(19) United States
(12) Patent Application Publication
(10) Pub. No.: US 2023/0127948 A1
(43) Pub. Date: Apr. 27, 2023

(54) FIELD DEPLOYABLE CRISPR-CAS DIAGNOSTICS AND METHODS OF USE THEREOF

(71) Applicants: THE BROAD INSTITUTE, INC., Cambridge, MA (US); MASSACHUSETTS INSTITUTE OF TECHNOLOGY, Cambridge, MA (US)

(72) Inventors: Jonathan Gootenberg, Cambridge, MA (US); Omar Abudayyeh, Cambridge, MA (US); Julia Joung, Cambridge, MA (US); Alim Ladha, Cambridge, MA (US); Han Altae-Tran, Cambridge, MA (US); Guilhem Faure, Cambridge, MA (US); Feng Zhang, Cambridge, MA (US)

(21) Appl. No.: 17/798,248

(22) PCT Filed: Feb. 12, 2021
(86) PCT No.: PCT/US2021/017985

§ 371 Date: Aug. 8, 2022

Related U.S. Application Data
(60) Provisional application No. 62/975,743, filed on Feb. 12, 2020.
(60) Provisional application No. 62/993,494, filed on Mar. 23, 2020.
(60) Provisional application No. 63/018,487, filed on Apr. 30, 2020.
(60) Provisional application No. 63/019,406, filed on May 3, 2020.
(60) Provisional application No. 63/032,470, filed on May 29, 2020.
(60) Provisional application No. 63/044,218, filed on Jun. 25, 2020.
(60) Provisional application No. 63/051,248, filed on Jul. 13, 2020.
(60) Provisional application No. 63/075,684, filed on Sep. 8, 2020.

(51) Int. Cl. C12Q 1/6844; C12N 9/22; C12Q 1/70

(52) U.S. Cl. CPC C12Q 1/6844; C12N 9/22; C12Q 1/701

(57) ABSTRACT

Systems and methods for rapid diagnostics related to the use of CRISPR effector systems and optimized guide sequences for detection of coronavirus, including multiplex lateral flow diagnostic devices and methods of use, are provided.

### CROSS REFERENCE TO RELATED APPLICATIONS

[0001] This application claims the benefit of U.S. Provisional Application Nos. 62/975,743 filed Feb. 12, 2020, 62/993,494 filed Mar. 23, 2020, 63/018,487 filed Apr. 30, 2020, 63/019,406 filed May 3, 2020, 63/032,470 filed May 29, 2020, 63/044,218 filed Jun. 25, 2020, 63/051,248 filed Jul. 13, 2020, and 63/075,684 filed Sep. 8, 2020. The entire contents of the above-identified applications are hereby fully incorporated herein by reference.

### STATEMENT REGARDING FEDERALLY SPONSORED RESEARCH

[0002] This invention was made with government support under grant nos. HL141201 and MH110049 awarded by National Institutes of Health. The government has certain rights in the invention.

### REFERENCE TO AN ELECTRONIC SEQUENCE LISTING

[0003] The contents of the electronic sequence listing (“BROD-5090WP_ST25.txt”; Size is 13,564,627 bytes and it was created on Feb. 10, 2021) is herein incorporated by reference in its entirety.

### TECHNICAL FIELD

[0004] The subject matter disclosed herein is generally directed to rapid single-reaction coronavirus diagnostics including the use of CRISPR effector systems and thermostable CRISPR Cas proteins.

### BACKGROUND

[0005] Nucleic acids are a universal signature of biological information. The ability to rapidly detect nucleic acids with high sensitivity and single-base specificity on a portable platform has the potential to revolutionize diagnosis and monitoring for many diseases, provide valuable epidemiological information, and serve as a generalizable scientific tool. Although many methods have been developed for detecting nucleic acids (Du et al., 2017; Green et al., 2014; Kumar et al., 2014; Pardee et al., 2014; Pardee et al., 2016; Urdea et al., 2006), they inevitably suffer from trade-offs among sensitivity, specificity, simplicity, and speed.

[0006] Sensitive and rapid detection of nucleic acids is important for clinical diagnostics and biotechnological applications. Particularly when responding to outbreaks, such as the novel coronavirus, which has been referred to as 2019-nCoV and SARS-CoV-2, which causes COVID 2019, time is of the essence. Sabeti, Early Detection Is Key to Combating the Spread of Coronavirus, Time (Feb. 6, 2020). The 2019-nCoV has killed hundreds in a 2-month time span, and response to the escalating outbreak, particularly where there are indications that both symptomatic and asymptomatic patients with 2019-nCov may transmit the disease. Wang, et al., A precision medicine approach to managing Wuhan Coronavirus pneumonia, Prec. Clin. Med, doi:10.1093/pcmedi/pbaa002. Current coronavirus testing kits sent to states and other countries do not work properly, according to the U.S. Centers for Disease Control and Prevention. Grady, “Coronavirus Test Kits Sent to States, 30 Countries Are Flawed, C.D.C. Says,” New York Times, Feb. 12, 2020. Moreover the test being used provides results in four hours from initial sample processing to results. cdc.gov/media/releases/2020/p0206-coronavirus-diagnostic-test-kits. Highly accurate test results at better processing speds, particularly that are field-depoloyable would aid in addressing the outbreak. Currently, the novel coronavirus SARS-CoV-2 has resulted in an international public health emergency, spreading to over 180 countries and infecting more than 300,000 individuals. Testing for the presence of the virus is of utmost importance to both reduce the basic reproductive rate of the virus (R0) and inform best clinical practices for affected patients. However, understanding the full extent of the virus outbreak has remained challenging due to bottlenecks in the diagnosis of infection.

[0007] Previously, Applicants developed a platform for nucleic acid detection using CRISPR enzymes called SHERLOCK (Specific High Sensitivity Enzymatic Reporter unLOCKing)(Gootenberg, 2018; Gootenberg, 2017), which combines pre-amplification with the RNA-guided RNase CRISPR-Cas13 (Abudayyeh, 2016; East-Seletsky, 2016; Shmakov, 2015; Smargon, 201; Shmakov, 2017) and DNase CRISPR-Cas12 (Zetsche, 2015 599; Chen, 2018) for sensing of nucleic acids via fluorescence or portable lateral flow.

### SUMMARY

[0008] In certain example embodiments, a single reaction composition for detecting the presence of a target polynucleotide in a sample is provided, comprising: an extraction-free polynucleotide isolation solution; one or more thermostable Cas proteins possessing collateral activity; at least one guide polynucleotide comprising a sequence capable of binding a target polynucleotide and designed to form a complex with the one or more Cas proteins; isothermal amplification reagents; and a detection construct comprising a polynucleotide component, wherein the Cas protein exhibits collateral nuclease activity and cleaves the polynucleotide component of the detection construct once activated by the target sequence.

[0009] The compositions may further comprise amplification reagents for amplification of the coronavirus target sequence. In an aspect the amplification reagents are LAMP reagents. In an aspect, the isothermal amplification reagents comprise optimized LAMP primers and amplification reagents. In an aspect, the optimized LAMP primers are selected from SEQ ID NOs. 1-40,499, and 61,983-61,988. In certain embodiments, the guide polynucleotide is selected from SEQ ID NOs: 40,500-61,643 and SEQ ID NO: 61,989. In an aspect, the guide polynucleotides are optimized guide polynucleotides.

[0010] In certain embodiments, the guide polynucleotide comprises a spacer specific for the N gene or S gene of SARS-CoV-2. The compositions may further comprise one or more additives to increase reaction specificity or kinetics, and/or polynucleotide binding beads.

[0011] In certain example embodiments, compositions for detecting the presence of a target polynucleotide in a sample, comprising isothermal amplification reagents for amplifying the target polynucleotide, and an extraction-free solution for isolating polynucleotides from a cell or virus particle. The isothermal amplification reagents may comprise LAMP reagents comprising F3, B3, FIP, BIP, Loop Forward and Loop Reverse primers. In an aspect, the LAMP reagents may further comprise oligonucleotide strand displacement (OSD) probes.

[0012] In certain example embodiments, a system for the detection of coronavirus is provided. A system for detecting the presence of a coronavirus in a sample, comprising: a Cas protein; at least one guide polynucleotides comprising a guide sequence capable of binding a coronoavirus target sequence and designed to form a complex with the Cas protein; and a detection construct comprising a polynucleotide component, wherein the Cas protein exhibits collateral RNase activity and cleaves the polynucleotide component of the detection construct once activate by the target sequence. In embodiments, the coronavirus is SARS-CoV-2. In an aspect, the at least one guide polynucleotide is a highly active guide polynucleotide. The guide polynucleotide of the system can, an embodiment, bind to a coronavirus sequence encoding a polypeptide that is immunostimulatory to a host immune system, and/or binds to at least one target sequence that is a unique coronavirus genomic sequence.

[0013] The systems and methods may utilize one or more Cas proteins. In embodiments, the Cas proteins are a Type V or Type VI Cas protein, and may be Cas 12 proteins, Cas13 proteins, or a combination thereof. In an aspect, the one or more Cas proteins comprise a thermostable protein. In example embodiment the Cas protein is a Cas13, which may be a thermostable Cas13 or Leptotrichia wadei Cas13. In an aspect, the one or more Cas proteins comprise a Cas12, which may be a thermostable Cas12b, for example Alicyclobacilluys acidiphilus Cas12b or Brevibacillus sp. SYSU G02855 (Br) Cas12b. In an aspect, the guide polynucleotide comprises a guide derived from Alicyclobacillus acidoterrestris. In an aspect, the Alicyclobacillus acidoterrestris sequence selected from Aac guide types 1 to 5 (SEQ ID NOs: 62006 to 62010). In an embodiment, the Cas12b protein is Brevibacillus sp. SYSU G02855 and the guide sequence comprises crRNA design 1 to 3 (SEQ ID NO:62003-62005).

[0014] The systems may further comprise amplification reagents for amplification of the coronavirus target sequence. In an aspect the amplification reagents are LAMP reagents.

[0015] Methods for detecting a target nucleic acid in a sample are also provided, comprising distributing a sample or set of samples into individual discrete volumes, each individual discrete volume comprising a composition as disclosed herein, incubating the sample or set of samples at conditions sufficient to allow lysis of a cell or virus via reagents of the extraction-free polynucleotide isolation solution; amplifying the target polynucleotides using isothermal amplification, wherein isolation of target polynucleotides between the incubating and amplifying steps is not required; an detecting amplified target polynucleotides by binding of the CRISPR-Cas complex to the target polynucleotides, wherein binding of the target polynucleotides activates cleavage of the detection construct thereby generating a detectable signal.

[0016] A lateral flow device comprising a substrate comprising a first end and a second end, are also provided, the first end comprising a sample loading portion, a first region comprising a detectable ligand, two or more systems of the claims provided herein, and one or more first capture regions, each comprising a first binding agent; the substrate comprising two or more second capture regions between the first region of the first end and the second end, each second capture region comprising a different binding agent. In an aspect, the first end comprises two detection constructs, wherein each of the two detection constructs comprises an RNA or DNA oligonucleotide, comprising a first molecule on a first end and a second molecule on a second end. In an aspect, the first end comprises three detection constructs, wherein each of the three detection constructs comprises an RNA or DNA oligonucleotide, comprising a first molecule on a first end and a second molecule on a second end. The lateral flow device may comprise a polynucleotide encoding a Cas13 and/or Cas12 and the one or more guide RNAs are provided as a multiplexing polynucleotide, the multiplexing polynucleotide configured to comprise two or more guide sequences.

[0017] Methods for detecting a target nucleic acid in a sample are also provided, comprising contacting a sample with the first end of the lateral flow device comprising the sample loading portion, wherein the sample flows from the sample loading portion of the substrate towards the first and second capture regions and generates a detectable signal. Methods may utilize a lateral flow device capable of detecting two different target nucleic acid sequences. In an aspect, the target nucleic acid sequences are absent from the sample, a detectable signal is generated at each capture region, the detectable signal appears at the first and second capture regions. The lateral flow device can be designed such that when the target nucleic acid sequences are absent from the sample, a detectable signal is generated at each capture region, and wherein when the sample contains one or more target nucleic acid sequences, a detectable signal is absent at the capture region for the corresponding target nucleic acid sequence.

[0018] Methods for detection may also comprise detecting coronavirus in a sample by contacting the sample with the systems disclosed herein. The step of contacting the sample with the system can comprise amplifying the one or more target sequences in the sample and incubating the sample under conditions sufficient to allow binding of the guide polynucleotides to one or more target molecules; activating the Cas protein via binding of the guide polynucleotides to one or more target sequencess, wherein activating the Cas protein results in modification of the detection construct such that a detectable signal is generated.

[0019] The step of contacting the sample with the system can further comprise incubating the sample at about 55° C. to about 65° C., about 59° C. to 61° C. or about 60° C. for 50 to 70 minutes and detecting the presence of a positive signal. The steps of extracting, amplifying incubating, activating and detecting are all performed in the same individual discrete volume.

[0020] Methods of detection can further comprise the step of treating the sample with a DNA extraction solution prior to contacting the sample with the systems disclosed herein.

[0021] In an aspect, the DNA extraction solution is mixed with a sample at a concetration of about 1:2 to 2:1 sample:extraction solution. In an aspect, the method may further comprise incubating the sample and the DNA extraction solution, which may be performed at a temperature of about 20° C. to 60° C. for about 60 minutes, or 95° C. for about 5 to 10 minutes. Extraction may also comprise the addition of beads capable of concentrating targets of interest of the sample, in an aspect, the beads are magnetic.

[0022] A cartridge for detection assays in accordance with methods disclosed herein is provided comprising a sample receiver, at least a first, second, and third ampoule, and at least a first and second chamber, and a lateral flow strip, wherein the first ampoule is communicatively coupled to the first chamber comprising a heat source, the first chamber is communicatively coupled to the second ampoule, the second ampoule communicatively coupled to the second chamber, the third ampoule communicatively coupled to the lateral flow strip.

[0023] A cartridge can be provided comprising at least a first and second ampoule, a lysis chamber, an amplification chamber and a sample receiving chamber, the first ampoule fluidically connected to the sample receiving chamber, the sample receiving chamber further connected to the lysis chamber, the lysis chamber connected via a metering channel to the second ampoule and the amplification chamber. In certain embodiments, the first ampoule comprises an extraction-free polynucleotide isolation solution and the second ampoule comprise isothermal amplification reagents amplifying a target polynucleotide or isothermal amplification reagents and a CRISPR-Cas collateral detection system for amplifying and detecting a target polynucleotide. In an aspect, wherein the extraction-fee polynucleotide isolation solution and/or the lysis well comprises polynucleotide binding bead.

[0024] The cartridge may be configured to fit in a system comprising a heating means, an optic means, a means for releasing reagents on the cartridge, and a means for readout of assay result. The cartridge can comprise a first ampoule that comprises lysis buffer, and/or the second ampoule that comprises a CRISPR system, the CRISPR-Cas system comprising one or more Cas proteins and at least one guide polynucleotide.

[0025] The cartridge may further comprise amplification reagents. The amplification reagents comprise LAMP F3, B3, FIP, BIP, Loop Forward and Loop Reverse primers.

[0026] The cartridge can comprise a CRISPR system that includes a guide RNA designed to bind to a target nucleic acid that are diagnostic for a disease state. The disease state can be an infection, which may be caused by a microbe, the microbe selected from a virus, bacterium, a fungus, a protozoa, or a parasite. The guide RNA may be specific for a microbe that is viral, bacterial, or fungal.

[0027] The cartridge can further comprise a detection construct comprising a polynucleotide component, which may be fluorescent. In an aspect, the cartridge comprises a CRISPR system that is lyophilized. In an aspect, the Cas protein of the CRISPR system is a Type V or Type VI Cas protein. In an aspect, the Cas protein is a Cas12 or Cas13 protein. The cartridge cancomprise a thermostable protein, for example, the thermostable Cas protein is Alicyclobacillus acidiphilus Cas12b (Aap). In an aspect, the guide comprises a sequence derived from Alicyclobacillus acidoterrestris (Aac). The cartridge can comprise a lysis buffer that comprises a DNA extraction buffer.

[0028] A device designed to receive the one or more cartridges as disclosed herein is provided, which may further comprise a one or more motors connected to a plunger for rupturing of the first and second ampoule of the cartridge and configured within the device to align with the first and second ampule of the inserted cartridge, a heating element configured to align with the amplification chamber of the inserted cartridge, an optical detector configured to align with the amplification chamber of the inserted cartridge, and a display. The device may comprise a graphical user interface for programming the device and/or readout of the results of the assay. A system comprising a docking station and two or more devices as disclosed herein is provided, wherein the docking station is configured to receive the two or more devices.

[0029] A system designed to receive the detection cartridge as disclosed herein is provided, the system designed to receive the cartridge and conduct an assay comprising isothermal amplification of nucleic acids and detection of target nucleic acids on the cartridge. In embodiments, the system can comprise one or more heating means for extraction, amplification and/or detection, a means for releasing reagents for extraction, amplification, and/or detection, a means for mixing reagents for extraction, amplification, and/or detection, and/or a means for reading the results of the assay. In an aspect, the means of reading the results of the assay is an optic means. The system can further comprise a user interface for programming the device and/or readout of the results of the assay.

[0030] These and other aspects, objects, features, and advantages of the example embodiments will become apparent to those having ordinary skill in the art upon consideration of the following detailed description of illustrated example embodiments.

### BRIEF DESCRIPTION OF THE DRAWINGS

[0031] An understanding of the features and advantages of the present invention will be obtained by reference to the following detailed description that sets forth illustrative embodiments, in which the principles of the invention may be utilized, and the accompanying drawings of which:

[0032] FIG. 1—includes lateral flow assay detection for three n2019-CoV targets, left, middle and right groups. Testing for each target shown with decreasing concentrations from left to right, with far right at 0 concentration S protein (left), middle, synthetic S (synthego) and right (Orflab).

[0033] FIG. 2A-2B— (A) Detection of synthetic COVID-19 sequences using a two-step SHERLOCK reaction (25 min RPA), in accordance with certain example embodiments. (B) Detection of synthetic COVID-19 sequence using a two-step example embodiment reaction (25 min RPA followed by 30 min Cas13 reaction) with lateral flow strip readout, in accordance with certain example embodiments.

[0034] FIG. 3A-3B.— (A) Quick Extract at a final concentration of 5% did not negatively affect the RT-qPCR reaction. (B) RNA samples prepared using Quick Extract according to exemplary embodiment supported similarly sensitive detection of coronavirus as QIAmp Viral RNA Miniprep.

[0035] FIG. 4—Schematic for developing a one pot RT-LAMP Cas12b SHERLOCK reaction, in accordance with certain example embodiments.

[0036] FIG. 5—provides results obtained for assessing limit of detection by lateral flow assay at 60° C. for 60 minutes, in accordance with certain example embodiments. The limit of detection was 100 molecules per reaction.

[0037] FIG. 6— Graph shows quantification of lateral flow assay from FIG. 5. The bar graph represents quantification of top band intensity/bottom band intensity.

[0038] FIG. 7— Shows that certain example embodiments can reliably perform at 2× the limit of detection.

[0039] FIG. 8— Graph showing that certain example embodiments can reliably perform at 2× the limit of detection. The graph represents quantification of top band intensity/bottom band intensity of lateral flow assays from FIG. 7.

[0040] FIG. 9— Shows that certain example embodiments of the assay have no cross-reactivity with SARS-CoV or MERS-CoV.

[0041] FIG. 10— Shows that a 50 minute incubation is sufficient to reach reaction saturation at 2× limit of detection, in accordance with certain example embodiments.

[0042] FIG. 11— Shows that an example embodiment is robust across a 10° C. window.

[0043] FIG. 12— Shows that an example embodiment can be master mixed and freeze-thawed for six freeze-thaw cycles or more.

[0044] FIG. 13— Shows positive detection of COVID in 12 patients, in accordance with certain example embodiments.

[0045] FIG. 14— The certain example embodiments of the assay can be run for less than $40 using conventional heating devices such as a sous vide heater

[0046] FIG. 15— Shows results obtained using an example embodiment of the assay on 9 different patients using a nasopharyngeal swab sample. The results were compared to qPCR tests.

[0047] FIG. 16— A schematic of an example embodiment of the diagnostic assay.

[0048] FIG. 17— Shows the different additives that may be used to optimize assay sensitivities and/or kinetics, in accordance with certain example embodiments.

[0049] FIG. 18— Shows that a limit of detection of 100 molecules per reaction is reached with certain example embodiments.

[0050] FIG. 19— Shows a comparison of positive tests to results obtained from qRT-PCR assays.

[0051] FIG. 20— Illustrates a low cost assay setup using a sous vide cooker, in accordance with certain example embodiments.

[0052] FIG. 21— Shows a point-of-care device that is compatible with certain example embodiments.

[0053] FIG. 22— Demonstrates that LAMP primers, in accordance with certain example embodiments, are active at lower temperatures.

[0054] FIG. 23— Demonstrates an example embodiment combining Alicyclobacillus acidoterrestris Cas12b (AacCas12b) with LAMP at 55° C. enables one-pot COVID-19 detection. Input comprised RNA genome of COVID-19 broken into 5 kb fragments.

[0055] FIG. 24— Demonstrates an example embodiment using multiple primer-sets and guide combinations targeting different COVID-19 genes. 200 aM detection limit was achieve by 150 minutes. Input comprised RNA genome of COVID-19 broken into 5 kb fragments.

[0056] FIG. 25A-25F— Development of a point-of-care (POC) example embodiment using RT-LAMP and thermophilic AapCas12b. (25A) Comparison of the example POC embodiment N gene LAMP primer set to two established LAMP primer sets measured by real-time fluorescence at varying levels of SARS-CoV-2 standard genomes. (25B) Temperature comparison of AapCas12b collateral activity activated by RT-LAMP amplified inputs, including 20 fM SARS-CoV-2 standards and NTC controls. (25C) AapCas12b collateral activity when incubated with AapCas12b or AacCas12b crRNAs and RT-LAMP amplified 20 fM SARS-CoV-2 standards or NTC. (25D) AapCas12b collateral activity measured using different guides for RT-LAMP amplified 20 fM SARS-CoV-2 standards or NTC. (25E) Example POC embodiment (One-pot Cas12b and RT-LAMP) results when using AapCas12b or AacCas12b and varying amounts of SARS-CoV-2 inputs or NTC. (25F) Example POC embodiment real-time fluorescence performance measured with glycine or taurine additives at 2 fM SARS-CoV-2 input or NTC.

[0057] FIG. 26A-26D— provides performance metrics of an example embodiment on lateral flow strips. (26A) Effect of reaction temperature on example POC embodiment lateral flow detection for 200 SARS-CoV-2 copies per reaction and NTC. (26B) Effect of reaction incubation time on exemplary embodiment lateral flow detection for 100 SARS-CoV-2 copies per reaction and NTC. (26C) Effect of master mix freeze-thaw cycles on example POC embodiment lateral flow detection for 200 SARS-CoV-2 copies per reaction and NTC. (26D) Measurement of cross-reactivity for COVID-19 example POC embodiment lateral flow test for SARS and MERS N genes compared to NTC. All inputs were at 1,000 copies per reaction.

[0058] FIG. 27—provides COVID-19 detection results for patient samples tested in FIG. 19 according to an exemplary POC embodiment. The results yield a sensitivity of 97% and specificity of 100%.

[0059] FIG. 28A-28B— COVID-19 example POC embodiment detection with SARS-CoV-2 positive patient nasopharyngeal swabs. (28A) COVID-19 detection of 12 different SARS-CoV-2 positive patient nasopharyngeal swabs with three replicates for each sample according to example POC embodiment. Prior to the exemplary embodiment assay, nasopharyngeal swabs were lysed using QE for 5 minutes at 22° C. Listed below are Ct values determined by RT-PCR using the CDC N1 and N2 assays. (28B) Example POC embodiment COVID-19 detection of 12 different SARS-CoV-2 positive patient nasopharyngeal swabs with three replicates for each sample. Prior to conducting assay according to example POC embodiment, nasopharyngeal swabs were lysed using QE for 5 minutes at 60° C. Listed below are Ct values determined by RT-PCR using the CDC N1 and N2 assays.

[0060] FIG. 29—Comparison of different lysis temperatures for SARS-CoV-2 positive patient nasopharyngeal swab extraction as measured by Ct values from RT-PCR using the CDC N1 and N2 assays. For patients 9 and 10, due to the low volume of samples provided, samples tested with 22° C. and 60° C. lysis conditions were diluted 1:2 prior to example POC embodiment assay and RT-qPCR.

[0061] FIG. 30A-30B—shows the top view (30A) and side view (30B) of an exemplary cartridge (10) according to the invention.

[0062] FIG. 31A-31C—device according to an exemplary embodiment. (31A) provides an exemplary front loading device, upper left shows a friction hinged door with magnetic latch to prevent unwanted objects and dirt from entering the cartridge slot, upper right, device showing use of LED lights to display operating states, positive and negative results; lower image depicts rear of device with USB-C port located in a recess; (31B) shows three views of a quad-dock for a front loading device, showing USB port located at the back of each cavity; (31C) shows stacking docs for 8 devices, on the left, a side profile, center front view, and rights, low profile feet on the botto of the dock.

[0063] FIG. 32—shows alternate front-loading device with screen, left with front hinge open; right, with front hinge closed with alternate screen and simple user interface with running, positive, negative results r other display information

[0064] FIG. 33—depicts front loading internal details, tope view (left) shows geared otor, optics and USB-C port; profile view (right) shows cartridge detection sensor, cam wheel, main PCBA, heater and plunger.

[0065] FIG. 34A-34C— depicts exemplary embodiments of the device. (34A) shows top loading device detains, friction hinged lid with magnetic latch to access cartridge slot (upper left), USB-C port in recess on the bottom of each device (lower left), front view of a top loading details (right) shows status display LED strip; (34B) top loading device quad-dock, USB port located in each cavity (left), quad dock with four top loading devices in closed lid orientation (upper right), quad dock with four top loading devices with one device in open lid orientation (lower right); (34C) top loading device octo-dock, rear view showing single rear power inlet (upper left), All 8 devices in octo-dock in open orientation (upper right), USB-C port located in each device cavity (lower left), and status display LED strip on octo dock with 8 devices in closed orientation (lower right).

[0066] FIG. 35A-35B—Expanded patient cohort testing from an example embodiment showing results of patient nasopharyngeal swab samples (35A) with calculated predictive values, sensitivity and specificity (35B)

[0067] FIG. 36—Concentration with magnetic beads according to an example embodiment. Upper panel shows old workflow, lower panel with homebrew beads

[0068] FIG. 37A-37C—Simplifying bead purification for POC application shows no mixing is required after addition of Master Mix according to certain exemplary embodiments Free Beads (37A), beads on magnet (Elution only)(37B), beads on magnet (binding and elution)(37C).

[0069] FIG. 38A-38B—Simplifying Bead purification for POC application shows removing the wash step requires significant reduction in salt concentration in the reaction buffer. (38A) NaCl beads; (38B) KCl beads.

[0070] FIG. 39— An example workflow demonstrating increased sensitivity while minimizing complexity.

[0071] FIG. 40— Shows data from an example embodiment demonstrating limit of detection (LOD) of 100 genomes per reaction from saliva or nasopharyngeal swabs

[0072] FIG. 41— Shows results of 12 replicates (right) using sous-vide waterbath (left) for reaction conducted according to certain example embodiments.

[0073] FIG. 42A-42B— Shows data from an example embodiment demonstrating an ability to achieve 97% sensitivity and 100% specificity on patient nasopharyngeal swab samples

[0074] FIG. 43— Shows CRISPR detection may improve upon LAMP by increased specificity.

[0075] FIG. 44— Provides data showing an ability to detect target in 20 to 30 minutes in accordance with certain example embodiments.

[0076] FIG. 45— Shows secondary structure of guide of Alicyclobacillus acidoterrestris (Aac) that is used with Alicyclobacillus acidiphilus (Aap) Cas12b in exemplary CRISPR Systems.

[0077] FIG. 46—shows BrCas12b is active with mature crRNA and described tracrRNA 1-3, detailed herein and in accordance with certain example embodiments.

[0078] FIG. 47—shows BrCas12b works well in the 60-70° C. temperature range in accordance with certain example embodiments.

[0079] FIG. 48—shows BrCas12b is more stable than AapCas12b at 60° C. when used in accordance with certain example embodiments.

[0080] FIG. 49—shows BrCas12b can achieve rapid detection is less than 20 minutes down to 200 aM for multiple LAMP primer sets in accordance with certain example embodiments.

[0081] FIG. 50—shows WCV329 reporter choice with BrCas12b.

[0082] FIG. 51—shows exemplary use of oligonucleotide strand displacement (OSD) probe and LAMP amplification at 21 minutes, with varied copies per reaction

[0083] FIG. 52—shows optimization of OSD probe concentration for COVID detection with LAMP reagents in accordance with certain example embodiments.

[0084] FIG. 53A-53C—workflow and performance evaluation in accordance with certain example embodiments. A nasopharyngeal (NP) or anterior nasal swab is dipped in 400 extraction buffer containing lysis buffer and magnetic beads. After 10 mins at room temperature, the sample is placed on a magnet and extraction buffer is aspirated. 50 μL of an exemplary embodiments reaction is added to the beads, and the sample is heated to 60° C. For lateral flow readout, after 80 mins, detection strips are dipped into the reaction. For fluorescence readout, after 45 mins, the reaction can be interpreted using a fluorescence reader. (53B) Results for assay conducted in accordance with certain example embodiment of 202 SARS-CoV-2 positive manufactured patient NP swab samples detected by fluorescence readout. A swab with 50 μL of viral transport medium was dipped into the extraction buffer. Ct values were determined using standard RT-qPCR workflows. Red dashed line indicates threshold for classifying samples. Endpoint fluorescence at 45 mins are shown. (53C) Same as (53B), for 200 SARS-CoV-2 negative manufactured patient NP swab samples. Samples are sorted by endpoint fluorescence.

[0085] FIG. 54A-54E—provides exemplary sample extraction using DNA QuickExtract and top LAMP primer sets targeting SARS-CoV-2. (54A) Effects of different lysis buffers on RT-qPCR. Different amounts of SARS-CoV-2 genomic standards were spiked into lysis buffers and used as input for the CDC N1 RT-qPCR assay. (54B) Comparison of lysis buffers for extracting lentiviral RNA measured by RT-qPCR targeting the RFP RNA. (54C) Comparison of lysis buffers to the standard QIAmp Viral RNA Miniprep extraction on SARS-CoV-2 RNA positive patient nasopharyngeal (NP) swab viral transport media (VTM). The 0.1% SDS condition did not produce any detectable Ct values. ND, not detected. (54D) Schematic of reverse transcription followed by Loop-mediated Isothermal Amplification (RT-LAMP) and CRISPR-mediated detection. Viral RNA is reverse transcribed and amplified using RT-LAMP. Cas12b detection of the LAMP product triggers collateral cleavage of a reporter to produce signal for detection. (54E) Comparison of LAMP primer sets targeting different regions of the SARS-CoV-2 genome to two established LAMP primer sets measured by real-time fluorescence across a range of concentrations of SARS-CoV-2 RNA amplicons at 65° C. NTC, no template control.

[0086] FIG. 55A-55E—Optimization of Aap sgRNAs targeting SARS-CoV-2 LAMP amplicons for one-pot reactions. (55A) Temperature dependence of AapCas12b collateral activity when incubated with RT-LAMP amplified SARS-CoV-2 genomic standards. Collateral activity was measured as end point fluorescence after incubation. (55B) Comparison of AapCas12b collateral activity with either a previously published AmCas12b sgRNA scaffold or an AacCas12b-based scaffold when incubated with RT-LAMP amplified SARS-CoV-2 genomic standards. (55C) Comparison of 3′ end of Aap and Aac Cas12b sgRNA scaffolds. Color indicates base-pairing probability determined by RNAfold. (55D) Collateral activity of AapCas12b using different guides (Table 16) when incubated with RT-LAMP amplified SARS-CoV-2 genomic standards or no template control, NTC. Assay was performed at 60° C. and collateral activity was measured by fluorescence after 5 and 15 mins. (55E) Comparison of the best Cas12b sgRNA targeting each of the 4 top LAMP sets at different Magnesium concentrations in the reaction. Different amounts of SARS-CoV-2 genomic standards spiked into NP swab were used as input. NTC, no template control.

[0087] FIG. 56A-56B—Optimization of exemplary embodiment with additive reagents. (56A) Titration of Glycine and Taurine additive concentrations for effects on performance of detection according to a certain exemplary embodiment assay of varying amounts of SARS-CoV-2 genomic standards spiked into NP swab. (56B) Comparison of fluorescence signal generated by LAMP alone (left), LAMP in an exemplary embodiment (middle), and AapCas12b in exemplary embodiment (right) for varying amounts of SARS-CoV-2 genomic standards. LAMP signal was measured using SYTO9 nucleic acid stain and AapCas12b signal was measured using collateral cleavage of a HEX reporter. NTC, no template control.

[0088] FIG. 57A-57B—Performance of exemplary embodiment with lateral flow readout. (57A) Determination of the sensitivity for exemplary embodiment with lateral flow readout at 60 minutes using three replicates per condition. Different amounts of SARS-CoV-2 genomic standards spiked into saliva (top) or nasopharyngeal (NP) swab (middle) were lysed by adding an equal volume of DNA QuickExtract and heating for 5 mins at 95° C. At 200 genome copies per reaction in NP swab, the example embodiment yielded positive results for all 30 replicates (bottom). (57B) Quantitation of the band intensity ratio (top band/bottom band) for the NP swab sensitivity (left) and reproducibility (right) from 56A panel. ***, P<0.001. Red dashed line indicates threshold for classification.

[0089] FIG. 58—Multiplexing internal control LAMP primer sets in an exemplary embodiment. Comparison of LAMP primer sets targeting ACTB and GAPDH genes to control for sample extraction and isothermal amplification on different amounts of SARS-CoV-2 genomic standards spiked into saliva or water control. Control primer sets were mixed with an exemplary embodiment LAMP primer set targeting the N gene at 50% or 20% of the total primer concentration. LAMP signal was detected using the SYTO9 nucleic acid stain and Cas12b signal was detected via collateral cleavage of a HEX reporter probe. Values indicate time to reach the half maximum fluorescence for each reaction.

[0090] FIG. 59A-59H— Performance of exemplary multiplexed embodiment fluorescence readout. LAMP primer sets targeting ACTB or the SARS-CoV-2 gene N were pooled at 20% and 80% of the total primer concentration respectively. LAMP signal was detected using the SYTO9 nucleic acid stain and Cas12b signal was detected via collateral cleavage of a HEX reporter probe. Endpoint normalized fluorescence signal was determined at 28 mins for LAMP and at 45 mins for Cas12b. (59A) Determination of the sensitivity for exemplary multiplexed embodiment with fluorescence readout using three replicates per condition. Different amounts of SARS-CoV-2 genomic standards spiked into nasopharyngeal (NP) swab was used for input. Values represent endpoint normalized fluorescence. (59B) Same as (59A) with values indicating time to reach the half maximum fluorescence. (59C) Determination of sensitivity for exemplary multiplexed embodiment using SARS-CoV-2 genomic standards spiked into saliva as input. Values represent endpoint fluorescence signals. (59D) Same as (59C) with values indicating time to reach the half maximum fluorescence. (59E) Reliability assessment of exemplary multiplexed embodiment using 30 replicates at 300 copies and 200 copies of SARS-CoV-2 genomic standards spiked into NP swab. (59F) Same as (59E) with values indicating time to reach the half maximum fluorescence. (59G) Effect of reaction temperature on exemplary multiplexed embodiment detection for 300 SARS-CoV-2 copies spiked into NP swab per reaction. Data represents three replicates per condition. (59H) Same as (59G) with values indicating time to reach the half maximum fluorescence.

[0091] FIG. 60A-60D—Evaluation of exemplary embodiment on SARS-CoV-2 patient nasopharyngeal swab samples. (60A) Quantification of the band intensity ratios of lateral flow results from panel (FIG. 35A). Red dashed line indicates threshold for classification. (60B) Table summarizing the example embodiment results on patient NP swab samples tested at Broad Institute. Results according to the example embodiment were considered positive if 2 out of 3 replicates were positive. (60C) Table summarizing example embodiment results on patient NP swab samples tested at the University of Washington Virology lab. (60D) Determination of the limit of detection using 5-fold serial dilutions of SARS-CoV-2 positive patient NP swab samples. Ct values represent the average of ORF lab and E gene assays from the Cobas 6800 RT-qPCR assay.

[0092] FIG. 61A-61D—Lysis temperature optimization and Ct distribution of SARS-CoV-2 patient nasopharyngeal swab samples according to certain exemplary embodiments. (61A) Results for 21 unique SARS-CoV-2 positive and 10 negative patient nasopharyngeal (NP) swab samples in triplicate detected by exemplary embodiment lateral flow readout. Prior to conducting exemplary embodiment, NP swab viral transport media (VTM) was lysed by adding an equal volume of DNA QuickExtract and heating for 10 mins at 60° C. (61B) Same as (61A) lysed for 10 mins at 22° C. (61C), Comparison of Ct values for the same set of samples lysed at 95° C., 60° C. and 22° C. from panels (61A) and (61B) and FIG. 35A. For patients 9 and 10, due to the low volume of samples available, samples lysed at 60° C. and 22° C. were diluted 1:2 prior to evaluation according to example embodiment and RT-qPCR. (61D) Scatterplot of 2,105 SARS-CoV-2 positive patient Ct values from the University of Washington Virology lab. Patient NP swab samples were tested using the cobas SARS-CoV-2 assay. The averages of ORF lab and E-gene Ct values are shown. For samples with undetected ORF lab or E-gene results, only the Ct value of the detected assay is shown.

[0093] FIG. 62A-62E—Optimization of an example embodiment by concentration sample input using magnetic bead concentration. (62A) Comparison of laboratory-developed and commercial (Beckman SPRIselect) magnetic bead formulations for sample concentration prior to conducting an example embodiment assay. Samples were eluted in water, an exemplary embodiment mastermix (MM), or exemplary embodiment mastermix retaining the magnetic beads. Values represent endpoint fluorescence signal at 45 mins. (62B) Determination of the sensitivity for purification with and without beads using fluorescence readout. Different amounts of SARS-CoV-2 genomic standards spiked into 200 μL of DNA QuickExtract with 1.25 μg of human RNA were used as the starting sample for both methods. (62C) Titration of different magnetic bead buffer components in exemplary embodiment reactions using 1,000 SARS-CoV-2 genomic standards spiked into 200 μL of DNA QuickExtract with 1.25 μg of human RNA. Fluorescence traces represent data from two biological replicates. (62D) Comparison of magnetic beads with either 1M NaCl (top) or KCl (bottom) in the buffer for sample concentration without ethanol wash prior to example embodiment assay. Exemplary embodiment reactions contained varying concentrations of KCl. Different amounts of SARS-CoV-2 genomic standards spiked into 200 μL of DNA QuickExtract with 1.25 μg of human RNA were used as the starting sample. (62E) Comparison of different lysis approaches according to an exemplary embodiment: buffer, amount of buffer, and temperature, either as a separate step or combined with magnetic bead binding. Mock SARS-CoV-2 virus (SARS-CoV-2 RNA targets in a noninfectious viral coat) were used to assess lysis efficacy. NTC, no template control. ND, not detected.

[0094] FIG. 63A-63E—Optimization of exemplary embodiment and limit of detection assessment. (63A) Titration of AapCas12b and sgRNA concentrations for effects on performance of exemplary embodiment. 500 copies of SARS-CoV-2 genomic standards were directly added to exemplary embodiment reactions without magnetic bead concentration. Two biological replicates were used for 500 copies and for 62 biological replicates were used for NTC (no template control) to evaluate sensitivity and specificity. Values represent endpoint fluorescence at 45 mins. (63B) Confirmation that lowering the AapCas12b and sgRNA concentrations to 31.3 nM does not affect the sensitivity of the exemplary embodiment. Different amounts of mock SARS-CoV-2 virus (SARS-CoV-2 RNA targets in a noninfectious viral coat) were added to extraction buffer containing lysis buffer and magnetic beads. Three biological replicates were used for 100, 250, or 500 copies and 87 biological replicates were used for 0 copies to evaluate sensitivity and specificity. Values represent endpoint fluorescence at 45 mins. (63C) Comparison of the limit of detection (LOD) for the standard CDC workflow (top) to an exemplary embodiment (middle and bottom). SARS-CoV-2 virus-like particles (SARS-CoV-2 RNA targets in a noninfectious viral coat) and 1.25 μg of human RNA were added to VTM or extraction buffer containing lysis buffer and magnetic beads. Exemplary embodiment fluorescence readout (middle) was evaluated using time for the fluorescence signal to reach the classification threshold (Example 10 Methods). Exemplary embodiment lateral flow readout (bottom) was quantified and interpreted using a mobile phone application with the red dashed line indicating the threshold for classification. ND, not detected. (63D), Dilution series using two SARS-CoV-2 RNA positive patient nasopharyngeal (NP) swab viral transport medium (VTM) to estimate sensitivity of the exemplary embodiment. A swab was used to transfer 50 μL of the sample into the extraction buffer. Ct values represent projected values for each 5-fold dilution in VTM. NTC, no template control. (63E) Estimation of sensitivity of exemplary embodiment by averaging the highest Ct values that were positive in all 3 replicates for each patient.

[0095] FIG. 64A-64E—Performance evaluation of exemplary embodiment using SARS-CoV-2 patient samples. (64A) exemplary embodiment results for 202 SARS-CoV-2 positive patient nasopharyngeal (NP) swab viral transport medium (VTM) samples detected by fluorescence readout. A swab with 50 μL of the sample was dipped into the extraction buffer. Ct values were determined using standard RT-qPCR workflows. Time to reach the fluorescence threshold in an example embodiment for 188 positive samples is shown. (64B-64C) exemplary embodiment results for SARS-CoV-2 negative patient anterior nasal (AN) swabs. Dry AN swabs with mock SARS-CoV-2 virus were dipped in extraction buffer. Data represents endpoint fluorescence (64B) or time to fluorescence threshold (64C). (64D-64E) exemplary embodiment results for 5 SARS-CoV-2 positive patient dry AN swabs. Data represents endpoint fluorescence (64D) or time to fluorescence threshold (64E). Ct values represent respective NP swab RT-qPCR results.

[0096] FIG. 65A-65B— Exemplary mobile phone application and equipment required for an example embodiment. (65A) Wireframe of mobile phone application for interpreting an exemplary embodiment lateral flow readout. Application starts with an exemplary embodiment workflow followed by camera capture of a lateral flow strip image and result interpretation. (65B) Equipment and consumables needed for running exemplary methods of detection according to an example embodiment.

[0097] The figures herein are for illustrative purposes only and are not necessarily drawn to scale.

### DETAILED DESCRIPTION OF THE EXAMPLE EMBODIMENTS

### General Definitions

[0098] Unless defined otherwise, technical and scientific terms used herein have the same meaning as commonly understood by one of ordinary skill in the art to which this disclosure pertains. Definitions of common terms and techniques in molecular biology may be found in Molecular Cloning: A Laboratory Manual, 2^{nd} edition (1989) (Sambrook, Fritsch, and Maniatis); Molecular Cloning: A Laboratory Manual, 4^{th} edition (2012) (Green and Sambrook); Current Protocols in Molecular Biology (1987) (F. M. Ausubel et al. eds.); the series Methods in Enzymology (Academic Press, Inc.): PCR 2: A Practical Approach (1995) (M. J. MacPherson, B. D. Hames, and G. R. Taylor eds.): Antibodies, A Laboratory Manual (1988) (Harlow and Lane, eds.): Antibodies A Laboraotry Manual, 2nd edition 2013 (E. A. Greenfield ed.); Animal Cell Culture (1987) (R. I. Freshney, ed.); Benjamin Lewin, Genes IX, published by Jones and Bartlet, 2008 (ISBN 0763752223); Kendrew et al. (eds.), The Encyclopedia of Molecular Biology, published by Blackwell Science Ltd., 1994 (ISBN 0632021829); Robert A. Meyers (ed.), Molecular Biology and Biotechnology: a Comprehensive Desk Reference, published by VCH Publishers, Inc., 1995 (ISBN 9780471185710); Singleton et al., Dictionary of Microbiology and Molecular Biology 2nd ed., J. Wiley & Sons (New York, N.Y. 1994), March, Advanced Organic Chemistry Reactions, Mechanisms and Structure 4th ed., John Wiley & Sons (New York, N.Y. 1992); and Marten H. Hofker and Jan van Deursen, Transgenic Mouse Methods and Protocols, 2nd edition (2011).

[0099] As used herein, the singular forms “a”, “an”, and “the” include both singular and plural referents unless the context clearly dictates otherwise.

[0100] The term “optional” or “optionally” means that the subsequent described event, circumstance or substituent may or may not occur, and that the description includes instances where the event or circumstance occurs and instances where it does not.

[0101] The recitation of numerical ranges by endpoints includes all numbers and fractions subsumed within the respective ranges, as well as the recited endpoints.

[0102] The terms “about” or “approximately” as used herein when referring to a measurable value such as a parameter, an amount, a temporal duration, and the like, are meant to encompass variations of and from the specified value, such as variations of +/−10% or less, +/−5% or less, +/−1% or less, and +/−0.1% or less of and from the specified value, insofar such variations are appropriate to perform in the disclosed invention. It is to be understood that the value to which the modifier “about” or “approximately” refers is itself also specifically, and preferably, disclosed.

[0103] As used herein, a “biological sample” may contain whole cells and/or live cells and/or cell debris. The biological sample may contain (or be derived from) a “bodily fluid”. The present invention encompasses embodiments wherein the bodily fluid is selected from amniotic fluid, aqueous humour, vitreous humour, bile, blood serum, breast milk, cerebrospinal fluid, cerumen (earwax), chyle, chyme, endolymph, perilymph, exudates, feces, female ejaculate, gastric acid, gastric juice, lymph, mucus (including nasal drainage and phlegm), pericardial fluid, peritoneal fluid, pleural fluid, pus, rheum, saliva, sebum (skin oil), semen, sputum, synovial fluid, sweat, tears, urine, vaginal secretion, vomit and mixtures of one or more thereof. Biological samples include cell cultures, bodily fluids, cell cultures from bodily fluids. Bodily fluids may be obtained from a mammal organism, for example by puncture, or other collecting or sampling procedures.

[0104] The terms “subject,” “individual,” and “patient” are used interchangeably herein to refer to a vertebrate, preferably a mammal, more preferably a human. Mammals include, but are not limited to, murines, simians, humans, farm animals, sport animals, and pets. Tissues, cells and their progeny of a biological entity obtained in vivo or cultured in vitro are also encompassed.

[0105] Various embodiments are described hereinafter. It should be noted that the specific embodiments are not intended as an exhaustive description or as a limitation to the broader aspects discussed herein. One aspect described in conjunction with a particular embodiment is not necessarily limited to that embodiment and can be practiced with any other embodiment(s). Reference throughout this specification to “one embodiment”, “an embodiment,” “an example embodiment,” means that a particular feature, structure or characteristic described in connection with the embodiment is included in at least one embodiment of the present invention. Thus, appearances of the phrases “in one embodiment,” “in an embodiment,” or “an example embodiment” in various places throughout this specification are not necessarily all referring to the same embodiment, but may. Furthermore, the particular features, structures or characteristics may be combined in any suitable manner, as would be apparent to a person skilled in the art from this disclosure, in one or more embodiments. Furthermore, while some embodiments described herein include some but not other features included in other embodiments, combinations of features of different embodiments are meant to be within the scope of the invention. For example, in the appended claims, any of the claimed embodiments can be used in any combination.

[0106] Reference is made to U.S. patent application Ser. No. 16/894,678 entitled Novel Type V CRISPR-Cas Systems and Use Thereof filed Jun. 5, 2020, Ser. No. 16/894,670 entitled CRISPR Effector System Based Coronavirus Diagnostics filed Jun. 5, 2020, and Ser. No. 16/894,664 entitled Rapid Diagnostics filed Jun. 5, 2020, each of which is incorporated by reference in their entirety.

[0107] All publications, published patent documents, and patent applications cited herein are hereby incorporated by reference to the same extent as though each individual publication, published patent document, or patent application was specifically and individually indicated as being incorporated by reference.

### OVERVIEW

[0108] Embodiments herein are directed to systems and methods of detecting the presence of a target nucleic acid in a sample. In certain example embodiments, the systems and methods provide for single reaction (one-pot) detection of target nucleic acids. In certain example embodiments, extraction, amplification, and detection may take place under a single set of reaction buffer and reagent conditions. In certain example embodiments, detection is achieved using isothermal amplification (e.g. LAMP) only. In other example embodiments, detection of nucleic acids can utilize Cas proteins to provide improved reaction sensitivity and/or specificity. In one embodiment, isothermal amplification may be utilized with a thermostable CRISPR-Cas protein, with the combination of thermostable protein and isothermal amplification utilized to further improve reaction conditions and times for detection and diagnostics. Advantageous quick extraction approaches for the extraction of nucleic acids from a sample are also provided. Design of reaction conditions and reagents are provided for the identification of primers and reaction conditions, including concentration and content of reagents and additives, that enhance the detection systems and methods disclosed herein. Advantageously, the systems and methods can be provided in lateral flow or self-contained cartridge devices for rapid, point-of-care diagnostics. In certain embodiments, the detection assay can be provided on a cartridge or chip. A device system can be configured to receive the cartridge and conduct an assay.

[0109] In certain example embodiments, the Cas protein may be a Type V CRISPR-Cas, a Type VI CRISPR-Cas, or combination thereof. In certain example embodiments, the Type V or Type VI Cas protein is a thermostable case protein with a nuclease activity above at least 50° C. In certain example embodiments, the Cas protein is a Cas12b protein. In certain other example embodiments, the Cas12b is Alicyclobacillus acidiphilus (AapCas12b). In certain other example embodiments, the Cas12b protein is Brevibacillus sp. SYSU G02855 (BrCas12b). In certain example embodiments, the Cas protein, may be paired with the novel guide designs disclosed herein.

[0110] Systems and method disclosed herein include approaches to detection isothermal amplification for detection of target nucleic acids. In certain example embodiments, isothermal amplification approach is loop-mediated isothermal amplification (LAMP). Design of optimal systems, including primers, reagents and additives to be used with isothermal amplification approaches are also provided. Optionally, CRISPR-Cas systems as disclosed herein can be used with isothermal amplification approaches, including LAMP, that can enhance sensitivity and/or specificity.

[0111] Methods of designing optimal reaction conditions are also provided. In an aspect, methods can comprise identifying the type of amplification reaction and designing optimal primers in accordance with the methods disclosed herein. Methods may also comprise identifying optimum CRISPR-Cas systems, including identification of the Cas protein for the reactions conditions. For example, the Cas protein may be identified based on its thermostability, cutting preferences, or other desired charateristics. Preferred guide molecules may similarly be identified. Once one or more primers and/or guides are identified, salt concentrations and other additives can be titrated and selected for further investigation. Additional reaction conditions, additives and reagents can be identified to optimize the use of one-pot methodology, lyophilization of reagents, and use in the devices disclosed herein. In certain example embodiments, preferred optimized additives include taurine, glycine or magnesium.

[0112] In certain example embodiments, the system comprises a Type VI CRISPR-Cas system, one or more guide polynucleotides comprising a guide sequence capable of binding a target sequence and designed to form a complex with the Type VI Cas protein, and a detection construct comprising a polynucleotide component. The Type VI Cas proteins of the present systems and methods exhibits collateral RNase activity, cleaving the polynucleotide component of the detection construct once activated by the target sequence, which can generate a detectable signal.

[0113] Embodiments disclosed herein provide systems utilized in multiplex lateral flow devices and methods of use. In certain preferred embodiments, the guides utilized are designed to be highly active guide molecules, allowing for rapid and highly sensitive detection of coronavirus. In certain example embodiments, the systems can utilize general capture of antibody that was not bound by intact reporter RNAs as described in Gootenberg, et al., Science 360, 439-444 (2018). In other embodiments, the presently disclosed system can be designed for detecting two or more targets. When utilized with a lateral flow approach, two or more separate detection lines consisting of deposited materials that capture detection construct and a molecule specific to the deposited material, allows visualization of detectable signal (e.g. gain or loss) at detection lines due to collateral activity and cleavage of corresponding reporter oligonucleotide. Utilizing guide design that allows for design of highly active guide RNAs for use with the specific Cas protein of the systems for target sequences, for example, coronavirus is also provided. In certain embodiments, the time from processing of a sample in the current methods and using the presently claimed systems, from receipt of sample to detectable signal is less than 120 minutes, 110 minutes, 100 minutes, 90 minutes, 75 minutes, 60 minutes, 45 minutes, or 30 minutes.

### Single Lysis Reaction Compositions

[0114] In certain aspects, embodiments disclosed herein are directed to compositions and kits that consolidate extraction-free lysis and amplification of target nucleic acids into a single reaction volume. In certain example embodiments, the extraction-free lysis reagents, e.g., extraction-free solution for isolating polynucleotides, can be used to extract nucleic acids from cells and/or viral particles. In contrast to existing protocols, the extraction-free lysis solution does not require isolation of the nucleic acid prior to further amplification. The extractaction-free lysis reagents may be mixed with amplification reagents such as standard RT-PCR amplification reactions. An example extraction-free lysis solution is described in Example 3.

[0115] In an embodiment, the extraction-free polynucleotide isolation solution, is referred to alternately as an extraction-free lysis reagent herein. In one embodiment, the extraction-free polynucleotide isolation solution is used for isolation of DNA or RNA without a separate extraction step. In an aspect, the polynucleotide isolation solution is a DNA extraction solution that is utilized for the extraction of RNA from a cell or virus particle.

[0116] In one embodiment, the extraction-free polynucleotide isolation solution is Quick Extract™ DNA Extraction Solution (QE09050), Lucigen, or QuickExtract Plant DNA Extraction Solution, Lucigen. In an embodiment, the solution allows for isolation of polynucleotides without the requirement of further extraction prior to further processing. In an aspect, the sample is diluted 2:1, 1:1 or 1:2 sample:DNA extraction solution. Advantageously, use of the QuickExtract DNA Extraction solution can be utilized for extraction of RNA. In one embodiment, the QuickExtract DNA Extraction solution can be utilized for extraction of viral RNA. In one embodiment, the QuickExtract DNA Extraction solution can be utilized for extraction-free isolation of SARS-CoV-2 with the compositions, systems and methods detailed herein in a one-pot solution.

[0117] In one embodiment, the extraction-free polynucleotide isolation solution is Plant Quick Extract solution. In one embodiment, the Plant Quick Extract solution is used with polynucleotide isolation beads. In an aspect the beads used are madnetic beads. In an embodiment, the polynucleotide islation solution, a KCl buffer and magnetic beads are utilized to allow a system that can be performed as a one pot method. In an aspect, the method using polynucleotide isolation solution, beads, and KCl buffer solution can be performed without washing steps or an extraction step.

[0118] In one example embodiments, the extraction-free lysis solution is combined with amplification reagents into a single volume. In an aspect, the amplification reagents are isothermal amplification reagents. In one embodiment, the isothermal amplification reagents are LAMP isothermal amplification reagents. The LAMP isothermal amplification reagents may include primers for the target nucleic acids discussed in further detail below. In an embodiment, the LAMP amplification reagents include primer sets selected from SEQ ID Nos: 1-40499.

TABLE 1A
Index of Lamp Primers and Sequence Identifiers

| | | FIP | BIP | F3 | F2 | F1c | B1c | B2 | B3 | LF | LB |
|---|---|---|---|---|---|---|---|---|---|---|---|
| | | SEQ | SEQ | SEQ | SEQ | SEQ | SEQ | SEQ | SEQ | SEQ | SEQ |
| Gene Ref | Ref. No. | ID NO | ID NO | ID NO. | ID NO. | ID NO. | ID NO. | ID NO. | ID NO. | ID NO. | ID NO. |
| NC_038524 | 0 | 1 | 4377 | 8753 | 13129 | 17505 | 21881 | 26257 | 30633 | | 37886 |
| NC_038524 | 1 | 2 | 4378 | 8754 | 13130 | 17506 | 21882 | 26258 | 30634 | 35009 | |
| NC_038524 | 2 | 3 | 4379 | 8755 | 13131 | 17507 | 21883 | 26259 | 30635 | 35010 | 37887 |
| NC_038524 | 3 | 4 | 4380 | 8756 | 13132 | 17508 | 21884 | 26260 | 30636 | 35011 | |
| NC_038524 | 4 | 5 | 4381 | 8757 | 13133 | 17509 | 21885 | 26261 | 30637 | 35012 | 37888 |
| NC_038524 | 5 | 6 | 4382 | 8758 | 13134 | 17510 | 21886 | 26262 | 30638 | 35013 | 37889 |
| NC_038524 | 6 | 7 | 4383 | 8759 | 13135 | 17511 | 21887 | 26263 | 30639 | | 37890 |
| NC_038524 | 7 | 8 | 4384 | 8760 | 13136 | 17512 | 21888 | 26264 | 30640 | 35014 | 37891 |
| NC_038524 | 8 | 9 | 4385 | 8761 | 13137 | 17513 | 21889 | 26265 | 30641 | 35015 | |
| NC_038524 | 9 | 10 | 4386 | 8762 | 13138 | 17514 | 21890 | 26266 | 30642 | 35016 | |
| NC_038524 | 10 | 11 | 4387 | 8763 | 13139 | 17515 | 21891 | 26267 | 30643 | | 37892 |
| NC_038524 | 11 | 12 | 4388 | 8764 | 13140 | 17516 | 21892 | 26268 | 30644 | 35017 | 37893 |
| NC_038524 | 12 | 13 | 4389 | 8765 | 13141 | 17517 | 21893 | 26269 | 30645 | | 37894 |
| NC_038524 | 13 | 14 | 4390 | 8766 | 13142 | 17518 | 21894 | 26270 | 30646 | | 37895 |
| NC_028125 | 14 | 15 | 4391 | 8767 | 13143 | 17519 | 21895 | 26271 | 30647 | 35018 | |
| NC_028125 | 15 | 16 | 4392 | 8768 | 13144 | 17520 | 21896 | 26272 | 30648 | | 37896 |
| NC_028125 | 16 | 17 | 4393 | 8769 | 13145 | 17521 | 21897 | 26273 | 30649 | 35019 | 37897 |
| NC_028125 | 17 | 18 | 4394 | 8770 | 13146 | 17522 | 21898 | 26274 | 30650 | | 37898 |
| NC_028125 | 18 | 19 | 4395 | 8771 | 13147 | 17523 | 21899 | 26275 | 30651 | 35020 | |
| NC_028125 | 19 | 20 | 4396 | 8772 | 13148 | 17524 | 21900 | 26276 | 30652 | 35021 | |
| NC_028125 | 20 | 21 | 4397 | 8773 | 13149 | 17525 | 21901 | 26277 | 30653 | 35022 | 37899 |
| NC_028125 | 21 | 22 | 4398 | 8774 | 13150 | 17526 | 21902 | 26278 | 30654 | | 37900 |
| NC_028125 | 22 | 23 | 4399 | 8775 | 13151 | 17527 | 21903 | 26279 | 30655 | | 37901 |
| NC_028125 | 23 | 24 | 4400 | 8776 | 13152 | 17528 | 21904 | 26280 | 30656 | 35023 | 37902 |
| NC_028125 | 24 | 25 | 4401 | 8777 | 13153 | 17529 | 21905 | 26281 | 30657 | | 37903 |
| NC_028125 | 25 | 26 | 4402 | 8778 | 13154 | 17530 | 21906 | 26282 | 30658 | 35024 | |
| NC_028125 | 26 | 27 | 4403 | 8779 | 13155 | 17531 | 21907 | 26283 | 30659 | | 37904 |
| NC_028125 | 27 | 28 | 4404 | 8780 | 13156 | 17532 | 21908 | 26284 | 30660 | | 37905 |
| NC_030791 | 28 | 29 | 4405 | 8781 | 13157 | 17533 | 21909 | 26285 | 30661 | | 37906 |
| NC_030791 | 29 | 30 | 4406 | 8782 | 13158 | 17534 | 21910 | 26286 | 30662 | 35025 | 37907 |
| NC_030791 | 30 | 31 | 4407 | 8783 | 13159 | 17535 | 21911 | 26287 | 30663 | 35026 | |
| NC_030791 | 31 | 32 | 4408 | 8784 | 13160 | 17536 | 21912 | 26288 | 30664 | 35027 | 37908 |
| NC_030791 | 32 | 33 | 4409 | 8785 | 13161 | 17537 | 21913 | 26289 | 30665 | 35028 | 37909 |
| NC_030791 | 33 | 34 | 4410 | 8786 | 13162 | 17538 | 21914 | 26290 | 30666 | 35029 | 37910 |
| NC_030791 | 34 | 35 | 4411 | 8787 | 13163 | 17539 | 21915 | 26291 | 30667 | 35030 | |
| NC_030791 | 35 | 36 | 4412 | 8788 | 13164 | 17540 | 21916 | 26292 | 30668 | 35031 | |
| NC_030791 | 36 | 37 | 4413 | 8789 | 13165 | 17541 | 21917 | 26293 | 30669 | 35032 | |
| NC_030791 | 37 | 38 | 4414 | 8790 | 13166 | 17542 | 21918 | 26294 | 30670 | | 37911 |
| NC_030791 | 38 | 39 | 4415 | 8791 | 13167 | 17543 | 21919 | 26295 | 30671 | 35033 | 37912 |
| NC_030791 | 39 | 40 | 4416 | 8792 | 13168 | 17544 | 21920 | 26296 | 30672 | | 37913 |
| NC_030791 | 40 | 41 | 4417 | 8793 | 13169 | 17545 | 21921 | 26297 | 30673 | 35034 | 37914 |
| NC_030791 | 41 | 42 | 4418 | 8794 | 13170 | 17546 | 21922 | 26298 | 30674 | 35035 | |
| NC_030791 | 42 | 43 | 4419 | 8795 | 13171 | 17547 | 21923 | 26299 | 30675 | | 37915 |
| NC_030791 | 43 | 44 | 4420 | 8796 | 13172 | 17548 | 21924 | 26300 | 30676 | | 37916 |
| NC_030791 | 44 | 45 | 4421 | 8797 | 13173 | 17549 | 21925 | 26301 | 30677 | 35036 | |
| NC_030791 | 45 | 46 | 4422 | 8798 | 13174 | 17550 | 21926 | 26302 | 30678 | 35037 | 37917 |
| NC_030791 | 46 | 47 | 4423 | 8799 | 13175 | 17551 | 21927 | 26303 | 30679 | | 37918 |
| NC_030791 | 47 | 48 | 4424 | 8800 | 13176 | 17552 | 21928 | 26304 | 30680 | | 37919 |
| NC_030791 | 48 | 49 | 4425 | 8801 | 13177 | 17553 | 21929 | 26305 | 30681 | | 37920 |
| NC_030791 | 49 | 50 | 4426 | 8802 | 13178 | 17554 | 21930 | 26306 | 30682 | 35038 | 37921 |
| NC_030791 | 50 | 51 | 4427 | 8803 | 13179 | 17555 | 21931 | 26307 | 30683 | | 37922 |
| NC_030791 | 51 | 52 | 4428 | 8804 | 13180 | 17556 | 21932 | 26308 | 30684 | | 37923 |
| NC_030791 | 52 | 53 | 4429 | 8805 | 13181 | 17557 | 21933 | 26309 | 30685 | 35039 | 37924 |
| NC_030791 | 53 | 54 | 4430 | 8806 | 13182 | 17558 | 21934 | 26310 | 30686 | 35040 | |
| NC_006312 | 54 | 55 | 4431 | 8807 | 13183 | 17559 | 21935 | 26311 | 30687 | | 37925 |
| NC_006312 | 55 | 56 | 4432 | 8808 | 13184 | 17560 | 21936 | 26312 | 30688 | | 37926 |
| NC_002204 | 56 | 57 | 4433 | 8809 | 13185 | 17561 | 21937 | 26313 | 30689 | 35041 | |
| NC_002204 | 57 | 58 | 4434 | 8810 | 13186 | 17562 | 21938 | 26314 | 30690 | | 37927 |
| NC_002204 | 58 | 59 | 4435 | 8811 | 13187 | 17563 | 21939 | 26315 | 30691 | | 37928 |
| NC_002204 | 59 | 60 | 4436 | 8812 | 13188 | 17564 | 21940 | 26316 | 30692 | 35042 | |
| NC_002204 | 60 | 61 | 4437 | 8813 | 13189 | 17565 | 21941 | 26317 | 30693 | | 37929 |
| NC_002204 | 61 | 62 | 4438 | 8814 | 13190 | 17566 | 21942 | 26318 | 30694 | 35043 | 37930 |
| NC_007374 | 62 | 63 | 4439 | 8815 | 13191 | 17567 | 21943 | 26319 | 30695 | 35044 | |
| NC_007374 | 63 | 64 | 4440 | 8816 | 13192 | 17568 | 21944 | 26320 | 30696 | 35045 | |
| NC_007374 | 64 | 65 | 4441 | 8817 | 13193 | 17569 | 21945 | 26321 | 30697 | 35046 | |
| NC_007374 | 65 | 66 | 4442 | 8818 | 13194 | 17570 | 21946 | 26322 | 30698 | 35047 | 37931 |
| NC_007374 | 66 | 67 | 4443 | 8819 | 13195 | 17571 | 21947 | 26323 | 30699 | | 37932 |
| NC_001803 | 67 | 68 | 4444 | 8820 | 13196 | 17572 | 21948 | 26324 | 30700 | 35048 | |
| NC_001803 | 68 | 69 | 4445 | 8821 | 13197 | 17573 | 21949 | 26325 | 30701 | | 37933 |
| NC_001803 | 69 | 70 | 4446 | 8822 | 13198 | 17574 | 21950 | 26326 | 30702 | 35049 | |
| NC_001803 | 70 | 71 | 4447 | 8823 | 13199 | 17575 | 21951 | 26327 | 30703 | 35050 | |
| NC_001803 | 71 | 72 | 4448 | 8824 | 13200 | 17576 | 21952 | 26328 | 30704 | 35051 | 37934 |
| NC_001803 | 72 | 73 | 4449 | 8825 | 13201 | 17577 | 21953 | 26329 | 30705 | | 37935 |
| NC_001803 | 73 | 74 | 4450 | 8826 | 13202 | 17578 | 21954 | 26330 | 30706 | | 37936 |
| NC_001803 | 74 | 75 | 4451 | 8827 | 13203 | 17579 | 21955 | 26331 | 30707 | 35052 | |
| NC_001803 | 75 | 76 | 4452 | 8828 | 13204 | 17580 | 21956 | 26332 | 30708 | 35053 | |
| NC_001803 | 76 | 77 | 4453 | 8829 | 13205 | 17581 | 21957 | 26333 | 30709 | 35054 | |
| NC_001803 | 77 | 78 | 4454 | 8830 | 13206 | 17582 | 21958 | 26334 | 30710 | 35055 | |
| NC_001803 | 78 | 79 | 4455 | 8831 | 13207 | 17583 | 21959 | 26335 | 30711 | | 37937 |
| NC_001803 | 79 | 80 | 4456 | 8832 | 13208 | 17584 | 21960 | 26336 | 30712 | | 37938 |
| NC_001803 | 80 | 81 | 4457 | 8833 | 13209 | 17585 | 21961 | 26337 | 30713 | 35056 | |
| NC_001803 | 81 | 82 | 4458 | 8834 | 13210 | 17586 | 21962 | 26338 | 30714 | 35057 | |
| NC_001803 | 82 | 83 | 4459 | 8835 | 13211 | 17587 | 21963 | 26339 | 30715 | 35058 | |
| NC_001803 | 83 | 84 | 4460 | 8836 | 13212 | 17588 | 21964 | 26340 | 30716 | | 37939 |
| NC_001803 | 84 | 85 | 4461 | 8837 | 13213 | 17589 | 21965 | 26341 | 30717 | | 37940 |
| NC_001803 | 85 | 86 | 4462 | 8838 | 13214 | 17590 | 21966 | 26342 | 30718 | 35059 | |
| NC_001803 | 86 | 87 | 4463 | 8839 | 13215 | 17591 | 21967 | 26343 | 30719 | | 37941 |
| NC_038882 | 87 | 88 | 4464 | 8840 | 13216 | 17592 | 21968 | 26344 | 30720 | 35060 | 37942 |
| NC_038882 | 88 | 89 | 4465 | 8841 | 13217 | 17593 | 21969 | 26345 | 30721 | 35061 | 37943 |
| NC_038882 | 89 | 90 | 4466 | 8842 | 13218 | 17594 | 21970 | 26346 | 30722 | 35062 | 37944 |
| NC_038882 | 90 | 91 | 4467 | 8843 | 13219 | 17595 | 21971 | 26347 | 30723 | 35063 | |
| NC_038882 | 91 | 92 | 4468 | 8844 | 13220 | 17596 | 21972 | 26348 | 30724 | 35064 | |
| NC_038882 | 92 | 93 | 4469 | 8845 | 13221 | 17597 | 21973 | 26349 | 30725 | | 37945 |
| NC_038882 | 93 | 94 | 4470 | 8846 | 13222 | 17598 | 21974 | 26350 | 30726 | 35065 | 37946 |
| NC_038882 | 94 | 95 | 4471 | 8847 | 13223 | 17599 | 21975 | 26351 | 30727 | 35066 | 37947 |
| NC_038882 | 95 | 96 | 4472 | 8848 | 13224 | 17600 | 21976 | 26352 | 30728 | | 37948 |
| NC_038882 | 96 | 97 | 4473 | 8849 | 13225 | 17601 | 21977 | 26353 | 30729 | | 37949 |
| NC_038882 | 97 | 98 | 4474 | 8850 | 13226 | 17602 | 21978 | 26354 | 30730 | 35067 | |
| NC_038882 | 98 | 99 | 4475 | 8851 | 13227 | 17603 | 21979 | 26355 | 30731 | 35068 | 37950 |
| NC_038882 | 99 | 100 | 4476 | 8852 | 13228 | 17604 | 21980 | 26356 | 30732 | | 37951 |
| NC_038882 | 100 | 101 | 4477 | 8853 | 13229 | 17605 | 21981 | 26357 | 30733 | 35069 | |
| NC_038882 | 101 | 102 | 4478 | 8854 | 13230 | 17606 | 21982 | 26358 | 30734 | | 37952 |
| NC_038882 | 102 | 103 | 4479 | 8855 | 13231 | 17607 | 21983 | 26359 | 30735 | 35070 | |
| NC_038882 | 103 | 104 | 4480 | 8856 | 13232 | 17608 | 21984 | 26360 | 30736 | | 37953 |
| NC_038882 | 104 | 105 | 4481 | 8857 | 13233 | 17609 | 21985 | 26361 | 30737 | 35071 | 37954 |
| NC_038882 | 105 | 106 | 4482 | 8858 | 13234 | 17610 | 21986 | 26362 | 30738 | | 37955 |
| NC_038882 | 106 | 107 | 4483 | 8859 | 13235 | 17611 | 21987 | 26363 | 30739 | 35072 | 37956 |
| NC_038882 | 107 | 108 | 4484 | 8860 | 13236 | 17612 | 21988 | 26364 | 30740 | | 37957 |
| NC_038882 | 108 | 109 | 4485 | 8861 | 13237 | 17613 | 21989 | 26365 | 30741 | 35073 | 37958 |
| NC_038882 | 109 | 110 | 4486 | 8862 | 13238 | 17614 | 21990 | 26366 | 30742 | | 37959 |
| NC_038882 | 110 | 111 | 4487 | 8863 | 13239 | 17615 | 21991 | 26367 | 30743 | | 37960 |
| NC_038882 | 111 | 112 | 4488 | 8864 | 13240 | 17616 | 21992 | 26368 | 30744 | | 37961 |
| NC_038882 | 112 | 113 | 4489 | 8865 | 13241 | 17617 | 21993 | 26369 | 30745 | | 37962 |
| NC_038882 | 113 | 114 | 4490 | 8866 | 13242 | 17618 | 21994 | 26370 | 30746 | 35074 | |
| NC_038882 | 114 | 115 | 4491 | 8867 | 13243 | 17619 | 21995 | 26371 | 30747 | 35075 | 37963 |
| NC_038882 | 115 | 116 | 4492 | 8868 | 13244 | 17620 | 21996 | 26372 | 30748 | | 37964 |
| NC_007359 | 116 | 117 | 4493 | 8869 | 13245 | 17621 | 21997 | 26373 | 30749 | 35076 | |
| NC_007359 | 117 | 118 | 4494 | 8870 | 13246 | 17622 | 21998 | 26374 | 30750 | 35077 | |
| NC_007359 | 118 | 119 | 4495 | 8871 | 13247 | 17623 | 21999 | 26375 | 30751 | 35078 | 37965 |
| NC_007359 | 119 | 120 | 4496 | 8872 | 13248 | 17624 | 22000 | 26376 | 30752 | 35079 | |
| NC_007359 | 120 | 121 | 4497 | 8873 | 13249 | 17625 | 22001 | 26377 | 30753 | 35080 | |
| NC_007359 | 121 | 122 | 4498 | 8874 | 13250 | 17626 | 22002 | 26378 | 30754 | 35081 | 37966 |
| NC_007380 | 122 | 123 | 4499 | 8875 | 13251 | 17627 | 22003 | 26379 | 30755 | 35082 | |
| NC_007380 | 123 | 124 | 4500 | 8876 | 13252 | 17628 | 22004 | 26380 | 30756 | | 37967 |
| NC_001676 | 124 | 125 | 4501 | 8877 | 13253 | 17629 | 22005 | 26381 | 30757 | 35083 | |
| NC_001676 | 125 | 126 | 4502 | 8878 | 13254 | 17630 | 22006 | 26382 | 30758 | | 37968 |
| NC_001676 | 126 | 127 | 4503 | 8879 | 13255 | 17631 | 22007 | 26383 | 30759 | 35084 | |
| NC_001676 | 127 | 128 | 4504 | 8880 | 13256 | 17632 | 22008 | 26384 | 30760 | 35085 | 37969 |
| NC_001676 | 128 | 129 | 4505 | 8881 | 13257 | 17633 | 22009 | 26385 | 30761 | | 37970 |
| NC_001676 | 129 | 130 | 4506 | 8882 | 13258 | 17634 | 22010 | 26386 | 30762 | 35086 | |
| NC_001676 | 130 | 131 | 4507 | 8883 | 13259 | 17635 | 22011 | 26387 | 30763 | 35087 | 37971 |
| NC_001676 | 131 | 132 | 4508 | 8884 | 13260 | 17636 | 22012 | 26388 | 30764 | | 37972 |
| NC_001676 | 132 | 133 | 4509 | 8885 | 13261 | 17637 | 22013 | 26389 | 30765 | | 37973 |
| NC_001676 | 133 | 134 | 4510 | 8886 | 13262 | 17638 | 22014 | 26390 | 30766 | 35088 | |
| NC_001676 | 134 | 135 | 4511 | 8887 | 13263 | 17639 | 22015 | 26391 | 30767 | | 37974 |
| NC_001676 | 135 | 136 | 4512 | 8888 | 13264 | 17640 | 22016 | 26392 | 30768 | | 37975 |
| NC_001676 | 136 | 137 | 4513 | 8889 | 13265 | 17641 | 22017 | 26393 | 30769 | | 37976 |
| NC_001436 | 137 | 138 | 4514 | 8890 | 13266 | 17642 | 22018 | 26394 | 30770 | 35089 | 37977 |
| NC_001436 | 138 | 139 | 4515 | 8891 | 13267 | 17643 | 22019 | 26395 | 30771 | 35090 | |
| NC_001436 | 139 | 140 | 4516 | 8892 | 13268 | 17644 | 22020 | 26396 | 30772 | 35091 | 37978 |
| NC_001436 | 140 | 141 | 4517 | 8893 | 13269 | 17645 | 22021 | 26397 | 30773 | | 37979 |
| NC_001436 | 141 | 142 | 4518 | 8894 | 13270 | 17646 | 22022 | 26398 | 30774 | | 37980 |
| NC_001436 | 142 | 143 | 4519 | 8895 | 13271 | 17647 | 22023 | 26399 | 30775 | | 37981 |
| NC_001436 | 143 | 144 | 4520 | 8896 | 13272 | 17648 | 22024 | 26400 | 30776 | 35092 | 37982 |
| NC_001436 | 144 | 145 | 4521 | 8897 | 13273 | 17649 | 22025 | 26401 | 30777 | 35093 | 37983 |
| NC_001436 | 145 | 146 | 4522 | 8898 | 13274 | 17650 | 22026 | 26402 | 30778 | | 37984 |
| NC_001436 | 146 | 147 | 4523 | 8899 | 13275 | 17651 | 22027 | 26403 | 30779 | 35094 | |
| NC_001436 | 147 | 148 | 4524 | 8900 | 13276 | 17652 | 22028 | 26404 | 30780 | 35095 | |
| NC_001436 | 148 | 149 | 4525 | 8901 | 13277 | 17653 | 22029 | 26405 | 30781 | 35096 | 37985 |
| NC_001436 | 149 | 150 | 4526 | 8902 | 13278 | 17654 | 22030 | 26406 | 30782 | | 37986 |
| NC_001436 | 150 | 151 | 4527 | 8903 | 13279 | 17655 | 22031 | 26407 | 30783 | 35097 | 37987 |
| NC_001436 | 151 | 152 | 4528 | 8904 | 13280 | 17656 | 22032 | 26408 | 30784 | | 37988 |
| NC_001436 | 152 | 153 | 4529 | 8905 | 13281 | 17657 | 22033 | 26409 | 30785 | 35098 | |
| NC_001436 | 153 | 154 | 4530 | 8906 | 13282 | 17658 | 22034 | 26410 | 30786 | | 37989 |
| NC_001436 | 154 | 155 | 4531 | 8907 | 13283 | 17659 | 22035 | 26411 | 30787 | | 37990 |
| NC_001436 | 155 | 156 | 4532 | 8908 | 13284 | 17660 | 22036 | 26412 | 30788 | | 37991 |
| NC_001436 | 156 | 157 | 4533 | 8909 | 13285 | 17661 | 22037 | 26413 | 30789 | 35099 | |
| NC_001436 | 157 | 158 | 4534 | 8910 | 13286 | 17662 | 22038 | 26414 | 30790 | 35100 | |
| NC_001436 | 158 | 159 | 4535 | 8911 | 13287 | 17663 | 22039 | 26415 | 30791 | 35101 | 37992 |
| NC_001436 | 159 | 160 | 4536 | 8912 | 13288 | 17664 | 22040 | 26416 | 30792 | 35102 | |
| NC_001436 | 160 | 161 | 4537 | 8913 | 13289 | 17665 | 22041 | 26417 | 30793 | 35103 | |
| NC_007378 | 161 | 162 | 4538 | 8914 | 13290 | 17666 | 22042 | 26418 | 30794 | 35104 | 37993 |
| NC_007378 | 162 | 163 | 4539 | 8915 | 13291 | 17667 | 22043 | 26419 | 30795 | 35105 | |
| NC_007378 | 163 | 164 | 4540 | 8916 | 13292 | 17668 | 22044 | 26420 | 30796 | | 37994 |
| NC_007378 | 164 | 165 | 4541 | 8917 | 13293 | 17669 | 22045 | 26421 | 30797 | | 37995 |
| NC_007378 | 165 | 166 | 4542 | 8918 | 13294 | 17670 | 22046 | 26422 | 30798 | 35106 | 37996 |
| NC_007378 | 166 | 167 | 4543 | 8919 | 13295 | 17671 | 22047 | 26423 | 30799 | 35107 | |
| NC_007378 | 167 | 168 | 4544 | 8920 | 13296 | 17672 | 22048 | 26424 | 30800 | 35108 | |
| NC_007378 | 168 | 169 | 4545 | 8921 | 13297 | 17673 | 22049 | 26425 | 30801 | 35109 | 37997 |
| NC_007378 | 169 | 170 | 4546 | 8922 | 13298 | 17674 | 22050 | 26426 | 30802 | | 37998 |
| NC_002020 | 170 | 171 | 4547 | 8923 | 13299 | 17675 | 22051 | 26427 | 30803 | 35110 | |
| NC_002020 | 171 | 172 | 4548 | 8924 | 13300 | 17676 | 22052 | 26428 | 30804 | 35111 | |
| NC_026435 | 172 | 173 | 4549 | 8925 | 13301 | 17677 | 22053 | 26429 | 30805 | 35112 | 37999 |
| NC_026435 | 173 | 174 | 4550 | 8926 | 13302 | 17678 | 22054 | 26430 | 30806 | | 38000 |
| NC_026435 | 174 | 175 | 4551 | 8927 | 13303 | 17679 | 22055 | 26431 | 30807 | 35113 | 38001 |
| NC_026435 | 175 | 176 | 4552 | 8928 | 13304 | 17680 | 22056 | 26432 | 30808 | 35114 | |
| NC_026435 | 176 | 177 | 4553 | 8929 | 13305 | 17681 | 22057 | 26433 | 30809 | 35115 | |
| NC_026435 | 177 | 178 | 4554 | 8930 | 13306 | 17682 | 22058 | 26434 | 30810 | | 38002 |
| NC_026435 | 178 | 179 | 4555 | 8931 | 13307 | 17683 | 22059 | 26435 | 30811 | 35116 | |
| NC_006273 | 179 | 180 | 4556 | 8932 | 13308 | 17684 | 22060 | 26436 | 30812 | 35117 | |
| NC_006273 | 180 | 181 | 4557 | 8933 | 13309 | 17685 | 22061 | 26437 | 30813 | 35118 | 38003 |
| NC_006273 | 181 | 182 | 4558 | 8934 | 13310 | 17686 | 22062 | 26438 | 30814 | | 38004 |
| NC_006273 | 182 | 183 | 4559 | 8935 | 13311 | 17687 | 22063 | 26439 | 30815 | 35119 | |
| NC_006273 | 183 | 184 | 4560 | 8936 | 13312 | 17688 | 22064 | 26440 | 30816 | | 38005 |
| NC_006273 | 184 | 185 | 4561 | 8937 | 13313 | 17689 | 22065 | 26441 | 30817 | 35120 | |
| NC_006273 | 185 | 186 | 4562 | 8938 | 13314 | 17690 | 22066 | 26442 | 30818 | 35121 | |
| NC_006273 | 186 | 187 | 4563 | 8939 | 13315 | 17691 | 22067 | 26443 | 30819 | | 38006 |
| NC_006273 | 187 | 188 | 4564 | 8940 | 13316 | 17692 | 22068 | 26444 | 30820 | 35122 | |
| NC_006273 | 188 | 189 | 4565 | 8941 | 13317 | 17693 | 22069 | 26445 | 30821 | 35123 | 38007 |
| NC_006273 | 189 | 190 | 4566 | 8942 | 13318 | 17694 | 22070 | 26446 | 30822 | 35124 | |
| NC_006273 | 190 | 191 | 4567 | 8943 | 13319 | 17695 | 22071 | 26447 | 30823 | 35125 | 38008 |
| NC_006273 | 191 | 192 | 4568 | 8944 | 13320 | 17696 | 22072 | 26448 | 30824 | | 38009 |
| NC_006273 | 192 | 193 | 4569 | 8945 | 13321 | 17697 | 22073 | 26449 | 30825 | 35126 | |
| NC_006273 | 193 | 194 | 4570 | 8946 | 13322 | 17698 | 22074 | 26450 | 30826 | 35127 | 38010 |
| NC_006273 | 194 | 195 | 4571 | 8947 | 13323 | 17699 | 22075 | 26451 | 30827 | | 38011 |
| NC_006273 | 195 | 196 | 4572 | 8948 | 13324 | 17700 | 22076 | 26452 | 30828 | | 38012 |
| NC_006273 | 196 | 197 | 4573 | 8949 | 13325 | 17701 | 22077 | 26453 | 30829 | 35128 | |
| NC_006273 | 197 | 198 | 4574 | 8950 | 13326 | 17702 | 22078 | 26454 | 30830 | | 38013 |
| NC_006273 | 198 | 199 | 4575 | 8951 | 13327 | 17703 | 22079 | 26455 | 30831 | 35129 | 38014 |
| NC_006273 | 199 | 200 | 4576 | 8952 | 13328 | 17704 | 22080 | 26456 | 30832 | | 38015 |
| NC_006273 | 200 | 201 | 4577 | 8953 | 13329 | 17705 | 22081 | 26457 | 30833 | 35130 | 38016 |
| NC_006273 | 201 | 202 | 4578 | 8954 | 13330 | 17706 | 22082 | 26458 | 30834 | 35131 | |
| NC_006273 | 202 | 203 | 4579 | 8955 | 13331 | 17707 | 22083 | 26459 | 30835 | | 38017 |
| NC_006273 | 203 | 204 | 4580 | 8956 | 13332 | 17708 | 22084 | 26460 | 30836 | 35132 | 38018 |
| NC_006273 | 204 | 205 | 4581 | 8957 | 13333 | 17709 | 22085 | 26461 | 30837 | 35133 | 38019 |
| NC_006273 | 205 | 206 | 4582 | 8958 | 13334 | 17710 | 22086 | 26462 | 30838 | 35134 | |
| NC_006273 | 206 | 207 | 4583 | 8959 | 13335 | 17711 | 22087 | 26463 | 30839 | 35135 | |
| NC_006273 | 207 | 208 | 4584 | 8960 | 13336 | 17712 | 22088 | 26464 | 30840 | 35136 | 38020 |
| NC_006273 | 208 | 209 | 4585 | 8961 | 13337 | 17713 | 22089 | 26465 | 30841 | 35137 | 38021 |
| NC_006273 | 209 | 210 | 4586 | 8962 | 13338 | 17714 | 22090 | 26466 | 30842 | | 38022 |
| NC_006273 | 210 | 211 | 4587 | 8963 | 13339 | 17715 | 22091 | 26467 | 30843 | | 38023 |
| NC_006273 | 211 | 212 | 4588 | 8964 | 13340 | 17716 | 22092 | 26468 | 30844 | | 38024 |
| NC_006273 | 212 | 213 | 4589 | 8965 | 13341 | 17717 | 22093 | 26469 | 30845 | | 38025 |
| NC_006273 | 213 | 214 | 4590 | 8966 | 13342 | 17718 | 22094 | 26470 | 30846 | 35138 | |
| NC_006273 | 214 | 215 | 4591 | 8967 | 13343 | 17719 | 22095 | 26471 | 30847 | 35139 | 38026 |
| NC_006273 | 215 | 216 | 4592 | 8968 | 13344 | 17720 | 22096 | 26472 | 30848 | 35140 | |
| NC_006273 | 216 | 217 | 4593 | 8969 | 13345 | 17721 | 22097 | 26473 | 30849 | 35141 | 38027 |
| NC_006273 | 217 | 218 | 4594 | 8970 | 13346 | 17722 | 22098 | 26474 | 30850 | 35142 | 38028 |
| NC_006273 | 218 | 219 | 4595 | 8971 | 13347 | 17723 | 22099 | 26475 | 30851 | 35143 | 38029 |
| NC_006273 | 219 | 220 | 4596 | 8972 | 13348 | 17724 | 22100 | 26476 | 30852 | 35144 | 38030 |
| NC_006273 | 220 | 221 | 4597 | 8973 | 13349 | 17725 | 22101 | 26477 | 30853 | | 38031 |
| NC_006273 | 221 | 222 | 4598 | 8974 | 13350 | 17726 | 22102 | 26478 | 30854 | 35145 | 38032 |
| NC_006273 | 222 | 223 | 4599 | 8975 | 13351 | 17727 | 22103 | 26479 | 30855 | 35146 | 38033 |
| NC_006273 | 223 | 224 | 4600 | 8976 | 13352 | 17728 | 22104 | 26480 | 30856 | 35147 | 38034 |
| NC_006273 | 224 | 225 | 4601 | 8977 | 13353 | 17729 | 22105 | 26481 | 30857 | 35148 | 38035 |
| NC_006273 | 225 | 226 | 4602 | 8978 | 13354 | 17730 | 22106 | 26482 | 30858 | 35149 | 38036 |
| NC_006273 | 226 | 227 | 4603 | 8979 | 13355 | 17731 | 22107 | 26483 | 30859 | 35150 | 38037 |
| NC_006273 | 227 | 228 | 4604 | 8980 | 13356 | 17732 | 22108 | 26484 | 30860 | 35151 | |
| NC_006273 | 228 | 229 | 4605 | 8981 | 13357 | 17733 | 22109 | 26485 | 30861 | 35152 | 38038 |
| NC_006273 | 229 | 230 | 4606 | 8982 | 13358 | 17734 | 22110 | 26486 | 30862 | 35153 | 38039 |
| NC_006273 | 230 | 231 | 4607 | 8983 | 13359 | 17735 | 22111 | 26487 | 30863 | 35154 | 38040 |
| NC_006273 | 231 | 232 | 4608 | 8984 | 13360 | 17736 | 22112 | 26488 | 30864 | | 38041 |
| NC_006273 | 232 | 233 | 4609 | 8985 | 13361 | 17737 | 22113 | 26489 | 30865 | 35155 | 38042 |
| NC_006273 | 233 | 234 | 4610 | 8986 | 13362 | 17738 | 22114 | 26490 | 30866 | | 38043 |
| NC_006273 | 234 | 235 | 4611 | 8987 | 13363 | 17739 | 22115 | 26491 | 30867 | | 38044 |
| NC_006273 | 235 | 236 | 4612 | 8988 | 13364 | 17740 | 22116 | 26492 | 30868 | 35156 | 38045 |
| NC_006273 | 236 | 237 | 4613 | 8989 | 13365 | 17741 | 22117 | 26493 | 30869 | 35157 | |
| NC_006273 | 237 | 238 | 4614 | 8990 | 13366 | 17742 | 22118 | 26494 | 30870 | 35158 | |
| NC_006273 | 238 | 239 | 4615 | 8991 | 13367 | 17743 | 22119 | 26495 | 30871 | 35159 | 38046 |
| NC_006273 | 239 | 240 | 4616 | 8992 | 13368 | 17744 | 22120 | 26496 | 30872 | 35160 | 38047 |
| NC_006273 | 240 | 241 | 4617 | 8993 | 13369 | 17745 | 22121 | 26497 | 30873 | 35161 | |
| NC_006273 | 241 | 242 | 4618 | 8994 | 13370 | 17746 | 22122 | 26498 | 30874 | 35162 | 38048 |
| NC_006273 | 242 | 243 | 4619 | 8995 | 13371 | 17747 | 22123 | 26499 | 30875 | 35163 | |
| NC_006273 | 243 | 244 | 4620 | 8996 | 13372 | 17748 | 22124 | 26500 | 30876 | 35164 | |
| NC_006273 | 244 | 245 | 4621 | 8997 | 13373 | 17749 | 22125 | 26501 | 30877 | | 38049 |
| NC_006273 | 245 | 246 | 4622 | 8998 | 13374 | 17750 | 22126 | 26502 | 30878 | 35165 | |
| NC_006273 | 246 | 247 | 4623 | 8999 | 13375 | 17751 | 22127 | 26503 | 30879 | | 38050 |
| NC_006273 | 247 | 248 | 4624 | 9000 | 13376 | 17752 | 22128 | 26504 | 30880 | 35166 | |
| NC_006273 | 248 | 249 | 4625 | 9001 | 13377 | 17753 | 22129 | 26505 | 30881 | | 38051 |
| NC_006273 | 249 | 250 | 4626 | 9002 | 13378 | 17754 | 22130 | 26506 | 30882 | 35167 | 38052 |
| NC_006273 | 250 | 251 | 4627 | 9003 | 13379 | 17755 | 22131 | 26507 | 30883 | 35168 | |
| NC_006273 | 251 | 252 | 4628 | 9004 | 13380 | 17756 | 22132 | 26508 | 30884 | | 38053 |
| NC_006273 | 252 | 253 | 4629 | 9005 | 13381 | 17757 | 22133 | 26509 | 30885 | 35169 | 38054 |
| NC_006273 | 253 | 254 | 4630 | 9006 | 13382 | 17758 | 22134 | 26510 | 30886 | | 38055 |
| NC_006273 | 254 | 255 | 4631 | 9007 | 13383 | 17759 | 22135 | 26511 | 30887 | | 38056 |
| NC_006273 | 255 | 256 | 4632 | 9008 | 13384 | 17760 | 22136 | 26512 | 30888 | 35170 | |
| NC_006273 | 256 | 257 | 4633 | 9009 | 13385 | 17761 | 22137 | 26513 | 30889 | 35171 | |
| NC_006273 | 257 | 258 | 4634 | 9010 | 13386 | 17762 | 22138 | 26514 | 30890 | 35172 | |
| NC_006273 | 258 | 259 | 4635 | 9011 | 13387 | 17763 | 22139 | 26515 | 30891 | 35173 | 38057 |
| NC_006273 | 259 | 260 | 4636 | 9012 | 13388 | 17764 | 22140 | 26516 | 30892 | 35174 | 38058 |
| NC_006273 | 260 | 261 | 4637 | 9013 | 13389 | 17765 | 22141 | 26517 | 30893 | 35175 | |
| NC_006273 | 261 | 262 | 4638 | 9014 | 13390 | 17766 | 22142 | 26518 | 30894 | 35176 | |
| NC_006273 | 262 | 263 | 4639 | 9015 | 13391 | 17767 | 22143 | 26519 | 30895 | 35177 | 38059 |
| NC_006273 | 263 | 264 | 4640 | 9016 | 13392 | 17768 | 22144 | 26520 | 30896 | | 38060 |
| NC_006273 | 264 | 265 | 4641 | 9017 | 13393 | 17769 | 22145 | 26521 | 30897 | 35178 | 38061 |
| NC_006273 | 265 | 266 | 4642 | 9018 | 13394 | 17770 | 22146 | 26522 | 30898 | 35179 | 38062 |
| NC_006273 | 266 | 267 | 4643 | 9019 | 13395 | 17771 | 22147 | 26523 | 30899 | 35180 | 38063 |
| NC_006273 | 267 | 268 | 4644 | 9020 | 13396 | 17772 | 22148 | 26524 | 30900 | | 38064 |
| NC_006273 | 268 | 269 | 4645 | 9021 | 13397 | 17773 | 22149 | 26525 | 30901 | | 38065 |
| NC_006273 | 269 | 270 | 4646 | 9022 | 13398 | 17774 | 22150 | 26526 | 30902 | 35181 | |
| NC_006273 | 270 | 271 | 4647 | 9023 | 13399 | 17775 | 22151 | 26527 | 30903 | 35182 | 38066 |
| NC_006273 | 271 | 272 | 4648 | 9024 | 13400 | 17776 | 22152 | 26528 | 30904 | 35183 | 38067 |
| NC_006273 | 272 | 273 | 4649 | 9025 | 13401 | 17777 | 22153 | 26529 | 30905 | 35184 | 38068 |
| NC_006273 | 273 | 274 | 4650 | 9026 | 13402 | 17778 | 22154 | 26530 | 30906 | 35185 | 38069 |
| NC_006273 | 274 | 275 | 4651 | 9027 | 13403 | 17779 | 22155 | 26531 | 30907 | 35186 | |
| NC_006273 | 275 | 276 | 4652 | 9028 | 13404 | 17780 | 22156 | 26532 | 30908 | 35187 | 38070 |
| NC_006273 | 276 | 277 | 4653 | 9029 | 13405 | 17781 | 22157 | 26533 | 30909 | | 38071 |
| NC_006273 | 277 | 278 | 4654 | 9030 | 13406 | 17782 | 22158 | 26534 | 30910 | 35188 | |
| NC_006273 | 278 | 279 | 4655 | 9031 | 13407 | 17783 | 22159 | 26535 | 30911 | 35189 | 38072 |
| NC_006273 | 279 | 280 | 4656 | 9032 | 13408 | 17784 | 22160 | 26536 | 30912 | 35190 | 38073 |
| NC_006273 | 280 | 281 | 4657 | 9033 | 13409 | 17785 | 22161 | 26537 | 30913 | 35191 | 38074 |
| NC_006273 | 281 | 282 | 4658 | 9034 | 13410 | 17786 | 22162 | 26538 | 30914 | 35192 | 38075 |
| NC_006273 | 282 | 283 | 4659 | 9035 | 13411 | 17787 | 22163 | 26539 | 30915 | 35193 | 38076 |
| NC_006273 | 283 | 284 | 4660 | 9036 | 13412 | 17788 | 22164 | 26540 | 30916 | 35194 | 38077 |
| NC_006273 | 284 | 285 | 4661 | 9037 | 13413 | 17789 | 22165 | 26541 | 30917 | 35195 | |
| NC_006273 | 285 | 286 | 4662 | 9038 | 13414 | 17790 | 22166 | 26542 | 30918 | 35196 | 38078 |
| NC_006273 | 286 | 287 | 4663 | 9039 | 13415 | 17791 | 22167 | 26543 | 30919 | 35197 | |
| NC_006273 | 287 | 288 | 4664 | 9040 | 13416 | 17792 | 22168 | 26544 | 30920 | 35198 | 38079 |
| NC_006273 | 288 | 289 | 4665 | 9041 | 13417 | 17793 | 22169 | 26545 | 30921 | 35199 | 38080 |
| NC_006273 | 289 | 290 | 4666 | 9042 | 13418 | 17794 | 22170 | 26546 | 30922 | | 38081 |
| NC_006273 | 290 | 291 | 4667 | 9043 | 13419 | 17795 | 22171 | 26547 | 30923 | | 38082 |
| NC_006273 | 291 | 292 | 4668 | 9044 | 13420 | 17796 | 22172 | 26548 | 30924 | 35200 | 38083 |
| NC_006273 | 292 | 293 | 4669 | 9045 | 13421 | 17797 | 22173 | 26549 | 30925 | 35201 | 38084 |
| NC_006273 | 293 | 294 | 4670 | 9046 | 13422 | 17798 | 22174 | 26550 | 30926 | | 38085 |
| NC_006273 | 294 | 295 | 4671 | 9047 | 13423 | 17799 | 22175 | 26551 | 30927 | 35202 | 38086 |
| NC_006273 | 295 | 296 | 4672 | 9048 | 13424 | 17800 | 22176 | 26552 | 30928 | 35203 | |
| NC_006273 | 296 | 297 | 4673 | 9049 | 13425 | 17801 | 22177 | 26553 | 30929 | | 38087 |
| NC_006273 | 297 | 298 | 4674 | 9050 | 13426 | 17802 | 22178 | 26554 | 30930 | 35204 | |
| NC_006273 | 298 | 299 | 4675 | 9051 | 13427 | 17803 | 22179 | 26555 | 30931 | 35205 | |
| NC_006273 | 299 | 300 | 4676 | 9052 | 13428 | 17804 | 22180 | 26556 | 30932 | | 38088 |
| NC_006273 | 300 | 301 | 4677 | 9053 | 13429 | 17805 | 22181 | 26557 | 30933 | 35206 | 38089 |
| NC_006273 | 301 | 302 | 4678 | 9054 | 13430 | 17806 | 22182 | 26558 | 30934 | 35207 | |
| NC_006273 | 302 | 303 | 4679 | 9055 | 13431 | 17807 | 22183 | 26559 | 30935 | 35208 | 38090 |
| NC_006273 | 303 | 304 | 4680 | 9056 | 13432 | 17808 | 22184 | 26560 | 30936 | 35209 | 38091 |
| NC_006273 | 304 | 305 | 4681 | 9057 | 13433 | 17809 | 22185 | 26561 | 30937 | 35210 | 38092 |
| NC_006273 | 305 | 306 | 4682 | 9058 | 13434 | 17810 | 22186 | 26562 | 30938 | 35211 | 38093 |
| NC_006273 | 306 | 307 | 4683 | 9059 | 13435 | 17811 | 22187 | 26563 | 30939 | 35212 | |
| NC_006273 | 307 | 308 | 4684 | 9060 | 13436 | 17812 | 22188 | 26564 | 30940 | | 38094 |
| NC_006273 | 308 | 309 | 4685 | 9061 | 13437 | 17813 | 22189 | 26565 | 30941 | 35213 | |
| NC_006273 | 309 | 310 | 4686 | 9062 | 13438 | 17814 | 22190 | 26566 | 30942 | 35214 | |
| NC_006273 | 310 | 311 | 4687 | 9063 | 13439 | 17815 | 22191 | 26567 | 30943 | | 38095 |
| NC_006273 | 311 | 312 | 4688 | 9064 | 13440 | 17816 | 22192 | 26568 | 30944 | 35215 | 38096 |
| NC_006273 | 312 | 313 | 4689 | 9065 | 13441 | 17817 | 22193 | 26569 | 30945 | 35216 | 38097 |
| NC_006273 | 313 | 314 | 4690 | 9066 | 13442 | 17818 | 22194 | 26570 | 30946 | 35217 | |
| NC_006273 | 314 | 315 | 4691 | 9067 | 13443 | 17819 | 22195 | 26571 | 30947 | 35218 | |
| NC_006273 | 315 | 316 | 4692 | 9068 | 13444 | 17820 | 22196 | 26572 | 30948 | 35219 | 38098 |
| NC_006273 | 316 | 317 | 4693 | 9069 | 13445 | 17821 | 22197 | 26573 | 30949 | 35220 | |
| NC_006273 | 317 | 318 | 4694 | 9070 | 13446 | 17822 | 22198 | 26574 | 30950 | | 38099 |
| NC_006273 | 318 | 319 | 4695 | 9071 | 13447 | 17823 | 22199 | 26575 | 30951 | 35221 | |
| NC_006273 | 319 | 320 | 4696 | 9072 | 13448 | 17824 | 22200 | 26576 | 30952 | 35222 | |
| NC_006273 | 320 | 321 | 4697 | 9073 | 13449 | 17825 | 22201 | 26577 | 30953 | 35223 | |
| NC_006273 | 321 | 322 | 4698 | 9074 | 13450 | 17826 | 22202 | 26578 | 30954 | 35224 | 38100 |
| NC_006273 | 322 | 323 | 4699 | 9075 | 13451 | 17827 | 22203 | 26579 | 30955 | 35225 | 38101 |
| NC_006273 | 323 | 324 | 4700 | 9076 | 13452 | 17828 | 22204 | 26580 | 30956 | 35226 | |
| NC_006273 | 324 | 325 | 4701 | 9077 | 13453 | 17829 | 22205 | 26581 | 30957 | 35227 | 38102 |
| NC_006273 | 325 | 326 | 4702 | 9078 | 13454 | 17830 | 22206 | 26582 | 30958 | 35228 | |
| NC_006273 | 326 | 327 | 4703 | 9079 | 13455 | 17831 | 22207 | 26583 | 30959 | 35229 | 38103 |
| NC_006273 | 327 | 328 | 4704 | 9080 | 13456 | 17832 | 22208 | 26584 | 30960 | | 38104 |
| NC_006273 | 328 | 329 | 4705 | 9081 | 13457 | 17833 | 22209 | 26585 | 30961 | 35230 | |
| NC_006273 | 329 | 330 | 4706 | 9082 | 13458 | 17834 | 22210 | 26586 | 30962 | 35231 | 38105 |
| NC_006273 | 330 | 331 | 4707 | 9083 | 13459 | 17835 | 22211 | 26587 | 30963 | | 38106 |
| NC_006273 | 331 | 332 | 4708 | 9084 | 13460 | 17836 | 22212 | 26588 | 30964 | | 38107 |
| NC_006273 | 332 | 333 | 4709 | 9085 | 13461 | 17837 | 22213 | 26589 | 30965 | | 38108 |
| NC_006273 | 333 | 334 | 4710 | 9086 | 13462 | 17838 | 22214 | 26590 | 30966 | 35232 | |
| NC_006273 | 334 | 335 | 4711 | 9087 | 13463 | 17839 | 22215 | 26591 | 30967 | 35233 | 38109 |
| NC_006273 | 335 | 336 | 4712 | 9088 | 13464 | 17840 | 22216 | 26592 | 30968 | 35234 | 38110 |
| NC_006273 | 336 | 337 | 4713 | 9089 | 13465 | 17841 | 22217 | 26593 | 30969 | 35235 | 38111 |
| NC_006273 | 337 | 338 | 4714 | 9090 | 13466 | 17842 | 22218 | 26594 | 30970 | 35236 | |
| NC_006273 | 338 | 339 | 4715 | 9091 | 13467 | 17843 | 22219 | 26595 | 30971 | 35237 | |
| NC_006273 | 339 | 340 | 4716 | 9092 | 13468 | 17844 | 22220 | 26596 | 30972 | 35238 | 38112 |
| NC_006273 | 340 | 341 | 4717 | 9093 | 13469 | 17845 | 22221 | 26597 | 30973 | 35239 | 38113 |
| NC_006273 | 341 | 342 | 4718 | 9094 | 13470 | 17846 | 22222 | 26598 | 30974 | 35240 | 38114 |
| NC_006273 | 342 | 343 | 4719 | 9095 | 13471 | 17847 | 22223 | 26599 | 30975 | 35241 | 38115 |
| NC_006273 | 343 | 344 | 4720 | 9096 | 13472 | 17848 | 22224 | 26600 | 30976 | 35242 | 38116 |
| NC_006273 | 344 | 345 | 4721 | 9097 | 13473 | 17849 | 22225 | 26601 | 30977 | 35243 | 38117 |
| NC_006273 | 345 | 346 | 4722 | 9098 | 13474 | 17850 | 22226 | 26602 | 30978 | 35244 | 38118 |
| NC_006273 | 346 | 347 | 4723 | 9099 | 13475 | 17851 | 22227 | 26603 | 30979 | 35245 | 38119 |
| NC_006273 | 347 | 348 | 4724 | 9100 | 13476 | 17852 | 22228 | 26604 | 30980 | 35246 | 38120 |
| NC_006273 | 348 | 349 | 4725 | 9101 | 13477 | 17853 | 22229 | 26605 | 30981 | 35247 | |
| NC_006273 | 349 | 350 | 4726 | 9102 | 13478 | 17854 | 22230 | 26606 | 30982 | | 38121 |
| NC_006273 | 350 | 351 | 4727 | 9103 | 13479 | 17855 | 22231 | 26607 | 30983 | 35248 | |
| NC_006273 | 351 | 352 | 4728 | 9104 | 13480 | 17856 | 22232 | 26608 | 30984 | | 38122 |
| NC_006273 | 352 | 353 | 4729 | 9105 | 13481 | 17857 | 22233 | 26609 | 30985 | | 38123 |
| NC_006273 | 353 | 354 | 4730 | 9106 | 13482 | 17858 | 22234 | 26610 | 30986 | 35249 | 38124 |
| NC_006273 | 354 | 355 | 4731 | 9107 | 13483 | 17859 | 22235 | 26611 | 30987 | | 38125 |
| NC_006273 | 355 | 356 | 4732 | 9108 | 13484 | 17860 | 22236 | 26612 | 30988 | | 38126 |
| NC_004912 | 356 | 357 | 4733 | 9109 | 13485 | 17861 | 22237 | 26613 | 30989 | 35250 | |
| NC_004912 | 357 | 358 | 4734 | 9110 | 13486 | 17862 | 22238 | 26614 | 30990 | 35251 | 38127 |
| NC_004912 | 358 | 359 | 4735 | 9111 | 13487 | 17863 | 22239 | 26615 | 30991 | 35252 | |
| NC_004912 | 359 | 360 | 4736 | 9112 | 13488 | 17864 | 22240 | 26616 | 30992 | 35253 | |
| NC_004912 | 360 | 361 | 4737 | 9113 | 13489 | 17865 | 22241 | 26617 | 30993 | | 38128 |
| NC_004912 | 361 | 362 | 4738 | 9114 | 13490 | 17866 | 22242 | 26618 | 30994 | | 38129 |
| NC_004912 | 362 | 363 | 4739 | 9115 | 13491 | 17867 | 22243 | 26619 | 30995 | | 38130 |
| NC_026426 | 363 | 364 | 4740 | 9116 | 13492 | 17868 | 22244 | 26620 | 30996 | | 38131 |
| NC_026426 | 364 | 365 | 4741 | 9117 | 13493 | 17869 | 22245 | 26621 | 30997 | | 38132 |
| NC_026426 | 365 | 366 | 4742 | 9118 | 13494 | 17870 | 22246 | 26622 | 30998 | | 38133 |
| NC_026426 | 366 | 367 | 4743 | 9119 | 13495 | 17871 | 22247 | 26623 | 30999 | 35254 | |
| NC_001460 | 367 | 368 | 4744 | 9120 | 13496 | 17872 | 22248 | 26624 | 31000 | | 38134 |
| NC_001460 | 368 | 369 | 4745 | 9121 | 13497 | 17873 | 22249 | 26625 | 31001 | 35255 | |
| NC_001460 | 369 | 370 | 4746 | 9122 | 13498 | 17874 | 22250 | 26626 | 31002 | | 38135 |
| NC_001460 | 370 | 371 | 4747 | 9123 | 13499 | 17875 | 22251 | 26627 | 31003 | 35256 | 38136 |
| NC_001460 | 371 | 372 | 4748 | 9124 | 13500 | 17876 | 22252 | 26628 | 31004 | 35257 | |
| NC_001460 | 372 | 373 | 4749 | 9125 | 13501 | 17877 | 22253 | 26629 | 31005 | 35258 | |
| NC_001460 | 373 | 374 | 4750 | 9126 | 13502 | 17878 | 22254 | 26630 | 31006 | 35259 | |
| NC_001460 | 374 | 375 | 4751 | 9127 | 13503 | 17879 | 22255 | 26631 | 31007 | | 38137 |
| NC_001460 | 375 | 376 | 4752 | 9128 | 13504 | 17880 | 22256 | 26632 | 31008 | | 38138 |
| NC_001460 | 376 | 377 | 4753 | 9129 | 13505 | 17881 | 22257 | 26633 | 31009 | 35260 | |
| NC_001460 | 377 | 378 | 4754 | 9130 | 13506 | 17882 | 22258 | 26634 | 31010 | 35261 | 38139 |
| NC_001460 | 378 | 379 | 4755 | 9131 | 13507 | 17883 | 22259 | 26635 | 31011 | | 38140 |
| NC_001460 | 379 | 380 | 4756 | 9132 | 13508 | 17884 | 22260 | 26636 | 31012 | 35262 | |
| NC_001460 | 380 | 381 | 4757 | 9133 | 13509 | 17885 | 22261 | 26637 | 31013 | | 38141 |
| NC_001460 | 381 | 382 | 4758 | 9134 | 13510 | 17886 | 22262 | 26638 | 31014 | 35263 | |
| NC_001460 | 382 | 383 | 4759 | 9135 | 13511 | 17887 | 22263 | 26639 | 31015 | 35264 | 38142 |
| NC_001460 | 383 | 384 | 4760 | 9136 | 13512 | 17888 | 22264 | 26640 | 31016 | | 38143 |
| NC_001460 | 384 | 385 | 4761 | 9137 | 13513 | 17889 | 22265 | 26641 | 31017 | 35265 | 38144 |
| NC_001460 | 385 | 386 | 4762 | 9138 | 13514 | 17890 | 22266 | 26642 | 31018 | | 38145 |
| NC_001460 | 386 | 387 | 4763 | 9139 | 13515 | 17891 | 22267 | 26643 | 31019 | 35266 | 38146 |
| NC_001460 | 387 | 388 | 4764 | 9140 | 13516 | 17892 | 22268 | 26644 | 31020 | | 38147 |
| NC_001460 | 388 | 389 | 4765 | 9141 | 13517 | 17893 | 22269 | 26645 | 31021 | 35267 | |
| NC_001460 | 389 | 390 | 4766 | 9142 | 13518 | 17894 | 22270 | 26646 | 31022 | | 38148 |
| NC_001460 | 390 | 391 | 4767 | 9143 | 13519 | 17895 | 22271 | 26647 | 31023 | 35268 | 38149 |
| NC_001460 | 391 | 392 | 4768 | 9144 | 13520 | 17896 | 22272 | 26648 | 31024 | 35269 | 38150 |
| NC_001460 | 392 | 393 | 4769 | 9145 | 13521 | 17897 | 22273 | 26649 | 31025 | 35270 | |
| NC_001460 | 393 | 394 | 4770 | 9146 | 13522 | 17898 | 22274 | 26650 | 31026 | 35271 | |
| NC_001460 | 394 | 395 | 4771 | 9147 | 13523 | 17899 | 22275 | 26651 | 31027 | | 38151 |
| NC_001460 | 395 | 396 | 4772 | 9148 | 13524 | 17900 | 22276 | 26652 | 31028 | 35272 | 38152 |
| NC_001460 | 396 | 397 | 4773 | 9149 | 13525 | 17901 | 22277 | 26653 | 31029 | | 38153 |
| NC_001460 | 397 | 398 | 4774 | 9150 | 13526 | 17902 | 22278 | 26654 | 31030 | 35273 | 38154 |
| NC_001460 | 398 | 399 | 4775 | 9151 | 13527 | 17903 | 22279 | 26655 | 31031 | 35274 | 38155 |
| NC_001460 | 399 | 400 | 4776 | 9152 | 13528 | 17904 | 22280 | 26656 | 31032 | | 38156 |
| NC_001460 | 400 | 401 | 4777 | 9153 | 13529 | 17905 | 22281 | 26657 | 31033 | | 38157 |
| NC_001460 | 401 | 402 | 4778 | 9154 | 13530 | 17906 | 22282 | 26658 | 31034 | 35275 | |
| NC_001460 | 402 | 403 | 4779 | 9155 | 13531 | 17907 | 22283 | 26659 | 31035 | 35276 | |
| NC_001460 | 403 | 404 | 4780 | 9156 | 13532 | 17908 | 22284 | 26660 | 31036 | 35277 | 38158 |
| NC_001460 | 404 | 405 | 4781 | 9157 | 13533 | 17909 | 22285 | 26661 | 31037 | 35278 | |
| NC_001460 | 405 | 406 | 4782 | 9158 | 13534 | 17910 | 22286 | 26662 | 31038 | 35279 | |
| NC_001460 | 406 | 407 | 4783 | 9159 | 13535 | 17911 | 22287 | 26663 | 31039 | 35280 | 38159 |
| NC_001460 | 407 | 408 | 4784 | 9160 | 13536 | 17912 | 22288 | 26664 | 31040 | | 38160 |
| NC_001460 | 408 | 409 | 4785 | 9161 | 13537 | 17913 | 22289 | 26665 | 31041 | 35281 | 38161 |
| NC_001460 | 409 | 410 | 4786 | 9162 | 13538 | 17914 | 22290 | 26666 | 31042 | | 38162 |
| NC_001460 | 410 | 411 | 4787 | 9163 | 13539 | 17915 | 22291 | 26667 | 31043 | 35282 | 38163 |
| NC_001460 | 411 | 412 | 4788 | 9164 | 13540 | 17916 | 22292 | 26668 | 31044 | 35283 | 38164 |
| NC_001460 | 412 | 413 | 4789 | 9165 | 13541 | 17917 | 22293 | 26669 | 31045 | 35284 | 38165 |
| NC_001460 | 413 | 414 | 4790 | 9166 | 13542 | 17918 | 22294 | 26670 | 31046 | | 38166 |
| NC_001460 | 414 | 415 | 4791 | 9167 | 13543 | 17919 | 22295 | 26671 | 31047 | | 38167 |
| NC_001460 | 415 | 416 | 4792 | 9168 | 13544 | 17920 | 22296 | 26672 | 31048 | 35285 | |
| NC_001460 | 416 | 417 | 4793 | 9169 | 13545 | 17921 | 22297 | 26673 | 31049 | | 38168 |
| NC_001460 | 417 | 418 | 4794 | 9170 | 13546 | 17922 | 22298 | 26674 | 31050 | 35286 | |
| NC_001460 | 418 | 419 | 4795 | 9171 | 13547 | 17923 | 22299 | 26675 | 31051 | 35287 | |
| NC_001460 | 419 | 420 | 4796 | 9172 | 13548 | 17924 | 22300 | 26676 | 31052 | | 38169 |
| NC_001460 | 420 | 421 | 4797 | 9173 | 13549 | 17925 | 22301 | 26677 | 31053 | | 38170 |
| NC_001460 | 421 | 422 | 4798 | 9174 | 13550 | 17926 | 22302 | 26678 | 31054 | | 38171 |
| NC_001460 | 422 | 423 | 4799 | 9175 | 13551 | 17927 | 22303 | 26679 | 31055 | 35288 | |
| NC_001460 | 423 | 424 | 4800 | 9176 | 13552 | 17928 | 22304 | 26680 | 31056 | 35289 | |
| NC_001460 | 424 | 425 | 4801 | 9177 | 13553 | 17929 | 22305 | 26681 | 31057 | 35290 | 38172 |
| NC_001460 | 425 | 426 | 4802 | 9178 | 13554 | 17930 | 22306 | 26682 | 31058 | 35291 | |
| NC_001460 | 426 | 427 | 4803 | 9179 | 13555 | 17931 | 22307 | 26683 | 31059 | 35292 | 38173 |
| NC_001460 | 427 | 428 | 4804 | 9180 | 13556 | 17932 | 22308 | 26684 | 31060 | 35293 | 38174 |
| NC_001460 | 428 | 429 | 4805 | 9181 | 13557 | 17933 | 22309 | 26685 | 31061 | 35294 | |
| NC_001460 | 429 | 430 | 4806 | 9182 | 13558 | 17934 | 22310 | 26686 | 31062 | 35295 | 38175 |
| NC_001460 | 430 | 431 | 4807 | 9183 | 13559 | 17935 | 22311 | 26687 | 31063 | 35296 | |
| NC_001460 | 431 | 432 | 4808 | 9184 | 13560 | 17936 | 22312 | 26688 | 31064 | 35297 | 38176 |
| NC_001460 | 432 | 433 | 4809 | 9185 | 13561 | 17937 | 22313 | 26689 | 31065 | 35298 | 38177 |
| NC_001460 | 433 | 434 | 4810 | 9186 | 13562 | 17938 | 22314 | 26690 | 31066 | | 38178 |
| NC_001460 | 434 | 435 | 4811 | 9187 | 13563 | 17939 | 22315 | 26691 | 31067 | 35299 | |
| NC_001460 | 435 | 436 | 4812 | 9188 | 13564 | 17940 | 22316 | 26692 | 31068 | | 38179 |
| NC_001460 | 436 | 437 | 4813 | 9189 | 13565 | 17941 | 22317 | 26693 | 31069 | 35300 | |
| NC_001460 | 437 | 438 | 4814 | 9190 | 13566 | 17942 | 22318 | 26694 | 31070 | | 38180 |
| NC_001460 | 438 | 439 | 4815 | 9191 | 13567 | 17943 | 22319 | 26695 | 31071 | | 38181 |
| NC_001460 | 439 | 440 | 4816 | 9192 | 13568 | 17944 | 22320 | 26696 | 31072 | | 38182 |
| NC_001460 | 440 | 441 | 4817 | 9193 | 13569 | 17945 | 22321 | 26697 | 31073 | 35301 | |
| NC_001460 | 441 | 442 | 4818 | 9194 | 13570 | 17946 | 22322 | 26698 | 31074 | | 38183 |
| NC_001460 | 442 | 443 | 4819 | 9195 | 13571 | 17947 | 22323 | 26699 | 31075 | 35302 | 38184 |
| NC_001460 | 443 | 444 | 4820 | 9196 | 13572 | 17948 | 22324 | 26700 | 31076 | | 38185 |
| NC_001460 | 444 | 445 | 4821 | 9197 | 13573 | 17949 | 22325 | 26701 | 31077 | | 38186 |
| NC_001460 | 445 | 446 | 4822 | 9198 | 13574 | 17950 | 22326 | 26702 | 31078 | | 38187 |
| NC_001460 | 446 | 447 | 4823 | 9199 | 13575 | 17951 | 22327 | 26703 | 31079 | 35303 | |
| NC_001460 | 447 | 448 | 4824 | 9200 | 13576 | 17952 | 22328 | 26704 | 31080 | 35304 | |
| NC_001460 | 448 | 449 | 4825 | 9201 | 13577 | 17953 | 22329 | 26705 | 31081 | 35305 | |
| NC_001460 | 449 | 450 | 4826 | 9202 | 13578 | 17954 | 22330 | 26706 | 31082 | 35306 | |
| NC_001460 | 450 | 451 | 4827 | 9203 | 13579 | 17955 | 22331 | 26707 | 31083 | 35307 | |
| NC_001460 | 451 | 452 | 4828 | 9204 | 13580 | 17956 | 22332 | 26708 | 31084 | | 38188 |
| NC_001460 | 452 | 453 | 4829 | 9205 | 13581 | 17957 | 22333 | 26709 | 31085 | | 38189 |
| NC_001460 | 453 | 454 | 4830 | 9206 | 13582 | 17958 | 22334 | 26710 | 31086 | 35308 | |
| NC_001460 | 454 | 455 | 4831 | 9207 | 13583 | 17959 | 22335 | 26711 | 31087 | 35309 | |
| NC_001460 | 455 | 456 | 4832 | 9208 | 13584 | 17960 | 22336 | 26712 | 31088 | | 38190 |
| NC_001460 | 456 | 457 | 4833 | 9209 | 13585 | 17961 | 22337 | 26713 | 31089 | 35310 | |
| NC_038878 | 457 | 458 | 4834 | 9210 | 13586 | 17962 | 22338 | 26714 | 31090 | 35311 | |
| NC_038878 | 458 | 459 | 4835 | 9211 | 13587 | 17963 | 22339 | 26715 | 31091 | 35312 | |
| NC_038878 | 459 | 460 | 4836 | 9212 | 13588 | 17964 | 22340 | 26716 | 31092 | 35313 | |
| NC_038878 | 460 | 461 | 4837 | 9213 | 13589 | 17965 | 22341 | 26717 | 31093 | | 38191 |
| NC_038878 | 461 | 462 | 4838 | 9214 | 13590 | 17966 | 22342 | 26718 | 31094 | 35314 | 38192 |
| NC_038878 | 462 | 463 | 4839 | 9215 | 13591 | 17967 | 22343 | 26719 | 31095 | 35315 | |
| NC_038878 | 463 | 464 | 4840 | 9216 | 13592 | 17968 | 22344 | 26720 | 31096 | 35316 | |
| NC_038878 | 464 | 465 | 4841 | 9217 | 13593 | 17969 | 22345 | 26721 | 31097 | 35317 | |
| NC_038878 | 465 | 466 | 4842 | 9218 | 13594 | 17970 | 22346 | 26722 | 31098 | | 38193 |
| NC_038878 | 466 | 467 | 4843 | 9219 | 13595 | 17971 | 22347 | 26723 | 31099 | 35318 | |
| NC_038878 | 467 | 468 | 4844 | 9220 | 13596 | 17972 | 22348 | 26724 | 31100 | 35319 | |
| NC_038878 | 468 | 469 | 4845 | 9221 | 13597 | 17973 | 22349 | 26725 | 31101 | 35320 | |
| NC_038878 | 469 | 470 | 4846 | 9222 | 13598 | 17974 | 22350 | 26726 | 31102 | 35321 | |
| NC_038878 | 470 | 471 | 4847 | 9223 | 13599 | 17975 | 22351 | 26727 | 31103 | | 38194 |
| NC_038878 | 471 | 472 | 4848 | 9224 | 13600 | 17976 | 22352 | 26728 | 31104 | 35322 | |
| NC_001457 | 472 | 473 | 4849 | 9225 | 13601 | 17977 | 22353 | 26729 | 31105 | | 38195 |
| NC_001457 | 473 | 474 | 4850 | 9226 | 13602 | 17978 | 22354 | 26730 | 31106 | 35323 | 38196 |
| NC_001457 | 474 | 475 | 4851 | 9227 | 13603 | 17979 | 22355 | 26731 | 31107 | 35324 | |
| NC_001457 | 475 | 476 | 4852 | 9228 | 13604 | 17980 | 22356 | 26732 | 31108 | 35325 | |
| NC_001457 | 476 | 477 | 4853 | 9229 | 13605 | 17981 | 22357 | 26733 | 31109 | 35326 | |
| NC_001457 | 477 | 478 | 4854 | 9230 | 13606 | 17982 | 22358 | 26734 | 31110 | 35327 | |
| NC_001457 | 478 | 479 | 4855 | 9231 | 13607 | 17983 | 22359 | 26735 | 31111 | | 38197 |
| NC_001457 | 479 | 480 | 4856 | 9232 | 13608 | 17984 | 22360 | 26736 | 31112 | 35328 | |
| NC_001457 | 480 | 481 | 4857 | 9233 | 13609 | 17985 | 22361 | 26737 | 31113 | | 38198 |
| NC_001457 | 481 | 482 | 4858 | 9234 | 13610 | 17986 | 22362 | 26738 | 31114 | | 38199 |
| NC_001457 | 482 | 483 | 4859 | 9235 | 13611 | 17987 | 22363 | 26739 | 31115 | 35329 | |
| NC_001457 | 483 | 484 | 4860 | 9236 | 13612 | 17988 | 22364 | 26740 | 31116 | 35330 | 38200 |
| NC_001457 | 484 | 485 | 4861 | 9237 | 13613 | 17989 | 22365 | 26741 | 31117 | 35331 | 38201 |
| NC_001457 | 485 | 486 | 4862 | 9238 | 13614 | 17990 | 22366 | 26742 | 31118 | 35332 | |
| NC_001457 | 486 | 487 | 4863 | 9239 | 13615 | 17991 | 22367 | 26743 | 31119 | | 38202 |
| NC_001457 | 487 | 488 | 4864 | 9240 | 13616 | 17992 | 22368 | 26744 | 31120 | | 38203 |
| NC_001457 | 488 | 489 | 4865 | 9241 | 13617 | 17993 | 22369 | 26745 | 31121 | | 38204 |
| NC_001457 | 489 | 490 | 4866 | 9242 | 13618 | 17994 | 22370 | 26746 | 31122 | | 38205 |
| NC_001716 | 490 | 491 | 4867 | 9243 | 13619 | 17995 | 22371 | 26747 | 31123 | 35333 | 38206 |
| NC_001716 | 491 | 492 | 4868 | 9244 | 13620 | 17996 | 22372 | 26748 | 31124 | 35334 | |
| NC_001716 | 492 | 493 | 4869 | 9245 | 13621 | 17997 | 22373 | 26749 | 31125 | | 38207 |
| NC_001716 | 493 | 494 | 4870 | 9246 | 13622 | 17998 | 22374 | 26750 | 31126 | 35335 | 38208 |
| NC_006308 | 494 | 495 | 4871 | 9247 | 13623 | 17999 | 22375 | 26751 | 31127 | 35336 | |
| NC_006308 | 495 | 496 | 4872 | 9248 | 13624 | 18000 | 22376 | 26752 | 31128 | 35337 | |
| NC_006308 | 496 | 497 | 4873 | 9249 | 13625 | 18001 | 22377 | 26753 | 31129 | 35338 | |
| NC_006308 | 497 | 498 | 4874 | 9250 | 13626 | 18002 | 22378 | 26754 | 31130 | 35339 | |
| NC_006308 | 498 | 499 | 4875 | 9251 | 13627 | 18003 | 22379 | 26755 | 31131 | 35340 | 38209 |
| NC_001355 | 499 | 500 | 4876 | 9252 | 13628 | 18004 | 22380 | 26756 | 31132 | 35341 | |
| NC_001355 | 500 | 501 | 4877 | 9253 | 13629 | 18005 | 22381 | 26757 | 31133 | | 38210 |
| NC_001355 | 501 | 502 | 4878 | 9254 | 13630 | 18006 | 22382 | 26758 | 31134 | | 38211 |
| NC_001355 | 502 | 503 | 4879 | 9255 | 13631 | 18007 | 22383 | 26759 | 31135 | 35342 | 38212 |
| NC_001355 | 503 | 504 | 4880 | 9256 | 13632 | 18008 | 22384 | 26760 | 31136 | | 38213 |
| NC_001355 | 504 | 505 | 4881 | 9257 | 13633 | 18009 | 22385 | 26761 | 31137 | 35343 | |
| NC_001355 | 505 | 506 | 4882 | 9258 | 13634 | 18010 | 22386 | 26762 | 31138 | 35344 | |
| NC_001355 | 506 | 507 | 4883 | 9259 | 13635 | 18011 | 22387 | 26763 | 31139 | | 38214 |
| NC_001355 | 507 | 508 | 4884 | 9260 | 13636 | 18012 | 22388 | 26764 | 31140 | 35345 | |
| NC_001355 | 508 | 509 | 4885 | 9261 | 13637 | 18013 | 22389 | 26765 | 31141 | | 38215 |
| NC_001355 | 509 | 510 | 4886 | 9262 | 13638 | 18014 | 22390 | 26766 | 31142 | 35346 | |
| NC_001355 | 510 | 511 | 4887 | 9263 | 13639 | 18015 | 22391 | 26767 | 31143 | 35347 | |
| NC_001355 | 511 | 512 | 4888 | 9264 | 13640 | 18016 | 22392 | 26768 | 31144 | 35348 | 38216 |
| NC_001355 | 512 | 513 | 4889 | 9265 | 13641 | 18017 | 22393 | 26769 | 31145 | 35349 | |
| NC_001355 | 513 | 514 | 4890 | 9266 | 13642 | 18018 | 22394 | 26770 | 31146 | 35350 | |
| NC_001355 | 514 | 515 | 4891 | 9267 | 13643 | 18019 | 22395 | 26771 | 31147 | 35351 | |
| NC_001355 | 515 | 516 | 4892 | 9268 | 13644 | 18020 | 22396 | 26772 | 31148 | 35352 | |
| NC_001355 | 516 | 517 | 4893 | 9269 | 13645 | 18021 | 22397 | 26773 | 31149 | 35353 | |
| NC_009825 | 517 | 518 | 4894 | 9270 | 13646 | 18022 | 22398 | 26774 | 31150 | | 38217 |
| NC_009825 | 518 | 519 | 4895 | 9271 | 13647 | 18023 | 22399 | 26775 | 31151 | 35354 | 38218 |
| NC_009825 | 519 | 520 | 4896 | 9272 | 13648 | 18024 | 22400 | 26776 | 31152 | | 38219 |
| NC_009825 | 520 | 521 | 4897 | 9273 | 13649 | 18025 | 22401 | 26777 | 31153 | 35355 | 38220 |
| NC_009825 | 521 | 522 | 4898 | 9274 | 13650 | 18026 | 22402 | 26778 | 31154 | | 38221 |
| NC_009825 | 522 | 523 | 4899 | 9275 | 13651 | 18027 | 22403 | 26779 | 31155 | 35356 | 38222 |
| NC_009825 | 523 | 524 | 4900 | 9276 | 13652 | 18028 | 22404 | 26780 | 31156 | | 38223 |
| NC_009825 | 524 | 525 | 4901 | 9277 | 13653 | 18029 | 22405 | 26781 | 31157 | 35357 | |
| NC_009825 | 525 | 526 | 4902 | 9278 | 13654 | 18030 | 22406 | 26782 | 31158 | 35358 | 38224 |
| NC_009825 | 526 | 527 | 4903 | 9279 | 13655 | 18031 | 22407 | 26783 | 31159 | 35359 | |
| NC_009825 | 527 | 528 | 4904 | 9280 | 13656 | 18032 | 22408 | 26784 | 31160 | 35360 | 38225 |
| NC_009825 | 528 | 529 | 4905 | 9281 | 13657 | 18033 | 22409 | 26785 | 31161 | | 38226 |
| NC_009825 | 529 | 530 | 4906 | 9282 | 13658 | 18034 | 22410 | 26786 | 31162 | 35361 | 38227 |
| NC_009825 | 530 | 531 | 4907 | 9283 | 13659 | 18035 | 22411 | 26787 | 31163 | | 38228 |
| NC_009825 | 531 | 532 | 4908 | 9284 | 13660 | 18036 | 22412 | 26788 | 31164 | 35362 | |
| NC_009825 | 532 | 533 | 4909 | 9285 | 13661 | 18037 | 22413 | 26789 | 31165 | | 38229 |
| NC_009825 | 533 | 534 | 4910 | 9286 | 13662 | 18038 | 22414 | 26790 | 31166 | 35363 | 38230 |
| NC_009825 | 534 | 535 | 4911 | 9287 | 13663 | 18039 | 22415 | 26791 | 31167 | 35364 | 38231 |
| NC_009825 | 535 | 536 | 4912 | 9288 | 13664 | 18040 | 22416 | 26792 | 31168 | | 38232 |
| NC_009825 | 536 | 537 | 4913 | 9289 | 13665 | 18041 | 22417 | 26793 | 31169 | 35365 | |
| NC_009825 | 537 | 538 | 4914 | 9290 | 13666 | 18042 | 22418 | 26794 | 31170 | | 38233 |
| NC_009825 | 538 | 539 | 4915 | 9291 | 13667 | 18043 | 22419 | 26795 | 31171 | 35366 | |
| NC_009825 | 539 | 540 | 4916 | 9292 | 13668 | 18044 | 22420 | 26796 | 31172 | 35367 | |
| NC_009825 | 540 | 541 | 4917 | 9293 | 13669 | 18045 | 22421 | 26797 | 31173 | 35368 | |
| NC_009825 | 541 | 542 | 4918 | 9294 | 13670 | 18046 | 22422 | 26798 | 31174 | 35369 | |
| NC_009825 | 542 | 543 | 4919 | 9295 | 13671 | 18047 | 22423 | 26799 | 31175 | | 38234 |
| NC_009825 | 543 | 544 | 4920 | 9296 | 13672 | 18048 | 22424 | 26800 | 31176 | 35370 | 38235 |
| NC_009825 | 544 | 545 | 4921 | 9297 | 13673 | 18049 | 22425 | 26801 | 31177 | | 38236 |
| NC_009825 | 545 | 546 | 4922 | 9298 | 13674 | 18050 | 22426 | 26802 | 31178 | | 38237 |
| NC_001490 | 546 | 547 | 4923 | 9299 | 13675 | 18051 | 22427 | 26803 | 31179 | 35371 | |
| NC_001490 | 547 | 548 | 4924 | 9300 | 13676 | 18052 | 22428 | 26804 | 31180 | | 38238 |
| NC_001490 | 548 | 549 | 4925 | 9301 | 13677 | 18053 | 22429 | 26805 | 31181 | 35372 | |
| NC_001490 | 549 | 550 | 4926 | 9302 | 13678 | 18054 | 22430 | 26806 | 31182 | 35373 | |
| NC_001490 | 550 | 551 | 4927 | 9303 | 13679 | 18055 | 22431 | 26807 | 31183 | 35374 | |
| NC_001490 | 551 | 552 | 4928 | 9304 | 13680 | 18056 | 22432 | 26808 | 31184 | | 38239 |
| NC_001490 | 552 | 553 | 4929 | 9305 | 13681 | 18057 | 22433 | 26809 | 31185 | 35375 | |
| NC_001490 | 553 | 554 | 4930 | 9306 | 13682 | 18058 | 22434 | 26810 | 31186 | 35376 | |
| NC_001490 | 554 | 555 | 4931 | 9307 | 13683 | 18059 | 22435 | 26811 | 31187 | 35377 | |
| NC_001490 | 555 | 556 | 4932 | 9308 | 13684 | 18060 | 22436 | 26812 | 31188 | 35378 | 38240 |
| NC_001490 | 556 | 557 | 4933 | 9309 | 13685 | 18061 | 22437 | 26813 | 31189 | 35379 | 38241 |
| NC_001490 | 557 | 558 | 4934 | 9310 | 13686 | 18062 | 22438 | 26814 | 31190 | 35380 | |
| NC_001490 | 558 | 559 | 4935 | 9311 | 13687 | 18063 | 22439 | 26815 | 31191 | | 38242 |
| NC_001490 | 559 | 560 | 4936 | 9312 | 13688 | 18064 | 22440 | 26816 | 31192 | 35381 | |
| NC_001490 | 560 | 561 | 4937 | 9313 | 13689 | 18065 | 22441 | 26817 | 31193 | 35382 | 38243 |
| NC_001490 | 561 | 562 | 4938 | 9314 | 13690 | 18066 | 22442 | 26818 | 31194 | 35383 | |
| NC_001490 | 562 | 563 | 4939 | 9315 | 13691 | 18067 | 22443 | 26819 | 31195 | | 38244 |
| NC_026817 | 563 | 564 | 4940 | 9316 | 13692 | 18068 | 22444 | 26820 | 31196 | | 38245 |
| NC_026817 | 564 | 565 | 4941 | 9317 | 13693 | 18069 | 22445 | 26821 | 31197 | 35384 | 38246 |
| NC_026817 | 565 | 566 | 4942 | 9318 | 13694 | 18070 | 22446 | 26822 | 31198 | | 38247 |
| NC_026817 | 566 | 567 | 4943 | 9319 | 13695 | 18071 | 22447 | 26823 | 31199 | 35385 | |
| NC_026817 | 567 | 568 | 4944 | 9320 | 13696 | 18072 | 22448 | 26824 | 31200 | 35386 | 38248 |
| NC_017996 | 568 | 569 | 4945 | 9321 | 13697 | 18073 | 22449 | 26825 | 31201 | | 38249 |
| NC_017996 | 569 | 570 | 4946 | 9322 | 13698 | 18074 | 22450 | 26826 | 31202 | | 38250 |
| NC_017996 | 570 | 571 | 4947 | 9323 | 13699 | 18075 | 22451 | 26827 | 31203 | | 38251 |
| NC_017996 | 571 | 572 | 4948 | 9324 | 13700 | 18076 | 22452 | 26828 | 31204 | 35387 | |
| NC_017996 | 572 | 573 | 4949 | 9325 | 13701 | 18077 | 22453 | 26829 | 31205 | | 38252 |
| NC_017996 | 573 | 574 | 4950 | 9326 | 13702 | 18078 | 22454 | 26830 | 31206 | 35388 | |
| NC_017996 | 574 | 575 | 4951 | 9327 | 13703 | 18079 | 22455 | 26831 | 31207 | 35389 | |
| NC_017996 | 575 | 576 | 4952 | 9328 | 13704 | 18080 | 22456 | 26832 | 31208 | 35390 | |
| NC_017996 | 576 | 577 | 4953 | 9329 | 13705 | 18081 | 22457 | 26833 | 31209 | | 38253 |
| NC_017996 | 577 | 578 | 4954 | 9330 | 13706 | 18082 | 22458 | 26834 | 31210 | | 38254 |
| NC_017996 | 578 | 579 | 4955 | 9331 | 13707 | 18083 | 22459 | 26835 | 31211 | | 38255 |
| NC_017996 | 579 | 580 | 4956 | 9332 | 13708 | 18084 | 22460 | 26836 | 31212 | 35391 | |
| NC_017996 | 580 | 581 | 4957 | 9333 | 13709 | 18085 | 22461 | 26837 | 31213 | 35392 | |
| NC_017996 | 581 | 582 | 4958 | 9334 | 13710 | 18086 | 22462 | 26838 | 31214 | | 38256 |
| NC_017996 | 582 | 583 | 4959 | 9335 | 13711 | 18087 | 22463 | 26839 | 31215 | 35393 | |
| NC_017996 | 583 | 584 | 4960 | 9336 | 13712 | 18088 | 22464 | 26840 | 31216 | 35394 | |
| NC_001434 | 584 | 585 | 4961 | 9337 | 13713 | 18089 | 22465 | 26841 | 31217 | 35395 | 38257 |
| NC_001434 | 585 | 586 | 4962 | 9338 | 13714 | 18090 | 22466 | 26842 | 31218 | 35396 | |
| NC_001434 | 586 | 587 | 4963 | 9339 | 13715 | 18091 | 22467 | 26843 | 31219 | 35397 | 38258 |
| NC_001434 | 587 | 588 | 4964 | 9340 | 13716 | 18092 | 22468 | 26844 | 31220 | 35398 | 38259 |
| NC_001434 | 588 | 589 | 4965 | 9341 | 13717 | 18093 | 22469 | 26845 | 31221 | | 38260 |
| NC_001434 | 589 | 590 | 4966 | 9342 | 13718 | 18094 | 22470 | 26846 | 31222 | 35399 | |
| NC_001434 | 590 | 591 | 4967 | 9343 | 13719 | 18095 | 22471 | 26847 | 31223 | | 38261 |
| NC_001434 | 591 | 592 | 4968 | 9344 | 13720 | 18096 | 22472 | 26848 | 31224 | | 38262 |
| NC_001434 | 592 | 593 | 4969 | 9345 | 13721 | 18097 | 22473 | 26849 | 31225 | 35400 | 38263 |
| NC_001434 | 593 | 594 | 4970 | 9346 | 13722 | 18098 | 22474 | 26850 | 31226 | 35401 | 38264 |
| NC_001434 | 594 | 595 | 4971 | 9347 | 13723 | 18099 | 22475 | 26851 | 31227 | | 38265 |
| NC_001434 | 595 | 596 | 4972 | 9348 | 13724 | 18100 | 22476 | 26852 | 31228 | 35402 | 38266 |
| NC_001434 | 596 | 597 | 4973 | 9349 | 13725 | 18101 | 22477 | 26853 | 31229 | 35403 | |
| NC_001434 | 597 | 598 | 4974 | 9350 | 13726 | 18102 | 22478 | 26854 | 31230 | 35404 | 38267 |
| NC_001434 | 598 | 599 | 4975 | 9351 | 13727 | 18103 | 22479 | 26855 | 31231 | 35405 | |
| NC_001434 | 599 | 600 | 4976 | 9352 | 13728 | 18104 | 22480 | 26856 | 31232 | | 38268 |
| NC_001434 | 600 | 601 | 4977 | 9353 | 13729 | 18105 | 22481 | 26857 | 31233 | | 38269 |
| NC_001434 | 601 | 602 | 4978 | 9354 | 13730 | 18106 | 22482 | 26858 | 31234 | 35406 | 38270 |
| NC_001434 | 602 | 603 | 4979 | 9355 | 13731 | 18107 | 22483 | 26859 | 31235 | 35407 | |
| NC_001434 | 603 | 604 | 4980 | 9356 | 13732 | 18108 | 22484 | 26860 | 31236 | 35408 | 38271 |
| NC_001348 | 604 | 605 | 4981 | 9357 | 13733 | 18109 | 22485 | 26861 | 31237 | 35409 | |
| NC_001348 | 605 | 606 | 4982 | 9358 | 13734 | 18110 | 22486 | 26862 | 31238 | | 38272 |
| NC_001348 | 606 | 607 | 4983 | 9359 | 13735 | 18111 | 22487 | 26863 | 31239 | | 38273 |
| NC_001348 | 607 | 608 | 4984 | 9360 | 13736 | 18112 | 22488 | 26864 | 31240 | | 38274 |
| NC_001348 | 608 | 609 | 4985 | 9361 | 13737 | 18113 | 22489 | 26865 | 31241 | 35410 | |
| NC_001348 | 609 | 610 | 4986 | 9362 | 13738 | 18114 | 22490 | 26866 | 31242 | | 38275 |
| NC_001348 | 610 | 611 | 4987 | 9363 | 13739 | 18115 | 22491 | 26867 | 31243 | | 38276 |
| NC_001348 | 611 | 612 | 4988 | 9364 | 13740 | 18116 | 22492 | 26868 | 31244 | | 38277 |
| NC_001348 | 612 | 613 | 4989 | 9365 | 13741 | 18117 | 22493 | 26869 | 31245 | 35411 | |
| NC_001348 | 613 | 614 | 4990 | 9366 | 13742 | 18118 | 22494 | 26870 | 31246 | 35412 | |
| NC_001348 | 614 | 615 | 4991 | 9367 | 13743 | 18119 | 22495 | 26871 | 31247 | 35413 | |
| NC_001348 | 615 | 616 | 4992 | 9368 | 13744 | 18120 | 22496 | 26872 | 31248 | 35414 | |
| NC_001348 | 616 | 617 | 4993 | 9369 | 13745 | 18121 | 22497 | 26873 | 31249 | 35415 | 38278 |
| NC_001348 | 617 | 618 | 4994 | 9370 | 13746 | 18122 | 22498 | 26874 | 31250 | 35416 | |
| NC_001348 | 618 | 619 | 4995 | 9371 | 13747 | 18123 | 22499 | 26875 | 31251 | | 38279 |
| NC_001348 | 619 | 620 | 4996 | 9372 | 13748 | 18124 | 22500 | 26876 | 31252 | 35417 | 38280 |
| NC_001802 | 620 | 621 | 4997 | 9373 | 13749 | 18125 | 22501 | 26877 | 31253 | 35418 | |
| NC_001802 | 621 | 622 | 4998 | 9374 | 13750 | 18126 | 22502 | 26878 | 31254 | | 38281 |
| NC_001802 | 622 | 623 | 4999 | 9375 | 13751 | 18127 | 22503 | 26879 | 31255 | 35419 | |
| NC_001802 | 623 | 624 | 5000 | 9376 | 13752 | 18128 | 22504 | 26880 | 31256 | | 38282 |
| NC_001802 | 624 | 625 | 5001 | 9377 | 13753 | 18129 | 22505 | 26881 | 31257 | 35420 | |
| NC_001802 | 625 | 626 | 5002 | 9378 | 13754 | 18130 | 22506 | 26882 | 31258 | 35421 | |
| NC_001802 | 626 | 627 | 5003 | 9379 | 13755 | 18131 | 22507 | 26883 | 31259 | | 38283 |
| NC_001802 | 627 | 628 | 5004 | 9380 | 13756 | 18132 | 22508 | 26884 | 31260 | 35422 | |
| NC_001802 | 628 | 629 | 5005 | 9381 | 13757 | 18133 | 22509 | 26885 | 31261 | 35423 | |
| NC_001802 | 629 | 630 | 5006 | 9382 | 13758 | 18134 | 22510 | 26886 | 31262 | 35424 | |
| NC_001802 | 630 | 631 | 5007 | 9383 | 13759 | 18135 | 22511 | 26887 | 31263 | 35425 | 38284 |
| NC_001802 | 631 | 632 | 5008 | 9384 | 13760 | 18136 | 22512 | 26888 | 31264 | 35426 | 38285 |
| NC_001802 | 632 | 633 | 5009 | 9385 | 13761 | 18137 | 22513 | 26889 | 31265 | | 38286 |
| NC_001802 | 633 | 634 | 5010 | 9386 | 13762 | 18138 | 22514 | 26890 | 31266 | 35427 | |
| NC_001802 | 634 | 635 | 5011 | 9387 | 13763 | 18139 | 22515 | 26891 | 31267 | | 38287 |
| NC_001802 | 635 | 636 | 5012 | 9388 | 13764 | 18140 | 22516 | 26892 | 31268 | | 38288 |
| NC_001802 | 636 | 637 | 5013 | 9389 | 13765 | 18141 | 22517 | 26893 | 31269 | | 38289 |
| NC_001802 | 637 | 638 | 5014 | 9390 | 13766 | 18142 | 22518 | 26894 | 31270 | 35428 | |
| NC_001798 | 638 | 639 | 5015 | 9391 | 13767 | 18143 | 22519 | 26895 | 31271 | 35429 | |
| NC_001798 | 639 | 640 | 5016 | 9392 | 13768 | 18144 | 22520 | 26896 | 31272 | 35430 | |
| NC_001798 | 640 | 641 | 5017 | 9393 | 13769 | 18145 | 22521 | 26897 | 31273 | 35431 | |
| NC_001798 | 641 | 642 | 5018 | 9394 | 13770 | 18146 | 22522 | 26898 | 31274 | 35432 | |
| NC_001798 | 642 | 643 | 5019 | 9395 | 13771 | 18147 | 22523 | 26899 | 31275 | 35433 | 38290 |
| NC_001798 | 643 | 644 | 5020 | 9396 | 13772 | 18148 | 22524 | 26900 | 31276 | | 38291 |
| NC_001798 | 644 | 645 | 5021 | 9397 | 13773 | 18149 | 22525 | 26901 | 31277 | | 38292 |
| NC_001798 | 645 | 646 | 5022 | 9398 | 13774 | 18150 | 22526 | 26902 | 31278 | 35434 | 38293 |
| NC_001798 | 646 | 647 | 5023 | 9399 | 13775 | 18151 | 22527 | 26903 | 31279 | 35435 | 38294 |
| NC_001798 | 647 | 648 | 5024 | 9400 | 13776 | 18152 | 22528 | 26904 | 31280 | | 38295 |
| NC_001798 | 648 | 649 | 5025 | 9401 | 13777 | 18153 | 22529 | 26905 | 31281 | 35436 | 38296 |
| NC_001798 | 649 | 650 | 5026 | 9402 | 13778 | 18154 | 22530 | 26906 | 31282 | 35437 | 38297 |
| NC_001798 | 650 | 651 | 5027 | 9403 | 13779 | 18155 | 22531 | 26907 | 31283 | 35438 | |
| NC_001798 | 651 | 652 | 5028 | 9404 | 13780 | 18156 | 22532 | 26908 | 31284 | | 38298 |
| NC_001798 | 652 | 653 | 5029 | 9405 | 13781 | 18157 | 22533 | 26909 | 31285 | 35439 | 38299 |
| NC_001798 | 653 | 654 | 5030 | 9406 | 13782 | 18158 | 22534 | 26910 | 31286 | | 38300 |
| NC_001798 | 654 | 655 | 5031 | 9407 | 13783 | 18159 | 22535 | 26911 | 31287 | | 38301 |
| NC_001798 | 655 | 656 | 5032 | 9408 | 13784 | 18160 | 22536 | 26912 | 31288 | 35440 | 38302 |
| NC_001798 | 656 | 657 | 5033 | 9409 | 13785 | 18161 | 22537 | 26913 | 31289 | 35441 | 38303 |
| NC_001798 | 657 | 658 | 5034 | 9410 | 13786 | 18162 | 22538 | 26914 | 31290 | 35442 | 38304 |
| NC_001798 | 658 | 659 | 5035 | 9411 | 13787 | 18163 | 22539 | 26915 | 31291 | | 38305 |
| NC_001798 | 659 | 660 | 5036 | 9412 | 13788 | 18164 | 22540 | 26916 | 31292 | | 38306 |
| NC_001798 | 660 | 661 | 5037 | 9413 | 13789 | 18165 | 22541 | 26917 | 31293 | 35443 | 38307 |
| NC_001798 | 661 | 662 | 5038 | 9414 | 13790 | 18166 | 22542 | 26918 | 31294 | 35444 | 38308 |
| NC_001798 | 662 | 663 | 5039 | 9415 | 13791 | 18167 | 22543 | 26919 | 31295 | | 38309 |
| NC_001798 | 663 | 664 | 5040 | 9416 | 13792 | 18168 | 22544 | 26920 | 31296 | | 38310 |
| NC_001798 | 664 | 665 | 5041 | 9417 | 13793 | 18169 | 22545 | 26921 | 31297 | 35445 | |
| NC_001798 | 665 | 666 | 5042 | 9418 | 13794 | 18170 | 22546 | 26922 | 31298 | | 38311 |
| NC_001798 | 666 | 667 | 5043 | 9419 | 13795 | 18171 | 22547 | 26923 | 31299 | | 38312 |
| NC_001798 | 667 | 668 | 5044 | 9420 | 13796 | 18172 | 22548 | 26924 | 31300 | 35446 | |
| NC_001798 | 668 | 669 | 5045 | 9421 | 13797 | 18173 | 22549 | 26925 | 31301 | 35447 | |
| NC_001798 | 669 | 670 | 5046 | 9422 | 13798 | 18174 | 22550 | 26926 | 31302 | 35448 | 38313 |
| NC_001798 | 670 | 671 | 5047 | 9423 | 13799 | 18175 | 22551 | 26927 | 31303 | | 38314 |
| NC_001798 | 671 | 672 | 5048 | 9424 | 13800 | 18176 | 22552 | 26928 | 31304 | | 38315 |
| NC_001798 | 672 | 673 | 5049 | 9425 | 13801 | 18177 | 22553 | 26929 | 31305 | | 38316 |
| NC_001798 | 673 | 674 | 5050 | 9426 | 13802 | 18178 | 22554 | 26930 | 31306 | 35449 | |
| NC_001798 | 674 | 675 | 5051 | 9427 | 13803 | 18179 | 22555 | 26931 | 31307 | 35450 | |
| NC_001798 | 675 | 676 | 5052 | 9428 | 13804 | 18180 | 22556 | 26932 | 31308 | | 38317 |
| NC_001798 | 676 | 677 | 5053 | 9429 | 13805 | 18181 | 22557 | 26933 | 31309 | 35451 | 38318 |
| NC_001798 | 677 | 678 | 5054 | 9430 | 13806 | 18182 | 22558 | 26934 | 31310 | | 38319 |
| NC_001798 | 678 | 679 | 5055 | 9431 | 13807 | 18183 | 22559 | 26935 | 31311 | 35452 | 38320 |
| NC_001798 | 679 | 680 | 5056 | 9432 | 13808 | 18184 | 22560 | 26936 | 31312 | 35453 | 38321 |
| NC_001798 | 680 | 681 | 5057 | 9433 | 13809 | 18185 | 22561 | 26937 | 31313 | 35454 | |
| NC_001798 | 681 | 682 | 5058 | 9434 | 13810 | 18186 | 22562 | 26938 | 31314 | 35455 | 38322 |
| NC_001798 | 682 | 683 | 5059 | 9435 | 13811 | 18187 | 22563 | 26939 | 31315 | 35456 | |
| NC_001798 | 683 | 684 | 5060 | 9436 | 13812 | 18188 | 22564 | 26940 | 31316 | 35457 | |
| NC_001798 | 684 | 685 | 5061 | 9437 | 13813 | 18189 | 22565 | 26941 | 31317 | | 38323 |
| NC_001798 | 685 | 686 | 5062 | 9438 | 13814 | 18190 | 22566 | 26942 | 31318 | 35458 | 38324 |
| NC_001798 | 686 | 687 | 5063 | 9439 | 13815 | 18191 | 22567 | 26943 | 31319 | 35459 | 38325 |
| NC_001798 | 687 | 688 | 5064 | 9440 | 13816 | 18192 | 22568 | 26944 | 31320 | | 38326 |
| NC_001798 | 688 | 689 | 5065 | 9441 | 13817 | 18193 | 22569 | 26945 | 31321 | 35460 | 38327 |
| NC_001798 | 689 | 690 | 5066 | 9442 | 13818 | 18194 | 22570 | 26946 | 31322 | 35461 | |
| NC_001798 | 690 | 691 | 5067 | 9443 | 13819 | 18195 | 22571 | 26947 | 31323 | 35462 | 38328 |
| NC_001798 | 691 | 692 | 5068 | 9444 | 13820 | 18196 | 22572 | 26948 | 31324 | | 38329 |
| NC_001798 | 692 | 693 | 5069 | 9445 | 13821 | 18197 | 22573 | 26949 | 31325 | 35463 | 38330 |
| NC_001798 | 693 | 694 | 5070 | 9446 | 13822 | 18198 | 22574 | 26950 | 31326 | 35464 | 38331 |
| NC_001798 | 694 | 695 | 5071 | 9447 | 13823 | 18199 | 22575 | 26951 | 31327 | 35465 | 38332 |
| NC_001798 | 695 | 696 | 5072 | 9448 | 13824 | 18200 | 22576 | 26952 | 31328 | 35466 | 38333 |
| NC_001798 | 696 | 697 | 5073 | 9449 | 13825 | 18201 | 22577 | 26953 | 31329 | 35467 | 38334 |
| NC_001798 | 697 | 698 | 5074 | 9450 | 13826 | 18202 | 22578 | 26954 | 31330 | | 38335 |
| NC_001798 | 698 | 699 | 5075 | 9451 | 13827 | 18203 | 22579 | 26955 | 31331 | 35468 | 38336 |
| NC_001798 | 699 | 700 | 5076 | 9452 | 13828 | 18204 | 22580 | 26956 | 31332 | 35469 | |
| NC_001798 | 700 | 701 | 5077 | 9453 | 13829 | 18205 | 22581 | 26957 | 31333 | 35470 | |
| NC_001798 | 701 | 702 | 5078 | 9454 | 13830 | 18206 | 22582 | 26958 | 31334 | | 38337 |
| NC_001354 | 702 | 703 | 5079 | 9455 | 13831 | 18207 | 22583 | 26959 | 31335 | | 38338 |
| NC_001354 | 703 | 704 | 5080 | 9456 | 13832 | 18208 | 22584 | 26960 | 31336 | 35471 | |
| NC_001354 | 704 | 705 | 5081 | 9457 | 13833 | 18209 | 22585 | 26961 | 31337 | | 38339 |
| NC_001354 | 705 | 706 | 5082 | 9458 | 13834 | 18210 | 22586 | 26962 | 31338 | 35472 | |
| NC_001354 | 706 | 707 | 5083 | 9459 | 13835 | 18211 | 22587 | 26963 | 31339 | 35473 | 38340 |
| NC_001354 | 707 | 708 | 5084 | 9460 | 13836 | 18212 | 22588 | 26964 | 31340 | | 38341 |
| NC_001354 | 708 | 709 | 5085 | 9461 | 13837 | 18213 | 22589 | 26965 | 31341 | | 38342 |
| NC_001354 | 709 | 710 | 5086 | 9462 | 13838 | 18214 | 22590 | 26966 | 31342 | 35474 | |
| NC_001354 | 710 | 711 | 5087 | 9463 | 13839 | 18215 | 22591 | 26967 | 31343 | | 38343 |
| NC_001354 | 711 | 712 | 5088 | 9464 | 13840 | 18216 | 22592 | 26968 | 31344 | 35475 | 38344 |
| NC_001354 | 712 | 713 | 5089 | 9465 | 13841 | 18217 | 22593 | 26969 | 31345 | 35476 | 38345 |
| NC_001354 | 713 | 714 | 5090 | 9466 | 13842 | 18218 | 22594 | 26970 | 31346 | | 38346 |
| NC_001354 | 714 | 715 | 5091 | 9467 | 13843 | 18219 | 22595 | 26971 | 31347 | 35477 | |
| NC_001354 | 715 | 716 | 5092 | 9468 | 13844 | 18220 | 22596 | 26972 | 31348 | 35478 | |
| NC_001354 | 716 | 717 | 5093 | 9469 | 13845 | 18221 | 22597 | 26973 | 31349 | 35479 | |
| NC_001354 | 717 | 718 | 5094 | 9470 | 13846 | 18222 | 22598 | 26974 | 31350 | 35480 | 38347 |
| NC_001354 | 718 | 719 | 5095 | 9471 | 13847 | 18223 | 22599 | 26975 | 31351 | | 38348 |
| NC_001354 | 719 | 720 | 5096 | 9472 | 13848 | 18224 | 22600 | 26976 | 31352 | 35481 | |
| NC_001354 | 720 | 721 | 5097 | 9473 | 13849 | 18225 | 22601 | 26977 | 31353 | 35482 | |
| NC_001354 | 721 | 722 | 5098 | 9474 | 13850 | 18226 | 22602 | 26978 | 31354 | | 38349 |
| NC_022892 | 722 | 723 | 5099 | 9475 | 13851 | 18227 | 22603 | 26979 | 31355 | | 38350 |
| NC_022892 | 723 | 724 | 5100 | 9476 | 13852 | 18228 | 22604 | 26980 | 31356 | 35483 | |
| NC_022892 | 724 | 725 | 5101 | 9477 | 13853 | 18229 | 22605 | 26981 | 31357 | 35484 | |
| NC_022892 | 725 | 726 | 5102 | 9478 | 13854 | 18230 | 22606 | 26982 | 31358 | | 38351 |
| NC_022892 | 726 | 727 | 5103 | 9479 | 13855 | 18231 | 22607 | 26983 | 31359 | | 38352 |
| NC_022892 | 727 | 728 | 5104 | 9480 | 13856 | 18232 | 22608 | 26984 | 31360 | 35485 | |
| NC_022892 | 728 | 729 | 5105 | 9481 | 13857 | 18233 | 22609 | 26985 | 31361 | 35486 | |
| NC_022892 | 729 | 730 | 5106 | 9482 | 13858 | 18234 | 22610 | 26986 | 31362 | | 38353 |
| NC_039086 | 730 | 731 | 5107 | 9483 | 13859 | 18235 | 22611 | 26987 | 31363 | | 38354 |
| NC_039086 | 731 | 732 | 5108 | 9484 | 13860 | 18236 | 22612 | 26988 | 31364 | 35487 | |
| NC_039086 | 732 | 733 | 5109 | 9485 | 13861 | 18237 | 22613 | 26989 | 31365 | | 38355 |
| NC_039086 | 733 | 734 | 5110 | 9486 | 13862 | 18238 | 22614 | 26990 | 31366 | | 38356 |
| NC_039086 | 734 | 735 | 5111 | 9487 | 13863 | 18239 | 22615 | 26991 | 31367 | | 38357 |
| NC_039086 | 735 | 736 | 5112 | 9488 | 13864 | 18240 | 22616 | 26992 | 31368 | | 38358 |
| NC_039086 | 736 | 737 | 5113 | 9489 | 13865 | 18241 | 22617 | 26993 | 31369 | | 38359 |
| NC_039086 | 737 | 738 | 5114 | 9490 | 13866 | 18242 | 22618 | 26994 | 31370 | 35488 | |
| NC_039086 | 738 | 739 | 5115 | 9491 | 13867 | 18243 | 22619 | 26995 | 31371 | 35489 | |
| NC_039086 | 739 | 740 | 5116 | 9492 | 13868 | 18244 | 22620 | 26996 | 31372 | 35490 | |
| NC_039086 | 740 | 741 | 5117 | 9493 | 13869 | 18245 | 22621 | 26997 | 31373 | 35491 | |
| NC_039086 | 741 | 742 | 5118 | 9494 | 13870 | 18246 | 22622 | 26998 | 31374 | 35492 | 38360 |
| NC_039086 | 742 | 743 | 5119 | 9495 | 13871 | 18247 | 22623 | 26999 | 31375 | 35493 | 38361 |
| NC_039086 | 743 | 744 | 5120 | 9496 | 13872 | 18248 | 22624 | 27000 | 31376 | | 38362 |
| NC_039086 | 744 | 745 | 5121 | 9497 | 13873 | 18249 | 22625 | 27001 | 31377 | 35494 | |
| NC_039086 | 745 | 746 | 5122 | 9498 | 13874 | 18250 | 22626 | 27002 | 31378 | 35495 | |
| NC_039086 | 746 | 747 | 5123 | 9499 | 13875 | 18251 | 22627 | 27003 | 31379 | | 38363 |
| NC_039086 | 747 | 748 | 5124 | 9500 | 13876 | 18252 | 22628 | 27004 | 31380 | | 38364 |
| NC_039086 | 748 | 749 | 5125 | 9501 | 13877 | 18253 | 22629 | 27005 | 31381 | | 38365 |
| NC_006307 | 749 | 750 | 5126 | 9502 | 13878 | 18254 | 22630 | 27006 | 31382 | 35496 | |
| NC_006307 | 750 | 751 | 5127 | 9503 | 13879 | 18255 | 22631 | 27007 | 31383 | 35497 | |
| NC_006307 | 751 | 752 | 5128 | 9504 | 13880 | 18256 | 22632 | 27008 | 31384 | 35498 | |
| NC_006307 | 752 | 753 | 5129 | 9505 | 13881 | 18257 | 22633 | 27009 | 31385 | | 38366 |
| NC_010329 | 753 | 754 | 5130 | 9506 | 13882 | 18258 | 22634 | 27010 | 31386 | 35499 | |
| NC_010329 | 754 | 755 | 5131 | 9507 | 13883 | 18259 | 22635 | 27011 | 31387 | | 38367 |
| NC_010329 | 755 | 756 | 5132 | 9508 | 13884 | 18260 | 22636 | 27012 | 31388 | 35500 | |
| NC_010329 | 756 | 757 | 5133 | 9509 | 13885 | 18261 | 22637 | 27013 | 31389 | 35501 | |
| NC_010329 | 757 | 758 | 5134 | 9510 | 13886 | 18262 | 22638 | 27014 | 31390 | 35502 | |
| NC_010329 | 758 | 759 | 5135 | 9511 | 13887 | 18263 | 22639 | 27015 | 31391 | | 38368 |
| NC_010329 | 759 | 760 | 5136 | 9512 | 13888 | 18264 | 22640 | 27016 | 31392 | 35503 | 38369 |
| NC_010329 | 760 | 761 | 5137 | 9513 | 13889 | 18265 | 22641 | 27017 | 31393 | 35504 | |
| NC_010329 | 761 | 762 | 5138 | 9514 | 13890 | 18266 | 22642 | 27018 | 31394 | 35505 | |
| NC_010329 | 762 | 763 | 5139 | 9515 | 13891 | 18267 | 22643 | 27019 | 31395 | 35506 | |
| NC_010329 | 763 | 764 | 5140 | 9516 | 13892 | 18268 | 22644 | 27020 | 31396 | 35507 | |
| NC_010329 | 764 | 765 | 5141 | 9517 | 13893 | 18269 | 22645 | 27021 | 31397 | 35508 | |
| NC_010329 | 765 | 766 | 5142 | 9518 | 13894 | 18270 | 22646 | 27022 | 31398 | 35509 | |
| NC_010329 | 766 | 767 | 5143 | 9519 | 13895 | 18271 | 22647 | 27023 | 31399 | | 38370 |
| NC_010329 | 767 | 768 | 5144 | 9520 | 13896 | 18272 | 22648 | 27024 | 31400 | 35510 | |
| NC_010329 | 768 | 769 | 5145 | 9521 | 13897 | 18273 | 22649 | 27025 | 31401 | 35511 | |
| NC_022095 | 769 | 770 | 5146 | 9522 | 13898 | 18274 | 22650 | 27026 | 31402 | 35512 | |
| NC_022095 | 770 | 771 | 5147 | 9523 | 13899 | 18275 | 22651 | 27027 | 31403 | 35513 | |
| NC_022095 | 771 | 772 | 5148 | 9524 | 13900 | 18276 | 22652 | 27028 | 31404 | 35514 | |
| NC_022095 | 772 | 773 | 5149 | 9525 | 13901 | 18277 | 22653 | 27029 | 31405 | 35515 | |
| NC_022095 | 773 | 774 | 5150 | 9526 | 13902 | 18278 | 22654 | 27030 | 31406 | | 38371 |
| NC_022095 | 774 | 775 | 5151 | 9527 | 13903 | 18279 | 22655 | 27031 | 31407 | 35516 | 38372 |
| NC_022095 | 775 | 776 | 5152 | 9528 | 13904 | 18280 | 22656 | 27032 | 31408 | 35517 | |
| NC_022095 | 776 | 777 | 5153 | 9529 | 13905 | 18281 | 22657 | 27033 | 31409 | 35518 | |
| NC_022095 | 777 | 778 | 5154 | 9530 | 13906 | 18282 | 22658 | 27034 | 31410 | 35519 | |
| NC_022095 | 778 | 779 | 5155 | 9531 | 13907 | 18283 | 22659 | 27035 | 31411 | | 38373 |
| NC_022095 | 779 | 780 | 5156 | 9532 | 13908 | 18284 | 22660 | 27036 | 31412 | | 38374 |
| NC_006306 | 780 | 781 | 5157 | 9533 | 13909 | 18285 | 22661 | 27037 | 31413 | 35520 | |
| NC_006306 | 781 | 782 | 5158 | 9534 | 13910 | 18286 | 22662 | 27038 | 31414 | | 38375 |
| NC_006306 | 782 | 783 | 5159 | 9535 | 13911 | 18287 | 22663 | 27039 | 31415 | 35521 | |
| NC_038312 | 783 | 784 | 5160 | 9536 | 13912 | 18288 | 22664 | 27040 | 31416 | 35522 | |
| NC_038312 | 784 | 785 | 5161 | 9537 | 13913 | 18289 | 22665 | 27041 | 31417 | | 38376 |
| NC_038312 | 785 | 786 | 5162 | 9538 | 13914 | 18290 | 22666 | 27042 | 31418 | 35523 | |
| NC_038312 | 786 | 787 | 5163 | 9539 | 13915 | 18291 | 22667 | 27043 | 31419 | 35524 | |
| NC_038312 | 787 | 788 | 5164 | 9540 | 13916 | 18292 | 22668 | 27044 | 31420 | | 38377 |
| NC_038312 | 788 | 789 | 5165 | 9541 | 13917 | 18293 | 22669 | 27045 | 31421 | 35525 | |
| NC_038312 | 789 | 790 | 5166 | 9542 | 13918 | 18294 | 22670 | 27046 | 31422 | 35526 | |
| NC_038312 | 790 | 791 | 5167 | 9543 | 13919 | 18295 | 22671 | 27047 | 31423 | 35527 | |
| NC_038312 | 791 | 792 | 5168 | 9544 | 13920 | 18296 | 22672 | 27048 | 31424 | 35528 | |
| NC_038312 | 792 | 793 | 5169 | 9545 | 13921 | 18297 | 22673 | 27049 | 31425 | | 38378 |
| NC_038312 | 793 | 794 | 5170 | 9546 | 13922 | 18298 | 22674 | 27050 | 31426 | 35529 | 38379 |
| NC_038312 | 794 | 795 | 5171 | 9547 | 13923 | 18299 | 22675 | 27051 | 31427 | 35530 | |
| NC_038312 | 795 | 796 | 5172 | 9548 | 13924 | 18300 | 22676 | 27052 | 31428 | 35531 | |
| NC_038312 | 796 | 797 | 5173 | 9549 | 13925 | 18301 | 22677 | 27053 | 31429 | 35532 | |
| NC_038312 | 797 | 798 | 5174 | 9550 | 13926 | 18302 | 22678 | 27054 | 31430 | | 38380 |
| NC_038312 | 798 | 799 | 5175 | 9551 | 13927 | 18303 | 22679 | 27055 | 31431 | | 38381 |
| NC_038312 | 799 | 800 | 5176 | 9552 | 13928 | 18304 | 22680 | 27056 | 31432 | | 38382 |
| NC_038312 | 800 | 801 | 5177 | 9553 | 13929 | 18305 | 22681 | 27057 | 31433 | | 38383 |
| NC_002022 | 801 | 802 | 5178 | 9554 | 13930 | 18306 | 22682 | 27058 | 31434 | 35533 | |
| NC_002022 | 802 | 803 | 5179 | 9555 | 13931 | 18307 | 22683 | 27059 | 31435 | | 38384 |
| NC_002022 | 803 | 804 | 5180 | 9556 | 13932 | 18308 | 22684 | 27060 | 31436 | 35534 | 38385 |
| NC_002022 | 804 | 805 | 5181 | 9557 | 13933 | 18309 | 22685 | 27061 | 31437 | 35535 | |
| NC_002022 | 805 | 806 | 5182 | 9558 | 13934 | 18310 | 22686 | 27062 | 31438 | | 38386 |
| NC_026422 | 806 | 807 | 5183 | 9559 | 13935 | 18311 | 22687 | 27063 | 31439 | 35536 | |
| NC_026422 | 807 | 808 | 5184 | 9560 | 13936 | 18312 | 22688 | 27064 | 31440 | | 38387 |
| NC_026422 | 808 | 809 | 5185 | 9561 | 13937 | 18313 | 22689 | 27065 | 31441 | 35537 | 38388 |
| NC_026422 | 809 | 810 | 5186 | 9562 | 13938 | 18314 | 22690 | 27066 | 31442 | 35538 | |
| NC_026422 | 810 | 811 | 5187 | 9563 | 13939 | 18315 | 22691 | 27067 | 31443 | | 38389 |
| NC_026422 | 811 | 812 | 5188 | 9564 | 13940 | 18316 | 22692 | 27068 | 31444 | 35539 | |
| NC_026422 | 812 | 813 | 5189 | 9565 | 13941 | 18317 | 22693 | 27069 | 31445 | 35540 | |
| NC_026422 | 813 | 814 | 5190 | 9566 | 13942 | 18318 | 22694 | 27070 | 31446 | 35541 | |
| NC_013035 | 814 | 815 | 5191 | 9567 | 13943 | 18319 | 22695 | 27071 | 31447 | 35542 | |
| NC_013035 | 815 | 816 | 5192 | 9568 | 13944 | 18320 | 22696 | 27072 | 31448 | | 38390 |
| NC_013035 | 816 | 817 | 5193 | 9569 | 13945 | 18321 | 22697 | 27073 | 31449 | | 38391 |
| NC_013035 | 817 | 818 | 5194 | 9570 | 13946 | 18322 | 22698 | 27074 | 31450 | 35543 | 38392 |
| NC_013035 | 818 | 819 | 5195 | 9571 | 13947 | 18323 | 22699 | 27075 | 31451 | 35544 | |
| NC_013035 | 819 | 820 | 5196 | 9572 | 13948 | 18324 | 22700 | 27076 | 31452 | | 38393 |
| NC_013035 | 820 | 821 | 5197 | 9573 | 13949 | 18325 | 22701 | 27077 | 31453 | 35545 | |
| NC_013035 | 821 | 822 | 5198 | 9574 | 13950 | 18326 | 22702 | 27078 | 31454 | | 38394 |
| NC_013035 | 822 | 823 | 5199 | 9575 | 13951 | 18327 | 22703 | 27079 | 31455 | 35546 | |
| NC_013035 | 823 | 824 | 5200 | 9576 | 13952 | 18328 | 22704 | 27080 | 31456 | 35547 | |
| NC_009827 | 824 | 825 | 5201 | 9577 | 13953 | 18329 | 22705 | 27081 | 31457 | 35548 | 38395 |
| NC_009827 | 825 | 826 | 5202 | 9578 | 13954 | 18330 | 22706 | 27082 | 31458 | 35549 | 38396 |
| NC_009827 | 826 | 827 | 5203 | 9579 | 13955 | 18331 | 22707 | 27083 | 31459 | | 38397 |
| NC_009827 | 827 | 828 | 5204 | 9580 | 13956 | 18332 | 22708 | 27084 | 31460 | | 38398 |
| NC_009827 | 828 | 829 | 5205 | 9581 | 13957 | 18333 | 22709 | 27085 | 31461 | 35550 | 38399 |
| NC_009827 | 829 | 830 | 5206 | 9582 | 13958 | 18334 | 22710 | 27086 | 31462 | | 38400 |
| NC_009827 | 830 | 831 | 5207 | 9583 | 13959 | 18335 | 22711 | 27087 | 31463 | 35551 | |
| NC_009827 | 831 | 832 | 5208 | 9584 | 13960 | 18336 | 22712 | 27088 | 31464 | 35552 | 38401 |
| NC_009827 | 832 | 833 | 5209 | 9585 | 13961 | 18337 | 22713 | 27089 | 31465 | | 38402 |
| NC_009827 | 833 | 834 | 5210 | 9586 | 13962 | 18338 | 22714 | 27090 | 31466 | 35553 | |
| NC_009827 | 834 | 835 | 5211 | 9587 | 13963 | 18339 | 22715 | 27091 | 31467 | 35554 | 38403 |
| NC_009827 | 835 | 836 | 5212 | 9588 | 13964 | 18340 | 22716 | 27092 | 31468 | 35555 | 38404 |
| NC_009827 | 836 | 837 | 5213 | 9589 | 13965 | 18341 | 22717 | 27093 | 31469 | | 38405 |
| NC_009827 | 837 | 838 | 5214 | 9590 | 13966 | 18342 | 22718 | 27094 | 31470 | 35556 | |
| NC_009827 | 838 | 839 | 5215 | 9591 | 13967 | 18343 | 22719 | 27095 | 31471 | 35557 | |
| NC_009827 | 839 | 840 | 5216 | 9592 | 13968 | 18344 | 22720 | 27096 | 31472 | | 38406 |
| NC_009827 | 840 | 841 | 5217 | 9593 | 13969 | 18345 | 22721 | 27097 | 31473 | | 38407 |
| NC_009827 | 841 | 842 | 5218 | 9594 | 13970 | 18346 | 22722 | 27098 | 31474 | | 38408 |
| NC_009827 | 842 | 843 | 5219 | 9595 | 13971 | 18347 | 22723 | 27099 | 31475 | 35558 | 38409 |
| NC_009827 | 843 | 844 | 5220 | 9596 | 13972 | 18348 | 22724 | 27100 | 31476 | 35559 | 38410 |
| NC_009827 | 844 | 845 | 5221 | 9597 | 13973 | 18349 | 22725 | 27101 | 31477 | | 38411 |
| NC_009827 | 845 | 846 | 5222 | 9598 | 13974 | 18350 | 22726 | 27102 | 31478 | 35560 | |
| NC_009827 | 846 | 847 | 5223 | 9599 | 13975 | 18351 | 22727 | 27103 | 31479 | 35561 | |
| NC_009827 | 847 | 848 | 5224 | 9600 | 13976 | 18352 | 22728 | 27104 | 31480 | 35562 | |
| NC_009827 | 848 | 849 | 5225 | 9601 | 13977 | 18353 | 22729 | 27105 | 31481 | 35563 | |
| NC_009827 | 849 | 850 | 5226 | 9602 | 13978 | 18354 | 22730 | 27106 | 31482 | | 38412 |
| NC_006311 | 850 | 851 | 5227 | 9603 | 13979 | 18355 | 22731 | 27107 | 31483 | 35564 | |
| NC_006311 | 851 | 852 | 5228 | 9604 | 13980 | 18356 | 22732 | 27108 | 31484 | 35565 | |
| NC_006311 | 852 | 853 | 5229 | 9605 | 13981 | 18357 | 22733 | 27109 | 31485 | 35566 | |
| NC_006311 | 853 | 854 | 5230 | 9606 | 13982 | 18358 | 22734 | 27110 | 31486 | | 38413 |
| NC_006311 | 854 | 855 | 5231 | 9607 | 13983 | 18359 | 22735 | 27111 | 31487 | | 38414 |
| NC_006311 | 855 | 856 | 5232 | 9608 | 13984 | 18360 | 22736 | 27112 | 31488 | 35567 | |
| NC_027528 | 856 | 857 | 5233 | 9609 | 13985 | 18361 | 22737 | 27113 | 31489 | | 38415 |
| NC_027528 | 857 | 858 | 5234 | 9610 | 13986 | 18362 | 22738 | 27114 | 31490 | | 38416 |
| NC_027528 | 858 | 859 | 5235 | 9611 | 13987 | 18363 | 22739 | 27115 | 31491 | | 38417 |
| NC_027528 | 859 | 860 | 5236 | 9612 | 13988 | 18364 | 22740 | 27116 | 31492 | | 38418 |
| NC_027528 | 860 | 861 | 5237 | 9613 | 13989 | 18365 | 22741 | 27117 | 31493 | 35568 | |
| NC_027528 | 861 | 862 | 5238 | 9614 | 13990 | 18366 | 22742 | 27118 | 31494 | 35569 | |
| NC_027528 | 862 | 863 | 5239 | 9615 | 13991 | 18367 | 22743 | 27119 | 31495 | 35570 | |
| NC_027528 | 863 | 864 | 5240 | 9616 | 13992 | 18368 | 22744 | 27120 | 31496 | 35571 | |
| NC_027528 | 864 | 865 | 5241 | 9617 | 13993 | 18369 | 22745 | 27121 | 31497 | | 38419 |
| NC_027528 | 865 | 866 | 5242 | 9618 | 13994 | 18370 | 22746 | 27122 | 31498 | 35572 | 38420 |
| NC_027528 | 866 | 867 | 5243 | 9619 | 13995 | 18371 | 22747 | 27123 | 31499 | 35573 | |
| NC_027528 | 867 | 868 | 5244 | 9620 | 13996 | 18372 | 22748 | 27124 | 31500 | 35574 | |
| NC_027528 | 868 | 869 | 5245 | 9621 | 13997 | 18373 | 22749 | 27125 | 31501 | | 38421 |
| NC_027528 | 869 | 870 | 5246 | 9622 | 13998 | 18374 | 22750 | 27126 | 31502 | | 38422 |
| NC_027528 | 870 | 871 | 5247 | 9623 | 13999 | 18375 | 22751 | 27127 | 31503 | 35575 | |
| NC_007367 | 871 | 872 | 5248 | 9624 | 14000 | 18376 | 22752 | 27128 | 31504 | 35576 | 38423 |
| NC_007367 | 872 | 873 | 5249 | 9625 | 14001 | 18377 | 22753 | 27129 | 31505 | 35577 | |
| NC_001526 | 873 | 874 | 5250 | 9626 | 14002 | 18378 | 22754 | 27130 | 31506 | 35578 | |
| NC_001526 | 874 | 875 | 5251 | 9627 | 14003 | 18379 | 22755 | 27131 | 31507 | | 38424 |
| NC_001526 | 875 | 876 | 5252 | 9628 | 14004 | 18380 | 22756 | 27132 | 31508 | 35579 | |
| NC_001526 | 876 | 877 | 5253 | 9629 | 14005 | 18381 | 22757 | 27133 | 31509 | 35580 | |
| NC_001526 | 877 | 878 | 5254 | 9630 | 14006 | 18382 | 22758 | 27134 | 31510 | | 38425 |
| NC_001526 | 878 | 879 | 5255 | 9631 | 14007 | 18383 | 22759 | 27135 | 31511 | 35581 | |
| NC_001526 | 879 | 880 | 5256 | 9632 | 14008 | 18384 | 22760 | 27136 | 31512 | | 38426 |
| NC_001526 | 880 | 881 | 5257 | 9633 | 14009 | 18385 | 22761 | 27137 | 31513 | 35582 | |
| NC_001526 | 881 | 882 | 5258 | 9634 | 14010 | 18386 | 22762 | 27138 | 31514 | 35583 | 38427 |
| NC_001526 | 882 | 883 | 5259 | 9635 | 14011 | 18387 | 22763 | 27139 | 31515 | | 38428 |
| NC_001526 | 883 | 884 | 5260 | 9636 | 14012 | 18388 | 22764 | 27140 | 31516 | | 38429 |
| NC_001526 | 884 | 885 | 5261 | 9637 | 14013 | 18389 | 22765 | 27141 | 31517 | | 38430 |
| NC_001526 | 885 | 886 | 5262 | 9638 | 14014 | 18390 | 22766 | 27142 | 31518 | | 38431 |
| NC_001526 | 886 | 887 | 5263 | 9639 | 14015 | 18391 | 22767 | 27143 | 31519 | 35584 | 38432 |
| NC_026424 | 887 | 888 | 5264 | 9640 | 14016 | 18392 | 22768 | 27144 | 31520 | 35585 | 38433 |
| NC_026424 | 888 | 889 | 5265 | 9641 | 14017 | 18393 | 22769 | 27145 | 31521 | 35586 | |
| NC_026424 | 889 | 890 | 5266 | 9642 | 14018 | 18394 | 22770 | 27146 | 31522 | | 38434 |
| NC_026424 | 890 | 891 | 5267 | 9643 | 14019 | 18395 | 22771 | 27147 | 31523 | 35587 | |
| NC_026424 | 891 | 892 | 5268 | 9644 | 14020 | 18396 | 22772 | 27148 | 31524 | | 38435 |
| NC_026424 | 892 | 893 | 5269 | 9645 | 14021 | 18397 | 22773 | 27149 | 31525 | | 38436 |
| NC_026423 | 893 | 894 | 5270 | 9646 | 14022 | 18398 | 22774 | 27150 | 31526 | 35588 | |
| NC_026423 | 894 | 895 | 5271 | 9647 | 14023 | 18399 | 22775 | 27151 | 31527 | 35589 | |
| NC_026423 | 895 | 896 | 5272 | 9648 | 14024 | 18400 | 22776 | 27152 | 31528 | 35590 | |
| NC_026423 | 896 | 897 | 5273 | 9649 | 14025 | 18401 | 22777 | 27153 | 31529 | | 38437 |
| NC_026423 | 897 | 898 | 5274 | 9650 | 14026 | 18402 | 22778 | 27154 | 31530 | 35591 | |
| NC_026423 | 898 | 899 | 5275 | 9651 | 14027 | 18403 | 22779 | 27155 | 31531 | 35592 | |
| NC_001458 | 899 | 900 | 5276 | 9652 | 14028 | 18404 | 22780 | 27156 | 31532 | 35593 | |
| NC_001458 | 900 | 901 | 5277 | 9653 | 14029 | 18405 | 22781 | 27157 | 31533 | 35594 | |
| NC_001458 | 901 | 902 | 5278 | 9654 | 14030 | 18406 | 22782 | 27158 | 31534 | 35595 | 38438 |
| NC_001458 | 902 | 903 | 5279 | 9655 | 14031 | 18407 | 22783 | 27159 | 31535 | 35596 | 38439 |
| NC_001458 | 903 | 904 | 5280 | 9656 | 14032 | 18408 | 22784 | 27160 | 31536 | 35597 | |
| NC_001458 | 904 | 905 | 5281 | 9657 | 14033 | 18409 | 22785 | 27161 | 31537 | 35598 | |
| NC_001458 | 905 | 906 | 5282 | 9658 | 14034 | 18410 | 22786 | 27162 | 31538 | | 38440 |
| NC_001458 | 906 | 907 | 5283 | 9659 | 14035 | 18411 | 22787 | 27163 | 31539 | 35599 | |
| NC_001458 | 907 | 908 | 5284 | 9660 | 14036 | 18412 | 22788 | 27164 | 31540 | | 38441 |
| NC_001458 | 908 | 909 | 5285 | 9661 | 14037 | 18413 | 22789 | 27165 | 31541 | 35600 | |
| NC_001458 | 909 | 910 | 5286 | 9662 | 14038 | 18414 | 22790 | 27166 | 31542 | 35601 | |
| NC_001458 | 910 | 911 | 5287 | 9663 | 14039 | 18415 | 22791 | 27167 | 31543 | | 38442 |
| NC_001458 | 911 | 912 | 5288 | 9664 | 14040 | 18416 | 22792 | 27168 | 31544 | | 38443 |
| NC_001458 | 912 | 913 | 5289 | 9665 | 14041 | 18417 | 22793 | 27169 | 31545 | | 38444 |
| NC_001458 | 913 | 914 | 5290 | 9666 | 14042 | 18418 | 22794 | 27170 | 31546 | 35602 | |
| NC_001458 | 914 | 915 | 5291 | 9667 | 14043 | 18419 | 22795 | 27171 | 31547 | 35603 | |
| NC_001458 | 915 | 916 | 5292 | 9668 | 14044 | 18420 | 22796 | 27172 | 31548 | | 38445 |
| NC_001458 | 916 | 917 | 5293 | 9669 | 14045 | 18421 | 22797 | 27173 | 31549 | 35604 | 38446 |
| NC_026436 | 917 | 918 | 5294 | 9670 | 14046 | 18422 | 22798 | 27174 | 31550 | | 38447 |
| NC_026436 | 918 | 919 | 5295 | 9671 | 14047 | 18423 | 22799 | 27175 | 31551 | | 38448 |
| NC_026436 | 919 | 920 | 5296 | 9672 | 14048 | 18424 | 22800 | 27176 | 31552 | 35605 | |
| NC_026436 | 920 | 921 | 5297 | 9673 | 14049 | 18425 | 22801 | 27177 | 31553 | | 38449 |
| NC_002018 | 921 | 922 | 5298 | 9674 | 14050 | 18426 | 22802 | 27178 | 31554 | 35606 | 38450 |
| NC_002018 | 922 | 923 | 5299 | 9675 | 14051 | 18427 | 22803 | 27179 | 31555 | 35607 | |
| NC_002018 | 923 | 924 | 5300 | 9676 | 14052 | 18428 | 22804 | 27180 | 31556 | | 38451 |
| NC_002018 | 924 | 925 | 5301 | 9677 | 14053 | 18429 | 22805 | 27181 | 31557 | 35608 | |
| NC_007358 | 925 | 926 | 5302 | 9678 | 14054 | 18430 | 22806 | 27182 | 31558 | | 38452 |
| NC_007358 | 926 | 927 | 5303 | 9679 | 14055 | 18431 | 22807 | 27183 | 31559 | 35609 | |
| NC_007358 | 927 | 928 | 5304 | 9680 | 14056 | 18432 | 22808 | 27184 | 31560 | | 38453 |
| NC_007358 | 928 | 929 | 5305 | 9681 | 14057 | 18433 | 22809 | 27185 | 31561 | 35610 | |
| NC_007358 | 929 | 930 | 5306 | 9682 | 14058 | 18434 | 22810 | 27186 | 31562 | 35611 | 38454 |
| NC_001357 | 930 | 931 | 5307 | 9683 | 14059 | 18435 | 22811 | 27187 | 31563 | | 38455 |
| NC_001357 | 931 | 932 | 5308 | 9684 | 14060 | 18436 | 22812 | 27188 | 31564 | | 38456 |
| NC_001357 | 932 | 933 | 5309 | 9685 | 14061 | 18437 | 22813 | 27189 | 31565 | | 38457 |
| NC_001357 | 933 | 934 | 5310 | 9686 | 14062 | 18438 | 22814 | 27190 | 31566 | 35612 | 38458 |
| NC_001357 | 934 | 935 | 5311 | 9687 | 14063 | 18439 | 22815 | 27191 | 31567 | | 38459 |
| NC_001357 | 935 | 936 | 5312 | 9688 | 14064 | 18440 | 22816 | 27192 | 31568 | 35613 | 38460 |
| NC_001357 | 936 | 937 | 5313 | 9689 | 14065 | 18441 | 22817 | 27193 | 31569 | 35614 | |
| NC_001357 | 937 | 938 | 5314 | 9690 | 14066 | 18442 | 22818 | 27194 | 31570 | 35615 | |
| NC_001357 | 938 | 939 | 5315 | 9691 | 14067 | 18443 | 22819 | 27195 | 31571 | | 38461 |
| NC_001357 | 939 | 940 | 5316 | 9692 | 14068 | 18444 | 22820 | 27196 | 31572 | 35616 | |
| NC_001357 | 940 | 941 | 5317 | 9693 | 14069 | 18445 | 22821 | 27197 | 31573 | 35617 | |
| NC_001357 | 941 | 942 | 5318 | 9694 | 14070 | 18446 | 22822 | 27198 | 31574 | 35618 | |
| NC_001357 | 942 | 943 | 5319 | 9695 | 14071 | 18447 | 22823 | 27199 | 31575 | 35619 | |
| NC_001357 | 943 | 944 | 5320 | 9696 | 14072 | 18448 | 22824 | 27200 | 31576 | | 38462 |
| NC_001357 | 944 | 945 | 5321 | 9697 | 14073 | 18449 | 22825 | 27201 | 31577 | 35620 | |
| NC_001357 | 945 | 946 | 5322 | 9698 | 14074 | 18450 | 22826 | 27202 | 31578 | 35621 | |
| NC_001357 | 946 | 947 | 5323 | 9699 | 14075 | 18451 | 22827 | 27203 | 31579 | 35622 | |
| NC_002021 | 947 | 948 | 5324 | 9700 | 14076 | 18452 | 22828 | 27204 | 31580 | | 38463 |
| NC_002021 | 948 | 949 | 5325 | 9701 | 14077 | 18453 | 22829 | 27205 | 31581 | | 38464 |
| NC_002021 | 949 | 950 | 5326 | 9702 | 14078 | 18454 | 22830 | 27206 | 31582 | 35623 | |
| NC_002021 | 950 | 951 | 5327 | 9703 | 14079 | 18455 | 22831 | 27207 | 31583 | | 38465 |
| NC_002021 | 951 | 952 | 5328 | 9704 | 14080 | 18456 | 22832 | 27208 | 31584 | 35624 | |
| NC_002021 | 952 | 953 | 5329 | 9705 | 14081 | 18457 | 22833 | 27209 | 31585 | 35625 | 38466 |
| NC_001837 | 953 | 954 | 5330 | 9706 | 14082 | 18458 | 22834 | 27210 | 31586 | 35626 | 38467 |
| NC_001837 | 954 | 955 | 5331 | 9707 | 14083 | 18459 | 22835 | 27211 | 31587 | 35627 | |
| NC_001837 | 955 | 956 | 5332 | 9708 | 14084 | 18460 | 22836 | 27212 | 31588 | 35628 | 38468 |
| NC_001837 | 956 | 957 | 5333 | 9709 | 14085 | 18461 | 22837 | 27213 | 31589 | | 38469 |
| NC_001837 | 957 | 958 | 5334 | 9710 | 14086 | 18462 | 22838 | 27214 | 31590 | 35629 | 38470 |
| NC_001837 | 958 | 959 | 5335 | 9711 | 14087 | 18463 | 22839 | 27215 | 31591 | 35630 | |
| NC_001837 | 959 | 960 | 5336 | 9712 | 14088 | 18464 | 22840 | 27216 | 31592 | 35631 | 38471 |
| NC_001837 | 960 | 961 | 5337 | 9713 | 14089 | 18465 | 22841 | 27217 | 31593 | 35632 | 38472 |
| NC_001837 | 961 | 962 | 5338 | 9714 | 14090 | 18466 | 22842 | 27218 | 31594 | 35633 | 38473 |
| NC_001837 | 962 | 963 | 5339 | 9715 | 14091 | 18467 | 22843 | 27219 | 31595 | | 38474 |
| NC_001837 | 963 | 964 | 5340 | 9716 | 14092 | 18468 | 22844 | 27220 | 31596 | | 38475 |
| NC_001837 | 964 | 965 | 5341 | 9717 | 14093 | 18469 | 22845 | 27221 | 31597 | 35634 | 38476 |
| NC_001837 | 965 | 966 | 5342 | 9718 | 14094 | 18470 | 22846 | 27222 | 31598 | 35635 | |
| NC_001837 | 966 | 967 | 5343 | 9719 | 14095 | 18471 | 22847 | 27223 | 31599 | | 38477 |
| NC_001837 | 967 | 968 | 5344 | 9720 | 14096 | 18472 | 22848 | 27224 | 31600 | 35636 | 38478 |
| NC_001837 | 968 | 969 | 5345 | 9721 | 14097 | 18473 | 22849 | 27225 | 31601 | 35637 | 38479 |
| NC_001837 | 969 | 970 | 5346 | 9722 | 14098 | 18474 | 22850 | 27226 | 31602 | 35638 | 38480 |
| NC_001837 | 970 | 971 | 5347 | 9723 | 14099 | 18475 | 22851 | 27227 | 31603 | | 38481 |
| NC_001837 | 971 | 972 | 5348 | 9724 | 14100 | 18476 | 22852 | 27228 | 31604 | | 38482 |
| NC_001837 | 972 | 973 | 5349 | 9725 | 14101 | 18477 | 22853 | 27229 | 31605 | | 38483 |
| NC_001837 | 973 | 974 | 5350 | 9726 | 14102 | 18478 | 22854 | 27230 | 31606 | | 38484 |
| NC_001837 | 974 | 975 | 5351 | 9727 | 14103 | 18479 | 22855 | 27231 | 31607 | 35639 | 38485 |
| NC_001837 | 975 | 976 | 5352 | 9728 | 14104 | 18480 | 22856 | 27232 | 31608 | 35640 | |
| NC_001837 | 976 | 977 | 5353 | 9729 | 14105 | 18481 | 22857 | 27233 | 31609 | 35641 | 38486 |
| NC_001837 | 977 | 978 | 5354 | 9730 | 14106 | 18482 | 22858 | 27234 | 31610 | | 38487 |
| NC_001837 | 978 | 979 | 5355 | 9731 | 14107 | 18483 | 22859 | 27235 | 31611 | 35642 | 38488 |
| NC_001837 | 979 | 980 | 5356 | 9732 | 14108 | 18484 | 22860 | 27236 | 31612 | 35643 | |
| NC_001531 | 980 | 981 | 5357 | 9733 | 14109 | 18485 | 22861 | 27237 | 31613 | 35644 | |
| NC_001531 | 981 | 982 | 5358 | 9734 | 14110 | 18486 | 22862 | 27238 | 31614 | 35645 | |
| NC_001531 | 982 | 983 | 5359 | 9735 | 14111 | 18487 | 22863 | 27239 | 31615 | | 38489 |
| NC_001531 | 983 | 984 | 5360 | 9736 | 14112 | 18488 | 22864 | 27240 | 31616 | 35646 | |
| NC_001531 | 984 | 985 | 5361 | 9737 | 14113 | 18489 | 22865 | 27241 | 31617 | | 38490 |
| NC_001531 | 985 | 986 | 5362 | 9738 | 14114 | 18490 | 22866 | 27242 | 31618 | 35647 | 38491 |
| NC_001531 | 986 | 987 | 5363 | 9739 | 14115 | 18491 | 22867 | 27243 | 31619 | 35648 | |
| NC_001531 | 987 | 988 | 5364 | 9740 | 14116 | 18492 | 22868 | 27244 | 31620 | | 38492 |
| NC_001531 | 988 | 989 | 5365 | 9741 | 14117 | 18493 | 22869 | 27245 | 31621 | 35649 | 38493 |
| NC_001531 | 989 | 990 | 5366 | 9742 | 14118 | 18494 | 22870 | 27246 | 31622 | 35650 | 38494 |
| NC_001531 | 990 | 991 | 5367 | 9743 | 14119 | 18495 | 22871 | 27247 | 31623 | | 38495 |
| NC_001531 | 991 | 992 | 5368 | 9744 | 14120 | 18496 | 22872 | 27248 | 31624 | 35651 | |
| NC_001531 | 992 | 993 | 5369 | 9745 | 14121 | 18497 | 22873 | 27249 | 31625 | | 38496 |
| NC_001531 | 993 | 994 | 5370 | 9746 | 14122 | 18498 | 22874 | 27250 | 31626 | | 38497 |
| NC_001531 | 994 | 995 | 5371 | 9747 | 14123 | 18499 | 22875 | 27251 | 31627 | | 38498 |
| NC_001531 | 995 | 996 | 5372 | 9748 | 14124 | 18500 | 22876 | 27252 | 31628 | | 38499 |
| NC_001531 | 996 | 997 | 5373 | 9749 | 14125 | 18501 | 22877 | 27253 | 31629 | 35652 | |
| NC_001531 | 997 | 998 | 5374 | 9750 | 14126 | 18502 | 22878 | 27254 | 31630 | 35653 | |
| NC_004909 | 998 | 999 | 5375 | 9751 | 14127 | 18503 | 22879 | 27255 | 31631 | 35654 | |
| NC_004909 | 999 | 1000 | 5376 | 9752 | 14128 | 18504 | 22880 | 27256 | 31632 | 35655 | 38500 |
| NC_004909 | 1000 | 1001 | 5377 | 9753 | 14129 | 18505 | 22881 | 27257 | 31633 | 35656 | 38501 |
| NC_004909 | 1001 | 1002 | 5378 | 9754 | 14130 | 18506 | 22882 | 27258 | 31634 | 35657 | |
| NC_004909 | 1002 | 1003 | 5379 | 9755 | 14131 | 18507 | 22883 | 27259 | 31635 | | 38502 |
| NC_002208 | 1003 | 1004 | 5380 | 9756 | 14132 | 18508 | 22884 | 27260 | 31636 | | 38503 |
| NC_002208 | 1004 | 1005 | 5381 | 9757 | 14133 | 18509 | 22885 | 27261 | 31637 | 35658 | |
| NC_002208 | 1005 | 1006 | 5382 | 9758 | 14134 | 18510 | 22886 | 27262 | 31638 | 35659 | |
| NC_038523 | 1006 | 1007 | 5383 | 9759 | 14135 | 18511 | 22887 | 27263 | 31639 | 35660 | |
| NC_038523 | 1007 | 1008 | 5384 | 9760 | 14136 | 18512 | 22888 | 27264 | 31640 | | 38504 |
| NC_038523 | 1008 | 1009 | 5385 | 9761 | 14137 | 18513 | 22889 | 27265 | 31641 | 35661 | |
| NC_038523 | 1009 | 1010 | 5386 | 9762 | 14138 | 18514 | 22890 | 27266 | 31642 | 35662 | |
| NC_038523 | 1010 | 1011 | 5387 | 9763 | 14139 | 18515 | 22891 | 27267 | 31643 | 35663 | 38505 |
| NC_038523 | 1011 | 1012 | 5388 | 9764 | 14140 | 18516 | 22892 | 27268 | 31644 | 35664 | |
| NC_038523 | 1012 | 1013 | 5389 | 9765 | 14141 | 18517 | 22893 | 27269 | 31645 | | 38506 |
| NC_038523 | 1013 | 1014 | 5390 | 9766 | 14142 | 18518 | 22894 | 27270 | 31646 | 35665 | |
| NC_038523 | 1014 | 1015 | 5391 | 9767 | 14143 | 18519 | 22895 | 27271 | 31647 | | 38507 |
| NC_038523 | 1015 | 1016 | 5392 | 9768 | 14144 | 18520 | 22896 | 27272 | 31648 | 35666 | |
| NC_038523 | 1016 | 1017 | 5393 | 9769 | 14145 | 18521 | 22897 | 27273 | 31649 | | 38508 |
| NC_038523 | 1017 | 1018 | 5394 | 9770 | 14146 | 18522 | 22898 | 27274 | 31650 | 35667 | |
| NC_038523 | 1018 | 1019 | 5395 | 9771 | 14147 | 18523 | 22899 | 27275 | 31651 | | 38509 |
| NC_038523 | 1019 | 1020 | 5396 | 9772 | 14148 | 18524 | 22900 | 27276 | 31652 | 35668 | |
| NC_038523 | 1020 | 1021 | 5397 | 9773 | 14149 | 18525 | 22901 | 27277 | 31653 | 35669 | |
| NC_038523 | 1021 | 1022 | 5398 | 9774 | 14150 | 18526 | 22902 | 27278 | 31654 | 35670 | |
| NC_007372 | 1022 | 1023 | 5399 | 9775 | 14151 | 18527 | 22903 | 27279 | 31655 | 35671 | 38510 |
| NC_007372 | 1023 | 1024 | 5400 | 9776 | 14152 | 18528 | 22904 | 27280 | 31656 | | 38511 |
| NC_007372 | 1024 | 1025 | 5401 | 9777 | 14153 | 18529 | 22905 | 27281 | 31657 | 35672 | |
| NC_007372 | 1025 | 1026 | 5402 | 9778 | 14154 | 18530 | 22906 | 27282 | 31658 | 35673 | |
| NC_007372 | 1026 | 1027 | 5403 | 9779 | 14155 | 18531 | 22907 | 27283 | 31659 | 35674 | |
| NC_007372 | 1027 | 1028 | 5404 | 9780 | 14156 | 18532 | 22908 | 27284 | 31660 | | 38512 |
| NC_007372 | 1028 | 1029 | 5405 | 9781 | 14157 | 18533 | 22909 | 27285 | 31661 | 35675 | |
| NC_007372 | 1029 | 1030 | 5406 | 9782 | 14158 | 18534 | 22910 | 27286 | 31662 | 35676 | |
| NC_007372 | 1030 | 1031 | 5407 | 9783 | 14159 | 18535 | 22911 | 27287 | 31663 | | 38513 |
| NC_001691 | 1031 | 1032 | 5408 | 9784 | 14160 | 18536 | 22912 | 27288 | 31664 | | 38514 |
| NC_001691 | 1032 | 1033 | 5409 | 9785 | 14161 | 18537 | 22913 | 27289 | 31665 | 35677 | 38515 |
| NC_001691 | 1033 | 1034 | 5410 | 9786 | 14162 | 18538 | 22914 | 27290 | 31666 | 35678 | |
| NC_001691 | 1034 | 1035 | 5411 | 9787 | 14163 | 18539 | 22915 | 27291 | 31667 | 35679 | |
| NC_001691 | 1035 | 1036 | 5412 | 9788 | 14164 | 18540 | 22916 | 27292 | 31668 | 35680 | |
| NC_001691 | 1036 | 1037 | 5413 | 9789 | 14165 | 18541 | 22917 | 27293 | 31669 | | 38516 |
| NC_001691 | 1037 | 1038 | 5414 | 9790 | 14166 | 18542 | 22918 | 27294 | 31670 | 35681 | |
| NC_001691 | 1038 | 1039 | 5415 | 9791 | 14167 | 18543 | 22919 | 27295 | 31671 | 35682 | |
| NC_001691 | 1039 | 1040 | 5416 | 9792 | 14168 | 18544 | 22920 | 27296 | 31672 | | 38517 |
| NC_001691 | 1040 | 1041 | 5417 | 9793 | 14169 | 18545 | 22921 | 27297 | 31673 | 35683 | |
| NC_001691 | 1041 | 1042 | 5418 | 9794 | 14170 | 18546 | 22922 | 27298 | 31674 | | 38518 |
| NC_001691 | 1042 | 1043 | 5419 | 9795 | 14171 | 18547 | 22923 | 27299 | 31675 | 35684 | |
| NC_012485 | 1043 | 1044 | 5420 | 9796 | 14172 | 18548 | 22924 | 27300 | 31676 | | 38519 |
| NC_012485 | 1044 | 1045 | 5421 | 9797 | 14173 | 18549 | 22925 | 27301 | 31677 | 35685 | |
| NC_012485 | 1045 | 1046 | 5422 | 9798 | 14174 | 18550 | 22926 | 27302 | 31678 | 35686 | 38520 |
| NC_012485 | 1046 | 1047 | 5423 | 9799 | 14175 | 18551 | 22927 | 27303 | 31679 | 35687 | |
| NC_012485 | 1047 | 1048 | 5424 | 9800 | 14176 | 18552 | 22928 | 27304 | 31680 | | 38521 |
| NC_012485 | 1048 | 1049 | 5425 | 9801 | 14177 | 18553 | 22929 | 27305 | 31681 | 35688 | |
| NC_012485 | 1049 | 1050 | 5426 | 9802 | 14178 | 18554 | 22930 | 27306 | 31682 | | 38522 |
| NC_012485 | 1050 | 1051 | 5427 | 9803 | 14179 | 18555 | 22931 | 27307 | 31683 | | 38523 |
| NC_012485 | 1051 | 1052 | 5428 | 9804 | 14180 | 18556 | 22932 | 27308 | 31684 | 35689 | 38524 |
| NC_012485 | 1052 | 1053 | 5429 | 9805 | 14181 | 18557 | 22933 | 27309 | 31685 | 35690 | |
| NC_012485 | 1053 | 1054 | 5430 | 9806 | 14182 | 18558 | 22934 | 27310 | 31686 | 35691 | |
| NC_014185 | 1054 | 1055 | 5431 | 9807 | 14183 | 18559 | 22935 | 27311 | 31687 | 35692 | |
| NC_014185 | 1055 | 1056 | 5432 | 9808 | 14184 | 18560 | 22936 | 27312 | 31688 | 35693 | |
| NC_014185 | 1056 | 1057 | 5433 | 9809 | 14185 | 18561 | 22937 | 27313 | 31689 | 35694 | |
| NC_014185 | 1057 | 1058 | 5434 | 9810 | 14186 | 18562 | 22938 | 27314 | 31690 | 35695 | |
| NC_014185 | 1058 | 1059 | 5435 | 9811 | 14187 | 18563 | 22939 | 27315 | 31691 | 35696 | |
| NC_014185 | 1059 | 1060 | 5436 | 9812 | 14188 | 18564 | 22940 | 27316 | 31692 | 35697 | |
| NC_014185 | 1060 | 1061 | 5437 | 9813 | 14189 | 18565 | 22941 | 27317 | 31693 | 35698 | |
| NC_014185 | 1061 | 1062 | 5438 | 9814 | 14190 | 18566 | 22942 | 27318 | 31694 | | 38525 |
| NC_014185 | 1062 | 1063 | 5439 | 9815 | 14191 | 18567 | 22943 | 27319 | 31695 | 35699 | |
| NC_014185 | 1063 | 1064 | 5440 | 9816 | 14192 | 18568 | 22944 | 27320 | 31696 | | 38526 |
| NC_014185 | 1064 | 1065 | 5441 | 9817 | 14193 | 18569 | 22945 | 27321 | 31697 | 35700 | |
| NC_014185 | 1065 | 1066 | 5442 | 9818 | 14194 | 18570 | 22946 | 27322 | 31698 | | 38527 |
| NC_014185 | 1066 | 1067 | 5443 | 9819 | 14195 | 18571 | 22947 | 27323 | 31699 | 35701 | |
| NC_014185 | 1067 | 1068 | 5444 | 9820 | 14196 | 18572 | 22948 | 27324 | 31700 | | 38528 |
| NC_014185 | 1068 | 1069 | 5445 | 9821 | 14197 | 18573 | 22949 | 27325 | 31701 | | 38529 |
| NC_014185 | 1069 | 1070 | 5446 | 9822 | 14198 | 18574 | 22950 | 27326 | 31702 | 35702 | |
| NC_001806 | 1070 | 1071 | 5447 | 9823 | 14199 | 18575 | 22951 | 27327 | 31703 | 35703 | 38530 |
| NC_001806 | 1071 | 1072 | 5448 | 9824 | 14200 | 18576 | 22952 | 27328 | 31704 | | 38531 |
| NC_001806 | 1072 | 1073 | 5449 | 9825 | 14201 | 18577 | 22953 | 27329 | 31705 | 35704 | 38532 |
| NC_001806 | 1073 | 1074 | 5450 | 9826 | 14202 | 18578 | 22954 | 27330 | 31706 | 35705 | 38533 |
| NC_001806 | 1074 | 1075 | 5451 | 9827 | 14203 | 18579 | 22955 | 27331 | 31707 | 35706 | |
| NC_001806 | 1075 | 1076 | 5452 | 9828 | 14204 | 18580 | 22956 | 27332 | 31708 | 35707 | |
| NC_001806 | 1076 | 1077 | 5453 | 9829 | 14205 | 18581 | 22957 | 27333 | 31709 | 35708 | 38534 |
| NC_001806 | 1077 | 1078 | 5454 | 9830 | 14206 | 18582 | 22958 | 27334 | 31710 | 35709 | |
| NC_001806 | 1078 | 1079 | 5455 | 9831 | 14207 | 18583 | 22959 | 27335 | 31711 | 35710 | 38535 |
| NC_001806 | 1079 | 1080 | 5456 | 9832 | 14208 | 18584 | 22960 | 27336 | 31712 | | 38536 |
| NC_001806 | 1080 | 1081 | 5457 | 9833 | 14209 | 18585 | 22961 | 27337 | 31713 | 35711 | |
| NC_001806 | 1081 | 1082 | 5458 | 9834 | 14210 | 18586 | 22962 | 27338 | 31714 | 35712 | 38537 |
| NC_001806 | 1082 | 1083 | 5459 | 9835 | 14211 | 18587 | 22963 | 27339 | 31715 | 35713 | 38538 |
| NC_001806 | 1083 | 1084 | 5460 | 9836 | 14212 | 18588 | 22964 | 27340 | 31716 | 35714 | |
| NC_001806 | 1084 | 1085 | 5461 | 9837 | 14213 | 18589 | 22965 | 27341 | 31717 | 35715 | 38539 |
| NC_001806 | 1085 | 1086 | 5462 | 9838 | 14214 | 18590 | 22966 | 27342 | 31718 | | 38540 |
| NC_001806 | 1086 | 1087 | 5463 | 9839 | 14215 | 18591 | 22967 | 27343 | 31719 | | 38541 |
| NC_001806 | 1087 | 1088 | 5464 | 9840 | 14216 | 18592 | 22968 | 27344 | 31720 | 35716 | 38542 |
| NC_001806 | 1088 | 1089 | 5465 | 9841 | 14217 | 18593 | 22969 | 27345 | 31721 | 35717 | |
| NC_001806 | 1089 | 1090 | 5466 | 9842 | 14218 | 18594 | 22970 | 27346 | 31722 | | 38543 |
| NC_001806 | 1090 | 1091 | 5467 | 9843 | 14219 | 18595 | 22971 | 27347 | 31723 | 35718 | 38544 |
| NC_001806 | 1091 | 1092 | 5468 | 9844 | 14220 | 18596 | 22972 | 27348 | 31724 | 35719 | |
| NC_001806 | 1092 | 1093 | 5469 | 9845 | 14221 | 18597 | 22973 | 27349 | 31725 | | 38545 |
| NC_001806 | 1093 | 1094 | 5470 | 9846 | 14222 | 18598 | 22974 | 27350 | 31726 | 35720 | |
| NC_001806 | 1094 | 1095 | 5471 | 9847 | 14223 | 18599 | 22975 | 27351 | 31727 | 35721 | |
| NC_001806 | 1095 | 1096 | 5472 | 9848 | 14224 | 18600 | 22976 | 27352 | 31728 | 35722 | 38546 |
| NC_001806 | 1096 | 1097 | 5473 | 9849 | 14225 | 18601 | 22977 | 27353 | 31729 | | 38547 |
| NC_001806 | 1097 | 1098 | 5474 | 9850 | 14226 | 18602 | 22978 | 27354 | 31730 | 35723 | 38548 |
| NC_001806 | 1098 | 1099 | 5475 | 9851 | 14227 | 18603 | 22979 | 27355 | 31731 | 35724 | 38549 |
| NC_001806 | 1099 | 1100 | 5476 | 9852 | 14228 | 18604 | 22980 | 27356 | 31732 | | 38550 |
| NC_001806 | 1100 | 1101 | 5477 | 9853 | 14229 | 18605 | 22981 | 27357 | 31733 | 35725 | 38551 |
| NC_001806 | 1101 | 1102 | 5478 | 9854 | 14230 | 18606 | 22982 | 27358 | 31734 | 35726 | |
| NC_001806 | 1102 | 1103 | 5479 | 9855 | 14231 | 18607 | 22983 | 27359 | 31735 | | 38552 |
| NC_001806 | 1103 | 1104 | 5480 | 9856 | 14232 | 18608 | 22984 | 27360 | 31736 | 35727 | 38553 |
| NC_001806 | 1104 | 1105 | 5481 | 9857 | 14233 | 18609 | 22985 | 27361 | 31737 | | 38554 |
| NC_001806 | 1105 | 1106 | 5482 | 9858 | 14234 | 18610 | 22986 | 27362 | 31738 | 35728 | |
| NC_001806 | 1106 | 1107 | 5483 | 9859 | 14235 | 18611 | 22987 | 27363 | 31739 | 35729 | |
| NC_001806 | 1107 | 1108 | 5484 | 9860 | 14236 | 18612 | 22988 | 27364 | 31740 | 35730 | |
| NC_001806 | 1108 | 1109 | 5485 | 9861 | 14237 | 18613 | 22989 | 27365 | 31741 | 35731 | 38555 |
| NC_001806 | 1109 | 1110 | 5486 | 9862 | 14238 | 18614 | 22990 | 27366 | 31742 | 35732 | |
| NC_001806 | 1110 | 1111 | 5487 | 9863 | 14239 | 18615 | 22991 | 27367 | 31743 | 35733 | |
| NC_001806 | 1111 | 1112 | 5488 | 9864 | 14240 | 18616 | 22992 | 27368 | 31744 | 35734 | 38556 |
| NC_001806 | 1112 | 1113 | 5489 | 9865 | 14241 | 18617 | 22993 | 27369 | 31745 | 35735 | 38557 |
| NC_001806 | 1113 | 1114 | 5490 | 9866 | 14242 | 18618 | 22994 | 27370 | 31746 | 35736 | |
| NC_001806 | 1114 | 1115 | 5491 | 9867 | 14243 | 18619 | 22995 | 27371 | 31747 | | 38558 |
| NC_001806 | 1115 | 1116 | 5492 | 9868 | 14244 | 18620 | 22996 | 27372 | 31748 | | 38559 |
| NC_001806 | 1116 | 1117 | 5493 | 9869 | 14245 | 18621 | 22997 | 27373 | 31749 | 35737 | |
| NC_001806 | 1117 | 1118 | 5494 | 9870 | 14246 | 18622 | 22998 | 27374 | 31750 | 35738 | 38560 |
| NC_001806 | 1118 | 1119 | 5495 | 9871 | 14247 | 18623 | 22999 | 27375 | 31751 | 35739 | 38561 |
| NC_001806 | 1119 | 1120 | 5496 | 9872 | 14248 | 18624 | 23000 | 27376 | 31752 | 35740 | |
| NC_001806 | 1120 | 1121 | 5497 | 9873 | 14249 | 18625 | 23001 | 27377 | 31753 | 35741 | |
| NC_001806 | 1121 | 1122 | 5498 | 9874 | 14250 | 18626 | 23002 | 27378 | 31754 | 35742 | |
| NC_001806 | 1122 | 1123 | 5499 | 9875 | 14251 | 18627 | 23003 | 27379 | 31755 | 35743 | |
| NC_001806 | 1123 | 1124 | 5500 | 9876 | 14252 | 18628 | 23004 | 27380 | 31756 | 35744 | 38562 |
| NC_001806 | 1124 | 1125 | 5501 | 9877 | 14253 | 18629 | 23005 | 27381 | 31757 | | 38563 |
| NC_001806 | 1125 | 1126 | 5502 | 9878 | 14254 | 18630 | 23006 | 27382 | 31758 | | 38564 |
| NC_001806 | 1126 | 1127 | 5503 | 9879 | 14255 | 18631 | 23007 | 27383 | 31759 | 35745 | |
| NC_001806 | 1127 | 1128 | 5504 | 9880 | 14256 | 18632 | 23008 | 27384 | 31760 | 35746 | 38565 |
| NC_001806 | 1128 | 1129 | 5505 | 9881 | 14257 | 18633 | 23009 | 27385 | 31761 | | 38566 |
| NC_001806 | 1129 | 1130 | 5506 | 9882 | 14258 | 18634 | 23010 | 27386 | 31762 | 35747 | |
| NC_001806 | 1130 | 1131 | 5507 | 9883 | 14259 | 18635 | 23011 | 27387 | 31763 | 35748 | |
| NC_001806 | 1131 | 1132 | 5508 | 9884 | 14260 | 18636 | 23012 | 27388 | 31764 | 35749 | |
| NC_001806 | 1132 | 1133 | 5509 | 9885 | 14261 | 18637 | 23013 | 27389 | 31765 | 35750 | |
| NC_001806 | 1133 | 1134 | 5510 | 9886 | 14262 | 18638 | 23014 | 27390 | 31766 | 35751 | 38567 |
| NC_001806 | 1134 | 1135 | 5511 | 9887 | 14263 | 18639 | 23015 | 27391 | 31767 | 35752 | |
| NC_001806 | 1135 | 1136 | 5512 | 9888 | 14264 | 18640 | 23016 | 27392 | 31768 | 35753 | |
| NC_001806 | 1136 | 1137 | 5513 | 9889 | 14265 | 18641 | 23017 | 27393 | 31769 | 35754 | |
| NC_001806 | 1137 | 1138 | 5514 | 9890 | 14266 | 18642 | 23018 | 27394 | 31770 | 35755 | 38568 |
| NC_001806 | 1138 | 1139 | 5515 | 9891 | 14267 | 18643 | 23019 | 27395 | 31771 | | 38569 |
| NC_001806 | 1139 | 1140 | 5516 | 9892 | 14268 | 18644 | 23020 | 27396 | 31772 | 35756 | |
| NC_001806 | 1140 | 1141 | 5517 | 9893 | 14269 | 18645 | 23021 | 27397 | 31773 | 35757 | |
| NC_001806 | 1141 | 1142 | 5518 | 9894 | 14270 | 18646 | 23022 | 27398 | 31774 | 35758 | |
| NC_001806 | 1142 | 1143 | 5519 | 9895 | 14271 | 18647 | 23023 | 27399 | 31775 | 35759 | 38570 |
| NC_001806 | 1143 | 1144 | 5520 | 9896 | 14272 | 18648 | 23024 | 27400 | 31776 | | 38571 |
| NC_001806 | 1144 | 1145 | 5521 | 9897 | 14273 | 18649 | 23025 | 27401 | 31777 | 35760 | 38572 |
| NC_001806 | 1145 | 1146 | 5522 | 9898 | 14274 | 18650 | 23026 | 27402 | 31778 | 35761 | |
| NC_001806 | 1146 | 1147 | 5523 | 9899 | 14275 | 18651 | 23027 | 27403 | 31779 | 35762 | |
| NC_001806 | 1147 | 1148 | 5524 | 9900 | 14276 | 18652 | 23028 | 27404 | 31780 | | 38573 |
| NC_001806 | 1148 | 1149 | 5525 | 9901 | 14277 | 18653 | 23029 | 27405 | 31781 | | 38574 |
| NC_001806 | 1149 | 1150 | 5526 | 9902 | 14278 | 18654 | 23030 | 27406 | 31782 | 35763 | |
| NC_001806 | 1150 | 1151 | 5527 | 9903 | 14279 | 18655 | 23031 | 27407 | 31783 | | 38575 |
| NC_001806 | 1151 | 1152 | 5528 | 9904 | 14280 | 18656 | 23032 | 27408 | 31784 | 35764 | 38576 |
| NC_001806 | 1152 | 1153 | 5529 | 9905 | 14281 | 18657 | 23033 | 27409 | 31785 | 35765 | 38577 |
| NC_001806 | 1153 | 1154 | 5530 | 9906 | 14282 | 18658 | 23034 | 27410 | 31786 | 35766 | 38578 |
| NC_001806 | 1154 | 1155 | 5531 | 9907 | 14283 | 18659 | 23035 | 27411 | 31787 | 35767 | 38579 |
| NC_001806 | 1155 | 1156 | 5532 | 9908 | 14284 | 18660 | 23036 | 27412 | 31788 | 35768 | 38580 |
| NC_001806 | 1156 | 1157 | 5533 | 9909 | 14285 | 18661 | 23037 | 27413 | 31789 | 35769 | 38581 |
| NC_001806 | 1157 | 1158 | 5534 | 9910 | 14286 | 18662 | 23038 | 27414 | 31790 | 35770 | |
| NC_001806 | 1158 | 1159 | 5535 | 9911 | 14287 | 18663 | 23039 | 27415 | 31791 | 35771 | 38582 |
| NC_001806 | 1159 | 1160 | 5536 | 9912 | 14288 | 18664 | 23040 | 27416 | 31792 | | 38583 |
| NC_001806 | 1160 | 1161 | 5537 | 9913 | 14289 | 18665 | 23041 | 27417 | 31793 | | 38584 |
| NC_001806 | 1161 | 1162 | 5538 | 9914 | 14290 | 18666 | 23042 | 27418 | 31794 | | 38585 |
| NC_001806 | 1162 | 1163 | 5539 | 9915 | 14291 | 18667 | 23043 | 27419 | 31795 | | 38586 |
| NC_001806 | 1163 | 1164 | 5540 | 9916 | 14292 | 18668 | 23044 | 27420 | 31796 | | 38587 |
| NC_001806 | 1164 | 1165 | 5541 | 9917 | 14293 | 18669 | 23045 | 27421 | 31797 | 35772 | 38588 |
| NC_001806 | 1165 | 1166 | 5542 | 9918 | 14294 | 18670 | 23046 | 27422 | 31798 | 35773 | 38589 |
| NC_001806 | 1166 | 1167 | 5543 | 9919 | 14295 | 18671 | 23047 | 27423 | 31799 | 35774 | |
| NC_001806 | 1167 | 1168 | 5544 | 9920 | 14296 | 18672 | 23048 | 27424 | 31800 | 35775 | |
| NC_001806 | 1168 | 1169 | 5545 | 9921 | 14297 | 18673 | 23049 | 27425 | 31801 | | 38590 |
| NC_001806 | 1169 | 1170 | 5546 | 9922 | 14298 | 18674 | 23050 | 27426 | 31802 | 35776 | 38591 |
| NC_001806 | 1170 | 1171 | 5547 | 9923 | 14299 | 18675 | 23051 | 27427 | 31803 | 35777 | 38592 |
| NC_001806 | 1171 | 1172 | 5548 | 9924 | 14300 | 18676 | 23052 | 27428 | 31804 | | 38593 |
| NC_001806 | 1172 | 1173 | 5549 | 9925 | 14301 | 18677 | 23053 | 27429 | 31805 | 35778 | 38594 |
| NC_001806 | 1173 | 1174 | 5550 | 9926 | 14302 | 18678 | 23054 | 27430 | 31806 | | 38595 |
| NC_001806 | 1174 | 1175 | 5551 | 9927 | 14303 | 18679 | 23055 | 27431 | 31807 | 35779 | 38596 |
| NC_001806 | 1175 | 1176 | 5552 | 9928 | 14304 | 18680 | 23056 | 27432 | 31808 | 35780 | 38597 |
| NC_001806 | 1176 | 1177 | 5553 | 9929 | 14305 | 18681 | 23057 | 27433 | 31809 | 35781 | 38598 |
| NC_001806 | 1177 | 1178 | 5554 | 9930 | 14306 | 18682 | 23058 | 27434 | 31810 | 35782 | |
| NC_001806 | 1178 | 1179 | 5555 | 9931 | 14307 | 18683 | 23059 | 27435 | 31811 | 35783 | 38599 |
| NC_007361 | 1179 | 1180 | 5556 | 9932 | 14308 | 18684 | 23060 | 27436 | 31812 | | 38600 |
| NC_007361 | 1180 | 1181 | 5557 | 9933 | 14309 | 18685 | 23061 | 27437 | 31813 | | 38601 |
| NC_007361 | 1181 | 1182 | 5558 | 9934 | 14310 | 18686 | 23062 | 27438 | 31814 | 35784 | 38602 |
| NC_007361 | 1182 | 1183 | 5559 | 9935 | 14311 | 18687 | 23063 | 27439 | 31815 | | 38603 |
| NC_003977 | 1183 | 1184 | 5560 | 9936 | 14312 | 18688 | 23064 | 27440 | 31816 | 35785 | 38604 |
| NC_003977 | 1184 | 1185 | 5561 | 9937 | 14313 | 18689 | 23065 | 27441 | 31817 | 35786 | |
| NC_003977 | 1185 | 1186 | 5562 | 9938 | 14314 | 18690 | 23066 | 27442 | 31818 | 35787 | |
| NC_003977 | 1186 | 1187 | 5563 | 9939 | 14315 | 18691 | 23067 | 27443 | 31819 | 35788 | 38605 |
| NC_003977 | 1187 | 1188 | 5564 | 9940 | 14316 | 18692 | 23068 | 27444 | 31820 | | 38606 |
| NC_007373 | 1188 | 1189 | 5565 | 9941 | 14317 | 18693 | 23069 | 27445 | 31821 | | 38607 |
| NC_007373 | 1189 | 1190 | 5566 | 9942 | 14318 | 18694 | 23070 | 27446 | 31822 | 35789 | |
| NC_007373 | 1190 | 1191 | 5567 | 9943 | 14319 | 18695 | 23071 | 27447 | 31823 | | 38608 |
| NC_007373 | 1191 | 1192 | 5568 | 9944 | 14320 | 18696 | 23072 | 27448 | 31824 | 35790 | |
| NC_007373 | 1192 | 1193 | 5569 | 9945 | 14321 | 18697 | 23073 | 27449 | 31825 | 35791 | |
| NC_007373 | 1193 | 1194 | 5570 | 9946 | 14322 | 18698 | 23074 | 27450 | 31826 | 35792 | 38609 |
| NC_007373 | 1194 | 1195 | 5571 | 9947 | 14323 | 18699 | 23075 | 27451 | 31827 | 35793 | 38610 |
| NC_007373 | 1195 | 1196 | 5572 | 9948 | 14324 | 18700 | 23076 | 27452 | 31828 | 35794 | |
| NC_023891 | 1196 | 1197 | 5573 | 9949 | 14325 | 18701 | 23077 | 27453 | 31829 | | 38611 |
| NC_023891 | 1197 | 1198 | 5574 | 9950 | 14326 | 18702 | 23078 | 27454 | 31830 | | 38612 |
| NC_023891 | 1198 | 1199 | 5575 | 9951 | 14327 | 18703 | 23079 | 27455 | 31831 | 35795 | |
| NC_023891 | 1199 | 1200 | 5576 | 9952 | 14328 | 18704 | 23080 | 27456 | 31832 | 35796 | 38613 |
| NC_023891 | 1200 | 1201 | 5577 | 9953 | 14329 | 18705 | 23081 | 27457 | 31833 | 35797 | |
| NC_023891 | 1201 | 1202 | 5578 | 9954 | 14330 | 18706 | 23082 | 27458 | 31834 | | 38614 |
| NC_023891 | 1202 | 1203 | 5579 | 9955 | 14331 | 18707 | 23083 | 27459 | 31835 | 35798 | |
| NC_023891 | 1203 | 1204 | 5580 | 9956 | 14332 | 18708 | 23084 | 27460 | 31836 | | 38615 |
| NC_023891 | 1204 | 1205 | 5581 | 9957 | 14333 | 18709 | 23085 | 27461 | 31837 | 35799 | |
| NC_023891 | 1205 | 1206 | 5582 | 9958 | 14334 | 18710 | 23086 | 27462 | 31838 | 35800 | |
| NC_023891 | 1206 | 1207 | 5583 | 9959 | 14335 | 18711 | 23087 | 27463 | 31839 | | 38616 |
| NC_023891 | 1207 | 1208 | 5584 | 9960 | 14336 | 18712 | 23088 | 27464 | 31840 | 35801 | |
| NC_023891 | 1208 | 1209 | 5585 | 9961 | 14337 | 18713 | 23089 | 27465 | 31841 | 35802 | |
| NC_023891 | 1209 | 1210 | 5586 | 9962 | 14338 | 18714 | 23090 | 27466 | 31842 | | 38617 |
| NC_023891 | 1210 | 1211 | 5587 | 9963 | 14339 | 18715 | 23091 | 27467 | 31843 | 35803 | |
| NC_023891 | 1211 | 1212 | 5588 | 9964 | 14340 | 18716 | 23092 | 27468 | 31844 | | 38618 |
| NC_023891 | 1212 | 1213 | 5589 | 9965 | 14341 | 18717 | 23093 | 27469 | 31845 | 35804 | |
| NC_001690 | 1213 | 1214 | 5590 | 9966 | 14342 | 18718 | 23094 | 27470 | 31846 | | 38619 |
| NC_001690 | 1214 | 1215 | 5591 | 9967 | 14343 | 18719 | 23095 | 27471 | 31847 | 35805 | |
| NC_001690 | 1215 | 1216 | 5592 | 9968 | 14344 | 18720 | 23096 | 27472 | 31848 | 35806 | |
| NC_001690 | 1216 | 1217 | 5593 | 9969 | 14345 | 18721 | 23097 | 27473 | 31849 | | 38620 |
| NC_001690 | 1217 | 1218 | 5594 | 9970 | 14346 | 18722 | 23098 | 27474 | 31850 | 35807 | |
| NC_001690 | 1218 | 1219 | 5595 | 9971 | 14347 | 18723 | 23099 | 27475 | 31851 | | 38621 |
| NC_001690 | 1219 | 1220 | 5596 | 9972 | 14348 | 18724 | 23100 | 27476 | 31852 | | 38622 |
| NC_001690 | 1220 | 1221 | 5597 | 9973 | 14349 | 18725 | 23101 | 27477 | 31853 | 35808 | |
| NC_001690 | 1221 | 1222 | 5598 | 9974 | 14350 | 18726 | 23102 | 27478 | 31854 | | 38623 |
| NC_001722 | 1222 | 1223 | 5599 | 9975 | 14351 | 18727 | 23103 | 27479 | 31855 | | 38624 |
| NC_001722 | 1223 | 1224 | 5600 | 9976 | 14352 | 18728 | 23104 | 27480 | 31856 | 35809 | 38625 |
| NC_001722 | 1224 | 1225 | 5601 | 9977 | 14353 | 18729 | 23105 | 27481 | 31857 | | 38626 |
| NC_001722 | 1225 | 1226 | 5602 | 9978 | 14354 | 18730 | 23106 | 27482 | 31858 | 35810 | |
| NC_001722 | 1226 | 1227 | 5603 | 9979 | 14355 | 18731 | 23107 | 27483 | 31859 | | 38627 |
| NC_001722 | 1227 | 1228 | 5604 | 9980 | 14356 | 18732 | 23108 | 27484 | 31860 | | 38628 |
| NC_001722 | 1228 | 1229 | 5605 | 9981 | 14357 | 18733 | 23109 | 27485 | 31861 | 35811 | 38629 |
| NC_001722 | 1229 | 1230 | 5606 | 9982 | 14358 | 18734 | 23110 | 27486 | 31862 | 35812 | |
| NC_001722 | 1230 | 1231 | 5607 | 9983 | 14359 | 18735 | 23111 | 27487 | 31863 | 35813 | 38630 |
| NC_001722 | 1231 | 1232 | 5608 | 9984 | 14360 | 18736 | 23112 | 27488 | 31864 | 35814 | |
| NC_001722 | 1232 | 1233 | 5609 | 9985 | 14361 | 18737 | 23113 | 27489 | 31865 | 35815 | |
| NC_001722 | 1233 | 1234 | 5610 | 9986 | 14362 | 18738 | 23114 | 27490 | 31866 | 35816 | |
| NC_001722 | 1234 | 1235 | 5611 | 9987 | 14363 | 18739 | 23115 | 27491 | 31867 | 35817 | |
| NC_001722 | 1235 | 1236 | 5612 | 9988 | 14364 | 18740 | 23116 | 27492 | 31868 | 35818 | |
| NC_001722 | 1236 | 1237 | 5613 | 9989 | 14365 | 18741 | 23117 | 27493 | 31869 | 35819 | 38631 |
| NC_001722 | 1237 | 1238 | 5614 | 9990 | 14366 | 18742 | 23118 | 27494 | 31870 | 35820 | |
| NC_001722 | 1238 | 1239 | 5615 | 9991 | 14367 | 18743 | 23119 | 27495 | 31871 | | 38632 |
| NC_001722 | 1239 | 1240 | 5616 | 9992 | 14368 | 18744 | 23120 | 27496 | 31872 | 35821 | 38633 |
| NC_001722 | 1240 | 1241 | 5617 | 9993 | 14369 | 18745 | 23121 | 27497 | 31873 | 35822 | |
| NC_001722 | 1241 | 1242 | 5618 | 9994 | 14370 | 18746 | 23122 | 27498 | 31874 | 35823 | 38634 |
| NC_001722 | 1242 | 1243 | 5619 | 9995 | 14371 | 18747 | 23123 | 27499 | 31875 | | 38635 |
| NC_001722 | 1243 | 1244 | 5620 | 9996 | 14372 | 18748 | 23124 | 27500 | 31876 | | 38636 |
| NC_001722 | 1244 | 1245 | 5621 | 9997 | 14373 | 18749 | 23125 | 27501 | 31877 | 35824 | 38637 |
| NC_001722 | 1245 | 1246 | 5622 | 9998 | 14374 | 18750 | 23126 | 27502 | 31878 | | 38638 |
| NC_001722 | 1246 | 1247 | 5623 | 9999 | 14375 | 18751 | 23127 | 27503 | 31879 | 35825 | 38639 |
| NC_001722 | 1247 | 1248 | 5624 | 10000 | 14376 | 18752 | 23128 | 27504 | 31880 | 35826 | |
| NC_001722 | 1248 | 1249 | 5625 | 10001 | 14377 | 18753 | 23129 | 27505 | 31881 | | 38640 |
| NC_001722 | 1249 | 1250 | 5626 | 10002 | 14378 | 18754 | 23130 | 27506 | 31882 | | 38641 |
| NC_002207 | 1250 | 1251 | 5627 | 10003 | 14379 | 18755 | 23131 | 27507 | 31883 | | 38642 |
| NC_002207 | 1251 | 1252 | 5628 | 10004 | 14380 | 18756 | 23132 | 27508 | 31884 | 35827 | |
| NC_002207 | 1252 | 1253 | 5629 | 10005 | 14381 | 18757 | 23133 | 27509 | 31885 | 35828 | |
| NC_002207 | 1253 | 1254 | 5630 | 10006 | 14382 | 18758 | 23134 | 27510 | 31886 | 35829 | 38643 |
| NC_002207 | 1254 | 1255 | 5631 | 10007 | 14383 | 18759 | 23135 | 27511 | 31887 | 35830 | 38644 |
| NC_002207 | 1255 | 1256 | 5632 | 10008 | 14384 | 18760 | 23136 | 27512 | 31888 | 35831 | |
| NC_002207 | 1256 | 1257 | 5633 | 10009 | 14385 | 18761 | 23137 | 27513 | 31889 | 35832 | |
| NC_007363 | 1257 | 1258 | 5634 | 10010 | 14386 | 18762 | 23138 | 27514 | 31890 | 35833 | |
| NC_007363 | 1258 | 1259 | 5635 | 10011 | 14387 | 18763 | 23139 | 27515 | 31891 | | 38645 |
| NC_007363 | 1259 | 1260 | 5636 | 10012 | 14388 | 18764 | 23140 | 27516 | 31892 | 35834 | |
| NC_038522 | 1260 | 1261 | 5637 | 10013 | 14389 | 18765 | 23141 | 27517 | 31893 | 35835 | |
| NC_038522 | 1261 | 1262 | 5638 | 10014 | 14390 | 18766 | 23142 | 27518 | 31894 | 35836 | |
| NC_038522 | 1262 | 1263 | 5639 | 10015 | 14391 | 18767 | 23143 | 27519 | 31895 | | 38646 |
| NC_038522 | 1263 | 1264 | 5640 | 10016 | 14392 | 18768 | 23144 | 27520 | 31896 | 35837 | |
| NC_038522 | 1264 | 1265 | 5641 | 10017 | 14393 | 18769 | 23145 | 27521 | 31897 | 35838 | |
| NC_038522 | 1265 | 1266 | 5642 | 10018 | 14394 | 18770 | 23146 | 27522 | 31898 | 35839 | |
| NC_038522 | 1266 | 1267 | 5643 | 10019 | 14395 | 18771 | 23147 | 27523 | 31899 | 35840 | |
| NC_038522 | 1267 | 1268 | 5644 | 10020 | 14396 | 18772 | 23148 | 27524 | 31900 | | 38647 |
| NC_038522 | 1268 | 1269 | 5645 | 10021 | 14397 | 18773 | 23149 | 27525 | 31901 | | 38648 |
| NC_038522 | 1269 | 1270 | 5646 | 10022 | 14398 | 18774 | 23150 | 27526 | 31902 | | 38649 |
| NC_038522 | 1270 | 1271 | 5647 | 10023 | 14399 | 18775 | 23151 | 27527 | 31903 | 35841 | |
| NC_038522 | 1271 | 1272 | 5648 | 10024 | 14400 | 18776 | 23152 | 27528 | 31904 | | 38650 |
| NC_038522 | 1272 | 1273 | 5649 | 10025 | 14401 | 18777 | 23153 | 27529 | 31905 | | 38651 |
| NC_038522 | 1273 | 1274 | 5650 | 10026 | 14402 | 18778 | 23154 | 27530 | 31906 | 35842 | |
| NC_038522 | 1274 | 1275 | 5651 | 10027 | 14403 | 18779 | 23155 | 27531 | 31907 | 35843 | |
| NC_021483 | 1275 | 1276 | 5652 | 10028 | 14404 | 18780 | 23156 | 27532 | 31908 | 35844 | |
| NC_021483 | 1276 | 1277 | 5653 | 10029 | 14405 | 18781 | 23157 | 27533 | 31909 | 35845 | |
| NC_021483 | 1277 | 1278 | 5654 | 10030 | 14406 | 18782 | 23158 | 27534 | 31910 | 35846 | |
| NC_021483 | 1278 | 1279 | 5655 | 10031 | 14407 | 18783 | 23159 | 27535 | 31911 | 35847 | |
| NC_021483 | 1279 | 1280 | 5656 | 10032 | 14408 | 18784 | 23160 | 27536 | 31912 | 35848 | |
| NC_021483 | 1280 | 1281 | 5657 | 10033 | 14409 | 18785 | 23161 | 27537 | 31913 | 35849 | |
| NC_021483 | 1281 | 1282 | 5658 | 10034 | 14410 | 18786 | 23162 | 27538 | 31914 | 35850 | |
| NC_021483 | 1282 | 1283 | 5659 | 10035 | 14411 | 18787 | 23163 | 27539 | 31915 | 35851 | 38652 |
| NC_021483 | 1283 | 1284 | 5660 | 10036 | 14412 | 18788 | 23164 | 27540 | 31916 | 35852 | 38653 |
| NC_021483 | 1284 | 1285 | 5661 | 10037 | 14413 | 18789 | 23165 | 27541 | 31917 | 35853 | |
| NC_021483 | 1285 | 1286 | 5662 | 10038 | 14414 | 18790 | 23166 | 27542 | 31918 | | 38654 |
| NC_021483 | 1286 | 1287 | 5663 | 10039 | 14415 | 18791 | 23167 | 27543 | 31919 | 35854 | 38655 |
| NC_021483 | 1287 | 1288 | 5664 | 10040 | 14416 | 18792 | 23168 | 27544 | 31920 | 35855 | |
| NC_021483 | 1288 | 1289 | 5665 | 10041 | 14417 | 18793 | 23169 | 27545 | 31921 | | 38656 |
| NC_004910 | 1289 | 1290 | 5666 | 10042 | 14418 | 18794 | 23170 | 27546 | 31922 | 35856 | |
| NC_004910 | 1290 | 1291 | 5667 | 10043 | 14419 | 18795 | 23171 | 27547 | 31923 | 35857 | |
| NC_004910 | 1291 | 1292 | 5668 | 10044 | 14420 | 18796 | 23172 | 27548 | 31924 | 35858 | |
| NC_004910 | 1292 | 1293 | 5669 | 10045 | 14421 | 18797 | 23173 | 27549 | 31925 | | 38657 |
| NC_004910 | 1293 | 1294 | 5670 | 10046 | 14422 | 18798 | 23174 | 27550 | 31926 | 35859 | 38658 |
| NC_004910 | 1294 | 1295 | 5671 | 10047 | 14423 | 18799 | 23175 | 27551 | 31927 | | 38659 |
| NC_004910 | 1295 | 1296 | 5672 | 10048 | 14424 | 18800 | 23176 | 27552 | 31928 | 35860 | |
| NC_004910 | 1296 | 1297 | 5673 | 10049 | 14425 | 18801 | 23177 | 27553 | 31929 | | 38660 |
| NC_004910 | 1297 | 1298 | 5674 | 10050 | 14426 | 18802 | 23178 | 27554 | 31930 | 35861 | 38661 |
| NC_026425 | 1298 | 1299 | 5675 | 10051 | 14427 | 18803 | 23179 | 27555 | 31931 | 35862 | |
| NC_026425 | 1299 | 1300 | 5676 | 10052 | 14428 | 18804 | 23180 | 27556 | 31932 | | 38662 |
| NC_026425 | 1300 | 1301 | 5677 | 10053 | 14429 | 18805 | 23181 | 27557 | 31933 | 35863 | |
| NC_026425 | 1301 | 1302 | 5678 | 10054 | 14430 | 18806 | 23182 | 27558 | 31934 | 35864 | |
| NC_026425 | 1302 | 1303 | 5679 | 10055 | 14431 | 18807 | 23183 | 27559 | 31935 | 35865 | 38663 |
| NC_026425 | 1303 | 1304 | 5680 | 10056 | 14432 | 18808 | 23184 | 27560 | 31936 | | 38664 |
| NC_001586 | 1304 | 1305 | 5681 | 10057 | 14433 | 18809 | 23185 | 27561 | 31937 | | 38665 |
| NC_001586 | 1305 | 1306 | 5682 | 10058 | 14434 | 18810 | 23186 | 27562 | 31938 | 35866 | |
| NC_001586 | 1306 | 1307 | 5683 | 10059 | 14435 | 18811 | 23187 | 27563 | 31939 | 35867 | 38666 |
| NC_001586 | 1307 | 1308 | 5684 | 10060 | 14436 | 18812 | 23188 | 27564 | 31940 | | 38667 |
| NC_001586 | 1308 | 1309 | 5685 | 10061 | 14437 | 18813 | 23189 | 27565 | 31941 | 35868 | |
| NC_001586 | 1309 | 1310 | 5686 | 10062 | 14438 | 18814 | 23190 | 27566 | 31942 | | 38668 |
| NC_001586 | 1310 | 1311 | 5687 | 10063 | 14439 | 18815 | 23191 | 27567 | 31943 | | 38669 |
| NC_001586 | 1311 | 1312 | 5688 | 10064 | 14440 | 18816 | 23192 | 27568 | 31944 | 35869 | |
| NC_001586 | 1312 | 1313 | 5689 | 10065 | 14441 | 18817 | 23193 | 27569 | 31945 | 35870 | 38670 |
| NC_001586 | 1313 | 1314 | 5690 | 10066 | 14442 | 18818 | 23194 | 27570 | 31946 | | 38671 |
| NC_001586 | 1314 | 1315 | 5691 | 10067 | 14443 | 18819 | 23195 | 27571 | 31947 | 35871 | |
| NC_001586 | 1315 | 1316 | 5692 | 10068 | 14444 | 18820 | 23196 | 27572 | 31948 | | 38672 |
| NC_001586 | 1316 | 1317 | 5693 | 10069 | 14445 | 18821 | 23197 | 27573 | 31949 | | 38673 |
| NC_001586 | 1317 | 1318 | 5694 | 10070 | 14446 | 18822 | 23198 | 27574 | 31950 | | 38674 |
| NC_001586 | 1318 | 1319 | 5695 | 10071 | 14447 | 18823 | 23199 | 27575 | 31951 | 35872 | |
| NC_001586 | 1319 | 1320 | 5696 | 10072 | 14448 | 18824 | 23200 | 27576 | 31952 | | 38675 |
| NC_001586 | 1320 | 1321 | 5697 | 10073 | 14449 | 18825 | 23201 | 27577 | 31953 | | 38676 |
| NC_017994 | 1321 | 1322 | 5698 | 10074 | 14450 | 18826 | 23202 | 27578 | 31954 | 35873 | |
| NC_017994 | 1322 | 1323 | 5699 | 10075 | 14451 | 18827 | 23203 | 27579 | 31955 | 35874 | |
| NC_017994 | 1323 | 1324 | 5700 | 10076 | 14452 | 18828 | 23204 | 27580 | 31956 | 35875 | |
| NC_017994 | 1324 | 1325 | 5701 | 10077 | 14453 | 18829 | 23205 | 27581 | 31957 | 35876 | 38677 |
| NC_017994 | 1325 | 1326 | 5702 | 10078 | 14454 | 18830 | 23206 | 27582 | 31958 | 35877 | 38678 |
| NC_017994 | 1326 | 1327 | 5703 | 10079 | 14455 | 18831 | 23207 | 27583 | 31959 | | 38679 |
| NC_017994 | 1327 | 1328 | 5704 | 10080 | 14456 | 18832 | 23208 | 27584 | 31960 | 35878 | |
| NC_017994 | 1328 | 1329 | 5705 | 10081 | 14457 | 18833 | 23209 | 27585 | 31961 | | 38680 |
| NC_017994 | 1329 | 1330 | 5706 | 10082 | 14458 | 18834 | 23210 | 27586 | 31962 | 35879 | |
| NC_017994 | 1330 | 1331 | 5707 | 10083 | 14459 | 18835 | 23211 | 27587 | 31963 | | 38681 |
| NC_017994 | 1331 | 1332 | 5708 | 10084 | 14460 | 18836 | 23212 | 27588 | 31964 | | 38682 |
| NC_004907 | 1332 | 1333 | 5709 | 10085 | 14461 | 18837 | 23213 | 27589 | 31965 | | 38683 |
| NC_004907 | 1333 | 1334 | 5710 | 10086 | 14462 | 18838 | 23214 | 27590 | 31966 | 35880 | 38684 |
| NC_001796 | 1334 | 1335 | 5711 | 10087 | 14463 | 18839 | 23215 | 27591 | 31967 | 35881 | |
| NC_001796 | 1335 | 1336 | 5712 | 10088 | 14464 | 18840 | 23216 | 27592 | 31968 | 35882 | |
| NC_001796 | 1336 | 1337 | 5713 | 10089 | 14465 | 18841 | 23217 | 27593 | 31969 | 35883 | 38685 |
| NC_001796 | 1337 | 1338 | 5714 | 10090 | 14466 | 18842 | 23218 | 27594 | 31970 | 35884 | |
| NC_001796 | 1338 | 1339 | 5715 | 10091 | 14467 | 18843 | 23219 | 27595 | 31971 | 35885 | |
| NC_001796 | 1339 | 1340 | 5716 | 10092 | 14468 | 18844 | 23220 | 27596 | 31972 | 35886 | |
| NC_001796 | 1340 | 1341 | 5717 | 10093 | 14469 | 18845 | 23221 | 27597 | 31973 | 35887 | |
| NC_001796 | 1341 | 1342 | 5718 | 10094 | 14470 | 18846 | 23222 | 27598 | 31974 | | 38686 |
| NC_001796 | 1342 | 1343 | 5719 | 10095 | 14471 | 18847 | 23223 | 27599 | 31975 | | 38687 |
| NC_001796 | 1343 | 1344 | 5720 | 10096 | 14472 | 18848 | 23224 | 27600 | 31976 | 35888 | |
| NC_001796 | 1344 | 1345 | 5721 | 10097 | 14473 | 18849 | 23225 | 27601 | 31977 | 35889 | |
| NC_001796 | 1345 | 1346 | 5722 | 10098 | 14474 | 18850 | 23226 | 27602 | 31978 | | 38688 |
| NC_001796 | 1346 | 1347 | 5723 | 10099 | 14475 | 18851 | 23227 | 27603 | 31979 | 35890 | |
| NC_001796 | 1347 | 1348 | 5724 | 10100 | 14476 | 18852 | 23228 | 27604 | 31980 | | 38689 |
| NC_001796 | 1348 | 1349 | 5725 | 10101 | 14477 | 18853 | 23229 | 27605 | 31981 | | 38690 |
| NC_001796 | 1349 | 1350 | 5726 | 10102 | 14478 | 18854 | 23230 | 27606 | 31982 | 35891 | 38691 |
| NC_001796 | 1350 | 1351 | 5727 | 10103 | 14479 | 18855 | 23231 | 27607 | 31983 | | 38692 |
| NC_001796 | 1351 | 1352 | 5728 | 10104 | 14480 | 18856 | 23232 | 27608 | 31984 | 35892 | |
| NC_001796 | 1352 | 1353 | 5729 | 10105 | 14481 | 18857 | 23233 | 27609 | 31985 | 35893 | |
| NC_001796 | 1353 | 1354 | 5730 | 10106 | 14482 | 18858 | 23234 | 27610 | 31986 | | 38693 |
| NC_001796 | 1354 | 1355 | 5731 | 10107 | 14483 | 18859 | 23235 | 27611 | 31987 | 35894 | |
| NC_001796 | 1355 | 1356 | 5732 | 10108 | 14484 | 18860 | 23236 | 27612 | 31988 | 35895 | |
| NC_002645 | 1356 | 1357 | 5733 | 10109 | 14485 | 18861 | 23237 | 27613 | 31989 | 35896 | 38694 |
| NC_002645 | 1357 | 1358 | 5734 | 10110 | 14486 | 18862 | 23238 | 27614 | 31990 | | 38695 |
| NC_002645 | 1358 | 1359 | 5735 | 10111 | 14487 | 18863 | 23239 | 27615 | 31991 | 35897 | |
| NC_002645 | 1359 | 1360 | 5736 | 10112 | 14488 | 18864 | 23240 | 27616 | 31992 | 35898 | |
| NC_002645 | 1360 | 1361 | 5737 | 10113 | 14489 | 18865 | 23241 | 27617 | 31993 | | 38696 |
| NC_002645 | 1361 | 1362 | 5738 | 10114 | 14490 | 18866 | 23242 | 27618 | 31994 | 35899 | |
| NC_002645 | 1362 | 1363 | 5739 | 10115 | 14491 | 18867 | 23243 | 27619 | 31995 | 35900 | |
| NC_002645 | 1363 | 1364 | 5740 | 10116 | 14492 | 18868 | 23244 | 27620 | 31996 | 35901 | 38697 |
| NC_002645 | 1364 | 1365 | 5741 | 10117 | 14493 | 18869 | 23245 | 27621 | 31997 | 35902 | |
| NC_002645 | 1365 | 1366 | 5742 | 10118 | 14494 | 18870 | 23246 | 27622 | 31998 | | 38698 |
| NC_002645 | 1366 | 1367 | 5743 | 10119 | 14495 | 18871 | 23247 | 27623 | 31999 | 35903 | |
| NC_002645 | 1367 | 1368 | 5744 | 10120 | 14496 | 18872 | 23248 | 27624 | 32000 | | 38699 |
| NC_002645 | 1368 | 1369 | 5745 | 10121 | 14497 | 18873 | 23249 | 27625 | 32001 | 35904 | |
| NC_002645 | 1369 | 1370 | 5746 | 10122 | 14498 | 18874 | 23250 | 27626 | 32002 | 35905 | |
| NC_002645 | 1370 | 1371 | 5747 | 10123 | 14499 | 18875 | 23251 | 27627 | 32003 | | 38700 |
| NC_002645 | 1371 | 1372 | 5748 | 10124 | 14500 | 18876 | 23252 | 27628 | 32004 | 35906 | |
| NC_002645 | 1372 | 1373 | 5749 | 10125 | 14501 | 18877 | 23253 | 27629 | 32005 | 35907 | |
| NC_002645 | 1373 | 1374 | 5750 | 10126 | 14502 | 18878 | 23254 | 27630 | 32006 | 35908 | 38701 |
| NC_002645 | 1374 | 1375 | 5751 | 10127 | 14503 | 18879 | 23255 | 27631 | 32007 | 35909 | |
| NC_002645 | 1375 | 1376 | 5752 | 10128 | 14504 | 18880 | 23256 | 27632 | 32008 | 35910 | |
| NC_002645 | 1376 | 1377 | 5753 | 10129 | 14505 | 18881 | 23257 | 27633 | 32009 | 35911 | |
| NC_002645 | 1377 | 1378 | 5754 | 10130 | 14506 | 18882 | 23258 | 27634 | 32010 | 35912 | |
| NC_002645 | 1378 | 1379 | 5755 | 10131 | 14507 | 18883 | 23259 | 27635 | 32011 | 35913 | |
| NC_002645 | 1379 | 1380 | 5756 | 10132 | 14508 | 18884 | 23260 | 27636 | 32012 | 35914 | |
| NC_002645 | 1380 | 1381 | 5757 | 10133 | 14509 | 18885 | 23261 | 27637 | 32013 | 35915 | 38702 |
| NC_002645 | 1381 | 1382 | 5758 | 10134 | 14510 | 18886 | 23262 | 27638 | 32014 | | 38703 |
| NC_002645 | 1382 | 1383 | 5759 | 10135 | 14511 | 18887 | 23263 | 27639 | 32015 | 35916 | 38704 |
| NC_002645 | 1383 | 1384 | 5760 | 10136 | 14512 | 18888 | 23264 | 27640 | 32016 | | 38705 |
| NC_002645 | 1384 | 1385 | 5761 | 10137 | 14513 | 18889 | 23265 | 27641 | 32017 | | 38706 |
| NC_002645 | 1385 | 1386 | 5762 | 10138 | 14514 | 18890 | 23266 | 27642 | 32018 | 35917 | |
| NC_002645 | 1386 | 1387 | 5763 | 10139 | 14515 | 18891 | 23267 | 27643 | 32019 | 35918 | |
| NC_002645 | 1387 | 1388 | 5764 | 10140 | 14516 | 18892 | 23268 | 27644 | 32020 | 35919 | |
| NC_002645 | 1388 | 1389 | 5765 | 10141 | 14517 | 18893 | 23269 | 27645 | 32021 | | 38707 |
| NC_002645 | 1389 | 1390 | 5766 | 10142 | 14518 | 18894 | 23270 | 27646 | 32022 | 35920 | |
| NC_002645 | 1390 | 1391 | 5767 | 10143 | 14519 | 18895 | 23271 | 27647 | 32023 | 35921 | |
| NC_002645 | 1391 | 1392 | 5768 | 10144 | 14520 | 18896 | 23272 | 27648 | 32024 | 35922 | |
| NC_002645 | 1392 | 1393 | 5769 | 10145 | 14521 | 18897 | 23273 | 27649 | 32025 | 35923 | |
| NC_002645 | 1393 | 1394 | 5770 | 10146 | 14522 | 18898 | 23274 | 27650 | 32026 | 35924 | |
| NC_002645 | 1394 | 1395 | 5771 | 10147 | 14523 | 18899 | 23275 | 27651 | 32027 | 35925 | |
| NC_002645 | 1395 | 1396 | 5772 | 10148 | 14524 | 18900 | 23276 | 27652 | 32028 | 35926 | |
| NC_002645 | 1396 | 1397 | 5773 | 10149 | 14525 | 18901 | 23277 | 27653 | 32029 | 35927 | |
| NC_002645 | 1397 | 1398 | 5774 | 10150 | 14526 | 18902 | 23278 | 27654 | 32030 | 35928 | |
| NC_002645 | 1398 | 1399 | 5775 | 10151 | 14527 | 18903 | 23279 | 27655 | 32031 | 35929 | |
| NC_002645 | 1399 | 1400 | 5776 | 10152 | 14528 | 18904 | 23280 | 27656 | 32032 | 35930 | |
| NC_002645 | 1400 | 1401 | 5777 | 10153 | 14529 | 18905 | 23281 | 27657 | 32033 | | 38708 |
| NC_002645 | 1401 | 1402 | 5778 | 10154 | 14530 | 18906 | 23282 | 27658 | 32034 | 35931 | |
| NC_002645 | 1402 | 1403 | 5779 | 10155 | 14531 | 18907 | 23283 | 27659 | 32035 | 35932 | |
| NC_002645 | 1403 | 1404 | 5780 | 10156 | 14532 | 18908 | 23284 | 27660 | 32036 | | 38709 |
| NC_002645 | 1404 | 1405 | 5781 | 10157 | 14533 | 18909 | 23285 | 27661 | 32037 | 35933 | |
| NC_002645 | 1405 | 1406 | 5782 | 10158 | 14534 | 18910 | 23286 | 27662 | 32038 | 35934 | |
| NC_002645 | 1406 | 1407 | 5783 | 10159 | 14535 | 18911 | 23287 | 27663 | 32039 | 35935 | |
| NC_002645 | 1407 | 1408 | 5784 | 10160 | 14536 | 18912 | 23288 | 27664 | 32040 | 35936 | |
| NC_002645 | 1408 | 1409 | 5785 | 10161 | 14537 | 18913 | 23289 | 27665 | 32041 | 35937 | |
| NC_002645 | 1409 | 1410 | 5786 | 10162 | 14538 | 18914 | 23290 | 27666 | 32042 | 35938 | |
| NC_002645 | 1410 | 1411 | 5787 | 10163 | 14539 | 18915 | 23291 | 27667 | 32043 | 35939 | |
| NC_002645 | 1411 | 1412 | 5788 | 10164 | 14540 | 18916 | 23292 | 27668 | 32044 | 35940 | 38710 |
| NC_002645 | 1412 | 1413 | 5789 | 10165 | 14541 | 18917 | 23293 | 27669 | 32045 | | 38711 |
| NC_002645 | 1413 | 1414 | 5790 | 10166 | 14542 | 18918 | 23294 | 27670 | 32046 | 35941 | |
| NC_002645 | 1414 | 1415 | 5791 | 10167 | 14543 | 18919 | 23295 | 27671 | 32047 | 35942 | |
| NC_002645 | 1415 | 1416 | 5792 | 10168 | 14544 | 18920 | 23296 | 27672 | 32048 | | 38712 |
| NC_002645 | 1416 | 1417 | 5793 | 10169 | 14545 | 18921 | 23297 | 27673 | 32049 | 35943 | |
| NC_002645 | 1417 | 1418 | 5794 | 10170 | 14546 | 18922 | 23298 | 27674 | 32050 | 35944 | |
| NC_002645 | 1418 | 1419 | 5795 | 10171 | 14547 | 18923 | 23299 | 27675 | 32051 | | 38713 |
| NC_002645 | 1419 | 1420 | 5796 | 10172 | 14548 | 18924 | 23300 | 27676 | 32052 | | 38714 |
| NC_002645 | 1420 | 1421 | 5797 | 10173 | 14549 | 18925 | 23301 | 27677 | 32053 | 35945 | |
| NC_002645 | 1421 | 1422 | 5798 | 10174 | 14550 | 18926 | 23302 | 27678 | 32054 | | 38715 |
| NC_002645 | 1422 | 1423 | 5799 | 10175 | 14551 | 18927 | 23303 | 27679 | 32055 | 35946 | 38716 |
| NC_002645 | 1423 | 1424 | 5800 | 10176 | 14552 | 18928 | 23304 | 27680 | 32056 | 35947 | |
| NC_002645 | 1424 | 1425 | 5801 | 10177 | 14553 | 18929 | 23305 | 27681 | 32057 | | 38717 |
| NC_002645 | 1425 | 1426 | 5802 | 10178 | 14554 | 18930 | 23306 | 27682 | 32058 | 35948 | 38718 |
| NC_002645 | 1426 | 1427 | 5803 | 10179 | 14555 | 18931 | 23307 | 27683 | 32059 | 35949 | |
| NC_002645 | 1427 | 1428 | 5804 | 10180 | 14556 | 18932 | 23308 | 27684 | 32060 | | 38719 |
| NC_002645 | 1428 | 1429 | 5805 | 10181 | 14557 | 18933 | 23309 | 27685 | 32061 | 35950 | 38720 |
| NC_002645 | 1429 | 1430 | 5806 | 10182 | 14558 | 18934 | 23310 | 27686 | 32062 | | 38721 |
| NC_002645 | 1430 | 1431 | 5807 | 10183 | 14559 | 18935 | 23311 | 27687 | 32063 | 35951 | |
| NC_002645 | 1431 | 1432 | 5808 | 10184 | 14560 | 18936 | 23312 | 27688 | 32064 | | 38722 |
| NC_002645 | 1432 | 1433 | 5809 | 10185 | 14561 | 18937 | 23313 | 27689 | 32065 | | 38723 |
| NC_002645 | 1433 | 1434 | 5810 | 10186 | 14562 | 18938 | 23314 | 27690 | 32066 | 35952 | |
| NC_002645 | 1434 | 1435 | 5811 | 10187 | 14563 | 18939 | 23315 | 27691 | 32067 | 35953 | 38724 |
| NC_002645 | 1435 | 1436 | 5812 | 10188 | 14564 | 18940 | 23316 | 27692 | 32068 | | 38725 |
| NC_002645 | 1436 | 1437 | 5813 | 10189 | 14565 | 18941 | 23317 | 27693 | 32069 | 35954 | |
| NC_012213 | 1437 | 1438 | 5814 | 10190 | 14566 | 18942 | 23318 | 27694 | 32070 | | 38726 |
| NC_012213 | 1438 | 1439 | 5815 | 10191 | 14567 | 18943 | 23319 | 27695 | 32071 | | 38727 |
| NC_012213 | 1439 | 1440 | 5816 | 10192 | 14568 | 18944 | 23320 | 27696 | 32072 | | 38728 |
| NC_012213 | 1440 | 1441 | 5817 | 10193 | 14569 | 18945 | 23321 | 27697 | 32073 | | 38729 |
| NC_012213 | 1441 | 1442 | 5818 | 10194 | 14570 | 18946 | 23322 | 27698 | 32074 | 35955 | |
| NC_012213 | 1442 | 1443 | 5819 | 10195 | 14571 | 18947 | 23323 | 27699 | 32075 | | 38730 |
| NC_012213 | 1443 | 1444 | 5820 | 10196 | 14572 | 18948 | 23324 | 27700 | 32076 | | 38731 |
| NC_012213 | 1444 | 1445 | 5821 | 10197 | 14573 | 18949 | 23325 | 27701 | 32077 | 35956 | 38732 |
| NC_012213 | 1445 | 1446 | 5822 | 10198 | 14574 | 18950 | 23326 | 27702 | 32078 | 35957 | |
| NC_012213 | 1446 | 1447 | 5823 | 10199 | 14575 | 18951 | 23327 | 27703 | 32079 | | 38733 |
| NC_012213 | 1447 | 1448 | 5824 | 10200 | 14576 | 18952 | 23328 | 27704 | 32080 | 35958 | |
| NC_012213 | 1448 | 1449 | 5825 | 10201 | 14577 | 18953 | 23329 | 27705 | 32081 | | 38734 |
| NC_012213 | 1449 | 1450 | 5826 | 10202 | 14578 | 18954 | 23330 | 27706 | 32082 | 35959 | |
| NC_012213 | 1450 | 1451 | 5827 | 10203 | 14579 | 18955 | 23331 | 27707 | 32083 | | 38735 |
| NC_012213 | 1451 | 1452 | 5828 | 10204 | 14580 | 18956 | 23332 | 27708 | 32084 | 35960 | |
| NC_012213 | 1452 | 1453 | 5829 | 10205 | 14581 | 18957 | 23333 | 27709 | 32085 | | 38736 |
| NC_007605 | 1453 | 1454 | 5830 | 10206 | 14582 | 18958 | 23334 | 27710 | 32086 | 35961 | 38737 |
| NC_007605 | 1454 | 1455 | 5831 | 10207 | 14583 | 18959 | 23335 | 27711 | 32087 | 35962 | |
| NC_007605 | 1455 | 1456 | 5832 | 10208 | 14584 | 18960 | 23336 | 27712 | 32088 | 35963 | |
| NC_007605 | 1456 | 1457 | 5833 | 10209 | 14585 | 18961 | 23337 | 27713 | 32089 | | 38738 |
| NC_007605 | 1457 | 1458 | 5834 | 10210 | 14586 | 18962 | 23338 | 27714 | 32090 | 35964 | |
| NC_007605 | 1458 | 1459 | 5835 | 10211 | 14587 | 18963 | 23339 | 27715 | 32091 | 35965 | |
| NC_007605 | 1459 | 1460 | 5836 | 10212 | 14588 | 18964 | 23340 | 27716 | 32092 | 35966 | |
| NC_007605 | 1460 | 1461 | 5837 | 10213 | 14589 | 18965 | 23341 | 27717 | 32093 | 35967 | |
| NC_007605 | 1461 | 1462 | 5838 | 10214 | 14590 | 18966 | 23342 | 27718 | 32094 | 35968 | |
| NC_007605 | 1462 | 1463 | 5839 | 10215 | 14591 | 18967 | 23343 | 27719 | 32095 | 35969 | |
| NC_007605 | 1463 | 1464 | 5840 | 10216 | 14592 | 18968 | 23344 | 27720 | 32096 | | 38739 |
| NC_007605 | 1464 | 1465 | 5841 | 10217 | 14593 | 18969 | 23345 | 27721 | 32097 | 35970 | 38740 |
| NC_007605 | 1465 | 1466 | 5842 | 10218 | 14594 | 18970 | 23346 | 27722 | 32098 | 35971 | |
| NC_007605 | 1466 | 1467 | 5843 | 10219 | 14595 | 18971 | 23347 | 27723 | 32099 | 35972 | 38741 |
| NC_007605 | 1467 | 1468 | 5844 | 10220 | 14596 | 18972 | 23348 | 27724 | 32100 | | 38742 |
| NC_007605 | 1468 | 1469 | 5845 | 10221 | 14597 | 18973 | 23349 | 27725 | 32101 | | 38743 |
| NC_007605 | 1469 | 1470 | 5846 | 10222 | 14598 | 18974 | 23350 | 27726 | 32102 | | 38744 |
| NC_007605 | 1470 | 1471 | 5847 | 10223 | 14599 | 18975 | 23351 | 27727 | 32103 | | 38745 |
| NC_007605 | 1471 | 1472 | 5848 | 10224 | 14600 | 18976 | 23352 | 27728 | 32104 | 35973 | 38746 |
| NC_007605 | 1472 | 1473 | 5849 | 10225 | 14601 | 18977 | 23353 | 27729 | 32105 | | 38747 |
| NC_007605 | 1473 | 1474 | 5850 | 10226 | 14602 | 18978 | 23354 | 27730 | 32106 | 35974 | |
| NC_007605 | 1474 | 1475 | 5851 | 10227 | 14603 | 18979 | 23355 | 27731 | 32107 | 35975 | |
| NC_007605 | 1475 | 1476 | 5852 | 10228 | 14604 | 18980 | 23356 | 27732 | 32108 | 35976 | 38748 |
| NC_007605 | 1476 | 1477 | 5853 | 10229 | 14605 | 18981 | 23357 | 27733 | 32109 | 35977 | 38749 |
| NC_007605 | 1477 | 1478 | 5854 | 10230 | 14606 | 18982 | 23358 | 27734 | 32110 | | 38750 |
| NC_007605 | 1478 | 1479 | 5855 | 10231 | 14607 | 18983 | 23359 | 27735 | 32111 | 35978 | 38751 |
| NC_007605 | 1479 | 1480 | 5856 | 10232 | 14608 | 18984 | 23360 | 27736 | 32112 | 35979 | 38752 |
| NC_007605 | 1480 | 1481 | 5857 | 10233 | 14609 | 18985 | 23361 | 27737 | 32113 | 35980 | 38753 |
| NC_007605 | 1481 | 1482 | 5858 | 10234 | 14610 | 18986 | 23362 | 27738 | 32114 | 35981 | 38754 |
| NC_007605 | 1482 | 1483 | 5859 | 10235 | 14611 | 18987 | 23363 | 27739 | 32115 | 35982 | |
| NC_007605 | 1483 | 1484 | 5860 | 10236 | 14612 | 18988 | 23364 | 27740 | 32116 | 35983 | 38755 |
| NC_007605 | 1484 | 1485 | 5861 | 10237 | 14613 | 18989 | 23365 | 27741 | 32117 | 35984 | 38756 |
| NC_007605 | 1485 | 1486 | 5862 | 10238 | 14614 | 18990 | 23366 | 27742 | 32118 | 35985 | |
| NC_007605 | 1486 | 1487 | 5863 | 10239 | 14615 | 18991 | 23367 | 27743 | 32119 | 35986 | |
| NC_007605 | 1487 | 1488 | 5864 | 10240 | 14616 | 18992 | 23368 | 27744 | 32120 | | 38757 |
| NC_007605 | 1488 | 1489 | 5865 | 10241 | 14617 | 18993 | 23369 | 27745 | 32121 | | 38758 |
| NC_007605 | 1489 | 1490 | 5866 | 10242 | 14618 | 18994 | 23370 | 27746 | 32122 | 35987 | 38759 |
| NC_007605 | 1490 | 1491 | 5867 | 10243 | 14619 | 18995 | 23371 | 27747 | 32123 | 35988 | |
| NC_007605 | 1491 | 1492 | 5868 | 10244 | 14620 | 18996 | 23372 | 27748 | 32124 | | 38760 |
| NC_007605 | 1492 | 1493 | 5869 | 10245 | 14621 | 18997 | 23373 | 27749 | 32125 | | 38761 |
| NC_007605 | 1493 | 1494 | 5870 | 10246 | 14622 | 18998 | 23374 | 27750 | 32126 | 35989 | |
| NC_007605 | 1494 | 1495 | 5871 | 10247 | 14623 | 18999 | 23375 | 27751 | 32127 | | 38762 |
| NC_007605 | 1495 | 1496 | 5872 | 10248 | 14624 | 19000 | 23376 | 27752 | 32128 | 35990 | |
| NC_007605 | 1496 | 1497 | 5873 | 10249 | 14625 | 19001 | 23377 | 27753 | 32129 | 35991 | 38763 |
| NC_007605 | 1497 | 1498 | 5874 | 10250 | 14626 | 19002 | 23378 | 27754 | 32130 | | 38764 |
| NC_007605 | 1498 | 1499 | 5875 | 10251 | 14627 | 19003 | 23379 | 27755 | 32131 | | 38765 |
| NC_007605 | 1499 | 1500 | 5876 | 10252 | 14628 | 19004 | 23380 | 27756 | 32132 | | 38766 |
| NC_007605 | 1500 | 1501 | 5877 | 10253 | 14629 | 19005 | 23381 | 27757 | 32133 | 35992 | |
| NC_007605 | 1501 | 1502 | 5878 | 10254 | 14630 | 19006 | 23382 | 27758 | 32134 | 35993 | |
| NC_007605 | 1502 | 1503 | 5879 | 10255 | 14631 | 19007 | 23383 | 27759 | 32135 | | 38767 |
| NC_007605 | 1503 | 1504 | 5880 | 10256 | 14632 | 19008 | 23384 | 27760 | 32136 | 35994 | |
| NC_007605 | 1504 | 1505 | 5881 | 10257 | 14633 | 19009 | 23385 | 27761 | 32137 | 35995 | |
| NC_007605 | 1505 | 1506 | 5882 | 10258 | 14634 | 19010 | 23386 | 27762 | 32138 | 35996 | 38768 |
| NC_007605 | 1506 | 1507 | 5883 | 10259 | 14635 | 19011 | 23387 | 27763 | 32139 | 35997 | 38769 |
| NC_007605 | 1507 | 1508 | 5884 | 10260 | 14636 | 19012 | 23388 | 27764 | 32140 | 35998 | 38770 |
| NC_007605 | 1508 | 1509 | 5885 | 10261 | 14637 | 19013 | 23389 | 27765 | 32141 | 35999 | 38771 |
| NC_007605 | 1509 | 1510 | 5886 | 10262 | 14638 | 19014 | 23390 | 27766 | 32142 | | 38772 |
| NC_007605 | 1510 | 1511 | 5887 | 10263 | 14639 | 19015 | 23391 | 27767 | 32143 | 36000 | |
| NC_007605 | 1511 | 1512 | 5888 | 10264 | 14640 | 19016 | 23392 | 27768 | 32144 | 36001 | 38773 |
| NC_007605 | 1512 | 1513 | 5889 | 10265 | 14641 | 19017 | 23393 | 27769 | 32145 | 36002 | |
| NC_007605 | 1513 | 1514 | 5890 | 10266 | 14642 | 19018 | 23394 | 27770 | 32146 | 36003 | 38774 |
| NC_007605 | 1514 | 1515 | 5891 | 10267 | 14643 | 19019 | 23395 | 27771 | 32147 | 36004 | |
| NC_007605 | 1515 | 1516 | 5892 | 10268 | 14644 | 19020 | 23396 | 27772 | 32148 | | 38775 |
| NC_007605 | 1516 | 1517 | 5893 | 10269 | 14645 | 19021 | 23397 | 27773 | 32149 | 36005 | 38776 |
| NC_007605 | 1517 | 1518 | 5894 | 10270 | 14646 | 19022 | 23398 | 27774 | 32150 | 36006 | |
| NC_007605 | 1518 | 1519 | 5895 | 10271 | 14647 | 19023 | 23399 | 27775 | 32151 | | 38777 |
| NC_007605 | 1519 | 1520 | 5896 | 10272 | 14648 | 19024 | 23400 | 27776 | 32152 | 36007 | 38778 |
| NC_007605 | 1520 | 1521 | 5897 | 10273 | 14649 | 19025 | 23401 | 27777 | 32153 | 36008 | 38779 |
| NC_007605 | 1521 | 1522 | 5898 | 10274 | 14650 | 19026 | 23402 | 27778 | 32154 | | 38780 |
| NC_007605 | 1522 | 1523 | 5899 | 10275 | 14651 | 19027 | 23403 | 27779 | 32155 | 36009 | 38781 |
| NC_007605 | 1523 | 1524 | 5900 | 10276 | 14652 | 19028 | 23404 | 27780 | 32156 | 36010 | 38782 |
| NC_007605 | 1524 | 1525 | 5901 | 10277 | 14653 | 19029 | 23405 | 27781 | 32157 | 36011 | 38783 |
| NC_007605 | 1525 | 1526 | 5902 | 10278 | 14654 | 19030 | 23406 | 27782 | 32158 | | 38784 |
| NC_007605 | 1526 | 1527 | 5903 | 10279 | 14655 | 19031 | 23407 | 27783 | 32159 | 36012 | 38785 |
| NC_007605 | 1527 | 1528 | 5904 | 10280 | 14656 | 19032 | 23408 | 27784 | 32160 | 36013 | |
| NC_007605 | 1528 | 1529 | 5905 | 10281 | 14657 | 19033 | 23409 | 27785 | 32161 | | 38786 |
| NC_007605 | 1529 | 1530 | 5906 | 10282 | 14658 | 19034 | 23410 | 27786 | 32162 | | 38787 |
| NC_007605 | 1530 | 1531 | 5907 | 10283 | 14659 | 19035 | 23411 | 27787 | 32163 | | 38788 |
| NC_007605 | 1531 | 1532 | 5908 | 10284 | 14660 | 19036 | 23412 | 27788 | 32164 | | 38789 |
| NC_007605 | 1532 | 1533 | 5909 | 10285 | 14661 | 19037 | 23413 | 27789 | 32165 | 36014 | 38790 |
| NC_007605 | 1533 | 1534 | 5910 | 10286 | 14662 | 19038 | 23414 | 27790 | 32166 | | 38791 |
| NC_007605 | 1534 | 1535 | 5911 | 10287 | 14663 | 19039 | 23415 | 27791 | 32167 | | 38792 |
| NC_007605 | 1535 | 1536 | 5912 | 10288 | 14664 | 19040 | 23416 | 27792 | 32168 | | 38793 |
| NC_007605 | 1536 | 1537 | 5913 | 10289 | 14665 | 19041 | 23417 | 27793 | 32169 | 36015 | |
| NC_007605 | 1537 | 1538 | 5914 | 10290 | 14666 | 19042 | 23418 | 27794 | 32170 | 36016 | 38794 |
| NC_007605 | 1538 | 1539 | 5915 | 10291 | 14667 | 19043 | 23419 | 27795 | 32171 | 36017 | 38795 |
| NC_007605 | 1539 | 1540 | 5916 | 10292 | 14668 | 19044 | 23420 | 27796 | 32172 | | 38796 |
| NC_007605 | 1540 | 1541 | 5917 | 10293 | 14669 | 19045 | 23421 | 27797 | 32173 | | 38797 |
| NC_007605 | 1541 | 1542 | 5918 | 10294 | 14670 | 19046 | 23422 | 27798 | 32174 | 36018 | |
| NC_007605 | 1542 | 1543 | 5919 | 10295 | 14671 | 19047 | 23423 | 27799 | 32175 | | 38798 |
| NC_007605 | 1543 | 1544 | 5920 | 10296 | 14672 | 19048 | 23424 | 27800 | 32176 | 36019 | 38799 |
| NC_033781 | 1544 | 1545 | 5921 | 10297 | 14673 | 19049 | 23425 | 27801 | 32177 | | 38800 |
| NC_033781 | 1545 | 1546 | 5922 | 10298 | 14674 | 19050 | 23426 | 27802 | 32178 | | 38801 |
| NC_033781 | 1546 | 1547 | 5923 | 10299 | 14675 | 19051 | 23427 | 27803 | 32179 | 36020 | |
| NC_033781 | 1547 | 1548 | 5924 | 10300 | 14676 | 19052 | 23428 | 27804 | 32180 | 36021 | |
| NC_033781 | 1548 | 1549 | 5925 | 10301 | 14677 | 19053 | 23429 | 27805 | 32181 | | 38802 |
| NC_033781 | 1549 | 1550 | 5926 | 10302 | 14678 | 19054 | 23430 | 27806 | 32182 | | 38803 |
| NC_033781 | 1550 | 1551 | 5927 | 10303 | 14679 | 19055 | 23431 | 27807 | 32183 | 36022 | |
| NC_033781 | 1551 | 1552 | 5928 | 10304 | 14680 | 19056 | 23432 | 27808 | 32184 | | 38804 |
| NC_033781 | 1552 | 1553 | 5929 | 10305 | 14681 | 19057 | 23433 | 27809 | 32185 | 36023 | |
| NC_033781 | 1553 | 1554 | 5930 | 10306 | 14682 | 19058 | 23434 | 27810 | 32186 | 36024 | |
| NC_033781 | 1554 | 1555 | 5931 | 10307 | 14683 | 19059 | 23435 | 27811 | 32187 | 36025 | |
| NC_033781 | 1555 | 1556 | 5932 | 10308 | 14684 | 19060 | 23436 | 27812 | 32188 | | 38805 |
| NC_002017 | 1556 | 1557 | 5933 | 10309 | 14685 | 19061 | 23437 | 27813 | 32189 | | 38806 |
| NC_002017 | 1557 | 1558 | 5934 | 10310 | 14686 | 19062 | 23438 | 27814 | 32190 | 36026 | |
| NC_002017 | 1558 | 1559 | 5935 | 10311 | 14687 | 19063 | 23439 | 27815 | 32191 | 36027 | |
| NC_002017 | 1559 | 1560 | 5936 | 10312 | 14688 | 19064 | 23440 | 27816 | 32192 | | 38807 |
| NC_002017 | 1560 | 1561 | 5937 | 10313 | 14689 | 19065 | 23441 | 27817 | 32193 | 36028 | |
| NC_002017 | 1561 | 1562 | 5938 | 10314 | 14690 | 19066 | 23442 | 27818 | 32194 | 36029 | 38808 |
| NC_001596 | 1562 | 1563 | 5939 | 10315 | 14691 | 19067 | 23443 | 27819 | 32195 | 36030 | |
| NC_001596 | 1563 | 1564 | 5940 | 10316 | 14692 | 19068 | 23444 | 27820 | 32196 | | 38809 |
| NC_001596 | 1564 | 1565 | 5941 | 10317 | 14693 | 19069 | 23445 | 27821 | 32197 | 36031 | |
| NC_001596 | 1565 | 1566 | 5942 | 10318 | 14694 | 19070 | 23446 | 27822 | 32198 | 36032 | |
| NC_001596 | 1566 | 1567 | 5943 | 10319 | 14695 | 19071 | 23447 | 27823 | 32199 | | 38810 |
| NC_001596 | 1567 | 1568 | 5944 | 10320 | 14696 | 19072 | 23448 | 27824 | 32200 | 36033 | |
| NC_001596 | 1568 | 1569 | 5945 | 10321 | 14697 | 19073 | 23449 | 27825 | 32201 | 36034 | |
| NC_001596 | 1569 | 1570 | 5946 | 10322 | 14698 | 19074 | 23450 | 27826 | 32202 | | 38811 |
| NC_001596 | 1570 | 1571 | 5947 | 10323 | 14699 | 19075 | 23451 | 27827 | 32203 | | 38812 |
| NC_001596 | 1571 | 1572 | 5948 | 10324 | 14700 | 19076 | 23452 | 27828 | 32204 | | 38813 |
| NC_001596 | 1572 | 1573 | 5949 | 10325 | 14701 | 19077 | 23453 | 27829 | 32205 | 36035 | |
| NC_001596 | 1573 | 1574 | 5950 | 10326 | 14702 | 19078 | 23454 | 27830 | 32206 | | 38814 |
| NC_001596 | 1574 | 1575 | 5951 | 10327 | 14703 | 19079 | 23455 | 27831 | 32207 | 36036 | |
| NC_001596 | 1575 | 1576 | 5952 | 10328 | 14704 | 19080 | 23456 | 27832 | 32208 | 36037 | |
| NC_001596 | 1576 | 1577 | 5953 | 10329 | 14705 | 19081 | 23457 | 27833 | 32209 | 36038 | |
| NC_001596 | 1577 | 1578 | 5954 | 10330 | 14706 | 19082 | 23458 | 27834 | 32210 | 36039 | 38815 |
| NC_001596 | 1578 | 1579 | 5955 | 10331 | 14707 | 19083 | 23459 | 27835 | 32211 | 36040 | 38816 |
| NC_001596 | 1579 | 1580 | 5956 | 10332 | 14708 | 19084 | 23460 | 27836 | 32212 | 36041 | |
| NC_001596 | 1580 | 1581 | 5957 | 10333 | 14709 | 19085 | 23461 | 27837 | 32213 | 36042 | |
| NC_001596 | 1581 | 1582 | 5958 | 10334 | 14710 | 19086 | 23462 | 27838 | 32214 | 36043 | |
| NC_001596 | 1582 | 1583 | 5959 | 10335 | 14711 | 19087 | 23463 | 27839 | 32215 | 36044 | |
| NC_000117 | 1583 | 1584 | 5960 | 10336 | 14712 | 19088 | 23464 | 27840 | 32216 | | 38817 |
| NC_000117 | 1584 | 1585 | 5961 | 10337 | 14713 | 19089 | 23465 | 27841 | 32217 | 36045 | |
| NC_000117 | 1585 | 1586 | 5962 | 10338 | 14714 | 19090 | 23466 | 27842 | 32218 | | 38818 |
| NC_000117 | 1586 | 1587 | 5963 | 10339 | 14715 | 19091 | 23467 | 27843 | 32219 | 36046 | |
| NC_000117 | 1587 | 1588 | 5964 | 10340 | 14716 | 19092 | 23468 | 27844 | 32220 | | 38819 |
| NC_000117 | 1588 | 1589 | 5965 | 10341 | 14717 | 19093 | 23469 | 27845 | 32221 | 36047 | |
| NC_000117 | 1589 | 1590 | 5966 | 10342 | 14718 | 19094 | 23470 | 27846 | 32222 | 36048 | |
| NC_000117 | 1590 | 1591 | 5967 | 10343 | 14719 | 19095 | 23471 | 27847 | 32223 | 36049 | |
| NC_000117 | 1591 | 1592 | 5968 | 10344 | 14720 | 19096 | 23472 | 27848 | 32224 | 36050 | |
| NC_000117 | 1592 | 1593 | 5969 | 10345 | 14721 | 19097 | 23473 | 27849 | 32225 | | 38820 |
| NC_000117 | 1593 | 1594 | 5970 | 10346 | 14722 | 19098 | 23474 | 27850 | 32226 | 36051 | |
| NC_000117 | 1594 | 1595 | 5971 | 10347 | 14723 | 19099 | 23475 | 27851 | 32227 | 36052 | 38821 |
| NC_000117 | 1595 | 1596 | 5972 | 10348 | 14724 | 19100 | 23476 | 27852 | 32228 | 36053 | |
| NC_000117 | 1596 | 1597 | 5973 | 10349 | 14725 | 19101 | 23477 | 27853 | 32229 | 36054 | |
| NC_000117 | 1597 | 1598 | 5974 | 10350 | 14726 | 19102 | 23478 | 27854 | 32230 | 36055 | |
| NC_000117 | 1598 | 1599 | 5975 | 10351 | 14727 | 19103 | 23479 | 27855 | 32231 | | 38822 |
| NC_000117 | 1599 | 1600 | 5976 | 10352 | 14728 | 19104 | 23480 | 27856 | 32232 | | 38823 |
| NC_000117 | 1600 | 1601 | 5977 | 10353 | 14729 | 19105 | 23481 | 27857 | 32233 | | 38824 |
| NC_000117 | 1601 | 1602 | 5978 | 10354 | 14730 | 19106 | 23482 | 27858 | 32234 | 36056 | |
| NC_000117 | 1602 | 1603 | 5979 | 10355 | 14731 | 19107 | 23483 | 27859 | 32235 | 36057 | |
| NC_000117 | 1603 | 1604 | 5980 | 10356 | 14732 | 19108 | 23484 | 27860 | 32236 | 36058 | |
| NC_000117 | 1604 | 1605 | 5981 | 10357 | 14733 | 19109 | 23485 | 27861 | 32237 | | 38825 |
| NC_000117 | 1605 | 1606 | 5982 | 10358 | 14734 | 19110 | 23486 | 27862 | 32238 | 36059 | |
| NC_000117 | 1606 | 1607 | 5983 | 10359 | 14735 | 19111 | 23487 | 27863 | 32239 | | 38826 |
| NC_000117 | 1607 | 1608 | 5984 | 10360 | 14736 | 19112 | 23488 | 27864 | 32240 | | 38827 |
| NC_000117 | 1608 | 1609 | 5985 | 10361 | 14737 | 19113 | 23489 | 27865 | 32241 | 36060 | |
| NC_000117 | 1609 | 1610 | 5986 | 10362 | 14738 | 19114 | 23490 | 27866 | 32242 | 36061 | |
| NC_000117 | 1610 | 1611 | 5987 | 10363 | 14739 | 19115 | 23491 | 27867 | 32243 | | 38828 |
| NC_000117 | 1611 | 1612 | 5988 | 10364 | 14740 | 19116 | 23492 | 27868 | 32244 | 36062 | |
| NC_000117 | 1612 | 1613 | 5989 | 10365 | 14741 | 19117 | 23493 | 27869 | 32245 | | 38829 |
| NC_000117 | 1613 | 1614 | 5990 | 10366 | 14742 | 19118 | 23494 | 27870 | 32246 | | 38830 |
| NC_000117 | 1614 | 1615 | 5991 | 10367 | 14743 | 19119 | 23495 | 27871 | 32247 | 36063 | |
| NC_000117 | 1615 | 1616 | 5992 | 10368 | 14744 | 19120 | 23496 | 27872 | 32248 | | 38831 |
| NC_000117 | 1616 | 1617 | 5993 | 10369 | 14745 | 19121 | 23497 | 27873 | 32249 | | 38832 |
| NC_000117 | 1617 | 1618 | 5994 | 10370 | 14746 | 19122 | 23498 | 27874 | 32250 | 36064 | |
| NC_000117 | 1618 | 1619 | 5995 | 10371 | 14747 | 19123 | 23499 | 27875 | 32251 | | 38833 |
| NC_000117 | 1619 | 1620 | 5996 | 10372 | 14748 | 19124 | 23500 | 27876 | 32252 | 36065 | |
| NC_000117 | 1620 | 1621 | 5997 | 10373 | 14749 | 19125 | 23501 | 27877 | 32253 | 36066 | |
| NC_000117 | 1621 | 1622 | 5998 | 10374 | 14750 | 19126 | 23502 | 27878 | 32254 | 36067 | |
| NC_000117 | 1622 | 1623 | 5999 | 10375 | 14751 | 19127 | 23503 | 27879 | 32255 | 36068 | |
| NC_000117 | 1623 | 1624 | 6000 | 10376 | 14752 | 19128 | 23504 | 27880 | 32256 | 36069 | |
| NC_000117 | 1624 | 1625 | 6001 | 10377 | 14753 | 19129 | 23505 | 27881 | 32257 | 36070 | |
| NC_000117 | 1625 | 1626 | 6002 | 10378 | 14754 | 19130 | 23506 | 27882 | 32258 | 36071 | |
| NC_000117 | 1626 | 1627 | 6003 | 10379 | 14755 | 19131 | 23507 | 27883 | 32259 | | 38834 |
| NC_000117 | 1627 | 1628 | 6004 | 10380 | 14756 | 19132 | 23508 | 27884 | 32260 | 36072 | |
| NC_000117 | 1628 | 1629 | 6005 | 10381 | 14757 | 19133 | 23509 | 27885 | 32261 | | 38835 |
| NC_000117 | 1629 | 1630 | 6006 | 10382 | 14758 | 19134 | 23510 | 27886 | 32262 | 36073 | |
| NC_000117 | 1630 | 1631 | 6007 | 10383 | 14759 | 19135 | 23511 | 27887 | 32263 | | 38836 |
| NC_000117 | 1631 | 1632 | 6008 | 10384 | 14760 | 19136 | 23512 | 27888 | 32264 | | 38837 |
| NC_000117 | 1632 | 1633 | 6009 | 10385 | 14761 | 19137 | 23513 | 27889 | 32265 | 36074 | |
| NC_000117 | 1633 | 1634 | 6010 | 10386 | 14762 | 19138 | 23514 | 27890 | 32266 | | 38838 |
| NC_000117 | 1634 | 1635 | 6011 | 10387 | 14763 | 19139 | 23515 | 27891 | 32267 | | 38839 |
| NC_000117 | 1635 | 1636 | 6012 | 10388 | 14764 | 19140 | 23516 | 27892 | 32268 | | 38840 |
| NC_000117 | 1636 | 1637 | 6013 | 10389 | 14765 | 19141 | 23517 | 27893 | 32269 | 36075 | |
| NC_000117 | 1637 | 1638 | 6014 | 10390 | 14766 | 19142 | 23518 | 27894 | 32270 | 36076 | |
| NC_000117 | 1638 | 1639 | 6015 | 10391 | 14767 | 19143 | 23519 | 27895 | 32271 | | 38841 |
| NC_000117 | 1639 | 1640 | 6016 | 10392 | 14768 | 19144 | 23520 | 27896 | 32272 | 36077 | 38842 |
| NC_000117 | 1640 | 1641 | 6017 | 10393 | 14769 | 19145 | 23521 | 27897 | 32273 | 36078 | 38843 |
| NC_000117 | 1641 | 1642 | 6018 | 10394 | 14770 | 19146 | 23522 | 27898 | 32274 | 36079 | |
| NC_000117 | 1642 | 1643 | 6019 | 10395 | 14771 | 19147 | 23523 | 27899 | 32275 | 36080 | |
| NC_000117 | 1643 | 1644 | 6020 | 10396 | 14772 | 19148 | 23524 | 27900 | 32276 | | 38844 |
| NC_000117 | 1644 | 1645 | 6021 | 10397 | 14773 | 19149 | 23525 | 27901 | 32277 | | 38845 |
| NC_000117 | 1645 | 1646 | 6022 | 10398 | 14774 | 19150 | 23526 | 27902 | 32278 | | 38846 |
| NC_000117 | 1646 | 1647 | 6023 | 10399 | 14775 | 19151 | 23527 | 27903 | 32279 | 36081 | |
| NC_000117 | 1647 | 1648 | 6024 | 10400 | 14776 | 19152 | 23528 | 27904 | 32280 | | 38847 |
| NC_000117 | 1648 | 1649 | 6025 | 10401 | 14777 | 19153 | 23529 | 27905 | 32281 | 36082 | |
| NC_000117 | 1649 | 1650 | 6026 | 10402 | 14778 | 19154 | 23530 | 27906 | 32282 | | 38848 |
| NC_000117 | 1650 | 1651 | 6027 | 10403 | 14779 | 19155 | 23531 | 27907 | 32283 | | 38849 |
| NC_000117 | 1651 | 1652 | 6028 | 10404 | 14780 | 19156 | 23532 | 27908 | 32284 | 36083 | |
| NC_000117 | 1652 | 1653 | 6029 | 10405 | 14781 | 19157 | 23533 | 27909 | 32285 | 36084 | |
| NC_000117 | 1653 | 1654 | 6030 | 10406 | 14782 | 19158 | 23534 | 27910 | 32286 | | 38850 |
| NC_000117 | 1654 | 1655 | 6031 | 10407 | 14783 | 19159 | 23535 | 27911 | 32287 | 36085 | |
| NC_000117 | 1655 | 1656 | 6032 | 10408 | 14784 | 19160 | 23536 | 27912 | 32288 | | 38851 |
| NC_000117 | 1656 | 1657 | 6033 | 10409 | 14785 | 19161 | 23537 | 27913 | 32289 | | 38852 |
| NC_000117 | 1657 | 1658 | 6034 | 10410 | 14786 | 19162 | 23538 | 27914 | 32290 | 36086 | |
| NC_000117 | 1658 | 1659 | 6035 | 10411 | 14787 | 19163 | 23539 | 27915 | 32291 | 36087 | |
| NC_000117 | 1659 | 1660 | 6036 | 10412 | 14788 | 19164 | 23540 | 27916 | 32292 | 36088 | |
| NC_000117 | 1660 | 1661 | 6037 | 10413 | 14789 | 19165 | 23541 | 27917 | 32293 | | 38853 |
| NC_000117 | 1661 | 1662 | 6038 | 10414 | 14790 | 19166 | 23542 | 27918 | 32294 | | 38854 |
| NC_000117 | 1662 | 1663 | 6039 | 10415 | 14791 | 19167 | 23543 | 27919 | 32295 | 36089 | |
| NC_000117 | 1663 | 1664 | 6040 | 10416 | 14792 | 19168 | 23544 | 27920 | 32296 | | 38855 |
| NC_000117 | 1664 | 1665 | 6041 | 10417 | 14793 | 19169 | 23545 | 27921 | 32297 | 36090 | |
| NC_000117 | 1665 | 1666 | 6042 | 10418 | 14794 | 19170 | 23546 | 27922 | 32298 | 36091 | |
| NC_000117 | 1666 | 1667 | 6043 | 10419 | 14795 | 19171 | 23547 | 27923 | 32299 | | 38856 |
| NC_000117 | 1667 | 1668 | 6044 | 10420 | 14796 | 19172 | 23548 | 27924 | 32300 | 36092 | |
| NC_000117 | 1668 | 1669 | 6045 | 10421 | 14797 | 19173 | 23549 | 27925 | 32301 | | 38857 |
| NC_000117 | 1669 | 1670 | 6046 | 10422 | 14798 | 19174 | 23550 | 27926 | 32302 | 36093 | |
| NC_000117 | 1670 | 1671 | 6047 | 10423 | 14799 | 19175 | 23551 | 27927 | 32303 | 36094 | |
| NC_000117 | 1671 | 1672 | 6048 | 10424 | 14800 | 19176 | 23552 | 27928 | 32304 | 36095 | |
| NC_000117 | 1672 | 1673 | 6049 | 10425 | 14801 | 19177 | 23553 | 27929 | 32305 | 36096 | |
| NC_000117 | 1673 | 1674 | 6050 | 10426 | 14802 | 19178 | 23554 | 27930 | 32306 | | 38858 |
| NC_000117 | 1674 | 1675 | 6051 | 10427 | 14803 | 19179 | 23555 | 27931 | 32307 | | 38859 |
| NC_000117 | 1675 | 1676 | 6052 | 10428 | 14804 | 19180 | 23556 | 27932 | 32308 | | 38860 |
| NC_000117 | 1676 | 1677 | 6053 | 10429 | 14805 | 19181 | 23557 | 27933 | 32309 | | 38861 |
| NC_000117 | 1677 | 1678 | 6054 | 10430 | 14806 | 19182 | 23558 | 27934 | 32310 | 36097 | |
| NC_000117 | 1678 | 1679 | 6055 | 10431 | 14807 | 19183 | 23559 | 27935 | 32311 | 36098 | |
| NC_000117 | 1679 | 1680 | 6056 | 10432 | 14808 | 19184 | 23560 | 27936 | 32312 | | 38862 |
| NC_000117 | 1680 | 1681 | 6057 | 10433 | 14809 | 19185 | 23561 | 27937 | 32313 | 36099 | |
| NC_000117 | 1681 | 1682 | 6058 | 10434 | 14810 | 19186 | 23562 | 27938 | 32314 | 36100 | |
| NC_000117 | 1682 | 1683 | 6059 | 10435 | 14811 | 19187 | 23563 | 27939 | 32315 | | 38863 |
| NC_000117 | 1683 | 1684 | 6060 | 10436 | 14812 | 19188 | 23564 | 27940 | 32316 | | 38864 |
| NC_000117 | 1684 | 1685 | 6061 | 10437 | 14813 | 19189 | 23565 | 27941 | 32317 | | 38865 |
| NC_000117 | 1685 | 1686 | 6062 | 10438 | 14814 | 19190 | 23566 | 27942 | 32318 | 36101 | |
| NC_000117 | 1686 | 1687 | 6063 | 10439 | 14815 | 19191 | 23567 | 27943 | 32319 | 36102 | |
| NC_000117 | 1687 | 1688 | 6064 | 10440 | 14816 | 19192 | 23568 | 27944 | 32320 | 36103 | |
| NC_000117 | 1688 | 1689 | 6065 | 10441 | 14817 | 19193 | 23569 | 27945 | 32321 | 36104 | |
| NC_000117 | 1689 | 1690 | 6066 | 10442 | 14818 | 19194 | 23570 | 27946 | 32322 | 36105 | |
| NC_000117 | 1690 | 1691 | 6067 | 10443 | 14819 | 19195 | 23571 | 27947 | 32323 | 36106 | |
| NC_000117 | 1691 | 1692 | 6068 | 10444 | 14820 | 19196 | 23572 | 27948 | 32324 | 36107 | |
| NC_000117 | 1692 | 1693 | 6069 | 10445 | 14821 | 19197 | 23573 | 27949 | 32325 | | 38866 |
| NC_000117 | 1693 | 1694 | 6070 | 10446 | 14822 | 19198 | 23574 | 27950 | 32326 | 36108 | |
| NC_000117 | 1694 | 1695 | 6071 | 10447 | 14823 | 19199 | 23575 | 27951 | 32327 | 36109 | |
| NC_000117 | 1695 | 1696 | 6072 | 10448 | 14824 | 19200 | 23576 | 27952 | 32328 | | 38867 |
| NC_000117 | 1696 | 1697 | 6073 | 10449 | 14825 | 19201 | 23577 | 27953 | 32329 | 36110 | |
| NC_000117 | 1697 | 1698 | 6074 | 10450 | 14826 | 19202 | 23578 | 27954 | 32330 | 36111 | |
| NC_000117 | 1698 | 1699 | 6075 | 10451 | 14827 | 19203 | 23579 | 27955 | 32331 | 36112 | |
| NC_000117 | 1699 | 1700 | 6076 | 10452 | 14828 | 19204 | 23580 | 27956 | 32332 | 36113 | 38868 |
| NC_000117 | 1700 | 1701 | 6077 | 10453 | 14829 | 19205 | 23581 | 27957 | 32333 | | 38869 |
| NC_000117 | 1701 | 1702 | 6078 | 10454 | 14830 | 19206 | 23582 | 27958 | 32334 | 36114 | |
| NC_000117 | 1702 | 1703 | 6079 | 10455 | 14831 | 19207 | 23583 | 27959 | 32335 | 36115 | |
| NC_000117 | 1703 | 1704 | 6080 | 10456 | 14832 | 19208 | 23584 | 27960 | 32336 | 36116 | |
| NC_000117 | 1704 | 1705 | 6081 | 10457 | 14833 | 19209 | 23585 | 27961 | 32337 | 36117 | |
| NC_000117 | 1705 | 1706 | 6082 | 10458 | 14834 | 19210 | 23586 | 27962 | 32338 | | 38870 |
| NC_000117 | 1706 | 1707 | 6083 | 10459 | 14835 | 19211 | 23587 | 27963 | 32339 | | 38871 |
| NC_000117 | 1707 | 1708 | 6084 | 10460 | 14836 | 19212 | 23588 | 27964 | 32340 | | 38872 |
| NC_000117 | 1708 | 1709 | 6085 | 10461 | 14837 | 19213 | 23589 | 27965 | 32341 | 36118 | |
| NC_000117 | 1709 | 1710 | 6086 | 10462 | 14838 | 19214 | 23590 | 27966 | 32342 | | 38873 |
| NC_000117 | 1710 | 1711 | 6087 | 10463 | 14839 | 19215 | 23591 | 27967 | 32343 | | 38874 |
| NC_000117 | 1711 | 1712 | 6088 | 10464 | 14840 | 19216 | 23592 | 27968 | 32344 | | 38875 |
| NC_000117 | 1712 | 1713 | 6089 | 10465 | 14841 | 19217 | 23593 | 27969 | 32345 | | 38876 |
| NC_000117 | 1713 | 1714 | 6090 | 10466 | 14842 | 19218 | 23594 | 27970 | 32346 | 36119 | |
| NC_000117 | 1714 | 1715 | 6091 | 10467 | 14843 | 19219 | 23595 | 27971 | 32347 | | 38877 |
| NC_000117 | 1715 | 1716 | 6092 | 10468 | 14844 | 19220 | 23596 | 27972 | 32348 | | 38878 |
| NC_000117 | 1716 | 1717 | 6093 | 10469 | 14845 | 19221 | 23597 | 27973 | 32349 | | 38879 |
| NC_000117 | 1717 | 1718 | 6094 | 10470 | 14846 | 19222 | 23598 | 27974 | 32350 | 36120 | |
| NC_000117 | 1718 | 1719 | 6095 | 10471 | 14847 | 19223 | 23599 | 27975 | 32351 | | 38880 |
| NC_000117 | 1719 | 1720 | 6096 | 10472 | 14848 | 19224 | 23600 | 27976 | 32352 | 36121 | |
| NC_000117 | 1720 | 1721 | 6097 | 10473 | 14849 | 19225 | 23601 | 27977 | 32353 | 36122 | |
| NC_000117 | 1721 | 1722 | 6098 | 10474 | 14850 | 19226 | 23602 | 27978 | 32354 | 36123 | |
| NC_000117 | 1722 | 1723 | 6099 | 10475 | 14851 | 19227 | 23603 | 27979 | 32355 | | 38881 |
| NC_000117 | 1723 | 1724 | 6100 | 10476 | 14852 | 19228 | 23604 | 27980 | 32356 | 36124 | |
| NC_000117 | 1724 | 1725 | 6101 | 10477 | 14853 | 19229 | 23605 | 27981 | 32357 | 36125 | |
| NC_000117 | 1725 | 1726 | 6102 | 10478 | 14854 | 19230 | 23606 | 27982 | 32358 | | 38882 |
| NC_000117 | 1726 | 1727 | 6103 | 10479 | 14855 | 19231 | 23607 | 27983 | 32359 | 36126 | |
| NC_000117 | 1727 | 1728 | 6104 | 10480 | 14856 | 19232 | 23608 | 27984 | 32360 | 36127 | |
| NC_000117 | 1728 | 1729 | 6105 | 10481 | 14857 | 19233 | 23609 | 27985 | 32361 | 36128 | |
| NC_000117 | 1729 | 1730 | 6106 | 10482 | 14858 | 19234 | 23610 | 27986 | 32362 | | 38883 |
| NC_000117 | 1730 | 1731 | 6107 | 10483 | 14859 | 19235 | 23611 | 27987 | 32363 | | 38884 |
| NC_000117 | 1731 | 1732 | 6108 | 10484 | 14860 | 19236 | 23612 | 27988 | 32364 | 36129 | |
| NC_000117 | 1732 | 1733 | 6109 | 10485 | 14861 | 19237 | 23613 | 27989 | 32365 | | 38885 |
| NC_000117 | 1733 | 1734 | 6110 | 10486 | 14862 | 19238 | 23614 | 27990 | 32366 | | 38886 |
| NC_000117 | 1734 | 1735 | 6111 | 10487 | 14863 | 19239 | 23615 | 27991 | 32367 | | 38887 |
| NC_000117 | 1735 | 1736 | 6112 | 10488 | 14864 | 19240 | 23616 | 27992 | 32368 | 36130 | |
| NC_000117 | 1736 | 1737 | 6113 | 10489 | 14865 | 19241 | 23617 | 27993 | 32369 | 36131 | |
| NC_000117 | 1737 | 1738 | 6114 | 10490 | 14866 | 19242 | 23618 | 27994 | 32370 | 36132 | |
| NC_000117 | 1738 | 1739 | 6115 | 10491 | 14867 | 19243 | 23619 | 27995 | 32371 | | 38888 |
| NC_000117 | 1739 | 1740 | 6116 | 10492 | 14868 | 19244 | 23620 | 27996 | 32372 | 36133 | |
| NC_000117 | 1740 | 1741 | 6117 | 10493 | 14869 | 19245 | 23621 | 27997 | 32373 | | 38889 |
| NC_000117 | 1741 | 1742 | 6118 | 10494 | 14870 | 19246 | 23622 | 27998 | 32374 | | 38890 |
| NC_000117 | 1742 | 1743 | 6119 | 10495 | 14871 | 19247 | 23623 | 27999 | 32375 | | 38891 |
| NC_000117 | 1743 | 1744 | 6120 | 10496 | 14872 | 19248 | 23624 | 28000 | 32376 | | 38892 |
| NC_000117 | 1744 | 1745 | 6121 | 10497 | 14873 | 19249 | 23625 | 28001 | 32377 | 36134 | |
| NC_000117 | 1745 | 1746 | 6122 | 10498 | 14874 | 19250 | 23626 | 28002 | 32378 | 36135 | |
| NC_000117 | 1746 | 1747 | 6123 | 10499 | 14875 | 19251 | 23627 | 28003 | 32379 | | 38893 |
| NC_000117 | 1747 | 1748 | 6124 | 10500 | 14876 | 19252 | 23628 | 28004 | 32380 | | 38894 |
| NC_000117 | 1748 | 1749 | 6125 | 10501 | 14877 | 19253 | 23629 | 28005 | 32381 | | 38895 |
| NC_000117 | 1749 | 1750 | 6126 | 10502 | 14878 | 19254 | 23630 | 28006 | 32382 | | 38896 |
| NC_000117 | 1750 | 1751 | 6127 | 10503 | 14879 | 19255 | 23631 | 28007 | 32383 | 36136 | |
| NC_000117 | 1751 | 1752 | 6128 | 10504 | 14880 | 19256 | 23632 | 28008 | 32384 | | 38897 |
| NC_000117 | 1752 | 1753 | 6129 | 10505 | 14881 | 19257 | 23633 | 28009 | 32385 | | 38898 |
| NC_000117 | 1753 | 1754 | 6130 | 10506 | 14882 | 19258 | 23634 | 28010 | 32386 | 36137 | |
| NC_007381 | 1754 | 1755 | 6131 | 10507 | 14883 | 19259 | 23635 | 28011 | 32387 | 36138 | |
| NC_007381 | 1755 | 1756 | 6132 | 10508 | 14884 | 19260 | 23636 | 28012 | 32388 | 36139 | 38899 |
| NC_007381 | 1756 | 1757 | 6133 | 10509 | 14885 | 19261 | 23637 | 28013 | 32389 | 36140 | |
| NC_007381 | 1757 | 1758 | 6134 | 10510 | 14886 | 19262 | 23638 | 28014 | 32390 | | 38900 |
| NC_026434 | 1758 | 1759 | 6135 | 10511 | 14887 | 19263 | 23639 | 28015 | 32391 | | 38901 |
| NC_026434 | 1759 | 1760 | 6136 | 10512 | 14888 | 19264 | 23640 | 28016 | 32392 | 36141 | |
| NC_026434 | 1760 | 1761 | 6137 | 10513 | 14889 | 19265 | 23641 | 28017 | 32393 | 36142 | |
| NC_026434 | 1761 | 1762 | 6138 | 10514 | 14890 | 19266 | 23642 | 28018 | 32394 | 36143 | |
| NC_007377 | 1762 | 1763 | 6139 | 10515 | 14891 | 19267 | 23643 | 28019 | 32395 | | 38902 |
| NC_006310 | 1763 | 1764 | 6140 | 10516 | 14892 | 19268 | 23644 | 28020 | 32396 | | 38903 |
| NC_006310 | 1764 | 1765 | 6141 | 10517 | 14893 | 19269 | 23645 | 28021 | 32397 | 36144 | |
| NC_006310 | 1765 | 1766 | 6142 | 10518 | 14894 | 19270 | 23646 | 28022 | 32398 | 36145 | |
| NC_006310 | 1766 | 1767 | 6143 | 10519 | 14895 | 19271 | 23647 | 28023 | 32399 | | 38904 |
| NC_006310 | 1767 | 1768 | 6144 | 10520 | 14896 | 19272 | 23648 | 28024 | 32400 | | 38905 |
| NC_006310 | 1768 | 1769 | 6145 | 10521 | 14897 | 19273 | 23649 | 28025 | 32401 | 36146 | |
| NC_006310 | 1769 | 1770 | 6146 | 10522 | 14898 | 19274 | 23650 | 28026 | 32402 | 36147 | |
| NC_006310 | 1770 | 1771 | 6147 | 10523 | 14899 | 19275 | 23651 | 28027 | 32403 | | 38906 |
| NC_026431 | 1771 | 1772 | 6148 | 10524 | 14900 | 19276 | 23652 | 28028 | 32404 | | 38907 |
| NC_026431 | 1772 | 1773 | 6149 | 10525 | 14901 | 19277 | 23653 | 28029 | 32405 | 36148 | |
| NC_004500 | 1773 | 1774 | 6150 | 10526 | 14902 | 19278 | 23654 | 28030 | 32406 | 36149 | |
| NC_004500 | 1774 | 1775 | 6151 | 10527 | 14903 | 19279 | 23655 | 28031 | 32407 | | 38908 |
| NC_004500 | 1775 | 1776 | 6152 | 10528 | 14904 | 19280 | 23656 | 28032 | 32408 | 36150 | |
| NC_004500 | 1776 | 1777 | 6153 | 10529 | 14905 | 19281 | 23657 | 28033 | 32409 | | 38909 |
| NC_004500 | 1777 | 1778 | 6154 | 10530 | 14906 | 19282 | 23658 | 28034 | 32410 | 36151 | |
| NC_004500 | 1778 | 1779 | 6155 | 10531 | 14907 | 19283 | 23659 | 28035 | 32411 | 36152 | |
| NC_004500 | 1779 | 1780 | 6156 | 10532 | 14908 | 19284 | 23660 | 28036 | 32412 | | 38910 |
| NC_004500 | 1780 | 1781 | 6157 | 10533 | 14909 | 19285 | 23661 | 28037 | 32413 | | 38911 |
| NC_004500 | 1781 | 1782 | 6158 | 10534 | 14910 | 19286 | 23662 | 28038 | 32414 | 36153 | |
| NC_004500 | 1782 | 1783 | 6159 | 10535 | 14911 | 19287 | 23663 | 28039 | 32415 | 36154 | |
| NC_004500 | 1783 | 1784 | 6160 | 10536 | 14912 | 19288 | 23664 | 28040 | 32416 | 36155 | |
| NC_004500 | 1784 | 1785 | 6161 | 10537 | 14913 | 19289 | 23665 | 28041 | 32417 | 36156 | |
| NC_004500 | 1785 | 1786 | 6162 | 10538 | 14914 | 19290 | 23666 | 28042 | 32418 | | 38912 |
| NC_004500 | 1786 | 1787 | 6163 | 10539 | 14915 | 19291 | 23667 | 28043 | 32419 | 36157 | |
| NC_004500 | 1787 | 1788 | 6164 | 10540 | 14916 | 19292 | 23668 | 28044 | 32420 | 36158 | 38913 |
| NC_004500 | 1788 | 1789 | 6165 | 10541 | 14917 | 19293 | 23669 | 28045 | 32421 | | 38914 |
| NC_004500 | 1789 | 1790 | 6166 | 10542 | 14918 | 19294 | 23670 | 28046 | 32422 | 36159 | |
| NC_006213 | 1790 | 1791 | 6167 | 10543 | 14919 | 19295 | 23671 | 28047 | 32423 | | 38915 |
| NC_006213 | 1791 | 1792 | 6168 | 10544 | 14920 | 19296 | 23672 | 28048 | 32424 | | 38916 |
| NC_006213 | 1792 | 1793 | 6169 | 10545 | 14921 | 19297 | 23673 | 28049 | 32425 | 36160 | |
| NC_006213 | 1793 | 1794 | 6170 | 10546 | 14922 | 19298 | 23674 | 28050 | 32426 | 36161 | |
| NC_006213 | 1794 | 1795 | 6171 | 10547 | 14923 | 19299 | 23675 | 28051 | 32427 | | 38917 |
| NC_006213 | 1795 | 1796 | 6172 | 10548 | 14924 | 19300 | 23676 | 28052 | 32428 | 36162 | 38918 |
| NC_006213 | 1796 | 1797 | 6173 | 10549 | 14925 | 19301 | 23677 | 28053 | 32429 | 36163 | |
| NC_006213 | 1797 | 1798 | 6174 | 10550 | 14926 | 19302 | 23678 | 28054 | 32430 | | 38919 |
| NC_006213 | 1798 | 1799 | 6175 | 10551 | 14927 | 19303 | 23679 | 28055 | 32431 | | 38920 |
| NC_006213 | 1799 | 1800 | 6176 | 10552 | 14928 | 19304 | 23680 | 28056 | 32432 | | 38921 |
| NC_006213 | 1800 | 1801 | 6177 | 10553 | 14929 | 19305 | 23681 | 28057 | 32433 | | 38922 |
| NC_006213 | 1801 | 1802 | 6178 | 10554 | 14930 | 19306 | 23682 | 28058 | 32434 | 36164 | |
| NC_006213 | 1802 | 1803 | 6179 | 10555 | 14931 | 19307 | 23683 | 28059 | 32435 | 36165 | 38923 |
| NC_006213 | 1803 | 1804 | 6180 | 10556 | 14932 | 19308 | 23684 | 28060 | 32436 | | 38924 |
| NC_006213 | 1804 | 1805 | 6181 | 10557 | 14933 | 19309 | 23685 | 28061 | 32437 | 36166 | |
| NC_006213 | 1805 | 1806 | 6182 | 10558 | 14934 | 19310 | 23686 | 28062 | 32438 | 36167 | |
| NC_006213 | 1806 | 1807 | 6183 | 10559 | 14935 | 19311 | 23687 | 28063 | 32439 | | 38925 |
| NC_006213 | 1807 | 1808 | 6184 | 10560 | 14936 | 19312 | 23688 | 28064 | 32440 | 36168 | |
| NC_006213 | 1808 | 1809 | 6185 | 10561 | 14937 | 19313 | 23689 | 28065 | 32441 | 36169 | |
| NC_006213 | 1809 | 1810 | 6186 | 10562 | 14938 | 19314 | 23690 | 28066 | 32442 | 36170 | |
| NC_006213 | 1810 | 1811 | 6187 | 10563 | 14939 | 19315 | 23691 | 28067 | 32443 | | 38926 |
| NC_006213 | 1811 | 1812 | 6188 | 10564 | 14940 | 19316 | 23692 | 28068 | 32444 | 36171 | |
| NC_006213 | 1812 | 1813 | 6189 | 10565 | 14941 | 19317 | 23693 | 28069 | 32445 | 36172 | |
| NC_006213 | 1813 | 1814 | 6190 | 10566 | 14942 | 19318 | 23694 | 28070 | 32446 | 36173 | |
| NC_006213 | 1814 | 1815 | 6191 | 10567 | 14943 | 19319 | 23695 | 28071 | 32447 | 36174 | |
| NC_006213 | 1815 | 1816 | 6192 | 10568 | 14944 | 19320 | 23696 | 28072 | 32448 | | 38927 |
| NC_006213 | 1816 | 1817 | 6193 | 10569 | 14945 | 19321 | 23697 | 28073 | 32449 | 36175 | |
| NC_006213 | 1817 | 1818 | 6194 | 10570 | 14946 | 19322 | 23698 | 28074 | 32450 | | 38928 |
| NC_006213 | 1818 | 1819 | 6195 | 10571 | 14947 | 19323 | 23699 | 28075 | 32451 | | 38929 |
| NC_006213 | 1819 | 1820 | 6196 | 10572 | 14948 | 19324 | 23700 | 28076 | 32452 | 36176 | 38930 |
| NC_006213 | 1820 | 1821 | 6197 | 10573 | 14949 | 19325 | 23701 | 28077 | 32453 | 36177 | |
| NC_006213 | 1821 | 1822 | 6198 | 10574 | 14950 | 19326 | 23702 | 28078 | 32454 | 36178 | |
| NC_006213 | 1822 | 1823 | 6199 | 10575 | 14951 | 19327 | 23703 | 28079 | 32455 | 36179 | |
| NC_006213 | 1823 | 1824 | 6200 | 10576 | 14952 | 19328 | 23704 | 28080 | 32456 | 36180 | |
| NC_006213 | 1824 | 1825 | 6201 | 10577 | 14953 | 19329 | 23705 | 28081 | 32457 | 36181 | 38931 |
| NC_006213 | 1825 | 1826 | 6202 | 10578 | 14954 | 19330 | 23706 | 28082 | 32458 | 36182 | |
| NC_006213 | 1826 | 1827 | 6203 | 10579 | 14955 | 19331 | 23707 | 28083 | 32459 | 36183 | |
| NC_006213 | 1827 | 1828 | 6204 | 10580 | 14956 | 19332 | 23708 | 28084 | 32460 | 36184 | |
| NC_006213 | 1828 | 1829 | 6205 | 10581 | 14957 | 19333 | 23709 | 28085 | 32461 | 36185 | |
| NC_006213 | 1829 | 1830 | 6206 | 10582 | 14958 | 19334 | 23710 | 28086 | 32462 | | 38932 |
| NC_006213 | 1830 | 1831 | 6207 | 10583 | 14959 | 19335 | 23711 | 28087 | 32463 | | 38933 |
| NC_006213 | 1831 | 1832 | 6208 | 10584 | 14960 | 19336 | 23712 | 28088 | 32464 | | 38934 |
| NC_006213 | 1832 | 1833 | 6209 | 10585 | 14961 | 19337 | 23713 | 28089 | 32465 | 36186 | |
| NC_006213 | 1833 | 1834 | 6210 | 10586 | 14962 | 19338 | 23714 | 28090 | 32466 | 36187 | |
| NC_006213 | 1834 | 1835 | 6211 | 10587 | 14963 | 19339 | 23715 | 28091 | 32467 | 36188 | |
| NC_006213 | 1835 | 1836 | 6212 | 10588 | 14964 | 19340 | 23716 | 28092 | 32468 | 36189 | |
| NC_006213 | 1836 | 1837 | 6213 | 10589 | 14965 | 19341 | 23717 | 28093 | 32469 | | 38935 |
| NC_006213 | 1837 | 1838 | 6214 | 10590 | 14966 | 19342 | 23718 | 28094 | 32470 | 36190 | 38936 |
| NC_006213 | 1838 | 1839 | 6215 | 10591 | 14967 | 19343 | 23719 | 28095 | 32471 | 36191 | |
| NC_006213 | 1839 | 1840 | 6216 | 10592 | 14968 | 19344 | 23720 | 28096 | 32472 | | 38937 |
| NC_006213 | 1840 | 1841 | 6217 | 10593 | 14969 | 19345 | 23721 | 28097 | 32473 | 36192 | 38938 |
| NC_006213 | 1841 | 1842 | 6218 | 10594 | 14970 | 19346 | 23722 | 28098 | 32474 | 36193 | 38939 |
| NC_006213 | 1842 | 1843 | 6219 | 10595 | 14971 | 19347 | 23723 | 28099 | 32475 | 36194 | |
| NC_006213 | 1843 | 1844 | 6220 | 10596 | 14972 | 19348 | 23724 | 28100 | 32476 | | 38940 |
| NC_006213 | 1844 | 1845 | 6221 | 10597 | 14973 | 19349 | 23725 | 28101 | 32477 | 36195 | |
| NC_006213 | 1845 | 1846 | 6222 | 10598 | 14974 | 19350 | 23726 | 28102 | 32478 | | 38941 |
| NC_006213 | 1846 | 1847 | 6223 | 10599 | 14975 | 19351 | 23727 | 28103 | 32479 | | 38942 |
| NC_006213 | 1847 | 1848 | 6224 | 10600 | 14976 | 19352 | 23728 | 28104 | 32480 | 36196 | |
| NC_006213 | 1848 | 1849 | 6225 | 10601 | 14977 | 19353 | 23729 | 28105 | 32481 | | 38943 |
| NC_006213 | 1849 | 1850 | 6226 | 10602 | 14978 | 19354 | 23730 | 28106 | 32482 | | 38944 |
| NC_006213 | 1850 | 1851 | 6227 | 10603 | 14979 | 19355 | 23731 | 28107 | 32483 | | 38945 |
| NC_006213 | 1851 | 1852 | 6228 | 10604 | 14980 | 19356 | 23732 | 28108 | 32484 | 36197 | |
| NC_006213 | 1852 | 1853 | 6229 | 10605 | 14981 | 19357 | 23733 | 28109 | 32485 | | 38946 |
| NC_006213 | 1853 | 1854 | 6230 | 10606 | 14982 | 19358 | 23734 | 28110 | 32486 | | 38947 |
| NC_006213 | 1854 | 1855 | 6231 | 10607 | 14983 | 19359 | 23735 | 28111 | 32487 | 36198 | |
| NC_006213 | 1855 | 1856 | 6232 | 10608 | 14984 | 19360 | 23736 | 28112 | 32488 | 36199 | |
| NC_006213 | 1856 | 1857 | 6233 | 10609 | 14985 | 19361 | 23737 | 28113 | 32489 | | 38948 |
| NC_006213 | 1857 | 1858 | 6234 | 10610 | 14986 | 19362 | 23738 | 28114 | 32490 | 36200 | |
| NC_006213 | 1858 | 1859 | 6235 | 10611 | 14987 | 19363 | 23739 | 28115 | 32491 | 36201 | |
| NC_006213 | 1859 | 1860 | 6236 | 10612 | 14988 | 19364 | 23740 | 28116 | 32492 | 36202 | |
| NC_006213 | 1860 | 1861 | 6237 | 10613 | 14989 | 19365 | 23741 | 28117 | 32493 | | 38949 |
| NC_006213 | 1861 | 1862 | 6238 | 10614 | 14990 | 19366 | 23742 | 28118 | 32494 | 36203 | 38950 |
| NC_006213 | 1862 | 1863 | 6239 | 10615 | 14991 | 19367 | 23743 | 28119 | 32495 | 36204 | 38951 |
| NC_006213 | 1863 | 1864 | 6240 | 10616 | 14992 | 19368 | 23744 | 28120 | 32496 | | 38952 |
| NC_006213 | 1864 | 1865 | 6241 | 10617 | 14993 | 19369 | 23745 | 28121 | 32497 | 36205 | |
| NC_006213 | 1865 | 1866 | 6242 | 10618 | 14994 | 19370 | 23746 | 28122 | 32498 | 36206 | |
| NC_006213 | 1866 | 1867 | 6243 | 10619 | 14995 | 19371 | 23747 | 28123 | 32499 | | 38953 |
| NC_007370 | 1867 | 1868 | 6244 | 10620 | 14996 | 19372 | 23748 | 28124 | 32500 | | 38954 |
| NC_007370 | 1868 | 1869 | 6245 | 10621 | 14997 | 19373 | 23749 | 28125 | 32501 | 36207 | |
| NC_004906 | 1869 | 1870 | 6246 | 10622 | 14998 | 19374 | 23750 | 28126 | 32502 | | 38955 |
| NC_004906 | 1870 | 1871 | 6247 | 10623 | 14999 | 19375 | 23751 | 28127 | 32503 | | 38956 |
| NC_004906 | 1871 | 1872 | 6248 | 10624 | 15000 | 19376 | 23752 | 28128 | 32504 | 36208 | |
| NC_009824 | 1872 | 1873 | 6249 | 10625 | 15001 | 19377 | 23753 | 28129 | 32505 | 36209 | 38957 |
| NC_009824 | 1873 | 1874 | 6250 | 10626 | 15002 | 19378 | 23754 | 28130 | 32506 | 36210 | |
| NC_009824 | 1874 | 1875 | 6251 | 10627 | 15003 | 19379 | 23755 | 28131 | 32507 | | 38958 |
| NC_009824 | 1875 | 1876 | 6252 | 10628 | 15004 | 19380 | 23756 | 28132 | 32508 | 36211 | |
| NC_009824 | 1876 | 1877 | 6253 | 10629 | 15005 | 19381 | 23757 | 28133 | 32509 | | 38959 |
| NC_009824 | 1877 | 1878 | 6254 | 10630 | 15006 | 19382 | 23758 | 28134 | 32510 | 36212 | 38960 |
| NC_009824 | 1878 | 1879 | 6255 | 10631 | 15007 | 19383 | 23759 | 28135 | 32511 | | 38961 |
| NC_009824 | 1879 | 1880 | 6256 | 10632 | 15008 | 19384 | 23760 | 28136 | 32512 | 36213 | |
| NC_009824 | 1880 | 1881 | 6257 | 10633 | 15009 | 19385 | 23761 | 28137 | 32513 | | 38962 |
| NC_009824 | 1881 | 1882 | 6258 | 10634 | 15010 | 19386 | 23762 | 28138 | 32514 | 36214 | 38963 |
| NC_009824 | 1882 | 1883 | 6259 | 10635 | 15011 | 19387 | 23763 | 28139 | 32515 | | 38964 |
| NC_009824 | 1883 | 1884 | 6260 | 10636 | 15012 | 19388 | 23764 | 28140 | 32516 | 36215 | 38965 |
| NC_009824 | 1884 | 1885 | 6261 | 10637 | 15013 | 19389 | 23765 | 28141 | 32517 | 36216 | |
| NC_009824 | 1885 | 1886 | 6262 | 10638 | 15014 | 19390 | 23766 | 28142 | 32518 | 36217 | |
| NC_009824 | 1886 | 1887 | 6263 | 10639 | 15015 | 19391 | 23767 | 28143 | 32519 | | 38966 |
| NC_009824 | 1887 | 1888 | 6264 | 10640 | 15016 | 19392 | 23768 | 28144 | 32520 | 36218 | |
| NC_009824 | 1888 | 1889 | 6265 | 10641 | 15017 | 19393 | 23769 | 28145 | 32521 | 36219 | 38967 |
| NC_009824 | 1889 | 1890 | 6266 | 10642 | 15018 | 19394 | 23770 | 28146 | 32522 | 36220 | 38968 |
| NC_009824 | 1890 | 1891 | 6267 | 10643 | 15019 | 19395 | 23771 | 28147 | 32523 | | 38969 |
| NC_009824 | 1891 | 1892 | 6268 | 10644 | 15020 | 19396 | 23772 | 28148 | 32524 | 36221 | 38970 |
| NC_009824 | 1892 | 1893 | 6269 | 10645 | 15021 | 19397 | 23773 | 28149 | 32525 | 36222 | |
| NC_009824 | 1893 | 1894 | 6270 | 10646 | 15022 | 19398 | 23774 | 28150 | 32526 | 36223 | |
| NC_009824 | 1894 | 1895 | 6271 | 10647 | 15023 | 19399 | 23775 | 28151 | 32527 | 36224 | |
| NC_009824 | 1895 | 1896 | 6272 | 10648 | 15024 | 19400 | 23776 | 28152 | 32528 | | 38971 |
| NC_009824 | 1896 | 1897 | 6273 | 10649 | 15025 | 19401 | 23777 | 28153 | 32529 | | 38972 |
| NC_009824 | 1897 | 1898 | 6274 | 10650 | 15026 | 19402 | 23778 | 28154 | 32530 | 36225 | 38973 |
| NC_002023 | 1898 | 1899 | 6275 | 10651 | 15027 | 19403 | 23779 | 28155 | 32531 | | 38974 |
| NC_002023 | 1899 | 1900 | 6276 | 10652 | 15028 | 19404 | 23780 | 28156 | 32532 | 36226 | |
| NC_002023 | 1900 | 1901 | 6277 | 10653 | 15029 | 19405 | 23781 | 28157 | 32533 | 36227 | |
| NC_002023 | 1901 | 1902 | 6278 | 10654 | 15030 | 19406 | 23782 | 28158 | 32534 | 36228 | 38975 |
| NC_002023 | 1902 | 1903 | 6279 | 10655 | 15031 | 19407 | 23783 | 28159 | 32535 | 36229 | 38976 |
| NC_002023 | 1903 | 1904 | 6280 | 10656 | 15032 | 19408 | 23784 | 28160 | 32536 | 36230 | |
| NC_002023 | 1904 | 1905 | 6281 | 10657 | 15033 | 19409 | 23785 | 28161 | 32537 | 36231 | 38977 |
| NC_002023 | 1905 | 1906 | 6282 | 10658 | 15034 | 19410 | 23786 | 28162 | 32538 | | 38978 |
| NC_002023 | 1906 | 1907 | 6283 | 10659 | 15035 | 19411 | 23787 | 28163 | 32539 | 36232 | |
| NC_004102 | 1907 | 1908 | 6284 | 10660 | 15036 | 19412 | 23788 | 28164 | 32540 | 36233 | |
| NC_004102 | 1908 | 1909 | 6285 | 10661 | 15037 | 19413 | 23789 | 28165 | 32541 | 36234 | |
| NC_004102 | 1909 | 1910 | 6286 | 10662 | 15038 | 19414 | 23790 | 28166 | 32542 | 36235 | 38979 |
| NC_004102 | 1910 | 1911 | 6287 | 10663 | 15039 | 19415 | 23791 | 28167 | 32543 | 36236 | |
| NC_004102 | 1911 | 1912 | 6288 | 10664 | 15040 | 19416 | 23792 | 28168 | 32544 | | 38980 |
| NC_004102 | 1912 | 1913 | 6289 | 10665 | 15041 | 19417 | 23793 | 28169 | 32545 | 36237 | |
| NC_004102 | 1913 | 1914 | 6290 | 10666 | 15042 | 19418 | 23794 | 28170 | 32546 | 36238 | 38981 |
| NC_004102 | 1914 | 1915 | 6291 | 10667 | 15043 | 19419 | 23795 | 28171 | 32547 | 36239 | 38982 |
| NC_004102 | 1915 | 1916 | 6292 | 10668 | 15044 | 19420 | 23796 | 28172 | 32548 | | 38983 |
| NC_004102 | 1916 | 1917 | 6293 | 10669 | 15045 | 19421 | 23797 | 28173 | 32549 | | 38984 |
| NC_004102 | 1917 | 1918 | 6294 | 10670 | 15046 | 19422 | 23798 | 28174 | 32550 | | 38985 |
| NC_004102 | 1918 | 1919 | 6295 | 10671 | 15047 | 19423 | 23799 | 28175 | 32551 | 36240 | |
| NC_004102 | 1919 | 1920 | 6296 | 10672 | 15048 | 19424 | 23800 | 28176 | 32552 | 36241 | |
| NC_004102 | 1920 | 1921 | 6297 | 10673 | 15049 | 19425 | 23801 | 28177 | 32553 | 36242 | 38986 |
| NC_004102 | 1921 | 1922 | 6298 | 10674 | 15050 | 19426 | 23802 | 28178 | 32554 | 36243 | 38987 |
| NC_004102 | 1922 | 1923 | 6299 | 10675 | 15051 | 19427 | 23803 | 28179 | 32555 | | 38988 |
| NC_004102 | 1923 | 1924 | 6300 | 10676 | 15052 | 19428 | 23804 | 28180 | 32556 | | 38989 |
| NC_004102 | 1924 | 1925 | 6301 | 10677 | 15053 | 19429 | 23805 | 28181 | 32557 | 36244 | |
| NC_004102 | 1925 | 1926 | 6302 | 10678 | 15054 | 19430 | 23806 | 28182 | 32558 | 36245 | 38990 |
| NC_004102 | 1926 | 1927 | 6303 | 10679 | 15055 | 19431 | 23807 | 28183 | 32559 | 36246 | 38991 |
| NC_004102 | 1927 | 1928 | 6304 | 10680 | 15056 | 19432 | 23808 | 28184 | 32560 | 36247 | 38992 |
| NC_004102 | 1928 | 1929 | 6305 | 10681 | 15057 | 19433 | 23809 | 28185 | 32561 | 36248 | |
| NC_004102 | 1929 | 1930 | 6306 | 10682 | 15058 | 19434 | 23810 | 28186 | 32562 | 36249 | |
| NC_004102 | 1930 | 1931 | 6307 | 10683 | 15059 | 19435 | 23811 | 28187 | 32563 | 36250 | |
| NC_001576 | 1931 | 1932 | 6308 | 10684 | 15060 | 19436 | 23812 | 28188 | 32564 | | 38993 |
| NC_001576 | 1932 | 1933 | 6309 | 10685 | 15061 | 19437 | 23813 | 28189 | 32565 | | 38994 |
| NC_001576 | 1933 | 1934 | 6310 | 10686 | 15062 | 19438 | 23814 | 28190 | 32566 | | 38995 |
| NC_001576 | 1934 | 1935 | 6311 | 10687 | 15063 | 19439 | 23815 | 28191 | 32567 | | 38996 |
| NC_001576 | 1935 | 1936 | 6312 | 10688 | 15064 | 19440 | 23816 | 28192 | 32568 | | 38997 |
| NC_001576 | 1936 | 1937 | 6313 | 10689 | 15065 | 19441 | 23817 | 28193 | 32569 | 36251 | |
| NC_001576 | 1937 | 1938 | 6314 | 10690 | 15066 | 19442 | 23818 | 28194 | 32570 | | 38998 |
| NC_001576 | 1938 | 1939 | 6315 | 10691 | 15067 | 19443 | 23819 | 28195 | 32571 | | 38999 |
| NC_001576 | 1939 | 1940 | 6316 | 10692 | 15068 | 19444 | 23820 | 28196 | 32572 | 36252 | 39000 |
| NC_001576 | 1940 | 1941 | 6317 | 10693 | 15069 | 19445 | 23821 | 28197 | 32573 | 36253 | |
| NC_001576 | 1941 | 1942 | 6318 | 10694 | 15070 | 19446 | 23822 | 28198 | 32574 | 36254 | |
| NC_001576 | 1942 | 1943 | 6319 | 10695 | 15071 | 19447 | 23823 | 28199 | 32575 | | 39001 |
| NC_001576 | 1943 | 1944 | 6320 | 10696 | 15072 | 19448 | 23824 | 28200 | 32576 | 36255 | |
| NC_001576 | 1944 | 1945 | 6321 | 10697 | 15073 | 19449 | 23825 | 28201 | 32577 | | 39002 |
| NC_001576 | 1945 | 1946 | 6322 | 10698 | 15074 | 19450 | 23826 | 28202 | 32578 | 36256 | |
| NC_001576 | 1946 | 1947 | 6323 | 10699 | 15075 | 19451 | 23827 | 28203 | 32579 | | 39003 |
| NC_001576 | 1947 | 1948 | 6324 | 10700 | 15076 | 19452 | 23828 | 28204 | 32580 | | 39004 |
| NC_038914 | 1948 | 1949 | 6325 | 10701 | 15077 | 19453 | 23829 | 28205 | 32581 | 36257 | |
| NC_038914 | 1949 | 1950 | 6326 | 10702 | 15078 | 19454 | 23830 | 28206 | 32582 | | 39005 |
| NC_038914 | 1950 | 1951 | 6327 | 10703 | 15079 | 19455 | 23831 | 28207 | 32583 | 36258 | |
| NC_038914 | 1951 | 1952 | 6328 | 10704 | 15080 | 19456 | 23832 | 28208 | 32584 | 36259 | 39006 |
| NC_038914 | 1952 | 1953 | 6329 | 10705 | 15081 | 19457 | 23833 | 28209 | 32585 | 36260 | |
| NC_038914 | 1953 | 1954 | 6330 | 10706 | 15082 | 19458 | 23834 | 28210 | 32586 | 36261 | |
| NC_038914 | 1954 | 1955 | 6331 | 10707 | 15083 | 19459 | 23835 | 28211 | 32587 | 36262 | |
| NC_038914 | 1955 | 1956 | 6332 | 10708 | 15084 | 19460 | 23836 | 28212 | 32588 | 36263 | |
| NC_038914 | 1956 | 1957 | 6333 | 10709 | 15085 | 19461 | 23837 | 28213 | 32589 | | 39007 |
| NC_038914 | 1957 | 1958 | 6334 | 10710 | 15086 | 19462 | 23838 | 28214 | 32590 | 36264 | |
| NC_038914 | 1958 | 1959 | 6335 | 10711 | 15087 | 19463 | 23839 | 28215 | 32591 | 36265 | |
| NC_038914 | 1959 | 1960 | 6336 | 10712 | 15088 | 19464 | 23840 | 28216 | 32592 | 36266 | |
| NC_038914 | 1960 | 1961 | 6337 | 10713 | 15089 | 19465 | 23841 | 28217 | 32593 | 36267 | |
| NC_038914 | 1961 | 1962 | 6338 | 10714 | 15090 | 19466 | 23842 | 28218 | 32594 | | 39008 |
| NC_002205 | 1962 | 1963 | 6339 | 10715 | 15091 | 19467 | 23843 | 28219 | 32595 | 36268 | |
| NC_002205 | 1963 | 1964 | 6340 | 10716 | 15092 | 19468 | 23844 | 28220 | 32596 | 36269 | 39009 |
| NC_002205 | 1964 | 1965 | 6341 | 10717 | 15093 | 19469 | 23845 | 28221 | 32597 | | 39010 |
| NC_002205 | 1965 | 1966 | 6342 | 10718 | 15094 | 19470 | 23846 | 28222 | 32598 | | 39011 |
| NC_002205 | 1966 | 1967 | 6343 | 10719 | 15095 | 19471 | 23847 | 28223 | 32599 | 36270 | |
| NC_002205 | 1967 | 1968 | 6344 | 10720 | 15096 | 19472 | 23848 | 28224 | 32600 | 36271 | |
| NC_002205 | 1968 | 1969 | 6345 | 10721 | 15097 | 19473 | 23849 | 28225 | 32601 | | 39012 |
| NC_002205 | 1969 | 1970 | 6346 | 10722 | 15098 | 19474 | 23850 | 28226 | 32602 | 36272 | |
| NC_002205 | 1970 | 1971 | 6347 | 10723 | 15099 | 19475 | 23851 | 28227 | 32603 | 36273 | |
| NC_006577 | 1971 | 1972 | 6348 | 10724 | 15100 | 19476 | 23852 | 28228 | 32604 | | 39013 |
| NC_006577 | 1972 | 1973 | 6349 | 10725 | 15101 | 19477 | 23853 | 28229 | 32605 | 36274 | |
| NC_006577 | 1973 | 1974 | 6350 | 10726 | 15102 | 19478 | 23854 | 28230 | 32606 | | 39014 |
| NC_006577 | 1974 | 1975 | 6351 | 10727 | 15103 | 19479 | 23855 | 28231 | 32607 | | 39015 |
| NC_006577 | 1975 | 1976 | 6352 | 10728 | 15104 | 19480 | 23856 | 28232 | 32608 | | 39016 |
| NC_006577 | 1976 | 1977 | 6353 | 10729 | 15105 | 19481 | 23857 | 28233 | 32609 | | 39017 |
| NC_006577 | 1977 | 1978 | 6354 | 10730 | 15106 | 19482 | 23858 | 28234 | 32610 | | 39018 |
| NC_006577 | 1978 | 1979 | 6355 | 10731 | 15107 | 19483 | 23859 | 28235 | 32611 | | 39019 |
| NC_006577 | 1979 | 1980 | 6356 | 10732 | 15108 | 19484 | 23860 | 28236 | 32612 | | 39020 |
| NC_006577 | 1980 | 1981 | 6357 | 10733 | 15109 | 19485 | 23861 | 28237 | 32613 | | 39021 |
| NC_006577 | 1981 | 1982 | 6358 | 10734 | 15110 | 19486 | 23862 | 28238 | 32614 | 36275 | |
| NC_006577 | 1982 | 1983 | 6359 | 10735 | 15111 | 19487 | 23863 | 28239 | 32615 | 36276 | |
| NC_006577 | 1983 | 1984 | 6360 | 10736 | 15112 | 19488 | 23864 | 28240 | 32616 | | 39022 |
| NC_006577 | 1984 | 1985 | 6361 | 10737 | 15113 | 19489 | 23865 | 28241 | 32617 | 36277 | |
| NC_006577 | 1985 | 1986 | 6362 | 10738 | 15114 | 19490 | 23866 | 28242 | 32618 | | 39023 |
| NC_006577 | 1986 | 1987 | 6363 | 10739 | 15115 | 19491 | 23867 | 28243 | 32619 | 36278 | 39024 |
| NC_006577 | 1987 | 1988 | 6364 | 10740 | 15116 | 19492 | 23868 | 28244 | 32620 | 36279 | 39025 |
| NC_006577 | 1988 | 1989 | 6365 | 10741 | 15117 | 19493 | 23869 | 28245 | 32621 | | 39026 |
| NC_006577 | 1989 | 1990 | 6366 | 10742 | 15118 | 19494 | 23870 | 28246 | 32622 | | 39027 |
| NC_006577 | 1990 | 1991 | 6367 | 10743 | 15119 | 19495 | 23871 | 28247 | 32623 | 36280 | |
| NC_006577 | 1991 | 1992 | 6368 | 10744 | 15120 | 19496 | 23872 | 28248 | 32624 | 36281 | |
| NC_006577 | 1992 | 1993 | 6369 | 10745 | 15121 | 19497 | 23873 | 28249 | 32625 | | 39028 |
| NC_006577 | 1993 | 1994 | 6370 | 10746 | 15122 | 19498 | 23874 | 28250 | 32626 | | 39029 |
| NC_006577 | 1994 | 1995 | 6371 | 10747 | 15123 | 19499 | 23875 | 28251 | 32627 | 36282 | 39030 |
| NC_006577 | 1995 | 1996 | 6372 | 10748 | 15124 | 19500 | 23876 | 28252 | 32628 | 36283 | |
| NC_006577 | 1996 | 1997 | 6373 | 10749 | 15125 | 19501 | 23877 | 28253 | 32629 | 36284 | |
| NC_006577 | 1997 | 1998 | 6374 | 10750 | 15126 | 19502 | 23878 | 28254 | 32630 | | 39031 |
| NC_006577 | 1998 | 1999 | 6375 | 10751 | 15127 | 19503 | 23879 | 28255 | 32631 | | 39032 |
| NC_006577 | 1999 | 2000 | 6376 | 10752 | 15128 | 19504 | 23880 | 28256 | 32632 | | 39033 |
| NC_006577 | 2000 | 2001 | 6377 | 10753 | 15129 | 19505 | 23881 | 28257 | 32633 | 36285 | |
| NC_006577 | 2001 | 2002 | 6378 | 10754 | 15130 | 19506 | 23882 | 28258 | 32634 | 36286 | |
| NC_006577 | 2002 | 2003 | 6379 | 10755 | 15131 | 19507 | 23883 | 28259 | 32635 | 36287 | |
| NC_006577 | 2003 | 2004 | 6380 | 10756 | 15132 | 19508 | 23884 | 28260 | 32636 | 36288 | |
| NC_006577 | 2004 | 2005 | 6381 | 10757 | 15133 | 19509 | 23885 | 28261 | 32637 | 36289 | |
| NC_006577 | 2005 | 2006 | 6382 | 10758 | 15134 | 19510 | 23886 | 28262 | 32638 | 36290 | |
| NC_007371 | 2006 | 2007 | 6383 | 10759 | 15135 | 19511 | 23887 | 28263 | 32639 | 36291 | |
| NC_007371 | 2007 | 2008 | 6384 | 10760 | 15136 | 19512 | 23888 | 28264 | 32640 | | 39034 |
| NC_007371 | 2008 | 2009 | 6385 | 10761 | 15137 | 19513 | 23889 | 28265 | 32641 | | 39035 |
| NC_007371 | 2009 | 2010 | 6386 | 10762 | 15138 | 19514 | 23890 | 28266 | 32642 | 36292 | |
| NC_007371 | 2010 | 2011 | 6387 | 10763 | 15139 | 19515 | 23891 | 28267 | 32643 | 36293 | 39036 |
| NC_007371 | 2011 | 2012 | 6388 | 10764 | 15140 | 19516 | 23892 | 28268 | 32644 | 36294 | |
| NC_007371 | 2012 | 2013 | 6389 | 10765 | 15141 | 19517 | 23893 | 28269 | 32645 | 36295 | |
| NC_004905 | 2013 | 2014 | 6390 | 10766 | 15142 | 19518 | 23894 | 28270 | 32646 | 36296 | 39037 |
| NC_004905 | 2014 | 2015 | 6391 | 10767 | 15143 | 19519 | 23895 | 28271 | 32647 | 36297 | |
| NC_004905 | 2015 | 2016 | 6392 | 10768 | 15144 | 19520 | 23896 | 28272 | 32648 | | 39038 |
| NC_004905 | 2016 | 2017 | 6393 | 10769 | 15145 | 19521 | 23897 | 28273 | 32649 | 36298 | |
| NC_014955 | 2017 | 2018 | 6394 | 10770 | 15146 | 19522 | 23898 | 28274 | 32650 | | 39039 |
| NC_014955 | 2018 | 2019 | 6395 | 10771 | 15147 | 19523 | 23899 | 28275 | 32651 | 36299 | 39040 |
| NC_014955 | 2019 | 2020 | 6396 | 10772 | 15148 | 19524 | 23900 | 28276 | 32652 | 36300 | |
| NC_014955 | 2020 | 2021 | 6397 | 10773 | 15149 | 19525 | 23901 | 28277 | 32653 | | 39041 |
| NC_014955 | 2021 | 2022 | 6398 | 10774 | 15150 | 19526 | 23902 | 28278 | 32654 | | 39042 |
| NC_014955 | 2022 | 2023 | 6399 | 10775 | 15151 | 19527 | 23903 | 28279 | 32655 | | 39043 |
| NC_014955 | 2023 | 2024 | 6400 | 10776 | 15152 | 19528 | 23904 | 28280 | 32656 | 36301 | |
| NC_014955 | 2024 | 2025 | 6401 | 10777 | 15153 | 19529 | 23905 | 28281 | 32657 | | 39044 |
| NC_014955 | 2025 | 2026 | 6402 | 10778 | 15154 | 19530 | 23906 | 28282 | 32658 | 36302 | 39045 |
| NC_014955 | 2026 | 2027 | 6403 | 10779 | 15155 | 19531 | 23907 | 28283 | 32659 | | 39046 |
| NC_014955 | 2027 | 2028 | 6404 | 10780 | 15156 | 19532 | 23908 | 28284 | 32660 | | 39047 |
| NC_014955 | 2028 | 2029 | 6405 | 10781 | 15157 | 19533 | 23909 | 28285 | 32661 | 36303 | 39048 |
| NC_014955 | 2029 | 2030 | 6406 | 10782 | 15158 | 19534 | 23910 | 28286 | 32662 | | 39049 |
| NC_026437 | 2030 | 2031 | 6407 | 10783 | 15159 | 19535 | 23911 | 28287 | 32663 | 36304 | |
| NC_026437 | 2031 | 2032 | 6408 | 10784 | 15160 | 19536 | 23912 | 28288 | 32664 | 36305 | |
| NC_026437 | 2032 | 2033 | 6409 | 10785 | 15161 | 19537 | 23913 | 28289 | 32665 | | 39050 |
| NC_026437 | 2033 | 2034 | 6410 | 10786 | 15162 | 19538 | 23914 | 28290 | 32666 | 36306 | 39051 |
| NC_026437 | 2034 | 2035 | 6411 | 10787 | 15163 | 19539 | 23915 | 28291 | 32667 | | 39052 |
| NC_026437 | 2035 | 2036 | 6412 | 10788 | 15164 | 19540 | 23916 | 28292 | 32668 | | 39053 |
| NC_026437 | 2036 | 2037 | 6413 | 10789 | 15165 | 19541 | 23917 | 28293 | 32669 | 36307 | 39054 |
| NC_007364 | 2037 | 2038 | 6414 | 10790 | 15166 | 19542 | 23918 | 28294 | 32670 | | 39055 |
| NC_007364 | 2038 | 2039 | 6415 | 10791 | 15167 | 19543 | 23919 | 28295 | 32671 | | 39056 |
| NC_007364 | 2039 | 2040 | 6416 | 10792 | 15168 | 19544 | 23920 | 28296 | 32672 | 36308 | 39057 |
| NC_004911 | 2040 | 2041 | 6417 | 10793 | 15169 | 19545 | 23921 | 28297 | 32673 | | 39058 |
| NC_004911 | 2041 | 2042 | 6418 | 10794 | 15170 | 19546 | 23922 | 28298 | 32674 | 36309 | |
| NC_004911 | 2042 | 2043 | 6419 | 10795 | 15171 | 19547 | 23923 | 28299 | 32675 | 36310 | |
| NC_004911 | 2043 | 2044 | 6420 | 10796 | 15172 | 19548 | 23924 | 28300 | 32676 | 36311 | |
| NC_004911 | 2044 | 2045 | 6421 | 10797 | 15173 | 19549 | 23925 | 28301 | 32677 | 36312 | 39059 |
| NC_034616 | 2045 | 2046 | 6422 | 10798 | 15174 | 19550 | 23926 | 28302 | 32678 | | 39060 |
| NC_034616 | 2046 | 2047 | 6423 | 10799 | 15175 | 19551 | 23927 | 28303 | 32679 | 36313 | |
| NC_034616 | 2047 | 2048 | 6424 | 10800 | 15176 | 19552 | 23928 | 28304 | 32680 | | 39061 |
| NC_034616 | 2048 | 2049 | 6425 | 10801 | 15177 | 19553 | 23929 | 28305 | 32681 | | 39062 |
| NC_034616 | 2049 | 2050 | 6426 | 10802 | 15178 | 19554 | 23930 | 28306 | 32682 | | 39063 |
| NC_034616 | 2050 | 2051 | 6427 | 10803 | 15179 | 19555 | 23931 | 28307 | 32683 | 36314 | |
| NC_034616 | 2051 | 2052 | 6428 | 10804 | 15180 | 19556 | 23932 | 28308 | 32684 | | 39064 |
| NC_034616 | 2052 | 2053 | 6429 | 10805 | 15181 | 19557 | 23933 | 28309 | 32685 | 36315 | |
| NC_034616 | 2053 | 2054 | 6430 | 10806 | 15182 | 19558 | 23934 | 28310 | 32686 | 36316 | 39065 |
| NC_034616 | 2054 | 2055 | 6431 | 10807 | 15183 | 19559 | 23935 | 28311 | 32687 | 36317 | |
| NC_034616 | 2055 | 2056 | 6432 | 10808 | 15184 | 19560 | 23936 | 28312 | 32688 | | 39066 |
| NC_034616 | 2056 | 2057 | 6433 | 10809 | 15185 | 19561 | 23937 | 28313 | 32689 | | 39067 |
| NC_034616 | 2057 | 2058 | 6434 | 10810 | 15186 | 19562 | 23938 | 28314 | 32690 | | 39068 |
| NC_026429 | 2058 | 2059 | 6435 | 10811 | 15187 | 19563 | 23939 | 28315 | 32691 | | 39069 |
| NC_026429 | 2059 | 2060 | 6436 | 10812 | 15188 | 19564 | 23940 | 28316 | 32692 | 36318 | |
| NC_026429 | 2060 | 2061 | 6437 | 10813 | 15189 | 19565 | 23941 | 28317 | 32693 | 36319 | |
| NC_026429 | 2061 | 2062 | 6438 | 10814 | 15190 | 19566 | 23942 | 28318 | 32694 | 36320 | |
| NC_026438 | 2062 | 2063 | 6439 | 10815 | 15191 | 19567 | 23943 | 28319 | 32695 | 36321 | 39070 |
| NC_026438 | 2063 | 2064 | 6440 | 10816 | 15192 | 19568 | 23944 | 28320 | 32696 | 36322 | |
| NC_026438 | 2064 | 2065 | 6441 | 10817 | 15193 | 19569 | 23945 | 28321 | 32697 | | 39071 |
| NC_026438 | 2065 | 2066 | 6442 | 10818 | 15194 | 19570 | 23946 | 28322 | 32698 | | 39072 |
| NC_026438 | 2066 | 2067 | 6443 | 10819 | 15195 | 19571 | 23947 | 28323 | 32699 | 36323 | 39073 |
| NC_026438 | 2067 | 2068 | 6444 | 10820 | 15196 | 19572 | 23948 | 28324 | 32700 | 36324 | 39074 |
| NC_026438 | 2068 | 2069 | 6445 | 10821 | 15197 | 19573 | 23949 | 28325 | 32701 | 36325 | 39075 |
| NC_026438 | 2069 | 2070 | 6446 | 10822 | 15198 | 19574 | 23950 | 28326 | 32702 | 36326 | |
| NC_026946 | 2070 | 2071 | 6447 | 10823 | 15199 | 19575 | 23951 | 28327 | 32703 | 36327 | |
| NC_026946 | 2071 | 2072 | 6448 | 10824 | 15200 | 19576 | 23952 | 28328 | 32704 | 36328 | |
| NC_026946 | 2072 | 2073 | 6449 | 10825 | 15201 | 19577 | 23953 | 28329 | 32705 | 36329 | |
| NC_026946 | 2073 | 2074 | 6450 | 10826 | 15202 | 19578 | 23954 | 28330 | 32706 | 36330 | 39076 |
| NC_026946 | 2074 | 2075 | 6451 | 10827 | 15203 | 19579 | 23955 | 28331 | 32707 | 36331 | |
| NC_026946 | 2075 | 2076 | 6452 | 10828 | 15204 | 19580 | 23956 | 28332 | 32708 | 36332 | |
| NC_026946 | 2076 | 2077 | 6453 | 10829 | 15205 | 19581 | 23957 | 28333 | 32709 | 36333 | |
| NC_026946 | 2077 | 2078 | 6454 | 10830 | 15206 | 19582 | 23958 | 28334 | 32710 | 36334 | |
| NC_026946 | 2078 | 2079 | 6455 | 10831 | 15207 | 19583 | 23959 | 28335 | 32711 | 36335 | |
| NC_026946 | 2079 | 2080 | 6456 | 10832 | 15208 | 19584 | 23960 | 28336 | 32712 | 36336 | |
| NC_026946 | 2080 | 2081 | 6457 | 10833 | 15209 | 19585 | 23961 | 28337 | 32713 | | 39077 |
| NC_008188 | 2081 | 2082 | 6458 | 10834 | 15210 | 19586 | 23962 | 28338 | 32714 | 36337 | 39078 |
| NC_008188 | 2082 | 2083 | 6459 | 10835 | 15211 | 19587 | 23963 | 28339 | 32715 | 36338 | |
| NC_008188 | 2083 | 2084 | 6460 | 10836 | 15212 | 19588 | 23964 | 28340 | 32716 | 36339 | |
| NC_008188 | 2084 | 2085 | 6461 | 10837 | 15213 | 19589 | 23965 | 28341 | 32717 | 36340 | |
| NC_008188 | 2085 | 2086 | 6462 | 10838 | 15214 | 19590 | 23966 | 28342 | 32718 | 36341 | 39079 |
| NC_008188 | 2086 | 2087 | 6463 | 10839 | 15215 | 19591 | 23967 | 28343 | 32719 | 36342 | |
| NC_008188 | 2087 | 2088 | 6464 | 10840 | 15216 | 19592 | 23968 | 28344 | 32720 | | 39080 |
| NC_008188 | 2088 | 2089 | 6465 | 10841 | 15217 | 19593 | 23969 | 28345 | 32721 | 36343 | 39081 |
| NC_008188 | 2089 | 2090 | 6466 | 10842 | 15218 | 19594 | 23970 | 28346 | 32722 | 36344 | |
| NC_008188 | 2090 | 2091 | 6467 | 10843 | 15219 | 19595 | 23971 | 28347 | 32723 | | 39082 |
| NC_008188 | 2091 | 2092 | 6468 | 10844 | 15220 | 19596 | 23972 | 28348 | 32724 | 36345 | |
| NC_008188 | 2092 | 2093 | 6469 | 10845 | 15221 | 19597 | 23973 | 28349 | 32725 | | 39083 |
| NC_008188 | 2093 | 2094 | 6470 | 10846 | 15222 | 19598 | 23974 | 28350 | 32726 | | 39084 |
| NC_008188 | 2094 | 2095 | 6471 | 10847 | 15223 | 19599 | 23975 | 28351 | 32727 | | 39085 |
| NC_008188 | 2095 | 2096 | 6472 | 10848 | 15224 | 19600 | 23976 | 28352 | 32728 | 36346 | 39086 |
| NC_001693 | 2096 | 2097 | 6473 | 10849 | 15225 | 19601 | 23977 | 28353 | 32729 | 36347 | |
| NC_001693 | 2097 | 2098 | 6474 | 10850 | 15226 | 19602 | 23978 | 28354 | 32730 | 36348 | |
| NC_001693 | 2098 | 2099 | 6475 | 10851 | 15227 | 19603 | 23979 | 28355 | 32731 | 36349 | |
| NC_001693 | 2099 | 2100 | 6476 | 10852 | 15228 | 19604 | 23980 | 28356 | 32732 | 36350 | |
| NC_001693 | 2100 | 2101 | 6477 | 10853 | 15229 | 19605 | 23981 | 28357 | 32733 | | 39087 |
| NC_001693 | 2101 | 2102 | 6478 | 10854 | 15230 | 19606 | 23982 | 28358 | 32734 | | 39088 |
| NC_001693 | 2102 | 2103 | 6479 | 10855 | 15231 | 19607 | 23983 | 28359 | 32735 | 36351 | |
| NC_001693 | 2103 | 2104 | 6480 | 10856 | 15232 | 19608 | 23984 | 28360 | 32736 | | 39089 |
| NC_001693 | 2104 | 2105 | 6481 | 10857 | 15233 | 19609 | 23985 | 28361 | 32737 | 36352 | 39090 |
| NC_001693 | 2105 | 2106 | 6482 | 10858 | 15234 | 19610 | 23986 | 28362 | 32738 | | 39091 |
| NC_001693 | 2106 | 2107 | 6483 | 10859 | 15235 | 19611 | 23987 | 28363 | 32739 | | 39092 |
| NC_001693 | 2107 | 2108 | 6484 | 10860 | 15236 | 19612 | 23988 | 28364 | 32740 | 36353 | |
| NC_001693 | 2108 | 2109 | 6485 | 10861 | 15237 | 19613 | 23989 | 28365 | 32741 | | 39093 |
| NC_001693 | 2109 | 2110 | 6486 | 10862 | 15238 | 19614 | 23990 | 28366 | 32742 | 36354 | 39094 |
| NC_009334 | 2110 | 2111 | 6487 | 10863 | 15239 | 19615 | 23991 | 28367 | 32743 | | 39095 |
| NC_009334 | 2111 | 2112 | 6488 | 10864 | 15240 | 19616 | 23992 | 28368 | 32744 | 36355 | |
| NC_009334 | 2112 | 2113 | 6489 | 10865 | 15241 | 19617 | 23993 | 28369 | 32745 | 36356 | |
| NC_009334 | 2113 | 2114 | 6490 | 10866 | 15242 | 19618 | 23994 | 28370 | 32746 | 36357 | |
| NC_009334 | 2114 | 2115 | 6491 | 10867 | 15243 | 19619 | 23995 | 28371 | 32747 | 36358 | |
| NC_009334 | 2115 | 2116 | 6492 | 10868 | 15244 | 19620 | 23996 | 28372 | 32748 | | 39096 |
| NC_009334 | 2116 | 2117 | 6493 | 10869 | 15245 | 19621 | 23997 | 28373 | 32749 | | 39097 |
| NC_009334 | 2117 | 2118 | 6494 | 10870 | 15246 | 19622 | 23998 | 28374 | 32750 | | 39098 |
| NC_009334 | 2118 | 2119 | 6495 | 10871 | 15247 | 19623 | 23999 | 28375 | 32751 | 36359 | 39099 |
| NC_009334 | 2119 | 2120 | 6496 | 10872 | 15248 | 19624 | 24000 | 28376 | 32752 | 36360 | 39100 |
| NC_009334 | 2120 | 2121 | 6497 | 10873 | 15249 | 19625 | 24001 | 28377 | 32753 | 36361 | 39101 |
| NC_009334 | 2121 | 2122 | 6498 | 10874 | 15250 | 19626 | 24002 | 28378 | 32754 | 36362 | 39102 |
| NC_009334 | 2122 | 2123 | 6499 | 10875 | 15251 | 19627 | 24003 | 28379 | 32755 | | 39103 |
| NC_009334 | 2123 | 2124 | 6500 | 10876 | 15252 | 19628 | 24004 | 28380 | 32756 | 36363 | |
| NC_009334 | 2124 | 2125 | 6501 | 10877 | 15253 | 19629 | 24005 | 28381 | 32757 | | 39104 |
| NC_009334 | 2125 | 2126 | 6502 | 10878 | 15254 | 19630 | 24006 | 28382 | 32758 | 36364 | |
| NC_009334 | 2126 | 2127 | 6503 | 10879 | 15255 | 19631 | 24007 | 28383 | 32759 | 36365 | 39105 |
| NC_009334 | 2127 | 2128 | 6504 | 10880 | 15256 | 19632 | 24008 | 28384 | 32760 | 36366 | |
| NC_009334 | 2128 | 2129 | 6505 | 10881 | 15257 | 19633 | 24009 | 28385 | 32761 | 36367 | 39106 |
| NC_009334 | 2129 | 2130 | 6506 | 10882 | 15258 | 19634 | 24010 | 28386 | 32762 | 36368 | |
| NC_009334 | 2130 | 2131 | 6507 | 10883 | 15259 | 19635 | 24011 | 28387 | 32763 | 36369 | |
| NC_009334 | 2131 | 2132 | 6508 | 10884 | 15260 | 19636 | 24012 | 28388 | 32764 | | 39107 |
| NC_009334 | 2132 | 2133 | 6509 | 10885 | 15261 | 19637 | 24013 | 28389 | 32765 | | 39108 |
| NC_009334 | 2133 | 2134 | 6510 | 10886 | 15262 | 19638 | 24014 | 28390 | 32766 | | 39109 |
| NC_009334 | 2134 | 2135 | 6511 | 10887 | 15263 | 19639 | 24015 | 28391 | 32767 | 36370 | |
| NC_009334 | 2135 | 2136 | 6512 | 10888 | 15264 | 19640 | 24016 | 28392 | 32768 | 36371 | 39110 |
| NC_009334 | 2136 | 2137 | 6513 | 10889 | 15265 | 19641 | 24017 | 28393 | 32769 | 36372 | |
| NC_009334 | 2137 | 2138 | 6514 | 10890 | 15266 | 19642 | 24018 | 28394 | 32770 | 36373 | |
| NC_009334 | 2138 | 2139 | 6515 | 10891 | 15267 | 19643 | 24019 | 28395 | 32771 | 36374 | |
| NC_009334 | 2139 | 2140 | 6516 | 10892 | 15268 | 19644 | 24020 | 28396 | 32772 | 36375 | |
| NC_009334 | 2140 | 2141 | 6517 | 10893 | 15269 | 19645 | 24021 | 28397 | 32773 | | 39111 |
| NC_009334 | 2141 | 2142 | 6518 | 10894 | 15270 | 19646 | 24022 | 28398 | 32774 | | 39112 |
| NC_009334 | 2142 | 2143 | 6519 | 10895 | 15271 | 19647 | 24023 | 28399 | 32775 | 36376 | |
| NC_009334 | 2143 | 2144 | 6520 | 10896 | 15272 | 19648 | 24024 | 28400 | 32776 | 36377 | |
| NC_009334 | 2144 | 2145 | 6521 | 10897 | 15273 | 19649 | 24025 | 28401 | 32777 | 36378 | 39113 |
| NC_009334 | 2145 | 2146 | 6522 | 10898 | 15274 | 19650 | 24026 | 28402 | 32778 | 36379 | 39114 |
| NC_009334 | 2146 | 2147 | 6523 | 10899 | 15275 | 19651 | 24027 | 28403 | 32779 | 36380 | 39115 |
| NC_009334 | 2147 | 2148 | 6524 | 10900 | 15276 | 19652 | 24028 | 28404 | 32780 | 36381 | |
| NC_009334 | 2148 | 2149 | 6525 | 10901 | 15277 | 19653 | 24029 | 28405 | 32781 | 36382 | 39116 |
| NC_009334 | 2149 | 2150 | 6526 | 10902 | 15278 | 19654 | 24030 | 28406 | 32782 | | 39117 |
| NC_009334 | 2150 | 2151 | 6527 | 10903 | 15279 | 19655 | 24031 | 28407 | 32783 | 36383 | 39118 |
| NC_009334 | 2151 | 2152 | 6528 | 10904 | 15280 | 19656 | 24032 | 28408 | 32784 | | 39119 |
| NC_009334 | 2152 | 2153 | 6529 | 10905 | 15281 | 19657 | 24033 | 28409 | 32785 | | 39120 |
| NC_009334 | 2153 | 2154 | 6530 | 10906 | 15282 | 19658 | 24034 | 28410 | 32786 | 36384 | 39121 |
| NC_009334 | 2154 | 2155 | 6531 | 10907 | 15283 | 19659 | 24035 | 28411 | 32787 | | 39122 |
| NC_009334 | 2155 | 2156 | 6532 | 10908 | 15284 | 19660 | 24036 | 28412 | 32788 | | 39123 |
| NC_009334 | 2156 | 2157 | 6533 | 10909 | 15285 | 19661 | 24037 | 28413 | 32789 | 36385 | |
| NC_009334 | 2157 | 2158 | 6534 | 10910 | 15286 | 19662 | 24038 | 28414 | 32790 | 36386 | 39124 |
| NC_009334 | 2158 | 2159 | 6535 | 10911 | 15287 | 19663 | 24039 | 28415 | 32791 | 36387 | 39125 |
| NC_009334 | 2159 | 2160 | 6536 | 10912 | 15288 | 19664 | 24040 | 28416 | 32792 | 36388 | 39126 |
| NC_009334 | 2160 | 2161 | 6537 | 10913 | 15289 | 19665 | 24041 | 28417 | 32793 | 36389 | 39127 |
| NC_009334 | 2161 | 2162 | 6538 | 10914 | 15290 | 19666 | 24042 | 28418 | 32794 | 36390 | |
| NC_009334 | 2162 | 2163 | 6539 | 10915 | 15291 | 19667 | 24043 | 28419 | 32795 | 36391 | 39128 |
| NC_009334 | 2163 | 2164 | 6540 | 10916 | 15292 | 19668 | 24044 | 28420 | 32796 | | 39129 |
| NC_009334 | 2164 | 2165 | 6541 | 10917 | 15293 | 19669 | 24045 | 28421 | 32797 | 36392 | 39130 |
| NC_009334 | 2165 | 2166 | 6542 | 10918 | 15294 | 19670 | 24046 | 28422 | 32798 | | 39131 |
| NC_009334 | 2166 | 2167 | 6543 | 10919 | 15295 | 19671 | 24047 | 28423 | 32799 | 36393 | |
| NC_009334 | 2167 | 2168 | 6544 | 10920 | 15296 | 19672 | 24048 | 28424 | 32800 | 36394 | |
| NC_009334 | 2168 | 2169 | 6545 | 10921 | 15297 | 19673 | 24049 | 28425 | 32801 | 36395 | |
| NC_009334 | 2169 | 2170 | 6546 | 10922 | 15298 | 19674 | 24050 | 28426 | 32802 | 36396 | 39132 |
| NC_009334 | 2170 | 2171 | 6547 | 10923 | 15299 | 19675 | 24051 | 28427 | 32803 | 36397 | 39133 |
| NC_009334 | 2171 | 2172 | 6548 | 10924 | 15300 | 19676 | 24052 | 28428 | 32804 | | 39134 |
| NC_009334 | 2172 | 2173 | 6549 | 10925 | 15301 | 19677 | 24053 | 28429 | 32805 | 36398 | |
| NC_009334 | 2173 | 2174 | 6550 | 10926 | 15302 | 19678 | 24054 | 28430 | 32806 | 36399 | |
| NC_009334 | 2174 | 2175 | 6551 | 10927 | 15303 | 19679 | 24055 | 28431 | 32807 | 36400 | 39135 |
| NC_009334 | 2175 | 2176 | 6552 | 10928 | 15304 | 19680 | 24056 | 28432 | 32808 | 36401 | 39136 |
| NC_009334 | 2176 | 2177 | 6553 | 10929 | 15305 | 19681 | 24057 | 28433 | 32809 | | 39137 |
| NC_009334 | 2177 | 2178 | 6554 | 10930 | 15306 | 19682 | 24058 | 28434 | 32810 | 36402 | |
| NC_009334 | 2178 | 2179 | 6555 | 10931 | 15307 | 19683 | 24059 | 28435 | 32811 | 36403 | 39138 |
| NC_009334 | 2179 | 2180 | 6556 | 10932 | 15308 | 19684 | 24060 | 28436 | 32812 | 36404 | |
| NC_009334 | 2180 | 2181 | 6557 | 10933 | 15309 | 19685 | 24061 | 28437 | 32813 | 36405 | |
| NC_009334 | 2181 | 2182 | 6558 | 10934 | 15310 | 19686 | 24062 | 28438 | 32814 | 36406 | 39139 |
| NC_009334 | 2182 | 2183 | 6559 | 10935 | 15311 | 19687 | 24063 | 28439 | 32815 | 36407 | 39140 |
| NC_009334 | 2183 | 2184 | 6560 | 10936 | 15312 | 19688 | 24064 | 28440 | 32816 | | 39141 |
| NC_009334 | 2184 | 2185 | 6561 | 10937 | 15313 | 19689 | 24065 | 28441 | 32817 | 36408 | 39142 |
| NC_009334 | 2185 | 2186 | 6562 | 10938 | 15314 | 19690 | 24066 | 28442 | 32818 | 36409 | 39143 |
| NC_009334 | 2186 | 2187 | 6563 | 10939 | 15315 | 19691 | 24067 | 28443 | 32819 | 36410 | 39144 |
| NC_009334 | 2187 | 2188 | 6564 | 10940 | 15316 | 19692 | 24068 | 28444 | 32820 | 36411 | |
| NC_009334 | 2188 | 2189 | 6565 | 10941 | 15317 | 19693 | 24069 | 28445 | 32821 | 36412 | |
| NC_009334 | 2189 | 2190 | 6566 | 10942 | 15318 | 19694 | 24070 | 28446 | 32822 | | 39145 |
| NC_009334 | 2190 | 2191 | 6567 | 10943 | 15319 | 19695 | 24071 | 28447 | 32823 | 36413 | |
| NC_009334 | 2191 | 2192 | 6568 | 10944 | 15320 | 19696 | 24072 | 28448 | 32824 | | 39146 |
| NC_039089 | 2192 | 2193 | 6569 | 10945 | 15321 | 19697 | 24073 | 28449 | 32825 | 36414 | |
| NC_039089 | 2193 | 2194 | 6570 | 10946 | 15322 | 19698 | 24074 | 28450 | 32826 | | 39147 |
| NC_039089 | 2194 | 2195 | 6571 | 10947 | 15323 | 19699 | 24075 | 28451 | 32827 | | 39148 |
| NC_039089 | 2195 | 2196 | 6572 | 10948 | 15324 | 19700 | 24076 | 28452 | 32828 | 36415 | |
| NC_039089 | 2196 | 2197 | 6573 | 10949 | 15325 | 19701 | 24077 | 28453 | 32829 | 36416 | |
| NC_039089 | 2197 | 2198 | 6574 | 10950 | 15326 | 19702 | 24078 | 28454 | 32830 | | 39149 |
| NC_039089 | 2198 | 2199 | 6575 | 10951 | 15327 | 19703 | 24079 | 28455 | 32831 | | 39150 |
| NC_039089 | 2199 | 2200 | 6576 | 10952 | 15328 | 19704 | 24080 | 28456 | 32832 | 36417 | |
| NC_039089 | 2200 | 2201 | 6577 | 10953 | 15329 | 19705 | 24081 | 28457 | 32833 | | 39151 |
| NC_039089 | 2201 | 2202 | 6578 | 10954 | 15330 | 19706 | 24082 | 28458 | 32834 | 36418 | |
| NC_039089 | 2202 | 2203 | 6579 | 10955 | 15331 | 19707 | 24083 | 28459 | 32835 | 36419 | |
| NC_039089 | 2203 | 2204 | 6580 | 10956 | 15332 | 19708 | 24084 | 28460 | 32836 | 36420 | 39152 |
| NC_039089 | 2204 | 2205 | 6581 | 10957 | 15333 | 19709 | 24085 | 28461 | 32837 | | 39153 |
| NC_039089 | 2205 | 2206 | 6582 | 10958 | 15334 | 19710 | 24086 | 28462 | 32838 | 36421 | |
| NC_039089 | 2206 | 2207 | 6583 | 10959 | 15335 | 19711 | 24087 | 28463 | 32839 | | 39154 |
| NC_039089 | 2207 | 2208 | 6584 | 10960 | 15336 | 19712 | 24088 | 28464 | 32840 | 36422 | |
| NC_039089 | 2208 | 2209 | 6585 | 10961 | 15337 | 19713 | 24089 | 28465 | 32841 | | 39155 |
| NC_039089 | 2209 | 2210 | 6586 | 10962 | 15338 | 19714 | 24090 | 28466 | 32842 | 36423 | |
| NC_039089 | 2210 | 2211 | 6587 | 10963 | 15339 | 19715 | 24091 | 28467 | 32843 | | 39156 |
| NC_012486 | 2211 | 2212 | 6588 | 10964 | 15340 | 19716 | 24092 | 28468 | 32844 | | 39157 |
| NC_012486 | 2212 | 2213 | 6589 | 10965 | 15341 | 19717 | 24093 | 28469 | 32845 | | 39158 |
| NC_012486 | 2213 | 2214 | 6590 | 10966 | 15342 | 19718 | 24094 | 28470 | 32846 | 36424 | |
| NC_012486 | 2214 | 2215 | 6591 | 10967 | 15343 | 19719 | 24095 | 28471 | 32847 | | 39159 |
| NC_012486 | 2215 | 2216 | 6592 | 10968 | 15344 | 19720 | 24096 | 28472 | 32848 | 36425 | |
| NC_012486 | 2216 | 2217 | 6593 | 10969 | 15345 | 19721 | 24097 | 28473 | 32849 | 36426 | |
| NC_012486 | 2217 | 2218 | 6594 | 10970 | 15346 | 19722 | 24098 | 28474 | 32850 | 36427 | |
| NC_012486 | 2218 | 2219 | 6595 | 10971 | 15347 | 19723 | 24099 | 28475 | 32851 | 36428 | |
| NC_012486 | 2219 | 2220 | 6596 | 10972 | 15348 | 19724 | 24100 | 28476 | 32852 | | 39160 |
| NC_012486 | 2220 | 2221 | 6597 | 10973 | 15349 | 19725 | 24101 | 28477 | 32853 | 36429 | |
| NC_012486 | 2221 | 2222 | 6598 | 10974 | 15350 | 19726 | 24102 | 28478 | 32854 | | 39161 |
| NC_012486 | 2222 | 2223 | 6599 | 10975 | 15351 | 19727 | 24103 | 28479 | 32855 | 36430 | |
| NC_012486 | 2223 | 2224 | 6600 | 10976 | 15352 | 19728 | 24104 | 28480 | 32856 | 36431 | |
| NC_004104 | 2224 | 2225 | 6601 | 10977 | 15353 | 19729 | 24105 | 28481 | 32857 | | 39162 |
| NC_004104 | 2225 | 2226 | 6602 | 10978 | 15354 | 19730 | 24106 | 28482 | 32858 | 36432 | 39163 |
| NC_004104 | 2226 | 2227 | 6603 | 10979 | 15355 | 19731 | 24107 | 28483 | 32859 | | 39164 |
| NC_004104 | 2227 | 2228 | 6604 | 10980 | 15356 | 19732 | 24108 | 28484 | 32860 | 36433 | 39165 |
| NC_004104 | 2228 | 2229 | 6605 | 10981 | 15357 | 19733 | 24109 | 28485 | 32861 | | 39166 |
| NC_004104 | 2229 | 2230 | 6606 | 10982 | 15358 | 19734 | 24110 | 28486 | 32862 | 36434 | |
| NC_004104 | 2230 | 2231 | 6607 | 10983 | 15359 | 19735 | 24111 | 28487 | 32863 | 36435 | 39167 |
| NC_004104 | 2231 | 2232 | 6608 | 10984 | 15360 | 19736 | 24112 | 28488 | 32864 | | 39168 |
| NC_004104 | 2232 | 2233 | 6609 | 10985 | 15361 | 19737 | 24113 | 28489 | 32865 | | 39169 |
| NC_004104 | 2233 | 2234 | 6610 | 10986 | 15362 | 19738 | 24114 | 28490 | 32866 | | 39170 |
| NC_004104 | 2234 | 2235 | 6611 | 10987 | 15363 | 19739 | 24115 | 28491 | 32867 | 36436 | 39171 |
| NC_004104 | 2235 | 2236 | 6612 | 10988 | 15364 | 19740 | 24116 | 28492 | 32868 | | 39172 |
| NC_004104 | 2236 | 2237 | 6613 | 10989 | 15365 | 19741 | 24117 | 28493 | 32869 | | 39173 |
| NC_004104 | 2237 | 2238 | 6614 | 10990 | 15366 | 19742 | 24118 | 28494 | 32870 | 36437 | |
| NC_004104 | 2238 | 2239 | 6615 | 10991 | 15367 | 19743 | 24119 | 28495 | 32871 | | 39174 |
| NC_004104 | 2239 | 2240 | 6616 | 10992 | 15368 | 19744 | 24120 | 28496 | 32872 | 36438 | 39175 |
| NC_004104 | 2240 | 2241 | 6617 | 10993 | 15369 | 19745 | 24121 | 28497 | 32873 | 36439 | |
| NC_004104 | 2241 | 2242 | 6618 | 10994 | 15370 | 19746 | 24122 | 28498 | 32874 | 36440 | |
| NC_004104 | 2242 | 2243 | 6619 | 10995 | 15371 | 19747 | 24123 | 28499 | 32875 | 36441 | 39176 |
| NC_004104 | 2243 | 2244 | 6620 | 10996 | 15372 | 19748 | 24124 | 28500 | 32876 | 36442 | 39177 |
| NC_004104 | 2244 | 2245 | 6621 | 10997 | 15373 | 19749 | 24125 | 28501 | 32877 | | 39178 |
| NC_004104 | 2245 | 2246 | 6622 | 10998 | 15374 | 19750 | 24126 | 28502 | 32878 | 36443 | |
| NC_004104 | 2246 | 2247 | 6623 | 10999 | 15375 | 19751 | 24127 | 28503 | 32879 | 36444 | 39179 |
| NC_009823 | 2247 | 2248 | 6624 | 11000 | 15376 | 19752 | 24128 | 28504 | 32880 | | 39180 |
| NC_009823 | 2248 | 2249 | 6625 | 11001 | 15377 | 19753 | 24129 | 28505 | 32881 | 36445 | |
| NC_009823 | 2249 | 2250 | 6626 | 11002 | 15378 | 19754 | 24130 | 28506 | 32882 | | 39181 |
| NC_009823 | 2250 | 2251 | 6627 | 11003 | 15379 | 19755 | 24131 | 28507 | 32883 | 36446 | |
| NC_009823 | 2251 | 2252 | 6628 | 11004 | 15380 | 19756 | 24132 | 28508 | 32884 | 36447 | 39182 |
| NC_009823 | 2252 | 2253 | 6629 | 11005 | 15381 | 19757 | 24133 | 28509 | 32885 | 36448 | |
| NC_009823 | 2253 | 2254 | 6630 | 11006 | 15382 | 19758 | 24134 | 28510 | 32886 | 36449 | 39183 |
| NC_009823 | 2254 | 2255 | 6631 | 11007 | 15383 | 19759 | 24135 | 28511 | 32887 | | 39184 |
| NC_009823 | 2255 | 2256 | 6632 | 11008 | 15384 | 19760 | 24136 | 28512 | 32888 | | 39185 |
| NC_009823 | 2256 | 2257 | 6633 | 11009 | 15385 | 19761 | 24137 | 28513 | 32889 | | 39186 |
| NC_009823 | 2257 | 2258 | 6634 | 11010 | 15386 | 19762 | 24138 | 28514 | 32890 | | 39187 |
| NC_009823 | 2258 | 2259 | 6635 | 11011 | 15387 | 19763 | 24139 | 28515 | 32891 | | 39188 |
| NC_009823 | 2259 | 2260 | 6636 | 11012 | 15388 | 19764 | 24140 | 28516 | 32892 | | 39189 |
| NC_009823 | 2260 | 2261 | 6637 | 11013 | 15389 | 19765 | 24141 | 28517 | 32893 | 36450 | |
| NC_009823 | 2261 | 2262 | 6638 | 11014 | 15390 | 19766 | 24142 | 28518 | 32894 | 36451 | |
| NC_009823 | 2262 | 2263 | 6639 | 11015 | 15391 | 19767 | 24143 | 28519 | 32895 | | 39190 |
| NC_009823 | 2263 | 2264 | 6640 | 11016 | 15392 | 19768 | 24144 | 28520 | 32896 | 36452 | |
| NC_009823 | 2264 | 2265 | 6641 | 11017 | 15393 | 19769 | 24145 | 28521 | 32897 | 36453 | |
| NC_009823 | 2265 | 2266 | 6642 | 11018 | 15394 | 19770 | 24146 | 28522 | 32898 | 36454 | 39191 |
| NC_009823 | 2266 | 2267 | 6643 | 11019 | 15395 | 19771 | 24147 | 28523 | 32899 | 36455 | 39192 |
| NC_009823 | 2267 | 2268 | 6644 | 11020 | 15396 | 19772 | 24148 | 28524 | 32900 | | 39193 |
| NC_009823 | 2268 | 2269 | 6645 | 11021 | 15397 | 19773 | 24149 | 28525 | 32901 | | 39194 |
| NC_009823 | 2269 | 2270 | 6646 | 11022 | 15398 | 19774 | 24150 | 28526 | 32902 | 36456 | |
| NC_009823 | 2270 | 2271 | 6647 | 11023 | 15399 | 19775 | 24151 | 28527 | 32903 | | 39195 |
| NC_009823 | 2271 | 2272 | 6648 | 11024 | 15400 | 19776 | 24152 | 28528 | 32904 | 36457 | |
| NC_009823 | 2272 | 2273 | 6649 | 11025 | 15401 | 19777 | 24153 | 28529 | 32905 | | 39196 |
| NC_009823 | 2273 | 2274 | 6650 | 11026 | 15402 | 19778 | 24154 | 28530 | 32906 | 36458 | |
| NC_009823 | 2274 | 2275 | 6651 | 11027 | 15403 | 19779 | 24155 | 28531 | 32907 | 36459 | |
| NZ_LT591897 | 2275 | 2276 | 6652 | 11028 | 15404 | 19780 | 24156 | 28532 | 32908 | | 39197 |
| NZ_LT591897 | 2276 | 2277 | 6653 | 11029 | 15405 | 19781 | 24157 | 28533 | 32909 | 36460 | 39198 |
| NZ_LT591897 | 2277 | 2278 | 6654 | 11030 | 15406 | 19782 | 24158 | 28534 | 32910 | | 39199 |
| NZ_LT591897 | 2278 | 2279 | 6655 | 11031 | 15407 | 19783 | 24159 | 28535 | 32911 | | 39200 |
| NZ_LT591897 | 2279 | 2280 | 6656 | 11032 | 15408 | 19784 | 24160 | 28536 | 32912 | 36461 | 39201 |
| NZ_LT591897 | 2280 | 2281 | 6657 | 11033 | 15409 | 19785 | 24161 | 28537 | 32913 | | 39202 |
| NZ_LT591897 | 2281 | 2282 | 6658 | 11034 | 15410 | 19786 | 24162 | 28538 | 32914 | 36462 | 39203 |
| NZ_LT591897 | 2282 | 2283 | 6659 | 11035 | 15411 | 19787 | 24163 | 28539 | 32915 | | 39204 |
| NZ_LT591897 | 2283 | 2284 | 6660 | 11036 | 15412 | 19788 | 24164 | 28540 | 32916 | 36463 | |
| NZ_LT591897 | 2284 | 2285 | 6661 | 11037 | 15413 | 19789 | 24165 | 28541 | 32917 | 36464 | |
| NZ_LT591897 | 2285 | 2286 | 6662 | 11038 | 15414 | 19790 | 24166 | 28542 | 32918 | 36465 | 39205 |
| NZ_LT591897 | 2286 | 2287 | 6663 | 11039 | 15415 | 19791 | 24167 | 28543 | 32919 | 36466 | 39206 |
| NZ_LT591897 | 2287 | 2288 | 6664 | 11040 | 15416 | 19792 | 24168 | 28544 | 32920 | 36467 | 39207 |
| NZ_LT591897 | 2288 | 2289 | 6665 | 11041 | 15417 | 19793 | 24169 | 28545 | 32921 | 36468 | |
| NZ_LT591897 | 2289 | 2290 | 6666 | 11042 | 15418 | 19794 | 24170 | 28546 | 32922 | | 39208 |
| NZ_LT591897 | 2290 | 2291 | 6667 | 11043 | 15419 | 19795 | 24171 | 28547 | 32923 | | 39209 |
| NZ_LT591897 | 2291 | 2292 | 6668 | 11044 | 15420 | 19796 | 24172 | 28548 | 32924 | 36469 | 39210 |
| NZ_LT591897 | 2292 | 2293 | 6669 | 11045 | 15421 | 19797 | 24173 | 28549 | 32925 | 36470 | 39211 |
| NZ_LT591897 | 2293 | 2294 | 6670 | 11046 | 15422 | 19798 | 24174 | 28550 | 32926 | 36471 | 39212 |
| NZ_LT591897 | 2294 | 2295 | 6671 | 11047 | 15423 | 19799 | 24175 | 28551 | 32927 | | 39213 |
| NZ_LT591897 | 2295 | 2296 | 6672 | 11048 | 15424 | 19800 | 24176 | 28552 | 32928 | 36472 | 39214 |
| NZ_LT591897 | 2296 | 2297 | 6673 | 11049 | 15425 | 19801 | 24177 | 28553 | 32929 | | 39215 |
| NZ_LT591897 | 2297 | 2298 | 6674 | 11050 | 15426 | 19802 | 24178 | 28554 | 32930 | 36473 | |
| NZ_LT591897 | 2298 | 2299 | 6675 | 11051 | 15427 | 19803 | 24179 | 28555 | 32931 | | 39216 |
| NZ_LT591897 | 2299 | 2300 | 6676 | 11052 | 15428 | 19804 | 24180 | 28556 | 32932 | 36474 | 39217 |
| NZ_LT591897 | 2300 | 2301 | 6677 | 11053 | 15429 | 19805 | 24181 | 28557 | 32933 | 36475 | |
| NZ_LT591897 | 2301 | 2302 | 6678 | 11054 | 15430 | 19806 | 24182 | 28558 | 32934 | 36476 | |
| NZ_LT591897 | 2302 | 2303 | 6679 | 11055 | 15431 | 19807 | 24183 | 28559 | 32935 | 36477 | |
| NZ_LT591897 | 2303 | 2304 | 6680 | 11056 | 15432 | 19808 | 24184 | 28560 | 32936 | 36478 | |
| NZ_LT591897 | 2304 | 2305 | 6681 | 11057 | 15433 | 19809 | 24185 | 28561 | 32937 | 36479 | 39218 |
| NZ_LT591897 | 2305 | 2306 | 6682 | 11058 | 15434 | 19810 | 24186 | 28562 | 32938 | | 39219 |
| NZ_LT591897 | 2306 | 2307 | 6683 | 11059 | 15435 | 19811 | 24187 | 28563 | 32939 | 36480 | |
| NZ_LT591897 | 2307 | 2308 | 6684 | 11060 | 15436 | 19812 | 24188 | 28564 | 32940 | 36481 | 39220 |
| NZ_LT591897 | 2308 | 2309 | 6685 | 11061 | 15437 | 19813 | 24189 | 28565 | 32941 | 36482 | |
| NZ_LT591897 | 2309 | 2310 | 6686 | 11062 | 15438 | 19814 | 24190 | 28566 | 32942 | 36483 | 39221 |
| NZ_LT591897 | 2310 | 2311 | 6687 | 11063 | 15439 | 19815 | 24191 | 28567 | 32943 | 36484 | 39222 |
| NZ_LT591897 | 2311 | 2312 | 6688 | 11064 | 15440 | 19816 | 24192 | 28568 | 32944 | 36485 | |
| NZ_LT591897 | 2312 | 2313 | 6689 | 11065 | 15441 | 19817 | 24193 | 28569 | 32945 | 36486 | |
| NZ_LT591897 | 2313 | 2314 | 6690 | 11066 | 15442 | 19818 | 24194 | 28570 | 32946 | 36487 | 39223 |
| NZ_LT591897 | 2314 | 2315 | 6691 | 11067 | 15443 | 19819 | 24195 | 28571 | 32947 | 36488 | 39224 |
| NZ_LT591897 | 2315 | 2316 | 6692 | 11068 | 15444 | 19820 | 24196 | 28572 | 32948 | | 39225 |
| NZ_LT591897 | 2316 | 2317 | 6693 | 11069 | 15445 | 19821 | 24197 | 28573 | 32949 | 36489 | 39226 |
| NZ_LT591897 | 2317 | 2318 | 6694 | 11070 | 15446 | 19822 | 24198 | 28574 | 32950 | | 39227 |
| NZ_LT591897 | 2318 | 2319 | 6695 | 11071 | 15447 | 19823 | 24199 | 28575 | 32951 | 36490 | 39228 |
| NZ_LT591897 | 2319 | 2320 | 6696 | 11072 | 15448 | 19824 | 24200 | 28576 | 32952 | | 39229 |
| NZ_LT591897 | 2320 | 2321 | 6697 | 11073 | 15449 | 19825 | 24201 | 28577 | 32953 | 36491 | 39230 |
| NZ_LT591897 | 2321 | 2322 | 6698 | 11074 | 15450 | 19826 | 24202 | 28578 | 32954 | 36492 | |
| NZ_LT591897 | 2322 | 2323 | 6699 | 11075 | 15451 | 19827 | 24203 | 28579 | 32955 | | 39231 |
| NZ_LT591897 | 2323 | 2324 | 6700 | 11076 | 15452 | 19828 | 24204 | 28580 | 32956 | | 39232 |
| NZ_LT591897 | 2324 | 2325 | 6701 | 11077 | 15453 | 19829 | 24205 | 28581 | 32957 | 36493 | 39233 |
| NZ_LT591897 | 2325 | 2326 | 6702 | 11078 | 15454 | 19830 | 24206 | 28582 | 32958 | 36494 | |
| NZ_LT591897 | 2326 | 2327 | 6703 | 11079 | 15455 | 19831 | 24207 | 28583 | 32959 | 36495 | |
| NZ_LT591897 | 2327 | 2328 | 6704 | 11080 | 15456 | 19832 | 24208 | 28584 | 32960 | 36496 | |
| NZ_LT591897 | 2328 | 2329 | 6705 | 11081 | 15457 | 19833 | 24209 | 28585 | 32961 | 36497 | 39234 |
| NZ_LT591897 | 2329 | 2330 | 6706 | 11082 | 15458 | 19834 | 24210 | 28586 | 32962 | 36498 | 39235 |
| NZ_LT591897 | 2330 | 2331 | 6707 | 11083 | 15459 | 19835 | 24211 | 28587 | 32963 | 36499 | 39236 |
| NZ_LT591897 | 2331 | 2332 | 6708 | 11084 | 15460 | 19836 | 24212 | 28588 | 32964 | 36500 | |
| NZ_LT591897 | 2332 | 2333 | 6709 | 11085 | 15461 | 19837 | 24213 | 28589 | 32965 | | 39237 |
| NZ_LT591897 | 2333 | 2334 | 6710 | 11086 | 15462 | 19838 | 24214 | 28590 | 32966 | 36501 | 39238 |
| NZ_LT591897 | 2334 | 2335 | 6711 | 11087 | 15463 | 19839 | 24215 | 28591 | 32967 | | 39239 |
| NZ_LT591897 | 2335 | 2336 | 6712 | 11088 | 15464 | 19840 | 24216 | 28592 | 32968 | 36502 | 39240 |
| NZ_LT591897 | 2336 | 2337 | 6713 | 11089 | 15465 | 19841 | 24217 | 28593 | 32969 | 36503 | 39241 |
| NZ_LT591897 | 2337 | 2338 | 6714 | 11090 | 15466 | 19842 | 24218 | 28594 | 32970 | | 39242 |
| NZ_LT591897 | 2338 | 2339 | 6715 | 11091 | 15467 | 19843 | 24219 | 28595 | 32971 | 36504 | 39243 |
| NZ_LT591897 | 2339 | 2340 | 6716 | 11092 | 15468 | 19844 | 24220 | 28596 | 32972 | 36505 | 39244 |
| NZ_LT591897 | 2340 | 2341 | 6717 | 11093 | 15469 | 19845 | 24221 | 28597 | 32973 | 36506 | 39245 |
| NZ_LT591897 | 2341 | 2342 | 6718 | 11094 | 15470 | 19846 | 24222 | 28598 | 32974 | 36507 | 39246 |
| NZ_LT591897 | 2342 | 2343 | 6719 | 11095 | 15471 | 19847 | 24223 | 28599 | 32975 | 36508 | 39247 |
| NZ_LT591897 | 2343 | 2344 | 6720 | 11096 | 15472 | 19848 | 24224 | 28600 | 32976 | 36509 | 39248 |
| NZ_LT591897 | 2344 | 2345 | 6721 | 11097 | 15473 | 19849 | 24225 | 28601 | 32977 | 36510 | |
| NZ_LT591897 | 2345 | 2346 | 6722 | 11098 | 15474 | 19850 | 24226 | 28602 | 32978 | 36511 | 39249 |
| NZ_LT591897 | 2346 | 2347 | 6723 | 11099 | 15475 | 19851 | 24227 | 28603 | 32979 | 36512 | 39250 |
| NZ_LT591897 | 2347 | 2348 | 6724 | 11100 | 15476 | 19852 | 24228 | 28604 | 32980 | 36513 | 39251 |
| NZ_LT591897 | 2348 | 2349 | 6725 | 11101 | 15477 | 19853 | 24229 | 28605 | 32981 | 36514 | 39252 |
| NZ_LT591897 | 2349 | 2350 | 6726 | 11102 | 15478 | 19854 | 24230 | 28606 | 32982 | 36515 | |
| NZ_LT591897 | 2350 | 2351 | 6727 | 11103 | 15479 | 19855 | 24231 | 28607 | 32983 | 36516 | 39253 |
| NZ_LT591897 | 2351 | 2352 | 6728 | 11104 | 15480 | 19856 | 24232 | 28608 | 32984 | 36517 | 39254 |
| NZ_LT591897 | 2352 | 2353 | 6729 | 11105 | 15481 | 19857 | 24233 | 28609 | 32985 | | 39255 |
| NZ_LT591897 | 2353 | 2354 | 6730 | 11106 | 15482 | 19858 | 24234 | 28610 | 32986 | | 39256 |
| NZ_LT591897 | 2354 | 2355 | 6731 | 11107 | 15483 | 19859 | 24235 | 28611 | 32987 | 36518 | |
| NZ_LT591897 | 2355 | 2356 | 6732 | 11108 | 15484 | 19860 | 24236 | 28612 | 32988 | 36519 | 39257 |
| NZ_LT591897 | 2356 | 2357 | 6733 | 11109 | 15485 | 19861 | 24237 | 28613 | 32989 | 36520 | |
| NZ_LT591897 | 2357 | 2358 | 6734 | 11110 | 15486 | 19862 | 24238 | 28614 | 32990 | | 39258 |
| NZ_LT591897 | 2358 | 2359 | 6735 | 11111 | 15487 | 19863 | 24239 | 28615 | 32991 | 36521 | |
| NZ_LT591897 | 2359 | 2360 | 6736 | 11112 | 15488 | 19864 | 24240 | 28616 | 32992 | 36522 | |
| NZ_LT591897 | 2360 | 2361 | 6737 | 11113 | 15489 | 19865 | 24241 | 28617 | 32993 | 36523 | 39259 |
| NZ_LT591897 | 2361 | 2362 | 6738 | 11114 | 15490 | 19866 | 24242 | 28618 | 32994 | 36524 | 39260 |
| NZ_LT591897 | 2362 | 2363 | 6739 | 11115 | 15491 | 19867 | 24243 | 28619 | 32995 | 36525 | |
| NZ_LT591897 | 2363 | 2364 | 6740 | 11116 | 15492 | 19868 | 24244 | 28620 | 32996 | 36526 | |
| NZ_LT591897 | 2364 | 2365 | 6741 | 11117 | 15493 | 19869 | 24245 | 28621 | 32997 | | 39261 |
| NZ_LT591897 | 2365 | 2366 | 6742 | 11118 | 15494 | 19870 | 24246 | 28622 | 32998 | 36527 | |
| NZ_LT591897 | 2366 | 2367 | 6743 | 11119 | 15495 | 19871 | 24247 | 28623 | 32999 | 36528 | 39262 |
| NZ_LT591897 | 2367 | 2368 | 6744 | 11120 | 15496 | 19872 | 24248 | 28624 | 33000 | 36529 | |
| NZ_LT591897 | 2368 | 2369 | 6745 | 11121 | 15497 | 19873 | 24249 | 28625 | 33001 | 36530 | |
| NZ_LT591897 | 2369 | 2370 | 6746 | 11122 | 15498 | 19874 | 24250 | 28626 | 33002 | 36531 | 39263 |
| NZ_LT591897 | 2370 | 2371 | 6747 | 11123 | 15499 | 19875 | 24251 | 28627 | 33003 | 36532 | |
| NZ_LT591897 | 2371 | 2372 | 6748 | 11124 | 15500 | 19876 | 24252 | 28628 | 33004 | | 39264 |
| NZ_LT591897 | 2372 | 2373 | 6749 | 11125 | 15501 | 19877 | 24253 | 28629 | 33005 | 36533 | 39265 |
| NZ_LT591897 | 2373 | 2374 | 6750 | 11126 | 15502 | 19878 | 24254 | 28630 | 33006 | 36534 | |
| NZ_LT591897 | 2374 | 2375 | 6751 | 11127 | 15503 | 19879 | 24255 | 28631 | 33007 | 36535 | 39266 |
| NZ_LT591897 | 2375 | 2376 | 6752 | 11128 | 15504 | 19880 | 24256 | 28632 | 33008 | 36536 | 39267 |
| NZ_LT591897 | 2376 | 2377 | 6753 | 11129 | 15505 | 19881 | 24257 | 28633 | 33009 | 36537 | 39268 |
| NZ_LT591897 | 2377 | 2378 | 6754 | 11130 | 15506 | 19882 | 24258 | 28634 | 33010 | 36538 | |
| NZ_LT591897 | 2378 | 2379 | 6755 | 11131 | 15507 | 19883 | 24259 | 28635 | 33011 | | 39269 |
| NZ_LT591897 | 2379 | 2380 | 6756 | 11132 | 15508 | 19884 | 24260 | 28636 | 33012 | | 39270 |
| NZ_LT591897 | 2380 | 2381 | 6757 | 11133 | 15509 | 19885 | 24261 | 28637 | 33013 | 36539 | 39271 |
| NZ_LT591897 | 2381 | 2382 | 6758 | 11134 | 15510 | 19886 | 24262 | 28638 | 33014 | 36540 | |
| NZ_LT591897 | 2382 | 2383 | 6759 | 11135 | 15511 | 19887 | 24263 | 28639 | 33015 | 36541 | 39272 |
| NZ_LT591897 | 2383 | 2384 | 6760 | 11136 | 15512 | 19888 | 24264 | 28640 | 33016 | 36542 | 39273 |
| NZ_LT591897 | 2384 | 2385 | 6761 | 11137 | 15513 | 19889 | 24265 | 28641 | 33017 | 36543 | |
| NZ_LT591897 | 2385 | 2386 | 6762 | 11138 | 15514 | 19890 | 24266 | 28642 | 33018 | 36544 | |
| NZ_LT591897 | 2386 | 2387 | 6763 | 11139 | 15515 | 19891 | 24267 | 28643 | 33019 | 36545 | 39274 |
| NZ_LT591897 | 2387 | 2388 | 6764 | 11140 | 15516 | 19892 | 24268 | 28644 | 33020 | 36546 | |
| NZ_LT591897 | 2388 | 2389 | 6765 | 11141 | 15517 | 19893 | 24269 | 28645 | 33021 | 36547 | 39275 |
| NZ_LT591897 | 2389 | 2390 | 6766 | 11142 | 15518 | 19894 | 24270 | 28646 | 33022 | 36548 | |
| NZ_LT591897 | 2390 | 2391 | 6767 | 11143 | 15519 | 19895 | 24271 | 28647 | 33023 | 36549 | |
| NZ_LT591897 | 2391 | 2392 | 6768 | 11144 | 15520 | 19896 | 24272 | 28648 | 33024 | 36550 | 39276 |
| NZ_LT591897 | 2392 | 2393 | 6769 | 11145 | 15521 | 19897 | 24273 | 28649 | 33025 | | 39277 |
| NZ_LT591897 | 2393 | 2394 | 6770 | 11146 | 15522 | 19898 | 24274 | 28650 | 33026 | | 39278 |
| NZ_LT591897 | 2394 | 2395 | 6771 | 11147 | 15523 | 19899 | 24275 | 28651 | 33027 | 36551 | 39279 |
| NZ_LT591897 | 2395 | 2396 | 6772 | 11148 | 15524 | 19900 | 24276 | 28652 | 33028 | | 39280 |
| NZ_LT591897 | 2396 | 2397 | 6773 | 11149 | 15525 | 19901 | 24277 | 28653 | 33029 | 36552 | |
| NZ_LT591897 | 2397 | 2398 | 6774 | 11150 | 15526 | 19902 | 24278 | 28654 | 33030 | 36553 | |
| NZ_LT591897 | 2398 | 2399 | 6775 | 11151 | 15527 | 19903 | 24279 | 28655 | 33031 | 36554 | |
| NZ_LT591897 | 2399 | 2400 | 6776 | 11152 | 15528 | 19904 | 24280 | 28656 | 33032 | 36555 | |
| NZ_LT591897 | 2400 | 2401 | 6777 | 11153 | 15529 | 19905 | 24281 | 28657 | 33033 | | 39281 |
| NZ_LT591897 | 2401 | 2402 | 6778 | 11154 | 15530 | 19906 | 24282 | 28658 | 33034 | 36556 | |
| NZ_LT591897 | 2402 | 2403 | 6779 | 11155 | 15531 | 19907 | 24283 | 28659 | 33035 | 36557 | |
| NZ_LT591897 | 2403 | 2404 | 6780 | 11156 | 15532 | 19908 | 24284 | 28660 | 33036 | 36558 | |
| NZ_LT591897 | 2404 | 2405 | 6781 | 11157 | 15533 | 19909 | 24285 | 28661 | 33037 | | 39282 |
| NZ_LT591897 | 2405 | 2406 | 6782 | 11158 | 15534 | 19910 | 24286 | 28662 | 33038 | 36559 | |
| NZ_LT591897 | 2406 | 2407 | 6783 | 11159 | 15535 | 19911 | 24287 | 28663 | 33039 | 36560 | 39283 |
| NZ_LT591897 | 2407 | 2408 | 6784 | 11160 | 15536 | 19912 | 24288 | 28664 | 33040 | | 39284 |
| NZ_LT591897 | 2408 | 2409 | 6785 | 11161 | 15537 | 19913 | 24289 | 28665 | 33041 | 36561 | |
| NZ_LT591897 | 2409 | 2410 | 6786 | 11162 | 15538 | 19914 | 24290 | 28666 | 33042 | | 39285 |
| NZ_LT591897 | 2410 | 2411 | 6787 | 11163 | 15539 | 19915 | 24291 | 28667 | 33043 | 36562 | 39286 |
| NZ_LT591897 | 2411 | 2412 | 6788 | 11164 | 15540 | 19916 | 24292 | 28668 | 33044 | 36563 | |
| NZ_LT591897 | 2412 | 2413 | 6789 | 11165 | 15541 | 19917 | 24293 | 28669 | 33045 | 36564 | 39287 |
| NZ_LT591897 | 2413 | 2414 | 6790 | 11166 | 15542 | 19918 | 24294 | 28670 | 33046 | | 39288 |
| NZ_LT591897 | 2414 | 2415 | 6791 | 11167 | 15543 | 19919 | 24295 | 28671 | 33047 | | 39289 |
| NZ_LT591897 | 2415 | 2416 | 6792 | 11168 | 15544 | 19920 | 24296 | 28672 | 33048 | | 39290 |
| NZ_LT591897 | 2416 | 2417 | 6793 | 11169 | 15545 | 19921 | 24297 | 28673 | 33049 | 36565 | |
| NZ_LT591897 | 2417 | 2418 | 6794 | 11170 | 15546 | 19922 | 24298 | 28674 | 33050 | 36566 | |
| NZ_LT591897 | 2418 | 2419 | 6795 | 11171 | 15547 | 19923 | 24299 | 28675 | 33051 | 36567 | 39291 |
| NZ_LT591897 | 2419 | 2420 | 6796 | 11172 | 15548 | 19924 | 24300 | 28676 | 33052 | 36568 | 39292 |
| NZ_LT591897 | 2420 | 2421 | 6797 | 11173 | 15549 | 19925 | 24301 | 28677 | 33053 | 36569 | |
| NZ_LT591897 | 2421 | 2422 | 6798 | 11174 | 15550 | 19926 | 24302 | 28678 | 33054 | 36570 | 39293 |
| NZ_LT591897 | 2422 | 2423 | 6799 | 11175 | 15551 | 19927 | 24303 | 28679 | 33055 | 36571 | 39294 |
| NZ_LT591897 | 2423 | 2424 | 6800 | 11176 | 15552 | 19928 | 24304 | 28680 | 33056 | 36572 | 39295 |
| NZ_LT591897 | 2424 | 2425 | 6801 | 11177 | 15553 | 19929 | 24305 | 28681 | 33057 | 36573 | |
| NZ_LT591897 | 2425 | 2426 | 6802 | 11178 | 15554 | 19930 | 24306 | 28682 | 33058 | 36574 | 39296 |
| NZ_LT591897 | 2426 | 2427 | 6803 | 11179 | 15555 | 19931 | 24307 | 28683 | 33059 | 36575 | |
| NZ_LT591897 | 2427 | 2428 | 6804 | 11180 | 15556 | 19932 | 24308 | 28684 | 33060 | 36576 | |
| NZ_LT591897 | 2428 | 2429 | 6805 | 11181 | 15557 | 19933 | 24309 | 28685 | 33061 | 36577 | |
| NZ_LT591897 | 2429 | 2430 | 6806 | 11182 | 15558 | 19934 | 24310 | 28686 | 33062 | 36578 | 39297 |
| NZ_LT591897 | 2430 | 2431 | 6807 | 11183 | 15559 | 19935 | 24311 | 28687 | 33063 | 36579 | |
| NZ_LT591897 | 2431 | 2432 | 6808 | 11184 | 15560 | 19936 | 24312 | 28688 | 33064 | 36580 | 39298 |
| NZ_LT591897 | 2432 | 2433 | 6809 | 11185 | 15561 | 19937 | 24313 | 28689 | 33065 | 36581 | 39299 |
| NZ_LT591897 | 2433 | 2434 | 6810 | 11186 | 15562 | 19938 | 24314 | 28690 | 33066 | | 39300 |
| NZ_LT591897 | 2434 | 2435 | 6811 | 11187 | 15563 | 19939 | 24315 | 28691 | 33067 | 36582 | 39301 |
| NZ_LT591897 | 2435 | 2436 | 6812 | 11188 | 15564 | 19940 | 24316 | 28692 | 33068 | | 39302 |
| NZ_LT591897 | 2436 | 2437 | 6813 | 11189 | 15565 | 19941 | 24317 | 28693 | 33069 | 36583 | |
| NZ_LT591897 | 2437 | 2438 | 6814 | 11190 | 15566 | 19942 | 24318 | 28694 | 33070 | 36584 | 39303 |
| NZ_LT591897 | 2438 | 2439 | 6815 | 11191 | 15567 | 19943 | 24319 | 28695 | 33071 | 36585 | |
| NZ_LT591897 | 2439 | 2440 | 6816 | 11192 | 15568 | 19944 | 24320 | 28696 | 33072 | 36586 | |
| NZ_LT591897 | 2440 | 2441 | 6817 | 11193 | 15569 | 19945 | 24321 | 28697 | 33073 | 36587 | |
| NZ_LT591897 | 2441 | 2442 | 6818 | 11194 | 15570 | 19946 | 24322 | 28698 | 33074 | 36588 | |
| NZ_LT591897 | 2442 | 2443 | 6819 | 11195 | 15571 | 19947 | 24323 | 28699 | 33075 | 36589 | |
| NZ_LT591897 | 2443 | 2444 | 6820 | 11196 | 15572 | 19948 | 24324 | 28700 | 33076 | 36590 | |
| NZ_LT591897 | 2444 | 2445 | 6821 | 11197 | 15573 | 19949 | 24325 | 28701 | 33077 | 36591 | |
| NZ_LT591897 | 2445 | 2446 | 6822 | 11198 | 15574 | 19950 | 24326 | 28702 | 33078 | 36592 | 39304 |
| NZ_LT591897 | 2446 | 2447 | 6823 | 11199 | 15575 | 19951 | 24327 | 28703 | 33079 | | 39305 |
| NZ_LT591897 | 2447 | 2448 | 6824 | 11200 | 15576 | 19952 | 24328 | 28704 | 33080 | 36593 | |
| NZ_LT591897 | 2448 | 2449 | 6825 | 11201 | 15577 | 19953 | 24329 | 28705 | 33081 | | 39306 |
| NZ_LT591897 | 2449 | 2450 | 6826 | 11202 | 15578 | 19954 | 24330 | 28706 | 33082 | 36594 | 39307 |
| NZ_LT591897 | 2450 | 2451 | 6827 | 11203 | 15579 | 19955 | 24331 | 28707 | 33083 | 36595 | 39308 |
| NZ_LT591897 | 2451 | 2452 | 6828 | 11204 | 15580 | 19956 | 24332 | 28708 | 33084 | | 39309 |
| NZ_LT591897 | 2452 | 2453 | 6829 | 11205 | 15581 | 19957 | 24333 | 28709 | 33085 | 36596 | 39310 |
| NZ_LT591897 | 2453 | 2454 | 6830 | 11206 | 15582 | 19958 | 24334 | 28710 | 33086 | 36597 | 39311 |
| NZ_LT591897 | 2454 | 2455 | 6831 | 11207 | 15583 | 19959 | 24335 | 28711 | 33087 | 36598 | |
| NZ_LT591897 | 2455 | 2456 | 6832 | 11208 | 15584 | 19960 | 24336 | 28712 | 33088 | 36599 | 39312 |
| NZ_LT591897 | 2456 | 2457 | 6833 | 11209 | 15585 | 19961 | 24337 | 28713 | 33089 | 36600 | 39313 |
| NZ_LT591897 | 2457 | 2458 | 6834 | 11210 | 15586 | 19962 | 24338 | 28714 | 33090 | | 39314 |
| NZ_LT591897 | 2458 | 2459 | 6835 | 11211 | 15587 | 19963 | 24339 | 28715 | 33091 | 36601 | 39315 |
| NZ_LT591897 | 2459 | 2460 | 6836 | 11212 | 15588 | 19964 | 24340 | 28716 | 33092 | 36602 | 39316 |
| NZ_LT591897 | 2460 | 2461 | 6837 | 11213 | 15589 | 19965 | 24341 | 28717 | 33093 | 36603 | 39317 |
| NZ_LT591897 | 2461 | 2462 | 6838 | 11214 | 15590 | 19966 | 24342 | 28718 | 33094 | 36604 | 39318 |
| NZ_LT591897 | 2462 | 2463 | 6839 | 11215 | 15591 | 19967 | 24343 | 28719 | 33095 | | 39319 |
| NZ_LT591897 | 2463 | 2464 | 6840 | 11216 | 15592 | 19968 | 24344 | 28720 | 33096 | 36605 | |
| NZ_LT591897 | 2464 | 2465 | 6841 | 11217 | 15593 | 19969 | 24345 | 28721 | 33097 | 36606 | 39320 |
| NZ_LT591897 | 2465 | 2466 | 6842 | 11218 | 15594 | 19970 | 24346 | 28722 | 33098 | 36607 | |
| NZ_LT591897 | 2466 | 2467 | 6843 | 11219 | 15595 | 19971 | 24347 | 28723 | 33099 | | 39321 |
| NZ_LT591897 | 2467 | 2468 | 6844 | 11220 | 15596 | 19972 | 24348 | 28724 | 33100 | 36608 | 39322 |
| NZ_LT591897 | 2468 | 2469 | 6845 | 11221 | 15597 | 19973 | 24349 | 28725 | 33101 | 36609 | |
| NZ_LT591897 | 2469 | 2470 | 6846 | 11222 | 15598 | 19974 | 24350 | 28726 | 33102 | 36610 | 39323 |
| NZ_LT591897 | 2470 | 2471 | 6847 | 11223 | 15599 | 19975 | 24351 | 28727 | 33103 | 36611 | |
| NZ_LT591897 | 2471 | 2472 | 6848 | 11224 | 15600 | 19976 | 24352 | 28728 | 33104 | 36612 | 39324 |
| NZ_LT591897 | 2472 | 2473 | 6849 | 11225 | 15601 | 19977 | 24353 | 28729 | 33105 | 36613 | 39325 |
| NZ_LT591897 | 2473 | 2474 | 6850 | 11226 | 15602 | 19978 | 24354 | 28730 | 33106 | 36614 | 39326 |
| NZ_LT591897 | 2474 | 2475 | 6851 | 11227 | 15603 | 19979 | 24355 | 28731 | 33107 | 36615 | 39327 |
| NZ_LT591897 | 2475 | 2476 | 6852 | 11228 | 15604 | 19980 | 24356 | 28732 | 33108 | 36616 | 39328 |
| NZ_LT591897 | 2476 | 2477 | 6853 | 11229 | 15605 | 19981 | 24357 | 28733 | 33109 | 36617 | |
| NZ_LT591897 | 2477 | 2478 | 6854 | 11230 | 15606 | 19982 | 24358 | 28734 | 33110 | 36618 | 39329 |
| NZ_LT591897 | 2478 | 2479 | 6855 | 11231 | 15607 | 19983 | 24359 | 28735 | 33111 | 36619 | 39330 |
| NZ_LT591897 | 2479 | 2480 | 6856 | 11232 | 15608 | 19984 | 24360 | 28736 | 33112 | 36620 | 39331 |
| NZ_LT591897 | 2480 | 2481 | 6857 | 11233 | 15609 | 19985 | 24361 | 28737 | 33113 | 36621 | |
| NZ_LT591897 | 2481 | 2482 | 6858 | 11234 | 15610 | 19986 | 24362 | 28738 | 33114 | 36622 | 39332 |
| NZ_LT591897 | 2482 | 2483 | 6859 | 11235 | 15611 | 19987 | 24363 | 28739 | 33115 | 36623 | |
| NZ_LT591897 | 2483 | 2484 | 6860 | 11236 | 15612 | 19988 | 24364 | 28740 | 33116 | 36624 | 39333 |
| NZ_LT591897 | 2484 | 2485 | 6861 | 11237 | 15613 | 19989 | 24365 | 28741 | 33117 | | 39334 |
| NZ_LT591897 | 2485 | 2486 | 6862 | 11238 | 15614 | 19990 | 24366 | 28742 | 33118 | 36625 | 39335 |
| NZ_LT591897 | 2486 | 2487 | 6863 | 11239 | 15615 | 19991 | 24367 | 28743 | 33119 | 36626 | |
| NZ_LT591897 | 2487 | 2488 | 6864 | 11240 | 15616 | 19992 | 24368 | 28744 | 33120 | | 39336 |
| NZ_LT591897 | 2488 | 2489 | 6865 | 11241 | 15617 | 19993 | 24369 | 28745 | 33121 | | 39337 |
| NZ_LT591897 | 2489 | 2490 | 6866 | 11242 | 15618 | 19994 | 24370 | 28746 | 33122 | 36627 | |
| NZ_LT591897 | 2490 | 2491 | 6867 | 11243 | 15619 | 19995 | 24371 | 28747 | 33123 | 36628 | 39338 |
| NZ_LT591897 | 2491 | 2492 | 6868 | 11244 | 15620 | 19996 | 24372 | 28748 | 33124 | | 39339 |
| NZ_LT591897 | 2492 | 2493 | 6869 | 11245 | 15621 | 19997 | 24373 | 28749 | 33125 | 36629 | |
| NZ_LT591897 | 2493 | 2494 | 6870 | 11246 | 15622 | 19998 | 24374 | 28750 | 33126 | | 39340 |
| NZ_LT591897 | 2494 | 2495 | 6871 | 11247 | 15623 | 19999 | 24375 | 28751 | 33127 | 36630 | |
| NZ_LT591897 | 2495 | 2496 | 6872 | 11248 | 15624 | 20000 | 24376 | 28752 | 33128 | | 39341 |
| NZ_LT591897 | 2496 | 2497 | 6873 | 11249 | 15625 | 20001 | 24377 | 28753 | 33129 | 36631 | 39342 |
| NZ_LT591897 | 2497 | 2498 | 6874 | 11250 | 15626 | 20002 | 24378 | 28754 | 33130 | 36632 | 39343 |
| NZ_LT591897 | 2498 | 2499 | 6875 | 11251 | 15627 | 20003 | 24379 | 28755 | 33131 | 36633 | |
| NZ_LT591897 | 2499 | 2500 | 6876 | 11252 | 15628 | 20004 | 24380 | 28756 | 33132 | 36634 | 39344 |
| NZ_LT591897 | 2500 | 2501 | 6877 | 11253 | 15629 | 20005 | 24381 | 28757 | 33133 | 36635 | 39345 |
| NZ_LT591897 | 2501 | 2502 | 6878 | 11254 | 15630 | 20006 | 24382 | 28758 | 33134 | 36636 | 39346 |
| NZ_LT591897 | 2502 | 2503 | 6879 | 11255 | 15631 | 20007 | 24383 | 28759 | 33135 | 36637 | 39347 |
| NZ_LT591897 | 2503 | 2504 | 6880 | 11256 | 15632 | 20008 | 24384 | 28760 | 33136 | 36638 | |
| NZ_LT591897 | 2504 | 2505 | 6881 | 11257 | 15633 | 20009 | 24385 | 28761 | 33137 | 36639 | |
| NZ_LT591897 | 2505 | 2506 | 6882 | 11258 | 15634 | 20010 | 24386 | 28762 | 33138 | 36640 | |
| NZ_LT591897 | 2506 | 2507 | 6883 | 11259 | 15635 | 20011 | 24387 | 28763 | 33139 | 36641 | 39348 |
| NZ_LT591897 | 2507 | 2508 | 6884 | 11260 | 15636 | 20012 | 24388 | 28764 | 33140 | 36642 | 39349 |
| NZ_LT591897 | 2508 | 2509 | 6885 | 11261 | 15637 | 20013 | 24389 | 28765 | 33141 | | 39350 |
| NZ_LT591897 | 2509 | 2510 | 6886 | 11262 | 15638 | 20014 | 24390 | 28766 | 33142 | 36643 | |
| NZ_LT591897 | 2510 | 2511 | 6887 | 11263 | 15639 | 20015 | 24391 | 28767 | 33143 | 36644 | |
| NZ_LT591897 | 2511 | 2512 | 6888 | 11264 | 15640 | 20016 | 24392 | 28768 | 33144 | 36645 | 39351 |
| NZ_LT591897 | 2512 | 2513 | 6889 | 11265 | 15641 | 20017 | 24393 | 28769 | 33145 | 36646 | |
| NZ_LT591897 | 2513 | 2514 | 6890 | 11266 | 15642 | 20018 | 24394 | 28770 | 33146 | | 39352 |
| NZ_LT591897 | 2514 | 2515 | 6891 | 11267 | 15643 | 20019 | 24395 | 28771 | 33147 | | 39353 |
| NZ_LT591897 | 2515 | 2516 | 6892 | 11268 | 15644 | 20020 | 24396 | 28772 | 33148 | 36647 | 39354 |
| NZ_LT591897 | 2516 | 2517 | 6893 | 11269 | 15645 | 20021 | 24397 | 28773 | 33149 | | 39355 |
| NZ_LT591897 | 2517 | 2518 | 6894 | 11270 | 15646 | 20022 | 24398 | 28774 | 33150 | 36648 | |
| NZ_LT591897 | 2518 | 2519 | 6895 | 11271 | 15647 | 20023 | 24399 | 28775 | 33151 | | 39356 |
| NZ_LT591897 | 2519 | 2520 | 6896 | 11272 | 15648 | 20024 | 24400 | 28776 | 33152 | 36649 | 39357 |
| NZ_LT591897 | 2520 | 2521 | 6897 | 11273 | 15649 | 20025 | 24401 | 28777 | 33153 | 36650 | |
| NZ_LT591897 | 2521 | 2522 | 6898 | 11274 | 15650 | 20026 | 24402 | 28778 | 33154 | 36651 | |
| NZ_LT591897 | 2522 | 2523 | 6899 | 11275 | 15651 | 20027 | 24403 | 28779 | 33155 | | 39358 |
| NZ_LT591897 | 2523 | 2524 | 6900 | 11276 | 15652 | 20028 | 24404 | 28780 | 33156 | | 39359 |
| NZ_LT591897 | 2524 | 2525 | 6901 | 11277 | 15653 | 20029 | 24405 | 28781 | 33157 | | 39360 |
| NZ_LT591897 | 2525 | 2526 | 6902 | 11278 | 15654 | 20030 | 24406 | 28782 | 33158 | 36652 | 39361 |
| NZ_LT591897 | 2526 | 2527 | 6903 | 11279 | 15655 | 20031 | 24407 | 28783 | 33159 | 36653 | 39362 |
| NZ_LT591897 | 2527 | 2528 | 6904 | 11280 | 15656 | 20032 | 24408 | 28784 | 33160 | 36654 | 39363 |
| NZ_LT591897 | 2528 | 2529 | 6905 | 11281 | 15657 | 20033 | 24409 | 28785 | 33161 | 36655 | 39364 |
| NZ_LT591897 | 2529 | 2530 | 6906 | 11282 | 15658 | 20034 | 24410 | 28786 | 33162 | 36656 | 39365 |
| NZ_LT591897 | 2530 | 2531 | 6907 | 11283 | 15659 | 20035 | 24411 | 28787 | 33163 | 36657 | |
| NZ_LT591897 | 2531 | 2532 | 6908 | 11284 | 15660 | 20036 | 24412 | 28788 | 33164 | 36658 | 39366 |
| NZ_LT591897 | 2532 | 2533 | 6909 | 11285 | 15661 | 20037 | 24413 | 28789 | 33165 | 36659 | 39367 |
| NZ_LT591897 | 2533 | 2534 | 6910 | 11286 | 15662 | 20038 | 24414 | 28790 | 33166 | 36660 | |
| NZ_LT591897 | 2534 | 2535 | 6911 | 11287 | 15663 | 20039 | 24415 | 28791 | 33167 | 36661 | |
| NZ_LT591897 | 2535 | 2536 | 6912 | 11288 | 15664 | 20040 | 24416 | 28792 | 33168 | | 39368 |
| NZ_LT591897 | 2536 | 2537 | 6913 | 11289 | 15665 | 20041 | 24417 | 28793 | 33169 | 36662 | 39369 |
| NZ_LT591897 | 2537 | 2538 | 6914 | 11290 | 15666 | 20042 | 24418 | 28794 | 33170 | | 39370 |
| NZ_LT591897 | 2538 | 2539 | 6915 | 11291 | 15667 | 20043 | 24419 | 28795 | 33171 | 36663 | 39371 |
| NZ_LT591897 | 2539 | 2540 | 6916 | 11292 | 15668 | 20044 | 24420 | 28796 | 33172 | 36664 | |
| NZ_LT591897 | 2540 | 2541 | 6917 | 11293 | 15669 | 20045 | 24421 | 28797 | 33173 | 36665 | 39372 |
| NZ_LT591897 | 2541 | 2542 | 6918 | 11294 | 15670 | 20046 | 24422 | 28798 | 33174 | 36666 | 39373 |
| NZ_LT591897 | 2542 | 2543 | 6919 | 11295 | 15671 | 20047 | 24423 | 28799 | 33175 | | 39374 |
| NZ_LT591897 | 2543 | 2544 | 6920 | 11296 | 15672 | 20048 | 24424 | 28800 | 33176 | 36667 | |
| NZ_LT591897 | 2544 | 2545 | 6921 | 11297 | 15673 | 20049 | 24425 | 28801 | 33177 | | 39375 |
| NZ_LT591897 | 2545 | 2546 | 6922 | 11298 | 15674 | 20050 | 24426 | 28802 | 33178 | 36668 | |
| NZ_LT591897 | 2546 | 2547 | 6923 | 11299 | 15675 | 20051 | 24427 | 28803 | 33179 | 36669 | 39376 |
| NZ_LT591897 | 2547 | 2548 | 6924 | 11300 | 15676 | 20052 | 24428 | 28804 | 33180 | 36670 | 39377 |
| NZ_LT591897 | 2548 | 2549 | 6925 | 11301 | 15677 | 20053 | 24429 | 28805 | 33181 | 36671 | |
| NZ_LT591897 | 2549 | 2550 | 6926 | 11302 | 15678 | 20054 | 24430 | 28806 | 33182 | 36672 | 39378 |
| NZ_LT591897 | 2550 | 2551 | 6927 | 11303 | 15679 | 20055 | 24431 | 28807 | 33183 | 36673 | |
| NZ_LT591897 | 2551 | 2552 | 6928 | 11304 | 15680 | 20056 | 24432 | 28808 | 33184 | 36674 | 39379 |
| NZ_LT591897 | 2552 | 2553 | 6929 | 11305 | 15681 | 20057 | 24433 | 28809 | 33185 | 36675 | 39380 |
| NZ_LT591897 | 2553 | 2554 | 6930 | 11306 | 15682 | 20058 | 24434 | 28810 | 33186 | | 39381 |
| NZ_LT591897 | 2554 | 2555 | 6931 | 11307 | 15683 | 20059 | 24435 | 28811 | 33187 | 36676 | 39382 |
| NZ_LT591897 | 2555 | 2556 | 6932 | 11308 | 15684 | 20060 | 24436 | 28812 | 33188 | | 39383 |
| NZ_LT591897 | 2556 | 2557 | 6933 | 11309 | 15685 | 20061 | 24437 | 28813 | 33189 | | 39384 |
| NZ_LT591897 | 2557 | 2558 | 6934 | 11310 | 15686 | 20062 | 24438 | 28814 | 33190 | 36677 | 39385 |
| NZ_LT591897 | 2558 | 2559 | 6935 | 11311 | 15687 | 20063 | 24439 | 28815 | 33191 | 36678 | 39386 |
| NZ_LT591897 | 2559 | 2560 | 6936 | 11312 | 15688 | 20064 | 24440 | 28816 | 33192 | 36679 | |
| NZ_LT591897 | 2560 | 2561 | 6937 | 11313 | 15689 | 20065 | 24441 | 28817 | 33193 | 36680 | 39387 |
| NZ_LT591897 | 2561 | 2562 | 6938 | 11314 | 15690 | 20066 | 24442 | 28818 | 33194 | | 39388 |
| NZ_LT591897 | 2562 | 2563 | 6939 | 11315 | 15691 | 20067 | 24443 | 28819 | 33195 | 36681 | |
| NZ_LT591897 | 2563 | 2564 | 6940 | 11316 | 15692 | 20068 | 24444 | 28820 | 33196 | 36682 | 39389 |
| NZ_LT591897 | 2564 | 2565 | 6941 | 11317 | 15693 | 20069 | 24445 | 28821 | 33197 | 36683 | 39390 |
| NZ_LT591897 | 2565 | 2566 | 6942 | 11318 | 15694 | 20070 | 24446 | 28822 | 33198 | 36684 | 39391 |
| NZ_LT591897 | 2566 | 2567 | 6943 | 11319 | 15695 | 20071 | 24447 | 28823 | 33199 | 36685 | 39392 |
| NZ_LT591897 | 2567 | 2568 | 6944 | 11320 | 15696 | 20072 | 24448 | 28824 | 33200 | 36686 | 39393 |
| NZ_LT591897 | 2568 | 2569 | 6945 | 11321 | 15697 | 20073 | 24449 | 28825 | 33201 | 36687 | 39394 |
| NZ_LT591897 | 2569 | 2570 | 6946 | 11322 | 15698 | 20074 | 24450 | 28826 | 33202 | 36688 | 39395 |
| NZ_LT591897 | 2570 | 2571 | 6947 | 11323 | 15699 | 20075 | 24451 | 28827 | 33203 | | 39396 |
| NZ_LT591897 | 2571 | 2572 | 6948 | 11324 | 15700 | 20076 | 24452 | 28828 | 33204 | 36689 | |
| NZ_LT591897 | 2572 | 2573 | 6949 | 11325 | 15701 | 20077 | 24453 | 28829 | 33205 | | 39397 |
| NZ_LT591897 | 2573 | 2574 | 6950 | 11326 | 15702 | 20078 | 24454 | 28830 | 33206 | 36690 | 39398 |
| NZ_LT591897 | 2574 | 2575 | 6951 | 11327 | 15703 | 20079 | 24455 | 28831 | 33207 | 36691 | 39399 |
| NZ_LT591897 | 2575 | 2576 | 6952 | 11328 | 15704 | 20080 | 24456 | 28832 | 33208 | | 39400 |
| NZ_LT591897 | 2576 | 2577 | 6953 | 11329 | 15705 | 20081 | 24457 | 28833 | 33209 | 36692 | 39401 |
| NZ_LT591897 | 2577 | 2578 | 6954 | 11330 | 15706 | 20082 | 24458 | 28834 | 33210 | | 39402 |
| NZ_LT591897 | 2578 | 2579 | 6955 | 11331 | 15707 | 20083 | 24459 | 28835 | 33211 | | 39403 |
| NZ_LT591897 | 2579 | 2580 | 6956 | 11332 | 15708 | 20084 | 24460 | 28836 | 33212 | 36693 | 39404 |
| NZ_LT591897 | 2580 | 2581 | 6957 | 11333 | 15709 | 20085 | 24461 | 28837 | 33213 | | 39405 |
| NZ_LT591897 | 2581 | 2582 | 6958 | 11334 | 15710 | 20086 | 24462 | 28838 | 33214 | 36694 | |
| NZ_LT591897 | 2582 | 2583 | 6959 | 11335 | 15711 | 20087 | 24463 | 28839 | 33215 | 36695 | |
| NZ_LT591897 | 2583 | 2584 | 6960 | 11336 | 15712 | 20088 | 24464 | 28840 | 33216 | 36696 | 39406 |
| NZ_LT591897 | 2584 | 2585 | 6961 | 11337 | 15713 | 20089 | 24465 | 28841 | 33217 | 36697 | |
| NZ_LT591897 | 2585 | 2586 | 6962 | 11338 | 15714 | 20090 | 24466 | 28842 | 33218 | | 39407 |
| NZ_LT591897 | 2586 | 2587 | 6963 | 11339 | 15715 | 20091 | 24467 | 28843 | 33219 | | 39408 |
| NZ_LT591897 | 2587 | 2588 | 6964 | 11340 | 15716 | 20092 | 24468 | 28844 | 33220 | 36698 | 39409 |
| NZ_LT591897 | 2588 | 2589 | 6965 | 11341 | 15717 | 20093 | 24469 | 28845 | 33221 | 36699 | |
| NZ_LT591897 | 2589 | 2590 | 6966 | 11342 | 15718 | 20094 | 24470 | 28846 | 33222 | | 39410 |
| NZ_LT591897 | 2590 | 2591 | 6967 | 11343 | 15719 | 20095 | 24471 | 28847 | 33223 | 36700 | 39411 |
| NZ_LT591897 | 2591 | 2592 | 6968 | 11344 | 15720 | 20096 | 24472 | 28848 | 33224 | 36701 | |
| NZ_LT591897 | 2592 | 2593 | 6969 | 11345 | 15721 | 20097 | 24473 | 28849 | 33225 | 36702 | |
| NZ_LT591897 | 2593 | 2594 | 6970 | 11346 | 15722 | 20098 | 24474 | 28850 | 33226 | 36703 | |
| NZ_LT591897 | 2594 | 2595 | 6971 | 11347 | 15723 | 20099 | 24475 | 28851 | 33227 | 36704 | |
| NZ_LT591897 | 2595 | 2596 | 6972 | 11348 | 15724 | 20100 | 24476 | 28852 | 33228 | 36705 | |
| NZ_LT591897 | 2596 | 2597 | 6973 | 11349 | 15725 | 20101 | 24477 | 28853 | 33229 | 36706 | |
| NZ_LT591897 | 2597 | 2598 | 6974 | 11350 | 15726 | 20102 | 24478 | 28854 | 33230 | 36707 | |
| NZ_LT591897 | 2598 | 2599 | 6975 | 11351 | 15727 | 20103 | 24479 | 28855 | 33231 | | 39412 |
| NZ_LT591897 | 2599 | 2600 | 6976 | 11352 | 15728 | 20104 | 24480 | 28856 | 33232 | 36708 | |
| NZ_LT591897 | 2600 | 2601 | 6977 | 11353 | 15729 | 20105 | 24481 | 28857 | 33233 | | 39413 |
| NZ_LT591897 | 2601 | 2602 | 6978 | 11354 | 15730 | 20106 | 24482 | 28858 | 33234 | 36709 | |
| NZ_LT591897 | 2602 | 2603 | 6979 | 11355 | 15731 | 20107 | 24483 | 28859 | 33235 | 36710 | |
| NZ_LT591897 | 2603 | 2604 | 6980 | 11356 | 15732 | 20108 | 24484 | 28860 | 33236 | 36711 | 39414 |
| NZ_LT591897 | 2604 | 2605 | 6981 | 11357 | 15733 | 20109 | 24485 | 28861 | 33237 | 36712 | |
| NZ_LT591897 | 2605 | 2606 | 6982 | 11358 | 15734 | 20110 | 24486 | 28862 | 33238 | 36713 | 39415 |
| NZ_LT591897 | 2606 | 2607 | 6983 | 11359 | 15735 | 20111 | 24487 | 28863 | 33239 | 36714 | 39416 |
| NZ_LT591897 | 2607 | 2608 | 6984 | 11360 | 15736 | 20112 | 24488 | 28864 | 33240 | | 39417 |
| NZ_LT591897 | 2608 | 2609 | 6985 | 11361 | 15737 | 20113 | 24489 | 28865 | 33241 | 36715 | 39418 |
| NZ_LT591897 | 2609 | 2610 | 6986 | 11362 | 15738 | 20114 | 24490 | 28866 | 33242 | 36716 | |
| NZ_LT591897 | 2610 | 2611 | 6987 | 11363 | 15739 | 20115 | 24491 | 28867 | 33243 | 36717 | 39419 |
| NZ_LT591897 | 2611 | 2612 | 6988 | 11364 | 15740 | 20116 | 24492 | 28868 | 33244 | 36718 | 39420 |
| NZ_LT591897 | 2612 | 2613 | 6989 | 11365 | 15741 | 20117 | 24493 | 28869 | 33245 | 36719 | 39421 |
| NZ_LT591897 | 2613 | 2614 | 6990 | 11366 | 15742 | 20118 | 24494 | 28870 | 33246 | | 39422 |
| NZ_LT591897 | 2614 | 2615 | 6991 | 11367 | 15743 | 20119 | 24495 | 28871 | 33247 | | 39423 |
| NZ_LT591897 | 2615 | 2616 | 6992 | 11368 | 15744 | 20120 | 24496 | 28872 | 33248 | 36720 | 39424 |
| NZ_LT591897 | 2616 | 2617 | 6993 | 11369 | 15745 | 20121 | 24497 | 28873 | 33249 | 36721 | |
| NZ_LT591897 | 2617 | 2618 | 6994 | 11370 | 15746 | 20122 | 24498 | 28874 | 33250 | 36722 | |
| NZ_LT591897 | 2618 | 2619 | 6995 | 11371 | 15747 | 20123 | 24499 | 28875 | 33251 | 36723 | |
| NZ_LT591897 | 2619 | 2620 | 6996 | 11372 | 15748 | 20124 | 24500 | 28876 | 33252 | | 39425 |
| NZ_LT591897 | 2620 | 2621 | 6997 | 11373 | 15749 | 20125 | 24501 | 28877 | 33253 | 36724 | 39426 |
| NZ_LT591897 | 2621 | 2622 | 6998 | 11374 | 15750 | 20126 | 24502 | 28878 | 33254 | 36725 | |
| NZ_LT591897 | 2622 | 2623 | 6999 | 11375 | 15751 | 20127 | 24503 | 28879 | 33255 | 36726 | |
| NZ_LT591897 | 2623 | 2624 | 7000 | 11376 | 15752 | 20128 | 24504 | 28880 | 33256 | | 39427 |
| NZ_LT591897 | 2624 | 2625 | 7001 | 11377 | 15753 | 20129 | 24505 | 28881 | 33257 | 36727 | 39428 |
| NZ_LT591897 | 2625 | 2626 | 7002 | 11378 | 15754 | 20130 | 24506 | 28882 | 33258 | 36728 | 39429 |
| NZ_LT591897 | 2626 | 2627 | 7003 | 11379 | 15755 | 20131 | 24507 | 28883 | 33259 | 36729 | |
| NZ_LT591897 | 2627 | 2628 | 7004 | 11380 | 15756 | 20132 | 24508 | 28884 | 33260 | | 39430 |
| NZ_LT591897 | 2628 | 2629 | 7005 | 11381 | 15757 | 20133 | 24509 | 28885 | 33261 | | 39431 |
| NZ_LT591897 | 2629 | 2630 | 7006 | 11382 | 15758 | 20134 | 24510 | 28886 | 33262 | 36730 | 39432 |
| NZ_LT591897 | 2630 | 2631 | 7007 | 11383 | 15759 | 20135 | 24511 | 28887 | 33263 | | 39433 |
| NZ_LT591897 | 2631 | 2632 | 7008 | 11384 | 15760 | 20136 | 24512 | 28888 | 33264 | | 39434 |
| NZ_LT591897 | 2632 | 2633 | 7009 | 11385 | 15761 | 20137 | 24513 | 28889 | 33265 | | 39435 |
| NZ_LT591897 | 2633 | 2634 | 7010 | 11386 | 15762 | 20138 | 24514 | 28890 | 33266 | 36731 | |
| NZ_LT591897 | 2634 | 2635 | 7011 | 11387 | 15763 | 20139 | 24515 | 28891 | 33267 | 36732 | |
| NZ_LT591897 | 2635 | 2636 | 7012 | 11388 | 15764 | 20140 | 24516 | 28892 | 33268 | | 39436 |
| NZ_LT591897 | 2636 | 2637 | 7013 | 11389 | 15765 | 20141 | 24517 | 28893 | 33269 | 36733 | |
| NZ_LT591897 | 2637 | 2638 | 7014 | 11390 | 15766 | 20142 | 24518 | 28894 | 33270 | 36734 | 39437 |
| NZ_LT591897 | 2638 | 2639 | 7015 | 11391 | 15767 | 20143 | 24519 | 28895 | 33271 | | 39438 |
| NZ_LT591897 | 2639 | 2640 | 7016 | 11392 | 15768 | 20144 | 24520 | 28896 | 33272 | 36735 | 39439 |
| NZ_LT591897 | 2640 | 2641 | 7017 | 11393 | 15769 | 20145 | 24521 | 28897 | 33273 | | 39440 |
| NZ_LT591897 | 2641 | 2642 | 7018 | 11394 | 15770 | 20146 | 24522 | 28898 | 33274 | | 39441 |
| NZ_LT591897 | 2642 | 2643 | 7019 | 11395 | 15771 | 20147 | 24523 | 28899 | 33275 | | 39442 |
| NZ_LT591897 | 2643 | 2644 | 7020 | 11396 | 15772 | 20148 | 24524 | 28900 | 33276 | | 39443 |
| NZ_LT591897 | 2644 | 2645 | 7021 | 11397 | 15773 | 20149 | 24525 | 28901 | 33277 | | 39444 |
| NZ_LT591897 | 2645 | 2646 | 7022 | 11398 | 15774 | 20150 | 24526 | 28902 | 33278 | 36736 | 39445 |
| NZ_LT591897 | 2646 | 2647 | 7023 | 11399 | 15775 | 20151 | 24527 | 28903 | 33279 | | 39446 |
| NZ_LT591897 | 2647 | 2648 | 7024 | 11400 | 15776 | 20152 | 24528 | 28904 | 33280 | 36737 | 39447 |
| NZ_LT591897 | 2648 | 2649 | 7025 | 11401 | 15777 | 20153 | 24529 | 28905 | 33281 | | 39448 |
| NZ_LT591897 | 2649 | 2650 | 7026 | 11402 | 15778 | 20154 | 24530 | 28906 | 33282 | 36738 | 39449 |
| NZ_LT591897 | 2650 | 2651 | 7027 | 11403 | 15779 | 20155 | 24531 | 28907 | 33283 | 36739 | |
| NZ_LT591897 | 2651 | 2652 | 7028 | 11404 | 15780 | 20156 | 24532 | 28908 | 33284 | 36740 | 39450 |
| NZ_LT591897 | 2652 | 2653 | 7029 | 11405 | 15781 | 20157 | 24533 | 28909 | 33285 | 36741 | |
| NZ_LT591897 | 2653 | 2654 | 7030 | 11406 | 15782 | 20158 | 24534 | 28910 | 33286 | 36742 | |
| NZ_LT591897 | 2654 | 2655 | 7031 | 11407 | 15783 | 20159 | 24535 | 28911 | 33287 | 36743 | |
| NZ_LT591897 | 2655 | 2656 | 7032 | 11408 | 15784 | 20160 | 24536 | 28912 | 33288 | 36744 | 39451 |
| NZ_LT591897 | 2656 | 2657 | 7033 | 11409 | 15785 | 20161 | 24537 | 28913 | 33289 | | 39452 |
| NZ_LT591897 | 2657 | 2658 | 7034 | 11410 | 15786 | 20162 | 24538 | 28914 | 33290 | | 39453 |
| NZ_LT591897 | 2658 | 2659 | 7035 | 11411 | 15787 | 20163 | 24539 | 28915 | 33291 | 36745 | |
| NZ_LT591897 | 2659 | 2660 | 7036 | 11412 | 15788 | 20164 | 24540 | 28916 | 33292 | 36746 | 39454 |
| NZ_LT591897 | 2660 | 2661 | 7037 | 11413 | 15789 | 20165 | 24541 | 28917 | 33293 | | 39455 |
| NZ_LT591897 | 2661 | 2662 | 7038 | 11414 | 15790 | 20166 | 24542 | 28918 | 33294 | 36747 | |
| NZ_LT591897 | 2662 | 2663 | 7039 | 11415 | 15791 | 20167 | 24543 | 28919 | 33295 | | 39456 |
| NZ_LT591897 | 2663 | 2664 | 7040 | 11416 | 15792 | 20168 | 24544 | 28920 | 33296 | | 39457 |
| NZ_LT591897 | 2664 | 2665 | 7041 | 11417 | 15793 | 20169 | 24545 | 28921 | 33297 | 36748 | |
| NZ_LT591897 | 2665 | 2666 | 7042 | 11418 | 15794 | 20170 | 24546 | 28922 | 33298 | | 39458 |
| NZ_LT591897 | 2666 | 2667 | 7043 | 11419 | 15795 | 20171 | 24547 | 28923 | 33299 | 36749 | |
| NZ_LT591897 | 2667 | 2668 | 7044 | 11420 | 15796 | 20172 | 24548 | 28924 | 33300 | 36750 | 39459 |
| NZ_LT591897 | 2668 | 2669 | 7045 | 11421 | 15797 | 20173 | 24549 | 28925 | 33301 | 36751 | |
| NZ_LT591897 | 2669 | 2670 | 7046 | 11422 | 15798 | 20174 | 24550 | 28926 | 33302 | | 39460 |
| NZ_LT591897 | 2670 | 2671 | 7047 | 11423 | 15799 | 20175 | 24551 | 28927 | 33303 | | 39461 |
| NZ_LT591897 | 2671 | 2672 | 7048 | 11424 | 15800 | 20176 | 24552 | 28928 | 33304 | | 39462 |
| NZ_LT591897 | 2672 | 2673 | 7049 | 11425 | 15801 | 20177 | 24553 | 28929 | 33305 | 36752 | |
| NZ_LT591897 | 2673 | 2674 | 7050 | 11426 | 15802 | 20178 | 24554 | 28930 | 33306 | 36753 | |
| NZ_LT591897 | 2674 | 2675 | 7051 | 11427 | 15803 | 20179 | 24555 | 28931 | 33307 | 36754 | 39463 |
| NZ_LT591897 | 2675 | 2676 | 7052 | 11428 | 15804 | 20180 | 24556 | 28932 | 33308 | 36755 | |
| NZ_LT591897 | 2676 | 2677 | 7053 | 11429 | 15805 | 20181 | 24557 | 28933 | 33309 | | 39464 |
| NZ_LT591897 | 2677 | 2678 | 7054 | 11430 | 15806 | 20182 | 24558 | 28934 | 33310 | 36756 | 39465 |
| NZ_LT591897 | 2678 | 2679 | 7055 | 11431 | 15807 | 20183 | 24559 | 28935 | 33311 | 36757 | 39466 |
| NZ_LT591897 | 2679 | 2680 | 7056 | 11432 | 15808 | 20184 | 24560 | 28936 | 33312 | 36758 | 39467 |
| NZ_LT591897 | 2680 | 2681 | 7057 | 11433 | 15809 | 20185 | 24561 | 28937 | 33313 | | 39468 |
| NZ_LT591897 | 2681 | 2682 | 7058 | 11434 | 15810 | 20186 | 24562 | 28938 | 33314 | 36759 | |
| NZ_LT591897 | 2682 | 2683 | 7059 | 11435 | 15811 | 20187 | 24563 | 28939 | 33315 | | 39469 |
| NZ_LT591897 | 2683 | 2684 | 7060 | 11436 | 15812 | 20188 | 24564 | 28940 | 33316 | | 39470 |
| NZ_LT591897 | 2684 | 2685 | 7061 | 11437 | 15813 | 20189 | 24565 | 28941 | 33317 | 36760 | 39471 |
| NZ_LT591897 | 2685 | 2686 | 7062 | 11438 | 15814 | 20190 | 24566 | 28942 | 33318 | 36761 | 39472 |
| NZ_LT591897 | 2686 | 2687 | 7063 | 11439 | 15815 | 20191 | 24567 | 28943 | 33319 | | 39473 |
| NZ_LT591897 | 2687 | 2688 | 7064 | 11440 | 15816 | 20192 | 24568 | 28944 | 33320 | 36762 | 39474 |
| NZ_LT591897 | 2688 | 2689 | 7065 | 11441 | 15817 | 20193 | 24569 | 28945 | 33321 | | 39475 |
| NZ_LT591897 | 2689 | 2690 | 7066 | 11442 | 15818 | 20194 | 24570 | 28946 | 33322 | 36763 | |
| NZ_LT591897 | 2690 | 2691 | 7067 | 11443 | 15819 | 20195 | 24571 | 28947 | 33323 | 36764 | 39476 |
| NZ_LT591897 | 2691 | 2692 | 7068 | 11444 | 15820 | 20196 | 24572 | 28948 | 33324 | 36765 | |
| NZ_LT591897 | 2692 | 2693 | 7069 | 11445 | 15821 | 20197 | 24573 | 28949 | 33325 | 36766 | |
| NZ_LT591897 | 2693 | 2694 | 7070 | 11446 | 15822 | 20198 | 24574 | 28950 | 33326 | 36767 | 39477 |
| NZ_LT591897 | 2694 | 2695 | 7071 | 11447 | 15823 | 20199 | 24575 | 28951 | 33327 | 36768 | |
| NZ_LT591897 | 2695 | 2696 | 7072 | 11448 | 15824 | 20200 | 24576 | 28952 | 33328 | 36769 | |
| NZ_LT591897 | 2696 | 2697 | 7073 | 11449 | 15825 | 20201 | 24577 | 28953 | 33329 | | 39478 |
| NZ_LT591897 | 2697 | 2698 | 7074 | 11450 | 15826 | 20202 | 24578 | 28954 | 33330 | 36770 | 39479 |
| NZ_LT591897 | 2698 | 2699 | 7075 | 11451 | 15827 | 20203 | 24579 | 28955 | 33331 | 36771 | |
| NZ_LT591897 | 2699 | 2700 | 7076 | 11452 | 15828 | 20204 | 24580 | 28956 | 33332 | 36772 | 39480 |
| NZ_LT591897 | 2700 | 2701 | 7077 | 11453 | 15829 | 20205 | 24581 | 28957 | 33333 | 36773 | 39481 |
| NZ_LT591897 | 2701 | 2702 | 7078 | 11454 | 15830 | 20206 | 24582 | 28958 | 33334 | 36774 | 39482 |
| NZ_LT591897 | 2702 | 2703 | 7079 | 11455 | 15831 | 20207 | 24583 | 28959 | 33335 | 36775 | 39483 |
| NZ_LT591897 | 2703 | 2704 | 7080 | 11456 | 15832 | 20208 | 24584 | 28960 | 33336 | 36776 | 39484 |
| NZ_LT591897 | 2704 | 2705 | 7081 | 11457 | 15833 | 20209 | 24585 | 28961 | 33337 | 36777 | |
| NZ_LT591897 | 2705 | 2706 | 7082 | 11458 | 15834 | 20210 | 24586 | 28962 | 33338 | 36778 | 39485 |
| NZ_LT591897 | 2706 | 2707 | 7083 | 11459 | 15835 | 20211 | 24587 | 28963 | 33339 | 36779 | |
| NZ_LT591897 | 2707 | 2708 | 7084 | 11460 | 15836 | 20212 | 24588 | 28964 | 33340 | 36780 | |
| NZ_LT591897 | 2708 | 2709 | 7085 | 11461 | 15837 | 20213 | 24589 | 28965 | 33341 | 36781 | |
| NZ_LT591897 | 2709 | 2710 | 7086 | 11462 | 15838 | 20214 | 24590 | 28966 | 33342 | | 39486 |
| NZ_LT591897 | 2710 | 2711 | 7087 | 11463 | 15839 | 20215 | 24591 | 28967 | 33343 | | 39487 |
| NZ_LT591897 | 2711 | 2712 | 7088 | 11464 | 15840 | 20216 | 24592 | 28968 | 33344 | | 39488 |
| NZ_LT591897 | 2712 | 2713 | 7089 | 11465 | 15841 | 20217 | 24593 | 28969 | 33345 | | 39489 |
| NZ_LT591897 | 2713 | 2714 | 7090 | 11466 | 15842 | 20218 | 24594 | 28970 | 33346 | 36782 | |
| NZ_LT591897 | 2714 | 2715 | 7091 | 11467 | 15843 | 20219 | 24595 | 28971 | 33347 | 36783 | 39490 |
| NZ_LT591897 | 2715 | 2716 | 7092 | 11468 | 15844 | 20220 | 24596 | 28972 | 33348 | | 39491 |
| NZ_LT591897 | 2716 | 2717 | 7093 | 11469 | 15845 | 20221 | 24597 | 28973 | 33349 | 36784 | |
| NZ_LT591897 | 2717 | 2718 | 7094 | 11470 | 15846 | 20222 | 24598 | 28974 | 33350 | 36785 | |
| NZ_LT591897 | 2718 | 2719 | 7095 | 11471 | 15847 | 20223 | 24599 | 28975 | 33351 | 36786 | 39492 |
| NZ_LT591897 | 2719 | 2720 | 7096 | 11472 | 15848 | 20224 | 24600 | 28976 | 33352 | 36787 | 39493 |
| NZ_LT591897 | 2720 | 2721 | 7097 | 11473 | 15849 | 20225 | 24601 | 28977 | 33353 | | 39494 |
| NZ_LT591897 | 2721 | 2722 | 7098 | 11474 | 15850 | 20226 | 24602 | 28978 | 33354 | 36788 | 39495 |
| NZ_LT591897 | 2722 | 2723 | 7099 | 11475 | 15851 | 20227 | 24603 | 28979 | 33355 | | 39496 |
| NZ_LT591897 | 2723 | 2724 | 7100 | 11476 | 15852 | 20228 | 24604 | 28980 | 33356 | | 39497 |
| NZ_LT591897 | 2724 | 2725 | 7101 | 11477 | 15853 | 20229 | 24605 | 28981 | 33357 | 36789 | 39498 |
| NZ_LT591897 | 2725 | 2726 | 7102 | 11478 | 15854 | 20230 | 24606 | 28982 | 33358 | 36790 | |
| NZ_LT591897 | 2726 | 2727 | 7103 | 11479 | 15855 | 20231 | 24607 | 28983 | 33359 | 36791 | |
| NZ_LT591897 | 2727 | 2728 | 7104 | 11480 | 15856 | 20232 | 24608 | 28984 | 33360 | 36792 | 39499 |
| NZ_LT591897 | 2728 | 2729 | 7105 | 11481 | 15857 | 20233 | 24609 | 28985 | 33361 | 36793 | |
| NZ_LT591897 | 2729 | 2730 | 7106 | 11482 | 15858 | 20234 | 24610 | 28986 | 33362 | | 39500 |
| NZ_LT591897 | 2730 | 2731 | 7107 | 11483 | 15859 | 20235 | 24611 | 28987 | 33363 | 36794 | 39501 |
| NZ_LT591897 | 2731 | 2732 | 7108 | 11484 | 15860 | 20236 | 24612 | 28988 | 33364 | 36795 | 39502 |
| NZ_LT591897 | 2732 | 2733 | 7109 | 11485 | 15861 | 20237 | 24613 | 28989 | 33365 | 36796 | |
| NZ_LT591897 | 2733 | 2734 | 7110 | 11486 | 15862 | 20238 | 24614 | 28990 | 33366 | | 39503 |
| NZ_LT591897 | 2734 | 2735 | 7111 | 11487 | 15863 | 20239 | 24615 | 28991 | 33367 | 36797 | |
| NZ_LT591897 | 2735 | 2736 | 7112 | 11488 | 15864 | 20240 | 24616 | 28992 | 33368 | 36798 | |
| NZ_LT591897 | 2736 | 2737 | 7113 | 11489 | 15865 | 20241 | 24617 | 28993 | 33369 | 36799 | |
| NZ_LT591897 | 2737 | 2738 | 7114 | 11490 | 15866 | 20242 | 24618 | 28994 | 33370 | 36800 | 39504 |
| NZ_LT591897 | 2738 | 2739 | 7115 | 11491 | 15867 | 20243 | 24619 | 28995 | 33371 | 36801 | 39505 |
| NZ_LT591897 | 2739 | 2740 | 7116 | 11492 | 15868 | 20244 | 24620 | 28996 | 33372 | 36802 | 39506 |
| NZ_LT591897 | 2740 | 2741 | 7117 | 11493 | 15869 | 20245 | 24621 | 28997 | 33373 | | 39507 |
| NZ_LT591897 | 2741 | 2742 | 7118 | 11494 | 15870 | 20246 | 24622 | 28998 | 33374 | | 39508 |
| NZ_LT591897 | 2742 | 2743 | 7119 | 11495 | 15871 | 20247 | 24623 | 28999 | 33375 | 36803 | 39509 |
| NZ_LT591897 | 2743 | 2744 | 7120 | 11496 | 15872 | 20248 | 24624 | 29000 | 33376 | 36804 | 39510 |
| NZ_LT591897 | 2744 | 2745 | 7121 | 11497 | 15873 | 20249 | 24625 | 29001 | 33377 | 36805 | 39511 |
| NZ_LT591897 | 2745 | 2746 | 7122 | 11498 | 15874 | 20250 | 24626 | 29002 | 33378 | 36806 | 39512 |
| NZ_LT591897 | 2746 | 2747 | 7123 | 11499 | 15875 | 20251 | 24627 | 29003 | 33379 | 36807 | 39513 |
| NZ_LT591897 | 2747 | 2748 | 7124 | 11500 | 15876 | 20252 | 24628 | 29004 | 33380 | 36808 | 39514 |
| NZ_LT591897 | 2748 | 2749 | 7125 | 11501 | 15877 | 20253 | 24629 | 29005 | 33381 | 36809 | 39515 |
| NZ_LT591897 | 2749 | 2750 | 7126 | 11502 | 15878 | 20254 | 24630 | 29006 | 33382 | 36810 | 39516 |
| NZ_LT591897 | 2750 | 2751 | 7127 | 11503 | 15879 | 20255 | 24631 | 29007 | 33383 | 36811 | 39517 |
| NZ_LT591897 | 2751 | 2752 | 7128 | 11504 | 15880 | 20256 | 24632 | 29008 | 33384 | | 39518 |
| NZ_LT591897 | 2752 | 2753 | 7129 | 11505 | 15881 | 20257 | 24633 | 29009 | 33385 | 36812 | 39519 |
| NZ_LT591897 | 2753 | 2754 | 7130 | 11506 | 15882 | 20258 | 24634 | 29010 | 33386 | 36813 | |
| NZ_LT591897 | 2754 | 2755 | 7131 | 11507 | 15883 | 20259 | 24635 | 29011 | 33387 | 36814 | 39520 |
| NZ_LT591897 | 2755 | 2756 | 7132 | 11508 | 15884 | 20260 | 24636 | 29012 | 33388 | | 39521 |
| NZ_LT591897 | 2756 | 2757 | 7133 | 11509 | 15885 | 20261 | 24637 | 29013 | 33389 | 36815 | |
| NZ_LT591897 | 2757 | 2758 | 7134 | 11510 | 15886 | 20262 | 24638 | 29014 | 33390 | 36816 | |
| NZ_LT591897 | 2758 | 2759 | 7135 | 11511 | 15887 | 20263 | 24639 | 29015 | 33391 | 36817 | 39522 |
| NZ_LT591897 | 2759 | 2760 | 7136 | 11512 | 15888 | 20264 | 24640 | 29016 | 33392 | 36818 | |
| NZ_LT591897 | 2760 | 2761 | 7137 | 11513 | 15889 | 20265 | 24641 | 29017 | 33393 | 36819 | |
| NZ_LT591897 | 2761 | 2762 | 7138 | 11514 | 15890 | 20266 | 24642 | 29018 | 33394 | | 39523 |
| NZ_LT591897 | 2762 | 2763 | 7139 | 11515 | 15891 | 20267 | 24643 | 29019 | 33395 | 36820 | 39524 |
| NZ_LT591897 | 2763 | 2764 | 7140 | 11516 | 15892 | 20268 | 24644 | 29020 | 33396 | 36821 | |
| NZ_LT591897 | 2764 | 2765 | 7141 | 11517 | 15893 | 20269 | 24645 | 29021 | 33397 | 36822 | |
| NZ_LT591897 | 2765 | 2766 | 7142 | 11518 | 15894 | 20270 | 24646 | 29022 | 33398 | 36823 | 39525 |
| NZ_LT591897 | 2766 | 2767 | 7143 | 11519 | 15895 | 20271 | 24647 | 29023 | 33399 | 36824 | 39526 |
| NZ_LT591897 | 2767 | 2768 | 7144 | 11520 | 15896 | 20272 | 24648 | 29024 | 33400 | 36825 | 39527 |
| NZ_LT591897 | 2768 | 2769 | 7145 | 11521 | 15897 | 20273 | 24649 | 29025 | 33401 | | 39528 |
| NZ_LT591897 | 2769 | 2770 | 7146 | 11522 | 15898 | 20274 | 24650 | 29026 | 33402 | | 39529 |
| NZ_LT591897 | 2770 | 2771 | 7147 | 11523 | 15899 | 20275 | 24651 | 29027 | 33403 | 36826 | 39530 |
| NZ_LT591897 | 2771 | 2772 | 7148 | 11524 | 15900 | 20276 | 24652 | 29028 | 33404 | | 39531 |
| NZ_LT591897 | 2772 | 2773 | 7149 | 11525 | 15901 | 20277 | 24653 | 29029 | 33405 | 36827 | 39532 |
| NZ_LT591897 | 2773 | 2774 | 7150 | 11526 | 15902 | 20278 | 24654 | 29030 | 33406 | 36828 | 39533 |
| NZ_LT591897 | 2774 | 2775 | 7151 | 11527 | 15903 | 20279 | 24655 | 29031 | 33407 | 36829 | 39534 |
| NZ_LT591897 | 2775 | 2776 | 7152 | 11528 | 15904 | 20280 | 24656 | 29032 | 33408 | | 39535 |
| NZ_LT591897 | 2776 | 2777 | 7153 | 11529 | 15905 | 20281 | 24657 | 29033 | 33409 | 36830 | 39536 |
| NZ_LT591897 | 2777 | 2778 | 7154 | 11530 | 15906 | 20282 | 24658 | 29034 | 33410 | | 39537 |
| NZ_LT591897 | 2778 | 2779 | 7155 | 11531 | 15907 | 20283 | 24659 | 29035 | 33411 | | 39538 |
| NZ_LT591897 | 2779 | 2780 | 7156 | 11532 | 15908 | 20284 | 24660 | 29036 | 33412 | 36831 | 39539 |
| NZ_LT591897 | 2780 | 2781 | 7157 | 11533 | 15909 | 20285 | 24661 | 29037 | 33413 | | 39540 |
| NZ_LT591897 | 2781 | 2782 | 7158 | 11534 | 15910 | 20286 | 24662 | 29038 | 33414 | | 39541 |
| NZ_LT591897 | 2782 | 2783 | 7159 | 11535 | 15911 | 20287 | 24663 | 29039 | 33415 | 36832 | 39542 |
| NZ_LT591897 | 2783 | 2784 | 7160 | 11536 | 15912 | 20288 | 24664 | 29040 | 33416 | 36833 | |
| NZ_LT591897 | 2784 | 2785 | 7161 | 11537 | 15913 | 20289 | 24665 | 29041 | 33417 | 36834 | |
| NZ_LT591897 | 2785 | 2786 | 7162 | 11538 | 15914 | 20290 | 24666 | 29042 | 33418 | 36835 | 39543 |
| NZ_LT591897 | 2786 | 2787 | 7163 | 11539 | 15915 | 20291 | 24667 | 29043 | 33419 | 36836 | 39544 |
| NZ_LT591897 | 2787 | 2788 | 7164 | 11540 | 15916 | 20292 | 24668 | 29044 | 33420 | 36837 | |
| NZ_LT591897 | 2788 | 2789 | 7165 | 11541 | 15917 | 20293 | 24669 | 29045 | 33421 | | 39545 |
| NZ_LT591897 | 2789 | 2790 | 7166 | 11542 | 15918 | 20294 | 24670 | 29046 | 33422 | | 39546 |
| NZ_LT591897 | 2790 | 2791 | 7167 | 11543 | 15919 | 20295 | 24671 | 29047 | 33423 | 36838 | 39547 |
| NZ_LT591897 | 2791 | 2792 | 7168 | 11544 | 15920 | 20296 | 24672 | 29048 | 33424 | 36839 | 39548 |
| NZ_LT591897 | 2792 | 2793 | 7169 | 11545 | 15921 | 20297 | 24673 | 29049 | 33425 | 36840 | |
| NZ_LT591897 | 2793 | 2794 | 7170 | 11546 | 15922 | 20298 | 24674 | 29050 | 33426 | | 39549 |
| NZ_LT591897 | 2794 | 2795 | 7171 | 11547 | 15923 | 20299 | 24675 | 29051 | 33427 | 36841 | 39550 |
| NZ_LT591897 | 2795 | 2796 | 7172 | 11548 | 15924 | 20300 | 24676 | 29052 | 33428 | 36842 | |
| NZ_LT591897 | 2796 | 2797 | 7173 | 11549 | 15925 | 20301 | 24677 | 29053 | 33429 | 36843 | |
| NZ_LT591897 | 2797 | 2798 | 7174 | 11550 | 15926 | 20302 | 24678 | 29054 | 33430 | 36844 | |
| NZ_LT591897 | 2798 | 2799 | 7175 | 11551 | 15927 | 20303 | 24679 | 29055 | 33431 | | 39551 |
| NZ_LT591897 | 2799 | 2800 | 7176 | 11552 | 15928 | 20304 | 24680 | 29056 | 33432 | 36845 | 39552 |
| NZ_LT591897 | 2800 | 2801 | 7177 | 11553 | 15929 | 20305 | 24681 | 29057 | 33433 | 36846 | |
| NZ_LT591897 | 2801 | 2802 | 7178 | 11554 | 15930 | 20306 | 24682 | 29058 | 33434 | | 39553 |
| NZ_LT591897 | 2802 | 2803 | 7179 | 11555 | 15931 | 20307 | 24683 | 29059 | 33435 | 36847 | |
| NZ_LT591897 | 2803 | 2804 | 7180 | 11556 | 15932 | 20308 | 24684 | 29060 | 33436 | | 39554 |
| NZ_LT591897 | 2804 | 2805 | 7181 | 11557 | 15933 | 20309 | 24685 | 29061 | 33437 | | 39555 |
| NZ_LT591897 | 2805 | 2806 | 7182 | 11558 | 15934 | 20310 | 24686 | 29062 | 33438 | | 39556 |
| NZ_LT591897 | 2806 | 2807 | 7183 | 11559 | 15935 | 20311 | 24687 | 29063 | 33439 | | 39557 |
| NZ_LT591897 | 2807 | 2808 | 7184 | 11560 | 15936 | 20312 | 24688 | 29064 | 33440 | | 39558 |
| NZ_LT591897 | 2808 | 2809 | 7185 | 11561 | 15937 | 20313 | 24689 | 29065 | 33441 | 36848 | |
| NZ_LT591897 | 2809 | 2810 | 7186 | 11562 | 15938 | 20314 | 24690 | 29066 | 33442 | | 39559 |
| NZ_LT591897 | 2810 | 2811 | 7187 | 11563 | 15939 | 20315 | 24691 | 29067 | 33443 | 36849 | 39560 |
| NZ_LT591897 | 2811 | 2812 | 7188 | 11564 | 15940 | 20316 | 24692 | 29068 | 33444 | 36850 | 39561 |
| NZ_LT591897 | 2812 | 2813 | 7189 | 11565 | 15941 | 20317 | 24693 | 29069 | 33445 | | 39562 |
| NZ_LT591897 | 2813 | 2814 | 7190 | 11566 | 15942 | 20318 | 24694 | 29070 | 33446 | | 39563 |
| NZ_LT591897 | 2814 | 2815 | 7191 | 11567 | 15943 | 20319 | 24695 | 29071 | 33447 | 36851 | 39564 |
| NZ_LT591897 | 2815 | 2816 | 7192 | 11568 | 15944 | 20320 | 24696 | 29072 | 33448 | | 39565 |
| NZ_LT591897 | 2816 | 2817 | 7193 | 11569 | 15945 | 20321 | 24697 | 29073 | 33449 | | 39566 |
| NZ_LT591897 | 2817 | 2818 | 7194 | 11570 | 15946 | 20322 | 24698 | 29074 | 33450 | | 39567 |
| NZ_LT591897 | 2818 | 2819 | 7195 | 11571 | 15947 | 20323 | 24699 | 29075 | 33451 | 36852 | |
| NZ_LT591897 | 2819 | 2820 | 7196 | 11572 | 15948 | 20324 | 24700 | 29076 | 33452 | 36853 | 39568 |
| NZ_LT591897 | 2820 | 2821 | 7197 | 11573 | 15949 | 20325 | 24701 | 29077 | 33453 | | 39569 |
| NZ_LT591897 | 2821 | 2822 | 7198 | 11574 | 15950 | 20326 | 24702 | 29078 | 33454 | 36854 | 39570 |
| NZ_LT591897 | 2822 | 2823 | 7199 | 11575 | 15951 | 20327 | 24703 | 29079 | 33455 | 36855 | 39571 |
| NZ_LT591897 | 2823 | 2824 | 7200 | 11576 | 15952 | 20328 | 24704 | 29080 | 33456 | 36856 | 39572 |
| NZ_LT591897 | 2824 | 2825 | 7201 | 11577 | 15953 | 20329 | 24705 | 29081 | 33457 | 36857 | 39573 |
| NZ_LT591897 | 2825 | 2826 | 7202 | 11578 | 15954 | 20330 | 24706 | 29082 | 33458 | 36858 | |
| NZ_LT591897 | 2826 | 2827 | 7203 | 11579 | 15955 | 20331 | 24707 | 29083 | 33459 | 36859 | 39574 |
| NZ_LT591897 | 2827 | 2828 | 7204 | 11580 | 15956 | 20332 | 24708 | 29084 | 33460 | | 39575 |
| NZ_LT591897 | 2828 | 2829 | 7205 | 11581 | 15957 | 20333 | 24709 | 29085 | 33461 | 36860 | 39576 |
| NZ_LT591897 | 2829 | 2830 | 7206 | 11582 | 15958 | 20334 | 24710 | 29086 | 33462 | 36861 | |
| NZ_LT591897 | 2830 | 2831 | 7207 | 11583 | 15959 | 20335 | 24711 | 29087 | 33463 | | 39577 |
| NZ_LT591897 | 2831 | 2832 | 7208 | 11584 | 15960 | 20336 | 24712 | 29088 | 33464 | | 39578 |
| NZ_LT591897 | 2832 | 2833 | 7209 | 11585 | 15961 | 20337 | 24713 | 29089 | 33465 | | 39579 |
| NZ_LT591897 | 2833 | 2834 | 7210 | 11586 | 15962 | 20338 | 24714 | 29090 | 33466 | 36862 | 39580 |
| NZ_LT591897 | 2834 | 2835 | 7211 | 11587 | 15963 | 20339 | 24715 | 29091 | 33467 | 36863 | |
| NZ_LT591897 | 2835 | 2836 | 7212 | 11588 | 15964 | 20340 | 24716 | 29092 | 33468 | 36864 | 39581 |
| NZ_LT591897 | 2836 | 2837 | 7213 | 11589 | 15965 | 20341 | 24717 | 29093 | 33469 | 36865 | 39582 |
| NZ_LT591897 | 2837 | 2838 | 7214 | 11590 | 15966 | 20342 | 24718 | 29094 | 33470 | 36866 | |
| NZ_LT591897 | 2838 | 2839 | 7215 | 11591 | 15967 | 20343 | 24719 | 29095 | 33471 | | 39583 |
| NZ_LT591897 | 2839 | 2840 | 7216 | 11592 | 15968 | 20344 | 24720 | 29096 | 33472 | 36867 | |
| NZ_LT591897 | 2840 | 2841 | 7217 | 11593 | 15969 | 20345 | 24721 | 29097 | 33473 | 36868 | 39584 |
| NZ_LT591897 | 2841 | 2842 | 7218 | 11594 | 15970 | 20346 | 24722 | 29098 | 33474 | | 39585 |
| NZ_LT591897 | 2842 | 2843 | 7219 | 11595 | 15971 | 20347 | 24723 | 29099 | 33475 | 36869 | |
| NZ_LT591897 | 2843 | 2844 | 7220 | 11596 | 15972 | 20348 | 24724 | 29100 | 33476 | 36870 | 39586 |
| NZ_LT591897 | 2844 | 2845 | 7221 | 11597 | 15973 | 20349 | 24725 | 29101 | 33477 | 36871 | 39587 |
| NZ_LT591897 | 2845 | 2846 | 7222 | 11598 | 15974 | 20350 | 24726 | 29102 | 33478 | 36872 | 39588 |
| NZ_LT591897 | 2846 | 2847 | 7223 | 11599 | 15975 | 20351 | 24727 | 29103 | 33479 | 36873 | 39589 |
| NZ_LT591897 | 2847 | 2848 | 7224 | 11600 | 15976 | 20352 | 24728 | 29104 | 33480 | 36874 | 39590 |
| NZ_LT591897 | 2848 | 2849 | 7225 | 11601 | 15977 | 20353 | 24729 | 29105 | 33481 | 36875 | 39591 |
| NZ_LT591897 | 2849 | 2850 | 7226 | 11602 | 15978 | 20354 | 24730 | 29106 | 33482 | 36876 | |
| NZ_LT591897 | 2850 | 2851 | 7227 | 11603 | 15979 | 20355 | 24731 | 29107 | 33483 | | 39592 |
| NZ_LT591897 | 2851 | 2852 | 7228 | 11604 | 15980 | 20356 | 24732 | 29108 | 33484 | | 39593 |
| NZ_LT591897 | 2852 | 2853 | 7229 | 11605 | 15981 | 20357 | 24733 | 29109 | 33485 | 36877 | |
| NZ_LT591897 | 2853 | 2854 | 7230 | 11606 | 15982 | 20358 | 24734 | 29110 | 33486 | 36878 | |
| NZ_LT591897 | 2854 | 2855 | 7231 | 11607 | 15983 | 20359 | 24735 | 29111 | 33487 | 36879 | 39594 |
| NZ_LT591897 | 2855 | 2856 | 7232 | 11608 | 15984 | 20360 | 24736 | 29112 | 33488 | 36880 | |
| NZ_LT591897 | 2856 | 2857 | 7233 | 11609 | 15985 | 20361 | 24737 | 29113 | 33489 | 36881 | 39595 |
| NZ_LT591897 | 2857 | 2858 | 7234 | 11610 | 15986 | 20362 | 24738 | 29114 | 33490 | | 39596 |
| NZ_LT591897 | 2858 | 2859 | 7235 | 11611 | 15987 | 20363 | 24739 | 29115 | 33491 | 36882 | 39597 |
| NZ_LT591897 | 2859 | 2860 | 7236 | 11612 | 15988 | 20364 | 24740 | 29116 | 33492 | 36883 | 39598 |
| NZ_LT591897 | 2860 | 2861 | 7237 | 11613 | 15989 | 20365 | 24741 | 29117 | 33493 | | 39599 |
| NZ_LT591897 | 2861 | 2862 | 7238 | 11614 | 15990 | 20366 | 24742 | 29118 | 33494 | 36884 | 39600 |
| NZ_LT591897 | 2862 | 2863 | 7239 | 11615 | 15991 | 20367 | 24743 | 29119 | 33495 | 36885 | 39601 |
| NZ_LT591897 | 2863 | 2864 | 7240 | 11616 | 15992 | 20368 | 24744 | 29120 | 33496 | 36886 | 39602 |
| NZ_LT591897 | 2864 | 2865 | 7241 | 11617 | 15993 | 20369 | 24745 | 29121 | 33497 | | 39603 |
| NZ_LT591897 | 2865 | 2866 | 7242 | 11618 | 15994 | 20370 | 24746 | 29122 | 33498 | 36887 | |
| NZ_LT591897 | 2866 | 2867 | 7243 | 11619 | 15995 | 20371 | 24747 | 29123 | 33499 | 36888 | |
| NZ_LT591897 | 2867 | 2868 | 7244 | 11620 | 15996 | 20372 | 24748 | 29124 | 33500 | 36889 | 39604 |
| NZ_LT591897 | 2868 | 2869 | 7245 | 11621 | 15997 | 20373 | 24749 | 29125 | 33501 | 36890 | |
| NZ_LT591897 | 2869 | 2870 | 7246 | 11622 | 15998 | 20374 | 24750 | 29126 | 33502 | 36891 | 39605 |
| NZ_LT591897 | 2870 | 2871 | 7247 | 11623 | 15999 | 20375 | 24751 | 29127 | 33503 | | 39606 |
| NZ_LT591897 | 2871 | 2872 | 7248 | 11624 | 16000 | 20376 | 24752 | 29128 | 33504 | 36892 | |
| NZ_LT591897 | 2872 | 2873 | 7249 | 11625 | 16001 | 20377 | 24753 | 29129 | 33505 | 36893 | 39607 |
| NZ_LT591897 | 2873 | 2874 | 7250 | 11626 | 16002 | 20378 | 24754 | 29130 | 33506 | 36894 | |
| NZ_LT591897 | 2874 | 2875 | 7251 | 11627 | 16003 | 20379 | 24755 | 29131 | 33507 | 36895 | 39608 |
| NZ_LT591897 | 2875 | 2876 | 7252 | 11628 | 16004 | 20380 | 24756 | 29132 | 33508 | 36896 | |
| NZ_LT591897 | 2876 | 2877 | 7253 | 11629 | 16005 | 20381 | 24757 | 29133 | 33509 | 36897 | |
| NZ_LT591897 | 2877 | 2878 | 7254 | 11630 | 16006 | 20382 | 24758 | 29134 | 33510 | 36898 | |
| NZ_LT591897 | 2878 | 2879 | 7255 | 11631 | 16007 | 20383 | 24759 | 29135 | 33511 | 36899 | |
| NZ_LT591897 | 2879 | 2880 | 7256 | 11632 | 16008 | 20384 | 24760 | 29136 | 33512 | 36900 | 39609 |
| NZ_LT591897 | 2880 | 2881 | 7257 | 11633 | 16009 | 20385 | 24761 | 29137 | 33513 | 36901 | 39610 |
| NZ_LT591897 | 2881 | 2882 | 7258 | 11634 | 16010 | 20386 | 24762 | 29138 | 33514 | 36902 | |
| NZ_LT591897 | 2882 | 2883 | 7259 | 11635 | 16011 | 20387 | 24763 | 29139 | 33515 | 36903 | 39611 |
| NZ_LT591897 | 2883 | 2884 | 7260 | 11636 | 16012 | 20388 | 24764 | 29140 | 33516 | 36904 | 39612 |
| NZ_LT591897 | 2884 | 2885 | 7261 | 11637 | 16013 | 20389 | 24765 | 29141 | 33517 | 36905 | 39613 |
| NZ_LT591897 | 2885 | 2886 | 7262 | 11638 | 16014 | 20390 | 24766 | 29142 | 33518 | 36906 | |
| NZ_LT591897 | 2886 | 2887 | 7263 | 11639 | 16015 | 20391 | 24767 | 29143 | 33519 | 36907 | 39614 |
| NZ_LT591897 | 2887 | 2888 | 7264 | 11640 | 16016 | 20392 | 24768 | 29144 | 33520 | | 39615 |
| NZ_LT591897 | 2888 | 2889 | 7265 | 11641 | 16017 | 20393 | 24769 | 29145 | 33521 | | 39616 |
| NZ_LT591897 | 2889 | 2890 | 7266 | 11642 | 16018 | 20394 | 24770 | 29146 | 33522 | 36908 | 39617 |
| NZ_LT591897 | 2890 | 2891 | 7267 | 11643 | 16019 | 20395 | 24771 | 29147 | 33523 | | 39618 |
| NZ_LT591897 | 2891 | 2892 | 7268 | 11644 | 16020 | 20396 | 24772 | 29148 | 33524 | | 39619 |
| NZ_LT591897 | 2892 | 2893 | 7269 | 11645 | 16021 | 20397 | 24773 | 29149 | 33525 | | 39620 |
| NZ_LT591897 | 2893 | 2894 | 7270 | 11646 | 16022 | 20398 | 24774 | 29150 | 33526 | | 39621 |
| NZ_LT591897 | 2894 | 2895 | 7271 | 11647 | 16023 | 20399 | 24775 | 29151 | 33527 | 36909 | |
| NZ_LT591897 | 2895 | 2896 | 7272 | 11648 | 16024 | 20400 | 24776 | 29152 | 33528 | 36910 | |
| NZ_LT591897 | 2896 | 2897 | 7273 | 11649 | 16025 | 20401 | 24777 | 29153 | 33529 | 36911 | 39622 |
| NZ_LT591897 | 2897 | 2898 | 7274 | 11650 | 16026 | 20402 | 24778 | 29154 | 33530 | 36912 | 39623 |
| NZ_LT591897 | 2898 | 2899 | 7275 | 11651 | 16027 | 20403 | 24779 | 29155 | 33531 | 36913 | 39624 |
| NZ_LT591897 | 2899 | 2900 | 7276 | 11652 | 16028 | 20404 | 24780 | 29156 | 33532 | 36914 | 39625 |
| NZ_LT591897 | 2900 | 2901 | 7277 | 11653 | 16029 | 20405 | 24781 | 29157 | 33533 | 36915 | |
| NZ_LT591897 | 2901 | 2902 | 7278 | 11654 | 16030 | 20406 | 24782 | 29158 | 33534 | 36916 | 39626 |
| NZ_LT591897 | 2902 | 2903 | 7279 | 11655 | 16031 | 20407 | 24783 | 29159 | 33535 | 36917 | 39627 |
| NZ_LT591897 | 2903 | 2904 | 7280 | 11656 | 16032 | 20408 | 24784 | 29160 | 33536 | | 39628 |
| NZ_LT591897 | 2904 | 2905 | 7281 | 11657 | 16033 | 20409 | 24785 | 29161 | 33537 | 36918 | 39629 |
| NZ_LT591897 | 2905 | 2906 | 7282 | 11658 | 16034 | 20410 | 24786 | 29162 | 33538 | 36919 | |
| NZ_LT591897 | 2906 | 2907 | 7283 | 11659 | 16035 | 20411 | 24787 | 29163 | 33539 | 36920 | |
| NZ_LT591897 | 2907 | 2908 | 7284 | 11660 | 16036 | 20412 | 24788 | 29164 | 33540 | | 39630 |
| NZ_LT591897 | 2908 | 2909 | 7285 | 11661 | 16037 | 20413 | 24789 | 29165 | 33541 | 36921 | 39631 |
| NZ_LT591897 | 2909 | 2910 | 7286 | 11662 | 16038 | 20414 | 24790 | 29166 | 33542 | | 39632 |
| NZ_LT591897 | 2910 | 2911 | 7287 | 11663 | 16039 | 20415 | 24791 | 29167 | 33543 | 36922 | 39633 |
| NZ_LT591897 | 2911 | 2912 | 7288 | 11664 | 16040 | 20416 | 24792 | 29168 | 33544 | 36923 | 39634 |
| NZ_LT591897 | 2912 | 2913 | 7289 | 11665 | 16041 | 20417 | 24793 | 29169 | 33545 | | 39635 |
| NZ_LT591897 | 2913 | 2914 | 7290 | 11666 | 16042 | 20418 | 24794 | 29170 | 33546 | 36924 | 39636 |
| NZ_LT591897 | 2914 | 2915 | 7291 | 11667 | 16043 | 20419 | 24795 | 29171 | 33547 | 36925 | |
| NZ_LT591897 | 2915 | 2916 | 7292 | 11668 | 16044 | 20420 | 24796 | 29172 | 33548 | 36926 | 39637 |
| NZ_LT591897 | 2916 | 2917 | 7293 | 11669 | 16045 | 20421 | 24797 | 29173 | 33549 | 36927 | |
| NZ_LT591897 | 2917 | 2918 | 7294 | 11670 | 16046 | 20422 | 24798 | 29174 | 33550 | 36928 | 39638 |
| NZ_LT591897 | 2918 | 2919 | 7295 | 11671 | 16047 | 20423 | 24799 | 29175 | 33551 | | 39639 |
| NZ_LT591897 | 2919 | 2920 | 7296 | 11672 | 16048 | 20424 | 24800 | 29176 | 33552 | | 39640 |
| NZ_LT591897 | 2920 | 2921 | 7297 | 11673 | 16049 | 20425 | 24801 | 29177 | 33553 | 36929 | |
| NZ_LT591897 | 2921 | 2922 | 7298 | 11674 | 16050 | 20426 | 24802 | 29178 | 33554 | 36930 | |
| NZ_LT591897 | 2922 | 2923 | 7299 | 11675 | 16051 | 20427 | 24803 | 29179 | 33555 | | 39641 |
| NZ_LT591897 | 2923 | 2924 | 7300 | 11676 | 16052 | 20428 | 24804 | 29180 | 33556 | 36931 | |
| NZ_LT591897 | 2924 | 2925 | 7301 | 11677 | 16053 | 20429 | 24805 | 29181 | 33557 | 36932 | |
| NZ_LT591897 | 2925 | 2926 | 7302 | 11678 | 16054 | 20430 | 24806 | 29182 | 33558 | 36933 | |
| NZ_LT591897 | 2926 | 2927 | 7303 | 11679 | 16055 | 20431 | 24807 | 29183 | 33559 | 36934 | |
| NZ_LT591897 | 2927 | 2928 | 7304 | 11680 | 16056 | 20432 | 24808 | 29184 | 33560 | 36935 | 39642 |
| NZ_LT591897 | 2928 | 2929 | 7305 | 11681 | 16057 | 20433 | 24809 | 29185 | 33561 | 36936 | |
| NZ_LT591897 | 2929 | 2930 | 7306 | 11682 | 16058 | 20434 | 24810 | 29186 | 33562 | | 39643 |
| NZ_LT591897 | 2930 | 2931 | 7307 | 11683 | 16059 | 20435 | 24811 | 29187 | 33563 | 36937 | |
| NZ_LT591897 | 2931 | 2932 | 7308 | 11684 | 16060 | 20436 | 24812 | 29188 | 33564 | | 39644 |
| NZ_LT591897 | 2932 | 2933 | 7309 | 11685 | 16061 | 20437 | 24813 | 29189 | 33565 | 36938 | |
| NZ_LT591897 | 2933 | 2934 | 7310 | 11686 | 16062 | 20438 | 24814 | 29190 | 33566 | | 39645 |
| NZ_LT591897 | 2934 | 2935 | 7311 | 11687 | 16063 | 20439 | 24815 | 29191 | 33567 | 36939 | 39646 |
| NZ_LT591897 | 2935 | 2936 | 7312 | 11688 | 16064 | 20440 | 24816 | 29192 | 33568 | 36940 | 39647 |
| NZ_LT591897 | 2936 | 2937 | 7313 | 11689 | 16065 | 20441 | 24817 | 29193 | 33569 | 36941 | |
| NZ_LT591897 | 2937 | 2938 | 7314 | 11690 | 16066 | 20442 | 24818 | 29194 | 33570 | 36942 | 39648 |
| NZ_LT591897 | 2938 | 2939 | 7315 | 11691 | 16067 | 20443 | 24819 | 29195 | 33571 | 36943 | 39649 |
| NZ_LT591897 | 2939 | 2940 | 7316 | 11692 | 16068 | 20444 | 24820 | 29196 | 33572 | 36944 | 39650 |
| NZ_LT591897 | 2940 | 2941 | 7317 | 11693 | 16069 | 20445 | 24821 | 29197 | 33573 | 36945 | 39651 |
| NZ_LT591897 | 2941 | 2942 | 7318 | 11694 | 16070 | 20446 | 24822 | 29198 | 33574 | 36946 | 39652 |
| NZ_LT591897 | 2942 | 2943 | 7319 | 11695 | 16071 | 20447 | 24823 | 29199 | 33575 | 36947 | 39653 |
| NZ_LT591897 | 2943 | 2944 | 7320 | 11696 | 16072 | 20448 | 24824 | 29200 | 33576 | 36948 | 39654 |
| NZ_LT591897 | 2944 | 2945 | 7321 | 11697 | 16073 | 20449 | 24825 | 29201 | 33577 | 36949 | 39655 |
| NZ_LT591897 | 2945 | 2946 | 7322 | 11698 | 16074 | 20450 | 24826 | 29202 | 33578 | | 39656 |
| NZ_LT591897 | 2946 | 2947 | 7323 | 11699 | 16075 | 20451 | 24827 | 29203 | 33579 | 36950 | |
| NZ_LT591897 | 2947 | 2948 | 7324 | 11700 | 16076 | 20452 | 24828 | 29204 | 33580 | | 39657 |
| NZ_LT591897 | 2948 | 2949 | 7325 | 11701 | 16077 | 20453 | 24829 | 29205 | 33581 | 36951 | |
| NZ_LT591897 | 2949 | 2950 | 7326 | 11702 | 16078 | 20454 | 24830 | 29206 | 33582 | | 39658 |
| NZ_LT591897 | 2950 | 2951 | 7327 | 11703 | 16079 | 20455 | 24831 | 29207 | 33583 | 36952 | 39659 |
| NZ_LT591897 | 2951 | 2952 | 7328 | 11704 | 16080 | 20456 | 24832 | 29208 | 33584 | 36953 | 39660 |
| NZ_LT591897 | 2952 | 2953 | 7329 | 11705 | 16081 | 20457 | 24833 | 29209 | 33585 | 36954 | |
| NZ_LT591897 | 2953 | 2954 | 7330 | 11706 | 16082 | 20458 | 24834 | 29210 | 33586 | 36955 | 39661 |
| NZ_LT591897 | 2954 | 2955 | 7331 | 11707 | 16083 | 20459 | 24835 | 29211 | 33587 | 36956 | 39662 |
| NZ_LT591897 | 2955 | 2956 | 7332 | 11708 | 16084 | 20460 | 24836 | 29212 | 33588 | 36957 | |
| NZ_LT591897 | 2956 | 2957 | 7333 | 11709 | 16085 | 20461 | 24837 | 29213 | 33589 | 36958 | 39663 |
| NZ_LT591897 | 2957 | 2958 | 7334 | 11710 | 16086 | 20462 | 24838 | 29214 | 33590 | | 39664 |
| NZ_LT591897 | 2958 | 2959 | 7335 | 11711 | 16087 | 20463 | 24839 | 29215 | 33591 | 36959 | 39665 |
| NZ_LT591897 | 2959 | 2960 | 7336 | 11712 | 16088 | 20464 | 24840 | 29216 | 33592 | 36960 | 39666 |
| NZ_LT591897 | 2960 | 2961 | 7337 | 11713 | 16089 | 20465 | 24841 | 29217 | 33593 | 36961 | 39667 |
| NZ_LT591897 | 2961 | 2962 | 7338 | 11714 | 16090 | 20466 | 24842 | 29218 | 33594 | 36962 | |
| NZ_LT591897 | 2962 | 2963 | 7339 | 11715 | 16091 | 20467 | 24843 | 29219 | 33595 | | 39668 |
| NZ_LT591897 | 2963 | 2964 | 7340 | 11716 | 16092 | 20468 | 24844 | 29220 | 33596 | 36963 | |
| NZ_LT591897 | 2964 | 2965 | 7341 | 11717 | 16093 | 20469 | 24845 | 29221 | 33597 | 36964 | |
| NZ_LT591897 | 2965 | 2966 | 7342 | 11718 | 16094 | 20470 | 24846 | 29222 | 33598 | 36965 | |
| NZ_LT591897 | 2966 | 2967 | 7343 | 11719 | 16095 | 20471 | 24847 | 29223 | 33599 | | 39669 |
| NZ_LT591897 | 2967 | 2968 | 7344 | 11720 | 16096 | 20472 | 24848 | 29224 | 33600 | 36966 | |
| NZ_LT591897 | 2968 | 2969 | 7345 | 11721 | 16097 | 20473 | 24849 | 29225 | 33601 | 36967 | |
| NZ_LT591897 | 2969 | 2970 | 7346 | 11722 | 16098 | 20474 | 24850 | 29226 | 33602 | 36968 | 39670 |
| NZ_LT591897 | 2970 | 2971 | 7347 | 11723 | 16099 | 20475 | 24851 | 29227 | 33603 | | 39671 |
| NZ_LT591897 | 2971 | 2972 | 7348 | 11724 | 16100 | 20476 | 24852 | 29228 | 33604 | 36969 | 39672 |
| NZ_LT591897 | 2972 | 2973 | 7349 | 11725 | 16101 | 20477 | 24853 | 29229 | 33605 | 36970 | 39673 |
| NZ_LT591897 | 2973 | 2974 | 7350 | 11726 | 16102 | 20478 | 24854 | 29230 | 33606 | 36971 | 39674 |
| NZ_LT591897 | 2974 | 2975 | 7351 | 11727 | 16103 | 20479 | 24855 | 29231 | 33607 | 36972 | 39675 |
| NZ_LT591897 | 2975 | 2976 | 7352 | 11728 | 16104 | 20480 | 24856 | 29232 | 33608 | 36973 | 39676 |
| NZ_LT591897 | 2976 | 2977 | 7353 | 11729 | 16105 | 20481 | 24857 | 29233 | 33609 | 36974 | |
| NZ_LT591897 | 2977 | 2978 | 7354 | 11730 | 16106 | 20482 | 24858 | 29234 | 33610 | 36975 | 39677 |
| NZ_LT591897 | 2978 | 2979 | 7355 | 11731 | 16107 | 20483 | 24859 | 29235 | 33611 | 36976 | 39678 |
| NZ_LT591897 | 2979 | 2980 | 7356 | 11732 | 16108 | 20484 | 24860 | 29236 | 33612 | 36977 | 39679 |
| NZ_LT591897 | 2980 | 2981 | 7357 | 11733 | 16109 | 20485 | 24861 | 29237 | 33613 | 36978 | 39680 |
| NZ_LT591897 | 2981 | 2982 | 7358 | 11734 | 16110 | 20486 | 24862 | 29238 | 33614 | | 39681 |
| NZ_LT591897 | 2982 | 2983 | 7359 | 11735 | 16111 | 20487 | 24863 | 29239 | 33615 | 36979 | 39682 |
| NZ_LT591897 | 2983 | 2984 | 7360 | 11736 | 16112 | 20488 | 24864 | 29240 | 33616 | 36980 | 39683 |
| NZ_LT591897 | 2984 | 2985 | 7361 | 11737 | 16113 | 20489 | 24865 | 29241 | 33617 | 36981 | 39684 |
| NZ_LT591897 | 2985 | 2986 | 7362 | 11738 | 16114 | 20490 | 24866 | 29242 | 33618 | 36982 | 39685 |
| NZ_LT591897 | 2986 | 2987 | 7363 | 11739 | 16115 | 20491 | 24867 | 29243 | 33619 | 36983 | |
| NZ_LT591897 | 2987 | 2988 | 7364 | 11740 | 16116 | 20492 | 24868 | 29244 | 33620 | 36984 | |
| NZ_LT591897 | 2988 | 2989 | 7365 | 11741 | 16117 | 20493 | 24869 | 29245 | 33621 | 36985 | 39686 |
| NZ_LT591897 | 2989 | 2990 | 7366 | 11742 | 16118 | 20494 | 24870 | 29246 | 33622 | 36986 | 39687 |
| NZ_LT591897 | 2990 | 2991 | 7367 | 11743 | 16119 | 20495 | 24871 | 29247 | 33623 | 36987 | |
| NZ_LT591897 | 2991 | 2992 | 7368 | 11744 | 16120 | 20496 | 24872 | 29248 | 33624 | | 39688 |
| NZ_LT591897 | 2992 | 2993 | 7369 | 11745 | 16121 | 20497 | 24873 | 29249 | 33625 | 36988 | |
| NZ_LT591897 | 2993 | 2994 | 7370 | 11746 | 16122 | 20498 | 24874 | 29250 | 33626 | | 39689 |
| NZ_LT591897 | 2994 | 2995 | 7371 | 11747 | 16123 | 20499 | 24875 | 29251 | 33627 | 36989 | 39690 |
| NZ_LT591897 | 2995 | 2996 | 7372 | 11748 | 16124 | 20500 | 24876 | 29252 | 33628 | | 39691 |
| NZ_LT591897 | 2996 | 2997 | 7373 | 11749 | 16125 | 20501 | 24877 | 29253 | 33629 | 36990 | 39692 |
| NZ_LT591897 | 2997 | 2998 | 7374 | 11750 | 16126 | 20502 | 24878 | 29254 | 33630 | 36991 | 39693 |
| NZ_LT591897 | 2998 | 2999 | 7375 | 11751 | 16127 | 20503 | 24879 | 29255 | 33631 | 36992 | 39694 |
| NZ_LT591897 | 2999 | 3000 | 7376 | 11752 | 16128 | 20504 | 24880 | 29256 | 33632 | 36993 | 39695 |
| NZ_LT591897 | 3000 | 3001 | 7377 | 11753 | 16129 | 20505 | 24881 | 29257 | 33633 | 36994 | |
| NZ_LT591897 | 3001 | 3002 | 7378 | 11754 | 16130 | 20506 | 24882 | 29258 | 33634 | 36995 | 39696 |
| NZ_LT591897 | 3002 | 3003 | 7379 | 11755 | 16131 | 20507 | 24883 | 29259 | 33635 | 36996 | 39697 |
| NZ_LT591897 | 3003 | 3004 | 7380 | 11756 | 16132 | 20508 | 24884 | 29260 | 33636 | 36997 | |
| NZ_LT591897 | 3004 | 3005 | 7381 | 11757 | 16133 | 20509 | 24885 | 29261 | 33637 | | 39698 |
| NZ_LT591897 | 3005 | 3006 | 7382 | 11758 | 16134 | 20510 | 24886 | 29262 | 33638 | 36998 | |
| NZ_LT591897 | 3006 | 3007 | 7383 | 11759 | 16135 | 20511 | 24887 | 29263 | 33639 | | 39699 |
| NZ_LT591897 | 3007 | 3008 | 7384 | 11760 | 16136 | 20512 | 24888 | 29264 | 33640 | | 39700 |
| NZ_LT591897 | 3008 | 3009 | 7385 | 11761 | 16137 | 20513 | 24889 | 29265 | 33641 | | 39701 |
| NZ_LT591897 | 3009 | 3010 | 7386 | 11762 | 16138 | 20514 | 24890 | 29266 | 33642 | 36999 | 39702 |
| NZ_LT591897 | 3010 | 3011 | 7387 | 11763 | 16139 | 20515 | 24891 | 29267 | 33643 | | 39703 |
| NZ_LT591897 | 3011 | 3012 | 7388 | 11764 | 16140 | 20516 | 24892 | 29268 | 33644 | 37000 | |
| NZ_LT591897 | 3012 | 3013 | 7389 | 11765 | 16141 | 20517 | 24893 | 29269 | 33645 | 37001 | |
| NZ_LT591897 | 3013 | 3014 | 7390 | 11766 | 16142 | 20518 | 24894 | 29270 | 33646 | | 39704 |
| NZ_LT591897 | 3014 | 3015 | 7391 | 11767 | 16143 | 20519 | 24895 | 29271 | 33647 | | 39705 |
| NZ_LT591897 | 3015 | 3016 | 7392 | 11768 | 16144 | 20520 | 24896 | 29272 | 33648 | | 39706 |
| NZ_LT591897 | 3016 | 3017 | 7393 | 11769 | 16145 | 20521 | 24897 | 29273 | 33649 | 37002 | |
| NZ_LT591897 | 3017 | 3018 | 7394 | 11770 | 16146 | 20522 | 24898 | 29274 | 33650 | 37003 | |
| NZ_LT591897 | 3018 | 3019 | 7395 | 11771 | 16147 | 20523 | 24899 | 29275 | 33651 | 37004 | 39707 |
| NZ_LT591897 | 3019 | 3020 | 7396 | 11772 | 16148 | 20524 | 24900 | 29276 | 33652 | | 39708 |
| NZ_LT591897 | 3020 | 3021 | 7397 | 11773 | 16149 | 20525 | 24901 | 29277 | 33653 | 37005 | |
| NZ_LT591897 | 3021 | 3022 | 7398 | 11774 | 16150 | 20526 | 24902 | 29278 | 33654 | 37006 | |
| NZ_LT591897 | 3022 | 3023 | 7399 | 11775 | 16151 | 20527 | 24903 | 29279 | 33655 | 37007 | |
| NZ_LT591897 | 3023 | 3024 | 7400 | 11776 | 16152 | 20528 | 24904 | 29280 | 33656 | 37008 | 39709 |
| NZ_LT591897 | 3024 | 3025 | 7401 | 11777 | 16153 | 20529 | 24905 | 29281 | 33657 | 37009 | 39710 |
| NZ_LT591897 | 3025 | 3026 | 7402 | 11778 | 16154 | 20530 | 24906 | 29282 | 33658 | 37010 | 39711 |
| NZ_LT591897 | 3026 | 3027 | 7403 | 11779 | 16155 | 20531 | 24907 | 29283 | 33659 | 37011 | 39712 |
| NZ_LT591897 | 3027 | 3028 | 7404 | 11780 | 16156 | 20532 | 24908 | 29284 | 33660 | 37012 | |
| NZ_LT591897 | 3028 | 3029 | 7405 | 11781 | 16157 | 20533 | 24909 | 29285 | 33661 | | 39713 |
| NZ_LT591897 | 3029 | 3030 | 7406 | 11782 | 16158 | 20534 | 24910 | 29286 | 33662 | 37013 | 39714 |
| NZ_LT591897 | 3030 | 3031 | 7407 | 11783 | 16159 | 20535 | 24911 | 29287 | 33663 | | 39715 |
| NZ_LT591897 | 3031 | 3032 | 7408 | 11784 | 16160 | 20536 | 24912 | 29288 | 33664 | | 39716 |
| NZ_LT591897 | 3032 | 3033 | 7409 | 11785 | 16161 | 20537 | 24913 | 29289 | 33665 | 37014 | 39717 |
| NZ_LT591897 | 3033 | 3034 | 7410 | 11786 | 16162 | 20538 | 24914 | 29290 | 33666 | | 39718 |
| NZ_LT591897 | 3034 | 3035 | 7411 | 11787 | 16163 | 20539 | 24915 | 29291 | 33667 | 37015 | |
| NZ_LT591897 | 3035 | 3036 | 7412 | 11788 | 16164 | 20540 | 24916 | 29292 | 33668 | 37016 | 39719 |
| NZ_LT591897 | 3036 | 3037 | 7413 | 11789 | 16165 | 20541 | 24917 | 29293 | 33669 | 37017 | 39720 |
| NZ_LT591897 | 3037 | 3038 | 7414 | 11790 | 16166 | 20542 | 24918 | 29294 | 33670 | 37018 | 39721 |
| NZ_LT591897 | 3038 | 3039 | 7415 | 11791 | 16167 | 20543 | 24919 | 29295 | 33671 | 37019 | 39722 |
| NZ_LT591897 | 3039 | 3040 | 7416 | 11792 | 16168 | 20544 | 24920 | 29296 | 33672 | 37020 | |
| NZ_LT591897 | 3040 | 3041 | 7417 | 11793 | 16169 | 20545 | 24921 | 29297 | 33673 | 37021 | |
| NZ_LT591897 | 3041 | 3042 | 7418 | 11794 | 16170 | 20546 | 24922 | 29298 | 33674 | 37022 | 39723 |
| NZ_LT591897 | 3042 | 3043 | 7419 | 11795 | 16171 | 20547 | 24923 | 29299 | 33675 | 37023 | 39724 |
| NZ_LT591897 | 3043 | 3044 | 7420 | 11796 | 16172 | 20548 | 24924 | 29300 | 33676 | | 39725 |
| NZ_LT591897 | 3044 | 3045 | 7421 | 11797 | 16173 | 20549 | 24925 | 29301 | 33677 | 37024 | |
| NZ_LT591897 | 3045 | 3046 | 7422 | 11798 | 16174 | 20550 | 24926 | 29302 | 33678 | 37025 | |
| NZ_LT591897 | 3046 | 3047 | 7423 | 11799 | 16175 | 20551 | 24927 | 29303 | 33679 | 37026 | 39726 |
| NZ_LT591897 | 3047 | 3048 | 7424 | 11800 | 16176 | 20552 | 24928 | 29304 | 33680 | | 39727 |
| NZ_LT591897 | 3048 | 3049 | 7425 | 11801 | 16177 | 20553 | 24929 | 29305 | 33681 | 37027 | |
| NZ_LT591897 | 3049 | 3050 | 7426 | 11802 | 16178 | 20554 | 24930 | 29306 | 33682 | | 39728 |
| NZ_LT591897 | 3050 | 3051 | 7427 | 11803 | 16179 | 20555 | 24931 | 29307 | 33683 | 37028 | |
| NZ_LT591897 | 3051 | 3052 | 7428 | 11804 | 16180 | 20556 | 24932 | 29308 | 33684 | 37029 | 39729 |
| NZ_LT591897 | 3052 | 3053 | 7429 | 11805 | 16181 | 20557 | 24933 | 29309 | 33685 | | 39730 |
| NZ_LT591897 | 3053 | 3054 | 7430 | 11806 | 16182 | 20558 | 24934 | 29310 | 33686 | | 39731 |
| NZ_LT591897 | 3054 | 3055 | 7431 | 11807 | 16183 | 20559 | 24935 | 29311 | 33687 | 37030 | |
| NZ_LT591897 | 3055 | 3056 | 7432 | 11808 | 16184 | 20560 | 24936 | 29312 | 33688 | 37031 | |
| NZ_LT591897 | 3056 | 3057 | 7433 | 11809 | 16185 | 20561 | 24937 | 29313 | 33689 | 37032 | 39732 |
| NZ_LT591897 | 3057 | 3058 | 7434 | 11810 | 16186 | 20562 | 24938 | 29314 | 33690 | | 39733 |
| NZ_LT591897 | 3058 | 3059 | 7435 | 11811 | 16187 | 20563 | 24939 | 29315 | 33691 | 37033 | |
| NZ_LT591897 | 3059 | 3060 | 7436 | 11812 | 16188 | 20564 | 24940 | 29316 | 33692 | | 39734 |
| NZ_LT591897 | 3060 | 3061 | 7437 | 11813 | 16189 | 20565 | 24941 | 29317 | 33693 | 37034 | |
| NZ_LT591897 | 3061 | 3062 | 7438 | 11814 | 16190 | 20566 | 24942 | 29318 | 33694 | 37035 | 39735 |
| NZ_LT591897 | 3062 | 3063 | 7439 | 11815 | 16191 | 20567 | 24943 | 29319 | 33695 | 37036 | 39736 |
| NZ_LT591897 | 3063 | 3064 | 7440 | 11816 | 16192 | 20568 | 24944 | 29320 | 33696 | 37037 | |
| NZ_LT591897 | 3064 | 3065 | 7441 | 11817 | 16193 | 20569 | 24945 | 29321 | 33697 | 37038 | |
| NZ_LT591897 | 3065 | 3066 | 7442 | 11818 | 16194 | 20570 | 24946 | 29322 | 33698 | 37039 | 39737 |
| NZ_LT591897 | 3066 | 3067 | 7443 | 11819 | 16195 | 20571 | 24947 | 29323 | 33699 | 37040 | 39738 |
| NZ_LT591897 | 3067 | 3068 | 7444 | 11820 | 16196 | 20572 | 24948 | 29324 | 33700 | 37041 | |
| NZ_LT591897 | 3068 | 3069 | 7445 | 11821 | 16197 | 20573 | 24949 | 29325 | 33701 | 37042 | 39739 |
| NZ_LT591897 | 3069 | 3070 | 7446 | 11822 | 16198 | 20574 | 24950 | 29326 | 33702 | 37043 | 39740 |
| NZ_LT591897 | 3070 | 3071 | 7447 | 11823 | 16199 | 20575 | 24951 | 29327 | 33703 | 37044 | |
| NZ_LT591897 | 3071 | 3072 | 7448 | 11824 | 16200 | 20576 | 24952 | 29328 | 33704 | 37045 | 39741 |
| NZ_LT591897 | 3072 | 3073 | 7449 | 11825 | 16201 | 20577 | 24953 | 29329 | 33705 | 37046 | 39742 |
| NZ_LT591897 | 3073 | 3074 | 7450 | 11826 | 16202 | 20578 | 24954 | 29330 | 33706 | 37047 | 39743 |
| NZ_LT591897 | 3074 | 3075 | 7451 | 11827 | 16203 | 20579 | 24955 | 29331 | 33707 | 37048 | 39744 |
| NZ_LT591897 | 3075 | 3076 | 7452 | 11828 | 16204 | 20580 | 24956 | 29332 | 33708 | 37049 | |
| NZ_LT591897 | 3076 | 3077 | 7453 | 11829 | 16205 | 20581 | 24957 | 29333 | 33709 | | 39745 |
| NZ_LT591897 | 3077 | 3078 | 7454 | 11830 | 16206 | 20582 | 24958 | 29334 | 33710 | 37050 | |
| NZ_LT591897 | 3078 | 3079 | 7455 | 11831 | 16207 | 20583 | 24959 | 29335 | 33711 | 37051 | |
| NZ_LT591897 | 3079 | 3080 | 7456 | 11832 | 16208 | 20584 | 24960 | 29336 | 33712 | 37052 | 39746 |
| NZ_LT591897 | 3080 | 3081 | 7457 | 11833 | 16209 | 20585 | 24961 | 29337 | 33713 | | 39747 |
| NZ_LT591897 | 3081 | 3082 | 7458 | 11834 | 16210 | 20586 | 24962 | 29338 | 33714 | | 39748 |
| NZ_LT591897 | 3082 | 3083 | 7459 | 11835 | 16211 | 20587 | 24963 | 29339 | 33715 | 37053 | 39749 |
| NZ_LT591897 | 3083 | 3084 | 7460 | 11836 | 16212 | 20588 | 24964 | 29340 | 33716 | | 39750 |
| NZ_LT591897 | 3084 | 3085 | 7461 | 11837 | 16213 | 20589 | 24965 | 29341 | 33717 | 37054 | |
| NZ_LT591897 | 3085 | 3086 | 7462 | 11838 | 16214 | 20590 | 24966 | 29342 | 33718 | 37055 | |
| NZ_LT591897 | 3086 | 3087 | 7463 | 11839 | 16215 | 20591 | 24967 | 29343 | 33719 | 37056 | 39751 |
| NZ_LT591897 | 3087 | 3088 | 7464 | 11840 | 16216 | 20592 | 24968 | 29344 | 33720 | | 39752 |
| NZ_LT591897 | 3088 | 3089 | 7465 | 11841 | 16217 | 20593 | 24969 | 29345 | 33721 | | 39753 |
| NZ_LT591897 | 3089 | 3090 | 7466 | 11842 | 16218 | 20594 | 24970 | 29346 | 33722 | | 39754 |
| NZ_LT591897 | 3090 | 3091 | 7467 | 11843 | 16219 | 20595 | 24971 | 29347 | 33723 | 37057 | 39755 |
| NZ_LT591897 | 3091 | 3092 | 7468 | 11844 | 16220 | 20596 | 24972 | 29348 | 33724 | 37058 | 39756 |
| NZ_LT591897 | 3092 | 3093 | 7469 | 11845 | 16221 | 20597 | 24973 | 29349 | 33725 | | 39757 |
| NZ_LT591897 | 3093 | 3094 | 7470 | 11846 | 16222 | 20598 | 24974 | 29350 | 33726 | 37059 | |
| NZ_LT591897 | 3094 | 3095 | 7471 | 11847 | 16223 | 20599 | 24975 | 29351 | 33727 | 37060 | 39758 |
| NZ_LT591897 | 3095 | 3096 | 7472 | 11848 | 16224 | 20600 | 24976 | 29352 | 33728 | | 39759 |
| NZ_LT591897 | 3096 | 3097 | 7473 | 11849 | 16225 | 20601 | 24977 | 29353 | 33729 | 37061 | 39760 |
| NZ_LT591897 | 3097 | 3098 | 7474 | 11850 | 16226 | 20602 | 24978 | 29354 | 33730 | 37062 | 39761 |
| NZ_LT591897 | 3098 | 3099 | 7475 | 11851 | 16227 | 20603 | 24979 | 29355 | 33731 | 37063 | 39762 |
| NZ_LT591897 | 3099 | 3100 | 7476 | 11852 | 16228 | 20604 | 24980 | 29356 | 33732 | 37064 | |
| NZ_LT591897 | 3100 | 3101 | 7477 | 11853 | 16229 | 20605 | 24981 | 29357 | 33733 | 37065 | 39763 |
| NZ_LT591897 | 3101 | 3102 | 7478 | 11854 | 16230 | 20606 | 24982 | 29358 | 33734 | 37066 | 39764 |
| NZ_LT591897 | 3102 | 3103 | 7479 | 11855 | 16231 | 20607 | 24983 | 29359 | 33735 | 37067 | |
| NZ_LT591897 | 3103 | 3104 | 7480 | 11856 | 16232 | 20608 | 24984 | 29360 | 33736 | | 39765 |
| NZ_LT591897 | 3104 | 3105 | 7481 | 11857 | 16233 | 20609 | 24985 | 29361 | 33737 | 37068 | 39766 |
| NZ_LT591897 | 3105 | 3106 | 7482 | 11858 | 16234 | 20610 | 24986 | 29362 | 33738 | | 39767 |
| NZ_LT591897 | 3106 | 3107 | 7483 | 11859 | 16235 | 20611 | 24987 | 29363 | 33739 | | 39768 |
| NZ_LT591897 | 3107 | 3108 | 7484 | 11860 | 16236 | 20612 | 24988 | 29364 | 33740 | | 39769 |
| NZ_LT591897 | 3108 | 3109 | 7485 | 11861 | 16237 | 20613 | 24989 | 29365 | 33741 | 37069 | |
| NZ_LT591897 | 3109 | 3110 | 7486 | 11862 | 16238 | 20614 | 24990 | 29366 | 33742 | 37070 | |
| NZ_LT591897 | 3110 | 3111 | 7487 | 11863 | 16239 | 20615 | 24991 | 29367 | 33743 | | 39770 |
| NZ_LT591897 | 3111 | 3112 | 7488 | 11864 | 16240 | 20616 | 24992 | 29368 | 33744 | 37071 | |
| NZ_LT591897 | 3112 | 3113 | 7489 | 11865 | 16241 | 20617 | 24993 | 29369 | 33745 | | 39771 |
| NZ_LT591897 | 3113 | 3114 | 7490 | 11866 | 16242 | 20618 | 24994 | 29370 | 33746 | 37072 | 39772 |
| NZ_LT591897 | 3114 | 3115 | 7491 | 11867 | 16243 | 20619 | 24995 | 29371 | 33747 | 37073 | |
| NZ_LT591897 | 3115 | 3116 | 7492 | 11868 | 16244 | 20620 | 24996 | 29372 | 33748 | | 39773 |
| NZ_LT591897 | 3116 | 3117 | 7493 | 11869 | 16245 | 20621 | 24997 | 29373 | 33749 | 37074 | |
| NZ_LT591897 | 3117 | 3118 | 7494 | 11870 | 16246 | 20622 | 24998 | 29374 | 33750 | 37075 | 39774 |
| NZ_LT591897 | 3118 | 3119 | 7495 | 11871 | 16247 | 20623 | 24999 | 29375 | 33751 | 37076 | |
| NZ_LT591897 | 3119 | 3120 | 7496 | 11872 | 16248 | 20624 | 25000 | 29376 | 33752 | 37077 | |
| NZ_LT591897 | 3120 | 3121 | 7497 | 11873 | 16249 | 20625 | 25001 | 29377 | 33753 | 37078 | |
| NZ_LT591897 | 3121 | 3122 | 7498 | 11874 | 16250 | 20626 | 25002 | 29378 | 33754 | | 39775 |
| NZ_LT591897 | 3122 | 3123 | 7499 | 11875 | 16251 | 20627 | 25003 | 29379 | 33755 | 37079 | 39776 |
| NZ_LT591897 | 3123 | 3124 | 7500 | 11876 | 16252 | 20628 | 25004 | 29380 | 33756 | 37080 | 39777 |
| NZ_LT591897 | 3124 | 3125 | 7501 | 11877 | 16253 | 20629 | 25005 | 29381 | 33757 | | 39778 |
| NZ_LT591897 | 3125 | 3126 | 7502 | 11878 | 16254 | 20630 | 25006 | 29382 | 33758 | | 39779 |
| NZ_LT591897 | 3126 | 3127 | 7503 | 11879 | 16255 | 20631 | 25007 | 29383 | 33759 | 37081 | 39780 |
| NZ_LT591897 | 3127 | 3128 | 7504 | 11880 | 16256 | 20632 | 25008 | 29384 | 33760 | 37082 | |
| NZ_LT591897 | 3128 | 3129 | 7505 | 11881 | 16257 | 20633 | 25009 | 29385 | 33761 | 37083 | |
| NZ_LT591897 | 3129 | 3130 | 7506 | 11882 | 16258 | 20634 | 25010 | 29386 | 33762 | 37084 | 39781 |
| NZ_LT591897 | 3130 | 3131 | 7507 | 11883 | 16259 | 20635 | 25011 | 29387 | 33763 | | 39782 |
| NZ_LT591897 | 3131 | 3132 | 7508 | 11884 | 16260 | 20636 | 25012 | 29388 | 33764 | 37085 | 39783 |
| NZ_LT591897 | 3132 | 3133 | 7509 | 11885 | 16261 | 20637 | 25013 | 29389 | 33765 | 37086 | |
| NZ_LT591897 | 3133 | 3134 | 7510 | 11886 | 16262 | 20638 | 25014 | 29390 | 33766 | | 39784 |
| NZ_LT591897 | 3134 | 3135 | 7511 | 11887 | 16263 | 20639 | 25015 | 29391 | 33767 | 37087 | 39785 |
| NZ_LT591897 | 3135 | 3136 | 7512 | 11888 | 16264 | 20640 | 25016 | 29392 | 33768 | 37088 | 39786 |
| NZ_LT591897 | 3136 | 3137 | 7513 | 11889 | 16265 | 20641 | 25017 | 29393 | 33769 | 37089 | 39787 |
| NZ_LT591897 | 3137 | 3138 | 7514 | 11890 | 16266 | 20642 | 25018 | 29394 | 33770 | 37090 | 39788 |
| NZ_LT591897 | 3138 | 3139 | 7515 | 11891 | 16267 | 20643 | 25019 | 29395 | 33771 | 37091 | 39789 |
| NZ_LT591897 | 3139 | 3140 | 7516 | 11892 | 16268 | 20644 | 25020 | 29396 | 33772 | 37092 | |
| NZ_LT591897 | 3140 | 3141 | 7517 | 11893 | 16269 | 20645 | 25021 | 29397 | 33773 | 37093 | |
| NZ_LT591897 | 3141 | 3142 | 7518 | 11894 | 16270 | 20646 | 25022 | 29398 | 33774 | 37094 | 39790 |
| NZ_LT591897 | 3142 | 3143 | 7519 | 11895 | 16271 | 20647 | 25023 | 29399 | 33775 | 37095 | |
| NZ_LT591897 | 3143 | 3144 | 7520 | 11896 | 16272 | 20648 | 25024 | 29400 | 33776 | 37096 | |
| NZ_LT591897 | 3144 | 3145 | 7521 | 11897 | 16273 | 20649 | 25025 | 29401 | 33777 | 37097 | |
| NZ_LT591897 | 3145 | 3146 | 7522 | 11898 | 16274 | 20650 | 25026 | 29402 | 33778 | 37098 | 39791 |
| NZ_LT591897 | 3146 | 3147 | 7523 | 11899 | 16275 | 20651 | 25027 | 29403 | 33779 | 37099 | 39792 |
| NZ_LT591897 | 3147 | 3148 | 7524 | 11900 | 16276 | 20652 | 25028 | 29404 | 33780 | | 39793 |
| NZ_LT591897 | 3148 | 3149 | 7525 | 11901 | 16277 | 20653 | 25029 | 29405 | 33781 | 37100 | |
| NZ_LT591897 | 3149 | 3150 | 7526 | 11902 | 16278 | 20654 | 25030 | 29406 | 33782 | | 39794 |
| NZ_LT591897 | 3150 | 3151 | 7527 | 11903 | 16279 | 20655 | 25031 | 29407 | 33783 | 37101 | |
| NZ_LT591897 | 3151 | 3152 | 7528 | 11904 | 16280 | 20656 | 25032 | 29408 | 33784 | | 39795 |
| NZ_LT591897 | 3152 | 3153 | 7529 | 11905 | 16281 | 20657 | 25033 | 29409 | 33785 | 37102 | 39796 |
| NZ_LT591897 | 3153 | 3154 | 7530 | 11906 | 16282 | 20658 | 25034 | 29410 | 33786 | 37103 | 39797 |
| NZ_LT591897 | 3154 | 3155 | 7531 | 11907 | 16283 | 20659 | 25035 | 29411 | 33787 | | 39798 |
| NZ_LT591897 | 3155 | 3156 | 7532 | 11908 | 16284 | 20660 | 25036 | 29412 | 33788 | | 39799 |
| NZ_LT591897 | 3156 | 3157 | 7533 | 11909 | 16285 | 20661 | 25037 | 29413 | 33789 | 37104 | |
| NZ_LT591897 | 3157 | 3158 | 7534 | 11910 | 16286 | 20662 | 25038 | 29414 | 33790 | | 39800 |
| NZ_LT591897 | 3158 | 3159 | 7535 | 11911 | 16287 | 20663 | 25039 | 29415 | 33791 | | 39801 |
| NZ_LT591897 | 3159 | 3160 | 7536 | 11912 | 16288 | 20664 | 25040 | 29416 | 33792 | 37105 | 39802 |
| NZ_LT591897 | 3160 | 3161 | 7537 | 11913 | 16289 | 20665 | 25041 | 29417 | 33793 | 37106 | 39803 |
| NZ_LT591897 | 3161 | 3162 | 7538 | 11914 | 16290 | 20666 | 25042 | 29418 | 33794 | 37107 | |
| NZ_LT591897 | 3162 | 3163 | 7539 | 11915 | 16291 | 20667 | 25043 | 29419 | 33795 | | 39804 |
| NZ_LT591897 | 3163 | 3164 | 7540 | 11916 | 16292 | 20668 | 25044 | 29420 | 33796 | | 39805 |
| NZ_LT591897 | 3164 | 3165 | 7541 | 11917 | 16293 | 20669 | 25045 | 29421 | 33797 | 37108 | 39806 |
| NZ_LT591897 | 3165 | 3166 | 7542 | 11918 | 16294 | 20670 | 25046 | 29422 | 33798 | 37109 | 39807 |
| NZ_LT591897 | 3166 | 3167 | 7543 | 11919 | 16295 | 20671 | 25047 | 29423 | 33799 | | 39808 |
| NZ_LT591897 | 3167 | 3168 | 7544 | 11920 | 16296 | 20672 | 25048 | 29424 | 33800 | 37110 | |
| NZ_LT591897 | 3168 | 3169 | 7545 | 11921 | 16297 | 20673 | 25049 | 29425 | 33801 | 37111 | 39809 |
| NZ_LT591897 | 3169 | 3170 | 7546 | 11922 | 16298 | 20674 | 25050 | 29426 | 33802 | | 39810 |
| NZ_LT591897 | 3170 | 3171 | 7547 | 11923 | 16299 | 20675 | 25051 | 29427 | 33803 | 37112 | |
| NZ_LT591897 | 3171 | 3172 | 7548 | 11924 | 16300 | 20676 | 25052 | 29428 | 33804 | 37113 | 39811 |
| NZ_LT591897 | 3172 | 3173 | 7549 | 11925 | 16301 | 20677 | 25053 | 29429 | 33805 | 37114 | 39812 |
| NZ_LT591897 | 3173 | 3174 | 7550 | 11926 | 16302 | 20678 | 25054 | 29430 | 33806 | 37115 | 39813 |
| NZ_LT591897 | 3174 | 3175 | 7551 | 11927 | 16303 | 20679 | 25055 | 29431 | 33807 | | 39814 |
| NZ_LT591897 | 3175 | 3176 | 7552 | 11928 | 16304 | 20680 | 25056 | 29432 | 33808 | 37116 | 39815 |
| NZ_LT591897 | 3176 | 3177 | 7553 | 11929 | 16305 | 20681 | 25057 | 29433 | 33809 | 37117 | 39816 |
| NZ_LT591897 | 3177 | 3178 | 7554 | 11930 | 16306 | 20682 | 25058 | 29434 | 33810 | 37118 | |
| NZ_LT591897 | 3178 | 3179 | 7555 | 11931 | 16307 | 20683 | 25059 | 29435 | 33811 | 37119 | 39817 |
| NZ_LT591897 | 3179 | 3180 | 7556 | 11932 | 16308 | 20684 | 25060 | 29436 | 33812 | 37120 | 39818 |
| NZ_LT591897 | 3180 | 3181 | 7557 | 11933 | 16309 | 20685 | 25061 | 29437 | 33813 | 37121 | 39819 |
| NZ_LT591897 | 3181 | 3182 | 7558 | 11934 | 16310 | 20686 | 25062 | 29438 | 33814 | | 39820 |
| NZ_LT591897 | 3182 | 3183 | 7559 | 11935 | 16311 | 20687 | 25063 | 29439 | 33815 | 37122 | 39821 |
| NZ_LT591897 | 3183 | 3184 | 7560 | 11936 | 16312 | 20688 | 25064 | 29440 | 33816 | 37123 | 39822 |
| NZ_LT591897 | 3184 | 3185 | 7561 | 11937 | 16313 | 20689 | 25065 | 29441 | 33817 | | 39823 |
| NZ_LT591897 | 3185 | 3186 | 7562 | 11938 | 16314 | 20690 | 25066 | 29442 | 33818 | 37124 | 39824 |
| NZ_LT591897 | 3186 | 3187 | 7563 | 11939 | 16315 | 20691 | 25067 | 29443 | 33819 | 37125 | 39825 |
| NZ_LT591897 | 3187 | 3188 | 7564 | 11940 | 16316 | 20692 | 25068 | 29444 | 33820 | | 39826 |
| NZ_LT591897 | 3188 | 3189 | 7565 | 11941 | 16317 | 20693 | 25069 | 29445 | 33821 | 37126 | |
| NZ_LT591897 | 3189 | 3190 | 7566 | 11942 | 16318 | 20694 | 25070 | 29446 | 33822 | | 39827 |
| NZ_LT591897 | 3190 | 3191 | 7567 | 11943 | 16319 | 20695 | 25071 | 29447 | 33823 | 37127 | 39828 |
| NZ_LT591897 | 3191 | 3192 | 7568 | 11944 | 16320 | 20696 | 25072 | 29448 | 33824 | 37128 | 39829 |
| NZ_LT591897 | 3192 | 3193 | 7569 | 11945 | 16321 | 20697 | 25073 | 29449 | 33825 | | 39830 |
| NZ_LT591897 | 3193 | 3194 | 7570 | 11946 | 16322 | 20698 | 25074 | 29450 | 33826 | 37129 | |
| NZ_LT591897 | 3194 | 3195 | 7571 | 11947 | 16323 | 20699 | 25075 | 29451 | 33827 | 37130 | |
| NZ_LT591897 | 3195 | 3196 | 7572 | 11948 | 16324 | 20700 | 25076 | 29452 | 33828 | | 39831 |
| NZ_LT591897 | 3196 | 3197 | 7573 | 11949 | 16325 | 20701 | 25077 | 29453 | 33829 | 37131 | 39832 |
| NZ_LT591897 | 3197 | 3198 | 7574 | 11950 | 16326 | 20702 | 25078 | 29454 | 33830 | | 39833 |
| NZ_LT591897 | 3198 | 3199 | 7575 | 11951 | 16327 | 20703 | 25079 | 29455 | 33831 | 37132 | |
| NZ_LT591897 | 3199 | 3200 | 7576 | 11952 | 16328 | 20704 | 25080 | 29456 | 33832 | 37133 | |
| NZ_LT591897 | 3200 | 3201 | 7577 | 11953 | 16329 | 20705 | 25081 | 29457 | 33833 | 37134 | |
| NZ_LT591897 | 3201 | 3202 | 7578 | 11954 | 16330 | 20706 | 25082 | 29458 | 33834 | | 39834 |
| NZ_LT591897 | 3202 | 3203 | 7579 | 11955 | 16331 | 20707 | 25083 | 29459 | 33835 | 37135 | |
| NZ_LT591897 | 3203 | 3204 | 7580 | 11956 | 16332 | 20708 | 25084 | 29460 | 33836 | | 39835 |
| NZ_LT591897 | 3204 | 3205 | 7581 | 11957 | 16333 | 20709 | 25085 | 29461 | 33837 | 37136 | 39836 |
| NZ_LT591897 | 3205 | 3206 | 7582 | 11958 | 16334 | 20710 | 25086 | 29462 | 33838 | | 39837 |
| NZ_LT591897 | 3206 | 3207 | 7583 | 11959 | 16335 | 20711 | 25087 | 29463 | 33839 | 37137 | |
| NZ_LT591897 | 3207 | 3208 | 7584 | 11960 | 16336 | 20712 | 25088 | 29464 | 33840 | 37138 | 39838 |
| NZ_LT591897 | 3208 | 3209 | 7585 | 11961 | 16337 | 20713 | 25089 | 29465 | 33841 | | 39839 |
| NZ_LT591897 | 3209 | 3210 | 7586 | 11962 | 16338 | 20714 | 25090 | 29466 | 33842 | 37139 | |
| NZ_LT591897 | 3210 | 3211 | 7587 | 11963 | 16339 | 20715 | 25091 | 29467 | 33843 | | 39840 |
| NZ_LT591897 | 3211 | 3212 | 7588 | 11964 | 16340 | 20716 | 25092 | 29468 | 33844 | 37140 | |
| NZ_LT591897 | 3212 | 3213 | 7589 | 11965 | 16341 | 20717 | 25093 | 29469 | 33845 | 37141 | |
| NZ_LT591897 | 3213 | 3214 | 7590 | 11966 | 16342 | 20718 | 25094 | 29470 | 33846 | | 39841 |
| NZ_LT591897 | 3214 | 3215 | 7591 | 11967 | 16343 | 20719 | 25095 | 29471 | 33847 | | 39842 |
| NZ_LT591897 | 3215 | 3216 | 7592 | 11968 | 16344 | 20720 | 25096 | 29472 | 33848 | 37142 | 39843 |
| NZ_LT591897 | 3216 | 3217 | 7593 | 11969 | 16345 | 20721 | 25097 | 29473 | 33849 | 37143 | |
| NZ_LT591897 | 3217 | 3218 | 7594 | 11970 | 16346 | 20722 | 25098 | 29474 | 33850 | 37144 | |
| NZ_LT591897 | 3218 | 3219 | 7595 | 11971 | 16347 | 20723 | 25099 | 29475 | 33851 | | 39844 |
| NZ_LT591897 | 3219 | 3220 | 7596 | 11972 | 16348 | 20724 | 25100 | 29476 | 33852 | 37145 | |
| NZ_LT591897 | 3220 | 3221 | 7597 | 11973 | 16349 | 20725 | 25101 | 29477 | 33853 | 37146 | 39845 |
| NZ_LT591897 | 3221 | 3222 | 7598 | 11974 | 16350 | 20726 | 25102 | 29478 | 33854 | 37147 | 39846 |
| NZ_LT591897 | 3222 | 3223 | 7599 | 11975 | 16351 | 20727 | 25103 | 29479 | 33855 | 37148 | 39847 |
| NZ_LT591897 | 3223 | 3224 | 7600 | 11976 | 16352 | 20728 | 25104 | 29480 | 33856 | | 39848 |
| NZ_LT591897 | 3224 | 3225 | 7601 | 11977 | 16353 | 20729 | 25105 | 29481 | 33857 | 37149 | |
| NZ_LT591897 | 3225 | 3226 | 7602 | 11978 | 16354 | 20730 | 25106 | 29482 | 33858 | 37150 | |
| NZ_LT591897 | 3226 | 3227 | 7603 | 11979 | 16355 | 20731 | 25107 | 29483 | 33859 | 37151 | 39849 |
| NZ_LT591897 | 3227 | 3228 | 7604 | 11980 | 16356 | 20732 | 25108 | 29484 | 33860 | 37152 | 39850 |
| NZ_LT591897 | 3228 | 3229 | 7605 | 11981 | 16357 | 20733 | 25109 | 29485 | 33861 | 37153 | 39851 |
| NZ_LT591897 | 3229 | 3230 | 7606 | 11982 | 16358 | 20734 | 25110 | 29486 | 33862 | 37154 | |
| NZ_LT591897 | 3230 | 3231 | 7607 | 11983 | 16359 | 20735 | 25111 | 29487 | 33863 | 37155 | 39852 |
| NZ_LT591897 | 3231 | 3232 | 7608 | 11984 | 16360 | 20736 | 25112 | 29488 | 33864 | | 39853 |
| NZ_LT591897 | 3232 | 3233 | 7609 | 11985 | 16361 | 20737 | 25113 | 29489 | 33865 | 37156 | 39854 |
| NZ_LT591897 | 3233 | 3234 | 7610 | 11986 | 16362 | 20738 | 25114 | 29490 | 33866 | | 39855 |
| NZ_LT591897 | 3234 | 3235 | 7611 | 11987 | 16363 | 20739 | 25115 | 29491 | 33867 | 37157 | 39856 |
| NZ_LT591897 | 3235 | 3236 | 7612 | 11988 | 16364 | 20740 | 25116 | 29492 | 33868 | 37158 | |
| NZ_LT591897 | 3236 | 3237 | 7613 | 11989 | 16365 | 20741 | 25117 | 29493 | 33869 | 37159 | 39857 |
| NZ_LT591897 | 3237 | 3238 | 7614 | 11990 | 16366 | 20742 | 25118 | 29494 | 33870 | 37160 | |
| NZ_LT591897 | 3238 | 3239 | 7615 | 11991 | 16367 | 20743 | 25119 | 29495 | 33871 | 37161 | |
| NZ_LT591897 | 3239 | 3240 | 7616 | 11992 | 16368 | 20744 | 25120 | 29496 | 33872 | 37162 | |
| NZ_LT591897 | 3240 | 3241 | 7617 | 11993 | 16369 | 20745 | 25121 | 29497 | 33873 | | 39858 |
| NZ_LT591897 | 3241 | 3242 | 7618 | 11994 | 16370 | 20746 | 25122 | 29498 | 33874 | | 39859 |
| NZ_LT591897 | 3242 | 3243 | 7619 | 11995 | 16371 | 20747 | 25123 | 29499 | 33875 | 37163 | 39860 |
| NZ_LT591897 | 3243 | 3244 | 7620 | 11996 | 16372 | 20748 | 25124 | 29500 | 33876 | 37164 | |
| NZ_LT591897 | 3244 | 3245 | 7621 | 11997 | 16373 | 20749 | 25125 | 29501 | 33877 | 37165 | 39861 |
| NZ_LT591897 | 3245 | 3246 | 7622 | 11998 | 16374 | 20750 | 25126 | 29502 | 33878 | 37166 | |
| NZ_LT591897 | 3246 | 3247 | 7623 | 11999 | 16375 | 20751 | 25127 | 29503 | 33879 | 37167 | |
| NZ_LT591897 | 3247 | 3248 | 7624 | 12000 | 16376 | 20752 | 25128 | 29504 | 33880 | | 39862 |
| NZ_LT591897 | 3248 | 3249 | 7625 | 12001 | 16377 | 20753 | 25129 | 29505 | 33881 | | 39863 |
| NZ_LT591897 | 3249 | 3250 | 7626 | 12002 | 16378 | 20754 | 25130 | 29506 | 33882 | 37168 | 39864 |
| NZ_LT591897 | 3250 | 3251 | 7627 | 12003 | 16379 | 20755 | 25131 | 29507 | 33883 | 37169 | |
| NZ_LT591897 | 3251 | 3252 | 7628 | 12004 | 16380 | 20756 | 25132 | 29508 | 33884 | 37170 | 39865 |
| NZ_LT591897 | 3252 | 3253 | 7629 | 12005 | 16381 | 20757 | 25133 | 29509 | 33885 | 37171 | |
| NZ_LT591897 | 3253 | 3254 | 7630 | 12006 | 16382 | 20758 | 25134 | 29510 | 33886 | 37172 | 39866 |
| NZ_LT591897 | 3254 | 3255 | 7631 | 12007 | 16383 | 20759 | 25135 | 29511 | 33887 | 37173 | |
| NZ_LT591897 | 3255 | 3256 | 7632 | 12008 | 16384 | 20760 | 25136 | 29512 | 33888 | | 39867 |
| NZ_LT591897 | 3256 | 3257 | 7633 | 12009 | 16385 | 20761 | 25137 | 29513 | 33889 | 37174 | 39868 |
| NZ_LT591897 | 3257 | 3258 | 7634 | 12010 | 16386 | 20762 | 25138 | 29514 | 33890 | | 39869 |
| NZ_LT591897 | 3258 | 3259 | 7635 | 12011 | 16387 | 20763 | 25139 | 29515 | 33891 | | 39870 |
| NZ_LT591897 | 3259 | 3260 | 7636 | 12012 | 16388 | 20764 | 25140 | 29516 | 33892 | | 39871 |
| NZ_LT591897 | 3260 | 3261 | 7637 | 12013 | 16389 | 20765 | 25141 | 29517 | 33893 | 37175 | 39872 |
| NZ_LT591897 | 3261 | 3262 | 7638 | 12014 | 16390 | 20766 | 25142 | 29518 | 33894 | 37176 | |
| NZ_LT591897 | 3262 | 3263 | 7639 | 12015 | 16391 | 20767 | 25143 | 29519 | 33895 | | 39873 |
| NZ_LT591897 | 3263 | 3264 | 7640 | 12016 | 16392 | 20768 | 25144 | 29520 | 33896 | 37177 | 39874 |
| NZ_LT591897 | 3264 | 3265 | 7641 | 12017 | 16393 | 20769 | 25145 | 29521 | 33897 | | 39875 |
| NZ_LT591897 | 3265 | 3266 | 7642 | 12018 | 16394 | 20770 | 25146 | 29522 | 33898 | 37178 | 39876 |
| NZ_LT591897 | 3266 | 3267 | 7643 | 12019 | 16395 | 20771 | 25147 | 29523 | 33899 | | 39877 |
| NZ_LT591897 | 3267 | 3268 | 7644 | 12020 | 16396 | 20772 | 25148 | 29524 | 33900 | | 39878 |
| NZ_LT591897 | 3268 | 3269 | 7645 | 12021 | 16397 | 20773 | 25149 | 29525 | 33901 | | 39879 |
| NC_014953 | 3269 | 3270 | 7646 | 12022 | 16398 | 20774 | 25150 | 29526 | 33902 | | 39880 |
| NC_014953 | 3270 | 3271 | 7647 | 12023 | 16399 | 20775 | 25151 | 29527 | 33903 | 37179 | |
| NC_014953 | 3271 | 3272 | 7648 | 12024 | 16400 | 20776 | 25152 | 29528 | 33904 | 37180 | |
| NC_014953 | 3272 | 3273 | 7649 | 12025 | 16401 | 20777 | 25153 | 29529 | 33905 | 37181 | 39881 |
| NC_014953 | 3273 | 3274 | 7650 | 12026 | 16402 | 20778 | 25154 | 29530 | 33906 | | 39882 |
| NC_014953 | 3274 | 3275 | 7651 | 12027 | 16403 | 20779 | 25155 | 29531 | 33907 | 37182 | |
| NC_014953 | 3275 | 3276 | 7652 | 12028 | 16404 | 20780 | 25156 | 29532 | 33908 | 37183 | |
| NC_014953 | 3276 | 3277 | 7653 | 12029 | 16405 | 20781 | 25157 | 29533 | 33909 | | 39883 |
| NC_014953 | 3277 | 3278 | 7654 | 12030 | 16406 | 20782 | 25158 | 29534 | 33910 | 37184 | 39884 |
| NC_014953 | 3278 | 3279 | 7655 | 12031 | 16407 | 20783 | 25159 | 29535 | 33911 | 37185 | |
| NC_014953 | 3279 | 3280 | 7656 | 12032 | 16408 | 20784 | 25160 | 29536 | 33912 | | 39885 |
| NC_014953 | 3280 | 3281 | 7657 | 12033 | 16409 | 20785 | 25161 | 29537 | 33913 | 37186 | |
| NC_014953 | 3281 | 3282 | 7658 | 12034 | 16410 | 20786 | 25162 | 29538 | 33914 | 37187 | |
| NC_014953 | 3282 | 3283 | 7659 | 12035 | 16411 | 20787 | 25163 | 29539 | 33915 | 37188 | |
| NC_007376 | 3283 | 3284 | 7660 | 12036 | 16412 | 20788 | 25164 | 29540 | 33916 | 37189 | |
| NC_007376 | 3284 | 3285 | 7661 | 12037 | 16413 | 20789 | 25165 | 29541 | 33917 | 37190 | |
| NC_007376 | 3285 | 3286 | 7662 | 12038 | 16414 | 20790 | 25166 | 29542 | 33918 | | 39886 |
| NC_007376 | 3286 | 3287 | 7663 | 12039 | 16415 | 20791 | 25167 | 29543 | 33919 | 37191 | |
| NC_007376 | 3287 | 3288 | 7664 | 12040 | 16416 | 20792 | 25168 | 29544 | 33920 | 37192 | |
| NC_007376 | 3288 | 3289 | 7665 | 12041 | 16417 | 20793 | 25169 | 29545 | 33921 | | 39887 |
| NC_007376 | 3289 | 3290 | 7666 | 12042 | 16418 | 20794 | 25170 | 29546 | 33922 | | 39888 |
| NC_001653 | 3290 | 3291 | 7667 | 12043 | 16419 | 20795 | 25171 | 29547 | 33923 | | 39889 |
| NC_001653 | 3291 | 3292 | 7668 | 12044 | 16420 | 20796 | 25172 | 29548 | 33924 | 37193 | 39890 |
| NC_001653 | 3292 | 3293 | 7669 | 12045 | 16421 | 20797 | 25173 | 29549 | 33925 | | 39891 |
| NC_001653 | 3293 | 3294 | 7670 | 12046 | 16422 | 20798 | 25174 | 29550 | 33926 | 37194 | |
| NC_001653 | 3294 | 3295 | 7671 | 12047 | 16423 | 20799 | 25175 | 29551 | 33927 | 37195 | 39892 |
| NC_001583 | 3295 | 3296 | 7672 | 12048 | 16424 | 20800 | 25176 | 29552 | 33928 | | 39893 |
| NC_001583 | 3296 | 3297 | 7673 | 12049 | 16425 | 20801 | 25177 | 29553 | 33929 | | 39894 |
| NC_001583 | 3297 | 3298 | 7674 | 12050 | 16426 | 20802 | 25178 | 29554 | 33930 | | 39895 |
| NC_001583 | 3298 | 3299 | 7675 | 12051 | 16427 | 20803 | 25179 | 29555 | 33931 | 37196 | 39896 |
| NC_001583 | 3299 | 3300 | 7676 | 12052 | 16428 | 20804 | 25180 | 29556 | 33932 | 37197 | 39897 |
| NC_001583 | 3300 | 3301 | 7677 | 12053 | 16429 | 20805 | 25181 | 29557 | 33933 | | 39898 |
| NC_001583 | 3301 | 3302 | 7678 | 12054 | 16430 | 20806 | 25182 | 29558 | 33934 | 37198 | |
| NC_001583 | 3302 | 3303 | 7679 | 12055 | 16431 | 20807 | 25183 | 29559 | 33935 | | 39899 |
| NC_001583 | 3303 | 3304 | 7680 | 12056 | 16432 | 20808 | 25184 | 29560 | 33936 | 37199 | 39900 |
| NC_001583 | 3304 | 3305 | 7681 | 12057 | 16433 | 20809 | 25185 | 29561 | 33937 | | 39901 |
| NC_001583 | 3305 | 3306 | 7682 | 12058 | 16434 | 20810 | 25186 | 29562 | 33938 | 37200 | 39902 |
| NC_001583 | 3306 | 3307 | 7683 | 12059 | 16435 | 20811 | 25187 | 29563 | 33939 | 37201 | |
| NC_001583 | 3307 | 3308 | 7684 | 12060 | 16436 | 20812 | 25188 | 29564 | 33940 | | 39903 |
| NC_001583 | 3308 | 3309 | 7685 | 12061 | 16437 | 20813 | 25189 | 29565 | 33941 | | 39904 |
| NC_001583 | 3309 | 3310 | 7686 | 12062 | 16438 | 20814 | 25190 | 29566 | 33942 | 37202 | |
| NC_001583 | 3310 | 3311 | 7687 | 12063 | 16439 | 20815 | 25191 | 29567 | 33943 | | 39905 |
| NC_001583 | 3311 | 3312 | 7688 | 12064 | 16440 | 20816 | 25192 | 29568 | 33944 | 37203 | |
| NC_001655 | 3312 | 3313 | 7689 | 12065 | 16441 | 20817 | 25193 | 29569 | 33945 | 37204 | 39906 |
| NC_001655 | 3313 | 3314 | 7690 | 12066 | 16442 | 20818 | 25194 | 29570 | 33946 | 37205 | 39907 |
| NC_001655 | 3314 | 3315 | 7691 | 12067 | 16443 | 20819 | 25195 | 29571 | 33947 | | 39908 |
| NC_001655 | 3315 | 3316 | 7692 | 12068 | 16444 | 20820 | 25196 | 29572 | 33948 | 37206 | 39909 |
| NC_001655 | 3316 | 3317 | 7693 | 12069 | 16445 | 20821 | 25197 | 29573 | 33949 | 37207 | 39910 |
| NC_001655 | 3317 | 3318 | 7694 | 12070 | 16446 | 20822 | 25198 | 29574 | 33950 | | 39911 |
| NC_001655 | 3318 | 3319 | 7695 | 12071 | 16447 | 20823 | 25199 | 29575 | 33951 | 37208 | |
| NC_001655 | 3319 | 3320 | 7696 | 12072 | 16448 | 20824 | 25200 | 29576 | 33952 | 37209 | 39912 |
| NC_001655 | 3320 | 3321 | 7697 | 12073 | 16449 | 20825 | 25201 | 29577 | 33953 | 37210 | 39913 |
| NC_001655 | 3321 | 3322 | 7698 | 12074 | 16450 | 20826 | 25202 | 29578 | 33954 | | 39914 |
| NC_001655 | 3322 | 3323 | 7699 | 12075 | 16451 | 20827 | 25203 | 29579 | 33955 | | 39915 |
| NC_001655 | 3323 | 3324 | 7700 | 12076 | 16452 | 20828 | 25204 | 29580 | 33956 | 37211 | 39916 |
| NC_001655 | 3324 | 3325 | 7701 | 12077 | 16453 | 20829 | 25205 | 29581 | 33957 | | 39917 |
| NC_001655 | 3325 | 3326 | 7702 | 12078 | 16454 | 20830 | 25206 | 29582 | 33958 | 37212 | |
| NC_001655 | 3326 | 3327 | 7703 | 12079 | 16455 | 20831 | 25207 | 29583 | 33959 | 37213 | 39918 |
| NC_001655 | 3327 | 3328 | 7704 | 12080 | 16456 | 20832 | 25208 | 29584 | 33960 | 37214 | |
| NC_001655 | 3328 | 3329 | 7705 | 12081 | 16457 | 20833 | 25209 | 29585 | 33961 | | 39919 |
| NC_001655 | 3329 | 3330 | 7706 | 12082 | 16458 | 20834 | 25210 | 29586 | 33962 | 37215 | 39920 |
| NC_001655 | 3330 | 3331 | 7707 | 12083 | 16459 | 20835 | 25211 | 29587 | 33963 | 37216 | |
| NC_001655 | 3331 | 3332 | 7708 | 12084 | 16460 | 20836 | 25212 | 29588 | 33964 | 37217 | |
| NC_001655 | 3332 | 3333 | 7709 | 12085 | 16461 | 20837 | 25213 | 29589 | 33965 | 37218 | |
| NC_001655 | 3333 | 3334 | 7710 | 12086 | 16462 | 20838 | 25214 | 29590 | 33966 | | 39921 |
| NC_001655 | 3334 | 3335 | 7711 | 12087 | 16463 | 20839 | 25215 | 29591 | 33967 | 37219 | |
| NC_001655 | 3335 | 3336 | 7712 | 12088 | 16464 | 20840 | 25216 | 29592 | 33968 | 37220 | |
| NC_007368 | 3336 | 3337 | 7713 | 12089 | 16465 | 20841 | 25217 | 29593 | 33969 | | 39922 |
| NC_007368 | 3337 | 3338 | 7714 | 12090 | 16466 | 20842 | 25218 | 29594 | 33970 | 37221 | 39923 |
| NC_007368 | 3338 | 3339 | 7715 | 12091 | 16467 | 20843 | 25219 | 29595 | 33971 | 37222 | |
| NC_007368 | 3339 | 3340 | 7716 | 12092 | 16468 | 20844 | 25220 | 29596 | 33972 | 37223 | 39924 |
| NC_007368 | 3340 | 3341 | 7717 | 12093 | 16469 | 20845 | 25221 | 29597 | 33973 | 37224 | 39925 |
| NC_027779 | 3341 | 3342 | 7718 | 12094 | 16470 | 20846 | 25222 | 29598 | 33974 | | 39926 |
| NC_027779 | 3342 | 3343 | 7719 | 12095 | 16471 | 20847 | 25223 | 29599 | 33975 | 37225 | 39927 |
| NC_027779 | 3343 | 3344 | 7720 | 12096 | 16472 | 20848 | 25224 | 29600 | 33976 | | 39928 |
| NC_027779 | 3344 | 3345 | 7721 | 12097 | 16473 | 20849 | 25225 | 29601 | 33977 | | 39929 |
| NC_027779 | 3345 | 3346 | 7722 | 12098 | 16474 | 20850 | 25226 | 29602 | 33978 | 37226 | |
| NC_027779 | 3346 | 3347 | 7723 | 12099 | 16475 | 20851 | 25227 | 29603 | 33979 | 37227 | |
| NC_027779 | 3347 | 3348 | 7724 | 12100 | 16476 | 20852 | 25228 | 29604 | 33980 | 37228 | |
| NC_027779 | 3348 | 3349 | 7725 | 12101 | 16477 | 20853 | 25229 | 29605 | 33981 | 37229 | |
| NC_027779 | 3349 | 3350 | 7726 | 12102 | 16478 | 20854 | 25230 | 29606 | 33982 | 37230 | |
| NC_027779 | 3350 | 3351 | 7727 | 12103 | 16479 | 20855 | 25231 | 29607 | 33983 | | 39930 |
| NC_027779 | 3351 | 3352 | 7728 | 12104 | 16480 | 20856 | 25232 | 29608 | 33984 | 37231 | |
| NC_027779 | 3352 | 3353 | 7729 | 12105 | 16481 | 20857 | 25233 | 29609 | 33985 | 37232 | |
| NC_004908 | 3353 | 3354 | 7730 | 12106 | 16482 | 20858 | 25234 | 29610 | 33986 | 37233 | |
| NC_004908 | 3354 | 3355 | 7731 | 12107 | 16483 | 20859 | 25235 | 29611 | 33987 | 37234 | |
| NC_004908 | 3355 | 3356 | 7732 | 12108 | 16484 | 20860 | 25236 | 29612 | 33988 | 37235 | |
| NC_004908 | 3356 | 3357 | 7733 | 12109 | 16485 | 20861 | 25237 | 29613 | 33989 | 37236 | |
| NC_004908 | 3357 | 3358 | 7734 | 12110 | 16486 | 20862 | 25238 | 29614 | 33990 | | 39931 |
| NC_009826 | 3358 | 3359 | 7735 | 12111 | 16487 | 20863 | 25239 | 29615 | 33991 | | 39932 |
| NC_009826 | 3359 | 3360 | 7736 | 12112 | 16488 | 20864 | 25240 | 29616 | 33992 | 37237 | 39933 |
| NC_009826 | 3360 | 3361 | 7737 | 12113 | 16489 | 20865 | 25241 | 29617 | 33993 | | 39934 |
| NC_009826 | 3361 | 3362 | 7738 | 12114 | 16490 | 20866 | 25242 | 29618 | 33994 | | 39935 |
| NC_009826 | 3362 | 3363 | 7739 | 12115 | 16491 | 20867 | 25243 | 29619 | 33995 | | 39936 |
| NC_009826 | 3363 | 3364 | 7740 | 12116 | 16492 | 20868 | 25244 | 29620 | 33996 | 37238 | 39937 |
| NC_009826 | 3364 | 3365 | 7741 | 12117 | 16493 | 20869 | 25245 | 29621 | 33997 | 37239 | |
| NC_009826 | 3365 | 3366 | 7742 | 12118 | 16494 | 20870 | 25246 | 29622 | 33998 | 37240 | 39938 |
| NC_009826 | 3366 | 3367 | 7743 | 12119 | 16495 | 20871 | 25247 | 29623 | 33999 | 37241 | 39939 |
| NC_009826 | 3367 | 3368 | 7744 | 12120 | 16496 | 20872 | 25248 | 29624 | 34000 | 37242 | |
| NC_009826 | 3368 | 3369 | 7745 | 12121 | 16497 | 20873 | 25249 | 29625 | 34001 | | 39940 |
| NC_009826 | 3369 | 3370 | 7746 | 12122 | 16498 | 20874 | 25250 | 29626 | 34002 | 37243 | 39941 |
| NC_009826 | 3370 | 3371 | 7747 | 12123 | 16499 | 20875 | 25251 | 29627 | 34003 | 37244 | |
| NC_009826 | 3371 | 3372 | 7748 | 12124 | 16500 | 20876 | 25252 | 29628 | 34004 | | 39942 |
| NC_009826 | 3372 | 3373 | 7749 | 12125 | 16501 | 20877 | 25253 | 29629 | 34005 | 37245 | 39943 |
| NC_009826 | 3373 | 3374 | 7750 | 12126 | 16502 | 20878 | 25254 | 29630 | 34006 | | 39944 |
| NC_009826 | 3374 | 3375 | 7751 | 12127 | 16503 | 20879 | 25255 | 29631 | 34007 | 37246 | 39945 |
| NC_009826 | 3375 | 3376 | 7752 | 12128 | 16504 | 20880 | 25256 | 29632 | 34008 | 37247 | |
| NC_009826 | 3376 | 3377 | 7753 | 12129 | 16505 | 20881 | 25257 | 29633 | 34009 | 37248 | 39946 |
| NC_009826 | 3377 | 3378 | 7754 | 12130 | 16506 | 20882 | 25258 | 29634 | 34010 | | 39947 |
| NC_009826 | 3378 | 3379 | 7755 | 12131 | 16507 | 20883 | 25259 | 29635 | 34011 | 37249 | |
| NC_009826 | 3379 | 3380 | 7756 | 12132 | 16508 | 20884 | 25260 | 29636 | 34012 | 37250 | |
| NC_009826 | 3380 | 3381 | 7757 | 12133 | 16509 | 20885 | 25261 | 29637 | 34013 | 37251 | |
| NC_009826 | 3381 | 3382 | 7758 | 12134 | 16510 | 20886 | 25262 | 29638 | 34014 | | 39948 |
| NC_009826 | 3382 | 3383 | 7759 | 12135 | 16511 | 20887 | 25263 | 29639 | 34015 | 37252 | 39949 |
| NC_009826 | 3383 | 3384 | 7760 | 12136 | 16512 | 20888 | 25264 | 29640 | 34016 | 37253 | |
| NC_009826 | 3384 | 3385 | 7761 | 12137 | 16513 | 20889 | 25265 | 29641 | 34017 | 37254 | |
| NC_004718 | 3385 | 3386 | 7762 | 12138 | 16514 | 20890 | 25266 | 29642 | 34018 | | 39950 |
| NC_004718 | 3386 | 3387 | 7763 | 12139 | 16515 | 20891 | 25267 | 29643 | 34019 | 37255 | |
| NC_004718 | 3387 | 3388 | 7764 | 12140 | 16516 | 20892 | 25268 | 29644 | 34020 | 37256 | |
| NC_004718 | 3388 | 3389 | 7765 | 12141 | 16517 | 20893 | 25269 | 29645 | 34021 | 37257 | 39951 |
| NC_004718 | 3389 | 3390 | 7766 | 12142 | 16518 | 20894 | 25270 | 29646 | 34022 | | 39952 |
| NC_004718 | 3390 | 3391 | 7767 | 12143 | 16519 | 20895 | 25271 | 29647 | 34023 | 37258 | |
| NC_004718 | 3391 | 3392 | 7768 | 12144 | 16520 | 20896 | 25272 | 29648 | 34024 | 37259 | 39953 |
| NC_004718 | 3392 | 3393 | 7769 | 12145 | 16521 | 20897 | 25273 | 29649 | 34025 | | 39954 |
| NC_004718 | 3393 | 3394 | 7770 | 12146 | 16522 | 20898 | 25274 | 29650 | 34026 | | 39955 |
| NC_004718 | 3394 | 3395 | 7771 | 12147 | 16523 | 20899 | 25275 | 29651 | 34027 | 37260 | 39956 |
| NC_004718 | 3395 | 3396 | 7772 | 12148 | 16524 | 20900 | 25276 | 29652 | 34028 | 37261 | 39957 |
| NC_004718 | 3396 | 3397 | 7773 | 12149 | 16525 | 20901 | 25277 | 29653 | 34029 | | 39958 |
| NC_004718 | 3397 | 3398 | 7774 | 12150 | 16526 | 20902 | 25278 | 29654 | 34030 | 37262 | |
| NC_004718 | 3398 | 3399 | 7775 | 12151 | 16527 | 20903 | 25279 | 29655 | 34031 | | 39959 |
| NC_004718 | 3399 | 3400 | 7776 | 12152 | 16528 | 20904 | 25280 | 29656 | 34032 | | 39960 |
| NC_004718 | 3400 | 3401 | 7777 | 12153 | 16529 | 20905 | 25281 | 29657 | 34033 | 37263 | |
| NC_004718 | 3401 | 3402 | 7778 | 12154 | 16530 | 20906 | 25282 | 29658 | 34034 | 37264 | 39961 |
| NC_004718 | 3402 | 3403 | 7779 | 12155 | 16531 | 20907 | 25283 | 29659 | 34035 | 37265 | |
| NC_004718 | 3403 | 3404 | 7780 | 12156 | 16532 | 20908 | 25284 | 29660 | 34036 | 37266 | |
| NC_004718 | 3404 | 3405 | 7781 | 12157 | 16533 | 20909 | 25285 | 29661 | 34037 | | 39962 |
| NC_004718 | 3405 | 3406 | 7782 | 12158 | 16534 | 20910 | 25286 | 29662 | 34038 | | 39963 |
| NC_004718 | 3406 | 3407 | 7783 | 12159 | 16535 | 20911 | 25287 | 29663 | 34039 | | 39964 |
| NC_004718 | 3407 | 3408 | 7784 | 12160 | 16536 | 20912 | 25288 | 29664 | 34040 | 37267 | |
| NC_004718 | 3408 | 3409 | 7785 | 12161 | 16537 | 20913 | 25289 | 29665 | 34041 | 37268 | |
| NC_004718 | 3409 | 3410 | 7786 | 12162 | 16538 | 20914 | 25290 | 29666 | 34042 | 37269 | |
| NC_004718 | 3410 | 3411 | 7787 | 12163 | 16539 | 20915 | 25291 | 29667 | 34043 | 37270 | |
| NC_004718 | 3411 | 3412 | 7788 | 12164 | 16540 | 20916 | 25292 | 29668 | 34044 | 37271 | |
| NC_004718 | 3412 | 3413 | 7789 | 12165 | 16541 | 20917 | 25293 | 29669 | 34045 | 37272 | |
| NC_004718 | 3413 | 3414 | 7790 | 12166 | 16542 | 20918 | 25294 | 29670 | 34046 | | 39965 |
| NC_004718 | 3414 | 3415 | 7791 | 12167 | 16543 | 20919 | 25295 | 29671 | 34047 | | 39966 |
| NC_004718 | 3415 | 3416 | 7792 | 12168 | 16544 | 20920 | 25296 | 29672 | 34048 | 37273 | 39967 |
| NC_004718 | 3416 | 3417 | 7793 | 12169 | 16545 | 20921 | 25297 | 29673 | 34049 | | 39968 |
| NC_004718 | 3417 | 3418 | 7794 | 12170 | 16546 | 20922 | 25298 | 29674 | 34050 | 37274 | |
| NC_004718 | 3418 | 3419 | 7795 | 12171 | 16547 | 20923 | 25299 | 29675 | 34051 | 37275 | |
| NC_004718 | 3419 | 3420 | 7796 | 12172 | 16548 | 20924 | 25300 | 29676 | 34052 | | 39969 |
| NC_004718 | 3420 | 3421 | 7797 | 12173 | 16549 | 20925 | 25301 | 29677 | 34053 | 37276 | |
| NC_004718 | 3421 | 3422 | 7798 | 12174 | 16550 | 20926 | 25302 | 29678 | 34054 | 37277 | |
| NC_004718 | 3422 | 3423 | 7799 | 12175 | 16551 | 20927 | 25303 | 29679 | 34055 | 37278 | |
| NC_004718 | 3423 | 3424 | 7800 | 12176 | 16552 | 20928 | 25304 | 29680 | 34056 | | 39970 |
| NC_004718 | 3424 | 3425 | 7801 | 12177 | 16553 | 20929 | 25305 | 29681 | 34057 | 37279 | |
| NC_004718 | 3425 | 3426 | 7802 | 12178 | 16554 | 20930 | 25306 | 29682 | 34058 | | 39971 |
| NC_004718 | 3426 | 3427 | 7803 | 12179 | 16555 | 20931 | 25307 | 29683 | 34059 | 37280 | |
| NC_004718 | 3427 | 3428 | 7804 | 12180 | 16556 | 20932 | 25308 | 29684 | 34060 | 37281 | |
| NC_004718 | 3428 | 3429 | 7805 | 12181 | 16557 | 20933 | 25309 | 29685 | 34061 | 37282 | |
| NC_004718 | 3429 | 3430 | 7806 | 12182 | 16558 | 20934 | 25310 | 29686 | 34062 | | 39972 |
| NC_004718 | 3430 | 3431 | 7807 | 12183 | 16559 | 20935 | 25311 | 29687 | 34063 | 37283 | |
| NC_004718 | 3431 | 3432 | 7808 | 12184 | 16560 | 20936 | 25312 | 29688 | 34064 | 37284 | |
| NC_004718 | 3432 | 3433 | 7809 | 12185 | 16561 | 20937 | 25313 | 29689 | 34065 | 37285 | |
| NC_004718 | 3433 | 3434 | 7810 | 12186 | 16562 | 20938 | 25314 | 29690 | 34066 | 37286 | |
| NC_004718 | 3434 | 3435 | 7811 | 12187 | 16563 | 20939 | 25315 | 29691 | 34067 | | 39973 |
| NC_004718 | 3435 | 3436 | 7812 | 12188 | 16564 | 20940 | 25316 | 29692 | 34068 | 37287 | 39974 |
| NC_004718 | 3436 | 3437 | 7813 | 12189 | 16565 | 20941 | 25317 | 29693 | 34069 | 37288 | 39975 |
| NC_004718 | 3437 | 3438 | 7814 | 12190 | 16566 | 20942 | 25318 | 29694 | 34070 | | 39976 |
| NC_004718 | 3438 | 3439 | 7815 | 12191 | 16567 | 20943 | 25319 | 29695 | 34071 | 37289 | 39977 |
| NC_004718 | 3439 | 3440 | 7816 | 12192 | 16568 | 20944 | 25320 | 29696 | 34072 | 37290 | 39978 |
| NC_004718 | 3440 | 3441 | 7817 | 12193 | 16569 | 20945 | 25321 | 29697 | 34073 | | 39979 |
| NC_004718 | 3441 | 3442 | 7818 | 12194 | 16570 | 20946 | 25322 | 29698 | 34074 | | 39980 |
| NC_004718 | 3442 | 3443 | 7819 | 12195 | 16571 | 20947 | 25323 | 29699 | 34075 | | 39981 |
| NC_004718 | 3443 | 3444 | 7820 | 12196 | 16572 | 20948 | 25324 | 29700 | 34076 | 37291 | |
| NC_004718 | 3444 | 3445 | 7821 | 12197 | 16573 | 20949 | 25325 | 29701 | 34077 | 37292 | |
| NC_004718 | 3445 | 3446 | 7822 | 12198 | 16574 | 20950 | 25326 | 29702 | 34078 | 37293 | 39982 |
| NC_004718 | 3446 | 3447 | 7823 | 12199 | 16575 | 20951 | 25327 | 29703 | 34079 | 37294 | |
| NC_004718 | 3447 | 3448 | 7824 | 12200 | 16576 | 20952 | 25328 | 29704 | 34080 | 37295 | |
| NC_004718 | 3448 | 3449 | 7825 | 12201 | 16577 | 20953 | 25329 | 29705 | 34081 | | 39983 |
| NC_004718 | 3449 | 3450 | 7826 | 12202 | 16578 | 20954 | 25330 | 29706 | 34082 | 37296 | |
| NC_004718 | 3450 | 3451 | 7827 | 12203 | 16579 | 20955 | 25331 | 29707 | 34083 | | 39984 |
| NC_004718 | 3451 | 3452 | 7828 | 12204 | 16580 | 20956 | 25332 | 29708 | 34084 | 37297 | 39985 |
| NC_004718 | 3452 | 3453 | 7829 | 12205 | 16581 | 20957 | 25333 | 29709 | 34085 | 37298 | 39986 |
| NC_004718 | 3453 | 3454 | 7830 | 12206 | 16582 | 20958 | 25334 | 29710 | 34086 | 37299 | |
| NC_004718 | 3454 | 3455 | 7831 | 12207 | 16583 | 20959 | 25335 | 29711 | 34087 | 37300 | 39987 |
| NC_004718 | 3455 | 3456 | 7832 | 12208 | 16584 | 20960 | 25336 | 29712 | 34088 | 37301 | |
| NC_004718 | 3456 | 3457 | 7833 | 12209 | 16585 | 20961 | 25337 | 29713 | 34089 | | 39988 |
| NC_004718 | 3457 | 3458 | 7834 | 12210 | 16586 | 20962 | 25338 | 29714 | 34090 | 37302 | |
| NC_004718 | 3458 | 3459 | 7835 | 12211 | 16587 | 20963 | 25339 | 29715 | 34091 | 37303 | |
| NC_004718 | 3459 | 3460 | 7836 | 12212 | 16588 | 20964 | 25340 | 29716 | 34092 | 37304 | 39989 |
| NC_004718 | 3460 | 3461 | 7837 | 12213 | 16589 | 20965 | 25341 | 29717 | 34093 | 37305 | |
| NC_004718 | 3461 | 3462 | 7838 | 12214 | 16590 | 20966 | 25342 | 29718 | 34094 | | 39990 |
| NC_004718 | 3462 | 3463 | 7839 | 12215 | 16591 | 20967 | 25343 | 29719 | 34095 | 37306 | 39991 |
| NC_004718 | 3463 | 3464 | 7840 | 12216 | 16592 | 20968 | 25344 | 29720 | 34096 | 37307 | 39992 |
| NC_004718 | 3464 | 3465 | 7841 | 12217 | 16593 | 20969 | 25345 | 29721 | 34097 | | 39993 |
| NC_004718 | 3465 | 3466 | 7842 | 12218 | 16594 | 20970 | 25346 | 29722 | 34098 | | 39994 |
| NC_004718 | 3466 | 3467 | 7843 | 12219 | 16595 | 20971 | 25347 | 29723 | 34099 | | 39995 |
| NC_004718 | 3467 | 3468 | 7844 | 12220 | 16596 | 20972 | 25348 | 29724 | 34100 | 37308 | |
| NC_004718 | 3468 | 3469 | 7845 | 12221 | 16597 | 20973 | 25349 | 29725 | 34101 | | 39996 |
| NC_004718 | 3469 | 3470 | 7846 | 12222 | 16598 | 20974 | 25350 | 29726 | 34102 | | 39997 |
| NC_004718 | 3470 | 3471 | 7847 | 12223 | 16599 | 20975 | 25351 | 29727 | 34103 | | 39998 |
| NC_001617 | 3471 | 3472 | 7848 | 12224 | 16600 | 20976 | 25352 | 29728 | 34104 | | 39999 |
| NC_001617 | 3472 | 3473 | 7849 | 12225 | 16601 | 20977 | 25353 | 29729 | 34105 | 37309 | 40000 |
| NC_001617 | 3473 | 3474 | 7850 | 12226 | 16602 | 20978 | 25354 | 29730 | 34106 | | 40001 |
| NC_001617 | 3474 | 3475 | 7851 | 12227 | 16603 | 20979 | 25355 | 29731 | 34107 | | 40002 |
| NC_001617 | 3475 | 3476 | 7852 | 12228 | 16604 | 20980 | 25356 | 29732 | 34108 | 37310 | |
| NC_001617 | 3476 | 3477 | 7853 | 12229 | 16605 | 20981 | 25357 | 29733 | 34109 | 37311 | |
| NC_001617 | 3477 | 3478 | 7854 | 12230 | 16606 | 20982 | 25358 | 29734 | 34110 | | 40003 |
| NC_001617 | 3478 | 3479 | 7855 | 12231 | 16607 | 20983 | 25359 | 29735 | 34111 | | 40004 |
| NC_001617 | 3479 | 3480 | 7856 | 12232 | 16608 | 20984 | 25360 | 29736 | 34112 | 37312 | |
| NC_001617 | 3480 | 3481 | 7857 | 12233 | 16609 | 20985 | 25361 | 29737 | 34113 | | 40005 |
| NC_001617 | 3481 | 3482 | 7858 | 12234 | 16610 | 20986 | 25362 | 29738 | 34114 | | 40006 |
| NC_001617 | 3482 | 3483 | 7859 | 12235 | 16611 | 20987 | 25363 | 29739 | 34115 | 37313 | |
| NC_001617 | 3483 | 3484 | 7860 | 12236 | 16612 | 20988 | 25364 | 29740 | 34116 | | 40007 |
| NC_001617 | 3484 | 3485 | 7861 | 12237 | 16613 | 20989 | 25365 | 29741 | 34117 | 37314 | |
| NC_001617 | 3485 | 3486 | 7862 | 12238 | 16614 | 20990 | 25366 | 29742 | 34118 | 37315 | |
| NC_001617 | 3486 | 3487 | 7863 | 12239 | 16615 | 20991 | 25367 | 29743 | 34119 | 37316 | |
| NC_001617 | 3487 | 3488 | 7864 | 12240 | 16616 | 20992 | 25368 | 29744 | 34120 | 37317 | |
| NC_001617 | 3488 | 3489 | 7865 | 12241 | 16617 | 20993 | 25369 | 29745 | 34121 | | 40008 |
| NC_001617 | 3489 | 3490 | 7866 | 12242 | 16618 | 20994 | 25370 | 29746 | 34122 | 37318 | |
| NC_001617 | 3490 | 3491 | 7867 | 12243 | 16619 | 20995 | 25371 | 29747 | 34123 | 37319 | |
| NC_001617 | 3491 | 3492 | 7868 | 12244 | 16620 | 20996 | 25372 | 29748 | 34124 | | 40009 |
| NC_001617 | 3492 | 3493 | 7869 | 12245 | 16621 | 20997 | 25373 | 29749 | 34125 | | 40010 |
| NC_014954 | 3493 | 3494 | 7870 | 12246 | 16622 | 20998 | 25374 | 29750 | 34126 | | 40011 |
| NC_014954 | 3494 | 3495 | 7871 | 12247 | 16623 | 20999 | 25375 | 29751 | 34127 | 37320 | |
| NC_014954 | 3495 | 3496 | 7872 | 12248 | 16624 | 21000 | 25376 | 29752 | 34128 | 37321 | |
| NC_014954 | 3496 | 3497 | 7873 | 12249 | 16625 | 21001 | 25377 | 29753 | 34129 | 37322 | |
| NC_014954 | 3497 | 3498 | 7874 | 12250 | 16626 | 21002 | 25378 | 29754 | 34130 | 37323 | 40012 |
| NC_014954 | 3498 | 3499 | 7875 | 12251 | 16627 | 21003 | 25379 | 29755 | 34131 | 37324 | |
| NC_014954 | 3499 | 3500 | 7876 | 12252 | 16628 | 21004 | 25380 | 29756 | 34132 | 37325 | |
| NC_014954 | 3500 | 3501 | 7877 | 12253 | 16629 | 21005 | 25381 | 29757 | 34133 | 37326 | 40013 |
| NC_014954 | 3501 | 3502 | 7878 | 12254 | 16630 | 21006 | 25382 | 29758 | 34134 | | 40014 |
| NC_014954 | 3502 | 3503 | 7879 | 12255 | 16631 | 21007 | 25383 | 29759 | 34135 | | 40015 |
| NC_014954 | 3503 | 3504 | 7880 | 12256 | 16632 | 21008 | 25384 | 29760 | 34136 | | 40016 |
| NC_014954 | 3504 | 3505 | 7881 | 12257 | 16633 | 21009 | 25385 | 29761 | 34137 | | 40017 |
| NC_014954 | 3505 | 3506 | 7882 | 12258 | 16634 | 21010 | 25386 | 29762 | 34138 | | 40018 |
| NC_017993 | 3506 | 3507 | 7883 | 12259 | 16635 | 21011 | 25387 | 29763 | 34139 | | 40019 |
| NC_017993 | 3507 | 3508 | 7884 | 12260 | 16636 | 21012 | 25388 | 29764 | 34140 | 37327 | |
| NC_017993 | 3508 | 3509 | 7885 | 12261 | 16637 | 21013 | 25389 | 29765 | 34141 | 37328 | |
| NC_017993 | 3509 | 3510 | 7886 | 12262 | 16638 | 21014 | 25390 | 29766 | 34142 | 37329 | |
| NC_017993 | 3510 | 3511 | 7887 | 12263 | 16639 | 21015 | 25391 | 29767 | 34143 | | 40020 |
| NC_017993 | 3511 | 3512 | 7888 | 12264 | 16640 | 21016 | 25392 | 29768 | 34144 | 37330 | |
| NC_017993 | 3512 | 3513 | 7889 | 12265 | 16641 | 21017 | 25393 | 29769 | 34145 | 37331 | |
| NC_017993 | 3513 | 3514 | 7890 | 12266 | 16642 | 21018 | 25394 | 29770 | 34146 | | 40021 |
| NC_017993 | 3514 | 3515 | 7891 | 12267 | 16643 | 21019 | 25395 | 29771 | 34147 | 37332 | |
| NC_002210 | 3515 | 3516 | 7892 | 12268 | 16644 | 21020 | 25396 | 29772 | 34148 | 37333 | |
| NC_002210 | 3516 | 3517 | 7893 | 12269 | 16645 | 21021 | 25397 | 29773 | 34149 | 37334 | |
| NC_002210 | 3517 | 3518 | 7894 | 12270 | 16646 | 21022 | 25398 | 29774 | 34150 | 37335 | |
| NC_007360 | 3518 | 3519 | 7895 | 12271 | 16647 | 21023 | 25399 | 29775 | 34151 | | 40022 |
| NC_007360 | 3519 | 3520 | 7896 | 12272 | 16648 | 21024 | 25400 | 29776 | 34152 | 37336 | 40023 |
| NC_007360 | 3520 | 3521 | 7897 | 12273 | 16649 | 21025 | 25401 | 29777 | 34153 | | 40024 |
| NC_007360 | 3521 | 3522 | 7898 | 12274 | 16650 | 21026 | 25402 | 29778 | 34154 | 37337 | |
| NZ_LN831034 | 3522 | 3523 | 7899 | 12275 | 16651 | 21027 | 25403 | 29779 | 34155 | 37338 | |
| NZ_LN831034 | 3523 | 3524 | 7900 | 12276 | 16652 | 21028 | 25404 | 29780 | 34156 | 37339 | |
| NZ_LN831034 | 3524 | 3525 | 7901 | 12277 | 16653 | 21029 | 25405 | 29781 | 34157 | | 40025 |
| NZ_LN831034 | 3525 | 3526 | 7902 | 12278 | 16654 | 21030 | 25406 | 29782 | 34158 | 37340 | |
| NZ_LN831034 | 3526 | 3527 | 7903 | 12279 | 16655 | 21031 | 25407 | 29783 | 34159 | | 40026 |
| NZ_LN831034 | 3527 | 3528 | 7904 | 12280 | 16656 | 21032 | 25408 | 29784 | 34160 | | 40027 |
| NZ_LN831034 | 3528 | 3529 | 7905 | 12281 | 16657 | 21033 | 25409 | 29785 | 34161 | 37341 | |
| NZ_LN831034 | 3529 | 3530 | 7906 | 12282 | 16658 | 21034 | 25410 | 29786 | 34162 | 37342 | |
| NZ_LN831034 | 3530 | 3531 | 7907 | 12283 | 16659 | 21035 | 25411 | 29787 | 34163 | 37343 | |
| NZ_LN831034 | 3531 | 3532 | 7908 | 12284 | 16660 | 21036 | 25412 | 29788 | 34164 | 37344 | |
| NZ_LN831034 | 3532 | 3533 | 7909 | 12285 | 16661 | 21037 | 25413 | 29789 | 34165 | | 40028 |
| NZ_LN831034 | 3533 | 3534 | 7910 | 12286 | 16662 | 21038 | 25414 | 29790 | 34166 | 37345 | |
| NZ_LN831034 | 3534 | 3535 | 7911 | 12287 | 16663 | 21039 | 25415 | 29791 | 34167 | | 40029 |
| NZ_LN831034 | 3535 | 3536 | 7912 | 12288 | 16664 | 21040 | 25416 | 29792 | 34168 | | 40030 |
| NZ_LN831034 | 3536 | 3537 | 7913 | 12289 | 16665 | 21041 | 25417 | 29793 | 34169 | | 40031 |
| NZ_LN831034 | 3537 | 3538 | 7914 | 12290 | 16666 | 21042 | 25418 | 29794 | 34170 | 37346 | |
| NZ_LN831034 | 3538 | 3539 | 7915 | 12291 | 16667 | 21043 | 25419 | 29795 | 34171 | 37347 | |
| NZ_LN831034 | 3539 | 3540 | 7916 | 12292 | 16668 | 21044 | 25420 | 29796 | 34172 | | 40032 |
| NZ_LN831034 | 3540 | 3541 | 7917 | 12293 | 16669 | 21045 | 25421 | 29797 | 34173 | 37348 | |
| NZ_LN831034 | 3541 | 3542 | 7918 | 12294 | 16670 | 21046 | 25422 | 29798 | 34174 | | 40033 |
| NZ_LN831034 | 3542 | 3543 | 7919 | 12295 | 16671 | 21047 | 25423 | 29799 | 34175 | | 40034 |
| NZ_LN831034 | 3543 | 3544 | 7920 | 12296 | 16672 | 21048 | 25424 | 29800 | 34176 | 37349 | |
| NZ_LN831034 | 3544 | 3545 | 7921 | 12297 | 16673 | 21049 | 25425 | 29801 | 34177 | | 40035 |
| NZ_LN831034 | 3545 | 3546 | 7922 | 12298 | 16674 | 21050 | 25426 | 29802 | 34178 | | 40036 |
| NZ_LN831034 | 3546 | 3547 | 7923 | 12299 | 16675 | 21051 | 25427 | 29803 | 34179 | 37350 | 40037 |
| NZ_LN831034 | 3547 | 3548 | 7924 | 12300 | 16676 | 21052 | 25428 | 29804 | 34180 | 37351 | |
| NZ_LN831034 | 3548 | 3549 | 7925 | 12301 | 16677 | 21053 | 25429 | 29805 | 34181 | 37352 | |
| NZ_LN831034 | 3549 | 3550 | 7926 | 12302 | 16678 | 21054 | 25430 | 29806 | 34182 | 37353 | |
| NZ_LN831034 | 3550 | 3551 | 7927 | 12303 | 16679 | 21055 | 25431 | 29807 | 34183 | 37354 | 40038 |
| NZ_LN831034 | 3551 | 3552 | 7928 | 12304 | 16680 | 21056 | 25432 | 29808 | 34184 | | 40039 |
| NZ_LN831034 | 3552 | 3553 | 7929 | 12305 | 16681 | 21057 | 25433 | 29809 | 34185 | | 40040 |
| NZ_LN831034 | 3553 | 3554 | 7930 | 12306 | 16682 | 21058 | 25434 | 29810 | 34186 | 37355 | |
| NZ_LN831034 | 3554 | 3555 | 7931 | 12307 | 16683 | 21059 | 25435 | 29811 | 34187 | | 40041 |
| NZ_LN831034 | 3555 | 3556 | 7932 | 12308 | 16684 | 21060 | 25436 | 29812 | 34188 | 37356 | 40042 |
| NZ_LN831034 | 3556 | 3557 | 7933 | 12309 | 16685 | 21061 | 25437 | 29813 | 34189 | 37357 | |
| NZ_LN831034 | 3557 | 3558 | 7934 | 12310 | 16686 | 21062 | 25438 | 29814 | 34190 | | 40043 |
| NZ_LN831034 | 3558 | 3559 | 7935 | 12311 | 16687 | 21063 | 25439 | 29815 | 34191 | | 40044 |
| NZ_LN831034 | 3559 | 3560 | 7936 | 12312 | 16688 | 21064 | 25440 | 29816 | 34192 | 37358 | |
| NZ_LN831034 | 3560 | 3561 | 7937 | 12313 | 16689 | 21065 | 25441 | 29817 | 34193 | 37359 | 40045 |
| NZ_LN831034 | 3561 | 3562 | 7938 | 12314 | 16690 | 21066 | 25442 | 29818 | 34194 | | 40046 |
| NZ_LN831034 | 3562 | 3563 | 7939 | 12315 | 16691 | 21067 | 25443 | 29819 | 34195 | 37360 | 40047 |
| NZ_LN831034 | 3563 | 3564 | 7940 | 12316 | 16692 | 21068 | 25444 | 29820 | 34196 | 37361 | |
| NZ_LN831034 | 3564 | 3565 | 7941 | 12317 | 16693 | 21069 | 25445 | 29821 | 34197 | 37362 | |
| NZ_LN831034 | 3565 | 3566 | 7942 | 12318 | 16694 | 21070 | 25446 | 29822 | 34198 | | 40048 |
| NZ_LN831034 | 3566 | 3567 | 7943 | 12319 | 16695 | 21071 | 25447 | 29823 | 34199 | | 40049 |
| NZ_LN831034 | 3567 | 3568 | 7944 | 12320 | 16696 | 21072 | 25448 | 29824 | 34200 | 37363 | |
| NZ_LN831034 | 3568 | 3569 | 7945 | 12321 | 16697 | 21073 | 25449 | 29825 | 34201 | 37364 | |
| NZ_LN831034 | 3569 | 3570 | 7946 | 12322 | 16698 | 21074 | 25450 | 29826 | 34202 | 37365 | |
| NZ_LN831034 | 3570 | 3571 | 7947 | 12323 | 16699 | 21075 | 25451 | 29827 | 34203 | 37366 | |
| NZ_LN831034 | 3571 | 3572 | 7948 | 12324 | 16700 | 21076 | 25452 | 29828 | 34204 | 37367 | |
| NZ_LN831034 | 3572 | 3573 | 7949 | 12325 | 16701 | 21077 | 25453 | 29829 | 34205 | | 40050 |
| NZ_LN831034 | 3573 | 3574 | 7950 | 12326 | 16702 | 21078 | 25454 | 29830 | 34206 | 37368 | 40051 |
| NZ_LN831034 | 3574 | 3575 | 7951 | 12327 | 16703 | 21079 | 25455 | 29831 | 34207 | 37369 | |
| NZ_LN831034 | 3575 | 3576 | 7952 | 12328 | 16704 | 21080 | 25456 | 29832 | 34208 | 37370 | |
| NZ_LN831034 | 3576 | 3577 | 7953 | 12329 | 16705 | 21081 | 25457 | 29833 | 34209 | | 40052 |
| NZ_LN831034 | 3577 | 3578 | 7954 | 12330 | 16706 | 21082 | 25458 | 29834 | 34210 | | 40053 |
| NZ_LN831034 | 3578 | 3579 | 7955 | 12331 | 16707 | 21083 | 25459 | 29835 | 34211 | 37371 | 40054 |
| NZ_LN831034 | 3579 | 3580 | 7956 | 12332 | 16708 | 21084 | 25460 | 29836 | 34212 | 37372 | |
| NZ_LN831034 | 3580 | 3581 | 7957 | 12333 | 16709 | 21085 | 25461 | 29837 | 34213 | 37373 | |
| NZ_LN831034 | 3581 | 3582 | 7958 | 12334 | 16710 | 21086 | 25462 | 29838 | 34214 | 37374 | |
| NZ_LN831034 | 3582 | 3583 | 7959 | 12335 | 16711 | 21087 | 25463 | 29839 | 34215 | 37375 | |
| NZ_LN831034 | 3583 | 3584 | 7960 | 12336 | 16712 | 21088 | 25464 | 29840 | 34216 | 37376 | 40055 |
| NZ_LN831034 | 3584 | 3585 | 7961 | 12337 | 16713 | 21089 | 25465 | 29841 | 34217 | 37377 | 40056 |
| NZ_LN831034 | 3585 | 3586 | 7962 | 12338 | 16714 | 21090 | 25466 | 29842 | 34218 | 37378 | |
| NZ_LN831034 | 3586 | 3587 | 7963 | 12339 | 16715 | 21091 | 25467 | 29843 | 34219 | 37379 | |
| NZ_LN831034 | 3587 | 3588 | 7964 | 12340 | 16716 | 21092 | 25468 | 29844 | 34220 | 37380 | |
| NZ_LN831034 | 3588 | 3589 | 7965 | 12341 | 16717 | 21093 | 25469 | 29845 | 34221 | 37381 | 40057 |
| NZ_LN831034 | 3589 | 3590 | 7966 | 12342 | 16718 | 21094 | 25470 | 29846 | 34222 | | 40058 |
| NZ_LN831034 | 3590 | 3591 | 7967 | 12343 | 16719 | 21095 | 25471 | 29847 | 34223 | 37382 | 40059 |
| NZ_LN831034 | 3591 | 3592 | 7968 | 12344 | 16720 | 21096 | 25472 | 29848 | 34224 | | 40060 |
| NZ_LN831034 | 3592 | 3593 | 7969 | 12345 | 16721 | 21097 | 25473 | 29849 | 34225 | | 40061 |
| NZ_LN831034 | 3593 | 3594 | 7970 | 12346 | 16722 | 21098 | 25474 | 29850 | 34226 | | 40062 |
| NZ_LN831034 | 3594 | 3595 | 7971 | 12347 | 16723 | 21099 | 25475 | 29851 | 34227 | 37383 | 40063 |
| NZ_LN831034 | 3595 | 3596 | 7972 | 12348 | 16724 | 21100 | 25476 | 29852 | 34228 | 37384 | |
| NZ_LN831034 | 3596 | 3597 | 7973 | 12349 | 16725 | 21101 | 25477 | 29853 | 34229 | 37385 | 40064 |
| NZ_LN831034 | 3597 | 3598 | 7974 | 12350 | 16726 | 21102 | 25478 | 29854 | 34230 | | 40065 |
| NZ_LN831034 | 3598 | 3599 | 7975 | 12351 | 16727 | 21103 | 25479 | 29855 | 34231 | 37386 | |
| NZ_LN831034 | 3599 | 3600 | 7976 | 12352 | 16728 | 21104 | 25480 | 29856 | 34232 | | 40066 |
| NZ_LN831034 | 3600 | 3601 | 7977 | 12353 | 16729 | 21105 | 25481 | 29857 | 34233 | 37387 | |
| NZ_LN831034 | 3601 | 3602 | 7978 | 12354 | 16730 | 21106 | 25482 | 29858 | 34234 | 37388 | |
| NZ_LN831034 | 3602 | 3603 | 7979 | 12355 | 16731 | 21107 | 25483 | 29859 | 34235 | | 40067 |
| NZ_LN831034 | 3603 | 3604 | 7980 | 12356 | 16732 | 21108 | 25484 | 29860 | 34236 | | 40068 |
| NZ_LN831034 | 3604 | 3605 | 7981 | 12357 | 16733 | 21109 | 25485 | 29861 | 34237 | 37389 | |
| NZ_LN831034 | 3605 | 3606 | 7982 | 12358 | 16734 | 21110 | 25486 | 29862 | 34238 | 37390 | 40069 |
| NZ_LN831034 | 3606 | 3607 | 7983 | 12359 | 16735 | 21111 | 25487 | 29863 | 34239 | 37391 | |
| NZ_LN831034 | 3607 | 3608 | 7984 | 12360 | 16736 | 21112 | 25488 | 29864 | 34240 | | 40070 |
| NZ_LN831034 | 3608 | 3609 | 7985 | 12361 | 16737 | 21113 | 25489 | 29865 | 34241 | | 40071 |
| NZ_LN831034 | 3609 | 3610 | 7986 | 12362 | 16738 | 21114 | 25490 | 29866 | 34242 | 37392 | |
| NZ_LN831034 | 3610 | 3611 | 7987 | 12363 | 16739 | 21115 | 25491 | 29867 | 34243 | 37393 | |
| NZ_LN831034 | 3611 | 3612 | 7988 | 12364 | 16740 | 21116 | 25492 | 29868 | 34244 | 37394 | 40072 |
| NZ_LN831034 | 3612 | 3613 | 7989 | 12365 | 16741 | 21117 | 25493 | 29869 | 34245 | | 40073 |
| NZ_LN831034 | 3613 | 3614 | 7990 | 12366 | 16742 | 21118 | 25494 | 29870 | 34246 | 37395 | |
| NZ_LN831034 | 3614 | 3615 | 7991 | 12367 | 16743 | 21119 | 25495 | 29871 | 34247 | | 40074 |
| NZ_LN831034 | 3615 | 3616 | 7992 | 12368 | 16744 | 21120 | 25496 | 29872 | 34248 | 37396 | 40075 |
| NZ_LN831034 | 3616 | 3617 | 7993 | 12369 | 16745 | 21121 | 25497 | 29873 | 34249 | 37397 | |
| NZ_LN831034 | 3617 | 3618 | 7994 | 12370 | 16746 | 21122 | 25498 | 29874 | 34250 | | 40076 |
| NZ_LN831034 | 3618 | 3619 | 7995 | 12371 | 16747 | 21123 | 25499 | 29875 | 34251 | | 40077 |
| NZ_LN831034 | 3619 | 3620 | 7996 | 12372 | 16748 | 21124 | 25500 | 29876 | 34252 | 37398 | |
| NZ_LN831034 | 3620 | 3621 | 7997 | 12373 | 16749 | 21125 | 25501 | 29877 | 34253 | 37399 | |
| NZ_LN831034 | 3621 | 3622 | 7998 | 12374 | 16750 | 21126 | 25502 | 29878 | 34254 | 37400 | |
| NZ_LN831034 | 3622 | 3623 | 7999 | 12375 | 16751 | 21127 | 25503 | 29879 | 34255 | 37401 | |
| NZ_LN831034 | 3623 | 3624 | 8000 | 12376 | 16752 | 21128 | 25504 | 29880 | 34256 | 37402 | 40078 |
| NZ_LN831034 | 3624 | 3625 | 8001 | 12377 | 16753 | 21129 | 25505 | 29881 | 34257 | | 40079 |
| NZ_LN831034 | 3625 | 3626 | 8002 | 12378 | 16754 | 21130 | 25506 | 29882 | 34258 | | 40080 |
| NZ_LN831034 | 3626 | 3627 | 8003 | 12379 | 16755 | 21131 | 25507 | 29883 | 34259 | | 40081 |
| NZ_LN831034 | 3627 | 3628 | 8004 | 12380 | 16756 | 21132 | 25508 | 29884 | 34260 | 37403 | |
| NZ_LN831034 | 3628 | 3629 | 8005 | 12381 | 16757 | 21133 | 25509 | 29885 | 34261 | | 40082 |
| NZ_LN831034 | 3629 | 3630 | 8006 | 12382 | 16758 | 21134 | 25510 | 29886 | 34262 | | 40083 |
| NZ_LN831034 | 3630 | 3631 | 8007 | 12383 | 16759 | 21135 | 25511 | 29887 | 34263 | 37404 | 40084 |
| NZ_LN831034 | 3631 | 3632 | 8008 | 12384 | 16760 | 21136 | 25512 | 29888 | 34264 | | 40085 |
| NZ_LN831034 | 3632 | 3633 | 8009 | 12385 | 16761 | 21137 | 25513 | 29889 | 34265 | 37405 | |
| NZ_LN831034 | 3633 | 3634 | 8010 | 12386 | 16762 | 21138 | 25514 | 29890 | 34266 | | 40086 |
| NZ_LN831034 | 3634 | 3635 | 8011 | 12387 | 16763 | 21139 | 25515 | 29891 | 34267 | 37406 | 40087 |
| NZ_LN831034 | 3635 | 3636 | 8012 | 12388 | 16764 | 21140 | 25516 | 29892 | 34268 | 37407 | 40088 |
| NZ_LN831034 | 3636 | 3637 | 8013 | 12389 | 16765 | 21141 | 25517 | 29893 | 34269 | 37408 | |
| NZ_LN831034 | 3637 | 3638 | 8014 | 12390 | 16766 | 21142 | 25518 | 29894 | 34270 | | 40089 |
| NZ_LN831034 | 3638 | 3639 | 8015 | 12391 | 16767 | 21143 | 25519 | 29895 | 34271 | | 40090 |
| NZ_LN831034 | 3639 | 3640 | 8016 | 12392 | 16768 | 21144 | 25520 | 29896 | 34272 | 37409 | |
| NZ_LN831034 | 3640 | 3641 | 8017 | 12393 | 16769 | 21145 | 25521 | 29897 | 34273 | 37410 | |
| NZ_LN831034 | 3641 | 3642 | 8018 | 12394 | 16770 | 21146 | 25522 | 29898 | 34274 | 37411 | |
| NZ_LN831034 | 3642 | 3643 | 8019 | 12395 | 16771 | 21147 | 25523 | 29899 | 34275 | | 40091 |
| NZ_LN831034 | 3643 | 3644 | 8020 | 12396 | 16772 | 21148 | 25524 | 29900 | 34276 | 37412 | |
| NZ_LN831034 | 3644 | 3645 | 8021 | 12397 | 16773 | 21149 | 25525 | 29901 | 34277 | | 40092 |
| NZ_LN831034 | 3645 | 3646 | 8022 | 12398 | 16774 | 21150 | 25526 | 29902 | 34278 | 37413 | |
| NZ_LN831034 | 3646 | 3647 | 8023 | 12399 | 16775 | 21151 | 25527 | 29903 | 34279 | 37414 | |
| NZ_LN831034 | 3647 | 3648 | 8024 | 12400 | 16776 | 21152 | 25528 | 29904 | 34280 | 37415 | 40093 |
| NZ_LN831034 | 3648 | 3649 | 8025 | 12401 | 16777 | 21153 | 25529 | 29905 | 34281 | 37416 | 40094 |
| NZ_LN831034 | 3649 | 3650 | 8026 | 12402 | 16778 | 21154 | 25530 | 29906 | 34282 | | 40095 |
| NZ_LN831034 | 3650 | 3651 | 8027 | 12403 | 16779 | 21155 | 25531 | 29907 | 34283 | 37417 | |
| NZ_LN831034 | 3651 | 3652 | 8028 | 12404 | 16780 | 21156 | 25532 | 29908 | 34284 | 37418 | |
| NZ_LN831034 | 3652 | 3653 | 8029 | 12405 | 16781 | 21157 | 25533 | 29909 | 34285 | 37419 | |
| NZ_LN831034 | 3653 | 3654 | 8030 | 12406 | 16782 | 21158 | 25534 | 29910 | 34286 | | 40096 |
| NZ_LN831034 | 3654 | 3655 | 8031 | 12407 | 16783 | 21159 | 25535 | 29911 | 34287 | 37420 | |
| NZ_LN831034 | 3655 | 3656 | 8032 | 12408 | 16784 | 21160 | 25536 | 29912 | 34288 | | 40097 |
| NZ_LN831034 | 3656 | 3657 | 8033 | 12409 | 16785 | 21161 | 25537 | 29913 | 34289 | 37421 | |
| NZ_LN831034 | 3657 | 3658 | 8034 | 12410 | 16786 | 21162 | 25538 | 29914 | 34290 | 37422 | |
| NZ_LN831034 | 3658 | 3659 | 8035 | 12411 | 16787 | 21163 | 25539 | 29915 | 34291 | 37423 | |
| NZ_LN831034 | 3659 | 3660 | 8036 | 12412 | 16788 | 21164 | 25540 | 29916 | 34292 | 37424 | |
| NZ_LN831034 | 3660 | 3661 | 8037 | 12413 | 16789 | 21165 | 25541 | 29917 | 34293 | | 40098 |
| NZ_LN831034 | 3661 | 3662 | 8038 | 12414 | 16790 | 21166 | 25542 | 29918 | 34294 | | 40099 |
| NZ_LN831034 | 3662 | 3663 | 8039 | 12415 | 16791 | 21167 | 25543 | 29919 | 34295 | 37425 | |
| NZ_LN831034 | 3663 | 3664 | 8040 | 12416 | 16792 | 21168 | 25544 | 29920 | 34296 | | 40100 |
| NZ_LN831034 | 3664 | 3665 | 8041 | 12417 | 16793 | 21169 | 25545 | 29921 | 34297 | 37426 | 40101 |
| NZ_LN831034 | 3665 | 3666 | 8042 | 12418 | 16794 | 21170 | 25546 | 29922 | 34298 | 37427 | |
| NZ_LN831034 | 3666 | 3667 | 8043 | 12419 | 16795 | 21171 | 25547 | 29923 | 34299 | 37428 | |
| NZ_LN831034 | 3667 | 3668 | 8044 | 12420 | 16796 | 21172 | 25548 | 29924 | 34300 | 37429 | 40102 |
| NZ_LN831034 | 3668 | 3669 | 8045 | 12421 | 16797 | 21173 | 25549 | 29925 | 34301 | 37430 | |
| NZ_LN831034 | 3669 | 3670 | 8046 | 12422 | 16798 | 21174 | 25550 | 29926 | 34302 | | 40103 |
| NZ_LN831034 | 3670 | 3671 | 8047 | 12423 | 16799 | 21175 | 25551 | 29927 | 34303 | 37431 | |
| NZ_LN831034 | 3671 | 3672 | 8048 | 12424 | 16800 | 21176 | 25552 | 29928 | 34304 | 37432 | 40104 |
| NC_038504 | 3672 | 3673 | 8049 | 12425 | 16801 | 21177 | 25553 | 29929 | 34305 | 37433 | |
| NC_038504 | 3673 | 3674 | 8050 | 12426 | 16802 | 21178 | 25554 | 29930 | 34306 | | 40105 |
| NC_038504 | 3674 | 3675 | 8051 | 12427 | 16803 | 21179 | 25555 | 29931 | 34307 | 37434 | |
| NC_038504 | 3675 | 3676 | 8052 | 12428 | 16804 | 21180 | 25556 | 29932 | 34308 | 37435 | |
| NC_038504 | 3676 | 3677 | 8053 | 12429 | 16805 | 21181 | 25557 | 29933 | 34309 | 37436 | |
| NC_038504 | 3677 | 3678 | 8054 | 12430 | 16806 | 21182 | 25558 | 29934 | 34310 | | 40106 |
| NC_038504 | 3678 | 3679 | 8055 | 12431 | 16807 | 21183 | 25559 | 29935 | 34311 | 37437 | |
| NC_038504 | 3679 | 3680 | 8056 | 12432 | 16808 | 21184 | 25560 | 29936 | 34312 | 37438 | 40107 |
| NC_038504 | 3680 | 3681 | 8057 | 12433 | 16809 | 21185 | 25561 | 29937 | 34313 | | 40108 |
| NC_038504 | 3681 | 3682 | 8058 | 12434 | 16810 | 21186 | 25562 | 29938 | 34314 | 37439 | |
| NC_038504 | 3682 | 3683 | 8059 | 12435 | 16811 | 21187 | 25563 | 29939 | 34315 | 37440 | 40109 |
| NC_038504 | 3683 | 3684 | 8060 | 12436 | 16812 | 21188 | 25564 | 29940 | 34316 | | 40110 |
| NC_038504 | 3684 | 3685 | 8061 | 12437 | 16813 | 21189 | 25565 | 29941 | 34317 | | 40111 |
| NC_038504 | 3685 | 3686 | 8062 | 12438 | 16814 | 21190 | 25566 | 29942 | 34318 | 37441 | |
| NC_038504 | 3686 | 3687 | 8063 | 12439 | 16815 | 21191 | 25567 | 29943 | 34319 | 37442 | 40112 |
| NC_038504 | 3687 | 3688 | 8064 | 12440 | 16816 | 21192 | 25568 | 29944 | 34320 | | 40113 |
| NC_038504 | 3688 | 3689 | 8065 | 12441 | 16817 | 21193 | 25569 | 29945 | 34321 | 37443 | 40114 |
| NC_038504 | 3689 | 3690 | 8066 | 12442 | 16818 | 21194 | 25570 | 29946 | 34322 | 37444 | |
| NC_038504 | 3690 | 3691 | 8067 | 12443 | 16819 | 21195 | 25571 | 29947 | 34323 | 37445 | |
| NC_038504 | 3691 | 3692 | 8068 | 12444 | 16820 | 21196 | 25572 | 29948 | 34324 | | 40115 |
| NC_038504 | 3692 | 3693 | 8069 | 12445 | 16821 | 21197 | 25573 | 29949 | 34325 | 37446 | 40116 |
| NC_038504 | 3693 | 3694 | 8070 | 12446 | 16822 | 21198 | 25574 | 29950 | 34326 | 37447 | |
| NC_005831 | 3694 | 3695 | 8071 | 12447 | 16823 | 21199 | 25575 | 29951 | 34327 | 37448 | |
| NC_005831 | 3695 | 3696 | 8072 | 12448 | 16824 | 21200 | 25576 | 29952 | 34328 | 37449 | |
| NC_005831 | 3696 | 3697 | 8073 | 12449 | 16825 | 21201 | 25577 | 29953 | 34329 | | 40117 |
| NC_005831 | 3697 | 3698 | 8074 | 12450 | 16826 | 21202 | 25578 | 29954 | 34330 | | 40118 |
| NC_005831 | 3698 | 3699 | 8075 | 12451 | 16827 | 21203 | 25579 | 29955 | 34331 | 37450 | 40119 |
| NC_005831 | 3699 | 3700 | 8076 | 12452 | 16828 | 21204 | 25580 | 29956 | 34332 | 37451 | |
| NC_005831 | 3700 | 3701 | 8077 | 12453 | 16829 | 21205 | 25581 | 29957 | 34333 | | 40120 |
| NC_005831 | 3701 | 3702 | 8078 | 12454 | 16830 | 21206 | 25582 | 29958 | 34334 | 37452 | |
| NC_005831 | 3702 | 3703 | 8079 | 12455 | 16831 | 21207 | 25583 | 29959 | 34335 | 37453 | |
| NC_005831 | 3703 | 3704 | 8080 | 12456 | 16832 | 21208 | 25584 | 29960 | 34336 | | 40121 |
| NC_005831 | 3704 | 3705 | 8081 | 12457 | 16833 | 21209 | 25585 | 29961 | 34337 | 37454 | |
| NC_005831 | 3705 | 3706 | 8082 | 12458 | 16834 | 21210 | 25586 | 29962 | 34338 | 37455 | 40122 |
| NC_005831 | 3706 | 3707 | 8083 | 12459 | 16835 | 21211 | 25587 | 29963 | 34339 | | 40123 |
| NC_005831 | 3707 | 3708 | 8084 | 12460 | 16836 | 21212 | 25588 | 29964 | 34340 | | 40124 |
| NC_005831 | 3708 | 3709 | 8085 | 12461 | 16837 | 21213 | 25589 | 29965 | 34341 | 37456 | |
| NC_005831 | 3709 | 3710 | 8086 | 12462 | 16838 | 21214 | 25590 | 29966 | 34342 | 37457 | |
| NC_005831 | 3710 | 3711 | 8087 | 12463 | 16839 | 21215 | 25591 | 29967 | 34343 | | 40125 |
| NC_005831 | 3711 | 3712 | 8088 | 12464 | 16840 | 21216 | 25592 | 29968 | 34344 | 37458 | |
| NC_005831 | 3712 | 3713 | 8089 | 12465 | 16841 | 21217 | 25593 | 29969 | 34345 | 37459 | |
| NC_005831 | 3713 | 3714 | 8090 | 12466 | 16842 | 21218 | 25594 | 29970 | 34346 | 37460 | |
| NC_005831 | 3714 | 3715 | 8091 | 12467 | 16843 | 21219 | 25595 | 29971 | 34347 | | 40126 |
| NC_005831 | 3715 | 3716 | 8092 | 12468 | 16844 | 21220 | 25596 | 29972 | 34348 | 37461 | |
| NC_005831 | 3716 | 3717 | 8093 | 12469 | 16845 | 21221 | 25597 | 29973 | 34349 | 37462 | |
| NC_005831 | 3717 | 3718 | 8094 | 12470 | 16846 | 21222 | 25598 | 29974 | 34350 | 37463 | |
| NC_005831 | 3718 | 3719 | 8095 | 12471 | 16847 | 21223 | 25599 | 29975 | 34351 | 37464 | |
| NC_005831 | 3719 | 3720 | 8096 | 12472 | 16848 | 21224 | 25600 | 29976 | 34352 | | 40127 |
| NC_005831 | 3720 | 3721 | 8097 | 12473 | 16849 | 21225 | 25601 | 29977 | 34353 | 37465 | |
| NC_005831 | 3721 | 3722 | 8098 | 12474 | 16850 | 21226 | 25602 | 29978 | 34354 | 37466 | |
| NC_005831 | 3722 | 3723 | 8099 | 12475 | 16851 | 21227 | 25603 | 29979 | 34355 | 37467 | 40128 |
| NC_005831 | 3723 | 3724 | 8100 | 12476 | 16852 | 21228 | 25604 | 29980 | 34356 | | 40129 |
| NC_005831 | 3724 | 3725 | 8101 | 12477 | 16853 | 21229 | 25605 | 29981 | 34357 | 37468 | |
| NC_005831 | 3725 | 3726 | 8102 | 12478 | 16854 | 21230 | 25606 | 29982 | 34358 | 37469 | |
| NC_005831 | 3726 | 3727 | 8103 | 12479 | 16855 | 21231 | 25607 | 29983 | 34359 | | 40130 |
| NC_005831 | 3727 | 3728 | 8104 | 12480 | 16856 | 21232 | 25608 | 29984 | 34360 | 37470 | |
| NC_005831 | 3728 | 3729 | 8105 | 12481 | 16857 | 21233 | 25609 | 29985 | 34361 | 37471 | |
| NC_005831 | 3729 | 3730 | 8106 | 12482 | 16858 | 21234 | 25610 | 29986 | 34362 | | 40131 |
| NC_005831 | 3730 | 3731 | 8107 | 12483 | 16859 | 21235 | 25611 | 29987 | 34363 | | 40132 |
| NC_005831 | 3731 | 3732 | 8108 | 12484 | 16860 | 21236 | 25612 | 29988 | 34364 | | 40133 |
| NC_005831 | 3732 | 3733 | 8109 | 12485 | 16861 | 21237 | 25613 | 29989 | 34365 | | 40134 |
| NC_005831 | 3733 | 3734 | 8110 | 12486 | 16862 | 21238 | 25614 | 29990 | 34366 | | 40135 |
| NC_005831 | 3734 | 3735 | 8111 | 12487 | 16863 | 21239 | 25615 | 29991 | 34367 | 37472 | 40136 |
| NC_005831 | 3735 | 3736 | 8112 | 12488 | 16864 | 21240 | 25616 | 29992 | 34368 | 37473 | |
| NC_005831 | 3736 | 3737 | 8113 | 12489 | 16865 | 21241 | 25617 | 29993 | 34369 | | 40137 |
| NC_005831 | 3737 | 3738 | 8114 | 12490 | 16866 | 21242 | 25618 | 29994 | 34370 | 37474 | |
| NC_005831 | 3738 | 3739 | 8115 | 12491 | 16867 | 21243 | 25619 | 29995 | 34371 | | 40138 |
| NC_005831 | 3739 | 3740 | 8116 | 12492 | 16868 | 21244 | 25620 | 29996 | 34372 | | 40139 |
| NC_005831 | 3740 | 3741 | 8117 | 12493 | 16869 | 21245 | 25621 | 29997 | 34373 | 37475 | |
| NC_005831 | 3741 | 3742 | 8118 | 12494 | 16870 | 21246 | 25622 | 29998 | 34374 | 37476 | |
| NC_005831 | 3742 | 3743 | 8119 | 12495 | 16871 | 21247 | 25623 | 29999 | 34375 | 37477 | |
| NC_005831 | 3743 | 3744 | 8120 | 12496 | 16872 | 21248 | 25624 | 30000 | 34376 | | 40140 |
| NC_005831 | 3744 | 3745 | 8121 | 12497 | 16873 | 21249 | 25625 | 30001 | 34377 | 37478 | |
| NC_005831 | 3745 | 3746 | 8122 | 12498 | 16874 | 21250 | 25626 | 30002 | 34378 | 37479 | |
| NC_005831 | 3746 | 3747 | 8123 | 12499 | 16875 | 21251 | 25627 | 30003 | 34379 | 37480 | |
| NC_001356 | 3747 | 3748 | 8124 | 12500 | 16876 | 21252 | 25628 | 30004 | 34380 | | 40141 |
| NC_001356 | 3748 | 3749 | 8125 | 12501 | 16877 | 21253 | 25629 | 30005 | 34381 | 37481 | |
| NC_001356 | 3749 | 3750 | 8126 | 12502 | 16878 | 21254 | 25630 | 30006 | 34382 | 37482 | 40142 |
| NC_001356 | 3750 | 3751 | 8127 | 12503 | 16879 | 21255 | 25631 | 30007 | 34383 | 37483 | |
| NC_001356 | 3751 | 3752 | 8128 | 12504 | 16880 | 21256 | 25632 | 30008 | 34384 | | 40143 |
| NC_001356 | 3752 | 3753 | 8129 | 12505 | 16881 | 21257 | 25633 | 30009 | 34385 | 37484 | |
| NC_001356 | 3753 | 3754 | 8130 | 12506 | 16882 | 21258 | 25634 | 30010 | 34386 | 37485 | |
| NC_001356 | 3754 | 3755 | 8131 | 12507 | 16883 | 21259 | 25635 | 30011 | 34387 | | 40144 |
| NC_001356 | 3755 | 3756 | 8132 | 12508 | 16884 | 21260 | 25636 | 30012 | 34388 | 37486 | 40145 |
| NC_001356 | 3756 | 3757 | 8133 | 12509 | 16885 | 21261 | 25637 | 30013 | 34389 | 37487 | 40146 |
| NC_001356 | 3757 | 3758 | 8134 | 12510 | 16886 | 21262 | 25638 | 30014 | 34390 | 37488 | 40147 |
| NC_001356 | 3758 | 3759 | 8135 | 12511 | 16887 | 21263 | 25639 | 30015 | 34391 | | 40148 |
| NC_001356 | 3759 | 3760 | 8136 | 12512 | 16888 | 21264 | 25640 | 30016 | 34392 | | 40149 |
| NC_001356 | 3760 | 3761 | 8137 | 12513 | 16889 | 21265 | 25641 | 30017 | 34393 | | 40150 |
| NC_001356 | 3761 | 3762 | 8138 | 12514 | 16890 | 21266 | 25642 | 30018 | 34394 | | 40151 |
| NC_001356 | 3762 | 3763 | 8139 | 12515 | 16891 | 21267 | 25643 | 30019 | 34395 | 37489 | |
| NC_001356 | 3763 | 3764 | 8140 | 12516 | 16892 | 21268 | 25644 | 30020 | 34396 | 37490 | |
| NC_001356 | 3764 | 3765 | 8141 | 12517 | 16893 | 21269 | 25645 | 30021 | 34397 | | 40152 |
| NC_001356 | 3765 | 3766 | 8142 | 12518 | 16894 | 21270 | 25646 | 30022 | 34398 | | 40153 |
| NC_038525 | 3766 | 3767 | 8143 | 12519 | 16895 | 21271 | 25647 | 30023 | 34399 | 37491 | |
| NC_038525 | 3767 | 3768 | 8144 | 12520 | 16896 | 21272 | 25648 | 30024 | 34400 | | 40154 |
| NC_038525 | 3768 | 3769 | 8145 | 12521 | 16897 | 21273 | 25649 | 30025 | 34401 | | 40155 |
| NC_038525 | 3769 | 3770 | 8146 | 12522 | 16898 | 21274 | 25650 | 30026 | 34402 | | 40156 |
| NC_038525 | 3770 | 3771 | 8147 | 12523 | 16899 | 21275 | 25651 | 30027 | 34403 | 37492 | |
| NC_038525 | 3771 | 3772 | 8148 | 12524 | 16900 | 21276 | 25652 | 30028 | 34404 | | 40157 |
| NC_038525 | 3772 | 3773 | 8149 | 12525 | 16901 | 21277 | 25653 | 30029 | 34405 | | 40158 |
| NC_038525 | 3773 | 3774 | 8150 | 12526 | 16902 | 21278 | 25654 | 30030 | 34406 | | 40159 |
| NC_038525 | 3774 | 3775 | 8151 | 12527 | 16903 | 21279 | 25655 | 30031 | 34407 | 37493 | 40160 |
| NC_038525 | 3775 | 3776 | 8152 | 12528 | 16904 | 21280 | 25656 | 30032 | 34408 | 37494 | |
| NC_038525 | 3776 | 3777 | 8153 | 12529 | 16905 | 21281 | 25657 | 30033 | 34409 | 37495 | |
| NC_038525 | 3777 | 3778 | 8154 | 12530 | 16906 | 21282 | 25658 | 30034 | 34410 | | 40161 |
| NC_038525 | 3778 | 3779 | 8155 | 12531 | 16907 | 21283 | 25659 | 30035 | 34411 | | 40162 |
| NC_002211 | 3779 | 3780 | 8156 | 12532 | 16908 | 21284 | 25660 | 30036 | 34412 | | 40163 |
| NC_002211 | 3780 | 3781 | 8157 | 12533 | 16909 | 21285 | 25661 | 30037 | 34413 | | 40164 |
| NC_002211 | 3781 | 3782 | 8158 | 12534 | 16910 | 21286 | 25662 | 30038 | 34414 | 37496 | |
| NC_002211 | 3782 | 3783 | 8159 | 12535 | 16911 | 21287 | 25663 | 30039 | 34415 | 37497 | 40165 |
| NC_001489 | 3783 | 3784 | 8160 | 12536 | 16912 | 21288 | 25664 | 30040 | 34416 | 37498 | |
| NC_001489 | 3784 | 3785 | 8161 | 12537 | 16913 | 21289 | 25665 | 30041 | 34417 | | 40166 |
| NC_001489 | 3785 | 3786 | 8162 | 12538 | 16914 | 21290 | 25666 | 30042 | 34418 | 37499 | |
| NC_001489 | 3786 | 3787 | 8163 | 12539 | 16915 | 21291 | 25667 | 30043 | 34419 | 37500 | 40167 |
| NC_001489 | 3787 | 3788 | 8164 | 12540 | 16916 | 21292 | 25668 | 30044 | 34420 | 37501 | |
| NC_001489 | 3788 | 3789 | 8165 | 12541 | 16917 | 21293 | 25669 | 30045 | 34421 | 37502 | |
| NC_001489 | 3789 | 3790 | 8166 | 12542 | 16918 | 21294 | 25670 | 30046 | 34422 | 37503 | |
| NC_001489 | 3790 | 3791 | 8167 | 12543 | 16919 | 21295 | 25671 | 30047 | 34423 | 37504 | |
| NC_001489 | 3791 | 3792 | 8168 | 12544 | 16920 | 21296 | 25672 | 30048 | 34424 | | 40168 |
| NC_001489 | 3792 | 3793 | 8169 | 12545 | 16921 | 21297 | 25673 | 30049 | 34425 | | 40169 |
| NC_001489 | 3793 | 3794 | 8170 | 12546 | 16922 | 21298 | 25674 | 30050 | 34426 | 37505 | |
| NC_001489 | 3794 | 3795 | 8171 | 12547 | 16923 | 21299 | 25675 | 30051 | 34427 | | 40170 |
| NC_001489 | 3795 | 3796 | 8172 | 12548 | 16924 | 21300 | 25676 | 30052 | 34428 | | 40171 |
| NC_001489 | 3796 | 3797 | 8173 | 12549 | 16925 | 21301 | 25677 | 30053 | 34429 | 37506 | 40172 |
| NC_001489 | 3797 | 3798 | 8174 | 12550 | 16926 | 21302 | 25678 | 30054 | 34430 | | 40173 |
| NC_001489 | 3798 | 3799 | 8175 | 12551 | 16927 | 21303 | 25679 | 30055 | 34431 | 37507 | |
| NC_001489 | 3799 | 3800 | 8176 | 12552 | 16928 | 21304 | 25680 | 30056 | 34432 | 37508 | |
| NC_001489 | 3800 | 3801 | 8177 | 12553 | 16929 | 21305 | 25681 | 30057 | 34433 | 37509 | |
| NC_001489 | 3801 | 3802 | 8178 | 12554 | 16930 | 21306 | 25682 | 30058 | 34434 | 37510 | |
| NC_007366 | 3802 | 3803 | 8179 | 12555 | 16931 | 21307 | 25683 | 30059 | 34435 | 37511 | |
| NC_007366 | 3803 | 3804 | 8180 | 12556 | 16932 | 21308 | 25684 | 30060 | 34436 | | 40174 |
| NC_007366 | 3804 | 3805 | 8181 | 12557 | 16933 | 21309 | 25685 | 30061 | 34437 | 37512 | |
| NC_007366 | 3805 | 3806 | 8182 | 12558 | 16934 | 21310 | 25686 | 30062 | 34438 | | 40175 |
| NC_007366 | 3806 | 3807 | 8183 | 12559 | 16935 | 21311 | 25687 | 30063 | 34439 | 37513 | 40176 |
| NC_007366 | 3807 | 3808 | 8184 | 12560 | 16936 | 21312 | 25688 | 30064 | 34440 | 37514 | |
| NC_007366 | 3808 | 3809 | 8185 | 12561 | 16937 | 21313 | 25689 | 30065 | 34441 | 37515 | 40177 |
| NC_005134 | 3809 | 3810 | 8186 | 12562 | 16938 | 21314 | 25690 | 30066 | 34442 | 37516 | |
| NC_005134 | 3810 | 3811 | 8187 | 12563 | 16939 | 21315 | 25691 | 30067 | 34443 | | 40178 |
| NC_005134 | 3811 | 3812 | 8188 | 12564 | 16940 | 21316 | 25692 | 30068 | 34444 | | 40179 |
| NC_005134 | 3812 | 3813 | 8189 | 12565 | 16941 | 21317 | 25693 | 30069 | 34445 | 37517 | |
| NC_005134 | 3813 | 3814 | 8190 | 12566 | 16942 | 21318 | 25694 | 30070 | 34446 | | 40180 |
| NC_005134 | 3814 | 3815 | 8191 | 12567 | 16943 | 21319 | 25695 | 30071 | 34447 | 37518 | |
| NC_005134 | 3815 | 3816 | 8192 | 12568 | 16944 | 21320 | 25696 | 30072 | 34448 | | 40181 |
| NC_005134 | 3816 | 3817 | 8193 | 12569 | 16945 | 21321 | 25697 | 30073 | 34449 | | 40182 |
| NC_005134 | 3817 | 3818 | 8194 | 12570 | 16946 | 21322 | 25698 | 30074 | 34450 | | 40183 |
| NC_005134 | 3818 | 3819 | 8195 | 12571 | 16947 | 21323 | 25699 | 30075 | 34451 | 37519 | 40184 |
| NC_005134 | 3819 | 3820 | 8196 | 12572 | 16948 | 21324 | 25700 | 30076 | 34452 | | 40185 |
| NC_005134 | 3820 | 3821 | 8197 | 12573 | 16949 | 21325 | 25701 | 30077 | 34453 | | 40186 |
| NC_005134 | 3821 | 3822 | 8198 | 12574 | 16950 | 21326 | 25702 | 30078 | 34454 | | 40187 |
| NC_005134 | 3822 | 3823 | 8199 | 12575 | 16951 | 21327 | 25703 | 30079 | 34455 | 37520 | |
| NC_007382 | 3823 | 3824 | 8200 | 12576 | 16952 | 21328 | 25704 | 30080 | 34456 | 37521 | |
| NC_007382 | 3824 | 3825 | 8201 | 12577 | 16953 | 21329 | 25705 | 30081 | 34457 | | 40188 |
| NC_007382 | 3825 | 3826 | 8202 | 12578 | 16954 | 21330 | 25706 | 30082 | 34458 | 37522 | |
| NC_007382 | 3826 | 3827 | 8203 | 12579 | 16955 | 21331 | 25707 | 30083 | 34459 | 37523 | |
| NC_007382 | 3827 | 3828 | 8204 | 12580 | 16956 | 21332 | 25708 | 30084 | 34460 | | 40189 |
| NC_001664 | 3828 | 3829 | 8205 | 12581 | 16957 | 21333 | 25709 | 30085 | 34461 | 37524 | 40190 |
| NC_001664 | 3829 | 3830 | 8206 | 12582 | 16958 | 21334 | 25710 | 30086 | 34462 | 37525 | 40191 |
| NC_001664 | 3830 | 3831 | 8207 | 12583 | 16959 | 21335 | 25711 | 30087 | 34463 | 37526 | 40192 |
| NC_001664 | 3831 | 3832 | 8208 | 12584 | 16960 | 21336 | 25712 | 30088 | 34464 | 37527 | 40193 |
| NC_001664 | 3832 | 3833 | 8209 | 12585 | 16961 | 21337 | 25713 | 30089 | 34465 | 37528 | 40194 |
| NC_001664 | 3833 | 3834 | 8210 | 12586 | 16962 | 21338 | 25714 | 30090 | 34466 | 37529 | |
| NC_001664 | 3834 | 3835 | 8211 | 12587 | 16963 | 21339 | 25715 | 30091 | 34467 | 37530 | |
| NC_001664 | 3835 | 3836 | 8212 | 12588 | 16964 | 21340 | 25716 | 30092 | 34468 | 37531 | |
| NC_001664 | 3836 | 3837 | 8213 | 12589 | 16965 | 21341 | 25717 | 30093 | 34469 | 37532 | |
| NC_001664 | 3837 | 3838 | 8214 | 12590 | 16966 | 21342 | 25718 | 30094 | 34470 | 37533 | |
| NC_001664 | 3838 | 3839 | 8215 | 12591 | 16967 | 21343 | 25719 | 30095 | 34471 | | 40195 |
| NC_001664 | 3839 | 3840 | 8216 | 12592 | 16968 | 21344 | 25720 | 30096 | 34472 | | 40196 |
| NC_001664 | 3840 | 3841 | 8217 | 12593 | 16969 | 21345 | 25721 | 30097 | 34473 | 37534 | 40197 |
| NC_001664 | 3841 | 3842 | 8218 | 12594 | 16970 | 21346 | 25722 | 30098 | 34474 | 37535 | 40198 |
| NC_001664 | 3842 | 3843 | 8219 | 12595 | 16971 | 21347 | 25723 | 30099 | 34475 | 37536 | |
| NC_001664 | 3843 | 3844 | 8220 | 12596 | 16972 | 21348 | 25724 | 30100 | 34476 | | 40199 |
| NC_001664 | 3844 | 3845 | 8221 | 12597 | 16973 | 21349 | 25725 | 30101 | 34477 | | 40200 |
| NC_001664 | 3845 | 3846 | 8222 | 12598 | 16974 | 21350 | 25726 | 30102 | 34478 | | 40201 |
| NC_001664 | 3846 | 3847 | 8223 | 12599 | 16975 | 21351 | 25727 | 30103 | 34479 | 37537 | 40202 |
| NC_001664 | 3847 | 3848 | 8224 | 12600 | 16976 | 21352 | 25728 | 30104 | 34480 | | 40203 |
| NC_001664 | 3848 | 3849 | 8225 | 12601 | 16977 | 21353 | 25729 | 30105 | 34481 | 37538 | 40204 |
| NC_001664 | 3849 | 3850 | 8226 | 12602 | 16978 | 21354 | 25730 | 30106 | 34482 | 37539 | |
| NC_001664 | 3850 | 3851 | 8227 | 12603 | 16979 | 21355 | 25731 | 30107 | 34483 | | 40205 |
| NC_001664 | 3851 | 3852 | 8228 | 12604 | 16980 | 21356 | 25732 | 30108 | 34484 | | 40206 |
| NC_001664 | 3852 | 3853 | 8229 | 12605 | 16981 | 21357 | 25733 | 30109 | 34485 | | 40207 |
| NC_001664 | 3853 | 3854 | 8230 | 12606 | 16982 | 21358 | 25734 | 30110 | 34486 | 37540 | 40208 |
| NC_001664 | 3854 | 3855 | 8231 | 12607 | 16983 | 21359 | 25735 | 30111 | 34487 | 37541 | |
| NC_001664 | 3855 | 3856 | 8232 | 12608 | 16984 | 21360 | 25736 | 30112 | 34488 | 37542 | |
| NC_001664 | 3856 | 3857 | 8233 | 12609 | 16985 | 21361 | 25737 | 30113 | 34489 | 37543 | |
| NC_001664 | 3857 | 3858 | 8234 | 12610 | 16986 | 21362 | 25738 | 30114 | 34490 | 37544 | 40209 |
| NC_001664 | 3858 | 3859 | 8235 | 12611 | 16987 | 21363 | 25739 | 30115 | 34491 | 37545 | 40210 |
| NC_001664 | 3859 | 3860 | 8236 | 12612 | 16988 | 21364 | 25740 | 30116 | 34492 | 37546 | |
| NC_002206 | 3860 | 3861 | 8237 | 12613 | 16989 | 21365 | 25741 | 30117 | 34493 | 37547 | |
| NC_002206 | 3861 | 3862 | 8238 | 12614 | 16990 | 21366 | 25742 | 30118 | 34494 | 37548 | |
| NC_002206 | 3862 | 3863 | 8239 | 12615 | 16991 | 21367 | 25743 | 30119 | 34495 | 37549 | |
| NC_002206 | 3863 | 3864 | 8240 | 12616 | 16992 | 21368 | 25744 | 30120 | 34496 | 37550 | |
| NC_002206 | 3864 | 3865 | 8241 | 12617 | 16993 | 21369 | 25745 | 30121 | 34497 | 37551 | |
| NC_002206 | 3865 | 3866 | 8242 | 12618 | 16994 | 21370 | 25746 | 30122 | 34498 | 37552 | |
| NC_026433 | 3866 | 3867 | 8243 | 12619 | 16995 | 21371 | 25747 | 30123 | 34499 | | 40211 |
| NC_026433 | 3867 | 3868 | 8244 | 12620 | 16996 | 21372 | 25748 | 30124 | 34500 | | 40212 |
| NC_026433 | 3868 | 3869 | 8245 | 12621 | 16997 | 21373 | 25749 | 30125 | 34501 | 37553 | 40213 |
| NC_026433 | 3869 | 3870 | 8246 | 12622 | 16998 | 21374 | 25750 | 30126 | 34502 | 37554 | |
| NC_026433 | 3870 | 3871 | 8247 | 12623 | 16999 | 21375 | 25751 | 30127 | 34503 | 37555 | 40214 |
| NC_000898 | 3871 | 3872 | 8248 | 12624 | 17000 | 21376 | 25752 | 30128 | 34504 | | 40215 |
| NC_000898 | 3872 | 3873 | 8249 | 12625 | 17001 | 21377 | 25753 | 30129 | 34505 | 37556 | 40216 |
| NC_000898 | 3873 | 3874 | 8250 | 12626 | 17002 | 21378 | 25754 | 30130 | 34506 | 37557 | 40217 |
| NC_000898 | 3874 | 3875 | 8251 | 12627 | 17003 | 21379 | 25755 | 30131 | 34507 | 37558 | 40218 |
| NC_000898 | 3875 | 3876 | 8252 | 12628 | 17004 | 21380 | 25756 | 30132 | 34508 | | 40219 |
| NC_000898 | 3876 | 3877 | 8253 | 12629 | 17005 | 21381 | 25757 | 30133 | 34509 | 37559 | |
| NC_000898 | 3877 | 3878 | 8254 | 12630 | 17006 | 21382 | 25758 | 30134 | 34510 | 37560 | |
| NC_000898 | 3878 | 3879 | 8255 | 12631 | 17007 | 21383 | 25759 | 30135 | 34511 | | 40220 |
| NC_000898 | 3879 | 3880 | 8256 | 12632 | 17008 | 21384 | 25760 | 30136 | 34512 | | 40221 |
| NC_000898 | 3880 | 3881 | 8257 | 12633 | 17009 | 21385 | 25761 | 30137 | 34513 | 37561 | 40222 |
| NC_000898 | 3881 | 3882 | 8258 | 12634 | 17010 | 21386 | 25762 | 30138 | 34514 | | 40223 |
| NC_000898 | 3882 | 3883 | 8259 | 12635 | 17011 | 21387 | 25763 | 30139 | 34515 | 37562 | |
| NC_000898 | 3883 | 3884 | 8260 | 12636 | 17012 | 21388 | 25764 | 30140 | 34516 | | 40224 |
| NC_000898 | 3884 | 3885 | 8261 | 12637 | 17013 | 21389 | 25765 | 30141 | 34517 | | 40225 |
| NC_000898 | 3885 | 3886 | 8262 | 12638 | 17014 | 21390 | 25766 | 30142 | 34518 | | 40226 |
| NC_000898 | 3886 | 3887 | 8263 | 12639 | 17015 | 21391 | 25767 | 30143 | 34519 | 37563 | |
| NC_000898 | 3887 | 3888 | 8264 | 12640 | 17016 | 21392 | 25768 | 30144 | 34520 | | 40227 |
| NC_000898 | 3888 | 3889 | 8265 | 12641 | 17017 | 21393 | 25769 | 30145 | 34521 | 37564 | |
| NC_000898 | 3889 | 3890 | 8266 | 12642 | 17018 | 21394 | 25770 | 30146 | 34522 | 37565 | |
| NC_000898 | 3890 | 3891 | 8267 | 12643 | 17019 | 21395 | 25771 | 30147 | 34523 | 37566 | 40228 |
| NC_000898 | 3891 | 3892 | 8268 | 12644 | 17020 | 21396 | 25772 | 30148 | 34524 | 37567 | |
| NC_000898 | 3892 | 3893 | 8269 | 12645 | 17021 | 21397 | 25773 | 30149 | 34525 | | 40229 |
| NC_000898 | 3893 | 3894 | 8270 | 12646 | 17022 | 21398 | 25774 | 30150 | 34526 | 37568 | |
| NC_000898 | 3894 | 3895 | 8271 | 12647 | 17023 | 21399 | 25775 | 30151 | 34527 | | 40230 |
| NC_000898 | 3895 | 3896 | 8272 | 12648 | 17024 | 21400 | 25776 | 30152 | 34528 | 37569 | |
| NC_000898 | 3896 | 3897 | 8273 | 12649 | 17025 | 21401 | 25777 | 30153 | 34529 | 37570 | |
| NC_000898 | 3897 | 3898 | 8274 | 12650 | 17026 | 21402 | 25778 | 30154 | 34530 | 37571 | |
| NC_000898 | 3898 | 3899 | 8275 | 12651 | 17027 | 21403 | 25779 | 30155 | 34531 | 37572 | |
| NC_000898 | 3899 | 3900 | 8276 | 12652 | 17028 | 21404 | 25780 | 30156 | 34532 | | 40231 |
| NC_000898 | 3900 | 3901 | 8277 | 12653 | 17029 | 21405 | 25781 | 30157 | 34533 | | 40232 |
| NC_000898 | 3901 | 3902 | 8278 | 12654 | 17030 | 21406 | 25782 | 30158 | 34534 | 37573 | 40233 |
| NC_000898 | 3902 | 3903 | 8279 | 12655 | 17031 | 21407 | 25783 | 30159 | 34535 | 37574 | |
| NC_000898 | 3903 | 3904 | 8280 | 12656 | 17032 | 21408 | 25784 | 30160 | 34536 | 37575 | 40234 |
| NC_000898 | 3904 | 3905 | 8281 | 12657 | 17033 | 21409 | 25785 | 30161 | 34537 | | 40235 |
| NC_000898 | 3905 | 3906 | 8282 | 12658 | 17034 | 21410 | 25786 | 30162 | 34538 | 37576 | 40236 |
| NC_002016 | 3906 | 3907 | 8283 | 12659 | 17035 | 21411 | 25787 | 30163 | 34539 | 37577 | 40237 |
| NC_002016 | 3907 | 3908 | 8284 | 12660 | 17036 | 21412 | 25788 | 30164 | 34540 | 37578 | |
| NC_026432 | 3908 | 3909 | 8285 | 12661 | 17037 | 21413 | 25789 | 30165 | 34541 | | 40238 |
| NC_026432 | 3909 | 3910 | 8286 | 12662 | 17038 | 21414 | 25790 | 30166 | 34542 | 37579 | 40239 |
| NC_026432 | 3910 | 3911 | 8287 | 12663 | 17039 | 21415 | 25791 | 30167 | 34543 | 37580 | |
| NC_001595 | 3911 | 3912 | 8288 | 12664 | 17040 | 21416 | 25792 | 30168 | 34544 | | 40240 |
| NC_001595 | 3912 | 3913 | 8289 | 12665 | 17041 | 21417 | 25793 | 30169 | 34545 | | 40241 |
| NC_001595 | 3913 | 3914 | 8290 | 12666 | 17042 | 21418 | 25794 | 30170 | 34546 | 37581 | |
| NC_001595 | 3914 | 3915 | 8291 | 12667 | 17043 | 21419 | 25795 | 30171 | 34547 | 37582 | 40242 |
| NC_001595 | 3915 | 3916 | 8292 | 12668 | 17044 | 21420 | 25796 | 30172 | 34548 | 37583 | 40243 |
| NC_001595 | 3916 | 3917 | 8293 | 12669 | 17045 | 21421 | 25797 | 30173 | 34549 | 37584 | |
| NC_001595 | 3917 | 3918 | 8294 | 12670 | 17046 | 21422 | 25798 | 30174 | 34550 | 37585 | 40244 |
| NC_001595 | 3918 | 3919 | 8295 | 12671 | 17047 | 21423 | 25799 | 30175 | 34551 | 37586 | |
| NC_001595 | 3919 | 3920 | 8296 | 12672 | 17048 | 21424 | 25800 | 30176 | 34552 | | 40245 |
| NC_001595 | 3920 | 3921 | 8297 | 12673 | 17049 | 21425 | 25801 | 30177 | 34553 | 37587 | 40246 |
| NC_001595 | 3921 | 3922 | 8298 | 12674 | 17050 | 21426 | 25802 | 30178 | 34554 | | 40247 |
| NC_001595 | 3922 | 3923 | 8299 | 12675 | 17051 | 21427 | 25803 | 30179 | 34555 | 37588 | |
| NC_001595 | 3923 | 3924 | 8300 | 12676 | 17052 | 21428 | 25804 | 30180 | 34556 | 37589 | |
| NC_001595 | 3924 | 3925 | 8301 | 12677 | 17053 | 21429 | 25805 | 30181 | 34557 | 37590 | |
| NC_001595 | 3925 | 3926 | 8302 | 12678 | 17054 | 21430 | 25806 | 30182 | 34558 | 37591 | |
| NC_001595 | 3926 | 3927 | 8303 | 12679 | 17055 | 21431 | 25807 | 30183 | 34559 | 37592 | |
| NC_001593 | 3927 | 3928 | 8304 | 12680 | 17056 | 21432 | 25808 | 30184 | 34560 | 37593 | 40248 |
| NC_001593 | 3928 | 3929 | 8305 | 12681 | 17057 | 21433 | 25809 | 30185 | 34561 | | 40249 |
| NC_001593 | 3929 | 3930 | 8306 | 12682 | 17058 | 21434 | 25810 | 30186 | 34562 | 37594 | 40250 |
| NC_001593 | 3930 | 3931 | 8307 | 12683 | 17059 | 21435 | 25811 | 30187 | 34563 | 37595 | 40251 |
| NC_001593 | 3931 | 3932 | 8308 | 12684 | 17060 | 21436 | 25812 | 30188 | 34564 | 37596 | |
| NC_001593 | 3932 | 3933 | 8309 | 12685 | 17061 | 21437 | 25813 | 30189 | 34565 | 37597 | |
| NC_001593 | 3933 | 3934 | 8310 | 12686 | 17062 | 21438 | 25814 | 30190 | 34566 | 37598 | |
| NC_001593 | 3934 | 3935 | 8311 | 12687 | 17063 | 21439 | 25815 | 30191 | 34567 | | 40252 |
| NC_001593 | 3935 | 3936 | 8312 | 12688 | 17064 | 21440 | 25816 | 30192 | 34568 | 37599 | 40253 |
| NC_001593 | 3936 | 3937 | 8313 | 12689 | 17065 | 21441 | 25817 | 30193 | 34569 | | 40254 |
| NC_001593 | 3937 | 3938 | 8314 | 12690 | 17066 | 21442 | 25818 | 30194 | 34570 | 37600 | |
| NC_001593 | 3938 | 3939 | 8315 | 12691 | 17067 | 21443 | 25819 | 30195 | 34571 | 37601 | 40255 |
| NC_001593 | 3939 | 3940 | 8316 | 12692 | 17068 | 21444 | 25820 | 30196 | 34572 | | 40256 |
| NC_001593 | 3940 | 3941 | 8317 | 12693 | 17069 | 21445 | 25821 | 30197 | 34573 | 37602 | 40257 |
| NC_001593 | 3941 | 3942 | 8318 | 12694 | 17070 | 21446 | 25822 | 30198 | 34574 | | 40258 |
| NC_001593 | 3942 | 3943 | 8319 | 12695 | 17071 | 21447 | 25823 | 30199 | 34575 | 37603 | 40259 |
| NC_001593 | 3943 | 3944 | 8320 | 12696 | 17072 | 21448 | 25824 | 30200 | 34576 | | 40260 |
| NC_038311 | 3944 | 3945 | 8321 | 12697 | 17073 | 21449 | 25825 | 30201 | 34577 | | 40261 |
| NC_038311 | 3945 | 3946 | 8322 | 12698 | 17074 | 21450 | 25826 | 30202 | 34578 | 37604 | 40262 |
| NC_038311 | 3946 | 3947 | 8323 | 12699 | 17075 | 21451 | 25827 | 30203 | 34579 | | 40263 |
| NC_038311 | 3947 | 3948 | 8324 | 12700 | 17076 | 21452 | 25828 | 30204 | 34580 | | 40264 |
| NC_038311 | 3948 | 3949 | 8325 | 12701 | 17077 | 21453 | 25829 | 30205 | 34581 | 37605 | |
| NC_038311 | 3949 | 3950 | 8326 | 12702 | 17078 | 21454 | 25830 | 30206 | 34582 | 37606 | |
| NC_038311 | 3950 | 3951 | 8327 | 12703 | 17079 | 21455 | 25831 | 30207 | 34583 | 37607 | |
| NC_038311 | 3951 | 3952 | 8328 | 12704 | 17080 | 21456 | 25832 | 30208 | 34584 | | 40265 |
| NC_038311 | 3952 | 3953 | 8329 | 12705 | 17081 | 21457 | 25833 | 30209 | 34585 | 37608 | 40266 |
| NC_038311 | 3953 | 3954 | 8330 | 12706 | 17082 | 21458 | 25834 | 30210 | 34586 | 37609 | |
| NC_038311 | 3954 | 3955 | 8331 | 12707 | 17083 | 21459 | 25835 | 30211 | 34587 | | 40267 |
| NC_019023 | 3955 | 3956 | 8332 | 12708 | 17084 | 21460 | 25836 | 30212 | 34588 | | 40268 |
| NC_019023 | 3956 | 3957 | 8333 | 12709 | 17085 | 21461 | 25837 | 30213 | 34589 | 37610 | |
| NC_019023 | 3957 | 3958 | 8334 | 12710 | 17086 | 21462 | 25838 | 30214 | 34590 | 37611 | |
| NC_019023 | 3958 | 3959 | 8335 | 12711 | 17087 | 21463 | 25839 | 30215 | 34591 | 37612 | |
| NC_019023 | 3959 | 3960 | 8336 | 12712 | 17088 | 21464 | 25840 | 30216 | 34592 | 37613 | |
| NC_019023 | 3960 | 3961 | 8337 | 12713 | 17089 | 21465 | 25841 | 30217 | 34593 | 37614 | |
| NC_019023 | 3961 | 3962 | 8338 | 12714 | 17090 | 21466 | 25842 | 30218 | 34594 | 37615 | |
| NC_019023 | 3962 | 3963 | 8339 | 12715 | 17091 | 21467 | 25843 | 30219 | 34595 | 37616 | |
| NC_019023 | 3963 | 3964 | 8340 | 12716 | 17092 | 21468 | 25844 | 30220 | 34596 | | 40269 |
| NC_019023 | 3964 | 3965 | 8341 | 12717 | 17093 | 21469 | 25845 | 30221 | 34597 | 37617 | 40270 |
| NC_019023 | 3965 | 3966 | 8342 | 12718 | 17094 | 21470 | 25846 | 30222 | 34598 | | 40271 |
| NC_019023 | 3966 | 3967 | 8343 | 12719 | 17095 | 21471 | 25847 | 30223 | 34599 | | 40272 |
| NC_019023 | 3967 | 3968 | 8344 | 12720 | 17096 | 21472 | 25848 | 30224 | 34600 | 37618 | |
| NC_019023 | 3968 | 3969 | 8345 | 12721 | 17097 | 21473 | 25849 | 30225 | 34601 | 37619 | 40273 |
| NC_019023 | 3969 | 3970 | 8346 | 12722 | 17098 | 21474 | 25850 | 30226 | 34602 | 37620 | |
| NC_009996 | 3970 | 3971 | 8347 | 12723 | 17099 | 21475 | 25851 | 30227 | 34603 | 37621 | |
| NC_009996 | 3971 | 3972 | 8348 | 12724 | 17100 | 21476 | 25852 | 30228 | 34604 | 37622 | 40274 |
| NC_009996 | 3972 | 3973 | 8349 | 12725 | 17101 | 21477 | 25853 | 30229 | 34605 | 37623 | |
| NC_009996 | 3973 | 3974 | 8350 | 12726 | 17102 | 21478 | 25854 | 30230 | 34606 | 37624 | |
| NC_009996 | 3974 | 3975 | 8351 | 12727 | 17103 | 21479 | 25855 | 30231 | 34607 | | 40275 |
| NC_009996 | 3975 | 3976 | 8352 | 12728 | 17104 | 21480 | 25856 | 30232 | 34608 | 37625 | |
| NC_009996 | 3976 | 3977 | 8353 | 12729 | 17105 | 21481 | 25857 | 30233 | 34609 | 37626 | |
| NC_009996 | 3977 | 3978 | 8354 | 12730 | 17106 | 21482 | 25858 | 30234 | 34610 | | 40276 |
| NC_009996 | 3978 | 3979 | 8355 | 12731 | 17107 | 21483 | 25859 | 30235 | 34611 | 37627 | 40277 |
| NC_009996 | 3979 | 3980 | 8356 | 12732 | 17108 | 21484 | 25860 | 30236 | 34612 | 37628 | |
| NC_009996 | 3980 | 3981 | 8357 | 12733 | 17109 | 21485 | 25861 | 30237 | 34613 | 37629 | 40278 |
| NC_009996 | 3981 | 3982 | 8358 | 12734 | 17110 | 21486 | 25862 | 30238 | 34614 | | 40279 |
| NC_009996 | 3982 | 3983 | 8359 | 12735 | 17111 | 21487 | 25863 | 30239 | 34615 | | 40280 |
| NC_009996 | 3983 | 3984 | 8360 | 12736 | 17112 | 21488 | 25864 | 30240 | 34616 | | 40281 |
| NC_009996 | 3984 | 3985 | 8361 | 12737 | 17113 | 21489 | 25865 | 30241 | 34617 | 37630 | |
| NC_009996 | 3985 | 3986 | 8362 | 12738 | 17114 | 21490 | 25866 | 30242 | 34618 | 37631 | 40282 |
| NC_009996 | 3986 | 3987 | 8363 | 12739 | 17115 | 21491 | 25867 | 30243 | 34619 | | 40283 |
| NC_009996 | 3987 | 3988 | 8364 | 12740 | 17116 | 21492 | 25868 | 30244 | 34620 | 37632 | |
| NC_009996 | 3988 | 3989 | 8365 | 12741 | 17117 | 21493 | 25869 | 30245 | 34621 | 37633 | |
| NC_009996 | 3989 | 3990 | 8366 | 12742 | 17118 | 21494 | 25870 | 30246 | 34622 | 37634 | |
| NC_009996 | 3990 | 3991 | 8367 | 12743 | 17119 | 21495 | 25871 | 30247 | 34623 | | 40284 |
| NC_009996 | 3991 | 3992 | 8368 | 12744 | 17120 | 21496 | 25872 | 30248 | 34624 | 37635 | 40285 |
| NC_009996 | 3992 | 3993 | 8369 | 12745 | 17121 | 21497 | 25873 | 30249 | 34625 | | 40286 |
| NC_007357 | 3993 | 3994 | 8370 | 12746 | 17122 | 21498 | 25874 | 30250 | 34626 | 37636 | |
| NC_007357 | 3994 | 3995 | 8371 | 12747 | 17123 | 21499 | 25875 | 30251 | 34627 | 37637 | |
| NC_007357 | 3995 | 3996 | 8372 | 12748 | 17124 | 21500 | 25876 | 30252 | 34628 | 37638 | |
| NC_007357 | 3996 | 3997 | 8373 | 12749 | 17125 | 21501 | 25877 | 30253 | 34629 | 37639 | |
| NC_007357 | 3997 | 3998 | 8374 | 12750 | 17126 | 21502 | 25878 | 30254 | 34630 | 37640 | 40287 |
| NC_007357 | 3998 | 3999 | 8375 | 12751 | 17127 | 21503 | 25879 | 30255 | 34631 | 37641 | |
| NC_012959 | 3999 | 4000 | 8376 | 12752 | 17128 | 21504 | 25880 | 30256 | 34632 | | 40288 |
| NC_012959 | 4000 | 4001 | 8377 | 12753 | 17129 | 21505 | 25881 | 30257 | 34633 | 37642 | 40289 |
| NC_012959 | 4001 | 4002 | 8378 | 12754 | 17130 | 21506 | 25882 | 30258 | 34634 | | 40290 |
| NC_012959 | 4002 | 4003 | 8379 | 12755 | 17131 | 21507 | 25883 | 30259 | 34635 | 37643 | |
| NC_012959 | 4003 | 4004 | 8380 | 12756 | 17132 | 21508 | 25884 | 30260 | 34636 | 37644 | |
| NC_012959 | 4004 | 4005 | 8381 | 12757 | 17133 | 21509 | 25885 | 30261 | 34637 | 37645 | |
| NC_012959 | 4005 | 4006 | 8382 | 12758 | 17134 | 21510 | 25886 | 30262 | 34638 | 37646 | |
| NC_012959 | 4006 | 4007 | 8383 | 12759 | 17135 | 21511 | 25887 | 30263 | 34639 | | 40291 |
| NC_012959 | 4007 | 4008 | 8384 | 12760 | 17136 | 21512 | 25888 | 30264 | 34640 | | 40292 |
| NC_012959 | 4008 | 4009 | 8385 | 12761 | 17137 | 21513 | 25889 | 30265 | 34641 | 37647 | |
| NC_012959 | 4009 | 4010 | 8386 | 12762 | 17138 | 21514 | 25890 | 30266 | 34642 | 37648 | 40293 |
| NC_012959 | 4010 | 4011 | 8387 | 12763 | 17139 | 21515 | 25891 | 30267 | 34643 | | 40294 |
| NC_012959 | 4011 | 4012 | 8388 | 12764 | 17140 | 21516 | 25892 | 30268 | 34644 | 37649 | 40295 |
| NC_012959 | 4012 | 4013 | 8389 | 12765 | 17141 | 21517 | 25893 | 30269 | 34645 | | 40296 |
| NC_012959 | 4013 | 4014 | 8390 | 12766 | 17142 | 21518 | 25894 | 30270 | 34646 | 37650 | |
| NC_012959 | 4014 | 4015 | 8391 | 12767 | 17143 | 21519 | 25895 | 30271 | 34647 | | 40297 |
| NC_012959 | 4015 | 4016 | 8392 | 12768 | 17144 | 21520 | 25896 | 30272 | 34648 | | 40298 |
| NC_012959 | 4016 | 4017 | 8393 | 12769 | 17145 | 21521 | 25897 | 30273 | 34649 | 37651 | |
| NC_012959 | 4017 | 4018 | 8394 | 12770 | 17146 | 21522 | 25898 | 30274 | 34650 | 37652 | 40299 |
| NC_012959 | 4018 | 4019 | 8395 | 12771 | 17147 | 21523 | 25899 | 30275 | 34651 | 37653 | 40300 |
| NC_012959 | 4019 | 4020 | 8396 | 12772 | 17148 | 21524 | 25900 | 30276 | 34652 | 37654 | |
| NC_012959 | 4020 | 4021 | 8397 | 12773 | 17149 | 21525 | 25901 | 30277 | 34653 | 37655 | |
| NC_012959 | 4021 | 4022 | 8398 | 12774 | 17150 | 21526 | 25902 | 30278 | 34654 | 37656 | 40301 |
| NC_012959 | 4022 | 4023 | 8399 | 12775 | 17151 | 21527 | 25903 | 30279 | 34655 | 37657 | 40302 |
| NC_012959 | 4023 | 4024 | 8400 | 12776 | 17152 | 21528 | 25904 | 30280 | 34656 | 37658 | |
| NC_012959 | 4024 | 4025 | 8401 | 12777 | 17153 | 21529 | 25905 | 30281 | 34657 | 37659 | 40303 |
| NC_012959 | 4025 | 4026 | 8402 | 12778 | 17154 | 21530 | 25906 | 30282 | 34658 | | 40304 |
| NC_012959 | 4026 | 4027 | 8403 | 12779 | 17155 | 21531 | 25907 | 30283 | 34659 | 37660 | |
| NC_012959 | 4027 | 4028 | 8404 | 12780 | 17156 | 21532 | 25908 | 30284 | 34660 | 37661 | 40305 |
| NC_012959 | 4028 | 4029 | 8405 | 12781 | 17157 | 21533 | 25909 | 30285 | 34661 | | 40306 |
| NC_012959 | 4029 | 4030 | 8406 | 12782 | 17158 | 21534 | 25910 | 30286 | 34662 | 37662 | 40307 |
| NC_012959 | 4030 | 4031 | 8407 | 12783 | 17159 | 21535 | 25911 | 30287 | 34663 | 37663 | |
| NC_012959 | 4031 | 4032 | 8408 | 12784 | 17160 | 21536 | 25912 | 30288 | 34664 | | 40308 |
| NC_012959 | 4032 | 4033 | 8409 | 12785 | 17161 | 21537 | 25913 | 30289 | 34665 | 37664 | 40309 |
| NC_012959 | 4033 | 4034 | 8410 | 12786 | 17162 | 21538 | 25914 | 30290 | 34666 | 37665 | 40310 |
| NC_012959 | 4034 | 4035 | 8411 | 12787 | 17163 | 21539 | 25915 | 30291 | 34667 | 37666 | |
| NC_012959 | 4035 | 4036 | 8412 | 12788 | 17164 | 21540 | 25916 | 30292 | 34668 | 37667 | 40311 |
| NC_012959 | 4036 | 4037 | 8413 | 12789 | 17165 | 21541 | 25917 | 30293 | 34669 | 37668 | 40312 |
| NC_012959 | 4037 | 4038 | 8414 | 12790 | 17166 | 21542 | 25918 | 30294 | 34670 | | 40313 |
| NC_012959 | 4038 | 4039 | 8415 | 12791 | 17167 | 21543 | 25919 | 30295 | 34671 | | 40314 |
| NC_012959 | 4039 | 4040 | 8416 | 12792 | 17168 | 21544 | 25920 | 30296 | 34672 | 37669 | |
| NC_012959 | 4040 | 4041 | 8417 | 12793 | 17169 | 21545 | 25921 | 30297 | 34673 | 37670 | |
| NC_012959 | 4041 | 4042 | 8418 | 12794 | 17170 | 21546 | 25922 | 30298 | 34674 | 37671 | |
| NC_012959 | 4042 | 4043 | 8419 | 12795 | 17171 | 21547 | 25923 | 30299 | 34675 | 37672 | 40315 |
| NC_012959 | 4043 | 4044 | 8420 | 12796 | 17172 | 21548 | 25924 | 30300 | 34676 | 37673 | |
| NC_012959 | 4044 | 4045 | 8421 | 12797 | 17173 | 21549 | 25925 | 30301 | 34677 | | 40316 |
| NC_012959 | 4045 | 4046 | 8422 | 12798 | 17174 | 21550 | 25926 | 30302 | 34678 | 37674 | |
| NC_012959 | 4046 | 4047 | 8423 | 12799 | 17175 | 21551 | 25927 | 30303 | 34679 | 37675 | |
| NC_012959 | 4047 | 4048 | 8424 | 12800 | 17176 | 21552 | 25928 | 30304 | 34680 | | 40317 |
| NC_012959 | 4048 | 4049 | 8425 | 12801 | 17177 | 21553 | 25929 | 30305 | 34681 | 37676 | 40318 |
| NC_012959 | 4049 | 4050 | 8426 | 12802 | 17178 | 21554 | 25930 | 30306 | 34682 | 37677 | |
| NC_012959 | 4050 | 4051 | 8427 | 12803 | 17179 | 21555 | 25931 | 30307 | 34683 | | 40319 |
| NC_012959 | 4051 | 4052 | 8428 | 12804 | 17180 | 21556 | 25932 | 30308 | 34684 | 37678 | 40320 |
| NC_012959 | 4052 | 4053 | 8429 | 12805 | 17181 | 21557 | 25933 | 30309 | 34685 | | 40321 |
| NC_012959 | 4053 | 4054 | 8430 | 12806 | 17182 | 21558 | 25934 | 30310 | 34686 | 37679 | |
| NC_012959 | 4054 | 4055 | 8431 | 12807 | 17183 | 21559 | 25935 | 30311 | 34687 | 37680 | |
| NC_012959 | 4055 | 4056 | 8432 | 12808 | 17184 | 21560 | 25936 | 30312 | 34688 | 37681 | |
| NC_012959 | 4056 | 4057 | 8433 | 12809 | 17185 | 21561 | 25937 | 30313 | 34689 | 37682 | |
| NC_012959 | 4057 | 4058 | 8434 | 12810 | 17186 | 21562 | 25938 | 30314 | 34690 | | 40322 |
| NC_012959 | 4058 | 4059 | 8435 | 12811 | 17187 | 21563 | 25939 | 30315 | 34691 | 37683 | |
| NC_012959 | 4059 | 4060 | 8436 | 12812 | 17188 | 21564 | 25940 | 30316 | 34692 | 37684 | 40323 |
| NC_012959 | 4060 | 4061 | 8437 | 12813 | 17189 | 21565 | 25941 | 30317 | 34693 | | 40324 |
| NC_012959 | 4061 | 4062 | 8438 | 12814 | 17190 | 21566 | 25942 | 30318 | 34694 | | 40325 |
| NC_012959 | 4062 | 4063 | 8439 | 12815 | 17191 | 21567 | 25943 | 30319 | 34695 | | 40326 |
| NC_012959 | 4063 | 4064 | 8440 | 12816 | 17192 | 21568 | 25944 | 30320 | 34696 | | 40327 |
| NC_012959 | 4064 | 4065 | 8441 | 12817 | 17193 | 21569 | 25945 | 30321 | 34697 | 37685 | |
| NC_012959 | 4065 | 4066 | 8442 | 12818 | 17194 | 21570 | 25946 | 30322 | 34698 | 37686 | 40328 |
| NC_012959 | 4066 | 4067 | 8443 | 12819 | 17195 | 21571 | 25947 | 30323 | 34699 | 37687 | |
| NC_012959 | 4067 | 4068 | 8444 | 12820 | 17196 | 21572 | 25948 | 30324 | 34700 | | 40329 |
| NC_012959 | 4068 | 4069 | 8445 | 12821 | 17197 | 21573 | 25949 | 30325 | 34701 | | 40330 |
| NC_012959 | 4069 | 4070 | 8446 | 12822 | 17198 | 21574 | 25950 | 30326 | 34702 | | 40331 |
| NC_012959 | 4070 | 4071 | 8447 | 12823 | 17199 | 21575 | 25951 | 30327 | 34703 | 37688 | 40332 |
| NC_012959 | 4071 | 4072 | 8448 | 12824 | 17200 | 21576 | 25952 | 30328 | 34704 | | 40333 |
| NC_012959 | 4072 | 4073 | 8449 | 12825 | 17201 | 21577 | 25953 | 30329 | 34705 | 37689 | |
| NC_012959 | 4073 | 4074 | 8450 | 12826 | 17202 | 21578 | 25954 | 30330 | 34706 | 37690 | |
| NC_012959 | 4074 | 4075 | 8451 | 12827 | 17203 | 21579 | 25955 | 30331 | 34707 | | 40334 |
| NC_012959 | 4075 | 4076 | 8452 | 12828 | 17204 | 21580 | 25956 | 30332 | 34708 | | 40335 |
| NC_012959 | 4076 | 4077 | 8453 | 12829 | 17205 | 21581 | 25957 | 30333 | 34709 | 37691 | |
| NC_012959 | 4077 | 4078 | 8454 | 12830 | 17206 | 21582 | 25958 | 30334 | 34710 | | 40336 |
| NC_012959 | 4078 | 4079 | 8455 | 12831 | 17207 | 21583 | 25959 | 30335 | 34711 | 37692 | |
| NC_012959 | 4079 | 4080 | 8456 | 12832 | 17208 | 21584 | 25960 | 30336 | 34712 | | 40337 |
| NC_012959 | 4080 | 4081 | 8457 | 12833 | 17209 | 21585 | 25961 | 30337 | 34713 | | 40338 |
| NC_012959 | 4081 | 4082 | 8458 | 12834 | 17210 | 21586 | 25962 | 30338 | 34714 | 37693 | |
| NC_012959 | 4082 | 4083 | 8459 | 12835 | 17211 | 21587 | 25963 | 30339 | 34715 | 37694 | |
| NC_012959 | 4083 | 4084 | 8460 | 12836 | 17212 | 21588 | 25964 | 30340 | 34716 | | 40339 |
| NC_012959 | 4084 | 4085 | 8461 | 12837 | 17213 | 21589 | 25965 | 30341 | 34717 | | 40340 |
| NC_012959 | 4085 | 4086 | 8462 | 12838 | 17214 | 21590 | 25966 | 30342 | 34718 | 37695 | |
| NC_012959 | 4086 | 4087 | 8463 | 12839 | 17215 | 21591 | 25967 | 30343 | 34719 | 37696 | 40341 |
| NC_012959 | 4087 | 4088 | 8464 | 12840 | 17216 | 21592 | 25968 | 30344 | 34720 | 37697 | |
| NC_012959 | 4088 | 4089 | 8465 | 12841 | 17217 | 21593 | 25969 | 30345 | 34721 | 37698 | 40342 |
| NC_012959 | 4089 | 4090 | 8466 | 12842 | 17218 | 21594 | 25970 | 30346 | 34722 | 37699 | |
| NC_012959 | 4090 | 4091 | 8467 | 12843 | 17219 | 21595 | 25971 | 30347 | 34723 | 37700 | |
| NC_012959 | 4091 | 4092 | 8468 | 12844 | 17220 | 21596 | 25972 | 30348 | 34724 | | 40343 |
| NC_012959 | 4092 | 4093 | 8469 | 12845 | 17221 | 21597 | 25973 | 30349 | 34725 | 37701 | 40344 |
| NC_012959 | 4093 | 4094 | 8470 | 12846 | 17222 | 21598 | 25974 | 30350 | 34726 | | 40345 |
| NC_012959 | 4094 | 4095 | 8471 | 12847 | 17223 | 21599 | 25975 | 30351 | 34727 | 37702 | 40346 |
| NC_012959 | 4095 | 4096 | 8472 | 12848 | 17224 | 21600 | 25976 | 30352 | 34728 | 37703 | 40347 |
| NC_012959 | 4096 | 4097 | 8473 | 12849 | 17225 | 21601 | 25977 | 30353 | 34729 | 37704 | 40348 |
| NC_012959 | 4097 | 4098 | 8474 | 12850 | 17226 | 21602 | 25978 | 30354 | 34730 | 37705 | |
| NC_012959 | 4098 | 4099 | 8475 | 12851 | 17227 | 21603 | 25979 | 30355 | 34731 | 37706 | 40349 |
| NC_003461 | 4099 | 4100 | 8476 | 12852 | 17228 | 21604 | 25980 | 30356 | 34732 | | 40350 |
| NC_003461 | 4100 | 4101 | 8477 | 12853 | 17229 | 21605 | 25981 | 30357 | 34733 | 37707 | 40351 |
| NC_003461 | 4101 | 4102 | 8478 | 12854 | 17230 | 21606 | 25982 | 30358 | 34734 | 37708 | |
| NC_003461 | 4102 | 4103 | 8479 | 12855 | 17231 | 21607 | 25983 | 30359 | 34735 | | 40352 |
| NC_003461 | 4103 | 4104 | 8480 | 12856 | 17232 | 21608 | 25984 | 30360 | 34736 | 37709 | |
| NC_003461 | 4104 | 4105 | 8481 | 12857 | 17233 | 21609 | 25985 | 30361 | 34737 | | 40353 |
| NC_003461 | 4105 | 4106 | 8482 | 12858 | 17234 | 21610 | 25986 | 30362 | 34738 | | 40354 |
| NC_003461 | 4106 | 4107 | 8483 | 12859 | 17235 | 21611 | 25987 | 30363 | 34739 | 37710 | 40355 |
| NC_003461 | 4107 | 4108 | 8484 | 12860 | 17236 | 21612 | 25988 | 30364 | 34740 | 37711 | 40356 |
| NC_003461 | 4108 | 4109 | 8485 | 12861 | 17237 | 21613 | 25989 | 30365 | 34741 | | 40357 |
| NC_003461 | 4109 | 4110 | 8486 | 12862 | 17238 | 21614 | 25990 | 30366 | 34742 | 37712 | |
| NC_003461 | 4110 | 4111 | 8487 | 12863 | 17239 | 21615 | 25991 | 30367 | 34743 | 37713 | |
| NC_003461 | 4111 | 4112 | 8488 | 12864 | 17240 | 21616 | 25992 | 30368 | 34744 | 37714 | 40358 |
| NC_003461 | 4112 | 4113 | 8489 | 12865 | 17241 | 21617 | 25993 | 30369 | 34745 | 37715 | |
| NC_003461 | 4113 | 4114 | 8490 | 12866 | 17242 | 21618 | 25994 | 30370 | 34746 | 37716 | |
| NC_003461 | 4114 | 4115 | 8491 | 12867 | 17243 | 21619 | 25995 | 30371 | 34747 | | 40359 |
| NC_003461 | 4115 | 4116 | 8492 | 12868 | 17244 | 21620 | 25996 | 30372 | 34748 | | 40360 |
| NC_003461 | 4116 | 4117 | 8493 | 12869 | 17245 | 21621 | 25997 | 30373 | 34749 | 37717 | |
| NC_003461 | 4117 | 4118 | 8494 | 12870 | 17246 | 21622 | 25998 | 30374 | 34750 | 37718 | |
| NC_003461 | 4118 | 4119 | 8495 | 12871 | 17247 | 21623 | 25999 | 30375 | 34751 | | 40361 |
| NC_003461 | 4119 | 4120 | 8496 | 12872 | 17248 | 21624 | 26000 | 30376 | 34752 | | 40362 |
| NC_003461 | 4120 | 4121 | 8497 | 12873 | 17249 | 21625 | 26001 | 30377 | 34753 | 37719 | |
| NC_003461 | 4121 | 4122 | 8498 | 12874 | 17250 | 21626 | 26002 | 30378 | 34754 | | 40363 |
| NC_003461 | 4122 | 4123 | 8499 | 12875 | 17251 | 21627 | 26003 | 30379 | 34755 | 37720 | |
| NC_003461 | 4123 | 4124 | 8500 | 12876 | 17252 | 21628 | 26004 | 30380 | 34756 | 37721 | |
| NC_003461 | 4124 | 4125 | 8501 | 12877 | 17253 | 21629 | 26005 | 30381 | 34757 | | 40364 |
| NC_003461 | 4125 | 4126 | 8502 | 12878 | 17254 | 21630 | 26006 | 30382 | 34758 | 37722 | |
| NC_003461 | 4126 | 4127 | 8503 | 12879 | 17255 | 21631 | 26007 | 30383 | 34759 | 37723 | |
| NC_003461 | 4127 | 4128 | 8504 | 12880 | 17256 | 21632 | 26008 | 30384 | 34760 | | 40365 |
| NC_003461 | 4128 | 4129 | 8505 | 12881 | 17257 | 21633 | 26009 | 30385 | 34761 | 37724 | |
| NC_003461 | 4129 | 4130 | 8506 | 12882 | 17258 | 21634 | 26010 | 30386 | 34762 | 37725 | |
| NC_003461 | 4130 | 4131 | 8507 | 12883 | 17259 | 21635 | 26011 | 30387 | 34763 | | 40366 |
| NC_003461 | 4131 | 4132 | 8508 | 12884 | 17260 | 21636 | 26012 | 30388 | 34764 | 37726 | |
| NC_003461 | 4132 | 4133 | 8509 | 12885 | 17261 | 21637 | 26013 | 30389 | 34765 | | 40367 |
| NC_007375 | 4133 | 4134 | 8510 | 12886 | 17262 | 21638 | 26014 | 30390 | 34766 | 37727 | |
| NC_007375 | 4134 | 4135 | 8511 | 12887 | 17263 | 21639 | 26015 | 30391 | 34767 | 37728 | 40368 |
| NC_007375 | 4135 | 4136 | 8512 | 12888 | 17264 | 21640 | 26016 | 30392 | 34768 | 37729 | |
| NC_007375 | 4136 | 4137 | 8513 | 12889 | 17265 | 21641 | 26017 | 30393 | 34769 | 37730 | |
| NC_007375 | 4137 | 4138 | 8514 | 12890 | 17266 | 21642 | 26018 | 30394 | 34770 | | 40369 |
| NC_007375 | 4138 | 4139 | 8515 | 12891 | 17267 | 21643 | 26019 | 30395 | 34771 | 37731 | |
| NC_007375 | 4139 | 4140 | 8516 | 12892 | 17268 | 21644 | 26020 | 30396 | 34772 | | 40370 |
| NC_007375 | 4140 | 4141 | 8517 | 12893 | 17269 | 21645 | 26021 | 30397 | 34773 | 37732 | |
| NC_007375 | 4141 | 4142 | 8518 | 12894 | 17270 | 21646 | 26022 | 30398 | 34774 | | 40371 |
| NC_001694 | 4142 | 4143 | 8519 | 12895 | 17271 | 21647 | 26023 | 30399 | 34775 | 37733 | 40372 |
| NC_001694 | 4143 | 4144 | 8520 | 12896 | 17272 | 21648 | 26024 | 30400 | 34776 | 37734 | |
| NC_001694 | 4144 | 4145 | 8521 | 12897 | 17273 | 21649 | 26025 | 30401 | 34777 | | 40373 |
| NC_001694 | 4145 | 4146 | 8522 | 12898 | 17274 | 21650 | 26026 | 30402 | 34778 | | 40374 |
| NC_001694 | 4146 | 4147 | 8523 | 12899 | 17275 | 21651 | 26027 | 30403 | 34779 | 37735 | 40375 |
| NC_001694 | 4147 | 4148 | 8524 | 12900 | 17276 | 21652 | 26028 | 30404 | 34780 | 37736 | |
| NC_001694 | 4148 | 4149 | 8525 | 12901 | 17277 | 21653 | 26029 | 30405 | 34781 | 37737 | |
| NC_001694 | 4149 | 4150 | 8526 | 12902 | 17278 | 21654 | 26030 | 30406 | 34782 | 37738 | |
| NC_001694 | 4150 | 4151 | 8527 | 12903 | 17279 | 21655 | 26031 | 30407 | 34783 | 37739 | |
| NC_001694 | 4151 | 4152 | 8528 | 12904 | 17280 | 21656 | 26032 | 30408 | 34784 | 37740 | |
| NC_001694 | 4152 | 4153 | 8529 | 12905 | 17281 | 21657 | 26033 | 30409 | 34785 | 37741 | |
| NC_001694 | 4153 | 4154 | 8530 | 12906 | 17282 | 21658 | 26034 | 30410 | 34786 | | 40376 |
| NC_001694 | 4154 | 4155 | 8531 | 12907 | 17283 | 21659 | 26035 | 30411 | 34787 | 37742 | |
| NC_001694 | 4155 | 4156 | 8532 | 12908 | 17284 | 21660 | 26036 | 30412 | 34788 | 37743 | 40377 |
| NC_001694 | 4156 | 4157 | 8533 | 12909 | 17285 | 21661 | 26037 | 30413 | 34789 | 37744 | |
| NC_001694 | 4157 | 4158 | 8534 | 12910 | 17286 | 21662 | 26038 | 30414 | 34790 | | 40378 |
| NC_001694 | 4158 | 4159 | 8535 | 12911 | 17287 | 21663 | 26039 | 30415 | 34791 | | 40379 |
| NC_001694 | 4159 | 4160 | 8536 | 12912 | 17288 | 21664 | 26040 | 30416 | 34792 | 37745 | |
| NC_001694 | 4160 | 4161 | 8537 | 12913 | 17289 | 21665 | 26041 | 30417 | 34793 | | 40380 |
| NC_001694 | 4161 | 4162 | 8538 | 12914 | 17290 | 21666 | 26042 | 30418 | 34794 | | 40381 |
| NC_001694 | 4162 | 4163 | 8539 | 12915 | 17291 | 21667 | 26043 | 30419 | 34795 | 37746 | 40382 |
| NC_009333 | 4163 | 4164 | 8540 | 12916 | 17292 | 21668 | 26044 | 30420 | 34796 | | 40383 |
| NC_009333 | 4164 | 4165 | 8541 | 12917 | 17293 | 21669 | 26045 | 30421 | 34797 | | 40384 |
| NC_009333 | 4165 | 4166 | 8542 | 12918 | 17294 | 21670 | 26046 | 30422 | 34798 | | 40385 |
| NC_009333 | 4166 | 4167 | 8543 | 12919 | 17295 | 21671 | 26047 | 30423 | 34799 | 37747 | 40386 |
| NC_009333 | 4167 | 4168 | 8544 | 12920 | 17296 | 21672 | 26048 | 30424 | 34800 | 37748 | 40387 |
| NC_009333 | 4168 | 4169 | 8545 | 12921 | 17297 | 21673 | 26049 | 30425 | 34801 | | 40388 |
| NC_009333 | 4169 | 4170 | 8546 | 12922 | 17298 | 21674 | 26050 | 30426 | 34802 | 37749 | 40389 |
| NC_009333 | 4170 | 4171 | 8547 | 12923 | 17299 | 21675 | 26051 | 30427 | 34803 | 37750 | 40390 |
| NC_009333 | 4171 | 4172 | 8548 | 12924 | 17300 | 21676 | 26052 | 30428 | 34804 | 37751 | 40391 |
| NC_009333 | 4172 | 4173 | 8549 | 12925 | 17301 | 21677 | 26053 | 30429 | 34805 | | 40392 |
| NC_009333 | 4173 | 4174 | 8550 | 12926 | 17302 | 21678 | 26054 | 30430 | 34806 | | 40393 |
| NC_009333 | 4174 | 4175 | 8551 | 12927 | 17303 | 21679 | 26055 | 30431 | 34807 | | 40394 |
| NC_009333 | 4175 | 4176 | 8552 | 12928 | 17304 | 21680 | 26056 | 30432 | 34808 | 37752 | |
| NC_009333 | 4176 | 4177 | 8553 | 12929 | 17305 | 21681 | 26057 | 30433 | 34809 | | 40395 |
| NC_009333 | 4177 | 4178 | 8554 | 12930 | 17306 | 21682 | 26058 | 30434 | 34810 | | 40396 |
| NC_009333 | 4178 | 4179 | 8555 | 12931 | 17307 | 21683 | 26059 | 30435 | 34811 | 37753 | |
| NC_009333 | 4179 | 4180 | 8556 | 12932 | 17308 | 21684 | 26060 | 30436 | 34812 | 37754 | |
| NC_009333 | 4180 | 4181 | 8557 | 12933 | 17309 | 21685 | 26061 | 30437 | 34813 | 37755 | 40397 |
| NC_009333 | 4181 | 4182 | 8558 | 12934 | 17310 | 21686 | 26062 | 30438 | 34814 | 37756 | 40398 |
| NC_009333 | 4182 | 4183 | 8559 | 12935 | 17311 | 21687 | 26063 | 30439 | 34815 | 37757 | 40399 |
| NC_009333 | 4183 | 4184 | 8560 | 12936 | 17312 | 21688 | 26064 | 30440 | 34816 | | 40400 |
| NC_009333 | 4184 | 4185 | 8561 | 12937 | 17313 | 21689 | 26065 | 30441 | 34817 | 37758 | |
| NC_009333 | 4185 | 4186 | 8562 | 12938 | 17314 | 21690 | 26066 | 30442 | 34818 | | 40401 |
| NC_009333 | 4186 | 4187 | 8563 | 12939 | 17315 | 21691 | 26067 | 30443 | 34819 | 37759 | |
| NC_009333 | 4187 | 4188 | 8564 | 12940 | 17316 | 21692 | 26068 | 30444 | 34820 | 37760 | |
| NC_009333 | 4188 | 4189 | 8565 | 12941 | 17317 | 21693 | 26069 | 30445 | 34821 | 37761 | |
| NC_009333 | 4189 | 4190 | 8566 | 12942 | 17318 | 21694 | 26070 | 30446 | 34822 | 37762 | 40402 |
| NC_009333 | 4190 | 4191 | 8567 | 12943 | 17319 | 21695 | 26071 | 30447 | 34823 | 37763 | 40403 |
| NC_009333 | 4191 | 4192 | 8568 | 12944 | 17320 | 21696 | 26072 | 30448 | 34824 | 37764 | |
| NC_009333 | 4192 | 4193 | 8569 | 12945 | 17321 | 21697 | 26073 | 30449 | 34825 | 37765 | |
| NC_009333 | 4193 | 4194 | 8570 | 12946 | 17322 | 21698 | 26074 | 30450 | 34826 | 37766 | |
| NC_009333 | 4194 | 4195 | 8571 | 12947 | 17323 | 21699 | 26075 | 30451 | 34827 | 37767 | 40404 |
| NC_009333 | 4195 | 4196 | 8572 | 12948 | 17324 | 21700 | 26076 | 30452 | 34828 | 37768 | |
| NC_009333 | 4196 | 4197 | 8573 | 12949 | 17325 | 21701 | 26077 | 30453 | 34829 | 37769 | 40405 |
| NC_009333 | 4197 | 4198 | 8574 | 12950 | 17326 | 21702 | 26078 | 30454 | 34830 | 37770 | |
| NC_009333 | 4198 | 4199 | 8575 | 12951 | 17327 | 21703 | 26079 | 30455 | 34831 | 37771 | 40406 |
| NC_009333 | 4199 | 4200 | 8576 | 12952 | 17328 | 21704 | 26080 | 30456 | 34832 | 37772 | 40407 |
| NC_009333 | 4200 | 4201 | 8577 | 12953 | 17329 | 21705 | 26081 | 30457 | 34833 | 37773 | 40408 |
| NC_009333 | 4201 | 4202 | 8578 | 12954 | 17330 | 21706 | 26082 | 30458 | 34834 | 37774 | 40409 |
| NC_009333 | 4202 | 4203 | 8579 | 12955 | 17331 | 21707 | 26083 | 30459 | 34835 | 37775 | 40410 |
| NC_009333 | 4203 | 4204 | 8580 | 12956 | 17332 | 21708 | 26084 | 30460 | 34836 | 37776 | 40411 |
| NC_001352 | 4204 | 4205 | 8581 | 12957 | 17333 | 21709 | 26085 | 30461 | 34837 | 37777 | 40412 |
| NC_001352 | 4205 | 4206 | 8582 | 12958 | 17334 | 21710 | 26086 | 30462 | 34838 | | 40413 |
| NC_001352 | 4206 | 4207 | 8583 | 12959 | 17335 | 21711 | 26087 | 30463 | 34839 | | 40414 |
| NC_001352 | 4207 | 4208 | 8584 | 12960 | 17336 | 21712 | 26088 | 30464 | 34840 | | 40415 |
| NC_001352 | 4208 | 4209 | 8585 | 12961 | 17337 | 21713 | 26089 | 30465 | 34841 | 37778 | |
| NC_001352 | 4209 | 4210 | 8586 | 12962 | 17338 | 21714 | 26090 | 30466 | 34842 | | 40416 |
| NC_001352 | 4210 | 4211 | 8587 | 12963 | 17339 | 21715 | 26091 | 30467 | 34843 | 37779 | |
| NC_001352 | 4211 | 4212 | 8588 | 12964 | 17340 | 21716 | 26092 | 30468 | 34844 | 37780 | 40417 |
| NC_001352 | 4212 | 4213 | 8589 | 12965 | 17341 | 21717 | 26093 | 30469 | 34845 | 37781 | |
| NC_001352 | 4213 | 4214 | 8590 | 12966 | 17342 | 21718 | 26094 | 30470 | 34846 | 37782 | |
| NC_001352 | 4214 | 4215 | 8591 | 12967 | 17343 | 21719 | 26095 | 30471 | 34847 | 37783 | 40418 |
| NC_001352 | 4215 | 4216 | 8592 | 12968 | 17344 | 21720 | 26096 | 30472 | 34848 | | 40419 |
| NC_001352 | 4216 | 4217 | 8593 | 12969 | 17345 | 21721 | 26097 | 30473 | 34849 | | 40420 |
| NC_001352 | 4217 | 4218 | 8594 | 12970 | 17346 | 21722 | 26098 | 30474 | 34850 | 37784 | 40421 |
| NC_001352 | 4218 | 4219 | 8595 | 12971 | 17347 | 21723 | 26099 | 30475 | 34851 | | 40422 |
| NC_001352 | 4219 | 4220 | 8596 | 12972 | 17348 | 21724 | 26100 | 30476 | 34852 | | 40423 |
| NC_014956 | 4220 | 4221 | 8597 | 12973 | 17349 | 21725 | 26101 | 30477 | 34853 | 37785 | |
| NC_014956 | 4221 | 4222 | 8598 | 12974 | 17350 | 21726 | 26102 | 30478 | 34854 | 37786 | 40424 |
| NC_014956 | 4222 | 4223 | 8599 | 12975 | 17351 | 21727 | 26103 | 30479 | 34855 | 37787 | |
| NC_014956 | 4223 | 4224 | 8600 | 12976 | 17352 | 21728 | 26104 | 30480 | 34856 | 37788 | |
| NC_014956 | 4224 | 4225 | 8601 | 12977 | 17353 | 21729 | 26105 | 30481 | 34857 | 37789 | 40425 |
| NC_014956 | 4225 | 4226 | 8602 | 12978 | 17354 | 21730 | 26106 | 30482 | 34858 | | 40426 |
| NC_014956 | 4226 | 4227 | 8603 | 12979 | 17355 | 21731 | 26107 | 30483 | 34859 | 37790 | |
| NC_014956 | 4227 | 4228 | 8604 | 12980 | 17356 | 21732 | 26108 | 30484 | 34860 | 37791 | |
| NC_014956 | 4228 | 4229 | 8605 | 12981 | 17357 | 21733 | 26109 | 30485 | 34861 | | 40427 |
| NC_014956 | 4229 | 4230 | 8606 | 12982 | 17358 | 21734 | 26110 | 30486 | 34862 | 37792 | |
| NC_014956 | 4230 | 4231 | 8607 | 12983 | 17359 | 21735 | 26111 | 30487 | 34863 | 37793 | |
| NC_014956 | 4231 | 4232 | 8608 | 12984 | 17360 | 21736 | 26112 | 30488 | 34864 | | 40428 |
| NC_014956 | 4232 | 4233 | 8609 | 12985 | 17361 | 21737 | 26113 | 30489 | 34865 | 37794 | |
| NC_014956 | 4233 | 4234 | 8610 | 12986 | 17362 | 21738 | 26114 | 30490 | 34866 | 37795 | |
| NC_014956 | 4234 | 4235 | 8611 | 12987 | 17363 | 21739 | 26115 | 30491 | 34867 | | 40429 |
| NC_017995 | 4235 | 4236 | 8612 | 12988 | 17364 | 21740 | 26116 | 30492 | 34868 | 37796 | |
| NC_017995 | 4236 | 4237 | 8613 | 12989 | 17365 | 21741 | 26117 | 30493 | 34869 | | 40430 |
| NC_017995 | 4237 | 4238 | 8614 | 12990 | 17366 | 21742 | 26118 | 30494 | 34870 | 37797 | 40431 |
| NC_017995 | 4238 | 4239 | 8615 | 12991 | 17367 | 21743 | 26119 | 30495 | 34871 | 37798 | |
| NC_017995 | 4239 | 4240 | 8616 | 12992 | 17368 | 21744 | 26120 | 30496 | 34872 | 37799 | |
| NC_017995 | 4240 | 4241 | 8617 | 12993 | 17369 | 21745 | 26121 | 30497 | 34873 | 37800 | |
| NC_017995 | 4241 | 4242 | 8618 | 12994 | 17370 | 21746 | 26122 | 30498 | 34874 | | 40432 |
| NC_017995 | 4242 | 4243 | 8619 | 12995 | 17371 | 21747 | 26123 | 30499 | 34875 | 37801 | |
| NC_017995 | 4243 | 4244 | 8620 | 12996 | 17372 | 21748 | 26124 | 30500 | 34876 | 37802 | |
| NC_017995 | 4244 | 4245 | 8621 | 12997 | 17373 | 21749 | 26125 | 30501 | 34877 | | 40433 |
| NC_017995 | 4245 | 4246 | 8622 | 12998 | 17374 | 21750 | 26126 | 30502 | 34878 | 37803 | |
| NC_017995 | 4246 | 4247 | 8623 | 12999 | 17375 | 21751 | 26127 | 30503 | 34879 | 37804 | |
| NC_017995 | 4247 | 4248 | 8624 | 13000 | 17376 | 21752 | 26128 | 30504 | 34880 | 37805 | |
| NC_017995 | 4248 | 4249 | 8625 | 13001 | 17377 | 21753 | 26129 | 30505 | 34881 | 37806 | |
| NC_017995 | 4249 | 4250 | 8626 | 13002 | 17378 | 21754 | 26130 | 30506 | 34882 | 37807 | |
| NC_002209 | 4250 | 4251 | 8627 | 13003 | 17379 | 21755 | 26131 | 30507 | 34883 | 37808 | |
| NC_002209 | 4251 | 4252 | 8628 | 13004 | 17380 | 21756 | 26132 | 30508 | 34884 | 37809 | 40434 |
| NC_002209 | 4252 | 4253 | 8629 | 13005 | 17381 | 21757 | 26133 | 30509 | 34885 | 37810 | |
| NC_002209 | 4253 | 4254 | 8630 | 13006 | 17382 | 21758 | 26134 | 30510 | 34886 | | 40435 |
| NC_002209 | 4254 | 4255 | 8631 | 13007 | 17383 | 21759 | 26135 | 30511 | 34887 | 37811 | 40436 |
| NC_002209 | 4255 | 4256 | 8632 | 13008 | 17384 | 21760 | 26136 | 30512 | 34888 | | 40437 |
| NC_001591 | 4256 | 4257 | 8633 | 13009 | 17385 | 21761 | 26137 | 30513 | 34889 | 37812 | |
| NC_001591 | 4257 | 4258 | 8634 | 13010 | 17386 | 21762 | 26138 | 30514 | 34890 | | 40438 |
| NC_001591 | 4258 | 4259 | 8635 | 13011 | 17387 | 21763 | 26139 | 30515 | 34891 | | 40439 |
| NC_001591 | 4259 | 4260 | 8636 | 13012 | 17388 | 21764 | 26140 | 30516 | 34892 | 37813 | |
| NC_001591 | 4260 | 4261 | 8637 | 13013 | 17389 | 21765 | 26141 | 30517 | 34893 | | 40440 |
| NC_001591 | 4261 | 4262 | 8638 | 13014 | 17390 | 21766 | 26142 | 30518 | 34894 | | 40441 |
| NC_001591 | 4262 | 4263 | 8639 | 13015 | 17391 | 21767 | 26143 | 30519 | 34895 | | 40442 |
| NC_001591 | 4263 | 4264 | 8640 | 13016 | 17392 | 21768 | 26144 | 30520 | 34896 | 37814 | |
| NC_001591 | 4264 | 4265 | 8641 | 13017 | 17393 | 21769 | 26145 | 30521 | 34897 | 37815 | 40443 |
| NC_001591 | 4265 | 4266 | 8642 | 13018 | 17394 | 21770 | 26146 | 30522 | 34898 | 37816 | |
| NC_001591 | 4266 | 4267 | 8643 | 13019 | 17395 | 21771 | 26147 | 30523 | 34899 | 37817 | |
| NC_001591 | 4267 | 4268 | 8644 | 13020 | 17396 | 21772 | 26148 | 30524 | 34900 | | 40444 |
| NC_001591 | 4268 | 4269 | 8645 | 13021 | 17397 | 21773 | 26149 | 30525 | 34901 | 37818 | |
| NC_001591 | 4269 | 4270 | 8646 | 13022 | 17398 | 21774 | 26150 | 30526 | 34902 | 37819 | |
| NC_001591 | 4270 | 4271 | 8647 | 13023 | 17399 | 21775 | 26151 | 30527 | 34903 | 37820 | |
| NC_001591 | 4271 | 4272 | 8648 | 13024 | 17400 | 21776 | 26152 | 30528 | 34904 | 37821 | |
| NC_001591 | 4272 | 4273 | 8649 | 13025 | 17401 | 21777 | 26153 | 30529 | 34905 | 37822 | |
| NC_001591 | 4273 | 4274 | 8650 | 13026 | 17402 | 21778 | 26154 | 30530 | 34906 | | 40445 |
| NC_001591 | 4274 | 4275 | 8651 | 13027 | 17403 | 21779 | 26155 | 30531 | 34907 | 37823 | |
| NC_026428 | 4275 | 4276 | 8652 | 13028 | 17404 | 21780 | 26156 | 30532 | 34908 | 37824 | |
| NC_006309 | 4276 | 4277 | 8653 | 13029 | 17405 | 21781 | 26157 | 30533 | 34909 | 37825 | |
| NC_006309 | 4277 | 4278 | 8654 | 13030 | 17406 | 21782 | 26158 | 30534 | 34910 | 37826 | |
| NC_016157 | 4278 | 4279 | 8655 | 13031 | 17407 | 21783 | 26159 | 30535 | 34911 | 37827 | |
| NC_016157 | 4279 | 4280 | 8656 | 13032 | 17408 | 21784 | 26160 | 30536 | 34912 | 37828 | |
| NC_016157 | 4280 | 4281 | 8657 | 13033 | 17409 | 21785 | 26161 | 30537 | 34913 | | 40446 |
| NC_016157 | 4281 | 4282 | 8658 | 13034 | 17410 | 21786 | 26162 | 30538 | 34914 | | 40447 |
| NC_016157 | 4282 | 4283 | 8659 | 13035 | 17411 | 21787 | 26163 | 30539 | 34915 | | 40448 |
| NC_016157 | 4283 | 4284 | 8660 | 13036 | 17412 | 21788 | 26164 | 30540 | 34916 | 37829 | |
| NC_016157 | 4284 | 4285 | 8661 | 13037 | 17413 | 21789 | 26165 | 30541 | 34917 | 37830 | |
| NC_016157 | 4285 | 4286 | 8662 | 13038 | 17414 | 21790 | 26166 | 30542 | 34918 | 37831 | |
| NC_016157 | 4286 | 4287 | 8663 | 13039 | 17415 | 21791 | 26167 | 30543 | 34919 | | 40449 |
| NC_016157 | 4287 | 4288 | 8664 | 13040 | 17416 | 21792 | 26168 | 30544 | 34920 | 37832 | |
| NC_014952 | 4288 | 4289 | 8665 | 13041 | 17417 | 21793 | 26169 | 30545 | 34921 | | 40450 |
| NC_014952 | 4289 | 4290 | 8666 | 13042 | 17418 | 21794 | 26170 | 30546 | 34922 | 37833 | |
| NC_014952 | 4290 | 4291 | 8667 | 13043 | 17419 | 21795 | 26171 | 30547 | 34923 | 37834 | 40451 |
| NC_014952 | 4291 | 4292 | 8668 | 13044 | 17420 | 21796 | 26172 | 30548 | 34924 | | 40452 |
| NC_014952 | 4292 | 4293 | 8669 | 13045 | 17421 | 21797 | 26173 | 30549 | 34925 | | 40453 |
| NC_014952 | 4293 | 4294 | 8670 | 13046 | 17422 | 21798 | 26174 | 30550 | 34926 | 37835 | |
| NC_014952 | 4294 | 4295 | 8671 | 13047 | 17423 | 21799 | 26175 | 30551 | 34927 | | 40454 |
| NC_014952 | 4295 | 4296 | 8672 | 13048 | 17424 | 21800 | 26176 | 30552 | 34928 | 37836 | 40455 |
| NC_014952 | 4296 | 4297 | 8673 | 13049 | 17425 | 21801 | 26177 | 30553 | 34929 | 37837 | |
| NC_014952 | 4297 | 4298 | 8674 | 13050 | 17426 | 21802 | 26178 | 30554 | 34930 | 37838 | |
| NC_014952 | 4298 | 4299 | 8675 | 13051 | 17427 | 21803 | 26179 | 30555 | 34931 | 37839 | |
| NC_014952 | 4299 | 4300 | 8676 | 13052 | 17428 | 21804 | 26180 | 30556 | 34932 | 37840 | |
| NC_014952 | 4300 | 4301 | 8677 | 13053 | 17429 | 21805 | 26181 | 30557 | 34933 | 37841 | |
| NC_017997 | 4301 | 4302 | 8678 | 13054 | 17430 | 21806 | 26182 | 30558 | 34934 | | 40456 |
| NC_017997 | 4302 | 4303 | 8679 | 13055 | 17431 | 21807 | 26183 | 30559 | 34935 | 37842 | 40457 |
| NC_017997 | 4303 | 4304 | 8680 | 13056 | 17432 | 21808 | 26184 | 30560 | 34936 | 37843 | |
| NC_017997 | 4304 | 4305 | 8681 | 13057 | 17433 | 21809 | 26185 | 30561 | 34937 | | 40458 |
| NC_017997 | 4305 | 4306 | 8682 | 13058 | 17434 | 21810 | 26186 | 30562 | 34938 | 37844 | 40459 |
| NC_017997 | 4306 | 4307 | 8683 | 13059 | 17435 | 21811 | 26187 | 30563 | 34939 | 37845 | |
| NC_017997 | 4307 | 4308 | 8684 | 13060 | 17436 | 21812 | 26188 | 30564 | 34940 | 37846 | |
| NC_017997 | 4308 | 4309 | 8685 | 13061 | 17437 | 21813 | 26189 | 30565 | 34941 | | 40460 |
| NC_017997 | 4309 | 4310 | 8686 | 13062 | 17438 | 21814 | 26190 | 30566 | 34942 | | 40461 |
| NC_017997 | 4310 | 4311 | 8687 | 13063 | 17439 | 21815 | 26191 | 30567 | 34943 | | 40462 |
| NC_017997 | 4311 | 4312 | 8688 | 13064 | 17440 | 21816 | 26192 | 30568 | 34944 | 37847 | |
| NC_017997 | 4312 | 4313 | 8689 | 13065 | 17441 | 21817 | 26193 | 30569 | 34945 | 37848 | 40463 |
| NC_017997 | 4313 | 4314 | 8690 | 13066 | 17442 | 21818 | 26194 | 30570 | 34946 | | 40464 |
| NC_017997 | 4314 | 4315 | 8691 | 13067 | 17443 | 21819 | 26195 | 30571 | 34947 | 37849 | 40465 |
| NC_007369 | 4315 | 4316 | 8692 | 13068 | 17444 | 21820 | 26196 | 30572 | 34948 | | 40466 |
| NC_007369 | 4316 | 4317 | 8693 | 13069 | 17445 | 21821 | 26197 | 30573 | 34949 | 37850 | 40467 |
| NC_007369 | 4317 | 4318 | 8694 | 13070 | 17446 | 21822 | 26198 | 30574 | 34950 | 37851 | |
| NC_007369 | 4318 | 4319 | 8695 | 13071 | 17447 | 21823 | 26199 | 30575 | 34951 | | 40468 |
| NC_038889 | 4319 | 4320 | 8696 | 13072 | 17448 | 21824 | 26200 | 30576 | 34952 | | 40469 |
| NC_038889 | 4320 | 4321 | 8697 | 13073 | 17449 | 21825 | 26201 | 30577 | 34953 | | 40470 |
| NC_038889 | 4321 | 4322 | 8698 | 13074 | 17450 | 21826 | 26202 | 30578 | 34954 | | 40471 |
| NC_038889 | 4322 | 4323 | 8699 | 13075 | 17451 | 21827 | 26203 | 30579 | 34955 | 37852 | |
| NC_038889 | 4323 | 4324 | 8700 | 13076 | 17452 | 21828 | 26204 | 30580 | 34956 | 37853 | |
| NC_038889 | 4324 | 4325 | 8701 | 13077 | 17453 | 21829 | 26205 | 30581 | 34957 | 37854 | |
| NC_038889 | 4325 | 4326 | 8702 | 13078 | 17454 | 21830 | 26206 | 30582 | 34958 | | 40472 |
| NC_038889 | 4326 | 4327 | 8703 | 13079 | 17455 | 21831 | 26207 | 30583 | 34959 | | 40473 |
| NC_038889 | 4327 | 4328 | 8704 | 13080 | 17456 | 21832 | 26208 | 30584 | 34960 | | 40474 |
| NC_038889 | 4328 | 4329 | 8705 | 13081 | 17457 | 21833 | 26209 | 30585 | 34961 | 37855 | 40475 |
| NC_038889 | 4329 | 4330 | 8706 | 13082 | 17458 | 21834 | 26210 | 30586 | 34962 | 37856 | 40476 |
| NC_038889 | 4330 | 4331 | 8707 | 13083 | 17459 | 21835 | 26211 | 30587 | 34963 | | 40477 |
| NC_038889 | 4331 | 4332 | 8708 | 13084 | 17460 | 21836 | 26212 | 30588 | 34964 | | 40478 |
| NC_038889 | 4332 | 4333 | 8709 | 13085 | 17461 | 21837 | 26213 | 30589 | 34965 | 37857 | |
| NC_038889 | 4333 | 4334 | 8710 | 13086 | 17462 | 21838 | 26214 | 30590 | 34966 | 37858 | |
| NC_038889 | 4334 | 4335 | 8711 | 13087 | 17463 | 21839 | 26215 | 30591 | 34967 | 37859 | |
| NC_038889 | 4335 | 4336 | 8712 | 13088 | 17464 | 21840 | 26216 | 30592 | 34968 | 37860 | |
| NC_038889 | 4336 | 4337 | 8713 | 13089 | 17465 | 21841 | 26217 | 30593 | 34969 | 37861 | |
| NC_001587 | 4337 | 4338 | 8714 | 13090 | 17466 | 21842 | 26218 | 30594 | 34970 | 37862 | 40479 |
| NC_001587 | 4338 | 4339 | 8715 | 13091 | 17467 | 21843 | 26219 | 30595 | 34971 | 37863 | |
| NC_001587 | 4339 | 4340 | 8716 | 13092 | 17468 | 21844 | 26220 | 30596 | 34972 | 37864 | |
| NC_001587 | 4340 | 4341 | 8717 | 13093 | 17469 | 21845 | 26221 | 30597 | 34973 | 37865 | |
| NC_001587 | 4341 | 4342 | 8718 | 13094 | 17470 | 21846 | 26222 | 30598 | 34974 | 37866 | |
| NC_001587 | 4342 | 4343 | 8719 | 13095 | 17471 | 21847 | 26223 | 30599 | 34975 | | 40480 |
| NC_001587 | 4343 | 4344 | 8720 | 13096 | 17472 | 21848 | 26224 | 30600 | 34976 | 37867 | |
| NC_001587 | 4344 | 4345 | 8721 | 13097 | 17473 | 21849 | 26225 | 30601 | 34977 | | 40481 |
| NC_001587 | 4345 | 4346 | 8722 | 13098 | 17474 | 21850 | 26226 | 30602 | 34978 | 37868 | |
| NC_001587 | 4346 | 4347 | 8723 | 13099 | 17475 | 21851 | 26227 | 30603 | 34979 | 37869 | |
| NC_001587 | 4347 | 4348 | 8724 | 13100 | 17476 | 21852 | 26228 | 30604 | 34980 | 37870 | |
| NC_001587 | 4348 | 4349 | 8725 | 13101 | 17477 | 21853 | 26229 | 30605 | 34981 | | 40482 |
| NC_001587 | 4349 | 4350 | 8726 | 13102 | 17478 | 21854 | 26230 | 30606 | 34982 | 37871 | 40483 |
| NC_001587 | 4350 | 4351 | 8727 | 13103 | 17479 | 21855 | 26231 | 30607 | 34983 | | 40484 |
| NC_007362 | 4351 | 4352 | 8728 | 13104 | 17480 | 21856 | 26232 | 30608 | 34984 | 37872 | |
| NC_007362 | 4352 | 4353 | 8729 | 13105 | 17481 | 21857 | 26233 | 30609 | 34985 | 37873 | |
| NC_007362 | 4353 | 4354 | 8730 | 13106 | 17482 | 21858 | 26234 | 30610 | 34986 | | 40485 |
| NC_007362 | 4354 | 4355 | 8731 | 13107 | 17483 | 21859 | 26235 | 30611 | 34987 | | 40486 |
| NC_007362 | 4355 | 4356 | 8732 | 13108 | 17484 | 21860 | 26236 | 30612 | 34988 | | 40487 |
| NC_007362 | 4356 | 4357 | 8733 | 13109 | 17485 | 21861 | 26237 | 30613 | 34989 | 37874 | |
| NC_007362 | 4357 | 4358 | 8734 | 13110 | 17486 | 21862 | 26238 | 30614 | 34990 | 37875 | 40488 |
| NC_002019 | 4358 | 4359 | 8735 | 13111 | 17487 | 21863 | 26239 | 30615 | 34991 | | 40489 |
| NC_002019 | 4359 | 4360 | 8736 | 13112 | 17488 | 21864 | 26240 | 30616 | 34992 | 37876 | |
| NC_002019 | 4360 | 4361 | 8737 | 13113 | 17489 | 21865 | 26241 | 30617 | 34993 | | 40490 |
| NC_002019 | 4361 | 4362 | 8738 | 13114 | 17490 | 21866 | 26242 | 30618 | 34994 | 37877 | |
| NC_008189 | 4362 | 4363 | 8739 | 13115 | 17491 | 21867 | 26243 | 30619 | 34995 | 37878 | |
| NC_008189 | 4363 | 4364 | 8740 | 13116 | 17492 | 21868 | 26244 | 30620 | 34996 | | 40491 |
| NC_008189 | 4364 | 4365 | 8741 | 13117 | 17493 | 21869 | 26245 | 30621 | 34997 | 37879 | |
| NC_008189 | 4365 | 4366 | 8742 | 13118 | 17494 | 21870 | 26246 | 30622 | 34998 | 37880 | |
| NC_008189 | 4366 | 4367 | 8743 | 13119 | 17495 | 21871 | 26247 | 30623 | 34999 | | 40492 |
| NC_008189 | 4367 | 4368 | 8744 | 13120 | 17496 | 21872 | 26248 | 30624 | 35000 | | 40493 |
| NC_008189 | 4368 | 4369 | 8745 | 13121 | 17497 | 21873 | 26249 | 30625 | 35001 | 37881 | 40494 |
| NC_008189 | 4369 | 4370 | 8746 | 13122 | 17498 | 21874 | 26250 | 30626 | 35002 | 37882 | 40495 |
| NC_008189 | 4370 | 4371 | 8747 | 13123 | 17499 | 21875 | 26251 | 30627 | 35003 | 37883 | |
| NC_008189 | 4371 | 4372 | 8748 | 13124 | 17500 | 21876 | 26252 | 30628 | 35004 | 37884 | |
| NC_008189 | 4372 | 4373 | 8749 | 13125 | 17501 | 21877 | 26253 | 30629 | 35005 | | 40496 |
| NC_008189 | 4373 | 4374 | 8750 | 13126 | 17502 | 21878 | 26254 | 30630 | 35006 | | 40497 |
| NC_008189 | 4374 | 4375 | 8751 | 13127 | 17503 | 21879 | 26255 | 30631 | 35007 | | 40498 |
| NC_008189 | 4375 | 4376 | 8752 | 13128 | 17504 | 21880 | 26256 | 30632 | 35008 | 37885 | 40499 |

TABLE IB
Index to LAMP Primer Descriptions

| | | | Common | |
|---|---|---|---|---|
| Name | % GC | Accession | Name | Description |
| NC_000117 | 41.30% | NC_000117.1 | | Chlamydia trachomatis D/UW-3/CX chromosome, |
| | | | | complete genome |
| NC_001489 | 37.90% | NC_001489.1 | | Hepatitis A virus, complete genome |
| NC_003977 | 48.50% | NC_003977.2 | | Hepatitis B virus (strain ayw) genome |
| NC_038882 | 58.40% | NC_038882.1 | isolate H77 | Hepatitis C virus (isolate H77) genotype 1, |
| | | | | complete cds |
| NC_004102 | 58.20% | NC_004102.1 | | Hepatitis C virus genotype 1, complete genome |
| NC_009823 | 56.90% | NC_009823.1 | | Hepatitis C virus genotype 2, complete genome |
| NC_009824 | 55.60% | NC_009824.1 | | Hepatitis C virus genotype 3, genome |
| NC_009825 | 56.20% | NC_009825.1 | | Hepatitis C virus genotype 4, genome |
| NC_009826 | 57.10% | NC_009826.1 | | Hepatitis C virus genotype 5, genome |
| NC_009827 | 55.40% | NC_009827.1 | | Hepatitis C virus genotype 6, complete genome |
| NC_030791 | 56.80% | NC_030791.1 | | Hepatitis C virus genotype 7, complete genome |
| NC_001653 | 58.80% | NC_001653.2 | | Hepatitis delta virus, complete genome |
| NC_001434 | 57.90% | NC_001434.1 | | Hepatitis E virus, complete genome |
| NC_038504 | 57.60% | NC_038504.1 | | Hepatitis E virus rat/R63/DEU/2009, complete |
| | | | | genome |
| NC_001837 | 57.90% | NC_001837.1 | | Hepatitis GB virus A, complete genome |
| NC_001655 | 50.60% | NC_001655.1 | | Hepatitis GB virus B, complete genome |
| NC_012959 | 54.90% | NC_012959.1 | | Human adenovirus 54, complete genome |
| NC_001460 | 46.50% | NC_001460.1 | | Human adenovirus A, complete genome |
| NC_001664 | 42.40% | NC_001664.4 | | Human betaherpesvirus 6A, variant A DNA, |
| | | | | complete virion genome, isolate U1102 |
| NC_002645 | 38.30% | NC_002645.1 | | Human coronavirus 229E, complete genome |
| NC_006577 | 32.10% | NC_006577.2 | HCoV-HKU1 | Human coronavirus HKU1, complete genome |
| NC_005831 | 34.50% | NC_005831.2 | HCoV-NL63 | Human Coronavirus NL63, complete genome |
| NC_006213 | 36.80% | NC_006213.1 | HCoV-OC43 | Human coronavirus OC43 strain ATCC VR-759, |
| | | | | complete genome |
| NC_007605 | 59.50% | NC_007605.1 | Epstein-Barr | Human gammaherpesvirus 4, complete genome |
| | | | virus | |
| NC_026817 | 54.90% | NC_026817.1 | | Human genital-associated circular DNA virus-1 |
| | | | | isolate 349, complete genome |
| NC_001806 | 68.30% | NC_001806.2 | Herpes | Human herpesvirus 1 strain 17, complete genome |
| | | | simplex virus | |
| | | | 1 | |
| NC_001798 | 70.40% | NC_001798.2 | Herpes | Human herpesvirus 2 strain HG52, complete |
| | | | simplex virus | genome |
| | | | 2 | |
| NC_001348 | 46.00% | NC_001348.1 | HHV-3 | Human herpesvirus 3, complete genome |
| NC_009334 | 59.50% | NC_009334.1 | Epstein-Barr | Human herpesvirus 4, complete genome |
| | | | virus type 2 | |
| NC_006273 | 57.50% | NC_006273.2 | HHV-5; HCMV | Human herpesvirus 5 strain Merlin, complete |
| | | | | genome |
| NC_000898 | 42.80% | NC_000898.1 | HHV-6B | Human herpesvirus 6B, complete genome |
| NC_001716 | 36.20% | NC_001716.2 | HHV-7 | Human herpesvirus 7, complete genome |
| NC_009333 | 53.80% | NC_009333.1 | Kaposi's | Human herpesvirus 8 strain GK18, complete |
| | | | sarcoma- | genome |
| | | | associated | |
| | | | herpesvirus | |
| NC_001802 | 42.10% | NC_001802.1 | HIV-1 | Human immunodeficiency virus 1, complete |
| | | | | genome |
| NC_001722 | 45.70% | NC_001722.1 | HIV-2 | Human immunodeficiency virus 2, complete |
| | | | | genome |
| NC_001676 | 41.90% | NC_001676.1 | | Human papillomavirus 54, complete genome |
| NC_013035 | 38.50% | NC_013035.1 | | Human papillomavirus 116, complete genome |
| NC_001356 | 40.30% | NC_001356.1 | | Human papillomavirus-1, complete genome |
| NC_001352 | 48.40% | NC_001352.1 | | Human papillomavirus-2, complete genome |
| NC_001357 | 40.40% | NC_001357.1 | | Human papillomavirus-18, complete genome |
| NC_001694 | 46.30% | NC_001694.1 | | Human papillomavirus-61, complete genome |
| NC_027779 | 37.50% | NC_027779.1 | | Human papillomavirus isolate SE379, complete |
| | | | | genome |
| NC_026946 | 36.80% | NC_026946.1 | | Human papillomavirus KC5, complete genome |
| NC_001457 | 38.50% | NC_001457.1 | | Human papillomavirus type 4, complete genome |
| NC_001355 | 40.90% | NC_001355.1 | | Human papillomavirus type 6b, complete genome |
| NC_001595 | 39.50% | NC_001595.1 | | Human papillomavirus type 7 genomic DNA |
| NC_001596 | 41.00% | NC_001596.1 | | Human papillomavirus type 9, complete genome |
| NC_001576 | 45.90% | NC_001576.1 | | Human papillomavirus type 10 genomic DNA |
| NC_001526 | 36.50% | NC_001526.4 | | Human papillomavirus type 16, complete genome |
| NC_001583 | 38.60% | NC_001583.1 | | Human papillomavirus type 26, complete genome |
| NC_038889 | 40.40% | NC_038889.1 | | Human papillomavirus type 30 genomic DNA |
| NC_001586 | 41.00% | NC_001586.1 | | Human papillomavirus type 32, complete genome |
| NC_001587 | 38.20% | NC_001587.1 | | Human papillomavirus type 34, complete genome |
| NC_001354 | 46.90% | NC_001354.1 | | Human papillomavirus type 41, complete genome |
| NC_001690 | 36.80% | NC_001690.1 | | Human papillomavirus type 48, complete genome |
| NC_001591 | 41.10% | NC_001591.1 | | Human papillomavirus type 49, complete genome |
| NC_001691 | 36.80% | NC_001691.1 | | Human papillomavirus type 50, complete genome |
| NC_001593 | 40.10% | NC_001593.1 | | Human papillomavirus type 53, complete genome |
| NC_001693 | 37.00% | NC_001693.1 | | Human papillomavirus type 60, complete genome |
| NC_001458 | 40.40% | NC_001458.1 | | Human papillomavirus type 63, complete genome |
| NC_039089 | 44.40% | NC_039089.1 | | Human papillomavirus type 71 DNA, complete |
| | | | | genome |
| NC_034616 | 37.70% | NC_034616.1 | | Human papillomavirus type 85 isolate 114B, |
| | | | | complete genome |
| NC_010329 | 40.10% | NC_010329.1 | | Human papillomavirus type 88, complete genome |
| NC_004104 | 46.70% | NC_004104.1 | candHPV90 | Human papillomavirus type 90, complete genome |
| NC_004500 | 40.00% | NC_004500.1 | | Human papillomavirus type 92, complete genome |
| NC_005134 | 40.30% | NC_005134.2 | | Human papillomavirus type 96, complete genome |
| NC_008189 | 43.10% | NC_008189.1 | HPV101 | Human papillomavirus type 101, complete |
| | | | | genome |
| NC_008188 | 41.60% | NC_008188.1 | HPV103 | Human papillomavirus type 103, complete |
| | | | | genome |
| NC_012213 | 42.60% | NC_012213.1 | | Human papillomavirus type 108, complete |
| | | | | genome |
| NC_012485 | 38.30% | NC_012485.1 | | Human papillomavirus type 109, complete |
| | | | | genome |
| NC_012486 | 37.50% | NC_012486.1 | | Human papillomavirus type 112, complete |
| | | | | genome |
| NC_014185 | 37.70% | NC_014185.1 | | Human papillomavirus type 121, complete |
| | | | | genome |
| NC_016157 | 38.00% | NC_016157.1 | | Human papillomavirus type 126, complete |
| | | | | genome |
| NC_014952 | 36.00% | NC_014952.1 | | Human papillomavirus type 128, complete |
| | | | | genome |
| NC_014953 | 37.30% | NC_014953.1 | | Human papillomavirus type 129, complete |
| | | | | genome |
| NC_014954 | 37.00% | NC_014954.1 | | Human papillomavirus type 131, complete |
| | | | | genome |
| NC_014955 | 37.90% | NC_014955.1 | | Human papillomavirus type 132, complete |
| | | | | genome |
| NC_014956 | 38.10% | NC_014956.1 | | Human papillomavirus type 134, complete |
| | | | | genome |
| NC_017993 | 36.80% | NC_017993.1 | | Human papillomavirus type 135, complete |
| | | | | genome |
| NC_017994 | 38.50% | NC_017994.1 | | Human papillomavirus type 136, complete |
| | | | | genome |
| NC_017995 | 37.60% | NC_017995.1 | | Human papillomavirus type 137, complete |
| | | | | genome |
| NC_017996 | 39.70% | NC_017996.1 | | Human papillomavirus type 140, complete |
| | | | | genome |
| NC_017997 | 38.20% | NC_017997.1 | | Human papillomavirus type 144, complete |
| | | | | genome |
| NC_021483 | 37.90% | NC_021483.1 | HPV154 | Human papillomavirus type 154 isolate PV77, |
| | | | | complete genome |
| NC_033781 | 36.20% | NC_033781.1 | | Human papillomavirus type 156 isolate GC01, |
| | | | | complete genome |
| NC_038522 | 37.70% | NC_038522.1 | | Human papillomavirus type 161 isolate KC1, |
| | | | | complete genome |
| NC_028125 | 37.70% | NC_028125.1 | | Human papillomavirus type 163 isolate KC3, |
| | | | | complete genome |
| NC_019023 | 38.30% | NC_019023.1 | | Human papillomavirus type 166 isolate KC9, |
| | | | | complete genome |
| NC_022892 | 35.80% | NC_022892.1 | | Human papillomavirus type 167 isolate KC10, |
| | | | | complete genome |
| NC_038523 | 37.80% | NC_038523.1 | HPV 172 | Human papillomavirus type 172, complete |
| | | | | genome |
| NC_038524 | 38.90% | NC_038524.1 | | Human papillomavirus type 175 isolate SE87, |
| | | | | complete genome |
| NC_023891 | 38.20% | NC_023891.1 | | Human papillomavirus type 178, complete |
| | | | | genome |
| NC_022095 | 36.80% | NC_022095.1 | | Human papillomavirus type 179 complete |
| | | | | genome, isolate SIBX16 |
| NC_038914 | 36.90% | NC_038914.1 | | Human papillomavirus type 184 complete |
| | | | | genome, isolate SIBX17 |
| NC_039086 | 38.90% | NC_039086.1 | | Human papillomavirus type 187 isolate ACS447, |
| | | | | complete genome |
| NC_027528 | 37.70% | NC_027528.1 | | Human papillomavirus type 201 isolate HPV201, |
| | | | | complete genome |
| NC_038525 | 37.80% | NC_038525.1 | | Human papillomavirus type 204 isolate A342, |
| | | | | complete genome |
| NC_001531 | 42.40% | NC_001531.1 | | Human papillomoavirustype 5, complete genome |
| NC_003461 | 37.20% | NC_003461.1 | | Human parainfluenza virus 1, complete genome |
| NC_001796 | 34.50% | NC_001796.2 | | Human parainfluenza virus 3, complete genome |
| NC_038311 | 37.40% | NC_038311.1 | HRV-Al | Human rhinovirus 1 strain ATCC VR-1559, |
| | | | | complete genome |
| NC_038312 | 39.90% | NC_038312.1 | | Human rhinovirus 3, complete genome |
| NC_001490 | 40.60% | NC_001490.1 | | Human rhinovirus 14, complete genome |
| NC_001617 | 39.00% | NC_001617.1 | | Human rhinovirus 89, complete genome |
| NC_009996 | 42.80% | NC_009996.1 | | Human rhinovirus C, complete genome |
| NC_038878 | 43.40% | NC_038878.1 | | Human rhinovirus NAT001 polyprotein gene, |
| | | | | complete cds |
| NC_001436 | 53.50% | NC_001436.1 | | Human T-lymphotropic virus 1, complete genome |
| NC_026438 | 44.80% | NC_026438.1 | A/California/ | Influenza A virus (A/California/07/2009(H1N1)) |
| | | | 07/2009(H1N1 | segment 1 polymerase PB2 (PB2) gene, complete |
| | | | | cds |
| NC_026435 | 42.00% | NC_026435.1 | A/California/ | Influenza A virus (A/California/07/2009(H1N1)) |
| | | | 07/2009(H1N1 | segment 2 polymerase PB1 (PB1) gene, complete |
| | | | | cds; and nonfunctional PB1-F2 protein (PB1-F2) |
| | | | | gene, complete sequence |
| NC_026437 | 44.20% | NC_026437.1 | A/California/ | Influenza A virus (A/California/07/2009(H1N1)) |
| | | | 07/2009(H1N1 | segment 3 polymerase PA (PA) gene, complete |
| | | | | cds |
| NC_026433 | 40.80% | NC_026433.1 | A/California/ | Influenza A virus (A/California/07/2009(H1N1)) |
| | | | 07/2009(H1N1 | segment 4 hemagglutinin (HA) gene, complete cds |
| NC_026436 | 46.30% | NC_026436.1 | A/California/ | Influenza A virus (A/California/07/2009(H1N1)) |
| | | | 07/2009(H1N1 | segment 5 nucleocapsid protein (NP) gene, |
| | | | | complete cds |
| NC_026434 | 42.10% | NC_026434.1 | A/California/ | Influenza A virus (A/California/07/2009(H1N1)) |
| | | | 07/2009(H1N1 | segment 6 neuraminidase (NA) gene, complete |
| | | | | cds |
| NC_026431 | 47.10% | NC_026431.1 | A/California/ | Influenza A virus (A/California/07/2009(H1N1)) |
| | | | 07/2009(H1N1 | segment 7 matrix protein 2 (M2) and matrix |
| | | | | protein 1 (M1) genes, complete cds |
| NC_026432 | 43.60% | NC_026432.1 | A/California/ | Influenza A virus (A/California/07/2009(H1N1)) |
| | | | 07/2009(H1N1 | segment 8 nuclear export protein (NEP) and |
| | | | | nonstructural protein 1 (NS1) genes, complete cds |
| NC_007361 | 43.40% | NC_007361.1 | A/goose/ | Influenza Avirus |
| | | | Guangdong/1/19 | (A/Goose/Guangdong/1/96(H5N1)) |
| | | | 96(H5N1 | neuraminidase (NA) gene, complete cds |
| NC_007360 | 46.80% | NC_007360.1 | A/goose/ | Influenza Avirus |
| | | | Guangdong/1/19 | (A/Goose/Guangdong/1/96(H5N1)) nucleocapsid |
| | | | 96(H5N1 | protein (NP) gene, complete cds |
| NC_007357 | 44.30% | NC_007357.1 | A/goose/ | Influenza Avirus |
| | | | Guangdong/1/19 | (A/Goose/Guangdong/1/96(H5N1)) polymerase |
| | | | 96(H5N1 | (PB2) gene, complete cds |
| NC_007362 | 41.70% | NC_007362.1 | A/goose/ | Influenza Avirus |
| | | | Guangdong/1/19 | (A/goose/Guangdong/1/1996(H5N1)) |
| | | | 96(H5N1 | hemagglutinin (HA) gene, complete cds |
| NC_007359 | 43.80% | NC_007359.1 | A/goose/ | Influenza Avirus |
| | | | Guangdong/1/19 | (A/goose/Guangdong/1/1996(H5N1)) polymerase |
| | | | 96(H5N1 | (PA) and PA-X protein (PA-X) genes, complete cds |
| NC_007358 | 44.10% | NC_007358.1 | A/goose/ | Influenza Avirus |
| | | | Guangdong/1/19 | (A/goose/Guangdong/1/1996(H5N1)) polymerase |
| | | | 96(H5N1 | (PB1) and PB1-F2 protein (PB1-F2) genes, |
| | | | | complete cds |
| NC_007363 | 47.90% | NC_007363.1 | A/goose/ | Influenza Avirus |
| | | | Guangdong/1/19 | (A/goose/Guangdong/1/1996(H5N1)) segment 7, |
| | | | 96(H5N1 | complete sequence |
| NC_007364 | 41.40% | NC_007364.1 | A/goose/ | Influenza Avirus |
| | | | Guangdong/1/19 | (A/goose/Guangdong/1/1996(H5N1)) segment 8, |
| | | | 96(H5N1 | complete sequence |
| NC_004905 | 47.30% | NC_004905.2 | A/Hong | Influenza Avirus (A/Hong Kong/1073/99(H9N2)) |
| | | | Kong/1073/ | segment 5, complete sequence |
| | | | 99(H9N2 | |
| NC_004907 | 47.80% | NC_004907.1 | A/Hong | Influenza Avirus (A/Hong Kong/1073/99(H9N2)) |
| | | | Kong/1073/ | segment 7, complete sequence |
| | | | 99(H9N2 | |
| NC_004906 | 43.30% | NC_004906.1 | A/Hong | Influenza Avirus (A/Hong Kong/1073/99(H9N2)) |
| | | | Kong/1073/ | segment 8, complete sequence |
| | | | 99(H9N2 | |
| NC_007378 | 42.50% | NC_007378.1 | A/Korea/426/ | Influenza Avirus (A/Korea/426/1968(H2N2)) |
| | | | 1968(H2N2 | segment 1, complete sequence |
| NC_007375 | 42.70% | NC_007375.1 | A/Korea/426/ | Influenza Avirus (A/Korea/426/1968(H2N2)) |
| | | | 1968(H2N2 | segment 2, complete sequence |
| NC_007376 | 42.40% | NC_007376.1 | A/Korea/426/ | Influenza Avirus (A/Korea/426/1968(H2N2)) |
| | | | 1968(H2N2 | segment 3, complete sequence |
| NC_007374 | 41.60% | NC_007374.1 | A/Korea/426/ | Influenza Avirus (A/Korea/426/1968(H2N2)) |
| | | | 1968(H2N2 | segment 4, complete sequence |
| NC_007381 | 46.40% | NC_007381.1 | A/Korea/426/ | Influenza Avirus (A/Korea/426/1968(H2N2)) |
| | | | 1968(H2N2 | segment 5, complete sequence |
| NC_007382 | 43.40% | NC_007382.1 | A/Korea/426/ | Influenza Avirus (A/Korea/426/1968(H2N2)) |
| | | | 1968(H2N2 | segment 6, complete sequence |
| NC_007377 | 47.50% | NC_007377.1 | A/Korea/426/ | Influenza Avirus (A/Korea/426/1968(H2N2)) |
| | | | 1968(H2N2 | segment 7, complete sequence |
| NC_007380 | 43.40% | NC_007380.1 | A/Korea/426/ | Influenza Avirus (A/Korea/426/1968(H2N2)) |
| | | | 1968(H2N2 | segment 8, complete sequence |
| NC_007373 | 42.50% | NC_007373.1 | A/New | Influenza A virus (A/New York/392/2004(H3N2)) |
| | | | York/392/ | segment 1, complete sequence |
| | | | 2004(H3N2 | |
| NC_007372 | 42.20% | NC_007372.1 | A/New | Influenza A virus (A/New York/392/2004(H3N2)) |
| | | | York/392/ | segment 2, complete sequence |
| | | | 2004(H3N2 | |
| NC_007371 | 41.70% | NC_007371.1 | A/New | Influenza A virus (A/New York/392/2004(H3N2)) |
| | | | York/392/ | segment 3, complete sequence |
| | | | 2004(H3N2 | |
| NC_007366 | 42.00% | NC_007366.1 | A/New | Influenza A virus (A/New York/392/2004(H3N2)) |
| | | | York/392/ | segment 4, complete sequence |
| | | | 2004(H3N2 | |
| NC_007369 | 45.80% | NC_007369.1 | A/New | Influenza A virus (A/New York/392/2004(H3N2)) |
| | | | York/392/ | segment 5, complete sequence |
| | | | 2004(H3N2 | |
| NC_007368 | 42.70% | NC_007368.1 | A/New | Influenza A virus (A/New York/392/2004(H3N2)) |
| | | | York/392/ | segment 6, complete sequence |
| | | | 2004(H3N2 | |
| NC_007367 | 46.70% | NC_007367.1 | A/New | Influenza A virus (A/New York/392/2004(H3N2)) |
| | | | York/392/ | segment 7, complete sequence |
| | | | 2004(H3N2 | |
| NC_007370 | 41.70% | NC_007370.1 | A/New | Influenza A virus (A/New York/392/2004(H3N2)) |
| | | | York/392/ | segment 8, complete sequence |
| | | | 2004(H3N2 | |
| NC_002023 | 43.70% | NC_002023.1 | A/Puerto | Influenza Avirus (A/Puerto Rico/8/1934(H1N1)) |
| | | | Rico/8/1934 | segment 1, complete sequence |
| | | | (H1N1 | |
| NC_002021 | 42.10% | NC_002021.1 | A/Puerto | Influenza Avirus (A/Puerto Rico/8/1934(H1N1)) |
| | | | Rico/8/1934 | segment 2, complete sequence |
| | | | (H1N1 | |
| NC_002022 | 42.00% | NC_002022.1 | A/Puerto | Influenza Avirus (A/Puerto Rico/8/1934(H1N1)) |
| | | | Rico/8/1934 | segment 3, complete sequence |
| | | | (H1N1 | |
| NC_002017 | 41.60% | NC_002017.1 | A/Puerto | Influenza Avirus (A/Puerto Rico/8/1934(H1N1)) |
| | | | Rico/8/1934 | segment 4, complete sequence |
| | | | (H1N1 | |
| NC_002019 | 46.40% | NC_002019.1 | A/Puerto | Influenza Avirus (A/Puerto Rico/8/1934(H1N1)) |
| | | | Rico/8/1934 | segment 5, complete sequence |
| | | | (H1N1 | |
| NC_002018 | 42.70% | NC_002018.1 | A/Puerto | Influenza Avirus (A/Puerto Rico/8/1934(H1N1)) |
| | | | Rico/8/1934 | segment 6, complete sequence |
| | | | (H1N1 | |
| NC_002016 | 47.20% | NC_002016.1 | A/Puerto | Influenza Avirus (A/Puerto Rico/8/1934(H1N1)) |
| | | | Rico/8/1934 | segment 7, complete sequence |
| | | | (H1N1 | |
| NC_002020 | 44.30% | NC_002020.1 | A/Puerto | Influenza Avirus (A/Puerto Rico/8/1934(H1N1)) |
| | | | Rico/8/1934 | segment 8, complete sequence |
| | | | (H1N1 | |
| NC_026422 | 44.90% | NC_026422.1 | A/Shanghai/ | Influenza Avirus (A/Shanghai/02/2013(H7N9)) |
| | | | 02/2013(H7N9 | segment 1 polymerase PB2 (PB2) gene, complete |
| | | | | cds |
| NC_026423 | 44.20% | NC_026423.1 | A/Shanghai/ | Influenza Avirus (A/Shanghai/02/2013(H7N9)) |
| | | | 02/2013(H7N9 | segment 2 polymerase PB1 (PB1) and PB1-F2 |
| | | | | protein (PB1-F2) genes, complete cds |
| NC_026424 | 44.30% | NC_026424.1 | A/Shanghai/ | Influenza Avirus (A/Shanghai/02/2013(H7N9)) |
| | | | 02/2013(H7N9 | segment 3 polymerase PA (PA) and PA-X protein |
| | | | | (PA-X) genes, complete cds |
| NC_026425 | 41.80% | NC_026425.1 | A/Shanghai/ | Influenza Avirus (A/Shanghai/02/2013(H7N9)) |
| | | | 02/2013(H7N9 | segment 4 hemagglutinin (HA) gene, complete cds |
| NC_026426 | 46.60% | NC_026426.1 | A/Shanghai/ | Influenza Avirus (A/Shanghai/02/2013(H7N9)) |
| | | | 02/2013(H7N9 | segment 5 nucleocapsid protein (NP) gene, |
| | | | | complete cds |
| NC_026429 | 43.60% | NC_026429.1 | A/Shanghai/ | Influenza Avirus (A/Shanghai/02/2013(H7N9)) |
| | | | 02/2013(H7N9 | segment 6 neuraminidase (NA) gene, complete |
| | | | | cds |
| NC_026427 | 47.50% | NC_026427.1 | A/Shanghai/ | Influenza Avirus (A/Shanghai/02/2013(H7N9)) |
| | | | 02/2013(H7N9 | segment 7 matrix protein 2 (M2) and matrix |
| | | | | protein 1 (M1) genes, complete cds |
| NC_026428 | 41.90% | NC_026428.1 | A/Shanghai/ | Influenza Avirus (A/Shanghai/02/2013(H7N9)) |
| | | | 02/2013(H7N9 | segment 8 nuclear export protein (NEP) and |
| | | | | nonstructural protein 1 (NS1) genes, complete cds |
| NC_004908 | 42.50% | NC_004908.1 | A/Hong | Influenza Avirus ha gene for Hemagglutinin, |
| | | | Kong/1073/ | genomic RNA, strain A/Hong |
| | | | 99(H9N2 | Kong/1073/99(H9N2) |
| NC_004909 | 42.60% | NC_004909.1 | A/Hong | Influenza Avirus na gene for neuraminidase, |
| | | | Kong/1073/ | genomic RNA, strain A/Hong |
| | | | 99(H9N2 | Kong/1073/99(H9N2) |
| NC_004912 | 44.00% | NC_004912.1 | A/Hong | Influenza A virus pa gene for polymerase PA, |
| | | | Kong/1073/ | genomic RNA, strain A/Hong |
| | | | 99(H9N2 | Kong/1073/99(H9N2) |
| NC_004911 | 43.50% | NC_004911.1 | A/Hong | Influenza A virus pb1 gene for polymerase Pb1, |
| | | | Kong/1073/ | genomic RNA, strain A/Hong |
| | | | 99(H9N2 | Kong/1073/99(H9N2) |
| NC_004910 | 43.20% | NC_004910.1 | A/Hong | Influenza A virus pb2 gene for polymerase Pb2, |
| | | | Kong/1073/ | genomic RNA, strain A/Hong |
| | | | 99(H9N2 | Kong/1073/99(H9N2) |
| NC_002205 | 38.50% | NC_002205.1 | B/Lee/1940 | Influenza B virus (B/Lee/1940) segment 2, |
| | | | | complete sequence |
| NC_002206 | 39.20% | NC_002206.1 | B/Lee/1940 | Influenza B virus (B/Lee/1940) segment 3, |
| | | | | complete sequence |
| NC_002207 | 41.80% | NC_002207.1 | B/Lee/1940 | Influenza B virus (B/Lee/1940) segment 4, |
| | | | | complete sequence |
| NC_002208 | 42.00% | NC_002208.1 | B/Lee/1940 | Influenza B virus (B/Lee/1940) segment 5, |
| | | | | complete sequence |
| NC_002209 | 41.60% | NC_002209.1 | B/Lee/1940 | Influenza B virus (B/Lee/1940) segment 6, |
| | | | | complete sequence |
| NC_002210 | 38.80% | NC_002210.1 | B/Lee/1940 | Influenza B virus (B/Lee/1940) segment 7, |
| | | | | complete sequence |
| NC_002211 | 41.30% | NC_002211.1 | B/Lee/1940 | Influenza B virus (B/Lee/1940) segment 8, |
| | | | | complete sequence |
| NC_002204 | 39.10% | NC_002204.1 | B/Lee/1940 | Influenza B virus RNA 1, complete sequence |
| NC_006310 | 39.80% | NC_006310.2 | C/Ann | Influenza C virus (C/Ann Arbor/1/50) HEF gene for |
| | | | Arbor/1/50 | hemagglutinin-esterase-fusion, complete cds |
| NC_006312 | 38.60% | NC_006312.2 | C/Ann | Influenza C virus (C/Ann Arbor/1/50) M1, CM2 |
| | | | Arbor/1/50 | genes for matrix protein, CM2 protein, complete |
| | | | | cds |
| NC_006309 | 35.60% | NC_006309.2 | C/Ann | Influenza C virus (C/Ann Arbor/1/50) P3 gene for |
| | | | Arbor/1/50 | polymerase 3, complete cds |
| NC_006308 | 35.60% | NC_006308.2 | C/Ann | Influenza C virus (C/Ann Arbor/1/50) PB1 gene for |
| | | | Arbor/1/50 | polymerase 1, complete cds |
| NC_006307 | 36.80% | NC_006307.2 | C/Ann | Influenza C virus (C/Ann Arbor/1/50) PB2 gene for |
| | | | Arbor/1/50 | polymerase 2, complete cds |
| NC_006311 | 38.40% | NC_006311.1 | C/Ann | Influenza C virus (C/Ann Arbor/1/50) segment 5, |
| | | | Arbor/1/50 | complete sequence |
| NC_006306 | 37.50% | NC_006306.2 | C/Ann | Influenza C virus (C/Ann Arbor/1/50) segment 7, |
| | | | Arbor/1/50 | complete sequence |
| NZ_LT591897 | 52.10% | NZ_LT591897.1 | | Neisseria gonorrhoeae strain WHO F chromosome |
| | | | | 1 |
| NC_001803 | 33.20% | NC_001803.1 | | Respiratory syncytial virus, complete genome |
| NC_004718 | 40.80% | NC_004718.3 | | SARS coronavirus, complete genome |
| NZ_LN831034 | 38.50% | NZ_LN831034.1 | | Streptococcus pyogenes strain NCTC8198 |
| | | | | chromosome 1 |

[0119] In certain example embodiments, the LAMP amplification reagents may include primers to SARS-COV2. In certain example embodiments, the primers are selected from SEQ ID NOS: 1-40,499 from Table 5, Table 10, Table 15. LAMP reagents may further comprise colorimetric and/or fluorescent detection reagents, such as hydroxy napthol blue (see, e.g. Goto, M., et al., Colorimetric detection of loop-mediated isothermal amplification reaction by using hydroxy naphthol blue. Biotechniques, 2009. 46 (3): p. 167-72.) leuco triphenylmethane dyes (see, e.g. Miyamoto, S., et al., Method for colorimetric detection of double-stranded nucleic acid using leuco triphenylmethane dyes. Anal Biochem, 2015. 473: p. 28-33) and pH-sensitive dyes (see, e.g. Tanner, N. A., Y. Zhang, and T. C. Evans, Jr., Visual detection of isothermal nucleic acid amplification using pH-sensitive dyes. Biotechniques, 2015. 58 (2): p. 59-68); as well as fluorescent detection (see, e.g. Yu et al., Clinical Chemistry, hvaa102, doi:10.1093/clinchem/hvaa102 12 May 2020), including use of quenching probes (see, e.g. Shirato et al., J Virol Methods. 2018 August; 258:41-48. doi: 10.1016/j.jviromet.2018.05.006). An overview of LAMP methods, including OSD-LAMP, for sequence-specific detection is described in Becherer et al., Anal. Methods, 2020, 12, 717-746, doi: 10.1039/C9AY02246E, incorporated herein by reference.

[0120] In embodiments, the LAMP amplification reagents can comprise oligonucleotide strand displacement (OSD) probes. As used herein, oligonucleotide strand displacement probes are also referred to herein as oligonucleotide strand exchange probes or one-step strand displacement probes. The general concept of the use of OSD exchange is depicted in FIG. 1 of Bhadra et al., High-surety isothermal amplification and detection of SARS-CoV-2, including with crude enzymes, doi:10.1101/2020.04.13.039941. OSD probes rely on the binding enthalpy between the target-binding probe and amplicon of the LAMP reaction yielding a strand exchange reaction, leading to an easily read change in fluorescent signal. As a result, the results of a LAMP reaction can be visually or optically read fluorogenic OSD probes.

[0121] In an aspect, the OSD probes comprise a sequence specific for a target molecule. The OSD probes may comprise a pre-hybridized nucleic acid sequence, strand wherein the target sequence is 5, 6, 7, 8, 9, 10, 11, 12 or 13 nucleotides longer than the strand to which it is hybridized, allowing for sequence-specific interaction with a complementary target, with the OSD undergoing strand exchange and yielding a change in fluorescent signal. In a certain aspect, the OSD probes are designed specific for one or more of the LAMP primer sets disclosed herein, for example SEQ ID NOs. 1-40499, 61,983-61,988, Table 5, Table 10, Table 15. In an aspect the OSD probes are specific for LAMP primer N set 6. The OSD probes may be selected from Table 11. In an aspect, the OSD probes are provided at a concentration of about 50 nM to 200 nM, about 75 nM to 150 nM, less than or equal to 200 nM, 190 nM, 180 nM, 170 nM, 160 nM, 150 nM, 140 nM, 130 nM, 120 nM, 110 nM, 100 nM, 90 nM, 80 nM, 75 nM, 65 nM, or 50 nM. Probes can be designed to be complementary to the loop region between the F1c and F2 primer binding sites for the LAMP primers, this can be reffed to as the long toehold region. The complementary portion can be between about 9 and 14 nucleotides long, more preferably 11-12 nucleotides long. In an aspect, the longer strand of the OSD is labeled with a fluorescent molecule at the 5′ or 3′ end of the strand. In an aspect, the label is provided on the end opposite the designed complementary target region (long toehold region). The short strand is prepared with a quencher on one end of the probe, and can be designed to comprise a region complementary to a portion of the long strand. The OSD probes can be provided as part of LAMP reagents as described herein, which may comprise their use on any of the devices, cartridges or in any of the compositions as provided herein, including being provided as a lyophilized reagent in some instances.

[0122] In certain embodiments, extraction-free lysis solution and isothermal amplification reagents may be lyophilized in a single reaction volume, to be reconstituted by addition of a sample to be assayed. In certain other embodiments, the extraction-free lysis solution and and isothermal amplification reagents may be lyophilized and stored on a cartridge or lateral flow strip, as discussed in further detail below.

[0123] In certain example embodiments, the single lysis reaction compositions and kits may further comprise one or more Cas proteins possessing collateral activity and a detection construct. Pairing with one or more Cas proteins may increase sensitivity or specificity of the assay. In certain example embodiments, the one or more Cas proteins may be thermostable Cas proteins. Example Cas proteins are disclosed in further detail below.

[0124] In certain example embodiments, the single lysis amplification reaction compositions and kits may comprise optimized primers and/or one or more additives. In an aspect, the design optimizes the primers used in the amplification, In particular aspects, the isothermal amplification is used alone. In another aspect, the isothermal amplification is used with CRISPR-Cas systems comprising one or more Cas proteins and one or more guide molecules. In either approach, design considerations can follow a rational design for optimization of the reactions. Optimization of the methods as disclosed herein can include first screening primers to identify one or more sets of primers that work well for a particular target, Cas protein and/or reaction. Once the primers have been screened, titration of magnesium concentration can be performed to identify an optimal magnesium concentration for higher signal to noise readout. Once an optimum magnesium concentration is identified, additional additives are screened at around 20-25% of the reaction, and once additives are identified, these additives, such as those additives identified in FIG. 17, can be evaluated and varied in concentration to identify optimal reaction kinetics for specific reaction parameters. In an example, varying additives with specific primers, target, Cas protein (when CRISPR system is used), temperature, and other additive concentrations within the reaction can be identified. Optimization can be made with the goal of reducing the number of steps and buffer exchanges that have to occur in the reaction, simplifying the reaction and reducing the risks of contamination at transfer steps. In an aspect, addition of inhibitors, such as proteinase K can be considered so that buffer exchanges can be reduced. Similarly, optimizing the salt levels as well as the type of salt utilized can further facilitate and optimize the one-pot detections disclosed herein. In an aspect, potassium chloride can be utilized rather than sodium choloride when such amplification approaches are used with bead concentration in a lysis step.

[0125] In certain embodiments, the compositions and kits may further comprise nucleic acid binding bead. The bead may be used to capture, concentrate or otherwise enrich for particular material. The bead may be magnetic, and may be provided to capture nucleic acid material. In another aspect, the bead is a silica bead. Beads may be utilized in an extraction step of the methods disclosed herein. Beads can be optionally used with the methods described herein, including with the one-pot methods that allow for concentration of viral nucleic acids from large volume samples, such as saliva or swab samples to allow for a single one-pot reaction method. Concentration of desired target molecules can be increased by about 10-fold, 50-fold, 100-fold, 200-fold, 500-fold, 800-fold, 1000-fold, 1500-fold, 2000-fold, 2500-fold, 3000-fold, or more.

[0126] Magnetic beads in a PEG and salt solution are preferred in an aspect, and in embodiments bind to viral RNA and/or DNA which allows for concentration and lysis concurrently. Silica beads can be used in another aspect. Capture moieties such as oligonucleotide functionalized beads are envisioned for use. The beads may be using with the extraction reagents, allowed to incubate with a sample and the lysis/extraction buffer, thereby concrrating target molecules on the beads. When used with a cartridge device detailed elsewhere herein, a magnet can be activated and the beads collected, with optional flushing of the extraction buffer and one or more washes performed. Advantageously, the beads can be used in the one-pot methods and systems without additional washings of the beads, allowing for a more efficient process without increased risks of contamination in multi-step processes. Beads can be utilized with the isothermal amplifications detailed herein, and the beads can flow into an amplification chamber of the cartridge or be maintained in the pot for the amplification step. Upon heating, nucleic acid can be released off the beads.

### EXAMPLE CRISPR-CAS SYSTEMS

[0127] CRISPR Cas for use in the embodiments disclosed herein may comprise a Type V Cas protein, a Type VI Cas protein, or a combination thereof and one or more guide molecules. In certain embodiments, the Cas proteins are thermostable Cas proteins. Example thermostable Cas proteins can be selected from Table 2A or Table 2B, comprising Cas12 thermostable Cas proteins; other representative Cas12 and Cas13 proteins can be identified from Cas systems isolated from organisms that inhabit similar microenviroments. In certain example embodiments, the Cas is AapCas12b. In other example embodiments, the Cas is BrCas12b. In an aspect, two or more CRISPR effector systems are provided which may be RNA-targeting effector proteins, DNA-targeting effector proteins, or a combination thereof. The RNA-targeting effector proteins may be a Type VI Cas protein, such as Cas13 protein, including Cas13b, Cas13c, or Cas13d. The DNA-targeting effector protein may be a Type V Cas protein, such as Cas12a (Cpf1), Cas12b (C2c2), or Cas12c (C2c3). In certain example embodiments, the guide molecules of the CRISPR System can comprise one or more guide molecules of Table 1C.

TABLE 1C
Index to Guide Molecules

| Target | SEQ ID |
|---|---|
| 0_Human_papillomavirus_type_175_isolate_SE87_g_1 | 40500 |
| 0_Human_papillomavirus_type_175_isolate_SE87_g_2 | 40501 |
| 0_Human_papillomavirus_type_175_isolate_SE87_g_3 | 40502 |
| 0_Human_papiliomavirus_type_175_isolate_SE87_g_4 | 40503 |
| 0_Human_papiliomavirus_type_175_isolate_SE87_g_5 | 40504 |
| 1_Human_papillomavirus_type_175_isolate_SE87_g_1 | 40505 |
| 1_Human_papillomavirus_type_175_isolate_SE87_g_2 | 40506 |
| 1_Human_papillomavirus_type_175_isolate_SE87_g_3 | 40507 |
| 1_Human_papillomavirus_type_175_isolate_SE87_g_4 | 40508 |
| 1_Human_papillomavirus_type_175_isolate_SE87_g_5 | 40509 |
| 2_Human_papillomavirus_type_175_isolate_SE87_g_1 | 40510 |
| 2_Human_papillomavirus_type_175_isolate_SE87_g_2 | 40511 |
| 2_Human_papillomavirus_type_175_isolate_SE87_g_3 | 40512 |
| 2_Human_papillomavirus_type_175_isolate_SE87_g_4 | 40513 |
| 2_Human_papillomavirus_type_175_isolate_SE87_g_5 | 40514 |
| 3_Human_papillomavirus_type_175_isolate_SE87_g_1 | 40515 |
| 3_Human_papillomavirus_type_175_isolate_SE87_g_2 | 40516 |
| 3_Human_papillomavirus_type_175_isolate_SE87_g_3 | 40517 |
| 3_Human_papillomavirus_type_175_isolate_SE87_g_4 | 40518 |
| 3_Human_papillomavirus_type_175_isolate_SE87_g_5 | 40519 |
| 4_Human_papillomavirus_type_175_isolate_SE87_g_1 | 40520 |
| 4_Human_papillomavirus_type_175_isolate_SE87_g_2 | 40521 |
| 4_Human_papillomavirus_type_175_isolate_SE87_g_3 | 40522 |
| 4_Human_papillomavirus_type_175_isolate_SE87_g_4 | 40523 |
| 4_Human_papillomavirus_type_175_isolate_SE87_g_5 | 40524 |
| 5_Human_papillomavirus_type_175_isolate_SE87_g_1 | 40525 |
| 5_Human_papillomavirus_type_175_isolate_SE87_g_2 | 40526 |
| 5_Human_papillomavirus_type_175_isolate_SE87_g_3 | 40527 |
| 5_Human_papillomavirus_type_175_isolate_SE87_g_4 | 40528 |
| 5_Human_papillomavirus_type_175_isolate_SE87_g_5 | 40529 |
| 6_Human_papillomavirus_type_175_isolate_SE87_g_1 | 40530 |
| 6_Human_papillomavirus_type_175_isolate_SE87_g_2 | 40531 |
| 6_Human_papillomavirus_type_175_isolate_SE87_g_3 | 40532 |
| 6_Human_papillomavirus_type_175_isolate_SE87_g_4 | 40533 |
| 6_Human_papillomavirus_type_175_isolate_SE87_g_5 | 40534 |
| 7_Human_papillomavirus_type_175_isolate_SE87_g_1 | 40535 |
| 7_Human_papillomavirus_type_175_isolate_SE87_g_2 | 40536 |
| 7_Human_papillomavirus_type_175_isolate_SE87_g_3 | 40537 |
| 7_Human_papillomavirus_type_175_isolate_SE87_g_4 | 40538 |
| 7_Human_papillomavirus_type_175_isolate_SE87_g_5 | 40539 |
| 8_Human_papillomavirus_type_175_isolate_SE87_g_1 | 40540 |
| 8_Human_papillomavirus_type_175_isolate_SE87_g_2 | 40541 |
| 8_Human_papillomavirus_type_175_isolate_SE87_g_3 | 40542 |
| 8_Human_papillomavirus_type_175_isolate_SE87_g_4 | 40543 |
| 8_Human_papillomavirus_type_175_isolate_SE87_g_5 | 40544 |
| 9_Human_papillomavirus_type_175_isolate_SE87_g_1 | 40545 |
| 9_Human_papillomavirus_type_175_isolate_SE87_g_2 | 40546 |
| 9_Human_papillomavirus_type_175_isolate_SE87_g_3 | 40547 |
| 9_Human_papillomavirus_type_175_isolate_SE87_g_4 | 40548 |
| 9_Human_papillomavirus_type_175_isolate_SE87_g_5 | 40549 |
| 10_Human_papillomavirus_type_175_isolate_SE87_g_1 | 40550 |
| 10_Human_papillomavirus_type_175_isolate_SE87_g_2 | 40551 |
| 10_Human_papillomavirus_type_175_isolate_SE87_g_3 | 40552 |
| 10_Human_papillomavirus_type_175_isolate_SE87_g_4 | 40553 |
| 10_Human_papillomavirus_type_175_isolate_SE87_g_5 | 40554 |
| 11_Human_papillomavirus_type_175_isolate_SE87_g_1 | 40555 |
| 11_Human_papillomavirus_type_175_isolate_SE87_g_2 | 40556 |
| 11_Human_papillomavirus_type_175_isolate_SE87_g_3 | 40557 |
| 11_Human_papillomavirus_type_175_isolate_SE87_g_4 | 40558 |
| 11_Human_papillomavirus_type_175_isolate_SE87_g_5 | 40559 |
| 12_Human_papillomavirus_type_175_isolate_SE87_g_1 | 40560 |
| 12_Human_papillomavirus_type_175_isolate_SE87_g_2 | 40561 |
| 12_Human_papillomavirus_type_175_isolate_SE87_g_3 | 40562 |
| 12_Human_papillomavirus_type_175_isolate_SE87_g_4 | 40563 |
| 12_Human_papillomavirus_type_175_isolate_SE87_g_5 | 40564 |
| 13_Human_papillomavirus_type_175_isolate_SE87_g_1 | 40565 |
| 13_Human_papillomavirus_type_175_isolate_SE87_g_2 | 40566 |
| 13_Human_papillomavirus_type_175_isolate_SE87_g_3 | 40567 |
| 13_Human_papillomavirus_type_175_isolate_SE87_g_4 | 40568 |
| 13_Human_papillomavirus_type_175_isolate_SE87_g_5 | 40569 |
| 14_Human_papillomavirus_type_163_isolate_KC3_g_1 | 40570 |
| 14_Human_papillomavirus_type_163_isolate_KC3_g_2 | 40571 |
| 14_Human_papillomavirus_type_163_isolate_KC3_g_3 | 40572 |
| 14_Human_papillomavirus_type_163_isolate_KC3_g_4 | 40573 |
| 14_Human_papillomavirus_type_163_isolate_KC3_g_5 | 40574 |
| 15_Human_papillomavirus_type_163_isolate_KC3_g_1 | 40575 |
| 15_Human_papillomavirus_type_163_isolate_KC3_g_2 | 40576 |
| 15_Human_papillomavirus_type_163_isolate_KC3_g_3 | 40577 |
| 15_Human_papillomavirus_type_163_isolate_KC3_g_4 | 40578 |
| 15_Human_papillomavirus_type_163_isolate_KC3_g_5 | 40579 |
| 16_Human_papillomavirus_type_163_isolate_KC3_g_1 | 40580 |
| 16_Human_papillomavirus_type_163_isolate_KC3_g_2 | 40581 |
| 16_Human_papillomavirus_type_163_isolate_KC3_g_3 | 40582 |
| 16_Human_papillomavirus_type_163_isolate_KC3_g_4 | 40583 |
| 16_Human_papillomavirus_type_163_isolate_KC3_g_5 | 40584 |
| 17_Human_papillomavirus_type_163_isolate_KC3_g_1 | 40585 |
| 17_Human_papillomavirus_type_163_isolate_KC3_g_2 | 40586 |
| 17_Human_papillomavirus_type_163_isolate_KC3_g_3 | 40587 |
| 17_Human_papillomavirus_type_163_isolate_KC3_g_4 | 40588 |
| 17_Human_papillomavirus_type_163_isolate_KC3_g_5 | 40589 |
| 18_Human_papillomavirus_type_163_isolate_KC3_g_1 | 40590 |
| 18_Human_papillomavirus_type_163_isolate_KC3_g_2 | 40591 |
| 18_Human_papillomavirus_type_163_isolate_KC3_g_3 | 40592 |
| 18_Human_papillomavirus_type_163_isolate_KC3_g_4 | 40593 |
| 18_Human_papillomavirus_type_163_isolate_KC3_g_5 | 40594 |
| 19_Human_papillomavirus_type_163_isolate_KC3_g_1 | 40595 |
| 19_Human_papillomavirus_type_163_isolate_KC3_g_2 | 40596 |
| 19_Human_papillomavirus_type_163_isolate_KC3_g_3 | 40597 |
| 19_Human_papillomavirus_type_163_isolate_KC3_g_4 | 40598 |
| 19_Human_papillomavirus_type_163_isolate_KC3_g_5 | 40599 |
| 20_Human_papillomavirus_type_163_isolate_KC3_g_1 | 40600 |
| 20_Human_papillomavirus_type_163_isolate_KC3_g_2 | 40601 |
| 20_Human_papillomavirus_type_163_isolate_KC3_g_3 | 40602 |
| 20_Human_papillomavirus_type_163_isolate_KC3_g_4 | 40603 |
| 20_Human_papillomavirus_type_163_isolate_KC3_g_5 | 40604 |
| 21_Human_papillomavirus_type_163_isolate_KC3_g_1 | 40605 |
| 21_Human_papillomavirus_type_163_isolate_KC3_g_2 | 40606 |
| 21_Human_papillomavirus_type_163_isolate_KC3_g_3 | 40607 |
| 21_Human_papillomavirus_type_163_isolate_KC3_g_4 | 40608 |
| 21_Human_papillomavirus_type_163_isolate_KC3_g_5 | 40609 |
| 22_Human_papillomavirus_type_163_isolate_KC3_g_1 | 40610 |
| 22_Human_papillomavirus_type_163_isolate_KC3_g_2 | 40611 |
| 22_Human_papillomavirus_type_163_isolate_KC3_g_3 | 40612 |
| 22_Human_papillomavirus_type_163_isolate_KC3_g_4 | 40613 |
| 22_Human_papillomavirus_type_163_isolate_KC3_g_5 | 40614 |
| 23_Human_papillomavirus_type_163_isolate_KC3_g_1 | 40615 |
| 23_Human_papillomavirus_type_163_isolate_KC3_g_2 | 40616 |
| 23_Human_papillomavirus_type_163_isolate_KC3_g_3 | 40617 |
| 23_Human_papillomavirus_type_163_isolate_KC3_g_4 | 40618 |
| 23_Human_papillomavirus_type_163_isolate_KC3_g_5 | 40619 |
| 24_Human_papillomavirus_type_163_isolate_KC3_g_1 | 40620 |
| 24_Human_papillomavirus_type_163_isolate_KC3_g_2 | 40621 |
| 24_Human_papillomavirus_type_163_isolate_KC3_g_3 | 40622 |
| 24_Human_papillomavirus_type_163_isolate_KC3_g_4 | 40623 |
| 24_Human_papillomavirus_type_163_isolate_KC3_g_5 | 40624 |
| 25_Human_papillomavirus_type_163_isolate_KC3_g_1 | 40625 |
| 25_Human_papillomavirus_type_163_isolate_KC3_g_2 | 40626 |
| 25_Human_papillomavirus_type_163_isolate_KC3_g_3 | 40627 |
| 25_Human_papillomavirus_type_163_isolate_KC3_g_4 | 40628 |
| 25_Human_papillomavirus_type_163_isolate_KC3_g_5 | 40629 |
| 26_Human_papillomavirus_type_163_isolate_KC3_g_1 | 40630 |
| 26_Human_papillomavirus_type_163_isolate_KC3_g_2 | 40631 |
| 26_Human_papillomavirus_type_163_isolate_KC3_g_3 | 40632 |
| 26_Human_papillomavirus_type_163_isolate_KC3_g_4 | 40633 |
| 26_Human_papillomavirus_type_163_isolate_KC3_g_5 | 40634 |
| 27_Human_papillomavirus_type_163_isolate_KC3_g_1 | 40635 |
| 27_Human_papillomavirus_type_163_isolate_KC3_g_2 | 40636 |
| 27_Human_papillomavirus_type_163_isolate_KC3_g_3 | 40637 |
| 27_Human_papillomavirus_type_163_isolate_KC3_g_4 | 40638 |
| 27_Human_papillomavirus_type_163_isolate_KC3_g_5 | 40639 |
| 28_Hepatitis_C_virus_genotype_7_g_1 | 40640 |
| 28_Hepatitis_C_virus_genotype_7_g_2 | 40641 |
| 28_Hepatitis_C_virus_genotype_7_g_3 | 40642 |
| 28_Hepatitis_C_virus_genotype_7_g_4 | 40643 |
| 28_Hepatitis_C_virus_genotype_7_g_5 | 40644 |
| 29_Hepatitis_C_virus_genotype_7_g_1 | 40645 |
| 29_Hepatitis_C_virus_genotype_7_g_2 | 40646 |
| 29_Hepatitis_C_virus_genotype_7_g_3 | 40647 |
| 29_Hepatitis_C_virus_genotype_7_g_4 | 40648 |
| 29_Hepatitis_C_virus_genotype_7_g_5 | 40649 |
| 30_Hepatitis_C_virus_genotype_7_g_1 | 40650 |
| 30_Hepatitis_C_virus_genotype_7_g_2 | 40651 |
| 30_Hepatitis_C_virus_genotype_7_g_3 | 40652 |
| 30_Hepatitis_C_virus_genotype_7_g_4 | 40653 |
| 31_Hepatitis_C_virus_genotype_7_g_1 | 40654 |
| 31_Hepatitis_C_virus_genotype_7_g_2 | 40655 |
| 31_Hepatitis_C_virus_genotype_7_g_3 | 40656 |
| 31_Hepatitis_C_virus_genotype_7_g_4 | 40657 |
| 31_Hepatitis_C_virus_genotype_7_g_5 | 40658 |
| 32_Hepatitis_C_virus_genotype_7_g_1 | 40659 |
| 32_Hepatitis_C_virus_genotype_7_g_2 | 40660 |
| 32_Hepatitis_C_virus_genotype_7_g_3 | 40661 |
| 32_Hepatitis_C_virus_genotype_7_g_4 | 40662 |
| 32_Hepatitis_C_virus_genotype_7_g_5 | 40663 |
| 33_Hepatitis_C_virus_genotype_7_g_1 | 40664 |
| 33_Hepatitis_C_virus_genotype_7_g_2 | 40665 |
| 33_Hepatitis_C_virus_genotype_7_g_3 | 40666 |
| 33_Hepatitis_C_virus_genotype_7_g_4 | 40667 |
| 33_Hepatitis_C_virus_genotype_7_g_5 | 40668 |
| 34_Hepatitis_C_virus_genotype_7_g_1 | 40669 |
| 34_Hepatitis_C_virus_genotype_7_g_2 | 40670 |
| 34_Hepatitis_C_virus_genotype_7_g_3 | 40671 |
| 35_Hepatitis_C_virus_genotype_7_g_1 | 40672 |
| 35_Hepatitis_C_virus_genotype_7_g_2 | 40673 |
| 36_Hepatitis_C_virus_genotype_7_g_1 | 40674 |
| 36_Hepatitis_C_virus_genotype_7_g_2 | 40675 |
| 36_Hepatitis_C_virus_genotype_7_g_3 | 40676 |
| 36_Hepatitis_C_virus_genotype_7_g_4 | 40677 |
| 36_Hepatitis_C_virus_genotype_7_g_5 | 40678 |
| 37_Hepatitis_C_virus_genotype_7_g_1 | 40679 |
| 37_Hepatitis_C_virus_genotype_7_g_2 | 40680 |
| 37_Hepatitis_C_virus_genotype_7_g_3 | 40681 |
| 37_Hepatitis_C_virus_genotype_7_g_4 | 40682 |
| 37_Hepatitis_C_virus_genotype_7_g_5 | 40683 |
| 38_Hepatitis_C_virus_genotype_7_g_1 | 40684 |
| 38_Hepatitis_C_virus_genotype_7_g_2 | 40685 |
| 38_Hepatitis_C_virus_genotype_7_g_3 | 40686 |
| 38_Hepatitis_C_virus_genotype_7_g_4 | 40687 |
| 38_Hepatitis_C_virus_genotype_7_g_5 | 40688 |
| 39_Hepatitis_C_virus_genotype_7_g_1 | 40689 |
| 39_Hepatitis_C_virus_genotype_7_g_2 | 40690 |
| 39_Hepatitis_C_virus_genotype_7_g_3 | 40691 |
| 39_Hepatitis_C_virus_genotype_7_g_4 | 40692 |
| 40_Hepatitis_C_virus_genotype_7_g_1 | 40693 |
| 40_Hepatitis_C_virus_genotype_7_g_2 | 40694 |
| 40_Hepatitis_C_virus_genotype_7_g_3 | 40695 |
| 40_Hepatitis_C_virus_genotype_7_g_4 | 40696 |
| 40_Hepatitis_C_virus_genotype_7_g_5 | 40697 |
| 41_Hepatitis_C_virus_genotype_7_g_1 | 40698 |
| 41_Hepatitis_C_virus_genotype_7_g_2 | 40699 |
| 41_Hepatitis_C_virus_genotype_7_g_3 | 40700 |
| 41_Hepatitis_C_virus_genotype_7_g_4 | 40701 |
| 41_Hepatitis_C_virus_genotype_7_g_5 | 40702 |
| 42_Hepatitis_C_virus_genotype_7_g_1 | 40703 |
| 42_Hepatitis_C_virus_genotype_7_g_2 | 40704 |
| 42_Hepatitis_C_virus_genotype_7_g_3 | 40705 |
| 42_Hepatitis_C_virus_genotype_7_g_4 | 40706 |
| 42_Hepatitis_C_virus_genotype_7_g_5 | 40707 |
| 43_Hepatitis_C_virus_genotype_7_g_1 | 40708 |
| 43_Hepatitis_C_virus_genotype_7_g_2 | 40709 |
| 43_Hepatitis_C_virus_genotype_7_g_3 | 40710 |
| 43_Hepatitis_C_virus_genotype_7_g_4 | 40711 |
| 44_Hepatitis_C_virus_genotype_7_g_1 | 40712 |
| 44_Hepatitis_C_virus_genotype_7_g_2 | 40713 |
| 44_Hepatitis_C_virus_genotype_7_g_3 | 40714 |
| 44_Hepatitis_C_virus_genotype_7_g_4 | 40715 |
| 44_Hepatitis_C_virus_genotype_7_g_5 | 40716 |
| 45_Hepatitis_C_virus_genotype_7_g_1 | 40717 |
| 45_Hepatitis_C_virus_genotype_7_g_2 | 40718 |
| 45_Hepatitis_C_virus_genotype_7_g_3 | 40719 |
| 45_Hepatitis_C_virus_genotype_7_g_4 | 40720 |
| 45_Hepatitis_C_virus_genotype_7_g_5 | 40721 |
| 46_Hepatitis_C_virus_genotype_7_g_1 | 40722 |
| 46_Hepatitis_C_virus_genotype_7_g_2 | 40723 |
| 46_Hepatitis_C_virus_genotype_7_g_3 | 40724 |
| 46_Hepatitis_C_virus_genotype_7_g_4 | 40725 |
| 46_Hepatitis_C_virus_genotype_7_g_5 | 40726 |
| 47_Hepatitis_C_virus_genotype_7_g_1 | 40727 |
| 47_Hepatitis_C_virus_genotype_7_g_2 | 40728 |
| 47_Hepatitis_C_virus_genotype_7_g_3 | 40729 |
| 47_Hepatitis_C_virus_genotype_7_g_4 | 40730 |
| 47_Hepatitis_C_virus_genotype_7_g_5 | 40731 |
| 48_Hepatitis_C_virus_genotype_7_g_1 | 40732 |
| 48_Hepatitis_C_virus_genotype_7_g_2 | 40733 |
| 48_Hepatitis_C_virus_genotype_7_g_3 | 40734 |
| 48_Hepatitis_C_virus_genotype_7_g_4 | 40735 |
| 48_Hepatitis_C_virus_genotype_7_g_5 | 40736 |
| 49_Hepatitis_C_virus_genotype_7_g_1 | 40737 |
| 49_Hepatitis_C_virus_genotype_7_g_2 | 40738 |
| 49_Hepatitis_C_virus_genotype_7_g_3 | 40739 |
| 49_Hepatitis_C_virus_genotype_7_g_4 | 40740 |
| 50_Hepatitis_C_virus_genotype_7_g_1 | 40741 |
| 50_Hepatitis_C_virus_genotype_7_g_2 | 40742 |
| 50_Hepatitis_C_virus_genotype_7_g_3 | 40743 |
| 50_Hepatitis_C_virus_genotype_7_g_4 | 40744 |
| 50_Hepatitis_C_virus_genotype_7_g_5 | 40745 |
| 51_Hepatitis_C_virus_genotype_7_g_1 | 40746 |
| 51_Hepatitis_C_virus_genotype_7_g_2 | 40747 |
| 51_Hepatitis_C_virus_genotype_7_g_3 | 40748 |
| 51_Hepatitis_C_virus_genotype_7_g_4 | 40749 |
| 51_Hepatitis_C_virus_genotype_7_g_5 | 40750 |
| 52_Hepatitis_C_virus_genotype_7_g_1 | 40751 |
| 52_Hepatitis_C_virus_genotype_7_g_2 | 40752 |
| 52_Hepatitis_C_virus_genotype_7_g_3 | 40753 |
| 52_Hepatitis_C_virus_genotype_7_g_4 | 40754 |
| 52_Hepatitis_C_virus_genotype_7_g_5 | 40755 |
| 53_Hepatitis_C_virus_genotype_7_g_1 | 40756 |
| 53_Hepatitis_C_virus_genotype_7_g_2 | 40757 |
| 53_Hepatitis_C_virus_genotype_7_g_3 | 40758 |
| 53_Hepatitis_C_virus_genotype_7_g_4 | 40759 |
| 53_Hepatitis_C_virus_genotype_7_g_5 | 40760 |
| 54_Influenza_C_virus_(C/Ann_Arbor/1/50)_M1_g_1 | 40761 |
| 54_Influenza_C_virus_(C/Ann_Arbor/1/50)_M1_g_2 | 40762 |
| 54_Influenza_C_virus_(C/Ann_Arbor/1/50)_M1_g_3 | 40763 |
| 54_Influenza_C_virus_(C/Ann_Arbor/1/50)_M1_g_4 | 40764 |
| 54_Influenza_C_virus_(C/Ann_Arbor/1/50)_M1_g_5 | 40765 |
| 55_Influenza_C_virus_(C/Ann_Arbor/1/50)_M1_g_1 | 40766 |
| 55_Influenza_C_virus_(C/Ann_Arbor/1/50)_M1_g_2 | 40767 |
| 55_Influenza_C_virus_(C/Ann_Arbor/1/50)_M1_g_3 | 40768 |
| 55_Influenza_C_virus_(C/Ann_Arbor/1/50)_M1_g_4 | 40769 |
| 55_Influenza_C_virus_(C/Ann_Arbor/1/50)_M1_g_5 | 40770 |
| 56_Influenza_B_virus_RNA_1_g_1 | 40771 |
| 56_Influenza_B_virus_RNA_1_g_2 | 40772 |
| 56_Influenza_B_virus_RNA_1_g_3 | 40773 |
| 56_Influenza_B_virus_RNA_1_g_4 | 40774 |
| 56_Influenza_B_virus_RNA_1_g_5 | 40775 |
| 57_Influenza_B_virus_RNA_1_g_1 | 40776 |
| 57_Influenza_B_virus_RNA_1_g_2 | 40777 |
| 57_Influenza_B_virus_RNA_1_g_3 | 40778 |
| 57_Influenza_B_virus_RNA_1_g_4 | 40779 |
| 57_Influenza_B_virus_RNA_1_g_5 | 40780 |
| 58_Influenza_B_virus_RNA_1_g_1 | 40781 |
| 58_Influenza_B_virus_RNA_1_g_2 | 40782 |
| 58_Influenza_B_virus_RNA_1_g_3 | 40783 |
| 58_Influenza_B_virus_RNA_1_g_4 | 40784 |
| 58_Influenza_B_virus_RNA_1_g_5 | 40785 |
| 59_Influenza_B_virus_RNA_1_g_1 | 40786 |
| 59_Influenza_B_virus_RNA_1_g_2 | 40787 |
| 59_Influenza_B_virus_RNA_1_g_3 | 40788 |
| 59_Influenza_B_virus_RNA_1_g_4 | 40789 |
| 59_Influenza_B_virus_RNA_1_g_5 | 40790 |
| 60_Influenza_B_virus_RNA_1_g_1 | 40791 |
| 60_Influenza_B_virus_RNA_1_g_2 | 40792 |
| 60_Influenza_B_virus_RNA_1_g_3 | 40793 |
| 60_Influenza_B_virus_RNA_1_g_4 | 40794 |
| 60_Influenza_B_virus_RNA_1_g_5 | 40795 |
| 61_Influenza_B_virus_RNA_1_g_1 | 40796 |
| 61_Influenza_B_virus_RNA_1_g_2 | 40797 |
| 61_Influenza_B_virus_RNA_1_g_3 | 40798 |
| 61_Influenza_B_virus_RNA_1_g_4 | 40799 |
| 61_Influenza_B_virus_RNA_1_g_5 | 40800 |
| 62_Influenza_A_virus_(A/Korea/426/1968(H2N2))_segment_4_g_1 | 40801 |
| 62_Influenza_A_virus_(A/Korea/426/1968(H2N2))_segment_4_g_2 | 40802 |
| 62_Influenza_A_virus_(A/Korea/426/1968(H2N2))_segment_4_g_3 | 40803 |
| 62_Influenza_A_virus_(A/Korea/426/1968(H2N2))_segment_4_g_4 | 40804 |
| 62_Influenza_A_virus_(A/Korea/426/1968(H2N2))_segment_4_g_5 | 40805 |
| 63_Influenza_A_virus_(A/Korea/426/1968(H2N2))_segment_4_g_1 | 40806 |
| 63_Influenza_A_virus_(A/Korea/426/1968(H2N2))_segment_4_g_2 | 40807 |
| 63_Influenza_A_virus_(A/Korea/426/1968(H2N2))_segment_4_g_3 | 40808 |
| 63_Influenza_A_virus_(A/Korea/426/1968(H2N2))_segment_4_g_4 | 40809 |
| 63_Influenza_A_virus_(A/Korea/426/1968(H2N2))_segment_4_g_5 | 40810 |
| 64_Influenza_A_virus_(A/Korea/426/1968(H2N2))_segment_4_g_1 | 40811 |
| 64_Influenza_A_virus_(A/Korea/426/1968(H2N2))_segment_4_g_2 | 40812 |
| 64_Influenza_A_virus_(A/Korea/426/1968(H2N2))_segment_4_g_3 | 40813 |
| 64_Influenza_A_virus_(A/Korea/426/1968(H2N2))_segment_4_g_4 | 40814 |
| 64_Influenza_A_virus_(A/Korea/426/1968(H2N2))_segment_4_g_5 | 40815 |
| 65_Influenza_A_virus_(A/Korea/426/1968(H2N2))_segment_4_g_1 | 40816 |
| 65_Influenza_A_virus_(A/Korea/426/1968(H2N2))_segment_4_g_2 | 40817 |
| 65_Influenza_A_virus_(A/Korea/426/1968(H2N2))_segment_4_g_3 | 40818 |
| 65_Influenza_A_virus_(A/Korea/426/1968(H2N2))_segment_4_g_4 | 40819 |
| 65_Influenza_A_virus_(A/Korea/426/1968(H2N2))_segment_4_g_5 | 40820 |
| 66_Influenza_A_virus_(A/Korea/426/1968(H2N2))_segment_4_g_1 | 40821 |
| 66_Influenza_A_virus_(A/Korea/426/1968(H2N2))_segment_4_g_2 | 40822 |
| 66_Influenza_A_virus_(A/Korea/426/1968(H2N2))_segment_4_g_3 | 40823 |
| 66_Influenza_A_virus_(A/Korea/426/1968(H2N2))_segment_4_g_4 | 40824 |
| 66_Influenza_A_virus_(A/Korea/426/1968(H2N2))_segment_4_g_5 | 40825 |
| 67_Respiratory_syncytial_virus_g_1 | 40826 |
| 67_Respiratory_syncytial_virus_g_2 | 40827 |
| 67_Respiratory_syncytial_virus_g_3 | 40828 |
| 67_Respiratory_syncytial_virus_g_4 | 40829 |
| 67_Respiratory_syncytial_virus_g_5 | 40830 |
| 68_Respiratory_syncytial_virus_g_1 | 40831 |
| 68_Respiratory_syncytial_virus_g_2 | 40832 |
| 68_Respiratory_syncytial_virus_g_3 | 40833 |
| 68_Respiratory_syncytial_virus_g_4 | 40834 |
| 68_Respiratory_syncytial_virus_g_5 | 40835 |
| 69_Respiratory_syncytial_virus_g_1 | 40836 |
| 69_Respiratory_syncytial_virus_g_2 | 40837 |
| 69_Respiratory_syncytial_virus_g_3 | 40838 |
| 69_Respiratory_syncytial_virus_g_4 | 40839 |
| 69_Respiratory_syncytial_virus_g_5 | 40840 |
| 70_Respiratory_syncytial_virus_g_1 | 40841 |
| 70_Respiratory_syncytial_virus_g_2 | 40842 |
| 70_Respiratory_syncytial_virus_g_3 | 40843 |
| 70_Respiratory_syncytial_virus_g_4 | 40844 |
| 70_Respiratory_syncytial_virus_g_5 | 40845 |
| 71_Respiratory_syncytial_virus_g_1 | 40846 |
| 71_Respiratory_syncytial_virus_g_2 | 40847 |
| 71_Respiratory_syncytial_virus_g_3 | 40848 |
| 71_Respiratory_syncytial_virus_g_4 | 40849 |
| 71_Respiratory_syncytial_virus_g_5 | 40850 |
| 72_Respiratory_syncytial_virus_g_1 | 40851 |
| 72_Respiratory_syncytial_virus_g_2 | 40852 |
| 72_Respiratory_syncytial_virus_g_3 | 40853 |
| 72_Respiratory_syncytial_virus_g_4 | 40854 |
| 72_Respiratory_syncytial_virus_g_5 | 40855 |
| 73_Respiratory_syncytial_virus_g_1 | 40856 |
| 73_Respiratory_syncytial_virus_g_2 | 40857 |
| 73_Respiratory_syncytial_virus_g_3 | 40858 |
| 73_Respiratory_syncytial_virus_g_4 | 40859 |
| 73_Respiratory_syncytial_virus_g_5 | 40860 |
| 74_Respiratory_syncytial_virus_g_1 | 40861 |
| 74_Respiratory_syncytial_virus_g_2 | 40862 |
| 74_Respiratory_syncytial_virus_g_3 | 40863 |
| 74_Respiratory_syncytial_virus_g_4 | 40864 |
| 74_Respiratory_syncytial_virus_g_5 | 40865 |
| 75_Respiratory_syncytial_virus_g_1 | 40866 |
| 75_Respiratory_syncytial_virus_g_2 | 40867 |
| 75_Respiratory_syncytial_virus_g_3 | 40868 |
| 75_Respiratory_syncytial_virus_g_4 | 40869 |
| 75_Respiratory_syncytial_virus_g_5 | 40870 |
| 76_Respiratory_syncytial_virus_g_1 | 40871 |
| 76_Respiratory_syncytial_virus_g_2 | 40872 |
| 76_Respiratory_syncytial_virus_g_3 | 40873 |
| 76_Respiratory_syncytial_virus_g_4 | 40874 |
| 76_Respiratory_syncytial_virus_g_5 | 40875 |
| 77_Respiratory_syncytial_virus_g_1 | 40876 |
| 77_Respiratory_syncytial_virus_g_2 | 40877 |
| 77_Respiratory_syncytial_virus_g_3 | 40878 |
| 77_Respiratory_syncytial_virus_g_4 | 40879 |
| 77_Respiratory_syncytial_virus_g_5 | 40880 |
| 78_Respiratory_syncytial_virus_g_1 | 40881 |
| 78_Respiratory_syncytial_virus_g_2 | 40882 |
| 78_Respiratory_syncytial_virus_g_3 | 40883 |
| 78_Respiratory_syncytial_virus_g_4 | 40884 |
| 78_Respiratory_syncytial_virus_g_5 | 40885 |
| 79_Respiratory_syncytial_virus_g_1 | 40886 |
| 79_Respiratory_syncytial_virus_g_2 | 40887 |
| 79_Respiratory_syncytial_virus_g_3 | 40888 |
| 79_Respiratory_syncytial_virus_g_4 | 40889 |
| 79_Respiratory_syncytial_virus_g_5 | 40890 |
| 80_Respiratory_syncytial_virus_g_1 | 40891 |
| 80_Respiratory_syncytial_virus_g_2 | 40892 |
| 80_Respiratory_syncytial_virus_g_3 | 40893 |
| 80_Respiratory_syncytial_virus_g_4 | 40894 |
| 80_Respiratory_syncytial_virus_g_5 | 40895 |
| 81_Respiratory_syncytial_virus_g_1 | 40896 |
| 81_Respiratory_syncytial_virus_g_2 | 40897 |
| 81_Respiratory_syncytial_virus_g_3 | 40898 |
| 81_Respiratory_syncytial_virus_g_4 | 40899 |
| 81_Respiratory_syncytial_virus_g_5 | 40900 |
| 82_Respiratory_syncytial_virus_g_1 | 40901 |
| 82_Respiratory_syncytial_virus_g_2 | 40902 |
| 82_Respiratory_syncytial_virus_g_3 | 40903 |
| 82_Respiratory_syncytial_virus_g_4 | 40904 |
| 82_Respiratory_syncytial_virus_g_5 | 40905 |
| 83_Respiratory_syncytial_virus_g_1 | 40906 |
| 83_Respiratory_syncytial_virus_g_2 | 40907 |
| 83_Respiratory_syncytial_virus_g_3 | 40908 |
| 83_Respiratory_syncytial_virus_g_4 | 40909 |
| 83_Respiratory_syncytial_virus_g_5 | 40910 |
| 84_Respiratory_syncytial_virus_g_1 | 40911 |
| 84_Respiratory_syncytial_virus_g_2 | 40912 |
| 84_Respiratory_syncytial_virus_g_3 | 40913 |
| 84_Respiratory_syncytial_virus_g_4 | 40914 |
| 84_Respiratory_syncytial_virus_g_5 | 40915 |
| 85_Respiratory_syncytial_virus_g_1 | 40916 |
| 85_Respiratory_syncytial_virus_g_2 | 40917 |
| 85_Respiratory_syncytial_virus_g_3 | 40918 |
| 85_Respiratory_syncytial_virus_g_4 | 40919 |
| 85_Respiratory_syncytial_virus_g_5 | 40920 |
| 86_Respiratory_syncytial_virus_g_1 | 40921 |
| 86_Respiratory_syncytial_virus_g_2 | 40922 |
| 86_Respiratory_syncytial_virus_g_3 | 40923 |
| 86_Respiratory_syncytial_virus_g_4 | 40924 |
| 86_Respiratory_syncytial_virus_g_5 | 40925 |
| 87_Hepatitis_C_virus_(isolate_H77)_genotype_1_g_1 | 40926 |
| 87_Hepatitis_C_virus_(isolate_H77)_genotype_1_g_2 | 40927 |
| 87_Hepatitis_C_virus_(isolate_H77)_genotype_1_g_3 | 40928 |
| 87_Hepatitis_C_virus_(isolate_H77)_genotype_1_g_4 | 40929 |
| 88_Hepatitis_C_virus_(isolate_H77)_genotype_1_g_1 | 40930 |
| 88_Hepatitis_C_virus_(isolate_H77)_genotype_1_g_2 | 40931 |
| 88_Hepatitis_C_virus_(isolate_H77)_genotype_1_g_3 | 40932 |
| 88_Hepatitis_C_virus_(isolate_H77)_genotype_1_g_4 | 40933 |
| 88_Hepatitis_C_virus_(isolate_H77)_genotype_1_g_5 | 40934 |
| 89_Hepatitis_C_virus_(isolate_H77)_genotype_1_g_1 | 40935 |
| 89_Hepatitis_C_virus_(isolate_H77)_genotype_1_g_2 | 40936 |
| 89_Hepatitis_C_virus_(isolate_H77)_genotype_1_g_3 | 40937 |
| 89_Hepatitis_C_virus_(isolate_H77)_genotype_1_g_4 | 40938 |
| 89_Hepatitis_C_virus_(isolate_H77)_genotype_1_g_5 | 40939 |
| 90_Hepatitis_C_virus_(isolate_H77)_genotype_1_g_1 | 40940 |
| 90_Hepatitis_C_virus_(isolate_H77)_genotype_1_g_2 | 40941 |
| 90_Hepatitis_C_virus_(isolate_H77)_genotype_1_g_3 | 40942 |
| 90_Hepatitis_C_virus_(isolate_H77)_genotype_1_g_4 | 40943 |
| 90_Hepatitis_C_virus_(isolate_H77)_genotype_1_g_5 | 40944 |
| 91_Hepatitis_C_virus_(isolate_H77)_genotype_1_g_1 | 40945 |
| 91_Hepatitis_C_virus_(isolate_H77)_genotype_1_g_2 | 40946 |
| 92_Hepatitis_C_virus_(isolate_H77)_genotype_1_g_1 | 40947 |
| 92_Hepatitis_C_virus_(isolate_H77)_genotype_1_g_2 | 40948 |
| 92_Hepatitis_C_virus_(isolate_H77)_genotype_1_g_3 | 40949 |
| 92_Hepatitis_C_virus_(isolate_H77)_genotype_1_g_4 | 40950 |
| 92_Hepatitis_C_virus_(isolate_H77)_genotype_1_g_5 | 40951 |
| 93_Hepatitis_C_virus_(isolate_H77)_genotype_1_g_1 | 40952 |
| 93_Hepatitis_C_virus_(isolate_H77)_genotype_1_g_2 | 40953 |
| 93_Hepatitis_C_virus_(isolate_H77)_genotype_1_g_3 | 40954 |
| 93_Hepatitis_C_virus_(isolate_H77)_genotype_1_g_4 | 40955 |
| 93_Hepatitis_C_virus_(isolate_H77)_genotype_1_g_5 | 40956 |
| 94_Hepatitis_C_virus_(isolate_H77)_genotype_1_g_1 | 40957 |
| 94_Hepatitis_C_virus_(isolate_H77)_genotype_1_g_2 | 40958 |
| 94_Hepatitis_C_virus_(isolate_H77)_genotype_1_g_3 | 40959 |
| 95_Hepatitis_C_virus_(isolate_H77)_genotype_1_g_1 | 40960 |
| 95_Hepatitis_C_virus_(isolate_H77)_genotype_1_g_2 | 40961 |
| 95_Hepatitis_C_virus_(isolate_H77)_genotype_1_g_3 | 40962 |
| 95_Hepatitis_C_virus_(isolate_H77)_genotype_1_g_4 | 40963 |
| 95_Hepatitis_C_virus_(isolate_H77)_genotype_1_g_5 | 40964 |
| 96_Hepatitis_C_virus_(isolate_H77)_genotype_1_g_1 | 40965 |
| 96_Hepatitis_C_virus_(isolate_H77)_genotype_1_g_2 | 40966 |
| 96_Hepatitis_C_virus_(isolate_H77)_genotype_1_g_3 | 40967 |
| 96_Hepatitis_C_virus_(isolate_H77)_genotype_1_g_4 | 40968 |
| 96_Hepatitis_C_virus_(isolate_H77)_genotype_1_g_5 | 40969 |
| 97_Hepatitis_C_virus_(isolate_H77)_genotype_1_g_1 | 40970 |
| 97_Hepatitis_C_virus_(isolate_H77)_genotype_1_g_2 | 40971 |
| 97_Hepatitis_C_virus_(isolate_H77)_genotype_1_g_3 | 40972 |
| 97_Hepatitis_C_virus_(isolate_H77)_genotype_1_g_4 | 40973 |
| 98_Hepatitis_C_virus_(isolate_H77)_genotype_1_g_1 | 40974 |
| 98_Hepatitis_C_virus_(isolate_H77)_genotype_1_g_2 | 40975 |
| 98_Hepatitis_C_virus_(isolate_H77)_genotype_1_g_3 | 40976 |
| 98_Hepatitis_C_virus_(isolate_H77)_genotype_1_g_4 | 40977 |
| 99_Hepatitis_C_virus_(isolate_H77)_genotype_1_g_1 | 40978 |
| 99_Hepatitis_C_virus_(isolate_H77)_genotype_1_g_2 | 40979 |
| 99_Hepatitis_C_virus_(isolate_H77)_genotype_1_g_3 | 40980 |
| 99_Hepatitis_C_virus_(isolate_H77)_genotype_1_g_4 | 40981 |
| 99_Hepatitis_C_virus_(isolate_H77)_genotype_1_g_5 | 40982 |
| 100_Hepatitis_C_virus_(isolate_H77)_genotype_1_g_1 | 40983 |
| 100_Hepatitis_C_virus_(isolate_H77)_genotype_1_g_2 | 40984 |
| 100_Hepatitis_C_virus_(isolate_H77)_genotype_1_g_3 | 40985 |
| 100_Hepatitis_C_virus_(isolate_H77)_genotype_1_g_4 | 40986 |
| 100_Hepatitis_C_virus_(isolate_H77)_genotype_1_g_5 | 40987 |
| 101_Hepatitis_C_virus_(isolate_H77)_genotype_1_g_1 | 40988 |
| 101_Hepatitis_C_virus_(isolate_H77)_genotype_1_g_2 | 40989 |
| 101_Hepatitis_C_virus_(isolate_H77)_genotype_1_g_3 | 40990 |
| 101_Hepatitis_C_virus_(isolate_H77)_genotype_1_g_4 | 40991 |
| 101_Hepatitis_C_virus_(isolate_H77)_genotype_1_g_5 | 40992 |
| 102_Hepatitis_C_virus_(isolate_H77)_genotype_1_g_1 | 40993 |
| 102_Hepatitis_C_virus_(isolate_H77)_genotype_1_g_2 | 40994 |
| 102_Hepatitis_C_virus_(isolate_H77)_genotype_1_g_3 | 40995 |
| 103_Hepatitis_C_virus_(isolate_H77)_genotype_1_g_1 | 40996 |
| 103_Hepatitis_C_virus_(isolate_H77)_genotype_1_g_2 | 40997 |
| 103_Hepatitis_C_virus_(isolate_H77)_genotype_1_g_3 | 40998 |
| 103_Hepatitis_C_virus_(isolate_H77)_genotype_1_g_4 | 40999 |
| 103_Hepatitis_C_virus_(isolate_H77)_genotype_1_g_5 | 41000 |
| 104_Hepatitis_C_virus_(isolate_H77)_genotype_1_g_1 | 41001 |
| 104_Hepatitis_C_virus_(isolate_H77)_genotype_1_g_2 | 41002 |
| 104_Hepatitis_C_virus_(isolate_H77)_genotype_1_g_3 | 41003 |
| 104_Hepatitis_C_virus_(isolate_H77)_genotype_1_g_4 | 41004 |
| 104_Hepatitis_C_virus_(isolate_H77)_genotype_1_g_5 | 41005 |
| 105_Hepatitis_C_virus_(isolate_H77)_genotype_1_g_1 | 41006 |
| 105_Hepatitis_C_virus_(isolate_H77)_genotype_1_g_2 | 41007 |
| 106_Hepatitis_C_virus_(isolate_H77)_genotype_1_g_1 | 41008 |
| 106_Hepatitis_C_virus_(isolate_H77)_genotype_1_g_2 | 41009 |
| 106_Hepatitis_C_virus_(isolate_H77)_genotype_1_g_3 | 41010 |
| 107_Hepatitis_C_virus_(isolate_H77)_genotype_1_g_1 | 41011 |
| 107_Hepatitis_C_virus_(isolate_H77)_genotype_1_g_2 | 41012 |
| 107_Hepatitis_C_virus_(isolate_H77)_genotype_1_g_3 | 41013 |
| 107_Hepatitis_C_virus_(isolate_H77)_genotype_1_g_4 | 41014 |
| 107_Hepatitis_C_virus_(isolate_H77)_genotype_1_g_5 | 41015 |
| 108_Hepatitis_C_virus_(isolate_H77)_genotype_1_g_1 | 41016 |
| 108_Hepatitis_C_virus_(isolate_H77)_genotype_1_g_2 | 41017 |
| 108_Hepatitis_C_virus_(isolate_H77)_genotype_1_g_3 | 41018 |
| 108_Hepatitis_C_virus_(isolate_H77)_genotype_1_g_4 | 41019 |
| 108_Hepatitis_C_virus_(isolate_H77)_genotype_1_g_5 | 41020 |
| 109_Hepatitis_C_virus_(isolate_H77)_genotype_1_g_1 | 41021 |
| 109_Hepatitis_C_virus_(isolate_H77)_genotype_1_g_2 | 41022 |
| 109_Hepatitis_C_virus_(isolate_H77)_genotype_1_g_3 | 41023 |
| 109_Hepatitis_C_virus_(isolate_H77)_genotype_1_g_4 | 41024 |
| 109_Hepatitis_C_virus_(isolate_H77)_genotype_1_g_5 | 41025 |
| 110_Hepatitis_C_virus_(isolate_H77)_genotype_1_g_1 | 41026 |
| 110_Hepatitis_C_virus_(isolate_H77)_genotype_1_g_2 | 41027 |
| 110_Hepatitis_C_virus_(isolate_H77)_genotype_1_g_3 | 41028 |
| 110_Hepatitis_C_virus_(isolate_H77)_genotype_1_g_4 | 41029 |
| 110_Hepatitis_C_virus_(isolate_H77)_genotype_1_g_5 | 41030 |
| 111_Hepatitis_C_virus_(isolate_H77)_genotype_1_g_1 | 41031 |
| 111_Hepatitis_C_virus_(isolate_H77)_genotype_1_g_2 | 41032 |
| 111_Hepatitis_C_virus_(isolate_H77)_genotype_1_g_3 | 41033 |
| 111_Hepatitis_C_virus_(isolate_H77)_genotype_1_g_4 | 41034 |
| 111_Hepatitis_C_virus_(isolate_H77)_genotype_1_g_5 | 41035 |
| 112_Hepatitis_C_virus_(isolate_H77)_genotype_1_g_1 | 41036 |
| 112_Hepatitis_C_virus_(isolate_H77)_genotype_1_g_2 | 41037 |
| 112_Hepatitis_C_virus_(isolate_H77)_genotype_1_g_3 | 41038 |
| 112_Hepatitis_C_virus_(isolate_H77)_genotype_1_g_4 | 41039 |
| 112_Hepatitis_C_virus_(isolate_H77)_genotype_1_g_5 | 41040 |
| 113_Hepatitis_C_virus_(isolate_H77)_genotype_1_g_1 | 41041 |
| 113_Hepatitis_C_virus_(isolate_H77)_genotype_1_g_2 | 41042 |
| 113_Hepatitis_C_virus_(isolate_H77)_genotype_1_g_3 | 41043 |
| 113_Hepatitis_C_virus_(isolate_H77)_genotype_1_g_4 | 41044 |
| 113_Hepatitis_C_virus_(isolate_H77)_genotype_1_g_5 | 41045 |
| 114_Hepatitis_C_virus_(isolate_H77)_genotype_1_g_1 | 41046 |
| 114_Hepatitis_C_virus_(isolate_H77)_genotype_1_g_2 | 41047 |
| 114_Hepatitis_C_virus_(isolate_H77)_genotype_1_g_3 | 41048 |
| 114_Hepatitis_C_virus_(isolate_H77)_genotype_1_g_4 | 41049 |
| 114_Hepatitis_C_virus_(isolate_H77)_genotype_1_g_5 | 41050 |
| 115_Hepatitis_C_virus_(isolate_H77)_genotype_1_g_1 | 41051 |
| 115_Hepatitis_C_virus_(isolate_H77)_genotype_1_g_2 | 41052 |
| 115_Hepatitis_C_virus_(isolate_H77)_genotype_1_g_3 | 41053 |
| 115_Hepatitis_C_virus_(isolate_H77)_genotype_1_g_4 | 41054 |
| 115_Hepatitis_C_virus_(isolate_H77)_genotype_1_g_5 | 41055 |
| 116_Influenza_A_virus_(A/goose/Guangdong/1/1996(H5N1))_{—} | 41056 |
| polymerase_(PA)_and_PA-X_protein_(PA-X)_genes_g_1 | |
| 116_Influenza_A_virus_(A/goose/Guangdong/1/1996(H5N1))_{—} | 41057 |
| polymerase_(PA)_and_PA-X_protein_(PA-X)_genes_g_2 | |
| 116_Influenza_A_virus_(A/goose/Guangdong/1/1996(H5N1))_{—} | 41058 |
| polymerase_(PA)_and_PA-X_protein_(PA-X)_genes_g_3 | |
| 116_Influenza_A_virus_(A/goose/Guangdong/1/1996(H5N1))_{—} | 41059 |
| polymerase_(PA)_and_PA-X_protein_(PA-X)_genes_g_4 | |
| 116_Influenza_A_virus_(A/goose/Guangdong/1/1996(H5N1))_{—} | 41060 |
| polymerase_(PA)_and_PA-X_protein_(PA-X)_genes_g_5 | |
| 117_Influenza_A_virus_(A/goose/Guangdong/1/1996(H5N1))_{—} | 41061 |
| polymerase_(PA)_and_PA-X_protein_(PA-X)_genes_g_1 | |
| 117_Influenza_A_virus_(A/goose/Guangdong/1/1996(H5N1))_{—} | 41062 |
| polymerase_(PA)_and_PA-X_protein_(PA-X)_genes_g_2 | |
| 117_Influenza_A_virus_(A/goose/Guangdong/1/1996(H5N1))_{—} | 41063 |
| polymerase_(PA)_and_PA-X_protein_(PA-X)_genes_g_3 | |
| 117_Influenza_A_virus_(A/goose/Guangdong/1/1996(H5N1))_{—} | 41064 |
| polymerase_(PA)_and_PA-X_protein_(PA-X)_genes_g_4 | |
| 117_Influenza_A_virus_(A/goose/Guangdong/1/1996(H5N1))_{—} | 41065 |
| polymerase_(PA)_and_PA-X_protein_(PA-X)_genes_g_5 | |
| 118_Influenza_A_virus_(A/goose/Guangdong/1/1996(H5N1))_{—} | 41066 |
| polymerase_(PA)_and_PA-X_protein_(PA-X)_genes_g_1 | |
| 118_Influenza_A_virus_(A/goose/Guangdong/1/1996(H5N1))_{—} | 41067 |
| polymerase_(PA)_and_PA-X_protein_(PA-X)_genes_g_2 | |
| 118_Influenza_A_virus_(A/goose/Guangdong/1/1996(H5N1))_{—} | 41068 |
| polymerase_(PA)_and_PA-X_protein_(PA-X)_genes_g_3 | |
| 118_Influenza_A_virus_(A/goose/Guangdong/1/1996(H5N1))_{—} | 41069 |
| polymerase_(PA)_and_PA-X_protein_(PA-X)_genes_g_4 | |
| 118_Influenza_A_virus_(A/goose/Guangdong/1/1996(H5N1))_{—} | 41070 |
| polymerase_(PA)_and_PA-X_protein_(PA-X)_genes_g_5 | |
| 119_Influenza_A_virus_(A/goose/Guangdong/1/1996(H5N1))_{—} | 41071 |
| polymerase_(PA)_and_PA-X_protein_(PA-X)_genes_g_1 | |
| 119_Influenza_A_virus_(A/goose/Guangdong/1/1996(H5N1))_{—} | 41072 |
| polymerase_(PA)_and_PA-X_protein_(PA-X)_genes_g_2 | |
| 119_Influenza_A_virus_(A/goose/Guangdong/1/1996(H5N1))_{—} | 41073 |
| polymerase_(PA)_and_PA-X_protein_(PA-X)_genes_g_3 | |
| 119_Influenza_A_virus_(A/goose/Guangdong/1/1996(H5N1))_{—} | 41074 |
| polymerase_(PA)_and_PA-X_protein_(PA-X)_genes_g_4 | |
| 119_Influenza_A_virus_(A/goose/Guangdong/1/1996(H5N1))_{—} | 41075 |
| polymerase_(PA)_and_PA-X_protein_(PA-X)_genes_g_5 | |
| 120_Influenza_A_virus_(A/goose/Guangdong/1/1996(H5N1))_{—} | 41076 |
| polymerase_(PA)_and_PA-X_protein_(PA-X)_genes_g_1 | |
| 120_Influenza_A_virus_(A/goose/Guangdong/1/1996(H5N1))_{—} | 41077 |
| polymerase_(PA)_and_PA-X_protein_(PA-X)_genes_g_2 | |
| 120_Influenza_A_virus_(A/goose/Guangdong/1/1996(H5N1))_{—} | 41078 |
| polymerase_(PA)_and_PA-X_protein_(PA-X)_genes_g_3 | |
| 120_Influenza_A_virus_(A/goose/Guangdong/1/1996(H5N1))_{—} | 41079 |
| polymerase_(PA)_and_PA-X_protein_(PA-X)_genes_g_4 | |
| 120_Influenza_A_virus_(A/goose/Guangdong/1/1996(H5N1))_{—} | 41080 |
| polymerase_(PA)_and_PA-X_protein_(PA-X)_genes_g_5 | |
| 121_Influenza_A_virus_(A/goose/Guangdong/1/1996(H5N1))_{—} | 41081 |
| polymerase_(PA)_and_PA-X_protein_(PA-X)_genes_g_1 | |
| 121_Influenza_A_virus_(A/goose/Guangdong/1/1996(H5N1))_{—} | 41082 |
| polymerase_(PA)_and_PA-X_protein_(PA-X)_genes_g_2 | |
| 121_Influenza_A_virus_(A/goose/Guangdong/1/1996(H5N1))_{—} | 41083 |
| polymerase_(PA)_and_PA-X_protein_(PA-X)_genes_g_3 | |
| 121_Influenza_A_virus_(A/goose/Guangdong/1/1996(H5N1))_{—} | 41084 |
| polymerase_(PA)_and_PA-X_protein_(PA-X)_genes_g_4 | |
| 121_Influenza_A_virus_(A/goose/Guangdong/1/1996(H5N1))_{—} | 41085 |
| polymerase_(PA)_and_PA-X_protein_(PA-X)_genes_g_5 | |
| 122_Influenza_A_virus_(A/Korea/426/1968(H2N2))_segment_8_g_1 | 41086 |
| 122_Influenza_A_virus_(A/Korea/426/1968(H2N2))_segment_8_g_2 | 41087 |
| 122_Influenza_A_virus_(A/Korea/426/1968(H2N2))_segment_8_g_3 | 41088 |
| 122_Influenza_A_virus_(A/Korea/426/1968(H2N2))_segment_8_g_4 | 41089 |
| 122_Influenza_A_virus_(A/Korea/426/1968(H2N2))_segment_8_g_5 | 41090 |
| 123_Influenza_A_virus_(A/Korea/426/1968(H2N2))_segment_8_g_1 | 41091 |
| 123_Influenza_A_virus_(A/Korea/426/1968(H2N2))_segment_8_g_2 | 41092 |
| 123_Influenza_A_virus_(A/Korea/426/1968(H2N2))_segment_8_g_3 | 41093 |
| 123_Influenza_A_virus_(A/Korea/426/1968(H2N2))_segment_8_g_4 | 41094 |
| 123_Influenza_A_virus_(A/Korea/426/1968(H2N2))_segment_8_g_5 | 41095 |
| 124_Human_papillomavirus_54_g_1 | 41096 |
| 124_Human_papillomavirus_54_g_2 | 41097 |
| 124_Human_papillomavirus_54_g_3 | 41098 |
| 124_Human_papillomavirus_54_g_4 | 41099 |
| 124_Human_papillomavirus_54_g_5 | 41100 |
| 125_Human_papillomavirus_54_g_1 | 41101 |
| 125_Human_papillomavirus_54_g_2 | 41102 |
| 125_Human_papillomavirus_54_g_3 | 41103 |
| 125_Human_papillomavirus_54_g_4 | 41104 |
| 125_Human_papillomavirus_54_g_5 | 41105 |
| 126_Human_papillomavirus_54_g_1 | 41106 |
| 126_Human_papillomavirus_54_g_2 | 41107 |
| 126_Human_papillomavirus_54_g_3 | 41108 |
| 126_Human_papillomavirus_54_g_4 | 41109 |
| 126_Human_papillomavirus_54_g_5 | 41110 |
| 127_Human_papillomavirus_54_g_1 | 41111 |
| 127_Human_papillomavirus_54_g_2 | 41112 |
| 127_Human_papillomavirus_54_g_3 | 41113 |
| 127_Human_papillomavirus_54_g_4 | 41114 |
| 127_Human_papillomavirus_54_g_5 | 41115 |
| 128_Human_papillomavirus_54_g_1 | 41116 |
| 128_Human_papillomavirus_54_g_2 | 41117 |
| 128_Human_papillomavirus_54_g_3 | 41118 |
| 128_Human_papillomavirus_54_g_4 | 41119 |
| 128_Human_papillomavirus_54_g_5 | 41120 |
| 129_Human_papillomavirus_54_g_1 | 41121 |
| 129_Human_papillomavirus_54_g_2 | 41122 |
| 129_Human_papillomavirus_54_g_3 | 41123 |
| 129_Human_papillomavirus_54_g_4 | 41124 |
| 129_Human_papillomavirus_54_g_5 | 41125 |
| 130_Human_papillomavirus_54_g_1 | 41126 |
| 130_Human_papillomavirus_54_g_2 | 41127 |
| 130_Human_papillomavirus_54_g_3 | 41128 |
| 130_Human_papillomavirus_54_g_4 | 41129 |
| 130_Human_papillomavirus_54_g_5 | 41130 |
| 131_Human_papillomavirus_54_g_1 | 41131 |
| 131_Human_papillomavirus_54_g_2 | 41132 |
| 131_Human_papillomavirus_54_g_3 | 41133 |
| 131_Human_papillomavirus_54_g_4 | 41134 |
| 131_Human_papillomavirus_54_g_5 | 41135 |
| 132_Human_papillomavirus_54_g_1 | 41136 |
| 132_Human_papillomavirus_54_g_2 | 41137 |
| 132_Human_papillomavirus_54_g_3 | 41138 |
| 132_Human_papillomavirus_54_g_4 | 41139 |
| 132_Human_papillomavirus_54_g_5 | 41140 |
| 133_Human_papillomavirus_54_g_1 | 41141 |
| 133_Human_papillomavirus_54_g_2 | 41142 |
| 133_Human_papillomavirus_54_g_3 | 41143 |
| 133_Human_papillomavirus_54_g_4 | 41144 |
| 133_Human_papillomavirus_54_g_5 | 41145 |
| 134_Human_papillomavirus_54_g_1 | 41146 |
| 134_Human_papillomavirus_54_g_2 | 41147 |
| 134_Human_papillomavirus_54_g_3 | 41148 |
| 134_Human_papillomavirus_54_g_4 | 41149 |
| 134_Human_papillomavirus_54_g_5 | 41150 |
| 135_Human_papillomavirus_54_g_1 | 41151 |
| 135_Human_papillomavirus_54_g_2 | 41152 |
| 135_Human_papillomavirus_54_g_3 | 41153 |
| 135_Human_papillomavirus_54_g_4 | 41154 |
| 135_Human_papillomavirus_54_g_5 | 41155 |
| 136_Human_papillomavirus_54_g_1 | 41156 |
| 136_Human_papillomavirus_54_g_2 | 41157 |
| 136_Human_papillomavirus_54_g_3 | 41158 |
| 136_Human_papillomavirus_54_g_4 | 41159 |
| 136_Human_papillomavirus_54_g_5 | 41160 |
| 137_Human_T-lymphotropic_virus_1_g_1 | 41161 |
| 137_Human_T-lymphotropic_virus_1_g_2 | 41162 |
| 137_Human_T-lymphotropic_virus_1_g_3 | 41163 |
| 137_Human_T-lymphotropic_virus_1_g_4 | 41164 |
| 137_Human_T-lymphotropic_virus_1_g_5 | 41165 |
| 138_Human_T-lymphotropic_virus_1_g_1 | 41166 |
| 138_Human_T-lymphotropic_virus_1_g_2 | 41167 |
| 138_Human_T-lymphotropic_virus_1_g_3 | 41168 |
| 138_Human_T-lymphotropic_virus_1_g_4 | 41169 |
| 138_Human_T-lymphotropic_virus_1_g_5 | 41170 |
| 139_Human_T-lymphotropic_virus_1_g_1 | 41171 |
| 139_Human_T-lymphotropic_virus_1_g_2 | 41172 |
| 139_Human_T-lymphotropic_virus_1_g_3 | 41173 |
| 139_Human_T-lymphotropic_virus_1_g_4 | 41174 |
| 139_Human_T-lymphotropic_virus_1_g_5 | 41175 |
| 140_Human_T-lymphotropic_virus_1_g_1 | 41176 |
| 140_Human_T-lymphotropic_virus_1_g_2 | 41177 |
| 140_Human_T-lymphotropic_virus_1_g_3 | 41178 |
| 140_Human_T-lymphotropic_virus_1_g_4 | 41179 |
| 140_Human_T-lymphotropic_virus_1_g_5 | 41180 |
| 141_Human_T-lymphotropic_virus_1_g_1 | 41181 |
| 141_Human_T-lymphotropic_virus_1_g_2 | 41182 |
| 141_Human_T-lymphotropic_virus_1_g_3 | 41183 |
| 141_Human_T-lymphotropic_virus_1_g_4 | 41184 |
| 141_Human_T-lymphotropic_virus_1_g_5 | 41185 |
| 142_Human_T-lymphotropic_virus_1_g_1 | 41186 |
| 142_Human_T-lymphotropic_virus_1_g_2 | 41187 |
| 142_Human_T-lymphotropic_virus_1_g_3 | 41188 |
| 142_Human_T-lymphotropic_virus_1_g_4 | 41189 |
| 142_Human_T-lymphotropic_virus_1_g_5 | 41190 |
| 143_Human_T-lymphotropic_virus_1_g_1 | 41191 |
| 143_Human_T-lymphotropic_virus_1_g_2 | 41192 |
| 143_Human_T-lymphotropic_virus_1_g_3 | 41193 |
| 143_Human_T-lymphotropic_virus_1_g_4 | 41194 |
| 143_Human_T-lymphotropic_virus_1_g_5 | 41195 |
| 144_Human_T-lymphotropic_virus_1_g_1 | 41196 |
| 144_Human_T-lymphotropic_virus_1_g_2 | 41197 |
| 144_Human_T-lymphotropic_virus_1_g_3 | 41198 |
| 144_Human_T-lymphotropic_virus_1_g_4 | 41199 |
| 144_Human_T-lymphotropic_virus_1_g_5 | 41200 |
| 145_Human_T-lymphotropic_virus_1_g_1 | 41201 |
| 145_Human_T-lymphotropic_virus_1_g_2 | 41202 |
| 145_Human_T-lymphotropic_virus_1_g_3 | 41203 |
| 145_Human_T-lymphotropic_virus_1_g_4 | 41204 |
| 145_Human_T-lymphotropic_virus_1_g_5 | 41205 |
| 146_Human_T-lymphotropic_virus_1_g_1 | 41206 |
| 146_Human_T-lymphotropic_virus_1_g_2 | 41207 |
| 146_Human_T-lymphotropic_virus_1_g_3 | 41208 |
| 146_Human_T-lymphotropic_virus_1_g_4 | 41209 |
| 146_Human_T-lymphotropic_virus_1_g_5 | 41210 |
| 147_Human_T-lymphotropic_virus_1_g_1 | 41211 |
| 147_Human_T-lymphotropic_virus_1_g_2 | 41212 |
| 147_Human_T-lymphotropic_virus_1_g_3 | 41213 |
| 147_Human_T-lymphotropic_virus_1_g_4 | 41214 |
| 147_Human_T-lymphotropic_virus_1_g_5 | 41215 |
| 148_Human_T-lymphotropic_virus_1_g_1 | 41216 |
| 148_Human_T-lymphotropic_virus_1_g_2 | 41217 |
| 148_Human_T-lymphotropic_virus_1_g_3 | 41218 |
| 148_Human_T-lymphotropic_virus_1_g_4 | 41219 |
| 148_Human_T-lymphotropic_virus_1_g_5 | 41220 |
| 149_Human_T-lymphotropic_virus_1_g_1 | 41221 |
| 149_Human_T-lymphotropic_virus_1_g_2 | 41222 |
| 149_Human_T-lymphotropic_virus_1_g_3 | 41223 |
| 149_Human_T-lymphotropic_virus_1_g_4 | 41224 |
| 149_Human_T-lymphotropic_virus_1_g_5 | 41225 |
| 150_Human_T-lymphotropic_virus_1_g_1 | 41226 |
| 150_Human_T-lymphotropic_virus_1_g_2 | 41227 |
| 150_Human_T-lymphotropic_virus_1_g_3 | 41228 |
| 150_Human_T-lymphotropic_virus_1_g_4 | 41229 |
| 151_Human_T-lymphotropic_virus_1_g_1 | 41230 |
| 151_Human_T-lymphotropic_virus_1_g_2 | 41231 |
| 151_Human_T-lymphotropic_virus_1_g_3 | 41232 |
| 151_Human_T-lymphotropic_virus_1_g_4 | 41233 |
| 151_Human_T-lymphotropic_virus_1_g_5 | 41234 |
| 152_Human_T-lymphotropic_virus_1_g_1 | 41235 |
| 152_Human_T-lymphotropic_virus_1_g_2 | 41236 |
| 152_Human_T-lymphotropic_virus_1_g_3 | 41237 |
| 152_Human_T-lymphotropic_virus_1_g_4 | 41238 |
| 152_Human_T-lymphotropic_virus_1_g_5 | 41239 |
| 153_Human_T-lymphotropic_virus_1_g_1 | 41240 |
| 153_Human_T-lymphotropic_virus_1_g_2 | 41241 |
| 153_Human_T-lymphotropic_virus_1_g_3 | 41242 |
| 153_Human_T-lymphotropic_virus_1_g_4 | 41243 |
| 153_Human_T-lymphotropic_virus_1_g_5 | 41244 |
| 154_Human_T-lymphotropic_virus_1_g_1 | 41245 |
| 154_Human_T-lymphotropic_virus_1_g_2 | 41246 |
| 154_Human_T-lymphotropic_virus_1_g_3 | 41247 |
| 154_Human_T-lymphotropic_virus_1_g_4 | 41248 |
| 154_Human_T-lymphotropic_virus_1_g_5 | 41249 |
| 155_Human_T-lymphotropic_virus_1_g_1 | 41250 |
| 155_Human_T-lymphotropic_virus_1_g_2 | 41251 |
| 155_Human_T-lymphotropic_virus_1_g_3 | 41252 |
| 155_Human_T-lymphotropic_virus_1_g_4 | 41253 |
| 155_Human_T-lymphotropic_virus_1_g_5 | 41254 |
| 156_Human_T-lymphotropic_virus_1_g_1 | 41255 |
| 156_Human_T-lymphotropic_virus_1_g_2 | 41256 |
| 156_Human_T-lymphotropic_virus_1_g_3 | 41257 |
| 156_Human_T-lymphotropic_virus_1_g_4 | 41258 |
| 156_Human_T-lymphotropic_virus_1_g_5 | 41259 |
| 157_Human_T-lymphotropic_virus_1_g_1 | 41260 |
| 157_Human_T-lymphotropic_virus_1_g_2 | 41261 |
| 157_Human_T-lymphotropic_virus_1_g_3 | 41262 |
| 157_Human_T-lymphotropic_virus_1_g_4 | 41263 |
| 157_Human_T-lymphotropic_virus_1_g_5 | 41264 |
| 158_Human_T-lymphotropic_virus_1_g_1 | 41265 |
| 158_Human_T-lymphotropic_virus_1_g_2 | 41266 |
| 158_Human_T-lymphotropic_virus_1_g_3 | 41267 |
| 158_Human_T-lymphotropic_virus_1_g_4 | 41268 |
| 158_Human_T-lymphotropic_virus_1_g_5 | 41269 |
| 159_Human_T-lymphotropic_virus_1_g_1 | 41270 |
| 159_Human_T-lymphotropic_virus_1_g_2 | 41271 |
| 159_Human_T-lymphotropic_virus_1_g_3 | 41272 |
| 159_Human_T-lymphotropic_virus_1_g_4 | 41273 |
| 159_Human_T-lymphotropic_virus_1_g_5 | 41274 |
| 160_Human_T-lymphotropic_virus_1_g_1 | 41275 |
| 160_Human_T-lymphotropic_virus_1_g_2 | 41276 |
| 160_Human_T-lymphotropic_virus_1_g_3 | 41277 |
| 160_Human_T-lymphotropic_virus_1_g_4 | 41278 |
| 160_Human_T-lymphotropic_virus_1_g_5 | 41279 |
| 161_Influenza_A_virus_(A/Korea/426/1968(H2N2))_segment_1_g_1 | 41280 |
| 161_Influenza_A_virus_(A/Korea/426/1968(H2N2))_segment_1_g_2 | 41281 |
| 161_Influenza_A_virus_(A/Korea/426/1968(H2N2))_segment_1_g_3 | 41282 |
| 161_Influenza_A_virus_(A/Korea/426/1968(H2N2))_segment_1_g_4 | 41283 |
| 161_Influenza_A_virus_(A/Korea/426/1968(H2N2))_segment_1_g_5 | 41284 |
| 162_Influenza_A_virus_(A/Korea/426/1968(H2N2))_segment_1_g_1 | 41285 |
| 162_Influenza_A_virus_(A/Korea/426/1968(H2N2))_segment_1_g_2 | 41286 |
| 162_Influenza_A_virus_(A/Korea/426/1968(H2N2))_segment_1_g_3 | 41287 |
| 162_Influenza_A_virus_(A/Korea/426/1968(H2N2))_segment_1_g_4 | 41288 |
| 162_Influenza_A_virus_(A/Korea/426/1968(H2N2))_segment_1_g_5 | 41289 |
| 163_Influenza_A_virus_(A/Korea/426/1968(H2N2))_segment_1_g_1 | 41290 |
| 163_Influenza_A_virus_(A/Korea/426/1968(H2N2))_segment_1_g_2 | 41291 |
| 163_Influenza_A_virus_(A/Korea/426/1968(H2N2))_segment_1_g_3 | 41292 |
| 163_Influenza_A_virus_(A/Korea/426/1968(H2N2))_segment_1_g_4 | 41293 |
| 163_Influenza_A_virus_(A/Korea/426/1968(H2N2))_segment_1_g_5 | 41294 |
| 164_Influenza_A_virus_(A/Korea/426/1968(H2N2))_segment_1_g_1 | 41295 |
| 164_Influenza_A_virus_(A/Korea/426/1968(H2N2))_segment_1_g_2 | 41296 |
| 164_Influenza_A_virus_(A/Korea/426/1968(H2N2))_segment_1_g_3 | 41297 |
| 164_Influenza_A_virus_(A/Korea/426/1968(H2N2))_segment_1_g_4 | 41298 |
| 165_Influenza_A_virus_(A/Korea/426/1968(H2N2))_segment_1_g_1 | 41299 |
| 165_Influenza_A_virus_(A/Korea/426/1968(H2N2))_segment_1_g_2 | 41300 |
| 165_Influenza_A_virus_(A/Korea/426/1968(H2N2))_segment_1_g_3 | 41301 |
| 165_Influenza_A_virus_(A/Korea/426/1968(H2N2))_segment_1_g_4 | 41302 |
| 165_Influenza_A_virus_(A/Korea/426/1968(H2N2))_segment_1_g_5 | 41303 |
| 166_Influenza_A_virus_(A/Korea/426/1968(H2N2))_segment_1_g_1 | 41304 |
| 166_Influenza_A_virus_(A/Korea/426/1968(H2N2))_segment_1_g_2 | 41305 |
| 166_Influenza_A_virus_(A/Korea/426/1968(H2N2))_segment_1_g_3 | 41306 |
| 166_Influenza_A_virus_(A/Korea/426/1968(H2N2))_segment_1_g_4 | 41307 |
| 166_Influenza_A_virus_(A/Korea/426/1968(H2N2))_segment_1_g_5 | 41308 |
| 167_Influenza_A_virus_(A/Korea/426/1968(H2N2))_segment_1_g_1 | 41309 |
| 167_Influenza_A_virus_(A/Korea/426/1968(H2N2))_segment_1_g_2 | 41310 |
| 167_Influenza_A_virus_(A/Korea/426/1968(H2N2))_segment_1_g_3 | 41311 |
| 167_Influenza_A_virus_(A/Korea/426/1968(H2N2))_segment_1_g_4 | 41312 |
| 167_Influenza_A_virus_(A/Korea/426/1968(H2N2))_segment_1_g_5 | 41313 |
| 168_Influenza_A_virus_(A/Korea/426/1968(H2N2))_segment_1_g_1 | 41314 |
| 168_Influenza_A_virus_(A/Korea/426/1968(H2N2))_segment_1_g_2 | 41315 |
| 168_Influenza_A_virus_(A/Korea/426/1968(H2N2))_segment_1_g_3 | 41316 |
| 168_Influenza_A_virus_(A/Korea/426/1968(H2N2))_segment_1_g_4 | 41317 |
| 168_Influenza_A_virus_(A/Korea/426/1968(H2N2))_segment_1_g_5 | 41318 |
| 169_Influenza_A_virus_(A/Korea/426/1968(H2N2))_segment_1_g_1 | 41319 |
| 169_Influenza_A_virus_(A/Korea/426/1968(H2N2))_segment_1_g_2 | 41320 |
| 169_Influenza_A_virus_(A/Korea/426/1968(H2N2))_segment_1_g_3 | 41321 |
| 169_Influenza_A_virus_(A/Korea/426/1968(H2N2))_segment_1_g_4 | 41322 |
| 169_Influenza_A_virus_(A/Korea/426/1968(H2N2))_segment_1_g_5 | 41323 |
| 170_Influenza_A_virus_(A/Puerto_Rico/8/1934(H1N1))_segment_8_g_1 | 41324 |
| 170_Influenza_A_virus_(A/Puerto_Rico/8/1934(H1N1))_segment_8_g_2 | 41325 |
| 170_Influenza_A_virus_(A/Puerto_Rico/8/1934(H1N1))_segment_8_g_3 | 41326 |
| 170_Influenza_A_virus_(A/Puerto_Rico/8/1934(H1N1))_segment_8_g_4 | 41327 |
| 170_Influenza_A_virus_(A/Puerto_Rico/8/1934(H1N1))_segment_8_g_5 | 41328 |
| 171_Influenza_A_virus_(A/Puerto_Rico/8/1934(H1N1))_segment_8_g_1 | 41329 |
| 171_Influenza_A_virus_(A/Puerto_Rico/8/1934(H1N1))_segment_8_g_2 | 41330 |
| 171_Influenza_A_virus_(A/Puerto_Rico/8/1934(H1N1))_segment_8_g_3 | 41331 |
| 171_Influenza_A_virus_(A/Puerto_Rico/8/1934(H1N1))_segment_8_g_4 | 41332 |
| 171_Influenza_A_virus_(A/Puerto_Rico/8/1934(H1N1))_segment_8_g_5 | 41333 |
| 172_Influenza_A_virus_(A/California/07/2009(H1N1))_{—} | 41334 |
| segment_2_polymerase_PB1_(PB1)_gene_g_1 | |
| 172_Influenza_A_virus_(A/California/07/2009(H1N1))_{—} | 41335 |
| segment_2_polymerase_PB1_(PB1)_gene_g_2 | |
| 172_Influenza_A_virus_(A/California/07/2009(H1N1))_{—} | 41336 |
| segment_2_polymerase_PB1_(PB1)_gene_g_3 | |
| 172_Influenza_A_virus_(A/California/07/2009(H1N1))_{—} | 41337 |
| segment_2_polymerase_PB1_(PB1)_gene_g_4 | |
| 172_Influenza_A_virus_(A/California/07/2009(H1N1))_{—} | 41338 |
| segment_2_polymerase_PB1_(PB1)_gene_g_5 | |
| 173_Influenza_A_virus_(A/California/07/2009(H1N1))_{—} | 41339 |
| segment_2_polymerase_PB1_(PB1)_gene_g_1 | |
| 173_Influenza_A_virus_(A/California/07/2009(H1N1))_{—} | 41340 |
| segment_2_polymerase_PB1_(PB1)_gene_g_2 | |
| 173_Influenza_A_virus_(A/California/07/2009(H1N1))_{—} | 41341 |
| segment_2_polymerase_PB1_(PB1)_gene_g_3 | |
| 173_Influenza_A_virus_(A/California/07/2009(H1N1))_{—} | 41342 |
| segment_2_polymerase_PB1_(PB1)_gene_g_4 | |
| 173_Influenza_A_virus_(A/California/07/2009(H1N1))_{—} | 41343 |
| segment_2_polymerase_PB1_(PB1)_gene_g_5 | |
| 174_Influenza_A_virus_(A/California/07/2009(H1N1))_{—} | 41344 |
| segment_2_polymerase_PB1_(PB1)_gene_g_1 | |
| 174_Influenza_A_virus_(A/California/07/2009(H1N1))_{—} | 41345 |
| segment_2_polymerase_PB1_(PB1)_gene_g_2 | |
| 174_Influenza_A_virus_(A/California/07/2009(H1N1))_{—} | 41346 |
| segment_2_polymerase_PB1_(PB1)_gene_g_3 | |
| 174_Influenza_A_virus_(A/California/07/2009(H1N1))_{—} | 41347 |
| segment_2_polymerase_PB1_(PB1)_gene_g_4 | |
| 174_Influenza_A_virus_(A/California/07/2009(H1N1))_{—} | 41348 |
| segment_2_polymerase_PB1_(PB1)_gene_g_5 | |
| 175_Influenza_A_virus_(A/California/07/2009(H1N1))_{—} | 41349 |
| segment_2_polymerase_PB1_(PB1)_gene_g_1 | |
| 175_Influenza_A_virus_(A/California/07/2009(H1N1))_{—} | 41350 |
| segment_2_polymerase_PB1_(PB1)_gene_g_2 | |
| 175_Influenza_A_virus_(A/California/07/2009(H1N1))_{—} | 41351 |
| segment_2_polymerase_PB1_(PB1)_gene_g_3 | |
| 175_Influenza_A_virus_(A/California/07/2009(H1N1))_{—} | 41352 |
| segment_2_polymerase_PB1_(PB1)_gene_g_4 | |
| 175_Influenza_A_virus_(A/California/07/2009(H1N1))_{—} | 41353 |
| segment_2_polymerase_PB1_(PB1)_gene_g_5 | |
| 176_Influenza_A_virus_(A/California/07/2009(H1N1))_{—} | 41354 |
| segment_2_polymerase_PB1_(PB1)_gene_g_1 | |
| 176_Influenza_A_virus_(A/California/07/2009(H1N1))_{—} | 41355 |
| segment_2_polymerase_PB1_(PB1)_gene_g_2 | |
| 176_Influenza_A_virus_(A/California/07/2009(H1N1))_{—} | 41356 |
| segment_2_polymerase_PB1_(PB1)_gene_g_3 | |
| 176_Influenza_A_virus_(A/California/07/2009(H1N1))_{—} | 41357 |
| segment_2_polymerase_PB1_(PB1)_gene_g_4 | |
| 176_Influenza_A_virus_(A/California/07/2009(H1N1))_{—} | 41358 |
| segment_2_polymerase_PB1_(PB1)_gene_g_5 | |
| 177_Influenza_A_virus_(A/California/07/2009(H1N1))_{—} | 41359 |
| segment_2_polymerase_PB1_(PB1)_gene_g_1 | |
| 177_Influenza_A_virus_(A/California/07/2009(H1N1))_{—} | 41360 |
| segment_2_polymerase_PB1_(PB1)_gene_g_2 | |
| 177_Influenza_A_virus_(A/California/07/2009(H1N1))_{—} | 41361 |
| segment_2_polymerase_PB1_(PB1)_gene_g_3 | |
| 177_Influenza_A_virus_(A/California/07/2009(H1N1))_{—} | 41362 |
| segment_2_polymerase_PB1_(PB1)_gene_g_4 | |
| 177_Influenza_A_virus_(A/California/07/2009(H1N1))_{—} | 41363 |
| segment_2_polymerase_PB1_(PB1)_gene_g_5 | |
| 178_Influenza_A_virus_(A/California/07/2009(H1N1))_{—} | 41364 |
| segment_2_polymerase_PB1_(PB1)_gene_g_1 | |
| 178_Influenza_A_virus_(A/California/07/2009(H1N1))_{—} | 41365 |
| segment_2_polymerase_PB1_(PB1)_gene_g_2 | |
| 178_Influenza_A_virus_(A/California/07/2009(H1N1))_{—} | 41366 |
| segment_2_polymerase_PB1_(PB1)_gene_g_3 | |
| 178_Influenza_A_virus_(A/California/07/2009(H1N1))_{—} | 41367 |
| segment_2_polymerase_PB1_(PB1)_gene_g_4 | |
| 178_Influenza_A_virus_(A/California/07/2009(H1N1))_{—} | 41368 |
| segment_2_polymerase_PB1_(PB1)_gene_g_5 | |
| 179_Human_herpesvirus_5_strain_Merlin_g_1 | 41369 |
| 179_Human_herpesvirus_5_strain_Merlin_g_2 | 41370 |
| 179_Human_herpesvirus_5_strain_Merlin_g_3 | 41371 |
| 179_Human_herpesvirus_5_strain_Merlin_g_4 | 41372 |
| 179_Human_herpesvirus_5_strain_Merlin_g_5 | 41373 |
| 180_Human_herpesvirus_5_strain_Merlin_g_1 | 41374 |
| 180_Human_herpesvirus_5_strain_Merlin_g_2 | 41375 |
| 180_Human_herpesvirus_5_strain_Merlin_g_3 | 41376 |
| 180_Human_herpesvirus_5_strain_Merlin_g_4 | 41377 |
| 180_Human_herpesvirus_5_strain_Merlin_g_5 | 41378 |
| 181_Human_herpesvirus_5_strain_Merlin_g_1 | 41379 |
| 181_Human_herpesvirus_5_strain_Merlin_g_2 | 41380 |
| 181_Human_herpesvirus_5_strain_Merlin_g_3 | 41381 |
| 181_Human_herpesvirus_5_strain_Merlin_g_4 | 41382 |
| 181_Human_herpesvirus_5_strain_Merlin_g_5 | 41383 |
| 182_Human_herpesvirus_5_strain_Merlin_g_1 | 41384 |
| 182_Human_herpesvirus_5_strain_Merlin_g_2 | 41385 |
| 182_Human_herpesvirus_5_strain_Merlin_g_3 | 41386 |
| 182_Human_herpesvirus_5_strain_Merlin_g_4 | 41387 |
| 182_Human_herpesvirus_5_strain_Merlin_g_5 | 41388 |
| 184_Human_herpesvirus_5_strain_Merlin_g_1 | 41389 |
| 184_Human_herpesvirus_5_strain_Merlin_g_2 | 41390 |
| 184_Human_herpesvirus_5_strain_Merlin_g_3 | 41391 |
| 184_Human_herpesvirus_5_strain_Merlin_g_4 | 41392 |
| 184_Human_herpesvirus_5_strain_Merlin_g_5 | 41393 |
| 185_Human_herpesvirus_5_strain_Merlin_g_1 | 41394 |
| 185_Human_herpesvirus_5_strain_Merlin_g_2 | 41395 |
| 185_Human_herpesvirus_5_strain_Merlin_g_3 | 41396 |
| 186_Human_herpesvirus_5_strain_Merlin_g_1 | 41397 |
| 186_Human_herpesvirus_5_strain_Merlin_g_2 | 41398 |
| 186_Human_herpesvirus_5_strain_Merlin_g_3 | 41399 |
| 186_Human_herpesvirus_5_strain_Merlin_g_4 | 41400 |
| 186_Human_herpesvirus_5_strain_Merlin_g_5 | 41401 |
| 187_Human_herpesvirus_5_strain_Merlin_g_1 | 41402 |
| 187_Human_herpesvirus_5_strain_Merlin_g_2 | 41403 |
| 187_Human_herpesvirus_5_strain_Merlin_g_3 | 41404 |
| 187_Human_herpesvirus_5_strain_Merlin_g_4 | 41405 |
| 187_Human_herpesvirus_5_strain_Merlin_g_5 | 41406 |
| 188_Human_herpesvirus_5_strain_Merlin_g_1 | 41407 |
| 188_Human_herpesvirus_5_strain_Merlin_g_2 | 41408 |
| 188_Human_herpesvirus_5_strain_Merlin_g_3 | 41409 |
| 188_Human_herpesvirus_5_strain_Merlin_g_4 | 41410 |
| 188_Human_herpesvirus_5_strain_Merlin_g_5 | 41411 |
| 189_Human_herpesvirus_5_strain_Merlin_g_1 | 41412 |
| 189_Human_herpesvirus_5_strain_Merlin_g_2 | 41413 |
| 189_Human_herpesvirus_5_strain_Merlin_g_3 | 41414 |
| 189_Human_herpesvirus_5_strain_Merlin_g_4 | 41415 |
| 189_Human_herpesvirus_5_strain_Merlin_g_5 | 41416 |
| 190_Human_herpesvirus_5_strain_Merlin_g_1 | 41417 |
| 190_Human_herpesvirus_5_strain_Merlin_g_2 | 41418 |
| 190_Human_herpesvirus_5_strain_Merlin_g_3 | 41419 |
| 191_Human_herpesvirus_5_strain_Merlin_g_1 | 41420 |
| 191_Human_herpesvirus_5_strain_Merlin_g_2 | 41421 |
| 191_Human_herpesvirus_5_strain_Merlin_g_3 | 41422 |
| 191_Human_herpesvirus_5_strain_Merlin_g_4 | 41423 |
| 191_Human_herpesvirus_5_strain_Merlin_g_5 | 41424 |
| 192_Human_herpesvirus_5_strain_Merlin_g_1 | 41425 |
| 192_Human_herpesvirus_5_strain_Merlin_g_2 | 41426 |
| 192_Human_herpesvirus_5_strain_Merlin_g_3 | 41427 |
| 193_Human_herpesvirus_5_strain_Merlin_g_1 | 41428 |
| 193_Human_herpesvirus_5_strain_Merlin_g_2 | 41429 |
| 193_Human_herpesvirus_5_strain_Merlin_g_3 | 41430 |
| 193_Human_herpesvirus_5_strain_Merlin_g_4 | 41431 |
| 193_Human_herpesvirus_5_strain_Merlin_g_5 | 41432 |
| 194_Human_herpesvirus_5_strain_Merlin_g_1 | 41433 |
| 194_Human_herpesvirus_5_strain_Merlin_g_2 | 41434 |
| 194_Human_herpesvirus_5_strain_Merlin_g_3 | 41435 |
| 194_Human_herpesvirus_5_strain_Merlin_g_4 | 41436 |
| 194_Human_herpesvirus_5_strain_Merlin_g_5 | 41437 |
| 195_Human_herpesvirus_5_strain_Merlin_g_1 | 41438 |
| 195_Human_herpesvirus_5_strain_Merlin_g_2 | 41439 |
| 195_Human_herpesvirus_5_strain_Merlin_g_3 | 41440 |
| 195_Human_herpesvirus_5_strain_Merlin_g_4 | 41441 |
| 195_Human_herpesvirus_5_strain_Merlin_g_5 | 41442 |
| 196_Human_herpesvirus_5_strain_Merlin_g_1 | 41443 |
| 196_Human_herpesvirus_5_strain_Merlin_g_2 | 41444 |
| 196_Human_herpesvirus_5_strain_Merlin_g_3 | 41445 |
| 196_Human_herpesvirus_5_strain_Merlin_g_4 | 41446 |
| 196_Human_herpesvirus_5_strain_Merlin_g_5 | 41447 |
| 197_Human_herpesvirus_5_strain_Merlin_g_1 | 41448 |
| 197_Human_herpesvirus_5_strain_Merlin_g_2 | 41449 |
| 197_Human_herpesvirus_5_strain_Merlin_g_3 | 41450 |
| 197_Human_herpesvirus_5_strain_Merlin_g_4 | 41451 |
| 197_Human_herpesvirus_5_strain_Merlin_g_5 | 41452 |
| 198_Human_herpesvirus_5_strain_Merlin_g_1 | 41453 |
| 198_Human_herpesvirus_5_strain_Merlin_g_2 | 41454 |
| 198_Human_herpesvirus_5_strain_Merlin_g_3 | 41455 |
| 198_Human_herpesvirus_5_strain_Merlin_g_4 | 41456 |
| 198_Human_herpesvirus_5_strain_Merlin_g_5 | 41457 |
| 199_Human_herpesvirus_5_strain_Merlin_g_1 | 41458 |
| 199_Human_herpesvirus_5_strain_Merlin_g_2 | 41459 |
| 199_Human_herpesvirus_5_strain_Merlin_g_3 | 41460 |
| 200_Human_herpesvirus_5_strain_Merlin_g_1 | 41461 |
| 200_Human_herpesvirus_5_strain_Merlin_g_2 | 41462 |
| 200_Human_herpesvirus_5_strain_Merlin_g_3 | 41463 |
| 200_Human_herpesvirus_5_strain_Merlin_g_4 | 41464 |
| 200_Human_herpesvirus_5_strain_Merlin_g_5 | 41465 |
| 201_Human_herpesvirus_5_strain_Merlin_g_1 | 41466 |
| 201_Human_herpesvirus_5_strain_Merlin_g_2 | 41467 |
| 201_Human_herpesvirus_5_strain_Merlin_g_3 | 41468 |
| 201_Human_herpesvirus_5_strain_Merlin_g_4 | 41469 |
| 201_Human_herpesvirus_5_strain_Merlin_g_5 | 41470 |
| 202_Human_herpesvirus_5_strain_Merlin_g_1 | 41471 |
| 202_Human_herpesvirus_5_strain_Merlin_g_2 | 41472 |
| 202_Human_herpesvirus_5_strain_Merlin_g_3 | 41473 |
| 202_Human_herpesvirus_5_strain_Merlin_g_4 | 41474 |
| 202_Human_herpesvirus_5_strain_Merlin_g_5 | 41475 |
| 203_Human_herpesvirus_5_strain_Merlin_g_1 | 41476 |
| 203_Human_herpesvirus_5_strain_Merlin_g_2 | 41477 |
| 203_Human_herpesvirus_5_strain_Merlin_g_3 | 41478 |
| 203_Human_herpesvirus_5_strain_Merlin_g_4 | 41479 |
| 204_Human_herpesvirus_5_strain_Merlin_g_1 | 41480 |
| 204_Human_herpesvirus_5_strain_Merlin_g_2 | 41481 |
| 204_Human_herpesvirus_5_strain_Merlin_g_3 | 41482 |
| 204_Human_herpesvirus_5_strain_Merlin_g_4 | 41483 |
| 204_Human_herpesvirus_5_strain_Merlin_g_5 | 41484 |
| 205_Human_herpesvirus_5_strain_Merlin_g_1 | 41485 |
| 205_Human_herpesvirus_5_strain_Merlin_g_2 | 41486 |
| 205_Human_herpesvirus_5_strain_Merlin_g_3 | 41487 |
| 205_Human_herpesvirus_5_strain_Merlin_g_4 | 41488 |
| 205_Human_herpesvirus_5_strain_Merlin_g_5 | 41489 |
| 206_Human_herpesvirus_5_strain_Merlin_g_1 | 41490 |
| 206_Human_herpesvirus_5_strain_Merlin_g_2 | 41491 |
| 206_Human_herpesvirus_5_strain_Merlin_g_3 | 41492 |
| 206_Human_herpesvirus_5_strain_Merlin_g_4 | 41493 |
| 206_Human_herpesvirus_5_strain_Merlin_g_5 | 41494 |
| 207_Human_herpesvirus_5_strain_Merlin_g_1 | 41495 |
| 208_Human_herpesvirus_5_strain_Merlin_g_1 | 41496 |
| 208_Human_herpesvirus_5_strain_Merlin_g_2 | 41497 |
| 208_Human_herpesvirus_5_strain_Merlin_g_3 | 41498 |
| 208_Human_herpesvirus_5_strain_Merlin_g_4 | 41499 |
| 208_Human_herpesvirus_5_strain_Merlin_g_5 | 41500 |
| 209_Human_herpesvirus_5_strain_Merlin_g_1 | 41501 |
| 209_Human_herpesvirus_5_strain_Merlin_g_2 | 41502 |
| 209_Human_herpesvirus_5_strain_Merlin_g_3 | 41503 |
| 209_Human_herpesvirus_5_strain_Merlin_g_4 | 41504 |
| 209_Human_herpesvirus_5_strain_Merlin_g_5 | 41505 |
| 210_Human_herpesvirus_5_strain_Merlin_g_1 | 41506 |
| 210_Human_herpesvirus_5_strain_Merlin_g_2 | 41507 |
| 210_Human_herpesvirus_5_strain_Merlin_g_3 | 41508 |
| 210_Human_herpesvirus_5_strain_Merlin_g_4 | 41509 |
| 210_Human_herpesvirus_5_strain_Merlin_g_5 | 41510 |
| 211_Human_herpesvirus_5_strain_Merlin_g_1 | 41511 |
| 211_Human_herpesvirus_5_strain_Merlin_g_2 | 41512 |
| 211_Human_herpesvirus_5_strain_Merlin_g_3 | 41513 |
| 211_Human_herpesvirus_5_strain_Merlin_g_4 | 41514 |
| 211_Human_herpesvirus_5_strain_Merlin_g_5 | 41515 |
| 212_Human_herpesvirus_5_strain_Merlin_g_1 | 41516 |
| 213_Human_herpesvirus_5_strain_Merlin_g_1 | 41517 |
| 213_Human_herpesvirus_5_strain_Merlin_g_2 | 41518 |
| 214_Human_herpesvirus_5_strain_Merlin_g_1 | 41519 |
| 214_Human_herpesvirus_5_strain_Merlin_g_2 | 41520 |
| 214_Human_herpesvirus_5_strain_Merlin_g_3 | 41521 |
| 214_Human_herpesvirus_5_strain_Merlin_g_4 | 41522 |
| 214_Human_herpesvirus_5_strain_Merlin_g_5 | 41523 |
| 215_Human_herpesvirus_5_strain_Merlin_g_1 | 41524 |
| 215_Human_herpesvirus_5_strain_Merlin_g_2 | 41525 |
| 215_Human_herpesvirus_5_strain_Merlin_g_3 | 41526 |
| 215_Human_herpesvirus_5_strain_Merlin_g_4 | 41527 |
| 216_Human_herpesvirus_5_strain_Merlin_g_1 | 41528 |
| 216_Human_herpesvirus_5_strain_Merlin_g_2 | 41529 |
| 216_Human_herpesvirus_5_strain_Merlin_g_3 | 41530 |
| 216_Human_herpesvirus_5_strain_Merlin_g_4 | 41531 |
| 216_Human_herpesvirus_5_strain_Merlin_g_5 | 41532 |
| 217_Human_herpesvirus_5_strain_Merlin_g_1 | 41533 |
| 217_Human_herpesvirus_5_strain_Merlin_g_2 | 41534 |
| 217_Human_herpesvirus_5_strain_Merlin_g_3 | 41535 |
| 217_Human_herpesvirus_5_strain_Merlin_g_4 | 41536 |
| 217_Human_herpesvirus_5_strain_Merlin_g_5 | 41537 |
| 218_Human_herpesvirus_5_strain_Merlin_g_1 | 41538 |
| 218_Human_herpesvirus_5_strain_Merlin_g_2 | 41539 |
| 218_Human_herpesvirus_5_strain_Merlin_g_3 | 41540 |
| 218_Human_herpesvirus_5_strain_Merlin_g_4 | 41541 |
| 218_Human_herpesvirus_5_strain_Merlin_g_5 | 41542 |
| 219_Human_herpesvirus_5_strain_Merlin_g_1 | 41543 |
| 219_Human_herpesvirus_5_strain_Merlin_g_2 | 41544 |
| 219_Human_herpesvirus_5_strain_Merlin_g_3 | 41545 |
| 219_Human_herpesvirus_5_strain_Merlin_g_4 | 41546 |
| 219_Human_herpesvirus_5_strain_Merlin_g_5 | 41547 |
| 220_Human_herpesvirus_5_strain_Merlin_g_1 | 41548 |
| 220_Human_herpesvirus_5_strain_Merlin_g_2 | 41549 |
| 220_Human_herpesvirus_5_strain_Merlin_g_3 | 41550 |
| 220_Human_herpesvirus_5_strain_Merlin_g_4 | 41551 |
| 220_Human_herpesvirus_5_strain_Merlin_g_5 | 41552 |
| 221_Human_herpesvirus_5_strain_Merlin_g_1 | 41553 |
| 221_Human_herpesvirus_5_strain_Merlin_g_2 | 41554 |
| 221_Human_herpesvirus_5_strain_Merlin_g_3 | 41555 |
| 221_Human_herpesvirus_5_strain_Merlin_g_4 | 41556 |
| 221_Human_herpesvirus_5_strain_Merlin_g_5 | 41557 |
| 222_Human_herpesvirus_5_strain_Merlin_g_1 | 41558 |
| 222_Human_herpesvirus_5_strain_Merlin_g_2 | 41559 |
| 222_Human_herpesvirus_5_strain_Merlin_g_3 | 41560 |
| 223_Human_herpesvirus_5_strain_Merlin_g_1 | 41561 |
| 223_Human_herpesvirus_5_strain_Merlin_g_2 | 41562 |
| 223_Human_herpesvirus_5_strain_Merlin_g_3 | 41563 |
| 223_Human_herpesvirus_5_strain_Merlin_g_4 | 41564 |
| 223_Human_herpesvirus_5_strain_Merlin_g_5 | 41565 |
| 224_Human_herpesvirus_5_strain_Merlin_g_1 | 41566 |
| 224_Human_herpesvirus_5_strain_Merlin_g_2 | 41567 |
| 224_Human_herpesvirus_5_strain_Merlin_g_3 | 41568 |
| 225_Human_herpesvirus_5_strain_Merlin_g_1 | 41569 |
| 225_Human_herpesvirus_5_strain_Merlin_g_2 | 41570 |
| 225_Human_herpesvirus_5_strain_Merlin_g_3 | 41571 |
| 225_Human_herpesvirus_5_strain_Merlin_g_4 | 41572 |
| 225_Human_herpesvirus_5_strain_Merlin_g_5 | 41573 |
| 226_Human_herpesvirus_5_strain_Merlin_g_1 | 41574 |
| 226_Human_herpesvirus_5_strain_Merlin_g_2 | 41575 |
| 226_Human_herpesvirus_5_strain_Merlin_g_3 | 41576 |
| 226_Human_herpesvirus_5_strain_Merlin_g_4 | 41577 |
| 226_Human_herpesvirus_5_strain_Merlin_g_5 | 41578 |
| 227_Human_herpesvirus_5_strain_Merlin_g_1 | 41579 |
| 227_Human_herpesvirus_5_strain_Merlin_g_2 | 41580 |
| 227_Human_herpesvirus_5_strain_Merlin_g_3 | 41581 |
| 227_Human_herpesvirus_5_strain_Merlin_g_4 | 41582 |
| 227_Human_herpesvirus_5_strain_Merlin_g_5 | 41583 |
| 228_Human_herpesvirus_5_strain_Merlin_g_1 | 41584 |
| 228_Human_herpesvirus_5_strain_Merlin_g_2 | 41585 |
| 228_Human_herpesvirus_5_strain_Merlin_g_3 | 41586 |
| 228_Human_herpesvirus_5_strain_Merlin_g_4 | 41587 |
| 228_Human_herpesvirus_5_strain_Merlin_g_5 | 41588 |
| 229_Human_herpesvirus_5_strain_Merlin_g_1 | 41589 |
| 229_Human_herpesvirus_5_strain_Merlin_g_2 | 41590 |
| 229_Human_herpesvirus_5_strain_Merlin_g_3 | 41591 |
| 229_Human_herpesvirus_5_strain_Merlin_g_4 | 41592 |
| 229_Human_herpesvirus_5_strain_Merlin_g_5 | 41593 |
| 230_Human_herpesvirus_5_strain_Merlin_g_1 | 41594 |
| 230_Human_herpesvirus_5_strain_Merlin_g_2 | 41595 |
| 230_Human_herpesvirus_5_strain_Merlin_g_3 | 41596 |
| 230_Human_herpesvirus_5_strain_Merlin_g_4 | 41597 |
| 230_Human_herpesvirus_5_strain_Merlin_g_5 | 41598 |
| 231_Human_herpesvirus_5_strain_Merlin_g_1 | 41599 |
| 231_Human_herpesvirus_5_strain_Merlin_g_2 | 41600 |
| 232_Human_herpesvirus_5_strain_Merlin_g_1 | 41601 |
| 232_Human_herpesvirus_5_strain_Merlin_g_2 | 41602 |
| 232_Human_herpesvirus_5_strain_Merlin_g_3 | 41603 |
| 232_Human_herpesvirus_5_strain_Merlin_g_4 | 41604 |
| 232_Human_herpesvirus_5_strain_Merlin_g_5 | 41605 |
| 233_Human_herpesvirus_5_strain_Merlin_g_1 | 41606 |
| 233_Human_herpesvirus_5_strain_Merlin_g_2 | 41607 |
| 233_Human_herpesvirus_5_strain_Merlin_g_3 | 41608 |
| 233_Human_herpesvirus_5_strain_Merlin_g_4 | 41609 |
| 233_Human_herpesvirus_5_strain_Merlin_g_5 | 41610 |
| 235_Human_herpesvirus_5_strain_Merlin_g_1 | 41611 |
| 235_Human_herpesvirus_5_strain_Merlin_g_2 | 41612 |
| 235_Human_herpesvirus_5_strain_Merlin_g_3 | 41613 |
| 235_Human_herpesvirus_5_strain_Merlin_g_4 | 41614 |
| 235_Human_herpesvirus_5_strain_Merlin_g_5 | 41615 |
| 236_Human_herpesvirus_5_strain_Merlin_g_1 | 41616 |
| 236_Human_herpesvirus_5_strain_Merlin_g_2 | 41617 |
| 236_Human_herpesvirus_5_strain_Merlin_g_3 | 41618 |
| 236_Human_herpesvirus_5_strain_Merlin_g_4 | 41619 |
| 236_Human_herpesvirus_5_strain_Merlin_g_5 | 41620 |
| 237_Human_herpesvirus_5_strain_Merlin_g_1 | 41621 |
| 237_Human_herpesvirus_5_strain_Merlin_g_2 | 41622 |
| 237_Human_herpesvirus_5_strain_Merlin_g_3 | 41623 |
| 238_Human_herpesvirus_5_strain_Merlin_g_1 | 41624 |
| 238_Human_herpesvirus_5_strain_Merlin_g_2 | 41625 |
| 238_Human_herpesvirus_5_strain_Merlin_g_3 | 41626 |
| 238_Human_herpesvirus_5_strain_Merlin_g_4 | 41627 |
| 238_Human_herpesvirus_5_strain_Merlin_g_5 | 41628 |
| 239_Human_herpesvirus_5_strain_Merlin_g_1 | 41629 |
| 239_Human_herpesvirus_5_strain_Merlin_g_2 | 41630 |
| 239_Human_herpesvirus_5_strain_Merlin_g_3 | 41631 |
| 239_Human_herpesvirus_5_strain_Merlin_g_4 | 41632 |
| 239_Human_herpesvirus_5_strain_Merlin_g_5 | 41633 |
| 240_Human_herpesvirus_5_strain_Merlin_g_1 | 41634 |
| 240_Human_herpesvirus_5_strain_Merlin_g_2 | 41635 |
| 240_Human_herpesvirus_5_strain_Merlin_g_3 | 41636 |
| 240_Human_herpesvirus_5_strain_Merlin_g_4 | 41637 |
| 240_Human_herpesvirus_5_strain_Merlin_g_5 | 41638 |
| 241_Human_herpesvirus_5_strain_Merlin_g_1 | 41639 |
| 241_Human_herpesvirus_5_strain_Merlin_g_2 | 41640 |
| 241_Human_herpesvirus_5_strain_Merlin_g_3 | 41641 |
| 241_Human_herpesvirus_5_strain_Merlin_g_4 | 41642 |
| 241_Human_herpesvirus_5_strain_Merlin_g_5 | 41643 |
| 242_Human_herpesvirus_5_strain_Merlin_g_1 | 41644 |
| 242_Human_herpesvirus_5_strain_Merlin_g_2 | 41645 |
| 242_Human_herpesvirus_5_strain_Merlin_g_3 | 41646 |
| 242_Human_herpesvirus_5_strain_Merlin_g_4 | 41647 |
| 242_Human_herpesvirus_5_strain_Merlin_g_5 | 41648 |
| 243_Human_herpesvirus_5_strain_Merlin_g_1 | 41649 |
| 243_Human_herpesvirus_5_strain_Merlin_g_2 | 41650 |
| 243_Human_herpesvirus_5_strain_Merlin_g_3 | 41651 |
| 243_Human_herpesvirus_5_strain_Merlin_g_4 | 41652 |
| 244_Human_herpesvirus_5_strain_Merlin_g_1 | 41653 |
| 244_Human_herpesvirus_5_strain_Merlin_g_2 | 41654 |
| 244_Human_herpesvirus_5_strain_Merlin_g_3 | 41655 |
| 244_Human_herpesvirus_5_strain_Merlin_g_4 | 41656 |
| 244_Human_herpesvirus_5_strain_Merlin_g_5 | 41657 |
| 245_Human_herpesvirus_5_strain_Merlin_g_1 | 41658 |
| 245_Human_herpesvirus_5_strain_Merlin_g_2 | 41659 |
| 246_Human_herpesvirus_5_strain_Merlin_g_1 | 41660 |
| 246_Human_herpesvirus_5_strain_Merlin_g_2 | 41661 |
| 246_Human_herpesvirus_5_strain_Merlin_g_3 | 41662 |
| 246_Human_herpesvirus_5_strain_Merlin_g_4 | 41663 |
| 246_Human_herpesvirus_5_strain_Merlin_g_5 | 41664 |
| 247_Human_herpesvirus_5_strain_Merlin_g_1 | 41665 |
| 247_Human_herpesvirus_5_strain_Merlin_g_2 | 41666 |
| 248_Human_herpesvirus_5_strain_Merlin_g_1 | 41667 |
| 248_Human_herpesvirus_5_strain_Merlin_g_2 | 41668 |
| 248_Human_herpesvirus_5_strain_Merlin_g_3 | 41669 |
| 248_Human_herpesvirus_5_strain_Merlin_g_4 | 41670 |
| 248_Human_herpesvirus_5_strain_Merlin_g_5 | 41671 |
| 249_Human_herpesvirus_5_strain_Merlin_g_1 | 41672 |
| 249_Human_herpesvirus_5_strain_Merlin_g_2 | 41673 |
| 249_Human_herpesvirus_5_strain_Merlin_g_3 | 41674 |
| 249_Human_herpesvirus_5_strain_Merlin_g_4 | 41675 |
| 249_Human_herpesvirus_5_strain_Merlin_g_5 | 41676 |
| 250_Human_herpesvirus_5_strain_Merlin_g_1 | 41677 |
| 250_Human_herpesvirus_5_strain_Merlin_g_2 | 41678 |
| 250_Human_herpesvirus_5_strain_Merlin_g_3 | 41679 |
| 250_Human_herpesvirus_5_strain_Merlin_g_4 | 41680 |
| 251_Human_herpesvirus_5_strain_Merlin_g_1 | 41681 |
| 251_Human_herpesvirus_5_strain_Merlin_g_2 | 41682 |
| 251_Human_herpesvirus_5_strain_Merlin_g_3 | 41683 |
| 251_Human_herpesvirus_5_strain_Merlin_g_4 | 41684 |
| 251_Human_herpesvirus_5_strain_Merlin_g_5 | 41685 |
| 252_Human_herpesvirus_5_strain_Merlin_g_1 | 41686 |
| 252_Human_herpesvirus_5_strain_Merlin_g_2 | 41687 |
| 252_Human_herpesvirus_5_strain_Merlin_g_3 | 41688 |
| 252_Human_herpesvirus_5_strain_Merlin_g_4 | 41689 |
| 253_Human_herpesvirus_5_strain_Merlin_g_1 | 41690 |
| 253_Human_herpesvirus_5_strain_Merlin_g_2 | 41691 |
| 254_Human_herpesvirus_5_strain_Merlin_g_1 | 41692 |
| 254_Human_herpesvirus_5_strain_Merlin_g_2 | 41693 |
| 254_Human_herpesvirus_5_strain_Merlin_g_3 | 41694 |
| 254_Human_herpesvirus_5_strain_Merlin_g_4 | 41695 |
| 254_Human_herpesvirus_5_strain_Merlin_g_5 | 41696 |
| 255_Human_herpesvirus_5_strain_Merlin_g_1 | 41697 |
| 255_Human_herpesvirus_5_strain_Merlin_g_2 | 41698 |
| 255_Human_herpesvirus_5_strain_Merlin_g_3 | 41699 |
| 255_Human_herpesvirus_5_strain_Merlin_g_4 | 41700 |
| 256_Human_herpesvirus_5_strain_Merlin_g_1 | 41701 |
| 256_Human_herpesvirus_5_strain_Merlin_g_2 | 41702 |
| 256_Human_herpesvirus_5_strain_Merlin_g_3 | 41703 |
| 256_Human_herpesvirus_5_strain_Merlin_g_4 | 41704 |
| 256_Human_herpesvirus_5_strain_Merlin_g_5 | 41705 |
| 257_Human_herpesvirus_5_strain_Merlin_g_1 | 41706 |
| 257_Human_herpesvirus_5_strain_Merlin_g_2 | 41707 |
| 257_Human_herpesvirus_5_strain_Merlin_g_3 | 41708 |
| 258_Human_herpesvirus_5_strain_Merlin_g_1 | 41709 |
| 258_Human_herpesvirus_5_strain_Merlin_g_2 | 41710 |
| 258_Human_herpesvirus_5_strain_Merlin_g_3 | 41711 |
| 258_Human_herpesvirus_5_strain_Merlin_g_4 | 41712 |
| 259_Human_herpesvirus_5_strain_Merlin_g_1 | 41713 |
| 259_Human_herpesvirus_5_strain_Merlin_g_2 | 41714 |
| 259_Human_herpesvirus_5_strain_Merlin_g_3 | 41715 |
| 259_Human_herpesvirus_5_strain_Merlin_g_4 | 41716 |
| 259_Human_herpesvirus_5_strain_Merlin_g_5 | 41717 |
| 260_Human_herpesvirus_5_strain_Merlin_g_1 | 41718 |
| 260_Human_herpesvirus_5_strain_Merlin_g_2 | 41719 |
| 260_Human_herpesvirus_5_strain_Merlin_g_3 | 41720 |
| 260_Human_herpesvirus_5_strain_Merlin_g_4 | 41721 |
| 260_Human_herpesvirus_5_strain_Merlin_g_5 | 41722 |
| 261_Human_herpesvirus_5_strain_Merlin_g_1 | 41723 |
| 261_Human_herpesvirus_5_strain_Merlin_g_2 | 41724 |
| 261_Human_herpesvirus_5_strain_Merlin_g_3 | 41725 |
| 261_Human_herpesvirus_5_strain_Merlin_g_4 | 41726 |
| 261_Human_herpesvirus_5_strain_Merlin_g_5 | 41727 |
| 262_Human_herpesvirus_5_strain_Merlin_g_1 | 41728 |
| 262_Human_herpesvirus_5_strain_Merlin_g_2 | 41729 |
| 262_Human_herpesvirus_5_strain_Merlin_g_3 | 41730 |
| 262_Human_herpesvirus_5_strain_Merlin_g_4 | 41731 |
| 262_Human_herpesvirus_5_strain_Merlin_g_5 | 41732 |
| 263_Human_herpesvirus_5_strain_Merlin_g_1 | 41733 |
| 263_Human_herpesvirus_5_strain_Merlin_g_2 | 41734 |
| 264_Human_herpesvirus_5_strain_Merlin_g_1 | 41735 |
| 264_Human_herpesvirus_5_strain_Merlin_g_2 | 41736 |
| 264_Human_herpesvirus_5_strain_Merlin_g_3 | 41737 |
| 265_Human_herpesvirus_5_strain_Merlin_g_1 | 41738 |
| 265_Human_herpesvirus_5_strain_Merlin_g_2 | 41739 |
| 265_Human_herpesvirus_5_strain_Merlin_g_3 | 41740 |
| 265_Human_herpesvirus_5_strain_Merlin_g_4 | 41741 |
| 265_Human_herpesvirus_5_strain_Merlin_g_5 | 41742 |
| 266_Human_herpesvirus_5_strain_Merlin_g_1 | 41743 |
| 266_Human_herpesvirus_5_strain_Merlin_g_2 | 41744 |
| 266_Human_herpesvirus_5_strain_Merlin_g_3 | 41745 |
| 267_Human_herpesvirus_5_strain_Merlin_g_1 | 41746 |
| 267_Human_herpesvirus_5_strain_Merlin_g_2 | 41747 |
| 267_Human_herpesvirus_5_strain_Merlin_g_3 | 41748 |
| 267_Human_herpesvirus_5_strain_Merlin_g_4 | 41749 |
| 267_Human_herpesvirus_5_strain_Merlin_g_5 | 41750 |
| 268_Human_herpesvirus_5_strain_Merlin_g_1 | 41751 |
| 269_Human_herpesvirus_5_strain_Merlin_g_1 | 41752 |
| 269_Human_herpesvirus_5_strain_Merlin_g_2 | 41753 |
| 269_Human_herpesvirus_5_strain_Merlin_g_3 | 41754 |
| 270_Human_herpesvirus_5_strain_Merlin_g_1 | 41755 |
| 270_Human_herpesvirus_5_strain_Merlin_g_2 | 41756 |
| 270_Human_herpesvirus_5_strain_Merlin_g_3 | 41757 |
| 270_Human_herpesvirus_5_strain_Merlin_g_4 | 41758 |
| 270_Human_herpesvirus_5_strain_Merlin_g_5 | 41759 |
| 271_Human_herpesvirus_5_strain_Merlin_g_1 | 41760 |
| 271_Human_herpesvirus_5_strain_Merlin_g_2 | 41761 |
| 271_Human_herpesvirus_5_strain_Merlin_g_3 | 41762 |
| 271_Human_herpesvirus_5_strain_Merlin_g_4 | 41763 |
| 271_Human_herpesvirus_5_strain_Merlin_g_5 | 41764 |
| 272_Human_herpesvirus_5_strain_Merlin_g_1 | 41765 |
| 272_Human_herpesvirus_5_strain_Merlin_g_2 | 41766 |
| 272_Human_herpesvirus_5_strain_Merlin_g_3 | 41767 |
| 272_Human_herpesvirus_5_strain_Merlin_g_4 | 41768 |
| 272_Human_herpesvirus_5_strain_Merlin_g_5 | 41769 |
| 273_Human_herpesvirus_5_strain_Merlin_g_1 | 41770 |
| 273_Human_herpesvirus_5_strain_Merlin_g_2 | 41771 |
| 273_Human_herpesvirus_5_strain_Merlin_g_3 | 41772 |
| 273_Human_herpesvirus_5_strain_Merlin_g_4 | 41773 |
| 273_Human_herpesvirus_5_strain_Merlin_g_5 | 41774 |
| 274_Human_herpesvirus_5_strain_Merlin_g_1 | 41775 |
| 274_Human_herpesvirus_5_strain_Merlin_g_2 | 41776 |
| 274_Human_herpesvirus_5_strain_Merlin_g_3 | 41777 |
| 274_Human_herpesvirus_5_strain_Merlin_g_4 | 41778 |
| 274_Human_herpesvirus_5_strain_Merlin_g_5 | 41779 |
| 275_Human_herpesvirus_5_strain_Merlin_g_1 | 41780 |
| 275_Human_herpesvirus_5_strain_Merlin_g_2 | 41781 |
| 275_Human_herpesvirus_5_strain_Merlin_g_3 | 41782 |
| 275_Human_herpesvirus_5_strain_Merlin_g_4 | 41783 |
| 275_Human_herpesvirus_5_strain_Merlin_g_5 | 41784 |
| 276_Human_herpesvirus_5_strain_Merlin_g_1 | 41785 |
| 276_Human_herpesvirus_5_strain_Merlin_g_2 | 41786 |
| 276_Human_herpesvirus_5_strain_Merlin_g_3 | 41787 |
| 276_Human_herpesvirus_5_strain_Merlin_g_4 | 41788 |
| 276_Human_herpesvirus_5_strain_Merlin_g_5 | 41789 |
| 277_Human_herpesvirus_5_strain_Merlin_g_1 | 41790 |
| 277_Human_herpesvirus_5_strain_Merlin_g_2 | 41791 |
| 277_Human_herpesvirus_5_strain_Merlin_g_3 | 41792 |
| 277_Human_herpesvirus_5_strain_Merlin_g_4 | 41793 |
| 278_Human_herpesvirus_5_strain_Merlin_g_1 | 41794 |
| 278_Human_herpesvirus_5_strain_Merlin_g_2 | 41795 |
| 278_Human_herpesvirus_5_strain_Merlin_g_3 | 41796 |
| 278_Human_herpesvirus_5_strain_Merlin_g_4 | 41797 |
| 278_Human_herpesvirus_5_strain_Merlin_g_5 | 41798 |
| 279_Human_herpesvirus_5_strain_Merlin_g_1 | 41799 |
| 279_Human_herpesvirus_5_strain_Merlin_g_2 | 41800 |
| 280_Human_herpesvirus_5_strain_Merlin_g_1 | 41801 |
| 280_Human_herpesvirus_5_strain_Merlin_g_2 | 41802 |
| 280_Human_herpesvirus_5_strain_Merlin_g_3 | 41803 |
| 280_Human_herpesvirus_5_strain_Merlin_g_4 | 41804 |
| 281_Human_herpesvirus_5_strain_Merlin_g_1 | 41805 |
| 281_Human_herpesvirus_5_strain_Merlin_g_2 | 41806 |
| 281_Human_herpesvirus_5_strain_Merlin_g_3 | 41807 |
| 282_Human_herpesvirus_5_strain_Merlin_g_1 | 41808 |
| 283_Human_herpesvirus_5_strain_Merlin_g_1 | 41809 |
| 283_Human_herpesvirus_5_strain_Merlin_g_2 | 41810 |
| 283_Human_herpesvirus_5_strain_Merlin_g_3 | 41811 |
| 283_Human_herpesvirus_5_strain_Merlin_g_4 | 41812 |
| 284_Human_herpesvirus_5_strain_Merlin_g_1 | 41813 |
| 284_Human_herpesvirus_5_strain_Merlin_g_2 | 41814 |
| 284_Human_herpesvirus_5_strain_Merlin_g_3 | 41815 |
| 284_Human_herpesvirus_5_strain_Merlin_g_4 | 41816 |
| 284_Human_herpesvirus_5_strain_Merlin_g_5 | 41817 |
| 285_Human_herpesvirus_5_strain_Merlin_g_1 | 41818 |
| 285_Human_herpesvirus_5_strain_Merlin_g_2 | 41819 |
| 285_Human_herpesvirus_5_strain_Merlin_g_3 | 41820 |
| 285_Human_herpesvirus_5_strain_Merlin_g_4 | 41821 |
| 285_Human_herpesvirus_5_strain_Merlin_g_5 | 41822 |
| 286_Human_herpesvirus_5_strain_Merlin_g_1 | 41823 |
| 286_Human_herpesvirus_5_strain_Merlin_g_2 | 41824 |
| 286_Human_herpesvirus_5_strain_Merlin_g_3 | 41825 |
| 287_Human_herpesvirus_5_strain_Merlin_g_1 | 41826 |
| 287_Human_herpesvirus_5_strain_Merlin_g_2 | 41827 |
| 287_Human_herpesvirus_5_strain_Merlin_g_3 | 41828 |
| 287_Human_herpesvirus_5_strain_Merlin_g_4 | 41829 |
| 287_Human_herpesvirus_5_strain_Merlin_g_5 | 41830 |
| 288_Human_herpesvirus_5_strain_Merlin_g_1 | 41831 |
| 288_Human_herpesvirus_5_strain_Merlin_g_2 | 41832 |
| 288_Human_herpesvirus_5_strain_Merlin_g_3 | 41833 |
| 288_Human_herpesvirus_5_strain_Merlin_g_4 | 41834 |
| 288_Human_herpesvirus_5_strain_Merlin_g_5 | 41835 |
| 289_Human_herpesvirus_5_strain_Merlin_g_1 | 41836 |
| 289_Human_herpesvirus_5_strain_Merlin_g_2 | 41837 |
| 289_Human_herpesvirus_5_strain_Merlin_g_3 | 41838 |
| 289_Human_herpesvirus_5_strain_Merlin_g_4 | 41839 |
| 289_Human_herpesvirus_5_strain_Merlin_g_5 | 41840 |
| 290_Human_herpesvirus_5_strain_Merlin_g_1 | 41841 |
| 290_Human_herpesvirus_5_strain_Merlin_g_2 | 41842 |
| 290_Human_herpesvirus_5_strain_Merlin_g_3 | 41843 |
| 290_Human_herpesvirus_5_strain_Merlin_g_4 | 41844 |
| 290_Human_herpesvirus_5_strain_Merlin_g_5 | 41845 |
| 291_Human_herpesvirus_5_strain_Merlin_g_1 | 41846 |
| 291_Human_herpesvirus_5_strain_Merlin_g_2 | 41847 |
| 291_Human_herpesvirus_5_strain_Merlin_g_3 | 41848 |
| 291_Human_herpesvirus_5_strain_Merlin_g_4 | 41849 |
| 291_Human_herpesvirus_5_strain_Merlin_g_5 | 41850 |
| 292_Human_herpesvirus_5_strain_Merlin_g_1 | 41851 |
| 292_Human_herpesvirus_5_strain_Merlin_g_2 | 41852 |
| 292_Human_herpesvirus_5_strain_Merlin_g_3 | 41853 |
| 292_Human_herpesvirus_5_strain_Merlin_g_4 | 41854 |
| 292_Human_herpesvirus_5_strain_Merlin_g_5 | 41855 |
| 293_Human_herpesvirus_5_strain_Merlin_g_1 | 41856 |
| 293_Human_herpesvirus_5_strain_Merlin_g_2 | 41857 |
| 293_Human_herpesvirus_5_strain_Merlin_g_3 | 41858 |
| 293_Human_herpesvirus_5_strain_Merlin_g_4 | 41859 |
| 294_Human_herpesvirus_5_strain_Merlin_g_1 | 41860 |
| 294_Human_herpesvirus_5_strain_Merlin_g_2 | 41861 |
| 294_Human_herpesvirus_5_strain_Merlin_g_3 | 41862 |
| 294_Human_herpesvirus_5_strain_Merlin_g_4 | 41863 |
| 294_Human_herpesvirus_5_strain_Merlin_g_5 | 41864 |
| 295_Human_herpesvirus_5_strain_Merlin_g_1 | 41865 |
| 295_Human_herpesvirus_5_strain_Merlin_g_2 | 41866 |
| 295_Human_herpesvirus_5_strain_Merlin_g_3 | 41867 |
| 295_Human_herpesvirus_5_strain_Merlin_g_4 | 41868 |
| 295_Human_herpesvirus_5_strain_Merlin_g_5 | 41869 |
| 296_Human_herpesvirus_5_strain_Merlin_g_1 | 41870 |
| 296_Human_herpesvirus_5_strain_Merlin_g_2 | 41871 |
| 296_Human_herpesvirus_5_strain_Merlin_g_3 | 41872 |
| 296_Human_herpesvirus_5_strain_Merlin_g_4 | 41873 |
| 296_Human_herpesvirus_5_strain_Merlin_g_5 | 41874 |
| 297_Human_herpesvirus_5_strain_Merlin_g_1 | 41875 |
| 297_Human_herpesvirus_5_strain_Merlin_g_2 | 41876 |
| 297_Human_herpesvirus_5_strain_Merlin_g_3 | 41877 |
| 297_Human_herpesvirus_5_strain_Merlin_g_4 | 41878 |
| 297_Human_herpesvirus_5_strain_Merlin_g_5 | 41879 |
| 298_Human_herpesvirus_5_strain_Merlin_g_1 | 41880 |
| 298_Human_herpesvirus_5_strain_Merlin_g_2 | 41881 |
| 298_Human_herpesvirus_5_strain_Merlin_g_3 | 41882 |
| 298_Human_herpesvirus_5_strain_Merlin_g_4 | 41883 |
| 298_Human_herpesvirus_5_strain_Merlin_g_5 | 41884 |
| 299_Human_herpesvirus_5_strain_Merlin_g_1 | 41885 |
| 299_Human_herpesvirus_5_strain_Merlin_g_2 | 41886 |
| 299_Human_herpesvirus_5_strain_Merlin_g_3 | 41887 |
| 299_Human_herpesvirus_5_strain_Merlin_g_4 | 41888 |
| 299_Human_herpesvirus_5_strain_Merlin_g_5 | 41889 |
| 300_Human_herpesvirus_5_strain_Merlin_g_1 | 41890 |
| 300_Human_herpesvirus_5_strain_Merlin_g_2 | 41891 |
| 301_Human_herpesvirus_5_strain_Merlin_g_1 | 41892 |
| 301_Human_herpesvirus_5_strain_Merlin_g_2 | 41893 |
| 301_Human_herpesvirus_5_strain_Merlin_g_3 | 41894 |
| 301_Human_herpesvirus_5_strain_Merlin_g_4 | 41895 |
| 301_Human_herpesvirus_5_strain_Merlin_g_5 | 41896 |
| 302_Human_herpesvirus_5_strain_Merlin_g_1 | 41897 |
| 302_Human_herpesvirus_5_strain_Merlin_g_2 | 41898 |
| 302_Human_herpesvirus_5_strain_Merlin_g_3 | 41899 |
| 303_Human_herpesvirus_5_strain_Merlin_g_1 | 41900 |
| 303_Human_herpesvirus_5_strain_Merlin_g_2 | 41901 |
| 304_Human_herpesvirus_5_strain_Merlin_g_1 | 41902 |
| 304_Human_herpesvirus_5_strain_Merlin_g_2 | 41903 |
| 304_Human_herpesvirus_5_strain_Merlin_g_3 | 41904 |
| 304_Human_herpesvirus_5_strain_Merlin_g_4 | 41905 |
| 305_Human_herpesvirus_5_strain_Merlin_g_1 | 41906 |
| 305_Human_herpesvirus_5_strain_Merlin_g_2 | 41907 |
| 306_Human_herpesvirus_5_strain_Merlin_g_1 | 41908 |
| 306_Human_herpesvirus_5_strain_Merlin_g_2 | 41909 |
| 306_Human_herpesvirus_5_strain_Merlin_g_3 | 41910 |
| 306_Human_herpesvirus_5_strain_Merlin_g_4 | 41911 |
| 306_Human_herpesvirus_5_strain_Merlin_g_5 | 41912 |
| 307_Human_herpesvirus_5_strain_Merlin_g_1 | 41913 |
| 307_Human_herpesvirus_5_strain_Merlin_g_2 | 41914 |
| 307_Human_herpesvirus_5_strain_Merlin_g_3 | 41915 |
| 308_Human_herpesvirus_5_strain_Merlin_g_1 | 41916 |
| 308_Human_herpesvirus_5_strain_Merlin_g_2 | 41917 |
| 308_Human_herpesvirus_5_strain_Merlin_g_3 | 41918 |
| 308_Human_herpesvirus_5_strain_Merlin_g_4 | 41919 |
| 308_Human_herpesvirus_5_strain_Merlin_g_5 | 41920 |
| 309_Human_herpesvirus_5_strain_Merlin_g_1 | 41921 |
| 309_Human_herpesvirus_5_strain_Merlin_g_2 | 41922 |
| 309_Human_herpesvirus_5_strain_Merlin_g_3 | 41923 |
| 310_Human_herpesvirus_5_strain_Merlin_g_1 | 41924 |
| 310_Human_herpesvirus_5_strain_Merlin_g_2 | 41925 |
| 310_Human_herpesvirus_5_strain_Merlin_g_3 | 41926 |
| 311_Human_herpesvirus_5_strain_Merlin_g_1 | 41927 |
| 311_Human_herpesvirus_5_strain_Merlin_g_2 | 41928 |
| 311_Human_herpesvirus_5_strain_Merlin_g_3 | 41929 |
| 311_Human_herpesvirus_5_strain_Merlin_g_4 | 41930 |
| 311_Human_herpesvirus_5_strain_Merlin_g_5 | 41931 |
| 312_Human_herpesvirus_5_strain_Merlin_g_1 | 41932 |
| 312_Human_herpesvirus_5_strain_Merlin_g_2 | 41933 |
| 312_Human_herpesvirus_5_strain_Merlin_g_3 | 41934 |
| 312_Human_herpesvirus_5_strain_Merlin_g_4 | 41935 |
| 312_Human_herpesvirus_5_strain_Merlin_g_5 | 41936 |
| 313_Human_herpesvirus_5_strain_Merlin_g_1 | 41937 |
| 313_Human_herpesvirus_5_strain_Merlin_g_2 | 41938 |
| 313_Human_herpesvirus_5_strain_Merlin_g_3 | 41939 |
| 313_Human_herpesvirus_5_strain_Merlin_g_4 | 41940 |
| 313_Human_herpesvirus_5_strain_Merlin_g_5 | 41941 |
| 314_Human_herpesvirus_5_strain_Merlin_g_1 | 41942 |
| 314_Human_herpesvirus_5_strain_Merlin_g_2 | 41943 |
| 314_Human_herpesvirus_5_strain_Merlin_g_3 | 41944 |
| 314_Human_herpesvirus_5_strain_Merlin_g_4 | 41945 |
| 314_Human_herpesvirus_5_strain_Merlin_g_5 | 41946 |
| 315_Human_herpesvirus_5_strain_Merlin_g_1 | 41947 |
| 315_Human_herpesvirus_5_strain_Merlin_g_2 | 41948 |
| 315_Human_herpesvirus_5_strain_Merlin_g_3 | 41949 |
| 316_Human_herpesvirus_5_strain_Merlin_g_1 | 41950 |
| 316_Human_herpesvirus_5_strain_Merlin_g_2 | 41951 |
| 316_Human_herpesvirus_5_strain_Merlin_g_3 | 41952 |
| 317_Human_herpesvirus_5_strain_Merlin_g_1 | 41953 |
| 317_Human_herpesvirus_5_strain_Merlin_g_2 | 41954 |
| 317_Human_herpesvirus_5_strain_Merlin_g_3 | 41955 |
| 317_Human_herpesvirus_5_strain_Merlin_g_4 | 41956 |
| 317_Human_herpesvirus_5_strain_Merlin_g_5 | 41957 |
| 318_Human_herpesvirus_5_strain_Merlin_g_1 | 41958 |
| 318_Human_herpesvirus_5_strain_Merlin_g_2 | 41959 |
| 318_Human_herpesvirus_5_strain_Merlin_g_3 | 41960 |
| 318_Human_herpesvirus_5_strain_Merlin_g_4 | 41961 |
| 318_Human_herpesvirus_5_strain_Merlin_g_5 | 41962 |
| 319_Human_herpesvirus_5_strain_Merlin_g_1 | 41963 |
| 319_Human_herpesvirus_5_strain_Merlin_g_2 | 41964 |
| 319_Human_herpesvirus_5_strain_Merlin_g_3 | 41965 |
| 319_Human_herpesvirus_5_strain_Merlin_g_4 | 41966 |
| 319_Human_herpesvirus_5_strain_Merlin_g_5 | 41967 |
| 320_Human_herpesvirus_5_strain_Merlin_g_1 | 41968 |
| 320_Human_herpesvirus_5_strain_Merlin_g_2 | 41969 |
| 320_Human_herpesvirus_5_strain_Merlin_g_3 | 41970 |
| 320_Human_herpesvirus_5_strain_Merlin_g_4 | 41971 |
| 320_Human_herpesvirus_5_strain_Merlin_g_5 | 41972 |
| 321_Human_herpesvirus_5_strain_Merlin_g_1 | 41973 |
| 321_Human_herpesvirus_5_strain_Merlin_g_2 | 41974 |
| 321_Human_herpesvirus_5_strain_Merlin_g_3 | 41975 |
| 321_Human_herpesvirus_5_strain_Merlin_g_4 | 41976 |
| 321_Human_herpesvirus_5_strain_Merlin_g_5 | 41977 |
| 322_Human_herpesvirus_5_strain_Merlin_g_1 | 41978 |
| 322_Human_herpesvirus_5_strain_Merlin_g_2 | 41979 |
| 323_Human_herpesvirus_5_strain_Merlin_g_1 | 41980 |
| 323_Human_herpesvirus_5_strain_Merlin_g_2 | 41981 |
| 323_Human_herpesvirus_5_strain_Merlin_g_3 | 41982 |
| 323_Human_herpesvirus_5_strain_Merlin_g_4 | 41983 |
| 323_Human_herpesvirus_5_strain_Merlin_g_5 | 41984 |
| 324_Human_herpesvirus_5_strain_Merlin_g_1 | 41985 |
| 324_Human_herpesvirus_5_strain_Merlin_g_2 | 41986 |
| 324_Human_herpesvirus_5_strain_Merlin_g_3 | 41987 |
| 324_Human_herpesvirus_5_strain_Merlin_g_4 | 41988 |
| 324_Human_herpesvirus_5_strain_Merlin_g_5 | 41989 |
| 325_Human_herpesvirus_5_strain_Merlin_g_1 | 41990 |
| 325_Human_herpesvirus_5_strain_Merlin_g_2 | 41991 |
| 325_Human_herpesvirus_5_strain_Merlin_g_3 | 41992 |
| 325_Human_herpesvirus_5_strain_Merlin_g_4 | 41993 |
| 325_Human_herpesvirus_5_strain_Merlin_g_5 | 41994 |
| 326_Human_herpesvirus_5_strain_Merlin_g_1 | 41995 |
| 326_Human_herpesvirus_5_strain_Merlin_g_2 | 41996 |
| 327_Human_herpesvirus_5_strain_Merlin_g_1 | 41997 |
| 327_Human_herpesvirus_5_strain_Merlin_g_2 | 41998 |
| 327_Human_herpesvirus_5_strain_Merlin_g_3 | 41999 |
| 327_Human_herpesvirus_5_strain_Merlin_g_4 | 42000 |
| 327_Human_herpesvirus_5_strain_Merlin_g_5 | 42001 |
| 328_Human_herpesvirus_5_strain_Merlin_g_1 | 42002 |
| 328_Human_herpesvirus_5_strain_Merlin_g_2 | 42003 |
| 328_Human_herpesvirus_5_strain_Merlin_g_3 | 42004 |
| 328_Human_herpesvirus_5_strain_Merlin_g_4 | 42005 |
| 328_Human_herpesvirus_5_strain_Merlin_g_5 | 42006 |
| 329_Human_herpesvirus_5_strain_Merlin_g_1 | 42007 |
| 329_Human_herpesvirus_5_strain_Merlin_g_2 | 42008 |
| 330_Human_herpesvirus_5_strain_Merlin_g_1 | 42009 |
| 330_Human_herpesvirus_5_strain_Merlin_g_2 | 42010 |
| 330_Human_herpesvirus_5_strain_Merlin_g_3 | 42011 |
| 330_Human_herpesvirus_5_strain_Merlin_g_4 | 42012 |
| 330_Human_herpesvirus_5_strain_Merlin_g_5 | 42013 |
| 331_Human_herpesvirus_5_strain_Merlin_g_1 | 42014 |
| 331_Human_herpesvirus_5_strain_Merlin_g_2 | 42015 |
| 331_Human_herpesvirus_5_strain_Merlin_g_3 | 42016 |
| 331_Human_herpesvirus_5_strain_Merlin_g_4 | 42017 |
| 331_Human_herpesvirus_5_strain_Merlin_g_5 | 42018 |
| 332_Human_herpesvirus_5_strain_Merlin_g_1 | 42019 |
| 333_Human_herpesvirus_5_strain_Merlin_g_1 | 42020 |
| 333_Human_herpesvirus_5_strain_Merlin_g_2 | 42021 |
| 333_Human_herpesvirus_5_strain_Merlin_g_3 | 42022 |
| 333_Human_herpesvirus_5_strain_Merlin_g_4 | 42023 |
| 333_Human_herpesvirus_5_strain_Merlin_g_5 | 42024 |
| 334_Human_herpesvirus_5_strain_Merlin_g_1 | 42025 |
| 334_Human_herpesvirus_5_strain_Merlin_g_2 | 42026 |
| 334_Human_herpesvirus_5_strain_Merlin_g_3 | 42027 |
| 334_Human_herpesvirus_5_strain_Merlin_g_4 | 42028 |
| 334_Human_herpesvirus_5_strain_Merlin_g_5 | 42029 |
| 335_Human_herpesvirus_5_strain_Merlin_g_1 | 42030 |
| 335_Human_herpesvirus_5_strain_Merlin_g_2 | 42031 |
| 335_Human_herpesvirus_5_strain_Merlin_g_3 | 42032 |
| 335_Human_herpesvirus_5_strain_Merlin_g_4 | 42033 |
| 335_Human_herpesvirus_5_strain_Merlin_g_5 | 42034 |
| 336_Human_herpesvirus_5_strain_Merlin_g_1 | 42035 |
| 336_Human_herpesvirus_5_strain_Merlin_g_2 | 42036 |
| 336_Human_herpesvirus_5_strain_Merlin_g_3 | 42037 |
| 336_Human_herpesvirus_5_strain_Merlin_g_4 | 42038 |
| 336_Human_herpesvirus_5_strain_Merlin_g_5 | 42039 |
| 337_Human_herpesvirus_5_strain_Merlin_g_1 | 42040 |
| 337_Human_herpesvirus_5_strain_Merlin_g_2 | 42041 |
| 337_Human_herpesvirus_5_strain_Merlin_g_3 | 42042 |
| 337_Human_herpesvirus_5_strain_Merlin_g_4 | 42043 |
| 337_Human_herpesvirus_5_strain_Merlin_g_5 | 42044 |
| 338_Human_herpesvirus_5_strain_Merlin_g_1 | 42045 |
| 338_Human_herpesvirus_5_strain_Merlin_g_2 | 42046 |
| 338_Human_herpesvirus_5_strain_Merlin_g_3 | 42047 |
| 338_Human_herpesvirus_5_strain_Merlin_g_4 | 42048 |
| 339_Human_herpesvirus_5_strain_Merlin_g_1 | 42049 |
| 339_Human_herpesvirus_5_strain_Merlin_g_2 | 42050 |
| 339_Human_herpesvirus_5_strain_Merlin_g_3 | 42051 |
| 339_Human_herpesvirus_5_strain_Merlin_g_4 | 42052 |
| 339_Human_herpesvirus_5_strain_Merlin_g_5 | 42053 |
| 340_Human_herpesvirus_5_strain_Merlin_g_1 | 42054 |
| 340_Human_herpesvirus_5_strain_Merlin_g_2 | 42055 |
| 340_Human_herpesvirus_5_strain_Merlin_g_3 | 42056 |
| 341_Human_herpesvirus_5_strain_Merlin_g_1 | 42057 |
| 341_Human_herpesvirus_5_strain_Merlin_g_2 | 42058 |
| 341_Human_herpesvirus_5_strain_Merlin_g_3 | 42059 |
| 341_Human_herpesvirus_5_strain_Merlin_g_4 | 42060 |
| 341_Human_herpesvirus_5_strain_Merlin_g_5 | 42061 |
| 342_Human_herpesvirus_5_strain_Merlin_g_1 | 42062 |
| 342_Human_herpesvirus_5_strain_Merlin_g_2 | 42063 |
| 342_Human_herpesvirus_5_strain_Merlin_g_3 | 42064 |
| 342_Human_herpesvirus_5_strain_Merlin_g_4 | 42065 |
| 342_Human_herpesvirus_5_strain_Merlin_g_5 | 42066 |
| 343_Human_herpesvirus_5_strain_Merlin_g_1 | 42067 |
| 343_Human_herpesvirus_5_strain_Merlin_g_2 | 42068 |
| 343_Human_herpesvirus_5_strain_Merlin_g_3 | 42069 |
| 343_Human_herpesvirus_5_strain_Merlin_g_4 | 42070 |
| 343_Human_herpesvirus_5_strain_Merlin_g_5 | 42071 |
| 344_Human_herpesvirus_5_strain_Merlin_g_1 | 42072 |
| 344_Human_herpesvirus_5_strain_Merlin_g_2 | 42073 |
| 344_Human_herpesvirus_5_strain_Merlin_g_3 | 42074 |
| 344_Human_herpesvirus_5_strain_Merlin_g_4 | 42075 |
| 344_Human_herpesvirus_5_strain_Merlin_g_5 | 42076 |
| 345_Human_herpesvirus_5_strain_Merlin_g_1 | 42077 |
| 345_Human_herpesvirus_5_strain_Merlin_g_2 | 42078 |
| 345_Human_herpesvirus_5_strain_Merlin_g_3 | 42079 |
| 345_Human_herpesvirus_5_strain_Merlin_g_4 | 42080 |
| 345_Human_herpesvirus_5_strain_Merlin_g_5 | 42081 |
| 346_Human_herpesvirus_5_strain_Merlin_g_1 | 42082 |
| 346_Human_herpesvirus_5_strain_Merlin_g_2 | 42083 |
| 346_Human_herpesvirus_5_strain_Merlin_g_3 | 42084 |
| 346_Human_herpesvirus_5_strain_Merlin_g_4 | 42085 |
| 347_Human_herpesvirus_5_strain_Merlin_g_1 | 42086 |
| 347_Human_herpesvirus_5_strain_Merlin_g_2 | 42087 |
| 348_Human_herpesvirus_5_strain_Merlin_g_1 | 42088 |
| 348_Human_herpesvirus_5_strain_Merlin_g_2 | 42089 |
| 348_Human_herpesvirus_5_strain_Merlin_g_3 | 42090 |
| 348_Human_herpesvirus_5_strain_Merlin_g_4 | 42091 |
| 348_Human_herpesvirus_5_strain_Merlin_g_5 | 42092 |
| 349_Human_herpesvirus_5_strain_Merlin_g_1 | 42093 |
| 349_Human_herpesvirus_5_strain_Merlin_g_2 | 42094 |
| 349_Human_herpesvirus_5_strain_Merlin_g_3 | 42095 |
| 350_Human_herpesvirus_5_strain_Merlin_g_1 | 42096 |
| 350_Human_herpesvirus_5_strain_Merlin_g_2 | 42097 |
| 350_Human_herpesvirus_5_strain_Merlin_g_3 | 42098 |
| 350_Human_herpesvirus_5_strain_Merlin_g_4 | 42099 |
| 350_Human_herpesvirus_5_strain_Merlin_g_5 | 42100 |
| 351_Human_herpesvirus_5_strain_Merlin_g_1 | 42101 |
| 351_Human_herpesvirus_5_strain_Merlin_g_2 | 42102 |
| 351_Human_herpesvirus_5_strain_Merlin_g_3 | 42103 |
| 352_Human_herpesvirus_5_strain_Merlin_g_1 | 42104 |
| 352_Human_herpesvirus_5_strain_Merlin_g_2 | 42105 |
| 352_Human_herpesvirus_5_strain_Merlin_g_3 | 42106 |
| 352_Human_herpesvirus_5_strain_Merlin_g_4 | 42107 |
| 352_Human_herpesvirus_5_strain_Merlin_g_5 | 42108 |
| 353_Human_herpesvirus_5_strain_Merlin_g_1 | 42109 |
| 353_Human_herpesvirus_5_strain_Merlin_g_2 | 42110 |
| 353_Human_herpesvirus_5_strain_Merlin_g_3 | 42111 |
| 354_Human_herpesvirus_5_strain_Merlin_g_1 | 42112 |
| 354_Human_herpesvirus_5_strain_Merlin_g_2 | 42113 |
| 354_Human_herpesvirus_5_strain_Merlin_g_3 | 42114 |
| 354_Human_herpesvirus_5_strain_Merlin_g_4 | 42115 |
| 354_Human_herpesvirus_5_strain_Merlin_g_5 | 42116 |
| 355_Human_herpesvirus_5_strain_Merlin_g_1 | 42117 |
| 355_Human_herpesvirus_5_strain_Merlin_g_2 | 42118 |
| 355_Human_herpesvirus_5_strain_Merlin_g_3 | 42119 |
| 355_Human_herpesvirus_5_strain_Merlin_g_4 | 42120 |
| 355_Human_herpesvirus_5_strain_Merlin_g_5 | 42121 |
| 356_Influenza_A_virus_pa_gene_for_polymerase_PA_g_1 | 42122 |
| 356_Influenza_A_virus_pa_gene_for_polymerase_PA_g_2 | 42123 |
| 356_Influenza_A_virus_pa_gene_for_polymerase_PA_g_3 | 42124 |
| 356_Influenza_A_virus_pa_gene_for_polymerase_PA_g_4 | 42125 |
| 356_Influenza_A_virus_pa_gene_for_polymerase_PA_g_5 | 42126 |
| 357_Influenza_A_virus_pa_gene_for_polymerase_PA_g_1 | 42127 |
| 357_Influenza_A_virus_pa_gene_for_polymerase_PA_g_2 | 42128 |
| 357_Influenza_A_virus_pa_gene_for_polymerase_PA_g_3 | 42129 |
| 357_Influenza_A_virus_pa_gene_for_polymerase_PA_g_4 | 42130 |
| 357_Influenza_A_virus_pa_gene_for_polymerase_PA_g_5 | 42131 |
| 358_Influenza_A_virus_pa_gene_for_polymerase_PA_g_1 | 42132 |
| 358_Influenza_A_virus_pa_gene_for_polymerase_PA_g_2 | 42133 |
| 358_Influenza_A_virus_pa_gene_for_polymerase_PA_g_3 | 42134 |
| 358_Influenza_A_virus_pa_gene_for_polymerase_PA_g_4 | 42135 |
| 358_Influenza_A_virus_pa_gene_for_polymerase_PA_g_5 | 42136 |
| 359_Influenza_A_virus_pa_gene_for_polymerase_PA_g_1 | 42137 |
| 359_Influenza_A_virus_pa_gene_for_polymerase_PA_g_2 | 42138 |
| 359_Influenza_A_virus_pa_gene_for_polymerase_PA_g_3 | 42139 |
| 359_Influenza_A_virus_pa_gene_for_polymerase_PA_g_4 | 42140 |
| 359_Influenza_A_virus_pa_gene_for_polymerase_PA_g_5 | 42141 |
| 360_Influenza_A_virus_pa_gene_for_polymerase_PA_g_1 | 42142 |
| 360_Influenza_A_virus_pa_gene_for_polymerase_PA_g_2 | 42143 |
| 360_Influenza_A_virus_pa_gene_for_polymerase_PA_g_3 | 42144 |
| 360_Influenza_A_virus_pa_gene_for_polymerase_PA_g_4 | 42145 |
| 360_Influenza_A_virus_pa_gene_for_polymerase_PA_g_5 | 42146 |
| 361_Influenza_A_virus_pa_gene_for_polymerase_PA_g_1 | 42147 |
| 361_Influenza_A_virus_pa_gene_for_polymerase_PA_g_2 | 42148 |
| 361_Influenza_A_virus_pa_gene_for_polymerase_PA_g_3 | 42149 |
| 361_Influenza_A_virus_pa_gene_for_polymerase_PA_g_4 | 42150 |
| 361_Influenza_A_virus_pa_gene_for_polymerase_PA_g_5 | 42151 |
| 362_Influenza_A_virus_pa_gene_for_polymerase_PA_g_1 | 42152 |
| 362_Influenza_A_virus_pa_gene_for_polymerase_PA_g_2 | 42153 |
| 362_Influenza_A_virus_pa_gene_for_polymerase_PA_g_3 | 42154 |
| 362_Influenza_A_virus_pa_gene_for_polymerase_PA_g_4 | 42155 |
| 362_Influenza_A_virus_pa_gene_for_polymerase_PA_g_5 | 42156 |
| 363_Influenza_A_virus_(A/Shanghai/02/2013(H7N9))_{—} | 42157 |
| segment_5_nucleocapsid_protein_(NP)_gene_g_1 | |
| 363_Influenza_A_virus_(A/Shanghai/02/2013(H7N9))_{—} | 42158 |
| segment_5_nucleocapsid_protein_(NP)_gene_g_2 | |
| 363_Influenza_A_virus_(A/Shanghai/02/2013(H7N9))_{—} | 42159 |
| segment_5_nucleocapsid_protein_(NP)_gene_g_3 | |
| 363_Influenza_A_virus_(A/Shanghai/02/2013(H7N9))_{—} | 42160 |
| segment_5_nucleocapsid_protein_(NP)_gene_g_4 | |
| 363_Influenza_A_virus_(A/Shanghai/02/2013(H7N9))_{—} | 42161 |
| segment_5_nucleocapsid_protein_(NP)_gene_g_5 | |
| 364_Influenza_A_virus_(A/Shanghai/02/2013(H7N9))_{—} | 42162 |
| segment_5_nucleocapsid_protein_(NP)_gene_g_1 | |
| 364_Influenza_A_virus_(A/Shanghai/02/2013(H7N9))_{—} | 42163 |
| segment_5_nucleocapsid_protein_(NP)_gene_g_2 | |
| 364_Influenza_A_virus_(A/Shanghai/02/2013(H7N9))_{—} | 42164 |
| segment_5_nucleocapsid_protein_(NP)_gene_g_3 | |
| 364_Influenza_A_virus_(A/Shanghai/02/2013(H7N9))_{—} | 42165 |
| segment_5_nucleocapsid_protein_(NP)_gene_g_4 | |
| 364_Influenza_A_virus_(A/Shanghai/02/2013(H7N9))_{—} | 42166 |
| segment_5_nucleocapsid_protein_(NP)_gene_g_5 | |
| 365_Influenza_A_virus_(A/Shanghai/02/2013(H7N9))_{—} | 42167 |
| segment_5_nucleocapsid_protein_(NP)_gene_g_1 | |
| 365_Influenza_A_virus_(A/Shanghai/02/2013(H7N9))_{—} | 42168 |
| segment_5_nucleocapsid_protein_(NP)_gene_g_2 | |
| 365_Influenza_A_virus_(A/Shanghai/02/2013(H7N9))_{—} | 42169 |
| segment_5_nucleocapsid_protein_(NP)_gene_g_3 | |
| 365_Influenza_A_virus_(A/Shanghai/02/2013(H7N9))_{—} | 42170 |
| segment_5_nucleocapsid_protein_(NP)_gene_g_4 | |
| 365_Influenza_A_virus_(A/Shanghai/02/2013(H7N9))_{—} | 42171 |
| segment_5_nucleocapsid_protein_(NP)_gene_g_5 | |
| 366_Influenza_A_virus_(A/Shanghai/02/2013(H7N9))_{—} | 42172 |
| segment_5_nucleocapsid_protein_(NP)_gene_g_1 | |
| 366_Influenza_A_virus_(A/Shanghai/02/2013(H7N9))_{—} | 42173 |
| segment_5_nucleocapsid_protein_(NP)_gene_g_2 | |
| 366_Influenza_A_virus_(A/Shanghai/02/2013(H7N9))_{—} | 42174 |
| segment_5_nucleocapsid_protein_(NP)_gene_g_3 | |
| 366_Influenza_A_virus_(A/Shanghai/02/2013(H7N9))_{—} | 42175 |
| segment_5_nucleocapsid_protein_(NP)_gene_g_4 | |
| 366_Influenza_A_virus_(A/Shanghai/02/2013(H7N9))_{—} | 42176 |
| segment_5_nucleocapsid_protein_(NP)_gene_g_5 | |
| 367_Human_adenovirus_A_g_1 | 42177 |
| 367_Human_adenovirus_A_g_2 | 42178 |
| 367_Human_adenovirus_A_g_3 | 42179 |
| 367_Human_adenovirus_A_g_4 | 42180 |
| 367_Human_adenovirus_A_g_5 | 42181 |
| 368_Human_adenovirus_A_g_1 | 42182 |
| 368_Human_adenovirus_A_g_2 | 42183 |
| 368_Human_adenovirus_A_g_3 | 42184 |
| 368_Human_adenovirus_A_g_4 | 42185 |
| 368_Human_adenovirus_A_g_5 | 42186 |
| 369_Human_adenovirus_A_g_1 | 42187 |
| 369_Human_adenovirus_A_g_2 | 42188 |
| 369_Human_adenovirus_A_g_3 | 42189 |
| 369_Human_adenovirus_A_g_4 | 42190 |
| 369_Human_adenovirus_A_g_5 | 42191 |
| 370_Human_adenovirus_A_g_1 | 42192 |
| 370_Human_adenovirus_A_g_2 | 42193 |
| 370_Human_adenovirus_A_g_3 | 42194 |
| 370_Human_adenovirus_A_g_4 | 42195 |
| 370_Human_adenovirus_A_g_5 | 42196 |
| 371_Human_adenovirus_A_g_1 | 42197 |
| 371_Human_adenovirus_A_g_2 | 42198 |
| 371_Human_adenovirus_A_g_3 | 42199 |
| 371_Human_adenovirus_A_g_4 | 42200 |
| 371_Human_adenovirus_A_g_5 | 42201 |
| 372_Human_adenovirus_A_g_1 | 42202 |
| 372_Human_adenovirus_A_g_2 | 42203 |
| 372_Human_adenovirus_A_g_3 | 42204 |
| 372_Human_adenovirus_A_g_4 | 42205 |
| 372_Human_adenovirus_A_g_5 | 42206 |
| 373_Human_adenovirus_A_g_1 | 42207 |
| 373_Human_adenovirus_A_g_2 | 42208 |
| 373_Human_adenovirus_A_g_3 | 42209 |
| 373_Human_adenovirus_A_g_4 | 42210 |
| 373_Human_adenovirus_A_g_5 | 42211 |
| 374_Human_adenovirus_A_g_1 | 42212 |
| 374_Human_adenovirus_A_g_2 | 42213 |
| 374_Human_adenovirus_A_g_3 | 42214 |
| 374_Human_adenovirus_A_g_4 | 42215 |
| 374_Human_adenovirus_A_g_5 | 42216 |
| 375_Human_adenovirus_A_g_1 | 42217 |
| 375_Human_adenovirus_A_g_2 | 42218 |
| 375_Human_adenovirus_A_g_3 | 42219 |
| 375_Human_adenovirus_A_g_4 | 42220 |
| 375_Human_adenovirus_A_g_5 | 42221 |
| 376_Human_adenovirus_A_g_1 | 42222 |
| 376_Human_adenovirus_A_g_2 | 42223 |
| 376_Human_adenovirus_A_g_3 | 42224 |
| 376_Human_adenovirus_A_g_4 | 42225 |
| 376_Human_adenovirus_A_g_5 | 42226 |
| 377_Human_adenovirus_A_g_1 | 42227 |
| 377_Human_adenovirus_A_g_2 | 42228 |
| 377_Human_adenovirus_A_g_3 | 42229 |
| 377_Human_adenovirus_A_g_4 | 42230 |
| 377_Human_adenovirus_A_g_5 | 42231 |
| 378_Human_adenovirus_A_g_1 | 42232 |
| 378_Human_adenovirus_A_g_2 | 42233 |
| 378_Human_adenovirus_A_g_3 | 42234 |
| 378_Human_adenovirus_A_g_4 | 42235 |
| 378_Human_adenovirus_A_g_5 | 42236 |
| 379_Human_adenovirus_A_g_1 | 42237 |
| 379_Human_adenovirus_A_g_2 | 42238 |
| 379_Human_adenovirus_A_g_3 | 42239 |
| 379_Human_adenovirus_A_g_4 | 42240 |
| 379_Human_adenovirus_A_g_5 | 42241 |
| 380_Human_adenovirus_A_g_1 | 42242 |
| 380_Human_adenovirus_A_g_2 | 42243 |
| 380_Human_adenovirus_A_g_3 | 42244 |
| 380_Human_adenovirus_A_g_4 | 42245 |
| 380_Human_adenovirus_A_g_5 | 42246 |
| 381_Human_adenovirus_A_g_1 | 42247 |
| 381_Human_adenovirus_A_g_2 | 42248 |
| 381_Human_adenovirus_A_g_3 | 42249 |
| 381_Human_adenovirus_A_g_4 | 42250 |
| 381_Human_adenovirus_A_g_5 | 42251 |
| 382_Human_adenovirus_A_g_1 | 42252 |
| 382_Human_adenovirus_A_g_2 | 42253 |
| 382_Human_adenovirus_A_g_3 | 42254 |
| 382_Human_adenovirus_A_g_4 | 42255 |
| 382_Human_adenovirus_A_g_5 | 42256 |
| 383_Human_adenovirus_A_g_1 | 42257 |
| 383_Human_adenovirus_A_g_2 | 42258 |
| 383_Human_adenovirus_A_g_3 | 42259 |
| 383_Human_adenovirus_A_g_4 | 42260 |
| 383_Human_adenovirus_A_g_5 | 42261 |
| 384_Human_adenovirus_A_g_1 | 42262 |
| 384_Human_adenovirus_A_g_2 | 42263 |
| 384_Human_adenovirus_A_g_3 | 42264 |
| 384_Human_adenovirus_A_g_4 | 42265 |
| 384_Human_adenovirus_A_g_5 | 42266 |
| 385_Human_adenovirus_A_g_1 | 42267 |
| 385_Human_adenovirus_A_g_2 | 42268 |
| 385_Human_adenovirus_A_g_3 | 42269 |
| 385_Human_adenovirus_A_g_4 | 42270 |
| 385_Human_adenovirus_A_g_5 | 42271 |
| 386_Human_adenovirus_A_g_1 | 42272 |
| 386_Human_adenovirus_A_g_2 | 42273 |
| 386_Human_adenovirus_A_g_3 | 42274 |
| 386_Human_adenovirus_A_g_4 | 42275 |
| 386_Human_adenovirus_A_g_5 | 42276 |
| 387_Human_adenovirus_A_g_1 | 42277 |
| 387_Human_adenovirus_A_g_2 | 42278 |
| 387_Human_adenovirus_A_g_3 | 42279 |
| 387_Human_adenovirus_A_g_4 | 42280 |
| 387_Human_adenovirus_A_g_5 | 42281 |
| 388_Human_adenovirus_A_g_1 | 42282 |
| 388_Human_adenovirus_A_g_2 | 42283 |
| 388_Human_adenovirus_A_g_3 | 42284 |
| 388_Human_adenovirus_A_g_4 | 42285 |
| 388_Human_adenovirus_A_g_5 | 42286 |
| 389_Human_adenovirus_A_g_1 | 42287 |
| 389_Human_adenovirus_A_g_2 | 42288 |
| 389_Human_adenovirus_A_g_3 | 42289 |
| 389_Human_adenovirus_A_g_4 | 42290 |
| 389_Human_adenovirus_A_g_5 | 42291 |
| 390_Human_adenovirus_A_g_1 | 42292 |
| 390_Human_adenovirus_A_g_2 | 42293 |
| 390_Human_adenovirus_A_g_3 | 42294 |
| 390_Human_adenovirus_A_g_4 | 42295 |
| 390_Human_adenovirus_A_g_5 | 42296 |
| 391_Human_adenovirus_A_g_1 | 42297 |
| 391_Human_adenovirus_A_g_2 | 42298 |
| 391_Human_adenovirus_A_g_3 | 42299 |
| 391_Human_adenovirus_A_g_4 | 42300 |
| 391_Human_adenovirus_A_g_5 | 42301 |
| 392_Human_adenovirus_A_g_1 | 42302 |
| 392_Human_adenovirus_A_g_2 | 42303 |
| 392_Human_adenovirus_A_g_3 | 42304 |
| 392_Human_adenovirus_A_g_4 | 42305 |
| 392_Human_adenovirus_A_g_5 | 42306 |
| 393_Human_adenovirus_A_g_1 | 42307 |
| 393_Human_adenovirus_A_g_2 | 42308 |
| 393_Human_adenovirus_A_g_3 | 42309 |
| 393_Human_adenovirus_A_g_4 | 42310 |
| 393_Human_adenovirus_A_g_5 | 42311 |
| 394_Human_adenovirus_A_g_1 | 42312 |
| 394_Human_adenovirus_A_g_2 | 42313 |
| 394_Human_adenovirus_A_g_3 | 42314 |
| 394_Human_adenovirus_A_g_4 | 42315 |
| 394_Human_adenovirus_A_g_5 | 42316 |
| 395_Human_adenovirus_A_g_1 | 42317 |
| 395_Human_adenovirus_A_g_2 | 42318 |
| 395_Human_adenovirus_A_g_3 | 42319 |
| 395_Human_adenovirus_A_g_4 | 42320 |
| 395_Human_adenovirus_A_g_5 | 42321 |
| 396_Human_adenovirus_A_g_1 | 42322 |
| 396_Human_adenovirus_A_g_2 | 42323 |
| 396_Human_adenovirus_A_g_3 | 42324 |
| 396_Human_adenovirus_A_g_4 | 42325 |
| 396_Human_adenovirus_A_g_5 | 42326 |
| 397_Human_adenovirus_A_g_1 | 42327 |
| 397_Human_adenovirus_A_g_2 | 42328 |
| 397_Human_adenovirus_A_g_3 | 42329 |
| 397_Human_adenovirus_A_g_4 | 42330 |
| 397_Human_adenovirus_A_g_5 | 42331 |
| 398_Human_adenovirus_A_g_1 | 42332 |
| 398_Human_adenovirus_A_g_2 | 42333 |
| 398_Human_adenovirus_A_g_3 | 42334 |
| 398_Human_adenovirus_A_g_4 | 42335 |
| 398_Human_adenovirus_A_g_5 | 42336 |
| 399_Human_adenovirus_A_g_1 | 42337 |
| 399_Human_adenovirus_A_g_2 | 42338 |
| 399_Human_adenovirus_A_g_3 | 42339 |
| 399_Human_adenovirus_A_g_4 | 42340 |
| 399_Human_adenovirus_A_g_5 | 42341 |
| 400_Human_adenovirus_A_g_1 | 42342 |
| 400_Human_adenovirus_A_g_2 | 42343 |
| 400_Human_adenovirus_A_g_3 | 42344 |
| 400_Human_adenovirus_A_g_4 | 42345 |
| 400_Human_adenovirus_A_g_5 | 42346 |
| 401_Human_adenovirus_A_g_1 | 42347 |
| 401_Human_adenovirus_A_g_2 | 42348 |
| 401_Human_adenovirus_A_g_3 | 42349 |
| 401_Human_adenovirus_A_g_4 | 42350 |
| 401_Human_adenovirus_A_g_5 | 42351 |
| 402_Human_adenovirus_A_g_1 | 42352 |
| 402_Human_adenovirus_A_g_2 | 42353 |
| 402_Human_adenovirus_A_g_3 | 42354 |
| 402_Human_adenovirus_A_g_4 | 42355 |
| 402_Human_adenovirus_A_g_5 | 42356 |
| 403_Human_adenovirus_A_g_1 | 42357 |
| 403_Human_adenovirus_A_g_2 | 42358 |
| 403_Human_adenovirus_A_g_3 | 42359 |
| 403_Human_adenovirus_A_g_4 | 42360 |
| 403_Human_adenovirus_A_g_5 | 42361 |
| 404_Human_adenovirus_A_g_1 | 42362 |
| 404_Human_adenovirus_A_g_2 | 42363 |
| 404_Human_adenovirus_A_g_3 | 42364 |
| 404_Human_adenovirus_A_g_4 | 42365 |
| 404_Human_adenovirus_A_g_5 | 42366 |
| 405_Human_adenovirus_A_g_1 | 42367 |
| 405_Human_adenovirus_A_g_2 | 42368 |
| 405_Human_adenovirus_A_g_3 | 42369 |
| 405_Human_adenovirus_A_g_4 | 42370 |
| 405_Human_adenovirus_A_g_5 | 42371 |
| 406_Human_adenovirus_A_g_1 | 42372 |
| 406_Human_adenovirus_A_g_2 | 42373 |
| 406_Human_adenovirus_A_g_3 | 42374 |
| 406_Human_adenovirus_A_g_4 | 42375 |
| 406_Human_adenovirus_A_g_5 | 42376 |
| 407_Human_adenovirus_A_g_1 | 42377 |
| 407_Human_adenovirus_A_g_2 | 42378 |
| 407_Human_adenovirus_A_g_3 | 42379 |
| 407_Human_adenovirus_A_g_4 | 42380 |
| 407_Human_adenovirus_A_g_5 | 42381 |
| 408_Human_adenovirus_A_g_1 | 42382 |
| 408_Human_adenovirus_A_g_2 | 42383 |
| 408_Human_adenovirus_A_g_3 | 42384 |
| 408_Human_adenovirus_A_g_4 | 42385 |
| 408_Human_adenovirus_A_g_5 | 42386 |
| 409_Human_adenovirus_A_g_1 | 42387 |
| 409_Human_adenovirus_A_g_2 | 42388 |
| 409_Human_adenovirus_A_g_3 | 42389 |
| 409_Human_adenovirus_A_g_4 | 42390 |
| 409_Human_adenovirus_A_g_5 | 42391 |
| 410_Human_adenovirus_A_g_1 | 42392 |
| 410_Human_adenovirus_A_g_2 | 42393 |
| 410_Human_adenovirus_A_g_3 | 42394 |
| 410_Human_adenovirus_A_g_4 | 42395 |
| 410_Human_adenovirus_A_g_5 | 42396 |
| 411_Human_adenovirus_A_g_1 | 42397 |
| 411_Human_adenovirus_A_g_2 | 42398 |
| 411_Human_adenovirus_A_g_3 | 42399 |
| 411_Human_adenovirus_A_g_4 | 42400 |
| 411_Human_adenovirus_A_g_5 | 42401 |
| 412_Human_adenovirus_A_g_1 | 42402 |
| 412_Human_adenovirus_A_g_2 | 42403 |
| 412_Human_adenovirus_A_g_3 | 42404 |
| 412_Human_adenovirus_A_g_4 | 42405 |
| 412_Human_adenovirus_A_g_5 | 42406 |
| 413_Human_adenovirus_A_g_1 | 42407 |
| 413_Human_adenovirus_A_g_2 | 42408 |
| 413_Human_adenovirus_A_g_3 | 42409 |
| 413_Human_adenovirus_A_g_4 | 42410 |
| 413_Human_adenovirus_A_g_5 | 42411 |
| 414_Human_adenovirus_A_g_1 | 42412 |
| 414_Human_adenovirus_A_g_2 | 42413 |
| 414_Human_adenovirus_A_g_3 | 42414 |
| 415_Human_adenovirus_A_g_1 | 42415 |
| 415_Human_adenovirus_A_g_2 | 42416 |
| 415_Human_adenovirus_A_g_3 | 42417 |
| 415_Human_adenovirus_A_g_4 | 42418 |
| 415_Human_adenovirus_A_g_5 | 42419 |
| 416_Human_adenovirus_A_g_1 | 42420 |
| 416_Human_adenovirus_A_g_2 | 42421 |
| 416_Human_adenovirus_A_g_3 | 42422 |
| 416_Human_adenovirus_A_g_4 | 42423 |
| 416_Human_adenovirus_A_g_5 | 42424 |
| 417_Human_adenovirus_A_g_1 | 42425 |
| 417_Human_adenovirus_A_g_2 | 42426 |
| 417_Human_adenovirus_A_g_3 | 42427 |
| 417_Human_adenovirus_A_g_4 | 42428 |
| 417_Human_adenovirus_A_g_5 | 42429 |
| 418_Human_adenovirus_A_g_1 | 42430 |
| 418_Human_adenovirus_A_g_2 | 42431 |
| 418_Human_adenovirus_A_g_3 | 42432 |
| 418_Human_adenovirus_A_g_4 | 42433 |
| 418_Human_adenovirus_A_g_5 | 42434 |
| 419_Human_adenovirus_A_g_1 | 42435 |
| 419_Human_adenovirus_A_g_2 | 42436 |
| 419_Human_adenovirus_A_g_3 | 42437 |
| 419_Human_adenovirus_A_g_4 | 42438 |
| 419_Human_adenovirus_A_g_5 | 42439 |
| 420_Human_adenovirus_A_g_1 | 42440 |
| 420_Human_adenovirus_A_g_2 | 42441 |
| 420_Human_adenovirus_A_g_3 | 42442 |
| 420_Human_adenovirus_A_g_4 | 42443 |
| 420_Human_adenovirus_A_g_5 | 42444 |
| 421_Human_adenovirus_A_g_1 | 42445 |
| 421_Human_adenovirus_A_g_2 | 42446 |
| 421_Human_adenovirus_A_g_3 | 42447 |
| 421_Human_adenovirus_A_g_4 | 42448 |
| 421_Human_adenovirus_A_g_5 | 42449 |
| 422_Human_adenovirus_A_g_1 | 42450 |
| 422_Human_adenovirus_A_g_2 | 42451 |
| 422_Human_adenovirus_A_g_3 | 42452 |
| 422_Human_adenovirus_A_g_4 | 42453 |
| 422_Human_adenovirus_A_g_5 | 42454 |
| 423_Human_adenovirus_A_g_1 | 42455 |
| 423_Human_adenovirus_A_g_2 | 42456 |
| 423_Human_adenovirus_A_g_3 | 42457 |
| 423_Human_adenovirus_A_g_4 | 42458 |
| 423_Human_adenovirus_A_g_5 | 42459 |
| 424_Human_adenovirus_A_g_1 | 42460 |
| 424_Human_adenovirus_A_g_2 | 42461 |
| 424_Human_adenovirus_A_g_3 | 42462 |
| 424_Human_adenovirus_A_g_4 | 42463 |
| 424_Human_adenovirus_A_g_5 | 42464 |
| 425_Human_adenovirus_A_g_1 | 42465 |
| 425_Human_adenovirus_A_g_2 | 42466 |
| 425_Human_adenovirus_A_g_3 | 42467 |
| 425_Human_adenovirus_A_g_4 | 42468 |
| 425_Human_adenovirus_A_g_5 | 42469 |
| 426_Human_adenovirus_A_g_1 | 42470 |
| 426_Human_adenovirus_A_g_2 | 42471 |
| 426_Human_adenovirus_A_g_3 | 42472 |
| 426_Human_adenovirus_A_g_4 | 42473 |
| 426_Human_adenovirus_A_g_5 | 42474 |
| 427_Human_adenovirus_A_g_1 | 42475 |
| 427_Human_adenovirus_A_g_2 | 42476 |
| 427_Human_adenovirus_A_g_3 | 42477 |
| 427_Human_adenovirus_A_g_4 | 42478 |
| 427_Human_adenovirus_A_g_5 | 42479 |
| 428_Human_adenovirus_A_g_1 | 42480 |
| 428_Human_adenovirus_A_g_2 | 42481 |
| 428_Human_adenovirus_A_g_3 | 42482 |
| 428_Human_adenovirus_A_g_4 | 42483 |
| 428_Human_adenovirus_A_g_5 | 42484 |
| 429_Human_adenovirus_A_g_1 | 42485 |
| 429_Human_adenovirus_A_g_2 | 42486 |
| 429_Human_adenovirus_A_g_3 | 42487 |
| 429_Human_adenovirus_A_g_4 | 42488 |
| 429_Human_adenovirus_A_g_5 | 42489 |
| 430_Human_adenovirus_A_g_1 | 42490 |
| 430_Human_adenovirus_A_g_2 | 42491 |
| 430_Human_adenovirus_A_g_3 | 42492 |
| 430_Human_adenovirus_A_g_4 | 42493 |
| 430_Human_adenovirus_A_g_5 | 42494 |
| 431_Human_adenovirus_A_g_1 | 42495 |
| 431_Human_adenovirus_A_g_2 | 42496 |
| 431_Human_adenovirus_A_g_3 | 42497 |
| 431_Human_adenovirus_A_g_4 | 42498 |
| 431_Human_adenovirus_A_g_5 | 42499 |
| 432_Human_adenovirus_A_g_1 | 42500 |
| 432_Human_adenovirus_A_g_2 | 42501 |
| 432_Human_adenovirus_A_g_3 | 42502 |
| 432_Human_adenovirus_A_g_4 | 42503 |
| 432_Human_adenovirus_A_g_5 | 42504 |
| 433_Human_adenovirus_A_g_1 | 42505 |
| 433_Human_adenovirus_A_g_2 | 42506 |
| 433_Human_adenovirus_A_g_3 | 42507 |
| 433_Human_adenovirus_A_g_4 | 42508 |
| 433_Human_adenovirus_A_g_5 | 42509 |
| 434_Human_adenovirus_A_g_1 | 42510 |
| 434_Human_adenovirus_A_g_2 | 42511 |
| 434_Human_adenovirus_A_g_3 | 42512 |
| 434_Human_adenovirus_A_g_4 | 42513 |
| 434_Human_adenovirus_A_g_5 | 42514 |
| 435_Human_adenovirus_A_g_1 | 42515 |
| 435_Human_adenovirus_A_g_2 | 42516 |
| 435_Human_adenovirus_A_g_3 | 42517 |
| 435_Human_adenovirus_A_g_4 | 42518 |
| 435_Human_adenovirus_A_g_5 | 42519 |
| 436_Human_adenovirus_A_g_1 | 42520 |
| 436_Human_adenovirus_A_g_2 | 42521 |
| 436_Human_adenovirus_A_g_3 | 42522 |
| 436_Human_adenovirus_A_g_4 | 42523 |
| 436_Human_adenovirus_A_g_5 | 42524 |
| 437_Human_adenovirus_A_g_1 | 42525 |
| 437_Human_adenovirus_A_g_2 | 42526 |
| 437_Human_adenovirus_A_g_3 | 42527 |
| 437_Human_adenovirus_A_g_4 | 42528 |
| 437_Human_adenovirus_A_g_5 | 42529 |
| 438_Human_adenovirus_A_g_1 | 42530 |
| 438_Human_adenovirus_A_g_2 | 42531 |
| 438_Human_adenovirus_A_g_3 | 42532 |
| 438_Human_adenovirus_A_g_4 | 42533 |
| 438_Human_adenovirus_A_g_5 | 42534 |
| 439_Human_adenovirus_A_g_1 | 42535 |
| 439_Human_adenovirus_A_g_2 | 42536 |
| 439_Human_adenovirus_A_g_3 | 42537 |
| 439_Human_adenovirus_A_g_4 | 42538 |
| 439_Human_adenovirus_A_g_5 | 42539 |
| 440_Human_adenovirus_A_g_1 | 42540 |
| 440_Human_adenovirus_A_g_2 | 42541 |
| 440_Human_adenovirus_A_g_3 | 42542 |
| 440_Human_adenovirus_A_g_4 | 42543 |
| 440_Human_adenovirus_A_g_5 | 42544 |
| 441_Human_adenovirus_A_g_1 | 42545 |
| 441_Human_adenovirus_A_g_2 | 42546 |
| 441_Human_adenovirus_A_g_3 | 42547 |
| 441_Human_adenovirus_A_g_4 | 42548 |
| 441_Human_adenovirus_A_g_5 | 42549 |
| 442_Human_adenovirus_A_g_1 | 42550 |
| 442_Human_adenovirus_A_g_2 | 42551 |
| 442_Human_adenovirus_A_g_3 | 42552 |
| 442_Human_adenovirus_A_g_4 | 42553 |
| 442_Human_adenovirus_A_g_5 | 42554 |
| 443_Human_adenovirus_A_g_1 | 42555 |
| 443_Human_adenovirus_A_g_2 | 42556 |
| 443_Human_adenovirus_A_g_3 | 42557 |
| 443_Human_adenovirus_A_g_4 | 42558 |
| 443_Human_adenovirus_A_g_5 | 42559 |
| 444_Human_adenovirus_A_g_1 | 42560 |
| 444_Human_adenovirus_A_g_2 | 42561 |
| 444_Human_adenovirus_A_g_3 | 42562 |
| 444_Human_adenovirus_A_g_4 | 42563 |
| 444_Human_adenovirus_A_g_5 | 42564 |
| 445_Human_adenovirus_A_g_1 | 42565 |
| 445_Human_adenovirus_A_g_2 | 42566 |
| 445_Human_adenovirus_A_g_3 | 42567 |
| 445_Human_adenovirus_A_g_4 | 42568 |
| 445_Human_adenovirus_A_g_5 | 42569 |
| 446_Human_adenovirus_A_g_1 | 42570 |
| 446_Human_adenovirus_A_g_2 | 42571 |
| 446_Human_adenovirus_A_g_3 | 42572 |
| 446_Human_adenovirus_A_g_4 | 42573 |
| 446_Human_adenovirus_A_g_5 | 42574 |
| 447_Human_adenovirus_A_g_1 | 42575 |
| 447_Human_adenovirus_A_g_2 | 42576 |
| 447_Human_adenovirus_A_g_3 | 42577 |
| 447_Human_adenovirus_A_g_4 | 42578 |
| 447_Human_adenovirus_A_g_5 | 42579 |
| 448_Human_adenovirus_A_g_1 | 42580 |
| 448_Human_adenovirus_A_g_2 | 42581 |
| 448_Human_adenovirus_A_g_3 | 42582 |
| 448_Human_adenovirus_A_g_4 | 42583 |
| 448_Human_adenovirus_A_g_5 | 42584 |
| 449_Human_adenovirus_A_g_1 | 42585 |
| 449_Human_adenovirus_A_g_2 | 42586 |
| 449_Human_adenovirus_A_g_3 | 42587 |
| 449_Human_adenovirus_A_g_4 | 42588 |
| 449_Human_adenovirus_A_g_5 | 42589 |
| 450_Human_adenovirus_A_g_1 | 42590 |
| 450_Human_adenovirus_A_g_2 | 42591 |
| 450_Human_adenovirus_A_g_3 | 42592 |
| 450_Human_adenovirus_A_g_4 | 42593 |
| 450_Human_adenovirus_A_g_5 | 42594 |
| 451_Human_adenovirus_A_g_1 | 42595 |
| 451_Human_adenovirus_A_g_2 | 42596 |
| 451_Human_adenovirus_A_g_3 | 42597 |
| 451_Human_adenovirus_A_g_4 | 42598 |
| 451_Human_adenovirus_A_g_5 | 42599 |
| 452_Human_adenovirus_A_g_1 | 42600 |
| 452_Human_adenovirus_A_g_2 | 42601 |
| 452_Human_adenovirus_A_g_3 | 42602 |
| 452_Human_adenovirus_A_g_4 | 42603 |
| 452_Human_adenovirus_A_g_5 | 42604 |
| 453_Human_adenovirus_A_g_1 | 42605 |
| 453_Human_adenovirus_A_g_2 | 42606 |
| 453_Human_adenovirus_A_g_3 | 42607 |
| 453_Human_adenovirus_A_g_4 | 42608 |
| 453_Human_adenovirus_A_g_5 | 42609 |
| 454_Human_adenovirus_A_g_1 | 42610 |
| 454_Human_adenovirus_A_g_2 | 42611 |
| 454_Human_adenovirus_A_g_3 | 42612 |
| 454_Human_adenovirus_A_g_4 | 42613 |
| 454_Human_adenovirus_A_g_5 | 42614 |
| 455_Human_adenovirus_A_g_1 | 42615 |
| 455_Human_adenovirus_A_g_2 | 42616 |
| 455_Human_adenovirus_A_g_3 | 42617 |
| 455_Human_adenovirus_A_g_4 | 42618 |
| 455_Human_adenovirus_A_g_5 | 42619 |
| 456_Human_adenovirus_A_g_1 | 42620 |
| 456_Human_adenovirus_A_g_2 | 42621 |
| 456_Human_adenovirus_A_g_3 | 42622 |
| 456_Human_adenovirus_A_g_4 | 42623 |
| 456_Human_adenovirus_A_g_5 | 42624 |
| 457_Human_rhinovirus_NAT001_polyprotein_gene_g_1 | 42625 |
| 457_Human_rhinovirus_NAT001_polyprotein_gene_g_2 | 42626 |
| 457_Human_rhinovirus_NAT001_polyprotein_gene_g_3 | 42627 |
| 457_Human_rhinovirus_NAT001_polyprotein_gene_g_4 | 42628 |
| 457_Human_rhinovirus_NAT001_polyprotein_gene_g_5 | 42629 |
| 458_Human_rhinovirus_NAT001_polyprotein_gene_g_1 | 42630 |
| 458_Human_rhinovirus_NAT001_polyprotein_gene_g_2 | 42631 |
| 458_Human_rhinovirus_NAT001_polyprotein_gene_g_3 | 42632 |
| 458_Human_rhinovirus_NAT001_polyprotein_gene_g_4 | 42633 |
| 458_Human_rhinovirus_NAT001_polyprotein_gene_g_5 | 42634 |
| 459_Human_rhinovirus_NAT001_polyprotein_gene_g_1 | 42635 |
| 459_Human_rhinovirus_NAT001_polyprotein_gene_g_2 | 42636 |
| 459_Human_rhinovirus_NAT001_polyprotein_gene_g_3 | 42637 |
| 459_Human_rhinovirus_NAT001_polyprotein_gene_g_4 | 42638 |
| 459_Human_rhinovirus_NAT001_polyprotein_gene_g_5 | 42639 |
| 460_Human_rhinovirus_NAT001_polyprotein_gene_g_1 | 42640 |
| 460_Human_rhinovirus_NAT001_polyprotein_gene_g_2 | 42641 |
| 460_Human_rhinovirus_NAT001_polyprotein_gene_g_3 | 42642 |
| 460_Human_rhinovirus_NAT001_polyprotein_gene_g_4 | 42643 |
| 460_Human_rhinovirus_NAT001_polyprotein_gene_g_5 | 42644 |
| 461_Human_rhinovirus_NAT001_polyprotein_gene_g_1 | 42645 |
| 461_Human_rhinovirus_NAT001_polyprotein_gene_g_2 | 42646 |
| 461_Human_rhinovirus_NAT001_polyprotein_gene_g_3 | 42647 |
| 461_Human_rhinovirus_NAT001_polyprotein_gene_g_4 | 42648 |
| 461_Human_rhinovirus_NAT001_polyprotein_gene_g_5 | 42649 |
| 462_Human_rhinovirus_NAT001_polyprotein_gene_g_1 | 42650 |
| 462_Human_rhinovirus_NAT001_polyprotein_gene_g_2 | 42651 |
| 462_Human_rhinovirus_NAT001_polyprotein_gene_g_3 | 42652 |
| 462_Human_rhinovirus_NAT001_polyprotein_gene_g_4 | 42653 |
| 462_Human_rhinovirus_NAT001_polyprotein_gene_g_5 | 42654 |
| 463_Human_rhinovirus_NAT001_polyprotein_gene_g_1 | 42655 |
| 463_Human_rhinovirus_NAT001_polyprotein_gene_g_2 | 42656 |
| 463_Human_rhinovirus_NAT001_polyprotein_gene_g_3 | 42657 |
| 463_Human_rhinovirus_NAT001_polyprotein_gene_g_4 | 42658 |
| 463_Human_rhinovirus_NAT001_polyprotein_gene_g_5 | 42659 |
| 464_Human_rhinovirus_NAT001_polyprotein_gene_g_1 | 42660 |
| 464_Human_rhinovirus_NAT001_polyprotein_gene_g_2 | 42661 |
| 464_Human_rhinovirus_NAT001_polyprotein_gene_g_3 | 42662 |
| 464_Human_rhinovirus_NAT001_polyprotein_gene_g_4 | 42663 |
| 464_Human_rhinovirus_NAT001_polyprotein_gene_g_5 | 42664 |
| 465_Human_rhinovirus_NAT001_polyprotein_gene_g_1 | 42665 |
| 465_Human_rhinovirus_NAT001_polyprotein_gene_g_2 | 42666 |
| 465_Human_rhinovirus_NAT001_polyprotein_gene_g_3 | 42667 |
| 465_Human_rhinovirus_NAT001_polyprotein_gene_g_4 | 42668 |
| 465_Human_rhinovirus_NAT001_polyprotein_gene_g_5 | 42669 |
| 466_Human_rhinovirus_NAT001_polyprotein_gene_g_1 | 42670 |
| 466_Human_rhinovirus_NAT001_polyprotein_gene_g_2 | 42671 |
| 466_Human_rhinovirus_NAT001_polyprotein_gene_g_3 | 42672 |
| 466_Human_rhinovirus_NAT001_polyprotein_gene_g_4 | 42673 |
| 466_Human_rhinovirus_NAT001_polyprotein_gene_g_5 | 42674 |
| 467_Human_rhinovirus_NAT001_polyprotein_gene_g_1 | 42675 |
| 467_Human_rhinovirus_NAT001_polyprotein_gene_g_2 | 42676 |
| 467_Human_rhinovirus_NAT001_polyprotein_gene_g_3 | 42677 |
| 467_Human_rhinovirus_NAT001_polyprotein_gene_g_4 | 42678 |
| 467_Human_rhinovirus_NAT001_polyprotein_gene_g_5 | 42679 |
| 468_Human_rhinovirus_NAT001_polyprotein_gene_g_1 | 42680 |
| 468_Human_rhinovirus_NAT001_polyprotein_gene_g_2 | 42681 |
| 468_Human_rhinovirus_NAT001_polyprotein_gene_g_3 | 42682 |
| 468_Human_rhinovirus_NAT001_polyprotein_gene_g_4 | 42683 |
| 468_Human_rhinovirus_NAT001_polyprotein_gene_g_5 | 42684 |
| 469_Human_rhinovirus_NAT001_polyprotein_gene_g_1 | 42685 |
| 469_Human_rhinovirus_NAT001_polyprotein_gene_g_2 | 42686 |
| 469_Human_rhinovirus_NAT001_polyprotein_gene_g_3 | 42687 |
| 469_Human_rhinovirus_NAT001_polyprotein_gene_g_4 | 42688 |
| 469_Human_rhinovirus_NAT001_polyprotein_gene_g_5 | 42689 |
| 470_Human_rhinovirus_NAT001_polyprotein_gene_g_1 | 42690 |
| 470_Human_rhinovirus_NAT001_polyprotein_gene_g_2 | 42691 |
| 470_Human_rhinovirus_NAT001_polyprotein_gene_g_3 | 42692 |
| 470_Human_rhinovirus_NAT001_polyprotein_gene_g_4 | 42693 |
| 470_Human_rhinovirus_NAT001_polyprotein_gene_g_5 | 42694 |
| 471_Human_rhinovirus_NAT001_polyprotein_gene_g_1 | 42695 |
| 471_Human_rhinovirus_NAT001_polyprotein_gene_g_2 | 42696 |
| 471_Human_rhinovirus_NAT001_polyprotein_gene_g_3 | 42697 |
| 471_Human_rhinovirus_NAT001_polyprotein_gene_g_4 | 42698 |
| 471_Human_rhinovirus_NAT001_polyprotein_gene_g_5 | 42699 |
| 472_Human_papillomavirus_type_4_g_1 | 42700 |
| 472_Human_papillomavirus_type_4_g_2 | 42701 |
| 472_Human_papillomavirus_type_4_g_3 | 42702 |
| 472_Human_papillomavirus_type_4_g_4 | 42703 |
| 472_Human_papillomavirus_type_4_g_5 | 42704 |
| 473_Human_papillomavirus_type_4_g_1 | 42705 |
| 473_Human_papillomavirus_type_4_g_2 | 42706 |
| 473_Human_papillomavirus_type_4_g_3 | 42707 |
| 473_Human_papillomavirus_type_4_g_4 | 42708 |
| 473_Human_papillomavirus_type_4_g_5 | 42709 |
| 474_Human_papillomavirus_type_4_g_1 | 42710 |
| 474_Human_papillomavirus_type_4_g_2 | 42711 |
| 474_Human_papillomavirus_type_4_g_3 | 42712 |
| 474_Human_papillomavirus_type_4_g_4 | 42713 |
| 474_Human_papillomavirus_type_4_g_5 | 42714 |
| 475_Human_papillomavirus_type_4_g_1 | 42715 |
| 475_Human_papillomavirus_type_4_g_2 | 42716 |
| 475_Human_papillomavirus_type_4_g_3 | 42717 |
| 475_Human_papillomavirus_type_4_g_4 | 42718 |
| 475_Human_papillomavirus_type_4_g_5 | 42719 |
| 476_Human_papillomavirus_type_4_g_1 | 42720 |
| 476_Human_papillomavirus_type_4_g_2 | 42721 |
| 476_Human_papillomavirus_type_4_g_3 | 42722 |
| 476_Human_papillomavirus_type_4_g_4 | 42723 |
| 476_Human_papillomavirus_type_4_g_5 | 42724 |
| 477_Human_papillomavirus_type_4_g_1 | 42725 |
| 477_Human_papillomavirus_type_4_g_2 | 42726 |
| 477_Human_papillomavirus_type_4_g_3 | 42727 |
| 477_Human_papillomavirus_type_4_g_4 | 42728 |
| 477_Human_papillomavirus_type_4_g_5 | 42729 |
| 478_Human_papillomavirus_type_4_g_1 | 42730 |
| 478_Human_papillomavirus_type_4_g_2 | 42731 |
| 478_Human_papillomavirus_type_4_g_3 | 42732 |
| 478_Human_papillomavirus_type_4_g_4 | 42733 |
| 478_Human_papillomavirus_type_4_g_5 | 42734 |
| 479_Human_papillomavirus_type_4_g_1 | 42735 |
| 479_Human_papillomavirus_type_4_g_2 | 42736 |
| 479_Human_papillomavirus_type_4_g_3 | 42737 |
| 479_Human_papillomavirus_type_4_g_4 | 42738 |
| 479_Human_papillomavirus_type_4_g_5 | 42739 |
| 480_Human_papillomavirus_type_4_g_1 | 42740 |
| 480_Human_papillomavirus_type_4_g_2 | 42741 |
| 480_Human_papillomavirus_type_4_g_3 | 42742 |
| 480_Human_papillomavirus_type_4_g_4 | 42743 |
| 480_Human_papillomavirus_type_4_g_5 | 42744 |
| 481_Human_papillomavirus_type_4_g_1 | 42745 |
| 481_Human_papillomavirus_type_4_g_2 | 42746 |
| 481_Human_papillomavirus_type_4_g_3 | 42747 |
| 481_Human_papillomavirus_type_4_g_4 | 42748 |
| 481_Human_papillomavirus_type_4_g_5 | 42749 |
| 482_Human_papillomavirus_type_4_g_1 | 42750 |
| 482_Human_papillomavirus_type_4_g_2 | 42751 |
| 482_Human_papillomavirus_type_4_g_3 | 42752 |
| 482_Human_papillomavirus_type_4_g_4 | 42753 |
| 482_Human_papillomavirus_type_4_g_5 | 42754 |
| 483_Human_papillomavirus_type_4_g_1 | 42755 |
| 483_Human_papillomavirus_type_4_g_2 | 42756 |
| 483_Human_papillomavirus_type_4_g_3 | 42757 |
| 483_Human_papillomavirus_type_4_g_4 | 42758 |
| 483_Human_papillomavirus_type_4_g_5 | 42759 |
| 484_Human_papillomavirus_type_4_g_1 | 42760 |
| 484_Human_papillomavirus_type_4_g_2 | 42761 |
| 484_Human_papillomavirus_type_4_g_3 | 42762 |
| 484_Human_papillomavirus_type_4_g_4 | 42763 |
| 484_Human_papillomavirus_type_4_g_5 | 42764 |
| 485_Human_papillomavirus_type_4_g_1 | 42765 |
| 485_Human_papillomavirus_type_4_g_2 | 42766 |
| 485_Human_papillomavirus_type_4_g_3 | 42767 |
| 485_Human_papillomavirus_type_4_g_4 | 42768 |
| 485_Human_papillomavirus_type_4_g_5 | 42769 |
| 486_Human_papillomavirus_type_4_g_1 | 42770 |
| 486_Human_papillomavirus_type_4_g_2 | 42771 |
| 486_Human_papillomavirus_type_4_g_3 | 42772 |
| 486_Human_papillomavirus_type_4_g_4 | 42773 |
| 486_Human_papillomavirus_type_4_g_5 | 42774 |
| 487_Human_papillomavirus_type_4_g_1 | 42775 |
| 487_Human_papillomavirus_type_4_g_2 | 42776 |
| 487_Human_papillomavirus_type_4_g_3 | 42777 |
| 487_Human_papillomavirus_type_4_g_4 | 42778 |
| 487_Human_papillomavirus_type_4_g_5 | 42779 |
| 488_Human_papillomavirus_type_4_g_1 | 42780 |
| 488_Human_papillomavirus_type_4_g_2 | 42781 |
| 488_Human_papillomavirus_type_4_g_3 | 42782 |
| 488_Human_papillomavirus_type_4_g_4 | 42783 |
| 488_Human_papillomavirus_type_4_g_5 | 42784 |
| 489_Human_papillomavirus_type_4_g_1 | 42785 |
| 489_Human_papillomavirus_type_4_g_2 | 42786 |
| 489_Human_papillomavirus_type_4_g_3 | 42787 |
| 489_Human_papillomavirus_type_4_g_4 | 42788 |
| 489_Human_papillomavirus_type_4_g_5 | 42789 |
| 490_Human_herpesvirus_7_g_1 | 42790 |
| 491_Human_herpesvirus_7_g_1 | 42791 |
| 491_Human_herpesvirus_7_g_2 | 42792 |
| 491_Human_herpesvirus_7_g_3 | 42793 |
| 491_Human_herpesvirus_7_g_4 | 42794 |
| 491_Human_herpesvirus_7_g_5 | 42795 |
| 492_Human_herpesvirus_7_g_1 | 42796 |
| 492_Human_herpesvirus_7_g_2 | 42797 |
| 492_Human_herpesvirus_7_g_3 | 42798 |
| 492_Human_herpesvirus_7_g_4 | 42799 |
| 492_Human_herpesvirus_7_g_5 | 42800 |
| 493_Human_herpesvirus_7_g_1 | 42801 |
| 493_Human_herpesvirus_7_g_2 | 42802 |
| 493_Human_herpesvirus_7_g_3 | 42803 |
| 494_Influenza_C_virus_(C/Ann_Arbor/1/50)_PB1_gene_{—} | 42804 |
| for_polymerase_1_g_1 | |
| 494_Influenza_C_virus_(C/Ann_Arbor/1/50)_PB1_gene_{—} | 42805 |
| for_polymerase_1_g_2 | |
| 494_Influenza_C_virus_(C/Ann_Arbor/1/50)_PB1_gene_{—} | 42806 |
| for_polymerase_1_g_3 | |
| 494_Influenza_C_virus_(C/Ann_Arbor/1/50)_PB1_gene_{—} | 42807 |
| for_polymerase_1_g_4 | |
| 494_Influenza_C_virus_(C/Ann_Arbor/1/50)_PB1_gene_{—} | 42808 |
| for_polymerase_1_g_5 | |
| 495_Influenza_C_virus_(C/Ann_Arbor/1/50)_PB1_gene_{—} | 42809 |
| for_polymerase_1_g_1 | |
| 495_Influenza_C_virus_(C/Ann_Arbor/1/50)_PB1_gene_{—} | 42810 |
| for_polymerase_1_g_2 | |
| 495_Influenza_C_virus_(C/Ann_Arbor/1/50)_PB1_gene_{—} | 42811 |
| for_polymerase_1_g_3 | |
| 495_Influenza_C_virus_(C/Ann_Arbor/1/50)_PB1_gene_{—} | 42812 |
| for_polymerase_1_g_4 | |
| 495_Influenza_C_virus_(C/Ann_Arbor/1/50)_PB1_gene_{—} | 42813 |
| for_polymerase_1_g_5 | |
| 496_Influenza_C_virus_(C/Ann_Arbor/1/50)_PB1_gene_{—} | 42814 |
| for_polymerase_1_g_1 | |
| 496_Influenza_C_virus_(C/Ann_Arbor/1/50)_PB1_gene_{—} | 42815 |
| for_polymerase_1_g_2 | |
| 496_Influenza_C_virus_(C/Ann_Arbor/1/50)_PB1_gene_{—} | 42816 |
| for_polymerase_1_g_3 | |
| 496_Influenza_C_virus_(C/Ann_Arbor/1/50)_PB1_gene_{—} | 42817 |
| for_polymerase_1_g_4 | |
| 496_Influenza_C_virus_(C/Ann_Arbor/1/50)_PB1_gene_{—} | 42818 |
| for_polymerase_1_g_5 | |
| 497_Influenza_C_virus_(C/Ann_Arbor/1/50)_PB1_gene_{—} | 42819 |
| for_polymerase_1_g_1 | |
| 497_Influenza_C_virus_(C/Ann_Arbor/1/50)_PB1_gene_{—} | 42820 |
| for_polymerase_1_g_2 | |
| 497_Influenza_C_virus_(C/Ann_Arbor/1/50)_PB1_gene_{—} | 42821 |
| for_polymerase_1_g_3 | |
| 497_Influenza_C_virus_(C/Ann_Arbor/1/50)_PB1_gene_{—} | 42822 |
| for_polymerase_1_g_4 | |
| 497_Influenza_C_virus_(C/Ann_Arbor/1/50)_PB1_gene_{—} | 42823 |
| for_polymerase_1_g_5 | |
| 498_Influenza_C_virus_(C/Ann_Arbor/1/50)_PB1_gene_{—} | 42824 |
| for_polymerase_1_g_1 | |
| 498_Influenza_C_virus_(C/Ann_Arbor/1/50)_PB1_gene_{—} | 42825 |
| for_polymerase_1_g_2 | |
| 498_Influenza_C_virus_(C/Ann_Arbor/1/50)_PB1_gene_{—} | 42826 |
| for_polymerase_1_g_3 | |
| 498_Influenza_C_virus_(C/Ann_Arbor/1/50)_PB1_gene_{—} | 42827 |
| for_polymerase_1_g_4 | |
| 498_Influenza_C_virus_(C/Ann_Arbor/1/50)_PB1_gene_{—} | 42828 |
| for_polymerase_1_g_5 | |
| 499_Human_papillomavirus_type_6b_g_1 | 42829 |
| 499_Human_papillomavirus_type_6b_g_2 | 42830 |
| 499_Human_papillomavirus_type_6b_g_3 | 42831 |
| 499_Human_papillomavirus_type_6b_g_4 | 42832 |
| 499_Human_papillomavirus_type_6b_g_5 | 42833 |
| 500_Human_papillomavirus_type_6b_g_1 | 42834 |
| 500_Human_papillomavirus_type_6b_g_2 | 42835 |
| 500_Human_papillomavirus_type_6b_g_3 | 42836 |
| 500_Human_papillomavirus_type_6b_g_4 | 42837 |
| 500_Human_papillomavirus_type_6b_g_5 | 42838 |
| 501_Human_papillomavirus_type_6b_g_1 | 42839 |
| 501_Human_papillomavirus_type_6b_g_2 | 42840 |
| 501_Human_papillomavirus_type_6b_g_3 | 42841 |
| 501_Human_papillomavirus_type_6b_g_4 | 42842 |
| 501_Human_papillomavirus_type_6b_g_5 | 42843 |
| 502_Human_papillomavirus_type_6b_g_1 | 42844 |
| 502_Human_papillomavirus_type_6b_g_2 | 42845 |
| 502_Human_papillomavirus_type_6b_g_3 | 42846 |
| 502_Human_papillomavirus_type_6b_g_4 | 42847 |
| 502_Human_papillomavirus_type_6b_g_5 | 42848 |
| 503_Human_papillomavirus_type_6b_g_1 | 42849 |
| 503_Human_papillomavirus_type_6b_g_2 | 42850 |
| 503_Human_papillomavirus_type_6b_g_3 | 42851 |
| 503_Human_papillomavirus_type_6b_g_4 | 42852 |
| 503_Human_papillomavirus_type_6b_g_5 | 42853 |
| 504_Human_papillomavirus_type_6b_g_1 | 42854 |
| 504_Human_papillomavirus_type_6b_g_2 | 42855 |
| 504_Human_papillomavirus_type_6b_g_3 | 42856 |
| 504_Human_papillomavirus_type_6b_g_4 | 42857 |
| 504_Human_papillomavirus_type_6b_g_5 | 42858 |
| 505_Human_papillomavirus_type_6b_g_1 | 42859 |
| 505_Human_papillomavirus_type_6b_g_2 | 42860 |
| 505_Human_papillomavirus_type_6b_g_3 | 42861 |
| 505_Human_papillomavirus_type_6b_g_4 | 42862 |
| 505_Human_papillomavirus_type_6b_g_5 | 42863 |
| 506_Human_papillomavirus_type_6b_g_1 | 42864 |
| 506_Human_papillomavirus_type_6b_g_2 | 42865 |
| 506_Human_papillomavirus_type_6b_g_3 | 42866 |
| 506_Human_papillomavirus_type_6b_g_4 | 42867 |
| 506_Human_papillomavirus_type_6b_g_5 | 42868 |
| 507_Human_papillomavirus_type_6b_g_1 | 42869 |
| 507_Human_papillomavirus_type_6b_g_2 | 42870 |
| 507_Human_papillomavirus_type_6b_g_3 | 42871 |
| 507_Human_papillomavirus_type_6b_g_4 | 42872 |
| 507_Human_papillomavirus_type_6b_g_5 | 42873 |
| 508_Human_papillomavirus_type_6b_g_1 | 42874 |
| 508_Human_papillomavirus_type_6b_g_2 | 42875 |
| 508_Human_papillomavirus_type_6b_g_3 | 42876 |
| 508_Human_papillomavirus_type_6b_g_4 | 42877 |
| 508_Human_papillomavirus_type_6b_g_5 | 42878 |
| 509_Human_papillomavirus_type_6b_g_1 | 42879 |
| 509_Human_papillomavirus_type_6b_g_2 | 42880 |
| 509_Human_papillomavirus_type_6b_g_3 | 42881 |
| 509_Human_papillomavirus_type_6b_g_4 | 42882 |
| 509_Human_papillomavirus_type_6b_g_5 | 42883 |
| 510_Human_papillomavirus_type_6b_g_1 | 42884 |
| 510_Human_papillomavirus_type_6b_g_2 | 42885 |
| 510_Human_papillomavirus_type_6b_g_3 | 42886 |
| 510_Human_papillomavirus_type_6b_g_4 | 42887 |
| 510_Human_papillomavirus_type_6b_g_5 | 42888 |
| 511_Human_papillomavirus_type_6b_g_1 | 42889 |
| 511_Human_papillomavirus_type_6b_g_2 | 42890 |
| 511_Human_papillomavirus_type_6b_g_3 | 42891 |
| 511_Human_papillomavirus_type_6b_g_4 | 42892 |
| 511_Human_papillomavirus_type_6b_g_5 | 42893 |
| 512_Human_papillomavirus_type_6b_g_1 | 42894 |
| 512_Human_papillomavirus_type_6b_g_2 | 42895 |
| 512_Human_papillomavirus_type_6b_g_3 | 42896 |
| 512_Human_papillomavirus_type_6b_g_4 | 42897 |
| 512_Human_papillomavirus_type_6b_g_5 | 42898 |
| 513_Human_papillomavirus_type_6b_g_1 | 42899 |
| 513_Human_papillomavirus_type_6b_g_2 | 42900 |
| 513_Human_papillomavirus_type_6b_g_3 | 42901 |
| 513_Human_papillomavirus_type_6b_g_4 | 42902 |
| 513_Human_papillomavirus_type_6b_g_5 | 42903 |
| 514_Human_papillomavirus_type_6b_g_1 | 42904 |
| 514_Human_papillomavirus_type_6b_g_2 | 42905 |
| 514_Human_papillomavirus_type_6b_g_3 | 42906 |
| 514_Human_papillomavirus_type_6b_g_4 | 42907 |
| 514_Human_papillomavirus_type_6b_g_5 | 42908 |
| 515_Human_papillomavirus_type_6b_g_1 | 42909 |
| 515_Human_papillomavirus_type_6b_g_2 | 42910 |
| 515_Human_papillomavirus_type_6b_g_3 | 42911 |
| 515_Human_papillomavirus_type_6b_g_4 | 42912 |
| 515_Human_papillomavirus_type_6b_g_5 | 42913 |
| 516_Human_papillomavirus_type_6b_g_1 | 42914 |
| 516_Human_papillomavirus_type_6b_g_2 | 42915 |
| 516_Human_papillomavirus_type_6b_g_3 | 42916 |
| 516_Human_papillomavirus_type_6b_g_4 | 42917 |
| 516_Human_papillomavirus_type_6b_g_5 | 42918 |
| 517_Hepatitis_C_virus_genotype_4_g_1 | 42919 |
| 517_Hepatitis_C_virus_genotype_4_g_2 | 42920 |
| 517_Hepatitis_C_virus_genotype_4_g_3 | 42921 |
| 517_Hepatitis_C_virus_genotype_4_g_4 | 42922 |
| 517_Hepatitis_C_virus_genotype_4_g_5 | 42923 |
| 518_Hepatitis_C_virus_genotype_4_g_1 | 42924 |
| 518_Hepatitis_C_virus_genotype_4_g_2 | 42925 |
| 518_Hepatitis_C_virus_genotype_4_g_3 | 42926 |
| 518_Hepatitis_C_virus_genotype_4_g_4 | 42927 |
| 518_Hepatitis_C_virus_genotype_4_g_5 | 42928 |
| 519_Hepatitis_C_virus_genotype_4_g_1 | 42929 |
| 519_Hepatitis_C_virus_genotype_4_g_2 | 42930 |
| 519_Hepatitis_C_virus_genotype_4_g_3 | 42931 |
| 519_Hepatitis_C_virus_genotype_4_g_4 | 42932 |
| 519_Hepatitis_C_virus_genotype_4_g_5 | 42933 |
| 520_Hepatitis_C_virus_genotype_4_g_1 | 42934 |
| 521_Hepatitis_C_virus_genotype_4_g_1 | 42935 |
| 521_Hepatitis_C_virus_genotype_4_g_2 | 42936 |
| 521_Hepatitis_C_virus_genotype_4_g_3 | 42937 |
| 521_Hepatitis_C_virus_genotype_4_g_4 | 42938 |
| 521_Hepatitis_C_virus_genotype_4_g_5 | 42939 |
| 522_Hepatitis_C_virus_genotype_4_g_1 | 42940 |
| 522_Hepatitis_C_virus_genotype_4_g_2 | 42941 |
| 522_Hepatitis_C_virus_genotype_4_g_3 | 42942 |
| 522_Hepatitis_C_virus_genotype_4_g_4 | 42943 |
| 523_Hepatitis_C_virus_genotype_4_g_1 | 42944 |
| 523_Hepatitis_C_virus_genotype_4_g_2 | 42945 |
| 523_Hepatitis_C_virus_genotype_4_g_3 | 42946 |
| 523_Hepatitis_C_virus_genotype_4_g_4 | 42947 |
| 523_Hepatitis_C_virus_genotype_4_g_5 | 42948 |
| 524_Hepatitis_C_virus_genotype_4_g_1 | 42949 |
| 524_Hepatitis_C_virus_genotype_4_g_2 | 42950 |
| 525_Hepatitis_C_virus_genotype_4_g_1 | 42951 |
| 525_Hepatitis_C_virus_genotype_4_g_2 | 42952 |
| 525_Hepatitis_C_virus_genotype_4_g_3 | 42953 |
| 525_Hepatitis_C_virus_genotype_4_g_4 | 42954 |
| 525_Hepatitis_C_virus_genotype_4_g_5 | 42955 |
| 526_Hepatitis_C_virus_genotype_4_g_1 | 42956 |
| 526_Hepatitis_C_virus_genotype_4_g_2 | 42957 |
| 526_Hepatitis_C_virus_genotype_4_g_3 | 42958 |
| 526_Hepatitis_C_virus_genotype_4_g_4 | 42959 |
| 526_Hepatitis_C_virus_genotype_4_g_5 | 42960 |
| 527_Hepatitis_C_virus_genotype_4_g_1 | 42961 |
| 527_Hepatitis_C_virus_genotype_4_g_2 | 42962 |
| 527_Hepatitis_C_virus_genotype_4_g_3 | 42963 |
| 527_Hepatitis_C_virus_genotype_4_g_4 | 42964 |
| 527_Hepatitis_C_virus_genotype_4_g_5 | 42965 |
| 528_Hepatitis_C_virus_genotype_4_g_1 | 42966 |
| 528_Hepatitis_C_virus_genotype_4_g_2 | 42967 |
| 528_Hepatitis_C_virus_genotype_4_g_3 | 42968 |
| 528_Hepatitis_C_virus_genotype_4_g_4 | 42969 |
| 528_Hepatitis_C_virus_genotype_4_g_5 | 42970 |
| 529_Hepatitis_C_virus_genotype_4_g_1 | 42971 |
| 529_Hepatitis_C_virus_genotype_4_g_2 | 42972 |
| 529_Hepatitis_C_virus_genotype_4_g_3 | 42973 |
| 529_Hepatitis_C_virus_genotype_4_g_4 | 42974 |
| 529_Hepatitis_C_virus_genotype_4_g_5 | 42975 |
| 530_Hepatitis_C_virus_genotype_4_g_1 | 42976 |
| 530_Hepatitis_C_virus_genotype_4_g_2 | 42977 |
| 530_Hepatitis_C_virus_genotype_4_g_3 | 42978 |
| 530_Hepatitis_C_virus_genotype_4_g_4 | 42979 |
| 531_Hepatitis_C_virus_genotype_4_g_1 | 42980 |
| 531_Hepatitis_C_virus_genotype_4_g_2 | 42981 |
| 531_Hepatitis_C_virus_genotype_4_g_3 | 42982 |
| 531_Hepatitis_C_virus_genotype_4_g_4 | 42983 |
| 531_Hepatitis_C_virus_genotype_4_g_5 | 42984 |
| 532_Hepatitis_C_virus_genotype_4_g_1 | 42985 |
| 533_Hepatitis_C_virus_genotype_4_g_1 | 42986 |
| 533_Hepatitis_C_virus_genotype_4_g_2 | 42987 |
| 533_Hepatitis_C_virus_genotype_4_g_3 | 42988 |
| 533_Hepatitis_C_virus_genotype_4_g_4 | 42989 |
| 533_Hepatitis_C_virus_genotype_4_g_5 | 42990 |
| 534_Hepatitis_C_virus_genotype_4_g_1 | 42991 |
| 534_Hepatitis_C_virus_genotype_4_g_2 | 42992 |
| 534_Hepatitis_C_virus_genotype_4_g_3 | 42993 |
| 534_Hepatitis_C_virus_genotype_4_g_4 | 42994 |
| 534_Hepatitis_C_virus_genotype_4_g_5 | 42995 |
| 535_Hepatitis_C_virus_genotype_4_g_1 | 42996 |
| 535_Hepatitis_C_virus_genotype_4_g_2 | 42997 |
| 535_Hepatitis_C_virus_genotype_4_g_3 | 42998 |
| 535_Hepatitis_C_virus_genotype_4_g_4 | 42999 |
| 535_Hepatitis_C_virus_genotype_4_g_5 | 43000 |
| 536_Hepatitis_C_virus_genotype_4_g_1 | 43001 |
| 536_Hepatitis_C_virus_genotype_4_g_2 | 43002 |
| 536_Hepatitis_C_virus_genotype_4_g_3 | 43003 |
| 536_Hepatitis_C_virus_genotype_4_g_4 | 43004 |
| 536_Hepatitis_C_virus_genotype_4_g_5 | 43005 |
| 537_Hepatitis_C_virus_genotype_4_g_1 | 43006 |
| 537_Hepatitis_C_virus_genotype_4_g_2 | 43007 |
| 537_Hepatitis_C_virus_genotype_4_g_3 | 43008 |
| 537_Hepatitis_C_virus_genotype_4_g_4 | 43009 |
| 537_Hepatitis_C_virus_genotype_4_g_5 | 43010 |
| 538_Hepatitis_C_virus_genotype_4_g_1 | 43011 |
| 538_Hepatitis_C_virus_genotype_4_g_2 | 43012 |
| 538_Hepatitis_C_virus_genotype_4_g_3 | 43013 |
| 538_Hepatitis_C_virus_genotype_4_g_4 | 43014 |
| 538_Hepatitis_C_virus_genotype_4_g_5 | 43015 |
| 539_Hepatitis_C_virus_genotype_4_g_1 | 43016 |
| 539_Hepatitis_C_virus_genotype_4_g_2 | 43017 |
| 539_Hepatitis_C_virus_genotype_4_g_3 | 43018 |
| 539_Hepatitis_C_virus_genotype_4_g_4 | 43019 |
| 539_Hepatitis_C_virus_genotype_4_g_5 | 43020 |
| 540_Hepatitis_C_virus_genotype_4_g_1 | 43021 |
| 540_Hepatitis_C_virus_genotype_4_g_2 | 43022 |
| 540_Hepatitis_C_virus_genotype_4_g_3 | 43023 |
| 540_Hepatitis_C_virus_genotype_4_g_4 | 43024 |
| 540_Hepatitis_C_virus_genotype_4_g_5 | 43025 |
| 541_Hepatitis_C_virus_genotype_4_g_1 | 43026 |
| 541_Hepatitis_C_virus_genotype_4_g_2 | 43027 |
| 541_Hepatitis_C_virus_genotype_4_g_3 | 43028 |
| 541_Hepatitis_C_virus_genotype_4_g_4 | 43029 |
| 541_Hepatitis_C_virus_genotype_4_g_5 | 43030 |
| 542_Hepatitis_C_virus_genotype_4_g_1 | 43031 |
| 542_Hepatitis_C_virus_genotype_4_g_2 | 43032 |
| 542_Hepatitis_C_virus_genotype_4_g_3 | 43033 |
| 542_Hepatitis_C_virus_genotype_4_g_4 | 43034 |
| 542_Hepatitis_C_virus_genotype_4_g_5 | 43035 |
| 543_Hepatitis_C_virus_genotype_4_g_1 | 43036 |
| 543_Hepatitis_C_virus_genotype_4_g_2 | 43037 |
| 543_Hepatitis_C_virus_genotype_4_g_3 | 43038 |
| 543_Hepatitis_C_virus_genotype_4_g_4 | 43039 |
| 543_Hepatitis_C_virus_genotype_4_g_5 | 43040 |
| 544_Hepatitis_C_virus_genotype_4_g_1 | 43041 |
| 544_Hepatitis_C_virus_genotype_4_g_2 | 43042 |
| 544_Hepatitis_C_virus_genotype_4_g_3 | 43043 |
| 544_Hepatitis_C_virus_genotype_4_g_4 | 43044 |
| 544_Hepatitis_C_virus_genotype_4_g_5 | 43045 |
| 545_Hepatitis_C_virus_genotype_4_g_1 | 43046 |
| 545_Hepatitis_C_virus_genotype_4_g_2 | 43047 |
| 545_Hepatitis_C_virus_genotype_4_g_3 | 43048 |
| 545_Hepatitis_C_virus_genotype_4_g_4 | 43049 |
| 545_Hepatitis_C_virus_genotype_4_g_5 | 43050 |
| 546_Human_rhinovirus_14_g_1 | 43051 |
| 546_Human_rhinovirus_14_g_2 | 43052 |
| 546_Human_rhinovirus_14_g_3 | 43053 |
| 546_Human_rhinovirus_14_g_4 | 43054 |
| 546_Human_rhinovirus_14_g_5 | 43055 |
| 547_Human_rhinovirus_14_g_1 | 43056 |
| 547_Human_rhinovirus_14_g_2 | 43057 |
| 547_Human_rhinovirus_14_g_3 | 43058 |
| 547_Human_rhinovirus_14_g_4 | 43059 |
| 547_Human_rhinovirus_14_g_5 | 43060 |
| 548_Human_rhinovirus_14_g_1 | 43061 |
| 548_Human_rhinovirus_14_g_2 | 43062 |
| 548_Human_rhinovirus_14_g_3 | 43063 |
| 548_Human_rhinovirus_14_g_4 | 43064 |
| 548_Human_rhinovirus_14_g_5 | 43065 |
| 549_Human_rhinovirus_14_g_1 | 43066 |
| 549_Human_rhinovirus_14_g_2 | 43067 |
| 549_Human_rhinovirus_14_g_3 | 43068 |
| 549_Human_rhinovirus_14_g_4 | 43069 |
| 549_Human_rhinovirus_14_g_5 | 43070 |
| 550_Human_rhinovirus_14_g_1 | 43071 |
| 550_Human_rhinovirus_14_g_2 | 43072 |
| 550_Human_rhinovirus_14_g_3 | 43073 |
| 550_Human_rhinovirus_14_g_4 | 43074 |
| 550_Human_rhinovirus_14_g_5 | 43075 |
| 551_Human_rhinovirus_14_g_1 | 43076 |
| 551_Human_rhinovirus_14_g_2 | 43077 |
| 551_Human_rhinovirus_14_g_3 | 43078 |
| 551_Human_rhinovirus_14_g_4 | 43079 |
| 551_Human_rhinovirus_14_g_5 | 43080 |
| 552_Human_rhinovirus_14_g_1 | 43081 |
| 552_Human_rhinovirus_14_g_2 | 43082 |
| 552_Human_rhinovirus_14_g_3 | 43083 |
| 552_Human_rhinovirus_14_g_4 | 43084 |
| 552_Human_rhinovirus_14_g_5 | 43085 |
| 553_Human_rhinovirus_14_g_1 | 43086 |
| 553_Human_rhinovirus_14_g_2 | 43087 |
| 553_Human_rhinovirus_14_g_3 | 43088 |
| 553_Human_rhinovirus_14_g_4 | 43089 |
| 553_Human_rhinovirus_14_g_5 | 43090 |
| 554_Human_rhinovirus_14_g_1 | 43091 |
| 554_Human_rhinovirus_14_g_2 | 43092 |
| 554_Human_rhinovirus_14_g_3 | 43093 |
| 554_Human_rhinovirus_14_g_4 | 43094 |
| 554_Human_rhinovirus_14_g_5 | 43095 |
| 555_Human_rhinovirus_14_g_1 | 43096 |
| 555_Human_rhinovirus_14_g_2 | 43097 |
| 555_Human_rhinovirus_14_g_3 | 43098 |
| 555_Human_rhinovirus_14_g_4 | 43099 |
| 555_Human_rhinovirus_14_g_5 | 43100 |
| 556_Human_rhinovirus_14_g_1 | 43101 |
| 556_Human_rhinovirus_14_g_2 | 43102 |
| 556_Human_rhinovirus_14_g_3 | 43103 |
| 556_Human_rhinovirus_14_g_4 | 43104 |
| 556_Human_rhinovirus_14_g_5 | 43105 |
| 557_Human_rhinovirus_14_g_1 | 43106 |
| 557_Human_rhinovirus_14_g_2 | 43107 |
| 557_Human_rhinovirus_14_g_3 | 43108 |
| 557_Human_rhinovirus_14_g_4 | 43109 |
| 557_Human_rhinovirus_14_g_5 | 43110 |
| 558_Human_rhinovirus_14_g_1 | 43111 |
| 558_Human_rhinovirus_14_g_2 | 43112 |
| 558_Human_rhinovirus_14_g_3 | 43113 |
| 558_Human_rhinovirus_14_g_4 | 43114 |
| 558_Human_rhinovirus_14_g_5 | 43115 |
| 559_Human_rhinovirus_14_g_1 | 43116 |
| 559_Human_rhinovirus_14_g_2 | 43117 |
| 559_Human_rhinovirus_14_g_3 | 43118 |
| 559_Human_rhinovirus_14_g_4 | 43119 |
| 559_Human_rhinovirus_14_g_5 | 43120 |
| 560_Human_rhinovirus_14_g_1 | 43121 |
| 560_Human_rhinovirus_14_g_2 | 43122 |
| 560_Human_rhinovirus_14_g_3 | 43123 |
| 560_Human_rhinovirus_14_g_4 | 43124 |
| 560_Human_rhinovirus_14_g_5 | 43125 |
| 561_Human_rhinovirus_14_g_1 | 43126 |
| 561_Human_rhinovirus_14_g_2 | 43127 |
| 561_Human_rhinovirus_14_g_3 | 43128 |
| 561_Human_rhinovirus_14_g_4 | 43129 |
| 561_Human_rhinovirus_14_g_5 | 43130 |
| 562_Human_rhinovirus_14_g_1 | 43131 |
| 562_Human_rhinovirus_14_g_2 | 43132 |
| 562_Human_rhinovirus_14_g_3 | 43133 |
| 562_Human_rhinovirus_14_g_4 | 43134 |
| 562_Human_rhinovirus_14_g_5 | 43135 |
| 563_Human_genital-associated_circular_DNA_virus-1_isolate_349_g_1 | 43136 |
| 563_Human_genital-associated_circular_DNA_virus-1_isolate_349_g_2 | 43137 |
| 563_Human_genital-associated_circular_DNA_virus-1_isolate_349_g_3 | 43138 |
| 563_Human_genital-associated_circular_DNA_virus-1_isolate_349_g_4 | 43139 |
| 563_Human_genital-associated_circular_DNA_virus-1_isolate_349_g_5 | 43140 |
| 564_Human_genital-associated_circular_DNA_virus-1_isolate_349_g_1 | 43141 |
| 564_Human_genital-associated_circular_DNA_virus-1_isolate_349_g_2 | 43142 |
| 564_Human_genital-associated_circular_DNA_virus-1_isolate_349_g_3 | 43143 |
| 564_Human_genital-associated_circular_DNA_virus-1_isolate_349_g_4 | 43144 |
| 564_Human_genital-associated_circular_DNA_virus-1_isolate_349_g_5 | 43145 |
| 565_Human_genital-associated_circular_DNA_virus-1_isolate_349_g_1 | 43146 |
| 565_Human_genital-associated_circular_DNA_virus-1_isolate_349_g_2 | 43147 |
| 565_Human_genital-associated_circular_DNA_virus-1_isolate_349_g_3 | 43148 |
| 565_Human_genital-associated_circular_DNA_virus-1_isolate_349_g_4 | 43149 |
| 566_Human_genital-associated_circular_DNA_virus-1_isolate_349_g_1 | 43150 |
| 566_Human_genital-associated_circular_DNA_virus-1_isolate_349_g_2 | 43151 |
| 566_Human_genital-associated_circular_DNA_virus-1_isolate_349_g_3 | 43152 |
| 566_Human_genital-associated_circular_DNA_virus-1_isolate_349_g_4 | 43153 |
| 567_Human_genital-associated_circular_DNA_virus-1_isolate_349_g_1 | 43154 |
| 567_Human_genital-associated_circular_DNA_virus-1_isolate_349_g_2 | 43155 |
| 567_Human_genital-associated_circular_DNA_virus-1_isolate_349_g_3 | 43156 |
| 567_Human_genital-associated_circular_DNA_virus-1_isolate_349_g_4 | 43157 |
| 567_Human_genital-associated_circular_DNA_virus-1_isolate_349_g_5 | 43158 |
| 568_Human_papillomavirus_type_140_g_1 | 43159 |
| 568_Human_papillomavirus_type_140_g_2 | 43160 |
| 568_Human_papillomavirus_type_140_g_3 | 43161 |
| 568_Human_papillomavirus_type_140_g_4 | 43162 |
| 568_Human_papillomavirus_type_140_g_5 | 43163 |
| 569_Human_papillomavirus_type_140_g_1 | 43164 |
| 569_Human_papillomavirus_type_140_g_2 | 43165 |
| 569_Human_papillomavirus_type_140_g_3 | 43166 |
| 569_Human_papillomavirus_type_140_g_4 | 43167 |
| 569_Human_papillomavirus_type_140_g_5 | 43168 |
| 570_Human_papillomavirus_type_140_g_1 | 43169 |
| 570_Human_papillomavirus_type_140_g_2 | 43170 |
| 570_Human_papillomavirus_type_140_g_3 | 43171 |
| 570_Human_papillomavirus_type_140_g_4 | 43172 |
| 570_Human_papillomavirus_type_140_g_5 | 43173 |
| 571_Human_papillomavirus_type_140_g_1 | 43174 |
| 571_Human_papillomavirus_type_140_g_2 | 43175 |
| 571_Human_papillomavirus_type_140_g_3 | 43176 |
| 571_Human_papillomavirus_type_140_g_4 | 43177 |
| 571_Human_papillomavirus_type_140_g_5 | 43178 |
| 572_Human_papillomavirus_type_140_g_1 | 43179 |
| 572_Human_papillomavirus_type_140_g_2 | 43180 |
| 572_Human_papillomavirus_type_140_g_3 | 43181 |
| 572_Human_papillomavirus_type_140_g_4 | 43182 |
| 572_Human_papillomavirus_type_140_g_5 | 43183 |
| 573_Human_papillomavirus_type_140_g_1 | 43184 |
| 573_Human_papillomavirus_type_140_g_2 | 43185 |
| 573_Human_papillomavirus_type_140_g_3 | 43186 |
| 573_Human_papillomavirus_type_140_g_4 | 43187 |
| 573_Human_papillomavirus_type_140_g_5 | 43188 |
| 574_Human_papillomavirus_type_140_g_1 | 43189 |
| 574_Human_papillomavirus_type_140_g_2 | 43190 |
| 574_Human_papillomavirus_type_140_g_3 | 43191 |
| 574_Human_papillomavirus_type_140_g_4 | 43192 |
| 574_Human_papillomavirus_type_140_g_5 | 43193 |
| 575_Human_papillomavirus_type_140_g_1 | 43194 |
| 575_Human_papillomavirus_type_140_g_2 | 43195 |
| 575_Human_papillomavirus_type_140_g_3 | 43196 |
| 575_Human_papillomavirus_type_140_g_4 | 43197 |
| 575_Human_papillomavirus_type_140_g_5 | 43198 |
| 576_Human_papillomavirus_type_140_g_1 | 43199 |
| 576_Human_papillomavirus_type_140_g_2 | 43200 |
| 576_Human_papillomavirus_type_140_g_3 | 43201 |
| 576_Human_papillomavirus_type_140_g_4 | 43202 |
| 576_Human_papillomavirus_type_140_g_5 | 43203 |
| 577_Human_papillomavirus_type_140_g_1 | 43204 |
| 577_Human_papillomavirus_type_140_g_2 | 43205 |
| 577_Human_papillomavirus_type_140_g_3 | 43206 |
| 577_Human_papillomavirus_type_140_g_4 | 43207 |
| 577_Human_papillomavirus_type_140_g_5 | 43208 |
| 578_Human_papillomavirus_type_140_g_1 | 43209 |
| 578_Human_papillomavirus_type_140_g_2 | 43210 |
| 578_Human_papillomavirus_type_140_g_3 | 43211 |
| 578_Human_papillomavirus_type_140_g_4 | 43212 |
| 578_Human_papillomavirus_type_140_g_5 | 43213 |
| 579_Human_papillomavirus_type_140_g_1 | 43214 |
| 579_Human_papillomavirus_type_140_g_2 | 43215 |
| 579_Human_papillomavirus_type_140_g_3 | 43216 |
| 579_Human_papillomavirus_type_140_g_4 | 43217 |
| 579_Human_papillomavirus_type_140_g_5 | 43218 |
| 580_Human_papillomavirus_type_140_g_1 | 43219 |
| 580_Human_papillomavirus_type_140_g_2 | 43220 |
| 580_Human_papillomavirus_type_140_g_3 | 43221 |
| 580_Human_papillomavirus_type_140_g_4 | 43222 |
| 580_Human_papillomavirus_type_140_g_5 | 43223 |
| 581_Human_papillomavirus_type_140_g_1 | 43224 |
| 581_Human_papillomavirus_type_140_g_2 | 43225 |
| 581_Human_papillomavirus_type_140_g_3 | 43226 |
| 581_Human_papillomavirus_type_140_g_4 | 43227 |
| 581_Human_papillomavirus_type_140_g_5 | 43228 |
| 582_Human_papillomavirus_type_140_g_1 | 43229 |
| 582_Human_papillomavirus_type_140_g_2 | 43230 |
| 582_Human_papillomavirus_type_140_g_3 | 43231 |
| 582_Human_papillomavirus_type_140_g_4 | 43232 |
| 582_Human_papillomavirus_type_140_g_5 | 43233 |
| 583_Human_papillomavirus_type_140_g_1 | 43234 |
| 583_Human_papillomavirus_type_140_g_2 | 43235 |
| 583_Human_papillomavirus_type_140_g_3 | 43236 |
| 583_Human_papillomavirus_type_140_g_4 | 43237 |
| 583_Human_papillomavirus_type_140_g_5 | 43238 |
| 584_Hepatitis_E_virus_g_1 | 43239 |
| 584_Hepatitis_E_virus_g_2 | 43240 |
| 584_Hepatitis_E_virus_g_3 | 43241 |
| 584_Hepatitis_E_virus_g_4 | 43242 |
| 584_Hepatitis_E_virus_g_5 | 43243 |
| 585_Hepatitis_E_virus_g_1 | 43244 |
| 585_Hepatitis_E_virus_g_2 | 43245 |
| 585_Hepatitis_E_virus_g_3 | 43246 |
| 585_Hepatitis_E_virus_g_4 | 43247 |
| 585_Hepatitis_E_virus_g_5 | 43248 |
| 586_Hepatitis_E_virus_g_1 | 43249 |
| 586_Hepatitis_E_virus_g_2 | 43250 |
| 586_Hepatitis_E_virus_g_3 | 43251 |
| 587_Hepatitis_E_virus_g_1 | 43252 |
| 587_Hepatitis_E_virus_g_2 | 43253 |
| 587_Hepatitis_E_virus_g_3 | 43254 |
| 587_Hepatitis_E_virus_g_4 | 43255 |
| 587_Hepatitis_E_virus_g_5 | 43256 |
| 588_Hepatitis_E_virus_g_1 | 43257 |
| 588_Hepatitis_E_virus_g_2 | 43258 |
| 588_Hepatitis_E_virus_g_3 | 43259 |
| 588_Hepatitis_E_virus_g_4 | 43260 |
| 588_Hepatitis_E_virus_g_5 | 43261 |
| 589_Hepatitis_E_virus_g_1 | 43262 |
| 589_Hepatitis_E_virus_g_2 | 43263 |
| 589_Hepatitis_E_virus_g_3 | 43264 |
| 589_Hepatitis_E_virus_g_4 | 43265 |
| 589_Hepatitis_E_virus_g_5 | 43266 |
| 590_Hepatitis_E_virus_g_1 | 43267 |
| 590_Hepatitis_E_virus_g_2 | 43268 |
| 590_Hepatitis_E_virus_g_3 | 43269 |
| 590_Hepatitis_E_virus_g_4 | 43270 |
| 590_Hepatitis_E_virus_g_5 | 43271 |
| 591_Hepatitis_E_virus_g_1 | 43272 |
| 591_Hepatitis_E_virus_g_2 | 43273 |
| 592_Hepatitis_E_virus_g_1 | 43274 |
| 592_Hepatitis_E_virus_g_2 | 43275 |
| 592_Hepatitis_E_virus_g_3 | 43276 |
| 592_Hepatitis_E_virus_g_4 | 43277 |
| 592_Hepatitis_E_virus_g_5 | 43278 |
| 593_Hepatitis_E_virus_g_1 | 43279 |
| 593_Hepatitis_E_virus_g_2 | 43280 |
| 593_Hepatitis_E_virus_g_3 | 43281 |
| 593_Hepatitis_E_virus_g_4 | 43282 |
| 593_Hepatitis_E_virus_g_5 | 43283 |
| 594_Hepatitis_E_virus_g_1 | 43284 |
| 594_Hepatitis_E_virus_g_2 | 43285 |
| 594_Hepatitis_E_virus_g_3 | 43286 |
| 594_Hepatitis_E_virus_g_4 | 43287 |
| 594_Hepatitis_E_virus_g_5 | 43288 |
| 595_Hepatitis_E_virus_g_1 | 43289 |
| 595_Hepatitis_E_virus_g_2 | 43290 |
| 595_Hepatitis_E_virus_g_3 | 43291 |
| 595_Hepatitis_E_virus_g_4 | 43292 |
| 595_Hepatitis_E_virus_g_5 | 43293 |
| 596_Hepatitis_E_virus_g_1 | 43294 |
| 596_Hepatitis_E_virus_g_2 | 43295 |
| 596_Hepatitis_E_virus_g_3 | 43296 |
| 596_Hepatitis_E_virus_g_4 | 43297 |
| 596_Hepatitis_E_virus_g_5 | 43298 |
| 597_Hepatitis_E_virus_g_1 | 43299 |
| 597_Hepatitis_E_virus_g_2 | 43300 |
| 597_Hepatitis_E_virus_g_3 | 43301 |
| 597_Hepatitis_E_virus_g_4 | 43302 |
| 597_Hepatitis_E_virus_g_5 | 43303 |
| 598_Hepatitis_E_virus_g_1 | 43304 |
| 598_Hepatitis_E_virus_g_2 | 43305 |
| 598_Hepatitis_E_virus_g_3 | 43306 |
| 598_Hepatitis_E_virus_g_4 | 43307 |
| 598_Hepatitis_E_virus_g_5 | 43308 |
| 599_Hepatitis_E_virus_g_1 | 43309 |
| 599_Hepatitis_E_virus_g_2 | 43310 |
| 599_Hepatitis_E_virus_g_3 | 43311 |
| 599_Hepatitis_E_virus_g_4 | 43312 |
| 599_Hepatitis_E_virus_g_5 | 43313 |
| 600_Hepatitis_E_virus_g_1 | 43314 |
| 600_Hepatitis_E_virus_g_2 | 43315 |
| 601_Hepatitis_E_virus_g_1 | 43316 |
| 601_Hepatitis_E_virus_g_2 | 43317 |
| 601_Hepatitis_E_virus_g_3 | 43318 |
| 601_Hepatitis_E_virus_g_4 | 43319 |
| 601_Hepatitis_E_virus_g_5 | 43320 |
| 602_Hepatitis_E_virus_g_1 | 43321 |
| 602_Hepatitis_E_virus_g_2 | 43322 |
| 602_Hepatitis_E_virus_g_3 | 43323 |
| 602_Hepatitis_E_virus_g_4 | 43324 |
| 602_Hepatitis_E_virus_g_5 | 43325 |
| 603_Hepatitis_E_virus_g_1 | 43326 |
| 603_Hepatitis_E_virus_g_2 | 43327 |
| 603_Hepatitis_E_virus_g_3 | 43328 |
| 603_Hepatitis_E_virus_g_4 | 43329 |
| 603_Hepatitis_E_virus_g_5 | 43330 |
| 604_Human_herpesvirus_3_g_1 | 43331 |
| 604_Human_herpesvirus_3_g_2 | 43332 |
| 604_Human_herpesvirus_3_g_3 | 43333 |
| 604_Human_herpesvirus_3_g_4 | 43334 |
| 604_Human_herpesvirus_3_g_5 | 43335 |
| 605_Human_herpesvirus_3_g_1 | 43336 |
| 605_Human_herpesvirus_3_g_2 | 43337 |
| 605_Human_herpesvirus_3_g_3 | 43338 |
| 605_Human_herpesvirus_3_g_4 | 43339 |
| 605_Human_herpesvirus_3_g_5 | 43340 |
| 606_Human_herpesvirus_3_g_1 | 43341 |
| 606_Human_herpesvirus_3_g_2 | 43342 |
| 606_Human_herpesvirus_3_g_3 | 43343 |
| 606_Human_herpesvirus_3_g_4 | 43344 |
| 606_Human_herpesvirus_3_g_5 | 43345 |
| 607_Human_herpesvirus_3_g_1 | 43346 |
| 607_Human_herpesvirus_3_g_2 | 43347 |
| 607_Human_herpesvirus_3_g_3 | 43348 |
| 607_Human_herpesvirus_3_g_4 | 43349 |
| 607_Human_herpesvirus_3_g_5 | 43350 |
| 608_Human_herpesvirus_3_g_1 | 43351 |
| 608_Human_herpesvirus_3_g_2 | 43352 |
| 608_Human_herpesvirus_3_g_3 | 43353 |
| 608_Human_herpesvirus_3_g_4 | 43354 |
| 608_Human_herpesvirus_3_g_5 | 43355 |
| 609_Human_herpesvirus_3_g_1 | 43356 |
| 609_Human_herpesvirus_3_g_2 | 43357 |
| 609_Human_herpesvirus_3_g_3 | 43358 |
| 609_Human_herpesvirus_3_g_4 | 43359 |
| 609_Human_herpesvirus_3_g_5 | 43360 |
| 610_Human_herpesvirus_3_g_1 | 43361 |
| 610_Human_herpesvirus_3_g_2 | 43362 |
| 610_Human_herpesvirus_3_g_3 | 43363 |
| 610_Human_herpesvirus_3_g_4 | 43364 |
| 610_Human_herpesvirus_3_g_5 | 43365 |
| 611_Human_herpesvirus_3_g_1 | 43366 |
| 611_Human_herpesvirus_3_g_2 | 43367 |
| 611_Human_herpesvirus_3_g_3 | 43368 |
| 611_Human_herpesvirus_3_g_4 | 43369 |
| 611_Human_herpesvirus_3_g_5 | 43370 |
| 612_Human_herpesvirus_3_g_1 | 43371 |
| 612_Human_herpesvirus_3_g_2 | 43372 |
| 612_Human_herpesvirus_3_g_3 | 43373 |
| 612_Human_herpesvirus_3_g_4 | 43374 |
| 612_Human_herpesvirus_3_g_5 | 43375 |
| 613_Human_herpesvirus_3_g_1 | 43376 |
| 613_Human_herpesvirus_3_g_2 | 43377 |
| 613_Human_herpesvirus_3_g_3 | 43378 |
| 613_Human_herpesvirus_3_g_4 | 43379 |
| 613_Human_herpesvirus_3_g_5 | 43380 |
| 614_Human_herpesvirus_3_g_1 | 43381 |
| 614_Human_herpesvirus_3_g_2 | 43382 |
| 614_Human_herpesvirus_3_g_3 | 43383 |
| 614_Human_herpesvirus_3_g_4 | 43384 |
| 614_Human_herpesvirus_3_g_5 | 43385 |
| 615_Human_herpesvirus_3_g_1 | 43386 |
| 615_Human_herpesvirus_3_g_2 | 43387 |
| 615_Human_herpesvirus_3_g_3 | 43388 |
| 615_Human_herpesvirus_3_g_4 | 43389 |
| 615_Human_herpesvirus_3_g_5 | 43390 |
| 616_Human_herpesvirus_3_g_1 | 43391 |
| 616_Human_herpesvirus_3_g_2 | 43392 |
| 616_Human_herpesvirus_3_g_3 | 43393 |
| 616_Human_herpesvirus_3_g_4 | 43394 |
| 616_Human_herpesvirus_3_g_5 | 43395 |
| 617_Human_herpesvirus_3_g_1 | 43396 |
| 617_Human_herpesvirus_3_g_2 | 43397 |
| 617_Human_herpesvirus_3_g_3 | 43398 |
| 617_Human_herpesvirus_3_g_4 | 43399 |
| 617_Human_herpesvirus_3_g_5 | 43400 |
| 618_Human_herpesvirus_3_g_1 | 43401 |
| 618_Human_herpesvirus_3_g_2 | 43402 |
| 618_Human_herpesvirus_3_g_3 | 43403 |
| 618_Human_herpesvirus_3_g_4 | 43404 |
| 618_Human_herpesvirus_3_g_5 | 43405 |
| 619_Human_herpesvirus_3_g_1 | 43406 |
| 619_Human_herpesvirus_3_g_2 | 43407 |
| 619_Human_herpesvirus_3_g_3 | 43408 |
| 619_Human_herpesvirus_3_g_4 | 43409 |
| 619_Human_herpesvirus_3_g_5 | 43410 |
| 620_Human_immunodeficiency_virus_1_g_1 | 43411 |
| 620_Human_immunodeficiency_virus_1_g_2 | 43412 |
| 620_Human_immunodeficiency_virus_1_g_3 | 43413 |
| 620_Human_immunodeficiency_virus_1_g_4 | 43414 |
| 620_Human_immunodeficiency_virus_1_g_5 | 43415 |
| 621_Human_immunodeficiency_virus_1_g_1 | 43416 |
| 621_Human_immunodeficiency_virus_1_g_2 | 43417 |
| 621_Human_immunodeficiency_virus_1_g_3 | 43418 |
| 621_Human_immunodeficiency_virus_1_g_4 | 43419 |
| 621_Human_immunodeficiency_virus_1_g_5 | 43420 |
| 622_Human_immunodeficiency_virus_1_g_1 | 43421 |
| 622_Human_immunodeficiency_virus_1_g_2 | 43422 |
| 622_Human_immunodeficiency_virus_1_g_3 | 43423 |
| 622_Human_immunodeficiency_virus_1_g_4 | 43424 |
| 622_Human_immunodeficiency_virus_1_g_5 | 43425 |
| 623_Human_immunodeficiency_virus_1_g_1 | 43426 |
| 623_Human_immunodeficiency_virus_1_g_2 | 43427 |
| 623_Human_immunodeficiency_virus_1_g_3 | 43428 |
| 623_Human_immunodeficiency_virus_1_g_4 | 43429 |
| 623_Human_immunodeficiency_virus_1_g_5 | 43430 |
| 624_Human_immunodeficiency_virus_1_g_1 | 43431 |
| 624_Human_immunodeficiency_virus_1_g_2 | 43432 |
| 624_Human_immunodeficiency_virus_1_g_3 | 43433 |
| 624_Human_immunodeficiency_virus_1_g_4 | 43434 |
| 624_Human_immunodeficiency_virus_1_g_5 | 43435 |
| 625_Human_immunodeficiency_virus_1_g_1 | 43436 |
| 625_Human_immunodeficiency_virus_1_g_2 | 43437 |
| 625_Human_immunodeficiency_virus_1_g_3 | 43438 |
| 625_Human_immunodeficiency_virus_1_g_4 | 43439 |
| 625_Human_immunodeficiency_virus_1_g_5 | 43440 |
| 626_Human_immunodeficiency_virus_1_g_1 | 43441 |
| 626_Human_immunodeficiency_virus_1_g_2 | 43442 |
| 626_Human_immunodeficiency_virus_1_g_3 | 43443 |
| 626_Human_immunodeficiency_virus_1_g_4 | 43444 |
| 626_Human_immunodeficiency_virus_1_g_5 | 43445 |
| 627_Human_immunodeficiency_virus_1_g_1 | 43446 |
| 627_Human_immunodeficiency_virus_1_g_2 | 43447 |
| 627_Human_immunodeficiency_virus_1_g_3 | 43448 |
| 627_Human_immunodeficiency_virus_1_g_4 | 43449 |
| 627_Human_immunodeficiency_virus_1_g_5 | 43450 |
| 628_Human_immunodeficiency_virus_1_g_1 | 43451 |
| 628_Human_immunodeficiency_virus_1_g_2 | 43452 |
| 628_Human_immunodeficiency_virus_1_g_3 | 43453 |
| 628_Human_immunodeficiency_virus_1_g_4 | 43454 |
| 628_Human_immunodeficiency_virus_1_g_5 | 43455 |
| 629_Human_immunodeficiency_virus_1_g_1 | 43456 |
| 629_Human_immunodeficiency_virus_1_g_2 | 43457 |
| 629_Human_immunodeficiency_virus_1_g_3 | 43458 |
| 629_Human_immunodeficiency_virus_1_g_4 | 43459 |
| 629_Human_immunodeficiency_virus_1_g_5 | 43460 |
| 630_Human_immunodeficiency_virus_1_g_1 | 43461 |
| 630_Human_immunodeficiency_virus_1_g_2 | 43462 |
| 630_Human_immunodeficiency_virus_1_g_3 | 43463 |
| 630_Human_immunodeficiency_virus_1_g_4 | 43464 |
| 630_Human_immunodeficiency_virus_1_g_5 | 43465 |
| 631_Human_immunodeficiency_virus_1_g_1 | 43466 |
| 631_Human_immunodeficiency_virus_1_g_2 | 43467 |
| 631_Human_immunodeficiency_virus_1_g_3 | 43468 |
| 631_Human_immunodeficiency_virus_1_g_4 | 43469 |
| 631_Human_immunodeficiency_virus_1_g_5 | 43470 |
| 632_Human_immunodeficiency_virus_1_g_1 | 43471 |
| 632_Human_immunodeficiency_virus_1_g_2 | 43472 |
| 632_Human_immunodeficiency_virus_1_g_3 | 43473 |
| 632_Human_immunodeficiency_virus_1_g_4 | 43474 |
| 632_Human_immunodeficiency_virus_1_g_5 | 43475 |
| 633_Human_immunodeficiency_virus_1_g_1 | 43476 |
| 633_Human_immunodeficiency_virus_1_g_2 | 43477 |
| 633_Human_immunodeficiency_virus_1_g_3 | 43478 |
| 633_Human_immunodeficiency_virus_1_g_4 | 43479 |
| 633_Human_immunodeficiency_virus_1_g_5 | 43480 |
| 634_Human_immunodeficiency_virus_1_g_1 | 43481 |
| 634_Human_immunodeficiency_virus_1_g_2 | 43482 |
| 634_Human_immunodeficiency_virus_1_g_3 | 43483 |
| 634_Human_immunodeficiency_virus_1_g_4 | 43484 |
| 634_Human_immunodeficiency_virus_1_g_5 | 43485 |
| 635_Human_immunodeficiency_virus_1_g_1 | 43486 |
| 635_Human_immunodeficiency_virus_1_g_2 | 43487 |
| 635_Human_immunodeficiency_virus_1_g_3 | 43488 |
| 635_Human_immunodeficiency_virus_1_g_4 | 43489 |
| 635_Human_immunodeficiency_virus_1_g_5 | 43490 |
| 636_Human_immunodeficiency_virus_1_g_1 | 43491 |
| 636_Human_immunodeficiency_virus_1_g_2 | 43492 |
| 636_Human_immunodeficiency_virus_1_g_3 | 43493 |
| 636_Human_immunodeficiency_virus_1_g_4 | 43494 |
| 636_Human_immunodeficiency_virus_1_g_5 | 43495 |
| 637_Human_immunodeficiency_virus_1_g_1 | 43496 |
| 637_Human_immunodeficiency_virus_1_g_2 | 43497 |
| 637_Human_immunodeficiency_virus_1_g_3 | 43498 |
| 637_Human_immunodeficiency_virus_1_g_4 | 43499 |
| 637_Human_immunodeficiency_virus_1_g_5 | 43500 |
| 638_Human_herpesvirus_2_strain_HG52_g_1 | 43501 |
| 638_Human_herpesvirus_2_strain_HG52_g_2 | 43502 |
| 639_Human_herpesvirus_2_strain_HG52_g_1 | 43503 |
| 639_Human_herpesvirus_2_strain_HG52_g_2 | 43504 |
| 639_Human_herpesvirus_2_strain_HG52_g_3 | 43505 |
| 640_Human_herpesvirus_2_strain_HG52_g_1 | 43506 |
| 640_Human_herpesvirus_2_strain_HG52_g_2 | 43507 |
| 640_Human_herpesvirus_2_strain_HG52_g_3 | 43508 |
| 640_Human_herpesvirus_2_strain_HG52_g_4 | 43509 |
| 640_Human_herpesvirus_2_strain_HG52_g_5 | 43510 |
| 641_Human_herpesvirus_2_strain_HG52_g_1 | 43511 |
| 641_Human_herpesvirus_2_strain_HG52_g_2 | 43512 |
| 641_Human_herpesvirus_2_strain_HG52_g_3 | 43513 |
| 641_Human_herpesvirus_2_strain_HG52_g_4 | 43514 |
| 641_Human_herpesvirus_2_strain_HG52_g_5 | 43515 |
| 642_Human_herpesvirus_2_strain_HG52_g_1 | 43516 |
| 642_Human_herpesvirus_2_strain_HG52_g_2 | 43517 |
| 642_Human_herpesvirus_2_strain_HG52_g_3 | 43518 |
| 642_Human_herpesvirus_2_strain_HG52_g_4 | 43519 |
| 642_Human_herpesvirus_2_strain_HG52_g_5 | 43520 |
| 643_Human_herpesvirus_2_strain_HG52_g_1 | 43521 |
| 643_Human_herpesvirus_2_strain_HG52_g_2 | 43522 |
| 643_Human_herpesvirus_2_strain_HG52_g_3 | 43523 |
| 643_Human_herpesvirus_2_strain_HG52_g_4 | 43524 |
| 643_Human_herpesvirus_2_strain_HG52_g_5 | 43525 |
| 644_Human_herpesvirus_2_strain_HG52_g_1 | 43526 |
| 644_Human_herpesvirus_2_strain_HG52_g_2 | 43527 |
| 644_Human_herpesvirus_2_strain_HG52_g_3 | 43528 |
| 645_Human_herpesvirus_2_strain_HG52_g_1 | 43529 |
| 645_Human_herpesvirus_2_strain_HG52_g_2 | 43530 |
| 645_Human_herpesvirus_2_strain_HG52_g_3 | 43531 |
| 645_Human_herpesvirus_2_strain_HG52_g_4 | 43532 |
| 645_Human_herpesvirus_2_strain_HG52_g_5 | 43533 |
| 646_Human_herpesvirus_2_strain_HG52_g_1 | 43534 |
| 646_Human_herpesvirus_2_strain_HG52_g_2 | 43535 |
| 646_Human_herpesvirus_2_strain_HG52_g_3 | 43536 |
| 647_Human_herpesvirus_2_strain_HG52_g_1 | 43537 |
| 647_Human_herpesvirus_2_strain_HG52_g_2 | 43538 |
| 647_Human_herpesvirus_2_strain_HG52_g_3 | 43539 |
| 648_Human_herpesvirus_2_strain_HG52_g_1 | 43540 |
| 648_Human_herpesvirus_2_strain_HG52_g_2 | 43541 |
| 648_Human_herpesvirus_2_strain_HG52_g_3 | 43542 |
| 648_Human_herpesvirus_2_strain_HG52_g_4 | 43543 |
| 648_Human_herpesvirus_2_strain_HG52_g_5 | 43544 |
| 649_Human_herpesvirus_2_strain_HG52_g_1 | 43545 |
| 649_Human_herpesvirus_2_strain_HG52_g_2 | 43546 |
| 649_Human_herpesvirus_2_strain_HG52_g_3 | 43547 |
| 649_Human_herpesvirus_2_strain_HG52_g_4 | 43548 |
| 650_Human_herpesvirus_2_strain_HG52_g_1 | 43549 |
| 650_Human_herpesvirus_2_strain_HG52_g_2 | 43550 |
| 650_Human_herpesvirus_2_strain_HG52_g_3 | 43551 |
| 650_Human_herpesvirus_2_strain_HG52_g_4 | 43552 |
| 651_Human_herpesvirus_2_strain_HG52_g_1 | 43553 |
| 652_Human_herpesvirus_2_strain_HG52_g_1 | 43554 |
| 652_Human_herpesvirus_2_strain_HG52_g_2 | 43555 |
| 652_Human_herpesvirus_2_strain_HG52_g_3 | 43556 |
| 653_Human_herpesvirus_2_strain_HG52_g_1 | 43557 |
| 653_Human_herpesvirus_2_strain_HG52_g_2 | 43558 |
| 653_Human_herpesvirus_2_strain_HG52_g_3 | 43559 |
| 653_Human_herpesvirus_2_strain_HG52_g_4 | 43560 |
| 653_Human_herpesvirus_2_strain_HG52_g_5 | 43561 |
| 654_Human_herpesvirus_2_strain_HG52_g_1 | 43562 |
| 654_Human_herpesvirus_2_strain_HG52_g_2 | 43563 |
| 654_Human_herpesvirus_2_strain_HG52_g_3 | 43564 |
| 654_Human_herpesvirus_2_strain_HG52_g_4 | 43565 |
| 654_Human_herpesvirus_2_strain_HG52_g_5 | 43566 |
| 655_Human_herpesvirus_2_strain_HG52_g_1 | 43567 |
| 655_Human_herpesvirus_2_strain_HG52_g_2 | 43568 |
| 655_Human_herpesvirus_2_strain_HG52_g_3 | 43569 |
| 656_Human_herpesvirus_2_strain_HG52_g_1 | 43570 |
| 656_Human_herpesvirus_2_strain_HG52_g_2 | 43571 |
| 656_Human_herpesvirus_2_strain_HG52_g_3 | 43572 |
| 656_Human_herpesvirus_2_strain_HG52_g_4 | 43573 |
| 656_Human_herpesvirus_2_strain_HG52_g_5 | 43574 |
| 657_Human_herpesvirus_2_strain_HG52_g_1 | 43575 |
| 657_Human_herpesvirus_2_strain_HG52_g_2 | 43576 |
| 657_Human_herpesvirus_2_strain_HG52_g_3 | 43577 |
| 657_Human_herpesvirus_2_strain_HG52_g_4 | 43578 |
| 657_Human_herpesvirus_2_strain_HG52_g_5 | 43579 |
| 658_Human_herpesvirus_2_strain_HG52_g_1 | 43580 |
| 658_Human_herpesvirus_2_strain_HG52_g_2 | 43581 |
| 658_Human_herpesvirus_2_strain_HG52_g_3 | 43582 |
| 658_Human_herpesvirus_2_strain_HG52_g_4 | 43583 |
| 658_Human_herpesvirus_2_strain_HG52_g_5 | 43584 |
| 659_Human_herpesvirus_2_strain_HG52_g_1 | 43585 |
| 659_Human_herpesvirus_2_strain_HG52_g_2 | 43586 |
| 659_Human_herpesvirus_2_strain_HG52_g_3 | 43587 |
| 659_Human_herpesvirus_2_strain_HG52_g_4 | 43588 |
| 659_Human_herpesvirus_2_strain_HG52_g_5 | 43589 |
| 660_Human_herpesvirus_2_strain_HG52_g_1 | 43590 |
| 660_Human_herpesvirus_2_strain_HG52_g_2 | 43591 |
| 660_Human_herpesvirus_2_strain_HG52_g_3 | 43592 |
| 660_Human_herpesvirus_2_strain_HG52_g_4 | 43593 |
| 661_Human_herpesvirus_2_strain_HG52_g_1 | 43594 |
| 661_Human_herpesvirus_2_strain_HG52_g_2 | 43595 |
| 661_Human_herpesvirus_2_strain_HG52_g_3 | 43596 |
| 662_Human_herpesvirus_2_strain_HG52_g_1 | 43597 |
| 662_Human_herpesvirus_2_strain_HG52_g_2 | 43598 |
| 662_Human_herpesvirus_2_strain_HG52_g_3 | 43599 |
| 662_Human_herpesvirus_2_strain_HG52_g_4 | 43600 |
| 662_Human_herpesvirus_2_strain_HG52_g_5 | 43601 |
| 663_Human_herpesvirus_2_strain_HG52_g_1 | 43602 |
| 663_Human_herpesvirus_2_strain_HG52_g_2 | 43603 |
| 663_Human_herpesvirus_2_strain_HG52_g_3 | 43604 |
| 664_Human_herpesvirus_2_strain_HG52_g_1 | 43605 |
| 665_Human_herpesvirus_2_strain_HG52_g_1 | 43606 |
| 665_Human_herpesvirus_2_strain_HG52_g_2 | 43607 |
| 665_Human_herpesvirus_2_strain_HG52_g_3 | 43608 |
| 665_Human_herpesvirus_2_strain_HG52_g_4 | 43609 |
| 665_Human_herpesvirus_2_strain_HG52_g_5 | 43610 |
| 666_Human_herpesvirus_2_strain_HG52_g_1 | 43611 |
| 666_Human_herpesvirus_2_strain_HG52_g_2 | 43612 |
| 666_Human_herpesvirus_2_strain_HG52_g_3 | 43613 |
| 667_Human_herpesvirus_2_strain_HG52_g_1 | 43614 |
| 668_Human_herpesvirus_2_strain_HG52_g_1 | 43615 |
| 668_Human_herpesvirus_2_strain_HG52_g_2 | 43616 |
| 669_Human_herpesvirus_2_strain_HG52_g_1 | 43617 |
| 669_Human_herpesvirus_2_strain_HG52_g_2 | 43618 |
| 669_Human_herpesvirus_2_strain_HG52_g_3 | 43619 |
| 669_Human_herpesvirus_2_strain_HG52_g_4 | 43620 |
| 670_Human_herpesvirus_2_strain_HG52_g_1 | 43621 |
| 670_Human_herpesvirus_2_strain_HG52_g_2 | 43622 |
| 670_Human_herpesvirus_2_strain_HG52_g_3 | 43623 |
| 671_Human_herpesvirus_2_strain_HG52_g_1 | 43624 |
| 671_Human_herpesvirus_2_strain_HG52_g_2 | 43625 |
| 671_Human_herpesvirus_2_strain_HG52_g_3 | 43626 |
| 671_Human_herpesvirus_2_strain_HG52_g_4 | 43627 |
| 671_Human_herpesvirus_2_strain_HG52_g_5 | 43628 |
| 672_Human_herpesvirus_2_strain_HG52_g_1 | 43629 |
| 672_Human_herpesvirus_2_strain_HG52_g_2 | 43630 |
| 672_Human_herpesvirus_2_strain_HG52_g_3 | 43631 |
| 672_Human_herpesvirus_2_strain_HG52_g_4 | 43632 |
| 672_Human_herpesvirus_2_strain_HG52_g_5 | 43633 |
| 673_Human_herpesvirus_2_strain_HG52_g_1 | 43634 |
| 673_Human_herpesvirus_2_strain_HG52_g_2 | 43635 |
| 673_Human_herpesvirus_2_strain_HG52_g_3 | 43636 |
| 674_Human_herpesvirus_2_strain_HG52_g_1 | 43637 |
| 674_Human_herpesvirus_2_strain_HG52_g_2 | 43638 |
| 674_Human_herpesvirus_2_strain_HG52_g_3 | 43639 |
| 674_Human_herpesvirus_2_strain_HG52_g_4 | 43640 |
| 674_Human_herpesvirus_2_strain_HG52_g_5 | 43641 |
| 675_Human_herpesvirus_2_strain_HG52_g_1 | 43642 |
| 675_Human_herpesvirus_2_strain_HG52_g_2 | 43643 |
| 676_Human_herpesvirus_2_strain_HG52_g_1 | 43644 |
| 676_Human_herpesvirus_2_strain_HG52_g_2 | 43645 |
| 676_Human_herpesvirus_2_strain_HG52_g_3 | 43646 |
| 676_Human_herpesvirus_2_strain_HG52_g_4 | 43647 |
| 676_Human_herpesvirus_2_strain_HG52_g_5 | 43648 |
| 677_Human_herpesvirus_2_strain_HG52_g_1 | 43649 |
| 677_Human_herpesvirus_2_strain_HG52_g_2 | 43650 |
| 677_Human_herpesvirus_2_strain_HG52_g_3 | 43651 |
| 677_Human_herpesvirus_2_strain_HG52_g_4 | 43652 |
| 677_Human_herpesvirus_2_strain_HG52_g_5 | 43653 |
| 678_Human_herpesvirus_2_strain_HG52_g_1 | 43654 |
| 678_Human_herpesvirus_2_strain_HG52_g_2 | 43655 |
| 678_Human_herpesvirus_2_strain_HG52_g_3 | 43656 |
| 678_Human_herpesvirus_2_strain_HG52_g_4 | 43657 |
| 679_Human_herpesvirus_2_strain_HG52_g_1 | 43658 |
| 679_Human_herpesvirus_2_strain_HG52_g_2 | 43659 |
| 681_Human_herpesvirus_2_strain_HG52_g_1 | 43660 |
| 681_Human_herpesvirus_2_strain_HG52_g_2 | 43661 |
| 683_Human_herpesvirus_2_strain_HG52_g_1 | 43662 |
| 683_Human_herpesvirus_2_strain_HG52_g_2 | 43663 |
| 684_Human_herpesvirus_2_strain_HG52_g_1 | 43664 |
| 684_Human_herpesvirus_2_strain_HG52_g_2 | 43665 |
| 684_Human_herpesvirus_2_strain_HG52_g_3 | 43666 |
| 684_Human_herpesvirus_2_strain_HG52_g_4 | 43667 |
| 685_Human_herpesvirus_2_strain_HG52_g_1 | 43668 |
| 685_Human_herpesvirus_2_strain_HG52_g_2 | 43669 |
| 685_Human_herpesvirus_2_strain_HG52_g_3 | 43670 |
| 685_Human_herpesvirus_2_strain_HG52_g_4 | 43671 |
| 685_Human_herpesvirus_2_strain_HG52_g_5 | 43672 |
| 686_Human_herpesvirus_2_strain_HG52_g_1 | 43673 |
| 686_Human_herpesvirus_2_strain_HG52_g_2 | 43674 |
| 686_Human_herpesvirus_2_strain_HG52_g_3 | 43675 |
| 686_Human_herpesvirus_2_strain_HG52_g_4 | 43676 |
| 686_Human_herpesvirus_2_strain_HG52_g_5 | 43677 |
| 687_Human_herpesvirus_2_strain_HG52_g_1 | 43678 |
| 688_Human_herpesvirus_2_strain_HG52_g_1 | 43679 |
| 688_Human_herpesvirus_2_strain_HG52_g_2 | 43680 |
| 688_Human_herpesvirus_2_strain_HG52_g_3 | 43681 |
| 688_Human_herpesvirus_2_strain_HG52_g_4 | 43682 |
| 688_Human_herpesvirus_2_strain_HG52_g_5 | 43683 |
| 689_Human_herpesvirus_2_strain_HG52_g_1 | 43684 |
| 689_Human_herpesvirus_2_strain_HG52_g_2 | 43685 |
| 689_Human_herpesvirus_2_strain_HG52_g_3 | 43686 |
| 689_Human_herpesvirus_2_strain_HG52_g_4 | 43687 |
| 689_Human_herpesvirus_2_strain_HG52_g_5 | 43688 |
| 690_Human_herpesvirus_2_strain_HG52_g_1 | 43689 |
| 690_Human_herpesvirus_2_strain_HG52_g_2 | 43690 |
| 690_Human_herpesvirus_2_strain_HG52_g_3 | 43691 |
| 690_Human_herpesvirus_2_strain_HG52_g_4 | 43692 |
| 690_Human_herpesvirus_2_strain_HG52_g_5 | 43693 |
| 691_Human_herpesvirus_2_strain_HG52_g_1 | 43694 |
| 691_Human_herpesvirus_2_strain_HG52_g_2 | 43695 |
| 691_Human_herpesvirus_2_strain_HG52_g_3 | 43696 |
| 691_Human_herpesvirus_2_strain_HG52_g_4 | 43697 |
| 691_Human_herpesvirus_2_strain_HG52_g_5 | 43698 |
| 692_Human_herpesvirus_2_strain_HG52_g_1 | 43699 |
| 692_Human_herpesvirus_2_strain_HG52_g_2 | 43700 |
| 692_Human_herpesvirus_2_strain_HG52_g_3 | 43701 |
| 692_Human_herpesvirus_2_strain_HG52_g_4 | 43702 |
| 692_Human_herpesvirus_2_strain_HG52_g_5 | 43703 |
| 693_Human_herpesvirus_2_strain_HG52_g_1 | 43704 |
| 693_Human_herpesvirus_2_strain_HG52_g_2 | 43705 |
| 693_Human_herpesvirus_2_strain_HG52_g_3 | 43706 |
| 694_Human_herpesvirus_2_strain_HG52_g_1 | 43707 |
| 694_Human_herpesvirus_2_strain_HG52_g_2 | 43708 |
| 694_Human_herpesvirus_2_strain_HG52_g_3 | 43709 |
| 694_Human_herpesvirus_2_strain_HG52_g_4 | 43710 |
| 694_Human_herpesvirus_2_strain_HG52_g_5 | 43711 |
| 695_Human_herpesvirus_2_strain_HG52_g_1 | 43712 |
| 695_Human_herpesvirus_2_strain_HG52_g_2 | 43713 |
| 695_Human_herpesvirus_2_strain_HG52_g_3 | 43714 |
| 695_Human_herpesvirus_2_strain_HG52_g_4 | 43715 |
| 695_Human_herpesvirus_2_strain_HG52_g_5 | 43716 |
| 696_Human_herpesvirus_2_strain_HG52_g_1 | 43717 |
| 696_Human_herpesvirus_2_strain_HG52_g_2 | 43718 |
| 696_Human_herpesvirus_2_strain_HG52_g_3 | 43719 |
| 697_Human_herpesvirus_2_strain_HG52_g_1 | 43720 |
| 697_Human_herpesvirus_2_strain_HG52_g_2 | 43721 |
| 697_Human_herpesvirus_2_strain_HG52_g_3 | 43722 |
| 697_Human_herpesvirus_2_strain_HG52_g_4 | 43723 |
| 698_Human_herpesvirus_2_strain_HG52_g_1 | 43724 |
| 698_Human_herpesvirus_2_strain_HG52_g_2 | 43725 |
| 698_Human_herpesvirus_2_strain_HG52_g_3 | 43726 |
| 698_Human_herpesvirus_2_strain_HG52_g_4 | 43727 |
| 698_Human_herpesvirus_2_strain_HG52_g_5 | 43728 |
| 700_Human_herpesvirus_2_strain_HG52_g_1 | 43729 |
| 700_Human_herpesvirus_2_strain_HG52_g_2 | 43730 |
| 700_Human_herpesvirus_2_strain_HG52_g_3 | 43731 |
| 700_Human_herpesvirus_2_strain_HG52_g_4 | 43732 |
| 700_Human_herpesvirus_2_strain_HG52_g_5 | 43733 |
| 701_Human_herpesvirus_2_strain_HG52_g_1 | 43734 |
| 701_Human_herpesvirus_2_strain_HG52_g_2 | 43735 |
| 702_Human_papillomavirus_type_41_g_1 | 43736 |
| 702_Human_papillomavirus_type_41_g_2 | 43737 |
| 702_Human_papillomavirus_type_41_g_3 | 43738 |
| 702_Human_papillomavirus_type_41_g_4 | 43739 |
| 702_Human_papillomavirus_type_41_g_5 | 43740 |
| 703_Human_papillomavirus_type_41_g_1 | 43741 |
| 703_Human_papillomavirus_type_41_g_2 | 43742 |
| 703_Human_papillomavirus_type_41_g_3 | 43743 |
| 703_Human_papillomavirus_type_41_g_4 | 43744 |
| 703_Human_papillomavirus_type_41_g_5 | 43745 |
| 704_Human_papillomavirus_type_41_g_1 | 43746 |
| 704_Human_papillomavirus_type_41_g_2 | 43747 |
| 704_Human_papillomavirus_type_41_g_3 | 43748 |
| 704_Human_papillomavirus_type_41_g_4 | 43749 |
| 704_Human_papillomavirus_type_41_g_5 | 43750 |
| 705_Human_papillomavirus_type_41_g_1 | 43751 |
| 705_Human_papillomavirus_type_41_g_2 | 43752 |
| 705_Human_papillomavirus_type_41_g_3 | 43753 |
| 705_Human_papillomavirus_type_41_g_4 | 43754 |
| 705_Human_papillomavirus_type_41_g_5 | 43755 |
| 706_Human_papillomavirus_type_41_g_1 | 43756 |
| 706_Human_papillomavirus_type_41_g_2 | 43757 |
| 706_Human_papillomavirus_type_41_g_3 | 43758 |
| 706_Human_papillomavirus_type_41_g_4 | 43759 |
| 706_Human_papillomavirus_type_41_g_5 | 43760 |
| 707_Human_papillomavirus_type_41_g_1 | 43761 |
| 707_Human_papillomavirus_type_41_g_2 | 43762 |
| 707_Human_papillomavirus_type_41_g_3 | 43763 |
| 707_Human_papillomavirus_type_41_g_4 | 43764 |
| 707_Human_papillomavirus_type_41_g_5 | 43765 |
| 708_Human_papillomavirus_type_41_g_1 | 43766 |
| 708_Human_papillomavirus_type_41_g_2 | 43767 |
| 708_Human_papillomavirus_type_41_g_3 | 43768 |
| 708_Human_papillomavirus_type_41_g_4 | 43769 |
| 708_Human_papillomavirus_type_41_g_5 | 43770 |
| 709_Human_papillomavirus_type_41_g_1 | 43771 |
| 709_Human_papillomavirus_type_41_g_2 | 43772 |
| 709_Human_papillomavirus_type_41_g_3 | 43773 |
| 709_Human_papillomavirus_type_41_g_4 | 43774 |
| 709_Human_papillomavirus_type_41_g_5 | 43775 |
| 710_Human_papillomavirus_type_41_g_1 | 43776 |
| 710_Human_papillomavirus_type_41_g_2 | 43777 |
| 710_Human_papillomavirus_type_41_g_3 | 43778 |
| 710_Human_papillomavirus_type_41_g_4 | 43779 |
| 710_Human_papillomavirus_type_41_g_5 | 43780 |
| 711_Human_papillomavirus_type_41_g_1 | 43781 |
| 711_Human_papillomavirus_type_41_g_2 | 43782 |
| 711_Human_papillomavirus_type_41_g_3 | 43783 |
| 711_Human_papillomavirus_type_41_g_4 | 43784 |
| 711_Human_papillomavirus_type_41_g_5 | 43785 |
| 712_Human_papillomavirus_type_41_g_1 | 43786 |
| 712_Human_papillomavirus_type_41_g_2 | 43787 |
| 712_Human_papillomavirus_type_41_g_3 | 43788 |
| 712_Human_papillomavirus_type_41_g_4 | 43789 |
| 712_Human_papillomavirus_type_41_g_5 | 43790 |
| 713_Human_papillomavirus_type_41_g_1 | 43791 |
| 713_Human_papillomavirus_type_41_g_2 | 43792 |
| 713_Human_papillomavirus_type_41_g_3 | 43793 |
| 713_Human_papillomavirus_type_41_g_4 | 43794 |
| 713_Human_papillomavirus_type_41_g_5 | 43795 |
| 714_Human_papillomavirus_type_41_g_1 | 43796 |
| 714_Human_papillomavirus_type_41_g_2 | 43797 |
| 714_Human_papillomavirus_type_41_g_3 | 43798 |
| 714_Human_papillomavirus_type_41_g_4 | 43799 |
| 714_Human_papillomavirus_type_41_g_5 | 43800 |
| 715_Human_papillomavirus_type_41_g_1 | 43801 |
| 715_Human_papillomavirus_type_41_g_2 | 43802 |
| 715_Human_papillomavirus_type_41_g_3 | 43803 |
| 715_Human_papillomavirus_type_41_g_4 | 43804 |
| 715_Human_papillomavirus_type_41_g_5 | 43805 |
| 716_Human_papillomavirus_type_41_g_1 | 43806 |
| 716_Human_papillomavirus_type_41_g_2 | 43807 |
| 716_Human_papillomavirus_type_41_g_3 | 43808 |
| 716_Human_papillomavirus_type_41_g_4 | 43809 |
| 716_Human_papillomavirus_type_41_g_5 | 43810 |
| 717_Human_papillomavirus_type_41_g_1 | 43811 |
| 717_Human_papillomavirus_type_41_g_2 | 43812 |
| 717_Human_papillomavirus_type_41_g_3 | 43813 |
| 717_Human_papillomavirus_type_41_g_4 | 43814 |
| 717_Human_papillomavirus_type_41_g_5 | 43815 |
| 718_Human_papillomavirus_type_41_g_1 | 43816 |
| 718_Human_papillomavirus_type_41_g_2 | 43817 |
| 718_Human_papillomavirus_type_41_g_3 | 43818 |
| 718_Human_papillomavirus_type_41_g_4 | 43819 |
| 718_Human_papillomavirus_type_41_g_5 | 43820 |
| 719_Human_papillomavirus_type_41_g_1 | 43821 |
| 719_Human_papillomavirus_type_41_g_2 | 43822 |
| 719_Human_papillomavirus_type_41_g_3 | 43823 |
| 719_Human_papillomavirus_type_41_g_4 | 43824 |
| 719_Human_papillomavirus_type_41_g_5 | 43825 |
| 720_Human_papillomavirus_type_41_g_1 | 43826 |
| 720_Human_papillomavirus_type_41_g_2 | 43827 |
| 720_Human_papillomavirus_type_41_g_3 | 43828 |
| 720_Human_papillomavirus_type_41_g_4 | 43829 |
| 720_Human_papillomavirus_type_41_g_5 | 43830 |
| 721_Human_papillomavirus_type_41_g_1 | 43831 |
| 721_Human_papillomavirus_type_41_g_2 | 43832 |
| 721_Human_papillomavirus_type_41_g_3 | 43833 |
| 721_Human_papillomavirus_type_41_g_4 | 43834 |
| 721_Human_papillomavirus_type_41_g_5 | 43835 |
| 722_Human_papillomavirus_type_167_isolate_KC10_g_1 | 43836 |
| 722_Human_papillomavirus_type_167_isolate_KC10_g_2 | 43837 |
| 722_Human_papillomavirus_type_167_isolate_KC10_g_3 | 43838 |
| 722_Human_papillomavirus_type_167_isolate_KC10_g_4 | 43839 |
| 722_Human_papillomavirus_type_167_isolate_KC10_g_5 | 43840 |
| 723_Human_papillomavirus_type_167_isolate_KC10_g_1 | 43841 |
| 723_Human_papillomavirus_type_167_isolate_KC10_g_2 | 43842 |
| 723_Human_papillomavirus_type_167_isolate_KC10_g_3 | 43843 |
| 723_Human_papillomavirus_type_167_isolate_KC10_g_4 | 43844 |
| 723_Human_papillomavirus_type_167_isolate_KC10_g_5 | 43845 |
| 724_Human_papillomavirus_type_167_isolate_KC10_g_1 | 43846 |
| 724_Human_papillomavirus_type_167_isolate_KC10_g_2 | 43847 |
| 724_Human_papillomavirus_type_167_isolate_KC10_g_3 | 43848 |
| 724_Human_papillomavirus_type_167_isolate_KC10_g_4 | 43849 |
| 724_Human_papillomavirus_type_167_isolate_KC10_g_5 | 43850 |
| 725_Human_papillomavirus_type_167_isolate_KC10_g_1 | 43851 |
| 725_Human_papillomavirus_type_167_isolate_KC10_g_2 | 43852 |
| 725_Human_papillomavirus_type_167_isolate_KC10_g_3 | 43853 |
| 725_Human_papillomavirus_type_167_isolate_KC10_g_4 | 43854 |
| 725_Human_papillomavirus_type_167_isolate_KC10_g_5 | 43855 |
| 726_Human_papillomavirus_type_167_isolate_KC10_g_1 | 43856 |
| 726_Human_papillomavirus_type_167_isolate_KC10_g_2 | 43857 |
| 726_Human_papillomavirus_type_167_isolate_KC10_g_3 | 43858 |
| 726_Human_papillomavirus_type_167_isolate_KC10_g_4 | 43859 |
| 726_Human_papillomavirus_type_167_isolate_KC10_g_5 | 43860 |
| 727_Human_papillomavirus_type_167_isolate_KC10_g_1 | 43861 |
| 727_Human_papillomavirus_type_167_isolate_KC10_g_2 | 43862 |
| 727_Human_papillomavirus_type_167_isolate_KC10_g_3 | 43863 |
| 727_Human_papillomavirus_type_167_isolate_KC10_g_4 | 43864 |
| 727_Human_papillomavirus_type_167_isolate_KC10_g_5 | 43865 |
| 728_Human_papillomavirus_type_167_isolate_KC10_g_1 | 43866 |
| 728_Human_papillomavirus_type_167_isolate_KC10_g_2 | 43867 |
| 728_Human_papillomavirus_type_167_isolate_KC10_g_3 | 43868 |
| 728_Human_papillomavirus_type_167_isolate_KC10_g_4 | 43869 |
| 728_Human_papillomavirus_type_167_isolate_KC10_g_5 | 43870 |
| 729_Human_papillomavirus_type_167_isolate_KC10_g_1 | 43871 |
| 729_Human_papillomavirus_type_167_isolate_KC10_g_2 | 43872 |
| 729_Human_papillomavirus_type_167_isolate_KC10_g_3 | 43873 |
| 729_Human_papillomavirus_type_167_isolate_KC10_g_4 | 43874 |
| 729_Human_papillomavirus_type_167_isolate_KC10_g_5 | 43875 |
| 730_Human_papillomavirus_type_187_isolate_ACS447_g_1 | 43876 |
| 730_Human_papillomavirus_type_187_isolate_ACS447_g_2 | 43877 |
| 730_Human_papillomavirus_type_187_isolate_ACS447_g_3 | 43878 |
| 730_Human_papillomavirus_type_187_isolate_ACS447_g_4 | 43879 |
| 730_Human_papillomavirus_type_187_isolate_ACS447_g_5 | 43880 |
| 731_Human_papillomavirus_type_187_isolate_ACS447_g_1 | 43881 |
| 731_Human_papillomavirus_type_187_isolate_ACS447_g_2 | 43882 |
| 731_Human_papillomavirus_type_187_isolate_ACS447_g_3 | 43883 |
| 731_Human_papillomavirus_type_187_isolate_ACS447_g_4 | 43884 |
| 731_Human_papillomavirus_type_187_isolate_ACS447_g_5 | 43885 |
| 732_Human_papillomavirus_type_187_isolate_ACS447_g_1 | 43886 |
| 732_Human_papillomavirus_type_187_isolate_ACS447_g_2 | 43887 |
| 732_Human_papillomavirus_type_187_isolate_ACS447_g_3 | 43888 |
| 732_Human_papillomavirus_type_187_isolate_ACS447_g_4 | 43889 |
| 732_Human_papillomavirus_type_187_isolate_ACS447_g_5 | 43890 |
| 733_Human_papillomavirus_type_187_isolate_ACS447_g_1 | 43891 |
| 733_Human_papillomavirus_type_187_isolate_ACS447_g_2 | 43892 |
| 733_Human_papillomavirus_type_187_isolate_ACS447_g_3 | 43893 |
| 733_Human_papillomavirus_type_187_isolate_ACS447_g_4 | 43894 |
| 733_Human_papillomavirus_type_187_isolate_ACS447_g_5 | 43895 |
| 734_Human_papillomavirus_type_187_isolate_ACS447_g_1 | 43896 |
| 734_Human_papillomavirus_type_187_isolate_ACS447_g_2 | 43897 |
| 734_Human_papillomavirus_type_187_isolate_ACS447_g_3 | 43898 |
| 734_Human_papillomavirus_type_187_isolate_ACS447_g_4 | 43899 |
| 734_Human_papillomavirus_type_187_isolate_ACS447_g_5 | 43900 |
| 735_Human_papillomavirus_type_187_isolate_ACS447_g_1 | 43901 |
| 735_Human_papillomavirus_type_187_isolate_ACS447_g_2 | 43902 |
| 735_Human_papillomavirus_type_187_isolate_ACS447_g_3 | 43903 |
| 735_Human_papillomavirus_type_187_isolate_ACS447_g_4 | 43904 |
| 735_Human_papillomavirus_type_187_isolate_ACS447_g_5 | 43905 |
| 736_Human_papillomavirus_type_187_isolate_ACS447_g_1 | 43906 |
| 736_Human_papillomavirus_type_187_isolate_ACS447_g_2 | 43907 |
| 736_Human_papillomavirus_type_187_isolate_ACS447_g_3 | 43908 |
| 736_Human_papillomavirus_type_187_isolate_ACS447_g_4 | 43909 |
| 736_Human_papillomavirus_type_187_isolate_ACS447_g_5 | 43910 |
| 737_Human_papillomavirus_type_187_isolate_ACS447_g_1 | 43911 |
| 737_Human_papillomavirus_type_187_isolate_ACS447_g_2 | 43912 |
| 738_Human_papillomavirus_type_187_isolate_ACS447_g_1 | 43913 |
| 738_Human_papillomavirus_type_187_isolate_ACS447_g_2 | 43914 |
| 738_Human_papillomavirus_type_187_isolate_ACS447_g_3 | 43915 |
| 738_Human_papillomavirus_type_187_isolate_ACS447_g_4 | 43916 |
| 738_Human_papillomavirus_type_187_isolate_ACS447_g_5 | 43917 |
| 739_Human_papillomavirus_type_187_isolate_ACS447_g_1 | 43918 |
| 739_Human_papillomavirus_type_187_isolate_ACS447_g_2 | 43919 |
| 739_Human_papillomavirus_type_187_isolate_ACS447_g_3 | 43920 |
| 739_Human_papillomavirus_type_187_isolate_ACS447_g_4 | 43921 |
| 739_Human_papillomavirus_type_187_isolate_ACS447_g_5 | 43922 |
| 740_Human_papillomavirus_type_187_isolate_ACS447_g_1 | 43923 |
| 740_Human_papillomavirus_type_187_isolate_ACS447_g_2 | 43924 |
| 740_Human_papillomavirus_type_187_isolate_ACS447_g_3 | 43925 |
| 740_Human_papillomavirus_type_187_isolate_ACS447_g_4 | 43926 |
| 740_Human_papillomavirus_type_187_isolate_ACS447_g_5 | 43927 |
| 741_Human_papillomavirus_type_187_isolate_ACS447_g_1 | 43928 |
| 741_Human_papillomavirus_type_187_isolate_ACS447_g_2 | 43929 |
| 741_Human_papillomavirus_type_187_isolate_ACS447_g_3 | 43930 |
| 741_Human_papillomavirus_type_187_isolate_ACS447_g_4 | 43931 |
| 741_Human_papillomavirus_type_187_isolate_ACS447_g_5 | 43932 |
| 742_Human_papillomavirus_type_187_isolate_ACS447_g_1 | 43933 |
| 742_Human_papillomavirus_type_187_isolate_ACS447_g_2 | 43934 |
| 742_Human_papillomavirus_type_187_isolate_ACS447_g_3 | 43935 |
| 742_Human_papillomavirus_type_187_isolate_ACS447_g_4 | 43936 |
| 742_Human_papillomavirus_type_187_isolate_ACS447_g_5 | 43937 |
| 743_Human_papillomavirus_type_187_isolate_ACS447_g_1 | 43938 |
| 743_Human_papillomavirus_type_187_isolate_ACS447_g_2 | 43939 |
| 743_Human_papillomavirus_type_187_isolate_ACS447_g_3 | 43940 |
| 743_Human_papillomavirus_type_187_isolate_ACS447_g_4 | 43941 |
| 743_Human_papillomavirus_type_187_isolate_ACS447_g_5 | 43942 |
| 744_Human_papillomavirus_type_187_isolate_ACS447_g_1 | 43943 |
| 744_Human_papillomavirus_type_187_isolate_ACS447_g_2 | 43944 |
| 744_Human_papillomavirus_type_187_isolate_ACS447_g_3 | 43945 |
| 744_Human_papillomavirus_type_187_isolate_ACS447_g_4 | 43946 |
| 744_Human_papillomavirus_type_187_isolate_ACS447_g_5 | 43947 |
| 745_Human_papillomavirus_type_187_isolate_ACS447_g_1 | 43948 |
| 745_Human_papillomavirus_type_187_isolate_ACS447_g_2 | 43949 |
| 745_Human_papillomavirus_type_187_isolate_ACS447_g_3 | 43950 |
| 745_Human_papillomavirus_type_187_isolate_ACS447_g_4 | 43951 |
| 745_Human_papillomavirus_type_187_isolate_ACS447_g_5 | 43952 |
| 746_Human_papillomavirus_type_187_isolate_ACS447_g_1 | 43953 |
| 746_Human_papillomavirus_type_187_isolate_ACS447_g_2 | 43954 |
| 746_Human_papillomavirus_type_187_isolate_ACS447_g_3 | 43955 |
| 746_Human_papillomavirus_type_187_isolate_ACS447_g_4 | 43956 |
| 746_Human_papillomavirus_type_187_isolate_ACS447_g_5 | 43957 |
| 747_Human_papillomavirus_type_187_isolate_ACS447_g_1 | 43958 |
| 747_Human_papillomavirus_type_187_isolate_ACS447_g_2 | 43959 |
| 747_Human_papillomavirus_type_187_isolate_ACS447_g_3 | 43960 |
| 747_Human_papillomavirus_type_187_isolate_ACS447_g_4 | 43961 |
| 747_Human_papillomavirus_type_187_isolate_ACS447_g_5 | 43962 |
| 748_Human_papillomavirus_type_187_isolate_ACS447_g_1 | 43963 |
| 748_Human_papillomavirus_type_187_isolate_ACS447_g_2 | 43964 |
| 748_Human_papillomavirus_type_187_isolate_ACS447_g_3 | 43965 |
| 748_Human_papillomavirus_type_187_isolate_ACS447_g_4 | 43966 |
| 748_Human_papillomavirus_type_187_isolate_ACS447_g_5 | 43967 |
| 749_Influenza_C_virus_(C/Ann_Arbor/1/50)_PB2_gene_{—} | 43968 |
| for_polymerase_2_g_1 | |
| 749_Influenza_C_virus_(C/Ann_Arbor/1/50)_PB2_gene_{—} | 43969 |
| for_polymerase_2_g_2 | |
| 749_Influenza_C_virus_(C/Ann_Arbor/1/50)_PB2_gene_{—} | 43970 |
| for_polymerase_2_g_3 | |
| 749_Influenza_C_virus_(C/Ann_Arbor/1/50)_PB2_gene_{—} | 43971 |
| for_polymerase_2_g_4 | |
| 749_Influenza_C_virus_(C/Ann_Arbor/1/50)_PB2_gene_{—} | 43972 |
| for_polymerase_2_g_5 | |
| 750_Influenza_C_virus_(C/Ann_Arbor/1/50)_PB2_gene_{—} | 43973 |
| for_polymerase_2_g_1 | |
| 750_Influenza_C_virus_(C/Ann_Arbor/1/50)_PB2_gene_{—} | 43974 |
| for_polymerase_2_g_2 | |
| 750_Influenza_C_virus_(C/Ann_Arbor/1/50)_PB2_gene_{—} | 43975 |
| for_polymerase_2_g_3 | |
| 750_Influenza_C_virus_(C/Ann_Arbor/1/50)_PB2_gene_{—} | 43976 |
| for_polymerase_2_g_4 | |
| 750_Influenza_C_virus_(C/Ann_Arbor/1/50)_PB2_gene_{—} | 43977 |
| for_polymerase_2_g_5 | |
| 751_Influenza_C_virus_(C/Ann_Arbor/1/50)_PB2_gene_{—} | 43978 |
| for_polymerase_2_g_1 | |
| 751_Influenza_C_virus_(C/Ann_Arbor/1/50)_PB2_gene_{—} | 43979 |
| for_polymerase_2_g_2 | |
| 751_Influenza_C_virus_(C/Ann_Arbor/1/50)_PB2_gene_{—} | 43980 |
| for_polymerase_2_g_3 | |
| 751_Influenza_C_virus_(C/Ann_Arbor/1/50)_PB2_gene_{—} | 43981 |
| for_polymerase_2_g_4 | |
| 751_Influenza_C_virus_(C/Ann_Arbor/1/50)_PB2_gene_{—} | 43982 |
| for_polymerase_2_g_5 | |
| 752_Influenza_C_virus_(C/Ann_Arbor/1/50)_PB2_gene_{—} | 43983 |
| for_polymerase_2_g_1 | |
| 752_Influenza_C_virus_(C/Ann_Arbor/1/50)_PB2_gene_{—} | 43984 |
| for_polymerase_2_g_2 | |
| 752_Influenza_C_virus_(C/Ann_Arbor/1/50)_PB2_gene_{—} | 43985 |
| for_polymerase_2_g_3 | |
| 752_Influenza_C_virus_(C/Ann_Arbor/1/50)_PB2_gene_{—} | 43986 |
| for_polymerase_2_g_4 | |
| 752_Influenza_C_virus_(C/Ann_Arbor/1/50)_PB2_gene_{—} | 43987 |
| for_polymerase_2_g_5 | |
| 753_Human_papillomavirus_type_88_g_1 | 43988 |
| 753_Human_papillomavirus_type_88_g_2 | 43989 |
| 753_Human_papillomavirus_type_88_g_3 | 43990 |
| 753_Human_papillomavirus_type_88_g_4 | 43991 |
| 753_Human_papillomavirus_type_88_g_5 | 43992 |
| 754_Human_papillomavirus_type_88_g_1 | 43993 |
| 754_Human_papillomavirus_type_88_g_2 | 43994 |
| 754_Human_papillomavirus_type_88_g_3 | 43995 |
| 754_Human_papillomavirus_type_88_g_4 | 43996 |
| 754_Human_papillomavirus_type_88_g_5 | 43997 |
| 755_Human_papillomavirus_type_88_g_1 | 43998 |
| 755_Human_papillomavirus_type_88_g_2 | 43999 |
| 755_Human_papillomavirus_type_88_g_3 | 44000 |
| 755_Human_papillomavirus_type_88_g_4 | 44001 |
| 755_Human_papillomavirus_type_88_g_5 | 44002 |
| 756_Human_papillomavirus_type_88_g_1 | 44003 |
| 756_Human_papillomavirus_type_88_g_2 | 44004 |
| 756_Human_papillomavirus_type_88_g_3 | 44005 |
| 756_Human_papillomavirus_type_88_g_4 | 44006 |
| 756_Human_papillomavirus_type_88_g_5 | 44007 |
| 757_Human_papillomavirus_type_88_g_1 | 44008 |
| 757_Human_papillomavirus_type_88_g_2 | 44009 |
| 757_Human_papillomavirus_type_88_g_3 | 44010 |
| 757_Human_papillomavirus_type_88_g_4 | 44011 |
| 757_Human_papillomavirus_type_88_g_5 | 44012 |
| 758_Human_papillomavirus_type_88_g_1 | 44013 |
| 758_Human_papillomavirus_type_88_g_2 | 44014 |
| 758_Human_papillomavirus_type_88_g_3 | 44015 |
| 758_Human_papillomavirus_type_88_g_4 | 44016 |
| 758_Human_papillomavirus_type_88_g_5 | 44017 |
| 759_Human_papillomavirus_type_88_g_1 | 44018 |
| 759_Human_papillomavirus_type_88_g_2 | 44019 |
| 759_Human_papillomavirus_type_88_g_3 | 44020 |
| 759_Human_papillomavirus_type_88_g_4 | 44021 |
| 759_Human_papillomavirus_type_88_g_5 | 44022 |
| 760_Human_papillomavirus_type_88_g_1 | 44023 |
| 760_Human_papillomavirus_type_88_g_2 | 44024 |
| 760_Human_papillomavirus_type_88_g_3 | 44025 |
| 760_Human_papillomavirus_type_88_g_4 | 44026 |
| 760_Human_papillomavirus_type_88_g_5 | 44027 |
| 761_Human_papillomavirus_type_88_g_1 | 44028 |
| 761_Human_papillomavirus_type_88_g_2 | 44029 |
| 761_Human_papillomavirus_type_88_g_3 | 44030 |
| 761_Human_papillomavirus_type_88_g_4 | 44031 |
| 761_Human_papillomavirus_type_88_g_5 | 44032 |
| 762_Human_papillomavirus_type_88_g_1 | 44033 |
| 762_Human_papillomavirus_type_88_g_2 | 44034 |
| 762_Human_papillomavirus_type_88_g_3 | 44035 |
| 762_Human_papillomavirus_type_88_g_4 | 44036 |
| 762_Human_papillomavirus_type_88_g_5 | 44037 |
| 763_Human_papillomavirus_type_88_g_1 | 44038 |
| 763_Human_papillomavirus_type_88_g_2 | 44039 |
| 763_Human_papillomavirus_type_88_g_3 | 44040 |
| 763_Human_papillomavirus_type_88_g_4 | 44041 |
| 763_Human_papillomavirus_type_88_g_5 | 44042 |
| 764_Human_papillomavirus_type_88_g_1 | 44043 |
| 764_Human_papillomavirus_type_88_g_2 | 44044 |
| 764_Human_papillomavirus_type_88_g_3 | 44045 |
| 764_Human_papillomavirus_type_88_g_4 | 44046 |
| 764_Human_papillomavirus_type_88_g_5 | 44047 |
| 765_Human_papillomavirus_type_88_g_1 | 44048 |
| 765_Human_papillomavirus_type_88_g_2 | 44049 |
| 765_Human_papillomavirus_type_88_g_3 | 44050 |
| 765_Human_papillomavirus_type_88_g_4 | 44051 |
| 765_Human_papillomavirus_type_88_g_5 | 44052 |
| 766_Human_papillomavirus_type_88_g_1 | 44053 |
| 766_Human_papillomavirus_type_88_g_2 | 44054 |
| 766_Human_papillomavirus_type_88_g_3 | 44055 |
| 766_Human_papillomavirus_type_88_g_4 | 44056 |
| 766_Human_papillomavirus_type_88_g_5 | 44057 |
| 767_Human_papillomavirus_type_88_g_1 | 44058 |
| 767_Human_papillomavirus_type_88_g_2 | 44059 |
| 767_Human_papillomavirus_type_88_g_3 | 44060 |
| 767_Human_papillomavirus_type_88_g_4 | 44061 |
| 767_Human_papillomavirus_type_88_g_5 | 44062 |
| 768_Human_papillomavirus_type_88_g_1 | 44063 |
| 768_Human_papillomavirus_type_88_g_2 | 44064 |
| 768_Human_papillomavirus_type_88_g_3 | 44065 |
| 768_Human_papillomavirus_type_88_g_4 | 44066 |
| 768_Human_papillomavirus_type_88_g_5 | 44067 |
| 769_Human_papillomavirus_type_179_complete_genome_g_1 | 44068 |
| 769_Human_papillomavirus_type_179_complete_genome_g_2 | 44069 |
| 769_Human_papillomavirus_type_179_complete_genome_g_3 | 44070 |
| 769_Human_papillomavirus_type_179_complete_genome_g_4 | 44071 |
| 769_Human_papillomavirus_type_179_complete_genome_g_5 | 44072 |
| 770_Human_papillomavirus_type_179_complete_genome_g_1 | 44073 |
| 770_Human_papillomavirus_type_179_complete_genome_g_2 | 44074 |
| 770_Human_papillomavirus_type_179_complete_genome_g_3 | 44075 |
| 770_Human_papillomavirus_type_179_complete_genome_g_4 | 44076 |
| 770_Human_papillomavirus_type_179_complete_genome_g_5 | 44077 |
| 771_Human_papillomavirus_type_179_complete_genome_g_1 | 44078 |
| 771_Human_papillomavirus_type_179_complete_genome_g_2 | 44079 |
| 771_Human_papillomavirus_type_179_complete_genome_g_3 | 44080 |
| 771_Human_papillomavirus_type_179_complete_genome_g_4 | 44081 |
| 771_Human_papillomavirus_type_179_complete_genome_g_5 | 44082 |
| 772_Human_papillomavirus_type_179_complete_genome_g_1 | 44083 |
| 772_Human_papillomavirus_type_179_complete_genome_g_2 | 44084 |
| 772_Human_papillomavirus_type_179_complete_genome_g_3 | 44085 |
| 772_Human_papillomavirus_type_179_complete_genome_g_4 | 44086 |
| 772_Human_papillomavirus_type_179_complete_genome_g_5 | 44087 |
| 773_Human_papillomavirus_type_179_complete_genome_g_1 | 44088 |
| 773_Human_papillomavirus_type_179_complete_genome_g_2 | 44089 |
| 773_Human_papillomavirus_type_179_complete_genome_g_3 | 44090 |
| 773_Human_papillomavirus_type_179_complete_genome_g_4 | 44091 |
| 773_Human_papillomavirus_type_179_complete_genome_g_5 | 44092 |
| 774_Human_papillomavirus_type_179_complete_genome_g_1 | 44093 |
| 774_Human_papillomavirus_type_179_complete_genome_g_2 | 44094 |
| 774_Human_papillomavirus_type_179_complete_genome_g_3 | 44095 |
| 774_Human_papillomavirus_type_179_complete_genome_g_4 | 44096 |
| 774_Human_papillomavirus_type_179_complete_genome_g_5 | 44097 |
| 775_Human_papillomavirus_type_179_complete_genome_g_1 | 44098 |
| 775_Human_papillomavirus_type_179_complete_genome_g_2 | 44099 |
| 775_Human_papillomavirus_type_179_complete_genome_g_3 | 44100 |
| 775_Human_papillomavirus_type_179_complete_genome_g_4 | 44101 |
| 775_Human_papillomavirus_type_179_complete_genome_g_5 | 44102 |
| 776_Human_papillomavirus_type_179_complete_genome_g_1 | 44103 |
| 776_Human_papillomavirus_type_179_complete_genome_g_2 | 44104 |
| 776_Human_papillomavirus_type_179_complete_genome_g_3 | 44105 |
| 776_Human_papillomavirus_type_179_complete_genome_g_4 | 44106 |
| 776_Human_papillomavirus_type_179_complete_genome_g_5 | 44107 |
| 777_Human_papillomavirus_type_179_complete_genome_g_1 | 44108 |
| 777_Human_papillomavirus_type_179_complete_genome_g_2 | 44109 |
| 777_Human_papillomavirus_type_179_complete_genome_g_3 | 44110 |
| 777_Human_papillomavirus_type_179_complete_genome_g_4 | 44111 |
| 777_Human_papillomavirus_type_179_complete_genome_g_5 | 44112 |
| 778_Human_papillomavirus_type_179_complete_genome_g_1 | 44113 |
| 778_Human_papillomavirus_type_179_complete_genome_g_2 | 44114 |
| 778_Human_papillomavirus_type_179_complete_genome_g_3 | 44115 |
| 778_Human_papillomavirus_type_179_complete_genome_g_4 | 44116 |
| 778_Human_papillomavirus_type_179_complete_genome_g_5 | 44117 |
| 779_Human_papillomavirus_type_179_complete_genome_g_1 | 44118 |
| 779_Human_papillomavirus_type_179_complete_genome_g_2 | 44119 |
| 779_Human_papillomavirus_type_179_complete_genome_g_3 | 44120 |
| 779_Human_papillomavirus_type_179_complete_genome_g_4 | 44121 |
| 779_Human_papillomavirus_type_179_complete_genome_g_5 | 44122 |
| 780_Influenza_C_virus_(C/Ann_Arbor/1/50)_segment_7_g_1 | 44123 |
| 780_Influenza_C_virus_(C/Ann_Arbor/1/50)_segment_7_g_2 | 44124 |
| 780_Influenza_C_virus_(C/Ann_Arbor/1/50)_segment_7_g_3 | 44125 |
| 780_Influenza_C_virus_(C/Ann_Arbor/1/50)_segment_7_g_4 | 44126 |
| 780_Influenza_C_virus_(C/Ann_Arbor/1/50)_segment_7_g_5 | 44127 |
| 781_Influenza_C_virus_(C/Ann_Arbor/1/50)_segment_7_g_1 | 44128 |
| 781_Influenza_C_virus_(C/Ann_Arbor/1/50)_segment_7_g_2 | 44129 |
| 781_Influenza_C_virus_(C/Ann_Arbor/1/50)_segment_7_g_3 | 44130 |
| 781_Influenza_C_virus_(C/Ann_Arbor/1/50)_segment_7_g_4 | 44131 |
| 781_Influenza_C_virus_(C/Ann_Arbor/1/50)_segment_7_g_5 | 44132 |
| 782_Influenza_C_virus_(C/Ann_Arbor/1/50)_segment_7_g_1 | 44133 |
| 782_Influenza_C_virus_(C/Ann_Arbor/1/50)_segment_7_g_2 | 44134 |
| 782_Influenza_C_virus_(C/Ann_Arbor/1/50)_segment_7_g_3 | 44135 |
| 782_Influenza_C_virus_(C/Ann_Arbor/1/50)_segment_7_g_4 | 44136 |
| 782_Influenza_C_virus_(C/Ann_Arbor/1/50)_segment_7_g_5 | 44137 |
| 783_Human_rhinovirus_3_g_1 | 44138 |
| 783_Human_rhinovirus_3_g_2 | 44139 |
| 783_Human_rhinovirus_3_g_3 | 44140 |
| 784_Human_rhinovirus_3_g_1 | 44141 |
| 784_Human_rhinovirus_3_g_2 | 44142 |
| 784_Human_rhinovirus_3_g_3 | 44143 |
| 784_Human_rhinovirus_3_g_4 | 44144 |
| 784_Human_rhinovirus_3_g_5 | 44145 |
| 785_Human_rhinovirus_3_g_1 | 44146 |
| 785_Human_rhinovirus_3_g_2 | 44147 |
| 785_Human_rhinovirus_3_g_3 | 44148 |
| 785_Human_rhinovirus_3_g_4 | 44149 |
| 785_Human_rhinovirus_3_g_5 | 44150 |
| 786_Human_rhinovirus_3_g_1 | 44151 |
| 786_Human_rhinovirus_3_g_2 | 44152 |
| 786_Human_rhinovirus_3_g_3 | 44153 |
| 786_Human_rhinovirus_3_g_4 | 44154 |
| 786_Human_rhinovirus_3_g_5 | 44155 |
| 787_Human_rhinovirus_3_g_1 | 44156 |
| 787_Human_rhinovirus_3_g_2 | 44157 |
| 787_Human_rhinovirus_3_g_3 | 44158 |
| 787_Human_rhinovirus_3_g_4 | 44159 |
| 787_Human_rhinovirus_3_g_5 | 44160 |
| 788_Human_rhinovirus_3_g_1 | 44161 |
| 788_Human_rhinovirus_3_g_2 | 44162 |
| 788_Human_rhinovirus_3_g_3 | 44163 |
| 788_Human_rhinovirus_3_g_4 | 44164 |
| 788_Human_rhinovirus_3_g_5 | 44165 |
| 789_Human_rhinovirus_3_g_1 | 44166 |
| 789_Human_rhinovirus_3_g_2 | 44167 |
| 789_Human_rhinovirus_3_g_3 | 44168 |
| 789_Human_rhinovirus_3_g_4 | 44169 |
| 789_Human_rhinovirus_3_g_5 | 44170 |
| 790_Human_rhinovirus_3_g_1 | 44171 |
| 790_Human_rhinovirus_3_g_2 | 44172 |
| 790_Human_rhinovirus_3_g_3 | 44173 |
| 790_Human_rhinovirus_3_g_4 | 44174 |
| 790_Human_rhinovirus_3_g_5 | 44175 |
| 791_Human_rhinovirus_3_g_1 | 44176 |
| 791_Human_rhinovirus_3_g_2 | 44177 |
| 791_Human_rhinovirus_3_g_3 | 44178 |
| 791_Human_rhinovirus_3_g_4 | 44179 |
| 791_Human_rhinovirus_3_g_5 | 44180 |
| 792_Human_rhinovirus_3_g_1 | 44181 |
| 792_Human_rhinovirus_3_g_2 | 44182 |
| 792_Human_rhinovirus_3_g_3 | 44183 |
| 792_Human_rhinovirus_3_g_4 | 44184 |
| 792_Human_rhinovirus_3_g_5 | 44185 |
| 793_Human_rhinovirus_3_g_1 | 44186 |
| 793_Human_rhinovirus_3_g_2 | 44187 |
| 793_Human_rhinovirus_3_g_3 | 44188 |
| 793_Human_rhinovirus_3_g_4 | 44189 |
| 793_Human_rhinovirus_3_g_5 | 44190 |
| 794_Human_rhinovirus_3_g_1 | 44191 |
| 794_Human_rhinovirus_3_g_2 | 44192 |
| 794_Human_rhinovirus_3_g_3 | 44193 |
| 794_Human_rhinovirus_3_g_4 | 44194 |
| 794_Human_rhinovirus_3_g_5 | 44195 |
| 795_Human_rhinovirus_3_g_1 | 44196 |
| 795_Human_rhinovirus_3_g_2 | 44197 |
| 795_Human_rhinovirus_3_g_3 | 44198 |
| 795_Human_rhinovirus_3_g_4 | 44199 |
| 795_Human_rhinovirus_3_g_5 | 44200 |
| 796_Human_rhinovirus_3_g_1 | 44201 |
| 796_Human_rhinovirus_3_g_2 | 44202 |
| 796_Human_rhinovirus_3_g_3 | 44203 |
| 796_Human_rhinovirus_3_g_4 | 44204 |
| 796_Human_rhinovirus_3_g_5 | 44205 |
| 797_Human_rhinovirus_3_g_1 | 44206 |
| 797_Human_rhinovirus_3_g_2 | 44207 |
| 797_Human_rhinovirus_3_g_3 | 44208 |
| 797_Human_rhinovirus_3_g_4 | 44209 |
| 797_Human_rhinovirus_3_g_5 | 44210 |
| 798_Human_rhinovirus_3_g_1 | 44211 |
| 798_Human_rhinovirus_3_g_2 | 44212 |
| 798_Human_rhinovirus_3_g_3 | 44213 |
| 798_Human_rhinovirus_3_g_4 | 44214 |
| 798_Human_rhinovirus_3_g_5 | 44215 |
| 799_Human_rhinovirus_3_g_1 | 44216 |
| 799_Human_rhinovirus_3_g_2 | 44217 |
| 799_Human_rhinovirus_3_g_3 | 44218 |
| 799_Human_rhinovirus_3_g_4 | 44219 |
| 799_Human_rhinovirus_3_g_5 | 44220 |
| 800_Human_rhinovirus_3_g_1 | 44221 |
| 800_Human_rhinovirus_3_g_2 | 44222 |
| 800_Human_rhinovirus_3_g_3 | 44223 |
| 800_Human_rhinovirus_3_g_4 | 44224 |
| 800_Human_rhinovirus_3_g_5 | 44225 |
| 801_Influenza_A_virus_(A/Puerto_Rico/8/1934(H1N1))_segment_3_g_1 | 44226 |
| 801_Influenza_A_virus_(A/Puerto_Rico/8/1934(H1N1))_segment_3_g_2 | 44227 |
| 801_Influenza_A_virus_(A/Puerto_Rico/8/1934(H1N1))_segment_3_g_3 | 44228 |
| 801_Influenza_A_virus_(A/Puerto_Rico/8/1934(H1N1))_segment_3_g_4 | 44229 |
| 801_Influenza_A_virus_(A/Puerto_Rico/8/1934(H1N1))_segment_3_g_5 | 44230 |
| 802_Influenza_A_virus_(A/Puerto_Rico/8/1934(H1N1))_segment_3_g_1 | 44231 |
| 802_Influenza_A_virus_(A/Puerto_Rico/8/1934(H1N1))_segment_3_g_2 | 44232 |
| 802_Influenza_A_virus_(A/Puerto_Rico/8/1934(H1N1))_segment_3_g_3 | 44233 |
| 802_Influenza_A_virus_(A/Puerto_Rico/8/1934(H1N1))_segment_3_g_4 | 44234 |
| 802_Influenza_A_virus_(A/Puerto_Rico/8/1934(H1N1))_segment_3_g_5 | 44235 |
| 803_Influenza_A_virus_(A/Puerto_Rico/8/1934(H1N1))_segment_3_g_1 | 44236 |
| 803_Influenza_A_virus_(A/Puerto_Rico/8/1934(H1N1))_segment_3_g_2 | 44237 |
| 803_Influenza_A_virus_(A/Puerto_Rico/8/1934(H1N1))_segment_3_g_3 | 44238 |
| 803_Influenza_A_virus_(A/Puerto_Rico/8/1934(H1N1))_segment_3_g_4 | 44239 |
| 803_Influenza_A_virus_(A/Puerto_Rico/8/1934(H1N1))_segment_3_g_5 | 44240 |
| 804_Influenza_A_virus_(A/Puerto_Rico/8/1934(H1N1))_segment_3_g_1 | 44241 |
| 804_Influenza_A_virus_(A/Puerto_Rico/8/1934(H1N1))_segment_3_g_2 | 44242 |
| 804_Influenza_A_virus_(A/Puerto_Rico/8/1934(H1N1))_segment_3_g_3 | 44243 |
| 804_Influenza_A_virus_(A/Puerto_Rico/8/1934(H1N1))_segment_3_g_4 | 44244 |
| 804_Influenza_A_virus_(A/Puerto_Rico/8/1934(H1N1))_segment_3_g_5 | 44245 |
| 805_Influenza_A_virus_(A/Puerto_Rico/8/1934(H1N1))_segment_3_g_1 | 44246 |
| 805_Influenza_A_virus_(A/Puerto_Rico/8/1934(H1N1))_segment_3_g_2 | 44247 |
| 805_Influenza_A_virus_(A/Puerto_Rico/8/1934(H1N1))_segment_3_g_3 | 44248 |
| 805_Influenza_A_virus_(A/Puerto_Rico/8/1934(H1N1))_segment_3_g_4 | 44249 |
| 805_Influenza_A_virus_(A/Puerto_Rico/8/1934(H1N1))_segment_3_g_5 | 44250 |
| 806_Influenza_A_virus_(A/Shanghai/02/2013(H7N9))_{—} | 44251 |
| segment_1_polymerase_PB2_(PB2)_gene_g_1 | |
| 806_Influenza_A_virus_(A/Shanghai/02/2013(H7N9))_{—} | 44252 |
| segment_1_polymerase_PB2_(PB2)_gene_g_2 | |
| 806_Influenza_A_virus_(A/Shanghai/02/2013(H7N9))_{—} | 44253 |
| segment_1_polymerase_PB2_(PB2)_gene_g_3 | |
| 806_Influenza_A_virus_(A/Shanghai/02/2013(H7N9))_{—} | 44254 |
| segment_1_polymerase_PB2_(PB2)_gene_g_4 | |
| 806_Influenza_A_virus_(A/Shanghai/02/2013(H7N9))_{—} | 44255 |
| segment_1_polymerase_PB2_(PB2)_gene_g_5 | |
| 807_Influenza_A_virus_(A/Shanghai/02/2013(H7N9))_{—} | 44256 |
| segment_1_polymerase_PB2_(PB2)_gene_g_1 | |
| 807_Influenza_A_virus_(A/Shanghai/02/2013(H7N9))_{—} | 44257 |
| segment_1_polymerase_PB2_(PB2)_gene_g_2 | |
| 807_Influenza_A_virus_(A/Shanghai/02/2013(H7N9))_{—} | 44258 |
| segment_1_polymerase_PB2_(PB2)_gene_g_3 | |
| 807_Influenza_A_virus_(A/Shanghai/02/2013(H7N9))_{—} | 44259 |
| segment_1_polymerase_PB2_(PB2)_gene_g_4 | |
| 807_Influenza_A_virus_(A/Shanghai/02/2013(H7N9))_{—} | 44260 |
| segment_1_polymerase_PB2_(PB2)_gene_g_5 | |
| 808_Influenza_A_virus_(A/Shanghai/02/2013(H7N9))_{—} | 44261 |
| segment_1_polymerase_PB2_(PB2)_gene_g_1 | |
| 808_Influenza_A_virus_(A/Shanghai/02/2013(H7N9))_{—} | 44262 |
| segment_1_polymerase_PB2_(PB2)_gene_g_2 | |
| 808_Influenza_A_virus_(A/Shanghai/02/2013(H7N9))_{—} | 44263 |
| segment_1_polymerase_PB2_(PB2)_gene_g_3 | |
| 808_Influenza_A_virus_(A/Shanghai/02/2013(H7N9))_{—} | 44264 |
| segment_1_polymerase_PB2_(PB2)_gene_g_4 | |
| 808_Influenza_A_virus_(A/Shanghai/02/2013(H7N9))_{—} | 44265 |
| segment_1_polymerase_PB2_(PB2)_gene_g_5 | |
| 809_Influenza_A_virus_(A/Shanghai/02/2013(H7N9))_{—} | 44266 |
| segment_1_polymerase_PB2_(PB2)_gene_g_1 | |
| 809_Influenza_A_virus_(A/Shanghai/02/2013(H7N9))_{—} | 44267 |
| segment_1_polymerase_PB2_(PB2)_gene_g_2 | |
| 809_Influenza_A_virus_(A/Shanghai/02/2013(H7N9))_{—} | 44268 |
| segment_1_polymerase_PB2_(PB2)_gene_g_3 | |
| 809_Influenza_A_virus_(A/Shanghai/02/2013(H7N9))_{—} | 44269 |
| segment_1_polymerase_PB2_(PB2)_gene_g_4 | |
| 809_Influenza_A_virus_(A/Shanghai/02/2013(H7N9))_{—} | 44270 |
| segment_1_polymerase_PB2_(PB2)_gene_g_5 | |
| 810_Influenza_A_virus_(A/Shanghai/02/2013(H7N9))_{—} | 44271 |
| segment_1_polymerase_PB2_(PB2)_gene_g_1 | |
| 810_Influenza_A_virus_(A/Shanghai/02/2013(H7N9))_{—} | 44272 |
| segment_1_polymerase_PB2_(PB2)_gene_g_2 | |
| 810_Influenza_A_virus_(A/Shanghai/02/2013(H7N9))_{—} | 44273 |
| segment_1_polymerase_PB2_(PB2)_gene_g_3 | |
| 810_Influenza_A_virus_(A/Shanghai/02/2013(H7N9))_{—} | 44274 |
| segment_1_polymerase_PB2_(PB2)_gene_g_4 | |
| 810_Influenza_A_virus_(A/Shanghai/02/2013(H7N9))_{—} | 44275 |
| segment_1_polymerase_PB2_(PB2)_gene_g_5 | |
| 811_Influenza_A_virus_(A/Shanghai/02/2013(H7N9))_{—} | 44276 |
| segment_1_polymerase_PB2_(PB2)_gene_g_1 | |
| 811_Influenza_A_virus_(A/Shanghai/02/2013(H7N9))_{—} | 44277 |
| segment_1_polymerase_PB2_(PB2)_gene_g_2 | |
| 811_Influenza_A_virus_(A/Shanghai/02/2013(H7N9))_{—} | 44278 |
| segment_1_polymerase_PB2_(PB2)_gene_g_3 | |
| 811_Influenza_A_virus_(A/Shanghai/02/2013(H7N9))_{—} | 44279 |
| segment_1_polymerase_PB2_(PB2)_gene_g_4 | |
| 811_Influenza_A_virus_(A/Shanghai/02/2013(H7N9))_{—} | 44280 |
| segment_1_polymerase_PB2_(PB2)_gene_g_5 | |
| 812_Influenza_A_virus_(A/Shanghai/02/2013(H7N9))_{—} | 44281 |
| segment_1_polymerase_PB2_(PB2)_gene_g_1 | |
| 812_Influenza_A_virus_(A/Shanghai/02/2013(H7N9))_{—} | 44282 |
| segment_1_polymerase_PB2_(PB2)_gene_g_2 | |
| 812_Influenza_A_virus_(A/Shanghai/02/2013(H7N9))_{—} | 44283 |
| segment_1_polymerase_PB2_(PB2)_gene_g_3 | |
| 812_Influenza_A_virus_(A/Shanghai/02/2013(H7N9))_{—} | 44284 |
| segment_1_polymerase_PB2_(PB2)_gene_g_4 | |
| 812_Influenza_A_virus_(A/Shanghai/02/2013(H7N9))_{—} | 44285 |
| segment_1_polymerase_PB2_(PB2)_gene_g_5 | |
| 813_Influenza_A_virus_(A/Shanghai/02/2013(H7N9))_{—} | 44286 |
| segment_1_polymerase_PB2_(PB2)_gene_g_1 | |
| 813_Influenza_A_virus_(A/Shanghai/02/2013(H7N9))_{—} | 44287 |
| segment_1_polymerase_PB2_(PB2)_gene_g_2 | |
| 813_Influenza_A_virus_(A/Shanghai/02/2013(H7N9))_{—} | 44288 |
| segment_1_polymerase_PB2_(PB2)_gene_g_3 | |
| 813_Influenza_A_virus_(A/Shanghai/02/2013(H7N9))_{—} | 44289 |
| segment_1_polymerase_PB2_(PB2)_gene_g_4 | |
| 813_Influenza_A_virus_(A/Shanghai/02/2013(H7N9))_{—} | 44290 |
| segment_1_polymerase_PB2_(PB2)_gene_g_5 | |
| 814_Human_papillomavirus_116_g_1 | 44291 |
| 814_Human_papillomavirus_116_g_2 | 44292 |
| 814_Human_papillomavirus_116_g_3 | 44293 |
| 814_Human_papillomavirus_116_g_4 | 44294 |
| 814_Human_papillomavirus_116_g_5 | 44295 |
| 815_Human_papillomavirus_116_g_1 | 44296 |
| 815_Human_papillomavirus_116_g_2 | 44297 |
| 815_Human_papillomavirus_116_g_3 | 44298 |
| 815_Human_papillomavirus_116_g_4 | 44299 |
| 815_Human_papillomavirus_116_g_5 | 44300 |
| 816_Human_papillomavirus_116_g_1 | 44301 |
| 816_Human_papillomavirus_116_g_2 | 44302 |
| 816_Human_papillomavirus_116_g_3 | 44303 |
| 816_Human_papillomavirus_116_g_4 | 44304 |
| 816_Human_papillomavirus_116_g_5 | 44305 |
| 817_Human_papillomavirus_116_g_1 | 44306 |
| 817_Human_papillomavirus_116_g_2 | 44307 |
| 817_Human_papillomavirus_116_g_3 | 44308 |
| 817_Human_papillomavirus_116_g_4 | 44309 |
| 817_Human_papillomavirus_116_g_5 | 44310 |
| 818_Human_papillomavirus_116_g_1 | 44311 |
| 818_Human_papillomavirus_116_g_2 | 44312 |
| 818_Human_papillomavirus_116_g_3 | 44313 |
| 818_Human_papillomavirus_116_g_4 | 44314 |
| 818_Human_papillomavirus_116_g_5 | 44315 |
| 819_Human_papillomavirus_116_g_1 | 44316 |
| 819_Human_papillomavirus_116_g_2 | 44317 |
| 819_Human_papillomavirus_116_g_3 | 44318 |
| 819_Human_papillomavirus_116_g_4 | 44319 |
| 819_Human_papillomavirus_116_g_5 | 44320 |
| 820_Human_papillomavirus_116_g_1 | 44321 |
| 820_Human_papillomavirus_116_g_2 | 44322 |
| 820_Human_papillomavirus_116_g_3 | 44323 |
| 820_Human_papillomavirus_116_g_4 | 44324 |
| 820_Human_papillomavirus_116_g_5 | 44325 |
| 821_Human_papillomavirus_116_g_1 | 44326 |
| 821_Human_papillomavirus_116_g_2 | 44327 |
| 821_Human_papillomavirus_116_g_3 | 44328 |
| 821_Human_papillomavirus_116_g_4 | 44329 |
| 821_Human_papillomavirus_116_g_5 | 44330 |
| 822_Human_papillomavirus_116_g_1 | 44331 |
| 822_Human_papillomavirus_116_g_2 | 44332 |
| 822_Human_papillomavirus_116_g_3 | 44333 |
| 822_Human_papillomavirus_116_g_4 | 44334 |
| 822_Human_papillomavirus_116_g_5 | 44335 |
| 823_Human_papillomavirus_116_g_1 | 44336 |
| 823_Human_papillomavirus_116_g_2 | 44337 |
| 823_Human_papillomavirus_116_g_3 | 44338 |
| 823_Human_papillomavirus_116_g_4 | 44339 |
| 823_Human_papillomavirus_116_g_5 | 44340 |
| 824_Hepatitis_C_virus_genotype_6_g_1 | 44341 |
| 824_Hepatitis_C_virus_genotype_6_g_2 | 44342 |
| 824_Hepatitis_C_virus_genotype_6_g_3 | 44343 |
| 824_Hepatitis_C_virus_genotype_6_g_4 | 44344 |
| 825_Hepatitis_C_virus_genotype_6_g_1 | 44345 |
| 825_Hepatitis_C_virus_genotype_6_g_2 | 44346 |
| 825_Hepatitis_C_virus_genotype_6_g_3 | 44347 |
| 825_Hepatitis_C_virus_genotype_6_g_4 | 44348 |
| 825_Hepatitis_C_virus_genotype_6_g_5 | 44349 |
| 826_Hepatitis_C_virus_genotype_6_g_1 | 44350 |
| 826_Hepatitis_C_virus_genotype_6_g_2 | 44351 |
| 826_Hepatitis_C_virus_genotype_6_g_3 | 44352 |
| 826_Hepatitis_C_virus_genotype_6_g_4 | 44353 |
| 826_Hepatitis_C_virus_genotype_6_g_5 | 44354 |
| 827_Hepatitis_C_virus_genotype_6_g_1 | 44355 |
| 827_Hepatitis_C_virus_genotype_6_g_2 | 44356 |
| 827_Hepatitis_C_virus_genotype_6_g_3 | 44357 |
| 827_Hepatitis_C_virus_genotype_6_g_4 | 44358 |
| 828_Hepatitis_C_virus_genotype_6_g_1 | 44359 |
| 828_Hepatitis_C_virus_genotype_6_g_2 | 44360 |
| 828_Hepatitis_C_virus_genotype_6_g_3 | 44361 |
| 828_Hepatitis_C_virus_genotype_6_g_4 | 44362 |
| 828_Hepatitis_C_virus_genotype_6_g_5 | 44363 |
| 829_Hepatitis_C_virus_genotype_6_g_1 | 44364 |
| 829_Hepatitis_C_virus_genotype_6_g_2 | 44365 |
| 829_Hepatitis_C_virus_genotype_6_g_3 | 44366 |
| 829_Hepatitis_C_virus_genotype_6_g_4 | 44367 |
| 829_Hepatitis_C_virus_genotype_6_g_5 | 44368 |
| 830_Hepatitis_C_virus_genotype_6_g_1 | 44369 |
| 830_Hepatitis_C_virus_genotype_6_g_2 | 44370 |
| 830_Hepatitis_C_virus_genotype_6_g_3 | 44371 |
| 830_Hepatitis_C_virus_genotype_6_g_4 | 44372 |
| 830_Hepatitis_C_virus_genotype_6_g_5 | 44373 |
| 831_Hepatitis_C_virus_genotype_6_g_1 | 44374 |
| 831_Hepatitis_C_virus_genotype_6_g_2 | 44375 |
| 831_Hepatitis_C_virus_genotype_6_g_3 | 44376 |
| 831_Hepatitis_C_virus_genotype_6_g_4 | 44377 |
| 831_Hepatitis_C_virus_genotype_6_g_5 | 44378 |
| 832_Hepatitis_C_virus_genotype_6_g_1 | 44379 |
| 832_Hepatitis_C_virus_genotype_6_g_2 | 44380 |
| 832_Hepatitis_C_virus_genotype_6_g_3 | 44381 |
| 832_Hepatitis_C_virus_genotype_6_g_4 | 44382 |
| 832_Hepatitis_C_virus_genotype_6_g_5 | 44383 |
| 833_Hepatitis_C_virus_genotype_6_g_1 | 44384 |
| 833_Hepatitis_C_virus_genotype_6_g_2 | 44385 |
| 833_Hepatitis_C_virus_genotype_6_g_3 | 44386 |
| 833_Hepatitis_C_virus_genotype_6_g_4 | 44387 |
| 833_Hepatitis_C_virus_genotype_6_g_5 | 44388 |
| 834_Hepatitis_C_virus_genotype_6_g_1 | 44389 |
| 834_Hepatitis_C_virus_genotype_6_g_2 | 44390 |
| 834_Hepatitis_C_virus_genotype_6_g_3 | 44391 |
| 834_Hepatitis_C_virus_genotype_6_g_4 | 44392 |
| 834_Hepatitis_C_virus_genotype_6_g_5 | 44393 |
| 835_Hepatitis_C_virus_genotype_6_g_1 | 44394 |
| 835_Hepatitis_C_virus_genotype_6_g_2 | 44395 |
| 835_Hepatitis_C_virus_genotype_6_g_3 | 44396 |
| 835_Hepatitis_C_virus_genotype_6_g_4 | 44397 |
| 835_Hepatitis_C_virus_genotype_6_g_5 | 44398 |
| 836_Hepatitis_C_virus_genotype_6_g_1 | 44399 |
| 836_Hepatitis_C_virus_genotype_6_g_2 | 44400 |
| 836_Hepatitis_C_virus_genotype_6_g_3 | 44401 |
| 836_Hepatitis_C_virus_genotype_6_g_4 | 44402 |
| 836_Hepatitis_C_virus_genotype_6_g_5 | 44403 |
| 837_Hepatitis_C_virus_genotype_6_g_1 | 44404 |
| 837_Hepatitis_C_virus_genotype_6_g_2 | 44405 |
| 837_Hepatitis_C_virus_genotype_6_g_3 | 44406 |
| 837_Hepatitis_C_virus_genotype_6_g_4 | 44407 |
| 837_Hepatitis_C_virus_genotype_6_g_5 | 44408 |
| 838_Hepatitis_C_virus_genotype_6_g_1 | 44409 |
| 838_Hepatitis_C_virus_genotype_6_g_2 | 44410 |
| 838_Hepatitis_C_virus_genotype_6_g_3 | 44411 |
| 838_Hepatitis_C_virus_genotype_6_g_4 | 44412 |
| 838_Hepatitis_C_virus_genotype_6_g_5 | 44413 |
| 839_Hepatitis_C_virus_genotype_6_g_1 | 44414 |
| 839_Hepatitis_C_virus_genotype_6_g_2 | 44415 |
| 839_Hepatitis_C_virus_genotype_6_g_3 | 44416 |
| 839_Hepatitis_C_virus_genotype_6_g_4 | 44417 |
| 839_Hepatitis_C_virus_genotype_6_g_3 | 44418 |
| 840_Hepatitis_C_virus_genotype_6_g_1 | 44419 |
| 840_Hepatitis_C_virus_genotype_6_g_2 | 44420 |
| 840_Hepatitis_C_virus_genotype_6_g_3 | 44421 |
| 840_Hepatitis_C_virus_genotype_6_g_4 | 44422 |
| 841_Hepatitis_C_virus_genotype_6_g_1 | 44423 |
| 841_Hepatitis_C_virus_genotype_6_g_2 | 44424 |
| 841_Hepatitis_C_virus_genotype_6_g_3 | 44425 |
| 841_Hepatitis_C_virus_genotype_6_g_4 | 44426 |
| 841_Hepatitis_C_virus_genotype_6_g_5 | 44427 |
| 842_Hepatitis_C_virus_genotype_6_g_1 | 44428 |
| 842_Hepatitis_C_virus_genotype_6_g_2 | 44429 |
| 842_Hepatitis_C_virus_genotype_6_g_3 | 44430 |
| 842_Hepatitis_C_virus_genotype_6_g_4 | 44431 |
| 842_Hepatitis_C_virus_genotype_6_g_5 | 44432 |
| 843_Hepatitis_C_virus_genotype_6_g_1 | 44433 |
| 843_Hepatitis_C_virus_genotype_6_g_2 | 44434 |
| 843_Hepatitis_C_virus_genotype_6_g_3 | 44435 |
| 843_Hepatitis_C_virus_genotype_6_g_4 | 44436 |
| 843_Hepatitis_C_virus_genotype_6_g_5 | 44437 |
| 844_Hepatitis_C_virus_genotype_6_g_1 | 44438 |
| 844_Hepatitis_C_virus_genotype_6_g_2 | 44439 |
| 844_Hepatitis_C_virus_genotype_6_g_3 | 44440 |
| 844_Hepatitis_C_virus_genotype_6_g_4 | 44441 |
| 844_Hepatitis_C_virus_genotype_6_g_5 | 44442 |
| 845_Hepatitis_C_virus_genotype_6_g_1 | 44443 |
| 845_Hepatitis_C_virus_genotype_6_g_2 | 44444 |
| 845_Hepatitis_C_virus_genotype_6_g_3 | 44445 |
| 845_Hepatitis_C_virus_genotype_6_g_4 | 44446 |
| 846_Hepatitis_C_virus_genotype_6_g_5 | 44447 |
| 846_Hepatitis_C_virus_genotype_6_g_2 | 44448 |
| 846_Hepatitis_C_virus_genotype_6_g_3 | 44449 |
| 846_Hepatitis_C_virus_genotype_6_g_4 | 44450 |
| 846_Hepatitis_C_virus_genotype_6_g_5 | 44451 |
| 847_Hepatitis_C_virus_genotype_6_g_1 | 44452 |
| 847_Hepatitis_C_virus_genotype_6_g_2 | 44453 |
| 847_Hepatitis_C_virus_genotype_6_g_3 | 44454 |
| 847_Hepatitis_C_virus_genotype_6_g_4 | 44455 |
| 847_Hepatitis_C_virus_genotype_6_g_5 | 44456 |
| 848_Hepatitis_C_virus_genotype_6_g_1 | 44457 |
| 848_Hepatitis_C_virus_genotype_6_g_2 | 44458 |
| 848_Hepatitis_C_virus_genotype_6_g_3 | 44459 |
| 848_Hepatitis_C_virus_genotype_6_g_4 | 44460 |
| 849_Hepatitis_C_virus_genotype_6_g_1 | 44461 |
| 849_Hepatitis_C_virus_genotype_6_g_2 | 44462 |
| 849_Hepatitis_C_virus_genotype_6_g_3 | 44463 |
| 849_Hepatitis_C_virus_genotype_6_g_4 | 44464 |
| 849_Hepatitis_C_virus_genotype_6_g_5 | 44465 |
| 850_Influenza_C_virus_(C/Ann_Arbor/1/50)_segment_5_g_1 | 44466 |
| 850_Influenza_C_virus_(C/Ann_Arbor/1/50)_segment_5_g_2 | 44467 |
| 850_Influenza_C_virus_(C/Ann_Arbor/1/50)_segment_5_g_3 | 44468 |
| 850_Influenza_C_virus_(C/Ann_Arbor/1/50)_segment_5_g_4 | 44469 |
| 850_Influenza_C_virus_(C/Ann_Arbor/1/50)_segment_5_g_5 | 44470 |
| 851_Influenza_C_virus_(C/Ann_Arbor/1/50)_segment_5_g_1 | 44471 |
| 851_Influenza_C_virus_(C/Ann_Arbor/1/50)_segment_5_g_2 | 44472 |
| 851_Influenza_C_virus_(C/Ann_Arbor/1/50)_segment_5_g_3 | 44473 |
| 851_Influenza_C_virus_(C/Ann_Arbor/1/50)_segment_5_g_4 | 44474 |
| 851_Influenza_C_virus_(C/Ann_Arbor/1/50)_segment_5_g_5 | 44475 |
| 852_Influenza_C_virus_(C/Ann_Arbor/1/50)_segment_5_g_1 | 44476 |
| 852_Influenza_C_virus_(C/Ann_Arbor/1/50)_segment_5_g_2 | 44477 |
| 852_Influenza_C_virus_(C/Ann_Arbor/1/50)_segment_5_g_3 | 44478 |
| 852_Influenza_C_virus_(C/Ann_Arbor/1/50)_segment_5_g_4 | 44479 |
| 852_Influenza_C_virus_(C/Ann_Arbor/1/50)_segment_5_g_5 | 44480 |
| 853_Influenza_C_virus_(C/Ann_Arbor/1/50)_segment_5_g_1 | 44481 |
| 853_Influenza_C_virus_(C/Ann_Arbor/1/50)_segment_5_g_2 | 44482 |
| 853_Influenza_C_virus_(C/Ann_Arbor/1/50)_segment_5_g_3 | 44483 |
| 853_Influenza_C_virus_(C/Ann_Arbor/1/50)_segment_5_g_4 | 44484 |
| 853_Influenza_C_virus_(C/Ann_Arbor/1/50)_segment_5_g_5 | 44485 |
| 854_Influenza_C_virus_(C/Ann_Arbor/1/50)_segment_5_g_1 | 44486 |
| 854_Influenza_C_virus_(C/Ann_Arbor/1/50)_segment_5_g_2 | 44487 |
| 854_Influenza_C_virus_(C/Ann_Arbor/1/50)_segment_5_g_3 | 44488 |
| 854_Influenza_C_virus_(C/Ann_Arbor/1/50)_segment_5_g_4 | 44489 |
| 854_Influenza_C_virus_(C/Ann_Arbor/1/50)_segment_5_g_5 | 44490 |
| 855_Influenza_C_virus_(C/Ann_Arbor/1/50)_segment_5_g_1 | 44491 |
| 855_Influenza_C_virus_(C/Ann_Arbor/1/50)_segment_5_g_2 | 44492 |
| 855_Influenza_C_virus_(C/Ann_Arbor/1/50)_segment_5_g_3 | 44493 |
| 855_Influenza_C_virus_(C/Ann_Arbor/1/50)_segment_5_g_4 | 44494 |
| 855_Influenza_C_virus_(C/Ann_Arbor/1/50)_segment_5_g_5 | 44495 |
| 856_Human_papillomavirus_type_201_isolate_HPV201_g_1 | 44496 |
| 856_Human_papillomavirus_type_201_isolate_HPV201_g_2 | 44497 |
| 856_Human_papillomavirus_type_201_isolate_HPV201_g_3 | 44498 |
| 856_Human_papillomavirus_type_201_isolate_HPV201_g_4 | 44499 |
| 856_Human_papillomavirus_type_201_isolate_HPV201_g_5 | 44500 |
| 857_Human_papillomavirus_type_201_isolate_HPV201_g_1 | 44501 |
| 857_Human_papillomavirus_type_201_isolate_HPV201_g_2 | 44502 |
| 857_Human_papillomavirus_type_201_isolate_HPV201_g_3 | 44503 |
| 857_Human_papillomavirus_type_201_isolate_HPV201_g_4 | 44504 |
| 857_Human_papillomavirus_type_201_isolate_HPV201_g_5 | 44505 |
| 858_Human_papillomavirus_type_201_isolate_HPV201_g_1 | 44506 |
| 858_Human_papillomavirus_type_201_isolate_HPV201_g_2 | 44507 |
| 858_Human_papillomavirus_type_201_isolate_HPV201_g_3 | 44508 |
| 858_Human_papillomavirus_type_201_isolate_HPV201_g_4 | 44509 |
| 858_Human_papillomavirus_type_201_isolate_HPV201_g_5 | 44510 |
| 859_Human_papillomavirus_type_201_isolate_HPV201_g_1 | 44511 |
| 859_Human_papillomavirus_type_201_isolate_HPV201_g_2 | 44512 |
| 859_Human_papillomavirus_type_201_isolate_HPV201_g_3 | 44513 |
| 859_Human_papillomavirus_type_201_isolate_HPV201_g_4 | 44514 |
| 859_Human_papillomavirus_type_201_isolate_HPV201_g_5 | 44515 |
| 860_Human_papillomavirus_type_201_isolate_HPV201_g_1 | 44516 |
| 860_Human_papillomavirus_type_201_isolate_HPV201_g_2 | 44517 |
| 860_Human_papillomavirus_type_201_isolate_HPV201_g_3 | 44518 |
| 860_Human_papillomavirus_type_201_isolate_HPV201_g_4 | 44519 |
| 860_Human_papillomavirus_type_201_isolate_HPV201_g_5 | 44520 |
| 861_Human_papillomavirus_type_201_isolate_HPV201_g_1 | 44521 |
| 861_Human_papillomavirus_type_201_isolate_HPV201_g_2 | 44522 |
| 861_Human_papillomavirus_type_201_isolate_HPV201_g_3 | 44523 |
| 861_Human_papillomavirus_type_201_isolate_HPV201_g_4 | 44524 |
| 861_Human_papillomavirus_type_201_isolate_HPV201_g_5 | 44525 |
| 862_Human_papillomavirus_type_201_isolate_HPV201_g_1 | 44526 |
| 862_Human_papillomavirus_type_201_isolate_HPV201_g_2 | 44527 |
| 862_Human_papillomavirus_type_201_isolate_HPV201_g_3 | 44528 |
| 862_Human_papillomavirus_type_201_isolate_HPV201_g_4 | 44529 |
| 862_Human_papillomavirus_type_201_isolate_HPV201_g_5 | 44530 |
| 863_Human_papillomavirus_type_201_isolate_HPV201_g_1 | 44531 |
| 863_Human_papillomavirus_type_201_isolate_HPV201_g_2 | 44532 |
| 863_Human_papillomavirus_type_201_isolate_HPV201_g_3 | 44533 |
| 863_Human_papillomavirus_type_201_isolate_HPV201_g_4 | 44534 |
| 863_Human_papillomavirus_type_201_isolate_HPV201_g_5 | 44535 |
| 864_Human_papillomavirus_type_201_isolate_HPV201_g_1 | 44536 |
| 864_Human_papillomavirus_type_201_isolate_HPV201_g_2 | 44537 |
| 864_Human_papillomavirus_type_201_isolate_HPV201_g_3 | 44538 |
| 864_Human_papillomavirus_type_201_isolate_HPV201_g_4 | 44539 |
| 864_Human_papillomavirus_type_201_isolate_HPV201_g_5 | 44540 |
| 865_Human_papillomavirus_type_201_isolate_HPV201_g_1 | 44541 |
| 865_Human_papillomavirus_type_201_isolate_HPV201_g_2 | 44542 |
| 865_Human_papillomavirus_type_201_isolate_HPV201_g_3 | 44543 |
| 865_Human_papillomavirus_type_201_isolate_HPV201_g_4 | 44544 |
| 865_Human_papillomavirus_type_201_isolate_HPV201_g_5 | 44545 |
| 866_Human_papillomavirus_type_201_isolate_HPV201_g_1 | 44546 |
| 866_Human_papillomavirus_type_201_isolate_HPV201_g_2 | 44547 |
| 866_Human_papillomavirus_type_201_isolate_HPV201_g_3 | 44548 |
| 866_Human_papillomavirus_type_201_isolate_HPV201_g_4 | 44549 |
| 866_Human_papillomavirus_type_201_isolate_HPV201_g_5 | 44550 |
| 867_Human_papillomavirus_type_201_isolate_HPV201_g_1 | 44551 |
| 867_Human_papillomavirus_type_201_isolate_HPV201_g_2 | 44552 |
| 867_Human_papillomavirus_type_201_isolate_HPV201_g_3 | 44553 |
| 867_Human_papillomavirus_type_201_isolate_HPV201_g_4 | 44554 |
| 867_Human_papillomavirus_type_201_isolate_HPV201_g_5 | 44555 |
| 868_Human_papillomavirus_type_201_isolate_HPV201_g_1 | 44556 |
| 868_Human_papillomavirus_type_201_isolate_HPV201_g_2 | 44557 |
| 868_Human_papillomavirus_type_201_isolate_HPV201_g_3 | 44558 |
| 868_Human_papillomavirus_type_201_isolate_HPV201_g_4 | 44559 |
| 868_Human_papillomavirus_type_201_isolate_HPV201_g_5 | 44560 |
| 869_Human_papillomavirus_type_201_isolate_HPV201_g_1 | 44561 |
| 869_Human_papillomavirus_type_201_isolate_HPV201_g_2 | 44562 |
| 869_Human_papillomavirus_type_201_isolate_HPV201_g_3 | 44563 |
| 869_Human_papillomavirus_type_201_isolate_HPV201_g_4 | 44564 |
| 869_Human_papillomavirus_type_201_isolate_HPV201_g_5 | 44565 |
| 870_Human_papillomavirus_type_201_isolate_HPV201_g_1 | 44566 |
| 870_Human_papillomavirus_type_201_isolate_HPV201_g_2 | 44567 |
| 870_Human_papillomavirus_type_201_isolate_HPV201_g_3 | 44568 |
| 870_Human_papillomavirus_type_201_isolate_HPV201_g_4 | 44569 |
| 870_Human_papillomavirus_type_201_isolate_HPV201_g_5 | 44570 |
| 871_Influenza_A_virus_(A/New_York/392/2004(H3N2))_segment_7_g_1 | 44571 |
| 871_Influenza_A_virus_(A/New_York/392/2004(H3N2))_segment_7_g_2 | 44572 |
| 871_Influenza_A_virus_(A/New_York/392/2004(H3N2))_segment_7_g_3 | 44573 |
| 871_Influenza_A_virus_(A/New_York/392/2004(H3N2))_segment_7_g_4 | 44574 |
| 871_Influenza_A_virus_(A/New_York/392/2004(H3N2))_segment_7_g_5 | 44575 |
| 872_Influenza_A_virus_(A/New_York/392/2004(H3N2))_segment_7_g_1 | 44576 |
| 872_Influenza_A_virus_(A/New_York/392/2004(H3N2))_segment_7_g_2 | 44577 |
| 872_Influenza_A_virus_(A/New_York/392/2004(H3N2))_segment_7_g_3 | 44578 |
| 872_Influenza_A_virus_(A/New_York/392/2004(H3N2))_segment_7_g_4 | 44579 |
| 872_Influenza_A_virus_(A/New_York/392/2004(H3N2))_segment_7_g_5 | 44580 |
| 873_Human_papillomavirus_type_16_g_1 | 44581 |
| 873_Human_papillomavirus_type_16_j_2 | 44582 |
| 873_Human_papillomavirus_type_16_g_3 | 44583 |
| 873_Human_papillomavirus_type_16_g_4 | 44584 |
| 873_Human_papillomavirus_type_16_g_5 | 44585 |
| 874_Human_papillomavirus_type_16_g_1 | 44586 |
| 874_Human_papillomavirus_type_16_g_2 | 44587 |
| 874_Human_papillomavirus_type_16_g_3 | 44588 |
| 874_Human_papillomavirus_type_16_g_4 | 44589 |
| 874_Human_papillomavirus_type_16_g_5 | 44590 |
| 875_Human_papillomavirus_type_16_g_1 | 44591 |
| 875_Human_papillomavirus_type_16_g_2 | 44592 |
| 875_Human_papillomavirus_type_16_g_3 | 44593 |
| 875_Human_papillomavirus_type_16_g_4 | 44594 |
| 875_Human_papillomavirus_type_16_g_5 | 44595 |
| 876_Human_papillomavirus_type_16_g_1 | 44596 |
| 876_Human_papillomavirus_type_16_g_2 | 44597 |
| 876_Human_papillomavirus_type_16_g_3 | 44598 |
| 876_Human_papillomavirus_type_16_g_4 | 44599 |
| 876_Human_papillomavirus_type_16_g_5 | 44600 |
| 877_Human_papillomavirus_type_16_g_1 | 44601 |
| 877_Human_papillomavirus_type_16_g_2 | 44602 |
| 877_Human_papillomavirus_type_16_g_3 | 44603 |
| 877_Human_papillomavirus_type_16_g_4 | 44604 |
| 877_Human_papillomavirus_type_16_g_5 | 44605 |
| 878_Human_papillomavirus_type_16_g_1 | 44606 |
| 878_Human_papillomavirus_type_16_g_2 | 44607 |
| 878_Human_papillomavirus_type_16_g_3 | 44608 |
| 878_Human_papillomavirus_type_16_g_4 | 44609 |
| 878_Human_papillomavirus_type_16_g_5 | 44610 |
| 879_Human_papillomavirus_type_16_g_1 | 44611 |
| 879_Human_papillomavirus_type_16_g_2 | 44612 |
| 879_Human_papillomavirus_type_16_g_3 | 44613 |
| 879_Human_papillomavirus_type_16_g_4 | 44614 |
| 879_Human_papillomavirus_type_16_g_5 | 44615 |
| 880_Human_papillomavirus_type_16_g_1 | 44616 |
| 880_Human_papillomavirus_type_16_g_2 | 44617 |
| 880_Human_papillomavirus_type_16_g_3 | 44618 |
| 880_Human_papillomavirus_type_16_g_4 | 44619 |
| 880_Human_papillomavirus_type_16_g_5 | 44620 |
| 881_Human_papillomavirus_type_16_g_1 | 44621 |
| 881_Human_papillomavirus_type_16_g_2 | 44622 |
| 881_Human_papillomavirus_type_16_g_3 | 44623 |
| 881_Human_papillomavirus_type_16_g_4 | 44624 |
| 881_Human_papillomavirus_type_16_g_5 | 44625 |
| 882_Human_papillomavirus_type_16_g_1 | 44626 |
| 882_Human_papillomavirus_type_16_g_2 | 44627 |
| 882_Human_papillomavirus_type_16_g_3 | 44628 |
| 882_Human_papillomavirus_type_16_g_4 | 44629 |
| 882_Human_papillomavirus_type_16_g_5 | 44630 |
| 883_Human_papillomavirus_type_16_g_1 | 44631 |
| 883_Human_papillomavirus_type_16_g_2 | 44632 |
| 883_Human_papillomavirus_type_16_g_3 | 44633 |
| 883_Human_papillomavirus_type_16_g_4 | 44634 |
| 883_Human_papillomavirus_type_16_g_5 | 44635 |
| 884_Human_papillomavirus_type_16_g_1 | 44636 |
| 884_Human_papillomavirus_type_16_g_2 | 44637 |
| 884_Human_papillomavirus_type_16_g_3 | 44638 |
| 884_Human_papillomavirus_type_16_g_4 | 44639 |
| 884_Human_papillomavirus_type_16_g_5 | 44640 |
| 885_Human_papillomavirus_type_16_g_1 | 44641 |
| 885_Human_papillomavirus_type_16_g_2 | 44642 |
| 885_Human_papillomavirus_type_16_g_3 | 44643 |
| 885_Human_papillomavirus_type_16_g_4 | 44644 |
| 885_Human_papillomavirus_type_16_g_5 | 44645 |
| 886_Human_papillomavirus_type_16_g_1 | 44646 |
| 886_Human_papillomavirus_type_16_g_2 | 44647 |
| 886_Human_papillomavirus_type_16_g_3 | 44648 |
| 886_Human_papillomavirus_type_16_g_4 | 44649 |
| 886_Human_papillomavirus_type_16_g_5 | 44650 |
| 887_Influenza_A_virus_(A/Shanghai/02/2013(H7N9))_segment_{—} | 44651 |
| 3_polymerase_PA_(PA)_and_PA-X_protein_(PA-X)_genes_g_1 | |
| 887_Influenza_A_virus_(A/Shanghai/02/2013(H7N9))_segment_{—} | 44652 |
| 3_polymerase_PA_(PA)_and_PA-X_protein_(PA-X)_genes_g_2 | |
| 887_Influenza_A_virus_(A/Shanghai/02/2013(H7N9))_segment_{—} | 44653 |
| 3_polymerase_PA_(PA)_and_PA-X_protein_(PA-X)_genes_g_3 | |
| 887_Influenza_A_virus_(A/Shanghai/02/2013(H7N9))_segment_{—} | 44654 |
| 3_polymerase_PA_(PA)_and_PA-X_protein_(PA-X)_genes_g_4 | |
| 887_Influenza_A_virus_(A/Shanghai/02/2013(H7N9))_segment_{—} | 44655 |
| 3_polymerase_PA_(PA)_and_PA-X_protein_(PA-X)_genes_g_5 | |
| 888_Influenza_A_virus_(A/Shanghai/02/2013(H7N9))_segment_{—} | 44656 |
| 3_polymerase_PA_(PA)_and_PA-X_protein_(PA-X)_genes_g_1 | |
| 888_Influenza_A_virus_(A/Shanghai/02/2013(H7N9))_segment_{—} | 44657 |
| 3_polymerase_PA_(PA)_and_PA-X_protein_(PA-X)_genes_g_2 | |
| 888_Influenza_A_virus_(A/Shanghai/02/2013(H7N9))_segment_{—} | 44658 |
| 3_polymerase_PA_(PA)_and_PA-X_protein_(PA-X)_genes_g_3 | |
| 888_Influenza_A_virus_(A/Shanghai/02/2013(H7N9))_segment_{—} | 44659 |
| 3_polymerase_PA_(PA)_and_PA-X_protein_(PA-X)_genes_g_4 | |
| 888_Influenza_A_virus_(A/Shanghai/02/2013(H7N9))_segment_{—} | 44660 |
| 3_polymerase_PA_(PA)_and_PA-X_protein_(PA-X)_genes_g_5 | |
| 889_Influenza_A_virus_(A/Shanghai/02/2013(H7N9))_segment_{—} | 44661 |
| 3_polymerase_PA_(PA)_and_PA-X_protein_(PA-X)_genes_g_1 | |
| 889_Influenza_A_virus_(A/Shanghai/02/2013(H7N9))_segment_{—} | 44662 |
| 3_polymerase_PA_(PA)_and_PA-X_protein_(PA-X)_genes_g_2 | |
| 889_Influenza_A_virus_(A/Shanghai/02/2013(H7N9))_segment_{—} | 44663 |
| 3_polymerase_PA_(PA)_and_PA-X_protein_(PA-X)_genes_g_3 | |
| 889_Influenza_A_virus_(A/Shanghai/02/2013(H7N9))_segment_{—} | 44664 |
| 3_polymerase_PA_(PA)_and_PA-X_protein_(PA-X)_genes_g_4 | |
| 889_Influenza_A_virus_(A/Shanghai/02/2013(H7N9))_segment_{—} | 44665 |
| 3_polymerase_PA_(PA)_and_PA-X_protein_(PA-X)_genes_g_5 | |
| 890_Influenza_A_virus_(A/Shanghai/02/2013(H7N9))_segment_{—} | 44666 |
| 3_polymerase_PA_(PA)_and_PA-X_protein_(PA-X)_genes_g_1 | |
| 890_Influenza_A_virus_(A/Shanghai/02/2013(H7N9))_segment_{—} | 44667 |
| 3_polymerase_PA_(PA)_and_PA-X_protein_(PA-X)_genes_g_2 | |
| 890_Influenza_A_virus_(A/Shanghai/02/2013(H7N9))_segment_{—} | 44668 |
| 3_polymerase_PA_(PA)_and_PA-X_protein_(PA-X)_genes_g_3 | |
| 890_Influenza_A_virus_(A/Shanghai/02/2013(H7N9))_segment_{—} | 44669 |
| 3_polymerase_PA_(PA)_and_PA-X_protein_(PA-X)_genes_g_4 | |
| 890_Influenza_A_virus_(A/Shanghai/02/2013(H7N9))_segment_{—} | 44670 |
| 3_polymerase_PA_(PA)_and_PA-X_protein_(PA-X)_genes_g_5 | |
| 891_Influenza_A_virus_(A/Shanghai/02/2013(H7N9))_segment_{—} | 44671 |
| 3_polymerase_PA_(PA)_and_PA-X_protein_(PA-X)_genes_g_1 | |
| 891_Influenza_A_virus_(A/Shanghai/02/2013(H7N9))_segment_{—} | 44672 |
| 3_polymerase_PA_(PA)_and_PA-X_protein_(PA-X)_genes_g_2 | |
| 891_Influenza_A_virus_(A/Shanghai/02/2013(H7N9))_segment_{—} | 44673 |
| 3_polymerase_PA_(PA)_and_PA-X_protein_(PA-X)_genes_g_3 | |
| 891_Influenza_A_virus_(A/Shanghai/02/2013(H7N9))_segment_{—} | 44674 |
| 3_polymerase_PA_(PA)_and_PA-X_protein_(PA-X)_genes_g_4 | |
| 891_Influenza_A_virus_(A/Shanghai/02/2013(H7N9))_segment_{—} | 44675 |
| 3_polymerase_PA_(PA)_and_PA-X_protein_(PA-X)_genes_g_5 | |
| 892_Influenza_A_virus_(A/Shanghai/02/2013(H7N9))_segment_{—} | 44676 |
| 3_polymerase_PA_(PA)_and_PA-X_protein_(PA-X)_genes_g_1 | |
| 892_Influenza_A_virus_(A/Shanghai/02/2013(H7N9))_segment_{—} | 44677 |
| 3_polymerase_PA_(PA)_and_PA-X_protein_(PA-X)_genes_g_2 | |
| 892_Influenza_A_virus_(A/Shanghai/02/2013(H7N9))_segment_{—} | 44678 |
| 3_polymerase_PA_(PA)_and_PA-X_protein_(PA-X)_genes_g_3 | |
| 892_Influenza_A_virus_(A/Shanghai/02/2013(H7N9))_segment_{—} | 44679 |
| 3_polymerase_PA_(PA)_and_PA-X_protein_(PA-X)_genes_g_4 | |
| 892_Influenza_A_virus_(A/Shanghai/02/2013(H7N9))_segment_{—} | 44680 |
| 3_polymerase_PA_(PA)_and_PA-X_protein_(PA-X)_genes_g_5 | |
| 893_Influenza_A_virus_(A/Shanghai/02/2013(H7N9))_segment_2_{—} | 44681 |
| polymerase_PB1_(PB1)_and_PB1-F2_protein_(PB1-F2)_genes_g_1 | |
| 893_Influenza_A_virus_(A/Shanghai/02/2013(H7N9))_segment_2_{—} | 44682 |
| polymerase_PB1_(PB1)_and_PB1-F2_protein_(PB1-F2)_genes_g_2 | |
| 893_Influenza_A_virus_(A/Shanghai/02/2013(H7N9))_segment_2_{—} | 44683 |
| polymerase_PB1_(PB1)_and_PB1-F2_protein_(PB1-F2)_genes_g_3 | |
| 893_Influenza_A_virus_(A/Shanghai/02/2013(H7N9))_segment_2_{—} | 44684 |
| polymerase_PB1_(PB1)_and_PB1-F2_protein_(PB1-F2)_genes_g_4 | |
| 893_Influenza_A_virus_(A/Shanghai/02/2013(H7N9))_segment_2_{—} | 44685 |
| polymerase_PB1_(PB1)_and_PB1-F2_protein_(PB1-F2)_genes_g_5 | |
| 894_Influenza_A_virus_(A/Shanghai/02/2013(H7N9))_segment_2_{—} | 44686 |
| polymerase_PB1_(PB1)_and_PB1-F2_protein_(PB1-F2)_genes_g_1 | |
| 894_Influenza_A_virus_(A/Shanghai/02/2013(H7N9))_segment_2_{—} | 44687 |
| polymerase_PB1_(PB1)_and_PB1-F2_protein_(PB1-F2)_genes_g_2 | |
| 894_Influenza_A_virus_(A/Shanghai/02/2013(H7N9))_segment_2_{—} | 44688 |
| polymerase_PB1_(PB1)_and_PB1-F2_protein_(PB1-F2)_genes_g_3 | |
| 894_Influenza_A_virus_(A/Shanghai/02/2013(H7N9))_segment_2_{—} | 44689 |
| polymerase_PB1_(PB1)_and_PB1-F2_protein_(PB1-F2)_genes_g_4 | |
| 894_Influenza_A_virus_(A/Shanghai/02/2013(H7N9))_segment_2_{—} | 44690 |
| polymerase_PB1_(PB1)_and_PB1-F2_protein_(PB1-F2)_genes_g_5 | |
| 895_Influenza_A_virus_(A/Shanghai/02/2013(H7N9))_segment_2_{—} | 44691 |
| polymerase_PB1_(PB1)_and_PB1-F2_protein_(PB1-F2)_genes_g_1 | |
| 895_Influenza_A_virus_(A/Shanghai/02/2013(H7N9))_segment_2_{—} | 44692 |
| polymerase_PB1_(PB1)_and_PB1-F2_protein_(PB1-F2)_genes_g_2 | |
| 895_Influenza_A_virus_(A/Shanghai/02/2013(H7N9))_segment_2_{—} | 44693 |
| polymerase_PB1_(PB1)_and_PB1-F2_protein_(PB1-F2)_genes_g_3 | |
| 895_Influenza_A_virus_(A/Shanghai/02/2013(H7N9))_segment_2_{—} | 44694 |
| polymerase_PB1_(PB1)_and_PB1-F2_protein_(PB1-F2)_genes_g_4 | |
| 895_Influenza_A_virus_(A/Shanghai/02/2013(H7N9))_segment_2_{—} | 44695 |
| polymerase_PB1_(PB1)_and_PB1-F2_protein_(PB1-F2)_genes_g_5 | |
| 896_Influenza_A_virus_(A/Shanghai/02/2013(H7N9))_segment_2_{—} | 44696 |
| polymerase_PB1_(PB1)_and_PB1-F2_protein_(PB1-F2)_genes_g_1 | |
| 896_Influenza_A_virus_(A/Shanghai/02/2013(H7N9))_segment_2_{—} | 44697 |
| polymerase_PB1_(PB1)_and_PB1-F2_protein_(PB1-F2)_genes_g_2 | |
| 896_Influenza_A_virus_(A/Shanghai/02/2013(H7N9))_segment_2_{—} | 44698 |
| polymerase_PB1_(PB1)_and_PB1-F2_protein_(PB1-F2)_genes_g_3 | |
| 896_Influenza_A_virus_(A/Shanghai/02/2013(H7N9))_segment_2_{—} | 44699 |
| polymerase_PB1_(PB1)_and_PB1-F2_protein_(PB1-F2)_genes_g_4 | |
| 896_Influenza_A_virus_(A/Shanghai/02/2013(H7N9))_segment_2_{—} | 44700 |
| polymerase_PB1_(PB1)_and_PB1-F2_protein_(PB1-F2)_genes_g_5 | |
| 897_Influenza_A_virus_(A/Shanghai/02/2013(H7N9))_segment_2_{—} | 44701 |
| polymerase_PB1_(PB1)_and_PB1-F2_protein_(PB1-F2)_genes_g_1 | |
| 897_Influenza_A_virus_(A/Shanghai/02/2013(H7N9))_segment_2_{—} | 44702 |
| polymerase_PB1_(PB1)_and_PB1-F2_protein_(PB1-F2)_genes_g_2 | |
| 897_Influenza_A_virus_(A/Shanghai/02/2013(H7N9))_segment_2_{—} | 44703 |
| polymerase_PB1_(PB1)_and_PB1-F2_protein_(PB1-F2)_genes_g_3 | |
| 897_Influenza_A_virus_(A/Shanghai/02/2013(H7N9))_segment_2_{—} | 44704 |
| polymerase_PB1_(PB1)_and_PB1-F2_protein_(PB1-F2)_genes_g_4 | |
| 897_Influenza_A_virus_(A/Shanghai/02/2013(H7N9))_segment_2_{—} | 44705 |
| polymerase_PB1_(PB1)_and_PB1-F2_protein_(PB1-F2)_genes_g_5 | |
| 898_Influenza_A_virus_(A/Shanghai/02/2013(H7N9))_segment_2_{—} | 44706 |
| polymerase_PB1_(PB1)_and_PB1-F2_protein_(PB1-F2)_genes_g_1 | |
| 898_Influenza_A_virus_(A/Shanghai/02/2013(H7N9))_segment_2_{—} | 44707 |
| polymerase_PB1_(PB1)_and_PB1-F2_protein_(PB1-F2)_genes_g_2 | |
| 898_Influenza_A_virus_(A/Shanghai/02/2013(H7N9))_segment_2_{—} | 44708 |
| polymerase_PB1_(PB1)_and_PB1-F2_protein_(PB1-F2)_genes_g_3 | |
| 898_Influenza_A_virus_(A/Shanghai/02/2013(H7N9))_segment_2_{—} | 44709 |
| polymerase_PB1_(PB1)_and_PB1-F2_protein_(PB1-F2)_genes_g_4 | |
| 898_Influenza_A_virus_(A/Shanghai/02/2013(H7N9))_segment_2_{—} | 44710 |
| polymerase_PB1_(PB1)_and_PB1-F2_protein_(PB1-F2)_genes_g_5 | |
| 899_Human_papillomavirus_type_63_g_1 | 44711 |
| 899_Human_papillomavirus_type_63_g_2 | 44712 |
| 899_Human_papillomavirus_type_63_g_3 | 44713 |
| 899_Human_papillomavirus_type_63_g_4 | 44714 |
| 899_Human_papillomavirus_type_63_g_5 | 44715 |
| 900_Human_papillomavirus_type_63_g_1 | 44716 |
| 900_Human_papillomavirus_type_63_g_2 | 44717 |
| 900_Human_papillomavirus_type_63_g_3 | 44718 |
| 900_Human_papillomavirus_type_63_g_4 | 44719 |
| 900_Human_papillomavirus_type_63_g_5 | 44720 |
| 901_Human_papillomavirus_type_63_g_1 | 44721 |
| 901_Human_papillomavirus_type_63_g_2 | 44722 |
| 901_Human_papillomavirus_type_63_g_3 | 44723 |
| 901_Human_papillomavirus_type_63_g_4 | 44724 |
| 901_Human_papillomavirus_type_63_g_5 | 44725 |
| 902_Human_papillomavirus_type_63_g_1 | 44726 |
| 902_Human_papillomavirus_type_63_g_2 | 44727 |
| 902_Human_papillomavirus_type_63_g_3 | 44728 |
| 902_Human_papillomavirus_type_63_g_4 | 44729 |
| 902_Human_papillomavirus_type_63_g_5 | 44730 |
| 903_Human_papillomavirus_type_63_g_1 | 44731 |
| 903_Human_papillomavirus_type_63_g_2 | 44732 |
| 903_Human_papillomavirus_type_63_g_3 | 44733 |
| 903_Human_papillomavirus_type_63_g_4 | 44734 |
| 903_Human_papillomavirus_type_63_g_5 | 44735 |
| 904_Human_papillomavirus_type_63_g_1 | 44736 |
| 904_Human_papillomavirus_type_63_g_2 | 44737 |
| 904_Human_papillomavirus_type_63_g_3 | 44738 |
| 904_Human_papillomavirus_type_63_g_4 | 44739 |
| 904_Human_papillomavirus_type_63_g_5 | 44740 |
| 905_Human_papillomavirus_type_63_g_1 | 44741 |
| 905_Human_papillomavirus_type_63_g_2 | 44742 |
| 905_Human_papillomavirus_type_63_g_3 | 44743 |
| 905_Human_papillomavirus_type_63_g_4 | 44744 |
| 905_Human_papillomavirus_type_63_g_5 | 44745 |
| 906_Human_papillomavirus_type_63_g_1 | 44746 |
| 906_Human_papillomavirus_type_63_g_2 | 44747 |
| 906_Human_papillomavirus_type_63_g_3 | 44748 |
| 906_Human_papillomavirus_type_63_g_4 | 44749 |
| 906_Human_papillomavirus_type_63_g_5 | 44750 |
| 907_Human_papillomavirus_type_63_g_1 | 44751 |
| 907_Human_papillomavirus_type_63_g_2 | 44752 |
| 907_Human_papillomavirus_type_63_g_3 | 44753 |
| 907_Human_papillomavirus_type_63_g_4 | 44754 |
| 907_Human_papillomavirus_type_63_g_5 | 44755 |
| 908_Human_papillomavirus_type_63_g_1 | 44756 |
| 908_Human_papillomavirus_type_63_g_2 | 44757 |
| 908_Human_papillomavirus_type_63_g_3 | 44758 |
| 908_Human_papillomavirus_type_63_g_4 | 44759 |
| 908_Human_papillomavirus_type_63_g_5 | 44760 |
| 909_Human_papillomavirus_type_63_g_1 | 44761 |
| 909_Human_papillomavirus_type_63_g_2 | 44762 |
| 909_Human_papillomavirus_type_63_g_3 | 44763 |
| 909_Human_papillomavirus_type_63_g_4 | 44764 |
| 909_Human_papillomavirus_type_63_g_5 | 44765 |
| 910_Human_papillomavirus_type_63_g_1 | 44766 |
| 910_Human_papillomavirus_type_63_g_2 | 44767 |
| 910_Human_papillomavirus_type_63_g_3 | 44768 |
| 910_Human_papillomavirus_type_63_g_4 | 44769 |
| 910_Human_papillomavirus_type_63_g_5 | 44770 |
| 911_Human_papillomavirus_type_63_g_1 | 44771 |
| 911_Human_papillomavirus_type_63_g_2 | 44772 |
| 911_Human_papillomavirus_type_63_g_3 | 44773 |
| 911_Human_papillomavirus_type_63_g_4 | 44774 |
| 911_Human_papillomavirus_type_63_g_5 | 44775 |
| 912_Human_papillomavirus_type_63_g_1 | 44776 |
| 912_Human_papillomavirus_type_63_g_2 | 44777 |
| 912_Human_papillomavirus_type_63_g_3 | 44778 |
| 912_Human_papillomavirus_type_63_g_4 | 44779 |
| 912_Human_papillomavirus_type_63_g_5 | 44780 |
| 913_Human_papillomavirus_type_63_g_1 | 44781 |
| 913_Human_papillomavirus_type_63_g_2 | 44782 |
| 913_Human_papillomavirus_type_63_g_3 | 44783 |
| 913_Human_papillomavirus_type_63_g_4 | 44784 |
| 913_Human_papillomavirus_type_63_g_5 | 44785 |
| 914_Human_papillomavirus_type_63_g_1 | 44786 |
| 914_Human_papillomavirus_type_63_g_2 | 44787 |
| 914_Human_papillomavirus_type_63_g_3 | 44788 |
| 914_Human_papillomavirus_type_63_g_4 | 44789 |
| 914_Human_papillomavirus_type_63_g_5 | 44790 |
| 915_Human_papillomavirus_type_63_g_1 | 44791 |
| 915_Human_papillomavirus_type_63_g_2 | 44792 |
| 915_Human_papillomavirus_type_63_g_3 | 44793 |
| 915_Human_papillomavirus_type_63_g_4 | 44794 |
| 915_Human_papillomavirus_type_63_g_5 | 44795 |
| 916_Human_papillomavirus_type_63_g_1 | 44796 |
| 916_Human_papillomavirus_type_63_g_2 | 44797 |
| 916_Human_papillomavirus_type_63_g_3 | 44798 |
| 916_Human_papillomavirus_type_63_g_4 | 44799 |
| 916_Human_papillomavirus_type_63_g_5 | 44800 |
| 917_Influenza_A_virus_(A/California/07/2009(H1N1))_{—} | 44801 |
| segment_5_nucleocapsid_protein_(NP)_gene_g_1 | |
| 917_Influenza_A_virus_(A/California/07/2009(H1N1))_{—} | 44802 |
| segment_5_nucleocapsid_protein_(NP)_gene_g_2 | |
| 917_Influenza_A_virus_(A/California/07/2009(H1N1))_{—} | 44803 |
| segment_5_nucleocapsid_protein_(NP)_gene_g_3 | |
| 917_Influenza_A_virus_(A/California/07/2009(H1N1))_{—} | 44804 |
| segment_5_nucleocapsid_protein_(NP)_gene_g_4 | |
| 917_Influenza_A_virus_(A/California/07/2009(H1N1))_{—} | 44805 |
| segment_5_nucleocapsid_protein_(NP)_gene_g_5 | |
| 918_Influenza_A_virus_(A/California/07/2009(H1N1))_{—} | 44806 |
| segment_5_nucleocapsid_protein_(NP)_gene_g_1 | |
| 918_Influenza_A_virus_(A/California/07/2009(H1N1))_{—} | 44807 |
| segment_5_nucleocapsid_protein_(NP)_gene_g_2 | |
| 918_Influenza_A_virus_(A/California/07/2009(H1N1))_{—} | 44808 |
| segment_5_nucleocapsid_protein_(NP)_gene_g_3 | |
| 918_Influenza_A_virus_(A/California/07/2009(H1N1))_{—} | 44809 |
| segment_5_nucleocapsid_protein_(NP)_gene_g_4 | |
| 918_Influenza_A_virus_(A/California/07/2009(H1N1))_{—} | 44810 |
| segment_5_nucleocapsid_protein_(NP)_gene_g_5 | |
| 919_Influenza_A_virus_(A/California/07/2009(H1N1))_{—} | 44811 |
| segment_5_nucleocapsid_protein_(NP)_gene_g_1 | |
| 919_Influenza_A_virus_(A/California/07/2009(H1N1))_{—} | 44812 |
| segment_5_nucleocapsid_protein_(NP)_gene_g_2 | |
| 919_Influenza_A_virus_(A/California/07/2009(H1N1))_{—} | 44813 |
| segment_5_nucleocapsid_protein_(NP)_gene_g_3 | |
| 919_Influenza_A_virus_(A/California/07/2009(H1N1))_{—} | 44814 |
| segment_5_nucleocapsid_protein_(NP)_gene_g_4 | |
| 919_Influenza_A_virus_(A/California/07/2009(H1N1))_{—} | 44815 |
| segment_5_nucleocapsid_protein_(NP)_gene_g_5 | |
| 920_Influenza_A_virus_(A/California/07/2009(H1N1))_{—} | 44816 |
| segment_5_nucleocapsid_protein_(NP)_gene_g_1 | |
| 920_Influenza_A_virus_(A/California/07/2009(H1N1))_{—} | 44817 |
| segment_5_nucleocapsid_protein_(NP)_gene_g_2 | |
| 920_Influenza_A_virus_(A/California/07/2009(H1N1))_{—} | 44818 |
| segment_5_nucleocapsid_protein_(NP)_gene_g_3 | |
| 920_Influenza_A_virus_(A/California/07/2009(H1N1))_{—} | 44819 |
| segment_5_nucleocapsid_protein_(NP)_gene_g_4 | |
| 920_Influenza_A_virus_(A/California/07/2009(H1N1))_{—} | 44820 |
| segment_5_nucleocapsid_protein_(NP)_gene_g_5 | |
| 921_Influenza_A_virus_(A/Puerto_Rico/8/1934(H1N1))_segment_6_g_1 | 44821 |
| 921_Influenza_A_virus_(A/Puerto_Rico/8/1934(H1N1))_segment_6_g_2 | 44822 |
| 921_Influenza_A_virus_(A/Puerto_Rico/8/1934(H1N1))_segment_6_g_3 | 44823 |
| 921_Influenza_A_virus_(A/Puerto_Rico/8/1934(H1N1))_segment_6_g_4 | 44824 |
| 921_Influenza_A_virus_(A/Puerto_Rico/8/1934(H1N1))_segment_6_g_5 | 44825 |
| 922_Influenza_A_virus_(A/Puerto_Rico/8/1934(H1N1))_segment_6_g_1 | 44826 |
| 922_Influenza_A_virus_(A/Puerto_Rico/8/1934(H1N1))_segment_6_g_2 | 44827 |
| 922_Influenza_A_virus_(A/Puerto_Rico/8/1934(H1N1))_segment_6_g_3 | 44828 |
| 922_Influenza_A_virus_(A/Puerto_Rico/8/1934(H1N1))_segment_6_g_4 | 44829 |
| 922_Influenza_A_virus_(A/Puerto_Rico/8/1934(H1N1))_segment_6_g_5 | 44830 |
| 923_Influenza_A_virus_(A/Puerto_Rico/8/1934(H1N1))_segment_6_g_1 | 44831 |
| 923_Influenza_A_virus_(A/Puerto_Rico/8/1934(H1N1))_segment_6_g_2 | 44832 |
| 923_Influenza_A_virus_(A/Puerto_Rico/8/1934(H1N1))_segment_6_g_3 | 44833 |
| 923_Influenza_A_virus_(A/Puerto_Rico/8/1934(H1N1))_segment_6_g_4 | 44834 |
| 923_Influenza_A_virus_(A/Puerto_Rico/8/1934(H1N1))_segment_6_g_5 | 44835 |
| 924_Influenza_A_virus_(A/Puerto_Rico/8/1934(H1N1))_segment_6_g_1 | 44836 |
| 924_Influenza_A_virus_(A/Puerto_Rico/8/1934(H1N1))_segment_6_g_2 | 44837 |
| 924_Influenza_A_virus_(A/Puerto_Rico/8/1934(H1N1))_segment_6_g_3 | 44838 |
| 924_Influenza_A_virus_(A/Puerto_Rico/8/1934(H1N1))_segment_6_g_4 | 44839 |
| 924_Influenza_A_virus_(A/Puerto_Rico/8/1934(H1N1))_segment_6_g_5 | 44840 |
| 925_Influenza_A_virus_(A/goose/Guangdong/1/1996(H5N1))_{—} | 44841 |
| polymerase_(PB1)_and_PB1-F2_protein_(PB1-F2)_genes_g_1 | |
| 925_Influenza_A_virus_(A/goose/Guangdong/1/1996(H5N1))_{—} | 44842 |
| polymerase_(PB1)_and_PB1-F2_protein_(PB1-F2)_genes_g_2 | |
| 925_Influenza_A_virus_(A/goose/Guangdong/1/1996(H5N1))_{—} | 44843 |
| polymerase_(PB1)_and_PB1-F2_protein_(PB1-F2)_genes_g_3 | |
| 925_Influenza_A_virus_(A/goose/Guangdong/1/1996(H5N1))_{—} | 44844 |
| polymerase_(PB1)_and_PB1-F2_protein_(PB1-F2)_genes_g_4 | |
| 925_Influenza_A_virus_(A/goose/Guangdong/1/1996(H5N1))_{—} | 44845 |
| polymerase_(PB1)_and_PB1-F2_protein_(PB1-F2)_genes_g_5 | |
| 926_Influenza_A_virus_(A/goose/Guangdong/1/1996(H5N1))_{—} | 44846 |
| polymerase_(PB1)_and_PB1-F2_protein_(PB1-F2)_genes_g_1 | |
| 926_Influenza_A_virus_(A/goose/Guangdong/1/1996(H5N1))_{—} | 44847 |
| polymerase_(PB1)_and_PB1-F2_protein_(PB1-F2)_genes_g_2 | |
| 926_Influenza_A_virus_(A/goose/Guangdong/1/1996(H5N1))_{—} | 44848 |
| polymerase_(PB1)_and_PB1-F2_protein_(PB1-F2)_genes_g_3 | |
| 926_Influenza_A_virus_(A/goose/Guangdong/1/1996(H5N1))_{—} | 44849 |
| polymerase_(PB1)_and_PB1-F2_protein_(PB1-F2)_genes_g_4 | |
| 926_Influenza_A_virus_(A/goose/Guangdong/1/1996(H5N1))_{—} | 44850 |
| polymerase_(PB1)_and_PB1-F2_protein_(PB1-F2)_genes_g_5 | |
| 927_Influenza_A_virus_(A/goose/Guangdong/1/1996(H5N1))_{—} | 44851 |
| polymerase_(PB1)_and_PB1-F2_protein_(PB1-F2)_genes_g_1 | |
| 927_Influenza_A_virus_(A/goose/Guangdong/1/1996(H5N1))_{—} | 44852 |
| polymerase_(PB1)_and_PB1-F2_protein_(PB1-F2)_genes_g_2 | |
| 927_Influenza_A_virus_(A/goose/Guangdong/1/1996(H5N1))_{—} | 44853 |
| polymerase_(PB1)_and_PB1-F2_protein_(PB1-F2)_genes_g_3 | |
| 927_Influenza_A_virus_(A/goose/Guangdong/1/1996(H5N1))_{—} | 44854 |
| polymerase_(PB1)_and_PB1-F2_protein_(PB1-F2)_genes_g_4 | |
| 927_Influenza_A_virus_(A/goose/Guangdong/1/1996(H5N1))_{—} | 44855 |
| polymerase_(PB1)_and_PB1-F2_protein_(PB1-F2)_genes_g_5 | |
| 928_Influenza_A_virus_(A/goose/Guangdong/1/1996(H5N1))_{—} | 44856 |
| polymerase_(PB1)_and_PB1-F2_protein_(PB1-F2)_genes_g_1 | |
| 928_Influenza_A_virus_(A/goose/Guangdong/1/1996(H5N1))_{—} | 44857 |
| polymerase_(PB1)_and_PB1-F2_protein_(PB1-F2)_genes_g_2 | |
| 928_Influenza_A_virus_(A/goose/Guangdong/1/1996(H5N1))_{—} | 44858 |
| polymerase_(PB1)_and_PB1-F2_protein_(PB1-F2)_genes_g_3 | |
| 928_Influenza_A_virus_(A/goose/Guangdong/1/1996(H5N1))_{—} | 44859 |
| polymerase_(PB1)_and_PB1-F2_protein_(PB1-F2)_genes_g_4 | |
| 928_Influenza_A_virus_(A/goose/Guangdong/1/1996(H5N1))_{—} | 44860 |
| polymerase_(PB1)_and_PB1-F2_protein_(PB1-F2)_genes_g_5 | |
| 929_Influenza_A_virus_(A/goose/Guangdong/1/1996(H5N1))_{—} | 44861 |
| polymerase_(PB1)_and_PB1-F2_protein_(PB1-F2)_genes_g_1 | |
| 929_Influenza_A_virus_(A/goose/Guangdong/1/1996(H5N1))_{—} | 44862 |
| polymerase_(PB1)_and_PB1-F2_protein_(PB1-F2)_genes_g_2 | |
| 929_Influenza_A_virus_(A/goose/Guangdong/1/1996(H5N1))_{—} | 44863 |
| polymerase_(PB1)_and_PB1-F2_protein_(PB1-F2)_genes_g_3 | |
| 929_Influenza_A_virus_(A/goose/Guangdong/1/1996(H5N1))_{—} | 44864 |
| polymerase_(PB1)_and_PB1-F2_protein_(PB1-F2)_genes_g_4 | |
| 929_Influenza_A_virus_(A/goose/Guangdong/1/1996(H5N1))_{—} | 44865 |
| polymerase_(PB1)_and_PB1-F2_protein_(PB1-F2)_genes_g_5 | |
| 930_Human_papillomavirus_—_18_g_1 | 44866 |
| 930_Human_papillomavirus_—_18_g_2 | 44867 |
| 930_Human_papillomavirus_—_18_g_3 | 44868 |
| 930_Human_papillomavirus_—_18_g_4 | 44869 |
| 930_Human_papillomavirus_—_18_g_5 | 44870 |
| 931_Human_papillomavirus_—_18_g_1 | 44871 |
| 931_Human_papillomavirus_—_18_g_2 | 44872 |
| 931_Human_papillomavirus_—_18_g_3 | 44873 |
| 931_Human_papillomavirus_—_18_g_4 | 44874 |
| 931_Human_papillomavirus_—_18_g_5 | 44875 |
| 932_Human_papillomavirus_—_18_g_1 | 44876 |
| 932_Human_papillomavirus_—_18_g_2 | 44877 |
| 932_Human_papillomavirus_—_18_g_3 | 44878 |
| 932_Human_papillomavirus_—_18_g_4 | 44879 |
| 932_Human_papillomavirus_—_18_g_5 | 44880 |
| 933_Human_papillomavirus_—_18_g_1 | 44881 |
| 933_Human_papillomavirus_—_18_g_2 | 44882 |
| 933_Human_papillomavirus_—_18_g_3 | 44883 |
| 933_Human_papillomavirus_—_18_g_4 | 44884 |
| 933_Human_papillomavirus_—_18_g_5 | 44885 |
| 934_Human_papillomavirus_—_18_g_1 | 44886 |
| 934_Human_papillomavirus_—_18_g_2 | 44887 |
| 934_Human_papillomavirus_—_18_g_3 | 44888 |
| 934_Human_papillomavirus_—_18_g_4 | 44889 |
| 934_Human_papillomavirus_—_18_g_5 | 44890 |
| 935_Human_papillomavirus_—_18_g_1 | 44891 |
| 935_Human_papillomavirus_—_18_g_2 | 44892 |
| 935_Human_papillomavirus_—_18_g_3 | 44893 |
| 935_Human_papillomavirus_—_18_g_4 | 44894 |
| 935_Human_papillomavirus_—_18_g_5 | 44895 |
| 936_Human_papillomavirus_—_18_g_1 | 44896 |
| 936_Human_papillomavirus_—_18_g_2 | 44897 |
| 936_Human_papillomavirus_—_18_g_3 | 44898 |
| 936_Human_papillomavirus_—_18_g_4 | 44899 |
| 936_Human_papillomavirus_—_18_g_5 | 44900 |
| 937_Human_papillomavirus_—_18_g_1 | 44901 |
| 937_Human_papillomavirus_—_18_g_2 | 44902 |
| 937_Human_papillomavirus_—_18_g_3 | 44903 |
| 937_Human_papillomavirus_—_18_g_4 | 44904 |
| 937_Human_papillomavirus_—_18_g_5 | 44905 |
| 938_Human_papillomavirus_—_18_g_1 | 44906 |
| 938_Human_papillomavirus_—_18_g_2 | 44907 |
| 938_Human_papillomavirus_—_18_g_3 | 44908 |
| 938_Human_papillomavirus_—_18_g_4 | 44909 |
| 938_Human_papillomavirus_—_18_g_5 | 44910 |
| 939_Human_papillomavirus_—_18_g_1 | 44911 |
| 939_Human_papillomavirus_—_18_g_2 | 44912 |
| 939_Human_papillomavirus_—_18_g_3 | 44913 |
| 939_Human_papillomavirus_—_18_g_4 | 44914 |
| 939_Human_papillomavirus_—_18_g_5 | 44915 |
| 940_Human_papillomavirus_—_18_g_1 | 44916 |
| 940_Human_papillomavirus_—_18_g_2 | 44917 |
| 940_Human_papillomavirus_—_18_g_3 | 44918 |
| 940_Human_papillomavirus_—_18_g_4 | 44919 |
| 940_Human_papillomavirus_—_18_g_5 | 44920 |
| 941_Human_papillomavirus_—_18_g_1 | 44921 |
| 941_Human_papillomavirus_—_18_g_2 | 44922 |
| 941_Human_papillomavirus_—_18_g_3 | 44923 |
| 941_Human_papillomavirus_—_18_g_4 | 44924 |
| 941_Human_papillomavirus_—_18_g_5 | 44925 |
| 942_Human_papillomavirus_—_18_g_1 | 44926 |
| 942_Human_papillomavirus_—_18_g_2 | 44927 |
| 942_Human_papillomavirus_—_18_g_3 | 44928 |
| 942_Human_papillomavirus_—_18_g_4 | 44929 |
| 942_Human_papillomavirus_—_18_g_5 | 44930 |
| 943_Human_papillomavirus_—_18_g_1 | 44931 |
| 943_Human_papillomavirus_—_18_g_2 | 44932 |
| 943_Human_papillomavirus_—_18_g_3 | 44933 |
| 943_Human_papillomavirus_—_18_g_4 | 44934 |
| 943_Human_papillomavirus_—_18_g_5 | 44935 |
| 944_Human_papillomavirus_—_18_g_1 | 44936 |
| 944_Human_papillomavirus_—_18_g_2 | 44937 |
| 944_Human_papillomavirus_—_18_g_3 | 44938 |
| 944_Human_papillomavirus_—_18_g_4 | 44939 |
| 944_Human_papillomavirus_—_18_g_5 | 44940 |
| 945_Human_papillomavirus_—_18_g_1 | 44941 |
| 945_Human_papillomavirus_—_18_g_2 | 44942 |
| 945_Human_papillomavirus_—_18_g_3 | 44943 |
| 945_Human_papillomavirus_—_18_g_4 | 44944 |
| 945_Human_papillomavirus_—_18_g_5 | 44945 |
| 946_Human_papillomavirus_—_18_g_1 | 44946 |
| 946_Human_papillomavirus_—_18_g_2 | 44947 |
| 946_Human_papillomavirus_—_18_g_3 | 44948 |
| 946_Human_papillomavirus_—_18_g_4 | 44949 |
| 946_Human_papillomavirus_—_18_g_5 | 44950 |
| 947_Influenza_A_virus_(A/Puerto_Rico/8/1934(H1N1))_segment_2_g_1 | 44951 |
| 947_Influenza_A_virus_(A/Puerto_Rico/8/1934(H1N1))_segment_2_g_2 | 44952 |
| 947_Influenza_A_virus_(A/Puerto_Rico/8/1934(H1N1))_segment_2_g_3 | 44953 |
| 947_Influenza_A_virus_(A/Puerto_Rico/8/1934(H1N1))_segment_2_g_4 | 44954 |
| 947_Influenza_A_virus_(A/Puerto_Rico/8/1934(H1N1))_segment_2_g_5 | 44955 |
| 948_Influenza_A_virus_(A/Puerto_Rico/8/1934(H1N1))_segment_2_g_1 | 44956 |
| 948_Influenza_A_virus_(A/Puerto_Rico/8/1934(H1N1))_segment_2_g_2 | 44957 |
| 948_Influenza_A_virus_(A/Puerto_Rico/8/1934(H1N1))_segment_2_g_3 | 44958 |
| 948_Influenza_A_virus_(A/Puerto_Rico/8/1934(H1N1))_segment_2_g_4 | 44959 |
| 948_Influenza_A_virus_(A/Puerto_Rico/8/1934(H1N1))_segment_2_g_5 | 44960 |
| 949_Influenza_A_virus_(A/Puerto_Rico/8/1934(H1N1))_segment_2_g_1 | 44961 |
| 949_Influenza_A_virus_(A/Puerto_Rico/8/1934(H1N1))_segment_2_g_2 | 44962 |
| 949_Influenza_A_virus_(A/Puerto_Rico/8/1934(H1N1))_segment_2_g_3 | 44963 |
| 949_Influenza_A_virus_(A/Puerto_Rico/8/1934(H1N1))_segment_2_g_4 | 44964 |
| 949_Influenza_A_virus_(A/Puerto_Rico/8/1934(H1N1))_segment_2_g_5 | 44965 |
| 950_Influenza_A_virus_(A/Puerto_Rico/8/1934(H1N1))_segment_2_g_1 | 44966 |
| 950_Influenza_A_virus_(A/Puerto_Rico/8/1934(H1N1))_segment_2_g_2 | 44967 |
| 950_Influenza_A_virus_(A/Puerto_Rico/8/1934(H1N1))_segment_2_g_3 | 44968 |
| 950_Influenza_A_virus_(A/Puerto_Rico/8/1934(H1N1))_segment_2_g_4 | 44969 |
| 950_Influenza_A_virus_(A/Puerto_Rico/8/1934(H1N1))_segment_2_g_5 | 44970 |
| 951_Influenza_A_virus_(A/Puerto_Rico/8/1934(H1N1))_segment_2_g_1 | 44971 |
| 951_Influenza_A_virus_(A/Puerto_Rico/8/1934(H1N1))_segment_2_g_2 | 44972 |
| 951_Influenza_A_virus_(A/Puerto_Rico/8/1934(H1N1))_segment_2_g_3 | 44973 |
| 951_Influenza_A_virus_(A/Puerto_Rico/8/1934(H1N1))_segment_2_g_4 | 44974 |
| 951_Influenza_A_virus_(A/Puerto_Rico/8/1934(H1N1))_segment_2_g_5 | 44975 |
| 952_Influenza_A_virus_(A/Puerto_Rico/8/1934(H1N1))_segment_2_g_1 | 44976 |
| 952_Influenza_A_virus_(A/Puerto_Rico/8/1934(H1N1))_segment_2_g_2 | 44977 |
| 952_Influenza_A_virus_(A/Puerto_Rico/8/1934(H1N1))_segment_2_g_3 | 44978 |
| 952_Influenza_A_virus_(A/Puerto_Rico/8/1934(H1N1))_segment_2_g_4 | 44979 |
| 952_Influenza_A_virus_(A/Puerto_Rico/8/1934(H1N1))_segment_2_g_5 | 44980 |
| 953_Hepatitis_GB_virus_A_g_1 | 44981 |
| 953_Hepatitis_GB_virus_A_g_2 | 44982 |
| 953_Hepatitis_GB_virus_A_g_3 | 44983 |
| 953_Hepatitis_GB_virus_A_g_4 | 44984 |
| 953_Hepatitis_GB_virus_A_g_5 | 44985 |
| 954_Hepatitis_GB_virus_A_g_1 | 44986 |
| 954_Hepatitis_GB_virus_A_g_2 | 44987 |
| 954_Hepatitis_GB_virus_A_g_3 | 44988 |
| 954_Hepatitis_GB_virus_A_g_4 | 44989 |
| 954_Hepatitis_GB_virus_A_g_5 | 44990 |
| 955_Hepatitis_GB_virus_A_g_1 | 44991 |
| 955_Hepatitis_GB_virus_A_g_2 | 44992 |
| 955_Hepatitis_GB_virus_A_g_3 | 44993 |
| 955_Hepatitis_GB_virus_A_g_4 | 44994 |
| 955_Hepatitis_GB_virus_A_g_5 | 44995 |
| 956_Hepatitis_GB_virus_A_g_1 | 44996 |
| 956_Hepatitis_GB_virus_A_g_2 | 44997 |
| 956_Hepatitis_GB_virus_A_g_3 | 44998 |
| 956_Hepatitis_GB_virus_A_g_4 | 44999 |
| 956_Hepatitis_GB_virus_A_g_5 | 45000 |
| 957_Hepatitis_GB_virus_A_g_1 | 45001 |
| 957_Hepatitis_GB_virus_A_g_2 | 45002 |
| 957_Hepatitis_GB_virus_A_g_3 | 45003 |
| 957_Hepatitis_GB_virus_A_g_4 | 45004 |
| 957_Hepatitis_GB_virus_A_g_5 | 45005 |
| 958_Hepatitis_GB_virus_A_g_1 | 45006 |
| 958_Hepatitis_GB_virus_A_g_2 | 45007 |
| 958_Hepatitis_GB_virus_A_g_3 | 45008 |
| 958_Hepatitis_GB_virus_A_g_4 | 45009 |
| 958_Hepatitis_GB_virus_A_g_5 | 45010 |
| 959_Hepatitis_GB_virus_A_g_1 | 45011 |
| 959_Hepatitis_GB_virus_A_g_2 | 45012 |
| 959_Hepatitis_GB_virus_A_g_3 | 45013 |
| 959_Hepatitis_GB_virus_A_g_4 | 45014 |
| 959_Hepatitis_GB_virus_A_g_5 | 45015 |
| 960_Hepatitis_GB_virus_A_g_1 | 45016 |
| 960_Hepatitis_GB_virus_A_g_2 | 45017 |
| 960_Hepatitis_GB_virus_A_g_3 | 45018 |
| 960_Hepatitis_GB_virus_A_g_4 | 45019 |
| 960_Hepatitis_GB_virus_A_g_5 | 45020 |
| 961_Hepatitis_GB_virus_A_g_1 | 45021 |
| 961_Hepatitis_GB_virus_A_g_2 | 45022 |
| 961_Hepatitis_GB_virus_A_g_3 | 45023 |
| 961_Hepatitis_GB_virus_A_g_4 | 45024 |
| 961_Hepatitis_GB_virus_A_g_5 | 45025 |
| 962_Hepatitis_GB_virus_A_g_1 | 45026 |
| 962_Hepatitis_GB_virus_A_g_2 | 45027 |
| 962_Hepatitis_GB_virus_A_g_3 | 45028 |
| 962_Hepatitis_GB_virus_A_g_4 | 45029 |
| 962_Hepatitis_GB_virus_A_g_5 | 45030 |
| 963_Hepatitis_GB_virus_A_g_1 | 45031 |
| 963_Hepatitis_GB_virus_A_g_2 | 45032 |
| 963_Hepatitis_GB_virus_A_g_3 | 45033 |
| 963_Hepatitis_GB_virus_A_g_4 | 45034 |
| 963_Hepatitis_GB_virus_A_g_5 | 45035 |
| 964_Hepatitis_GB_virus_A_g_1 | 45036 |
| 964_Hepatitis_GB_virus_A_g_2 | 45037 |
| 964_Hepatitis_GB_virus_A_g_3 | 45038 |
| 964_Hepatitis_GB_virus_A_g_4 | 45039 |
| 964_Hepatitis_GB_virus_A_g_5 | 45040 |
| 965_Hepatitis_GB_virus_A_g_1 | 45041 |
| 965_Hepatitis_GB_virus_A_g_2 | 45042 |
| 965_Hepatitis_GB_virus_A_g_3 | 45043 |
| 965_Hepatitis_GB_virus_A_g_4 | 45044 |
| 965_Hepatitis_GB_virus_A_g_5 | 45045 |
| 966_Hepatitis_GB_virus_A_g_1 | 45046 |
| 966_Hepatitis_GB_virus_A_g_2 | 45047 |
| 966_Hepatitis_GB_virus_A_g_3 | 45048 |
| 966_Hepatitis_GB_virus_A_g_4 | 45049 |
| 966_Hepatitis_GB_virus_A_g_5 | 45050 |
| 967_Hepatitis_GB_virus_A_g_1 | 45051 |
| 967_Hepatitis_GB_virus_A_g_2 | 45052 |
| 967_Hepatitis_GB_virus_A_g_3 | 45053 |
| 967_Hepatitis_GB_virus_A_g_4 | 45054 |
| 967_Hepatitis_GB_virus_A_g_5 | 45055 |
| 969_Hepatitis_GB_virus_A_g_1 | 45056 |
| 969_Hepatitis_GB_virus_A_g_2 | 45057 |
| 969_Hepatitis_GB_virus_A_g_3 | 45058 |
| 969_Hepatitis_GB_virus_A_g_4 | 45059 |
| 969_Hepatitis_GB_virus_A_g_5 | 45060 |
| 970_Hepatitis_GB_virus_A_g_1 | 45061 |
| 970_Hepatitis_GB_virus_A_g_2 | 45062 |
| 970_Hepatitis_GB_virus_A_g_3 | 45063 |
| 970_Hepatitis_GB_virus_A_g_4 | 45064 |
| 971_Hepatitis_GB_virus_A_g_1 | 45065 |
| 971_Hepatitis_GB_virus_A_g_2 | 45066 |
| 971_Hepatitis_GB_virus_A_g_3 | 45067 |
| 971_Hepatitis_GB_virus_A_g_4 | 45068 |
| 971_Hepatitis_GB_virus_A_g_5 | 45069 |
| 972_Hepatitis_GB_virus_A_g_1 | 45070 |
| 972_Hepatitis_GB_virus_A_g_2 | 45071 |
| 972_Hepatitis_GB_virus_A_g_3 | 45072 |
| 973_Hepatitis_GB_virus_A_g_1 | 45073 |
| 973_Hepatitis_GB_virus_A_g_2 | 45074 |
| 973_Hepatitis_GB_virus_A_g_3 | 45075 |
| 973_Hepatitis_GB_virus_A_g_4 | 45076 |
| 973_Hepatitis_GB_virus_A_g_5 | 45077 |
| 974_Hepatitis_GB_virus_A_g_1 | 45078 |
| 974_Hepatitis_GB_virus_A_g_2 | 45079 |
| 974_Hepatitis_GB_virus_A_g_3 | 45080 |
| 974_Hepatitis_GB_virus_A_g_4 | 45081 |
| 974_Hepatitis_GB_virus_A_g_5 | 45082 |
| 975_Hepatitis_GB_virus_A_g_1 | 45083 |
| 975_Hepatitis_GB_virus_A_g_2 | 45084 |
| 975_Hepatitis_GB_virus_A_g_3 | 45085 |
| 976_Hepatitis_GB_virus_A_g_1 | 45086 |
| 976_Hepatitis_GB_virus_A_g_2 | 45087 |
| 976_Hepatitis_GB_virus_A_g_3 | 45088 |
| 976_Hepatitis_GB_virus_A_g_4 | 45089 |
| 977_Hepatitis_GB_virus_A_g_1 | 45090 |
| 977_Hepatitis_GB_virus_A_g_2 | 45091 |
| 977_Hepatitis_GB_virus_A_g_3 | 45092 |
| 977_Hepatitis_GB_virus_A_g_4 | 45093 |
| 977_Hepatitis_GB_virus_A_g_5 | 45094 |
| 978_Hepatitis_GB_virus_A_g_1 | 45095 |
| 978_Hepatitis_GB_virus_A_g_2 | 45096 |
| 978_Hepatitis_GB_virus_A_g_3 | 45097 |
| 978_Hepatitis_GB_virus_A_g_4 | 45098 |
| 978_Hepatitis_GB_virus_A_g_5 | 45099 |
| 979_Hepatitis_GB_virus_A_g_1 | 45100 |
| 979_Hepatitis_GB_virus_A_g_2 | 45101 |
| 979_Hepatitis_GB_virus_A_g_3 | 45102 |
| 979_Hepatitis_GB_virus_A_g_4 | 45103 |
| 979_Hepatitis_GB_virus_A_g_5 | 45104 |
| 980_Human_papillomoavirus_type_5_g_1 | 45105 |
| 980_Human_papillomoavirus_type_5_g_2 | 45106 |
| 980_Human_papillomoavirus_type_5_g_3 | 45107 |
| 980_Human_papillomoavirus_type_5_g_4 | 45108 |
| 980_Human_papillomoavirus_type_5_g_5 | 45109 |
| 981_Human_papillomoavirus_type_5_g_1 | 45110 |
| 981_Human_papillomoavirus_type_5_g_2 | 45111 |
| 981_Human_papillomoavirus_type_5_g_3 | 45112 |
| 981_Human_papillomoavirus_type_5_g_4 | 45113 |
| 981_Human_papillomoavirus_type_5_g_5 | 45114 |
| 982_Human_papillomoavirus_type_5_g_1 | 45115 |
| 982_Human_papillomoavirus_type_5_g_2 | 45116 |
| 982_Human_papillomoavirus_type_5_g_3 | 45117 |
| 982_Human_papillomoavirus_type_5_g_4 | 45118 |
| 982_Human_papillomoavirus_type_5_g_5 | 45119 |
| 983_Human_papillomoavirus_type_5_g_1 | 45120 |
| 983_Human_papillomoavirus_type_5_g_2 | 45121 |
| 983_Human_papillomoavirus_type_5_g_3 | 45122 |
| 983_Human_papillomoavirus_type_5_g_4 | 45123 |
| 983_Human_papillomoavirus_type_5_g_5 | 45124 |
| 984_Human_papillomoavirus_type_5_g_1 | 45125 |
| 984_Human_papillomoavirus_type_5_g_2 | 45126 |
| 984_Human_papillomoavirus_type_5_g_3 | 45127 |
| 984_Human_papillomoavirus_type_5_g_4 | 45128 |
| 984_Human_papillomoavirus_type_5_g_5 | 45129 |
| 985_Human_papillomoavirus_type_5_g_1 | 45130 |
| 985_Human_papillomoavirus_type_5_g_2 | 45131 |
| 985_Human_papillomoavirus_type_5_g_3 | 45132 |
| 985_Human_papillomoavirus_type_5_g_4 | 45133 |
| 985_Human_papillomoavirus_type_5_g_5 | 45134 |
| 986_Human_papillomoavirus_type_5_g_1 | 45135 |
| 986_Human_papillomoavirus_type_5_g_2 | 45136 |
| 986_Human_papillomoavirus_type_5_g_3 | 45137 |
| 986_Human_papillomoavirus_type_5_g_4 | 45138 |
| 986_Human_papillomoavirus_type_5_g_5 | 45139 |
| 987_Human_papillomoavirus_type_5_g_1 | 45140 |
| 987_Human_papillomoavirus_type_5_g_2 | 45141 |
| 987_Human_papillomoavirus_type_5_g_3 | 45142 |
| 987_Human_papillomoavirus_type_5_g_4 | 45143 |
| 987_Human_papillomoavirus_type_5_g_5 | 45144 |
| 988_Human_papillomoavirus_type_5_g_1 | 45145 |
| 988_Human_papillomoavirus_type_5_g_2 | 45146 |
| 988_Human_papillomoavirus_type_5_g_3 | 45147 |
| 988_Human_papillomoavirus_type_5_g_4 | 45148 |
| 988_Human_papillomoavirus_type_5_g_5 | 45149 |
| 989_Human_papillomoavirus_type_5_g_1 | 45150 |
| 989_Human_papillomoavirus_type_5_g_2 | 45151 |
| 989_Human_papillomoavirus_type_5_g_3 | 45152 |
| 989_Human_papillomoavirus_type_5_g_4 | 45153 |
| 990_Human_papillomoavirus_type_5_g_1 | 45154 |
| 990_Human_papillomoavirus_type_5_g_2 | 45155 |
| 990_Human_papillomoavirus_type_5_g_3 | 45156 |
| 990_Human_papillomoavirus_type_5_g_4 | 45157 |
| 990_Human_papillomoavirus_type_5_g_5 | 45158 |
| 991_Human_papillomoavirus_type_5_g_1 | 45159 |
| 991_Human_papillomoavirus_type_5_g_2 | 45160 |
| 991_Human_papillomoavirus_type_5_g_3 | 45161 |
| 991_Human_papillomoavirus_type_5_g_4 | 45162 |
| 991_Human_papillomoavirus_type_5_g_5 | 45163 |
| 992_Human_papillomoavirus_type_5_g_1 | 45164 |
| 992_Human_papillomoavirus_type_5_g_2 | 45165 |
| 992_Human_papillomoavirus_type_5_g_3 | 45166 |
| 992_Human_papillomoavirus_type_5_g_4 | 45167 |
| 992_Human_papillomoavirus_type_5_g_5 | 45168 |
| 993_Human_papillomoavirus_type_5_g_1 | 45169 |
| 993_Human_papillomoavirus_type_5_g_2 | 45170 |
| 993_Human_papillomoavirus_type_5_g_3 | 45171 |
| 993_Human_papillomoavirus_type_5_g_4 | 45172 |
| 993_Human_papillomoavirus_type_5_g_5 | 45173 |
| 994_Human_papillomoavirus_type_5_g_1 | 45174 |
| 994_Human_papillomoavirus_type_5_g_2 | 45175 |
| 994_Human_papillomoavirus_type_5_g_3 | 45176 |
| 994_Human_papillomoavirus_type_5_g_4 | 45177 |
| 994_Human_papillomoavirus_type_5_g_5 | 45178 |
| 995_Human_papillomoavirus_type_5_g_1 | 45179 |
| 995_Human_papillomoavirus_type_5_g_2 | 45180 |
| 995_Human_papillomoavirus_type_5_g_3 | 45181 |
| 995_Human_papillomoavirus_type_5_g_4 | 45182 |
| 995_Human_papillomoavirus_type_5_g_5 | 45183 |
| 996_Human_papillomoavirus_type_5_g_1 | 45184 |
| 996_Human_papillomoavirus_type_5_g_2 | 45185 |
| 996_Human_papillomoavirus_type_5_g_3 | 45186 |
| 996_Human_papillomoavirus_type_5_g_4 | 45187 |
| 996_Human_papillomoavirus_type_5_g_5 | 45188 |
| 997_Human_papillomoavirus_type_5_g_1 | 45189 |
| 997_Human_papillomoavirus_type_5_g_2 | 45190 |
| 997_Human_papillomoavirus_type_5_g_3 | 45191 |
| 997_Human_papillomoavirus_type_5_g_4 | 45192 |
| 997_Human_papillomoavirus_type_5_g_5 | 45193 |
| 998_Influenza_A_virus_na_gene_for_neuraminidase_g_1 | 45194 |
| 998_Influenza_A_virus_na_gene_for_neuraminidase_g_2 | 45195 |
| 998_Influenza_A_virus_na_gene_for_neuraminidase_g_3 | 45196 |
| 998_Influenza_A_virus_na_gene_for_neuraminidase_g_4 | 45197 |
| 998_Influenza_A_virus_na_gene_for_neuraminidase_g_5 | 45198 |
| 999_Influenza_A_virus_na_gene_for_neuraminidase_g_1 | 45199 |
| 999_Influenza_A_virus_na_gene_for_neuraminidase_g_2 | 45200 |
| 999_Influenza_A_virus_na_gene_for_neuraminidase_g_3 | 45201 |
| 999_Influenza_A_virus_na_gene_for_neuraminidase_g_4 | 45202 |
| 999_Influenza_A_virus_na_gene_for_neuraminidase_g_5 | 45203 |
| 1000_Influenza_A_virus_na_gene_for_neuraminidase_g_1 | 45204 |
| 1000_Influenza_A_virus_na_gene_for_neuraminidase_g_2 | 45205 |
| 1000_Influenza_A_virus_na_gene_for_neuraminidase_g_3 | 45206 |
| 1000_Influenza_A_virus_na_gene_for_neuraminidase_g_4 | 45207 |
| 1000_Influenza_A_virus_na_gene_for_neuraminidase_g_5 | 45208 |
| 1001_Influenza_A_virus_na_gene_for_neuraminidase_g_1 | 45209 |
| 1001_Influenza_A_virus_na_gene_for_neuraminidase_g_2 | 45210 |
| 1001_Influenza_A_virus_na_gene_for_neuraminidase_g_3 | 45211 |
| 1001_Influenza_A_virus_na_gene_for_neuraminidase_g_4 | 45212 |
| 1001_Influenza_A_virus_na_gene_for_neuraminidase_g_5 | 45213 |
| 1002_Influenza_A_virus_na_gene_for_neuraminidase_g_1 | 45214 |
| 1002_Influenza_A_virus_na_gene_for_neuraminidase_g_2 | 45215 |
| 1002_Influenza_A_virus_na_gene_for_neuraminidase_g_3 | 45216 |
| 1002_Influenza_A_virus_na_gene_for_neuraminidase_g_4 | 45217 |
| 1002_Influenza_A_virus_na_gene_for_neuraminidase_g_5 | 45218 |
| 1003_Influenza_B_virus_(B/Lee/1940)_segment_5_g_1 | 45219 |
| 1003_Influenza_B_virus_(B/Lee/1940)_segment_5_g_2 | 45220 |
| 1003_Influenza_B_virus_(B/Lee/1940)_segment_5_g_3 | 45221 |
| 1003_Influenza_B_virus_(B/Lee/1940)_segment_5_g_4 | 45222 |
| 1003_Influenza_B_virus_(B/Lee/1940)_segment_5_g_5 | 45223 |
| 1004_Influenza_B_virus_(B/Lee/1940)_segment_5_g_1 | 45224 |
| 1004_Influenza_B_virus_(B/Lee/1940)_segment_5_g_2 | 45225 |
| 1004_Influenza_B_virus_(B/Lee/1940)_segment_5_g_3 | 45226 |
| 1004_Influenza_B_virus_(B/Lee/1940)_segment_5_g_4 | 45227 |
| 1004_Influenza_B_virus_(B/Lee/1940)_segment_5_g_5 | 45228 |
| 1005_Influenza_B_virus_(B/Lee/1940)_segment_5_g_1 | 45229 |
| 1005_Influenza_B_virus_(B/Lee/1940)_segment_5_g_2 | 45230 |
| 1005_Influenza_B_virus_(B/Lee/1940)_segment_5_g_3 | 45231 |
| 1005_Influenza_B_virus_(B/Lee/1940)_segment_5_g_4 | 45232 |
| 1005_Influenza_B_virus_(B/Lee/1940)_segment_5_g_5 | 45233 |
| 1006_Human_papillomavirus_type_172_g_1 | 45234 |
| 1006_Human_papillomavirus_type_172_g_2 | 45235 |
| 1006_Human_papillomavirus_type_172_g_3 | 45236 |
| 1006_Human_papillomavirus_type_172_g_4 | 45237 |
| 1006_Human_papillomavirus_type_172_g_5 | 45238 |
| 1007_Human_papillomavirus_type_172_g_1 | 45239 |
| 1007_Human_papillomavirus_type_172_g_2 | 45240 |
| 1007_Human_papillomavirus_type_172_g_3 | 45241 |
| 1007_Human_papillomavirus_type_172_g_4 | 45242 |
| 1007_Human_papillomavirus_type_172_g_5 | 45243 |
| 1008_Human_papillomavirus_type_172_g_1 | 45244 |
| 1008_Human_papillomavirus_type_172_g_2 | 45245 |
| 1008_Human_papillomavirus_type_172_g_3 | 45246 |
| 1008_Human_papillomavirus_type_172_g_4 | 45247 |
| 1008_Human_papillomavirus_type_172_g_5 | 45248 |
| 1009_Human_papillomavirus_type_172_g_1 | 45249 |
| 1009_Human_papillomavirus_type_172_g_2 | 45250 |
| 1009_Human_papillomavirus_type_172_g_3 | 45251 |
| 1009_Human_papillomavirus_type_172_g_4 | 45252 |
| 1009_Human_papillomavirus_type_172_g_5 | 45253 |
| 1010_Human_papillomavirus_type_172_g_1 | 45254 |
| 1010_Human_papillomavirus_type_172_g_2 | 45255 |
| 1010_Human_papillomavirus_type_172_g_3 | 45256 |
| 1010_Human_papillomavirus_type_172_g_4 | 45257 |
| 1010_Human_papillomavirus_type_172_g_5 | 45258 |
| 1011_Human_papillomavirus_type_172_g_1 | 45259 |
| 1011_Human_papillomavirus_type_172_g_2 | 45260 |
| 1011_Human_papillomavirus_type_172_g_3 | 45261 |
| 1011_Human_papillomavirus_type_172_g_4 | 45262 |
| 1011_Human_papillomavirus_type_172_g_5 | 45263 |
| 1012_Human_papillomavirus_type_172_g_1 | 45264 |
| 1012_Human_papillomavirus_type_172_g_2 | 45265 |
| 1012_Human_papillomavirus_type_172_g_3 | 45266 |
| 1012_Human_papillomavirus_type_172_g_4 | 45267 |
| 1012_Human_papillomavirus_type_172_g_5 | 45268 |
| 1013_Human_papillomavirus_type_172_g_1 | 45269 |
| 1013_Human_papillomavirus_type_172_g_2 | 45270 |
| 1013_Human_papillomavirus_type_172_g_3 | 45271 |
| 1013_Human_papillomavirus_type_172_g_4 | 45272 |
| 1013_Human_papillomavirus_type_172_g_5 | 45273 |
| 1014_Human_papillomavirus_type_172_g_1 | 45274 |
| 1014_Human_papillomavirus_type_172_g_2 | 45275 |
| 1014_Human_papillomavirus_type_172_g_3 | 45276 |
| 1014_Human_papillomavirus_type_172_g_4 | 45277 |
| 1014_Human_papillomavirus_type_172_g_5 | 45278 |
| 1015_Human_papillomavirus_type_172_g_1 | 45279 |
| 1015_Human_papillomavirus_type_172_g_2 | 45280 |
| 1015_Human_papillomavirus_type_172_g_3 | 45281 |
| 1015_Human_papillomavirus_type_172_g_4 | 45282 |
| 1015_Human_papillomavirus_type_172_g_5 | 45283 |
| 1016_Human_papillomavirus_type_172_g_1 | 45284 |
| 1016_Human_papillomavirus_type_172_g_2 | 45285 |
| 1016_Human_papillomavirus_type_172_g_3 | 45286 |
| 1016_Human_papillomavirus_type_172_g_4 | 45287 |
| 1016_Human_papillomavirus_type_172_g_5 | 45288 |
| 1017_Human_papillomavirus_type_172_g_1 | 45289 |
| 1017_Human_papillomavirus_type_172_g_2 | 45290 |
| 1017_Human_papillomavirus_type_172_g_3 | 45291 |
| 1017_Human_papillomavirus_type_172_g_4 | 45292 |
| 1017_Human_papillomavirus_type_172_g_5 | 45293 |
| 1018_Human_papillomavirus_type_172_g_1 | 45294 |
| 1018_Human_papillomavirus_type_172_g_2 | 45295 |
| 1018_Human_papillomavirus_type_172_g_3 | 45296 |
| 1018_Human_papillomavirus_type_172_g_4 | 45297 |
| 1018_Human_papillomavirus_type_172_g_5 | 45298 |
| 1019_Human_papillomavirus_type_172_g_1 | 45299 |
| 1019_Human_papillomavirus_type_172_g_2 | 45300 |
| 1019_Human_papillomavirus_type_172_g_3 | 45301 |
| 1019_Human_papillomavirus_type_172_g_4 | 45302 |
| 1019_Human_papillomavirus_type_172_g_5 | 45303 |
| 1020_Human_papillomavirus_type_172_g_1 | 45304 |
| 1020_Human_papillomavirus_type_172_g_2 | 45305 |
| 1020_Human_papillomavirus_type_172_g_3 | 45306 |
| 1020_Human_papillomavirus_type_172_g_4 | 45307 |
| 1020_Human_papillomavirus_type_172_g_5 | 45308 |
| 1021_Human_papillomavirus_type_172_g_1 | 45309 |
| 1021_Human_papillomavirus_type_172_g_2 | 45310 |
| 1021_Human_papillomavirus_type_172_g_3 | 45311 |
| 1021_Human_papillomavirus_type_172_g_4 | 45312 |
| 1021_Human_papillomavirus_type_172_g_5 | 45313 |
| 1022_Influenza_A_virus_(A/New_York/392/2004(H3N2))_segment_2_g_1 | 45314 |
| 1022_Influenza_A_virus_(A/New_York/392/2004(H3N2))_segment_2_g_2 | 45315 |
| 1022_Influenza_A_virus_(A/New_York/392/2004(H3N2))_segment_2_g_3 | 45316 |
| 1022_Influenza_A_virus_(A/New_York/392/2004(H3N2))_segment_2_g_4 | 45317 |
| 1022_Influenza_A_virus_(A/New_York/392/2004(H3N2))_segment_2_g_5 | 45318 |
| 1023_Influenza_A_virus_(A/New_York/392/2004(H3N2))_segment_2_g_1 | 45319 |
| 1023_Influenza_A_virus_(A/New_York/392/2004(H3N2))_segment_2_g_2 | 45320 |
| 1023_Influenza_A_virus_(A/New_York/392/2004(H3N2))_segment_2_g_3 | 45321 |
| 1023_Influenza_A_virus_(A/New_York/392/2004(H3N2))_segment_2_g_4 | 45322 |
| 1023_Influenza_A_virus_(A/New_York/392/2004(H3N2))_segment_2_g_5 | 45323 |
| 1024_Influenza_A_virus_(A/New_York/392/2004(H3N2))_segment_2_g_1 | 45324 |
| 1024_Influenza_A_virus_(A/New_York/392/2004(H3N2))_segment_2_g_2 | 45325 |
| 1024_Influenza_A_virus_(A/New_York/392/2004(H3N2))_segment_2_g_3 | 45326 |
| 1024_Influenza_A_virus_(A/New_York/392/2004(H3N2))_segment_2_g_4 | 45327 |
| 1024_Influenza_A_virus_(A/New_York/392/2004(H3N2))_segment_2_g_5 | 45328 |
| 1025_Influenza_A_virus_(A/New_York/392/2004(H3N2))_segment_2_g_1 | 45329 |
| 1025_Influenza_A_virus_(A/New_York/392/2004(H3N2))_segment_2_g_2 | 45330 |
| 1025_Influenza_A_virus_(A/New_York/392/2004(H3N2))_segment_2_g_3 | 45331 |
| 1025_Influenza_A_virus_(A/New_York/392/2004(H3N2))_segment_2_g_4 | 45332 |
| 1025_Influenza_A_virus_(A/New_York/392/2004(H3N2))_segment_2_g_5 | 45333 |
| 1026_Influenza_A_virus_(A/New_York/392/2004(H3N2))_segment_2_g_1 | 45334 |
| 1026_Influenza_A_virus_(A/New_York/392/2004(H3N2))_segment_2_g_2 | 45335 |
| 1026_Influenza_A_virus_(A/New_York/392/2004(H3N2))_segment_2_g_3 | 45336 |
| 1026_Influenza_A_virus_(A/New_York/392/2004(H3N2))_segment_2_g_4 | 45337 |
| 1026_Influenza_A_virus_(A/New_York/392/2004(H3N2))_segment_2_g_5 | 45338 |
| 1027_Influenza_A_virus_(A/New_York/392/2004(H3N2))_segment_2_g_1 | 45339 |
| 1027_Influenza_A_virus_(A/New_York/392/2004(H3N2))_segment_2_g_2 | 45340 |
| 1027_Influenza_A_virus_(A/New_York/392/2004(H3N2))_segment_2_g_3 | 45341 |
| 1027_Influenza_A_virus_(A/New_York/392/2004(H3N2))_segment_2_g_4 | 45342 |
| 1027_Influenza_A_virus_(A/New_York/392/2004(H3N2))_segment_2_g_5 | 45343 |
| 1028_Influenza_A_virus_(A/New_York/392/2004(H3N2))_segment_2_g_1 | 45344 |
| 1028_Influenza_A_virus_(A/New_York/392/2004(H3N2))_segment_2_g_2 | 45345 |
| 1028_Influenza_A_virus_(A/New_York/392/2004(H3N2))_segment_2_g_3 | 45346 |
| 1028_Influenza_A_virus_(A/New_York/392/2004(H3N2))_segment_2_g_4 | 45347 |
| 1028_Influenza_A_virus_(A/New_York/392/2004(H3N2))_segment_2_g_5 | 45348 |
| 1029_Influenza_A_virus_(A/New_York/392/2004(H3N2))_segment_2_g_1 | 45349 |
| 1029_Influenza_A_virus_(A/New_York/392/2004(H3N2))_segment_2_g_2 | 45350 |
| 1029_Influenza_A_virus_(A/New_York/392/2004(H3N2))_segment_2_g_3 | 45351 |
| 1029_Influenza_A_virus_(A/New_York/392/2004(H3N2))_segment_2_g_4 | 45352 |
| 1029_Influenza_A_virus_(A/New_York/392/2004(H3N2))_segment_2_g_5 | 45353 |
| 1030_Influenza_A_virus_(A/New_York/392/2004(H3N2))_segment_2_g_1 | 45354 |
| 1030_Influenza_A_virus_(A/New_York/392/2004(H3N2))_segment_2_g_2 | 45355 |
| 1030_Influenza_A_virus_(A/New_York/392/2004(H3N2))_segment_2_g_3 | 45356 |
| 1030_Influenza_A_virus_(A/New_York/392/2004(H3N2))_segment_2_g_4 | 45357 |
| 1030_Influenza_A_virus_(A/New_York/392/2004(H3N2))_segment_2_g_5 | 45358 |
| 1031_Human_papillomavirus_type_50_g_1 | 45359 |
| 1031_Human_papillomavirus_type_50_g_2 | 45360 |
| 1031_Human_papillomavirus_type_50_g_3 | 45361 |
| 1031_Human_papillomavirus_type_50_g_4 | 45362 |
| 1031_Human_papillomavirus_type_50_g_5 | 45363 |
| 1032_Human_papillomavirus_type_50_g_1 | 45364 |
| 1032_Human_papillomavirus_type_50_g_2 | 45365 |
| 1032_Human_papillomavirus_type_50_g_3 | 45366 |
| 1032_Human_papillomavirus_type_50_g_4 | 45367 |
| 1032_Human_papillomavirus_type_50_g_5 | 45368 |
| 1033_Human_papillomavirus_type_50_g_1 | 45369 |
| 1033_Human_papillomavirus_type_50_g_2 | 45370 |
| 1033_Human_papillomavirus_type_50_g_3 | 45371 |
| 1033_Human_papillomavirus_type_50_g_4 | 45372 |
| 1033_Human_papillomavirus_type_50_g_5 | 45373 |
| 1034_Human_papillomavirus_type_50_g_1 | 45374 |
| 1034_Human_papillomavirus_type_50_g_2 | 45375 |
| 1034_Human_papillomavirus_type_50_g_3 | 45376 |
| 1034_Human_papillomavirus_type_50_g_4 | 45377 |
| 1034_Human_papillomavirus_type_50_g_5 | 45378 |
| 1035_Human_papillomavirus_type_50_g_1 | 45379 |
| 1035_Human_papillomavirus_type_50_g_2 | 45380 |
| 1035_Human_papillomavirus_type_50_g_3 | 45381 |
| 1035_Human_papillomavirus_type_50_g_4 | 45382 |
| 1035_Human_papillomavirus_type_50_g_5 | 45383 |
| 1036_Human_papillomavirus_type_50_g_1 | 45384 |
| 1036_Human_papillomavirus_type_50_g_2 | 45385 |
| 1036_Human_papillomavirus_type_50_g_3 | 45386 |
| 1036_Human_papillomavirus_type_50_g_4 | 45387 |
| 1036_Human_papillomavirus_type_50_g_5 | 45388 |
| 1037_Human_papillomavirus_type_50_g_1 | 45389 |
| 1037_Human_papillomavirus_type_50_g_2 | 45390 |
| 1037_Human_papillomavirus_type_50_g_3 | 45391 |
| 1037_Human_papillomavirus_type_50_g_4 | 45392 |
| 1037_Human_papillomavirus_type_50_g_5 | 45393 |
| 1038_Human_papillomavirus_type_50_g_1 | 45394 |
| 1038_Human_papillomavirus_type_50_g_2 | 45395 |
| 1038_Human_papillomavirus_type_50_g_3 | 45396 |
| 1038_Human_papillomavirus_type_50_g_4 | 45397 |
| 1038_Human_papillomavirus_type_50_g_5 | 45398 |
| 1039_Human_papillomavirus_type_50_g_1 | 45399 |
| 1039_Human_papillomavirus_type_50_g_2 | 45400 |
| 1039_Human_papillomavirus_type_50_g_3 | 45401 |
| 1039_Human_papillomavirus_type_50_g_4 | 45402 |
| 1039_Human_papillomavirus_type_50_g_5 | 45403 |
| 1040_Human_papillomavirus_type_50_g_1 | 45404 |
| 1040_Human_papillomavirus_type_50_g_2 | 45405 |
| 1040_Human_papillomavirus_type_50_g_3 | 45406 |
| 1040_Human_papillomavirus_type_50_g_4 | 45407 |
| 1040_Human_papillomavirus_type_50_g_5 | 45408 |
| 1041_Human_papillomavirus_type_50_g_1 | 45409 |
| 1041_Human_papillomavirus_type_50_g_2 | 45410 |
| 1041_Human_papillomavirus_type_50_g_3 | 45411 |
| 1041_Human_papillomavirus_type_50_g_4 | 45412 |
| 1041_Human_papillomavirus_type_50_g_5 | 45413 |
| 1042_Human_papillomavirus_type_50_g_1 | 45414 |
| 1042_Human_papillomavirus_type_50_g_2 | 45415 |
| 1042_Human_papillomavirus_type_50_g_3 | 45416 |
| 1042_Human_papillomavirus_type_50_g_4 | 45417 |
| 1042_Human_papillomavirus_type_50_g_5 | 45418 |
| 1043_Human_papillomavirus_type_109_g_1 | 45419 |
| 1043_Human_papillomavirus_type_109_g_2 | 45420 |
| 1043_Human_papillomavirus_type_109_g_3 | 45421 |
| 1043_Human_papillomavirus_type_109_g_4 | 45422 |
| 1043_Human_papillomavirus_type_109_g_5 | 45423 |
| 1044_Human_papillomavirus_type_109_g_1 | 45424 |
| 1044_Human_papillomavirus_type_109_g_2 | 45425 |
| 1044_Human_papillomavirus_type_109_g_3 | 45426 |
| 1044_Human_papillomavirus_type_109_g_4 | 45427 |
| 1044_Human_papillomavirus_type_109_g_5 | 45428 |
| 1045_Human_papillomavirus_type_109_g_1 | 45429 |
| 1045_Human_papillomavirus_type_109_g_2 | 45430 |
| 1045_Human_papillomavirus_type_109_g_3 | 45431 |
| 1045_Human_papillomavirus_type_109_g_4 | 45432 |
| 1045_Human_papillomavirus_type_109_g_5 | 45433 |
| 1046_Human_papillomavirus_type_109_g_1 | 45434 |
| 1046_Human_papillomavirus_type_109_g_2 | 45435 |
| 1046_Human_papillomavirus_type_109_g_3 | 45436 |
| 1046_Human_papillomavirus_type_109_g_4 | 45437 |
| 1046_Human_papillomavirus_type_109_g_5 | 45438 |
| 1047_Human_papillomavirus_type_109_g_1 | 45439 |
| 1047_Human_papillomavirus_type_109_g_2 | 45440 |
| 1047_Human_papillomavirus_type_109_g_3 | 45441 |
| 1047_Human_papillomavirus_type_109_g_4 | 45442 |
| 1047_Human_papillomavirus_type_109_g_5 | 45443 |
| 1048_Human_papillomavirus_type_109_g_1 | 45444 |
| 1048_Human_papillomavirus_type_109_g_2 | 45445 |
| 1048_Human_papillomavirus_type_109_g_3 | 45446 |
| 1048_Human_papillomavirus_type_109_g_4 | 45447 |
| 1048_Human_papillomavirus_type_109_g_5 | 45448 |
| 1049_Human_papillomavirus_type_109_g_1 | 45449 |
| 1049_Human_papillomavirus_type_109_g_2 | 45450 |
| 1049_Human_papillomavirus_type_109_g_3 | 45451 |
| 1049_Human_papillomavirus_type_109_g_4 | 45452 |
| 1049_Human_papillomavirus_type_109_g_5 | 45453 |
| 1050_Human_papillomavirus_type_109_g_1 | 45454 |
| 1050_Human_papillomavirus_type_109_g_2 | 45455 |
| 1050_Human_papillomavirus_type_109_g_3 | 45456 |
| 1050_Human_papillomavirus_type_109_g_4 | 45457 |
| 1050_Human_papillomavirus_type_109_g_5 | 45458 |
| 1051_Human_papillomavirus_type_109_g_1 | 45459 |
| 1051_Human_papillomavirus_type_109_g_2 | 45460 |
| 1051_Human_papillomavirus_type_109_g_3 | 45461 |
| 1051_Human_papillomavirus_type_109_g_4 | 45462 |
| 1051_Human_papillomavirus_type_109_g_5 | 45463 |
| 1052_Human_papillomavirus_type_109_g_1 | 45464 |
| 1052_Human_papillomavirus_type_109_g_2 | 45465 |
| 1052_Human_papillomavirus_type_109_g_3 | 45466 |
| 1052_Human_papillomavirus_type_109_g_4 | 45467 |
| 1052_Human_papillomavirus_type_109_g_5 | 45468 |
| 1053_Human_papillomavirus_type_109_g_1 | 45469 |
| 1053_Human_papillomavirus_type_109_g_2 | 45470 |
| 1053_Human_papillomavirus_type_109_g_3 | 45471 |
| 1053_Human_papillomavirus_type_109_g_4 | 45472 |
| 1053_Human_papillomavirus_type_109_g_5 | 45473 |
| 1054_Human_papillomavirus_type_121_g_1 | 45474 |
| 1054_Human_papillomavirus_type_121_g_2 | 45475 |
| 1054_Human_papillomavirus_type_121_g_3 | 45476 |
| 1054_Human_papillomavirus_type_121_g_4 | 45477 |
| 1054_Human_papillomavirus_type_121_g_5 | 45478 |
| 1055_Human_papillomavirus_type_121_g_1 | 45479 |
| 1055_Human_papillomavirus_type_121_g_2 | 45480 |
| 1055_Human_papillomavirus_type_121_g_3 | 45481 |
| 1055_Human_papillomavirus_type_121_g_4 | 45482 |
| 1055_Human_papillomavirus_type_121_g_5 | 45483 |
| 1056_Human_papillomavirus_type_121_g_1 | 45484 |
| 1056_Human_papillomavirus_type_121_g_2 | 45485 |
| 1056_Human_papillomavirus_type_121_g_3 | 45486 |
| 1056_Human_papillomavirus_type_121_g_4 | 45487 |
| 1056_Human_papillomavirus_type_121_g_5 | 45488 |
| 1057_Human_papillomavirus_type_121_g_1 | 45489 |
| 1057_Human_papillomavirus_type_121_g_2 | 45490 |
| 1057_Human_papillomavirus_type_121_g_3 | 45491 |
| 1057_Human_papillomavirus_type_121_g_4 | 45492 |
| 1057_Human_papillomavirus_type_121_g_5 | 45493 |
| 1058_Human_papillomavirus_type_121_g_1 | 45494 |
| 1058_Human_papillomavirus_type_121_g_2 | 45495 |
| 1058_Human_papillomavirus_type_121_g_3 | 45496 |
| 1058_Human_papillomavirus_type_121_g_4 | 45497 |
| 1058_Human_papillomavirus_type_121_g_5 | 45498 |
| 1059_Human_papillomavirus_type_121_g_1 | 45499 |
| 1059_Human_papillomavirus_type_121_g_2 | 45500 |
| 1059_Human_papillomavirus_type_121_g_3 | 45501 |
| 1059_Human_papillomavirus_type_121_g_4 | 45502 |
| 1059_Human_papillomavirus_type_121_g_5 | 45503 |
| 1060_Human_papillomavirus_type_121_g_1 | 45504 |
| 1060_Human_papillomavirus_type_121_g_2 | 45505 |
| 1060_Human_papillomavirus_type_121_g_3 | 45506 |
| 1060_Human_papillomavirus_type_121_g_4 | 45507 |
| 1060_Human_papillomavirus_type_121_g_5 | 45508 |
| 1061_Human_papillomavirus_type_121_g_1 | 45509 |
| 1061_Human_papillomavirus_type_121_g_2 | 45510 |
| 1061_Human_papillomavirus_type_121_g_3 | 45511 |
| 1061_Human_papillomavirus_type_121_g_4 | 45512 |
| 1061_Human_papillomavirus_type_121_g_5 | 45513 |
| 1062_Human_papillomavirus_type_121_g_1 | 45514 |
| 1062_Human_papillomavirus_type_121_g_2 | 45515 |
| 1062_Human_papillomavirus_type_121_g_3 | 45516 |
| 1062_Human_papillomavirus_type_121_g_4 | 45517 |
| 1062_Human_papillomavirus_type_121_g_5 | 45518 |
| 1063_Human_papillomavirus_type_121_g_1 | 45519 |
| 1063_Human_papillomavirus_type_121_g_2 | 45520 |
| 1063_Human_papillomavirus_type_121_g_3 | 45521 |
| 1063_Human_papillomavirus_type_121_g_4 | 45522 |
| 1063_Human_papillomavirus_type_121_g_5 | 45523 |
| 1064_Human_papillomavirus_type_121_g_1 | 45524 |
| 1064_Human_papillomavirus_type_121_g_2 | 45525 |
| 1064_Human_papillomavirus_type_121_g_3 | 45526 |
| 1064_Human_papillomavirus_type_121_g_4 | 45527 |
| 1064_Human_papillomavirus_type_121_g_5 | 45528 |
| 1065_Human_papillomavirus_type_121_g_1 | 45529 |
| 1065_Human_papillomavirus_type_121_g_2 | 45530 |
| 1065_Human_papillomavirus_type_121_g_3 | 45531 |
| 1065_Human_papillomavirus_type_121_g_4 | 45532 |
| 1065_Human_papillomavirus_type_121_g_5 | 45533 |
| 1066_Human_papillomavirus_type_121_g_1 | 45534 |
| 1066_Human_papillomavirus_type_121_g_2 | 45535 |
| 1066_Human_papillomavirus_type_121_g_3 | 45536 |
| 1066_Human_papillomavirus_type_121_g_4 | 45537 |
| 1066_Human_papillomavirus_type_121_g_5 | 45538 |
| 1067_Human_papillomavirus_type_121_g_1 | 45539 |
| 1067_Human_papillomavirus_type_121_g_2 | 45540 |
| 1067_Human_papillomavirus_type_121_g_3 | 45541 |
| 1067_Human_papillomavirus_type_121_g_4 | 45542 |
| 1067_Human_papillomavirus_type_121_g_5 | 45543 |
| 1068_Human_papillomavirus_type_121_g_1 | 45544 |
| 1068_Human_papillomavirus_type_121_g_2 | 45545 |
| 1068_Human_papillomavirus_type_121_g_3 | 45546 |
| 1068_Human_papillomavirus_type_121_g_4 | 45547 |
| 1068_Human_papillomavirus_type_121_g_5 | 45548 |
| 1069_Human_papillomavirus_type_121_g_1 | 45549 |
| 1069_Human_papillomavirus_type_121_g_2 | 45550 |
| 1069_Human_papillomavirus_type_121_g_3 | 45551 |
| 1069_Human_papillomavirus_type_121_g_4 | 45552 |
| 1069_Human_papillomavirus_type_121_g_5 | 45553 |
| 1070_Human_herpesvirus_1_strain_17_g_1 | 45554 |
| 1070_Human_herpesvirus_1_strain_17_g_2 | 45555 |
| 1070_Human_herpesvirus_1_strain_17_g_3 | 45556 |
| 1070_Human_herpesvirus_1_strain_17_g_4 | 45557 |
| 1071_Human_herpesvirus_1_strain_17_g_1 | 45558 |
| 1071_Human_herpesvirus_1_strain_17_g_2 | 45559 |
| 1071_Human_herpesvirus_1_strain_17_g_3 | 45560 |
| 1071_Human_herpesvirus_1_strain_17_g_4 | 45561 |
| 1071_Human_herpesvirus_1_strain_17_g_5 | 45562 |
| 1072_Human_herpesvirus_1_strain_17_g_1 | 45563 |
| 1072_Human_herpesvirus_1_strain_17_g_2 | 45564 |
| 1072_Human_herpesvirus_1_strain_17_g_3 | 45565 |
| 1072_Human_herpesvirus_1_strain_17_g_4 | 45566 |
| 1072_Human_herpesvirus_1_strain_17_g_5 | 45567 |
| 1073_Human_herpesvirus_1_strain_17_g_1 | 45568 |
| 1073_Human_herpesvirus_1_strain_17_g_2 | 45569 |
| 1073_Human_herpesvirus_1_strain_17_g_3 | 45570 |
| 1073_Human_herpesvirus_1_strain_17_g_4 | 45571 |
| 1073_Human_herpesvirus_1_strain_17_g_5 | 45572 |
| 1074_Human_herpesvirus_1_strain_17_g_1 | 45573 |
| 1074_Human_herpesvirus_1_strain_17_g_2 | 45574 |
| 1074_Human_herpesvirus_1_strain_17_g_3 | 45575 |
| 1074_Human_herpesvirus_1_strain_17_g_4 | 45576 |
| 1074_Human_herpesvirus_1_strain_17_g_5 | 45577 |
| 1075_Human_herpesvirus_1_strain_17_g_1 | 45578 |
| 1075_Human_herpesvirus_1_strain_17_g_2 | 45579 |
| 1075_Human_herpesvirus_1_strain_17_g_3 | 45580 |
| 1075_Human_herpesvirus_1_strain_17_g_4 | 45581 |
| 1075_Human_herpesvirus_1_strain_17_g_5 | 45582 |
| 1076_Human_herpesvirus_1_strain_17_g_1 | 45583 |
| 1076_Human_herpesvirus_1_strain_17_g_2 | 45584 |
| 1076_Human_herpesvirus_1_strain_17_g_3 | 45585 |
| 1076_Human_herpesvirus_1_strain_17_g_4 | 45586 |
| 1076_Human_herpesvirus_1_strain_17_g_5 | 45587 |
| 1077_Human_herpesvirus_1_strain_17_g_1 | 45588 |
| 1077_Human_herpesvirus_1_strain_17_g_2 | 45589 |
| 1077_Human_herpesvirus_1_strain_17_g_3 | 45590 |
| 1077_Human_herpesvirus_1_strain_17_g_4 | 45591 |
| 1078_Human_herpesvirus_1_strain_17_g_1 | 45592 |
| 1078_Human_herpesvirus_1_strain_17_g_2 | 45593 |
| 1078_Human_herpesvirus_1_strain_17_g_3 | 45594 |
| 1078_Human_herpesvirus_1_strain_17_g_4 | 45595 |
| 1078_Human_herpesvirus_1_strain_17_g_5 | 45596 |
| 1079_Human_herpesvirus_1_strain_17_g_1 | 45597 |
| 1079_Human_herpesvirus_1_strain_17_g_2 | 45598 |
| 1079_Human_herpesvirus_1_strain_17_g_3 | 45599 |
| 1079_Human_herpesvirus_1_strain_17_g_4 | 45600 |
| 1079_Human_herpesvirus_1_strain_17_g_5 | 45601 |
| 1080_Human_herpesvirus_1_strain_17_g_1 | 45602 |
| 1080_Human_herpesvirus_1_strain_17_g_2 | 45603 |
| 1080_Human_herpesvirus_1_strain_17_g_3 | 45604 |
| 1080_Human_herpesvirus_1_strain_17_g_4 | 45605 |
| 1080_Human_herpesvirus_1_strain_17_g_5 | 45606 |
| 1081_Human_herpesvirus_1_strain_17_g_1 | 45607 |
| 1081_Human_herpesvirus_1_strain_17_g_2 | 45608 |
| 1082_Human_herpesvirus_1_strain_17_g_1 | 45609 |
| 1082_Human_herpesvirus_1_strain_17_g_2 | 45610 |
| 1082_Human_herpesvirus_1_strain_17_g_3 | 45611 |
| 1082_Human_herpesvirus_1_strain_17_g_4 | 45612 |
| 1082_Human_herpesvirus_1_strain_17_g_5 | 45613 |
| 1083_Human_herpesvirus_1_strain_17_g_1 | 45614 |
| 1083_Human_herpesvirus_1_strain_17_g_2 | 45615 |
| 1083_Human_herpesvirus_1_strain_17_g_3 | 45616 |
| 1083_Human_herpesvirus_1_strain_17_g_4 | 45617 |
| 1083_Human_herpesvirus_1_strain_17_g_5 | 45618 |
| 1084_Human_herpesvirus_1_strain_17_g_1 | 45619 |
| 1084_Human_herpesvirus_1_strain_17_g_2 | 45620 |
| 1084_Human_herpesvirus_1_strain_17_g_3 | 45621 |
| 1084_Human_herpesvirus_1_strain_17_g_4 | 45622 |
| 1084_Human_herpesvirus_1_strain_17_g_5 | 45623 |
| 1085_Human_herpesvirus_1_strain_17_g_1 | 45624 |
| 1085_Human_herpesvirus_1_strain_17_g_2 | 45625 |
| 1085_Human_herpesvirus_1_strain_17_g_3 | 45626 |
| 1086_Human_herpesvirus_1_strain_17_g_1 | 45627 |
| 1086_Human_herpesvirus_1_strain_17_g_2 | 45628 |
| 1086_Human_herpesvirus_1_strain_17_g_3 | 45629 |
| 1086_Human_herpesvirus_1_strain_17_g_4 | 45630 |
| 1087_Human_herpesvirus_1_strain_17_g_1 | 45631 |
| 1087_Human_herpesvirus_1_strain_17_g_2 | 45632 |
| 1087_Human_herpesvirus_1_strain_17_g_3 | 45633 |
| 1088_Human_herpesvirus_1_strain_17_g_1 | 45634 |
| 1088_Human_herpesvirus_1_strain_17_g_2 | 45635 |
| 1088_Human_herpesvirus_1_strain_17_g_3 | 45636 |
| 1088_Human_herpesvirus_1_strain_17_g_4 | 45637 |
| 1088_Human_herpesvirus_1_strain_17_g_5 | 45638 |
| 1089_Human_herpesvirus_1_strain_17_g_1 | 45639 |
| 1089_Human_herpesvirus_1_strain_17_g_2 | 45640 |
| 1089_Human_herpesvirus_1_strain_17_g_3 | 45641 |
| 1089_Human_herpesvirus_1_strain_17_g_4 | 45642 |
| 1090_Human_herpesvirus_1_strain_17_g_1 | 45643 |
| 1090_Human_herpesvirus_1_strain_17_g_2 | 45644 |
| 1090_Human_herpesvirus_1_strain_17_g_3 | 45645 |
| 1090_Human_herpesvirus_1_strain_17_g_4 | 45646 |
| 1090_Human_herpesvirus_1_strain_17_g_5 | 45647 |
| 1091_Human_herpesvirus_1_strain_17_g_1 | 45648 |
| 1091_Human_herpesvirus_1_strain_17_g_2 | 45649 |
| 1091_Human_herpesvirus_1_strain_17_g_3 | 45650 |
| 1091_Human_herpesvirus_1_strain_17_g_4 | 45651 |
| 1091_Human_herpesvirus_1_strain_17_g_5 | 45652 |
| 1092_Human_herpesvirus_1_strain_17_g_1 | 45653 |
| 1093_Human_herpesvirus_1_strain_17_g_1 | 45654 |
| 1093_Human_herpesvirus_1_strain_17_g_2 | 45655 |
| 1093_Human_herpesvirus_1_strain_17_g_3 | 45656 |
| 1094_Human_herpesvirus_1_strain_17_g_1 | 45657 |
| 1094_Human_herpesvirus_1_strain_17_g_2 | 45658 |
| 1094_Human_herpesvirus_1_strain_17_g_3 | 45659 |
| 1094_Human_herpesvirus_1_strain_17_g_4 | 45660 |
| 1094_Human_herpesvirus_1_strain_17_g_5 | 45661 |
| 1095_Human_herpesvirus_1_strain_17_g_1 | 45662 |
| 1095_Human_herpesvirus_1_strain_17_g_2 | 45663 |
| 1095_Human_herpesvirus_1_strain_17_g_3 | 45664 |
| 1095_Human_herpesvirus_1_strain_17_g_4 | 45665 |
| 1095_Human_herpesvirus_1_strain_17_g_5 | 45666 |
| 1096_Human_herpesvirus_1_strain_17_g_1 | 45667 |
| 1096_Human_herpesvirus_1_strain_17_g_2 | 45668 |
| 1096_Human_herpesvirus_1_strain_17_g_3 | 45669 |
| 1096_Human_herpesvirus_1_strain_17_g_4 | 45670 |
| 1096_Human_herpesvirus_1_strain_17_g_5 | 45671 |
| 1097_Human_herpesvirus_1_strain_17_g_1 | 45672 |
| 1097_Human_herpesvirus_1_strain_17_g_2 | 45673 |
| 1097_Human_herpesvirus_1_strain_17_g_3 | 45674 |
| 1097_Human_herpesvirus_1_strain_17_g_4 | 45675 |
| 1097_Human_herpesvirus_1_strain_17_g_5 | 45676 |
| 1098_Human_herpesvirus_1_strain_17_g_1 | 45677 |
| 1098_Human_herpesvirus_1_strain_17_g_2 | 45678 |
| 1098_Human_herpesvirus_1_strain_17_g_3 | 45679 |
| 1098_Human_herpesvirus_1_strain_17_g_4 | 45680 |
| 1098_Human_herpesvirus_1_strain_17_g_5 | 45681 |
| 1099_Human_herpesvirus_1_strain_17_g_1 | 45682 |
| 1099_Human_herpesvirus_1_strain_17_g_2 | 45683 |
| 1099_Human_herpesvirus_1_strain_17_g_3 | 45684 |
| 1099_Human_herpesvirus_1_strain_17_g_4 | 45685 |
| 1099_Human_herpesvirus_1_strain_17_g_5 | 45686 |
| 1100_Human_herpesvirus_1_strain_17_g_1 | 45687 |
| 1100_Human_herpesvirus_1_strain_17_g_2 | 45688 |
| 1100_Human_herpesvirus_1_strain_17_g_3 | 45689 |
| 1100_Human_herpesvirus_1_strain_17_g_4 | 45690 |
| 1100_Human_herpesvirus_1_strain_17_g_5 | 45691 |
| 1101_Human_herpesvirus_1_strain_17_g_1 | 45692 |
| 1101_Human_herpesvirus_1_strain_17_g_2 | 45693 |
| 1101_Human_herpesvirus_1_strain_17_g_3 | 45694 |
| 1102_Human_herpesvirus_1_strain_17_g_1 | 45695 |
| 1102_Human_herpesvirus_1_strain_17_g_2 | 45696 |
| 1102_Human_herpesvirus_1_strain_17_g_3 | 45697 |
| 1102_Human_herpesvirus_1_strain_17_g_4 | 45698 |
| 1102_Human_herpesvirus_1_strain_17_g_5 | 45699 |
| 1103_Human_herpesvirus_1_strain_17_g_1 | 45700 |
| 1103_Human_herpesvirus_1_strain_17_g_2 | 45701 |
| 1103_Human_herpesvirus_1_strain_17_g_3 | 45702 |
| 1103_Human_herpesvirus_1_strain_17_g_4 | 45703 |
| 1103_Human_herpesvirus_1_strain_17_g_5 | 45704 |
| 1104_Human_herpesvirus_1_strain_17_g_1 | 45705 |
| 1104_Human_herpesvirus_1_strain_17_g_2 | 45706 |
| 1104_Human_herpesvirus_1_strain_17_g_3 | 45707 |
| 1104_Human_herpesvirus_1_strain_17_g_4 | 45708 |
| 1104_Human_herpesvirus_1_strain_17_g_5 | 45709 |
| 1105_Human_herpesvirus_1_strain_17_g_1 | 45710 |
| 1105_Human_herpesvirus_1_strain_17_g_2 | 45711 |
| 1106_Human_herpesvirus_1_strain_17_g_1 | 45712 |
| 1107_Human_herpesvirus_1_strain_17_g_1 | 45713 |
| 1107_Human_herpesvirus_1_strain_17_g_2 | 45714 |
| 1107_Human_herpesvirus_1_strain_17_g_3 | 45715 |
| 1107_Human_herpesvirus_1_strain_17_g_4 | 45716 |
| 1107_Human_herpesvirus_1_strain_17_g_5 | 45717 |
| 1108_Human_herpesvirus_1_strain_17_g_1 | 45718 |
| 1108_Human_herpesvirus_1_strain_17_g_2 | 45719 |
| 1108_Human_herpesvirus_1_strain_17_g_3 | 45720 |
| 1108_Human_herpesvirus_1_strain_17_g_4 | 45721 |
| 1108_Human_herpesvirus_1_strain_17_g_5 | 45722 |
| 1109_Human_herpesvirus_1_strain_17_g_1 | 45723 |
| 1109_Human_herpesvirus_1_strain_17_g_2 | 45724 |
| 1109_Human_herpesvirus_1_strain_17_g_3 | 45725 |
| 1109_Human_herpesvirus_1_strain_17_g_4 | 45726 |
| 1109_Human_herpesvirus_1_strain_17_g_5 | 45727 |
| 1110_Human_herpesvirus_1_strain_17_g_1 | 45728 |
| 1110_Human_herpesvirus_1_strain_17_g_2 | 45729 |
| 1110_Human_herpesvirus_1_strain_17_g_3 | 45730 |
| 1110_Human_herpesvirus_1_strain_17_g_4 | 45731 |
| 1110_Human_herpesvirus_1_strain_17_g_5 | 45732 |
| 1111_Human_herpesvirus_1_strain_17_g_1 | 45733 |
| 1111_Human_herpesvirus_1_strain_17_g_2 | 45734 |
| 1111_Human_herpesvirus_1_strain_17_g_3 | 45735 |
| 1111_Human_herpesvirus_1_strain_17_g_4 | 45736 |
| 1111_Human_herpesvirus_1_strain_17_g_5 | 45737 |
| 1112_Human_herpesvirus_1_strain_17_g_1 | 45738 |
| 1112_Human_herpesvirus_1_strain_17_g_2 | 45739 |
| 1112_Human_herpesvirus_1_strain_17_g_3 | 45740 |
| 1112_Human_herpesvirus_1_strain_17_g_4 | 45741 |
| 1113_Human_herpesvirus_1_strain_17_g_1 | 45742 |
| 1113_Human_herpesvirus_1_strain_17_g_2 | 45743 |
| 1113_Human_herpesvirus_1_strain_17_g_3 | 45744 |
| 1114_Human_herpesvirus_1_strain_17_g_1 | 45745 |
| 1114_Human_herpesvirus_1_strain_17_g_2 | 45746 |
| 1114_Human_herpesvirus_1_strain_17_g_3 | 45747 |
| 1115_Human_herpesvirus_1_strain_17_g_1 | 45748 |
| 1115_Human_herpesvirus_1_strain_17_g_2 | 45749 |
| 1115_Human_herpesvirus_1_strain_17_g_3 | 45750 |
| 1115_Human_herpesvirus_1_strain_17_g_4 | 45751 |
| 1116_Human_herpesvirus_1_strain_17_g_1 | 45752 |
| 1116_Human_herpesvirus_1_strain_17_g_2 | 45753 |
| 1116_Human_herpesvirus_1_strain_17_g_3 | 45754 |
| 1116_Human_herpesvirus_1_strain_17_g_4 | 45755 |
| 1117_Human_herpesvirus_1_strain_17_g_1 | 45756 |
| 1118_Human_herpesvirus_1_strain_17_g_1 | 45757 |
| 1118_Human_herpesvirus_1_strain_17_g_2 | 45758 |
| 1118_Human_herpesvirus_1_strain_17_g_3 | 45759 |
| 1118_Human_herpesvirus_1_strain_17_g_4 | 45760 |
| 1118_Human_herpesvirus_1_strain_17_g_5 | 45761 |
| 1119_Human_herpesvirus_1_strain_17_g_1 | 45762 |
| 1119_Human_herpesvirus_1_strain_17_g_2 | 45763 |
| 1119_Human_herpesvirus_1_strain_17_g_3 | 45764 |
| 1119_Human_herpesvirus_1_strain_17_g_4 | 45765 |
| 1119_Human_herpesvirus_1_strain_17_g_5 | 45766 |
| 1120_Human_herpesvirus_1_strain_17_g_1 | 45767 |
| 1121_Human_herpesvirus_1_strain_17_g_1 | 45768 |
| 1121_Human_herpesvirus_1_strain_17_g_2 | 45769 |
| 1121_Human_herpesvirus_1_strain_17_g_3 | 45770 |
| 1121_Human_herpesvirus_1_strain_17_g_4 | 45771 |
| 1122_Human_herpesvirus_1_strain_17_g_1 | 45772 |
| 1122_Human_herpesvirus_1_strain_17_g_2 | 45773 |
| 1122_Human_herpesvirus_1_strain_17_g_3 | 45774 |
| 1122_Human_herpesvirus_1_strain_17_g_4 | 45775 |
| 1122_Human_herpesvirus_1_strain_17_g_5 | 45776 |
| 1123_Human_herpesvirus_1_strain_17_g_1 | 45777 |
| 1123_Human_herpesvirus_1_strain_17_g_2 | 45778 |
| 1123_Human_herpesvirus_1_strain_17_g_3 | 45779 |
| 1123_Human_herpesvirus_1_strain_17_g_4 | 45780 |
| 1123_Human_herpesvirus_1_strain_17_g_5 | 45781 |
| 1124_Human_herpesvirus_1_strain_17_g_1 | 45782 |
| 1124_Human_herpesvirus_1_strain_17_g_2 | 45783 |
| 1124_Human_herpesvirus_1_strain_17_g_3 | 45784 |
| 1124_Human_herpesvirus_1_strain_17_g_4 | 45785 |
| 1125_Human_herpesvirus_1_strain_17_g_1 | 45786 |
| 1125_Human_herpesvirus_1_strain_17_g_2 | 45787 |
| 1125_Human_herpesvirus_1_strain_17_g_3 | 45788 |
| 1125_Human_herpesvirus_1_strain_17_g_4 | 45789 |
| 1125_Human_herpesvirus_1_strain_17_g_5 | 45790 |
| 1126_Human_herpesvirus_1_strain_17_g_1 | 45791 |
| 1126_Human_herpesvirus_1_strain_17_g_2 | 45792 |
| 1126_Human_herpesvirus_1_strain_17_g_3 | 45793 |
| 1126_Human_herpesvirus_1_strain_17_g_4 | 45794 |
| 1126_Human_herpesvirus_1_strain_17_g_5 | 45795 |
| 1127_Human_herpesvirus_1_strain_17_g_1 | 45796 |
| 1127_Human_herpesvirus_1_strain_17_g_2 | 45797 |
| 1127_Human_herpesvirus_1_strain_17_g_3 | 45798 |
| 1127_Human_herpesvirus_1_strain_17_g_4 | 45799 |
| 1128_Human_herpesvirus_1_strain_17_g_1 | 45800 |
| 1128_Human_herpesvirus_1_strain_17_g_2 | 45801 |
| 1129_Human_herpesvirus_1_strain_17_g_1 | 45802 |
| 1129_Human_herpesvirus_1_strain_17_g_2 | 45803 |
| 1129_Human_herpesvirus_1_strain_17_g_3 | 45804 |
| 1129_Human_herpesvirus_1_strain_17_g_4 | 45805 |
| 1130_Human_herpesvirus_1_strain_17_g_1 | 45806 |
| 1130_Human_herpesvirus_1_strain_17_g_2 | 45807 |
| 1130_Human_herpesvirus_1_strain_17_g_3 | 45808 |
| 1130_Human_herpesvirus_1_strain_17_g_4 | 45809 |
| 1130_Human_herpesvirus_1_strain_17_g_5 | 45810 |
| 1131_Human_herpesvirus_1_strain_17_g_1 | 45811 |
| 1131_Human_herpesvirus_1_strain_17_g_2 | 45812 |
| 1131_Human_herpesvirus_1_strain_17_g_3 | 45813 |
| 1132_Human_herpesvirus_1_strain_17_g_1 | 45814 |
| 1132_Human_herpesvirus_1_strain_17_g_2 | 45815 |
| 1132_Human_herpesvirus_1_strain_17_g_3 | 45816 |
| 1133_Human_herpesvirus_1_strain_17_g_1 | 45817 |
| 1133_Human_herpesvirus_1_strain_17_g_2 | 45818 |
| 1133_Human_herpesvirus_1_strain_17_g_3 | 45819 |
| 1133_Human_herpesvirus_1_strain_17_g_4 | 45820 |
| 1133_Human_herpesvirus_1_strain_17_g_5 | 45821 |
| 1134_Human_herpesvirus_1_strain_17_g_1 | 45822 |
| 1134_Human_herpesvirus_1_strain_17_g_2 | 45823 |
| 1134_Human_herpesvirus_1_strain_17_g_3 | 45824 |
| 1134_Human_herpesvirus_1_strain_17_g_4 | 45825 |
| 1134_Human_herpesvirus_1_strain_17_g_5 | 45826 |
| 1135_Human_herpesvirus_1_strain_17_g_1 | 45827 |
| 1135_Human_herpesvirus_1_strain_17_g_2 | 45828 |
| 1135_Human_herpesvirus_1_strain_17_g_3 | 45829 |
| 1135_Human_herpesvirus_1_strain_17_g_4 | 45830 |
| 1135_Human_herpesvirus_1_strain_17_g_5 | 45831 |
| 1136_Human_herpesvirus_1_strain_17_g_1 | 45832 |
| 1136_Human_herpesvirus_1_strain_17_g_2 | 45833 |
| 1136_Human_herpesvirus_1_strain_17_g_3 | 45834 |
| 1136_Human_herpesvirus_1_strain_17_g_4 | 45835 |
| 1137_Human_herpesvirus_1_strain_17_g_1 | 45836 |
| 1137_Human_herpesvirus_1_strain_17_g_2 | 45837 |
| 1138_Human_herpesvirus_1_strain_17_g_1 | 45838 |
| 1138_Human_herpesvirus_1_strain_17_g_2 | 45839 |
| 1138_Human_herpesvirus_1_strain_17_g_3 | 45840 |
| 1140_Human_herpesvirus_1_strain_17_g_1 | 45841 |
| 1140_Human_herpesvirus_1_strain_17_g_2 | 45842 |
| 1140_Human_herpesvirus_1_strain_17_g_3 | 45843 |
| 1140_Human_herpesvirus_1_strain_17_g_4 | 45844 |
| 1140_Human_herpesvirus_1_strain_17_g_5 | 45845 |
| 1141_Human_herpesvirus_1_strain_17_g_1 | 45846 |
| 1141_Human_herpesvirus_1_strain_17_g_2 | 45847 |
| 1141_Human_herpesvirus_1_strain_17_g_3 | 45848 |
| 1141_Human_herpesvirus_1_strain_17_g_4 | 45849 |
| 1141_Human_herpesvirus_1_strain_17_g_5 | 45850 |
| 1142_Human_herpesvirus_1_strain_17_g_1 | 45851 |
| 1142_Human_herpesvirus_1_strain_17_g_2 | 45852 |
| 1142_Human_herpesvirus_1_strain_17_g_3 | 45853 |
| 1142_Human_herpesvirus_1_strain_17_g_4 | 45854 |
| 1143_Human_herpesvirus_1_strain_17_g_1 | 45855 |
| 1143_Human_herpesvirus_1_strain_17_g_2 | 45856 |
| 1143_Human_herpesvirus_1_strain_17_g_3 | 45857 |
| 1143_Human_herpesvirus_1_strain_17_g_4 | 45858 |
| 1143_Human_herpesvirus_1_strain_17_g_5 | 45859 |
| 1144_Human_herpesvirus_1_strain_17_g_1 | 45860 |
| 1144_Human_herpesvirus_1_strain_17_g_2 | 45861 |
| 1144_Human_herpesvirus_1_strain_17_g_3 | 45862 |
| 1145_Human_herpesvirus_1_strain_17_g_1 | 45863 |
| 1145_Human_herpesvirus_1_strain_17_g_2 | 45864 |
| 1146_Human_herpesvirus_1_strain_17_g_1 | 45865 |
| 1146_Human_herpesvirus_1_strain_17_g_2 | 45866 |
| 1146_Human_herpesvirus_1_strain_17_g_3 | 45867 |
| 1146_Human_herpesvirus_1_strain_17_g_4 | 45868 |
| 1146_Human_herpesvirus_1_strain_17_g_5 | 45869 |
| 1147_Human_herpesvirus_1_strain_17_g_1 | 45870 |
| 1147_Human_herpesvirus_1_strain_17_g_2 | 45871 |
| 1147_Human_herpesvirus_1_strain_17_g_3 | 45872 |
| 1147_Human_herpesvirus_1_strain_17_g_4 | 45873 |
| 1147_Human_herpesvirus_1_strain_17_g_5 | 45874 |
| 1148_Human_herpesvirus_1_strain_17_g_1 | 45875 |
| 1148_Human_herpesvirus_1_strain_17_g_2 | 45876 |
| 1148_Human_herpesvirus_1_strain_17_g_3 | 45877 |
| 1148_Human_herpesvirus_1_strain_17_g_4 | 45878 |
| 1148_Human_herpesvirus_1_strain_17_g_5 | 45879 |
| 1149_Human_herpesvirus_1_strain_17_g_1 | 45880 |
| 1149_Human_herpesvirus_1_strain_17_g_2 | 45881 |
| 1149_Human_herpesvirus_1_strain_17_g_3 | 45882 |
| 1150_Human_herpesvirus_1_strain_17_g_1 | 45883 |
| 1150_Human_herpesvirus_1_strain_17_g_2 | 45884 |
| 1151_Human_herpesvirus_1_strain_17_g_1 | 45885 |
| 1151_Human_herpesvirus_1_strain_17_g_2 | 45886 |
| 1151_Human_herpesvirus_1_strain_17_g_3 | 45887 |
| 1151_Human_herpesvirus_1_strain_17_g_4 | 45888 |
| 1151_Human_herpesvirus_1_strain_17_g_5 | 45889 |
| 1152_Human_herpesvirus_1_strain_17_g_1 | 45890 |
| 1152_Human_herpesvirus_1_strain_17_g_2 | 45891 |
| 1153_Human_herpesvirus_1_strain_17_g_1 | 45892 |
| 1153_Human_herpesvirus_1_strain_17_g_2 | 45893 |
| 1153_Human_herpesvirus_1_strain_17_g_3 | 45894 |
| 1153_Human_herpesvirus_1_strain_17_g_4 | 45895 |
| 1153_Human_herpesvirus_1_strain_17_g_5 | 45896 |
| 1154_Human_herpesvirus_1_strain_17_g_1 | 45897 |
| 1154_Human_herpesvirus_1_strain_17_g_2 | 45898 |
| 1154_Human_herpesvirus_1_strain_17_g_3 | 45899 |
| 1155_Human_herpesvirus_1_strain_17_g_1 | 45900 |
| 1155_Human_herpesvirus_1_strain_17_g_2 | 45901 |
| 1155_Human_herpesvirus_1_strain_17_g_3 | 45902 |
| 1155_Human_herpesvirus_1_strain_17_g_4 | 45903 |
| 1155_Human_herpesvirus_1_strain_17_g_5 | 45904 |
| 1156_Human_herpesvirus_1_strain_17_g_1 | 45905 |
| 1156_Human_herpesvirus_1_strain_17_g_2 | 45906 |
| 1156_Human_herpesvirus_1_strain_17_g_3 | 45907 |
| 1156_Human_herpesvirus_1_strain_17_g_4 | 45908 |
| 1156_Human_herpesvirus_1_strain_17_g_5 | 45909 |
| 1157_Human_herpesvirus_1_strain_17_g_1 | 45910 |
| 1157_Human_herpesvirus_1_strain_17_g_2 | 45911 |
| 1157_Human_herpesvirus_1_strain_17_g_3 | 45912 |
| 1157_Human_herpesvirus_1_strain_17_g_4 | 45913 |
| 1157_Human_herpesvirus_1_strain_17_g_5 | 45914 |
| 1158_Human_herpesvirus_1_strain_17_g_1 | 45915 |
| 1158_Human_herpesvirus_1_strain_17_g_2 | 45916 |
| 1158_Human_herpesvirus_1_strain_17_g_3 | 45917 |
| 1158_Human_herpesvirus_1_strain_17_g_4 | 45918 |
| 1158_Human_herpesvirus_1_strain_17_g_5 | 45919 |
| 1159_Human_herpesvirus_1_strain_17_g_1 | 45920 |
| 1159_Human_herpesvirus_1_strain_17_g_2 | 45921 |
| 1159_Human_herpesvirus_1_strain_17_g_3 | 45922 |
| 1159_Human_herpesvirus_1_strain_17_g_4 | 45923 |
| 1159_Human_herpesvirus_1_strain_17_g_5 | 45924 |
| 1160_Human_herpesvirus_1_strain_17_g_1 | 45925 |
| 1160_Human_herpesvirus_1_strain_17_g_2 | 45926 |
| 1160_Human_herpesvirus_1_strain_17_g_3 | 45927 |
| 1160_Human_herpesvirus_1_strain_17_g_4 | 45928 |
| 1160_Human_herpesvirus_1_strain_17_g_5 | 45929 |
| 1161_Human_herpesvirus_1_strain_17_g_1 | 45930 |
| 1161_Human_herpesvirus_1_strain_17_g_2 | 45931 |
| 1161_Human_herpesvirus_1_strain_17_g_3 | 45932 |
| 1161_Human_herpesvirus_1_strain_17_g_4 | 45933 |
| 1161_Human_herpesvirus_1_strain_17_g_5 | 45934 |
| 1162_Human_herpesvirus_1_strain_17_g_1 | 45935 |
| 1162_Human_herpesvirus_1_strain_17_g_2 | 45936 |
| 1162_Human_herpesvirus_1_strain_17_g_3 | 45937 |
| 1163_Human_herpesvirus_1_strain_17_g_1 | 45938 |
| 1163_Human_herpesvirus_1_strain_17_g_2 | 45939 |
| 1163_Human_herpesvirus_1_strain_17_g_3 | 45940 |
| 1163_Human_herpesvirus_1_strain_17_g_4 | 45941 |
| 1163_Human_herpesvirus_1_strain_17_g_5 | 45942 |
| 1164_Human_herpesvirus_1_strain_17_g_1 | 45943 |
| 1164_Human_herpesvirus_1_strain_17_g_2 | 45944 |
| 1164_Human_herpesvirus_1_strain_17_g_3 | 45945 |
| 1164_Human_herpesvirus_1_strain_17_g_4 | 45946 |
| 1164_Human_herpesvirus_1_strain_17_g_5 | 45947 |
| 1165_Human_herpesvirus_1_strain_17_g_1 | 45948 |
| 1165_Human_herpesvirus_1_strain_17_g_2 | 45949 |
| 1165_Human_herpesvirus_1_strain_17_g_3 | 45950 |
| 1165_Human_herpesvirus_1_strain_17_g_4 | 45951 |
| 1165_Human_herpesvirus_1_strain_17_g_5 | 45952 |
| 1166_Human_herpesvirus_1_strain_17_g_1 | 45953 |
| 1166_Human_herpesvirus_1_strain_17_g_2 | 45954 |
| 1166_Human_herpesvirus_1_strain_17_g_3 | 45955 |
| 1166_Human_herpesvirus_1_strain_17_g_4 | 45956 |
| 1166_Human_herpesvirus_1_strain_17_g_5 | 45957 |
| 1167_Human_herpesvirus_1_strain_17_g_1 | 45958 |
| 1167_Human_herpesvirus_1_strain_17_g_2 | 45959 |
| 1167_Human_herpesvirus_1_strain_17_g_3 | 45960 |
| 1167_Human_herpesvirus_1_strain_17_g_4 | 45961 |
| 1167_Human_herpesvirus_1_strain_17_g_5 | 45962 |
| 1168_Human_herpesvirus_1_strain_17_g_1 | 45963 |
| 1168_Human_herpesvirus_1_strain_17_g_2 | 45964 |
| 1169_Human_herpesvirus_1_strain_17_g_1 | 45965 |
| 1169_Human_herpesvirus_1_strain_17_g_2 | 45966 |
| 1169_Human_herpesvirus_1_strain_17_g_3 | 45967 |
| 1169_Human_herpesvirus_1_strain_17_g_4 | 45968 |
| 1169_Human_herpesvirus_1_strain_17_g_5 | 45969 |
| 1170_Human_herpesvirus_1_strain_17_g_1 | 45970 |
| 1170_Human_herpesvirus_1_strain_17_g_2 | 45971 |
| 1171_Human_herpesvirus_1_strain_17_g_1 | 45972 |
| 1171_Human_herpesvirus_1_strain_17_g_2 | 45973 |
| 1171_Human_herpesvirus_1_strain_17_g_3 | 45974 |
| 1171_Human_herpesvirus_1_strain_17_g_4 | 45975 |
| 1171_Human_herpesvirus_1_strain_17_g_5 | 45976 |
| 1172_Human_herpesvirus_1_strain_17_g_1 | 45977 |
| 1172_Human_herpesvirus_1_strain_17_g_2 | 45978 |
| 1172_Human_herpesvirus_1_strain_17_g_3 | 45979 |
| 1172_Human_herpesvirus_1_strain_17_g_4 | 45980 |
| 1172_Human_herpesvirus_1_strain_17_g_5 | 45981 |
| 1173_Human_herpesvirus_1_strain_17_g_1 | 45982 |
| 1173_Human_herpesvirus_1_strain_17_g_2 | 45983 |
| 1173_Human_herpesvirus_1_strain_17_g_3 | 45984 |
| 1173_Human_herpesvirus_1_strain_17_g_4 | 45985 |
| 1173_Human_herpesvirus_1_strain_17_g_5 | 45986 |
| 1174_Human_herpesvirus_1_strain_17_g_1 | 45987 |
| 1174_Human_herpesvirus_1_strain_17_g_2 | 45988 |
| 1174_Human_herpesvirus_1_strain_17_g_3 | 45989 |
| 1174_Human_herpesvirus_1_strain_17_g_4 | 45990 |
| 1174_Human_herpesvirus_1_strain_17_g_5 | 45991 |
| 1175_Human_herpesvirus_1_strain_17_g_1 | 45992 |
| 1175_Human_herpesvirus_1_strain_17_g_2 | 45993 |
| 1175_Human_herpesvirus_1_strain_17_g_3 | 45994 |
| 1175_Human_herpesvirus_1_strain_17_g_4 | 45995 |
| 1175_Human_herpesvirus_1_strain_17_g_5 | 45996 |
| 1176_Human_herpesvirus_1_strain_17_g_1 | 45997 |
| 1176_Human_herpesvirus_1_strain_17_g_2 | 45998 |
| 1176_Human_herpesvirus_1_strain_17_g_3 | 45999 |
| 1176_Human_herpesvirus_1_strain_17_g_4 | 46000 |
| 1176_Human_herpesvirus_1_strain_17_g_5 | 46001 |
| 1177_Human_herpesvirus_1_strain_17_g_1 | 46002 |
| 1177_Human_herpesvirus_1_strain_17_g_2 | 46003 |
| 1177_Human_herpesvirus_1_strain_17_g_3 | 46004 |
| 1177_Human_herpesvirus_1_strain_17_g_4 | 46005 |
| 1177_Human_herpesvirus_1_strain_17_g_5 | 46006 |
| 1178_Human_herpesvirus_1_strain_17_g_1 | 46007 |
| 1178_Human_herpesvirus_1_strain_17_g_2 | 46008 |
| 1178_Human_herpesvirus_1_strain_17_g_3 | 46009 |
| 1178_Human_herpesvirus_1_strain_17_g_4 | 46010 |
| 1178_Human_herpesvirus_1_strain_17_g_5 | 46011 |
| 1179_Influenza_A_virus_(A/Goose/Guangdong/1/96(H5N1))_{—} | 46012 |
| neuraminidase_(NA)_gene_g_1 | |
| 1179_Influenza_A_virus_(A/Goose/Guangdong/1/96(H5N1))_{—} | 46013 |
| neuraminidase_(NA)_gene_g_2 | |
| 1179_Influenza_A_virus_(A/Goose/Guangdong/1/96(H5N1))_{—} | 46014 |
| neuraminidase_(NA)_gene_g_3 | |
| 1179_Influenza_A_virus_(A/Goose/Guangdong/1/96(H5N1))_{—} | 46015 |
| neuraminidase_(NA)_gene_g_4 | |
| 1179_Influenza_A_virus_(A/Goose/Guangdong/1/96(H5N1))_{—} | 46016 |
| neuraminidase_(NA)_gene_g_5 | |
| 1180_Influenza_A_virus_(A/Goose/Guangdong/1/96(H5N1))_{—} | 46017 |
| neuraminidase_(NA)_gene_g_1 | |
| 1180_Influenza_A_virus_(A/Goose/Guangdong/1/96(H5N1))_{—} | 46018 |
| neuraminidase_(NA)_gene_g_2 | |
| 1180_Influenza_A_virus_(A/Goose/Guangdong/1/96(H5N1))_{—} | 46019 |
| neuraminidase_(NA)_gene_g_3 | |
| 1180_Influenza_A_virus_(A/Goose/Guangdong/1/96(H5N1))_{—} | 46020 |
| neuraminidase_(NA)_gene_g_4 | |
| 1180_Influenza_A_virus_(A/Goose/Guangdong/1/96(H5N1))_{—} | 46021 |
| neuraminidase_(NA)_gene_g_5 | |
| 1181_Influenza_A_virus_(A/Goose/Guangdong/1/96(H5N1))_{—} | 46022 |
| neuraminidase_(NA)_gene_g_1 | |
| 1181_Influenza_A_virus_(A/Goose/Guangdong/1/96(H5N1))_{—} | 46023 |
| neuraminidase_(NA)_gene_g_2 | |
| 1181_Influenza_A_virus_(A/Goose/Guangdong/1/96(H5N1))_{—} | 46024 |
| neuraminidase_(NA)_gene_g_3 | |
| 1181_Influenza_A_virus_(A/Goose/Guangdong/1/96(H5N1))_{—} | 46025 |
| neuraminidase_(NA)_gene_g_4 | |
| 1181_Influenza_A_virus_(A/Goose/Guangdong/1/96(H5N1))_{—} | 46026 |
| neuraminidase_(NA)_gene_g_5 | |
| 1182_Influenza_A_virus_(A/Goose/Guangdong/1/96(H5N1))_{—} | 46027 |
| neuraminidase_(NA)_gene_g_1 | |
| 1182_Influenza_A_virus_(A/Goose/Guangdong/1/96(H5N1))_{—} | 46028 |
| neuraminidase_(NA)_gene_g_2 | |
| 1182_Influenza_A_virus_(A/Goose/Guangdong/1/96(H5N1))_{—} | 46029 |
| neuraminidase_(NA)_gene_g_3 | |
| 1182_Influenza_A_virus_(A/Goose/Guangdong/1/96(H5N1))_{—} | 46030 |
| neuraminidase_(NA)_gene_g_4 | |
| 1182_Influenza_A_virus_(A/Goose/Guangdong/1/96(H5N1))_{—} | 46031 |
| neuraminidase_(NA)_gene_g_5 | |
| 1183_Hepatitis_B_virus_(strain_ayw)_genome_g_1 | 46032 |
| 1183_Hepatitis_B_virus_(strain_ayw)_genome_g_2 | 46033 |
| 1183_Hepatitis_B_virus_(strain_ayw)_genome_g_3 | 46034 |
| 1183_Hepatitis_B_virus_(strain_ayw)_genome_g_4 | 46035 |
| 1183_Hepatitis_B_virus_(strain_ayw)_genome_g_5 | 46036 |
| 1184_Hepatitis_B_virus_(strain_ayw)_genome_g_1 | 46037 |
| 1184_Hepatitis_B_virus_(strain_ayw)_genome_g_2 | 46038 |
| 1184_Hepatitis_B_virus_(strain_ayw)_genome_g_3 | 46039 |
| 1184_Hepatitis_B_virus_(strain_ayw)_genome_g_4 | 46040 |
| 1184_Hepatitis_B_virus_(strain_ayw)_genome_g_5 | 46041 |
| 1185_Hepatitis_B_virus_(strain_ayw)_genome_g_1 | 46042 |
| 1185_Hepatitis_B_virus_(strain_ayw)_genome_g_2 | 46043 |
| 1185_Hepatitis_B_virus_(strain_ayw)_genome_g_3 | 46044 |
| 1185_Hepatitis_B_virus_(strain_ayw)_genome_g_4 | 46045 |
| 1185_Hepatitis_B_virus_(strain_ayw)_genome_g_5 | 46046 |
| 1186_Hepatitis_B_virus_(strain_ayw)_genome_g_1 | 46047 |
| 1186_Hepatitis_B_virus_(strain_ayw)_genome_g_2 | 46048 |
| 1186_Hepatitis_B_virus_(strain_ayw)_genome_g_3 | 46049 |
| 1186_Hepatitis_B_virus_(strain_ayw)_genome_g_4 | 46050 |
| 1186_Hepatitis_B_virus_(strain_ayw)_genome_g_5 | 46051 |
| 1187_Hepatitis_B_virus_(strain_ayw)_genome_g_1 | 46052 |
| 1187_Hepatitis_B_virus_(strain_ayw)_genome_g_2 | 46053 |
| 1187_Hepatitis_B_virus_(strain_ayw)_genome_g_3 | 46054 |
| 1187_Hepatitis_B_virus_(strain_ayw)_genome_g_4 | 46055 |
| 1187_Hepatitis_B_virus_(strain_ayw)_genome_g_5 | 46056 |
| 1188_Influenza_A_virus_(A/New_York/392/2004(H3N2))_segment_1_g_3 | 46059 |
| 1188_Influenza_A_virus_(A/New_York/392/2004(H3N2))_segment_1_g_4 | 46060 |
| 1188_Influenza_A_virus_(A/New_York/392/2004(H3N2))_segment_1_g_5 | 46061 |
| 1189_Influenza_A_virus_(A/New_York/392/2004(H3N2))_segment_1_g_1 | 46062 |
| 1189_Influenza_A_virus_(A/New_York/392/2004(H3N2))_segment_1_g_2 | 46063 |
| 1189_Influenza_A_virus_(A/New_York/392/2004(H3N2))_segment_1_g_3 | 46064 |
| 1189_Influenza_A_virus_(A/New_York/392/2004(H3N2))_segment_1_g_4 | 46065 |
| 1189_Influenza_A_virus_(A/New_York/392/2004(H3N2))_segment_1_g_5 | 46066 |
| 1190_Influenza_A_virus_(A/New_York/392/2004(H3N2))_segment_1_g_1 | 46067 |
| 1190_Influenza_A_virus_(A/New_York/392/2004(H3N2))_segment_1_g_2 | 46068 |
| 1190_Influenza_A_virus_(A/New_York/392/2004(H3N2))_segment_1_g_3 | 46069 |
| 1190_Influenza_A_virus_(A/New_York/392/2004(H3N2))_segment_1_g_4 | 46070 |
| 1190_Influenza_A_virus_(A/New_York/392/2004(H3N2))_segment_1_g_5 | 46071 |
| 1191_Influenza_A_virus_(A/New_York/392/2004(H3N2))_segment_1_g_1 | 46072 |
| 1191_Influenza_A_virus_(A/New_York/392/2004(H3N2))_segment_1_g_2 | 46073 |
| 1191_Influenza_A_virus_(A/New_York/392/2004(H3N2))_segment_1_g_3 | 46074 |
| 1191_Influenza_A_virus_(A/New_York/392/2004(H3N2))_segment_1_g_4 | 46075 |
| 1191_Influenza_A_virus_(A/New_York/392/2004(H3N2))_segment_1_g_5 | 46076 |
| 1192_Influenza_A_virus_(A/New_York/392/2004(H3N2))_segment_1_g_1 | 46077 |
| 1192_Influenza_A_virus_(A/New_York/392/2004(H3N2))_segment_1_g_2 | 46078 |
| 1192_Influenza_A_virus_(A/New_York/392/2004(H3N2))_segment_1_g_3 | 46079 |
| 1192_Influenza_A_virus_(A/New_York/392/2004(H3N2))_segment_1_g_4 | 46080 |
| 1192_Influenza_A_virus_(A/New_York/392/2004(H3N2))_segment_1_g_5 | 46081 |
| 1193_Influenza_A_virus_(A/New_York/392/2004(H3N2))_segment_1_g_1 | 46082 |
| 1193_Influenza_A_virus_(A/New_York/392/2004(H3N2))_segment_1_g_2 | 46083 |
| 1193_Influenza_A_virus_(A/New_York/392/2004(H3N2))_segment_1_g_3 | 46084 |
| 1193_Influenza_A_virus_(A/New_York/392/2004(H3N2))_segment_1_g_4 | 46085 |
| 1193_Influenza_A_virus_(A/New_York/392/2004(H3N2))_segment_1_g_5 | 46086 |
| 1194_Influenza_A_virus_(A/New_York/392/2004(H3N2))_segment_1_g_1 | 46087 |
| 1194_Influenza_A_virus_(A/New_York/392/2004(H3N2))_segment_1_g_2 | 46088 |
| 1194_Influenza_A_virus_(A/New_York/392/2004(H3N2))_segment_1_g_3 | 46089 |
| 1194_Influenza_A_virus_(A/New_York/392/2004(H3N2))_segment_1_g_4 | 46090 |
| 1194_Influenza_A_virus_(A/New_York/392/2004(H3N2))_segment_1_g_5 | 46091 |
| 1195_Influenza_A_virus_(A/New_York/392/2004(H3N2))_segment_1_g_1 | 46092 |
| 1195_Influenza_A_virus_(A/New_York/392/2004(H3N2))_segment_1_g_2 | 46093 |
| 1195_Influenza_A_virus_(A/New_York/392/2004(H3N2))_segment_1_g_3 | 46094 |
| 1195_Influenza_A_virus_(A/New_York/392/2004(H3N2))_segment_1_g_4 | 46095 |
| 1195_Influenza_A_virus_(A/New_York/392/2004(H3N2))_segment_1_g_5 | 46096 |
| 1196_Human_papillomavirus_type_178_g_1 | 46097 |
| 1196_Human_papillomavirus_type_178_g_2 | 46098 |
| 1196_Human_papillomavirus_type_178_g_3 | 46099 |
| 1196_Human_papillomavirus_type_178_g_4 | 46100 |
| 1196_Human_papillomavirus_type_178_g_5 | 46101 |
| 1197_Human_papillomavirus_type_178_g_1 | 46102 |
| 1197_Human_papillomavirus_type_178_g_2 | 46103 |
| 1197_Human_papillomavirus_type_178_g_3 | 46104 |
| 1197_Human_papillomavirus_type_178_g_4 | 46105 |
| 1197_Human_papillomavirus_type_178_g_5 | 46106 |
| 1198_Human_papillomavirus_type_178_g_1 | 46107 |
| 1198_Human_papillomavirus_type_178_g_2 | 46108 |
| 1198_Human_papillomavirus_type_178_g_3 | 46109 |
| 1198_Human_papillomavirus_type_178_g_4 | 46110 |
| 1198_Human_papillomavirus_type_178_g_5 | 46111 |
| 1199_Human_papillomavirus_type_178_g_1 | 46112 |
| 1199_Human_papillomavirus_type_178_g_2 | 46113 |
| 1199_Human_papillomavirus_type_178_g_3 | 46114 |
| 1199_Human_papillomavirus_type_178_g_4 | 46115 |
| 1199_Human_papillomavirus_type_178_g_5 | 46116 |
| 1200_Human_papillomavirus_type_178_g_1 | 46117 |
| 1200_Human_papillomavirus_type_178_g_2 | 46118 |
| 1200_Human_papillomavirus_type_178_g_3 | 46119 |
| 1200_Human_papillomavirus_type_178_g_4 | 46120 |
| 1200_Human_papillomavirus_type_178_g_5 | 46121 |
| 1201_Human_papillomavirus_type_178_g_1 | 46122 |
| 1201_Human_papillomavirus_type_178_g_2 | 46123 |
| 1201_Human_papillomavirus_type_178_g_3 | 46124 |
| 1201_Human_papillomavirus_type_178_g_4 | 46125 |
| 1201_Human_papillomavirus_type_178_g_5 | 46126 |
| 1202_Human_papillomavirus_type_178_g_1 | 46127 |
| 1202_Human_papillomavirus_type_178_g_2 | 46128 |
| 1202_Human_papillomavirus_type_178_g_3 | 46129 |
| 1202_Human_papillomavirus_type_178_g_4 | 46130 |
| 1202_Human_papillomavirus_type_178_g_5 | 46131 |
| 1203_Human_papillomavirus_type_178_g_1 | 46132 |
| 1203_Human_papillomavirus_type_178_g_2 | 46133 |
| 1203_Human_papillomavirus_type_178_g_3 | 46134 |
| 1203_Human_papillomavirus_type_178_g_4 | 46135 |
| 1203_Human_papillomavirus_type_178_g_5 | 46136 |
| 1204_Human_papillomavirus_type_178_g_1 | 46137 |
| 1204_Human_papillomavirus_type_178_g_2 | 46138 |
| 1204_Human_papillomavirus_type_178_g_3 | 46139 |
| 1204_Human_papillomavirus_type_178_g_4 | 46140 |
| 1204_Human_papillomavirus_type_178_g_5 | 46141 |
| 1205_Human_papillomavirus_type_178_g_1 | 46142 |
| 1205_Human_papillomavirus_type_178_g_2 | 46143 |
| 1205_Human_papillomavirus_type_178_g_3 | 46144 |
| 1205_Human_papillomavirus_type_178_g_4 | 46145 |
| 1205_Human_papillomavirus_type_178_g_5 | 46146 |
| 1206_Human_papillomavirus_type_178_g_1 | 46147 |
| 1206_Human_papillomavirus_type_178_g_2 | 46148 |
| 1206_Human_papillomavirus_type_178_g_3 | 46149 |
| 1206_Human_papillomavirus_type_178_g_4 | 46150 |
| 1206_Human_papillomavirus_type_178_g_5 | 46151 |
| 1207_Human_papillomavirus_type_178_g_1 | 46152 |
| 1207_Human_papillomavirus_type_178_g_2 | 46153 |
| 1207_Human_papillomavirus_type_178_g_3 | 46154 |
| 1207_Human_papillomavirus_type_178_g_4 | 46155 |
| 1207_Human_papillomavirus_type_178_g_5 | 46156 |
| 1208_Human_papillomavirus_type_178_g_1 | 46157 |
| 1208_Human_papillomavirus_type_178_g_2 | 46158 |
| 1208_Human_papillomavirus_type_178_g_3 | 46159 |
| 1208_Human_papillomavirus_type_178_g_4 | 46160 |
| 1208_Human_papillomavirus_type_178_g_5 | 46161 |
| 1209_Human_papillomavirus_type_178_g_1 | 46162 |
| 1209_Human_papillomavirus_type_178_g_2 | 46163 |
| 1209_Human_papillomavirus_type_178_g_3 | 46164 |
| 1209_Human_papillomavirus_type_178_g_4 | 46165 |
| 1209_Human_papillomavirus_type_178_g_5 | 46166 |
| 1210_Human_papillomavirus_type_178_g_1 | 46167 |
| 1210_Human_papillomavirus_type_178_g_2 | 46168 |
| 1210_Human_papillomavirus_type_178_g_3 | 46169 |
| 1210_Human_papillomavirus_type_178_g_4 | 46170 |
| 1210_Human_papillomavirus_type_178_g_5 | 46171 |
| 1211_Human_papillomavirus_type_178_g_1 | 46172 |
| 1211_Human_papillomavirus_type_178_g_2 | 46173 |
| 1211_Human_papillomavirus_type_178_g_3 | 46174 |
| 1211_Human_papillomavirus_type_178_g_4 | 46175 |
| 1211_Human_papillomavirus_type_178_g_5 | 46176 |
| 1212_Human_papillomavirus_type_178_g_1 | 46177 |
| 1212_Human_papillomavirus_type_178_g_2 | 46178 |
| 1212_Human_papillomavirus_type_178_g_3 | 46179 |
| 1212_Human_papillomavirus_type_178_g_4 | 46180 |
| 1212_Human_papillomavirus_type_178_g_5 | 46181 |
| 1213_Human_papillomavirus_type_48_g_1 | 46182 |
| 1213_Human_papillomavirus_type_48_g_2 | 46183 |
| 1213_Human_papillomavirus_type_48_g_3 | 46184 |
| 1213_Human_papillomavirus_type_48_g_4 | 46185 |
| 1213_Human_papillomavirus_type_48_g_5 | 46186 |
| 1214_Human_papillomavirus_type_48_g_1 | 46187 |
| 1214_Human_papillomavirus_type_48_g_2 | 46188 |
| 1214_Human_papillomavirus_type_48_g_3 | 46189 |
| 1214_Human_papillomavirus_type_48_g_4 | 46190 |
| 1214_Human_papillomavirus_type_48_g_5 | 46191 |
| 1215_Human_papillomavirus_type_48_g_1 | 46192 |
| 1215_Human_papillomavirus_type_48_g_2 | 46193 |
| 1215_Human_papillomavirus_type_48_g_3 | 46194 |
| 1215_Human_papillomavirus_type_48_g_4 | 46195 |
| 1215_Human_papillomavirus_type_48_g_5 | 46196 |
| 1216_Human_papillomavirus_type_48_g_1 | 46197 |
| 1216_Human_papillomavirus_type_48_g_2 | 46198 |
| 1216_Human_papillomavirus_type_48_g_3 | 46199 |
| 1216_Human_papillomavirus_type_48_g_4 | 46200 |
| 1216_Human_papillomavirus_type_48_g_5 | 46201 |
| 1217_Human_papillomavirus_type_48_g_1 | 46202 |
| 1217_Human_papillomavirus_type_48_g_2 | 46203 |
| 1217_Human_papillomavirus_type_48_g_3 | 46204 |
| 1217_Human_papillomavirus_type_48_g_4 | 46205 |
| 1217_Human_papillomavirus_type_48_g_5 | 46206 |
| 1218_Human_papillomavirus_type_48_g_1 | 46207 |
| 1218_Human_papillomavirus_type_48_g_2 | 46208 |
| 1218_Human_papillomavirus_type_48_g_3 | 46209 |
| 1218_Human_papillomavirus_type_48_g_4 | 46210 |
| 1218_Human_papillomavirus_type_48_g_5 | 46211 |
| 1219_Human_papillomavirus_type_48_g_1 | 46212 |
| 1219_Human_papillomavirus_type_48_g_2 | 46213 |
| 1219_Human_papillomavirus_type_48_g_3 | 46214 |
| 1219_Human_papillomavirus_type_48_g_4 | 46215 |
| 1219_Human_papillomavirus_type_48_g_5 | 46216 |
| 1220_Human_papillomavirus_type_48_g_1 | 46217 |
| 1220_Human_papillomavirus_type_48_g_2 | 46218 |
| 1220_Human_papillomavirus_type_48_g_3 | 46219 |
| 1220_Human_papillomavirus_type_48_g_4 | 46220 |
| 1220_Human_papillomavirus_type_48_g_5 | 46221 |
| 1221_Human_papillomavirus_type_48_g_1 | 46222 |
| 1221_Human_papillomavirus_type_48_g_2 | 46223 |
| 1221_Human_papillomavirus_type_48_g_3 | 46224 |
| 1221_Human_papillomavirus_type_48_g_4 | 46225 |
| 1221_Human_papillomavirus_type_48_g_5 | 46226 |
| 1222_Human_immunodeficiency_virus_2_g_1 | 46227 |
| 1222_Human_immunodeficiency_virus_2_g_2 | 46228 |
| 1222_Human_immunodeficiency_virus_2_g_3 | 46229 |
| 1222_Human_immunodeficiency_virus_2_g_4 | 46230 |
| 1222_Human_immunodeficiency_virus_2_g_5 | 46231 |
| 1223_Human_immunodeficiency_virus_2_g_1 | 46232 |
| 1223_Human_immunodeficiency_virus_2_g_2 | 46233 |
| 1223_Human_immunodeficiency_virus_2_g_3 | 46234 |
| 1223_Human_immunodeficiency_virus_2_g_4 | 46235 |
| 1223_Human_immunodeficiency_virus_2_g_5 | 46236 |
| 1224_Human_immunodeficiency_virus_2_g_1 | 46237 |
| 1224_Human_immunodeficiency_virus_2_g_2 | 46238 |
| 1224_Human_immunodeficiency_virus_2_g_3 | 46239 |
| 1224_Human_immunodeficiency_virus_2_g_4 | 46240 |
| 1224_Human_immunodeficiency_virus_2_g_5 | 46241 |
| 1225_Human_immunodeficiency_virus_2_g_1 | 46242 |
| 1225_Human_immunodeficiency_virus_2_g_2 | 46243 |
| 1225_Human_immunodeficiency_virus_2_g_3 | 46244 |
| 1225_Human_immunodeficiency_virus_2_g_4 | 46245 |
| 1225_Human_immunodeficiency_virus_2_g_5 | 46246 |
| 1226_Human_immunodeficiency_virus_2_g_1 | 46247 |
| 1226_Human_immunodeficiency_virus_2_g_2 | 46248 |
| 1226_Human_immunodeficiency_virus_2_g_3 | 46249 |
| 1226_Human_immunodeficiency_virus_2_g_4 | 46250 |
| 1226_Human_immunodeficiency_virus_2_g_5 | 46251 |
| 1227_Human_immunodeficiency_virus_2_g_1 | 46252 |
| 1227_Human_immunodeficiency_virus_2_g_2 | 46253 |
| 1227_Human_immunodeficiency_virus_2_g_3 | 46254 |
| 1227_Human_immunodeficiency_virus_2_g_4 | 46255 |
| 1227_Human_immunodeficiency_virus_2_g_5 | 46256 |
| 1228_Human_immunodeficiency_virus_2_g_1 | 46257 |
| 1228_Human_immunodeficiency_virus_2_g_2 | 46258 |
| 1228_Human_immunodeficiency_virus_2_g_3 | 46259 |
| 1228_Human_immunodeficiency_virus_2_g_4 | 46260 |
| 1228_Human_immunodeficiency_virus_2_g_5 | 46261 |
| 1229_Human_immunodeficiency_virus_2_g_1 | 46262 |
| 1229_Human_immunodeficiency_virus_2_g_2 | 46263 |
| 1229_Human_immunodeficiency_virus_2_g_3 | 46264 |
| 1229_Human_immunodeficiency_virus_2_g_4 | 46265 |
| 1229_Human_immunodeficiency_virus_2_g_5 | 46266 |
| 1230_Human_immunodeficiency_virus_2_g_1 | 46267 |
| 1230_Human_immunodeficiency_virus_2_g_2 | 46268 |
| 1230_Human_immunodeficiency_virus_2_g_3 | 46269 |
| 1230_Human_immunodeficiency_virus_2_g_4 | 46270 |
| 1230_Human_immunodeficiency_virus_2_g_5 | 46271 |
| 1231_Human_immunodeficiency_virus_2_g_1 | 46272 |
| 1231_Human_immunodeficiency_virus_2_g_2 | 46273 |
| 1231_Human_immunodeficiency_virus_2_g_3 | 46274 |
| 1231_Human_immunodeficiency_virus_2_g_4 | 46275 |
| 1231_Human_immunodeficiency_virus_2_g_5 | 46276 |
| 1232_Human_immunodeficiency_virus_2_g_1 | 46277 |
| 1232_Human_immunodeficiency_virus_2_g_2 | 46278 |
| 1232_Human_immunodeficiency_virus_2_g_3 | 46279 |
| 1232_Human_immunodeficiency_virus_2_g_4 | 46280 |
| 1232_Human_immunodeficiency_virus_2_g_5 | 46281 |
| 1233_Human_immunodeficiency_virus_2_g_1 | 46282 |
| 1233_Human_immunodeficiency_virus_2_g_2 | 46283 |
| 1233_Human_immunodeficiency_virus_2_g_3 | 46284 |
| 1233_Human_immunodeficiency_virus_2_g_4 | 46285 |
| 1233_Human_immunodeficiency_virus_2_g_5 | 46286 |
| 1234_Human_immunodeficiency_virus_2_g_1 | 46287 |
| 1234_Human_immunodeficiency_virus_2_g_2 | 46288 |
| 1234_Human_immunodeficiency_virus_2_g_3 | 46289 |
| 1234_Human_immunodeficiency_virus_2_g_4 | 46290 |
| 1234_Human_immunodeficiency_virus_2_g_5 | 46291 |
| 1235_Human_immunodeficiency_virus_2_g_1 | 46292 |
| 1235_Human_immunodeficiency_virus_2_g_2 | 46293 |
| 1235_Human_immunodeficiency_virus_2_g_3 | 46294 |
| 1235_Human_immunodeficiency_virus_2_g_4 | 46295 |
| 1235_Human_immunodeficiency_virus_2_g_5 | 46296 |
| 1236_Human_immunodeficiency_virus_2_g_1 | 46297 |
| 1236_Human_immunodeficiency_virus_2_g_2 | 46298 |
| 1236_Human_immunodeficiency_virus_2_g_3 | 46299 |
| 1236_Human_immunodeficiency_virus_2_g_4 | 46300 |
| 1236_Human_immunodeficiency_virus_2_g_5 | 46301 |
| 1237_Human_immunodeficiency_virus_2_g_1 | 46302 |
| 1237_Human_immunodeficiency_virus_2_g_2 | 46303 |
| 1237_Human_immunodeficiency_virus_2_g_3 | 46304 |
| 1237_Human_immunodeficiency_virus_2_g_4 | 46305 |
| 1237_Human_immunodeficiency_virus_2_g_5 | 46306 |
| 1238_Human_immunodeficiency_virus_2_g_1 | 46307 |
| 1238_Human_immunodeficiency_virus_2_g_2 | 46308 |
| 1238_Human_immunodeficiency_virus_2_g_3 | 46309 |
| 1238_Human_immunodeficiency_virus_2_g_4 | 46310 |
| 1238_Human_immunodeficiency_virus_2_g_5 | 46311 |
| 1239_Human_immunodeficiency_virus_2_g_1 | 46312 |
| 1239_Human_immunodeficiency_virus_2_g_2 | 46313 |
| 1239_Human_immunodeficiency_virus_2_g_3 | 46314 |
| 1239_Human_immunodeficiency_virus_2_g_4 | 46315 |
| 1239_Human_immunodeficiency_virus_2_g_5 | 46316 |
| 1240_Human_immunodeficiency_virus_2_g_1 | 46317 |
| 1240_Human_immunodeficiency_virus_2_g_2 | 46318 |
| 1240_Human_immunodeficiency_virus_2_g_3 | 46319 |
| 1240_Human_immunodeficiency_virus_2_g_4 | 46320 |
| 1240_Human_immunodeficiency_virus_2_g_5 | 46321 |
| 1241_Human_immunodeficiency_virus_2_g_1 | 46322 |
| 1241_Human_immunodeficiency_virus_2_g_2 | 46323 |
| 1241_Human_immunodeficiency_virus_2_g_3 | 46324 |
| 1241_Human_immunodeficiency_virus_2_g_4 | 46325 |
| 1241_Human_immunodeficiency_virus_2_g_5 | 46326 |
| 1242_Human_immunodeficiency_virus_2_g_1 | 46327 |
| 1242_Human_immunodeficiency_virus_2_g_2 | 46328 |
| 1242_Human_immunodeficiency_virus_2_g_3 | 46329 |
| 1242_Human_immunodeficiency_virus_2_g_4 | 46330 |
| 1242_Human_immunodeficiency_virus_2_g_5 | 46331 |
| 1243_Human_immunodeficiency_virus_2_g_1 | 46332 |
| 1243_Human_immunodeficiency_virus_2_g_2 | 46333 |
| 1243_Human_immunodeficiency_virus_2_g_3 | 46334 |
| 1243_Human_immunodeficiency_virus_2_g_4 | 46335 |
| 1243_Human_immunodeficiency_virus_2_g_5 | 46336 |
| 1244_Human_immunodeficiency_virus_2_g_1 | 46337 |
| 1244_Human_immunodeficiency_virus_2_g_2 | 46338 |
| 1244_Human_immunodeficiency_virus_2_g_3 | 46339 |
| 1244_Human_immunodeficiency_virus_2_g_4 | 46340 |
| 1244_Human_immunodeficiency_virus_2_g_5 | 46341 |
| 1245_Human_immunodeficiency_virus_2_g_1 | 46342 |
| 1245_Human_immunodeficiency_virus_2_g_2 | 46343 |
| 1245_Human_immunodeficiency_virus_2_g_3 | 46344 |
| 1245_Human_immunodeficiency_virus_2_g_4 | 46345 |
| 1245_Human_immunodeficiency_virus_2_g_5 | 46346 |
| 1246_Human_immunodeficiency_virus_2_g_1 | 46347 |
| 1246_Human_immunodeficiency_virus_2_g_2 | 46348 |
| 1246_Human_immunodeficiency_virus_2_g_3 | 46349 |
| 1246_Human_immunodeficiency_virus_2_g_4 | 46350 |
| 1246_Human_immunodeficiency_virus_2_g_5 | 46351 |
| 1247_Human_immunodeficiency_virus_2_g_1 | 46352 |
| 1247_Human_immunodeficiency_virus_2_g_2 | 46353 |
| 1247_Human_immunodeficiency_virus_2_g_3 | 46354 |
| 1247_Human_immunodeficiency_virus_2_g_4 | 46355 |
| 1247_Human_immunodeficiency_virus_2_g_5 | 46356 |
| 1248_Human_immunodeficiency_virus_2_g_1 | 46357 |
| 1248_Human_immunodeficiency_virus_2_g_2 | 46358 |
| 1248_Human_immunodeficiency_virus_2_g_3 | 46359 |
| 1248_Human_immunodeficiency_virus_2_g_4 | 46360 |
| 1248_Human_immunodeficiency_virus_2_g_5 | 46361 |
| 1249_Human_immunodeficiency_virus_2_g_1 | 46362 |
| 1249_Human_immunodeficiency_virus_2_g_2 | 46363 |
| 1249_Human_immunodeficiency_virus_2_g_3 | 46364 |
| 1249_Human_immunodeficiency_virus_2_g_4 | 46365 |
| 1249_Human_immunodeficiency_virus_2_g_5 | 46366 |
| 1250_Influenza_B_virus_(B/Lee/1940)_segment_4_g_1 | 46367 |
| 1250_Influenza_B_virus_(B/Lee/1940)_segment_4_g_2 | 46368 |
| 1250_Influenza_B_virus_(B/Lee/1940)_segment_4_g_3 | 46369 |
| 1250_Influenza_B_virus_(B/Lee/1940)_segment_4_g_4 | 46370 |
| 1250_Influenza_B_virus_(B/Lee/1940)_segment_4_g_5 | 46371 |
| 1251_Influenza_B_virus_(B/Lee/1940)_segment_4_g_1 | 46372 |
| 1251_Influenza_B_virus_(B/Lee/1940)_segment_4_g_2 | 46373 |
| 1251_Influenza_B_virus_(B/Lee/1940)_segment_4_g_3 | 46374 |
| 1251_Influenza_B_virus_(B/Lee/1940)_segment_4_g_4 | 46375 |
| 1251_Influenza_B_virus_(B/Lee/1940)_segment_4_g_5 | 46376 |
| 1252_Influenza_B_virus_(B/Lee/1940)_segment_4_g_1 | 46377 |
| 1252_Influenza_B_virus_(B/Lee/1940)_segment_4_g_2 | 46378 |
| 1252_Influenza_B_virus_(B/Lee/1940)_segment_4_g_3 | 46379 |
| 1252_Influenza_B_virus_(B/Lee/1940)_segment_4_g_4 | 46380 |
| 1252_Influenza_B_virus_(B/Lee/1940)_segment_4_g_5 | 46381 |
| 1253_Influenza_B_virus_(B/Lee/1940)_segment_4_g_1 | 46382 |
| 1253_Influenza_B_virus_(B/Lee/1940)_segment_4_g_2 | 46383 |
| 1253_Influenza_B_virus_(B/Lee/1940)_segment_4_g_3 | 46384 |
| 1253_Influenza_B_virus_(B/Lee/1940)_segment_4_g_4 | 46385 |
| 1253_Influenza_B_virus_(B/Lee/1940)_segment_4_g_5 | 46386 |
| 1254_Influenza_B_virus_(B/Lee/1940)_segment_4_g_1 | 46387 |
| 1254_Influenza_B_virus_(B/Lee/1940)_segment_4_g_2 | 46388 |
| 1254_Influenza_B_virus_(B/Lee/1940)_segment_4_g_3 | 46389 |
| 1254_Influenza_B_virus_(B/Lee/1940)_segment_4_g_4 | 46390 |
| 1254_Influenza_B_virus_(B/Lee/1940)_segment_4_g_5 | 46391 |
| 1255_Influenza_B_virus_(B/Lee/1940)_segment_4_g_1 | 46392 |
| 1255_Influenza_B_virus_(B/Lee/1940)_segment_4_g_2 | 46393 |
| 1255_Influenza_B_virus_(B/Lee/1940)_segment_4_g_3 | 46394 |
| 1255_Influenza_B_virus_(B/Lee/1940)_segment_4_g_4 | 46395 |
| 1255_Influenza_B_virus_(B/Lee/1940)_segment_4_g_5 | 46396 |
| 1256_Influenza_B_virus_(B/Lee/1940)_segment_4_g_1 | 46397 |
| 1256_Influenza_B_virus_(B/Lee/1940)_segment_4_g_2 | 46398 |
| 1256_Influenza_B_virus_(B/Lee/1940)_segment_4_g_3 | 46399 |
| 1256_Influenza_B_virus_(B/Lee/1940)_segment_4_g_4 | 46400 |
| 1256_Influenza_B_virus_(B/Lee/1940)_segment_4_g_5 | 46401 |
| 1257_Influenza_A_virus_(A/goose/Guangdong/1/1996(H5N1))_segment_7_g_1 | 46402 |
| 1257_Influenza_A_virus_(A/goose/Guangdong/1/1996(H5N1))_segment_7_g_2 | 46403 |
| 1257_Influenza_A_virus_(A/goose/Guangdong/1/1996(H5N1))_segment_7_g_3 | 46404 |
| 1257_Influenza_A_virus_(A/goose/Guangdong/1/1996(H5N1))_segment_7_g_4 | 46405 |
| 1257_Influenza_A_virus_(A/goose/Guangdong/1/1996(H5N1))_segment_7_g_5 | 46406 |
| 1258_Influenza_A_virus_(A/goose/Guangdong/1/1996(H5N1))_segment_7_g_1 | 46407 |
| 1258_Influenza_A_virus_(A/goose/Guangdong/1/1996(H5N1))_segment_7_g_2 | 46408 |
| 1259_Influenza_A_virus_(A/goose/Guangdong/1/1996(H5N1))_segment_7_g_1 | 46409 |
| 1259_Influenza_A_virus_(A/goose/Guangdong/1/1996(H5N1))_segment_7_g_2 | 46410 |
| 1259_Influenza_A_virus_(A/goose/Guangdong/1/1996(H5N1))_segment_7_g_3 | 46411 |
| 1259_Influenza_A_virus_(A/goose/Guangdong/1/1996(H5N1))_segment_7_g_4 | 46412 |
| 1259_Influenza_A_virus_(A/goose/Guangdong/1/1996(H5N1))_segment_7_g_5 | 46413 |
| 1260_Human_papillomavirus_type_161_isolate_KC1_g_1 | 46414 |
| 1260_Human_papillomavirus_type_161_isolate_KC1_g_2 | 46415 |
| 1260_Human_papillomavirus_type_161_isolate_KC1_g_3 | 46416 |
| 1260_Human_papillomavirus_type_161_isolate_KC1_g_4 | 46417 |
| 1260_Human_papillomavirus_type_161_isolate_KC1_g_5 | 46418 |
| 1261_Human_papillomavirus_type_161_isolate_KC1_g_1 | 46419 |
| 1261_Human_papillomavirus_type_161_isolate_KC1_g_2 | 46420 |
| 1261_Human_papillomavirus_type_161_isolate_KC1_g_3 | 46421 |
| 1261_Human_papillomavirus_type_161_isolate_KC1_g_4 | 46422 |
| 1261_Human_papillomavirus_type_161_isolate_KC1_g_5 | 46423 |
| 1262_Human_papillomavirus_type_161_isolate_KC1_g_1 | 46424 |
| 1262_Human_papillomavirus_type_161_isolate_KC1_g_2 | 46425 |
| 1262_Human_papillomavirus_type_161_isolate_KC1_g_3 | 46426 |
| 1262_Human_papillomavirus_type_161_isolate_KC1_g_4 | 46427 |
| 1262_Human_papillomavirus_type_161_isolate_KC1_g_5 | 46428 |
| 1263_Human_papillomavirus_type_161_isolate_KC1_g_1 | 46429 |
| 1263_Human_papillomavirus_type_161_isolate_KC1_g_2 | 46430 |
| 1263_Human_papillomavirus_type_161_isolate_KC1_g_3 | 46431 |
| 1263_Human_papillomavirus_type_161_isolate_KC1_g_4 | 46432 |
| 1263_Human_papillomavirus_type_161_isolate_KC1_g_5 | 46433 |
| 1264_Human_papillomavirus_type_161_isolate_KC1_g_1 | 46434 |
| 1264_Human_papillomavirus_type_161_isolate_KC1_g_2 | 46435 |
| 1264_Human_papillomavirus_type_161_isolate_KC1_g_3 | 46436 |
| 1264_Human_papillomavirus_type_161_isolate_KC1_g_4 | 46437 |
| 1264_Human_papillomavirus_type_161_isolate_KC1_g_5 | 46438 |
| 1265_Human_papillomavirus_type_161_isolate_KC1_g_1 | 46439 |
| 1265_Human_papillomavirus_type_161_isolate_KC1_g_2 | 46440 |
| 1265_Human_papillomavirus_type_161_isolate_KC1_g_3 | 46441 |
| 1265_Human_papillomavirus_type_161_isolate_KC1_g_4 | 46442 |
| 1265_Human_papillomavirus_type_161_isolate_KC1_g_5 | 46443 |
| 1266_Human_papillomavirus_type_161_isolate_KC1_g_1 | 46444 |
| 1266_Human_papillomavirus_type_161_isolate_KC1_g_2 | 46445 |
| 1266_Human_papillomavirus_type_161_isolate_KC1_g_3 | 46446 |
| 1266_Human_papillomavirus_type_161_isolate_KC1_g_4 | 46447 |
| 1266_Human_papillomavirus_type_161_isolate_KC1_g_5 | 46448 |
| 1267_Human_papillomavirus_type_161_isolate_KC1_g_1 | 46449 |
| 1267_Human_papillomavirus_type_161_isolate_KC1_g_2 | 46450 |
| 1267_Human_papillomavirus_type_161_isolate_KC1_g_3 | 46451 |
| 1267_Human_papillomavirus_type_161_isolate_KC1_g_4 | 46452 |
| 1267_Human_papillomavirus_type_161_isolate_KC1_g_5 | 46453 |
| 1268_Human_papillomavirus_type_161_isolate_KC1_g_1 | 46454 |
| 1268_Human_papillomavirus_type_161_isolate_KC1_g_2 | 46455 |
| 1268_Human_papillomavirus_type_161_isolate_KC1_g_3 | 46456 |
| 1268_Human_papillomavirus_type_161_isolate_KC1_g_4 | 46457 |
| 1268_Human_papillomavirus_type_161_isolate_KC1_g_5 | 46458 |
| 1269_Human_papillomavirus_type_161_isolate_KC1_g_1 | 46459 |
| 1269_Human_papillomavirus_type_161_isolate_KC1_g_2 | 46460 |
| 1269_Human_papillomavirus_type_161_isolate_KC1_g_3 | 46461 |
| 1269_Human_papillomavirus_type_161_isolate_KC1_g_4 | 46462 |
| 1269_Human_papillomavirus_type_161_isolate_KC1_g_5 | 46463 |
| 1270_Human_papillomavirus_type_161_isolate_KC1_g_1 | 46464 |
| 1270_Human_papillomavirus_type_161_isolate_KC1_g_2 | 46465 |
| 1270_Human_papillomavirus_type_161_isolate_KC1_g_3 | 46466 |
| 1270_Human_papillomavirus_type_161_isolate_KC1_g_4 | 46467 |
| 1270_Human_papillomavirus_type_161_isolate_KC1_g_5 | 46468 |
| 1271_Human_papillomavirus_type_161_isolate_KC1_g_1 | 46469 |
| 1271_Human_papillomavirus_type_161_isolate_KC1_g_2 | 46470 |
| 1271_Human_papillomavirus_type_161_isolate_KC1_g_3 | 46471 |
| 1271_Human_papillomavirus_type_161_isolate_KC1_g_4 | 46472 |
| 1271_Human_papillomavirus_type_161_isolate_KC1_g_5 | 46473 |
| 1272_Human_papillomavirus_type_161_isolate_KC1_g_1 | 46474 |
| 1272_Human_papillomavirus_type_161_isolate_KC1_g_2 | 46475 |
| 1272_Human_papillomavirus_type_161_isolate_KC1_g_3 | 46476 |
| 1272_Human_papillomavirus_type_161_isolate_KC1_g_4 | 46477 |
| 1272_Human_papillomavirus_type_161_isolate_KC1_g_5 | 46478 |
| 1273_Human_papillomavirus_type_161_isolate_KC1_g_1 | 46479 |
| 1273_Human_papillomavirus_type_161_isolate_KC1_g_2 | 46480 |
| 1273_Human_papillomavirus_type_161_isolate_KC1_g_3 | 46481 |
| 1273_Human_papillomavirus_type_161_isolate_KC1_g_4 | 46482 |
| 1273_Human_papillomavirus_type_161_isolate_KC1_g_5 | 46483 |
| 1274_Human_papillomavirus_type_161_isolate_KC1_g_1 | 46484 |
| 1274_Human_papillomavirus_type_161_isolate_KC1_g_2 | 46485 |
| 1274_Human_papillomavirus_type_161_isolate_KC1_g_3 | 46486 |
| 1274_Human_papillomavirus_type_161_isolate_KC1_g_4 | 46487 |
| 1274_Human_papillomavirus_type_161_isolate_KC1_g_5 | 46488 |
| 1275_Human_papillomavirus_type_154_isolate_PV77_g_1 | 46489 |
| 1275_Human_papillomavirus_type_154_isolate_PV77_g_2 | 46490 |
| 1275_Human_papillomavirus_type_154_isolate_PV77_g_3 | 46491 |
| 1275_Human_papillomavirus_type_154_isolate_PV77_g_4 | 46492 |
| 1275_Human_papillomavirus_type_154_isolate_PV77_g_5 | 46493 |
| 1276_Human_papillomavirus_type_154_isolate_PV77_g_1 | 46494 |
| 1276_Human_papillomavirus_type_154_isolate_PV77_g_2 | 46495 |
| 1276_Human_papillomavirus_type_154_isolate_PV77_g_3 | 46496 |
| 1276_Human_papillomavirus_type_154_isolate_PV77_g_4 | 46497 |
| 1276_Human_papillomavirus_type_154_isolate_PV77_g_5 | 46498 |
| 1277_Human_papillomavirus_type_154_isolate_PV77_g_1 | 46499 |
| 1277_Human_papillomavirus_type_154_isolate_PV77_g_2 | 46500 |
| 1277_Human_papillomavirus_type_154_isolate_PV77_g_3 | 46501 |
| 1277_Human_papillomavirus_type_154_isolate_PV77_g_4 | 46502 |
| 1277_Human_papillomavirus_type_154_isolate_PV77_g_5 | 46503 |
| 1278_Human_papillomavirus_type_154_isolate_PV77_g_1 | 46504 |
| 1278_Human_papillomavirus_type_154_isolate_PV77_g_2 | 46505 |
| 1278_Human_papillomavirus_type_154_isolate_PV77_g_3 | 46506 |
| 1278_Human_papillomavirus_type_154_isolate_PV77_g_4 | 46507 |
| 1278_Human_papillomavirus_type_154_isolate_PV77_g_5 | 46508 |
| 1279_Human_papillomavirus_type_154_isolate_PV77_g_1 | 46509 |
| 1279_Human_papillomavirus_type_154_isolate_PV77_g_2 | 46510 |
| 1279_Human_papillomavirus_type_154_isolate_PV77_g_3 | 46511 |
| 1279_Human_papillomavirus_type_154_isolate_PV77_g_4 | 46512 |
| 1279_Human_papillomavirus_type_154_isolate_PV77_g_5 | 46513 |
| 1280_Human_papillomavirus_type_154_isolate_PV77_g_1 | 46514 |
| 1280_Human_papillomavirus_type_154_isolate_PV77_g_2 | 46515 |
| 1280_Human_papillomavirus_type_154_isolate_PV77_g_3 | 46516 |
| 1280_Human_papillomavirus_type_154_isolate_PV77_g_4 | 46517 |
| 1280_Human_papillomavirus_type_154_isolate_PV77_g_5 | 46518 |
| 1281_Human_papillomavirus_type_154_isolate_PV77_g_1 | 46519 |
| 1281_Human_papillomavirus_type_154_isolate_PV77_g_2 | 46520 |
| 1281_Human_papillomavirus_type_154_isolate_PV77_g_3 | 46521 |
| 1281_Human_papillomavirus_type_154_isolate_PV77_g_4 | 46522 |
| 1281_Human_papillomavirus_type_154_isolate_PV77_g_5 | 46523 |
| 1282_Human_papillomavirus_type_154_isolate_PV77_g_1 | 46524 |
| 1282_Human_papillomavirus_type_154_isolate_PV77_g_2 | 46525 |
| 1282_Human_papillomavirus_type_154_isolate_PV77_g_3 | 46526 |
| 1282_Human_papillomavirus_type_154_isolate_PV77_g_4 | 46527 |
| 1282_Human_papillomavirus_type_154_isolate_PV77_g_5 | 46528 |
| 1283_Human_papillomavirus_type_154_isolate_PV77_g_1 | 46529 |
| 1283_Human_papillomavirus_type_154_isolate_PV77_g_2 | 46530 |
| 1283_Human_papillomavirus_type_154_isolate_PV77_g_3 | 46531 |
| 1283_Human_papillomavirus_type_154_isolate_PV77_g_4 | 46532 |
| 1283_Human_papillomavirus_type_154_isolate_PV77_g_5 | 46533 |
| 1284_Human_papillomavirus_type_154_isolate_PV77_g_1 | 46534 |
| 1284_Human_papillomavirus_type_154_isolate_PV77_g_2 | 46535 |
| 1284_Human_papillomavirus_type_154_isolate_PV77_g_3 | 46536 |
| 1284_Human_papillomavirus_type_154_isolate_PV77_g_4 | 46537 |
| 1284_Human_papillomavirus_type_154_isolate_PV77_g_5 | 46538 |
| 1285_Human_papillomavirus_type_154_isolate_PV77_g_1 | 46539 |
| 1285_Human_papillomavirus_type_154_isolate_PV77_g_2 | 46540 |
| 1285_Human_papillomavirus_type_154_isolate_PV77_g_3 | 46541 |
| 1285_Human_papillomavirus_type_154_isolate_PV77_g_4 | 46542 |
| 1285_Human_papillomavirus_type_154_isolate_PV77_g_5 | 46543 |
| 1286_Human_papillomavirus_type_154_isolate_PV77_g_1 | 46544 |
| 1286_Human_papillomavirus_type_154_isolate_PV77_g_2 | 46545 |
| 1286_Human_papillomavirus_type_154_isolate_PV77_g_3 | 46546 |
| 1286_Human_papillomavirus_type_154_isolate_PV77_g_4 | 46547 |
| 1286_Human_papillomavirus_type_154_isolate_PV77_g_5 | 46548 |
| 1287_Human_papillomavirus_type_154_isolate_PV77_g_1 | 46549 |
| 1287_Human_papillomavirus_type_154_isolate_PV77_g_2 | 46550 |
| 1287_Human_papillomavirus_type_154_isolate_PV77_g_3 | 46551 |
| 1287_Human_papillomavirus_type_154_isolate_PV77_g_4 | 46552 |
| 1287_Human_papillomavirus_type_154_isolate_PV77_g_5 | 46553 |
| 1288_Human_papillomavirus_type_154_isolate_PV77_g_1 | 46554 |
| 1288_Human_papillomavirus_type_154_isolate_PV77_g_2 | 46555 |
| 1288_Human_papillomavirus_type_154_isolate_PV77_g_3 | 46556 |
| 1288_Human_papillomavirus_type_154_isolate_PV77_g_4 | 46557 |
| 1288_Human_papillomavirus_type_154_isolate_PV77_g_5 | 46558 |
| 1289_Influenza_A_virus_PB2_gene_for_polymerase_Pb2_g_1 | 46559 |
| 1289_Influenza_A_virus_PB2_gene_for_polymerase_Pb2_g_2 | 46560 |
| 1289_Influenza_A_virus_PB2_gene_for_polymerase_Pb2_g_3 | 46561 |
| 1289_Influenza_A_virus_PB2_gene_for_polymerase_Pb2_g_4 | 46562 |
| 1289_Influenza_A_virus_PB2_gene_for_polymerase_Pb2_g_5 | 46563 |
| 1290_Influenza_A_virus_PB2_gene_for_polymerase_Pb2_g_1 | 46564 |
| 1290_Influenza_A_virus_PB2_gene_for_polymerase_Pb2_g_2 | 46565 |
| 1290_Influenza_A_virus_PB2_gene_for_polymerase_Pb2_g_3 | 46566 |
| 1290_Influenza_A_virus_PB2_gene_for_polymerase_Pb2_g_4 | 46567 |
| 1290_Influenza_A_virus_PB2_gene_for_polymerase_Pb2_g_5 | 46568 |
| 1291_Influenza_A_virus_PB2_gene_for_polymerase_Pb2_g_1 | 46569 |
| 1291_Influenza_A_virus_PB2_gene_for_polymerase_Pb2_g_2 | 46570 |
| 1291_Influenza_A_virus_PB2_gene_for_polymerase_Pb2_g_3 | 46571 |
| 1291_Influenza_A_virus_PB2_gene_for_polymerase_Pb2_g_4 | 46572 |
| 1291_Influenza_A_virus_PB2_gene_for_polymerase_Pb2_g_5 | 46573 |
| 1292_Influenza_A_virus_PB2_gene_for_polymerase_Pb2_g_1 | 46574 |
| 1292_Influenza_A_virus_PB2_gene_for_polymerase_Pb2_g_2 | 46575 |
| 1292_Influenza_A_virus_PB2_gene_for_polymerase_Pb2_g_3 | 46576 |
| 1292_Influenza_A_virus_PB2_gene_for_polymerase_Pb2_g_4 | 46577 |
| 1292_Influenza_A_virus_PB2_gene_for_polymerase_Pb2_g_5 | 46578 |
| 1293_Influenza_A_virus_PB2_gene_for_polymerase_Pb2_g_1 | 46579 |
| 1293_Influenza_A_virus_PB2_gene_for_polymerase_Pb2_g_2 | 46580 |
| 1293_Influenza_A_virus_PB2_gene_for_polymerase_Pb2_g_3 | 46581 |
| 1293_Influenza_A_virus_PB2_gene_for_polymerase_Pb2_g_4 | 46582 |
| 1293_Influenza_A_virus_PB2_gene_for_polymerase_Pb2_g_5 | 46583 |
| 1294_Influenza_A_virus_PB2_gene_for_polymerase_Pb2_g_1 | 46584 |
| 1294_Influenza_A_virus_PB2_gene_for_polymerase_Pb2_g_2 | 46585 |
| 1294_Influenza_A_virus_PB2_gene_for_polymerase_Pb2_g_3 | 46586 |
| 1294_Influenza_A_virus_PB2_gene_for_polymerase_Pb2_g_4 | 46587 |
| 1294_Influenza_A_virus_PB2_gene_for_polymerase_Pb2_g_5 | 46588 |
| 1295_Influenza_A_virus_PB2_gene_for_polymerase_Pb2_g_1 | 46589 |
| 1295_Influenza_A_virus_PB2_gene_for_polymerase_Pb2_g_2 | 46590 |
| 1295_Influenza_A_virus_PB2_gene_for_polymerase_Pb2_g_3 | 46591 |
| 1295_Influenza_A_virus_PB2_gene_for_polymerase_Pb2_g_4 | 46592 |
| 1295_Influenza_A_virus_PB2_gene_for_polymerase_Pb2_g_5 | 46593 |
| 1296_Influenza_A_virus_PB2_gene_for_polymerase_Pb2_g_1 | 46594 |
| 1296_Influenza_A_virus_PB2_gene_for_polymerase_Pb2_g_2 | 46595 |
| 1296_Influenza_A_virus_PB2_gene_for_polymerase_Pb2_g_3 | 46596 |
| 1296_Influenza_A_virus_PB2_gene_for_polymerase_Pb2_g_4 | 46597 |
| 1296_Influenza_A_virus_PB2_gene_for_polymerase_Pb2_g_5 | 46598 |
| 1297_Influenza_A_virus_PB2_gene_for_polymerase_Pb2_g_1 | 46599 |
| 1297_Influenza_A_virus_PB2_gene_for_polymerase_Pb2_g_2 | 46600 |
| 1297_Influenza_A_virus_PB2_gene_for_polymerase_Pb2_g_3 | 46601 |
| 1297_Influenza_A_virus_PB2_gene_for_polymerase_Pb2_g_4 | 46602 |
| 1297_Influenza_A_virus_PB2_gene_for_polymerase_Pb2_g_5 | 46603 |
| 1298_Influenza_A_virus_(A/Shanghai/02/2013(H7N9))_{—} | 46604 |
| segment_4_hemagglutinin_(HA)_gene_g_1 | |
| 1298_Influenza_A_virus_(A/Shanghai/02/2013(H7N9))_{—} | 46605 |
| segment_4_hemagglutinin_(HA)_gene_g_2 | |
| 1298_Influenza_A_virus_(A/Shanghai/02/2013(H7N9))_{—} | 46606 |
| segment_4_hemagglutinin_(HA)_gene_g_3 | |
| 1298_Influenza_A_virus_(A/Shanghai/02/2013(H7N9))_{—} | 46607 |
| segment_4_hemagglutinin_(HA)_gene_g_4 | |
| 1298_Influenza_A_virus_(A/Shanghai/02/2013(H7N9))_{—} | 46608 |
| segment_4_hemagglutinin_(HA)_gene_g_5 | |
| 1299_Influenza_A_virus_(A/Shanghai/02/2013(H7N9))_{—} | 46609 |
| segment_4_hemagglutinin_(HA)_gene_g_1 | |
| 1299_Influenza_A_virus_(A/Shanghai/02/2013(H7N9))_{—} | 46610 |
| segment_4_hemagglutinin_(HA)_gene_g_2 | |
| 1299_Influenza_A_virus_(A/Shanghai/02/2013(H7N9))_{—} | 46611 |
| segment_4_hemagglutinin_(HA)_gene_g_3 | |
| 1299_Influenza_A_virus_(A/Shanghai/02/2013(H7N9))_{—} | 46612 |
| segment_4_hemagglutinin_(HA)_gene_g_4 | |
| 1299_Influenza_A_virus_(A/Shanghai/02/2013(H7N9))_{—} | 46613 |
| segment_4_hemagglutinin_(HA)_gene_g_5 | |
| 1300_Influenza_A_virus_(A/Shanghai/02/2013(H7N9))_{—} | 46614 |
| segment_4_hemagglutinin_(HA)_gene_g_1 | |
| 1300_Influenza_A_virus_(A/Shanghai/02/2013(H7N9))_{—} | 46615 |
| segment_4_hemagglutinin_(HA)_gene_g_2 | |
| 1300_Influenza_A_virus_(A/Shanghai/02/2013(H7N9))_{—} | 46616 |
| segment_4_hemagglutinin_(HA)_gene_g_3 | |
| 1300_Influenza_A_virus_(A/Shanghai/02/2013(H7N9))_{—} | 46617 |
| segment_4_hemagglutinin_(HA)_gene_g_4 | |
| 1300_Influenza_A_virus_(A/Shanghai/02/2013(H7N9))_{—} | 46618 |
| segment_4_hemagglutinin_(HA)_gene_g_5 | |
| 1301_Influenza_A_virus_(A/Shanghai/02/2013(H7N9))_{—} | 46619 |
| segment_4_hemagglutinin_(HA)_gene_g_1 | |
| 1301_Influenza_A_virus_(A/Shanghai/02/2013(H7N9))_{—} | 46620 |
| segment_4_hemagglutinin_(HA)_gene_g_2 | |
| 1301_Influenza_A_virus_(A/Shanghai/02/2013(H7N9))_{—} | 46621 |
| segment_4_hemagglutinin_(HA)_gene_g_3 | |
| 1301_Influenza_A_virus_(A/Shanghai/02/2013(H7N9))_{—} | 46622 |
| segment_4_hemagglutinin_(HA)_gene_g_4 | |
| 1301_Influenza_A_virus_(A/Shanghai/02/2013(H7N9))_{—} | 46623 |
| segment_4_hemagglutinin_(HA)_gene_g_5 | |
| 1302_Influenza_A_virus_(A/Shanghai/02/2013(H7N9))_{—} | 46624 |
| segment_4_hemagglutinin_(HA)_gene_g_1 | |
| 1302_Influenza_A_virus_(A/Shanghai/02/2013(H7N9))_{—} | 46625 |
| segment_4_hemagglutinin_(HA)_gene_g_2 | |
| 1302_Influenza_A_virus_(A/Shanghai/02/2013(H7N9))_{—} | 46626 |
| segment_4_hemagglutinin_(HA)_gene_g_3 | |
| 1302_Influenza_A_virus_(A/Shanghai/02/2013(H7N9))_{—} | 46627 |
| segment_4_hemagglutinin_(HA)_gene_g_4 | |
| 1302_Influenza_A_virus_(A/Shanghai/02/2013(H7N9))_{—} | 46628 |
| segment_4_hemagglutinin_(HA)_gene_g_5 | |
| 1303_Influenza_A_virus_(A/Shanghai/02/2013(H7N9))_{—} | 46629 |
| segment_4_hemagglutinin_(HA)_gene_g_1 | |
| 1303_Influenza_A_virus_(A/Shanghai/02/2013(H7N9))_{—} | 46630 |
| segment_4_hemagglutinin_(HA)_gene_g_2 | |
| 1303_Influenza_A_virus_(A/Shanghai/02/2013(H7N9))_{—} | 46631 |
| segment_4_hemagglutinin_(HA)_gene_g_3 | |
| 1303_Influenza_A_virus_(A/Shanghai/02/2013(H7N9))_{—} | 46632 |
| segment_4_hemagglutinin_(HA)_gene_g_4 | |
| 1303_Influenza_A_virus_(A/Shanghai/02/2013(H7N9))_{—} | 46633 |
| segment_4_hemagglutinin_(HA)_gene_g_5 | |
| 1304_Human_papillomavirus_type_32_g_1 | 46634 |
| 1304_Human_papillomavirus_type_32_g_2 | 46635 |
| 1304_Human_papillomavirus_type_32_g_3 | 46636 |
| 1304_Human_papillomavirus_type_32_g_4 | 46637 |
| 1304_Human_papillomavirus_type_32_g_5 | 46638 |
| 1305_Human_papillomavirus_type_32_g_1 | 46639 |
| 1305_Human_papillomavirus_type_32_g_2 | 46640 |
| 1305_Human_papillomavirus_type_32_g_3 | 46641 |
| 1305_Human_papillomavirus_type_32_g_4 | 46642 |
| 1305_Human_papillomavirus_type_32_g_5 | 46643 |
| 1306_Human_papillomavirus_type_32_g_1 | 46644 |
| 1306_Human_papillomavirus_type_32_g_2 | 46645 |
| 1306_Human_papillomavirus_type_32_g_3 | 46646 |
| 1306_Human_papillomavirus_type_32_g_4 | 46647 |
| 1306_Human_papillomavirus_type_32_g_5 | 46648 |
| 1307_Human_papillomavirus_type_32_g_1 | 46649 |
| 1307_Human_papillomavirus_type_32_g_2 | 46650 |
| 1307_Human_papillomavirus_type_32_g_3 | 46651 |
| 1307_Human_papillomavirus_type_32_g_4 | 46652 |
| 1307_Human_papillomavirus_type_32_g_5 | 46653 |
| 1308_Human_papillomavirus_type_32_g_1 | 46654 |
| 1308_Human_papillomavirus_type_32_g_2 | 46655 |
| 1308_Human_papillomavirus_type_32_g_3 | 46656 |
| 1308_Human_papillomavirus_type_32_g_4 | 46657 |
| 1308_Human_papillomavirus_type_32_g_5 | 46658 |
| 1309_Human_papillomavirus_type_32_g_1 | 46659 |
| 1309_Human_papillomavirus_type_32_g_2 | 46660 |
| 1309_Human_papillomavirus_type_32_g_3 | 46661 |
| 1309_Human_papillomavirus_type_32_g_4 | 46662 |
| 1309_Human_papillomavirus_type_32_g_5 | 46663 |
| 1310_Human_papillomavirus_type_32_g_1 | 46664 |
| 1310_Human_papillomavirus_type_32_g_2 | 46665 |
| 1310_Human_papillomavirus_type_32_g_3 | 46666 |
| 1310_Human_papillomavirus_type_32_g_4 | 46667 |
| 1310_Human_papillomavirus_type_32_g_5 | 46668 |
| 1311_Human_papillomavirus_type_32_g_1 | 46669 |
| 1311_Human_papillomavirus_type_32_g_2 | 46670 |
| 1311_Human_papillomavirus_type_32_g_3 | 46671 |
| 1311_Human_papillomavirus_type_32_g_4 | 46672 |
| 1311_Human_papillomavirus_type_32_g_5 | 46673 |
| 1312_Human_papillomavirus_type_32_g_1 | 46674 |
| 1312_Human_papillomavirus_type_32_g_2 | 46675 |
| 1312_Human_papillomavirus_type_32_g_3 | 46676 |
| 1312_Human_papillomavirus_type_32_g_4 | 46677 |
| 1312_Human_papillomavirus_type_32_g_5 | 46678 |
| 1313_Human_papillomavirus_type_32_g_1 | 46679 |
| 1313_Human_papillomavirus_type_32_g_2 | 46680 |
| 1313_Human_papillomavirus_type_32_g_3 | 46681 |
| 1313_Human_papillomavirus_type_32_g_4 | 46682 |
| 1313_Human_papillomavirus_type_32_g_5 | 46683 |
| 1314_Human_papillomavirus_type_32_g_1 | 46684 |
| 1314_Human_papillomavirus_type_32_g_2 | 46685 |
| 1314_Human_papillomavirus_type_32_g_3 | 46686 |
| 1314_Human_papillomavirus_type_32_g_4 | 46687 |
| 1314_Human_papillomavirus_type_32_g_5 | 46688 |
| 1315_Human_papillomavirus_type_32_g_1 | 46689 |
| 1315_Human_papillomavirus_type_32_g_2 | 46690 |
| 1315_Human_papillomavirus_type_32_g_3 | 46691 |
| 1315_Human_papillomavirus_type_32_g_4 | 46692 |
| 1315_Human_papillomavirus_type_32_g_5 | 46693 |
| 1316_Human_papillomavirus_type_32_g_1 | 46694 |
| 1316_Human_papillomavirus_type_32_g_2 | 46695 |
| 1316_Human_papillomavirus_type_32_g_3 | 46696 |
| 1316_Human_papillomavirus_type_32_g_4 | 46697 |
| 1316_Human_papillomavirus_type_32_g_5 | 46698 |
| 1317_Human_papillomavirus_type_32_g_1 | 46699 |
| 1317_Human_papillomavirus_type_32_g_2 | 46700 |
| 1317_Human_papillomavirus_type_32_g_3 | 46701 |
| 1317_Human_papillomavirus_type_32_g_4 | 46702 |
| 1317_Human_papillomavirus_type_32_g_5 | 46703 |
| 1318_Human_papillomavirus_type_32_g_1 | 46704 |
| 1318_Human_papillomavirus_type_32_g_2 | 46705 |
| 1318_Human_papillomavirus_type_32_g_3 | 46706 |
| 1318_Human_papillomavirus_type_32_g_4 | 46707 |
| 1318_Human_papillomavirus_type_32_g_5 | 46708 |
| 1319_Human_papillomavirus_type_32_g_1 | 46709 |
| 1319_Human_papillomavirus_type_32_g_2 | 46710 |
| 1319_Human_papillomavirus_type_32_g_3 | 46711 |
| 1319_Human_papillomavirus_type_32_g_4 | 46712 |
| 1319_Human_papillomavirus_type_32_g_5 | 46713 |
| 1320_Human_papillomavirus_type_32_g_1 | 46714 |
| 1320_Human_papillomavirus_type_32_g_2 | 46715 |
| 1320_Human_papillomavirus_type_32_g_3 | 46716 |
| 1320_Human_papillomavirus_type_32_g_4 | 46717 |
| 1320_Human_papillomavirus_type_32_g_5 | 46718 |
| 1321_Human_papillomavirus_type_136_g_1 | 46719 |
| 1321_Human_papillomavirus_type_136_g_2 | 46720 |
| 1321_Human_papillomavirus_type_136_g_3 | 46721 |
| 1321_Human_papillomavirus_type_136_g_4 | 46722 |
| 1321_Human_papillomavirus_type_136_g_5 | 46723 |
| 1322_Human_papillomavirus_type_136_g_1 | 46724 |
| 1322_Human_papillomavirus_type_136_g_2 | 46725 |
| 1322_Human_papillomavirus_type_136_g_3 | 46726 |
| 1322_Human_papillomavirus_type_136_g_4 | 46727 |
| 1322_Human_papillomavirus_type_136_g_5 | 46728 |
| 1323_Human_papillomavirus_type_136_g_1 | 46729 |
| 1323_Human_papillomavirus_type_136_g_2 | 46730 |
| 1323_Human_papillomavirus_type_136_g_3 | 46731 |
| 1323_Human_papillomavirus_type_136_g_4 | 46732 |
| 1323_Human_papillomavirus_type_136_g_5 | 46733 |
| 1324_Human_papillomavirus_type_136_g_1 | 46734 |
| 1324_Human_papillomavirus_type_136_g_2 | 46735 |
| 1324_Human_papillomavirus_type_136_g_3 | 46736 |
| 1324_Human_papillomavirus_type_136_g_4 | 46737 |
| 1324_Human_papillomavirus_type_136_g_5 | 46738 |
| 1325_Human_papillomavirus_type_136_g_1 | 46739 |
| 1325_Human_papillomavirus_type_136_g_2 | 46740 |
| 1325_Human_papillomavirus_type_136_g_3 | 46741 |
| 1325_Human_papillomavirus_type_136_g_4 | 46742 |
| 1325_Human_papillomavirus_type_136_g_5 | 46743 |
| 1326_Human_papillomavirus_type_136_g_1 | 46744 |
| 1326_Human_papillomavirus_type_136_g_2 | 46745 |
| 1326_Human_papillomavirus_type_136_g_3 | 46746 |
| 1326_Human_papillomavirus_type_136_g_4 | 46747 |
| 1326_Human_papillomavirus_type_136_g_5 | 46748 |
| 1327_Human_papillomavirus_type_136_g_1 | 46749 |
| 1327_Human_papillomavirus_type_136_g_2 | 46750 |
| 1327_Human_papillomavirus_type_136_g_3 | 46751 |
| 1327_Human_papillomavirus_type_136_g_4 | 46752 |
| 1327_Human_papillomavirus_type_136_g_5 | 46753 |
| 1328_Human_papillomavirus_type_136_g_1 | 46754 |
| 1328_Human_papillomavirus_type_136_g_2 | 46755 |
| 1328_Human_papillomavirus_type_136_g_3 | 46756 |
| 1328_Human_papillomavirus_type_136_g_4 | 46757 |
| 1328_Human_papillomavirus_type_136_g_5 | 46758 |
| 1329_Human_papillomavirus_type_136_g_1 | 46759 |
| 1329_Human_papillomavirus_type_136_g_2 | 46760 |
| 1329_Human_papillomavirus_type_136_g_3 | 46761 |
| 1329_Human_papillomavirus_type_136_g_4 | 46762 |
| 1329_Human_papillomavirus_type_136_g_5 | 46763 |
| 1330_Human_papillomavirus_type_136_g_1 | 46764 |
| 1330_Human_papillomavirus_type_136_g_2 | 46765 |
| 1330_Human_papillomavirus_type_136_g_3 | 46766 |
| 1330_Human_papillomavirus_type_136_g_4 | 46767 |
| 1330_Human_papillomavirus_type_136_g_5 | 46768 |
| 1331_Human_papillomavirus_type_136_g_1 | 46769 |
| 1331_Human_papillomavirus_type_136_g_2 | 46770 |
| 1331_Human_papillomavirus_type_136_g_3 | 46771 |
| 1331_Human_papillomavirus_type_136_g_4 | 46772 |
| 1331_Human_papillomavirus_type_136_g_5 | 46773 |
| 1332_Influenza_A_virus_(A/Hong_Kong/1073/99(H9N2))_segment_7_g_1 | 46774 |
| 1332_Influenza_A_virus_(A/Hong_Kong/1073/99(H9N2))_segment_7_g_2 | 46775 |
| 1332_Influenza_A_virus_(A/Hong_Kong/1073/99(H9N2))_segment_7_g_3 | 46776 |
| 1332_Influenza_A_virus_(A/Hong_Kong/1073/99(H9N2))_segment_7_g_4 | 46777 |
| 1332_Influenza_A_virus_(A/Hong_Kong/1073/99(H9N2))_segment_7_g_5 | 46778 |
| 1333_Influenza_A_virus_(A/Hong_Kong/1073/99(H9N2))_segment_7_g_1 | 46779 |
| 1333_Influenza_A_virus_(A/Hong_Kong/1073/99(H9N2))_segment_7_g_2 | 46780 |
| 1333_Influenza_A_virus_(A/Hong_Kong/1073/99(H9N2))_segment_7_g_3 | 46781 |
| 1333_Influenza_A_virus_(A/Hong_Kong/1073/99(H9N2))_segment_7_g_4 | 46782 |
| 1333_Influenza_A_virus_(A/Hong_Kong/1073/99(H9N2))_segment_7_g_5 | 46783 |
| 1334_Human_parainfluenza_virus_3_g_1 | 46784 |
| 1334_Human_parainfluenza_virus_3_g_2 | 46785 |
| 1334_Human_parainfluenza_virus_3_g_3 | 46786 |
| 1334_Human_parainfluenza_virus_3_g_4 | 46787 |
| 1334_Human_parainfluenza_virus_3_g_5 | 46788 |
| 1335_Human_parainfluenza_virus_3_g_1 | 46789 |
| 1335_Human_parainfluenza_virus_3_g_2 | 46790 |
| 1335_Human_parainfluenza_virus_3_g_3 | 46791 |
| 1335_Human_parainfluenza_virus_3_g_4 | 46792 |
| 1335_Human_parainfluenza_virus_3_g_5 | 46793 |
| 1336_Human_parainfluenza_virus_3_g_1 | 46794 |
| 1336_Human_parainfluenza_virus_3_g_2 | 46795 |
| 1336_Human_parainfluenza_virus_3_g_3 | 46796 |
| 1336_Human_parainfluenza_virus_3_g_4 | 46797 |
| 1336_Human_parainfluenza_virus_3_g_5 | 46798 |
| 1337_Human_parainfluenza_virus_3_g_1 | 46799 |
| 1337_Human_parainfluenza_virus_3_g_2 | 46800 |
| 1337_Human_parainfluenza_virus_3_g_3 | 46801 |
| 1337_Human_parainfluenza_virus_3_g_4 | 46802 |
| 1337_Human_parainfluenza_virus_3_g_5 | 46803 |
| 1338_Human_parainfluenza_virus_3_g_1 | 46804 |
| 1338_Human_parainfluenza_virus_3_g_2 | 46805 |
| 1338_Human_parainfluenza_virus_3_g_3 | 46806 |
| 1338_Human_parainfluenza_virus_3_g_4 | 46807 |
| 1338_Human_parainfluenza_virus_3_g_5 | 46808 |
| 1339_Human_parainfluenza_virus_3_g_1 | 46809 |
| 1339_Human_parainfluenza_virus_3_g_2 | 46810 |
| 1339_Human_parainfluenza_virus_3_g_3 | 46811 |
| 1339_Human_parainfluenza_virus_3_g_4 | 46812 |
| 1339_Human_parainfluenza_virus_3_g_5 | 46813 |
| 1340_Human_parainfluenza_virus_3_g_1 | 46814 |
| 1340_Human_parainfluenza_virus_3_g_2 | 46815 |
| 1340_Human_parainfluenza_virus_3_g_3 | 46816 |
| 1340_Human_parainfluenza_virus_3_g_4 | 46817 |
| 1340_Human_parainfluenza_virus_3_g_5 | 46818 |
| 1341_Human_parainfluenza_virus_3_g_1 | 46819 |
| 1341_Human_parainfluenza_virus_3_g_2 | 46820 |
| 1341_Human_parainfluenza_virus_3_g_3 | 46821 |
| 1341_Human_parainfluenza_virus_3_g_4 | 46822 |
| 1341_Human_parainfluenza_virus_3_g_5 | 46823 |
| 1342_Human_parainfluenza_virus_3_g_1 | 46824 |
| 1342_Human_parainfluenza_virus_3_g_2 | 46825 |
| 1342_Human_parainfluenza_virus_3_g_3 | 46826 |
| 1342_Human_parainfluenza_virus_3_g_4 | 46827 |
| 1342_Human_parainfluenza_virus_3_g_5 | 46828 |
| 1343_Human_parainfluenza_virus_3_g_1 | 46829 |
| 1343_Human_parainfluenza_virus_3_g_2 | 46830 |
| 1343_Human_parainfluenza_virus_3_g_3 | 46831 |
| 1343_Human_parainfluenza_virus_3_g_4 | 46832 |
| 1343_Human_parainfluenza_virus_3_g_5 | 46833 |
| 1344_Human_parainfluenza_virus_3_g_1 | 46834 |
| 1344_Human_parainfluenza_virus_3_g_2 | 46835 |
| 1344_Human_parainfluenza_virus_3_g_3 | 46836 |
| 1344_Human_parainfluenza_virus_3_g_4 | 46837 |
| 1344_Human_parainfluenza_virus_3_g_5 | 46838 |
| 1345_Human_parainfluenza_virus_3_g_1 | 46839 |
| 1345_Human_parainfluenza_virus_3_g_2 | 46840 |
| 1345_Human_parainfluenza_virus_3_g_3 | 46841 |
| 1345_Human_parainfluenza_virus_3_g_4 | 46842 |
| 1345_Human_parainfluenza_virus_3_g_5 | 46843 |
| 1346_Human_parainfluenza_virus_3_g_1 | 46844 |
| 1346_Human_parainfluenza_virus_3_g_2 | 46845 |
| 1346_Human_parainfluenza_virus_3_g_3 | 46846 |
| 1346_Human_parainfluenza_virus_3_g_4 | 46847 |
| 1346_Human_parainfluenza_virus_3_g_5 | 46848 |
| 1347_Human_parainfluenza_virus_3_g_1 | 46849 |
| 1347_Human_parainfluenza_virus_3_g_2 | 46850 |
| 1347_Human_parainfluenza_virus_3_g_3 | 46851 |
| 1347_Human_parainfluenza_virus_3_g_4 | 46852 |
| 1347_Human_parainfluenza_virus_3_g_5 | 46853 |
| 1348_Human_parainfluenza_virus_3_g_1 | 46854 |
| 1348_Human_parainfluenza_virus_3_g_2 | 46855 |
| 1348_Human_parainfluenza_virus_3_g_3 | 46856 |
| 1348_Human_parainfluenza_virus_3_g_4 | 46857 |
| 1348_Human_parainfluenza_virus_3_g_5 | 46858 |
| 1349_Human_parainfluenza_virus_3_g_1 | 46859 |
| 1349_Human_parainfluenza_virus_3_g_2 | 46860 |
| 1349_Human_parainfluenza_virus_3_g_3 | 46861 |
| 1349_Human_parainfluenza_virus_3_g_4 | 46862 |
| 1349_Human_parainfluenza_virus_3_g_5 | 46863 |
| 1350_Human_parainfluenza_virus_3_g_1 | 46864 |
| 1350_Human_parainfluenza_virus_3_g_2 | 46865 |
| 1350_Human_parainfluenza_virus_3_g_3 | 46866 |
| 1350_Human_parainfluenza_virus_3_g_4 | 46867 |
| 1350_Human_parainfluenza_virus_3_g_5 | 46868 |
| 1351_Human_parainfluenza_virus_3_g_1 | 46869 |
| 1351_Human_parainfluenza_virus_3_g_2 | 46870 |
| 1351_Human_parainfluenza_virus_3_g_3 | 46871 |
| 1351_Human_parainfluenza_virus_3_g_4 | 46872 |
| 1351_Human_parainfluenza_virus_3_g_5 | 46873 |
| 1352_Human_parainfluenza_virus_3_g_1 | 46874 |
| 1352_Human_parainfluenza_virus_3_g_2 | 46875 |
| 1352_Human_parainfluenza_virus_3_g_3 | 46876 |
| 1352_Human_parainfluenza_virus_3_g_4 | 46877 |
| 1352_Human_parainfluenza_virus_3_g_5 | 46878 |
| 1353_Human_parainfluenza_virus_3_g_1 | 46879 |
| 1353_Human_parainfluenza_virus_3_g_2 | 46880 |
| 1353_Human_parainfluenza_virus_3_g_3 | 46881 |
| 1353_Human_parainfluenza_virus_3_g_4 | 46882 |
| 1353_Human_parainfluenza_virus_3_g_5 | 46883 |
| 1354_Human_parainfluenza_virus_3_g_1 | 46884 |
| 1354_Human_parainfluenza_virus_3_g_2 | 46885 |
| 1354_Human_parainfluenza_virus_3_g_3 | 46886 |
| 1354_Human_parainfluenza_virus_3_g_4 | 46887 |
| 1354_Human_parainfluenza_virus_3_g_5 | 46888 |
| 1355_Human_parainfluenza_virus_3_g_1 | 46889 |
| 1355_Human_parainfluenza_virus_3_g_2 | 46890 |
| 1355_Human_parainfluenza_virus_3_g_3 | 46891 |
| 1355_Human_parainfluenza_virus_3_g_4 | 46892 |
| 1355_Human_parainfluenza_virus_3_g_5 | 46893 |
| 1356_Human_coronavirus_229E_g_1 | 46894 |
| 1356_Human_coronavirus_229E_g_2 | 46895 |
| 1356_Human_coronavirus_229E_g_3 | 46896 |
| 1356_Human_coronavirus_229E_g_4 | 46897 |
| 1356_Human_coronavirus_229E_g_5 | 46898 |
| 1357_Human_coronavirus_229E_g_1 | 46899 |
| 1357_Human_coronavirus_229E_g_2 | 46900 |
| 1357_Human_coronavirus_229E_g_3 | 46901 |
| 1357_Human_coronavirus_229E_g_4 | 46902 |
| 1357_Human_coronavirus_229E_g_5 | 46903 |
| 1358_Human_coronavirus_229E_g_1 | 46904 |
| 1358_Human_coronavirus_229E_g_2 | 46905 |
| 1358_Human_coronavirus_229E_g_3 | 46906 |
| 1358_Human_coronavirus_229E_g_4 | 46907 |
| 1358_Human_coronavirus_229E_g_5 | 46908 |
| 1359_Human_coronavirus_229E_g_1 | 46909 |
| 1359_Human_coronavirus_229E_g_2 | 46910 |
| 1359_Human_coronavirus_229E_g_3 | 46911 |
| 1359_Human_coronavirus_229E_g_4 | 46912 |
| 1359_Human_coronavirus_229E_g_5 | 46913 |
| 1360_Human_coronavirus_229E_g_1 | 46914 |
| 1360_Human_coronavirus_229E_g_2 | 46915 |
| 1360_Human_coronavirus_229E_g_3 | 46916 |
| 1360_Human_coronavirus_229E_g_4 | 46917 |
| 1360_Human_coronavirus_229E_g_5 | 46918 |
| 1361_Human_coronavirus_229E_g_1 | 46919 |
| 1361_Human_coronavirus_229E_g_2 | 46920 |
| 1361_Human_coronavirus_229E_g_3 | 46921 |
| 1361_Human_coronavirus_229E_g_4 | 46922 |
| 1361_Human_coronavirus_229E_g_5 | 46923 |
| 1362_Human_coronavirus_229E_g_1 | 46924 |
| 1362_Human_coronavirus_229E_g_2 | 46925 |
| 1362_Human_coronavirus_229E_g_3 | 46926 |
| 1362_Human_coronavirus_229E_g_4 | 46927 |
| 1362_Human_coronavirus_229E_g_5 | 46928 |
| 1363_Human_coronavirus_229E_g_1 | 46929 |
| 1363_Human_coronavirus_229E_g_2 | 46930 |
| 1363_Human_coronavirus_229E_g_3 | 46931 |
| 1363_Human_coronavirus_229E_g_4 | 46932 |
| 1363_Human_coronavirus_229E_g_5 | 46933 |
| 1364_Human_coronavirus_229E_g_1 | 46934 |
| 1364_Human_coronavirus_229E_g_2 | 46935 |
| 1364_Human_coronavirus_229E_g_3 | 46936 |
| 1364_Human_coronavirus_229E_g_4 | 46937 |
| 1364_Human_coronavirus_229E_g_5 | 46938 |
| 1365_Human_coronavirus_229E_g_1 | 46939 |
| 1365_Human_coronavirus_229E_g_2 | 46940 |
| 1365_Human_coronavirus_229E_g_3 | 46941 |
| 1365_Human_coronavirus_229E_g_4 | 46942 |
| 1365_Human_coronavirus_229E_g_5 | 46943 |
| 1366_Human_coronavirus_229E_g_1 | 46944 |
| 1366_Human_coronavirus_229E_g_2 | 46945 |
| 1366_Human_coronavirus_229E_g_3 | 46946 |
| 1366_Human_coronavirus_229E_g_4 | 46947 |
| 1366_Human_coronavirus_229E_g_5 | 46948 |
| 1367_Human_coronavirus_229E_g_1 | 46949 |
| 1367_Human_coronavirus_229E_g_2 | 46950 |
| 1367_Human_coronavirus_229E_g_3 | 46951 |
| 1367_Human_coronavirus_229E_g_4 | 46952 |
| 1367_Human_coronavirus_229E_g_5 | 46953 |
| 1368_Human_coronavirus_229E_g_1 | 46954 |
| 1368_Human_coronavirus_229E_g_2 | 46955 |
| 1368_Human_coronavirus_229E_g_3 | 46956 |
| 1368_Human_coronavirus_229E_g_4 | 46957 |
| 1368_Human_coronavirus_229E_g_5 | 46958 |
| 1369_Human_coronavirus_229E_g_1 | 46959 |
| 1369_Human_coronavirus_229E_g_2 | 46960 |
| 1369_Human_coronavirus_229E_g_3 | 46961 |
| 1369_Human_coronavirus_229E_g_4 | 46962 |
| 1369_Human_coronavirus_229E_g_5 | 46963 |
| 1370_Human_coronavirus_229E_g_1 | 46964 |
| 1370_Human_coronavirus_229E_g_2 | 46965 |
| 1370_Human_coronavirus_229E_g_3 | 46966 |
| 1370_Human_coronavirus_229E_g_4 | 46967 |
| 1370_Human_coronavirus_229E_g_5 | 46968 |
| 1371_Human_coronavirus_229E_g_1 | 46969 |
| 1371_Human_coronavirus_229E_g_2 | 46970 |
| 1371_Human_coronavirus_229E_g_3 | 46971 |
| 1371_Human_coronavirus_229E_g_4 | 46972 |
| 1371_Human_coronavirus_229E_g_5 | 46973 |
| 1372_Human_coronavirus_229E_g_1 | 46974 |
| 1372_Human_coronavirus_229E_g_2 | 46975 |
| 1372_Human_coronavirus_229E_g_3 | 46976 |
| 1372_Human_coronavirus_229E_g_4 | 46977 |
| 1372_Human_coronavirus_229E_g_5 | 46978 |
| 1373_Human_coronavirus_229E_g_1 | 46979 |
| 1373_Human_coronavirus_229E_g_2 | 46980 |
| 1373_Human_coronavirus_229E_g_3 | 46981 |
| 1373_Human_coronavirus_229E_g_4 | 46982 |
| 1373_Human_coronavirus_229E_g_5 | 46983 |
| 1374_Human_coronavirus_229E_g_1 | 46984 |
| 1374_Human_coronavirus_229E_g_2 | 46985 |
| 1374_Human_coronavirus_229E_g_3 | 46986 |
| 1374_Human_coronavirus_229E_g_4 | 46987 |
| 1374_Human_coronavirus_229E_g_5 | 46988 |
| 1375_Human_coronavirus_229E_g_1 | 46989 |
| 1375_Human_coronavirus_229E_g_2 | 46990 |
| 1375_Human_coronavirus_229E_g_3 | 46991 |
| 1375_Human_coronavirus_229E_g_4 | 46992 |
| 1375_Human_coronavirus_229E_g_5 | 46993 |
| 1376_Human_coronavirus_229E_g_1 | 46994 |
| 1376_Human_coronavirus_229E_g_2 | 46995 |
| 1376_Human_coronavirus_229E_g_3 | 46996 |
| 1376_Human_coronavirus_229E_g_4 | 46997 |
| 1376_Human_coronavirus_229E_g_5 | 46998 |
| 1377_Human_coronavirus_229E_g_1 | 46999 |
| 1377_Human_coronavirus_229E_g_2 | 47000 |
| 1377_Human_coronavirus_229E_g_3 | 47001 |
| 1377_Human_coronavirus_229E_g_4 | 47002 |
| 1377_Human_coronavirus_229E_g_5 | 47003 |
| 1378_Human_coronavirus_229E_g_1 | 47004 |
| 1378_Human_coronavirus_229E_g_2 | 47005 |
| 1378_Human_coronavirus_229E_g_3 | 47006 |
| 1378_Human_coronavirus_229E_g_4 | 47007 |
| 1378_Human_coronavirus_229E_g_5 | 47008 |
| 1379_Human_coronavirus_229E_g_1 | 47009 |
| 1379_Human_coronavirus_229E_g_2 | 47010 |
| 1379_Human_coronavirus_229E_g_3 | 47011 |
| 1379_Human_coronavirus_229E_g_4 | 47012 |
| 1379_Human_coronavirus_229E_g_5 | 47013 |
| 1380_Human_coronavirus_229E_g_1 | 47014 |
| 1380_Human_coronavirus_229E_g_2 | 47015 |
| 1380_Human_coronavirus_229E_g_3 | 47016 |
| 1380_Human_coronavirus_229E_g_4 | 47017 |
| 1380_Human_coronavirus_229E_g_5 | 47018 |
| 1381_Human_coronavirus_229E_g_1 | 47019 |
| 1381_Human_coronavirus_229E_g_2 | 47020 |
| 1381_Human_coronavirus_229E_g_3 | 47021 |
| 1381_Human_coronavirus_229E_g_4 | 47022 |
| 1381_Human_coronavirus_229E_g_5 | 47023 |
| 1382_Human_coronavirus_229E_g_1 | 47024 |
| 1382_Human_coronavirus_229E_g_2 | 47025 |
| 1382_Human_coronavirus_229E_g_3 | 47026 |
| 1382_Human_coronavirus_229E_g_4 | 47027 |
| 1382_Human_coronavirus_229E_g_5 | 47028 |
| 1383_Human_coronavirus_229E_g_1 | 47029 |
| 1383_Human_coronavirus_229E_g_2 | 47030 |
| 1383_Human_coronavirus_229E_g_3 | 47031 |
| 1383_Human_coronavirus_229E_g_4 | 47032 |
| 1383_Human_coronavirus_229E_g_5 | 47033 |
| 1384_Human_coronavirus_229E_g_1 | 47034 |
| 1384_Human_coronavirus_229E_g_2 | 47035 |
| 1384_Human_coronavirus_229E_g_3 | 47036 |
| 1384_Human_coronavirus_229E_g_4 | 47037 |
| 1384_Human_coronavirus_229E_g_5 | 47038 |
| 1385_Human_coronavirus_229E_g_1 | 47039 |
| 1385_Human_coronavirus_229E_g_2 | 47040 |
| 1385_Human_coronavirus_229E_g_3 | 47041 |
| 1385_Human_coronavirus_229E_g_4 | 47042 |
| 1385_Human_coronavirus_229E_g_5 | 47043 |
| 1386_Human_coronavirus_229E_g_1 | 47044 |
| 1386_Human_coronavirus_229E_g_2 | 47045 |
| 1386_Human_coronavirus_229E_g_3 | 47046 |
| 1386_Human_coronavirus_229E_g_4 | 47047 |
| 1386_Human_coronavirus_229E_g_5 | 47048 |
| 1387_Human_coronavirus_229E_g_1 | 47049 |
| 1387_Human_coronavirus_229E_g_2 | 47050 |
| 1387_Human_coronavirus_229E_g_3 | 47051 |
| 1387_Human_coronavirus_229E_g_4 | 47052 |
| 1387_Human_coronavirus_229E_g_5 | 47053 |
| 1388_Human_coronavirus_229E_g_1 | 47054 |
| 1388_Human_coronavirus_229E_g_2 | 47055 |
| 1388_Human_coronavirus_229E_g_3 | 47056 |
| 1388_Human_coronavirus_229E_g_4 | 47057 |
| 1388_Human_coronavirus_229E_g_5 | 47058 |
| 1389_Human_coronavirus_229E_g_1 | 47059 |
| 1389_Human_coronavirus_229E_g_2 | 47060 |
| 1389_Human_coronavirus_229E_g_3 | 47061 |
| 1389_Human_coronavirus_229E_g_4 | 47062 |
| 1389_Human_coronavirus_229E_g_5 | 47063 |
| 1390_Human_coronavirus_229E_g_1 | 47064 |
| 1390_Human_coronavirus_229E_g_2 | 47065 |
| 1390_Human_coronavirus_229E_g_3 | 47066 |
| 1390_Human_coronavirus_229E_g_4 | 47067 |
| 1390_Human_coronavirus_229E_g_5 | 47068 |
| 1391_Human_coronavirus_229E_g_1 | 47069 |
| 1391_Human_coronavirus_229E_g_2 | 47070 |
| 1391_Human_coronavirus_229E_g_3 | 47071 |
| 1391_Human_coronavirus_229E_g_4 | 47072 |
| 1391_Human_coronavirus_229E_g_5 | 47073 |
| 1392_Human_coronavirus_229E_g_1 | 47074 |
| 1392_Human_coronavirus_229E_g_2 | 47075 |
| 1392_Human_coronavirus_229E_g_3 | 47076 |
| 1392_Human_coronavirus_229E_g_4 | 47077 |
| 1392_Human_coronavirus_229E_g_5 | 47078 |
| 1393_Human_coronavirus_229E_g_1 | 47079 |
| 1393_Human_coronavirus_229E_g_2 | 47080 |
| 1393_Human_coronavirus_229E_g_3 | 47081 |
| 1393_Human_coronavirus_229E_g_4 | 47082 |
| 1393_Human_coronavirus_229E_g_5 | 47083 |
| 1394_Human_coronavirus_229E_g_1 | 47084 |
| 1394_Human_coronavirus_229E_g_2 | 47085 |
| 1394_Human_coronavirus_229E_g_3 | 47086 |
| 1394_Human_coronavirus_229E_g_4 | 47087 |
| 1394_Human_coronavirus_229E_g_5 | 47088 |
| 1395_Human_coronavirus_229E_g_1 | 47089 |
| 1395_Human_coronavirus_229E_g_2 | 47090 |
| 1395_Human_coronavirus_229E_g_3 | 47091 |
| 1395_Human_coronavirus_229E_g_4 | 47092 |
| 1395_Human_coronavirus_229E_g_5 | 47093 |
| 1396_Human_coronavirus_229E_g_1 | 47094 |
| 1396_Human_coronavirus_229E_g_2 | 47095 |
| 1396_Human_coronavirus_229E_g_3 | 47096 |
| 1396_Human_coronavirus_229E_g_4 | 47097 |
| 1396_Human_coronavirus_229E_g_5 | 47098 |
| 1397_Human_coronavirus_229E_g_1 | 47099 |
| 1397_Human_coronavirus_229E_g_2 | 47100 |
| 1397_Human_coronavirus_229E_g_3 | 47101 |
| 1397_Human_coronavirus_229E_g_4 | 47102 |
| 1397_Human_coronavirus_229E_g_5 | 47103 |
| 1398_Human_coronavirus_229E_g_1 | 47104 |
| 1398_Human_coronavirus_229E_g_2 | 47105 |
| 1398_Human_coronavirus_229E_g_3 | 47106 |
| 1398_Human_coronavirus_229E_g_4 | 47107 |
| 1398_Human_coronavirus_229E_g_5 | 47108 |
| 1399_Human_coronavirus_229E_g_1 | 47109 |
| 1399_Human_coronavirus_229E_g_2 | 47110 |
| 1399_Human_coronavirus_229E_g_3 | 47111 |
| 1399_Human_coronavirus_229E_g_4 | 47112 |
| 1399_Human_coronavirus_229E_g_5 | 47113 |
| 1400_Human_coronavirus_229E_g_1 | 47114 |
| 1400_Human_coronavirus_229E_g_2 | 47115 |
| 1400_Human_coronavirus_229E_g_3 | 47116 |
| 1400_Human_coronavirus_229E_g_4 | 47117 |
| 1400_Human_coronavirus_229E_g_5 | 47118 |
| 1401_Human_coronavirus_229E_g_1 | 47119 |
| 1401_Human_coronavirus_229E_g_2 | 47120 |
| 1401_Human_coronavirus_229E_g_3 | 47121 |
| 1401_Human_coronavirus_229E_g_4 | 47122 |
| 1401_Human_coronavirus_229E_g_5 | 47123 |
| 1402_Human_coronavirus_229E_g_1 | 47124 |
| 1402_Human_coronavirus_229E_g_2 | 47125 |
| 1402_Human_coronavirus_229E_g_3 | 47126 |
| 1402_Human_coronavirus_229E_g_4 | 47127 |
| 1402_Human_coronavirus_229E_g_5 | 47128 |
| 1403_Human_coronavirus_229E_g_1 | 47129 |
| 1403_Human_coronavirus_229E_g_2 | 47130 |
| 1403_Human_coronavirus_229E_g_3 | 47131 |
| 1403_Human_coronavirus_229E_g_4 | 47132 |
| 1403_Human_coronavirus_229E_g_5 | 47133 |
| 1404_Human_coronavirus_229E_g_1 | 47134 |
| 1404_Human_coronavirus_229E_g_2 | 47135 |
| 1404_Human_coronavirus_229E_g_3 | 47136 |
| 1404_Human_coronavirus_229E_g_4 | 47137 |
| 1404_Human_coronavirus_229E_g_5 | 47138 |
| 1405_Human_coronavirus_229E_g_1 | 47139 |
| 1405_Human_coronavirus_229E_g_2 | 47140 |
| 1405_Human_coronavirus_229E_g_3 | 47141 |
| 1405_Human_coronavirus_229E_g_4 | 47142 |
| 1405_Human_coronavirus_229E_g_5 | 47143 |
| 1406_Human_coronavirus_229E_g_1 | 47144 |
| 1406_Human_coronavirus_229E_g_2 | 47145 |
| 1406_Human_coronavirus_229E_g_3 | 47146 |
| 1406_Human_coronavirus_229E_g_4 | 47147 |
| 1406_Human_coronavirus_229E_g_5 | 47148 |
| 1407_Human_coronavirus_229E_g_1 | 47149 |
| 1407_Human_coronavirus_229E_g_2 | 47150 |
| 1407_Human_coronavirus_229E_g_3 | 47151 |
| 1407_Human_coronavirus_229E_g_4 | 47152 |
| 1407_Human_coronavirus_229E_g_5 | 47153 |
| 1408_Human_coronavirus_229E_g_1 | 47154 |
| 1408_Human_coronavirus_229E_g_2 | 47155 |
| 1408_Human_coronavirus_229E_g_3 | 47156 |
| 1408_Human_coronavirus_229E_g_4 | 47157 |
| 1408_Human_coronavirus_229E_g_5 | 47158 |
| 1409_Human_coronavirus_229E_g_1 | 47159 |
| 1409_Human_coronavirus_229E_g_2 | 47160 |
| 1409_Human_coronavirus_229E_g_3 | 47161 |
| 1409_Human_coronavirus_229E_g_4 | 47162 |
| 1409_Human_coronavirus_229E_g_5 | 47163 |
| 1410_Human_coronavirus_229E_g_1 | 47164 |
| 1410_Human_coronavirus_229E_g_2 | 47165 |
| 1410_Human_coronavirus_229E_g_3 | 47166 |
| 1410_Human_coronavirus_229E_g_4 | 47167 |
| 1410_Human_coronavirus_229E_g_5 | 47168 |
| 1411_Human_coronavirus_229E_g_1 | 47169 |
| 1411_Human_coronavirus_229E_g_2 | 47170 |
| 1411_Human_coronavirus_229E_g_3 | 47171 |
| 1411_Human_coronavirus_229E_g_4 | 47172 |
| 1411_Human_coronavirus_229E_g_5 | 47173 |
| 1412_Human_coronavirus_229E_g_1 | 47174 |
| 1412_Human_coronavirus_229E_g_2 | 47175 |
| 1412_Human_coronavirus_229E_g_3 | 47176 |
| 1412_Human_coronavirus_229E_g_4 | 47177 |
| 1412_Human_coronavirus_229E_g_5 | 47178 |
| 1413_Human_coronavirus_229E_g_1 | 47179 |
| 1413_Human_coronavirus_229E_g_2 | 47180 |
| 1413_Human_coronavirus_229E_g_3 | 47181 |
| 1413_Human_coronavirus_229E_g_4 | 47182 |
| 1413_Human_coronavirus_229E_g_5 | 47183 |
| 1414_Human_coronavirus_229E_g_1 | 47184 |
| 1414_Human_coronavirus_229E_g_2 | 47185 |
| 1414_Human_coronavirus_229E_g_3 | 47186 |
| 1414_Human_coronavirus_229E_g_4 | 47187 |
| 1414_Human_coronavirus_229E_g_5 | 47188 |
| 1415_Human_coronavirus_229E_g_1 | 47189 |
| 1415_Human_coronavirus_229E_g_2 | 47190 |
| 1415_Human_coronavirus_229E_g_3 | 47191 |
| 1415_Human_coronavirus_229E_g_4 | 47192 |
| 1415_Human_coronavirus_229E_g_5 | 47193 |
| 1416_Human_coronavirus_229E_g_1 | 47194 |
| 1416_Human_coronavirus_229E_g_2 | 47195 |
| 1416_Human_coronavirus_229E_g_3 | 47196 |
| 1416_Human_coronavirus_229E_g_4 | 47197 |
| 1416_Human_coronavirus_229E_g_5 | 47198 |
| 1417_Human_coronavirus_229E_g_1 | 47199 |
| 1417_Human_coronavirus_229E_g_2 | 47200 |
| 1417_Human_coronavirus_229E_g_3 | 47201 |
| 1417_Human_coronavirus_229E_g_4 | 47202 |
| 1417_Human_coronavirus_229E_g_5 | 47203 |
| 1418_Human_coronavirus_229E_g_1 | 47204 |
| 1418_Human_coronavirus_229E_g_2 | 47205 |
| 1418_Human_coronavirus_229E_g_3 | 47206 |
| 1418_Human_coronavirus_229E_g_4 | 47207 |
| 1418_Human_coronavirus_229E_g_5 | 47208 |
| 1419_Human_coronavirus_229E_g_1 | 47209 |
| 1419_Human_coronavirus_229E_g_2 | 47210 |
| 1419_Human_coronavirus_229E_g_3 | 47211 |
| 1419_Human_coronavirus_229E_g_4 | 47212 |
| 1419_Human_coronavirus_229E_g_5 | 47213 |
| 1420_Human_coronavirus_229E_g_1 | 47214 |
| 1420_Human_coronavirus_229E_g_2 | 47215 |
| 1420_Human_coronavirus_229E_g_3 | 47216 |
| 1420_Human_coronavirus_229E_g_4 | 47217 |
| 1420_Human_coronavirus_229E_g_5 | 47218 |
| 1421_Human_coronavirus_229E_g_1 | 47219 |
| 1421_Human_coronavirus_229E_g_2 | 47220 |
| 1421_Human_coronavirus_229E_g_3 | 47221 |
| 1421_Human_coronavirus_229E_g_4 | 47222 |
| 1421_Human_coronavirus_229E_g_5 | 47223 |
| 1422_Human_coronavirus_229E_g_1 | 47224 |
| 1422_Human_coronavirus_229E_g_2 | 47225 |
| 1422_Human_coronavirus_229E_g_3 | 47226 |
| 1422_Human_coronavirus_229E_g_4 | 47227 |
| 1422_Human_coronavirus_229E_g_5 | 47228 |
| 1423_Human_coronavirus_229E_g_1 | 47229 |
| 1423_Human_coronavirus_229E_g_2 | 47230 |
| 1423_Human_coronavirus_229E_g_3 | 47231 |
| 1423_Human_coronavirus_229E_g_4 | 47232 |
| 1423_Human_coronavirus_229E_g_5 | 47233 |
| 1424_Human_coronavirus_229E_g_1 | 47234 |
| 1424_Human_coronavirus_229E_g_2 | 47235 |
| 1424_Human_coronavirus_229E_g_3 | 47236 |
| 1424_Human_coronavirus_229E_g_4 | 47237 |
| 1424_Human_coronavirus_229E_g_5 | 47238 |
| 1425_Human_coronavirus_229E_g_1 | 47239 |
| 1425_Human_coronavirus_229E_g_2 | 47240 |
| 1425_Human_coronavirus_229E_g_3 | 47241 |
| 1425_Human_coronavirus_229E_g_4 | 47242 |
| 1425_Human_coronavirus_229E_g_5 | 47243 |
| 1426_Human_coronavirus_229E_g_1 | 47244 |
| 1426_Human_coronavirus_229E_g_2 | 47245 |
| 1426_Human_coronavirus_229E_g_3 | 47246 |
| 1426_Human_coronavirus_229E_g_4 | 47247 |
| 1426_Human_coronavirus_229E_g_5 | 47248 |
| 1427_Human_coronavirus_229E_g_1 | 47249 |
| 1427_Human_coronavirus_229E_g_2 | 47250 |
| 1427_Human_coronavirus_229E_g_3 | 47251 |
| 1427_Human_coronavirus_229E_g_4 | 47252 |
| 1427_Human_coronavirus_229E_g_5 | 47253 |
| 1428_Human_coronavirus_229E_g_1 | 47254 |
| 1428_Human_coronavirus_229E_g_2 | 47255 |
| 1428_Human_coronavirus_229E_g_3 | 47256 |
| 1428_Human_coronavirus_229E_g_4 | 47257 |
| 1428_Human_coronavirus_229E_g_5 | 47258 |
| 1429_Human_coronavirus_229E_g_1 | 47259 |
| 1429_Human_coronavirus_229E_g_2 | 47260 |
| 1429_Human_coronavirus_229E_g_3 | 47261 |
| 1429_Human_coronavirus_229E_g_4 | 47262 |
| 1429_Human_coronavirus_229E_g_5 | 47263 |
| 1430_Human_coronavirus_229E_g_1 | 47264 |
| 1430_Human_coronavirus_229E_g_2 | 47265 |
| 1430_Human_coronavirus_229E_g_3 | 47266 |
| 1430_Human_coronavirus_229E_g_4 | 47267 |
| 1430_Human_coronavirus_229E_g_5 | 47268 |
| 1431_Human_coronavirus_229E_g_1 | 47269 |
| 1431_Human_coronavirus_229E_g_2 | 47270 |
| 1431_Human_coronavirus_229E_g_3 | 47271 |
| 1431_Human_coronavirus_229E_g_4 | 47272 |
| 1431_Human_coronavirus_229E_g_5 | 47273 |
| 1432_Human_coronavirus_229E_g_1 | 47274 |
| 1432_Human_coronavirus_229E_g_2 | 47275 |
| 1432_Human_coronavirus_229E_g_3 | 47276 |
| 1432_Human_coronavirus_229E_g_4 | 47277 |
| 1432_Human_coronavirus_229E_g_5 | 47278 |
| 1433_Human_coronavirus_229E_g_1 | 47279 |
| 1433_Human_coronavirus_229E_g_2 | 47280 |
| 1433_Human_coronavirus_229E_g_3 | 47281 |
| 1433_Human_coronavirus_229E_g_4 | 47282 |
| 1433_Human_coronavirus_229E_g_5 | 47283 |
| 1434_Human_coronavirus_229E_g_1 | 47284 |
| 1434_Human_coronavirus_229E_g_2 | 47285 |
| 1434_Human_coronavirus_229E_g_3 | 47286 |
| 1434_Human_coronavirus_229E_g_4 | 47287 |
| 1434_Human_coronavirus_229E_g_5 | 47288 |
| 1435_Human_coronavirus_229E_g_1 | 47289 |
| 1435_Human_coronavirus_229E_g_2 | 47290 |
| 1435_Human_coronavirus_229E_g_3 | 47291 |
| 1435_Human_coronavirus_229E_g_4 | 47292 |
| 1435_Human_coronavirus_229E_g_5 | 47293 |
| 1436_Human_coronavirus_229E_g_1 | 47294 |
| 1436_Human_coronavirus_229E_g_2 | 47295 |
| 1436_Human_coronavirus_229E_g_3 | 47296 |
| 1436_Human_coronavirus_229E_g_4 | 47297 |
| 1436_Human_coronavirus_229E_g_5 | 47298 |
| 1437_Human_papillomavirus_type_108_g_1 | 47299 |
| 1437_Human_papillomavirus_type_108_g_2 | 47300 |
| 1437_Human_papillomavirus_type_108_g_3 | 47301 |
| 1437_Human_papillomavirus_type_108_g_4 | 47302 |
| 1437_Human_papillomavirus_type_108_g_5 | 47303 |
| 1438_Human_papillomavirus_type_108_g_1 | 47304 |
| 1438_Human_papillomavirus_type_108_g_2 | 47305 |
| 1438_Human_papillomavirus_type_108_g_3 | 47306 |
| 1438_Human_papillomavirus_type_108_g_4 | 47307 |
| 1438_Human_papillomavirus_type_108_g_5 | 47308 |
| 1439_Human_papillomavirus_type_108_g_1 | 47309 |
| 1439_Human_papillomavirus_type_108_g_2 | 47310 |
| 1439_Human_papillomavirus_type_108_g_3 | 47311 |
| 1439_Human_papillomavirus_type_108_g_4 | 47312 |
| 1439_Human_papillomavirus_type_108_g_5 | 47313 |
| 1440_Human_papillomavirus_type_108_g_1 | 47314 |
| 1440_Human_papillomavirus_type_108_g_2 | 47315 |
| 1440_Human_papillomavirus_type_108_g_3 | 47316 |
| 1440_Human_papillomavirus_type_108_g_4 | 47317 |
| 1440_Human_papillomavirus_type_108_g_5 | 47318 |
| 1441_Human_papillomavirus_type_108_g_1 | 47319 |
| 1441_Human_papillomavirus_type_108_g_2 | 47320 |
| 1441_Human_papillomavirus_type_108_g_3 | 47321 |
| 1441_Human_papillomavirus_type_108_g_4 | 47322 |
| 1441_Human_papillomavirus_type_108_g_5 | 47323 |
| 1442_Human_papillomavirus_type_108_g_1 | 47324 |
| 1442_Human_papillomavirus_type_108_g_2 | 47325 |
| 1442_Human_papillomavirus_type_108_g_3 | 47326 |
| 1442_Human_papillomavirus_type_108_g_4 | 47327 |
| 1442_Human_papillomavirus_type_108_g_5 | 47328 |
| 1443_Human_papillomavirus_type_108_g_1 | 47329 |
| 1443_Human_papillomavirus_type_108_g_2 | 47330 |
| 1443_Human_papillomavirus_type_108_g_3 | 47331 |
| 1443_Human_papillomavirus_type_108_g_4 | 47332 |
| 1443_Human_papillomavirus_type_108_g_5 | 47333 |
| 1444_Human_papillomavirus_type_108_g_1 | 47334 |
| 1444_Human_papillomavirus_type_108_g_2 | 47335 |
| 1444_Human_papillomavirus_type_108_g_3 | 47336 |
| 1444_Human_papillomavirus_type_108_g_4 | 47337 |
| 1444_Human_papillomavirus_type_108_g_5 | 47338 |
| 1445_Human_papillomavirus_type_108_g_1 | 47339 |
| 1445_Human_papillomavirus_type_108_g_2 | 47340 |
| 1445_Human_papillomavirus_type_108_g_3 | 47341 |
| 1445_Human_papillomavirus_type_108_g_4 | 47342 |
| 1445_Human_papillomavirus_type_108_g_5 | 47343 |
| 1446_Human_papillomavirus_type_108_g_1 | 47344 |
| 1446_Human_papillomavirus_type_108_g_2 | 47345 |
| 1446_Human_papillomavirus_type_108_g_3 | 47346 |
| 1446_Human_papillomavirus_type_108_g_4 | 47347 |
| 1446_Human_papillomavirus_type_108_g_5 | 47348 |
| 1447_Human_papillomavirus_type_108_g_1 | 47349 |
| 1447_Human_papillomavirus_type_108_g_2 | 47350 |
| 1447_Human_papillomavirus_type_108_g_3 | 47351 |
| 1447_Human_papillomavirus_type_108_g_4 | 47352 |
| 1447_Human_papillomavirus_type_108_g_5 | 47353 |
| 1448_Human_papillomavirus_type_108_g_1 | 47354 |
| 1448_Human_papillomavirus_type_108_g_2 | 47355 |
| 1448_Human_papillomavirus_type_108_g_3 | 47356 |
| 1448_Human_papillomavirus_type_108_g_4 | 47357 |
| 1448_Human_papillomavirus_type_108_g_5 | 47358 |
| 1449_Human_papillomavirus_type_108_g_1 | 47359 |
| 1449_Human_papillomavirus_type_108_g_2 | 47360 |
| 1449_Human_papillomavirus_type_108_g_3 | 47361 |
| 1449_Human_papillomavirus_type_108_g_4 | 47362 |
| 1449_Human_papillomavirus_type_108_g_5 | 47363 |
| 1450_Human_papillomavirus_type_108_g_1 | 47364 |
| 1450_Human_papillomavirus_type_108_g_2 | 47365 |
| 1450_Human_papillomavirus_type_108_g_3 | 47366 |
| 1450_Human_papillomavirus_type_108_g_4 | 47367 |
| 1450_Human_papillomavirus_type_108_g_5 | 47368 |
| 1451_Human_papillomavirus_type_108_g_1 | 47369 |
| 1451_Human_papillomavirus_type_108_g_2 | 47370 |
| 1451_Human_papillomavirus_type_108_g_3 | 47371 |
| 1451_Human_papillomavirus_type_108_g_4 | 47372 |
| 1451_Human_papillomavirus_type_108_g_5 | 47373 |
| 1452_Human_papillomavirus_type_108_g_1 | 47374 |
| 1452_Human_papillomavirus_type_108_g_2 | 47375 |
| 1452_Human_papillomavirus_type_108_g_3 | 47376 |
| 1452_Human_papillomavirus_type_108_g_4 | 47377 |
| 1452_Human_papillomavirus_type_108_g_5 | 47378 |
| 1453_Human_gammaherpesvirus_4_g_1 | 47379 |
| 1453_Human_gammaherpesvirus_4_g_2 | 47380 |
| 1453_Human_gammaherpesvirus_4_g_3 | 47381 |
| 1453_Human_gammaherpesvirus_4_g_4 | 47382 |
| 1453_Human_gammaherpesvirus_4_g_5 | 47383 |
| 1454_Human_gammaherpesvirus_4_g_1 | 47384 |
| 1454_Human_gammaherpesvirus_4_g_2 | 47385 |
| 1454_Human_gammaherpesvirus_4_g_3 | 47386 |
| 1454_Human_gammaherpesvirus_4_g_4 | 47387 |
| 1454_Human_gammaherpesvirus_4_g_5 | 47388 |
| 1455_Human_gammaherpesvirus_4_g_1 | 47389 |
| 1455_Human_gammaherpesvirus_4_g_2 | 47390 |
| 1455_Human_gammaherpesvirus_4_g_3 | 47391 |
| 1455_Human_gammaherpesvirus_4_g_4 | 47392 |
| 1456_Human_gammaherpesvirus_4_g_1 | 47393 |
| 1456_Human_gammaherpesvirus_4_g_2 | 47394 |
| 1457_Human_gammaherpesvirus_4_g_1 | 47395 |
| 1457_Human_gammaherpesvirus_4_g_2 | 47396 |
| 1457_Human_gammaherpesvirus_4_g_3 | 47397 |
| 1457_Human_gammaherpesvirus_4_g_4 | 47398 |
| 1457_Human_gammaherpesvirus_4_g_5 | 47399 |
| 1458_Human_gammaherpesvirus_4_g_1 | 47400 |
| 1458_Human_gammaherpesvirus_4_g_2 | 47401 |
| 1458_Human_gammaherpesvirus_4_g_3 | 47402 |
| 1458_Human_gammaherpesvirus_4_g_4 | 47403 |
| 1458_Human_gammaherpesvirus_4_g_5 | 47404 |
| 1459_Human_gammaherpesvirus_4_g_1 | 47405 |
| 1459_Human_gammaherpesvirus_4_g_2 | 47406 |
| 1459_Human_gammaherpesvirus_4_g_3 | 47407 |
| 1459_Human_gammaherpesvirus_4_g_4 | 47408 |
| 1459_Human_gammaherpesvirus_4_g_5 | 47409 |
| 1460_Human_gammaherpesvirus_4_g_1 | 47410 |
| 1460_Human_gammaherpesvirus_4_g_2 | 47411 |
| 1460_Human_gammaherpesvirus_4_g_3 | 47412 |
| 1460_Human_gammaherpesvirus_4_g_4 | 47413 |
| 1460_Human_gammaherpesvirus_4_g_5 | 47414 |
| 1461_Human_gammaherpesvirus_4_g_1 | 47415 |
| 1461_Human_gammaherpesvirus_4_g_2 | 47416 |
| 1461_Human_gammaherpesvirus_4_g_3 | 47417 |
| 1461_Human_gammaherpesvirus_4_g_4 | 47418 |
| 1461_Human_gammaherpesvirus_4_g_5 | 47419 |
| 1462_Human_gammaherpesvirus_4_g_1 | 47420 |
| 1462_Human_gammaherpesvirus_4_g_2 | 47421 |
| 1462_Human_gammaherpesvirus_4_g_3 | 47422 |
| 1462_Human_gammaherpesvirus_4_g_4 | 47423 |
| 1462_Human_gammaherpesvirus_4_g_5 | 47424 |
| 1463_Human_gammaherpesvirus_4_g_1 | 47425 |
| 1463_Human_gammaherpesvirus_4_g_2 | 47426 |
| 1463_Human_gammaherpesvirus_4_g_3 | 47427 |
| 1464_Human_gammaherpesvirus_4_g_1 | 47428 |
| 1464_Human_gammaherpesvirus_4_g_2 | 47429 |
| 1464_Human_gammaherpesvirus_4_g_3 | 47430 |
| 1464_Human_gammaherpesvirus_4_g_4 | 47431 |
| 1464_Human_gammaherpesvirus_4_g_5 | 47432 |
| 1465_Human_gammaherpesvirus_4_g_1 | 47433 |
| 1465_Human_gammaherpesvirus_4_g_2 | 47434 |
| 1465_Human_gammaherpesvirus_4_g_3 | 47435 |
| 1465_Human_gammaherpesvirus_4_g_4 | 47436 |
| 1465_Human_gammaherpesvirus_4_g_5 | 47437 |
| 1466_Human_gammaherpesvirus_4_g_1 | 47438 |
| 1466_Human_gammaherpesvirus_4_g_2 | 47439 |
| 1466_Human_gammaherpesvirus_4_g_3 | 47440 |
| 1466_Human_gammaherpesvirus_4_g_4 | 47441 |
| 1467_Human_gammaherpesvirus_4_g_1 | 47442 |
| 1467_Human_gammaherpesvirus_4_g_2 | 47443 |
| 1467_Human_gammaherpesvirus_4_g_3 | 47444 |
| 1467_Human_gammaherpesvirus_4_g_4 | 47445 |
| 1467_Human_gammaherpesvirus_4_g_5 | 47446 |
| 1468_Human_gammaherpesvirus_4_g_1 | 47447 |
| 1468_Human_gammaherpesvirus_4_g_2 | 47448 |
| 1468_Human_gammaherpesvirus_4_g_3 | 47449 |
| 1468_Human_gammaherpesvirus_4_g_4 | 47450 |
| 1468_Human_gammaherpesvirus_4_g_5 | 47451 |
| 1469_Human_gammaherpesvirus_4_g_1 | 47452 |
| 1469_Human_gammaherpesvirus_4_g_2 | 47453 |
| 1469_Human_gammaherpesvirus_4_g_3 | 47454 |
| 1470_Human_gammaherpesvirus_4_g_1 | 47455 |
| 1470_Human_gammaherpesvirus_4_g_2 | 47456 |
| 1470_Human_gammaherpesvirus_4_g_3 | 47457 |
| 1470_Human_gammaherpesvirus_4_g_4 | 47458 |
| 1470_Human_gammaherpesvirus_4_g_5 | 47459 |
| 1471_Human_gammaherpesvirus_4_g_1 | 47460 |
| 1471_Human_gammaherpesvirus_4_g_2 | 47461 |
| 1471_Human_gammaherpesvirus_4_g_3 | 47462 |
| 1471_Human_gammaherpesvirus_4_g_4 | 47463 |
| 1471_Human_gammaherpesvirus_4_g_5 | 47464 |
| 1472_Human_gammaherpesvirus_4_g_1 | 47465 |
| 1472_Human_gammaherpesvirus_4_g_2 | 47466 |
| 1472_Human_gammaherpesvirus_4_g_3 | 47467 |
| 1472_Human_gammaherpesvirus_4_g_4 | 47468 |
| 1472_Human_gammaherpesvirus_4_g_5 | 47469 |
| 1473_Human_gammaherpesvirus_4_g_1 | 47470 |
| 1473_Human_gammaherpesvirus_4_g_2 | 47471 |
| 1474_Human_gammaherpesvirus_4_g_1 | 47472 |
| 1474_Human_gammaherpesvirus_4_g_2 | 47473 |
| 1474_Human_gammaherpesvirus_4_g_3 | 47474 |
| 1474_Human_gammaherpesvirus_4_g_4 | 47475 |
| 1474_Human_gammaherpesvirus_4_g_5 | 47476 |
| 1475_Human_gammaherpesvirus_4_g_1 | 47477 |
| 1475_Human_gammaherpesvirus_4_g_2 | 47478 |
| 1476_Human_gammaherpesvirus_4_g_1 | 47479 |
| 1476_Human_gammaherpesvirus_4_g_2 | 47480 |
| 1476_Human_gammaherpesvirus_4_g_3 | 47481 |
| 1476_Human_gammaherpesvirus_4_g_4 | 47482 |
| 1476_Human_gammaherpesvirus_4_g_5 | 47483 |
| 1477_Human_gammaherpesvirus_4_g_1 | 47484 |
| 1477_Human_gammaherpesvirus_4_g_2 | 47485 |
| 1477_Human_gammaherpesvirus_4_g_3 | 47486 |
| 1477_Human_gammaherpesvirus_4_g_4 | 47487 |
| 1477_Human_gammaherpesvirus_4_g_5 | 47488 |
| 1478_Human_gammaherpesvirus_4_g_1 | 47489 |
| 1478_Human_gammaherpesvirus_4_g_2 | 47490 |
| 1478_Human_gammaherpesvirus_4_g_3 | 47491 |
| 1479_Human_gammaherpesvirus_4_g_1 | 47492 |
| 1479_Human_gammaherpesvirus_4_g_2 | 47493 |
| 1479_Human_gammaherpesvirus_4_g_3 | 47494 |
| 1479_Human_gammaherpesvirus_4_g_4 | 47495 |
| 1479_Human_gammaherpesvirus_4_g_5 | 47496 |
| 1480_Human_gammaherpesvirus_4_g_1 | 47497 |
| 1480_Human_gammaherpesvirus_4_g_2 | 47498 |
| 1480_Human_gammaherpesvirus_4_g_3 | 47499 |
| 1480_Human_gammaherpesvirus_4_g_4 | 47500 |
| 1480_Human_gammaherpesvirus_4_g_5 | 47501 |
| 1481_Human_gammaherpesvirus_4_g_1 | 47502 |
| 1481_Human_gammaherpesvirus_4_g_2 | 47503 |
| 1481_Human_gammaherpesvirus_4_g_3 | 47504 |
| 1481_Human_gammaherpesvirus_4_g_4 | 47505 |
| 1482_Human_gammaherpesvirus_4_g_1 | 47506 |
| 1482_Human_gammaherpesvirus_4_g_2 | 47507 |
| 1482_Human_gammaherpesvirus_4_g_3 | 47508 |
| 1482_Human_gammaherpesvirus_4_g_4 | 47509 |
| 1482_Human_gammaherpesvirus_4_g_5 | 47510 |
| 1483_Human_gammaherpesvirus_4_g_1 | 47511 |
| 1483_Human_gammaherpesvirus_4_g_2 | 47512 |
| 1483_Human_gammaherpesvirus_4_g_3 | 47513 |
| 1483_Human_gammaherpesvirus_4_g_4 | 47514 |
| 1483_Human_gammaherpesvirus_4_g_5 | 47515 |
| 1484_Human_gammaherpesvirus_4_g_1 | 47516 |
| 1484_Human_gammaherpesvirus_4_g_2 | 47517 |
| 1484_Human_gammaherpesvirus_4_g_3 | 47518 |
| 1484_Human_gammaherpesvirus_4_g_4 | 47519 |
| 1484_Human_gammaherpesvirus_4_g_5 | 47520 |
| 1485_Human_gammaherpesvirus_4_g_1 | 47521 |
| 1485_Human_gammaherpesvirus_4_g_2 | 47522 |
| 1485_Human_gammaherpesvirus_4_g_3 | 47523 |
| 1486_Human_gammaherpesvirus_4_g_1 | 47524 |
| 1486_Human_gammaherpesvirus_4_g_2 | 47525 |
| 1487_Human_gammaherpesvirus_4_g_1 | 47526 |
| 1487_Human_gammaherpesvirus_4_g_2 | 47527 |
| 1487_Human_gammaherpesvirus_4_g_3 | 47528 |
| 1487_Human_gammaherpesvirus_4_g_4 | 47529 |
| 1488_Human_gammaherpesvirus_4_g_1 | 47530 |
| 1488_Human_gammaherpesvirus_4_g_2 | 47531 |
| 1488_Human_gammaherpesvirus_4_g_3 | 47532 |
| 1488_Human_gammaherpesvirus_4_g_4 | 47533 |
| 1489_Human_gammaherpesvirus_4_g_1 | 47534 |
| 1489_Human_gammaherpesvirus_4_g_2 | 47535 |
| 1489_Human_gammaherpesvirus_4_g_3 | 47536 |
| 1489_Human_gammaherpesvirus_4_g_4 | 47537 |
| 1490_Human_gammaherpesvirus_4_g_1 | 47538 |
| 1490_Human_gammaherpesvirus_4_g_2 | 47539 |
| 1490_Human_gammaherpesvirus_4_g_3 | 47540 |
| 1490_Human_gammaherpesvirus_4_g_4 | 47541 |
| 1490_Human_gammaherpesvirus_4_g_5 | 47542 |
| 1491_Human_gammaherpesvirus_4_g_1 | 47543 |
| 1491_Human_gammaherpesvirus_4_g_2 | 47544 |
| 1491_Human_gammaherpesvirus_4_g_3 | 47545 |
| 1491_Human_gammaherpesvirus_4_g_4 | 47546 |
| 1491_Human_gammaherpesvirus_4_g_5 | 47547 |
| 1492_Human_gammaherpesvirus_4_g_1 | 47548 |
| 1493_Human_gammaherpesvirus_4_g_1 | 47549 |
| 1493_Human_gammaherpesvirus_4_g_2 | 47550 |
| 1493_Human_gammaherpesvirus_4_g_3 | 47551 |
| 1493_Human_gammaherpesvirus_4_g_4 | 47552 |
| 1493_Human_gammaherpesvirus_4_g_5 | 47553 |
| 1494_Human_gammaherpesvirus_4_g_1 | 47554 |
| 1494_Human_gammaherpesvirus_4_g_2 | 47555 |
| 1494_Human_gammaherpesvirus_4_g_3 | 47556 |
| 1494_Human_gammaherpesvirus_4_g_4 | 47557 |
| 1494_Human_gammaherpesvirus_4_g_5 | 47558 |
| 1495_Human_gammaherpesvirus_4_g_1 | 47559 |
| 1495_Human_gammaherpesvirus_4_g_2 | 47560 |
| 1495_Human_gammaherpesvirus_4_g_3 | 47561 |
| 1495_Human_gammaherpesvirus_4_g_4 | 47562 |
| 1496_Human_gammaherpesvirus_4_g_1 | 47563 |
| 1496_Human_gammaherpesvirus_4_g_2 | 47564 |
| 1496_Human_gammaherpesvirus_4_g_3 | 47565 |
| 1496_Human_gammaherpesvirus_4_g_4 | 47566 |
| 1496_Human_gammaherpesvirus_4_g_5 | 47567 |
| 1498_Human_gammaherpesvirus_4_g_1 | 47568 |
| 1498_Human_gammaherpesvirus_4_g_2 | 47569 |
| 1498_Human_gammaherpesvirus_4_g_3 | 47570 |
| 1498_Human_gammaherpesvirus_4_g_4 | 47571 |
| 1498_Human_gammaherpesvirus_4_g_5 | 47572 |
| 1499_Human_gammaherpesvirus_4_g_1 | 47573 |
| 1499_Human_gammaherpesvirus_4_g_2 | 47574 |
| 1499_Human_gammaherpesvirus_4_g_3 | 47575 |
| 1499_Human_gammaherpesvirus_4_g_4 | 47576 |
| 1499_Human_gammaherpesvirus_4_g_5 | 47577 |
| 1500_Human_gammaherpesvirus_4_g_1 | 47578 |
| 1500_Human_gammaherpesvirus_4_g_2 | 47579 |
| 1500_Human_gammaherpesvirus_4_g_3 | 47580 |
| 1500_Human_gammaherpesvirus_4_g_4 | 47581 |
| 1500_Human_gammaherpesvirus_4_g_5 | 47582 |
| 1501_Human_gammaherpesvirus_4_g_1 | 47583 |
| 1501_Human_gammaherpesvirus_4_g_2 | 47584 |
| 1501_Human_gammaherpesvirus_4_g_3 | 47585 |
| 1501_Human_gammaherpesvirus_4_g_4 | 47586 |
| 1501_Human_gammaherpesvirus_4_g_5 | 47587 |
| 1502_Human_gammaherpesvirus_4_g_1 | 47588 |
| 1502_Human_gammaherpesvirus_4_g_2 | 47589 |
| 1502_Human_gammaherpesvirus_4_g_3 | 47590 |
| 1502_Human_gammaherpesvirus_4_g_4 | 47591 |
| 1502_Human_gammaherpesvirus_4_g_5 | 47592 |
| 1503_Human_gammaherpesvirus_4_g_1 | 47593 |
| 1503_Human_gammaherpesvirus_4_g_2 | 47594 |
| 1503_Human_gammaherpesvirus_4_g_3 | 47595 |
| 1503_Human_gammaherpesvirus_4_g_4 | 47596 |
| 1503_Human_gammaherpesvirus_4_g_5 | 47597 |
| 1504_Human_gammaherpesvirus_4_g_1 | 47598 |
| 1504_Human_gammaherpesvirus_4_g_2 | 47599 |
| 1504_Human_gammaherpesvirus_4_g_3 | 47600 |
| 1504_Human_gammaherpesvirus_4_g_4 | 47601 |
| 1504_Human_gammaherpesvirus_4_g_5 | 47602 |
| 1505_Human_gammaherpesvirus_4_g_1 | 47603 |
| 1505_Human_gammaherpesvirus_4_g_2 | 47604 |
| 1505_Human_gammaherpesvirus_4_g_3 | 47605 |
| 1506_Human_gammaherpesvirus_4_g_1 | 47606 |
| 1506_Human_gammaherpesvirus_4_g_2 | 47607 |
| 1506_Human_gammaherpesvirus_4_g_3 | 47608 |
| 1506_Human_gammaherpesvirus_4_g_4 | 47609 |
| 1506_Human_gammaherpesvirus_4_g_5 | 47610 |
| 1507_Human_gammaherpesvirus_4_g_1 | 47611 |
| 1507_Human_gammaherpesvirus_4_g_2 | 47612 |
| 1507_Human_gammaherpesvirus_4_g_3 | 47613 |
| 1507_Human_gammaherpesvirus_4_g_4 | 47614 |
| 1508_Human_gammaherpesvirus_4_g_1 | 47615 |
| 1508_Human_gammaherpesvirus_4_g_2 | 47616 |
| 1508_Human_gammaherpesvirus_4_g_3 | 47617 |
| 1508_Human_gammaherpesvirus_4_g_4 | 47618 |
| 1508_Human_gammaherpesvirus_4_g_5 | 47619 |
| 1509_Human_gammaherpesvirus_4_g_1 | 47620 |
| 1509_Human_gammaherpesvirus_4_g_2 | 47621 |
| 1509_Human_gammaherpesvirus_4_g_3 | 47622 |
| 1509_Human_gammaherpesvirus_4_g_4 | 47623 |
| 1509_Human_gammaherpesvirus_4_g_5 | 47624 |
| 1510_Human_gammaherpesvirus_4_g_1 | 47625 |
| 1510_Human_gammaherpesvirus_4_g_2 | 47626 |
| 1510_Human_gammaherpesvirus_4_g_3 | 47627 |
| 1510_Human_gammaherpesvirus_4_g_4 | 47628 |
| 1510_Human_gammaherpesvirus_4_g_5 | 47629 |
| 1511_Human_gammaherpesvirus_4_g_1 | 47630 |
| 1511_Human_gammaherpesvirus_4_g_2 | 47631 |
| 1511_Human_gammaherpesvirus_4_g_3 | 47632 |
| 1511_Human_gammaherpesvirus_4_g_4 | 47633 |
| 1512_Human_gammaherpesvirus_4_g_1 | 47634 |
| 1512_Human_gammaherpesvirus_4_g_2 | 47635 |
| 1512_Human_gammaherpesvirus_4_g_3 | 47636 |
| 1512_Human_gammaherpesvirus_4_g_4 | 47637 |
| 1512_Human_gammaherpesvirus_4_g_5 | 47638 |
| 1513_Human_gammaherpesvirus_4_g_1 | 47639 |
| 1513_Human_gammaherpesvirus_4_g_2 | 47640 |
| 1513_Human_gammaherpesvirus_4_g_3 | 47641 |
| 1513_Human_gammaherpesvirus_4_g_4 | 47642 |
| 1514_Human_gammaherpesvirus_4_g_1 | 47643 |
| 1514_Human_gammaherpesvirus_4_g_2 | 47644 |
| 1514_Human_gammaherpesvirus_4_g_3 | 47645 |
| 1514_Human_gammaherpesvirus_4_g_4 | 47646 |
| 1514_Human_gammaherpesvirus_4_g_5 | 47647 |
| 1515_Human_gammaherpesvirus_4_g_1 | 47648 |
| 1515_Human_gammaherpesvirus_4_g_2 | 47649 |
| 1515_Human_gammaherpesvirus_4_g_3 | 47650 |
| 1515_Human_gammaherpesvirus_4_g_4 | 47651 |
| 1515_Human_gammaherpesvirus_4_g_5 | 47652 |
| 1516_Human_gammaherpesvirus_4_g_1 | 47653 |
| 1516_Human_gammaherpesvirus_4_g_2 | 47654 |
| 1517_Human_gammaherpesvirus_4_g_1 | 47655 |
| 1517_Human_gammaherpesvirus_4_g_2 | 47656 |
| 1517_Human_gammaherpesvirus_4_g_3 | 47657 |
| 1517_Human_gammaherpesvirus_4_g_4 | 47658 |
| 1517_Human_gammaherpesvirus_4_g_5 | 47659 |
| 1518_Human_gammaherpesvirus_4_g_1 | 47660 |
| 1518_Human_gammaherpesvirus_4_g_2 | 47661 |
| 1518_Human_gammaherpesvirus_4_g_3 | 47662 |
| 1518_Human_gammaherpesvirus_4_g_4 | 47663 |
| 1518_Human_gammaherpesvirus_4_g_5 | 47664 |
| 1519_Human_gammaherpesvirus_4_g_1 | 47665 |
| 1519_Human_gammaherpesvirus_4_g_2 | 47666 |
| 1519_Human_gammaherpesvirus_4_g_3 | 47667 |
| 1519_Human_gammaherpesvirus_4_g_4 | 47668 |
| 1520_Human_gammaherpesvirus_4_g_1 | 47669 |
| 1520_Human_gammaherpesvirus_4_g_2 | 47670 |
| 1520_Human_gammaherpesvirus_4_g_3 | 47671 |
| 1520_Human_gammaherpesvirus_4_g_4 | 47672 |
| 1520_Human_gammaherpesvirus_4_g_5 | 47673 |
| 1521_Human_gammaherpesvirus_4_g_1 | 47674 |
| 1521_Human_gammaherpesvirus_4_g_2 | 47675 |
| 1521_Human_gammaherpesvirus_4_g_3 | 47676 |
| 1521_Human_gammaherpesvirus_4_g_4 | 47677 |
| 1521_Human_gammaherpesvirus_4_g_5 | 47678 |
| 1522_Human_gammaherpesvirus_4_g_1 | 47679 |
| 1522_Human_gammaherpesvirus_4_g_2 | 47680 |
| 1522_Human_gammaherpesvirus_4_g_3 | 47681 |
| 1522_Human_gammaherpesvirus_4_g_4 | 47682 |
| 1522_Human_gammaherpesvirus_4_g_5 | 47683 |
| 1523_Human_gammaherpesvirus_4_g_1 | 47684 |
| 1523_Human_gammaherpesvirus_4_g_2 | 47685 |
| 1523_Human_gammaherpesvirus_4_g_3 | 47686 |
| 1523_Human_gammaherpesvirus_4_g_4 | 47687 |
| 1524_Human_gammaherpesvirus_4_g_1 | 47688 |
| 1524_Human_gammaherpesvirus_4_g_2 | 47689 |
| 1524_Human_gammaherpesvirus_4_g_3 | 47690 |
| 1524_Human_gammaherpesvirus_4_g_4 | 47691 |
| 1524_Human_gammaherpesvirus_4_g_5 | 47692 |
| 1525_Human_gammaherpesvirus_4_g_1 | 47693 |
| 1525_Human_gammaherpesvirus_4_g_2 | 47694 |
| 1525_Human_gammaherpesvirus_4_g_3 | 47695 |
| 1525_Human_gammaherpesvirus_4_g_4 | 47696 |
| 1525_Human_gammaherpesvirus_4_g_5 | 47697 |
| 1526_Human_gammaherpesvirus_4_g_1 | 47698 |
| 1526_Human_gammaherpesvirus_4_g_2 | 47699 |
| 1526_Human_gammaherpesvirus_4_g_3 | 47700 |
| 1527_Human_gammaherpesvirus_4_g_1 | 47701 |
| 1527_Human_gammaherpesvirus_4_g_2 | 47702 |
| 1527_Human_gammaherpesvirus_4_g_3 | 47703 |
| 1527_Human_gammaherpesvirus_4_g_4 | 47704 |
| 1527_Human_gammaherpesvirus_4_g_5 | 47705 |
| 1528_Human_gammaherpesvirus_4_g_1 | 47706 |
| 1528_Human_gammaherpesvirus_4_g_2 | 47707 |
| 1528_Human_gammaherpesvirus_4_g_3 | 47708 |
| 1528_Human_gammaherpesvirus_4_g_4 | 47709 |
| 1528_Human_gammaherpesvirus_4_g_5 | 47710 |
| 1529_Human_gammaherpesvirus_4_g_1 | 47711 |
| 1529_Human_gammaherpesvirus_4_g_2 | 47712 |
| 1529_Human_gammaherpesvirus_4_g_3 | 47713 |
| 1529_Human_gammaherpesvirus_4_g_4 | 47714 |
| 1529_Human_gammaherpesvirus_4_g_5 | 47715 |
| 1530_Human_gammaherpesvirus_4_g_1 | 47716 |
| 1530_Human_gammaherpesvirus_4_g_2 | 47717 |
| 1530_Human_gammaherpesvirus_4_g_3 | 47718 |
| 1530_Human_gammaherpesvirus_4_g_4 | 47719 |
| 1530_Human_gammaherpesvirus_4_g_5 | 47720 |
| 1531_Human_gammaherpesvirus_4_g_1 | 47721 |
| 1531_Human_gammaherpesvirus_4_g_2 | 47722 |
| 1531_Human_gammaherpesvirus_4_g_3 | 47723 |
| 1531_Human_gammaherpesvirus_4_g_4 | 47724 |
| 1531_Human_gammaherpesvirus_4_g_5 | 47725 |
| 1532_Human_gammaherpesvirus_4_g_1 | 47726 |
| 1532_Human_gammaherpesvirus_4_g_2 | 47727 |
| 1532_Human_gammaherpesvirus_4_g_3 | 47728 |
| 1532_Human_gammaherpesvirus_4_g_4 | 47729 |
| 1532_Human_gammaherpesvirus_4_g_5 | 47730 |
| 1533_Human_gammaherpesvirus_4_g_1 | 47731 |
| 1533_Human_gammaherpesvirus_4_g_2 | 47732 |
| 1533_Human_gammaherpesvirus_4_g_3 | 47733 |
| 1533_Human_gammaherpesvirus_4_g_4 | 47734 |
| 1533_Human_gammaherpesvirus_4_g_5 | 47735 |
| 1534_Human_gammaherpesvirus_4_g_1 | 47736 |
| 1534_Human_gammaherpesvirus_4_g_2 | 47737 |
| 1534_Human_gammaherpesvirus_4_g_3 | 47738 |
| 1534_Human_gammaherpesvirus_4_g_4 | 47739 |
| 1534_Human_gammaherpesvirus_4_g_5 | 47740 |
| 1535_Human_gammaherpesvirus_4_g_1 | 47741 |
| 1535_Human_gammaherpesvirus_4_g_2 | 47742 |
| 1537_Human_gammaherpesvirus_4_g_1 | 47743 |
| 1538_Human_gammaherpesvirus_4_g_1 | 47744 |
| 1538_Human_gammaherpesvirus_4_g_2 | 47745 |
| 1538_Human_gammaherpesvirus_4_g_3 | 47746 |
| 1539_Human_gammaherpesvirus_4_g_1 | 47747 |
| 1539_Human_gammaherpesvirus_4_g_2 | 47748 |
| 1539_Human_gammaherpesvirus_4_g_3 | 47749 |
| 1539_Human_gammaherpesvirus_4_g_4 | 47750 |
| 1539_Human_gammaherpesvirus_4_g_5 | 47751 |
| 1540_Human_gammaherpesvirus_4_g_1 | 47752 |
| 1540_Human_gammaherpesvirus_4_g_2 | 47753 |
| 1540_Human_gammaherpesvirus_4_g_3 | 47754 |
| 1540_Human_gammaherpesvirus_4_g_4 | 47755 |
| 1541_Human_gammaherpesvirus_4_g_1 | 47756 |
| 1541_Human_gammaherpesvirus_4_g_2 | 47757 |
| 1541_Human_gammaherpesvirus_4_g_3 | 47758 |
| 1541_Human_gammaherpesvirus_4_g_4 | 47759 |
| 1542_Human_gammaherpesvirus_4_g_1 | 47760 |
| 1542_Human_gammaherpesvirus_4_g_2 | 47761 |
| 1542_Human_gammaherpesvirus_4_g_3 | 47762 |
| 1542_Human_gammaherpesvirus_4_g_4 | 47763 |
| 1542_Human_gammaherpesvirus_4_g_5 | 47764 |
| 1543_Human_gammaherpesvirus_4_g_1 | 47765 |
| 1543_Human_gammaherpesvirus_4_g_2 | 47766 |
| 1543_Human_gammaherpesvirus_4_g_3 | 47767 |
| 1543_Human_gammaherpesvirus_4_g_4 | 47768 |
| 1543_Human_gammaherpesvirus_4_g_5 | 47769 |
| 1544_Human_papillomavirus_type_156_isolate_GC01_g_1 | 47770 |
| 1544_Human_papillomavirus_type_156_isolate_GC01_g_2 | 47771 |
| 1544_Human_papillomavirus_type_156_isolate_GC01_g_3 | 47772 |
| 1544_Human_papillomavirus_type_156_isolate_GC01_g_4 | 47773 |
| 1544_Human_papillomavirus_type_156_isolate_GC01_g_5 | 47774 |
| 1545_Human_papillomavirus_type_156_isolate_GC01_g_1 | 47775 |
| 1545_Human_papillomavirus_type_156_isolate_GC01_g_2 | 47776 |
| 1545_Human_papillomavirus_type_156_isolate_GC01_g_3 | 47777 |
| 1545_Human_papillomavirus_type_156_isolate_GC01_g_4 | 47778 |
| 1545_Human_papillomavirus_type_156_isolate_GC01_g_5 | 47779 |
| 1546_Human_papillomavirus_type_156_isolate_GC01_g_1 | 47780 |
| 1546_Human_papillomavirus_type_156_isolate_GC01_g_2 | 47781 |
| 1546_Human_papillomavirus_type_156_isolate_GC01_g_3 | 47782 |
| 1546_Human_papillomavirus_type_156_isolate_GC01_g_4 | 47783 |
| 1546_Human_papillomavirus_type_156_isolate_GC01_g_5 | 47784 |
| 1547_Human_papillomavirus_type_156_isolate_GC01_g_1 | 47785 |
| 1547_Human_papillomavirus_type_156_isolate_GC01_g_2 | 47786 |
| 1547_Human_papillomavirus_type_156_isolate_GC01_g_3 | 47787 |
| 1547_Human_papillomavirus_type_156_isolate_GC01_g_4 | 47788 |
| 1547_Human_papillomavirus_type_156_isolate_GC01_g_5 | 47789 |
| 1548_Human_papillomavirus_type_156_isolate_GC01_g_1 | 47790 |
| 1548_Human_papillomavirus_type_156_isolate_GC01_g_2 | 47791 |
| 1548_Human_papillomavirus_type_156_isolate_GC01_g_3 | 47792 |
| 1548_Human_papillomavirus_type_156_isolate_GC01_g_4 | 47793 |
| 1548_Human_papillomavirus_type_156_isolate_GC01_g_5 | 47794 |
| 1549_Human_papillomavirus_type_156_isolate_GC01_g_1 | 47795 |
| 1549_Human_papillomavirus_type_156_isolate_GC01_g_2 | 47796 |
| 1549_Human_papillomavirus_type_156_isolate_GC01_g_3 | 47797 |
| 1549_Human_papillomavirus_type_156_isolate_GC01_g_4 | 47798 |
| 1549_Human_papillomavirus_type_156_isolate_GC01_g_5 | 47799 |
| 1550_Human_papillomavirus_type_156_isolate_GC01_g_1 | 47800 |
| 1550_Human_papillomavirus_type_156_isolate_GC01_g_2 | 47801 |
| 1550_Human_papillomavirus_type_156_isolate_GC01_g_3 | 47802 |
| 1550_Human_papillomavirus_type_156_isolate_GC01_g_4 | 47803 |
| 1550_Human_papillomavirus_type_156_isolate_GC01_g_5 | 47804 |
| 1551_Human_papillomavirus_type_156_isolate_GC01_g_1 | 47805 |
| 1551_Human_papillomavirus_type_156_isolate_GC01_g_2 | 47806 |
| 1551_Human_papillomavirus_type_156_isolate_GC01_g_3 | 47807 |
| 1551_Human_papillomavirus_type_156_isolate_GC01_g_4 | 47808 |
| 1551_Human_papillomavirus_type_156_isolate_GC01_g_5 | 47809 |
| 1552_Human_papillomavirus_type_156_isolate_GC01_g_1 | 47810 |
| 1552_Human_papillomavirus_type_156_isolate_GC01_g_2 | 47811 |
| 1552_Human_papillomavirus_type_156_isolate_GC01_g_3 | 47812 |
| 1552_Human_papillomavirus_type_156_isolate_GC01_g_4 | 47813 |
| 1552_Human_papillomavirus_type_156_isolate_GC01_g_5 | 47814 |
| 1553_Human_papillomavirus_type_156_isolate_GC01_g_1 | 47815 |
| 1553_Human_papillomavirus_type_156_isolate_GC01_g_2 | 47816 |
| 1553_Human_papillomavirus_type_156_isolate_GC01_g_3 | 47817 |
| 1553_Human_papillomavirus_type_156_isolate_GC01_g_4 | 47818 |
| 1553_Human_papillomavirus_type_156_isolate_GC01_g_5 | 47819 |
| 1554_Human_papillomavirus_type_156_isolate_GC01_g_1 | 47820 |
| 1554_Human_papillomavirus_type_156_isolate_GC01_g_2 | 47821 |
| 1554_Human_papillomavirus_type_156_isolate_GC01_g_3 | 47822 |
| 1554_Human_papillomavirus_type_156_isolate_GC01_g_4 | 47823 |
| 1554_Human_papillomavirus_type_156_isolate_GC01_g_5 | 47824 |
| 1555_Human_papillomavirus_type_156_isolate_GC01_g_1 | 47825 |
| 1555_Human_papillomavirus_type_156_isolate_GC01_g_2 | 47826 |
| 1555_Human_papillomavirus_type_156_isolate_GC01_g_3 | 47827 |
| 1555_Human_papillomavirus_type_156_isolate_GC01_g_4 | 47828 |
| 1555_Human_papillomavirus_type_156_isolate_GC01_g_5 | 47829 |
| 1556_Influenza_A_virus_(A/Puerto_Rico/8/1934(H1N1))_{—} | 47830 |
| segment_4_{—} | g_1 |
| 1556_Influenza_A_virus_(A/Puerto_Rico/8/1934(H1N1))_{—} | 47831 |
| segment_4_{—} | g_2 |
| 1556_Influenza_A_virus_(A/Puerto_Rico/8/1934(H1N1))_{—} | 47832 |
| segment_4_g_3 | |
| 1556_Influenza_A_virus_(A/Puerto_Rico/8/1934(H1N1))_{—} | 47833 |
| segment_4_g_4 | |
| 1556_Influenza_A_virus_(A/Puerto_Rico/8/1934(H1N1))_{—} | 47834 |
| segment_4_g_5 | |
| 1557_Influenza_A_virus_(A/Puerto_Rico/8/1934(H1N1))_{—} | 47835 |
| segment_4_g_1 | |
| 1557_Influenza_A_virus_(A/Puerto_Rico/8/1934(H1N1))_{—} | 47836 |
| segment_4_g_2 | |
| 1557_Influenza_A_virus_(A/Puerto_Rico/8/1934(H1N1))_{—} | 47837 |
| segment_4_g_3 | |
| 1557_Influenza_A_virus_(A/Puerto_Rico/8/1934(H1N1))_{—} | 47838 |
| segment_4_g_4 | |
| 1557_Influenza_A_virus_(A/Puerto_Rico/8/1934(H1N1))_{—} | 47839 |
| segment_4_g_5 | |
| 1558_Influenza_A_virus_(A/Puerto_Rico/8/1934(H1N1))_{—} | 47840 |
| segment_4_g_1 | |
| 1558_Influenza_A_virus_(A/Puerto_Rico/8/1934(H1N1))_{—} | 47841 |
| segment_4_g_2 | |
| 1558_Influenza_A_virus_(A/Puerto_Rico/8/1934(H1N1))_{—} | 47842 |
| segment_4_g_3 | |
| 1558_Influenza_A_virus_(A/Puerto_Rico/8/1934(H1N1))_{—} | 47843 |
| segment_4_g_4 | |
| 1558_Influenza_A_virus_(A/Puerto_Rico/8/1934(H1N1))_{—} | 47844 |
| segment_4_g_5 | |
| 1559_Influenza_A_virus_(A/Puerto_Rico/8/1934(H1N1))_{—} | 47845 |
| segment_4_g_1 | |
| 1559_Influenza_A_virus_(A/Puerto_Rico/8/1934(H1N1))_{—} | 47846 |
| segment_4_g_2 | |
| 1559_Influenza_A_virus_(A/Puerto_Rico/8/1934(H1N1))_{—} | 47847 |
| segment_4_g_3 | |
| 1559_Influenza_A_virus_(A/Puerto_Rico/8/1934(H1N1))_{—} | 47848 |
| segment_4_g_4 | |
| 1559_Influenza_A_virus_(A/Puerto_Rico/8/1934(H1N1))_{—} | 47849 |
| segment_4_g_5 | |
| 1560_Influenza_A_virus_(A/Puerto_Rico/8/1934(H1N1))_{—} | 47850 |
| segment_4_g_1 | |
| 1560_Influenza_A_virus_(A/Puerto_Rico/8/1934(H1N1))_{—} | 47851 |
| segment_4_g_2 | |
| 1560_Influenza_A_virus_(A/Puerto_Rico/8/1934(H1N1))_{—} | 47852 |
| segment_4_g_3 | |
| 1560_Influenza_A_virus_(A/Puerto_Rico/8/1934(H1N1))_{—} | 47853 |
| segment_4_g_4 | |
| 1560_Influenza_A_virus_(A/Puerto_Rico/8/1934(H1N1))_{—} | 47854 |
| segment_4_g_5 | |
| 1561_Influenza_A_virus_(A/Puerto_Rico/8/1934(H1N1))_{—} | 47855 |
| segment_4_g_1 | |
| 1561_Influenza_A_virus_(A/Puerto_Rico/8/1934(H1N1))_{—} | 47856 |
| segment_4_g_2 | |
| 1561_Influenza_A_virus_(A/Puerto_Rico/8/1934(H1N1))_{—} | 47857 |
| segment_4_g_3 | |
| 1561_Influenza_A_virus_(A/Puerto_Rico/8/1934(H1N1))_{—} | 47858 |
| segment_4_g_4 | |
| 1561_Influenza_A_virus_(A/Puerto_Rico/8/1934(H1N1))_{—} | 47859 |
| segment_4_g_5 | |
| 1562_Human_papillomavirus_type_9_g_1 | 47860 |
| 1562_Human_papillomavirus_type_9_g_2 | 47861 |
| 1562_Human_papillomavirus_type_9_g_3 | 47862 |
| 1562_Human_papillomavirus_type_9_g_4 | 47863 |
| 1562_Human_papillomavirus_type_9_g_5 | 47864 |
| 1563_Human_papillomavirus_type_9_g_1 | 47865 |
| 1563_Human_papillomavirus_type_9_g_2 | 47866 |
| 1563_Human_papillomavirus_type_9_g_3 | 47867 |
| 1563_Human_papillomavirus_type_9_g_4 | 47868 |
| 1563_Human_papillomavirus_type_9_g_5 | 47869 |
| 1564_Human_papillomavirus_type_9_g_1 | 47870 |
| 1564_Human_papillomavirus_type_9_g_2 | 47871 |
| 1564_Human_papillomavirus_type_9_g_3 | 47872 |
| 1564_Human_papillomavirus_type_9_g_4 | 47873 |
| 1564_Human_papillomavirus_type_9_g_5 | 47874 |
| 1565_Human_papillomavirus_type_9_g_1 | 47875 |
| 1565_Human_papillomavirus_type_9_g_2 | 47876 |
| 1565_Human_papillomavirus_type_9_g_3 | 47877 |
| 1565_Human_papillomavirus_type_9_g_4 | 47878 |
| 1565_Human_papillomavirus_type_9_g_5 | 47879 |
| 1566_Human_papillomavirus_type_9_g_1 | 47880 |
| 1566_Human_papillomavirus_type_9_g_2 | 47881 |
| 1566_Human_papillomavirus_type_9_g_3 | 47882 |
| 1566_Human_papillomavirus_type_9_g_4 | 47883 |
| 1566_Human_papillomavirus_type_9_g_5 | 47884 |
| 1567_Human_papillomavirus_type_9_g_1 | 47885 |
| 1567_Human_papillomavirus_type_9_g_2 | 47886 |
| 1567_Human_papillomavirus_type_9_g_3 | 47887 |
| 1567_Human_papillomavirus_type_9_g_4 | 47888 |
| 1567_Human_papillomavirus_type_9_g_5 | 47889 |
| 1568_Human_papillomavirus_type_9_g_1 | 47890 |
| 1568_Human_papillomavirus_type_9_g_2 | 47891 |
| 1568_Human_papillomavirus_type_9_g_3 | 47892 |
| 1568_Human_papillomavirus_type_9_g_4 | 47893 |
| 1568_Human_papillomavirus_type_9_g_5 | 47894 |
| 1569_Human_papillomavirus_type_9_g_1 | 47895 |
| 1569_Human_papillomavirus_type_9_g_2 | 47896 |
| 1569_Human_papillomavirus_type_9_g_3 | 47897 |
| 1569_Human_papillomavirus_type_9_g_4 | 47898 |
| 1569_Human_papillomavirus_type_9_g_5 | 47899 |
| 1570_Human_papillomavirus_type_9_g_1 | 47900 |
| 1570_Human_papillomavirus_type_9_g_2 | 47901 |
| 1570_Human_papillomavirus_type_9_g_3 | 47902 |
| 1570_Human_papillomavirus_type_9_g_4 | 47903 |
| 1570_Human_papillomavirus_type_9_g_5 | 47904 |
| 1571_Human_papillomavirus_type_9_g_1 | 47905 |
| 1571_Human_papillomavirus_type_9_g_2 | 47906 |
| 1571_Human_papillomavirus_type_9_g_3 | 47907 |
| 1571_Human_papillomavirus_type_9_g_4 | 47908 |
| 1571_Human_papillomavirus_type_9_g_5 | 47909 |
| 1572_Human_papillomavirus_type_9_g_1 | 47910 |
| 1572_Human_papillomavirus_type_9_g_2 | 47911 |
| 1572_Human_papillomavirus_type_9_g_3 | 47912 |
| 1572_Human_papillomavirus_type_9_g_4 | 47913 |
| 1572_Human_papillomavirus_type_9_g_5 | 47914 |
| 1573_Human_papillomavirus_type_9_g_1 | 47915 |
| 1573_Human_papillomavirus_type_9_g_2 | 47916 |
| 1573_Human_papillomavirus_type_9_g_3 | 47917 |
| 1574_Human_papillomavirus_type_9_g_1 | 47918 |
| 1574_Human_papillomavirus_type_9_g_2 | 47919 |
| 1574_Human_papillomavirus_type_9_g_3 | 47920 |
| 1574_Human_papillomavirus_type_9_g_4 | 47921 |
| 1574_Human_papillomavirus_type_9_g_5 | 47922 |
| 1575_Human_papillomavirus_type_9_g_1 | 47923 |
| 1575_Human_papillomavirus_type_9_g_2 | 47924 |
| 1575_Human_papillomavirus_type_9_g_3 | 47925 |
| 1575_Human_papillomavirus_type_9_g_4 | 47926 |
| 1575_Human_papillomavirus_type_9_g_5 | 47927 |
| 1576_Human_papillomavirus_type_9_g_1 | 47928 |
| 1576_Human_papillomavirus_type_9_g_2 | 47929 |
| 1576_Human_papillomavirus_type_9_g_3 | 47930 |
| 1576_Human_papillomavirus_type_9_g_4 | 47931 |
| 1576_Human_papillomavirus_type_9_g_5 | 47932 |
| 1577_Human_papillomavirus_type_9_g_1 | 47933 |
| 1577_Human_papillomavirus_type_9_g_2 | 47934 |
| 1577_Human_papillomavirus_type_9_g_3 | 47935 |
| 1577_Human_papillomavirus_type_9_g_4 | 47936 |
| 1577_Human_papillomavirus_type_9_g_5 | 47937 |
| 1578_Human_papillomavirus_type_9_g_1 | 47938 |
| 1578_Human_papillomavirus_type_9_g_2 | 47939 |
| 1578_Human_papillomavirus_type_9_g_3 | 47940 |
| 1578_Human_papillomavirus_type_9_g_4 | 47941 |
| 1578_Human_papillomavirus_type_9_g_5 | 47942 |
| 1579_Human_papillomavirus_type_9_g_1 | 47943 |
| 1579_Human_papillomavirus_type_9_g_2 | 47944 |
| 1579_Human_papillomavirus_type_9_g_3 | 47945 |
| 1579_Human_papillomavirus_type_9_g_4 | 47946 |
| 1579_Human_papillomavirus_type_9_g_5 | 47947 |
| 1580_Human_papillomavirus_type_9_g_1 | 47948 |
| 1580_Human_papillomavirus_type_9_g_2 | 47949 |
| 1580_Human_papillomavirus_type_9_g_3 | 47950 |
| 1580_Human_papillomavirus_type_9_g_4 | 47951 |
| 1580_Human_papillomavirus_type_9_g_5 | 47952 |
| 1581_Human_papillomavirus_type_9_g_1 | 47953 |
| 1581_Human_papillomavirus_type_9_g_2 | 47954 |
| 1581_Human_papillomavirus_type_9_g_3 | 47955 |
| 1581_Human_papillomavirus_type_9_g_4 | 47956 |
| 1581_Human_papillomavirus_type_9_g_3 | 47957 |
| 1582_Human_papillomavirus_type_9_g_1 | 47958 |
| 1582_Human_papillomavirus_type_9_g_2 | 47959 |
| 1582_Human_papillomavirus_type_9_g_3 | 47960 |
| 1582_Human_papillomavirus_type_9_g_4 | 47961 |
| 1582_Human_papillomavirus_type_9_g_5 | 47962 |
| 1583_Chlamydia_trachomatis_D/UW-3/CX_chromosome_g_1 | 47963 |
| 1583_Chlamydia_trachomatis_D/UW-3/CX_chromosome_g_2 | 47964 |
| 1583_Chlamydia_trachomatis_D/UW-3/CX_chromosome_g_3 | 47965 |
| 1583_Chlamydia_trachomatis_D/UW-3/CX_chromosome_g_4 | 47966 |
| 1583_Chlamydia_trachomatis_D/UW-3/CX_chromosome_g_5 | 47967 |
| 1584_Chlamydia_trachomatis_D/UW-3/CX_chromosome_g_1 | 47968 |
| 1584_Chlamydia_trachomatis_D/UW-3/CX_chromosome_g_2 | 47969 |
| 1584_Chlamydia_trachomatis_D/UW-3/CX_chromosome_g_3 | 47970 |
| 1584_Chlamydia_trachomatis_D/UW-3/CX_chromosome_g_4 | 47971 |
| 1584_Chlamydia_trachomatis_D/UW-3/CX_chromosome_g_5 | 47972 |
| 1585_Chlamydia_trachomatis_D/UW-3/CX_chromosome_g_1 | 47973 |
| 1585_Chlamydia_trachomatis_D/UW-3/CX_chromosome_g_2 | 47974 |
| 1585_Chlamydia_trachomatis_D/UW-3/CX_chromosome_g_3 | 47975 |
| 1585_Chlamydia_trachomatis_D/UW-3/CX_chromosome_g_4 | 47976 |
| 1585_Chlamydia_trachomatis_D/UW-3/CX_chromosome_g_5 | 47977 |
| 1586_Chlamydia_trachomatis_D/UW-3/CX_chromosome_g_1 | 47978 |
| 1586_Chlamydia_trachomatis_D/UW-3/CX_chromosome_g_2 | 47979 |
| 1586_Chlamydia_trachomatis_D/UW-3/CX_chromosome_g_3 | 47980 |
| 1586_Chlamydia_trachomatis_D/UW-3/CX_chromosome_g_4 | 47981 |
| 1586_Chlamydia_trachomatis_D/UW-3/CX_chromosome_g_5 | 47982 |
| 1587_Chlamydia_trachomatis_D/UW-3/CX_chromosome_g_1 | 47983 |
| 1587_Chlamydia_trachomatis_D/UW-3/CX_chromosome_g_2 | 47984 |
| 1587_Chlamydia_trachomatis_D/UW-3/CX_chromosome_g_3 | 47985 |
| 1587_Chlamydia_trachomatis_D/UW-3/CX_chromosome_g_4 | 47986 |
| 1587_Chlamydia_trachomatis_D/UW-3/CX_chromosome_g_5 | 47987 |
| 1588_Chlamydia_trachomatis_D/UW-3/CX_chromosome_g_1 | 47988 |
| 1588_Chlamydia_trachomatis_D/UW-3/CX_chromosome_g_2 | 47989 |
| 1588_Chlamydia_trachomatis_D/UW-3/CX_chromosome_g_3 | 47990 |
| 1588_Chlamydia_trachomatis_D/UW-3/CX_chromosome_g_4 | 47991 |
| 1588_Chlamydia_trachomatis_D/UW-3/CX_chromosome_g_5 | 47992 |
| 1589_Chlamydia_trachomatis_D/UW-3/CX_chromosome_g_1 | 47993 |
| 1589_Chlamydia_trachomatis_D/UW-3/CX_chromosome_g_2 | 47994 |
| 1589_Chlamydia_trachomatis_D/UW-3/CX_chromosome_g_3 | 47995 |
| 1589_Chlamydia_trachomatis_D/UW-3/CX_chromosome_g_4 | 47996 |
| 1589_Chlamydia_trachomatis_D/UW-3/CX_chromosome_g_5 | 47997 |
| 1590_Chlamydia_trachomatis_D/UW-3/CX_chromosome_g_1 | 47998 |
| 1590_Chlamydia_trachomatis_D/UW-3/CX_chromosome_g_2 | 47999 |
| 1590_Chlamydia_trachomatis_D/UW-3/CX_chromosome_g_3 | 48000 |
| 1590_Chlamydia_trachomatis_D/UW-3/CX_chromosome_g_4 | 48001 |
| 1590_Chlamydia_trachomatis_D/UW-3/CX_chromosome_g_5 | 48002 |
| 1591_Chlamydia_trachomatis_D/UW-3/CX_chromosome_g_1 | 48003 |
| 1591_Chlamydia_trachomatis_D/UW-3/CX_chromosome_g_2 | 48004 |
| 1591_Chlamydia_trachomatis_D/UW-3/CX_chromosome_g_3 | 48005 |
| 1591_Chlamydia_trachomatis_D/UW-3/CX_chromosome_g_4 | 48006 |
| 1591_Chlamydia_trachomatis_D/UW-3/CX_chromosome_g_5 | 48007 |
| 1592_Chlamydia_trachomatis_D/UW-3/CX_chromosome_g_1 | 48008 |
| 1592_Chlamydia_trachomatis_D/UW-3/CX_chromosome_g_2 | 48009 |
| 1592_Chlamydia_trachomatis_D/UW-3/CX_chromosome_g_3 | 48010 |
| 1592_Chlamydia_trachomatis_D/UW-3/CX_chromosome_g_4 | 48011 |
| 1592_Chlamydia_trachomatis_D/UW-3/CX_chromosome_g_5 | 48012 |
| 1593_Chlamydia_trachomatis_D/UW-3/CX_chromosome_g_1 | 48013 |
| 1593_Chlamydia_trachomatis_D/UW-3/CX_chromosome_g_2 | 48014 |
| 1593_Chlamydia_trachomatis_D/UW-3/CX_chromosome_g_3 | 48015 |
| 1593_Chlamydia_trachomatis_D/UW-3/CX_chromosome_g_4 | 48016 |
| 1593_Chlamydia_trachomatis_D/UW-3/CX_chromosome_g_5 | 48017 |
| 1594_Chlamydia_trachomatis_D/UW-3/CX_chromosome_g_1 | 48018 |
| 1594_Chlamydia_trachomatis_D/UW-3/CX_chromosome_g_2 | 48019 |
| 1594_Chlamydia_trachomatis_D/UW-3/CX_chromosome_g_3 | 48020 |
| 1594_Chlamydia_trachomatis_D/UW-3/CX_chromosome_g_4 | 48021 |
| 1594_Chlamydia_trachomatis_D/UW-3/CX_chromosome_g_5 | 48022 |
| 1595_Chlamydia_trachomatis_D/UW-3/CX_chromosome_g_1 | 48023 |
| 1595_Chlamydia_trachomatis_D/UW-3/CX_chromosome_g_2 | 48024 |
| 1595_Chlamydia_trachomatis_D/UW-3/CX_chromosome_g_3 | 48025 |
| 1595_Chlamydia_trachomatis_D/UW-3/CX_chromosome_g_4 | 48026 |
| 1595_Chlamydia_trachomatis_D/UW-3/CX_chromosome_g_5 | 48027 |
| 1596_Chlamydia_trachomatis_D/UW-3/CX_chromosome_g_1 | 48028 |
| 1596_Chlamydia_trachomatis_D/UW-3/CX_chromosome_g_2 | 48029 |
| 1596_Chlamydia_trachomatis_D/UW-3/CX_chromosome_g_3 | 48030 |
| 1596_Chlamydia_trachomatis_D/UW-3/CX_chromosome_g_4 | 48031 |
| 1596_Chlamydia_trachomatis_D/UW-3/CX_chromosome_g_5 | 48032 |
| 1597_Chlamydia_trachomatis_D/UW-3/CX_chromosome_g_1 | 48033 |
| 1597_Chlamydia_trachomatis_D/UW-3/CX_chromosome_g_2 | 48034 |
| 1597_Chlamydia_trachomatis_D/UW-3/CX_chromosome_g_3 | 48035 |
| 1597_Chlamydia_trachomatis_D/UW-3/CX_chromosome_g_4 | 48036 |
| 1597_Chlamydia_trachomatis_D/UW-3/CX_chromosome_g_5 | 48037 |
| 1598_Chlamydia_trachomatis_D/UW-3/CX_chromosome_g_1 | 48038 |
| 1598_Chlamydia_trachomatis_D/UW-3/CX_chromosome_g_2 | 48039 |
| 1598_Chlamydia_trachomatis_D/UW-3/CX_chromosome_g_3 | 48040 |
| 1598_Chlamydia_trachomatis_D/UW-3/CX_chromosome_g_4 | 48041 |
| 1598_Chlamydia_trachomatis_D/UW-3/CX_chromosome_g_5 | 48042 |
| 1599_Chlamydia_trachomatis_D/UW-3/CX_chromosome_g_1 | 48043 |
| 1599_Chlamydia_trachomatis_D/UW-3/CX_chromosome_g_2 | 48044 |
| 1599_Chlamydia_trachomatis_D/UW-3/CX_chromosome_g_3 | 48045 |
| 1599_Chlamydia_trachomatis_D/UW-3/CX_chromosome_g_4 | 48046 |
| 1599_Chlamydia_trachomatis_D/UW-3/CX_chromosome_g_5 | 48047 |
| 1600_Chlamydia_trachomatis_D/UW-3/CX_chromosome_g_1 | 48048 |
| 1600_Chlamydia_trachomatis_D/UW-3/CX_chromosome_g_2 | 48049 |
| 1600_Chlamydia_trachomatis_D/UW-3/CX_chromosome_g_3 | 48050 |
| 1600_Chlamydia_trachomatis_D/UW-3/CX_chromosome_g_4 | 48051 |
| 1600_Chlamydia_trachomatis_D/UW-3/CX_chromosome_g_5 | 48052 |
| 1601_Chlamydia_trachomatis_D/UW-3/CX_chromosome_g_1 | 48053 |
| 1601_Chlamydia_trachomatis_D/UW-3/CX_chromosome_g_2 | 48054 |
| 1601_Chlamydia_trachomatis_D/UW-3/CX_chromosome_g_3 | 48055 |
| 1601_Chlamydia_trachomatis_D/UW-3/CX_chromosome_g_4 | 48056 |
| 1601_Chlamydia_trachomatis_D/UW-3/CX_chromosome_g_5 | 48057 |
| 1602_Chlamydia_trachomatis_D/UW-3/CX_chromosome_g_1 | 48058 |
| 1602_Chlamydia_trachomatis_D/UW-3/CX_chromosome_g_2 | 48059 |
| 1602_Chlamydia_trachomatis_D/UW-3/CX_chromosome_g_3 | 48060 |
| 1602_Chlamydia_trachomatis_D/UW-3/CX_chromosome_g_4 | 48061 |
| 1602_Chlamydia_trachomatis_D/UW-3/CX_chromosome_g_5 | 48062 |
| 1603_Chlamydia_trachomatis_D/UW-3/CX_chromosome_g_1 | 48063 |
| 1603_Chlamydia_trachomatis_D/UW-3/CX_chromosome_g_2 | 48064 |
| 1603_Chlamydia_trachomatis_D/UW-3/CX_chromosome_g_3 | 48065 |
| 1603_Chlamydia_trachomatis_D/UW-3/CX_chromosome_g_4 | 48066 |
| 1603_Chlamydia_trachomatis_D/UW-3/CX_chromosome_g_5 | 48067 |
| 1604_Chlamydia_trachomatis_D/UW-3/CX_chromosome_g_1 | 48068 |
| 1604_Chlamydia_trachomatis_D/UW-3/CX_chromosome_g_2 | 48069 |
| 1604_Chlamydia_trachomatis_D/UW-3/CX_chromosome_g_3 | 48070 |
| 1604_Chlamydia_trachomatis_D/UW-3/CX_chromosome_g_4 | 48071 |
| 1604_Chlamydia_trachomatis_D/UW-3/CX_chromosome_g_5 | 48072 |
| 1605_Chlamydia_trachomatis_D/UW-3/CX_chromosome_g_1 | 48073 |
| 1605_Chlamydia_trachomatis_D/UW-3/CX_chromosome_g_2 | 48074 |
| 1605_Chlamydia_trachomatis_D/UW-3/CX_chromosome_g_3 | 48075 |
| 1605_Chlamydia_trachomatis_D/UW-3/CX_chromosome_g_4 | 48076 |
| 1605_Chlamydia_trachomatis_D/UW-3/CX_chromosome_g_5 | 48077 |
| 1606_Chlamydia_trachomatis_D/UW-3/CX_chromosome_g_1 | 48078 |
| 1606_Chlamydia_trachomatis_D/UW-3/CX_chromosome_g_2 | 48079 |
| 1606_Chlamydia_trachomatis_D/UW-3/CX_chromosome_g_3 | 48080 |
| 1606_Chlamydia_trachomatis_D/UW-3/CX_chromosome_g_4 | 48081 |
| 1606_Chlamydia_trachomatis_D/UW-3/CX_chromosome_g_5 | 48082 |
| 1607_Chlamydia_trachomatis_D/UW-3/CX_chromosome_g_1 | 48083 |
| 1607_Chlamydia_trachomatis_D/UW-3/CX_chromosome_g_2 | 48084 |
| 1607_Chlamydia_trachomatis_D/UW-3/CX_chromosome_g_3 | 48085 |
| 1607_Chlamydia_trachomatis_D/UW-3/CX_chromosome_g_4 | 48086 |
| 1607_Chlamydia_trachomatis_D/UW-3/CX_chromosome_g_5 | 48087 |
| 1608_Chlamydia_trachomatis_D/UW-3/CX_chromosome_g_1 | 48088 |
| 1608_Chlamydia_trachomatis_D/UW-3/CX_chromosome_g_2 | 48089 |
| 1608_Chlamydia_trachomatis_D/UW-3/CX_chromosome_g_3 | 48090 |
| 1608_Chlamydia_trachomatis_D/UW-3/CX_chromosome_g_4 | 48091 |
| 1608_Chlamydia_trachomatis_D/UW-3/CX_chromosome_g_5 | 48092 |
| 1609_Chlamydia_trachomatis_D/UW-3/CX_chromosome_g_1 | 48093 |
| 1609_Chlamydia_trachomatis_D/UW-3/CX_chromosome_g_2 | 48094 |
| 1609_Chlamydia_trachomatis_D/UW-3/CX_chromosome_g_3 | 48095 |
| 1609_Chlamydia_trachomatis_D/UW-3/CX_chromosome_g_4 | 48096 |
| 1609_Chlamydia_trachomatis_D/UW-3/CX_chromosome_g_5 | 48097 |
| 1610_Chlamydia_trachomatis_D/UW-3/CX_chromosome_g_1 | 48098 |
| 1610_Chlamydia_trachomatis_D/UW-3/CX_chromosome_g_2 | 48099 |
| 1610_Chlamydia_trachomatis_D/UW-3/CX_chromosome_g_3 | 48100 |
| 1610_Chlamydia_trachomatis_D/UW-3/CX_chromosome_g_4 | 48101 |
| 1610_Chlamydia_trachomatis_D/UW-3/CX_chromosome_g_5 | 48102 |
| 1611_Chlamydia_trachomatis_D/UW-3/CX_chromosome_g_1 | 48103 |
| 1611_Chlamydia_trachomatis_D/UW-3/CX_chromosome_g_2 | 48104 |
| 1611_Chlamydia_trachomatis_D/UW-3/CX_chromosome_g_3 | 48105 |
| 1611_Chlamydia_trachomatis_D/UW-3/CX_chromosome_g_4 | 48106 |
| 1611_Chlamydia_trachomatis_D/UW-3/CX_chromosome_g_5 | 48107 |
| 1612_Chlamydia_trachomatis_D/UW-3/CX_chromosome_g_1 | 48108 |
| 1612_Chlamydia_trachomatis_D/UW-3/CX_chromosome_g_2 | 48109 |
| 1612_Chlamydia_trachomatis_D/UW-3/CX_chromosome_g_3 | 48110 |
| 1612_Chlamydia_trachomatis_D/UW-3/CX_chromosome_g_4 | 48111 |
| 1612_Chlamydia_trachomatis_D/UW-3/CX_chromosome_g_5 | 48112 |
| 1613_Chlamydia_trachomatis_D/UW-3/CX_chromosome_g_1 | 48113 |
| 1613_Chlamydia_trachomatis_D/UW-3/CX_chromosome_g_2 | 48114 |
| 1613_Chlamydia_trachomatis_D/UW-3/CX_chromosome_g_3 | 48115 |
| 1613_Chlamydia_trachomatis_D/UW-3/CX_chromosome_g_4 | 48116 |
| 1613_Chlamydia_trachomatis_D/UW-3/CX_chromosome_g_5 | 48117 |
| 1614_Chlamydia_trachomatis_D/UW-3/CX_chromosome_g_1 | 48118 |
| 1614_Chlamydia_trachomatis_D/UW-3/CX_chromosome_g_2 | 48119 |
| 1614_Chlamydia_trachomatis_D/UW-3/CX_chromosome_g_3 | 48120 |
| 1614_Chlamydia_trachomatis_D/UW-3/CX_chromosome_g_4 | 48121 |
| 1614_Chlamydia_trachomatis_D/UW-3/CX_chromosome_g_5 | 48122 |
| 1615_Chlamydia_trachomatis_D/UW-3/CX_chromosome_g_1 | 48123 |
| 1615_Chlamydia_trachomatis_D/UW-3/CX_chromosome_g_2 | 48124 |
| 1615_Chlamydia_trachomatis_D/UW-3/CX_chromosome_g_3 | 48125 |
| 1615_Chlamydia_trachomatis_D/UW-3/CX_chromosome_g_4 | 48126 |
| 1615_Chlamydia_trachomatis_D/UW-3/CX_chromosome_g_5 | 48127 |
| 1616_Chlamydia_trachomatis_D/UW-3/CX_chromosome_g_1 | 48128 |
| 1616_Chlamydia_trachomatis_D/UW-3/CX_chromosome_g_2 | 48129 |
| 1616_Chlamydia_trachomatis_D/UW-3/CX_chromosome_g_3 | 48130 |
| 1616_Chlamydia_trachomatis_D/UW-3/CX_chromosome_g_4 | 48131 |
| 1616_Chlamydia_trachomatis_D/UW-3/CX_chromosome_g_5 | 48132 |
| 1617_Chlamydia_trachomatis_D/UW-3/CX_chromosome_g_1 | 48133 |
| 1617_Chlamydia_trachomatis_D/UW-3/CX_chromosome_g_2 | 48134 |
| 1617_Chlamydia_trachomatis_D/UW-3/CX_chromosome_g_3 | 48135 |
| 1617_Chlamydia_trachomatis_D/UW-3/CX_chromosome_g_4 | 48136 |
| 1617_Chlamydia_trachomatis_D/UW-3/CX_chromosome_g_5 | 48137 |
| 1618_Chlamydia_trachomatis_D/UW-3/CX_chromosome_g_1 | 48138 |
| 1618_Chlamydia_trachomatis_D/UW-3/CX_chromosome_g_2 | 48139 |
| 1618_Chlamydia_trachomatis_D/UW-3/CX_chromosome_g_3 | 48140 |
| 1618_Chlamydia_trachomatis_D/UW-3/CX_chromosome_g_4 | 48141 |
| 1618_Chlamydia_trachomatis_D/UW-3/CX_chromosome_g_5 | 48142 |
| 1619_Chlamydia_trachomatis_D/UW-3/CX_chromosome_g_1 | 48143 |
| 1619_Chlamydia_trachomatis_D/UW-3/CX_chromosome_g_2 | 48144 |
| 1619_Chlamydia_trachomatis_D/UW-3/CX_chromosome_g_3 | 48145 |
| 1619_Chlamydia_trachomatis_D/UW-3/CX_chromosome_g_4 | 48146 |
| 1619_Chlamydia_trachomatis_D/UW-3/CX_chromosome_g_5 | 48147 |
| 1620_Chlamydia_trachomatis_D/UW-3/CX_chromosome_g_1 | 48148 |
| 1620_Chlamydia_trachomatis_D/UW-3/CX_chromosome_g_2 | 48149 |
| 1620_Chlamydia_trachomatis_D/UW-3/CX_chromosome_g_3 | 48150 |
| 1620_Chlamydia_trachomatis_D/UW-3/CX_chromosome_g_4 | 48151 |
| 1620_Chlamydia_trachomatis_D/UW-3/CX_chromosome_g_5 | 48152 |
| 1621_Chlamydia_trachomatis_D/UW-3/CX_chromosome_g_1 | 48153 |
| 1621_Chlamydia_trachomatis_D/UW-3/CX_chromosome_g_2 | 48154 |
| 1621_Chlamydia_trachomatis_D/UW-3/CX_chromosome_g_3 | 48155 |
| 1621_Chlamydia_trachomatis_D/UW-3/CX_chromosome_g_4 | 48156 |
| 1621_Chlamydia_trachomatis_D/UW-3/CX_chromosome_g_5 | 48157 |
| 1622_Chlamydia_trachomatis_D/UW-3/CX_chromosome_g_1 | 48158 |
| 1622_Chlamydia_trachomatis_D/UW-3/CX_chromosome_g_2 | 48159 |
| 1622_Chlamydia_trachomatis_D/UW-3/CX_chromosome_g_3 | 48160 |
| 1622_Chlamydia_trachomatis_D/UW-3/CX_chromosome_g_4 | 48161 |
| 1622_Chlamydia_trachomatis_D/UW-3/CX_chromosome_g_5 | 48162 |
| 1623_Chlamydia_trachomatis_D/UW-3/CX_chromosome_g_1 | 48163 |
| 1623_Chlamydia_trachomatis_D/UW-3/CX_chromosome_g_2 | 48164 |
| 1623_Chlamydia_trachomatis_D/UW-3/CX_chromosome_g_3 | 48165 |
| 1623_Chlamydia_trachomatis_D/UW-3/CX_chromosome_g_4 | 48166 |
| 1623_Chlamydia_trachomatis_D/UW-3/CX_chromosome_g_5 | 48167 |
| 1624_Chlamydia_trachomatis_D/UW-3/CX_chromosome_g_1 | 48168 |
| 1624_Chlamydia_trachomatis_D/UW-3/CX_chromosome_g_2 | 48169 |
| 1624_Chlamydia_trachomatis_D/UW-3/CX_chromosome_g_3 | 48170 |
| 1624_Chlamydia_trachomatis_D/UW-3/CX_chromosome_g_4 | 48171 |
| 1624_Chlamydia_trachomatis_D/UW-3/CX_chromosome_g_5 | 48172 |
| 1625_Chlamydia_trachomatis_D/UW-3/CX_chromosome_g_1 | 48173 |
| 1625_Chlamydia_trachomatis_D/UW-3/CX_chromosome_g_2 | 48174 |
| 1625_Chlamydia_trachomatis_D/UW-3/CX_chromosome_g_3 | 48175 |
| 1625_Chlamydia_trachomatis_D/UW-3/CX_chromosome_g_4 | 48176 |
| 1625_Chlamydia_trachomatis_D/UW-3/CX_chromosome_g_5 | 48177 |
| 1626_Chlamydia_trachomatis_D/UW-3/CX_chromosome_g_1 | 48178 |
| 1626_Chlamydia_trachomatis_D/UW-3/CX_chromosome_g_2 | 48179 |
| 1626_Chlamydia_trachomatis_D/UW-3/CX_chromosome_g_3 | 48180 |
| 1626_Chlamydia_trachomatis_D/UW-3/CX_chromosome_g_4 | 48181 |
| 1626_Chlamydia_trachomatis_D/UW-3/CX_chromosome_g_5 | 48182 |
| 1627_Chlamydia_trachomatis_D/UW-3/CX_chromosome_g_1 | 48183 |
| 1627_Chlamydia_trachomatis_D/UW-3/CX_chromosome_g_2 | 48184 |
| 1627_Chlamydia_trachomatis_D/UW-3/CX_chromosome_g_3 | 48185 |
| 1627_Chlamydia_trachomatis_D/UW-3/CX_chromosome_g_4 | 48186 |
| 1627_Chlamydia_trachomatis_D/UW-3/CX_chromosome_g_5 | 48187 |
| 1628_Chlamydia_trachomatis_D/UW-3/CX_chromosome_g_1 | 48188 |
| 1628_Chlamydia_trachomatis_D/UW-3/CX_chromosome_g_2 | 48189 |
| 1628_Chlamydia_trachomatis_D/UW-3/CX_chromosome_g_3 | 48190 |
| 1628_Chlamydia_trachomatis_D/UW-3/CX_chromosome_g_4 | 48191 |
| 1628_Chlamydia_trachomatis_D/UW-3/CX_chromosome_g_5 | 48192 |
| 1629_Chlamydia_trachomatis_D/UW-3/CX_chromosome_g_1 | 48193 |
| 1629_Chlamydia_trachomatis_D/UW-3/CX_chromosome_g_2 | 48194 |
| 1629_Chlamydia_trachomatis_D/UW-3/CX_chromosome_g_3 | 48195 |
| 1629_Chlamydia_trachomatis_D/UW-3/CX_chromosome_g_4 | 48196 |
| 1629_Chlamydia_trachomatis_D/UW-3/CX_chromosome_g_5 | 48197 |
| 1630_Chlamydia_trachomatis_D/UW-3/CX_chromosome_g_1 | 48198 |
| 1630_Chlamydia_trachomatis_D/UW-3/CX_chromosome_g_2 | 48199 |
| 1630_Chlamydia_trachomatis_D/UW-3/CX_chromosome_g_3 | 48200 |
| 1630_Chlamydia_trachomatis_D/UW-3/CX_chromosome_g_4 | 48201 |
| 1630_Chlamydia_trachomatis_D/UW-3/CX_chromosome_g_5 | 48202 |
| 1631_Chlamydia_trachomatis_D/UW-3/CX_chromosome_g_1 | 48203 |
| 1631_Chlamydia_trachomatis_D/UW-3/CX_chromosome_g_2 | 48204 |
| 1631_Chlamydia_trachomatis_D/UW-3/CX_chromosome_g_3 | 48205 |
| 1631_Chlamydia_trachomatis_D/UW-3/CX_chromosome_g_4 | 48206 |
| 1631_Chlamydia_trachomatis_D/UW-3/CX_chromosome_g_5 | 48207 |
| 1632_Chlamydia_trachomatis_D/UW-3/CX_chromosome_g_1 | 48208 |
| 1632_Chlamydia_trachomatis_D/UW-3/CX_chromosome_g_2 | 48209 |
| 1632_Chlamydia_trachomatis_D/UW-3/CX_chromosome_g_3 | 48210 |
| 1632_Chlamydia_trachomatis_D/UW-3/CX_chromosome_g_4 | 48211 |
| 1632_Chlamydia_trachomatis_D/UW-3/CX_chromosome_g_5 | 48212 |
| 1633_Chlamydia_trachomatis_D/UW-3/CX_chromosome_g_1 | 48213 |
| 1633_Chlamydia_trachomatis_D/UW-3/CX_chromosome_g_2 | 48214 |
| 1633_Chlamydia_trachomatis_D/UW-3/CX_chromosome_g_3 | 48215 |
| 1633_Chlamydia_trachomatis_D/UW-3/CX_chromosome_g_4 | 48216 |
| 1633_Chlamydia_trachomatis_D/UW-3/CX_chromosome_g_5 | 48217 |
| 1634_Chlamydia_trachomatis_D/UW-3/CX_chromosome_g_1 | 48218 |
| 1634_Chlamydia_trachomatis_D/UW-3/CX_chromosome_g_2 | 48219 |
| 1634_Chlamydia_trachomatis_D/UW-3/CX_chromosome_g_3 | 48220 |
| 1634_Chlamydia_trachomatis_D/UW-3/CX_chromosome_g_4 | 48221 |
| 1634_Chlamydia_trachomatis_D/UW-3/CX_chromosome_g_5 | 48222 |
| 1635_Chlamydia_trachomatis_D/UW-3/CX_chromosome_g_1 | 48223 |
| 1635_Chlamydia_trachomatis_D/UW-3/CX_chromosome_g_2 | 48224 |
| 1635_Chlamydia_trachomatis_D/UW-3/CX_chromosome_g_3 | 48225 |
| 1635_Chlamydia_trachomatis_D/UW-3/CX_chromosome_g_4 | 48226 |
| 1635_Chlamydia_trachomatis_D/UW-3/CX_chromosome_g_5 | 48227 |
| 1636_Chlamydia_trachomatis_D/UW-3/CX_chromosome_g_1 | 48228 |
| 1636_Chlamydia_trachomatis_D/UW-3/CX_chromosome_g_2 | 48229 |
| 1636_Chlamydia_trachomatis_D/UW-3/CX_chromosome_g_3 | 48230 |
| 1636_Chlamydia_trachomatis_D/UW-3/CX_chromosome_g_4 | 48231 |
| 1636_Chlamydia_trachomatis_D/UW-3/CX_chromosome_g_5 | 48232 |
| 1637_Chlamydia_trachomatis_D/UW-3/CX_chromosome_g_1 | 48233 |
| 1637_Chlamydia_trachomatis_D/UW-3/CX_chromosome_g_2 | 48234 |
| 1637_Chlamydia_trachomatis_D/UW-3/CX_chromosome_g_3 | 48235 |
| 1637_Chlamydia_trachomatis_D/UW-3/CX_chromosome_g_4 | 48236 |
| 1637_Chlamydia_trachomatis_D/UW-3/CX_chromosome_g_5 | 48237 |
| 1638_Chlamydia_trachomatis_D/UW-3/CX_chromosome_g_1 | 48238 |
| 1638_Chlamydia_trachomatis_D/UW-3/CX_chromosome_g_2 | 48239 |
| 1638_Chlamydia_trachomatis_D/UW-3/CX_chromosome_g_3 | 48240 |
| 1638_Chlamydia_trachomatis_D/UW-3/CX_chromosome_g_4 | 48241 |
| 1638_Chlamydia_trachomatis_D/UW-3/CX_chromosome_g_5 | 48242 |
| 1639_Chlamydia_trachomatis_D/UW-3/CX_chromosome_g_1 | 48243 |
| 1639_Chlamydia_trachomatis_D/UW-3/CX_chromosome_g_2 | 48244 |
| 1639_Chlamydia_trachomatis_D/UW-3/CX_chromosome_g_3 | 48245 |
| 1639_Chlamydia_trachomatis_D/UW-3/CX_chromosome_g_4 | 48246 |
| 1639_Chlamydia_trachomatis_D/UW-3/CX_chromosome_g_5 | 48247 |
| 1640_Chlamydia_trachomatis_D/UW-3/CX_chromosome_g_1 | 48248 |
| 1640_Chlamydia_trachomatis_D/UW-3/CX_chromosome_g_2 | 48249 |
| 1640_Chlamydia_trachomatis_D/UW-3/CX_chromosome_g_3 | 48250 |
| 1640_Chlamydia_trachomatis_D/UW-3/CX_chromosome_g_4 | 48251 |
| 1640_Chlamydia_trachomatis_D/UW-3/CX_chromosome_g_5 | 48252 |
| 1641_Chlamydia_trachomatis_D/UW-3/CX_chromosome_g_1 | 48253 |
| 1641_Chlamydia_trachomatis_D/UW-3/CX_chromosome_g_2 | 48254 |
| 1641_Chlamydia_trachomatis_D/UW-3/CX_chromosome_g_3 | 48255 |
| 1641_Chlamydia_trachomatis_D/UW-3/CX_chromosome_g_4 | 48256 |
| 1641_Chlamydia_trachomatis_D/UW-3/CX_chromosome_g_5 | 48257 |
| 1642_Chlamydia_trachomatis_D/UW-3/CX_chromosome_g_1 | 48258 |
| 1642_Chlamydia_trachomatis_D/UW-3/CX_chromosome_g_2 | 48259 |
| 1642_Chlamydia_trachomatis_D/UW-3/CX_chromosome_g_3 | 48260 |
| 1642_Chlamydia_trachomatis_D/UW-3/CX_chromosome_g_4 | 48261 |
| 1642_Chlamydia_trachomatis_D/UW-3/CX_chromosome_g_5 | 48262 |
| 1643_Chlamydia_trachomatis_D/UW-3/CX_chromosome_g_1 | 48263 |
| 1643_Chlamydia_trachomatis_D/UW-3/CX_chromosome_g_2 | 48264 |
| 1643_Chlamydia_trachomatis_D/UW-3/CX_chromosome_g_3 | 48265 |
| 1643_Chlamydia_trachomatis_D/UW-3/CX_chromosome_g_4 | 48266 |
| 1643_Chlamydia_trachomatis_D/UW-3/CX_chromosome_g_5 | 48267 |
| 1644_Chlamydia_trachomatis_D/UW-3/CX_chromosome_g_1 | 48268 |
| 1644_Chlamydia_trachomatis_D/UW-3/CX_chromosome_g_2 | 48269 |
| 1644_Chlamydia_trachomatis_D/UW-3/CX_chromosome_g_3 | 48270 |
| 1644_Chlamydia_trachomatis_D/UW-3/CX_chromosome_g_4 | 48271 |
| 1644_Chlamydia_trachomatis_D/UW-3/CX_chromosome_g_5 | 48272 |
| 1645_Chlamydia_trachomatis_D/UW-3/CX_chromosome_g_1 | 48273 |
| 1645_Chlamydia_trachomatis_D/UW-3/CX_chromosome_g_2 | 48274 |
| 1645_Chlamydia_trachomatis_D/UW-3/CX_chromosome_g_3 | 48275 |
| 1645_Chlamydia_trachomatis_D/UW-3/CX_chromosome_g_4 | 48276 |
| 1645_Chlamydia_trachomatis_D/UW-3/CX_chromosome_g_5 | 48277 |
| 1646_Chlamydia_trachomatis_D/UW-3/CX_chromosome_g_1 | 48278 |
| 1646_Chlamydia_trachomatis_D/UW-3/CX_chromosome_g_1 | 48279 |
| 1646_Chlamydia_trachomatis_D/UW-3/CX_chromosome_g_3 | 48280 |
| 1646_Chlamydia_trachomatis_D/UW-3/CX_chromosome_g_4 | 48281 |
| 1646_Chlamydia_trachomatis_D/UW-3/CX_chromosome_g_5 | 48282 |
| 1647_Chlamydia_trachomatis_D/UW-3/CX_chromosome_g_1 | 48283 |
| 1647_Chlamydia_trachomatis_D/UW-3/CX_chromosome_g_2 | 48284 |
| 1647_Chlamydia_trachomatis_D/UW-3/CX_chromosome_g_3 | 48285 |
| 1647_Chlamydia_trachomatis_D/UW-3/CX_chromosome_g_4 | 48286 |
| 1647_Chlamydia_trachomatis_D/UW-3/CX_chromosome_g_5 | 48287 |
| 1648_Chlamydia_trachomatis_D/UW-3/CX_chromosome_g_1 | 48288 |
| 1648_Chlamydia_trachomatis_D/UW-3/CX_chromosome_g_2 | 48289 |
| 1648_Chlamydia_trachomatis_D/UW-3/CX_chromosome_g_3 | 48290 |
| 1648_Chlamydia_trachomatis_D/UW-3/CX_chromosome_g_4 | 48291 |
| 1648_Chlamydia_trachomatis_D/UW-3/CX_chromosome_g_5 | 48292 |
| 1649_Chlamydia_trachomatis_D/UW-3/CX_chromosome_g_1 | 48293 |
| 1649_Chlamydia_trachomatis_D/UW-3/CX_chromosome_g_2 | 48294 |
| 1649_Chlamydia_trachomatis_D/UW-3/CX_chromosome_g_3 | 48295 |
| 1649_Chlamydia_trachomatis_D/UW-3/CX_chromosome_g_4 | 48296 |
| 1649_Chlamydia_trachomatis_D/UW-3/CX_chromosome_g_5 | 48297 |
| 1650_Chlamydia_trachomatis_D/UW-3/CX_chromosome_g_1 | 48298 |
| 1650_Chlamydia_trachomatis_D/UW-3/CX_chromosome_g_2 | 48299 |
| 1650_Chlamydia_trachomatis_D/UW-3/CX_chromosome_g_3 | 48300 |
| 1650_Chlamydia_trachomatis_D/UW-3/CX_chromosome_g_4 | 48301 |
| 1650_Chlamydia_trachomatis_D/UW-3/CX_chromosome_g_5 | 48302 |
| 1651_Chlamydia_trachomatis_D/UW-3/CX_chromosome_g_1 | 48303 |
| 1651_Chlamydia_trachomatis_D/UW-3/CX_chromosome_g_2 | 48304 |
| 1651_Chlamydia_trachomatis_D/UW-3/CX_chromosome_g_3 | 48305 |
| 1651_Chlamydia_trachomatis_D/UW-3/CX_chromosome_g_4 | 48306 |
| 1651_Chlamydia_trachomatis_D/UW-3/CX_chromosome_g_5 | 48307 |
| 1652_Chlamydia_trachomatis_D/UW-3/CX_chromosome_g_1 | 48308 |
| 1652_Chlamydia_trachomatis_D/UW-3/CX_chromosome_g_2 | 48309 |
| 1652_Chlamydia_trachomatis_D/UW-3/CX_chromosome_g_3 | 48310 |
| 1652_Chlamydia_trachomatis_D/UW-3/CX_chromosome_g_4 | 48311 |
| 1652_Chlamydia_trachomatis_D/UW-3/CX_chromosome_g_5 | 48312 |
| 1653_Chlamydia_trachomatis_D/UW-3/CX_chromosome_g_1 | 48313 |
| 1653_Chlamydia_trachomatis_D/UW-3/CX_chromosome_g_2 | 48314 |
| 1653_Chlamydia_trachomatis_D/UW-3/CX_chromosome_g_3 | 48315 |
| 1653_Chlamydia_trachomatis_D/UW-3/CX_chromosome_g_4 | 48316 |
| 1653_Chlamydia_trachomatis_D/UW-3/CX_chromosome_g_5 | 48317 |
| 1654_Chlamydia_trachomatis_D/UW-3/CX_chromosome_g_1 | 48318 |
| 1654_Chlamydia_trachomatis_D/UW-3/CX_chromosome_g_2 | 48319 |
| 1654_Chlamydia_trachomatis_D/UW-3/CX_chromosome_g_3 | 48320 |
| 1654_Chlamydia_trachomatis_D/UW-3/CX_chromosome_g_4 | 48321 |
| 1654_Chlamydia_trachomatis_D/UW-3/CX_chromosome_g_5 | 48322 |
| 1655_Chlamydia_trachomatis_D/UW-3/CX_chromosome_g_1 | 48323 |
| 1655_Chlamydia_trachomatis_D/UW-3/CX_chromosome_g_2 | 48324 |
| 1655_Chlamydia_trachomatis_D/UW-3/CX_chromosome_g_3 | 48325 |
| 1655_Chlamydia_trachomatis_D/UW-3/CX_chromosome_g_4 | 48326 |
| 1655_Chlamydia_trachomatis_D/UW-3/CX_chromosome_g_5 | 48327 |
| 1656_Chlamydia_trachomatis_D/UW-3/CX_chromosome_g_1 | 48328 |
| 1656_Chlamydia_trachomatis_D/UW-3/CX_chromosome_g_2 | 48329 |
| 1656_Chlamydia_trachomatis_D/UW-3/CX_chromosome_g_3 | 48330 |
| 1656_Chlamydia_trachomatis_D/UW-3/CX_chromosome_g_4 | 48331 |
| 1656_Chlamydia_trachomatis_D/UW-3/CX_chromosome_g_5 | 48332 |
| 1657_Chlamydia_trachomatis_D/UW-3/CX_chromosome_g_1 | 48333 |
| 1657_Chlamydia_trachomatis_D/UW-3/CX_chromosome_g_2 | 48334 |
| 1657_Chlamydia_trachomatis_D/UW-3/CX_chromosome_g_3 | 48335 |
| 1657_Chlamydia_trachomatis_D/UW-3/CX_chromosome_g_4 | 48336 |
| 1657_Chlamydia_trachomatis_D/UW-3/CX_chromosome_g_5 | 48337 |
| 1658_Chlamydia_trachomatis_D/UW-3/CX_chromosome_g_1 | 48338 |
| 1658_Chlamydia_trachomatis_D/UW-3/CX_chromosome_g_2 | 48339 |
| 1658_Chlamydia_trachomatis_D/UW-3/CX_chromosome_g_3 | 48340 |
| 1658_Chlamydia_trachomatis_D/UW-3/CX_chromosome_g_4 | 48341 |
| 1658_Chlamydia_trachomatis_D/UW-3/CX_chromosome_g_5 | 48342 |
| 1659_Chlamydia_trachomatis_D/UW-3/CX_chromosome_g_1 | 48343 |
| 1659_Chlamydia_trachomatis_D/UW-3/CX_chromosome_g_2 | 48344 |
| 1659_Chlamydia_trachomatis_D/UW-3/CX_chromosome_g_3 | 48345 |
| 1659_Chlamydia_trachomatis_D/UW-3/CX_chromosome_g_4 | 48346 |
| 1659_Chlamydia_trachomatis_D/UW-3/CX_chromosome_g_5 | 48347 |
| 1660_Chlamydia_trachomatis_D/UW-3/CX_chromosome_g_1 | 48348 |
| 1660_Chlamydia_trachomatis_D/UW-3/CX_chromosome_g_2 | 48349 |
| 1660_Chlamydia_trachomatis_D/UW-3/CX_chromosome_g_3 | 48350 |
| 1660_Chlamydia_trachomatis_D/UW-3/CX_chromosome_g_4 | 48351 |
| 1660_Chlamydia_trachomatis_D/UW-3/CX_chromosome_g_5 | 48352 |
| 1661_Chlamydia_trachomatis_D/UW-3/CX_chromosome_g_1 | 48353 |
| 1661_Chlamydia_trachomatis_D/UW-3/CX_chromosome_g_2 | 48354 |
| 1661_Chlamydia_trachomatis_D/UW-3/CX_chromosome_g_3 | 48355 |
| 1661_Chlamydia_trachomatis_D/UW-3/CX_chromosome_g_4 | 48356 |
| 1661_Chlamydia_trachomatis_D/UW-3/CX_chromosome_g_5 | 48357 |
| 1662_Chlamydia_trachomatis_D/UW-3/CX_chromosome_g_1 | 48358 |
| 1662_Chlamydia_trachomatis_D/UW-3/CX_chromosome_g_2 | 48359 |
| 1662_Chlamydia_trachomatis_D/UW-3/CX_chromosome_g_3 | 48360 |
| 1662_Chlamydia_trachomatis_D/UW-3/CX_chromosome_g_4 | 48361 |
| 1662_Chlamydia_trachomatis_D/UW-3/CX_chromosome_g_5 | 48362 |
| 1663_Chlamydia_trachomatis_D/UW-3/CX_chromosome_g_1 | 48363 |
| 1663_Chlamydia_trachomatis_D/UW-3/CX_chromosome_g_2 | 48364 |
| 1663_Chlamydia_trachomatis_D/UW-3/CX_chromosome_g_3 | 48365 |
| 1663_Chlamydia_trachomatis_D/UW-3/CX_chromosome_g_4 | 48366 |
| 1663_Chlamydia_trachomatis_D/UW-3/CX_chromosome_g_5 | 48367 |
| 1664_Chlamydia_trachomatis_D/UW-3/CX_chromosome_g_1 | 48368 |
| 1664_Chlamydia_trachomatis_D/UW-3/CX_chromosome_g_2 | 48369 |
| 1664_Chlamydia_trachomatis_D/UW-3/CX_chromosome_g_3 | 48370 |
| 1664_Chlamydia_trachomatis_D/UW-3/CX_chromosome_g_4 | 48371 |
| 1664_Chlamydia_trachomatis_D/UW-3/CX_chromosome_g_5 | 48372 |
| 1665_Chlamydia_trachomatis_D/UW-3/CX_chromosome_g_1 | 48373 |
| 1665_Chlamydia_trachomatis_D/UW-3/CX_chromosome_g_2 | 48374 |
| 1665_Chlamydia_trachomatis_D/UW-3/CX_chromosome_g_3 | 48375 |
| 1665_Chlamydia_trachomatis_D/UW-3/CX_chromosome_g_4 | 48376 |
| 1665_Chlamydia_trachomatis_D/UW-3/CX_chromosome_g_5 | 48377 |
| 1666_Chlamydia_trachomatis_D/UW-3/CX_chromosome_g_1 | 48378 |
| 1666_Chlamydia_trachomatis_D/UW-3/CX_chromosome_g_2 | 48379 |
| 1666_Chlamydia_trachomatis_D/UW-3/CX_chromosome_g_3 | 48380 |
| 1666_Chlamydia_trachomatis_D/UW-3/CX_chromosome_g_4 | 48381 |
| 1666_Chlamydia_trachomatis_D/UW-3/CX_chromosome_g_5 | 48382 |
| 1667_Chlamydia_trachomatis_D/UW-3/CX_chromosome_g_1 | 48383 |
| 1667_Chlamydia_trachomatis_D/UW-3/CX_chromosome_g_2 | 48384 |
| 1667_Chlamydia_trachomatis_D/UW-3/CX_chromosome_g_3 | 48385 |
| 1667_Chlamydia_trachomatis_D/UW-3/CX_chromosome_g_4 | 48386 |
| 1667_Chlamydia_trachomatis_D/UW-3/CX_chromosome_g_5 | 48387 |
| 1668_Chlamydia_trachomatis_D/UW-3/CX_chromosome_g_1 | 48388 |
| 1668_Chlamydia_trachomatis_D/UW-3/CX_chromosome_g_2 | 48389 |
| 1668_Chlamydia_trachomatis_D/UW-3/CX_chromosome_g_3 | 48390 |
| 1668_Chlamydia_trachomatis_D/UW-3/CX_chromosome_g_4 | 48391 |
| 1668_Chlamydia_trachomatis_D/UW-3/CX_chromosome_g_5 | 48392 |
| 1669_Chlamydia_trachomatis_D/UW-3/CX_chromosome_g_1 | 48393 |
| 1669_Chlamydia_trachomatis_D/UW-3/CX_chromosome_g_2 | 48394 |
| 1669_Chlamydia_trachomatis_D/UW-3/CX_chromosome_g_3 | 48395 |
| 1669_Chlamydia_trachomatis_D/UW-3/CX_chromosome_g_4 | 48396 |
| 1669_Chlamydia_trachomatis_D/UW-3/CX_chromosome_g_5 | 48397 |
| 1670_Chlamydia_trachomatis_D/UW-3/CX_chromosome_g_1 | 48398 |
| 1670_Chlamydia_trachomatis_D/UW-3/CX_chromosome_g_2 | 48399 |
| 1670_Chlamydia_trachomatis_D/UW-3/CX_chromosome_g_3 | 48400 |
| 1670_Chlamydia_trachomatis_D/UW-3/CX_chromosome_g_4 | 48401 |
| 1670_Chlamydia_trachomatis_D/UW-3/CX_chromosome_g_5 | 48402 |
| 1671_Chlamydia_trachomatis_D/UW-3/CX_chromosome_g_1 | 48403 |
| 1671_Chlamydia_trachomatis_D/UW-3/CX_chromosome_g_2 | 48404 |
| 1671_Chlamydia_trachomatis_D/UW-3/CX_chromosome_g_3 | 48405 |
| 1671_Chlamydia_trachomatis_D/UW-3/CX_chromosome_g_4 | 48406 |
| 1671_Chlamydia_trachomatis_D/UW-3/CX_chromosome_g_5 | 48407 |
| 1672_Chlamydia_trachomatis_D/UW-3/CX_chromosome_g_1 | 48408 |
| 1672_Chlamydia_trachomatis_D/UW-3/CX_chromosome_g_2 | 48409 |
| 1672_Chlamydia_trachomatis_D/UW-3/CX_chromosome_g_3 | 48410 |
| 1672_Chlamydia_trachomatis_D/UW-3/CX_chromosome_g_4 | 48411 |
| 1672_Chlamydia_trachomatis_D/UW-3/CX_chromosome_g_5 | 48412 |
| 1673_Chlamydia_trachomatis_D/UW-3/CX_chromosome_g_1 | 48413 |
| 1673_Chlamydia_trachomatis_D/UW-3/CX_chromosome_g_2 | 48414 |
| 1673_Chlamydia_trachomatis_D/UW-3/CX_chromosome_g_3 | 48415 |
| 1673_Chlamydia_trachomatis_D/UW-3/CX_chromosome_g_4 | 48416 |
| 1673_Chlamydia_trachomatis_D/UW-3/CX_chromosome_g_5 | 48417 |
| 1674_Chlamydia_trachomatis_D/UW-3/CX_chromosome_g_1 | 48418 |
| 1674_Chlamydia_trachomatis_D/UW-3/CX_chromosome_g_2 | 48419 |
| 1674_Chlamydia_trachomatis_D/UW-3/CX_chromosome_g_3 | 48420 |
| 1674_Chlamydia_trachomatis_D/UW-3/CX_chromosome_g_4 | 48421 |
| 1674_Chlamydia_trachomatis_D/UW-3/CX_chromosome_g_5 | 48422 |
| 1675_Chlamydia_trachomatis_D/UW-3/CX_chromosome_g_1 | 48423 |
| 1675_Chlamydia_trachomatis_D/UW-3/CX_chromosome_g_2 | 48424 |
| 1675_Chlamydia_trachomatis_D/UW-3/CX_chromosome_g_3 | 48425 |
| 1675_Chlamydia_trachomatis_D/UW-3/CX_chromosome_g_4 | 48426 |
| 1675_Chlamydia_trachomatis_D/UW-3/CX_chromosome_g_5 | 48427 |
| 1676_Chlamydia_trachomatis_D/UW-3/CX_chromosome_g_1 | 48428 |
| 1676_Chlamydia_trachomatis_D/UW-3/CX_chromosome_g_2 | 48429 |
| 1676_Chlamydia_trachomatis_D/UW-3/CX_chromosome_g_3 | 48430 |
| 1676_Chlamydia_trachomatis_D/UW-3/CX_chromosome_g_4 | 48431 |
| 1676_Chlamydia_trachomatis_D/UW-3/CX_chromosome_g_5 | 48432 |
| 1677_Chlamydia_trachomatis_D/UW-3/CX_chromosome_g_1 | 48433 |
| 1677_Chlamydia_trachomatis_D/UW-3/CX_chromosome_g_2 | 48434 |
| 1677_Chlamydia_trachomatis_D/UW-3/CX_chromosome_g_3 | 48435 |
| 1677_Chlamydia_trachomatis_D/UW-3/CX_chromosome_g_4 | 48436 |
| 1677_Chlamydia_trachomatis_D/UW-3/CX_chromosome_g_5 | 48437 |
| 1678_Chlamydia_trachomatis_D/UW-3/CX_chromosome_g_1 | 48438 |
| 1678_Chlamydia_trachomatis_D/UW-3/CX_chromosome_g_2 | 48439 |
| 1678_Chlamydia_trachomatis_D/UW-3/CX_chromosome_g_3 | 48440 |
| 1678_Chlamydia_trachomatis_D/UW-3/CX_chromosome_g_4 | 48441 |
| 1678_Chlamydia_trachomatis_D/UW-3/CX_chromosome_g_5 | 48442 |
| 1679_Chlamydia_trachomatis_D/UW-3/CX_chromosome_g_1 | 48443 |
| 1679_Chlamydia_trachomatis_D/UW-3/CX_chromosome_g_2 | 48444 |
| 1679_Chlamydia_trachomatis_D/UW-3/CX_chromosome_g_3 | 48445 |
| 1679_Chlamydia_trachomatis_D/UW-3/CX_chromosome_g_4 | 48446 |
| 1679_Chlamydia_trachomatis_D/UW-3/CX_chromosome_g_5 | 48447 |
| 1680_Chlamydia_trachomatis_D/UW-3/CX_chromosome_g_1 | 48448 |
| 1680_Chlamydia_trachomatis_D/UW-3/CX_chromosome_g_2 | 48449 |
| 1680_Chlamydia_trachomatis_D/UW-3/CX_chromosome_g_3 | 48450 |
| 1680_Chlamydia_trachomatis_D/UW-3/CX_chromosome_g_4 | 48451 |
| 1680_Chlamydia_trachomatis_D/UW-3/CX_chromosome_g_5 | 48452 |
| 1681_Chlamydia_trachomatis_D/UW-3/CX_chromosome_g_1 | 48453 |
| 1681_Chlamydia_trachomatis_D/UW-3/CX_chromosome_g_2 | 48454 |
| 1681_Chlamydia_trachomatis_D/UW-3/CX_chromosome_g_3 | 48455 |
| 1681_Chlamydia_trachomatis_D/UW-3/CX_chromosome_g_4 | 48456 |
| 1681_Chlamydia_trachomatis_D/UW-3/CX_chromosome_g_5 | 48457 |
| 1682_Chlamydia_trachomatis_D/UW-3/CX_chromosome_g_1 | 48458 |
| 1682_Chlamydia_trachomatis_D/UW-3/CX_chromosome_g_2 | 48459 |
| 1682_Chlamydia_trachomatis_D/UW-3/CX_chromosome_g_3 | 48460 |
| 1682_Chlamydia_trachomatis_D/UW-3/CX_chromosome_g_4 | 48461 |
| 1682_Chlamydia_trachomatis_D/UW-3/CX_chromosome_g_5 | 48462 |
| 1683_Chlamydia_trachomatis_D/UW-3/CX_chromosome_g_1 | 48463 |
| 1683_Chlamydia_trachomatis_D/UW-3/CX_chromosome_g_2 | 48464 |
| 1683_Chlamydia_trachomatis_D/UW-3/CX_chromosome_g_3 | 48465 |
| 1683_Chlamydia_trachomatis_D/UW-3/CX_chromosome_g_4 | 48466 |
| 1683_Chlamydia_trachomatis_D/UW-3/CX_chromosome_g_5 | 48467 |
| 1684_Chlamydia_trachomatis_D/UW-3/CX_chromosome_g_1 | 48468 |
| 1684_Chlamydia_trachomatis_D/UW-3/CX_chromosome_g_2 | 48469 |
| 1684_Chlamydia_trachomatis_D/UW-3/CX_chromosome_g_3 | 48470 |
| 1684_Chlamydia_trachomatis_D/UW-3/CX_chromosome_g_4 | 48471 |
| 1684_Chlamydia_trachomatis_D/UW-3/CX_chromosome_g_5 | 48472 |
| 1685_Chlamydia_trachomatis_D/UW-3/CX_chromosome_g_1 | 48473 |
| 1685_Chlamydia_trachomatis_D/UW-3/CX_chromosome_g_2 | 48474 |
| 1685_Chlamydia_trachomatis_D/UW-3/CX_chromosome_g_3 | 48475 |
| 1685_Chlamydia_trachomatis_D/UW-3/CX_chromosome_g_4 | 48476 |
| 1685_Chlamydia_trachomatis_D/UW-3/CX_chromosome_g_5 | 48477 |
| 1686_Chlamydia_trachomatis_D/UW-3/CX_chromosome_g_1 | 48478 |
| 1686_Chlamydia_trachomatis_D/UW-3/CX_chromosome_g_2 | 48479 |
| 1686_Chlamydia_trachomatis_D/UW-3/CX_chromosome_g_3 | 48480 |
| 1686_Chlamydia_trachomatis_D/UW-3/CX_chromosome_g_4 | 48481 |
| 1686_Chlamydia_trachomatis_D/UW-3/CX_chromosome_g_5 | 48482 |
| 1687_Chlamydia_trachomatis_D/UW-3/CX_chromosome_g_1 | 48483 |
| 1687_Chlamydia_trachomatis_D/UW-3/CX_chromosome_g_2 | 48484 |
| 1687_Chlamydia_trachomatis_D/UW-3/CX_chromosome_g_3 | 48485 |
| 1687_Chlamydia_trachomatis_D/UW-3/CX_chromosome_g_4 | 48486 |
| 1687_Chlamydia_trachomatis_D/UW-3/CX_chromosome_g_5 | 48487 |
| 1688_Chlamydia_trachomatis_D/UW-3/CX_chromosome_g_1 | 48488 |
| 1688_Chlamydia_trachomatis_D/UW-3/CX_chromosome_g_2 | 48489 |
| 1688_Chlamydia_trachomatis_D/UW-3/CX_chromosome_g_3 | 48490 |
| 1688_Chlamydia_trachomatis_D/UW-3/CX_chromosome_g_4 | 48491 |
| 1688_Chlamydia_trachomatis_D/UW-3/CX_chromosome_g_5 | 48492 |
| 1689_Chlamydia_trachomatis_D/UW-3/CX_chromosome_g_1 | 48493 |
| 1689_Chlamydia_trachomatis_D/UW-3/CX_chromosome_g_2 | 48494 |
| 1689_Chlamydia_trachomatis_D/UW-3/CX_chromosome_g_3 | 48495 |
| 1689_Chlamydia_trachomatis_D/UW-3/CX_chromosome_g_4 | 48496 |
| 1689_Chlamydia_trachomatis_D/UW-3/CX_chromosome_g_5 | 48497 |
| 1690_Chlamydia_trachomatis_D/UW-3/CX_chromosome_g_1 | 48498 |
| 1690_Chlamydia_trachomatis_D/UW-3/CX_chromosome_g_2 | 48499 |
| 1690_Chlamydia_trachomatis_D/UW-3/CX_chromosome_g_3 | 48500 |
| 1690_Chlamydia_trachomatis_D/UW-3/CX_chromosome_g_4 | 48501 |
| 1690_Chlamydia_trachomatis_D/UW-3/CX_chromosome_g_5 | 48502 |
| 1691_Chlamydia_trachomatis_D/UW-3/CX_chromosome_g_1 | 48503 |
| 1691_Chlamydia_trachomatis_D/UW-3/CX_chromosome_g_2 | 48504 |
| 1691_Chlamydia_trachomatis_D/UW-3/CX_chromosome_g_3 | 48505 |
| 1691_Chlamydia_trachomatis_D/UW-3/CX_chromosome_g_4 | 48506 |
| 1691_Chlamydia_trachomatis_D/UW-3/CX_chromosome_g_5 | 48507 |
| 1692_Chlamydia_trachomatis_D/UW-3/CX_chromosome_g_1 | 48508 |
| 1692_Chlamydia_trachomatis_D/UW-3/CX_chromosome_g_2 | 48509 |
| 1692_Chlamydia_trachomatis_D/UW-3/CX_chromosome_g_3 | 48510 |
| 1692_Chlamydia_trachomatis_D/UW-3/CX_chromosome_g_4 | 48511 |
| 1692_Chlamydia_trachomatis_D/UW-3/CX_chromosome_g_5 | 48512 |
| 1693_Chlamydia_trachomatis_D/UW-3/CX_chromosome_g_1 | 48513 |
| 1693_Chlamydia_trachomatis_D/UW-3/CX_chromosome_g_2 | 48514 |
| 1693_Chlamydia_trachomatis_D/UW-3/CX_chromosome_g_3 | 48515 |
| 1693_Chlamydia_trachomatis_D/UW-3/CX_chromosome_g_4 | 48516 |
| 1693_Chlamydia_trachomatis_D/UW-3/CX_chromosome_g_5 | 48517 |
| 1694_Chlamydia_trachomatis_D/UW-3/CX_chromosome_g_1 | 48518 |
| 1694_Chlamydia_trachomatis_D/UW-3/CX_chromosome_g_2 | 48519 |
| 1694_Chlamydia_trachomatis_D/UW-3/CX_chromosome_g_3 | 48520 |
| 1694_Chlamydia_trachomatis_D/UW-3/CX_chromosome_g_4 | 48521 |
| 1694_Chlamydia_trachomatis_D/UW-3/CX_chromosome_g_5 | 48522 |
| 1695_Chlamydia_trachomatis_D/UW-3/CX_chromosome_g_1 | 48523 |
| 1695_Chlamydia_trachomatis_D/UW-3/CX_chromosome_g_2 | 48524 |
| 1695_Chlamydia_trachomatis_D/UW-3/CX_chromosome_g_3 | 48525 |
| 1695_Chlamydia_trachomatis_D/UW-3/CX_chromosome_g_4 | 48526 |
| 1695_Chlamydia_trachomatis_D/UW-3/CX_chromosome_g_5 | 48527 |
| 1696_Chlamydia_trachomatis_D/UW-3/CX_chromosome_g_1 | 48528 |
| 1696_Chlamydia_trachomatis_D/UW-3/CX_chromosome_g_2 | 48529 |
| 1696_Chlamydia_trachomatis_D/UW-3/CX_chromosome_g_3 | 48530 |
| 1696_Chlamydia_trachomatis_D/UW-3/CX_chromosome_g_4 | 48531 |
| 1696_Chlamydia_trachomatis_D/UW-3/CX_chromosome_g_5 | 48532 |
| 1697_Chlamydia_trachomatis_D/UW-3/CX_chromosome_g_1 | 48533 |
| 1697_Chlamydia_trachomatis_D/UW-3/CX_chromosome_g_2 | 48534 |
| 1697_Chlamydia_trachomatis_D/UW-3/CX_chromosome_g_3 | 48535 |
| 1697_Chlamydia_trachomatis_D/UW-3/CX_chromosome_g_4 | 48536 |
| 1697_Chlamydia_trachomatis_D/UW-3/CX_chromosome_g_5 | 48537 |
| 1698_Chlamydia_trachomatis_D/UW-3/CX_chromosome_g_1 | 48538 |
| 1698_Chlamydia_trachomatis_D/UW-3/CX_chromosome_g_2 | 48539 |
| 1698_Chlamydia_trachomatis_D/UW-3/CX_chromosome_g_3 | 48540 |
| 1698_Chlamydia_trachomatis_D/UW-3/CX_chromosome_g_4 | 48541 |
| 1698_Chlamydia_trachomatis_D/UW-3/CX_chromosome_g_5 | 48542 |
| 1699_Chlamydia_trachomatis_D/UW-3/CX_chromosome_g_1 | 48543 |
| 1699_Chlamydia_trachomatis_D/UW-3/CX_chromosome_g_2 | 48544 |
| 1699_Chlamydia_trachomatis_D/UW-3/CX_chromosome_g_3 | 48545 |
| 1699_Chlamydia_trachomatis_D/UW-3/CX_chromosome_g_4 | 48546 |
| 1699_Chlamydia_trachomatis_D/UW-3/CX_chromosome_g_5 | 48547 |
| 1700_Chlamydia_trachomatis_D/UW-3/CX_chromosome_g_1 | 48548 |
| 1700_Chlamydia_trachomatis_D/UW-3/CX_chromosome_g_2 | 48549 |
| 1700_Chlamydia_trachomatis_D/UW-3/CX_chromosome_g_3 | 48550 |
| 1700_Chlamydia_trachomatis_D/UW-3/CX_chromosome_g_4 | 48551 |
| 1700_Chlamydia_trachomatis_D/UW-3/CX_chromosome_g_5 | 48552 |
| 1701_Chlamydia_trachomatis_D/UW-3/CX_chromosome_g_1 | 48553 |
| 1701_Chlamydia_trachomatis_D/UW-3/CX_chromosome_g_2 | 48554 |
| 1701_Chlamydia_trachomatis_D/UW-3/CX_chromosome_g_3 | 48555 |
| 1701_Chlamydia_trachomatis_D/UW-3/CX_chromosome_g_4 | 48556 |
| 1701_Chlamydia_trachomatis_D/UW-3/CX_chromosome_g_5 | 48557 |
| 1702_Chlamydia_trachomatis_D/UW-3/CX_chromosome_g_1 | 48558 |
| 1702_Chlamydia_trachomatis_D/UW-3/CX_chromosome_g_2 | 48559 |
| 1702_Chlamydia_trachomatis_D/UW-3/CX_chromosome_g_3 | 48560 |
| 1702_Chlamydia_trachomatis_D/UW-3/CX_chromosome_g_4 | 48561 |
| 1702_Chlamydia_trachomatis_D/UW-3/CX_chromosome_g_5 | 48562 |
| 1703_Chlamydia_trachomatis_D/UW-3/CX_chromosome_g_1 | 48563 |
| 1703_Chlamydia_trachomatis_D/UW-3/CX_chromosome_g_2 | 48564 |
| 1703_Chlamydia_trachomatis_D/UW-3/CX_chromosome_g_3 | 48565 |
| 1703_Chlamydia_trachomatis_D/UW-3/CX_chromosome_g_4 | 48566 |
| 1703_Chlamydia_trachomatis_D/UW-3/CX_chromosome_g_5 | 48567 |
| 1704_Chlamydia_trachomatis_D/UW-3/CX_chromosome_g_1 | 48568 |
| 1704_Chlamydia_trachomatis_D/UW-3/CX_chromosome_g_2 | 48569 |
| 1704_Chlamydia_trachomatis_D/UW-3/CX_chromosome_g_3 | 48570 |
| 1704_Chlamydia_trachomatis_D/UW-3/CX_chromosome_g_4 | 48571 |
| 1704_Chlamydia_trachomatis_D/UW-3/CX_chromosome_g_5 | 48572 |
| 1705_Chlamydia_trachomatis_D/UW-3/CX_chromosome_g_1 | 48573 |
| 1705_Chlamydia_trachomatis_D/UW-3/CX_chromosome_g_2 | 48574 |
| 1705_Chlamydia_trachomatis_D/UW-3/CX_chromosome_g_3 | 48575 |
| 1705_Chlamydia_trachomatis_D/UW-3/CX_chromosome_g_4 | 48576 |
| 1705_Chlamydia_trachomatis_D/UW-3/CX_chromosome_g_5 | 48577 |
| 1706_Chlamydia_trachomatis_D/UW-3/CX_chromosome_g_1 | 48578 |
| 1706_Chlamydia_trachomatis_D/UW-3/CX_chromosome_g_2 | 48579 |
| 1706_Chlamydia_trachomatis_D/UW-3/CX_chromosome_g_3 | 48580 |
| 1706_Chlamydia_trachomatis_D/UW-3/CX_chromosome_g_4 | 48581 |
| 1706_Chlamydia_trachomatis_D/UW-3/CX_chromosome_g_5 | 48582 |
| 1707_Chlamydia_trachomatis_D/UW-3/CX_chromosome_g_1 | 48583 |
| 1707_Chlamydia_trachomatis_D/UW-3/CX_chromosome_g_2 | 48584 |
| 1707_Chlamydia_trachomatis_D/UW-3/CX_chromosome_g_3 | 48585 |
| 1707_Chlamydia_trachomatis_D/UW-3/CX_chromosome_g_4 | 48586 |
| 1707_Chlamydia_trachomatis_D/UW-3/CX_chromosome_g_5 | 48587 |
| 1708_Chlamydia_trachomatis_D/UW-3/CX_chromosome_g_1 | 48588 |
| 1708_Chlamydia_trachomatis_D/UW-3/CX_chromosome_g_2 | 48589 |
| 1708_Chlamydia_trachomatis_D/UW-3/CX_chromosome_g_3 | 48590 |
| 1708_Chlamydia_trachomatis_D/UW-3/CX_chromosome_g_4 | 48591 |
| 1708_Chlamydia_trachomatis_D/UW-3/CX_chromosome_g_5 | 48592 |
| 1709_Chlamydia_trachomatis_D/UW-3/CX_chromosome_g_1 | 48593 |
| 1709_Chlamydia_trachomatis_D/UW-3/CX_chromosome_g_2 | 48594 |
| 1709_Chlamydia_trachomatis_D/UW-3/CX_chromosome_g_3 | 48595 |
| 1709_Chlamydia_trachomatis_D/UW-3/CX_chromosome_g_4 | 48596 |
| 1709_Chlamydia_trachomatis_D/UW-3/CX_chromosome_g_5 | 48597 |
| 1710_Chlamydia_trachomatis_D/UW-3/CX_chromosome_g_1 | 48598 |
| 1710_Chlamydia_trachomatis_D/UW-3/CX_chromosome_g_2 | 48599 |
| 1710_Chlamydia_trachomatis_D/UW-3/CX_chromosome_g_3 | 48600 |
| 1710_Chlamydia_trachomatis_D/UW-3/CX_chromosome_g_4 | 48601 |
| 1710_Chlamydia_trachomatis_D/UW-3/CX_chromosome_g_5 | 48602 |
| 1711_Chlamydia_trachomatis_D/UW-3/CX_chromosome_g_1 | 48603 |
| 1711_Chlamydia_trachomatis_D/UW-3/CX_chromosome_g_2 | 48604 |
| 1711_Chlamydia_trachomatis_D/UW-3/CX_chromosome_g_3 | 48605 |
| 1711_Chlamydia_trachomatis_D/UW-3/CX_chromosome_g_4 | 48606 |
| 1711_Chlamydia_trachomatis_D/UW-3/CX_chromosome_g_5 | 48607 |
| 1712_Chlamydia_trachomatis_D/UW-3/CX_chromosome_g_1 | 48608 |
| 1712_Chlamydia_trachomatis_D/UW-3/CX_chromosome_g_2 | 48609 |
| 1712_Chlamydia_trachomatis_D/UW-3/CX_chromosome_g_3 | 48610 |
| 1712_Chlamydia_trachomatis_D/UW-3/CX_chromosome_g_4 | 48611 |
| 1712_Chlamydia_trachomatis_D/UW-3/CX_chromosome_g_5 | 48612 |
| 1713_Chlamydia_trachomatis_D/UW-3/CX_chromosome_g_1 | 48613 |
| 1713_Chlamydia_trachomatis_D/UW-3/CX_chromosome_g_2 | 48614 |
| 1713_Chlamydia_trachomatis_D/UW-3/CX_chromosome_g_3 | 48615 |
| 1713_Chlamydia_trachomatis_D/UW-3/CX_chromosome_g_4 | 48616 |
| 1713_Chlamydia_trachomatis_D/UW-3/CX_chromosome_g_5 | 48617 |
| 1714_Chlamydia_trachomatis_D/UW-3/CX_chromosome_g_1 | 48618 |
| 1714_Chlamydia_trachomatis_D/UW-3/CX_chromosome_g_2 | 48619 |
| 1714_Chlamydia_trachomatis_D/UW-3/CX_chromosome_g_3 | 48620 |
| 1714_Chlamydia_trachomatis_D/UW-3/CX_chromosome_g_4 | 48621 |
| 1714_Chlamydia_trachomatis_D/UW-3/CX_chromosome_g_5 | 48622 |
| 1715_Chlamydia_trachomatis_D/UW-3/CX_chromosome_g_1 | 48623 |
| 1715_Chlamydia_trachomatis_D/UW-3/CX_chromosome_g_2 | 48624 |
| 1715_Chlamydia_trachomatis_D/UW-3/CX_chromosome_g_3 | 48625 |
| 1715_Chlamydia_trachomatis_D/UW-3/CX_chromosome_g_4 | 48626 |
| 1715_Chlamydia_trachomatis_D/UW-3/CX_chromosome_g_5 | 48627 |
| 1716_Chlamydia_trachomatis_D/UW-3/CX_chromosome_g_1 | 48628 |
| 1716_Chlamydia_trachomatis_D/UW-3/CX_chromosome_g_2 | 48629 |
| 1716_Chlamydia_trachomatis_D/UW-3/CX_chromosome_g_3 | 48630 |
| 1716_Chlamydia_trachomatis_D/UW-3/CX_chromosome_g_4 | 48631 |
| 1716_Chlamydia_trachomatis_D/UW-3/CX_chromosome_g_5 | 48632 |
| 1717_Chlamydia_trachomatis_D/UW-3/CX_chromosome_g_1 | 48633 |
| 1717_Chlamydia_trachomatis_D/UW-3/CX_chromosome_g_2 | 48634 |
| 1717_Chlamydia_trachomatis_D/UW-3/CX_chromosome_g_3 | 48635 |
| 1717_Chlamydia_trachomatis_D/UW-3/CX_chromosome_g_4 | 48636 |
| 1717_Chlamydia_trachomatis_D/UW-3/CX_chromosome_g_5 | 48637 |
| 1718_Chlamydia_trachomatis_D/UW-3/CX_chromosome_g_1 | 48638 |
| 1718_Chlamydia_trachomatis_D/UW-3/CX_chromosome_g_2 | 48639 |
| 1718_Chlamydia_trachomatis_D/UW-3/CX_chromosome_g_3 | 48640 |
| 1718_Chlamydia_trachomatis_D/UW-3/CX_chromosome_g_4 | 48641 |
| 1718_Chlamydia_trachomatis_D/UW-3/CX_chromosome_g_5 | 48642 |
| 1719_Chlamydia_trachomatis_D/UW-3/CX_chromosome_g_1 | 48643 |
| 1719_Chlamydia_trachomatis_D/UW-3/CX_chromosome_g_2 | 48644 |
| 1719_Chlamydia_trachomatis_D/UW-3/CX_chromosome_g_3 | 48645 |
| 1719_Chlamydia_trachomatis_D/UW-3/CX_chromosome_g_4 | 48646 |
| 1719_Chlamydia_trachomatis_D/UW-3/CX_chromosome_g_5 | 48647 |
| 1720_Chlamydia_trachomatis_D/UW-3/CX_chromosome_g_1 | 48648 |
| 1720_Chlamydia_trachomatis_D/UW-3/CX_chromosome_g_2 | 48649 |
| 1720_Chlamydia_trachomatis_D/UW-3/CX_chromosome_g_3 | 48650 |
| 1720_Chlamydia_trachomatis_D/UW-3/CX_chromosome_g_4 | 48651 |
| 1720_Chlamydia_trachomatis_D/UW-3/CX_chromosome_g_5 | 48652 |
| 1721_Chlamydia_trachomatis_D/UW-3/CX_chromosome_g_1 | 48653 |
| 1721_Chlamydia_trachomatis_D/UW-3/CX_chromosome_g_2 | 48654 |
| 1721_Chlamydia_trachomatis_D/UW-3/CX_chromosome_g_3 | 48655 |
| 1721_Chlamydia_trachomatis_D/UW-3/CX_chromosome_g_4 | 48656 |
| 1721_Chlamydia_trachomatis_D/UW-3/CX_chromosome_g_5 | 48657 |
| 1722_Chlamydia_trachomatis_D/UW-3/CX_chromosome_g_1 | 48658 |
| 1722_Chlamydia_trachomatis_D/UW-3/CX_chromosome_g_2 | 48659 |
| 1722_Chlamydia_trachomatis_D/UW-3/CX_chromosome_g_3 | 48660 |
| 1722_Chlamydia_trachomatis_D/UW-3/CX_chromosome_g_4 | 48661 |
| 1722_Chlamydia_trachomatis_D/UW-3/CX_chromosome_g_5 | 48662 |
| 1723_Chlamydia_trachomatis_D/UW-3/CX_chromosome_g_1 | 48663 |
| 1723_Chlamydia_trachomatis_D/UW-3/CX_chromosome_g_2 | 48664 |
| 1723_Chlamydia_trachomatis_D/UW-3/CX_chromosome_g_3 | 48665 |
| 1723_Chlamydia_trachomatis_D/UW-3/CX_chromosome_g_4 | 48666 |
| 1723_Chlamydia_trachomatis_D/UW-3/CX_chromosome_g_5 | 48667 |
| 1724_Chlamydia_trachomatis_D/UW-3/CX_chromosome_g_1 | 48668 |
| 1724_Chlamydia_trachomatis_D/UW-3/CX_chromosome_g_2 | 48669 |
| 1724_Chlamydia_trachomatis_D/UW-3/CX_chromosome_g_3 | 48670 |
| 1724_Chlamydia_trachomatis_D/UW-3/CX_chromosome_g_4 | 48671 |
| 1724_Chlamydia_trachomatis_D/UW-3/CX_chromosome_g_5 | 48672 |
| 1725_Chlamydia_trachomatis_D/UW-3/CX_chromosome_g_1 | 48673 |
| 1725_Chlamydia_trachomatis_D/UW-3/CX_chromosome_g_2 | 48674 |
| 1725_Chlamydia_trachomatis_D/UW-3/CX_chromosome_g_3 | 48675 |
| 1725_Chlamydia_trachomatis_D/UW-3/CX_chromosome_g_4 | 48676 |
| 1725_Chlamydia_trachomatis_D/UW-3/CX_chromosome_g_5 | 48677 |
| 1726_Chlamydia_trachomatis_D/UW-3/CX_chromosome_g_1 | 48678 |
| 1726_Chlamydia_trachomatis_D/UW-3/CX_chromosome_g_2 | 48679 |
| 1726_Chlamydia_trachomatis_D/UW-3/CX_chromosome_g_3 | 48680 |
| 1726_Chlamydia_trachomatis_D/UW-3/CX_chromosome_g_4 | 48681 |
| 1726_Chlamydia_trachomatis_D/UW-3/CX_chromosome_g_5 | 48682 |
| 1727_Chlamydia_trachomatis_D/UW-3/CX_chromosome_g_1 | 48683 |
| 1727_Chlamydia_trachomatis_D/UW-3/CX_chromosome_g_2 | 48684 |
| 1727_Chlamydia_trachomatis_D/UW-3/CX_chromosome_g_3 | 48685 |
| 1727_Chlamydia_trachomatis_D/UW-3/CX_chromosome_g_4 | 48686 |
| 1727_Chlamydia_trachomatis_D/UW-3/CX_chromosome_g_5 | 48687 |
| 1728_Chlamydia_trachomatis_D/UW-3/CX_chromosome_g_1 | 48688 |
| 1728_Chlamydia_trachomatis_D/UW-3/CX_chromosome_g_2 | 48689 |
| 1728_Chlamydia_trachomatis_D/UW-3/CX_chromosome_g_3 | 48690 |
| 1728_Chlamydia_trachomatis_D/UW-3/CX_chromosome_g_4 | 48691 |
| 1728_Chlamydia_trachomatis_D/UW-3/CX_chromosome_g_5 | 48692 |
| 1729_Chlamydia_trachomatis_D/UW-3/CX_chromosome_g_1 | 48693 |
| 1729_Chlamydia_trachomatis_D/UW-3/CX_chromosome_g_2 | 48694 |
| 1729_Chlamydia_trachomatis_D/UW-3/CX_chromosome_g_3 | 48695 |
| 1729_Chlamydia_trachomatis_D/UW-3/CX_chromosome_g_4 | 48696 |
| 1729_Chlamydia_trachomatis_D/UW-3/CX_chromosome_g_5 | 48697 |
| 1730_Chlamydia_trachomatis_D/UW-3/CX_chromosome_g_1 | 48698 |
| 1730_Chlamydia_trachomatis_D/UW-3/CX_chromosome_g_2 | 48699 |
| 1730_Chlamydia_trachomatis_D/UW-3/CX_chromosome_g_3 | 48700 |
| 1730_Chlamydia_trachomatis_D/UW-3/CX_chromosome_g_4 | 48701 |
| 1730_Chlamydia_trachomatis_D/UW-3/CX_chromosome_g_5 | 48702 |
| 1731_Chlamydia_trachomatis_D/UW-3/CX_chromosome_g_1 | 48703 |
| 1731_Chlamydia_trachomatis_D/UW-3/CX_chromosome_g_2 | 48704 |
| 1731_Chlamydia_trachomatis_D/UW-3/CX_chromosome_g_3 | 48705 |
| 1731_Chlamydia_trachomatis_D/UW-3/CX_chromosome_g_4 | 48706 |
| 1731_Chlamydia_trachomatis_D/UW-3/CX_chromosome_g_5 | 48707 |
| 1732_Chlamydia_trachomatis_D/UW-3/CX_chromosome_g_1 | 48708 |
| 1732_Chlamydia_trachomatis_D/UW-3/CX_chromosome_g_2 | 48709 |
| 1732_Chlamydia_trachomatis_D/UW-3/CX_chromosome_g_3 | 48710 |
| 1732_Chlamydia_trachomatis_D/UW-3/CX_chromosome_g_4 | 48711 |
| 1732_Chlamydia_trachomatis_D/UW-3/CX_chromosome_g_5 | 48712 |
| 1733_Chlamydia_trachomatis_D/UW-3/CX_chromosome_g_1 | 48713 |
| 1733_Chlamydia_trachomatis_D/UW-3/CX_chromosome_g_2 | 48714 |
| 1733_Chlamydia_trachomatis_D/UW-3/CX_chromosome_g_3 | 48715 |
| 1733_Chlamydia_trachomatis_D/UW-3/CX_chromosome_g_4 | 48716 |
| 1733_Chlamydia_trachomatis_D/UW-3/CX_chromosome_g_5 | 48717 |
| 1734_Chlamydia_trachomatis_D/UW-3/CX_chromosome_g_1 | 48718 |
| 1734_Chlamydia_trachomatis_D/UW-3/CX_chromosome_g_2 | 48719 |
| 1734_Chlamydia_trachomatis_D/UW-3/CX_chromosome_g_3 | 48720 |
| 1734_Chlamydia_trachomatis_D/UW-3/CX_chromosome_g_4 | 48721 |
| 1734_Chlamydia_trachomatis_D/UW-3/CX_chromosome_g_5 | 48722 |
| 1735_Chlamydia_trachomatis_D/UW-3/CX_chromosome_g_1 | 48723 |
| 1735_Chlamydia_trachomatis_D/UW-3/CX_chromosome_g_2 | 48724 |
| 1735_Chlamydia_trachomatis_D/UW-3/CX_chromosome_g_3 | 48725 |
| 1735_Chlamydia_trachomatis_D/UW-3/CX_chromosome_g_4 | 48726 |
| 1735_Chlamydia_trachomatis_D/UW-3/CX_chromosome_g_5 | 48727 |
| 1736_Chlamydia_trachomatis_D/UW-3/CX_chromosome_g_1 | 48728 |
| 1736_Chlamydia_trachomatis_D/UW-3/CX_chromosome_g_2 | 48729 |
| 1736_Chlamydia_trachomatis_D/UW-3/CX_chromosome_g_3 | 48730 |
| 1736_Chlamydia_trachomatis_D/UW-3/CX_chromosome_g_4 | 48731 |
| 1736_Chlamydia_trachomatis_D/UW-3/CX_chromosome_g_5 | 48732 |
| 1737_Chlamydia_trachomatis_D/UW-3/CX_chromosome_g_1 | 48733 |
| 1737_Chlamydia_trachomatis_D/UW-3/CX_chromosome_g_2 | 48734 |
| 1737_Chlamydia_trachomatis_D/UW-3/CX_chromosome_g_3 | 48735 |
| 1737_Chlamydia_trachomatis_D/UW-3/CX_chromosome_g_4 | 48736 |
| 1737_Chlamydia_trachomatis_D/UW-3/CX_chromosome_g_5 | 48737 |
| 1738_Chlamydia_trachomatis_D/UW-3/CX_chromosome_g_1 | 48738 |
| 1738_Chlamydia_trachomatis_D/UW-3/CX_chromosome_g_2 | 48739 |
| 1738_Chlamydia_trachomatis_D/UW-3/CX_chromosome_g_3 | 48740 |
| 1738_Chlamydia_trachomatis_D/UW-3/CX_chromosome_g_4 | 48741 |
| 1738_Chlamydia_trachomatis_D/UW-3/CX_chromosome_g_5 | 48742 |
| 1739_Chlamydia_trachomatis_D/UW-3/CX_chromosome_g_1 | 48743 |
| 1739_Chlamydia_trachomatis_D/UW-3/CX_chromosome_g_2 | 48744 |
| 1739_Chlamydia_trachomatis_D/UW-3/CX_chromosome_g_3 | 48745 |
| 1739_Chlamydia_trachomatis_D/UW-3/CX_chromosome_g_4 | 48746 |
| 1739_Chlamydia_trachomatis_D/UW-3/CX_chromosome_g_5 | 48747 |
| 1740_Chlamydia_trachomatis_D/UW-3/CX_chromosome_g_1 | 48748 |
| 1740_Chlamydia_trachomatis_D/UW-3/CX_chromosome_g_2 | 48749 |
| 1740_Chlamydia_trachomatis_D/UW-3/CX_chromosome_g_3 | 48750 |
| 1740_Chlamydia_trachomatis_D/UW-3/CX_chromosome_g_4 | 48751 |
| 1740_Chlamydia_trachomatis_D/UW-3/CX_chromosome_g_5 | 48752 |
| 1741_Chlamydia_trachomatis_D/UW-3/CX_chromosome_g_1 | 48753 |
| 1741_Chlamydia_trachomatis_D/UW-3/CX_chromosome_g_2 | 48754 |
| 1741_Chlamydia_trachomatis_D/UW-3/CX_chromosome_g_3 | 48755 |
| 1741_Chlamydia_trachomatis_D/UW-3/CX_chromosome_g_4 | 48756 |
| 1741_Chlamydia_trachomatis_D/UW-3/CX_chromosome_g_5 | 48757 |
| 1742_Chlamydia_trachomatis_D/UW-3/CX_chromosome_g_1 | 48758 |
| 1742_Chlamydia_trachomatis_D/UW-3/CX_chromosome_g_2 | 48759 |
| 1742_Chlamydia_trachomatis_D/UW-3/CX_chromosome_g_3 | 48760 |
| 1742_Chlamydia_trachomatis_D/UW-3/CX_chromosome_g_4 | 48761 |
| 1742_Chlamydia_trachomatis_D/UW-3/CX_chromosome_g_5 | 48762 |
| 1743_Chlamydia_trachomatis_D/UW-3/CX_chromosome_g_1 | 48763 |
| 1743_Chlamydia_trachomatis_D/UW-3/CX_chromosome_g_2 | 48764 |
| 1743_Chlamydia_trachomatis_D/UW-3/CX_chromosome_g_3 | 48765 |
| 1743_Chlamydia_trachomatis_D/UW-3/CX_chromosome_g_4 | 48766 |
| 1743_Chlamydia_trachomatis_D/UW-3/CX_chromosome_g_5 | 48767 |
| 1744_Chlamydia_trachomatis_D/UW-3/CX_chromosome_g_1 | 48768 |
| 1744_Chlamydia_trachomatis_D/UW-3/CX_chromosome_g_2 | 48769 |
| 1744_Chlamydia_trachomatis_D/UW-3/CX_chromosome_g_3 | 48770 |
| 1744_Chlamydia_trachomatis_D/UW-3/CX_chromosome_g_4 | 48771 |
| 1744_Chlamydia_trachomatis_D/UW-3/CX_chromosome_g_5 | 48772 |
| 1745_Chlamydia_trachomatis_D/UW-3/CX_chromosome_g_1 | 48773 |
| 1745_Chlamydia_trachomatis_D/UW-3/CX_chromosome_g_2 | 48774 |
| 1745_Chlamydia_trachomatis_D/UW-3/CX_chromosome_g_3 | 48775 |
| 1745_Chlamydia_trachomatis_D/UW-3/CX_chromosome_g_4 | 48776 |
| 1745_Chlamydia_trachomatis_D/UW-3/CX_chromosome_g_5 | 48777 |
| 1746_Chlamydia_trachomatis_D/UW-3/CX_chromosome_g_1 | 48778 |
| 1746_Chlamydia_trachomatis_D/UW-3/CX_chromosome_g_2 | 48779 |
| 1746_Chlamydia_trachomatis_D/UW-3/CX_chromosome_g_3 | 48780 |
| 1746_Chlamydia_trachomatis_D/UW-3/CX_chromosome_g_4 | 48781 |
| 1746_Chlamydia_trachomatis_D/UW-3/CX_chromosome_g_5 | 48782 |
| 1747_Chlamydia_trachomatis_D/UW-3/CX_chromosome_g_1 | 48783 |
| 1747_Chlamydia_trachomatis_D/UW-3/CX_chromosome_g_2 | 48784 |
| 1747_Chlamydia_trachomatis_D/UW-3/CX_chromosome_g_3 | 48785 |
| 1747_Chlamydia_trachomatis_D/UW-3/CX_chromosome_g_4 | 48786 |
| 1747_Chlamydia_trachomatis_D/UW-3/CX_chromosome_g_5 | 48787 |
| 1748_Chlamydia_trachomatis_D/UW-3/CX_chromosome_g_1 | 48788 |
| 1748_Chlamydia_trachomatis_D/UW-3/CX_chromosome_g_2 | 48789 |
| 1748_Chlamydia_trachomatis_D/UW-3/CX_chromosome_g_3 | 48790 |
| 1748_Chlamydia_trachomatis_D/UW-3/CX_chromosome_g_4 | 48791 |
| 1748_Chlamydia_trachomatis_D/UW-3/CX_chromosome_g_5 | 48792 |
| 1749_Chlamydia_trachomatis_D/UW-3/CX_chromosome_g_1 | 48793 |
| 1749_Chlamydia_trachomatis_D/UW-3/CX_chromosome_g_2 | 48794 |
| 1749_Chlamydia_trachomatis_D/UW-3/CX_chromosome_g_3 | 48795 |
| 1749_Chlamydia_trachomatis_D/UW-3/CX_chromosome_g_4 | 48796 |
| 1749_Chlamydia_trachomatis_D/UW-3/CX_chromosome_g_5 | 48797 |
| 1750_Chlamydia_trachomatis_D/UW-3/CX_chromosome_g_1 | 48798 |
| 1750_Chlamydia_trachomatis_D/UW-3/CX_chromosome_g_2 | 48799 |
| 1750_Chlamydia_trachomatis_D/UW-3/CX_chromosome_g_3 | 48800 |
| 1750_Chlamydia_trachomatis_D/UW-3/CX_chromosome_g_4 | 48801 |
| 1750_Chlamydia_trachomatis_D/UW-3/CX_chromosome_g_5 | 48802 |
| 1751_Chlamydia_trachomatis_D/UW-3/CX_chromosome_g_1 | 48803 |
| 1751_Chlamydia_trachomatis_D/UW-3/CX_chromosome_g_2 | 48804 |
| 1751_Chlamydia_trachomatis_D/UW-3/CX_chromosome_g_3 | 48805 |
| 1751_Chlamydia_trachomatis_D/UW-3/CX_chromosome_g_4 | 48806 |
| 1751_Chlamydia_trachomatis_D/UW-3/CX_chromosome_g_5 | 48807 |
| 1752_Chlamydia_trachomatis_D/UW-3/CX_chromosome_g_1 | 48808 |
| 1752_Chlamydia_trachomatis_D/UW-3/CX_chromosome_g_2 | 48809 |
| 1752_Chlamydia_trachomatis_D/UW-3/CX_chromosome_g_3 | 48810 |
| 1752_Chlamydia_trachomatis_D/UW-3/CX_chromosome_g_4 | 48811 |
| 1752_Chlamydia_trachomatis_D/UW-3/CX_chromosome_g_5 | 48812 |
| 1753_Chlamydia_trachomatis_D/UW-3/CX_chromosome_g_1 | 48813 |
| 1753_Chlamydia_trachomatis_D/UW-3/CX_chromosome_g_2 | 48814 |
| 1753_Chlamydia_trachomatis_D/UW-3/CX_chromosome_g_3 | 48815 |
| 1753_Chlamydia_trachomatis_D/UW-3/CX_chromosome_g_4 | 48816 |
| 1753_Chlamydia_trachomatis_D/UW-3/CX_chromosome_g_5 | 48817 |
| 1754_Influenza_A_virus_(A/Korea/426/1968(H2N2))_{—} | 48818 |
| segment_5_g_1 | |
| 1754_Influenza_A_virus_(A/Korea/426/1968(H2N2))_{—} | 48819 |
| segment_5_g_2 | |
| 1754_Influenza_A_virus_(A/Korea/426/1968(H2N2))_{—} | 48820 |
| segment_5_g_3 | |
| 1754_Influenza_A_virus_(A/Korea/426/1968(H2N2))_{—} | 48821 |
| segment_5_g_4 | |
| 1754_Influenza_A_virus_(A/Korea/426/1968(H2N2))_{—} | 48822 |
| segment_5_g_5 | |
| 1755_Influenza_A_virus_(A/Korea/426/1968(H2N2))_{—} | 48823 |
| segment_5_g_1 | |
| 1755_Influenza_A_virus_(A/Korea/426/1968(H2N2))_{—} | 48824 |
| segment_5_g_2 | |
| 1755_Influenza_A_virus_(A/Korea/426/1968(H2N2))_{—} | 48825 |
| segment_5_g_3 | |
| 1755_Influenza_A_virus_(A/Korea/426/1968(H2N2))_{—} | 48826 |
| segment_5_g_4 | |
| 1755_Influenza_A_virus_(A/Korea/426/1968(H2N2))_{—} | 48827 |
| segment_5_g_5 | |
| 1756_Influenza_A_virus_(A/Korea/426/1968(H2N2))_{—} | 48828 |
| segment_5_g_1 | |
| 1756_Influenza_A_virus_(A/Korea/426/1968(H2N2))_{—} | 48829 |
| segment_5_g_2 | |
| 1756_Influenza_A_virus_(A/Korea/426/1968(H2N2))_{—} | 48830 |
| segment_5_g_3 | |
| 1756_Influenza_A_virus_(A/Korea/426/1968(H2N2))_{—} | 48831 |
| segment_s_g_4 | |
| 1756_Influenza_A_virus_(A/Korea/426/1968(H2N2))_{—} | 48832 |
| segment_5_g_5 | |
| 1757_Influenza_A_virus_(A/Korea/426/1968(H2N2))_{—} | 48833 |
| segment_5_g_1 | |
| 1757_Influenza_A_virus_(A/Korea/426/1968(H2N2))_{—} | 48834 |
| segment_5_g_2 | |
| 1757_Influenza_A_virus_(A/Korea/426/1968(H2N2))_{—} | 48835 |
| segment_5_g_3 | |
| 1757_Influenza_A_virus_(A/Korea/426/1968(H2N2))_{—} | 48836 |
| segment_5_g_4 | |
| 1757_Influenza_A_virus_(A/Korea/426/1968(H2N2))_{—} | 48837 |
| segment_5_g_5 | |
| 1758_Influenza_A_virus_(A/California/07/2009(H1N1))_{—} | 48838 |
| segment_6_{—} | |
| neuraminidase_(NA)_gene_g_1 | |
| 1758_Influenza_A_virus_(A/California/07/2009(H1N1))_{—} | 48839 |
| segment_6_{—} | |
| neuraminidase_(NA)_gene_g_2 | |
| 1758_Influenza_A_virus_(A/California/07/2009(H1N1))_{—} | 48840 |
| segment_6_{—} | |
| neuraminidase_(NA)_gene_g_3 | |
| 1758_Influenza_A_virus_(A/California/07/2009(H1N1))_{—} | 48841 |
| segment_6_{—} | |
| neuraminidase_(NA)_gene_g_4 | |
| 1758_Influenza_A_virus_(A/California/07/2009(H1N1))_{—} | 48842 |
| segment_6_{—} | |
| neuraminidase_(NA)_gene_g_5 | |
| 1759_Influenza_A_virus_(A/California/07/2009(H1N1))_{—} | 48843 |
| segment_6_{—} | |
| neuraminidase_(NA)_gene_g_1 | |
| 1759_Influenza_A_virus_(A/California/07/2009(H1N1))_{—} | 48844 |
| segment_6_{—} | |
| neuraminidase_(NA)_gene_g_2 | |
| 1759_Influenza_A_virus_(A/California/07/2009(H1N1))_{—} | 48845 |
| segment_6_{—} | |
| neuraminidase_(NA)_gene_g_3 | |
| 1759_Influenza_A_virus_(A/California/07/2009(H1N1))_{—} | 48846 |
| segment_6_{—} | |
| neuraminidase_(NA)_gene_g_4 | |
| 1759_Influenza_A_virus_(A/California/07/2009(H1N1))_{—} | 48847 |
| segment_6_{—} | |
| neuraminidase_(NA)_gene_g_5 | |
| 1760_Influenza_A_virus_(A/California/07/2009(H1N1))_{—} | 48848 |
| segment_6_{—} | |
| neuraminidase_(NA)_gene_g_1 | |
| 1760_Influenza_A_virus_(A/California/07/2009(H1N1))_{—} | 48849 |
| segment_6_{—} | |
| neuraminidase_(NA)_gene_g_2 | |
| 1760_Influenza_A_virus_(A/California/07/2009(H1N1))_{—} | 48850 |
| segment_6_{—} | |
| neuraminidase_(NA)_gene_g_3 | |
| 1760_Influenza_A_virus_(A/California/07/2009(H1N1))_{—} | 48851 |
| segment_6_{—} | |
| neuraminidase_(NA)_gene_g_4 | |
| 1760_Influenza_A_virus_(A/California/07/2009(H1N1))_{—} | 48852 |
| segment_6_{—} | |
| neuraminidase_(NA)_gene_g_5 | |
| 1761_Influenza_A_virus_(A/California/07/2009(H1N1))_{—} | 48853 |
| segment_6_{—} | |
| neuraminidase_(NA)_gene_g_1 | |
| 1761_Influenza_A_virus_(A/California/07/2009(H1N1))_{—} | 48854 |
| segment_6_{—} | |
| neuraminidase_(NA)_gene_g_2 | |
| 1761_Influenza_A_virus_(A/California/07/2009(H1N1))_{—} | 48855 |
| segment_6_{—} | |
| neuraminidase_(NA)_gene_g_3 | |
| 1761_Influenza_A_virus_(A/California/07/2009(H1N1))_{—} | 48856 |
| segment_6_{—} | |
| neuraminidase_(NA)_gene_g_4 | |
| 1761_Influenza_A_virus_(A/California/07/2009(H1N1))_{—} | 48857 |
| segment_6_{—} | |
| neuraminidase_(NA)_gene_g_5 | |
| 1762_Influenza_A_virus_(A/Korea/426/1968(H2N2))_{—} | 48858 |
| segment_7_g_1 | |
| 1762_Influenza_A_virus_(A/Korea/426/1968(H2N2))_{—} | 48859 |
| segment_7_g_2 | |
| 1762_Influenza_A_virus_(A/Korea/426/1968(H2N2))_{—} | 48860 |
| segment_7_g_3 | |
| 1762_Influenza_A_virus_(A/Korea/426/1968(H2N2))_{—} | 48861 |
| segment_7_g_4 | |
| 1762_Influenza_A_virus_(A/Korea/426/1968(H2N2))_{—} | 48862 |
| segment_7_g_5 | |
| 1763_Influenza_C_virus_(C/Ann_Arbor/1/50)_HEF_gene_for_{—} | 48863 |
| hemagglutinin-esterase-fusion_g_1 | |
| 1763_Influenza_C_virus_(C/Ann_Arbor/1/50)_HEF_gene_for_{—} | 48864 |
| hemagglutinin-esterase-fusion_g_2 | |
| 1763_Influenza_C_virus_(C/Ann_Arbor/1/50)_HEF_gene_for_{—} | 48865 |
| hemagglutinin-esterase-fusion_g_3 | |
| 1763_Influenza_C_virus_(C/Ann_Arbor/1/50)_HEF_gene_for_{—} | 48866 |
| hemagglutinin-esterase-fusion_g_4 | |
| 1763_Influenza_C_virus_(C/Ann_Arbor/1/50)_HEF_gene_for_{—} | 48867 |
| hemagglutinin-esterase-fusion_g_5 | |
| 1764_Influenza_C_virus_(C/Ann_Arbor/1/50)_HEF_gene_for_{—} | 48868 |
| hemagglutinin-esterase-fusion_g_1 | |
| 1764_Influenza_C_virus_(C/Ann_Arbor/1/50)_HEF_gene_for_{—} | 48869 |
| hemagglutinin-esterase-fusion_g_2 | |
| 1764_Influenza_C_virus_(C/Ann_Arbor/1/50)_HEF_gene_for_{—} | 48870 |
| hemagglutinin-esterase-fusion_g_3 | |
| 1764_Influenza_C_virus_(C/Ann_Arbor/1/50)_HEF_gene_for_{—} | 48871 |
| hemagglutinin-esterase-fusion_g_4 | |
| 1764_Influenza_C_virus_(C/Ann_Arbor/1/50)_HEF_gene_for_{—} | 48872 |
| hemagglutinin-esterase-fusion_g_5 | |
| 1765_Influenza_C_virus_(C/Ann_Arbor/1/50)_HEF_gene_for_{—} | 48873 |
| hemagglutinin-esterase-fusion_g_1 | |
| 1765_Influenza_C_virus_(C/Ann_Arbor/1/50)_HEF_gene_for_{—} | 48874 |
| hemagglutinin-esterase-fusion_g_2 | |
| 1765_Influenza_C_virus_(C/Ann_Arbor/1/50)_HEF_gene_for_{—} | 48875 |
| hemagglutinin-esterase-fusion_g_3 | |
| 1765_Influenza_C_virus_(C/Ann_Arbor/1/50)_HEF_gene_for_{—} | 48876 |
| hemagglutinin-esterase-fusion_g_4 | |
| 1765_Influenza_C_virus_(C/Ann_Arbor/1/50)_HEF_gene_for_{—} | 48877 |
| hemagglutinin-esterase-fusion_g_5 | |
| 1766_Influenza_C_virus_(C/Ann_Arbor/1/50)_HEF_gene_for_{—} | 48878 |
| hemagglutinin-esterase-fusion_g_1 | |
| 1766_Influenza_C_virus_(C/Ann_Arbor/1/50)_HEF_gene_for_{—} | 48879 |
| hemagglutinin-esterase-fusion_g_2 | |
| 1766_Influenza_C_virus_(C/Ann_Arbor/1/50)_HEF_gene_for_{—} | 48880 |
| hemagglutinin-esterase-fusion_g_3 | |
| 1766_Influenza_C_virus_(C/Ann_Arbor/1/50)_HEF_gene_for_{—} | 48881 |
| hemagglutinin-esterase-fusion_g_4 | |
| 1766_Influenza_C_virus_(C/Ann_Arbor/1/50)_HEF_gene_for_{—} | 48882 |
| hemagglutinin-esterase-fusion_g_5 | |
| 1767_Influenza_C_virus_(C/Ann_Arbor/1/50)_HEF_gene_for_{—} | 48883 |
| hemagglutinin-esterase-fusion_g_1 | |
| 1767_Influenza_C_virus_(C/Ann_Arbor/1/50)_HEF_gene_for_{—} | 48884 |
| hemagglutinin-esterase-fusion_g_2 | |
| 1767_Influenza_C_virus_(C/Ann_Arbor/1/50)_HEF_gene_for_{—} | 48885 |
| hemagglutinin-esterase-fusion_g_3 | |
| 1767_Influenza_C_virus_(C/Ann_Arbor/1/50)_HEF_gene_for_{—} | 48886 |
| hemagglutinin-esterase-fusion_g_4 | |
| 1767_Influenza_C_virus_(C/Ann_Arbor/1/50)_HEF_gene_for_{—} | 48887 |
| hemagglutinin-esterase-fusion_g_5 | |
| 1768_Influenza_C_virus_(C/Ann_Arbor/1/50)_HEF_gene_for_{—} | 48888 |
| hemagglutinin-esterase-fusion_g_1 | |
| 1768_Influenza_C_virus_(C/Ann_Arbor/1/50)_HEF_gene_for_{—} | 48889 |
| hemagglutinin-esterase-fusion_g_2 | |
| 1768_Influenza_C_virus_(C/Ann_Arbor/1/50)_HEF_gene_for_{—} | 48890 |
| hemagglutinin-esterase-fusion_g_3 | |
| 1768_Influenza_C_virus_(C/Ann_Arbor/1/50)_HEF_gene_for_{—} | 48891 |
| hemagglutinin-esterase-fusion_g_4 | |
| 1768_Influenza_C_virus_(C/Ann_Arbor/1/50)_HEF_gene_for_{—} | 48892 |
| hemagglutinin-esterase-fusion_g_5 | |
| 1769_Influenza_C_virus_(C/Ann_Arbor/1/50)_HEF_gene_for_{—} | 48893 |
| hemagglutinin-esterase-fusion_g_1 | |
| 1769_Influenza_C_virus_(C/Ann_Arbor/1/50)_HEF_gene_for_{—} | 48894 |
| hemagglutinin-esterase-fusion_g_2 | |
| 1769_Influenza_C_virus_(C/Ann_Arbor/1/50)_HEF_gene_for_{—} | 48895 |
| hemagglutinin-esterase-fusion_g_3 | |
| 1769_Influenza_C_virus_(C/Ann_Arbor/1/50)_HEF_gene_for_{—} | 48896 |
| hemagglutinin-esterase-fusion_g_4 | |
| 1769_Influenza_C_virus_(C/Ann_Arbor/1/50)_HEF_gene_for_{—} | 48897 |
| hemagglutinin-esterase-fusion_g_5 | |
| 1770_Influenza_C_virus_(C/Ann_Arbor/1/50)_HEF_gene_for_{—} | 48898 |
| hemagglutinin-esterase-fusion_g_1 | |
| 1770_Influenza_C_virus_(C/Ann_Arbor/1/50)_HEF_gene_for_{—} | 48899 |
| hemagglutinin-esterase-fusion_g_2 | |
| 1770_Influenza_C_virus_(C/Ann_Arbor/1/50)_HEF_gene_for_{—} | 48900 |
| hemagglutinin-esterase-fusion_g_3 | |
| 1770_Influenza_C_virus_(C/Ann_Arbor/1/50)_HEF_gene_for_{—} | 48901 |
| hemagglutinin-esterase-fusion_g_4 | |
| 1770_Influenza_C_virus_(C/Ann_Arbor/1/50)_HEF_gene_for_{—} | 48902 |
| hemagglutinin-esterase-fusion_g_5 | |
| 1771_Influenza_A_virus_(A/California/07/2009(H1N1))_segment_7_{—} | 48903 |
| matrix_protein_2_(M2)_and_matrix_protein_1_(M1)_genes_g_1 | |
| 1771_Influenza_A_virus_(A/California/07/2009(H1N1))_segment_7_{—} | 48904 |
| matrix_protein_2_(M2)_and_matrix_protein_1_(M1)_genes_g_2 | |
| 1771_Influenza_A_virus_(A/California/07/2009(H1N1))_segment_7_{—} | 48905 |
| matrix_protein_2_(M2)_and_matrix_protein_1_(M1)_genes_g_3 | |
| 1771_Influenza_A_virus_(A/California/07/2009(H1N1))_segment_7_{—} | 48906 |
| matrix_protein_2_(M2)_and_matrix_protein_1_(M1)_genes_g_4 | |
| 1771_Influenza_A_virus_(A/California/07/2009(H1N1))_segment_7_{—} | 48907 |
| matrix_protein_2_(M2)_and_matrix_protein_1_(M1)_genes_g_5 | |
| 1772_Influenza_A_virus_(A/California/07/2009(H1N1))_segment_7_{—} | 48908 |
| matrix_protein_2_(M2)_and_matrix_protein_1_(M1)_genes_g_1 | |
| 1772_Influenza_A_virus_(A/California/07/2009(H1N1))_segment_7_{—} | 48909 |
| matrix_protein_2_(M2)_and_matrix_protein_1_(M1)_genes_g_2 | |
| 1772_Influenza_A_virus_(A/California/07/2009(H1N1))_segment_7_{—} | 48910 |
| matrix_protein_2_(M2)_and_matrix_protein_1_(M1)_genes_g_3 | |
| 1772_Influenza_A_virus_(A/California/07/2009(H1N1))_segment_7_{—} | 48911 |
| matrix_protein_2_(M2)_and_matrix_protein_1_(M1)_genes_g_4 | |
| 1772_Influenza_A_virus_(A/California/07/2009(H1N1))_segment_7_{—} | 48912 |
| matrix_protein_2_(M2)_and_matrix_protein_1_(M1)_genes_g_5 | |
| 1773_Human_papillomavirus_type_92_g_1 | 48913 |
| 1773_Human_papillomavirus_type_92_g_2 | 48914 |
| 1773_Human_papillomavirus_type_92_g_3 | 48915 |
| 1773_Human_papillomavirus_type_92_g_4 | 48916 |
| 1773_Human_papillomavirus_type_92_g_5 | 48917 |
| 1774_Human_papillomavirus_type_92_g_1 | 48918 |
| 1774_Human_papillomavirus_type_92_g_2 | 48919 |
| 1774_Human_papillomavirus_type_92_g_3 | 48920 |
| 1774_Human_papillomavirus_type_92_g_4 | 48921 |
| 1774_Human_papillomavirus_type_92_g_5 | 48922 |
| 1775_Human_papillomavirus_type_92_g_1 | 48923 |
| 1775_Human_papillomavirus_type_92_g_2 | 48924 |
| 1775_Human_papillomavirus_type_92_g_3 | 48925 |
| 1775_Human_papillomavirus_type_92_g_4 | 48926 |
| 1775_Human_papillomavirus_type_92_g_5 | 48927 |
| 1776_Human_papillomavirus_type_92_g_1 | 48928 |
| 1776_Human_papillomavirus_type_92_g_2 | 48929 |
| 1776_Human_papillomavirus_type_92_g_3 | 48930 |
| 1776_Human_papillomavirus_type_92_g_4 | 48931 |
| 1776_Human_papillomavirus_type_92_g_5 | 48932 |
| 1777_Human_papillomavirus_type_92_g_1 | 48933 |
| 1777_Human_papillomavirus_type_92_g_2 | 48934 |
| 1777_Human_papillomavirus_type_92_g_3 | 48935 |
| 1777_Human_papillomavirus_type_92_g_4 | 48936 |
| 1777_Human_papillomavirus_type_92_g_5 | 48937 |
| 1778_Human_papillomavirus_type_92_g_1 | 48938 |
| 1778_Human_papillomavirus_type_92_g_2 | 48939 |
| 1778_Human_papillomavirus_type_92_g_3 | 48940 |
| 1778_Human_papillomavirus_type_92_g_4 | 48941 |
| 1778_Human_papillomavirus_type_92_g_5 | 48942 |
| 1779_Human_papillomavirus_type_92_g_1 | 48943 |
| 1779_Human_papillomavirus_type_92_g_2 | 48944 |
| 1779_Human_papillomavirus_type_92_g_3 | 48945 |
| 1779_Human_papillomavirus_type_92_g_4 | 48946 |
| 1779_Human_papillomavirus_type_92_g_5 | 48947 |
| 1780_Human_papillomavirus_type_92_g_1 | 48948 |
| 1780_Human_papillomavirus_type_92_g_2 | 48949 |
| 1780_Human_papillomavirus_type_92_g_3 | 48950 |
| 1780_Human_papillomavirus_type_92_g_4 | 48951 |
| 1780_Human_papillomavirus_type_92_g_5 | 48952 |
| 1781_Human_papillomavirus_type_92_g_1 | 48953 |
| 1781_Human_papillomavirus_type_92_g_2 | 48954 |
| 1781_Human_papillomavirus_type_92_g_3 | 48955 |
| 1781_Human_papillomavirus_type_92_g_4 | 48956 |
| 1781_Human_papillomavirus_type_92_g_5 | 48957 |
| 1782_Human_papillomavirus_type_92_g_1 | 48958 |
| 1782_Human_papillomavirus_type_92_g_2 | 48959 |
| 1782_Human_papillomavirus_type_92_g_3 | 48960 |
| 1782_Human_papillomavirus_type_92_g_4 | 48961 |
| 1782_Human_papillomavirus_type_92_g_5 | 48962 |
| 1783_Human_papillomavirus_type_92_g_1 | 48963 |
| 1783_Human_papillomavirus_type_92_g_2 | 48964 |
| 1783_Human_papillomavirus_type_92_g_3 | 48965 |
| 1783_Human_papillomavirus_type_92_g_4 | 48966 |
| 1783_Human_papillomavirus_type_92_g_5 | 48967 |
| 1784_Human_papillomavirus_type_92_g_1 | 48968 |
| 1784_Human_papillomavirus_type_92_g_2 | 48969 |
| 1784_Human_papillomavirus_type_92_g_3 | 48970 |
| 1784_Human_papillomavirus_type_92_g_4 | 48971 |
| 1784_Human_papillomavirus_type_92_g_5 | 48972 |
| 1785_Human_papillomavirus_type_92_g_1 | 48973 |
| 1785_Human_papillomavirus_type_92_g_2 | 48974 |
| 1785_Human_papillomavirus_type_92_g_3 | 48975 |
| 1785_Human_papillomavirus_type_92_g_4 | 48976 |
| 1785_Human_papillomavirus_type_92_g_5 | 48977 |
| 1786_Human_papillomavirus_type_92_g_1 | 48978 |
| 1786_Human_papillomavirus_type_92_g_2 | 48979 |
| 1786_Human_papillomavirus_type_92_g_3 | 48980 |
| 1786_Human_papillomavirus_type_92_g_4 | 48981 |
| 1786_Human_papillomavirus_type_92_g_5 | 48982 |
| 1787_Human_papillomavirus_type_92_g_1 | 48983 |
| 1787_Human_papillomavirus_type_92_g_2 | 48984 |
| 1787_Human_papillomavirus_type_92_g_3 | 48985 |
| 1787_Human_papillomavirus_type_92_g_4 | 48986 |
| 1787_Human_papillomavirus_type_92_g_5 | 48987 |
| 1788_Human_papillomavirus_type_92_g_1 | 48988 |
| 1788_Human_papillomavirus_type_92_g_2 | 48989 |
| 1788_Human_papillomavirus_type_92_g_3 | 48990 |
| 1788_Human_papillomavirus_type_92_g_4 | 48991 |
| 1788_Human_papillomavirus_type_92_g_5 | 48992 |
| 1789_Human_papillomavirus_type_92_g_1 | 48993 |
| 1789_Human_papillomavirus_type_92_g_2 | 48994 |
| 1789_Human_papillomavirus_type_92_g_3 | 48995 |
| 1789_Human_papillomavirus_type_92_g_4 | 48996 |
| 1789_Human_papillomavirus_type_92_g_5 | 48997 |
| 1790_Human_coronavirus_OC43_strain_ATCC_VR-759_g_1 | 48998 |
| 1790_Human_coronavirus_OC43_strain_ATCC_VR-759_g_2 | 48999 |
| 1790_Human_coronavirus_OC43_strain_ATCC_VR-759_g_3 | 49000 |
| 1790_Human_coronavirus_OC43_strain_ATCC_VR-759_g_4 | 49001 |
| 1790_Human_coronavirus_OC43_strain_ATCC_VR-759_g_5 | 49002 |
| 1791_Human_coronavirus_OC43_strain_ATCC_VR-759_g_1 | 49003 |
| 1791_Human_coronavirus_OC43_strain_ATCC_VR-759_g_2 | 49004 |
| 1791_Human_coronavirus_OC43_strain_ATCC_VR-759_g_3 | 49005 |
| 1791_Human_coronavirus_OC43_strain_ATCC_VR-759_g_4 | 49006 |
| 1791_Human_coronavirus_OC43_strain_ATCC_VR-759_g_5 | 49007 |
| 1792_Human_coronavirus_OC43_strain_ATCC_VR-759_g_1 | 49008 |
| 1792_Human_coronavirus_OC43_strain_ATCC_VR-759_g_2 | 49009 |
| 1792_Human_coronavirus_OC43_strain_ATCC_VR-759_g_3 | 49010 |
| 1792_Human_coronavirus_OC43_strain_ATCC_VR-759_g_4 | 49011 |
| 1792_Human_coronavirus_OC43_strain_ATCC_VR-759_g_5 | 49012 |
| 1793_Human_coronavirus_OC43_strain_ATCC_VR-759_g_1 | 49013 |
| 1793_Human_coronavirus_OC43_strain_ATCC_VR-759_g_2 | 49014 |
| 1793_Human_coronavirus_OC43_strain_ATCC_VR-759_g_3 | 49015 |
| 1793_Human_coronavirus_OC43_strain_ATCC_VR-759_g_4 | 49016 |
| 1793_Human_coronavirus_OC43_strain_ATCC_VR-759_g_5 | 49017 |
| 1794_Human_coronavirus_OC43_strain_ATCC_VR-759_g_1 | 49018 |
| 1794_Human_coronavirus_OC43_strain_ATCC_VR-759_g_2 | 49019 |
| 1794_Human_coronavirus_OC43_strain_ATCC_VR-759_g_3 | 49020 |
| 1794_Human_coronavirus_OC43_strain_ATCC_VR-759_g_4 | 49021 |
| 1794_Human_coronavirus_OC43_strain_ATCC_VR-759_g_5 | 49022 |
| 1795_Human_coronavirus_OC43_strain_ATCC_VR-759_g_1 | 49023 |
| 1795_Human_coronavirus_OC43_strain_ATCC_VR-759_g_2 | 49024 |
| 1795_Human_coronavirus_OC43_strain_ATCC_VR-759_g_3 | 49025 |
| 1795_Human_coronavirus_OC43_strain_ATCC_VR-759_g_4 | 49026 |
| 1795_Human_coronavirus_OC43_strain_ATCC_VR-759_g_5 | 49027 |
| 1796_Human_coronavirus_OC43_strain_ATCC_VR-759_g_1 | 49028 |
| 1796_Human_coronavirus_OC43_strain_ATCC_VR-759_g_2 | 49029 |
| 1796_Human_coronavirus_OC43_strain_ATCC_VR-759_g_3 | 49030 |
| 1796_Human_coronavirus_OC43_strain_ATCC_VR-759_g_4 | 49031 |
| 1796_Human_coronavirus_OC43_strain_ATCC_VR-759_g_5 | 49032 |
| 1797_Human_coronavirus_OC43_strain_ATCC_VR-759_g_1 | 49033 |
| 1797_Human_coronavirus_OC43_strain_ATCC_VR-759_g_2 | 49034 |
| 1797_Human_coronavirus_OC43_strain_ATCC_VR-759_g_3 | 49035 |
| 1797_Human_coronavirus_OC43_strain_ATCC_VR-759_g_4 | 49036 |
| 1797_Human_coronavirus_OC43_strain_ATCC_VR-759_g_5 | 49037 |
| 1798_Human_coronavirus_OC43_strain_ATCC_VR-759_g_1 | 49038 |
| 1798_Human_coronavirus_OC43_strain_ATCC_VR-759_g_2 | 49039 |
| 1798_Human_coronavirus_OC43_strain_ATCC_VR-759_g_3 | 49040 |
| 1798_Human_coronavirus_OC43_strain_ATCC_VR-759_g_4 | 49041 |
| 1798_Human_coronavirus_OC43_strain_ATCC_VR-759_g_5 | 49042 |
| 1799_Human_coronavirus_OC43_strain_ATCC_VR-759_g_1 | 49043 |
| 1799_Human_coronavirus_OC43_strain_ATCC_VR-759_g_2 | 49044 |
| 1799_Human_coronavirus_OC43_strain_ATCC_VR-759_g_3 | 49045 |
| 1799_Human_coronavirus_OC43_strain_ATCC_VR-759_g_4 | 49046 |
| 1799_Human_coronavirus_OC43_strain_ATCC_VR-759_g_5 | 49047 |
| 1800_Human_coronavirus_OC43_strain_ATCC_VR-759_g_1 | 49048 |
| 1800_Human_coronavirus_OC43_strain_ATCC_VR-759_g_2 | 49049 |
| 1800_Human_coronavirus_OC43_strain_ATCC_VR-759_g_3 | 49050 |
| 1800_Human_coronavirus_OC43_strain_ATCC_VR-759_g_4 | 49051 |
| 1800_Human_coronavirus_OC43_strain_ATCC_VR-759_g_5 | 49052 |
| 1801_Human_coronavirus_OC43_strain_ATCC_VR-759_g_1 | 49053 |
| 1801_Human_coronavirus_OC43_strain_ATCC_VR-759_g_2 | 49054 |
| 1801_Human_coronavirus_OC43_strain_ATCC_VR-759_g_3 | 49055 |
| 1801_Human_coronavirus_OC43_strain_ATCC_VR-759_g_4 | 49056 |
| 1801_Human_coronavirus_OC43_strain_ATCC_VR-759_g_5 | 49057 |
| 1802_Human_coronavirus_OC43_strain_ATCC_VR-759_g_1 | 49058 |
| 1802_Human_coronavirus_OC43_strain_ATCC_VR-759_g_2 | 49059 |
| 1802_Human_coronavirus_OC43_strain_ATCC_VR-759_g_3 | 49060 |
| 1802_Human_coronavirus_OC43_strain_ATCC_VR-759_g_4 | 49061 |
| 1802_Human_coronavirus_OC43_strain_ATCC_VR-759_g_5 | 49062 |
| 1803_Human_coronavirus_OC43_strain_ATCC_VR-759_g_1 | 49063 |
| 1803_Human_coronavirus_OC43_strain_ATCC_VR-759_g_2 | 49064 |
| 1803_Human_coronavirus_OC43_strain_ATCC_VR-759_g_3 | 49065 |
| 1803_Human_coronavirus_OC43_strain_ATCC_VR-759_g_4 | 49066 |
| 1803_Human_coronavirus_OC43_strain_ATCC_VR-759_g_5 | 49067 |
| 1804_Human_coronavirus_OC43_strain_ATCC_VR-759_g_1 | 49068 |
| 1804_Human_coronavirus_OC43_strain_ATCC_VR-759_g_2 | 49069 |
| 1804_Human_coronavirus_OC43_strain_ATCC_VR-759_g_3 | 49070 |
| 1804_Human_coronavirus_OC43_strain_ATCC_VR-759_g_4 | 49071 |
| 1804_Human_coronavirus_OC43_strain_ATCC_VR-759_g_5 | 49072 |
| 1805_Human_coronavirus_OC43_strain_ATCC_VR-759_g_1 | 49073 |
| 1805_Human_coronavirus_OC43_strain_ATCC_VR-759_g_2 | 49074 |
| 1805_Human_coronavirus_OC43_strain_ATCC_VR-759_g_3 | 49075 |
| 1805_Human_coronavirus_OC43_strain_ATCC_VR-759_g_4 | 49076 |
| 1805_Human_coronavirus_OC43_strain_ATCC_VR-759_g_5 | 49077 |
| 1806_Human_coronavirus_OC43_strain_ATCC_VR-759_g_1 | 49078 |
| 1806_Human_coronavirus_OC43_strain_ATCC_VR-759_g_2 | 49079 |
| 1806_Human_coronavirus_OC43_strain_ATCC_VR-759_g_3 | 49080 |
| 1806_Human_coronavirus_OC43_strain_ATCC_VR-759_g_4 | 49081 |
| 1806_Human_coronavirus_OC43_strain_ATCC_VR-759_g_5 | 49082 |
| 1807_Human_coronavirus_OC43_strain_ATCC_VR-759_g_1 | 49083 |
| 1807_Human_coronavirus_OC43_strain_ATCC_VR-759_g_2 | 49084 |
| 1807_Human_coronavirus_OC43_strain_ATCC_VR-759_g_3 | 49085 |
| 1807_Human_coronavirus_OC43_strain_ATCC_VR-759_g_4 | 49086 |
| 1807_Human_coronavirus_OC43_strain_ATCC_VR-759_g_5 | 49087 |
| 1808_Human_coronavirus_OC43_strain_ATCC_VR-759_g_1 | 49088 |
| 1808_Human_coronavirus_OC43_strain_ATCC_VR-759_g_2 | 49089 |
| 1808_Human_coronavirus_OC43_strain_ATCC_VR-759_g_3 | 49090 |
| 1808_Human_coronavirus_OC43_strain_ATCC_VR-759_g_4 | 49091 |
| 1808_Human_coronavirus_OC43_strain_ATCC_VR-759_g_5 | 49092 |
| 1809_Human_coronavirus_OC43_strain_ATCC_VR-759_g_1 | 49093 |
| 1809_Human_coronavirus_OC43_strain_ATCC_VR-759_g_2 | 49094 |
| 1809_Human_coronavirus_OC43_strain_ATCC_VR-759_g_3 | 49095 |
| 1809_Human_coronavirus_OC43_strain_ATCC_VR-759_g_4 | 49096 |
| 1809_Human_coronavirus_OC43_strain_ATCC_VR-759_g_5 | 49097 |
| 1810_Human_coronavirus_OC43_strain_ATCC_VR-759_g_1 | 49098 |
| 1810_Human_coronavirus_OC43_strain_ATCC_VR-759_g_2 | 49099 |
| 1810_Human_coronavirus_OC43_strain_ATCC_VR-759_g_3 | 49100 |
| 1810_Human_coronavirus_OC43_strain_ATCC_VR-759_g_4 | 49101 |
| 1810_Human_coronavirus_OC43_strain_ATCC_VR-759_g_5 | 49102 |
| 1811_Human_coronavirus_OC43_strain_ATCC_VR-759_g_1 | 49103 |
| 1811_Human_coronavirus_OC43_strain_ATCC_VR-759_g_2 | 49104 |
| 1811_Human_coronavirus_OC43_strain_ATCC_VR-759_g_3 | 49105 |
| 1811_Human_coronavirus_OC43_strain_ATCC_VR-759_g_4 | 49106 |
| 1811_Human_coronavirus_OC43_strain_ATCC_VR-759_g_5 | 49107 |
| 1812_Human_coronavirus_OC43_strain_ATCC_VR-759_g_1 | 49108 |
| 1812_Human_coronavirus_OC43_strain_ATCC_VR-759_g_2 | 49109 |
| 1812_Human_coronavirus_OC43_strain_ATCC_VR-759_g_3 | 49110 |
| 1812_Human_coronavirus_OC43_strain_ATCC_VR-759_g_4 | 49111 |
| 1812_Human_coronavirus_OC43_strain_ATCC_VR-759_g_5 | 49112 |
| 1813_Human_coronavirus_OC43_strain_ATCC_VR-759_g_1 | 49113 |
| 1813_Human_coronavirus_OC43_strain_ATCC_VR-759_g_2 | 49114 |
| 1813_Human_coronavirus_OC43_strain_ATCC_VR-759_g_3 | 49115 |
| 1813_Human_coronavirus_OC43_strain_ATCC_VR-759_g_4 | 49116 |
| 1813_Human_coronavirus_OC43_strain_ATCC_VR-759_g_5 | 49117 |
| 1814_Human_coronavirus_OC43_strain_ATCC_VR-759_g_1 | 49118 |
| 1814_Human_coronavirus_OC43_strain_ATCC_VR-759_g_2 | 49119 |
| 1814_Human_coronavirus_OC43_strain_ATCC_VR-759_g_3 | 49120 |
| 1814_Human_coronavirus_OC43_strain_ATCC_VR-759_g_4 | 49121 |
| 1814_Human_coronavirus_OC43_strain_ATCC_VR-759_g_5 | 49122 |
| 1815_Human_coronavirus_OC43_strain_ATCC_VR-759_g_1 | 49123 |
| 1815_Human_coronavirus_OC43_strain_ATCC_VR-759_g_2 | 49124 |
| 1815_Human_coronavirus_OC43_strain_ATCC_VR-759_g_3 | 49125 |
| 1815_Human_coronavirus_OC43_strain_ATCC_VR-759_g_4 | 49126 |
| 1815_Human_coronavirus_OC43_strain_ATCC_VR-759_g_5 | 49127 |
| 1816_Human_coronavirus_OC43_strain_ATCC_VR-759_g_1 | 49128 |
| 1816_Human_coronavirus_OC43_strain_ATCC_VR-759_g_2 | 49129 |
| 1816_Human_coronavirus_OC43_strain_ATCC_VR-759_g_3 | 49130 |
| 1816_Human_coronavirus_OC43_strain_ATCC_VR-759_g_4 | 49131 |
| 1816_Human_coronavirus_OC43_strain_ATCC_VR-759_g_5 | 49132 |
| 1817_Human_coronavirus_OC43_strain_ATCC_VR-759_g_1 | 49133 |
| 1817_Human_coronavirus_OC43_strain_ATCC_VR-759_g_2 | 49134 |
| 1817_Human_coronavirus_OC43_strain_ATCC_VR-759_g_3 | 49135 |
| 1817_Human_coronavirus_OC43_strain_ATCC_VR-759_g_4 | 49136 |
| 1817_Human_coronavirus_OC43_strain_ATCC_VR-759_g_5 | 49137 |
| 1818_Human_coronavirus_OC43_strain_ATCC_VR-759_g_1 | 49138 |
| 1818_Human_coronavirus_OC43_strain_ATCC_VR-759_g_2 | 49139 |
| 1818_Human_coronavirus_OC43_strain_ATCC_VR-759_g_3 | 49140 |
| 1818_Human_coronavirus_OC43_strain_ATCC_VR-759_g_4 | 49141 |
| 1818_Human_coronavirus_OC43_strain_ATCC_VR-759_g_5 | 49142 |
| 1819_Human_coronavirus_OC43_strain_ATCC_VR-759_g_1 | 49143 |
| 1819_Human_coronavirus_OC43_strain_ATCC_VR-759_g_2 | 49144 |
| 1819_Human_coronavirus_OC43_strain_ATCC_VR-759_g_3 | 49145 |
| 1819_Human_coronavirus_OC43_strain_ATCC_VR-759_g_4 | 49146 |
| 1819_Human_coronavirus_OC43_strain_ATCC_VR-759_g_5 | 49147 |
| 1820_Human_coronavirus_OC43_strain_ATCC_VR-759_g_1 | 49148 |
| 1820_Human_coronavirus_OC43_strain_ATCC_VR-759_g_2 | 49149 |
| 1820_Human_coronavirus_OC43_strain_ATCC_VR-759_g_3 | 49150 |
| 1820_Human_coronavirus_OC43_strain_ATCC_VR-759_g_4 | 49151 |
| 1820_Human_coronavirus_OC43_strain_ATCC_VR-759_g_5 | 49152 |
| 1821_Human_coronavirus_OC43_strain_ATCC_VR-759_g_1 | 49153 |
| 1821_Human_coronavirus_OC43_strain_ATCC_VR-759_g_2 | 49154 |
| 1821_Human_coronavirus_OC43_strain_ATCC_VR-759_g_3 | 49155 |
| 1821_Human_coronavirus_OC43_strain_ATCC_VR-759_g_4 | 49156 |
| 1821_Human_coronavirus_OC43_strain_ATCC_VR-759_g_5 | 49157 |
| 1822_Human_coronavirus_OC43_strain_ATCC_VR-759_g_1 | 49158 |
| 1822_Human_coronavirus_OC43_strain_ATCC_VR-759_g_2 | 49159 |
| 1822_Human_coronavirus_OC43_strain_ATCC_VR-759_g_3 | 49160 |
| 1822_Human_coronavirus_OC43_strain_ATCC_VR-759_g_4 | 49161 |
| 1822_Human_coronavirus_OC43_strain_ATCC_VR-759_g_5 | 49162 |
| 1823_Human_coronavirus_OC43_strain_ATCC_VR-759_g_1 | 49163 |
| 1823_Human_coronavirus_OC43_strain_ATCC_VR-759_g_2 | 49164 |
| 1823_Human_coronavirus_OC43_strain_ATCC_VR-759_g_3 | 49165 |
| 1823_Human_coronavirus_OC43_strain_ATCC_VR-759_g_4 | 49166 |
| 1823_Human_coronavirus_OC43_strain_ATCC_VR-759_g_5 | 49167 |
| 1824_Human_coronavirus_OC43_strain_ATCC_VR-759_g_1 | 49168 |
| 1824_Human_coronavirus_OC43_strain_ATCC_VR-759_g_2 | 49169 |
| 1824_Human_coronavirus_OC43_strain_ATCC_VR-759_g_3 | 49170 |
| 1824_Human_coronavirus_OC43_strain_ATCC_VR-759_g_4 | 49171 |
| 1824_Human_coronavirus_OC43_strain_ATCC_VR-759_g_5 | 49172 |
| 1825_Human_coronavirus_OC43_strain_ATCC_VR-759_g_1 | 49173 |
| 1825_Human_coronavirus_OC43_strain_ATCC_VR-759_g_2 | 49174 |
| 1825_Human_coronavirus_OC43_strain_ATCC_VR-759_g_3 | 49175 |
| 1825_Human_coronavirus_OC43_strain_ATCC_VR-759_g_4 | 49176 |
| 1825_Human_coronavirus_OC43_strain_ATCC_VR-759_g_5 | 49177 |
| 1826_Human_coronavirus_OC43_strain_ATCC_VR-759_g_1 | 49178 |
| 1826_Human_coronavirus_OC43_strain_ATCC_VR-759_g_2 | 49179 |
| 1826_Human_coronavirus_OC43_strain_ATCC_VR-759_g_3 | 49180 |
| 1826_Human_coronavirus_OC43_strain_ATCC_VR-759_g_4 | 49181 |
| 1826_Human_coronavirus_OC43_strain_ATCC_VR-759_g_5 | 49182 |
| 1827_Human_coronavirus_OC43_strain_ATCC_VR-759_g_1 | 49183 |
| 1827_Human_coronavirus_OC43_strain_ATCC_VR-759_g_2 | 49184 |
| 1827_Human_coronavirus_OC43_strain_ATCC_VR-759_g_3 | 49185 |
| 1827_Human_coronavirus_OC43_strain_ATCC_VR-759_g_4 | 49186 |
| 1827_Human_coronavirus_OC43_strain_ATCC_VR-759_g_5 | 49187 |
| 1828_Human_coronavirus_OC43_strain_ATCC_VR-759_g_1 | 49188 |
| 1828_Human_coronavirus_OC43_strain_ATCC_VR-759_g_2 | 49189 |
| 1828_Human_coronavirus_OC43_strain_ATCC_VR-759_g_3 | 49190 |
| 1828_Human_coronavirus_OC43_strain_ATCC_VR-759_g_4 | 49191 |
| 1828_Human_coronavirus_OC43_strain_ATCC_VR-759_g_5 | 49192 |
| 1829_Human_coronavirus_OC43_strain_ATCC_VR-759_g_1 | 49193 |
| 1829_Human_coronavirus_OC43_strain_ATCC_VR-759_g_2 | 49194 |
| 1829_Human_coronavirus_OC43_strain_ATCC_VR-759_g_3 | 49195 |
| 1829_Human_coronavirus_OC43_strain_ATCC_VR-759_g_4 | 49196 |
| 1829_Human_coronavirus_OC43_strain_ATCC_VR-759_g_5 | 49197 |
| 1830_Human_coronavirus_OC43_strain_ATCC_VR-759_g_1 | 49198 |
| 1830_Human_coronavirus_OC43_strain_ATCC_VR-759_g_2 | 49199 |
| 1830_Human_coronavirus_OC43_strain_ATCC_VR-759_g_3 | 49200 |
| 1830_Human_coronavirus_OC43_strain_ATCC_VR-759_g_4 | 49201 |
| 1830_Human_coronavirus_OC43_strain_ATCC_VR-759_g_5 | 49202 |
| 1831_Human_coronavirus_OC43_strain_ATCC_VR-759_g_1 | 49203 |
| 1831_Human_coronavirus_OC43_strain_ATCC_VR-759_g_2 | 49204 |
| 1831_Human_coronavirus_OC43_strain_ATCC_VR-759_g_3 | 49205 |
| 1831_Human_coronavirus_OC43_strain_ATCC_VR-759_g_4 | 49206 |
| 1831_Human_coronavirus_OC43_strain_ATCC_VR-759_g_5 | 49207 |
| 1832_Human_coronavirus_OC43_strain_ATCC_VR-759_g_1 | 49208 |
| 1832_Human_coronavirus_OC43_strain_ATCC_VR-759_g_2 | 49209 |
| 1832_Human_coronavirus_OC43_strain_ATCC_VR-759_g_3 | 49210 |
| 1832_Human_coronavirus_OC43_strain_ATCC_VR-759_g_4 | 49211 |
| 1832_Human_coronavirus_OC43_strain_ATCC_VR-759_g_5 | 49212 |
| 1833_Human_coronavirus_OC43_strain_ATCC_VR-759_g_1 | 49213 |
| 1833_Human_coronavirus_OC43_strain_ATCC_VR-759_g_2 | 49214 |
| 1833_Human_coronavirus_OC43_strain_ATCC_VR-759_g_3 | 49215 |
| 1833_Human_coronavirus_OC43_strain_ATCC_VR-759_g_4 | 49216 |
| 1833_Human_coronavirus_OC43_strain_ATCC_VR-759_g_5 | 49217 |
| 1834_Human_coronavirus_OC43_strain_ATCC_VR-759_g_1 | 49218 |
| 1834_Human_coronavirus_OC43_strain_ATCC_VR-759_g_2 | 49219 |
| 1834_Human_coronavirus_OC43_strain_ATCC_VR-759_g_3 | 49220 |
| 1834_Human_coronavirus_OC43_strain_ATCC_VR-759_g_4 | 49221 |
| 1834_Human_coronavirus_OC43_strain_ATCC_VR-759_g_5 | 49222 |
| 1835_Human_coronavirus_OC43_strain_ATCC_VR-759_g_1 | 49223 |
| 1835_Human_coronavirus_OC43_strain_ATCC_VR-759_g_2 | 49224 |
| 1835_Human_coronavirus_OC43_strain_ATCC_VR-759_g_3 | 49225 |
| 1835_Human_coronavirus_OC43_strain_ATCC_VR-759_g_4 | 49226 |
| 1835_Human_coronavirus_OC43_strain_ATCC_VR-759_g_5 | 49227 |
| 1836_Human_coronavirus_OC43_strain_ATCC_VR-759_g_1 | 49228 |
| 1836_Human_coronavirus_OC43_strain_ATCC_VR-759_g_2 | 49229 |
| 1836_Human_coronavirus_OC43_strain_ATCC_VR-759_g_3 | 49230 |
| 1836_Human_coronavirus_OC43_strain_ATCC_VR-759_g_4 | 49231 |
| 1836_Human_coronavirus_OC43_strain_ATCC_VR-759_g_5 | 49232 |
| 1837_Human_coronavirus_OC43_strain_ATCC_VR-759_g_1 | 49233 |
| 1837_Human_coronavirus_OC43_strain_ATCC_VR-759_g_2 | 49234 |
| 1837_Human_coronavirus_OC43_strain_ATCC_VR-759_g_3 | 49235 |
| 1837_Human_coronavirus_OC43_strain_ATCC_VR-759_g_4 | 49236 |
| 1837_Human_coronavirus_OC43_strain_ATCC_VR-759_g_5 | 49237 |
| 1838_Human_coronavirus_OC43_strain_ATCC_VR-759_g_1 | 49238 |
| 1838_Human_coronavirus_OC43_strain_ATCC_VR-759_g_2 | 49239 |
| 1838_Human_coronavirus_OC43_strain_ATCC_VR-759_g_3 | 49240 |
| 1838_Human_coronavirus_OC43_strain_ATCC_VR-759_g_4 | 49241 |
| 1838_Human_coronavirus_OC43_strain_ATCC_VR-759_g_5 | 49242 |
| 1839_Human_coronavirus_OC43_strain_ATCC_VR-759_g_1 | 49243 |
| 1839_Human_coronavirus_OC43_strain_ATCC_VR-759_g_2 | 49244 |
| 1839_Human_coronavirus_OC43_strain_ATCC_VR-759_g_3 | 49245 |
| 1839_Human_coronavirus_OC43_strain_ATCC_VR-759_g_4 | 49246 |
| 1839_Human_coronavirus_OC43_strain_ATCC_VR-759_g_5 | 49247 |
| 1840_Human_coronavirus_OC43_strain_ATCC_VR-759_g_1 | 49248 |
| 1840_Human_coronavirus_OC43_strain_ATCC_VR-759_g_2 | 49249 |
| 1840_Human_coronavirus_OC43_strain_ATCC_VR-759_g_3 | 49250 |
| 1840_Human_coronavirus_OC43_strain_ATCC_VR-759_g_4 | 49251 |
| 1840_Human_coronavirus_OC43_strain_ATCC_VR-759_g_5 | 49252 |
| 1841_Human_coronavirus_OC43_strain_ATCC_VR-759_g_1 | 49253 |
| 1841_Human_coronavirus_OC43_strain_ATCC_VR-759_g_2 | 49254 |
| 1841_Human_coronavirus_OC43_strain_ATCC_VR-759_g_3 | 49255 |
| 1841_Human_coronavirus_OC43_strain_ATCC_VR-759_g_4 | 49256 |
| 1841_Human_coronavirus_OC43_strain_ATCC_VR-759_g_5 | 49257 |
| 1842_Human_coronavirus_OC43_strain_ATCC_VR-759_g_1 | 49258 |
| 1842_Human_coronavirus_OC43_strain_ATCC_VR-759_g_2 | 49259 |
| 1842_Human_coronavirus_OC43_strain_ATCC_VR-759_g_3 | 49260 |
| 1842_Human_coronavirus_OC43_strain_ATCC_VR-759_g_4 | 49261 |
| 1842_Human_coronavirus_OC43_strain_ATCC_VR-759_g_5 | 49262 |
| 1843_Human_coronavirus_OC43_strain_ATCC_VR-759_g_1 | 49263 |
| 1843_Human_coronavirus_OC43_strain_ATCC_VR-759_g_2 | 49264 |
| 1843_Human_coronavirus_OC43_strain_ATCC_VR-759_g_3 | 49265 |
| 1843_Human_coronavirus_OC43_strain_ATCC_VR-759_g_4 | 49266 |
| 1843_Human_coronavirus_OC43_strain_ATCC_VR-759_g_5 | 49267 |
| 1844_Human_coronavirus_OC43_strain_ATCC_VR-759_g_1 | 49268 |
| 1844_Human_coronavirus_OC43_strain_ATCC_VR-759_g_2 | 49269 |
| 1844_Human_coronavirus_OC43_strain_ATCC_VR-759_g_3 | 49270 |
| 1844_Human_coronavirus_OC43_strain_ATCC_VR-759_g_4 | 49271 |
| 1844_Human_coronavirus_OC43_strain_ATCC_VR-759_g_5 | 49272 |
| 1845_Human_coronavirus_OC43_strain_ATCC_VR-759_g_1 | 49273 |
| 1845_Human_coronavirus_OC43_strain_ATCC_VR-759_g_2 | 49274 |
| 1845_Human_coronavirus_OC43_strain_ATCC_VR-759_g_3 | 49275 |
| 1845_Human_coronavirus_OC43_strain_ATCC_VR-759_g_4 | 49276 |
| 1845_Human_coronavirus_OC43_strain_ATCC_VR-759_g_5 | 49277 |
| 1846_Human_coronavirus_OC43_strain_ATCC_VR-759_g_1 | 49278 |
| 1846_Human_coronavirus_OC43_strain_ATCC_VR-759_g_2 | 49279 |
| 1846_Human_coronavirus_OC43_strain_ATCC_VR-759_g_3 | 49280 |
| 1846_Human_coronavirus_OC43_strain_ATCC_VR-759_g_4 | 49281 |
| 1846_Human_coronavirus_OC43_strain_ATCC_VR-759_g_5 | 49282 |
| 1847_Human_coronavirus_OC43_strain_ATCC_VR-759_g_1 | 49283 |
| 1847_Human_coronavirus_OC43_strain_ATCC_VR-759_g_2 | 49284 |
| 1847_Human_coronavirus_OC43_strain_ATCC_VR-759_g_3 | 49285 |
| 1847_Human_coronavirus_OC43_strain_ATCC_VR-759_g_4 | 49286 |
| 1847_Human_coronavirus_OC43_strain_ATCC_VR-759_g_5 | 49287 |
| 1848_Human_coronavirus_OC43_strain_ATCC_VR-759_g_1 | 49288 |
| 1848_Human_coronavirus_OC43_strain_ATCC_VR-759_g_2 | 49289 |
| 1848_Human_coronavirus_OC43_strain_ATCC_VR-759_g_3 | 49290 |
| 1848_Human_coronavirus_OC43_strain_ATCC_VR-759_g_4 | 49291 |
| 1848_Human_coronavirus_OC43_strain_ATCC_VR-759_g_5 | 49292 |
| 1849_Human_coronavirus_OC43_strain_ATCC_VR-759_g_1 | 49293 |
| 1849_Human_coronavirus_OC43_strain_ATCC_VR-759_g_2 | 49294 |
| 1849_Human_coronavirus_OC43_strain_ATCC_VR-759_g_3 | 49295 |
| 1849_Human_coronavirus_OC43_strain_ATCC_VR-759_g_4 | 49296 |
| 1849_Human_coronavirus_OC43_strain_ATCC_VR-759_g_5 | 49297 |
| 1850_Human_coronavirus_OC43_strain_ATCC_VR-759_g_1 | 49298 |
| 1850_Human_coronavirus_OC43_strain_ATCC_VR-759_g_2 | 49299 |
| 1850_Human_coronavirus_OC43_strain_ATCC_VR-759_g_3 | 49300 |
| 1850_Human_coronavirus_OC43_strain_ATCC_VR-759_g_4 | 49301 |
| 1850_Human_coronavirus_OC43_strain_ATCC_VR-759_g_5 | 49302 |
| 1851_Human_coronavirus_OC43_strain_ATCC_VR-759_g_1 | 49303 |
| 1851_Human_coronavirus_OC43_strain_ATCC_VR-759_g_2 | 49304 |
| 1851_Human_coronavirus_OC43_strain_ATCC_VR-759_g_3 | 49305 |
| 1851_Human_coronavirus_OC43_strain_ATCC_VR-759_g_4 | 49306 |
| 1851_Human_coronavirus_OC43_strain_ATCC_VR-759_g_5 | 49307 |
| 1852_Human_coronavirus_OC43_strain_ATCC_VR-759_g_1 | 49308 |
| 1852_Human_coronavirus_OC43_strain_ATCC_VR-759_g_2 | 49309 |
| 1852_Human_coronavirus_OC43_strain_ATCC_VR-759_g_3 | 49310 |
| 1852_Human_coronavirus_OC43_strain_ATCC_VR-759_g_4 | 49311 |
| 1852_Human_coronavirus_OC43_strain_ATCC_VR-759_g_5 | 49312 |
| 1853_Human_coronavirus_OC43_strain_ATCC_VR-759_g_1 | 49313 |
| 1853_Human_coronavirus_OC43_strain_ATCC_VR-759_g_2 | 49314 |
| 1853_Human_coronavirus_OC43_strain_ATCC_VR-759_g_3 | 49315 |
| 1853_Human_coronavirus_OC43_strain_ATCC_VR-759_g_4 | 49316 |
| 1853_Human_coronavirus_OC43_strain_ATCC_VR-759_g_5 | 49317 |
| 1854_Human_coronavirus_OC43_strain_ATCC_VR-759_g_1 | 49318 |
| 1854_Human_coronavirus_OC43_strain_ATCC_VR-759_g_2 | 49319 |
| 1854_Human_coronavirus_OC43_strain_ATCC_VR-759_g_3 | 49320 |
| 1854_Human_coronavirus_OC43_strain_ATCC_VR-759_g_4 | 49321 |
| 1854_Human_coronavirus_OC43_strain_ATCC_VR-759_g_5 | 49322 |
| 1855_Human_coronavirus_OC43_strain_ATCC_VR-759_g_1 | 49323 |
| 1855_Human_coronavirus_OC43_strain_ATCC_VR-759_g_2 | 49324 |
| 1855_Human_coronavirus_OC43_strain_ATCC_VR-759_g_3 | 49325 |
| 1855_Human_coronavirus_OC43_strain_ATCC_VR-759_g_4 | 49326 |
| 1855_Human_coronavirus_OC43_strain_ATCC_VR-759_g_5 | 49327 |
| 1856_Human_coronavirus_OC43_strain_ATCC_VR-759_g_1 | 49328 |
| 1856_Human_coronavirus_OC43_strain_ATCC_VR-759_g_2 | 49329 |
| 1856_Human_coronavirus_OC43_strain_ATCC_VR-759_g_3 | 49330 |
| 1856_Human_coronavirus_OC43_strain_ATCC_VR-759_g_4 | 49331 |
| 1856_Human_coronavirus_OC43_strain_ATCC_VR-759_g_5 | 49332 |
| 1857_Human_coronavirus_OC43_strain_ATCC_VR-759_g_1 | 49333 |
| 1857_Human_coronavirus_OC43_strain_ATCC_VR-759_g_2 | 49334 |
| 1857_Human_coronavirus_OC43_strain_ATCC_VR-759_g_3 | 49335 |
| 1857_Human_coronavirus_OC43_strain_ATCC_VR-759_g_4 | 49336 |
| 1857_Human_coronavirus_OC43_strain_ATCC_VR-759_g_5 | 49337 |
| 1858_Human_coronavirus_OC43_strain_ATCC_VR-759_g_1 | 49338 |
| 1858_Human_coronavirus_OC43_strain_ATCC_VR-759_g_2 | 49339 |
| 1858_Human_coronavirus_OC43_strain_ATCC_VR-759_g_3 | 49340 |
| 1858_Human_coronavirus_OC43_strain_ATCC_VR-759_g_4 | 49341 |
| 1858_Human_coronavirus_OC43_strain_ATCC_VR-759_g_5 | 49342 |
| 1859_Human_coronavirus_OC43_strain_ATCC_VR-759_g_1 | 49343 |
| 1859_Human_coronavirus_OC43_strain_ATCC_VR-759_g_2 | 49344 |
| 1859_Human_coronavirus_OC43_strain_ATCC_VR-759_g_3 | 49345 |
| 1859_Human_coronavirus_OC43_strain_ATCC_VR-759_g_4 | 49346 |
| 1859_Human_coronavirus_OC43_strain_ATCC_VR-759_g_5 | 49347 |
| 1860_Human_coronavirus_OC43_strain_ATCC_VR-759_g_1 | 49348 |
| 1860_Human_coronavirus_OC43_strain_ATCC_VR-759_g_2 | 49349 |
| 1860_Human_coronavirus_OC43_strain_ATCC_VR-759_g_3 | 49350 |
| 1860_Human_coronavirus_OC43_strain_ATCC_VR-759_g_4 | 49351 |
| 1860_Human_coronavirus_OC43_strain_ATCC_VR-759_g_5 | 49352 |
| 1861_Human_coronavirus_OC43_strain_ATCC_VR-759_g_1 | 49353 |
| 1861_Human_coronavirus_OC43_strain_ATCC_VR-759_g_2 | 49354 |
| 1861_Human_coronavirus_OC43_strain_ATCC_VR-759_g_3 | 49355 |
| 1861_Human_coronavirus_OC43_strain_ATCC_VR-759_g_4 | 49356 |
| 1861_Human_coronavirus_OC43_strain_ATCC_VR-759_g_5 | 49357 |
| 1862_Human_coronavirus_OC43_strain_ATCC_VR-759_g_1 | 49358 |
| 1862_Human_coronavirus_OC43_strain_ATCC_VR-759_g_2 | 49359 |
| 1862_Human_coronavirus_OC43_strain_ATCC_VR-759_g_3 | 49360 |
| 1862_Human_coronavirus_OC43_strain_ATCC_VR-759_g_4 | 49361 |
| 1862_Human_coronavirus_OC43_strain_ATCC_VR-759_g_5 | 49362 |
| 1863_Human_coronavirus_OC43_strain_ATCC_VR-759_g_1 | 49363 |
| 1863_Human_coronavirus_OC43_strain_ATCC_VR-759_g_2 | 49364 |
| 1863_Human_coronavirus_OC43_strain_ATCC_VR-759_g_3 | 49365 |
| 1863_Human_coronavirus_OC43_strain_ATCC_VR-759_g_4 | 49366 |
| 1864_Human_coronavirus_OC43_strain_ATCC_VR-759_g_1 | 49367 |
| 1864_Human_coronavirus_OC43_strain_ATCC_VR-759_g_2 | 49368 |
| 1864_Human_coronavirus_OC43_strain_ATCC_VR-759_g_3 | 49369 |
| 1864_Human_coronavirus_OC43_strain_ATCC_VR-759_g_4 | 49370 |
| 1864_Human_coronavirus_OC43_strain_ATCC_VR-759_g_5 | 49371 |
| 1865_Human_coronavirus_OC43_strain_ATCC_VR-759_g_1 | 49372 |
| 1865_Human_coronavirus_OC43_strain_ATCC_VR-759_g_2 | 49373 |
| 1865_Human_coronavirus_OC43_strain_ATCC_VR-759_g_3 | 49374 |
| 1865_Human_coronavirus_OC43_strain_ATCC_VR-759_g_4 | 49375 |
| 1865_Human_coronavirus_OC43_strain_ATCC_VR-759_g_5 | 49376 |
| 1866_Human_coronavirus_OC43_strain_ATCC_VR-759_g_1 | 49377 |
| 1866_Human_coronavirus_OC43_strain_ATCC_VR-759_g_2 | 49378 |
| 1866_Human_coronavirus_OC43_strain_ATCC_VR-759_g_3 | 49379 |
| 1866_Human_coronavirus_OC43_strain_ATCC_VR-759_g_4 | 49380 |
| 1866_Human_coronavirus_OC43_strain_ATCC_VR-759_g_5 | 49381 |
| 1867_Influenza_A_virus_(A/New_York/392/2004(H3N2))_{—} | 49382 |
| segment_8_g_1 | |
| 1867_Influenza_A_virus_(A/New_York/392/2004(H3N2))_{—} | 49383 |
| segment_8_g_2 | |
| 1867_Influenza_A_virus_(A/New_York/392/2004(H3N2))_{—} | 49384 |
| segment_8_g_3 | |
| 1867_Influenza_A_virus_(A/New_York/392/2004(H3N2))_{—} | 49385 |
| segment_8_g_4 | |
| 1867_Influenza_A_virus_(A/New_York/392/2004(H3N2))_{—} | 49386 |
| segment_8_g_5 | |
| 1868_Influenza_A_virus_(A/New_York/392/2004(H3N2))_{—} | 49387 |
| segment_8_g_1 | |
| 1868_Influenza_A_virus_(A/New_York/392/2004(H3N2))_{—} | 49388 |
| segment_8_g_2 | |
| 1868_Influenza_A_virus_(A/New_York/392/2004(H3N2))_{—} | 49389 |
| segment_8_g_3 | |
| 1868_Influenza_A_virus_(A/New_York/392/2004(H3N2))_{—} | 49390 |
| segment_8_g_4 | |
| 1868_Influenza_A_virus_(A/New_York/392/2004(H3N2))_{—} | 49391 |
| segment_8_g_5 | |
| 1869_Influenza_A_virus_(A/Hong_Kong/1073/99(H9N2))_{—} | 49392 |
| segment_8_g_1 | |
| 1869_Influenza_A_virus_(A/Hong_Kong/1073/99(H9N2))_{—} | 49393 |
| segment_8_g_2 | |
| 1869_Influenza_A_virus_(A/Hong_Kong/1073/99(H9N2))_{—} | 49394 |
| segment_8_g_3 | |
| 1869_Influenza_A_virus_(A/Hong_Kong/1073/99(H9N2))_{—} | 49395 |
| segment_8_g_4 | |
| 1869_Influenza_A_virus_(A/Hong_Kong/1073/99(H9N2))_{—} | 49396 |
| segment_8_g_5 | |
| 1870_Influenza_A_virus_(A/Hong_Kong/1073/99(H9N2))_{—} | 49397 |
| segment_8_g_1 | |
| 1870_Influenza_A_virus_(A/Hong_Kong/1073/99(H9N2))_{—} | 49398 |
| segment_8_g_2 | |
| 1870_Influenza_A_virus_(A/Hong_Kong/1073/99(H9N2))_{—} | 49399 |
| segment_8_g_3 | |
| 1870_Influenza_A_virus_(A/Hong_Kong/1073/99(H9N2))_{—} | 49400 |
| segment_8_g_4 | |
| 1870_Influenza_A_virus_(A/Hong_Kong/1073/99(H9N2))_{—} | 49401 |
| segment_8_g_5 | |
| 1871_Influenza_A_virus_(A/Hong_Kong/1073/99(H9N2))_{—} | 49402 |
| segment_8_g_1 | |
| 1871_Influenza_A_virus_(A/Hong_Kong/1073/99(H9N2))_{—} | 49403 |
| segment_8_g_2 | |
| 1871_Influenza_A_virus_(A/Hong_Kong/1073/99(H9N2))_{—} | 49404 |
| segment_8_g_3 | |
| 1871_Influenza_A_virus_(A/Hong_Kong/1073/99(H9N2))_{—} | 49405 |
| segment_8_g_4 | |
| 1871_Influenza_A_virus_(A/Hong_Kong/1073/99(H9N2))_{—} | 49406 |
| segment_8_g_5 | |
| 1872_Hepatitis_C_virus_genotype_3_g_1 | 49407 |
| 1872_Hepatitis_C_virus_genotype_3_g_2 | 49408 |
| 1872_Hepatitis_C_virus_genotype_3_g_3 | 49409 |
| 1872_Hepatitis_C_virus_genotype_3_g_4 | 49410 |
| 1872_Hepatitis_C_virus_genotype_3_g_5 | 49411 |
| 1873_Hepatitis_C_virus_genotype_3_g_1 | 49412 |
| 1873_Hepatitis_C_virus_genotype_3_g_2 | 49413 |
| 1873_Hepatitis_C_virus_genotype_3_g_3 | 49414 |
| 1874_Hepatitis_C_virus_genotype_3_g_1 | 49415 |
| 1874_Hepatitis_C_virus_genotype_3_g_2 | 49416 |
| 1874_Hepatitis_C_virus_genotype_3_g_3 | 49417 |
| 1874_Hepatitis_C_virus_genotype_3_g_4 | 49418 |
| 1875_Hepatitis_C_virus_genotype_3_g_1 | 49419 |
| 1875_Hepatitis_C_virus_genotype_3_g_2 | 49420 |
| 1875_Hepatitis_C_virus_genotype_3_g_3 | 49421 |
| 1876_Hepatitis_C_virus_genotype_3_g_1 | 49422 |
| 1876_Hepatitis_C_virus_genotype_3_g_2 | 49423 |
| 1876_Hepatitis_C_virus_genotype_3_g_3 | 49424 |
| 1876_Hepatitis_C_virus_genotype_3_g_4 | 49425 |
| 1876_Hepatitis_C_virus_genotype_3_g_5 | 49426 |
| 1877_Hepatitis_C_virus_genotype_3_g_1 | 49427 |
| 1877_Hepatitis_C_virus_genotype_3_g_2 | 49428 |
| 1877_Hepatitis_C_virus_genotype_3_g_3 | 49429 |
| 1877_Hepatitis_C_virus_genotype_3_g_4 | 49430 |
| 1877_Hepatitis_C_virus_genotype_3_g_5 | 49431 |
| 1878_Hepatitis_C_virus_genotype_3_g_1 | 49432 |
| 1878_Hepatitis_C_virus_genotype_3_g_2 | 49433 |
| 1878_Hepatitis_C_virus_genotype_3_g_3 | 49434 |
| 1878_Hepatitis_C_virus_genotype_3_g_4 | 49435 |
| 1878_Hepatitis_C_virus_genotype_3_g_5 | 49436 |
| 1879_Hepatitis_C_virus_genotype_3_g_1 | 49437 |
| 1879_Hepatitis_C_virus_genotype_3_g_2 | 49438 |
| 1879_Hepatitis_C_virus_genotype_3_g_3 | 49439 |
| 1879_Hepatitis_C_virus_genotype_3_g_4 | 49440 |
| 1880_Hepatitis_C_virus_genotype_3_g_1 | 49441 |
| 1880_Hepatitis_C_virus_genotype_3_g_2 | 49442 |
| 1880_Hepatitis_C_virus_genotype_3_g_3 | 49443 |
| 1881_Hepatitis_C_virus_genotype_3_g_1 | 49444 |
| 1881_Hepatitis_C_virus_genotype_3_g_2 | 49445 |
| 1881_Hepatitis_C_virus_genotype_3_g_3 | 49446 |
| 1881_Hepatitis_C_virus_genotype_3_g_4 | 49447 |
| 1881_Hepatitis_C_virus_genotype_3_g_5 | 49448 |
| 1882_Hepatitis_C_virus_genotype_3_g_1 | 49449 |
| 1882_Hepatitis_C_virus_genotype_3_g_2 | 49450 |
| 1882_Hepatitis_C_virus_genotype_3_g_3 | 49451 |
| 1882_Hepatitis_C_virus_genotype_3_g_4 | 49452 |
| 1882_Hepatitis_C_virus_genotype_3_g_5 | 49453 |
| 1883_Hepatitis_C_virus_genotype_3_g_1 | 49454 |
| 1883_Hepatitis_C_virus_genotype_3_g_2 | 49455 |
| 1883_Hepatitis_C_virus_genotype_3_g_3 | 49456 |
| 1883_Hepatitis_C_virus_genotype_3_g_4 | 49457 |
| 1883_Hepatitis_C_virus_genotype_3_g_5 | 49458 |
| 1884_Hepatitis_C_virus_genotype_3_g_1 | 49459 |
| 1884_Hepatitis_C_virus_genotype_3_g_2 | 49460 |
| 1884_Hepatitis_C_virus_genotype_3_g_3 | 49461 |
| 1884_Hepatitis_C_virus_genotype_3_g_4 | 49462 |
| 1884_Hepatitis_C_virus_genotype_3_g_5 | 49463 |
| 1885_Hepatitis_C_virus_genotype_3_g_1 | 49464 |
| 1885_Hepatitis_C_virus_genotype_3_g_2 | 49465 |
| 1885_Hepatitis_C_virus_genotype_3_g_3 | 49466 |
| 1885_Hepatitis_C_virus_genotype_3_g_4 | 49467 |
| 1885_Hepatitis_C_virus_genotype_3_g_5 | 49468 |
| 1886_Hepatitis_C_virus_genotype_3_g_1 | 49469 |
| 1886_Hepatitis_C_virus_genotype_3_g_2 | 49470 |
| 1886_Hepatitis_C_virus_genotype_3_g_3 | 49471 |
| 1886_Hepatitis_C_virus_genotype_3_g_4 | 49472 |
| 1886_Hepatitis_C_virus_genotype_3_g_5 | 49473 |
| 1887_Hepatitis_C_virus_genotype_3_g_1 | 49474 |
| 1887_Hepatitis_C_virus_genotype_3_g_2 | 49475 |
| 1887_Hepatitis_C_virus_genotype_3_g_3 | 49476 |
| 1887_Hepatitis_C_virus_genotype_3_g_4 | 49477 |
| 1887_Hepatitis_C_virus_genotype_3_g_5 | 49478 |
| 1888_Hepatitis_C_virus_genotype_3_g_1 | 49479 |
| 1888_Hepatitis_C_virus_genotype_3_g_2 | 49480 |
| 1888_Hepatitis_C_virus_genotype_3_g_3 | 49481 |
| 1888_Hepatitis_C_virus_genotype_3_g_4 | 49482 |
| 1888_Hepatitis_C_virus_genotype_3_g_5 | 49483 |
| 1889_Hepatitis_C_virus_genotype_3_g_1 | 49484 |
| 1890_Hepatitis_C_virus_genotype_3_g_1 | 49485 |
| 1890_Hepatitis_C_virus_genotype_3_g_2 | 49486 |
| 1890_Hepatitis_C_virus_genotype_3_g_3 | 49487 |
| 1890_Hepatitis_C_virus_genotype_3_g_4 | 49488 |
| 1890_Hepatitis_C_virus_genotype_3_g_5 | 49489 |
| 1891_Hepatitis_C_virus_genotype_3_g_1 | 49490 |
| 1891_Hepatitis_C_virus_genotype_3_g_2 | 49491 |
| 1891_Hepatitis_C_virus_genotype_3_g_3 | 49492 |
| 1891_Hepatitis_C_virus_genotype_3_g_4 | 49493 |
| 1891_Hepatitis_C_virus_genotype_3_g_5 | 49494 |
| 1892_Hepatitis_C_virus_genotype_3_g_1 | 49495 |
| 1892_Hepatitis_C_virus_genotype_3_g_2 | 49496 |
| 1892_Hepatitis_C_virus_genotype_3_g_3 | 49497 |
| 1892_Hepatitis_C_virus_genotype_3_g_4 | 49498 |
| 1893_Hepatitis_C_virus_genotype_3_g_1 | 49499 |
| 1893_Hepatitis_C_virus_genotype_3_g_2 | 49500 |
| 1893_Hepatitis_C_virus_genotype_3_g_3 | 49501 |
| 1893_Hepatitis_C_virus_genotype_3_g_4 | 49502 |
| 1893_Hepatitis_C_virus_genotype_3_g_5 | 49503 |
| 1894_Hepatitis_C_virus_genotype_3_g_1 | 49504 |
| 1894_Hepatitis_C_virus_genotype_3_g_2 | 49505 |
| 1894_Hepatitis_C_virus_genotype_3_g_3 | 49506 |
| 1894_Hepatitis_C_virus_genotype_3_g_4 | 49507 |
| 1894_Hepatitis_C_virus_genotype_3_g_5 | 49508 |
| 1895_Hepatitis_C_virus_genotype_3_g_1 | 49509 |
| 1895_Hepatitis_C_virus_genotype_3_g_2 | 49510 |
| 1895_Hepatitis_C_virus_genotype_3_g_3 | 49511 |
| 1895_Hepatitis_C_virus_genotype_3_g_4 | 49512 |
| 1895_Hepatitis_C_virus_genotype_3_g_5 | 49513 |
| 1896_Hepatitis_C_virus_genotype_3_g_1 | 49514 |
| 1896_Hepatitis_C_virus_genotype_3_g_2 | 49515 |
| 1896_Hepatitis_C_virus_genotype_3_g_3 | 49516 |
| 1896_Hepatitis_C_virus_genotype_3_g_4 | 49517 |
| 1896_Hepatitis_C_virus_genotype_3_g_5 | 49518 |
| 1897_Hepatitis_C_virus_genotype_3_g_1 | 49519 |
| 1897_Hepatitis_C_virus_genotype_3_g_2 | 49520 |
| 1897_Hepatitis_C_virus_genotype_3_g_3 | 49521 |
| 1897_Hepatitis_C_virus_genotype_3_g_4 | 49522 |
| 1897_Hepatitis_C_virus_genotype_3_g_5 | 49523 |
| 1898_Influenza_A_virus_(A/Puerto_Rico/8/1934(H1N1))_{—} | 49524 |
| segment_1_g_1 | |
| 1898_Influenza_A_virus_(A/Puerto_Rico/8/1934(H1N1))_{—} | 49525 |
| segment_1_g_2 | |
| 1898_Influenza_A_virus_(A/Puerto_Rico/8/1934(H1N1))_{—} | 49526 |
| segment_1_g_3 | |
| 1898_Influenza_A_virus_(A/Puerto_Rico/8/1934(H1N1))_{—} | 49527 |
| segment_1_g_4 | |
| 1898_Influenza_A_virus_(A/Puerto_Rico/8/1934(H1N1))_{—} | 49528 |
| segment_1_g_5 | |
| 1899_Influenza_A_virus_(A/Puerto_Rico/8/1934(H1N1))_{—} | 49529 |
| segment_1_g_1 | |
| 1899_Influenza_A_virus_(A/Puerto_Rico/8/1934(H1N1))_{—} | 49530 |
| segment_1_g_2 | |
| 1899_Influenza_A_virus_(A/Puerto_Rico/8/1934(H1N1))_{—} | 49531 |
| segment_1_g_3 | |
| 1899_Influenza_A_virus_(A/Puerto_Rico/8/1934(H1N1))_{—} | 49532 |
| segment_1_g_4 | |
| 1899_Influenza_A_virus_(A/Puerto_Rico/8/1934(H1N1))_{—} | 49533 |
| segment_1_g_5 | |
| 1900_Influenza_A_virus_(A/Puerto_Rico/8/1934(H1N1))_{—} | 49534 |
| segment_1_g_1 | |
| 1900_Influenza_A_virus_(A/Puerto_Rico/8/1934(H1N1))_{—} | 49535 |
| segment_1_g_2 | |
| 1900_Influenza_A_virus_(A/Puerto_Rico/8/1934(H1N1))_{—} | 49536 |
| segment_1_g_3 | |
| 1900_Influenza_A_virus_(A/Puerto_Rico/8/1934(H1N1))_{—} | 49537 |
| segment_1_g_4 | |
| 1900_Influenza_A_virus_(A/Puerto_Rico/8/1934(H1N1))_{—} | 49538 |
| segment_1_g_5 | |
| 1901_Influenza_A_virus_(A/Puerto_Rico/8/1934(H1N1))_{—} | 49539 |
| segment_1_g_1 | |
| 1901_Influenza_A_virus_(A/Puerto_Rico/8/1934(H1N1))_{—} | 49540 |
| segment_1_g_2 | |
| 1901_Influenza_A_virus_(A/Puerto_Rico/8/1934(H1N1))_{—} | 49541 |
| segment_1_g_3 | |
| 1901_Influenza_A_virus_(A/Puerto_Rico/8/1934(H1N1))_{—} | 49542 |
| segment_1_g_4 | |
| 1901_Influenza_A_virus_(A/Puerto_Rico/8/1934(H1N1))_{—} | 49543 |
| segment_1_g_5 | |
| 1902_Influenza_A_virus_(A/Puerto_Rico/8/1934(H1N1))_{—} | 49544 |
| segment_1_g_1 | |
| 1902_Influenza_A_virus_(A/Puerto_Rico/8/1934(H1N1))_{—} | 49545 |
| segment_1_g_2 | |
| 1902_Influenza_A_virus_(A/Puerto_Rico/8/1934(H1N1))_{—} | 49546 |
| segment_1_g_3 | |
| 1902_Influenza_A_virus_(A/Puerto_Rico/8/1934(H1N1))_{—} | 49547 |
| segment_1_g_4 | |
| 1902_Influenza_A_virus_(A/Puerto_Rico/8/1934(H1N1))_{—} | 49548 |
| segment_1_g_5 | |
| 1903_Influenza_A_virus_(A/Puerto_Rico/8/1934(H1N1))_{—} | 49549 |
| segment_1_g_1 | |
| 1903_Influenza_A_virus_(A/Puerto_Rico/8/1934(H1N1))_{—} | 49550 |
| segment_1_g_2 | |
| 1903_Influenza_A_virus_(A/Puerto_Rico/8/1934(H1N1))_{—} | 49551 |
| segment_1_g_3 | |
| 1903_Influenza_A_virus_(A/Puerto_Rico/8/1934(H1N1))_{—} | 49552 |
| segment_1_g_4 | |
| 1903_Influenza_A_virus_(A/Puerto_Rico/8/1934(H1N1))_{—} | 49553 |
| segment_1_g_5 | |
| 1904_Influenza_A_virus_(A/Puerto_Rico/8/1934(H1N1))_{—} | 49554 |
| segment_1_g_{—} | |
| 1904_Influenza_A_virus_(A/Puerto_Rico/8/1934(H1N1))_{—} | 49555 |
| segment_1_g_2 | |
| 1904_Influenza_A_virus_(A/Puerto_Rico/8/1934(H1N1))_{—} | 49556 |
| segment_1_g_3 | |
| 1904_Influenza_A_virus_(A/Puerto_Rico/8/1934(H1N1))_{—} | 49557 |
| segment_1_g_4 | |
| 1904_Influenza_A_virus_(A/Puerto_Rico/8/1934(H1N1))_{—} | 49558 |
| segment_1_g_5 | |
| 1905_Influenza_A_virus_(A/Puerto_Rico/8/1934(H1N1))_{—} | 49559 |
| segment_1_g_1 | |
| 1905_Influenza_A_virus_(A/Puerto_Rico/8/1934(H1N1))_{—} | 49560 |
| segment_1_g_2 | |
| 1905_Influenza_A_virus_(A/Puerto_Rico/8/1934(H1N1))_{—} | 49561 |
| segment_1_g_3 | |
| 1905_Influenza_A_virus_(A/Puerto_Rico/8/1934(H1N1))_{—} | 49562 |
| segment_1_g_4 | |
| 1905_Influenza_A_virus_(A/Puerto_Rico/8/1934(H1N1))_{—} | 49563 |
| segment_1_g_5 | |
| 1906_Influenza_A_virus_(A/Puerto_Rico/8/1934(H1N1))_{—} | 49564 |
| segment_1_g_1 | |
| 1906_Influenza_A_virus_(A/Puerto_Rico/8/1934(H1N1))_{—} | 49565 |
| segment_1_g_2 | |
| 1906_Influenza_A_virus_(A/Puerto_Rico/8/1934(H1N1))_{—} | 49566 |
| segment_1_g_3 | |
| 1906_Influenza_A_virus_(A/Puerto_Rico/8/1934(H1N1))_{—} | 49567 |
| segment_1_g_4 | |
| 1906_Influenza_A_virus_(A/Puerto_Rico/8/1934(H1N1))_{—} | 49568 |
| segment_1_g_5 | |
| 1907_Hepatitis_C_virus_genotype_1_g_1 | 49569 |
| 1907_Hepatitis_C_virus_genotype_1_g_2 | 49570 |
| 1907_Hepatitis_C_virus_genotype_1_g_3 | 49571 |
| 1907_Hepatitis_C_virus_genotype_1_g_4 | 49572 |
| 1907_Hepatitis_C_virus_genotype_1_g_5 | 49573 |
| 1908_Hepatitis_C_virus_genotype_1_g_1 | 49574 |
| 1908_Hepatitis_C_virus_genotype_1_g_2 | 49575 |
| 1908_Hepatitis_C_virus_genotype_1_g_3 | 49576 |
| 1908_Hepatitis_C_virus_genotype_1_g_4 | 49577 |
| 1908_Hepatitis_C_virus_genotype_1_g_5 | 49578 |
| 1909_Hepatitis_C_virus_genotype_1_g_1 | 49579 |
| 1909_Hepatitis_C_virus_genotype_1_g_2 | 49580 |
| 1910_Hepatitis_C_virus_genotype_1_g_1 | 49581 |
| 1910_Hepatitis_C_virus_genotype_1_g_2 | 49582 |
| 1910_Hepatitis_C_virus_genotype_1_g_3 | 49583 |
| 1910_Hepatitis_C_virus_genotype_1_g_4 | 49584 |
| 1910_Hepatitis_C_virus_genotype_1_g_5 | 49585 |
| 1911_Hepatitis_C_virus_genotype_1_g_1 | 49586 |
| 1911_Hepatitis_C_virus_genotype_1_g_2 | 49587 |
| 1911_Hepatitis_C_virus_genotype_1_g_3 | 49588 |
| 1911_Hepatitis_C_virus_genotype_1_g_4 | 49589 |
| 1911_Hepatitis_C_virus_genotype_1_g_5 | 49590 |
| 1912_Hepatitis_C_virus_genotype_1_g_1 | 49591 |
| 1912_Hepatitis_C_virus_genotype_1_g_2 | 49592 |
| 1912_Hepatitis_C_virus_genotype_1_g_3 | 49593 |
| 1912_Hepatitis_C_virus_genotype_1_g_4 | 49594 |
| 1913_Hepatitis_C_virus_genotype_1_g_1 | 49595 |
| 1913_Hepatitis_C_virus_genotype_1_g_2 | 49596 |
| 1913_Hepatitis_C_virus_genotype_1_g_3 | 49597 |
| 1913_Hepatitis_C_virus_genotype_1_g_4 | 49598 |
| 1913_Hepatitis_C_virus_genotype_1_g_5 | 49599 |
| 1914_Hepatitis_C_virus_genotype_1_g_1 | 49600 |
| 1914_Hepatitis_C_virus_genotype_1_g_2 | 49601 |
| 1914_Hepatitis_C_virus_genotype_1_g_3 | 49602 |
| 1914_Hepatitis_C_virus_genotype_1_g_4 | 49603 |
| 1914_Hepatitis_C_virus_genotype_1_g_5 | 49604 |
| 1915_Hepatitis_C_virus_genotype_1_g_1 | 49605 |
| 1915_Hepatitis_C_virus_genotype_1_g_2 | 49606 |
| 1915_Hepatitis_C_virus_genotype_1_g_3 | 49607 |
| 1915_Hepatitis_C_virus_genotype_1_g_4 | 49608 |
| 1915_Hepatitis_C_virus_genotype_1_g_5 | 49609 |
| 1916_Hepatitis_C_virus_genotype_1_g_1 | 49610 |
| 1916_Hepatitis_C_virus_genotype_1_g_2 | 49611 |
| 1916_Hepatitis_C_virus_genotype_1_g_3 | 49612 |
| 1917_Hepatitis_C_virus_genotype_1_g_1 | 49613 |
| 1917_Hepatitis_C_virus_genotype_1_g_2 | 49614 |
| 1918_Hepatitis_C_virus_genotype_1_g_1 | 49615 |
| 1918_Hepatitis_C_virus_genotype_1_g_2 | 49616 |
| 1918_Hepatitis_C_virus_genotype_1_g_3 | 49617 |
| 1918_Hepatitis_C_virus_genotype_1_g_4 | 49618 |
| 1918_Hepatitis_C_virus_genotype_1_g_5 | 49619 |
| 1919_Hepatitis_C_virus_genotype_1_g_1 | 49620 |
| 1919_Hepatitis_C_virus_genotype_1_g_2 | 49621 |
| 1919_Hepatitis_C_virus_genotype_1_g_3 | 49622 |
| 1919_Hepatitis_C_virus_genotype_1_g_4 | 49623 |
| 1919_Hepatitis_C_virus_genotype_1_g_5 | 49624 |
| 1920_Hepatitis_C_virus_genotype_1_g_1 | 49625 |
| 1920_Hepatitis_C_virus_genotype_1_g_2 | 49626 |
| 1920_Hepatitis_C_virus_genotype_1_g_3 | 49627 |
| 1920_Hepatitis_C_virus_genotype_1_g_4 | 49628 |
| 1920_Hepatitis_C_virus_genotype_1_g_5 | 49629 |
| 1921_Hepatitis_C_virus_genotype_1_g_1 | 49630 |
| 1922_Hepatitis_C_virus_genotype_1_g_1 | 49631 |
| 1922_Hepatitis_C_virus_genotype_1_g_2 | 49632 |
| 1922_Hepatitis_C_virus_genotype_1_g_3 | 49633 |
| 1922_Hepatitis_C_virus_genotype_1_g_4 | 49634 |
| 1923_Hepatitis_C_virus_genotype_1_g_1 | 49635 |
| 1923_Hepatitis_C_virus_genotype_1_g_2 | 49636 |
| 1923_Hepatitis_C_virus_genotype_1_g_3 | 49637 |
| 1923_Hepatitis_C_virus_genotype_1_g_4 | 49638 |
| 1923_Hepatitis_C_virus_genotype_1_g_3 | 49639 |
| 1924_Hepatitis_C_virus_genotype_1_g_1 | 49640 |
| 1924_Hepatitis_C_virus_genotype_1_g_2 | 49641 |
| 1924_Hepatitis_C_virus_genotype_1_g_3 | 49642 |
| 1924_Hepatitis_C_virus_genotype_1_g_4 | 49643 |
| 1924_Hepatitis_C_virus_genotype_1_g_3 | 49644 |
| 1925_Hepatitis_C_virus_genotype_1_g_1 | 49645 |
| 1925_Hepatitis_C_virus_genotype_1_g_2 | 49646 |
| 1925_Hepatitis_C_virus_genotype_1_g_3 | 49647 |
| 1925_Hepatitis_C_virus_genotype_1_g_4 | 49648 |
| 1926_Hepatitis_C_virus_genotype_1_g_1 | 49649 |
| 1926_Hepatitis_C_virus_genotype_1_g_2 | 49650 |
| 1926_Hepatitis_C_virus_genotype_1_g_3 | 49651 |
| 1926_Hepatitis_C_virus_genotype_1_g_4 | 49652 |
| 1926_Hepatitis_C_virus_genotype_1_g_5 | 49653 |
| 1927_Hepatitis_C_virus_genotype_1_g_1 | 49654 |
| 1927_Hepatitis_C_virus_genotype_1_g_2 | 49655 |
| 1927_Hepatitis_C_virus_genotype_1_g_3 | 49656 |
| 1927_Hepatitis_C_virus_genotype_1_g_4 | 49657 |
| 1927_Hepatitis_C_virus_genotype_1_g_5 | 49658 |
| 1928_Hepatitis_C_virus_genotype_1_g_1 | 49659 |
| 1928_Hepatitis_C_virus_genotype_1_g_2 | 49660 |
| 1928_Hepatitis_C_virus_genotype_1_g_3 | 49661 |
| 1928_Hepatitis_C_virus_genotype_1_g_4 | 49662 |
| 1928_Hepatitis_C_virus_genotype_1_g_5 | 49663 |
| 1929_Hepatitis_C_virus_genotype_1_g_1 | 49664 |
| 1929_Hepatitis_C_virus_genotype_1_g_2 | 49665 |
| 1929_Hepatitis_C_virus_genotype_1_g_3 | 49666 |
| 1929_Hepatitis_C_virus_genotype_1_g_4 | 49667 |
| 1929_Hepatitis_C_virus_genotype_1_g_5 | 49668 |
| 1930_Hepatitis_C_virus_genotype_1_g_1 | 49669 |
| 1930_Hepatitis_C_virus_genotype_1_g_2 | 49670 |
| 1930_Hepatitis_C_virus_genotype_1_g_3 | 49671 |
| 1930_Hepatitis_C_virus_genotype_1_g_4 | 49672 |
| 1930_Hepatitis_C_virus_genotype_1_g_5 | 49673 |
| 1931_Human_papillomavirus_type_10_genomic_DNA_g_1 | 49674 |
| 1931_Human_papillomavirus_type_10_genomic_DNA_g_2 | 49675 |
| 1931_Human_papillomavirus_type_10_genomic_DNA_g_3 | 49676 |
| 1931_Human_papillomavirus_type_10_genomic_DNA_g_4 | 49677 |
| 1931_Human_papillomavirus_type_10_genomic_DNA_g_5 | 49678 |
| 1932_Human_papillomavirus_type_10_genomic_DNA_g_1 | 49679 |
| 1932_Human_papillomavirus_type_10_genomic_DNA_g_2 | 49680 |
| 1932_Human_papillomavirus_type_10_genomic_DNA_g_3 | 49681 |
| 1932_Human_papillomavirus_type_10_genomic_DNA_g_4 | 49682 |
| 1932_Human_papillomavirus_type_10_genomic_DNA_g_5 | 49683 |
| 1933_Human_papillomavirus_type_10_genomic_DNA_g_1 | 49684 |
| 1933_Human_papillomavirus_type_10_genomic_DNA_g_2 | 49685 |
| 1933_Human_papillomavirus_type_10_genomic_DNA_g_3 | 49686 |
| 1933_Human_papillomavirus_type_10_genomic_DNA_g_4 | 49687 |
| 1933_Human_papillomavirus_type_10_genomic_DNA_g_5 | 49688 |
| 1934_Human_papillomavirus_type_10_genomic_DNA_g_1 | 49689 |
| 1934_Human_papillomavirus_type_10_genomic_DNA_g_2 | 49690 |
| 1934_Human_papillomavirus_type_10_genomic_DNA_g_3 | 49691 |
| 1934_Human_papillomavirus_type_10_genomic_DNA_g_4 | 49692 |
| 1934_Human_papillomavirus_type_10_genomic_DNA_g_5 | 49693 |
| 1935_Human_papillomavirus_type_10_genomic_DNA_g_1 | 49694 |
| 1935_Human_papillomavirus_type_10_genomic_DNA_g_2 | 49695 |
| 1935_Human_papillomavirus_type_10_genomic_DNA_g_3 | 49696 |
| 1935_Human_papillomavirus_type_10_genomic_DNA_g_4 | 49697 |
| 1935_Human_papillomavirus_type_10_genomic_DNA_g_5 | 49698 |
| 1936_Human_papillomavirus_type_10_genomic_DNA_g_1 | 49699 |
| 1936_Human_papillomavirus_type_10_genomic_DNA_g_2 | 49700 |
| 1936_Human_papillomavirus_type_10_genomic_DNA_g_3 | 49701 |
| 1936_Human_papillomavirus_type_10_genomic_DNA_g_4 | 49702 |
| 1936_Human_papillomavirus_type_10_genomic_DNA_g_5 | 49703 |
| 1937_Human_papillomavirus_type_10_genomic_DNA_g_1 | 49704 |
| 1937_Human_papillomavirus_type_10_genomic_DNA_g_2 | 49705 |
| 1937_Human_papillomavirus_type_10_genomic_DNA_g_3 | 49706 |
| 1937_Human_papillomavirus_type_10_genomic_DNA_g_4 | 49707 |
| 1937_Human_papillomavirus_type_10_genomic_DNA_g_5 | 49708 |
| 1938_Human_papillomavirus_type_10_genomic_DNA_g_1 | 49709 |
| 1938_Human_papillomavirus_type_10_genomic_DNA_g_2 | 49710 |
| 1938_Human_papillomavirus_type_10_genomic_DNA_g_3 | 49711 |
| 1938_Human_papillomavirus_type_10_genomic_DNA_g_4 | 49712 |
| 1938_Human_papillomavirus_type_10_genomic_DNA_g_5 | 49713 |
| 1939_Human_papillomavirus_type_10_genomic_DNA_g_1 | 49714 |
| 1939_Human_papillomavirus_type_10_genomic_DNA_g_2 | 49715 |
| 1939_Human_papillomavirus_type_10_genomic_DNA_g_3 | 49716 |
| 1939_Human_papillomavirus_type_10_genomic_DNA_g_4 | 49717 |
| 1939_Human_papillomavirus_type_10_genomic_DNA_g_5 | 49718 |
| 1940_Human_papillomavirus_type_10_genomic_DNA_g_1 | 49719 |
| 1940_Human_papillomavirus_type_10_genomic_DNA_g_2 | 49720 |
| 1940_Human_papillomavirus_type_10_genomic_DNA_g_3 | 49721 |
| 1940_Human_papillomavirus_type_10_genomic_DNA_g_4 | 49722 |
| 1940_Human_papillomavirus_type_10_genomic_DNA_g_5 | 49723 |
| 1941_Human_papillomavirus_type_10_genomic_DNA_g_1 | 49724 |
| 1941_Human_papillomavirus_type_10_genomic_DNA_g_2 | 49725 |
| 1941_Human_papillomavirus_type_10_genomic_DNA_g_3 | 49726 |
| 1941_Human_papillomavirus_type_10_genomic_DNA_g_4 | 49727 |
| 1941_Human_papillomavirus_type_10_genomic_DNA_g_5 | 49728 |
| 1942_Human_papillomavirus_type_10_genomic_DNA_g_1 | 49729 |
| 1942_Human_papillomavirus_type_10_genomic_DNA_g_2 | 49730 |
| 1942_Human_papillomavirus_type_10_genomic_DNA_g_3 | 49731 |
| 1942_Human_papillomavirus_type_10_genomic_DNA_g_4 | 49732 |
| 1942_Human_papillomavirus_type_10_genomic_DNA_g_5 | 49733 |
| 1943_Human_papillomavirus_type_10_genomic_DNA_g_1 | 49734 |
| 1943_Human_papillomavirus_type_10_genomic_DNA_g_2 | 49735 |
| 1943_Human_papillomavirus_type_10_genomic_DNA_g_3 | 49736 |
| 1943_Human_papillomavirus_type_10_genomic_DNA_g_4 | 49737 |
| 1943_Human_papillomavirus_type_10_genomic_DNA_g_5 | 49738 |
| 1944_Human_papillomavirus_type_10_genomic_DNA_g_1 | 49739 |
| 1944_Human_papillomavirus_type_10_genomic_DNA_g_2 | 49740 |
| 1944_Human_papillomavirus_type_10_genomic_DNA_g_3 | 49741 |
| 1944_Human_papillomavirus_type_10_genomic_DNA_g_4 | 49742 |
| 1944_Human_papillomavirus_type_10_genomic_DNA_g_5 | 49743 |
| 1945_Human_papillomavirus_type_10_genomic_DNA_g_1 | 49744 |
| 1945_Human_papillomavirus_type_10_genomic_DNA_g_2 | 49745 |
| 1945_Human_papillomavirus_type_10_genomic_DNA_g_3 | 49746 |
| 1945_Human_papillomavirus_type_10_genomic_DNA_g_4 | 49747 |
| 1945_Human_papillomavirus_type_10_genomic_DNA_g_5 | 49748 |
| 1946_Human_papillomavirus_type_10_genomic_DNA_g_1 | 49749 |
| 1946_Human_papillomavirus_type_10_genomic_DNA_g_2 | 49750 |
| 1946_Human_papillomavirus_type_10_genomic_DNA_g_3 | 49751 |
| 1946_Human_papillomavirus_type_10_genomic_DNA_g_4 | 49752 |
| 1946_Human_papillomavirus_type_10_genomic_DNA_g_5 | 49753 |
| 1947_Human_papillomavirus_type_10_genomic_DNA_g_1 | 49754 |
| 1947_Human_papillomavirus_type_10_genomic_DNA_g_2 | 49755 |
| 1947_Human_papillomavirus_type_10_genomic_DNA_g_3 | 49756 |
| 1947_Human_papillomavirus_type_10_genomic_DNA_g_4 | 49757 |
| 1947_Human_papillomavirus_type_10_genomic_DNA_g_5 | 49758 |
| 1948_Human_papillomavirus_type_184_complete_genome_g_1 | 49759 |
| 1948_Human_papillomavirus_type_184_complete_genome_g_2 | 49760 |
| 1948_Human_papillomavirus_type_184_complete_genome_g_3 | 49761 |
| 1948_Human_papillomavirus_type_184_complete_genome_g_4 | 49762 |
| 1948_Human_papillomavirus_type_184_complete_genome_g_5 | 49763 |
| 1949_Human_papillomavirus_type_184_complete_genome_g_1 | 49764 |
| 1949_Human_papillomavirus_type_184_complete_genome_g_2 | 49765 |
| 1949_Human_papillomavirus_type_184_complete_genome_g_3 | 49766 |
| 1949_Human_papillomavirus_type_184_complete_genome_g_4 | 49767 |
| 1949_Human_papillomavirus_type_184_complete_genome_g_5 | 49768 |
| 1950_Human_papillomavirus_type_184_complete_genome_g_1 | 49769 |
| 1950_Human_papillomavirus_type_184_complete_genome_g_2 | 49770 |
| 1950_Human_papillomavirus_type_184_complete_genome_g_3 | 49771 |
| 1950_Human_papillomavirus_type_184_complete_genome_g_4 | 49772 |
| 1950_Human_papillomavirus_type_184_complete_genome_g_5 | 49773 |
| 1951_Human_papillomavirus_type_184_complete_genome_g_1 | 49774 |
| 1951_Human_papillomavirus_type_184_complete_genome_g_2 | 49775 |
| 1951_Human_papillomavirus_type_184_complete_genome_g_3 | 49776 |
| 1951_Human_papillomavirus_type_184_complete_genome_g_4 | 49777 |
| 1951_Human_papillomavirus_type_184_complete_genome_g_5 | 49778 |
| 1952_Human_papillomavirus_type_184_complete_genome_g_1 | 49779 |
| 1952_Human_papillomavirus_type_184_complete_genome_g_2 | 49780 |
| 1952_Human_papillomavirus_type_184_complete_genome_g_3 | 49781 |
| 1952_Human_papillomavirus_type_184_complete_genome_g_4 | 49782 |
| 1952_Human_papillomavirus_type_184_complete_genome_g_5 | 49783 |
| 1953_Human_papillomavirus_type_184_complete_genome_g_1 | 49784 |
| 1953_Human_papillomavirus_type_184_complete_genome_g_2 | 49785 |
| 1953_Human_papillomavirus_type_184_complete_genome_g_3 | 49786 |
| 1953_Human_papillomavirus_type_184_complete_genome_g_4 | 49787 |
| 1953_Human_papillomavirus_type_184_complete_genome_g_5 | 49788 |
| 1954_Human_papillomavirus_type_184_complete_genome_g_1 | 49789 |
| 1954_Human_papillomavirus_type_184_complete_genome_g_2 | 49790 |
| 1954_Human_papillomavirus_type_184_complete_genome_g_3 | 49791 |
| 1954_Human_papillomavirus_type_184_complete_genome_g_4 | 49792 |
| 1954_Human_papillomavirus_type_184_complete_genome_g_5 | 49793 |
| 1955_Human_papillomavirus_type_184_complete_genome_g_1 | 49794 |
| 1955_Human_papillomavirus_type_184_complete_genome_g_2 | 49795 |
| 1955_Human_papillomavirus_type_184_complete_genome_g_3 | 49796 |
| 1955_Human_papillomavirus_type_184_complete_genome_g_4 | 49797 |
| 1955_Human_papillomavirus_type_184_complete_genome_g_5 | 49798 |
| 1956_Human_papillomavirus_type_184_complete_genome_g_1 | 49799 |
| 1956_Human_papillomavirus_type_184_complete_genome_g_2 | 49800 |
| 1956_Human_papillomavirus_type_184_complete_genome_g_3 | 49801 |
| 1956_Human_papillomavirus_type_184_complete_genome_g_4 | 49802 |
| 1956_Human_papillomavirus_type_184_complete_genome_g_5 | 49803 |
| 1957_Human_papillomavirus_type_184_complete_genome_g_1 | 49804 |
| 1957_Human_papillomavirus_type_184_complete_genome_g_2 | 49805 |
| 1957_Human_papillomavirus_type_184_complete_genome_g_3 | 49806 |
| 1957_Human_papillomavirus_type_184_complete_genome_g_4 | 49807 |
| 1957_Human_papillomavirus_type_184_complete_genome_g_5 | 49808 |
| 1958_Human_papillomavirus_type_184_complete_genome_g_1 | 49809 |
| 1958_Human_papillomavirus_type_184_complete_genome_g_2 | 49810 |
| 1958_Human_papillomavirus_type_184_complete_genome_g_3 | 49811 |
| 1958_Human_papillomavirus_type_184_complete_genome_g_4 | 49812 |
| 1958_Human_papillomavirus_type_184_complete_genome_g_5 | 49813 |
| 1959_Human_papillomavirus_type_184_complete_genome_g_1 | 49814 |
| 1959_Human_papillomavirus_type_184_complete_genome_g_2 | 49815 |
| 1959_Human_papillomavirus_type_184_complete_genome_g_3 | 49816 |
| 1959_Human_papillomavirus_type_184_complete_genome_g_4 | 49817 |
| 1959_Human_papillomavirus_type_184_complete_genome_g_5 | 49818 |
| 1960_Human_papillomavirus_type_184_complete_genome_g_1 | 49819 |
| 1960_Human_papillomavirus_type_184_complete_genome_g_2 | 49820 |
| 1960_Human_papillomavirus_type_184_complete_genome_g_3 | 49821 |
| 1960_Human_papillomavirus_type_184_complete_genome_g_4 | 49822 |
| 1960_Human_papillomavirus_type_184_complete_genome_g_5 | 49823 |
| 1961_Human_papillomavirus_type_184_complete_genome_g_1 | 49824 |
| 1961_Human_papillomavirus_type_184_complete_genome_g_2 | 49825 |
| 1961_Human_papillomavirus_type_184_complete_genome_g_3 | 49826 |
| 1961_Human_papillomavirus_type_184_complete_genome_g_4 | 49827 |
| 1961_Human_papillomavirus_type_184_complete_genome_g_5 | 49828 |
| 1962_Influenza_B_virus_(B/Lee/1940)_segment_2_g_1 | 49829 |
| 1962_Influenza_B_virus_(B/Lee/1940)_segment_2_g_2 | 49830 |
| 1962_Influenza_B_virus_(B/Lee/1940)_segment_2_g_3 | 49831 |
| 1962_Influenza_B_virus_(B/Lee/1940)_segment_2_g_4 | 49832 |
| 1962_Influenza_B_virus_(B/Lee/1940)_segment_2_g_5 | 49833 |
| 1963_Influenza_B_virus_(B/Lee/1940)_segment_2_g_1 | 49834 |
| 1963_Influenza_B_virus_(B/Lee/1940)_segment_2_g_2 | 49835 |
| 1963_Influenza_B_virus_(B/Lee/1940)_segment_2_g_3 | 49836 |
| 1963_Influenza_B_virus_(B/Lee/1940)_segment_2_g_4 | 49837 |
| 1963_Influenza_B_virus_(B/Lee/1940)_segment_2_g_5 | 49838 |
| 1964_Influenza_B_virus_(B/Lee/1940)_segment_2_g_1 | 49839 |
| 1964_Influenza_B_virus_(B/Lee/1940)_segment_2_g_2 | 49840 |
| 1964_Influenza_B_virus_(B/Lee/1940)_segment_2_g_3 | 49841 |
| 1964_Influenza_B_virus_(B/Lee/1940)_segment_2_g_4 | 49842 |
| 1964_Influenza_B_virus_(B/Lee/1940)_segment_2_g_5 | 49843 |
| 1965_Influenza_B_virus_(B/Lee/1940)_segment_2_g_1 | 49844 |
| 1965_Influenza_B_virus_(B/Lee/1940)_segment_2_g_2 | 49845 |
| 1965_Influenza_B_virus_(B/Lee/1940)_segment_2_g_3 | 49846 |
| 1965_Influenza_B_virus_(B/Lee/1940)_segment_2_g_4 | 49847 |
| 1965_Influenza_B_virus_(B/Lee/1940)_segment_2_g_5 | 49848 |
| 1966_Influenza_B_virus_(B/Lee/1940)_segment_2_g_1 | 49849 |
| 1966_Influenza_B_virus_(B/Lee/1940)_segment_2_g_2 | 49850 |
| 1966_Influenza_B_virus_(B/Lee/1940)_segment_2_g_3 | 49851 |
| 1966_Influenza_B_virus_(B/Lee/1940)_segment_2_g_4 | 49852 |
| 1966_Influenza_B_virus_(B/Lee/1940)_segment_2_g_5 | 49853 |
| 1967_Influenza_B_virus_(B/Lee/1940)_segment_2_g_1 | 49854 |
| 1967_Influenza_B_virus_(B/Lee/1940)_segment_2_g_2 | 49855 |
| 1967_Influenza_B_virus_(B/Lee/1940)_segment_2_g_3 | 49856 |
| 1967_Influenza_B_virus_(B/Lee/1940)_segment_2_g_4 | 49857 |
| 1967_Influenza_B_virus_(B/Lee/1940)_segment_2_g_5 | 49858 |
| 1968_Influenza_B_virus_(B/Lee/1940)_segment_2_g_1 | 49859 |
| 1968_Influenza_B_virus_(B/Lee/1940)_segment_2_g_2 | 49860 |
| 1968_Influenza_B_virus_(B/Lee/1940)_segment_2_g_3 | 49861 |
| 1968_Influenza_B_virus_(B/Lee/1940)_segment_2_g_4 | 49862 |
| 1968_Influenza_B_virus_(B/Lee/1940)_segment_2_g_5 | 49863 |
| 1969_Influenza_B_virus_(B/Lee/1940)_segment_2_g_1 | 49864 |
| 1969_Influenza_B_virus_(B/Lee/1940)_segment_2_g_2 | 49865 |
| 1969_Influenza_B_virus_(B/Lee/1940)_segment_2_g_3 | 49866 |
| 1969_Influenza_B_virus_(B/Lee/1940)_segment_2_g_4 | 49867 |
| 1969_Influenza_B_virus_(B/Lee/1940)_segment_2_g_5 | 49868 |
| 1970_Influenza_B_virus_(B/Lee/1940)_segment_2_g_1 | 49869 |
| 1970_Influenza_B_virus_(B/Lee/1940)_segment_2_g_2 | 49870 |
| 1970_Influenza_B_virus_(B/Lee/1940)_segment_2_g_3 | 49871 |
| 1970_Influenza_B_virus_(B/Lee/1940)_segment_2_g_4 | 49872 |
| 1970_Influenza_B_virus_(B/Lee/1940)_segment_2_g_5 | 49873 |
| 1971_Human_coronavirus_HKU1_g_1 | 49874 |
| 1971_Human_coronavirus_HKU1_g_2 | 49875 |
| 1971_Human_coronavirus_HKU1_g_3 | 49876 |
| 1971_Human_coronavirus_HKU1_g_4 | 49877 |
| 1971_Human_coronavirus_HKU1_g_5 | 49878 |
| 1972_Human_coronavirus_HKU1_g_1 | 49879 |
| 1972_Human_coronavirus_HKU1_g_2 | 49880 |
| 1972_Human_coronavirus_HKU1_g_3 | 49881 |
| 1972_Human_coronavirus_HKU1_g_4 | 49882 |
| 1972_Human_coronavirus_HKU1_g_5 | 49883 |
| 1973_Human_coronavirus_HKU1_g_1 | 49884 |
| 1973_Human_coronavirus_HKU1_g_2 | 49885 |
| 1973_Human_coronavirus_HKU1_g_3 | 49886 |
| 1973_Human_coronavirus_HKU1_g_4 | 49887 |
| 1973_Human_coronavirus_HKU1_g_5 | 49888 |
| 1974_Human_coronavirus_HKU1_g_1 | 49889 |
| 1974_Human_coronavirus_HKU1_g_2 | 49890 |
| 1974_Human_coronavirus_HKU1_g_3 | 49891 |
| 1974_Human_coronavirus_HKU1_g_4 | 49892 |
| 1974_Human_coronavirus_HKU1_g_5 | 49893 |
| 1975_Human_coronavirus_HKU1_g_1 | 49894 |
| 1975_Human_coronavirus_HKU1_g_2 | 49895 |
| 1975_Human_coronavirus_HKU1_g_3 | 49896 |
| 1975_Human_coronavirus_HKU1_g_4 | 49897 |
| 1975_Human_coronavirus_HKU1_g_5 | 49898 |
| 1976_Human_coronavirus_HKU1_g_1 | 49899 |
| 1976_Human_coronavirus_HKU1_g_2 | 49900 |
| 1976_Human_coronavirus_HKU1_g_3 | 49901 |
| 1976_Human_coronavirus_HKU1_g_4 | 49902 |
| 1976_Human_coronavirus_HKU1_g_5 | 49903 |
| 1977_Human_coronavirus_HKU1_g_1 | 49904 |
| 1977_Human_coronavirus_HKU1_g_2 | 49905 |
| 1977_Human_coronavirus_HKU1_g_3 | 49906 |
| 1977_Human_coronavirus_HKU1_g_4 | 49907 |
| 1977_Human_coronavirus_HKU1_g_5 | 49908 |
| 1978_Human_coronavirus_HKU1_g_1 | 49909 |
| 1978_Human_coronavirus_HKU1_g_2 | 49910 |
| 1978_Human_coronavirus_HKU1_g_3 | 49911 |
| 1978_Human_coronavirus_HKU1_g_4 | 49912 |
| 1978_Human_coronavirus_HKU1_g_5 | 49913 |
| 1979_Human_coronavirus_HKU1_g_1 | 49914 |
| 1979_Human_coronavirus_HKU1_g_2 | 49915 |
| 1979_Human_coronavirus_HKU1_g_3 | 49916 |
| 1979_Human_coronavirus_HKU1_g_4 | 49917 |
| 1979_Human_coronavirus_HKU1_g_5 | 49918 |
| 1980_Human_coronavirus_HKU1_g_1 | 49919 |
| 1980_Human_coronavirus_HKU1_g_2 | 49920 |
| 1980_Human_coronavirus_HKU1_g_3 | 49921 |
| 1980_Human_coronavirus_HKU1_g_4 | 49922 |
| 1980_Human_coronavirus_HKU1_g_5 | 49923 |
| 1981_Human_coronavirus_HKU1_g_1 | 49924 |
| 1981_Human_coronavirus_HKU1_g_2 | 49925 |
| 1981_Human_coronavirus_HKU1_g_3 | 49926 |
| 1981_Human_coronavirus_HKU1_g_4 | 49927 |
| 1981_Human_coronavirus_HKU1_g_5 | 49928 |
| 1982_Human_coronavirus_HKU1_g_1 | 49929 |
| 1982_Human_coronavirus_HKU1_g_2 | 49930 |
| 1982_Human_coronavirus_HKU1_g_3 | 49931 |
| 1982_Human_coronavirus_HKU1_g_4 | 49932 |
| 1982_Human_coronavirus_HKU1_g_5 | 49933 |
| 1983_Human_coronavirus_HKU1_g_1 | 49934 |
| 1983_Human_coronavirus_HKU1_g_2 | 49935 |
| 1983_Human_coronavirus_HKU1_g_3 | 49936 |
| 1983_Human_coronavirus_HKU1_g_4 | 49937 |
| 1983_Human_coronavirus_HKU1_g_5 | 49938 |
| 1984_Human_coronavirus_HKU1_g_1 | 49939 |
| 1984_Human_coronavirus_HKU1_g_2 | 49940 |
| 1984_Human_coronavirus_HKU1_g_3 | 49941 |
| 1984_Human_coronavirus_HKU1_g_4 | 49942 |
| 1984_Human_coronavirus_HKU1_g_5 | 49943 |
| 1985_Human_coronavirus_HKU1_g_1 | 49944 |
| 1985_Human_coronavirus_HKU1_g_2 | 49945 |
| 1985_Human_coronavirus_HKU1_g_3 | 49946 |
| 1985_Human_coronavirus_HKU1_g_4 | 49947 |
| 1985_Human_coronavirus_HKU1_g_5 | 49948 |
| 1986_Human_coronavirus_HKU1_g_1 | 49949 |
| 1986_Human_coronavirus_HKU1_g_2 | 49950 |
| 1986_Human_coronavirus_HKU1_g_3 | 49951 |
| 1986_Human_coronavirus_HKU1_g_4 | 49952 |
| 1986_Human_coronavirus_HKU1_g_5 | 49953 |
| 1987_Human_coronavirus_HKU1_g_1 | 49954 |
| 1987_Human_coronavirus_HKU1_g_2 | 49955 |
| 1987_Human_coronavirus_HKU1_g_3 | 49956 |
| 1987_Human_coronavirus_HKU1_g_4 | 49957 |
| 1987_Human_coronavirus_HKU1_g_5 | 49958 |
| 1988_Human_coronavirus_HKU1_g_1 | 49959 |
| 1988_Human_coronavirus_HKU1_g_2 | 49960 |
| 1988_Human_coronavirus_HKU1_g_3 | 49961 |
| 1988_Human_coronavirus_HKU1_g_4 | 49962 |
| 1988_Human_coronavirus_HKU1_g_5 | 49963 |
| 1989_Human_coronavirus_HKU1_g_1 | 49964 |
| 1989_Human_coronavirus_HKU1_g_2 | 49965 |
| 1989_Human_coronavirus_HKU1_g_3 | 49966 |
| 1989_Human_coronavirus_HKU1_g_4 | 49967 |
| 1989_Human_coronavirus_HKU1_g_5 | 49968 |
| 1990_Human_coronavirus_HKU1_g_1 | 49969 |
| 1990_Human_coronavirus_HKU1_g_2 | 49970 |
| 1990_Human_coronavirus_HKU1_g_3 | 49971 |
| 1990_Human_coronavirus_HKU1_g_4 | 49972 |
| 1990_Human_coronavirus_HKU1_g_5 | 49973 |
| 1991_Human_coronavirus_HKU1_g_1 | 49974 |
| 1991_Human_coronavirus_HKU1_g_2 | 49975 |
| 1991_Human_coronavirus_HKU1_g_3 | 49976 |
| 1991_Human_coronavirus_HKU1_g_4 | 49977 |
| 1991_Human_coronavirus_HKU1_g_5 | 49978 |
| 1992_Human_coronavirus_HKU1_g_1 | 49979 |
| 1992_Human_coronavirus_HKU1_g_2 | 49980 |
| 1992_Human_coronavirus_HKU1_g_3 | 49981 |
| 1992_Human_coronavirus_HKU1_g_4 | 49982 |
| 1992_Human_coronavirus_HKU1_g_5 | 49983 |
| 1993_Human_coronavirus_HKU1_g_1 | 49984 |
| 1993_Human_coronavirus_HKU1_g_2 | 49985 |
| 1993_Human_coronavirus_HKU1_g_3 | 49986 |
| 1993_Human_coronavirus_HKU1_g_4 | 49987 |
| 1993_Human_coronavirus_HKU1_g_5 | 49988 |
| 1994_Human_coronavirus_HKU1_g_1 | 49989 |
| 1994_Human_coronavirus_HKU1_g_2 | 49990 |
| 1994_Human_coronavirus_HKU1_g_3 | 49991 |
| 1994_Human_coronavirus_HKU1_g_4 | 49992 |
| 1994_Human_coronavirus_HKU1_g_5 | 49993 |
| 1995_Human_coronavirus_HKU1_g_1 | 49994 |
| 1995_Human_coronavirus_HKU1_g_2 | 49995 |
| 1995_Human_coronavirus_HKU1_g_3 | 49996 |
| 1995_Human_coronavirus_HKU1_g_4 | 49997 |
| 1995_Human_coronavirus_HKU1_g_5 | 49998 |
| 1996_Human_coronavirus_HKU1_g_1 | 49999 |
| 1996_Human_coronavirus_HKU1_g_2 | 50000 |
| 1996_Human_coronavirus_HKU1_g_3 | 50001 |
| 1996_Human_coronavirus_HKU1_g_4 | 50002 |
| 1996_Human_coronavirus_HKU1_g_5 | 50003 |
| 1997_Human_coronavirus_HKU1_g_1 | 50004 |
| 1997_Human_coronavirus_HKU1_g_2 | 50005 |
| 1997_Human_coronavirus_HKU1_g_3 | 50006 |
| 1997_Human_coronavirus_HKU1_g_4 | 50007 |
| 1997_Human_coronavirus_HKU1_g_5 | 50008 |
| 1998_Human_coronavirus_HKU1_g_1 | 50009 |
| 1998_Human_coronavirus_HKU1_g_2 | 50010 |
| 1998_Human_coronavirus_HKU1_g_3 | 50011 |
| 1998_Human_coronavirus_HKU1_g_4 | 50012 |
| 1998_Human_coronavirus_HKU1_g_5 | 50013 |
| 1999_Human_coronavirus_HKU1_g_1 | 50014 |
| 1999_Human_coronavirus_HKU1_g_2 | 50015 |
| 1999_Human_coronavirus_HKU1_g_3 | 50016 |
| 1999_Human_coronavirus_HKU1_g_4 | 50017 |
| 1999_Human_coronavirus_HKU1_g_5 | 50018 |
| 2000_Human_coronavirus_HKU1_g_1 | 50019 |
| 2000_Human_coronavirus_HKU1_g_2 | 50020 |
| 2000_Human_coronavirus_HKU1_g_3 | 50021 |
| 2000_Human_coronavirus_HKU1_g_4 | 50022 |
| 2000_Human_coronavirus_HKU1_g_5 | 50023 |
| 2001_Human_coronavirus_HKU1_g_1 | 50024 |
| 2001_Human_coronavirus_HKU1_g_2 | 50025 |
| 2001_Human_coronavirus_HKU1_g_3 | 50026 |
| 2001_Human_coronavirus_HKU1_g_4 | 50027 |
| 2001_Human_coronavirus_HKU1_g_5 | 50028 |
| 2002_Human_coronavirus_HKU1_g_1 | 50029 |
| 2002_Human_coronavirus_HKU1_g_2 | 50030 |
| 2002_Human_coronavirus_HKU1_g_3 | 50031 |
| 2002_Human_coronavirus_HKU1_g_4 | 50032 |
| 2002_Human_coronavirus_HKU1_g_5 | 50033 |
| 2003_Human_coronavirus_HKU1_g_1 | 50034 |
| 2003_Human_coronavirus_HKU1_g_2 | 50035 |
| 2003_Human_coronavirus_HKU1_g_3 | 50036 |
| 2003_Human_coronavirus_HKU1_g_4 | 50037 |
| 2003_Human_coronavirus_HKU1_g_5 | 50038 |
| 2004_Human_coronavirus_HKU1_g_1 | 50039 |
| 2004_Human_coronavirus_HKU1_g_2 | 50040 |
| 2004_Human_coronavirus_HKU1_g_3 | 50041 |
| 2004_Human_coronavirus_HKU1_g_4 | 50042 |
| 2004_Human_coronavirus_HKU1_g_5 | 50043 |
| 2005_Human_coronavirus_HKU1_g_1 | 50044 |
| 2005_Human_coronavirus_HKU1_g_2 | 50045 |
| 2005_Human_coronavirus_HKU1_g_3 | 50046 |
| 2005_Human_coronavirus_HKU1_g_4 | 50047 |
| 2005_Human_coronavirus_HKU1_g_5 | 50048 |
| 2006_Influenza_A_virus_(A/New_York/392/2004(H3N2))_{—} | 50049 |
| segment_3_g_1 | |
| 2006_Influenza_A_virus_(A/New_York/392/2004(H3N2))_{—} | 50050 |
| segment_3_g_2 | |
| 2006_Influenza_A_virus_(A/New_York/392/2004(H3N2))_{—} | 50051 |
| segment_3_g_3 | |
| 2006_Influenza_A_virus_(A/New_York/392/2004(H3N2))_{—} | 50052 |
| segment_3_g_4 | |
| 2006_Influenza_A_virus_(A/New_York/392/2004(H3N2))_{—} | 50053 |
| segment_3_g_5 | |
| 2007_Influenza_A_virus_(A/New_York/392/2004(H3N2))_{—} | 50054 |
| segment_3_g_1 | |
| 2007_Influenza_A_virus_(A/New_York/392/2004(H3N2))_{—} | 50055 |
| segment_3_g_2 | |
| 2007_Influenza_A_virus_(A/New_York/392/2004(H3N2))_{—} | 50056 |
| segment_3_g_3 | |
| 2007_Influenza_A_virus_(A/New_York/392/2004(H3N2))_{—} | 50057 |
| segment_3_g_4 | |
| 2007_Influenza_A_virus_(A/New_York/392/2004(H3N2))_{—} | 50058 |
| segment_3_g_5 | |
| 2008_Influenza_A_virus_(A/New_York/392/2004(H3N2))_{—} | 50059 |
| segment_3_g_1 | |
| 2008_Influenza_A_virus_(A/New_York/392/2004(H3N2))_{—} | 50060 |
| segment_3_g_2 | |
| 2008_Influenza_A_virus_(A/New_York/392/2004(H3N2))_{—} | 50061 |
| segment_3_g_3 | |
| 2008_Influenza_A_virus_(A/New_York/392/2004(H3N2))_{—} | 50062 |
| segment_3_g_4 | |
| 2008_Influenza_A_virus_(A/New_York/392/2004(H3N2))_{—} | 50063 |
| segment_3_g_5 | |
| 2009_Influenza_A_virus_(A/New_York/392/2004(H3N2))_{—} | 50064 |
| segment_3_g_1 | |
| 2009_Influenza_A_virus_(A/New_York/392/2004(H3N2))_{—} | 50065 |
| segment_3_g_2 | |
| 2009_Influenza_A_virus_(A/New_York/392/2004(H3N2))_{—} | 50066 |
| segment_3_g_3 | |
| 2009_Influenza_A_virus_(A/New_York/392/2004(H3N2))_{—} | 50067 |
| segment_3_g_4 | |
| 2009_Influenza_A_virus_(A/New_York/392/2004(H3N2))_{—} | 50068 |
| segment_3_g_5 | |
| 2010_Influenza_A_virus_(A/New_York/392/2004(H3N2))_{—} | 50069 |
| segment_3_g_1 | |
| 2010_Influenza_A_virus_(A/New_York/392/2004(H3N2))_{—} | 50070 |
| segment_3_g_2 | |
| 2010_Influenza_A_virus_(A/New_York/392/2004(H3N2))_{—} | 50071 |
| segment_3_g_3 | |
| 2010_Influenza_A_virus_(A/New_York/392/2004(H3N2))_{—} | 50072 |
| segment_3_g_4 | |
| 2010_Influenza_A_virus_(A/New_York/392/2004(H3N2))_{—} | 50073 |
| segment_3_g_5 | |
| 2011_Influenza_A_virus_(A/New_York/392/2004(H3N2))_{—} | 50074 |
| segment_3_g_1 | |
| 2011_Influenza_A_virus_(A/New_York/392/2004(H3N2))_{—} | 50075 |
| segment_3_g_2 | |
| 2011_Influenza_A_virus_(A/New_York/392/2004(H3N2))_{—} | 50076 |
| segment_3_g_3 | |
| 2011_Influenza_A_virus_(A/New_York/392/2004(H3N2))_{—} | 50077 |
| segment_3_g_4 | |
| 2011_Influenza_A_virus_(A/New_York/392/2004(H3N2))_{—} | 50078 |
| segment_3_g_5 | |
| 2012_Influenza_A_virus_(A/New_York/392/2004(H3N2))_{—} | 50079 |
| segment_3_g_1 | |
| 2012_Influenza_A_virus_(A/New_York/392/2004(H3N2))_{—} | 50080 |
| segment_3_g_2 | |
| 2012_Influenza_A_virus_(A/New_York/392/2004(H3N2))_{—} | 50081 |
| segment_3_g_3 | |
| 2012_Influenza_A_virus_(A/New_York/392/2004(H3N2))_{—} | 50082 |
| segment_3_g_4 | |
| 2012_Influenza_A_virus_(A/New_York/392/2004(H3N2))_{—} | 50083 |
| segment_3_g_5 | |
| 2013_Influenza_A_virus_(A/Hong_Kong/1073/99(H9N2))_{—} | 50084 |
| segment_5_g_1 | |
| 2013_Influenza_A_virus_(A/Hong_Kong/1073/99(H9N2))_{—} | 50085 |
| segment_5_g_2 | |
| 2013_Influenza_A_virus_(A/Hong_Kong/1073/99(H9N2))_{—} | 50086 |
| segment_5_g_3 | |
| 2013_Influenza_A_virus_(A/Hong_Kong/1073/99(H9N2))_{—} | 50087 |
| segment_5_g_4 | |
| 2013_Influenza_A_virus_(A/Hong_Kong/1073/99(H9N2))_{—} | 50088 |
| segment_5_g_5 | |
| 2014_Influenza_A_virus_(A/Hong_Kong/1073/99(H9N2))_{—} | 50089 |
| segment_5_g_1 | |
| 2014_Influenza_A_virus_(A/Hong_Kong/1073/99(H9N2))_{—} | 50090 |
| segment_5_g_2 | |
| 2014_Influenza_A_virus_(A/Hong_Kong/1073/99(H9N2))_{—} | 50091 |
| segment_5_g_3 | |
| 2014_Influenza_A_virus_(A/Hong_Kong/1073/99(H9N2))_{—} | 50092 |
| segment_5_g_4 | |
| 2014_Influenza_A_virus_(A/Hong_Kong/1073/99(H9N2))_{—} | 50093 |
| segment_5_g_5 | |
| 2015_Influenza_A_virus_(A/Hong_Kong/1073/99(H9N2))_{—} | 50094 |
| segment_5_g_1 | |
| 2015_Influenza_A_virus_(A/Hong_Kong/1073/99(H9N2))_{—} | 50095 |
| segment_5_g_2 | |
| 2015_Influenza_A_virus_(A/Hong_Kong/1073/99(H9N2))_{—} | 50096 |
| segment_5_g_3 | |
| 2015_Influenza_A_virus_(A/Hong_Kong/1073/99(H9N2))_{—} | 50097 |
| segment_5_g_4 | |
| 2015_Influenza_A_virus_(A/Hong_Kong/1073/99(H9N2))_{—} | 50098 |
| segment_5_g_5 | |
| 2016_Influenza_A_virus_(A/Hong_Kong/1073/99(H9N2))_{—} | 50099 |
| segment_5_g_1 | |
| 2016_Influenza_A_virus_(A/Hong_Kong/1073/99(H9N2))_{—} | 50100 |
| segment_5_g_2 | |
| 2016_Influenza_A_virus_(A/Hong_Kong/1073/99(H9N2))_{—} | 50101 |
| segment_5_g_3 | |
| 2016_Influenza_A_virus_(A/Hong_Kong/1073/99(H9N2))_{—} | 50102 |
| segment_5_g_4 | |
| 2016_Influenza_A_virus_(A/Hong_Kong/1073/99(H9N2))_{—} | 50103 |
| segment_5_g_5 | |
| 2017_Human_papillomavirus_type_132_g_1 | 50104 |
| 2017_Human_papillomavirus_type_132_g_2 | 50105 |
| 2017_Human_papillomavirus_type_132_g_3 | 50106 |
| 2017_Human_papillomavirus_type_132_g_4 | 50107 |
| 2017_Human_papillomavirus_type_132_g_5 | 50108 |
| 2018_Human_papillomavirus_type_132_g_1 | 50109 |
| 2018_Human_papillomavirus_type_132_g_2 | 50110 |
| 2018_Human_papillomavirus_type_132_g_3 | 50111 |
| 2018_Human_papillomavirus_type_132_g_4 | 50112 |
| 2018_Human_papillomavirus_type_132_g_5 | 50113 |
| 2019_Human_papillomavirus_type_132_g_1 | 50114 |
| 2019_Human_papillomavirus_type_132_g_2 | 50115 |
| 2019_Human_papillomavirus_type_132_g_3 | 50116 |
| 2019_Human_papillomavirus_type_132_g_4 | 50117 |
| 2019_Human_papillomavirus_type_132_g_5 | 50118 |
| 2020_Human_papillomavirus_type_132_g_1 | 50119 |
| 2020_Human_papillomavirus_type_132_g_2 | 50120 |
| 2020_Human_papillomavirus_type_132_g_3 | 50121 |
| 2020_Human_papillomavirus_type_132_g_4 | 50122 |
| 2020_Human_papillomavirus_type_132_g_5 | 50123 |
| 2021_Human_papillomavirus_type_132_g_1 | 50124 |
| 2021_Human_papillomavirus_type_132_g_2 | 50125 |
| 2021_Human_papillomavirus_type_132_g_3 | 50126 |
| 2021_Human_papillomavirus_type_132_g_4 | 50127 |
| 2021_Human_papillomavirus_type_132_g_5 | 50128 |
| 2022_Human_papillomavirus_type_132_g_1 | 50129 |
| 2022_Human_papillomavirus_type_132_g_2 | 50130 |
| 2022_Human_papillomavirus_type_132_g_3 | 50131 |
| 2022_Human_papillomavirus_type_132_g_4 | 50132 |
| 2022_Human_papillomavirus_type_132_g_5 | 50133 |
| 2023_Human_papillomavirus_type_132_g_1 | 50134 |
| 2023_Human_papillomavirus_type_132_g_2 | 50135 |
| 2023_Human_papillomavirus_type_132_g_3 | 50136 |
| 2023_Human_papillomavirus_type_132_g_4 | 50137 |
| 2023_Human_papillomavirus_type_132_g_5 | 50138 |
| 2024_Human_papillomavirus_type_132_g_1 | 50139 |
| 2024_Human_papillomavirus_type_132_g_2 | 50140 |
| 2024_Human_papillomavirus_type_132_g_3 | 50141 |
| 2024_Human_papillomavirus_type_132_g_4 | 50142 |
| 2024_Human_papillomavirus_type_132_g_5 | 50143 |
| 2025_Human_papillomavirus_type_132_g_1 | 50144 |
| 2025_Human_papillomavirus_type_132_g_2 | 50145 |
| 2025_Human_papillomavirus_type_132_g_3 | 50146 |
| 2025_Human_papillomavirus_type_132_g_4 | 50147 |
| 2025_Human_papillomavirus_type_132_g_5 | 50148 |
| 2026_Human_papillomavirus_type_132_g_1 | 50149 |
| 2026_Human_papillomavirus_type_132_g_2 | 50150 |
| 2026_Human_papillomavirus_type_132_g_3 | 50151 |
| 2026_Human_papillomavirus_type_132_g_4 | 50152 |
| 2026_Human_papillomavirus_type_132_g_5 | 50153 |
| 2027_Human_papillomavirus_type_132_g_1 | 50154 |
| 2027_Human_papillomavirus_type_132_g_2 | 50155 |
| 2027_Human_papillomavirus_type_132_g_3 | 50156 |
| 2027_Human_papillomavirus_type_132_g_4 | 50157 |
| 2027_Human_papillomavirus_type_132_g_5 | 50158 |
| 2028_Human_papillomavirus_type_132_g_1 | 50159 |
| 2028_Human_papillomavirus_type_132_g_2 | 50160 |
| 2028_Human_papillomavirus_type_132_g_3 | 50161 |
| 2028_Human_papillomavirus_type_132_g_4 | 50162 |
| 2028_Human_papillomavirus_type_132_g_5 | 50163 |
| 2029_Human_papillomavirus_type_132_g_1 | 50164 |
| 2029_Human_papillomavirus_type_132_g_2 | 50165 |
| 2029_Human_papillomavirus_type_132_g_3 | 50166 |
| 2029_Human_papillomavirus_type_132_g_4 | 50167 |
| 2029_Human_papillomavirus_type_132_g_5 | 50168 |
| 2030_Influenza_A_virus_(A/California/07/2009(H1N1))_{—} | 50169 |
| segment_3_polymerase_PA_(PA)_gene_g_1 | |
| 2030_Influenza_A_virus_(A/California/07/2009(H1N1))_{—} | 50170 |
| segment_3_polymerase_PA_(PA)_gene_g_2 | |
| 2030_Influenza_A_virus_(A/California/07/2009(H1N1))_{—} | 50171 |
| segment_3_polymerase_PA_(PA)_gene_g_3 | |
| 2030_Influenza_A_virus_(A/California/07/2009(H1N1))_{—} | 50172 |
| segment_3_polymerase_PA_(PA)_gene_g_4 | |
| 2030_Influenza_A_virus_(A/California/07/2009(H1N1))_{—} | 50173 |
| segment_3_polymerase_PA_(PA)_gene_g_5 | |
| 2031_Influenza_A_virus_(A/California/07/2009(H1N1))_{—} | 50174 |
| segment_3_polymerase_PA_(PA)_gene_g_1 | |
| 2031_Influenza_A_virus_(A/California/07/2009(H1N1))_{—} | 50175 |
| segment_3_polymerase_PA_(PA)_gene_g_2 | |
| 2031_Influenza_A_virus_(A/California/07/2009(H1N1))_{—} | 50176 |
| segment_3_polymerase_PA_(PA)_gene_g_3 | |
| 2031_Influenza_A_virus_(A/California/07/2009(H1N1))_{—} | 50177 |
| segment_3_polymerase_PA_(PA)_gene_g_4 | |
| 2031_Influenza_A_virus_(A/California/07/2009(H1N1))_{—} | 50178 |
| segment_3_polymerase_PA_(PA)_gene_g_5 | |
| 2032_Influenza_A_virus_(A/California/07/2009(H1N1))_{—} | 50179 |
| segment_3_polymerase_PA_(PA)_gene_g_1 | |
| 2032_Influenza_A_virus_(A/California/07/2009(H1N1))_{—} | 50180 |
| segment_3_polymerase_PA_(PA)_gene_g_2 | |
| 2032_Influenza_A_virus_(A/California/07/2009(H1N1))_{—} | 50181 |
| segment_3_polymerase_PA_(PA)_gene_g_3 | |
| 2032_Influenza_A_virus_(A/California/07/2009(H1N1))_{—} | 50182 |
| segment_3_polymerase_PA_(PA)_gene_g_4 | |
| 2032_Influenza_A_virus_(A/California/07/2009(H1N1))_{—} | 50183 |
| segment_3_polymerase_PA_(PA)_gene_g_5 | |
| 2033_Influenza_A_virus_(A/California/07/2009(H1N1))_{—} | 50184 |
| segment_3_polymerase_PA_(PA)_gene_g_1 | |
| 2033_Influenza_A_virus_(A/California/07/2009(H1N1))_{—} | 50185 |
| segment_3_polymerase_PA_(PA)_gene_g_2 | |
| 2033_Influenza_A_virus_(A/California/07/2009(H1N1))_{—} | 50186 |
| segment_3_polymerase_PA_(PA)_gene_g_3 | |
| 2033_Influenza_A_virus_(A/California/07/2009(H1N1))_{—} | 50187 |
| segment_3_polymerase_PA_(PA)_gene_g_4 | |
| 2033_Influenza_A_virus_(A/California/07/2009(H1N1))_{—} | 50188 |
| segment_3_polymerase_PA_(PA)_gene_g_5 | |
| 2034_Influenza_A_virus_(A/California/07/2009(H1N1))_{—} | 50189 |
| segment_3_polymerase_PA_(PA)_gene_g_1 | |
| 2034_Influenza_A_virus_(A/California/07/2009(H1N1))_{—} | 50190 |
| segment_3_polymerase_PA_(PA)_gene_g_2 | |
| 2034_Influenza_A_virus_(A/California/07/2009(H1N1))_{—} | 50191 |
| segment_3_polymerase_PA_(PA)_gene_g_3 | |
| 2034_Influenza_A_virus_(A/California/07/2009(H1N1))_{—} | 50192 |
| segment_3_polymerase_PA_(PA)_gene_g_4 | |
| 2034_Influenza_A_virus_(A/California/07/2009(H1N1))_{—} | 50193 |
| segment_3_polymerase_PA_(PA)_gene_g_5 | |
| 2035_Influenza_A_virus_(A/California/07/2009(H1N1))_{—} | 50194 |
| segment_3_polymerase_PA_(PA)_gene_g_1 | |
| 2035_Influenza_A_virus_(A/California/07/2009(H1N1))_{—} | 50195 |
| segment_3_polymerase_PA_(PA)_gene_g_2 | |
| 2035_Influenza_A_virus_(A/California/07/2009(H1N1))_{—} | 50196 |
| segment_3_polymerase_PA_(PA)_gene_g_3 | |
| 2035_Influenza_A_virus_(A/California/07/2009(H1N1))_{—} | 50197 |
| segment_3_polymerase_PA_(PA)_gene_g_4 | |
| 2035_Influenza_A_virus_(A/California/07/2009(H1N1))_{—} | 50198 |
| segment_3_polymerase_PA_(PA)_gene_g_5 | |
| 2036_Influenza_A_virus_(A/California/07/2009(H1N1))_{—} | 50199 |
| segment_3_polymerase_PA_(PA)_gene_g_1 | |
| 2036_Influenza_A_virus_(A/California/07/2009(H1N1))_{—} | 50200 |
| segment_3_polymerase_PA_(PA)_gene_g_2 | |
| 2036_Influenza_A_virus_(A/California/07/2009(H1N1))_{—} | 50201 |
| segment_3_polymerase_PA_(PA)_gene_g_3 | |
| 2036_Influenza_A_virus_(A/California/07/2009(H1N1))_{—} | 50202 |
| segment_3_polymerase_PA_(PA)_gene_g_4 | |
| 2036_Influenza_A_virus_(A/California/07/2009(H1N1))_{—} | 50203 |
| segment_3_polymerase_PA_(PA)_gene_g_5 | |
| 2037_Influenza_A_virus_(A/goose/Guangdong/1/1996(H5N1))_{—} | 50204 |
| segment_8_g_1 | |
| 2037_Influenza_A_virus_(A/goose/Guangdong/1/1996(H5N1))_{—} | 50205 |
| segment_8_g_2 | |
| 2037_Influenza_A_virus_(A/goose/Guangdong/1/1996(H5N1))_{—} | 50206 |
| segment_8_g_3 | |
| 2037_Influenza_A_virus_(A/goose/Guangdong/1/1996(H5N1))_{—} | 50207 |
| segment_8_g_4 | |
| 2037_Influenza_A_virus_(A/goose/Guangdong/1/1996(H5N1))_{—} | 50208 |
| segment_8_g_5 | |
| 2038_Influenza_A_virus_(A/goose/Guangdong/1/1996(H5N1))_{—} | 50209 |
| segment_8_g_1 | |
| 2038_Influenza_A_virus_(A/goose/Guangdong/1/1996(H5N1))_{—} | 50210 |
| segment_8_g_2 | |
| 2038_Influenza_A_virus_(A/goose/Guangdong/1/1996(H5N1))_{—} | 50211 |
| segment_8_g_3 | |
| 2038_Influenza_A_virus_(A/goose/Guangdong/1/1996(H5N1))_{—} | 50212 |
| segment_8_g_4 | |
| 2038_Influenza_A_virus_(A/goose/Guangdong/1/1996(H5N1))_{—} | 50213 |
| segment_8_g_5 | |
| 2039_Influenza_A_virus_(A/goose/Guangdong/1/1996(H5N1))_{—} | 50214 |
| segment_8_g_1 | |
| 2039_Influenza_A_virus_(A/goose/Guangdong/1/1996(H5N1))_{—} | 50215 |
| segment_8_g_2 | |
| 2039_Influenza_A_virus_(A/goose/Guangdong/1/1996(H5N1))_{—} | 50216 |
| segment_8_g_3 | |
| 2039_Influenza_A_virus_(A/goose/Guangdong/1/1996(H5N1))_{—} | 50217 |
| segment_8_g_4 | |
| 2039_Influenza_A_virus_(A/goose/Guangdong/1/1996(H5N1))_{—} | 50218 |
| segment_8_g_5 | |
| 2040_Influenza_A_virus_pb1_gene_for_polymerase_Pb1_g_1 | 50219 |
| 2040_Influenza_A_virus_pb1_gene_for_polymerase_Pb1_g_2 | 50220 |
| 2040_Influenza_A_virus_pb1_gene_for_polymerase_Pb1_g_3 | 50221 |
| 2040_Influenza_A_virus_pb1_gene_for_polymerase_Pb1_g_4 | 50222 |
| 2040_Influenza_A_virus_pb1_gene_for_polymerase_Pb1_g_5 | 50223 |
| 2041_Influenza_A_virus_pb1_gene_for_polymerase_Pb1_g_1 | 50224 |
| 2041_Influenza_A_virus_pb1_gene_for_polymerase_Pb1_g_2 | 50225 |
| 2041_Influenza_A_virus_pb1_gene_for_polymerase_Pb1_g_3 | 50226 |
| 2041_Influenza_A_virus_pb1_gene_for_polymerase_Pb1_g_4 | 50227 |
| 2041_Influenza_A_virus_pb1_gene_for_polymerase_Pb1_g_5 | 50228 |
| 2042_Influenza_A_virus_pb1_gene_for_polymerase_Pb1_g_1 | 50229 |
| 2042_Influenza_A_virus_pb1_gene_for_polymerase_Pb1_g_2 | 50230 |
| 2042_Influenza_A_virus_pb1_gene_for_polymerase_Pb1_g_3 | 50231 |
| 2042_Influenza_A_virus_pb1_gene_for_polymerase_Pb1_g_4 | 50232 |
| 2042_Influenza_A_virus_pb1_gene_for_polymerase_Pb1_g_5 | 50233 |
| 2043_Influenza_A_virus_pb1_gene_for_polymerase_Pb1_g_1 | 50234 |
| 2043_Influenza_A_virus_pb1_gene_for_polymerase_Pb1_g_2 | 50235 |
| 2043_Influenza_A_virus_pb1_gene_for_polymerase_Pb1_g_3 | 50236 |
| 2043_Influenza_A_virus_pb1_gene_for_polymerase_Pb1_g_4 | 50237 |
| 2043_Influenza_A_virus_pb1_gene_for_polymerase_Pb1_g_5 | 50238 |
| 2044_Influenza_A_virus_pb1_gene_for_polymerase_Pb1_g_1 | 50239 |
| 2044_Influenza_A_virus_pb1_gene_for_polymerase_Pb1_g_2 | 50240 |
| 2044_Influenza_A_virus_pb1_gene_for_polymerase_Pb1_g_3 | 50241 |
| 2044_Influenza_A_virus_pb1_gene_for_polymerase_Pb1_g_4 | 50242 |
| 2044_Influenza_A_virus_pb1_gene_for_polymerase_Pb1_g_5 | 50243 |
| 2045_Human_papillomavirus_type_85_isolate_114B_g_1 | 50244 |
| 2045_Human_papillomavirus_type_85_isolate_114B_g_2 | 50245 |
| 2045_Human_papillomavirus_type_85_isolate_114B_g_3 | 50246 |
| 2045_Human_papillomavirus_type_85_isolate_114B_g_4 | 50247 |
| 2045_Human_papillomavirus_type_85_isolate_114B_g_5 | 50248 |
| 2046_Human_papillomavirus_type_85_isolate_114B_g_1 | 50249 |
| 2046_Human_papillomavirus_type_85_isolate_114B_g_2 | 50250 |
| 2046_Human_papillomavirus_type_85_isolate_114B_g_3 | 50251 |
| 2046_Human_papillomavirus_type_85_isolate_114B_g_4 | 50252 |
| 2046_Human_papillomavirus_type_85_isolate_114B_g_5 | 50253 |
| 2047_Human_papillomavirus_type_85_isolate_114B_g_1 | 50254 |
| 2047_Human_papillomavirus_type_85_isolate_114B_g_2 | 50255 |
| 2047_Human_papillomavirus_type_85_isolate_114B_g_3 | 50256 |
| 2047_Human_papillomavirus_type_85_isolate_114B_g_4 | 50257 |
| 2047_Human_papillomavirus_type_85_isolate_114B_g_5 | 50258 |
| 2048_Human_papillomavirus_type_85_isolate_114B_g_1 | 50259 |
| 2048_Human_papillomavirus_type_85_isolate_114B_g_2 | 50260 |
| 2048_Human_papillomavirus_type_85_isolate_114B_g_3 | 50261 |
| 2048_Human_papillomavirus_type_85_isolate_114B_g_4 | 50262 |
| 2048_Human_papillomavirus_type_85_isolate_114B_g_5 | 50263 |
| 2049_Human_papillomavirus_type_85_isolate_114B_g_1 | 50264 |
| 2049_Human_papillomavirus_type_85_isolate_114B_g_2 | 50265 |
| 2049_Human_papillomavirus_type_85_isolate_114B_g_3 | 50266 |
| 2049_Human_papillomavirus_type_85_isolate_114B_g_4 | 50267 |
| 2049_Human_papillomavirus_type_85_isolate_114B_g_5 | 50268 |
| 2050_Human_papillomavirus_type_85_isolate_114B_g_1 | 50269 |
| 2050_Human_papillomavirus_type_85_isolate_114B_g_2 | 50270 |
| 2050_Human_papillomavirus_type_85_isolate_114B_g_3 | 50271 |
| 2050_Human_papillomavirus_type_85_isolate_114B_g_4 | 50272 |
| 2050_Human_papillomavirus_type_85_isolate_114B_g_5 | 50273 |
| 2051_Human_papillomavirus_type_85_isolate_114B_g_1 | 50274 |
| 2051_Human_papillomavirus_type_85_isolate_114B_g_2 | 50275 |
| 2051_Human_papillomavirus_type_85_isolate_114B_g_3 | 50276 |
| 2051_Human_papillomavirus_type_85_isolate_114B_g_4 | 50277 |
| 2051_Human_papillomavirus_type_85_isolate_114B_g_5 | 50278 |
| 2052_Human_papillomavirus_type_85_isolate_114B_g_1 | 50279 |
| 2052_Human_papillomavirus_type_85_isolate_114B_g_2 | 50280 |
| 2052_Human_papillomavirus_type_85_isolate_114B_g_3 | 50281 |
| 2052_Human_papillomavirus_type_85_isolate_114B_g_4 | 50282 |
| 2052_Human_papillomavirus_type_85_isolate_114B_g_5 | 50283 |
| 2053_Human_papillomavirus_type_85_isolate_114B_g_1 | 50284 |
| 2053_Human_papillomavirus_type_85_isolate_114B_g_2 | 50285 |
| 2053_Human_papillomavirus_type_85_isolate_114B_g_3 | 50286 |
| 2053_Human_papillomavirus_type_85_isolate_114B_g_4 | 50287 |
| 2053_Human_papillomavirus_type_85_isolate_114B_g_5 | 50288 |
| 2054_Human_papillomavirus_type_85_isolate_114B_g_1 | 50289 |
| 2054_Human_papillomavirus_type_85_isolate_114B_g_2 | 50290 |
| 2054_Human_papillomavirus_type_85_isolate_114B_g_3 | 50291 |
| 2054_Human_papillomavirus_type_85_isolate_114B_g_4 | 50292 |
| 2054_Human_papillomavirus_type_85_isolate_114B_g_5 | 50293 |
| 2055_Human_papillomavirus_type_85_isolate_114B_g_1 | 50294 |
| 2055_Human_papillomavirus_type_85_isolate_114B_g_2 | 50295 |
| 2055_Human_papillomavirus_type_85_isolate_114B_g_3 | 50296 |
| 2055_Human_papillomavirus_type_85_isolate_114B_g_4 | 50297 |
| 2055_Human_papillomavirus_type_85_isolate_114B_g_5 | 50298 |
| 2056_Human_papillomavirus_type_85_isolate_114B_g_1 | 50299 |
| 2056_Human_papillomavirus_type_85_isolate_114B_g_2 | 50300 |
| 2056_Human_papillomavirus_type_85_isolate_114B_g_3 | 50301 |
| 2056_Human_papillomavirus_type_85_isolate_114B_g_4 | 50302 |
| 2056_Human_papillomavirus_type_85_isolate_114B_g_5 | 50303 |
| 2057_Human_papillomavirus_type_85_isolate_114B_g_1 | 50304 |
| 2057_Human_papillomavirus_type_85_isolate_114B_g_2 | 50305 |
| 2057_Human_papillomavirus_type_85_isolate_114B_g_3 | 50306 |
| 2057_Human_papillomavirus_type_85_isolate_114B_g_4 | 50307 |
| 2057_Human_papillomavirus_type_85_isolate_114B_g_5 | 50308 |
| 2058_Influenza_A_virus_(A/Shanghai/02/2013(H7N9))_{—} | 50309 |
| segment_6_neuraminidase_(NA)_gene_g_1 | |
| 2058_Influenza_A_virus_(A/Shanghai/02/2013(H7N9))_{—} | 50310 |
| segment_6_neuraminidase_(NA)_gene_g_2 | |
| 2058_Influenza_A_virus_(A/Shanghai/02/2013(H7N9))_{—} | 50311 |
| segment_6_neuraminidase_(NA)_gene_g_3 | |
| 2058_Influenza_A_virus_(A/Shanghai/02/2013(H7N9))_{—} | 50312 |
| segment_6_neuraminidase_(NA)_gene_g_4 | |
| 2058_Influenza_A_virus_(A/Shanghai/02/2013(H7N9))_{—} | 50313 |
| segment_6_neuraminidase_(NA)_gene_g_5 | |
| 2059_Influenza_A_virus_(A/Shanghai/02/2013(H7N9))_{—} | 50314 |
| segment_6_neuraminidase_(NA)_gene_g_1 | |
| 2059_Influenza_A_virus_(A/Shanghai/02/2013(H7N9))_{—} | 50315 |
| segment_6_neuraminidase_(NA)_gene_g_2 | |
| 2059_Influenza_A_virus_(A/Shanghai/02/2013(H7N9))_{—} | 50316 |
| segment_6_neuraminidase_(NA)_gene_g_3 | |
| 2059_Influenza_A_virus_(A/Shanghai/02/2013(H7N9))_{—} | 50317 |
| segment_6_neuraminidase_(NA)_gene_g_4 | |
| 2059_Influenza_A_virus_(A/Shanghai/02/2013(H7N9))_{—} | 50318 |
| segment_6_neuraminidase_(NA)_gene_g_5 | |
| 2060_Influenza_A_virus_(A/Shanghai/02/2013(H7N9))_{—} | 50319 |
| segment_6_neuraminidase_(NA)_gene_g_1 | |
| 2060_Influenza_A_virus_(A/Shanghai/02/2013(H7N9))_{—} | 50320 |
| segment_6_neuraminidase_(NA)_gene_g_2 | |
| 2060_Influenza_A_virus_(A/Shanghai/02/2013(H7N9))_{—} | 50321 |
| segment_6_neuraminidase_(NA)_gene_g_3 | |
| 2060_Influenza_A_virus_(A/Shanghai/02/2013(H7N9))_{—} | 50322 |
| segment_6_neuraminidase_(NA)_gene_g_4 | |
| 2060_Influenza_A_virus_(A/Shanghai/02/2013(H7N9))_{—} | 50323 |
| segment_6_neuraminidase_(NA)_gene_g_5 | |
| 2061_Influenza_A_virus_(A/Shanghai/02/2013(H7N9))_{—} | 50324 |
| segment_6_neuraminidase_(NA)_gene_g_1 | |
| 2061_Influenza_A_virus_(A/Shanghai/02/2013(H7N9))_{—} | 50325 |
| segment_6_neuraminidase_(NA)_gene_g_2 | |
| 2061_Influenza_A_virus_(A/Shanghai/02/2013(H7N9))_{—} | 50326 |
| segment_6_neuraminidase_(NA)_gene_g_3 | |
| 2061_Influenza_A_virus_(A/Shanghai/02/2013(H7N9))_{—} | 50327 |
| segment_6_neuraminidase_(NA)_gene_g_4 | |
| 2061_Influenza_A_virus_(A/Shanghai/02/2013(H7N9))_{—} | 50328 |
| segment_6_neuraminidase_(NA)_gene_g_5 | |
| 2062_Influenza_A_virus_(A/California/07/2009(H1N1))_{—} | 50329 |
| segment_1_polymerase_PB2_(PB2)_gene_g_1 | |
| 2062_Influenza_A_virus_(A/California/07/2009(H1N1))_{—} | 50330 |
| segment_1_polymerase_PB2_(PB2)_gene_g_2 | |
| 2062_Influenza_A_virus_(A/California/07/2009(H1N1))_{—} | 50331 |
| segment_1_polymerase_PB2_(PB2)_gene_g_3 | |
| 2062_Influenza_A_virus_(A/California/07/2009(H1N1))_{—} | 50332 |
| segment_1_polymerase_PB2_(PB2)_gene_g_4 | |
| 2062_Influenza_A_virus_(A/California/07/2009(H1N1))_{—} | 50333 |
| segment_1_polymerase_PB2_(PB2)_gene_g_5 | |
| 2063_Influenza_A_virus_(A/California/07/2009(H1N1))_{—} | 50334 |
| segment_1_polymerase_PB2_(PB2)_gene_g_1 | |
| 2063_Influenza_A_virus_(A/California/07/2009(H1N1))_{—} | 50335 |
| segment_1_polymerase_PB2_(PB2)_gene_g_2 | |
| 2063_Influenza_A_virus_(A/California/07/2009(H1N1))_{—} | 50336 |
| segment_1_polymerase_PB2_(PB2)_gene_g_3 | |
| 2063_Influenza_A_virus_(A/California/07/2009(H1N1))_{—} | 50337 |
| segment_1_polymerase_PB2_(PB2)_gene_g_4 | |
| 2063_Influenza_A_virus_(A/California/07/2009(H1N1))_{—} | 50338 |
| segment_1_polymerase_PB2_(PB2)_gene_g_5 | |
| 2064_Influenza_A_virus_(A/California/07/2009(H1N1))_{—} | 50339 |
| segment_1_polymerase_PB2_(PB2)_gene_g_1 | |
| 2064_Influenza_A_virus_(A/California/07/2009(H1N1))_{—} | 50340 |
| segment_1_polymerase_PB2_(PB2)_gene_g_2 | |
| 2064_Influenza_A_virus_(A/California/07/2009(H1N1))_{—} | 50341 |
| segment_1_polymerase_PB2_(PB2)_gene_g_3 | |
| 2064_Influenza_A_virus_(A/California/07/2009(H1N1))_{—} | 50342 |
| segment_1_polymerase_PB2_(PB2)_gene_g_4 | |
| 2064_Influenza_A_virus_(A/California/07/2009(H1N1))_{—} | 50343 |
| segment_1_polymerase_PB2_(PB2)_gene_g_5 | |
| 2065_Influenza_A_virus_(A/California/07/2009(H1N1))_{—} | 50344 |
| segment_1_polymerase_PB2_(PB2)_gene_g_1 | |
| 2065_Influenza_A_virus_(A/California/07/2009(H1N1))_{—} | 50345 |
| segment_1_polymerase_PB2_(PB2)_gene_g_2 | |
| 2065_Influenza_A_virus_(A/California/07/2009(H1N1))_{—} | 50346 |
| segment_1_polymerase_PB2_(PB2)_gene_g_3 | |
| 2065_Influenza_A_virus_(A/California/07/2009(H1N1))_{—} | 50347 |
| segment_1_polymerase_PB2_(PB2)_gene_g_4 | |
| 2065_Influenza_A_virus_(A/California/07/2009(H1N1))_{—} | 50348 |
| segment_1_polymerase_PB2_(PB2)_gene_g_5 | |
| 2066_Influenza_A_virus_(A/California/07/2009(H1N1))_{—} | 50349 |
| segment_1_polymerase_PB2_(PB2)_gene_g_1 | |
| 2066_Influenza_A_virus_(A/California/07/2009(H1N1))_{—} | 50350 |
| segment_1_polymerase_PB2_(PB2)_gene_g_2 | |
| 2066_Influenza_A_virus_(A/California/07/2009(H1N1))_{—} | 50351 |
| segment_1_polymerase_PB2_(PB2)_gene_g_3 | |
| 2066_Influenza_A_virus_(A/California/07/2009(H1N1))_{—} | 50352 |
| segment_1_polymerase_PB2_(PB2)_gene_g_4 | |
| 2066_Influenza_A_virus_(A/California/07/2009(H1N1))_{—} | 50353 |
| segment_1_polymerase_PB2_(PB2)_gene_g_5 | |
| 2067_Influenza_A_virus_(A/California/07/2009(H1N1))_{—} | 50354 |
| segment_1_polymerase_PB2_(PB2)_gene_g_1 | |
| 2067_Influenza_A_virus_(A/California/07/2009(H1N1))_{—} | 50355 |
| segment_1_polymerase_PB2_(PB2)_gene_g_2 | |
| 2067_Influenza_A_virus_(A/California/07/2009(H1N1))_{—} | 50356 |
| segment_1_polymerase_PB2_(PB2)_gene_g_3 | |
| 2067_Influenza_A_virus_(A/California/07/2009(H1N1))_{—} | 50357 |
| segment_1_polymerase_PB2_(PB2)_gene_g_4 | |
| 2067_Influenza_A_virus_(A/California/07/2009(H1N1))_{—} | 50358 |
| segment_1_polymerase_PB2_(PB2)_gene_g_5 | |
| 2068_Influenza_A_virus_(A/California/07/2009(H1N1))_{—} | 50359 |
| segment_1_polymerase_PB2_(PB2)_gene_g_1 | |
| 2068_Influenza_A_virus_(A/California/07/2009(H1N1))_{—} | 50360 |
| segment_1_polymerase_PB2_(PB2)_gene_g_2 | |
| 2068_Influenza_A_virus_(A/California/07/2009(H1N1))_{—} | 50361 |
| segment_1_polymerase_PB2_(PB2)_gene_g_3 | |
| 2068_Influenza_A_virus_(A/California/07/2009(H1N1))_{—} | 50362 |
| segment_1_polymerase_PB2_(PB2)_gene_g_4 | |
| 2068_Influenza_A_virus_(A/California/07/2009(H1N1))_{—} | 50363 |
| segment_1_polymerase_PB2_(PB2)_gene_g_5 | |
| 2069_Influenza_A_virus_(A/California/07/2009(H1N1))_{—} | 50364 |
| segment_1_polymerase_PB2_(PB2)_gene_g_1 | |
| 2069_Influenza_A_virus_(A/California/07/2009(H1N1))_{—} | 50365 |
| segment_1_polymerase_PB2_(PB2)_gene_g_2 | |
| 2069_Influenza_A_virus_(A/California/07/2009(H1N1))_{—} | 50366 |
| segment_1_polymerase_PB2_(PB2)_gene_g_3 | |
| 2069_Influenza_A_virus_(A/California/07/2009(H1N1))_{—} | 50367 |
| segment_1_polymerase_PB2_(PB2)_gene_g_4 | |
| 2069_Influenza_A_virus_(A/California/07/2009(H1N1))_{—} | 50368 |
| segment_1_polymerase_PB2_(PB2)_gene_g_5 | |
| 2070_Human_papillomavirus_KC5_g_1 | 50369 |
| 2070_Human_papillomavirus_KC5_g_2 | 50370 |
| 2070_Human_papillomavirus_KC5_g_3 | 50371 |
| 2070_Human_papillomavirus_KC5_g_4 | 50372 |
| 2070_Human_papillomavirus_KC5_g_5 | 50373 |
| 2071_Human_papillomavirus_KC5_g_1 | 50374 |
| 2071_Human_papillomavirus_KC5_g_2 | 50375 |
| 2071_Human_papillomavirus_KC5_g_3 | 50376 |
| 2071_Human_papillomavirus_KC5_g_4 | 50377 |
| 2071_Human_papillomavirus_KC5_g_5 | 50378 |
| 2072_Human_papillomavirus_KC5_g_1 | 50379 |
| 2072_Human_papillomavirus_KC5_g_2 | 50380 |
| 2072_Human_papillomavirus_KC5_g_3 | 50381 |
| 2072_Human_papillomavirus_KC5_g_4 | 50382 |
| 2072_Human_papillomavirus_KC5_g_5 | 50383 |
| 2073_Human_papillomavirus_KC5_g_1 | 50384 |
| 2073_Human_papillomavirus_KC5_g_2 | 50385 |
| 2073_Human_papillomavirus_KC5_g_3 | 50386 |
| 2073_Human_papillomavirus_KC5_g_4 | 50387 |
| 2073_Human_papillomavirus_KC5_g_5 | 50388 |
| 2074_Human_papillomavirus_KC5_g_1 | 50389 |
| 2074_Human_papillomavirus_KC5_g_2 | 50390 |
| 2074_Human_papillomavirus_KC5_g_3 | 50391 |
| 2074_Human_papillomavirus_KC5_g_4 | 50392 |
| 2074_Human_papillomavirus_KC5_g_5 | 50393 |
| 2075_Human_papillomavirus_KC5_g_1 | 50394 |
| 2075_Human_papillomavirus_KC5_g_2 | 50395 |
| 2075_Human_papillomavirus_KC5_g_3 | 50396 |
| 2075_Human_papillomavirus_KC5_g_4 | 50397 |
| 2075_Human_papillomavirus_KC5_g_5 | 50398 |
| 2076_Human_papillomavirus_KC5_g_1 | 50399 |
| 2076_Human_papillomavirus_KC5_g_2 | 50400 |
| 2076_Human_papillomavirus_KC5_g_3 | 50401 |
| 2076_Human_papillomavirus_KC5_g_4 | 50402 |
| 2076_Human_papillomavirus_KC5_g_5 | 50403 |
| 2077_Human_papillomavirus_KC5_g_1 | 50404 |
| 2077_Human_papillomavirus_KC5_g_2 | 50405 |
| 2077_Human_papillomavirus_KC5_g_3 | 50406 |
| 2077_Human_papillomavirus_KC5_g_4 | 50407 |
| 2077_Human_papillomavirus_KC5_g_5 | 50408 |
| 2078_Human_papillomavirus_KC5_g_1 | 50409 |
| 2078_Human_papillomavirus_KC5_g_2 | 50410 |
| 2078_Human_papillomavirus_KC5_g_3 | 50411 |
| 2078_Human_papillomavirus_KC5_g_4 | 50412 |
| 2078_Human_papillomavirus_KC5_g_5 | 50413 |
| 2079_Human_papillomavirus_KC5_g_1 | 50414 |
| 2079_Human_papillomavirus_KC5_g_2 | 50415 |
| 2079_Human_papillomavirus_KC5_g_3 | 50416 |
| 2079_Human_papillomavirus_KC5_g_4 | 50417 |
| 2079_Human_papillomavirus_KC5_g_5 | 50418 |
| 2080_Human_papillomavirus_KC5_g_1 | 50419 |
| 2080_Human_papillomavirus_KC5_g_2 | 50420 |
| 2080_Human_papillomavirus_KC5_g_3 | 50421 |
| 2080_Human_papillomavirus_KC5_g_4 | 50422 |
| 2080_Human_papillomavirus_KC5_g_5 | 50423 |
| 2081_Human_papillomavirus_type_103_g_1 | 50424 |
| 2081_Human_papillomavirus_type_103_g_2 | 50425 |
| 2081_Human_papillomavirus_type_103_g_3 | 50426 |
| 2081_Human_papillomavirus_type_103_g_4 | 50427 |
| 2081_Human_papillomavirus_type_103_g_5 | 50428 |
| 2082_Human_papillomavirus_type_103_g_1 | 50429 |
| 2082_Human_papillomavirus_type_103_g_2 | 50430 |
| 2082_Human_papillomavirus_type_103_g_3 | 50431 |
| 2082_Human_papillomavirus_type_103_g_4 | 50432 |
| 2082_Human_papillomavirus_type_103_g_5 | 50433 |
| 2083_Human_papillomavirus_type_103_g_1 | 50434 |
| 2083_Human_papillomavirus_type_103_g_2 | 50435 |
| 2083_Human_papillomavirus_type_103_g_3 | 50436 |
| 2083_Human_papillomavirus_type_103_g_4 | 50437 |
| 2083_Human_papillomavirus_type_103_g_5 | 50438 |
| 2084_Human_papillomavirus_type_103_g_1 | 50439 |
| 2084_Human_papillomavirus_type_103_g_2 | 50440 |
| 2084_Human_papillomavirus_type_103_g_3 | 50441 |
| 2084_Human_papillomavirus_type_103_g_4 | 50442 |
| 2084_Human_papillomavirus_type_103_g_5 | 50443 |
| 2085_Human_papillomavirus_type_103_g_1 | 50444 |
| 2085_Human_papillomavirus_type_103_g_2 | 50445 |
| 2085_Human_papillomavirus_type_103_g_3 | 50446 |
| 2085_Human_papillomavirus_type_103_g_4 | 50447 |
| 2085_Human_papillomavirus_type_103_g_5 | 50448 |
| 2086_Human_papillomavirus_type_103_g_1 | 50449 |
| 2086_Human_papillomavirus_type_103_g_2 | 50450 |
| 2086_Human_papillomavirus_type_103_g_3 | 50451 |
| 2086_Human_papillomavirus_type_103_g_4 | 50452 |
| 2086_Human_papillomavirus_type_103_g_5 | 50453 |
| 2087_Human_papillomavirus_type_103_g_1 | 50454 |
| 2087_Human_papillomavirus_type_103_g_2 | 50455 |
| 2087_Human_papillomavirus_type_103_g_3 | 50456 |
| 2087_Human_papillomavirus_type_103_g_4 | 50457 |
| 2087_Human_papillomavirus_type_103_g_5 | 50458 |
| 2088_Human_papillomavirus_type_103_g_1 | 50459 |
| 2088_Human_papillomavirus_type_103_g_2 | 50460 |
| 2088_Human_papillomavirus_type_103_g_3 | 50461 |
| 2089_Human_papillomavirus_type_103_g_1 | 50462 |
| 2089_Human_papillomavirus_type_103_g_2 | 50463 |
| 2089_Human_papillomavirus_type_103_g_3 | 50464 |
| 2090_Human_papillomavirus_type_103_g_1 | 50465 |
| 2090_Human_papillomavirus_type_103_g_2 | 50466 |
| 2090_Human_papillomavirus_type_103_g_3 | 50467 |
| 2090_Human_papillomavirus_type_103_g_4 | 50468 |
| 2090_Human_papillomavirus_type_103_g_5 | 50469 |
| 2091_Human_papillomavirus_type_103_g_1 | 50470 |
| 2091_Human_papillomavirus_type_103_g_2 | 50471 |
| 2091_Human_papillomavirus_type_103_g_3 | 50472 |
| 2091_Human_papillomavirus_type_103_g_4 | 50473 |
| 2091_Human_papillomavirus_type_103_g_5 | 50474 |
| 2092_Human_papillomavirus_type_103_g_1 | 50475 |
| 2092_Human_papillomavirus_type_103_g_2 | 50476 |
| 2092_Human_papillomavirus_type_103_g_3 | 50477 |
| 2092_Human_papillomavirus_type_103_g_4 | 50478 |
| 2092_Human_papillomavirus_type_103_g_5 | 50479 |
| 2093_Human_papillomavirus_type_103_g_1 | 50480 |
| 2093_Human_papillomavirus_type_103_g_2 | 50481 |
| 2093_Human_papillomavirus_type_103_g_3 | 50482 |
| 2093_Human_papillomavirus_type_103_g_4 | 50483 |
| 2093_Human_papillomavirus_type_103_g_5 | 50484 |
| 2094_Human_papillomavirus_type_103_g_1 | 50485 |
| 2094_Human_papillomavirus_type_103_g_2 | 50486 |
| 2094_Human_papillomavirus_type_103_g_3 | 50487 |
| 2094_Human_papillomavirus_type_103_g_4 | 50488 |
| 2094_Human_papillomavirus_type_103_g_5 | 50489 |
| 2095_Human_papillomavirus_type_103_g_1 | 50490 |
| 2095_Human_papillomavirus_type_103_g_2 | 50491 |
| 2095_Human_papillomavirus_type_103_g_3 | 50492 |
| 2095_Human_papillomavirus_type_103_g_4 | 50493 |
| 2095_Human_papillomavirus_type_103_g_5 | 50494 |
| 2096_Human_papillomavirus_type_60_g_1 | 50495 |
| 2096_Human_papillomavirus_type_60_g_2 | 50496 |
| 2096_Human_papillomavirus_type_60_g_3 | 50497 |
| 2096_Human_papillomavirus_type_60_g_4 | 50498 |
| 2097_Human_papillomavirus_type_60_g_1 | 50499 |
| 2097_Human_papillomavirus_type_60_g_2 | 50500 |
| 2097_Human_papillomavirus_type_60_g_3 | 50501 |
| 2097_Human_papillomavirus_type_60_g_4 | 50502 |
| 2097_Human_papillomavirus_type_60_g_5 | 50503 |
| 2098_Human_papillomavirus_type_60_g_1 | 50504 |
| 2098_Human_papillomavirus_type_60_g_2 | 50505 |
| 2098_Human_papillomavirus_type_60_g_3 | 50506 |
| 2098_Human_papillomavirus_type_60_g_4 | 50507 |
| 2098_Human_papillomavirus_type_60_g_5 | 50508 |
| 2099_Human_papillomavirus_type_60_g_1 | 50509 |
| 2099_Human_papillomavirus_type_60_g_2 | 50510 |
| 2099_Human_papillomavirus_type_60_g_3 | 50511 |
| 2099_Human_papillomavirus_type_60_g_4 | 50512 |
| 2099_Human_papillomavirus_type_60_g_5 | 50513 |
| 2100_Human_papillomavirus_type_60_g_1 | 50514 |
| 2100_Human_papillomavirus_type_60_g_2 | 50515 |
| 2100_Human_papillomavirus_type_60_g_3 | 50516 |
| 2100_Human_papillomavirus_type_60_g_4 | 50517 |
| 2100_Human_papillomavirus_type_60_g_5 | 50518 |
| 2101_Human_papillomavirus_type_60_g_1 | 50519 |
| 2101_Human_papillomavirus_type_60_g_2 | 50520 |
| 2101_Human_papillomavirus_type_60_g_3 | 50521 |
| 2101_Human_papillomavirus_type_60_g_4 | 50522 |
| 2101_Human_papillomavirus_type_60_g_5 | 50523 |
| 2102_Human_papillomavirus_type_60_g_1 | 50524 |
| 2102_Human_papillomavirus_type_60_g_2 | 50525 |
| 2102_Human_papillomavirus_type_60_g_3 | 50526 |
| 2102_Human_papillomavirus_type_60_g_4 | 50527 |
| 2102_Human_papillomavirus_type_60_g_5 | 50528 |
| 2103_Human_papillomavirus_type_60_g_1 | 50529 |
| 2103_Human_papillomavirus_type_60_g_2 | 50530 |
| 2103_Human_papillomavirus_type_60_g_3 | 50531 |
| 2103_Human_papillomavirus_type_60_g_4 | 50532 |
| 2103_Human_papillomavirus_type_60_g_5 | 50533 |
| 2104_Human_papillomavirus_type_60_g_1 | 50534 |
| 2104_Human_papillomavirus_type_60_g_2 | 50535 |
| 2104_Human_papillomavirus_type_60_g_3 | 50536 |
| 2104_Human_papillomavirus_type_60_g_4 | 50537 |
| 2104_Human_papillomavirus_type_60_g_5 | 50538 |
| 2105_Human_papillomavirus_type_60_g_1 | 50539 |
| 2105_Human_papillomavirus_type_60_g_2 | 50540 |
| 2105_Human_papillomavirus_type_60_g_3 | 50541 |
| 2105_Human_papillomavirus_type_60_g_4 | 50542 |
| 2105_Human_papillomavirus_type_60_g_5 | 50543 |
| 2106_Human_papillomavirus_type_60_g_1 | 50544 |
| 2106_Human_papillomavirus_type_60_g_2 | 50545 |
| 2106_Human_papillomavirus_type_60_g_3 | 50546 |
| 2106_Human_papillomavirus_type_60_g_4 | 50547 |
| 2106_Human_papillomavirus_type_60_g_5 | 50548 |
| 2107_Human_papillomavirus_type_60_g_1 | 50549 |
| 2107_Human_papillomavirus_type_60_g_2 | 50550 |
| 2107_Human_papillomavirus_type_60_g_3 | 50551 |
| 2107_Human_papillomavirus_type_60_g_4 | 50552 |
| 2107_Human_papillomavirus_type_60_g_5 | 50553 |
| 2108_Human_papillomavirus_type_60_g_1 | 50554 |
| 2108_Human_papillomavirus_type_60_g_2 | 50555 |
| 2108_Human_papillomavirus_type_60_g_3 | 50556 |
| 2108_Human_papillomavirus_type_60_g_4 | 50557 |
| 2108_Human_papillomavirus_type_60_g_5 | 50558 |
| 2109_Human_papillomavirus_type_60_g_1 | 50559 |
| 2109_Human_papillomavirus_type_60_g_2 | 50560 |
| 2109_Human_papillomavirus_type_60_g_3 | 50561 |
| 2109_Human_papillomavirus_type_60_g_4 | 50562 |
| 2109_Human_papillomavirus_type_60_g_5 | 50563 |
| 2110_Human_herpesvirus_4_g_1 | 50564 |
| 2110_Human_herpesvirus_4_g_2 | 50565 |
| 2110_Human_herpesvirus_4_g_3 | 50566 |
| 2110_Human_herpesvirus_4_g_4 | 50567 |
| 2110_Human_herpesvirus_4_g_5 | 50568 |
| 2111_Human_herpesvirus_4_g_1 | 50569 |
| 2111_Human_herpesvirus_4_g_2 | 50570 |
| 2111_Human_herpesvirus_4_g_3 | 50571 |
| 2111_Human_herpesvirus_4_g_4 | 50572 |
| 2111_Human_herpesvirus_4_g_5 | 50573 |
| 2112_Human_herpesvirus_4_g_1 | 50574 |
| 2112_Human_herpesvirus_4_g_2 | 50575 |
| 2112_Human_herpesvirus_4_g_3 | 50576 |
| 2112_Human_herpesvirus_4_g_4 | 50577 |
| 2112_Human_herpesvirus_4_g_5 | 50578 |
| 2113_Human_herpesvirus_4_g_1 | 50579 |
| 2113_Human_herpesvirus_4_g_2 | 50580 |
| 2113_Human_herpesvirus_4_g_3 | 50581 |
| 2113_Human_herpesvirus_4_g_4 | 50582 |
| 2113_Human_herpesvirus_4_g_5 | 50583 |
| 2114_Human_herpesvirus_4_g_1 | 50584 |
| 2114_Human_herpesvirus_4_g_2 | 50585 |
| 2114_Human_herpesvirus_4_g_3 | 50586 |
| 2114_Human_herpesvirus_4_g_4 | 50587 |
| 2114_Human_herpesvirus_4_g_5 | 50588 |
| 2115_Human_herpesvirus_4_g_1 | 50589 |
| 2115_Human_herpesvirus_4_g_2 | 50590 |
| 2115_Human_herpesvirus_4_g_3 | 50591 |
| 2115_Human_herpesvirus_4_g_4 | 50592 |
| 2115_Human_herpesvirus_4_g_5 | 50593 |
| 2116_Human_herpesvirus_4_g_1 | 50594 |
| 2116_Human_herpesvirus_4_g_2 | 50595 |
| 2116_Human_herpesvirus_4_g_3 | 50596 |
| 2116_Human_herpesvirus_4_g_4 | 50597 |
| 2116_Human_herpesvirus_4_g_5 | 50598 |
| 2117_Human_herpesvirus_4_g_1 | 50599 |
| 2117_Human_herpesvirus_4_g_2 | 50600 |
| 2117_Human_herpesvirus_4_g_3 | 50601 |
| 2117_Human_herpesvirus_4_g_4 | 50602 |
| 2117_Human_herpesvirus_4_g_5 | 50603 |
| 2118_Human_herpesvirus_4_g_1 | 50604 |
| 2118_Human_herpesvirus_4_g_2 | 50605 |
| 2118_Human_herpesvirus_4_g_3 | 50606 |
| 2118_Human_herpesvirus_4_g_4 | 50607 |
| 2118_Human_herpesvirus_4_g_5 | 50608 |
| 2119_Human_herpesvirus_4_g_1 | 50609 |
| 2119_Human_herpesvirus_4_g_2 | 50610 |
| 2119_Human_herpesvirus_4_g_3 | 50611 |
| 2119_Human_herpesvirus_4_g_4 | 50612 |
| 2120_Human_herpesvirus_4_g_1 | 50613 |
| 2120_Human_herpesvirus_4_g_2 | 50614 |
| 2120_Human_herpesvirus_4_g_3 | 50615 |
| 2121_Human_herpesvirus_4_g_1 | 50616 |
| 2121_Human_herpesvirus_4_g_2 | 50617 |
| 2121_Human_herpesvirus_4_g_3 | 50618 |
| 2121_Human_herpesvirus_4_g_4 | 50619 |
| 2122_Human_herpesvirus_4_g_1 | 50620 |
| 2122_Human_herpesvirus_4_g_2 | 50621 |
| 2122_Human_herpesvirus_4_g_3 | 50622 |
| 2122_Human_herpesvirus_4_g_4 | 50623 |
| 2122_Human_herpesvirus_4_g_5 | 50624 |
| 2123_Human_herpesvirus_4_g_1 | 50625 |
| 2123_Human_herpesvirus_4_g_2 | 50626 |
| 2123_Human_herpesvirus_4_g_3 | 50627 |
| 2123_Human_herpesvirus_4_g_4 | 50628 |
| 2124_Human_herpesvirus_4_g_1 | 50629 |
| 2124_Human_herpesvirus_4_g_2 | 50630 |
| 2125_Human_herpesvirus_4_g_1 | 50631 |
| 2125_Human_herpesvirus_4_g_2 | 50632 |
| 2125_Human_herpesvirus_4_g_3 | 50633 |
| 2125_Human_herpesvirus_4_g_4 | 50634 |
| 2126_Human_herpesvirus_4_g_1 | 50635 |
| 2126_Human_herpesvirus_4_g_2 | 50636 |
| 2126_Human_herpesvirus_4_g_3 | 50637 |
| 2126_Human_herpesvirus_4_g_4 | 50638 |
| 2127_Human_herpesvirus_4_g_1 | 50639 |
| 2127_Human_herpesvirus_4_g_2 | 50640 |
| 2127_Human_herpesvirus_4_g_3 | 50641 |
| 2127_Human_herpesvirus_4_g_4 | 50642 |
| 2128_Human_herpesvirus_4_g_1 | 50643 |
| 2128_Human_herpesvirus_4_g_2 | 50644 |
| 2128_Human_herpesvirus_4_g_3 | 50645 |
| 2128_Human_herpesvirus_4_g_4 | 50646 |
| 2129_Human_herpesvirus_4_g_1 | 50647 |
| 2129_Human_herpesvirus_4_g_2 | 50648 |
| 2129_Human_herpesvirus_4_g_3 | 50649 |
| 2129_Human_herpesvirus_4_g_4 | 50650 |
| 2130_Human_herpesvirus_4_g_1 | 50651 |
| 2130_Human_herpesvirus_4_g_2 | 50652 |
| 2130_Human_herpesvirus_4_g_3 | 50653 |
| 2130_Human_herpesvirus_4_g_4 | 50654 |
| 2131_Human_herpesvirus_4_g_1 | 50655 |
| 2131_Human_herpesvirus_4_g_2 | 50656 |
| 2131_Human_herpesvirus_4_g_3 | 50657 |
| 2131_Human_herpesvirus_4_g_4 | 50658 |
| 2131_Human_herpesvirus_4_g_5 | 50659 |
| 2133_Human_herpesvirus_4_g_1 | 50660 |
| 2133_Human_herpesvirus_4_g_2 | 50661 |
| 2133_Human_herpesvirus_4_g_3 | 50662 |
| 2133_Human_herpesvirus_4_g_4 | 50663 |
| 2133_Human_herpesvirus_4_g_5 | 50664 |
| 2134_Human_herpesvirus_4_g_1 | 50665 |
| 2135_Human_herpesvirus_4_g_1 | 50666 |
| 2135_Human_herpesvirus_4_g_2 | 50667 |
| 2135_Human_herpesvirus_4_g_3 | 50668 |
| 2135_Human_herpesvirus_4_g_4 | 50669 |
| 2136_Human_herpesvirus_4_g_1 | 50670 |
| 2136_Human_herpesvirus_4_g_2 | 50671 |
| 2136_Human_herpesvirus_4_g_3 | 50672 |
| 2136_Human_herpesvirus_4_g_4 | 50673 |
| 2136_Human_herpesvirus_4_g_5 | 50674 |
| 2137_Human_herpesvirus_4_g_1 | 50675 |
| 2137_Human_herpesvirus_4_g_2 | 50676 |
| 2137_Human_herpesvirus_4_g_3 | 50677 |
| 2137_Human_herpesvirus_4_g_4 | 50678 |
| 2137_Human_herpesvirus_4_g_5 | 50679 |
| 2138_Human_herpesvirus_4_g_1 | 50680 |
| 2138_Human_herpesvirus_4_g_2 | 50681 |
| 2138_Human_herpesvirus_4_g_3 | 50682 |
| 2138_Human_herpesvirus_4_g_4 | 50683 |
| 2138_Human_herpesvirus_4_g_5 | 50684 |
| 2139_Human_herpesvirus_4_g_1 | 50685 |
| 2139_Human_herpesvirus_4_g_2 | 50686 |
| 2139_Human_herpesvirus_4_g_3 | 50687 |
| 2139_Human_herpesvirus_4_g_4 | 50688 |
| 2139_Human_herpesvirus_4_g_5 | 50689 |
| 2140_Human_herpesvirus_4_g_1 | 50690 |
| 2140_Human_herpesvirus_4_g_2 | 50691 |
| 2140_Human_herpesvirus_4_g_3 | 50692 |
| 2141_Human_herpesvirus_4_g_1 | 50693 |
| 2141_Human_herpesvirus_4_g_2 | 50694 |
| 2141_Human_herpesvirus_4_g_3 | 50695 |
| 2141_Human_herpesvirus_4_g_4 | 50696 |
| 2141_Human_herpesvirus_4_g_5 | 50697 |
| 2142_Human_herpesvirus_4_g_1 | 50698 |
| 2142_Human_herpesvirus_4_g_2 | 50699 |
| 2142_Human_herpesvirus_4_g_3 | 50700 |
| 2142_Human_herpesvirus_4_g_4 | 50701 |
| 2142_Human_herpesvirus_4_g_5 | 50702 |
| 2143_Human_herpesvirus_4_g_1 | 50703 |
| 2143_Human_herpesvirus_4_g_2 | 50704 |
| 2143_Human_herpesvirus_4_g_3 | 50705 |
| 2143_Human_herpesvirus_4_g_4 | 50706 |
| 2143_Human_herpesvirus_4_g_5 | 50707 |
| 2144_Human_herpesvirus_4_g_1 | 50708 |
| 2144_Human_herpesvirus_4_g_2 | 50709 |
| 2144_Human_herpesvirus_4_g_3 | 50710 |
| 2144_Human_herpesvirus_4_g_4 | 50711 |
| 2145_Human_herpesvirus_4_g_1 | 50712 |
| 2145_Human_herpesvirus_4_g_2 | 50713 |
| 2145_Human_herpesvirus_4_g_3 | 50714 |
| 2145_Human_herpesvirus_4_g_4 | 50715 |
| 2145_Human_herpesvirus_4_g_5 | 50716 |
| 2146_Human_herpesvirus_4_g_1 | 50717 |
| 2146_Human_herpesvirus_4_g_2 | 50718 |
| 2146_Human_herpesvirus_4_g_3 | 50719 |
| 2146_Human_herpesvirus_4_g_4 | 50720 |
| 2146_Human_herpesvirus_4_g_5 | 50721 |
| 2147_Human_herpesvirus_4_g_1 | 50722 |
| 2147_Human_herpesvirus_4_g_2 | 50723 |
| 2147_Human_herpesvirus_4_g_3 | 50724 |
| 2147_Human_herpesvirus_4_g_4 | 50725 |
| 2147_Human_herpesvirus_4_g_5 | 50726 |
| 2148_Human_herpesvirus_4_g_1 | 50727 |
| 2148_Human_herpesvirus_4_g_2 | 50728 |
| 2148_Human_herpesvirus_4_g_3 | 50729 |
| 2148_Human_herpesvirus_4_g_4 | 50730 |
| 2148_Human_herpesvirus_4_g_5 | 50731 |
| 2149_Human_herpesvirus_4_g_1 | 50732 |
| 2149_Human_herpesvirus_4_g_2 | 50733 |
| 2149_Human_herpesvirus_4_g_3 | 50734 |
| 2150_Human_herpesvirus_4_g_1 | 50735 |
| 2150_Human_herpesvirus_4_g_2 | 50736 |
| 2150_Human_herpesvirus_4_g_3 | 50737 |
| 2150_Human_herpesvirus_4_g_4 | 50738 |
| 2150_Human_herpesvirus_4_g_5 | 50739 |
| 2151_Human_herpesvirus_4_g_1 | 50740 |
| 2151_Human_herpesvirus_4_g_2 | 50741 |
| 2151_Human_herpesvirus_4_g_3 | 50742 |
| 2151_Human_herpesvirus_4_g_4 | 50743 |
| 2151_Human_herpesvirus_4_g_5 | 50744 |
| 2152_Human_herpesvirus_4_g_1 | 50745 |
| 2152_Human_herpesvirus_4_g_2 | 50746 |
| 2152_Human_herpesvirus_4_g_3 | 50747 |
| 2152_Human_herpesvirus_4_g_4 | 50748 |
| 2152_Human_herpesvirus_4_g_5 | 50749 |
| 2153_Human_herpesvirus_4_g_1 | 50750 |
| 2153_Human_herpesvirus_4_g_2 | 50751 |
| 2153_Human_herpesvirus_4_g_3 | 50752 |
| 2153_Human_herpesvirus_4_g_4 | 50753 |
| 2153_Human_herpesvirus_4_g_5 | 50754 |
| 2154_Human_herpesvirus_4_g_1 | 50755 |
| 2154_Human_herpesvirus_4_g_2 | 50756 |
| 2154_Human_herpesvirus_4_g_3 | 50757 |
| 2154_Human_herpesvirus_4_g_4 | 50758 |
| 2154_Human_herpesvirus_4_g_5 | 50759 |
| 2155_Human_herpesvirus_4_g_1 | 50760 |
| 2155_Human_herpesvirus_4_g_2 | 50761 |
| 2155_Human_herpesvirus_4_g_3 | 50762 |
| 2155_Human_herpesvirus_4_g_4 | 50763 |
| 2155_Human_herpesvirus_4_g_5 | 50764 |
| 2156_Human_herpesvirus_4_g_1 | 50765 |
| 2156_Human_herpesvirus_4_g_2 | 50766 |
| 2156_Human_herpesvirus_4_g_3 | 50767 |
| 2156_Human_herpesvirus_4_g_4 | 50768 |
| 2156_Human_herpesvirus_4_g_5 | 50769 |
| 2157_Human_herpesvirus_4_g_1 | 50770 |
| 2157_Human_herpesvirus_4_g_2 | 50771 |
| 2157_Human_herpesvirus_4_g_3 | 50772 |
| 2157_Human_herpesvirus_4_g_4 | 50773 |
| 2158_Human_herpesvirus_4_g_1 | 50774 |
| 2158_Human_herpesvirus_4_g_2 | 50775 |
| 2158_Human_herpesvirus_4_g_3 | 50776 |
| 2158_Human_herpesvirus_4_g_4 | 50777 |
| 2158_Human_herpesvirus_4_g_5 | 50778 |
| 2159_Human_herpesvirus_4_g_1 | 50779 |
| 2159_Human_herpesvirus_4_g_2 | 50780 |
| 2159_Human_herpesvirus_4_g_3 | 50781 |
| 2159_Human_herpesvirus_4_g_4 | 50782 |
| 2159_Human_herpesvirus_4_g_5 | 50783 |
| 2160_Human_herpesvirus_4_g_1 | 50784 |
| 2160_Human_herpesvirus_4_g_2 | 50785 |
| 2160_Human_herpesvirus_4_g_3 | 50786 |
| 2160_Human_herpesvirus_4_g_4 | 50787 |
| 2160_Human_herpesvirus_4_g_5 | 50788 |
| 2161_Human_herpesvirus_4_g_1 | 50789 |
| 2161_Human_herpesvirus_4_g_2 | 50790 |
| 2161_Human_herpesvirus_4_g_3 | 50791 |
| 2161_Human_herpesvirus_4_g_4 | 50792 |
| 2162_Human_herpesvirus_4_g_1 | 50793 |
| 2162_Human_herpesvirus_4_g_2 | 50794 |
| 2162_Human_herpesvirus_4_g_3 | 50795 |
| 2162_Human_herpesvirus_4_g_4 | 50796 |
| 2162_Human_herpesvirus_4_g_5 | 50797 |
| 2163_Human_herpesvirus_4_g_1 | 50798 |
| 2163_Human_herpesvirus_4_g_2 | 50799 |
| 2163_Human_herpesvirus_4_g_3 | 50800 |
| 2163_Human_herpesvirus_4_g_4 | 50801 |
| 2163_Human_herpesvirus_4_g_5 | 50802 |
| 2164_Human_herpesvirus_4_g_1 | 50803 |
| 2164_Human_herpesvirus_4_g_2 | 50804 |
| 2164_Human_herpesvirus_4_g_3 | 50805 |
| 2165_Human_herpesvirus_4_g_1 | 50806 |
| 2165_Human_herpesvirus_4_g_2 | 50807 |
| 2165_Human_herpesvirus_4_g_3 | 50808 |
| 2165_Human_herpesvirus_4_g_4 | 50809 |
| 2166_Human_herpesvirus_4_g_1 | 50810 |
| 2166_Human_herpesvirus_4_g_2 | 50811 |
| 2166_Human_herpesvirus_4_g_3 | 50812 |
| 2166_Human_herpesvirus_4_g_4 | 50813 |
| 2166_Human_herpesvirus_4_g_5 | 50814 |
| 2167_Human_herpesvirus_4_g_1 | 50815 |
| 2167_Human_herpesvirus_4_g_2 | 50816 |
| 2167_Human_herpesvirus_4_g_3 | 50817 |
| 2167_Human_herpesvirus_4_g_4 | 50818 |
| 2167_Human_herpesvirus_4_g_5 | 50819 |
| 2168_Human_herpesvirus_4_g_1 | 50820 |
| 2168_Human_herpesvirus_4_g_2 | 50821 |
| 2169_Human_herpesvirus_4_g_1 | 50822 |
| 2169_Human_herpesvirus_4_g_2 | 50823 |
| 2169_Human_herpesvirus_4_g_3 | 50824 |
| 2169_Human_herpesvirus_4_g_4 | 50825 |
| 2169_Human_herpesvirus_4_g_5 | 50826 |
| 2170_Human_herpesvirus_4_g_1 | 50827 |
| 2170_Human_herpesvirus_4_g_2 | 50828 |
| 2170_Human_herpesvirus_4_g_3 | 50829 |
| 2170_Human_herpesvirus_4_g_4 | 50830 |
| 2170_Human_herpesvirus_4_g_5 | 50831 |
| 2171_Human_herpesvirus_4_g_1 | 50832 |
| 2171_Human_herpesvirus_4_g_2 | 50833 |
| 2171_Human_herpesvirus_4_g_3 | 50834 |
| 2171_Human_herpesvirus_4_g_4 | 50835 |
| 2171_Human_herpesvirus_4_g_5 | 50836 |
| 2172_Human_herpesvirus_4_g_1 | 50837 |
| 2172_Human_herpesvirus_4_g_2 | 50838 |
| 2172_Human_herpesvirus_4_g_3 | 50839 |
| 2172_Human_herpesvirus_4_g_4 | 50840 |
| 2172_Human_herpesvirus_4_g_5 | 50841 |
| 2173_Human_herpesvirus_4_g_1 | 50842 |
| 2173_Human_herpesvirus_4_g_2 | 50843 |
| 2173_Human_herpesvirus_4_g_3 | 50844 |
| 2173_Human_herpesvirus_4_g_4 | 50845 |
| 2173_Human_herpesvirus_4_g_5 | 50846 |
| 2174_Human_herpesvirus_4_g_1 | 50847 |
| 2174_Human_herpesvirus_4_g_2 | 50848 |
| 2175_Human_herpesvirus_4_g_1 | 50849 |
| 2175_Human_herpesvirus_4_g_2 | 50850 |
| 2175_Human_herpesvirus_4_g_3 | 50851 |
| 2175_Human_herpesvirus_4_g_4 | 50852 |
| 2175_Human_herpesvirus_4_g_5 | 50853 |
| 2176_Human_herpesvirus_4_g_1 | 50854 |
| 2176_Human_herpesvirus_4_g_2 | 50855 |
| 2176_Human_herpesvirus_4_g_3 | 50856 |
| 2176_Human_herpesvirus_4_g_4 | 50857 |
| 2176_Human_herpesvirus_4_g_5 | 50858 |
| 2177_Human_herpesvirus_4_g_1 | 50859 |
| 2177_Human_herpesvirus_4_g_2 | 50860 |
| 2177_Human_herpesvirus_4_g_3 | 50861 |
| 2177_Human_herpesvirus_4_g_4 | 50862 |
| 2177_Human_herpesvirus_4_g_5 | 50863 |
| 2178_Human_herpesvirus_4_g_1 | 50864 |
| 2178_Human_herpesvirus_4_g_2 | 50865 |
| 2178_Human_herpesvirus_4_g_3 | 50866 |
| 2178_Human_herpesvirus_4_g_4 | 50867 |
| 2178_Human_herpesvirus_4_g_5 | 50868 |
| 2179_Human_herpesvirus_4_g_1 | 50869 |
| 2179_Human_herpesvirus_4_g_2 | 50870 |
| 2179_Human_herpesvirus_4_g_3 | 50871 |
| 2179_Human_herpesvirus_4_g_4 | 50872 |
| 2179_Human_herpesvirus_4_g_5 | 50873 |
| 2180_Human_herpesvirus_4_g_1 | 50874 |
| 2180_Human_herpesvirus_4_g_2 | 50875 |
| 2180_Human_herpesvirus_4_g_3 | 50876 |
| 2180_Human_herpesvirus_4_g_4 | 50877 |
| 2180_Human_herpesvirus_4_g_5 | 50878 |
| 2181_Human_herpesvirus_4_g_1 | 50879 |
| 2181_Human_herpesvirus_4_g_2 | 50880 |
| 2181_Human_herpesvirus_4_g_3 | 50881 |
| 2181_Human_herpesvirus_4_g_4 | 50882 |
| 2181_Human_herpesvirus_4_g_5 | 50883 |
| 2182_Human_herpesvirus_4_g_1 | 50884 |
| 2182_Human_herpesvirus_4_g_2 | 50885 |
| 2182_Human_herpesvirus_4_g_3 | 50886 |
| 2182_Human_herpesvirus_4_g_4 | 50887 |
| 2183_Human_herpesvirus_4_g_1 | 50888 |
| 2183_Human_herpesvirus_4_g_2 | 50889 |
| 2183_Human_herpesvirus_4_g_3 | 50890 |
| 2183_Human_herpesvirus_4_g_4 | 50891 |
| 2183_Human_herpesvirus_4_g_5 | 50892 |
| 2184_Human_herpesvirus_4_g_1 | 50893 |
| 2184_Human_herpesvirus_4_g_2 | 50894 |
| 2184_Human_herpesvirus_4_g_3 | 50895 |
| 2184_Human_herpesvirus_4_g_4 | 50896 |
| 2184_Human_herpesvirus_4_g_5 | 50897 |
| 2185_Human_herpesvirus_4_g_1 | 50898 |
| 2185_Human_herpesvirus_4_g_2 | 50899 |
| 2186_Human_herpesvirus_4_g_1 | 50900 |
| 2186_Human_herpesvirus_4_g_2 | 50901 |
| 2186_Human_herpesvirus_4_g_3 | 50902 |
| 2186_Human_herpesvirus_4_g_4 | 50903 |
| 2186_Human_herpesvirus_4_g_5 | 50904 |
| 2187_Human_herpesvirus_4_g_1 | 50905 |
| 2187_Human_herpesvirus_4_g_2 | 50906 |
| 2187_Human_herpesvirus_4_g_3 | 50907 |
| 2188_Human_herpesvirus_4_g_1 | 50908 |
| 2188_Human_herpesvirus_4_g_2 | 50909 |
| 2188_Human_herpesvirus_4_g_3 | 50910 |
| 2188_Human_herpesvirus_4_g_4 | 50911 |
| 2189_Human_herpesvirus_4_g_1 | 50912 |
| 2189_Human_herpesvirus_4_g_2 | 50913 |
| 2189_Human_herpesvirus_4_g_3 | 50914 |
| 2190_Human_herpesvirus_4_g_1 | 50915 |
| 2190_Human_herpesvirus_4_g_2 | 50916 |
| 2191_Human_herpesvirus_4_g_1 | 50917 |
| 2191_Human_herpesvirus_4_g_2 | 50918 |
| 2191_Human_herpesvirus_4_g_3 | 50919 |
| 2191_Human_herpesvirus_4_g_4 | 50920 |
| 2191_Human_herpesvirus_4_g_5 | 50921 |
| 2192_Human_papillomavirus_type_71_DNA_g_1 | 50922 |
| 2192_Human_papillomavirus_type_71_DNA_g_2 | 50923 |
| 2192_Human_papillomavirus_type_71_DNA_g_3 | 50924 |
| 2192_Human_papillomavirus_type_71_DNA_g_4 | 50925 |
| 2192_Human_papillomavirus_type_71_DNA_g_5 | 50926 |
| 2193_Human_papillomavirus_type_71_DNA_g_1 | 50927 |
| 2193_Human_papillomavirus_type_71_DNA_g_2 | 50928 |
| 2193_Human_papillomavirus_type_71_DNA_g_3 | 50929 |
| 2193_Human_papillomavirus_type_71_DNA_g_4 | 50930 |
| 2193_Human_papillomavirus_type_71_DNA_g_5 | 50931 |
| 2194_Human_papillomavirus_type_71_DNA_g_1 | 50932 |
| 2194_Human_papillomavirus_type_71_DNA_g_2 | 50933 |
| 2194_Human_papillomavirus_type_71_DNA_g_3 | 50934 |
| 2194_Human_papillomavirus_type_71_DNA_g_4 | 50935 |
| 2194_Human_papillomavirus_type_71_DNA_g_5 | 50936 |
| 2195_Human_papillomavirus_type_71_DNA_g_1 | 50937 |
| 2195_Human_papillomavirus_type_71_DNA_g_2 | 50938 |
| 2195_Human_papillomavirus_type_71_DNA_g_3 | 50939 |
| 2195_Human_papillomavirus_type_71_DNA_g_4 | 50940 |
| 2195_Human_papillomavirus_type_71_DNA_g_5 | 50941 |
| 2196_Human_papillomavirus_type_71_DNA_g_1 | 50942 |
| 2196_Human_papillomavirus_type_71_DNA_g_2 | 50943 |
| 2196_Human_papillomavirus_type_71_DNA_g_3 | 50944 |
| 2196_Human_papillomavirus_type_71_DNA_g_4 | 50945 |
| 2196_Human_papillomavirus_type_71_DNA_g_5 | 50946 |
| 2197_Human_papillomavirus_type_71_DNA_g_1 | 50947 |
| 2197_Human_papillomavirus_type_71_DNA_g_2 | 50948 |
| 2197_Human_papillomavirus_type_71_DNA_g_3 | 50949 |
| 2197_Human_papillomavirus_type_71_DNA_g_4 | 50950 |
| 2197_Human_papillomavirus_type_71_DNA_g_5 | 50951 |
| 2198_Human_papillomavirus_type_71_DNA_g_1 | 50952 |
| 2198_Human_papillomavirus_type_71_DNA_g_2 | 50953 |
| 2198_Human_papillomavirus_type_71_DNA_g_3 | 50954 |
| 2198_Human_papillomavirus_type_71_DNA_g_4 | 50955 |
| 2198_Human_papillomavirus_type_71_DNA_g_5 | 50956 |
| 2199_Human_papillomavirus_type_71_DNA_g_1 | 50957 |
| 2199_Human_papillomavirus_type_71_DNA_g_2 | 50958 |
| 2199_Human_papillomavirus_type_71_DNA_g_3 | 50959 |
| 2199_Human_papillomavirus_type_71_DNA_g_4 | 50960 |
| 2199_Human_papillomavirus_type_71_DNA_g_5 | 50961 |
| 2200_Human_papillomavirus_type_71_DNA_g_1 | 50962 |
| 2200_Human_papillomavirus_type_71_DNA_g_2 | 50963 |
| 2200_Human_papillomavirus_type_71_DNA_g_3 | 50964 |
| 2200_Human_papillomavirus_type_71_DNA_g_4 | 50965 |
| 2200_Human_papillomavirus_type_71_DNA_g_5 | 50966 |
| 2201_Human_papillomavirus_type_71_DNA_g_1 | 50967 |
| 2201_Human_papillomavirus_type_71_DNA_g_2 | 50968 |
| 2201_Human_papillomavirus_type_71_DNA_g_3 | 50969 |
| 2201_Human_papillomavirus_type_71_DNA_g_4 | 50970 |
| 2201_Human_papillomavirus_type_71_DNA_g_5 | 50971 |
| 2202_Human_papillomavirus_type_71_DNA_g_1 | 50972 |
| 2202_Human_papillomavirus_type_71_DNA_g_2 | 50973 |
| 2202_Human_papillomavirus_type_71_DNA_g_3 | 50974 |
| 2202_Human_papillomavirus_type_71_DNA_g_4 | 50975 |
| 2202_Human_papillomavirus_type_71_DNA_g_5 | 50976 |
| 2203_Human_papillomavirus_type_71_DNA_g_1 | 50977 |
| 2203_Human_papillomavirus_type_71_DNA_g_2 | 50978 |
| 2203_Human_papillomavirus_type_71_DNA_g_3 | 50979 |
| 2203_Human_papillomavirus_type_71_DNA_g_4 | 50980 |
| 2203_Human_papillomavirus_type_71_DNA_g_5 | 50981 |
| 2204_Human_papillomavirus_type_71_DNA_g_1 | 50982 |
| 2204_Human_papillomavirus_type_71_DNA_g_2 | 50983 |
| 2204_Human_papillomavirus_type_71_DNA_g_3 | 50984 |
| 2204_Human_papillomavirus_type_71_DNA_g_4 | 50985 |
| 2204_Human_papillomavirus_type_71_DNA_g_5 | 50986 |
| 2205_Human_papillomavirus_type_71_DNA_g_1 | 50987 |
| 2205_Human_papillomavirus_type_71_DNA_g_2 | 50988 |
| 2205_Human_papillomavirus_type_71_DNA_g_3 | 50989 |
| 2205_Human_papillomavirus_type_71_DNA_g_4 | 50990 |
| 2205_Human_papillomavirus_type_71_DNA_g_5 | 50991 |
| 2206_Human_papillomavirus_type_71_DNA_g_1 | 50992 |
| 2206_Human_papillomavirus_type_71_DNA_g_2 | 50993 |
| 2206_Human_papillomavirus_type_71_DNA_g_3 | 50994 |
| 2206_Human_papillomavirus_type_71_DNA_g_4 | 50995 |
| 2206_Human_papillomavirus_type_71_DNA_g_5 | 50996 |
| 2207_Human_papillomavirus_type_71_DNA_g_1 | 50997 |
| 2207_Human_papillomavirus_type_71_DNA_g_2 | 50998 |
| 2207_Human_papillomavirus_type_71_DNA_g_3 | 50999 |
| 2207_Human_papillomavirus_type_71_DNA_g_4 | 51000 |
| 2207_Human_papillomavirus_type_71_DNA_g_5 | 51001 |
| 2208_Human_papillomavirus_type_71_DNA_g_1 | 51002 |
| 2208_Human_papillomavirus_type_71_DNA_g_2 | 51003 |
| 2208_Human_papillomavirus_type_71_DNA_g_3 | 51004 |
| 2208_Human_papillomavirus_type_71_DNA_g_4 | 51005 |
| 2208_Human_papillomavirus_type_71_DNA_g_5 | 51006 |
| 2209_Human_papillomavirus_type_71_DNA_g_1 | 51007 |
| 2209_Human_papillomavirus_type_71_DNA_g_2 | 51008 |
| 2209_Human_papillomavirus_type_71_DNA_g_3 | 51009 |
| 2209_Human_papillomavirus_type_71_DNA_g_4 | 51010 |
| 2209_Human_papillomavirus_type_71_DNA_g_5 | 51011 |
| 2210_Human_papillomavirus_type_71_DNA_g_1 | 51012 |
| 2210_Human_papillomavirus_type_71_DNA_g_2 | 51013 |
| 2210_Human_papillomavirus_type_71_DNA_g_3 | 51014 |
| 2210_Human_papillomavirus_type_71_DNA_g_4 | 51015 |
| 2210_Human_papillomavirus_type_71_DNA_g_5 | 51016 |
| 2211_Human_papillomavirus_type_112_g_1 | 51017 |
| 2211_Human_papillomavirus_type_112_g_2 | 51018 |
| 2211_Human_papillomavirus_type_112_g_3 | 51019 |
| 2211_Human_papillomavirus_type_112_g_4 | 51020 |
| 2211_Human_papillomavirus_type_112_g_5 | 51021 |
| 2212_Human_papillomavirus_type_112_g_1 | 51022 |
| 2212_Human_papillomavirus_type_112_g_2 | 51023 |
| 2212_Human_papillomavirus_type_112_g_3 | 51024 |
| 2212_Human_papillomavirus_type_112_g_4 | 51025 |
| 2212_Human_papillomavirus_type_112_g_5 | 51026 |
| 2213_Human_papillomavirus_type_112_g_1 | 51027 |
| 2213_Human_papillomavirus_type_112_g_2 | 51028 |
| 2213_Human_papillomavirus_type_112_g_3 | 51029 |
| 2213_Human_papillomavirus_type_112_g_4 | 51030 |
| 2213_Human_papillomavirus_type_112_g_5 | 51031 |
| 2214_Human_papillomavirus_type_112_g_1 | 51032 |
| 2214_Human_papillomavirus_type_112_g_2 | 51033 |
| 2214_Human_papillomavirus_type_112_g_3 | 51034 |
| 2214_Human_papillomavirus_type_112_g_4 | 51035 |
| 2214_Human_papillomavirus_type_112_g_5 | 51036 |
| 2215_Human_papillomavirus_type_112_g_1 | 51037 |
| 2215_Human_papillomavirus_type_112_g_2 | 51038 |
| 2215_Human_papillomavirus_type_112_g_3 | 51039 |
| 2215_Human_papillomavirus_type_112_g_4 | 51040 |
| 2215_Human_papillomavirus_type_112_g_5 | 51041 |
| 2216_Human_papillomavirus_type_112_g_1 | 51042 |
| 2216_Human_papillomavirus_type_112_g_2 | 51043 |
| 2216_Human_papillomavirus_type_112_g_3 | 51044 |
| 2216_Human_papillomavirus_type_112_g_4 | 51045 |
| 2216_Human_papillomavirus_type_112_g_5 | 51046 |
| 2217_Human_papillomavirus_type_112_g_1 | 51047 |
| 2217_Human_papillomavirus_type_112_g_2 | 51048 |
| 2217_Human_papillomavirus_type_112_g_3 | 51049 |
| 2217_Human_papillomavirus_type_112_g_4 | 51050 |
| 2217_Human_papillomavirus_type_112_g_5 | 51051 |
| 2218_Human_papillomavirus_type_112_g_1 | 51052 |
| 2218_Human_papillomavirus_type_112_g_2 | 51053 |
| 2218_Human_papillomavirus_type_112_g_3 | 51054 |
| 2218_Human_papillomavirus_type_112_g_4 | 51055 |
| 2218_Human_papillomavirus_type_112_g_5 | 51056 |
| 2219_Human_papillomavirus_type_112_g_1 | 51057 |
| 2219_Human_papillomavirus_type_112_g_2 | 51058 |
| 2219_Human_papillomavirus_type_112_g_3 | 51059 |
| 2219_Human_papillomavirus_type_112_g_4 | 51060 |
| 2219_Human_papillomavirus_type_112_g_5 | 51061 |
| 2220_Human_papillomavirus_type_112_g_1 | 51062 |
| 2220_Human_papillomavirus_type_112_g_2 | 51063 |
| 2220_Human_papillomavirus_type_112_g_3 | 51064 |
| 2220_Human_papillomavirus_type_112_g_4 | 51065 |
| 2220_Human_papillomavirus_type_112_g_5 | 51066 |
| 2221_Human_papillomavirus_type_112_g_1 | 51067 |
| 2221_Human_papillomavirus_type_112_g_2 | 51068 |
| 2221_Human_papillomavirus_type_112_g_3 | 51069 |
| 2221_Human_papillomavirus_type_112_g_4 | 51070 |
| 2221_Human_papillomavirus_type_112_g_5 | 51071 |
| 2222_Human_papillomavirus_type_112_g_1 | 51072 |
| 2222_Human_papillomavirus_type_112_g_2 | 51073 |
| 2222_Human_papillomavirus_type_112_g_3 | 51074 |
| 2222_Human_papillomavirus_type_112_g_4 | 51075 |
| 2222_Human_papillomavirus_type_112_g_5 | 51076 |
| 2223_Human_papillomavirus_type_112_g_1 | 51077 |
| 2223_Human_papillomavirus_type_112_g_2 | 51078 |
| 2223_Human_papillomavirus_type_112_g_3 | 51079 |
| 2223_Human_papillomavirus_type_112_g_4 | 51080 |
| 2223_Human_papillomavirus_type_112_g_5 | 51081 |
| 2224_Human_papillomavirus_type_90_g_1 | 51082 |
| 2224_Human_papillomavirus_type_90_g_2 | 51083 |
| 2224_Human_papillomavirus_type_90_g_3 | 51084 |
| 2224_Human_papillomavirus_type_90_g_4 | 51085 |
| 2224_Human_papillomavirus_type_90_g_5 | 51086 |
| 2225_Human_papillomavirus_type_90_g_1 | 51087 |
| 2225_Human_papillomavirus_type_90_g_2 | 51088 |
| 2225_Human_papillomavirus_type_90_g_3 | 51089 |
| 2225_Human_papillomavirus_type_90_g_4 | 51090 |
| 2225_Human_papillomavirus_type_90_g_5 | 51091 |
| 2226_Human_papillomavirus_type_90_g_1 | 51092 |
| 2226_Human_papillomavirus_type_90_g_2 | 51093 |
| 2226_Human_papillomavirus_type_90_g_3 | 51094 |
| 2226_Human_papillomavirus_type_90_g_4 | 51095 |
| 2226_Human_papillomavirus_type_90_g_5 | 51096 |
| 2227_Human_papillomavirus_type_90_g_1 | 51097 |
| 2227_Human_papillomavirus_type_90_g_2 | 51098 |
| 2227_Human_papillomavirus_type_90_g_3 | 51099 |
| 2227_Human_papillomavirus_type_90_g_4 | 51100 |
| 2227_Human_papillomavirus_type_90_g_5 | 51101 |
| 2228_Human_papillomavirus_type_90_g_1 | 51102 |
| 2228_Human_papillomavirus_type_90_g_2 | 51103 |
| 2228_Human_papillomavirus_type_90_g_3 | 51104 |
| 2228_Human_papillomavirus_type_90_g_4 | 51105 |
| 2228_Human_papillomavirus_type_90_g_5 | 51106 |
| 2229_Human_papillomavirus_type_90_g_1 | 51107 |
| 2229_Human_papillomavirus_type_90_g_2 | 51108 |
| 2229_Human_papillomavirus_type_90_g_3 | 51109 |
| 2229_Human_papillomavirus_type_90_g_4 | 51110 |
| 2229_Human_papillomavirus_type_90_g_5 | 51111 |
| 2230_Human_papillomavirus_type_90_g_1 | 51112 |
| 2230_Human_papillomavirus_type_90_g_2 | 51113 |
| 2230_Human_papillomavirus_type_90_g_3 | 51114 |
| 2230_Human_papillomavirus_type_90_g_4 | 51115 |
| 2230_Human_papillomavirus_type_90_g_5 | 51116 |
| 2231_Human_papillomavirus_type_90_g_1 | 51117 |
| 2231_Human_papillomavirus_type_90_g_2 | 51118 |
| 2231_Human_papillomavirus_type_90_g_3 | 51119 |
| 2231_Human_papillomavirus_type_90_g_4 | 51120 |
| 2231_Human_papillomavirus_type_90_g_5 | 51121 |
| 2232_Human_papillomavirus_type_90_g_1 | 51122 |
| 2232_Human_papillomavirus_type_90_g_2 | 51123 |
| 2232_Human_papillomavirus_type_90_g_3 | 51124 |
| 2232_Human_papillomavirus_type_90_g_4 | 51125 |
| 2232_Human_papillomavirus_type_90_g_5 | 51126 |
| 2233_Human_papillomavirus_type_90_g_1 | 51127 |
| 2233_Human_papillomavirus_type_90_g_2 | 51128 |
| 2233_Human_papillomavirus_type_90_g_3 | 51129 |
| 2233_Human_papillomavirus_type_90_g_4 | 51130 |
| 2233_Human_papillomavirus_type_90_g_5 | 51131 |
| 2234_Human_papillomavirus_type_90_g_1 | 51132 |
| 2234_Human_papillomavirus_type_90_g_2 | 51133 |
| 2234_Human_papillomavirus_type_90_g_3 | 51134 |
| 2234_Human_papillomavirus_type_90_g_4 | 51135 |
| 2235_Human_papillomavirus_type_90_g_1 | 51136 |
| 2235_Human_papillomavirus_type_90_g_2 | 51137 |
| 2235_Human_papillomavirus_type_90_g_3 | 51138 |
| 2235_Human_papillomavirus_type_90_g_4 | 51139 |
| 2236_Human_papillomavirus_type_90_g_1 | 51140 |
| 2236_Human_papillomavirus_type_90_g_2 | 51141 |
| 2236_Human_papillomavirus_type_90_g_3 | 51142 |
| 2236_Human_papillomavirus_type_90_g_4 | 51143 |
| 2236_Human_papillomavirus_type_90_g_5 | 51144 |
| 2237_Human_papillomavirus_type_90_g_1 | 51145 |
| 2237_Human_papillomavirus_type_90_g_2 | 51146 |
| 2237_Human_papillomavirus_type_90_g_3 | 51147 |
| 2237_Human_papillomavirus_type_90_g_4 | 51148 |
| 2237_Human_papillomavirus_type_90_g_5 | 51149 |
| 2238_Human_papillomavirus_type_90_g_1 | 51150 |
| 2238_Human_papillomavirus_type_90_g_2 | 51151 |
| 2239_Human_papillomavirus_type_90_g_1 | 51152 |
| 2239_Human_papillomavirus_type_90_g_2 | 51153 |
| 2239_Human_papillomavirus_type_90_g_3 | 51154 |
| 2240_Human_papillomavirus_type_90_g_1 | 51155 |
| 2240_Human_papillomavirus_type_90_g_2 | 51156 |
| 2240_Human_papillomavirus_type_90_g_3 | 51157 |
| 2240_Human_papillomavirus_type_90_g_4 | 51158 |
| 2240_Human_papillomavirus_type_90_g_5 | 51159 |
| 2241_Human_papillomavirus_type_90_g_1 | 51160 |
| 2241_Human_papillomavirus_type_90_g_2 | 51161 |
| 2241_Human_papillomavirus_type_90_g_3 | 51162 |
| 2241_Human_papillomavirus_type_90_g_4 | 51163 |
| 2241_Human_papillomavirus_type_90_g_5 | 51164 |
| 2242_Human_papillomavirus_type_90_g_1 | 51165 |
| 2242_Human_papillomavirus_type_90_g_2 | 51166 |
| 2242_Human_papillomavirus_type_90_g_3 | 51167 |
| 2242_Human_papillomavirus_type_90_g_4 | 51168 |
| 2242_Human_papillomavirus_type_90_g_5 | 51169 |
| 2243_Human_papillomavirus_type_90_g_1 | 51170 |
| 2243_Human_papillomavirus_type_90_g_2 | 51171 |
| 2243_Human_papillomavirus_type_90_g_3 | 51172 |
| 2243_Human_papillomavirus_type_90_g_4 | 51173 |
| 2243_Human_papillomavirus_type_90_g_5 | 51174 |
| 2244_Human_papillomavirus_type_90_g_1 | 51175 |
| 2244_Human_papillomavirus_type_90_g_2 | 51176 |
| 2244_Human_papillomavirus_type_90_g_3 | 51177 |
| 2244_Human_papillomavirus_type_90_g_4 | 51178 |
| 2244_Human_papillomavirus_type_90_g_5 | 51179 |
| 2245_Human_papillomavirus_type_90_g_1 | 51180 |
| 2245_Human_papillomavirus_type_90_g_2 | 51181 |
| 2245_Human_papillomavirus_type_90_g_3 | 51182 |
| 2245_Human_papillomavirus_type_90_g_4 | 51183 |
| 2245_Human_papillomavirus_type_90_g_5 | 51184 |
| 2246_Human_papillomavirus_type_90_g_1 | 51185 |
| 2246_Human_papillomavirus_type_90_g_2 | 51186 |
| 2246_Human_papillomavirus_type_90_g_3 | 51187 |
| 2246_Human_papillomavirus_type_90_g_4 | 51188 |
| 2246_Human_papillomavirus_type_90_g_5 | 51189 |
| 2247_Hepatitis_C_virus_genotype_2_g_1 | 51190 |
| 2247_Hepatitis_C_virus_genotype_2_g_2 | 51191 |
| 2247_Hepatitis_C_virus_genotype_2_g_3 | 51192 |
| 2247_Hepatitis_C_virus_genotype_2_g_4 | 51193 |
| 2248_Hepatitis_C_virus_genotype_2_g_1 | 51194 |
| 2248_Hepatitis_C_virus_genotype_2_g_2 | 51195 |
| 2248_Hepatitis_C_virus_genotype_2_g_3 | 51196 |
| 2248_Hepatitis_C_virus_genotype_2_g_4 | 51197 |
| 2248_Hepatitis_C_virus_genotype_2_g_5 | 51198 |
| 2249_Hepatitis_C_virus_genotype_2_g_1 | 51199 |
| 2249_Hepatitis_C_virus_genotype_2_g_2 | 51200 |
| 2249_Hepatitis_C_virus_genotype_2_g_3 | 51201 |
| 2249_Hepatitis_C_virus_genotype_2_g_4 | 51202 |
| 2250_Hepatitis_C_virus_genotype_2_g_1 | 51203 |
| 2250_Hepatitis_C_virus_genotype_2_g_2 | 51204 |
| 2250_Hepatitis_C_virus_genotype_2_g_3 | 51205 |
| 2250_Hepatitis_C_virus_genotype_2_g_4 | 51206 |
| 2251_Hepatitis_C_virus_genotype_2_g_1 | 51207 |
| 2251_Hepatitis_C_virus_genotype_2_g_2 | 51208 |
| 2251_Hepatitis_C_virus_genotype_2_g_3 | 51209 |
| 2251_Hepatitis_C_virus_genotype_2_g_4 | 51210 |
| 2251_Hepatitis_C_virus_genotype_2_g_5 | 51211 |
| 2252_Hepatitis_C_virus_genotype_2_g_1 | 51212 |
| 2252_Hepatitis_C_virus_genotype_2_g_2 | 51213 |
| 2252_Hepatitis_C_virus_genotype_2_g_3 | 51214 |
| 2252_Hepatitis_C_virus_genotype_2_g_4 | 51215 |
| 2252_Hepatitis_C_virus_genotype_2_g_5 | 51216 |
| 2253_Hepatitis_C_virus_genotype_2_g_1 | 51217 |
| 2253_Hepatitis_C_virus_genotype_2_g_2 | 51218 |
| 2253_Hepatitis_C_virus_genotype_2_g_3 | 51219 |
| 2253_Hepatitis_C_virus_genotype_2_g_4 | 51220 |
| 2253_Hepatitis_C_virus_genotype_2_g_5 | 51221 |
| 2254_Hepatitis_C_virus_genotype_2_g_1 | 51222 |
| 2254_Hepatitis_C_virus_genotype_2_g_2 | 51223 |
| 2254_Hepatitis_C_virus_genotype_2_g_3 | 51224 |
| 2254_Hepatitis_C_virus_genotype_2_g_4 | 51225 |
| 2254_Hepatitis_C_virus_genotype_2_g_5 | 51226 |
| 2255_Hepatitis_C_virus_genotype_2_g_1 | 51227 |
| 2255_Hepatitis_C_virus_genotype_2_g_2 | 51228 |
| 2255_Hepatitis_C_virus_genotype_2_g_3 | 51229 |
| 2255_Hepatitis_C_virus_genotype_2_g_4 | 51230 |
| 2255_Hepatitis_C_virus_genotype_2_g_5 | 51231 |
| 2256_Hepatitis_C_virus_genotype_2_g_1 | 51232 |
| 2256_Hepatitis_C_virus_genotype_2_g_2 | 51233 |
| 2256_Hepatitis_C_virus_genotype_2_g_3 | 51234 |
| 2256_Hepatitis_C_virus_genotype_2_g_4 | 51235 |
| 2256_Hepatitis_C_virus_genotype_2_g_5 | 51236 |
| 2257_Hepatitis_C_virus_genotype_2_g_1 | 51237 |
| 2257_Hepatitis_C_virus_genotype_2_g_2 | 51238 |
| 2257_Hepatitis_C_virus_genotype_2_g_3 | 51239 |
| 2257_Hepatitis_C_virus_genotype_2_g_4 | 51240 |
| 2257_Hepatitis_C_virus_genotype_2_g_5 | 51241 |
| 2258_Hepatitis_C_virus_genotype_2_g_1 | 51242 |
| 2258_Hepatitis_C_virus_genotype_2_g_2 | 51243 |
| 2258_Hepatitis_C_virus_genotype_2_g_3 | 51244 |
| 2258_Hepatitis_C_virus_genotype_2_g_4 | 51245 |
| 2258_Hepatitis_C_virus_genotype_2_g_5 | 51246 |
| 2259_Hepatitis_C_virus_genotype_2_g_1 | 51247 |
| 2259_Hepatitis_C_virus_genotype_2_g_2 | 51248 |
| 2259_Hepatitis_C_virus_genotype_2_g_3 | 51249 |
| 2259_Hepatitis_C_virus_genotype_2_g_4 | 51250 |
| 2259_Hepatitis_C_virus_genotype_2_g_5 | 51251 |
| 2260_Hepatitis_C_virus_genotype_2_g_1 | 51252 |
| 2260_Hepatitis_C_virus_genotype_2_g_2 | 51253 |
| 2260_Hepatitis_C_virus_genotype_2_g_3 | 51254 |
| 2260_Hepatitis_C_virus_genotype_2_g_4 | 51255 |
| 2260_Hepatitis_C_virus_genotype_2_g_5 | 51256 |
| 2261_Hepatitis_C_virus_genotype_2_g_1 | 51257 |
| 2261_Hepatitis_C_virus_genotype_2_g_2 | 51258 |
| 2261_Hepatitis_C_virus_genotype_2_g_3 | 51259 |
| 2262_Hepatitis_C_virus_genotype_2_g_1 | 51260 |
| 2262_Hepatitis_C_virus_genotype_2_g_2 | 51261 |
| 2262_Hepatitis_C_virus_genotype_2_g_3 | 51262 |
| 2262_Hepatitis_C_virus_genotype_2_g_4 | 51263 |
| 2262_Hepatitis_C_virus_genotype_2_g_5 | 51264 |
| 2263_Hepatitis_C_virus_genotype_2_g_1 | 51265 |
| 2263_Hepatitis_C_virus_genotype_2_g_2 | 51266 |
| 2263_Hepatitis_C_virus_genotype_2_g_3 | 51267 |
| 2263_Hepatitis_C_virus_genotype_2_g_4 | 51268 |
| 2263_Hepatitis_C_virus_genotype_2_g_5 | 51269 |
| 2264_Hepatitis_C_virus_genotype_2_g_1 | 51270 |
| 2264_Hepatitis_C_virus_genotype_2_g_2 | 51271 |
| 2264_Hepatitis_C_virus_genotype_2_g_3 | 51272 |
| 2264_Hepatitis_C_virus_genotype_2_g_4 | 51273 |
| 2264_Hepatitis_C_virus_genotype_2_g_5 | 51274 |
| 2265_Hepatitis_C_virus_genotype_2_g_1 | 51275 |
| 2265_Hepatitis_C_virus_genotype_2_g_2 | 51276 |
| 2265_Hepatitis_C_virus_genotype_2_g_3 | 51277 |
| 2265_Hepatitis_C_virus_genotype_2_g_4 | 51278 |
| 2265_Hepatitis_C_virus_genotype_2_g_5 | 51279 |
| 2266_Hepatitis_C_virus_genotype_2_g_1 | 51280 |
| 2266_Hepatitis_C_virus_genotype_2_g_2 | 51281 |
| 2266_Hepatitis_C_virus_genotype_2_g_3 | 51282 |
| 2266_Hepatitis_C_virus_genotype_2_g_4 | 51283 |
| 2266_Hepatitis_C_virus_genotype_2_g_5 | 51284 |
| 2267_Hepatitis_C_virus_genotype_2_g_1 | 51285 |
| 2267_Hepatitis_C_virus_genotype_2_g_2 | 51286 |
| 2267_Hepatitis_C_virus_genotype_2_g_3 | 51287 |
| 2267_Hepatitis_C_virus_genotype_2_g_4 | 51288 |
| 2267_Hepatitis_C_virus_genotype_2_g_5 | 51289 |
| 2268_Hepatitis_C_virus_genotype_2_g_1 | 51290 |
| 2268_Hepatitis_C_virus_genotype_2_g_2 | 51291 |
| 2268_Hepatitis_C_virus_genotype_2_g_3 | 51292 |
| 2268_Hepatitis_C_virus_genotype_2_g_4 | 51293 |
| 2268_Hepatitis_C_virus_genotype_2_g_5 | 51294 |
| 2269_Hepatitis_C_virus_genotype_2_g_1 | 51295 |
| 2269_Hepatitis_C_virus_genotype_2_g_2 | 51296 |
| 2269_Hepatitis_C_virus_genotype_2_g_3 | 51297 |
| 2269_Hepatitis_C_virus_genotype_2_g_4 | 51298 |
| 2269_Hepatitis_C_virus_genotype_2_g_5 | 51299 |
| 2270_Hepatitis_C_virus_genotype_2_g_1 | 51300 |
| 2270_Hepatitis_C_virus_genotype_2_g_2 | 51301 |
| 2270_Hepatitis_C_virus_genotype_2_g_3 | 51302 |
| 2270_Hepatitis_C_virus_genotype_2_g_4 | 51303 |
| 2270_Hepatitis_C_virus_genotype_2_g_5 | 51304 |
| 2271_Hepatitis_C_virus_genotype_2_g_1 | 51305 |
| 2271_Hepatitis_C_virus_genotype_2_g_2 | 51306 |
| 2271_Hepatitis_C_virus_genotype_2_g_3 | 51307 |
| 2271_Hepatitis_C_virus_genotype_2_g_4 | 51308 |
| 2271_Hepatitis_C_virus_genotype_2_g_5 | 51309 |
| 2272_Hepatitis_C_virus_genotype_2_g_1 | 51310 |
| 2272_Hepatitis_C_virus_genotype_2_g_2 | 51311 |
| 2272_Hepatitis_C_virus_genotype_2_g_3 | 51312 |
| 2272_Hepatitis_C_virus_genotype_2_g_4 | 51313 |
| 2272_Hepatitis_C_virus_genotype_2_g_5 | 51314 |
| 2273_Hepatitis_C_virus_genotype_2_g_1 | 51315 |
| 2273_Hepatitis_C_virus_genotype_2_g_2 | 51316 |
| 2273_Hepatitis_C_virus_genotype_2_g_3 | 51317 |
| 2273_Hepatitis_C_virus_genotype_2_g_4 | 51318 |
| 2273_Hepatitis_C_virus_genotype_2_g_5 | 51319 |
| 2274_Hepatitis_C_virus_genotype_2_g_1 | 51320 |
| 2274_Hepatitis_C_virus_genotype_2_g_2 | 51321 |
| 2274_Hepatitis_C_virus_genotype_2_g_3 | 51322 |
| 2274_Hepatitis_C_virus_genotype_2_g_4 | 51323 |
| 2274_Hepatitis_C_virus_genotype_2_g_5 | 51324 |
| 2275_Neisseria_gonorrhoeae_strain_WHO_F_chromosome_1_g_1 | 51325 |
| 2275_Neisseria_gonorrhoeae_strain_WHO_F_chromosome_1_g_2 | 51326 |
| 2275_Neisseria_gonorrhoeae_strain_WHO_F_chromosome_1_g_3 | 51327 |
| 2275_Neisseria_gonorrhoeae_strain_WHO_F_chromosome_1_g_4 | 51328 |
| 2275_Neisseria_gonorrhoeae_strain_WHO_F_chromosome_1_g_5 | 51329 |
| 2276_Neisseria_gonorrhoeae_strain_WHO_F_chromosome_1_g_1 | 51330 |
| 2276_Neisseria_gonorrhoeae_strain_WHO_F_chromosome_1_g_2 | 51331 |
| 2276_Neisseria_gonorrhoeae_strain_WHO_F_chromosome_1_g_3 | 51332 |
| 2276_Neisseria_gonorrhoeae_strain_WHO_F_chromosome_1_g_4 | 51333 |
| 2276_Neisseria_gonorrhoeae_strain_WHO_F_chromosome_1_g_5 | 51334 |
| 2277_Neisseria_gonorrhoeae_strain_WHO_F_chromosome_1_g_1 | 51335 |
| 2277_Neisseria_gonorrhoeae_strain_WHO_F_chromosome_1_g_2 | 51336 |
| 2277_Neisseria_gonorrhoeae_strain_WHO_F_chromosome_1_g_3 | 51337 |
| 2277_Neisseria_gonorrhoeae_strain_WHO_F_chromosome_1_g_4 | 51338 |
| 2277_Neisseria_gonorrhoeae_strain_WHO_F_chromosome_1_g_5 | 51339 |
| 2278_Neisseria_gonorrhoeae_strain_WHO_F_chromosome_1_g_1 | 51340 |
| 2278_Neisseria_gonorrhoeae_strain_WHO_F_chromosome_1_g_2 | 51341 |
| 2278_Neisseria_gonorrhoeae_strain_WHO_F_chromosome_1_g_3 | 51342 |
| 2278_Neisseria_gonorrhoeae_strain_WHO_F_chromosome_1_g_4 | 51343 |
| 2278_Neisseria_gonorrhoeae_strain_WHO_F_chromosome_1_g_5 | 51344 |
| 2279_Neisseria_gonorrhoeae_strain_WHO_F_chromosome_1_g_1 | 51345 |
| 2279_Neisseria_gonorrhoeae_strain_WHO_F_chromosome_1_g_2 | 51346 |
| 2279_Neisseria_gonorrhoeae_strain_WHO_F_chromosome_1_g_3 | 51347 |
| 2279_Neisseria_gonorrhoeae_strain_WHO_F_chromosome_1_g_4 | 51348 |
| 2279_Neisseria_gonorrhoeae_strain_WHO_F_chromosome_1_g_5 | 51349 |
| 2280_Neisseria_gonorrhoeae_strain_WHO_F_chromosome_1_g_1 | 51350 |
| 2280_Neisseria_gonorrhoeae_strain_WHO_F_chromosome_1_g_2 | 51351 |
| 2280_Neisseria_gonorrhoeae_strain_WHO_F_chromosome_1_g_3 | 51352 |
| 2280_Neisseria_gonorrhoeae_strain_WHO_F_chromosome_1_g_4 | 51353 |
| 2280_Neisseria_gonorrhoeae_strain_WHO_F_chromosome_1_g_5 | 51354 |
| 2281_Neisseria_gonorrhoeae_strain_WHO_F_chromosome_1_g_1 | 51355 |
| 2281_Neisseria_gonorrhoeae_strain_WHO_F_chromosome_1_g_2 | 51356 |
| 2281_Neisseria_gonorrhoeae_strain_WHO_F_chromosome_1_g_3 | 51357 |
| 2281_Neisseria_gonorrhoeae_strain_WHO_F_chromosome_1_g_4 | 51358 |
| 2281_Neisseria_gonorrhoeae_strain_WHO_F_chromosome_1_g_5 | 51359 |
| 2282_Neisseria_gonorrhoeae_strain_WHO_F_chromosome_1_g_1 | 51360 |
| 2282_Neisseria_gonorrhoeae_strain_WHO_F_chromosome_1_g_2 | 51361 |
| 2282_Neisseria_gonorrhoeae_strain_WHO_F_chromosome_1_g_3 | 51362 |
| 2282_Neisseria_gonorrhoeae_strain_WHO_F_chromosome_1_g_4 | 51363 |
| 2282_Neisseria_gonorrhoeae_strain_WHO_F_chromosome_1_g_5 | 51364 |
| 2283_Neisseria_gonorrhoeae_strain_WHO_F_chromosome_1_g_1 | 51365 |
| 2283_Neisseria_gonorrhoeae_strain_WHO_F_chromosome_1_g_2 | 51366 |
| 2283_Neisseria_gonorrhoeae_strain_WHO_F_chromosome_1_g_3 | 51367 |
| 2283_Neisseria_gonorrhoeae_strain_WHO_F_chromosome_1_g_4 | 51368 |
| 2283_Neisseria_gonorrhoeae_strain_WHO_F_chromosome_1_g_5 | 51369 |
| 2284_Neisseria_gonorrhoeae_strain_WHO_F_chromosome_1_g_1 | 51370 |
| 2284_Neisseria_gonorrhoeae_strain_WHO_F_chromosome_1_g_2 | 51371 |
| 2284_Neisseria_gonorrhoeae_strain_WHO_F_chromosome_1_g_3 | 51372 |
| 2284_Neisseria_gonorrhoeae_strain_WHO_F_chromosome_1_g_4 | 51373 |
| 2284_Neisseria_gonorrhoeae_strain_WHO_F_chromosome_1_g_5 | 51374 |
| 2285_Neisseria_gonorrhoeae_strain_WHO_F_chromosome_1_g_1 | 51375 |
| 2285_Neisseria_gonorrhoeae_strain_WHO_F_chromosome_1_g_2 | 51376 |
| 2285_Neisseria_gonorrhoeae_strain_WHO_F_chromosome_1_g_3 | 51377 |
| 2285_Neisseria_gonorrhoeae_strain_WHO_F_chromosome_1_g_4 | 51378 |
| 2285_Neisseria_gonorrhoeae_strain_WHO_F_chromosome_1_g_5 | 51379 |
| 2286_Neisseria_gonorrhoeae_strain_WHO_F_chromosome_1_g_1 | 51380 |
| 2286_Neisseria_gonorrhoeae_strain_WHO_F_chromosome_1_g_2 | 51381 |
| 2286_Neisseria_gonorrhoeae_strain_WHO_F_chromosome_1_g_3 | 51382 |
| 2286_Neisseria_gonorrhoeae_strain_WHO_F_chromosome_1_g_4 | 51383 |
| 2286_Neisseria_gonorrhoeae_strain_WHO_F_chromosome_1_g_5 | 51384 |
| 2287_Neisseria_gonorrhoeae_strain_WHO_F_chromosome_1_g_1 | 51385 |
| 2287_Neisseria_gonorrhoeae_strain_WHO_F_chromosome_1_g_2 | 51386 |
| 2287_Neisseria_gonorrhoeae_strain_WHO_F_chromosome_1_g_3 | 51387 |
| 2287_Neisseria_gonorrhoeae_strain_WHO_F_chromosome_1_g_4 | 51388 |
| 2287_Neisseria_gonorrhoeae_strain_WHO_F_chromosome_1_g_5 | 51389 |
| 2288_Neisseria_gonorrhoeae_strain_WHO_F_chromosome_1_g_1 | 51390 |
| 2288_Neisseria_gonorrhoeae_strain_WHO_F_chromosome_1_g_2 | 51391 |
| 2288_Neisseria_gonorrhoeae_strain_WHO_F_chromosome_1_g_3 | 51392 |
| 2288_Neisseria_gonorrhoeae_strain_WHO_F_chromosome_1_g_4 | 51393 |
| 2288_Neisseria_gonorrhoeae_strain_WHO_F_chromosome_1_g_5 | 51394 |
| 2289_Neisseria_gonorrhoeae_strain_WHO_F_chromosome_1_g_1 | 51395 |
| 2289_Neisseria_gonorrhoeae_strain_WHO_F_chromosome_1_g_2 | 51396 |
| 2289_Neisseria_gonorrhoeae_strain_WHO_F_chromosome_1_g_3 | 51397 |
| 2289_Neisseria_gonorrhoeae_strain_WHO_F_chromosome_1_g_4 | 51398 |
| 2289_Neisseria_gonorrhoeae_strain_WHO_F_chromosome_1_g_5 | 51399 |
| 2290_Neisseria_gonorrhoeae_strain_WHO_F_chromosome_1_g_1 | 51400 |
| 2290_Neisseria_gonorrhoeae_strain_WHO_F_chromosome_1_g_2 | 51401 |
| 2290_Neisseria_gonorrhoeae_strain_WHO_F_chromosome_1_g_3 | 51402 |
| 2290_Neisseria_gonorrhoeae_strain_WHO_F_chromosome_1_g_4 | 51403 |
| 2290_Neisseria_gonorrhoeae_strain_WHO_F_chromosome_1_g_5 | 51404 |
| 2291_Neisseria_gonorrhoeae_strain_WHO_F_chromosome_1_g_1 | 51405 |
| 2291_Neisseria_gonorrhoeae_strain_WHO_F_chromosome_1_g_2 | 51406 |
| 2291_Neisseria_gonorrhoeae_strain_WHO_F_chromosome_1_g_3 | 51407 |
| 2291_Neisseria_gonorrhoeae_strain_WHO_F_chromosome_1_g_4 | 51408 |
| 2291_Neisseria_gonorrhoeae_strain_WHO_F_chromosome_1_g_5 | 51409 |
| 2292_Neisseria_gonorrhoeae_strain_WHO_F_chromosome_1_g_1 | 51410 |
| 2292_Neisseria_gonorrhoeae_strain_WHO_F_chromosome_1_g_2 | 51411 |
| 2292_Neisseria_gonorrhoeae_strain_WHO_F_chromosome_1_g_3 | 51412 |
| 2292_Neisseria_gonorrhoeae_strain_WHO_F_chromosome_1_g_4 | 51413 |
| 2292_Neisseria_gonorrhoeae_strain_WHO_F_chromosome_1_g_5 | 51414 |
| 2293_Neisseria_gonorrhoeae_strain_WHO_F_chromosome_1_g_1 | 51415 |
| 2293_Neisseria_gonorrhoeae_strain_WHO_F_chromosome_1_g_2 | 51416 |
| 2293_Neisseria_gonorrhoeae_strain_WHO_F_chromosome_1_g_3 | 51417 |
| 2293_Neisseria_gonorrhoeae_strain_WHO_F_chromosome_1_g_4 | 51418 |
| 2293_Neisseria_gonorrhoeae_strain_WHO_F_chromosome_1_g_5 | 51419 |
| 2294_Neisseria_gonorrhoeae_strain_WHO_F_chromosome_1_g_1 | 51420 |
| 2294_Neisseria_gonorrhoeae_strain_WHO_F_chromosome_1_g_2 | 51421 |
| 2294_Neisseria_gonorrhoeae_strain_WHO_F_chromosome_1_g_3 | 51422 |
| 2294_Neisseria_gonorrhoeae_strain_WHO_F_chromosome_1_g_4 | 51423 |
| 2294_Neisseria_gonorrhoeae_strain_WHO_F_chromosome_1_g_5 | 51424 |
| 2295_Neisseria_gonorrhoeae_strain_WHO_F_chromosome_1_g_1 | 51425 |
| 2295_Neisseria_gonorrhoeae_strain_WHO_F_chromosome_1_g_2 | 51426 |
| 2296_Neisseria_gonorrhoeae_strain_WHO_F_chromosome_1_g_1 | 51427 |
| 2296_Neisseria_gonorrhoeae_strain_WHO_F_chromosome_1_g_2 | 51428 |
| 2296_Neisseria_gonorrhoeae_strain_WHO_F_chromosome_1_g_3 | 51429 |
| 2296_Neisseria_gonorrhoeae_strain_WHO_F_chromosome_1_g_4 | 51430 |
| 2296_Neisseria_gonorrhoeae_strain_WHO_F_chromosome_1_g_5 | 51431 |
| 2297_Neisseria_gonorrhoeae_strain_WHO_F_chromosome_1_g_1 | 51432 |
| 2297_Neisseria_gonorrhoeae_strain_WHO_F_chromosome_1_g_2 | 51433 |
| 2297_Neisseria_gonorrhoeae_strain_WHO_F_chromosome_1_g_3 | 51434 |
| 2297_Neisseria_gonorrhoeae_strain_WHO_F_chromosome_1_g_4 | 51435 |
| 2297_Neisseria_gonorrhoeae_strain_WHO_F_chromosome_1_g_5 | 51436 |
| 2298_Neisseria_gonorrhoeae_strain_WHO_F_chromosome_1_g_1 | 51437 |
| 2298_Neisseria_gonorrhoeae_strain_WHO_F_chromosome_1_g_2 | 51438 |
| 2298_Neisseria_gonorrhoeae_strain_WHO_F_chromosome_1_g_3 | 51439 |
| 2298_Neisseria_gonorrhoeae_strain_WHO_F_chromosome_1_g_4 | 51440 |
| 2298_Neisseria_gonorrhoeae_strain_WHO_F_chromosome_1_g_5 | 51441 |
| 2299_Neisseria_gonorrhoeae_strain_WHO_F_chromosome_1_g_1 | 51442 |
| 2299_Neisseria_gonorrhoeae_strain_WHO_F_chromosome_1_g_2 | 51443 |
| 2299_Neisseria_gonorrhoeae_strain_WHO_F_chromosome_1_g_3 | 51444 |
| 2299_Neisseria_gonorrhoeae_strain_WHO_F_chromosome_1_g_4 | 51445 |
| 2299_Neisseria_gonorrhoeae_strain_WHO_F_chromosome_1_g_5 | 51446 |
| 2300_Neisseria_gonorrhoeae_strain_WHO_F_chromosome_1_g_1 | 51447 |
| 2300_Neisseria_gonorrhoeae_strain_WHO_F_chromosome_1_g_2 | 51448 |
| 2300_Neisseria_gonorrhoeae_strain_WHO_F_chromosome_1_g_3 | 51449 |
| 2300_Neisseria_gonorrhoeae_strain_WHO_F_chromosome_1_g_4 | 51450 |
| 2300_Neisseria_gonorrhoeae_strain_WHO_F_chromosome_1_g_5 | 51451 |
| 2301_Neisseria_gonorrhoeae_strain_WHO_F_chromosome_1_g_1 | 51452 |
| 2301_Neisseria_gonorrhoeae_strain_WHO_F_chromosome_1_g_2 | 51453 |
| 2301_Neisseria_gonorrhoeae_strain_WHO_F_chromosome_1_g_3 | 51454 |
| 2301_Neisseria_gonorrhoeae_strain_WHO_F_chromosome_1_g_4 | 51455 |
| 2301_Neisseria_gonorrhoeae_strain_WHO_F_chromosome_1_g_5 | 51456 |
| 2302_Neisseria_gonorrhoeae_strain_WHO_F_chromosome_1_g_1 | 51457 |
| 2302_Neisseria_gonorrhoeae_strain_WHO_F_chromosome_1_g_2 | 51458 |
| 2302_Neisseria_gonorrhoeae_strain_WHO_F_chromosome_1_g_3 | 51459 |
| 2302_Neisseria_gonorrhoeae_strain_WHO_F_chromosome_1_g_4 | 51460 |
| 2302_Neisseria_gonorrhoeae_strain_WHO_F_chromosome_1_g_5 | 51461 |
| 2303_Neisseria_gonorrhoeae_strain_WHO_F_chromosome_1_g_1 | 51462 |
| 2303_Neisseria_gonorrhoeae_strain_WHO_F_chromosome_1_g_2 | 51463 |
| 2303_Neisseria_gonorrhoeae_strain_WHO_F_chromosome_1_g_3 | 51464 |
| 2303_Neisseria_gonorrhoeae_strain_WHO_F_chromosome_1_g_4 | 51465 |
| 2303_Neisseria_gonorrhoeae_strain_WHO_F_chromosome_1_g_5 | 51466 |
| 2304_Neisseria_gonorrhoeae_strain_WHO_F_chromosome_1_g_1 | 51467 |
| 2304_Neisseria_gonorrhoeae_strain_WHO_F_chromosome_1_g_2 | 51468 |
| 2304_Neisseria_gonorrhoeae_strain_WHO_F_chromosome_1_g_3 | 51469 |
| 2304_Neisseria_gonorrhoeae_strain_WHO_F_chromosome_1_g_4 | 51470 |
| 2304_Neisseria_gonorrhoeae_strain_WHO_F_chromosome_1_g_5 | 51471 |
| 2305_Neisseria_gonorrhoeae_strain_WHO_F_chromosome_1_g_1 | 51472 |
| 2305_Neisseria_gonorrhoeae_strain_WHO_F_chromosome_1_g_2 | 51473 |
| 2305_Neisseria_gonorrhoeae_strain_WHO_F_chromosome_1_g_3 | 51474 |
| 2305_Neisseria_gonorrhoeae_strain_WHO_F_chromosome_1_g_4 | 51475 |
| 2305_Neisseria_gonorrhoeae_strain_WHO_F_chromosome_1_g_5 | 51476 |
| 2306_Neisseria_gonorrhoeae_strain_WHO_F_chromosome_1_g_1 | 51477 |
| 2306_Neisseria_gonorrhoeae_strain_WHO_F_chromosome_1_g_2 | 51478 |
| 2306_Neisseria_gonorrhoeae_strain_WHO_F_chromosome_1_g_3 | 51479 |
| 2306_Neisseria_gonorrhoeae_strain_WHO_F_chromosome_1_g_4 | 51480 |
| 2306_Neisseria_gonorrhoeae_strain_WHO_F_chromosome_1_g_5 | 51481 |
| 2307_Neisseria_gonorrhoeae_strain_WHO_F_chromosome_1_g_1 | 51482 |
| 2307_Neisseria_gonorrhoeae_strain_WHO_F_chromosome_1_g_2 | 51483 |
| 2307_Neisseria_gonorrhoeae_strain_WHO_F_chromosome_1_g_3 | 51484 |
| 2307_Neisseria_gonorrhoeae_strain_WHO_F_chromosome_1_g_4 | 51485 |
| 2307_Neisseria_gonorrhoeae_strain_WHO_F_chromosome_1_g_5 | 51486 |
| 2308_Neisseria_gonorrhoeae_strain_WHO_F_chromosome_1_g_1 | 51487 |
| 2308_Neisseria_gonorrhoeae_strain_WHO_F_chromosome_1_g_2 | 51488 |
| 2308_Neisseria_gonorrhoeae_strain_WHO_F_chromosome_1_g_3 | 51489 |
| 2308_Neisseria_gonorrhoeae_strain_WHO_F_chromosome_1_g_4 | 51490 |
| 2308_Neisseria_gonorrhoeae_strain_WHO_F_chromosome_1_g_5 | 51491 |
| 2309_Neisseria_gonorrhoeae_strain_WHO_F_chromosome_1_g_1 | 51492 |
| 2309_Neisseria_gonorrhoeae_strain_WHO_F_chromosome_1_g_2 | 51493 |
| 2309_Neisseria_gonorrhoeae_strain_WHO_F_chromosome_1_g_3 | 51494 |
| 2309_Neisseria_gonorrhoeae_strain_WHO_F_chromosome_1_g_4 | 51495 |
| 2309_Neisseria_gonorrhoeae_strain_WHO_F_chromosome_1_g_5 | 51496 |
| 2310_Neisseria_gonorrhoeae_strain_WHO_F_chromosome_1_g_1 | 51497 |
| 2310_Neisseria_gonorrhoeae_strain_WHO_F_chromosome_1_g_2 | 51498 |
| 2310_Neisseria_gonorrhoeae_strain_WHO_F_chromosome_1_g_3 | 51499 |
| 2310_Neisseria_gonorrhoeae_strain_WHO_F_chromosome_1_g_4 | 51500 |
| 2310_Neisseria_gonorrhoeae_strain_WHO_F_chromosome_1_g_5 | 51501 |
| 2311_Neisseria_gonorrhoeae_strain_WHO_F_chromosome_1_g_1 | 51502 |
| 2311_Neisseria_gonorrhoeae_strain_WHO_F_chromosome_1_g_2 | 51503 |
| 2311_Neisseria_gonorrhoeae_strain_WHO_F_chromosome_1_g_3 | 51504 |
| 2311_Neisseria_gonorrhoeae_strain_WHO_F_chromosome_1_g_4 | 51505 |
| 2311_Neisseria_gonorrhoeae_strain_WHO_F_chromosome_1_g_5 | 51506 |
| 2312_Neisseria_gonorrhoeae_strain_WHO_F_chromosome_1_g_1 | 51507 |
| 2312_Neisseria_gonorrhoeae_strain_WHO_F_chromosome_1_g_2 | 51508 |
| 2312_Neisseria_gonorrhoeae_strain_WHO_F_chromosome_1_g_3 | 51509 |
| 2312_Neisseria_gonorrhoeae_strain_WHO_F_chromosome_1_g_4 | 51510 |
| 2312_Neisseria_gonorrhoeae_strain_WHO_F_chromosome_1_g_5 | 51511 |
| 2313_Neisseria_gonorrhoeae_strain_WHO_F_chromosome_1_g_1 | 51512 |
| 2313_Neisseria_gonorrhoeae_strain_WHO_F_chromosome_1_g_2 | 51513 |
| 2313_Neisseria_gonorrhoeae_strain_WHO_F_chromosome_1_g_3 | 51514 |
| 2313_Neisseria_gonorrhoeae_strain_WHO_F_chromosome_1_g_4 | 51515 |
| 2313_Neisseria_gonorrhoeae_strain_WHO_F_chromosome_1_g_5 | 51516 |
| 2314_Neisseria_gonorrhoeae_strain_WHO_F_chromosome_1_g_1 | 51517 |
| 2314_Neisseria_gonorrhoeae_strain_WHO_F_chromosome_1_g_2 | 51518 |
| 2314_Neisseria_gonorrhoeae_strain_WHO_F_chromosome_1_g_3 | 51519 |
| 2314_Neisseria_gonorrhoeae_strain_WHO_F_chromosome_1_g_4 | 51520 |
| 2314_Neisseria_gonorrhoeae_strain_WHO_F_chromosome_1_g_5 | 51521 |
| 2315_Neisseria_gonorrhoeae_strain_WHO_F_chromosome_1_g_1 | 51522 |
| 2315_Neisseria_gonorrhoeae_strain_WHO_F_chromosome_1_g_2 | 51523 |
| 2315_Neisseria_gonorrhoeae_strain_WHO_F_chromosome_1_g_3 | 51524 |
| 2315_Neisseria_gonorrhoeae_strain_WHO_F_chromosome_1_g_4 | 51525 |
| 2315_Neisseria_gonorrhoeae_strain_WHO_F_chromosome_1_g_5 | 51526 |
| 2316_Neisseria_gonorrhoeae_strain_WHO_F_chromosome_1_g_1 | 51527 |
| 2316_Neisseria_gonorrhoeae_strain_WHO_F_chromosome_1_g_2 | 51528 |
| 2316_Neisseria_gonorrhoeae_strain_WHO_F_chromosome_1_g_3 | 51529 |
| 2316_Neisseria_gonorrhoeae_strain_WHO_F_chromosome_1_g_4 | 51530 |
| 2316_Neisseria_gonorrhoeae_strain_WHO_F_chromosome_1_g_5 | 51531 |
| 2317_Neisseria_gonorrhoeae_strain_WHO_F_chromosome_1_g_1 | 51532 |
| 2317_Neisseria_gonorrhoeae_strain_WHO_F_chromosome_1_g_2 | 51533 |
| 2317_Neisseria_gonorrhoeae_strain_WHO_F_chromosome_1_g_3 | 51534 |
| 2317_Neisseria_gonorrhoeae_strain_WHO_F_chromosome_1_g_4 | 51535 |
| 2317_Neisseria_gonorrhoeae_strain_WHO_F_chromosome_1_g_5 | 51536 |
| 2318_Neisseria_gonorrhoeae_strain_WHO_F_chromosome_1_g_1 | 51537 |
| 2318_Neisseria_gonorrhoeae_strain_WHO_F_chromosome_1_g_2 | 51538 |
| 2318_Neisseria_gonorrhoeae_strain_WHO_F_chromosome_1_g_3 | 51539 |
| 2318_Neisseria_gonorrhoeae_strain_WHO_F_chromosome_1_g_4 | 51540 |
| 2318_Neisseria_gonorrhoeae_strain_WHO_F_chromosome_1_g_5 | 51541 |
| 2319_Neisseria_gonorrhoeae_strain_WHO_F_chromosome_1_g_1 | 51542 |
| 2319_Neisseria_gonorrhoeae_strain_WHO_F_chromosome_1_g_2 | 51543 |
| 2319_Neisseria_gonorrhoeae_strain_WHO_F_chromosome_1_g_3 | 51544 |
| 2319_Neisseria_gonorrhoeae_strain_WHO_F_chromosome_1_g_4 | 51545 |
| 2319_Neisseria_gonorrhoeae_strain_WHO_F_chromosome_1_g_5 | 51546 |
| 2320_Neisseria_gonorrhoeae_strain_WHO_F_chromosome_1_g_1 | 51547 |
| 2320_Neisseria_gonorrhoeae_strain_WHO_F_chromosome_1_g_2 | 51548 |
| 2320_Neisseria_gonorrhoeae_strain_WHO_F_chromosome_1_g_3 | 51549 |
| 2320_Neisseria_gonorrhoeae_strain_WHO_F_chromosome_1_g_4 | 51550 |
| 2320_Neisseria_gonorrhoeae_strain_WHO_F_chromosome_1_g_5 | 51551 |
| 2321_Neisseria_gonorrhoeae_strain_WHO_F_chromosome_1_g_1 | 51552 |
| 2321_Neisseria_gonorrhoeae_strain_WHO_F_chromosome_1_g_2 | 51553 |
| 2321_Neisseria_gonorrhoeae_strain_WHO_F_chromosome_1_g_3 | 51554 |
| 2321_Neisseria_gonorrhoeae_strain_WHO_F_chromosome_1_g_4 | 51555 |
| 2321_Neisseria_gonorrhoeae_strain_WHO_F_chromosome_1_g_5 | 51556 |
| 2322_Neisseria_gonorrhoeae_strain_WHO_F_chromosome_1_g_1 | 51557 |
| 2322_Neisseria_gonorrhoeae_strain_WHO_F_chromosome_1_g_2 | 51558 |
| 2322_Neisseria_gonorrhoeae_strain_WHO_F_chromosome_1_g_3 | 51559 |
| 2322_Neisseria_gonorrhoeae_strain_WHO_F_chromosome_1_g_4 | 51560 |
| 2322_Neisseria_gonorrhoeae_strain_WHO_F_chromosome_1_g_5 | 51561 |
| 2323_Neisseria_gonorrhoeae_strain_WHO_F_chromosome_1_g_1 | 51562 |
| 2323_Neisseria_gonorrhoeae_strain_WHO_F_chromosome_1_g_2 | 51563 |
| 2323_Neisseria_gonorrhoeae_strain_WHO_F_chromosome_1_g_3 | 51564 |
| 2323_Neisseria_gonorrhoeae_strain_WHO_F_chromosome_1_g_4 | 51565 |
| 2323_Neisseria_gonorrhoeae_strain_WHO_F_chromosome_1_g_5 | 51566 |
| 2324_Neisseria_gonorrhoeae_strain_WHO_F_chromosome_1_g_1 | 51567 |
| 2325_Neisseria_gonorrhoeae_strain_WHO_F_chromosome_1_g_1 | 51568 |
| 2325_Neisseria_gonorrhoeae_strain_WHO_F_chromosome_1_g_2 | 51569 |
| 2325_Neisseria_gonorrhoeae_strain_WHO_F_chromosome_1_g_3 | 51570 |
| 2325_Neisseria_gonorrhoeae_strain_WHO_F_chromosome_1_g_4 | 51571 |
| 2325_Neisseria_gonorrhoeae_strain_WHO_F_chromosome_1_g_5 | 51572 |
| 2326_Neisseria_gonorrhoeae_strain_WHO_F_chromosome_1_g_1 | 51573 |
| 2326_Neisseria_gonorrhoeae_strain_WHO_F_chromosome_1_g_2 | 51574 |
| 2326_Neisseria_gonorrhoeae_strain_WHO_F_chromosome_1_g_3 | 51575 |
| 2326_Neisseria_gonorrhoeae_strain_WHO_F_chromosome_1_g_4 | 51576 |
| 2326_Neisseria_gonorrhoeae_strain_WHO_F_chromosome_1_g_5 | 51577 |
| 2327_Neisseria_gonorrhoeae_strain_WHO_F_chromosome_1_g_1 | 51578 |
| 2327_Neisseria_gonorrhoeae_strain_WHO_F_chromosome_1_g_2 | 51579 |
| 2327_Neisseria_gonorrhoeae_strain_WHO_F_chromosome_1_g_3 | 51580 |
| 2327_Neisseria_gonorrhoeae_strain_WHO_F_chromosome_1_g_4 | 51581 |
| 2327_Neisseria_gonorrhoeae_strain_WHO_F_chromosome_1_g_5 | 51582 |
| 2328_Neisseria_gonorrhoeae_strain_WHO_F_chromosome_1_g_1 | 51583 |
| 2328_Neisseria_gonorrhoeae_strain_WHO_F_chromosome_1_g_2 | 51584 |
| 2328_Neisseria_gonorrhoeae_strain_WHO_F_chromosome_1_g_3 | 51585 |
| 2328_Neisseria_gonorrhoeae_strain_WHO_F_chromosome_1_g_4 | 51586 |
| 2328_Neisseria_gonorrhoeae_strain_WHO_F_chromosome_1_g_5 | 51587 |
| 2329_Neisseria_gonorrhoeae_strain_WHO_F_chromosome_1_g_1 | 51588 |
| 2329_Neisseria_gonorrhoeae_strain_WHO_F_chromosome_1_g_2 | 51589 |
| 2329_Neisseria_gonorrhoeae_strain_WHO_F_chromosome_1_g_3 | 51590 |
| 2329_Neisseria_gonorrhoeae_strain_WHO_F_chromosome_1_g_4 | 51591 |
| 2329_Neisseria_gonorrhoeae_strain_WHO_F_chromosome_1_g_5 | 51592 |
| 2330_Neisseria_gonorrhoeae_strain_WHO_F_chromosome_1_g_1 | 51593 |
| 2331_Neisseria_gonorrhoeae_strain_WHO_F_chromosome_1_g_1 | 51594 |
| 2331_Neisseria_gonorrhoeae_strain_WHO_F_chromosome_1_g_2 | 51595 |
| 2331_Neisseria_gonorrhoeae_strain_WHO_F_chromosome_1_g_3 | 51596 |
| 2331_Neisseria_gonorrhoeae_strain_WHO_F_chromosome_1_g_4 | 51597 |
| 2331_Neisseria_gonorrhoeae_strain_WHO_F_chromosome_1_g_5 | 51598 |
| 2332_Neisseria_gonorrhoeae_strain_WHO_F_chromosome_1_g_1 | 51599 |
| 2332_Neisseria_gonorrhoeae_strain_WHO_F_chromosome_1_g_2 | 51600 |
| 2332_Neisseria_gonorrhoeae_strain_WHO_F_chromosome_1_g_3 | 51601 |
| 2332_Neisseria_gonorrhoeae_strain_WHO_F_chromosome_1_g_4 | 51602 |
| 2332_Neisseria_gonorrhoeae_strain_WHO_F_chromosome_1_g_5 | 51603 |
| 2333_Neisseria_gonorrhoeae_strain_WHO_F_chromosome_1_g_1 | 51604 |
| 2333_Neisseria_gonorrhoeae_strain_WHO_F_chromosome_1_g_2 | 51605 |
| 2333_Neisseria_gonorrhoeae_strain_WHO_F_chromosome_1_g_3 | 51606 |
| 2333_Neisseria_gonorrhoeae_strain_WHO_F_chromosome_1_g_4 | 51607 |
| 2333_Neisseria_gonorrhoeae_strain_WHO_F_chromosome_1_g_5 | 51608 |
| 2334_Neisseria_gonorrhoeae_strain_WHO_F_chromosome_1_g_1 | 51609 |
| 2334_Neisseria_gonorrhoeae_strain_WHO_F_chromosome_1_g_2 | 51610 |
| 2334_Neisseria_gonorrhoeae_strain_WHO_F_chromosome_1_g_3 | 51611 |
| 2334_Neisseria_gonorrhoeae_strain_WHO_F_chromosome_1_g_4 | 51612 |
| 2334_Neisseria_gonorrhoeae_strain_WHO_F_chromosome_1_g_5 | 51613 |
| 2335_Neisseria_gonorrhoeae_strain_WHO_F_chromosome_1_g_1 | 51614 |
| 2335_Neisseria_gonorrhoeae_strain_WHO_F_chromosome_1_g_2 | 51615 |
| 2335_Neisseria_gonorrhoeae_strain_WHO_F_chromosome_1_g_3 | 51616 |
| 2335_Neisseria_gonorrhoeae_strain_WHO_F_chromosome_1_g_4 | 51617 |
| 2335_Neisseria_gonorrhoeae_strain_WHO_F_chromosome_1_g_5 | 51618 |
| 2336_Neisseria_gonorrhoeae_strain_WHO_F_chromosome_1_g_1 | 51619 |
| 2336_Neisseria_gonorrhoeae_strain_WHO_F_chromosome_1_g_2 | 51620 |
| 2336_Neisseria_gonorrhoeae_strain_WHO_F_chromosome_1_g_3 | 51621 |
| 2336_Neisseria_gonorrhoeae_strain_WHO_F_chromosome_1_g_4 | 51622 |
| 2336_Neisseria_gonorrhoeae_strain_WHO_F_chromosome_1_g_5 | 51623 |
| 2337_Neisseria_gonorrhoeae_strain_WHO_F_chromosome_1_g_1 | 51624 |
| 2337_Neisseria_gonorrhoeae_strain_WHO_F_chromosome_1_g_2 | 51625 |
| 2337_Neisseria_gonorrhoeae_strain_WHO_F_chromosome_1_g_3 | 51626 |
| 2337_Neisseria_gonorrhoeae_strain_WHO_F_chromosome_1_g_4 | 51627 |
| 2337_Neisseria_gonorrhoeae_strain_WHO_F_chromosome_1_g_5 | 51628 |
| 2338_Neisseria_gonorrhoeae_strain_WHO_F_chromosome_1_g_1 | 51629 |
| 2338_Neisseria_gonorrhoeae_strain_WHO_F_chromosome_1_g_2 | 51630 |
| 2338_Neisseria_gonorrhoeae_strain_WHO_F_chromosome_1_g_3 | 51631 |
| 2338_Neisseria_gonorrhoeae_strain_WHO_F_chromosome_1_g_4 | 51632 |
| 2338_Neisseria_gonorrhoeae_strain_WHO_F_chromosome_1_g_5 | 51633 |
| 2339_Neisseria_gonorrhoeae_strain_WHO_F_chromosome_1_g_1 | 51634 |
| 2339_Neisseria_gonorrhoeae_strain_WHO_F_chromosome_1_g_2 | 51635 |
| 2339_Neisseria_gonorrhoeae_strain_WHO_F_chromosome_1_g_3 | 51636 |
| 2339_Neisseria_gonorrhoeae_strain_WHO_F_chromosome_1_g_4 | 51637 |
| 2339_Neisseria_gonorrhoeae_strain_WHO_F_chromosome_1_g_5 | 51638 |
| 2340_Neisseria_gonorrhoeae_strain_WHO_F_chromosome_1_g_1 | 51639 |
| 2340_Neisseria_gonorrhoeae_strain_WHO_F_chromosome_1_g_2 | 51640 |
| 2340_Neisseria_gonorrhoeae_strain_WHO_F_chromosome_1_g_3 | 51641 |
| 2340_Neisseria_gonorrhoeae_strain_WHO_F_chromosome_1_g_4 | 51642 |
| 2340_Neisseria_gonorrhoeae_strain_WHO_F_chromosome_1_g_5 | 51643 |
| 2341_Neisseria_gonorrhoeae_strain_WHO_F_chromosome_1_g_1 | 51644 |
| 2341_Neisseria_gonorrhoeae_strain_WHO_F_chromosome_1_g_2 | 51645 |
| 2341_Neisseria_gonorrhoeae_strain_WHO_F_chromosome_1_g_3 | 51646 |
| 2341_Neisseria_gonorrhoeae_strain_WHO_F_chromosome_1_g_4 | 51647 |
| 2341_Neisseria_gonorrhoeae_strain_WHO_F_chromosome_1_g_5 | 51648 |
| 2342_Neisseria_gonorrhoeae_strain_WHO_F_chromosome_1_g_1 | 51649 |
| 2342_Neisseria_gonorrhoeae_strain_WHO_F_chromosome_1_g_2 | 51650 |
| 2342_Neisseria_gonorrhoeae_strain_WHO_F_chromosome_1_g_3 | 51651 |
| 2342_Neisseria_gonorrhoeae_strain_WHO_F_chromosome_1_g_4 | 51652 |
| 2342_Neisseria_gonorrhoeae_strain_WHO_F_chromosome_1_g_5 | 51653 |
| 2343_Neisseria_gonorrhoeae_strain_WHO_F_chromosome_1_g_1 | 51654 |
| 2343_Neisseria_gonorrhoeae_strain_WHO_F_chromosome_1_g_2 | 51655 |
| 2343_Neisseria_gonorrhoeae_strain_WHO_F_chromosome_1_g_3 | 51656 |
| 2343_Neisseria_gonorrhoeae_strain_WHO_F_chromosome_1_g_4 | 51657 |
| 2343_Neisseria_gonorrhoeae_strain_WHO_F_chromosome_1_g_5 | 51658 |
| 2344_Neisseria_gonorrhoeae_strain_WHO_F_chromosome_1_g_1 | 51659 |
| 2344_Neisseria_gonorrhoeae_strain_WHO_F_chromosome_1_g_2 | 51660 |
| 2344_Neisseria_gonorrhoeae_strain_WHO_F_chromosome_1_g_3 | 51661 |
| 2344_Neisseria_gonorrhoeae_strain_WHO_F_chromosome_1_g_4 | 51662 |
| 2344_Neisseria_gonorrhoeae_strain_WHO_F_chromosome_1_g_5 | 51663 |
| 2345_Neisseria_gonorrhoeae_strain_WHO_F_chromosome_1_g_1 | 51664 |
| 2345_Neisseria_gonorrhoeae_strain_WHO_F_chromosome_1_g_2 | 51665 |
| 2345_Neisseria_gonorrhoeae_strain_WHO_F_chromosome_1_g_3 | 51666 |
| 2345_Neisseria_gonorrhoeae_strain_WHO_F_chromosome_1_g_4 | 51667 |
| 2345_Neisseria_gonorrhoeae_strain_WHO_F_chromosome_1_g_5 | 51668 |
| 2346_Neisseria_gonorrhoeae_strain_WHO_F_chromosome_1_g_1 | 51669 |
| 2346_Neisseria_gonorrhoeae_strain_WHO_F_chromosome_1_g_2 | 51670 |
| 2346_Neisseria_gonorrhoeae_strain_WHO_F_chromosome_1_g_3 | 51671 |
| 2346_Neisseria_gonorrhoeae_strain_WHO_F_chromosome_1_g_4 | 51672 |
| 2346_Neisseria_gonorrhoeae_strain_WHO_F_chromosome_1_g_5 | 51673 |
| 2347_Neisseria_gonorrhoeae_strain_WHO_F_chromosome_1_g_1 | 51674 |
| 2347_Neisseria_gonorrhoeae_strain_WHO_F_chromosome_1_g_2 | 51675 |
| 2347_Neisseria_gonorrhoeae_strain_WHO_F_chromosome_1_g_3 | 51676 |
| 2347_Neisseria_gonorrhoeae_strain_WHO_F_chromosome_1_g_4 | 51677 |
| 2347_Neisseria_gonorrhoeae_strain_WHO_F_chromosome_1_g_5 | 51678 |
| 2348_Neisseria_gonorrhoeae_strain_WHO_F_chromosome_1_g_1 | 51679 |
| 2348_Neisseria_gonorrhoeae_strain_WHO_F_chromosome_1_g_2 | 51680 |
| 2348_Neisseria_gonorrhoeae_strain_WHO_F_chromosome_1_g_3 | 51681 |
| 2348_Neisseria_gonorrhoeae_strain_WHO_F_chromosome_1_g_4 | 51682 |
| 2348_Neisseria_gonorrhoeae_strain_WHO_F_chromosome_1_g_5 | 51683 |
| 2349_Neisseria_gonorrhoeae_strain_WHO_F_chromosome_1_g_1 | 51684 |
| 2349_Neisseria_gonorrhoeae_strain_WHO_F_chromosome_1_g_2 | 51685 |
| 2349_Neisseria_gonorrhoeae_strain_WHO_F_chromosome_1_g_3 | 51686 |
| 2349_Neisseria_gonorrhoeae_strain_WHO_F_chromosome_1_g_4 | 51687 |
| 2349_Neisseria_gonorrhoeae_strain_WHO_F_chromosome_1_g_5 | 51688 |
| 2350_Neisseria_gonorrhoeae_strain_WHO_F_chromosome_1_g_1 | 51689 |
| 2350_Neisseria_gonorrhoeae_strain_WHO_F_chromosome_1_g_2 | 51690 |
| 2350_Neisseria_gonorrhoeae_strain_WHO_F_chromosome_1_g_3 | 51691 |
| 2350_Neisseria_gonorrhoeae_strain_WHO_F_chromosome_1_g_4 | 51692 |
| 2350_Neisseria_gonorrhoeae_strain_WHO_F_chromosome_1_g_5 | 51693 |
| 2351_Neisseria_gonorrhoeae_strain_WHO_F_chromosome_1_g_1 | 51694 |
| 2351_Neisseria_gonorrhoeae_strain_WHO_F_chromosome_1_g_2 | 51695 |
| 2351_Neisseria_gonorrhoeae_strain_WHO_F_chromosome_1_g_3 | 51696 |
| 2351_Neisseria_gonorrhoeae_strain_WHO_F_chromosome_1_g_4 | 51697 |
| 2351_Neisseria_gonorrhoeae_strain_WHO_F_chromosome_1_g_5 | 51698 |
| 2352_Neisseria_gonorrhoeae_strain_WHO_F_chromosome_1_g_1 | 51699 |
| 2352_Neisseria_gonorrhoeae_strain_WHO_F_chromosome_1_g_2 | 51700 |
| 2352_Neisseria_gonorrhoeae_strain_WHO_F_chromosome_1_g_3 | 51701 |
| 2352_Neisseria_gonorrhoeae_strain_WHO_F_chromosome_1_g_4 | 51702 |
| 2352_Neisseria_gonorrhoeae_strain_WHO_F_chromosome_1_g_5 | 51703 |
| 2353_Neisseria_gonorrhoeae_strain_WHO_F_chromosome_1_g_1 | 51704 |
| 2353_Neisseria_gonorrhoeae_strain_WHO_F_chromosome_1_g_2 | 51705 |
| 2353_Neisseria_gonorrhoeae_strain_WHO_F_chromosome_1_g_3 | 51706 |
| 2353_Neisseria_gonorrhoeae_strain_WHO_F_chromosome_1_g_4 | 51707 |
| 2353_Neisseria_gonorrhoeae_strain_WHO_F_chromosome_1_g_5 | 51708 |
| 2354_Neisseria_gonorrhoeae_strain_WHO_F_chromosome_1_g_1 | 51709 |
| 2354_Neisseria_gonorrhoeae_strain_WHO_F_chromosome_1_g_2 | 51710 |
| 2354_Neisseria_gonorrhoeae_strain_WHO_F_chromosome_1_g_3 | 51711 |
| 2354_Neisseria_gonorrhoeae_strain_WHO_F_chromosome_1_g_4 | 51712 |
| 2354_Neisseria_gonorrhoeae_strain_WHO_F_chromosome_1_g_5 | 51713 |
| 2355_Neisseria_gonorrhoeae_strain_WHO_F_chromosome_1_g_1 | 51714 |
| 2355_Neisseria_gonorrhoeae_strain_WHO_F_chromosome_1_g_2 | 51715 |
| 2355_Neisseria_gonorrhoeae_strain_WHO_F_chromosome_1_g_3 | 51716 |
| 2355_Neisseria_gonorrhoeae_strain_WHO_F_chromosome_1_g_4 | 51717 |
| 2355_Neisseria_gonorrhoeae_strain_WHO_F_chromosome_1_g_5 | 51718 |
| 2356_Neisseria_gonorrhoeae_strain_WHO_F_chromosome_1_g_1 | 51719 |
| 2356_Neisseria_gonorrhoeae_strain_WHO_F_chromosome_1_g_2 | 51720 |
| 2356_Neisseria_gonorrhoeae_strain_WHO_F_chromosome_1_g_3 | 51721 |
| 2356_Neisseria_gonorrhoeae_strain_WHO_F_chromosome_1_g_4 | 51722 |
| 2356_Neisseria_gonorrhoeae_strain_WHO_F_chromosome_1_g_5 | 51723 |
| 2357_Neisseria_gonorrhoeae_strain_WHO_F_chromosome_1_g_1 | 51724 |
| 2357_Neisseria_gonorrhoeae_strain_WHO_F_chromosome_1_g_2 | 51725 |
| 2357_Neisseria_gonorrhoeae_strain_WHO_F_chromosome_1_g_3 | 51726 |
| 2357_Neisseria_gonorrhoeae_strain_WHO_F_chromosome_1_g_4 | 51727 |
| 2357_Neisseria_gonorrhoeae_strain_WHO_F_chromosome_1_g_5 | 51728 |
| 2358_Neisseria_gonorrhoeae_strain_WHO_F_chromosome_1_g_1 | 51729 |
| 2358_Neisseria_gonorrhoeae_strain_WHO_F_chromosome_1_g_2 | 51730 |
| 2358_Neisseria_gonorrhoeae_strain_WHO_F_chromosome_1_g_3 | 51731 |
| 2358_Neisseria_gonorrhoeae_strain_WHO_F_chromosome_1_g_4 | 51732 |
| 2358_Neisseria_gonorrhoeae_strain_WHO_F_chromosome_1_g_5 | 51733 |
| 2359_Neisseria_gonorrhoeae_strain_WHO_F_chromosome_1_g_1 | 51734 |
| 2359_Neisseria_gonorrhoeae_strain_WHO_F_chromosome_1_g_2 | 51735 |
| 2359_Neisseria_gonorrhoeae_strain_WHO_F_chromosome_1_g_3 | 51736 |
| 2359_Neisseria_gonorrhoeae_strain_WHO_F_chromosome_1_g_4 | 51737 |
| 2359_Neisseria_gonorrhoeae_strain_WHO_F_chromosome_1_g_5 | 51738 |
| 2360_Neisseria_gonorrhoeae_strain_WHO_F_chromosome_1_g_1 | 51739 |
| 2360_Neisseria_gonorrhoeae_strain_WHO_F_chromosome_1_g_2 | 51740 |
| 2360_Neisseria_gonorrhoeae_strain_WHO_F_chromosome_1_g_3 | 51741 |
| 2360_Neisseria_gonorrhoeae_strain_WHO_F_chromosome_1_g_4 | 51742 |
| 2360_Neisseria_gonorrhoeae_strain_WHO_F_chromosome_1_g_5 | 51743 |
| 2361_Neisseria_gonorrhoeae_strain_WHO_F_chromosome_1_g_1 | 51744 |
| 2361_Neisseria_gonorrhoeae_strain_WHO_F_chromosome_1_g_2 | 51745 |
| 2361_Neisseria_gonorrhoeae_strain_WHO_F_chromosome_1_g_3 | 51746 |
| 2361_Neisseria_gonorrhoeae_strain_WHO_F_chromosome_1_g_4 | 51747 |
| 2361_Neisseria_gonorrhoeae_strain_WHO_F_chromosome_1_g_5 | 51748 |
| 2362_Neisseria_gonorrhoeae_strain_WHO_F_chromosome_1_g_1 | 51749 |
| 2362_Neisseria_gonorrhoeae_strain_WHO_F_chromosome_1_g_2 | 51750 |
| 2362_Neisseria_gonorrhoeae_strain_WHO_F_chromosome_1_g_3 | 51751 |
| 2362_Neisseria_gonorrhoeae_strain_WHO_F_chromosome_1_g_4 | 51752 |
| 2362_Neisseria_gonorrhoeae_strain_WHO_F_chromosome_1_g_5 | 51753 |
| 2363_Neisseria_gonorrhoeae_strain_WHO_F_chromosome_1_g_1 | 51754 |
| 2363_Neisseria_gonorrhoeae_strain_WHO_F_chromosome_1_g_2 | 51755 |
| 2363_Neisseria_gonorrhoeae_strain_WHO_F_chromosome_1_g_3 | 51756 |
| 2363_Neisseria_gonorrhoeae_strain_WHO_F_chromosome_1_g_4 | 51757 |
| 2363_Neisseria_gonorrhoeae_strain_WHO_F_chromosome_1_g_5 | 51758 |
| 2364_Neisseria_gonorrhoeae_strain_WHO_F_chromosome_1_g_1 | 51759 |
| 2364_Neisseria_gonorrhoeae_strain_WHO_F_chromosome_1_g_2 | 51760 |
| 2364_Neisseria_gonorrhoeae_strain_WHO_F_chromosome_1_g_3 | 51761 |
| 2364_Neisseria_gonorrhoeae_strain_WHO_F_chromosome_1_g_4 | 51762 |
| 2364_Neisseria_gonorrhoeae_strain_WHO_F_chromosome_1_g_5 | 51763 |
| 2365_Neisseria_gonorrhoeae_strain_WHO_F_chromosome_1_g_1 | 51764 |
| 2365_Neisseria_gonorrhoeae_strain_WHO_F_chromosome_1_g_2 | 51765 |
| 2365_Neisseria_gonorrhoeae_strain_WHO_F_chromosome_1_g_3 | 51766 |
| 2365_Neisseria_gonorrhoeae_strain_WHO_F_chromosome_1_g_4 | 51767 |
| 2365_Neisseria_gonorrhoeae_strain_WHO_F_chromosome_1_g_5 | 51768 |
| 2366_Neisseria_gonorrhoeae_strain_WHO_F_chromosome_1_g_1 | 51769 |
| 2366_Neisseria_gonorrhoeae_strain_WHO_F_chromosome_1_g_2 | 51770 |
| 2366_Neisseria_gonorrhoeae_strain_WHO_F_chromosome_1_g_3 | 51771 |
| 2367_Neisseria_gonorrhoeae_strain_WHO_F_chromosome_1_g_1 | 51772 |
| 2367_Neisseria_gonorrhoeae_strain_WHO_F_chromosome_1_g_2 | 51773 |
| 2367_Neisseria_gonorrhoeae_strain_WHO_F_chromosome_1_g_3 | 51774 |
| 2367_Neisseria_gonorrhoeae_strain_WHO_F_chromosome_1_g_4 | 51775 |
| 2367_Neisseria_gonorrhoeae_strain_WHO_F_chromosome_1_g_5 | 51776 |
| 2368_Neisseria_gonorrhoeae_strain_WHO_F_chromosome_1_g_1 | 51777 |
| 2368_Neisseria_gonorrhoeae_strain_WHO_F_chromosome_1_g_2 | 51778 |
| 2368_Neisseria_gonorrhoeae_strain_WHO_F_chromosome_1_g_3 | 51779 |
| 2368_Neisseria_gonorrhoeae_strain_WHO_F_chromosome_1_g_4 | 51780 |
| 2369_Neisseria_gonorrhoeae_strain_WHO_F_chromosome_1_g_1 | 51781 |
| 2369_Neisseria_gonorrhoeae_strain_WHO_F_chromosome_1_g_2 | 51782 |
| 2369_Neisseria_gonorrhoeae_strain_WHO_F_chromosome_1_g_3 | 51783 |
| 2369_Neisseria_gonorrhoeae_strain_WHO_F_chromosome_1_g_4 | 51784 |
| 2369_Neisseria_gonorrhoeae_strain_WHO_F_chromosome_1_g_5 | 51785 |
| 2370_Neisseria_gonorrhoeae_strain_WHO_F_chromosome_1_g_1 | 51786 |
| 2370_Neisseria_gonorrhoeae_strain_WHO_F_chromosome_1_g_2 | 51787 |
| 2370_Neisseria_gonorrhoeae_strain_WHO_F_chromosome_1_g_3 | 51788 |
| 2370_Neisseria_gonorrhoeae_strain_WHO_F_chromosome_1_g_4 | 51789 |
| 2370_Neisseria_gonorrhoeae_strain_WHO_F_chromosome_1_g_5 | 51790 |
| 2371_Neisseria_gonorrhoeae_strain_WHO_F_chromosome_1_g_1 | 51791 |
| 2371_Neisseria_gonorrhoeae_strain_WHO_F_chromosome_1_g_2 | 51792 |
| 2371_Neisseria_gonorrhoeae_strain_WHO_F_chromosome_1_g_3 | 51793 |
| 2371_Neisseria_gonorrhoeae_strain_WHO_F_chromosome_1_g_4 | 51794 |
| 2371_Neisseria_gonorrhoeae_strain_WHO_F_chromosome_1_g_5 | 51795 |
| 2372_Neisseria_gonorrhoeae_strain_WHO_F_chromosome_1_g_1 | 51796 |
| 2372_Neisseria_gonorrhoeae_strain_WHO_F_chromosome_1_g_2 | 51797 |
| 2372_Neisseria_gonorrhoeae_strain_WHO_F_chromosome_1_g_3 | 51798 |
| 2372_Neisseria_gonorrhoeae_strain_WHO_F_chromosome_1_g_4 | 51799 |
| 2372_Neisseria_gonorrhoeae_strain_WHO_F_chromosome_1_g_5 | 51800 |
| 2373_Neisseria_gonorrhoeae_strain_WHO_F_chromosome_1_g_1 | 51801 |
| 2373_Neisseria_gonorrhoeae_strain_WHO_F_chromosome_1_g_2 | 51802 |
| 2373_Neisseria_gonorrhoeae_strain_WHO_F_chromosome_1_g_3 | 51803 |
| 2373_Neisseria_gonorrhoeae_strain_WHO_F_chromosome_1_g_4 | 51804 |
| 2373_Neisseria_gonorrhoeae_strain_WHO_F_chromosome_1_g_5 | 51805 |
| 2374_Neisseria_gonorrhoeae_strain_WHO_F_chromosome_1_g_1 | 51806 |
| 2374_Neisseria_gonorrhoeae_strain_WHO_F_chromosome_1_g_2 | 51807 |
| 2374_Neisseria_gonorrhoeae_strain_WHO_F_chromosome_1_g_3 | 51808 |
| 2374_Neisseria_gonorrhoeae_strain_WHO_F_chromosome_1_g_4 | 51809 |
| 2374_Neisseria_gonorrhoeae_strain_WHO_F_chromosome_1_g_5 | 51810 |
| 2375_Neisseria_gonorrhoeae_strain_WHO_F_chromosome_1_g_1 | 51811 |
| 2375_Neisseria_gonorrhoeae_strain_WHO_F_chromosome_1_g_2 | 51812 |
| 2375_Neisseria_gonorrhoeae_strain_WHO_F_chromosome_1_g_3 | 51813 |
| 2375_Neisseria_gonorrhoeae_strain_WHO_F_chromosome_1_g_4 | 51814 |
| 2375_Neisseria_gonorrhoeae_strain_WHO_F_chromosome_1_g_5 | 51815 |
| 2376_Neisseria_gonorrhoeae_strain_WHO_F_chromosome_1_g_1 | 51816 |
| 2376_Neisseria_gonorrhoeae_strain_WHO_F_chromosome_1_g_2 | 51817 |
| 2376_Neisseria_gonorrhoeae_strain_WHO_F_chromosome_1_g_3 | 51818 |
| 2376_Neisseria_gonorrhoeae_strain_WHO_F_chromosome_1_g_4 | 51819 |
| 2376_Neisseria_gonorrhoeae_strain_WHO_F_chromosome_1_g_5 | 51820 |
| 2377_Neisseria_gonorrhoeae_strain_WHO_F_chromosome_1_g_1 | 51821 |
| 2377_Neisseria_gonorrhoeae_strain_WHO_F_chromosome_1_g_2 | 51822 |
| 2377_Neisseria_gonorrhoeae_strain_WHO_F_chromosome_1_g_3 | 51823 |
| 2377_Neisseria_gonorrhoeae_strain_WHO_F_chromosome_1_g_4 | 51824 |
| 2377_Neisseria_gonorrhoeae_strain_WHO_F_chromosome_1_g_5 | 51825 |
| 2378_Neisseria_gonorrhoeae_strain_WHO_F_chromosome_1_g_1 | 51826 |
| 2378_Neisseria_gonorrhoeae_strain_WHO_F_chromosome_1_g_2 | 51827 |
| 2378_Neisseria_gonorrhoeae_strain_WHO_F_chromosome_1_g_3 | 51828 |
| 2378_Neisseria_gonorrhoeae_strain_WHO_F_chromosome_1_g_4 | 51829 |
| 2378_Neisseria_gonorrhoeae_strain_WHO_F_chromosome_1_g_5 | 51830 |
| 2379_Neisseria_gonorrhoeae_strain_WHO_F_chromosome_1_g_1 | 51831 |
| 2379_Neisseria_gonorrhoeae_strain_WHO_F_chromosome_1_g_2 | 51832 |
| 2379_Neisseria_gonorrhoeae_strain_WHO_F_chromosome_1_g_3 | 51833 |
| 2379_Neisseria_gonorrhoeae_strain_WHO_F_chromosome_1_g_4 | 51834 |
| 2379_Neisseria_gonorrhoeae_strain_WHO_F_chromosome_1_g_5 | 51835 |
| 2380_Neisseria_gonorrhoeae_strain_WHO_F_chromosome_1_g_1 | 51836 |
| 2380_Neisseria_gonorrhoeae_strain_WHO_F_chromosome_1_g_2 | 51837 |
| 2380_Neisseria_gonorrhoeae_strain_WHO_F_chromosome_1_g_3 | 51838 |
| 2380_Neisseria_gonorrhoeae_strain_WHO_F_chromosome_1_g_4 | 51839 |
| 2380_Neisseria_gonorrhoeae_strain_WHO_F_chromosome_1_g_5 | 51840 |
| 2381_Neisseria_gonorrhoeae_strain_WHO_F_chromosome_1_g_1 | 51841 |
| 2381_Neisseria_gonorrhoeae_strain_WHO_F_chromosome_1_g_2 | 51842 |
| 2381_Neisseria_gonorrhoeae_strain_WHO_F_chromosome_1_g_3 | 51843 |
| 2381_Neisseria_gonorrhoeae_strain_WHO_F_chromosome_1_g_4 | 51844 |
| 2381_Neisseria_gonorrhoeae_strain_WHO_F_chromosome_1_g_5 | 51845 |
| 2382_Neisseria_gonorrhoeae_strain_WHO_F_chromosome_1_g_1 | 51846 |
| 2382_Neisseria_gonorrhoeae_strain_WHO_F_chromosome_1_g_2 | 51847 |
| 2382_Neisseria_gonorrhoeae_strain_WHO_F_chromosome_1_g_3 | 51848 |
| 2382_Neisseria_gonorrhoeae_strain_WHO_F_chromosome_1_g_4 | 51849 |
| 2382_Neisseria_gonorrhoeae_strain_WHO_F_chromosome_1_g_5 | 51850 |
| 2383_Neisseria_gonorrhoeae_strain_WHO_F_chromosome_1_g_1 | 51851 |
| 2383_Neisseria_gonorrhoeae_strain_WHO_F_chromosome_1_g_2 | 51852 |
| 2383_Neisseria_gonorrhoeae_strain_WHO_F_chromosome_1_g_3 | 51853 |
| 2383_Neisseria_gonorrhoeae_strain_WHO_F_chromosome_1_g_4 | 51854 |
| 2383_Neisseria_gonorrhoeae_strain_WHO_F_chromosome_1_g_5 | 51855 |
| 2384_Neisseria_gonorrhoeae_strain_WHO_F_chromosome_1_g_1 | 51856 |
| 2384_Neisseria_gonorrhoeae_strain_WHO_F_chromosome_1_g_2 | 51857 |
| 2384_Neisseria_gonorrhoeae_strain_WHO_F_chromosome_1_g_3 | 51858 |
| 2384_Neisseria_gonorrhoeae_strain_WHO_F_chromosome_1_g_4 | 51859 |
| 2384_Neisseria_gonorrhoeae_strain_WHO_F_chromosome_1_g_5 | 51860 |
| 2385_Neisseria_gonorrhoeae_strain_WHO_F_chromosome_1_g_1 | 51861 |
| 2385_Neisseria_gonorrhoeae_strain_WHO_F_chromosome_1_g_2 | 51862 |
| 2385_Neisseria_gonorrhoeae_strain_WHO_F_chromosome_1_g_3 | 51863 |
| 2385_Neisseria_gonorrhoeae_strain_WHO_F_chromosome_1_g_4 | 51864 |
| 2385_Neisseria_gonorrhoeae_strain_WHO_F_chromosome_1_g_5 | 51865 |
| 2386_Neisseria_gonorrhoeae_strain_WHO_F_chromosome_1_g_1 | 51866 |
| 2386_Neisseria_gonorrhoeae_strain_WHO_F_chromosome_1_g_2 | 51867 |
| 2386_Neisseria_gonorrhoeae_strain_WHO_F_chromosome_1_g_3 | 51868 |
| 2386_Neisseria_gonorrhoeae_strain_WHO_F_chromosome_1_g_4 | 51869 |
| 2386_Neisseria_gonorrhoeae_strain_WHO_F_chromosome_1_g_5 | 51870 |
| 2387_Neisseria_gonorrhoeae_strain_WHO_F_chromosome_1_g_1 | 51871 |
| 2387_Neisseria_gonorrhoeae_strain_WHO_F_chromosome_1_g_2 | 51872 |
| 2387_Neisseria_gonorrhoeae_strain_WHO_F_chromosome_1_g_3 | 51873 |
| 2387_Neisseria_gonorrhoeae_strain_WHO_F_chromosome_1_g_4 | 51874 |
| 2388_Neisseria_gonorrhoeae_strain_WHO_F_chromosome_1_g_1 | 51875 |
| 2388_Neisseria_gonorrhoeae_strain_WHO_F_chromosome_1_g_2 | 51876 |
| 2388_Neisseria_gonorrhoeae_strain_WHO_F_chromosome_1_g_3 | 51877 |
| 2388_Neisseria_gonorrhoeae_strain_WHO_F_chromosome_1_g_4 | 51878 |
| 2388_Neisseria_gonorrhoeae_strain_WHO_F_chromosome_1_g_5 | 51879 |
| 2389_Neisseria_gonorrhoeae_strain_WHO_F_chromosome_1_g_1 | 51880 |
| 2389_Neisseria_gonorrhoeae_strain_WHO_F_chromosome_1_g_2 | 51881 |
| 2389_Neisseria_gonorrhoeae_strain_WHO_F_chromosome_1_g_3 | 51882 |
| 2389_Neisseria_gonorrhoeae_strain_WHO_F_chromosome_1_g_4 | 51883 |
| 2389_Neisseria_gonorrhoeae_strain_WHO_F_chromosome_1_g_5 | 51884 |
| 2390_Neisseria_gonorrhoeae_strain_WHO_F_chromosome_1_g_1 | 51885 |
| 2390_Neisseria_gonorrhoeae_strain_WHO_F_chromosome_1_g_2 | 51886 |
| 2390_Neisseria_gonorrhoeae_strain_WHO_F_chromosome_1_g_3 | 51887 |
| 2390_Neisseria_gonorrhoeae_strain_WHO_F_chromosome_1_g_4 | 51888 |
| 2390_Neisseria_gonorrhoeae_strain_WHO_F_chromosome_1_g_5 | 51889 |
| 2391_Neisseria_gonorrhoeae_strain_WHO_F_chromosome_1_g_1 | 51890 |
| 2391_Neisseria_gonorrhoeae_strain_WHO_F_chromosome_1_g_2 | 51891 |
| 2391_Neisseria_gonorrhoeae_strain_WHO_F_chromosome_1_g_3 | 51892 |
| 2391_Neisseria_gonorrhoeae_strain_WHO_F_chromosome_1_g_4 | 51893 |
| 2391_Neisseria_gonorrhoeae_strain_WHO_F_chromosome_1_g_5 | 51894 |
| 2392_Neisseria_gonorrhoeae_strain_WHO_F_chromosome_1_g_1 | 51895 |
| 2392_Neisseria_gonorrhoeae_strain_WHO_F_chromosome_1_g_2 | 51896 |
| 2392_Neisseria_gonorrhoeae_strain_WHO_F_chromosome_1_g_3 | 51897 |
| 2392_Neisseria_gonorrhoeae_strain_WHO_F_chromosome_1_g_4 | 51898 |
| 2392_Neisseria_gonorrhoeae_strain_WHO_F_chromosome_1_g_5 | 51899 |
| 2393_Neisseria_gonorrhoeae_strain_WHO_F_chromosome_1_g_1 | 51900 |
| 2393_Neisseria_gonorrhoeae_strain_WHO_F_chromosome_1_g_2 | 51901 |
| 2393_Neisseria_gonorrhoeae_strain_WHO_F_chromosome_1_g_3 | 51902 |
| 2393_Neisseria_gonorrhoeae_strain_WHO_F_chromosome_1_g_4 | 51903 |
| 2393_Neisseria_gonorrhoeae_strain_WHO_F_chromosome_1_g_5 | 51904 |
| 2394_Neisseria_gonorrhoeae_strain_WHO_F_chromosome_1_g_1 | 51905 |
| 2394_Neisseria_gonorrhoeae_strain_WHO_F_chromosome_1_g_2 | 51906 |
| 2394_Neisseria_gonorrhoeae_strain_WHO_F_chromosome_1_g_3 | 51907 |
| 2394_Neisseria_gonorrhoeae_strain_WHO_F_chromosome_1_g_4 | 51908 |
| 2394_Neisseria_gonorrhoeae_strain_WHO_F_chromosome_1_g_5 | 51909 |
| 2395_Neisseria_gonorrhoeae_strain_WHO_F_chromosome_1_g_1 | 51910 |
| 2395_Neisseria_gonorrhoeae_strain_WHO_F_chromosome_1_g_2 | 51911 |
| 2395_Neisseria_gonorrhoeae_strain_WHO_F_chromosome_1_g_3 | 51912 |
| 2395_Neisseria_gonorrhoeae_strain_WHO_F_chromosome_1_g_4 | 51913 |
| 2395_Neisseria_gonorrhoeae_strain_WHO_F_chromosome_1_g_5 | 51914 |
| 2396_Neisseria_gonorrhoeae_strain_WHO_F_chromosome_1_g_1 | 51915 |
| 2396_Neisseria_gonorrhoeae_strain_WHO_F_chromosome_1_g_2 | 51916 |
| 2396_Neisseria_gonorrhoeae_strain_WHO_F_chromosome_1_g_3 | 51917 |
| 2396_Neisseria_gonorrhoeae_strain_WHO_F_chromosome_1_g_4 | 51918 |
| 2396_Neisseria_gonorrhoeae_strain_WHO_F_chromosome_1_g_5 | 51919 |
| 2397_Neisseria_gonorrhoeae_strain_WHO_F_chromosome_1_g_1 | 51920 |
| 2397_Neisseria_gonorrhoeae_strain_WHO_F_chromosome_1_g_2 | 51921 |
| 2397_Neisseria_gonorrhoeae_strain_WHO_F_chromosome_1_g_3 | 51922 |
| 2397_Neisseria_gonorrhoeae_strain_WHO_F_chromosome_1_g_4 | 51923 |
| 2397_Neisseria_gonorrhoeae_strain_WHO_F_chromosome_1_g_5 | 51924 |
| 2398_Neisseria_gonorrhoeae_strain_WHO_F_chromosome_1_g_1 | 51925 |
| 2398_Neisseria_gonorrhoeae_strain_WHO_F_chromosome_1_g_2 | 51926 |
| 2398_Neisseria_gonorrhoeae_strain_WHO_F_chromosome_1_g_3 | 51927 |
| 2398_Neisseria_gonorrhoeae_strain_WHO_F_chromosome_1_g_4 | 51928 |
| 2398_Neisseria_gonorrhoeae_strain_WHO_F_chromosome_1_g_5 | 51929 |
| 2399_Neisseria_gonorrhoeae_strain_WHO_F_chromosome_1_g_1 | 51930 |
| 2399_Neisseria_gonorrhoeae_strain_WHO_F_chromosome_1_g_2 | 51931 |
| 2399_Neisseria_gonorrhoeae_strain_WHO_F_chromosome_1_g_3 | 51932 |
| 2399_Neisseria_gonorrhoeae_strain_WHO_F_chromosome_1_g_4 | 51933 |
| 2399_Neisseria_gonorrhoeae_strain_WHO_F_chromosome_1_g_5 | 51934 |
| 2400_Neisseria_gonorrhoeae_strain_WHO_F_chromosome_1_g_1 | 51935 |
| 2400_Neisseria_gonorrhoeae_strain_WHO_F_chromosome_1_g_2 | 51936 |
| 2400_Neisseria_gonorrhoeae_strain_WHO_F_chromosome_1_g_3 | 51937 |
| 2400_Neisseria_gonorrhoeae_strain_WHO_F_chromosome_1_g_4 | 51938 |
| 2401_Neisseria_gonorrhoeae_strain_WHO_F_chromosome_1_g_1 | 51939 |
| 2401_Neisseria_gonorrhoeae_strain_WHO_F_chromosome_1_g_2 | 51940 |
| 2401_Neisseria_gonorrhoeae_strain_WHO_F_chromosome_1_g_3 | 51941 |
| 2401_Neisseria_gonorrhoeae_strain_WHO_F_chromosome_1_g_4 | 51942 |
| 2401_Neisseria_gonorrhoeae_strain_WHO_F_chromosome_1_g_5 | 51943 |
| 2402_Neisseria_gonorrhoeae_strain_WHO_F_chromosome_1_g_1 | 51944 |
| 2402_Neisseria_gonorrhoeae_strain_WHO_F_chromosome_1_g_2 | 51945 |
| 2402_Neisseria_gonorrhoeae_strain_WHO_F_chromosome_1_g_3 | 51946 |
| 2402_Neisseria_gonorrhoeae_strain_WHO_F_chromosome_1_g_4 | 51947 |
| 2402_Neisseria_gonorrhoeae_strain_WHO_F_chromosome_1_g_5 | 51948 |
| 2403_Neisseria_gonorrhoeae_strain_WHO_F_chromosome_1_g_1 | 51949 |
| 2403_Neisseria_gonorrhoeae_strain_WHO_F_chromosome_1_g_2 | 51950 |
| 2403_Neisseria_gonorrhoeae_strain_WHO_F_chromosome_1_g_3 | 51951 |
| 2403_Neisseria_gonorrhoeae_strain_WHO_F_chromosome_1_g_4 | 51952 |
| 2403_Neisseria_gonorrhoeae_strain_WHO_F_chromosome_1_g_5 | 51953 |
| 2404_Neisseria_gonorrhoeae_strain_WHO_F_chromosome_1_g_1 | 51954 |
| 2404_Neisseria_gonorrhoeae_strain_WHO_F_chromosome_1_g_2 | 51955 |
| 2404_Neisseria_gonorrhoeae_strain_WHO_F_chromosome_1_g_3 | 51956 |
| 2404_Neisseria_gonorrhoeae_strain_WHO_F_chromosome_1_g_4 | 51957 |
| 2404_Neisseria_gonorrhoeae_strain_WHO_F_chromosome_1_g_5 | 51958 |
| 2405_Neisseria_gonorrhoeae_strain_WHO_F_chromosome_1_g_1 | 51959 |
| 2405_Neisseria_gonorrhoeae_strain_WHO_F_chromosome_1_g_2 | 51960 |
| 2405_Neisseria_gonorrhoeae_strain_WHO_F_chromosome_1_g_3 | 51961 |
| 2405_Neisseria_gonorrhoeae_strain_WHO_F_chromosome_1_g_4 | 51962 |
| 2405_Neisseria_gonorrhoeae_strain_WHO_F_chromosome_1_g_5 | 51963 |
| 2406_Neisseria_gonorrhoeae_strain_WHO_F_chromosome_1_g_1 | 51964 |
| 2406_Neisseria_gonorrhoeae_strain_WHO_F_chromosome_1_g_2 | 51965 |
| 2406_Neisseria_gonorrhoeae_strain_WHO_F_chromosome_1_g_3 | 51966 |
| 2406_Neisseria_gonorrhoeae_strain_WHO_F_chromosome_1_g_4 | 51967 |
| 2406_Neisseria_gonorrhoeae_strain_WHO_F_chromosome_1_g_5 | 51968 |
| 2407_Neisseria_gonorrhoeae_strain_WHO_F_chromosome_1_g_1 | 51969 |
| 2407_Neisseria_gonorrhoeae_strain_WHO_F_chromosome_1_g_2 | 51970 |
| 2407_Neisseria_gonorrhoeae_strain_WHO_F_chromosome_1_g_3 | 51971 |
| 2407_Neisseria_gonorrhoeae_strain_WHO_F_chromosome_1_g_4 | 51972 |
| 2407_Neisseria_gonorrhoeae_strain_WHO_F_chromosome_1_g_5 | 51973 |
| 2408_Neisseria_gonorrhoeae_strain_WHO_F_chromosome_1_g_1 | 51974 |
| 2408_Neisseria_gonorrhoeae_strain_WHO_F_chromosome_1_g_2 | 51975 |
| 2408_Neisseria_gonorrhoeae_strain_WHO_F_chromosome_1_g_3 | 51976 |
| 2408_Neisseria_gonorrhoeae_strain_WHO_F_chromosome_1_g_4 | 51977 |
| 2408_Neisseria_gonorrhoeae_strain_WHO_F_chromosome_1_g_5 | 51978 |
| 2409_Neisseria_gonorrhoeae_strain_WHO_F_chromosome_1_g_1 | 51979 |
| 2409_Neisseria_gonorrhoeae_strain_WHO_F_chromosome_1_g_2 | 51980 |
| 2409_Neisseria_gonorrhoeae_strain_WHO_F_chromosome_1_g_3 | 51981 |
| 2409_Neisseria_gonorrhoeae_strain_WHO_F_chromosome_1_g_4 | 51982 |
| 2409_Neisseria_gonorrhoeae_strain_WHO_F_chromosome_1_g_5 | 51983 |
| 2410_Neisseria_gonorrhoeae_strain_WHO_F_chromosome_1_g_1 | 51984 |
| 2410_Neisseria_gonorrhoeae_strain_WHO_F_chromosome_1_g_2 | 51985 |
| 2410_Neisseria_gonorrhoeae_strain_WHO_F_chromosome_1_g_3 | 51986 |
| 2410_Neisseria_gonorrhoeae_strain_WHO_F_chromosome_1_g_4 | 51987 |
| 2410_Neisseria_gonorrhoeae_strain_WHO_F_chromosome_1_g_5 | 51988 |
| 2411_Neisseria_gonorrhoeae_strain_WHO_F_chromosome_1_g_1 | 51989 |
| 2411_Neisseria_gonorrhoeae_strain_WHO_F_chromosome_1_g_2 | 51990 |
| 2411_Neisseria_gonorrhoeae_strain_WHO_F_chromosome_1_g_3 | 51991 |
| 2411_Neisseria_gonorrhoeae_strain_WHO_F_chromosome_1_g_4 | 51992 |
| 2411_Neisseria_gonorrhoeae_strain_WHO_F_chromosome_1_g_5 | 51993 |
| 2412_Neisseria_gonorrhoeae_strain_WHO_F_chromosome_1_g_1 | 51994 |
| 2412_Neisseria_gonorrhoeae_strain_WHO_F_chromosome_1_g_2 | 51995 |
| 2412_Neisseria_gonorrhoeae_strain_WHO_F_chromosome_1_g_3 | 51996 |
| 2412_Neisseria_gonorrhoeae_strain_WHO_F_chromosome_1_g_4 | 51997 |
| 2412_Neisseria_gonorrhoeae_strain_WHO_F_chromosome_1_g_5 | 51998 |
| 2413_Neisseria_gonorrhoeae_strain_WHO_F_chromosome_1_g_1 | 51999 |
| 2413_Neisseria_gonorrhoeae_strain_WHO_F_chromosome_1_g_2 | 52000 |
| 2413_Neisseria_gonorrhoeae_strain_WHO_F_chromosome_1_g_3 | 52001 |
| 2413_Neisseria_gonorrhoeae_strain_WHO_F_chromosome_1_g_4 | 52002 |
| 2413_Neisseria_gonorrhoeae_strain_WHO_F_chromosome_1_g_5 | 52003 |
| 2414_Neisseria_gonorrhoeae_strain_WHO_F_chromosome_1_g_1 | 52004 |
| 2414_Neisseria_gonorrhoeae_strain_WHO_F_chromosome_1_g_2 | 52005 |
| 2414_Neisseria_gonorrhoeae_strain_WHO_F_chromosome_1_g_3 | 52006 |
| 2414_Neisseria_gonorrhoeae_strain_WHO_F_chromosome_1_g_4 | 52007 |
| 2414_Neisseria_gonorrhoeae_strain_WHO_F_chromosome_1_g_5 | 52008 |
| 2415_Neisseria_gonorrhoeae_strain_WHO_F_chromosome_1_g_1 | 52009 |
| 2415_Neisseria_gonorrhoeae_strain_WHO_F_chromosome_1_g_2 | 52010 |
| 2415_Neisseria_gonorrhoeae_strain_WHO_F_chromosome_1_g_3 | 52011 |
| 2415_Neisseria_gonorrhoeae_strain_WHO_F_chromosome_1_g_4 | 52012 |
| 2415_Neisseria_gonorrhoeae_strain_WHO_F_chromosome_1_g_5 | 52013 |
| 2416_Neisseria_gonorrhoeae_strain_WHO_F_chromosome_1_g_1 | 52014 |
| 2416_Neisseria_gonorrhoeae_strain_WHO_F_chromosome_1_g_2 | 52015 |
| 2416_Neisseria_gonorrhoeae_strain_WHO_F_chromosome_1_g_3 | 52016 |
| 2416_Neisseria_gonorrhoeae_strain_WHO_F_chromosome_1_g_4 | 52017 |
| 2416_Neisseria_gonorrhoeae_strain_WHO_F_chromosome_1_g_5 | 52018 |
| 2417_Neisseria_gonorrhoeae_strain_WHO_F_chromosome_1_g_1 | 52019 |
| 2417_Neisseria_gonorrhoeae_strain_WHO_F_chromosome_1_g_2 | 52020 |
| 2417_Neisseria_gonorrhoeae_strain_WHO_F_chromosome_1_g_3 | 52021 |
| 2417_Neisseria_gonorrhoeae_strain_WHO_F_chromosome_1_g_4 | 52022 |
| 2417_Neisseria_gonorrhoeae_strain_WHO_F_chromosome_1_g_5 | 52023 |
| 2418_Neisseria_gonorrhoeae_strain_WHO_F_chromosome_1_g_1 | 52024 |
| 2418_Neisseria_gonorrhoeae_strain_WHO_F_chromosome_1_g_2 | 52025 |
| 2418_Neisseria_gonorrhoeae_strain_WHO_F_chromosome_1_g_3 | 52026 |
| 2418_Neisseria_gonorrhoeae_strain_WHO_F_chromosome_1_g_4 | 52027 |
| 2418_Neisseria_gonorrhoeae_strain_WHO_F_chromosome_1_g_5 | 52028 |
| 2419_Neisseria_gonorrhoeae_strain_WHO_F_chromosome_1_g_1 | 52029 |
| 2419_Neisseria_gonorrhoeae_strain_WHO_F_chromosome_1_g_2 | 52030 |
| 2419_Neisseria_gonorrhoeae_strain_WHO_F_chromosome_1_g_3 | 52031 |
| 2419_Neisseria_gonorrhoeae_strain_WHO_F_chromosome_1_g_4 | 52032 |
| 2419_Neisseria_gonorrhoeae_strain_WHO_F_chromosome_1_g_5 | 52033 |
| 2420_Neisseria_gonorrhoeae_strain_WHO_F_chromosome_1_g_1 | 52034 |
| 2420_Neisseria_gonorrhoeae_strain_WHO_F_chromosome_1_g_2 | 52035 |
| 2420_Neisseria_gonorrhoeae_strain_WHO_F_chromosome_1_g_3 | 52036 |
| 2420_Neisseria_gonorrhoeae_strain_WHO_F_chromosome_1_g_4 | 52037 |
| 2420_Neisseria_gonorrhoeae_strain_WHO_F_chromosome_1_g_5 | 52038 |
| 2421_Neisseria_gonorrhoeae_strain_WHO_F_chromosome_1_g_1 | 52039 |
| 2421_Neisseria_gonorrhoeae_strain_WHO_F_chromosome_1_g_2 | 52040 |
| 2421_Neisseria_gonorrhoeae_strain_WHO_F_chromosome_1_g_3 | 52041 |
| 2421_Neisseria_gonorrhoeae_strain_WHO_F_chromosome_1_g_4 | 52042 |
| 2421_Neisseria_gonorrhoeae_strain_WHO_F_chromosome_1_g_5 | 52043 |
| 2422_Neisseria_gonorrhoeae_strain_WHO_F_chromosome_1_g_1 | 52044 |
| 2422_Neisseria_gonorrhoeae_strain_WHO_F_chromosome_1_g_2 | 52045 |
| 2422_Neisseria_gonorrhoeae_strain_WHO_F_chromosome_1_g_3 | 52046 |
| 2422_Neisseria_gonorrhoeae_strain_WHO_F_chromosome_1_g_4 | 52047 |
| 2422_Neisseria_gonorrhoeae_strain_WHO_F_chromosome_1_g_5 | 52048 |
| 2423_Neisseria_gonorrhoeae_strain_WHO_F_chromosome_1_g_1 | 52049 |
| 2423_Neisseria_gonorrhoeae_strain_WHO_F_chromosome_1_g_2 | 52050 |
| 2423_Neisseria_gonorrhoeae_strain_WHO_F_chromosome_1_g_3 | 52051 |
| 2423_Neisseria_gonorrhoeae_strain_WHO_F_chromosome_1_g_4 | 52052 |
| 2423_Neisseria_gonorrhoeae_strain_WHO_F_chromosome_1_g_5 | 52053 |
| 2424_Neisseria_gonorrhoeae_strain_WHO_F_chromosome_1_g_1 | 52054 |
| 2424_Neisseria_gonorrhoeae_strain_WHO_F_chromosome_1_g_2 | 52055 |
| 2424_Neisseria_gonorrhoeae_strain_WHO_F_chromosome_1_g_3 | 52056 |
| 2424_Neisseria_gonorrhoeae_strain_WHO_F_chromosome_1_g_4 | 52057 |
| 2424_Neisseria_gonorrhoeae_strain_WHO_F_chromosome_1_g_5 | 52058 |
| 2425_Neisseria_gonorrhoeae_strain_WHO_F_chromosome_1_g_1 | 52059 |
| 2425_Neisseria_gonorrhoeae_strain_WHO_F_chromosome_1_g_2 | 52060 |
| 2425_Neisseria_gonorrhoeae_strain_WHO_F_chromosome_1_g_3 | 52061 |
| 2425_Neisseria_gonorrhoeae_strain_WHO_F_chromosome_1_g_4 | 52062 |
| 2425_Neisseria_gonorrhoeae_strain_WHO_F_chromosome_1_g_5 | 52063 |
| 2426_Neisseria_gonorrhoeae_strain_WHO_F_chromosome_1_g_1 | 52064 |
| 2426_Neisseria_gonorrhoeae_strain_WHO_F_chromosome_1_g_2 | 52065 |
| 2426_Neisseria_gonorrhoeae_strain_WHO_F_chromosome_1_g_3 | 52066 |
| 2426_Neisseria_gonorrhoeae_strain_WHO_F_chromosome_1_g_4 | 52067 |
| 2426_Neisseria_gonorrhoeae_strain_WHO_F_chromosome_1_g_5 | 52068 |
| 2427_Neisseria_gonorrhoeae_strain_WHO_F_chromosome_1_g_1 | 52069 |
| 2427_Neisseria_gonorrhoeae_strain_WHO_F_chromosome_1_g_2 | 52070 |
| 2427_Neisseria_gonorrhoeae_strain_WHO_F_chromosome_1_g_3 | 52071 |
| 2427_Neisseria_gonorrhoeae_strain_WHO_F_chromosome_1_g_4 | 52072 |
| 2427_Neisseria_gonorrhoeae_strain_WHO_F_chromosome_1_g_5 | 52073 |
| 2428_Neisseria_gonorrhoeae_strain_WHO_F_chromosome_1_g_1 | 52074 |
| 2428_Neisseria_gonorrhoeae_strain_WHO_F_chromosome_1_g_2 | 52075 |
| 2428_Neisseria_gonorrhoeae_strain_WHO_F_chromosome_1_g_3 | 52076 |
| 2428_Neisseria_gonorrhoeae_strain_WHO_F_chromosome_1_g_4 | 52077 |
| 2428_Neisseria_gonorrhoeae_strain_WHO_F_chromosome_1_g_5 | 52078 |
| 2429_Neisseria_gonorrhoeae_strain_WHO_F_chromosome_1_g_1 | 52079 |
| 2429_Neisseria_gonorrhoeae_strain_WHO_F_chromosome_1_g_2 | 52080 |
| 2429_Neisseria_gonorrhoeae_strain_WHO_F_chromosome_1_g_3 | 52081 |
| 2429_Neisseria_gonorrhoeae_strain_WHO_F_chromosome_1_g_4 | 52082 |
| 2429_Neisseria_gonorrhoeae_strain_WHO_F_chromosome_1_g_5 | 52083 |
| 2430_Neisseria_gonorrhoeae_strain_WHO_F_chromosome_1_g_1 | 52084 |
| 2430_Neisseria_gonorrhoeae_strain_WHO_F_chromosome_1_g_2 | 52085 |
| 2430_Neisseria_gonorrhoeae_strain_WHO_F_chromosome_1_g_3 | 52086 |
| 2430_Neisseria_gonorrhoeae_strain_WHO_F_chromosome_1_g_4 | 52087 |
| 2430_Neisseria_gonorrhoeae_strain_WHO_F_chromosome_1_g_5 | 52088 |
| 2431_Neisseria_gonorrhoeae_strain_WHO_F_chromosome_1_g_1 | 52089 |
| 2431_Neisseria_gonorrhoeae_strain_WHO_F_chromosome_1_g_2 | 52090 |
| 2431_Neisseria_gonorrhoeae_strain_WHO_F_chromosome_1_g_3 | 52091 |
| 2431_Neisseria_gonorrhoeae_strain_WHO_F_chromosome_1_g_4 | 52092 |
| 2431_Neisseria_gonorrhoeae_strain_WHO_F_chromosome_1_g_5 | 52093 |
| 2432_Neisseria_gonorrhoeae_strain_WHO_F_chromosome_1_g_1 | 52094 |
| 2432_Neisseria_gonorrhoeae_strain_WHO_F_chromosome_1_g_2 | 52095 |
| 2432_Neisseria_gonorrhoeae_strain_WHO_F_chromosome_1_g_3 | 52096 |
| 2433_Neisseria_gonorrhoeae_strain_WHO_F_chromosome_1_g_1 | 52097 |
| 2433_Neisseria_gonorrhoeae_strain_WHO_F_chromosome_1_g_2 | 52098 |
| 2433_Neisseria_gonorrhoeae_strain_WHO_F_chromosome_1_g_3 | 52099 |
| 2433_Neisseria_gonorrhoeae_strain_WHO_F_chromosome_1_g_4 | 52100 |
| 2433_Neisseria_gonorrhoeae_strain_WHO_F_chromosome_1_g_5 | 52101 |
| 2434_Neisseria_gonorrhoeae_strain_WHO_F_chromosome_1_g_1 | 52102 |
| 2434_Neisseria_gonorrhoeae_strain_WHO_F_chromosome_1_g_2 | 52103 |
| 2434_Neisseria_gonorrhoeae_strain_WHO_F_chromosome_1_g_3 | 52104 |
| 2435_Neisseria_gonorrhoeae_strain_WHO_F_chromosome_1_g_1 | 52105 |
| 2435_Neisseria_gonorrhoeae_strain_WHO_F_chromosome_1_g_2 | 52106 |
| 2435_Neisseria_gonorrhoeae_strain_WHO_F_chromosome_1_g_3 | 52107 |
| 2435_Neisseria_gonorrhoeae_strain_WHO_F_chromosome_1_g_4 | 52108 |
| 2435_Neisseria_gonorrhoeae_strain_WHO_F_chromosome_1_g_5 | 52109 |
| 2436_Neisseria_gonorrhoeae_strain_WHO_F_chromosome_1_g_1 | 52110 |
| 2436_Neisseria_gonorrhoeae_strain_WHO_F_chromosome_1_g_2 | 52111 |
| 2436_Neisseria_gonorrhoeae_strain_WHO_F_chromosome_1_g_3 | 52112 |
| 2436_Neisseria_gonorrhoeae_strain_WHO_F_chromosome_1_g_4 | 52113 |
| 2436_Neisseria_gonorrhoeae_strain_WHO_F_chromosome_1_g_5 | 52114 |
| 2437_Neisseria_gonorrhoeae_strain_WHO_F_chromosome_1_g_1 | 52115 |
| 2437_Neisseria_gonorrhoeae_strain_WHO_F_chromosome_1_g_2 | 52116 |
| 2437_Neisseria_gonorrhoeae_strain_WHO_F_chromosome_1_g_3 | 52117 |
| 2437_Neisseria_gonorrhoeae_strain_WHO_F_chromosome_1_g_4 | 52118 |
| 2438_Neisseria_gonorrhoeae_strain_WHO_F_chromosome_1_g_1 | 52119 |
| 2438_Neisseria_gonorrhoeae_strain_WHO_F_chromosome_1_g_2 | 52120 |
| 2438_Neisseria_gonorrhoeae_strain_WHO_F_chromosome_1_g_3 | 52121 |
| 2438_Neisseria_gonorrhoeae_strain_WHO_F_chromosome_1_g_4 | 52122 |
| 2438_Neisseria_gonorrhoeae_strain_WHO_F_chromosome_1_g_5 | 52123 |
| 2439_Neisseria_gonorrhoeae_strain_WHO_F_chromosome_1_g_1 | 52124 |
| 2439_Neisseria_gonorrhoeae_strain_WHO_F_chromosome_1_g_2 | 52125 |
| 2439_Neisseria_gonorrhoeae_strain_WHO_F_chromosome_1_g_3 | 52126 |
| 2439_Neisseria_gonorrhoeae_strain_WHO_F_chromosome_1_g_4 | 52127 |
| 2439_Neisseria_gonorrhoeae_strain_WHO_F_chromosome_1_g_5 | 52128 |
| 2440_Neisseria_gonorrhoeae_strain_WHO_F_chromosome_1_g_1 | 52129 |
| 2440_Neisseria_gonorrhoeae_strain_WHO_F_chromosome_1_g_2 | 52130 |
| 2440_Neisseria_gonorrhoeae_strain_WHO_F_chromosome_1_g_3 | 52131 |
| 2440_Neisseria_gonorrhoeae_strain_WHO_F_chromosome_1_g_4 | 52132 |
| 2440_Neisseria_gonorrhoeae_strain_WHO_F_chromosome_1_g_5 | 52133 |
| 2441_Neisseria_gonorrhoeae_strain_WHO_F_chromosome_1_g_1 | 52134 |
| 2441_Neisseria_gonorrhoeae_strain_WHO_F_chromosome_1_g_2 | 52135 |
| 2441_Neisseria_gonorrhoeae_strain_WHO_F_chromosome_1_g_3 | 52136 |
| 2441_Neisseria_gonorrhoeae_strain_WHO_F_chromosome_1_g_4 | 52137 |
| 2441_Neisseria_gonorrhoeae_strain_WHO_F_chromosome_1_g_5 | 52138 |
| 2442_Neisseria_gonorrhoeae_strain_WHO_F_chromosome_1_g_1 | 52139 |
| 2442_Neisseria_gonorrhoeae_strain_WHO_F_chromosome_1_g_2 | 52140 |
| 2442_Neisseria_gonorrhoeae_strain_WHO_F_chromosome_1_g_3 | 52141 |
| 2442_Neisseria_gonorrhoeae_strain_WHO_F_chromosome_1_g_4 | 52142 |
| 2442_Neisseria_gonorrhoeae_strain_WHO_F_chromosome_1_g_5 | 52143 |
| 2443_Neisseria_gonorrhoeae_strain_WHO_F_chromosome_1_g_1 | 52144 |
| 2443_Neisseria_gonorrhoeae_strain_WHO_F_chromosome_1_g_2 | 52145 |
| 2443_Neisseria_gonorrhoeae_strain_WHO_F_chromosome_1_g_3 | 52146 |
| 2443_Neisseria_gonorrhoeae_strain_WHO_F_chromosome_1_g_4 | 52147 |
| 2443_Neisseria_gonorrhoeae_strain_WHO_F_chromosome_1_g_5 | 52148 |
| 2444_Neisseria_gonorrhoeae_strain_WHO_F_chromosome_1_g_1 | 52149 |
| 2444_Neisseria_gonorrhoeae_strain_WHO_F_chromosome_1_g_2 | 52150 |
| 2444_Neisseria_gonorrhoeae_strain_WHO_F_chromosome_1_g_3 | 52151 |
| 2444_Neisseria_gonorrhoeae_strain_WHO_F_chromosome_1_g_4 | 52152 |
| 2444_Neisseria_gonorrhoeae_strain_WHO_F_chromosome_1_g_5 | 52153 |
| 2445_Neisseria_gonorrhoeae_strain_WHO_F_chromosome_1_g_1 | 52154 |
| 2445_Neisseria_gonorrhoeae_strain_WHO_F_chromosome_1_g_2 | 52155 |
| 2445_Neisseria_gonorrhoeae_strain_WHO_F_chromosome_1_g_3 | 52156 |
| 2445_Neisseria_gonorrhoeae_strain_WHO_F_chromosome_1_g_4 | 52157 |
| 2445_Neisseria_gonorrhoeae_strain_WHO_F_chromosome_1_g_5 | 52158 |
| 2446_Neisseria_gonorrhoeae_strain_WHO_F_chromosome_1_g_1 | 52159 |
| 2446_Neisseria_gonorrhoeae_strain_WHO_F_chromosome_1_g_2 | 52160 |
| 2446_Neisseria_gonorrhoeae_strain_WHO_F_chromosome_1_g_3 | 52161 |
| 2446_Neisseria_gonorrhoeae_strain_WHO_F_chromosome_1_g_4 | 52162 |
| 2446_Neisseria_gonorrhoeae_strain_WHO_F_chromosome_1_g_5 | 52163 |
| 2447_Neisseria_gonorrhoeae_strain_WHO_F_chromosome_1_g_1 | 52164 |
| 2447_Neisseria_gonorrhoeae_strain_WHO_F_chromosome_1_g_2 | 52165 |
| 2447_Neisseria_gonorrhoeae_strain_WHO_F_chromosome_1_g_3 | 52166 |
| 2447_Neisseria_gonorrhoeae_strain_WHO_F_chromosome_1_g_4 | 52167 |
| 2447_Neisseria_gonorrhoeae_strain_WHO_F_chromosome_1_g_5 | 52168 |
| 2448_Neisseria_gonorrhoeae_strain_WHO_F_chromosome_1_g_1 | 52169 |
| 2448_Neisseria_gonorrhoeae_strain_WHO_F_chromosome_1_g_2 | 52170 |
| 2448_Neisseria_gonorrhoeae_strain_WHO_F_chromosome_1_g_3 | 52171 |
| 2448_Neisseria_gonorrhoeae_strain_WHO_F_chromosome_1_g_4 | 52172 |
| 2448_Neisseria_gonorrhoeae_strain_WHO_F_chromosome_1_g_5 | 52173 |
| 2449_Neisseria_gonorrhoeae_strain_WHO_F_chromosome_1_g_1 | 52174 |
| 2449_Neisseria_gonorrhoeae_strain_WHO_F_chromosome_1_g_2 | 52175 |
| 2449_Neisseria_gonorrhoeae_strain_WHO_F_chromosome_1_g_3 | 52176 |
| 2449_Neisseria_gonorrhoeae_strain_WHO_F_chromosome_1_g_4 | 52177 |
| 2449_Neisseria_gonorrhoeae_strain_WHO_F_chromosome_1_g_5 | 52178 |
| 2450_Neisseria_gonorrhoeae_strain_WHO_F_chromosome_1_g_1 | 52179 |
| 2450_Neisseria_gonorrhoeae_strain_WHO_F_chromosome_1_g_2 | 52180 |
| 2450_Neisseria_gonorrhoeae_strain_WHO_F_chromosome_1_g_3 | 52181 |
| 2450_Neisseria_gonorrhoeae_strain_WHO_F_chromosome_1_g_4 | 52182 |
| 2450_Neisseria_gonorrhoeae_strain_WHO_F_chromosome_1_g_5 | 52183 |
| 2451_Neisseria_gonorrhoeae_strain_WHO_F_chromosome_1_g_1 | 52184 |
| 2451_Neisseria_gonorrhoeae_strain_WHO_F_chromosome_1_g_2 | 52185 |
| 2451_Neisseria_gonorrhoeae_strain_WHO_F_chromosome_1_g_3 | 52186 |
| 2451_Neisseria_gonorrhoeae_strain_WHO_F_chromosome_1_g_4 | 52187 |
| 2451_Neisseria_gonorrhoeae_strain_WHO_F_chromosome_1_g_5 | 52188 |
| 2452_Neisseria_gonorrhoeae_strain_WHO_F_chromosome_1_g_1 | 52189 |
| 2452_Neisseria_gonorrhoeae_strain_WHO_F_chromosome_1_g_2 | 52190 |
| 2452_Neisseria_gonorrhoeae_strain_WHO_F_chromosome_1_g_3 | 52191 |
| 2452_Neisseria_gonorrhoeae_strain_WHO_F_chromosome_1_g_4 | 52192 |
| 2452_Neisseria_gonorrhoeae_strain_WHO_F_chromosome_1_g_5 | 52193 |
| 2453_Neisseria_gonorrhoeae_strain_WHO_F_chromosome_1_g_1 | 52194 |
| 2453_Neisseria_gonorrhoeae_strain_WHO_F_chromosome_1_g_2 | 52195 |
| 2453_Neisseria_gonorrhoeae_strain_WHO_F_chromosome_1_g_3 | 52196 |
| 2453_Neisseria_gonorrhoeae_strain_WHO_F_chromosome_1_g_4 | 52197 |
| 2453_Neisseria_gonorrhoeae_strain_WHO_F_chromosome_1_g_5 | 52198 |
| 2454_Neisseria_gonorrhoeae_strain_WHO_F_chromosome_1_g_1 | 52199 |
| 2454_Neisseria_gonorrhoeae_strain_WHO_F_chromosome_1_g_2 | 52200 |
| 2454_Neisseria_gonorrhoeae_strain_WHO_F_chromosome_1_g_3 | 52201 |
| 2454_Neisseria_gonorrhoeae_strain_WHO_F_chromosome_1_g_4 | 52202 |
| 2454_Neisseria_gonorrhoeae_strain_WHO_F_chromosome_1_g_5 | 52203 |
| 2455_Neisseria_gonorrhoeae_strain_WHO_F_chromosome_1_g_1 | 52204 |
| 2455_Neisseria_gonorrhoeae_strain_WHO_F_chromosome_1_g_2 | 52205 |
| 2455_Neisseria_gonorrhoeae_strain_WHO_F_chromosome_1_g_3 | 52206 |
| 2455_Neisseria_gonorrhoeae_strain_WHO_F_chromosome_1_g_4 | 52207 |
| 2455_Neisseria_gonorrhoeae_strain_WHO_F_chromosome_1_g_5 | 52208 |
| 2456_Neisseria_gonorrhoeae_strain_WHO_F_chromosome_1_g_1 | 52209 |
| 2456_Neisseria_gonorrhoeae_strain_WHO_F_chromosome_1_g_2 | 52210 |
| 2456_Neisseria_gonorrhoeae_strain_WHO_F_chromosome_1_g_3 | 52211 |
| 2456_Neisseria_gonorrhoeae_strain_WHO_F_chromosome_1_g_4 | 52212 |
| 2456_Neisseria_gonorrhoeae_strain_WHO_F_chromosome_1_g_5 | 52213 |
| 2457_Neisseria_gonorrhoeae_strain_WHO_F_chromosome_1_g_1 | 52214 |
| 2457_Neisseria_gonorrhoeae_strain_WHO_F_chromosome_1_g_2 | 52215 |
| 2457_Neisseria_gonorrhoeae_strain_WHO_F_chromosome_1_g_3 | 52216 |
| 2457_Neisseria_gonorrhoeae_strain_WHO_F_chromosome_1_g_4 | 52217 |
| 2457_Neisseria_gonorrhoeae_strain_WHO_F_chromosome_1_g_5 | 52218 |
| 2458_Neisseria_gonorrhoeae_strain_WHO_F_chromosome_1_g_1 | 52219 |
| 2458_Neisseria_gonorrhoeae_strain_WHO_F_chromosome_1_g_2 | 52220 |
| 2458_Neisseria_gonorrhoeae_strain_WHO_F_chromosome_1_g_3 | 52221 |
| 2458_Neisseria_gonorrhoeae_strain_WHO_F_chromosome_1_g_4 | 52222 |
| 2458_Neisseria_gonorrhoeae_strain_WHO_F_chromosome_1_g_5 | 52223 |
| 2459_Neisseria_gonorrhoeae_strain_WHO_F_chromosome_1_g_1 | 52224 |
| 2459_Neisseria_gonorrhoeae_strain_WHO_F_chromosome_1_g_2 | 52225 |
| 2459_Neisseria_gonorrhoeae_strain_WHO_F_chromosome_1_g_3 | 52226 |
| 2459_Neisseria_gonorrhoeae_strain_WHO_F_chromosome_1_g_4 | 52227 |
| 2459_Neisseria_gonorrhoeae_strain_WHO_F_chromosome_1_g_5 | 52228 |
| 2460_Neisseria_gonorrhoeae_strain_WHO_F_chromosome_1_g_1 | 52229 |
| 2460_Neisseria_gonorrhoeae_strain_WHO_F_chromosome_1_g_2 | 52230 |
| 2460_Neisseria_gonorrhoeae_strain_WHO_F_chromosome_1_g_3 | 52231 |
| 2460_Neisseria_gonorrhoeae_strain_WHO_F_chromosome_1_g_4 | 52232 |
| 2460_Neisseria_gonorrhoeae_strain_WHO_F_chromosome_1_g_5 | 52233 |
| 2461_Neisseria_gonorrhoeae_strain_WHO_F_chromosome_1_g_1 | 52234 |
| 2461_Neisseria_gonorrhoeae_strain_WHO_F_chromosome_1_g_2 | 52235 |
| 2461_Neisseria_gonorrhoeae_strain_WHO_F_chromosome_1_g_3 | 52236 |
| 2461_Neisseria_gonorrhoeae_strain_WHO_F_chromosome_1_g_4 | 52237 |
| 2461_Neisseria_gonorrhoeae_strain_WHO_F_chromosome_1_g_5 | 52238 |
| 2462_Neisseria_gonorrhoeae_strain_WHO_F_chromosome_1_g_1 | 52239 |
| 2462_Neisseria_gonorrhoeae_strain_WHO_F_chromosome_1_g_2 | 52240 |
| 2462_Neisseria_gonorrhoeae_strain_WHO_F_chromosome_1_g_3 | 52241 |
| 2462_Neisseria_gonorrhoeae_strain_WHO_F_chromosome_1_g_4 | 52242 |
| 2462_Neisseria_gonorrhoeae_strain_WHO_F_chromosome_1_g_5 | 52243 |
| 2463_Neisseria_gonorrhoeae_strain_WHO_F_chromosome_1_g_1 | 52244 |
| 2463_Neisseria_gonorrhoeae_strain_WHO_F_chromosome_1_g_2 | 52245 |
| 2463_Neisseria_gonorrhoeae_strain_WHO_F_chromosome_1_g_3 | 52246 |
| 2463_Neisseria_gonorrhoeae_strain_WHO_F_chromosome_1_g_4 | 52247 |
| 2463_Neisseria_gonorrhoeae_strain_WHO_F_chromosome_1_g_5 | 52248 |
| 2464_Neisseria_gonorrhoeae_strain_WHO_F_chromosome_1_g_1 | 52249 |
| 2464_Neisseria_gonorrhoeae_strain_WHO_F_chromosome_1_g_2 | 52250 |
| 2464_Neisseria_gonorrhoeae_strain_WHO_F_chromosome_1_g_3 | 52251 |
| 2464_Neisseria_gonorrhoeae_strain_WHO_F_chromosome_1_g_4 | 52252 |
| 2464_Neisseria_gonorrhoeae_strain_WHO_F_chromosome_1_g_5 | 52253 |
| 2465_Neisseria_gonorrhoeae_strain_WHO_F_chromosome_1_g_1 | 52254 |
| 2465_Neisseria_gonorrhoeae_strain_WHO_F_chromosome_1_g_2 | 52255 |
| 2465_Neisseria_gonorrhoeae_strain_WHO_F_chromosome_1_g_3 | 52256 |
| 2465_Neisseria_gonorrhoeae_strain_WHO_F_chromosome_1_g_4 | 52257 |
| 2465_Neisseria_gonorrhoeae_strain_WHO_F_chromosome_1_g_5 | 52258 |
| 2466_Neisseria_gonorrhoeae_strain_WHO_F_chromosome_1_g_1 | 52259 |
| 2466_Neisseria_gonorrhoeae_strain_WHO_F_chromosome_1_g_2 | 52260 |
| 2466_Neisseria_gonorrhoeae_strain_WHO_F_chromosome_1_g_3 | 52261 |
| 2466_Neisseria_gonorrhoeae_strain_WHO_F_chromosome_1_g_4 | 52262 |
| 2466_Neisseria_gonorrhoeae_strain_WHO_F_chromosome_1_g_5 | 52263 |
| 2467_Neisseria_gonorrhoeae_strain_WHO_F_chromosome_1_g_1 | 52264 |
| 2467_Neisseria_gonorrhoeae_strain_WHO_F_chromosome_1_g_2 | 52265 |
| 2467_Neisseria_gonorrhoeae_strain_WHO_F_chromosome_1_g_3 | 52266 |
| 2467_Neisseria_gonorrhoeae_strain_WHO_F_chromosome_1_g_4 | 52267 |
| 2467_Neisseria_gonorrhoeae_strain_WHO_F_chromosome_1_g_5 | 52268 |
| 2468_Neisseria_gonorrhoeae_strain_WHO_F_chromosome_1_g_1 | 52269 |
| 2468_Neisseria_gonorrhoeae_strain_WHO_F_chromosome_1_g_2 | 52270 |
| 2468_Neisseria_gonorrhoeae_strain_WHO_F_chromosome_1_g_3 | 52271 |
| 2468_Neisseria_gonorrhoeae_strain_WHO_F_chromosome_1_g_4 | 52272 |
| 2468_Neisseria_gonorrhoeae_strain_WHO_F_chromosome_1_g_5 | 52273 |
| 2469_Neisseria_gonorrhoeae_strain_WHO_F_chromosome_1_g_1 | 52274 |
| 2469_Neisseria_gonorrhoeae_strain_WHO_F_chromosome_1_g_2 | 52275 |
| 2469_Neisseria_gonorrhoeae_strain_WHO_F_chromosome_1_g_3 | 52276 |
| 2469_Neisseria_gonorrhoeae_strain_WHO_F_chromosome_1_g_4 | 52277 |
| 2470_Neisseria_gonorrhoeae_strain_WHO_F_chromosome_1_g_1 | 52278 |
| 2470_Neisseria_gonorrhoeae_strain_WHO_F_chromosome_1_g_2 | 52279 |
| 2470_Neisseria_gonorrhoeae_strain_WHO_F_chromosome_1_g_3 | 52280 |
| 2470_Neisseria_gonorrhoeae_strain_WHO_F_chromosome_1_g_4 | 52281 |
| 2470_Neisseria_gonorrhoeae_strain_WHO_F_chromosome_1_g_5 | 52282 |
| 2471_Neisseria_gonorrhoeae_strain_WHO_F_chromosome_1_g_1 | 52283 |
| 2471_Neisseria_gonorrhoeae_strain_WHO_F_chromosome_1_g_2 | 52284 |
| 2471_Neisseria_gonorrhoeae_strain_WHO_F_chromosome_1_g_3 | 52285 |
| 2471_Neisseria_gonorrhoeae_strain_WHO_F_chromosome_1_g_4 | 52286 |
| 2471_Neisseria_gonorrhoeae_strain_WHO_F_chromosome_1_g_5 | 52287 |
| 2472_Neisseria_gonorrhoeae_strain_WHO_F_chromosome_1_g_1 | 52288 |
| 2472_Neisseria_gonorrhoeae_strain_WHO_F_chromosome_1_g_2 | 52289 |
| 2472_Neisseria_gonorrhoeae_strain_WHO_F_chromosome_1_g_3 | 52290 |
| 2472_Neisseria_gonorrhoeae_strain_WHO_F_chromosome_1_g_4 | 52291 |
| 2472_Neisseria_gonorrhoeae_strain_WHO_F_chromosome_1_g_5 | 52292 |
| 2473_Neisseria_gonorrhoeae_strain_WHO_F_chromosome_1_g_1 | 52293 |
| 2473_Neisseria_gonorrhoeae_strain_WHO_F_chromosome_1_g_2 | 52294 |
| 2473_Neisseria_gonorrhoeae_strain_WHO_F_chromosome_1_g_3 | 52295 |
| 2473_Neisseria_gonorrhoeae_strain_WHO_F_chromosome_1_g_4 | 52296 |
| 2473_Neisseria_gonorrhoeae_strain_WHO_F_chromosome_1_g_5 | 52297 |
| 2474_Neisseria_gonorrhoeae_strain_WHO_F_chromosome_1_g_1 | 52298 |
| 2474_Neisseria_gonorrhoeae_strain_WHO_F_chromosome_1_g_2 | 52299 |
| 2474_Neisseria_gonorrhoeae_strain_WHO_F_chromosome_1_g_3 | 52300 |
| 2474_Neisseria_gonorrhoeae_strain_WHO_F_chromosome_1_g_4 | 52301 |
| 2474_Neisseria_gonorrhoeae_strain_WHO_F_chromosome_1_g_5 | 52302 |
| 2475_Neisseria_gonorrhoeae_strain_WHO_F_chromosome_1_g_1 | 52303 |
| 2475_Neisseria_gonorrhoeae_strain_WHO_F_chromosome_1_g_2 | 52304 |
| 2475_Neisseria_gonorrhoeae_strain_WHO_F_chromosome_1_g_3 | 52305 |
| 2475_Neisseria_gonorrhoeae_strain_WHO_F_chromosome_1_g_4 | 52306 |
| 2475_Neisseria_gonorrhoeae_strain_WHO_F_chromosome_1_g_5 | 52307 |
| 2476_Neisseria_gonorrhoeae_strain_WHO_F_chromosome_1_g_1 | 52308 |
| 2476_Neisseria_gonorrhoeae_strain_WHO_F_chromosome_1_g_2 | 52309 |
| 2476_Neisseria_gonorrhoeae_strain_WHO_F_chromosome_1_g_3 | 52310 |
| 2476_Neisseria_gonorrhoeae_strain_WHO_F_chromosome_1_g_4 | 52311 |
| 2476_Neisseria_gonorrhoeae_strain_WHO_F_chromosome_1_g_5 | 52312 |
| 2477_Neisseria_gonorrhoeae_strain_WHO_F_chromosome_1_g_1 | 52313 |
| 2477_Neisseria_gonorrhoeae_strain_WHO_F_chromosome_1_g_2 | 52314 |
| 2477_Neisseria_gonorrhoeae_strain_WHO_F_chromosome_1_g_3 | 52315 |
| 2477_Neisseria_gonorrhoeae_strain_WHO_F_chromosome_1_g_4 | 52316 |
| 2477_Neisseria_gonorrhoeae_strain_WHO_F_chromosome_1_g_5 | 52317 |
| 2478_Neisseria_gonorrhoeae_strain_WHO_F_chromosome_1_g_1 | 52318 |
| 2478_Neisseria_gonorrhoeae_strain_WHO_F_chromosome_1_g_2 | 52319 |
| 2478_Neisseria_gonorrhoeae_strain_WHO_F_chromosome_1_g_3 | 52320 |
| 2478_Neisseria_gonorrhoeae_strain_WHO_F_chromosome_1_g_4 | 52321 |
| 2478_Neisseria_gonorrhoeae_strain_WHO_F_chromosome_1_g_5 | 52322 |
| 2479_Neisseria_gonorrhoeae_strain_WHO_F_chromosome_1_g_1 | 52323 |
| 2479_Neisseria_gonorrhoeae_strain_WHO_F_chromosome_1_g_2 | 52324 |
| 2479_Neisseria_gonorrhoeae_strain_WHO_F_chromosome_1_g_3 | 52325 |
| 2479_Neisseria_gonorrhoeae_strain_WHO_F_chromosome_1_g_4 | 52326 |
| 2479_Neisseria_gonorrhoeae_strain_WHO_F_chromosome_1_g_5 | 52327 |
| 2480_Neisseria_gonorrhoeae_strain_WHO_F_chromosome_1_g_1 | 52328 |
| 2480_Neisseria_gonorrhoeae_strain_WHO_F_chromosome_1_g_2 | 52329 |
| 2480_Neisseria_gonorrhoeae_strain_WHO_F_chromosome_1_g_3 | 52330 |
| 2480_Neisseria_gonorrhoeae_strain_WHO_F_chromosome_1_g_4 | 52331 |
| 2480_Neisseria_gonorrhoeae_strain_WHO_F_chromosome_1_g_5 | 52332 |
| 2481_Neisseria_gonorrhoeae_strain_WHO_F_chromosome_1_g_1 | 52333 |
| 2481_Neisseria_gonorrhoeae_strain_WHO_F_chromosome_1_g_2 | 52334 |
| 2481_Neisseria_gonorrhoeae_strain_WHO_F_chromosome_1_g_3 | 52335 |
| 2481_Neisseria_gonorrhoeae_strain_WHO_F_chromosome_1_g_4 | 52336 |
| 2481_Neisseria_gonorrhoeae_strain_WHO_F_chromosome_1_g_5 | 52337 |
| 2482_Neisseria_gonorrhoeae_strain_WHO_F_chromosome_1_g_1 | 52338 |
| 2482_Neisseria_gonorrhoeae_strain_WHO_F_chromosome_1_g_2 | 52339 |
| 2482_Neisseria_gonorrhoeae_strain_WHO_F_chromosome_1_g_3 | 52340 |
| 2482_Neisseria_gonorrhoeae_strain_WHO_F_chromosome_1_g_4 | 52341 |
| 2482_Neisseria_gonorrhoeae_strain_WHO_F_chromosome_1_g_5 | 52342 |
| 2483_Neisseria_gonorrhoeae_strain_WHO_F_chromosome_1_g_1 | 52343 |
| 2483_Neisseria_gonorrhoeae_strain_WHO_F_chromosome_1_g_2 | 52344 |
| 2483_Neisseria_gonorrhoeae_strain_WHO_F_chromosome_1_g_3 | 52345 |
| 2483_Neisseria_gonorrhoeae_strain_WHO_F_chromosome_1_g_4 | 52346 |
| 2483_Neisseria_gonorrhoeae_strain_WHO_F_chromosome_1_g_5 | 52347 |
| 2484_Neisseria_gonorrhoeae_strain_WHO_F_chromosome_1_g_1 | 52348 |
| 2484_Neisseria_gonorrhoeae_strain_WHO_F_chromosome_1_g_2 | 52349 |
| 2484_Neisseria_gonorrhoeae_strain_WHO_F_chromosome_1_g_3 | 52350 |
| 2484_Neisseria_gonorrhoeae_strain_WHO_F_chromosome_1_g_4 | 52351 |
| 2484_Neisseria_gonorrhoeae_strain_WHO_F_chromosome_1_g_5 | 52352 |
| 2485_Neisseria_gonorrhoeae_strain_WHO_F_chromosome_1_g_1 | 52353 |
| 2485_Neisseria_gonorrhoeae_strain_WHO_F_chromosome_1_g_2 | 52354 |
| 2485_Neisseria_gonorrhoeae_strain_WHO_F_chromosome_1_g_3 | 52355 |
| 2485_Neisseria_gonorrhoeae_strain_WHO_F_chromosome_1_g_4 | 52356 |
| 2485_Neisseria_gonorrhoeae_strain_WHO_F_chromosome_1_g_5 | 52357 |
| 2486_Neisseria_gonorrhoeae_strain_WHO_F_chromosome_1_g_1 | 52358 |
| 2486_Neisseria_gonorrhoeae_strain_WHO_F_chromosome_1_g_2 | 52359 |
| 2486_Neisseria_gonorrhoeae_strain_WHO_F_chromosome_1_g_3 | 52360 |
| 2486_Neisseria_gonorrhoeae_strain_WHO_F_chromosome_1_g_4 | 52361 |
| 2486_Neisseria_gonorrhoeae_strain_WHO_F_chromosome_1_g_5 | 52362 |
| 2487_Neisseria_gonorrhoeae_strain_WHO_F_chromosome_1_g_1 | 52363 |
| 2487_Neisseria_gonorrhoeae_strain_WHO_F_chromosome_1_g_2 | 52364 |
| 2487_Neisseria_gonorrhoeae_strain_WHO_F_chromosome_1_g_3 | 52365 |
| 2487_Neisseria_gonorrhoeae_strain_WHO_F_chromosome_1_g_4 | 52366 |
| 2487_Neisseria_gonorrhoeae_strain_WHO_F_chromosome_1_g_5 | 52367 |
| 2488_Neisseria_gonorrhoeae_strain_WHO_F_chromosome_1_g_1 | 52368 |
| 2488_Neisseria_gonorrhoeae_strain_WHO_F_chromosome_1_g_2 | 52369 |
| 2488_Neisseria_gonorrhoeae_strain_WHO_F_chromosome_1_g_3 | 52370 |
| 2488_Neisseria_gonorrhoeae_strain_WHO_F_chromosome_1_g_4 | 52371 |
| 2488_Neisseria_gonorrhoeae_strain_WHO_F_chromosome_1_g_5 | 52372 |
| 2489_Neisseria_gonorrhoeae_strain_WHO_F_chromosome_1_g_1 | 52373 |
| 2489_Neisseria_gonorrhoeae_strain_WHO_F_chromosome_1_g_2 | 52374 |
| 2489_Neisseria_gonorrhoeae_strain_WHO_F_chromosome_1_g_3 | 52375 |
| 2489_Neisseria_gonorrhoeae_strain_WHO_F_chromosome_1_g_4 | 52376 |
| 2489_Neisseria_gonorrhoeae_strain_WHO_F_chromosome_1_g_5 | 52377 |
| 2490_Neisseria_gonorrhoeae_strain_WHO_F_chromosome_1_g_1 | 52378 |
| 2490_Neisseria_gonorrhoeae_strain_WHO_F_chromosome_1_g_2 | 52379 |
| 2490_Neisseria_gonorrhoeae_strain_WHO_F_chromosome_1_g_3 | 52380 |
| 2490_Neisseria_gonorrhoeae_strain_WHO_F_chromosome_1_g_4 | 52381 |
| 2490_Neisseria_gonorrhoeae_strain_WHO_F_chromosome_1_g_5 | 52382 |
| 2491_Neisseria_gonorrhoeae_strain_WHO_F_chromosome_1_g_1 | 52383 |
| 2491_Neisseria_gonorrhoeae_strain_WHO_F_chromosome_1_g_2 | 52384 |
| 2491_Neisseria_gonorrhoeae_strain_WHO_F_chromosome_1_g_3 | 52385 |
| 2491_Neisseria_gonorrhoeae_strain_WHO_F_chromosome_1_g_4 | 52386 |
| 2491_Neisseria_gonorrhoeae_strain_WHO_F_chromosome_1_g_5 | 52387 |
| 2492_Neisseria_gonorrhoeae_strain_WHO_F_chromosome_1_g_1 | 52388 |
| 2492_Neisseria_gonorrhoeae_strain_WHO_F_chromosome_1_g_2 | 52389 |
| 2492_Neisseria_gonorrhoeae_strain_WHO_F_chromosome_1_g_3 | 52390 |
| 2492_Neisseria_gonorrhoeae_strain_WHO_F_chromosome_1_g_4 | 52391 |
| 2492_Neisseria_gonorrhoeae_strain_WHO_F_chromosome_1_g_5 | 52392 |
| 2493_Neisseria_gonorrhoeae_strain_WHO_F_chromosome_1_g_1 | 52393 |
| 2493_Neisseria_gonorrhoeae_strain_WHO_F_chromosome_1_g_2 | 52394 |
| 2493_Neisseria_gonorrhoeae_strain_WHO_F_chromosome_1_g_3 | 52395 |
| 2493_Neisseria_gonorrhoeae_strain_WHO_F_chromosome_1_g_4 | 52396 |
| 2493_Neisseria_gonorrhoeae_strain_WHO_F_chromosome_1_g_5 | 52397 |
| 2494_Neisseria_gonorrhoeae_strain_WHO_F_chromosome_1_g_1 | 52398 |
| 2494_Neisseria_gonorrhoeae_strain_WHO_F_chromosome_1_g_2 | 52399 |
| 2494_Neisseria_gonorrhoeae_strain_WHO_F_chromosome_1_g_3 | 52400 |
| 2494_Neisseria_gonorrhoeae_strain_WHO_F_chromosome_1_g_4 | 52401 |
| 2494_Neisseria_gonorrhoeae_strain_WHO_F_chromosome_1_g_5 | 52402 |
| 2495_Neisseria_gonorrhoeae_strain_WHO_F_chromosome_1_g_1 | 52403 |
| 2495_Neisseria_gonorrhoeae_strain_WHO_F_chromosome_1_g_2 | 52404 |
| 2495_Neisseria_gonorrhoeae_strain_WHO_F_chromosome_1_g_3 | 52405 |
| 2495_Neisseria_gonorrhoeae_strain_WHO_F_chromosome_1_g_4 | 52406 |
| 2495_Neisseria_gonorrhoeae_strain_WHO_F_chromosome_1_g_5 | 52407 |
| 2496_Neisseria_gonorrhoeae_strain_WHO_F_chromosome_1_g_1 | 52408 |
| 2496_Neisseria_gonorrhoeae_strain_WHO_F_chromosome_1_g_2 | 52409 |
| 2496_Neisseria_gonorrhoeae_strain_WHO_F_chromosome_1_g_3 | 52410 |
| 2496_Neisseria_gonorrhoeae_strain_WHO_F_chromosome_1_g_4 | 52411 |
| 2496_Neisseria_gonorrhoeae_strain_WHO_F_chromosome_1_g_5 | 52412 |
| 2497_Neisseria_gonorrhoeae_strain_WHO_F_chromosome_1_g_1 | 52413 |
| 2497_Neisseria_gonorrhoeae_strain_WHO_F_chromosome_1_g_2 | 52414 |
| 2497_Neisseria_gonorrhoeae_strain_WHO_F_chromosome_1_g_3 | 52415 |
| 2497_Neisseria_gonorrhoeae_strain_WHO_F_chromosome_1_g_4 | 52416 |
| 2497_Neisseria_gonorrhoeae_strain_WHO_F_chromosome_1_g_5 | 52417 |
| 2498_Neisseria_gonorrhoeae_strain_WHO_F_chromosome_1_g_1 | 52418 |
| 2498_Neisseria_gonorrhoeae_strain_WHO_F_chromosome_1_g_2 | 52419 |
| 2498_Neisseria_gonorrhoeae_strain_WHO_F_chromosome_1_g_3 | 52420 |
| 2498_Neisseria_gonorrhoeae_strain_WHO_F_chromosome_1_g_4 | 52421 |
| 2498_Neisseria_gonorrhoeae_strain_WHO_F_chromosome_1_g_5 | 52422 |
| 2499_Neisseria_gonorrhoeae_strain_WHO_F_chromosome_1_g_1 | 52423 |
| 2499_Neisseria_gonorrhoeae_strain_WHO_F_chromosome_1_g_2 | 52424 |
| 2499_Neisseria_gonorrhoeae_strain_WHO_F_chromosome_1_g_3 | 52425 |
| 2499_Neisseria_gonorrhoeae_strain_WHO_F_chromosome_1_g_4 | 52426 |
| 2499_Neisseria_gonorrhoeae_strain_WHO_F_chromosome_1_g_5 | 52427 |
| 2500_Neisseria_gonorrhoeae_strain_WHO_F_chromosome_1_g_1 | 52428 |
| 2500_Neisseria_gonorrhoeae_strain_WHO_F_chromosome_1_g_2 | 52429 |
| 2500_Neisseria_gonorrhoeae_strain_WHO_F_chromosome_1_g_3 | 52430 |
| 2500_Neisseria_gonorrhoeae_strain_WHO_F_chromosome_1_g_4 | 52431 |
| 2500_Neisseria_gonorrhoeae_strain_WHO_F_chromosome_1_g_5 | 52432 |
| 2501_Neisseria_gonorrhoeae_strain_WHO_F_chromosome_1_g_1 | 52433 |
| 2501_Neisseria_gonorrhoeae_strain_WHO_F_chromosome_1_g_2 | 52434 |
| 2501_Neisseria_gonorrhoeae_strain_WHO_F_chromosome_1_g_3 | 52435 |
| 2501_Neisseria_gonorrhoeae_strain_WHO_F_chromosome_1_g_4 | 52436 |
| 2501_Neisseria_gonorrhoeae_strain_WHO_F_chromosome_1_g_5 | 52437 |
| 2502_Neisseria_gonorrhoeae_strain_WHO_F_chromosome_1_g_1 | 52438 |
| 2502_Neisseria_gonorrhoeae_strain_WHO_F_chromosome_1_g_2 | 52439 |
| 2502_Neisseria_gonorrhoeae_strain_WHO_F_chromosome_1_g_3 | 52440 |
| 2502_Neisseria_gonorrhoeae_strain_WHO_F_chromosome_1_g_4 | 52441 |
| 2502_Neisseria_gonorrhoeae_strain_WHO_F_chromosome_1_g_5 | 52442 |
| 2503_Neisseria_gonorrhoeae_strain_WHO_F_chromosome_1_g_1 | 52443 |
| 2503_Neisseria_gonorrhoeae_strain_WHO_F_chromosome_1_g_2 | 52444 |
| 2503_Neisseria_gonorrhoeae_strain_WHO_F_chromosome_1_g_3 | 52445 |
| 2503_Neisseria_gonorrhoeae_strain_WHO_F_chromosome_1_g_4 | 52446 |
| 2503_Neisseria_gonorrhoeae_strain_WHO_F_chromosome_1_g_5 | 52447 |
| 2504_Neisseria_gonorrhoeae_strain_WHO_F_chromosome_1_g_1 | 52448 |
| 2504_Neisseria_gonorrhoeae_strain_WHO_F_chromosome_1_g_2 | 52449 |
| 2504_Neisseria_gonorrhoeae_strain_WHO_F_chromosome_1_g_3 | 52450 |
| 2504_Neisseria_gonorrhoeae_strain_WHO_F_chromosome_1_g_4 | 52451 |
| 2504_Neisseria_gonorrhoeae_strain_WHO_F_chromosome_1_g_5 | 52452 |
| 2505_Neisseria_gonorrhoeae_strain_WHO_F_chromosome_1_g_1 | 52453 |
| 2505_Neisseria_gonorrhoeae_strain_WHO_F_chromosome_1_g_2 | 52454 |
| 2505_Neisseria_gonorrhoeae_strain_WHO_F_chromosome_1_g_3 | 52455 |
| 2505_Neisseria_gonorrhoeae_strain_WHO_F_chromosome_1_g_4 | 52456 |
| 2505_Neisseria_gonorrhoeae_strain_WHO_F_chromosome_1_g_5 | 52457 |
| 2506_Neisseria_gonorrhoeae_strain_WHO_F_chromosome_1_g_1 | 52458 |
| 2506_Neisseria_gonorrhoeae_strain_WHO_F_chromosome_1_g_2 | 52459 |
| 2506_Neisseria_gonorrhoeae_strain_WHO_F_chromosome_1_g_3 | 52460 |
| 2506_Neisseria_gonorrhoeae_strain_WHO_F_chromosome_1_g_4 | 52461 |
| 2506_Neisseria_gonorrhoeae_strain_WHO_F_chromosome_1_g_5 | 52462 |
| 2507_Neisseria_gonorrhoeae_strain_WHO_F_chromosome_1_g_1 | 52463 |
| 2507_Neisseria_gonorrhoeae_strain_WHO_F_chromosome_1_g_2 | 52464 |
| 2507_Neisseria_gonorrhoeae_strain_WHO_F_chromosome_1_g_3 | 52465 |
| 2507_Neisseria_gonorrhoeae_strain_WHO_F_chromosome_1_g_4 | 52466 |
| 2507_Neisseria_gonorrhoeae_strain_WHO_F_chromosome_1_g_5 | 52467 |
| 2508_Neisseria_gonorrhoeae_strain_WHO_F_chromosome_1_g_1 | 52468 |
| 2508_Neisseria_gonorrhoeae_strain_WHO_F_chromosome_1_g_2 | 52469 |
| 2508_Neisseria_gonorrhoeae_strain_WHO_F_chromosome_1_g_3 | 52470 |
| 2508_Neisseria_gonorrhoeae_strain_WHO_F_chromosome_1_g_4 | 52471 |
| 2508_Neisseria_gonorrhoeae_strain_WHO_F_chromosome_1_g_5 | 52472 |
| 2509_Neisseria_gonorrhoeae_strain_WHO_F_chromosome_1_g_1 | 52473 |
| 2509_Neisseria_gonorrhoeae_strain_WHO_F_chromosome_1_g_2 | 52474 |
| 2509_Neisseria_gonorrhoeae_strain_WHO_F_chromosome_1_g_3 | 52475 |
| 2509_Neisseria_gonorrhoeae_strain_WHO_F_chromosome_1_g_4 | 52476 |
| 2509_Neisseria_gonorrhoeae_strain_WHO_F_chromosome_1_g_5 | 52477 |
| 2510_Neisseria_gonorrhoeae_strain_WHO_F_chromosome_1_g_1 | 52478 |
| 2510_Neisseria_gonorrhoeae_strain_WHO_F_chromosome_1_g_2 | 52479 |
| 2510_Neisseria_gonorrhoeae_strain_WHO_F_chromosome_1_g_3 | 52480 |
| 2510_Neisseria_gonorrhoeae_strain_WHO_F_chromosome_1_g_4 | 52481 |
| 2510_Neisseria_gonorrhoeae_strain_WHO_F_chromosome_1_g_5 | 52482 |
| 2511_Neisseria_gonorrhoeae_strain_WHO_F_chromosome_1_g_1 | 52483 |
| 2511_Neisseria_gonorrhoeae_strain_WHO_F_chromosome_1_g_2 | 52484 |
| 2511_Neisseria_gonorrhoeae_strain_WHO_F_chromosome_1_g_3 | 52485 |
| 2511_Neisseria_gonorrhoeae_strain_WHO_F_chromosome_1_g_4 | 52486 |
| 2511_Neisseria_gonorrhoeae_strain_WHO_F_chromosome_1_g_5 | 52487 |
| 2512_Neisseria_gonorrhoeae_strain_WHO_F_chromosome_1_g_1 | 52488 |
| 2512_Neisseria_gonorrhoeae_strain_WHO_F_chromosome_1_g_2 | 52489 |
| 2512_Neisseria_gonorrhoeae_strain_WHO_F_chromosome_1_g_3 | 52490 |
| 2512_Neisseria_gonorrhoeae_strain_WHO_F_chromosome_1_g_4 | 52491 |
| 2512_Neisseria_gonorrhoeae_strain_WHO_F_chromosome_1_g_5 | 52492 |
| 2513_Neisseria_gonorrhoeae_strain_WHO_F_chromosome_1_g_1 | 52493 |
| 2513_Neisseria_gonorrhoeae_strain_WHO_F_chromosome_1_g_2 | 52494 |
| 2513_Neisseria_gonorrhoeae_strain_WHO_F_chromosome_1_g_3 | 52495 |
| 2513_Neisseria_gonorrhoeae_strain_WHO_F_chromosome_1_g_4 | 52496 |
| 2513_Neisseria_gonorrhoeae_strain_WHO_F_chromosome_1_g_5 | 52497 |
| 2514_Neisseria_gonorrhoeae_strain_WHO_F_chromosome_1_g_1 | 52498 |
| 2514_Neisseria_gonorrhoeae_strain_WHO_F_chromosome_1_g_2 | 52499 |
| 2514_Neisseria_gonorrhoeae_strain_WHO_F_chromosome_1_g_3 | 52500 |
| 2514_Neisseria_gonorrhoeae_strain_WHO_F_chromosome_1_g_4 | 52501 |
| 2514_Neisseria_gonorrhoeae_strain_WHO_F_chromosome_1_g_5 | 52502 |
| 2515_Neisseria_gonorrhoeae_strain_WHO_F_chromosome_1_g_1 | 52503 |
| 2515_Neisseria_gonorrhoeae_strain_WHO_F_chromosome_1_g_2 | 52504 |
| 2515_Neisseria_gonorrhoeae_strain_WHO_F_chromosome_1_g_3 | 52505 |
| 2515_Neisseria_gonorrhoeae_strain_WHO_F_chromosome_1_g_4 | 52506 |
| 2515_Neisseria_gonorrhoeae_strain_WHO_F_chromosome_1_g_5 | 52507 |
| 2516_Neisseria_gonorrhoeae_strain_WHO_F_chromosome_1_g_1 | 52508 |
| 2516_Neisseria_gonorrhoeae_strain_WHO_F_chromosome_1_g_2 | 52509 |
| 2516_Neisseria_gonorrhoeae_strain_WHO_F_chromosome_1_g_3 | 52510 |
| 2516_Neisseria_gonorrhoeae_strain_WHO_F_chromosome_1_g_4 | 52511 |
| 2517_Neisseria_gonorrhoeae_strain_WHO_F_chromosome_1_g_1 | 52512 |
| 2517_Neisseria_gonorrhoeae_strain_WHO_F_chromosome_1_g_2 | 52513 |
| 2517_Neisseria_gonorrhoeae_strain_WHO_F_chromosome_1_g_3 | 52514 |
| 2517_Neisseria_gonorrhoeae_strain_WHO_F_chromosome_1_g_4 | 52515 |
| 2517_Neisseria_gonorrhoeae_strain_WHO_F_chromosome_1_g_5 | 52516 |
| 2518_Neisseria_gonorrhoeae_strain_WHO_F_chromosome_1_g_1 | 52517 |
| 2518_Neisseria_gonorrhoeae_strain_WHO_F_chromosome_1_g_2 | 52518 |
| 2518_Neisseria_gonorrhoeae_strain_WHO_F_chromosome_1_g_3 | 52519 |
| 2518_Neisseria_gonorrhoeae_strain_WHO_F_chromosome_1_g_4 | 52520 |
| 2518_Neisseria_gonorrhoeae_strain_WHO_F_chromosome_1_g_5 | 52521 |
| 2519_Neisseria_gonorrhoeae_strain_WHO_F_chromosome_1_g_1 | 52522 |
| 2519_Neisseria_gonorrhoeae_strain_WHO_F_chromosome_1_g_2 | 52523 |
| 2519_Neisseria_gonorrhoeae_strain_WHO_F_chromosome_1_g_3 | 52524 |
| 2519_Neisseria_gonorrhoeae_strain_WHO_F_chromosome_1_g_4 | 52525 |
| 2519_Neisseria_gonorrhoeae_strain_WHO_F_chromosome_1_g_5 | 52526 |
| 2520_Neisseria_gonorrhoeae_strain_WHO_F_chromosome_1_g_1 | 52527 |
| 2520_Neisseria_gonorrhoeae_strain_WHO_F_chromosome_1_g_2 | 52528 |
| 2520_Neisseria_gonorrhoeae_strain_WHO_F_chromosome_1_g_3 | 52529 |
| 2520_Neisseria_gonorrhoeae_strain_WHO_F_chromosome_1_g_4 | 52530 |
| 2520_Neisseria_gonorrhoeae_strain_WHO_F_chromosome_1_g_5 | 52531 |
| 2521_Neisseria_gonorrhoeae_strain_WHO_F_chromosome_1_g_1 | 52532 |
| 2521_Neisseria_gonorrhoeae_strain_WHO_F_chromosome_1_g_2 | 52533 |
| 2521_Neisseria_gonorrhoeae_strain_WHO_F_chromosome_1_g_3 | 52534 |
| 2521_Neisseria_gonorrhoeae_strain_WHO_F_chromosome_1_g_4 | 52535 |
| 2521_Neisseria_gonorrhoeae_strain_WHO_F_chromosome_1_g_5 | 52536 |
| 2522_Neisseria_gonorrhoeae_strain_WHO_F_chromosome_1_g_1 | 52537 |
| 2522_Neisseria_gonorrhoeae_strain_WHO_F_chromosome_1_g_2 | 52538 |
| 2522_Neisseria_gonorrhoeae_strain_WHO_F_chromosome_1_g_3 | 52539 |
| 2522_Neisseria_gonorrhoeae_strain_WHO_F_chromosome_1_g_4 | 52540 |
| 2522_Neisseria_gonorrhoeae_strain_WHO_F_chromosome_1_g_5 | 52541 |
| 2523_Neisseria_gonorrhoeae_strain_WHO_F_chromosome_1_g_1 | 52542 |
| 2523_Neisseria_gonorrhoeae_strain_WHO_F_chromosome_1_g_2 | 52543 |
| 2523_Neisseria_gonorrhoeae_strain_WHO_F_chromosome_1_g_3 | 52544 |
| 2523_Neisseria_gonorrhoeae_strain_WHO_F_chromosome_1_g_4 | 52545 |
| 2523_Neisseria_gonorrhoeae_strain_WHO_F_chromosome_1_g_5 | 52546 |
| 2524_Neisseria_gonorrhoeae_strain_WHO_F_chromosome_1_g_1 | 52547 |
| 2524_Neisseria_gonorrhoeae_strain_WHO_F_chromosome_1_g_2 | 52548 |
| 2524_Neisseria_gonorrhoeae_strain_WHO_F_chromosome_1_g_3 | 52549 |
| 2524_Neisseria_gonorrhoeae_strain_WHO_F_chromosome_1_g_4 | 52550 |
| 2524_Neisseria_gonorrhoeae_strain_WHO_F_chromosome_1_g_5 | 52551 |
| 2525_Neisseria_gonorrhoeae_strain_WHO_F_chromosome_1_g_1 | 52552 |
| 2525_Neisseria_gonorrhoeae_strain_WHO_F_chromosome_1_g_2 | 52553 |
| 2525_Neisseria_gonorrhoeae_strain_WHO_F_chromosome_1_g_3 | 52554 |
| 2525_Neisseria_gonorrhoeae_strain_WHO_F_chromosome_1_g_4 | 52555 |
| 2525_Neisseria_gonorrhoeae_strain_WHO_F_chromosome_1_g_5 | 52556 |
| 2526_Neisseria_gonorrhoeae_strain_WHO_F_chromosome_1_g_1 | 52557 |
| 2526_Neisseria_gonorrhoeae_strain_WHO_F_chromosome_1_g_2 | 52558 |
| 2526_Neisseria_gonorrhoeae_strain_WHO_F_chromosome_1_g_3 | 52559 |
| 2526_Neisseria_gonorrhoeae_strain_WHO_F_chromosome_1_g_4 | 52560 |
| 2526_Neisseria_gonorrhoeae_strain_WHO_F_chromosome_1_g_5 | 52561 |
| 2527_Neisseria_gonorrhoeae_strain_WHO_F_chromosome_1_g_1 | 52562 |
| 2527_Neisseria_gonorrhoeae_strain_WHO_F_chromosome_1_g_2 | 52563 |
| 2527_Neisseria_gonorrhoeae_strain_WHO_F_chromosome_1_g_3 | 52564 |
| 2527_Neisseria_gonorrhoeae_strain_WHO_F_chromosome_1_g_4 | 52565 |
| 2527_Neisseria_gonorrhoeae_strain_WHO_F_chromosome_1_g_5 | 52566 |
| 2528_Neisseria_gonorrhoeae_strain_WHO_F_chromosome_1_g_1 | 52567 |
| 2528_Neisseria_gonorrhoeae_strain_WHO_F_chromosome_1_g_2 | 52568 |
| 2528_Neisseria_gonorrhoeae_strain_WHO_F_chromosome_1_g_3 | 52569 |
| 2528_Neisseria_gonorrhoeae_strain_WHO_F_chromosome_1_g_4 | 52570 |
| 2528_Neisseria_gonorrhoeae_strain_WHO_F_chromosome_1_g_5 | 52571 |
| 2529_Neisseria_gonorrhoeae_strain_WHO_F_chromosome_1_g_1 | 52572 |
| 2529_Neisseria_gonorrhoeae_strain_WHO_F_chromosome_1_g_2 | 52573 |
| 2529_Neisseria_gonorrhoeae_strain_WHO_F_chromosome_1_g_3 | 52574 |
| 2529_Neisseria_gonorrhoeae_strain_WHO_F_chromosome_1_g_4 | 52575 |
| 2529_Neisseria_gonorrhoeae_strain_WHO_F_chromosome_1_g_5 | 52576 |
| 2530_Neisseria_gonorrhoeae_strain_WHO_F_chromosome_1_g_1 | 52577 |
| 2530_Neisseria_gonorrhoeae_strain_WHO_F_chromosome_1_g_2 | 52578 |
| 2530_Neisseria_gonorrhoeae_strain_WHO_F_chromosome_1_g_3 | 52579 |
| 2530_Neisseria_gonorrhoeae_strain_WHO_F_chromosome_1_g_4 | 52580 |
| 2530_Neisseria_gonorrhoeae_strain_WHO_F_chromosome_1_g_5 | 52581 |
| 2531_Neisseria_gonorrhoeae_strain_WHO_F_chromosome_1_g_1 | 52582 |
| 2531_Neisseria_gonorrhoeae_strain_WHO_F_chromosome_1_g_2 | 52583 |
| 2531_Neisseria_gonorrhoeae_strain_WHO_F_chromosome_1_g_3 | 52584 |
| 2531_Neisseria_gonorrhoeae_strain_WHO_F_chromosome_1_g_4 | 52585 |
| 2531_Neisseria_gonorrhoeae_strain_WHO_F_chromosome_1_g_5 | 52586 |
| 2532_Neisseria_gonorrhoeae_strain_WHO_F_chromosome_1_g_1 | 52587 |
| 2532_Neisseria_gonorrhoeae_strain_WHO_F_chromosome_1_g_2 | 52588 |
| 2532_Neisseria_gonorrhoeae_strain_WHO_F_chromosome_1_g_3 | 52589 |
| 2532_Neisseria_gonorrhoeae_strain_WHO_F_chromosome_1_g_4 | 52590 |
| 2532_Neisseria_gonorrhoeae_strain_WHO_F_chromosome_1_g_5 | 52591 |
| 2533_Neisseria_gonorrhoeae_strain_WHO_F_chromosome_1_g_1 | 52592 |
| 2533_Neisseria_gonorrhoeae_strain_WHO_F_chromosome_1_g_2 | 52593 |
| 2533_Neisseria_gonorrhoeae_strain_WHO_F_chromosome_1_g_3 | 52594 |
| 2533_Neisseria_gonorrhoeae_strain_WHO_F_chromosome_1_g_4 | 52595 |
| 2533_Neisseria_gonorrhoeae_strain_WHO_F_chromosome_1_g_5 | 52596 |
| 2534_Neisseria_gonorrhoeae_strain_WHO_F_chromosome_1_g_1 | 52597 |
| 2534_Neisseria_gonorrhoeae_strain_WHO_F_chromosome_1_g_2 | 52598 |
| 2534_Neisseria_gonorrhoeae_strain_WHO_F_chromosome_1_g_3 | 52599 |
| 2534_Neisseria_gonorrhoeae_strain_WHO_F_chromosome_1_g_4 | 52600 |
| 2534_Neisseria_gonorrhoeae_strain_WHO_F_chromosome_1_g_5 | 52601 |
| 2535_Neisseria_gonorrhoeae_strain_WHO_F_chromosome_1_g_1 | 52602 |
| 2535_Neisseria_gonorrhoeae_strain_WHO_F_chromosome_1_g_2 | 52603 |
| 2535_Neisseria_gonorrhoeae_strain_WHO_F_chromosome_1_g_3 | 52604 |
| 2535_Neisseria_gonorrhoeae_strain_WHO_F_chromosome_1_g_4 | 52605 |
| 2536_Neisseria_gonorrhoeae_strain_WHO_F_chromosome_1_g_1 | 52606 |
| 2536_Neisseria_gonorrhoeae_strain_WHO_F_chromosome_1_g_2 | 52607 |
| 2536_Neisseria_gonorrhoeae_strain_WHO_F_chromosome_1_g_3 | 52608 |
| 2536_Neisseria_gonorrhoeae_strain_WHO_F_chromosome_1_g_4 | 52609 |
| 2536_Neisseria_gonorrhoeae_strain_WHO_F_chromosome_1_g_5 | 52610 |
| 2537_Neisseria_gonorrhoeae_strain_WHO_F_chromosome_1_g_1 | 52611 |
| 2537_Neisseria_gonorrhoeae_strain_WHO_F_chromosome_1_g_2 | 52612 |
| 2537_Neisseria_gonorrhoeae_strain_WHO_F_chromosome_1_g_3 | 52613 |
| 2537_Neisseria_gonorrhoeae_strain_WHO_F_chromosome_1_g_4 | 52614 |
| 2537_Neisseria_gonorrhoeae_strain_WHO_F_chromosome_1_g_5 | 52615 |
| 2538_Neisseria_gonorrhoeae_strain_WHO_F_chromosome_1_g_1 | 52616 |
| 2538_Neisseria_gonorrhoeae_strain_WHO_F_chromosome_1_g_2 | 52617 |
| 2538_Neisseria_gonorrhoeae_strain_WHO_F_chromosome_1_g_3 | 52618 |
| 2538_Neisseria_gonorrhoeae_strain_WHO_F_chromosome_1_g_4 | 52619 |
| 2538_Neisseria_gonorrhoeae_strain_WHO_F_chromosome_1_g_5 | 52620 |
| 2539_Neisseria_gonorrhoeae_strain_WHO_F_chromosome_1_g_1 | 52621 |
| 2539_Neisseria_gonorrhoeae_strain_WHO_F_chromosome_1_g_2 | 52622 |
| 2539_Neisseria_gonorrhoeae_strain_WHO_F_chromosome_1_g_3 | 52623 |
| 2539_Neisseria_gonorrhoeae_strain_WHO_F_chromosome_1_g_4 | 52624 |
| 2539_Neisseria_gonorrhoeae_strain_WHO_F_chromosome_1_g_5 | 52625 |
| 2540_Neisseria_gonorrhoeae_strain_WHO_F_chromosome_1_g_1 | 52626 |
| 2540_Neisseria_gonorrhoeae_strain_WHO_F_chromosome_1_g_2 | 52627 |
| 2540_Neisseria_gonorrhoeae_strain_WHO_F_chromosome_1_g_3 | 52628 |
| 2540_Neisseria_gonorrhoeae_strain_WHO_F_chromosome_1_g_4 | 52629 |
| 2540_Neisseria_gonorrhoeae_strain_WHO_F_chromosome_1_g_5 | 52630 |
| 2541_Neisseria_gonorrhoeae_strain_WHO_F_chromosome_1_g_1 | 52631 |
| 2541_Neisseria_gonorrhoeae_strain_WHO_F_chromosome_1_g_2 | 52632 |
| 2541_Neisseria_gonorrhoeae_strain_WHO_F_chromosome_1_g_3 | 52633 |
| 2541_Neisseria_gonorrhoeae_strain_WHO_F_chromosome_1_g_4 | 52634 |
| 2541_Neisseria_gonorrhoeae_strain_WHO_F_chromosome_1_g_5 | 52635 |
| 2542_Neisseria_gonorrhoeae_strain_WHO_F_chromosome_1_g_1 | 52636 |
| 2542_Neisseria_gonorrhoeae_strain_WHO_F_chromosome_1_g_2 | 52637 |
| 2543_Neisseria_gonorrhoeae_strain_WHO_F_chromosome_1_g_1 | 52638 |
| 2543_Neisseria_gonorrhoeae_strain_WHO_F_chromosome_1_g_2 | 52639 |
| 2543_Neisseria_gonorrhoeae_strain_WHO_F_chromosome_1_g_3 | 52640 |
| 2543_Neisseria_gonorrhoeae_strain_WHO_F_chromosome_1_g_4 | 52641 |
| 2544_Neisseria_gonorrhoeae_strain_WHO_F_chromosome_1_g_1 | 52642 |
| 2544_Neisseria_gonorrhoeae_strain_WHO_F_chromosome_1_g_2 | 52643 |
| 2544_Neisseria_gonorrhoeae_strain_WHO_F_chromosome_1_g_3 | 52644 |
| 2544_Neisseria_gonorrhoeae_strain_WHO_F_chromosome_1_g_4 | 52645 |
| 2544_Neisseria_gonorrhoeae_strain_WHO_F_chromosome_1_g_5 | 52646 |
| 2545_Neisseria_gonorrhoeae_strain_WHO_F_chromosome_1_g_1 | 52647 |
| 2545_Neisseria_gonorrhoeae_strain_WHO_F_chromosome_1_g_2 | 52648 |
| 2545_Neisseria_gonorrhoeae_strain_WHO_F_chromosome_1_g_3 | 52649 |
| 2545_Neisseria_gonorrhoeae_strain_WHO_F_chromosome_1_g_4 | 52650 |
| 2545_Neisseria_gonorrhoeae_strain_WHO_F_chromosome_1_g_5 | 52651 |
| 2546_Neisseria_gonorrhoeae_strain_WHO_F_chromosome_1_g_1 | 52652 |
| 2546_Neisseria_gonorrhoeae_strain_WHO_F_chromosome_1_g_2 | 52653 |
| 2546_Neisseria_gonorrhoeae_strain_WHO_F_chromosome_1_g_3 | 52654 |
| 2546_Neisseria_gonorrhoeae_strain_WHO_F_chromosome_1_g_4 | 52655 |
| 2546_Neisseria_gonorrhoeae_strain_WHO_F_chromosome_1_g_5 | 52656 |
| 2547_Neisseria_gonorrhoeae_strain_WHO_F_chromosome_1_g_1 | 52657 |
| 2547_Neisseria_gonorrhoeae_strain_WHO_F_chromosome_1_g_2 | 52658 |
| 2547_Neisseria_gonorrhoeae_strain_WHO_F_chromosome_1_g_3 | 52659 |
| 2547_Neisseria_gonorrhoeae_strain_WHO_F_chromosome_1_g_4 | 52660 |
| 2547_Neisseria_gonorrhoeae_strain_WHO_F_chromosome_1_g_5 | 52661 |
| 2548_Neisseria_gonorrhoeae_strain_WHO_F_chromosome_1_g_1 | 52662 |
| 2548_Neisseria_gonorrhoeae_strain_WHO_F_chromosome_1_g_2 | 52663 |
| 2548_Neisseria_gonorrhoeae_strain_WHO_F_chromosome_1_g_3 | 52664 |
| 2548_Neisseria_gonorrhoeae_strain_WHO_F_chromosome_1_g_4 | 52665 |
| 2548_Neisseria_gonorrhoeae_strain_WHO_F_chromosome_1_g_5 | 52666 |
| 2549_Neisseria_gonorrhoeae_strain_WHO_F_chromosome_1_g_1 | 52667 |
| 2549_Neisseria_gonorrhoeae_strain_WHO_F_chromosome_1_g_2 | 52668 |
| 2549_Neisseria_gonorrhoeae_strain_WHO_F_chromosome_1_g_3 | 52669 |
| 2549_Neisseria_gonorrhoeae_strain_WHO_F_chromosome_1_g_4 | 52670 |
| 2549_Neisseria_gonorrhoeae_strain_WHO_F_chromosome_1_g_5 | 52671 |
| 2550_Neisseria_gonorrhoeae_strain_WHO_F_chromosome_1_g_1 | 52672 |
| 2550_Neisseria_gonorrhoeae_strain_WHO_F_chromosome_1_g_2 | 52673 |
| 2550_Neisseria_gonorrhoeae_strain_WHO_F_chromosome_1_g_3 | 52674 |
| 2550_Neisseria_gonorrhoeae_strain_WHO_F_chromosome_1_g_4 | 52675 |
| 2550_Neisseria_gonorrhoeae_strain_WHO_F_chromosome_1_g_5 | 52676 |
| 2551_Neisseria_gonorrhoeae_strain_WHO_F_chromosome_1_g_1 | 52677 |
| 2551_Neisseria_gonorrhoeae_strain_WHO_F_chromosome_1_g_2 | 52678 |
| 2551_Neisseria_gonorrhoeae_strain_WHO_F_chromosome_1_g_3 | 52679 |
| 2551_Neisseria_gonorrhoeae_strain_WHO_F_chromosome_1_g_4 | 52680 |
| 2551_Neisseria_gonorrhoeae_strain_WHO_F_chromosome_1_g_5 | 52681 |
| 2552_Neisseria_gonorrhoeae_strain_WHO_F_chromosome_1_g_1 | 52682 |
| 2552_Neisseria_gonorrhoeae_strain_WHO_F_chromosome_1_g_2 | 52683 |
| 2552_Neisseria_gonorrhoeae_strain_WHO_F_chromosome_1_g_3 | 52684 |
| 2552_Neisseria_gonorrhoeae_strain_WHO_F_chromosome_1_g_4 | 52685 |
| 2552_Neisseria_gonorrhoeae_strain_WHO_F_chromosome_1_g_5 | 52686 |
| 2553_Neisseria_gonorrhoeae_strain_WHO_F_chromosome_1_g_1 | 52687 |
| 2553_Neisseria_gonorrhoeae_strain_WHO_F_chromosome_1_g_2 | 52688 |
| 2553_Neisseria_gonorrhoeae_strain_WHO_F_chromosome_1_g_3 | 52689 |
| 2553_Neisseria_gonorrhoeae_strain_WHO_F_chromosome_1_g_4 | 52690 |
| 2553_Neisseria_gonorrhoeae_strain_WHO_F_chromosome_1_g_5 | 52691 |
| 2554_Neisseria_gonorrhoeae_strain_WHO_F_chromosome_1_g_1 | 52692 |
| 2554_Neisseria_gonorrhoeae_strain_WHO_F_chromosome_1_g_2 | 52693 |
| 2554_Neisseria_gonorrhoeae_strain_WHO_F_chromosome_1_g_3 | 52694 |
| 2554_Neisseria_gonorrhoeae_strain_WHO_F_chromosome_1_g_4 | 52695 |
| 2554_Neisseria_gonorrhoeae_strain_WHO_F_chromosome_1_g_5 | 52696 |
| 2555_Neisseria_gonorrhoeae_strain_WHO_F_chromosome_1_g_1 | 52697 |
| 2555_Neisseria_gonorrhoeae_strain_WHO_F_chromosome_1_g_2 | 52698 |
| 2555_Neisseria_gonorrhoeae_strain_WHO_F_chromosome_1_g_3 | 52699 |
| 2555_Neisseria_gonorrhoeae_strain_WHO_F_chromosome_1_g_4 | 52700 |
| 2555_Neisseria_gonorrhoeae_strain_WHO_F_chromosome_1_g_5 | 52701 |
| 2556_Neisseria_gonorrhoeae_strain_WHO_F_chromosome_1_g_1 | 52702 |
| 2556_Neisseria_gonorrhoeae_strain_WHO_F_chromosome_1_g_2 | 52703 |
| 2556_Neisseria_gonorrhoeae_strain_WHO_F_chromosome_1_g_3 | 52704 |
| 2556_Neisseria_gonorrhoeae_strain_WHO_F_chromosome_1_g_4 | 52705 |
| 2556_Neisseria_gonorrhoeae_strain_WHO_F_chromosome_1_g_5 | 52706 |
| 2557_Neisseria_gonorrhoeae_strain_WHO_F_chromosome_1_g_1 | 52707 |
| 2557_Neisseria_gonorrhoeae_strain_WHO_F_chromosome_1_g_2 | 52708 |
| 2557_Neisseria_gonorrhoeae_strain_WHO_F_chromosome_1_g_3 | 52709 |
| 2557_Neisseria_gonorrhoeae_strain_WHO_F_chromosome_1_g_4 | 52710 |
| 2557_Neisseria_gonorrhoeae_strain_WHO_F_chromosome_1_g_5 | 52711 |
| 2558_Neisseria_gonorrhoeae_strain_WHO_F_chromosome_1_g_1 | 52712 |
| 2558_Neisseria_gonorrhoeae_strain_WHO_F_chromosome_1_g_2 | 52713 |
| 2558_Neisseria_gonorrhoeae_strain_WHO_F_chromosome_1_g_3 | 52714 |
| 2558_Neisseria_gonorrhoeae_strain_WHO_F_chromosome_1_g_4 | 52715 |
| 2558_Neisseria_gonorrhoeae_strain_WHO_F_chromosome_1_g_5 | 52716 |
| 2559_Neisseria_gonorrhoeae_strain_WHO_F_chromosome_1_g_1 | 52717 |
| 2559_Neisseria_gonorrhoeae_strain_WHO_F_chromosome_1_g_2 | 52718 |
| 2559_Neisseria_gonorrhoeae_strain_WHO_F_chromosome_1_g_3 | 52719 |
| 2559_Neisseria_gonorrhoeae_strain_WHO_F_chromosome_1_g_4 | 52720 |
| 2559_Neisseria_gonorrhoeae_strain_WHO_F_chromosome_1_g_5 | 52721 |
| 2560_Neisseria_gonorrhoeae_strain_WHO_F_chromosome_1_g_1 | 52722 |
| 2560_Neisseria_gonorrhoeae_strain_WHO_F_chromosome_1_g_2 | 52723 |
| 2560_Neisseria_gonorrhoeae_strain_WHO_F_chromosome_1_g_3 | 52724 |
| 2560_Neisseria_gonorrhoeae_strain_WHO_F_chromosome_1_g_4 | 52725 |
| 2560_Neisseria_gonorrhoeae_strain_WHO_F_chromosome_1_g_5 | 52726 |
| 2561_Neisseria_gonorrhoeae_strain_WHO_F_chromosome_1_g_1 | 52727 |
| 2561_Neisseria_gonorrhoeae_strain_WHO_F_chromosome_1_g_2 | 52728 |
| 2561_Neisseria_gonorrhoeae_strain_WHO_F_chromosome_1_g_3 | 52729 |
| 2561_Neisseria_gonorrhoeae_strain_WHO_F_chromosome_1_g_4 | 52730 |
| 2561_Neisseria_gonorrhoeae_strain_WHO_F_chromosome_1_g_5 | 52731 |
| 2562_Neisseria_gonorrhoeae_strain_WHO_F_chromosome_1_g_1 | 52732 |
| 2562_Neisseria_gonorrhoeae_strain_WHO_F_chromosome_1_g_2 | 52733 |
| 2562_Neisseria_gonorrhoeae_strain_WHO_F_chromosome_1_g_3 | 52734 |
| 2562_Neisseria_gonorrhoeae_strain_WHO_F_chromosome_1_g_4 | 52735 |
| 2562_Neisseria_gonorrhoeae_strain_WHO_F_chromosome_1_g_5 | 52736 |
| 2563_Neisseria_gonorrhoeae_strain_WHO_F_chromosome_1_g_1 | 52737 |
| 2563_Neisseria_gonorrhoeae_strain_WHO_F_chromosome_1_g_2 | 52738 |
| 2563_Neisseria_gonorrhoeae_strain_WHO_F_chromosome_1_g_3 | 52739 |
| 2563_Neisseria_gonorrhoeae_strain_WHO_F_chromosome_1_g_4 | 52740 |
| 2563_Neisseria_gonorrhoeae_strain_WHO_F_chromosome_1_g_5 | 52741 |
| 2564_Neisseria_gonorrhoeae_strain_WHO_F_chromosome_1_g_1 | 52742 |
| 2564_Neisseria_gonorrhoeae_strain_WHO_F_chromosome_1_g_2 | 52743 |
| 2564_Neisseria_gonorrhoeae_strain_WHO_F_chromosome_1_g_3 | 52744 |
| 2564_Neisseria_gonorrhoeae_strain_WHO_F_chromosome_1_g_4 | 52745 |
| 2564_Neisseria_gonorrhoeae_strain_WHO_F_chromosome_1_g_5 | 52746 |
| 2565_Neisseria_gonorrhoeae_strain_WHO_F_chromosome_1_g_1 | 52747 |
| 2565_Neisseria_gonorrhoeae_strain_WHO_F_chromosome_1_g_2 | 52748 |
| 2566_Neisseria_gonorrhoeae_strain_WHO_F_chromosome_1_g_1 | 52749 |
| 2566_Neisseria_gonorrhoeae_strain_WHO_F_chromosome_1_g_2 | 52750 |
| 2566_Neisseria_gonorrhoeae_strain_WHO_F_chromosome_1_g_3 | 52751 |
| 2566_Neisseria_gonorrhoeae_strain_WHO_F_chromosome_1_g_4 | 52752 |
| 2567_Neisseria_gonorrhoeae_strain_WHO_F_chromosome_1_g_1 | 52753 |
| 2567_Neisseria_gonorrhoeae_strain_WHO_F_chromosome_1_g_2 | 52754 |
| 2567_Neisseria_gonorrhoeae_strain_WHO_F_chromosome_1_g_3 | 52755 |
| 2567_Neisseria_gonorrhoeae_strain_WHO_F_chromosome_1_g_4 | 52756 |
| 2567_Neisseria_gonorrhoeae_strain_WHO_F_chromosome_1_g_5 | 52757 |
| 2568_Neisseria_gonorrhoeae_strain_WHO_F_chromosome_1_g_1 | 52758 |
| 2568_Neisseria_gonorrhoeae_strain_WHO_F_chromosome_1_g_2 | 52759 |
| 2568_Neisseria_gonorrhoeae_strain_WHO_F_chromosome_1_g_3 | 52760 |
| 2568_Neisseria_gonorrhoeae_strain_WHO_F_chromosome_1_g_4 | 52761 |
| 2569_Neisseria_gonorrhoeae_strain_WHO_F_chromosome_1_g_1 | 52762 |
| 2569_Neisseria_gonorrhoeae_strain_WHO_F_chromosome_1_g_2 | 52763 |
| 2569_Neisseria_gonorrhoeae_strain_WHO_F_chromosome_1_g_3 | 52764 |
| 2569_Neisseria_gonorrhoeae_strain_WHO_F_chromosome_1_g_4 | 52765 |
| 2569_Neisseria_gonorrhoeae_strain_WHO_F_chromosome_1_g_5 | 52766 |
| 2570_Neisseria_gonorrhoeae_strain_WHO_F_chromosome_1_g_1 | 52767 |
| 2570_Neisseria_gonorrhoeae_strain_WHO_F_chromosome_1_g_2 | 52768 |
| 2570_Neisseria_gonorrhoeae_strain_WHO_F_chromosome_1_g_3 | 52769 |
| 2570_Neisseria_gonorrhoeae_strain_WHO_F_chromosome_1_g_4 | 52770 |
| 2570_Neisseria_gonorrhoeae_strain_WHO_F_chromosome_1_g_5 | 52771 |
| 2571_Neisseria_gonorrhoeae_strain_WHO_F_chromosome_1_g_1 | 52772 |
| 2571_Neisseria_gonorrhoeae_strain_WHO_F_chromosome_1_g_2 | 52773 |
| 2571_Neisseria_gonorrhoeae_strain_WHO_F_chromosome_1_g_3 | 52774 |
| 2571_Neisseria_gonorrhoeae_strain_WHO_F_chromosome_1_g_4 | 52775 |
| 2571_Neisseria_gonorrhoeae_strain_WHO_F_chromosome_1_g_5 | 52776 |
| 2572_Neisseria_gonorrhoeae_strain_WHO_F_chromosome_1_g_1 | 52777 |
| 2572_Neisseria_gonorrhoeae_strain_WHO_F_chromosome_1_g_2 | 52778 |
| 2572_Neisseria_gonorrhoeae_strain_WHO_F_chromosome_1_g_3 | 52779 |
| 2572_Neisseria_gonorrhoeae_strain_WHO_F_chromosome_1_g_4 | 52780 |
| 2572_Neisseria_gonorrhoeae_strain_WHO_F_chromosome_1_g_5 | 52781 |
| 2573_Neisseria_gonorrhoeae_strain_WHO_F_chromosome_1_g_1 | 52782 |
| 2573_Neisseria_gonorrhoeae_strain_WHO_F_chromosome_1_g_2 | 52783 |
| 2574_Neisseria_gonorrhoeae_strain_WHO_F_chromosome_1_g_1 | 52784 |
| 2574_Neisseria_gonorrhoeae_strain_WHO_F_chromosome_1_g_2 | 52785 |
| 2574_Neisseria_gonorrhoeae_strain_WHO_F_chromosome_1_g_3 | 52786 |
| 2574_Neisseria_gonorrhoeae_strain_WHO_F_chromosome_1_g_4 | 52787 |
| 2574_Neisseria_gonorrhoeae_strain_WHO_F_chromosome_1_g_5 | 52788 |
| 2575_Neisseria_gonorrhoeae_strain_WHO_F_chromosome_1_g_1 | 52789 |
| 2575_Neisseria_gonorrhoeae_strain_WHO_F_chromosome_1_g_2 | 52790 |
| 2575_Neisseria_gonorrhoeae_strain_WHO_F_chromosome_1_g_3 | 52791 |
| 2575_Neisseria_gonorrhoeae_strain_WHO_F_chromosome_1_g_4 | 52792 |
| 2575_Neisseria_gonorrhoeae_strain_WHO_F_chromosome_1_g_5 | 52793 |
| 2576_Neisseria_gonorrhoeae_strain_WHO_F_chromosome_1_g_1 | 52794 |
| 2576_Neisseria_gonorrhoeae_strain_WHO_F_chromosome_1_g_2 | 52795 |
| 2576_Neisseria_gonorrhoeae_strain_WHO_F_chromosome_1_g_3 | 52796 |
| 2576_Neisseria_gonorrhoeae_strain_WHO_F_chromosome_1_g_4 | 52797 |
| 2576_Neisseria_gonorrhoeae_strain_WHO_F_chromosome_1_g_5 | 52798 |
| 2577_Neisseria_gonorrhoeae_strain_WHO_F_chromosome_1_g_1 | 52799 |
| 2577_Neisseria_gonorrhoeae_strain_WHO_F_chromosome_1_g_2 | 52800 |
| 2577_Neisseria_gonorrhoeae_strain_WHO_F_chromosome_1_g_3 | 52801 |
| 2577_Neisseria_gonorrhoeae_strain_WHO_F_chromosome_1_g_4 | 52802 |
| 2577_Neisseria_gonorrhoeae_strain_WHO_F_chromosome_1_g_5 | 52803 |
| 2578_Neisseria_gonorrhoeae_strain_WHO_F_chromosome_1_g_1 | 52804 |
| 2578_Neisseria_gonorrhoeae_strain_WHO_F_chromosome_1_g_2 | 52805 |
| 2578_Neisseria_gonorrhoeae_strain_WHO_F_chromosome_1_g_3 | 52806 |
| 2578_Neisseria_gonorrhoeae_strain_WHO_F_chromosome_1_g_4 | 52807 |
| 2578_Neisseria_gonorrhoeae_strain_WHO_F_chromosome_1_g_5 | 52808 |
| 2579_Neisseria_gonorrhoeae_strain_WHO_F_chromosome_1_g_1 | 52809 |
| 2579_Neisseria_gonorrhoeae_strain_WHO_F_chromosome_1_g_2 | 52810 |
| 2579_Neisseria_gonorrhoeae_strain_WHO_F_chromosome_1_g_3 | 52811 |
| 2579_Neisseria_gonorrhoeae_strain_WHO_F_chromosome_1_g_4 | 52812 |
| 2579_Neisseria_gonorrhoeae_strain_WHO_F_chromosome_1_g_5 | 52813 |
| 2580_Neisseria_gonorrhoeae_strain_WHO_F_chromosome_1_g_1 | 52814 |
| 2580_Neisseria_gonorrhoeae_strain_WHO_F_chromosome_1_g_2 | 52815 |
| 2580_Neisseria_gonorrhoeae_strain_WHO_F_chromosome_1_g_3 | 52816 |
| 2580_Neisseria_gonorrhoeae_strain_WHO_F_chromosome_1_g_4 | 52817 |
| 2580_Neisseria_gonorrhoeae_strain_WHO_F_chromosome_1_g_5 | 52818 |
| 2581_Neisseria_gonorrhoeae_strain_WHO_F_chromosome_1_g_1 | 52819 |
| 2581_Neisseria_gonorrhoeae_strain_WHO_F_chromosome_1_g_2 | 52820 |
| 2581_Neisseria_gonorrhoeae_strain_WHO_F_chromosome_1_g_3 | 52821 |
| 2581_Neisseria_gonorrhoeae_strain_WHO_F_chromosome_1_g_4 | 52822 |
| 2581_Neisseria_gonorrhoeae_strain_WHO_F_chromosome_1_g_5 | 52823 |
| 2582_Neisseria_gonorrhoeae_strain_WHO_F_chromosome_1_g_1 | 52824 |
| 2582_Neisseria_gonorrhoeae_strain_WHO_F_chromosome_1_g_2 | 52825 |
| 2582_Neisseria_gonorrhoeae_strain_WHO_F_chromosome_1_g_3 | 52826 |
| 2582_Neisseria_gonorrhoeae_strain_WHO_F_chromosome_1_g_4 | 52827 |
| 2582_Neisseria_gonorrhoeae_strain_WHO_F_chromosome_1_g_5 | 52828 |
| 2583_Neisseria_gonorrhoeae_strain_WHO_F_chromosome_1_g_1 | 52829 |
| 2583_Neisseria_gonorrhoeae_strain_WHO_F_chromosome_1_g_2 | 52830 |
| 2583_Neisseria_gonorrhoeae_strain_WHO_F_chromosome_1_g_3 | 52831 |
| 2583_Neisseria_gonorrhoeae_strain_WHO_F_chromosome_1_g_4 | 52832 |
| 2583_Neisseria_gonorrhoeae_strain_WHO_F_chromosome_1_g_5 | 52833 |
| 2584_Neisseria_gonorrhoeae_strain_WHO_F_chromosome_1_g_1 | 52834 |
| 2584_Neisseria_gonorrhoeae_strain_WHO_F_chromosome_1_g_2 | 52835 |
| 2584_Neisseria_gonorrhoeae_strain_WHO_F_chromosome_1_g_3 | 52836 |
| 2584_Neisseria_gonorrhoeae_strain_WHO_F_chromosome_1_g_4 | 52837 |
| 2584_Neisseria_gonorrhoeae_strain_WHO_F_chromosome_1_g_5 | 52838 |
| 2585_Neisseria_gonorrhoeae_strain_WHO_F_chromosome_1_g_1 | 52839 |
| 2585_Neisseria_gonorrhoeae_strain_WHO_F_chromosome_1_g_2 | 52840 |
| 2585_Neisseria_gonorrhoeae_strain_WHO_F_chromosome_1_g_3 | 52841 |
| 2585_Neisseria_gonorrhoeae_strain_WHO_F_chromosome_1_g_4 | 52842 |
| 2585_Neisseria_gonorrhoeae_strain_WHO_F_chromosome_1_g_5 | 52843 |
| 2586_Neisseria_gonorrhoeae_strain_WHO_F_chromosome_1_g_1 | 52844 |
| 2586_Neisseria_gonorrhoeae_strain_WHO_F_chromosome_1_g_2 | 52845 |
| 2586_Neisseria_gonorrhoeae_strain_WHO_F_chromosome_1_g_3 | 52846 |
| 2586_Neisseria_gonorrhoeae_strain_WHO_F_chromosome_1_g_4 | 52847 |
| 2586_Neisseria_gonorrhoeae_strain_WHO_F_chromosome_1_g_5 | 52848 |
| 2587_Neisseria_gonorrhoeae_strain_WHO_F_chromosome_1_g_1 | 52849 |
| 2587_Neisseria_gonorrhoeae_strain_WHO_F_chromosome_1_g_2 | 52850 |
| 2587_Neisseria_gonorrhoeae_strain_WHO_F_chromosome_1_g_3 | 52851 |
| 2587_Neisseria_gonorrhoeae_strain_WHO_F_chromosome_1_g_4 | 52852 |
| 2587_Neisseria_gonorrhoeae_strain_WHO_F_chromosome_1_g_5 | 52853 |
| 2588_Neisseria_gonorrhoeae_strain_WHO_F_chromosome_1_g_1 | 52854 |
| 2588_Neisseria_gonorrhoeae_strain_WHO_F_chromosome_1_g_2 | 52855 |
| 2588_Neisseria_gonorrhoeae_strain_WHO_F_chromosome_1_g_3 | 52856 |
| 2588_Neisseria_gonorrhoeae_strain_WHO_F_chromosome_1_g_4 | 52857 |
| 2588_Neisseria_gonorrhoeae_strain_WHO_F_chromosome_1_g_5 | 52858 |
| 2589_Neisseria_gonorrhoeae_strain_WHO_F_chromosome_1_g_1 | 52859 |
| 2589_Neisseria_gonorrhoeae_strain_WHO_F_chromosome_1_g_2 | 52860 |
| 2589_Neisseria_gonorrhoeae_strain_WHO_F_chromosome_1_g_3 | 52861 |
| 2589_Neisseria_gonorrhoeae_strain_WHO_F_chromosome_1_g_4 | 52862 |
| 2589_Neisseria_gonorrhoeae_strain_WHO_F_chromosome_1_g_5 | 52863 |
| 2590_Neisseria_gonorrhoeae_strain_WHO_F_chromosome_1_g_1 | 52864 |
| 2590_Neisseria_gonorrhoeae_strain_WHO_F_chromosome_1_g_2 | 52865 |
| 2590_Neisseria_gonorrhoeae_strain_WHO_F_chromosome_1_g_3 | 52866 |
| 2590_Neisseria_gonorrhoeae_strain_WHO_F_chromosome_1_g_4 | 52867 |
| 2590_Neisseria_gonorrhoeae_strain_WHO_F_chromosome_1_g_5 | 52868 |
| 2591_Neisseria_gonorrhoeae_strain_WHO_F_chromosome_1_g_1 | 52869 |
| 2591_Neisseria_gonorrhoeae_strain_WHO_F_chromosome_1_g_2 | 52870 |
| 2591_Neisseria_gonorrhoeae_strain_WHO_F_chromosome_1_g_3 | 52871 |
| 2591_Neisseria_gonorrhoeae_strain_WHO_F_chromosome_1_g_4 | 52872 |
| 2591_Neisseria_gonorrhoeae_strain_WHO_F_chromosome_1_g_5 | 52873 |
| 2592_Neisseria_gonorrhoeae_strain_WHO_F_chromosome_1_g_1 | 52874 |
| 2592_Neisseria_gonorrhoeae_strain_WHO_F_chromosome_1_g_2 | 52875 |
| 2592_Neisseria_gonorrhoeae_strain_WHO_F_chromosome_1_g_3 | 52876 |
| 2592_Neisseria_gonorrhoeae_strain_WHO_F_chromosome_1_g_4 | 52877 |
| 2592_Neisseria_gonorrhoeae_strain_WHO_F_chromosome_1_g_5 | 52878 |
| 2593_Neisseria_gonorrhoeae_strain_WHO_F_chromosome_1_g_1 | 52879 |
| 2593_Neisseria_gonorrhoeae_strain_WHO_F_chromosome_1_g_2 | 52880 |
| 2593_Neisseria_gonorrhoeae_strain_WHO_F_chromosome_1_g_3 | 52881 |
| 2593_Neisseria_gonorrhoeae_strain_WHO_F_chromosome_1_g_4 | 52882 |
| 2593_Neisseria_gonorrhoeae_strain_WHO_F_chromosome_1_g_5 | 52883 |
| 2594_Neisseria_gonorrhoeae_strain_WHO_F_chromosome_1_g_1 | 52884 |
| 2594_Neisseria_gonorrhoeae_strain_WHO_F_chromosome_1_g_2 | 52885 |
| 2594_Neisseria_gonorrhoeae_strain_WHO_F_chromosome_1_g_3 | 52886 |
| 2594_Neisseria_gonorrhoeae_strain_WHO_F_chromosome_1_g_4 | 52887 |
| 2594_Neisseria_gonorrhoeae_strain_WHO_F_chromosome_1_g_5 | 52888 |
| 2595_Neisseria_gonorrhoeae_strain_WHO_F_chromosome_1_g_1 | 52889 |
| 2595_Neisseria_gonorrhoeae_strain_WHO_F_chromosome_1_g_2 | 52890 |
| 2595_Neisseria_gonorrhoeae_strain_WHO_F_chromosome_1_g_3 | 52891 |
| 2595_Neisseria_gonorrhoeae_strain_WHO_F_chromosome_1_g_4 | 52892 |
| 2595_Neisseria_gonorrhoeae_strain_WHO_F_chromosome_1_g_5 | 52893 |
| 2596_Neisseria_gonorrhoeae_strain_WHO_F_chromosome_1_g_1 | 52894 |
| 2596_Neisseria_gonorrhoeae_strain_WHO_F_chromosome_1_g_2 | 52895 |
| 2596_Neisseria_gonorrhoeae_strain_WHO_F_chromosome_1_g_3 | 52896 |
| 2596_Neisseria_gonorrhoeae_strain_WHO_F_chromosome_1_g_4 | 52897 |
| 2596_Neisseria_gonorrhoeae_strain_WHO_F_chromosome_1_g_5 | 52898 |
| 2597_Neisseria_gonorrhoeae_strain_WHO_F_chromosome_1_g_1 | 52899 |
| 2597_Neisseria_gonorrhoeae_strain_WHO_F_chromosome_1_g_2 | 52900 |
| 2597_Neisseria_gonorrhoeae_strain_WHO_F_chromosome_1_g_3 | 52901 |
| 2597_Neisseria_gonorrhoeae_strain_WHO_F_chromosome_1_g_4 | 52902 |
| 2597_Neisseria_gonorrhoeae_strain_WHO_F_chromosome_1_g_5 | 52903 |
| 2598_Neisseria_gonorrhoeae_strain_WHO_F_chromosome_1_g_1 | 52904 |
| 2598_Neisseria_gonorrhoeae_strain_WHO_F_chromosome_1_g_2 | 52905 |
| 2598_Neisseria_gonorrhoeae_strain_WHO_F_chromosome_1_g_3 | 52906 |
| 2598_Neisseria_gonorrhoeae_strain_WHO_F_chromosome_1_g_4 | 52907 |
| 2598_Neisseria_gonorrhoeae_strain_WHO_F_chromosome_1_g_5 | 52908 |
| 2599_Neisseria_gonorrhoeae_strain_WHO_F_chromosome_1_g_1 | 52909 |
| 2599_Neisseria_gonorrhoeae_strain_WHO_F_chromosome_1_g_2 | 52910 |
| 2599_Neisseria_gonorrhoeae_strain_WHO_F_chromosome_1_g_3 | 52911 |
| 2599_Neisseria_gonorrhoeae_strain_WHO_F_chromosome_1_g_4 | 52912 |
| 2599_Neisseria_gonorrhoeae_strain_WHO_F_chromosome_1_g_5 | 52913 |
| 2600_Neisseria_gonorrhoeae_strain_WHO_F_chromosome_1_g_1 | 52914 |
| 2600_Neisseria_gonorrhoeae_strain_WHO_F_chromosome_1_g_2 | 52915 |
| 2600_Neisseria_gonorrhoeae_strain_WHO_F_chromosome_1_g_3 | 52916 |
| 2600_Neisseria_gonorrhoeae_strain_WHO_F_chromosome_1_g_4 | 52917 |
| 2600_Neisseria_gonorrhoeae_strain_WHO_F_chromosome_1_g_5 | 52918 |
| 2601_Neisseria_gonorrhoeae_strain_WHO_F_chromosome_1_g_1 | 52919 |
| 2601_Neisseria_gonorrhoeae_strain_WHO_F_chromosome_1_g_2 | 52920 |
| 2601_Neisseria_gonorrhoeae_strain_WHO_F_chromosome_1_g_3 | 52921 |
| 2601_Neisseria_gonorrhoeae_strain_WHO_F_chromosome_1_g_4 | 52922 |
| 2601_Neisseria_gonorrhoeae_strain_WHO_F_chromosome_1_g_5 | 52923 |
| 2602_Neisseria_gonorrhoeae_strain_WHO_F_chromosome_1_g_1 | 52924 |
| 2602_Neisseria_gonorrhoeae_strain_WHO_F_chromosome_1_g_2 | 52925 |
| 2602_Neisseria_gonorrhoeae_strain_WHO_F_chromosome_1_g_3 | 52926 |
| 2602_Neisseria_gonorrhoeae_strain_WHO_F_chromosome_1_g_4 | 52927 |
| 2602_Neisseria_gonorrhoeae_strain_WHO_F_chromosome_1_g_5 | 52928 |
| 2603_Neisseria_gonorrhoeae_strain_WHO_F_chromosome_1_g_1 | 52929 |
| 2603_Neisseria_gonorrhoeae_strain_WHO_F_chromosome_1_g_2 | 52930 |
| 2603_Neisseria_gonorrhoeae_strain_WHO_F_chromosome_1_g_3 | 52931 |
| 2603_Neisseria_gonorrhoeae_strain_WHO_F_chromosome_1_g_4 | 52932 |
| 2603_Neisseria_gonorrhoeae_strain_WHO_F_chromosome_1_g_5 | 52933 |
| 2604_Neisseria_gonorrhoeae_strain_WHO_F_chromosome_1_g_1 | 52934 |
| 2604_Neisseria_gonorrhoeae_strain_WHO_F_chromosome_1_g_2 | 52935 |
| 2604_Neisseria_gonorrhoeae_strain_WHO_F_chromosome_1_g_3 | 52936 |
| 2604_Neisseria_gonorrhoeae_strain_WHO_F_chromosome_1_g_4 | 52937 |
| 2604_Neisseria_gonorrhoeae_strain_WHO_F_chromosome_1_g_5 | 52938 |
| 2605_Neisseria_gonorrhoeae_strain_WHO_F_chromosome_1_g_1 | 52939 |
| 2605_Neisseria_gonorrhoeae_strain_WHO_F_chromosome_1_g_2 | 52940 |
| 2605_Neisseria_gonorrhoeae_strain_WHO_F_chromosome_1_g_3 | 52941 |
| 2605_Neisseria_gonorrhoeae_strain_WHO_F_chromosome_1_g_4 | 52942 |
| 2605_Neisseria_gonorrhoeae_strain_WHO_F_chromosome_1_g_5 | 52943 |
| 2606_Neisseria_gonorrhoeae_strain_WHO_F_chromosome_1_g_1 | 52944 |
| 2606_Neisseria_gonorrhoeae_strain_WHO_F_chromosome_1_g_2 | 52945 |
| 2606_Neisseria_gonorrhoeae_strain_WHO_F_chromosome_1_g_3 | 52946 |
| 2606_Neisseria_gonorrhoeae_strain_WHO_F_chromosome_1_g_4 | 52947 |
| 2606_Neisseria_gonorrhoeae_strain_WHO_F_chromosome_1_g_5 | 52948 |
| 2607_Neisseria_gonorrhoeae_strain_WHO_F_chromosome_1_g_1 | 52949 |
| 2607_Neisseria_gonorrhoeae_strain_WHO_F_chromosome_1_g_2 | 52950 |
| 2607_Neisseria_gonorrhoeae_strain_WHO_F_chromosome_1_g_3 | 52951 |
| 2607_Neisseria_gonorrhoeae_strain_WHO_F_chromosome_1_g_4 | 52952 |
| 2607_Neisseria_gonorrhoeae_strain_WHO_F_chromosome_1_g_5 | 52953 |
| 2608_Neisseria_gonorrhoeae_strain_WHO_F_chromosome_1_g_1 | 52954 |
| 2608_Neisseria_gonorrhoeae_strain_WHO_F_chromosome_1_g_2 | 52955 |
| 2608_Neisseria_gonorrhoeae_strain_WHO_F_chromosome_1_g_3 | 52956 |
| 2608_Neisseria_gonorrhoeae_strain_WHO_F_chromosome_1_g_4 | 52957 |
| 2608_Neisseria_gonorrhoeae_strain_WHO_F_chromosome_1_g_5 | 52958 |
| 2609_Neisseria_gonorrhoeae_strain_WHO_F_chromosome_1_g_1 | 52959 |
| 2609_Neisseria_gonorrhoeae_strain_WHO_F_chromosome_1_g_2 | 52960 |
| 2609_Neisseria_gonorrhoeae_strain_WHO_F_chromosome_1_g_3 | 52961 |
| 2609_Neisseria_gonorrhoeae_strain_WHO_F_chromosome_1_g_4 | 52962 |
| 2609_Neisseria_gonorrhoeae_strain_WHO_F_chromosome_1_g_5 | 52963 |
| 2610_Neisseria_gonorrhoeae_strain_WHO_F_chromosome_1_g_1 | 52964 |
| 2610_Neisseria_gonorrhoeae_strain_WHO_F_chromosome_1_g_2 | 52965 |
| 2610_Neisseria_gonorrhoeae_strain_WHO_F_chromosome_1_g_3 | 52966 |
| 2610_Neisseria_gonorrhoeae_strain_WHO_F_chromosome_1_g_4 | 52967 |
| 2610_Neisseria_gonorrhoeae_strain_WHO_F_chromosome_1_g_5 | 52968 |
| 2611_Neisseria_gonorrhoeae_strain_WHO_F_chromosome_1_g_1 | 52969 |
| 2611_Neisseria_gonorrhoeae_strain_WHO_F_chromosome_1_g_2 | 52970 |
| 2611_Neisseria_gonorrhoeae_strain_WHO_F_chromosome_1_g_3 | 52971 |
| 2611_Neisseria_gonorrhoeae_strain_WHO_F_chromosome_1_g_4 | 52972 |
| 2611_Neisseria_gonorrhoeae_strain_WHO_F_chromosome_1_g_5 | 52973 |
| 2612_Neisseria_gonorrhoeae_strain_WHO_F_chromosome_1_g_1 | 52974 |
| 2612_Neisseria_gonorrhoeae_strain_WHO_F_chromosome_1_g_2 | 52975 |
| 2612_Neisseria_gonorrhoeae_strain_WHO_F_chromosome_1_g_3 | 52976 |
| 2612_Neisseria_gonorrhoeae_strain_WHO_F_chromosome_1_g_4 | 52977 |
| 2612_Neisseria_gonorrhoeae_strain_WHO_F_chromosome_1_g_5 | 52978 |
| 2613_Neisseria_gonorrhoeae_strain_WHO_F_chromosome_1_g_1 | 52979 |
| 2613_Neisseria_gonorrhoeae_strain_WHO_F_chromosome_1_g_2 | 52980 |
| 2613_Neisseria_gonorrhoeae_strain_WHO_F_chromosome_1_g_3 | 52981 |
| 2613_Neisseria_gonorrhoeae_strain_WHO_F_chromosome_1_g_4 | 52982 |
| 2613_Neisseria_gonorrhoeae_strain_WHO_F_chromosome_1_g_5 | 52983 |
| 2614_Neisseria_gonorrhoeae_strain_WHO_F_chromosome_1_g_1 | 52984 |
| 2614_Neisseria_gonorrhoeae_strain_WHO_F_chromosome_1_g_2 | 52985 |
| 2614_Neisseria_gonorrhoeae_strain_WHO_F_chromosome_1_g_3 | 52986 |
| 2614_Neisseria_gonorrhoeae_strain_WHO_F_chromosome_1_g_4 | 52987 |
| 2614_Neisseria_gonorrhoeae_strain_WHO_F_chromosome_1_g_5 | 52988 |
| 2615_Neisseria_gonorrhoeae_strain_WHO_F_chromosome_1_g_1 | 52989 |
| 2615_Neisseria_gonorrhoeae_strain_WHO_F_chromosome_1_g_2 | 52990 |
| 2615_Neisseria_gonorrhoeae_strain_WHO_F_chromosome_1_g_3 | 52991 |
| 2615_Neisseria_gonorrhoeae_strain_WHO_F_chromosome_1_g_4 | 52992 |
| 2615_Neisseria_gonorrhoeae_strain_WHO_F_chromosome_1_g_5 | 52993 |
| 2616_Neisseria_gonorrhoeae_strain_WHO_F_chromosome_1_g_1 | 52994 |
| 2616_Neisseria_gonorrhoeae_strain_WHO_F_chromosome_1_g_2 | 52995 |
| 2616_Neisseria_gonorrhoeae_strain_WHO_F_chromosome_1_g_3 | 52996 |
| 2616_Neisseria_gonorrhoeae_strain_WHO_F_chromosome_1_g_4 | 52997 |
| 2616_Neisseria_gonorrhoeae_strain_WHO_F_chromosome_1_g_5 | 52998 |
| 2617_Neisseria_gonorrhoeae_strain_WHO_F_chromosome_1_g_1 | 52999 |
| 2617_Neisseria_gonorrhoeae_strain_WHO_F_chromosome_1_g_2 | 53000 |
| 2617_Neisseria_gonorrhoeae_strain_WHO_F_chromosome_1_g_3 | 53001 |
| 2617_Neisseria_gonorrhoeae_strain_WHO_F_chromosome_1_g_4 | 53002 |
| 2617_Neisseria_gonorrhoeae_strain_WHO_F_chromosome_1_g_5 | 53003 |
| 2618_Neisseria_gonorrhoeae_strain_WHO_F_chromosome_1_g_1 | 53004 |
| 2618_Neisseria_gonorrhoeae_strain_WHO_F_chromosome_1_g_2 | 53005 |
| 2618_Neisseria_gonorrhoeae_strain_WHO_F_chromosome_1_g_3 | 53006 |
| 2618_Neisseria_gonorrhoeae_strain_WHO_F_chromosome_1_g_4 | 53007 |
| 2618_Neisseria_gonorrhoeae_strain_WHO_F_chromosome_1_g_5 | 53008 |
| 2619_Neisseria_gonorrhoeae_strain_WHO_F_chromosome_1_g_1 | 53009 |
| 2619_Neisseria_gonorrhoeae_strain_WHO_F_chromosome_1_g_2 | 53010 |
| 2619_Neisseria_gonorrhoeae_strain_WHO_F_chromosome_1_g_3 | 53011 |
| 2619_Neisseria_gonorrhoeae_strain_WHO_F_chromosome_1_g_4 | 53012 |
| 2619_Neisseria_gonorrhoeae_strain_WHO_F_chromosome_1_g_5 | 53013 |
| 2620_Neisseria_gonorrhoeae_strain_WHO_F_chromosome_1_g_1 | 53014 |
| 2620_Neisseria_gonorrhoeae_strain_WHO_F_chromosome_1_g_2 | 53015 |
| 2620_Neisseria_gonorrhoeae_strain_WHO_F_chromosome_1_g_3 | 53016 |
| 2620_Neisseria_gonorrhoeae_strain_WHO_F_chromosome_1_g_4 | 53017 |
| 2620_Neisseria_gonorrhoeae_strain_WHO_F_chromosome_1_g_5 | 53018 |
| 2621_Neisseria_gonorrhoeae_strain_WHO_F_chromosome_1_g_1 | 53019 |
| 2621_Neisseria_gonorrhoeae_strain_WHO_F_chromosome_1_g_2 | 53020 |
| 2621_Neisseria_gonorrhoeae_strain_WHO_F_chromosome_1_g_3 | 53021 |
| 2621_Neisseria_gonorrhoeae_strain_WHO_F_chromosome_1_g_4 | 53022 |
| 2621_Neisseria_gonorrhoeae_strain_WHO_F_chromosome_1_g_5 | 53023 |
| 2622_Neisseria_gonorrhoeae_strain_WHO_F_chromosome_1_g_1 | 53024 |
| 2622_Neisseria_gonorrhoeae_strain_WHO_F_chromosome_1_g_2 | 53025 |
| 2622_Neisseria_gonorrhoeae_strain_WHO_F_chromosome_1_g_3 | 53026 |
| 2622_Neisseria_gonorrhoeae_strain_WHO_F_chromosome_1_g_4 | 53027 |
| 2622_Neisseria_gonorrhoeae_strain_WHO_F_chromosome_1_g_5 | 53028 |
| 2623_Neisseria_gonorrhoeae_strain_WHO_F_chromosome_1_g_1 | 53029 |
| 2623_Neisseria_gonorrhoeae_strain_WHO_F_chromosome_1_g_2 | 53030 |
| 2623_Neisseria_gonorrhoeae_strain_WHO_F_chromosome_1_g_3 | 53031 |
| 2623_Neisseria_gonorrhoeae_strain_WHO_F_chromosome_1_g_4 | 53032 |
| 2623_Neisseria_gonorrhoeae_strain_WHO_F_chromosome_1_g_5 | 53033 |
| 2624_Neisseria_gonorrhoeae_strain_WHO_F_chromosome_1_g_1 | 53034 |
| 2624_Neisseria_gonorrhoeae_strain_WHO_F_chromosome_1_g_2 | 53035 |
| 2624_Neisseria_gonorrhoeae_strain_WHO_F_chromosome_1_g_3 | 53036 |
| 2624_Neisseria_gonorrhoeae_strain_WHO_F_chromosome_1_g_4 | 53037 |
| 2624_Neisseria_gonorrhoeae_strain_WHO_F_chromosome_1_g_5 | 53038 |
| 2625_Neisseria_gonorrhoeae_strain_WHO_F_chromosome_1_g_1 | 53039 |
| 2625_Neisseria_gonorrhoeae_strain_WHO_F_chromosome_1_g_2 | 53040 |
| 2625_Neisseria_gonorrhoeae_strain_WHO_F_chromosome_1_g_3 | 53041 |
| 2625_Neisseria_gonorrhoeae_strain_WHO_F_chromosome_1_g_4 | 53042 |
| 2625_Neisseria_gonorrhoeae_strain_WHO_F_chromosome_1_g_5 | 53043 |
| 2626_Neisseria_gonorrhoeae_strain_WHO_F_chromosome_1_g_1 | 53044 |
| 2626_Neisseria_gonorrhoeae_strain_WHO_F_chromosome_1_g_2 | 53045 |
| 2626_Neisseria_gonorrhoeae_strain_WHO_F_chromosome_1_g_3 | 53046 |
| 2626_Neisseria_gonorrhoeae_strain_WHO_F_chromosome_1_g_4 | 53047 |
| 2626_Neisseria_gonorrhoeae_strain_WHO_F_chromosome_1_g_5 | 53048 |
| 2627_Neisseria_gonorrhoeae_strain_WHO_F_chromosome_1_g_1 | 53049 |
| 2627_Neisseria_gonorrhoeae_strain_WHO_F_chromosome_1_g_2 | 53050 |
| 2627_Neisseria_gonorrhoeae_strain_WHO_F_chromosome_1_g_3 | 53051 |
| 2627_Neisseria_gonorrhoeae_strain_WHO_F_chromosome_1_g_4 | 53052 |
| 2627_Neisseria_gonorrhoeae_strain_WHO_F_chromosome_1_g_5 | 53053 |
| 2628_Neisseria_gonorrhoeae_strain_WHO_F_chromosome_1_g_1 | 53054 |
| 2628_Neisseria_gonorrhoeae_strain_WHO_F_chromosome_1_g_2 | 53055 |
| 2628_Neisseria_gonorrhoeae_strain_WHO_F_chromosome_1_g_3 | 53056 |
| 2628_Neisseria_gonorrhoeae_strain_WHO_F_chromosome_1_g_4 | 53057 |
| 2628_Neisseria_gonorrhoeae_strain_WHO_F_chromosome_1_g_5 | 53058 |
| 2629_Neisseria_gonorrhoeae_strain_WHO_F_chromosome_1_g_1 | 53059 |
| 2629_Neisseria_gonorrhoeae_strain_WHO_F_chromosome_1_g_2 | 53060 |
| 2629_Neisseria_gonorrhoeae_strain_WHO_F_chromosome_1_g_3 | 53061 |
| 2629_Neisseria_gonorrhoeae_strain_WHO_F_chromosome_1_g_4 | 53062 |
| 2629_Neisseria_gonorrhoeae_strain_WHO_F_chromosome_1_g_5 | 53063 |
| 2630_Neisseria_gonorrhoeae_strain_WHO_F_chromosome_1_g_1 | 53064 |
| 2630_Neisseria_gonorrhoeae_strain_WHO_F_chromosome_1_g_2 | 53065 |
| 2630_Neisseria_gonorrhoeae_strain_WHO_F_chromosome_1_g_3 | 53066 |
| 2630_Neisseria_gonorrhoeae_strain_WHO_F_chromosome_1_g_4 | 53067 |
| 2630_Neisseria_gonorrhoeae_strain_WHO_F_chromosome_1_g_5 | 53068 |
| 2631_Neisseria_gonorrhoeae_strain_WHO_F_chromosome_1_g_1 | 53069 |
| 2631_Neisseria_gonorrhoeae_strain_WHO_F_chromosome_1_g_2 | 53070 |
| 2631_Neisseria_gonorrhoeae_strain_WHO_F_chromosome_1_g_3 | 53071 |
| 2631_Neisseria_gonorrhoeae_strain_WHO_F_chromosome_1_g_4 | 53072 |
| 2631_Neisseria_gonorrhoeae_strain_WHO_F_chromosome_1_g_5 | 53073 |
| 2632_Neisseria_gonorrhoeae_strain_WHO_F_chromosome_1_g_1 | 53074 |
| 2632_Neisseria_gonorrhoeae_strain_WHO_F_chromosome_1_g_2 | 53075 |
| 2632_Neisseria_gonorrhoeae_strain_WHO_F_chromosome_1_g_3 | 53076 |
| 2632_Neisseria_gonorrhoeae_strain_WHO_F_chromosome_1_g_4 | 53077 |
| 2632_Neisseria_gonorrhoeae_strain_WHO_F_chromosome_1_g_5 | 53078 |
| 2633_Neisseria_gonorrhoeae_strain_WHO_F_chromosome_1_g_1 | 53079 |
| 2633_Neisseria_gonorrhoeae_strain_WHO_F_chromosome_1_g_2 | 53080 |
| 2633_Neisseria_gonorrhoeae_strain_WHO_F_chromosome_1_g_3 | 53081 |
| 2633_Neisseria_gonorrhoeae_strain_WHO_F_chromosome_1_g_4 | 53082 |
| 2633_Neisseria_gonorrhoeae_strain_WHO_F_chromosome_1_g_5 | 53083 |
| 2634_Neisseria_gonorrhoeae_strain_WHO_F_chromosome_1_g_1 | 53084 |
| 2634_Neisseria_gonorrhoeae_strain_WHO_F_chromosome_1_g_2 | 53085 |
| 2634_Neisseria_gonorrhoeae_strain_WHO_F_chromosome_1_g_3 | 53086 |
| 2634_Neisseria_gonorrhoeae_strain_WHO_F_chromosome_1_g_4 | 53087 |
| 2634_Neisseria_gonorrhoeae_strain_WHO_F_chromosome_1_g_5 | 53088 |
| 2635_Neisseria_gonorrhoeae_strain_WHO_F_chromosome_1_g_1 | 53089 |
| 2635_Neisseria_gonorrhoeae_strain_WHO_F_chromosome_1_g_2 | 53090 |
| 2635_Neisseria_gonorrhoeae_strain_WHO_F_chromosome_1_g_3 | 53091 |
| 2635_Neisseria_gonorrhoeae_strain_WHO_F_chromosome_1_g_4 | 53092 |
| 2635_Neisseria_gonorrhoeae_strain_WHO_F_chromosome_1_g_5 | 53093 |
| 2636_Neisseria_gonorrhoeae_strain_WHO_F_chromosome_1_g_1 | 53094 |
| 2636_Neisseria_gonorrhoeae_strain_WHO_F_chromosome_1_g_2 | 53095 |
| 2636_Neisseria_gonorrhoeae_strain_WHO_F_chromosome_1_g_3 | 53096 |
| 2636_Neisseria_gonorrhoeae_strain_WHO_F_chromosome_1_g_4 | 53097 |
| 2636_Neisseria_gonorrhoeae_strain_WHO_F_chromosome_1_g_5 | 53098 |
| 2637_Neisseria_gonorrhoeae_strain_WHO_F_chromosome_1_g_1 | 53099 |
| 2637_Neisseria_gonorrhoeae_strain_WHO_F_chromosome_1_g_2 | 53100 |
| 2637_Neisseria_gonorrhoeae_strain_WHO_F_chromosome_1_g_3 | 53101 |
| 2637_Neisseria_gonorrhoeae_strain_WHO_F_chromosome_1_g_4 | 53102 |
| 2637_Neisseria_gonorrhoeae_strain_WHO_F_chromosome_1_g_5 | 53103 |
| 2638_Neisseria_gonorrhoeae_strain_WHO_F_chromosome_1_g_1 | 53104 |
| 2638_Neisseria_gonorrhoeae_strain_WHO_F_chromosome_1_g_2 | 53105 |
| 2638_Neisseria_gonorrhoeae_strain_WHO_F_chromosome_1_g_3 | 53106 |
| 2638_Neisseria_gonorrhoeae_strain_WHO_F_chromosome_1_g_4 | 53107 |
| 2638_Neisseria_gonorrhoeae_strain_WHO_F_chromosome_1_g_5 | 53108 |
| 2639_Neisseria_gonorrhoeae_strain_WHO_F_chromosome_1_g_1 | 53109 |
| 2639_Neisseria_gonorrhoeae_strain_WHO_F_chromosome_1_g_2 | 53110 |
| 2639_Neisseria_gonorrhoeae_strain_WHO_F_chromosome_1_g_3 | 53111 |
| 2639_Neisseria_gonorrhoeae_strain_WHO_F_chromosome_1_g_4 | 53112 |
| 2639_Neisseria_gonorrhoeae_strain_WHO_F_chromosome_1_g_5 | 53113 |
| 2640_Neisseria_gonorrhoeae_strain_WHO_F_chromosome_1_g_1 | 53114 |
| 2640_Neisseria_gonorrhoeae_strain_WHO_F_chromosome_1_g_2 | 53115 |
| 2640_Neisseria_gonorrhoeae_strain_WHO_F_chromosome_1_g_3 | 53116 |
| 2640_Neisseria_gonorrhoeae_strain_WHO_F_chromosome_1_g_4 | 53117 |
| 2640_Neisseria_gonorrhoeae_strain_WHO_F_chromosome_1_g_5 | 53118 |
| 2641_Neisseria_gonorrhoeae_strain_WHO_F_chromosome_1_g_1 | 53119 |
| 2641_Neisseria_gonorrhoeae_strain_WHO_F_chromosome_1_g_2 | 53120 |
| 2641_Neisseria_gonorrhoeae_strain_WHO_F_chromosome_1_g_3 | 53121 |
| 2641_Neisseria_gonorrhoeae_strain_WHO_F_chromosome_1_g_4 | 53122 |
| 2641_Neisseria_gonorrhoeae_strain_WHO_F_chromosome_1_g_5 | 53123 |
| 2642_Neisseria_gonorrhoeae_strain_WHO_F_chromosome_1_g_1 | 53124 |
| 2642_Neisseria_gonorrhoeae_strain_WHO_F_chromosome_1_g_2 | 53125 |
| 2642_Neisseria_gonorrhoeae_strain_WHO_F_chromosome_1_g_3 | 53126 |
| 2642_Neisseria_gonorrhoeae_strain_WHO_F_chromosome_1_g_4 | 53127 |
| 2642_Neisseria_gonorrhoeae_strain_WHO_F_chromosome_1_g_5 | 53128 |
| 2643_Neisseria_gonorrhoeae_strain_WHO_F_chromosome_1_g_1 | 53129 |
| 2643_Neisseria_gonorrhoeae_strain_WHO_F_chromosome_1_g_2 | 53130 |
| 2643_Neisseria_gonorrhoeae_strain_WHO_F_chromosome_1_g_3 | 53131 |
| 2643_Neisseria_gonorrhoeae_strain_WHO_F_chromosome_1_g_4 | 53132 |
| 2643_Neisseria_gonorrhoeae_strain_WHO_F_chromosome_1_g_5 | 53133 |
| 2644_Neisseria_gonorrhoeae_strain_WHO_F_chromosome_1_g_1 | 53134 |
| 2644_Neisseria_gonorrhoeae_strain_WHO_F_chromosome_1_g_2 | 53135 |
| 2644_Neisseria_gonorrhoeae_strain_WHO_F_chromosome_1_g_3 | 53136 |
| 2644_Neisseria_gonorrhoeae_strain_WHO_F_chromosome_1_g_4 | 53137 |
| 2644_Neisseria_gonorrhoeae_strain_WHO_F_chromosome_1_g_5 | 53138 |
| 2645_Neisseria_gonorrhoeae_strain_WHO_F_chromosome_1_g_1 | 53139 |
| 2645_Neisseria_gonorrhoeae_strain_WHO_F_chromosome_1_g_2 | 53140 |
| 2645_Neisseria_gonorrhoeae_strain_WHO_F_chromosome_1_g_3 | 53141 |
| 2646_Neisseria_gonorrhoeae_strain_WHO_F_chromosome_1_g_1 | 53142 |
| 2646_Neisseria_gonorrhoeae_strain_WHO_F_chromosome_1_g_2 | 53143 |
| 2646_Neisseria_gonorrhoeae_strain_WHO_F_chromosome_1_g_3 | 53144 |
| 2646_Neisseria_gonorrhoeae_strain_WHO_F_chromosome_1_g_4 | 53145 |
| 2646_Neisseria_gonorrhoeae_strain_WHO_F_chromosome_1_g_5 | 53146 |
| 2647_Neisseria_gonorrhoeae_strain_WHO_F_chromosome_1_g_1 | 53147 |
| 2647_Neisseria_gonorrhoeae_strain_WHO_F_chromosome_1_g_2 | 53148 |
| 2647_Neisseria_gonorrhoeae_strain_WHO_F_chromosome_1_g_3 | 53149 |
| 2647_Neisseria_gonorrhoeae_strain_WHO_F_chromosome_1_g_4 | 53150 |
| 2647_Neisseria_gonorrhoeae_strain_WHO_F_chromosome_1_g_5 | 53151 |
| 2648_Neisseria_gonorrhoeae_strain_WHO_F_chromosome_1_g_1 | 53152 |
| 2648_Neisseria_gonorrhoeae_strain_WHO_F_chromosome_1_g_2 | 53153 |
| 2648_Neisseria_gonorrhoeae_strain_WHO_F_chromosome_1_g_3 | 53154 |
| 2648_Neisseria_gonorrhoeae_strain_WHO_F_chromosome_1_g_4 | 53155 |
| 2648_Neisseria_gonorrhoeae_strain_WHO_F_chromosome_1_g_5 | 53156 |
| 2649_Neisseria_gonorrhoeae_strain_WHO_F_chromosome_1_g_1 | 53157 |
| 2649_Neisseria_gonorrhoeae_strain_WHO_F_chromosome_1_g_2 | 53158 |
| 2649_Neisseria_gonorrhoeae_strain_WHO_F_chromosome_1_g_3 | 53159 |
| 2649_Neisseria_gonorrhoeae_strain_WHO_F_chromosome_1_g_4 | 53160 |
| 2649_Neisseria_gonorrhoeae_strain_WHO_F_chromosome_1_g_5 | 53161 |
| 2650_Neisseria_gonorrhoeae_strain_WHO_F_chromosome_1_g_1 | 53162 |
| 2650_Neisseria_gonorrhoeae_strain_WHO_F_chromosome_1_g_2 | 53163 |
| 2650_Neisseria_gonorrhoeae_strain_WHO_F_chromosome_1_g_3 | 53164 |
| 2650_Neisseria_gonorrhoeae_strain_WHO_F_chromosome_1_g_4 | 53165 |
| 2650_Neisseria_gonorrhoeae_strain_WHO_F_chromosome_1_g_5 | 53166 |
| 2651_Neisseria_gonorrhoeae_strain_WHO_F_chromosome_1_g_1 | 53167 |
| 2651_Neisseria_gonorrhoeae_strain_WHO_F_chromosome_1_g_2 | 53168 |
| 2651_Neisseria_gonorrhoeae_strain_WHO_F_chromosome_1_g_3 | 53169 |
| 2651_Neisseria_gonorrhoeae_strain_WHO_F_chromosome_1_g_4 | 53170 |
| 2651_Neisseria_gonorrhoeae_strain_WHO_F_chromosome_1_g_5 | 53171 |
| 2652_Neisseria_gonorrhoeae_strain_WHO_F_chromosome_1_g_1 | 53172 |
| 2652_Neisseria_gonorrhoeae_strain_WHO_F_chromosome_1_g_2 | 53173 |
| 2652_Neisseria_gonorrhoeae_strain_WHO_F_chromosome_1_g_3 | 53174 |
| 2652_Neisseria_gonorrhoeae_strain_WHO_F_chromosome_1_g_4 | 53175 |
| 2652_Neisseria_gonorrhoeae_strain_WHO_F_chromosome_1_g_5 | 53176 |
| 2653_Neisseria_gonorrhoeae_strain_WHO_F_chromosome_1_g_1 | 53177 |
| 2653_Neisseria_gonorrhoeae_strain_WHO_F_chromosome_1_g_2 | 53178 |
| 2653_Neisseria_gonorrhoeae_strain_WHO_F_chromosome_1_g_3 | 53179 |
| 2653_Neisseria_gonorrhoeae_strain_WHO_F_chromosome_1_g_4 | 53180 |
| 2653_Neisseria_gonorrhoeae_strain_WHO_F_chromosome_1_g_5 | 53181 |
| 2654_Neisseria_gonorrhoeae_strain_WHO_F_chromosome_1_g_1 | 53182 |
| 2654_Neisseria_gonorrhoeae_strain_WHO_F_chromosome_1_g_2 | 53183 |
| 2654_Neisseria_gonorrhoeae_strain_WHO_F_chromosome_1_g_3 | 53184 |
| 2654_Neisseria_gonorrhoeae_strain_WHO_F_chromosome_1_g_4 | 53185 |
| 2654_Neisseria_gonorrhoeae_strain_WHO_F_chromosome_1_g_5 | 53186 |
| 2655_Neisseria_gonorrhoeae_strain_WHO_F_chromosome_1_g_1 | 53187 |
| 2655_Neisseria_gonorrhoeae_strain_WHO_F_chromosome_1_g_2 | 53188 |
| 2655_Neisseria_gonorrhoeae_strain_WHO_F_chromosome_1_g_3 | 53189 |
| 2655_Neisseria_gonorrhoeae_strain_WHO_F_chromosome_1_g_4 | 53190 |
| 2655_Neisseria_gonorrhoeae_strain_WHO_F_chromosome_1_g_5 | 53191 |
| 2656_Neisseria_gonorrhoeae_strain_WHO_F_chromosome_1_g_1 | 53192 |
| 2656_Neisseria_gonorrhoeae_strain_WHO_F_chromosome_1_g_2 | 53193 |
| 2656_Neisseria_gonorrhoeae_strain_WHO_F_chromosome_1_g_3 | 53194 |
| 2656_Neisseria_gonorrhoeae_strain_WHO_F_chromosome_1_g_4 | 53195 |
| 2656_Neisseria_gonorrhoeae_strain_WHO_F_chromosome_1_g_5 | 53196 |
| 2657_Neisseria_gonorrhoeae_strain_WHO_F_chromosome_1_g_1 | 53197 |
| 2657_Neisseria_gonorrhoeae_strain_WHO_F_chromosome_1_g_2 | 53198 |
| 2657_Neisseria_gonorrhoeae_strain_WHO_F_chromosome_1_g_3 | 53199 |
| 2657_Neisseria_gonorrhoeae_strain_WHO_F_chromosome_1_g_4 | 53200 |
| 2657_Neisseria_gonorrhoeae_strain_WHO_F_chromosome_1_g_5 | 53201 |
| 2658_Neisseria_gonorrhoeae_strain_WHO_F_chromosome_1_g_1 | 53202 |
| 2658_Neisseria_gonorrhoeae_strain_WHO_F_chromosome_1_g_2 | 53203 |
| 2658_Neisseria_gonorrhoeae_strain_WHO_F_chromosome_1_g_3 | 53204 |
| 2658_Neisseria_gonorrhoeae_strain_WHO_F_chromosome_1_g_4 | 53205 |
| 2658_Neisseria_gonorrhoeae_strain_WHO_F_chromosome_1_g_5 | 53206 |
| 2659_Neisseria_gonorrhoeae_strain_WHO_F_chromosome_1_g_1 | 53207 |
| 2659_Neisseria_gonorrhoeae_strain_WHO_F_chromosome_1_g_2 | 53208 |
| 2659_Neisseria_gonorrhoeae_strain_WHO_F_chromosome_1_g_3 | 53209 |
| 2659_Neisseria_gonorrhoeae_strain_WHO_F_chromosome_1_g_4 | 53210 |
| 2659_Neisseria_gonorrhoeae_strain_WHO_F_chromosome_1_g_5 | 53211 |
| 2660_Neisseria_gonorrhoeae_strain_WHO_F_chromosome_1_g_1 | 53212 |
| 2660_Neisseria_gonorrhoeae_strain_WHO_F_chromosome_1_g_2 | 53213 |
| 2660_Neisseria_gonorrhoeae_strain_WHO_F_chromosome_1_g_3 | 53214 |
| 2660_Neisseria_gonorrhoeae_strain_WHO_F_chromosome_1_g_4 | 53215 |
| 2660_Neisseria_gonorrhoeae_strain_WHO_F_chromosome_1_g_5 | 53216 |
| 2661_Neisseria_gonorrhoeae_strain_WHO_F_chromosome_1_g_1 | 53217 |
| 2661_Neisseria_gonorrhoeae_strain_WHO_F_chromosome_1_g_2 | 53218 |
| 2661_Neisseria_gonorrhoeae_strain_WHO_F_chromosome_1_g_3 | 53219 |
| 2661_Neisseria_gonorrhoeae_strain_WHO_F_chromosome_1_g_4 | 53220 |
| 2662_Neisseria_gonorrhoeae_strain_WHO_F_chromosome_1_g_1 | 53221 |
| 2662_Neisseria_gonorrhoeae_strain_WHO_F_chromosome_1_g_2 | 53222 |
| 2662_Neisseria_gonorrhoeae_strain_WHO_F_chromosome_1_g_3 | 53223 |
| 2663_Neisseria_gonorrhoeae_strain_WHO_F_chromosome_1_g_1 | 53224 |
| 2663_Neisseria_gonorrhoeae_strain_WHO_F_chromosome_1_g_2 | 53225 |
| 2663_Neisseria_gonorrhoeae_strain_WHO_F_chromosome_1_g_3 | 53226 |
| 2663_Neisseria_gonorrhoeae_strain_WHO_F_chromosome_1_g_4 | 53227 |
| 2663_Neisseria_gonorrhoeae_strain_WHO_F_chromosome_1_g_5 | 53228 |
| 2664_Neisseria_gonorrhoeae_strain_WHO_F_chromosome_1_g_1 | 53229 |
| 2664_Neisseria_gonorrhoeae_strain_WHO_F_chromosome_1_g_2 | 53230 |
| 2664_Neisseria_gonorrhoeae_strain_WHO_F_chromosome_1_g_3 | 53231 |
| 2664_Neisseria_gonorrhoeae_strain_WHO_F_chromosome_1_g_4 | 53232 |
| 2664_Neisseria_gonorrhoeae_strain_WHO_F_chromosome_1_g_5 | 53233 |
| 2665_Neisseria_gonorrhoeae_strain_WHO_F_chromosome_1_g_1 | 53234 |
| 2665_Neisseria_gonorrhoeae_strain_WHO_F_chromosome_1_g_2 | 53235 |
| 2665_Neisseria_gonorrhoeae_strain_WHO_F_chromosome_1_g_3 | 53236 |
| 2665_Neisseria_gonorrhoeae_strain_WHO_F_chromosome_1_g_4 | 53237 |
| 2665_Neisseria_gonorrhoeae_strain_WHO_F_chromosome_1_g_5 | 53238 |
| 2666_Neisseria_gonorrhoeae_strain_WHO_F_chromosome_1_g_1 | 53239 |
| 2666_Neisseria_gonorrhoeae_strain_WHO_F_chromosome_1_g_2 | 53240 |
| 2666_Neisseria_gonorrhoeae_strain_WHO_F_chromosome_1_g_3 | 53241 |
| 2666_Neisseria_gonorrhoeae_strain_WHO_F_chromosome_1_g_4 | 53242 |
| 2666_Neisseria_gonorrhoeae_strain_WHO_F_chromosome_1_g_5 | 53243 |
| 2667_Neisseria_gonorrhoeae_strain_WHO_F_chromosome_1_g_1 | 53244 |
| 2667_Neisseria_gonorrhoeae_strain_WHO_F_chromosome_1_g_2 | 53245 |
| 2667_Neisseria_gonorrhoeae_strain_WHO_F_chromosome_1_g_3 | 53246 |
| 2667_Neisseria_gonorrhoeae_strain_WHO_F_chromosome_1_g_4 | 53247 |
| 2667_Neisseria_gonorrhoeae_strain_WHO_F_chromosome_1_g_5 | 53248 |
| 2668_Neisseria_gonorrhoeae_strain_WHO_F_chromosome_1_g_1 | 53249 |
| 2668_Neisseria_gonorrhoeae_strain_WHO_F_chromosome_1_g_2 | 53250 |
| 2668_Neisseria_gonorrhoeae_strain_WHO_F_chromosome_1_g_3 | 53251 |
| 2668_Neisseria_gonorrhoeae_strain_WHO_F_chromosome_1_g_4 | 53252 |
| 2668_Neisseria_gonorrhoeae_strain_WHO_F_chromosome_1_g_5 | 53253 |
| 2669_Neisseria_gonorrhoeae_strain_WHO_F_chromosome_1_g_1 | 53254 |
| 2669_Neisseria_gonorrhoeae_strain_WHO_F_chromosome_1_g_2 | 53255 |
| 2669_Neisseria_gonorrhoeae_strain_WHO_F_chromosome_1_g_3 | 53256 |
| 2669_Neisseria_gonorrhoeae_strain_WHO_F_chromosome_1_g_4 | 53257 |
| 2669_Neisseria_gonorrhoeae_strain_WHO_F_chromosome_1_g_5 | 53258 |
| 2670_Neisseria_gonorrhoeae_strain_WHO_F_chromosome_1_g_1 | 53259 |
| 2670_Neisseria_gonorrhoeae_strain_WHO_F_chromosome_1_g_2 | 53260 |
| 2670_Neisseria_gonorrhoeae_strain_WHO_F_chromosome_1_g_3 | 53261 |
| 2670_Neisseria_gonorrhoeae_strain_WHO_F_chromosome_1_g_4 | 53262 |
| 2670_Neisseria_gonorrhoeae_strain_WHO_F_chromosome_1_g_5 | 53263 |
| 2671_Neisseria_gonorrhoeae_strain_WHO_F_chromosome_1_g_1 | 53264 |
| 2671_Neisseria_gonorrhoeae_strain_WHO_F_chromosome_1_g_2 | 53265 |
| 2671_Neisseria_gonorrhoeae_strain_WHO_F_chromosome_1_g_3 | 53266 |
| 2671_Neisseria_gonorrhoeae_strain_WHO_F_chromosome_1_g_4 | 53267 |
| 2671_Neisseria_gonorrhoeae_strain_WHO_F_chromosome_1_g_5 | 53268 |
| 2672_Neisseria_gonorrhoeae_strain_WHO_F_chromosome_1_g_1 | 53269 |
| 2672_Neisseria_gonorrhoeae_strain_WHO_F_chromosome_1_g_2 | 53270 |
| 2672_Neisseria_gonorrhoeae_strain_WHO_F_chromosome_1_g_3 | 53271 |
| 2672_Neisseria_gonorrhoeae_strain_WHO_F_chromosome_1_g_4 | 53272 |
| 2672_Neisseria_gonorrhoeae_strain_WHO_F_chromosome_1_g_5 | 53273 |
| 2673_Neisseria_gonorrhoeae_strain_WHO_F_chromosome_1_g_1 | 53274 |
| 2673_Neisseria_gonorrhoeae_strain_WHO_F_chromosome_1_g_2 | 53275 |
| 2673_Neisseria_gonorrhoeae_strain_WHO_F_chromosome_1_g_3 | 53276 |
| 2673_Neisseria_gonorrhoeae_strain_WHO_F_chromosome_1_g_4 | 53277 |
| 2673_Neisseria_gonorrhoeae_strain_WHO_F_chromosome_1_g_5 | 53278 |
| 2674_Neisseria_gonorrhoeae_strain_WHO_F_chromosome_1_g_1 | 53279 |
| 2674_Neisseria_gonorrhoeae_strain_WHO_F_chromosome_1_g_2 | 53280 |
| 2674_Neisseria_gonorrhoeae_strain_WHO_F_chromosome_1_g_3 | 53281 |
| 2674_Neisseria_gonorrhoeae_strain_WHO_F_chromosome_1_g_4 | 53282 |
| 2674_Neisseria_gonorrhoeae_strain_WHO_F_chromosome_1_g_5 | 53283 |
| 2675_Neisseria_gonorrhoeae_strain_WHO_F_chromosome_1_g_1 | 53284 |
| 2675_Neisseria_gonorrhoeae_strain_WHO_F_chromosome_1_g_2 | 53285 |
| 2675_Neisseria_gonorrhoeae_strain_WHO_F_chromosome_1_g_3 | 53286 |
| 2675_Neisseria_gonorrhoeae_strain_WHO_F_chromosome_1_g_4 | 53287 |
| 2675_Neisseria_gonorrhoeae_strain_WHO_F_chromosome_1_g_5 | 53288 |
| 2676_Neisseria_gonorrhoeae_strain_WHO_F_chromosome_1_g_1 | 53289 |
| 2676_Neisseria_gonorrhoeae_strain_WHO_F_chromosome_1_g_2 | 53290 |
| 2676_Neisseria_gonorrhoeae_strain_WHO_F_chromosome_1_g_3 | 53291 |
| 2676_Neisseria_gonorrhoeae_strain_WHO_F_chromosome_1_g_4 | 53292 |
| 2676_Neisseria_gonorrhoeae_strain_WHO_F_chromosome_1_g_5 | 53293 |
| 2677_Neisseria_gonorrhoeae_strain_WHO_F_chromosome_1_g_1 | 53294 |
| 2677_Neisseria_gonorrhoeae_strain_WHO_F_chromosome_1_g_2 | 53295 |
| 2677_Neisseria_gonorrhoeae_strain_WHO_F_chromosome_1_g_3 | 53296 |
| 2677_Neisseria_gonorrhoeae_strain_WHO_F_chromosome_1_g_4 | 53297 |
| 2677_Neisseria_gonorrhoeae_strain_WHO_F_chromosome_1_g_5 | 53298 |
| 2678_Neisseria_gonorrhoeae_strain_WHO_F_chromosome_1_g_1 | 53299 |
| 2678_Neisseria_gonorrhoeae_strain_WHO_F_chromosome_1_g_2 | 53300 |
| 2678_Neisseria_gonorrhoeae_strain_WHO_F_chromosome_1_g_3 | 53301 |
| 2678_Neisseria_gonorrhoeae_strain_WHO_F_chromosome_1_g_4 | 53302 |
| 2678_Neisseria_gonorrhoeae_strain_WHO_F_chromosome_1_g_5 | 53303 |
| 2679_Neisseria_gonorrhoeae_strain_WHO_F_chromosome_1_g_1 | 53304 |
| 2679_Neisseria_gonorrhoeae_strain_WHO_F_chromosome_1_g_2 | 53305 |
| 2679_Neisseria_gonorrhoeae_strain_WHO_F_chromosome_1_g_3 | 53306 |
| 2679_Neisseria_gonorrhoeae_strain_WHO_F_chromosome_1_g_4 | 53307 |
| 2679_Neisseria_gonorrhoeae_strain_WHO_F_chromosome_1_g_5 | 53308 |
| 2680_Neisseria_gonorrhoeae_strain_WHO_F_chromosome_1_g_1 | 53309 |
| 2680_Neisseria_gonorrhoeae_strain_WHO_F_chromosome_1_g_2 | 53310 |
| 2680_Neisseria_gonorrhoeae_strain_WHO_F_chromosome_1_g_3 | 53311 |
| 2680_Neisseria_gonorrhoeae_strain_WHO_F_chromosome_1_g_4 | 53312 |
| 2680_Neisseria_gonorrhoeae_strain_WHO_F_chromosome_1_g_5 | 53313 |
| 2681_Neisseria_gonorrhoeae_strain_WHO_F_chromosome_1_g_1 | 53314 |
| 2681_Neisseria_gonorrhoeae_strain_WHO_F_chromosome_1_g_2 | 53315 |
| 2681_Neisseria_gonorrhoeae_strain_WHO_F_chromosome_1_g_3 | 53316 |
| 2681_Neisseria_gonorrhoeae_strain_WHO_F_chromosome_1_g_4 | 53317 |
| 2681_Neisseria_gonorrhoeae_strain_WHO_F_chromosome_1_g_5 | 53318 |
| 2682_Neisseria_gonorrhoeae_strain_WHO_F_chromosome_1_g_1 | 53319 |
| 2682_Neisseria_gonorrhoeae_strain_WHO_F_chromosome_1_g_2 | 53320 |
| 2682_Neisseria_gonorrhoeae_strain_WHO_F_chromosome_1_g_3 | 53321 |
| 2682_Neisseria_gonorrhoeae_strain_WHO_F_chromosome_1_g_4 | 53322 |
| 2683_Neisseria_gonorrhoeae_strain_WHO_F_chromosome_1_g_1 | 53323 |
| 2683_Neisseria_gonorrhoeae_strain_WHO_F_chromosome_1_g_2 | 53324 |
| 2683_Neisseria_gonorrhoeae_strain_WHO_F_chromosome_1_g_3 | 53325 |
| 2683_Neisseria_gonorrhoeae_strain_WHO_F_chromosome_1_g_4 | 53326 |
| 2683_Neisseria_gonorrhoeae_strain_WHO_F_chromosome_1_g_5 | 53327 |
| 2684_Neisseria_gonorrhoeae_strain_WHO_F_chromosome_1_g_1 | 53328 |
| 2684_Neisseria_gonorrhoeae_strain_WHO_F_chromosome_1_g_2 | 53329 |
| 2684_Neisseria_gonorrhoeae_strain_WHO_F_chromosome_1_g_3 | 53330 |
| 2684_Neisseria_gonorrhoeae_strain_WHO_F_chromosome_1_g_4 | 53331 |
| 2684_Neisseria_gonorrhoeae_strain_WHO_F_chromosome_1_g_5 | 53332 |
| 2685_Neisseria_gonorrhoeae_strain_WHO_F_chromosome_1_g_1 | 53333 |
| 2685_Neisseria_gonorrhoeae_strain_WHO_F_chromosome_1_g_2 | 53334 |
| 2685_Neisseria_gonorrhoeae_strain_WHO_F_chromosome_1_g_3 | 53335 |
| 2685_Neisseria_gonorrhoeae_strain_WHO_F_chromosome_1_g_4 | 53336 |
| 2685_Neisseria_gonorrhoeae_strain_WHO_F_chromosome_1_g_5 | 53337 |
| 2686_Neisseria_gonorrhoeae_strain_WHO_F_chromosome_1_g_1 | 53338 |
| 2686_Neisseria_gonorrhoeae_strain_WHO_F_chromosome_1_g_2 | 53339 |
| 2686_Neisseria_gonorrhoeae_strain_WHO_F_chromosome_1_g_3 | 53340 |
| 2686_Neisseria_gonorrhoeae_strain_WHO_F_chromosome_1_g_4 | 53341 |
| 2686_Neisseria_gonorrhoeae_strain_WHO_F_chromosome_1_g_5 | 53342 |
| 2687_Neisseria_gonorrhoeae_strain_WHO_F_chromosome_1_g_1 | 53343 |
| 2687_Neisseria_gonorrhoeae_strain_WHO_F_chromosome_1_g_2 | 53344 |
| 2687_Neisseria_gonorrhoeae_strain_WHO_F_chromosome_1_g_3 | 53345 |
| 2687_Neisseria_gonorrhoeae_strain_WHO_F_chromosome_1_g_4 | 53346 |
| 2687_Neisseria_gonorrhoeae_strain_WHO_F_chromosome_1_g_5 | 53347 |
| 2688_Neisseria_gonorrhoeae_strain_WHO_F_chromosome_1_g_1 | 53348 |
| 2688_Neisseria_gonorrhoeae_strain_WHO_F_chromosome_1_g_2 | 53349 |
| 2688_Neisseria_gonorrhoeae_strain_WHO_F_chromosome_1_g_3 | 53350 |
| 2688_Neisseria_gonorrhoeae_strain_WHO_F_chromosome_1_g_4 | 53351 |
| 2688_Neisseria_gonorrhoeae_strain_WHO_F_chromosome_1_g_5 | 53352 |
| 2689_Neisseria_gonorrhoeae_strain_WHO_F_chromosome_1_g_1 | 53353 |
| 2689_Neisseria_gonorrhoeae_strain_WHO_F_chromosome_1_g_2 | 53354 |
| 2689_Neisseria_gonorrhoeae_strain_WHO_F_chromosome_1_g_3 | 53355 |
| 2689_Neisseria_gonorrhoeae_strain_WHO_F_chromosome_1_g_4 | 53356 |
| 2689_Neisseria_gonorrhoeae_strain_WHO_F_chromosome_1_g_5 | 53357 |
| 2690_Neisseria_gonorrhoeae_strain_WHO_F_chromosome_1_g_1 | 53358 |
| 2690_Neisseria_gonorrhoeae_strain_WHO_F_chromosome_1_g_2 | 53359 |
| 2690_Neisseria_gonorrhoeae_strain_WHO_F_chromosome_1_g_3 | 53360 |
| 2690_Neisseria_gonorrhoeae_strain_WHO_F_chromosome_1_g_4 | 53361 |
| 2690_Neisseria_gonorrhoeae_strain_WHO_F_chromosome_1_g_5 | 53362 |
| 2691_Neisseria_gonorrhoeae_strain_WHO_F_chromosome_1_g_1 | 53363 |
| 2691_Neisseria_gonorrhoeae_strain_WHO_F_chromosome_1_g_2 | 53364 |
| 2691_Neisseria_gonorrhoeae_strain_WHO_F_chromosome_1_g_3 | 53365 |
| 2691_Neisseria_gonorrhoeae_strain_WHO_F_chromosome_1_g_4 | 53366 |
| 2691_Neisseria_gonorrhoeae_strain_WHO_F_chromosome_1_g_5 | 53367 |
| 2692_Neisseria_gonorrhoeae_strain_WHO_F_chromosome_1_g_1 | 53368 |
| 2692_Neisseria_gonorrhoeae_strain_WHO_F_chromosome_1_g_2 | 53369 |
| 2692_Neisseria_gonorrhoeae_strain_WHO_F_chromosome_1_g_3 | 53370 |
| 2692_Neisseria_gonorrhoeae_strain_WHO_F_chromosome_1_g_4 | 53371 |
| 2692_Neisseria_gonorrhoeae_strain_WHO_F_chromosome_1_g_5 | 53372 |
| 2693_Neisseria_gonorrhoeae_strain_WHO_F_chromosome_1_g_1 | 53373 |
| 2693_Neisseria_gonorrhoeae_strain_WHO_F_chromosome_1_g_2 | 53374 |
| 2693_Neisseria_gonorrhoeae_strain_WHO_F_chromosome_1_g_3 | 53375 |
| 2693_Neisseria_gonorrhoeae_strain_WHO_F_chromosome_1_g_4 | 53376 |
| 2693_Neisseria_gonorrhoeae_strain_WHO_F_chromosome_1_g_5 | 53377 |
| 2694_Neisseria_gonorrhoeae_strain_WHO_F_chromosome_1_g_1 | 53378 |
| 2694_Neisseria_gonorrhoeae_strain_WHO_F_chromosome_1_g_2 | 53379 |
| 2694_Neisseria_gonorrhoeae_strain_WHO_F_chromosome_1_g_3 | 53380 |
| 2694_Neisseria_gonorrhoeae_strain_WHO_F_chromosome_1_g_4 | 53381 |
| 2694_Neisseria_gonorrhoeae_strain_WHO_F_chromosome_1_g_5 | 53382 |
| 2695_Neisseria_gonorrhoeae_strain_WHO_F_chromosome_1_g_1 | 53383 |
| 2695_Neisseria_gonorrhoeae_strain_WHO_F_chromosome_1_g_2 | 53384 |
| 2695_Neisseria_gonorrhoeae_strain_WHO_F_chromosome_1_g_3 | 53385 |
| 2695_Neisseria_gonorrhoeae_strain_WHO_F_chromosome_1_g_4 | 53386 |
| 2695_Neisseria_gonorrhoeae_strain_WHO_F_chromosome_1_g_5 | 53387 |
| 2696_Neisseria_gonorrhoeae_strain_WHO_F_chromosome_1_g_1 | 53388 |
| 2696_Neisseria_gonorrhoeae_strain_WHO_F_chromosome_1_g_2 | 53389 |
| 2696_Neisseria_gonorrhoeae_strain_WHO_F_chromosome_1_g_3 | 53390 |
| 2696_Neisseria_gonorrhoeae_strain_WHO_F_chromosome_1_g_4 | 53391 |
| 2696_Neisseria_gonorrhoeae_strain_WHO_F_chromosome_1_g_5 | 53392 |
| 2697_Neisseria_gonorrhoeae_strain_WHO_F_chromosome_1_g_1 | 53393 |
| 2697_Neisseria_gonorrhoeae_strain_WHO_F_chromosome_1_g_2 | 53394 |
| 2697_Neisseria_gonorrhoeae_strain_WHO_F_chromosome_1_g_3 | 53395 |
| 2697_Neisseria_gonorrhoeae_strain_WHO_F_chromosome_1_g_4 | 53396 |
| 2697_Neisseria_gonorrhoeae_strain_WHO_F_chromosome_1_g_5 | 53397 |
| 2698_Neisseria_gonorrhoeae_strain_WHO_F_chromosome_1_g_1 | 53398 |
| 2698_Neisseria_gonorrhoeae_strain_WHO_F_chromosome_1_g_2 | 53399 |
| 2698_Neisseria_gonorrhoeae_strain_WHO_F_chromosome_1_g_3 | 53400 |
| 2698_Neisseria_gonorrhoeae_strain_WHO_F_chromosome_1_g_4 | 53401 |
| 2698_Neisseria_gonorrhoeae_strain_WHO_F_chromosome_1_g_5 | 53402 |
| 2699_Neisseria_gonorrhoeae_strain_WHO_F_chromosome_1_g_1 | 53403 |
| 2699_Neisseria_gonorrhoeae_strain_WHO_F_chromosome_1_g_2 | 53404 |
| 2699_Neisseria_gonorrhoeae_strain_WHO_F_chromosome_1_g_3 | 53405 |
| 2699_Neisseria_gonorrhoeae_strain_WHO_F_chromosome_1_g_4 | 53406 |
| 2699_Neisseria_gonorrhoeae_strain_WHO_F_chromosome_1_g_5 | 53407 |
| 2700_Neisseria_gonorrhoeae_strain_WHO_F_chromosome_1_g_1 | 53408 |
| 2700_Neisseria_gonorrhoeae_strain_WHO_F_chromosome_1_g_2 | 53409 |
| 2700_Neisseria_gonorrhoeae_strain_WHO_F_chromosome_1_g_3 | 53410 |
| 2700_Neisseria_gonorrhoeae_strain_WHO_F_chromosome_1_g_4 | 53411 |
| 2700_Neisseria_gonorrhoeae_strain_WHO_F_chromosome_1_g_5 | 53412 |
| 2701_Neisseria_gonorrhoeae_strain_WHO_F_chromosome_1_g_1 | 53413 |
| 2701_Neisseria_gonorrhoeae_strain_WHO_F_chromosome_1_g_2 | 53414 |
| 2701_Neisseria_gonorrhoeae_strain_WHO_F_chromosome_1_g_3 | 53415 |
| 2701_Neisseria_gonorrhoeae_strain_WHO_F_chromosome_1_g_4 | 53416 |
| 2701_Neisseria_gonorrhoeae_strain_WHO_F_chromosome_1_g_5 | 53417 |
| 2702_Neisseria_gonorrhoeae_strain_WHO_F_chromosome_1_g_1 | 53418 |
| 2702_Neisseria_gonorrhoeae_strain_WHO_F_chromosome_1_g_2 | 53419 |
| 2702_Neisseria_gonorrhoeae_strain_WHO_F_chromosome_1_g_3 | 53420 |
| 2702_Neisseria_gonorrhoeae_strain_WHO_F_chromosome_1_g_4 | 53421 |
| 2702_Neisseria_gonorrhoeae_strain_WHO_F_chromosome_1_g_5 | 53422 |
| 2703_Neisseria_gonorrhoeae_strain_WHO_F_chromosome_1_g_1 | 53423 |
| 2703_Neisseria_gonorrhoeae_strain_WHO_F_chromosome_1_g_2 | 53424 |
| 2703_Neisseria_gonorrhoeae_strain_WHO_F_chromosome_1_g_3 | 53425 |
| 2703_Neisseria_gonorrhoeae_strain_WHO_F_chromosome_1_g_4 | 53426 |
| 2703_Neisseria_gonorrhoeae_strain_WHO_F_chromosome_1_g_5 | 53427 |
| 2704_Neisseria_gonorrhoeae_strain_WHO_F_chromosome_1_g_1 | 53428 |
| 2704_Neisseria_gonorrhoeae_strain_WHO_F_chromosome_1_g_2 | 53429 |
| 2704_Neisseria_gonorrhoeae_strain_WHO_F_chromosome_1_g_3 | 53430 |
| 2704_Neisseria_gonorrhoeae_strain_WHO_F_chromosome_1_g_4 | 53431 |
| 2704_Neisseria_gonorrhoeae_strain_WHO_F_chromosome_1_g_5 | 53432 |
| 2705_Neisseria_gonorrhoeae_strain_WHO_F_chromosome_1_g_1 | 53433 |
| 2705_Neisseria_gonorrhoeae_strain_WHO_F_chromosome_1_g_2 | 53434 |
| 2705_Neisseria_gonorrhoeae_strain_WHO_F_chromosome_1_g_3 | 53435 |
| 2705_Neisseria_gonorrhoeae_strain_WHO_F_chromosome_1_g_4 | 53436 |
| 2705_Neisseria_gonorrhoeae_strain_WHO_F_chromosome_1_g_5 | 53437 |
| 2706_Neisseria_gonorrhoeae_strain_WHO_F_chromosome_1_g_1 | 53438 |
| 2706_Neisseria_gonorrhoeae_strain_WHO_F_chromosome_1_g_2 | 53439 |
| 2706_Neisseria_gonorrhoeae_strain_WHO_F_chromosome_1_g_3 | 53440 |
| 2706_Neisseria_gonorrhoeae_strain_WHO_F_chromosome_1_g_4 | 53441 |
| 2706_Neisseria_gonorrhoeae_strain_WHO_F_chromosome_1_g_5 | 53442 |
| 2707_Neisseria_gonorrhoeae_strain_WHO_F_chromosome_1_g_1 | 53443 |
| 2707_Neisseria_gonorrhoeae_strain_WHO_F_chromosome_1_g_2 | 53444 |
| 2707_Neisseria_gonorrhoeae_strain_WHO_F_chromosome_1_g_3 | 53445 |
| 2707_Neisseria_gonorrhoeae_strain_WHO_F_chromosome_1_g_4 | 53446 |
| 2707_Neisseria_gonorrhoeae_strain_WHO_F_chromosome_1_g_5 | 53447 |
| 2708_Neisseria_gonorrhoeae_strain_WHO_F_chromosome_1_g_1 | 53448 |
| 2708_Neisseria_gonorrhoeae_strain_WHO_F_chromosome_1_g_2 | 53449 |
| 2708_Neisseria_gonorrhoeae_strain_WHO_F_chromosome_1_g_3 | 53450 |
| 2708_Neisseria_gonorrhoeae_strain_WHO_F_chromosome_1_g_4 | 53451 |
| 2708_Neisseria_gonorrhoeae_strain_WHO_F_chromosome_1_g_5 | 53452 |
| 2709_Neisseria_gonorrhoeae_strain_WHO_F_chromosome_1_g_1 | 53453 |
| 2709_Neisseria_gonorrhoeae_strain_WHO_F_chromosome_1_g_2 | 53454 |
| 2709_Neisseria_gonorrhoeae_strain_WHO_F_chromosome_1_g_3 | 53455 |
| 2709_Neisseria_gonorrhoeae_strain_WHO_F_chromosome_1_g_4 | 53456 |
| 2709_Neisseria_gonorrhoeae_strain_WHO_F_chromosome_1_g_5 | 53457 |
| 2710_Neisseria_gonorrhoeae_strain_WHO_F_chromosome_1_g_1 | 53458 |
| 2710_Neisseria_gonorrhoeae_strain_WHO_F_chromosome_1_g_2 | 53459 |
| 2710_Neisseria_gonorrhoeae_strain_WHO_F_chromosome_1_g_3 | 53460 |
| 2710_Neisseria_gonorrhoeae_strain_WHO_F_chromosome_1_g_4 | 53461 |
| 2710_Neisseria_gonorrhoeae_strain_WHO_F_chromosome_1_g_5 | 53462 |
| 2711_Neisseria_gonorrhoeae_strain_WHO_F_chromosome_1_g_1 | 53463 |
| 2711_Neisseria_gonorrhoeae_strain_WHO_F_chromosome_1_g_2 | 53464 |
| 2711_Neisseria_gonorrhoeae_strain_WHO_F_chromosome_1_g_3 | 53465 |
| 2711_Neisseria_gonorrhoeae_strain_WHO_F_chromosome_1_g_4 | 53466 |
| 2711_Neisseria_gonorrhoeae_strain_WHO_F_chromosome_1_g_5 | 53467 |
| 2712_Neisseria_gonorrhoeae_strain_WHO_F_chromosome_1_g_1 | 53468 |
| 2712_Neisseria_gonorrhoeae_strain_WHO_F_chromosome_1_g_2 | 53469 |
| 2712_Neisseria_gonorrhoeae_strain_WHO_F_chromosome_1_g_3 | 53470 |
| 2712_Neisseria_gonorrhoeae_strain_WHO_F_chromosome_1_g_4 | 53471 |
| 2712_Neisseria_gonorrhoeae_strain_WHO_F_chromosome_1_g_5 | 53472 |
| 2713_Neisseria_gonorrhoeae_strain_WHO_F_chromosome_1_g_1 | 53473 |
| 2713_Neisseria_gonorrhoeae_strain_WHO_F_chromosome_1_g_2 | 53474 |
| 2713_Neisseria_gonorrhoeae_strain_WHO_F_chromosome_1_g_3 | 53475 |
| 2713_Neisseria_gonorrhoeae_strain_WHO_F_chromosome_1_g_4 | 53476 |
| 2713_Neisseria_gonorrhoeae_strain_WHO_F_chromosome_1_g_5 | 53477 |
| 2714_Neisseria_gonorrhoeae_strain_WHO_F_chromosome_1_g_1 | 53478 |
| 2714_Neisseria_gonorrhoeae_strain_WHO_F_chromosome_1_g_2 | 53479 |
| 2714_Neisseria_gonorrhoeae_strain_WHO_F_chromosome_1_g_3 | 53480 |
| 2714_Neisseria_gonorrhoeae_strain_WHO_F_chromosome_1_g_4 | 53481 |
| 2714_Neisseria_gonorrhoeae_strain_WHO_F_chromosome_1_g_5 | 53482 |
| 2715_Neisseria_gonorrhoeae_strain_WHO_F_chromosome_1_g_1 | 53483 |
| 2715_Neisseria_gonorrhoeae_strain_WHO_F_chromosome_1_g_2 | 53484 |
| 2715_Neisseria_gonorrhoeae_strain_WHO_F_chromosome_1_g_3 | 53485 |
| 2715_Neisseria_gonorrhoeae_strain_WHO_F_chromosome_1_g_4 | 53486 |
| 2715_Neisseria_gonorrhoeae_strain_WHO_F_chromosome_1_g_5 | 53487 |
| 2716_Neisseria_gonorrhoeae_strain_WHO_F_chromosome_1_g_1 | 53488 |
| 2716_Neisseria_gonorrhoeae_strain_WHO_F_chromosome_1_g_2 | 53489 |
| 2716_Neisseria_gonorrhoeae_strain_WHO_F_chromosome_1_g_3 | 53490 |
| 2716_Neisseria_gonorrhoeae_strain_WHO_F_chromosome_1_g_4 | 53491 |
| 2716_Neisseria_gonorrhoeae_strain_WHO_F_chromosome_1_g_5 | 53492 |
| 2717_Neisseria_gonorrhoeae_strain_WHO_F_chromosome_1_g_1 | 53493 |
| 2717_Neisseria_gonorrhoeae_strain_WHO_F_chromosome_1_g_2 | 53494 |
| 2717_Neisseria_gonorrhoeae_strain_WHO_F_chromosome_1_g_3 | 53495 |
| 2717_Neisseria_gonorrhoeae_strain_WHO_F_chromosome_1_g_4 | 53496 |
| 2717_Neisseria_gonorrhoeae_strain_WHO_F_chromosome_1_g_5 | 53497 |
| 2718_Neisseria_gonorrhoeae_strain_WHO_F_chromosome_1_g_1 | 53498 |
| 2718_Neisseria_gonorrhoeae_strain_WHO_F_chromosome_1_g_2 | 53499 |
| 2718_Neisseria_gonorrhoeae_strain_WHO_F_chromosome_1_g_3 | 53500 |
| 2718_Neisseria_gonorrhoeae_strain_WHO_F_chromosome_1_g_4 | 53501 |
| 2718_Neisseria_gonorrhoeae_strain_WHO_F_chromosome_1_g_5 | 53502 |
| 2719_Neisseria_gonorrhoeae_strain_WHO_F_chromosome_1_g_1 | 53503 |
| 2719_Neisseria_gonorrhoeae_strain_WHO_F_chromosome_1_g_2 | 53504 |
| 2719_Neisseria_gonorrhoeae_strain_WHO_F_chromosome_1_g_3 | 53505 |
| 2719_Neisseria_gonorrhoeae_strain_WHO_F_chromosome_1_g_4 | 53506 |
| 2719_Neisseria_gonorrhoeae_strain_WHO_F_chromosome_1_g_5 | 53507 |
| 2720_Neisseria_gonorrhoeae_strain_WHO_F_chromosome_1_g_1 | 53508 |
| 2720_Neisseria_gonorrhoeae_strain_WHO_F_chromosome_1_g_2 | 53509 |
| 2720_Neisseria_gonorrhoeae_strain_WHO_F_chromosome_1_g_3 | 53510 |
| 2720_Neisseria_gonorrhoeae_strain_WHO_F_chromosome_1_g_4 | 53511 |
| 2720_Neisseria_gonorrhoeae_strain_WHO_F_chromosome_1_g_5 | 53512 |
| 2721_Neisseria_gonorrhoeae_strain_WHO_F_chromosome_1_g_1 | 53513 |
| 2721_Neisseria_gonorrhoeae_strain_WHO_F_chromosome_1_g_2 | 53514 |
| 2721_Neisseria_gonorrhoeae_strain_WHO_F_chromosome_1_g_3 | 53515 |
| 2721_Neisseria_gonorrhoeae_strain_WHO_F_chromosome_1_g_4 | 53516 |
| 2721_Neisseria_gonorrhoeae_strain_WHO_F_chromosome_1_g_5 | 53517 |
| 2722_Neisseria_gonorrhoeae_strain_WHO_F_chromosome_1_g_1 | 53518 |
| 2722_Neisseria_gonorrhoeae_strain_WHO_F_chromosome_1_g_2 | 53519 |
| 2722_Neisseria_gonorrhoeae_strain_WHO_F_chromosome_1_g_3 | 53520 |
| 2722_Neisseria_gonorrhoeae_strain_WHO_F_chromosome_1_g_4 | 53521 |
| 2722_Neisseria_gonorrhoeae_strain_WHO_F_chromosome_1_g_5 | 53522 |
| 2723_Neisseria_gonorrhoeae_strain_WHO_F_chromosome_1_g_1 | 53523 |
| 2723_Neisseria_gonorrhoeae_strain_WHO_F_chromosome_1_g_2 | 53524 |
| 2723_Neisseria_gonorrhoeae_strain_WHO_F_chromosome_1_g_3 | 53525 |
| 2723_Neisseria_gonorrhoeae_strain_WHO_F_chromosome_1_g_4 | 53526 |
| 2723_Neisseria_gonorrhoeae_strain_WHO_F_chromosome_1_g_5 | 53527 |
| 2724_Neisseria_gonorrhoeae_strain_WHO_F_chromosome_1_g_1 | 53528 |
| 2724_Neisseria_gonorrhoeae_strain_WHO_F_chromosome_1_g_2 | 53529 |
| 2724_Neisseria_gonorrhoeae_strain_WHO_F_chromosome_1_g_3 | 53530 |
| 2724_Neisseria_gonorrhoeae_strain_WHO_F_chromosome_1_g_4 | 53531 |
| 2724_Neisseria_gonorrhoeae_strain_WHO_F_chromosome_1_g_5 | 53532 |
| 2725_Neisseria_gonorrhoeae_strain_WHO_F_chromosome_1_g_1 | 53533 |
| 2725_Neisseria_gonorrhoeae_strain_WHO_F_chromosome_1_g_2 | 53534 |
| 2725_Neisseria_gonorrhoeae_strain_WHO_F_chromosome_1_g_3 | 53535 |
| 2725_Neisseria_gonorrhoeae_strain_WHO_F_chromosome_1_g_4 | 53536 |
| 2725_Neisseria_gonorrhoeae_strain_WHO_F_chromosome_1_g_5 | 53537 |
| 2726_Neisseria_gonorrhoeae_strain_WHO_F_chromosome_1_g_1 | 53538 |
| 2726_Neisseria_gonorrhoeae_strain_WHO_F_chromosome_1_g_2 | 53539 |
| 2726_Neisseria_gonorrhoeae_strain_WHO_F_chromosome_1_g_3 | 53540 |
| 2726_Neisseria_gonorrhoeae_strain_WHO_F_chromosome_1_g_4 | 53541 |
| 2726_Neisseria_gonorrhoeae_strain_WHO_F_chromosome_1_g_5 | 53542 |
| 2727_Neisseria_gonorrhoeae_strain_WHO_F_chromosome_1_g_1 | 53543 |
| 2727_Neisseria_gonorrhoeae_strain_WHO_F_chromosome_1_g_2 | 53544 |
| 2727_Neisseria_gonorrhoeae_strain_WHO_F_chromosome_1_g_3 | 53545 |
| 2727_Neisseria_gonorrhoeae_strain_WHO_F_chromosome_1_g_4 | 53546 |
| 2727_Neisseria_gonorrhoeae_strain_WHO_F_chromosome_1_g_5 | 53547 |
| 2728_Neisseria_gonorrhoeae_strain_WHO_F_chromosome_1_g_1 | 53548 |
| 2728_Neisseria_gonorrhoeae_strain_WHO_F_chromosome_1_g_2 | 53549 |
| 2728_Neisseria_gonorrhoeae_strain_WHO_F_chromosome_1_g_3 | 53550 |
| 2728_Neisseria_gonorrhoeae_strain_WHO_F_chromosome_1_g_4 | 53551 |
| 2728_Neisseria_gonorrhoeae_strain_WHO_F_chromosome_1_g_5 | 53552 |
| 2729_Neisseria_gonorrhoeae_strain_WHO_F_chromosome_1_g_1 | 53553 |
| 2729_Neisseria_gonorrhoeae_strain_WHO_F_chromosome_1_g_2 | 53554 |
| 2729_Neisseria_gonorrhoeae_strain_WHO_F_chromosome_1_g_3 | 53555 |
| 2729_Neisseria_gonorrhoeae_strain_WHO_F_chromosome_1_g_4 | 53556 |
| 2729_Neisseria_gonorrhoeae_strain_WHO_F_chromosome_1_g_5 | 53557 |
| 2730_Neisseria_gonorrhoeae_strain_WHO_F_chromosome_1_g_1 | 53558 |
| 2730_Neisseria_gonorrhoeae_strain_WHO_F_chromosome_1_g_2 | 53559 |
| 2730_Neisseria_gonorrhoeae_strain_WHO_F_chromosome_1_g_3 | 53560 |
| 2730_Neisseria_gonorrhoeae_strain_WHO_F_chromosome_1_g_4 | 53561 |
| 2731_Neisseria_gonorrhoeae_strain_WHO_F_chromosome_1_g_1 | 53562 |
| 2731_Neisseria_gonorrhoeae_strain_WHO_F_chromosome_1_g_2 | 53563 |
| 2731_Neisseria_gonorrhoeae_strain_WHO_F_chromosome_1_g_3 | 53564 |
| 2731_Neisseria_gonorrhoeae_strain_WHO_F_chromosome_1_g_4 | 53565 |
| 2731_Neisseria_gonorrhoeae_strain_WHO_F_chromosome_1_g_5 | 53566 |
| 2732_Neisseria_gonorrhoeae_strain_WHO_F_chromosome_1_g_1 | 53567 |
| 2732_Neisseria_gonorrhoeae_strain_WHO_F_chromosome_1_g_2 | 53568 |
| 2732_Neisseria_gonorrhoeae_strain_WHO_F_chromosome_1_g_3 | 53569 |
| 2732_Neisseria_gonorrhoeae_strain_WHO_F_chromosome_1_g_4 | 53570 |
| 2732_Neisseria_gonorrhoeae_strain_WHO_F_chromosome_1_g_5 | 53571 |
| 2733_Neisseria_gonorrhoeae_strain_WHO_F_chromosome_1_g_1 | 53572 |
| 2733_Neisseria_gonorrhoeae_strain_WHO_F_chromosome_1_g_2 | 53573 |
| 2733_Neisseria_gonorrhoeae_strain_WHO_F_chromosome_1_g_3 | 53574 |
| 2733_Neisseria_gonorrhoeae_strain_WHO_F_chromosome_1_g_4 | 53575 |
| 2733_Neisseria_gonorrhoeae_strain_WHO_F_chromosome_1_g_5 | 53576 |
| 2734_Neisseria_gonorrhoeae_strain_WHO_F_chromosome_1_g_1 | 53577 |
| 2734_Neisseria_gonorrhoeae_strain_WHO_F_chromosome_1_g_2 | 53578 |
| 2734_Neisseria_gonorrhoeae_strain_WHO_F_chromosome_1_g_3 | 53579 |
| 2734_Neisseria_gonorrhoeae_strain_WHO_F_chromosome_1_g_4 | 53580 |
| 2734_Neisseria_gonorrhoeae_strain_WHO_F_chromosome_1_g_5 | 53581 |
| 2735_Neisseria_gonorrhoeae_strain_WHO_F_chromosome_1_g_1 | 53582 |
| 2735_Neisseria_gonorrhoeae_strain_WHO_F_chromosome_1_g_2 | 53583 |
| 2735_Neisseria_gonorrhoeae_strain_WHO_F_chromosome_1_g_3 | 53584 |
| 2735_Neisseria_gonorrhoeae_strain_WHO_F_chromosome_1_g_4 | 53585 |
| 2735_Neisseria_gonorrhoeae_strain_WHO_F_chromosome_1_g_5 | 53586 |
| 2736_Neisseria_gonorrhoeae_strain_WHO_F_chromosome_1_g_1 | 53587 |
| 2736_Neisseria_gonorrhoeae_strain_WHO_F_chromosome_1_g_2 | 53588 |
| 2736_Neisseria_gonorrhoeae_strain_WHO_F_chromosome_1_g_3 | 53589 |
| 2736_Neisseria_gonorrhoeae_strain_WHO_F_chromosome_1_g_4 | 53590 |
| 2736_Neisseria_gonorrhoeae_strain_WHO_F_chromosome_1_g_5 | 53591 |
| 2737_Neisseria_gonorrhoeae_strain_WHO_F_chromosome_1_g_1 | 53592 |
| 2737_Neisseria_gonorrhoeae_strain_WHO_F_chromosome_1_g_2 | 53593 |
| 2737_Neisseria_gonorrhoeae_strain_WHO_F_chromosome_1_g_3 | 53594 |
| 2737_Neisseria_gonorrhoeae_strain_WHO_F_chromosome_1_g_4 | 53595 |
| 2737_Neisseria_gonorrhoeae_strain_WHO_F_chromosome_1_g_5 | 53596 |
| 2738_Neisseria_gonorrhoeae_strain_WHO_F_chromosome_1_g_1 | 53597 |
| 2738_Neisseria_gonorrhoeae_strain_WHO_F_chromosome_1_g_2 | 53598 |
| 2738_Neisseria_gonorrhoeae_strain_WHO_F_chromosome_1_g_3 | 53599 |
| 2738_Neisseria_gonorrhoeae_strain_WHO_F_chromosome_1_g_4 | 53600 |
| 2738_Neisseria_gonorrhoeae_strain_WHO_F_chromosome_1_g_5 | 53601 |
| 2739_Neisseria_gonorrhoeae_strain_WHO_F_chromosome_1_g_1 | 53602 |
| 2739_Neisseria_gonorrhoeae_strain_WHO_F_chromosome_1_g_2 | 53603 |
| 2739_Neisseria_gonorrhoeae_strain_WHO_F_chromosome_1_g_3 | 53604 |
| 2739_Neisseria_gonorrhoeae_strain_WHO_F_chromosome_1_g_4 | 53605 |
| 2739_Neisseria_gonorrhoeae_strain_WHO_F_chromosome_1_g_5 | 53606 |
| 2740_Neisseria_gonorrhoeae_strain_WHO_F_chromosome_1_g_1 | 53607 |
| 2740_Neisseria_gonorrhoeae_strain_WHO_F_chromosome_1_g_2 | 53608 |
| 2740_Neisseria_gonorrhoeae_strain_WHO_F_chromosome_1_g_3 | 53609 |
| 2740_Neisseria_gonorrhoeae_strain_WHO_F_chromosome_1_g_4 | 53610 |
| 2740_Neisseria_gonorrhoeae_strain_WHO_F_chromosome_1_g_5 | 53611 |
| 2741_Neisseria_gonorrhoeae_strain_WHO_F_chromosome_1_g_1 | 53612 |
| 2741_Neisseria_gonorrhoeae_strain_WHO_F_chromosome_1_g_2 | 53613 |
| 2741_Neisseria_gonorrhoeae_strain_WHO_F_chromosome_1_g_3 | 53614 |
| 2741_Neisseria_gonorrhoeae_strain_WHO_F_chromosome_1_g_4 | 53615 |
| 2741_Neisseria_gonorrhoeae_strain_WHO_F_chromosome_1_g_5 | 53616 |
| 2742_Neisseria_gonorrhoeae_strain_WHO_F_chromosome_1_g_1 | 53617 |
| 2742_Neisseria_gonorrhoeae_strain_WHO_F_chromosome_1_g_2 | 53618 |
| 2742_Neisseria_gonorrhoeae_strain_WHO_F_chromosome_1_g_3 | 53619 |
| 2742_Neisseria_gonorrhoeae_strain_WHO_F_chromosome_1_g_4 | 53620 |
| 2742_Neisseria_gonorrhoeae_strain_WHO_F_chromosome_1_g_5 | 53621 |
| 2743_Neisseria_gonorrhoeae_strain_WHO_F_chromosome_1_g_1 | 53622 |
| 2743_Neisseria_gonorrhoeae_strain_WHO_F_chromosome_1_g_2 | 53623 |
| 2743_Neisseria_gonorrhoeae_strain_WHO_F_chromosome_1_g_3 | 53624 |
| 2743_Neisseria_gonorrhoeae_strain_WHO_F_chromosome_1_g_4 | 53625 |
| 2743_Neisseria_gonorrhoeae_strain_WHO_F_chromosome_1_g_5 | 53626 |
| 2744_Neisseria_gonorrhoeae_strain_WHO_F_chromosome_1_g_1 | 53627 |
| 2744_Neisseria_gonorrhoeae_strain_WHO_F_chromosome_1_g_2 | 53628 |
| 2744_Neisseria_gonorrhoeae_strain_WHO_F_chromosome_1_g_3 | 53629 |
| 2744_Neisseria_gonorrhoeae_strain_WHO_F_chromosome_1_g_4 | 53630 |
| 2744_Neisseria_gonorrhoeae_strain_WHO_F_chromosome_1_g_5 | 53631 |
| 2745_Neisseria_gonorrhoeae_strain_WHO_F_chromosome_1_g_1 | 53632 |
| 2745_Neisseria_gonorrhoeae_strain_WHO_F_chromosome_1_g_2 | 53633 |
| 2745_Neisseria_gonorrhoeae_strain_WHO_F_chromosome_1_g_3 | 53634 |
| 2745_Neisseria_gonorrhoeae_strain_WHO_F_chromosome_1_g_4 | 53635 |
| 2745_Neisseria_gonorrhoeae_strain_WHO_F_chromosome_1_g_5 | 53636 |
| 2746_Neisseria_gonorrhoeae_strain_WHO_F_chromosome_1_g_1 | 53637 |
| 2746_Neisseria_gonorrhoeae_strain_WHO_F_chromosome_1_g_2 | 53638 |
| 2746_Neisseria_gonorrhoeae_strain_WHO_F_chromosome_1_g_3 | 53639 |
| 2746_Neisseria_gonorrhoeae_strain_WHO_F_chromosome_1_g_4 | 53640 |
| 2746_Neisseria_gonorrhoeae_strain_WHO_F_chromosome_1_g_5 | 53641 |
| 2747_Neisseria_gonorrhoeae_strain_WHO_F_chromosome_1_g_1 | 53642 |
| 2747_Neisseria_gonorrhoeae_strain_WHO_F_chromosome_1_g_2 | 53643 |
| 2747_Neisseria_gonorrhoeae_strain_WHO_F_chromosome_1_g_3 | 53644 |
| 2747_Neisseria_gonorrhoeae_strain_WHO_F_chromosome_1_g_4 | 53645 |
| 2747_Neisseria_gonorrhoeae_strain_WHO_F_chromosome_1_g_5 | 53646 |
| 2748_Neisseria_gonorrhoeae_strain_WHO_F_chromosome_1_g_1 | 53647 |
| 2748_Neisseria_gonorrhoeae_strain_WHO_F_chromosome_1_g_2 | 53648 |
| 2748_Neisseria_gonorrhoeae_strain_WHO_F_chromosome_1_g_3 | 53649 |
| 2748_Neisseria_gonorrhoeae_strain_WHO_F_chromosome_1_g_4 | 53650 |
| 2748_Neisseria_gonorrhoeae_strain_WHO_F_chromosome_1_g_5 | 53651 |
| 2749_Neisseria_gonorrhoeae_strain_WHO_F_chromosome_1_g_1 | 53652 |
| 2749_Neisseria_gonorrhoeae_strain_WHO_F_chromosome_1_g_2 | 53653 |
| 2749_Neisseria_gonorrhoeae_strain_WHO_F_chromosome_1_g_3 | 53654 |
| 2749_Neisseria_gonorrhoeae_strain_WHO_F_chromosome_1_g_4 | 53655 |
| 2749_Neisseria_gonorrhoeae_strain_WHO_F_chromosome_1_g_5 | 53656 |
| 2750_Neisseria_gonorrhoeae_strain_WHO_F_chromosome_1_g_1 | 53657 |
| 2750_Neisseria_gonorrhoeae_strain_WHO_F_chromosome_1_g_2 | 53658 |
| 2750_Neisseria_gonorrhoeae_strain_WHO_F_chromosome_1_g_3 | 53659 |
| 2750_Neisseria_gonorrhoeae_strain_WHO_F_chromosome_1_g_4 | 53660 |
| 2750_Neisseria_gonorrhoeae_strain_WHO_F_chromosome_1_g_5 | 53661 |
| 2751_Neisseria_gonorrhoeae_strain_WHO_F_chromosome_1_g_1 | 53662 |
| 2751_Neisseria_gonorrhoeae_strain_WHO_F_chromosome_1_g_2 | 53663 |
| 2751_Neisseria_gonorrhoeae_strain_WHO_F_chromosome_1_g_3 | 53664 |
| 2751_Neisseria_gonorrhoeae_strain_WHO_F_chromosome_1_g_4 | 53665 |
| 2751_Neisseria_gonorrhoeae_strain_WHO_F_chromosome_1_g_5 | 53666 |
| 2752_Neisseria_gonorrhoeae_strain_WHO_F_chromosome_1_g_1 | 53667 |
| 2752_Neisseria_gonorrhoeae_strain_WHO_F_chromosome_1_g_2 | 53668 |
| 2752_Neisseria_gonorrhoeae_strain_WHO_F_chromosome_1_g_3 | 53669 |
| 2752_Neisseria_gonorrhoeae_strain_WHO_F_chromosome_1_g_4 | 53670 |
| 2752_Neisseria_gonorrhoeae_strain_WHO_F_chromosome_1_g_5 | 53671 |
| 2753_Neisseria_gonorrhoeae_strain_WHO_F_chromosome_1_g_1 | 53672 |
| 2753_Neisseria_gonorrhoeae_strain_WHO_F_chromosome_1_g_2 | 53673 |
| 2753_Neisseria_gonorrhoeae_strain_WHO_F_chromosome_1_g_3 | 53674 |
| 2753_Neisseria_gonorrhoeae_strain_WHO_F_chromosome_1_g_4 | 53675 |
| 2753_Neisseria_gonorrhoeae_strain_WHO_F_chromosome_1_g_5 | 53676 |
| 2754_Neisseria_gonorrhoeae_strain_WHO_F_chromosome_1_g_1 | 53677 |
| 2754_Neisseria_gonorrhoeae_strain_WHO_F_chromosome_1_g_2 | 53678 |
| 2754_Neisseria_gonorrhoeae_strain_WHO_F_chromosome_1_g_3 | 53679 |
| 2754_Neisseria_gonorrhoeae_strain_WHO_F_chromosome_1_g_4 | 53680 |
| 2754_Neisseria_gonorrhoeae_strain_WHO_F_chromosome_1_g_5 | 53681 |
| 2755_Neisseria_gonorrhoeae_strain_WHO_F_chromosome_1_g_1 | 53682 |
| 2755_Neisseria_gonorrhoeae_strain_WHO_F_chromosome_1_g_2 | 53683 |
| 2755_Neisseria_gonorrhoeae_strain_WHO_F_chromosome_1_g_3 | 53684 |
| 2756_Neisseria_gonorrhoeae_strain_WHO_F_chromosome_1_g_1 | 53685 |
| 2756_Neisseria_gonorrhoeae_strain_WHO_F_chromosome_1_g_2 | 53686 |
| 2756_Neisseria_gonorrhoeae_strain_WHO_F_chromosome_1_g_3 | 53687 |
| 2756_Neisseria_gonorrhoeae_strain_WHO_F_chromosome_1_g_4 | 53688 |
| 2756_Neisseria_gonorrhoeae_strain_WHO_F_chromosome_1_g_5 | 53689 |
| 2757_Neisseria_gonorrhoeae_strain_WHO_F_chromosome_1_g_1 | 53690 |
| 2757_Neisseria_gonorrhoeae_strain_WHO_F_chromosome_1_g_2 | 53691 |
| 2757_Neisseria_gonorrhoeae_strain_WHO_F_chromosome_1_g_3 | 53692 |
| 2757_Neisseria_gonorrhoeae_strain_WHO_F_chromosome_1_g_4 | 53693 |
| 2757_Neisseria_gonorrhoeae_strain_WHO_F_chromosome_1_g_5 | 53694 |
| 2758_Neisseria_gonorrhoeae_strain_WHO_F_chromosome_1_g_1 | 53695 |
| 2758_Neisseria_gonorrhoeae_strain_WHO_F_chromosome_1_g_2 | 53696 |
| 2758_Neisseria_gonorrhoeae_strain_WHO_F_chromosome_1_g_3 | 53697 |
| 2758_Neisseria_gonorrhoeae_strain_WHO_F_chromosome_1_g_4 | 53698 |
| 2758_Neisseria_gonorrhoeae_strain_WHO_F_chromosome_1_g_5 | 53699 |
| 2759_Neisseria_gonorrhoeae_strain_WHO_F_chromosome_1_g_1 | 53700 |
| 2759_Neisseria_gonorrhoeae_strain_WHO_F_chromosome_1_g_2 | 53701 |
| 2759_Neisseria_gonorrhoeae_strain_WHO_F_chromosome_1_g_3 | 53702 |
| 2759_Neisseria_gonorrhoeae_strain_WHO_F_chromosome_1_g_4 | 53703 |
| 2759_Neisseria_gonorrhoeae_strain_WHO_F_chromosome_1_g_5 | 53704 |
| 2760_Neisseria_gonorrhoeae_strain_WHO_F_chromosome_1_g_1 | 53705 |
| 2760_Neisseria_gonorrhoeae_strain_WHO_F_chromosome_1_g_2 | 53706 |
| 2760_Neisseria_gonorrhoeae_strain_WHO_F_chromosome_1_g_3 | 53707 |
| 2760_Neisseria_gonorrhoeae_strain_WHO_F_chromosome_1_g_4 | 53708 |
| 2760_Neisseria_gonorrhoeae_strain_WHO_F_chromosome_1_g_5 | 53709 |
| 2761_Neisseria_gonorrhoeae_strain_WHO_F_chromosome_1_g_1 | 53710 |
| 2761_Neisseria_gonorrhoeae_strain_WHO_F_chromosome_1_g_2 | 53711 |
| 2761_Neisseria_gonorrhoeae_strain_WHO_F_chromosome_1_g_3 | 53712 |
| 2761_Neisseria_gonorrhoeae_strain_WHO_F_chromosome_1_g_4 | 53713 |
| 2761_Neisseria_gonorrhoeae_strain_WHO_F_chromosome_1_g_5 | 53714 |
| 2762_Neisseria_gonorrhoeae_strain_WHO_F_chromosome_1_g_1 | 53715 |
| 2762_Neisseria_gonorrhoeae_strain_WHO_F_chromosome_1_g_2 | 53716 |
| 2762_Neisseria_gonorrhoeae_strain_WHO_F_chromosome_1_g_3 | 53717 |
| 2762_Neisseria_gonorrhoeae_strain_WHO_F_chromosome_1_g_4 | 53718 |
| 2762_Neisseria_gonorrhoeae_strain_WHO_F_chromosome_1_g_5 | 53719 |
| 2763_Neisseria_gonorrhoeae_strain_WHO_F_chromosome_1_g_1 | 53720 |
| 2763_Neisseria_gonorrhoeae_strain_WHO_F_chromosome_1_g_2 | 53721 |
| 2763_Neisseria_gonorrhoeae_strain_WHO_F_chromosome_1_g_3 | 53722 |
| 2763_Neisseria_gonorrhoeae_strain_WHO_F_chromosome_1_g_4 | 53723 |
| 2763_Neisseria_gonorrhoeae_strain_WHO_F_chromosome_1_g_5 | 53724 |
| 2764_Neisseria_gonorrhoeae_strain_WHO_F_chromosome_1_g_1 | 53725 |
| 2764_Neisseria_gonorrhoeae_strain_WHO_F_chromosome_1_g_2 | 53726 |
| 2764_Neisseria_gonorrhoeae_strain_WHO_F_chromosome_1_g_3 | 53727 |
| 2764_Neisseria_gonorrhoeae_strain_WHO_F_chromosome_1_g_4 | 53728 |
| 2764_Neisseria_gonorrhoeae_strain_WHO_F_chromosome_1_g_5 | 53729 |
| 2765_Neisseria_gonorrhoeae_strain_WHO_F_chromosome_1_g_1 | 53730 |
| 2765_Neisseria_gonorrhoeae_strain_WHO_F_chromosome_1_g_2 | 53731 |
| 2765_Neisseria_gonorrhoeae_strain_WHO_F_chromosome_1_g_3 | 53732 |
| 2765_Neisseria_gonorrhoeae_strain_WHO_F_chromosome_1_g_4 | 53733 |
| 2765_Neisseria_gonorrhoeae_strain_WHO_F_chromosome_1_g_5 | 53734 |
| 2766_Neisseria_gonorrhoeae_strain_WHO_F_chromosome_1_g_1 | 53735 |
| 2766_Neisseria_gonorrhoeae_strain_WHO_F_chromosome_1_g_2 | 53736 |
| 2766_Neisseria_gonorrhoeae_strain_WHO_F_chromosome_1_g_3 | 53737 |
| 2766_Neisseria_gonorrhoeae_strain_WHO_F_chromosome_1_g_4 | 53738 |
| 2766_Neisseria_gonorrhoeae_strain_WHO_F_chromosome_1_g_5 | 53739 |
| 2767_Neisseria_gonorrhoeae_strain_WHO_F_chromosome_1_g_1 | 53740 |
| 2767_Neisseria_gonorrhoeae_strain_WHO_F_chromosome_1_g_2 | 53741 |
| 2767_Neisseria_gonorrhoeae_strain_WHO_F_chromosome_1_g_3 | 53742 |
| 2767_Neisseria_gonorrhoeae_strain_WHO_F_chromosome_1_g_4 | 53743 |
| 2767_Neisseria_gonorrhoeae_strain_WHO_F_chromosome_1_g_5 | 53744 |
| 2768_Neisseria_gonorrhoeae_strain_WHO_F_chromosome_1_g_1 | 53745 |
| 2768_Neisseria_gonorrhoeae_strain_WHO_F_chromosome_1_g_2 | 53746 |
| 2768_Neisseria_gonorrhoeae_strain_WHO_F_chromosome_1_g_3 | 53747 |
| 2768_Neisseria_gonorrhoeae_strain_WHO_F_chromosome_1_g_4 | 53748 |
| 2768_Neisseria_gonorrhoeae_strain_WHO_F_chromosome_1_g_5 | 53749 |
| 2769_Neisseria_gonorrhoeae_strain_WHO_F_chromosome_1_g_1 | 53750 |
| 2769_Neisseria_gonorrhoeae_strain_WHO_F_chromosome_1_g_2 | 53751 |
| 2769_Neisseria_gonorrhoeae_strain_WHO_F_chromosome_1_g_3 | 53752 |
| 2769_Neisseria_gonorrhoeae_strain_WHO_F_chromosome_1_g_4 | 53753 |
| 2769_Neisseria_gonorrhoeae_strain_WHO_F_chromosome_1_g_5 | 53754 |
| 2770_Neisseria_gonorrhoeae_strain_WHO_F_chromosome_1_g_1 | 53755 |
| 2770_Neisseria_gonorrhoeae_strain_WHO_F_chromosome_1_g_2 | 53756 |
| 2770_Neisseria_gonorrhoeae_strain_WHO_F_chromosome_1_g_3 | 53757 |
| 2770_Neisseria_gonorrhoeae_strain_WHO_F_chromosome_1_g_4 | 53758 |
| 2770_Neisseria_gonorrhoeae_strain_WHO_F_chromosome_1_g_5 | 53759 |
| 2771_Neisseria_gonorrhoeae_strain_WHO_F_chromosome_1_g_1 | 53760 |
| 2771_Neisseria_gonorrhoeae_strain_WHO_F_chromosome_1_g_2 | 53761 |
| 2771_Neisseria_gonorrhoeae_strain_WHO_F_chromosome_1_g_3 | 53762 |
| 2771_Neisseria_gonorrhoeae_strain_WHO_F_chromosome_1_g_4 | 53763 |
| 2771_Neisseria_gonorrhoeae_strain_WHO_F_chromosome_1_g_5 | 53764 |
| 2772_Neisseria_gonorrhoeae_strain_WHO_F_chromosome_1_g_1 | 53765 |
| 2772_Neisseria_gonorrhoeae_strain_WHO_F_chromosome_1_g_2 | 53766 |
| 2772_Neisseria_gonorrhoeae_strain_WHO_F_chromosome_1_g_3 | 53767 |
| 2772_Neisseria_gonorrhoeae_strain_WHO_F_chromosome_1_g_4 | 53768 |
| 2772_Neisseria_gonorrhoeae_strain_WHO_F_chromosome_1_g_5 | 53769 |
| 2773_Neisseria_gonorrhoeae_strain_WHO_F_chromosome_1_g_1 | 53770 |
| 2773_Neisseria_gonorrhoeae_strain_WHO_F_chromosome_1_g_2 | 53771 |
| 2773_Neisseria_gonorrhoeae_strain_WHO_F_chromosome_1_g_3 | 53772 |
| 2773_Neisseria_gonorrhoeae_strain_WHO_F_chromosome_1_g_4 | 53773 |
| 2773_Neisseria_gonorrhoeae_strain_WHO_F_chromosome_1_g_5 | 53774 |
| 2774_Neisseria_gonorrhoeae_strain_WHO_F_chromosome_1_g_1 | 53775 |
| 2774_Neisseria_gonorrhoeae_strain_WHO_F_chromosome_1_g_2 | 53776 |
| 2774_Neisseria_gonorrhoeae_strain_WHO_F_chromosome_1_g_3 | 53777 |
| 2774_Neisseria_gonorrhoeae_strain_WHO_F_chromosome_1_g_4 | 53778 |
| 2774_Neisseria_gonorrhoeae_strain_WHO_F_chromosome_1_g_5 | 53779 |
| 2775_Neisseria_gonorrhoeae_strain_WHO_F_chromosome_1_g_1 | 53780 |
| 2775_Neisseria_gonorrhoeae_strain_WHO_F_chromosome_1_g_2 | 53781 |
| 2775_Neisseria_gonorrhoeae_strain_WHO_F_chromosome_1_g_3 | 53782 |
| 2775_Neisseria_gonorrhoeae_strain_WHO_F_chromosome_1_g_4 | 53783 |
| 2775_Neisseria_gonorrhoeae_strain_WHO_F_chromosome_1_g_5 | 53784 |
| 2776_Neisseria_gonorrhoeae_strain_WHO_F_chromosome_1_g_1 | 53785 |
| 2776_Neisseria_gonorrhoeae_strain_WHO_F_chromosome_1_g_2 | 53786 |
| 2776_Neisseria_gonorrhoeae_strain_WHO_F_chromosome_1_g_3 | 53787 |
| 2776_Neisseria_gonorrhoeae_strain_WHO_F_chromosome_1_g_4 | 53788 |
| 2776_Neisseria_gonorrhoeae_strain_WHO_F_chromosome_1_g_5 | 53789 |
| 2777_Neisseria_gonorrhoeae_strain_WHO_F_chromosome_1_g_1 | 53790 |
| 2777_Neisseria_gonorrhoeae_strain_WHO_F_chromosome_1_g_2 | 53791 |
| 2777_Neisseria_gonorrhoeae_strain_WHO_F_chromosome_1_g_3 | 53792 |
| 2777_Neisseria_gonorrhoeae_strain_WHO_F_chromosome_1_g_4 | 53793 |
| 2777_Neisseria_gonorrhoeae_strain_WHO_F_chromosome_1_g_5 | 53794 |
| 2778_Neisseria_gonorrhoeae_strain_WHO_F_chromosome_1_g_1 | 53795 |
| 2778_Neisseria_gonorrhoeae_strain_WHO_F_chromosome_1_g_2 | 53796 |
| 2778_Neisseria_gonorrhoeae_strain_WHO_F_chromosome_1_g_3 | 53797 |
| 2778_Neisseria_gonorrhoeae_strain_WHO_F_chromosome_1_g_4 | 53798 |
| 2778_Neisseria_gonorrhoeae_strain_WHO_F_chromosome_1_g_5 | 53799 |
| 2779_Neisseria_gonorrhoeae_strain_WHO_F_chromosome_1_g_1 | 53800 |
| 2779_Neisseria_gonorrhoeae_strain_WHO_F_chromosome_1_g_2 | 53801 |
| 2779_Neisseria_gonorrhoeae_strain_WHO_F_chromosome_1_g_3 | 53802 |
| 2779_Neisseria_gonorrhoeae_strain_WHO_F_chromosome_1_g_4 | 53803 |
| 2779_Neisseria_gonorrhoeae_strain_WHO_F_chromosome_1_g_5 | 53804 |
| 2780_Neisseria_gonorrhoeae_strain_WHO_F_chromosome_1_g_1 | 53805 |
| 2780_Neisseria_gonorrhoeae_strain_WHO_F_chromosome_1_g_2 | 53806 |
| 2780_Neisseria_gonorrhoeae_strain_WHO_F_chromosome_1_g_3 | 53807 |
| 2780_Neisseria_gonorrhoeae_strain_WHO_F_chromosome_1_g_4 | 53808 |
| 2780_Neisseria_gonorrhoeae_strain_WHO_F_chromosome_1_g_5 | 53809 |
| 2781_Neisseria_gonorrhoeae_strain_WHO_F_chromosome_1_g_1 | 53810 |
| 2781_Neisseria_gonorrhoeae_strain_WHO_F_chromosome_1_g_2 | 53811 |
| 2781_Neisseria_gonorrhoeae_strain_WHO_F_chromosome_1_g_3 | 53812 |
| 2781_Neisseria_gonorrhoeae_strain_WHO_F_chromosome_1_g_4 | 53813 |
| 2781_Neisseria_gonorrhoeae_strain_WHO_F_chromosome_1_g_5 | 53814 |
| 2782_Neisseria_gonorrhoeae_strain_WHO_F_chromosome_1_g_1 | 53815 |
| 2782_Neisseria_gonorrhoeae_strain_WHO_F_chromosome_1_g_2 | 53816 |
| 2782_Neisseria_gonorrhoeae_strain_WHO_F_chromosome_1_g_3 | 53817 |
| 2783_Neisseria_gonorrhoeae_strain_WHO_F_chromosome_1_g_1 | 53818 |
| 2783_Neisseria_gonorrhoeae_strain_WHO_F_chromosome_1_g_2 | 53819 |
| 2783_Neisseria_gonorrhoeae_strain_WHO_F_chromosome_1_g_3 | 53820 |
| 2783_Neisseria_gonorrhoeae_strain_WHO_F_chromosome_1_g_4 | 53821 |
| 2783_Neisseria_gonorrhoeae_strain_WHO_F_chromosome_1_g_5 | 53822 |
| 2784_Neisseria_gonorrhoeae_strain_WHO_F_chromosome_1_g_1 | 53823 |
| 2784_Neisseria_gonorrhoeae_strain_WHO_F_chromosome_1_g_2 | 53824 |
| 2784_Neisseria_gonorrhoeae_strain_WHO_F_chromosome_1_g_3 | 53825 |
| 2784_Neisseria_gonorrhoeae_strain_WHO_F_chromosome_1_g_4 | 53826 |
| 2784_Neisseria_gonorrhoeae_strain_WHO_F_chromosome_1_g_5 | 53827 |
| 2785_Neisseria_gonorrhoeae_strain_WHO_F_chromosome_1_g_1 | 53828 |
| 2785_Neisseria_gonorrhoeae_strain_WHO_F_chromosome_1_g_2 | 53829 |
| 2785_Neisseria_gonorrhoeae_strain_WHO_F_chromosome_1_g_3 | 53830 |
| 2785_Neisseria_gonorrhoeae_strain_WHO_F_chromosome_1_g_4 | 53831 |
| 2785_Neisseria_gonorrhoeae_strain_WHO_F_chromosome_1_g_5 | 53832 |
| 2786_Neisseria_gonorrhoeae_strain_WHO_F_chromosome_1_g_1 | 53833 |
| 2786_Neisseria_gonorrhoeae_strain_WHO_F_chromosome_1_g_2 | 53834 |
| 2786_Neisseria_gonorrhoeae_strain_WHO_F_chromosome_1_g_3 | 53835 |
| 2786_Neisseria_gonorrhoeae_strain_WHO_F_chromosome_1_g_4 | 53836 |
| 2786_Neisseria_gonorrhoeae_strain_WHO_F_chromosome_1_g_5 | 53837 |
| 2787_Neisseria_gonorrhoeae_strain_WHO_F_chromosome_1_g_1 | 53838 |
| 2787_Neisseria_gonorrhoeae_strain_WHO_F_chromosome_1_g_2 | 53839 |
| 2787_Neisseria_gonorrhoeae_strain_WHO_F_chromosome_1_g_3 | 53840 |
| 2787_Neisseria_gonorrhoeae_strain_WHO_F_chromosome_1_g_4 | 53841 |
| 2787_Neisseria_gonorrhoeae_strain_WHO_F_chromosome_1_g_5 | 53842 |
| 2788_Neisseria_gonorrhoeae_strain_WHO_F_chromosome_1_g_1 | 53843 |
| 2788_Neisseria_gonorrhoeae_strain_WHO_F_chromosome_1_g_2 | 53844 |
| 2788_Neisseria_gonorrhoeae_strain_WHO_F_chromosome_1_g_3 | 53845 |
| 2788_Neisseria_gonorrhoeae_strain_WHO_F_chromosome_1_g_4 | 53846 |
| 2788_Neisseria_gonorrhoeae_strain_WHO_F_chromosome_1_g_5 | 53847 |
| 2789_Neisseria_gonorrhoeae_strain_WHO_F_chromosome_1_g_1 | 53848 |
| 2789_Neisseria_gonorrhoeae_strain_WHO_F_chromosome_1_g_2 | 53849 |
| 2789_Neisseria_gonorrhoeae_strain_WHO_F_chromosome_1_g_3 | 53850 |
| 2789_Neisseria_gonorrhoeae_strain_WHO_F_chromosome_1_g_4 | 53851 |
| 2789_Neisseria_gonorrhoeae_strain_WHO_F_chromosome_1_g_5 | 53852 |
| 2790_Neisseria_gonorrhoeae_strain_WHO_F_chromosome_1_g_1 | 53853 |
| 2790_Neisseria_gonorrhoeae_strain_WHO_F_chromosome_1_g_2 | 53854 |
| 2790_Neisseria_gonorrhoeae_strain_WHO_F_chromosome_1_g_3 | 53855 |
| 2790_Neisseria_gonorrhoeae_strain_WHO_F_chromosome_1_g_4 | 53856 |
| 2790_Neisseria_gonorrhoeae_strain_WHO_F_chromosome_1_g_5 | 53857 |
| 2791_Neisseria_gonorrhoeae_strain_WHO_F_chromosome_1_g_1 | 53858 |
| 2791_Neisseria_gonorrhoeae_strain_WHO_F_chromosome_1_g_2 | 53859 |
| 2791_Neisseria_gonorrhoeae_strain_WHO_F_chromosome_1_g_3 | 53860 |
| 2791_Neisseria_gonorrhoeae_strain_WHO_F_chromosome_1_g_4 | 53861 |
| 2791_Neisseria_gonorrhoeae_strain_WHO_F_chromosome_1_g_5 | 53862 |
| 2792_Neisseria_gonorrhoeae_strain_WHO_F_chromosome_1_g_1 | 53863 |
| 2792_Neisseria_gonorrhoeae_strain_WHO_F_chromosome_1_g_2 | 53864 |
| 2792_Neisseria_gonorrhoeae_strain_WHO_F_chromosome_1_g_3 | 53865 |
| 2792_Neisseria_gonorrhoeae_strain_WHO_F_chromosome_1_g_4 | 53866 |
| 2792_Neisseria_gonorrhoeae_strain_WHO_F_chromosome_1_g_5 | 53867 |
| 2793_Neisseria_gonorrhoeae_strain_WHO_F_chromosome_1_g_1 | 53868 |
| 2793_Neisseria_gonorrhoeae_strain_WHO_F_chromosome_1_g_2 | 53869 |
| 2793_Neisseria_gonorrhoeae_strain_WHO_F_chromosome_1_g_3 | 53870 |
| 2793_Neisseria_gonorrhoeae_strain_WHO_F_chromosome_1_g_4 | 53871 |
| 2793_Neisseria_gonorrhoeae_strain_WHO_F_chromosome_1_g_5 | 53872 |
| 2794_Neisseria_gonorrhoeae_strain_WHO_F_chromosome_1_g_1 | 53873 |
| 2794_Neisseria_gonorrhoeae_strain_WHO_F_chromosome_1_g_2 | 53874 |
| 2794_Neisseria_gonorrhoeae_strain_WHO_F_chromosome_1_g_3 | 53875 |
| 2794_Neisseria_gonorrhoeae_strain_WHO_F_chromosome_1_g_4 | 53876 |
| 2794_Neisseria_gonorrhoeae_strain_WHO_F_chromosome_1_g_5 | 53877 |
| 2795_Neisseria_gonorrhoeae_strain_WHO_F_chromosome_1_g_1 | 53878 |
| 2795_Neisseria_gonorrhoeae_strain_WHO_F_chromosome_1_g_2 | 53879 |
| 2795_Neisseria_gonorrhoeae_strain_WHO_F_chromosome_1_g_3 | 53880 |
| 2795_Neisseria_gonorrhoeae_strain_WHO_F_chromosome_1_g_4 | 53881 |
| 2795_Neisseria_gonorrhoeae_strain_WHO_F_chromosome_1_g_5 | 53882 |
| 2796_Neisseria_gonorrhoeae_strain_WHO_F_chromosome_1_g_1 | 53883 |
| 2796_Neisseria_gonorrhoeae_strain_WHO_F_chromosome_1_g_2 | 53884 |
| 2796_Neisseria_gonorrhoeae_strain_WHO_F_chromosome_1_g_3 | 53885 |
| 2796_Neisseria_gonorrhoeae_strain_WHO_F_chromosome_1_g_4 | 53886 |
| 2796_Neisseria_gonorrhoeae_strain_WHO_F_chromosome_1_g_5 | 53887 |
| 2797_Neisseria_gonorrhoeae_strain_WHO_F_chromosome_1_g_1 | 53888 |
| 2797_Neisseria_gonorrhoeae_strain_WHO_F_chromosome_1_g_2 | 53889 |
| 2797_Neisseria_gonorrhoeae_strain_WHO_F_chromosome_1_g_3 | 53890 |
| 2797_Neisseria_gonorrhoeae_strain_WHO_F_chromosome_1_g_4 | 53891 |
| 2797_Neisseria_gonorrhoeae_strain_WHO_F_chromosome_1_g_5 | 53892 |
| 2798_Neisseria_gonorrhoeae_strain_WHO_F_chromosome_1_g_1 | 53893 |
| 2798_Neisseria_gonorrhoeae_strain_WHO_F_chromosome_1_g_2 | 53894 |
| 2798_Neisseria_gonorrhoeae_strain_WHO_F_chromosome_1_g_3 | 53895 |
| 2798_Neisseria_gonorrhoeae_strain_WHO_F_chromosome_1_g_4 | 53896 |
| 2798_Neisseria_gonorrhoeae_strain_WHO_F_chromosome_1_g_5 | 53897 |
| 2799_Neisseria_gonorrhoeae_strain_WHO_F_chromosome_1_g_1 | 53898 |
| 2799_Neisseria_gonorrhoeae_strain_WHO_F_chromosome_1_g_2 | 53899 |
| 2799_Neisseria_gonorrhoeae_strain_WHO_F_chromosome_1_g_3 | 53900 |
| 2799_Neisseria_gonorrhoeae_strain_WHO_F_chromosome_1_g_4 | 53901 |
| 2799_Neisseria_gonorrhoeae_strain_WHO_F_chromosome_1_g_5 | 53902 |
| 2800_Neisseria_gonorrhoeae_strain_WHO_F_chromosome_1_g_1 | 53903 |
| 2800_Neisseria_gonorrhoeae_strain_WHO_F_chromosome_1_g_2 | 53904 |
| 2800_Neisseria_gonorrhoeae_strain_WHO_F_chromosome_1_g_3 | 53905 |
| 2800_Neisseria_gonorrhoeae_strain_WHO_F_chromosome_1_g_4 | 53906 |
| 2800_Neisseria_gonorrhoeae_strain_WHO_F_chromosome_1_g_5 | 53907 |
| 2801_Neisseria_gonorrhoeae_strain_WHO_F_chromosome_1_g_1 | 53908 |
| 2801_Neisseria_gonorrhoeae_strain_WHO_F_chromosome_1_g_2 | 53909 |
| 2801_Neisseria_gonorrhoeae_strain_WHO_F_chromosome_1_g_3 | 53910 |
| 2801_Neisseria_gonorrhoeae_strain_WHO_F_chromosome_1_g_4 | 53911 |
| 2801_Neisseria_gonorrhoeae_strain_WHO_F_chromosome_1_g_5 | 53912 |
| 2802_Neisseria_gonorrhoeae_strain_WHO_F_chromosome_1_g_1 | 53913 |
| 2802_Neisseria_gonorrhoeae_strain_WHO_F_chromosome_1_g_2 | 53914 |
| 2802_Neisseria_gonorrhoeae_strain_WHO_F_chromosome_1_g_3 | 53915 |
| 2802_Neisseria_gonorrhoeae_strain_WHO_F_chromosome_1_g_4 | 53916 |
| 2802_Neisseria_gonorrhoeae_strain_WHO_F_chromosome_1_g_5 | 53917 |
| 2803_Neisseria_gonorrhoeae_strain_WHO_F_chromosome_1_g_1 | 53918 |
| 2803_Neisseria_gonorrhoeae_strain_WHO_F_chromosome_1_g_2 | 53919 |
| 2803_Neisseria_gonorrhoeae_strain_WHO_F_chromosome_1_g_3 | 53920 |
| 2803_Neisseria_gonorrhoeae_strain_WHO_F_chromosome_1_g_4 | 53921 |
| 2804_Neisseria_gonorrhoeae_strain_WHO_F_chromosome_1_g_1 | 53922 |
| 2804_Neisseria_gonorrhoeae_strain_WHO_F_chromosome_1_g_2 | 53923 |
| 2804_Neisseria_gonorrhoeae_strain_WHO_F_chromosome_1_g_3 | 53924 |
| 2804_Neisseria_gonorrhoeae_strain_WHO_F_chromosome_1_g_4 | 53925 |
| 2804_Neisseria_gonorrhoeae_strain_WHO_F_chromosome_1_g_5 | 53926 |
| 2805_Neisseria_gonorrhoeae_strain_WHO_F_chromosome_1_g_1 | 53927 |
| 2805_Neisseria_gonorrhoeae_strain_WHO_F_chromosome_1_g_2 | 53928 |
| 2805_Neisseria_gonorrhoeae_strain_WHO_F_chromosome_1_g_3 | 53929 |
| 2805_Neisseria_gonorrhoeae_strain_WHO_F_chromosome_1_g_4 | 53930 |
| 2805_Neisseria_gonorrhoeae_strain_WHO_F_chromosome_1_g_5 | 53931 |
| 2806_Neisseria_gonorrhoeae_strain_WHO_F_chromosome_1_g_1 | 53932 |
| 2806_Neisseria_gonorrhoeae_strain_WHO_F_chromosome_1_g_2 | 53933 |
| 2806_Neisseria_gonorrhoeae_strain_WHO_F_chromosome_1_g_3 | 53934 |
| 2806_Neisseria_gonorrhoeae_strain_WHO_F_chromosome_1_g_4 | 53935 |
| 2806_Neisseria_gonorrhoeae_strain_WHO_F_chromosome_1_g_5 | 53936 |
| 2807_Neisseria_gonorrhoeae_strain_WHO_F_chromosome_1_g_1 | 53937 |
| 2807_Neisseria_gonorrhoeae_strain_WHO_F_chromosome_1_g_2 | 53938 |
| 2807_Neisseria_gonorrhoeae_strain_WHO_F_chromosome_1_g_3 | 53939 |
| 2807_Neisseria_gonorrhoeae_strain_WHO_F_chromosome_1_g_4 | 53940 |
| 2807_Neisseria_gonorrhoeae_strain_WHO_F_chromosome_1_g_5 | 53941 |
| 2808_Neisseria_gonorrhoeae_strain_WHO_F_chromosome_1_g_1 | 53942 |
| 2808_Neisseria_gonorrhoeae_strain_WHO_F_chromosome_1_g_2 | 53943 |
| 2808_Neisseria_gonorrhoeae_strain_WHO_F_chromosome_1_g_3 | 53944 |
| 2808_Neisseria_gonorrhoeae_strain_WHO_F_chromosome_1_g_4 | 53945 |
| 2808_Neisseria_gonorrhoeae_strain_WHO_F_chromosome_1_g_5 | 53946 |
| 2809_Neisseria_gonorrhoeae_strain_WHO_F_chromosome_1_g_1 | 53947 |
| 2809_Neisseria_gonorrhoeae_strain_WHO_F_chromosome_1_g_2 | 53948 |
| 2809_Neisseria_gonorrhoeae_strain_WHO_F_chromosome_1_g_3 | 53949 |
| 2809_Neisseria_gonorrhoeae_strain_WHO_F_chromosome_1_g_4 | 53950 |
| 2809_Neisseria_gonorrhoeae_strain_WHO_F_chromosome_1_g_5 | 53951 |
| 2810_Neisseria_gonorrhoeae_strain_WHO_F_chromosome_1_g_1 | 53952 |
| 2810_Neisseria_gonorrhoeae_strain_WHO_F_chromosome_1_g_2 | 53953 |
| 2810_Neisseria_gonorrhoeae_strain_WHO_F_chromosome_1_g_3 | 53954 |
| 2810_Neisseria_gonorrhoeae_strain_WHO_F_chromosome_1_g_4 | 53955 |
| 2810_Neisseria_gonorrhoeae_strain_WHO_F_chromosome_1_g_5 | 53956 |
| 2811_Neisseria_gonorrhoeae_strain_WHO_F_chromosome_1_g_1 | 53957 |
| 2811_Neisseria_gonorrhoeae_strain_WHO_F_chromosome_1_g_2 | 53958 |
| 2811_Neisseria_gonorrhoeae_strain_WHO_F_chromosome_1_g_3 | 53959 |
| 2811_Neisseria_gonorrhoeae_strain_WHO_F_chromosome_1_g_4 | 53960 |
| 2811_Neisseria_gonorrhoeae_strain_WHO_F_chromosome_1_g_5 | 53961 |
| 2812_Neisseria_gonorrhoeae_strain_WHO_F_chromosome_1_g_1 | 53962 |
| 2812_Neisseria_gonorrhoeae_strain_WHO_F_chromosome_1_g_2 | 53963 |
| 2812_Neisseria_gonorrhoeae_strain_WHO_F_chromosome_1_g_3 | 53964 |
| 2812_Neisseria_gonorrhoeae_strain_WHO_F_chromosome_1_g_4 | 53965 |
| 2812_Neisseria_gonorrhoeae_strain_WHO_F_chromosome_1_g_5 | 53966 |
| 2813_Neisseria_gonorrhoeae_strain_WHO_F_chromosome_1_g_1 | 53967 |
| 2813_Neisseria_gonorrhoeae_strain_WHO_F_chromosome_1_g_2 | 53968 |
| 2813_Neisseria_gonorrhoeae_strain_WHO_F_chromosome_1_g_3 | 53969 |
| 2813_Neisseria_gonorrhoeae_strain_WHO_F_chromosome_1_g_4 | 53970 |
| 2813_Neisseria_gonorrhoeae_strain_WHO_F_chromosome_1_g_5 | 53971 |
| 2814_Neisseria_gonorrhoeae_strain_WHO_F_chromosome_1_g_1 | 53972 |
| 2814_Neisseria_gonorrhoeae_strain_WHO_F_chromosome_1_g_2 | 53973 |
| 2814_Neisseria_gonorrhoeae_strain_WHO_F_chromosome_1_g_3 | 53974 |
| 2814_Neisseria_gonorrhoeae_strain_WHO_F_chromosome_1_g_4 | 53975 |
| 2814_Neisseria_gonorrhoeae_strain_WHO_F_chromosome_1_g_5 | 53976 |
| 2815_Neisseria_gonorrhoeae_strain_WHO_F_chromosome_1_g_1 | 53977 |
| 2815_Neisseria_gonorrhoeae_strain_WHO_F_chromosome_1_g_2 | 53978 |
| 2815_Neisseria_gonorrhoeae_strain_WHO_F_chromosome_1_g_3 | 53979 |
| 2815_Neisseria_gonorrhoeae_strain_WHO_F_chromosome_1_g_4 | 53980 |
| 2815_Neisseria_gonorrhoeae_strain_WHO_F_chromosome_1_g_5 | 53981 |
| 2816_Neisseria_gonorrhoeae_strain_WHO_F_chromosome_1_g_1 | 53982 |
| 2816_Neisseria_gonorrhoeae_strain_WHO_F_chromosome_1_g_2 | 53983 |
| 2816_Neisseria_gonorrhoeae_strain_WHO_F_chromosome_1_g_3 | 53984 |
| 2816_Neisseria_gonorrhoeae_strain_WHO_F_chromosome_1_g_4 | 53985 |
| 2816_Neisseria_gonorrhoeae_strain_WHO_F_chromosome_1_g_5 | 53986 |
| 2817_Neisseria_gonorrhoeae_strain_WHO_F_chromosome_1_g_1 | 53987 |
| 2817_Neisseria_gonorrhoeae_strain_WHO_F_chromosome_1_g_2 | 53988 |
| 2817_Neisseria_gonorrhoeae_strain_WHO_F_chromosome_1_g_3 | 53989 |
| 2817_Neisseria_gonorrhoeae_strain_WHO_F_chromosome_1_g_4 | 53990 |
| 2817_Neisseria_gonorrhoeae_strain_WHO_F_chromosome_1_g_5 | 53991 |
| 2818_Neisseria_gonorrhoeae_strain_WHO_F_chromosome_1_g_1 | 53992 |
| 2818_Neisseria_gonorrhoeae_strain_WHO_F_chromosome_1_g_2 | 53993 |
| 2818_Neisseria_gonorrhoeae_strain_WHO_F_chromosome_1_g_3 | 53994 |
| 2818_Neisseria_gonorrhoeae_strain_WHO_F_chromosome_1_g_4 | 53995 |
| 2818_Neisseria_gonorrhoeae_strain_WHO_F_chromosome_1_g_5 | 53996 |
| 2819_Neisseria_gonorrhoeae_strain_WHO_F_chromosome_1_g_1 | 53997 |
| 2819_Neisseria_gonorrhoeae_strain_WHO_F_chromosome_1_g_2 | 53998 |
| 2819_Neisseria_gonorrhoeae_strain_WHO_F_chromosome_1_g_3 | 53999 |
| 2819_Neisseria_gonorrhoeae_strain_WHO_F_chromosome_1_g_4 | 54000 |
| 2819_Neisseria_gonorrhoeae_strain_WHO_F_chromosome_1_g_5 | 54001 |
| 2820_Neisseria_gonorrhoeae_strain_WHO_F_chromosome_1_g_1 | 54002 |
| 2820_Neisseria_gonorrhoeae_strain_WHO_F_chromosome_1_g_2 | 54003 |
| 2820_Neisseria_gonorrhoeae_strain_WHO_F_chromosome_1_g_3 | 54004 |
| 2820_Neisseria_gonorrhoeae_strain_WHO_F_chromosome_1_g_4 | 54005 |
| 2820_Neisseria_gonorrhoeae_strain_WHO_F_chromosome_1_g_5 | 54006 |
| 2821_Neisseria_gonorrhoeae_strain_WHO_F_chromosome_1_g_1 | 54007 |
| 2821_Neisseria_gonorrhoeae_strain_WHO_F_chromosome_1_g_2 | 54008 |
| 2821_Neisseria_gonorrhoeae_strain_WHO_F_chromosome_1_g_3 | 54009 |
| 2821_Neisseria_gonorrhoeae_strain_WHO_F_chromosome_1_g_4 | 54010 |
| 2821_Neisseria_gonorrhoeae_strain_WHO_F_chromosome_1_g_5 | 54011 |
| 2822_Neisseria_gonorrhoeae_strain_WHO_F_chromosome_1_g_1 | 54012 |
| 2822_Neisseria_gonorrhoeae_strain_WHO_F_chromosome_1_g_2 | 54013 |
| 2822_Neisseria_gonorrhoeae_strain_WHO_F_chromosome_1_g_3 | 54014 |
| 2822_Neisseria_gonorrhoeae_strain_WHO_F_chromosome_1_g_4 | 54015 |
| 2822_Neisseria_gonorrhoeae_strain_WHO_F_chromosome_1_g_5 | 54016 |
| 2823_Neisseria_gonorrhoeae_strain_WHO_F_chromosome_1_g_1 | 54017 |
| 2823_Neisseria_gonorrhoeae_strain_WHO_F_chromosome_1_g_2 | 54018 |
| 2823_Neisseria_gonorrhoeae_strain_WHO_F_chromosome_1_g_3 | 54019 |
| 2823_Neisseria_gonorrhoeae_strain_WHO_F_chromosome_1_g_4 | 54020 |
| 2823_Neisseria_gonorrhoeae_strain_WHO_F_chromosome_1_g_5 | 54021 |
| 2824_Neisseria_gonorrhoeae_strain_WHO_F_chromosome_1_g_1 | 54022 |
| 2824_Neisseria_gonorrhoeae_strain_WHO_F_chromosome_1_g_2 | 54023 |
| 2824_Neisseria_gonorrhoeae_strain_WHO_F_chromosome_1_g_3 | 54024 |
| 2824_Neisseria_gonorrhoeae_strain_WHO_F_chromosome_1_g_4 | 54025 |
| 2824_Neisseria_gonorrhoeae_strain_WHO_F_chromosome_1_g_5 | 54026 |
| 2825_Neisseria_gonorrhoeae_strain_WHO_F_chromosome_1_g_1 | 54027 |
| 2825_Neisseria_gonorrhoeae_strain_WHO_F_chromosome_1_g_2 | 54028 |
| 2825_Neisseria_gonorrhoeae_strain_WHO_F_chromosome_1_g_3 | 54029 |
| 2825_Neisseria_gonorrhoeae_strain_WHO_F_chromosome_1_g_4 | 54030 |
| 2825_Neisseria_gonorrhoeae_strain_WHO_F_chromosome_1_g_5 | 54031 |
| 2826_Neisseria_gonorrhoeae_strain_WHO_F_chromosome_1_g_1 | 54032 |
| 2826_Neisseria_gonorrhoeae_strain_WHO_F_chromosome_1_g_2 | 54033 |
| 2826_Neisseria_gonorrhoeae_strain_WHO_F_chromosome_1_g_3 | 54034 |
| 2826_Neisseria_gonorrhoeae_strain_WHO_F_chromosome_1_g_4 | 54035 |
| 2826_Neisseria_gonorrhoeae_strain_WHO_F_chromosome_1_g_5 | 54036 |
| 2827_Neisseria_gonorrhoeae_strain_WHO_F_chromosome_1_g_1 | 54037 |
| 2827_Neisseria_gonorrhoeae_strain_WHO_F_chromosome_1_g_2 | 54038 |
| 2827_Neisseria_gonorrhoeae_strain_WHO_F_chromosome_1_g_3 | 54039 |
| 2827_Neisseria_gonorrhoeae_strain_WHO_F_chromosome_1_g_4 | 54040 |
| 2827_Neisseria_gonorrhoeae_strain_WHO_F_chromosome_1_g_5 | 54041 |
| 2828_Neisseria_gonorrhoeae_strain_WHO_F_chromosome_1_g_1 | 54042 |
| 2828_Neisseria_gonorrhoeae_strain_WHO_F_chromosome_1_g_2 | 54043 |
| 2828_Neisseria_gonorrhoeae_strain_WHO_F_chromosome_1_g_3 | 54044 |
| 2828_Neisseria_gonorrhoeae_strain_WHO_F_chromosome_1_g_4 | 54045 |
| 2829_Neisseria_gonorrhoeae_strain_WHO_F_chromosome_1_g_1 | 54046 |
| 2829_Neisseria_gonorrhoeae_strain_WHO_F_chromosome_1_g_2 | 54047 |
| 2829_Neisseria_gonorrhoeae_strain_WHO_F_chromosome_1_g_3 | 54048 |
| 2829_Neisseria_gonorrhoeae_strain_WHO_F_chromosome_1_g_4 | 54049 |
| 2829_Neisseria_gonorrhoeae_strain_WHO_F_chromosome_1_g_5 | 54050 |
| 2830_Neisseria_gonorrhoeae_strain_WHO_F_chromosome_1_g_1 | 54051 |
| 2830_Neisseria_gonorrhoeae_strain_WHO_F_chromosome_1_g_2 | 54052 |
| 2830_Neisseria_gonorrhoeae_strain_WHO_F_chromosome_1_g_3 | 54053 |
| 2830_Neisseria_gonorrhoeae_strain_WHO_F_chromosome_1_g_4 | 54054 |
| 2830_Neisseria_gonorrhoeae_strain_WHO_F_chromosome_1_g_5 | 54055 |
| 2831_Neisseria_gonorrhoeae_strain_WHO_F_chromosome_1_g_1 | 54056 |
| 2831_Neisseria_gonorrhoeae_strain_WHO_F_chromosome_1_g_2 | 54057 |
| 2831_Neisseria_gonorrhoeae_strain_WHO_F_chromosome_1_g_3 | 54058 |
| 2831_Neisseria_gonorrhoeae_strain_WHO_F_chromosome_1_g_4 | 54059 |
| 2831_Neisseria_gonorrhoeae_strain_WHO_F_chromosome_1_g_5 | 54060 |
| 2832_Neisseria_gonorrhoeae_strain_WHO_F_chromosome_1_g_1 | 54061 |
| 2832_Neisseria_gonorrhoeae_strain_WHO_F_chromosome_1_g_2 | 54062 |
| 2832_Neisseria_gonorrhoeae_strain_WHO_F_chromosome_1_g_3 | 54063 |
| 2832_Neisseria_gonorrhoeae_strain_WHO_F_chromosome_1_g_4 | 54064 |
| 2832_Neisseria_gonorrhoeae_strain_WHO_F_chromosome_1_g_5 | 54065 |
| 2833_Neisseria_gonorrhoeae_strain_WHO_F_chromosome_1_g_1 | 54066 |
| 2833_Neisseria_gonorrhoeae_strain_WHO_F_chromosome_1_g_2 | 54067 |
| 2833_Neisseria_gonorrhoeae_strain_WHO_F_chromosome_1_g_3 | 54068 |
| 2833_Neisseria_gonorrhoeae_strain_WHO_F_chromosome_1_g_4 | 54069 |
| 2833_Neisseria_gonorrhoeae_strain_WHO_F_chromosome_1_g_5 | 54070 |
| 2834_Neisseria_gonorrhoeae_strain_WHO_F_chromosome_1_g_1 | 54071 |
| 2834_Neisseria_gonorrhoeae_strain_WHO_F_chromosome_1_g_2 | 54072 |
| 2834_Neisseria_gonorrhoeae_strain_WHO_F_chromosome_1_g_3 | 54073 |
| 2834_Neisseria_gonorrhoeae_strain_WHO_F_chromosome_1_g_4 | 54074 |
| 2834_Neisseria_gonorrhoeae_strain_WHO_F_chromosome_1_g_5 | 54075 |
| 2835_Neisseria_gonorrhoeae_strain_WHO_F_chromosome_1_g_1 | 54076 |
| 2835_Neisseria_gonorrhoeae_strain_WHO_F_chromosome_1_g_2 | 54077 |
| 2835_Neisseria_gonorrhoeae_strain_WHO_F_chromosome_1_g_3 | 54078 |
| 2835_Neisseria_gonorrhoeae_strain_WHO_F_chromosome_1_g_4 | 54079 |
| 2835_Neisseria_gonorrhoeae_strain_WHO_F_chromosome_1_g_5 | 54080 |
| 2836_Neisseria_gonorrhoeae_strain_WHO_F_chromosome_1_g_1 | 54081 |
| 2836_Neisseria_gonorrhoeae_strain_WHO_F_chromosome_1_g_2 | 54082 |
| 2836_Neisseria_gonorrhoeae_strain_WHO_F_chromosome_1_g_3 | 54083 |
| 2836_Neisseria_gonorrhoeae_strain_WHO_F_chromosome_1_g_4 | 54084 |
| 2836_Neisseria_gonorrhoeae_strain_WHO_F_chromosome_1_g_5 | 54085 |
| 2837_Neisseria_gonorrhoeae_strain_WHO_F_chromosome_1_g_1 | 54086 |
| 2837_Neisseria_gonorrhoeae_strain_WHO_F_chromosome_1_g_2 | 54087 |
| 2837_Neisseria_gonorrhoeae_strain_WHO_F_chromosome_1_g_3 | 54088 |
| 2837_Neisseria_gonorrhoeae_strain_WHO_F_chromosome_1_g_4 | 54089 |
| 2837_Neisseria_gonorrhoeae_strain_WHO_F_chromosome_1_g_5 | 54090 |
| 2838_Neisseria_gonorrhoeae_strain_WHO_F_chromosome_1_g_1 | 54091 |
| 2838_Neisseria_gonorrhoeae_strain_WHO_F_chromosome_1_g_2 | 54092 |
| 2838_Neisseria_gonorrhoeae_strain_WHO_F_chromosome_1_g_3 | 54093 |
| 2838_Neisseria_gonorrhoeae_strain_WHO_F_chromosome_1_g_4 | 54094 |
| 2839_Neisseria_gonorrhoeae_strain_WHO_F_chromosome_1_g_1 | 54095 |
| 2839_Neisseria_gonorrhoeae_strain_WHO_F_chromosome_1_g_2 | 54096 |
| 2839_Neisseria_gonorrhoeae_strain_WHO_F_chromosome_1_g_3 | 54097 |
| 2839_Neisseria_gonorrhoeae_strain_WHO_F_chromosome_1_g_4 | 54098 |
| 2839_Neisseria_gonorrhoeae_strain_WHO_F_chromosome_1_g_5 | 54099 |
| 2840_Neisseria_gonorrhoeae_strain_WHO_F_chromosome_1_g_1 | 54100 |
| 2840_Neisseria_gonorrhoeae_strain_WHO_F_chromosome_1_g_2 | 54101 |
| 2840_Neisseria_gonorrhoeae_strain_WHO_F_chromosome_1_g_3 | 54102 |
| 2840_Neisseria_gonorrhoeae_strain_WHO_F_chromosome_1_g_4 | 54103 |
| 2840_Neisseria_gonorrhoeae_strain_WHO_F_chromosome_1_g_5 | 54104 |
| 2841_Neisseria_gonorrhoeae_strain_WHO_F_chromosome_1_g_1 | 54105 |
| 2841_Neisseria_gonorrhoeae_strain_WHO_F_chromosome_1_g_2 | 54106 |
| 2841_Neisseria_gonorrhoeae_strain_WHO_F_chromosome_1_g_3 | 54107 |
| 2841_Neisseria_gonorrhoeae_strain_WHO_F_chromosome_1_g_4 | 54108 |
| 2841_Neisseria_gonorrhoeae_strain_WHO_F_chromosome_1_g_5 | 54109 |
| 2842_Neisseria_gonorrhoeae_strain_WHO_F_chromosome_1_g_1 | 54110 |
| 2842_Neisseria_gonorrhoeae_strain_WHO_F_chromosome_1_g_2 | 54111 |
| 2842_Neisseria_gonorrhoeae_strain_WHO_F_chromosome_1_g_3 | 54112 |
| 2842_Neisseria_gonorrhoeae_strain_WHO_F_chromosome_1_g_4 | 54113 |
| 2842_Neisseria_gonorrhoeae_strain_WHO_F_chromosome_1_g_5 | 54114 |
| 2843_Neisseria_gonorrhoeae_strain_WHO_F_chromosome_1_g_1 | 54115 |
| 2843_Neisseria_gonorrhoeae_strain_WHO_F_chromosome_1_g_2 | 54116 |
| 2843_Neisseria_gonorrhoeae_strain_WHO_F_chromosome_1_g_3 | 54117 |
| 2843_Neisseria_gonorrhoeae_strain_WHO_F_chromosome_1_g_4 | 54118 |
| 2843_Neisseria_gonorrhoeae_strain_WHO_F_chromosome_1_g_5 | 54119 |
| 2844_Neisseria_gonorrhoeae_strain_WHO_F_chromosome_1_g_1 | 54120 |
| 2844_Neisseria_gonorrhoeae_strain_WHO_F_chromosome_1_g_2 | 54121 |
| 2844_Neisseria_gonorrhoeae_strain_WHO_F_chromosome_1_g_3 | 54122 |
| 2844_Neisseria_gonorrhoeae_strain_WHO_F_chromosome_1_g_4 | 54123 |
| 2844_Neisseria_gonorrhoeae_strain_WHO_F_chromosome_1_g_5 | 54124 |
| 2845_Neisseria_gonorrhoeae_strain_WHO_F_chromosome_1_g_1 | 54125 |
| 2845_Neisseria_gonorrhoeae_strain_WHO_F_chromosome_1_g_2 | 54126 |
| 2845_Neisseria_gonorrhoeae_strain_WHO_F_chromosome_1_g_3 | 54127 |
| 2845_Neisseria_gonorrhoeae_strain_WHO_F_chromosome_1_g_4 | 54128 |
| 2845_Neisseria_gonorrhoeae_strain_WHO_F_chromosome_1_g_5 | 54129 |
| 2846_Neisseria_gonorrhoeae_strain_WHO_F_chromosome_1_g_1 | 54130 |
| 2846_Neisseria_gonorrhoeae_strain_WHO_F_chromosome_1_g_2 | 54131 |
| 2846_Neisseria_gonorrhoeae_strain_WHO_F_chromosome_1_g_3 | 54132 |
| 2846_Neisseria_gonorrhoeae_strain_WHO_F_chromosome_1_g_4 | 54133 |
| 2846_Neisseria_gonorrhoeae_strain_WHO_F_chromosome_1_g_5 | 54134 |
| 2847_Neisseria_gonorrhoeae_strain_WHO_F_chromosome_1_g_1 | 54135 |
| 2847_Neisseria_gonorrhoeae_strain_WHO_F_chromosome_1_g_2 | 54136 |
| 2847_Neisseria_gonorrhoeae_strain_WHO_F_chromosome_1_g_3 | 54137 |
| 2847_Neisseria_gonorrhoeae_strain_WHO_F_chromosome_1_g_4 | 54138 |
| 2847_Neisseria_gonorrhoeae_strain_WHO_F_chromosome_1_g_5 | 54139 |
| 2848_Neisseria_gonorrhoeae_strain_WHO_F_chromosome_1_g_1 | 54140 |
| 2848_Neisseria_gonorrhoeae_strain_WHO_F_chromosome_1_g_2 | 54141 |
| 2848_Neisseria_gonorrhoeae_strain_WHO_F_chromosome_1_g_3 | 54142 |
| 2848_Neisseria_gonorrhoeae_strain_WHO_F_chromosome_1_g_4 | 54143 |
| 2848_Neisseria_gonorrhoeae_strain_WHO_F_chromosome_1_g_5 | 54144 |
| 2849_Neisseria_gonorrhoeae_strain_WHO_F_chromosome_1_g_1 | 54145 |
| 2849_Neisseria_gonorrhoeae_strain_WHO_F_chromosome_1_g_2 | 54146 |
| 2849_Neisseria_gonorrhoeae_strain_WHO_F_chromosome_1_g_3 | 54147 |
| 2849_Neisseria_gonorrhoeae_strain_WHO_F_chromosome_1_g_4 | 54148 |
| 2849_Neisseria_gonorrhoeae_strain_WHO_F_chromosome_1_g_5 | 54149 |
| 2850_Neisseria_gonorrhoeae_strain_WHO_F_chromosome_1_g_1 | 54150 |
| 2850_Neisseria_gonorrhoeae_strain_WHO_F_chromosome_1_g_2 | 54151 |
| 2850_Neisseria_gonorrhoeae_strain_WHO_F_chromosome_1_g_3 | 54152 |
| 2850_Neisseria_gonorrhoeae_strain_WHO_F_chromosome_1_g_4 | 54153 |
| 2850_Neisseria_gonorrhoeae_strain_WHO_F_chromosome_1_g_5 | 54154 |
| 2851_Neisseria_gonorrhoeae_strain_WHO_F_chromosome_1_g_1 | 54155 |
| 2851_Neisseria_gonorrhoeae_strain_WHO_F_chromosome_1_g_2 | 54156 |
| 2851_Neisseria_gonorrhoeae_strain_WHO_F_chromosome_1_g_3 | 54157 |
| 2852_Neisseria_gonorrhoeae_strain_WHO_F_chromosome_1_g_1 | 54158 |
| 2852_Neisseria_gonorrhoeae_strain_WHO_F_chromosome_1_g_2 | 54159 |
| 2852_Neisseria_gonorrhoeae_strain_WHO_F_chromosome_1_g_3 | 54160 |
| 2852_Neisseria_gonorrhoeae_strain_WHO_F_chromosome_1_g_4 | 54161 |
| 2852_Neisseria_gonorrhoeae_strain_WHO_F_chromosome_1_g_5 | 54162 |
| 2853_Neisseria_gonorrhoeae_strain_WHO_F_chromosome_1_g_1 | 54163 |
| 2853_Neisseria_gonorrhoeae_strain_WHO_F_chromosome_1_g_2 | 54164 |
| 2853_Neisseria_gonorrhoeae_strain_WHO_F_chromosome_1_g_3 | 54165 |
| 2853_Neisseria_gonorrhoeae_strain_WHO_F_chromosome_1_g_4 | 54166 |
| 2853_Neisseria_gonorrhoeae_strain_WHO_F_chromosome_1_g_5 | 54167 |
| 2854_Neisseria_gonorrhoeae_strain_WHO_F_chromosome_1_g_1 | 54168 |
| 2854_Neisseria_gonorrhoeae_strain_WHO_F_chromosome_1_g_2 | 54169 |
| 2854_Neisseria_gonorrhoeae_strain_WHO_F_chromosome_1_g_3 | 54170 |
| 2854_Neisseria_gonorrhoeae_strain_WHO_F_chromosome_1_g_4 | 54171 |
| 2854_Neisseria_gonorrhoeae_strain_WHO_F_chromosome_1_g_5 | 54172 |
| 2855_Neisseria_gonorrhoeae_strain_WHO_F_chromosome_1_g_1 | 54173 |
| 2855_Neisseria_gonorrhoeae_strain_WHO_F_chromosome_1_g_2 | 54174 |
| 2855_Neisseria_gonorrhoeae_strain_WHO_F_chromosome_1_g_3 | 54175 |
| 2855_Neisseria_gonorrhoeae_strain_WHO_F_chromosome_1_g_4 | 54176 |
| 2855_Neisseria_gonorrhoeae_strain_WHO_F_chromosome_1_g_5 | 54177 |
| 2856_Neisseria_gonorrhoeae_strain_WHO_F_chromosome_1_g_1 | 54178 |
| 2856_Neisseria_gonorrhoeae_strain_WHO_F_chromosome_1_g_2 | 54179 |
| 2856_Neisseria_gonorrhoeae_strain_WHO_F_chromosome_1_g_3 | 54180 |
| 2856_Neisseria_gonorrhoeae_strain_WHO_F_chromosome_1_g_4 | 54181 |
| 2856_Neisseria_gonorrhoeae_strain_WHO_F_chromosome_1_g_5 | 54182 |
| 2857_Neisseria_gonorrhoeae_strain_WHO_F_chromosome_1_g_1 | 54183 |
| 2857_Neisseria_gonorrhoeae_strain_WHO_F_chromosome_1_g_2 | 54184 |
| 2857_Neisseria_gonorrhoeae_strain_WHO_F_chromosome_1_g_3 | 54185 |
| 2857_Neisseria_gonorrhoeae_strain_WHO_F_chromosome_1_g_4 | 54186 |
| 2857_Neisseria_gonorrhoeae_strain_WHO_F_chromosome_1_g_5 | 54187 |
| 2858_Neisseria_gonorrhoeae_strain_WHO_F_chromosome_1_g_1 | 54188 |
| 2858_Neisseria_gonorrhoeae_strain_WHO_F_chromosome_1_g_2 | 54189 |
| 2858_Neisseria_gonorrhoeae_strain_WHO_F_chromosome_1_g_3 | 54190 |
| 2858_Neisseria_gonorrhoeae_strain_WHO_F_chromosome_1_g_4 | 54191 |
| 2858_Neisseria_gonorrhoeae_strain_WHO_F_chromosome_1_g_5 | 54192 |
| 2859_Neisseria_gonorrhoeae_strain_WHO_F_chromosome_1_g_1 | 54193 |
| 2859_Neisseria_gonorrhoeae_strain_WHO_F_chromosome_1_g_2 | 54194 |
| 2859_Neisseria_gonorrhoeae_strain_WHO_F_chromosome_1_g_3 | 54195 |
| 2859_Neisseria_gonorrhoeae_strain_WHO_F_chromosome_1_g_4 | 54196 |
| 2859_Neisseria_gonorrhoeae_strain_WHO_F_chromosome_1_g_5 | 54197 |
| 2860_Neisseria_gonorrhoeae_strain_WHO_F_chromosome_1_g_1 | 54198 |
| 2860_Neisseria_gonorrhoeae_strain_WHO_F_chromosome_1_g_2 | 54199 |
| 2860_Neisseria_gonorrhoeae_strain_WHO_F_chromosome_1_g_3 | 54200 |
| 2860_Neisseria_gonorrhoeae_strain_WHO_F_chromosome_1_g_4 | 54201 |
| 2860_Neisseria_gonorrhoeae_strain_WHO_F_chromosome_1_g_5 | 54202 |
| 2861_Neisseria_gonorrhoeae_strain_WHO_F_chromosome_1_g_1 | 54203 |
| 2861_Neisseria_gonorrhoeae_strain_WHO_F_chromosome_1_g_2 | 54204 |
| 2861_Neisseria_gonorrhoeae_strain_WHO_F_chromosome_1_g_3 | 54205 |
| 2861_Neisseria_gonorrhoeae_strain_WHO_F_chromosome_1_g_4 | 54206 |
| 2861_Neisseria_gonorrhoeae_strain_WHO_F_chromosome_1_g_5 | 54207 |
| 2862_Neisseria_gonorrhoeae_strain_WHO_F_chromosome_1_g_1 | 54208 |
| 2862_Neisseria_gonorrhoeae_strain_WHO_F_chromosome_1_g_2 | 54209 |
| 2862_Neisseria_gonorrhoeae_strain_WHO_F_chromosome_1_g_3 | 54210 |
| 2862_Neisseria_gonorrhoeae_strain_WHO_F_chromosome_1_g_4 | 54211 |
| 2862_Neisseria_gonorrhoeae_strain_WHO_F_chromosome_1_g_5 | 54212 |
| 2863_Neisseria_gonorrhoeae_strain_WHO_F_chromosome_1_g_1 | 54213 |
| 2863_Neisseria_gonorrhoeae_strain_WHO_F_chromosome_1_g_2 | 54214 |
| 2863_Neisseria_gonorrhoeae_strain_WHO_F_chromosome_1_g_3 | 54215 |
| 2863_Neisseria_gonorrhoeae_strain_WHO_F_chromosome_1_g_4 | 54216 |
| 2863_Neisseria_gonorrhoeae_strain_WHO_F_chromosome_1_g_5 | 54217 |
| 2864_Neisseria_gonorrhoeae_strain_WHO_F_chromosome_1_g_1 | 54218 |
| 2864_Neisseria_gonorrhoeae_strain_WHO_F_chromosome_1_g_2 | 54219 |
| 2864_Neisseria_gonorrhoeae_strain_WHO_F_chromosome_1_g_3 | 54220 |
| 2864_Neisseria_gonorrhoeae_strain_WHO_F_chromosome_1_g_4 | 54221 |
| 2864_Neisseria_gonorrhoeae_strain_WHO_F_chromosome_1_g_5 | 54222 |
| 2865_Neisseria_gonorrhoeae_strain_WHO_F_chromosome_1_g_1 | 54223 |
| 2865_Neisseria_gonorrhoeae_strain_WHO_F_chromosome_1_g_2 | 54224 |
| 2865_Neisseria_gonorrhoeae_strain_WHO_F_chromosome_1_g_3 | 54225 |
| 2865_Neisseria_gonorrhoeae_strain_WHO_F_chromosome_1_g_4 | 54226 |
| 2865_Neisseria_gonorrhoeae_strain_WHO_F_chromosome_1_g_5 | 54227 |
| 2866_Neisseria_gonorrhoeae_strain_WHO_F_chromosome_1_g_1 | 54228 |
| 2866_Neisseria_gonorrhoeae_strain_WHO_F_chromosome_1_g_2 | 54229 |
| 2866_Neisseria_gonorrhoeae_strain_WHO_F_chromosome_1_g_3 | 54230 |
| 2866_Neisseria_gonorrhoeae_strain_WHO_F_chromosome_1_g_4 | 54231 |
| 2866_Neisseria_gonorrhoeae_strain_WHO_F_chromosome_1_g_5 | 54232 |
| 2867_Neisseria_gonorrhoeae_strain_WHO_F_chromosome_1_g_1 | 54233 |
| 2867_Neisseria_gonorrhoeae_strain_WHO_F_chromosome_1_g_2 | 54234 |
| 2867_Neisseria_gonorrhoeae_strain_WHO_F_chromosome_1_g_3 | 54235 |
| 2867_Neisseria_gonorrhoeae_strain_WHO_F_chromosome_1_g_4 | 54236 |
| 2867_Neisseria_gonorrhoeae_strain_WHO_F_chromosome_1_g_5 | 54237 |
| 2868_Neisseria_gonorrhoeae_strain_WHO_F_chromosome_1_g_1 | 54238 |
| 2868_Neisseria_gonorrhoeae_strain_WHO_F_chromosome_1_g_2 | 54239 |
| 2868_Neisseria_gonorrhoeae_strain_WHO_F_chromosome_1_g_3 | 54240 |
| 2868_Neisseria_gonorrhoeae_strain_WHO_F_chromosome_1_g_4 | 54241 |
| 2868_Neisseria_gonorrhoeae_strain_WHO_F_chromosome_1_g_5 | 54242 |
| 2869_Neisseria_gonorrhoeae_strain_WHO_F_chromosome_1_g_1 | 54243 |
| 2869_Neisseria_gonorrhoeae_strain_WHO_F_chromosome_1_g_2 | 54244 |
| 2869_Neisseria_gonorrhoeae_strain_WHO_F_chromosome_1_g_3 | 54245 |
| 2869_Neisseria_gonorrhoeae_strain_WHO_F_chromosome_1_g_4 | 54246 |
| 2869_Neisseria_gonorrhoeae_strain_WHO_F_chromosome_1_g_5 | 54247 |
| 2870_Neisseria_gonorrhoeae_strain_WHO_F_chromosome_1_g_1 | 54248 |
| 2870_Neisseria_gonorrhoeae_strain_WHO_F_chromosome_1_g_2 | 54249 |
| 2870_Neisseria_gonorrhoeae_strain_WHO_F_chromosome_1_g_3 | 54250 |
| 2870_Neisseria_gonorrhoeae_strain_WHO_F_chromosome_1_g_4 | 54251 |
| 2870_Neisseria_gonorrhoeae_strain_WHO_F_chromosome_1_g_5 | 54252 |
| 2871_Neisseria_gonorrhoeae_strain_WHO_F_chromosome_1_g_1 | 54253 |
| 2871_Neisseria_gonorrhoeae_strain_WHO_F_chromosome_1_g_2 | 54254 |
| 2871_Neisseria_gonorrhoeae_strain_WHO_F_chromosome_1_g_3 | 54255 |
| 2871_Neisseria_gonorrhoeae_strain_WHO_F_chromosome_1_g_4 | 54256 |
| 2871_Neisseria_gonorrhoeae_strain_WHO_F_chromosome_1_g_5 | 54257 |
| 2872_Neisseria_gonorrhoeae_strain_WHO_F_chromosome_1_g_1 | 54258 |
| 2872_Neisseria_gonorrhoeae_strain_WHO_F_chromosome_1_g_2 | 54259 |
| 2872_Neisseria_gonorrhoeae_strain_WHO_F_chromosome_1_g_3 | 54260 |
| 2872_Neisseria_gonorrhoeae_strain_WHO_F_chromosome_1_g_4 | 54261 |
| 2872_Neisseria_gonorrhoeae_strain_WHO_F_chromosome_1_g_5 | 54262 |
| 2873_Neisseria_gonorrhoeae_strain_WHO_F_chromosome_1_g_1 | 54263 |
| 2873_Neisseria_gonorrhoeae_strain_WHO_F_chromosome_1_g_2 | 54264 |
| 2873_Neisseria_gonorrhoeae_strain_WHO_F_chromosome_1_g_3 | 54265 |
| 2874_Neisseria_gonorrhoeae_strain_WHO_F_chromosome_1_g_1 | 54266 |
| 2874_Neisseria_gonorrhoeae_strain_WHO_F_chromosome_1_g_2 | 54267 |
| 2874_Neisseria_gonorrhoeae_strain_WHO_F_chromosome_1_g_3 | 54268 |
| 2874_Neisseria_gonorrhoeae_strain_WHO_F_chromosome_1_g_4 | 54269 |
| 2874_Neisseria_gonorrhoeae_strain_WHO_F_chromosome_1_g_5 | 54270 |
| 2875_Neisseria_gonorrhoeae_strain_WHO_F_chromosome_1_g_1 | 54271 |
| 2875_Neisseria_gonorrhoeae_strain_WHO_F_chromosome_1_g_2 | 54272 |
| 2875_Neisseria_gonorrhoeae_strain_WHO_F_chromosome_1_g_3 | 54273 |
| 2875_Neisseria_gonorrhoeae_strain_WHO_F_chromosome_1_g_4 | 54274 |
| 2875_Neisseria_gonorrhoeae_strain_WHO_F_chromosome_1_g_5 | 54275 |
| 2876_Neisseria_gonorrhoeae_strain_WHO_F_chromosome_1_g_1 | 54276 |
| 2876_Neisseria_gonorrhoeae_strain_WHO_F_chromosome_1_g_2 | 54277 |
| 2876_Neisseria_gonorrhoeae_strain_WHO_F_chromosome_1_g_3 | 54278 |
| 2876_Neisseria_gonorrhoeae_strain_WHO_F_chromosome_1_g_4 | 54279 |
| 2876_Neisseria_gonorrhoeae_strain_WHO_F_chromosome_1_g_5 | 54280 |
| 2877_Neisseria_gonorrhoeae_strain_WHO_F_chromosome_1_g_1 | 54281 |
| 2877_Neisseria_gonorrhoeae_strain_WHO_F_chromosome_1_g_2 | 54282 |
| 2877_Neisseria_gonorrhoeae_strain_WHO_F_chromosome_1_g_3 | 54283 |
| 2877_Neisseria_gonorrhoeae_strain_WHO_F_chromosome_1_g_4 | 54284 |
| 2877_Neisseria_gonorrhoeae_strain_WHO_F_chromosome_1_g_5 | 54285 |
| 2878_Neisseria_gonorrhoeae_strain_WHO_F_chromosome_1_g_1 | 54286 |
| 2878_Neisseria_gonorrhoeae_strain_WHO_F_chromosome_1_g_2 | 54287 |
| 2878_Neisseria_gonorrhoeae_strain_WHO_F_chromosome_1_g_3 | 54288 |
| 2878_Neisseria_gonorrhoeae_strain_WHO_F_chromosome_1_g_4 | 54289 |
| 2878_Neisseria_gonorrhoeae_strain_WHO_F_chromosome_1_g_5 | 54290 |
| 2879_Neisseria_gonorrhoeae_strain_WHO_F_chromosome_1_g_1 | 54291 |
| 2879_Neisseria_gonorrhoeae_strain_WHO_F_chromosome_1_g_2 | 54292 |
| 2879_Neisseria_gonorrhoeae_strain_WHO_F_chromosome_1_g_3 | 54293 |
| 2879_Neisseria_gonorrhoeae_strain_WHO_F_chromosome_1_g_4 | 54294 |
| 2879_Neisseria_gonorrhoeae_strain_WHO_F_chromosome_1_g_5 | 54295 |
| 2880_Neisseria_gonorrhoeae_strain_WHO_F_chromosome_1_g_1 | 54296 |
| 2880_Neisseria_gonorrhoeae_strain_WHO_F_chromosome_1_g_2 | 54297 |
| 2880_Neisseria_gonorrhoeae_strain_WHO_F_chromosome_1_g_3 | 54298 |
| 2880_Neisseria_gonorrhoeae_strain_WHO_F_chromosome_1_g_4 | 54299 |
| 2880_Neisseria_gonorrhoeae_strain_WHO_F_chromosome_1_g_5 | 54300 |
| 2881_Neisseria_gonorrhoeae_strain_WHO_F_chromosome_1_g_1 | 54301 |
| 2881_Neisseria_gonorrhoeae_strain_WHO_F_chromosome_1_g_2 | 54302 |
| 2881_Neisseria_gonorrhoeae_strain_WHO_F_chromosome_1_g_3 | 54303 |
| 2881_Neisseria_gonorrhoeae_strain_WHO_F_chromosome_1_g_4 | 54304 |
| 2881_Neisseria_gonorrhoeae_strain_WHO_F_chromosome_1_g_5 | 54305 |
| 2882_Neisseria_gonorrhoeae_strain_WHO_F_chromosome_1_g_1 | 54306 |
| 2882_Neisseria_gonorrhoeae_strain_WHO_F_chromosome_1_g_2 | 54307 |
| 2882_Neisseria_gonorrhoeae_strain_WHO_F_chromosome_1_g_3 | 54308 |
| 2882_Neisseria_gonorrhoeae_strain_WHO_F_chromosome_1_g_4 | 54309 |
| 2882_Neisseria_gonorrhoeae_strain_WHO_F_chromosome_1_g_5 | 54310 |
| 2883_Neisseria_gonorrhoeae_strain_WHO_F_chromosome_1_g_1 | 54311 |
| 2883_Neisseria_gonorrhoeae_strain_WHO_F_chromosome_1_g_2 | 54312 |
| 2883_Neisseria_gonorrhoeae_strain_WHO_F_chromosome_1_g_3 | 54313 |
| 2883_Neisseria_gonorrhoeae_strain_WHO_F_chromosome_1_g_4 | 54314 |
| 2883_Neisseria_gonorrhoeae_strain_WHO_F_chromosome_1_g_5 | 54315 |
| 2884_Neisseria_gonorrhoeae_strain_WHO_F_chromosome_1_g_1 | 54316 |
| 2884_Neisseria_gonorrhoeae_strain_WHO_F_chromosome_1_g_2 | 54317 |
| 2884_Neisseria_gonorrhoeae_strain_WHO_F_chromosome_1_g_3 | 54318 |
| 2884_Neisseria_gonorrhoeae_strain_WHO_F_chromosome_1_g_4 | 54319 |
| 2884_Neisseria_gonorrhoeae_strain_WHO_F_chromosome_1_g_5 | 54320 |
| 2885_Neisseria_gonorrhoeae_strain_WHO_F_chromosome_1_g_1 | 54321 |
| 2885_Neisseria_gonorrhoeae_strain_WHO_F_chromosome_1_g_2 | 54322 |
| 2885_Neisseria_gonorrhoeae_strain_WHO_F_chromosome_1_g_3 | 54323 |
| 2885_Neisseria_gonorrhoeae_strain_WHO_F_chromosome_1_g_4 | 54324 |
| 2885_Neisseria_gonorrhoeae_strain_WHO_F_chromosome_1_g_5 | 54325 |
| 2886_Neisseria_gonorrhoeae_strain_WHO_F_chromosome_1_g_1 | 54326 |
| 2886_Neisseria_gonorrhoeae_strain_WHO_F_chromosome_1_g_2 | 54327 |
| 2886_Neisseria_gonorrhoeae_strain_WHO_F_chromosome_1_g_3 | 54328 |
| 2886_Neisseria_gonorrhoeae_strain_WHO_F_chromosome_1_g_4 | 54329 |
| 2886_Neisseria_gonorrhoeae_strain_WHO_F_chromosome_1_g_5 | 54330 |
| 2887_Neisseria_gonorrhoeae_strain_WHO_F_chromosome_1_g_1 | 54331 |
| 2887_Neisseria_gonorrhoeae_strain_WHO_F_chromosome_1_g_2 | 54332 |
| 2887_Neisseria_gonorrhoeae_strain_WHO_F_chromosome_1_g_3 | 54333 |
| 2887_Neisseria_gonorrhoeae_strain_WHO_F_chromosome_1_g_4 | 54334 |
| 2887_Neisseria_gonorrhoeae_strain_WHO_F_chromosome_1_g_5 | 54335 |
| 2888_Neisseria_gonorrhoeae_strain_WHO_F_chromosome_1_g_1 | 54336 |
| 2888_Neisseria_gonorrhoeae_strain_WHO_F_chromosome_1_g_2 | 54337 |
| 2888_Neisseria_gonorrhoeae_strain_WHO_F_chromosome_1_g_3 | 54338 |
| 2888_Neisseria_gonorrhoeae_strain_WHO_F_chromosome_1_g_4 | 54339 |
| 2888_Neisseria_gonorrhoeae_strain_WHO_F_chromosome_1_g_5 | 54340 |
| 2889_Neisseria_gonorrhoeae_strain_WHO_F_chromosome_1_g_1 | 54341 |
| 2889_Neisseria_gonorrhoeae_strain_WHO_F_chromosome_1_g_2 | 54342 |
| 2889_Neisseria_gonorrhoeae_strain_WHO_F_chromosome_1_g_3 | 54343 |
| 2889_Neisseria_gonorrhoeae_strain_WHO_F_chromosome_1_g_4 | 54344 |
| 2889_Neisseria_gonorrhoeae_strain_WHO_F_chromosome_1_g_5 | 54345 |
| 2890_Neisseria_gonorrhoeae_strain_WHO_F_chromosome_1_g_1 | 54346 |
| 2890_Neisseria_gonorrhoeae_strain_WHO_F_chromosome_1_g_2 | 54347 |
| 2890_Neisseria_gonorrhoeae_strain_WHO_F_chromosome_1_g_3 | 54348 |
| 2890_Neisseria_gonorrhoeae_strain_WHO_F_chromosome_1_g_4 | 54349 |
| 2890_Neisseria_gonorrhoeae_strain_WHO_F_chromosome_1_g_5 | 54350 |
| 2891_Neisseria_gonorrhoeae_strain_WHO_F_chromosome_1_g_1 | 54351 |
| 2891_Neisseria_gonorrhoeae_strain_WHO_F_chromosome_1_g_2 | 54352 |
| 2891_Neisseria_gonorrhoeae_strain_WHO_F_chromosome_1_g_3 | 54353 |
| 2891_Neisseria_gonorrhoeae_strain_WHO_F_chromosome_1_g_4 | 54354 |
| 2891_Neisseria_gonorrhoeae_strain_WHO_F_chromosome_1_g_5 | 54355 |
| 2892_Neisseria_gonorrhoeae_strain_WHO_F_chromosome_1_g_1 | 54356 |
| 2892_Neisseria_gonorrhoeae_strain_WHO_F_chromosome_1_g_2 | 54357 |
| 2892_Neisseria_gonorrhoeae_strain_WHO_F_chromosome_1_g_3 | 54358 |
| 2892_Neisseria_gonorrhoeae_strain_WHO_F_chromosome_1_g_4 | 54359 |
| 2892_Neisseria_gonorrhoeae_strain_WHO_F_chromosome_1_g_5 | 54360 |
| 2893_Neisseria_gonorrhoeae_strain_WHO_F_chromosome_1_g_1 | 54361 |
| 2893_Neisseria_gonorrhoeae_strain_WHO_F_chromosome_1_g_2 | 54362 |
| 2893_Neisseria_gonorrhoeae_strain_WHO_F_chromosome_1_g_3 | 54363 |
| 2893_Neisseria_gonorrhoeae_strain_WHO_F_chromosome_1_g_4 | 54364 |
| 2893_Neisseria_gonorrhoeae_strain_WHO_F_chromosome_1_g_5 | 54365 |
| 2894_Neisseria_gonorrhoeae_strain_WHO_F_chromosome_1_g_1 | 54366 |
| 2894_Neisseria_gonorrhoeae_strain_WHO_F_chromosome_1_g_2 | 54367 |
| 2894_Neisseria_gonorrhoeae_strain_WHO_F_chromosome_1_g_3 | 54368 |
| 2894_Neisseria_gonorrhoeae_strain_WHO_F_chromosome_1_g_4 | 54369 |
| 2894_Neisseria_gonorrhoeae_strain_WHO_F_chromosome_1_g_5 | 54370 |
| 2895_Neisseria_gonorrhoeae_strain_WHO_F_chromosome_1_g_1 | 54371 |
| 2895_Neisseria_gonorrhoeae_strain_WHO_F_chromosome_1_g_2 | 54372 |
| 2895_Neisseria_gonorrhoeae_strain_WHO_F_chromosome_1_g_3 | 54373 |
| 2895_Neisseria_gonorrhoeae_strain_WHO_F_chromosome_1_g_4 | 54374 |
| 2896_Neisseria_gonorrhoeae_strain_WHO_F_chromosome_1_g_1 | 54375 |
| 2896_Neisseria_gonorrhoeae_strain_WHO_F_chromosome_1_g_2 | 54376 |
| 2896_Neisseria_gonorrhoeae_strain_WHO_F_chromosome_1_g_3 | 54377 |
| 2896_Neisseria_gonorrhoeae_strain_WHO_F_chromosome_1_g_4 | 54378 |
| 2896_Neisseria_gonorrhoeae_strain_WHO_F_chromosome_1_g_5 | 54379 |
| 2897_Neisseria_gonorrhoeae_strain_WHO_F_chromosome_1_g_1 | 54380 |
| 2897_Neisseria_gonorrhoeae_strain_WHO_F_chromosome_1_g_2 | 54381 |
| 2897_Neisseria_gonorrhoeae_strain_WHO_F_chromosome_1_g_3 | 54382 |
| 2897_Neisseria_gonorrhoeae_strain_WHO_F_chromosome_1_g_4 | 54383 |
| 2897_Neisseria_gonorrhoeae_strain_WHO_F_chromosome_1_g_5 | 54384 |
| 2898_Neisseria_gonorrhoeae_strain_WHO_F_chromosome_1_g_1 | 54385 |
| 2898_Neisseria_gonorrhoeae_strain_WHO_F_chromosome_1_g_2 | 54386 |
| 2898_Neisseria_gonorrhoeae_strain_WHO_F_chromosome_1_g_3 | 54387 |
| 2898_Neisseria_gonorrhoeae_strain_WHO_F_chromosome_1_g_4 | 54388 |
| 2898_Neisseria_gonorrhoeae_strain_WHO_F_chromosome_1_g_5 | 54389 |
| 2899_Neisseria_gonorrhoeae_strain_WHO_F_chromosome_1_g_1 | 54390 |
| 2899_Neisseria_gonorrhoeae_strain_WHO_F_chromosome_1_g_2 | 54391 |
| 2899_Neisseria_gonorrhoeae_strain_WHO_F_chromosome_1_g_3 | 54392 |
| 2899_Neisseria_gonorrhoeae_strain_WHO_F_chromosome_1_g_4 | 54393 |
| 2899_Neisseria_gonorrhoeae_strain_WHO_F_chromosome_1_g_5 | 54394 |
| 2900_Neisseria_gonorrhoeae_strain_WHO_F_chromosome_1_g_1 | 54395 |
| 2900_Neisseria_gonorrhoeae_strain_WHO_F_chromosome_1_g_2 | 54396 |
| 2900_Neisseria_gonorrhoeae_strain_WHO_F_chromosome_1_g_3 | 54397 |
| 2900_Neisseria_gonorrhoeae_strain_WHO_F_chromosome_1_g_4 | 54398 |
| 2900_Neisseria_gonorrhoeae_strain_WHO_F_chromosome_1_g_5 | 54399 |
| 2901_Neisseria_gonorrhoeae_strain_WHO_F_chromosome_1_g_1 | 54400 |
| 2901_Neisseria_gonorrhoeae_strain_WHO_F_chromosome_1_g_2 | 54401 |
| 2901_Neisseria_gonorrhoeae_strain_WHO_F_chromosome_1_g_3 | 54402 |
| 2901_Neisseria_gonorrhoeae_strain_WHO_F_chromosome_1_g_4 | 54403 |
| 2901_Neisseria_gonorrhoeae_strain_WHO_F_chromosome_1_g_5 | 54404 |
| 2902_Neisseria_gonorrhoeae_strain_WHO_F_chromosome_1_g_1 | 54405 |
| 2902_Neisseria_gonorrhoeae_strain_WHO_F_chromosome_1_g_2 | 54406 |
| 2902_Neisseria_gonorrhoeae_strain_WHO_F_chromosome_1_g_3 | 54407 |
| 2902_Neisseria_gonorrhoeae_strain_WHO_F_chromosome_1_g_4 | 54408 |
| 2902_Neisseria_gonorrhoeae_strain_WHO_F_chromosome_1_g_5 | 54409 |
| 2903_Neisseria_gonorrhoeae_strain_WHO_F_chromosome_1_g_1 | 54410 |
| 2903_Neisseria_gonorrhoeae_strain_WHO_F_chromosome_1_g_2 | 54411 |
| 2903_Neisseria_gonorrhoeae_strain_WHO_F_chromosome_1_g_3 | 54412 |
| 2903_Neisseria_gonorrhoeae_strain_WHO_F_chromosome_1_g_4 | 54413 |
| 2903_Neisseria_gonorrhoeae_strain_WHO_F_chromosome_1_g_5 | 54414 |
| 2904_Neisseria_gonorrhoeae_strain_WHO_F_chromosome_1_g_1 | 54415 |
| 2904_Neisseria_gonorrhoeae_strain_WHO_F_chromosome_1_g_2 | 54416 |
| 2904_Neisseria_gonorrhoeae_strain_WHO_F_chromosome_1_g_3 | 54417 |
| 2904_Neisseria_gonorrhoeae_strain_WHO_F_chromosome_1_g_4 | 54418 |
| 2904_Neisseria_gonorrhoeae_strain_WHO_F_chromosome_1_g_5 | 54419 |
| 2905_Neisseria_gonorrhoeae_strain_WHO_F_chromosome_1_g_1 | 54420 |
| 2905_Neisseria_gonorrhoeae_strain_WHO_F_chromosome_1_g_2 | 54421 |
| 2905_Neisseria_gonorrhoeae_strain_WHO_F_chromosome_1_g_3 | 54422 |
| 2905_Neisseria_gonorrhoeae_strain_WHO_F_chromosome_1_g_4 | 54423 |
| 2905_Neisseria_gonorrhoeae_strain_WHO_F_chromosome_1_g_5 | 54424 |
| 2906_Neisseria_gonorrhoeae_strain_WHO_F_chromosome_1_g_1 | 54425 |
| 2906_Neisseria_gonorrhoeae_strain_WHO_F_chromosome_1_g_2 | 54426 |
| 2906_Neisseria_gonorrhoeae_strain_WHO_F_chromosome_1_g_3 | 54427 |
| 2906_Neisseria_gonorrhoeae_strain_WHO_F_chromosome_1_g_4 | 54428 |
| 2906_Neisseria_gonorrhoeae_strain_WHO_F_chromosome_1_g_5 | 54429 |
| 2907_Neisseria_gonorrhoeae_strain_WHO_F_chromosome_1_g_1 | 54430 |
| 2907_Neisseria_gonorrhoeae_strain_WHO_F_chromosome_1_g_2 | 54431 |
| 2907_Neisseria_gonorrhoeae_strain_WHO_F_chromosome_1_g_3 | 54432 |
| 2907_Neisseria_gonorrhoeae_strain_WHO_F_chromosome_1_g_4 | 54433 |
| 2907_Neisseria_gonorrhoeae_strain_WHO_F_chromosome_1_g_5 | 54434 |
| 2908_Neisseria_gonorrhoeae_strain_WHO_F_chromosome_1_g_1 | 54435 |
| 2908_Neisseria_gonorrhoeae_strain_WHO_F_chromosome_1_g_2 | 54436 |
| 2908_Neisseria_gonorrhoeae_strain_WHO_F_chromosome_1_g_3 | 54437 |
| 2908_Neisseria_gonorrhoeae_strain_WHO_F_chromosome_1_g_4 | 54438 |
| 2908_Neisseria_gonorrhoeae_strain_WHO_F_chromosome_1_g_5 | 54439 |
| 2909_Neisseria_gonorrhoeae_strain_WHO_F_chromosome_1_g_1 | 54440 |
| 2909_Neisseria_gonorrhoeae_strain_WHO_F_chromosome_1_g_2 | 54441 |
| 2909_Neisseria_gonorrhoeae_strain_WHO_F_chromosome_1_g_3 | 54442 |
| 2909_Neisseria_gonorrhoeae_strain_WHO_F_chromosome_1_g_4 | 54443 |
| 2909_Neisseria_gonorrhoeae_strain_WHO_F_chromosome_1_g_5 | 54444 |
| 2910_Neisseria_gonorrhoeae_strain_WHO_F_chromosome_1_g_1 | 54445 |
| 2910_Neisseria_gonorrhoeae_strain_WHO_F_chromosome_1_g_2 | 54446 |
| 2910_Neisseria_gonorrhoeae_strain_WHO_F_chromosome_1_g_3 | 54447 |
| 2910_Neisseria_gonorrhoeae_strain_WHO_F_chromosome_1_g_4 | 54448 |
| 2910_Neisseria_gonorrhoeae_strain_WHO_F_chromosome_1_g_5 | 54449 |
| 2911_Neisseria_gonorrhoeae_strain_WHO_F_chromosome_1_g_1 | 54450 |
| 2911_Neisseria_gonorrhoeae_strain_WHO_F_chromosome_1_g_2 | 54451 |
| 2911_Neisseria_gonorrhoeae_strain_WHO_F_chromosome_1_g_3 | 54452 |
| 2911_Neisseria_gonorrhoeae_strain_WHO_F_chromosome_1_g_4 | 54453 |
| 2911_Neisseria_gonorrhoeae_strain_WHO_F_chromosome_1_g_5 | 54454 |
| 2912_Neisseria_gonorrhoeae_strain_WHO_F_chromosome_1_g_1 | 54455 |
| 2912_Neisseria_gonorrhoeae_strain_WHO_F_chromosome_1_g_2 | 54456 |
| 2912_Neisseria_gonorrhoeae_strain_WHO_F_chromosome_1_g_3 | 54457 |
| 2912_Neisseria_gonorrhoeae_strain_WHO_F_chromosome_1_g_4 | 54458 |
| 2912_Neisseria_gonorrhoeae_strain_WHO_F_chromosome_1_g_5 | 54459 |
| 2913_Neisseria_gonorrhoeae_strain_WHO_F_chromosome_1_g_1 | 54460 |
| 2913_Neisseria_gonorrhoeae_strain_WHO_F_chromosome_1_g_2 | 54461 |
| 2913_Neisseria_gonorrhoeae_strain_WHO_F_chromosome_1_g_3 | 54462 |
| 2913_Neisseria_gonorrhoeae_strain_WHO_F_chromosome_1_g_4 | 54463 |
| 2914_Neisseria_gonorrhoeae_strain_WHO_F_chromosome_1_g_1 | 54464 |
| 2914_Neisseria_gonorrhoeae_strain_WHO_F_chromosome_1_g_2 | 54465 |
| 2914_Neisseria_gonorrhoeae_strain_WHO_F_chromosome_1_g_3 | 54466 |
| 2914_Neisseria_gonorrhoeae_strain_WHO_F_chromosome_1_g_4 | 54467 |
| 2914_Neisseria_gonorrhoeae_strain_WHO_F_chromosome_1_g_5 | 54468 |
| 2915_Neisseria_gonorrhoeae_strain_WHO_F_chromosome_1_g_1 | 54469 |
| 2915_Neisseria_gonorrhoeae_strain_WHO_F_chromosome_1_g_2 | 54470 |
| 2915_Neisseria_gonorrhoeae_strain_WHO_F_chromosome_1_g_3 | 54471 |
| 2915_Neisseria_gonorrhoeae_strain_WHO_F_chromosome_1_g_4 | 54472 |
| 2915_Neisseria_gonorrhoeae_strain_WHO_F_chromosome_1_g_5 | 54473 |
| 2916_Neisseria_gonorrhoeae_strain_WHO_F_chromosome_1_g_1 | 54474 |
| 2916_Neisseria_gonorrhoeae_strain_WHO_F_chromosome_1_g_2 | 54475 |
| 2916_Neisseria_gonorrhoeae_strain_WHO_F_chromosome_1_g_3 | 54476 |
| 2916_Neisseria_gonorrhoeae_strain_WHO_F_chromosome_1_g_4 | 54477 |
| 2916_Neisseria_gonorrhoeae_strain_WHO_F_chromosome_1_g_5 | 54478 |
| 2917_Neisseria_gonorrhoeae_strain_WHO_F_chromosome_1_g_1 | 54479 |
| 2917_Neisseria_gonorrhoeae_strain_WHO_F_chromosome_1_g_2 | 54480 |
| 2917_Neisseria_gonorrhoeae_strain_WHO_F_chromosome_1_g_3 | 54481 |
| 2917_Neisseria_gonorrhoeae_strain_WHO_F_chromosome_1_g_4 | 54482 |
| 2917_Neisseria_gonorrhoeae_strain_WHO_F_chromosome_1_g_5 | 54483 |
| 2918_Neisseria_gonorrhoeae_strain_WHO_F_chromosome_1_g_1 | 54484 |
| 2918_Neisseria_gonorrhoeae_strain_WHO_F_chromosome_1_g_2 | 54485 |
| 2918_Neisseria_gonorrhoeae_strain_WHO_F_chromosome_1_g_3 | 54486 |
| 2918_Neisseria_gonorrhoeae_strain_WHO_F_chromosome_1_g_4 | 54487 |
| 2918_Neisseria_gonorrhoeae_strain_WHO_F_chromosome_1_g_5 | 54488 |
| 2919_Neisseria_gonorrhoeae_strain_WHO_F_chromosome_1_g_1 | 54489 |
| 2919_Neisseria_gonorrhoeae_strain_WHO_F_chromosome_1_g_2 | 54490 |
| 2919_Neisseria_gonorrhoeae_strain_WHO_F_chromosome_1_g_3 | 54491 |
| 2919_Neisseria_gonorrhoeae_strain_WHO_F_chromosome_1_g_4 | 54492 |
| 2919_Neisseria_gonorrhoeae_strain_WHO_F_chromosome_1_g_5 | 54493 |
| 2920_Neisseria_gonorrhoeae_strain_WHO_F_chromosome_1_g_1 | 54494 |
| 2920_Neisseria_gonorrhoeae_strain_WHO_F_chromosome_1_g_2 | 54495 |
| 2920_Neisseria_gonorrhoeae_strain_WHO_F_chromosome_1_g_3 | 54496 |
| 2920_Neisseria_gonorrhoeae_strain_WHO_F_chromosome_1_g_4 | 54497 |
| 2920_Neisseria_gonorrhoeae_strain_WHO_F_chromosome_1_g_5 | 54498 |
| 2921_Neisseria_gonorrhoeae_strain_WHO_F_chromosome_1_g_1 | 54499 |
| 2921_Neisseria_gonorrhoeae_strain_WHO_F_chromosome_1_g_2 | 54500 |
| 2921_Neisseria_gonorrhoeae_strain_WHO_F_chromosome_1_g_3 | 54501 |
| 2921_Neisseria_gonorrhoeae_strain_WHO_F_chromosome_1_g_4 | 54502 |
| 2921_Neisseria_gonorrhoeae_strain_WHO_F_chromosome_1_g_5 | 54503 |
| 2922_Neisseria_gonorrhoeae_strain_WHO_F_chromosome_1_g_1 | 54504 |
| 2922_Neisseria_gonorrhoeae_strain_WHO_F_chromosome_1_g_2 | 54505 |
| 2922_Neisseria_gonorrhoeae_strain_WHO_F_chromosome_1_g_3 | 54506 |
| 2922_Neisseria_gonorrhoeae_strain_WHO_F_chromosome_1_g_4 | 54507 |
| 2922_Neisseria_gonorrhoeae_strain_WHO_F_chromosome_1_g_5 | 54508 |
| 2923_Neisseria_gonorrhoeae_strain_WHO_F_chromosome_1_g_1 | 54509 |
| 2923_Neisseria_gonorrhoeae_strain_WHO_F_chromosome_1_g_2 | 54510 |
| 2923_Neisseria_gonorrhoeae_strain_WHO_F_chromosome_1_g_3 | 54511 |
| 2923_Neisseria_gonorrhoeae_strain_WHO_F_chromosome_1_g_4 | 54512 |
| 2923_Neisseria_gonorrhoeae_strain_WHO_F_chromosome_1_g_5 | 54513 |
| 2924_Neisseria_gonorrhoeae_strain_WHO_F_chromosome_1_g_1 | 54514 |
| 2924_Neisseria_gonorrhoeae_strain_WHO_F_chromosome_1_g_2 | 54515 |
| 2924_Neisseria_gonorrhoeae_strain_WHO_F_chromosome_1_g_3 | 54516 |
| 2924_Neisseria_gonorrhoeae_strain_WHO_F_chromosome_1_g_4 | 54517 |
| 2924_Neisseria_gonorrhoeae_strain_WHO_F_chromosome_1_g_5 | 54518 |
| 2925_Neisseria_gonorrhoeae_strain_WHO_F_chromosome_1_g_1 | 54519 |
| 2925_Neisseria_gonorrhoeae_strain_WHO_F_chromosome_1_g_2 | 54520 |
| 2925_Neisseria_gonorrhoeae_strain_WHO_F_chromosome_1_g_3 | 54521 |
| 2925_Neisseria_gonorrhoeae_strain_WHO_F_chromosome_1_g_4 | 54522 |
| 2925_Neisseria_gonorrhoeae_strain_WHO_F_chromosome_1_g_5 | 54523 |
| 2926_Neisseria_gonorrhoeae_strain_WHO_F_chromosome_1_g_1 | 54524 |
| 2926_Neisseria_gonorrhoeae_strain_WHO_F_chromosome_1_g_2 | 54525 |
| 2926_Neisseria_gonorrhoeae_strain_WHO_F_chromosome_1_g_3 | 54526 |
| 2926_Neisseria_gonorrhoeae_strain_WHO_F_chromosome_1_g_4 | 54527 |
| 2926_Neisseria_gonorrhoeae_strain_WHO_F_chromosome_1_g_5 | 54528 |
| 2927_Neisseria_gonorrhoeae_strain_WHO_F_chromosome_1_g_1 | 54529 |
| 2927_Neisseria_gonorrhoeae_strain_WHO_F_chromosome_1_g_2 | 54530 |
| 2927_Neisseria_gonorrhoeae_strain_WHO_F_chromosome_1_g_3 | 54531 |
| 2927_Neisseria_gonorrhoeae_strain_WHO_F_chromosome_1_g_4 | 54532 |
| 2927_Neisseria_gonorrhoeae_strain_WHO_F_chromosome_1_g_5 | 54533 |
| 2928_Neisseria_gonorrhoeae_strain_WHO_F_chromosome_1_g_1 | 54534 |
| 2928_Neisseria_gonorrhoeae_strain_WHO_F_chromosome_1_g_2 | 54535 |
| 2928_Neisseria_gonorrhoeae_strain_WHO_F_chromosome_1_g_3 | 54536 |
| 2928_Neisseria_gonorrhoeae_strain_WHO_F_chromosome_1_g_4 | 54537 |
| 2928_Neisseria_gonorrhoeae_strain_WHO_F_chromosome_1_g_5 | 54538 |
| 2929_Neisseria_gonorrhoeae_strain_WHO_F_chromosome_1_g_1 | 54539 |
| 2929_Neisseria_gonorrhoeae_strain_WHO_F_chromosome_1_g_2 | 54540 |
| 2929_Neisseria_gonorrhoeae_strain_WHO_F_chromosome_1_g_3 | 54541 |
| 2929_Neisseria_gonorrhoeae_strain_WHO_F_chromosome_1_g_4 | 54542 |
| 2929_Neisseria_gonorrhoeae_strain_WHO_F_chromosome_1_g_5 | 54543 |
| 2930_Neisseria_gonorrhoeae_strain_WHO_F_chromosome_1_g_1 | 54544 |
| 2930_Neisseria_gonorrhoeae_strain_WHO_F_chromosome_1_g_2 | 54545 |
| 2930_Neisseria_gonorrhoeae_strain_WHO_F_chromosome_1_g_3 | 54546 |
| 2930_Neisseria_gonorrhoeae_strain_WHO_F_chromosome_1_g_4 | 54547 |
| 2930_Neisseria_gonorrhoeae_strain_WHO_F_chromosome_1_g_5 | 54548 |
| 2931_Neisseria_gonorrhoeae_strain_WHO_F_chromosome_1_g_1 | 54549 |
| 2931_Neisseria_gonorrhoeae_strain_WHO_F_chromosome_1_g_2 | 54550 |
| 2931_Neisseria_gonorrhoeae_strain_WHO_F_chromosome_1_g_3 | 54551 |
| 2931_Neisseria_gonorrhoeae_strain_WHO_F_chromosome_1_g_4 | 54552 |
| 2931_Neisseria_gonorrhoeae_strain_WHO_F_chromosome_1_g_5 | 54553 |
| 2932_Neisseria_gonorrhoeae_strain_WHO_F_chromosome_1_g_1 | 54554 |
| 2932_Neisseria_gonorrhoeae_strain_WHO_F_chromosome_1_g_2 | 54555 |
| 2932_Neisseria_gonorrhoeae_strain_WHO_F_chromosome_1_g_3 | 54556 |
| 2932_Neisseria_gonorrhoeae_strain_WHO_F_chromosome_1_g_4 | 54557 |
| 2932_Neisseria_gonorrhoeae_strain_WHO_F_chromosome_1_g_5 | 54558 |
| 2933_Neisseria_gonorrhoeae_strain_WHO_F_chromosome_1_g_1 | 54559 |
| 2933_Neisseria_gonorrhoeae_strain_WHO_F_chromosome_1_g_2 | 54560 |
| 2933_Neisseria_gonorrhoeae_strain_WHO_F_chromosome_1_g_3 | 54561 |
| 2933_Neisseria_gonorrhoeae_strain_WHO_F_chromosome_1_g_4 | 54562 |
| 2933_Neisseria_gonorrhoeae_strain_WHO_F_chromosome_1_g_5 | 54563 |
| 2934_Neisseria_gonorrhoeae_strain_WHO_F_chromosome_1_g_1 | 54564 |
| 2934_Neisseria_gonorrhoeae_strain_WHO_F_chromosome_1_g_2 | 54565 |
| 2934_Neisseria_gonorrhoeae_strain_WHO_F_chromosome_1_g_3 | 54566 |
| 2934_Neisseria_gonorrhoeae_strain_WHO_F_chromosome_1_g_4 | 54567 |
| 2934_Neisseria_gonorrhoeae_strain_WHO_F_chromosome_1_g_5 | 54568 |
| 2935_Neisseria_gonorrhoeae_strain_WHO_F_chromosome_1_g_1 | 54569 |
| 2935_Neisseria_gonorrhoeae_strain_WHO_F_chromosome_1_g_2 | 54570 |
| 2935_Neisseria_gonorrhoeae_strain_WHO_F_chromosome_1_g_3 | 54571 |
| 2935_Neisseria_gonorrhoeae_strain_WHO_F_chromosome_1_g_4 | 54572 |
| 2935_Neisseria_gonorrhoeae_strain_WHO_F_chromosome_1_g_5 | 54573 |
| 2936_Neisseria_gonorrhoeae_strain_WHO_F_chromosome_1_g_1 | 54574 |
| 2936_Neisseria_gonorrhoeae_strain_WHO_F_chromosome_1_g_2 | 54575 |
| 2936_Neisseria_gonorrhoeae_strain_WHO_F_chromosome_1_g_3 | 54576 |
| 2936_Neisseria_gonorrhoeae_strain_WHO_F_chromosome_1_g_4 | 54577 |
| 2936_Neisseria_gonorrhoeae_strain_WHO_F_chromosome_1_g_5 | 54578 |
| 2937_Neisseria_gonorrhoeae_strain_WHO_F_chromosome_1_g_1 | 54579 |
| 2937_Neisseria_gonorrhoeae_strain_WHO_F_chromosome_1_g_2 | 54580 |
| 2937_Neisseria_gonorrhoeae_strain_WHO_F_chromosome_1_g_3 | 54581 |
| 2937_Neisseria_gonorrhoeae_strain_WHO_F_chromosome_1_g_4 | 54582 |
| 2937_Neisseria_gonorrhoeae_strain_WHO_F_chromosome_1_g_5 | 54583 |
| 2938_Neisseria_gonorrhoeae_strain_WHO_F_chromosome_1_g_1 | 54584 |
| 2938_Neisseria_gonorrhoeae_strain_WHO_F_chromosome_1_g_2 | 54585 |
| 2938_Neisseria_gonorrhoeae_strain_WHO_F_chromosome_1_g_3 | 54586 |
| 2938_Neisseria_gonorrhoeae_strain_WHO_F_chromosome_1_g_4 | 54587 |
| 2938_Neisseria_gonorrhoeae_strain_WHO_F_chromosome_1_g_5 | 54588 |
| 2939_Neisseria_gonorrhoeae_strain_WHO_F_chromosome_1_g_1 | 54589 |
| 2939_Neisseria_gonorrhoeae_strain_WHO_F_chromosome_1_g_2 | 54590 |
| 2939_Neisseria_gonorrhoeae_strain_WHO_F_chromosome_1_g_3 | 54591 |
| 2939_Neisseria_gonorrhoeae_strain_WHO_F_chromosome_1_g_4 | 54592 |
| 2939_Neisseria_gonorrhoeae_strain_WHO_F_chromosome_1_g_5 | 54593 |
| 2940_Neisseria_gonorrhoeae_strain_WHO_F_chromosome_1_g_1 | 54594 |
| 2940_Neisseria_gonorrhoeae_strain_WHO_F_chromosome_1_g_2 | 54595 |
| 2940_Neisseria_gonorrhoeae_strain_WHO_F_chromosome_1_g_3 | 54596 |
| 2940_Neisseria_gonorrhoeae_strain_WHO_F_chromosome_1_g_4 | 54597 |
| 2940_Neisseria_gonorrhoeae_strain_WHO_F_chromosome_1_g_5 | 54598 |
| 2941_Neisseria_gonorrhoeae_strain_WHO_F_chromosome_1_g_1 | 54599 |
| 2941_Neisseria_gonorrhoeae_strain_WHO_F_chromosome_1_g_2 | 54600 |
| 2941_Neisseria_gonorrhoeae_strain_WHO_F_chromosome_1_g_3 | 54601 |
| 2941_Neisseria_gonorrhoeae_strain_WHO_F_chromosome_1_g_4 | 54602 |
| 2941_Neisseria_gonorrhoeae_strain_WHO_F_chromosome_1_g_5 | 54603 |
| 2942_Neisseria_gonorrhoeae_strain_WHO_F_chromosome_1_g_1 | 54604 |
| 2942_Neisseria_gonorrhoeae_strain_WHO_F_chromosome_1_g_2 | 54605 |
| 2942_Neisseria_gonorrhoeae_strain_WHO_F_chromosome_1_g_3 | 54606 |
| 2942_Neisseria_gonorrhoeae_strain_WHO_F_chromosome_1_g_4 | 54607 |
| 2942_Neisseria_gonorrhoeae_strain_WHO_F_chromosome_1_g_5 | 54608 |
| 2943_Neisseria_gonorrhoeae_strain_WHO_F_chromosome_1_g_1 | 54609 |
| 2943_Neisseria_gonorrhoeae_strain_WHO_F_chromosome_1_g_2 | 54610 |
| 2943_Neisseria_gonorrhoeae_strain_WHO_F_chromosome_1_g_3 | 54611 |
| 2943_Neisseria_gonorrhoeae_strain_WHO_F_chromosome_1_g_4 | 54612 |
| 2943_Neisseria_gonorrhoeae_strain_WHO_F_chromosome_1_g_5 | 54613 |
| 2944_Neisseria_gonorrhoeae_strain_WHO_F_chromosome_1_g_1 | 54614 |
| 2944_Neisseria_gonorrhoeae_strain_WHO_F_chromosome_1_g_2 | 54615 |
| 2944_Neisseria_gonorrhoeae_strain_WHO_F_chromosome_1_g_3 | 54616 |
| 2944_Neisseria_gonorrhoeae_strain_WHO_F_chromosome_1_g_4 | 54617 |
| 2944_Neisseria_gonorrhoeae_strain_WHO_F_chromosome_1_g_5 | 54618 |
| 2945_Neisseria_gonorrhoeae_strain_WHO_F_chromosome_1_g_1 | 54619 |
| 2945_Neisseria_gonorrhoeae_strain_WHO_F_chromosome_1_g_2 | 54620 |
| 2945_Neisseria_gonorrhoeae_strain_WHO_F_chromosome_1_g_3 | 54621 |
| 2945_Neisseria_gonorrhoeae_strain_WHO_F_chromosome_1_g_4 | 54622 |
| 2945_Neisseria_gonorrhoeae_strain_WHO_F_chromosome_1_g_5 | 54623 |
| 2946_Neisseria_gonorrhoeae_strain_WHO_F_chromosome_1_g_1 | 54624 |
| 2946_Neisseria_gonorrhoeae_strain_WHO_F_chromosome_1_g_2 | 54625 |
| 2946_Neisseria_gonorrhoeae_strain_WHO_F_chromosome_1_g_3 | 54626 |
| 2946_Neisseria_gonorrhoeae_strain_WHO_F_chromosome_1_g_4 | 54627 |
| 2946_Neisseria_gonorrhoeae_strain_WHO_F_chromosome_1_g_5 | 54628 |
| 2947_Neisseria_gonorrhoeae_strain_WHO_F_chromosome_1_g_1 | 54629 |
| 2947_Neisseria_gonorrhoeae_strain_WHO_F_chromosome_1_g_2 | 54630 |
| 2947_Neisseria_gonorrhoeae_strain_WHO_F_chromosome_1_g_3 | 54631 |
| 2947_Neisseria_gonorrhoeae_strain_WHO_F_chromosome_1_g_4 | 54632 |
| 2947_Neisseria_gonorrhoeae_strain_WHO_F_chromosome_1_g_5 | 54633 |
| 2948_Neisseria_gonorrhoeae_strain_WHO_F_chromosome_1_g_1 | 54634 |
| 2948_Neisseria_gonorrhoeae_strain_WHO_F_chromosome_1_g_2 | 54635 |
| 2948_Neisseria_gonorrhoeae_strain_WHO_F_chromosome_1_g_3 | 54636 |
| 2948_Neisseria_gonorrhoeae_strain_WHO_F_chromosome_1_g_4 | 54637 |
| 2948_Neisseria_gonorrhoeae_strain_WHO_F_chromosome_1_g_5 | 54638 |
| 2949_Neisseria_gonorrhoeae_strain_WHO_F_chromosome_1_g_1 | 54639 |
| 2949_Neisseria_gonorrhoeae_strain_WHO_F_chromosome_1_g_2 | 54640 |
| 2949_Neisseria_gonorrhoeae_strain_WHO_F_chromosome_1_g_3 | 54641 |
| 2949_Neisseria_gonorrhoeae_strain_WHO_F_chromosome_1_g_4 | 54642 |
| 2949_Neisseria_gonorrhoeae_strain_WHO_F_chromosome_1_g_5 | 54643 |
| 2950_Neisseria_gonorrhoeae_strain_WHO_F_chromosome_1_g_1 | 54644 |
| 2950_Neisseria_gonorrhoeae_strain_WHO_F_chromosome_1_g_2 | 54645 |
| 2950_Neisseria_gonorrhoeae_strain_WHO_F_chromosome_1_g_3 | 54646 |
| 2950_Neisseria_gonorrhoeae_strain_WHO_F_chromosome_1_g_4 | 54647 |
| 2950_Neisseria_gonorrhoeae_strain_WHO_F_chromosome_1_g_5 | 54648 |
| 2951_Neisseria_gonorrhoeae_strain_WHO_F_chromosome_1_g_1 | 54649 |
| 2951_Neisseria_gonorrhoeae_strain_WHO_F_chromosome_1_g_2 | 54650 |
| 2951_Neisseria_gonorrhoeae_strain_WHO_F_chromosome_1_g_3 | 54651 |
| 2951_Neisseria_gonorrhoeae_strain_WHO_F_chromosome_1_g_4 | 54652 |
| 2951_Neisseria_gonorrhoeae_strain_WHO_F_chromosome_1_g_5 | 54653 |
| 2952_Neisseria_gonorrhoeae_strain_WHO_F_chromosome_1_g_1 | 54654 |
| 2952_Neisseria_gonorrhoeae_strain_WHO_F_chromosome_1_g_2 | 54655 |
| 2952_Neisseria_gonorrhoeae_strain_WHO_F_chromosome_1_g_3 | 54656 |
| 2952_Neisseria_gonorrhoeae_strain_WHO_F_chromosome_1_g_4 | 54657 |
| 2952_Neisseria_gonorrhoeae_strain_WHO_F_chromosome_1_g_5 | 54658 |
| 2953_Neisseria_gonorrhoeae_strain_WHO_F_chromosome_1_g_1 | 54659 |
| 2953_Neisseria_gonorrhoeae_strain_WHO_F_chromosome_1_g_2 | 54660 |
| 2953_Neisseria_gonorrhoeae_strain_WHO_F_chromosome_1_g_3 | 54661 |
| 2953_Neisseria_gonorrhoeae_strain_WHO_F_chromosome_1_g_4 | 54662 |
| 2953_Neisseria_gonorrhoeae_strain_WHO_F_chromosome_1_g_5 | 54663 |
| 2954_Neisseria_gonorrhoeae_strain_WHO_F_chromosome_1_g_1 | 54664 |
| 2954_Neisseria_gonorrhoeae_strain_WHO_F_chromosome_1_g_2 | 54665 |
| 2954_Neisseria_gonorrhoeae_strain_WHO_F_chromosome_1_g_3 | 54666 |
| 2954_Neisseria_gonorrhoeae_strain_WHO_F_chromosome_1_g_4 | 54667 |
| 2954_Neisseria_gonorrhoeae_strain_WHO_F_chromosome_1_g_5 | 54668 |
| 2955_Neisseria_gonorrhoeae_strain_WHO_F_chromosome_1_g_1 | 54669 |
| 2955_Neisseria_gonorrhoeae_strain_WHO_F_chromosome_1_g_2 | 54670 |
| 2955_Neisseria_gonorrhoeae_strain_WHO_F_chromosome_1_g_3 | 54671 |
| 2955_Neisseria_gonorrhoeae_strain_WHO_F_chromosome_1_g_4 | 54672 |
| 2955_Neisseria_gonorrhoeae_strain_WHO_F_chromosome_1_g_5 | 54673 |
| 2956_Neisseria_gonorrhoeae_strain_WHO_F_chromosome_1_g_1 | 54674 |
| 2956_Neisseria_gonorrhoeae_strain_WHO_F_chromosome_1_g_2 | 54675 |
| 2956_Neisseria_gonorrhoeae_strain_WHO_F_chromosome_1_g_3 | 54676 |
| 2956_Neisseria_gonorrhoeae_strain_WHO_F_chromosome_1_g_4 | 54677 |
| 2956_Neisseria_gonorrhoeae_strain_WHO_F_chromosome_1_g_5 | 54678 |
| 2957_Neisseria_gonorrhoeae_strain_WHO_F_chromosome_1_g_1 | 54679 |
| 2957_Neisseria_gonorrhoeae_strain_WHO_F_chromosome_1_g_2 | 54680 |
| 2957_Neisseria_gonorrhoeae_strain_WHO_F_chromosome_1_g_3 | 54681 |
| 2957_Neisseria_gonorrhoeae_strain_WHO_F_chromosome_1_g_4 | 54682 |
| 2957_Neisseria_gonorrhoeae_strain_WHO_F_chromosome_1_g_5 | 54683 |
| 2958_Neisseria_gonorrhoeae_strain_WHO_F_chromosome_1_g_1 | 54684 |
| 2958_Neisseria_gonorrhoeae_strain_WHO_F_chromosome_1_g_2 | 54685 |
| 2958_Neisseria_gonorrhoeae_strain_WHO_F_chromosome_1_g_3 | 54686 |
| 2958_Neisseria_gonorrhoeae_strain_WHO_F_chromosome_1_g_4 | 54687 |
| 2958_Neisseria_gonorrhoeae_strain_WHO_F_chromosome_1_g_5 | 54688 |
| 2959_Neisseria_gonorrhoeae_strain_WHO_F_chromosome_1_g_1 | 54689 |
| 2959_Neisseria_gonorrhoeae_strain_WHO_F_chromosome_1_g_2 | 54690 |
| 2959_Neisseria_gonorrhoeae_strain_WHO_F_chromosome_1_g_3 | 54691 |
| 2959_Neisseria_gonorrhoeae_strain_WHO_F_chromosome_1_g_4 | 54692 |
| 2960_Neisseria_gonorrhoeae_strain_WHO_F_chromosome_1_g_1 | 54693 |
| 2960_Neisseria_gonorrhoeae_strain_WHO_F_chromosome_1_g_2 | 54694 |
| 2960_Neisseria_gonorrhoeae_strain_WHO_F_chromosome_1_g_3 | 54695 |
| 2960_Neisseria_gonorrhoeae_strain_WHO_F_chromosome_1_g_4 | 54696 |
| 2960_Neisseria_gonorrhoeae_strain_WHO_F_chromosome_1_g_5 | 54697 |
| 2961_Neisseria_gonorrhoeae_strain_WHO_F_chromosome_1_g_1 | 54698 |
| 2961_Neisseria_gonorrhoeae_strain_WHO_F_chromosome_1_g_2 | 54699 |
| 2961_Neisseria_gonorrhoeae_strain_WHO_F_chromosome_1_g_3 | 54700 |
| 2961_Neisseria_gonorrhoeae_strain_WHO_F_chromosome_1_g_4 | 54701 |
| 2961_Neisseria_gonorrhoeae_strain_WHO_F_chromosome_1_g_5 | 54702 |
| 2962_Neisseria_gonorrhoeae_strain_WHO_F_chromosome_1_g_1 | 54703 |
| 2962_Neisseria_gonorrhoeae_strain_WHO_F_chromosome_1_g_2 | 54704 |
| 2962_Neisseria_gonorrhoeae_strain_WHO_F_chromosome_1_g_3 | 54705 |
| 2962_Neisseria_gonorrhoeae_strain_WHO_F_chromosome_1_g_4 | 54706 |
| 2962_Neisseria_gonorrhoeae_strain_WHO_F_chromosome_1_g_5 | 54707 |
| 2963_Neisseria_gonorrhoeae_strain_WHO_F_chromosome_1_g_1 | 54708 |
| 2963_Neisseria_gonorrhoeae_strain_WHO_F_chromosome_1_g_2 | 54709 |
| 2963_Neisseria_gonorrhoeae_strain_WHO_F_chromosome_1_g_3 | 54710 |
| 2963_Neisseria_gonorrhoeae_strain_WHO_F_chromosome_1_g_4 | 54711 |
| 2963_Neisseria_gonorrhoeae_strain_WHO_F_chromosome_1_g_5 | 54712 |
| 2964_Neisseria_gonorrhoeae_strain_WHO_F_chromosome_1_g_1 | 54713 |
| 2964_Neisseria_gonorrhoeae_strain_WHO_F_chromosome_1_g_2 | 54714 |
| 2964_Neisseria_gonorrhoeae_strain_WHO_F_chromosome_1_g_3 | 54715 |
| 2964_Neisseria_gonorrhoeae_strain_WHO_F_chromosome_1_g_4 | 54716 |
| 2964_Neisseria_gonorrhoeae_strain_WHO_F_chromosome_1_g_5 | 54717 |
| 2965_Neisseria_gonorrhoeae_strain_WHO_F_chromosome_1_g_1 | 54718 |
| 2965_Neisseria_gonorrhoeae_strain_WHO_F_chromosome_1_g_2 | 54719 |
| 2965_Neisseria_gonorrhoeae_strain_WHO_F_chromosome_1_g_3 | 54720 |
| 2965_Neisseria_gonorrhoeae_strain_WHO_F_chromosome_1_g_4 | 54721 |
| 2965_Neisseria_gonorrhoeae_strain_WHO_F_chromosome_1_g_5 | 54722 |
| 2966_Neisseria_gonorrhoeae_strain_WHO_F_chromosome_1_g_1 | 54723 |
| 2966_Neisseria_gonorrhoeae_strain_WHO_F_chromosome_1_g_2 | 54724 |
| 2966_Neisseria_gonorrhoeae_strain_WHO_F_chromosome_1_g_3 | 54725 |
| 2966_Neisseria_gonorrhoeae_strain_WHO_F_chromosome_1_g_4 | 54726 |
| 2966_Neisseria_gonorrhoeae_strain_WHO_F_chromosome_1_g_5 | 54727 |
| 2967_Neisseria_gonorrhoeae_strain_WHO_F_chromosome_1_g_1 | 54728 |
| 2967_Neisseria_gonorrhoeae_strain_WHO_F_chromosome_1_g_2 | 54729 |
| 2967_Neisseria_gonorrhoeae_strain_WHO_F_chromosome_1_g_3 | 54730 |
| 2967_Neisseria_gonorrhoeae_strain_WHO_F_chromosome_1_g_4 | 54731 |
| 2967_Neisseria_gonorrhoeae_strain_WHO_F_chromosome_1_g_5 | 54732 |
| 2968_Neisseria_gonorrhoeae_strain_WHO_F_chromosome_1_g_1 | 54733 |
| 2968_Neisseria_gonorrhoeae_strain_WHO_F_chromosome_1_g_2 | 54734 |
| 2968_Neisseria_gonorrhoeae_strain_WHO_F_chromosome_1_g_3 | 54735 |
| 2968_Neisseria_gonorrhoeae_strain_WHO_F_chromosome_1_g_4 | 54736 |
| 2968_Neisseria_gonorrhoeae_strain_WHO_F_chromosome_1_g_5 | 54737 |
| 2969_Neisseria_gonorrhoeae_strain_WHO_F_chromosome_1_g_1 | 54738 |
| 2969_Neisseria_gonorrhoeae_strain_WHO_F_chromosome_1_g_2 | 54739 |
| 2969_Neisseria_gonorrhoeae_strain_WHO_F_chromosome_1_g_3 | 54740 |
| 2969_Neisseria_gonorrhoeae_strain_WHO_F_chromosome_1_g_4 | 54741 |
| 2969_Neisseria_gonorrhoeae_strain_WHO_F_chromosome_1_g_5 | 54742 |
| 2970_Neisseria_gonorrhoeae_strain_WHO_F_chromosome_1_g_1 | 54743 |
| 2970_Neisseria_gonorrhoeae_strain_WHO_F_chromosome_1_g_2 | 54744 |
| 2970_Neisseria_gonorrhoeae_strain_WHO_F_chromosome_1_g_3 | 54745 |
| 2970_Neisseria_gonorrhoeae_strain_WHO_F_chromosome_1_g_4 | 54746 |
| 2970_Neisseria_gonorrhoeae_strain_WHO_F_chromosome_1_g_5 | 54747 |
| 2971_Neisseria_gonorrhoeae_strain_WHO_F_chromosome_1_g_1 | 54748 |
| 2971_Neisseria_gonorrhoeae_strain_WHO_F_chromosome_1_g_2 | 54749 |
| 2971_Neisseria_gonorrhoeae_strain_WHO_F_chromosome_1_g_3 | 54750 |
| 2971_Neisseria_gonorrhoeae_strain_WHO_F_chromosome_1_g_4 | 54751 |
| 2971_Neisseria_gonorrhoeae_strain_WHO_F_chromosome_1_g_5 | 54752 |
| 2972_Neisseria_gonorrhoeae_strain_WHO_F_chromosome_1_g_1 | 54753 |
| 2972_Neisseria_gonorrhoeae_strain_WHO_F_chromosome_1_g_2 | 54754 |
| 2972_Neisseria_gonorrhoeae_strain_WHO_F_chromosome_1_g_3 | 54755 |
| 2972_Neisseria_gonorrhoeae_strain_WHO_F_chromosome_1_g_4 | 54756 |
| 2972_Neisseria_gonorrhoeae_strain_WHO_F_chromosome_1_g_5 | 54757 |
| 2973_Neisseria_gonorrhoeae_strain_WHO_F_chromosome_1_g_1 | 54758 |
| 2973_Neisseria_gonorrhoeae_strain_WHO_F_chromosome_1_g_2 | 54759 |
| 2973_Neisseria_gonorrhoeae_strain_WHO_F_chromosome_1_g_3 | 54760 |
| 2973_Neisseria_gonorrhoeae_strain_WHO_F_chromosome_1_g_4 | 54761 |
| 2973_Neisseria_gonorrhoeae_strain_WHO_F_chromosome_1_g_5 | 54762 |
| 2974_Neisseria_gonorrhoeae_strain_WHO_F_chromosome_1_g_1 | 54763 |
| 2974_Neisseria_gonorrhoeae_strain_WHO_F_chromosome_1_g_2 | 54764 |
| 2974_Neisseria_gonorrhoeae_strain_WHO_F_chromosome_1_g_3 | 54765 |
| 2974_Neisseria_gonorrhoeae_strain_WHO_F_chromosome_1_g_4 | 54766 |
| 2974_Neisseria_gonorrhoeae_strain_WHO_F_chromosome_1_g_5 | 54767 |
| 2975_Neisseria_gonorrhoeae_strain_WHO_F_chromosome_1_g_1 | 54768 |
| 2975_Neisseria_gonorrhoeae_strain_WHO_F_chromosome_1_g_2 | 54769 |
| 2975_Neisseria_gonorrhoeae_strain_WHO_F_chromosome_1_g_3 | 54770 |
| 2975_Neisseria_gonorrhoeae_strain_WHO_F_chromosome_1_g_4 | 54771 |
| 2975_Neisseria_gonorrhoeae_strain_WHO_F_chromosome_1_g_5 | 54772 |
| 2976_Neisseria_gonorrhoeae_strain_WHO_F_chromosome_1_g_1 | 54773 |
| 2976_Neisseria_gonorrhoeae_strain_WHO_F_chromosome_1_g_2 | 54774 |
| 2976_Neisseria_gonorrhoeae_strain_WHO_F_chromosome_1_g_3 | 54775 |
| 2976_Neisseria_gonorrhoeae_strain_WHO_F_chromosome_1_g_4 | 54776 |
| 2976_Neisseria_gonorrhoeae_strain_WHO_F_chromosome_1_g_5 | 54777 |
| 2977_Neisseria_gonorrhoeae_strain_WHO_F_chromosome_1_g_1 | 54778 |
| 2977_Neisseria_gonorrhoeae_strain_WHO_F_chromosome_1_g_2 | 54779 |
| 2977_Neisseria_gonorrhoeae_strain_WHO_F_chromosome_1_g_3 | 54780 |
| 2977_Neisseria_gonorrhoeae_strain_WHO_F_chromosome_1_g_4 | 54781 |
| 2977_Neisseria_gonorrhoeae_strain_WHO_F_chromosome_1_g_5 | 54782 |
| 2978_Neisseria_gonorrhoeae_strain_WHO_F_chromosome_1_g_1 | 54783 |
| 2978_Neisseria_gonorrhoeae_strain_WHO_F_chromosome_1_g_2 | 54784 |
| 2978_Neisseria_gonorrhoeae_strain_WHO_F_chromosome_1_g_3 | 54785 |
| 2978_Neisseria_gonorrhoeae_strain_WHO_F_chromosome_1_g_4 | 54786 |
| 2978_Neisseria_gonorrhoeae_strain_WHO_F_chromosome_1_g_5 | 54787 |
| 2979_Neisseria_gonorrhoeae_strain_WHO_F_chromosome_1_g_1 | 54788 |
| 2979_Neisseria_gonorrhoeae_strain_WHO_F_chromosome_1_g_2 | 54789 |
| 2979_Neisseria_gonorrhoeae_strain_WHO_F_chromosome_1_g_3 | 54790 |
| 2979_Neisseria_gonorrhoeae_strain_WHO_F_chromosome_1_g_4 | 54791 |
| 2979_Neisseria_gonorrhoeae_strain_WHO_F_chromosome_1_g_5 | 54792 |
| 2980_Neisseria_gonorrhoeae_strain_WHO_F_chromosome_1_g_1 | 54793 |
| 2980_Neisseria_gonorrhoeae_strain_WHO_F_chromosome_1_g_2 | 54794 |
| 2980_Neisseria_gonorrhoeae_strain_WHO_F_chromosome_1_g_3 | 54795 |
| 2980_Neisseria_gonorrhoeae_strain_WHO_F_chromosome_1_g_4 | 54796 |
| 2980_Neisseria_gonorrhoeae_strain_WHO_F_chromosome_1_g_5 | 54797 |
| 2981_Neisseria_gonorrhoeae_strain_WHO_F_chromosome_1_g_1 | 54798 |
| 2981_Neisseria_gonorrhoeae_strain_WHO_F_chromosome_1_g_2 | 54799 |
| 2981_Neisseria_gonorrhoeae_strain_WHO_F_chromosome_1_g_3 | 54800 |
| 2981_Neisseria_gonorrhoeae_strain_WHO_F_chromosome_1_g_4 | 54801 |
| 2981_Neisseria_gonorrhoeae_strain_WHO_F_chromosome_1_g_5 | 54802 |
| 2982_Neisseria_gonorrhoeae_strain_WHO_F_chromosome_1_g_1 | 54803 |
| 2982_Neisseria_gonorrhoeae_strain_WHO_F_chromosome_1_g_2 | 54804 |
| 2982_Neisseria_gonorrhoeae_strain_WHO_F_chromosome_1_g_3 | 54805 |
| 2982_Neisseria_gonorrhoeae_strain_WHO_F_chromosome_1_g_4 | 54806 |
| 2982_Neisseria_gonorrhoeae_strain_WHO_F_chromosome_1_g_5 | 54807 |
| 2983_Neisseria_gonorrhoeae_strain_WHO_F_chromosome_1_g_1 | 54808 |
| 2983_Neisseria_gonorrhoeae_strain_WHO_F_chromosome_1_g_2 | 54809 |
| 2983_Neisseria_gonorrhoeae_strain_WHO_F_chromosome_1_g_3 | 54810 |
| 2983_Neisseria_gonorrhoeae_strain_WHO_F_chromosome_1_g_4 | 54811 |
| 2983_Neisseria_gonorrhoeae_strain_WHO_F_chromosome_1_g_5 | 54812 |
| 2984_Neisseria_gonorrhoeae_strain_WHO_F_chromosome_1_g_1 | 54813 |
| 2984_Neisseria_gonorrhoeae_strain_WHO_F_chromosome_1_g_2 | 54814 |
| 2984_Neisseria_gonorrhoeae_strain_WHO_F_chromosome_1_g_3 | 54815 |
| 2984_Neisseria_gonorrhoeae_strain_WHO_F_chromosome_1_g_4 | 54816 |
| 2984_Neisseria_gonorrhoeae_strain_WHO_F_chromosome_1_g_5 | 54817 |
| 2985_Neisseria_gonorrhoeae_strain_WHO_F_chromosome_1_g_1 | 54818 |
| 2985_Neisseria_gonorrhoeae_strain_WHO_F_chromosome_1_g_2 | 54819 |
| 2985_Neisseria_gonorrhoeae_strain_WHO_F_chromosome_1_g_3 | 54820 |
| 2985_Neisseria_gonorrhoeae_strain_WHO_F_chromosome_1_g_4 | 54821 |
| 2985_Neisseria_gonorrhoeae_strain_WHO_F_chromosome_1_g_5 | 54822 |
| 2986_Neisseria_gonorrhoeae_strain_WHO_F_chromosome_1_g_1 | 54823 |
| 2986_Neisseria_gonorrhoeae_strain_WHO_F_chromosome_1_g_2 | 54824 |
| 2986_Neisseria_gonorrhoeae_strain_WHO_F_chromosome_1_g_3 | 54825 |
| 2986_Neisseria_gonorrhoeae_strain_WHO_F_chromosome_1_g_4 | 54826 |
| 2986_Neisseria_gonorrhoeae_strain_WHO_F_chromosome_1_g_5 | 54827 |
| 2987_Neisseria_gonorrhoeae_strain_WHO_F_chromosome_1_g_1 | 54828 |
| 2987_Neisseria_gonorrhoeae_strain_WHO_F_chromosome_1_g_2 | 54829 |
| 2987_Neisseria_gonorrhoeae_strain_WHO_F_chromosome_1_g_3 | 54830 |
| 2987_Neisseria_gonorrhoeae_strain_WHO_F_chromosome_1_g_4 | 54831 |
| 2987_Neisseria_gonorrhoeae_strain_WHO_F_chromosome_1_g_5 | 54832 |
| 2988_Neisseria_gonorrhoeae_strain_WHO_F_chromosome_1_g_1 | 54833 |
| 2988_Neisseria_gonorrhoeae_strain_WHO_F_chromosome_1_g_2 | 54834 |
| 2988_Neisseria_gonorrhoeae_strain_WHO_F_chromosome_1_g_3 | 54835 |
| 2988_Neisseria_gonorrhoeae_strain_WHO_F_chromosome_1_g_4 | 54836 |
| 2988_Neisseria_gonorrhoeae_strain_WHO_F_chromosome_1_g_5 | 54837 |
| 2989_Neisseria_gonorrhoeae_strain_WHO_F_chromosome_1_g_1 | 54838 |
| 2989_Neisseria_gonorrhoeae_strain_WHO_F_chromosome_1_g_2 | 54839 |
| 2989_Neisseria_gonorrhoeae_strain_WHO_F_chromosome_1_g_3 | 54840 |
| 2990_Neisseria_gonorrhoeae_strain_WHO_F_chromosome_1_g_1 | 54841 |
| 2990_Neisseria_gonorrhoeae_strain_WHO_F_chromosome_1_g_2 | 54842 |
| 2990_Neisseria_gonorrhoeae_strain_WHO_F_chromosome_1_g_3 | 54843 |
| 2990_Neisseria_gonorrhoeae_strain_WHO_F_chromosome_1_g_4 | 54844 |
| 2990_Neisseria_gonorrhoeae_strain_WHO_F_chromosome_1_g_5 | 54845 |
| 2991_Neisseria_gonorrhoeae_strain_WHO_F_chromosome_1_g_1 | 54846 |
| 2991_Neisseria_gonorrhoeae_strain_WHO_F_chromosome_1_g_2 | 54847 |
| 2991_Neisseria_gonorrhoeae_strain_WHO_F_chromosome_1_g_3 | 54848 |
| 2991_Neisseria_gonorrhoeae_strain_WHO_F_chromosome_1_g_4 | 54849 |
| 2991_Neisseria_gonorrhoeae_strain_WHO_F_chromosome_1_g_5 | 54850 |
| 2992_Neisseria_gonorrhoeae_strain_WHO_F_chromosome_1_g_1 | 54851 |
| 2992_Neisseria_gonorrhoeae_strain_WHO_F_chromosome_1_g_2 | 54852 |
| 2992_Neisseria_gonorrhoeae_strain_WHO_F_chromosome_1_g_3 | 54853 |
| 2992_Neisseria_gonorrhoeae_strain_WHO_F_chromosome_1_g_4 | 54854 |
| 2992_Neisseria_gonorrhoeae_strain_WHO_F_chromosome_1_g_5 | 54855 |
| 2993_Neisseria_gonorrhoeae_strain_WHO_F_chromosome_1_g_1 | 54856 |
| 2993_Neisseria_gonorrhoeae_strain_WHO_F_chromosome_1_g_2 | 54857 |
| 2993_Neisseria_gonorrhoeae_strain_WHO_F_chromosome_1_g_3 | 54858 |
| 2993_Neisseria_gonorrhoeae_strain_WHO_F_chromosome_1_g_4 | 54859 |
| 2994_Neisseria_gonorrhoeae_strain_WHO_F_chromosome_1_g_1 | 54860 |
| 2994_Neisseria_gonorrhoeae_strain_WHO_F_chromosome_1_g_2 | 54861 |
| 2994_Neisseria_gonorrhoeae_strain_WHO_F_chromosome_1_g_3 | 54862 |
| 2994_Neisseria_gonorrhoeae_strain_WHO_F_chromosome_1_g_4 | 54863 |
| 2994_Neisseria_gonorrhoeae_strain_WHO_F_chromosome_1_g_5 | 54864 |
| 2995_Neisseria_gonorrhoeae_strain_WHO_F_chromosome_1_g_1 | 54865 |
| 2995_Neisseria_gonorrhoeae_strain_WHO_F_chromosome_1_g_2 | 54866 |
| 2995_Neisseria_gonorrhoeae_strain_WHO_F_chromosome_1_g_3 | 54867 |
| 2995_Neisseria_gonorrhoeae_strain_WHO_F_chromosome_1_g_4 | 54868 |
| 2995_Neisseria_gonorrhoeae_strain_WHO_F_chromosome_1_g_5 | 54869 |
| 2996_Neisseria_gonorrhoeae_strain_WHO_F_chromosome_1_g_1 | 54870 |
| 2996_Neisseria_gonorrhoeae_strain_WHO_F_chromosome_1_g_2 | 54871 |
| 2996_Neisseria_gonorrhoeae_strain_WHO_F_chromosome_1_g_3 | 54872 |
| 2996_Neisseria_gonorrhoeae_strain_WHO_F_chromosome_1_g_4 | 54873 |
| 2996_Neisseria_gonorrhoeae_strain_WHO_F_chromosome_1_g_5 | 54874 |
| 2997_Neisseria_gonorrhoeae_strain_WHO_F_chromosome_1_g_1 | 54875 |
| 2997_Neisseria_gonorrhoeae_strain_WHO_F_chromosome_1_g_2 | 54876 |
| 2997_Neisseria_gonorrhoeae_strain_WHO_F_chromosome_1_g_3 | 54877 |
| 2997_Neisseria_gonorrhoeae_strain_WHO_F_chromosome_1_g_4 | 54878 |
| 2997_Neisseria_gonorrhoeae_strain_WHO_F_chromosome_1_g_5 | 54879 |
| 2998_Neisseria_gonorrhoeae_strain_WHO_F_chromosome_1_g_1 | 54880 |
| 2998_Neisseria_gonorrhoeae_strain_WHO_F_chromosome_1_g_2 | 54881 |
| 2998_Neisseria_gonorrhoeae_strain_WHO_F_chromosome_1_g_3 | 54882 |
| 2998_Neisseria_gonorrhoeae_strain_WHO_F_chromosome_1_g_4 | 54883 |
| 2998_Neisseria_gonorrhoeae_strain_WHO_F_chromosome_1_g_5 | 54884 |
| 2999_Neisseria_gonorrhoeae_strain_WHO_F_chromosome_1_g_1 | 54885 |
| 2999_Neisseria_gonorrhoeae_strain_WHO_F_chromosome_1_g_2 | 54886 |
| 2999_Neisseria_gonorrhoeae_strain_WHO_F_chromosome_1_g_3 | 54887 |
| 2999_Neisseria_gonorrhoeae_strain_WHO_F_chromosome_1_g_4 | 54888 |
| 2999_Neisseria_gonorrhoeae_strain_WHO_F_chromosome_1_g_5 | 54889 |
| 3000_Neisseria_gonorrhoeae_strain_WHO_F_chromosome_1_g_1 | 54890 |
| 3000_Neisseria_gonorrhoeae_strain_WHO_F_chromosome_1_g_2 | 54891 |
| 3000_Neisseria_gonorrhoeae_strain_WHO_F_chromosome_1_g_3 | 54892 |
| 3000_Neisseria_gonorrhoeae_strain_WHO_F_chromosome_1_g_4 | 54893 |
| 3000_Neisseria_gonorrhoeae_strain_WHO_F_chromosome_1_g_5 | 54894 |
| 3001_Neisseria_gonorrhoeae_strain_WHO_F_chromosome_1_g_1 | 54895 |
| 3001_Neisseria_gonorrhoeae_strain_WHO_F_chromosome_1_g_2 | 54896 |
| 3001_Neisseria_gonorrhoeae_strain_WHO_F_chromosome_1_g_3 | 54897 |
| 3001_Neisseria_gonorrhoeae_strain_WHO_F_chromosome_1_g_4 | 54898 |
| 3001_Neisseria_gonorrhoeae_strain_WHO_F_chromosome_1_g_5 | 54899 |
| 3002_Neisseria_gonorrhoeae_strain_WHO_F_chromosome_1_g_1 | 54900 |
| 3002_Neisseria_gonorrhoeae_strain_WHO_F_chromosome_1_g_2 | 54901 |
| 3002_Neisseria_gonorrhoeae_strain_WHO_F_chromosome_1_g_3 | 54902 |
| 3002_Neisseria_gonorrhoeae_strain_WHO_F_chromosome_1_g_4 | 54903 |
| 3002_Neisseria_gonorrhoeae_strain_WHO_F_chromosome_1_g_5 | 54904 |
| 3003_Neisseria_gonorrhoeae_strain_WHO_F_chromosome_1_g_1 | 54905 |
| 3003_Neisseria_gonorrhoeae_strain_WHO_F_chromosome_1_g_2 | 54906 |
| 3003_Neisseria_gonorrhoeae_strain_WHO_F_chromosome_1_g_3 | 54907 |
| 3003_Neisseria_gonorrhoeae_strain_WHO_F_chromosome_1_g_4 | 54908 |
| 3003_Neisseria_gonorrhoeae_strain_WHO_F_chromosome_1_g_5 | 54909 |
| 3004_Neisseria_gonorrhoeae_strain_WHO_F_chromosome_1_g_1 | 54910 |
| 3004_Neisseria_gonorrhoeae_strain_WHO_F_chromosome_1_g_2 | 54911 |
| 3004_Neisseria_gonorrhoeae_strain_WHO_F_chromosome_1_g_3 | 54912 |
| 3004_Neisseria_gonorrhoeae_strain_WHO_F_chromosome_1_g_4 | 54913 |
| 3004_Neisseria_gonorrhoeae_strain_WHO_F_chromosome_1_g_5 | 54914 |
| 3005_Neisseria_gonorrhoeae_strain_WHO_F_chromosome_1_g_1 | 54915 |
| 3005_Neisseria_gonorrhoeae_strain_WHO_F_chromosome_1_g_2 | 54916 |
| 3005_Neisseria_gonorrhoeae_strain_WHO_F_chromosome_1_g_3 | 54917 |
| 3005_Neisseria_gonorrhoeae_strain_WHO_F_chromosome_1_g_4 | 54918 |
| 3005_Neisseria_gonorrhoeae_strain_WHO_F_chromosome_1_g_5 | 54919 |
| 3006_Neisseria_gonorrhoeae_strain_WHO_F_chromosome_1_g_1 | 54920 |
| 3006_Neisseria_gonorrhoeae_strain_WHO_F_chromosome_1_g_2 | 54921 |
| 3006_Neisseria_gonorrhoeae_strain_WHO_F_chromosome_1_g_3 | 54922 |
| 3006_Neisseria_gonorrhoeae_strain_WHO_F_chromosome_1_g_4 | 54923 |
| 3006_Neisseria_gonorrhoeae_strain_WHO_F_chromosome_1_g_5 | 54924 |
| 3007_Neisseria_gonorrhoeae_strain_WHO_F_chromosome_1_g_1 | 54925 |
| 3007_Neisseria_gonorrhoeae_strain_WHO_F_chromosome_1_g_2 | 54926 |
| 3007_Neisseria_gonorrhoeae_strain_WHO_F_chromosome_1_g_3 | 54927 |
| 3007_Neisseria_gonorrhoeae_strain_WHO_F_chromosome_1_g_4 | 54928 |
| 3007_Neisseria_gonorrhoeae_strain_WHO_F_chromosome_1_g_5 | 54929 |
| 3008_Neisseria_gonorrhoeae_strain_WHO_F_chromosome_1_g_1 | 54930 |
| 3008_Neisseria_gonorrhoeae_strain_WHO_F_chromosome_1_g_2 | 54931 |
| 3008_Neisseria_gonorrhoeae_strain_WHO_F_chromosome_1_g_3 | 54932 |
| 3008_Neisseria_gonorrhoeae_strain_WHO_F_chromosome_1_g_4 | 54933 |
| 3008_Neisseria_gonorrhoeae_strain_WHO_F_chromosome_1_g_5 | 54934 |
| 3009_Neisseria_gonorrhoeae_strain_WHO_F_chromosome_1_g_1 | 54935 |
| 3009_Neisseria_gonorrhoeae_strain_WHO_F_chromosome_1_g_2 | 54936 |
| 3009_Neisseria_gonorrhoeae_strain_WHO_F_chromosome_1_g_3 | 54937 |
| 3009_Neisseria_gonorrhoeae_strain_WHO_F_chromosome_1_g_4 | 54938 |
| 3009_Neisseria_gonorrhoeae_strain_WHO_F_chromosome_1_g_5 | 54939 |
| 3010_Neisseria_gonorrhoeae_strain_WHO_F_chromosome_1_g_1 | 54940 |
| 3010_Neisseria_gonorrhoeae_strain_WHO_F_chromosome_1_g_2 | 54941 |
| 3010_Neisseria_gonorrhoeae_strain_WHO_F_chromosome_1_g_3 | 54942 |
| 3010_Neisseria_gonorrhoeae_strain_WHO_F_chromosome_1_g_4 | 54943 |
| 3010_Neisseria_gonorrhoeae_strain_WHO_F_chromosome_1_g_5 | 54944 |
| 3011_Neisseria_gonorrhoeae_strain_WHO_F_chromosome_1_g_1 | 54945 |
| 3011_Neisseria_gonorrhoeae_strain_WHO_F_chromosome_1_g_2 | 54946 |
| 3011_Neisseria_gonorrhoeae_strain_WHO_F_chromosome_1_g_3 | 54947 |
| 3011_Neisseria_gonorrhoeae_strain_WHO_F_chromosome_1_g_4 | 54948 |
| 3012_Neisseria_gonorrhoeae_strain_WHO_F_chromosome_1_g_1 | 54949 |
| 3012_Neisseria_gonorrhoeae_strain_WHO_F_chromosome_1_g_2 | 54950 |
| 3012_Neisseria_gonorrhoeae_strain_WHO_F_chromosome_1_g_3 | 54951 |
| 3012_Neisseria_gonorrhoeae_strain_WHO_F_chromosome_1_g_4 | 54952 |
| 3012_Neisseria_gonorrhoeae_strain_WHO_F_chromosome_1_g_5 | 54953 |
| 3013_Neisseria_gonorrhoeae_strain_WHO_F_chromosome_1_g_1 | 54954 |
| 3013_Neisseria_gonorrhoeae_strain_WHO_F_chromosome_1_g_2 | 54955 |
| 3013_Neisseria_gonorrhoeae_strain_WHO_F_chromosome_1_g_3 | 54956 |
| 3013_Neisseria_gonorrhoeae_strain_WHO_F_chromosome_1_g_4 | 54957 |
| 3013_Neisseria_gonorrhoeae_strain_WHO_F_chromosome_1_g_5 | 54958 |
| 3014_Neisseria_gonorrhoeae_strain_WHO_F_chromosome_1_g_1 | 54959 |
| 3014_Neisseria_gonorrhoeae_strain_WHO_F_chromosome_1_g_2 | 54960 |
| 3014_Neisseria_gonorrhoeae_strain_WHO_F_chromosome_1_g_3 | 54961 |
| 3014_Neisseria_gonorrhoeae_strain_WHO_F_chromosome_1_g_4 | 54962 |
| 3014_Neisseria_gonorrhoeae_strain_WHO_F_chromosome_1_g_5 | 54963 |
| 3015_Neisseria_gonorrhoeae_strain_WHO_F_chromosome_1_g_1 | 54964 |
| 3015_Neisseria_gonorrhoeae_strain_WHO_F_chromosome_1_g_2 | 54965 |
| 3015_Neisseria_gonorrhoeae_strain_WHO_F_chromosome_1_g_3 | 54966 |
| 3015_Neisseria_gonorrhoeae_strain_WHO_F_chromosome_1_g_4 | 54967 |
| 3015_Neisseria_gonorrhoeae_strain_WHO_F_chromosome_1_g_5 | 54968 |
| 3016_Neisseria_gonorrhoeae_strain_WHO_F_chromosome_1_g_1 | 54969 |
| 3016_Neisseria_gonorrhoeae_strain_WHO_F_chromosome_1_g_2 | 54970 |
| 3016_Neisseria_gonorrhoeae_strain_WHO_F_chromosome_1_g_3 | 54971 |
| 3016_Neisseria_gonorrhoeae_strain_WHO_F_chromosome_1_g_4 | 54972 |
| 3016_Neisseria_gonorrhoeae_strain_WHO_F_chromosome_1_g_5 | 54973 |
| 3017_Neisseria_gonorrhoeae_strain_WHO_F_chromosome_1_g_1 | 54974 |
| 3017_Neisseria_gonorrhoeae_strain_WHO_F_chromosome_1_g_2 | 54975 |
| 3017_Neisseria_gonorrhoeae_strain_WHO_F_chromosome_1_g_3 | 54976 |
| 3017_Neisseria_gonorrhoeae_strain_WHO_F_chromosome_1_g_4 | 54977 |
| 3018_Neisseria_gonorrhoeae_strain_WHO_F_chromosome_1_g_1 | 54978 |
| 3018_Neisseria_gonorrhoeae_strain_WHO_F_chromosome_1_g_2 | 54979 |
| 3018_Neisseria_gonorrhoeae_strain_WHO_F_chromosome_1_g_3 | 54980 |
| 3018_Neisseria_gonorrhoeae_strain_WHO_F_chromosome_1_g_4 | 54981 |
| 3018_Neisseria_gonorrhoeae_strain_WHO_F_chromosome_1_g_5 | 54982 |
| 3019_Neisseria_gonorrhoeae_strain_WHO_F_chromosome_1_g_1 | 54983 |
| 3019_Neisseria_gonorrhoeae_strain_WHO_F_chromosome_1_g_2 | 54984 |
| 3019_Neisseria_gonorrhoeae_strain_WHO_F_chromosome_1_g_3 | 54985 |
| 3019_Neisseria_gonorrhoeae_strain_WHO_F_chromosome_1_g_4 | 54986 |
| 3019_Neisseria_gonorrhoeae_strain_WHO_F_chromosome_1_g_5 | 54987 |
| 3020_Neisseria_gonorrhoeae_strain_WHO_F_chromosome_1_g_1 | 54988 |
| 3020_Neisseria_gonorrhoeae_strain_WHO_F_chromosome_1_g_2 | 54989 |
| 3020_Neisseria_gonorrhoeae_strain_WHO_F_chromosome_1_g_3 | 54990 |
| 3020_Neisseria_gonorrhoeae_strain_WHO_F_chromosome_1_g_4 | 54991 |
| 3020_Neisseria_gonorrhoeae_strain_WHO_F_chromosome_1_g_5 | 54992 |
| 3021_Neisseria_gonorrhoeae_strain_WHO_F_chromosome_1_g_1 | 54993 |
| 3021_Neisseria_gonorrhoeae_strain_WHO_F_chromosome_1_g_2 | 54994 |
| 3021_Neisseria_gonorrhoeae_strain_WHO_F_chromosome_1_g_3 | 54995 |
| 3021_Neisseria_gonorrhoeae_strain_WHO_F_chromosome_1_g_4 | 54996 |
| 3021_Neisseria_gonorrhoeae_strain_WHO_F_chromosome_1_g_5 | 54997 |
| 3022_Neisseria_gonorrhoeae_strain_WHO_F_chromosome_1_g_1 | 54998 |
| 3022_Neisseria_gonorrhoeae_strain_WHO_F_chromosome_1_g_2 | 54999 |
| 3022_Neisseria_gonorrhoeae_strain_WHO_F_chromosome_1_g_3 | 55000 |
| 3022_Neisseria_gonorrhoeae_strain_WHO_F_chromosome_1_g_4 | 55001 |
| 3022_Neisseria_gonorrhoeae_strain_WHO_F_chromosome_1_g_5 | 55002 |
| 3023_Neisseria_gonorrhoeae_strain_WHO_F_chromosome_1_g_1 | 55003 |
| 3023_Neisseria_gonorrhoeae_strain_WHO_F_chromosome_1_g_2 | 55004 |
| 3023_Neisseria_gonorrhoeae_strain_WHO_F_chromosome_1_g_3 | 55005 |
| 3023_Neisseria_gonorrhoeae_strain_WHO_F_chromosome_1_g_4 | 55006 |
| 3024_Neisseria_gonorrhoeae_strain_WHO_F_chromosome_1_g_1 | 55007 |
| 3024_Neisseria_gonorrhoeae_strain_WHO_F_chromosome_1_g_2 | 55008 |
| 3024_Neisseria_gonorrhoeae_strain_WHO_F_chromosome_1_g_3 | 55009 |
| 3024_Neisseria_gonorrhoeae_strain_WHO_F_chromosome_1_g_4 | 55010 |
| 3024_Neisseria_gonorrhoeae_strain_WHO_F_chromosome_1_g_5 | 55011 |
| 3025_Neisseria_gonorrhoeae_strain_WHO_F_chromosome_1_g_1 | 55012 |
| 3025_Neisseria_gonorrhoeae_strain_WHO_F_chromosome_1_g_2 | 55013 |
| 3025_Neisseria_gonorrhoeae_strain_WHO_F_chromosome_1_g_3 | 55014 |
| 3025_Neisseria_gonorrhoeae_strain_WHO_F_chromosome_1_g_4 | 55015 |
| 3025_Neisseria_gonorrhoeae_strain_WHO_F_chromosome_1_g_5 | 55016 |
| 3026_Neisseria_gonorrhoeae_strain_WHO_F_chromosome_1_g_1 | 55017 |
| 3026_Neisseria_gonorrhoeae_strain_WHO_F_chromosome_1_g_2 | 55018 |
| 3026_Neisseria_gonorrhoeae_strain_WHO_F_chromosome_1_g_3 | 55019 |
| 3026_Neisseria_gonorrhoeae_strain_WHO_F_chromosome_1_g_4 | 55020 |
| 3026_Neisseria_gonorrhoeae_strain_WHO_F_chromosome_1_g_5 | 55021 |
| 3027_Neisseria_gonorrhoeae_strain_WHO_F_chromosome_1_g_1 | 55022 |
| 3027_Neisseria_gonorrhoeae_strain_WHO_F_chromosome_1_g_2 | 55023 |
| 3027_Neisseria_gonorrhoeae_strain_WHO_F_chromosome_1_g_3 | 55024 |
| 3027_Neisseria_gonorrhoeae_strain_WHO_F_chromosome_1_g_4 | 55025 |
| 3027_Neisseria_gonorrhoeae_strain_WHO_F_chromosome_1_g_5 | 55026 |
| 3028_Neisseria_gonorrhoeae_strain_WHO_F_chromosome_1_g_1 | 55027 |
| 3028_Neisseria_gonorrhoeae_strain_WHO_F_chromosome_1_g_2 | 55028 |
| 3029_Neisseria_gonorrhoeae_strain_WHO_F_chromosome_1_g_1 | 55029 |
| 3029_Neisseria_gonorrhoeae_strain_WHO_F_chromosome_1_g_2 | 55030 |
| 3029_Neisseria_gonorrhoeae_strain_WHO_F_chromosome_1_g_3 | 55031 |
| 3029_Neisseria_gonorrhoeae_strain_WHO_F_chromosome_1_g_4 | 55032 |
| 3029_Neisseria_gonorrhoeae_strain_WHO_F_chromosome_1_g_5 | 55033 |
| 3030_Neisseria_gonorrhoeae_strain_WHO_F_chromosome_1_g_1 | 55034 |
| 3030_Neisseria_gonorrhoeae_strain_WHO_F_chromosome_1_g_2 | 55035 |
| 3030_Neisseria_gonorrhoeae_strain_WHO_F_chromosome_1_g_3 | 55036 |
| 3030_Neisseria_gonorrhoeae_strain_WHO_F_chromosome_1_g_4 | 55037 |
| 3030_Neisseria_gonorrhoeae_strain_WHO_F_chromosome_1_g_5 | 55038 |
| 3031_Neisseria_gonorrhoeae_strain_WHO_F_chromosome_1_g_1 | 55039 |
| 3031_Neisseria_gonorrhoeae_strain_WHO_F_chromosome_1_g_2 | 55040 |
| 3031_Neisseria_gonorrhoeae_strain_WHO_F_chromosome_1_g_3 | 55041 |
| 3031_Neisseria_gonorrhoeae_strain_WHO_F_chromosome_1_g_4 | 55042 |
| 3031_Neisseria_gonorrhoeae_strain_WHO_F_chromosome_1_g_5 | 55043 |
| 3032_Neisseria_gonorrhoeae_strain_WHO_F_chromosome_1_g_1 | 55044 |
| 3032_Neisseria_gonorrhoeae_strain_WHO_F_chromosome_1_g_2 | 55045 |
| 3032_Neisseria_gonorrhoeae_strain_WHO_F_chromosome_1_g_3 | 55046 |
| 3032_Neisseria_gonorrhoeae_strain_WHO_F_chromosome_1_g_4 | 55047 |
| 3032_Neisseria_gonorrhoeae_strain_WHO_F_chromosome_1_g_5 | 55048 |
| 3033_Neisseria_gonorrhoeae_strain_WHO_F_chromosome_1_g_1 | 55049 |
| 3033_Neisseria_gonorrhoeae_strain_WHO_F_chromosome_1_g_2 | 55050 |
| 3033_Neisseria_gonorrhoeae_strain_WHO_F_chromosome_1_g_3 | 55051 |
| 3033_Neisseria_gonorrhoeae_strain_WHO_F_chromosome_1_g_4 | 55052 |
| 3033_Neisseria_gonorrhoeae_strain_WHO_F_chromosome_1_g_5 | 55053 |
| 3034_Neisseria_gonorrhoeae_strain_WHO_F_chromosome_1_g_1 | 55054 |
| 3034_Neisseria_gonorrhoeae_strain_WHO_F_chromosome_1_g_2 | 55055 |
| 3034_Neisseria_gonorrhoeae_strain_WHO_F_chromosome_1_g_3 | 55056 |
| 3034_Neisseria_gonorrhoeae_strain_WHO_F_chromosome_1_g_4 | 55057 |
| 3034_Neisseria_gonorrhoeae_strain_WHO_F_chromosome_1_g_5 | 55058 |
| 3035_Neisseria_gonorrhoeae_strain_WHO_F_chromosome_1_g_1 | 55059 |
| 3035_Neisseria_gonorrhoeae_strain_WHO_F_chromosome_1_g_2 | 55060 |
| 3035_Neisseria_gonorrhoeae_strain_WHO_F_chromosome_1_g_3 | 55061 |
| 3035_Neisseria_gonorrhoeae_strain_WHO_F_chromosome_1_g_4 | 55062 |
| 3035_Neisseria_gonorrhoeae_strain_WHO_F_chromosome_1_g_5 | 55063 |
| 3036_Neisseria_gonorrhoeae_strain_WHO_F_chromosome_1_g_1 | 55064 |
| 3036_Neisseria_gonorrhoeae_strain_WHO_F_chromosome_1_g_2 | 55065 |
| 3036_Neisseria_gonorrhoeae_strain_WHO_F_chromosome_1_g_3 | 55066 |
| 3036_Neisseria_gonorrhoeae_strain_WHO_F_chromosome_1_g_4 | 55067 |
| 3036_Neisseria_gonorrhoeae_strain_WHO_F_chromosome_1_g_5 | 55068 |
| 3037_Neisseria_gonorrhoeae_strain_WHO_F_chromosome_1_g_1 | 55069 |
| 3037_Neisseria_gonorrhoeae_strain_WHO_F_chromosome_1_g_2 | 55070 |
| 3037_Neisseria_gonorrhoeae_strain_WHO_F_chromosome_1_g_3 | 55071 |
| 3037_Neisseria_gonorrhoeae_strain_WHO_F_chromosome_1_g_4 | 55072 |
| 3037_Neisseria_gonorrhoeae_strain_WHO_F_chromosome_1_g_5 | 55073 |
| 3038_Neisseria_gonorrhoeae_strain_WHO_F_chromosome_1_g_1 | 55074 |
| 3038_Neisseria_gonorrhoeae_strain_WHO_F_chromosome_1_g_2 | 55075 |
| 3038_Neisseria_gonorrhoeae_strain_WHO_F_chromosome_1_g_3 | 55076 |
| 3038_Neisseria_gonorrhoeae_strain_WHO_F_chromosome_1_g_4 | 55077 |
| 3038_Neisseria_gonorrhoeae_strain_WHO_F_chromosome_1_g_5 | 55078 |
| 3039_Neisseria_gonorrhoeae_strain_WHO_F_chromosome_1_g_1 | 55079 |
| 3039_Neisseria_gonorrhoeae_strain_WHO_F_chromosome_1_g_2 | 55080 |
| 3039_Neisseria_gonorrhoeae_strain_WHO_F_chromosome_1_g_3 | 55081 |
| 3039_Neisseria_gonorrhoeae_strain_WHO_F_chromosome_1_g_4 | 55082 |
| 3039_Neisseria_gonorrhoeae_strain_WHO_F_chromosome_1_g_5 | 55083 |
| 3040_Neisseria_gonorrhoeae_strain_WHO_F_chromosome_1_g_1 | 55084 |
| 3040_Neisseria_gonorrhoeae_strain_WHO_F_chromosome_1_g_2 | 55085 |
| 3040_Neisseria_gonorrhoeae_strain_WHO_F_chromosome_1_g_3 | 55086 |
| 3040_Neisseria_gonorrhoeae_strain_WHO_F_chromosome_1_g_4 | 55087 |
| 3040_Neisseria_gonorrhoeae_strain_WHO_F_chromosome_1_g_5 | 55088 |
| 3041_Neisseria_gonorrhoeae_strain_WHO_F_chromosome_1_g_1 | 55089 |
| 3041_Neisseria_gonorrhoeae_strain_WHO_F_chromosome_1_g_2 | 55090 |
| 3041_Neisseria_gonorrhoeae_strain_WHO_F_chromosome_1_g_3 | 55091 |
| 3041_Neisseria_gonorrhoeae_strain_WHO_F_chromosome_1_g_4 | 55092 |
| 3041_Neisseria_gonorrhoeae_strain_WHO_F_chromosome_1_g_5 | 55093 |
| 3042_Neisseria_gonorrhoeae_strain_WHO_F_chromosome_1_g_1 | 55094 |
| 3042_Neisseria_gonorrhoeae_strain_WHO_F_chromosome_1_g_2 | 55095 |
| 3042_Neisseria_gonorrhoeae_strain_WHO_F_chromosome_1_g_3 | 55096 |
| 3042_Neisseria_gonorrhoeae_strain_WHO_F_chromosome_1_g_4 | 55097 |
| 3042_Neisseria_gonorrhoeae_strain_WHO_F_chromosome_1_g_5 | 55098 |
| 3043_Neisseria_gonorrhoeae_strain_WHO_F_chromosome_1_g_1 | 55099 |
| 3043_Neisseria_gonorrhoeae_strain_WHO_F_chromosome_1_g_2 | 55100 |
| 3043_Neisseria_gonorrhoeae_strain_WHO_F_chromosome_1_g_3 | 55101 |
| 3043_Neisseria_gonorrhoeae_strain_WHO_F_chromosome_1_g_4 | 55102 |
| 3043_Neisseria_gonorrhoeae_strain_WHO_F_chromosome_1_g_5 | 55103 |
| 3044_Neisseria_gonorrhoeae_strain_WHO_F_chromosome_1_g_1 | 55104 |
| 3044_Neisseria_gonorrhoeae_strain_WHO_F_chromosome_1_g_2 | 55105 |
| 3044_Neisseria_gonorrhoeae_strain_WHO_F_chromosome_1_g_3 | 55106 |
| 3044_Neisseria_gonorrhoeae_strain_WHO_F_chromosome_1_g_4 | 55107 |
| 3044_Neisseria_gonorrhoeae_strain_WHO_F_chromosome_1_g_5 | 55108 |
| 3045_Neisseria_gonorrhoeae_strain_WHO_F_chromosome_1_g_1 | 55109 |
| 3045_Neisseria_gonorrhoeae_strain_WHO_F_chromosome_1_g_2 | 55110 |
| 3045_Neisseria_gonorrhoeae_strain_WHO_F_chromosome_1_g_3 | 55111 |
| 3045_Neisseria_gonorrhoeae_strain_WHO_F_chromosome_1_g_4 | 55112 |
| 3045_Neisseria_gonorrhoeae_strain_WHO_F_chromosome_1_g_5 | 55113 |
| 3046_Neisseria_gonorrhoeae_strain_WHO_F_chromosome_1_g_1 | 55114 |
| 3046_Neisseria_gonorrhoeae_strain_WHO_F_chromosome_1_g_2 | 55115 |
| 3046_Neisseria_gonorrhoeae_strain_WHO_F_chromosome_1_g_3 | 55116 |
| 3046_Neisseria_gonorrhoeae_strain_WHO_F_chromosome_1_g_4 | 55117 |
| 3046_Neisseria_gonorrhoeae_strain_WHO_F_chromosome_1_g_5 | 55118 |
| 3047_Neisseria_gonorrhoeae_strain_WHO_F_chromosome_1_g_1 | 55119 |
| 3047_Neisseria_gonorrhoeae_strain_WHO_F_chromosome_1_g_2 | 55120 |
| 3047_Neisseria_gonorrhoeae_strain_WHO_F_chromosome_1_g_3 | 55121 |
| 3047_Neisseria_gonorrhoeae_strain_WHO_F_chromosome_1_g_4 | 55122 |
| 3047_Neisseria_gonorrhoeae_strain_WHO_F_chromosome_1_g_5 | 55123 |
| 3048_Neisseria_gonorrhoeae_strain_WHO_F_chromosome_1_g_1 | 55124 |
| 3048_Neisseria_gonorrhoeae_strain_WHO_F_chromosome_1_g_2 | 55125 |
| 3048_Neisseria_gonorrhoeae_strain_WHO_F_chromosome_1_g_3 | 55126 |
| 3048_Neisseria_gonorrhoeae_strain_WHO_F_chromosome_1_g_4 | 55127 |
| 3048_Neisseria_gonorrhoeae_strain_WHO_F_chromosome_1_g_5 | 55128 |
| 3049_Neisseria_gonorrhoeae_strain_WHO_F_chromosome_1_g_1 | 55129 |
| 3049_Neisseria_gonorrhoeae_strain_WHO_F_chromosome_1_g_2 | 55130 |
| 3049_Neisseria_gonorrhoeae_strain_WHO_F_chromosome_1_g_3 | 55131 |
| 3049_Neisseria_gonorrhoeae_strain_WHO_F_chromosome_1_g_4 | 55132 |
| 3049_Neisseria_gonorrhoeae_strain_WHO_F_chromosome_1_g_5 | 55133 |
| 3050_Neisseria_gonorrhoeae_strain_WHO_F_chromosome_1_g_1 | 55134 |
| 3050_Neisseria_gonorrhoeae_strain_WHO_F_chromosome_1_g_2 | 55135 |
| 3050_Neisseria_gonorrhoeae_strain_WHO_F_chromosome_1_g_3 | 55136 |
| 3050_Neisseria_gonorrhoeae_strain_WHO_F_chromosome_1_g_4 | 55137 |
| 3050_Neisseria_gonorrhoeae_strain_WHO_F_chromosome_1_g_5 | 55138 |
| 3051_Neisseria_gonorrhoeae_strain_WHO_F_chromosome_1_g_1 | 55139 |
| 3051_Neisseria_gonorrhoeae_strain_WHO_F_chromosome_1_g_2 | 55140 |
| 3051_Neisseria_gonorrhoeae_strain_WHO_F_chromosome_1_g_3 | 55141 |
| 3051_Neisseria_gonorrhoeae_strain_WHO_F_chromosome_1_g_4 | 55142 |
| 3051_Neisseria_gonorrhoeae_strain_WHO_F_chromosome_1_g_5 | 55143 |
| 3052_Neisseria_gonorrhoeae_strain_WHO_F_chromosome_1_g_1 | 55144 |
| 3052_Neisseria_gonorrhoeae_strain_WHO_F_chromosome_1_g_2 | 55145 |
| 3052_Neisseria_gonorrhoeae_strain_WHO_F_chromosome_1_g_3 | 55146 |
| 3052_Neisseria_gonorrhoeae_strain_WHO_F_chromosome_1_g_4 | 55147 |
| 3052_Neisseria_gonorrhoeae_strain_WHO_F_chromosome_1_g_5 | 55148 |
| 3053_Neisseria_gonorrhoeae_strain_WHO_F_chromosome_1_g_1 | 55149 |
| 3053_Neisseria_gonorrhoeae_strain_WHO_F_chromosome_1_g_2 | 55150 |
| 3053_Neisseria_gonorrhoeae_strain_WHO_F_chromosome_1_g_3 | 55151 |
| 3053_Neisseria_gonorrhoeae_strain_WHO_F_chromosome_1_g_4 | 55152 |
| 3054_Neisseria_gonorrhoeae_strain_WHO_F_chromosome_1_g_1 | 55153 |
| 3054_Neisseria_gonorrhoeae_strain_WHO_F_chromosome_1_g_2 | 55154 |
| 3054_Neisseria_gonorrhoeae_strain_WHO_F_chromosome_1_g_3 | 55155 |
| 3054_Neisseria_gonorrhoeae_strain_WHO_F_chromosome_1_g_4 | 55156 |
| 3054_Neisseria_gonorrhoeae_strain_WHO_F_chromosome_1_g_5 | 55157 |
| 3055_Neisseria_gonorrhoeae_strain_WHO_F_chromosome_1_g_1 | 55158 |
| 3055_Neisseria_gonorrhoeae_strain_WHO_F_chromosome_1_g_2 | 55159 |
| 3055_Neisseria_gonorrhoeae_strain_WHO_F_chromosome_1_g_3 | 55160 |
| 3055_Neisseria_gonorrhoeae_strain_WHO_F_chromosome_1_g_4 | 55161 |
| 3055_Neisseria_gonorrhoeae_strain_WHO_F_chromosome_1_g_5 | 55162 |
| 3056_Neisseria_gonorrhoeae_strain_WHO_F_chromosome_1_g_1 | 55163 |
| 3056_Neisseria_gonorrhoeae_strain_WHO_F_chromosome_1_g_2 | 55164 |
| 3056_Neisseria_gonorrhoeae_strain_WHO_F_chromosome_1_g_3 | 55165 |
| 3056_Neisseria_gonorrhoeae_strain_WHO_F_chromosome_1_g_4 | 55166 |
| 3056_Neisseria_gonorrhoeae_strain_WHO_F_chromosome_1_g_5 | 55167 |
| 3057_Neisseria_gonorrhoeae_strain_WHO_F_chromosome_1_g_1 | 55168 |
| 3057_Neisseria_gonorrhoeae_strain_WHO_F_chromosome_1_g_2 | 55169 |
| 3057_Neisseria_gonorrhoeae_strain_WHO_F_chromosome_1_g_3 | 55170 |
| 3057_Neisseria_gonorrhoeae_strain_WHO_F_chromosome_1_g_4 | 55171 |
| 3057_Neisseria_gonorrhoeae_strain_WHO_F_chromosome_1_g_5 | 55172 |
| 3058_Neisseria_gonorrhoeae_strain_WHO_F_chromosome_1_g_1 | 55173 |
| 3058_Neisseria_gonorrhoeae_strain_WHO_F_chromosome_1_g_2 | 55174 |
| 3058_Neisseria_gonorrhoeae_strain_WHO_F_chromosome_1_g_3 | 55175 |
| 3058_Neisseria_gonorrhoeae_strain_WHO_F_chromosome_1_g_4 | 55176 |
| 3058_Neisseria_gonorrhoeae_strain_WHO_F_chromosome_1_g_5 | 55177 |
| 3059_Neisseria_gonorrhoeae_strain_WHO_F_chromosome_1_g_1 | 55178 |
| 3059_Neisseria_gonorrhoeae_strain_WHO_F_chromosome_1_g_2 | 55179 |
| 3059_Neisseria_gonorrhoeae_strain_WHO_F_chromosome_1_g_3 | 55180 |
| 3059_Neisseria_gonorrhoeae_strain_WHO_F_chromosome_1_g_4 | 55181 |
| 3059_Neisseria_gonorrhoeae_strain_WHO_F_chromosome_1_g_5 | 55182 |
| 3060_Neisseria_gonorrhoeae_strain_WHO_F_chromosome_1_g_1 | 55183 |
| 3060_Neisseria_gonorrhoeae_strain_WHO_F_chromosome_1_g_2 | 55184 |
| 3060_Neisseria_gonorrhoeae_strain_WHO_F_chromosome_1_g_3 | 55185 |
| 3060_Neisseria_gonorrhoeae_strain_WHO_F_chromosome_1_g_4 | 55186 |
| 3060_Neisseria_gonorrhoeae_strain_WHO_F_chromosome_1_g_5 | 55187 |
| 3061_Neisseria_gonorrhoeae_strain_WHO_F_chromosome_1_g_1 | 55188 |
| 3061_Neisseria_gonorrhoeae_strain_WHO_F_chromosome_1_g_2 | 55189 |
| 3061_Neisseria_gonorrhoeae_strain_WHO_F_chromosome_1_g_3 | 55190 |
| 3061_Neisseria_gonorrhoeae_strain_WHO_F_chromosome_1_g_4 | 55191 |
| 3061_Neisseria_gonorrhoeae_strain_WHO_F_chromosome_1_g_5 | 55192 |
| 3062_Neisseria_gonorrhoeae_strain_WHO_F_chromosome_1_g_1 | 55193 |
| 3062_Neisseria_gonorrhoeae_strain_WHO_F_chromosome_1_g_2 | 55194 |
| 3062_Neisseria_gonorrhoeae_strain_WHO_F_chromosome_1_g_3 | 55195 |
| 3062_Neisseria_gonorrhoeae_strain_WHO_F_chromosome_1_g_4 | 55196 |
| 3062_Neisseria_gonorrhoeae_strain_WHO_F_chromosome_1_g_5 | 55197 |
| 3063_Neisseria_gonorrhoeae_strain_WHO_F_chromosome_1_g_1 | 55198 |
| 3063_Neisseria_gonorrhoeae_strain_WHO_F_chromosome_1_g_2 | 55199 |
| 3063_Neisseria_gonorrhoeae_strain_WHO_F_chromosome_1_g_3 | 55200 |
| 3063_Neisseria_gonorrhoeae_strain_WHO_F_chromosome_1_g_4 | 55201 |
| 3063_Neisseria_gonorrhoeae_strain_WHO_F_chromosome_1_g_5 | 55202 |
| 3064_Neisseria_gonorrhoeae_strain_WHO_F_chromosome_1_g_1 | 55203 |
| 3064_Neisseria_gonorrhoeae_strain_WHO_F_chromosome_1_g_2 | 55204 |
| 3064_Neisseria_gonorrhoeae_strain_WHO_F_chromosome_1_g_3 | 55205 |
| 3064_Neisseria_gonorrhoeae_strain_WHO_F_chromosome_1_g_4 | 55206 |
| 3064_Neisseria_gonorrhoeae_strain_WHO_F_chromosome_1_g_5 | 55207 |
| 3065_Neisseria_gonorrhoeae_strain_WHO_F_chromosome_1_g_1 | 55208 |
| 3065_Neisseria_gonorrhoeae_strain_WHO_F_chromosome_1_g_2 | 55209 |
| 3065_Neisseria_gonorrhoeae_strain_WHO_F_chromosome_1_g_3 | 55210 |
| 3065_Neisseria_gonorrhoeae_strain_WHO_F_chromosome_1_g_4 | 55211 |
| 3065_Neisseria_gonorrhoeae_strain_WHO_F_chromosome_1_g_5 | 55212 |
| 3066_Neisseria_gonorrhoeae_strain_WHO_F_chromosome_1_g_1 | 55213 |
| 3066_Neisseria_gonorrhoeae_strain_WHO_F_chromosome_1_g_2 | 55214 |
| 3066_Neisseria_gonorrhoeae_strain_WHO_F_chromosome_1_g_3 | 55215 |
| 3066_Neisseria_gonorrhoeae_strain_WHO_F_chromosome_1_g_4 | 55216 |
| 3067_Neisseria_gonorrhoeae_strain_WHO_F_chromosome_1_g_1 | 55217 |
| 3067_Neisseria_gonorrhoeae_strain_WHO_F_chromosome_1_g_2 | 55218 |
| 3067_Neisseria_gonorrhoeae_strain_WHO_F_chromosome_1_g_3 | 55219 |
| 3067_Neisseria_gonorrhoeae_strain_WHO_F_chromosome_1_g_4 | 55220 |
| 3067_Neisseria_gonorrhoeae_strain_WHO_F_chromosome_1_g_5 | 55221 |
| 3068_Neisseria_gonorrhoeae_strain_WHO_F_chromosome_1_g_1 | 55222 |
| 3068_Neisseria_gonorrhoeae_strain_WHO_F_chromosome_1_g_2 | 55223 |
| 3068_Neisseria_gonorrhoeae_strain_WHO_F_chromosome_1_g_3 | 55224 |
| 3068_Neisseria_gonorrhoeae_strain_WHO_F_chromosome_1_g_4 | 55225 |
| 3068_Neisseria_gonorrhoeae_strain_WHO_F_chromosome_1_g_5 | 55226 |
| 3069_Neisseria_gonorrhoeae_strain_WHO_F_chromosome_1_g_1 | 55227 |
| 3069_Neisseria_gonorrhoeae_strain_WHO_F_chromosome_1_g_2 | 55228 |
| 3069_Neisseria_gonorrhoeae_strain_WHO_F_chromosome_1_g_3 | 55229 |
| 3069_Neisseria_gonorrhoeae_strain_WHO_F_chromosome_1_g_4 | 55230 |
| 3069_Neisseria_gonorrhoeae_strain_WHO_F_chromosome_1_g_5 | 55231 |
| 3070_Neisseria_gonorrhoeae_strain_WHO_F_chromosome_1_g_1 | 55232 |
| 3070_Neisseria_gonorrhoeae_strain_WHO_F_chromosome_1_g_2 | 55233 |
| 3070_Neisseria_gonorrhoeae_strain_WHO_F_chromosome_1_g_3 | 55234 |
| 3070_Neisseria_gonorrhoeae_strain_WHO_F_chromosome_1_g_4 | 55235 |
| 3070_Neisseria_gonorrhoeae_strain_WHO_F_chromosome_1_g_5 | 55236 |
| 3071_Neisseria_gonorrhoeae_strain_WHO_F_chromosome_1_g_1 | 55237 |
| 3071_Neisseria_gonorrhoeae_strain_WHO_F_chromosome_1_g_2 | 55238 |
| 3071_Neisseria_gonorrhoeae_strain_WHO_F_chromosome_1_g_3 | 55239 |
| 3071_Neisseria_gonorrhoeae_strain_WHO_F_chromosome_1_g_4 | 55240 |
| 3071_Neisseria_gonorrhoeae_strain_WHO_F_chromosome_1_g_5 | 55241 |
| 3072_Neisseria_gonorrhoeae_strain_WHO_F_chromosome_1_g_1 | 55242 |
| 3072_Neisseria_gonorrhoeae_strain_WHO_F_chromosome_1_g_2 | 55243 |
| 3072_Neisseria_gonorrhoeae_strain_WHO_F_chromosome_1_g_3 | 55244 |
| 3072_Neisseria_gonorrhoeae_strain_WHO_F_chromosome_1_g_4 | 55245 |
| 3072_Neisseria_gonorrhoeae_strain_WHO_F_chromosome_1_g_5 | 55246 |
| 3073_Neisseria_gonorrhoeae_strain_WHO_F_chromosome_1_g_1 | 55247 |
| 3073_Neisseria_gonorrhoeae_strain_WHO_F_chromosome_1_g_2 | 55248 |
| 3074_Neisseria_gonorrhoeae_strain_WHO_F_chromosome_1_g_1 | 55249 |
| 3074_Neisseria_gonorrhoeae_strain_WHO_F_chromosome_1_g_2 | 55250 |
| 3074_Neisseria_gonorrhoeae_strain_WHO_F_chromosome_1_g_3 | 55251 |
| 3074_Neisseria_gonorrhoeae_strain_WHO_F_chromosome_1_g_4 | 55252 |
| 3074_Neisseria_gonorrhoeae_strain_WHO_F_chromosome_1_g_5 | 55253 |
| 3075_Neisseria_gonorrhoeae_strain_WHO_F_chromosome_1_g_1 | 55254 |
| 3075_Neisseria_gonorrhoeae_strain_WHO_F_chromosome_1_g_2 | 55255 |
| 3075_Neisseria_gonorrhoeae_strain_WHO_F_chromosome_1_g_3 | 55256 |
| 3075_Neisseria_gonorrhoeae_strain_WHO_F_chromosome_1_g_4 | 55257 |
| 3076_Neisseria_gonorrhoeae_strain_WHO_F_chromosome_1_g_1 | 55258 |
| 3076_Neisseria_gonorrhoeae_strain_WHO_F_chromosome_1_g_2 | 55259 |
| 3076_Neisseria_gonorrhoeae_strain_WHO_F_chromosome_1_g_3 | 55260 |
| 3076_Neisseria_gonorrhoeae_strain_WHO_F_chromosome_1_g_4 | 55261 |
| 3076_Neisseria_gonorrhoeae_strain_WHO_F_chromosome_1_g_5 | 55262 |
| 3077_Neisseria_gonorrhoeae_strain_WHO_F_chromosome_1_g_1 | 55263 |
| 3077_Neisseria_gonorrhoeae_strain_WHO_F_chromosome_1_g_2 | 55264 |
| 3077_Neisseria_gonorrhoeae_strain_WHO_F_chromosome_1_g_3 | 55265 |
| 3077_Neisseria_gonorrhoeae_strain_WHO_F_chromosome_1_g_4 | 55266 |
| 3077_Neisseria_gonorrhoeae_strain_WHO_F_chromosome_1_g_5 | 55267 |
| 3078_Neisseria_gonorrhoeae_strain_WHO_F_chromosome_1_g_1 | 55268 |
| 3078_Neisseria_gonorrhoeae_strain_WHO_F_chromosome_1_g_2 | 55269 |
| 3078_Neisseria_gonorrhoeae_strain_WHO_F_chromosome_1_g_3 | 55270 |
| 3078_Neisseria_gonorrhoeae_strain_WHO_F_chromosome_1_g_4 | 55271 |
| 3078_Neisseria_gonorrhoeae_strain_WHO_F_chromosome_1_g_5 | 55272 |
| 3079_Neisseria_gonorrhoeae_strain_WHO_F_chromosome_1_g_1 | 55273 |
| 3079_Neisseria_gonorrhoeae_strain_WHO_F_chromosome_1_g_2 | 55274 |
| 3079_Neisseria_gonorrhoeae_strain_WHO_F_chromosome_1_g_3 | 55275 |
| 3079_Neisseria_gonorrhoeae_strain_WHO_F_chromosome_1_g_4 | 55276 |
| 3079_Neisseria_gonorrhoeae_strain_WHO_F_chromosome_1_g_5 | 55277 |
| 3080_Neisseria_gonorrhoeae_strain_WHO_F_chromosome_1_g_1 | 55278 |
| 3080_Neisseria_gonorrhoeae_strain_WHO_F_chromosome_1_g_2 | 55279 |
| 3080_Neisseria_gonorrhoeae_strain_WHO_F_chromosome_1_g_3 | 55280 |
| 3080_Neisseria_gonorrhoeae_strain_WHO_F_chromosome_1_g_4 | 55281 |
| 3080_Neisseria_gonorrhoeae_strain_WHO_F_chromosome_1_g_5 | 55282 |
| 3081_Neisseria_gonorrhoeae_strain_WHO_F_chromosome_1_g_1 | 55283 |
| 3081_Neisseria_gonorrhoeae_strain_WHO_F_chromosome_1_g_2 | 55284 |
| 3081_Neisseria_gonorrhoeae_strain_WHO_F_chromosome_1_g_3 | 55285 |
| 3081_Neisseria_gonorrhoeae_strain_WHO_F_chromosome_1_g_4 | 55286 |
| 3081_Neisseria_gonorrhoeae_strain_WHO_F_chromosome_1_g_5 | 55287 |
| 3082_Neisseria_gonorrhoeae_strain_WHO_F_chromosome_1_g_1 | 55288 |
| 3082_Neisseria_gonorrhoeae_strain_WHO_F_chromosome_1_g_2 | 55289 |
| 3082_Neisseria_gonorrhoeae_strain_WHO_F_chromosome_1_g_3 | 55290 |
| 3082_Neisseria_gonorrhoeae_strain_WHO_F_chromosome_1_g_4 | 55291 |
| 3082_Neisseria_gonorrhoeae_strain_WHO_F_chromosome_1_g_5 | 55292 |
| 3083_Neisseria_gonorrhoeae_strain_WHO_F_chromosome_1_g_1 | 55293 |
| 3083_Neisseria_gonorrhoeae_strain_WHO_F_chromosome_1_g_2 | 55294 |
| 3083_Neisseria_gonorrhoeae_strain_WHO_F_chromosome_1_g_3 | 55295 |
| 3083_Neisseria_gonorrhoeae_strain_WHO_F_chromosome_1_g_4 | 55296 |
| 3083_Neisseria_gonorrhoeae_strain_WHO_F_chromosome_1_g_5 | 55297 |
| 3084_Neisseria_gonorrhoeae_strain_WHO_F_chromosome_1_g_1 | 55298 |
| 3084_Neisseria_gonorrhoeae_strain_WHO_F_chromosome_1_g_2 | 55299 |
| 3084_Neisseria_gonorrhoeae_strain_WHO_F_chromosome_1_g_3 | 55300 |
| 3084_Neisseria_gonorrhoeae_strain_WHO_F_chromosome_1_g_4 | 55301 |
| 3084_Neisseria_gonorrhoeae_strain_WHO_F_chromosome_1_g_5 | 55302 |
| 3085_Neisseria_gonorrhoeae_strain_WHO_F_chromosome_1_g_1 | 55303 |
| 3085_Neisseria_gonorrhoeae_strain_WHO_F_chromosome_1_g_2 | 55304 |
| 3085_Neisseria_gonorrhoeae_strain_WHO_F_chromosome_1_g_3 | 55305 |
| 3085_Neisseria_gonorrhoeae_strain_WHO_F_chromosome_1_g_4 | 55306 |
| 3085_Neisseria_gonorrhoeae_strain_WHO_F_chromosome_1_g_5 | 55307 |
| 3086_Neisseria_gonorrhoeae_strain_WHO_F_chromosome_1_g_1 | 55308 |
| 3086_Neisseria_gonorrhoeae_strain_WHO_F_chromosome_1_g_2 | 55309 |
| 3086_Neisseria_gonorrhoeae_strain_WHO_F_chromosome_1_g_3 | 55310 |
| 3086_Neisseria_gonorrhoeae_strain_WHO_F_chromosome_1_g_4 | 55311 |
| 3086_Neisseria_gonorrhoeae_strain_WHO_F_chromosome_1_g_5 | 55312 |
| 3087_Neisseria_gonorrhoeae_strain_WHO_F_chromosome_1_g_1 | 55313 |
| 3087_Neisseria_gonorrhoeae_strain_WHO_F_chromosome_1_g_2 | 55314 |
| 3087_Neisseria_gonorrhoeae_strain_WHO_F_chromosome_1_g_3 | 55315 |
| 3087_Neisseria_gonorrhoeae_strain_WHO_F_chromosome_1_g_4 | 55316 |
| 3087_Neisseria_gonorrhoeae_strain_WHO_F_chromosome_1_g_5 | 55317 |
| 3088_Neisseria_gonorrhoeae_strain_WHO_F_chromosome_1_g_1 | 55318 |
| 3088_Neisseria_gonorrhoeae_strain_WHO_F_chromosome_1_g_2 | 55319 |
| 3088_Neisseria_gonorrhoeae_strain_WHO_F_chromosome_1_g_3 | 55320 |
| 3088_Neisseria_gonorrhoeae_strain_WHO_F_chromosome_1_g_4 | 55321 |
| 3088_Neisseria_gonorrhoeae_strain_WHO_F_chromosome_1_g_5 | 55322 |
| 3089_Neisseria_gonorrhoeae_strain_WHO_F_chromosome_1_g_1 | 55323 |
| 3089_Neisseria_gonorrhoeae_strain_WHO_F_chromosome_1_g_2 | 55324 |
| 3089_Neisseria_gonorrhoeae_strain_WHO_F_chromosome_1_g_3 | 55325 |
| 3089_Neisseria_gonorrhoeae_strain_WHO_F_chromosome_1_g_4 | 55326 |
| 3089_Neisseria_gonorrhoeae_strain_WHO_F_chromosome_1_g_5 | 55327 |
| 3090_Neisseria_gonorrhoeae_strain_WHO_F_chromosome_1_g_1 | 55328 |
| 3090_Neisseria_gonorrhoeae_strain_WHO_F_chromosome_1_g_2 | 55329 |
| 3090_Neisseria_gonorrhoeae_strain_WHO_F_chromosome_1_g_3 | 55330 |
| 3090_Neisseria_gonorrhoeae_strain_WHO_F_chromosome_1_g_4 | 55331 |
| 3090_Neisseria_gonorrhoeae_strain_WHO_F_chromosome_1_g_5 | 55332 |
| 3091_Neisseria_gonorrhoeae_strain_WHO_F_chromosome_1_g_1 | 55333 |
| 3091_Neisseria_gonorrhoeae_strain_WHO_F_chromosome_1_g_2 | 55334 |
| 3091_Neisseria_gonorrhoeae_strain_WHO_F_chromosome_1_g_3 | 55335 |
| 3091_Neisseria_gonorrhoeae_strain_WHO_F_chromosome_1_g_4 | 55336 |
| 3091_Neisseria_gonorrhoeae_strain_WHO_F_chromosome_1_g_5 | 55337 |
| 3092_Neisseria_gonorrhoeae_strain_WHO_F_chromosome_1_g_1 | 55338 |
| 3092_Neisseria_gonorrhoeae_strain_WHO_F_chromosome_1_g_2 | 55339 |
| 3092_Neisseria_gonorrhoeae_strain_WHO_F_chromosome_1_g_3 | 55340 |
| 3092_Neisseria_gonorrhoeae_strain_WHO_F_chromosome_1_g_4 | 55341 |
| 3092_Neisseria_gonorrhoeae_strain_WHO_F_chromosome_1_g_5 | 55342 |
| 3093_Neisseria_gonorrhoeae_strain_WHO_F_chromosome_1_g_1 | 55343 |
| 3093_Neisseria_gonorrhoeae_strain_WHO_F_chromosome_1_g_2 | 55344 |
| 3093_Neisseria_gonorrhoeae_strain_WHO_F_chromosome_1_g_3 | 55345 |
| 3093_Neisseria_gonorrhoeae_strain_WHO_F_chromosome_1_g_4 | 55346 |
| 3093_Neisseria_gonorrhoeae_strain_WHO_F_chromosome_1_g_5 | 55347 |
| 3094_Neisseria_gonorrhoeae_strain_WHO_F_chromosome_1_g_1 | 55348 |
| 3094_Neisseria_gonorrhoeae_strain_WHO_F_chromosome_1_g_2 | 55349 |
| 3094_Neisseria_gonorrhoeae_strain_WHO_F_chromosome_1_g_3 | 55350 |
| 3094_Neisseria_gonorrhoeae_strain_WHO_F_chromosome_1_g_4 | 55351 |
| 3094_Neisseria_gonorrhoeae_strain_WHO_F_chromosome_1_g_5 | 55352 |
| 3095_Neisseria_gonorrhoeae_strain_WHO_F_chromosome_1_g_1 | 55353 |
| 3095_Neisseria_gonorrhoeae_strain_WHO_F_chromosome_1_g_2 | 55354 |
| 3095_Neisseria_gonorrhoeae_strain_WHO_F_chromosome_1_g_3 | 55355 |
| 3095_Neisseria_gonorrhoeae_strain_WHO_F_chromosome_1_g_4 | 55356 |
| 3095_Neisseria_gonorrhoeae_strain_WHO_F_chromosome_1_g_5 | 55357 |
| 3096_Neisseria_gonorrhoeae_strain_WHO_F_chromosome_1_g_1 | 55358 |
| 3096_Neisseria_gonorrhoeae_strain_WHO_F_chromosome_1_g_2 | 55359 |
| 3096_Neisseria_gonorrhoeae_strain_WHO_F_chromosome_1_g_3 | 55360 |
| 3096_Neisseria_gonorrhoeae_strain_WHO_F_chromosome_1_g_4 | 55361 |
| 3096_Neisseria_gonorrhoeae_strain_WHO_F_chromosome_1_g_5 | 55362 |
| 3097_Neisseria_gonorrhoeae_strain_WHO_F_chromosome_1_g_1 | 55363 |
| 3097_Neisseria_gonorrhoeae_strain_WHO_F_chromosome_1_g_2 | 55364 |
| 3097_Neisseria_gonorrhoeae_strain_WHO_F_chromosome_1_g_3 | 55365 |
| 3097_Neisseria_gonorrhoeae_strain_WHO_F_chromosome_1_g_4 | 55366 |
| 3097_Neisseria_gonorrhoeae_strain_WHO_F_chromosome_1_g_5 | 55367 |
| 3098_Neisseria_gonorrhoeae_strain_WHO_F_chromosome_1_g_1 | 55368 |
| 3098_Neisseria_gonorrhoeae_strain_WHO_F_chromosome_1_g_2 | 55369 |
| 3098_Neisseria_gonorrhoeae_strain_WHO_F_chromosome_1_g_3 | 55370 |
| 3098_Neisseria_gonorrhoeae_strain_WHO_F_chromosome_1_g_4 | 55371 |
| 3098_Neisseria_gonorrhoeae_strain_WHO_F_chromosome_1_g_5 | 55372 |
| 3099_Neisseria_gonorrhoeae_strain_WHO_F_chromosome_1_g_1 | 55373 |
| 3099_Neisseria_gonorrhoeae_strain_WHO_F_chromosome_1_g_2 | 55374 |
| 3099_Neisseria_gonorrhoeae_strain_WHO_F_chromosome_1_g_3 | 55375 |
| 3099_Neisseria_gonorrhoeae_strain_WHO_F_chromosome_1_g_4 | 55376 |
| 3099_Neisseria_gonorrhoeae_strain_WHO_F_chromosome_1_g_5 | 55377 |
| 3100_Neisseria_gonorrhoeae_strain_WHO_F_chromosome_1_g_1 | 55378 |
| 3100_Neisseria_gonorrhoeae_strain_WHO_F_chromosome_1_g_2 | 55379 |
| 3100_Neisseria_gonorrhoeae_strain_WHO_F_chromosome_1_g_3 | 55380 |
| 3100_Neisseria_gonorrhoeae_strain_WHO_F_chromosome_1_g_4 | 55381 |
| 3100_Neisseria_gonorrhoeae_strain_WHO_F_chromosome_1_g_5 | 55382 |
| 3101_Neisseria_gonorrhoeae_strain_WHO_F_chromosome_1_g_1 | 55383 |
| 3101_Neisseria_gonorrhoeae_strain_WHO_F_chromosome_1_g_2 | 55384 |
| 3101_Neisseria_gonorrhoeae_strain_WHO_F_chromosome_1_g_3 | 55385 |
| 3101_Neisseria_gonorrhoeae_strain_WHO_F_chromosome_1_g_4 | 55386 |
| 3101_Neisseria_gonorrhoeae_strain_WHO_F_chromosome_1_g_5 | 55387 |
| 3102_Neisseria_gonorrhoeae_strain_WHO_F_chromosome_1_g_1 | 55388 |
| 3102_Neisseria_gonorrhoeae_strain_WHO_F_chromosome_1_g_2 | 55389 |
| 3102_Neisseria_gonorrhoeae_strain_WHO_F_chromosome_1_g_3 | 55390 |
| 3103_Neisseria_gonorrhoeae_strain_WHO_F_chromosome_1_g_1 | 55391 |
| 3103_Neisseria_gonorrhoeae_strain_WHO_F_chromosome_1_g_2 | 55392 |
| 3103_Neisseria_gonorrhoeae_strain_WHO_F_chromosome_1_g_3 | 55393 |
| 3103_Neisseria_gonorrhoeae_strain_WHO_F_chromosome_1_g_4 | 55394 |
| 3103_Neisseria_gonorrhoeae_strain_WHO_F_chromosome_1_g_5 | 55395 |
| 3104_Neisseria_gonorrhoeae_strain_WHO_F_chromosome_1_g_1 | 55396 |
| 3104_Neisseria_gonorrhoeae_strain_WHO_F_chromosome_1_g_2 | 55397 |
| 3104_Neisseria_gonorrhoeae_strain_WHO_F_chromosome_1_g_3 | 55398 |
| 3104_Neisseria_gonorrhoeae_strain_WHO_F_chromosome_1_g_4 | 55399 |
| 3104_Neisseria_gonorrhoeae_strain_WHO_F_chromosome_1_g_5 | 55400 |
| 3105_Neisseria_gonorrhoeae_strain_WHO_F_chromosome_1_g_1 | 55401 |
| 3105_Neisseria_gonorrhoeae_strain_WHO_F_chromosome_1_g_2 | 55402 |
| 3105_Neisseria_gonorrhoeae_strain_WHO_F_chromosome_1_g_3 | 55403 |
| 3105_Neisseria_gonorrhoeae_strain_WHO_F_chromosome_1_g_4 | 55404 |
| 3105_Neisseria_gonorrhoeae_strain_WHO_F_chromosome_1_g_5 | 55405 |
| 3106_Neisseria_gonorrhoeae_strain_WHO_F_chromosome_1_g_1 | 55406 |
| 3106_Neisseria_gonorrhoeae_strain_WHO_F_chromosome_1_g_2 | 55407 |
| 3106_Neisseria_gonorrhoeae_strain_WHO_F_chromosome_1_g_3 | 55408 |
| 3106_Neisseria_gonorrhoeae_strain_WHO_F_chromosome_1_g_4 | 55409 |
| 3106_Neisseria_gonorrhoeae_strain_WHO_F_chromosome_1_g_5 | 55410 |
| 3107_Neisseria_gonorrhoeae_strain_WHO_F_chromosome_1_g_1 | 55411 |
| 3107_Neisseria_gonorrhoeae_strain_WHO_F_chromosome_1_g_2 | 55412 |
| 3107_Neisseria_gonorrhoeae_strain_WHO_F_chromosome_1_g_3 | 55413 |
| 3107_Neisseria_gonorrhoeae_strain_WHO_F_chromosome_1_g_4 | 55414 |
| 3107_Neisseria_gonorrhoeae_strain_WHO_F_chromosome_1_g_5 | 55415 |
| 3108_Neisseria_gonorrhoeae_strain_WHO_F_chromosome_1_g_1 | 55416 |
| 3108_Neisseria_gonorrhoeae_strain_WHO_F_chromosome_1_g_2 | 55417 |
| 3108_Neisseria_gonorrhoeae_strain_WHO_F_chromosome_1_g_3 | 55418 |
| 3108_Neisseria_gonorrhoeae_strain_WHO_F_chromosome_1_g_4 | 55419 |
| 3108_Neisseria_gonorrhoeae_strain_WHO_F_chromosome_1_g_5 | 55420 |
| 3109_Neisseria_gonorrhoeae_strain_WHO_F_chromosome_1_g_1 | 55421 |
| 3109_Neisseria_gonorrhoeae_strain_WHO_F_chromosome_1_g_2 | 55422 |
| 3109_Neisseria_gonorrhoeae_strain_WHO_F_chromosome_1_g_3 | 55423 |
| 3109_Neisseria_gonorrhoeae_strain_WHO_F_chromosome_1_g_4 | 55424 |
| 3109_Neisseria_gonorrhoeae_strain_WHO_F_chromosome_1_g_5 | 55425 |
| 3110_Neisseria_gonorrhoeae_strain_WHO_F_chromosome_1_g_1 | 55426 |
| 3110_Neisseria_gonorrhoeae_strain_WHO_F_chromosome_1_g_2 | 55427 |
| 3110_Neisseria_gonorrhoeae_strain_WHO_F_chromosome_1_g_3 | 55428 |
| 3110_Neisseria_gonorrhoeae_strain_WHO_F_chromosome_1_g_4 | 55429 |
| 3110_Neisseria_gonorrhoeae_strain_WHO_F_chromosome_1_g_5 | 55430 |
| 3111_Neisseria_gonorrhoeae_strain_WHO_F_chromosome_1_g_1 | 55431 |
| 3111_Neisseria_gonorrhoeae_strain_WHO_F_chromosome_1_g_2 | 55432 |
| 3111_Neisseria_gonorrhoeae_strain_WHO_F_chromosome_1_g_3 | 55433 |
| 3111_Neisseria_gonorrhoeae_strain_WHO_F_chromosome_1_g_4 | 55434 |
| 3111_Neisseria_gonorrhoeae_strain_WHO_F_chromosome_1_g_5 | 55435 |
| 3112_Neisseria_gonorrhoeae_strain_WHO_F_chromosome_1_g_1 | 55436 |
| 3112_Neisseria_gonorrhoeae_strain_WHO_F_chromosome_1_g_2 | 55437 |
| 3112_Neisseria_gonorrhoeae_strain_WHO_F_chromosome_1_g_3 | 55438 |
| 3112_Neisseria_gonorrhoeae_strain_WHO_F_chromosome_1_g_4 | 55439 |
| 3112_Neisseria_gonorrhoeae_strain_WHO_F_chromosome_1_g_5 | 55440 |
| 3113_Neisseria_gonorrhoeae_strain_WHO_F_chromosome_1_g_1 | 55441 |
| 3113_Neisseria_gonorrhoeae_strain_WHO_F_chromosome_1_g_2 | 55442 |
| 3113_Neisseria_gonorrhoeae_strain_WHO_F_chromosome_1_g_3 | 55443 |
| 3113_Neisseria_gonorrhoeae_strain_WHO_F_chromosome_1_g_4 | 55444 |
| 3113_Neisseria_gonorrhoeae_strain_WHO_F_chromosome_1_g_5 | 55445 |
| 3114_Neisseria_gonorrhoeae_strain_WHO_F_chromosome_1_g_1 | 55446 |
| 3114_Neisseria_gonorrhoeae_strain_WHO_F_chromosome_1_g_2 | 55447 |
| 3114_Neisseria_gonorrhoeae_strain_WHO_F_chromosome_1_g_3 | 55448 |
| 3114_Neisseria_gonorrhoeae_strain_WHO_F_chromosome_1_g_4 | 55449 |
| 3114_Neisseria_gonorrhoeae_strain_WHO_F_chromosome_1_g_5 | 55450 |
| 3115_Neisseria_gonorrhoeae_strain_WHO_F_chromosome_1_g_1 | 55451 |
| 3115_Neisseria_gonorrhoeae_strain_WHO_F_chromosome_1_g_2 | 55452 |
| 3115_Neisseria_gonorrhoeae_strain_WHO_F_chromosome_1_g_3 | 55453 |
| 3115_Neisseria_gonorrhoeae_strain_WHO_F_chromosome_1_g_4 | 55454 |
| 3115_Neisseria_gonorrhoeae_strain_WHO_F_chromosome_1_g_5 | 55455 |
| 3116_Neisseria_gonorrhoeae_strain_WHO_F_chromosome_1_g_1 | 55456 |
| 3116_Neisseria_gonorrhoeae_strain_WHO_F_chromosome_1_g_2 | 55457 |
| 3116_Neisseria_gonorrhoeae_strain_WHO_F_chromosome_1_g_3 | 55458 |
| 3116_Neisseria_gonorrhoeae_strain_WHO_F_chromosome_1_g_4 | 55459 |
| 3116_Neisseria_gonorrhoeae_strain_WHO_F_chromosome_1_g_5 | 55460 |
| 3117_Neisseria_gonorrhoeae_strain_WHO_F_chromosome_1_g_1 | 55461 |
| 3117_Neisseria_gonorrhoeae_strain_WHO_F_chromosome_1_g_2 | 55462 |
| 3117_Neisseria_gonorrhoeae_strain_WHO_F_chromosome_1_g_3 | 55463 |
| 3117_Neisseria_gonorrhoeae_strain_WHO_F_chromosome_1_g_4 | 55464 |
| 3117_Neisseria_gonorrhoeae_strain_WHO_F_chromosome_1_g_5 | 55465 |
| 3118_Neisseria_gonorrhoeae_strain_WHO_F_chromosome_1_g_1 | 55466 |
| 3118_Neisseria_gonorrhoeae_strain_WHO_F_chromosome_1_g_2 | 55467 |
| 3118_Neisseria_gonorrhoeae_strain_WHO_F_chromosome_1_g_3 | 55468 |
| 3118_Neisseria_gonorrhoeae_strain_WHO_F_chromosome_1_g_4 | 55469 |
| 3118_Neisseria_gonorrhoeae_strain_WHO_F_chromosome_1_g_5 | 55470 |
| 3119_Neisseria_gonorrhoeae_strain_WHO_F_chromosome_1_g_1 | 55471 |
| 3119_Neisseria_gonorrhoeae_strain_WHO_F_chromosome_1_g_2 | 55472 |
| 3119_Neisseria_gonorrhoeae_strain_WHO_F_chromosome_1_g_3 | 55473 |
| 3119_Neisseria_gonorrhoeae_strain_WHO_F_chromosome_1_g_4 | 55474 |
| 3119_Neisseria_gonorrhoeae_strain_WHO_F_chromosome_1_g_5 | 55475 |
| 3120_Neisseria_gonorrhoeae_strain_WHO_F_chromosome_1_g_1 | 55476 |
| 3120_Neisseria_gonorrhoeae_strain_WHO_F_chromosome_1_g_2 | 55477 |
| 3120_Neisseria_gonorrhoeae_strain_WHO_F_chromosome_1_g_3 | 55478 |
| 3120_Neisseria_gonorrhoeae_strain_WHO_F_chromosome_1_g_4 | 55479 |
| 3120_Neisseria_gonorrhoeae_strain_WHO_F_chromosome_1_g_5 | 55480 |
| 3121_Neisseria_gonorrhoeae_strain_WHO_F_chromosome_1_g_1 | 55481 |
| 3121_Neisseria_gonorrhoeae_strain_WHO_F_chromosome_1_g_2 | 55482 |
| 3121_Neisseria_gonorrhoeae_strain_WHO_F_chromosome_1_g_3 | 55483 |
| 3121_Neisseria_gonorrhoeae_strain_WHO_F_chromosome_1_g_4 | 55484 |
| 3121_Neisseria_gonorrhoeae_strain_WHO_F_chromosome_1_g_5 | 55485 |
| 3122_Neisseria_gonorrhoeae_strain_WHO_F_chromosome_1_g_1 | 55486 |
| 3122_Neisseria_gonorrhoeae_strain_WHO_F_chromosome_1_g_2 | 55487 |
| 3122_Neisseria_gonorrhoeae_strain_WHO_F_chromosome_1_g_3 | 55488 |
| 3122_Neisseria_gonorrhoeae_strain_WHO_F_chromosome_1_g_4 | 55489 |
| 3122_Neisseria_gonorrhoeae_strain_WHO_F_chromosome_1_g_5 | 55490 |
| 3123_Neisseria_gonorrhoeae_strain_WHO_F_chromosome_1_g_1 | 55491 |
| 3123_Neisseria_gonorrhoeae_strain_WHO_F_chromosome_1_g_2 | 55492 |
| 3123_Neisseria_gonorrhoeae_strain_WHO_F_chromosome_1_g_3 | 55493 |
| 3123_Neisseria_gonorrhoeae_strain_WHO_F_chromosome_1_g_4 | 55494 |
| 3123_Neisseria_gonorrhoeae_strain_WHO_F_chromosome_1_g_5 | 55495 |
| 3124_Neisseria_gonorrhoeae_strain_WHO_F_chromosome_1_g_1 | 55496 |
| 3124_Neisseria_gonorrhoeae_strain_WHO_F_chromosome_1_g_2 | 55497 |
| 3124_Neisseria_gonorrhoeae_strain_WHO_F_chromosome_1_g_3 | 55498 |
| 3124_Neisseria_gonorrhoeae_strain_WHO_F_chromosome_1_g_4 | 55499 |
| 3124_Neisseria_gonorrhoeae_strain_WHO_F_chromosome_1_g_5 | 55500 |
| 3125_Neisseria_gonorrhoeae_strain_WHO_F_chromosome_1_g_1 | 55501 |
| 3125_Neisseria_gonorrhoeae_strain_WHO_F_chromosome_1_g_2 | 55502 |
| 3125_Neisseria_gonorrhoeae_strain_WHO_F_chromosome_1_g_3 | 55503 |
| 3125_Neisseria_gonorrhoeae_strain_WHO_F_chromosome_1_g_4 | 55504 |
| 3125_Neisseria_gonorrhoeae_strain_WHO_F_chromosome_1_g_5 | 55505 |
| 3126_Neisseria_gonorrhoeae_strain_WHO_F_chromosome_1_g_1 | 55506 |
| 3126_Neisseria_gonorrhoeae_strain_WHO_F_chromosome_1_g_2 | 55507 |
| 3126_Neisseria_gonorrhoeae_strain_WHO_F_chromosome_1_g_3 | 55508 |
| 3126_Neisseria_gonorrhoeae_strain_WHO_F_chromosome_1_g_4 | 55509 |
| 3126_Neisseria_gonorrhoeae_strain_WHO_F_chromosome_1_g_5 | 55510 |
| 3127_Neisseria_gonorrhoeae_strain_WHO_F_chromosome_1_g_1 | 55511 |
| 3127_Neisseria_gonorrhoeae_strain_WHO_F_chromosome_1_g_2 | 55512 |
| 3127_Neisseria_gonorrhoeae_strain_WHO_F_chromosome_1_g_3 | 55513 |
| 3127_Neisseria_gonorrhoeae_strain_WHO_F_chromosome_1_g_4 | 55514 |
| 3127_Neisseria_gonorrhoeae_strain_WHO_F_chromosome_1_g_5 | 55515 |
| 3128_Neisseria_gonorrhoeae_strain_WHO_F_chromosome_1_g_1 | 55516 |
| 3128_Neisseria_gonorrhoeae_strain_WHO_F_chromosome_1_g_2 | 55517 |
| 3128_Neisseria_gonorrhoeae_strain_WHO_F_chromosome_1_g_3 | 55518 |
| 3128_Neisseria_gonorrhoeae_strain_WHO_F_chromosome_1_g_4 | 55519 |
| 3128_Neisseria_gonorrhoeae_strain_WHO_F_chromosome_1_g_5 | 55520 |
| 3129_Neisseria_gonorrhoeae_strain_WHO_F_chromosome_1_g_1 | 55521 |
| 3129_Neisseria_gonorrhoeae_strain_WHO_F_chromosome_1_g_2 | 55522 |
| 3129_Neisseria_gonorrhoeae_strain_WHO_F_chromosome_1_g_3 | 55523 |
| 3129_Neisseria_gonorrhoeae_strain_WHO_F_chromosome_1_g_4 | 55524 |
| 3129_Neisseria_gonorrhoeae_strain_WHO_F_chromosome_1_g_5 | 55525 |
| 3130_Neisseria_gonorrhoeae_strain_WHO_F_chromosome_1_g_1 | 55526 |
| 3130_Neisseria_gonorrhoeae_strain_WHO_F_chromosome_1_g_2 | 55527 |
| 3130_Neisseria_gonorrhoeae_strain_WHO_F_chromosome_1_g_3 | 55528 |
| 3130_Neisseria_gonorrhoeae_strain_WHO_F_chromosome_1_g_4 | 55529 |
| 3130_Neisseria_gonorrhoeae_strain_WHO_F_chromosome_1_g_5 | 55530 |
| 3131_Neisseria_gonorrhoeae_strain_WHO_F_chromosome_1_g_1 | 55531 |
| 3131_Neisseria_gonorrhoeae_strain_WHO_F_chromosome_1_g_2 | 55532 |
| 3131_Neisseria_gonorrhoeae_strain_WHO_F_chromosome_1_g_3 | 55533 |
| 3131_Neisseria_gonorrhoeae_strain_WHO_F_chromosome_1_g_4 | 55534 |
| 3131_Neisseria_gonorrhoeae_strain_WHO_F_chromosome_1_g_5 | 55535 |
| 3132_Neisseria_gonorrhoeae_strain_WHO_F_chromosome_1_g_1 | 55536 |
| 3132_Neisseria_gonorrhoeae_strain_WHO_F_chromosome_1_g_2 | 55537 |
| 3132_Neisseria_gonorrhoeae_strain_WHO_F_chromosome_1_g_3 | 55538 |
| 3132_Neisseria_gonorrhoeae_strain_WHO_F_chromosome_1_g_4 | 55539 |
| 3132_Neisseria_gonorrhoeae_strain_WHO_F_chromosome_1_g_5 | 55540 |
| 3133_Neisseria_gonorrhoeae_strain_WHO_F_chromosome_1_g_1 | 55541 |
| 3133_Neisseria_gonorrhoeae_strain_WHO_F_chromosome_1_g_2 | 55542 |
| 3133_Neisseria_gonorrhoeae_strain_WHO_F_chromosome_1_g_3 | 55543 |
| 3133_Neisseria_gonorrhoeae_strain_WHO_F_chromosome_1_g_4 | 55544 |
| 3133_Neisseria_gonorrhoeae_strain_WHO_F_chromosome_1_g_5 | 55545 |
| 3134_Neisseria_gonorrhoeae_strain_WHO_F_chromosome_1_g_1 | 55546 |
| 3134_Neisseria_gonorrhoeae_strain_WHO_F_chromosome_1_g_2 | 55547 |
| 3134_Neisseria_gonorrhoeae_strain_WHO_F_chromosome_1_g_3 | 55548 |
| 3134_Neisseria_gonorrhoeae_strain_WHO_F_chromosome_1_g_4 | 55549 |
| 3134_Neisseria_gonorrhoeae_strain_WHO_F_chromosome_1_g_5 | 55550 |
| 3135_Neisseria_gonorrhoeae_strain_WHO_F_chromosome_1_g_1 | 55551 |
| 3135_Neisseria_gonorrhoeae_strain_WHO_F_chromosome_1_g_2 | 55552 |
| 3135_Neisseria_gonorrhoeae_strain_WHO_F_chromosome_1_g_3 | 55553 |
| 3136_Neisseria_gonorrhoeae_strain_WHO_F_chromosome_1_g_1 | 55554 |
| 3136_Neisseria_gonorrhoeae_strain_WHO_F_chromosome_1_g_2 | 55555 |
| 3137_Neisseria_gonorrhoeae_strain_WHO_F_chromosome_1_g_1 | 55556 |
| 3137_Neisseria_gonorrhoeae_strain_WHO_F_chromosome_1_g_2 | 55557 |
| 3137_Neisseria_gonorrhoeae_strain_WHO_F_chromosome_1_g_3 | 55558 |
| 3137_Neisseria_gonorrhoeae_strain_WHO_F_chromosome_1_g_4 | 55559 |
| 3137_Neisseria_gonorrhoeae_strain_WHO_F_chromosome_1_g_5 | 55560 |
| 3138_Neisseria_gonorrhoeae_strain_WHO_F_chromosome_1_g_1 | 55561 |
| 3138_Neisseria_gonorrhoeae_strain_WHO_F_chromosome_1_g_2 | 55562 |
| 3138_Neisseria_gonorrhoeae_strain_WHO_F_chromosome_1_g_3 | 55563 |
| 3138_Neisseria_gonorrhoeae_strain_WHO_F_chromosome_1_g_4 | 55564 |
| 3138_Neisseria_gonorrhoeae_strain_WHO_F_chromosome_1_g_5 | 55565 |
| 3139_Neisseria_gonorrhoeae_strain_WHO_F_chromosome_1_g_1 | 55566 |
| 3139_Neisseria_gonorrhoeae_strain_WHO_F_chromosome_1_g_2 | 55567 |
| 3139_Neisseria_gonorrhoeae_strain_WHO_F_chromosome_1_g_3 | 55568 |
| 3139_Neisseria_gonorrhoeae_strain_WHO_F_chromosome_1_g_4 | 55569 |
| 3139_Neisseria_gonorrhoeae_strain_WHO_F_chromosome_1_g_5 | 55570 |
| 3140_Neisseria_gonorrhoeae_strain_WHO_F_chromosome_1_g_1 | 55571 |
| 3140_Neisseria_gonorrhoeae_strain_WHO_F_chromosome_1_g_2 | 55572 |
| 3140_Neisseria_gonorrhoeae_strain_WHO_F_chromosome_1_g_3 | 55573 |
| 3140_Neisseria_gonorrhoeae_strain_WHO_F_chromosome_1_g_4 | 55574 |
| 3140_Neisseria_gonorrhoeae_strain_WHO_F_chromosome_1_g_5 | 55575 |
| 3141_Neisseria_gonorrhoeae_strain_WHO_F_chromosome_1_g_1 | 55576 |
| 3141_Neisseria_gonorrhoeae_strain_WHO_F_chromosome_1_g_2 | 55577 |
| 3141_Neisseria_gonorrhoeae_strain_WHO_F_chromosome_1_g_3 | 55578 |
| 3141_Neisseria_gonorrhoeae_strain_WHO_F_chromosome_1_g_4 | 55579 |
| 3141_Neisseria_gonorrhoeae_strain_WHO_F_chromosome_1_g_5 | 55580 |
| 3142_Neisseria_gonorrhoeae_strain_WHO_F_chromosome_1_g_1 | 55581 |
| 3142_Neisseria_gonorrhoeae_strain_WHO_F_chromosome_1_g_2 | 55582 |
| 3142_Neisseria_gonorrhoeae_strain_WHO_F_chromosome_1_g_3 | 55583 |
| 3142_Neisseria_gonorrhoeae_strain_WHO_F_chromosome_1_g_4 | 55584 |
| 3142_Neisseria_gonorrhoeae_strain_WHO_F_chromosome_1_g_5 | 55585 |
| 3143_Neisseria_gonorrhoeae_strain_WHO_F_chromosome_1_g_1 | 55586 |
| 3143_Neisseria_gonorrhoeae_strain_WHO_F_chromosome_1_g_2 | 55587 |
| 3143_Neisseria_gonorrhoeae_strain_WHO_F_chromosome_1_g_3 | 55588 |
| 3143_Neisseria_gonorrhoeae_strain_WHO_F_chromosome_1_g_4 | 55589 |
| 3143_Neisseria_gonorrhoeae_strain_WHO_F_chromosome_1_g_5 | 55590 |
| 3144_Neisseria_gonorrhoeae_strain_WHO_F_chromosome_1_g_1 | 55591 |
| 3144_Neisseria_gonorrhoeae_strain_WHO_F_chromosome_1_g_2 | 55592 |
| 3144_Neisseria_gonorrhoeae_strain_WHO_F_chromosome_1_g_3 | 55593 |
| 3144_Neisseria_gonorrhoeae_strain_WHO_F_chromosome_1_g_4 | 55594 |
| 3144_Neisseria_gonorrhoeae_strain_WHO_F_chromosome_1_g_5 | 55595 |
| 3145_Neisseria_gonorrhoeae_strain_WHO_F_chromosome_1_g_1 | 55596 |
| 3145_Neisseria_gonorrhoeae_strain_WHO_F_chromosome_1_g_2 | 55597 |
| 3145_Neisseria_gonorrhoeae_strain_WHO_F_chromosome_1_g_3 | 55598 |
| 3145_Neisseria_gonorrhoeae_strain_WHO_F_chromosome_1_g_4 | 55599 |
| 3145_Neisseria_gonorrhoeae_strain_WHO_F_chromosome_1_g_5 | 55600 |
| 3146_Neisseria_gonorrhoeae_strain_WHO_F_chromosome_1_g_1 | 55601 |
| 3146_Neisseria_gonorrhoeae_strain_WHO_F_chromosome_1_g_2 | 55602 |
| 3146_Neisseria_gonorrhoeae_strain_WHO_F_chromosome_1_g_3 | 55603 |
| 3146_Neisseria_gonorrhoeae_strain_WHO_F_chromosome_1_g_4 | 55604 |
| 3146_Neisseria_gonorrhoeae_strain_WHO_F_chromosome_1_g_5 | 55605 |
| 3147_Neisseria_gonorrhoeae_strain_WHO_F_chromosome_1_g_1 | 55606 |
| 3147_Neisseria_gonorrhoeae_strain_WHO_F_chromosome_1_g_2 | 55607 |
| 3147_Neisseria_gonorrhoeae_strain_WHO_F_chromosome_1_g_3 | 55608 |
| 3147_Neisseria_gonorrhoeae_strain_WHO_F_chromosome_1_g_4 | 55609 |
| 3147_Neisseria_gonorrhoeae_strain_WHO_F_chromosome_1_g_5 | 55610 |
| 3148_Neisseria_gonorrhoeae_strain_WHO_F_chromosome_1_g_1 | 55611 |
| 3148_Neisseria_gonorrhoeae_strain_WHO_F_chromosome_1_g_2 | 55612 |
| 3148_Neisseria_gonorrhoeae_strain_WHO_F_chromosome_1_g_3 | 55613 |
| 3148_Neisseria_gonorrhoeae_strain_WHO_F_chromosome_1_g_4 | 55614 |
| 3148_Neisseria_gonorrhoeae_strain_WHO_F_chromosome_1_g_5 | 55615 |
| 3149_Neisseria_gonorrhoeae_strain_WHO_F_chromosome_1_g_1 | 55616 |
| 3149_Neisseria_gonorrhoeae_strain_WHO_F_chromosome_1_g_2 | 55617 |
| 3149_Neisseria_gonorrhoeae_strain_WHO_F_chromosome_1_g_3 | 55618 |
| 3149_Neisseria_gonorrhoeae_strain_WHO_F_chromosome_1_g_4 | 55619 |
| 3149_Neisseria_gonorrhoeae_strain_WHO_F_chromosome_1_g_5 | 55620 |
| 3150_Neisseria_gonorrhoeae_strain_WHO_F_chromosome_1_g_1 | 55621 |
| 3150_Neisseria_gonorrhoeae_strain_WHO_F_chromosome_1_g_2 | 55622 |
| 3150_Neisseria_gonorrhoeae_strain_WHO_F_chromosome_1_g_3 | 55623 |
| 3150_Neisseria_gonorrhoeae_strain_WHO_F_chromosome_1_g_4 | 55624 |
| 3150_Neisseria_gonorrhoeae_strain_WHO_F_chromosome_1_g_5 | 55625 |
| 3151_Neisseria_gonorrhoeae_strain_WHO_F_chromosome_1_g_1 | 55626 |
| 3151_Neisseria_gonorrhoeae_strain_WHO_F_chromosome_1_g_2 | 55627 |
| 3151_Neisseria_gonorrhoeae_strain_WHO_F_chromosome_1_g_3 | 55628 |
| 3151_Neisseria_gonorrhoeae_strain_WHO_F_chromosome_1_g_4 | 55629 |
| 3151_Neisseria_gonorrhoeae_strain_WHO_F_chromosome_1_g_5 | 55630 |
| 3152_Neisseria_gonorrhoeae_strain_WHO_F_chromosome_1_g_1 | 55631 |
| 3152_Neisseria_gonorrhoeae_strain_WHO_F_chromosome_1_g_2 | 55632 |
| 3152_Neisseria_gonorrhoeae_strain_WHO_F_chromosome_1_g_3 | 55633 |
| 3152_Neisseria_gonorrhoeae_strain_WHO_F_chromosome_1_g_4 | 55634 |
| 3152_Neisseria_gonorrhoeae_strain_WHO_F_chromosome_1_g_5 | 55635 |
| 3153_Neisseria_gonorrhoeae_strain_WHO_F_chromosome_1_g_1 | 55636 |
| 3153_Neisseria_gonorrhoeae_strain_WHO_F_chromosome_1_g_2 | 55637 |
| 3153_Neisseria_gonorrhoeae_strain_WHO_F_chromosome_1_g_3 | 55638 |
| 3153_Neisseria_gonorrhoeae_strain_WHO_F_chromosome_1_g_4 | 55639 |
| 3153_Neisseria_gonorrhoeae_strain_WHO_F_chromosome_1_g_5 | 55640 |
| 3154_Neisseria_gonorrhoeae_strain_WHO_F_chromosome_1_g_1 | 55641 |
| 3154_Neisseria_gonorrhoeae_strain_WHO_F_chromosome_1_g_2 | 55642 |
| 3154_Neisseria_gonorrhoeae_strain_WHO_F_chromosome_1_g_3 | 55643 |
| 3154_Neisseria_gonorrhoeae_strain_WHO_F_chromosome_1_g_4 | 55644 |
| 3154_Neisseria_gonorrhoeae_strain_WHO_F_chromosome_1_g_5 | 55645 |
| 3155_Neisseria_gonorrhoeae_strain_WHO_F_chromosome_1_g_1 | 55646 |
| 3155_Neisseria_gonorrhoeae_strain_WHO_F_chromosome_1_g_2 | 55647 |
| 3155_Neisseria_gonorrhoeae_strain_WHO_F_chromosome_1_g_3 | 55648 |
| 3155_Neisseria_gonorrhoeae_strain_WHO_F_chromosome_1_g_4 | 55649 |
| 3155_Neisseria_gonorrhoeae_strain_WHO_F_chromosome_1_g_5 | 55650 |
| 3156_Neisseria_gonorrhoeae_strain_WHO_F_chromosome_1_g_1 | 55651 |
| 3156_Neisseria_gonorrhoeae_strain_WHO_F_chromosome_1_g_2 | 55652 |
| 3156_Neisseria_gonorrhoeae_strain_WHO_F_chromosome_1_g_3 | 55653 |
| 3156_Neisseria_gonorrhoeae_strain_WHO_F_chromosome_1_g_4 | 55654 |
| 3156_Neisseria_gonorrhoeae_strain_WHO_F_chromosome_1_g_5 | 55655 |
| 3157_Neisseria_gonorrhoeae_strain_WHO_F_chromosome_1_g_1 | 55656 |
| 3157_Neisseria_gonorrhoeae_strain_WHO_F_chromosome_1_g_2 | 55657 |
| 3157_Neisseria_gonorrhoeae_strain_WHO_F_chromosome_1_g_3 | 55658 |
| 3157_Neisseria_gonorrhoeae_strain_WHO_F_chromosome_1_g_4 | 55659 |
| 3157_Neisseria_gonorrhoeae_strain_WHO_F_chromosome_1_g_5 | 55660 |
| 3158_Neisseria_gonorrhoeae_strain_WHO_F_chromosome_1_g_1 | 55661 |
| 3158_Neisseria_gonorrhoeae_strain_WHO_F_chromosome_1_g_2 | 55662 |
| 3158_Neisseria_gonorrhoeae_strain_WHO_F_chromosome_1_g_3 | 55663 |
| 3158_Neisseria_gonorrhoeae_strain_WHO_F_chromosome_1_g_4 | 55664 |
| 3158_Neisseria_gonorrhoeae_strain_WHO_F_chromosome_1_g_5 | 55665 |
| 3159_Neisseria_gonorrhoeae_strain_WHO_F_chromosome_1_g_1 | 55666 |
| 3159_Neisseria_gonorrhoeae_strain_WHO_F_chromosome_1_g_2 | 55667 |
| 3159_Neisseria_gonorrhoeae_strain_WHO_F_chromosome_1_g_3 | 55668 |
| 3159_Neisseria_gonorrhoeae_strain_WHO_F_chromosome_1_g_4 | 55669 |
| 3159_Neisseria_gonorrhoeae_strain_WHO_F_chromosome_1_g_5 | 55670 |
| 3160_Neisseria_gonorrhoeae_strain_WHO_F_chromosome_1_g_1 | 55671 |
| 3160_Neisseria_gonorrhoeae_strain_WHO_F_chromosome_1_g_2 | 55672 |
| 3160_Neisseria_gonorrhoeae_strain_WHO_F_chromosome_1_g_3 | 55673 |
| 3160_Neisseria_gonorrhoeae_strain_WHO_F_chromosome_1_g_4 | 55674 |
| 3160_Neisseria_gonorrhoeae_strain_WHO_F_chromosome_1_g_5 | 55675 |
| 3161_Neisseria_gonorrhoeae_strain_WHO_F_chromosome_1_g_1 | 55676 |
| 3161_Neisseria_gonorrhoeae_strain_WHO_F_chromosome_1_g_2 | 55677 |
| 3161_Neisseria_gonorrhoeae_strain_WHO_F_chromosome_1_g_3 | 55678 |
| 3161_Neisseria_gonorrhoeae_strain_WHO_F_chromosome_1_g_4 | 55679 |
| 3161_Neisseria_gonorrhoeae_strain_WHO_F_chromosome_1_g_5 | 55680 |
| 3162_Neisseria_gonorrhoeae_strain_WHO_F_chromosome_1_g_1 | 55681 |
| 3162_Neisseria_gonorrhoeae_strain_WHO_F_chromosome_1_g_2 | 55682 |
| 3162_Neisseria_gonorrhoeae_strain_WHO_F_chromosome_1_g_3 | 55683 |
| 3162_Neisseria_gonorrhoeae_strain_WHO_F_chromosome_1_g_4 | 55684 |
| 3162_Neisseria_gonorrhoeae_strain_WHO_F_chromosome_1_g_5 | 55685 |
| 3163_Neisseria_gonorrhoeae_strain_WHO_F_chromosome_1_g_1 | 55686 |
| 3163_Neisseria_gonorrhoeae_strain_WHO_F_chromosome_1_g_2 | 55687 |
| 3163_Neisseria_gonorrhoeae_strain_WHO_F_chromosome_1_g_3 | 55688 |
| 3163_Neisseria_gonorrhoeae_strain_WHO_F_chromosome_1_g_4 | 55689 |
| 3163_Neisseria_gonorrhoeae_strain_WHO_F_chromosome_1_g_5 | 55690 |
| 3164_Neisseria_gonorrhoeae_strain_WHO_F_chromosome_1_g_1 | 55691 |
| 3164_Neisseria_gonorrhoeae_strain_WHO_F_chromosome_1_g_2 | 55692 |
| 3164_Neisseria_gonorrhoeae_strain_WHO_F_chromosome_1_g_3 | 55693 |
| 3164_Neisseria_gonorrhoeae_strain_WHO_F_chromosome_1_g_4 | 55694 |
| 3164_Neisseria_gonorrhoeae_strain_WHO_F_chromosome_1_g_5 | 55695 |
| 3165_Neisseria_gonorrhoeae_strain_WHO_F_chromosome_1_g_1 | 55696 |
| 3165_Neisseria_gonorrhoeae_strain_WHO_F_chromosome_1_g_2 | 55697 |
| 3165_Neisseria_gonorrhoeae_strain_WHO_F_chromosome_1_g_3 | 55698 |
| 3165_Neisseria_gonorrhoeae_strain_WHO_F_chromosome_1_g_4 | 55699 |
| 3165_Neisseria_gonorrhoeae_strain_WHO_F_chromosome_1_g_5 | 55700 |
| 3166_Neisseria_gonorrhoeae_strain_WHO_F_chromosome_1_g_1 | 55701 |
| 3166_Neisseria_gonorrhoeae_strain_WHO_F_chromosome_1_g_2 | 55702 |
| 3166_Neisseria_gonorrhoeae_strain_WHO_F_chromosome_1_g_3 | 55703 |
| 3166_Neisseria_gonorrhoeae_strain_WHO_F_chromosome_1_g_4 | 55704 |
| 3166_Neisseria_gonorrhoeae_strain_WHO_F_chromosome_1_g_5 | 55705 |
| 3167_Neisseria_gonorrhoeae_strain_WHO_F_chromosome_1_g_1 | 55706 |
| 3167_Neisseria_gonorrhoeae_strain_WHO_F_chromosome_1_g_2 | 55707 |
| 3167_Neisseria_gonorrhoeae_strain_WHO_F_chromosome_1_g_3 | 55708 |
| 3167_Neisseria_gonorrhoeae_strain_WHO_F_chromosome_1_g_4 | 55709 |
| 3167_Neisseria_gonorrhoeae_strain_WHO_F_chromosome_1_g_5 | 55710 |
| 3168_Neisseria_gonorrhoeae_strain_WHO_F_chromosome_1_g_1 | 55711 |
| 3168_Neisseria_gonorrhoeae_strain_WHO_F_chromosome_1_g_2 | 55712 |
| 3168_Neisseria_gonorrhoeae_strain_WHO_F_chromosome_1_g_3 | 55713 |
| 3168_Neisseria_gonorrhoeae_strain_WHO_F_chromosome_1_g_4 | 55714 |
| 3168_Neisseria_gonorrhoeae_strain_WHO_F_chromosome_1_g_5 | 55715 |
| 3169_Neisseria_gonorrhoeae_strain_WHO_F_chromosome_1_g_1 | 55716 |
| 3169_Neisseria_gonorrhoeae_strain_WHO_F_chromosome_1_g_2 | 55717 |
| 3169_Neisseria_gonorrhoeae_strain_WHO_F_chromosome_1_g_3 | 55718 |
| 3169_Neisseria_gonorrhoeae_strain_WHO_F_chromosome_1_g_4 | 55719 |
| 3169_Neisseria_gonorrhoeae_strain_WHO_F_chromosome_1_g_5 | 55720 |
| 3170_Neisseria_gonorrhoeae_strain_WHO_F_chromosome_1_g_1 | 55721 |
| 3170_Neisseria_gonorrhoeae_strain_WHO_F_chromosome_1_g_2 | 55722 |
| 3170_Neisseria_gonorrhoeae_strain_WHO_F_chromosome_1_g_3 | 55723 |
| 3170_Neisseria_gonorrhoeae_strain_WHO_F_chromosome_1_g_4 | 55724 |
| 3171_Neisseria_gonorrhoeae_strain_WHO_F_chromosome_1_g_1 | 55725 |
| 3171_Neisseria_gonorrhoeae_strain_WHO_F_chromosome_1_g_2 | 55726 |
| 3171_Neisseria_gonorrhoeae_strain_WHO_F_chromosome_1_g_3 | 55727 |
| 3171_Neisseria_gonorrhoeae_strain_WHO_F_chromosome_1_g_4 | 55728 |
| 3171_Neisseria_gonorrhoeae_strain_WHO_F_chromosome_1_g_5 | 55729 |
| 3172_Neisseria_gonorrhoeae_strain_WHO_F_chromosome_1_g_1 | 55730 |
| 3172_Neisseria_gonorrhoeae_strain_WHO_F_chromosome_1_g_2 | 55731 |
| 3172_Neisseria_gonorrhoeae_strain_WHO_F_chromosome_1_g_3 | 55732 |
| 3172_Neisseria_gonorrhoeae_strain_WHO_F_chromosome_1_g_4 | 55733 |
| 3172_Neisseria_gonorrhoeae_strain_WHO_F_chromosome_1_g_5 | 55734 |
| 3173_Neisseria_gonorrhoeae_strain_WHO_F_chromosome_1_g_1 | 55735 |
| 3173_Neisseria_gonorrhoeae_strain_WHO_F_chromosome_1_g_2 | 55736 |
| 3173_Neisseria_gonorrhoeae_strain_WHO_F_chromosome_1_g_3 | 55737 |
| 3173_Neisseria_gonorrhoeae_strain_WHO_F_chromosome_1_g_4 | 55738 |
| 3173_Neisseria_gonorrhoeae_strain_WHO_F_chromosome_1_g_5 | 55739 |
| 3174_Neisseria_gonorrhoeae_strain_WHO_F_chromosome_1_g_1 | 55740 |
| 3174_Neisseria_gonorrhoeae_strain_WHO_F_chromosome_1_g_2 | 55741 |
| 3174_Neisseria_gonorrhoeae_strain_WHO_F_chromosome_1_g_3 | 55742 |
| 3174_Neisseria_gonorrhoeae_strain_WHO_F_chromosome_1_g_4 | 55743 |
| 3174_Neisseria_gonorrhoeae_strain_WHO_F_chromosome_1_g_5 | 55744 |
| 3175_Neisseria_gonorrhoeae_strain_WHO_F_chromosome_1_g_1 | 55745 |
| 3175_Neisseria_gonorrhoeae_strain_WHO_F_chromosome_1_g_2 | 55746 |
| 3175_Neisseria_gonorrhoeae_strain_WHO_F_chromosome_1_g_3 | 55747 |
| 3175_Neisseria_gonorrhoeae_strain_WHO_F_chromosome_1_g_4 | 55748 |
| 3175_Neisseria_gonorrhoeae_strain_WHO_F_chromosome_1_g_5 | 55749 |
| 3176_Neisseria_gonorrhoeae_strain_WHO_F_chromosome_1_g_1 | 55750 |
| 3176_Neisseria_gonorrhoeae_strain_WHO_F_chromosome_1_g_2 | 55751 |
| 3176_Neisseria_gonorrhoeae_strain_WHO_F_chromosome_1_g_3 | 55752 |
| 3176_Neisseria_gonorrhoeae_strain_WHO_F_chromosome_1_g_4 | 55753 |
| 3176_Neisseria_gonorrhoeae_strain_WHO_F_chromosome_1_g_5 | 55754 |
| 3177_Neisseria_gonorrhoeae_strain_WHO_F_chromosome_1_g_1 | 55755 |
| 3177_Neisseria_gonorrhoeae_strain_WHO_F_chromosome_1_g_2 | 55756 |
| 3177_Neisseria_gonorrhoeae_strain_WHO_F_chromosome_1_g_3 | 55757 |
| 3177_Neisseria_gonorrhoeae_strain_WHO_F_chromosome_1_g_4 | 55758 |
| 3177_Neisseria_gonorrhoeae_strain_WHO_F_chromosome_1_g_5 | 55759 |
| 3178_Neisseria_gonorrhoeae_strain_WHO_F_chromosome_1_g_1 | 55760 |
| 3178_Neisseria_gonorrhoeae_strain_WHO_F_chromosome_1_g_2 | 55761 |
| 3178_Neisseria_gonorrhoeae_strain_WHO_F_chromosome_1_g_3 | 55762 |
| 3178_Neisseria_gonorrhoeae_strain_WHO_F_chromosome_1_g_4 | 55763 |
| 3178_Neisseria_gonorrhoeae_strain_WHO_F_chromosome_1_g_5 | 55764 |
| 3179_Neisseria_gonorrhoeae_strain_WHO_F_chromosome_1_g_1 | 55765 |
| 3179_Neisseria_gonorrhoeae_strain_WHO_F_chromosome_1_g_2 | 55766 |
| 3179_Neisseria_gonorrhoeae_strain_WHO_F_chromosome_1_g_3 | 55767 |
| 3179_Neisseria_gonorrhoeae_strain_WHO_F_chromosome_1_g_4 | 55768 |
| 3179_Neisseria_gonorrhoeae_strain_WHO_F_chromosome_1_g_5 | 55769 |
| 3180_Neisseria_gonorrhoeae_strain_WHO_F_chromosome_1_g_1 | 55770 |
| 3180_Neisseria_gonorrhoeae_strain_WHO_F_chromosome_1_g_2 | 55771 |
| 3180_Neisseria_gonorrhoeae_strain_WHO_F_chromosome_1_g_3 | 55772 |
| 3180_Neisseria_gonorrhoeae_strain_WHO_F_chromosome_1_g_4 | 55773 |
| 3180_Neisseria_gonorrhoeae_strain_WHO_F_chromosome_1_g_5 | 55774 |
| 3181_Neisseria_gonorrhoeae_strain_WHO_F_chromosome_1_g_1 | 55775 |
| 3181_Neisseria_gonorrhoeae_strain_WHO_F_chromosome_1_g_2 | 55776 |
| 3181_Neisseria_gonorrhoeae_strain_WHO_F_chromosome_1_g_3 | 55777 |
| 3181_Neisseria_gonorrhoeae_strain_WHO_F_chromosome_1_g_4 | 55778 |
| 3181_Neisseria_gonorrhoeae_strain_WHO_F_chromosome_1_g_5 | 55779 |
| 3182_Neisseria_gonorrhoeae_strain_WHO_F_chromosome_1_g_1 | 55780 |
| 3182_Neisseria_gonorrhoeae_strain_WHO_F_chromosome_1_g_2 | 55781 |
| 3182_Neisseria_gonorrhoeae_strain_WHO_F_chromosome_1_g_3 | 55782 |
| 3182_Neisseria_gonorrhoeae_strain_WHO_F_chromosome_1_g_4 | 55783 |
| 3182_Neisseria_gonorrhoeae_strain_WHO_F_chromosome_1_g_5 | 55784 |
| 3183_Neisseria_gonorrhoeae_strain_WHO_F_chromosome_1_g_1 | 55785 |
| 3183_Neisseria_gonorrhoeae_strain_WHO_F_chromosome_1_g_2 | 55786 |
| 3183_Neisseria_gonorrhoeae_strain_WHO_F_chromosome_1_g_3 | 55787 |
| 3183_Neisseria_gonorrhoeae_strain_WHO_F_chromosome_1_g_4 | 55788 |
| 3183_Neisseria_gonorrhoeae_strain_WHO_F_chromosome_1_g_5 | 55789 |
| 3184_Neisseria_gonorrhoeae_strain_WHO_F_chromosome_1_g_1 | 55790 |
| 3184_Neisseria_gonorrhoeae_strain_WHO_F_chromosome_1_g_2 | 55791 |
| 3184_Neisseria_gonorrhoeae_strain_WHO_F_chromosome_1_g_3 | 55792 |
| 3184_Neisseria_gonorrhoeae_strain_WHO_F_chromosome_1_g_4 | 55793 |
| 3184_Neisseria_gonorrhoeae_strain_WHO_F_chromosome_1_g_5 | 55794 |
| 3185_Neisseria_gonorrhoeae_strain_WHO_F_chromosome_1_g_1 | 55795 |
| 3185_Neisseria_gonorrhoeae_strain_WHO_F_chromosome_1_g_2 | 55796 |
| 3185_Neisseria_gonorrhoeae_strain_WHO_F_chromosome_1_g_3 | 55797 |
| 3185_Neisseria_gonorrhoeae_strain_WHO_F_chromosome_1_g_4 | 55798 |
| 3185_Neisseria_gonorrhoeae_strain_WHO_F_chromosome_1_g_5 | 55799 |
| 3186_Neisseria_gonorrhoeae_strain_WHO_F_chromosome_1_g_1 | 55800 |
| 3186_Neisseria_gonorrhoeae_strain_WHO_F_chromosome_1_g_2 | 55801 |
| 3186_Neisseria_gonorrhoeae_strain_WHO_F_chromosome_1_g_3 | 55802 |
| 3186_Neisseria_gonorrhoeae_strain_WHO_F_chromosome_1_g_4 | 55803 |
| 3186_Neisseria_gonorrhoeae_strain_WHO_F_chromosome_1_g_5 | 55804 |
| 3187_Neisseria_gonorrhoeae_strain_WHO_F_chromosome_1_g_1 | 55805 |
| 3187_Neisseria_gonorrhoeae_strain_WHO_F_chromosome_1_g_2 | 55806 |
| 3187_Neisseria_gonorrhoeae_strain_WHO_F_chromosome_1_g_3 | 55807 |
| 3187_Neisseria_gonorrhoeae_strain_WHO_F_chromosome_1_g_4 | 55808 |
| 3187_Neisseria_gonorrhoeae_strain_WHO_F_chromosome_1_g_5 | 55809 |
| 3188_Neisseria_gonorrhoeae_strain_WHO_F_chromosome_1_g_1 | 55810 |
| 3188_Neisseria_gonorrhoeae_strain_WHO_F_chromosome_1_g_2 | 55811 |
| 3188_Neisseria_gonorrhoeae_strain_WHO_F_chromosome_1_g_3 | 55812 |
| 3188_Neisseria_gonorrhoeae_strain_WHO_F_chromosome_1_g_4 | 55813 |
| 3188_Neisseria_gonorrhoeae_strain_WHO_F_chromosome_1_g_5 | 55814 |
| 3189_Neisseria_gonorrhoeae_strain_WHO_F_chromosome_1_g_1 | 55815 |
| 3189_Neisseria_gonorrhoeae_strain_WHO_F_chromosome_1_g_2 | 55816 |
| 3189_Neisseria_gonorrhoeae_strain_WHO_F_chromosome_1_g_3 | 55817 |
| 3189_Neisseria_gonorrhoeae_strain_WHO_F_chromosome_1_g_4 | 55818 |
| 3189_Neisseria_gonorrhoeae_strain_WHO_F_chromosome_1_g_5 | 55819 |
| 3190_Neisseria_gonorrhoeae_strain_WHO_F_chromosome_1_g_1 | 55820 |
| 3190_Neisseria_gonorrhoeae_strain_WHO_F_chromosome_1_g_2 | 55821 |
| 3190_Neisseria_gonorrhoeae_strain_WHO_F_chromosome_1_g_3 | 55822 |
| 3190_Neisseria_gonorrhoeae_strain_WHO_F_chromosome_1_g_4 | 55823 |
| 3190_Neisseria_gonorrhoeae_strain_WHO_F_chromosome_1_g_5 | 55824 |
| 3191_Neisseria_gonorrhoeae_strain_WHO_F_chromosome_1_g_1 | 55825 |
| 3191_Neisseria_gonorrhoeae_strain_WHO_F_chromosome_1_g_2 | 55826 |
| 3191_Neisseria_gonorrhoeae_strain_WHO_F_chromosome_1_g_3 | 55827 |
| 3191_Neisseria_gonorrhoeae_strain_WHO_F_chromosome_1_g_4 | 55828 |
| 3191_Neisseria_gonorrhoeae_strain_WHO_F_chromosome_1_g_5 | 55829 |
| 3192_Neisseria_gonorrhoeae_strain_WHO_F_chromosome_1_g_1 | 55830 |
| 3192_Neisseria_gonorrhoeae_strain_WHO_F_chromosome_1_g_2 | 55831 |
| 3192_Neisseria_gonorrhoeae_strain_WHO_F_chromosome_1_g_3 | 55832 |
| 3192_Neisseria_gonorrhoeae_strain_WHO_F_chromosome_1_g_4 | 55833 |
| 3192_Neisseria_gonorrhoeae_strain_WHO_F_chromosome_1_g_5 | 55834 |
| 3193_Neisseria_gonorrhoeae_strain_WHO_F_chromosome_1_g_1 | 55835 |
| 3193_Neisseria_gonorrhoeae_strain_WHO_F_chromosome_1_g_2 | 55836 |
| 3193_Neisseria_gonorrhoeae_strain_WHO_F_chromosome_1_g_3 | 55837 |
| 3193_Neisseria_gonorrhoeae_strain_WHO_F_chromosome_1_g_4 | 55838 |
| 3193_Neisseria_gonorrhoeae_strain_WHO_F_chromosome_1_g_5 | 55839 |
| 3194_Neisseria_gonorrhoeae_strain_WHO_F_chromosome_1_g_1 | 55840 |
| 3194_Neisseria_gonorrhoeae_strain_WHO_F_chromosome_1_g_2 | 55841 |
| 3194_Neisseria_gonorrhoeae_strain_WHO_F_chromosome_1_g_3 | 55842 |
| 3194_Neisseria_gonorrhoeae_strain_WHO_F_chromosome_1_g_4 | 55843 |
| 3194_Neisseria_gonorrhoeae_strain_WHO_F_chromosome_1_g_5 | 55844 |
| 3195_Neisseria_gonorrhoeae_strain_WHO_F_chromosome_1_g_1 | 55845 |
| 3195_Neisseria_gonorrhoeae_strain_WHO_F_chromosome_1_g_2 | 55846 |
| 3195_Neisseria_gonorrhoeae_strain_WHO_F_chromosome_1_g_3 | 55847 |
| 3195_Neisseria_gonorrhoeae_strain_WHO_F_chromosome_1_g_4 | 55848 |
| 3195_Neisseria_gonorrhoeae_strain_WHO_F_chromosome_1_g_5 | 55849 |
| 3196_Neisseria_gonorrhoeae_strain_WHO_F_chromosome_1_g_1 | 55850 |
| 3196_Neisseria_gonorrhoeae_strain_WHO_F_chromosome_1_g_2 | 55851 |
| 3196_Neisseria_gonorrhoeae_strain_WHO_F_chromosome_1_g_3 | 55852 |
| 3196_Neisseria_gonorrhoeae_strain_WHO_F_chromosome_1_g_4 | 55853 |
| 3196_Neisseria_gonorrhoeae_strain_WHO_F_chromosome_1_g_5 | 55854 |
| 3197_Neisseria_gonorrhoeae_strain_WHO_F_chromosome_1_g_1 | 55855 |
| 3197_Neisseria_gonorrhoeae_strain_WHO_F_chromosome_1_g_2 | 55856 |
| 3197_Neisseria_gonorrhoeae_strain_WHO_F_chromosome_1_g_3 | 55857 |
| 3197_Neisseria_gonorrhoeae_strain_WHO_F_chromosome_1_g_4 | 55858 |
| 3197_Neisseria_gonorrhoeae_strain_WHO_F_chromosome_1_g_5 | 55859 |
| 3198_Neisseria_gonorrhoeae_strain_WHO_F_chromosome_1_g_1 | 55860 |
| 3198_Neisseria_gonorrhoeae_strain_WHO_F_chromosome_1_g_2 | 55861 |
| 3198_Neisseria_gonorrhoeae_strain_WHO_F_chromosome_1_g_3 | 55862 |
| 3198_Neisseria_gonorrhoeae_strain_WHO_F_chromosome_1_g_4 | 55863 |
| 3198_Neisseria_gonorrhoeae_strain_WHO_F_chromosome_1_g_5 | 55864 |
| 3199_Neisseria_gonorrhoeae_strain_WHO_F_chromosome_1_g_1 | 55865 |
| 3199_Neisseria_gonorrhoeae_strain_WHO_F_chromosome_1_g_2 | 55866 |
| 3199_Neisseria_gonorrhoeae_strain_WHO_F_chromosome_1_g_3 | 55867 |
| 3199_Neisseria_gonorrhoeae_strain_WHO_F_chromosome_1_g_4 | 55868 |
| 3199_Neisseria_gonorrhoeae_strain_WHO_F_chromosome_1_g_5 | 55869 |
| 3200_Neisseria_gonorrhoeae_strain_WHO_F_chromosome_1_g_1 | 55870 |
| 3200_Neisseria_gonorrhoeae_strain_WHO_F_chromosome_1_g_2 | 55871 |
| 3200_Neisseria_gonorrhoeae_strain_WHO_F_chromosome_1_g_3 | 55872 |
| 3200_Neisseria_gonorrhoeae_strain_WHO_F_chromosome_1_g_4 | 55873 |
| 3200_Neisseria_gonorrhoeae_strain_WHO_F_chromosome_1_g_5 | 55874 |
| 3201_Neisseria_gonorrhoeae_strain_WHO_F_chromosome_1_g_1 | 55875 |
| 3201_Neisseria_gonorrhoeae_strain_WHO_F_chromosome_1_g_2 | 55876 |
| 3201_Neisseria_gonorrhoeae_strain_WHO_F_chromosome_1_g_3 | 55877 |
| 3201_Neisseria_gonorrhoeae_strain_WHO_F_chromosome_1_g_4 | 55878 |
| 3201_Neisseria_gonorrhoeae_strain_WHO_F_chromosome_1_g_5 | 55879 |
| 3202_Neisseria_gonorrhoeae_strain_WHO_F_chromosome_1_g_1 | 55880 |
| 3202_Neisseria_gonorrhoeae_strain_WHO_F_chromosome_1_g_2 | 55881 |
| 3202_Neisseria_gonorrhoeae_strain_WHO_F_chromosome_1_g_3 | 55882 |
| 3202_Neisseria_gonorrhoeae_strain_WHO_F_chromosome_1_g_4 | 55883 |
| 3202_Neisseria_gonorrhoeae_strain_WHO_F_chromosome_1_g_5 | 55884 |
| 3203_Neisseria_gonorrhoeae_strain_WHO_F_chromosome_1_g_1 | 55885 |
| 3203_Neisseria_gonorrhoeae_strain_WHO_F_chromosome_1_g_2 | 55886 |
| 3203_Neisseria_gonorrhoeae_strain_WHO_F_chromosome_1_g_3 | 55887 |
| 3203_Neisseria_gonorrhoeae_strain_WHO_F_chromosome_1_g_4 | 55888 |
| 3203_Neisseria_gonorrhoeae_strain_WHO_F_chromosome_1_g_5 | 55889 |
| 3204_Neisseria_gonorrhoeae_strain_WHO_F_chromosome_1_g_1 | 55890 |
| 3204_Neisseria_gonorrhoeae_strain_WHO_F_chromosome_1_g_2 | 55891 |
| 3204_Neisseria_gonorrhoeae_strain_WHO_F_chromosome_1_g_3 | 55892 |
| 3204_Neisseria_gonorrhoeae_strain_WHO_F_chromosome_1_g_4 | 55893 |
| 3204_Neisseria_gonorrhoeae_strain_WHO_F_chromosome_1_g_5 | 55894 |
| 3205_Neisseria_gonorrhoeae_strain_WHO_F_chromosome_1_g_1 | 55895 |
| 3205_Neisseria_gonorrhoeae_strain_WHO_F_chromosome_1_g_2 | 55896 |
| 3205_Neisseria_gonorrhoeae_strain_WHO_F_chromosome_1_g_3 | 55897 |
| 3205_Neisseria_gonorrhoeae_strain_WHO_F_chromosome_1_g_4 | 55898 |
| 3205_Neisseria_gonorrhoeae_strain_WHO_F_chromosome_1_g_5 | 55899 |
| 3206_Neisseria_gonorrhoeae_strain_WHO_F_chromosome_1_g_1 | 55900 |
| 3206_Neisseria_gonorrhoeae_strain_WHO_F_chromosome_1_g_2 | 55901 |
| 3206_Neisseria_gonorrhoeae_strain_WHO_F_chromosome_1_g_3 | 55902 |
| 3206_Neisseria_gonorrhoeae_strain_WHO_F_chromosome_1_g_4 | 55903 |
| 3206_Neisseria_gonorrhoeae_strain_WHO_F_chromosome_1_g_5 | 55904 |
| 3207_Neisseria_gonorrhoeae_strain_WHO_F_chromosome_1_g_1 | 55905 |
| 3207_Neisseria_gonorrhoeae_strain_WHO_F_chromosome_1_g_2 | 55906 |
| 3207_Neisseria_gonorrhoeae_strain_WHO_F_chromosome_1_g_3 | 55907 |
| 3207_Neisseria_gonorrhoeae_strain_WHO_F_chromosome_1_g_4 | 55908 |
| 3207_Neisseria_gonorrhoeae_strain_WHO_F_chromosome_1_g_5 | 55909 |
| 3208_Neisseria_gonorrhoeae_strain_WHO_F_chromosome_1_g_1 | 55910 |
| 3208_Neisseria_gonorrhoeae_strain_WHO_F_chromosome_1_g_2 | 55911 |
| 3208_Neisseria_gonorrhoeae_strain_WHO_F_chromosome_1_g_3 | 55912 |
| 3208_Neisseria_gonorrhoeae_strain_WHO_F_chromosome_1_g_4 | 55913 |
| 3208_Neisseria_gonorrhoeae_strain_WHO_F_chromosome_1_g_5 | 55914 |
| 3209_Neisseria_gonorrhoeae_strain_WHO_F_chromosome_1_g_1 | 55915 |
| 3209_Neisseria_gonorrhoeae_strain_WHO_F_chromosome_1_g_2 | 55916 |
| 3209_Neisseria_gonorrhoeae_strain_WHO_F_chromosome_1_g_3 | 55917 |
| 3209_Neisseria_gonorrhoeae_strain_WHO_F_chromosome_1_g_4 | 55918 |
| 3209_Neisseria_gonorrhoeae_strain_WHO_F_chromosome_1_g_5 | 55919 |
| 3210_Neisseria_gonorrhoeae_strain_WHO_F_chromosome_1_g_1 | 55920 |
| 3210_Neisseria_gonorrhoeae_strain_WHO_F_chromosome_1_g_2 | 55921 |
| 3210_Neisseria_gonorrhoeae_strain_WHO_F_chromosome_1_g_3 | 55922 |
| 3210_Neisseria_gonorrhoeae_strain_WHO_F_chromosome_1_g_4 | 55923 |
| 3210_Neisseria_gonorrhoeae_strain_WHO_F_chromosome_1_g_5 | 55924 |
| 3211_Neisseria_gonorrhoeae_strain_WHO_F_chromosome_1_g_1 | 55925 |
| 3211_Neisseria_gonorrhoeae_strain_WHO_F_chromosome_1_g_2 | 55926 |
| 3211_Neisseria_gonorrhoeae_strain_WHO_F_chromosome_1_g_3 | 55927 |
| 3211_Neisseria_gonorrhoeae_strain_WHO_F_chromosome_1_g_4 | 55928 |
| 3211_Neisseria_gonorrhoeae_strain_WHO_F_chromosome_1_g_5 | 55929 |
| 3212_Neisseria_gonorrhoeae_strain_WHO_F_chromosome_1_g_1 | 55930 |
| 3212_Neisseria_gonorrhoeae_strain_WHO_F_chromosome_1_g_2 | 55931 |
| 3212_Neisseria_gonorrhoeae_strain_WHO_F_chromosome_1_g_3 | 55932 |
| 3212_Neisseria_gonorrhoeae_strain_WHO_F_chromosome_1_g_4 | 55933 |
| 3212_Neisseria_gonorrhoeae_strain_WHO_F_chromosome_1_g_5 | 55934 |
| 3213_Neisseria_gonorrhoeae_strain_WHO_F_chromosome_1_g_1 | 55935 |
| 3213_Neisseria_gonorrhoeae_strain_WHO_F_chromosome_1_g_2 | 55936 |
| 3213_Neisseria_gonorrhoeae_strain_WHO_F_chromosome_1_g_3 | 55937 |
| 3213_Neisseria_gonorrhoeae_strain_WHO_F_chromosome_1_g_4 | 55938 |
| 3213_Neisseria_gonorrhoeae_strain_WHO_F_chromosome_1_g_5 | 55939 |
| 3214_Neisseria_gonorrhoeae_strain_WHO_F_chromosome_1_g_1 | 55940 |
| 3214_Neisseria_gonorrhoeae_strain_WHO_F_chromosome_1_g_2 | 55941 |
| 3214_Neisseria_gonorrhoeae_strain_WHO_F_chromosome_1_g_3 | 55942 |
| 3214_Neisseria_gonorrhoeae_strain_WHO_F_chromosome_1_g_4 | 55943 |
| 3214_Neisseria_gonorrhoeae_strain_WHO_F_chromosome_1_g_5 | 55944 |
| 3215_Neisseria_gonorrhoeae_strain_WHO_F_chromosome_1_g_1 | 55945 |
| 3215_Neisseria_gonorrhoeae_strain_WHO_F_chromosome_1_g_2 | 55946 |
| 3215_Neisseria_gonorrhoeae_strain_WHO_F_chromosome_1_g_3 | 55947 |
| 3215_Neisseria_gonorrhoeae_strain_WHO_F_chromosome_1_g_4 | 55948 |
| 3215_Neisseria_gonorrhoeae_strain_WHO_F_chromosome_1_g_5 | 55949 |
| 3216_Neisseria_gonorrhoeae_strain_WHO_F_chromosome_1_g_1 | 55950 |
| 3216_Neisseria_gonorrhoeae_strain_WHO_F_chromosome_1_g_2 | 55951 |
| 3216_Neisseria_gonorrhoeae_strain_WHO_F_chromosome_1_g_3 | 55952 |
| 3216_Neisseria_gonorrhoeae_strain_WHO_F_chromosome_1_g_4 | 55953 |
| 3216_Neisseria_gonorrhoeae_strain_WHO_F_chromosome_1_g_5 | 55954 |
| 3217_Neisseria_gonorrhoeae_strain_WHO_F_chromosome_1_g_1 | 55955 |
| 3217_Neisseria_gonorrhoeae_strain_WHO_F_chromosome_1_g_2 | 55956 |
| 3217_Neisseria_gonorrhoeae_strain_WHO_F_chromosome_1_g_3 | 55957 |
| 3217_Neisseria_gonorrhoeae_strain_WHO_F_chromosome_1_g_4 | 55958 |
| 3217_Neisseria_gonorrhoeae_strain_WHO_F_chromosome_1_g_5 | 55959 |
| 3218_Neisseria_gonorrhoeae_strain_WHO_F_chromosome_1_g_1 | 55960 |
| 3218_Neisseria_gonorrhoeae_strain_WHO_F_chromosome_1_g_2 | 55961 |
| 3218_Neisseria_gonorrhoeae_strain_WHO_F_chromosome_1_g_3 | 55962 |
| 3218_Neisseria_gonorrhoeae_strain_WHO_F_chromosome_1_g_4 | 55963 |
| 3218_Neisseria_gonorrhoeae_strain_WHO_F_chromosome_1_g_5 | 55964 |
| 3219_Neisseria_gonorrhoeae_strain_WHO_F_chromosome_1_g_1 | 55965 |
| 3219_Neisseria_gonorrhoeae_strain_WHO_F_chromosome_1_g_2 | 55966 |
| 3219_Neisseria_gonorrhoeae_strain_WHO_F_chromosome_1_g_3 | 55967 |
| 3219_Neisseria_gonorrhoeae_strain_WHO_F_chromosome_1_g_4 | 55968 |
| 3219_Neisseria_gonorrhoeae_strain_WHO_F_chromosome_1_g_5 | 55969 |
| 3220_Neisseria_gonorrhoeae_strain_WHO_F_chromosome_1_g_1 | 55970 |
| 3220_Neisseria_gonorrhoeae_strain_WHO_F_chromosome_1_g_2 | 55971 |
| 3220_Neisseria_gonorrhoeae_strain_WHO_F_chromosome_1_g_3 | 55972 |
| 3220_Neisseria_gonorrhoeae_strain_WHO_F_chromosome_1_g_4 | 55973 |
| 3220_Neisseria_gonorrhoeae_strain_WHO_F_chromosome_1_g_5 | 55974 |
| 3221_Neisseria_gonorrhoeae_strain_WHO_F_chromosome_1_g_1 | 55975 |
| 3221_Neisseria_gonorrhoeae_strain_WHO_F_chromosome_1_g_2 | 55976 |
| 3221_Neisseria_gonorrhoeae_strain_WHO_F_chromosome_1_g_3 | 55977 |
| 3221_Neisseria_gonorrhoeae_strain_WHO_F_chromosome_1_g_4 | 55978 |
| 3221_Neisseria_gonorrhoeae_strain_WHO_F_chromosome_1_g_5 | 55979 |
| 3222_Neisseria_gonorrhoeae_strain_WHO_F_chromosome_1_g_1 | 55980 |
| 3222_Neisseria_gonorrhoeae_strain_WHO_F_chromosome_1_g_2 | 55981 |
| 3222_Neisseria_gonorrhoeae_strain_WHO_F_chromosome_1_g_3 | 55982 |
| 3222_Neisseria_gonorrhoeae_strain_WHO_F_chromosome_1_g_4 | 55983 |
| 3223_Neisseria_gonorrhoeae_strain_WHO_F_chromosome_1_g_1 | 55984 |
| 3223_Neisseria_gonorrhoeae_strain_WHO_F_chromosome_1_g_2 | 55985 |
| 3223_Neisseria_gonorrhoeae_strain_WHO_F_chromosome_1_g_3 | 55986 |
| 3223_Neisseria_gonorrhoeae_strain_WHO_F_chromosome_1_g_4 | 55987 |
| 3223_Neisseria_gonorrhoeae_strain_WHO_F_chromosome_1_g_5 | 55988 |
| 3224_Neisseria_gonorrhoeae_strain_WHO_F_chromosome_1_g_1 | 55989 |
| 3224_Neisseria_gonorrhoeae_strain_WHO_F_chromosome_1_g_2 | 55990 |
| 3224_Neisseria_gonorrhoeae_strain_WHO_F_chromosome_1_g_3 | 55991 |
| 3224_Neisseria_gonorrhoeae_strain_WHO_F_chromosome_1_g_4 | 55992 |
| 3224_Neisseria_gonorrhoeae_strain_WHO_F_chromosome_1_g_5 | 55993 |
| 3225_Neisseria_gonorrhoeae_strain_WHO_F_chromosome_1_g_1 | 55994 |
| 3225_Neisseria_gonorrhoeae_strain_WHO_F_chromosome_1_g_2 | 55995 |
| 3225_Neisseria_gonorrhoeae_strain_WHO_F_chromosome_1_g_3 | 55996 |
| 3225_Neisseria_gonorrhoeae_strain_WHO_F_chromosome_1_g_4 | 55997 |
| 3225_Neisseria_gonorrhoeae_strain_WHO_F_chromosome_1_g_5 | 55998 |
| 3226_Neisseria_gonorrhoeae_strain_WHO_F_chromosome_1_g_1 | 55999 |
| 3226_Neisseria_gonorrhoeae_strain_WHO_F_chromosome_1_g_2 | 56000 |
| 3226_Neisseria_gonorrhoeae_strain_WHO_F_chromosome_1_g_3 | 56001 |
| 3226_Neisseria_gonorrhoeae_strain_WHO_F_chromosome_1_g_4 | 56002 |
| 3226_Neisseria_gonorrhoeae_strain_WHO_F_chromosome_1_g_5 | 56003 |
| 3227_Neisseria_gonorrhoeae_strain_WHO_F_chromosome_1_g_1 | 56004 |
| 3227_Neisseria_gonorrhoeae_strain_WHO_F_chromosome_1_g_2 | 56005 |
| 3227_Neisseria_gonorrhoeae_strain_WHO_F_chromosome_1_g_3 | 56006 |
| 3227_Neisseria_gonorrhoeae_strain_WHO_F_chromosome_1_g_4 | 56007 |
| 3227_Neisseria_gonorrhoeae_strain_WHO_F_chromosome_1_g_5 | 56008 |
| 3228_Neisseria_gonorrhoeae_strain_WHO_F_chromosome_1_g_1 | 56009 |
| 3228_Neisseria_gonorrhoeae_strain_WHO_F_chromosome_1_g_2 | 56010 |
| 3228_Neisseria_gonorrhoeae_strain_WHO_F_chromosome_1_g_3 | 56011 |
| 3228_Neisseria_gonorrhoeae_strain_WHO_F_chromosome_1_g_4 | 56012 |
| 3228_Neisseria_gonorrhoeae_strain_WHO_F_chromosome_1_g_5 | 56013 |
| 3229_Neisseria_gonorrhoeae_strain_WHO_F_chromosome_1_g_1 | 56014 |
| 3229_Neisseria_gonorrhoeae_strain_WHO_F_chromosome_1_g_2 | 56015 |
| 3229_Neisseria_gonorrhoeae_strain_WHO_F_chromosome_1_g_3 | 56016 |
| 3229_Neisseria_gonorrhoeae_strain_WHO_F_chromosome_1_g_4 | 56017 |
| 3229_Neisseria_gonorrhoeae_strain_WHO_F_chromosome_1_g_5 | 56018 |
| 3230_Neisseria_gonorrhoeae_strain_WHO_F_chromosome_1_g_1 | 56019 |
| 3230_Neisseria_gonorrhoeae_strain_WHO_F_chromosome_1_g_2 | 56020 |
| 3230_Neisseria_gonorrhoeae_strain_WHO_F_chromosome_1_g_3 | 56021 |
| 3230_Neisseria_gonorrhoeae_strain_WHO_F_chromosome_1_g_4 | 56022 |
| 3230_Neisseria_gonorrhoeae_strain_WHO_F_chromosome_1_g_5 | 56023 |
| 3231_Neisseria_gonorrhoeae_strain_WHO_F_chromosome_1_g_1 | 56024 |
| 3231_Neisseria_gonorrhoeae_strain_WHO_F_chromosome_1_g_2 | 56025 |
| 3231_Neisseria_gonorrhoeae_strain_WHO_F_chromosome_1_g_3 | 56026 |
| 3231_Neisseria_gonorrhoeae_strain_WHO_F_chromosome_1_g_4 | 56027 |
| 3231_Neisseria_gonorrhoeae_strain_WHO_F_chromosome_1_g_5 | 56028 |
| 3232_Neisseria_gonorrhoeae_strain_WHO_F_chromosome_1_g_1 | 56029 |
| 3232_Neisseria_gonorrhoeae_strain_WHO_F_chromosome_1_g_2 | 56030 |
| 3232_Neisseria_gonorrhoeae_strain_WHO_F_chromosome_1_g_3 | 56031 |
| 3232_Neisseria_gonorrhoeae_strain_WHO_F_chromosome_1_g_4 | 56032 |
| 3232_Neisseria_gonorrhoeae_strain_WHO_F_chromosome_1_g_5 | 56033 |
| 3233_Neisseria_gonorrhoeae_strain_WHO_F_chromosome_1_g_1 | 56034 |
| 3233_Neisseria_gonorrhoeae_strain_WHO_F_chromosome_1_g_2 | 56035 |
| 3233_Neisseria_gonorrhoeae_strain_WHO_F_chromosome_1_g_3 | 56036 |
| 3233_Neisseria_gonorrhoeae_strain_WHO_F_chromosome_1_g_4 | 56037 |
| 3233_Neisseria_gonorrhoeae_strain_WHO_F_chromosome_1_g_5 | 56038 |
| 3234_Neisseria_gonorrhoeae_strain_WHO_F_chromosome_1_g_1 | 56039 |
| 3234_Neisseria_gonorrhoeae_strain_WHO_F_chromosome_1_g_2 | 56040 |
| 3234_Neisseria_gonorrhoeae_strain_WHO_F_chromosome_1_g_3 | 56041 |
| 3234_Neisseria_gonorrhoeae_strain_WHO_F_chromosome_1_g_4 | 56042 |
| 3234_Neisseria_gonorrhoeae_strain_WHO_F_chromosome_1_g_5 | 56043 |
| 3235_Neisseria_gonorrhoeae_strain_WHO_F_chromosome_1_g_1 | 56044 |
| 3235_Neisseria_gonorrhoeae_strain_WHO_F_chromosome_1_g_2 | 56045 |
| 3235_Neisseria_gonorrhoeae_strain_WHO_F_chromosome_1_g_3 | 56046 |
| 3235_Neisseria_gonorrhoeae_strain_WHO_F_chromosome_1_g_4 | 56047 |
| 3235_Neisseria_gonorrhoeae_strain_WHO_F_chromosome_1_g_5 | 56048 |
| 3236_Neisseria_gonorrhoeae_strain_WHO_F_chromosome_1_g_1 | 56049 |
| 3236_Neisseria_gonorrhoeae_strain_WHO_F_chromosome_1_g_2 | 56050 |
| 3236_Neisseria_gonorrhoeae_strain_WHO_F_chromosome_1_g_3 | 56051 |
| 3236_Neisseria_gonorrhoeae_strain_WHO_F_chromosome_1_g_4 | 56052 |
| 3237_Neisseria_gonorrhoeae_strain_WHO_F_chromosome_1_g_1 | 56053 |
| 3237_Neisseria_gonorrhoeae_strain_WHO_F_chromosome_1_g_2 | 56054 |
| 3237_Neisseria_gonorrhoeae_strain_WHO_F_chromosome_1_g_3 | 56055 |
| 3237_Neisseria_gonorrhoeae_strain_WHO_F_chromosome_1_g_4 | 56056 |
| 3237_Neisseria_gonorrhoeae_strain_WHO_F_chromosome_1_g_5 | 56057 |
| 3238_Neisseria_gonorrhoeae_strain_WHO_F_chromosome_1_g_1 | 56058 |
| 3238_Neisseria_gonorrhoeae_strain_WHO_F_chromosome_1_g_2 | 56059 |
| 3238_Neisseria_gonorrhoeae_strain_WHO_F_chromosome_1_g_3 | 56060 |
| 3238_Neisseria_gonorrhoeae_strain_WHO_F_chromosome_1_g_4 | 56061 |
| 3238_Neisseria_gonorrhoeae_strain_WHO_F_chromosome_1_g_5 | 56062 |
| 3239_Neisseria_gonorrhoeae_strain_WHO_F_chromosome_1_g_1 | 56063 |
| 3239_Neisseria_gonorrhoeae_strain_WHO_F_chromosome_1_g_2 | 56064 |
| 3239_Neisseria_gonorrhoeae_strain_WHO_F_chromosome_1_g_3 | 56065 |
| 3239_Neisseria_gonorrhoeae_strain_WHO_F_chromosome_1_g_4 | 56066 |
| 3239_Neisseria_gonorrhoeae_strain_WHO_F_chromosome_1_g_5 | 56067 |
| 3240_Neisseria_gonorrhoeae_strain_WHO_F_chromosome_1_g_1 | 56068 |
| 3240_Neisseria_gonorrhoeae_strain_WHO_F_chromosome_1_g_2 | 56069 |
| 3240_Neisseria_gonorrhoeae_strain_WHO_F_chromosome_1_g_3 | 56070 |
| 3240_Neisseria_gonorrhoeae_strain_WHO_F_chromosome_1_g_4 | 56071 |
| 3240_Neisseria_gonorrhoeae_strain_WHO_F_chromosome_1_g_5 | 56072 |
| 3241_Neisseria_gonorrhoeae_strain_WHO_F_chromosome_1_g_1 | 56073 |
| 3241_Neisseria_gonorrhoeae_strain_WHO_F_chromosome_1_g_2 | 56074 |
| 3241_Neisseria_gonorrhoeae_strain_WHO_F_chromosome_1_g_3 | 56075 |
| 3241_Neisseria_gonorrhoeae_strain_WHO_F_chromosome_1_g_4 | 56076 |
| 3241_Neisseria_gonorrhoeae_strain_WHO_F_chromosome_1_g_5 | 56077 |
| 3242_Neisseria_gonorrhoeae_strain_WHO_F_chromosome_1_g_1 | 56078 |
| 3242_Neisseria_gonorrhoeae_strain_WHO_F_chromosome_1_g_2 | 56079 |
| 3242_Neisseria_gonorrhoeae_strain_WHO_F_chromosome_1_g_3 | 56080 |
| 3242_Neisseria_gonorrhoeae_strain_WHO_F_chromosome_1_g_4 | 56081 |
| 3242_Neisseria_gonorrhoeae_strain_WHO_F_chromosome_1_g_5 | 56082 |
| 3243_Neisseria_gonorrhoeae_strain_WHO_F_chromosome_1_g_1 | 56083 |
| 3243_Neisseria_gonorrhoeae_strain_WHO_F_chromosome_1_g_2 | 56084 |
| 3243_Neisseria_gonorrhoeae_strain_WHO_F_chromosome_1_g_3 | 56085 |
| 3243_Neisseria_gonorrhoeae_strain_WHO_F_chromosome_1_g_4 | 56086 |
| 3243_Neisseria_gonorrhoeae_strain_WHO_F_chromosome_1_g_5 | 56087 |
| 3244_Neisseria_gonorrhoeae_strain_WHO_F_chromosome_1_g_1 | 56088 |
| 3244_Neisseria_gonorrhoeae_strain_WHO_F_chromosome_1_g_2 | 56089 |
| 3244_Neisseria_gonorrhoeae_strain_WHO_F_chromosome_1_g_3 | 56090 |
| 3244_Neisseria_gonorrhoeae_strain_WHO_F_chromosome_1_g_4 | 56091 |
| 3244_Neisseria_gonorrhoeae_strain_WHO_F_chromosome_1_g_5 | 56092 |
| 3245_Neisseria_gonorrhoeae_strain_WHO_F_chromosome_1_g_1 | 56093 |
| 3245_Neisseria_gonorrhoeae_strain_WHO_F_chromosome_1_g_2 | 56094 |
| 3245_Neisseria_gonorrhoeae_strain_WHO_F_chromosome_1_g_3 | 56095 |
| 3245_Neisseria_gonorrhoeae_strain_WHO_F_chromosome_1_g_4 | 56096 |
| 3245_Neisseria_gonorrhoeae_strain_WHO_F_chromosome_1_g_5 | 56097 |
| 3246_Neisseria_gonorrhoeae_strain_WHO_F_chromosome_1_g_1 | 56098 |
| 3246_Neisseria_gonorrhoeae_strain_WHO_F_chromosome_1_g_2 | 56099 |
| 3246_Neisseria_gonorrhoeae_strain_WHO_F_chromosome_1_g_3 | 56100 |
| 3246_Neisseria_gonorrhoeae_strain_WHO_F_chromosome_1_g_4 | 56101 |
| 3246_Neisseria_gonorrhoeae_strain_WHO_F_chromosome_1_g_5 | 56102 |
| 3247_Neisseria_gonorrhoeae_strain_WHO_F_chromosome_1_g_1 | 56103 |
| 3247_Neisseria_gonorrhoeae_strain_WHO_F_chromosome_1_g_2 | 56104 |
| 3247_Neisseria_gonorrhoeae_strain_WHO_F_chromosome_1_g_3 | 56105 |
| 3247_Neisseria_gonorrhoeae_strain_WHO_F_chromosome_1_g_4 | 56106 |
| 3247_Neisseria_gonorrhoeae_strain_WHO_F_chromosome_1_g_5 | 56107 |
| 3248_Neisseria_gonorrhoeae_strain_WHO_F_chromosome_1_g_1 | 56108 |
| 3248_Neisseria_gonorrhoeae_strain_WHO_F_chromosome_1_g_2 | 56109 |
| 3248_Neisseria_gonorrhoeae_strain_WHO_F_chromosome_1_g_3 | 56110 |
| 3248_Neisseria_gonorrhoeae_strain_WHO_F_chromosome_1_g_4 | 56111 |
| 3248_Neisseria_gonorrhoeae_strain_WHO_F_chromosome_1_g_5 | 56112 |
| 3249_Neisseria_gonorrhoeae_strain_WHO_F_chromosome_1_g_1 | 56113 |
| 3249_Neisseria_gonorrhoeae_strain_WHO_F_chromosome_1_g_2 | 56114 |
| 3249_Neisseria_gonorrhoeae_strain_WHO_F_chromosome_1_g_3 | 56115 |
| 3249_Neisseria_gonorrhoeae_strain_WHO_F_chromosome_1_g_4 | 56116 |
| 3249_Neisseria_gonorrhoeae_strain_WHO_F_chromosome_1_g_5 | 56117 |
| 3250_Neisseria_gonorrhoeae_strain_WHO_F_chromosome_1_g_1 | 56118 |
| 3250_Neisseria_gonorrhoeae_strain_WHO_F_chromosome_1_g_2 | 56119 |
| 3250_Neisseria_gonorrhoeae_strain_WHO_F_chromosome_1_g_3 | 56120 |
| 3250_Neisseria_gonorrhoeae_strain_WHO_F_chromosome_1_g_4 | 56121 |
| 3250_Neisseria_gonorrhoeae_strain_WHO_F_chromosome_1_g_5 | 56122 |
| 3251_Neisseria_gonorrhoeae_strain_WHO_F_chromosome_1_g_1 | 56123 |
| 3251_Neisseria_gonorrhoeae_strain_WHO_F_chromosome_1_g_2 | 56124 |
| 3251_Neisseria_gonorrhoeae_strain_WHO_F_chromosome_1_g_3 | 56125 |
| 3251_Neisseria_gonorrhoeae_strain_WHO_F_chromosome_1_g_4 | 56126 |
| 3251_Neisseria_gonorrhoeae_strain_WHO_F_chromosome_1_g_5 | 56127 |
| 3252_Neisseria_gonorrhoeae_strain_WHO_F_chromosome_1_g_1 | 56128 |
| 3252_Neisseria_gonorrhoeae_strain_WHO_F_chromosome_1_g_2 | 56129 |
| 3252_Neisseria_gonorrhoeae_strain_WHO_F_chromosome_1_g_3 | 56130 |
| 3252_Neisseria_gonorrhoeae_strain_WHO_F_chromosome_1_g_4 | 56131 |
| 3252_Neisseria_gonorrhoeae_strain_WHO_F_chromosome_1_g_5 | 56132 |
| 3253_Neisseria_gonorrhoeae_strain_WHO_F_chromosome_1_g_1 | 56133 |
| 3253_Neisseria_gonorrhoeae_strain_WHO_F_chromosome_1_g_2 | 56134 |
| 3253_Neisseria_gonorrhoeae_strain_WHO_F_chromosome_1_g_3 | 56135 |
| 3253_Neisseria_gonorrhoeae_strain_WHO_F_chromosome_1_g_4 | 56136 |
| 3253_Neisseria_gonorrhoeae_strain_WHO_F_chromosome_1_g_5 | 56137 |
| 3254_Neisseria_gonorrhoeae_strain_WHO_F_chromosome_1_g_1 | 56138 |
| 3254_Neisseria_gonorrhoeae_strain_WHO_F_chromosome_1_g_2 | 56139 |
| 3254_Neisseria_gonorrhoeae_strain_WHO_F_chromosome_1_g_3 | 56140 |
| 3254_Neisseria_gonorrhoeae_strain_WHO_F_chromosome_1_g_4 | 56141 |
| 3254_Neisseria_gonorrhoeae_strain_WHO_F_chromosome_1_g_5 | 56142 |
| 3255_Neisseria_gonorrhoeae_strain_WHO_F_chromosome_1_g_1 | 56143 |
| 3255_Neisseria_gonorrhoeae_strain_WHO_F_chromosome_1_g_2 | 56144 |
| 3255_Neisseria_gonorrhoeae_strain_WHO_F_chromosome_1_g_3 | 56145 |
| 3255_Neisseria_gonorrhoeae_strain_WHO_F_chromosome_1_g_4 | 56146 |
| 3255_Neisseria_gonorrhoeae_strain_WHO_F_chromosome_1_g_5 | 56147 |
| 3256_Neisseria_gonorrhoeae_strain_WHO_F_chromosome_1_g_1 | 56148 |
| 3256_Neisseria_gonorrhoeae_strain_WHO_F_chromosome_1_g_2 | 56149 |
| 3256_Neisseria_gonorrhoeae_strain_WHO_F_chromosome_1_g_3 | 56150 |
| 3256_Neisseria_gonorrhoeae_strain_WHO_F_chromosome_1_g_4 | 56151 |
| 3256_Neisseria_gonorrhoeae_strain_WHO_F_chromosome_1_g_5 | 56152 |
| 3257_Neisseria_gonorrhoeae_strain_WHO_F_chromosome_1_g_1 | 56153 |
| 3257_Neisseria_gonorrhoeae_strain_WHO_F_chromosome_1_g_2 | 56154 |
| 3257_Neisseria_gonorrhoeae_strain_WHO_F_chromosome_1_g_3 | 56155 |
| 3257_Neisseria_gonorrhoeae_strain_WHO_F_chromosome_1_g_4 | 56156 |
| 3257_Neisseria_gonorrhoeae_strain_WHO_F_chromosome_1_g_5 | 56157 |
| 3258_Neisseria_gonorrhoeae_strain_WHO_F_chromosome_1_g_1 | 56158 |
| 3258_Neisseria_gonorrhoeae_strain_WHO_F_chromosome_1_g_2 | 56159 |
| 3258_Neisseria_gonorrhoeae_strain_WHO_F_chromosome_1_g_3 | 56160 |
| 3258_Neisseria_gonorrhoeae_strain_WHO_F_chromosome_1_g_4 | 56161 |
| 3258_Neisseria_gonorrhoeae_strain_WHO_F_chromosome_1_g_5 | 56162 |
| 3259_Neisseria_gonorrhoeae_strain_WHO_F_chromosome_1_g_1 | 56163 |
| 3259_Neisseria_gonorrhoeae_strain_WHO_F_chromosome_1_g_2 | 56164 |
| 3259_Neisseria_gonorrhoeae_strain_WHO_F_chromosome_1_g_3 | 56165 |
| 3259_Neisseria_gonorrhoeae_strain_WHO_F_chromosome_1_g_4 | 56166 |
| 3259_Neisseria_gonorrhoeae_strain_WHO_F_chromosome_1_g_5 | 56167 |
| 3260_Neisseria_gonorrhoeae_strain_WHO_F_chromosome_1_g_1 | 56168 |
| 3260_Neisseria_gonorrhoeae_strain_WHO_F_chromosome_1_g_2 | 56169 |
| 3260_Neisseria_gonorrhoeae_strain_WHO_F_chromosome_1_g_3 | 56170 |
| 3260_Neisseria_gonorrhoeae_strain_WHO_F_chromosome_1_g_4 | 56171 |
| 3260_Neisseria_gonorrhoeae_strain_WHO_F_chromosome_1_g_5 | 56172 |
| 3261_Neisseria_gonorrhoeae_strain_WHO_F_chromosome_1_g_1 | 56173 |
| 3261_Neisseria_gonorrhoeae_strain_WHO_F_chromosome_1_g_2 | 56174 |
| 3261_Neisseria_gonorrhoeae_strain_WHO_F_chromosome_1_g_3 | 56175 |
| 3261_Neisseria_gonorrhoeae_strain_WHO_F_chromosome_1_g_4 | 56176 |
| 3261_Neisseria_gonorrhoeae_strain_WHO_F_chromosome_1_g_5 | 56177 |
| 3262_Neisseria_gonorrhoeae_strain_WHO_F_chromosome_1_g_1 | 56178 |
| 3262_Neisseria_gonorrhoeae_strain_WHO_F_chromosome_1_g_2 | 56179 |
| 3262_Neisseria_gonorrhoeae_strain_WHO_F_chromosome_1_g_3 | 56180 |
| 3263_Neisseria_gonorrhoeae_strain_WHO_F_chromosome_1_g_1 | 56181 |
| 3263_Neisseria_gonorrhoeae_strain_WHO_F_chromosome_1_g_2 | 56182 |
| 3263_Neisseria_gonorrhoeae_strain_WHO_F_chromosome_1_g_3 | 56183 |
| 3263_Neisseria_gonorrhoeae_strain_WHO_F_chromosome_1_g_4 | 56184 |
| 3263_Neisseria_gonorrhoeae_strain_WHO_F_chromosome_1_g_5 | 56185 |
| 3264_Neisseria_gonorrhoeae_strain_WHO_F_chromosome_1_g_1 | 56186 |
| 3264_Neisseria_gonorrhoeae_strain_WHO_F_chromosome_1_g_2 | 56187 |
| 3264_Neisseria_gonorrhoeae_strain_WHO_F_chromosome_1_g_3 | 56188 |
| 3264_Neisseria_gonorrhoeae_strain_WHO_F_chromosome_1_g_4 | 56189 |
| 3264_Neisseria_gonorrhoeae_strain_WHO_F_chromosome_1_g_5 | 56190 |
| 3265_Neisseria_gonorrhoeae_strain_WHO_F_chromosome_1_g_1 | 56191 |
| 3265_Neisseria_gonorrhoeae_strain_WHO_F_chromosome_1_g_2 | 56192 |
| 3265_Neisseria_gonorrhoeae_strain_WHO_F_chromosome_1_g_3 | 56193 |
| 3265_Neisseria_gonorrhoeae_strain_WHO_F_chromosome_1_g_4 | 56194 |
| 3265_Neisseria_gonorrhoeae_strain_WHO_F_chromosome_1_g_5 | 56195 |
| 3266_Neisseria_gonorrhoeae_strain_WHO_F_chromosome_1_g_1 | 56196 |
| 3266_Neisseria_gonorrhoeae_strain_WHO_F_chromosome_1_g_2 | 56197 |
| 3266_Neisseria_gonorrhoeae_strain_WHO_F_chromosome_1_g_3 | 56198 |
| 3266_Neisseria_gonorrhoeae_strain_WHO_F_chromosome_1_g_4 | 56199 |
| 3266_Neisseria_gonorrhoeae_strain_WHO_F_chromosome_1_g_5 | 56200 |
| 3267_Neisseria_gonorrhoeae_strain_WHO_F_chromosome_1_g_1 | 56201 |
| 3267_Neisseria_gonorrhoeae_strain_WHO_F_chromosome_1_g_2 | 56202 |
| 3267_Neisseria_gonorrhoeae_strain_WHO_F_chromosome_1_g_3 | 56203 |
| 3267_Neisseria_gonorrhoeae_strain_WHO_F_chromosome_1_g_4 | 56204 |
| 3267_Neisseria_gonorrhoeae_strain_WHO_F_chromosome_1_g_5 | 56205 |
| 3268_Neisseria_gonorrhoeae_strain_WHO_F_chromosome_1_g_1 | 56206 |
| 3268_Neisseria_gonorrhoeae_strain_WHO_F_chromosome_1_g_2 | 56207 |
| 3268_Neisseria_gonorrhoeae_strain_WHO_F_chromosome_1_g_3 | 56208 |
| 3268_Neisseria_gonorrhoeae_strain_WHO_F_chromosome_1_g_4 | 56209 |
| 3268_Neisseria_gonorrhoeae_strain_WHO_F_chromosome_1_g_5 | 56210 |
| 3269_Human_papillomavirus_type_129_g_1 | 56211 |
| 3269_Human_papillomavirus_type_129_g_2 | 56212 |
| 3269_Human_papillomavirus_type_129_g_3 | 56213 |
| 3269_Human_papillomavirus_type_129_g_4 | 56214 |
| 3269_Human_papillomavirus_type_129_g_5 | 56215 |
| 3270_Human_papillomavirus_type_129_g_1 | 56216 |
| 3270_Human_papillomavirus_type_129_g_2 | 56217 |
| 3270_Human_papillomavirus_type_129_g_3 | 56218 |
| 3270_Human_papillomavirus_type_129_g_4 | 56219 |
| 3270_Human_papillomavirus_type_129_g_5 | 56220 |
| 3271_Human_papillomavirus_type_129_g_1 | 56221 |
| 3271_Human_papillomavirus_type_129_g_2 | 56222 |
| 3271_Human_papillomavirus_type_129_g_3 | 56223 |
| 3271_Human_papillomavirus_type_129_g_4 | 56224 |
| 3271_Human_papillomavirus_type_129_g_5 | 56225 |
| 3272_Human_papillomavirus_type_129_g_1 | 56226 |
| 3272_Human_papillomavirus_type_129_g_2 | 56227 |
| 3272_Human_papillomavirus_type_129_g_3 | 56228 |
| 3272_Human_papillomavirus_type_129_g_4 | 56229 |
| 3272_Human_papillomavirus_type_129_g_5 | 56230 |
| 3273_Human_papillomavirus_type_129_g_1 | 56231 |
| 3273_Human_papillomavirus_type_129_g_2 | 56232 |
| 3273_Human_papillomavirus_type_129_g_3 | 56233 |
| 3273_Human_papillomavirus_type_129_g_4 | 56234 |
| 3273_Human_papillomavirus_type_129_g_5 | 56235 |
| 3274_Human_papillomavirus_type_129_g_1 | 56236 |
| 3274_Human_papillomavirus_type_129_g_2 | 56237 |
| 3274_Human_papillomavirus_type_129_g_3 | 56238 |
| 3274_Human_papillomavirus_type_129_g_4 | 56239 |
| 3274_Human_papillomavirus_type_129_g_5 | 56240 |
| 3275_Human_papillomavirus_type_129_g_1 | 56241 |
| 3275_Human_papillomavirus_type_129_g_2 | 56242 |
| 3275_Human_papillomavirus_type_129_g_3 | 56243 |
| 3275_Human_papillomavirus_type_129_g_4 | 56244 |
| 3275_Human_papillomavirus_type_129_g_5 | 56245 |
| 3276_Human_papillomavirus_type_129_g_1 | 56246 |
| 3276_Human_papillomavirus_type_129_g_2 | 56247 |
| 3276_Human_papillomavirus_type_129_g_3 | 56248 |
| 3276_Human_papillomavirus_type_129_g_4 | 56249 |
| 3276_Human_papillomavirus_type_129_g_5 | 56250 |
| 3277_Human_papillomavirus_type_129_g_1 | 56251 |
| 3277_Human_papillomavirus_type_129_g_2 | 56252 |
| 3277_Human_papillomavirus_type_129_g_3 | 56253 |
| 3277_Human_papillomavirus_type_129_g_4 | 56254 |
| 3277_Human_papillomavirus_type_129_g_5 | 56255 |
| 3278_Human_papillomavirus_type_129_g_1 | 56256 |
| 3278_Human_papillomavirus_type_129_g_2 | 56257 |
| 3278_Human_papillomavirus_type_129_g_3 | 56258 |
| 3278_Human_papillomavirus_type_129_g_4 | 56259 |
| 3278_Human_papillomavirus_type_129_g_5 | 56260 |
| 3279_Human_papillomavirus_type_129_g_1 | 56261 |
| 3279_Human_papillomavirus_type_129_g_2 | 56262 |
| 3279_Human_papillomavirus_type_129_g_3 | 56263 |
| 3279_Human_papillomavirus_type_129_g_4 | 56264 |
| 3279_Human_papillomavirus_type_129_g_5 | 56265 |
| 3280_Human_papillomavirus_type_129_g_1 | 56266 |
| 3280_Human_papillomavirus_type_129_g_2 | 56267 |
| 3280_Human_papillomavirus_type_129_g_3 | 56268 |
| 3280_Human_papillomavirus_type_129_g_4 | 56269 |
| 3280_Human_papillomavirus_type_129_g_5 | 56270 |
| 3281_Human_papillomavirus_type_129_g_1 | 56271 |
| 3281_Human_papillomavirus_type_129_g_2 | 56272 |
| 3281_Human_papillomavirus_type_129_g_3 | 56273 |
| 3281_Human_papillomavirus_type_129_g_4 | 56274 |
| 3281_Human_papillomavirus_type_129_g_5 | 56275 |
| 3282_Human_papillomavirus_type_129_g_1 | 56276 |
| 3282_Human_papillomavirus_type_129_g_2 | 56277 |
| 3282_Human_papillomavirus_type_129_g_3do you | 56278 |
| have a preferred numbe | |
| 3282_Human_papillomavirus_type_129_g_4 | 56279 |
| 3282_Human_papillomavirus_type_129_g_5 | 56280 |
| 3283_Influenza_A_virus_(A/Korea/426/1968(H2N2))_{—} | 56281 |
| segment_3_g_1 | |
| 3283_Influenza_A_virus_(A/Korea/426/1968(H2N2))_{—} | 56282 |
| segment_3_g_2 | |
| 3283_Influenza_A_virus_(A/Korea/426/1968(H2N2))_{—} | 56283 |
| segment_3_g_3 | |
| 3283_Influenza_A_virus_(A/Korea/426/1968(H2N2))_{—} | 56284 |
| segment_3_g_4 | |
| 3283_Influenza_A_virus_(A/Korea/426/1968(H2N2))_{—} | 56285 |
| segment_3_g_5 | |
| 3284_Influenza_A_virus_(A/Korea/426/1968(H2N2))_{—} | 56286 |
| segment_3_g_1 | |
| 3284_Influenza_A_virus_(A/Korea/426/1968(H2N2))_{—} | 56287 |
| segment_3_g_2 | |
| 3284_Influenza_A_virus_(A/Korea/426/1968(H2N2))_{—} | 56288 |
| segment_3_g_3 | |
| 3284_Influenza_A_virus_(A/Korea/426/1968(H2N2))_{—} | 56289 |
| segment_3_g_4 | |
| 3284_Influenza_A_virus_(A/Korea/426/1968(H2N2))_{—} | 56290 |
| segment_3_g_5 | |
| 3285_Influenza_A_virus_(A/Korea/426/1968(H2N2))_{—} | 56291 |
| segment_3_g_1 | |
| 3285_Influenza_A_virus_(A/Korea/426/1968(H2N2))_{—} | 56292 |
| segment_3_g_2 | |
| 3285_Influenza_A_virus_(A/Korea/426/1968(H2N2))_{—} | 56293 |
| segment_3_g_3 | |
| 3285_Influenza_A_virus_(A/Korea/426/1968(H2N2))_{—} | 56294 |
| segment_3_g_4 | |
| 3285_Influenza_A_virus_(A/Korea/426/1968(H2N2))_{—} | 56295 |
| segment_3_g_5 | |
| 3286_Influenza_A_virus_(A/Korea/426/1968(H2N2))_{—} | 56296 |
| segment_3_g_1 | |
| 3286_Influenza_A_virus_(A/Korea/426/1968(H2N2))_{—} | 56297 |
| segment_3_g_2 | |
| 3286_Influenza_A_virus_(A/Korea/426/1968(H2N2))_{—} | 56298 |
| segment_3_g_3 | |
| 3286_Influenza_A_virus_(A/Korea/426/1968(H2N2))_{—} | 56299 |
| segment_3_g_4 | |
| 3286_Influenza_A_virus_(A/Korea/426/1968(H2N2))_{—} | 56300 |
| segment_3_g_5 | |
| 3287_Influenza_A_virus_(A/Korea/426/1968(H2N2))_{—} | 56301 |
| segment_3_g_1 | |
| 3287_Influenza_A_virus_(A/Korea/426/1968(H2N2))_{—} | 56302 |
| segment_3_g_2 | |
| 3287_Influenza_A_virus_(A/Korea/426/1968(H2N2))_{—} | 56303 |
| segment_3_g_3 | |
| 3287_Influenza_A_virus_(A/Korea/426/1968(H2N2))_{—} | 56304 |
| segment_3_g_4 | |
| 3287_Influenza_A_virus_(A/Korea/426/1968(H2N2))_{—} | 56305 |
| segment_3_g_5 | |
| 3288_Influenza_A_virus_(A/Korea/426/1968(H2N2))_{—} | 56306 |
| segment_3_g_1 | |
| 3288_Influenza_A_virus_(A/Korea/426/1968(H2N2))_{—} | 56307 |
| segment_3_g_2 | |
| 3288_Influenza_A_virus_(A/Korea/426/1968(H2N2))_{—} | 56308 |
| segment_3_g_3 | |
| 3288_Influenza_A_virus_(A/Korea/426/1968(H2N2))_{—} | 56309 |
| segment_3_g_4 | |
| 3288_Influenza_A_virus_(A/Korea/426/1968(H2N2))_{—} | 56310 |
| segment_3_g_5 | |
| 3289_Influenza_A_virus_(A/Korea/426/1968(H2N2))_{—} | 56311 |
| segment_3_g_1 | |
| 3289_Influenza_A_virus_(A/Korea/426/1968(H2N2))_{—} | 56312 |
| segment_3_g_2 | |
| 3289_Influenza_A_virus_(A/Korea/426/1968(H2N2))_{—} | 56313 |
| segment_3_g_3 | |
| 3289_Influenza_A_virus_(A/Korea/426/1968(H2N2))_{—} | 56314 |
| segment_3_g_4 | |
| 3289_Influenza_A_virus_(A/Korea/426/1968(H2N2))_{—} | 56315 |
| segment_3_g_5 | |
| 3290_Hepatitis_delta_virus_g_1 | 56316 |
| 3290_Hepatitis_delta_virus_g_2 | 56317 |
| 3290_Hepatitis_delta_virus_g_3 | 56318 |
| 3290_Hepatitis_delta_virus_g_4 | 56319 |
| 3290_Hepatitis_delta_virus_g_5 | 56320 |
| 3291_Hepatitis_delta_virus_g_1 | 56321 |
| 3291_Hepatitis_delta_virus_g_2 | 56322 |
| 3291_Hepatitis_delta_virus_g_3 | 56323 |
| 3291_Hepatitis_delta_virus_g_4 | 56324 |
| 3291_Hepatitis_delta_virus_g_5 | 56325 |
| 3292_Hepatitis_delta_virus_g_1 | 56326 |
| 3292_Hepatitis_delta_virus_g_2 | 56327 |
| 3293_Hepatitis_delta_virus_g_1 | 56328 |
| 3293_Hepatitis_delta_virus_g_2 | 56329 |
| 3293_Hepatitis_delta_virus_g_3 | 56330 |
| 3293_Hepatitis_delta_virus_g_4 | 56331 |
| 3293_Hepatitis_delta_virus_g_5 | 56332 |
| 3294_Hepatitis_delta_virus_g_1 | 56333 |
| 3294_Hepatitis_delta_virus_g_2 | 56334 |
| 3294_Hepatitis_delta_virus_g_3 | 56335 |
| 3294_Hepatitis_delta_virus_g_4 | 56336 |
| 3294_Hepatitis_delta_virus_g_5 | 56337 |
| 3295_Human_papillomavirus_type_26_g_1 | 56338 |
| 3295_Human_papillomavirus_type_26_g_2 | 56339 |
| 3295_Human_papillomavirus_type_26_g_3 | 56340 |
| 3295_Human_papillomavirus_type_26_g_4 | 56341 |
| 3295_Human_papillomavirus_type_26_g_5 | 56342 |
| 3296_Human_papillomavirus_type_26_g_1 | 56343 |
| 3296_Human_papillomavirus_type_26_g_2 | 56344 |
| 3296_Human_papillomavirus_type_26_g_3 | 56345 |
| 3296_Human_papillomavirus_type_26_g_4 | 56346 |
| 3296_Human_papillomavirus_type_26_g_5 | 56347 |
| 3297_Human_papillomavirus_type_26_g_1 | 56348 |
| 3297_Human_papillomavirus_type_26_g_2 | 56349 |
| 3297_Human_papillomavirus_type_26_g_3 | 56350 |
| 3297_Human_papillomavirus_type_26_g_4 | 56351 |
| 3297_Human_papillomavirus_type_26_g_5 | 56352 |
| 3298_Human_papillomavirus_type_26_g_1 | 56353 |
| 3298_Human_papillomavirus_type_26_g_2 | 56354 |
| 3298_Human_papillomavirus_type_26_g_3 | 56355 |
| 3298_Human_papillomavirus_type_26_g_4 | 56356 |
| 3298_Human_papillomavirus_type_26_g_5 | 56357 |
| 3299_Human_papillomavirus_type_26_g_1 | 56358 |
| 3299_Human_papillomavirus_type_26_g_2 | 56359 |
| 3299_Human_papillomavirus_type_26_g_3 | 56360 |
| 3299_Human_papillomavirus_type_26_g_4 | 56361 |
| 3299_Human_papillomavirus_type_26_g_5 | 56362 |
| 3300_Human_papillomavirus_type_26_g_1 | 56363 |
| 3300_Human_papillomavirus_type_26_g_2 | 56364 |
| 3300_Human_papillomavirus_type_26_g_3 | 56365 |
| 3300_Human_papillomavirus_type_26_g_4 | 56366 |
| 3300_Human_papillomavirus_type_26_g_5 | 56367 |
| 3301_Human_papillomavirus_type_26_g_1 | 56368 |
| 3301_Human_papillomavirus_type_26_g_2 | 56369 |
| 3301_Human_papillomavirus_type_26_g_3 | 56370 |
| 3301_Human_papillomavirus_type_26_g_4 | 56371 |
| 3301_Human_papillomavirus_type_26_g_5 | 56372 |
| 3302_Human_papillomavirus_type_26_g_1 | 56373 |
| 3302_Human_papillomavirus_type_26_g_2 | 56374 |
| 3302_Human_papillomavirus_type_26_g_3 | 56375 |
| 3302_Human_papillomavirus_type_26_g_4 | 56376 |
| 3302_Human_papillomavirus_type_26_g_5 | 56377 |
| 3303_Human_papillomavirus_type_26_g_1 | 56378 |
| 3303_Human_papillomavirus_type_26_g_2 | 56379 |
| 3303_Human_papillomavirus_type_26_g_3 | 56380 |
| 3303_Human_papillomavirus_type_26_g_4 | 56381 |
| 3304_Human_papillomavirus_type_26_g_1 | 56382 |
| 3304_Human_papillomavirus_type_26_g_2 | 56383 |
| 3304_Human_papillomavirus_type_26_g_3 | 56384 |
| 3304_Human_papillomavirus_type_26_g_4 | 56385 |
| 3304_Human_papillomavirus_type_26_g_5 | 56386 |
| 3305_Human_papillomavirus_type_26_g_1 | 56387 |
| 3305_Human_papillomavirus_type_26_g_2 | 56388 |
| 3305_Human_papillomavirus_type_26_g_3 | 56389 |
| 3305_Human_papillomavirus_type_26_g_4 | 56390 |
| 3305_Human_papillomavirus_type_26_g_5 | 56391 |
| 3306_Human_papillomavirus_type_26_g_1 | 56392 |
| 3306_Human_papillomavirus_type_26_g_2 | 56393 |
| 3306_Human_papillomavirus_type_26_g_3 | 56394 |
| 3306_Human_papillomavirus_type_26_g_4 | 56395 |
| 3306_Human_papillomavirus_type_26_g_5 | 56396 |
| 3307_Human_papillomavirus_type_26_g_1 | 56397 |
| 3307_Human_papillomavirus_type_26_g_2 | 56398 |
| 3307_Human_papillomavirus_type_26_g_3 | 56399 |
| 3307_Human_papillomavirus_type_26_g_4 | 56400 |
| 3307_Human_papillomavirus_type_26_g_5 | 56401 |
| 3308_Human_papillomavirus_type_26_g_1 | 56402 |
| 3308_Human_papillomavirus_type_26_g_2 | 56403 |
| 3308_Human_papillomavirus_type_26_g_3 | 56404 |
| 3308_Human_papillomavirus_type_26_g_4 | 56405 |
| 3308_Human_papillomavirus_type_26_g_5 | 56406 |
| 3309_Human_papillomavirus_type_26_g_1 | 56407 |
| 3309_Human_papillomavirus_type_26_g_2 | 56408 |
| 3309_Human_papillomavirus_type_26_g_3 | 56409 |
| 3309_Human_papillomavirus_type_26_g_4 | 56410 |
| 3309_Human_papillomavirus_type_26_g_5 | 56411 |
| 3310_Human_papillomavirus_type_26_g_1 | 56412 |
| 3310_Human_papillomavirus_type_26_g_2 | 56413 |
| 3310_Human_papillomavirus_type_26_g_3 | 56414 |
| 3310_Human_papillomavirus_type_26_g_4 | 56415 |
| 3310_Human_papillomavirus_type_26_g_5 | 56416 |
| 3311_Human_papillomavirus_type_26_g_1 | 56417 |
| 3311_Human_papillomavirus_type_26_g_2 | 56418 |
| 3311_Human_papillomavirus_type_26_g_3 | 56419 |
| 3311_Human_papillomavirus_type_26_g_4 | 56420 |
| 3311_Human_papillomavirus_type_26_g_5 | 56421 |
| 3312_Hepatitis_GB_virus_B_g_1 | 56422 |
| 3312_Hepatitis_GB_virus_B_g_2 | 56423 |
| 3312_Hepatitis_GB_virus_B_g_3 | 56424 |
| 3312_Hepatitis_GB_virus_B_g_4 | 56425 |
| 3312_Hepatitis_GB_virus_B_g_5 | 56426 |
| 3313_Hepatitis_GB_virus_B_g_1 | 56427 |
| 3313_Hepatitis_GB_virus_B_g_2 | 56428 |
| 3313_Hepatitis_GB_virus_B_g_3 | 56429 |
| 3313_Hepatitis_GB_virus_B_g_4 | 56430 |
| 3313_Hepatitis_GB_virus_B_g_5 | 56431 |
| 3314_Hepatitis_GB_virus_B_g_1 | 56432 |
| 3314_Hepatitis_GB_virus_B_g_2 | 56433 |
| 3314_Hepatitis_GB_virus_B_g_3 | 56434 |
| 3314_Hepatitis_GB_virus_B_g_4 | 56435 |
| 3314_Hepatitis_GB_virus_B_g_5 | 56436 |
| 3315_Hepatitis_GB_virus_B_g_1 | 56437 |
| 3315_Hepatitis_GB_virus_B_g_2 | 56438 |
| 3315_Hepatitis_GB_virus_B_g_3 | 56439 |
| 3315_Hepatitis_GB_virus_B_g_4 | 56440 |
| 3315_Hepatitis_GB_virus_B_g_5 | 56441 |
| 3316_Hepatitis_GB_virus_B_g_1 | 56442 |
| 3316_Hepatitis_GB_virus_B_g_2 | 56443 |
| 3316_Hepatitis_GB_virus_B_g_3 | 56444 |
| 3316_Hepatitis_GB_virus_B_g_4 | 56445 |
| 3316_Hepatitis_GB_virus_B_g_5 | 56446 |
| 3317_Hepatitis_GB_virus_B_g_1 | 56447 |
| 3317_Hepatitis_GB_virus_B_g_2 | 56448 |
| 3317_Hepatitis_GB_virus_B_g_3 | 56449 |
| 3317_Hepatitis_GB_virus_B_g_4 | 56450 |
| 3317_Hepatitis_GB_virus_B_g_5 | 56451 |
| 3318_Hepatitis_GB_virus_B_g_1 | 56452 |
| 3318_Hepatitis_GB_virus_B_g_2 | 56453 |
| 3318_Hepatitis_GB_virus_B_g_3 | 56454 |
| 3318_Hepatitis_GB_virus_B_g_4 | 56455 |
| 3318_Hepatitis_GB_virus_B_g_5 | 56456 |
| 3319_Hepatitis_GB_virus_B_g_1 | 56457 |
| 3319_Hepatitis_GB_virus_B_g_2 | 56458 |
| 3319_Hepatitis_GB_virus_B_g_3 | 56459 |
| 3319_Hepatitis_GB_virus_B_g_4 | 56460 |
| 3319_Hepatitis_GB_virus_B_g_5 | 56461 |
| 3320_Hepatitis_GB_virus_B_g_1 | 56462 |
| 3320_Hepatitis_GB_virus_B_g_2 | 56463 |
| 3320_Hepatitis_GB_virus_B_g_3 | 56464 |
| 3320_Hepatitis_GB_virus_B_g_4 | 56465 |
| 3320_Hepatitis_GB_virus_B_g_5 | 56466 |
| 3321_Hepatitis_GB_virus_B_g_1 | 56467 |
| 3321_Hepatitis_GB_virus_B_g_2 | 56468 |
| 3321_Hepatitis_GB_virus_B_g_3 | 56469 |
| 3321_Hepatitis_GB_virus_B_g_4 | 56470 |
| 3321_Hepatitis_GB_virus_B_g_5 | 56471 |
| 3322_Hepatitis_GB_virus_B_g_1 | 56472 |
| 3322_Hepatitis_GB_virus_B_g_2 | 56473 |
| 3322_Hepatitis_GB_virus_B_g_3 | 56474 |
| 3322_Hepatitis_GB_virus_B_g_4 | 56475 |
| 3322_Hepatitis_GB_virus_B_g_5 | 56476 |
| 3323_Hepatitis_GB_virus_B_g_1 | 56477 |
| 3323_Hepatitis_GB_virus_B_g_2 | 56478 |
| 3323_Hepatitis_GB_virus_B_g_3 | 56479 |
| 3323_Hepatitis_GB_virus_B_g_4 | 56480 |
| 3323_Hepatitis_GB_virus_B_g_5 | 56481 |
| 3324_Hepatitis_GB_virus_B_g_1 | 56482 |
| 3324_Hepatitis_GB_virus_B_g_2 | 56483 |
| 3324_Hepatitis_GB_virus_B_g_3 | 56484 |
| 3324_Hepatitis_GB_virus_B_g_4 | 56485 |
| 3324_Hepatitis_GB_virus_B_g_5 | 56486 |
| 3325_Hepatitis_GB_virus_B_g_1 | 56487 |
| 3325_Hepatitis_GB_virus_B_g_2 | 56488 |
| 3325_Hepatitis_GB_virus_B_g_3 | 56489 |
| 3325_Hepatitis_GB_virus_B_g_4 | 56490 |
| 3325_Hepatitis_GB_virus_B_g_5 | 56491 |
| 3326_Hepatitis_GB_virus_B_g_1 | 56492 |
| 3326_Hepatitis_GB_virus_B_g_2 | 56493 |
| 3326_Hepatitis_GB_virus_B_g_3 | 56494 |
| 3326_Hepatitis_GB_virus_B_g_4 | 56495 |
| 3326_Hepatitis_GB_virus_B_g_5 | 56496 |
| 3327_Hepatitis_GB_virus_B_g_1 | 56497 |
| 3327_Hepatitis_GB_virus_B_g_2 | 56498 |
| 3327_Hepatitis_GB_virus_B_g_3 | 56499 |
| 3327_Hepatitis_GB_virus_B_g_4 | 56500 |
| 3327_Hepatitis_GB_virus_B_g_5 | 56501 |
| 3328_Hepatitis_GB_virus_B_g_1 | 56502 |
| 3328_Hepatitis_GB_virus_B_g_2 | 56503 |
| 3328_Hepatitis_GB_virus_B_g_3 | 56504 |
| 3328_Hepatitis_GB_virus_B_g_4 | 56505 |
| 3328_Hepatitis_GB_virus_B_g_5 | 56506 |
| 3329_Hepatitis_GB_virus_B_g_1 | 56507 |
| 3329_Hepatitis_GB_virus_B_g_2 | 56508 |
| 3329_Hepatitis_GB_virus_B_g_3 | 56509 |
| 3329_Hepatitis_GB_virus_B_g_4 | 56510 |
| 3329_Hepatitis_GB_virus_B_g_5 | 56511 |
| 3330_Hepatitis_GB_virus_B_g_1 | 56512 |
| 3330_Hepatitis_GB_virus_B_g_2 | 56513 |
| 3330_Hepatitis_GB_virus_B_g_3 | 56514 |
| 3330_Hepatitis_GB_virus_B_g_4 | 56515 |
| 3330_Hepatitis_GB_virus_B_g_5 | 56516 |
| 3331_Hepatitis_GB_virus_B_g_1 | 56517 |
| 3331_Hepatitis_GB_virus_B_g_2 | 56518 |
| 3331_Hepatitis_GB_virus_B_g_3 | 56519 |
| 3331_Hepatitis_GB_virus_B_g_4 | 56520 |
| 3331_Hepatitis_GB_virus_B_g_5 | 56521 |
| 3332_Hepatitis_GB_virus_B_g_1 | 56522 |
| 3332_Hepatitis_GB_virus_B_g_2 | 56523 |
| 3332_Hepatitis_GB_virus_B_g_3 | 56524 |
| 3332_Hepatitis_GB_virus_B_g_4 | 56525 |
| 3332_Hepatitis_GB_virus_B_g_5 | 56526 |
| 3333_Hepatitis_GB_virus_B_g_1 | 56527 |
| 3333_Hepatitis_GB_virus_B_g_2 | 56528 |
| 3333_Hepatitis_GB_virus_B_g_3 | 56529 |
| 3333_Hepatitis_GB_virus_B_g_4 | 56530 |
| 3333_Hepatitis_GB_virus_B_g_5 | 56531 |
| 3334_Hepatitis_GB_virus_B_g_1 | 56532 |
| 3334_Hepatitis_GB_virus_B_g_2 | 56533 |
| 3334_Hepatitis_GB_virus_B_g_3 | 56534 |
| 3334_Hepatitis_GB_virus_B_g_4 | 56535 |
| 3334_Hepatitis_GB_virus_B_g_5 | 56536 |
| 3335_Hepatitis_GB_virus_B_g_1 | 56537 |
| 3335_Hepatitis_GB_virus_B_g_2 | 56538 |
| 3335_Hepatitis_GB_virus_B_g_3 | 56539 |
| 3335_Hepatitis_GB_virus_B_g_4 | 56540 |
| 3335_Hepatitis_GB_virus_B_g_5 | 56541 |
| 3336_Influenza_A_virus_(A/New_York/392/2004(H3N2))_{—} | 56542 |
| segment_6_g_1 | |
| 3336_Influenza_A_virus_(A/New_York/392/2004(H3N2))_{—} | 56543 |
| segment_6_g_2 | |
| 3336_Influenza_A_virus_(A/New_York/392/2004(H3N2))_{—} | 56544 |
| segment_6_g_3 | |
| 3336_Influenza_A_virus_(A/New_York/392/2004(H3N2))_{—} | 56545 |
| segment_6_g_4 | |
| 3336_Influenza_A_virus_(A/New_York/392/2004(H3N2))_{—} | 56546 |
| segment_6_g_5 | |
| 3337_Influenza_A_virus_(A/New_York/392/2004(H3N2))_{—} | 56547 |
| segment_6_g_1 | |
| 3337_Influenza_A_virus_(A/New_York/392/2004(H3N2))_{—} | 56548 |
| segment_6_g_2 | |
| 3337_Influenza_A_virus_(A/New_York/392/2004(H3N2))_{—} | 56549 |
| segment_6_g_3 | |
| 3337_Influenza_A_virus_(A/New_York/392/2004(H3N2))_{—} | 56550 |
| segment_6_g_4 | |
| 3337_Influenza_A_virus_(A/New_York/392/2004(H3N2))_{—} | 56551 |
| segment_6_g_5 | |
| 3338_Influenza_A_virus_(A/New_York/392/2004(H3N2))_{—} | 56552 |
| segment_6_g_1 | |
| 3338_Influenza_A_virus_(A/New_York/392/2004(H3N2))_{—} | 56553 |
| segment_6_g_2 | |
| 3338_Influenza_A_virus_(A/New_York/392/2004(H3N2))_{—} | 56554 |
| segment_6_g_3 | |
| 3338_Influenza_A_virus_(A/New_York/392/2004(H3N2))_{—} | 56555 |
| segment_6_g_4 | |
| 3338_Influenza_A_virus_(A/New_York/392/2004(H3N2))_{—} | 56556 |
| segment_6_g_5 | |
| 3339_Influenza_A_virus_(A/New_York/392/2004(H3N2))_{—} | 56557 |
| segment_6_g_1 | |
| 3339_Influenza_A_virus_(A/New_York/392/2004(H3N2))_{—} | 56558 |
| segment_6_g_2 | |
| 3339_Influenza_A_virus_(A/New_York/392/2004(H3N2))_{—} | 56559 |
| segment_6_g_3 | |
| 3339_Influenza_A_virus_(A/New_York/392/2004(H3N2))_{—} | 56560 |
| segment_6_g_4 | |
| 3339_Influenza_A_virus_(A/New_York/392/2004(H3N2))_{—} | 56561 |
| segment_6_g_5 | |
| 3340_Influenza_A_virus_(A/New_York/392/2004(H3N2))_{—} | 56562 |
| segment_6_g_1 | |
| 3340_Influenza_A_virus_(A/New_York/392/2004(H3N2))_{—} | 56563 |
| segment_6_g_2 | |
| 3340_Influenza_A_virus_(A/New_York/392/2004(H3N2))_{—} | 56564 |
| segment_6_g_3 | |
| 3340_Influenza_A_virus_(A/New_York/392/2004(H3N2))_{—} | 56565 |
| segment_6_g_4 | |
| 3340_Influenza_A_virus_(A/New_York/392/2004(H3N2))_{—} | 56566 |
| segment_6_g_5 | |
| 3341_Human_papillomavirus_isolate_SE379_g_1 | 56567 |
| 3341_Human_papillomavirus_isolate_SE379_g_2 | 56568 |
| 3341_Human_papillomavirus_isolate_SE379_g_3 | 56569 |
| 3341_Human_papillomavirus_isolate_SE379_g_4 | 56570 |
| 3341_Human_papillomavirus_isolate_SE379_g_5 | 56571 |
| 3342_Human_papillomavirus_isolate_SE379_g_1 | 56572 |
| 3342_Human_papillomavirus_isolate_SE379_g_2 | 56573 |
| 3342_Human_papillomavirus_isolate_SE379_g_3 | 56574 |
| 3342_Human_papillomavirus_isolate_SE379_g_4 | 56575 |
| 3342_Human_papillomavirus_isolate_SE379_g_5 | 56576 |
| 3343_Human_papillomavirus_isolate_SE379_g_1 | 56577 |
| 3343_Human_papillomavirus_isolate_SE379_g_2 | 56578 |
| 3343_Human_papillomavirus_isolate_SE379_g_3 | 56579 |
| 3343_Human_papillomavirus_isolate_SE379_g_4 | 56580 |
| 3343_Human_papillomavirus_isolate_SE379_g_5 | 56581 |
| 3344_Human_papillomavirus_isolate_SE379_g_1 | 56582 |
| 3344_Human_papillomavirus_isolate_SE379_g_2 | 56583 |
| 3344_Human_papillomavirus_isolate_SE379_g_3 | 56584 |
| 3344_Human_papillomavirus_isolate_SE379_g_4 | 56585 |
| 3344_Human_papillomavirus_isolate_SE379_g_5 | 56586 |
| 3345_Human_papillomavirus_isolate_SE379_g_1 | 56587 |
| 3345_Human_papillomavirus_isolate_SE379_g_2 | 56588 |
| 3345_Human_papillomavirus_isolate_SE379_g_3 | 56589 |
| 3345_Human_papillomavirus_isolate_SE379_g_4 | 56590 |
| 3345_Human_papillomavirus_isolate_SE379_g_5 | 56591 |
| 3346_Human_papillomavirus_isolate_SE379_g_1 | 56592 |
| 3346_Human_papillomavirus_isolate_SE379_g_2 | 56593 |
| 3346_Human_papillomavirus_isolate_SE379_g_3 | 56594 |
| 3346_Human_papillomavirus_isolate_SE379_g_4 | 56595 |
| 3346_Human_papillomavirus_isolate_SE379_g_5 | 56596 |
| 3347_Human_papillomavirus_isolate_SE379_g_1 | 56597 |
| 3347_Human_papillomavirus_isolate_SE379_g_2 | 56598 |
| 3347_Human_papillomavirus_isolate_SE379_g_3 | 56599 |
| 3347_Human_papillomavirus_isolate_SE379_g_4 | 56600 |
| 3347_Human_papillomavirus_isolate_SE379_g_5 | 56601 |
| 3348_Human_papillomavirus_isolate_SE379_g_1 | 56602 |
| 3348_Human_papillomavirus_isolate_SE379_g_2 | 56603 |
| 3348_Human_papillomavirus_isolate_SE379_g_3 | 56604 |
| 3348_Human_papillomavirus_isolate_SE379_g_4 | 56605 |
| 3348_Human_papillomavirus_isolate_SE379_g_5 | 56606 |
| 3349_Human_papillomavirus_isolate_SE379_g_1 | 56607 |
| 3349_Human_papillomavirus_isolate_SE379_g_2 | 56608 |
| 3349_Human_papillomavirus_isolate_SE379_g_3 | 56609 |
| 3349_Human_papillomavirus_isolate_SE379_g_4 | 56610 |
| 3349_Human_papillomavirus_isolate_SE379_g_5 | 56611 |
| 3350_Human_papillomavirus_isolate_SE379_g_1 | 56612 |
| 3350_Human_papillomavirus_isolate_SE379_g_2 | 56613 |
| 3350_Human_papillomavirus_isolate_SE379_g_3 | 56614 |
| 3350_Human_papillomavirus_isolate_SE379_g_4 | 56615 |
| 3350_Human_papillomavirus_isolate_SE379_g_5 | 56616 |
| 3351_Human_papillomavirus_isolate_SE379_g_1 | 56617 |
| 3351_Human_papillomavirus_isolate_SE379_g_2 | 56618 |
| 3351_Human_papillomavirus_isolate_SE379_g_3 | 56619 |
| 3351_Human_papillomavirus_isolate_SE379_g_4 | 56620 |
| 3351_Human_papillomavirus_isolate_SE379_g_5 | 56621 |
| 3352_Human_papillomavirus_isolate_SE379_g_1 | 56622 |
| 3352_Human_papillomavirus_isolate_SE379_g_2 | 56623 |
| 3352_Human_papillomavirus_isolate_SE379_g_3 | 56624 |
| 3352_Human_papillomavirus_isolate_SE379_g_4 | 56625 |
| 3352_Human_papillomavirus_isolate_SE379_g_5 | 56626 |
| 3353_Influenza_A_virus_ha_gene_for_hemagglutinin_g_1 | 56627 |
| 3353_Influenza_A_virus_ha_gene_for_hemagglutinin_g_2 | 56628 |
| 3353_Influenza_A_virus_ha_gene_for_hemagglutinin_g_3 | 56629 |
| 3353_Influenza_A_virus_ha_gene_for_hemagglutinin_g_4 | 56630 |
| 3353_Influenza_A_virus_ha_gene_for_hemagglutinin_g_5 | 56631 |
| 3354_Influenza_A_virus_ha_gene_for_hemagglutinin_g_1 | 56632 |
| 3354_Influenza_A_virus_ha_gene_for_hemagglutinin_g_2 | 56633 |
| 3354_Influenza_A_virus_ha_gene_for_hemagglutinin_g_3 | 56634 |
| 3354_Influenza_A_virus_ha_gene_for_hemagglutinin_g_4 | 56635 |
| 3354_Influenza_A_virus_ha_gene_for_hemagglutinin_g_5 | 56636 |
| 3355_Influenza_A_virus_ha_gene_for_hemagglutinin_g_1 | 56637 |
| 3355_Influenza_A_virus_ha_gene_for_hemagglutinin_g_2 | 56638 |
| 3355_Influenza_A_virus_ha_gene_for_hemagglutinin_g_3 | 56639 |
| 3355_Influenza_A_virus_ha_gene_for_hemagglutinin_g_4 | 56640 |
| 3355_Influenza_A_virus_ha_gene_for_hemagglutinin_g_5 | 56641 |
| 3356_Influenza_A_virus_ha_gene_for_hemagglutinin_g_1 | 56642 |
| 3356_Influenza_A_virus_ha_gene_for_hemagglutinin_g_2 | 56643 |
| 3356_Influenza_A_virus_ha_gene_for_hemagglutinin_g_3 | 56644 |
| 3356_Influenza_A_virus_ha_gene_for_hemagglutinin_g_4 | 56645 |
| 3356_Influenza_A_virus_ha_gene_for_hemagglutinin_g_5 | 56646 |
| 3357_Influenza_A_virus_ha_gene_for_hemagglutinin_g_1 | 56647 |
| 3357_Influenza_A_virus_ha_gene_for_hemagglutinin_g_2 | 56648 |
| 3357_Influenza_A_virus_ha_gene_for_hemagglutinin_g_3 | 56649 |
| 3357_Influenza_A_virus_ha_gene_for_hemagglutinin_g_4 | 56650 |
| 3357_Influenza_A_virus_ha_gene_for_hemagglutinin_g_5 | 56651 |
| 3358_Hepatitis_C_virus_genotype_5_g_1 | 56652 |
| 3358_Hepatitis_C_virus_genotype_5_g_2 | 56653 |
| 3358_Hepatitis_C_virus_genotype_5_g_3 | 56654 |
| 3358_Hepatitis_C_virus_genotype_5_g_4 | 56655 |
| 3358_Hepatitis_C_virus_genotype_5_g_5 | 56656 |
| 3359_Hepatitis_C_virus_genotype_5_g_1 | 56657 |
| 3359_Hepatitis_C_virus_genotype_5_g_2 | 56658 |
| 3359_Hepatitis_C_virus_genotype_5_g_3 | 56659 |
| 3359_Hepatitis_C_virus_genotype_5_g_4 | 56660 |
| 3359_Hepatitis_C_virus_genotype_5_g_5 | 56661 |
| 3360_Hepatitis_C_virus_genotype_5_g_1 | 56662 |
| 3360_Hepatitis_C_virus_genotype_5_g_2 | 56663 |
| 3360_Hepatitis_C_virus_genotype_5_g_3 | 56664 |
| 3360_Hepatitis_C_virus_genotype_5_g_4 | 56665 |
| 3360_Hepatitis_C_virus_genotype_5_g_5 | 56666 |
| 3361_Hepatitis_C_virus_genotype_5_g_1 | 56667 |
| 3361_Hepatitis_C_virus_genotype_5_g_2 | 56668 |
| 3361_Hepatitis_C_virus_genotype_5_g_3 | 56669 |
| 3361_Hepatitis_C_virus_genotype_5_g_4 | 56670 |
| 3361_Hepatitis_C_virus_genotype_5_g_5 | 56671 |
| 3362_Hepatitis_C_virus_genotype_5_g_1 | 56672 |
| 3362_Hepatitis_C_virus_genotype_5_g_2 | 56673 |
| 3362_Hepatitis_C_virus_genotype_5_g_3 | 56674 |
| 3362_Hepatitis_C_virus_genotype_5_g_4 | 56675 |
| 3362_Hepatitis_C_virus_genotype_5_g_5 | 56676 |
| 3363_Hepatitis_C_virus_genotype_5_g_1 | 56677 |
| 3363_Hepatitis_C_virus_genotype_5_g_2 | 56678 |
| 3363_Hepatitis_C_virus_genotype_5_g_3 | 56679 |
| 3363_Hepatitis_C_virus_genotype_5_g_4 | 56680 |
| 3363_Hepatitis_C_virus_genotype_5_g_5 | 56681 |
| 3364_Hepatitis_C_virus_genotype_5_g_1 | 56682 |
| 3364_Hepatitis_C_virus_genotype_5_g_2 | 56683 |
| 3364_Hepatitis_C_virus_genotype_5_g_3 | 56684 |
| 3364_Hepatitis_C_virus_genotype_5_g_4 | 56685 |
| 3364_Hepatitis_C_virus_genotype_5_g_5 | 56686 |
| 3365_Hepatitis_C_virus_genotype_5_g_1 | 56687 |
| 3365_Hepatitis_C_virus_genotype_5_g_2 | 56688 |
| 3365_Hepatitis_C_virus_genotype_5_g_3 | 56689 |
| 3365_Hepatitis_C_virus_genotype_5_g_4 | 56690 |
| 3365_Hepatitis_C_virus_genotype_5_g_5 | 56691 |
| 3366_Hepatitis_C_virus_genotype_5_g_1 | 56692 |
| 3366_Hepatitis_C_virus_genotype_5_g_2 | 56693 |
| 3366_Hepatitis_C_virus_genotype_5_g_3 | 56694 |
| 3366_Hepatitis_C_virus_genotype_5_g_4 | 56695 |
| 3366_Hepatitis_C_virus_genotype_5_g_5 | 56696 |
| 3367_Hepatitis_C_virus_genotype_5_g_1 | 56697 |
| 3367_Hepatitis_C_virus_genotype_5_g_2 | 56698 |
| 3367_Hepatitis_C_virus_genotype_5_g_3 | 56699 |
| 3367_Hepatitis_C_virus_genotype_5_g_4 | 56700 |
| 3367_Hepatitis_C_virus_genotype_5_g_5 | 56701 |
| 3368_Hepatitis_C_virus_genotype_5_g_1 | 56702 |
| 3368_Hepatitis_C_virus_genotype_5_g_2 | 56703 |
| 3368_Hepatitis_C_virus_genotype_5_g_3 | 56704 |
| 3368_Hepatitis_C_virus_genotype_5_g_4 | 56705 |
| 3368_Hepatitis_C_virus_genotype_5_g_5 | 56706 |
| 3369_Hepatitis_C_virus_genotype_5_g_1 | 56707 |
| 3369_Hepatitis_C_virus_genotype_5_g_2 | 56708 |
| 3369_Hepatitis_C_virus_genotype_5_g_3 | 56709 |
| 3369_Hepatitis_C_virus_genotype_5_g_4 | 56710 |
| 3369_Hepatitis_C_virus_genotype_5_g_5 | 56711 |
| 3370_Hepatitis_C_virus_genotype_5_g_1 | 56712 |
| 3370_Hepatitis_C_virus_genotype_5_g_2 | 56713 |
| 3370_Hepatitis_C_virus_genotype_5_g_3 | 56714 |
| 3370_Hepatitis_C_virus_genotype_5_g_4 | 56715 |
| 3371_Hepatitis_C_virus_genotype_5_g_1 | 56716 |
| 3371_Hepatitis_C_virus_genotype_5_g_2 | 56717 |
| 3371_Hepatitis_C_virus_genotype_5_g_3 | 56718 |
| 3371_Hepatitis_C_virus_genotype_5_g_4 | 56719 |
| 3371_Hepatitis_C_virus_genotype_5_g_5 | 56720 |
| 3372_Hepatitis_C_virus_genotype_5_g_1 | 56721 |
| 3372_Hepatitis_C_virus_genotype_5_g_2 | 56722 |
| 3373_Hepatitis_C_virus_genotype_5_g_1 | 56723 |
| 3373_Hepatitis_C_virus_genotype_5_g_2 | 56724 |
| 3373_Hepatitis_C_virus_genotype_5_g_3 | 56725 |
| 3373_Hepatitis_C_virus_genotype_5_g_4 | 56726 |
| 3373_Hepatitis_C_virus_genotype_5_g_5 | 56727 |
| 3374_Hepatitis_C_virus_genotype_5_g_1 | 56728 |
| 3374_Hepatitis_C_virus_genotype_5_g_2 | 56729 |
| 3374_Hepatitis_C_virus_genotype_5_g_3 | 56730 |
| 3374_Hepatitis_C_virus_genotype_5_g_4 | 56731 |
| 3374_Hepatitis_C_virus_genotype_5_g_5 | 56732 |
| 3375_Hepatitis_C_virus_genotype_5_g_1 | 56733 |
| 3375_Hepatitis_C_virus_genotype_5_g_2 | 56734 |
| 3375_Hepatitis_C_virus_genotype_5_g_3 | 56735 |
| 3375_Hepatitis_C_virus_genotype_5_g_4 | 56736 |
| 3376_Hepatitis_C_virus_genotype_5_g_1 | 56737 |
| 3376_Hepatitis_C_virus_genotype_5_g_2 | 56738 |
| 3376_Hepatitis_C_virus_genotype_5_g_3 | 56739 |
| 3376_Hepatitis_C_virus_genotype_5_g_4 | 56740 |
| 3376_Hepatitis_C_virus_genotype_5_g_5 | 56741 |
| 3377_Hepatitis_C_virus_genotype_5_g_1 | 56742 |
| 3377_Hepatitis_C_virus_genotype_5_g_2 | 56743 |
| 3377_Hepatitis_C_virus_genotype_5_g_3 | 56744 |
| 3377_Hepatitis_C_virus_genotype_5_g_4 | 56745 |
| 3377_Hepatitis_C_virus_genotype_5_g_5 | 56746 |
| 3378_Hepatitis_C_virus_genotype_5_g_1 | 56747 |
| 3378_Hepatitis_C_virus_genotype_5_g_2 | 56748 |
| 3378_Hepatitis_C_virus_genotype_5_g_3 | 56749 |
| 3378_Hepatitis_C_virus_genotype_5_g_4 | 56750 |
| 3378_Hepatitis_C_virus_genotype_5_g_5 | 56751 |
| 3379_Hepatitis_C_virus_genotype_5_g_1 | 56752 |
| 3379_Hepatitis_C_virus_genotype_5_g_2 | 56753 |
| 3379_Hepatitis_C_virus_genotype_5_g_3 | 56754 |
| 3379_Hepatitis_C_virus_genotype_5_g_4 | 56755 |
| 3379_Hepatitis_C_virus_genotype_5_g_5 | 56756 |
| 3380_Hepatitis_C_virus_genotype_5_g_1 | 56757 |
| 3380_Hepatitis_C_virus_genotype_5_g_2 | 56758 |
| 3380_Hepatitis_C_virus_genotype_5_g_3 | 56759 |
| 3380_Hepatitis_C_virus_genotype_5_g_4 | 56760 |
| 3380_Hepatitis_C_virus_genotype_5_g_5 | 56761 |
| 3381_Hepatitis_C_virus_genotype_5_g_1 | 56762 |
| 3381_Hepatitis_C_virus_genotype_5_g_2 | 56763 |
| 3381_Hepatitis_C_virus_genotype_5_g_3 | 56764 |
| 3381_Hepatitis_C_virus_genotype_5_g_4 | 56765 |
| 3381_Hepatitis_C_virus_genotype_5_g_5 | 56766 |
| 3382_Hepatitis_C_virus_genotype_5_g_1 | 56767 |
| 3382_Hepatitis_C_virus_genotype_5_g_2 | 56768 |
| 3382_Hepatitis_C_virus_genotype_5_g_3 | 56769 |
| 3383_Hepatitis_C_virus_genotype_5_g_1 | 56770 |
| 3383_Hepatitis_C_virus_genotype_5_g_2 | 56771 |
| 3383_Hepatitis_C_virus_genotype_5_g_3 | 56772 |
| 3383_Hepatitis_C_virus_genotype_5_g_4 | 56773 |
| 3383_Hepatitis_C_virus_genotype_5_g_5 | 56774 |
| 3384_Hepatitis_C_virus_genotype_5_g_1 | 56775 |
| 3384_Hepatitis_C_virus_genotype_5_g_2 | 56776 |
| 3384_Hepatitis_C_virus_genotype_5_g_3 | 56777 |
| 3384_Hepatitis_C_virus_genotype_5_g_4 | 56778 |
| 3384_Hepatitis_C_virus_genotype_5_g_5 | 56779 |
| 3385_SARS_coronavirus_g_1 | 56780 |
| 3385_SARS_coronavirus_g_2 | 56781 |
| 3385_SARS_coronavirus_g_3 | 56782 |
| 3385_SARS_coronavirus_g_4 | 56783 |
| 3385_SARS_coronavirus_g_5 | 56784 |
| 3386_SARS_coronavirus_g_1 | 56785 |
| 3386_SARS_coronavirus_g_2 | 56786 |
| 3386_SARS_coronavirus_g_3 | 56787 |
| 3386_SARS_coronavirus_g_4 | 56788 |
| 3386_SARS_coronavirus_g_5 | 56789 |
| 3387_SARS_coronavirus_g_1 | 56790 |
| 3387_SARS_coronavirus_g_2 | 56791 |
| 3387_SARS_coronavirus_g_3 | 56792 |
| 3387_SARS_coronavirus_g_4 | 56793 |
| 3387_SARS_coronavirus_g_5 | 56794 |
| 3388_SARS_coronavirus_g_1 | 56795 |
| 3388_SARS_coronavirus_g_2 | 56796 |
| 3388_SARS_coronavirus_g_3 | 56797 |
| 3388_SARS_coronavirus_g_4 | 56798 |
| 3388_SARS_coronavirus_g_5 | 56799 |
| 3389_SARS_coronavirus_g_1 | 56800 |
| 3389_SARS_coronavirus_g_2 | 56801 |
| 3389_SARS_coronavirus_g_3 | 56802 |
| 3389_SARS_coronavirus_g_4 | 56803 |
| 3389_SARS_coronavirus_g_5 | 56804 |
| 3390_SARS_coronavirus_g_1 | 56805 |
| 3390_SARS_coronavirus_g_2 | 56806 |
| 3390_SARS_coronavirus_g_3 | 56807 |
| 3390_SARS_coronavirus_g_4 | 56808 |
| 3390_SARS_coronavirus_g_5 | 56809 |
| 3391_SARS_coronavirus_g_1 | 56810 |
| 3391_SARS_coronavirus_g_2 | 56811 |
| 3391_SARS_coronavirus_g_3 | 56812 |
| 3391_SARS_coronavirus_g_4 | 56813 |
| 3391_SARS_coronavirus_g_5 | 56814 |
| 3392_SARS_coronavirus_g_1 | 56815 |
| 3392_SARS_coronavirus_g_2 | 56816 |
| 3392_SARS_coronavirus_g_3 | 56817 |
| 3392_SARS_coronavirus_g_4 | 56818 |
| 3392_SARS_coronavirus_g_5 | 56819 |
| 3393_SARS_coronavirus_g_1 | 56820 |
| 3393_SARS_coronavirus_g_2 | 56821 |
| 3393_SARS_coronavirus_g_3 | 56822 |
| 3393_SARS_coronavirus_g_4 | 56823 |
| 3393_SARS_coronavirus_g_5 | 56824 |
| 3394_SARS_coronavirus_g_1 | 56825 |
| 3394_SARS_coronavirus_g_2 | 56826 |
| 3394_SARS_coronavirus_g_3 | 56827 |
| 3394_SARS_coronavirus_g_4 | 56828 |
| 3394_SARS_coronavirus_g_5 | 56829 |
| 3395_SARS_coronavirus_g_1 | 56830 |
| 3395_SARS_coronavirus_g_2 | 56831 |
| 3395_SARS_coronavirus_g_3 | 56832 |
| 3395_SARS_coronavirus_g_4 | 56833 |
| 3395_SARS_coronavirus_g_5 | 56834 |
| 3396_SARS_coronavirus_g_1 | 56835 |
| 3396_SARS_coronavirus_g_2 | 56836 |
| 3396_SARS_coronavirus_g_3 | 56837 |
| 3396_SARS_coronavirus_g_4 | 56838 |
| 3396_SARS_coronavirus_g_5 | 56839 |
| 3397_SARS_coronavirus_g_1 | 56840 |
| 3397_SARS_coronavirus_g_2 | 56841 |
| 3397_SARS_coronavirus_g_3 | 56842 |
| 3397_SARS_coronavirus_g_4 | 56843 |
| 3397_SARS_coronavirus_g_5 | 56844 |
| 3398_SARS_coronavirus_g_1 | 56845 |
| 3398_SARS_coronavirus_g_2 | 56846 |
| 3398_SARS_coronavirus_g_3 | 56847 |
| 3398_SARS_coronavirus_g_4 | 56848 |
| 3398_SARS_coronavirus_g_5 | 56849 |
| 3399_SARS_coronavirus_g_1 | 56850 |
| 3399_SARS_coronavirus_g_2 | 56851 |
| 3399_SARS_coronavirus_g_3 | 56852 |
| 3399_SARS_coronavirus_g_4 | 56853 |
| 3399_SARS_coronavirus_g_5 | 56854 |
| 3400_SARS_coronavirus_g_1 | 56855 |
| 3400_SARS_coronavirus_g_2 | 56856 |
| 3400_SARS_coronavirus_g_3 | 56857 |
| 3400_SARS_coronavirus_g_4 | 56858 |
| 3400_SARS_coronavirus_g_5 | 56859 |
| 3401_SARS_coronavirus_g_1 | 56860 |
| 3401_SARS_coronavirus_g_2 | 56861 |
| 3401_SARS_coronavirus_g_3 | 56862 |
| 3401_SARS_coronavirus_g_4 | 56863 |
| 3401_SARS_coronavirus_g_5 | 56864 |
| 3402_SARS_coronavirus_g_1 | 56865 |
| 3402_SARS_coronavirus_g_2 | 56866 |
| 3402_SARS_coronavirus_g_3 | 56867 |
| 3402_SARS_coronavirus_g_4 | 56868 |
| 3402_SARS_coronavirus_g_5 | 56869 |
| 3403_SARS_coronavirus_g_1 | 56870 |
| 3403_SARS_coronavirus_g_2 | 56871 |
| 3403_SARS_coronavirus_g_3 | 56872 |
| 3403_SARS_coronavirus_g_4 | 56873 |
| 3403_SARS_coronavirus_g_5 | 56874 |
| 3404_SARS_coronavirus_g_1 | 56875 |
| 3404_SARS_coronavirus_g_2 | 56876 |
| 3404_SARS_coronavirus_g_3 | 56877 |
| 3404_SARS_coronavirus_g_4 | 56878 |
| 3404_SARS_coronavirus_g_5 | 56879 |
| 3405_SARS_coronavirus_g_1 | 56880 |
| 3405_SARS_coronavirus_g_2 | 56881 |
| 3405_SARS_coronavirus_g_3 | 56882 |
| 3405_SARS_coronavirus_g_4 | 56883 |
| 3405_SARS_coronavirus_g_5 | 56884 |
| 3406_SARS_coronavirus_g_1 | 56885 |
| 3406_SARS_coronavirus_g_2 | 56886 |
| 3406_SARS_coronavirus_g_3 | 56887 |
| 3406_SARS_coronavirus_g_4 | 56888 |
| 3406_SARS_coronavirus_g_5 | 56889 |
| 3407_SARS_coronavirus_g_1 | 56890 |
| 3407_SARS_coronavirus_g_2 | 56891 |
| 3407_SARS_coronavirus_g_3 | 56892 |
| 3407_SARS_coronavirus_g_4 | 56893 |
| 3407_SARS_coronavirus_g_5 | 56894 |
| 3408_SARS_coronavirus_g_1 | 56895 |
| 3408_SARS_coronavirus_g_2 | 56896 |
| 3408_SARS_coronavirus_g_3 | 56897 |
| 3408_SARS_coronavirus_g_4 | 56898 |
| 3408_SARS_coronavirus_g_5 | 56899 |
| 3409_SARS_coronavirus_g_1 | 56900 |
| 3409_SARS_coronavirus_g_2 | 56901 |
| 3409_SARS_coronavirus_g_3 | 56902 |
| 3409_SARS_coronavirus_g_4 | 56903 |
| 3409_SARS_coronavirus_g_5 | 56904 |
| 3410_SARS_coronavirus_g_1 | 56905 |
| 3410_SARS_coronavirus_g_2 | 56906 |
| 3410_SARS_coronavirus_g_3 | 56907 |
| 3410_SARS_coronavirus_g_4 | 56908 |
| 3410_SARS_coronavirus_g_5 | 56909 |
| 3411_SARS_coronavirus_g_1 | 56910 |
| 3411_SARS_coronavirus_g_2 | 56911 |
| 3411_SARS_coronavirus_g_3 | 56912 |
| 3411_SARS_coronavirus_g_4 | 56913 |
| 3411_SARS_coronavirus_g_5 | 56914 |
| 3412_SARS_coronavirus_g_1 | 56915 |
| 3412_SARS_coronavirus_g_2 | 56916 |
| 3412_SARS_coronavirus_g_3 | 56917 |
| 3412_SARS_coronavirus_g_4 | 56918 |
| 3412_SARS_coronavirus_g_5 | 56919 |
| 3413_SARS_coronavirus_g_1 | 56920 |
| 3413_SARS_coronavirus_g_2 | 56921 |
| 3413_SARS_coronavirus_g_3 | 56922 |
| 3413_SARS_coronavirus_g_4 | 56923 |
| 3413_SARS_coronavirus_g_5 | 56924 |
| 3414_SARS_coronavirus_g_1 | 56925 |
| 3414_SARS_coronavirus_g_2 | 56926 |
| 3414_SARS_coronavirus_g_3 | 56927 |
| 3414_SARS_coronavirus_g_4 | 56928 |
| 3414_SARS_coronavirus_g_5 | 56929 |
| 3415_SARS_coronavirus_g_1 | 56930 |
| 3415_SARS_coronavirus_g_2 | 56931 |
| 3415_SARS_coronavirus_g_3 | 56932 |
| 3415_SARS_coronavirus_g_4 | 56933 |
| 3415_SARS_coronavirus_g_5 | 56934 |
| 3416_SARS_coronavirus_g_1 | 56935 |
| 3416_SARS_coronavirus_g_2 | 56936 |
| 3416_SARS_coronavirus_g_3 | 56937 |
| 3416_SARS_coronavirus_g_4 | 56938 |
| 3416_SARS_coronavirus_g_5 | 56939 |
| 3417_SARS_coronavirus_g_1 | 56940 |
| 3417_SARS_coronavirus_g_2 | 56941 |
| 3417_SARS_coronavirus_g_3 | 56942 |
| 3417_SARS_coronavirus_g_4 | 56943 |
| 3417_SARS_coronavirus_g_5 | 56944 |
| 3418_SARS_coronavirus_g_1 | 56945 |
| 3418_SARS_coronavirus_g_2 | 56946 |
| 3418_SARS_coronavirus_g_3 | 56947 |
| 3418_SARS_coronavirus_g_4 | 56948 |
| 3418_SARS_coronavirus_g_5 | 56949 |
| 3419_SARS_coronavirus_g_1 | 56950 |
| 3419_SARS_coronavirus_g_2 | 56951 |
| 3419_SARS_coronavirus_g_3 | 56952 |
| 3419_SARS_coronavirus_g_4 | 56953 |
| 3419_SARS_coronavirus_g_5 | 56954 |
| 3420_SARS_coronavirus_g_1 | 56955 |
| 3420_SARS_coronavirus_g_2 | 56956 |
| 3420_SARS_coronavirus_g_3 | 56957 |
| 3420_SARS_coronavirus_g_4 | 56958 |
| 3420_SARS_coronavirus_g_5 | 56959 |
| 3421_SARS_coronavirus_g_1 | 56960 |
| 3421_SARS_coronavirus_g_2 | 56961 |
| 3421_SARS_coronavirus_g_3 | 56962 |
| 3421_SARS_coronavirus_g_4 | 56963 |
| 3421_SARS_coronavirus_g_5 | 56964 |
| 3422_SARS_coronavirus_g_1 | 56965 |
| 3422_SARS_coronavirus_g_2 | 56966 |
| 3422_SARS_coronavirus_g_3 | 56967 |
| 3422_SARS_coronavirus_g_4 | 56968 |
| 3422_SARS_coronavirus_g_5 | 56969 |
| 3423_SARS_coronavirus_g_1 | 56970 |
| 3423_SARS_coronavirus_g_2 | 56971 |
| 3423_SARS_coronavirus_g_3 | 56972 |
| 3423_SARS_coronavirus_g_4 | 56973 |
| 3423_SARS_coronavirus_g_5 | 56974 |
| 3424_SARS_coronavirus_g_1 | 56975 |
| 3424_SARS_coronavirus_g_2 | 56976 |
| 3424_SARS_coronavirus_g_3 | 56977 |
| 3424_SARS_coronavirus_g_4 | 56978 |
| 3424_SARS_coronavirus_g_5 | 56979 |
| 3425_SARS_coronavirus_g_1 | 56980 |
| 3425_SARS_coronavirus_g_2 | 56981 |
| 3425_SARS_coronavirus_g_3 | 56982 |
| 3425_SARS_coronavirus_g_4 | 56983 |
| 3425_SARS_coronavirus_g_5 | 56984 |
| 3426_SARS_coronavirus_g_1 | 56985 |
| 3426_SARS_coronavirus_g_2 | 56986 |
| 3426_SARS_coronavirus_g_3 | 56987 |
| 3426_SARS_coronavirus_g_4 | 56988 |
| 3426_SARS_coronavirus_g_5 | 56989 |
| 3427_SARS_coronavirus_g_1 | 56990 |
| 3427_SARS_coronavirus_g_2 | 56991 |
| 3427_SARS_coronavirus_g_3 | 56992 |
| 3427_SARS_coronavirus_g_4 | 56993 |
| 3427_SARS_coronavirus_g_5 | 56994 |
| 3428_SARS_coronavirus_g_1 | 56995 |
| 3428_SARS_coronavirus_g_2 | 56996 |
| 3428_SARS_coronavirus_g_3 | 56997 |
| 3428_SARS_coronavirus_g_4 | 56998 |
| 3428_SARS_coronavirus_g_5 | 56999 |
| 3429_SARS_coronavirus_g_1 | 57000 |
| 3429_SARS_coronavirus_g_2 | 57001 |
| 3429_SARS_coronavirus_g_3 | 57002 |
| 3429_SARS_coronavirus_g_4 | 57003 |
| 3429_SARS_coronavirus_g_5 | 57004 |
| 3430_SARS_coronavirus_g_1 | 57005 |
| 3430_SARS_coronavirus_g_2 | 57006 |
| 3430_SARS_coronavirus_g_3 | 57007 |
| 3430_SARS_coronavirus_g_4 | 57008 |
| 3430_SARS_coronavirus_g_5 | 57009 |
| 3431_SARS_coronavirus_g_1 | 57010 |
| 3431_SARS_coronavirus_g_2 | 57011 |
| 3431_SARS_coronavirus_g_3 | 57012 |
| 3431_SARS_coronavirus_g_4 | 57013 |
| 3431_SARS_coronavirus_g_5 | 57014 |
| 3432_SARS_coronavirus_g_1 | 57015 |
| 3432_SARS_coronavirus_g_2 | 57016 |
| 3432_SARS_coronavirus_g_3 | 57017 |
| 3432_SARS_coronavirus_g_4 | 57018 |
| 3432_SARS_coronavirus_g_5 | 57019 |
| 3433_SARS_coronavirus_g_1 | 57020 |
| 3433_SARS_coronavirus_g_2 | 57021 |
| 3433_SARS_coronavirus_g_3 | 57022 |
| 3433_SARS_coronavirus_g_4 | 57023 |
| 3433_SARS_coronavirus_g_5 | 57024 |
| 3434_SARS_coronavirus_g_1 | 57025 |
| 3434_SARS_coronavirus_g_2 | 57026 |
| 3434_SARS_coronavirus_g_3 | 57027 |
| 3434_SARS_coronavirus_g_4 | 57028 |
| 3434_SARS_coronavirus_g_5 | 57029 |
| 3435_SARS_coronavirus_g_1 | 57030 |
| 3435_SARS_coronavirus_g_2 | 57031 |
| 3435_SARS_coronavirus_g_3 | 57032 |
| 3435_SARS_coronavirus_g_4 | 57033 |
| 3435_SARS_coronavirus_g_5 | 57034 |
| 3436_SARS_coronavirus_g_1 | 57035 |
| 3436_SARS_coronavirus_g_2 | 57036 |
| 3436_SARS_coronavirus_g_3 | 57037 |
| 3436_SARS_coronavirus_g_4 | 57038 |
| 3436_SARS_coronavirus_g_5 | 57039 |
| 3437_SARS_coronavirus_g_1 | 57040 |
| 3437_SARS_coronavirus_g_2 | 57041 |
| 3437_SARS_coronavirus_g_3 | 57042 |
| 3437_SARS_coronavirus_g_4 | 57043 |
| 3437_SARS_coronavirus_g_5 | 57044 |
| 3438_SARS_coronavirus_g_1 | 57045 |
| 3438_SARS_coronavirus_g_2 | 57046 |
| 3438_SARS_coronavirus_g_3 | 57047 |
| 3438_SARS_coronavirus_g_4 | 57048 |
| 3438_SARS_coronavirus_g_5 | 57049 |
| 3439_SARS_coronavirus_g_1 | 57050 |
| 3439_SARS_coronavirus_g_2 | 57051 |
| 3439_SARS_coronavirus_g_3 | 57052 |
| 3439_SARS_coronavirus_g_4 | 57053 |
| 3439_SARS_coronavirus_g_5 | 57054 |
| 3440_SARS_coronavirus_g_1 | 57055 |
| 3440_SARS_coronavirus_g_2 | 57056 |
| 3440_SARS_coronavirus_g_3 | 57057 |
| 3440_SARS_coronavirus_g_4 | 57058 |
| 3440_SARS_coronavirus_g_5 | 57059 |
| 3441_SARS_coronavirus_g_1 | 57060 |
| 3441_SARS_coronavirus_g_2 | 57061 |
| 3441_SARS_coronavirus_g_3 | 57062 |
| 3441_SARS_coronavirus_g_4 | 57063 |
| 3441_SARS_coronavirus_g_5 | 57064 |
| 3442_SARS_coronavirus_g_1 | 57065 |
| 3442_SARS_coronavirus_g_2 | 57066 |
| 3442_SARS_coronavirus_g_3 | 57067 |
| 3442_SARS_coronavirus_g_4 | 57068 |
| 3442_SARS_coronavirus_g_5 | 57069 |
| 3443_SARS_coronavirus_g_1 | 57070 |
| 3443_SARS_coronavirus_g_2 | 57071 |
| 3443_SARS_coronavirus_g_3 | 57072 |
| 3443_SARS_coronavirus_g_4 | 57073 |
| 3443_SARS_coronavirus_g_5 | 57074 |
| 3444_SARS_coronavirus_g_1 | 57075 |
| 3444_SARS_coronavirus_g_2 | 57076 |
| 3444_SARS_coronavirus_g_3 | 57077 |
| 3444_SARS_coronavirus_g_4 | 57078 |
| 3444_SARS_coronavirus_g_5 | 57079 |
| 3445_SARS_coronavirus_g_1 | 57080 |
| 3445_SARS_coronavirus_g_2 | 57081 |
| 3445_SARS_coronavirus_g_3 | 57082 |
| 3445_SARS_coronavirus_g_4 | 57083 |
| 3445_SARS_coronavirus_g_5 | 57084 |
| 3446_SARS_coronavirus_g_1 | 57085 |
| 3446_SARS_coronavirus_g_2 | 57086 |
| 3446_SARS_coronavirus_g_3 | 57087 |
| 3446_SARS_coronavirus_g_4 | 57088 |
| 3446_SARS_coronavirus_g_5 | 57089 |
| 3447_SARS_coronavirus_g_1 | 57090 |
| 3447_SARS_coronavirus_g_2 | 57091 |
| 3447_SARS_coronavirus_g_3 | 57092 |
| 3447_SARS_coronavirus_g_4 | 57093 |
| 3447_SARS_coronavirus_g_5 | 57094 |
| 3448_SARS_coronavirus_g_1 | 57095 |
| 3448_SARS_coronavirus_g_2 | 57096 |
| 3448_SARS_coronavirus_g_3 | 57097 |
| 3448_SARS_coronavirus_g_4 | 57098 |
| 3448_SARS_coronavirus_g_5 | 57099 |
| 3449_SARS_coronavirus_g_1 | 57100 |
| 3449_SARS_coronavirus_g_2 | 57101 |
| 3449_SARS_coronavirus_g_3 | 57102 |
| 3449_SARS_coronavirus_g_4 | 57103 |
| 3449_SARS_coronavirus_g_5 | 57104 |
| 3450_SARS_coronavirus_g_1 | 57105 |
| 3450_SARS_coronavirus_g_2 | 57106 |
| 3450_SARS_coronavirus_g_3 | 57107 |
| 3450_SARS_coronavirus_g_4 | 57108 |
| 3450_SARS_coronavirus_g_5 | 57109 |
| 3451_SARS_coronavirus_g_1 | 57110 |
| 3451_SARS_coronavirus_g_2 | 57111 |
| 3451_SARS_coronavirus_g_3 | 57112 |
| 3451_SARS_coronavirus_g_4 | 57113 |
| 3451_SARS_coronavirus_g_5 | 57114 |
| 3452_SARS_coronavirus_g_1 | 57115 |
| 3452_SARS_coronavirus_g_2 | 57116 |
| 3452_SARS_coronavirus_g_3 | 57117 |
| 3452_SARS_coronavirus_g_4 | 57118 |
| 3452_SARS_coronavirus_g_5 | 57119 |
| 3453_SARS_coronavirus_g_1 | 57120 |
| 3453_SARS_coronavirus_g_2 | 57121 |
| 3453_SARS_coronavirus_g_3 | 57122 |
| 3453_SARS_coronavirus_g_4 | 57123 |
| 3453_SARS_coronavirus_g_5 | 57124 |
| 3454_SARS_coronavirus_g_1 | 57125 |
| 3454_SARS_coronavirus_g_2 | 57126 |
| 3454_SARS_coronavirus_g_3 | 57127 |
| 3454_SARS_coronavirus_g_4 | 57128 |
| 3454_SARS_coronavirus_g_5 | 57129 |
| 3455_SARS_coronavirus_g_1 | 57130 |
| 3455_SARS_coronavirus_g_2 | 57131 |
| 3455_SARS_coronavirus_g_3 | 57132 |
| 3455_SARS_coronavirus_g_4 | 57133 |
| 3455_SARS_coronavirus_g_5 | 57134 |
| 3456_SARS_coronavirus_g_1 | 57135 |
| 3456_SARS_coronavirus_g_2 | 57136 |
| 3456_SARS_coronavirus_g_3 | 57137 |
| 3456_SARS_coronavirus_g_4 | 57138 |
| 3456_SARS_coronavirus_g_5 | 57139 |
| 3457_SARS_coronavirus_g_1 | 57140 |
| 3457_SARS_coronavirus_g_2 | 57141 |
| 3457_SARS_coronavirus_g_3 | 57142 |
| 3457_SARS_coronavirus_g_4 | 57143 |
| 3457_SARS_coronavirus_g_5 | 57144 |
| 3458_SARS_coronavirus_g_1 | 57145 |
| 3458_SARS_coronavirus_g_2 | 57146 |
| 3458_SARS_coronavirus_g_3 | 57147 |
| 3458_SARS_coronavirus_g_4 | 57148 |
| 3458_SARS_coronavirus_g_5 | 57149 |
| 3459_SARS_coronavirus_g_1 | 57150 |
| 3459_SARS_coronavirus_g_2 | 57151 |
| 3459_SARS_coronavirus_g_3 | 57152 |
| 3459_SARS_coronavirus_g_4 | 57153 |
| 3459_SARS_coronavirus_g_5 | 57154 |
| 3460_SARS_coronavirus_g_1 | 57155 |
| 3460_SARS_coronavirus_g_2 | 57156 |
| 3460_SARS_coronavirus_g_3 | 57157 |
| 3460_SARS_coronavirus_g_4 | 57158 |
| 3460_SARS_coronavirus_g_5 | 57159 |
| 3461_SARS_coronavirus_g_1 | 57160 |
| 3461_SARS_coronavirus_g_2 | 57161 |
| 3461_SARS_coronavirus_g_3 | 57162 |
| 3461_SARS_coronavirus_g_4 | 57163 |
| 3461_SARS_coronavirus_g_5 | 57164 |
| 3462_SARS_coronavirus_g_1 | 57165 |
| 3462_SARS_coronavirus_g_2 | 57166 |
| 3462_SARS_coronavirus_g_3 | 57167 |
| 3462_SARS_coronavirus_g_4 | 57168 |
| 3462_SARS_coronavirus_g_5 | 57169 |
| 3463_SARS_coronavirus_g_1 | 57170 |
| 3463_SARS_coronavirus_g_2 | 57171 |
| 3463_SARS_coronavirus_g_3 | 57172 |
| 3463_SARS_coronavirus_g_4 | 57173 |
| 3463_SARS_coronavirus_g_5 | 57174 |
| 3464_SARS_coronavirus_g_1 | 57175 |
| 3464_SARS_coronavirus_g_2 | 57176 |
| 3464_SARS_coronavirus_g_3 | 57177 |
| 3464_SARS_coronavirus_g_4 | 57178 |
| 3464_SARS_coronavirus_g_5 | 57179 |
| 3465_SARS_coronavirus_g_1 | 57180 |
| 3465_SARS_coronavirus_g_2 | 57181 |
| 3465_SARS_coronavirus_g_3 | 57182 |
| 3465_SARS_coronavirus_g_4 | 57183 |
| 3465_SARS_coronavirus_g_5 | 57184 |
| 3466_SARS_coronavirus_g_1 | 57185 |
| 3466_SARS_coronavirus_g_2 | 57186 |
| 3466_SARS_coronavirus_g_3 | 57187 |
| 3466_SARS_coronavirus_g_4 | 57188 |
| 3466_SARS_coronavirus_g_5 | 57189 |
| 3467_SARS_coronavirus_g_1 | 57190 |
| 3467_SARS_coronavirus_g_2 | 57191 |
| 3467_SARS_coronavirus_g_3 | 57192 |
| 3467_SARS_coronavirus_g_4 | 57193 |
| 3467_SARS_coronavirus_g_5 | 57194 |
| 3468_SARS_coronavirus_g_1 | 57195 |
| 3468_SARS_coronavirus_g_2 | 57196 |
| 3468_SARS_coronavirus_g_3 | 57197 |
| 3468_SARS_coronavirus_g_4 | 57198 |
| 3468_SARS_coronavirus_g_5 | 57199 |
| 3469_SARS_coronavirus_g_1 | 57200 |
| 3469_SARS_coronavirus_g_2 | 57201 |
| 3469_SARS_coronavirus_g_3 | 57202 |
| 3469_SARS_coronavirus_g_4 | 57203 |
| 3469_SARS_coronavirus_g_5 | 57204 |
| 3470_SARS_coronavirus_g_1 | 57205 |
| 3470_SARS_coronavirus_g_2 | 57206 |
| 3470_SARS_coronavirus_g_3 | 57207 |
| 3470_SARS_coronavirus_g_4 | 57208 |
| 3470_SARS_coronavirus_g_5 | 57209 |
| 3471_Human_rhinovirus_89_g_1 | 57210 |
| 3471_Human_rhinovirus_89_g_2 | 57211 |
| 3471_Human_rhinovirus_89_g_3 | 57212 |
| 3471_Human_rhinovirus_89_g_4 | 57213 |
| 3471_Human_rhinovirus_89_g_5 | 57214 |
| 3472_Human_rhinovirus_89_g_1 | 57215 |
| 3472_Human_rhinovirus_89_g_2 | 57216 |
| 3472_Human_rhinovirus_89_g_3 | 57217 |
| 3472_Human_rhinovirus_89_g_4 | 57218 |
| 3472_Human_rhinovirus_89_g_5 | 57219 |
| 3473_Human_rhinovirus_89_g_1 | 57220 |
| 3473_Human_rhinovirus_89_g_2 | 57221 |
| 3473_Human_rhinovirus_89_g_3 | 57222 |
| 3473_Human_rhinovirus_89_g_4 | 57223 |
| 3473_Human_rhinovirus_89_g_5 | 57224 |
| 3474_Human_rhinovirus_89_g_1 | 57225 |
| 3474_Human_rhinovirus_89_g_2 | 57226 |
| 3474_Human_rhinovirus_89_g_3 | 57227 |
| 3474_Human_rhinovirus_89_g_4 | 57228 |
| 3474_Human_rhinovirus_89_g_5 | 57229 |
| 3475_Human_rhinovirus_89_g_1 | 57230 |
| 3475_Human_rhinovirus_89_g_2 | 57231 |
| 3475_Human_rhinovirus_89_g_3 | 57232 |
| 3475_Human_rhinovirus_89_g_4 | 57233 |
| 3475_Human_rhinovirus_89_g_5 | 57234 |
| 3476_Human_rhinovirus_89_g_1 | 57235 |
| 3476_Human_rhinovirus_89_g_2 | 57236 |
| 3476_Human_rhinovirus_89_g_3 | 57237 |
| 3476_Human_rhinovirus_89_g_4 | 57238 |
| 3476_Human_rhinovirus_89_g_5 | 57239 |
| 3477_Human_rhinovirus_89_g_1 | 57240 |
| 3477_Human_rhinovirus_89_g_2 | 57241 |
| 3477_Human_rhinovirus_89_g_3 | 57242 |
| 3477_Human_rhinovirus_89_g_4 | 57243 |
| 3477_Human_rhinovirus_89_g_5 | 57244 |
| 3478_Human_rhinovirus_89_g_1 | 57245 |
| 3478_Human_rhinovirus_89_g_2 | 57246 |
| 3478_Human_rhinovirus_89_g_3 | 57247 |
| 3478_Human_rhinovirus_89_g_4 | 57248 |
| 3478_Human_rhinovirus_89_g_5 | 57249 |
| 3479_Human_rhinovirus_89_g_1 | 57250 |
| 3479_Human_rhinovirus_89_g_2 | 57251 |
| 3479_Human_rhinovirus_89_g_3 | 57252 |
| 3479_Human_rhinovirus_89_g_4 | 57253 |
| 3479_Human_rhinovirus_89_g_5 | 57254 |
| 3480_Human_rhinovirus_89_g_1 | 57255 |
| 3480_Human_rhinovirus_89_g_2 | 57256 |
| 3480_Human_rhinovirus_89_g_3 | 57257 |
| 3480_Human_rhinovirus_89_g_4 | 57258 |
| 3480_Human_rhinovirus_89_g_5 | 57259 |
| 3481_Human_rhinovirus_89_g_1 | 57260 |
| 3481_Human_rhinovirus_89_g_2 | 57261 |
| 3481_Human_rhinovirus_89_g_3 | 57262 |
| 3481_Human_rhinovirus_89_g_4 | 57263 |
| 3481_Human_rhinovirus_89_g_5 | 57264 |
| 3482_Human_rhinovirus_89_g_1 | 57265 |
| 3482_Human_rhinovirus_89_g_2 | 57266 |
| 3482_Human_rhinovirus_89_g_3 | 57267 |
| 3482_Human_rhinovirus_89_g_4 | 57268 |
| 3482_Human_rhinovirus_89_g_5 | 57269 |
| 3483_Human_rhinovirus_89_g_1 | 57270 |
| 3483_Human_rhinovirus_89_g_2 | 57271 |
| 3483_Human_rhinovirus_89_g_3 | 57272 |
| 3483_Human_rhinovirus_89_g_4 | 57273 |
| 3483_Human_rhinovirus_89_g_5 | 57274 |
| 3484_Human_rhinovirus_89_g_1 | 57275 |
| 3484_Human_rhinovirus_89_g_2 | 57276 |
| 3484_Human_rhinovirus_89_g_3 | 57277 |
| 3484_Human_rhinovirus_89_g_4 | 57278 |
| 3484_Human_rhinovirus_89_g_5 | 57279 |
| 3485_Human_rhinovirus_89_g_1 | 57280 |
| 3485_Human_rhinovirus_89_g_2 | 57281 |
| 3485_Human_rhinovirus_89_g_3 | 57282 |
| 3485_Human_rhinovirus_89_g_4 | 57283 |
| 3485_Human_rhinovirus_89_g_5 | 57284 |
| 3486_Human_rhinovirus_89_g_1 | 57285 |
| 3486_Human_rhinovirus_89_g_2 | 57286 |
| 3486_Human_rhinovirus_89_g_3 | 57287 |
| 3486_Human_rhinovirus_89_g_4 | 57288 |
| 3486_Human_rhinovirus_89_g_5 | 57289 |
| 3487_Human_rhinovirus_89_g_1 | 57290 |
| 3487_Human_rhinovirus_89_g_2 | 57291 |
| 3487_Human_rhinovirus_89_g_3 | 57292 |
| 3487_Human_rhinovirus_89_g_4 | 57293 |
| 3487_Human_rhinovirus_89_g_5 | 57294 |
| 3488_Human_rhinovirus_89_g_1 | 57295 |
| 3488_Human_rhinovirus_89_g_2 | 57296 |
| 3488_Human_rhinovirus_89_g_3 | 57297 |
| 3488_Human_rhinovirus_89_g_4 | 57298 |
| 3488_Human_rhinovirus_89_g_5 | 57299 |
| 3489_Human_rhinovirus_89_g_1 | 57300 |
| 3489_Human_rhinovirus_89_g_2 | 57301 |
| 3489_Human_rhinovirus_89_g_3 | 57302 |
| 3489_Human_rhinovirus_89_g_4 | 57303 |
| 3489_Human_rhinovirus_89_g_5 | 57304 |
| 3490_Human_rhinovirus_89_g_1 | 57305 |
| 3490_Human_rhinovirus_89_g_2 | 57306 |
| 3490_Human_rhinovirus_89_g_3 | 57307 |
| 3490_Human_rhinovirus_89_g_4 | 57308 |
| 3490_Human_rhinovirus_89_g_5 | 57309 |
| 3491_Human_rhinovirus_89_g_1 | 57310 |
| 3491_Human_rhinovirus_89_g_2 | 57311 |
| 3491_Human_rhinovirus_89_g_3 | 57312 |
| 3491_Human_rhinovirus_89_g_4 | 57313 |
| 3491_Human_rhinovirus_89_g_5 | 57314 |
| 3492_Human_rhinovirus_89_g_1 | 57315 |
| 3492_Human_rhinovirus_89_g_2 | 57316 |
| 3492_Human_rhinovirus_89_g_3 | 57317 |
| 3492_Human_rhinovirus_89_g_4 | 57318 |
| 3492_Human_rhinovirus_89_g_5 | 57319 |
| 3493_Human_papillomavirus_type_131_g_1 | 57320 |
| 3493_Human_papillomavirus_type_131_g_2 | 57321 |
| 3493_Human_papillomavirus_type_131_g_3 | 57322 |
| 3493_Human_papillomavirus_type_131_g_4 | 57323 |
| 3493_Human_papillomavirus_type_131_g_5 | 57324 |
| 3494_Human_papillomavirus_type_131_g_1 | 57325 |
| 3494_Human_papillomavirus_type_131_g_2 | 57326 |
| 3494_Human_papillomavirus_type_131_g_3 | 57327 |
| 3494_Human_papillomavirus_type_131_g_4 | 57328 |
| 3494_Human_papillomavirus_type_131_g_5 | 57329 |
| 3495_Human_papillomavirus_type_131_g_1 | 57330 |
| 3495_Human_papillomavirus_type_131_g_2 | 57331 |
| 3495_Human_papillomavirus_type_131_g_3 | 57332 |
| 3495_Human_papillomavirus_type_131_g_4 | 57333 |
| 3495_Human_papillomavirus_type_131_g_5 | 57334 |
| 3496_Human_papillomavirus_type_131_g_1 | 57335 |
| 3496_Human_papillomavirus_type_131_g_2 | 57336 |
| 3496_Human_papillomavirus_type_131_g_3 | 57337 |
| 3496_Human_papillomavirus_type_131_g_4 | 57338 |
| 3496_Human_papillomavirus_type_131_g_5 | 57339 |
| 3497_Human_papillomavirus_type_131_g_1 | 57340 |
| 3497_Human_papillomavirus_type_131_g_2 | 57341 |
| 3497_Human_papillomavirus_type_131_g_3 | 57342 |
| 3497_Human_papillomavirus_type_131_g_4 | 57343 |
| 3497_Human_papillomavirus_type_131_g_5 | 57344 |
| 3498_Human_papillomavirus_type_131_g_1 | 57345 |
| 3498_Human_papillomavirus_type_131_g_2 | 57346 |
| 3498_Human_papillomavirus_type_131_g_3 | 57347 |
| 3498_Human_papillomavirus_type_131_g_4 | 57348 |
| 3498_Human_papillomavirus_type_131_g_5 | 57349 |
| 3499_Human_papillomavirus_type_131_g_1 | 57350 |
| 3499_Human_papillomavirus_type_131_g_2 | 57351 |
| 3499_Human_papillomavirus_type_131_g_3 | 57352 |
| 3499_Human_papillomavirus_type_131_g_4 | 57353 |
| 3499_Human_papillomavirus_type_131_g_5 | 57354 |
| 3500_Human_papillomavirus_type_131_g_1 | 57355 |
| 3500_Human_papillomavirus_type_131_g_2 | 57356 |
| 3500_Human_papillomavirus_type_131_g_3 | 57357 |
| 3500_Human_papillomavirus_type_131_g_4 | 57358 |
| 3500_Human_papillomavirus_type_131_g_5 | 57359 |
| 3501_Human_papillomavirus_type_131_g_1 | 57360 |
| 3501_Human_papillomavirus_type_131_g_2 | 57361 |
| 3501_Human_papillomavirus_type_131_g_3 | 57362 |
| 3501_Human_papillomavirus_type_131_g_4 | 57363 |
| 3501_Human_papillomavirus_type_131_g_5 | 57364 |
| 3502_Human_papillomavirus_type_131_g_1 | 57365 |
| 3502_Human_papillomavirus_type_131_g_2 | 57366 |
| 3502_Human_papillomavirus_type_131_g_3 | 57367 |
| 3502_Human_papillomavirus_type_131_g_4 | 57368 |
| 3502_Human_papillomavirus_type_131_g_5 | 57369 |
| 3503_Human_papillomavirus_type_131_g_1 | 57370 |
| 3503_Human_papillomavirus_type_131_g_2 | 57371 |
| 3503_Human_papillomavirus_type_131_g_3 | 57372 |
| 3503_Human_papillomavirus_type_131_g_4 | 57373 |
| 3503_Human_papillomavirus_type_131_g_5 | 57374 |
| 3504_Human_papillomavirus_type_131_g_1 | 57375 |
| 3504_Human_papillomavirus_type_131_g_2 | 57376 |
| 3504_Human_papillomavirus_type_131_g_3 | 57377 |
| 3504_Human_papillomavirus_type_131_g_4 | 57378 |
| 3504_Human_papillomavirus_type_131_g_5 | 57379 |
| 3505_Human_papillomavirus_type_131_g_1 | 57380 |
| 3505_Human_papillomavirus_type_131_g_2 | 57381 |
| 3505_Human_papillomavirus_type_131_g_3 | 57382 |
| 3505_Human_papillomavirus_type_131_g_4 | 57383 |
| 3505_Human_papillomavirus_type_131_g_5 | 57384 |
| 3506_Human_papillomavirus_type_135_g_1 | 57385 |
| 3506_Human_papillomavirus_type_135_g_2 | 57386 |
| 3506_Human_papillomavirus_type_135_g_3 | 57387 |
| 3506_Human_papillomavirus_type_135_g_4 | 57388 |
| 3506_Human_papillomavirus_type_135_g_5 | 57389 |
| 3507_Human_papillomavirus_type_135_g_1 | 57390 |
| 3507_Human_papillomavirus_type_135_g_2 | 57391 |
| 3507_Human_papillomavirus_type_135_g_3 | 57392 |
| 3507_Human_papillomavirus_type_135_g_4 | 57393 |
| 3507_Human_papillomavirus_type_135_g_5 | 57394 |
| 3508_Human_papillomavirus_type_135_g_1 | 57395 |
| 3508_Human_papillomavirus_type_135_g_2 | 57396 |
| 3508_Human_papillomavirus_type_135_g_3 | 57397 |
| 3508_Human_papillomavirus_type_135_g_4 | 57398 |
| 3508_Human_papillomavirus_type_135_g_5 | 57399 |
| 3509_Human_papillomavirus_type_135_g_1 | 57400 |
| 3509_Human_papillomavirus_type_135_g_2 | 57401 |
| 3509_Human_papillomavirus_type_135_g_3 | 57402 |
| 3509_Human_papillomavirus_type_135_g_4 | 57403 |
| 3509_Human_papillomavirus_type_135_g_5 | 57404 |
| 3510_Human_papillomavirus_type_135_g_1 | 57405 |
| 3510_Human_papillomavirus_type_135_g_2 | 57406 |
| 3510_Human_papillomavirus_type_135_g_3 | 57407 |
| 3510_Human_papillomavirus_type_135_g_4 | 57408 |
| 3510_Human_papillomavirus_type_135_g_5 | 57409 |
| 3511_Human_papillomavirus_type_135_g_1 | 57410 |
| 3511_Human_papillomavirus_type_135_g_2 | 57411 |
| 3511_Human_papillomavirus_type_135_g_3 | 57412 |
| 3511_Human_papillomavirus_type_135_g_4 | 57413 |
| 3511_Human_papillomavirus_type_135_g_5 | 57414 |
| 3512_Human_papillomavirus_type_135_g_1 | 57415 |
| 3512_Human_papillomavirus_type_135_g_2 | 57416 |
| 3512_Human_papillomavirus_type_135_g_3 | 57417 |
| 3512_Human_papillomavirus_type_135_g_4 | 57418 |
| 3512_Human_papillomavirus_type_135_g_5 | 57419 |
| 3513_Human_papillomavirus_type_135_g_1 | 57420 |
| 3513_Human_papillomavirus_type_135_g_2 | 57421 |
| 3513_Human_papillomavirus_type_135_g_3 | 57422 |
| 3513_Human_papillomavirus_type_135_g_4 | 57423 |
| 3513_Human_papillomavirus_type_135_g_5 | 57424 |
| 3514_Human_papillomavirus_type_135_g_1 | 57425 |
| 3514_Human_papillomavirus_type_135_g_2 | 57426 |
| 3514_Human_papillomavirus_type_135_g_3 | 57427 |
| 3514_Human_papillomavirus_type_135_g_4 | 57428 |
| 3514_Human_papillomavirus_type_135_g_5 | 57429 |
| 3515_Influenza_B_virus_(B/Lee/1940)_segment_7_g_1 | 57430 |
| 3515_Influenza_B_virus_(B/Lee/1940)_segment_7_g_2 | 57431 |
| 3515_Influenza_B_virus_(B/Lee/1940)_segment_7_g_3 | 57432 |
| 3515_Influenza_B_virus_(B/Lee/1940)_segment_7_g_4 | 57433 |
| 3515_Influenza_B_virus_(B/Lee/1940)_segment_7_g_5 | 57434 |
| 3516_Influenza_B_virus_(B/Lee/1940)_segment_7_g_1 | 57435 |
| 3516_Influenza_B_virus_(B/Lee/1940)_segment_7_g_2 | 57436 |
| 3516_Influenza_B_virus_(B/Lee/1940)_segment_7_g_3 | 57437 |
| 3516_Influenza_B_virus_(B/Lee/1940)_segment_7_g_4 | 57438 |
| 3516_Influenza_B_virus_(B/Lee/1940)_segment_7_g_5 | 57439 |
| 3517_Influenza_B_virus_(B/Lee/1940)_segment_7_g_1 | 57440 |
| 3517_Influenza_B_virus_(B/Lee/1940)_segment_7_g_2 | 57441 |
| 3517_Influenza_B_virus_(B/Lee/1940)_segment_7_g_3 | 57442 |
| 3517_Influenza_B_virus_(B/Lee/1940)_segment_7_g_4 | 57443 |
| 3517_Influenza_B_virus_(B/Lee/1940)_segment_7_g_5 | 57444 |
| 3518_Influenza_A_virus_(A/Goose/Guangdong/1/96(H5N1))_{—} | 57445 |
| nucleocapsid_protein_(NP)_gene_g_1 | |
| 3518_Influenza_A_virus_(A/Goose/Guangdong/1/96(H5N1))_{—} | 57446 |
| nucleocapsid_protein_(NP)_gene_g_2 | |
| 3518_Influenza_A_virus_(A/Goose/Guangdong/1/96(H5N1))_{—} | 57447 |
| nucleocapsid_protein_(NP)_gene_g_3 | |
| 3518_Influenza_A_virus_(A/Goose/Guangdong/1/96(H5N1))_{—} | 57448 |
| nucleocapsid_protein_(NP)_gene_g_4 | |
| 3518_Influenza_A_virus_(A/Goose/Guangdong/1/96(H5N1))_{—} | 57449 |
| nucleocapsid_protein_(NP)_gene_g_5 | |
| 3519_Influenza_A_virus_(A/Goose/Guangdong/1/96(H5N1))_{—} | 57450 |
| nucleocapsid_protein_(NP)_gene_g_1 | |
| 3519_Influenza_A_virus_(A/Goose/Guangdong/1/96(H5N1))_{—} | 57451 |
| nucleocapsid_protein_(NP)_gene_g_2 | |
| 3519_Influenza_A_virus_(A/Goose/Guangdong/1/96(H5N1))_{—} | 57452 |
| nucleocapsid_protein_(NP)_gene_g_3 | |
| 3519_Influenza_A_virus_(A/Goose/Guangdong/1/96(H5N1))_{—} | 57453 |
| nucleocapsid_protein_(NP)_gene_g_4 | |
| 3519_Influenza_A_virus_(A/Goose/Guangdong/1/96(H5N1))_{—} | 57454 |
| nucleocapsid_protein_(NP)_gene_g_5 | |
| 3520_Influenza_A_virus_(A/Goose/Guangdong/1/96(H5N1))_{—} | 57455 |
| nucleocapsid_protein_(NP)_gene_g_1 | |
| 3520_Influenza_A_virus_(A/Goose/Guangdong/1/96(H5N1))_{—} | 57456 |
| nucleocapsid_protein_(NP)_gene_g_2 | |
| 3520_Influenza_A_virus_(A/Goose/Guangdong/1/96(H5N1))_{—} | 57457 |
| nucleocapsid_protein_(NP)_gene_g_3 | |
| 3520_Influenza_A_virus_(A/Goose/Guangdong/1/96(H5N1))_{—} | 57458 |
| nucleocapsid_protein_(NP)_gene_g_4 | |
| 3520_Influenza_A_virus_(A/Goose/Guangdong/1/96(H5N1))_{—} | 57459 |
| nucleocapsid_protein_(NP)_gene_g_5 | |
| 3521_Influenza_A_virus_(A/Goose/Guangdong/1/96(H5N1))_{—} | 57460 |
| nucleocapsid_protein_(NP)_gene_g_1 | |
| 3521_Influenza_A_virus_(A/Goose/Guangdong/1/96(H5N1))_{—} | 57461 |
| nucleocapsid_protein_(NP)_gene_g_2 | |
| 3521_Influenza_A_virus_(A/Goose/Guangdong/1/96(H5N1))_{—} | 57462 |
| nucleocapsid_protein_(NP)_gene_g_3 | |
| 3521_Influenza_A_virus_(A/Goose/Guangdong/1/96(H5N1))_{—} | 57463 |
| nucleocapsid_protein_(NP)_gene_g_4 | |
| 3521_Influenza_A_virus_(A/Goose/Guangdong/1/96(H5N1))_{—} | 57464 |
| nucleocapsid_protein_(NP)_gene_g_5 | |
| 3522_Streptococcus_pyogenes_strain_NCTC8198_{—} | 57465 |
| chromosome_1_g_1 | |
| 3522_Streptococcus_pyogenes_strain_NCTC8198_{—} | 57466 |
| chromosome_1_g_2 | |
| 3522_Streptococcus_pyogenes_strain_NCTC8198_{—} | 57467 |
| chromosome_1_g_3 | |
| 3522_Streptococcus_pyogenes_strain_NCTC8198_{—} | 57468 |
| chromosome_1_g_4 | |
| 3522_Streptococcus_pyogenes_strain_NCTC8198_{—} | 57469 |
| chromosome_1_g_5 | |
| 3523_Streptococcus_pyogenes_strain_NCTC8198_{—} | 57470 |
| chromosome_1_g_1 | |
| 3523_Streptococcus_pyogenes_strain_NCTC8198_{—} | 57471 |
| chromosome_1_g_2 | |
| 3523_Streptococcus_pyogenes_strain_NCTC8198_{—} | 57472 |
| chromosome_1_g_3 | |
| 3523_Streptococcus_pyogenes_strain_NCTC8198_{—} | 57473 |
| chromosome_1_g_4 | |
| 3523_Streptococcus_pyogenes_strain_NCTC8198_{—} | 57474 |
| chromosome_1_g_5 | |
| 3524_Streptococcus_pyogenes_strain_NCTC8198_{—} | 57475 |
| chromosome_1_g_1 | |
| 3524_Streptococcus_pyogenes_strain_NCTC8198_{—} | 57476 |
| chromosome_1_g_2 | |
| 3524_Streptococcus_pyogenes_strain_NCTC8198_{—} | 57477 |
| chromosome_1_g_3 | |
| 3524_Streptococcus_pyogenes_strain_NCTC8198_{—} | 57478 |
| chromosome_1_g_4 | |
| 3524_Streptococcus_pyogenes_strain_NCTC8198_{—} | 57479 |
| chromosome_1_g_5 | |
| 3525_Streptococcus_pyogenes_strain_NCTC8198_{—} | 57480 |
| chromosome_1_g_1 | |
| 3525_Streptococcus_pyogenes_strain_NCTC8198_{—} | 57481 |
| chromosome_1_g_2 | |
| 3525_Streptococcus_pyogenes_strain_NCTC8198_{—} | 57482 |
| chromosome_1_g_3 | |
| 3525_Streptococcus_pyogenes_strain_NCTC8198_{—} | 57483 |
| chromosome_1_g_4 | |
| 3525_Streptococcus_pyogenes_strain_NCTC8198_{—} | 57484 |
| chromosome_1_g_5 | |
| 3526_Streptococcus_pyogenes_strain_NCTC8198_{—} | 57485 |
| chromosome_1_g_1 | |
| 3526_Streptococcus_pyogenes_strain_NCTC8198_{—} | 57486 |
| chromosome_1_g_2 | |
| 3526_Streptococcus_pyogenes_strain_NCTC8198_{—} | 57487 |
| chromosome_1_g_3 | |
| 3526_Streptococcus_pyogenes_strain_NCTC8198_{—} | 57488 |
| chromosome_1_g_4 | |
| 3526_Streptococcus_pyogenes_strain_NCTC8198_{—} | 57489 |
| chromosome_1_g_5 | |
| 3527_Streptococcus_pyogenes_strain_NCTC8198_{—} | 57490 |
| chromosome_1_g_1 | |
| 3527_Streptococcus_pyogenes_strain_NCTC8198_{—} | 57491 |
| chromosome_1_g_2 | |
| 3527_Streptococcus_pyogenes_strain_NCTC8198_{—} | 57492 |
| chromosome_1_g_3 | |
| 3527_Streptococcus_pyogenes_strain_NCTC8198_{—} | 57493 |
| chromosome_1_g_4 | |
| 3527_Streptococcus_pyogenes_strain_NCTC8198_{—} | 57494 |
| chromosome_1_g_5 | |
| 3528_Streptococcus_pyogenes_strain_NCTC8198_{—} | 57495 |
| chromosome_1_g_1 | |
| 3528_Streptococcus_pyogenes_strain_NCTC8198_{—} | 57496 |
| chromosome_1_g_2 | |
| 3528_Streptococcus_pyogenes_strain_NCTC8198_{—} | 57497 |
| chromosome_1_g_3 | |
| 3528_Streptococcus_pyogenes_strain_NCTC8198_{—} | 57498 |
| chromosome_1_g_4 | |
| 3528_Streptococcus_pyogenes_strain_NCTC8198_{—} | 57499 |
| chromosome_1_g_5 | |
| 3529_Streptococcus_pyogenes_strain_NCTC8198_{—} | 57500 |
| chromosome_1_g_1 | |
| 3529_Streptococcus_pyogenes_strain_NCTC8198_{—} | 57501 |
| chromosome_1_g_2 | |
| 3529_Streptococcus_pyogenes_strain_NCTC8198_{—} | 57502 |
| chromosome_1_g_3 | |
| 3529_Streptococcus_pyogenes_strain_NCTC8198_{—} | 57503 |
| chromosome_1_g_4 | |
| 3529_Streptococcus_pyogenes_strain_NCTC8198_{—} | 57504 |
| chromosome_1_g_5 | |
| 3530_Streptococcus_pyogenes_strain_NCTC8198_{—} | 57505 |
| chromosome_1_g_1 | |
| 3530_Streptococcus_pyogenes_strain_NCTC8198_{—} | 57506 |
| chromosome_1_g_2 | |
| 3530_Streptococcus_pyogenes_strain_NCTC8198_{—} | 57507 |
| chromosome_1_g_3 | |
| 3530_Streptococcus_pyogenes_strain_NCTC8198_{—} | 57508 |
| chromosome_1_g_4 | |
| 3530_Streptococcus_pyogenes_strain_NCTC8198_{—} | 57509 |
| chromosome_1_g_5 | |
| 3531_Streptococcus_pyogenes_strain_NCTC8198_{—} | 57510 |
| chromosome_1_g_1 | |
| 3531_Streptococcus_pyogenes_strain_NCTC8198_{—} | 57511 |
| chromosome_1_g_2 | |
| 3531_Streptococcus_pyogenes_strain_NCTC8198_{—} | 57512 |
| chromosome_1_g_3 | |
| 3531_Streptococcus_pyogenes_strain_NCTC8198_{—} | 57513 |
| chromosome_1_g_4 | |
| 3531_Streptococcus_pyogenes_strain_NCTC8198_{—} | 57514 |
| chromosome_1_g_5 | |
| 3532_Streptococcus_pyogenes_strain_NCTC8198_{—} | 57515 |
| chromosome_1_g_1 | |
| 3532_Streptococcus_pyogenes_strain_NCTC8198_{—} | 57516 |
| chromosome_1_g_2 | |
| 3532_Streptococcus_pyogenes_strain_NCTC8198_{—} | 57517 |
| chromosome_1_g_3 | |
| 3532_Streptococcus_pyogenes_strain_NCTC8198_{—} | 57518 |
| chromosome_1_g_4 | |
| 3532_Streptococcus_pyogenes_strain_NCTC8198_{—} | 57519 |
| chromosome_1_g_5 | |
| 3533_Streptococcus_pyogenes_strain_NCTC8198_{—} | 57520 |
| chromosome_1_g_1 | |
| 3533_Streptococcus_pyogenes_strain_NCTC8198_{—} | 57521 |
| chromosome_1_g_2 | |
| 3533_Streptococcus_pyogenes_strain_NCTC8198_{—} | 57522 |
| chromosome_1_g_3 | |
| 3533_Streptococcus_pyogenes_strain_NCTC8198_{—} | 57523 |
| chromosome_1_g_4 | |
| 3533_Streptococcus_pyogenes_strain_NCTC8198_{—} | 57524 |
| chromosome_1_g_5 | |
| 3534_Streptococcus_pyogenes_strain_NCTC8198_{—} | 57525 |
| chromosome_1_g_1 | |
| 3534_Streptococcus_pyogenes_strain_NCTC8198_{—} | 57526 |
| chromosome_1_g_2 | |
| 3534_Streptococcus_pyogenes_strain_NCTC8198_{—} | 57527 |
| chromosome_1_g_3 | |
| 3534_Streptococcus_pyogenes_strain_NCTC8198_{—} | 57528 |
| chromosome_1_g_4 | |
| 3534_Streptococcus_pyogenes_strain_NCTC8198_{—} | 57529 |
| chromosome_1_g_5 | |
| 3535_Streptococcus_pyogenes_strain_NCTC8198_{—} | 57530 |
| chromosome_1_g_1 | |
| 3535_Streptococcus_pyogenes_strain_NCTC8198_{—} | 57531 |
| chromosome_1_g_2 | |
| 3535_Streptococcus_pyogenes_strain_NCTC8198_{—} | 57532 |
| chromosome_1_g_3 | |
| 3535_Streptococcus_pyogenes_strain_NCTC8198_{—} | 57533 |
| chromosome_1_g_4 | |
| 3535_Streptococcus_pyogenes_strain_NCTC8198_{—} | 57534 |
| chromosome_1_g_5 | |
| 3536_Streptococcus_pyogenes_strain_NCTC8198_{—} | 57535 |
| chromosome_1_g_1 | |
| 3536_Streptococcus_pyogenes_strain_NCTC8198_{—} | 57536 |
| chromosome_1_g_2 | |
| 3536_Streptococcus_pyogenes_strain_NCTC8198_{—} | 57537 |
| chromosome_1_g_3 | |
| 3536_Streptococcus_pyogenes_strain_NCTC8198_{—} | 57538 |
| chromosome_1_g_4 | |
| 3536_Streptococcus_pyogenes_strain_NCTC8198_{—} | 57539 |
| chromosome_1_g_5 | |
| 3537_Streptococcus_pyogenes_strain_NCTC8198_{—} | 57540 |
| chromosome_1_g_1 | |
| 3537_Streptococcus_pyogenes_strain_NCTC8198_{—} | 57541 |
| chromosome_1_g_2 | |
| 3537_Streptococcus_pyogenes_strain_NCTC8198_{—} | 57542 |
| chromosome_1_g_3 | |
| 3537_Streptococcus_pyogenes_strain_NCTC8198_{—} | 57543 |
| chromosome_1_g_4 | |
| 3537_Streptococcus_pyogenes_strain_NCTC8198_{—} | 57544 |
| chromosome_1_g_5 | |
| 3538_Streptococcus_pyogenes_strain_NCTC8198_{—} | 57545 |
| chromosome_1_g_1 | |
| 3538_Streptococcus_pyogenes_strain_NCTC8198_{—} | 57546 |
| chromosome_1_g_2 | |
| 3538_Streptococcus_pyogenes_strain_NCTC8198_{—} | 57547 |
| chromosome_1_g_3 | |
| 3538_Streptococcus_pyogenes_strain_NCTC8198_{—} | 57548 |
| chromosome_1_g_4 | |
| 3538_Streptococcus_pyogenes_strain_NCTC8198_{—} | 57549 |
| chromosome_1_g_5 | |
| 3539_Streptococcus_pyogenes_strain_NCTC8198_{—} | 57550 |
| chromosome_1_g_1 | |
| 3539_Streptococcus_pyogenes_strain_NCTC8198_{—} | 57551 |
| chromosome_1_g_2 | |
| 3539_Streptococcus_pyogenes_strain_NCTC8198_{—} | 57552 |
| chromosome_1_g_3 | |
| 3539_Streptococcus_pyogenes_strain_NCTC8198_{—} | 57553 |
| chromosome_1_g_4 | |
| 3539_Streptococcus_pyogenes_strain_NCTC8198_{—} | 57554 |
| chromosome_1_g_5 | |
| 3540_Streptococcus_pyogenes_strain_NCTC8198_{—} | 57555 |
| chromosome_1_g_1 | |
| 3540_Streptococcus_pyogenes_strain_NCTC8198_{—} | 57556 |
| chromosome_1_g_2 | |
| 3540_Streptococcus_pyogenes_strain_NCTC8198_{—} | 57557 |
| chromosome_1_g_3 | |
| 3540_Streptococcus_pyogenes_strain_NCTC8198_{—} | 57558 |
| chromosome_1_g_4 | |
| 3540_Streptococcus_pyogenes_strain_NCTC8198_{—} | 57559 |
| chromosome_1_g_5 | |
| 3541_Streptococcus_pyogenes_strain_NCTC8198_{—} | 57560 |
| chromosome_1_g_1 | |
| 3541_Streptococcus_pyogenes_strain_NCTC8198_{—} | 57561 |
| chromosome_1_g_2 | |
| 3541_Streptococcus_pyogenes_strain_NCTC8198_{—} | 57562 |
| chromosome_1_g_3 | |
| 3541_Streptococcus_pyogenes_strain_NCTC8198_{—} | 57563 |
| chromosome_1_g_4 | |
| 3541_Streptococcus_pyogenes_strain_NCTC8198_{—} | 57564 |
| chromosome_1_g_5 | |
| 3542_Streptococcus_pyogenes_strain_NCTC8198_{—} | 57565 |
| chromosome_1_g_1 | |
| 3542_Streptococcus_pyogenes_strain_NCTC8198_{—} | 57566 |
| chromosome_1_g_2 | |
| 3542_Streptococcus_pyogenes_strain_NCTC8198_{—} | 57567 |
| chromosome_1_g_3 | |
| 3542_Streptococcus_pyogenes_strain_NCTC8198_{—} | 57568 |
| chromosome_1_g_4 | |
| 3542_Streptococcus_pyogenes_strain_NCTC8198_{—} | 57569 |
| chromosome_1_g_5 | |
| 3543_Streptococcus_pyogenes_strain_NCTC8198_{—} | 57570 |
| chromosome_1_g_1 | |
| 3543_Streptococcus_pyogenes_strain_NCTC8198_{—} | 57571 |
| chromosome_1_g_2 | |
| 3543_Streptococcus_pyogenes_strain_NCTC8198_{—} | 57572 |
| chromosome_1_g_3 | |
| 3543_Streptococcus_pyogenes_strain_NCTC8198_{—} | 57573 |
| chromosome_1_g_4 | |
| 3543_Streptococcus_pyogenes_strain_NCTC8198_{—} | 57574 |
| chromosome_1_g_5 | |
| 3544_Streptococcus_pyogenes_strain_NCTC8198_{—} | 57575 |
| chromosome_1_g_1 | |
| 3544_Streptococcus_pyogenes_strain_NCTC8198_{—} | 57576 |
| chromosome_1_g_2 | |
| 3544_Streptococcus_pyogenes_strain_NCTC8198_{—} | 57577 |
| chromosome_1_g_3 | |
| 3544_Streptococcus_pyogenes_strain_NCTC8198_{—} | 57578 |
| chromosome_1_g_4 | |
| 3544_Streptococcus_pyogenes_strain_NCTC8198_{—} | 57579 |
| chromosome_1_g_5 | |
| 3545_Streptococcus_pyogenes_strain_NCTC8198_{—} | 57580 |
| chromosome_1_g_1 | |
| 3545_Streptococcus_pyogenes_strain_NCTC8198_{—} | 57581 |
| chromosome_1_g_2 | |
| 3545_Streptococcus_pyogenes_strain_NCTC8198_{—} | 57582 |
| chromosome_1_g_3 | |
| 3545_Streptococcus_pyogenes_strain_NCTC8198_{—} | 57583 |
| chromosome_1_g_4 | |
| 3545_Streptococcus_pyogenes_strain_NCTC8198_{—} | 57584 |
| chromosome_1_g_5 | |
| 3546_Streptococcus_pyogenes_strain_NCTC8198_{—} | 57585 |
| chromosome_1_g_1 | |
| 3546_Streptococcus_pyogenes_strain_NCTC8198_{—} | 57586 |
| chromosome_1_g_2 | |
| 3546_Streptococcus_pyogenes_strain_NCTC8198_{—} | 57587 |
| chromosome_1_g_3 | |
| 3546_Streptococcus_pyogenes_strain_NCTC8198_{—} | 57588 |
| chromosome_1_g_4 | |
| 3546_Streptococcus_pyogenes_strain_NCTC8198_{—} | 57589 |
| chromosome_1_g_5 | |
| 3547_Streptococcus_pyogenes_strain_NCTC8198_{—} | 57590 |
| chromosome_1_g_1 | |
| 3547_Streptococcus_pyogenes_strain_NCTC8198_{—} | 57591 |
| chromosome_1_g_2 | |
| 3547_Streptococcus_pyogenes_strain_NCTC8198_{—} | 57592 |
| chromosome_1_g_3 | |
| 3547_Streptococcus_pyogenes_strain_NCTC8198_{—} | 57593 |
| chromosome_1_g_4 | |
| 3547_Streptococcus_pyogenes_strain_NCTC8198_{—} | 57594 |
| chromosome_1_g_5 | |
| 3548_Streptococcus_pyogenes_strain_NCTC8198_{—} | 57595 |
| chromosome_1_g_1 | |
| 3548_Streptococcus_pyogenes_strain_NCTC8198_{—} | 57596 |
| chromosome_1_g_2 | |
| 3548_Streptococcus_pyogenes_strain_NCTC8198_{—} | 57597 |
| chromosome_1_g_3 | |
| 3548_Streptococcus_pyogenes_strain_NCTC8198_{—} | 57598 |
| chromosome_1_g_4 | |
| 3548_Streptococcus_pyogenes_strain_NCTC8198_{—} | 57599 |
| chromosome_1_g_5 | |
| 3549_Streptococcus_pyogenes_strain_NCTC8198_{—} | 57600 |
| chromosome_1_g_1 | |
| 3549_Streptococcus_pyogenes_strain_NCTC8198_{—} | 57601 |
| chromosome_1_g_2 | |
| 3549_Streptococcus_pyogenes_strain_NCTC8198_{—} | 57602 |
| chromosome_1_g_3 | |
| 3549_Streptococcus_pyogenes_strain_NCTC8198_{—} | 57603 |
| chromosome_1_g_4 | |
| 3549_Streptococcus_pyogenes_strain_NCTC8198_{—} | 57604 |
| chromosome_1_g_5 | |
| 3550_Streptococcus_pyogenes_strain_NCTC8198_{—} | 57605 |
| chromosome_1_g_1 | |
| 3550_Streptococcus_pyogenes_strain_NCTC8198_{—} | 57606 |
| chromosome_1_g_2 | |
| 3550_Streptococcus_pyogenes_strain_NCTC8198_{—} | 57607 |
| chromosome_1_g_3 | |
| 3550_Streptococcus_pyogenes_strain_NCTC8198_{—} | 57608 |
| chromosome_1_g_4 | |
| 3550_Streptococcus_pyogenes_strain_NCTC8198_{—} | 57609 |
| chromosome_1_g_5 | |
| 3551_Streptococcus_pyogenes_strain_NCTC8198_{—} | 57610 |
| chromosome_1_g_1 | |
| 3551_Streptococcus_pyogenes_strain_NCTC8198_{—} | 57611 |
| chromosome_1_g_2 | |
| 3551_Streptococcus_pyogenes_strain_NCTC8198_{—} | 57612 |
| chromosome_1_g_3 | |
| 3551_Streptococcus_pyogenes_strain_NCTC8198_{—} | 57613 |
| chromosome_1_g_4 | |
| 3551_Streptococcus_pyogenes_strain_NCTC8198_{—} | 57614 |
| chromosome_1_g_5 | |
| 3552_Streptococcus_pyogenes_strain_NCTC8198_{—} | 57615 |
| chromosome_1_g_1 | |
| 3552_Streptococcus_pyogenes_strain_NCTC8198_{—} | 57616 |
| chromosome_1_g_2 | |
| 3552_Streptococcus_pyogenes_strain_NCTC8198_{—} | 57617 |
| chromosome_1_g_3 | |
| 3552_Streptococcus_pyogenes_strain_NCTC8198_{—} | 57618 |
| chromosome_1_g_4 | |
| 3552_Streptococcus_pyogenes_strain_NCTC8198_{—} | 57619 |
| chromosome_1_g_5 | |
| 3553_Streptococcus_pyogenes_strain_NCTC8198_{—} | 57620 |
| chromosome_1_g_1 | |
| 3553_Streptococcus_pyogenes_strain_NCTC8198_{—} | 57621 |
| chromosome_1_g_2 | |
| 3553_Streptococcus_pyogenes_strain_NCTC8198_{—} | 57622 |
| chromosome_1_g_3 | |
| 3553_Streptococcus_pyogenes_strain_NCTC8198_{—} | 57623 |
| chromosome_1_g_4 | |
| 3553_Streptococcus_pyogenes_strain_NCTC8198_{—} | 57624 |
| chromosome_1_g_5 | |
| 3554_Streptococcus_pyogenes_strain_NCTC8198_{—} | 57625 |
| chromosome_1_g_1 | |
| 3554_Streptococcus_pyogenes_strain_NCTC8198_{—} | 57626 |
| chromosome_1_g_2 | |
| 3554_Streptococcus_pyogenes_strain_NCTC8198_{—} | 57627 |
| chromosome_1_g_3 | |
| 3554_Streptococcus_pyogenes_strain_NCTC8198_{—} | 57628 |
| chromosome_1_g_4 | |
| 3554_Streptococcus_pyogenes_strain_NCTC8198_{—} | 57629 |
| chromosome_1_g_5 | |
| 3555_Streptococcus_pyogenes_strain_NCTC8198_{—} | 57630 |
| chromosome_1_g_1 | |
| 3555_Streptococcus_pyogenes_strain_NCTC8198_{—} | 57631 |
| chromosome_1_g_2 | |
| 3555_Streptococcus_pyogenes_strain_NCTC8198_{—} | 57632 |
| chromosome_1_g_3 | |
| 3555_Streptococcus_pyogenes_strain_NCTC8198_{—} | 57633 |
| chromosome_1_g_4 | |
| 3555_Streptococcus_pyogenes_strain_NCTC8198_{—} | 57634 |
| chromosome_1_g_5 | |
| 3556_Streptococcus_pyogenes_strain_NCTC8198_{—} | 57635 |
| chromosome_1_g_1 | |
| 3556_Streptococcus_pyogenes_strain_NCTC8198_{—} | 57636 |
| chromosome_1_g_2 | |
| 3556_Streptococcus_pyogenes_strain_NCTC8198_{—} | 57637 |
| chromosome_1_g_3 | |
| 3556_Streptococcus_pyogenes_strain_NCTC8198_{—} | 57638 |
| chromosome_1_g_4 | |
| 3556_Streptococcus_pyogenes_strain_NCTC8198_{—} | 57639 |
| chromosome_1_g_5 | |
| 3557_Streptococcus_pyogenes_strain_NCTC8198_{—} | 57640 |
| chromosome_1_g_1 | |
| 3557_Streptococcus_pyogenes_strain_NCTC8198_{—} | 57641 |
| chromosome_1_g_2 | |
| 3557_Streptococcus_pyogenes_strain_NCTC8198_{—} | 57642 |
| chromosome_1_g_3 | |
| 3557_Streptococcus_pyogenes_strain_NCTC8198_{—} | 57643 |
| chromosome_1_g_4 | |
| 3557_Streptococcus_pyogenes_strain_NCTC8198_{—} | 57644 |
| chromosome_1_g_5 | |
| 3558_Streptococcus_pyogenes_strain_NCTC8198_{—} | 57645 |
| chromosome_1_g_1 | |
| 3558_Streptococcus_pyogenes_strain_NCTC8198_{—} | 57646 |
| chromosome_1_g_2 | |
| 3558_Streptococcus_pyogenes_strain_NCTC8198_{—} | 57647 |
| chromosome_1_g_3 | |
| 3558_Streptococcus_pyogenes_strain_NCTC8198_{—} | 57648 |
| chromosome_1_g_4 | |
| 3558_Streptococcus_pyogenes_strain_NCTC8198_{—} | 57649 |
| chromosome_1_g_5 | |
| 3559_Streptococcus_pyogenes_strain_NCTC8198_{—} | 57650 |
| chromosome_1_g_1 | |
| 3559_Streptococcus_pyogenes_strain_NCTC8198_{—} | 57651 |
| chromosome_1_g_2 | |
| 3559_Streptococcus_pyogenes_strain_NCTC8198_{—} | 57652 |
| chromosome_1_g_3 | |
| 3559_Streptococcus_pyogenes_strain_NCTC8198_{—} | 57653 |
| chromosome_1_g_4 | |
| 3559_Streptococcus_pyogenes_strain_NCTC8198_{—} | 57654 |
| chromosome_1_g_5 | |
| 3560_Streptococcus_pyogenes_strain_NCTC8198_{—} | 57655 |
| chromosome_1_g_1 | |
| 3560_Streptococcus_pyogenes_strain_NCTC8198_{—} | 57656 |
| chromosome_1_g_2 | |
| 3560_Streptococcus_pyogenes_strain_NCTC8198_{—} | 57657 |
| chromosome_1_g_3 | |
| 3560_Streptococcus_pyogenes_strain_NCTC8198_{—} | 57658 |
| chromosome_1_g_4 | |
| 3560_Streptococcus_pyogenes_strain_NCTC8198_{—} | 57659 |
| chromosome_1_g_5 | |
| 3561_Streptococcus_pyogenes_strain_NCTC8198_{—} | 57660 |
| chromosome_1_g_1 | |
| 3561_Streptococcus_pyogenes_strain_NCTC8198_{—} | 57661 |
| chromosome_1_g_2 | |
| 3561_Streptococcus_pyogenes_strain_NCTC8198_{—} | 57662 |
| chromosome_1_g_3 | |
| 3561_Streptococcus_pyogenes_strain_NCTC8198_{—} | 57663 |
| chromosome_1_g_4 | |
| 3561_Streptococcus_pyogenes_strain_NCTC8198_{—} | 57664 |
| chromosome_1_g_5 | |
| 3562_Streptococcus_pyogenes_strain_NCTC8198_{—} | 57665 |
| chromosome_1_g_1 | |
| 3562_Streptococcus_pyogenes_strain_NCTC8198_{—} | 57666 |
| chromosome_1_g_2 | |
| 3562_Streptococcus_pyogenes_strain_NCTC8198_{—} | 57667 |
| chromosome_1_g_3 | |
| 3562_Streptococcus_pyogenes_strain_NCTC8198_{—} | 57668 |
| chromosome_1_g_4 | |
| 3562_Streptococcus_pyogenes_strain_NCTC8198_{—} | 57669 |
| chromosome_1_g_5 | |
| 3563_Streptococcus_pyogenes_strain_NCTC8198_{—} | 57670 |
| chromosome_1_g_1 | |
| 3563_Streptococcus_pyogenes_strain_NCTC8198_{—} | 57671 |
| chromosome_1_g_2 | |
| 3563_Streptococcus_pyogenes_strain_NCTC8198_{—} | 57672 |
| chromosome_1_g_3 | |
| 3563_Streptococcus_pyogenes_strain_NCTC8198_{—} | 57673 |
| chromosome_1_g_4 | |
| 3563_Streptococcus_pyogenes_strain_NCTC8198_{—} | 57674 |
| chromosome_1_g_5 | |
| 3564_Streptococcus_pyogenes_strain_NCTC8198_{—} | 57675 |
| chromosome_1_g_1 | |
| 3564_Streptococcus_pyogenes_strain_NCTC8198_{—} | 57676 |
| chromosome_1_g_2 | |
| 3564_Streptococcus_pyogenes_strain_NCTC8198_{—} | 57677 |
| chromosome_1_g_3 | |
| 3564_Streptococcus_pyogenes_strain_NCTC8198_{—} | 57678 |
| chromosome_1_g_4 | |
| 3564_Streptococcus_pyogenes_strain_NCTC8198_{—} | 57679 |
| chromosome_1_g_5 | |
| 3565_Streptococcus_pyogenes_strain_NCTC8198_{—} | 57680 |
| chromosome_1_g_1 | |
| 3565_Streptococcus_pyogenes_strain_NCTC8198_{—} | 57681 |
| chromosome_1_g_2 | |
| 3565_Streptococcus_pyogenes_strain_NCTC8198_{—} | 57682 |
| chromosome_1_g_3 | |
| 3565_Streptococcus_pyogenes_strain_NCTC8198_{—} | 57683 |
| chromosome_1_g_4 | |
| 3565_Streptococcus_pyogenes_strain_NCTC8198_{—} | 57684 |
| chromosome_1_g_5 | |
| 3566_Streptococcus_pyogenes_strain_NCTC8198_{—} | 57685 |
| chromosome_1_g_1 | |
| 3566_Streptococcus_pyogenes_strain_NCTC8198_{—} | 57686 |
| chromosome_1_g_2 | |
| 3566_Streptococcus_pyogenes_strain_NCTC8198_{—} | 57687 |
| chromosome_1_g_3 | |
| 3566_Streptococcus_pyogenes_strain_NCTC8198_{—} | 57688 |
| chromosome_1_g_4 | |
| 3566_Streptococcus_pyogenes_strain_NCTC8198_{—} | 57689 |
| chromosome_1_g_5 | |
| 3567_Streptococcus_pyogenes_strain_NCTC8198_{—} | 57690 |
| chromosome_1_g_1 | |
| 3567_Streptococcus_pyogenes_strain_NCTC8198_{—} | 57691 |
| chromosome_1_g_2 | |
| 3567_Streptococcus_pyogenes_strain_NCTC8198_{—} | 57692 |
| chromosome_1_g_3 | |
| 3567_Streptococcus_pyogenes_strain_NCTC8198_{—} | 57693 |
| chromosome_1_g_4 | |
| 3567_Streptococcus_pyogenes_strain_NCTC8198_{—} | 57694 |
| chromosome_1_g_5 | |
| 3568_Streptococcus_pyogenes_strain_NCTC8198_{—} | 57695 |
| chromosome_1_g_1 | |
| 3568_Streptococcus_pyogenes_strain_NCTC8198_{—} | 57696 |
| chromosome_1_g_2 | |
| 3568_Streptococcus_pyogenes_strain_NCTC8198_{—} | 57697 |
| chromosome_1_g_3 | |
| 3568_Streptococcus_pyogenes_strain_NCTC8198_{—} | 57698 |
| chromosome_1_g_4 | |
| 3568_Streptococcus_pyogenes_strain_NCTC8198_{—} | 57699 |
| chromosome_1_g_5 | |
| 3569_Streptococcus_pyogenes_strain_NCTC8198_{—} | 57700 |
| chromosome_1_g_1 | |
| 3569_Streptococcus_pyogenes_strain_NCTC8198_{—} | 57701 |
| chromosome_1_g_2 | |
| 3569_Streptococcus_pyogenes_strain_NCTC8198_{—} | 57702 |
| chromosome_1_g_3 | |
| 3569_Streptococcus_pyogenes_strain_NCTC8198_{—} | 57703 |
| chromosome_1_g_4 | |
| 3569_Streptococcus_pyogenes_strain_NCTC8198_{—} | 57704 |
| chromosome_1_g_5 | |
| 3570_Streptococcus_pyogenes_strain_NCTC8198_{—} | 57705 |
| chromosome_1_g_1 | |
| 3570_Streptococcus_pyogenes_strain_NCTC8198_{—} | 57706 |
| chromosome_1_g_2 | |
| 3570_Streptococcus_pyogenes_strain_NCTC8198_{—} | 57707 |
| chromosome_1_g_3 | |
| 3570_Streptococcus_pyogenes_strain_NCTC8198_{—} | 57708 |
| chromosome_1_g_4 | |
| 3570_Streptococcus_pyogenes_strain_NCTC8198_{—} | 57709 |
| chromosome_1_g_5 | |
| 3571_Streptococcus_pyogenes_strain_NCTC8198_{—} | 57710 |
| chromosome_1_g_1 | |
| 3571_Streptococcus_pyogenes_strain_NCTC8198_{—} | 57711 |
| chromosome_1_g_2 | |
| 3571_Streptococcus_pyogenes_strain_NCTC8198_{—} | 57712 |
| chromosome_1_g_3 | |
| 3571_Streptococcus_pyogenes_strain_NCTC8198_{—} | 57713 |
| chromosome_1_g_4 | |
| 3571_Streptococcus_pyogenes_strain_NCTC8198_{—} | 57714 |
| chromosome_1_g_5 | |
| 3572_Streptococcus_pyogenes_strain_NCTC8198_{—} | 57715 |
| chromosome_1_g_1 | |
| 3572_Streptococcus_pyogenes_strain_NCTC8198_{—} | 57716 |
| chromosome_1_g_2 | |
| 3572_Streptococcus_pyogenes_strain_NCTC8198_{—} | 57717 |
| chromosome_1_g_3 | |
| 3572_Streptococcus_pyogenes_strain_NCTC8198_{—} | 57718 |
| chromosome_1_g_4 | |
| 3572_Streptococcus_pyogenes_strain_NCTC8198_{—} | 57719 |
| chromosome_1_g_5 | |
| 3573_Streptococcus_pyogenes_strain_NCTC8198_{—} | 57720 |
| chromosome_1_g_1 | |
| 3573_Streptococcus_pyogenes_strain_NCTC8198_{—} | 57721 |
| chromosome_1_g_2 | |
| 3573_Streptococcus_pyogenes_strain_NCTC8198_{—} | 57722 |
| chromosome_1_g_3 | |
| 3573_Streptococcus_pyogenes_strain_NCTC8198_{—} | 57723 |
| chromosome_1_g_4 | |
| 3573_Streptococcus_pyogenes_strain_NCTC8198_{—} | 57724 |
| chromosome_1_g_5 | |
| 3574_Streptococcus_pyogenes_strain_NCTC8198_{—} | 57725 |
| chromosome_1_g_1 | |
| 3574_Streptococcus_pyogenes_strain_NCTC8198_{—} | 57726 |
| chromosome_1_g_2 | |
| 3574_Streptococcus_pyogenes_strain_NCTC8198_{—} | 57727 |
| chromosome_1_g_3 | |
| 3574_Streptococcus_pyogenes_strain_NCTC8198_{—} | 57728 |
| chromosome_1_g_4 | |
| 3574_Streptococcus_pyogenes_strain_NCTC8198_{—} | 57729 |
| chromosome_1_g_5 | |
| 3575_Streptococcus_pyogenes_strain_NCTC8198_{—} | 57730 |
| chromosome_1_g_1 | |
| 3575_Streptococcus_pyogenes_strain_NCTC8198_{—} | 57731 |
| chromosome_1_g_2 | |
| 3575_Streptococcus_pyogenes_strain_NCTC8198_{—} | 57732 |
| chromosome_1_g_3 | |
| 3575_Streptococcus_pyogenes_strain_NCTC8198_{—} | 57733 |
| chromosome_1_g_4 | |
| 3575_Streptococcus_pyogenes_strain_NCTC8198_{—} | 57734 |
| chromosome_1_g_5 | |
| 3576_Streptococcus_pyogenes_strain_NCTC8198_{—} | 57735 |
| chromosome_1_g_1 | |
| 3576_Streptococcus_pyogenes_strain_NCTC8198_{—} | 57736 |
| chromosome_1_g_2 | |
| 3576_Streptococcus_pyogenes_strain_NCTC8198_{—} | 57737 |
| chromosome_1_g_3 | |
| 3576_Streptococcus_pyogenes_strain_NCTC8198_{—} | 57738 |
| chromosome_1_g_4 | |
| 3576_Streptococcus_pyogenes_strain_NCTC8198_{—} | 57739 |
| chromosome_1_g_5 | |
| 3577_Streptococcus_pyogenes_strain_NCTC8198_{—} | 57740 |
| chromosome_1_g_1 | |
| 3577_Streptococcus_pyogenes_strain_NCTC8198_{—} | 57741 |
| chromosome_1_g_2 | |
| 3577_Streptococcus_pyogenes_strain_NCTC8198_{—} | 57742 |
| chromosome_1_g_3 | |
| 3577_Streptococcus_pyogenes_strain_NCTC8198_{—} | 57743 |
| chromosome_1_g_4 | |
| 3577_Streptococcus_pyogenes_strain_NCTC8198_{—} | 57744 |
| chromosome_1_g_5 | |
| 3578_Streptococcus_pyogenes_strain_NCTC8198_{—} | 57745 |
| chromosome_1_g_1 | |
| 3578_Streptococcus_pyogenes_strain_NCTC8198_{—} | 57746 |
| chromosome_1_g_2 | |
| 3578_Streptococcus_pyogenes_strain_NCTC8198_{—} | 57747 |
| chromosome_1_g_3 | |
| 3578_Streptococcus_pyogenes_strain_NCTC8198_{—} | 57748 |
| chromosome_1_g_4 | |
| 3578_Streptococcus_pyogenes_strain_NCTC8198_{—} | 57749 |
| chromosome_1_g_5 | |
| 3579_Streptococcus_pyogenes_strain_NCTC8198_{—} | 57750 |
| chromosome_1_g_1 | |
| 3579_Streptococcus_pyogenes_strain_NCTC8198_{—} | 57751 |
| chromosome_1_g_2 | |
| 3579_Streptococcus_pyogenes_strain_NCTC8198_{—} | 57752 |
| chromosome_1_g_3 | |
| 3579_Streptococcus_pyogenes_strain_NCTC8198_{—} | 57753 |
| chromosome_1_g_4 | |
| 3579_Streptococcus_pyogenes_strain_NCTC8198_{—} | 57754 |
| chromosome_1_g_5 | |
| 3580_Streptococcus_pyogenes_strain_NCTC8198_{—} | 57755 |
| chromosome_1_g_1 | |
| 3580_Streptococcus_pyogenes_strain_NCTC8198_{—} | 57756 |
| chromosome_1_g_2 | |
| 3580_Streptococcus_pyogenes_strain_NCTC8198_{—} | 57757 |
| chromosome_1_g_3 | |
| 3580_Streptococcus_pyogenes_strain_NCTC8198_{—} | 57758 |
| chromosome_1_g_4 | |
| 3580_Streptococcus_pyogenes_strain_NCTC8198_{—} | 57759 |
| chromosome_1_g_5 | |
| 3581_Streptococcus_pyogenes_strain_NCTC8198_{—} | 57760 |
| chromosome_1_g_1 | |
| 3581_Streptococcus_pyogenes_strain_NCTC8198_{—} | 57761 |
| chromosome_1_g_2 | |
| 3581_Streptococcus_pyogenes_strain_NCTC8198_{—} | 57762 |
| chromosome_1_g_3 | |
| 3581_Streptococcus_pyogenes_strain_NCTC8198_{—} | 57763 |
| chromosome_1_g_4 | |
| 3581_Streptococcus_pyogenes_strain_NCTC8198_{—} | 57764 |
| chromosome_1_g_5 | |
| 3582_Streptococcus_pyogenes_strain_NCTC8198_{—} | 57765 |
| chromosome_1_g_1 | |
| 3582_Streptococcus_pyogenes_strain_NCTC8198_{—} | 57766 |
| chromosome_1_g_2 | |
| 3582_Streptococcus_pyogenes_strain_NCTC8198_{—} | 57767 |
| chromosome_1_g_3 | |
| 3582_Streptococcus_pyogenes_strain_NCTC8198_{—} | 57768 |
| chromosome_1_g_4 | |
| 3582_Streptococcus_pyogenes_strain_NCTC8198_{—} | 57769 |
| chromosome_1_g_5 | |
| 3583_Streptococcus_pyogenes_strain_NCTC8198_{—} | 57770 |
| chromosome_1_g_1 | |
| 3583_Streptococcus_pyogenes_strain_NCTC8198_{—} | 57771 |
| chromosome_1_g_2 | |
| 3583_Streptococcus_pyogenes_strain_NCTC8198_{—} | 57772 |
| chromosome_1_g_3 | |
| 3583_Streptococcus_pyogenes_strain_NCTC8198_{—} | 57773 |
| chromosome_1_g_4 | |
| 3583_Streptococcus_pyogenes_strain_NCTC8198_{—} | 57774 |
| chromosome_1_g_5 | |
| 3584_Streptococcus_pyogenes_strain_NCTC8198_{—} | 57775 |
| chromosome_1_g_1 | |
| 3584_Streptococcus_pyogenes_strain_NCTC8198_{—} | 57776 |
| chromosome_1_g_2 | |
| 3584_Streptococcus_pyogenes_strain_NCTC8198_{—} | 57777 |
| chromosome_1_g_3 | |
| 3584_Streptococcus_pyogenes_strain_NCTC8198_{—} | 57778 |
| chromosome_1_g_4 | |
| 3584_Streptococcus_pyogenes_strain_NCTC8198_{—} | 57779 |
| chromosome_1_g_5 | |
| 3585_Streptococcus_pyogenes_strain_NCTC8198_{—} | 57780 |
| chromosome_1_g_1 | |
| 3585_Streptococcus_pyogenes_strain_NCTC8198_{—} | 57781 |
| chromosome_1_g_2 | |
| 3585_Streptococcus_pyogenes_strain_NCTC8198_{—} | 57782 |
| chromosome_1_g_3 | |
| 3585_Streptococcus_pyogenes_strain_NCTC8198_{—} | 57783 |
| chromosome_1_g_4 | |
| 3585_Streptococcus_pyogenes_strain_NCTC8198_{—} | 57784 |
| chromosome_1_g_5 | |
| 3586_Streptococcus_pyogenes_strain_NCTC8198_{—} | 57785 |
| chromosome_1_g_1 | |
| 3586_Streptococcus_pyogenes_strain_NCTC8198_{—} | 57786 |
| chromosome_1_g_2 | |
| 3586_Streptococcus_pyogenes_strain_NCTC8198_{—} | 57787 |
| chromosome_1_g_3 | |
| 3586_Streptococcus_pyogenes_strain_NCTC8198_{—} | 57788 |
| chromosome_1_g_4 | |
| 3586_Streptococcus_pyogenes_strain_NCTC8198_{—} | 57789 |
| chromosome_1_g_5 | |
| 3587_Streptococcus_pyogenes_strain_NCTC8198_{—} | 57790 |
| chromosome_1_g_1 | |
| 3587_Streptococcus_pyogenes_strain_NCTC8198_{—} | 57791 |
| chromosome_1_g_2 | |
| 3587_Streptococcus_pyogenes_strain_NCTC8198_{—} | 57792 |
| chromosome_1_g_3 | |
| 3587_Streptococcus_pyogenes_strain_NCTC8198_{—} | 57793 |
| chromosome_1_g_4 | |
| 3587_Streptococcus_pyogenes_strain_NCTC8198_{—} | 57794 |
| chromosome_1_g_5 | |
| 3588_Streptococcus_pyogenes_strain_NCTC8198_{—} | 57795 |
| chromosome_1_g_1 | |
| 3588_Streptococcus_pyogenes_strain_NCTC8198_{—} | 57796 |
| chromosome_1_g_2 | |
| 3588_Streptococcus_pyogenes_strain_NCTC8198_{—} | 57797 |
| chromosome_1_g_3 | |
| 3588_Streptococcus_pyogenes_strain_NCTC8198_{—} | 57798 |
| chromosome_1_g_4 | |
| 3588_Streptococcus_pyogenes_strain_NCTC8198_{—} | 57799 |
| chromosome_1_g_5 | |
| 3589_Streptococcus_pyogenes_strain_NCTC8198_{—} | 57800 |
| chromosome_1_g_1 | |
| 3589_Streptococcus_pyogenes_strain_NCTC8198_{—} | 57801 |
| chromosome_1_g_2 | |
| 3589_Streptococcus_pyogenes_strain_NCTC8198_{—} | 57802 |
| chromosome_1_g_3 | |
| 3589_Streptococcus_pyogenes_strain_NCTC8198_{—} | 57803 |
| chromosome_1_g_4 | |
| 3589_Streptococcus_pyogenes_strain_NCTC8198_{—} | 57804 |
| chromosome_1_g_5 | |
| 3590_Streptococcus_pyogenes_strain_NCTC8198_{—} | 57805 |
| chromosome_1_g_1 | |
| 3590_Streptococcus_pyogenes_strain_NCTC8198_{—} | 57806 |
| chromosome_1_g_2 | |
| 3590_Streptococcus_pyogenes_strain_NCTC8198_{—} | 57807 |
| chromosome_1_g_3 | |
| 3590_Streptococcus_pyogenes_strain_NCTC8198_{—} | 57808 |
| chromosome_1_g_4 | |
| 3590_Streptococcus_pyogenes_strain_NCTC8198_{—} | 57809 |
| chromosome_1_g_5 | |
| 3591_Streptococcus_pyogenes_strain_NCTC8198_{—} | 57810 |
| chromosome_1_g_1 | |
| 3591_Streptococcus_pyogenes_strain_NCTC8198_{—} | 57811 |
| chromosome_1_g_2 | |
| 3591_Streptococcus_pyogenes_strain_NCTC8198_{—} | 57812 |
| chromosome_1_g_3 | |
| 3591_Streptococcus_pyogenes_strain_NCTC8198_{—} | 57813 |
| chromosome_1_g_4 | |
| 3591_Streptococcus_pyogenes_strain_NCTC8198_{—} | 57814 |
| chromosome_1_g_5 | |
| 3592_Streptococcus_pyogenes_strain_NCTC8198_{—} | 57815 |
| chromosome_1_g_1 | |
| 3592_Streptococcus_pyogenes_strain_NCTC8198_{—} | 57816 |
| chromosome_1_g_2 | |
| 3592_Streptococcus_pyogenes_strain_NCTC8198_{—} | 57817 |
| chromosome_1_g_3 | |
| 3592_Streptococcus_pyogenes_strain_NCTC8198_{—} | 57818 |
| chromosome_1_g_4 | |
| 3592_Streptococcus_pyogenes_strain_NCTC8198_{—} | 57819 |
| chromosome_1_g_5 | |
| 3593_Streptococcus_pyogenes_strain_NCTC8198_{—} | 57820 |
| chromosome_1_g_1 | |
| 3593_Streptococcus_pyogenes_strain_NCTC8198_{—} | 57821 |
| chromosome_1_g_2 | |
| 3593_Streptococcus_pyogenes_strain_NCTC8198_{—} | 57822 |
| chromosome_1_g_3 | |
| 3593_Streptococcus_pyogenes_strain_NCTC8198_{—} | 57823 |
| chromosome_1_g_4 | |
| 3593_Streptococcus_pyogenes_strain_NCTC8198_{—} | 57824 |
| chromosome_1_g_5 | |
| 3594_Streptococcus_pyogenes_strain_NCTC8198_{—} | 57825 |
| chromosome_1_g_1 | |
| 3594_Streptococcus_pyogenes_strain_NCTC8198_{—} | 57826 |
| chromosome_1_g_2 | |
| 3594_Streptococcus_pyogenes_strain_NCTC8198_{—} | 57827 |
| chromosome_1_g_3 | |
| 3594_Streptococcus_pyogenes_strain_NCTC8198_{—} | 57828 |
| chromosome_1_g_4 | |
| 3594_Streptococcus_pyogenes_strain_NCTC8198_{—} | 57829 |
| chromosome_1_g_5 | |
| 3595_Streptococcus_pyogenes_strain_NCTC8198_{—} | 57830 |
| chromosome_1_g_1 | |
| 3595_Streptococcus_pyogenes_strain_NCTC8198_{—} | 57831 |
| chromosome_1_g_2 | |
| 3595_Streptococcus_pyogenes_strain_NCTC8198_{—} | 57832 |
| chromosome_1_g_3 | |
| 3595_Streptococcus_pyogenes_strain_NCTC8198_{—} | 57833 |
| chromosome_1_g_4 | |
| 3595_Streptococcus_pyogenes_strain_NCTC8198_{—} | 57834 |
| chromosome_1_g_5 | |
| 3596_Streptococcus_pyogenes_strain_NCTC8198_{—} | 57835 |
| chromosome_1_g_1 | |
| 3596_Streptococcus_pyogenes_strain_NCTC8198_{—} | 57836 |
| chromosome_1_g_2 | |
| 3596_Streptococcus_pyogenes_strain_NCTC8198_{—} | 57837 |
| chromosome_1_g_3 | |
| 3596_Streptococcus_pyogenes_strain_NCTC8198_{—} | 57838 |
| chromosome_1_g_4 | |
| 3596_Streptococcus_pyogenes_strain_NCTC8198_{—} | 57839 |
| chromosome_1_g_5 | |
| 3597_Streptococcus_pyogenes_strain_NCTC8198_{—} | 57840 |
| chromosome_1_g_1 | |
| 3597_Streptococcus_pyogenes_strain_NCTC8198_{—} | 57841 |
| chromosome_1_g_2 | |
| 3597_Streptococcus_pyogenes_strain_NCTC8198_{—} | 57842 |
| chromosome_1_g_3 | |
| 3597_Streptococcus_pyogenes_strain_NCTC8198_{—} | 57843 |
| chromosome_1_g_4 | |
| 3597_Streptococcus_pyogenes_strain_NCTC8198_{—} | 57844 |
| chromosome_1_g_5 | |
| 3598_Streptococcus_pyogenes_strain_NCTC8198_{—} | 57845 |
| chromosome_1_g_1 | |
| 3598_Streptococcus_pyogenes_strain_NCTC8198_{—} | 57846 |
| chromosome_1_g_2 | |
| 3598_Streptococcus_pyogenes_strain_NCTC8198_{—} | 57847 |
| chromosome_1_g_3 | |
| 3598_Streptococcus_pyogenes_strain_NCTC8198_{—} | 57848 |
| chromosome_1_g_4 | |
| 3598_Streptococcus_pyogenes_strain_NCTC8198_{—} | 57849 |
| chromosome_1_g_5 | |
| 3599_Streptococcus_pyogenes_strain_NCTC8198_{—} | 57850 |
| chromosome_1_g_1 | |
| 3599_Streptococcus_pyogenes_strain_NCTC8198_{—} | 57851 |
| chromosome_1_g_2 | |
| 3599_Streptococcus_pyogenes_strain_NCTC8198_{—} | 57852 |
| chromosome_1_g_3 | |
| 3599_Streptococcus_pyogenes_strain_NCTC8198_{—} | 57853 |
| chromosome_1_g_4 | |
| 3599_Streptococcus_pyogenes_strain_NCTC8198_{—} | 57854 |
| chromosome_1_g_5 | |
| 3600_Streptococcus_pyogenes_strain_NCTC8198_{—} | 57855 |
| chromosome_1_g_1 | |
| 3600_Streptococcus_pyogenes_strain_NCTC8198_{—} | 57856 |
| chromosome_1_g_2 | |
| 3600_Streptococcus_pyogenes_strain_NCTC8198_{—} | 57857 |
| chromosome_1_g_3 | |
| 3600_Streptococcus_pyogenes_strain_NCTC8198_{—} | 57858 |
| chromosome_1_g_4 | |
| 3600_Streptococcus_pyogenes_strain_NCTC8198_{—} | 57859 |
| chromosome_1_g_5 | |
| 3601_Streptococcus_pyogenes_strain_NCTC8198_{—} | 57860 |
| chromosome_1_g_1 | |
| 3601_Streptococcus_pyogenes_strain_NCTC8198_{—} | 57861 |
| chromosome_1_g_2 | |
| 3601_Streptococcus_pyogenes_strain_NCTC8198_{—} | 57862 |
| chromosome_1_g_3 | |
| 3601_Streptococcus_pyogenes_strain_NCTC8198_{—} | 57863 |
| chromosome_1_g_4 | |
| 3601_Streptococcus_pyogenes_strain_NCTC8198_{—} | 57864 |
| chromosome_1_g_5 | |
| 3602_Streptococcus_pyogenes_strain_NCTC8198_{—} | 57865 |
| chromosome_1_g_1 | |
| 3602_Streptococcus_pyogenes_strain_NCTC8198_{—} | 57866 |
| chromosome_1_g_2 | |
| 3602_Streptococcus_pyogenes_strain_NCTC8198_{—} | 57867 |
| chromosome_1_g_3 | |
| 3602_Streptococcus_pyogenes_strain_NCTC8198_{—} | 57868 |
| chromosome_1_g_4 | |
| 3602_Streptococcus_pyogenes_strain_NCTC8198_{—} | 57869 |
| chromosome_1_g_5 | |
| 3603_Streptococcus_pyogenes_strain_NCTC8198_{—} | 57870 |
| chromosome_1_g_1 | |
| 3603_Streptococcus_pyogenes_strain_NCTC8198_{—} | 57871 |
| chromosome_1_g_2 | |
| 3603_Streptococcus_pyogenes_strain_NCTC8198_{—} | 57872 |
| chromosome_1_g_3 | |
| 3603_Streptococcus_pyogenes_strain_NCTC8198_{—} | 57873 |
| chromosome_1_g_4 | |
| 3603_Streptococcus_pyogenes_strain_NCTC8198_{—} | 57874 |
| chromosome_1_g_5 | |
| 3604_Streptococcus_pyogenes_strain_NCTC8198_{—} | 57875 |
| chromosome_1_g_1 | |
| 3604_Streptococcus_pyogenes_strain_NCTC8198_{—} | 57876 |
| chromosome_1_g_2 | |
| 3604_Streptococcus_pyogenes_strain_NCTC8198_{—} | 57877 |
| chromosome_1_g_3 | |
| 3604_Streptococcus_pyogenes_strain_NCTC8198_{—} | 57878 |
| chromosome_1_g_4 | |
| 3604_Streptococcus_pyogenes_strain_NCTC8198_{—} | 57879 |
| chromosome_1_g_5 | |
| 3605_Streptococcus_pyogenes_strain_NCTC8198_{—} | 57880 |
| chromosome_1_g_1 | |
| 3605_Streptococcus_pyogenes_strain_NCTC8198_{—} | 57881 |
| chromosome_1_g_2 | |
| 3605_Streptococcus_pyogenes_strain_NCTC8198_{—} | 57882 |
| chromosome_1_g_3 | |
| 3605_Streptococcus_pyogenes_strain_NCTC8198_{—} | 57883 |
| chromosome_1_g_4 | |
| 3605_Streptococcus_pyogenes_strain_NCTC8198_{—} | 57884 |
| chromosome_1_g_5 | |
| 3606_Streptococcus_pyogenes_strain_NCTC8198_{—} | 57885 |
| chromosome_1_g_1 | |
| 3606_Streptococcus_pyogenes_strain_NCTC8198_{—} | 57886 |
| chromosome_1_g_2 | |
| 3606_Streptococcus_pyogenes_strain_NCTC8198_{—} | 57887 |
| chromosome_1_g_3 | |
| 3606_Streptococcus_pyogenes_strain_NCTC8198_{—} | 57888 |
| chromosome_1_g_4 | |
| 3606_Streptococcus_pyogenes_strain_NCTC8198_{—} | 57889 |
| chromosome_1_g_5 | |
| 3607_Streptococcus_pyogenes_strain_NCTC8198_{—} | 57890 |
| chromosome_1_g_1 | |
| 3607_Streptococcus_pyogenes_strain_NCTC8198_{—} | 57891 |
| chromosome_1_g_2 | |
| 3607_Streptococcus_pyogenes_strain_NCTC8198_{—} | 57892 |
| chromosome_1_g_3 | |
| 3607_Streptococcus_pyogenes_strain_NCTC8198_{—} | 57893 |
| chromosome_1_g_4 | |
| 3607_Streptococcus_pyogenes_strain_NCTC8198_{—} | 57894 |
| chromosome_1_g_5 | |
| 3608_Streptococcus_pyogenes_strain_NCTC8198_{—} | 57895 |
| chromosome_1_g_1 | |
| 3608_Streptococcus_pyogenes_strain_NCTC8198_{—} | 57896 |
| chromosome_1_g_2 | |
| 3608_Streptococcus_pyogenes_strain_NCTC8198_{—} | 57897 |
| chromosome_1_g_3 | |
| 3608_Streptococcus_pyogenes_strain_NCTC8198_{—} | 57898 |
| chromosome_1_g_4 | |
| 3608_Streptococcus_pyogenes_strain_NCTC8198_{—} | 57899 |
| chromosome_1_g_5 | |
| 3609_Streptococcus_pyogenes_strain_NCTC8198_{—} | 57900 |
| chromosome_1_g_1 | |
| 3609_Streptococcus_pyogenes_strain_NCTC8198_{—} | 57901 |
| chromosome_1_g_2 | |
| 3609_Streptococcus_pyogenes_strain_NCTC8198_{—} | 57902 |
| chromosome_1_g_3 | |
| 3609_Streptococcus_pyogenes_strain_NCTC8198_{—} | 57903 |
| chromosome_1_g_4 | |
| 3609_Streptococcus_pyogenes_strain_NCTC8198_{—} | 57904 |
| chromosome_1_g_5 | |
| 3610_Streptococcus_pyogenes_strain_NCTC8198_{—} | 57905 |
| chromosome_1_g_1 | |
| 3610_Streptococcus_pyogenes_strain_NCTC8198_{—} | 57906 |
| chromosome_1_g_2 | |
| 3610_Streptococcus_pyogenes_strain_NCTC8198_{—} | 57907 |
| chromosome_1_g_3 | |
| 3610_Streptococcus_pyogenes_strain_NCTC8198_{—} | 57908 |
| chromosome_1_g_4 | |
| 3610_Streptococcus_pyogenes_strain_NCTC8198_{—} | 57909 |
| chromosome_1_g_5 | |
| 3611_Streptococcus_pyogenes_strain_NCTC8198_{—} | 57910 |
| chromosome_1_g_1 | |
| 3611_Streptococcus_pyogenes_strain_NCTC8198_{—} | 57911 |
| chromosome_1_g_2 | |
| 3611_Streptococcus_pyogenes_strain_NCTC8198_{—} | 57912 |
| chromosome_1_g_3 | |
| 3611_Streptococcus_pyogenes_strain_NCTC8198_{—} | 57913 |
| chromosome_1_g_4 | |
| 3611_Streptococcus_pyogenes_strain_NCTC8198_{—} | 57914 |
| chromosome_1_g_5 | |
| 3612_Streptococcus_pyogenes_strain_NCTC8198_{—} | 57915 |
| chromosome_1_g_1 | |
| 3612_Streptococcus_pyogenes_strain_NCTC8198_{—} | 57916 |
| chromosome_1_g_2 | |
| 3612_Streptococcus_pyogenes_strain_NCTC8198_{—} | 57917 |
| chromosome_1_g_3 | |
| 3612_Streptococcus_pyogenes_strain_NCTC8198_{—} | 57918 |
| chromosome_1_g_4 | |
| 3612_Streptococcus_pyogenes_strain_NCTC8198_{—} | 57919 |
| chromosome_1_g_5 | |
| 3613_Streptococcus_pyogenes_strain_NCTC8198_{—} | 57920 |
| chromosome_1_g_1 | |
| 3613_Streptococcus_pyogenes_strain_NCTC8198_{—} | 57921 |
| chromosome_1_g_2 | |
| 3613_Streptococcus_pyogenes_strain_NCTC8198_{—} | 57922 |
| chromosome_1_g_3 | |
| 3613_Streptococcus_pyogenes_strain_NCTC8198_{—} | 57923 |
| chromosome_1_g_4 | |
| 3613_Streptococcus_pyogenes_strain_NCTC8198_{—} | 57924 |
| chromosome_1_g_5 | |
| 3614_Streptococcus_pyogenes_strain_NCTC8198_{—} | 57925 |
| chromosome_1_g_1 | |
| 3614_Streptococcus_pyogenes_strain_NCTC8198_{—} | 57926 |
| chromosome_1_g_2 | |
| 3614_Streptococcus_pyogenes_strain_NCTC8198_{—} | 57927 |
| chromosome_1_g_3 | |
| 3614_Streptococcus_pyogenes_strain_NCTC8198_{—} | 57928 |
| chromosome_1_g_4 | |
| 3614_Streptococcus_pyogenes_strain_NCTC8198_{—} | 57929 |
| chromosome_1_g_5 | |
| 3615_Streptococcus_pyogenes_strain_NCTC8198_{—} | 57930 |
| chromosome_1_g_1 | |
| 3615_Streptococcus_pyogenes_strain_NCTC8198_{—} | 57931 |
| chromosome_1_g_2 | |
| 3615_Streptococcus_pyogenes_strain_NCTC8198_{—} | 57932 |
| chromosome_1_g_3 | |
| 3615_Streptococcus_pyogenes_strain_NCTC8198_{—} | 57933 |
| chromosome_1_g_4 | |
| 3615_Streptococcus_pyogenes_strain_NCTC8198_{—} | 57934 |
| chromosome_1_g_5 | |
| 3616_Streptococcus_pyogenes_strain_NCTC8198_{—} | 57935 |
| chromosome_1_g_1 | |
| 3616_Streptococcus_pyogenes_strain_NCTC8198_{—} | 57936 |
| chromosome_1_g_2 | |
| 3616_Streptococcus_pyogenes_strain_NCTC8198_{—} | 57937 |
| chromosome_1_g_3 | |
| 3616_Streptococcus_pyogenes_strain_NCTC8198_{—} | 57938 |
| chromosome_1_g_4 | |
| 3616_Streptococcus_pyogenes_strain_NCTC8198_{—} | 57939 |
| chromosome_1_g_5 | |
| 3617_Streptococcus_pyogenes_strain_NCTC8198_{—} | 57940 |
| chromosome_1_g_1 | |
| 3617_Streptococcus_pyogenes_strain_NCTC8198_{—} | 57941 |
| chromosome_1_g_2 | |
| 3617_Streptococcus_pyogenes_strain_NCTC8198_{—} | 57942 |
| chromosome_1_g_3 | |
| 3617_Streptococcus_pyogenes_strain_NCTC8198_{—} | 57943 |
| chromosome_1_g_4 | |
| 3617_Streptococcus_pyogenes_strain_NCTC8198_{—} | 57944 |
| chromosome_1_g_5 | |
| 3618_Streptococcus_pyogenes_strain_NCTC8198_{—} | 57945 |
| chromosome_1_g_1 | |
| 3618_Streptococcus_pyogenes_strain_NCTC8198_{—} | 57946 |
| chromosome_1_g_2 | |
| 3618_Streptococcus_pyogenes_strain_NCTC8198_{—} | 57947 |
| chromosome_1_g_3 | |
| 3618_Streptococcus_pyogenes_strain_NCTC8198_{—} | 57948 |
| chromosome_1_g_4 | |
| 3618_Streptococcus_pyogenes_strain_NCTC8198_{—} | 57949 |
| chromosome_1_g_5 | |
| 3619_Streptococcus_pyogenes_strain_NCTC8198_{—} | 57950 |
| chromosome_1_g_1 | |
| 3619_Streptococcus_pyogenes_strain_NCTC8198_{—} | 57951 |
| chromosome_1_g_2 | |
| 3619_Streptococcus_pyogenes_strain_NCTC8198_{—} | 57952 |
| chromosome_1_g_3 | |
| 3619_Streptococcus_pyogenes_strain_NCTC8198_{—} | 57953 |
| chromosome_1_g_4 | |
| 3619_Streptococcus_pyogenes_strain_NCTC8198_{—} | 57954 |
| chromosome_1_g_5 | |
| 3620_Streptococcus_pyogenes_strain_NCTC8198_{—} | 57955 |
| chromosome_1_g_1 | |
| 3620_Streptococcus_pyogenes_strain_NCTC8198_{—} | 57956 |
| chromosome_1_g_2 | |
| 3620_Streptococcus_pyogenes_strain_NCTC8198_{—} | 57957 |
| chromosome_1_g_3 | |
| 3620_Streptococcus_pyogenes_strain_NCTC8198_{—} | 57958 |
| chromosome_1_g_4 | |
| 3620_Streptococcus_pyogenes_strain_NCTC8198_{—} | 57959 |
| chromosome_1_g_5 | |
| 3621_Streptococcus_pyogenes_strain_NCTC8198_{—} | 57960 |
| chromosome_1_g_1 | |
| 3621_Streptococcus_pyogenes_strain_NCTC8198_{—} | 57961 |
| chromosome_1_g_2 | |
| 3621_Streptococcus_pyogenes_strain_NCTC8198_{—} | 57962 |
| chromosome_1_g_3 | |
| 3621_Streptococcus_pyogenes_strain_NCTC8198_{—} | 57963 |
| chromosome_1_g_4 | |
| 3621_Streptococcus_pyogenes_strain_NCTC8198_{—} | 57964 |
| chromosome_1_g_5 | |
| 3622_Streptococcus_pyogenes_strain_NCTC8198_{—} | 57965 |
| chromosome_1_g_1 | |
| 3622_Streptococcus_pyogenes_strain_NCTC8198_{—} | 57966 |
| chromosome_1_g_2 | |
| 3622_Streptococcus_pyogenes_strain_NCTC8198_{—} | 57967 |
| chromosome_1_g_3 | |
| 3622_Streptococcus_pyogenes_strain_NCTC8198_{—} | 57968 |
| chromosome_1_g_4 | |
| 3622_Streptococcus_pyogenes_strain_NCTC8198_{—} | 57969 |
| chromosome_1_g_5 | |
| 3623_Streptococcus_pyogenes_strain_NCTC8198_{—} | 57970 |
| chromosome_1_g_1 | |
| 3623_Streptococcus_pyogenes_strain_NCTC8198_{—} | 57971 |
| chromosome_1_g_2 | |
| 3623_Streptococcus_pyogenes_strain_NCTC8198_{—} | 57972 |
| chromosome_1_g_3 | |
| 3623_Streptococcus_pyogenes_strain_NCTC8198_{—} | 57973 |
| chromosome_1_g_4 | |
| 3623_Streptococcus_pyogenes_strain_NCTC8198_{—} | 57974 |
| chromosome_1_g_5 | |
| 3624_Streptococcus_pyogenes_strain_NCTC8198_{—} | 57975 |
| chromosome_1_g_1 | |
| 3624_Streptococcus_pyogenes_strain_NCTC8198_{—} | 57976 |
| chromosome_1_g_2 | |
| 3624_Streptococcus_pyogenes_strain_NCTC8198_{—} | 57977 |
| chromosome_1_g_3 | |
| 3624_Streptococcus_pyogenes_strain_NCTC8198_{—} | 57978 |
| chromosome_1_g_4 | |
| 3624_Streptococcus_pyogenes_strain_NCTC8198_{—} | 57979 |
| chromosome_1_g_5 | |
| 3625_Streptococcus_pyogenes_strain_NCTC8198_{—} | 57980 |
| chromosome_1_g_1 | |
| 3625_Streptococcus_pyogenes_strain_NCTC8198_{—} | 57981 |
| chromosome_1_g_2 | |
| 3625_Streptococcus_pyogenes_strain_NCTC8198_{—} | 57982 |
| chromosome_1_g_3 | |
| 3625_Streptococcus_pyogenes_strain_NCTC8198_{—} | 57983 |
| chromosome_1_g_4 | |
| 3625_Streptococcus_pyogenes_strain_NCTC8198_{—} | 57984 |
| chromosome_1_g_5 | |
| 3626_Streptococcus_pyogenes_strain_NCTC8198_{—} | 57985 |
| chromosome_1_g_1 | |
| 3626_Streptococcus_pyogenes_strain_NCTC8198_{—} | 57986 |
| chromosome_1_g_2 | |
| 3626_Streptococcus_pyogenes_strain_NCTC8198_{—} | 57987 |
| chromosome_1_g_3 | |
| 3626_Streptococcus_pyogenes_strain_NCTC8198_{—} | 57988 |
| chromosome_1_g_4 | |
| 3626_Streptococcus_pyogenes_strain_NCTC8198_{—} | 57989 |
| chromosome_1_g_5 | |
| 3627_Streptococcus_pyogenes_strain_NCTC8198_{—} | 57990 |
| chromosome_1_g_1 | |
| 3627_Streptococcus_pyogenes_strain_NCTC8198_{—} | 57991 |
| chromosome_1_g_2 | |
| 3627_Streptococcus_pyogenes_strain_NCTC8198_{—} | 57992 |
| chromosome_1_g_3 | |
| 3627_Streptococcus_pyogenes_strain_NCTC8198_{—} | 57993 |
| chromosome_1_g_4 | |
| 3627_Streptococcus_pyogenes_strain_NCTC8198_{—} | 57994 |
| chromosome_1_g_5 | |
| 3628_Streptococcus_pyogenes_strain_NCTC8198_{—} | 57995 |
| chromosome_1_g_1 | |
| 3628_Streptococcus_pyogenes_strain_NCTC8198_{—} | 57996 |
| chromosome_1_g_2 | |
| 3628_Streptococcus_pyogenes_strain_NCTC8198_{—} | 57997 |
| chromosome_1_g_3 | |
| 3628_Streptococcus_pyogenes_strain_NCTC8198_{—} | 57998 |
| chromosome_1_g_4 | |
| 3628_Streptococcus_pyogenes_strain_NCTC8198_{—} | 57999 |
| chromosome_1_g_5 | |
| 3629_Streptococcus_pyogenes_strain_NCTC8198_{—} | 58000 |
| chromosome_1_g_1 | |
| 3629_Streptococcus_pyogenes_strain_NCTC8198_{—} | 58001 |
| chromosome_1_g_2 | |
| 3629_Streptococcus_pyogenes_strain_NCTC8198_{—} | 58002 |
| chromosome_1_g_3 | |
| 3629_Streptococcus_pyogenes_strain_NCTC8198_{—} | 58003 |
| chromosome_1_g_4 | |
| 3629_Streptococcus_pyogenes_strain_NCTC8198_{—} | 58004 |
| chromosome_1_g_5 | |
| 3630_Streptococcus_pyogenes_strain_NCTC8198_{—} | 58005 |
| chromosome_1_g_1 | |
| 3630_Streptococcus_pyogenes_strain_NCTC8198_{—} | 58006 |
| chromosome_1_g_2 | |
| 3630_Streptococcus_pyogenes_strain_NCTC8198_{—} | 58007 |
| chromosome_1_g_3 | |
| 3630_Streptococcus_pyogenes_strain_NCTC8198_{—} | 58008 |
| chromosome_1_g_4 | |
| 3630_Streptococcus_pyogenes_strain_NCTC8198_{—} | 58009 |
| chromosome_1_g_5 | |
| 3631_Streptococcus_pyogenes_strain_NCTC8198_{—} | 58010 |
| chromosome_1_g_1 | |
| 3631_Streptococcus_pyogenes_strain_NCTC8198_{—} | 58011 |
| chromosome_1_g_2 | |
| 3631_Streptococcus_pyogenes_strain_NCTC8198_{—} | 58012 |
| chromosome_1_g_3 | |
| 3631_Streptococcus_pyogenes_strain_NCTC8198_{—} | 58013 |
| chromosome_1_g_4 | |
| 3631_Streptococcus_pyogenes_strain_NCTC8198_{—} | 58014 |
| chromosome_1_g_5 | |
| 3632_Streptococcus_pyogenes_strain_NCTC8198_{—} | 58015 |
| chromosome_1_g_1 | |
| 3632_Streptococcus_pyogenes_strain_NCTC8198_{—} | 58016 |
| chromosome_1_g_2 | |
| 3632_Streptococcus_pyogenes_strain_NCTC8198_{—} | 58017 |
| chromosome_1_g_3 | |
| 3632_Streptococcus_pyogenes_strain_NCTC8198_{—} | 58018 |
| chromosome_1_g_4 | |
| 3632_Streptococcus_pyogenes_strain_NCTC8198_{—} | 58019 |
| chromosome_1_g_5 | |
| 3633_Streptococcus_pyogenes_strain_NCTC8198_{—} | 58020 |
| chromosome_1_g_1 | |
| 3633_Streptococcus_pyogenes_strain_NCTC8198_{—} | 58021 |
| chromosome_1_g_2 | |
| 3633_Streptococcus_pyogenes_strain_NCTC8198_{—} | 58022 |
| chromosome_1_g_3 | |
| 3633_Streptococcus_pyogenes_strain_NCTC8198_{—} | 58023 |
| chromosome_1_g_4 | |
| 3633_Streptococcus_pyogenes_strain_NCTC8198_{—} | 58024 |
| chromosome_1_g_5 | |
| 3634_Streptococcus_pyogenes_strain_NCTC8198_{—} | 58025 |
| chromosome_1_g_1 | |
| 3634_Streptococcus_pyogenes_strain_NCTC8198_{—} | 58026 |
| chromosome_1_g_2 | |
| 3634_Streptococcus_pyogenes_strain_NCTC8198_{—} | 58027 |
| chromosome_1_g_3 | |
| 3634_Streptococcus_pyogenes_strain_NCTC8198_{—} | 58028 |
| chromosome_1_g_4 | |
| 3634_Streptococcus_pyogenes_strain_NCTC8198_{—} | 58029 |
| chromosome_1_g_5 | |
| 3635_Streptococcus_pyogenes_strain_NCTC8198_{—} | 58030 |
| chromosome_1_g_1 | |
| 3635_Streptococcus_pyogenes_strain_NCTC8198_{—} | 58031 |
| chromosome_1_g_2 | |
| 3635_Streptococcus_pyogenes_strain_NCTC8198_{—} | 58032 |
| chromosome_1_g_3 | |
| 3635_Streptococcus_pyogenes_strain_NCTC8198_{—} | 58033 |
| chromosome_1_g_4 | |
| 3635_Streptococcus_pyogenes_strain_NCTC8198_{—} | 58034 |
| chromosome_1_g_5 | |
| 3636_Streptococcus_pyogenes_strain_NCTC8198_{—} | 58035 |
| chromosome_1_g_1 | |
| 3636_Streptococcus_pyogenes_strain_NCTC8198_{—} | 58036 |
| chromosome_1_g_2 | |
| 3636_Streptococcus_pyogenes_strain_NCTC8198_{—} | 58037 |
| chromosome_1_g_3 | |
| 3636_Streptococcus_pyogenes_strain_NCTC8198_{—} | 58038 |
| chromosome_1_g_4 | |
| 3636_Streptococcus_pyogenes_strain_NCTC8198_{—} | 58039 |
| chromosome_1_g_5 | |
| 3637_Streptococcus_pyogenes_strain_NCTC8198_{—} | 58040 |
| chromosome_1_g_1 | |
| 3637_Streptococcus_pyogenes_strain_NCTC8198_{—} | 58041 |
| chromosome_1_g_2 | |
| 3637_Streptococcus_pyogenes_strain_NCTC8198_{—} | 58042 |
| chromosome_1_g_3 | |
| 3637_Streptococcus_pyogenes_strain_NCTC8198_{—} | 58043 |
| chromosome_1_g_4 | |
| 3637_Streptococcus_pyogenes_strain_NCTC8198_{—} | 58044 |
| chromosome_1_g_5 | |
| 3638_Streptococcus_pyogenes_strain_NCTC8198_{—} | 58045 |
| chromosome_1_g_1 | |
| 3638_Streptococcus_pyogenes_strain_NCTC8198_{—} | 58046 |
| chromosome_1_g_2 | |
| 3638_Streptococcus_pyogenes_strain_NCTC8198_{—} | 58047 |
| chromosome_1_g_3 | |
| 3638_Streptococcus_pyogenes_strain_NCTC8198_{—} | 58048 |
| chromosome_1_g_4 | |
| 3638_Streptococcus_pyogenes_strain_NCTC8198_{—} | 58049 |
| chromosome_1_g_5 | |
| 3639_Streptococcus_pyogenes_strain_NCTC8198_{—} | 58050 |
| chromosome_1_g_1 | |
| 3639_Streptococcus_pyogenes_strain_NCTC8198_{—} | 58051 |
| chromosome_1_g_2 | |
| 3639_Streptococcus_pyogenes_strain_NCTC8198_{—} | 58052 |
| chromosome_1_g_3 | |
| 3639_Streptococcus_pyogenes_strain_NCTC8198_{—} | 58053 |
| chromosome_1_g_4 | |
| 3639_Streptococcus_pyogenes_strain_NCTC8198_{—} | 58054 |
| chromosome_1_g_5 | |
| 3640_Streptococcus_pyogenes_strain_NCTC8198_{—} | 58055 |
| chromosome_1_g_1 | |
| 3640_Streptococcus_pyogenes_strain_NCTC8198_{—} | 58056 |
| chromosome_1_g_2 | |
| 3640_Streptococcus_pyogenes_strain_NCTC8198_{—} | 58057 |
| chromosome_1_g_3 | |
| 3640_Streptococcus_pyogenes_strain_NCTC8198_{—} | 58058 |
| chromosome_1_g_4 | |
| 3640_Streptococcus_pyogenes_strain_NCTC8198_{—} | 58059 |
| chromosome_1_g_5 | |
| 3641_Streptococcus_pyogenes_strain_NCTC8198_{—} | 58060 |
| chromosome_1_g_1 | |
| 3641_Streptococcus_pyogenes_strain_NCTC8198_{—} | 58061 |
| chromosome_1_g_2 | |
| 3641_Streptococcus_pyogenes_strain_NCTC8198_{—} | 58062 |
| chromosome_1_g_3 | |
| 3641_Streptococcus_pyogenes_strain_NCTC8198_{—} | 58063 |
| chromosome_1_g_4 | |
| 3641_Streptococcus_pyogenes_strain_NCTC8198_{—} | 58064 |
| chromosome_1_g_5 | |
| 3642_Streptococcus_pyogenes_strain_NCTC8198_{—} | 58065 |
| chromosome_1_g_1 | |
| 3642_Streptococcus_pyogenes_strain_NCTC8198_{—} | 58066 |
| chromosome_1_g_2 | |
| 3642_Streptococcus_pyogenes_strain_NCTC8198_{—} | 58067 |
| chromosome_1_g_3 | |
| 3642_Streptococcus_pyogenes_strain_NCTC8198_{—} | 58068 |
| chromosome_1_g_4 | |
| 3642_Streptococcus_pyogenes_strain_NCTC8198_{—} | 58069 |
| chromosome_1_g_5 | |
| 3643_Streptococcus_pyogenes_strain_NCTC8198_{—} | 58070 |
| chromosome_1_g_1 | |
| 3643_Streptococcus_pyogenes_strain_NCTC8198_{—} | 58071 |
| chromosome_1_g_2 | |
| 3643_Streptococcus_pyogenes_strain_NCTC8198_{—} | 58072 |
| chromosome_1_g_3 | |
| 3643_Streptococcus_pyogenes_strain_NCTC8198_{—} | 58073 |
| chromosome_1_g_4 | |
| 3643_Streptococcus_pyogenes_strain_NCTC8198_{—} | 58074 |
| chromosome_1_g_5 | |
| 3644_Streptococcus_pyogenes_strain_NCTC8198_{—} | 58075 |
| chromosome_1_g_1 | |
| 3644_Streptococcus_pyogenes_strain_NCTC8198_{—} | 58076 |
| chromosome_1_g_2 | |
| 3644_Streptococcus_pyogenes_strain_NCTC8198_{—} | 58077 |
| chromosome_1_g_3 | |
| 3644_Streptococcus_pyogenes_strain_NCTC8198_{—} | 58078 |
| chromosome_1_g_4 | |
| 3644_Streptococcus_pyogenes_strain_NCTC8198_{—} | 58079 |
| chromosome_1_g_5 | |
| 3645_Streptococcus_pyogenes_strain_NCTC8198_{—} | 58080 |
| chromosome_1_g_1 | |
| 3645_Streptococcus_pyogenes_strain_NCTC8198_{—} | 58081 |
| chromosome_1_g_2 | |
| 3645_Streptococcus_pyogenes_strain_NCTC8198_{—} | 58082 |
| chromosome_1_g_3 | |
| 3645_Streptococcus_pyogenes_strain_NCTC8198_{—} | 58083 |
| chromosome_1_g_4 | |
| 3645_Streptococcus_pyogenes_strain_NCTC8198_{—} | 58084 |
| chromosome_1_g_5 | |
| 3646_Streptococcus_pyogenes_strain_NCTC8198_{—} | 58085 |
| chromosome_1_g_1 | |
| 3646_Streptococcus_pyogenes_strain_NCTC8198_{—} | 58086 |
| chromosome_1_g_2 | |
| 3646_Streptococcus_pyogenes_strain_NCTC8198_{—} | 58087 |
| chromosome_1_g_3 | |
| 3646_Streptococcus_pyogenes_strain_NCTC8198_{—} | 58088 |
| chromosome_1_g_4 | |
| 3646_Streptococcus_pyogenes_strain_NCTC8198_{—} | 58089 |
| chromosome_1_g_5 | |
| 3647_Streptococcus_pyogenes_strain_NCTC8198_{—} | 58090 |
| chromosome_1_g_1 | |
| 3647_Streptococcus_pyogenes_strain_NCTC8198_{—} | 58091 |
| chromosome_1_g_2 | |
| 3647_Streptococcus_pyogenes_strain_NCTC8198_{—} | 58092 |
| chromosome_1_g_3 | |
| 3647_Streptococcus_pyogenes_strain_NCTC8198_{—} | 58093 |
| chromosome_1_g_4 | |
| 3647_Streptococcus_pyogenes_strain_NCTC8198_{—} | 58094 |
| chromosome_1_g_5 | |
| 3648_Streptococcus_pyogenes_strain_NCTC8198_{—} | 58095 |
| chromosome_1_g_1 | |
| 3648_Streptococcus_pyogenes_strain_NCTC8198_{—} | 58096 |
| chromosome_1_g_2 | |
| 3648_Streptococcus_pyogenes_strain_NCTC8198_{—} | 58097 |
| chromosome_1_g_3 | |
| 3648_Streptococcus_pyogenes_strain_NCTC8198_{—} | 58098 |
| chromosome_1_g_4 | |
| 3648_Streptococcus_pyogenes_strain_NCTC8198_{—} | 58099 |
| chromosome_1_g_5 | |
| 3649_Streptococcus_pyogenes_strain_NCTC8198_{—} | 58100 |
| chromosome_1_g_1 | |
| 3649_Streptococcus_pyogenes_strain_NCTC8198_{—} | 58101 |
| chromosome_1_g_2 | |
| 3649_Streptococcus_pyogenes_strain_NCTC8198_{—} | 58102 |
| chromosome_1_g_3 | |
| 3649_Streptococcus_pyogenes_strain_NCTC8198_{—} | 58103 |
| chromosome_1_g_4 | |
| 3649_Streptococcus_pyogenes_strain_NCTC8198_{—} | 58104 |
| chromosome_1_g_5 | |
| 3650_Streptococcus_pyogenes_strain_NCTC8198_{—} | 58105 |
| chromosome_1_g_1 | |
| 3650_Streptococcus_pyogenes_strain_NCTC8198_{—} | 58106 |
| chromosome_1_g_2 | |
| 3650_Streptococcus_pyogenes_strain_NCTC8198_{—} | 58107 |
| chromosome_1_g_3 | |
| 3650_Streptococcus_pyogenes_strain_NCTC8198_{—} | 58108 |
| chromosome_1_g_4 | |
| 3650_Streptococcus_pyogenes_strain_NCTC8198_{—} | 58109 |
| chromosome_1_g_5 | |
| 3651_Streptococcus_pyogenes_strain_NCTC8198_{—} | 58110 |
| chromosome_1_g_1 | |
| 3651_Streptococcus_pyogenes_strain_NCTC8198_{—} | 58111 |
| chromosome_1_g_2 | |
| 3651_Streptococcus_pyogenes_strain_NCTC8198_{—} | 58112 |
| chromosome_1_g_3 | |
| 3651_Streptococcus_pyogenes_strain_NCTC8198_{—} | 58113 |
| chromosome_1_g_4 | |
| 3651_Streptococcus_pyogenes_strain_NCTC8198_{—} | 58114 |
| chromosome_1_g_5 | |
| 3652_Streptococcus_pyogenes_strain_NCTC8198_{—} | 58115 |
| chromosome_1_g_1 | |
| 3652_Streptococcus_pyogenes_strain_NCTC8198_{—} | 58116 |
| chromosome_1_g_2 | |
| 3652_Streptococcus_pyogenes_strain_NCTC8198_{—} | 58117 |
| chromosome_1_g_3 | |
| 3652_Streptococcus_pyogenes_strain_NCTC8198_{—} | 58118 |
| chromosome_1_g_4 | |
| 3652_Streptococcus_pyogenes_strain_NCTC8198_{—} | 58119 |
| chromosome_1_g_5 | |
| 3653_Streptococcus_pyogenes_strain_NCTC8198_{—} | 58120 |
| chromosome_1_g_1 | |
| 3653_Streptococcus_pyogenes_strain_NCTC8198_{—} | 58121 |
| chromosome_1_g_2 | |
| 3653_Streptococcus_pyogenes_strain_NCTC8198_{—} | 58122 |
| chromosome_1_g_3 | |
| 3653_Streptococcus_pyogenes_strain_NCTC8198_{—} | 58123 |
| chromosome_1_g_4 | |
| 3653_Streptococcus_pyogenes_strain_NCTC8198_{—} | 58124 |
| chromosome_1_g_5 | |
| 3654_Streptococcus_pyogenes_strain_NCTC8198_{—} | 58125 |
| chromosome_1_g_1 | |
| 3654_Streptococcus_pyogenes_strain_NCTC8198_{—} | 58126 |
| chromosome_1_g_2 | |
| 3654_Streptococcus_pyogenes_strain_NCTC8198_{—} | 58127 |
| chromosome_1_g_3 | |
| 3654_Streptococcus_pyogenes_strain_NCTC8198_{—} | 58128 |
| chromosome_1_g_4 | |
| 3654_Streptococcus_pyogenes_strain_NCTC8198_{—} | 58129 |
| chromosome_1_g_5 | |
| 3655_Streptococcus_pyogenes_strain_NCTC8198_{—} | 58130 |
| chromosome_1_g_1 | |
| 3655_Streptococcus_pyogenes_strain_NCTC8198_{—} | 58131 |
| chromosome_1_g_2 | |
| 3655_Streptococcus_pyogenes_strain_NCTC8198_{—} | 58132 |
| chromosome_1_g_3 | |
| 3655_Streptococcus_pyogenes_strain_NCTC8198_{—} | 58133 |
| chromosome_1_g_4 | |
| 3655_Streptococcus_pyogenes_strain_NCTC8198_{—} | 58134 |
| chromosome_1_g_5 | |
| 3656_Streptococcus_pyogenes_strain_NCTC8198_{—} | 58135 |
| chromosome_1_g_1 | |
| 3656_Streptococcus_pyogenes_strain_NCTC8198_{—} | 58136 |
| chromosome_1_g_2 | |
| 3656_Streptococcus_pyogenes_strain_NCTC8198_{—} | 58137 |
| chromosome_1_g_3 | |
| 3656_Streptococcus_pyogenes_strain_NCTC8198_{—} | 58138 |
| chromosome_1_g_4 | |
| 3656_Streptococcus_pyogenes_strain_NCTC8198_{—} | 58139 |
| chromosome_1_g_5 | |
| 3657_Streptococcus_pyogenes_strain_NCTC8198_{—} | 58140 |
| chromosome_1_g_1 | |
| 3657_Streptococcus_pyogenes_strain_NCTC8198_{—} | 58141 |
| chromosome_1_g_2 | |
| 3657_Streptococcus_pyogenes_strain_NCTC8198_{—} | 58142 |
| chromosome_1_g_3 | |
| 3657_Streptococcus_pyogenes_strain_NCTC8198_{—} | 58143 |
| chromosome_1_g_4 | |
| 3657_Streptococcus_pyogenes_strain_NCTC8198_{—} | 58144 |
| chromosome_1_g_5 | |
| 3658_Streptococcus_pyogenes_strain_NCTC8198_{—} | 58145 |
| chromosome_1_g_1 | |
| 3658_Streptococcus_pyogenes_strain_NCTC8198_{—} | 58146 |
| chromosome_1_g_2 | |
| 3658_Streptococcus_pyogenes_strain_NCTC8198_{—} | 58147 |
| chromosome_1_g_3 | |
| 3658_Streptococcus_pyogenes_strain_NCTC8198_{—} | 58148 |
| chromosome_1_g_4 | |
| 3658_Streptococcus_pyogenes_strain_NCTC8198_{—} | 58149 |
| chromosome_1_g_5 | |
| 3659_Streptococcus_pyogenes_strain_NCTC8198_{—} | 58150 |
| chromosome_1_g_1 | |
| 3659_Streptococcus_pyogenes_strain_NCTC8198_{—} | 58151 |
| chromosome_1_g_2 | |
| 3659_Streptococcus_pyogenes_strain_NCTC8198_{—} | 58152 |
| chromosome_1_g_3 | |
| 3659_Streptococcus_pyogenes_strain_NCTC8198_{—} | 58153 |
| chromosome_1_g_4 | |
| 3659_Streptococcus_pyogenes_strain_NCTC8198_{—} | 58154 |
| chromosome_1_g_5 | |
| 3660_Streptococcus_pyogenes_strain_NCTC8198_{—} | 58155 |
| chromosome_1_g_1 | |
| 3660_Streptococcus_pyogenes_strain_NCTC8198_{—} | 58156 |
| chromosome_1_g_2 | |
| 3660_Streptococcus_pyogenes_strain_NCTC8198_{—} | 58157 |
| chromosome_1_g_3 | |
| 3660_Streptococcus_pyogenes_strain_NCTC8198_{—} | 58158 |
| chromosome_1_g_4 | |
| 3660_Streptococcus_pyogenes_strain_NCTC8198_{—} | 58159 |
| chromosome_1_g_5 | |
| 3661_Streptococcus_pyogenes_strain_NCTC8198_{—} | 58160 |
| chromosome_1_g_1 | |
| 3661_Streptococcus_pyogenes_strain_NCTC8198_{—} | 58161 |
| chromosome_1_g_2 | |
| 3661_Streptococcus_pyogenes_strain_NCTC8198_{—} | 58162 |
| chromosome_1_g_3 | |
| 3661_Streptococcus_pyogenes_strain_NCTC8198_{—} | 58163 |
| chromosome_1_g_4 | |
| 3661_Streptococcus_pyogenes_strain_NCTC8198_{—} | 58164 |
| chromosome_1_g_5 | |
| 3662_Streptococcus_pyogenes_strain_NCTC8198_{—} | 58165 |
| chromosome_1_g_1 | |
| 3662_Streptococcus_pyogenes_strain_NCTC8198_{—} | 58166 |
| chromosome_1_g_2 | |
| 3662_Streptococcus_pyogenes_strain_NCTC8198_{—} | 58167 |
| chromosome_1_g_3 | |
| 3662_Streptococcus_pyogenes_strain_NCTC8198_{—} | 58168 |
| chromosome_1_g_4 | |
| 3662_Streptococcus_pyogenes_strain_NCTC8198_{—} | 58169 |
| chromosome_1_g_5 | |
| 3663_Streptococcus_pyogenes_strain_NCTC8198_{—} | 58170 |
| chromosome_1_g_1 | |
| 3663_Streptococcus_pyogenes_strain_NCTC8198_{—} | 58171 |
| chromosome_1_g_2 | |
| 3663_Streptococcus_pyogenes_strain_NCTC8198_{—} | 58172 |
| chromosome_1_g_3 | |
| 3663_Streptococcus_pyogenes_strain_NCTC8198_{—} | 58173 |
| chromosome_1_g_4 | |
| 3663_Streptococcus_pyogenes_strain_NCTC8198_{—} | 58174 |
| chromosome_1_g_5 | |
| 3664_Streptococcus_pyogenes_strain_NCTC8198_{—} | 58175 |
| chromosome_1_g_1 | |
| 3664_Streptococcus_pyogenes_strain_NCTC8198_{—} | 58176 |
| chromosome_1_g_2 | |
| 3664_Streptococcus_pyogenes_strain_NCTC8198_{—} | 58177 |
| chromosome_1_g_3 | |
| 3664_Streptococcus_pyogenes_strain_NCTC8198_{—} | 58178 |
| chromosome_1_g_4 | |
| 3664_Streptococcus_pyogenes_strain_NCTC8198_{—} | 58179 |
| chromosome_1_g_5 | |
| 3665_Streptococcus_pyogenes_strain_NCTC8198_{—} | 58180 |
| chromosome_1_g_1 | |
| 3665_Streptococcus_pyogenes_strain_NCTC8198_{—} | 58181 |
| chromosome_1_g_2 | |
| 3665_Streptococcus_pyogenes_strain_NCTC8198_{—} | 58182 |
| chromosome_1_g_3 | |
| 3665_Streptococcus_pyogenes_strain_NCTC8198_{—} | 58183 |
| chromosome_1_g_4 | |
| 3665_Streptococcus_pyogenes_strain_NCTC8198_{—} | 58184 |
| chromosome_1_g_5 | |
| 3666_Streptococcus_pyogenes_strain_NCTC8198_{—} | 58185 |
| chromosome_1_g_1 | |
| 3666_Streptococcus_pyogenes_strain_NCTC8198_{—} | 58186 |
| chromosome_1_g_2 | |
| 3666_Streptococcus_pyogenes_strain_NCTC8198_{—} | 58187 |
| chromosome_1_g_3 | |
| 3666_Streptococcus_pyogenes_strain_NCTC8198_{—} | 58188 |
| chromosome_1_g_4 | |
| 3666_Streptococcus_pyogenes_strain_NCTC8198_{—} | 58189 |
| chromosome_1_g_5 | |
| 3667_Streptococcus_pyogenes_strain_NCTC8198_{—} | 58190 |
| chromosome_1_g_1 | |
| 3667_Streptococcus_pyogenes_strain_NCTC8198_{—} | 58191 |
| chromosome_1_g_2 | |
| 3667_Streptococcus_pyogenes_strain_NCTC8198_{—} | 58192 |
| chromosome_1_g_3 | |
| 3667_Streptococcus_pyogenes_strain_NCTC8198_{—} | 58193 |
| chromosome_1_g_4 | |
| 3667_Streptococcus_pyogenes_strain_NCTC8198_{—} | 58194 |
| chromosome_1_g_5 | |
| 3668_Streptococcus_pyogenes_strain_NCTC8198_{—} | 58195 |
| chromosome_1_g_1 | |
| 3668_Streptococcus_pyogenes_strain_NCTC8198_{—} | 58196 |
| chromosome_1_g_2 | |
| 3668_Streptococcus_pyogenes_strain_NCTC8198_{—} | 58197 |
| chromosome_1_g_3 | |
| 3668_Streptococcus_pyogenes_strain_NCTC8198_{—} | 58198 |
| chromosome_1_g_4 | |
| 3668_Streptococcus_pyogenes_strain_NCTC8198_{—} | 58199 |
| chromosome_1_g_5 | |
| 3669_Streptococcus_pyogenes_strain_NCTC8198_{—} | 58200 |
| chromosome_1_g_1 | |
| 3669_Streptococcus_pyogenes_strain_NCTC8198_{—} | 58201 |
| chromosome_1_g_2 | |
| 3669_Streptococcus_pyogenes_strain_NCTC8198_{—} | 58202 |
| chromosome_1_g_3 | |
| 3669_Streptococcus_pyogenes_strain_NCTC8198_{—} | 58203 |
| chromosome_1_g_4 | |
| 3669_Streptococcus_pyogenes_strain_NCTC8198_{—} | 58204 |
| chromosome_1_g_5 | |
| 3670_Streptococcus_pyogenes_strain_NCTC8198_{—} | 58205 |
| chromosome_1_g_1 | |
| 3670_Streptococcus_pyogenes_strain_NCTC8198_{—} | 58206 |
| chromosome_1_g_2 | |
| 3670_Streptococcus_pyogenes_strain_NCTC8198_{—} | 58207 |
| chromosome_1_g_3 | |
| 3670_Streptococcus_pyogenes_strain_NCTC8198_{—} | 58208 |
| chromosome_1_g_4 | |
| 3670_Streptococcus_pyogenes_strain_NCTC8198_{—} | 58209 |
| chromosome_1_g_5 | |
| 3671_Streptococcus_pyogenes_strain_NCTC8198_{—} | 58210 |
| chromosome_1_g_1 | |
| 3671_Streptococcus_pyogenes_strain_NCTC8198_{—} | 58211 |
| chromosome_1_g_2 | |
| 3671_Streptococcus_pyogenes_strain_NCTC8198_{—} | 58212 |
| chromosome_1_g_3 | |
| 3671_Streptococcus_pyogenes_strain_NCTC8198_{—} | 58213 |
| chromosome_1_g_4 | |
| 3671_Streptococcus_pyogenes_strain_NCTC8198_{—} | 58214 |
| chromosome_1_g_5 | |
| 3672_Hepatitis_E_virus_rat/R63/DEU/2009_g_1 | 58215 |
| 3672_Hepatitis_E_virus_rat/R63/DEU/2009_g_2 | 58216 |
| 3672_Hepatitis_E_virus_rat/R63/DEU/2009_g_3 | 58217 |
| 3672_Hepatitis_E_virus_rat/R63/DEU/2009_g_4 | 58218 |
| 3672_Hepatitis_E_virus_rat/R63/DEU/2009_g_5 | 58219 |
| 3673_Hepatitis_E_virus_rat/R63/DEU/2009_g_1 | 58220 |
| 3673_Hepatitis_E_virus_rat/R63/DEU/2009_g_2 | 58221 |
| 3673_Hepatitis_E_virus_rat/R63/DEU/2009_g_3 | 58222 |
| 3673_Hepatitis_E_virus_rat/R63/DEU/2009_g_4 | 58223 |
| 3673_Hepatitis_E_virus_rat/R63/DEU/2009_g_5 | 58224 |
| 3674_Hepatitis_E_virus_rat/R63/DEU/2009_g_1 | 58225 |
| 3674_Hepatitis_E_virus_rat/R63/DEU/2009_g_2 | 58226 |
| 3674_Hepatitis_E_virus_rat/R63/DEU/2009_g_3 | 58227 |
| 3674_Hepatitis_E_virus_rat/R63/DEU/2009_g_4 | 58228 |
| 3674_Hepatitis_E_virus_rat/R63/DEU/2009_g_5 | 58229 |
| 3675_Hepatitis_E_virus_rat/R63/DEU/2009_g_1 | 58230 |
| 3675_Hepatitis_E_virus_rat/R63/DEU/2009_g_2 | 58231 |
| 3675_Hepatitis_E_virus_rat/R63/DEU/2009_g_3 | 58232 |
| 3675_Hepatitis_E_virus_rat/R63/DEU/2009_g_4 | 58233 |
| 3675_Hepatitis_E_virus_rat/R63/DEU/2009_g_5 | 58234 |
| 3676_Hepatitis_E_virus_rat/R63/DEU/2009_g_1 | 58235 |
| 3676_Hepatitis_E_virus_rat/R63/DEU/2009_g_2 | 58236 |
| 3676_Hepatitis_E_virus_rat/R63/DEU/2009_g_3 | 58237 |
| 3676_Hepatitis_E_virus_rat/R63/DEU/2009_g_4 | 58238 |
| 3676_Hepatitis_E_virus_rat/R63/DEU/2009_g_5 | 58239 |
| 3677_Hepatitis_E_virus_rat/R63/DEU/2009_g_1 | 58240 |
| 3677_Hepatitis_E_virus_rat/R63/DEU/2009_g_2 | 58241 |
| 3677_Hepatitis_E_virus_rat/R63/DEU/2009_g_3 | 58242 |
| 3677_Hepatitis_E_virus_rat/R63/DEU/2009_g_4 | 58243 |
| 3677_Hepatitis_E_virus_rat/R63/DEU/2009_g_5 | 58244 |
| 3678_Hepatitis_E_virus_rat/R63/DEU/2009_g_1 | 58245 |
| 3678_Hepatitis_E_virus_rat/R63/DEU/2009_g_2 | 58246 |
| 3678_Hepatitis_E_virus_rat/R63/DEU/2009_g_3 | 58247 |
| 3678_Hepatitis_E_virus_rat/R63/DEU/2009_g_4 | 58248 |
| 3678_Hepatitis_E_virus_rat/R63/DEU/2009_g_5 | 58249 |
| 3679_Hepatitis_E_virus_rat/R63/DEU/2009_g_1 | 58250 |
| 3679_Hepatitis_E_virus_rat/R63/DEU/2009_g_2 | 58251 |
| 3679_Hepatitis_E_virus_rat/R63/DEU/2009_g_3 | 58252 |
| 3679_Hepatitis_E_virus_rat/R63/DEU/2009_g_4 | 58253 |
| 3679_Hepatitis_E_virus_rat/R63/DEU/2009_g_5 | 58254 |
| 3680_Hepatitis_E_virus_rat/R63/DEU/2009_g_1 | 58255 |
| 3680_Hepatitis_E_virus_rat/R63/DEU/2009_g_2 | 58256 |
| 3680_Hepatitis_E_virus_rat/R63/DEU/2009_g_3 | 58257 |
| 3680_Hepatitis_E_virus_rat/R63/DEU/2009_g_4 | 58258 |
| 3680_Hepatitis_E_virus_rat/R63/DEU/2009_g_5 | 58259 |
| 3681_Hepatitis_E_virus_rat/R63/DEU/2009_g_1 | 58260 |
| 3681_Hepatitis_E_virus_rat/R63/DEU/2009_g_2 | 58261 |
| 3681_Hepatitis_E_virus_rat/R63/DEU/2009_g_3 | 58262 |
| 3681_Hepatitis_E_virus_rat/R63/DEU/2009_g_4 | 58263 |
| 3682_Hepatitis_E_virus_rat/R63/DEU/2009_g_1 | 58264 |
| 3682_Hepatitis_E_virus_rat/R63/DEU/2009_g_2 | 58265 |
| 3682_Hepatitis_E_virus_rat/R63/DEU/2009_g_3 | 58266 |
| 3682_Hepatitis_E_virus_rat/R63/DEU/2009_g_4 | 58267 |
| 3682_Hepatitis_E_virus_rat/R63/DEU/2009_g_5 | 58268 |
| 3683_Hepatitis_E_virus_rat/R63/DEU/2009_g_1 | 58269 |
| 3683_Hepatitis_E_virus_rat/R63/DEU/2009_g_2 | 58270 |
| 3683_Hepatitis_E_virus_rat/R63/DEU/2009_g_3 | 58271 |
| 3683_Hepatitis_E_virus_rat/R63/DEU/2009_g_4 | 58272 |
| 3683_Hepatitis_E_virus_rat/R63/DEU/2009_g_5 | 58273 |
| 3684_Hepatitis_E_virus_rat/R63/DEU/2009_g_1 | 58274 |
| 3684_Hepatitis_E_virus_rat/R63/DEU/2009_g_2 | 58275 |
| 3684_Hepatitis_E_virus_rat/R63/DEU/2009_g_3 | 58276 |
| 3684_Hepatitis_E_virus_rat/R63/DEU/2009_g_4 | 58277 |
| 3685_Hepatitis_E_virus_rat/R63/DEU/2009_g_1 | 58278 |
| 3685_Hepatitis_E_virus_rat/R63/DEU/2009_g_2 | 58279 |
| 3685_Hepatitis_E_virus_rat/R63/DEU/2009_g_3 | 58280 |
| 3685_Hepatitis_E_virus_rat/R63/DEU/2009_g_4 | 58281 |
| 3685_Hepatitis_E_virus_rat/R63/DEU/2009_g_5 | 58282 |
| 3686_Hepatitis_E_virus_rat/R63/DEU/2009_g_1 | 58283 |
| 3686_Hepatitis_E_virus_rat/R63/DEU/2009_g_2 | 58284 |
| 3686_Hepatitis_E_virus_rat/R63/DEU/2009_g_3 | 58285 |
| 3686_Hepatitis_E_virus_rat/R63/DEU/2009_g_4 | 58286 |
| 3686_Hepatitis_E_virus_rat/R63/DEU/2009_g_5 | 58287 |
| 3687_Hepatitis_E_virus_rat/R63/DEU/2009_g_1 | 58288 |
| 3687_Hepatitis_E_virus_rat/R63/DEU/2009_g_2 | 58289 |
| 3687_Hepatitis_E_virus_rat/R63/DEU/2009_g_3 | 58290 |
| 3687_Hepatitis_E_virus_rat/R63/DEU/2009_g_4 | 58291 |
| 3687_Hepatitis_E_virus_rat/R63/DEU/2009_g_5 | 58292 |
| 3688_Hepatitis_E_virus_rat/R63/DEU/2009_g_1 | 58293 |
| 3688_Hepatitis_E_virus_rat/R63/DEU/2009_g_2 | 58294 |
| 3688_Hepatitis_E_virus_rat/R63/DEU/2009_g_3 | 58295 |
| 3688_Hepatitis_E_virus_rat/R63/DEU/2009_g_4 | 58296 |
| 3688_Hepatitis_E_virus_rat/R63/DEU/2009_g_5 | 58297 |
| 3689_Hepatitis_E_virus_rat/R63/DEU/2009_g_1 | 58298 |
| 3689_Hepatitis_E_virus_rat/R63/DEU/2009_g_2 | 58299 |
| 3689_Hepatitis_E_virus_rat/R63/DEU/2009_g_3 | 58300 |
| 3689_Hepatitis_E_virus_rat/R63/DEU/2009_g_4 | 58301 |
| 3689_Hepatitis_E_virus_rat/R63/DEU/2009_g_5 | 58302 |
| 3690_Hepatitis_E_virus_rat/R63/DEU/2009_g_1 | 58303 |
| 3690_Hepatitis_E_virus_rat/R63/DEU/2009_g_2 | 58304 |
| 3690_Hepatitis_E_virus_rat/R63/DEU/2009_g_3 | 58305 |
| 3690_Hepatitis_E_virus_rat/R63/DEU/2009_g_4 | 58306 |
| 3690_Hepatitis_E_virus_rat/R63/DEU/2009_g_5 | 58307 |
| 3691_Hepatitis_E_virus_rat/R63/DEU/2009_g_1 | 58308 |
| 3691_Hepatitis_E_virus_rat/R63/DEU/2009_g_2 | 58309 |
| 3691_Hepatitis_E_virus_rat/R63/DEU/2009_g_3 | 58310 |
| 3691_Hepatitis_E_virus_rat/R63/DEU/2009_g_4 | 58311 |
| 3691_Hepatitis_E_virus_rat/R63/DEU/2009_g_5 | 58312 |
| 3692_Hepatitis_E_virus_rat/R63/DEU/2009_g_1 | 58313 |
| 3692_Hepatitis_E_virus_rat/R63/DEU/2009_g_2 | 58314 |
| 3692_Hepatitis_E_virus_rat/R63/DEU/2009_g_3 | 58315 |
| 3693_Hepatitis_E_virus_rat/R63/DEU/2009_g_1 | 58316 |
| 3693_Hepatitis_E_virus_rat/R63/DEU/2009_g_2 | 58317 |
| 3693_Hepatitis_E_virus_rat/R63/DEU/2009_g_3 | 58318 |
| 3693_Hepatitis_E_virus_rat/R63/DEU/2009_g_4 | 58319 |
| 3693_Hepatitis_E_virus_rat/R63/DEU/2009_g_5 | 58320 |
| 3694_Human_Coronavirus_NL63_g_1 | 58321 |
| 3694_Human_Coronavirus_NL63_g_2 | 58322 |
| 3694_Human_Coronavirus_NL63_g_3 | 58323 |
| 3694_Human_Coronavirus_NL63_g_4 | 58324 |
| 3694_Human_Coronavirus_NL63_g_5 | 58325 |
| 3695_Human_Coronavirus_NL63_g_1 | 58326 |
| 3695_Human_Coronavirus_NL63_g_2 | 58327 |
| 3695_Human_Coronavirus_NL63_g_3 | 58328 |
| 3695_Human_Coronavirus_NL63_g_4 | 58329 |
| 3695_Human_Coronavirus_NL63_g_5 | 58330 |
| 3696_Human_Coronavirus_NL63_g_1 | 58331 |
| 3696_Human_Coronavirus_NL63_g_2 | 58332 |
| 3696_Human_Coronavirus_NL63_g_3 | 58333 |
| 3696_Human_Coronavirus_NL63_g_4 | 58334 |
| 3696_Human_Coronavirus_NL63_g_5 | 58335 |
| 3697_Human_Coronavirus_NL63_g_1 | 58336 |
| 3697_Human_Coronavirus_NL63_g_2 | 58337 |
| 3697_Human_Coronavirus_NL63_g_3 | 58338 |
| 3697_Human_Coronavirus_NL63_g_4 | 58339 |
| 3697_Human_Coronavirus_NL63_g_5 | 58340 |
| 3698_Human_Coronavirus_NL63_g_1 | 58341 |
| 3698_Human_Coronavirus_NL63_g_2 | 58342 |
| 3698_Human_Coronavirus_NL63_g_3 | 58343 |
| 3698_Human_Coronavirus_NL63_g_4 | 58344 |
| 3698_Human_Coronavirus_NL63_g_5 | 58345 |
| 3699_Human_Coronavirus_NL63_g_1 | 58346 |
| 3699_Human_Coronavirus_NL63_g_2 | 58347 |
| 3699_Human_Coronavirus_NL63_g_3 | 58348 |
| 3699_Human_Coronavirus_NL63_g_4 | 58349 |
| 3699_Human_Coronavirus_NL63_g_5 | 58350 |
| 3700_Human_Coronavirus_NL63_g_1 | 58351 |
| 3700_Human_Coronavirus_NL63_g_2 | 58352 |
| 3700_Human_Coronavirus_NL63_g_3 | 58353 |
| 3700_Human_Coronavirus_NL63_g_4 | 58354 |
| 3700_Human_Coronavirus_NL63_g_5 | 58355 |
| 3701_Human_Coronavirus_NL63_g_1 | 58356 |
| 3701_Human_Coronavirus_NL63_g_2 | 58357 |
| 3701_Human_Coronavirus_NL63_g_3 | 58358 |
| 3701_Human_Coronavirus_NL63_g_4 | 58359 |
| 3701_Human_Coronavirus_NL63_g_5 | 58360 |
| 3702_Human_Coronavirus_NL63_g_1 | 58361 |
| 3702_Human_Coronavirus_NL63_g_2 | 58362 |
| 3702_Human_Coronavirus_NL63_g_3 | 58363 |
| 3702_Human_Coronavirus_NL63_g_4 | 58364 |
| 3702_Human_Coronavirus_NL63_g_5 | 58365 |
| 3703_Human_Coronavirus_NL63_g_1 | 58366 |
| 3703_Human_Coronavirus_NL63_g_2 | 58367 |
| 3703_Human_Coronavirus_NL63_g_3 | 58368 |
| 3703_Human_Coronavirus_NL63_g_4 | 58369 |
| 3703_Human_Coronavirus_NL63_g_5 | 58370 |
| 3704_Human_Coronavirus_NL63_g_1 | 58371 |
| 3704_Human_Coronavirus_NL63_g_2 | 58372 |
| 3704_Human_Coronavirus_NL63_g_3 | 58373 |
| 3704_Human_Coronavirus_NL63_g_4 | 58374 |
| 3704_Human_Coronavirus_NL63_g_5 | 58375 |
| 3705_Human_Coronavirus_NL63_g_1 | 58376 |
| 3705_Human_Coronavirus_NL63_g_2 | 58377 |
| 3705_Human_Coronavirus_NL63_g_3 | 58378 |
| 3705_Human_Coronavirus_NL63_g_4 | 58379 |
| 3705_Human_Coronavirus_NL63_g_5 | 58380 |
| 3706_Human_Coronavirus_NL63_g_1 | 58381 |
| 3706_Human_Coronavirus_NL63_g_2 | 58382 |
| 3706_Human_Coronavirus_NL63_g_3 | 58383 |
| 3706_Human_Coronavirus_NL63_g_4 | 58384 |
| 3706_Human_Coronavirus_NL63_g_5 | 58385 |
| 3707_Human_Coronavirus_NL63_g_1 | 58386 |
| 3707_Human_Coronavirus_NL63_g_2 | 58387 |
| 3707_Human_Coronavirus_NL63_g_3 | 58388 |
| 3707_Human_Coronavirus_NL63_g_4 | 58389 |
| 3707_Human_Coronavirus_NL63_g_5 | 58390 |
| 3708_Human_Coronavirus_NL63_g_1 | 58391 |
| 3708_Human_Coronavirus_NL63_g_2 | 58392 |
| 3708_Human_Coronavirus_NL63_g_3 | 58393 |
| 3708_Human_Coronavirus_NL63_g_4 | 58394 |
| 3708_Human_Coronavirus_NL63_g_5 | 58395 |
| 3709_Human_Coronavirus_NL63_g_1 | 58396 |
| 3709_Human_Coronavirus_NL63_g_2 | 58397 |
| 3709_Human_Coronavirus_NL63_g_3 | 58398 |
| 3709_Human_Coronavirus_NL63_g_4 | 58399 |
| 3709_Human_Coronavirus_NL63_g_5 | 58400 |
| 3710_Human_Coronavirus_NL63_g_1 | 58401 |
| 3710_Human_Coronavirus_NL63_g_2 | 58402 |
| 3710_Human_Coronavirus_NL63_g_3 | 58403 |
| 3710_Human_Coronavirus_NL63_g_4 | 58404 |
| 3710_Human_Coronavirus_NL63_g_5 | 58405 |
| 3711_Human_Coronavirus_NL63_g_1 | 58406 |
| 3711_Human_Coronavirus_NL63_g_2 | 58407 |
| 3711_Human_Coronavirus_NL63_g_3 | 58408 |
| 3711_Human_Coronavirus_NL63_g_4 | 58409 |
| 3711_Human_Coronavirus_NL63_g_5 | 58410 |
| 3712_Human_Coronavirus_NL63_g_1 | 58411 |
| 3712_Human_Coronavirus_NL63_g_2 | 58412 |
| 3712_Human_Coronavirus_NL63_g_3 | 58413 |
| 3712_Human_Coronavirus_NL63_g_4 | 58414 |
| 3712_Human_Coronavirus_NL63_g_5 | 58415 |
| 3713_Human_Coronavirus_NL63_g_1 | 58416 |
| 3713_Human_Coronavirus_NL63_g_2 | 58417 |
| 3713_Human_Coronavirus_NL63_g_3 | 58418 |
| 3713_Human_Coronavirus_NL63_g_4 | 58419 |
| 3713_Human_Coronavirus_NL63_g_5 | 58420 |
| 3714_Human_Coronavirus_NL63_g_1 | 58421 |
| 3714_Human_Coronavirus_NL63_g_2 | 58422 |
| 3714_Human_Coronavirus_NL63_g_3 | 58423 |
| 3714_Human_Coronavirus_NL63_g_4 | 58424 |
| 3714_Human_Coronavirus_NL63_g_5 | 58425 |
| 3715_Human_Coronavirus_NL63_g_1 | 58426 |
| 3715_Human_Coronavirus_NL63_g_2 | 58427 |
| 3715_Human_Coronavirus_NL63_g_3 | 58428 |
| 3715_Human_Coronavirus_NL63_g_4 | 58429 |
| 3715_Human_Coronavirus_NL63_g_5 | 58430 |
| 3716_Human_Coronavirus_NL63_g_1 | 58431 |
| 3716_Human_Coronavirus_NL63_g_2 | 58432 |
| 3716_Human_Coronavirus_NL63_g_3 | 58433 |
| 3716_Human_Coronavirus_NL63_g_4 | 58434 |
| 3716_Human_Coronavirus_NL63_g_5 | 58435 |
| 3717_Human_Coronavirus_NL63_g_1 | 58436 |
| 3717_Human_Coronavirus_NL63_g_2 | 58437 |
| 3717_Human_Coronavirus_NL63_g_3 | 58438 |
| 3717_Human_Coronavirus_NL63_g_4 | 58439 |
| 3717_Human_Coronavirus_NL63_g_5 | 58440 |
| 3718_Human_Coronavirus_NL63_g_1 | 58441 |
| 3718_Human_Coronavirus_NL63_g_2 | 58442 |
| 3718_Human_Coronavirus_NL63_g_3 | 58443 |
| 3718_Human_Coronavirus_NL63_g_4 | 58444 |
| 3718_Human_Coronavirus_NL63_g_5 | 58445 |
| 3719_Human_Coronavirus_NL63_g_1 | 58446 |
| 3719_Human_Coronavirus_NL63_g_2 | 58447 |
| 3719_Human_Coronavirus_NL63_g_3 | 58448 |
| 3719_Human_Coronavirus_NL63_g_4 | 58449 |
| 3719_Human_Coronavirus_NL63_g_5 | 58450 |
| 3720_Human_Coronavirus_NL63_g_1 | 58451 |
| 3720_Human_Coronavirus_NL63_g_2 | 58452 |
| 3720_Human_Coronavirus_NL63_g_3 | 58453 |
| 3720_Human_Coronavirus_NL63_g_4 | 58454 |
| 3720_Human_Coronavirus_NL63_g_5 | 58455 |
| 3721_Human_Coronavirus_NL63_g_1 | 58456 |
| 3721_Human_Coronavirus_NL63_g_2 | 58457 |
| 3721_Human_Coronavirus_NL63_g_3 | 58458 |
| 3721_Human_Coronavirus_NL63_g_4 | 58459 |
| 3721_Human_Coronavirus_NL63_g_5 | 58460 |
| 3722_Human_Coronavirus_NL63_g_1 | 58461 |
| 3722_Human_Coronavirus_NL63_g_2 | 58462 |
| 3722_Human_Coronavirus_NL63_g_3 | 58463 |
| 3722_Human_Coronavirus_NL63_g_4 | 58464 |
| 3722_Human_Coronavirus_NL63_g_5 | 58465 |
| 3723_Human_Coronavirus_NL63_g_1 | 58466 |
| 3723_Human_Coronavirus_NL63_g_2 | 58467 |
| 3723_Human_Coronavirus_NL63_g_3 | 58468 |
| 3723_Human_Coronavirus_NL63_g_4 | 58469 |
| 3723_Human_Coronavirus_NL63_g_5 | 58470 |
| 3724_Human_Coronavirus_NL63_g_1 | 58471 |
| 3724_Human_Coronavirus_NL63_g_2 | 58472 |
| 3724_Human_Coronavirus_NL63_g_3 | 58473 |
| 3724_Human_Coronavirus_NL63_g_4 | 58474 |
| 3724_Human_Coronavirus_NL63_g_5 | 58475 |
| 3725_Human_Coronavirus_NL63_g_1 | 58476 |
| 3725_Human_Coronavirus_NL63_g_2 | 58477 |
| 3725_Human_Coronavirus_NL63_g_3 | 58478 |
| 3725_Human_Coronavirus_NL63_g_4 | 58479 |
| 3725_Human_Coronavirus_NL63_g_5 | 58480 |
| 3726_Human_Coronavirus_NL63_g_1 | 58481 |
| 3726_Human_Coronavirus_NL63_g_2 | 58482 |
| 3726_Human_Coronavirus_NL63_g_3 | 58483 |
| 3726_Human_Coronavirus_NL63_g_4 | 58484 |
| 3726_Human_Coronavirus_NL63_g_5 | 58485 |
| 3727_Human_Coronavirus_NL63_g_1 | 58486 |
| 3727_Human_Coronavirus_NL63_g_2 | 58487 |
| 3727_Human_Coronavirus_NL63_g_3 | 58488 |
| 3727_Human_Coronavirus_NL63_g_4 | 58489 |
| 3727_Human_Coronavirus_NL63_g_5 | 58490 |
| 3728_Human_Coronavirus_NL63_g_1 | 58491 |
| 3728_Human_Coronavirus_NL63_g_2 | 58492 |
| 3728_Human_Coronavirus_NL63_g_3 | 58493 |
| 3728_Human_Coronavirus_NL63_g_4 | 58494 |
| 3728_Human_Coronavirus_NL63_g_5 | 58495 |
| 3729_Human_Coronavirus_NL63_g_1 | 58496 |
| 3729_Human_Coronavirus_NL63_g_2 | 58497 |
| 3729_Human_Coronavirus_NL63_g_3 | 58498 |
| 3729_Human_Coronavirus_NL63_g_4 | 58499 |
| 3729_Human_Coronavirus_NL63_g_5 | 58500 |
| 3730_Human_Coronavirus_NL63_g_1 | 58501 |
| 3730_Human_Coronavirus_NL63_g_2 | 58502 |
| 3730_Human_Coronavirus_NL63_g_3 | 58503 |
| 3730_Human_Coronavirus_NL63_g_4 | 58504 |
| 3730_Human_Coronavirus_NL63_g_5 | 58505 |
| 3731_Human_Coronavirus_NL63_g_1 | 58506 |
| 3731_Human_Coronavirus_NL63_g_2 | 58507 |
| 3731_Human_Coronavirus_NL63_g_3 | 58508 |
| 3731_Human_Coronavirus_NL63_g_4 | 58509 |
| 3731_Human_Coronavirus_NL63_g_5 | 58510 |
| 3732_Human_Coronavirus_NL63_g_1 | 58511 |
| 3732_Human_Coronavirus_NL63_g_2 | 58512 |
| 3732_Human_Coronavirus_NL63_g_3 | 58513 |
| 3732_Human_Coronavirus_NL63_g_4 | 58514 |
| 3732_Human_Coronavirus_NL63_g_5 | 58515 |
| 3733_Human_Coronavirus_NL63_g_1 | 58516 |
| 3733_Human_Coronavirus_NL63_g_2 | 58517 |
| 3733_Human_Coronavirus_NL63_g_3 | 58518 |
| 3733_Human_Coronavirus_NL63_g_4 | 58519 |
| 3733_Human_Coronavirus_NL63_g_5 | 58520 |
| 3734_Human_Coronavirus_NL63_g_1 | 58521 |
| 3734_Human_Coronavirus_NL63_g_2 | 58522 |
| 3734_Human_Coronavirus_NL63_g_3 | 58523 |
| 3734_Human_Coronavirus_NL63_g_4 | 58524 |
| 3734_Human_Coronavirus_NL63_g_5 | 58525 |
| 3735_Human_Coronavirus_NL63_g_1 | 58526 |
| 3735_Human_Coronavirus_NL63_g_2 | 58527 |
| 3735_Human_Coronavirus_NL63_g_3 | 58528 |
| 3735_Human_Coronavirus_NL63_g_4 | 58529 |
| 3735_Human_Coronavirus_NL63_g_5 | 58530 |
| 3736_Human_Coronavirus_NL63_g_1 | 58531 |
| 3736_Human_Coronavirus_NL63_g_2 | 58532 |
| 3736_Human_Coronavirus_NL63_g_3 | 58533 |
| 3736_Human_Coronavirus_NL63_g_4 | 58534 |
| 3736_Human_Coronavirus_NL63_g_5 | 58535 |
| 3737_Human_Coronavirus_NL63_g_1 | 58536 |
| 3737_Human_Coronavirus_NL63_g_2 | 58537 |
| 3737_Human_Coronavirus_NL63_g_3 | 58538 |
| 3737_Human_Coronavirus_NL63_g_4 | 58539 |
| 3737_Human_Coronavirus_NL63_g_5 | 58540 |
| 3738_Human_Coronavirus_NL63_g_1 | 58541 |
| 3738_Human_Coronavirus_NL63_g_2 | 58542 |
| 3738_Human_Coronavirus_NL63_g_3 | 58543 |
| 3738_Human_Coronavirus_NL63_g_4 | 58544 |
| 3738_Human_Coronavirus_NL63_g_5 | 58545 |
| 3739_Human_Coronavirus_NL63_g_1 | 58546 |
| 3739_Human_Coronavirus_NL63_g_2 | 58547 |
| 3739_Human_Coronavirus_NL63_g_3 | 58548 |
| 3739_Human_Coronavirus_NL63_g_4 | 58549 |
| 3739_Human_Coronavirus_NL63_g_5 | 58550 |
| 3740_Human_Coronavirus_NL63_g_1 | 58551 |
| 3740_Human_Coronavirus_NL63_g_2 | 58552 |
| 3740_Human_Coronavirus_NL63_g_3 | 58553 |
| 3740_Human_Coronavirus_NL63_g_4 | 58554 |
| 3740_Human_Coronavirus_NL63_g_5 | 58555 |
| 3741_Human_Coronavirus_NL63_g_1 | 58556 |
| 3741_Human_Coronavirus_NL63_g_2 | 58557 |
| 3741_Human_Coronavirus_NL63_g_3 | 58558 |
| 3741_Human_Coronavirus_NL63_g_4 | 58559 |
| 3741_Human_Coronavirus_NL63_g_5 | 58560 |
| 3742_Human_Coronavirus_NL63_g_1 | 58561 |
| 3742_Human_Coronavirus_NL63_g_2 | 58562 |
| 3742_Human_Coronavirus_NL63_g_3 | 58563 |
| 3742_Human_Coronavirus_NL63_g_4 | 58564 |
| 3742_Human_Coronavirus_NL63_g_5 | 58565 |
| 3743_Human_Coronavirus_NL63_g_1 | 58566 |
| 3743_Human_Coronavirus_NL63_g_2 | 58567 |
| 3743_Human_Coronavirus_NL63_g_3 | 58568 |
| 3743_Human_Coronavirus_NL63_g_4 | 58569 |
| 3743_Human_Coronavirus_NL63_g_5 | 58570 |
| 3744_Human_Coronavirus_NL63_g_1 | 58571 |
| 3744_Human_Coronavirus_NL63_g_2 | 58572 |
| 3744_Human_Coronavirus_NL63_g_3 | 58573 |
| 3744_Human_Coronavirus_NL63_g_4 | 58574 |
| 3744_Human_Coronavirus_NL63_g_5 | 58575 |
| 3745_Human_Coronavirus_NL63_g_1 | 58576 |
| 3745_Human_Coronavirus_NL63_g_2 | 58577 |
| 3745_Human_Coronavirus_NL63_g_3 | 58578 |
| 3745_Human_Coronavirus_NL63_g_4 | 58579 |
| 3745_Human_Coronavirus_NL63_g_5 | 58580 |
| 3746_Human_Coronavirus_NL63_g_1 | 58581 |
| 3746_Human_Coronavirus_NL63_g_2 | 58582 |
| 3746_Human_Coronavirus_NL63_g_3 | 58583 |
| 3746_Human_Coronavirus_NL63_g_4 | 58584 |
| 3746_Human_Coronavirus_NL63_g_5 | 58585 |
| 3747_Human_papillomavirus_—_1_g_1 | 58586 |
| 3747_Human_papillomavirus_—_1_g_2 | 58587 |
| 3747_Human_papillomavirus_—_1_g_3 | 58588 |
| 3747_Human_papillomavirus_—_1_g_4 | 58589 |
| 3747_Human_papillomavirus_—_1_g_5 | 58590 |
| 3748_Human_papillomavirus_—_1_g_1 | 58591 |
| 3748_Human_papillomavirus_—_1_g_2 | 58592 |
| 3748_Human_papillomavirus_—_1_g_3 | 58593 |
| 3748_Human_papillomavirus_—_1_g_4 | 58594 |
| 3748_Human_papillomavirus_—_1_g_5 | 58595 |
| 3749_Human_papillomavirus_—_1_g_1 | 58596 |
| 3749_Human_papillomavirus_—_1_g_2 | 58597 |
| 3749_Human_papillomavirus_—_1_g_3 | 58598 |
| 3749_Human_papillomavirus_—_1_g_4 | 58599 |
| 3749_Human_papillomavirus_—_1_g_5 | 58600 |
| 3750_Human_papillomavirus_—_1_g_1 | 58601 |
| 3750_Human_papillomavirus_—_1_g_2 | 58602 |
| 3750_Human_papillomavirus_—_1_g_3 | 58603 |
| 3750_Human_papillomavirus_—_1_g_4 | 58604 |
| 3750_Human_papillomavirus_—_1_g_5 | 58605 |
| 3751_Human_papillomavirus_—_1_g_1 | 58606 |
| 3751_Human_papillomavirus_—_1_g_2 | 58607 |
| 3751_Human_papillomavirus_—_1_g_3 | 58608 |
| 3751_Human_papillomavirus_—_1_g_4 | 58609 |
| 3751_Human_papillomavirus_—_1_g_5 | 58610 |
| 3752_Human_papillomavirus_—_1_g_1 | 58611 |
| 3752_Human_papillomavirus_—_1_g_2 | 58612 |
| 3752_Human_papillomavirus_—_1_g_3 | 58613 |
| 3752_Human_papillomavirus_—_1_g_4 | 58614 |
| 3752_Human_papillomavirus_—_1_g_5 | 58615 |
| 3753_Human_papillomavirus_—_1_g_1 | 58616 |
| 3753_Human_papillomavirus_—_1_g_2 | 58617 |
| 3754_Human_papillomavirus_—_1_g_1 | 58618 |
| 3754_Human_papillomavirus_—_1_g_2 | 58619 |
| 3754_Human_papillomavirus_—_1_g_3 | 58620 |
| 3754_Human_papillomavirus_—_1_g_4 | 58621 |
| 3754_Human_papillomavirus_—_1_g_5 | 58622 |
| 3755_Human_papillomavirus_—_1_g_1 | 58623 |
| 3755_Human_papillomavirus_—_1_g_2 | 58624 |
| 3755_Human_papillomavirus_—_1_g_3 | 58625 |
| 3755_Human_papillomavirus_—_1_g_4 | 58626 |
| 3755_Human_papillomavirus_—_1_g_5 | 58627 |
| 3756_Human_papillomavirus_—_1_g_1 | 58628 |
| 3756_Human_papillomavirus_—_1_g_2 | 58629 |
| 3756_Human_papillomavirus_—_1_g_3 | 58630 |
| 3756_Human_papillomavirus_—_1_g_4 | 58631 |
| 3756_Human_papillomavirus_—_1_g_5 | 58632 |
| 3757_Human_papillomavirus_—_1_g_1 | 58633 |
| 3757_Human_papillomavirus_—_1_g_2 | 58634 |
| 3757_Human_papillomavirus_—_1_g_3 | 58635 |
| 3757_Human_papillomavirus_—_1_g_4 | 58636 |
| 3757_Human_papillomavirus_—_1_g_5 | 58637 |
| 3758_Human_papillomavirus_—_1_g_1 | 58638 |
| 3758_Human_papillomavirus_—_1_g_2 | 58639 |
| 3758_Human_papillomavirus_—_1_g_3 | 58640 |
| 3758_Human_papillomavirus_—_1_g_4 | 58641 |
| 3758_Human_papillomavirus_—_1_g_5 | 58642 |
| 3759_Human_papillomavirus_—_1_g_1 | 58643 |
| 3759_Human_papillomavirus_—_1_g_2 | 58644 |
| 3759_Human_papillomavirus_—_1_g_3 | 58645 |
| 3759_Human_papillomavirus_—_1_g_4 | 58646 |
| 3759_Human_papillomavirus_—_1_g_5 | 58647 |
| 3760_Human_papillomavirus_—_1_g_1 | 58648 |
| 3760_Human_papillomavirus_—_1_g_2 | 58649 |
| 3760_Human_papillomavirus_—_1_g_3 | 58650 |
| 3760_Human_papillomavirus_—_1_g_4 | 58651 |
| 3760_Human_papillomavirus_—_1_g_5 | 58652 |
| 3761_Human_papillomavirus_—_1_g_1 | 58653 |
| 3761_Human_papillomavirus_—_1_g_2 | 58654 |
| 3761_Human_papillomavirus_—_1_g_3 | 58655 |
| 3761_Human_papillomavirus_—_1_g_4 | 58656 |
| 3761_Human_papillomavirus_—_1_g_5 | 58657 |
| 3762_Human_papillomavirus_—_1_g_1 | 58658 |
| 3762_Human_papillomavirus_—_1_g_2 | 58659 |
| 3762_Human_papillomavirus_—_1_g_3 | 58660 |
| 3762_Human_papillomavirus_—_1_g_4 | 58661 |
| 3762_Human_papillomavirus_—_1_g_5 | 58662 |
| 3763_Human_papillomavirus_—_1_g_1 | 58663 |
| 3763_Human_papillomavirus_—_1_g_2 | 58664 |
| 3763_Human_papillomavirus_—_1_g_3 | 58665 |
| 3763_Human_papillomavirus_—_1_g_4 | 58666 |
| 3763_Human_papillomavirus_—_1_g_5 | 58667 |
| 3764_Human_papillomavirus_—_1_g_1 | 58668 |
| 3764_Human_papillomavirus_—_1_g_2 | 58669 |
| 3764_Human_papillomavirus_—_1_g_3 | 58670 |
| 3764_Human_papillomavirus_—_1_g_4 | 58671 |
| 3764_Human_papillomavirus_—_1_g_5 | 58672 |
| 3765_Human_papillomavirus_—_1_g_1 | 58673 |
| 3765_Human_papillomavirus_—_1_g_2 | 58674 |
| 3765_Human_papillomavirus_—_1_g_3 | 58675 |
| 3765_Human_papillomavirus_—_1_g_4 | 58676 |
| 3765_Human_papillomavirus_—_1_g_5 | 58677 |
| 3766_Human_papillomavirus_type_204_isolate_A342_g_1 | 58678 |
| 3766_Human_papillomavirus_type_204_isolate_A342_g_2 | 58679 |
| 3766_Human_papillomavirus_type_204_isolate_A342_g_3 | 58680 |
| 3766_Human_papillomavirus_type_204_isolate_A342_g_4 | 58681 |
| 3766_Human_papillomavirus_type_204_isolate_A342_g_5 | 58682 |
| 3767_Human_papillomavirus_type_204_isolate_A342_g_1 | 58683 |
| 3767_Human_papillomavirus_type_204_isolate_A342_g_2 | 58684 |
| 3767_Human_papillomavirus_type_204_isolate_A342_g_3 | 58685 |
| 3767_Human_papillomavirus_type_204_isolate_A342_g_4 | 58686 |
| 3767_Human_papillomavirus_type_204_isolate_A342_g_5 | 58687 |
| 3768_Human_papillomavirus_type_204_isolate_A342_g_1 | 58688 |
| 3768_Human_papillomavirus_type_204_isolate_A342_g_2 | 58689 |
| 3768_Human_papillomavirus_type_204_isolate_A342_g_3 | 58690 |
| 3768_Human_papillomavirus_type_204_isolate_A342_g_4 | 58691 |
| 3768_Human_papillomavirus_type_204_isolate_A342_g_5 | 58692 |
| 3769_Human_papillomavirus_type_204_isolate_A342_g_1 | 58693 |
| 3769_Human_papillomavirus_type_204_isolate_A342_g_2 | 58694 |
| 3769_Human_papillomavirus_type_204_isolate_A342_g_3 | 58695 |
| 3769_Human_papillomavirus_type_204_isolate_A342_g_4 | 58696 |
| 3769_Human_papillomavirus_type_204_isolate_A342_g_5 | 58697 |
| 3770_Human_papillomavirus_type_204_isolate_A342_g_1 | 58698 |
| 3770_Human_papillomavirus_type_204_isolate_A342_g_2 | 58699 |
| 3770_Human_papillomavirus_type_204_isolate_A342_g_3 | 58700 |
| 3770_Human_papillomavirus_type_204_isolate_A342_g_4 | 58701 |
| 3770_Human_papillomavirus_type_204_isolate_A342_g_5 | 58702 |
| 3771_Human_papillomavirus_type_204_isolate_A342_g_1 | 58703 |
| 3771_Human_papillomavirus_type_204_isolate_A342_g_2 | 58704 |
| 3771_Human_papillomavirus_type_204_isolate_A342_g_3 | 58705 |
| 3771_Human_papillomavirus_type_204_isolate_A342_g_4 | 58706 |
| 3771_Human_papillomavirus_type_204_isolate_A342_g_5 | 58707 |
| 3772_Human_papillomavirus_type_204_isolate_A342_g_1 | 58708 |
| 3772_Human_papillomavirus_type_204_isolate_A342_g_2 | 58709 |
| 3772_Human_papillomavirus_type_204_isolate_A342_g_3 | 58710 |
| 3772_Human_papillomavirus_type_204_isolate_A342_g_4 | 58711 |
| 3772_Human_papillomavirus_type_204_isolate_A342_g_5 | 58712 |
| 3773_Human_papillomavirus_type_204_isolate_A342_g_1 | 58713 |
| 3773_Human_papillomavirus_type_204_isolate_A342_g_2 | 58714 |
| 3773_Human_papillomavirus_type_204_isolate_A342_g_3 | 58715 |
| 3773_Human_papillomavirus_type_204_isolate_A342_g_4 | 58716 |
| 3773_Human_papillomavirus_type_204_isolate_A342_g_5 | 58717 |
| 3774_Human_papillomavirus_type_204_isolate_A342_g_1 | 58718 |
| 3774_Human_papillomavirus_type_204_isolate_A342_g_2 | 58719 |
| 3774_Human_papillomavirus_type_204_isolate_A342_g_3 | 58720 |
| 3774_Human_papillomavirus_type_204_isolate_A342_g_4 | 58721 |
| 3774_Human_papillomavirus_type_204_isolate_A342_g_5 | 58722 |
| 3775_Human_papillomavirus_type_204_isolate_A342_g_1 | 58723 |
| 3775_Human_papillomavirus_type_204_isolate_A342_g_2 | 58724 |
| 3775_Human_papillomavirus_type_204_isolate_A342_g_3 | 58725 |
| 3775_Human_papillomavirus_type_204_isolate_A342_g_4 | 58726 |
| 3775_Human_papillomavirus_type_204_isolate_A342_g_5 | 58727 |
| 3776_Human_papillomavirus_type_204_isolate_A342_g_1 | 58728 |
| 3776_Human_papillomavirus_type_204_isolate_A342_g_2 | 58729 |
| 3776_Human_papillomavirus_type_204_isolate_A342_g_3 | 58730 |
| 3776_Human_papillomavirus_type_204_isolate_A342_g_4 | 58731 |
| 3776_Human_papillomavirus_type_204_isolate_A342_g_5 | 58732 |
| 3777_Human_papillomavirus_type_204_isolate_A342_g_1 | 58733 |
| 3777_Human_papillomavirus_type_204_isolate_A342_g_2 | 58734 |
| 3777_Human_papillomavirus_type_204_isolate_A342_g_3 | 58735 |
| 3777_Human_papillomavirus_type_204_isolate_A342_g_4 | 58736 |
| 3777_Human_papillomavirus_type_204_isolate_A342_g_5 | 58737 |
| 3778_Human_papillomavirus_type_204_isolate_A342_g_1 | 58738 |
| 3778_Human_papillomavirus_type_204_isolate_A342_g_2 | 58739 |
| 3778_Human_papillomavirus_type_204_isolate_A342_g_3 | 58740 |
| 3778_Human_papillomavirus_type_204_isolate_A342_g_4 | 58741 |
| 3778_Human_papillomavirus_type_204_isolate_A342_g_5 | 58742 |
| 3779_Influenza_B_virus_(B/Lee/1940)_segment_8_g_1 | 58743 |
| 3779_Influenza_B_virus_(B/Lee/1940)_segment_8_g_2 | 58744 |
| 3779_Influenza_B_virus_(B/Lee/1940)_segment_8_g_3 | 58745 |
| 3779_Influenza_B_virus_(B/Lee/1940)_segment_8_g_4 | 58746 |
| 3779_Influenza_B_virus_(B/Lee/1940)_segment_8_g_5 | 58747 |
| 3780_Influenza_B_virus_(B/Lee/1940)_segment_8_g_1 | 58748 |
| 3780_Influenza_B_virus_(B/Lee/1940)_segment_8_g_2 | 58749 |
| 3780_Influenza_B_virus_(B/Lee/1940)_segment_8_g_3 | 58750 |
| 3780_Influenza_B_virus_(B/Lee/1940)_segment_8_g_4 | 58751 |
| 3780_Influenza_B_virus_(B/Lee/1940)_segment_8_g_5 | 58752 |
| 3781_Influenza_B_virus_(B/Lee/1940)_segment_8_g_1 | 58753 |
| 3781_Influenza_B_virus_(B/Lee/1940)_segment_8_g_2 | 58754 |
| 3781_Influenza_B_virus_(B/Lee/1940)_segment_8_g_3 | 58755 |
| 3781_Influenza_B_virus_(B/Lee/1940)_segment_8_g_4 | 58756 |
| 3781_Influenza_B_virus_(B/Lee/1940)_segment_8_g_5 | 58757 |
| 3782_Influenza_B_virus_(B/Lee/1940)_segment_8_g_1 | 58758 |
| 3782_Influenza_B_virus_(B/Lee/1940)_segment_8_g_2 | 58759 |
| 3782_Influenza_B_virus_(B/Lee/1940)_segment_8_g_3 | 58760 |
| 3782_Influenza_B_virus_(B/Lee/1940)_segment_8_g_4 | 58761 |
| 3782_Influenza_B_virus_(B/Lee/1940)_segment_8_g_5 | 58762 |
| 3783_Hepatitis_A_virus_g_1 | 58763 |
| 3783_Hepatitis_A_virus_g_2 | 58764 |
| 3783_Hepatitis_A_virus_g_3 | 58765 |
| 3783_Hepatitis_A_virus_g_4 | 58766 |
| 3783_Hepatitis_A_virus_g_5 | 58767 |
| 3784_Hepatitis_A_virus_g_1 | 58768 |
| 3784_Hepatitis_A_virus_g_2 | 58769 |
| 3784_Hepatitis_A_virus_g_3 | 58770 |
| 3784_Hepatitis_A_virus_g_4 | 58771 |
| 3784_Hepatitis_A_virus_g_5 | 58772 |
| 3785_Hepatitis_A_virus_g_1 | 58773 |
| 3785_Hepatitis_A_virus_g_2 | 58774 |
| 3785_Hepatitis_A_virus_g_3 | 58775 |
| 3785_Hepatitis_A_virus_g_4 | 58776 |
| 3785_Hepatitis_A_virus_g_5 | 58777 |
| 3786_Hepatitis_A_virus_g_1 | 58778 |
| 3786_Hepatitis_A_virus_g_2 | 58779 |
| 3786_Hepatitis_A_virus_g_3 | 58780 |
| 3786_Hepatitis_A_virus_g_4 | 58781 |
| 3786_Hepatitis_A_virus_g_5 | 58782 |
| 3787_Hepatitis_A_virus_g_1 | 58783 |
| 3787_Hepatitis_A_virus_g_2 | 58784 |
| 3787_Hepatitis_A_virus_g_3 | 58785 |
| 3787_Hepatitis_A_virus_g_4 | 58786 |
| 3787_Hepatitis_A_virus_g_5 | 58787 |
| 3788_Hepatitis_A_virus_g_1 | 58788 |
| 3788_Hepatitis_A_virus_g_2 | 58789 |
| 3788_Hepatitis_A_virus_g_3 | 58790 |
| 3788_Hepatitis_A_virus_g_4 | 58791 |
| 3788_Hepatitis_A_virus_g_5 | 58792 |
| 3789_Hepatitis_A_virus_g_1 | 58793 |
| 3789_Hepatitis_A_virus_g_2 | 58794 |
| 3789_Hepatitis_A_virus_g_3 | 58795 |
| 3789_Hepatitis_A_virus_g_4 | 58796 |
| 3789_Hepatitis_A_virus_g_5 | 58797 |
| 3790_Hepatitis_A_virus_g_1 | 58798 |
| 3790_Hepatitis_A_virus_g_2 | 58799 |
| 3790_Hepatitis_A_virus_g_3 | 58800 |
| 3790_Hepatitis_A_virus_g_4 | 58801 |
| 3790_Hepatitis_A_virus_g_5 | 58802 |
| 3791_Hepatitis_A_virus_g_1 | 58803 |
| 3791_Hepatitis_A_virus_g_2 | 58804 |
| 3791_Hepatitis_A_virus_g_3 | 58805 |
| 3791_Hepatitis_A_virus_g_4 | 58806 |
| 3791_Hepatitis_A_virus_g_5 | 58807 |
| 3792_Hepatitis_A_virus_g_1 | 58808 |
| 3792_Hepatitis_A_virus_g_2 | 58809 |
| 3792_Hepatitis_A_virus_g_3 | 58810 |
| 3792_Hepatitis_A_virus_g_4 | 58811 |
| 3792_Hepatitis_A_virus_g_5 | 58812 |
| 3793_Hepatitis_A_virus_g_1 | 58813 |
| 3793_Hepatitis_A_virus_g_2 | 58814 |
| 3793_Hepatitis_A_virus_g_3 | 58815 |
| 3793_Hepatitis_A_virus_g_4 | 58816 |
| 3793_Hepatitis_A_virus_g_5 | 58817 |
| 3794_Hepatitis_A_virus_g_1 | 58818 |
| 3794_Hepatitis_A_virus_g_2 | 58819 |
| 3794_Hepatitis_A_virus_g_3 | 58820 |
| 3794_Hepatitis_A_virus_g_4 | 58821 |
| 3794_Hepatitis_A_virus_g_5 | 58822 |
| 3795_Hepatitis_A_virus_g_1 | 58823 |
| 3795_Hepatitis_A_virus_g_2 | 58824 |
| 3795_Hepatitis_A_virus_g_3 | 58825 |
| 3795_Hepatitis_A_virus_g_4 | 58826 |
| 3795_Hepatitis_A_virus_g_5 | 58827 |
| 3796_Hepatitis_A_virus_g_1 | 58828 |
| 3796_Hepatitis_A_virus_g_2 | 58829 |
| 3796_Hepatitis_A_virus_g_3 | 58830 |
| 3796_Hepatitis_A_virus_g_4 | 58831 |
| 3796_Hepatitis_A_virus_g_5 | 58832 |
| 3797_Hepatitis_A_virus_g_1 | 58833 |
| 3797_Hepatitis_A_virus_g_2 | 58834 |
| 3797_Hepatitis_A_virus_g_3 | 58835 |
| 3797_Hepatitis_A_virus_g_4 | 58836 |
| 3797_Hepatitis_A_virus_g_5 | 58837 |
| 3798_Hepatitis_A_virus_g_1 | 58838 |
| 3798_Hepatitis_A_virus_g_2 | 58839 |
| 3798_Hepatitis_A_virus_g_3 | 58840 |
| 3798_Hepatitis_A_virus_g_4 | 58841 |
| 3798_Hepatitis_A_virus_g_5 | 58842 |
| 3799_Hepatitis_A_virus_g_1 | 58843 |
| 3799_Hepatitis_A_virus_g_2 | 58844 |
| 3799_Hepatitis_A_virus_g_3 | 58845 |
| 3799_Hepatitis_A_virus_g_4 | 58846 |
| 3799_Hepatitis_A_virus_g_5 | 58847 |
| 3800_Hepatitis_A_virus_g_1 | 58848 |
| 3800_Hepatitis_A_virus_g_2 | 58849 |
| 3800_Hepatitis_A_virus_g_3 | 58850 |
| 3800_Hepatitis_A_virus_g_4 | 58851 |
| 3800_Hepatitis_A_virus_g_5 | 58852 |
| 3801_Hepatitis_A_virus_g_1 | 58853 |
| 3801_Hepatitis_A_virus_g_2 | 58854 |
| 3801_Hepatitis_A_virus_g_3 | 58855 |
| 3801_Hepatitis_A_virus_g_4 | 58856 |
| 3801_Hepatitis_A_virus_g_5 | 58857 |
| 3802_Influenza_A_virus_(A/New_York/392/2004(H3N2))_{—} | 58858 |
| segment_4_g_1 | |
| 3802_Influenza_A_virus_(A/New_York/392/2004(H3N2))_{—} | 58859 |
| segment_4_g_2 | |
| 3802_Influenza_A_virus_(A/New_York/392/2004(H3N2))_{—} | 58860 |
| segment_4_g_3 | |
| 3802_Influenza_A_virus_(A/New_York/392/2004(H3N2))_{—} | 58861 |
| segment_4_g_4 | |
| 3802_Influenza_A_virus_(A/New_York/392/2004(H3N2))_{—} | 58862 |
| segment_4_g_5 | |
| 3803_Influenza_A_virus_(A/New_York/392/2004(H3N2))_{—} | 58863 |
| segment_4_g_1 | |
| 3803_Influenza_A_virus_(A/New_York/392/2004(H3N2))_{—} | 58864 |
| segment_4_g_2 | |
| 3803_Influenza_A_virus_(A/New_York/392/2004(H3N2))_{—} | 58865 |
| segment_4_g_3 | |
| 3803_Influenza_A_virus_(A/New_York/392/2004(H3N2))_{—} | 58866 |
| segment_4_g_4 | |
| 3803_Influenza_A_virus_(A/New_York/392/2004(H3N2))_{—} | 58867 |
| segment_4_g_5 | |
| 3804_Influenza_A_virus_(A/New_York/392/2004(H3N2))_{—} | 58868 |
| segment_4_g_1 | |
| 3804_Influenza_A_virus_(A/New_York/392/2004(H3N2))_{—} | 58869 |
| segment_4_g_2 | |
| 3804_Influenza_A_virus_(A/New_York/392/2004(H3N2))_{—} | 58870 |
| segment_4_g_3 | |
| 3804_Influenza_A_virus_(A/New_York/392/2004(H3N2))_{—} | 58871 |
| segment_4_g_4 | |
| 3804_Influenza_A_virus_(A/New_York/392/2004(H3N2))_{—} | 58872 |
| segment_4_g_5 | |
| 3805_Influenza_A_virus_(A/New_York/392/2004(H3N2))_{—} | 58873 |
| segment_4_g_1 | |
| 3805_Influenza_A_virus_(A/New_York/392/2004(H3N2))_{—} | 58874 |
| segment_4_g_2 | |
| 3805_Influenza_A_virus_(A/New_York/392/2004(H3N2))_{—} | 58875 |
| segment_4_g_3 | |
| 3805_Influenza_A_virus_(A/New_York/392/2004(H3N2))_{—} | 58876 |
| segment_4_g_4 | |
| 3805_Influenza_A_virus_(A/New_York/392/2004(H3N2))_{—} | 58877 |
| segment_4_g_5 | |
| 3806_Influenza_A_virus_(A/New_York/392/2004(H3N2))_{—} | 58878 |
| segment_4_g_1 | |
| 3806_Influenza_A_virus_(A/New_York/392/2004(H3N2))_{—} | 58879 |
| segment_4_g_2 | |
| 3806_Influenza_A_virus_(A/New_York/392/2004(H3N2))_{—} | 58880 |
| segment_4_g_3 | |
| 3806_Influenza_A_virus_(A/New_York/392/2004(H3N2))_{—} | 58881 |
| segment_4_g_4 | |
| 3806_Influenza_A_virus_(A/New_York/392/2004(H3N2))_{—} | 58882 |
| segment_4_g_5 | |
| 3807_Influenza_A_virus_(A/New_York/392/2004(H3N2))_{—} | 58883 |
| segment_4_g_1 | |
| 3807_Influenza_A_virus_(A/New_York/392/2004(H3N2))_{—} | 58884 |
| segment_4_g_2 | |
| 3807_Influenza_A_virus_(A/New_York/392/2004(H3N2))_{—} | 58885 |
| segment_4_g_3 | |
| 3807_Influenza_A_virus_(A/New_York/392/2004(H3N2))_{—} | 58886 |
| segment_4_g_4 | |
| 3807_Influenza_A_virus_(A/New_York/392/2004(H3N2))_{—} | 58887 |
| segment_4_g_5 | |
| 3808_Influenza_A_virus_(A/New_York/392/2004(H3N2))_{—} | 58888 |
| segment_4_g_1 | |
| 3808_Influenza_A_virus_(A/New_York/392/2004(H3N2))_{—} | 58889 |
| segment_4_g_2 | |
| 3808_Influenza_A_virus_(A/New_York/392/2004(H3N2))_{—} | 58890 |
| segment_4_g_3 | |
| 3808_Influenza_A_virus_(A/New_York/392/2004(H3N2))_{—} | 58891 |
| segment_4_g_4 | |
| 3808_Influenza_A_virus_(A/New_York/392/2004(H3N2))_{—} | 58892 |
| segment_4_g_5 | |
| 3809_Human_papillomavirus_type_96_g_1 | 58893 |
| 3809_Human_papillomavirus_type_96_g_2 | 58894 |
| 3809_Human_papillomavirus_type_96_g_3 | 58895 |
| 3809_Human_papillomavirus_type_96_g_4 | 58896 |
| 3809_Human_papillomavirus_type_96_g_5 | 58897 |
| 3810_Human_papillomavirus_type_96_g_1 | 58898 |
| 3810_Human_papillomavirus_type_96_g_2 | 58899 |
| 3810_Human_papillomavirus_type_96_g_3 | 58900 |
| 3810_Human_papillomavirus_type_96_g_4 | 58901 |
| 3810_Human_papillomavirus_type_96_g_5 | 58902 |
| 3811_Human_papillomavirus_type_96_g_1 | 58903 |
| 3811_Human_papillomavirus_type_96_g_2 | 58904 |
| 3811_Human_papillomavirus_type_96_g_3 | 58905 |
| 3811_Human_papillomavirus_type_96_g_4 | 58906 |
| 3811_Human_papillomavirus_type_96_g_5 | 58907 |
| 3812_Human_papillomavirus_type_96_g_1 | 58908 |
| 3812_Human_papillomavirus_type_96_g_2 | 58909 |
| 3812_Human_papillomavirus_type_96_g_3 | 58910 |
| 3812_Human_papillomavirus_type_96_g_4 | 58911 |
| 3812_Human_papillomavirus_type_96_g_5 | 58912 |
| 3813_Human_papillomavirus_type_96_g_1 | 58913 |
| 3813_Human_papillomavirus_type_96_g_2 | 58914 |
| 3813_Human_papillomavirus_type_96_g_3 | 58915 |
| 3813_Human_papillomavirus_type_96_g_4 | 58916 |
| 3813_Human_papillomavirus_type_96_g_5 | 58917 |
| 3814_Human_papillomavirus_type_96_g_1 | 58918 |
| 3814_Human_papillomavirus_type_96_g_2 | 58919 |
| 3814_Human_papillomavirus_type_96_g_3 | 58920 |
| 3814_Human_papillomavirus_type_96_g_4 | 58921 |
| 3814_Human_papillomavirus_type_96_g_5 | 58922 |
| 3815_Human_papillomavirus_type_96_g_1 | 58923 |
| 3815_Human_papillomavirus_type_96_g_2 | 58924 |
| 3815_Human_papillomavirus_type_96_g_3 | 58925 |
| 3815_Human_papillomavirus_type_96_g_4 | 58926 |
| 3815_Human_papillomavirus_type_96_g_5 | 58927 |
| 3816_Human_papillomavirus_type_96_g_1 | 58928 |
| 3816_Human_papillomavirus_type_96_g_2 | 58929 |
| 3816_Human_papillomavirus_type_96_g_3 | 58930 |
| 3816_Human_papillomavirus_type_96_g_4 | 58931 |
| 3816_Human_papillomavirus_type_96_g_5 | 58932 |
| 3817_Human_papillomavirus_type_96_g_1 | 58933 |
| 3817_Human_papillomavirus_type_96_g_2 | 58934 |
| 3817_Human_papillomavirus_type_96_g_3 | 58935 |
| 3817_Human_papillomavirus_type_96_g_4 | 58936 |
| 3817_Human_papillomavirus_type_96_g_5 | 58937 |
| 3818_Human_papillomavirus_type_96_g_1 | 58938 |
| 3818_Human_papillomavirus_type_96_g_2 | 58939 |
| 3818_Human_papillomavirus_type_96_g_3 | 58940 |
| 3818_Human_papillomavirus_type_96_g_4 | 58941 |
| 3818_Human_papillomavirus_type_96_g_5 | 58942 |
| 3819_Human_papillomavirus_type_96_g_1 | 58943 |
| 3819_Human_papillomavirus_type_96_g_2 | 58944 |
| 3819_Human_papillomavirus_type_96_g_3 | 58945 |
| 3819_Human_papillomavirus_type_96_g_4 | 58946 |
| 3819_Human_papillomavirus_type_96_g_5 | 58947 |
| 3820_Human_papillomavirus_type_96_g_1 | 58948 |
| 3820_Human_papillomavirus_type_96_g_2 | 58949 |
| 3820_Human_papillomavirus_type_96_g_3 | 58950 |
| 3820_Human_papillomavirus_type_96_g_4 | 58951 |
| 3820_Human_papillomavirus_type_96_g_5 | 58952 |
| 3821_Human_papillomavirus_type_96_g_1 | 58953 |
| 3821_Human_papillomavirus_type_96_g_2 | 58954 |
| 3821_Human_papillomavirus_type_96_g_3 | 58955 |
| 3821_Human_papillomavirus_type_96_g_4 | 58956 |
| 3821_Human_papillomavirus_type_96_g_5 | 58957 |
| 3822_Human_papillomavirus_type_96_g_1 | 58958 |
| 3822_Human_papillomavirus_type_96_g_2 | 58959 |
| 3822_Human_papillomavirus_type_96_g_3 | 58960 |
| 3822_Human_papillomavirus_type_96_g_4 | 58961 |
| 3822_Human_papillomavirus_type_96_g_5 | 58962 |
| 3823_Influenza_A_virus_(A/Korea/426/1968(H2N2))_{—} | 58963 |
| segment_6_g_1 | |
| 3823_Influenza_A_virus_(A/Korea/426/1968(H2N2))_{—} | 58964 |
| segment_6_g_2 | |
| 3823_Influenza_A_virus_(A/Korea/426/1968(H2N2))_{—} | 58965 |
| segment_6_g_3 | |
| 3823_Influenza_A_virus_(A/Korea/426/1968(H2N2))_{—} | 58966 |
| segment_6_g_4 | |
| 3823_Influenza_A_virus_(A/Korea/426/1968(H2N2))_{—} | 58967 |
| segment_6_g_5 | |
| 3824_Influenza_A_virus_(A/Korea/426/1968(H2N2))_{—} | 58968 |
| segment_6_g_1 | |
| 3824_Influenza_A_virus_(A/Korea/426/1968(H2N2))_{—} | 58969 |
| segment_6_g_2 | |
| 3824_Influenza_A_virus_(A/Korea/426/1968(H2N2))_{—} | 58970 |
| segment_6_g_3 | |
| 3824_Influenza_A_virus_(A/Korea/426/1968(H2N2))_{—} | 58971 |
| segment_6_g_4 | |
| 3824_Influenza_A_virus_(A/Korea/426/1968(H2N2))_{—} | 58972 |
| segment_6_g_5 | |
| 3825_Influenza_A_virus_(A/Korea/426/1968(H2N2))_{—} | 58973 |
| segment_6_g_1 | |
| 3825_Influenza_A_virus_(A/Korea/426/1968(H2N2))_{—} | 58974 |
| segment_6_g_2 | |
| 3825_Influenza_A_virus_(A/Korea/426/1968(H2N2))_{—} | 58975 |
| segment_6_g_3 | |
| 3825_Influenza_A_virus_(A/Korea/426/1968(H2N2))_{—} | 58976 |
| segment_6_g_4 | |
| 3825_Influenza_A_virus_(A/Korea/426/1968(H2N2))_{—} | 58977 |
| segment_6_g_5 | |
| 3826_Influenza_A_virus_(A/Korea/426/1968(H2N2))_{—} | 58978 |
| segment_6_g_1 | |
| 3826_Influenza_A_virus_(A/Korea/426/1968(H2N2))_{—} | 58979 |
| segment_6_g_2 | |
| 3826_Influenza_A_virus_(A/Korea/426/1968(H2N2))_{—} | 58980 |
| segment_6_g_3 | |
| 3826_Influenza_A_virus_(A/Korea/426/1968(H2N2))_{—} | 58981 |
| segment_6_g_4 | |
| 3826_Influenza_A_virus_(A/Korea/426/1968(H2N2))_{—} | 58982 |
| segment_6_g_5 | |
| 3827_Influenza_A_virus_(A/Korea/426/1968(H2N2))_{—} | 58983 |
| segment_6_g_1 | |
| 3827_Influenza_A_virus_(A/Korea/426/1968(H2N2))_{—} | 58984 |
| segment_6_g_2 | |
| 3827_Influenza_A_virus_(A/Korea/426/1968(H2N2))_{—} | 58985 |
| segment_6_g_3 | |
| 3827_Influenza_A_virus_(A/Korea/426/1968(H2N2))_{—} | 58986 |
| segment_6_g_4 | |
| 3827_Influenza_A_virus_(A/Korea/426/1968(H2N2))_{—} | 58987 |
| segment_6_g_5 | |
| 3828_Human_betaherpesvirus_6A_g_1 | 58988 |
| 3828_Human_betaherpesvirus_6A_g_2 | 58989 |
| 3829_Human_betaherpesvirus_6A_g_1 | 58990 |
| 3829_Human_betaherpesvirus_6A_g_2 | 58991 |
| 3829_Human_betaherpesvirus_6A_g_3 | 58992 |
| 3830_Human_betaherpesvirus_6A_g_1 | 58993 |
| 3830_Human_betaherpesvirus_6A_g_2 | 58994 |
| 3830_Human_betaherpesvirus_6A_g_3 | 58995 |
| 3830_Human_betaherpesvirus_6A_g_4 | 58996 |
| 3830_Human_betaherpesvirus_6A_g_5 | 58997 |
| 3831_Human_betaherpesvirus_6A_g_1 | 58998 |
| 3831_Human_betaherpesvirus_6A_g_2 | 58999 |
| 3831_Human_betaherpesvirus_6A_g_3 | 59000 |
| 3831_Human_betaherpesvirus_6A_g_4 | 59001 |
| 3831_Human_betaherpesvirus_6A_g_5 | 59002 |
| 3832_Human_betaherpesvirus_6A_g_1 | 59003 |
| 3832_Human_betaherpesvirus_6A_g_2 | 59004 |
| 3832_Human_betaherpesvirus_6A_g_3 | 59005 |
| 3832_Human_betaherpesvirus_6A_g_4 | 59006 |
| 3832_Human_betaherpesvirus_6A_g_5 | 59007 |
| 3833_Human_betaherpesvirus_6A_g_1 | 59008 |
| 3833_Human_betaherpesvirus_6A_g_2 | 59009 |
| 3834_Human_betaherpesvirus_6A_g_1 | 59010 |
| 3834_Human_betaherpesvirus_6A_g_2 | 59011 |
| 3834_Human_betaherpesvirus_6A_g_3 | 59012 |
| 3834_Human_betaherpesvirus_6A_g_4 | 59013 |
| 3834_Human_betaherpesvirus_6A_g_5 | 59014 |
| 3835_Human_betaherpesvirus_6A_g_1 | 59015 |
| 3835_Human_betaherpesvirus_6A_g_2 | 59016 |
| 3835_Human_betaherpesvirus_6A_g_3 | 59017 |
| 3835_Human_betaherpesvirus_6A_g_4 | 59018 |
| 3835_Human_betaherpesvirus_6A_g_5 | 59019 |
| 3836_Human_betaherpesvirus_6A_g_1 | 59020 |
| 3836_Human_betaherpesvirus_6A_g_2 | 59021 |
| 3836_Human_betaherpesvirus_6A_g_3 | 59022 |
| 3836_Human_betaherpesvirus_6A_g_4 | 59023 |
| 3836_Human_betaherpesvirus_6A_g_5 | 59024 |
| 3837_Human_betaherpesvirus_6A_g_1 | 59025 |
| 3837_Human_betaherpesvirus_6A_g_2 | 59026 |
| 3837_Human_betaherpesvirus_6A_g_3 | 59027 |
| 3837_Human_betaherpesvirus_6A_g_4 | 59028 |
| 3837_Human_betaherpesvirus_6A_g_5 | 59029 |
| 3838_Human_betaherpesvirus_6A_g_1 | 59030 |
| 3838_Human_betaherpesvirus_6A_g_2 | 59031 |
| 3838_Human_betaherpesvirus_6A_g_3 | 59032 |
| 3838_Human_betaherpesvirus_6A_g_4 | 59033 |
| 3838_Human_betaherpesvirus_6A_g_5 | 59034 |
| 3839_Human_betaherpesvirus_6A_g_1 | 59035 |
| 3839_Human_betaherpesvirus_6A_g_2 | 59036 |
| 3839_Human_betaherpesvirus_6A_g_3 | 59037 |
| 3839_Human_betaherpesvirus_6A_g_4 | 59038 |
| 3839_Human_betaherpesvirus_6A_g_5 | 59039 |
| 3840_Human_betaherpesvirus_6A_g_1 | 59040 |
| 3840_Human_betaherpesvirus_6A_g_2 | 59041 |
| 3840_Human_betaherpesvirus_6A_g_3 | 59042 |
| 3840_Human_betaherpesvirus_6A_g_4 | 59043 |
| 3840_Human_betaherpesvirus_6A_g_5 | 59044 |
| 3841_Human_betaherpesvirus_6A_g_1 | 59045 |
| 3841_Human_betaherpesvirus_6A_g_2 | 59046 |
| 3841_Human_betaherpesvirus_6A_g_3 | 59047 |
| 3841_Human_betaherpesvirus_6A_g_4 | 59048 |
| 3841_Human_betaherpesvirus_6A_g_5 | 59049 |
| 3842_Human_betaherpesvirus_6A_g_1 | 59050 |
| 3842_Human_betaherpesvirus_6A_g_2 | 59051 |
| 3842_Human_betaherpesvirus_6A_g_3 | 59052 |
| 3842_Human_betaherpesvirus_6A_g_4 | 59053 |
| 3842_Human_betaherpesvirus_6A_g_5 | 59054 |
| 3843_Human_betaherpesvirus_6A_g_1 | 59055 |
| 3843_Human_betaherpesvirus_6A_g_2 | 59056 |
| 3843_Human_betaherpesvirus_6A_g_3 | 59057 |
| 3843_Human_betaherpesvirus_6A_g_4 | 59058 |
| 3843_Human_betaherpesvirus_6A_g_5 | 59059 |
| 3844_Human_betaherpesvirus_6A_g_1 | 59060 |
| 3844_Human_betaherpesvirus_6A_g_2 | 59061 |
| 3844_Human_betaherpesvirus_6A_g_3 | 59062 |
| 3844_Human_betaherpesvirus_6A_g_4 | 59063 |
| 3844_Human_betaherpesvirus_6A_g_5 | 59064 |
| 3845_Human_betaherpesvirus_6A_g_1 | 59065 |
| 3845_Human_betaherpesvirus_6A_g_2 | 59066 |
| 3845_Human_betaherpesvirus_6A_g_3 | 59067 |
| 3845_Human_betaherpesvirus_6A_g_4 | 59068 |
| 3845_Human_betaherpesvirus_6A_g_5 | 59069 |
| 3846_Human_betaherpesvirus_6A_g_1 | 59070 |
| 3846_Human_betaherpesvirus_6A_g_2 | 59071 |
| 3846_Human_betaherpesvirus_6A_g_3 | 59072 |
| 3846_Human_betaherpesvirus_6A_g_4 | 59073 |
| 3846_Human_betaherpesvirus_6A_g_5 | 59074 |
| 3847_Human_betaherpesvirus_6A_g_1 | 59075 |
| 3847_Human_betaherpesvirus_6A_g_2 | 59076 |
| 3847_Human_betaherpesvirus_6A_g_3 | 59077 |
| 3847_Human_betaherpesvirus_6A_g_4 | 59078 |
| 3847_Human_betaherpesvirus_6A_g_5 | 59079 |
| 3848_Human_betaherpesvirus_6A_g_1 | 59080 |
| 3848_Human_betaherpesvirus_6A_g_2 | 59081 |
| 3848_Human_betaherpesvirus_6A_g_3 | 59082 |
| 3848_Human_betaherpesvirus_6A_g_4 | 59083 |
| 3848_Human_betaherpesvirus_6A_g_5 | 59084 |
| 3849_Human_betaherpesvirus_6A_g_1 | 59085 |
| 3849_Human_betaherpesvirus_6A_g_2 | 59086 |
| 3849_Human_betaherpesvirus_6A_g_3 | 59087 |
| 3849_Human_betaherpesvirus_6A_g_4 | 59088 |
| 3849_Human_betaherpesvirus_6A_g_5 | 59089 |
| 3850_Human_betaherpesvirus_6A_g_1 | 59090 |
| 3850_Human_betaherpesvirus_6A_g_2 | 59091 |
| 3850_Human_betaherpesvirus_6A_g_3 | 59092 |
| 3850_Human_betaherpesvirus_6A_g_4 | 59093 |
| 3850_Human_betaherpesvirus_6A_g_5 | 59094 |
| 3851_Human_betaherpesvirus_6A_g_1 | 59095 |
| 3851_Human_betaherpesvirus_6A_g_2 | 59096 |
| 3851_Human_betaherpesvirus_6A_g_3 | 59097 |
| 3851_Human_betaherpesvirus_6A_g_4 | 59098 |
| 3851_Human_betaherpesvirus_6A_g_5 | 59099 |
| 3852_Human_betaherpesvirus_6A_g_1 | 59100 |
| 3852_Human_betaherpesvirus_6A_g_2 | 59101 |
| 3852_Human_betaherpesvirus_6A_g_3 | 59102 |
| 3852_Human_betaherpesvirus_6A_g_4 | 59103 |
| 3852_Human_betaherpesvirus_6A_g_5 | 59104 |
| 3853_Human_betaherpesvirus_6A_g_1 | 59105 |
| 3853_Human_betaherpesvirus_6A_g_2 | 59106 |
| 3853_Human_betaherpesvirus_6A_g_3 | 59107 |
| 3853_Human_betaherpesvirus_6A_g_4 | 59108 |
| 3853_Human_betaherpesvirus_6A_g_5 | 59109 |
| 3854_Human_betaherpesvirus_6A_g_1 | 59110 |
| 3854_Human_betaherpesvirus_6A_g_2 | 59111 |
| 3854_Human_betaherpesvirus_6A_g_3 | 59112 |
| 3854_Human_betaherpesvirus_6A_g_4 | 59113 |
| 3854_Human_betaherpesvirus_6A_g_5 | 59114 |
| 3855_Human_betaherpesvirus_6A_g_1 | 59115 |
| 3855_Human_betaherpesvirus_6A_g_2 | 59116 |
| 3855_Human_betaherpesvirus_6A_g_3 | 59117 |
| 3856_Human_betaherpesvirus_6A_g_1 | 59118 |
| 3856_Human_betaherpesvirus_6A_g_2 | 59119 |
| 3856_Human_betaherpesvirus_6A_g_3 | 59120 |
| 3857_Human_betaherpesvirus_6A_g_1 | 59121 |
| 3857_Human_betaherpesvirus_6A_g_2 | 59122 |
| 3857_Human_betaherpesvirus_6A_g_3 | 59123 |
| 3857_Human_betaherpesvirus_6A_g_4 | 59124 |
| 3857_Human_betaherpesvirus_6A_g_5 | 59125 |
| 3858_Human_betaherpesvirus_6A_g_1 | 59126 |
| 3858_Human_betaherpesvirus_6A_g_2 | 59127 |
| 3858_Human_betaherpesvirus_6A_g_3 | 59128 |
| 3858_Human_betaherpesvirus_6A_g_4 | 59129 |
| 3859_Human_betaherpesvirus_6A_g_1 | 59130 |
| 3859_Human_betaherpesvirus_6A_g_2 | 59131 |
| 3859_Human_betaherpesvirus_6A_g_3 | 59132 |
| 3859_Human_betaherpesvirus_6A_g_4 | 59133 |
| 3859_Human_betaherpesvirus_6A_g_5 | 59134 |
| 3860_Influenza_B_virus_(B/Lee/1940)_segment_3_g_1 | 59135 |
| 3860_Influenza_B_virus_(B/Lee/1940)_segment_3_g_2 | 59136 |
| 3860_Influenza_B_virus_(B/Lee/1940)_segment_3_g_3 | 59137 |
| 3860_Influenza_B_virus_(B/Lee/1940)_segment_3_g_4 | 59138 |
| 3860_Influenza_B_virus_(B/Lee/1940)_segment_3_g_5 | 59139 |
| 3861_Influenza_B_virus_(B/Lee/1940)_segment_3_g_1 | 59140 |
| 3861_Influenza_B_virus_(B/Lee/1940)_segment_3_g_2 | 59141 |
| 3861_Influenza_B_virus_(B/Lee/1940)_segment_3_g_3 | 59142 |
| 3861_Influenza_B_virus_(B/Lee/1940)_segment_3_g_4 | 59143 |
| 3861_Influenza_B_virus_(B/Lee/1940)_segment_3_g_5 | 59144 |
| 3862_Influenza_B_virus_(B/Lee/1940)_segment_3_g_1 | 59145 |
| 3862_Influenza_B_virus_(B/Lee/1940)_segment_3_g_2 | 59146 |
| 3862_Influenza_B_virus_(B/Lee/1940)_segment_3_g_3 | 59147 |
| 3862_Influenza_B_virus_(B/Lee/1940)_segment_3_g_4 | 59148 |
| 3862_Influenza_B_virus_(B/Lee/1940)_segment_3_g_5 | 59149 |
| 3863_Influenza_B_virus_(B/Lee/1940)_segment_3_g_1 | 59150 |
| 3863_Influenza_B_virus_(B/Lee/1940)_segment_3_g_2 | 59151 |
| 3863_Influenza_B_virus_(B/Lee/1940)_segment_3_g_3 | 59152 |
| 3863_Influenza_B_virus_(B/Lee/1940)_segment_3_g_4 | 59153 |
| 3863_Influenza_B_virus_(B/Lee/1940)_segment_3_g_5 | 59154 |
| 3864_Influenza_B_virus_(B/Lee/1940)_segment_3_g_1 | 59155 |
| 3864_Influenza_B_virus_(B/Lee/1940)_segment_3_g_2 | 59156 |
| 3864_Influenza_B_virus_(B/Lee/1940)_segment_3_g_3 | 59157 |
| 3864_Influenza_B_virus_(B/Lee/1940)_segment_3_g_4 | 59158 |
| 3864_Influenza_B_virus_(B/Lee/1940)_segment_3_g_5 | 59159 |
| 3865_Influenza_B_virus_(B/Lee/1940)_segment_3_g_1 | 59160 |
| 3865_Influenza_B_virus_(B/Lee/1940)_segment_3_g_2 | 59161 |
| 3865_Influenza_B_virus_(B/Lee/1940)_segment_3_g_3 | 59162 |
| 3865_Influenza_B_virus_(B/Lee/1940)_segment_3_g_4 | 59163 |
| 3865_Influenza_B_virus_(B/Lee/1940)_segment_3_g_5 | 59164 |
| 3866_Influenza_A_virus_(A/California/07/2009(H1N1))_{—} | 59165 |
| segment_4_hemagglutinin_(HA)_gene_g_1 | |
| 3866_Influenza_A_virus_(A/California/07/2009(H1N1))_{—} | 59166 |
| segment_4_hemagglutinin_(HA)_gene_g_2 | |
| 3866_Influenza_A_virus_(A/California/07/2009(H1N1))_{—} | 59167 |
| segment_4_hemagglutinin_(HA)_gene_g_3 | |
| 3866_Influenza_A_virus_(A/California/07/2009(H1N1))_{—} | 59168 |
| segment_4_hemagglutinin_(HA)_gene_g_4 | |
| 3866_Influenza_A_virus_(A/California/07/2009(H1N1))_{—} | 59169 |
| segment_4_hemagglutinin_(HA)_gene_g_5 | |
| 3867_Influenza_A_virus_(A/California/07/2009(H1N1))_{—} | 59170 |
| segment_4_hemagglutinin_(HA)_gene_g_1 | |
| 3867_Influenza_A_virus_(A/California/07/2009(H1N1))_{—} | 59171 |
| segment_4_hemagglutinin_(HA)_gene_g_2 | |
| 3867_Influenza_A_virus_(A/California/07/2009(H1N1))_{—} | 59172 |
| segment_4_hemagglutinin_(HA)_gene_g_3 | |
| 3867_Influenza_A_virus_(A/California/07/2009(H1N1))_{—} | 59173 |
| segment_4_hemagglutinin_(HA)_gene_g_4 | |
| 3867_Influenza_A_virus_(A/California/07/2009(H1N1))_{—} | 59174 |
| segment_4_hemagglutinin_(HA)_gene_g_5 | |
| 3868_Influenza_A_virus_(A/California/07/2009(H1N1))_{—} | 59175 |
| segment_4_hemagglutinin_(HA)_gene_g_1 | |
| 3868_Influenza_A_virus_(A/California/07/2009(H1N1))_{—} | 59176 |
| segment_4_hemagglutinin_(HA)_gene_g_2 | |
| 3868_Influenza_A_virus_(A/California/07/2009(H1N1))_{—} | 59177 |
| segment_4_hemagglutinin_(HA)_gene_g_3 | |
| 3868_Influenza_A_virus_(A/California/07/2009(H1N1))_{—} | 59178 |
| segment_4_hemagglutinin_(HA)_gene_g_4 | |
| 3868_Influenza_A_virus_(A/California/07/2009(H1N1))_{—} | 59179 |
| segment_4_hemagglutinin_(HA)_gene_g_5 | |
| 3869_Influenza_A_virus_(A/California/07/2009(H1N1))_{—} | 59180 |
| segment_4_hemagglutinin_(HA)_gene_g_1 | |
| 3869_Influenza_A_virus_(A/California/07/2009(H1N1))_{—} | 59181 |
| segment_4_hemagglutinin_(HA)_gene_g_2 | |
| 3869_Influenza_A_virus_(A/California/07/2009(H1N1))_{—} | 59182 |
| segment_4_hemagglutinin_(HA)_gene_g_3 | |
| 3869_Influenza_A_virus_(A/California/07/2009(H1N1))_{—} | 59183 |
| segment_4_hemagglutinin_(HA)_gene_g_4 | |
| 3869_Influenza_A_virus_(A/California/07/2009(H1N1))_{—} | 59184 |
| segment_4_hemagglutinin_(HA)_gene_g_5 | |
| 3870_Influenza_A_virus_(A/California/07/2009(H1N1))_{—} | 59185 |
| segment_4_hemagglutinin_(HA)_gene_g_1 | |
| 3870_Influenza_A_virus_(A/California/07/2009(H1N1))_{—} | 59186 |
| segment_4_hemagglutinin_(HA)_gene_g_2 | |
| 3870_Influenza_A_virus_(A/California/07/2009(H1N1))_{—} | 59187 |
| segment_4_hemagglutinin_(HA)_gene_g_3 | |
| 3870_Influenza_A_virus_(A/California/07/2009(H1N1))_{—} | 59188 |
| segment_4_hemagglutinin_(HA)_gene_g_4 | |
| 3870_Influenza_A_virus_(A/California/07/2009(H1N1))_{—} | 59189 |
| segment_4_hemagglutinin_(HA)_gene_g_5 | |
| 3871_Human_herpesvirus_6B_g_1 | 59190 |
| 3871_Human_herpesvirus_6B_g_2 | 59191 |
| 3871_Human_herpesvirus_6B_g_3 | 59192 |
| 3871_Human_herpesvirus_6B_g_4 | 59193 |
| 3871_Human_herpesvirus_6B_g_5 | 59194 |
| 3872_Human_herpesvirus_6B_g_1 | 59195 |
| 3872_Human_herpesvirus_6B_g_2 | 59196 |
| 3873_Human_herpesvirus_6B_g_1 | 59197 |
| 3873_Human_herpesvirus_6B_g_2 | 59198 |
| 3873_Human_herpesvirus_6B_g_3 | 59199 |
| 3875_Human_herpesvirus_6B_g_1 | 59200 |
| 3875_Human_herpesvirus_6B_g_2 | 59201 |
| 3875_Human_herpesvirus_6B_g_3 | 59202 |
| 3875_Human_herpesvirus_6B_g_4 | 59203 |
| 3875_Human_herpesvirus_6B_g_5 | 59204 |
| 3876_Human_herpesvirus_6B_g_1 | 59205 |
| 3876_Human_herpesvirus_6B_g_2 | 59206 |
| 3876_Human_herpesvirus_6B_g_3 | 59207 |
| 3876_Human_herpesvirus_6B_g_4 | 59208 |
| 3876_Human_herpesvirus_6B_g_5 | 59209 |
| 3877_Human_herpesvirus_6B_g_1 | 59210 |
| 3877_Human_herpesvirus_6B_g_2 | 59211 |
| 3877_Human_herpesvirus_6B_g_3 | 59212 |
| 3878_Human_herpesvirus_6B_g_1 | 59213 |
| 3878_Human_herpesvirus_6B_g_2 | 59214 |
| 3878_Human_herpesvirus_6B_g_3 | 59215 |
| 3878_Human_herpesvirus_6B_g_4 | 59216 |
| 3878_Human_herpesvirus_6B_g_5 | 59217 |
| 3879_Human_herpesvirus_6B_g_1 | 59218 |
| 3879_Human_herpesvirus_6B_g_2 | 59219 |
| 3879_Human_herpesvirus_6B_g_3 | 59220 |
| 3879_Human_herpesvirus_6B_g_4 | 59221 |
| 3879_Human_herpesvirus_6B_g_5 | 59222 |
| 3880_Human_herpesvirus_6B_g_1 | 59223 |
| 3880_Human_herpesvirus_6B_g_2 | 59224 |
| 3880_Human_herpesvirus_6B_g_3 | 59225 |
| 3881_Human_herpesvirus_6B_g_1 | 59226 |
| 3881_Human_herpesvirus_6B_g_2 | 59227 |
| 3881_Human_herpesvirus_6B_g_3 | 59228 |
| 3881_Human_herpesvirus_6B_g_4 | 59229 |
| 3881_Human_herpesvirus_6B_g_5 | 59230 |
| 3882_Human_herpesvirus_6B_g_1 | 59231 |
| 3882_Human_herpesvirus_6B_g_2 | 59232 |
| 3882_Human_herpesvirus_6B_g_3 | 59233 |
| 3882_Human_herpesvirus_6B_g_4 | 59234 |
| 3882_Human_herpesvirus_6B_g_5 | 59235 |
| 3883_Human_herpesvirus_6B_g_1 | 59236 |
| 3883_Human_herpesvirus_6B_g_2 | 59237 |
| 3883_Human_herpesvirus_6B_g_3 | 59238 |
| 3883_Human_herpesvirus_6B_g_4 | 59239 |
| 3883_Human_herpesvirus_6B_g_5 | 59240 |
| 3884_Human_herpesvirus_6B_g_1 | 59241 |
| 3884_Human_herpesvirus_6B_g_2 | 59242 |
| 3884_Human_herpesvirus_6B_g_3 | 59243 |
| 3884_Human_herpesvirus_6B_g_4 | 59244 |
| 3884_Human_herpesvirus_6B_g_5 | 59245 |
| 3885_Human_herpesvirus_6B_g_1 | 59246 |
| 3885_Human_herpesvirus_6B_g_2 | 59247 |
| 3885_Human_herpesvirus_6B_g_3 | 59248 |
| 3885_Human_herpesvirus_6B_g_4 | 59249 |
| 3885_Human_herpesvirus_6B_g_5 | 59250 |
| 3886_Human_herpesvirus_6B_g_1 | 59251 |
| 3886_Human_herpesvirus_6B_g_2 | 59252 |
| 3886_Human_herpesvirus_6B_g_3 | 59253 |
| 3886_Human_herpesvirus_6B_g_4 | 59254 |
| 3886_Human_herpesvirus_6B_g_5 | 59255 |
| 3887_Human_herpesvirus_6B_g_1 | 59256 |
| 3887_Human_herpesvirus_6B_g_2 | 59257 |
| 3887_Human_herpesvirus_6B_g_3 | 59258 |
| 3887_Human_herpesvirus_6B_g_4 | 59259 |
| 3887_Human_herpesvirus_6B_g_5 | 59260 |
| 3888_Human_herpesvirus_6B_g_1 | 59261 |
| 3888_Human_herpesvirus_6B_g_2 | 59262 |
| 3888_Human_herpesvirus_6B_g_3 | 59263 |
| 3888_Human_herpesvirus_6B_g_4 | 59264 |
| 3888_Human_herpesvirus_6B_g_5 | 59265 |
| 3889_Human_herpesvirus_6B_g_1 | 59266 |
| 3889_Human_herpesvirus_6B_g_2 | 59267 |
| 3889_Human_herpesvirus_6B_g_3 | 59268 |
| 3889_Human_herpesvirus_6B_g_4 | 59269 |
| 3889_Human_herpesvirus_6B_g_5 | 59270 |
| 3890_Human_herpesvirus_6B_g_1 | 59271 |
| 3890_Human_herpesvirus_6B_g_2 | 59272 |
| 3890_Human_herpesvirus_6B_g_3 | 59273 |
| 3890_Human_herpesvirus_6B_g_4 | 59274 |
| 3890_Human_herpesvirus_6B_g_5 | 59275 |
| 3891_Human_herpesvirus_6B_g_1 | 59276 |
| 3891_Human_herpesvirus_6B_g_2 | 59277 |
| 3891_Human_herpesvirus_6B_g_3 | 59278 |
| 3891_Human_herpesvirus_6B_g_4 | 59279 |
| 3891_Human_herpesvirus_6B_g_5 | 59280 |
| 3892_Human_herpesvirus_6B_g_1 | 59281 |
| 3892_Human_herpesvirus_6B_g_2 | 59282 |
| 3892_Human_herpesvirus_6B_g_3 | 59283 |
| 3892_Human_herpesvirus_6B_g_4 | 59284 |
| 3892_Human_herpesvirus_6B_g_5 | 59285 |
| 3893_Human_herpesvirus_6B_g_1 | 59286 |
| 3893_Human_herpesvirus_6B_g_2 | 59287 |
| 3893_Human_herpesvirus_6B_g_3 | 59288 |
| 3893_Human_herpesvirus_6B_g_4 | 59289 |
| 3893_Human_herpesvirus_6B_g_5 | 59290 |
| 3894_Human_herpesvirus_6B_g_1 | 59291 |
| 3894_Human_herpesvirus_6B_g_2 | 59292 |
| 3894_Human_herpesvirus_6B_g_3 | 59293 |
| 3894_Human_herpesvirus_6B_g_4 | 59294 |
| 3894_Human_herpesvirus_6B_g_5 | 59295 |
| 3895_Human_herpesvirus_6B_g_1 | 59296 |
| 3895_Human_herpesvirus_6B_g_2 | 59297 |
| 3895_Human_herpesvirus_6B_g_3 | 59298 |
| 3895_Human_herpesvirus_6B_g_4 | 59299 |
| 3895_Human_herpesvirus_6B_g_5 | 59300 |
| 3896_Human_herpesvirus_6B_g_1 | 59301 |
| 3896_Human_herpesvirus_6B_g_2 | 59302 |
| 3896_Human_herpesvirus_6B_g_3 | 59303 |
| 3896_Human_herpesvirus_6B_g_4 | 59304 |
| 3896_Human_herpesvirus_6B_g_5 | 59305 |
| 3897_Human_herpesvirus_6B_g_1 | 59306 |
| 3897_Human_herpesvirus_6B_g_2 | 59307 |
| 3897_Human_herpesvirus_6B_g_3 | 59308 |
| 3897_Human_herpesvirus_6B_g_4 | 59309 |
| 3897_Human_herpesvirus_6B_g_5 | 59310 |
| 3898_Human_herpesvirus_6B_g_1 | 59311 |
| 3898_Human_herpesvirus_6B_g_2 | 59312 |
| 3898_Human_herpesvirus_6B_g_3 | 59313 |
| 3898_Human_herpesvirus_6B_g_4 | 59314 |
| 3898_Human_herpesvirus_6B_g_5 | 59315 |
| 3899_Human_herpesvirus_6B_g_1 | 59316 |
| 3899_Human_herpesvirus_6B_g_2 | 59317 |
| 3899_Human_herpesvirus_6B_g_3 | 59318 |
| 3899_Human_herpesvirus_6B_g_4 | 59319 |
| 3899_Human_herpesvirus_6B_g_5 | 59320 |
| 3900_Human_herpesvirus_6B_g_1 | 59321 |
| 3900_Human_herpesvirus_6B_g_2 | 59322 |
| 3900_Human_herpesvirus_6B_g_3 | 59323 |
| 3900_Human_herpesvirus_6B_g_4 | 59324 |
| 3900_Human_herpesvirus_6B_g_5 | 59325 |
| 3901_Human_herpesvirus_6B_g_1 | 59326 |
| 3901_Human_herpesvirus_6B_g_2 | 59327 |
| 3901_Human_herpesvirus_6B_g_3 | 59328 |
| 3901_Human_herpesvirus_6B_g_4 | 59329 |
| 3901_Human_herpesvirus_6B_g_5 | 59330 |
| 3902_Human_herpesvirus_6B_g_1 | 59331 |
| 3903_Human_herpesvirus_6B_g_1 | 59332 |
| 3903_Human_herpesvirus_6B_g_2 | 59333 |
| 3903_Human_herpesvirus_6B_g_3 | 59334 |
| 3903_Human_herpesvirus_6B_g_4 | 59335 |
| 3904_Human_herpesvirus_6B_g_1 | 59336 |
| 3904_Human_herpesvirus_6B_g_2 | 59337 |
| 3904_Human_herpesvirus_6B_g_3 | 59338 |
| 3904_Human_herpesvirus_6B_g_4 | 59339 |
| 3904_Human_herpesvirus_6B_g_5 | 59340 |
| 3905_Human_herpesvirus_6B_g_1 | 59341 |
| 3905_Human_herpesvirus_6B_g_2 | 59342 |
| 3905_Human_herpesvirus_6B_g_3 | 59343 |
| 3905_Human_herpesvirus_6B_g_4 | 59344 |
| 3905_Human_herpesvirus_6B_g_5 | 59345 |
| 3906_Influenza_A_virus_(A/Puerto_Rico/8/1934(H1N1))_{—} | 59346 |
| segment_7_g_1 | |
| 3906_Influenza_A_virus_(A/Puerto_Rico/8/1934(H1N1))_{—} | 59347 |
| segment_7_g_2 | |
| 3906_Influenza_A_virus_(A/Puerto_Rico/8/1934(H1N1))_{—} | 59348 |
| segment_7_g_3 | |
| 3906_Influenza_A_virus_(A/Puerto_Rico/8/1934(H1N1))_{—} | 59349 |
| segment_7_g_4 | |
| 3906_Influenza_A_virus_(A/Puerto_Rico/8/1934(H1N1))_{—} | 59350 |
| segment_7_g_5 | |
| 3907_Influenza_A_virus_(A/Puerto_Rico/8/1934(H1N1))_{—} | 59351 |
| segment_7_g_1 | |
| 3907_Influenza_A_virus_(A/Puerto_Rico/8/1934(H1N1))_{—} | 59352 |
| segment_7_g_2 | |
| 3907_Influenza_A_virus_(A/Puerto_Rico/8/1934(H1N1))_{—} | 59353 |
| segment_7_g_3 | |
| 3907_Influenza_A_virus_(A/Puerto_Rico/8/1934(H1N1))_{—} | 59354 |
| segment_7_g_4 | |
| 3907_Influenza_A_virus_(A/Puerto_Rico/8/1934(H1N1))_{—} | 59355 |
| segment_7_g_5 | |
| 3908_Influenza_A_virus_(A/California/07/2009(H1N1))_segment_8_nuclear_export_{—} | 59356 |
| protein_(NEP)_and_nonstructural_protein_1_(NS1)_genes_g_1 | |
| 3908_Influenza_A_virus_(A/California/07/2009(H1N1))_segment_8_nuclear_export_{—} | 59357 |
| protein_(NEP)_and_nonstructural_protein_1_(NS1)_genes_g_2 | |
| 3908_Influenza_A_virus_(A/California/07/2009(H1N1))_segment_8_nuclear_export_{—} | 59358 |
| protein_(NEP)_and_nonstructural_protein_1_(NS1)_genes_g_3 | |
| 3908_Influenza_A_virus_(A/California/07/2009(H1N1))_segment_8_nuclear_export_{—} | 59359 |
| protein_(NEP)_and_nonstructural_protein_1_(NS1)_genes_g_4 | |
| 3908_Influenza_A_virus_(A/California/07/2009(H1N1))_segment_8_nuclear_export_{—} | 59360 |
| protein_(NEP)_and_nonstructural_protein_1_(NS1)_genes_g_5 | |
| 3909_Influenza_A_virus_(A/California/07/2009(H1N1))_segment_8_nuclear_export_{—} | 59361 |
| protein_(NEP)_and_nonstructural_protein_1_(NS1)_genes_g_1 | |
| 3909_Influenza_A_virus_(A/California/07/2009(H1N1))_segment_8_nuclear_export_{—} | 59362 |
| protein_(NEP)_and_nonstructural_protein_1_(NS1)_genes_g_2 | |
| 3909_Influenza_A_virus_(A/California/07/2009(H1N1))_segment_8_nuclear_export_{—} | 59363 |
| protein_(NEP)_and_nonstructural_protein_1_(NS1)_genes_g_3 | |
| 3909_Influenza_A_virus_(A/California/07/2009(H1N1))_segment_8_nuclear_export_{—} | 59364 |
| protein_(NEP)_and_nonstructural_protein_1_(NS1)_genes_g_4 | |
| 3909_Influenza_A_virus_(A/California/07/2009(H1N1))_segment_8_nuclear_export_{—} | 59365 |
| protein_(NEP)_and_nonstructural_protein_1_(NS1)_genes_g_5 | |
| 3910_Influenza_A_virus_(A/California/07/2009(H1N1))_segment_8_nuclear_export_{—} | 59366 |
| protein_(NEP)_and_nonstructural_protein_1_(NS1)_genes_g_1 | |
| 3910_Influenza_A_virus_(A/California/07/2009(H1N1))_segment_8_nuclear_export_{—} | 59367 |
| protein_(NEP)_and_nonstructural_protein_1_(NS1)_genes_g_2 | |
| 3910_Influenza_A_virus_(A/California/07/2009(H1N1))_segment_8_nuclear_export_{—} | 59368 |
| protein_(NEP)_and_nonstructural_protein_1_(NS1)_genes_g_3 | |
| 3910_Influenza_A_virus_(A/California/07/2009(H1N1))_segment_8_nuclear_export_{—} | 59369 |
| protein_(NEP)_and_nonstructural_protein_1_(NS1)_genes_g_4 | |
| 3910_Influenza_A_virus_(A/California/07/2009(H1N1))_segment_8_nuclear_export_{—} | 59370 |
| protein_(NEP)_and_nonstructural_protein_1_(NS1)_genes_g_5 | |
| 3911_Human_papillomavirus_type_7_genomic_DNA_g_1 | 59371 |
| 3911_Human_papillomavirus_type_7_genomic_DNA_g_2 | 59372 |
| 3911_Human_papillomavirus_type_7_genomic_DNA_g_3 | 59373 |
| 3911_Human_papillomavirus_type_7_genomic_DNA_g_4 | 59374 |
| 3911_Human_papillomavirus_type_7_genomic_DNA_g_5 | 59375 |
| 3912_Human_papillomavirus_type_7_genomic_DNA_g_1 | 59376 |
| 3912_Human_papillomavirus_type_7_genomic_DNA_g_2 | 59377 |
| 3912_Human_papillomavirus_type_7_genomic_DNA_g_3 | 59378 |
| 3912_Human_papillomavirus_type_7_genomic_DNA_g_4 | 59379 |
| 3912_Human_papillomavirus_type_7_genomic_DNA_g_5 | 59380 |
| 3913_Human_papillomavirus_type_7_genomic_DNA_g_1 | 59381 |
| 3913_Human_papillomavirus_type_7_genomic_DNA_g_2 | 59382 |
| 3913_Human_papillomavirus_type_7_genomic_DNA_g_3 | 59383 |
| 3913_Human_papillomavirus_type_7_genomic_DNA_g_4 | 59384 |
| 3913_Human_papillomavirus_type_7_genomic_DNA_g_5 | 59385 |
| 3914_Human_papillomavirus_type_7_genomic_DNA_g_1 | 59386 |
| 3914_Human_papillomavirus_type_7_genomic_DNA_g_2 | 59387 |
| 3914_Human_papillomavirus_type_7_genomic_DNA_g_3 | 59388 |
| 3914_Human_papillomavirus_type_7_genomic_DNA_g_4 | 59389 |
| 3914_Human_papillomavirus_type_7_genomic_DNA_g_5 | 59390 |
| 3915_Human_papillomavirus_type_7_genomic_DNA_g_1 | 59391 |
| 3915_Human_papillomavirus_type_7_genomic_DNA_g_2 | 59392 |
| 3915_Human_papillomavirus_type_7_genomic_DNA_g_3 | 59393 |
| 3915_Human_papillomavirus_type_7_genomic_DNA_g_4 | 59394 |
| 3915_Human_papillomavirus_type_7_genomic_DNA_g_5 | 59395 |
| 3916_Human_papillomavirus_type_7_genomic_DNA_g_1 | 59396 |
| 3916_Human_papillomavirus_type_7_genomic_DNA_g_2 | 59397 |
| 3916_Human_papillomavirus_type_7_genomic_DNA_g_3 | 59398 |
| 3916_Human_papillomavirus_type_7_genomic_DNA_g_4 | 59399 |
| 3916_Human_papillomavirus_type_7_genomic_DNA_g_5 | 59400 |
| 3917_Human_papillomavirus_type_7_genomic_DNA_g_1 | 59401 |
| 3917_Human_papillomavirus_type_7_genomic_DNA_g_2 | 59402 |
| 3917_Human_papillomavirus_type_7_genomic_DNA_g_3 | 59403 |
| 3917_Human_papillomavirus_type_7_genomic_DNA_g_4 | 59404 |
| 3917_Human_papillomavirus_type_7_genomic_DNA_g_5 | 59405 |
| 3918_Human_papillomavirus_type_7_genomic_DNA_g_1 | 59406 |
| 3918_Human_papillomavirus_type_7_genomic_DNA_g_2 | 59407 |
| 3918_Human_papillomavirus_type_7_genomic_DNA_g_3 | 59408 |
| 3918_Human_papillomavirus_type_7_genomic_DNA_g_4 | 59409 |
| 3918_Human_papillomavirus_type_7_genomic_DNA_g_5 | 59410 |
| 3919_Human_papillomavirus_type_7_genomic_DNA_g_1 | 59411 |
| 3919_Human_papillomavirus_type_7_genomic_DNA_g_2 | 59412 |
| 3919_Human_papillomavirus_type_7_genomic_DNA_g_3 | 59413 |
| 3919_Human_papillomavirus_type_7_genomic_DNA_g_4 | 59414 |
| 3919_Human_papillomavirus_type_7_genomic_DNA_g_5 | 59415 |
| 3920_Human_papillomavirus_type_7_genomic_DNA_g_1 | 59416 |
| 3920_Human_papillomavirus_type_7_genomic_DNA_g_2 | 59417 |
| 3920_Human_papillomavirus_type_7_genomic_DNA_g_3 | 59418 |
| 3920_Human_papillomavirus_type_7_genomic_DNA_g_4 | 59419 |
| 3920_Human_papillomavirus_type_7_genomic_DNA_g_5 | 59420 |
| 3921_Human_papillomavirus_type_7_genomic_DNA_g_1 | 59421 |
| 3921_Human_papillomavirus_type_7_genomic_DNA_g_2 | 59422 |
| 3921_Human_papillomavirus_type_7_genomic_DNA_g_3 | 59423 |
| 3921_Human_papillomavirus_type_7_genomic_DNA_g_4 | 59424 |
| 3921_Human_papillomavirus_type_7_genomic_DNA_g_5 | 59425 |
| 3922_Human_papillomavirus_type_7_genomic_DNA_g_1 | 59426 |
| 3922_Human_papillomavirus_type_7_genomic_DNA_g_2 | 59427 |
| 3922_Human_papillomavirus_type_7_genomic_DNA_g_3 | 59428 |
| 3922_Human_papillomavirus_type_7_genomic_DNA_g_4 | 59429 |
| 3922_Human_papillomavirus_type_7_genomic_DNA_g_5 | 59430 |
| 3923_Human_papillomavirus_type_7_genomic_DNA_g_1 | 59431 |
| 3923_Human_papillomavirus_type_7_genomic_DNA_g_2 | 59432 |
| 3923_Human_papillomavirus_type_7_genomic_DNA_g_3 | 59433 |
| 3923_Human_papillomavirus_type_7_genomic_DNA_g_4 | 59434 |
| 3923_Human_papillomavirus_type_7_genomic_DNA_g_5 | 59435 |
| 3924_Human_papillomavirus_type_7_genomic_DNA_g_1 | 59436 |
| 3924_Human_papillomavirus_type_7_genomic_DNA_g_2 | 59437 |
| 3924_Human_papillomavirus_type_7_genomic_DNA_g_3 | 59438 |
| 3924_Human_papillomavirus_type_7_genomic_DNA_g_4 | 59439 |
| 3924_Human_papillomavirus_type_7_genomic_DNA_g_5 | 59440 |
| 3925_Human_papillomavirus_type_7_genomic_DNA_g_1 | 59441 |
| 3925_Human_papillomavirus_type_7_genomic_DNA_g_2 | 59442 |
| 3925_Human_papillomavirus_type_7_genomic_DNA_g_3 | 59443 |
| 3925_Human_papillomavirus_type_7_genomic_DNA_g_4 | 59444 |
| 3925_Human_papillomavirus_type_7_genomic_DNA_g_5 | 59445 |
| 3926_Human_papillomavirus_type_7_genomic_DNA_g_1 | 59446 |
| 3926_Human_papillomavirus_type_7_genomic_DNA_g_2 | 59447 |
| 3926_Human_papillomavirus_type_7_genomic_DNA_g_3 | 59448 |
| 3926_Human_papillomavirus_type_7_genomic_DNA_g_4 | 59449 |
| 3926_Human_papillomavirus_type_7_genomic_DNA_g_5 | 59450 |
| 3927_Human_papillomavirus_type_53_g_1 | 59451 |
| 3927_Human_papillomavirus_type_53_g_2 | 59452 |
| 3927_Human_papillomavirus_type_53_g_3 | 59453 |
| 3927_Human_papillomavirus_type_53_g_4 | 59454 |
| 3927_Human_papillomavirus_type_53_g_5 | 59455 |
| 3928_Human_papillomavirus_type_53_g_1 | 59456 |
| 3928_Human_papillomavirus_type_53_g_2 | 59457 |
| 3928_Human_papillomavirus_type_53_g_3 | 59458 |
| 3928_Human_papillomavirus_type_53_g_4 | 59459 |
| 3928_Human_papillomavirus_type_53_g_5 | 59460 |
| 3929_Human_papillomavirus_type_53_g_1 | 59461 |
| 3929_Human_papillomavirus_type_53_g_2 | 59462 |
| 3929_Human_papillomavirus_type_53_g_3 | 59463 |
| 3929_Human_papillomavirus_type_53_g_4 | 59464 |
| 3929_Human_papillomavirus_type_53_g_5 | 59465 |
| 3930_Human_papillomavirus_type_53_g_1 | 59466 |
| 3930_Human_papillomavirus_type_53_g_2 | 59467 |
| 3930_Human_papillomavirus_type_53_g_3 | 59468 |
| 3930_Human_papillomavirus_type_53_g_4 | 59469 |
| 3930_Human_papillomavirus_type_53_g_5 | 59470 |
| 3931_Human_papillomavirus_type_53_g_1 | 59471 |
| 3931_Human_papillomavirus_type_53_g_2 | 59472 |
| 3931_Human_papillomavirus_type_53_g_3 | 59473 |
| 3931_Human_papillomavirus_type_53_g_4 | 59474 |
| 3931_Human_papillomavirus_type_53_g_5 | 59475 |
| 3932_Human_papillomavirus_type_53_g_1 | 59476 |
| 3932_Human_papillomavirus_type_53_g_2 | 59477 |
| 3932_Human_papillomavirus_type_53_g_3 | 59478 |
| 3932_Human_papillomavirus_type_53_g_4 | 59479 |
| 3932_Human_papillomavirus_type_53_g_5 | 59480 |
| 3933_Human_papillomavirus_type_53_g_1 | 59481 |
| 3933_Human_papillomavirus_type_53_g_2 | 59482 |
| 3933_Human_papillomavirus_type_53_g_3 | 59483 |
| 3933_Human_papillomavirus_type_53_g_4 | 59484 |
| 3933_Human_papillomavirus_type_53_g_5 | 59485 |
| 3934_Human_papillomavirus_type_53_g_1 | 59486 |
| 3934_Human_papillomavirus_type_53_g_2 | 59487 |
| 3934_Human_papillomavirus_type_53_g_3 | 59488 |
| 3934_Human_papillomavirus_type_53_g_4 | 59489 |
| 3934_Human_papillomavirus_type_53_g_5 | 59490 |
| 3935_Human_papillomavirus_type_53_g_1 | 59491 |
| 3935_Human_papillomavirus_type_53_g_2 | 59492 |
| 3935_Human_papillomavirus_type_53_g_3 | 59493 |
| 3935_Human_papillomavirus_type_53_g_4 | 59494 |
| 3935_Human_papillomavirus_type_53_g_5 | 59495 |
| 3936_Human_papillomavirus_type_53_g_1 | 59496 |
| 3936_Human_papillomavirus_type_53_g_2 | 59497 |
| 3936_Human_papillomavirus_type_53_g_3 | 59498 |
| 3936_Human_papillomavirus_type_53_g_4 | 59499 |
| 3937_Human_papillomavirus_type_53_g_1 | 59500 |
| 3937_Human_papillomavirus_type_53_g_2 | 59501 |
| 3937_Human_papillomavirus_type_53_g_3 | 59502 |
| 3937_Human_papillomavirus_type_53_g_4 | 59503 |
| 3937_Human_papillomavirus_type_53_g_5 | 59504 |
| 3938_Human_papillomavirus_type_53_g_1 | 59505 |
| 3938_Human_papillomavirus_type_53_g_2 | 59506 |
| 3938_Human_papillomavirus_type_53_g_3 | 59507 |
| 3938_Human_papillomavirus_type_53_g_4 | 59508 |
| 3938_Human_papillomavirus_type_53_g_5 | 59509 |
| 3939_Human_papillomavirus_type_53_g_1 | 59510 |
| 3939_Human_papillomavirus_type_53_g_2 | 59511 |
| 3939_Human_papillomavirus_type_53_g_3 | 59512 |
| 3939_Human_papillomavirus_type_53_g_4 | 59513 |
| 3939_Human_papillomavirus_type_53_g_5 | 59514 |
| 3940_Human_papillomavirus_type_53_g_1 | 59515 |
| 3940_Human_papillomavirus_type_53_g_2 | 59516 |
| 3940_Human_papillomavirus_type_53_g_3 | 59517 |
| 3940_Human_papillomavirus_type_53_g_4 | 59518 |
| 3940_Human_papillomavirus_type_53_g_5 | 59519 |
| 3941_Human_papillomavirus_type_53_g_1 | 59520 |
| 3941_Human_papillomavirus_type_53_g_2 | 59521 |
| 3941_Human_papillomavirus_type_53_g_3 | 59522 |
| 3941_Human_papillomavirus_type_53_g_4 | 59523 |
| 3941_Human_papillomavirus_type_53_g_5 | 59524 |
| 3942_Human_papillomavirus_type_53_g_1 | 59525 |
| 3942_Human_papillomavirus_type_53_g_2 | 59526 |
| 3942_Human_papillomavirus_type_53_g_3 | 59527 |
| 3942_Human_papillomavirus_type_53_g_4 | 59528 |
| 3942_Human_papillomavirus_type_53_g_5 | 59529 |
| 3943_Human_papillomavirus_type_53_g_1 | 59530 |
| 3943_Human_papillomavirus_type_53_g_2 | 59531 |
| 3943_Human_papillomavirus_type_53_g_3 | 59532 |
| 3943_Human_papillomavirus_type_53_g_4 | 59533 |
| 3943_Human_papillomavirus_type_53_g_5 | 59534 |
| 3944_Human_rhinovirus_1_strain_ATCC_VR-1559_g_1 | 59535 |
| 3944_Human_rhinovirus_1_strain_ATCC_VR-1559_g_2 | 59536 |
| 3944_Human_rhinovirus_1_strain_ATCC_VR-1559_g_3 | 59537 |
| 3944_Human_rhinovirus_1_strain_ATCC_VR-1559_g_4 | 59538 |
| 3944_Human_rhinovirus_1_strain_ATCC_VR-1559_g_5 | 59539 |
| 3945_Human_rhinovirus_1_strain_ATCC_VR-1559_g_1 | 59540 |
| 3945_Human_rhinovirus_1_strain_ATCC_VR-1559_g_2 | 59541 |
| 3945_Human_rhinovirus_1_strain_ATCC_VR-1559_g_3 | 59542 |
| 3945_Human_rhinovirus_1_strain_ATCC_VR-1559_g_4 | 59543 |
| 3945_Human_rhinovirus_1_strain_ATCC_VR-1559_g_5 | 59544 |
| 3946_Human_rhinovirus_1_strain_ATCC_VR-1559_g_1 | 59545 |
| 3946_Human_rhinovirus_1_strain_ATCC_VR-1559_g_2 | 59546 |
| 3946_Human_rhinovirus_1_strain_ATCC_VR-1559_g_3 | 59547 |
| 3946_Human_rhinovirus_1_strain_ATCC_VR-1559_g_4 | 59548 |
| 3946_Human_rhinovirus_1_strain_ATCC_VR-1559_g_5 | 59549 |
| 3947_Human_rhinovirus_1_strain_ATCC_VR-1559_g_1 | 59550 |
| 3947_Human_rhinovirus_1_strain_ATCC_VR-1559_g_2 | 59551 |
| 3947_Human_rhinovirus_1_strain_ATCC_VR-1559_g_3 | 59552 |
| 3947_Human_rhinovirus_1_strain_ATCC_VR-1559_g_4 | 59553 |
| 3947_Human_rhinovirus_1_strain_ATCC_VR-1559_g_5 | 59554 |
| 3948_Human_rhinovirus_1_strain_ATCC_VR-1559_g_1 | 59555 |
| 3948_Human_rhinovirus_1_strain_ATCC_VR-1559_g_2 | 59556 |
| 3948_Human_rhinovirus_1_strain_ATCC_VR-1559_g_3 | 59557 |
| 3948_Human_rhinovirus_1_strain_ATCC_VR-1559_g_4 | 59558 |
| 3948_Human_rhinovirus_1_strain_ATCC_VR-1559_g_5 | 59559 |
| 3949_Human_rhinovirus_1_strain_ATCC_VR-1559_g_1 | 59560 |
| 3949_Human_rhinovirus_1_strain_ATCC_VR-1559_g_2 | 59561 |
| 3949_Human_rhinovirus_1_strain_ATCC_VR-1559_g_3 | 59562 |
| 3949_Human_rhinovirus_1_strain_ATCC_VR-1559_g_4 | 59563 |
| 3949_Human_rhinovirus_1_strain_ATCC_VR-1559_g_5 | 59564 |
| 3950_Human_rhinovirus_1_strain_ATCC_VR-1559_g_1 | 59565 |
| 3950_Human_rhinovirus_1_strain_ATCC_VR-1559_g_2 | 59566 |
| 3950_Human_rhinovirus_1_strain_ATCC_VR-1559_g_3 | 59567 |
| 3950_Human_rhinovirus_1_strain_ATCC_VR-1559_g_4 | 59568 |
| 3950_Human_rhinovirus_1_strain_ATCC_VR-1559_g_5 | 59569 |
| 3951_Human_rhinovirus_1_strain_ATCC_VR-1559_g_1 | 59570 |
| 3951_Human_rhinovirus_1_strain_ATCC_VR-1559_g_2 | 59571 |
| 3951_Human_rhinovirus_1_strain_ATCC_VR-1559_g_3 | 59572 |
| 3951_Human_rhinovirus_1_strain_ATCC_VR-1559_g_4 | 59573 |
| 3951_Human_rhinovirus_1_strain_ATCC_VR-1559_g_5 | 59574 |
| 3952_Human_rhinovirus_1_strain_ATCC_VR-1559_g_1 | 59575 |
| 3952_Human_rhinovirus_1_strain_ATCC_VR-1559_g_2 | 59576 |
| 3952_Human_rhinovirus_1_strain_ATCC_VR-1559_g_3 | 59577 |
| 3952_Human_rhinovirus_1_strain_ATCC_VR-1559_g_4 | 59578 |
| 3952_Human_rhinovirus_1_strain_ATCC_VR-1559_g_5 | 59579 |
| 3953_Human_rhinovirus_1_strain_ATCC_VR-1559_g_1 | 59580 |
| 3953_Human_rhinovirus_1_strain_ATCC_VR-1559_g_2 | 59581 |
| 3953_Human_rhinovirus_1_strain_ATCC_VR-1559_g_3 | 59582 |
| 3953_Human_rhinovirus_1_strain_ATCC_VR-1559_g_4 | 59583 |
| 3953_Human_rhinovirus_1_strain_ATCC_VR-1559_g_5 | 59584 |
| 3954_Human_rhinovirus_1_strain_ATCC_VR-1559_g_1 | 59585 |
| 3954_Human_rhinovirus_1_strain_ATCC_VR-1559_g_2 | 59586 |
| 3954_Human_rhinovirus_1_strain_ATCC_VR-1559_g_3 | 59587 |
| 3954_Human_rhinovirus_1_strain_ATCC_VR-1559_g_4 | 59588 |
| 3954_Human_rhinovirus_1_strain_ATCC_VR-1559_g_5 | 59589 |
| 3955_Human_papillomavirus_type_166_isolate_KC9_g_1 | 59590 |
| 3955_Human_papillomavirus_type_166_isolate_KC9_g_2 | 59591 |
| 3955_Human_papillomavirus_type_166_isolate_KC9_g_3 | 59592 |
| 3955_Human_papillomavirus_type_166_isolate_KC9_g_4 | 59593 |
| 3955_Human_papillomavirus_type_166_isolate_KC9_g_5 | 59594 |
| 3956_Human_papillomavirus_type_166_isolate_KC9_g_1 | 59595 |
| 3956_Human_papillomavirus_type_166_isolate_KC9_g_2 | 59596 |
| 3956_Human_papillomavirus_type_166_isolate_KC9_g_3 | 59597 |
| 3956_Human_papillomavirus_type_166_isolate_KC9_g_4 | 59598 |
| 3956_Human_papillomavirus_type_166_isolate_KC9_g_5 | 59599 |
| 3957_Human_papillomavirus_type_166_isolate_KC9_g_1 | 59600 |
| 3957_Human_papillomavirus_type_166_isolate_KC9_g_2 | 59601 |
| 3957_Human_papillomavirus_type_166_isolate_KC9_g_3 | 59602 |
| 3957_Human_papillomavirus_type_166_isolate_KC9_g_4 | 59603 |
| 3957_Human_papillomavirus_type_166_isolate_KC9_g_5 | 59604 |
| 3958_Human_papillomavirus_type_166_isolate_KC9_g_1 | 59605 |
| 3958_Human_papillomavirus_type_166_isolate_KC9_g_2 | 59606 |
| 3958_Human_papillomavirus_type_166_isolate_KC9_g_3 | 59607 |
| 3958_Human_papillomavirus_type_166_isolate_KC9_g_4 | 59608 |
| 3958_Human_papillomavirus_type_166_isolate_KC9_g_5 | 59609 |
| 3959_Human_papillomavirus_type_166_isolate_KC9_g_1 | 59610 |
| 3959_Human_papillomavirus_type_166_isolate_KC9_g_2 | 59611 |
| 3959_Human_papillomavirus_type_166_isolate_KC9_g_3 | 59612 |
| 3959_Human_papillomavirus_type_166_isolate_KC9_g_4 | 59613 |
| 3959_Human_papillomavirus_type_166_isolate_KC9_g_5 | 59614 |
| 3960_Human_papillomavirus_type_166_isolate_KC9_g_1 | 59615 |
| 3960_Human_papillomavirus_type_166_isolate_KC9_g_2 | 59616 |
| 3960_Human_papillomavirus_type_166_isolate_KC9_g_3 | 59617 |
| 3960_Human_papillomavirus_type_166_isolate_KC9_g_4 | 59618 |
| 3960_Human_papillomavirus_type_166_isolate_KC9_g_5 | 59619 |
| 3961_Human_papillomavirus_type_166_isolate_KC9_g_1 | 59620 |
| 3961_Human_papillomavirus_type_166_isolate_KC9_g_2 | 59621 |
| 3961_Human_papillomavirus_type_166_isolate_KC9_g_3 | 59622 |
| 3961_Human_papillomavirus_type_166_isolate_KC9_g_4 | 59623 |
| 3961_Human_papillomavirus_type_166_isolate_KC9_g_5 | 59624 |
| 3962_Human_papillomavirus_type_166_isolate_KC9_g_1 | 59625 |
| 3962_Human_papillomavirus_type_166_isolate_KC9_g_2 | 59626 |
| 3962_Human_papillomavirus_type_166_isolate_KC9_g_3 | 59627 |
| 3962_Human_papillomavirus_type_166_isolate_KC9_g_4 | 59628 |
| 3962_Human_papillomavirus_type_166_isolate_KC9_g_5 | 59629 |
| 3963_Human_papillomavirus_type_166_isolate_KC9_g_1 | 59630 |
| 3963_Human_papillomavirus_type_166_isolate_KC9_g_2 | 59631 |
| 3963_Human_papillomavirus_type_166_isolate_KC9_g_3 | 59632 |
| 3963_Human_papillomavirus_type_166_isolate_KC9_g_4 | 59633 |
| 3963_Human_papillomavirus_type_166_isolate_KC9_g_5 | 59634 |
| 3964_Human_papillomavirus_type_166_isolate_KC9_g_1 | 59635 |
| 3964_Human_papillomavirus_type_166_isolate_KC9_g_2 | 59636 |
| 3964_Human_papillomavirus_type_166_isolate_KC9_g_3 | 59637 |
| 3964_Human_papillomavirus_type_166_isolate_KC9_g_4 | 59638 |
| 3964_Human_papillomavirus_type_166_isolate_KC9_g_5 | 59639 |
| 3965_Human_papillomavirus_type_166_isolate_KC9_g_1 | 59640 |
| 3965_Human_papillomavirus_type_166_isolate_KC9_g_2 | 59641 |
| 3965_Human_papillomavirus_type_166_isolate_KC9_g_3 | 59642 |
| 3965_Human_papillomavirus_type_166_isolate_KC9_g_4 | 59643 |
| 3965_Human_papillomavirus_type_166_isolate_KC9_g_5 | 59644 |
| 3966_Human_papillomavirus_type_166_isolate_KC9_g_1 | 59645 |
| 3966_Human_papillomavirus_type_166_isolate_KC9_g_2 | 59646 |
| 3966_Human_papillomavirus_type_166_isolate_KC9_g_3 | 59647 |
| 3966_Human_papillomavirus_type_166_isolate_KC9_g_4 | 59648 |
| 3966_Human_papillomavirus_type_166_isolate_KC9_g_5 | 59649 |
| 3967_Human_papillomavirus_type_166_isolate_KC9_g_1 | 59650 |
| 3967_Human_papillomavirus_type_166_isolate_KC9_g_2 | 59651 |
| 3967_Human_papillomavirus_type_166_isolate_KC9_g_3 | 59652 |
| 3967_Human_papillomavirus_type_166_isolate_KC9_g_4 | 59653 |
| 3967_Human_papillomavirus_type_166_isolate_KC9_g_5 | 59654 |
| 3968_Human_papillomavirus_type_166_isolate_KC9_g_1 | 59655 |
| 3968_Human_papillomavirus_type_166_isolate_KC9_g_2 | 59656 |
| 3968_Human_papillomavirus_type_166_isolate_KC9_g_3 | 59657 |
| 3968_Human_papillomavirus_type_166_isolate_KC9_g_4 | 59658 |
| 3968_Human_papillomavirus_type_166_isolate_KC9_g_5 | 59659 |
| 3969_Human_papillomavirus_type_166_isolate_KC9_g_1 | 59660 |
| 3969_Human_papillomavirus_type_166_isolate_KC9_g_2 | 59661 |
| 3969_Human_papillomavirus_type_166_isolate_KC9_g_3 | 59662 |
| 3969_Human_papillomavirus_type_166_isolate_KC9_g_4 | 59663 |
| 3969_Human_papillomavirus_type_166_isolate_KC9_g_5 | 59664 |
| 3970_Human_rhinovirus_C_g_1 | 59665 |
| 3970_Human_rhinovirus_C_g_2 | 59666 |
| 3970_Human_rhinovirus_C_g_3 | 59667 |
| 3970_Human_rhinovirus_C_g_4 | 59668 |
| 3970_Human_rhinovirus_C_g_5 | 59669 |
| 3971_Human_rhinovirus_C_g_1 | 59670 |
| 3971_Human_rhinovirus_C_g_2 | 59671 |
| 3971_Human_rhinovirus_C_g_3 | 59672 |
| 3971_Human_rhinovirus_C_g_4 | 59673 |
| 3971_Human_rhinovirus_C_g_5 | 59674 |
| 3972_Human_rhinovirus_C_g_1 | 59675 |
| 3972_Human_rhinovirus_C_g_2 | 59676 |
| 3972_Human_rhinovirus_C_g_3 | 59677 |
| 3972_Human_rhinovirus_C_g_4 | 59678 |
| 3972_Human_rhinovirus_C_g_5 | 59679 |
| 3973_Human_rhinovirus_C_g_1 | 59680 |
| 3973_Human_rhinovirus_C_g_2 | 59681 |
| 3973_Human_rhinovirus_C_g_3 | 59682 |
| 3973_Human_rhinovirus_C_g_4 | 59683 |
| 3973_Human_rhinovirus_C_g_5 | 59684 |
| 3974_Human_rhinovirus_C_g_1 | 59685 |
| 3974_Human_rhinovirus_C_g_2 | 59686 |
| 3974_Human_rhinovirus_C_g_3 | 59687 |
| 3974_Human_rhinovirus_C_g_4 | 59688 |
| 3974_Human_rhinovirus_C_g_5 | 59689 |
| 3975_Human_rhinovirus_C_g_1 | 59690 |
| 3975_Human_rhinovirus_C_g_2 | 59691 |
| 3975_Human_rhinovirus_C_g_3 | 59692 |
| 3975_Human_rhinovirus_C_g_4 | 59693 |
| 3975_Human_rhinovirus_C_g_5 | 59694 |
| 3976_Human_rhinovirus_C_g_1 | 59695 |
| 3976_Human_rhinovirus_C_g_2 | 59696 |
| 3976_Human_rhinovirus_C_g_3 | 59697 |
| 3976_Human_rhinovirus_C_g_4 | 59698 |
| 3976_Human_rhinovirus_C_g_5 | 59699 |
| 3977_Human_rhinovirus_C_g_1 | 59700 |
| 3977_Human_rhinovirus_C_g_2 | 59701 |
| 3977_Human_rhinovirus_C_g_3 | 59702 |
| 3977_Human_rhinovirus_C_g_4 | 59703 |
| 3977_Human_rhinovirus_C_g_5 | 59704 |
| 3978_Human_rhinovirus_C_g_1 | 59705 |
| 3978_Human_rhinovirus_C_g_2 | 59706 |
| 3978_Human_rhinovirus_C_g_3 | 59707 |
| 3978_Human_rhinovirus_C_g_4 | 59708 |
| 3978_Human_rhinovirus_C_g_5 | 59709 |
| 3979_Human_rhinovirus_C_g_1 | 59710 |
| 3979_Human_rhinovirus_C_g_2 | 59711 |
| 3979_Human_rhinovirus_C_g_3 | 59712 |
| 3979_Human_rhinovirus_C_g_4 | 59713 |
| 3979_Human_rhinovirus_C_g_5 | 59714 |
| 3980_Human_rhinovirus_C_g_1 | 59715 |
| 3980_Human_rhinovirus_C_g_2 | 59716 |
| 3980_Human_rhinovirus_C_g_3 | 59717 |
| 3980_Human_rhinovirus_C_g_4 | 59718 |
| 3980_Human_rhinovirus_C_g_5 | 59719 |
| 3981_Human_rhinovirus_C_g_1 | 59720 |
| 3981_Human_rhinovirus_C_g_2 | 59721 |
| 3981_Human_rhinovirus_C_g_3 | 59722 |
| 3981_Human_rhinovirus_C_g_4 | 59723 |
| 3981_Human_rhinovirus_C_g_5 | 59724 |
| 3982_Human_rhinovirus_C_g_1 | 59725 |
| 3982_Human_rhinovirus_C_g_2 | 59726 |
| 3982_Human_rhinovirus_C_g_3 | 59727 |
| 3982_Human_rhinovirus_C_g_4 | 59728 |
| 3982_Human_rhinovirus_C_g_5 | 59729 |
| 3983_Human_rhinovirus_C_g_1 | 59730 |
| 3983_Human_rhinovirus_C_g_2 | 59731 |
| 3983_Human_rhinovirus_C_g_3 | 59732 |
| 3983_Human_rhinovirus_C_g_4 | 59733 |
| 3983_Human_rhinovirus_C_g_5 | 59734 |
| 3984_Human_rhinovirus_C_g_1 | 59735 |
| 3984_Human_rhinovirus_C_g_2 | 59736 |
| 3984_Human_rhinovirus_C_g_3 | 59737 |
| 3984_Human_rhinovirus_C_g_4 | 59738 |
| 3984_Human_rhinovirus_C_g_5 | 59739 |
| 3985_Human_rhinovirus_C_g_1 | 59740 |
| 3985_Human_rhinovirus_C_g_2 | 59741 |
| 3985_Human_rhinovirus_C_g_3 | 59742 |
| 3985_Human_rhinovirus_C_g_4 | 59743 |
| 3985_Human_rhinovirus_C_g_5 | 59744 |
| 3986_Human_rhinovirus_C_g_1 | 59745 |
| 3986_Human_rhinovirus_C_g_2 | 59746 |
| 3986_Human_rhinovirus_C_g_3 | 59747 |
| 3986_Human_rhinovirus_C_g_4 | 59748 |
| 3986_Human_rhinovirus_C_g_5 | 59749 |
| 3987_Human_rhinovirus_C_g_1 | 59750 |
| 3987_Human_rhinovirus_C_g_2 | 59751 |
| 3987_Human_rhinovirus_C_g_3 | 59752 |
| 3987_Human_rhinovirus_C_g_4 | 59753 |
| 3987_Human_rhinovirus_C_g_5 | 59754 |
| 3988_Human_rhinovirus_C_g_1 | 59755 |
| 3988_Human_rhinovirus_C_g_2 | 59756 |
| 3988_Human_rhinovirus_C_g_3 | 59757 |
| 3988_Human_rhinovirus_C_g_4 | 59758 |
| 3988_Human_rhinovirus_C_g_5 | 59759 |
| 3989_Human_rhinovirus_C_g_1 | 59760 |
| 3989_Human_rhinovirus_C_g_2 | 59761 |
| 3989_Human_rhinovirus_C_g_3 | 59762 |
| 3989_Human_rhinovirus_C_g_4 | 59763 |
| 3989_Human_rhinovirus_C_g_5 | 59764 |
| 3990_Human_rhinovirus_C_g_1 | 59765 |
| 3990_Human_rhinovirus_C_g_2 | 59766 |
| 3990_Human_rhinovirus_C_g_3 | 59767 |
| 3990_Human_rhinovirus_C_g_4 | 59768 |
| 3990_Human_rhinovirus_C_g_5 | 59769 |
| 3991_Human_rhinovirus_C_g_1 | 59770 |
| 3991_Human_rhinovirus_C_g_2 | 59771 |
| 3991_Human_rhinovirus_C_g_3 | 59772 |
| 3991_Human_rhinovirus_C_g_4 | 59773 |
| 3991_Human_rhinovirus_C_g_5 | 59774 |
| 3992_Human_rhinovirus_C_g_1 | 59775 |
| 3992_Human_rhinovirus_C_g_2 | 59776 |
| 3992_Human_rhinovirus_C_g_3 | 59777 |
| 3992_Human_rhinovirus_C_g_4 | 59778 |
| 3992_Human_rhinovirus_C_g_5 | 59779 |
| 3993_Influenza_A_virus_(A/Goose/Guangdong/1/96(H5N1))_{—} | 59780 |
| polymerase_(PB2)_gene_g_1 | |
| 3993_Influenza_A_virus_(A/Goose/Guangdong/1/96(H5N1))_{—} | 59781 |
| polymerase_(PB2)_gene_g_2 | |
| 3993_Influenza_A_virus_(A/Goose/Guangdong/1/96(H5N1))_{—} | 59782 |
| polymerase_(PB2)_gene_g_3 | |
| 3993_Influenza_A_virus_(A/Goose/Guangdong/1/96(H5N1))_{—} | 59783 |
| polymerase_(PB2)_gene_g_4 | |
| 3993_Influenza_A_virus_(A/Goose/Guangdong/1/96(H5N1))_{—} | 59784 |
| polymerase_(PB2)_gene_g_5 | |
| 3994_Influenza_A_virus_(A/Goose/Guangdong/1/96(H5N1))_{—} | 59785 |
| polymerase_(PB2)_gene_g_1 | |
| 3994_Influenza_A_virus_(A/Goose/Guangdong/1/96(H5N1))_{—} | 59786 |
| polymerase_(PB2)_gene_g_2 | |
| 3994_Influenza_A_virus_(A/Goose/Guangdong/1/96(H5N1))_{—} | 59787 |
| polymerase_(PB2)_gene_g_3 | |
| 3994_Influenza_A_virus_(A/Goose/Guangdong/1/96(H5N1))_{—} | 59788 |
| polymerase_(PB2)_gene_g_4 | |
| 3994_Influenza_A_virus_(A/Goose/Guangdong/1/96(H5N1))_{—} | 59789 |
| polymerase_(PB2)_gene_g_5 | |
| 3995_Influenza_A_virus_(A/Goose/Guangdong/1/96(H5N1))_{—} | 59790 |
| polymerase_(PB2)_gene_g_1 | |
| 3995_Influenza_A_virus_(A/Goose/Guangdong/1/96(H5N1))_{—} | 59791 |
| polymerase_(PB2)_gene_g_2 | |
| 3995_Influenza_A_virus_(A/Goose/Guangdong/1/96(H5N1))_{—} | 59792 |
| polymerase_(PB2)_gene_g_3 | |
| 3995_Influenza_A_virus_(A/Goose/Guangdong/1/96(H5N1))_{—} | 59793 |
| polymerase_(PB2)_gene_g_4 | |
| 3995_Influenza_A_virus_(A/Goose/Guangdong/1/96(H5N1))_{—} | 59794 |
| polymerase_(PB2)_gene_g_5 | |
| 3996_Influenza_A_virus_(A/Goose/Guangdong/1/96(H5N1))_{—} | 59795 |
| polymerase_(PB2)_gene_g_1 | |
| 3996_Influenza_A_virus_(A/Goose/Guangdong/1/96(H5N1))_{—} | 59796 |
| polymerase_(PB2)_gene_g_2 | |
| 3996_Influenza_A_virus_(A/Goose/Guangdong/1/96(H5N1))_{—} | 59797 |
| polymerase_(PB2)_gene_g_3 | |
| 3996_Influenza_A_virus_(A/Goose/Guangdong/1/96(H5N1))_{—} | 59798 |
| polymerase_(PB2)_gene_g_4 | |
| 3996_Influenza_A_virus_(A/Goose/Guangdong/1/96(H5N1))_{—} | 59799 |
| polymerase_(PB2)_gene_g_5 | |
| 3997_Influenza_A_virus_(A/Goose/Guangdong/1/96(H5N1))_{—} | 59800 |
| polymerase_(PB2)_gene_g_1 | |
| 3997_Influenza_A_virus_(A/Goose/Guangdong/1/96(H5N1))_{—} | 59801 |
| polymerase_(PB2)_gene_g_2 | |
| 3997_Influenza_A_virus_(A/Goose/Guangdong/1/96(H5N1))_{—} | 59802 |
| polymerase_(PB2)_gene_g_3 | |
| 3997_Influenza_A_virus_(A/Goose/Guangdong/1/96(H5N1))_{—} | 59803 |
| polymerase_(PB2)_gene_g_4 | |
| 3997_Influenza_A_virus_(A/Goose/Guangdong/1/96(H5N1))_{—} | 59804 |
| polymerase_(PB2)_gene_g_5 | |
| 3998_Influenza_A_virus_(A/Goose/Guangdong/1/96(H5N1))_{—} | 59805 |
| polymerase_(PB2)_gene_g_1 | |
| 3998_Influenza_A_virus_(A/Goose/Guangdong/1/96(H5N1))_{—} | 59806 |
| polymerase_(PB2)_gene_g_2 | |
| 3998_Influenza_A_virus_(A/Goose/Guangdong/1/96(H5N1))_{—} | 59807 |
| polymerase_(PB2)_gene_g_3 | |
| 3998_Influenza_A_virus_(A/Goose/Guangdong/1/96(H5N1))_{—} | 59808 |
| polymerase_(PB2)_gene_g_4 | |
| 3998_Influenza_A_virus_(A/Goose/Guangdong/1/96(H5N1))_{—} | 59809 |
| polymerase_(PB2)_gene_g_5 | |
| 3999_Human_adenovirus_54_g_1 | 59810 |
| 3999_Human_adenovirus_54_g_2 | 59811 |
| 3999_Human_adenovirus_54_g_3 | 59812 |
| 3999_Human_adenovirus_54_g_4 | 59813 |
| 3999_Human_adenovirus_54_g_5 | 59814 |
| 4000_Human_adenovirus_54_g_1 | 59815 |
| 4000_Human_adenovirus_54_g_2 | 59816 |
| 4000_Human_adenovirus_54_g_3 | 59817 |
| 4000_Human_adenovirus_54_g_4 | 59818 |
| 4000_Human_adenovirus_54_g_5 | 59819 |
| 4001_Human_adenovirus_54_g_1 | 59820 |
| 4001_Human_adenovirus_54_g_2 | 59821 |
| 4001_Human_adenovirus_54_g_3 | 59822 |
| 4001_Human_adenovirus_54_g_4 | 59823 |
| 4001_Human_adenovirus_54_g_5 | 59824 |
| 4002_Human_adenovirus_54_g_1 | 59825 |
| 4002_Human_adenovirus_54_g_2 | 59826 |
| 4002_Human_adenovirus_54_g_3 | 59827 |
| 4002_Human_adenovirus_54_g_4 | 59828 |
| 4002_Human_adenovirus_54_g_5 | 59829 |
| 4003_Human_adenovirus_54_g_1 | 59830 |
| 4003_Human_adenovirus_54_g_2 | 59831 |
| 4003_Human_adenovirus_54_g_3 | 59832 |
| 4003_Human_adenovirus_54_g_4 | 59833 |
| 4003_Human_adenovirus_54_g_5 | 59834 |
| 4004_Human_adenovirus_54_g_1 | 59835 |
| 4004_Human_adenovirus_54_g_2 | 59836 |
| 4004_Human_adenovirus_54_g_3 | 59837 |
| 4004_Human_adenovirus_54_g_4 | 59838 |
| 4004_Human_adenovirus_54_g_5 | 59839 |
| 4005_Human_adenovirus_54_g_1 | 59840 |
| 4005_Human_adenovirus_54_g_2 | 59841 |
| 4005_Human_adenovirus_54_g_3 | 59842 |
| 4005_Human_adenovirus_54_g_4 | 59843 |
| 4005_Human_adenovirus_54_g_5 | 59844 |
| 4006_Human_adenovirus_54_g_1 | 59845 |
| 4006_Human_adenovirus_54_g_2 | 59846 |
| 4006_Human_adenovirus_54_g_3 | 59847 |
| 4006_Human_adenovirus_54_g_4 | 59848 |
| 4006_Human_adenovirus_54_g_5 | 59849 |
| 4007_Human_adenovirus_54_g_1 | 59850 |
| 4007_Human_adenovirus_54_g_2 | 59851 |
| 4007_Human_adenovirus_54_g_3 | 59852 |
| 4007_Human_adenovirus_54_g_4 | 59853 |
| 4007_Human_adenovirus_54_g_5 | 59854 |
| 4008_Human_adenovirus_54_g_1 | 59855 |
| 4008_Human_adenovirus_54_g_2 | 59856 |
| 4008_Human_adenovirus_54_g_3 | 59857 |
| 4008_Human_adenovirus_54_g_4 | 59858 |
| 4008_Human_adenovirus_54_g_5 | 59859 |
| 4009_Human_adenovirus_54_g_1 | 59860 |
| 4009_Human_adenovirus_54_g_2 | 59861 |
| 4009_Human_adenovirus_54_g_3 | 59862 |
| 4009_Human_adenovirus_54_g_4 | 59863 |
| 4009_Human_adenovirus_54_g_5 | 59864 |
| 4010_Human_adenovirus_54_g_1 | 59865 |
| 4010_Human_adenovirus_54_g_2 | 59866 |
| 4010_Human_adenovirus_54_g_3 | 59867 |
| 4010_Human_adenovirus_54_g_4 | 59868 |
| 4010_Human_adenovirus_54_g_5 | 59869 |
| 4011_Human_adenovirus_54_g_1 | 59870 |
| 4011_Human_adenovirus_54_g_2 | 59871 |
| 4011_Human_adenovirus_54_g_3 | 59872 |
| 4011_Human_adenovirus_54_g_4 | 59873 |
| 4011_Human_adenovirus_54_g_5 | 59874 |
| 4012_Human_adenovirus_54_g_1 | 59875 |
| 4012_Human_adenovirus_54_g_2 | 59876 |
| 4012_Human_adenovirus_54_g_3 | 59877 |
| 4012_Human_adenovirus_54_g_4 | 59878 |
| 4012_Human_adenovirus_54_g_5 | 59879 |
| 4013_Human_adenovirus_54_g_1 | 59880 |
| 4013_Human_adenovirus_54_g_2 | 59881 |
| 4013_Human_adenovirus_54_g_3 | 59882 |
| 4013_Human_adenovirus_54_g_4 | 59883 |
| 4013_Human_adenovirus_54_g_5 | 59884 |
| 4014_Human_adenovirus_54_g_1 | 59885 |
| 4014_Human_adenovirus_54_g_2 | 59886 |
| 4014_Human_adenovirus_54_g_3 | 59887 |
| 4014_Human_adenovirus_54_g_4 | 59888 |
| 4014_Human_adenovirus_54_g_5 | 59889 |
| 4015_Human_adenovirus_54_g_1 | 59890 |
| 4015_Human_adenovirus_54_g_2 | 59891 |
| 4015_Human_adenovirus_54_g_3 | 59892 |
| 4015_Human_adenovirus_54_g_4 | 59893 |
| 4015_Human_adenovirus_54_g_5 | 59894 |
| 4016_Human_adenovirus_54_g_1 | 59895 |
| 4016_Human_adenovirus_54_g_2 | 59896 |
| 4016_Human_adenovirus_54_g_3 | 59897 |
| 4016_Human_adenovirus_54_g_4 | 59898 |
| 4016_Human_adenovirus_54_g_5 | 59899 |
| 4017_Human_adenovirus_54_g_1 | 59900 |
| 4017_Human_adenovirus_54_g_2 | 59901 |
| 4017_Human_adenovirus_54_g_3 | 59902 |
| 4018_Human_adenovirus_54_g_1 | 59903 |
| 4018_Human_adenovirus_54_g_2 | 59904 |
| 4018_Human_adenovirus_54_g_3 | 59905 |
| 4018_Human_adenovirus_54_g_4 | 59906 |
| 4018_Human_adenovirus_54_g_5 | 59907 |
| 4019_Human_adenovirus_54_g_1 | 59908 |
| 4019_Human_adenovirus_54_g_2 | 59909 |
| 4019_Human_adenovirus_54_g_3 | 59910 |
| 4019_Human_adenovirus_54_g_4 | 59911 |
| 4019_Human_adenovirus_54_g_5 | 59912 |
| 4020_Human_adenovirus_54_g_1 | 59913 |
| 4020_Human_adenovirus_54_g_2 | 59914 |
| 4020_Human_adenovirus_54_g_3 | 59915 |
| 4020_Human_adenovirus_54_g_4 | 59916 |
| 4020_Human_adenovirus_54_g_5 | 59917 |
| 4021_Human_adenovirus_54_g_1 | 59918 |
| 4021_Human_adenovirus_54_g_2 | 59919 |
| 4021_Human_adenovirus_54_g_3 | 59920 |
| 4021_Human_adenovirus_54_g_4 | 59921 |
| 4021_Human_adenovirus_54_g_5 | 59922 |
| 4022_Human_adenovirus_54_g_1 | 59923 |
| 4022_Human_adenovirus_54_g_2 | 59924 |
| 4022_Human_adenovirus_54_g_3 | 59925 |
| 4022_Human_adenovirus_54_g_4 | 59926 |
| 4022_Human_adenovirus_54_g_5 | 59927 |
| 4023_Human_adenovirus_54_g_1 | 59928 |
| 4023_Human_adenovirus_54_g_2 | 59929 |
| 4023_Human_adenovirus_54_g_3 | 59930 |
| 4023_Human_adenovirus_54_g_4 | 59931 |
| 4023_Human_adenovirus_54_g_5 | 59932 |
| 4024_Human_adenovirus_54_g_1 | 59933 |
| 4024_Human_adenovirus_54_g_2 | 59934 |
| 4024_Human_adenovirus_54_g_3 | 59935 |
| 4024_Human_adenovirus_54_g_4 | 59936 |
| 4024_Human_adenovirus_54_g_5 | 59937 |
| 4025_Human_adenovirus_54_g_1 | 59938 |
| 4025_Human_adenovirus_54_g_2 | 59939 |
| 4025_Human_adenovirus_54_g_3 | 59940 |
| 4025_Human_adenovirus_54_g_4 | 59941 |
| 4025_Human_adenovirus_54_g_5 | 59942 |
| 4026_Human_adenovirus_54_g_1 | 59943 |
| 4026_Human_adenovirus_54_g_2 | 59944 |
| 4026_Human_adenovirus_54_g_3 | 59945 |
| 4026_Human_adenovirus_54_g_4 | 59946 |
| 4026_Human_adenovirus_54_g_5 | 59947 |
| 4027_Human_adenovirus_54_g_1 | 59948 |
| 4027_Human_adenovirus_54_g_2 | 59949 |
| 4027_Human_adenovirus_54_g_3 | 59950 |
| 4027_Human_adenovirus_54_g_4 | 59951 |
| 4027_Human_adenovirus_54_g_5 | 59952 |
| 4028_Human_adenovirus_54_g_1 | 59953 |
| 4028_Human_adenovirus_54_g_2 | 59954 |
| 4029_Human_adenovirus_54_g_1 | 59955 |
| 4029_Human_adenovirus_54_g_2 | 59956 |
| 4029_Human_adenovirus_54_g_3 | 59957 |
| 4029_Human_adenovirus_54_g_4 | 59958 |
| 4029_Human_adenovirus_54_g_5 | 59959 |
| 4030_Human_adenovirus_54_g_1 | 59960 |
| 4030_Human_adenovirus_54_g_2 | 59961 |
| 4030_Human_adenovirus_54_g_3 | 59962 |
| 4030_Human_adenovirus_54_g_4 | 59963 |
| 4030_Human_adenovirus_54_g_5 | 59964 |
| 4031_Human_adenovirus_54_g_1 | 59965 |
| 4031_Human_adenovirus_54_g_2 | 59966 |
| 4031_Human_adenovirus_54_g_3 | 59967 |
| 4031_Human_adenovirus_54_g_4 | 59968 |
| 4031_Human_adenovirus_54_g_5 | 59969 |
| 4032_Human_adenovirus_54_g_1 | 59970 |
| 4032_Human_adenovirus_54_g_2 | 59971 |
| 4032_Human_adenovirus_54_g_3 | 59972 |
| 4032_Human_adenovirus_54_g_4 | 59973 |
| 4032_Human_adenovirus_54_g_5 | 59974 |
| 4033_Human_adenovirus_54_g_1 | 59975 |
| 4033_Human_adenovirus_54_g_2 | 59976 |
| 4033_Human_adenovirus_54_g_3 | 59977 |
| 4033_Human_adenovirus_54_g_4 | 59978 |
| 4033_Human_adenovirus_54_g_5 | 59979 |
| 4034_Human_adenovirus_54_g_1 | 59980 |
| 4034_Human_adenovirus_54_g_2 | 59981 |
| 4034_Human_adenovirus_54_g_3 | 59982 |
| 4034_Human_adenovirus_54_g_4 | 59983 |
| 4035_Human_adenovirus_54_g_1 | 59984 |
| 4035_Human_adenovirus_54_g_2 | 59985 |
| 4035_Human_adenovirus_54_g_3 | 59986 |
| 4035_Human_adenovirus_54_g_4 | 59987 |
| 4035_Human_adenovirus_54_g_5 | 59988 |
| 4036_Human_adenovirus_54_g_1 | 59989 |
| 4036_Human_adenovirus_54_g_2 | 59990 |
| 4036_Human_adenovirus_54_g_3 | 59991 |
| 4036_Human_adenovirus_54_g_4 | 59992 |
| 4036_Human_adenovirus_54_g_5 | 59993 |
| 4037_Human_adenovirus_54_g_1 | 59994 |
| 4037_Human_adenovirus_54_g_2 | 59995 |
| 4037_Human_adenovirus_54_g_3 | 59996 |
| 4037_Human_adenovirus_54_g_4 | 59997 |
| 4037_Human_adenovirus_54_g_5 | 59998 |
| 4038_Human_adenovirus_54_g_1 | 59999 |
| 4038_Human_adenovirus_54_g_2 | 60000 |
| 4038_Human_adenovirus_54_g_3 | 60001 |
| 4038_Human_adenovirus_54_g_4 | 60002 |
| 4038_Human_adenovirus_54_g_5 | 60003 |
| 4039_Human_adenovirus_54_g_1 | 60004 |
| 4039_Human_adenovirus_54_g_2 | 60005 |
| 4039_Human_adenovirus_54_g_3 | 60006 |
| 4039_Human_adenovirus_54_g_4 | 60007 |
| 4040_Human_adenovirus_54_g_1 | 60008 |
| 4040_Human_adenovirus_54_g_2 | 60009 |
| 4040_Human_adenovirus_54_g_3 | 60010 |
| 4040_Human_adenovirus_54_g_4 | 60011 |
| 4040_Human_adenovirus_54_g_5 | 60012 |
| 4041_Human_adenovirus_54_g_1 | 60013 |
| 4041_Human_adenovirus_54_g_2 | 60014 |
| 4041_Human_adenovirus_54_g_3 | 60015 |
| 4041_Human_adenovirus_54_g_4 | 60016 |
| 4041_Human_adenovirus_54_g_5 | 60017 |
| 4042_Human_adenovirus_54_g_1 | 60018 |
| 4042_Human_adenovirus_54_g_2 | 60019 |
| 4042_Human_adenovirus_54_g_3 | 60020 |
| 4042_Human_adenovirus_54_g_4 | 60021 |
| 4042_Human_adenovirus_54_g_5 | 60022 |
| 4043_Human_adenovirus_54_g_1 | 60023 |
| 4043_Human_adenovirus_54_g_2 | 60024 |
| 4043_Human_adenovirus_54_g_3 | 60025 |
| 4043_Human_adenovirus_54_g_4 | 60026 |
| 4043_Human_adenovirus_54_g_5 | 60027 |
| 4044_Human_adenovirus_54_g_1 | 60028 |
| 4044_Human_adenovirus_54_g_2 | 60029 |
| 4045_Human_adenovirus_54_g_1 | 60030 |
| 4045_Human_adenovirus_54_g_2 | 60031 |
| 4045_Human_adenovirus_54_g_3 | 60032 |
| 4046_Human_adenovirus_54_g_1 | 60033 |
| 4046_Human_adenovirus_54_g_2 | 60034 |
| 4046_Human_adenovirus_54_g_3 | 60035 |
| 4046_Human_adenovirus_54_g_4 | 60036 |
| 4046_Human_adenovirus_54_g_5 | 60037 |
| 4047_Human_adenovirus_54_g_1 | 60038 |
| 4047_Human_adenovirus_54_g_2 | 60039 |
| 4047_Human_adenovirus_54_g_3 | 60040 |
| 4047_Human_adenovirus_54_g_4 | 60041 |
| 4047_Human_adenovirus_54_g_5 | 60042 |
| 4048_Human_adenovirus_54_g_1 | 60043 |
| 4048_Human_adenovirus_54_g_2 | 60044 |
| 4048_Human_adenovirus_54_g_3 | 60045 |
| 4048_Human_adenovirus_54_g_4 | 60046 |
| 4048_Human_adenovirus_54_g_5 | 60047 |
| 4049_Human_adenovirus_54_g_1 | 60048 |
| 4049_Human_adenovirus_54_g_2 | 60049 |
| 4049_Human_adenovirus_54_g_3 | 60050 |
| 4049_Human_adenovirus_54_g_4 | 60051 |
| 4049_Human_adenovirus_54_g_5 | 60052 |
| 4050_Human_adenovirus_54_g_1 | 60053 |
| 4050_Human_adenovirus_54_g_2 | 60054 |
| 4050_Human_adenovirus_54_g_3 | 60055 |
| 4050_Human_adenovirus_54_g_4 | 60056 |
| 4050_Human_adenovirus_54_g_5 | 60057 |
| 4051_Human_adenovirus_54_g_1 | 60058 |
| 4051_Human_adenovirus_54_g_2 | 60059 |
| 4051_Human_adenovirus_54_g_3 | 60060 |
| 4052_Human_adenovirus_54_g_1 | 60061 |
| 4052_Human_adenovirus_54_g_2 | 60062 |
| 4052_Human_adenovirus_54_g_3 | 60063 |
| 4052_Human_adenovirus_54_g_4 | 60064 |
| 4052_Human_adenovirus_54_g_5 | 60065 |
| 4053_Human_adenovirus_54_g_1 | 60066 |
| 4053_Human_adenovirus_54_g_2 | 60067 |
| 4053_Human_adenovirus_54_g_3 | 60068 |
| 4053_Human_adenovirus_54_g_4 | 60069 |
| 4053_Human_adenovirus_54_g_5 | 60070 |
| 4054_Human_adenovirus_54_g_1 | 60071 |
| 4054_Human_adenovirus_54_g_2 | 60072 |
| 4054_Human_adenovirus_54_g_3 | 60073 |
| 4054_Human_adenovirus_54_g_4 | 60074 |
| 4054_Human_adenovirus_54_g_5 | 60075 |
| 4055_Human_adenovirus_54_g_1 | 60076 |
| 4055_Human_adenovirus_54_g_2 | 60077 |
| 4055_Human_adenovirus_54_g_3 | 60078 |
| 4055_Human_adenovirus_54_g_4 | 60079 |
| 4055_Human_adenovirus_54_g_5 | 60080 |
| 4056_Human_adenovirus_54_g_1 | 60081 |
| 4056_Human_adenovirus_54_g_2 | 60082 |
| 4056_Human_adenovirus_54_g_3 | 60083 |
| 4056_Human_adenovirus_54_g_4 | 60084 |
| 4056_Human_adenovirus_54_g_5 | 60085 |
| 4057_Human_adenovirus_54_g_1 | 60086 |
| 4057_Human_adenovirus_54_g_2 | 60087 |
| 4057_Human_adenovirus_54_g_3 | 60088 |
| 4057_Human_adenovirus_54_g_4 | 60089 |
| 4057_Human_adenovirus_54_g_5 | 60090 |
| 4058_Human_adenovirus_54_g_1 | 60091 |
| 4058_Human_adenovirus_54_g_2 | 60092 |
| 4058_Human_adenovirus_54_g_3 | 60093 |
| 4058_Human_adenovirus_54_g_4 | 60094 |
| 4058_Human_adenovirus_54_g_5 | 60095 |
| 4059_Human_adenovirus_54_g_1 | 60096 |
| 4059_Human_adenovirus_54_g_2 | 60097 |
| 4059_Human_adenovirus_54_g_3 | 60098 |
| 4060_Human_adenovirus_54_g_1 | 60099 |
| 4060_Human_adenovirus_54_g_2 | 60100 |
| 4060_Human_adenovirus_54_g_3 | 60101 |
| 4060_Human_adenovirus_54_g_4 | 60102 |
| 4060_Human_adenovirus_54_g_5 | 60103 |
| 4061_Human_adenovirus_54_g_1 | 60104 |
| 4061_Human_adenovirus_54_g_2 | 60105 |
| 4061_Human_adenovirus_54_g_3 | 60106 |
| 4061_Human_adenovirus_54_g_4 | 60107 |
| 4061_Human_adenovirus_54_g_5 | 60108 |
| 4062_Human_adenovirus_54_g_1 | 60109 |
| 4062_Human_adenovirus_54_g_2 | 60110 |
| 4062_Human_adenovirus_54_g_3 | 60111 |
| 4062_Human_adenovirus_54_g_4 | 60112 |
| 4063_Human_adenovirus_54_g_1 | 60113 |
| 4063_Human_adenovirus_54_g_2 | 60114 |
| 4063_Human_adenovirus_54_g_3 | 60115 |
| 4063_Human_adenovirus_54_g_4 | 60116 |
| 4063_Human_adenovirus_54_g_5 | 60117 |
| 4064_Human_adenovirus_54_g_1 | 60118 |
| 4064_Human_adenovirus_54_g_2 | 60119 |
| 4064_Human_adenovirus_54_g_3 | 60120 |
| 4064_Human_adenovirus_54_g_4 | 60121 |
| 4064_Human_adenovirus_54_g_5 | 60122 |
| 4065_Human_adenovirus_54_g_1 | 60123 |
| 4065_Human_adenovirus_54_g_2 | 60124 |
| 4065_Human_adenovirus_54_g_3 | 60125 |
| 4065_Human_adenovirus_54_g_4 | 60126 |
| 4066_Human_adenovirus_54_g_1 | 60127 |
| 4066_Human_adenovirus_54_g_2 | 60128 |
| 4066_Human_adenovirus_54_g_3 | 60129 |
| 4066_Human_adenovirus_54_g_4 | 60130 |
| 4066_Human_adenovirus_54_g_5 | 60131 |
| 4067_Human_adenovirus_54_g_1 | 60132 |
| 4067_Human_adenovirus_54_g_2 | 60133 |
| 4067_Human_adenovirus_54_g_3 | 60134 |
| 4067_Human_adenovirus_54_g_4 | 60135 |
| 4067_Human_adenovirus_54_g_5 | 60136 |
| 4068_Human_adenovirus_54_g_1 | 60137 |
| 4068_Human_adenovirus_54_g_2 | 60138 |
| 4068_Human_adenovirus_54_g_3 | 60139 |
| 4068_Human_adenovirus_54_g_4 | 60140 |
| 4068_Human_adenovirus_54_g_5 | 60141 |
| 4069_Human_adenovirus_54_g_1 | 60142 |
| 4069_Human_adenovirus_54_g_2 | 60143 |
| 4069_Human_adenovirus_54_g_3 | 60144 |
| 4069_Human_adenovirus_54_g_4 | 60145 |
| 4069_Human_adenovirus_54_g_5 | 60146 |
| 4070_Human_adenovirus_54_g_1 | 60147 |
| 4070_Human_adenovirus_54_g_2 | 60148 |
| 4070_Human_adenovirus_54_g_3 | 60149 |
| 4070_Human_adenovirus_54_g_4 | 60150 |
| 4070_Human_adenovirus_54_g_5 | 60151 |
| 4071_Human_adenovirus_54_g_1 | 60152 |
| 4071_Human_adenovirus_54_g_2 | 60153 |
| 4071_Human_adenovirus_54_g_3 | 60154 |
| 4071_Human_adenovirus_54_g_4 | 60155 |
| 4071_Human_adenovirus_54_g_5 | 60156 |
| 4072_Human_adenovirus_54_g_1 | 60157 |
| 4072_Human_adenovirus_54_g_2 | 60158 |
| 4072_Human_adenovirus_54_g_3 | 60159 |
| 4072_Human_adenovirus_54_g_4 | 60160 |
| 4073_Human_adenovirus_54_g_1 | 60161 |
| 4073_Human_adenovirus_54_g_2 | 60162 |
| 4073_Human_adenovirus_54_g_3 | 60163 |
| 4073_Human_adenovirus_54_g_4 | 60164 |
| 4073_Human_adenovirus_54_g_5 | 60165 |
| 4074_Human_adenovirus_54_g_1 | 60166 |
| 4074_Human_adenovirus_54_g_2 | 60167 |
| 4074_Human_adenovirus_54_g_3 | 60168 |
| 4074_Human_adenovirus_54_g_4 | 60169 |
| 4075_Human_adenovirus_54_g_1 | 60170 |
| 4075_Human_adenovirus_54_g_2 | 60171 |
| 4075_Human_adenovirus_54_g_3 | 60172 |
| 4075_Human_adenovirus_54_g_4 | 60173 |
| 4075_Human_adenovirus_54_g_5 | 60174 |
| 4076_Human_adenovirus_54_g_1 | 60175 |
| 4076_Human_adenovirus_54_g_2 | 60176 |
| 4076_Human_adenovirus_54_g_3 | 60177 |
| 4076_Human_adenovirus_54_g_4 | 60178 |
| 4076_Human_adenovirus_54_g_5 | 60179 |
| 4077_Human_adenovirus_54_g_1 | 60180 |
| 4077_Human_adenovirus_54_g_2 | 60181 |
| 4077_Human_adenovirus_54_g_3 | 60182 |
| 4077_Human_adenovirus_54_g_4 | 60183 |
| 4077_Human_adenovirus_54_g_5 | 60184 |
| 4078_Human_adenovirus_54_g_1 | 60185 |
| 4078_Human_adenovirus_54_g_2 | 60186 |
| 4078_Human_adenovirus_54_g_3 | 60187 |
| 4078_Human_adenovirus_54_g_4 | 60188 |
| 4078_Human_adenovirus_54_g_5 | 60189 |
| 4079_Human_adenovirus_54_g_1 | 60190 |
| 4079_Human_adenovirus_54_g_2 | 60191 |
| 4079_Human_adenovirus_54_g_3 | 60192 |
| 4079_Human_adenovirus_54_g_4 | 60193 |
| 4079_Human_adenovirus_54_g_5 | 60194 |
| 4080_Human_adenovirus_54_g_1 | 60195 |
| 4080_Human_adenovirus_54_g_2 | 60196 |
| 4080_Human_adenovirus_54_g_3 | 60197 |
| 4080_Human_adenovirus_54_g_4 | 60198 |
| 4080_Human_adenovirus_54_g_5 | 60199 |
| 4081_Human_adenovirus_54_g_1 | 60200 |
| 4081_Human_adenovirus_54_g_2 | 60201 |
| 4081_Human_adenovirus_54_g_3 | 60202 |
| 4081_Human_adenovirus_54_g_4 | 60203 |
| 4081_Human_adenovirus_54_g_5 | 60204 |
| 4082_Human_adenovirus_54_g_1 | 60205 |
| 4082_Human_adenovirus_54_g_2 | 60206 |
| 4082_Human_adenovirus_54_g_3 | 60207 |
| 4082_Human_adenovirus_54_g_4 | 60208 |
| 4082_Human_adenovirus_54_g_5 | 60209 |
| 4083_Human_adenovirus_54_g_1 | 60210 |
| 4083_Human_adenovirus_54_g_2 | 60211 |
| 4083_Human_adenovirus_54_g_3 | 60212 |
| 4083_Human_adenovirus_54_g_4 | 60213 |
| 4083_Human_adenovirus_54_g_5 | 60214 |
| 4084_Human_adenovirus_54_g_1 | 60215 |
| 4084_Human_adenovirus_54_g_2 | 60216 |
| 4084_Human_adenovirus_54_g_3 | 60217 |
| 4084_Human_adenovirus_54_g_4 | 60218 |
| 4084_Human_adenovirus_54_g_5 | 60219 |
| 4085_Human_adenovirus_54_g_1 | 60220 |
| 4085_Human_adenovirus_54_g_2 | 60221 |
| 4085_Human_adenovirus_54_g_3 | 60222 |
| 4085_Human_adenovirus_54_g_4 | 60223 |
| 4085_Human_adenovirus_54_g_5 | 60224 |
| 4086_Human_adenovirus_54_g_1 | 60225 |
| 4086_Human_adenovirus_54_g_2 | 60226 |
| 4086_Human_adenovirus_54_g_3 | 60227 |
| 4086_Human_adenovirus_54_g_4 | 60228 |
| 4086_Human_adenovirus_54_g_5 | 60229 |
| 4087_Human_adenovirus_54_g_1 | 60230 |
| 4087_Human_adenovirus_54_g_2 | 60231 |
| 4087_Human_adenovirus_54_g_3 | 60232 |
| 4087_Human_adenovirus_54_g_4 | 60233 |
| 4087_Human_adenovirus_54_g_5 | 60234 |
| 4088_Human_adenovirus_54_g_1 | 60235 |
| 4088_Human_adenovirus_54_g_2 | 60236 |
| 4088_Human_adenovirus_54_g_3 | 60237 |
| 4088_Human_adenovirus_54_g_4 | 60238 |
| 4088_Human_adenovirus_54_g_5 | 60239 |
| 4089_Human_adenovirus_54_g_1 | 60240 |
| 4089_Human_adenovirus_54_g_2 | 60241 |
| 4089_Human_adenovirus_54_g_3 | 60242 |
| 4089_Human_adenovirus_54_g_4 | 60243 |
| 4089_Human_adenovirus_54_g_5 | 60244 |
| 4090_Human_adenovirus_54_g_1 | 60245 |
| 4090_Human_adenovirus_54_g_2 | 60246 |
| 4090_Human_adenovirus_54_g_3 | 60247 |
| 4090_Human_adenovirus_54_g_4 | 60248 |
| 4090_Human_adenovirus_54_g_5 | 60249 |
| 4091_Human_adenovirus_54_g_1 | 60250 |
| 4091_Human_adenovirus_54_g_2 | 60251 |
| 4091_Human_adenovirus_54_g_3 | 60252 |
| 4091_Human_adenovirus_54_g_4 | 60253 |
| 4091_Human_adenovirus_54_g_5 | 60254 |
| 4092_Human_adenovirus_54_g_1 | 60255 |
| 4092_Human_adenovirus_54_g_2 | 60256 |
| 4092_Human_adenovirus_54_g_3 | 60257 |
| 4092_Human_adenovirus_54_g_4 | 60258 |
| 4092_Human_adenovirus_54_g_5 | 60259 |
| 4093_Human_adenovirus_54_g_1 | 60260 |
| 4093_Human_adenovirus_54_g_2 | 60261 |
| 4093_Human_adenovirus_54_g_3 | 60262 |
| 4093_Human_adenovirus_54_g_4 | 60263 |
| 4093_Human_adenovirus_54_g_5 | 60264 |
| 4094_Human_adenovirus_54_g_1 | 60265 |
| 4094_Human_adenovirus_54_g_2 | 60266 |
| 4094_Human_adenovirus_54_g_3 | 60267 |
| 4094_Human_adenovirus_54_g_4 | 60268 |
| 4094_Human_adenovirus_54_g_5 | 60269 |
| 4095_Human_adenovirus_54_g_1 | 60270 |
| 4095_Human_adenovirus_54_g_2 | 60271 |
| 4095_Human_adenovirus_54_g_3 | 60272 |
| 4095_Human_adenovirus_54_g_4 | 60273 |
| 4095_Human_adenovirus_54_g_5 | 60274 |
| 4096_Human_adenovirus_54_g_1 | 60275 |
| 4096_Human_adenovirus_54_g_2 | 60276 |
| 4096_Human_adenovirus_54_g_3 | 60277 |
| 4096_Human_adenovirus_54_g_4 | 60278 |
| 4096_Human_adenovirus_54_g_5 | 60279 |
| 4097_Human_adenovirus_54_g_1 | 60280 |
| 4097_Human_adenovirus_54_g_2 | 60281 |
| 4097_Human_adenovirus_54_g_3 | 60282 |
| 4097_Human_adenovirus_54_g_4 | 60283 |
| 4097_Human_adenovirus_54_g_5 | 60284 |
| 4098_Human_adenovirus_54_g_1 | 60285 |
| 4098_Human_adenovirus_54_g_2 | 60286 |
| 4098_Human_adenovirus_54_g_3 | 60287 |
| 4098_Human_adenovirus_54_g_4 | 60288 |
| 4098_Human_adenovirus_54_g_5 | 60289 |
| 4099_Human_parainfluenza_virus_1_g_1 | 60290 |
| 4099_Human_parainfluenza_virus_1_g_2 | 60291 |
| 4099_Human_parainfluenza_virus_1_g_3 | 60292 |
| 4099_Human_parainfluenza_virus_1_g_4 | 60293 |
| 4099_Human_parainfluenza_virus_1_g_5 | 60294 |
| 4100_Human_parainfluenza_virus_1_g_1 | 60295 |
| 4100_Human_parainfluenza_virus_1_g_2 | 60296 |
| 4100_Human_parainfluenza_virus_1_g_3 | 60297 |
| 4100_Human_parainfluenza_virus_1_g_4 | 60298 |
| 4100_Human_parainfluenza_virus_1_g_5 | 60299 |
| 4101_Human_parainfluenza_virus_1_g_1 | 60300 |
| 4101_Human_parainfluenza_virus_1_g_2 | 60301 |
| 4101_Human_parainfluenza_virus_1_g_3 | 60302 |
| 4101_Human_parainfluenza_virus_1_g_4 | 60303 |
| 4101_Human_parainfluenza_virus_1_g_5 | 60304 |
| 4102_Human_parainfluenza_virus_1_g_1 | 60305 |
| 4102_Human_parainfluenza_virus_1_g_2 | 60306 |
| 4102_Human_parainfluenza_virus_1_g_3 | 60307 |
| 4102_Human_parainfluenza_virus_1_g_4 | 60308 |
| 4102_Human_parainfluenza_virus_1_g_5 | 60309 |
| 4103_Human_parainfluenza_virus_1_g_1 | 60310 |
| 4103_Human_parainfluenza_virus_1_g_2 | 60311 |
| 4103_Human_parainfluenza_virus_1_g_3 | 60312 |
| 4103_Human_parainfluenza_virus_1_g_4 | 60313 |
| 4103_Human_parainfluenza_virus_1_g_5 | 60314 |
| 4104_Human_parainfluenza_virus_1_g_1 | 60315 |
| 4104_Human_parainfluenza_virus_1_g_2 | 60316 |
| 4104_Human_parainfluenza_virus_1_g_3 | 60317 |
| 4104_Human_parainfluenza_virus_1_g_4 | 60318 |
| 4104_Human_parainfluenza_virus_1_g_5 | 60319 |
| 4105_Human_parainfluenza_virus_1_g_1 | 60320 |
| 4105_Human_parainfluenza_virus_1_g_2 | 60321 |
| 4105_Human_parainfluenza_virus_1_g_3 | 60322 |
| 4105_Human_parainfluenza_virus_1_g_4 | 60323 |
| 4105_Human_parainfluenza_virus_1_g_5 | 60324 |
| 4106_Human_parainfluenza_virus_1_g_1 | 60325 |
| 4106_Human_parainfluenza_virus_1_g_2 | 60326 |
| 4106_Human_parainfluenza_virus_1_g_3 | 60327 |
| 4106_Human_parainfluenza_virus_1_g_4 | 60328 |
| 4106_Human_parainfluenza_virus_1_g_5 | 60329 |
| 4107_Human_parainfluenza_virus_1_g_1 | 60330 |
| 4107_Human_parainfluenza_virus_1_g_2 | 60331 |
| 4107_Human_parainfluenza_virus_1_g_3 | 60332 |
| 4107_Human_parainfluenza_virus_1_g_4 | 60333 |
| 4107_Human_parainfluenza_virus_1_g_5 | 60334 |
| 4108_Human_parainfluenza_virus_1_g_1 | 60335 |
| 4108_Human_parainfluenza_virus_1_g_2 | 60336 |
| 4108_Human_parainfluenza_virus_1_g_3 | 60337 |
| 4108_Human_parainfluenza_virus_1_g_4 | 60338 |
| 4108_Human_parainfluenza_virus_1_g_5 | 60339 |
| 4109_Human_parainfluenza_virus_1_g_1 | 60340 |
| 4109_Human_parainfluenza_virus_1_g_2 | 60341 |
| 4109_Human_parainfluenza_virus_1_g_3 | 60342 |
| 4109_Human_parainfluenza_virus_1_g_4 | 60343 |
| 4109_Human_parainfluenza_virus_1_g_5 | 60344 |
| 4110_Human_parainfluenza_virus_1_g_1 | 60345 |
| 4110_Human_parainfluenza_virus_1_g_2 | 60346 |
| 4110_Human_parainfluenza_virus_1_g_3 | 60347 |
| 4110_Human_parainfluenza_virus_1_g_4 | 60348 |
| 4110_Human_parainfluenza_virus_1_g_5 | 60349 |
| 4111_Human_parainfluenza_virus_1_g_1 | 60350 |
| 4111_Human_parainfluenza_virus_1_g_2 | 60351 |
| 4111_Human_parainfluenza_virus_1_g_3 | 60352 |
| 4111_Human_parainfluenza_virus_1_g_4 | 60353 |
| 4111_Human_parainfluenza_virus_1_g_5 | 60354 |
| 4112_Human_parainfluenza_virus_1_g_1 | 60355 |
| 4112_Human_parainfluenza_virus_1_g_2 | 60356 |
| 4112_Human_parainfluenza_virus_1_g_3 | 60357 |
| 4112_Human_parainfluenza_virus_1_g_4 | 60358 |
| 4112_Human_parainfluenza_virus_1_g_5 | 60359 |
| 4113_Human_parainfluenza_virus_1_g_1 | 60360 |
| 4113_Human_parainfluenza_virus_1_g_2 | 60361 |
| 4113_Human_parainfluenza_virus_1_g_3 | 60362 |
| 4113_Human_parainfluenza_virus_1_g_4 | 60363 |
| 4113_Human_parainfluenza_virus_1_g_5 | 60364 |
| 4114_Human_parainfluenza_virus_1_g_1 | 60365 |
| 4114_Human_parainfluenza_virus_1_g_2 | 60366 |
| 4114_Human_parainfluenza_virus_1_g_3 | 60367 |
| 4114_Human_parainfluenza_virus_1_g_4 | 60368 |
| 4114_Human_parainfluenza_virus_1_g_5 | 60369 |
| 4115_Human_parainfluenza_virus_1_g_1 | 60370 |
| 4115_Human_parainfluenza_virus_1_g_2 | 60371 |
| 4115_Human_parainfluenza_virus_1_g_3 | 60372 |
| 4115_Human_parainfluenza_virus_1_g_4 | 60373 |
| 4115_Human_parainfluenza_virus_1_g_5 | 60374 |
| 4116_Human_parainfluenza_virus_1_g_1 | 60375 |
| 4116_Human_parainfluenza_virus_1_g_2 | 60376 |
| 4116_Human_parainfluenza_virus_1_g_3 | 60377 |
| 4116_Human_parainfluenza_virus_1_g_4 | 60378 |
| 4116_Human_parainfluenza_virus_1_g_5 | 60379 |
| 4117_Human_parainfluenza_virus_1_g_1 | 60380 |
| 4117_Human_parainfluenza_virus_1_g_2 | 60381 |
| 4117_Human_parainfluenza_virus_1_g_3 | 60382 |
| 4117_Human_parainfluenza_virus_1_g_4 | 60383 |
| 4117_Human_parainfluenza_virus_1_g_5 | 60384 |
| 4118_Human_parainfluenza_virus_1_g_1 | 60385 |
| 4118_Human_parainfluenza_virus_1_g_2 | 60386 |
| 4118_Human_parainfluenza_virus_1_g_3 | 60387 |
| 4118_Human_parainfluenza_virus_1_g_4 | 60388 |
| 4118_Human_parainfluenza_virus_1_g_5 | 60389 |
| 4119_Human_parainfluenza_virus_1_g_1 | 60390 |
| 4119_Human_parainfluenza_virus_1_g_2 | 60391 |
| 4119_Human_parainfluenza_virus_1_g_3 | 60392 |
| 4119_Human_parainfluenza_virus_1_g_4 | 60393 |
| 4119_Human_parainfluenza_virus_1_g_5 | 60394 |
| 4120_Human_parainfluenza_virus_1_g_1 | 60395 |
| 4120_Human_parainfluenza_virus_1_g_2 | 60396 |
| 4120_Human_parainfluenza_virus_1_g_3 | 60397 |
| 4120_Human_parainfluenza_virus_1_g_4 | 60398 |
| 4120_Human_parainfluenza_virus_1_g_5 | 60399 |
| 4121_Human_parainfluenza_virus_1_g_1 | 60400 |
| 4121_Human_parainfluenza_virus_1_g_2 | 60401 |
| 4121_Human_parainfluenza_virus_1_g_3 | 60402 |
| 4121_Human_parainfluenza_virus_1_g_4 | 60403 |
| 4121_Human_parainfluenza_virus_1_g_5 | 60404 |
| 4122_Human_parainfluenza_virus_1_g_1 | 60405 |
| 4122_Human_parainfluenza_virus_1_g_2 | 60406 |
| 4122_Human_parainfluenza_virus_1_g_3 | 60407 |
| 4122_Human_parainfluenza_virus_1_g_4 | 60408 |
| 4122_Human_parainfluenza_virus_1_g_5 | 60409 |
| 4123_Human_parainfluenza_virus_1_g_1 | 60410 |
| 4123_Human_parainfluenza_virus_1_g_2 | 60411 |
| 4123_Human_parainfluenza_virus_1_g_3 | 60412 |
| 4123_Human_parainfluenza_virus_1_g_4 | 60413 |
| 4123_Human_parainfluenza_virus_1_g_5 | 60414 |
| 4124_Human_parainfluenza_virus_1_g_1 | 60415 |
| 4124_Human_parainfluenza_virus_1_g_2 | 60416 |
| 4124_Human_parainfluenza_virus_1_g_3 | 60417 |
| 4124_Human_parainfluenza_virus_1_g_4 | 60418 |
| 4124_Human_parainfluenza_virus_1_g_5 | 60419 |
| 4125_Human_parainfluenza_virus_1_g_1 | 60420 |
| 4125_Human_parainfluenza_virus_1_g_2 | 60421 |
| 4125_Human_parainfluenza_virus_1_g_3 | 60422 |
| 4125_Human_parainfluenza_virus_1_g_4 | 60423 |
| 4125_Human_parainfluenza_virus_1_g_5 | 60424 |
| 4126_Human_parainfluenza_virus_1_g_1 | 60425 |
| 4126_Human_parainfluenza_virus_1_g_2 | 60426 |
| 4126_Human_parainfluenza_virus_1_g_3 | 60427 |
| 4126_Human_parainfluenza_virus_1_g_4 | 60428 |
| 4126_Human_parainfluenza_virus_1_g_5 | 60429 |
| 4127_Human_parainfluenza_virus_1_g_1 | 60430 |
| 4127_Human_parainfluenza_virus_1_g_2 | 60431 |
| 4127_Human_parainfluenza_virus_1_g_3 | 60432 |
| 4127_Human_parainfluenza_virus_1_g_4 | 60433 |
| 4127_Human_parainfluenza_virus_1_g_5 | 60434 |
| 4128_Human_parainfluenza_virus_1_g_1 | 60435 |
| 4128_Human_parainfluenza_virus_1_g_2 | 60436 |
| 4128_Human_parainfluenza_virus_1_g_3 | 60437 |
| 4128_Human_parainfluenza_virus_1_g_4 | 60438 |
| 4128_Human_parainfluenza_virus_1_g_5 | 60439 |
| 4129_Human_parainfluenza_virus_1_g_1 | 60440 |
| 4129_Human_parainfluenza_virus_1_g_2 | 60441 |
| 4129_Human_parainfluenza_virus_1_g_3 | 60442 |
| 4129_Human_parainfluenza_virus_1_g_4 | 60443 |
| 4129_Human_parainfluenza_virus_1_g_5 | 60444 |
| 4130_Human_parainfluenza_virus_1_g_1 | 60445 |
| 4130_Human_parainfluenza_virus_1_g_2 | 60446 |
| 4130_Human_parainfluenza_virus_1_g_3 | 60447 |
| 4130_Human_parainfluenza_virus_1_g_4 | 60448 |
| 4130_Human_parainfluenza_virus_1_g_5 | 60449 |
| 4131_Human_parainfluenza_virus_1_g_1 | 60450 |
| 4131_Human_parainfluenza_virus_1_g_2 | 60451 |
| 4131_Human_parainfluenza_virus_1_g_3 | 60452 |
| 4131_Human_parainfluenza_virus_1_g_4 | 60453 |
| 4131_Human_parainfluenza_virus_1_g_5 | 60454 |
| 4132_Human_parainfluenza_virus_1_g_1 | 60455 |
| 4132_Human_parainfluenza_virus_1_g_2 | 60456 |
| 4132_Human_parainfluenza_virus_1_g_3 | 60457 |
| 4132_Human_parainfluenza_virus_1_g_4 | 60458 |
| 4132_Human_parainfluenza_virus_1_g_5 | 60459 |
| 4133_Influenza_A_virus_(A/Korea/426/1968(H2N2))_{—} | 60460 |
| segment_2_g_1 | |
| 4133_Influenza_A_virus_(A/Korea/426/1968(H2N2))_{—} | 60461 |
| segment_2_g_2 | |
| 4133_Influenza_A_virus_(A/Korea/426/1968(H2N2))_{—} | 60462 |
| segment_2_g_3 | |
| 4133_Influenza_A_virus_(A/Korea/426/1968(H2N2))_{—} | 60463 |
| segment_2_g_4 | |
| 4133_Influenza_A_virus_(A/Korea/426/1968(H2N2))_{—} | 60464 |
| segment_2_g_5 | |
| 4134_Influenza_A_virus_(A/Korea/426/1968(H2N2))_{—} | 60465 |
| segment_2_g_1 | |
| 4134_Influenza_A_virus_(A/Korea/426/1968(H2N2))_{—} | 60466 |
| segment_2_g_2 | |
| 4134_Influenza_A_virus_(A/Korea/426/1968(H2N2))_{—} | 60467 |
| segment_2_g_3 | |
| 4134_Influenza_A_virus_(A/Korea/426/1968(H2N2))_{—} | 60468 |
| segment_2_g_4 | |
| 4134_Influenza_A_virus_(A/Korea/426/1968(H2N2))_{—} | 60469 |
| segment_2_g_5 | |
| 4135_Influenza_A_virus_(A/Korea/426/1968(H2N2))_{—} | 60470 |
| segment_2_g_1 | |
| 4135_Influenza_A_virus_(A/Korea/426/1968(H2N2))_{—} | 60471 |
| segment_2_g_2 | |
| 4135_Influenza_A_virus_(A/Korea/426/1968(H2N2))_{—} | 60472 |
| segment_2_g_3 | |
| 4135_Influenza_A_virus_(A/Korea/426/1968(H2N2))_{—} | 60473 |
| segment_2_g_4 | |
| 4135_Influenza_A_virus_(A/Korea/426/1968(H2N2))_{—} | 60474 |
| segment_2_g_5 | |
| 4136_Influenza_A_virus_(A/Korea/426/1968(H2N2))_{—} | 60475 |
| segment_2_g_1 | |
| 4136_Influenza_A_virus_(A/Korea/426/1968(H2N2))_{—} | 60476 |
| segment_2_g_2 | |
| 4136_Influenza_A_virus_(A/Korea/426/1968(H2N2))_{—} | 60477 |
| segment_2_g_3 | |
| 4136_Influenza_A_virus_(A/Korea/426/1968(H2N2))_{—} | 60478 |
| segment_2_g_4 | |
| 4136_Influenza_A_virus_(A/Korea/426/1968(H2N2))_{—} | 60479 |
| segment_2_g_5 | |
| 4137_Influenza_A_virus_(A/Korea/426/1968(H2N2))_{—} | 60480 |
| segment_2_g_1 | |
| 4137_Influenza_A_virus_(A/Korea/426/1968(H2N2))_{—} | 60481 |
| segment_2_g_2 | |
| 4137_Influenza_A_virus_(A/Korea/426/1968(H2N2))_{—} | 60482 |
| segment_2_g_3 | |
| 4137_Influenza_A_virus_(A/Korea/426/1968(H2N2))_{—} | 60483 |
| segment_2_g_4 | |
| 4137_Influenza_A_virus_(A/Korea/426/1968(H2N2))_{—} | 60484 |
| segment_2_g_5 | |
| 4138_Influenza_A_virus_(A/Korea/426/1968(H2N2))_{—} | 60485 |
| segment_2_g_1 | |
| 4138_Influenza_A_virus_(A/Korea/426/1968(H2N2))_{—} | 60486 |
| segment_2_g_2 | |
| 4138_Influenza_A_virus_(A/Korea/426/1968(H2N2))_{—} | 60487 |
| segment_2_g_3 | |
| 4138_Influenza_A_virus_(A/Korea/426/1968(H2N2))_{—} | 60488 |
| segment_2_g_4 | |
| 4138_Influenza_A_virus_(A/Korea/426/1968(H2N2))_{—} | 60489 |
| segment_2_g_5 | |
| 4139_Influenza_A_virus_(A/Korea/426/1968(H2N2))_{—} | 60490 |
| segment_2_g_1 | |
| 4139_Influenza_A_virus_(A/Korea/426/1968(H2N2))_{—} | 60491 |
| segment_2_g_2 | |
| 4139_Influenza_A_virus_(A/Korea/426/1968(H2N2))_{—} | 60492 |
| segment_2_g_3 | |
| 4139_Influenza_A_virus_(A/Korea/426/1968(H2N2))_{—} | 60493 |
| segment_2_g_4 | |
| 4139_Influenza_A_virus_(A/Korea/426/1968(H2N2))_{—} | 60494 |
| segment_2_g_5 | |
| 4140_Influenza_A_virus_(A/Korea/426/1968(H2N2))_{—} | 60495 |
| segment_2_g_1 | |
| 4140_Influenza_A_virus_(A/Korea/426/1968(H2N2))_{—} | 60496 |
| segment_2_g_2 | |
| 4140_Influenza_A_virus_(A/Korea/426/1968(H2N2))_{—} | 60497 |
| segment_2_g_3 | |
| 4140_Influenza_A_virus_(A/Korea/426/1968(H2N2))_{—} | 60498 |
| segment_2_g_4 | |
| 4140_Influenza_A_virus_(A/Korea/426/1968(H2N2))_{—} | 60499 |
| segment_2_g_5 | |
| 4141_Influenza_A_virus_(A/Korea/426/1968(H2N2))_{—} | 60500 |
| segment_2_g_1 | |
| 4141_Influenza_A_virus_(A/Korea/426/1968(H2N2))_{—} | 60501 |
| segment_2_g_2 | |
| 4141_Influenza_A_virus_(A/Korea/426/1968(H2N2))_{—} | 60502 |
| segment_2_g_3 | |
| 4141_Influenza_A_virus_(A/Korea/426/1968(H2N2))_{—} | 60503 |
| segment_2_g_4 | |
| 4141_Influenza_A_virus_(A/Korea/426/1968(H2N2))_{—} | 60504 |
| segment_2_g_5 | |
| 4142_Human_papillomavirus_—_61_g_1 | 60505 |
| 4142_Human_papillomavirus_—_61_g_2 | 60506 |
| 4142_Human_papillomavirus_—_61_g_3 | 60507 |
| 4142_Human_papillomavirus_—_61_g_4 | 60508 |
| 4142_Human_papillomavirus_—_61_g_5 | 60509 |
| 4143_Human_papillomavirus_—_61_g_1 | 60510 |
| 4143_Human_papillomavirus_—_61_g_2 | 60511 |
| 4143_Human_papillomavirus_—_61_g_3 | 60512 |
| 4143_Human_papillomavirus_—_61_g_4 | 60513 |
| 4143_Human_papillomavirus_—_61_g_5 | 60514 |
| 4144_Human_papillomavirus_—_61_g_1 | 60515 |
| 4144_Human_papillomavirus_—_61_g_2 | 60516 |
| 4144_Human_papillomavirus_—_61_g_3 | 60517 |
| 4144_Human_papillomavirus_—_61_g_4 | 60518 |
| 4144_Human_papillomavirus_—_61_g_5 | 60519 |
| 4145_Human_papillomavirus_—_61_g_1 | 60520 |
| 4145_Human_papillomavirus_—_61_g_2 | 60521 |
| 4145_Human_papillomavirus_—_61_g_3 | 60522 |
| 4145_Human_papillomavirus_—_61_g_4 | 60523 |
| 4145_Human_papillomavirus_—_61_g_5 | 60524 |
| 4146_Human_papillomavirus_—_61_g_1 | 60525 |
| 4146_Human_papillomavirus_—_61_g_2 | 60526 |
| 4146_Human_papillomavirus_—_61_g_3 | 60527 |
| 4146_Human_papillomavirus_—_61_g_4 | 60528 |
| 4146_Human_papillomavirus_—_61_g_5 | 60529 |
| 4147_Human_papillomavirus_—_61_g_1 | 60530 |
| 4147_Human_papillomavirus_—_61_g_2 | 60531 |
| 4147_Human_papillomavirus_—_61_g_3 | 60532 |
| 4147_Human_papillomavirus_—_61_g_4 | 60533 |
| 4147_Human_papillomavirus_—_61_g_5 | 60534 |
| 4148_Human_papillomavirus_—_61_g_1 | 60535 |
| 4148_Human_papillomavirus_—_61_g_2 | 60536 |
| 4148_Human_papillomavirus_—_61_g_3 | 60537 |
| 4148_Human_papillomavirus_—_61_g_4 | 60538 |
| 4148_Human_papillomavirus_—_61_g_5 | 60539 |
| 4149_Human_papillomavirus_—_61_g_1 | 60540 |
| 4149_Human_papillomavirus_—_61_g_2 | 60541 |
| 4149_Human_papillomavirus_—_61_g_3 | 60542 |
| 4149_Human_papillomavirus_—_61_g_4 | 60543 |
| 4149_Human_papillomavirus_—_61_g_5 | 60544 |
| 4150_Human_papillomavirus_—_61_g_1 | 60545 |
| 4150_Human_papillomavirus_—_61_g_2 | 60546 |
| 4150_Human_papillomavirus_—_61_g_3 | 60547 |
| 4150_Human_papillomavirus_—_61_g_4 | 60548 |
| 4150_Human_papillomavirus_—_61_g_5 | 60549 |
| 4151_Human_papillomavirus_—_61_g_1 | 60550 |
| 4151_Human_papillomavirus_—_61_g_2 | 60551 |
| 4151_Human_papillomavirus_—_61_g_3 | 60552 |
| 4151_Human_papillomavirus_—_61_g_4 | 60553 |
| 4151_Human_papillomavirus_—_61_g_5 | 60554 |
| 4152_Human_papillomavirus_—_61_g_1 | 60555 |
| 4152_Human_papillomavirus_—_61_g_2 | 60556 |
| 4153_Human_papillomavirus_—_61_g_1 | 60557 |
| 4153_Human_papillomavirus_—_61_g_2 | 60558 |
| 4153_Human_papillomavirus_—_61_g_3 | 60559 |
| 4153_Human_papillomavirus_—_61_g_4 | 60560 |
| 4153_Human_papillomavirus_—_61_g_5 | 60561 |
| 4154_Human_papillomavirus_—_61_g_1 | 60562 |
| 4154_Human_papillomavirus_—_61_g_2 | 60563 |
| 4154_Human_papillomavirus_—_61_g_3 | 60564 |
| 4154_Human_papillomavirus_—_61_g_4 | 60565 |
| 4154_Human_papillomavirus_—_61_g_5 | 60566 |
| 4155_Human_papillomavirus_—_61_g_1 | 60567 |
| 4155_Human_papillomavirus_—_61_g_2 | 60568 |
| 4155_Human_papillomavirus_—_61_g_3 | 60569 |
| 4155_Human_papillomavirus_—_61_g_4 | 60570 |
| 4155_Human_papillomavirus_—_61_g_5 | 60571 |
| 4156_Human_papillomavirus_—_61_g_1 | 60572 |
| 4156_Human_papillomavirus_—_61_g_2 | 60573 |
| 4156_Human_papillomavirus_—_61_g_3 | 60574 |
| 4156_Human_papillomavirus_—_61_g_4 | 60575 |
| 4156_Human_papillomavirus_—_61_g_5 | 60576 |
| 4157_Human_papillomavirus_—_61_g_1 | 60577 |
| 4157_Human_papillomavirus_—_61_g_2 | 60578 |
| 4157_Human_papillomavirus_—_61_g_3 | 60579 |
| 4157_Human_papillomavirus_—_61_g_4 | 60580 |
| 4157_Human_papillomavirus_—_61_g_5 | 60581 |
| 4158_Human_papillomavirus_—_61_g_1 | 60582 |
| 4158_Human_papillomavirus_—_61_g_2 | 60583 |
| 4158_Human_papillomavirus_—_61_g_3 | 60584 |
| 4158_Human_papillomavirus_—_61_g_4 | 60585 |
| 4158_Human_papillomavirus_—_61_g_5 | 60586 |
| 4159_Human_papillomavirus_—_61_g_1 | 60587 |
| 4159_Human_papillomavirus_—_61_g_2 | 60588 |
| 4159_Human_papillomavirus_—_61_g_3 | 60589 |
| 4159_Human_papillomavirus_—_61_g_4 | 60590 |
| 4159_Human_papillomavirus_—_61_g_5 | 60591 |
| 4160_Human_papillomavirus_—_61_g_1 | 60592 |
| 4160_Human_papillomavirus_—_61_g_2 | 60593 |
| 4160_Human_papillomavirus_—_61_g_3 | 60594 |
| 4160_Human_papillomavirus_—_61_g_4 | 60595 |
| 4160_Human_papillomavirus_—_61_g_5 | 60596 |
| 4161_Human_papillomavirus_—_61_g_1 | 60597 |
| 4161_Human_papillomavirus_—_61_g_2 | 60598 |
| 4161_Human_papillomavirus_—_61_g_3 | 60599 |
| 4161_Human_papillomavirus_—_61_g_4 | 60600 |
| 4161_Human_papillomavirus_—_61_g_5 | 60601 |
| 4162_Human_papillomavirus_—_61_g_1 | 60602 |
| 4162_Human_papillomavirus_—_61_g_2 | 60603 |
| 4162_Human_papillomavirus_—_61_g_3 | 60604 |
| 4162_Human_papillomavirus_—_61_g_4 | 60605 |
| 4162_Human_papillomavirus_—_61_g_5 | 60606 |
| 4163_Human_herpesvirus_8_strain_GK18_g_1 | 60607 |
| 4163_Human_herpesvirus_8_strain_GK18_g_2 | 60608 |
| 4163_Human_herpesvirus_8_strain_GK18_g_3 | 60609 |
| 4163_Human_herpesvirus_8_strain_GK18_g_4 | 60610 |
| 4163_Human_herpesvirus_8_strain_GK18_g_5 | 60611 |
| 4164_Human_herpesvirus_8_strain_GK18_g_1 | 60612 |
| 4164_Human_herpesvirus_8_strain_GK18_g_2 | 60613 |
| 4164_Human_herpesvirus_8_strain_GK18_g_3 | 60614 |
| 4164_Human_herpesvirus_8_strain_GK18_g_4 | 60615 |
| 4164_Human_herpesvirus_8_strain_GK18_g_5 | 60616 |
| 4165_Human_herpesvirus_8_strain_GK18_g_1 | 60617 |
| 4165_Human_herpesvirus_8_strain_GK18_g_2 | 60618 |
| 4165_Human_herpesvirus_8_strain_GK18_g_3 | 60619 |
| 4165_Human_herpesvirus_8_strain_GK18_g_4 | 60620 |
| 4165_Human_herpesvirus_8_strain_GK18_g_5 | 60621 |
| 4166_Human_herpesvirus_8_strain_GK18_g_1 | 60622 |
| 4166_Human_herpesvirus_8_strain_GK18_g_2 | 60623 |
| 4166_Human_herpesvirus_8_strain_GK18_g_3 | 60624 |
| 4166_Human_herpesvirus_8_strain_GK18_g_4 | 60625 |
| 4166_Human_herpesvirus_8_strain_GK18_g_5 | 60626 |
| 4167_Human_herpesvirus_8_strain_GK18_g_1 | 60627 |
| 4167_Human_herpesvirus_8_strain_GK18_g_2 | 60628 |
| 4167_Human_herpesvirus_8_strain_GK18_g_3 | 60629 |
| 4167_Human_herpesvirus_8_strain_GK18_g_4 | 60630 |
| 4167_Human_herpesvirus_8_strain_GK18_g_5 | 60631 |
| 4168_Human_herpesvirus_8_strain_GK18_g_1 | 60632 |
| 4168_Human_herpesvirus_8_strain_GK18_g_2 | 60633 |
| 4168_Human_herpesvirus_8_strain_GK18_g_3 | 60634 |
| 4168_Human_herpesvirus_8_strain_GK18_g_4 | 60635 |
| 4168_Human_herpesvirus_8_strain_GK18_g_5 | 60636 |
| 4169_Human_herpesvirus_8_strain_GK18_g_1 | 60637 |
| 4169_Human_herpesvirus_8_strain_GK18_g_2 | 60638 |
| 4169_Human_herpesvirus_8_strain_GK18_g_3 | 60639 |
| 4169_Human_herpesvirus_8_strain_GK18_g_4 | 60640 |
| 4169_Human_herpesvirus_8_strain_GK18_g_5 | 60641 |
| 4170_Human_herpesvirus_8_strain_GK18_g_1 | 60642 |
| 4170_Human_herpesvirus_8_strain_GK18_g_2 | 60643 |
| 4170_Human_herpesvirus_8_strain_GK18_g_3 | 60644 |
| 4170_Human_herpesvirus_8_strain_GK18_g_4 | 60645 |
| 4170_Human_herpesvirus_8_strain_GK18_g_5 | 60646 |
| 4172_Human_herpesvirus_8_strain_GK18_g_1 | 60647 |
| 4172_Human_herpesvirus_8_strain_GK18_g_2 | 60648 |
| 4172_Human_herpesvirus_8_strain_GK18_g_3 | 60649 |
| 4172_Human_herpesvirus_8_strain_GK18_g_4 | 60650 |
| 4172_Human_herpesvirus_8_strain_GK18_g_5 | 60651 |
| 4173_Human_herpesvirus_8_strain_GK18_g_1 | 60652 |
| 4173_Human_herpesvirus_8_strain_GK18_g_2 | 60653 |
| 4173_Human_herpesvirus_8_strain_GK18_g_3 | 60654 |
| 4173_Human_herpesvirus_8_strain_GK18_g_4 | 60655 |
| 4173_Human_herpesvirus_8_strain_GK18_g_5 | 60656 |
| 4174_Human_herpesvirus_8_strain_GK18_g_1 | 60657 |
| 4174_Human_herpesvirus_8_strain_GK18_g_2 | 60658 |
| 4174_Human_herpesvirus_8_strain_GK18_g_3 | 60659 |
| 4174_Human_herpesvirus_8_strain_GK18_g_4 | 60660 |
| 4174_Human_herpesvirus_8_strain_GK18_g_5 | 60661 |
| 4175_Human_herpesvirus_8_strain_GK18_g_1 | 60662 |
| 4175_Human_herpesvirus_8_strain_GK18_g_2 | 60663 |
| 4175_Human_herpesvirus_8_strain_GK18_g_3 | 60664 |
| 4175_Human_herpesvirus_8_strain_GK18_g_4 | 60665 |
| 4175_Human_herpesvirus_8_strain_GK18_g_5 | 60666 |
| 4176_Human_herpesvirus_8_strain_GK18_g_1 | 60667 |
| 4176_Human_herpesvirus_8_strain_GK18_g_2 | 60668 |
| 4176_Human_herpesvirus_8_strain_GK18_g_3 | 60669 |
| 4176_Human_herpesvirus_8_strain_GK18_g_4 | 60670 |
| 4176_Human_herpesvirus_8_strain_GK18_g_5 | 60671 |
| 4177_Human_herpesvirus_8_strain_GK18_g_1 | 60672 |
| 4177_Human_herpesvirus_8_strain_GK18_g_2 | 60673 |
| 4177_Human_herpesvirus_8_strain_GK18_g_3 | 60674 |
| 4178_Human_herpesvirus_8_strain_GK18_g_1 | 60675 |
| 4178_Human_herpesvirus_8_strain_GK18_g_2 | 60676 |
| 4178_Human_herpesvirus_8_strain_GK18_g_3 | 60677 |
| 4178_Human_herpesvirus_8_strain_GK18_g_4 | 60678 |
| 4178_Human_herpesvirus_8_strain_GK18_g_5 | 60679 |
| 4179_Human_herpesvirus_8_strain_GK18_g_1 | 60680 |
| 4179_Human_herpesvirus_8_strain_GK18_g_2 | 60681 |
| 4179_Human_herpesvirus_8_strain_GK18_g_3 | 60682 |
| 4179_Human_herpesvirus_8_strain_GK18_g_4 | 60683 |
| 4179_Human_herpesvirus_8_strain_GK18_g_5 | 60684 |
| 4180_Human_herpesvirus_8_strain_GK18_g_1 | 60685 |
| 4180_Human_herpesvirus_8_strain_GK18_g_2 | 60686 |
| 4180_Human_herpesvirus_8_strain_GK18_g_3 | 60687 |
| 4180_Human_herpesvirus_8_strain_GK18_g_4 | 60688 |
| 4180_Human_herpesvirus_8_strain_GK18_g_5 | 60689 |
| 4181_Human_herpesvirus_8_strain_GK18_g_1 | 60690 |
| 4181_Human_herpesvirus_8_strain_GK18_g_2 | 60691 |
| 4181_Human_herpesvirus_8_strain_GK18_g_3 | 60692 |
| 4181_Human_herpesvirus_8_strain_GK18_g_4 | 60693 |
| 4181_Human_herpesvirus_8_strain_GK18_g_5 | 60694 |
| 4182_Human_herpesvirus_8_strain_GK18_g_1 | 60695 |
| 4182_Human_herpesvirus_8_strain_GK18_g_2 | 60696 |
| 4182_Human_herpesvirus_8_strain_GK18_g_3 | 60697 |
| 4182_Human_herpesvirus_8_strain_GK18_g_4 | 60698 |
| 4182_Human_herpesvirus_8_strain_GK18_g_5 | 60699 |
| 4183_Human_herpesvirus_8_strain_GK18_g_1 | 60700 |
| 4183_Human_herpesvirus_8_strain_GK18_g_2 | 60701 |
| 4183_Human_herpesvirus_8_strain_GK18_g_3 | 60702 |
| 4183_Human_herpesvirus_8_strain_GK18_g_4 | 60703 |
| 4183_Human_herpesvirus_8_strain_GK18_g_5 | 60704 |
| 4184_Human_herpesvirus_8_strain_GK18_g_1 | 60705 |
| 4184_Human_herpesvirus_8_strain_GK18_g_2 | 60706 |
| 4184_Human_herpesvirus_8_strain_GK18_g_3 | 60707 |
| 4184_Human_herpesvirus_8_strain_GK18_g_4 | 60708 |
| 4185_Human_herpesvirus_8_strain_GK18_g_1 | 60709 |
| 4185_Human_herpesvirus_8_strain_GK18_g_2 | 60710 |
| 4185_Human_herpesvirus_8_strain_GK18_g_3 | 60711 |
| 4185_Human_herpesvirus_8_strain_GK18_g_4 | 60712 |
| 4185_Human_herpesvirus_8_strain_GK18_g_5 | 60713 |
| 4186_Human_herpesvirus_8_strain_GK18_g_1 | 60714 |
| 4186_Human_herpesvirus_8_strain_GK18_g_2 | 60715 |
| 4186_Human_herpesvirus_8_strain_GK18_g_3 | 60716 |
| 4186_Human_herpesvirus_8_strain_GK18_g_4 | 60717 |
| 4186_Human_herpesvirus_8_strain_GK18_g_5 | 60718 |
| 4187_Human_herpesvirus_8_strain_GK18_g_1 | 60719 |
| 4187_Human_herpesvirus_8_strain_GK18_g_2 | 60720 |
| 4187_Human_herpesvirus_8_strain_GK18_g_3 | 60721 |
| 4187_Human_herpesvirus_8_strain_GK18_g_4 | 60722 |
| 4187_Human_herpesvirus_8_strain_GK18_g_5 | 60723 |
| 4188_Human_herpesvirus_8_strain_GK18_g_1 | 60724 |
| 4188_Human_herpesvirus_8_strain_GK18_g_2 | 60725 |
| 4188_Human_herpesvirus_8_strain_GK18_g_3 | 60726 |
| 4189_Human_herpesvirus_8_strain_GK18_g_1 | 60727 |
| 4189_Human_herpesvirus_8_strain_GK18_g_2 | 60728 |
| 4189_Human_herpesvirus_8_strain_GK18_g_3 | 60729 |
| 4189_Human_herpesvirus_8_strain_GK18_g_4 | 60730 |
| 4190_Human_herpesvirus_8_strain_GK18_g_1 | 60731 |
| 4190_Human_herpesvirus_8_strain_GK18_g_2 | 60732 |
| 4190_Human_herpesvirus_8_strain_GK18_g_3 | 60733 |
| 4190_Human_herpesvirus_8_strain_GK18_g_4 | 60734 |
| 4191_Human_herpesvirus_8_strain_GK18_g_1 | 60735 |
| 4191_Human_herpesvirus_8_strain_GK18_g_2 | 60736 |
| 4191_Human_herpesvirus_8_strain_GK18_g_3 | 60737 |
| 4191_Human_herpesvirus_8_strain_GK18_g_4 | 60738 |
| 4191_Human_herpesvirus_8_strain_GK18_g_5 | 60739 |
| 4192_Human_herpesvirus_8_strain_GK18_g_1 | 60740 |
| 4192_Human_herpesvirus_8_strain_GK18_g_2 | 60741 |
| 4192_Human_herpesvirus_8_strain_GK18_g_3 | 60742 |
| 4193_Human_herpesvirus_8_strain_GK18_g_1 | 60743 |
| 4193_Human_herpesvirus_8_strain_GK18_g_2 | 60744 |
| 4193_Human_herpesvirus_8_strain_GK18_g_3 | 60745 |
| 4193_Human_herpesvirus_8_strain_GK18_g_4 | 60746 |
| 4193_Human_herpesvirus_8_strain_GK18_g_5 | 60747 |
| 4194_Human_herpesvirus_8_strain_GK18_g_1 | 60748 |
| 4194_Human_herpesvirus_8_strain_GK18_g_2 | 60749 |
| 4194_Human_herpesvirus_8_strain_GK18_g_3 | 60750 |
| 4194_Human_herpesvirus_8_strain_GK18_g_4 | 60751 |
| 4194_Human_herpesvirus_8_strain_GK18_g_5 | 60752 |
| 4195_Human_herpesvirus_8_strain_GK18_g_1 | 60753 |
| 4195_Human_herpesvirus_8_strain_GK18_g_2 | 60754 |
| 4195_Human_herpesvirus_8_strain_GK18_g_3 | 60755 |
| 4195_Human_herpesvirus_8_strain_GK18_g_4 | 60756 |
| 4195_Human_herpesvirus_8_strain_GK18_g_5 | 60757 |
| 4196_Human_herpesvirus_8_strain_GK18_g_1 | 60758 |
| 4196_Human_herpesvirus_8_strain_GK18_g_2 | 60759 |
| 4196_Human_herpesvirus_8_strain_GK18_g_3 | 60760 |
| 4196_Human_herpesvirus_8_strain_GK18_g_4 | 60761 |
| 4196_Human_herpesvirus_8_strain_GK18_g_5 | 60762 |
| 4198_Human_herpesvirus_8_strain_GK18_g_1 | 60763 |
| 4198_Human_herpesvirus_8_strain_GK18_g_2 | 60764 |
| 4198_Human_herpesvirus_8_strain_GK18_g_3 | 60765 |
| 4198_Human_herpesvirus_8_strain_GK18_g_4 | 60766 |
| 4198_Human_herpesvirus_8_strain_GK18_g_5 | 60767 |
| 4199_Human_herpesvirus_8_strain_GK18_g_1 | 60768 |
| 4199_Human_herpesvirus_8_strain_GK18_g_2 | 60769 |
| 4199_Human_herpesvirus_8_strain_GK18_g_3 | 60770 |
| 4199_Human_herpesvirus_8_strain_GK18_g_4 | 60771 |
| 4200_Human_herpesvirus_8_strain_GK18_g_1 | 60772 |
| 4200_Human_herpesvirus_8_strain_GK18_g_2 | 60773 |
| 4200_Human_herpesvirus_8_strain_GK18_g_3 | 60774 |
| 4200_Human_herpesvirus_8_strain_GK18_g_4 | 60775 |
| 4200_Human_herpesvirus_8_strain_GK18_g_5 | 60776 |
| 4201_Human_herpesvirus_8_strain_GK18_g_1 | 60777 |
| 4201_Human_herpesvirus_8_strain_GK18_g_2 | 60778 |
| 4201_Human_herpesvirus_8_strain_GK18_g_3 | 60779 |
| 4201_Human_herpesvirus_8_strain_GK18_g_4 | 60780 |
| 4201_Human_herpesvirus_8_strain_GK18_g_5 | 60781 |
| 4202_Human_herpesvirus_8_strain_GK18_g_1 | 60782 |
| 4202_Human_herpesvirus_8_strain_GK18_g_2 | 60783 |
| 4203_Human_herpesvirus_8_strain_GK18_g_1 | 60784 |
| 4203_Human_herpesvirus_8_strain_GK18_g_2 | 60785 |
| 4203_Human_herpesvirus_8_strain_GK18_g_3 | 60786 |
| 4203_Human_herpesvirus_8_strain_GK18_g_4 | 60787 |
| 4204_Human_papillomavirus_—_2_g_1 | 60788 |
| 4204_Human_papillomavirus_—_2_g_2 | 60789 |
| 4204_Human_papillomavirus_—_2_g_3 | 60790 |
| 4204_Human_papillomavirus_—_2_g_4 | 60791 |
| 4204_Human_papillomavirus_—_2_g_5 | 60792 |
| 4205_Human_papillomavirus_—_2_g_1 | 60793 |
| 4205_Human_papillomavirus_—_2_g_2 | 60794 |
| 4205_Human_papillomavirus_—_2_g_3 | 60795 |
| 4205_Human_papillomavirus_—_2_g_4 | 60796 |
| 4205_Human_papillomavirus_—_2_g_5 | 60797 |
| 4206_Human_papillomavirus_—_2_g_1 | 60798 |
| 4206_Human_papillomavirus_—_2_g_2 | 60799 |
| 4206_Human_papillomavirus_—_2_g_3 | 60800 |
| 4206_Human_papillomavirus_—_2_g_4 | 60801 |
| 4206_Human_papillomavirus_—_2_g_5 | 60802 |
| 4207_Human_papillomavirus_—_2_g_1 | 60803 |
| 4207_Human_papillomavirus_—_2_g_2 | 60804 |
| 4207_Human_papillomavirus_—_2_g_3 | 60805 |
| 4207_Human_papillomavirus_—_2_g_4 | 60806 |
| 4207_Human_papillomavirus_—_2_g_5 | 60807 |
| 4208_Human_papillomavirus_—_2_g_1 | 60808 |
| 4208_Human_papillomavirus_—_2_g_2 | 60809 |
| 4208_Human_papillomavirus_—_2_g_3 | 60810 |
| 4208_Human_papillomavirus_—_2_g_4 | 60811 |
| 4208_Human_papillomavirus_—_2_g_5 | 60812 |
| 4209_Human_papillomavirus_—_2_g_1 | 60813 |
| 4209_Human_papillomavirus_—_2_g_2 | 60814 |
| 4209_Human_papillomavirus_—_2_g_3 | 60815 |
| 4209_Human_papillomavirus_—_2_g_4 | 60816 |
| 4209_Human_papillomavirus_—_2_g_5 | 60817 |
| 4210_Human_papillomavirus_—_2_g_1 | 60818 |
| 4210_Human_papillomavirus_—_2_g_2 | 60819 |
| 4210_Human_papillomavirus_—_2_g_3 | 60820 |
| 4210_Human_papillomavirus_—_2_g_4 | 60821 |
| 4210_Human_papillomavirus_—_2_g_5 | 60822 |
| 4211_Human_papillomavirus_—_2_g_1 | 60823 |
| 4211_Human_papillomavirus_—_2_g_2 | 60824 |
| 4211_Human_papillomavirus_—_2_g_3 | 60825 |
| 4211_Human_papillomavirus_—_2_g_4 | 60826 |
| 4211_Human_papillomavirus_—_2_g_5 | 60827 |
| 4212_Human_papillomavirus_—_2_g_1 | 60828 |
| 4212_Human_papillomavirus_—_2_g_2 | 60829 |
| 4212_Human_papillomavirus_—_2_g_3 | 60830 |
| 4212_Human_papillomavirus_—_2_g_4 | 60831 |
| 4212_Human_papillomavirus_—_2_g_5 | 60832 |
| 4213_Human_papillomavirus_—_2_g_1 | 60833 |
| 4213_Human_papillomavirus_—_2_g_2 | 60834 |
| 4213_Human_papillomavirus_—_2_g_3 | 60835 |
| 4213_Human_papillomavirus_—_2_g_4 | 60836 |
| 4213_Human_papillomavirus_—_2_g_5 | 60837 |
| 4214_Human_papillomavirus_—_2_g_1 | 60838 |
| 4214_Human_papillomavirus_—_2_g_2 | 60839 |
| 4214_Human_papillomavirus_—_2_g_3 | 60840 |
| 4214_Human_papillomavirus_—_2_g_4 | 60841 |
| 4214_Human_papillomavirus_—_2_g_5 | 60842 |
| 4215_Human_papillomavirus_—_2_g_1 | 60843 |
| 4215_Human_papillomavirus_—_2_g_2 | 60844 |
| 4215_Human_papillomavirus_—_2_g_3 | 60845 |
| 4215_Human_papillomavirus_—_2_g_4 | 60846 |
| 4215_Human_papillomavirus_—_2_g_5 | 60847 |
| 4216_Human_papillomavirus_—_2_g_1 | 60848 |
| 4216_Human_papillomavirus_—_2_g_2 | 60849 |
| 4216_Human_papillomavirus_—_2_g_3 | 60850 |
| 4216_Human_papillomavirus_—_2_g_4 | 60851 |
| 4216_Human_papillomavirus_—_2_g_5 | 60852 |
| 4217_Human_papillomavirus_—_2_g_1 | 60853 |
| 4217_Human_papillomavirus_—_2_g_2 | 60854 |
| 4217_Human_papillomavirus_—_2_g_3 | 60855 |
| 4217_Human_papillomavirus_—_2_g_4 | 60856 |
| 4217_Human_papillomavirus_—_2_g_5 | 60857 |
| 4218_Human_papillomavirus_—_2_g_1 | 60858 |
| 4218_Human_papillomavirus_—_2_g_2 | 60859 |
| 4218_Human_papillomavirus_—_2_g_3 | 60860 |
| 4218_Human_papillomavirus_—_2_g_4 | 60861 |
| 4218_Human_papillomavirus_—_2_g_5 | 60862 |
| 4219_Human_papillomavirus_—_2_g_1 | 60863 |
| 4219_Human_papillomavirus_—_2_g_2 | 60864 |
| 4219_Human_papillomavirus_—_2_g_3 | 60865 |
| 4219_Human_papillomavirus_—_2_g_4 | 60866 |
| 4219_Human_papillomavirus_—_2_g_5 | 60867 |
| 4220_Human_papillomavirus_type_134_g_1 | 60868 |
| 4220_Human_papillomavirus_type_134_g_2 | 60869 |
| 4220_Human_papillomavirus_type_134_g_3 | 60870 |
| 4220_Human_papillomavirus_type_134_g_4 | 60871 |
| 4220_Human_papillomavirus_type_134_g_5 | 60872 |
| 4221_Human_papillomavirus_type_134_g_1 | 60873 |
| 4221_Human_papillomavirus_type_134_g_2 | 60874 |
| 4221_Human_papillomavirus_type_134_g_3 | 60875 |
| 4221_Human_papillomavirus_type_134_g_4 | 60876 |
| 4221_Human_papillomavirus_type_134_g_5 | 60877 |
| 4222_Human_papillomavirus_type_134_g_1 | 60878 |
| 4222_Human_papillomavirus_type_134_g_2 | 60879 |
| 4222_Human_papillomavirus_type_134_g_3 | 60880 |
| 4222_Human_papillomavirus_type_134_g_4 | 60881 |
| 4222_Human_papillomavirus_type_134_g_5 | 60882 |
| 4223_Human_papillomavirus_type_134_g_1 | 60883 |
| 4223_Human_papillomavirus_type_134_g_2 | 60884 |
| 4223_Human_papillomavirus_type_134_g_3 | 60885 |
| 4223_Human_papillomavirus_type_134_g_4 | 60886 |
| 4223_Human_papillomavirus_type_134_g_5 | 60887 |
| 4224_Human_papillomavirus_type_134_g_1 | 60888 |
| 4224_Human_papillomavirus_type_134_g_2 | 60889 |
| 4224_Human_papillomavirus_type_134_g_3 | 60890 |
| 4224_Human_papillomavirus_type_134_g_4 | 60891 |
| 4224_Human_papillomavirus_type_134_g_5 | 60892 |
| 4225_Human_papillomavirus_type_134_g_1 | 60893 |
| 4225_Human_papillomavirus_type_134_g_2 | 60894 |
| 4225_Human_papillomavirus_type_134_g_3 | 60895 |
| 4225_Human_papillomavirus_type_134_g_4 | 60896 |
| 4225_Human_papillomavirus_type_134_g_5 | 60897 |
| 4226_Human_papillomavirus_type_134_g_1 | 60898 |
| 4226_Human_papillomavirus_type_134_g_2 | 60899 |
| 4226_Human_papillomavirus_type_134_g_3 | 60900 |
| 4226_Human_papillomavirus_type_134_g_4 | 60901 |
| 4226_Human_papillomavirus_type_134_g_5 | 60902 |
| 4227_Human_papillomavirus_type_134_g_1 | 60903 |
| 4227_Human_papillomavirus_type_134_g_2 | 60904 |
| 4227_Human_papillomavirus_type_134_g_3 | 60905 |
| 4227_Human_papillomavirus_type_134_g_4 | 60906 |
| 4227_Human_papillomavirus_type_134_g_5 | 60907 |
| 4228_Human_papillomavirus_type_134_g_1 | 60908 |
| 4228_Human_papillomavirus_type_134_g_2 | 60909 |
| 4228_Human_papillomavirus_type_134_g_3 | 60910 |
| 4228_Human_papillomavirus_type_134_g_4 | 60911 |
| 4228_Human_papillomavirus_type_134_g_5 | 60912 |
| 4229_Human_papillomavirus_type_134_g_1 | 60913 |
| 4229_Human_papillomavirus_type_134_g_2 | 60914 |
| 4229_Human_papillomavirus_type_134_g_3 | 60915 |
| 4229_Human_papillomavirus_type_134_g_4 | 60916 |
| 4229_Human_papillomavirus_type_134_g_5 | 60917 |
| 4230_Human_papillomavirus_type_134_g_1 | 60918 |
| 4230_Human_papillomavirus_type_134_g_2 | 60919 |
| 4230_Human_papillomavirus_type_134_g_3 | 60920 |
| 4230_Human_papillomavirus_type_134_g_4 | 60921 |
| 4230_Human_papillomavirus_type_134_g_5 | 60922 |
| 4231_Human_papillomavirus_type_134_g_1 | 60923 |
| 4231_Human_papillomavirus_type_134_g_2 | 60924 |
| 4231_Human_papillomavirus_type_134_g_3 | 60925 |
| 4231_Human_papillomavirus_type_134_g_4 | 60926 |
| 4231_Human_papillomavirus_type_134_g_5 | 60927 |
| 4232_Human_papillomavirus_type_134_g_1 | 60928 |
| 4232_Human_papillomavirus_type_134_g_2 | 60929 |
| 4232_Human_papillomavirus_type_134_g_3 | 60930 |
| 4232_Human_papillomavirus_type_134_g_4 | 60931 |
| 4232_Human_papillomavirus_type_134_g_5 | 60932 |
| 4233_Human_papillomavirus_type_134_g_1 | 60933 |
| 4233_Human_papillomavirus_type_134_g_2 | 60934 |
| 4233_Human_papillomavirus_type_134_g_3 | 60935 |
| 4233_Human_papillomavirus_type_134_g_4 | 60936 |
| 4233_Human_papillomavirus_type_134_g_5 | 60937 |
| 4234_Human_papillomavirus_type_134_g_1 | 60938 |
| 4234_Human_papillomavirus_type_134_g_2 | 60939 |
| 4234_Human_papillomavirus_type_134_g_3 | 60940 |
| 4234_Human_papillomavirus_type_134_g_4 | 60941 |
| 4234_Human_papillomavirus_type_134_g_5 | 60942 |
| 4235_Human_papillomavirus_type_137_g_1 | 60943 |
| 4235_Human_papillomavirus_type_137_g_2 | 60944 |
| 4235_Human_papillomavirus_type_137_g_3 | 60945 |
| 4235_Human_papillomavirus_type_137_g_4 | 60946 |
| 4235_Human_papillomavirus_type_137_g_5 | 60947 |
| 4236_Human_papillomavirus_type_137_g_1 | 60948 |
| 4236_Human_papillomavirus_type_137_g_2 | 60949 |
| 4236_Human_papillomavirus_type_137_g_3 | 60950 |
| 4236_Human_papillomavirus_type_137_g_4 | 60951 |
| 4236_Human_papillomavirus_type_137_g_5 | 60952 |
| 4237_Human_papillomavirus_type_137_g_1 | 60953 |
| 4237_Human_papillomavirus_type_137_g_2 | 60954 |
| 4237_Human_papillomavirus_type_137_g_3 | 60955 |
| 4237_Human_papillomavirus_type_137_g_4 | 60956 |
| 4237_Human_papillomavirus_type_137_g_5 | 60957 |
| 4238_Human_papillomavirus_type_137_g_1 | 60958 |
| 4238_Human_papillomavirus_type_137_g_2 | 60959 |
| 4238_Human_papillomavirus_type_137_g_3 | 60960 |
| 4238_Human_papillomavirus_type_137_g_4 | 60961 |
| 4238_Human_papillomavirus_type_137_g_5 | 60962 |
| 4239_Human_papillomavirus_type_137_g_1 | 60963 |
| 4239_Human_papillomavirus_type_137_g_2 | 60964 |
| 4239_Human_papillomavirus_type_137_g_3 | 60965 |
| 4239_Human_papillomavirus_type_137_g_4 | 60966 |
| 4239_Human_papillomavirus_type_137_g_5 | 60967 |
| 4240_Human_papillomavirus_type_137_g_1 | 60968 |
| 4240_Human_papillomavirus_type_137_g_2 | 60969 |
| 4240_Human_papillomavirus_type_137_g_3 | 60970 |
| 4240_Human_papillomavirus_type_137_g_4 | 60971 |
| 4240_Human_papillomavirus_type_137_g_5 | 60972 |
| 4241_Human_papillomavirus_type_137_g_1 | 60973 |
| 4241_Human_papillomavirus_type_137_g_2 | 60974 |
| 4241_Human_papillomavirus_type_137_g_3 | 60975 |
| 4241_Human_papillomavirus_type_137_g_4 | 60976 |
| 4241_Human_papillomavirus_type_137_g_5 | 60977 |
| 4242_Human_papillomavirus_type_137_g_1 | 60978 |
| 4242_Human_papillomavirus_type_137_g_2 | 60979 |
| 4242_Human_papillomavirus_type_137_g_3 | 60980 |
| 4242_Human_papillomavirus_type_137_g_4 | 60981 |
| 4242_Human_papillomavirus_type_137_g_5 | 60982 |
| 4243_Human_papillomavirus_type_137_g_1 | 60983 |
| 4243_Human_papillomavirus_type_137_g_2 | 60984 |
| 4243_Human_papillomavirus_type_137_g_3 | 60985 |
| 4243_Human_papillomavirus_type_137_g_4 | 60986 |
| 4243_Human_papillomavirus_type_137_g_5 | 60987 |
| 4244_Human_papillomavirus_type_137_g_1 | 60988 |
| 4244_Human_papillomavirus_type_137_g_2 | 60989 |
| 4244_Human_papillomavirus_type_137_g_3 | 60990 |
| 4244_Human_papillomavirus_type_137_g_4 | 60991 |
| 4244_Human_papillomavirus_type_137_g_5 | 60992 |
| 4245_Human_papillomavirus_type_137_g_1 | 60993 |
| 4245_Human_papillomavirus_type_137_g_2 | 60994 |
| 4245_Human_papillomavirus_type_137_g_3 | 60995 |
| 4245_Human_papillomavirus_type_137_g_4 | 60996 |
| 4245_Human_papillomavirus_type_137_g_5 | 60997 |
| 4246_Human_papillomavirus_type_137_g_1 | 60998 |
| 4246_Human_papillomavirus_type_137_g_2 | 60999 |
| 4246_Human_papillomavirus_type_137_g_3 | 61000 |
| 4246_Human_papillomavirus_type_137_g_4 | 61001 |
| 4246_Human_papillomavirus_type_137_g_5 | 61002 |
| 4247_Human_papillomavirus_type_137_g_1 | 61003 |
| 4247_Human_papillomavirus_type_137_g_2 | 61004 |
| 4247_Human_papillomavirus_type_137_g_3 | 61005 |
| 4247_Human_papillomavirus_type_137_g_4 | 61006 |
| 4247_Human_papillomavirus_type_137_g_5 | 61007 |
| 4248_Human_papillomavirus_type_137_g_1 | 61008 |
| 4248_Human_papillomavirus_type_137_g_2 | 61009 |
| 4248_Human_papillomavirus_type_137_g_3 | 61010 |
| 4248_Human_papillomavirus_type_137_g_4 | 61011 |
| 4248_Human_papillomavirus_type_137_g_5 | 61012 |
| 4249_Human_papillomavirus_type_137_g_1 | 61013 |
| 4249_Human_papillomavirus_type_137_g_2 | 61014 |
| 4249_Human_papillomavirus_type_137_g_3 | 61015 |
| 4249_Human_papillomavirus_type_137_g_4 | 61016 |
| 4249_Human_papillomavirus_type_137_g_5 | 61017 |
| 4250_Influenza_B_virus_(B/Lee/1940)_segment_6_g_1 | 61018 |
| 4250_Influenza_B_virus_(B/Lee/1940)_segment_6_g_2 | 61019 |
| 4250_Influenza_B_virus_(B/Lee/1940)_segment_6_g_3 | 61020 |
| 4250_Influenza_B_virus_(B/Lee/1940)_segment_6_g_4 | 61021 |
| 4250_Influenza_B_virus_(B/Lee/1940)_segment_6_g_5 | 61022 |
| 4251_Influenza_B_virus_(B/Lee/1940)_segment_6_g_1 | 61023 |
| 4251_Influenza_B_virus_(B/Lee/1940)_segment_6_g_2 | 61024 |
| 4251_Influenza_B_virus_(B/Lee/1940)_segment_6_g_3 | 61025 |
| 4251_Influenza_B_virus_(B/Lee/1940)_segment_6_g_4 | 61026 |
| 4251_Influenza_B_virus_(B/Lee/1940)_segment_6_g_5 | 61027 |
| 4252_Influenza_B_virus_(B/Lee/1940)_segment_6_g_1 | 61028 |
| 4252_Influenza_B_virus_(B/Lee/1940)_segment_6_g_2 | 61029 |
| 4252_Influenza_B_virus_(B/Lee/1940)_segment_6_g_3 | 61030 |
| 4252_Influenza_B_virus_(B/Lee/1940)_segment_6_g_4 | 61031 |
| 4252_Influenza_B_virus_(B/Lee/1940)_segment_6_g_5 | 61032 |
| 4253_Influenza_B_virus_(B/Lee/1940)_segment_6_g_1 | 61033 |
| 4253_Influenza_B_virus_(B/Lee/1940)_segment_6_g_2 | 61034 |
| 4253_Influenza_B_virus_(B/Lee/1940)_segment_6_g_3 | 61035 |
| 4253_Influenza_B_virus_(B/Lee/1940)_segment_6_g_4 | 61036 |
| 4253_Influenza_B_virus_(B/Lee/1940)_segment_6_g_5 | 61037 |
| 4254_Influenza_B_virus_(B/Lee/1940)_segment_6_g_1 | 61038 |
| 4254_Influenza_B_virus_(B/Lee/1940)_segment_6_g_2 | 61039 |
| 4254_Influenza_B_virus_(B/Lee/1940)_segment_6_g_3 | 61040 |
| 4254_Influenza_B_virus_(B/Lee/1940)_segment_6_g_4 | 61041 |
| 4254_Influenza_B_virus_(B/Lee/1940)_segment_6_g_5 | 61042 |
| 4255_Influenza_B_virus_(B/Lee/1940)_segment_6_g_1 | 61043 |
| 4255_Influenza_B_virus_(B/Lee/1940)_segment_6_g_2 | 61044 |
| 4255_Influenza_B_virus_(B/Lee/1940)_segment_6_g_3 | 61045 |
| 4255_Influenza_B_virus_(B/Lee/1940)_segment_6_g_4 | 61046 |
| 4255_Influenza_B_virus_(B/Lee/1940)_segment_6_g_5 | 61047 |
| 4256_Human_papillomavirus_type_49_g_1 | 61048 |
| 4256_Human_papillomavirus_type_49_g_2 | 61049 |
| 4256_Human_papillomavirus_type_49_g_3 | 61050 |
| 4256_Human_papillomavirus_type_49_g_4 | 61051 |
| 4256_Human_papillomavirus_type_49_g_5 | 61052 |
| 4257_Human_papillomavirus_type_49_g_1 | 61053 |
| 4257_Human_papillomavirus_type_49_g_2 | 61054 |
| 4257_Human_papillomavirus_type_49_g_3 | 61055 |
| 4257_Human_papillomavirus_type_49_g_4 | 61056 |
| 4257_Human_papillomavirus_type_49_g_5 | 61057 |
| 4258_Human_papillomavirus_type_49_g_1 | 61058 |
| 4258_Human_papillomavirus_type_49_g_2 | 61059 |
| 4258_Human_papillomavirus_type_49_g_3 | 61060 |
| 4258_Human_papillomavirus_type_49_g_4 | 61061 |
| 4258_Human_papillomavirus_type_49_g_5 | 61062 |
| 4259_Human_papillomavirus_type_49_g_1 | 61063 |
| 4259_Human_papillomavirus_type_49_g_2 | 61064 |
| 4259_Human_papillomavirus_type_49_g_3 | 61065 |
| 4259_Human_papillomavirus_type_49_g_4 | 61066 |
| 4259_Human_papillomavirus_type_49_g_5 | 61067 |
| 4260_Human_papillomavirus_type_49_g_1 | 61068 |
| 4260_Human_papillomavirus_type_49_g_2 | 61069 |
| 4260_Human_papillomavirus_type_49_g_3 | 61070 |
| 4260_Human_papillomavirus_type_49_g_4 | 61071 |
| 4260_Human_papillomavirus_type_49_g_5 | 61072 |
| 4261_Human_papillomavirus_type_49_g_1 | 61073 |
| 4261_Human_papillomavirus_type_49_g_2 | 61074 |
| 4261_Human_papillomavirus_type_49_g_3 | 61075 |
| 4261_Human_papillomavirus_type_49_g_4 | 61076 |
| 4261_Human_papillomavirus_type_49_g_5 | 61077 |
| 4262_Human_papillomavirus_type_49_g_1 | 61078 |
| 4262_Human_papillomavirus_type_49_g_2 | 61079 |
| 4262_Human_papillomavirus_type_49_g_3 | 61080 |
| 4262_Human_papillomavirus_type_49_g_4 | 61081 |
| 4262_Human_papillomavirus_type_49_g_5 | 61082 |
| 4263_Human_papillomavirus_type_49_g_1 | 61083 |
| 4263_Human_papillomavirus_type_49_g_2 | 61084 |
| 4263_Human_papillomavirus_type_49_g_3 | 61085 |
| 4263_Human_papillomavirus_type_49_g_4 | 61086 |
| 4263_Human_papillomavirus_type_49_g_5 | 61087 |
| 4264_Human_papillomavirus_type_49_g_1 | 61088 |
| 4264_Human_papillomavirus_type_49_g_2 | 61089 |
| 4265_Human_papillomavirus_type_49_g_1 | 61090 |
| 4265_Human_papillomavirus_type_49_g_2 | 61091 |
| 4265_Human_papillomavirus_type_49_g_3 | 61092 |
| 4265_Human_papillomavirus_type_49_g_4 | 61093 |
| 4265_Human_papillomavirus_type_49_g_5 | 61094 |
| 4266_Human_papillomavirus_type_49_g_1 | 61095 |
| 4266_Human_papillomavirus_type_49_g_2 | 61096 |
| 4266_Human_papillomavirus_type_49_g_3 | 61097 |
| 4266_Human_papillomavirus_type_49_g_4 | 61098 |
| 4266_Human_papillomavirus_type_49_g_5 | 61099 |
| 4267_Human_papillomavirus_type_49_g_1 | 61100 |
| 4267_Human_papillomavirus_type_49_g_2 | 61101 |
| 4267_Human_papillomavirus_type_49_g_3 | 61102 |
| 4267_Human_papillomavirus_type_49_g_4 | 61103 |
| 4267_Human_papillomavirus_type_49_g_5 | 61104 |
| 4268_Human_papillomavirus_type_49_g_1 | 61105 |
| 4268_Human_papillomavirus_type_49_g_2 | 61106 |
| 4268_Human_papillomavirus_type_49_g_3 | 61107 |
| 4268_Human_papillomavirus_type_49_g_4 | 61108 |
| 4268_Human_papillomavirus_type_49_g_5 | 61109 |
| 4269_Human_papillomavirus_type_49_g_1 | 61110 |
| 4269_Human_papillomavirus_type_49_g_2 | 61111 |
| 4269_Human_papillomavirus_type_49_g_3 | 61112 |
| 4269_Human_papillomavirus_type_49_g_4 | 61113 |
| 4269_Human_papillomavirus_type_49_g_5 | 61114 |
| 4270_Human_papillomavirus_type_49_g_1 | 61115 |
| 4270_Human_papillomavirus_type_49_g_2 | 61116 |
| 4270_Human_papillomavirus_type_49_g_3 | 61117 |
| 4270_Human_papillomavirus_type_49_g_4 | 61118 |
| 4270_Human_papillomavirus_type_49_g_5 | 61119 |
| 4271_Human_papillomavirus_type_49_g_1 | 61120 |
| 4271_Human_papillomavirus_type_49_g_2 | 61121 |
| 4271_Human_papillomavirus_type_49_g_3 | 61122 |
| 4271_Human_papillomavirus_type_49_g_4 | 61123 |
| 4271_Human_papillomavirus_type_49_g_5 | 61124 |
| 4272_Human_papillomavirus_type_49_g_1 | 61125 |
| 4272_Human_papillomavirus_type_49_g_2 | 61126 |
| 4272_Human_papillomavirus_type_49_g_3 | 61127 |
| 4272_Human_papillomavirus_type_49_g_4 | 61128 |
| 4272_Human_papillomavirus_type_49_g_5 | 61129 |
| 4273_Human_papillomavirus_type_49_g_1 | 61130 |
| 4273_Human_papillomavirus_type_49_g_2 | 61131 |
| 4273_Human_papillomavirus_type_49_g_3 | 61132 |
| 4273_Human_papillomavirus_type_49_g_4 | 61133 |
| 4273_Human_papillomavirus_type_49_g_5 | 61134 |
| 4274_Human_papillomavirus_type_49_g_1 | 61135 |
| 4274_Human_papillomavirus_type_49_g_2 | 61136 |
| 4274_Human_papillomavirus_type_49_g_3 | 61137 |
| 4274_Human_papillomavirus_type_49_g_4 | 61138 |
| 4274_Human_papillomavirus_type_49_g_5 | 61139 |
| 4275_Influenza_A_virus_(A/Shanghai/02/2013(H7N9))_segment_{—} | 61140 |
| 8_nuclear_export_protein_(NEP)_and_nonstructural_protein_1_(NS1)_genes_g_1 | |
| 4275_Influenza_A_virus_(A/Shanghai/02/2013(H7N9))_segment_{—} | 61141 |
| 8_nuclear_export_protein_(NEP)_and_nonstructural_protein_1_(NS1)_genes_g_2 | |
| 4275_Influenza_A_virus_(A/Shanghai/02/2013(H7N9))_segment_{—} | 61142 |
| 8_nuclear_export_protein_(NEP)_and_nonstructural_protein_1_(NS1)_genes_g_3 | |
| 4275_Influenza_A_virus_(A/Shanghai/02/2013(H7N9))_segment_{—} | 61143 |
| 8_nuclear_export_protein_(NEP)_and_nonstructural_protein_1_(NS1)_genes_g_4 | |
| 4275_Influenza_A_virus_(A/Shanghai/02/2013(H7N9))_segment_{—} | 61144 |
| 8_nuclear_export_protein_(NEP)_and_nonstructural_protein_1_(NS1)_genes_g_5 | |
| 4276_Influenza_C_virus_(C/Ann_Arbor/1/50)_P3_gene_{—} | 61145 |
| for_polymerase_3_g_1 | |
| 4276_Influenza_C_virus_(C/Ann_Arbor/1/50)_P3_gene_{—} | 61146 |
| for_polymerase_3_g_2 | |
| 4276_Influenza_C_virus_(C/Ann_Arbor/1/50)_P3_gene_{—} | 61147 |
| for_polymerase_3_g_3 | |
| 4276_Influenza_C_virus_(C/Ann_Arbor/1/50)_P3_gene_{—} | 61148 |
| for_polymerase_3_g_4 | |
| 4276_Influenza_C_virus_(C/Ann_Arbor/1/50)_P3_gene_{—} | 61149 |
| for_polymerase_3_g_5 | |
| 4277_Influenza_C_virus_(C/Ann_Arbor/1/50)_P3_gene_{—} | 61150 |
| for_polymerase_3_g_1 | |
| 4277_Influenza_C_virus_(C/Ann_Arbor/1/50)_P3_gene_{—} | 61151 |
| for_polymerase_3_g_2 | |
| 4277_Influenza_C_virus_(C/Ann_Arbor/1/50)_P3_gene_{—} | 61152 |
| for_polymerase_3_g_3 | |
| 4277_Influenza_C_virus_(C/Ann_Arbor/1/50)_P3_gene_{—} | 61153 |
| for_polymerase_3_g_4 | |
| 4277_Influenza_C_virus_(C/Ann_Arbor/1/50)_P3_gene_{—} | 61154 |
| for_polymerase_3_g_5 | |
| 4278_Human_papillomavirus_type_126_g_1 | 61155 |
| 4278_Human_papillomavirus_type_126_g_2 | 61156 |
| 4278_Human_papillomavirus_type_126_g_3 | 61157 |
| 4278_Human_papillomavirus_type_126_g_4 | 61158 |
| 4278_Human_papillomavirus_type_126_g_5 | 61159 |
| 4279_Human_papillomavirus_type_126_g_1 | 61160 |
| 4279_Human_papillomavirus_type_126_g_2 | 61161 |
| 4279_Human_papillomavirus_type_126_g_3 | 61162 |
| 4279_Human_papillomavirus_type_126_g_4 | 61163 |
| 4279_Human_papillomavirus_type_126_g_5 | 61164 |
| 4280_Human_papillomavirus_type_126_g_1 | 61165 |
| 4280_Human_papillomavirus_type_126_g_2 | 61166 |
| 4280_Human_papillomavirus_type_126_g_3 | 61167 |
| 4280_Human_papillomavirus_type_126_g_4 | 61168 |
| 4280_Human_papillomavirus_type_126_g_5 | 61169 |
| 4281_Human_papillomavirus_type_126_g_1 | 61170 |
| 4281_Human_papillomavirus_type_126_g_2 | 61171 |
| 4281_Human_papillomavirus_type_126_g_3 | 61172 |
| 4281_Human_papillomavirus_type_126_g_4 | 61173 |
| 4281_Human_papillomavirus_type_126_g_5 | 61174 |
| 4282_Human_papillomavirus_type_126_g_1 | 61175 |
| 4282_Human_papillomavirus_type_126_g_2 | 61176 |
| 4282_Human_papillomavirus_type_126_g_3 | 61177 |
| 4282_Human_papillomavirus_type_126_g_4 | 61178 |
| 4283_Human_papillomavirus_type_126_g_1 | 61179 |
| 4283_Human_papillomavirus_type_126_g_2 | 61180 |
| 4283_Human_papillomavirus_type_126_g_3 | 61181 |
| 4283_Human_papillomavirus_type_126_g_4 | 61182 |
| 4283_Human_papillomavirus_type_126_g_5 | 61183 |
| 4284_Human_papillomavirus_type_126_g_1 | 61184 |
| 4284_Human_papillomavirus_type_126_g_2 | 61185 |
| 4284_Human_papillomavirus_type_126_g_3 | 61186 |
| 4284_Human_papillomavirus_type_126_g_4 | 61187 |
| 4284_Human_papillomavirus_type_126_g_5 | 61188 |
| 4285_Human_papillomavirus_type_126_g_1 | 61189 |
| 4285_Human_papillomavirus_type_126_g_2 | 61190 |
| 4285_Human_papillomavirus_type_126_g_3 | 61191 |
| 4285_Human_papillomavirus_type_126_g_4 | 61192 |
| 4285_Human_papillomavirus_type_126_g_5 | 61193 |
| 4286_Human_papillomavirus_type_126_g_1 | 61194 |
| 4286_Human_papillomavirus_type_126_g_2 | 61195 |
| 4286_Human_papillomavirus_type_126_g_3 | 61196 |
| 4286_Human_papillomavirus_type_126_g_4 | 61197 |
| 4286_Human_papillomavirus_type_126_g_5 | 61198 |
| 4287_Human_papillomavirus_type_126_g_1 | 61199 |
| 4287_Human_papillomavirus_type_126_g_2 | 61200 |
| 4287_Human_papillomavirus_type_126_g_3 | 61201 |
| 4287_Human_papillomavirus_type_126_g_4 | 61202 |
| 4287_Human_papillomavirus_type_126_g_5 | 61203 |
| 4288_Human_papillomavirus_type_128_g_1 | 61204 |
| 4288_Human_papillomavirus_type_128_g_2 | 61205 |
| 4288_Human_papillomavirus_type_128_g_3 | 61206 |
| 4288_Human_papillomavirus_type_128_g_4 | 61207 |
| 4288_Human_papillomavirus_type_128_g_5 | 61208 |
| 4289_Human_papillomavirus_type_128_g_1 | 61209 |
| 4289_Human_papillomavirus_type_128_g_2 | 61210 |
| 4289_Human_papillomavirus_type_128_g_3 | 61211 |
| 4289_Human_papillomavirus_type_128_g_4 | 61212 |
| 4289_Human_papillomavirus_type_128_g_5 | 61213 |
| 4290_Human_papillomavirus_type_128_g_1 | 61214 |
| 4290_Human_papillomavirus_type_128_g_2 | 61215 |
| 4290_Human_papillomavirus_type_128_g_3 | 61216 |
| 4290_Human_papillomavirus_type_128_g_4 | 61217 |
| 4290_Human_papillomavirus_type_128_g_5 | 61218 |
| 4291_Human_papillomavirus_type_128_g_1 | 61219 |
| 4291_Human_papillomavirus_type_128_g_2 | 61220 |
| 4291_Human_papillomavirus_type_128_g_3 | 61221 |
| 4291_Human_papillomavirus_type_128_g_4 | 61222 |
| 4291_Human_papillomavirus_type_128_g_5 | 61223 |
| 4292_Human_papillomavirus_type_128_g_1 | 61224 |
| 4292_Human_papillomavirus_type_128_g_2 | 61225 |
| 4292_Human_papillomavirus_type_128_g_3 | 61226 |
| 4292_Human_papillomavirus_type_128_g_4 | 61227 |
| 4292_Human_papillomavirus_type_128_g_5 | 61228 |
| 4293_Human_papillomavirus_type_128_g_1 | 61229 |
| 4293_Human_papillomavirus_type_128_g_2 | 61230 |
| 4293_Human_papillomavirus_type_128_g_3 | 61231 |
| 4293_Human_papillomavirus_type_128_g_4 | 61232 |
| 4293_Human_papillomavirus_type_128_g_5 | 61233 |
| 4294_Human_papillomavirus_type_128_g_1 | 61234 |
| 4294_Human_papillomavirus_type_128_g_2 | 61235 |
| 4294_Human_papillomavirus_type_128_g_3 | 61236 |
| 4294_Human_papillomavirus_type_128_g_4 | 61237 |
| 4294_Human_papillomavirus_type_128_g_5 | 61238 |
| 4295_Human_papillomavirus_type_128_g_1 | 61239 |
| 4295_Human_papillomavirus_type_128_g_2 | 61240 |
| 4295_Human_papillomavirus_type_128_g_3 | 61241 |
| 4295_Human_papillomavirus_type_128_g_4 | 61242 |
| 4295_Human_papillomavirus_type_128_g_5 | 61243 |
| 4296_Human_papillomavirus_type_128_g_1 | 61244 |
| 4296_Human_papillomavirus_type_128_g_2 | 61245 |
| 4296_Human_papillomavirus_type_128_g_3 | 61246 |
| 4296_Human_papillomavirus_type_128_g_4 | 61247 |
| 4296_Human_papillomavirus_type_128_g_5 | 61248 |
| 4297_Human_papillomavirus_type_128_g_1 | 61249 |
| 4297_Human_papillomavirus_type_128_g_2 | 61250 |
| 4297_Human_papillomavirus_type_128_g_3 | 61251 |
| 4297_Human_papillomavirus_type_128_g_4 | 61252 |
| 4297_Human_papillomavirus_type_128_g_5 | 61253 |
| 4298_Human_papillomavirus_type_128_g_1 | 61254 |
| 4298_Human_papillomavirus_type_128_g_2 | 61255 |
| 4298_Human_papillomavirus_type_128_g_3 | 61256 |
| 4298_Human_papillomavirus_type_128_g_4 | 61257 |
| 4298_Human_papillomavirus_type_128_g_5 | 61258 |
| 4299_Human_papillomavirus_type_128_g_1 | 61259 |
| 4299_Human_papillomavirus_type_128_g_2 | 61260 |
| 4299_Human_papillomavirus_type_128_g_3 | 61261 |
| 4299_Human_papillomavirus_type_128_g_4 | 61262 |
| 4299_Human_papillomavirus_type_128_g_5 | 61263 |
| 4300_Human_papillomavirus_type_128_g_1 | 61264 |
| 4300_Human_papillomavirus_type_128_g_2 | 61265 |
| 4300_Human_papillomavirus_type_128_g_3 | 61266 |
| 4300_Human_papillomavirus_type_128_g_4 | 61267 |
| 4300_Human_papillomavirus_type_128_g_5 | 61268 |
| 4301_Human_papillomavirus_type_144_g_1 | 61269 |
| 4301_Human_papillomavirus_type_144_g_2 | 61270 |
| 4301_Human_papillomavirus_type_144_g_3 | 61271 |
| 4301_Human_papillomavirus_type_144_g_4 | 61272 |
| 4301_Human_papillomavirus_type_144_g_5 | 61273 |
| 4302_Human_papillomavirus_type_144_g_1 | 61274 |
| 4302_Human_papillomavirus_type_144_g_2 | 61275 |
| 4302_Human_papillomavirus_type_144_g_3 | 61276 |
| 4302_Human_papillomavirus_type_144_g_4 | 61277 |
| 4302_Human_papillomavirus_type_144_g_5 | 61278 |
| 4303_Human_papillomavirus_type_144_g_1 | 61279 |
| 4303_Human_papillomavirus_type_144_g_2 | 61280 |
| 4303_Human_papillomavirus_type_144_g_3 | 61281 |
| 4303_Human_papillomavirus_type_144_g_4 | 61282 |
| 4303_Human_papillomavirus_type_144_g_5 | 61283 |
| 4304_Human_papillomavirus_type_144_g_1 | 61284 |
| 4304_Human_papillomavirus_type_144_g_2 | 61285 |
| 4304_Human_papillomavirus_type_144_g_3 | 61286 |
| 4304_Human_papillomavirus_type_144_g_4 | 61287 |
| 4304_Human_papillomavirus_type_144_g_5 | 61288 |
| 4305_Human_papillomavirus_type_144_g_1 | 61289 |
| 4305_Human_papillomavirus_type_144_g_2 | 61290 |
| 4305_Human_papillomavirus_type_144_g_3 | 61291 |
| 4305_Human_papillomavirus_type_144_g_4 | 61292 |
| 4305_Human_papillomavirus_type_144_g_5 | 61293 |
| 4306_Human_papillomavirus_type_144_g_1 | 61294 |
| 4306_Human_papillomavirus_type_144_g_2 | 61295 |
| 4306_Human_papillomavirus_type_144_g_3 | 61296 |
| 4306_Human_papillomavirus_type_144_g_4 | 61297 |
| 4306_Human_papillomavirus_type_144_g_5 | 61298 |
| 4307_Human_papillomavirus_type_144_g_1 | 61299 |
| 4307_Human_papillomavirus_type_144_g_2 | 61300 |
| 4307_Human_papillomavirus_type_144_g_3 | 61301 |
| 4307_Human_papillomavirus_type_144_g_4 | 61302 |
| 4307_Human_papillomavirus_type_144_g_5 | 61303 |
| 4308_Human_papillomavirus_type_144_g_1 | 61304 |
| 4308_Human_papillomavirus_type_144_g_2 | 61305 |
| 4308_Human_papillomavirus_type_144_g_3 | 61306 |
| 4308_Human_papillomavirus_type_144_g_4 | 61307 |
| 4308_Human_papillomavirus_type_144_g_5 | 61308 |
| 4309_Human_papillomavirus_type_144_g_1 | 61309 |
| 4309_Human_papillomavirus_type_144_g_2 | 61310 |
| 4309_Human_papillomavirus_type_144_g_3 | 61311 |
| 4309_Human_papillomavirus_type_144_g_4 | 61312 |
| 4309_Human_papillomavirus_type_144_g_5 | 61313 |
| 4310_Human_papillomavirus_type_144_g_1 | 61314 |
| 4310_Human_papillomavirus_type_144_g_2 | 61315 |
| 4310_Human_papillomavirus_type_144_g_3 | 61316 |
| 4310_Human_papillomavirus_type_144_g_4 | 61317 |
| 4310_Human_papillomavirus_type_144_g_5 | 61318 |
| 4311_Human_papillomavirus_type_144_g_1 | 61319 |
| 4311_Human_papillomavirus_type_144_g_2 | 61320 |
| 4311_Human_papillomavirus_type_144_g_3 | 61321 |
| 4311_Human_papillomavirus_type_144_g_4 | 61322 |
| 4311_Human_papillomavirus_type_144_g_5 | 61323 |
| 4312_Human_papillomavirus_type_144_g_1 | 61324 |
| 4312_Human_papillomavirus_type_144_g_2 | 61325 |
| 4312_Human_papillomavirus_type_144_g_3 | 61326 |
| 4312_Human_papillomavirus_type_144_g_4 | 61327 |
| 4312_Human_papillomavirus_type_144_g_5 | 61328 |
| 4313_Human_papillomavirus_type_144_g_1 | 61329 |
| 4313_Human_papillomavirus_type_144_g_2 | 61330 |
| 4313_Human_papillomavirus_type_144_g_3 | 61331 |
| 4313_Human_papillomavirus_type_144_g_4 | 61332 |
| 4313_Human_papillomavirus_type_144_g_5 | 61333 |
| 4314_Human_papillomavirus_type_144_g_1 | 61334 |
| 4314_Human_papillomavirus_type_144_g_2 | 61335 |
| 4314_Human_papillomavirus_type_144_g_3 | 61336 |
| 4314_Human_papillomavirus_type_144_g_4 | 61337 |
| 4314_Human_papillomavirus_type_144_g_5 | 61338 |
| 4315_Influenza_A_virus_(A/New_York/392/2004(H3N2))_{—} | 61339 |
| segment_5_g_1 | |
| 4315_Influenza_A_virus_(A/New_York/392/2004(H3N2))_{—} | 61340 |
| segment_5_g_2 | |
| 4315_Influenza_A_virus_(A/New_York/392/2004(H3N2))_{—} | 61341 |
| segment_5_g_3 | |
| 4315_Influenza_A_virus_(A/New_York/392/2004(H3N2))_{—} | 61342 |
| segment_5_g_4 | |
| 4315_Influenza_A_virus_(A/New_York/392/2004(H3N2))_{—} | 61343 |
| segment_5_g_5 | |
| 4316_Influenza_A_virus_(A/New_York/392/2004(H3N2))_{—} | 61344 |
| segment_5_g_1 | |
| 4316_Influenza_A_virus_(A/New_York/392/2004(H3N2))_{—} | 61345 |
| segment_5_g_2 | |
| 4316_Influenza_A_virus_(A/New_York/392/2004(H3N2))_{—} | 61346 |
| segment_5_g_3 | |
| 4316_Influenza_A_virus_(A/New_York/392/2004(H3N2))_{—} | 61347 |
| segment_5_g_4 | |
| 4316_Influenza_A_virus_(A/New_York/392/2004(H3N2))_{—} | 61348 |
| segment_5_g_5 | |
| 4317_Influenza_A_virus_(A/New_York/392/2004(H3N2))_{—} | 61349 |
| segment_5_g_1 | |
| 4317_Influenza_A_virus_(A/New_York/392/2004(H3N2))_{—} | 61350 |
| segment_5_g_2 | |
| 4317_Influenza_A_virus_(A/New_York/392/2004(H3N2))_{—} | 61351 |
| segment_5_g_3 | |
| 4317_Influenza_A_virus_(A/New_York/392/2004(H3N2))_{—} | 61352 |
| segment_5_g_4 | |
| 4317_Influenza_A_virus_(A/New_York/392/2004(H3N2))_{—} | 61353 |
| segment_5_g_5 | |
| 4318_Influenza_A_virus_(A/New_York/392/2004(H3N2))_{—} | 61354 |
| segment_5_g_1 | |
| 4318_Influenza_A_virus_(A/New_York/392/2004(H3N2))_{—} | 61355 |
| segment_5_g_2 | |
| 4318_Influenza_A_virus_(A/New_York/392/2004(H3N2))_{—} | 61356 |
| segment_5_g_3 | |
| 4318_Influenza_A_virus_(A/New_York/392/2004(H3N2))_{—} | 61357 |
| segment_5_g_4 | |
| 4318_Influenza_A_virus_(A/New_York/392/2004(H3N2))_{—} | 61358 |
| segment_5_g_5 | |
| 4319_Human_papillomavirus_type_30_genomic_DNA_g_1 | 61359 |
| 4319_Human_papillomavirus_type_30_genomic_DNA_g_2 | 61360 |
| 4319_Human_papillomavirus_type_30_genomic_DNA_g_3 | 61361 |
| 4319_Human_papillomavirus_type_30_genomic_DNA_g_4 | 61362 |
| 4319_Human_papillomavirus_type_30_genomic_DNA_g_5 | 61363 |
| 4320_Human_papillomavirus_type_30_genomic_DNA_g_1 | 61364 |
| 4320_Human_papillomavirus_type_30_genomic_DNA_g_2 | 61365 |
| 4320_Human_papillomavirus_type_30_genomic_DNA_g_3 | 61366 |
| 4320_Human_papillomavirus_type_30_genomic_DNA_g_4 | 61367 |
| 4320_Human_papillomavirus_type_30_genomic_DNA_g_5 | 61368 |
| 4321_Human_papillomavirus_type_30_genomic_DNA_g_1 | 61369 |
| 4321_Human_papillomavirus_type_30_genomic_DNA_g_2 | 61370 |
| 4321_Human_papillomavirus_type_30_genomic_DNA_g_3 | 61371 |
| 4321_Human_papillomavirus_type_30_genomic_DNA_g_4 | 61372 |
| 4321_Human_papillomavirus_type_30_genomic_DNA_g_5 | 61373 |
| 4322_Human_papillomavirus_type_30_genomic_DNA_g_1 | 61374 |
| 4322_Human_papillomavirus_type_30_genomic_DNA_g_2 | 61375 |
| 4322_Human_papillomavirus_type_30_genomic_DNA_g_3 | 61376 |
| 4322_Human_papillomavirus_type_30_genomic_DNA_g_4 | 61377 |
| 4322_Human_papillomavirus_type_30_genomic_DNA_g_5 | 61378 |
| 4323_Human_papillomavirus_type_30_genomic_DNA_g_1 | 61379 |
| 4323_Human_papillomavirus_type_30_genomic_DNA_g_2 | 61380 |
| 4323_Human_papillomavirus_type_30_genomic_DNA_g_3 | 61381 |
| 4323_Human_papillomavirus_type_30_genomic_DNA_g_4 | 61382 |
| 4323_Human_papillomavirus_type_30_genomic_DNA_g_5 | 61383 |
| 4324_Human_papillomavirus_type_30_genomic_DNA_g_1 | 61384 |
| 4324_Human_papillomavirus_type_30_genomic_DNA_g_2 | 61385 |
| 4324_Human_papillomavirus_type_30_genomic_DNA_g_3 | 61386 |
| 4324_Human_papillomavirus_type_30_genomic_DNA_g_4 | 61387 |
| 4324_Human_papillomavirus_type_30_genomic_DNA_g_5 | 61388 |
| 4325_Human_papillomavirus_type_30_genomic_DNA_g_1 | 61389 |
| 4325_Human_papillomavirus_type_30_genomic_DNA_g_2 | 61390 |
| 4325_Human_papillomavirus_type_30_genomic_DNA_g_3 | 61391 |
| 4325_Human_papillomavirus_type_30_genomic_DNA_g_4 | 61392 |
| 4325_Human_papillomavirus_type_30_genomic_DNA_g_5 | 61393 |
| 4326_Human_papillomavirus_type_30_genomic_DNA_g_1 | 61394 |
| 4326_Human_papillomavirus_type_30_genomic_DNA_g_2 | 61395 |
| 4326_Human_papillomavirus_type_30_genomic_DNA_g_3 | 61396 |
| 4326_Human_papillomavirus_type_30_genomic_DNA_g_4 | 61397 |
| 4326_Human_papillomavirus_type_30_genomic_DNA_g_5 | 61398 |
| 4327_Human_papillomavirus_type_30_genomic_DNA_g_1 | 61399 |
| 4327_Human_papillomavirus_type_30_genomic_DNA_g_2 | 61400 |
| 4327_Human_papillomavirus_type_30_genomic_DNA_g_3 | 61401 |
| 4327_Human_papillomavirus_type_30_genomic_DNA_g_4 | 61402 |
| 4327_Human_papillomavirus_type_30_genomic_DNA_g_5 | 61403 |
| 4328_Human_papillomavirus_type_30_genomic_DNA_g_1 | 61404 |
| 4328_Human_papillomavirus_type_30_genomic_DNA_g_2 | 61405 |
| 4328_Human_papillomavirus_type_30_genomic_DNA_g_3 | 61406 |
| 4328_Human_papillomavirus_type_30_genomic_DNA_g_4 | 61407 |
| 4328_Human_papillomavirus_type_30_genomic_DNA_g_5 | 61408 |
| 4329_Human_papillomavirus_type_30_genomic_DNA_g_1 | 61409 |
| 4329_Human_papillomavirus_type_30_genomic_DNA_g_2 | 61410 |
| 4329_Human_papillomavirus_type_30_genomic_DNA_g_3 | 61411 |
| 4329_Human_papillomavirus_type_30_genomic_DNA_g_4 | 61412 |
| 4329_Human_papillomavirus_type_30_genomic_DNA_g_5 | 61413 |
| 4330_Human_papillomavirus_type_30_genomic_DNA_g_1 | 61414 |
| 4330_Human_papillomavirus_type_30_genomic_DNA_g_2 | 61415 |
| 4330_Human_papillomavirus_type_30_genomic_DNA_g_3 | 61416 |
| 4330_Human_papillomavirus_type_30_genomic_DNA_g_4 | 61417 |
| 4330_Human_papillomavirus_type_30_genomic_DNA_g_5 | 61418 |
| 4331_Human_papillomavirus_type_30_genomic_DNA_g_1 | 61419 |
| 4331_Human_papillomavirus_type_30_genomic_DNA_g_2 | 61420 |
| 4331_Human_papillomavirus_type_30_genomic_DNA_g_3 | 61421 |
| 4331_Human_papillomavirus_type_30_genomic_DNA_g_4 | 61422 |
| 4331_Human_papillomavirus_type_30_genomic_DNA_g_5 | 61423 |
| 4332_Human_papillomavirus_type_30_genomic_DNA_g_1 | 61424 |
| 4332_Human_papillomavirus_type_30_genomic_DNA_g_2 | 61425 |
| 4332_Human_papillomavirus_type_30_genomic_DNA_g_3 | 61426 |
| 4332_Human_papillomavirus_type_30_genomic_DNA_g_4 | 61427 |
| 4332_Human_papillomavirus_type_30_genomic_DNA_g_5 | 61428 |
| 4333_Human_papillomavirus_type_30_genomic_DNA_g_1 | 61429 |
| 4333_Human_papillomavirus_type_30_genomic_DNA_g_2 | 61430 |
| 4333_Human_papillomavirus_type_30_genomic_DNA_g_3 | 61431 |
| 4333_Human_papillomavirus_type_30_genomic_DNA_g_4 | 61432 |
| 4333_Human_papillomavirus_type_30_genomic_DNA_g_5 | 61433 |
| 4334_Human_papillomavirus_type_30_genomic_DNA_g_1 | 61434 |
| 4334_Human_papillomavirus_type_30_genomic_DNA_g_2 | 61435 |
| 4334_Human_papillomavirus_type_30_genomic_DNA_g_3 | 61436 |
| 4334_Human_papillomavirus_type_30_genomic_DNA_g_4 | 61437 |
| 4334_Human_papillomavirus_type_30_genomic_DNA_g_5 | 61438 |
| 4335_Human_papillomavirus_type_30_genomic_DNA_g_1 | 61439 |
| 4335_Human_papillomavirus_type_30_genomic_DNA_g_2 | 61440 |
| 4335_Human_papillomavirus_type_30_genomic_DNA_g_3 | 61441 |
| 4335_Human_papillomavirus_type_30_genomic_DNA_g_4 | 61442 |
| 4335_Human_papillomavirus_type_30_genomic_DNA_g_5 | 61443 |
| 4336_Human_papillomavirus_type_30_genomic_DNA_g_1 | 61444 |
| 4336_Human_papillomavirus_type_30_genomic_DNA_g_2 | 61445 |
| 4336_Human_papillomavirus_type_30_genomic_DNA_g_3 | 61446 |
| 4336_Human_papillomavirus_type_30_genomic_DNA_g_4 | 61447 |
| 4336_Human_papillomavirus_type_30_genomic_DNA_g_5 | 61448 |
| 4337_Human_papillomavirus_type_34_g_1 | 61449 |
| 4337_Human_papillomavirus_type_34_g_2 | 61450 |
| 4337_Human_papillomavirus_type_34_g_3 | 61451 |
| 4337_Human_papillomavirus_type_34_g_4 | 61452 |
| 4337_Human_papillomavirus_type_34_g_5 | 61453 |
| 4338_Human_papillomavirus_type_34_g_1 | 61454 |
| 4338_Human_papillomavirus_type_34_g_2 | 61455 |
| 4338_Human_papillomavirus_type_34_g_3 | 61456 |
| 4338_Human_papillomavirus_type_34_g_4 | 61457 |
| 4338_Human_papillomavirus_type_34_g_5 | 61458 |
| 4339_Human_papillomavirus_type_34_g_1 | 61459 |
| 4339_Human_papillomavirus_type_34_g_2 | 61460 |
| 4339_Human_papillomavirus_type_34_g_3 | 61461 |
| 4339_Human_papillomavirus_type_34_g_4 | 61462 |
| 4339_Human_papillomavirus_type_34_g_5 | 61463 |
| 4340_Human_papillomavirus_type_34_g_1 | 61464 |
| 4340_Human_papillomavirus_type_34_g_2 | 61465 |
| 4340_Human_papillomavirus_type_34_g_3 | 61466 |
| 4340_Human_papillomavirus_type_34_g_4 | 61467 |
| 4340_Human_papillomavirus_type_34_g_5 | 61468 |
| 4341_Human_papillomavirus_type_34_g_1 | 61469 |
| 4341_Human_papillomavirus_type_34_g_2 | 61470 |
| 4341_Human_papillomavirus_type_34_g_3 | 61471 |
| 4341_Human_papillomavirus_type_34_g_4 | 61472 |
| 4341_Human_papillomavirus_type_34_g_5 | 61473 |
| 4342_Human_papillomavirus_type_34_g_1 | 61474 |
| 4342_Human_papillomavirus_type_34_g_2 | 61475 |
| 4342_Human_papillomavirus_type_34_g_3 | 61476 |
| 4342_Human_papillomavirus_type_34_g_4 | 61477 |
| 4342_Human_papillomavirus_type_34_g_5 | 61478 |
| 4343_Human_papillomavirus_type_34_g_1 | 61479 |
| 4343_Human_papillomavirus_type_34_g_2 | 61480 |
| 4343_Human_papillomavirus_type_34_g_3 | 61481 |
| 4343_Human_papillomavirus_type_34_g_4 | 61482 |
| 4343_Human_papillomavirus_type_34_g_5 | 61483 |
| 4344_Human_papillomavirus_type_34_g_1 | 61484 |
| 4344_Human_papillomavirus_type_34_g_2 | 61485 |
| 4344_Human_papillomavirus_type_34_g_3 | 61486 |
| 4344_Human_papillomavirus_type_34_g_4 | 61487 |
| 4344_Human_papillomavirus_type_34_g_5 | 61488 |
| 4345_Human_papillomavirus_type_34_g_1 | 61489 |
| 4345_Human_papillomavirus_type_34_g_2 | 61490 |
| 4345_Human_papillomavirus_type_34_g_3 | 61491 |
| 4345_Human_papillomavirus_type_34_g_4 | 61492 |
| 4345_Human_papillomavirus_type_34_g_5 | 61493 |
| 4346_Human_papillomavirus_type_34_g_1 | 61494 |
| 4346_Human_papillomavirus_type_34_g_2 | 61495 |
| 4346_Human_papillomavirus_type_34_g_3 | 61496 |
| 4346_Human_papillomavirus_type_34_g_4 | 61497 |
| 4346_Human_papillomavirus_type_34_g_5 | 61498 |
| 4347_Human_papillomavirus_type_34_g_1 | 61499 |
| 4347_Human_papillomavirus_type_34_g_2 | 61500 |
| 4347_Human_papillomavirus_type_34_g_3 | 61501 |
| 4347_Human_papillomavirus_type_34_g_4 | 61502 |
| 4347_Human_papillomavirus_type_34_g_5 | 61503 |
| 4348_Human_papillomavirus_type_34_g_1 | 61504 |
| 4348_Human_papillomavirus_type_34_g_2 | 61505 |
| 4348_Human_papillomavirus_type_34_g_3 | 61506 |
| 4348_Human_papillomavirus_type_34_g_4 | 61507 |
| 4348_Human_papillomavirus_type_34_g_5 | 61508 |
| 4349_Human_papillomavirus_type_34_g_1 | 61509 |
| 4349_Human_papillomavirus_type_34_g_2 | 61510 |
| 4349_Human_papillomavirus_type_34_g_3 | 61511 |
| 4349_Human_papillomavirus_type_34_g_4 | 61512 |
| 4349_Human_papillomavirus_type_34_g_5 | 61513 |
| 4350_Human_papillomavirus_type_34_g_1 | 61514 |
| 4350_Human_papillomavirus_type_34_g_2 | 61515 |
| 4350_Human_papillomavirus_type_34_g_3 | 61516 |
| 4350_Human_papillomavirus_type_34_g_4 | 61517 |
| 4350_Human_papillomavirus_type_34_g_5 | 61518 |
| 4351_Influenza_A_virus_(A/goose/Guangdong/1/1996(H5N1))_{—} | 61519 |
| hemagglutinin_(HA)_gene_g_1 | |
| 4351_Influenza_A_virus_(A/goose/Guangdong/1/1996(H5N1))_{—} | 61520 |
| hemagglutinin_(HA)_gene_g_2 | |
| 4351_Influenza_A_virus_(A/goose/Guangdong/1/1996(H5N1))_{—} | 61521 |
| hemagglutinin_(HA)_gene_g_3 | |
| 4351_Influenza_A_virus_(A/goose/Guangdong/1/1996(H5N1))_{—} | 61522 |
| hemagglutinin_(HA)_gene_g_4 | |
| 4351_Influenza_A_virus_(A/goose/Guangdong/1/1996(H5N1))_{—} | 61523 |
| hemagglutinin_(HA)_gene_g_5 | |
| 4352_Influenza_A_virus_(A/goose/Guangdong/1/1996(H5N1))_{—} | 61524 |
| hemagglutinin_(HA)_gene_g_1 | |
| 4352_Influenza_A_virus_(A/goose/Guangdong/1/1996(H5N1))_{—} | 61525 |
| hemagglutinin_(HA)_gene_g_2 | |
| 4352_Influenza_A_virus_(A/goose/Guangdong/1/1996(H5N1))_{—} | 61526 |
| hemagglutinin_(HA)_gene_g_3 | |
| 4352_Influenza_A_virus_(A/goose/Guangdong/1/1996(H5N1))_{—} | 61527 |
| hemagglutinin_(HA)_gene_g_4 | |
| 4352_Influenza_A_virus_(A/goose/Guangdong/1/1996(H5N1))_{—} | 61528 |
| hemagglutinin_(HA)_gene_g_5 | |
| 4353_Influenza_A_virus_(A/goose/Guangdong/1/1996(H5N1))_{—} | 61529 |
| hemagglutinin_(HA)_gene_g_1 | |
| 4353_Influenza_A_virus_(A/goose/Guangdong/1/1996(H5N1))_{—} | 61530 |
| hemagglutinin_(HA)_gene_g_2 | |
| 4353_Influenza_A_virus_(A/goose/Guangdong/1/1996(H5N1))_{—} | 61531 |
| hemagglutinin_(HA)_gene_g_3 | |
| 4353_Influenza_A_virus_(A/goose/Guangdong/1/1996(H5N1))_{—} | 61532 |
| hemagglutinin_(HA)_gene_g_4 | |
| 4353_Influenza_A_virus_(A/goose/Guangdong/1/1996(H5N1))_{—} | 61533 |
| hemagglutinin_(HA)_gene_g_5 | |
| 4354_Influenza_A_virus_(A/goose/Guangdong/1/1996(H5N1))_{—} | 61534 |
| hemagglutinin_(HA)_gene_g_1 | |
| 4354_Influenza_A_virus_(A/goose/Guangdong/1/1996(H5N1))_{—} | 61535 |
| hemagglutinin_(HA)_gene_g_2 | |
| 4354_Influenza_A_virus_(A/goose/Guangdong/1/1996(H5N1))_{—} | 61536 |
| hemagglutinin_(HA)_gene_g_3 | |
| 4354_Influenza_A_virus_(A/goose/Guangdong/1/1996(H5N1))_{—} | 61537 |
| hemagglutinin_(HA)_gene_g_4 | |
| 4354_Influenza_A_virus_(A/goose/Guangdong/1/1996(H5N1))_{—} | 61538 |
| hemagglutinin_(HA)_gene_g_5 | |
| 4355_Influenza_A_virus_(A/goose/Guangdong/1/1996(H5N1))_{—} | 61539 |
| hemagglutinin_(HA)_gene_g_1 | |
| 4355_Influenza_A_virus_(A/goose/Guangdong/1/1996(H5N1))_{—} | 61540 |
| hemagglutinin_(HA)_gene_g_2 | |
| 4355_Influenza_A_virus_(A/goose/Guangdong/1/1996(H5N1))_{—} | 61541 |
| hemagglutinin_(HA)_gene_g_3 | |
| 4355_Influenza_A_virus_(A/goose/Guangdong/1/1996(H5N1))_{—} | 61542 |
| hemagglutinin_(HA)_gene_g_4 | |
| 4355_Influenza_A_virus_(A/goose/Guangdong/1/1996(H5N1))_{—} | 61543 |
| hemagglutinin_(HA)_gene_g_5 | |
| 4356_Influenza_A_virus_(A/goose/Guangdong/1/1996(H5N1))_{—} | 61544 |
| hemagglutinin_(HA)_gene_g_1 | |
| 4356_Influenza_A_virus_(A/goose/Guangdong/1/1996(H5N1))_{—} | 61545 |
| hemagglutinin_(HA)_gene_g_2 | |
| 4356_Influenza_A_virus_(A/goose/Guangdong/1/1996(H5N1))_{—} | 61546 |
| hemagglutinin_(HA)_gene_g_3 | |
| 4356_Influenza_A_virus_(A/goose/Guangdong/1/1996(H5N1))_{—} | 61547 |
| hemagglutinin_(HA)_gene_g_4 | |
| 4356_Influenza_A_virus_(A/goose/Guangdong/1/1996(H5N1))_{—} | 61548 |
| hemagglutinin_(HA)_gene_g_5 | |
| 4357_Influenza_A_virus_(A/goose/Guangdong/1/1996(H5N1))_{—} | 61549 |
| hemagglutinin_(HA)_gene_g_1 | |
| 4357_Influenza_A_virus_(A/goose/Guangdong/1/1996(H5N1))_{—} | 61550 |
| hemagglutinin_(HA)_gene_g_2 | |
| 4357_Influenza_A_virus_(A/goose/Guangdong/1/1996(H5N1))_{—} | 61551 |
| hemagglutinin_(HA)_gene_g_3 | |
| 4357_Influenza_A_virus_(A/goose/Guangdong/1/1996(H5N1))_{—} | 61552 |
| hemagglutinin_(HA)_gene_g_4 | |
| 4357_Influenza_A_virus_(A/goose/Guangdong/1/1996(H5N1))_{—} | 61553 |
| hemagglutinin_(HA)_gene_g_5 | |
| 4358_Influenza_A_virus_(A/Puerto_Rico/8/1934(H1N1))_{—} | 61554 |
| segment_5_g_1 | |
| 4358_Influenza_A_virus_(A/Puerto_Rico/8/1934(H1N1))_{—} | 61555 |
| segment_5_g_2 | |
| 4358_Influenza_A_virus_(A/Puerto_Rico/8/1934(H1N1))_{—} | 61556 |
| segment_5_g_3 | |
| 4358_Influenza_A_virus_(A/Puerto_Rico/8/1934(H1N1))_{—} | 61557 |
| segment_5_g_4 | |
| 4358_Influenza_A_virus_(A/Puerto_Rico/8/1934(H1N1))_{—} | 61558 |
| segment_5_g_5 | |
| 4359_Influenza_A_virus_(A/Puerto_Rico/8/1934(H1N1))_{—} | 61559 |
| segment_5_g_1 | |
| 4359_Influenza_A_virus_(A/Puerto_Rico/8/1934(H1N1))_{—} | 61560 |
| segment_5_g_2 | |
| 4359_Influenza_A_virus_(A/Puerto_Rico/8/1934(H1N1))_{—} | 61561 |
| segment_5_g_3 | |
| 4359_Influenza_A_virus_(A/Puerto_Rico/8/1934(H1N1))_{—} | 61562 |
| segment_5_g_4 | |
| 4359_Influenza_A_virus_(A/Puerto_Rico/8/1934(H1N1))_{—} | 61563 |
| segment_5_g_5 | |
| 4360_Influenza_A_virus_(A/Puerto_Rico/8/1934(H1N1))_{—} | 61564 |
| segment_5_g_1 | |
| 4360_Influenza_A_virus_(A/Puerto_Rico/8/1934(H1N1))_{—} | 61565 |
| segment_5_g_2 | |
| 4360_Influenza_A_virus_(A/Puerto_Rico/8/1934(H1N1))_{—} | 61566 |
| segment_5_g_3 | |
| 4360_Influenza_A_virus_(A/Puerto_Rico/8/1934(H1N1))_{—} | 61567 |
| segment_5_g_4 | |
| 4360_Influenza_A_virus_(A/Puerto_Rico/8/1934(H1N1))_{—} | 61568 |
| segment_5_g_5 | |
| 4361_Influenza_A_virus_(A/Puerto_Rico/8/1934(H1N1))_{—} | 61569 |
| segment_5_g_1 | |
| 4361_Influenza_A_virus_(A/Puerto_Rico/8/1934(H1N1))_{—} | 61570 |
| segment_5_g_2 | |
| 4361_Influenza_A_virus_(A/Puerto_Rico/8/1934(H1N1))_{—} | 61571 |
| segment_5_g_3 | |
| 4361_Influenza_A_virus_(A/Puerto_Rico/8/1934(H1N1))_{—} | 61572 |
| segment_5_g_4 | |
| 4361_Influenza_A_virus_(A/Puerto_Rico/8/1934(H1N1))_{—} | 61573 |
| segment_5_g_5 | |
| 4362_Human_papillomavirus_type_101_g_1 | 61574 |
| 4362_Human_papillomavirus_type_101_g_2 | 61575 |
| 4362_Human_papillomavirus_type_101_g_3 | 61576 |
| 4362_Human_papillomavirus_type_101_g_4 | 61577 |
| 4362_Human_papillomavirus_type_101_g_5 | 61578 |
| 4363_Human_papillomavirus_type_101_g_1 | 61579 |
| 4363_Human_papillomavirus_type_101_g_2 | 61580 |
| 4363_Human_papillomavirus_type_101_g_3 | 61581 |
| 4363_Human_papillomavirus_type_101_g_4 | 61582 |
| 4363_Human_papillomavirus_type_101_g_5 | 61583 |
| 4364_Human_papillomavirus_type_101_g_1 | 61584 |
| 4364_Human_papillomavirus_type_101_g_2 | 61585 |
| 4364_Human_papillomavirus_type_101_g_3 | 61586 |
| 4364_Human_papillomavirus_type_101_g_4 | 61587 |
| 4364_Human_papillomavirus_type_101_g_5 | 61588 |
| 4365_Human_papillomavirus_type_101_g_1 | 61589 |
| 4365_Human_papillomavirus_type_101_g_2 | 61590 |
| 4365_Human_papillomavirus_type_101_g_3 | 61591 |
| 4365_Human_papillomavirus_type_101_g_4 | 61592 |
| 4365_Human_papillomavirus_type_101_g_5 | 61593 |
| 4366_Human_papillomavirus_type_101_g_1 | 61594 |
| 4366_Human_papillomavirus_type_101_g_2 | 61595 |
| 4366_Human_papillomavirus_type_101_g_3 | 61596 |
| 4366_Human_papillomavirus_type_101_g_4 | 61597 |
| 4366_Human_papillomavirus_type_101_g_5 | 61598 |
| 4367_Human_papillomavirus_type_101_g_1 | 61599 |
| 4367_Human_papillomavirus_type_101_g_2 | 61600 |
| 4367_Human_papillomavirus_type_101_g_3 | 61601 |
| 4367_Human_papillomavirus_type_101_g_4 | 61602 |
| 4367_Human_papillomavirus_type_101_g_5 | 61603 |
| 4368_Human_papillomavirus_type_101_g_1 | 61604 |
| 4368_Human_papillomavirus_type_101_g_2 | 61605 |
| 4368_Human_papillomavirus_type_101_g_3 | 61606 |
| 4368_Human_papillomavirus_type_101_g_4 | 61607 |
| 4368_Human_papillomavirus_type_101_g_5 | 61608 |
| 4369_Human_papillomavirus_type_101_g_1 | 61609 |
| 4369_Human_papillomavirus_type_101_g_2 | 61610 |
| 4369_Human_papillomavirus_type_101_g_3 | 61611 |
| 4369_Human_papillomavirus_type_101_g_4 | 61612 |
| 4369_Human_papillomavirus_type_101_g_5 | 61613 |
| 4370_Human_papillomavirus_type_101_g_1 | 61614 |
| 4370_Human_papillomavirus_type_101_g_2 | 61615 |
| 4370_Human_papillomavirus_type_101_g_3 | 61616 |
| 4370_Human_papillomavirus_type_101_g_4 | 61617 |
| 4370_Human_papillomavirus_type_101_g_5 | 61618 |
| 4371_Human_papillomavirus_type_101_g_1 | 61619 |
| 4371_Human_papillomavirus_type_101_g_2 | 61620 |
| 4371_Human_papillomavirus_type_101_g_3 | 61621 |
| 4371_Human_papillomavirus_type_101_g_4 | 61622 |
| 4371_Human_papillomavirus_type_101_g_5 | 61623 |
| 4372_Human_papillomavirus_type_101_g_1 | 61624 |
| 4372_Human_papillomavirus_type_101_g_2 | 61625 |
| 4372_Human_papillomavirus_type_101_g_3 | 61626 |
| 4372_Human_papillomavirus_type_101_g_4 | 61627 |
| 4372_Human_papillomavirus_type_101_g_5 | 61628 |
| 4373_Human_papillomavirus_type_101_g_1 | 61629 |
| 4373_Human_papillomavirus_type_101_g_2 | 61630 |
| 4373_Human_papillomavirus_type_101_g_3 | 61631 |
| 4373_Human_papillomavirus_type_101_g_4 | 61632 |
| 4373_Human_papillomavirus_type_101_g_5 | 61633 |
| 4374_Human_papillomavirus_type_101_g_1 | 61634 |
| 4374_Human_papillomavirus_type_101_g_2 | 61635 |
| 4374_Human_papillomavirus_type_101_g_3 | 61636 |
| 4374_Human_papillomavirus_type_101_g_4 | 61637 |
| 4374_Human_papillomavirus_type_101_g_5 | 61638 |
| 4375_Human_papillomavirus_type_101_g_1 | 61639 |
| 4375_Human_papillomavirus_type_101_g_2 | 61640 |
| 4375_Human_papillomavirus_type_101_g_3 | 61641 |
| 4375_Human_papillomavirus_type_101_g_4 | 61642 |
| 4375_Human_papillomavirus_type_101_g_5 | 61643 |

### Thermostable Proteins

[0128] In certain example embodiments, the protein selected may be more thermostable at higher temperatures. Exemplary proteins may comprise any Cas protein with collateral effect when used with particular methodologies disclosed herein. In an aspect, the Cas protein is a thermostable protein. The thermostable Cas protein may be a Type V or a Type VI protein, for example, a Cas12 or Cas13 protein. In embodiments, the thermostable protein, upon activation, comprises collateral cleavage. A thermostable protein as used herein comprises a protein that retains catalytic activity at a temperature at or above 32° C., 33° C., 34° C., 35° C., 36° C., 37° C., 38° C., 39° C., 40° C., 41° C., 42° C., 43° C., 44° C., 45° C., 46° C., 47° C., 48° C., 49° C., 50° C., 51° C., 52° C., 53° C., 54° C., 55° C., 56° C., 57° C., 58° C., 59° C., 60° C., 61° C., 62° C., 63° C., 64° C., 65° C., 66° C., 67° C., 68° C., 69° C., 70° C., 71° C., 72° C. In certain example embodiments, the protein is thermostable at or above 55° C.

[0129] Methods for identification of thermostable proteins are detailed herein, and may comprise identifying Cas proteins from thermophilic bacterial species. Upon identification of a particular Cas protein from a species, Cas proteins form similar species may be identified.

[0130] In certain embodiments, the thermostable CRISPR-Cas protein is a Cas 12 protein from Table 2A or 2B, or at least 80% identity to a polypeptide from Table 2A or 2B.

[0131] In certain embodiments, the thermostable CRISPR-Cas protein is a Cas 12 protein from Table 2A or 2B, or at least 80% identity to a polypeptide from Table 2A or 2B. SEQ ID NOS: 61644-61990.

TABLE 2A

Cas 12 proteins
Cas 12 proteins
(65C)_Ga0209381_1004188 | GENOME_ACCESSION
(66C)_a0212093_1 | Ga0212093_1006934 | GENOME_ACCESSION
3300022548 | Ga0212092_1000015 | GENOME_ACCESSION
a0117933_1071983 | Ga0117933_1071983 | GENOME_ACCESSION
a0212092_1024084 | Ga0212092_1024084 | GENOME_ACCESSION
a0212093_1001507 | Ga0212093_1001507 | GENOME_ACCESSION
a0212120_1000874 | Ga0212120_1000874 | GENOME_ACCESSION
a0212125_1004414 | Ga0212125_1004414 | GENOME_ACCESSION
a0212125_1006348 | Ga0212125_1006348 | GENOME_ACCESSION
ABHJ01000011.1_o | Hydrogenivirga sp. 128-5-R1-1_1102927038514
AGIV01000002.1_o | Rhodothermus marinus SG0.5JP17-171 Rhoma_Contig848_C
BDSM01000053.1_o | Microcystis sp. 0824 DNA
BFBB01000008.1_o | Leptospira sp. YH101 DNA
BHZK01000001.1_o | Parageobacillus thermoglucosidasius TG4 DNA
CP000240.1_organ | Synechococcus sp. JA-2-3B′a(2-13)
CP001229.1_organ | Sulfurihydrogenibium azorense Az-Ful
CP011339.1_organ | Microcystis panniformis FACHB-1757
CP020382.1_organ | Rhodothermaceae bacterium RA chromosome
CP040694.1_organ | Elizabethkingia sp. JS20170427COW chromosome
DCUT01000059.1_o | TPA_asm
DHGN01000237.1_o | TPA_asm
FQUK01000003.1_o | Thermomonas hydrothermalis strain DSM 14834 genome assembly
Ga0063162_1014580 | GENOME_ACCESSION
Ga0065719_107896 | GENOME_ACCESSION
Ga0065719_116807 | GENOME_ACCESSION
Ga0067045_1002454 | GENOME_ACCESSION
Ga0067045_1004962 | GENOME_ACCESSION]
Ga0068669_1023596 | GENOME_ACCESSION
Ga0068707_1002163 | GENOME_ACCESSION
Ga0068707_1009867 | GENOME_ACCESSION
Ga0068707_1024093 | GENOME_ACCESSION
Ga0071330_1110381 | GENOME_ACCESSION
Ga0072682_101461 | GENOME_ACCESSION
Ga0073928_10004924 | GENOME_ACCESSION
Ga0073932_1022770 | GENOME_ACCESSION
Ga0079044_1002244 | GENOME_ACCESSION
Ga0079639_1009487 | GENOME_ACCESSION
Ga0099914_10727 | GENOME_ACCESSION
Ga0101790_149349 | GENOME_ACCESSION
Ga0102924_1013089 | GENOME_ACCESSION
Ga0103818_10095 | GENOME_ACCESSION
Ga0105154_1006902 | GENOME_ACCESSION
Ga0105158_1004615 | GENOME_ACCESSION
Ga0114945_10008792 | GENOME_ACCESSION
Ga0116141_10037070 | GENOME_ACCESSION
Ga0116143_10029534 | GENOME_ACCESSION
Ga0116146_1004071 | GENOME_ACCESSION
Ga0116159_1001590 | GENOME_ACCESSION
Ga0116160_1008286 | GENOME_ACCESSION
Ga0116161_1004008 | GENOME_ACCESSION
Ga0116167_1006930 | GENOME_ACCESSION
Ga0116184_10002336 | GENOME_ACCESSION
Ga0116185_1015740 | GENOME_ACCESSION
Ga0116188_1022712 | GENOME_ACCESSION
Ga0116210_1003377 | GENOME_ACCESSION
Ga0123519_10000481 | GENOME_ACCESSION
Ga0123519_10002165 | GENOME_ACCESSION
Ga0123519_10002912 | GENOME_ACCESSION
Ga0123519_10003344 | GENOME_ACCESSION
Ga0123519_10003852 | GENOME_ACCESSION
Ga0123519_10021143 | GENOME_ACCESSION
Ga0123519_10027137 | GENOME_ACCESSION
Ga0123519_10057643 | GENOME_ACCESSION
Ga0123519_10064432 | GENOME_ACCESSION
Ga0124943_1106748 | GENOME_ACCESSION
Ga0124945_1030784 | GENOME_ACCESSION
Ga0133944_1001807 | GENOME_ACCESSION
Ga0134095_1000962 | GENOME_ACCESSION
Ga0137716_10003017 | GENOME_ACCESSION
Ga0137716_10003038 | GENOME_ACCESSION
Ga0137716_10003531 | GENOME_ACCESSION
Ga0137716_10006890 | GENOME_ACCESSION
Ga0137716_10009026 | GENOME_ACCESSION
Ga0137716_10009341 | GENOME_ACCESSION
Ga0137716_10027208 | GENOME_ACCESSION
Ga0137716_10032400 | GENOME_ACCESSION
Ga0137716_10033855 | GENOME_ACCESSION
Ga0137716_10038387 | GENOME_ACCESSION
Ga0137716_10042212 | GENOME_ACCESSION
Ga0137716_10061480 | GENOME_ACCESSION
Ga0172363_10016551 | GENOME_ACCESSION
Ga0172365_10006450 | GENOME_ACCESSION
Ga0172382_10012866 | GENOME_ACCESSION
Ga0180300_10000403 | GENOME_ACCESSION
Ga0180301_10011215 | GENOME_ACCESSION
Ga0180435_10008691 | GENOME_ACCESSION
Ga0180446_1198 | GENOME_ACCESSION
Ga0181613_1004254 | GENOME_ACCESSION
Ga0181613_1005053 | GENOME_ACCESSION
Ga0181858_1004277 | GENOME_ACCESSION
Ga0182014_10001887 | GENOME_ACCESSION
Ga0186994_110 | GENOME_ACCESSION
Ga0187028_105 | GENOME_ACCESSION
Ga0187073_104 | GENOME_ACCESSION
Ga0187107_1033 | GENOME_ACCESSION
Ga0187121_108 | GENOME_ACCESSION
Ga0187143_105 | GENOME_ACCESSION
Ga0187864_10009485 | GENOME_ACCESSION
Ga0190309_1003062 | GENOME_ACCESSION
Ga0190334_1000016 | GENOME_ACCESSION
Ga0190361_1000443 | GENOME_ACCESSION
Ga0190361_1001609 | GENOME_ACCESSION
Ga0190361_1003780 | GENOME_ACCESSION 27
Ga0190361_1003780 | GENOME_ACCESSION 31
Ga0190363_1000125 | GENOME_ACCESSION
Ga0194111_10067953 | GENOME_ACCESSION
Ga0207429_10023 | GENOME_ACCESSION
Ga0207433_10006213 | GENOME_ACCESSION
Ga0207433_10011113 | GENOME_ACCESSION
Ga0207433_10012523 | GENOME_ACCESSION
Ga0207433_10020534 | GENOME_ACCESSION
Ga0207433_10021674 | GENOME_ACCESSION
Ga0207433_10022806 | GENOME_ACCESSION
Ga0207433_10030792 | GENOME_ACCESSION
Ga0207433_10045901 | GENOME_ACCESSION
Ga0207433_10075234 | GENOME_ACCESSION
Ga0207433_10075916 | GENOME_ACCESSION
Ga0207433_10082276 | GENOME_ACCESSION
Ga0207747_1007959 | GENOME_ACCESSION
Ga0207868_1000002 | GENOME_ACCESSION
Ga0208151_102415 | GENOME_ACCESSION
Ga0208195_1004385 | GENOME_ACCESSION
Ga0208357_1002034 | GENOME_ACCESSION
Ga0208429_100128 | GENOME_ACCESSION
Ga0208429_100584 | GENOME_ACCESSION
Ga0208429_100770 | GENOME_ACCESSION
Ga0208461_1008711 | GENOME_ACCESSION
Ga0208609_100002 | GENOME_ACCESSION
Ga0208683_103187 | GENOME_ACCESSION
Ga0208683_103849 | GENOME_ACCESSION
Ga0208683_104403 | GENOME_ACCESSION
Ga0208940_1001448 | GENOME_ACCESSION
Ga0209012_1000842 | GENOME_ACCESSION
Ga0209012_1001252 | GENOME_ACCESSION
Ga0209012_1015334 | GENOME_ACCESSION
Ga0209018_1000172 | GENOME_ACCESSION
Ga0209101_1000507 | GENOME_ACCESSION
Ga0209101_1006392 | GENOME_ACCESSION
Ga0209102_1000334 | GENOME_ACCESSION
Ga0209102_1003688 | GENOME_ACCESSION
Ga0209143_1000788 | GENOME_ACCESSION
Ga0209143_1002248 | GENOME_ACCESSION
Ga0209143_1006289 | GENOME_ACCESSION
Ga0209162_1014546 | GENOME_ACCESSION
Ga0209171_10000726 | GENOME_ACCESSION
Ga0209172_10015399 | GENOME_ACCESSION
Ga0209201_1007464 | GENOME_ACCESSION
Ga0209207_1001084 | GENOME_ACCESSION
Ga0209207_1006579 | GENOME_ACCESSION
Ga0209224_1000001 | GENOME_ACCESSION
Ga0209225_1002268 | GENOME_ACCESSION
Ga0209399_10016114 | GENOME_ACCESSION
Ga0209410_1010848 | GENOME_ACCESSION
Ga0209467_1000554 | GENOME_ACCESSION
Ga0209507_1000982 | GENOME_ACCESSION
Ga0209513_1002134 | GENOME_ACCESSION
Ga0209542_10001012 | GENOME_ACCESSION
Ga0209542_10007289 | GENOME_ACCESSION
Ga0209669_100016 | GENOME_ACCESSION
Ga0209669_101200 | GENOME_ACCESSION
Ga0209750_1000252 | GENOME_ACCESSION
Ga0209827_10659006 | GENOME_ACCESSION
Ga0209980_10011112 | GENOME_ACCESSION
Ga0210049_1040060 | GENOME_ACCESSION
Ga0210051_1028938 | GENOME_ACCESSION
Ga0210057_1032582 | GENOME_ACCESSION
Ga0214474_1011027 | GENOME_ACCESSION
Ga0255343_1026926 | GENOME_ACCESSION
Ga0255346_1002844 | GENOME_ACCESSION
Ga0255355_1000451 | GENOME_ACCESSION
Ga0255811_11272827 | GENOME_ACCESSION
Ga0255812_10127107 | GENOME_ACCESSION
Ga0272445_1000517 | GENOME_ACCESSION
Ga0272446_1000057 | GENOME_ACCESSION
Ga0272446_1000164 | GENOME_ACCESSION
Ga0272446_1001728 | GENOME_ACCESSION 137
Ga0272446_1001728 | GENOME_ACCESSION 249
Ga0272446_1001929 | GENOME_ACCESSION
Ga0272446_1017314 | GENOME_ACCESSION
Ga0272447_1003507 | GENOME_ACCESSION
Ga0272448_1000001 | GENOME_ACCESSION
Ga0272448_1000002 | GENOME_ACCESSION
Ga0272448_1000009 | GENOME_ACCESSION
Ga0272448_1000011 | GENOME_ACCESSION
Ga0272448_1000062 | GENOME_ACCESSION
Ga0272448_1000167 | GENOME_ACCESSION
Ga0272448_1002516 | GENOME_ACCESSION
Ga0272448_1011735 | GENOME_ACCESSION
Ga0272448_1059621 | GENOME_ACCESSION
Ga0272448_1067731 | GENOME_ACCESSION
Ga0272449_1002236 | GENOME_ACCESSION
Ga0272449_1004365 | GENOME_ACCESSION
Ga0272449_1006528 | GENOME_ACCESSION
Ga0272449_1019852 | GENOME_ACCESSION
Ga0302046_10000852 | GENOME_ACCESSION
Ga0302192_10026063 | GENOME_ACCESSION
Ga0302246_1000265 | GENOME_ACCESSION
Ga0302251_1001844 | GENOME_ACCESSION
Ga0302253_1002416 | GENOME_ACCESSION
Ga0307340_100872 | GENOME_ACCESSION
Ga0308310_1004946 | GENOME_ACCESSION
Ga0308310_1013800 | GENOME_ACCESSION
Ga0308411_10001123 | GENOME_ACCESSION
Ga0308411_10021369 | GENOME_ACCESSION
Ga0308414_1002480 | GENOME_ACCESSION
Ga0308414_1007395 | GENOME_ACCESSION
Ga0308414_1018540 | GENOME_ACCESSION
Ga0308415_1006042 | GENOME_ACCESSION
Ga0308419_1006240 | GENOME_ACCESSION
Ga0308419_1011938 | GENOME_ACCESSION
Ga0310136_000087 | GENOME_ACCESSION
Ga0310138_009337 | GENOME_ACCESSION
Ga0310146_00181 | GENOME_ACCESSION
Ga0310828_1006812 | GENOME_ACCESSION
Ga0311022_13670299 | GENOME_ACCESSION
Ga0315269_0011078 | GENOME_ACCESSION
Ga0315269_0014929 | GENOME_ACCESSION
Ga0315269_0030078 | GENOME_ACCESSION
Ga0315277_10001015 | GENOME_ACCESSION
Ga0315280_10009663 | GENOME_ACCESSION
Ga0315280_10032046 | GENOME_ACCESSION
Ga0315282_10006339 | GENOME_ACCESSION
Ga0315282_10053614 | GENOME_ACCESSION
Ga0315285_10079970 | GENOME_ACCESSION
Ga0315288_10142264 | GENOME_ACCESSION
Ga0315298_1000517 | GENOME_ACCESSION
Ga0315298_1001941 | GENOME_ACCESSION
Ga0315298_1005332 | GENOME_ACCESSION
Ga0315298_1007399 | GENOME_ACCESSION
Ga0315298_1007594 | GENOME_ACCESSION
Ga0315298_1015991 | GENOME_ACCESSION
Ga0315903_10087816 | GENOME_ACCESSION
Ga0334883_1024988 | GENOME_ACCESSION
Ga0334884_1015165 | GENOME_ACCESSION
Ga0370516_000963 | GENOME_ACCESSION
Ga0370516_004838 | GENOME_ACCESSION
Ga0370516_008232 | GENOME_ACCESSION
Ga0370516_009639 | GENOME_ACCESSION
Ga0370516_018229 | GENOME_ACCESSION
Ga0370516_020865 | GENOME_ACCESSION
Ga0373397_000168 | GENOME_ACCESSION
Ga0373621_000479 | GENOME_ACCESSION
Ga0373621_007959 | GENOME_ACCESSION
Ga0373621_010685 | GENOME_ACCESSION
Ga0373621_017562 | GENOME_ACCESSION
Ga0373621_020135 | GENOME_ACCESSION
Ga0373621_023545 | GENOME_ACCESSION
Ga0373621_050562 | GENOME_ACCESSION
Ga0373637_0010996 | GENOME_ACCESSION
Ga0373637_0021496 | GENOME_ACCESSION
Ga0373637_0024972 | GENOME_ACCESSION
Ga0373637_0031827 | GENOME_ACCESSION
Ga0373637_0034837 | GENOME_ACCESSION
Ga0373637_0065620 | GENOME_ACCESSION
Ga0374803_055 | GENOME_ACCESSION
GCA_000092125.1 | Meiothermus silvanus DSM 9946 plasmid pMESIL02
GCA_000444055.1 | Alicyclobacillus acidoterrestris ATCC 49025 contig_23
GCA_000444055.1 | Alicyclobacillus acidoterrestris ATCC 49025 contig_26
GCA_000832185.1_ASM83218v1 | Bacillus thermoamylovorans strain B4167 NODE_88
GCA_002951815.1_ASM295181v1 | Sulfobacillus thermotolerans strain Kr chromosome
GCA_004343255.1_ASM434325v1 | Laceyella sacchari strain DSM 43356 Ga0244645_102
GCA_006503695.1 | Tepidiphilus succinatimandens strain DSM 15512 Scaffold2
GCA_006503695.1_ASM650369v1 | Tepidiphilus succinatimandens strain DSM 15512 Scaffold2
GCA_900116805.1 | Alicyclobacillus macrosporangiidus strain DSM 17980 genome assembly
GCA_900129915.1 | Tepidibacterthalassicus DSM 15285 genome assembly
JGI12383J13903_1002647 | GENOME_ACCESSION
JGI24108J20142_1001595 | GENOME_ACCESSION
JGI24721J44947_10029740 | GENOME_ACCESSION
JGI24721J44947_10039167 | GENOME_ACCESSION
JGI26463J51803_1000081 | GENOME_ACCESSION
KE386988.1_organ | Desulfatirhabdium butyrativorans DSM 18734 genomic scaffold G492DRAFT_scaffold00017.17
KE387196.1_organ | Tuberibacillus calidus DSM 17572 genomic scaffold H532DRAFT_scaffold00011.il
LGRA01000008.1_o | Azospirillum sp. TSO35-2 Contig02
LNAA02000020.1_o | Oscillateriales cyanobacterium MTP1 Contig_26
mgm4742482.3 | NODE_1674_length_13888_cov_ 4.96582_ID_49155357 | GENOME_ACCESSION
MHOL01000010.1_o | Candidatus Staskawiczbacteria bacterium RIFCSPHIGHO2_01_FULL_34_27
rifcsphigho2_01_scaffold_2126
MHPA01000001.1_o | Candidatus Staskawiczbacteria bacterium RIFCSPLOWO2_01_FULL_38_12b
rifcsplowo2_01_scaffold_12327
MTKY01071110.1_o | Anaerobic digester metagenome soeholt_digester_71110
MVGR01000004.1_o | Microcystis aeruginosa KW Contig4
NICF_comb_assmDRAFT_10010420 | GENOME_ACCESSION
NJDI01000010.1_o | Archaeoglobales archaeon ex4484_92 ex4484_82_scaffold_1630_length_14867_count_1478
OGCG01005283.1_o | hot springs metagenome genome assembly
OGCG01007631.1_o | hot springs metagenome genome assembly
OKRQ01000045.1_o | freshwater metagenome genome assembly
OQOO01000421.1_o | human oral metagenome genome assembly
OQUW01.1 | hot springs metagenome genome assembly
OQUW01000094.1_o | hot springs metagenome genome assembly
OQUW01000235.1_o | hot springs metagenome genome assembly
OQUW01001775.1_o | hot springs metagenome genome assembly
ORXB01007227.1_o | sediment metagenome genome assembly
OVXJ01001238.1_o | sediment metagenome genome assembly
QNAW01000106.1_o | Thermodesulfobacteria bacterium isolate B8_G2B8_Guay2_scaffold_12966
UOVV01006324.1_o | compost metagenome genome assembly
UPSJ01002360.1_o | activated sludge metagenome genome assembly
YNPsite07_CeleraDRAF_scf1119010704098 | GENOME_ACCESSION
Ga0065721_10050166 | GENOME_ACCESSION: BioRi 2199352012 $F 3300005286 GENOME ID: 23829 CONTIG ID: 14524
Ga0255812_10583625 | GENOME ACESSION: IMG 3300023203 $F 3300023203 GENOME ID: 30040 CONTIG ID: 32030
Ga0265297_10015673 | GENOME ACESSION: Munlaniwel113791 2 $F 3300029288 GENOME ID: 280701 CONTIG ID: 15672
Ga0315280_10014676 | GENOME_ACESSION: YL17G06_40_MG_2_$F_3300031862 GENOME_ID: 281631 CONTIG_ID: 14675
Ga0206102_1000160 | GENOME ACESSION: 1B1Ametagenome 2 $F 3300020149 GENOME ID: 20785 CONTIG ID: 159
Ga0207869_1001742 | GENOME ACESSION: HigsolAR5DSPAdes $F 3300025517 GENOME ID: 27181 CONTIG ID: 1741
Ga0209347_1001125 | GENOME ACESSION: AutmicBR23SPAdes $F 3300027640 GENOME ID: 23478 CONTIG ID: 1124
Alicyclobacillus kakegawensis NBRC 103104 DNA, contig: AK2_CON0027_0001, whole genome shotgun sequence | GENOME_ACESSION:
GCA_001552655.1 ASM155265v1 genomic GENOME ID: 98642 CONTIG ID: 26
FNOJ0100000035.1
Alicyclobacillus hesperidum strain DSM 12489 genome assembly, contig: Ga0074806_135, whole genome shotgun sequence | GENOME_ACESSION:
GCA_900107035.1 IMG-taxon 2634166329 annotated assembly genomic GENOME ID: 184129 CONTIG ID: 49
OQOO010000421.1
human oral metagenome genome assembly, contig: NODE_421_length_10358_cov_14.800155, whole genome shotgun sequence | GENOME_ACESSION: OQOO01.1
GENOME ID: 9995 CONTIG ID: 420
bioreactor metagenome genome assembly, contig: NODE_247_length_93349_cov_7.384563, whole genome shotgun sequence | GENOME_ACCESSION: OWPA01.1
GENOME ID: 12159 CONTIG ID: 246
PGUZ01000040.1
Bacillus sp. V3-13 contig_40, whole genome shotgun sequence | GENOME_ACCESSION: GCA_002860165.1_ ASM286016v1_genomic GENOME_ID: 150146
CONTIG ID: 56
RHHN01000007.1
Brevibacillus agri strain NRRL NRS 1219 contig_7, whole genome shotgun sequence | GENOME_ACCESSION: GCA_003710885.1_ASM371088v1_genomic
GENOME ID: 202321 CONTIG ID: 115
RHHS01000035.1
Brevibacillus gelatini strain DSM 100115 contig_35, whole genome shotgun sequence | GENOME_ACESSION: GCA_003710935.1_ASM371093v1_genomic
GENOME ID: 202324 CONTIG ID: 28
AacCas12b
AapCas12b
BrCas12b

TABLE 2B

Cas12 proteins
Cas 12 proteins
(65C) Ga0209381_1004188 | GENOME_ACCESSION
a0212093_1001507 | Ga0212093_1001507 | GENOME_ACCESSION
DCUT01000059.1_o | TPA_asm: Syntrophaceae bacterium UBA2207 UBA2207_contig_83649, whole
genome shotgun sequence | GENOME_ACESSION: GCA_002328545.1_ASM232854v1_genomic
GENOME_ID: 131523 CONTIG_ID: 133
FQUK01000003.1_o | Thermomonas hydrothermalis strain DSM 14834 genome assembly
Ga0067045_1002454 | GENOME_ACCESSION
Ga0067045_1004962 | GENOME_ACCESSION]
Ga0116159_1001590 | GENOME_ACCESSION
Ga0116160_1008286 | GENOME_ACCESSION
Ga0116161_1004008 | GENOME_ACCESSION
Ga0116167_1006930 | GENOME_ACCESSION
Ga0116184_10002336 | GENOME_ACCESSION
Ga0123519_10002912 | GENOME_ACCESSION
Ga0123519_10003852 | GENOME_ACCESSION
Ga0137716_10027208 | GENOME_ACCESSION
Ga0172382_10012866 | GENOME_ACCESSION
Ga0180435_10008691 | GENOME_ACCESSION
Ga0182014_10001887 | GENOME_ACCESSION
Ga0187107_1033 | GENOME_ACCESSION
Ga0187864_10009485 | GENOME_ACCESSION
Ga0208195_1004385 | GENOME_ACCESSION
Ga0208357_1002034 | GENOME_ACCESSION
Ga0208609_100002 | GENOME_ACCESSION
Ga0209012_1001252 | GENOME_ACCESSION
Ga0209018_1000172 | GENOME_ACCESSION
Ga0209507_1000982 | GENOME_ACCESSION
Ga0209513 1002134 | GENOME_ACCESSION
Ga0255346_1002844 | GENOME_ACCESSION
Ga0255812_10127107 | GENOME_ACCESSION
Ga0272448_1000001 | GENOME_ACCESSION
Ga0272448_1000009 | GENOME_ACCESSION
Ga0272448_1000167 | GENOME_ACCESSION
Ga0272448_1002516 | GENOME_ACCESSION
Ga0302246_1000265 | GENOME_ACCESSION
Ga0302251_1001844 | GENOME_ACCESSION
Ga0302253_1002416 | GENOME_ACCESSION
Ga0310136_000087 | GENOME_ACCESSION
Ga0315298_1005332 | GENOME_ACCESSION
Ga0315298_1015991 | GENOME_ACCESSION
Ga0334884_1015165 | GENOME_ACCESSION
Ga0373637_0010996 | GENOME_ACCESSION
Ga0373637_0024972 | GENOME_ACCESSION
Ga0373637_0031827 | GENOME_ACCESSION
GCA_000444055.1 | Alicyclobacillus acidoterrestris ATCC 49025 contig_26
GCA_000832185.1_ASM83218v1 | Bacillus thermoamylovorans strain B4167 NODE_88
GCA_002951815.1_ASM295181v1 | Sulfobacillus thermotolerans strain Kr chromosome
GCA_004343255.1_ASM434325v1 | Laceyella sacchari strain DSM 43356 Ga0244645_102
GCA_900116805.1 | Alicyclobacillus macrosporangiidus strain DSM 17980 genome assembly
KE386988.1_organ | Desulfatirhabdium butyrativorans DSM 18734 genomic scaffold
G492DRAFT_scaffold00017.17
KE387196.1_organ | Tuberibacillus calidus DSM 17572 genomic scaffold H532DRAFT scaffold00011.11
LNAA02000020.1_o | Oscillatoriales cyanobacterium MTP1 Contig_26
OQUW01000094.1_o | hot springs metagenome genome assembly
OQUW01001775.1_o | hot springs metagenome genome assembly
Ga0255812_10583625 | GENOME_ACESSION: IMG_3300023203_$F_3300023203 GENOME_ID:
30040 CONTIG_ID: 32030
Ga0065721_10050166 | GENOME_ACCESSION: BioRi_2199352012_$F_3300005286 GENOME_ID:
23829 CONTIG_ID: 14524
Ga0265297_10015673 | GENOME_ACESSION: Munlanlwel113791_2_$F_3300029288 GENOME_ID:
280701 CONTIG_ID: 15672
Ga0315280_10014676 | GENOME_ACESSION: YL17G06_40_MG_2_$F_3300031862 GENOME_ID:
281631 CONTIG_ID: 14675
Ga0206102_1000160 | GENOME_ACESSION: 1B1Ametagenome_2_$F_3300020149 GENOME_ID:
20785 CONTIG_ID: 159
Ga0207869_1001742 | GENOME_ACESSION: HigsolAR5DSPAdes_$F_3300025517 GENOME_ID:
27181 CONTIG_ID: 1741
Ga0209347_1001125 | GENOME ACESSION: AutmicBR23SPAdes_$F_3300027640 GENOME_ID:
23478 CONTIG_ID: 1124
Alicyclobacillus kakegawensis NBRC 103104 DNA, contig: AK2_CON0027_0001, whole genome shotgun
sequence | GENOME_ACESSION: GCA_001552655.1_ ASM155265v1_genomic GENOME_ID: 98642
CONTIG_ID: 26
FNOJ0100000035.1
Alicyclobacillus hesperidum strain DSM 12489 genome assembly, contig: Ga0074806_135, whole genome
shotgun sequence | GENOME_ACESSION: GCA_900107035.1_IMG-
taxon_2634166329_annotated_assembly_genomic GENOME_ID: 184129 CONTIG_ID: 49
OQOO010000421.1
human oral metagenome genome assembly, contig: NODE_421_length_10358_cov_14.800155, whole
genome shotgun sequence | GENOME_ACESSION: OQOO01.1 GENOME_ID: 9995 CONTIG_ID: 420
bioreactor metagenome genome assembly, contig: NODE_247_length_93349_cov_7.384563, whole
genome shotgun sequence | GENOME_ACCESSION: OWPA01.1 GENOME_ID: 12159 CONTIG_ID:
246
PGUZ01000040.1
Bacillus sp. V3-13 contig_40, whole genome shotgun sequence | GENOME_ACCESSION:
GCA_002860165.1_ASM286016v1_genomic GENOME_ID: 150146 CONTIG_ID: 56
RHHN01000007.1
Brevibacillus agri strain NRRL NRS 1219 contig_7, whole genome shotgun sequence |
GENOME_ACCESSION: GCA_003710885.1_ ASM371088v1_genomic GENOME_ID: 202321
CONTIG ID: 115
RHHS01000035.1
Brevibacillus gelatini strain DSM 100115 contig_35, whole genome shotgun sequence |
GENOME_ACESSION: GCA_003710935.1_ ASM371093v1_genomic GENOME_ID: 202324
CONTIG_ID: 28
AacCas12b
AapCas12b
BrCas12b

[0132] In certain embodiments, the CRISPR-Cas protein is a Cas12b from a thermostable species, for example Alicyclobacillus acidiphilus (Aap). Cas 12a proteins can be identified from similar organisms as identified in any of BROD_5090P4_Cas12b_sequences.txt. In certain embodiments, the thermostable CRISPR-Cas protein is a Cas13a. In an aspect, the Cas13a thermostable protein is from FIG. 1A of U.S. Provisional Application 62/967,408, filed Jan. 29, 2020, entitled “Novel CRISPR Enzymes and Systems” which were identified from stable anaerobic thermophilic methanogenic microbiomes fermenting switchgrass, supporting their thermostability. See, Liang et al., Biotechnol Biofuels 2018; 11:243 doi: 10.1186/s13068-018-1238-1. Similarly, the 0J26742_10014101 clusters with the verified thermophilic sourced Cas13a sequences detailed in FIG. 1A of U.S. Provisional Application 62/967,408, filed Jan. 29, 2020, entitled “Novel CRISPR Enzymes and Systems”. The nucleic acid identified at loci 123519_10037894 was identified from a study focusing on 70° C. organism. In certain example embodiments, the Cas13 orthologue has at least two HEPN domains and at least 80% identity to a polypeptide encoded by the nucleic acid sequence 0123519_10037894 or 0J26742_10014101.

[0133] Certain example embodiments disclosed herein provide are based on low-cost CRISPR-based diagnostic that enables single-molecule detection of DNA or RNA with single-nucleotide specificity (Gootenberg, 2018; Gootenberg, et al, Science. 2017 Apr. 28; 356(6336):438-442 (2017); Myhrvold, et al., Science 360, 444-448 (2018)). Nucleic acid detection with SHERLOCK relies on the collateral activity of Type VI and Type V Cas proteins, such as Cas13 and Cas12, which unleashes promiscuous cleavage of reporters upon target detection (Gooteneberg et al., 2018)(Abudayyeh, et al., Science. 353(6299)(2016); East-Seletsky et al. Nature 538:270-273 (2016); Smargon et al. Mol Cell 65(4):618-630 (2017)). Certain embodiments disclosed herein, are capable of single-molecule detection in less than an hour and can be used for multiplexed target detection when using CRISPR enzymes with orthogonal cleavage preference, such as Cas13a from Leptotrichia wadei (LwaCas13a), Cas13b from Capnocytophaga canimorsus Cc5 (CcaCas13b), and Cas12a from Acidaminococcus sp. BV3L6 (AsCas12a); Alicyclobacillus acidiphilus (Aap) Cas 12b and Brevibacillus sp. SYSU G02855 (BrCas12b); (Gootenberg, 2018; Myhrvold et al. Science 360(6387):444-448 (2018); Gootenberg, 2017; Chen et al. Science 360(6387):436-439 (2018); Li et al. Cell Rep 25(12):3262-3272 (2018); Li et al. Nat Protoc 13(5):899-914 (2018)). Guide molecules used herein are designed using a model for high activity-based Cas guide selection for coronavirus would facilitate design of optimal diagnostic assays, especially in applications requiring high-activity guides like lateral flow detection, and enable guide RNA design for in vivo RNA targeting applications with Cas13 has also been detailed in U.S. Provisional Applications 62/818,702 filed Mar. 14, 2019, now PCT/US20/22795 and 62/890,555, filed Aug. 22, 2019, now PCT/US20/22795, both entitled CRISPR Effector System Based Multiplex Diagnostics, incorporated herein by reference in their entirety, and, in particular, Examples 1-4, Tables 1-8 and FIG. 4A of U.S. Provisional Application 62/890,555.

[0134] Embodiments disclosed herein utilize Cas proteins possessing non-specific nuclease collateral activity to cleave detectable reporters upon target recognition, providing sensitive and specific diagnostics, including single nucleotide variants, detection based on rRNA sequences, screening for drug resistance, monitoring microbe outbreaks, genetic perturbations, and screening of environmental samples, as described, for example, in PCT/US18/054472 filed Oct. 22, 2018 at [0183]-[0327], incorporated herein by reference. Reference is made to WO 2017/219027, WO2018/107129, US20180298445, US 2018-0274017, US 2018-0305773, WO 2018/170340, U.S. application Ser. No. 15/922,837, filed Mar. 15, 2018 entitled “Devices for CRISPR Effector System Based Diagnostics”, PCT/US18/50091, filed Sep. 7, 2018 “Multi-Effector CRISPR Based Diagnostic Systems”, PCT/US18/66940 filed Dec. 20, 2018 entitled “CRISPR Effector System Based Multiplex Diagnostics”, PCT/US18/054472 filed Oct. 4, 2018 entitled “CRISPR Effector System Based Diagnostic”, U.S. Provisional 62/740,728 filed Oct. 3, 2018 entitled “CRISPR Effector System Based Diagnostics for Hemorrhagic Fever Detection”, U.S. Provisional 62/690,278 filed Jun. 26, 2018 and U.S. Provisional 62/767,059 filed Nov. 14, 2018 both entitled “CRISPR Double Nickase Based Amplification, Compositions, Systems and Methods”, U.S. Provisional 62/690,160 filed Jun. 26, 2018 and U.S. Pat. No. 62,767,077 filed Nov. 14, 2018, both entitled “CRISPR/CAS and Transposase Based Amplification Compositions, Systems, And Methods”, U.S. Provisional 62/690,257 filed Jun. 26, 2018 and 62/767,052 filed Nov. 14, 2018 both entitled “CRISPR Effector System Based Amplification Methods, Systems, And Diagnostics”, U.S. Provisional 62/767,076 filed Nov. 14, 2018 entitled “Multiplexing Highly Evolving Viral Variants With SHERLOCK” and 62/767,070 filed Nov. 14, 2018 entitled “Droplet SHERLOCK.” Reference is further made to WO2017/127807, WO2017/184786, WO 2017/184768, WO 2017/189308, WO 2018/035388, WO 2018/170333, WO 2018/191388, WO 2018/213708, WO 2019/005866, PCT/US18/67328 filed Dec. 21, 2018 entitled “Novel CRISPR Enzymes and Systems”, PCT/US18/67225 filed Dec. 21, 2018 entitled “Novel CRISPR Enzymes and Systems” and PCT/US18/67307 filed Dec. 21, 2018 entitled “Novel CRISPR Enzymes and Systems”, U.S. 62/712,809 filed Jul. 31, 2018 entitled “Novel CRISPR Enzymes and Systems”, U.S. 62/744,080 filed Oct. 10, 2018 entitled “Novel Cas12b Enzymes and Systems” and U.S. 62/751,196 filed Oct. 26, 2018 entitled “Novel Cas12b Enzymes and Systems”, U.S. 715,640 filed August 7, 2-18 entitled “Novel CRISPR Enzymes and Systems”, WO 2016/205711, U.S. Pat. No. 9,790,490, WO 2016/205749, WO 2016/205764, WO 2017/070605, WO 2017/106657, and WO 2016/149661, WO2018/035387, WO2018/194963, Cox DBT, et al., RNA editing with CRISPR-Cas13, Science. 2017 Nov. 24; 358(6366):1019-1027; Gootenberg J S, et al., Multiplexed and portable nucleic acid detection platform with Cas13, Cas12a, and Csm6., Science. 2018 Apr. 27; 360(6387):439-444; Gootenberg J S, et al., Nucleic acid detection with CRISPR-Cas13a/C2c2., Science. 2017 Apr. 28; 356(6336):438-442; Abudayyeh 00, et al., RNA targeting with CRISPR-Cas13, Nature. 2017 Oct. 12; 550(7675):280-284; Smargon A A, et al., Cas13b Is a Type VI-B CRISPR-Associated RNA-Guided RNase Differentially Regulated by Accessory Proteins Csx27 and Csx28. Mol Cell. 2017 Feb. 16; 65(4):618-630.e7; Abudayyeh 00, et al., C2c2 is a single-component programmable RNA-guided RNA-targeting CRISPR effector, Science. 2016 Aug. 5; 353 (6299):aaf5573; Yang L, et al., Engineering and optimising deaminase fusions for genome editing. Nat Commun. 2016 Nov. 2; 7:13330, Myhrvold et al., Field deployable viral diagnostics using CRISPR-Cas13, Science 2018 360, 444-448, Shmakov et al. “Diversity and evolution of class 2 CRISPR-Cas systems,” Nat Rev Microbiol. 2017 15(3):169-182, each of which is incorporated herein by reference in its entirety.

[0135] In general, a CRISPR-Cas or CRISPR system as used herein and in documents, such as WO 2014/093622 (PCT/US2013/074667), refers collectively to transcripts and other elements involved in the expression of or directing the activity of CRISPR-associated (“Cas”) genes, including sequences encoding a Cas gene, a tracr (trans-activating CRISPR) sequence (e.g. tracrRNA or an active partial tracrRNA), a tracr-mate sequence (encompassing a “direct repeat” and a tracrRNA-processed partial direct repeat in the context of an endogenous CRISPR system), a guide sequence (also referred to as a “spacer” in the context of an endogenous CRISPR system), or “RNA(s)” as that term is herein used (e.g., RNA(s) to guide Cas, such as Cas9, e.g. CRISPR RNA and transactivating (tracr) RNA or a single guide RNA (sgRNA) (chimeric RNA)) or other sequences and transcripts from a CRISPR locus. In general, a CRISPR system is characterized by elements that promote the formation of a CRISPR complex at the site of a target sequence (also referred to as a protospacer in the context of an endogenous CRISPR system). When the CRISPR protein is a Cas13 protein, a tracrRNA is not required. Cas13 has been described in Abudayyeh et al. (2016) “C2c2 is a single-component programmable RNA-guided RNA-targeting CRISPR effector”; Science; DOI: 10.1126/science.aaf5573; and Shmakov et al. (2015) “Discovery and Functional Characterization of Diverse Class 2 CRISPR-Cas Systems”, Molecular Cell, DOI: dx.doi.org/10.1016/j.molce1.2015.10.008; which are incorporated herein in their entirety by reference. Cas13b has been described in Smargon et al. (2017) “Cas13b Is a Type VI-B CRISPR-Associated RNA-Guided RNases Differentially Regulated by Accessory Proteins Csx27 and Csx28,” Molecular Cell. 65, 1-13; dx.doi.org/10.1016/j.molce1.2016.12.023., which is incorporated herein in its entirety by reference.

[0136] In certain embodiments, protospacer flanking site, or protospacer flanking sequence (PFS) directs binding of the effector proteins (e.g. Type VI) as disclosed herein to the target locus of interest. A PFS is a region that can affect the efficacy of Cas13a mediated targeting, and may be adjacent to the protospacer target in certain Cas13a proteins, while other orthologs do not require a specific PFS. In a preferred embodiment, the CRISPR effector protein may recognize a 3′ PFS. In certain embodiments, the CRISPR effector protein may recognize a 3′ PFS which is 5′H, wherein H is A, C or U. See, e.g. Abudayyeh, 2016. In certain embodiments, the effector protein may be Leptotrichia shahii Cas13p, more preferably Leptotrichia shahii DSM 19757 Cas13, and the 3′ PFS is a 5′ H.

[0137] In the context of formation of a CRISPR complex, “target molecule” or “target sequence” or “target nucleic acid” refers to a molecule harboring a sequence, or a sequence to which a guide sequence is designed to have complementarity, where hybridization between a target sequence and a guide sequence promotes the formation of a CRISPR complex. A target sequence may comprise RNA polynucleotides. The term “target RNA” refers to a RNA polynucleotide being or comprising the target sequence. In other words, the target RNA may be a RNA polynucleotide or a part of a RNA polynucleotide to which a part of the gRNA, i.e. the guide sequence, is designed to have complementarity and to which the effector function mediated by the complex comprising CRISPR effector protein and a gRNA is to be directed. In some embodiments, a target sequence is located in the nucleus or cytoplasm of a cell. A target sequence may comprise DNA polynucleotides.

[0138] As such, a CRISPR system may comprise RNA-targeting effector proteins. A CRISPR system may comprise DNA-targeting effector proteins. In some embodiments, a CRISPR system may comprise a combination of RNA- and DNA-targeting effector proteins, or effector proteins that target both RNA and DNA.

### Other Example Type VI Cas Proteins

[0139] In some embodiments, one or more elements of a nucleic acid-targeting system is derived from a particular organism comprising an endogenous CRISPR RNA-targeting system. In certain example embodiments, the effector protein CRISPR RNA-targeting system comprises at least one HEPN domain, including but not limited to the HEPN domains described herein, HEPN domains known in the art, and domains recognized to be HEPN domains by comparison to consensus sequence motifs. Several such domains are provided herein. In one non-limiting example, a consensus sequence can be derived from the sequences of Cas13a or Cas13b orthologs provided herein. In certain example embodiments, the effector protein comprises a single HEPN domain. In certain other example embodiments, the effector protein comprises two HEPN domains.

[0140] In one example embodiment, the effector protein comprises one or more HEPN domains comprising a RxxxxH motif sequence. The RxxxxH motif sequence can be, without limitation, from a HEPN domain described herein or a HEPN domain known in the art. RxxxxH motif sequences further include motif sequences created by combining portions of two or more HEPN domains. As noted, consensus sequences can be derived from the sequences of the orthologs disclosed in U.S. Provisional Patent Application 62/432,240 entitled “Novel CRISPR Enzymes and Systems,” U.S. Provisional Patent Application 62/471,710 entitled “Novel Type VI CRISPR Orthologs and Systems” filed on Mar. 15, 2017, and U.S. Provisional Patent Application entitled “Novel Type VI CRISPR Orthologs and Systems,” labeled as attorney docket number 47627-05-2133 and filed on Apr. 12, 2017.

[0141] In an embodiment of the invention, a HEPN domain comprises at least one RxxxxH motif comprising the sequence of R(N/H/K)X1X2X3H (SEQ ID NO: 61991-61993). In an embodiment of the invention, a HEPN domain comprises a RxxxxH motif comprising the sequence of R(N/H)X1X2X3H (SEQ ID NO:61991 and SEQ ID NO: 61992). In an embodiment of the invention, a HEPN domain comprises the sequence of R(N/K)X1X2X3H (SEQ ID NO:61991 and SEQ ID NO: 61993). In certain embodiments, X1 is R, S, D, E, Q, N, G, Y, or H. In certain embodiments, X2 is I, S, T, V, or L. In certain embodiments, X3 is L, F, N, Y, V, I, S, D, E, or A.

[0142] In particular embodiments, the Type VI RNA-targeting Cas enzyme is Cas13a. In other example embodiments, the Type VI RNA-targeting Cas enzyme is Cas13b. In certain embodiments, the Cas13b protein is from an organism of a genus selected from the group consisting of: Bergeyella, Prevotella, Porphyromonas, Bacterioides, Alistipes, Riemerella, Myroides, Capnocytophaga, Porphyromonas, Flavobacterium, Porphyromonas, Chryseobacterium, Paludibacter, Psychroflexus, Riemerella, Phaeodactylibacter, Sinomicrobium, Reichenbachiella.

[0143] In particular embodiments, the homologue or orthologue of a Type VI protein such as Cas13a as referred to herein has a sequence homology or identity of at least 30%, or at least 40%, or at least 50%, or at least 60%, or at least 70%, or at least 80%, more preferably at least 85%, even more preferably at least 90%, such as for instance at least 95% with a Type VI protein such as Cas13a (e.g., based on the wild-type sequence of any of Leptotrichia shahii Cas13a, Lachnospiraceae bacterium MA2020 Cas13a, Lachnospiraceae bacterium NK4A179 Cas13a, Clostridium aminophilum (DSM 10710) Cas13a, Carnobacterium gallinarum (DSM 4847) Cas13, Paludibacter propionicigenes (WB4) Cas13, Listeria weihenstephanensis (FSL R9-0317) Cas13, Listeriaceae bacterium (FSL M6-0635) Cas13, Listeria newyorkensis (FSL M6-0635) Cas13, Leptotrichia wadei (F0279) Cas13, Rhodobacter capsulatus (SB 1003) Cas13, Rhodobacter capsulatus (R121) Cas13, Rhodobacter capsulatus (DE442) Cas13, Leptotrichia wadei (Lw2) Cas13, or Listeria seeligeri Cas13). In further embodiments, the homologue or orthologue of a Type VI protein such as Cas13 as referred to herein has a sequence identity of at least 30%, or at least 40%, or at least 50%, or at least 60%, or at least 70%, or at least 80%, more preferably at least 85%, even more preferably at least 90%, such as for instance at least 95% with the wild type Cas13 (e.g., based on the wild-type sequence of any of Leptotrichia shahii Cas13, Lachnospiraceae bacterium MA2020 Cas13, Lachnospiraceae bacterium NK4A179 Cas13, Clostridium aminophilum (DSM 10710) Cas13, Carnobacterium gallinarum (DSM 4847) Cas13, Paludibacter propionicigenes (WB4) Cas13, Listeria weihenstephanensis (FSL R9-0317) Cas13, Listeriaceae bacterium (FSL M6-0635) Cas13, Listeria newyorkensis (FSL M6-0635) Cas13, Leptotrichia wadei (F0279) Cas13, Rhodobacter capsulatus (SB 1003) Cas13, Rhodobacter capsulatus (R121) Cas13, Rhodobacter capsulatus (DE442) Cas13, Leptotrichia wadei (Lw2) Cas13, or Listeria seeligeri Cas13).

[0144] In certain other example embodiments, the CRISPR system the effector protein is a Cas13 nuclease. The activity of Cas13 may depend on the presence of two HEPN domains. These have been shown to be RNase domains, i.e. nuclease (in particular an endonuclease) cutting RNA. Cas13a HEPN may also target DNA, or potentially DNA and/or RNA. On the basis that the HEPN domains of Cas13a are at least capable of binding to and, in their wild-type form, cutting RNA, then it is preferred that the Cas13a effector protein has RNase function. Regarding Cas13a CRISPR systems, reference is made to U.S. Provisional 62/351,662 filed on Jun. 17, 2016 and U.S. Provisional 62/376,377 filed on Aug. 17, 2016. Reference is also made to U.S. Provisional 62/351,803 filed on Jun. 17, 2016. Reference is also made to U.S. Provisional entitled “Novel Crispr Enzymes and Systems” filed Dec. 8, 2016 bearing Broad Institute No. 10035.PA4 and Attorney Docket No. 47627.03.2133. Reference is further made to East-Seletsky et al. “Two distinct RNase activities of CRISPR-C2c2 enable guide-RNA processing and RNA detection” Nature doi:10/1038/nature19802 and Abudayyeh et al. “C2c2 is a single-component programmable RNA-guided RNA targeting CRISPR effector” bioRxiv doi:10.1101/054742.

[0145] RNase function in CRISPR systems is known, for example mRNA targeting has been reported for certain type III CRISPR-Cas systems (Hale et al., 2014, Genes Dev, vol. 28, 2432-2443; Hale et al., 2009, Cell, vol. 139, 945-956; Peng et al., 2015, Nucleic acids research, vol. 43, 406-417) and provides significant advantages. In the Staphylococcus epidermis type III-A system, transcription across targets results in cleavage of the target DNA and its transcripts, mediated by independent active sites within the Cas10-Csm ribonucleoprotein effector protein complex (see, Samai et al., 2015, Cell, vol. 151, 1164-1174). A CRISPR-Cas system, composition or method targeting RNA via the present effector proteins is thus provided.

[0146] In an embodiment, the Cas protein may be a Cas13a ortholog of an organism of a genus which includes but is not limited to Leptotrichia, Listeria, Corynebacter, Sutterella, Legionella, Treponema, Filifactor, Eubacterium, Streptococcus, Lactobacillus, Mycoplasma, Bacteroides, Flaviivola, Flavobacterium, Sphaerochaeta, Azospirillum, Gluconacetobacter, Neisseria, Roseburia, Parvibaculum, Staphylococcus, Nitratifractor, Mycoplasma and Campylobacter. Species of organism of such a genus can be as otherwise herein discussed.

[0147] It will be appreciated that any of the functionalities described herein may be engineered into CRISPR enzymes from other orthologs, including chimeric enzymes comprising fragments from multiple orthologs. Examples of such orthologs are described elsewhere herein. Thus, chimeric enzymes may comprise fragments of CRISPR enzyme orthologs of an organism which includes but is not limited to Leptotrichia, Listeria, Corynebacter, Sutterella, Legionella, Treponema, Filifactor, Eubacterium, Streptococcus, Lactobacillus, Mycoplasma, Bacteroides, Flaviivola, Flavobacterium, Sphaerochaeta, Azospirillum, Gluconacetobacter, Neisseria, Roseburia, Parvibaculum, Staphylococcus, Nitratifractor, Mycoplasma and Campylobacter. A chimeric enzyme can comprise a first fragment and a second fragment, and the fragments can be of CRISPR enzyme orthologs of organisms of genera herein mentioned or of species herein mentioned; advantageously the fragments are from CRISPR enzyme orthologs of different species.

[0148] In embodiments, the Cas13a protein as referred to herein also encompasses a functional variant of Cas13a or a homologue or an orthologue thereof. A “functional variant” of a protein as used herein refers to a variant of such protein which retains at least partially the activity of that protein. Functional variants may include mutants (which may be insertion, deletion, or replacement mutants), including polymorphs, etc. Also included within functional variants are fusion products of such protein with another, usually unrelated, nucleic acid, protein, polypeptide or peptide. Functional variants may be naturally occurring or may be man-made. Advantageous embodiments can involve engineered or non-naturally occurring Type VI RNA-targeting effector protein.

[0149] In an embodiment, nucleic acid molecule(s) encoding the Cas13 or an ortholog or homolog thereof, may be codon-optimized for expression in a eukaryotic cell. A eukaryote can be as herein discussed. Nucleic acid molecule(s) can be engineered or non-naturally occurring.

[0150] In an embodiment, the Cas13a or an ortholog or homolog thereof, may comprise one or more mutations (and hence nucleic acid molecule(s) coding for same may have mutation(s). The mutations may be artificially introduced mutations and may include but are not limited to one or more mutations in a catalytic domain. Examples of catalytic domains with reference to a Cas9 enzyme may include but are not limited to RuvC I, RuvC II, RuvC III and HNH domains.

[0151] In an embodiment, the Cas13a or an ortholog or homolog thereof, may comprise one or more mutations. The mutations may be artificially introduced mutations and may include but are not limited to one or more mutations in a catalytic domain. Examples of catalytic domains with reference to a Cas enzyme may include but are not limited to HEPN domains.

[0152] In an embodiment, the Cas1a3 or an ortholog or homolog thereof, may be used as a generic nucleic acid binding protein with fusion to or being operably linked to a functional domain. Exemplary functional domains may include but are not limited to translational initiator, translational activator, translational repressor, nucleases, in particular ribonucleases, a spliceosome, beads, a light inducible/controllable domain or a chemically inducible/controllable domain.

[0153] In certain example embodiments, the Cas13a effector protein may be from an organism selected from the group consisting of; Leptotrichia, Listeria, Corynebacter, Sutterella, Legionella, Treponema, Filifactor, Eubacterium, Streptococcus, Lactobacillus, Mycoplasma, Bacteroides, Flaviivola, Flavobacterium, Sphaerochaeta, Azospirillum, Gluconacetobacter, Neisseria, Roseburia, Parvibaculum, Staphylococcus, Nitratifractor, Mycoplasma, and Campylobacter.

[0154] In certain embodiments, the effector protein may be a Listeria sp. Cas13p, preferably Listeria seeligeria Cas13p, more preferably Listeria seeligeria serovar 1/2b str. SLCC3954 Cas13p and the crRNA sequence may be 44 to 47 nucleotides in length, with a 5′ 29-nt direct repeat (DR) and a 15-nt to 18-nt spacer.

[0155] In certain embodiments, the effector protein may be a Leptotrichia sp. Cas13p, preferably Leptotrichia shahii Cas13p, more preferably Leptotrichia shahii DSM 19757 Cas13p and the crRNA sequence may be 42 to 58 nucleotides in length, with a 5′ direct repeat of at least 24 nt, such as a 5′ 24-28-nt direct repeat (DR) and a spacer of at least 14 nt, such as a 14-nt to 28-nt spacer, or a spacer of at least 18 nt, such as 19, 20, 21, 22, or more nt, such as 18-28, 19-28, 20-28, 21-28, or 22-28 nt.

[0156] In certain example embodiments, the effector protein may be a Leptotrichia sp., Leptotrichia wadei F0279, or a Listeria sp., preferably Listeria newyorkensis FSL M6-0635.

[0157] In certain example embodiments, the Cas13 effector proteins of the invention include, without limitation, the following 21 ortholog species (including multiple CRISPR loci: Leptotrichia shahii; Leptotrichia wadei (Lw2); Listeria seeligeri; Lachnospiraceae bacterium MA2020; Lachnospiraceae bacterium NK4A179; [Clostridium] aminophilum DSM 10710; Carnobacterium gallinarum DSM 4847; Carnobacterium gallinarum DSM 4847 (second CRISPR Loci); Paludibacter propionicigenes WB4; Listeria weihenstephanensis FSL R9-0317; Listeriaceae bacterium FSL M6-0635; Leptotrichia wadei F0279; Rhodobacter capsulatus SB 1003; Rhodobacter capsulatus R121; Rhodobacter capsulatus DE442; Leptotrichia buccalis C-1013-b; Herbinix hemicellulosilytica; [Eubacterium] rectale; Eubacteriaceae bacterium CHKCI004; Blautia sp. Marseille-P2398; and Leptotrichia sp. oral taxon 879 str. F0557. Twelve (12) further non-limiting examples are: Lachnospiraceae bacterium NK4A144; Chloroflexus aggregans; Demequina aurantiaca; Thalassospira sp. TSL5-1; Pseudobutyrivibrio sp. OR37; Butyrivibrio sp. YAB3001; Blautia sp. Marseille-P2398; Leptotrichia sp. Marseille-P3007; Bacteroides ihuae; Porphyromonadaceae bacterium KH3CP3RA; Listeria riparia; and Insolitispirillum peregrinum.

[0158] In certain embodiments, the Cas13 protein according to the invention is or is derived from one of the orthologues as described, or is a chimeric protein of two or more of the orthologues as described below, or is a mutant or variant of one of the orthologues as described (or a chimeric mutant or variant), including dead Cas13, split Cas13, destabilized Cas13, etc. as defined herein elsewhere, with or without fusion with a heterologous/functional domain.

[0159] In certain example embodiments, the Cas13a effector protein is from an organism of a genus selected from the group consisting of: Leptotrichia, Listeria, Corynebacter, Sutterella, Legionella, Treponema, Filifactor, Eubacterium, Streptococcus, Lactobacillus, Mycoplasma, Bacteroides, Flaviivola, Flavobacterium, Sphaerochaeta, Azospirillum, Gluconacetobacter, Neisseria, Roseburia, Parvibaculum, Staphylococcus, Nitratifractor, Mycoplasma, Campylobacter, and Lachnospira.

[0160] In an embodiment of the invention, there is provided an effector protein which comprises an amino acid sequence having at least 80% sequence homology to the wild-type sequence of any of Leptotrichia shahii Cas13, Lachnospiraceae bacterium MA2020 Cas13, Lachnospiraceae bacterium NK4A179 Cas13, Clostridium aminophilum (DSM 10710) Cas13, Carnobacterium gallinarum (DSM 4847) Cas13, Paludibacter propionicigenes (WB4) Cas13, Listeria weihenstephanensis (FSL R9-0317) Cas13, Listeriaceae bacterium (FSL M6-0635) Cas13, Listeria newyorkensis (FSL M6-0635) Cas13, Leptotrichia wadei (F0279) Cas13, Rhodobacter capsulatus (SB 1003) Cas13, Rhodobacter capsulatus (R121) Cas13, Rhodobacter capsulatus (DE442) Cas13, Leptotrichia wadei (Lw2) Cas13, or Listeria seeligeri Cas13. According to the invention, a consensus sequence can be generated from multiple Cas13 orthologs, which can assist in locating conserved amino acid residues, and motifs, including but not limited to catalytic residues and HEPN motifs in Cas13 orthologs that mediate Cas13 function. One such consensus sequence, generated from selected orthologs.

[0161] In an embodiment of the invention, the effector protein comprises an amino acid sequence having at least 80% sequence homology to a Type VI effector protein consensus sequence including but not limited to a consensus sequence described herein.

[0162] In another non-limiting example, a sequence alignment tool to assist generation of a consensus sequence and identification of conserved residues is the MUSCLE alignment tool (www.ebi.ac.uk/Tools/msa/muscle/). For example, using MUSCLE, the following amino acid locations conserved among Cas13a orthologs can be identified in Leptotrichia wadei Cas13a:K2; K5; V6; E301; L331; 1335; N341; G351; K352; E375; L392; L396; D403; F446; 1466; 1470; R474 (HEPN); H475; H479 (HEPN), E508; P556; L561; 1595; Y596; F600; Y669; 1673; F681; L685; Y761; L676; L779; Y782; L836; D847; Y863; L869; 1872; K879; 1933; L954; 1958; R961; Y965; E970; R971; D972; R1046 (HEPN), H1051 (HEPN), Y1075; D1076; K1078; K1080; 11083; 11090.

[0163] In certain example embodiments, the RNA-targeting effector protein is a Type VI-B effector protein, such as Cas13b and Group 29 or Group 30 proteins. In certain example embodiments, the RNA-targeting effector protein comprises one or more HEPN domains. In certain example embodiments, the RNA-targeting effector protein comprises a C-terminal HEPN domain, a N-terminal HEPN domain, or both. Regarding example Type VI-B effector proteins that may be used in the context of this invention, reference is made to U.S. application Ser. No. 15/331,792 entitled “Novel CRISPR Enzymes and Systems” and filed Oct. 21, 2016, International Patent Application No. PCT/US2016/058302 entitled “Novel CRISPR Enzymes and Systems”, and filed Oct. 21, 2016, and Smargon et al. “Cas13b is a Type VI-B CRISPR-associated RNA-Guided RNase differentially regulated by accessory proteins Csx27 and Csx28” Molecular Cell, 65, 1-13 (2017); dx.doi.org/10.1016/j.molce1.2016.12.023. In certain example embodiments, the Cas13b effector protein is, or comprises an amino acid sequence having at least 80% sequence homology to any of the sequences of Table 1 of International Patent Application No. PCT/US2016/058302. Further reference is made to example Type VI-B effector proteins of U.S. Provisional Application Nos. 62/471,710, 62/566,829 and International Patent Publication No. WO2018/1703333, entitled “Novel Cas13b Orthologues CRISPR Enzymes and System”. In particular embodiments, the Cas13b enzyme is derived from Bergeyella zoohelcum. In certain other example embodiments, the effector protein is, or comprises an amino acid sequence having at least 80% sequence homology to any of the sequences listed in Tables 1A or 1B of International Patent Publication No. WO2018/1703333, specifically incorporated herein by reference. In certain embodiments, the Cas 13b effector protein is, or comprises an amino acid sequence having at least 80% sequence homology to any of the polypeptides in U.S. Provisional Applications 62/484,791, 62/561,662, 62/568,129 or International Patent Publication WO2018/191388, all entitled “Novel Type VI CRISPR Orthologs and Systems,” incorporated herein by reference. In certain embodiments, the Cas13b effector protein is, or comprises an amino acid sequence having at least 80% sequence homology to a polypeptide as set forth in FIG. 1 of International Patent Publication WO2018/191388, specifically incorporated herein by reference. In an aspect, the Cas13b protein is selected from the group consisting of Porphyromonas gulae Cas13b (accession number WP 039434803), Prevotella sp. P5-125 Cas 13b (accession number WP 044065294), Porphyromonas gingivalis Cas 13b (accession number WP 053444417), Porphyromonas sp. COT-052 OH4946 Cas 13b (accession number WP 039428968), Bacteroides pyogenes Cas 13b (accession number WP 034542281), Riemerella anatipestifer Cas13b (accession number WP 004919755).

[0164] In certain example embodiments, the RNA-targeting effector protein is a Cas13c effector protein as disclosed in U.S. Provisional Patent Application No. 62/525,165 filed Jun. 26, 2017, and International Patent Publication No. WO2018/035250 filed Aug. 16, 2017. In certain example embodiments, the Cas13c protein may be from an organism of a genus such as Fusobacterium or Anaerosalibacter. Example wildtype orthologue sequences of Cas13c are: EHO19081, WP 094899336, WP 040490876, WP 047396607, WP 035935671, WP 035906563, WP 042678931, WP 062627846, WP 005959231, WP 027128616, WP 062624740, WP 096402050.

[0165] In certain example embodiments, the Cas13 protein may be selected from any of the following: Cas13a: Leptotrichia shahii, Leptotrichia wadei (Lw2), Listeria seeligeri, Lachnospiraceae bacterium MA2020, Lachnospiraceae bacterium NK4A179, [Clostridium] aminophilum DSM 10710, Carnobacterium gallinarum DSM 4847, Carnobacterium gallinarum DSM 4847, Paludibacter propionicigenes WB4, Listeria weihenstephanensis FSL R9-0317, Listeriaceae bacterium FSL M6-0635, Leptotrichia wadei F0279, Rhodobacter capsulatus SB 1003, Rhodobacter capsulatus R121, Rhodobacter capsulatus DE442, Leptotrichia buccalis C-1013-b, Herbinix hemicellulosilytica, [Eubacterium] rectale, Eubacteriaceae bacterium CHKCI004, Blautia sp. Marseille-P2398, Leptotrichia sp. oral taxon 879 str. F0557; Cas 13b: Bergeyella zoohelcum, Prevotella intermedia, Prevotella buccae, Alistipes sp. ZOR0009, Prevotella sp. MA2016, Riemerella anatipestifer, Prevotella aurantiaca, Prevotella saccharolytica, Prevotella intermedia, Capnocytophaga canimorsus, Porphyromonas gulae, Prevotella sp. P5-125, Flavobacterium branchiophilum, Porphyromonas gingivalis, Prevotella intermedia; Cas13c: Fusobacterium necrophorum subsp. funduliforme ATCC 51357 contig00003, Fusobacterium necrophorum DJ-2 contig0065, whole genome shotgun sequence, Fusobacterium necrophorum BFTR-1 contig0068, Fusobacterium necrophorum subsp. funduliforme 1_1_36S cont1.14, Fusobacterium perfoetens ATCC 29250 T364DRAFT_scaffold00009.9_C, Fusobacterium ulcerans ATCC 49185 cont2.38, Anaerosalibacter sp. ND1 genome assembly Anaerosalibacter massiliensis ND1.

[0166] In certain example embodiments the orthologue is a Cas13a, Cas13b, Cas13c, or Cas13d. In certain example embodiments the orthologue is a Cas13 orthologue. In certain example embodiments, the Cas13a orthologues is derived from Herbinix hemicellulosilytica. In certain example embodiments, the Cas13a orthologue is derived from Herbinix hemicellulosilytica DSM 29228. In certain example embodiments, the Cas 13 orthologue is defined by SEQ ID NO: 75 of International Publication No. WO 2017/219027. In certain example embodiments, the Cas 13 orthologue is defined by a sequence from FIG. 1A of U.S. Provisional Application 62/967,408, filed Jan. 29, 2020, entitled “Novel CRISPR Enzymes and Systems” (loci QNRW01000010.1, OWPA01000389.1, 0153798_10014618, 0153978_10005171, and 0153798_10004687). In certain example embodiments, the Cas 13a orthologue is encoded by the nucleic acid sequence 0123519_10037894 or 0J26742_10014101. In certain other example embodiments, the Cas13 orthologue has at least 80% sequence identity to SEQ ID NO: 75 of International Publication No. WO 2017/219027. In certain other example embodiments, the Cas13 orthologue has at least 80% sequence identity to sequence from FIG. 1A of U.S. Provisional Application 62/967,408, filed Jan. 29, 2020, entitled “Novel CRISPR Enzymes and Systems” (loci QNRW01000010.1, OWPA01000389.1, 0153798_10014618, 0153978_10005171, and 0153798_10004687), incorporated herein by reference. In certain other example embodiments, the Cas13 orthologue has at least 80% sequence identity to a polypeptide encoded by the nucleic acid sequence 0123519_10037894 or 0J26742_10014101. In certain example embodiments, the Cas13 orthologue has at least one HEPN domain and at least 80% identity to SEQ ID NO: 75 of International Publication No. WO 2017/219027. In certain example embodiments, the Cas13 orthologue has at least one HEPN domain and at least 80% identity to sequence from loci QNRW01000010.1, OWPA01000389.1, 0153798_10014618, 0153978_10005171, and 0153798_10004687. In certain example embodiments, the Cas13 orthologue has at least one HEPN domain and at least 80% identity to a polypeptide encoded by the nucleic acid sequence of 0123519_10037894 or 0J26742_10014101 in BROD-4880P2_Cas13a_sequences.txt. In another example embodiment, the Cas13 orthologue has at least two HEPN domains and at least 80% identity to SEQ ID NO: 75 of International Publication No. WO 2017/219027. In another example embodiment, the Cas13 orthologue has at least two HEPN domains and at least 80% identity to sequence from FIG. 1A of U.S. Provisional Application 62/967,408, filed Jan. 29, 2020, entitled “Novel CRISPR Enzymes and Systems” loci QNRW01000010.1, OWPA01000389.1, 0153798_10014618, 0153978_10005171, and 0153798_10004687. The Cas13a thermostable proteins of FIG. 1A of U.S. Provisional Application 62/967,408, filed Jan. 29, 2020, entitled “Novel CRISPR Enzymes and Systems” were identified from stable anaerobic thermophilic methanogenic microbiomes fermenting switchgrass, supporting their thermostability. See, Liang et al., Biotechnol Biofuels 2018; 11:243 doi: 10.1186/s13068-018-1238-1. Similarly, the 0J26742_10014101 clusters with the verified thermophilic sourced Cas13a sequences detailed in FIG. 1A of U.S. Provisional Application 62/967,408, filed Jan. 29, 2020, entitled “Novel CRISPR Enzymes and Systems”. The nucleic acid identified at loci 123519_10037894 was identified from a study focusing on 70° C. organism. In certain example embodiments, the Cas13 orthologue has at least two HEPN domains and at least 80% identity to a polypeptide encoded by the nucleic acid sequence 0123519_10037894 or 0J26742_10014101. Accordingly, a person of ordinary skill in the art may use characteristics of the above identified orthologs to select other suitable thermostable orthologues from those disclosed herein.

### Other Example Type V Cas Proteins

[0167] In certain example embodiments, the assays may comprise a DNA-targeting effector protein. In certain example embodiments, the assays may comprise multiple DNA-targeting effectors or one or more orthologs in combination with one or more RNA-targeting effectors. In certain example embodiments, the DNA targeting are Type V Cas proteins, such as Cas12 proteins. In certain other example embodiments, the Cas12 proteins are Cas12a, Cas12b, Cas12c, Cas12d, Cas12e, Cas12g, or a combination thereof.

[0168] Cpf1 Orthologs

[0169] The present invention encompasses the use of a Cpf1 effector protein, derived from a Cpf1 locus denoted as subtype V-A. Herein such effector proteins are also referred to as “Cpf1p”, e.g., a Cpf1 protein (and such effector protein or Cpf1 protein or protein derived from a Cpf1 locus is also called “CRISPR enzyme”). Presently, the subtype V-A loci encompasses cas1, cas2, a distinct gene denoted cpf1 and a CRISPR array. Cpf1 (CRISPR-associated protein Cpf1, subtype PREFRAN) is a large protein (about 1300 amino acids) that contains a RuvC-like nuclease domain homologous to the corresponding domain of Cas9 along with a counterpart to the characteristic arginine-rich cluster of Cas9. However, Cpf1 lacks the HNH nuclease domain that is present in all Cas9 proteins, and the RuvC-like domain is contiguous in the Cpf1 sequence, in contrast to Cas9 where it contains long inserts including the HNH domain. Accordingly, in particular embodiments, the CRISPR-Cas enzyme comprises only a RuvC-like nuclease domain.

[0170] The programmability, specificity, and collateral activity of the RNA-guided Cpf1 also make it an ideal switchable nuclease for non-specific cleavage of nucleic acids. In one embodiment, a Cpf1 system is engineered to provide and take advantage of collateral non-specific cleavage of RNA. In another embodiment, a Cpf1 system is engineered to provide and take advantage of collateral non-specific cleavage of ssDNA. Accordingly, engineered Cpf1 systems provide platforms for nucleic acid detection and transcriptome manipulation. Cpf1 is developed for use as a mammalian transcript knockdown and binding tool. Cpf1 is capable of robust collateral cleavage of RNA and ssDNA when activated by sequence-specific targeted DNA binding.

[0171] Homologs and orthologs may be identified by homology modelling (see, e.g., Greer, Science vol. 228 (1985) 1055, and Blundell et al. Eur J Biochem vol 172 (1988), 513) or “structural BLAST” (Dey F, Cliff Zhang Q, Petrey D, Honig B. Toward a “structural BLAST”: using structural relationships to infer function. Protein Sci. 2013 April; 22(4):359-66. doi: 10.1002/pro.2225.). See also Shmakov et al. (2015) for application in the field of CRISPR-Cas loci. Homologous proteins may but need not be structurally related, or are only partially structurally related. The Cpf1 gene is found in several diverse bacterial genomes, typically in the same locus with cas1, cas2, and cas4 genes and a CRISPR cassette (for example, FNFX1_1431-FNFX1_1428 of Francisella cf. novicida Fx1). In particular embodiments, the effector protein is a Cpf1 effector protein from an organism from a genus comprising Streptococcus, Campylobacter, Nitratifractor, Staphylococcus, Parvibaculum, Roseburia, Neisseria, Gluconacetobacter, Azospirillum, Sphaerochaeta, Lactobacillus, Eubacterium, Corynebacter, Carnobacterium, Rhodobacter, Listeria, Paludibacter, Clostridium, Lachnospiraceae, Clostridiaridium, Leptotrichia, Francisella, Legionella, Alicyclobacillus, Methanomethyophilus, Porphyromonas, Prevotella, Bacteroidetes, Helcococcus, Letospira, Desulfovibrio, Desulfonatronum, Opitutaceae, Tuberibacillus, Bacillus, Brevibacilus, Methylobacterium or Acidaminococcus.

[0172] In further particular embodiments, the Cpf1 effector protein is from an organism selected from S. mutans, S. agalactiae, S. equisimilis, S. sanguinis, S. pneumonia; C. jejuni, C. coli; N. salsuginis, N. tergarcus; S. auricularis, S. carnosus; N. meningitides, N. gonorrhoeae; L. monocytogenes, L. ivanovii; C. botulinum, C. difficile, C. tetani, C. sordellii.

[0173] The effector protein may comprise a chimeric effector protein comprising a first fragment from a first effector protein (e.g., a Cpf1) ortholog and a second fragment from a second effector (e.g., a Cpf1) protein ortholog, and wherein the first and second effector protein orthologs are different. At least one of the first and second effector protein (e.g., a Cpf1) orthologs may comprise an effector protein (e.g., a Cpf1) from an organism comprising Streptococcus, Campylobacter, Nitratifractor, Staphylococcus, Parvibaculum, Roseburia, Neisseria, Gluconacetobacter, Azospirillum, Sphaerochaeta, Lactobacillus, Eubacterium, Corynebacter, Carnobacterium, Rhodobacter, Listeria, Paludibacter, Clostridium, Lachnospiraceae, Clostridiaridium, Leptotrichia, Francisella, Legionella, Alicyclobacillus, Methanomethyophilus, Porphyromonas, Prevotella, Bacteroidetes, Helcococcus, Letospira, Desulfovibrio, Desulfonatronum, Opitutaceae, Tuberibacillus, Bacillus, Brevibacilus, Methylobacterium or Acidaminococcus; e.g., a chimeric effector protein comprising a first fragment and a second fragment wherein each of the first and second fragments is selected from a Cpf1 of an organism comprising Streptococcus, Campylobacter, Nitratifractor, Staphylococcus, Parvibaculum, Roseburia, Neisseria, Gluconacetobacter, Azospirillum, Sphaerochaeta, Lactobacillus, Eubacterium, Corynebacter, Carnobacterium, Rhodobacter, Listeria, Paludibacter, Clostridium, Lachnospiraceae, Clostridiaridium, Leptotrichia, Francisella, Legionella, Alicyclobacillus, Methanomethyophilus, Porphyromonas, Prevotella, Bacteroidetes, Helcococcus, Letospira, Desulfovibrio, Desulfonatronum, Opitutaceae, Tuberibacillus, Bacillus, Brevibacilus, Methylobacterium or Acidaminococcus wherein the first and second fragments are not from the same bacteria; for instance a chimeric effector protein comprising a first fragment and a second fragment wherein each of the first and second fragments is selected from a Cpf1 of S. mutans, S. agalactiae, S. equisimilis, S. sanguinis, S. pneumonia; C. jejuni, C. coli; N. salsuginis, N. tergarcus; S. auricularis, S. carnosus; N. meningitides, N. gonorrhoeae; L. monocytogenes, L. ivanovii; C. botulinum, C. difficile, C. tetani, C. sordellii; Francisella tularensis 1, Prevotella albensis, Lachnospiraceae bacterium MC2017 1, Butyrivibrio proteoclasticus, Peregrinibacteria bacterium GW2011_GWA2_33_10, Parcubacteria bacterium GW2011_GWC2_44_17, Smithella sp. SCADC, Acidaminococcus sp. BV3L6, Lachnospiraceae bacterium MA2020, Candidatus Methanoplasma termitum, Eubacterium eligens, Moraxella bovoculi 237, Leptospira inadai, Lachnospiraceae bacterium ND2006, Porphyromonas crevioricanis 3, Prevotella disiens and Porphyromonas macacae, wherein the first and second fragments are not from the same bacteria. In a more preferred embodiment, the Cpf1p is derived from a bacterial species selected from Francisella tularensis 1, Prevotella albensis, Lachnospiraceae bacterium MC2017 1, Butyrivibrio proteoclasticus, Peregrinibacteria bacterium GW2011_GWA2_33_10, Parcubacteria bacterium GW2011_GWC2_44_17, Smithella sp. SCADC, Acidaminococcus sp. BV3L6, Lachnospiraceae bacterium MA2020, Candidatus Methanoplasma termitum, Eubacterium eligens, Moraxella bovoculi 237, Leptospira inadai, Lachnospiraceae bacterium ND2006, Porphyromonas crevioricanis 3, Prevotella disiens and Porphyromonas macacae. In certain embodiments, the Cpf1p is derived from a bacterial species selected from Acidaminococcus sp. BV3L6, Lachnospiraceae bacterium MA2020. In certain embodiments, the effector protein is derived from a subspecies of Francisella tularensis 1, including but not limited to Francisella tularensis subsp. Novicida.

[0174] In some embodiments, the Cpf1p is derived from an organism from the genus of Eubacterium. In some embodiments, the CRISPR effector protein is a Cpf1 protein derived from an organism from the bacterial species of Eubacterium rectale. In some embodiments, the amino acid sequence of the Cpf1 effector protein corresponds to NCBI Reference Sequence WP 055225123.1, NCBI Reference Sequence WP 055237260.1, NCBI Reference Sequence WP 055272206.1, or GenBank ID OLA16049.1. In some embodiments, the Cpf1 effector protein has a sequence homology or sequence identity of at least 60%, more particularly at least 70, such as at least 80%, more preferably at least 85%, even more preferably at least 90%, such as for instance at least 95%, with NCBI Reference Sequence WP 055225123.1, NCBI Reference Sequence WP_055237260.1, NCBI Reference Sequence WP_055272206.1, or GenBank ID OLA16049.1. The skilled person will understand that this includes truncated forms of the Cpf1 protein whereby the sequence identity is determined over the length of the truncated form. In some embodiments, the Cpf1 effector recognizes the PAM sequence of TTTN or CTTN.

[0175] In particular embodiments, the homologue or orthologue of Cpf1 as referred to herein has a sequence homology or identity of at least 80%, more preferably at least 85%, even more preferably at least 90%, such as for instance at least 95% with Cpf1. In further embodiments, the homologue or orthologue of Cpf1 as referred to herein has a sequence identity of at least 80%, more preferably at least 85%, even more preferably at least 90%, such as for instance at least 95% with the wild type Cpf1. Where the Cpf1 has one or more mutations (mutated), the homologue or orthologue of said Cpf1 as referred to herein has a sequence identity of at least 80%, more preferably at least 85%, even more preferably at least 90%, such as for instance at least 95% with the mutated Cpf1.

[0176] In an ambodiment, the Cpf1 protein may be an ortholog of an organism of a genus which includes, but is not limited to Acidaminococcus sp, Lachnospiraceae bacterium or Moraxella bovoculi; in particular embodiments, the type V Cas protein may be an ortholog of an organism of a species which includes, but is not limited to Acidaminococcus sp. BV3L6; Lachnospiraceae bacterium ND2006 (LbCpf1) or Moraxella bovoculi 237. In particular embodiments, the homologue or orthologue of Cpf1 as referred to herein has a sequence homology or identity of at least 80%, more preferably at least 85%, even more preferably at least 90%, such as for instance at least 95% with one or more of the Cpf1 sequences disclosed herein. In further embodiments, the homologue or orthologue of Cpf as referred to herein has a sequence identity of at least 80%, more preferably at least 85%, even more preferably at least 90%, such as for instance at least 95% with the wild type FnCpf1, AsCpf1 or LbCpf1. The skilled person will understand that this includes truncated forms of the Cpf1 protein whereby the sequence identity is determined over the length of the truncated form. In certain of the following, Cpf1 amino acids are followed by nuclear localization signals (NLS) (italics), a glycine-serine (GS) linker, and 3× HA tag. Further Cpf1 orthologs include NCBI WP_055225123.1, NCBI WP_055237260.1, NCBI WP_055272206.1, and GenBank OLA16049.1.

[0177] C2c1 Orthologs

[0178] The present invention encompasses the use of a C2c1 effector proteins, derived from a C2c1 locus denoted as subtype V-B. Herein such effector proteins are also referred to as “C2c1p”, e.g., a C2c1 protein (and such effector protein or C2c1 protein or protein derived from a C2c1 locus is also called “CRISPR enzyme”). Presently, the subtype V-B loci encompasses cas1-Cas4 fusion, cas2, a distinct gene denoted C2c1 and a CRISPR array. C2c1 (CRISPR-associated protein C2c1) is a large protein (about 1100-1300 amino acids) that contains a RuvC-like nuclease domain homologous to the corresponding domain of Cas9 along with a counterpart to the characteristic arginine-rich cluster of Cas9. However, C2c1 lacks the HNH nuclease domain that is present in all Cas9 proteins, and the RuvC-like domain is contiguous in the C2c1 sequence, in contrast to Cas9 where it contains long inserts including the HNH domain. Accordingly, in particular embodiments, the CRISPR-Cas enzyme comprises only a RuvC-like nuclease domain.

[0179] The programmability, specificity, and collateral activity of the RNA-guided C2c1 also make it an ideal switchable nuclease for non-specific cleavage of nucleic acids. In one embodiment, a C2c1 system is engineered to provide and take advantage of collateral non-specific cleavage of RNA. In another embodiment, a C2c1 system is engineered to provide and take advantage of collateral non-specific cleavage of ssDNA. Accordingly, engineered C2c1 systems provide platforms for nucleic acid detection and transcriptome manipulation, and inducing cell death. C2c1 is developed for use as a mammalian transcript knockdown and binding tool. C2c1 is capable of robust collateral cleavage of RNA and ssDNA when activated by sequence-specific targeted DNA binding.

[0180] In certain embodiments, C2c1 is provided or expressed in an in vitro system or in a cell, transiently or stably, and targeted or triggered to non-specifically cleave cellular nucleic acids. In one embodiment, C2c1 is engineered to knock down ssDNA, for example viral ssDNA. In another embodiment, C2c1 is engineered to knock down RNA. The system can be devised such that the knockdown is dependent on a target DNA present in the cell or in vitro system, or triggered by the addition of a target nucleic acid to the system or cell.

[0181] C2c1 (also known as Cas12b) proteins are RNA guided nucleases. In certain embodiments, the Cas protein may comprise at least 80% sequence identity to a polypeptide as described in International Patent Publication WO 2016/205749 at FIG. 17-21, FIG. 41A-41M, 44A-44E, incorporated herein by reference. Its cleavage relies on a tracr RNA to recruit a guide RNA comprising a guide sequence and a direct repeat, where the guide sequence hybridizes with the target nucleotide sequence to form a DNA/RNA heteroduplex. Based on current studies, C2c1 nuclease activity also requires relies on recognition of PAM sequence. C2c1 PAM sequences are T-rich sequences. In some embodiments, the PAM sequence is 5′ TTN 3′ or 5′ ATTN 3′, wherein N is any nucleotide. In a particular embodiment, the PAM sequence is 5′ TTC 3′. In a particular embodiment, the PAM is in the sequence of Plasmodium falciparum.

[0182] In particular embodiments, the effector protein is a C2c1 effector protein from an organism from a genus comprising Alicyclobacillus, Desulfovibrio, Desulfonatronum, Opitutaceae, Tuberibacillus, Bacillus, Brevibacillus, Candidatus, Desulfatirhabdium, Citrobacter, Elusimicrobia, Methylobacterium, Omnitrophica, Phycisphaerae, Planctomycetes, Spirochaetes, and Verrucomicrobiaceae.

[0183] In further particular embodiments, the C2c1 effector protein is from a species selected from Alicyclobacillus acidoterrestris (e.g., ATCC 49025), Alicyclobacillus contaminans (e.g., DSM 17975), Alicyclobacillus macrosporangiidus (e.g. DSM 17980), Bacillus hisashii strain C4, Candidatus Lindowbacteria bacterium RIFCSPLOWO2, Desulfovibrio inopinatus (e.g., DSM 10711), Desulfonatronum thiodismutans (e.g., strain MLF-1), Elusimicrobia bacterium RIFOXYA12, Omnitrophica WOR_2 bacterium RIFCSPHIGHO2, Opitutaceae bacterium TAV5, Phycisphaerae bacterium ST-NAGAB-D1, Planctomycetes bacterium RBG_13_46_10, Spirochaetes bacterium GWB1_27_13, Verrucomicrobiaceae bacterium UBA2429, Tuberibacillus calidus (e.g., DSM 17572), Bacillus thermoamylovorans (e.g., strain B4166), Brevibacillus sp. CF112, Bacillus sp. NSP2.1, Desulfatirhabdium butyrativorans (e.g., DSM 18734), Alicyclobacillus herbarius (e.g., DSM 13609), Citrobacter freundii (e.g., ATCC 8090), Brevibacillus agri (e.g., BAB-2500), Methylobacterium nodulans (e.g., ORS 2060).

[0184] In one aspect, the CRISPR-Cas protein is a Cas12b from Table 2A or Table 2B. In certain embodiments, the CRISPR-Cas protein is a Cas12b from a thermostable species, for example Alicyclobacillus acidiphilus (AapCas12b). When the Aap protein is utilized, a related guide can be used, for example from the same or another Alicyclobacillus species, e.g. Alicyclobacillus acidoterrestrus (AacCas12b). In an aspect, the guide comprises at least 95%, 96%, 97% or more sequence identity to the DR and/or the tracr sequence from Aac. In certain embodiments, the AapCas12b protein comprises a sequence with 80%, 85%, 90%, 95% identity to, or consisting of the sequence:

(SEQ ID NO: 61995)
MAVKSMKVKLRLDNMPEIRAGLWKLHTEVNAGVRY
YTEWLSLLRQENLYRRSPNGDGEQECYKTAEECKA
ELLERLRARQVENGHCGPAGSDDELLQLARQLYEL
LVPQAIGAKGDAQQIARKFLSPLADKDAVGGLGIA
KAGNKPRWVRMREAGEPGWEEEKAKAEARKSTDRT
ADVLRALADFGLKPLMRVYTDSDMSSVQWKPLRKG
QAVRTWDRDMFQQAIERMMSWESWNQRVGEAYAKL
VEQKSRFEQKNFVGQEHLVQLVNQLQQDMKEASHG
LESKEQTAHYLTGRALRGSDKVFEKWEKLDPDAPF
DLYDTEIKNVQRRNTRRFGSHDLFAKLAEPKYQAL
WREDASFLTRYAVYNSIVRKLNHAKMFATFTLPDA
TAHPIWTRFDKLGGNLHQYTFLFNEFGEGRHAIRF
QKLLTVEDGVAKEVDDVTVPISMSAQLDDLLPRDP
HELVALYFQDYGAEQHLAGEFGGAKIQYRRDQLNH
LHARRGARDVYLNLSVRVQSQSEARGERRPPYAAV
FRLVGDNHRAFVHFDKLSDYLAEHPDDGKLGSEGL
LSGLRVMSVDLGLRTSASISVFRVARKDELKPNSE
GRVPFCFPIEGNENLVAVHERSQLLKLPGETESKD
LRAIREERQRTLRQLRTQLAYLRLLVRCGSEDVGR
RERSWAKLIEQPMDANQMTPDWREAFEDELQKLKS
LYGICGDREWTEAVYESVRRVWRHMGKQVRDWRKD
VRSGERPKIRGYQKDVVGGNSIEQIEYLERQYKFL
KSWSFFGKVSGQVIRAEKGSRFAITLREHIDHAKE
DRLKKLADRIIMEALGYVYALDDERGKGKWVAKYP
PCQLILLEELSEYQFNNDRPPSENNQLMQWSHRGV
FQELLNQAQVHDLLVGTMYAAFSSRFDARTGAPGI
RCRRVPARCAREQNPEPFPWWLNKFVAEHKLDGCP
LRADDLIPTGEGEFFVSPFSAEEGDFHQIHADLNA
AQNLQRRLWSDFDISQIRLRCDWGEVDGEPVLIPR
TTGKRTADSYGNKVFYTKTGVTYYERERGKKRRKV
FAQEELSEEEAELLVEADEAREKSVVLMRDPSGII
NRGDWTRQKEFWSMVNQRIEGYLVKQIRSRVRLQE
SACENTGDI*.

[0185] In an aspect, the CRISPR-Cas protein is a BrCas12b. In certain embodiments, the BrCas12b protein comprises a sequence with 80%, 85%, 90%, 95% identity to, or consisting of the sequence:

(SEQ ID NO: 61996)
MPVRSFKVKLVTRSGDAEHMLQLRRGLWKTHEIVN
QGIAYYMNKLALMRQEPYAGKSREVVRLELLHSLR
AQQKRNNWTGDAGTDDEILNLSRRLYELLVPSAIG
EKGDAQMLSRKFLSPLVDPNSEGGKGTAKSGRKPR
WMKMREEGHPDWEAEREKDRAKKAADPTASILNDL
EAFGLRPLFPLFTDEQKGIQWLPKQKRQFVRTFDR
DMFQQALERMLSWESWNRRVAEEYQKLQAQRDELY
AKYLADGGAWLEALQSFEKQREVELAEESFAAKSE
YLITRRQIRGWKQVYEKWSQLPEHAAQEQFWQVVA
DVQTSLPGAFGDPKVYQRGGNIHDYEISQNGKQYQ
VTFSRLLWPENETWVERENVTVAIGASQQLKRQIR
LDGYADKKQKVRYRDYSSGIELTGVLGGAKIQFDR
RHLRKASNRLADGETGPVYLNVVVDIEPFLAMRNG
RLQTPIGQVLQVNTKDWPKVTGYKPAELISWIQNS
PLAVGTGVNTIEAGMRVMSVDLGQRSAAAVSIFEV
MRQKPAEQETKLFYPIAVTGLYAVHRRSLLLRLPG
EKISDEIEQQRKIRAHARSLVRYQIRLLADVLRLH
TRGTAEQRRAKLDELLATLQTKQELDQKLWQTELE
KLFDYIHEPAERWQQALVAAHRTLEPVIGQAVRHW
RKSLRIDRKGLAGMSMWNIEELEETRKLLIAWSKH
SRVPGEPNRLDKEETFAPQQLQHIQNVKDDRLKQM
ANLLVMTALGYKYDEAEKQWKEAYPACQMILFEDL
SRYRFALDRPRRENNRLMKWAHRSIPRLVYLQGEL
FGIQVGDVYSAYTSRFHAKTGAPGIRCHALKEEDL
QPNSYVVKQLIKDGFIREDQTGSLKPGQIVPWSGG
ELFVTLADRSGSRLAVIHADINAAQNLQKRFWQQN
TEIFRVPCKVTTSGLIPAYDKMKKLFGKGYFAKIN
QTDTSEVYVWEHSAKMKGKTTPADPAEEGVFDESL
TDEMEELEDSQEGYKTLFRDPSGFFWSSDRWLPQK
EFWFWVKRRIEKKLREQLQ.

[0186] In an aspect, when the CRISPR-Cas protein is a BrCas12b, the tracrRNA can be selected from one of tracrRNA design 1-tracrRNA design 6 as detailed below: tracrRdesign

1:
(SEQ ID NO: 61997)
TGCAGGTTAGTGGAAATATAGATAGCCGTTGTGA
CTGAGTGACGTGTTAGGTCACCGTAGCACATGAC
ACAACTGCACTGGTCAGCCTGTAGCTAACCACCT
TCATTATATCTAGTTTTTCCAAC
tracrRNA design
2:
(SEQ ID NO: 61998)
GTTGTGACTGAGTGACGTGTTAGGTCACCGTAGC
ACATGACACAACTGCACTGGTCAGCCTGTAGCTA
ACCACCTTCATTATATCTAGTTTTTCCAAC
tracrRNA design
3:
(SEQ ID NO: 61999)
TGACACAACTGCACTGGTCAGCCTGTAGCTAACC
ACCTTCATTATATCTAGTTTTTCCAAC
tracrRNA design
4:
(SEQ ID NO: 62000)
GAAGGTGGTTAGCTACAGGCTGACCAGTGCAGTT
GTGTCATGTGCTACGGTGACCTAACACGTCACTC
AGTCACAACGGCTATCTATATTTCCACTAAC
tracrRNA design
5:
(SEQ ID NO: 62001)
GTTGGAAAAACTAGATATAATGAAGGTGGTTAGC
TACAGGCTGACCAGTGCAGTTGTGTCATGTGCTA
CGGTGACCTAACACGTCACTCAGTCACAACGGCT
ATCTATATTTCCACTAAC
tracrRNA design
6:
(SEQ ID NO: 62002)
GTGCAGTTGTGTCATGTGCTACGGTGACCTAACA
CGTCACTCAGTCACAACGGCTATCTATATTTCCA
CTAAC

[0187] In an aspect, when BrCas12b is utilized, the crNA design can be selected from one of crRNAdesign 1 to crRNA design 3, wherein N represents the spacer design:

crRNA design 1:
(SEQ ID NO: 62003)
GTCCGTTTCGTTAGTGGAAATGTAGATGGTTAGC
ACNNNNNNNNNNNNNNNNNNNNNNNNNN
crRNA design 2:
(SEQ ID NO: 62004)
TAGTGGAAATGTAGATGGTTAGCACNNNNNNNNN
NNNNNNNNNNNNNNNNNN
crRNA design 3
(SEQ ID NO: 62005)
GTTAGTGGAAATCTAGATGGTTAGCACNNNNNNN
NNNNNNNNNNNNNNNNNNNN

[0188] In certain example embodiments, the guide sequence is selected from SEQ ID NOS: 40,500-61,643 or Table 10 or Table 16.

[0189] The effector protein may comprise a chimeric effector protein comprising a first fragment from a first effector protein (e.g., a C2c1) ortholog and a second fragment from a second effector (e.g., a C2c1) protein ortholog, and wherein the first and second effector protein orthologs are different. At least one of the first and second effector protein (e.g., a C2c1) orthologs may comprise an effector protein (e.g., a C2c1) from an organism comprising Alicyclobacillus, Desulfovibrio, Desulfonatronum, Opitutaceae, Tuberibacillus, Bacillus, Brevibacillus, Candidatus, Desulfatirhabdium, Elusimicrobia, Citrobacter, Methylobacterium, Omnitrophicai, Phycisphaerae, Planctomycetes, Spirochaetes, and Verrucomicrobiaceae; e.g., a chimeric effector protein comprising a first fragment and a second fragment wherein each of the first and second fragments is selected from a C2c1 of an organism comprising Alicyclobacillus, Desulfovibrio, Desulfonatronum, Opitutaceae, Tuberibacillus, Bacillus, Brevibacillus, Candidatus, Desulfatirhabdium, Elusimicrobia, Citrobacter, Methylobacterium, Omnitrophicai, Phycisphaerae, Planctomycetes, Spirochaetes, and Verrucomicrobiaceae wherein the first and second fragments are not from the same bacteria; for instance a chimeric effector protein comprising a first fragment and a second fragment wherein each of the first and second fragments is selected from a C2c1 of Alicyclobacillus acidoterrestris (e.g., ATCC 49025), Alicyclobacillus contaminans (e.g., DSM 17975), Alicyclobacillus macrosporangiidus (e.g. DSM 17980), Bacillus hisashii strain C4, Candidatus Lindowbacteria bacterium RIFCSPLOWO2, Desulfovibrio inopinatus (e.g., DSM 10711), Desulfonatronum thiodismutans (e.g., strain MLF-1), Elusimicrobia bacterium RIFOXYA12, Omnitrophica WOR_2 bacterium RIFCSPHIGHO2, Opitutaceae bacterium TAV5, Phycisphaerae bacterium ST-NAGAB-D1, Planctomycetes bacterium RBG_13_46_10, Spirochaetes bacterium GWB1_27_13, Verrucomicrobiaceae bacterium UBA2429, Tuberibacillus calidus (e.g., DSM 17572), Bacillus thermoamylovorans (e.g., strain B4166), Brevibacillus sp. CF112, Bacillus sp. NSP2.1, Desulfatirhabdium butyrativorans (e.g., DSM 18734), Alicyclobacillus herbarius (e.g., DSM 13609), Citrobacter freundii (e.g., ATCC 8090), Brevibacillus agri (e.g., BAB-2500), Methylobacterium nodulans (e.g., ORS 2060), wherein the first and second fragments are not from the same bacteria.

[0190] In a more preferred embodiment, the C2c1p is derived from a bacterial species selected from Alicyclobacillus acidoterrestris (e.g., ATCC 49025), Alicyclobacillus contaminans (e.g., DSM 17975), Alicyclobacillus macrosporangiidus (e.g. DSM 17980), Bacillus hisashii strain C4, Candidatus Lindowbacteria bacterium RIFCSPLOWO2, Desulfovibrio inopinatus (e.g., DSM 10711), Desulfonatronum thiodismutans (e.g., strain MLF-1), Elusimicrobia bacterium RIFOXYA12, Omnitrophica WOR_2 bacterium RIFCSPHIGHO2, Opitutaceae bacterium TAV5, Phycisphaerae bacterium ST-NAGAB-D1, Planctomycetes bacterium RBG_13_46_10, Spirochaetes bacterium GWB1_27_13, Verrucomicrobiaceae bacterium UBA2429, Tuberibacillus calidus (e.g., DSM 17572), Bacillus thermoamylovorans (e.g., strain B4166), Brevibacillus sp. CF112, Bacillus sp. NSP2.1, Desulfatirhabdium butyrativorans (e.g., DSM 18734), Alicyclobacillus herbarius (e.g., DSM 13609), Citrobacter freundii (e.g., ATCC 8090), Brevibacillus agri (e.g., BAB-2500), Methylobacterium nodulans (e.g., ORS 2060). In certain embodiments, the C2c1p is derived from a bacterial species selected from Alicyclobacillus acidoterrestris (e.g., ATCC 49025), Alicyclobacillus contaminans (e.g., DSM 17975).

[0191] In particular embodiments, the homologue or orthologue of C2c1 as referred to herein has a sequence homology or identity of at least 80%, more preferably at least 85%, even more preferably at least 90%, such as for instance at least 95% with C2c1. In further embodiments, the homologue or orthologue of C2c1 as referred to herein has a sequence identity of at least 80%, more preferably at least 85%, even more preferably at least 90%, such as for instance at least 95% with the wild type C2c1. Where the C2c1 has one or more mutations (mutated), the homologue or orthologue of said C2c1 as referred to herein has a sequence identity of at least 80%, more preferably at least 85%, even more preferably at least 90%, such as for instance at least 95% with the mutated C2c1.

[0192] In an embodiment, the C2c1 protein may be an ortholog of an organism of a genus which includes, but is not limited to Alicyclobacillus, Desulfovibrio, Desulfonatronum, Opitutaceae, Tuberibacillus, Bacillus, Brevibacillus, Candidatus, Desulfatirhabdium, Elusimicrobia, Citrobacter, Methylobacterium, Omnitrophicai, Phycisphaerae, Planctomycetes, Spirochaetes, and Verrucomicrobiaceae; in particular embodiments, the type V Cas protein may be an ortholog of an organism of a species which includes, but is not limited to Alicyclobacillus acidoterrestris (e.g., ATCC 49025), Alicyclobacillus contaminans (e.g., DSM 17975), Alicyclobacillus macrosporangiidus (e.g. DSM 17980), Bacillus hisashii strain C4, Candidatus Lindowbacteria bacterium RIFCSPLOWO2, Desulfovibrio inopinatus (e.g., DSM 10711), Desulfonatronum thiodismutans (e.g., strain MLF-1), Elusimicrobia bacterium RIFOXYA12, Omnitrophica WOR_2 bacterium RIFCSPHIGHO2, Opitutaceae bacterium TAV5, Phycisphaerae bacterium ST-NAGAB-D1, Planctomycetes bacterium RBG_13_46_10, Spirochaetes bacterium GWB1_27_13, Verrucomicrobiaceae bacterium UBA2429, Tuberibacillus calidus (e.g., DSM 17572), Bacillus thermoamylovorans (e.g., strain B4166), Brevibacillus sp. CF112, Bacillus sp. NSP2.1, Desulfatirhabdium butyrativorans (e.g., DSM 18734), Alicyclobacillus herbarius (e.g., DSM 13609), Citrobacter freundii (e.g., ATCC 8090), Brevibacillus agri (e.g., BAB-2500), Methylobacterium nodulans (e.g., ORS 2060),In particular embodiments, the homologue or orthologue of C2c1 as referred to herein has a sequence homology or identity of at least 80%, more preferably at least 85%, even more preferably at least 90%, such as for instance at least 95% with one or more of the C2c1 sequences disclosed herein. In further embodiments, the homologue or orthologue of C2c1 as referred to herein has a sequence identity of at least 80%, more preferably at least 85%, even more preferably at least 90%, such as for instance at least 95% with the wild type AacC2c1 or BthC2c1.

[0193] In particular embodiments, the C2c1 protein of the invention has a sequence homology or identity of at least 60%, more particularly at least 70, such as at least 80%, more preferably at least 85%, even more preferably at least 90%, such as for instance at least 95% with AacC2c1 or BthC2c1. In further embodiments, the C2c1 protein as referred to herein has a sequence identity of at least 60%, such as at least 70%, more particularly at least 80%, more preferably at least 85%, even more preferably at least 90%, such as for instance at least 95% with the wild type AacC2c1. In particular embodiments, the C2c1 protein of the present invention has less than 60% sequence identity with AacC2c1. The skilled person will understand that this includes truncated forms of the C2c1 protein whereby the sequence identity is determined over the length of the truncated form.

[0194] In certain methods according to the present invention, the CRISPR-Cas protein is preferably mutated with respect to a corresponding wild-type enzyme such that the mutated CRISPR-Cas protein lacks the ability to cleave one or both DNA strands of a target locus containing a target sequence. In particular embodiments, one or more catalytic domains of the C2c1 protein are mutated to produce a mutated Cas protein which cleaves only one DNA strand of a target sequence.

[0195] In particular embodiments, the CRISPR-Cas protein may be mutated with respect to a corresponding wild-type enzyme such that the mutated CRISPR-Cas protein lacks substantially all DNA cleavage activity. In some embodiments, a CRISPR-Cas protein may be considered to substantially lack all DNA and/or RNA cleavage activity when the cleavage activity of the mutated enzyme is about no more than 25%, 10%, 5%, 1%, 0.1%, 0.01%, or less of the nucleic acid cleavage activity of the non-mutated form of the enzyme; an example can be when the nucleic acid cleavage activity of the mutated form is nil or negligible as compared with the non-mutated form.

[0196] In certain embodiments of the methods provided herein the CRISPR-Cas protein is a mutated CRISPR-Cas protein which cleaves only one DNA strand, i.e. a nickase. More particularly, in the context of the present invention, the nickase ensures cleavage within the non-target sequence, i.e. the sequence which is on the opposite DNA strand of the target sequence and which is 3′ of the PAM sequence. By means of further guidance, and without limitation, an arginine-to-alanine substitution (R911A) in the Nuc domain of C2c1 from Alicyclobacillus acidoterrestris converts C2c1 from a nuclease that cleaves both strands to a nickase (cleaves a single strand). It will be understood by the skilled person that where the enzyme is not AacC2c1, a mutation may be made at a residue in a corresponding position. Cas 12c orthologs

[0197] In certain embodiments, the effector protein, particularly a Type V loci effector protein, more particularly a Type V-C loci effector protein, even more particularly a C2c3p, may originate, may be isolated or may be derived from a bacterial metagenome selected from the group consisting of the bacterial metagenomes listed in the Table in FIG. 43A-43B of PCT/US2016/038238, specifically incorporated by reference, which presents analysis of the Type-V-C Cas12c loci.

[0198] In certain embodiments, the effector protein, particularly a Type V loci effector protein, more particularly a Type V-C loci effector protein, even more particularly a C2c3p, may comprise, consist essentially of or consist of an amino acid sequence selected from the group consisting of amino acid sequences shown in the multiple sequence alignment in FIG. 13I of PCT/US2016/038238, specifically incorporated by reference.

[0199] In certain embodiments, a Type V-C locus as intended herein may encode Cas1 and the C2c3p effector protein. See FIG. 14 of PCT/US2016/038238, specifically incorporated by reference, depicting the genomic architecture of the Cas12c CRISPR-Cas loci. In certain embodiments, a Cas1 protein encoded by a Type V-C locus as intended herein may cluster with Type I-B system. See FIGS. 10A and 10B and FIG. 10C-V of PCT/US2016/038238, specifically incorporated by reference, illustrating a Cas1 tree including Cas1 encoded by representative Type V-C loci.

[0200] In certain embodiments, the effector protein, particularly a Type V loci effector protein, more particularly a Type V-C loci effector protein, even more particularly a C2c3p, such as a native C2c3p, may be about 1100 to about 1500 amino acids long, e.g., about 1100 to about 1200 amino acids long, or about 1200 to about 1300 amino acids long, or about 1300 to about 1400 amino acids long, or about 1400 to about 1500 amino acids long, e.g., about 1100, about 1200, about 1300, about 1400 or about 1500 amino acids long, or at least about 1100, at least about 1200, at least about 1300, at least about 1400 or at least about 1500 amino acids long.

[0201] In certain embodiments, the effector protein, particularly a Type V loci effector protein, more particularly a Type V-C loci effector protein, even more particularly a C2c3p, and preferably the C-terminal portion of said effector protein, comprises the three catalytic motifs of the RuvC-like nuclease (i.e., RuvCI, RuvCII and RuvCIII). In certain embodiments, said effector protein, and preferably the C-terminal portion of said effector protein, may further comprise a region corresponding to the bridge helix (also known as arginine-rich cluster) that in Cas9 protein is involved in crRNA-binding. In certain embodiments, said effector protein, and preferably the C-terminal portion of said effector protein, may further comprise a Zn finger region. Preferably, the Zn-binding cysteine residue(s) may be conserved in C2c3p. In certain embodiments, said effector protein, and preferably the C-terminal portion of said effector protein, may comprise the three catalytic motifs of the RuvC-like nuclease (i.e., RuvCI, RuvCII and RuvCIII), the region corresponding to the bridge helix, and the Zn finger region, preferably in the following order, from N to C terminus: RuvCI-bridge helix-RuvCII-Zinc finger-RuvCIII. See FIGS. 13A and 13C of PCT/US2016/038238, specifically incorporated by reference, for illustration of representative Type V-C effector proteins domain architecture.

[0202] In certain embodiments, Type V-C loci as intended herein may comprise CRISPR repeats between 20 and 30 bp long, more typically between 22 and 27 bp long, yet more typically 25 bp long, e.g., 20, 21, 22, 23, 24, 25, 26, 27, 28, 29, or 30 bp long.

[0203] Orthologous proteins may but need not be structurally related, or are only partially structurally related. In particular embodiments, the homologue or orthologue of a Type V protein such as Cas12c as referred to herein has a sequence homology or identity of at least 80%, more preferably at least 85%, even more preferably at least 90%, such as for instance at least 95% with a Cas12c. In further embodiments, the homologue or orthologue of a Type V Cas12c as referred to herein has a sequence identity of at least 80%, more preferably at least 85%, even more preferably at least 90%, such as for instance at least 95% with the wild type Cas12c.

[0204] In an embodiment, the Type V RNA-targeting Cas protein may be a Cas12c ortholog of an organism of a genus which includes but is not limited to Corynebacter, Sutterella, Legionella, Treponema, Filifactor, Eubacterium, Streptococcus, Lactobacillus, Mycoplasma, Bacteroides, Flaviivola, Flavobacterium, Sphaerochaeta, Azospirillum, Gluconacetobacter, Neisseria, Roseburia, Parvibaculum, Staphylococcus, Nitratifractor, Mycoplasma and Campylobacter.

[0205] In an embodiment, the Cas12c or an ortholog or homolog thereof, may comprise one or more mutations (and hence nucleic acid molecule(s) coding for same may have mutation(s). The mutations may be artificially introduced mutations and may include but are not limited to one or more mutations in a catalytic domain. Examples of catalytic domains with reference to a Cas9 enzyme may include but are not limited to RuvC I, RuvC II, RuvC III and HNH domains. In an embodiment, the Cas12c or an ortholog or homolog thereof, may comprise one or more mutations. The mutations may be artificially introduced mutations and may include but are not limited to one or more mutations in a catalytic domain. Examples of catalytic domains with reference to a Cas enzyme may include but are not limited to RuvC I, RuvC II, RuvC III, HNH domains, and HEPN domains.

### Guide Sequences

[0206] As used herein, the term “guide sequence” and “guide molecule” in the context of a CRISPR-Cas system, comprises any polynucleotide sequence having sufficient complementarity with a target nucleic acid sequence to hybridize with the target nucleic acid sequence and direct sequence-specific binding of a nucleic acid-targeting complex to the target nucleic acid sequence. The guide sequences made using the methods disclosed herein may be a full-length guide sequence, a truncated guide sequence, a full-length sgRNA sequence, a truncated sgRNA sequence, or an E+F sgRNA sequence. In some embodiments, the degree of complementarity of the guide sequence to a given target sequence, when optimally aligned using a suitable alignment algorithm, is about or more than about 50%, 60%, 75%, 80%, 85%, 90%, 95%, 97.5%, 99%, or more. In certain example embodiments, the guide molecule comprises a guide sequence that may be designed to have at least one mismatch with the target sequence, such that a RNA duplex formed between the guide sequence and the target sequence. Accordingly, the degree of complementarity is preferably less than 99%. For instance, where the guide sequence consists of 24 nucleotides, the degree of complementarity is more particularly about 96% or less. In particular embodiments, the guide sequence is designed to have a stretch of two or more adjacent mismatching nucleotides, such that the degree of complementarity over the entire guide sequence is further reduced. For instance, where the guide sequence consists of 24 nucleotides, the degree of complementarity is more particularly about 96% or less, more particularly, about 92% or less, more particularly about 88% or less, more particularly about 84% or less, more particularly about 80% or less, more particularly about 76% or less, more particularly about 72% or less, depending on whether the stretch of two or more mismatching nucleotides encompasses 2, 3, 4, 5, 6 or 7 nucleotides, etc. In some embodiments, aside from the stretch of one or more mismatching nucleotides, the degree of complementarity, when optimally aligned using a suitable alignment algorithm, is about or more than about 50%, 60%, 75%, 80%, 85%, 90%, 95%, 97.5%, 99%, or more. Optimal alignment may be determined with the use of any suitable algorithm for aligning sequences, non-limiting example of which include the Smith-Waterman algorithm, the Needleman-Wunsch algorithm, algorithms based on the Burrows-Wheeler Transform (e.g., the Burrows Wheeler Aligner), ClustalW, Clustal X, BLAT, Novoalign (Novocraft Technologies; available at www.novocraft.com), ELAND (Illumina, San Diego, Calif.), SOAP (available at soap.genomics.org.cn), and Maq (available at maq.sourceforge.net). The ability of a guide sequence (within a nucleic acid-targeting guide RNA) to direct sequence-specific binding of a nucleic acid-targeting complex to a target nucleic acid sequence may be assessed by any suitable assay. For example, the components of a nucleic acid-targeting CRISPR system sufficient to form a nucleic acid-targeting complex, including the guide sequence to be tested, may be provided to a host cell having the corresponding target nucleic acid sequence, such as by transfection with vectors encoding the components of the nucleic acid-targeting complex, followed by an assessment of preferential targeting (e.g., cleavage) within the target nucleic acid sequence, such as by Surveyor assay as described herein. Similarly, cleavage of a target nucleic acid sequence (or a sequence in the vicinity thereof) may be evaluated in a test tube by providing the target nucleic acid sequence, components of a nucleic acid-targeting complex, including the guide sequence to be tested and a control guide sequence different from the test guide sequence, and comparing binding or rate of cleavage at or in the vicinity of the target sequence between the test and control guide sequence reactions. Other assays are possible, and will occur to those skilled in the art. A guide sequence, and hence a nucleic acid-targeting guide RNA may be selected to target any target nucleic acid sequence.

[0207] As used herein, the term “guide sequence,” “crRNA,” “guide RNA,” or “single guide RNA,” or “gRNA” refers to a polynucleotide comprising any polynucleotide sequence having sufficient complementarity with a target nucleic acid sequence to hybridize with the target nucleic acid sequence and to direct sequence-specific binding of a RNA-targeting complex comprising the guide sequence and a CRISPR effector protein to the target nucleic acid sequence. In some example embodiments, the degree of complementarity, when optimally aligned using a suitable alignment algorithm, is about or more than about 50%, 60%, 75%, 80%, 85%, 90%, 95%, 97.5%, 99%, or more. Optimal alignment may be determined with the use of any suitable algorithm for aligning sequences, non-limiting example of which include the Smith-Waterman algorithm, the Needleman-Wunsch algorithm, algorithms based on the Burrows-Wheeler Transform (e.g., the Burrows Wheeler Aligner), ClustalW, Clustal X, BLAT, Novoalign (Novocraft Technologies; available at www.novocraft.com), ELAND (Illumina, San Diego, Calif.), SOAP (available at soap.genomics.org.cn), and Maq (available at maq.sourceforge.net). The ability of a guide sequence (within a nucleic acid-targeting guide RNA) to direct sequence-specific binding of a nucleic acid-targeting complex to a target nucleic acid sequence may be assessed by any suitable assay. For example, the components of a nucleic acid-targeting CRISPR system sufficient to form a nucleic acid-targeting complex, including the guide sequence to be tested, may be provided to a host cell having the corresponding target nucleic acid sequence, such as by transfection with vectors encoding the components of the nucleic acid-targeting complex, followed by an assessment of preferential targeting (e.g., cleavage) within the target nucleic acid sequence, such as by Surveyor assay as described herein. Similarly, cleavage of a target nucleic acid sequence may be evaluated in a test tube by providing the target nucleic acid sequence, components of a nucleic acid-targeting complex, including the guide sequence to be tested and a control guide sequence different from the test guide sequence, and comparing binding or rate of cleavage at the target sequence between the test and control guide sequence reactions. Other assays are possible, and will occur to those skilled in the art. A guide sequence, and hence a nucleic acid-targeting guide may be selected to target any target nucleic acid sequence. The target sequence may be DNA. The target sequence may be any RNA sequence. In some embodiments, the target sequence may be a sequence within a RNA molecule selected from the group consisting of messenger RNA (mRNA), pre-mRNA, ribosomal RNA (rRNA), transfer RNA (tRNA), micro-RNA (miRNA), small interfering RNA (siRNA), small nuclear RNA (snRNA), small nucleolar RNA (snoRNA), double stranded RNA (dsRNA), non-coding RNA (ncRNA), long non-coding RNA (lncRNA), and small cytoplasmatic RNA (scRNA). In some preferred embodiments, the target sequence may be a sequence within a RNA molecule selected from the group consisting of mRNA, pre-mRNA, and rRNA. In some preferred embodiments, the target sequence may be a sequence within a RNA molecule selected from the group consisting of ncRNA, and lncRNA. In some more preferred embodiments, the target sequence may be a sequence within an mRNA molecule or a pre-mRNA molecule.

[0208] In certain embodiments, the guide sequence or spacer length of the guide molecules is from 15 to 50 nt. In certain embodiments, the spacer length of the guide RNA is at least 15 nucleotides. In certain embodiments, the spacer length is from 15 to 17 nt, e.g., 15, 16, or 17 nt, from 17 to 20 nt, e.g., 17, 18, 19, or 20 nt, from 20 to 24 nt, e.g., 20, 21, 22, 23, or 24 nt, from 23 to 25 nt, e.g., 23, 24, or 25 nt, from 24 to 27 nt, e.g., 24, 25, 26, or 27 nt, from 27-30 nt, e.g., 27, 28, 29, or 30 nt, from 30-35 nt, e.g., 30, 31, 32, 33, 34, or 35 nt, or 35 nt or longer. In certain example embodiment, the guide sequence is 15, 16, 17, 18, 19, 20, 21, 22, 23, 24, 25, 26, 27, 28, 29, 30, 31, 32, 33, 34, 35, 36, 37, 38, 39, 40, 41, 42, 43, 44, 45, 46, 47, 48, 49, 50, 51, 52, 53, 54, 55, 56, 57, 58, 59, 60, 61, 62, 63, 64, 65, 66, 67, 68, 69, 70, 71, 72, 73, 74, 75, 76, 77, 78, 79, 80, 81, 82, 83, 84, 85, 86, 87, 88, 89, 90, 91, 92, 93, 94, 95, 96, 97, 98, 99, or 100 nt.

[0209] The guide may be derived from a different species than the Cas protein. In certain embodiments, the CRISPR-Cas protein is a Cas12b from a thermostable species, for example Alicyclobacillus acidiphilus (Aap). When the Aap Cas protein is utilized, a related guide can be used, for example from the same or another Alicyclobacillus species, e.g. Alicyclobacillus acidoterrestrus (Aac). In an aspect, the guide comprises at least 95%, 96%, 97% or more sequence similarity to the DR and/or the tracr sequence from Aac Cas12b. The guide can be designed similarly for other Cas proteins, deriving the guide from a different species than the Cas protein species.

[0210] In an aspect, the CRISPR-Cas protein is a Cas12b from Aap, and the guide molecule is derived from Aac, or an Alicyclobacillus CRISPR Cas system direct repeat and tracrRNA. In certain embodiments, the guide is designed with a spacer sequence to target a molecule of interest, for example, SARS-CoV-2. While any portion of the SARS-CoV-2 can be targeted, as described elsewhere herein, in an aspect, the spacer is designed to target the Nucleocapsid protein of the SARS-CoV-2. In certain embodiments, the Aac guide has 90%, 91%, 92%, 93%, 94%, 95%, 96%, 97%, 98%, 99% sequence similarity to any one of Type 1 to Type 5 guide sequence below.

[0211] In an aspect, the guide comprises:

Type 1:
(SEQ ID NO: 62006)
GTCTAGAGGACAGAATTTTTCAACGGGTGTGCCA
ATGGCCACTTTCCAGGTGGCAAAGCCCGTTGAGC
TTCTCAAATCTGAGAAGTGGCAC,
Type2:
(SEQ ID NO: 62007)
GTCTAAAGGACAGAATTTTTCAACGGGTGTGCCA
ATGGCCACTTTCCAGGTGGCAAAGCCCGTTGAAC
TTCTCAAATCTGAGAAGTGGCAC
Type 3:
(SEQ ID NO: 62008)
GTCTAGAGGACAGAATTTTTCAACGGGTGTGCCA
ATGGCCACTTTCCAGGTGGCAAAGCCCGTTGAAC
TTCTCAAATCTGAGAAGTGGCAC
Type 4:
(SEQ ID NO: 62009)
GTCTAAAGGACAGAATTTTTCAACGGGTGTGCCA
ATGGCCACTTTCCAGGTGGCAAAGCCCGTTGAGC
TTCTCAAATCTGAGAAGTGGCAC
or
Type 5:
(SEQ ID NO: 62010)
GTCTAGAGGACAGAATTTTTCAACGGGTGTGCCA
ATGGCCACTTTCCAGGTGGCAAAGCCCGTTGAAC
TTCTCAAATCTGCGAAGTGGCAC.

[0212] In certain embodiments, preservation of the underlined portions of the following guide sequence are maintained:

(SEQ ID NO: 62011)
GTCTAGAGGACAGAATTTTTCAACGGGTGTGC
CAATGGCCACTTTCCAGGTGGCAAAGCCCGTT
GAGCTTCTCAAATCTGAGAAGTGGCAC

[0213] However, importance of particular bases of the guide sequence are not limited to the underlined areas in SEQ ID NO: 62011, and mutations of these bases can be performed when structure and activity of the guide sequence can be maintained. Such mutations can be tested and optimized in accordance with the guide optimization methods detailed elsewhere herein. In an aspect, the guide preserves the secondary structure as detailed in FIG. 45. In some embodiments, the sequence of the guide molecule (direct repeat and/or spacer) is selected to reduce the degree secondary structure within the guide molecule. In some embodiments, about or less than about 75%, 50%, 40%, 30%, 25%, 20%, 15%, 10%, 5%, 1%, or fewer of the nucleotides of the nucleic acid-targeting guide RNA participate in self-complementary base pairing when optimally folded. Optimal folding may be determined by any suitable polynucleotide folding algorithm. Some programs are based on calculating the minimal Gibbs free energy. An example of one such algorithm is mFold, as described by Zuker and Stiegler (Nucleic Acids Res. 9 (1981), 133-148). Another example folding algorithm is the online webserver RNAfold, developed at Institute for Theoretical Chemistry at the University of Vienna, using the centroid structure prediction algorithm (see e.g., A. R. Gruber et al., 2008, Cell 106(1): 23-24; and P A Carr and G M Church, 2009, Nature Biotechnology 27(12): 1151-62).

[0214] In some embodiments, it is of interest to reduce the susceptibility of the guide molecule to RNA cleavage, such as to cleavage by Cas13. Accordingly, in particular embodiments, the guide molecule is adjusted to avoid cleavage by Cas13 or other RNA-cleaving enzymes.

[0215] In certain embodiments, the guide molecule comprises non-naturally occurring nucleic acids and/or non-naturally occurring nucleotides and/or nucleotide analogs, and/or chemically modifications. Preferably, these non-naturally occurring nucleic acids and non-naturally occurring nucleotides are located outside the guide sequence. Non-naturally occurring nucleic acids can include, for example, mixtures of naturally and non-naturally occurring nucleotides. Non-naturally occurring nucleotides and/or nucleotide analogs may be modified at the ribose, phosphate, and/or base moiety. In an embodiment of the invention, a guide nucleic acid comprises ribonucleotides and non-ribonucleotides. In one such embodiment, a guide comprises one or more ribonucleotides and one or more deoxyribonucleotides. In an embodiment of the invention, the guide comprises one or more non-naturally occurring nucleotide or nucleotide analog such as a nucleotide with phosphorothioate linkage, a locked nucleic acid (LNA) nucleotides comprising a methylene bridge between the 2′ and 4′ carbons of the ribose ring, or bridged nucleic acids (BNA). Other examples of modified nucleotides include 2′-O-methyl analogs, 2′-deoxy analogs, or 2′-fluoro analogs. Further examples of modified bases include, but are not limited to, 2-aminopurine, 5-bromo-uridine, pseudouridine, inosine, 7-methylguanosine. Examples of guide RNA chemical modifications include, without limitation, incorporation of 2′-O-methyl (M), 2′-O-methyl 3′phosphorothioate (MS), S-constrained ethyl(cEt), or 2′-O-methyl 3′thioPACE (MSP) at one or more terminal nucleotides. Such chemically modified guides can comprise increased stability and increased activity as compared to unmodified guides, though on-target vs. off-target specificity is not predictable. (See, Hendel, 2015, Nat Biotechnol. 33(9):985-9, doi: 10.1038/nbt.3290, published online 29 Jun. 2015 Ragdarm et al., 0215, PNAS, E7110-E7111; Allerson et al., J. Med. Chem. 2005, 48:901-904; Bramsen et al., Front. Genet., 2012, 3:154; Deng et al., PNAS, 2015, 112:11870-11875; Sharma et al., MedChemComm., 2014, 5:1454-1471; Hendel et al., Nat. Biotechnol. (2015) 33(9): 985-989; Li et al., Nature Biomedical Engineering, 2017, 1, 0066 DOI:10.1038/s41551-017-0066). In some embodiments, the 5′ and/or 3′ end of a guide RNA is modified by a variety of functional moieties including fluorescent dyes, polyethylene glycol, cholesterol, proteins, or detection tags. (See Kelly et al., 2016, J. Biotech. 233:74-83). In certain embodiments, a guide comprises ribonucleotides in a region that binds to a target RNA and one or more deoxyribonucletides and/or nucleotide analogs in a region that binds to Cas13. In an embodiment of the invention, deoxyribonucleotides and/or nucleotide analogs are incorporated in engineered guide structures, such as, without limitation, stem-loop regions, and the seed region. For Cas13 guide, in certain embodiments, the modification is not in the 5′-handle of the stem-loop regions. Chemical modification in the 5′-handle of the stem-loop region of a guide may abolish its function (see Li, et al., Nature Biomedical Engineering, 2017, 1:0066). In certain embodiments, at least 1, 2, 3, 4, 5, 6, 7, 8, 9, 10, 11, 12, 13, 14, 15, 16, 17, 18, 19, 20, 21, 22, 23, 24, 25, 26, 27, 28, 29, 30, 35, 40, 45, 50, or 75 nucleotides of a guide is chemically modified. In some embodiments, 3-5 nucleotides at either the 3′ or the 5′ end of a guide is chemically modified. In some embodiments, only minor modifications are introduced in the seed region, such as 2′-F modifications. In some embodiments, 2′-F modification is introduced at the 3′ end of a guide. In certain embodiments, three to five nucleotides at the 5′ and/or the 3′ end of the guide are chemicially modified with 2′-O-methyl (M), 2′-O-methyl 3′ phosphorothioate (MS), S-constrained ethyl(cEt), or 2′-O-methyl 3′ thioPACE (MSP). Such modification can enhance genome editing efficiency (see Hendel et al., Nat. Biotechnol. (2015) 33(9): 985-989). In certain embodiments, all of the phosphodiester bonds of a guide are substituted with phosphorothioates (PS) for enhancing levels of gene disruption. In certain embodiments, more than five nucleotides at the 5′ and/or the 3′ end of the guide are chemicially modified with 2′-O-Me, 2′-F or S-constrained ethyl(cEt). Such chemically modified guide can mediate enhanced levels of gene disruption (see Ragdarm et al., 0215, PNAS, E7110-E7111). In an embodiment of the invention, a guide is modified to comprise a chemical moiety at its 3′ and/or 5′ end. Such moieties include, but are not limited to amine, azide, alkyne, thio, dibenzocyclooctyne (DBCO), or Rhodamine. In certain embodiment, the chemical moiety is conjugated to the guide by a linker, such as an alkyl chain. In certain embodiments, the chemical moiety of the modified guide can be used to attach the guide to another molecule, such as DNA, RNA, protein, or nanoparticles. Such chemically modified guide can be used to identify or enrich cells generically edited by a CRISPR system (see Lee et al., eLife, 2017, 6:e25312, DOI:10.7554).

[0216] In some embodiments, a nucleic acid-targeting guide is selected to reduce the degree secondary structure within the nucleic acid-targeting guide. In some embodiments, about or less than about 75%, 50%, 40%, 30%, 25%, 20%, 15%, 10%, 5%, 1%, or fewer of the nucleotides of the nucleic acid-targeting guide participate in self-complementary base pairing when optimally folded. Optimal folding may be determined by any suitable polynucleotide folding algorithm. Some programs are based on calculating the minimal Gibbs free energy. An example of one such algorithm is mFold, as described by Zuker and Stiegler (Nucleic Acids Res. 9 (1981), 133-148). Another example folding algorithm is the online webserver RNAfold, developed at Institute for Theoretical Chemistry at the University of Vienna, using the centroid structure prediction algorithm (see e.g., A. R. Gruber et al., 2008, Cell 106(1): 23-24; and PA Carr and GM Church, 2009, Nature Biotechnology 27(12): 1151-62).

[0217] In some embodiments, a nucleic acid-targeting guide is designed or selected to modulate intermolecular interactions among guide molecules, such as among stem-loop regions of different guide molecules. It will be appreciated that nucleotides within a guide that base-pair to form a stem-loop are also capable of base-pairing to form an intermolecular duplex with a second guide and that such an intermolecular duplex would not have a secondary structure compatible with CRISPR complex formation. Accordingly, is useful to select or design DR sequences in order to modulate stem-loop formation and CRISPR complex formation. In some embodiments, about or less than about 75%, 50%, 40%, 30%, 25%, 20%, 15%, 10%, 5%, 1%, or fewer of nucleic acid-targeting guides are in intermolecular duplexes. It will be appreciated that stem-loop variation will often be within limits imposed by DR-CRISPR effector interactions. One way to modulate stem-loop formation or change the equilibrium between stem-loop and intermolecular duplex is to vary nucleotide pairs in the stem of the stem-loop of a DR. For example, in one embodiment, a G-C pair is replaced by an A-U or U-A pair. In another embodiment, an A-U pair is substituted for a G-C or a C-G pair. In another embodiment, a naturally occurring nucleotide is replaced by a nucleotide analog. Another way to modulate stem-loop formation or change the equilibrium between stem-loop and intermolecular duplex is to modify the loop of the stem-loop of a DR. Without be bound by theory, the loop can be viewed as an intervening sequence flanked by two sequences that are complementary to each other. When that intervening sequence is not self-complementary, its effect will be to destabilize intermolecular duplex formation. The same principle applies when guides are multiplexed: while the targeting sequences may differ, it may be advantageous to modify the stem-loop region in the DRs of the different guides. Moreover, when guides are multiplexed, the relative activities of the different guides can be modulated by balancing the activity of each individual guide. In certain embodiments, the equilibrium between intermolecular stem-loops vs. intermolecular duplexes is determined. The determination may be made by physical or biochemical means and can be in the presence or absence of a CRISPR effector.

[0218] In certain embodiments, a guide RNA or crRNA may comprise, consist essentially of, or consist of a direct repeat (DR) sequence and a guide sequence or spacer sequence. In certain embodiments, the guide RNA or crRNA may comprise, consist essentially of, or consist of a direct repeat sequence fused or linked to a guide sequence or spacer sequence. In certain embodiments, the direct repeat sequence may be located upstream (i.e., 5′) from the guide sequence or spacer sequence. In other embodiments, the direct repeat sequence may be located downstream (i.e., 3′) from the guide sequence or spacer sequence.

[0219] In certain embodiments, the crRNA comprises a stem loop, preferably a single stem loop. In certain embodiments, the direct repeat sequence forms a stem loop, preferably a single stem loop.

[0220] In certain embodiments, the spacer length of the guide RNA is from 15 to 35 nt. In certain embodiments, the spacer length of the guide RNA is at least 15 nucleotides. In certain embodiments, the spacer length is from 15 to 17 nt, e.g., 15, 16, or 17 nt, from 17 to 20 nt, e.g., 17, 18, 19, or 20 nt, from 20 to 24 nt, e.g., 20, 21, 22, 23, or 24 nt, from 23 to 25 nt, e.g., 23, 24, or 25 nt, from 24 to 27 nt, e.g., 24, 25, 26, or 27 nt, from 27-30 nt, e.g., 27, 28, 29, or 30 nt, from 30-35 nt, e.g., 30, 31, 32, 33, 34, or 35 nt, or 35 nt or longer.

[0221] In general, the CRISPR-Cas, CRISPR-Cas9 or CRISPR system may be as used in the foregoing documents, such as WO 2014/093622 (PCT/US2013/074667) and refers collectively to transcripts and other elements involved in the expression of or directing the activity of CRISPR-associated (“Cas”) genes, including sequences encoding a Cas gene, in particular a Cas9 gene in the case of CRISPR-Cas9, a tracr (trans-activating CRISPR) sequence (e.g. tracrRNA or an active partial tracrRNA), a tracr-mate sequence (encompassing a “direct repeat” and a tracrRNA-processed partial direct repeat in the context of an endogenous CRISPR system), a guide sequence (also referred to as a “spacer” in the context of an endogenous CRISPR system), or “RNA(s)” as that term is herein used (e.g., RNA(s) to guide Cas9, e.g. CRISPR RNA and transactivating (tracr) RNA or a single guide RNA (sgRNA) (chimeric RNA)) or other sequences and transcripts from a CRISPR locus. In general, a CRISPR system is characterized by elements that promote the formation of a CRISPR complex at the site of a target sequence (also referred to as a protospacer in the context of an endogenous CRISPR system). In the context of formation of a CRISPR complex, “target sequence” refers to a sequence to which a guide sequence is designed to have complementarity, where hybridization between a target sequence and a guide sequence promotes the formation of a CRISPR complex. The section of the guide sequence through which complementarity to the target sequence is important for cleavage activity is referred to herein as the seed sequence. A target sequence may comprise any polynucleotide, such as DNA or RNA polynucleotides. In some embodiments, a target sequence is located in the nucleus or cytoplasm of a cell, and may include nucleic acids in or from mitochondrial, organelles, vesicles, liposomes or particles present within the cell. In some embodiments, especially for non-nuclear uses, NLSs are not preferred. In some embodiments, a CRISPR system comprises one or more nuclear exports signals (NESs). In some embodiments, a CRISPR system comprises one or more NLSs and one or more NESs. In some embodiments, direct repeats may be identified in silico by searching for repetitive motifs that fulfill any or all of the following criteria: 1. found in a 2Kb window of genomic sequence flanking the type II CRISPR locus; 2. span from 20 to 50 bp; and 3. interspaced by 20 to 50 bp. In some embodiments, 2 of these criteria may be used, for instance 1 and 2, 2 and 3, or 1 and 3. In some embodiments, all 3 criteria may be used.

[0222] In embodiments of the invention the terms guide sequence and guide RNA, i.e. RNA capable of guiding Cas to a target genomic locus, are used interchangeably as in foregoing cited documents such as WO 2014/093622 (PCT/US2013/074667). In general, a guide sequence is any polynucleotide sequence having sufficient complementarity with a target polynucleotide sequence to hybridize with the target sequence and direct sequence-specific binding of a CRISPR complex to the target sequence. In some embodiments, the degree of complementarity between a guide sequence and its corresponding target sequence, when optimally aligned using a suitable alignment algorithm, is about or more than about 50%, 60%, 75%, 80%, 85%, 90%, 95%, 97.5%, 99%, or more. Optimal alignment may be determined with the use of any suitable algorithm for aligning sequences, non-limiting example of which include the Smith-Waterman algorithm, the Needleman-Wunsch algorithm, algorithms based on the Burrows-Wheeler Transform (e.g. the Burrows Wheeler Aligner), ClustalW, Clustal X, BLAT, Novoalign (Novocraft Technologies; available at www.novocraft.com), ELAND (Illumina, San Diego, Calif.), SOAP (available at soap.genomics.org.cn), and Maq (available at maq.sourceforge.net). In some embodiments, a guide sequence is about or more than about 5, 10, 11, 12, 13, 14, 15, 16, 17, 18, 19, 20, 21, 22, 23, 24, 25, 26, 27, 28, 29, 30, 35, 40, 45, 50, 75, or more nucleotides in length. In some embodiments, a guide sequence is less than about 75, 50, 45, 40, 35, 30, 25, 20, 15, 12, or fewer nucleotides in length. Preferably the guide sequence is 10-30 nucleotides long. The ability of a guide sequence to direct sequence-specific binding of a CRISPR complex to a target sequence may be assessed by any suitable assay. For example, the components of a CRISPR system sufficient to form a CRISPR complex, including the guide sequence to be tested, may be provided to a host cell having the corresponding target sequence, such as by transfection with vectors encoding the components of the CRISPR sequence, followed by an assessment of preferential cleavage within the target sequence, such as by Surveyor assay as described herein. Similarly, cleavage of a target polynucleotide sequence may be evaluated in a test tube by providing the target sequence, components of a CRISPR complex, including the guide sequence to be tested and a control guide sequence different from the test guide sequence, and comparing binding or rate of cleavage at the target sequence between the test and control guide sequence reactions. Other assays are possible, and will occur to those skilled in the art.

[0223] In some embodiments of CRISPR-Cas systems, the degree of complementarity between a guide sequence and its corresponding target sequence can be about or more than about 50%, 60%, 75%, 80%, 85%, 90%, 95%, 97.5%, 99%, or 100%; a guide or RNA or sgRNA can be about or more than about 5, 10, 11, 12, 13, 14, 15, 16, 17, 18, 19, 20, 21, 22, 23, 24, 25, 26, 27, 28, 29, 30, 35, 40, 45, 50, 75, or more nucleotides in length; or guide or RNA or sgRNA can be less than about 75, 50, 45, 40, 35, 30, 25, 20, 15, 12, or fewer nucleotides in length; and advantageously tracr RNA is 30 or 50 nucleotides in length. However, an aspect of the invention is to reduce off-target interactions, e.g., reduce the guide interacting with a target sequence having low complementarity. Indeed, in the examples, it is shown that the invention involves mutations that result in the CRISPR-Cas system being able to distinguish between target and off-target sequences that have greater than 80% to about 95% complementarity, e.g., 83%-84% or 88-89% or 94-95% complementarity (for instance, distinguishing between a target having 18 nucleotides from an off-target of 18 nucleotides having 1, 2 or 3 mismatches). Accordingly, in the context of the present invention the degree of complementarity between a guide sequence and its corresponding target sequence is greater than 94.5% or 95% or 95.5% or 96% or 96.5% or 97% or 97.5% or 98% or 98.5% or 99% or 99.5% or 99.9%, or 100%. Off target is less than 100% or 99.9% or 99.5% or 99% or 99% or 98.5% or 98% or 97.5% or 97% or 96.5% or 96% or 95.5% or 95% or 94.5% or 94% or 93% or 92% or 91% or 90% or 89% or 88% or 87% or 86% or 85% or 84% or 83% or 82% or 81% or 80% complementarity between the sequence and the guide, with it advantageous that off target is 100% or 99.9% or 99.5% or 99% or 99% or 98.5% or 98% or 97.5% or 97% or 96.5% or 96% or 95.5% or 95% or 94.5% complementarity between the sequence and the guide.

### Multiplexing Polynucleotides

[0224] Provided herein are engineered polynucleotide sequences that can direct the activity of a CRISPR protein to multiple targets using a single crRNA. The engineered polynucleotide sequences, also referred to as a multiplexing polynucleotides, can include two or more direct repeats interspersed with two or more guide sequences. More specifically, the engineered polynucleotide sequences can include a direct repeat sequence having one or more mutations relative to the corresponding wild type direct repeat sequence. The engineered polynucleotide can be configured, for example, as: 5′ DR1-G1-DR2-G2 3′. In some embodiments, the engineered polynucleotide can be configured to include three, four, five, or more additional direct repeat and guide sequences, for example: 5′ DR1-G1-DR2-G2-DR3-G3 3′, 5″ DR1-G1-DR2-G2-DR3-G3-DR4-G4 3′, or 5′ DR1-G1-DR2-G2-DR3-G3-DR4-G4-DR5-G5 3′.

[0225] Regardless of the number of direct repeat sequences, the direct repeat sequences differ from one another. Thus, DR1 can be a wild type sequence and DR2 can include one or more mutations relative to the wild type sequence in accordance with the disclosure provided herein regarding direct repeats for Cas orthologs. The guide sequences can also be the same or different. In some embodiments, the guide sequences can bind to different nucleic acid targets, for example, nucleic acids encoding different polypeptides. The multiplexing polynucleotides can be as described, for example, at [0039]-[0072] in U.S. Application 62/780,748 entitled “CRISPR Cpf1 Direct Repeat Variants” and filed Dec. 17, 2018, incorporated herein in its entirety by reference.

[0226] Multiplex design of guide molecules for the detection of coronaviruses and/or other respiratory viruses in a sample to identify the cause of a respiratory infection is envisioned, and design can be according to the methods disclosed herein. Briefly, the design of guide molecules can encompass utilization of training models described herein using a variety of input features, which may include the particular Cas protein used for targeting of the sequences of interest. See U.S. Provisional Application 62/818,702 FIG. 4A, incorporated specifically by reference. Guide molecules can be designed as detailed elsewhere herein. Regarding detection of coronavirus, guide design can be predicated on genome sequences disclosed in Tian et al, “Potent binding of 2019 novel coronavirus spike protein by a SARS coronavirus-specific human monoclonal antibody”; doi: 10.1101/2020.01.28.923011, incorporated by reference, which details human monoclonal antibody, CR3022 binding of the 2019-nCoV RBD (KD of 6.3 nM) or Sequences of the 2019-nCoV are available at GISAID accession no. EPI_ISL 402124 and EPI_ISL 402127-402130, and described in doi:10.1101/2020.01.22.914952, or EP_ISL 402119-402121 and EP_ISL 402123-402124; see also GenBank Accession No. MN908947.3. Guide design can target unique viral genomic regions of SARS-CoV-2 or conserved genomic regions across one or more viruses of the coronavirus family.

### Guide Modifications

[0227] In certain embodiments, guides of the invention comprise non-naturally occurring nucleic acids and/or non-naturally occurring nucleotides and/or nucleotide analogs, and/or chemical modifications. Non-naturally occurring nucleic acids can include, for example, mixtures of naturally and non-naturally occurring nucleotides. Non-naturally occurring nucleotides and/or nucleotide analogs may be modified at the ribose, phosphate, and/or base moiety. In an embodiment of the invention, a guide nucleic acid comprises ribonucleotides and non-ribonucleotides. In one such embodiment, a guide comprises one or more ribonucleotides and one or more deoxyribonucleotides. In an embodiment of the invention, the guide comprises one or more non-naturally occurring nucleotide or nucleotide analog such as a nucleotide with phosphorothioate linkage, boranophosphate linkage, a locked nucleic acid (LNA) nucleotides comprising a methylene bridge between the 2′ and 4′ carbons of the ribose ring, or bridged nucleic acids (BNA). Other examples of modified nucleotides include 2′-O-methyl analogs, 2′-deoxy analogs, 2-thiouridine analogs, N6-methyladenosine analogs, or 2′-fluoro analogs. Further examples of modified bases include, but are not limited to, 2-aminopurine, 5-bromo-uridine, pseudouridine (Ψ), N1-methylpseudouridine (me1Ψ), 5-methoxyuridine(5moU), inosine, 7-methylguanosine. Examples of guide RNA chemical modifications include, without limitation, incorporation of 2′-O-methyl (M), 2′-O-methyl-3′-phosphorothioate (MS), phosphorothioate (PS), S-constrained ethyl(cEt), or 2′-O-methyl-3′-thioPACE (MSP) at one or more terminal nucleotides. Such chemically modified guides can comprise increased stability and increased activity as compared to unmodified guides, though on-target vs. off-target specificity is not predictable. (See, Hendel, 2015, Nat Biotechnol. 33(9):985-9, doi: 10.1038/nbt.3290, published online 29 Jun. 2015; Ragdarm et al., 0215, PNAS, E7110-E7111; Allerson et al., J. Med. Chem. 2005, 48:901-904; Bramsen et al., Front. Genet., 2012, 3:154; Deng et al., PNAS, 2015, 112:11870-11875; Sharma et al., MedChemComm., 2014, 5:1454-1471; Hendel et al., Nat. Biotechnol. (2015) 33(9): 985-989; Li et al., Nature Biomedical Engineering, 2017, 1, 0066 DOI:10.1038/s41551-017-0066). In some embodiments, the 5′ and/or 3′ end of a guide RNA is modified by a variety of functional moieties including fluorescent dyes, polyethylene glycol, cholesterol, proteins, or detection tags. (See Kelly et al., 2016, J. Biotech. 233:74-83). In certain embodiments, a guide comprises ribonucleotides in a region that binds to a target DNA and one or more deoxyribonucleotides and/or nucleotide analogs in a region that binds to Cas9, Cpf1, or C2c1. In an embodiment of the invention, deoxyribonucleotides and/or nucleotide analogs are incorporated in engineered guide structures, such as, without limitation, 5′ and/or 3′ end, stem-loop regions, and the seed region. In certain embodiments, the modification is not in the 5′-handle of the stem-loop regions. Chemical modification in the 5′-handle of the stem-loop region of a guide may abolish its function (see Li, et al., Nature Biomedical Engineering, 2017, 1:0066). In certain embodiments, at least 1, 2, 3, 4, 5, 6, 7, 8, 9, 10, 11, 12, 13, 14, 15, 16, 17, 18, 19, 20, 21, 22, 23, 24, 25, 26, 27, 28, 29, 30, 35, 40, 45, 50, or 75 nucleotides of a guide is chemically modified. In some embodiments, 3-5 nucleotides at either the 3′ or the 5′ end of a guide is chemically modified. In some embodiments, only minor modifications are introduced in the seed region, such as 2′-F modifications. In some embodiments, 2′-F modification is introduced at the 3′ end of a guide. In certain embodiments, three to five nucleotides at the 5′ and/or the 3′ end of the guide are chemically modified with 2′-O-methyl (M), 2′-O-methyl-3′-phosphorothioate (MS), S-constrained ethyl(cEt), or 2′-O-methyl-3′-thioPACE (MSP). Such modification can enhance genome editing efficiency (see Hendel et al., Nat. Biotechnol. (2015) 33(9): 985-989). In certain embodiments, all of the phosphodiester bonds of a guide are substituted with phosphorothioates (PS) for enhancing levels of gene disruption. In certain embodiments, more than five nucleotides at the 5′ and/or the 3′ end of the guide are chemically modified with 2′-O-Me, 2′-F or S-constrained ethyl(cEt). Such chemically modified guide can mediate enhanced levels of gene disruption (see Ragdarm et al., 0215, PNAS, E7110-E7111). In an embodiment of the invention, a guide is modified to comprise a chemical moiety at its 3′ and/or 5′ end. Such moieties include, but are not limited to amine, azide, alkyne, thio, dibenzocyclooctyne (DBCO), or Rhodamine. In certain embodiment, the chemical moiety is conjugated to the guide by a linker, such as an alkyl chain. In certain embodiments, the chemical moiety of the modified guide can be used to attach the guide to another molecule, such as DNA, RNA, protein, or nanoparticles. Such chemically modified guide can be used to identify or enrich cells generically edited by a CRISPR system (see Lee et al., eLife, 2017, 6:e25312, DOI:10.7554).

[0228] In certain embodiments, the CRISPR system as provided herein can make use of a crRNA or analogous polynucleotide comprising a guide sequence, wherein the polynucleotide is an RNA, a DNA or a mixture of RNA and DNA, and/or wherein the polynucleotide comprises one or more nucleotide analogs. The sequence can comprise any structure, including but not limited to a structure of a native crRNA, such as a bulge, a hairpin or a stem loop structure. In certain embodiments, the polynucleotide comprising the guide sequence forms a duplex with a second polynucleotide sequence which can be an RNA or a DNA sequence.

[0229] In certain embodiments, use is made of chemically modified guide RNAs. Examples of guide RNA chemical modifications include, without limitation, incorporation of 2′-O-methyl (M), 2′-O-methyl 3′phosphorothioate (MS), or 2′-O-methyl 3′thioPACE (MSP) at one or more terminal nucleotides. Such chemically modified guide RNAs can comprise increased stability and increased activity as compared to unmodified guide RNAs, though on-target vs. off-target specificity is not predictable. (See, Hendel, 2015, Nat Biotechnol. 33(9):985-9, doi: 10.1038/nbt.3290, published online 29 Jun. 2015). Chemically modified guide RNAs further include, without limitation, RNAs with phosphorothioate linkages and locked nucleic acid (LNA) nucleotides comprising a methylene bridge between the 2′ and 4′ carbons of the ribose ring.

[0230] In some embodiments, a guide sequence is about or more than about 5, 10, 11, 12, 13, 14, 15, 16, 17, 18, 19, 20, 21, 22, 23, 24, 25, 26, 27, 28, 29, 30, 35, 40, 45, 50, 75, or more nucleotides in length. In some embodiments, a guide sequence is less than about 75, 50, 45, 40, 35, 30, 25, 20, 15, 12, or fewer nucleotides in length. Preferably the guide sequence is 10 to 30 nucleotides long. The ability of a guide sequence to direct sequence-specific binding of a CRISPR complex to a target sequence may be assessed by any suitable assay. For example, the components of a CRISPR system sufficient to form a CRISPR complex, including the guide sequence to be tested, may be provided to a host cell having the corresponding target sequence, such as by transfection with vectors encoding the components of the CRISPR sequence, followed by an assessment of preferential cleavage within the target sequence, such as by Surveyor assay. Similarly, cleavage of a target RNA may be evaluated in a test tube by providing the target sequence, components of a CRISPR complex, including the guide sequence to be tested and a control guide sequence different from the test guide sequence, and comparing binding or rate of cleavage at the target sequence between the test and control guide sequence reactions. Other assays are possible, and will occur to those skilled in the art.

[0231] In some embodiments, the modification to the guide is a chemical modification, an insertion, a deletion or a split. In some embodiments, the chemical modification includes, but is not limited to, incorporation of 2′-O-methyl (M) analogs, 2′-deoxy analogs, 2-thiouridine analogs, N6-methyladenosine analogs, 2′-fluoro analogs, 2-aminopurine, 5-bromo-uridine, pseudouridine (Ψ), N1-methylpseudouridine (me1Ψ), 5-methoxyuridine(5moU), inosine, 7-methylguanosine, 2′-O-methyl-3′-phosphorothioate (MS), S-constrained ethyl(cEt), phosphorothioate (PS), or 2′-O-methyl-3′-thioPACE (MSP). In some embodiments, the guide comprises one or more of phosphorothioate modifications. In certain embodiments, at least 1, 2, 3, 4, 5, 6, 7, 8, 9, 10, 11, 12, 13, 14, 15, 16, 17, 18, 19, 20, or 25 nucleotides of the guide are chemically modified. In certain embodiments, one or more nucleotides in the seed region are chemically modified. In certain embodiments, one or more nucleotides in the 3′-terminus are chemically modified. In certain embodiments, none of the nucleotides in the 5′-handle is chemically modified. In some embodiments, the chemical modification in the seed region is a minor modification, such as incorporation of a 2′-fluoro analog. In a specific embodiment, one nucleotide of the seed region is replaced with a 2′-fluoro analog. In some embodiments, 5 or 10 nucleotides in the 3′-terminus are chemically modified. Such chemical modifications at the 3′-terminus of the Cpf1 CrRNA improve gene cutting efficiency (see Li, et al., Nature Biomedical Engineering, 2017, 1:0066). In a specific embodiment, 5 nucleotides in the 3′-terminus are replaced with 2′-fluoro analogues. In a specific embodiment, 10 nucleotides in the 3′-terminus are replaced with 2′-fluoro analogues. In a specific embodiment, 5 nucleotides in the 3′-terminus are replaced with 2′-O-methyl (M) analogs.

[0232] In some embodiments, the loop of the 5′-handle of the guide is modified. In some embodiments, the loop of the 5′-handle of the guide is modified to have a deletion, an insertion, a split, or chemical modifications. In certain embodiments, the loop comprises 3, 4, or 5 nucleotides. In certain embodiments, the loop comprises the sequence of UCUU, UUUU, UAUU, or UGUU.

[0233] A guide sequence, and hence a nucleic acid-targeting guide RNA may be selected to target any target nucleic acid sequence. In the context of formation of a CRISPR complex, “target sequence” refers to a sequence to which a guide sequence is designed to have complementarity, where hybridization between a target sequence and a guide sequence promotes the formation of a CRISPR complex. A target sequence may comprise RNA polynucleotides. The term “target RNA” refers to a RNA polynucleotide being or comprising the target sequence. In other words, the target RNA may be a RNA polynucleotide or a part of a RNA polynucleotide to which a part of the gRNA, i.e. the guide sequence, is designed to have complementarity and to which the effector function mediated by the complex comprising CRISPR effector protein and a gRNA is to be directed. In some embodiments, a target sequence is located in the nucleus or cytoplasm of a cell. The target sequence may be DNA. The target sequence may be any RNA sequence. In some embodiments, the target sequence may be a sequence within a RNA molecule selected from the group consisting of messenger RNA (mRNA), pre-mRNA, ribosomal RNA (rRNA), transfer RNA (tRNA), micro-RNA (miRNA), small interfering RNA (siRNA), small nuclear RNA (snRNA), small nuclear RNA (snoRNA), double stranded RNA (dsRNA), non coding RNA (ncRNA), long non-coding RNA (lncRNA), and small cytoplasmic RNA (scRNA). In some preferred embodiments, the target sequence may be a sequence within a RNA molecule selected from the group consisting of mRNA, pre-mRNA, and rRNA. In some preferred embodiments, the target sequence may be a sequence within a RNA molecule selected from the group consisting of ncRNA, and lncRNA. In some more preferred embodiments, the target sequence may be a sequence within an mRNA molecule or a pre-mRNA molecule.

[0234] In certain embodiments, the spacer length of the guide RNA is less than 28 nucleotides. In certain embodiments, the spacer length of the guide RNA is at least 18 nucleotides and less than 28 nucleotides. In certain embodiments, the spacer length of the guide RNA is between 19 and 28 nucleotides. In certain embodiments, the spacer length of the guide RNA is between 19 and 25 nucleotides. In certain embodiments, the spacer length of the guide RNA is 20 nucleotides. In certain embodiments, the spacer length of the guide RNA is 23 nucleotides. In certain embodiments, the spacer length of the guide RNA is 25 nucleotides.

[0235] In certain embodiments, modulations of cleavage efficiency can be exploited by introduction of mismatches, e.g. 1 or more mismatches, such as 1 or 2 mismatches between spacer sequence and target sequence, including the position of the mismatch along the spacer/target. The more central (i.e. not 3′ or 5′) for instance a double mismatch is, the more cleavage efficiency is affected. Accordingly, by choosing mismatch position along the spacer, cleavage efficiency can be modulated. By means of example, if less than 100% cleavage of targets is desired (e.g. in a cell population), 1 or more, such as preferably 2 mismatches between spacer and target sequence may be introduced in the spacer sequences. The more central along the spacer of the mismatch position, the lower the cleavage percentage.

[0236] In certain example embodiments, the cleavage efficiency may be exploited to design single guides that can distinguish two or more targets that vary by a single nucleotide, such as a single nucleotide polymorphism (SNP), variation, or (point) mutation. The CRISPR effector may have reduced sensitivity to SNPs (or other single nucleotide variations) and continue to cleave SNP targets with a certain level of efficiency. Thus, for two targets, or a set of targets, a guide RNA may be designed with a nucleotide sequence that is complementary to one of the targets i.e. the on-target SNP. The guide RNA is further designed to have a synthetic mismatch. As used herein a “synthetic mismatch” refers to a non-naturally occurring mismatch that is introduced upstream or downstream of the naturally occurring SNP, such as at most 5 nucleotides upstream or downstream, for instance 4, 3, 2, or 1 nucleotide upstream or downstream, preferably at most 3 nucleotides upstream or downstream, more preferably at most 2 nucleotides upstream or downstream, most preferably 1 nucleotide upstream or downstream (i.e. adjacent the SNP). When the CRISPR effector binds to the on-target SNP, only a single mismatch will be formed with the synthetic mismatch and the CRISPR effector will continue to be activated and a detectable signal produced. When the guide RNA hybridizes to an off-target SNP, two mismatches will be formed, the mismatch from the SNP and the synthetic mismatch, and no detectable signal generated. Thus, the systems disclosed herein may be designed to distinguish SNPs within a population. For, example the systems may be used to distinguish pathogenic strains that differ by a single SNP or detect certain disease specific SNPs, such as but not limited to, disease associated SNPs, such as without limitation cancer associated SNPs.

[0237] In certain embodiments, the guide RNA is designed such that the SNP is located on position 1, 2, 3, 4, 5, 6, 7, 8, 9, 10, 11, 12, 13, 14, 15, 16, 17, 18, 19, 20, 21, 22, 23, 24, 25, 26, 27, 28, 29, or 30 of the spacer sequence (starting at the 5′ end). In certain embodiments, the guide RNA is designed such that the SNP is located on position 1, 2, 3, 4, 5, 6, 7, 8, or 9 of the spacer sequence (starting at the 5′ end). In certain embodiments, the guide RNA is designed such that the SNP is located on position 2, 3, 4, 5, 6, or 7 of the spacer sequence (starting at the 5′ end). In certain embodiments, the guide RNA is designed such that the SNP is located on position 3, 4, 5, or 6 of the spacer sequence (starting at the 5′ end). In certain embodiments, the guide RNA is designed such that the SNP is located on position 3 of the spacer sequence (starting at the 5′ end).

[0238] In certain embodiments, the guide RNA is designed such that the mismatch (e.g. the synthetic mismatch, i.e. an additional mutation besides a SNP) is located on position 1, 2, 3, 4, 5, 6, 7, 8, 9, 10, 11, 12, 13, 14, 15, 16, 17, 18, 19, 20, 21, 22, 23, 24, 25, 26, 27, 28, 29, or 30 of the spacer sequence (starting at the 5′ end). In certain embodiments, the guide RNA is designed such that the mismatch is located on position 1, 2, 3, 4, 5, 6, 7, 8, or 9 of the spacer sequence (starting at the 5′ end). In certain embodiments, the guide RNA is designed such that the mismatch is located on position 4, 5, 6, or 7 of the spacer sequence (starting at the 5′ end. In certain embodiments, the guide RNA is designed such that the mismatch is located at position 3, 4, 5, or 6 of the spacer, preferably position 3. In certain embodiments, the guide RNA is designed such that the mismatch is located on position 5 of the spacer sequence (starting at the 5′ end).

[0239] In certain embodiments, said mismatch is 1, 2, 3, 4, or 5 nucleotides upstream or downstream, preferably 2 nucleotides, preferably downstream of said SNP or other single nucleotide variation in said guide RNA.

[0240] In certain embodiments, the guide RNA is designed such that the mismatch is located 2 nucleotides upstream of the SNP (i.e. one intervening nucleotide).

[0241] In certain embodiments, the guide RNA is designed such that the mismatch is located 2 nucleotides downstream of the SNP (i.e. one intervening nucleotide).

[0242] In certain embodiments, the guide RNA is designed such that the mismatch is located on position 5 of the spacer sequence (starting at the 5′ end) and the SNP is located on position 3 of the spacer sequence (starting at the 5′ end).

[0243] In certain embodiments, the guide RNA comprises a spacer which is truncated relative to a wild type spacer. In certain embodiments, the guide RNA comprises a spacer which comprises less than 28 nucleotides, preferably between and including 20 to 27 nucleotides.

[0244] In certain embodiments, the guide RNA comprises a spacer which consists of 20-25 nucleotides or 20-23 nucleotides, such as preferably 20 or 23 nucleotides.

[0245] In certain embodiments, the one or more guide RNAs are designed to detect a single nucleotide polymorphism in a target RNA or DNA, or a splice variant of an RNA transcript.

[0246] In certain embodiments, the one or more guide RNAs may be designed to bind to one or more target molecules that are diagnostic for a disease state. In some embodiments, the disease may be cancer. In some embodiments, the disease state may be an autoimmune disease. In some embodiments, the disease state may be an infection. In some embodiments, the infection may be caused by a virus, a bacterium, a fungus, a protozoa, or a parasite. In specific embodiments, the infection is a viral infection. In specific embodiments, the viral infection is caused by a DNA virus.

[0247] The embodiments described herein comprehend inducing one or more nucleotide modifications in a eukaryotic cell (in vitro, i.e. in an isolated eukaryotic cell) as herein discussed comprising delivering to cell a vector as herein discussed. The mutation(s) can include the introduction, deletion, or substitution of one or more nucleotides at each target sequence of cell(s) via the guide(s) RNA(s). The mutations can include the introduction, deletion, or substitution of 1-75 nucleotides at each target sequence of said cell(s) via the guide(s) RNA(s). The mutations can include the introduction, deletion, or substitution of 1, 5, 10, 11, 12, 13, 14, 15, 16, 17, 18, 19, 20, 21, 22, 23, 24, 25, 26, 27, 28, 29, 30, 35, 40, 45, 50, or 75 nucleotides at each target sequence of said cell(s) via the guide(s) RNA(s). The mutations can include the introduction, deletion, or substitution of 5, 10, 11, 12, 13, 14, 15, 16, 17, 18, 19, 20, 21, 22, 23, 24, 25, 26, 27, 28, 29, 30, 35, 40, 45, 50, or 75 nucleotides at each target sequence of said cell(s) via the guide(s) RNA(s). The mutations include the introduction, deletion, or substitution of 10, 11, 12, 13, 14, 15, 16, 17, 18, 19, 20, 21, 22, 23, 24, 25, 26, 27, 28, 29, 30, 35, 40, 45, 50, or 75 nucleotides at each target sequence of said cell(s) via the guide(s) RNA(s). The mutations can include the introduction, deletion, or substitution of 20, 21, 22, 23, 24, 25, 26, 27, 28, 29, 30, 35, 40, 45, 50, or 75 nucleotides at each target sequence of said cell(s) via the guide(s) RNA(s). The mutations can include the introduction, deletion, or substitution of 40, 45, 50, 75, 100, 200, 300, 400 or 500 nucleotides at each target sequence of said cell(s) via the guide(s) RNA(s).

[0248] Typically, in the context of an endogenous CRISPR system, formation of a CRISPR complex (comprising a guide sequence hybridized to a target sequence and complexed with one or more Cas proteins) results in cleavage in or near (e.g. within 1, 2, 3, 4, 5, 6, 7, 8, 9, 10, 20, 50, or more base pairs from) the target sequence, but may depend on for instance secondary structure, in particular in the case of RNA targets.

### Methods for Designing Highly Active Guides

[0249] A method for designing highly active guide molecules, e.g., guide RNAs, for use in the detection systems may comprise the steps of designing putative guide RNAs tiled across a target molecule of interest; creating a training model based on results of incubating guide RNAs with a Cas13 protein and the target molecule; predicting highly active guide RNAs for the target molecule, wherein the predicting comprises optimizing the nucleotide at each base position in the guide RNA based on the training model; and validating the predicted highly active guide RNAs by incubating the guide RNAs with the Cas13 protein and the target molecule. The method can be as described in U.S. Provisional Application Nos. 62/818,702 amd 62/890,555 (Attorney Reference BI-10504, Docket BROD-3980) incorporated by reference in their entirety. Guide RNAs generate by the design methods can be used with the systems for detecting coronavirus as described elsewhere herein.

[0250] In some embodiments, the invention provides a method for designing guide RNAs for use in the detection systems described herein. The method may comprise designing putative guide RNAs tiled across a target molecule of interest, such as a coronavirus, viruses that cause respiratory illness, including coronavirus, including 2019-nCov (Covid-19). The method may further comprise creating a training model based on results of incubating guide RNAs with a Cas13 protein and the target molecule. The method may further comprise predicting highly active guide RNAs for the target molecule. Predicting may comprise optimizing the nucleotide at each base position in the guide RNA based on the training model. The method may further comprise validating the predicted highly active guide RNAs by incubating the guide RNAs with the Cas13 protein and the target molecule.

[0251] In certain instances, the optimized guide for the target molecule is generated by pooling a set of guides, the guides produced by tiling guides across the target molecule; incubating the set of guides with a Cas polypeptide and the target molecule and measuring cleavage activity of each guide in the set; creating a training model based on the cleavage activity of the set of guides in the incubating step. Steps of predicting highly active guides for the target molecule and identifying the optimized guides by incubating the predicted highly active guides with the Cas polypeptide and the target molecule and selecting optimized guides may also be utilized in generating optimized guides. In embodiments, the training model comprises one or more input features selected from guide sequence, flanking target sequence, normalized positions of the guide in the target and guide GC content. In certain instances, the guide sequence and/or flanking sequence input comprises one hit encoding mono-nucleotide and/or dinucleotide In an embodiments, the training model comprises applying logistic regression model on the activity of the guides across the one or more input features.

[0252] In an aspect, the predicting highly active guides for the target molecule comprises selecting guides with an increase in activity of a guide relative to the median activity, or selecting guides with highest guide activity. In certain instances, the increase in activity is measured by an increase in fluorescence. Guides may be selected based on a particular cutoff, in certain instances based on activity relative to a median or above a particular cutoff-, for instance, are selected with a 1.5, 2, 2.5 or 3-fold activity relative to median, or are in the top quartile or quintile for each target tested.

[0253] The optimized guides may be generated for a Cas13 ortholog, in some instances, the optimized guide is generated for an LwaCas13a or a Cca13b ortholog.

[0254] In some embodiments, the invention provides a method for designing guide RNAs for use in the detection systems described herein. The method may comprise designing putative guide RNAs tiled across a target molecule of interest. The method may further comprise creating a training model based on results of incubating guide RNAs with a Cas13 protein and the target molecule. The method may further comprise predicting highly active guide RNAs for the target molecule. Predicting may comprise optimizing the nucleotide at each base position in the guide RNA based on the training model. The method may further comprise validating the predicted highly active guide RNAs by incubating the guide RNAs with the Cas13 protein and the target molecule.

[0255] Guides may be screened for on-target and off-target effects. When using LAMP amplification, the products of LAMP can help identify those guides with more minimal off-target effects relative to on-target products.

[0256] The design of putative guide RNAs for target molecules of interest is described elsewhere herein.

[0257] The creation of training models is known in the art. Machine learning can be generalized as the ability of a learning machine to perform accurately on new, unseen examples/tasks after having experienced a learning data set. Machine learning may include the following concepts and methods. Supervised learning concepts may include AODE; Artificial neural network, such as Backpropagation, Autoencoders, Hopfield networks, Boltzmann machines, Restricted Boltzmann Machines, and Spiking neural networks; Bayesian statistics, such as Bayesian network and Bayesian knowledge base; Case-based reasoning; Gaussian process regression; Gene expression programming; Group method of data handling (GMDH); Inductive logic programming; Instance-based learning; Lazy learning; Learning Automata; Learning Vector Quantization; Logistic Model Tree; Minimum message length (decision trees, decision graphs, etc.), such as Nearest Neighbor Algorithm and Analogical modeling; Probably approximately correct learning (PAC) learning; Ripple down rules, a knowledge acquisition methodology; Symbolic machine learning algorithms; Support vector machines; Random Forests; Ensembles of classifiers, such as Bootstrap aggregating (bagging) and Boosting (meta-algorithm); Ordinal classification; Information fuzzy networks (IFN); Conditional Random Field; ANOVA; Linear classifiers, such as Fisher's linear discriminant, Linear regression, Logistic regression, Multinomial logistic regression, Naive Bayes classifier, Perceptron, Support vector machines; Quadratic classifiers; k-nearest neighbor; Boosting; Decision trees, such as C4.5, Random forests, ID3, CART, SLIQ, SPRINT; Bayesian networks, such as Naive Bayes; and Hidden Markov models. Unsupervised learning concepts may include; Expectation-maximization algorithm; Vector Quantization; Generative topographic map; Information bottleneck method; Artificial neural network, such as Self-organizing map; Association rule learning, such as, Apriori algorithm, Eclat algorithm, and FP-growth algorithm; Hierarchical clustering, such as Single-linkage clustering and Conceptual clustering; Cluster analysis, such as, K-means algorithm, Fuzzy clustering, DBSCAN, and OPTICS algorithm; and Outlier Detection, such as Local Outlier Factor. Semi-supervised learning concepts may include; Generative models; Low-density separation; Graph-based methods; and Co-training. Reinforcement learning concepts may include; Temporal difference learning; Q-learning; Learning Automata; and SARSA. Deep learning concepts may include; Deep belief networks; Deep Boltzmann machines; Deep Convolutional neural networks; Deep Recurrent neural networks; and Hierarchical temporal memory.

[0258] The methods as disclosed herein designing putative guide RNAs may comprise design based on one or more variables, including guide sequence, flanking target sequence, guide position and guide GC content as input features. In certain embodiments, the length of the flanking target region can be considered a freeparameter and can be further selected during cross-validation. Additionally, mono-nucleotide and/or dinucleotide based identities across a guide length and flanking sequence in the target, varying one or more of flanking sequence length, normalized positions of the guide in the target, and GC content of the guide, or a combination thereof.

[0259] In embodiments, the training model for the guide design of highly active guides is Cas protein specific. In embodiments, the Cas protein is a Cas13a, Cas13b, a Cas12a and/or a Cas12b protein. In certain embodiments, the protein is LwaCas13a or CcaCas13b. Selection for the best guides can be dependent on each enzyme. In particular embodiments, where majority of guides have activity above background on a per-target basis, selection of guides may be based on 1.5 fold, 2, 2.5, 3 or more fold activity over the median activity. In other instances, the best performing guides may be at or near background fluorescence. In this instance, the guide selection may be based on a top percentile, e.g. quartile or quintile, of performing guides.

[0260] Codon optimization is described elsewhere herein. In specific embodiments, the nucleotide at each base position in the guide RNA may be optimized based on the training model, thus allowing for prediction of highly active guide RNAs for the target molecule.

[0261] The predicted highly active guide RNAs may then be validated or verified by incubating the guide RNAs with a Cas effector protein, such as Cas13 protein and the target molecule(s) for coronavirus, for example coronavirus sequence that is immunostimulatory to a host immune system, or a target sequence unique to the 2019-nCov, as described elsewhere herein.

[0262] In certain embodiments, optimization comprises validation of best performing models for a particular Cas polypeptide across multiple guides may comprise comparing the predicted score of each guide versus actual collateral activity upon target recognition. In embodiments, kinetic data of the best and worst predicted guides are evaluated. In embodiments, lateral flow performance of the predicted guides is evaluated for a target sequence.

[0263] In an aspect, the guide sequence is selected from SEQ ID NOS: 40,500-61,643. Guide sequences can also be selected from Table 5 or Table 10 or Table 16.

### Detection Construct

[0264] The systems and methods described herein comprise a detection construct. As used herein, a “detection construct” refers to a molecule that can be cleaved or otherwise deactivated by an activated CRISPR system effector protein described herein. The term “detection construct” may also be referred to in the alternative as a “masking construct.” Depending on the nuclease activity of the CRISPR effector protein, the masking construct may be a RNA-based masking construct or a DNA-based masking construct. The Nucleic Acid-based masking constructs comprises a nucleic acid element that is cleavable by a CRISPR effector protein. Cleavage of the nucleic acid element releases agents or produces conformational changes that allow a detectable signal to be produced. Example constructs demonstrating how the nucleic acid element may be used to prevent or mask generation of detectable signal are described below and embodiments of the invention comprise variants of the same. Prior to cleavage, or when the masking construct is in an ‘active’ state, the masking construct blocks the generation or detection of a positive detectable signal. In certain embodiments, detection constructs are designed for cutting motifs of particular Cas proteins. See, International Publication WO 2019/126577, incorporated herein by reference in its entirety, and specifically paragraphs [00314]-[00356], Table 25, and Examples 8-10, for teaching of design of detection constructs for Cas proteins with preferred cutting motifs. For example, when AapCas12b is used, a reporter designed with A and T bases can be utilized because of preferred cleavage specificity. In an aspect, a reporter comprising sequence TTTTTTT is utilized with AapCas12b systems. In embodiments, the reporter comprises a AAAAA sequence or a TTTTT sequence. In an aspect, the reporter is selected from WCV328, WCV329, WCV333. The reporter can be selected from WCV0333/5HEX/TTTTTTT/3IABkFQ/homopolymer hex probe, WCV0328/5HEX/AAAAA/3IABkFQ/homopolymer hex probe, and WCV0329/5HEX/TTTTT/3IABkFQ/homopolymer hex probe.

[0265] It will be understood that in certain example embodiments a minimal background signal may be produced in the presence of an active masking construct. A positive detectable signal may be any signal that can be detected using optical, fluorescent, chemiluminescent, electrochemical or other detection methods known in the art. The term “positive detectable signal” is used to differentiate from other detectable signals that may be detectable in the presence of the masking construct. For example, in certain embodiments a first signal may be detected when the masking agent is present or when a CRISPR system has not been activated (i.e. a negative detectable signal), which then converts to a second signal (e.g. the positive detectable signal) upon detection of the target molecules and cleavage or deactivation of the masking agent, or upon activation of the CRISPR effector protein. The positive detectable signal, then, is a signal detected upon activation of the CRISPR effector protein, and may be, in a colorimetric or fluorescent assay, a decrease in fluorescence or color relative to a control or an increase in fluorescence or color relative to a control, depending on the configuration of the lateral flow substrate, and as described further herein.

[0266] In certain example embodiments, the masking construct may comprise a HCR initiator sequence and a cutting motif, or a cleavable structural element, such as a loop or hairpin, that prevents the initiator from initiating the HCR reaction. The cutting motif may be preferentially cut by one of the activated CRISPR effector proteins. Upon cleavage of the cutting motif or structure element by an activated CRISPR effector protein, the initiator is then released to trigger the HCR reaction, detection thereof indicating the presence of one or more targets in the sample. In certain example embodiments, the masking construct comprises a hairpin with a RNA loop. When an activated CRISPR effector protein cuts the RNA loop, the initiator can be released to trigger the HCR reaction.

[0267] In certain example embodiments, the masking construct may suppress generation of a gene product. The gene product may be encoded by a reporter construct that is added to the sample. The masking construct may be an interfering RNA involved in a RNA interference pathway, such as a short hairpin RNA (shRNA) or small interfering RNA (siRNA). The masking construct may also comprise microRNA (miRNA). While present, the masking construct suppresses expression of the gene product. The gene product may be a fluorescent protein or other RNA transcript or proteins that would otherwise be detectable by a labeled probe, aptamer, or antibody but for the presence of the masking construct. Upon activation of the effector protein the masking construct is cleaved or otherwise silenced allowing for expression and detection of the gene product as the positive detectable signal. In preferred embodiments, the masking constructs comprise two or more detectable signals, for example, fluorescent signals, that can be read on different channels of a fluorimeter.

[0268] In specific embodiments, the masking construct comprises a silencing RNA that suppresses generation of a gene product encoded by a reporting construct, wherein the gene product generates the detectable positive signal when expressed.

[0269] In certain example embodiments, the masking construct may sequester one or more reagents needed to generate a detectable positive signal such that release of the one or more reagents from the masking construct results in generation of the detectable positive signal. The one or more reagents may combine to produce a colorimetric signal, a chemiluminescent signal, a fluorescent signal, or any other detectable signal and may comprise any reagents known to be suitable for such purposes. In certain example embodiments, the one or more reagents are sequestered by RNA aptamers that bind the one or more reagents. The one or more reagents are released when the effector protein is activated upon detection of a target molecule and the RNA or DNA aptamers are degraded.

[0270] In certain example embodiments, the masking construct may be immobilized on a solid substrate in an individual discrete volume (defined further below) and sequesters a single reagent. For example, the reagent may be a bead comprising a dye. When sequestered by the immobilized reagent, the individual beads are too diffuse to generate a detectable signal, but upon release from the masking construct are able to generate a detectable signal, for example by aggregation or simple increase in solution concentration. In certain example embodiments, the immobilized masking agent is a RNA- or DNA-based aptamer that can be cleaved by the activated effector protein upon detection of a target molecule.

[0271] In certain other example embodiments, the masking construct binds to an immobilized reagent in solution thereby blocking the ability of the reagent to bind to a separate labeled binding partner that is free in solution. Thus, upon application of a washing step to a sample, the labeled binding partner can be washed out of the sample in the absence of a target molecule. However, if the effector protein is activated, the masking construct is cleaved to a degree sufficient to interfere with the ability of the masking construct to bind the reagent thereby allowing the labeled binding partner to bind to the immobilized reagent. Thus, the labeled binding partner remains after the wash step indicating the presence of the target molecule in the sample. In certain aspects, the masking construct that binds the immobilized reagent is a DNA or RNA aptamer. The immobilized reagent may be a protein and the labeled binding partner may be a labeled antibody. Alternatively, the immobilized reagent may be streptavidin and the labeled binding partner may be labeled biotin. The label on the binding partner used in the above embodiments may be any detectable label known in the art. In addition, other known binding partners may be used in accordance with the overall design described herein.

[0272] In certain example embodiments, the masking construct may comprise a ribozyme. Ribozymes are RNA molecules having catalytic properties. Ribozymes, both naturally and engineered, comprise or consist of RNA that may be targeted by the effector proteins disclosed herein. The ribozyme may be selected or engineered to catalyze a reaction that either generates a negative detectable signal or prevents generation of a positive control signal. Upon deactivation of the ribozyme by the activated effector protein the reaction generating a negative control signal, or preventing generation of a positive detectable signal, is removed thereby allowing a positive detectable signal to be generated. In one example embodiment, the ribozyme may catalyze a colorimetric reaction causing a solution to appear as a first color. When the ribozyme is deactivated the solution then turns to a second color, the second color being the detectable positive signal. An example of how ribozymes can be used to catalyze a colorimetric reaction are described in Zhao et al. “Signal amplification of glucosamine phosphate based on ribozyme glmS,” Biosens Bioelectron. 2014; 16:337-42, and provide an example of how such a system could be modified to work in the context of the embodiments disclosed herein. Alternatively, ribozymes, when present can generate cleavage products of, for example, RNA transcripts. Thus, detection of a positive detectable signal may comprise detection of non-cleaved RNA transcripts that are only generated in the absence of the ribozyme.

[0273] In some embodiments, the masking construct may be a ribozyme that generates a negative detectable signal, and wherein a positive detectable signal is generated when the ribozyme is deactivated.

[0274] In certain example embodiments, the one or more reagents is a protein, such as an enzyme, capable of facilitating generation of a detectable signal, such as a colorimetric, chemiluminescent, or fluorescent signal, that is inhibited or sequestered such that the protein cannot generate the detectable signal by the binding of one or more DNA or RNA aptamers to the protein. Upon activation of the effector proteins disclosed herein, the DNA or RNA aptamers are cleaved or degraded to an extent that they no longer inhibit the protein's ability to generate the detectable signal. In certain example embodiments, the aptamer is a thrombin inhibitor aptamer. In certain example embodiments the thrombin inhibitor aptamer has a sequence of GGGAACAAAGCUGAAGUACUUACCC (SEQ ID NO: 62012). When this aptamer is cleaved, thrombin will become active and will cleave a peptide colorimetric or fluorescent substrate. In certain example embodiments, the colorimetric substrate is para-nitroanilide (pNA) covalently linked to the peptide substrate for thrombin. Upon cleavage by thrombin, pNA is released and becomes yellow in color and easily visible to the eye. In certain example embodiments, the fluorescent substrate is 7-amino-4-methylcoumarin a blue fluorophore that can be detected using a fluorescence detector. Inhibitory aptamers may also be used for horseradish peroxidase (HRP), beta-galactosidase, or calf alkaline phosphatase (CAP) and within the general principals laid out above.

[0275] In certain embodiments, RNAse or DNAse activity is detected colorimetrically via cleavage of enzyme-inhibiting aptamers. One potential mode of converting DNAse or RNAse activity into a colorimetric signal is to couple the cleavage of a DNA or RNA aptamer with the re-activation of an enzyme that is capable of producing a colorimetric output. In the absence of RNA or DNA cleavage, the intact aptamer will bind to the enzyme target and inhibit its activity. The advantage of this readout system is that the enzyme provides an additional amplification step: once liberated from an aptamer via collateral activity (e.g. Cpf1 collateral activity), the colorimetric enzyme will continue to produce colorimetric product, leading to a multiplication of signal.

[0276] In certain embodiments, an existing aptamer that inhibits an enzyme with a colorimetric readout is used. Several aptamer/enzyme pairs with colorimetric readouts exist, such as thrombin, protein C, neutrophil elastase, and subtilisin. These proteases have colorimetric substrates based upon pNA and are commercially available. In certain embodiments, a novel aptamer targeting a common colorimetric enzyme is used. Common and robust enzymes, such as beta-galactosidase, horseradish peroxidase, or calf intestinal alkaline phosphatase, could be targeted by engineered aptamers designed by selection strategies such as SELEX. Such strategies allow for quick selection of aptamers with nanomolar binding efficiencies and could be used for the development of additional enzyme/aptamer pairs for colorimetric readout.

[0277] In certain embodiments, the masking construct may be a DNA or RNA aptamer and/or may comprise a DNA or RNA-tethered inhibitor.

[0278] In certain embodiments, the masking construct may comprise a DNA or RNA oligonucleotide to which a detectable ligand and a masking component are attached.

[0279] In certain embodiments, RNAse or DNase activity is detected colorimetrically via cleavage of RNA-tethered inhibitors. Many common colorimetric enzymes have competitive, reversible inhibitors: for example, beta-galactosidase can be inhibited by galactose. Many of these inhibitors are weak, but their effect can be increased by increases in local concentration. By linking local concentration of inhibitors to DNase RNAse activity, colorimetric enzyme and inhibitor pairs can be engineered into DNase and RNAse sensors. The colorimetric DNase or RNAse sensor based upon small-molecule inhibitors involves three components: the colorimetric enzyme, the inhibitor, and a bridging RNA or DNA that is covalently linked to both the inhibitor and enzyme, tethering the inhibitor to the enzyme. In the uncleaved configuration, the enzyme is inhibited by the increased local concentration of the small molecule; when the DNA or RNA is cleaved (e.g. by Cas13 or Cas12 collateral cleavage), the inhibitor will be released and the colorimetric enzyme will be activated.

[0280] In certain embodiments, the aptamer or DNA- or RNA-tethered inhibitor may sequester an enzyme, wherein the enzyme generates a detectable signal upon release from the aptamer or DNA or RNA tethered inhibitor by acting upon a substrate. In some embodiments, the aptamer may be an inhibitor aptamer that inhibits an enzyme and prevents the enzyme from catalyzing generation of a detectable signal from a substance. In some embodiments, the DNA- or RNA-tethered inhibitor may inhibit an enzyme and may prevent the enzyme from catalyzing generation of a detectable signal from a substrate.

[0281] In certain embodiments, RNAse activity is detected colorimetrically via formation and/or activation of G-quadruplexes. G quadruplexes in DNA can complex with heme (iron (III)-protoporphyrin IX) to form a DNAzyme with peroxidase activity. When supplied with a peroxidase substrate (e.g. ABTS: (2,2′-Azinobis [3-ethylbenzothiazoline-6-sulfonic acid]-diammonium salt)), the G-quadruplex-heme complex in the presence of hydrogen peroxide causes oxidation of the substrate, which then forms a green color in solution. An example G-quadruplex forming DNA sequence is: GGGTAGGGCGGGTTGGGA (SEQ ID NO: 62013). By hybridizing an additional DNA or RNA sequence, referred to herein as a “staple,” to this DNA aptamer, formation of the G-quadraplex structure will be limited. Upon collateral activation, the staple will be cleaved allowing the G quadraplex to form and heme to bind. This strategy is particularly appealing because color formation is enzymatic, meaning there is additional amplification beyond collateral activation.

[0282] In certain embodiments, the masking construct may comprise an RNA oligonucleotide designed to bind a G-quadruplex forming sequence, wherein a G-quadruplex structure is formed by the G-quadruplex forming sequence upon cleavage of the masking construct, and wherein the G-quadruplex structure generates a detectable positive signal.

[0283] In certain example embodiments, the masking construct may be immobilized on a solid substrate in an individual discrete volume (defined further below) and sequesters a single reagent. For example, the reagent may be a bead comprising a dye. When sequestered by the immobilized reagent, the individual beads are too diffuse to generate a detectable signal, but upon release from the masking construct are able to generate a detectable signal, for example by aggregation or simple increase in solution concentration. In certain example embodiments, the immobilized masking agent is a DNA- or RNA-based aptamer that can be cleaved by the activated effector protein upon detection of a target molecule.

[0284] In one example embodiment, the masking construct comprises a detection agent that changes color depending on whether the detection agent is aggregated or dispersed in solution. For example, certain nanoparticles, such as colloidal gold, undergo a visible purple to red color shift as they move from aggregates to dispersed particles. Accordingly, in certain example embodiments, such detection agents may be held in aggregate by one or more bridge molecules. At least a portion of the bridge molecule comprises RNA or DNA. Upon activation of the effector proteins disclosed herein, the RNA or DNA portion of the bridge molecule is cleaved allowing the detection agent to disperse and resulting in the corresponding change in color. In certain example embodiments, the detection agent is a colloidal metal. The colloidal metal material may include water-insoluble metal particles or metallic compounds dispersed in a liquid, a hydrosol, or a metal sol. The colloidal metal may be selected from the metals in groups IA, IB, IIB and IIIB of the periodic table, as well as the transition metals, especially those of group VIII. Preferred metals include gold, silver, aluminum, ruthenium, zinc, iron, nickel and calcium. Other suitable metals also include the following in all of their various oxidation states: lithium, sodium, magnesium, potassium, scandium, titanium, vanadium, chromium, manganese, cobalt, copper, gallium, strontium, niobium, molybdenum, palladium, indium, tin, tungsten, rhenium, platinum, and gadolinium. The metals are preferably provided in ionic form, derived from an appropriate metal compound, for example the A13+, Ru3+, Zn2+, Fe3+, Ni2+ and Ca2+ ions.

[0285] When the RNA or DNA bridge is cut by the activated CRISPR effector, the aforementioned color shift is observed. In certain example embodiments the particles are colloidal metals. In certain other example embodiments, the colloidal metal is a colloidal gold. In certain example embodiments, the colloidal nanoparticles are 15 nm gold nanoparticles (AuNPs). Due to the unique surface properties of colloidal gold nanoparticles, maximal absorbance is observed at 520 nm when fully dispersed in solution and appear red in color to the naked eye. Upon aggregation of AuNPs, they exhibit a red-shift in maximal absorbance and appear darker in color, eventually precipitating from solution as a dark purple aggregate. In certain example embodiments the nanoparticles are modified to include DNA linkers extending from the surface of the nanoparticle. Individual particles are linked together by single-stranded RNA (ssRNA) or single-stranded DNA bridges that hybridize on each end to at least a portion of the DNA linkers. Thus, the nanoparticles will form a web of linked particles and aggregate, appearing as a dark precipitate. Upon activation of the CRISPR effectors disclosed herein, the ssRNA or ssDNA bridge will be cleaved, releasing the AU NPS from the linked mesh and producing a visible red color. Example DNA linkers and bridge sequences are listed below. Thiol linkers on the end of the DNA linkers may be used for surface conjugation to the AuNPS. Other forms of conjugation may be used. In certain example embodiments, two populations of AuNPs may be generated, one for each DNA linker. This will help facilitate proper binding of the ssRNA bridge with proper orientation. In certain example embodiments, a first DNA linker is conjugated by the 3′ end while a second DNA linker is conjugated by the 5′ end.

[0286] In certain other example embodiments, the masking construct may comprise an RNA or DNA oligonucleotide to which are attached a detectable label and a masking agent of that detectable label. An example of such a detectable label/masking agent pair is a fluorophore and a quencher of the fluorophore. Quenching of the fluorophore can occur as a result of the formation of a non-fluorescent complex between the fluorophore and another fluorophore or non-fluorescent molecule. This mechanism is known as ground-state complex formation, static quenching, or contact quenching. Accordingly, the RNA or DNA oligonucleotide may be designed so that the fluorophore and quencher are in sufficient proximity for contact quenching to occur. Fluorophores and their cognate quenchers are known in the art and can be selected for this purpose by one having ordinary skill in the art. The particular fluorophore/quencher pair is not critical in the context of this invention, only that selection of the fluorophore/quencher pairs ensures masking of the fluorophore. Upon activation of the effector proteins disclosed herein, the RNA or DNA oligonucleotide is cleaved thereby severing the proximity between the fluorophore and quencher needed to maintain the contact quenching effect. Accordingly, detection of the fluorophore may be used to determine the presence of a target molecule in a sample.

[0287] In certain other example embodiments, the masking construct may comprise one or more RNA oligonucleotides to which are attached one or more metal nanoparticles, such as gold nanoparticles. In some embodiments, the masking construct comprises a plurality of metal nanoparticles crosslinked by a plurality of RNA or DNA oligonucleotides forming a closed loop. In one embodiment, the masking construct comprises three gold nanoparticles crosslinked by three RNA or DNA oligonucleotides forming a closed loop. In some embodiments, the cleavage of the RNA or DNA oligonucleotides by the CRISPR effector protein leads to a detectable signal produced by the metal nanoparticles.

[0288] In certain other example embodiments, the masking construct may comprise one or more RNA or DNA oligonucleotides to which are attached one or more quantum dots. In some embodiments, the cleavage of the RNA or DNA oligonucleotides by the CRISPR effector protein leads to a detectable signal produced by the quantum dots.

[0289] In one example embodiment, the masking construct may comprise a quantum dot. The quantum dot may have multiple linker molecules attached to the surface. At least a portion of the linker molecule comprises RNA or DNA. The linker molecule is attached to the quantum dot at one end and to one or more quenchers along the length or at terminal ends of the linker such that the quenchers are maintained in sufficient proximity for quenching of the quantum dot to occur. The linker may be branched. As above, the quantum dot/quencher pair is not critical, only that selection of the quantum dot/quencher pair ensures masking of the fluorophore. Quantum dots and their cognate quenchers are known in the art and can be selected for this purpose by one having ordinary skill in the art. Upon activation of the effector proteins disclosed herein, the RNA or DNA portion of the linker molecule is cleaved thereby eliminating the proximity between the quantum dot and one or more quenchers needed to maintain the quenching effect. In certain example embodiments the quantum dot is streptavidin conjugated. RNA or DNA are attached via biotin linkers and recruit quenching molecules with the sequences/5Biosg/UCUCGUACGUUC/3IAbRQSp/(SEQ ID NO: 62014) or /5Biosg/UCUCGUACGUUCUCUCGUACGUUC/3IAbRQSp/(SEQ ID NO: 62015) where /5Biosg/ is a biotin tag and/31AbRQSp/ is an Iowa black quencher (Iowa Black FQ). Upon cleavage, by the activated effectors disclosed herein the quantum dot will fluoresce visibly.

[0290] In specific embodiments, the detectable ligand may be a fluorophore and the masking component may be a quencher molecule.

[0291] In a similar fashion, fluorescence energy transfer (FRET) may be used to generate a detectable positive signal. FRET is a non-radiative process by which a photon from an energetically excited fluorophore (i.e. “donor fluorophore”) raises the energy state of an electron in another molecule (i.e. “the acceptor”) to higher vibrational levels of the excited singlet state. The donor fluorophore returns to the ground state without emitting a fluoresce characteristic of that fluorophore. The acceptor can be another fluorophore or non-fluorescent molecule. If the acceptor is a fluorophore, the transferred energy is emitted as fluorescence characteristic of that fluorophore. If the acceptor is a non-fluorescent molecule the absorbed energy is loss as heat. Thus, in the context of the embodiments disclosed herein, the fluorophore/quencher pair is replaced with a donor fluorophore/acceptor pair attached to the oligonucleotide molecule. When intact, the masking construct generates a first signal (negative detectable signal) as detected by the fluorescence or heat emitted from the acceptor. Upon activation of the effector proteins disclosed herein the RNA oligonucleotide is cleaved and FRET is disrupted such that fluorescence of the donor fluorophore is now detected (positive detectable signal).

[0292] In certain example embodiments, the masking construct comprises the use of intercalating dyes which change their absorbance in response to cleavage of long RNAs or DNAs to short nucleotides. Several such dyes exist. For example, pyronine-Y will complex with RNA and form a complex that has an absorbance at 572 nm. Cleavage of the RNA results in loss of absorbance and a color change. Methylene blue may be used in a similar fashion, with changes in absorbance at 688 nm upon RNA cleavage. Accordingly, in certain example embodiments the masking construct comprises a RNA and intercalating dye complex that changes absorbance upon the cleavage of RNA by the effector proteins disclosed herein.

[0293] In certain example embodiments, the masking construct may comprise an initiator for an HCR reaction. See e.g. Dirks and Pierce. PNAS 101, 15275-15728 (2004). HCR reactions utilize the potential energy in two hairpin species. When a single-stranded initiator having a portion of complementary to a corresponding region on one of the hairpins is released into the previously stable mixture, it opens a hairpin of one speces. This process, in turn, exposes a single-stranded region that opens a hairpin of the other species. This process, in turn, exposes a single stranded region identical to the original initiator. The resulting chain reaction may lead to the formation of a nicked double helix that grows until the hairpin supply is exhausted. Detection of the resulting products may be done on a gel or colorimetrically. Example colorimetric detection methods include, for example, those disclosed in Lu et al. “Ultra-sensitive colorimetric assay system based on the hybridization chain reaction-triggered enzyme cascade amplification ACS Appl Mater Interfaces, 2017, 9(1):167-175, Wang et al. “An enzyme-free colorimetric assay using hybridization chain reaction amplification and split aptamers” Analyst 2015, 150, 7657-7662, and Song et al. “Non-covalent fluorescent labeling of hairpin DNA probe coupled with hybridization chain reaction for sensitive DNA detection.” Applied Spectroscopy, 70(4): 686-694 (2016).

[0294] In certain example embodiments, the masking construct suppresses generation of a detectable positive signal until cleaved, or modified by an activated CRISPR effector protein. In some embodiments, the masking construct may suppress generation of a detectable positive signal by masking the detectable positive signal, or generating a detectable negative signal instead.

### Devices for Detection Assays

[0295] In certain embodiments, the detection assay can be provided on a cartridge or chip. In an aspect, the cartridge can comprise one or more ampoules and one or more wells that are communicatively coupled, allowing for the transfer, exchange or movement of reagents and sample with or without the use of beads through the chambers of the cartridge and facilitating detection assays utilizing systems/devices for facilitating the detection assay on the cartridge.

### Cartridge

[0296] The cartridge, also referred to herein as a chip, according to the present invention comprises a series of components of ampoules and chambers that are communicatively coupled with one or more other components on the cartridge. The coupling is typically a fluidic communication, for example, via channels. The cartridge may comprise a membrane that seals one or more of the chambers and/or ampoules. In an aspect, the membrane allows for storage of reagents, buffers and other solid or fluid components which cover and seal the cartridge. The membrane can be configured to be punctured, pierced or otherwise released from sealing or covering one or more components of the cartridge by a means for releasing reagents.

[0297] As noted above, certain embodiments enable the use of nucleic acid binding beads to concentrate target nucleic acid but that do not require elution of the isolated nucleic acid. Thus, in certain example embodiments, the cartridge may further comprise an activatable magnet, such as an electro-magnet. A means for activating the magnet may be located on the device, or the means for supplying the magnet or activating the magnet on the cartridge may be provided by a second device, such as those disclosed in further detail below.

[0298] An exemplary cartridge is depicted in FIG. 30A-30B. This embodiment is by way of example only, and it should be understood that other configurations of individual components on the cartridge are also envisioned without departing from the overall scope and function of the invention. The cartridge (10) can comprise two or more ampoules (80,90). A first chamber for receiving a sample (30) is also provided and can be communicatively connected to an ampoule (90) and a second chamber (40). The second chamber (40) may be a lysis chamber. The lysis chamber can in turn be communicatively connected to a channel (100). The channel (100) may be a metering channel that is communicatively coupled to an ampoule (90) and a third chamber (60). The third chamber (60) may be an amplification chamber. Hyrdophobic vents can be disposed on the cartridge (50, 70). FIG. 30B shows the cartridge body (15) with a membrane cover or laminate film (12).

[0299] The overall size of the device may be between 10, 15, 20, 25, 30, 35, 40, 45, 55, 60, 65, 70, 75, 80, 85, 90, 95, or 100 mm in width, and 45, 50, 55, 60, 65, 70, 75, 80, 85, 90, 95, 100, 105, 110, 115, 120, 125, 130, 135, 140, 145, 150, 155, 160, 165, 170, 175, 180, 185, 190, 195, or 200 mm. The sizing of ampoules, chambers, and channels can be selected to be in line with the reaction volumes discussed herein and to fit within the general size parameters of the overall cartridge.

### Ampoules

[0300] The ampoules, also referred to as blisters, allow for storage and release of reagents throughout the cartridge. Ampoules can include liquid or solid reagents, for example, lysis reagents in one ampoule and reaction reagents in another ampoule. The reagents can be as described elsewhere herein, and can be adapted for the use in the cartridge. The ampoule may be sealed by a film that allows for the bursting, puncture or other release of the contents of the ampoules. See, e.g. Becker, H. & Gartner, C. Microfluidics-enabled diagnostic systems: markets, challenges, and examples. In Microchip Diagnostics: Methods and Protocols (eds Taly, V. et al.) (Springer, New York, 2017); Czurratis et al., doi: 10.1088/0960-1317/25/4/045002. Considerations for ampoules can include as discussed in, for example, Smith, S., et al., Blister pouches for effective reagent storage on microfluidic chips for blood cell counting. Microfluid Nanofluid 20, 163 (2016). DOI:10.1007/s10404-016-1830-2. In an aspect, the seal is a frangible seal formed of a composite-layer film that is assembled to the cartride main body. While referred to herein as an ampoule, the ampoule may comprise a cavity on a chip which comprises a sealed film that is opened by the release means.

### Chambers

[0301] The chambers on the chip may located and sized for fluidic communication via channels or other communication means with ampoules and/or other chambers on the chip, see, e.g. FIG. 30A. A chamber for receiving a sample can be provided. The sample can be injected, placed in a receptacle into the chamber for receiving a sample, or otherwise transferred to the chamber. A lysis chamber may comprise, for example, capture beads, that may be used for concentration and/or extraction of the desired target material from the sample. Alternatively, the beads may be comprised in an ampoule comprising lysis reagents that are in fluidic communication with the lysis chamber. An amplification chamber may also be provided with, for example, one or more lyophilized components of the system in the amplification chamber and/or communicatively connected to an ampoule comprising one or more components of the amplification reaction.

[0302] When the cartridge comprises a magnet, it may be configured near one or more of the chambers. In an aspect, the magnet is near the lysis well, and may be configured such that the device has a means for activating the magnet. Embodiments comprising a magnet in the cartridge may be utilized with methodologies using magnetic beads for extraction of particular target molecules.

### System for Detection Assays

[0303] A system configured for use with the cartridge and to perform an assay, also referred to as a sample analysis apparatus, detection system or detection device, is configured system to receive the cartridge and conduct an assay comprising isothermal amplification of nucleic acids and detection of target nucleic acids on the cartridge. The system may comprise: a body; a door housing which may be provided in an opened state or a closed state, and configured to be coupled to the body of the sample analysis apparatus by a hinge or other closure means; a cartridge accommodating unit included in the detection system and configured to accommodate the cartridge. The system may further comprise one or more means for releasing reagents for extractions, amplification and/or detection; one or more heating means for extractions, amplification and/or detection, a means for mixing reagents for extraction, amplification, and/or detections, and/or a menas for reading the results of the assay. The device may further comprise a user interface for programming the device and/or readout of the results of the assay.

### Means for Release of Reagents

[0304] The system may comprise means for releasing reagents for extraction, amplification and/or detection. Release of reagents can be performed by a crushing, puncturing, applying heat or pressure until burst, cutting, or other means for the opening of the ampoule and release of contents. e.g. Becker, H. & Gartner, C. Microfluidics-enabled diagnostic systems: markets, challenges, and examples. In Microchip Diagnostics: Methods and Protocols (eds Taly, V. et al.) (Springer, New York, 2017); Czurratis et al., doi: 10.1088/0960-1317/25/4/045002. Mechanical actuators

### Heating Means

[0305] The heating means or heating element can be provided, for example, by electrical or chemical elements. One or more heating means can be utilized, or circuits providing regulation of temperature to one or more locations within the detection device can be utilized. In one preferred embodiment the device is configured to comprise a heating means for heating the lysis (extraction) chamber and at the amplification chamber of the cartridge. In an aspect, the heating element is disposed under the extraction well. The system can be designed with one or more heating means for extraction, amplification and/or detection.

### Mixing Means

[0306] A means for mixing reagents for extraction, amplification and/or detection can be provided. A means for mixing reagents may comprise a means for mixing one or more fluids, or a fluid with a solid or lyophilized reaction mixture can also be provided. Means for mixing that disturb the laminar flow can be provided. In an aspect, the mixing means is a passive mixer, in another aspect, the mixing means is an active mixer. See, e.g. Nam-Trung Nguyen and Zhigang Wu 2005 J. Micromech. Microeng. 15 R1, doi: 10.1088/0960-1317/15/2/R01 for discussion of mixing approaches. In an aspect, the active mixer can be based on external sources such as pressure, temperature, hydrodynamics (with electrical or magnetic forces), dielectrophoresis, electrokinetics, or acoustics. Examples of passive mixing means can be provided by use of geometric approaches, such as a curved path or channel, see, e.g. U.S. Pat. No. 7,160,025, or an expansion/contraction of a channel cross section or diameter. When the cartridge is utilized with beads, channels and wells are configured and sized for the flow of beads.

### Means for Reading the Results of the Assay

[0307] A means for reading the results of the assay can be provided in the system. The means for reading the results of the assay will depend in part on the type of detectable signal generated by the assay. In particular embodiments, the assay generates a detectable fluorescent or color readout. In these instances, the means for reading the results of the assay will be an optic means, for example a single channel or multi-channel optical means such as a fluorimeter, colorimeter or other spectroscopic sensor.

[0308] A combination of means for reading the results of the assay can be utilized, and may include readings such as turbidity, temperature, magnetic, radio, or electrical properties and or optical properties, including scattering, polarization effects, etc.

[0309] The system may further comprise a user interface for programming the device and/or readout of the results of the assay. The user interface may comprise an LED screen. The system can be further configured for a USB port that can allow for docking of four or more devices.

[0310] In an aspect, the system comprises a means for activating a magnet that is disposed within or on the cartridge.

### Lateral Flow Devices

[0311] In certain embodiments, the detection assay can be provided on a lateral flow device, as described in International Publication WO 2019/071051, incorporated herein by reference. The lateral flow device can be adapted to detect one or more coronaviruses and/or other viruses in combination of the coronavirus. The lateral flow device may comprise a flexible substrate, such as a paper substrate or a flexible polymer-based substrate, which can include freeze-dried reagents for detection assays with a visual readout of the assay results. See, WO 2019/071051 at [0145]-[0151] and Example 2, specifically incorporated herein by reference. In an aspect, lyophilized reagents can include preferred excipients that aid in rate of reaction, specificity, or other variables. The excipients may comprise trehalose, histidine, and/or glycine. In certain embodiments, the coronavirus assay can be utilized with isothermal amplification reagents, allowing amplification without complex instrumentation that may be unavailable in the field, as described in WO 2019/071051. Accordingly, the assay can be adapted for field diagnostics, including use of visual readout on a lateral flow device, rapid, sensitive detection and can be deployed for early and direct detection. Colorimetric detection can be utilized and may be particularly suited for field deployable applications, as described in International Application PCT/US2019/015726, published as WO2019/148206. In particular, colorimetric detection can be as described in WO2019/148206 at FIGS. 102, 105, 107-111 and [00306]-[00324], incorporated herein by reference.

[0312] In one embodiment, the invention provides a lateral flow device comprising a substrate comprising a first end and a second end. The first end may comprise a sample loading portion, a first region comprising a detectable ligand, two or more CRISPR effector systems, two or more detection constructs, and one or more first capture regions, each comprising a first binding agent. The substrate may also comprise two or more second capture regions between the first region of the first end and the second end, each second capture region comprising a different binding agent. Each of the two or more CRISPR effector systems may comprise a CRISPR effector protein and one or more guide sequences, each guide sequence configured to bind one or more target molecules.

[0313] The embodiments disclosed herein are directed to lateral flow detection devices that comprise SHERLOCK systems.

[0314] The device may comprise a lateral flow substrate for detecting a SHERLOCK reaction. Substrates suitable for use in lateral flow assays are known in the art. These may include, but are not necessarily limited to membranes or pads made of cellulose and/or glass fiber, polyesters, nitrocellulose, or absorbent pads (J Saudi Chem Soc 19(6):689-705; 2015), and other embodiments further described herein. The SHERLOCK system, i.e. one or more CRISPR systems and corresponding reporter constructs are added to the lateral flow substrate at a defined reagent portion of the lateral flow substrate, typically on one end of the lateral flow substrate. Reporting constructs used within the context of the present invention can comprise a first molecule and a second molecule linked by an RNA or DNA linker. The lateral flow substrate further comprises a sample portion. The sample portion may be equivalent to, continuous with, or adjacent to the reagent portion. In an aspect, the lateral flow substrate can be contained within a further device (see, e.g. FIG. 21). In an aspect, the lateral flow substrate can be utilized for visual readout of a detectable signal in one-pot reactions, e.g. wherein steps of extracting, amplifying and detecting are performed in an individual discrete volume.

### Lateral Flow Substrate

[0315] In certain example embodiments, a lateral flow device comprises a lateral flow substrate on which detection can be performed. Substrates suitable for use in lateral flow assays are known in the art. These may include, but are not necessarily limited to, membranes or pads made of cellulose and/or glass fiber, polyesters, nitrocellulose, or absorbent pads (J Saudi Chem Soc 19(6):689-705; 2015).

[0316] Lateral support substrates comprise a first and second end, and one or more capture regions that each comprise binding agents. The first end may comprise a sample loading portion, a first region comprising a detectable ligand, two or more CRISPR effector systems, two or more detection constructs, and one or more first capture regions, each comprising a first binding agent. The substrate may also comprise two or more second capture regions between the first region of the first end and the second end, each second capture region comprising a different binding agent. Each of the two or more CRISPR effector systems may comprise a CRISPR effector protein and one or more guide sequences, each guide sequence configured to bind one or more target molecules. The lateral flow substrates may be configured to detect a SHERLOCK reaction.

[0317] Lateral support substrates may be located within a housing (see for example, “Rapid Lateral Flow Test Strips” Merck Millipore 2013). The housing may comprise at least one opening for loading samples and a second single opening or separate openings that allow for reading of detectable signal generated at the first and second capture regions.

[0318] The embodiments disclosed herein can be prepared in freeze-dried format for convenient distribution and point-of-care (POC) applications. Such embodiments are useful in multiple scenarios in human health including, for example, viral detection, bacterial strain typing, sensitive genotyping, and detection of disease-associated cell free DNA. Accordingly, the lateral substrate comprising one or more of the elements of the system, including detectable ligands, CRISPR effector systems, detection constructs and binding agents may be freeze-dried to the lateral flow substrate and packaged as a ready to use device. Alternatively, all or a portion of the elements of the system may be added to the reagent portion of the lateral flow substrate at the time of using the device.

### First End and Second End of the Substrate

[0319] The substrate of the lateral flow device comprises a first and second end. The SHERLOCK system, i.e. one or more CRISPR systems and corresponding reporter constructs are added to the lateral flow substrate at a defined reagent portion of the lateral flow substrate, typically on a first end of the lateral flow substrate. Reporting constructs used within the context of the present invention comprise a first molecule and a second molecule linked by an RNA or DNA linker. The lateral flow substrate further comprises a sample portion. The sample portion may be equivalent to, continuous with, or adjacent to the reagent portion.

[0320] In certain example embodiments, the first end comprises a first region. The first region comprises a detectable ligand, two or more CRISPR effector systems, two or more detection constructs, and one or more first capture regions, each comprising a first binding agent.

### Capture Regions

[0321] The lateral flow substrate can comprise one or more capture regions. In embodiments the first end of the lateral flow substrate comprises one or more first capture regions, with two or more second capture regions between the first region of the first end of the substrate and the second end of the substrate. The capture regions may be provided as a capture line, typically a horizontal line running across the device, but other configurations are possible. The first capture region is proximate to and on the same end of the lateral flow substrate as the sample loading portion.

### Binding Agents

[0322] Specific binding-integrating molecules comprise any members of binding pairs that can be used in the present invention. Such binding pairs are known to those skilled in the art and include, but are not limited to, antibody-antigen pairs, enzyme-substrate pairs, receptor-ligand pairs, and streptavidin-biotin. In addition to such known binding pairs, novel binding pairs may be specifically designed. A characteristic of binding pairs is the binding between the two members of the binding pair.

[0323] A first binding agent that specifically binds the first molecule of the reporter construct is fixed or otherwise immobilized to the first capture region. The second capture region is located towards the opposite end of the lateral flow substrate from the first capture region. A second binding agent is fixed or otherwise immobilized at the second capture region. The second binding agent specifically binds the second molecule of the reporter construct, or the second binding agent may bind a detectable ligand. For example, the detectable ligand may be a particle, such as a colloidal particle, that when it aggregates can be detected visually, and generates a detectable positive signal. The particle may be modified with an antibody that specifically binds the second molecule on the reporter construct. If the reporter construct is not cleaved it will facilitate accumulation of the detectable ligand at the first binding region. If the reporter construct is cleaved the detectable ligand is released to flow to the second binding region. In such an embodiment, the second binding region comprises a second binding agent capable of specifically or non-specifically binding the detectable ligand on the antibody of the detectable ligand. Binding agents can be, for example, antibodies, that recognize a particular affinity tag. Such binding agents can further contain, for example, detectable labels, such as isotope labels and/or nucleic acid barcodes. A barcode is a short sequence of nucleotides (for example, DNA, RNA, or combinations thereof) that is used as an identifier. A nucleic acid barcode may have a length of 4-100 nucleotides and be either single or double-stranded. Methods for identifying cells with barcodes are known in the art. Accordingly, guide RNAs of the CRISPR effector systems described herein may be used to detect the barcode.

### Detectable Ligands

[0324] The first region is loaded with a detectable ligand, such as those disclosed herein, for example a gold nanoparticle. The detectable ligand may be a particle, such as a colloidal particle, that when it aggregates can be detected visually. The particle may be modified with an antibody that specifically binds the second molecule on the reporter construct. If the reporter construct is not cleaved it will facilitate accumulation of the detectable ligand at the first binding region. If the reporter construct is cleaved the detectable ligand is released to flow to the second binding region. In such an embodiment, the second binding agent is an agent capable of specifically or non-specifically binding the detectable ligand on the antibody on the detectable ligand. Examples of suitable binding agents for such an embodiment include, but are not limited to, protein A and protein G. In some examples, the detectable ligand is a gold nanoparticle, which may be modified with a first antibody, such as an anti-FITC antibody.

### Lateral Flow Detection Constructs

[0325] The first region also comprises a detection construct. In one example embodiment, a RNA detection construct and a CRISPR effector system (a CRISPR effector protein and one or more guide sequences configured to bind to one or more target sequences) as disclosed herein. In one example embodiment, and for purposes of further illustration, the RNA construct may comprise a FAM molecule on a first end of the detection construction and a biotin on a second end of the detection construct. Upstream of the flow of solution from the first end of the lateral flow substrate is a first test band. The test band may comprise a biotin ligand. Accordingly, when the RNA detection construct is present it its initial state, i.e. in the absence of target, the FAM molecule on the first end will bind the anti-FITC antibody on the gold nanoparticle, and the biotin on the second end of the RNA construct will bind the biotin ligand allowing for the detectable ligand to accumulate at the first test, generating a detectable signal. Generation of a detectable signal at the first band indicates the absence of the target ligand. In the presence of target, the CRISPR effector complex forms and the CRISPR effector protein is activated resulting in cleavage of the RND detection construct. In the absence of intact RNA detection construct the colloidal gold will flow past the second strip. The lateral flow device may comprise a second band, upstream of the first band. The second band may comprise a molecule capable of binding the antibody-labeled colloidal gold molecule, for example an anti-rabbit antibody capable of binding a rabbit anti-FITC antibody on the colloidal gold. Therefore, in the presence of one or more targets, the detectable ligand will accumulate at the second band, indicating the presence of the one or more targets in the sample.

[0326] In some embodiments, the first end of the lateral flow device comprises two detection constructs and each of the two detection constructs comprises an RNA or DNA oligonucleotide, comprising a first molecule on a first end and a second molecule on a second end. The first molecule and the second molecule may be linked by an RNA or DNA linker.

[0327] In some embodiments, the first molecule on the first end of the first detection construct may be FAM and the second molecule on the second end of the first detection construct may be biotin, or vice versa. In some embodiments, the first molecule on the first end of the second detection construct may be FAM and the second molecule on the second end of the second detection construct may be Digoxigenin (DIG), or vice versa.

[0328] In some embodiments, the first end may comprise three detection constructs, wherein each of the three detection constructs comprises an RNA or DNA oligonucleotide, comprising a first molecule on a first end and a second molecule on a second end. In specific embodiments, the first and second molecules on the detection constructs comprise Tye 665 and Alexa 488; Tye 665 and FAM, and Tye 665 and Digoxigenin (DIG), respectively.

[0329] In some embodiments, the first end of the lateral flow device comprises two or more CRISPR effector systems, also referred to as a CRISPR-Cas or CRISPR system. In some embodiments, such a CRISPR effector system may include a CRISPR effector protein and one or more guide sequences configured to bind to one or more target sequences.

### Samples

[0330] When utilizing the detection systems with a lateral flow substrate, samples to be screened are loaded at the sample loading portion of the lateral flow substrate. The samples must be liquid samples or samples dissolved in an appropriate solvent, usually aqueous. The liquid sample reconstitutes the SHERLOCK reagents such that a SHERLOCK reaction can occur. The liquid sample begins to flow from the sample portion of the substrate towards the first and second capture regions.

[0331] A sample for use with the invention may be a biological or environmental sample, such as a surface sample, a fluid sample, or a food sample (fresh fruits or vegetables, meats). Food samples may include a beverage sample, a paper surface, a fabric surface, a metal surface, a wood surface, a plastic surface, a soil sample, a freshwater sample, a wastewater sample, a saline water sample, exposure to atmospheric air or other gas sample, or a combination thereof. For example, household/commercial/industrial surfaces made of any materials including, but not limited to, metal, wood, plastic, rubber, or the like, may be swabbed and tested for contaminants. Soil samples may be tested for the presence of pathogenic bacteria or parasites, or other microbes, both for environmental purposes and/or for human, animal, or plant disease testing. Water samples such as freshwater samples, wastewater samples, or saline water samples can be evaluated for cleanliness and safety, and/or potability, to detect the presence of, for example, Cryptosporidium parvum, Giardia lamblia, or other microbial contamination. In further embodiments, a biological sample may be obtained from a source including, but not limited to, a tissue sample, saliva, blood, plasma, sera, stool, urine, sputum, mucous, lymph, synovial fluid, spinal fluid, cerebrospinal fluid, ascites, pleural effusion, seroma, pus, bile, aqueous or vitreous humor, transudate, exudate, or swab of skin or a mucosal membrane surface. In some particular embodiments, an environmental sample or biological samples may be crude samples and/or the one or more target molecules may not be purified or amplified from the sample prior to application of the method. Identification of microbes may be useful and/or needed for any number of applications, and thus any type of sample from any source deemed appropriate by one of skill in the art may be used in accordance with the invention.

[0332] In particular embodiments, the methods and systems can be utilized for direct detection from patient samples. In an aspect, the methods and systems can further allow for direct detection from patient samples with a visual readout to further facilitate field-deployability. In an aspect, a field depoloyable version can include, for example the lateral flow devices and systems as described herein, and/or colorimetric detection. The methods and systems can be utilized to distinguish multiple viral species and strains and identify clinically relevant mutations, important with viral outbreaks such as the coronavirus outbreak in Wuhan (2019-nCoV). In an aspect, the sample is from a nasophyringeal swab or a saliva sample. See., e.g. FIG. 40, see also, Wyllie et al., “Saliva is more sensitive for SARS-CoV-2 detection in COVID-19 patients than nasopharyngeal swabs,” DOI: 10.1101/2020.04.16.20067835.

Methods for Detecting and/or Quantifying Target Nucleic Acids

[0333] In some embodiments, the invention provides methods for detecting target nucleic acids in a sample. Such methods may comprise contacting a sample with the first end of a lateral flow device as described herein. The first end of the lateral flow device may comprise a sample loading portion, wherein the sample flows from the sample loading portion of the substrate towards the first and second capture regions and generates a detectable signal.

[0334] A positive detectable signal may be any signal that can be detected using optical, fluorescent, chemiluminescent, electrochemical or other detection methods known in the art, as described elsewhere herein.

[0335] In some embodiments, the lateral flow device may be capable of detecting two different target nucleic acid sequences. In some embodiments, this detection of two different target nucleic acid sequences may occur simultaneously.

[0336] In some embodiments, the absence of target nucleic acid sequences in a sample elicits a detectable fluorescent signal at each capture region. In such instances, the absence of any target nucleic acid sequences in a sample may cause a detectable signal to appear at the first and second capture regions.

[0337] In some embodiments, the lateral flow device as described herein is capable of detecting three different target nucleic acid sequences. In specific embodiments, when the target nucleic acid sequences are absent from the sample, a fluorescent signal may be generated at each of the three capture regions. In such exemplary embodiments, a fluorescent signal may be absent at the capture region for the corresponding target nucleic acid sequence when the sample contains one or more target nucleic acid sequences.

[0338] Samples to be screened are loaded at the sample loading portion of the lateral flow substrate. The samples must be liquid samples or samples dissolved in an appropriate solvent, usually aqueous. The liquid sample reconstitutes the system reagents such that a SHERLOCK reaction can occur. Intact reporter construct is bound at the first capture region by binding between the first binding agent and the first molecule. Likewise, the detection agent will begin to collect at the first binding region by binding to the second molecule on the intact reporter construct. If target molecule(s) are present in the sample, the CRISPR effector protein collateral effect is activated. As activated CRISPR effector protein comes into contact with the bound reporter construct, the reporter constructs are cleaved, releasing the second molecule to flow further down the lateral flow substrate towards the second binding region. The released second molecule is then captured at the second capture region by binding to the second binding agent, where additional detection agent may also accumulate by binding to the second molecule. Accordingly, if the target molecule(s) is not present in the sample, a detectable signal will appear at the first capture region, and if the target molecule(s) is present in the sample, a detectable signal will appear at the location of the second capture region.

[0339] In some embodiments, the invention provides a method for quantifying target nucleic acids in samples comprising distributing a sample or set of samples into one or more individual discrete volumes comprising two or more CRISPR systems as described herein. The method may comprise using HDA to amplify one or more target molecules in the sample or set of samples, as described herein. The method may further comprise incubating the sample or set of samples under conditions sufficient to allow binding of the guide RNAs to one or more target molecules. The method may further comprise activating the CRISPR effector protein via binding of the guide RNAs to the one or more target molecules. Activating the CRISPR effector protein may result in modification of the detection construct such that a detectable positive signal is generated. The method may further comprise detecting the one or more detectable positive signals, wherein detection indicates the presence of one or more target molecules in the sample. The method may further comprise comparing the intensity of the one or more signals to a control to quantify the nucleic acid in the sample. The steps of amplifying, incubating, activating, and detecting may all be performed in the same individual discrete volume.

[0340] An “individual discrete volume” is a discrete volume or discrete space, such as a container, receptacle, or other defined volume or space that can be defined by properties that prevent and/or inhibit migration of nucleic acids and reagents necessary to carry out the methods disclosed herein, for example a volume or space defined by physical properties such as walls, for example the walls of a well, tube, or a surface of a droplet, which may be impermeable or semipermeable, or as defined by other means such as chemical, diffusion rate limited, electro-magnetic, or light illumination, or any combination thereof. By “diffusion rate limited” (for example diffusion defined volumes) is meant spaces that are only accessible to certain molecules or reactions because diffusion constraints effectively defining a space or volume as would be the case for two parallel laminar streams where diffusion will limit the migration of a target molecule from one stream to the other. By “chemical” defined volume or space is meant spaces where only certain target molecules can exist because of their chemical or molecular properties, such as size, where for example gel beads may exclude certain species from entering the beads but not others, such as by surface charge, matrix size or other physical property of the bead that can allow selection of species that may enter the interior of the bead. By “electro-magnetically” defined volume or space is meant spaces where the electro-magnetic properties of the target molecules or their supports such as charge or magnetic properties can be used to define certain regions in a space such as capturing magnetic particles within a magnetic field or directly on magnets. By “optically” defined volume is meant any region of space that may be defined by illuminating it with visible, ultraviolet, infrared, or other wavelengths of light such that only target molecules within the defined space or volume may be labeled. One advantage to the used of non-walled, or semipermeable is that some reagents, such as buffers, chemical activators, or other agents maybe passed in Applicants' through the discrete volume, while other material, such as target molecules, maybe maintained in the discrete volume or space. Typically, a discrete volume will include a fluid medium, (for example, an aqueous solution, an oil, a buffer, and/or a media capable of supporting cell growth) suitable for labeling of the target molecule with the indexable nucleic acid identifier under conditions that permit labeling. Exemplary discrete volumes or spaces useful in the disclosed methods include droplets (for example, microfluidic droplets and/or emulsion droplets), hydrogel beads or other polymer structures (for example poly-ethylene glycol di-acrylate beads or agarose beads), tissue slides (for example, fixed formalin paraffin embedded tissue slides with particular regions, volumes, or spaces defined by chemical, optical, or physical means), microscope slides with regions defined by depositing reagents in ordered arrays or random patterns, tubes (such as, centrifuge tubes, microcentrifuge tubes, test tubes, cuvettes, conical tubes, and the like), bottles (such as glass bottles, plastic bottles, ceramic bottles, Erlenmeyer flasks, scintillation vials and the like), wells (such as wells in a plate), plates, pipettes, or pipette tips among others. In certain example embodiments, the individual discrete volumes are the wells of a microplate. In certain example embodiments, the microplate is a 96 well, a 384 well, or a 1536 well microplate.

[0341] Incubating the sample at either the amplification step or the extraction steps as described herein can be performed using heat sources known in the art. Advantageously, the heat source can be readily commercially available heating sources that do not require complicated instrumentation. The heating sources can be included in a device that allows for the one-pot reaction detailed herein. Exemplary heating systems can include heating blocks, incubators, and/or water baths with temperatures maintained by commercially available sous-vide cookers. In this way, sample diagnostics can be performed without the requirement of expensive and proprietary equipment found primarily in diagnostic laboratory and hospital settings.

[0342] In certain example embodiments, paper-based microfluidics may be used for transfer of samples or reagents. For example, paper strips having wax barrier printed at a defined distance from the end of a paper dipstick may be used to define a volume of reagent or sample to be transferred. For example, a wax barrier may be printed across a paper dipstick to define a microliter volume such that when the dipstick is transferred into a volume of a reagent or sample only a microliter of said reagent or sample is absorbed onto the dipstick. The dipstick may be place in a second reagent mix, where the reagent or sample will diffuse into the reaction mixture. Such components allow for preparation and use of the assay without specialized equipment such as pipettors.

[0343] Optical means may be used to assess the presence and level of a given target molecule. In certain embodiments, an optical sensor detects unmasking of a fluorescent masking agent. In certain embodiments, the device of the present invention may include handheld portable devices for diagnostic reading of an assay (see e.g., Vashist et al., Commercial Smartphone-Based Devices and Smart Applications for Personalized Healthcare Monitoring and Management, Diagnostics 2014, 4(3), 104-128; mReader from Mobile Assay; and Holomic Rapid Diagnostic Test Reader). As provided in Example 10, Applicants have developed an application for mobile devices that aid a user in interpreting lateral flow results (FIGS. 63C and 65A-65B).

[0344] As noted herein, certain embodiments allow detection via colorimetric change which has certain attendant benefits when embodiments are utilized in POC situations and or in resource poor environments where access to more complex detection equipment to readout the signal may be limited. However, portable embodiments disclosed herein may also be coupled with hand-held spectrophotometers that enable detection of signals outside the visible range. An example of a hand-held spectrophotometer device that may be used in combination with the present invention is described in Das et al. “Ultra-portable, wireless smartphone spectrophotometer for rapid, non-destructive testing of fruit ripeness.” Nature Scientific Reports. 2016, 6:32504, DOI: 10.1038/srep32504. Finally, in certain embodiments utilizing quantum dot-based masking constructs, use of a hand-held UV light, or other suitable device, may be successfully used to detect a signal owing to the near complete quantum yield provided by quantum dots.

### Amplifying Target Molecules

[0345] The step of amplifying one or more target molecules can comprise amplification systems known in the art. In some embodiments, amplification is isothermal. In certain example embodiments, target RNAs and/or DNAs may be amplified prior to activating the CRISPR effector protein. Any suitable RNA or DNA amplification technique may be used. In certain embodiments, the amplifying step may take less than about 1 hour, 50 minutes, 40 minutes, 30 minutes, 25 minutes, 20 minutes or 15 minutes, which may depend on the sample, starting concentrations and nature of amplification used.

[0346] In certain embodiments, the amplifying of the target molecules and the detection of the target molecules can be performed in a single reaction, for example, a ‘one-pot’ method. Guidance for use of a single-pot approach can be as described in Gootenberg, et al., Science 2018 Apr. 27:360 (6387) 439-444 (using Cas13, Cas12a and Csm6 generally, detecting multiple targets in a single reaction, and specifically performing DNA extraction in a sample and using as input for direct detection at Figure S33); and Ding et al., “All-in-One Dual CRISPR-Cas12a (AIOD-CRISPR) Assay: A Case for Rapid, Ultrasensitive and Visual Detection of Novel Coronavirus SARS-CoV-2 and HIV Virus,” doi:10.1101/2020.03.19.998724, biorxiv preprint (utilizing a pair of crRNAs with dual CRISPR-Cas12a detection for a one-pot approach to target-specific nucleic acid detection); and International Patent Application PCT/US2020/022795, filed Mar. 13, 2020, incorporated herein by reference in its entirety.

[0347] In certain example embodiments, the RNA or DNA amplification is an isothermal amplification. In certain example embodiments, the isothermal amplification may be nucleic-acid sequenced-based amplification (NASBA), recombinase polymerase amplification (RPA), loop-mediated isothermal amplification (LAMP), strand displacement amplification (SDA), helicase-dependent amplification (HDA), or nicking enzyme amplification reaction (NEAR). In certain example embodiments, non-isothermal amplification methods may be used which include, but are not limited to, PCR, multiple displacement amplification (MDA), rolling circle amplification (RCA), ligase chain reaction (LCR), or ramification amplification method (RAM).

[0348] The amplifying of target molecules can be optimized by methods as detailed herein. In an aspect, the design optimizes the primers used in the amplification, In particular aspects, the isothermal amplification is used alone. In another aspect, the iotheraml amplification is used with CRISPR-Cas systems. In either approach, design considerations can follow a rational design for optimization of the reactions. Optimization of the methods as disclosed herein can include first screening primers to identify one or more sets of primers that work well for a particular target, Cas protein and/or reaction. Once the primers have been screened, titration of magnesium concentration can be performed to identify an optimal magnesium concentration for higher signal to noise readout. Once an optimum magnesium concentration is identified, additional additives are screened at around 20-25% of the reaction, and once additives are identified, these additives, such as those additives identified in FIG. 17, can be evaluated and varied in concentration to identify optimal reaction kinetics for specific reaction parameters. In an example, varying additives with specific primers, target, Cas protein (when CRISPR system is used), temperature, and other additive concentrations within the reaction can be identified. Optimization can be made with the goal of reducing the number of steps and buffer exchanges that have to occur in the reaction, simplifying the reaction and reducing the risks of contamination at transfer steps. In an aspect, addition of inhibitors, such as proteinase K can be considered so that buffer exchanges can be reduced. Similarly, optimizing the salt levels as well as the type of salt utilized can further facilitate and optimize the one-pot detections disclosed herein. In an aspect, potassium chloride can be utilized rather than sodium choloride when such amplification approaches are used with bead concentration in a lysis step. In certain example embodiments, taurine is provided at a final concentration of about 20 mM to about 100 mM.

### Loop-Mediated Isothermal Amplification

[0349] In certain example embodiments, a loop-mediated isothermal amplification (LAMP) reaction may be used to target nucleic acids, which encompasses both LAMP and RT-LAMP reactions. LAMP can be performed with a four-primer system for isothermal nucleic acid amplification in conjunction with a polymerase. Notomi et al., Nucleic Acids Res. 2000, 28, 12, Nagamine et al., Molecular and Cellular Probes (2002) 16, 223-229, doi: 10.1006/mcpr.2002.0415. When performing LAMP with a 4-primer system, two loop-forming inner primers, denoted as FIP and BIP, are provided with two outer primers, F3 and B3. The inner primers each contain two distinct sequences, one for priming in the first stage of the amplification and the other sequence for self-priming in subsequent amplification states. The two outer primers initiate strand displacement of nucleic acid strands initiated from the FIP and BIP primers, thereby generating formation of loops and strand displacement nucleic acid synthesis utilizing the provided polymerase. LAMP can be conducted with two to six primers, ranging from only the two loop-forming primers, up to at least the addition of 2 additional primers, LF and LB along with the two outer primers and two inner primers. LAMP technologies advantageously have high specificity and can work at a variety of pH and temperature. In a preferred aspect, the LAMP is an isothermal reaction at between about 45° C. to 75° C., 55 to 70° C. or 60° C. to 65° C. Colorimetric LAMP (Y. Zhang et al., doi:10.1101/2020.92.26.20028373), RT-LAMP (Lamb et al., doi: 10.1101/2020.02.19.20025155; and Yang et al., doi:10.1101/2020.03.02.20030130) have been developed for detection of COVID-19, and are incorporated herein by reference in their entirety.

[0350] In certain embodiments, the LAMP reagents may include Bst 2.0+RTx or Bst 3.0 from New England Biolabs. In certain embodiments, the LAMP reagents may comprise colorimetric or fluorescent detection. Detection of LAMP products can be accomplished using colorimetric tools, such as hydroxy napthol blue (see, e.g. Goto, M., et al., Colorimetric detection of loop-mediated isothermal amplification reaction by using hydroxy naphthol blue. Biotechniques, 2009. 46 (3): p. 167-72.) leuco triphenylmethane dyes (see, e.g. Miyamoto, S., et al., Method for colorimetric detection of double-stranded nucleic acid using leuco triphenylmethane dyes. Anal Biochem, 2015. 473: p. 28-33) and pH-sensitive dyes (see, e.g. Tanner, N. A., Y. Zhang, and T. C. Evans, Jr., Visual detection of isothermal nucleic acid amplification using pH-sensitive dyes. Biotechniques, 2015. 58 (2): p. 59-68); as well as fluorescent detection (see, e.g. Yu et al., Clinical Chemistry, hvaa102, doi:10.1093/clinchem/hvaa102 12 May 2020), including use of quenching probes (see, e.g. Shirato et al., J Virol Methods. 2018 August; 258:41-48. doi: 10.1016/j.jviromet.2018.05.006).

[0351] In an aspect, the primer sets for LAMP are designed to amplify one or more target sequences, generating amplicons that comprise the one or more target sequences. Optionally, the primers can comprise barcodes that can be designed as described elsewhere herein. Incubating to a temperature sufficient for LAMP amplification, e.g. 50° C.−72° C., more preferably 55° C. to 65° C., using a polymerase and, optionally a reverse transcriptase (in the event RT-LAMP is utilized). Preferably the enzymes utilized in the LAMP reaction are heat-stabilized. LAMP primer sites have been designed, see, e.g. Park et al., “Development of Reverse Transcription Loop-Mediated Isothermal Amplification Assays Targeting SARS-CoV-2” J. of Mol. Diag. (2020). Optionally, a control template is further provided with the sample, which may differ from the target sequence but share primer binding sites. In an exemplary embodiment, visual read out of the detection results can be accomplished using commercially-available lateral flow substrate, e.g. a commercially available paper substrate. In certain embodiments, the LAMP control can comprise ACTB Set 1, and may be optionally be provided in a multiplexed format with the primer set of the target sequence at about 15% to about 50% of the total primer amount, preferably about 20% of the total primer amount.

[0352] In certain embodiments, the LAMP primer can be selected from SEQ ID NOS: 1-40499, or Table 1A. In certain embodiments, the primers are designed to target one or more of the targets in Table 1B, for example, Chlamydia trachomatis D/UW-3/CX chromosome, Hepatitis A virus, Hepatitis B virus (strain ayw) genome, Hepatitis C virus (isolate H77) genotype 1, complete cds, Hepatitis C virus genotype 1, Hepatitis C virus genotype 2, Hepatitis C virus genotype 3, genome, Hepatitis C virus genotype 4, genome, Hepatitis C virus genotype 5, genome, Hepatitis C virus genotype 6, Hepatitis C virus genotype 7, Hepatitis delta virus, Hepatitis E virus, Hepatitis E virus rat/R63/DEU/2009, Hepatitis GB virus A, Hepatitis GB virus B, Human adenovirus 54, Human adenovirus A, Human betaherpesvirus 6A, variant A DNA, complete virion genome, isolate U1102, Human coronavirus 229E, Human coronavirus HKU1, Human Coronavirus NL63, Human coronavirus OC43 strain ATCC VR-759, Human gammaherpesvirus 4, Human genital-associated circular DNA virus-1 isolate 349, Human herpesvirus 1 strain 17, Human herpesvirus 2 strain HG52, Human herpesvirus 3, Human herpesvirus 4, Human herpesvirus 5 strain Merlin, Human herpesvirus 6B, Human herpesvirus 7, Human herpesvirus 8 strain GK18, Human immunodeficiency virus 1, Human immunodeficiency virus 2, Human papillomavirus 54, Human papillomavirus 116, Human papillomavirus—1, Human papillomavirus—2, Human papillomavirus—18, Human papillomavirus—61, Human papillomavirus isolate SE379, Human papillomavirus KCS, Human papillomavirus type 4, Human papillomavirus type 6b, Human papillomavirus type 7 genomic DNA, Human papillomavirus type 9, Human papillomavirus type 10 genomic DNA, Human papillomavirus type 16, Human papillomavirus type 26, Human papillomavirus type 30 genomic DNA, Human papillomavirus type 32, Human papillomavirus type 34, Human papillomavirus type 41, Human papillomavirus type 48, Human papillomavirus type 49, Human papillomavirus type 50, Human papillomavirus type 53, Human papillomavirus type 60, Human papillomavirus type 63, Human papillomavirus type 71 DNA, Human papillomavirus type 85 isolate 114B, Human papillomavirus type 88, Human papillomavirus type 90, Human papillomavirus type 92, Human papillomavirus type 96, Human papillomavirus type 101, Human papillomavirus type 103, Human papillomavirus type 108, Human papillomavirus type 109, Human papillomavirus type 112, Human papillomavirus type 121, Human papillomavirus type 126, Human papillomavirus type 128, Human papillomavirus type 129, Human papillomavirus type 131, Human papillomavirus type 132, Human papillomavirus type 134, Human papillomavirus type 135, Human papillomavirus type 136, Human papillomavirus type 137, Human papillomavirus type 140, Human papillomavirus type 144, Human papillomavirus type 154 isolate PV77, Human papillomavirus type 156 isolate GC01, Human papillomavirus type 161 isolate KCl, Human papillomavirus type 163 isolate KC3, Human papillomavirus type 166 isolate KC9, Human papillomavirus type 167 isolate KC10, Human papillomavirus type 172, Human papillomavirus type 175 isolate SE87, Human, apillomavirus type 178, Human papillomavirus type 179 isolate SIBX16, Human papillomavirus type 184 isolate SIBX17, Human papillomavirus type 187 isolate ACS447, Human papillomavirus type 201 isolate HPV201, Human papillomavirus type 204 isolate A342, Human papillomoavirus type 5, Human parainfluenza virus 1, Human parainfluenza virus 3, Human rhinovirus 1 strain ATCC VR-1559, Human rhinovirus 3, Human rhinovirus 14, Human rhinovirus 89, Human rhinovirus C, Human rhinovirus NAT001 polyprotein gene, complete cds, Human T-lymphotropic virus 1, Influenza A virus (A/California/07/2009(H1N1)) segment 1 polymerase PB2 (PB2) gene, complete cds, Influenza A virus (A/California/07/2009(H1N1)) segment 2 polymerase PB1 (PB1) gene, complete cds; and nonfunctional PB1-F2 protein (PB1-F2) gene, Influenza A virus (A/California/07/2009(H1N1)) segment 3 polymerase PA (PA) gene, complete cds, Influenza A virus (A/California/07/2009(H1N1)) segment 4 hemagglutinin (HA) gene, complete cds, Influenza A virus (A/California/07/2009(H1N1)) segment 5 nucleocapsid protein (NP) gene, complete cds, Influenza A virus (A/California/07/2009(H1N1)) segment 6 neuraminidase (NA) gene, complete cds, Influenza A virus (A/California/07/2009(H1N1)) segment 7 matrix protein 2 (M2) and matrix protein 1 (M1) genes, complete cds, Influenza A virus (A/California/07/2009(H1N1)) segment 8 nuclear export protein (NEP) and nonstructural protein 1 (NS1) genes, complete cds, Influenza A virus (A/Goose/Guangdong/1/96(H5N1)) neuraminidase (NA) gene, complete cds, Influenza A virus (A/Goose/Guangdong/1/96(H5N1)) nucleocapsid protein (NP) gene, complete cds, Influenza A virus (A/Goose/Guangdong/1/96(H5N1)) polymerase (PB2) gene, complete cds, Influenza A virus (A/goose/Guangdong/1/1996(H5N1)) hemagglutinin (HA) gene, complete cds, Influenza A virus (A/goose/Guangdong/1/1996(H5N1)) polymerase (PA) and PA-X protein (PA-X) genes, complete cds, Influenza A virus (A/goose/Guangdong/1/1996(H5N1)) polymerase (PB1) and PB1-F2 protein (PB1-F2) genes, complete cds, Influenza A virus (A/goose/Guangdong/1/1996(H5N1)) segment 7, Influenza A virus (A/goose/Guangdong/1/1996(H5N1)) segment 8, Influenza A virus (A/Hong Kong/1073/99(H9N2)) segment 5, Influenza A virus (A/Hong Kong/1073/99(H9N2)) segment 7, Influenza A virus (A/Hong Kong/1073/99(H9N2)) segment 8, Influenza A virus (A/Korea/426/1968(H2N2)) segment 1, Influenza A virus (A/Korea/426/1968(H2N2)) segment 2, Influenza A virus (A/Korea/426/1968(H2N2)) segment 3, Influenza A virus (A/Korea/426/1968(H2N2)) segment 4, Influenza A virus (A/Korea/426/1968(H2N2)) segment 5, Influenza A virus (A/Korea/426/1968(H2N2)) segment 6, Influenza A virus (A/Korea/426/1968(H2N2)) segment 7, Influenza A virus (A/Korea/426/1968(H2N2)) segment 8, Influenza A virus (A/New York/392/2004(H3N2)) segment 1, Influenza A virus (A/New York/392/2004(H3N2)) segment 2, Influenza A virus (A/New York/392/2004(H3N2)) segment 3, Influenza A virus (A/New York/392/2004(H3N2)) segment 4, Influenza A virus (A/New York/392/2004(H3N2)) segment 5, Influenza A virus (A/New York/392/2004(H3N2)) segment 6, Influenza A virus (A/New York/392/2004(H3N2)) segment 7, Influenza A virus (A/New York/392/2004(H3N2)) segment 8, Influenza A virus (A/Puerto Rico/8/1934(H1N1)) segment 1, Influenza A virus (A/Puerto Rico/8/1934(H1N1)) segment 2, Influenza A virus (A/Puerto Rico/8/1934(H1N1)) segment 3, Influenza A virus (A/Puerto Rico/8/1934(H1N1)) segment 4, Influenza A virus (A/Puerto Rico/8/1934(H1N1)) segment 5, Influenza A virus (A/Puerto Rico/8/1934(H1N1)) segment 6, Influenza A virus (A/Puerto Rico/8/1934(H1N1)) segment 7, Influenza A virus (A/Puerto Rico/8/1934(H1N1)) segment 8, Influenza A virus (A/Shanghai/02/2013(H7N9)) segment 1 polymerase PB2 (PB2) gene, complete cds, Influenza A virus (A/Shanghai/02/2013(H7N9)) segment 2 polymerase PB1 (PB1) and PB1-F2 protein (PB1-F2) genes, complete cds, Influenza A virus (A/Shanghai/02/2013(H7N9)) segment 3 polymerase PA (PA) and PA-X protein (PA-X) genes, complete cds, Influenza A virus (A/Shanghai/02/2013(H7N9)) segment 4 hemagglutinin (HA) gene, complete cds, Influenza A virus (A/Shanghai/02/2013(H7N9)) segment 5 nucleocapsid protein (NP) gene, complete cds, Influenza A virus (A/Shanghai/02/2013(H7N9)) segment 6 neuraminidase (NA) gene, complete cds, Influenza A virus (A/Shanghai/02/2013(H7N9)) segment 7 matrix protein 2 (M2) and matrix protein 1 (M1) genes, complete cds, Influenza A virus (A/Shanghai/02/2013(H7N9)) segment 8 nuclear export protein (NEP) and nonstructural protein 1 (NS1) genes, complete cds, Influenza A virus ha gene for Hemagglutinin, genomic RNA, strain A/Hong Kong/1073/99(H9N2), Influenza A virus na gene for neuraminidase, genomic RNA, strain A/Hong Kong/1073/99(H9N2), Influenza A virus pa gene for polymerase PA, genomic RNA, strain A/Hong Kong/1073/99(H9N2), Influenza A virus pb1 gene for polymerase Pb1, genomic RNA, strain A/Hong Kong/1073/99(H9N2), Influenza A virus pb2 gene for polymerase Pb2, genomic RNA, strain A/Hong Kong/1073/99(H9N2), Influenza B virus (B/Lee/1940) segment 2, Influenza B virus (B/Lee/1940) segment 3, Influenza B virus (B/Lee/1940) segment 4, Influenza B virus (B/Lee/1940) segment 5, Influenza B virus (B/Lee/1940) segment 6, Influenza B virus (B/Lee/1940) segment 7, Influenza B virus (B/Lee/1940) segment 8, Influenza B virus RNA 1, Influenza C virus (C/Ann Arbor/1/50) HEF gene for hemagglutinin-esterase-fusion, complete cds, Influenza C virus (C/Ann Arbor/1/50) M1, CM2 genes for matrix protein, CM2 protein, complete cds, Influenza C virus (C/Ann Arbor/1/50) P3 gene for polymerase 3, complete cds, Influenza C virus (C/Ann Arbor/1/50) PB1 gene for polymerase 1, complete cds, Influenza C virus (C/Ann Arbor/1/50) PB2 gene for polymerase 2, complete cds, Influenza C virus (C/Ann Arbor/1/50) segment 5, Influenza C virus (C/Ann Arbor/1/50) segment 7, Neisseria gonorrhoeae strain WHO F chromosome 1, Respiratory syncytial virus, SARS coronavirus, or Streptococcus pyogenes strain NCTC8198 chromosome 1.

### NASBA

[0353] In certain example embodiments, the RNA or DNA amplification is NASBA, which is initiated with reverse transcription of target RNA by a sequence-specific reverse primer to create a RNA/DNA duplex. RNase H is then used to degrade the RNA template, allowing a forward primer containing a promoter, such as the T7 promoter, to bind and initiate elongation of the complementary strand, generating a double-stranded DNA product. The RNA polymerase promoter-mediated transcription of the DNA template then creates copies of the target RNA sequence. Importantly, each of the new target RNAs can be detected by the guide RNAs thus further enhancing the sensitivity of the assay. Binding of the target RNAs by the guide RNAs then leads to activation of the CRISPR effector protein and the methods proceed as outlined above. The NASBA reaction has the additional advantage of being able to proceed under moderate isothermal conditions, for example at approximately 41° C., making it suitable for systems and devices deployed for early and direct detection in the field and far from clinical laboratories.

### RPA

[0354] In certain other example embodiments, a recombinase polymerase amplification (RPA) reaction may be used to amplify the target nucleic acids. RPA reactions employ recombinases which are capable of pairing sequence-specific primers with homologous sequence in duplex DNA. If target DNA is present, DNA amplification is initiated and no other sample manipulation such as thermal cycling or chemical melting is required. The entire RPA amplification system is stable as a dried formulation and can be transported safely without refrigeration. RPA reactions may also be carried out at isothermal temperatures with an optimum reaction temperature of 37-42o C. The sequence specific primers are designed to amplify a sequence comprising the target nucleic acid sequence to be detected. In certain example embodiments, a RNA polymerase promoter, such as a T7 promoter, is added to one of the primers. This results in an amplified double-stranded DNA product comprising the target sequence and a RNA polymerase promoter. After, or during, the RPA reaction, a RNA polymerase is added that will produce RNA from the double-stranded DNA templates. The amplified target RNA can then in turn be detected by the CRISPR effector system. In this way target DNA can be detected using the embodiments disclosed herein. RPA reactions can also be used to amplify target RNA. The target RNA is first converted to cDNA using a reverse transcriptase, followed by second strand DNA synthesis, at which point the RPA reaction proceeds as outlined above.

### Transposase Based Amplification

[0355] Embodiments disclosed herein provide systems and methods for isothermal amplification of target nucleic acid sequences by contacting oligonucleotides containing the target nucleic acid sequence with a transposon complex. The oligonucleotides may be single stranded or double stranded RNA, DNA, or RNA/DNA hybrid oligonucleotides. The transposon complex comprises a transposase and a transposon sequence comprising one or more RNA polymerase promoters. The transposase facilitates insertion of the one or more RNA polymerase promoters into the oligonucleotide. A RNA polymerase promoter can then transcribe the target nucleic acid sequence from the inserted one or more RNA polymerase promoters. One advantage of this system is that there is no need to heat or melt double-stranded DNA templates, since RNA polymerase polymerases require a double-stranded template. Such isothermal amplification is fast and simple, obviating the need for complicated and expensive instrumentation for denaturation and cooling. In certain example embodiment the RNA polymerase promoter is a native of modified T7 RNA promoter.

[0356] The term “transposon”, as used herein, refers to a nucleic acid segment, which is recognized by a transposase or an integrase enzyme and which is an essential component of a functional nucleic acid-protein complex (i.e. a transposome) capable of transposition. The term “transposase” as used herein refers to an enzyme, which is a component of a functional nucleic acid-protein complex capable of transposition and which is mediating transposition. The term “transposase” also refers to integrases from retrotransposons or of retroviral origin. Transposon complexes form between a transposase enzyme and a fragment of double stranded DNA that contains a specific binding sequence for the enzyme, termed “transposon end”. The sequence of the transposon binding site can be modified with other bases, at certain positions, without affecting the ability for transposon complex to form a stable structure that can efficiently transpose into target DNA.

[0357] In embodiments provided herein, the transposon complex may comprise a transposase and a transposon sequence comprising one or more RNA polymerase promoters. The term “promoter” refers to a region of DNA involved in binding the RNA polymerase to initiate transcription. In specific embodiments, the RNA polymerase promoter may be a T7 RNA polymerase promoter. The T7 RNA promoter may be inserted into the double-stranded polynucleotide using the transposase. In some embodiments, insertion of the T7 RNA polymerase promoter into the oligonucleotide may be random.

[0358] The frequency of transposition is very low for most transposons, which use complex mechanisms to limit activity. Tn5 transposase, for example, utilizes a DNA binding sequence that is suboptimal and the C-terminus of the transposase interferes with DNA binding. Mechanisms involved in Tn5 transposition have been carefully characterized by Reznikoff and colleagues. Tn5 transposes by a cut-and-paste mechanism. The transposon has two pairs of 19 bp elements that are utilized by the transposase: outside elements (OE) and inside elements (IE). One transposase monomer binds to each of the two elements that are utilized. After a monomer is bound to each end of the transposon, the two monomers dimerize, forming a synapse. Vectors with donor backbones of at least 200 bp, but less than 1000 bp, are most functional for transposition in bacteria. Transposon cleavage occurs by trans catalysis and only when monomers bound to each DNA end are in a synaptic complex. Tn5 transposes with a relaxed target site selection and can therefore insert into target DNA with little to no target sequence specificity.

[0359] The natural downregulation of Tn5 transposition can be overcome by selection of a hyperactive transposase and by optimizing the transposase-binding elements [Yorket al. 1998]. A mosaic element (ME), made by modification of three bases of the wild type OE, led to a 50-fold increase in transposition events in bacteria as well as cell-free systems. The combined effect of the optimized ME and hyperactive mutant transposase is estimated to result in a 100-fold increase in transposition activity. Goryshin et al showed that preformed Tn5 transposition complexes could be functionally introduced into bacterial or yeast by electroporation [Goryshin et al. 2000]. Linearization of the DNA, to have inverted repeats precisely positioned at both ends of the transposon, allowed Goryshin and coworkers to bypass the cutting step of transposition thus enhancing transposition efficiency.

[0360] In some embodiments, the transposase may be used to tagment the oligonucleotide sequence comprising the target sequence. The term “tagmentation” refers to a step in the Assay for Transposase Accessible Chromatin using sequencing (ATAC-seq) as described. (See, Buenrostro, J. D., Giresi, P. G., Zaba, L. C., Chang, H. Y., Greenleaf, W. J., Transposition of native chromatin for fast and sensitive epigenomic profiling of open chromatin, DNA-binding proteins and nucleosome position. Nature methods 2013; 10 (12): 1213-1218). Specifically, a hyperactive Tn5 transposase loaded in vitro with adapters for high-throughput DNA sequencing, can simultaneously fragment and tag a genome with sequencing adapters. In one embodiment the adapters are compatible with the methods described herein.

[0361] In some embodiments, the transposase may be a Tn5 transposase. In some embodiments, the transposase may be a variant of a Tn5 transposase, or an engineered transposase. Transposases may be engineered using any method known in the art. The engineered transposase may be optimized to function at a temperature ranging from 30° C. to 45° C., 35° C. to 40° C. or any temperature in between. The engineered transposase may be optimized to release from the oligonucleotide at a faster rate compared to a wild type transposase.

[0362] In some embodiments, the transposase may be a Tn5 transposase, a Mu transposase, or a Tn7 transposase. Transposition efficiency in vitro may vary depending on the transposon system used. Generally, Tn5 and Mu transposases effect higher levels of transposition efficiency. In some embodiments, insertion may be random. In some embodiments, insertion may occur in GC rich regions of the target sequence.

[0363] In some embodiments, the transposon sequence may comprise two 19 base pair Mosaic End (ME) Tn5 transposase recognition sequences. Tn5 transposases will generally transpose any DNA sequence contained between such short 19 base pair ME Tn5 transposase recognition sequences.

[0364] In some embodiments, use of a transposase allows for separation of a double-stranded polynucleotide in the absence of heat or melting. Embodiments can be as described in PCT/US2019/039195, entitled CRISPR/Cas and Transposase Based Amplification Compositions, Systems and Methods, incorporated herein by reference.

### Nickase Dependent Amplification

[0365] In an embodiment of the invention may comprise nickase-based amplification. The nicking enzyme may be a CRISPR protein. Accordingly, the introduction of nicks into dsDNA can be programmable and sequence-specific. In an embodiment of the invention, two guides can be designed to target opposite strands of a dsDNA target. According to the invention, the nickase can be Cpf1, C2c1, Cas9 or any ortholog or CRISPR protein that cleaves or is engineered to cleave a single strand of a DNA duplex. The nicked strands may then be extended by a polymerase. In an embodiment, the locations of the nicks are selected such that extension of the strands by a polymerase is towards the central portion of the target duplex DNA between the nick sites. In certain embodiments, primers are included in the reaction capable of hybridizing to the extended strands followed by further polymerase extension of the primers to regenerate two dsDNA pieces: a first dsDNA that includes the first strand Cpf1 guide site or both the first and second strand Cpf1 guide sites, and a second dsDNA that includes the second strand Cpf1 guide site or both the first and second strand Cprf guide sites. These pieces continue to be nicked and extended in a cyclic reaction that exponentially amplifies the region of the target between nicking sites.

[0366] The amplification can be isothermal and selected for temperature. In one embodiment, the amplification proceeds rapidly at 37 degrees. In other embodiments, the temperature of the isothermal amplification may be chosen by selecting a polymerase (e.g. Bsu, Bst, Phi29, klenow fragment etc.) operable at a different temperature.

[0367] Thus, whereas nicking isothermal amplification techniques use nicking enyzmes with fixed sequence preference (e.g. in nicking enzyme amplification reaction or NEAR), which requires denaturing of the original dsDNA target to allow annealing and extension of primers that add the nicking substrate to the ends of the target, use of a CRISPR nickase wherein the nicking sites can be programed via guide RNAs means that no denaturing step is necessary, enabling the entire reaction to be truly isothermal. This also simplifies the reaction because these primers that add the nicking substrate are different than the primers that are used later in the reaction, meaning that NEAR requires two primer sets (i.e. 4 primers) while Cpf1 nicking amplification only requires one primer set (i.e. two primers). This makes nicking Cpf1 amplification much simpler and easier to operate without complicated instrumentation to perform the denaturation and then cooling to the isothermal temperature.

[0368] In an aspect, the isothermal amplification reagents may be utilized with a thermostable CRISPR-Cas protein. The combination of thermostable protein and isothermal amplification reagents may be utilized to further improve reaction times for detection and diagnostics.

[0369] Accordingly, in certain example embodiments the systems disclosed herein may include amplification reagents. Different components or reagents useful for amplification of nucleic acids are described herein. For example, an amplification reagent as described herein may include a buffer, such as a Tris buffer. A Tris buffer may be used at any concentration appropriate for the desired application or use, for example including, but not limited to, a concentration of 1 mM, 2 mM, 3 mM, 4 mM, 5 mM, 6 mM, 7 mM, 8 mM, 9 mM, 10 mM, 11 mM, 12 mM, 13 mM, 14 mM, 15 mM, 25 mM, 50 mM, 75 mM, 1 M, or the like. One of skill in the art will be able to determine an appropriate concentration of a buffer such as Tris for use with the present invention.

[0370] A salt, such as magnesium chloride (MgCl2), potassium chloride (KCl), or sodium chloride (NaCl), may be included in an amplification reaction, such as PCR, in order to improve the amplification of nucleic acid fragments. Although the salt concentration will depend on the particular reaction and application, in some embodiments, nucleic acid fragments of a particular size may produce optimum results at particular salt concentrations. Larger products may require altered salt concentrations, typically lower salt, in order to produce desired results, while amplification of smaller products may produce better results at higher salt concentrations. One of skill in the art will understand that the presence and/or concentration of a salt, along with alteration of salt concentrations, may alter the stringency of a biological or chemical reaction, and therefore any salt may be used that provides the appropriate conditions for a reaction of the present invention and as described herein. In certain preferred embodiments, when polynucleotide extraction beads such as magnetic beads are utilized, a Plant QuickExtract solution can be used in combination with a KCl buffer in optimized detection methods according to the present disclosure. Such a combination of beads and polynucleotide solutions in the one pot reactions provides methods for detecting without a separate extraction (extraction-free) step. The reagents and examples detailed herein further allow for the use of polynucleotide binding beads without additional step such as rinsing, with further efficencies in the reactions and sample processing, and permitting reduced operator time and laboratory resources.

[0371] Other components of a biological or chemical reaction may include a cell lysis component in order to break open or lyse a cell for analysis of the materials therein. A cell lysis component may include, but is not limited to, a detergent, a salt as described above, such as NaCl, KCl, ammonium sulfate [(NH4)2SO4], or others. Detergents that may be appropriate for the invention may include Triton X-100, sodium dodecyl sulfate (SDS), CHAPS (3-[(3-cholamidopropyl)dimethylammonio]-1-propanesulfonate), ethyl trimethyl ammonium bromide, nonyl phenoxypolyethoxylethanol (NP-40). Concentrations of detergents may depend on the particular application, and may be specific to the reaction in some cases. Amplification reactions may include dNTPs and nucleic acid primers used at any concentration appropriate for the invention, such as including, but not limited to, a concentration of 100 nM, 150 nM, 200 nM, 250 nM, 300 nM, 350 nM, 400 nM, 450 nM, 500 nM, 550 nM, 600 nM, 650 nM, 700 nM, 750 nM, 800 nM, 850 nM, 900 nM, 950 nM, 1 mM, 2 mM, 3 mM, 4 mM, 5 mM, 6 mM, 7 mM, 8 mM, 9 mM, 10 mM, 20 mM, 30 mM, 40 mM, 50 mM, 60 mM, 70 mM, 80 mM, 90 mM, 100 mM, 150 mM, 200 mM, 250 mM, 300 mM, 350 mM, 400 mM, 450 mM, 500 mM, or the like. Likewise, a polymerase useful in accordance with the invention may be any specific or general polymerase known in the art and useful or the invention, including Taq polymerase, Q5 polymerase, or the like.

[0372] In some embodiments, amplification reagents as described herein may be appropriate for use in hot-start amplification. Hot start amplification may be beneficial in some embodiments to reduce or eliminate dimerization of adaptor molecules or oligos, or to otherwise prevent unwanted amplification products or artifacts and obtain optimum amplification of the desired product. Many components described herein for use in amplification may also be used in hot-start amplification. In some embodiments, reagents or components appropriate for use with hot-start amplification may be used in place of one or more of the composition components as appropriate. For example, a polymerase or other reagent may be used that exhibits a desired activity at a particular temperature or other reaction condition. In some embodiments, reagents may be used that are designed or optimized for use in hot-start amplification, for example, a polymerase may be activated after transposition or after reaching a particular temperature. Such polymerases may be antibody-based or aptamer-based. Polymerases as described herein are known in the art. Examples of such reagents may include, but are not limited to, hot-start polymerases, hot-start dNTPs, and photo-caged dNTPs. Such reagents are known and available in the art. One of skill in the art will be able to determine the optimum temperatures as appropriate for individual reagents.

[0373] Amplification of nucleic acids may be performed using specific thermal cycle machinery or equipment, and may be performed in single reactions or in bulk, such that any desired number of reactions may be performed simultaneously. In some embodiments, amplification may be performed using microfluidic or robotic devices, or may be performed using manual alteration in temperatures to achieve the desired amplification. In some embodiments, optimization may be performed to obtain the optimum reactions conditions for the particular application or materials. One of skill in the art will understand and be able to optimize reaction conditions to obtain sufficient amplification.

[0374] In certain embodiments, detection of DNA with the methods or systems of the invention requires transcription of the (amplified) DNA into RNA prior to detection.

[0375] It will be evident that detection methods of the invention can involve nucleic acid amplification and detection procedures in various combinations. The nucleic acid to be detected can be any naturally occurring or synthetic nucleic acid, including but not limited to DNA and RNA, which may be amplified by any suitable method to provide an intermediate product that can be detected. Detection of the intermediate product can be by any suitable method including but not limited to binding and activation of a CRISPR protein which produces a detectable signal moiety by direct or collateral activity.

### Helicase-Dependent Amplification

[0376] In helicase-dependent amplification, a helicase enzyme is used to unwind a double stranded nucleic acid to generate templates for primer hybridization and subsequent primer-extension. This process utilizes two oligonucleotide primers, each hybridizing to the 3′-end of either the sense strand containing the target sequence or the anti-sense strand containing the reverse-complementary target sequence. The HDA reaction is a general method for helicase-dependent nucleic acid amplification.

[0377] In combining this method with a CRISPR-SHERLOCK system, the target nucleic acid may be amplified by opening R-loops of the target nucleic acid using first and second CRISPR/Cas complexes. The first and second strand of the target nucleic acid may thus be unwound using a helicase, allowing primers and polymerase to bind and extend the DNA under isothermal conditions.

[0378] The term “helicase” refers here to any enzyme capable of unwinding a double stranded nucleic acid enzymatically. For example, helicases are enzymes that are found in all organisms and in all processes that involve nucleic acid such as replication, recombination, repair, transcription, translation and RNA splicing. (Kornberg and Baker, DNA Replication, W. H. Freeman and Company (2nd ed. (1992)), especially chapter 11). Any helicase that translocates along DNA or RNA in a 5′ to 3′ direction or in the opposite 3′ to 5′ direction may be used in present embodiments of the invention. This includes helicases obtained from prokaryotes, viruses, archaea, and eukaryotes or recombinant forms of naturally occurring enzymes as well as analogues or derivatives having the specified activity. Examples of naturally occurring DNA helicases, described by Kornberg and Baker in chapter 11 of their book, DNA Replication, W. H. Freeman and Company (2^{nd} ed. (1992)), include E. coli helicase I, II, III, & IV, Rep, DnaB, PriA, PcrA, T4 Gp4lhelicase, T4 Dda helicase, T7 Gp4 helicases, SV40 Large T antigen, yeast RAD. Additional helicases that may be useful in HDA include RecQ helicase (Harmon and Kowalczykowski, J. Biol. Chem. 276:232-243 (2001)), thermostable UvrD helicases from T. tengcongensis (disclosed in this invention, Example XII) and T. thermophilus (Collins and McCarthy, Extremophiles. 7:35-41. (2003)), thermostable DnaB helicase from T. aquaticus (Kaplan and Steitz, J. Biol. Chem. 274:6889-6897 (1999)), and MCM helicase from archaeal and eukaryotic organisms ((Grainge et al., Nucleic Acids Res. 31:4888-4898 (2003)).

[0379] A traditional definition of a helicase is an enzyme that catalyzes the reaction of separating/unzipping/unwinding the helical structure of nucleic acid duplexes (DNA, RNA or hybrids) into single-stranded components, using nucleoside triphosphate (NTP) hydrolysis as the energy source (such as ATP). However, it should be noted that not all helicases fit this definition anymore. A more general definition is that they are motor proteins that move along the single-stranded or double stranded nucleic acids (usually in a certain direction, 3′ to 5′ or 5 to 3, or both), i.e. translocases, that can or cannot unwind the duplexed nucleic acid encountered. In addition, some helicases simply bind and “melt” the duplexed nucleic acid structure without an apparent translocase activity.

[0380] Helicases exist in all living organisms and function in all aspects of nucleic acid metabolism. Helicases are classified based on the amino acid sequences, directionality, oligomerization state and nucleic-acid type and structure preferences. The most common classification method was developed based on the presence of certain amino acid sequences, called motifs. According to this classification helicases are divided into 6 super families: SF1, SF2, SF3, SF4, SF5 and SF6. SF1 and SF2 helicases do not form a ring structure around the nucleic acid, whereas SF3 to SF6 do. Superfamily classification is not dependent on the classical taxonomy.

[0381] DNA helicases are responsible for catalyzing the unwinding of double-stranded DNA (dsDNA) molecules to their respective single-stranded nucleic acid (ssDNA) forms. Although structural and biochemical studies have shown how various helicases can translocate on ssDNA directionally, consuming one ATP per nucleotide, the mechanism of nucleic acid unwinding and how the unwinding activity is regulated remains unclear and controversial (T. M. Lohman, E. J. Tomko, C. G. Wu, “Non-hexameric DNA helicases and translocases: mechanisms and regulation,” Nat Rev Mol Cell Biol 9:391-401 (2008)). Since helicases can potentially unwind all nucleic acids encountered, understanding how their unwinding activities are regulated can lead to harnessing helicase functions for biotechnology applications.

[0382] The term “HDA” refers to Helicase Dependent Amplification, which is an in vitro method for amplifying nucleic acids by using a helicase preparation for unwinding a double stranded nucleic acid to generate templates for primer hybridization and subsequent primer-extension. This process utilizes two oligonucleotide primers, each hybridizing to the 3′-end of either the sense strand containing the target sequence or the anti-sense strand containing the reverse-complementary target sequence. The HDA reaction is a general method for helicase-dependent nucleic acid amplification.

[0383] The invention comprises use of any suitable helicase known in the art. These include, but are not necessarily limited to, UvrD helicase, CRISPR-Cas3 helicase, E. coli helicase I, E. coli helicase II, E. coli helicase III, E. coli helicase IV, Rep helicase, DnaB helicase, PriA helicase, PcrA helicase, T4 Gp41 helicase, T4 Dda helicase, SV40 Large T antigen, yeast RAD helicase, RecD helicase, RecQ helicase, thermostable T. tengcongensis UvrD helicase, thermostable T. thermophilus UvrD helicase, thermostable T. aquaticus DnaB helicase, Dda helicase, papilloma virus E1 helicase, archaeal MCM helicase, eukaryotic MCM helicase, and T7 Gp4 helicase.

[0384] In particularly preferred embodiments, the helicase comprises a super mutation. In particular embodiments, although the E. coli mutation has been described, the mutations were generated by sequence alignment (e.g. D409A/D410A for TteUvrd) and result in thermophilic enzymes working at lower temperatures like 37° C., which is advantageous for amplification methods and systems described herein. In some embodiments, the super mutations is an aspartate to alanine mutation, with position based on sequence alignment. In some embodiments, the super mutant helicase is selected from WP_003870487.1 Thermoanaerobacter ethanolicus 403/404, WP_049660019.1 Bacillus sp. FJAT-27231 407/408, WP_034654680.1 Bacillus megaterium 415/416, WP_095390358.1 Bacillus simplex 407/408, and WP_055343022.1 Paeniclostridium sordellii 402/403.

### Incubating

[0385] Methods of detection and/or extraction using the systems disclosed herein can comprise incubating the sample or set of samples under conditions sufficient to allow binding of the guide RNAs to one or more target molecules. Exstraction can comprise incubating the sample under conditions sufficient to allow release of viral RNA present in the sample, which may comprise incubating at 22° C. to 60° C. for 30 to 70 minutes or at 90° C.-100° C. for about 10 minutes.

[0386] In certain example embodiments, the incubation time of the amplifying and detecting in the present invention may be shortened. The assay may be performed in a period of time required for an enzymatic reaction to occur. One skilled in the art can perform biochemical reactions in 5 minutes (e.g., 5 minute ligation). Incubating may occur at one or more temperatures over timeframes between about 10 minutes and 90 minutes, preferably less than 90 minutes, 75 minutes, 60 minutes, 45 minutes, 30 minutes, 25 minutes, 20 minutes, 15 minutes, or 10 minutes depending on sample, reagents and components of the system. In some embodiments, incubating for the amplification is performed at one or more temperatures between about 20° C. and 80° C., in some embodiments, about 37° C. In some embodiments, incubating for the amplification is performed at one or more temperatures between about 55° C. and 65° C., between about 59° C. and 61° C., in some embodiments, about 60° C.

### Activating

[0387] In certain example embodiment, activating of the Cas protein occurs via binding of the CRISPR-Cas complex via the guide molecule to the one or more target molecules, wherein activating the CRISPR effector protein results in modification of the detection construct such that a detectable positive signal is generated.

### Detecting a Signal

[0388] Detecting may comprise visual observance of a positive signal relative to a control. Detecting may comprise a loss of signal or presence of signal at one or more capture regions, for example colorimetric detection, or fluorescent detection. In certain example embodiments, further modifications may be introduced that further amplify the detectable positive signal. For example, activated CRISPR effector protein collateral activation may be used to generate a secondary target or additional guide sequence, or both. In one example embodiment, the reaction solution would contain a secondary target that is spiked in at high concentration. The secondary target may be distinct from the primary target (i.e. the target for which the assay is designed to detect) and in certain instances may be common across all reaction volumes. A secondary guide sequence for the secondary target may be protected, e.g. by a secondary structural feature such as a hairpin with an RNA loop, and unable to bind the second target or the CRISPR effector protein. Cleavage of the protecting group by an activated CRISPR effector protein (i.e. after activation by formation of complex with the primary target(s) in solution) and formation of a complex with free CRISPR effector protein in solution and activation from the spiked in secondary target. In certain other example embodiments, a similar concept is used with free guide sequence to a secondary target and protected secondary target. Cleavage of a protecting group off the secondary target would allow additional CRISPR effector protein, guide sequence, secondary target sequence to form. In yet another example embodiment, activation of CRISPR effector protein by the primary target(s) may be used to cleave a protected or circularized primer, which would then be released to perform an isothermal amplification reaction, such as those disclosed herein, on a template for either secondary guide sequence, secondary target, or both. Subsequent transcription of this amplified template would produce more secondary guide sequence and/or secondary target sequence, followed by additional CRISPR effector protein collateral activation.

### Quantifying

[0389] In particular methods, comparing the intensity of the one or more signals to a control is performed to quantify the nucleic acid in the sample. The term “control” refers to any reference standard suitable to provide a comparison to the expression products in the test sample. In one embodiment, the control comprises obtaining a “control sample” from which expression product levels are detected and compared to the expression product levels from the test sample. Such a control sample may comprise any suitable sample, including but not limited to a sample from a control patient (can be stored sample or previous sample measurement) with a known outcome; normal tissue, fluid, or cells isolated from a subject, such as a normal patient or the patient having a condition of interest.

[0390] The intensity of a signal is “significantly” higher or lower than the normal intensity if the signal is greater or less, respectively, than the normal or control level by an amount greater than the standard error of the assay employed to assess amount, and preferably at least 20%, 30%, 40%, 50%, 60%, 70%, 80%, 90%, 100%, 150%, 200%, 300%, 350%, 400%, 500%, 600%, 700%, 800%, 900%, 1000% or than that amount. Alternatively, the signal can be considered “significantly” higher or lower than the normal and/or control signal if the amount is at least about two, and preferably at least about 5%, 10%, 15%, 20%, 25%, 30%, 35%, 40%, 45%, 50%, 55%, 60%, 65%, 70%, 75%, 80%, 85%, 90%, 95%, 100%, 105%, 110%, 115%, 120%, 125%, 130%, 135%, 140%, 145%, 150%, 155%, 160%, 165%, 170%, 175%, 180%, 185%, 190%, 195%, two times, three times, four times, five times, or more, or any range in between, such as 5%-100%, higher or lower, respectively, than the normal and/or control signal. Such significant modulation values can be applied to any metric described herein, such as altered level of expression, altered activity, changes in biomarker inhibition, changes in test agent binding, and the like.

[0391] In some embodiments, the detectable positive signal may be a loss of fluorescent signal or colorimetric relative to a control, as described herein. In some embodiments, the detectable positive signal may be detected on a lateral flow device, as described herein.

### Applications of Detection Methods

[0392] Systems and methods can be designed for the detection and diagnosis of microbes, including bacterial, fungi and viral microbes. In an aspect, the systems may comprise multiplex detection of multiple variants of viral infections, including coronavirus, different viruses which may be related coronaviruses or respiratory viruses, or a combination thereof. In embodiments, assays can be performed for a variety of viruses and viral infections, including acute respiratory infections using the disclosure detailed herein. The systems can comprise two or more CRISPR Cas systems to multiplex, as described elsewhere herein, to detect a plurality of respiratory infections or viral infections, including coronavirus. The coronavirus is a positive-sense single stranded RNA family of viruses, infecting a variety of animals and humans. SARS-CoV is one type of coronavirus infection, as well as MERS-CoV Detection of one or more coronaviruses are envisioned, including the 2019-nCoV detected in Wuhan City. Sequences of the 2019-nCoV are available at GISAID accession no. EPI_ISL_402124 and EPI_ISL_402127-402130, and described in DOI: 10.1101/2020.01.22.914952. Further deposits of the SARS-CoV-2 deposited in the GISAID platform include EP_ISL_402119-402121 and EP_ISL 402123-402124; see also GenBank Accession No. MN908947.3.

[0393] Target molecule detection can comprise two or more detection systems utilizing RNA targeting Cas effector proteins; DNA targeting Cas effector proteins, or a combination thereof. The RNA-targeting effector proteins may be a Cas13 protein, such as Cas13a, Cas13b, or Cas13c, including one of the thermostable Cas13a proteins described herein. The DNA-targeting effector protein may be a Type V protein, e.g. Cas12 protein such as Cpf1 and C2c1. The Cas protein may preferably be thermostable, such as BrCas12b or Aap Cas12b. Multiplexing systems can be designed such that different Cas proteins with different sequence specificities or other motif cutting preferences can be used, including, in certain embodiments, at least one Cas. thermostable protein described herein. See International Publication WO 2019/126577. Type VI and Type V Cas proteins are known to possess different cutting motif preferences. See Gootenberg et al. “Multiplexed and portable nucleic acid detection platform with Cas13b, Cas12a, and Csm6.” Science. Apr. 27, 2018, 360:439-444; International Publication WO 2019/051318. Thus, embodiments disclosed herein may further comprise multiplex embodiments comprising two or more Type VI Cas proteins with different cutting preferences, or one or more Type VI Cas proteins and one or more Type V Cas proteins.

[0394] Multiplex approaches and selection of Cas effector proteins can be as described in International Publication WO 2019/126577 at [0415]-[0416] and Examples 1-10, incorporated herein by reference. In certain example embodiments, the coronavirus assay comprises a Type VI Cas protein disclosed herein and guide molecule comprising a guide sequence configured to directed binding of the CRISPR-Cas complex to a target molecule and a labeled detection molecule (“RNA-based masking construct”). A multiplex embodiment can be designed to track one or more variants of coronavirus or one or more variants of coronavirus, including SARS-CoV-2, in combination with other viruses, for example, Human respiratory syncytial virus, Middle East respiratory syndrome (MERS) coronavirus, Severe acute respiratory syndrome-related (SARS) coronavirus, and influenza. In embodiments, assays can be done in multiplex to detect multiple variants of coronavirus, different viruses which may be related coronaviruses or respiratory viruses, or a combination thereof. In an aspect, each assay can take place in an individual discrete volume. An “individual discrete volume” is a discrete volume or discrete space, such as a container, receptacle, or other defined volume or space that can be defined by properties that prevent and/or inhibit migration of nucleic acids and reagents necessary to carry out the methods disclosed herein, for example a volume or space defined by physical properties such as walls, for example the walls of a well, tube, or a surface of a droplet, which may be impermeable or semipermeable, or as defined by other means such as chemical, diffusion rate limited, electro-magnetic, or light illumination, or any combination thereof. By “diffusion rate limited” (for example diffusion defined volumes) is meant spaces that are only accessible to certain molecules or reactions because diffusion constraints effectively defining a space or volume as would be the case for two parallel laminar streams where diffusion will limit the migration of a target molecule from one stream to the other. By “chemical” defined volume or space is meant spaces where only certain target molecules can exist because of their chemical or molecular properties, such as size, where for example gel beads may exclude certain species from entering the beads but not others, such as by surface charge, matrix size or other physical property of the bead that can allow selection of species that may enter the interior of the bead. By “electro-magnetically” defined volume or space is meant spaces where the electro-magnetic properties of the target molecules or their supports such as charge or magnetic properties can be used to define certain regions in a space such as capturing magnetic particles within a magnetic field or directly on magnets. By “optically” defined volume is meant any region of space that may be defined by illuminating it with visible, ultraviolet, infrared, or other wavelengths of light such that only target molecules within the defined space or volume may be labeled. One advantage to the used of non-walled, or semipermeable is that some reagents, such as buffers, chemical activators, or other agents maybe passed in Applicants' through the discrete volume, while other material, such as target molecules, maybe maintained in the discrete volume or space. Typically, a discrete volume will include a fluid medium, (for example, an aqueous solution, an oil, a buffer, and/or a media capable of supporting cell growth) suitable for labeling of the target molecule with the indexable nucleic acid identifier under conditions that permit labeling. Exemplary discrete volumes or spaces useful in the disclosed methods include droplets (for example, microfluidic droplets and/or emulsion droplets), hydrogel beads or other polymer structures (for example poly-ethylene glycol di-acrylate beads or agarose beads), tissue slides (for example, fixed formalin paraffin embedded tissue slides with particular regions, volumes, or spaces defined by chemical, optical, or physical means), microscope slides with regions defined by depositing reagents in ordered arrays or random patterns, tubes (such as, centrifuge tubes, microcentrifuge tubes, test tubes, cuvettes, conical tubes, and the like), bottles (such as glass bottles, plastic bottles, ceramic bottles, Erlenmeyer flasks, scintillation vials and the like), wells (such as wells in a plate), plates, pipettes, or pipette tips among others. In certain example embodiments, the individual discrete volumes are the wells of a microplate. In certain example embodiments, the microplate is a 96 well, a 384 well, or a 1536 well microplate.

[0395] In certain example embodiments, the systems, devices, and methods, disclosed herein are directed to detecting the presence of one or more microbial agents in a sample, such as a biological sample obtained from a subject. In certain example embodiments, the microbe may be a bacterium, a fungus, a yeast, a protozoan, a parasite, or a virus. Accordingly, the methods disclosed herein can be adapted for use in other methods (or in combination) with other methods that require quick identification of microbe species, monitoring the presence of microbial proteins (antigens), antibodies, antibody genes, detection of certain phenotypes (e.g. bacterial resistance), monitoring of disease progression and/or outbreak, and antibiotic screening. Because of the rapid and sensitive diagnostic capabilities of the embodiments disclosed here, detection of microbe species type, down to a single nucleotide difference, and the ability to be deployed as a POC device, the embodiments disclosed herein may be used as guide therapeutic regimens, such as a selection of the appropriate antibiotic or antiviral. The embodiments disclosed herein may also be used to screen environmental samples (air, water, surfaces, food etc.) for the presence of microbial contamination.

[0396] Disclosed is a method to identify microbial species, such as bacterial, viral, fungal, yeast, or parasitic species, or the like. Particular embodiments disclosed herein describe methods and systems that will identify and distinguish microbial species within a single sample, or across multiple samples, allowing for recognition of many different microbes. The present methods allow the detection of pathogens and distinguishing between two or more species of one or more organisms, e.g., bacteria, viruses, yeast, protozoa, and fungi or a combination thereof, in a biological or environmental sample, by detecting the presence of a target nucleic acid sequence in the sample. A positive signal obtained from the sample indicates the presence of the microbe. Multiple microbes can be identified simultaneously using the methods and systems of the invention, by employing the use of more than one effector protein, wherein each effector protein targets a specific microbial target sequence. In this way, a multi-level analysis can be performed for a particular subject in which any number of microbes can be detected at once, for example, a subject with unknown respiratory infection, having symptoms of coronavirus, or an individual at risk or having been exposed to coronavirus. In some embodiments, simultaneous detection of multiple microbes may be performed using a set of probes that can identify one or more microbial species.

### Microbe Detection

[0397] In some embodiments, a method for detecting microbes in samples is provided comprising distributing a sample or set of samples into one or more individual discrete volumes, the individual discrete volumes comprising a CRISPR system as described herein; incubating the sample or set of samples under conditions sufficient to allow binding of the one or more guide RNAs to one or more microbe-specific targets; activating the CRISPR effector protein via binding of the one or more guide RNAs to the one or more target molecules, wherein activating the CRISPR effector protein results in modification of the RNA-based masking construct such that a detectable positive signal is generated; and detecting the detectable positive signal, wherein detection of the detectable positive signal indicates a presence of one or more target molecules in the sample. The one or more target molecules may be mRNA, gDNA (coding or non-coding), trRNA, or rRNA comprising a target nucleotide tide sequence that may be used to distinguish two or more microbial species/strains from one another. The guide RNAs may be designed to detect target sequences. The embodiments disclosed herein may also utilize certain steps to improve hybridization between guide RNA and target RNA sequences. Methods for enhancing ribonucleic acid hybridization are disclosed in WO 2015/085194, entitled “Enhanced Methods of Ribonucleic Acid Hybridization” which is incorporated herein by reference. The microbe-specific target may be RNA or DNA or a protein. If DNA method may further comprise the use of DNA primers that introduce a RNA polymerase promoter as described herein. If the target is a protein then the method will utilize aptamers and steps specific to protein detection described herein.

### Detection of Single Nucleotide Variants

[0398] In some embodiments, one or more identified target sequences may be detected using guide RNAs that are specific for and bind to the target sequence as described herein. The systems and methods of the present invention can distinguish even between single nucleotide polymorphisms present among different microbial species and therefore, use of multiple guide RNAs in accordance with the invention may further expand on or improve the number of target sequences that may be used to distinguish between species. For example, in some embodiments, the one or more guide RNAs may distinguish between microbes at the species, genus, family, order, class, phylum, kingdom, or phenotype, or a combination thereof.

Detection Based on rRNA Sequences

[0399] In certain example embodiments, the devices, systems, and methods disclosed herein may be used to distinguish multiple microbial species in a sample. In certain example embodiments, identification may be based on ribosomal RNA sequences, including the 16S, 23S, and 5S subunits. Methods for identifying relevant rRNA sequences are disclosed in U.S. Patent Application Publication No. 2017/0029872. In certain example embodiments, a set of guide RNA may designed to distinguish each species by a variable region that is unique to each species or strain. Guide RNAs may also be designed to target RNA genes that distinguish microbes at the genus, family, order, class, phylum, kingdom levels, or a combination thereof. In certain example embodiments where amplification is used, a set of amplification primers may be designed to flanking constant regions of the ribosomal RNA sequence and a guide RNA designed to distinguish each species by a variable internal region. In certain example embodiments, the primers and guide RNAs may be designed to conserved and variable regions in the 16S subunit respectfully. Other genes or genomic regions that uniquely variable across species or a subset of species such as the RecA gene family, RNA polymerase β subunit, may be used as well. Other suitable phylogenetic markers, and methods for identifying the same, are discussed for example in Wu et al. arXiv:1307.8690 [q-bio.GN].

[0400] In certain example embodiments, a method or diagnostic is designed to screen microbes across multiple phylogenetic and/or phenotypic levels at the same time. For example, the method or diagnostic may comprise the use of multiple CRISPR systems with different guide RNAs. A first set of guide RNAs may distinguish, for example, between mycobacteria, gram positive, and gram-negative bacteria. These general classes can be even further subdivided. For example, guide RNAs could be designed and used in the method or diagnostic that distinguish enteric and non-enteric within gram negative bacteria. A second set of guide RNA can be designed to distinguish microbes at the genus or species level. Thus, a matrix may be produced identifying all mycobacteria, gram positive, gram negative (further divided into enteric and non-enteric) with each genus of species of bacteria identified in a given sample that fall within one of those classes. The foregoing is for example purposes only. Other means for classifying other microbe types are also contemplated and would follow the general structure described above.

### Screening for Drug Resistance

[0401] In certain example embodiments, the devices, systems and methods disclosed herein may be used to screen for microbial genes of interest, for example antibiotic and/or antiviral resistance genes. Guide RNAs may be designed to distinguish between known genes of interest. Samples, including clinical samples, may then be screened using the embodiments disclosed herein for detection of such genes. The ability to screen for drug resistance at POC would have tremendous benefit in selecting an appropriate treatment regime. In certain example embodiments, the antibiotic resistance genes are carbapenemases including KPC, NDM1, CTX-M15, OXA-48. Other antibiotic resistance genes are known and may be found for example in the Comprehensive Antibiotic Resistance Database (Jia et al. “CARD 2017: expansion and model-centric curation of the Comprehensive Antibiotic Resistance Database.” Nucleic Acids Research, 45, D566-573).

[0402] Ribavirin is an effective antiviral that hits a number of RNA viruses. Several clinically important viruses have evolved ribavirin resistance including Foot and Mouth Disease Virus doi:10.1128/JVI.03594-13; polio virus (Pfeifer and Kirkegaard. PNAS, 100(12):7289-7294, 2003); and hepatitis C virus (Pfeiffer and Kirkegaard, J. Virol. 79(4):2346-2355, 2005). A number of other persistent RNA viruses, such as hepatitis and HIV, have evolved resistance to existing antiviral drugs: hepatitis B virus (lamivudine, tenofovir, entecavir) doi:10/1002/hep22900; hepatitis C virus (telaprevir, BILN2061, ITMN-191, SCh6, boceprevir, AG-021541, ACH-806) doi:10.1002/hep.22549; and HIV (many drug resistance mutations) hivb.standford.edu. The embodiments disclosed herein may be used to detect such variants among others.

[0403] Aside from drug resistance, there are a number of clinically relevant mutations that could be detected with the embodiments disclosed herein, such as persistent versus acute infection in LCMV (doi:10.1073/pnas.1019304108), and increased infectivity of Ebola (Diehl et al. Cell. 2016, 167(4):1088-1098.

[0404] As described herein elsewhere, closely related microbial species (e.g. having only a single nucleotide difference in a given target sequence) may be distinguished by introduction of a synthetic mismatch in the gRNA.

### Monitoring Microbe Outbreaks

[0405] In some embodiments, a CRISPR system or methods of use thereof as described herein may be used to determine the evolution of a pathogen outbreak. The method may comprise detecting one or more target sequences from a plurality of samples from one or more subjects, wherein the target sequence is a sequence from a microbe causing the outbreaks. Such a method may further comprise determining a pattern of pathogen transmission, or a mechanism involved in a disease outbreak caused by a pathogen.

[0406] The pattern of pathogen transmission may comprise continued new transmissions from the natural reservoir of the pathogen or subject-to-subject transmissions (e.g. human-to-human transmission) following a single transmission from the natural reservoir or a mixture of both. In one embodiment, the pathogen transmission may be bacterial or viral transmission, in such case, the target sequence is preferably a microbial genome or fragments thereof. In one embodiment, the pattern of the pathogen transmission is the early pattern of the pathogen transmission, i.e. at the beginning of the pathogen outbreak. Determining the pattern of the pathogen transmission at the beginning of the outbreak increases likelihood of stopping the outbreak at the earliest possible time thereby reducing the possibility of local and international dissemination.

[0407] Determining the pattern of the pathogen transmission may comprise detecting a pathogen sequence according to the methods described herein. Determining the pattern of the pathogen transmission may further comprise detecting shared intra-host variations of the pathogen sequence between the subjects and determining whether the shared intra-host variations show temporal patterns. Patterns in observed intrahost and interhost variation provide important insight about transmission and epidemiology (Gire, et al., 2014).

[0408] Detection of shared intra-host variations between the subjects that show temporal patterns is an indication of transmission links between subject (in particular between humans) because it can be explained by subject infection from multiple sources (superinfection), sample contamination recurring mutations (with or without balancing selection to reinforce mutations), or co-transmission of slightly divergent viruses that arose by mutation earlier in the transmission chain (Park, et al., Cell 161(7):1516-1526, 2015). Detection of shared intra-host variations between subjects may comprise detection of intra-host variants located at common single nucleotide polymorphism (SNP) positions. Positive detection of intra-host variants located at common (SNP) positions is indicative of superinfection and contamination as primary explanations for the intra-host variants. Superinfection and contamination can be parted on the basis of SNP frequency appearing as inter-host variants (Park, et al., 2015). Otherwise superinfection and contamination can be ruled out. In this latter case, detection of shared intra-host variations between subjects may further comprise assessing the frequencies of synonymous and nonsynonymous variants and comparing the frequency of synonymous and nonsynonymous variants to one another. A nonsynonymous mutation is a mutation that alters the amino acid of the protein, likely resulting in a biological change in the microbe that is subject to natural selection. Synonymous substitution does not alter an amino acid sequence. Equal frequency of synonymous and nonsynonymous variants is indicative of the intra-host variants evolving neutrally. If frequencies of synonymous and nonsynonymous variants are divergent, the intra-host variants are likely to be maintained by balancing selection. If frequencies of synonymous and nonsynonymous variants are low, this is indicative of recurrent mutation. If frequencies of synonymous and nonsynonymous variants are high, this is indicative of co-transmission (Park, et al., 2015).

[0409] Like Ebola virus, Lassa virus (LASV) can cause hemorrhagic fever with high case fatality rates. Andersen et al. generated a genomic catalog of almost 200 LASV sequences from clinical and rodent reservoir samples (Andersen, et al., Cell Volume 162, Issue 4, p 738-750, 13 Aug. 2015). Andersen et al. show that whereas the 2013-2015 EVD epidemic is fueled by human-to-human transmissions, LASV infections mainly result from reservoir-to-human infections. Andersen et al. elucidated the spread of LASV across West Africa and show that this migration was accompanied by changes in LASV genome abundance, fatality rates, codon adaptation, and translational efficiency. The method may further comprise phylogenetically comparing a first pathogen sequence to a second pathogen sequence, and determining whether there is a phylogenetic link between the first and second pathogen sequences. The second pathogen sequence may be an earlier reference sequence. If there is a phylogenetic link, the method may further comprise rooting the phylogeny of the first pathogen sequence to the second pathogen sequence. Thus, it is possible to construct the lineage of the first pathogen sequence. (Park, et al., 2015).

[0410] The method may further comprise determining whether the mutations are deleterious or adaptive. Deleterious mutations are indicative of transmission-impaired viruses and dead-end infections, thus normally only present in an individual subject. Mutations unique to one individual subject are those that occur on the external branches of the phylogenetic tree, whereas internal branch mutations are those present in multiple samples (i.e. in multiple subjects). Higher rate of nonsynonymous substitution is a characteristic of external branches of the phylogenetic tree (Park, et al., 2015).

[0411] In internal branches of the phylogenetic tree, selection has had more opportunity to filter out deleterious mutants. Internal branches, by definition, have produced multiple descendent lineages and are thus less likely to include mutations with fitness costs. Thus, lower rate of nonsynonymous substitution is indicative of internal branches (Park, et al., 2015).

[0412] Synonymous mutations, which likely have less impact on fitness, occurred at more comparable frequencies on internal and external branches (Park, et al., 2015).

[0413] By analyzing the sequenced target sequence, such as viral genomes, it is possible to discover the mechanisms responsible for the severity of the epidemic episode such as during the 2014 Ebola outbreak. For example, Gire et al. made a phylogenetic comparison of the genomes of the 2014 outbreak to all 20 genomes from earlier outbreaks suggests that the 2014 West African virus likely spread from central Africa within the past decade. Rooting the phylogeny using divergence from other ebolavirus genomes was problematic (6, 13). However, rooting the tree on the oldest outbreak revealed a strong correlation between sample date and root-to-tip distance, with a substitution rate of 8×10-4 per site per year (13). This suggests that the lineages of the three most recent outbreaks all diverged from a common ancestor at roughly the same time, around 2004, which supports the hypothesis that each outbreak represents an independent zoonotic event from the same genetically diverse viral population in its natural reservoir. They also found out that the 2014 EBOV outbreak might be caused by a single transmission from the natural reservoir, followed by human-to-human transmission during the outbreak. Their results also suggested that the epidemic episode in Sierra Leon might stem from the introduction of two genetically distinct viruses from Guinea around the same time (Gire, et al., 2014).

[0414] It has been also possible to determine how the Lassa virus spread out from its origin point, in particular thanks to human-to-human transmission and even retrace the history of this spread 400 years back (Andersen, et al., Cell 162(4):738-50, 2015).

[0415] In relation to the work needed during the 2013-2015 EBOV outbreak and the difficulties encountered by the medical staff at the site of the outbreak, and more generally, the method of the invention makes it possible to carry out sequencing using fewer selected probes such that sequencing can be accelerated, thus shortening the time needed from sample taking to results procurement. Further, kits and systems can be designed to be usable on the field so that diagnostics of a patient can be readily performed without need to send or ship samples to another part of the country or the world.

[0416] In any method described above, sequencing the target sequence or fragment thereof may be used any of the sequencing processes described above. Further, sequencing the target sequence or fragment thereof may be a near-real-time sequencing. Sequencing the target sequence or fragment thereof may be carried out according to previously described methods (Experimental Procedures: Matranga et al., 2014; and Gire, et al., 2014). Sequencing the target sequence or fragment thereof may comprise parallel sequencing of a plurality of target sequences. Sequencing the target sequence or fragment thereof may comprise Illumina sequencing.

[0417] Analyzing the target sequence or fragment thereof that hybridizes to one or more of the selected probes may be an identifying analysis, wherein hybridization of a selected probe to the target sequence or a fragment thereof indicates the presence of the target sequence within the sample.

[0418] Currently, primary diagnostics are based on the symptoms a patient has. However, various diseases may share identical symptoms so that diagnostics rely much on statistics. For example, malaria triggers flu-like symptoms: headache, fever, shivering, joint pain, vomiting, hemolytic anemia, jaundice, hemoglobin in the urine, retinal damage, and convulsions. These symptoms are also common for septicemia, gastroenteritis, and viral diseases. Amongst the latter, Ebola hemorrhagic fever has the following symptoms fever, sore throat, muscular pain, headaches, vomiting, diarrhea, rash, decreased function of the liver and kidneys, internal and external hemorrhage.

[0419] When a patient is presented to a medical unit, for example in tropical Africa, basic diagnostics will conclude to malaria because statistically, malaria is the most probable disease within that region of Africa. The patient is consequently treated for malaria although the patient might not actually have contracted the disease and the patient ends up not being correctly treated. This lack of correct treatment can be life-threatening especially when the disease the patient contracted presents a rapid evolution. It might be too late before the medical staff realizes that the treatment given to the patient is ineffective and comes to the correct diagnostics and administers the adequate treatment to the patient.

[0420] The method of the invention provides a solution to this situation. Indeed, because the number of guide RNAs can be dramatically reduced, this makes it possible to provide on a single chip selected probes divided into groups, each group being specific to one disease, such that a plurality of diseases, e.g. viral infection, can be diagnosed at the same time. Thanks to the invention, more than 3 diseases can be diagnosed on a single chip, preferably more than 4, 5, 6, 7, 8, 9, 10, 11, 12, 13, 14, 15, 16, 17, 18, 19, 20 diseases at the same time, preferably the diseases that most commonly occur within the population of a given geographical area. Since each group of selected probes is specific to one of the diagnosed diseases, a more accurate diagnosis can be performed, thus diminishing the risk of administering the wrong treatment to the patient.

[0421] In other cases, a disease such as a viral infection may occur without any symptoms, or had caused symptoms but they faded out before the patient is presented to the medical staff. In such cases, either the patient does not seek any medical assistance or the diagnostics is complicated due to the absence of symptoms on the day of the presentation.

[0422] The present invention may also be used in concert with other methods of diagnosing disease, identifying pathogens and optimizing treatment based upon detection of nucleic acids, such as mRNA in crude, non-purified samples.

[0423] The method of the invention also provides a powerful tool to address this situation. Indeed, since a plurality of groups of selected guide RNAs, each group being specific to one of the most common diseases that occur within the population of the given area, are comprised within a single diagnostic, the medical staff only need to contact a biological sample taken from the patient with the chip. Reading the chip reveals the diseases the patient has contracted.

[0424] In some cases, the patient is presented to the medical staff for diagnostics of particular symptoms. The method of the invention makes it possible not only to identify which disease causes these symptoms but at the same time determine whether the patient suffers from another disease he was not aware of.

[0425] This information might be of utmost importance when searching for the mechanisms of an outbreak. Indeed, groups of patients with identical viruses also show temporal patterns suggesting a subject-to-subject transmission links.

### Example Microbes

[0426] The embodiment disclosed herein may be used to detect a number of different microbes. The term microbe as used herein includes bacteria, fungus, protozoa, parasites and viruses.

[0427] Bacteria

[0428] The following provides an example list of the types of microbes that might be detected using the embodiments disclosed herein. In certain example embodiments, the microbe is a bacterium. Examples of bacteria that can be detected in accordance with the disclosed methods include without limitation any one or more of (or any combination of) Acinetobacter baumanii, Actinobacillus sp., Actinomycetes, Actinomyces sp. (such as Actinomyces israelii and Actinomyces naeslundii), Aeromonas sp. (such as Aeromonas hydrophila, Aeromonas veronii biovar sobria (Aeromonas sobria), and Aeromonas caviae), Anaplasma phagocytophilum, Anaplasma marginate Alcaligenes xylosoxidans, Acinetobacter baumanii, Actinobacillus actinomycetemcomitans, Bacillus sp. (such as Bacillus anthracis, Bacillus cereus, Bacillus subtilis, Bacillus thuringiensis, and Bacillus stearothermophilus), Bacteroides sp. (such as Bacteroides Bartonella sp. (such as Bartonella bacilliformis and Bartonella henselae, Bifidobacterium sp., Bordetella sp. (such as Bordetella pertussis, Bordetella parapertussis, and Bordetella bronchiseptica), Borrelia sp. (such as Borrelia recurrentis, and Borrelia burgdorferi), Brucella sp. (such as Brucella abortus, Brucella canis, Brucella melintensis and Brucella suis), Burkholderia sp. (such as Burkholderia pseudomallei and Burkholderia cepacia), Campylobacter sp. (such as Campylobacter jejuni, Campylobacter coli, Campylobacter lari and Campylobacter fetus), Capnocytophaga sp., Cardiobacterium hominis, Chlamydia trachomatis, Chlamydophila pneumoniae, Chlamydophila psittaci, Citrobacter sp. Coxiella burnetii, Corynebacterium sp. (such as, Corynebacterium diphtheriae, Corynebacterium jeikeum and Corynebacterium), Clostridium sp. (such as Clostridium perfringens, Clostridium difficile, Clostridium botulinum and Clostridium tetani), Eikenella corrodens, Enterobacter sp. (such as Enterobacter aerogenes, Enterobacter agglomerans, Enterobacter cloacae and Escherichia coli, including opportunistic Escherichia coli, such as enterotoxigenic E. coli, enteroinvasive E. coli, enteropathogenic E. coli, enterohemorrhagic E. coli, enteroaggregative E. coli and uropathogenic E. coli) Enterococcus sp. (such as Enterococcus faecalis and Enterococcus faecium) Ehrlichia sp. (such as Ehrlichia chafeensia and Ehrlichia canis), Epidermophyton floccosum, Erysipelothrix rhusiopathiae, Eubacterium sp., Francisella tularensis, Fusobacterium nucleatum, Gardnerella vaginalis, Gemella morbillorum, Haemophilus sp. (such as Haemophilus influenzae, Haemophilus ducreyi, Haemophilus aegyptius, Haemophilus parainfluenzae, Haemophilus haemolyticus and Haemophilus parahaemolyticus, Helicobacter sp. (such as Helicobacter pylori, Helicobacter cinaedi and Helicobacter fennelliae), Kingella kingii, Klebsiella sp. (such as Klebsiella pneumoniae, Klebsiella granulomatis and Klebsiella oxytoca), Lactobacillus sp., Listeria monocytogenes, Leptospira interrogans, Legionella pneumophila, Leptospira interrogans, Peptostreptococcus sp., Mannheimia hemolytica, Microsporum canis, Moraxella catarrhalis, Morganella sp., Mobiluncus sp., Micrococcus sp., Mycobacterium sp. (such as Mycobacterium leprae, Mycobacterium tuberculosis, Mycobacterium paratuberculosis, Mycobacterium intracellulare, Mycobacterium avium, Mycobacterium bovis, and Mycobacterium marinum), Mycoplasm sp. (such as Mycoplasma pneumoniae, Mycoplasma hominis, and Mycoplasma genitalium), Nocardia sp. (such as Nocardia asteroides, Nocardia cyriacigeorgica and Nocardia brasiliensis), Neisseria sp. (such as Neisseria gonorrhoeae and Neisseria meningitidis), Pasteurella multocida, Pityrosporum orbiculare (Malassezia furfur), Plesiomonas shigelloides. Prevotella sp., Porphyromonas sp., Prevotella melaninogenica, Proteus sp. (such as Proteus vulgaris and Proteus mirabilis), Providencia sp. (such as Providencia alcalifaciens, Providencia rettgeri and Providencia stuartii), Pseudomonas aeruginosa, Propionibacterium acnes, Rhodococcus equi, Rickettsia sp. (such as Rickettsia rickettsii, Rickettsia akari and Rickettsia prowazekii, Orientia tsutsugamushi (formerly: Rickettsia tsutsugamushi) and Rickettsia typhi), Rhodococcus sp., Serratia marcescens, Stenotrophomonas maltophilia, Salmonella sp. (such as Salmonella enterica, Salmonella typhi, Salmonella paratyphi, Salmonella enteritidis, Salmonella cholerasuis and Salmonella typhimurium), Serratia sp. (such as Serratia marcesans and Serratia liquifaciens), Shigella sp. (such as Shigella dysenteriae, Shigella flexneri, Shigella boydii and Shigella sonnei), Staphylococcus sp. (such as Staphylococcus aureus, Staphylococcus epidermidis, Staphylococcus hemolyticus, Staphylococcus saprophyticus), Streptococcus sp. (such as Streptococcus pneumoniae (for example chloramphenicol-resistant serotype 4 Streptococcus pneumoniae, spectinomycin-resistant serotype 6B Streptococcus pneumoniae, streptomycin-resistant serotype 9V Streptococcus pneumoniae, erythromycin-resistant serotype 14 Streptococcus pneumoniae, optochin-resistant serotype 14 Streptococcus pneumoniae, rifampicin-resistant serotype 18C Streptococcus pneumoniae, tetracycline-resistant serotype 19F Streptococcus pneumoniae, penicillin-resistant serotype 19F Streptococcus pneumoniae, and trimethoprim-resistant serotype 23F Streptococcus pneumoniae, chloramphenicol-resistant serotype 4 Streptococcus pneumoniae, spectinomycin-resistant serotype 6B Streptococcus pneumoniae, streptomycin-resistant serotype 9V Streptococcus pneumoniae, optochin-resistant serotype 14 Streptococcus pneumoniae, rifampicin-resistant serotype 18C Streptococcus pneumoniae, penicillin-resistant serotype 19F Streptococcus pneumoniae, or trimethoprim-resistant serotype 23F Streptococcus pneumoniae), Streptococcus agalactiae, Streptococcus mutans, Streptococcus pyogenes, Group A streptococci, Streptococcus pyogenes, Group B streptococci, Streptococcus agalactiae, Group C streptococci, Streptococcus anginosus, Streptococcus equismilis, Group D streptococci, Streptococcus bovis, Group F streptococci, and Streptococcus anginosus Group G streptococci), Spirillum minus, Streptobacillus moniliformi, Treponema sp. (such as Treponema carateum, Treponema petenue, Treponema pallidum and Treponema endemicum, Trichophyton rubrum, T mentagrophytes, Tropheryma whippelii, Ureaplasma urealyticum, Veillonella sp., Vibrio sp. (such as Vibrio cholerae, Vibrio parahemolyticus, Vibrio vulnificus, Vibrio parahaemolyticus, Vibrio vulnificus, Vibrio alginolyticus, Vibrio mimicus, Vibrio hollisae, Vibrio fluvialis, Vibrio metchnikovii, Vibrio damsela and Vibrio furnisii), Yersinia sp. (such as Yersinia enterocolitica, Yersinia pestis, and Yersinia pseudotuberculosis) and Xanthomonas maltophilia among others.

[0429] Fungi

[0430] In certain example embodiments, the microbe is a fungus or a fungal species. Examples of fungi that can be detected in accordance with the disclosed methods include without limitation any one or more of (or any combination of), Aspergillus, Blastomyces, Candidiasis, Coccidiodomycosis, Cryptococcus neoformans, Cryptococcus gatti, sp. Histoplasma sp. (such as Histoplasma capsulatum), Pneumocystis sp. (such as Pneumocystis jirovecii), Stachybotrys (such as Stachybotrys chartarum), Mucroymcosis, Sporothrix, fungal eye infections ringworm, Exserohilum, Cladosporium.

[0431] In certain example embodiments, the fungus is a yeast. Examples of yeast that can be detected in accordance with disclosed methods include without limitation one or more of (or any combination of), Aspergillus species (such as Aspergillus fumigatus, Aspergillus flavus and Aspergillus clavatus), Cryptococcus sp. (such as Cryptococcus neoformans, Cryptococcus gattii, Cryptococcus laurentii and Cryptococcus albidus), a Geotrichum species, a Saccharomyces species, a Hansenula species, a Candida species (such as Candida albicans), a Kluyveromyces species, a Debaryomyces species, a Pichia species, or combination thereof. In certain example embodiments, the fungi is a mold. Example molds include, but are not limited to, a Penicillium species, a Cladosporium species, a Byssochlamys species, or a combination thereof.

[0432] Protozoa

[0433] In certain example embodiments, the microbe is a protozoa. Examples of protozoa that can be detected in accordance with the disclosed methods and devices include without limitation any one or more of (or any combination of), Euglenozoa, Heterolobosea, Diplomonadida, Amoebozoa, Blastocystic, and Apicomplexa. Example Euglenoza include, but are not limited to, Trypanosoma cruzi (Chagas disease), T. brucei gambiense, T. brucei rhodesiense, Leishmania braziliensis, L. infantum, L. mexicana, L. major, L. tropica, and L. donovani. Example Heterolobosea include, but are not limited to, Naegleria fowleri. Example Diplomonadids include, but are not limited to, Giardia intestinalis (G. lamblia, G. duodenalis). Example Amoebozoa include, but are not limited to, Acanthamoeba castellanii, Balamuthia madrillaris, Entamoeba histolytica. Example Blastocysts include, but are not limited to, Blastocystic hominis. Example Apicomplexa include, but are not limited to, Babesia microti, Cryptosporidium parvum, Cyclospora cayetanensis, Plasmodium falciparum, P. vivax, P. ovale, P. malariae, and Toxoplasma gondii.

[0434] Parasites

[0435] In certain example embodiments, the microbe is a parasite. Examples of parasites that can be detected in accordance with disclosed methods include without limitation one or more of (or any combination of), an Onchocerca species and a Plasmodium species.

[0436] Viruses

[0437] In certain example embodiments, the systems, devices, and methods, disclosed herein are directed to detecting viruses in a sample. The embodiments disclosed herein may be used to detect viral infection (e.g. of a subject or plant), or determination of a viral strain, including viral strains that differ by a single nucleotide polymorphism. The virus may be a DNA virus, a RNA virus, or a retrovirus. Non-limiting example of viruses useful with the present invention include, but are not limited to Ebola, measles, SARS, Chikungunya, hepatitis, Marburg, yellow fever, MERS, Dengue, Lassa, influenza, rhabdovirus or HIV. A hepatitis virus may include hepatitis A, hepatitis B, or hepatitis C. An influenza virus may include, for example, influenza A or influenza B. An HIV may include HIV 1 or HIV 2. In certain example embodiments, the viral sequence may be a human respiratory syncytial virus, Sudan ebola virus, Bundibugyo virus, Tai Forest ebola virus, Reston ebola virus, Achimota, Aedes flavivirus, Aguacate virus, Akabane virus, Alethinophid reptarenavirus, Allpahuayo mammarenavirus, Amapari mmarenavirus, Andes virus, Apoi virus, Aravan virus, Aroa virus, Arumwot virus, Atlantic salmon paramyxovirus, Australian bat lyssavirus, Avian bornavirus, Avian metapneumovirus, Avian paramyxoviruses, penguin or Falkland Islandsvirus, BK polyomavirus, Bagaza virus, Banna virus, Bat herpesvirus, Bat sapovirus, Bear Canon mammarenavirus, Beilong virus, Betacoronavirus, Betapapillomavirus 1-6, Bhanja virus, Bokeloh bat lyssavirus, Borna disease virus, Bourbon virus, Bovine hepacivirus, Bovine parainfluenza virus 3, Bovine respiratory syncytial virus, Brazoran virus, Bunyamwera virus, Caliciviridae virus. California encephalitis virus, Candiru virus, Canine distemper virus, Canine pneumovirus, Cedar virus, Cell fusing agent virus, Cetacean morbillivirus, Chandipura virus, Chaoyang virus, Chapare mammarenavirus, Chikungunya virus, Colobus monkey papillomavirus, Colorado tick fever virus, Cowpox virus, Crimean-Congo hemorrhagic fever virus, Culex flavivirus, Cupixi mammarenavirus, Dengue virus, Dobrava-Belgrade virus, Donggang virus, Dugbe virus, Duvenhage virus, Eastern equine encephalitis virus, Entebbe bat virus, Enterovirus A-D, European bat lyssavirus 1-2, Eyach virus, Feline morbillivirus, Fer-de-Lance paramyxovirus, Fitzroy River virus, Flaviviridae virus, Flexal mammarenavirus, GB virus C, Gairo virus, Gemycircularvirus, Goose paramyxovirus SF02, Great Island virus, Guanarito mammarenavirus, Hantaan virus, Hantavirus Z10, Heartland virus, Hendra virus, Hepatitis A/B/C/E, Hepatitis delta virus, Human bocavirus, Human coronavirus, Human endogenous retrovirus K, Human enteric coronavirus, Human genital-associated circular DNA virus-1, Human herpesvirus 1-8, Human immunodeficiency virus 1/2, Human mastadenovirus A-G, Human papillomavirus, Human parainfluenza virus 1-4, Human paraechovirus, Human picornavirus, Human smacovirus, Ikoma lyssavirus, Ilheus virus, Influenza A-C, Ippy mammarenavirus, Irkut virus, J-virus, JC polyomavirus, Japanese encephalitis virus, Junin mammarenavirus, KI polyomavirus, Kadipiro virus, Kamiti River virus, Kedougou virus, Khuj and virus, Kokobera virus, Kyasanur forest disease virus, Lagos bat virus, Langat virus, Lassa mammarenavirus, Latino mammarenavirus, Leopards Hill virus, Liao ning virus, Ljungan virus, Lloviu virus, Louping ill virus, Lujo mammarenavirus, Luna mammarenavirus, Lunk virus, Lymphocytic choriomeningitis mammarenavirus, Lyssavirus Ozernoe, MS512\.225 virus, Machupo mammarenavirus, Mamastrovirus 1, Manzanilla virus, Mapuera virus, Marburg virus, Mayaro virus, Measles virus, Menangle virus, Mercadeo virus, Merkel cell polyomavirus, Middle East respiratory syndrome coronavirus, Mobala mammarenavirus, Modoc virus, Moijang virus, Mokolo virus, Monkeypox virus, Montana myotis leukoenchalitis virus, Mopeia lassa virus reassortant 29, Mopeia mammarenavirus, Morogoro virus, Mossman virus, Mumps virus, Murine pneumonia virus, Murray Valley encephalitis virus, Nariva virus, Newcastle disease virus, Nipah virus, Norwalk virus, Norway rat hepacivirus, Ntaya virus, O'nyong-nyong virus, Oliveros mammarenavirus, Omsk hemorrhagic fever virus, Oropouche virus, Parainfluenza virus 5, Parana mammarenavirus, Parramatta River virus, Peste-des-petits-ruminants virus, Pichande mammarenavirus, Picornaviridae virus, Pirital mammarenavirus, Piscihepevirus A, Porcine parainfluenza virus 1, porcine rubulavirus, Powassan virus, Primate T-lymphotropic virus 1-2, Primate erythroparvovirus 1, Punta Toro virus, Puumala virus, Quang Binh virus, Rabies virus, Razdan virus, Reptile bornavirus 1, Rhinovirus A-B, Rift Valley fever virus, Rinderpest virus, Rio Bravo virus, Rodent Torque Teno virus, Rodent hepacivirus, Ross River virus, Rotavirus A-I, Royal Farm virus, Rubella virus, Sabia mammarenavirus, Salem virus, Sandfly fever Naples virus, Sandfly fever Sicilian virus, Sapporo virus, Sathuperi virus, Seal anellovirus, Semliki Forest virus, Sendai virus, Seoul virus, Sepik virus, Severe acute respiratory syndrome-related coronavirus, Severe fever with thrombocytopenia syndrome virus, Shamonda virus, Shimoni bat virus, Shuni virus, Simbu virus, Simian torque teno virus, Simian virus 40-41, Sin Nombre virus, Sindbis virus, Small anellovirus, Sosuga virus, Spanish goat encephalitis virus, Spondweni virus, St. Louis encephalitis virus, Sunshine virus, TTV-like mini virus, Tacaribe mammarenavirus, Taila virus, Tamana bat virus, Tamiami mammarenavirus, Tembusu virus, Thogoto virus, Thottapalayam virus, Tick-borne encephalitis virus, Tioman virus, Togaviridae virus, Torque teno canis virus, Torque teno douroucouli virus, Torque teno felis virus, Torque teno midi virus, Torque teno sus virus, Torque teno tamarin virus, Torque teno virus, Torque teno zalophus virus, Tuhoko virus, Tula virus, Tupaia paramyxovirus, Usutu virus, Uukuniemi virus, Vaccinia virus, Variola virus, Venezuelan equine encephalitis virus, Vesicular stomatitis Indiana virus, WU Polyomavirus, Wesselsbron virus, West Caucasian bat virus, West Nile virus, Western equine encephalitis virus, Whitewater Arroyo mammarenavirus, Yellow fever virus, Yokose virus, Yug Bogdanovac virus, Zaire ebolavirus, Zika virus, or Zygosaccharomyces bailii virus Z viral sequence. Examples of RNA viruses that may be detected include one or more of (or any combination of) Coronaviridae virus, a Picornaviridae virus, a Caliciviridae virus, a Flaviviridae virus, a Togaviridae virus, a Bornaviridae, a Filoviridae, a Paramyxoviridae, a Pneumoviridae, a Rhabdoviridae, an Arenaviridae, a Bunyaviridae, an Orthomyxoviridae, or a Deltavirus. In certain example embodiments, the virus is Coronavirus, SARS, Poliovirus, Rhinovirus, Hepatitis A, Norwalk virus, Yellow fever virus, West Nile virus, Hepatitis C virus, Dengue fever virus, Zika virus, Rubella virus, Ross River virus, Sindbis virus, Chikungunya virus, Borna disease virus, Ebola virus, Marburg virus, Measles virus, Mumps virus, Nipah virus, Hendra virus, Newcastle disease virus, Human respiratory syncytial virus, Rabies virus, Lassa virus, Hantavirus, Crimean-Congo hemorrhagic fever virus, Influenza, or Hepatitis D virus.

[0438] In certain example embodiments, the virus may be a plant virus selected from the group comprising Tobacco mosaic virus (TMV), Tomato spotted wilt virus (TSWV), Cucumber mosaic virus (CMV), Potato virus Y (PVY), the RT virus Cauliflower mosaic virus (CaMV), Plum pox virus (PPV), Brome mosaic virus (BMV), Potato virus X (PVX), Citrus tristeza virus (CTV), Barley yellow dwarf virus (BYDV), Potato leafroll virus (PLRV), Tomato bushy stunt virus (TBSV), rice tungro spherical virus (RTSV), rice yellow mottle virus (RYMV), rice hoj a blanca virus (RHBV), maize rayado fino virus (MRFV), maize dwarf mosaic virus (MDMV), sugarcane mosaic virus (SCMV), Sweet potato feathery mottle virus (SPFMV), sweet potato sunken vein closterovirus (SPSVV), Grapevine fanleaf virus (GFLV), Grapevine virus A (GVA), Grapevine virus B (GVB), Grapevine fleck virus (GFkV), Grapevine leafroll-associated virus-1, -2, and -3, (GLRaV-1, -2, and -3), Arabis mosaic virus (ArMV), or Rupestris stem pitting-associated virus (RSPaV). In a preferred embodiment, the target RNA molecule is part of said pathogen or transcribed from a DNA molecule of said pathogen. For example, the target sequence may be comprised in the genome of an RNA virus. It is further preferred that CRISPR effector protein hydrolyzes said target RNA molecule of said pathogen in said plant if said pathogen infects or has infected said plant. It is thus preferred that the CRISPR system is capable of cleaving the target RNA molecule from the plant pathogen both when the CRISPR system (or parts needed for its completion) is applied therapeutically, i.e. after infection has occurred or prophylactically, i.e. before infection has occurred.

[0439] In certain example embodiments, the virus may be a retrovirus. Example retroviruses that may be detected using the embodiments disclosed herein include one or more of or any combination of viruses of the Genus Alpharetrovirus, Betaretrovirus, Gammaretrovirus, Deltaretrovirus, Epsilonretrovirus, Lentivirus, Spumavirus, or the Family Metaviridae, Pseudoviridae, and Retroviridae (including HIV), Hepadnaviridae (including Hepatitis B virus), and Caulimoviridae (including Cauliflower mosaic virus).

[0440] In certain example embodiments, the virus is a DNA virus. Example DNA viruses that may be detected using the embodiments disclosed herein include one or more of (or any combination of) viruses from the Family Myoviridae, Podoviridae, Siphoviridae, Alloherpesviridae, Herpesviridae (including human herpes virus, and Varicella Zorter virus), Malocoherpesviridae, Lipothrixviridae, Rudiviridae, Adenoviridae, Ampullaviridae, Ascoviridae, Asfarviridae (including African swine fever virus), Baculoviridae, Cicaudaviridae, Clavaviridae, Corticoviridae, Fuselloviridae, Globuloviridae, Guttaviridae, Hytrosaviridae, Iridoviridae, Maseilleviridae, Mimiviridae, Nudiviridae, Nimaviridae, Pandoraviridae, Papillomaviridae, Phycodnaviridae, Plasmaviridae, Polydnaviruses, Polyomaviridae (including Simian virus 40, JC virus, BK virus), Poxviridae (including Cowpox and smallpox), Sphaerolipoviridae, Tectiviridae, Turriviridae, Dinodnavirus, Salterprovirus, Rhizidovirus, among others. In some embodiments, a method of diagnosing a species-specific bacterial infection in a subject suspected of having a bacterial infection is described as obtaining a sample comprising bacterial ribosomal ribonucleic acid from the subject; contacting the sample with one or more of the probes described, and detecting hybridization between the bacterial ribosomal ribonucleic acid sequence present in the sample and the probe, wherein the detection of hybridization indicates that the subject is infected with Escherichia coli, Klebsiella pneumoniae, Pseudomonas aeruginosa, Staphylococcus aureus, Acinetobacter baumannii, Candida albicans, Enterobacter cloacae, Enterococcus faecalis, Enterococcus faecium, Proteus mirabilis, Staphylococcus agalactiae, or Staphylococcus maltophilia or a combination thereof.

### Coronavirus

[0441] Systems and methods of the presently disclosed invention are designed to detect coronavirus, in an aspect, the target sequence is the 2019-nCoV, also referred to herein as SARS-CoV-2, which causes COVID-19. The coronavirus is a positive-sense single stranded RNA family of viruses, infecting a variety of animals and humans. SARS-CoV is one type of coronavirus infection, as well as MERS-CoV. Detection of one or more coronaviruses are envisioned, including the SARS-CoV-2 detected in Wuhan City. Sequences of the sARS-CoV-2 are available at GISAID accession no. EPI_ISL_402124 and EPI_ISL_402127-402130, and described in DOI: 10.1101/2020.01.22.914952. Further deposits of the SARS-CoV2 are deposited in the GISAID platform include EP_ISL_402119-402121 and EP_ISL_402123-402124; see also GenBank Accession No. MN908947.3. In an aspect, one may use known SARS and SARS-related coronaviruses or other viruses from one or more hosts to generate a non-redundant alignment. Related viruses can be found, for example in bats.

[0442] In certain embodiments, the systems are designed to comprise at least one highly active guide polynucleotide which is designed according to the methods disclosed herein. In a preferred embodiment, the guide polynucleotide binds to at least one target sequence that is a unique coronavirus genomic sequence, thereby identifying the presence of coronavirus to the exclusion of other viruses. The systems and methods can be designed to detect a plurality of respiratory infections or viral infections, including coronavirus.

[0443] In an aspect the at least one guide polynucleotide binds to a coronavirus sequence encoding a polypeptide that is immunostimulatory to a host immune system. Immunostiumulatory polypeptides have the ability to enhance, stimulate, or increase response of the immune system, typically by inducing the activation or activity of a components of the immune system (e.g. an immune cell). In embodiments, the immunostimulatory polypeptide contributes to immune-mediated disease in the host. In an aspect, the host is a mammal, for example, a human, a bat, or a pangolin, that may be infected by a coronavirus. Cyranoski, D. Did pangolins spread the China coronavirus to people? Nature, 7 Feb. 2020. In certain embodiments, the guide polynucleotide can be designed to detect SARS-CoV-2 or a variant thereof in meat, live anmials and humans so that testing can be performed, for example at markets and other public places where sources of contamination can arise.

[0444] Gene targets may comprise ORF lab, N protein, RNA-dependent RNA polymerase (RdRP), E protein, ORF1b-nsp14, Spike glycoprotein (S), or pancorona targets. Molecular assays have been under development and can be used as a starting point to develop guide molecules for the methods and systems described herein. See, “Diagnostic detection of 2019-nCoV by real-time RT-PCR” Charitê, Berlin Germany (17 Jan. 2020)’ Detection of 2019 novel coronavirus (2019-nCoV) in suspected human cases by RT-PCR— Hong Kong University (23 Jan. 2020); PCR and sequencing protocol for 2019-nCoV—Department of Medical Sciences, Ministry of Public Health, Thailand (updated 28 Jan. 2020); PCR and sequencing protocols for 2019-nCoV-National Institute of Infectious Diseases Japan (24 Jan. 2020); US CDC panel primer and probes— U.S. CDC, USAV— U.S. CDC, USA (28 Jan. 2020); China CDC Primers and probes for detection 2019-nCoV (24 Jan. 2020), incorporated in their entirety by reference. Further, the guide molecule design may exploit differences or similarities with SARS-CoV. Researchers have recently identified simialrities and fifrferences between 2019-nCoV and SARS-CoV. “Coronavirus Genome Annotation Reveals Amino Acid Differences with Other SARS Viruses,” genomeweb, Feb. 10, 2020. For example, guide molecules based on the 8a protein, which was present in SARS-CoV but absent in SARS-CoV-2, can be utilized to differentiate between the viruses. Similarly, the 8b and 3b proteins have different lengths in SARS-CoV and sARS-CoV-2 and can be utilized to design guide molecules to detect non-overlapping proteins of nucleotides encoding in the two viruses. Wu et al., Genome Composition and Divergence of the Novel Coronavirus (2019-nCoV) Originating in China, Cell Host & Microbe (2020), DOI: 10.1016/j.chom.2020.02.001, incorporated herein by reference, including all supplemental information, in particular Table 51. Mutations may also be detected, with guide and/or primers designed specifically to detect, for example, changes in the SARS-CoV-2 virus. In an embodiment, the guide or primer can be designed to detect the D614G mutation in the SARS-CoV-2 spike protein. See, Korber et al., Cell 182, 812-827 (2020); doi: 10.1016/j.cell.2020.06.043. Other mutations in the spike protein can be designed utilizing the COVID-19 viral genome analysis pipeline available at cov.lanl.gov. Further resources to design primers and guides to detect coronavirus or coronavirus mutations can be found at Starr, et al., “Deep Mutational Scanning of SARS-CoV-2 Receptor Binding Domain Reveals Constraints in Folding and ACE2 Binding,” Cell, 182, 1-16 (2020); doi: 10.1016/j.cell.2020.08.012.

[0445] In an aspect, the systems and methods of detection can be used to identify and/or distinguish SARS-CoV-2 variants. Exemplary variants include a variant identified in the United Kingdom, referred to as 201/501Y.V1, VOC 202012/01, or B.1.1.7. Similarly, a variant identified in South Africa known as 20H/501Y.V2 or B.1.351. Another exemplary variant identified in Brazil, known as P.1, may be detected by the systems and methods described herein. In an aspect, the variants can be identified based on unique mutations associated therewith. In an exemplary embodiment, sequences with at least one, two, three, four or more SNPs of the sequences can be identified. In an aspect, mutations or deletions associated with a particular SARS-CoV-2 lineage can be identified. See, e.g. virological.org/t/preliminary-genomic-characterisation-of-an-emergent-sars-cov-2-lineage-in-the-uk-defined-by-a-novel-set-of-spike-mutations/563, identifying non-synonymous mutations and deletions inferred to occur in B1.1.7 lineage. In an aspect, the mutation is in the ORF lab, spike, Orf8, or N gene.

[0446] The systems and methods of detection can be used to identify single nucleotide variants, detection based on rRNA sequences, screening for drug resistance, monitoring microbe outbreaks, genetic perturbations, and screening of environmental samples, as described in PCT/US2018/054472 filed Oct. 22, 2018, at [0183]-[0327], incorporated herein by reference.

[0447] In certain example embodiments, the systems, devices, and methods disclosed herein may be used for biomarker detection. For example, the systems, devices and method disclosed herein may be used for SNP detection and/or genotyping. The systems, devices and methods disclosed herein may be also used for the detection of any disease state or disorder characterized by aberrant gene expression. Aberrant gene expression includes aberration in the gene expressed, location of expression and level of expression. Multiple transcripts or protein markers related to cardiovascular, immune disorders, and cancer among other diseases may be detected. In certain example embodiments, the embodiments disclosed herein may be used for cell free DNA detection of diseases that involve lysis. In certain example embodiments, the embodiments could be utilized for faster and more portable detection for pre-natal testing of cell-free DNA. The embodiments disclosed herein may be used for screening panels of different SNPs associated with, among others, different coronaviruses, evolving SARS-CoV2, and other related respiratory viral infections. As described herein elsewhere, closely related genotypes/alleles or biomarkers (e.g. having only a single nucleotide difference in a given target sequence) may be distinguished by introduction of a synthetic mismatch in the gRNA.

[0448] In an aspect, the invention relates to a method for detecting target nucleic acids in samples, comprising:

[0449] distributing a sample or set of samples into one or more individual discrete volumes, the individual discrete volumes comprising a CRISPR system according to the invention as described herein;

[0450] incubating the sample or set of samples under conditions sufficient to allow binding of the one or more guide RNAs to one or more target molecules;

[0451] activating the CRISPR effector protein via binding of the one or more guide RNAs to the one or more target molecules, wherein activating the CRISPR effector protein results in modification of the RNA-based masking construct such that a detectable positive signal is generated; and

[0452] detecting the detectable positive signal, wherein detection of the detectable positive signal indicates a presence of one or more target molecules in the sample.

[0453] The sensitivity of the assays described herein are well suited for detection of target nucleic acids in a wide variety of biological sample types, including sample types in which the target nucleic acid is dilute or for which sample material is limited. Methods for field deployable and rapid diagnostic assays can be optimized for the type of sample material utilized. See, e.g. Myhrvold et al., 2018. Biomarker screening may be carried out on a number of sample types including, but not limited to, saliva, urine, blood, feces, sputum, and cerebrospinal fluid. The embodiments disclosed herein may also be used to detect up- and/or down-regulation of genes. For example, a sample may be serially diluted such that only over-expressed genes remain above the detection limit threshold of the assay.

[0454] In certain embodiments, the present invention provides steps of obtaining a sample of biological fluid (e.g., urine, blood plasma or serum, sputum, cerebral spinal fluid), and extracting the DNA or RNA. The mutant nucleotide sequence to be detected, may be a fraction of a larger molecule or can be present initially as a discrete molecule.

[0455] In certain embodiments, DNA is isolated from plasma/serum of a cancer patient. For comparison, DNA samples isolated from neoplastic tissue and a second sample may be isolated from non-neoplastic tissue from the same patient (control), for example, lymphocytes. The non-neoplastic tissue can be of the same type as the neoplastic tissue or from a different organ source. In certain embodiments, blood samples are collected and plasma immediately separated from the blood cells by centrifugation. Serum may be filtered and stored frozen until DNA/RNA extraction.

[0456] In an aspect, sample preparation can comprise methods as disclosed herein to circumvent other RNA extraction methods and can be used with standard amplification techniques such as RT-PCR as well as the CRISPR-Cas detection methods disclosed herein. In an aspect, the method may comprise a one-step extraction-free RNA preparation method that can be used with samples tested for coronavirus, which may be, in an aspect, a RT-qPCR testing method, a lateral flow detection method or other CRISPR-Cas detection method disclosed herein. Advantageously, the RNA extraction method can be utilized directly with other testing protocols. In an aspect, the method comprises use of a nasopharyngeal swab, nasal saline lavage, or other nasal sample (e.g., anterior nasal swab) with Quick Extract™ DNA Extraction Solution (QE09050), Lucigen, or QuickExtract Plant DNA Extraction Solution, Lucigen. In an embodiment, the solution allows for isolation of polynucleotides without the requirement of further extraction prior to further processing. In an aspect, the sample is diluted 2:1, 1:1 or 1:2 sample:DNA extraction solution. The sample:extraction mix is incubated at about 90° C. to about 98° C., preferably about 95° C. In another aspect, incubation is performed at between about 20° C. to about 90° C., about 22, 23, 24, 25, 26, 27, 28, 29, 30, 31, 32, 33, 34, 35, 36, 37, 38, 39, 40, 41, 42, 43, 44, 45, 46, 47, 48, 49, 50, 51, 52, 53, 54, 55, 56, 57, 58, 59, 60, 61, 62, 63, 64, 65, 66, 67, 68, 69, 70, 71, 72, 73, 74, 75, 76, 77, 78, 79, 80, 81, 82, 83, 84, 85, 86, 87, 88, 89 or 90° C. The incubation period can be about 2, 3, 4, 5, 6, 7, 8, 9, 10, 11, 12, 13, 14, 15, 16, 17, 18, 19, 20, 21, 22, 23, 24, 25, 26, 27, 28, 29 or 30 minutes, preferably about 4 to 6 minutes, or about 5 minutes. Incubation time and temperature may vary depending on sample size and quality, and incubation time may increase if using lower temperature. Current CDC Real-Time RT-PCR Diagnostic Panel are as described at fda.gov/media/134922/download, “CDC 2019-Novel Coronavirus (2019-nCoV) Real-Time RT-PCR Diagnostic Panel.” In certain embodiments, the DNA extraction solution can remain with the sample subsequent to incubation and be utilized in the next steps fo detection methods. In an aspect, the detection method is an RT-qPCR reaction and the extraction solution is kept at a concentration of less than 10%, 9%, 8%, 7%, 6%, 5%, 4%, 3% of the reaction mixture, where the reaction mixture comprises the detection reaction reagents, sample and extraction solution.

[0457] In certain embodiments, a bead is utilized with particular embodiments of the invention and may be included with the extraction solution. The bead may be used to capture, concentrate or otherwise enrich for particular material. The bead may be magnetic, and may be provided to capture nucleic acid material. In another aspect, the bead is a silica bead. Beads may be utilized in an extraction step of the methods disclosed herein. Beads can be optionally used with the methods described herein, including with the one-pot methods that allow for concentration of viral nucleic acids from large volume samples, such as saliva or swab samples to allow for a single one-pot reaction method. Concentration of desired target molecules can be increased by about 10-fold, 50-fold, 100-fold, 200-fold, 500-fold, 800-fold, 1000-fold, 1500-fold, 2000-fold, 2500-fold, 3000-fold, or more.

[0458] Magnetic beads in a PEG and salt solution are preferred in an aspect, and in embodiments bind to viral RNA and/or DNA which allows for concentration and lysis concurrently. Silica beads can be used in another aspect. Capture moieties such as oligonucleotide functionalized beads are envisioned for use. The beads may be using with the extraction reagents, allowed to incubate with a sample and the lysis/extraction buffer, thereby concentrating target molecules on the beads. Extraction can be performed as described elsewhere herein, at 22° C.-60° C., with subsequent isothermal amplification and/or CRISPR detection performed under conditions as described elsewhere herein. When used with a cartridge device detailed elsewhere herein, a magnet can be activated and the beads collected, with optional flushing of the extraction buffer and one or more washes performed. Advantageously, the beads can be used in the one-pot methods and systems without additional washings of the beads, allowing for a more efficient process without increased risks of contamination in multi-step processes. Beads can be utilized with the isothermal amplifications detailed herein, and the beads can flow into an amplification chamber of the cartridge or be maintained in the pot for the amplification step. Upon heating, nucleic acid can be released off the beads.

[0459] In certain example embodiments, target nucleic acids are detected directly from a crude or unprocessed sample, such as blood, serum, saliva, cebrospinal fluid, sputum, or urine. In certain example embodiments, the target nucleic acid is cell free DNA.

### EXAMPLES

### Example 1— Coronavirus Assay Development

[0460] Systems and methods can be designed for the detection and diagnosis of viruses and viral infections, including Covid-2019, optionally with acute respiratory infections using the disclosure detailed herein. The systems can comprise two or more CRISPR Cas systems to multiplex, for example, detection of Covid-2019, and other coronaviruses such as SARS-CoV and MERS-CoV. Sequences of the 2019-nCoV are available at GISAID accession no. EPI_ISL_402124 and EPI_ISL_402127-402130, and described in DOI: 10.1101/2020.01.22.914952. Further deposits of the Wuhan coronavirus deposited in the GISAID platform include EP_ISL_402119-402121 and EP_ISL_402123-402124; see also GenBank Accession No. MN908947, and guide design can be predicated on genome sequences disclosed therein and in Tian et al, “Potent binding of 2019 novel coronavirus spike protein by a SARS coronavirus-specific human monoclonal antibody”; doi: 10.1101/2020.01.28.923011, incorporated by reference, which details human monoclonal antibody, CR3022 binding of the 2019-nCoV RBD (KD of 6.3 nM). Guide design can target unique viral genomic regions of the 2019-nCoV or conserved genomic regions across one or more viruses of the coronavirus family. Gene targets may comprise ORF lab, N protein, RNA-dependent RNA polymerase (RdRP), E protein, ORF1b-nsp14, Spike glycoprotein (S), or pancorona targets, including guide molecules based on the 8a protein, which was present in SARS-CoV but absent in 2019-nCoV, utilized to differentiate between the viruses. Similarly, the 8b and 3b proteins have different lengths in SARS-CoV and 2019-nCoV and can be utilized to design guide molecules to detect non-overlapping proteins of nucleotides encoding in the two viruses. Wu et al., Genome Composition and Divergence of the Novel Coronavirus (2019-nCoV) Originating in China, Cell Host & Microbe (2020), DOI: 10.1016/j.chom.2020.02.001, incorporated herein by reference, including all supplemental information, in particular Table 51. Molecular assays have been under development and can be used as a starting point to develop guide molecules for the methods and systems described herein.

[0461] Detection of respiratory viruses such as coronavirus may include a thermostable CRISPR-Cas protein as described herein, which may be a Cas13a ortholog. As described elsewhere herein, one or more Cas13a orthologs may be utilized in a multiplex design, including the thermostable Cas13a orthologs described herein, where such thermostability confers further rapidity to the diagnostic and detections platforms and methods disclosed herein.

[0462] Coronavirus detection can comprise two or more detection systems utilizing RNA targeting Cas effector proteins; DNA targeting Cas effector proteins, or a combination thereof. The RNA-targeting effector proteins may be a Cas13 protein, such as Cas13a, Cas13b, or Cas13c, including one of the thermostable Cas13a proteins described herein. The DNA-targeting effector protein may be a Type V protein, e.g. Cas12 protein such as Cpf1 and C2c1. Multiplexing systems can be designed such that different Cas proteins with different sequence specificities or other motif cutting preferences can be used, including, in certain embodiments, at least one Cas13a thermostable protein described herein. See International Publication WO 2019/126577. Type VI and Type V Cas proteins are known to possess different cutting motif preferences. See Gootenberg et al. “Multiplexed and portable nucleic acid detection platform with Cas13b, Cas12a, and Csm6.” Science. Apr. 27, 2018, 360:439-444; International Publication WO 2019/051318. Thus, embodiments disclosed herein may further comprise multiplex embodiments comprising two or more Type VI Cas proteins with different cutting preferences, or one or more Type VI Cas proteins and one or more Type V case proteins.

[0463] In certain example embodiments, the coronavirus assay comprises a Type VI Cas protein disclosed herein and guide molecule comprising a guide sequence configured to direct binding of the CRISPR-Cas complex to a target molecule and a labeled detection molecule (“RNA-based masking construct”). A multiplex embodiment can be designed to track one or more variants of coronavirus or one or more variants of coronavirus, including the 2019-nCoV, in combination with other viruses, for example, Human respiratory syncytial virus, Middle East respiratory syndrome (MERS) coronavirus, Severe acute respiratory syndrome-related (SARS) coronavirus, and influenza.

[0464] In certain embodiments, the detection assay can be provided on a lateral flow device, as described herein. The lateral flow device may comprise a flexible substrate, such as a paper substrate or a flexible polymer-based substrate, which can include freeze-dried reagents for detection assays with a visual readout of the assay results. See, WO 2019/071051 at [0145]-[0151] and Example 2, specifically incorporated herein by reference. Accordingly, the assay can be adapted for field diagnostics, including use of visual readout on a lateral flow device, rapid, sensitive detection and can be deployed for early and direct detection.

### Example 2— Lateral Flow Cornavirus Detection

[0465] Detection of coronavirus targets was performed using RPA amplification for 25 minutes followed by a 30 minute Cas 13 reaction using the following primers and guides:

TABLE 3

| | |
|---|---|
| S gene | GAAATTAATACGACTCACTATAGGGAGGTT |
| RPA | TCAAACTTTACTTGCTTTACATAGA |
| Forward | (SEQ ID NO: 62016) |
| S gene | TCCTAGGTTGAAGATAACCCACATAATAAG |
| RPA | (SEQ ID NO: 62017) |
| Reverse | |
| Sgene | GAUUUAGACUACCCCAAAAACGAAGGGGAC |
| LwCas13a | UAAAACGCAGCACCAGCUGUCCAACCUGAA |
| crRNA | GAAG (SEQ ID NO: 62018) |
| Orflab | GAAATTAATACGACTCACTATAGGGCGAAG |
| RPA | TTGTAGGAGACATTATACTTAAACC |
| Forward | (SEQ ID NO: 62019) |
| Orflab | TAGTAAGACTAGAATTGTCTACATAAGCAGC |
| RPA | (SEQ ID NO: 62020) |
| Reverse | |
| Orflab | GAUUUAGACUACCCCAAAAACGAAGGGGACU |
| LwCas13a | AAAACCCAACCUCUUCUGUAAUUUUUAAACU |
| crRNA | AU (SEQ ID NO: 62021) |

[0466] Results are provided in FIG. 1, with S gene detection shown on the left and Orflab on the right, and FIG. 2B. The assay has been further validated by fluorescence in FIG. 2A.

### Example 3. RNA Preparation for COVID-19 Detection

[0467] One of the major bottlenecks for COVID-19 diagnosis is the limited availability of RNA extraction kits for preparing virus RNA from patient samples and the low-throughput nature of the extraction procedure. Here, Applicants describe a one-step extraction-free RNA preparation method that can be carried out in 5 minutes and the reaction can be used directly with the CDC COVID-19 RT-qPCR testing protocol, thus increasing throughput, and alleviating supply chain issues.

### Materials and Reagents

[0468] Quick Extract™ DNA Extraction Solution (QE09050), Lucigen

### Protocol

[0469] Step 1. Dilute nasopharyngeal swab stored in Viral Transport Medium or Human Specimen Control (HSC) 1:1 with Quick Extract™ DNA Extraction Solution. For example, in a fresh PCR tube, mix 20 ul of swab sample with 20 ul of Quick Extract.

[0470] Step 2. Incubate swab-Quick Extract mix at 95° C. for 5 minutes. Allow reaction to cool on ice before proceeding.

[0471] Step 3. Use reaction from step (2) for qRT-PCR. Make sure the amount from step (2) does not exceed 10% of the total qRT-PCR reaction volume. For example, if a RT-qPCR reaction has a total volume of 50 ul, do not use more than 5 ul of the reaction mix from step (2).

### Assay Development and Preliminary Validation

[0472] Applicants evaluated a number of buffer compositions to identify one that achieved efficient lysis of enveloped virus while preserving the activity of the CDC recommended RT-qPCR reaction (TaqPath™ 1-Step RT-qPCR Master Mix). Of all of the buffers tested, Quick Extract™ DNA Extraction Solution provided satisfactory results.

[0473] To confirm that the presence of QE does not interfere with RT-qPCR activity, comparison of RT-qPCR reactions using synthetic SARS-CoV-2 gene fragment (Twist Synthetic SARS-CoV-2 RNA Control 1, SKU:102019) dissolved in either ddH₂O or in a 50:50 ddH₂O:Quick Extract mixture was performed. Each RT-qPCR reaction was set up with a total volume of 10 ul (1 ul of RNA sample, 0.5 ul of CDC probe N1, 2.5 ul of TaqPath RT-qPCR master mix, and 6 ul of ddH₂O). From these reactions, Applicants found that Quick Extract at a final concentration of 5% did not negatively affect the RT-qPCR reaction (FIG. 1A).

[0474] Preliminary validation of the Quick Extract RNA preparation procedure was conducted on coronavirus positive nasopharyngeal swabs where it was found that RNA samples prepared using Quick Extract supported similarly sensitive detection of coronavirus as QIAmp Viral RNA Miniprep for all 4 swab samples (FIG. 1B). To simulate low viral load, coronavirus positive swabs were diluted 1:10 in pooled nasopharyngeal swabs from 5 unique, healthy donors (Lee Biosolutions, SKU:991-31-NC-5) prior to purification or Quick Extract treatment. For the QIAmp Viral RNA Miniprep conditions, 100 ul of diluted swab sample was used for extraction and was eluted using 100 ul of ddH₂O. 1 ul of the elution was used in a 10 ul RT-qPCR reaction. For the Quick Extract conditions, 1 ul of Quick Extract preparation was used for each 10 ul RT-qPCR reaction.

### Example 4. Development of a One Pot RT-LAMP Cas12b SHERLOCK Reaction

[0475] Applicants developed a research protocol for a SHERLOCK-based COVID-19 coronavirus detection. The basic protocol is outlined in FIG. 16. A nasopharyngeal swab or saliva sample is collected from a patient. The sample is added to a tube containing SHERLOCK reagents. The tube is heated for 60 minutes at 60° C. A SHERLOCK detection lateral flow strip is then dipped into the reaction in the tube and the strip is then analyzed for results. Table 4 shows final reaction parameters for reagents in the tube.

[0476] The lateral flow strip is inserted directly into this reaction as shown in FIG. 16.

TABLE 4
Final Reaction Parameters

| | Initial | | Final | | Amount |
|---|---|---|---|---|---|
| | Concentration | | Concentration | | (μL) |
| Isothermal | 10X | | 1X | | 5 |
| amplification | | | | | |
| buffer | | | | | |
| dNTPs | 10 | mM | 1.4 | mM | 7 |
| MgSO4 | 100 | mM | 8 | mM | 4 |
| Bst 2.0 | 8000 | units/mL | 320 | units/mL | 2 |
| WS RTx | 15,000 | units/mL | 300 | units/mL | 1 |
| Aap Cas12b | 2 mg/mL or | | 500 | nM | 1.625 |
| | 15.4 μM | | | | |
| Aac Cas12b | 360 ng/μL or | | 500 | nM | 2.5 |
| crRNA | 10 μM | | | | |
| WCV332 | 100 | μM | 125 | nM | 0.0625 |
| Taurine | 500 | mM | 50 | nM | 5 |
| LAMP primer pool | 10X | | 1X | | 5 |
| Sample | | | | | 5 |
| H2O | | | | | 11.8125 |
| Total | | | | | 50 |

[0477] The different reaction additives that were used to optimize the assay is shown in FIG. 17. FIG. 18 shows results obtained for assessing limit of detection by lateral flow assay at 60° C. for 60 minutes. The limit of detection was 100 molecules per reaction.

[0478] Results obtained by SHERLOCK assay were compared to results obtained by qRT-PCR, as shown in FIG. 19. The assay can also be performed using a sous vide cooker, as illustrated in FIG. 20, 41.

### Example 5. Exemplary Use of Device in Diagnostic Methods

[0479] One exemplary device that can be utilized at point of care, in home environments, and/or for distribution as a take home device is shown in FIG. 21. The device can advantageously be disposable and can offer rapid instrument-free visualization of the nucleic acid amplification products of the methods disclosed herein. In an exemplary embodiment, the disposable device is compatible with nucleic acid amplification technologies, including LAMP. The device comprises an ampule which can contain the lateral flow buffer for the lateral flow readout of the amplification result. A sample can be loaded into a container which may comprise the reagents for the SHERLOCK reaction, including amplification reagents and CRISPR-Cas protein and guide molecules, which may optionally be stored in the container as lyophilized reagents. (See FIG. 21 at step 1). The device can further comprise a container for the contents of the SHERLOCK reaction, including LAMP amplification reagents and CRISPR-Cas protein and guide molecules. The device can also be configured to comprise the lateral flow strip, such that after the reaction is conducted, a lateral flow readout is provided in the device utilizing an instrument-free method for the visualization of the reaction products without cross-contamination.

### Example 6. Point-of-Care Testing for COVID-19 Using SHERLOCK Diagnostics

[0480] Rapid point-of-care (POC) tests capable of being run in any low-resource setting, including at home, are needed to adequately combat the COVID-19 pandemic and re-open society. Applicants previously described a protocol for using the CRISPR-based SHERLOCK (Specific High Sensitivity Enzymatic Reporter UnLOCKing) technique (Gootenberg et al., 2017, 2018) for the detection of SARS-CoV-2. SHERLOCK achieves sensitive detection of SARS-CoV-2 through two consecutive reactions: (1) amplification of the virus RNA using an isothermal amplification reaction, and (2) detection of the resulting amplicon using CRISPR-mediated collateral reporter unlocking. Additional CRISPR-based tests have also been recently developed (Broughton et al., 2020; Ding et al., 2020; Guo et al., 2020; Lucia et al., 2020), but these all rely on two separate reaction steps, which requires liquid handling and opening of tubes. These steps add complexity and can lead to contamination, prohibiting their use outside laboratory environments and precluding use by lay individuals. Other POC tests for COVID-19 have been authorized by the U.S. Food and Drug Administration (FDA), including the Abbott ID NOW and Cepheid Genexpert, but these require complex and expensive instrumentation, limiting use to complex labs and hospitals by trained professionals. Some isothermal pre-amplification methods, such as Loop-mediated Isothermal Amplification (LAMP), have been developed as POC tests (Zhang et al., 2020), but these rely on amplification that can be nonspecific.

[0481] Currently, the only tests readily available for at-home or low-resource settings are serology paper-based tests (Whitman et al., 2020). However, these are not adequate for diagnosing live infection as antibodies take 1-2 weeks to become detectable in blood and only signify previous exposure. Therefore, Applicants sought to create a POC COVID-19 nucleic acid test that can be run in any setting. Through a series of optimizations, Applicants developed a streamlined, 1-hour SHERLOCK based test that requires no sample extraction and can be performed at one temperature in a single reaction with minimal fluid handling and visual colorimetric readout (FIG. 16).

[0482] The one-pot SHERLOCK SARS-CoV-2 detection protocol works in the following three steps, without requiring separate virus RNA extraction:

| | | |
|---|---|---|
| Step (1) | 5 mins at 95° C. | lysis of virus-containing patient sample using |
| | | QuickExtract to release virus RNA; |
| Step (2) | l hr at 60° C. | detection of virus RNA using one-step |
| | | SHERLOCK reaction; |
| Step (3) | 2 mins at | visual read out of the detection |
| | room temp | result by eye using |
| | | a commercially-available paper dipstick. |

[0483] In order to integrate the isothermal amplification step with the CRISPR-mediated detection step, Applicants sought to establish a common reaction condition capable of supporting both steps. Due to the supply chain constraints for the commercially-available recombinase polymerase amplification (RPA) reagents and difficulties in producing a rapid one-pot RPA test for sensitive RNA detection, Applicants chose loop-mediated isothermal amplification (LAMP) reaction for amplifying the virus RNA. The requisite enzymes for LAMP are more readily available from a number of commercial suppliers and the LAMP buffers are simpler and more amenable to systematic optimization with Cas enzymes.

[0484] To determine the optimal combination of LAMP primers and guides, Applicants designed 29 sets of LAMP primers targeting different regions of the SARS-CoV-2 genome and identified the best primer set for amplifying gene N (FIG. 25A). As LAMP operates at a higher temperature than RPA (55-65° C. compared to 42° C.), a one-pot reaction demands a Cas enzyme with collateral activity that is thermostable. Of the various Cas proteins Applicants explored, Cas12b from Alicyclobacillus acidiphilus (AapCas12b) (Teng et al., 2018) maintained sufficient activity in the same temperature range as LAMP (FIG. 25B). However, because the AapCas12b locus did not contain a CRISPR array, the published single guide RNA (sgRNA) for AapCas12b used a direct repeat (DR) sequence from Alicyclobacillus macrosporangiidus Cas12b, which could impede activity. To remedy this, Applicants searched for alternative orthologs with similar protein sequences to AapCas12b and found that Alicyclobacillus acidoterrestris Cas12b (AacCas12b) shared a 95% sequence homology (Shmakov et al., 2015). Additionally, the AacCas12b tracrRNA and predicted AapCas12b tracrRNA are 97% identical. Given the high degree of similarity between AapCas12b and AacCas12b protein and tracrRNA, Applicants surmised that the sgRNA for AacCas12b should closely match the cognate AapCas12b DR-tracrRNA hybrid. Indeed, reactions combining AapCas12b enzyme with AacCas12b sgRNA produced more robust and specific nuclease activity compared to the published AapCas12b sgRNA (FIG. 25C).

[0485] For the best LAMP amplicon, Applicants tested 18 sgRNAs to identify the optimal combination of primers and guide sequence (FIG. 25D). Using this combination in a one pot reaction, Applicants found that AapCas12b generated faster and higher collateral activity than AacCas12b protein (FIG. 25E). Applicants further optimized one-pot reaction components by screening 94 additives to improve thermal stability, finding that addition of taurine significantly improved reaction kinetics (FIG. 25F).

[0486] Applicants profiled the optimized reaction with a lateral flow readout and an RNA extraction-free input using SARS-CoV-2 genome standards spiked into nasopharyngeal (NP) swab to determine limit of detection (LOD), ideal incubation temperature, readout time, and robustness. Applicants found that the LOD of the reaction was 100 copies of SARS-CoV-2 (FIG. 18). This LOD was reliable and reproducible over 30 replicates (FIG. 6). At twice the LOD, the ideal incubation parameters were 60° C. for at least 50 minutes (FIG. 26A, 26B). The reaction components could be formulated as a mastermix and maintained functionality after 6 freeze-thaw cycles (FIG. 26C). The assay exhibited no cross-reactivity with the SARS or MERS coronavirus genomes (FIG. 26D). The reaction could be performed using either a standard heat block or via a water bath maintained by a commercially-available low-cost (under $40 USD) sous-vide cooker (FIG. 20).

[0487] Finally, Applicants evaluated the one-pot SHERLOCK detection on 12 positive and 5 negative patient NP swabs. Applicants' assay correctly identified 35/36 positive patient replicates and 15/15 negative patient replicates, resulting in a sensitivity of 97% and specificity of 100% (FIGS. 19 and 27, 42A). To further simplify the assay workflow, Applicants tested whether lysis using QuickExtract at room temperature (22° C.) or the one-pot incubation temperature (60° C.) for 10 mins would be sufficient for detection. As QuickExtract contains Proteinase K that inhibits SHERLOCK without heat inactivation at 95° C., Applicants added Proteinase K Inhibitor to the SHERLOCK reaction. In both cases, Applicants could identify 33/36 positive patient replicates (FIGS. 28A, 28B). Comparison of RT-qPCR Ct values between the lysis methods suggested that both lysis methods are viable alternatives for streamlining the assay workflow, though with a slight decrease (0.2/0.4 Ct at 60° C. and 0.4/0.7 Ct for 22° C. for CDC N1/N2) in sensitivity (FIG. 29).

### Materials and Methods

[0488] Design of LAMP and SHERLOCK reactions. Applicants designed LAMP amplification primers and SHERLOCK AapCas12b guide RNAs to target the N gene of SARS-CoV-2. The N gene is known to be present at higher copy numbers than other segments of the SARS-CoV-2 genome, which helps to increase the detection sensitivity. Below are the LAMP primer sequences and SHERLOCK AapCas12b guide RNAs:

TABLE 5
LAMP Primers and Cas Guide

| | |
|---|---|
| F3: | 5'-GCTGCTGAGGCTTCTAAG-3' |
| | (SEQ ID NO: 62022) |
| B3: | 5'-GCGTCAATATGCTTATTCAGC-3' |
| | (SEQ ID NO: 62023) |
| FIP: | 5'-GCGGCCAATGTTTGTAATCAG |
| | TAGACGTGGTCCAGAACAA-3' |
| | (SEQ ID NO: 62024) |
| BIP: | 5'-TCAGCGTTCTTCGGAATGTCGC |
| | TGTGTAGGTCAACCACG-3' |
| | (SEQ ID NO: 62025) |
| Loop | 5'-CCTTGTCTGATTAGTTCCTGGT-3' |
| Forward: | (SEQ ID NO: 62026) |
| Loop | 5'- TGGCATGGAAGTCACACC -3' |
| Reverse: | (SEQ ID NO: 62027) |
| AapCas12 | 5'- |
| b Guide | GUCUAGAGGACAGAAUUUUUCAACGG |
| RNA | GUGUGCCAAUGGCCACUUUCCAGGUG |
| targeting | GCAAAGCCCGUUGAGCUUCUCAAAUC |
| | UGAGAAGUGGCACCGAAGAACGCUG |
| | AAGCGCUG-3' (SEQ ID NO: 62028) |
| | (The spacer matching N gene |
| | is underlined.) |
| SARS- | GCAAAGCCCGUUGAGCUUCUCAAAUCU |
| CoV-2 N | GAGAAGUGGCACCGAAGAACGCUGAAG |
| gene: | CGCUG (SEQ ID NO: 62029) |

[0489] AapCas12b Protein Sequence:

(SEQ ID NO: 62030)
MAVKSMKVKLRLDNMPEIRAGLWKLHTEVNAGVRYY
TEWLSLLRQENLYRRSPNGDGEQECYKTAEECKAE
LLERLRARQVENGHCGPAGSDDELLQLARQLYELL
VPQAIGAKGDAQQIARKFLSPLADKDAVGGLGIAK
AGNKPRWVRMREAGEPGWEEEKAKAEARKSTDRTA
DVLRALADFGLKPLMRVYTDSDMSSVQWKPLRKGQ
AVRTWDRDMFQQAIERMMSWESWNQRVGEAYAKLV
EQKSRFEQKNFVGQEHLVQLVNQLQQDMKEASHGL
ESKEQTAHYLTGRALRGSDKVFEKWEKLDPDAPFD
LYDTEIKNVQRRNTRRFGSHDLFAKLAEPKYQALW
REDASFLTRYAVYNSIVRKLNHAKMFATFTLPDAT
AHPIWTRFDKLGGNLHQYTFLFNEFGEGRHAIRFQ
KLLTVEDGVAKEVDDVTVPISMSAQLDDLLPRDPH
ELVALYFQDYGAEQHLAGEFGGAKIQYRRDQLNHL
HARRGARDVYLNLSVRVQSQSEARGERRPPYAAVF
RLVGDNHRAFVHFDKLSDYLAEHPDDGKLGSEGLL
SGLRVMSVDLGLRTSASISVFRVARKDELKPNSEG
RVPFCFPIEGNENLVAVHERSQLLKLPGETESKDL
RAIREERQRTLRQLRTQLAYLRLLVRCGSEDVGRR
ERSWAKLIEQPMDANQMTPDWREAFEDELQKLKSL
YGICGDREWTEAVYESVRRVWRHMGKQVRDWRKDV
RSGERPKIRGYQKDVVGGNSIEQIEYLERQYKFLK
SWSFFGKVSGQVIRAEKGSRFAITLREHIDHAKED
RLKKLADRIIMEALGYVYALDDERGKGKWVAKYPP
CQLILLEELSEYQFNNDRPPSENNQLMQWSHRGVF
QELLNQAQVHDLLVGTMYAAFSSRFDARTGAPGIR
CRRVPARCAREQNPEPFPWWLNKFVAEHKLDGCPL
RADDLIPTGEGEFFVSPFSAEEGDFHQIHADLNAA
QNLQRRLWSDFDISQIRLRCDWGEVDGEPVLIPRT
TGKRTADSYGNKVFYTKTGVTYYERERGKKRRKVF
AQEELSEEEAELLVEADEAREKSVVLMRDPSGIIN
RGDWTRQKEFWSMVNQRIEGYLVKQIRSRVRLQES
ACENTGDI*

[0490] Specimen and nucleic acid extraction. Two types of patient samples have been tested for compatibility with one-pot SHERLOCK. All samples should be collected and processed according to the appropriate biosafety procedure.

[0491] a. RNA extracted from patient samples: The patient sample should be collected according to the appropriate biosafety procedures. Please reference the 2020 CDC COVID-19 test protocol for details on specimen collection and subsequent nucleic acid extraction. The input for this protocol, beginning with Step (1), can be the same extracted nucleic acid as used in qRT-PCR assays.

[0492] b. Nasopharyngeal (NP) swabs: NP swabs dissolved in viral transport media (VTM) or TE can be directly used.

[0493] Reagents.

[0494] For Step (1)—lysis of viral sample:
[0495] QuickExtract DNA Extraction Solution (QE09050), Lucigen. Once thawed, aliquot and store at −20° C. to avoid >3 freeze-thaw cycles.

[0496] For Step (2)—one-pot SHERLOCK detection reaction:
[0497] Bst 2.0 WarmStart® DNA Polymerase (M0538L), New England BioLabs
[0498] WarmStart® RTx Reverse Transcriptase (M0380L), New England BioLabs
[0499] 10X Isothermal Amplification Buffer (B0374S), New England BioLabs, supplied with M0538L and M0380L
[0500] 100 mM MgSO4 (B1003S), New England BioLabs, supplied with M0538L and M0380L
[0501] 10 mM Deoxynucleotide (dNTP) Solution Mix (N0447L), New England BioLabs
[0502] Taurine (86329-100G), Millipore Sigma
[0503] AapCas12b protein purified according to Kellner et al., Nature Protocols 2019, stored as 10 μL aliquots at 2 mg/mL.
[0504] Guide RNA for detecting N gene can be ordered from Synthego
[0505] Reporter DNA for lateral flow read out (Lateral Flow Reporter: /56-FAM/TTTTTTT/3Bio/), can be ordered from IDT
[0506] (Optional) Proteinase K Inhibitor (539470-10MG), Millipore Sigma. Resuspend 10 mg of Proteinase K Inhibitor with 150 μL of DMSO to make the stock solution. Dilute stock solution 1:100 with ddH2O to make working aliquots. Store both stock and working solutions at −20° C.
[0507] 10X LAMP Primer Mix:

TABLE 6
LAMP Primer Mix.

| LAMP Primer | |
|---|---|
| (100 μM) | Amount (μL) |
| F3 | 2 |
| B3 | 2 |
| FIP | 16 |
| BIP | 16 |
| Loop F | 4 |
| Loop B | 4 |
| ddH₂O | 56 |
| Total | 100 |

[0508] A Sherlock mastermix can be prepared as follows:

TABLE 7

| | Initial | Final | Amount |
|---|---|---|---|
| | concentration | concentration | (uL) |
| Isothermal | 10 X | 1 X | 5 |
| amplification | | | |
| buffer | | | |
| dNTPs | 10 mM | 1.4 mM | 7 |
| MgSO₄ | 100 mM | 8 mM | 4 |
| WS Bst 2.0 | 8000 units/mL | 320 units/mL | 2 |
| WS RTx | 15,000 | 300 units/mL | 1 |
| | units/mL | | |
| Aap Cas12b | 2 mg/mL or | 500 nM | 1.625 |
| | 15.4 uM | | |
| Aac Cas12b | 360 ng/uL or | 500 nM | 2.5 |
| crRNA | 10 uM | | |
| Lateral Flow | 100 uM | 125 nM | 0.0625 |
| Reporter | | | |
| Taurine | 500 mM | 50 mM | 5 |
| LAMP | 10 X | 1 X | 5 |
| primer mix | | | |
| ddH₂O | | | 11.8125 |
| Total | | | 45 |

[0509] If lysing samples at 22° C. or 60° C. instead of 95° C., replace 2 uL of ddH2O with 2 uL of Proteinase K Inhibitor working solution.

[0510] For Step (3) reading out using lateral flow dipstick:
[0511] HybriDetect Dipstick (MGHD 1), Milenia Biotec GmbH Positive control sequences
[0512] SARS-CoV-2 RNA control (102019), Twist Bioscience

[0513] Equipment.
[0514] 95° C. heat block or water bath
[0515] 60° C. heat block or water bath
[0516] Alternative: a sous vide immersion cooker capable of supporting the temperature range of 55° C. to 95° C. can also be used (example).

[0517] One-Step SHERLOCK Protocol for SARS-CoV-2 Detection

[0518] ***IMPORTANT NOTE: To prevent sample contamination from confounding detection result, two different work areas should be used for performing Steps (1)/(2) and (3). Steps (1)/(2) should be performed in a pre-amplification area and is especially sensitive to contamination. Amplified samples should not be opened in the work area for Steps (1)/(2). A separate area for post-amplification reactions should be used for performing Step (3) of the protocol. After incubation, reactions from Step (2) should be thoroughly spun down after incubation before opening in the post-amplification area to carry out Step (3).

[0519] Step (1)— Lysis of patients sample. *PERFORMED IN THE PRE-AMPLIFICATION AREA*

[0520] NP swab sample should be lysed using the QuickExtract lysis buffer.

[0521] Mix 10 μL of NP swab sample with 10 μL of Quick Extract in an eppendorf tube.

[0522] Incubate the sample-QuickExtract mixture at 95° C. for 5 minutes (or at room temperature or 60° C. for 10 mins) and proceed to Step (2).

[0523] Step (2)— One pot SHERLOCK detection. *PERFORMED IN THE PRE-AMPLIFICATION AREA*

[0524] For each sample, set up one reaction as follows. In addition, a positive control can be set up using the SARS-CoV-2 control RNA. A negative control with Isothermal Amplification Buffer, MgSO4, dNTPs, Lateral Flow Reporter, and sample should also be set up to control for DNAse contamination that may produce false positive results.

TABLE 8

| Reagent | Amount (μL) |
|---|---|
| Sherlock mastermix | 45 |
| Lysed sample | 5 |
| Total | 50 |

[0525] Mix thoroughly and incubate each reaction at 60° C. for 1 hour. Spin down the reaction in a centrifuge at maximum speed. Transfer the reaction tubes to the post-amplification area before proceeding to Step (3).

[0526] Step (3)— Visual readout of detection result via lateral flow strip. *PERFORMED IN THE POST-AMPLIFICATION AREA*

[0527] Before opening each tube, spin down each reaction tube in a centrifuge at maximum speed to prevent aerosol contamination. Place a HybriDetect Dipstick into each reaction tube and wait for the reaction to flow through the dipstick.

[0528] Positive control samples should show the top line and a faint bottom line. Negative control samples should show the bottom line.

[0529] For each test sample, check to see the top line appears, indicating positive SARS-CoV-2 detection.

### Additional Information

[0530] A detailed general protocol for setting up SHERLOCK-based detection can be found in the following reference: SHERLOCK: nucleic acid detection with CRISPR nucleases. Kellner M J, Koob J G, Gootenberg J S, Abudayyeh 00, and Zhang F. Nature Protocols. 2019 October; 14(10):2986-3012. doi: 10.1038/s41596-019-0210-2.

### CONCLUSIONS

[0531] Applicants' one-pot SHERLOCK detection method is capable of rapid, point-of-care diagnosis of COVID-19. With 97% sensitivity and 100% specificity on patient samples, Applicants were able to detect presence of SARS-CoV-2 down to 100 molecules of viral genome per reaction in a simplified format that any user could perform in a non-laboratory setting. Because of the rapid speed and lack of instrumentation, it is envisioned that this protocol could be used in low resource clinics, workplaces, and even at home. While Applicants tested on nasopharyngeal swabs, saliva samples have similar viral loads and would be a simpler alternative sample source. Future versions of the protocol could benefit from an all-in-one integrated device that could heat the reaction and transfer the reaction to a paper strip to reduce amplicon spread and streamline the workflow.

TABLE 9
Methods Comparison.

| | SHERLOCKv2, | | | CDC |
|---|---|---|---|---|
| | RT- | | | SARS- |
| | LAMP/AapCas1 | SHERLOCKv1, | SARS-Cov2 | Cov2 |
| | 2b | RPA-Cas13 | DETECTR | qRT-PCR |
| Reference | This study | (Zhang et al. | (Broughton | (CDC) |
| | | 2020) | et al., 2020) | |
| Target | N gene | N gene and S | E gene and N | N gene |
| | | gene | gene | |
| LoD | 100 copies | 50-500 copies | 50 copies | 5-15 copies |
| (per 50 ul | | | | |
| reaction) | | | | |
| Assay reaction | 60 min | 55 min | 40 min | 120 min |
| time | | | | |
| Assay | 70 min | 90 min | 75 min | 4 h |
| sample- | | | | |
| to-result time | | (including RNA | (including RNA | (including RNA |
| | | extraction) | extraction) | extraction) |
| Assay | Visual | Visual | Visual | Fluorescent |
| results | | | | |
| Laboratory | None | Centrifuges, | Centrifuges, | Centrifuges, |
| instru- | | water baths | water baths | qPCR |
| mentation | | | | machine |
| required | | | | |
| Sample | None | Yes | Yes | Yes |
| extraction | | | | |
| required | | | | |
| Liquid transfer | 1 | 3 | 3 | 1 |
| steps | | | | |

### REFERENCES

[0532] Broughton, J. P., Deng, X., Yu, G., Fasching, C. L., Servellita, V., Singh, J., Miao, X., Streithorst, J. A., Granados, A., Sotomayor-Gonzalez, A., et al. (2020). CRISPR-Cas12-based detection of SARS-CoV-2. Nat. Biotechnol.

[0533] Ding, X., Yin, K., Li, Z., and Liu, C. (2020). All-in-One Dual CRISPR-Cas12a (AIOD-CRISPR) Assay: A Case for Rapid, Ultrasensitive and Visual Detection of Novel Coronavirus SARS-CoV-2 and HIV virus.

[0534] Gootenberg, J. S., Abudayyeh, O. O., Lee, J. W., Essletzbichler, P., Dy, A. J., Joung, J., Verdine, V., Donghia, N., Daringer, N. M., Freije, C. A., et al. (2017). Nucleic acid detection with CRISPR-Cas13a/C2c2. Science 356, 438-442.

[0535] Gootenberg, J. S., Abudayyeh, O. O., Kellner, M. J., Joung, J., Collins, J. J., and Zhang, F. (2018). Multiplexed and portable nucleic acid detection platform with Cas13, Cas12a, and Csm6. Science 360, 439-444.

[0536] Guo, L., Sun, X., Wang, X., Liang, C., Jiang, H., Gao, Q., Dai, M., Qu, B., Fang, S., Mao, Y., et al. (2020). SARS-CoV-2 detection with CRISPR diagnostics.

[0537] Lucia, C., Federico, P.-B., and Alejandra, G. C. (2020). An ultrasensitive, rapid, and portable coronavirus SARS-CoV-2 sequence detection method based on CRISPR-Cas12.

[0538] Shmakov, S., Abudayyeh, O. O., Makarova, K. S., Wolf, Y. I., Gootenberg, J. S., Semenova, E., Minakhin, L., Joung, J., Konermann, S., Severinov, K., et al. (2015). Discovery and Functional Characterization of Diverse Class 2 CRISPR-Cas Systems. Mol. Cell 60, 385-397.

[0539] Teng, F., Cui, T., Feng, G., Guo, L., Xu, K., Gao, Q., Li, T., Li, J., Zhou, Q., and Li, W. (2018). Repurposing CRISPR-Cas12b for mammalian genome engineering. Cell Discov 4, 63.

[0540] Whitman, J. D., Hiatt, J., Mowery, C. T., Shy, B. R., Yu, R., Yamamoto, T. N., Rathore, U., Goldgof, G. M., Whitty, C., Woo, J. M., et al. (2020). Test performance evaluation of SARS-CoV-2 serological assays. medRxiv 2020.04.25.20074856.

[0541] Zhang, Y., Odiwuor, N., Xiong, J., Sun, L., Nyaruaba, R. O., Wei, H., and Tanner, N. A. (2020). Rapid Molecular Detection of SARS-CoV-2 (COVID-19) Virus RNA Using Colorimetric LAMP. medRxiv 2020.02.26.20028373.

### Example 7— Optimization and Enhancement of Detection Methods

[0542] Rather than a multi-step process for the extraction and washing when using beads as is explained in previous prior art methods, the present disclosure improves upon the methods:

[0543] A bead and lysis buffer mix is added to the sample, for about 5 to 10 minutes. At this time, the virus is lysed and bound to the beads.

[0544] Sample with beads is placed upon magxit, after separation, supernatant is aspirated and reaction buffer mix is added and sample can be subjected in pPCR. Thus, lysis and bead preparation steps are merged rather than multi-steps, and elimination of washes and elution steps are eliminated, with elution merged with the addition of reaction buffer mix.

[0545] The bead mix can include potassium chloride, with the typical amount of potassium chloride being reduced or eliminated from the reaction buffer mix. Additionally, the lysis buffer according to methods as provided herein can comprise proteinase K. Without the typical wash steps utilized after lysis, proteinase K carries over from the lysis step in the current methods, and proteinase K inhibitor is added to the reaction buffer mix.

[0546] Beads can be optionally used with the methods described herein, including with the one-pot methods that allow for concentration of viral nucleic acids from large volume samples, such as saliva or swab samples to allow for a single one-pot reaction method.

[0547] An exemplary method of making the beads are as follows:

### Reagents

[0548] 500 mL 5M NaCl

[0549] 1M Tris-HCl, pH 8.0

[0550] 500 mM EDTA, pH 8.0

[0551] Dry Poly-Ethylene Glycol 8000, PEG-8000 (Fisher, P/N BP233-1)

[0552] Carboxy-Modified Sera-Mag Speed Beads (Fisher, P/N 09-981-124)

[0553] Protocol

[0554] Vortex the Sera-Mag speedbeads bottle for 1 minutes.

[0555] Add 0.1% (w/v) of your intended production amount, which is 10 mL of the Sera-Mag Speedbeads solution to a 50 mL conical tube.

[0556] Using a 50 mL magnetic separator, pellet the magnetic beads.

[0557] Aspirate the supernatant and discard.

[0558] The beads contain residual azide. Wash them twice with 10 mL of DI water, resuspending the pellet each time by vortexing for 30 seconds.

[0559] Pellet the beads for the last time.

[0560] Prepare the bead buffer by mixing orderly the following in a 500 mL reagent bottle.

| Component | Volume |
|---|---|
| 5M NaCl | 100 mL |
| 1M Tris-HCl | 5 mL |
| 500 mM EDTA | 1 mL |
| PEG-8000 | 90 g |

[0561] Invert mix 10 times and fill with DI water until it reaches the 500 mL mark.

[0562] Filter using a vacuum filtration unit according to the manufacturer's instructions and store filtered buffer in container of filtration unit until needed.

[0563] Remove the final wash fluid on the beads and add 10 mL of the sterile bead buffer to the beads.

[0564] Vortex for 30 seconds to resuspend the beads.

[0565] Add the bead slurry to the 500 mL bottle containing the remainder of the sterile buffer.

[0566] Twirl the bottle to homogenize the beads with the buffer.

[0567] The beads can now be aliquoted and stored at −20° C.

[0568] Optimization of reagents For ease of reference, optimization is described using LAMP amplification, but the design paradigm is applicable to any other isothermal amplification approach detailed herein. Further optimization of the methods as disclosed herein can include first screening primers to identify one or more sets of primers that work well for a particular target, Cas protein and/or reaction. Once the primers have been screened, titration of Magnesium concentration can be performed to identify an optimal magnesium concentration for higher signal to noise. Once an optimum magnesium concentration is identified, additional additives are screened at around 20-25% of the reaction, and once additives are identified, these additives, such as those components identified in FIG. 17, can be evaluated and varied in concentration to identify optimal reaction kinetics for specific reaction parameters, for example, specific primers, target, Cas protein, temperature, and other additive concentrations within the reaction. As described herein, a change form NaCl to KCl allows for the bead and lysis buffer mix to and reduce carryover and optimize reactions, allowing for merger of bead preparation, and washing/elution steps. Additionally, optimization of salt types and concentrations may further aid one-pot reactions.

### Example 8— BrCas12b

[0569] Further investigations utilizing BrCas12b were performed. While BrCas12b had been previously identified (see, Tian et al., In. J. Biol Marcomol. 2020 Mar. 15, 147:376-384; doi:10.1016/jbiomac.2020.01.079), it was unclear whether the protein would demonstrate sufficient collateral activity and, moreover, whether it would perform in the instant diagnostic application. In particular, it was unclear whether BrCas12b could be utilized at higher temperatures using the LAMP protocls disclosed herein and achieve collateral detection.

[0570] As shown in FIG. 46, BrCas12b is active with the crRNA design disclosed herein and described tracrRNA design. BrCas12b performs well in the 60-70C degree, as exhibited by the measured temperature gradient at 15, 30, 60 and 120 minutes (FIG. 47). When using preincubation of 30 minutes at 60C, BrCas12b is shown to more stable than AapCas12b, as pre-incubation of AapCas12b causes denaturation whereas BrCas12b is still active (FIG. 48). BrCas12b can achieve rapid detection in less than 20 minutes down to 200 aM for multiple LAMP primer sets specific to N or S gene of coronavirus (FIG. 49). Reporter choice for BrCas12b is important, as less signal is achieved with the WCV329 reporter, sequence shown in Table 10. N set 6 LAMP primers utilized in this Example are as shown in Table 5. Optimization of reporter can also be included in the reagent and additive optimization detailed elsewhere herein.

TABLE 10
Plasmid, Guide and Primer Sequences

| | |
|---|---|
| pCV0001 His6- | MAVKSIKVKLRLDDMPEIRAGLWKLHKEVNAGVRYYTEWLSLLRQENLYRRSPNG |
| TwinStrep- | DGEQECDKTAEECKAELLERLRARQVENGHRGPAGSDDELLQLARQLYELLVPQA |
| SUMO- | IGAKGDAQQIARKFLSPLADKDAVGGLGIAKAGNKPRWVRMREAGEPGWEEEKE |
| AacC2c1 | KAETRKSADRTADVLRALADFGLKPLMRVYTDSEMSSVEWKPLRKGQAVRTWDR |
| (originally | DMFQQAIERMMSWESWNQRVGQEYAKLVEQKNRFEQKNFVGQEHLVHLVNQ |
| pR0280) | LQQDMKEASPGLESKEQTAHYVTGRALRGSDKVFEKWGKLAPDAPFDLYDAEIK |
| | NVQRRNTRRFGSHDLFAKLAEPEYQALWREDASFLTRYAVYNSILRKLNHAKMFA |
| | TFTLPDATAHPIWTRFDKLGGNLHQYTFLFNEFGERRHAIRFHKLLKVENGVAREV |
| | DDVTVPISMSEQLDNLLPRDPNEPIALYFRDYGAEQHFTGEFGGAKIQCRRDQLA |
| | HMHRRRGARDVYLNVSVRVQSQSEARGERRPPYAAVFRLVGDNHRAFVHFDKLS |
| | DYLAEHPDDGKLGSEGLLSGLRVMSVDLGLRTSASISVFRVARKDELKPNSKGRVP |
| | FFFPIKGNDNLVAVHERSQLLKLPGETESKDLRAIREERQRTLRQLRTQLAYLRLL |
| | VRCGSEDVGRRERSWAKLIEQPVDAANHMTPDWREAFENELQKLKSLHGICSDKEW |
| | MDAVYESVRRVWRHMGKQVRDWRKDVRSGERPKIRGYAKDVVGGNSIEQIEYLER |
| | QYKFLKSWSFFGKVSGQVIRAEKGSRFAITLREHIDHAKEDRLKKLADRIIMEAL |
| | GYVYALDERGKGKWVAKYPPCQLILLEELSEYQFNNDRPPSENNQLMQWSHRGV |
| | FQELINQAQVHDLLVGTMYAAFSSRFDARTGAPGIRCRRVPARCTQEHNPEPFP |
| | WWLNKFVVEHTLDACPLRADDLIPTGEGEIFVSPFSAEEGDFHQIHADLNAAQNL |
| | QQRLWSDFDISQIRLRCDWGEVDGELVLIPRLTGKRTADSYSNKVFYTNTGVTYYE |
| | RERGKKRRKVFAQEKLSEEEAELLVEADEAREKSVVLMRDPSGIINRGNWTRQKEF |
| | WSMVNQRIEGYLVKQIRSRVPLQDSACENTGDI* (SEQ ID NO: 62031) |
| pCV0002 | MAVKSMKVKLRLDNMPEIRAGLWKLHTEVNAGVRYYTEWLSLLRQENLYRRSPN |
| His6- | GDGEQECYKTAEECKAELLERLRARQVENGHCGPAGSDDELLQLARQLYELLVPQ |
| TwinStrep- | AIGAKGDAQQIARKFLSPLADKDAVGGLGIAKAGNKPRWVRMREAGEPGWEEE |
| SUMO- | KAKAEARKSTDRTADVLRALADFGLKPLMRVYTDSDMSSVQWKPLRKGQAVRT |
| AapCas12b | WDRDMFQQAIERMMSWESWNQRVGEAYAKLVEQKSRFEQKNFVGQEHLVQL |
| | VNQLQQDMKEASHGLESKEQTAHYLTGRALRGSDKVFEKWEKLDPDAPFDLYDT |
| | EIKNVQRRNTRRFGSHDLFAKLAEPKYQALWREDASFLTRYAVYNSIVRKLNHAK |
| | MFATFTLPDATAHPIWTRFDKLGGNLHQYTFLFNEFGEGRHAIRFQKLLTVEDGV |
| | AKEVDDVTVPISMSAQLDDLLPRDPHELVALYFQDYGAEQHLAGEFGGAKIQYRR |
| | DQLNHLHARRGARDVYLNLSVRVQSQSEARGERRPPYAAVFRLVGDNHRAFVHFDK |
| | LSDYLAEHPDDGKLGSEGLLSGLRVMSVDLGLRTSASISVFRVARKDELKPNSEG |
| | RVPFCFPIEGNENLVAVHERSQLLKLPGETESKDLRAIREERQRTLRQLRTQLAYL |
| | RLLVRCGSEDVGRRERSWAKLIEQPMDANQMTPDWREAFEDELQKLKSLYGICGDR |
| | EWTEAVYESVRRVWRHMGKQVRDWRKDVRSGERPKIRGYQKDVVGGNSIEQIEYL |
| | ERQYKFLKSWSFFGKVSGQVIRAEKGSRFAITLREHIDHAKEDRLKKLADRIIME |
| | ALGYVYALDDERGKGKWVAKYPPCQLILLEELSEYQFNNDRPPSENNQLMQWSHR |
| | GVFQELLNQAQVHDLLVGTMYAAFSSRFDARTGAPGIRCRRVPARCAREQNPEP |
| | FPWWLNKFVAEHKLDGCPLRADDLIPTGEGEFFVSPFSAEEGDFHQIHADLNAAQ |
| | NLQRRLWSDFDISQIRLRCDWGEVDGEPVLIPRTTGKRTADSYGNKVFYTKTGVTY |
| | YERERGKKRRKVFAQEELSEEEAELLVEADEAREKSVVLMRDPSGIINRGDWTRQK |
| | EFWSMVNQRIEGYLVKQIRSRVRLQESACENTGDI* (SEQ ID NO: 62032) |
| pCV0003 His6- | MPVRSFKVKLVTRSGDAEHMLQLRRGLWKTHEIVNQGIAYYMNKLALMRQEPY |
| TwinStrep- | AGKSREVVRLELLHSLRAQQKRNNWTGDAGTDDEILNLSRRLYELLVPSAIGEKGD |
| SUMO- | AQMLSRKFLSPLVDPNSEGGKGTAKSGRKPRWMKMREEGHPDWEAEREKDRA |
| BrCas12b, | KKAADPTASILNDLEAFGLRPLFPLFTDEQKGIQWLPKQKRQFVRTFDRDMFQQA |
| extra C-term | LERMLSWESWNRRVAEEYQKLQAQRDELYAKYLADGGAWLEALQSFEKQREVEL |
| extension | AEESFAAKSEYLITRRQIRGWKQVYEKWSQLPEHAAQEQFWQVVADVQTSLPGA |
| | FGDPKVYQFLSQPEHHHIWRGYPNRLFHYSDYNGVRKKLQRARHDATFTLPDPVE |
| | HPLWIRFDARGGNIHDYEISQNGKQYQVTFSRLLWPENETWVERENVTVAIGAS |
| | QQLKRQIRLDGYADKKQKVRYRDYSSGIELTGVLGGAKIQFDRRHLRKASNRLADG |
| | ETGPVYLNVVVDIEPFLAMRNGRLQTPIGQVLQVNTKDWPKVTGYKPAELISWIQ |
| | NSPLAVGTGVNTIEAGMRVMSVDLGQRSAAAVSIFEVMRQKPAEQETKLFYPIAV |
| | TGLYAVHRRSLLLRLPGEKISDEIEQQRKIRAHARSLVRYQIRLLADVLRLHTRGTAE |
| | QRRAKLDELLATLQTKQELDQKLWQTELEKLFDYIHEPAERWQQALVAAHRTLEP |
| | VIGQAVRHWRKSLRIDRKGLAGMSMWNIEELEETRKLLIAWSKHSRVPGEPNRLD |
| | KEETFAPQQLQHIQNVKDDRLKQMANLLVMTALGYKYDEAEKQWKEAYPACQ |
| | MILFEDLSRYRFALDRPRRENNRLMKWAHRSIPRLVYLQGELFGIQVGDVYSAYTS |
| | RFHAKTGAPGIRCHALKEEDLQPNSYVVKQLIKDGFIREDQTGSLKPGQIVPWSGG |
| | ELFVTLADRSGSRLAVIHADINAAQNLQKRFWQQNTEIFRVPCKVTTSGLIPAYDK |
| | MKKLFGKGYFAKINQTDTSEVYVWEHSAKMKGKTTPADPAEEGVFDESLTDEME |
| | ELEDSQEGYKTLFRDPSGFFWSSDRWLPQKEFWFWVKRRIEKKLREQLQAAALEA |
| | RKEAELAAATAEQ*(SEQ ID NO: 62033) |
| pCV0004 His6- | MPVRSFKVKLVTRSGDAEHMLQLRRGLWKTHEIVNQGIAYYMNKLALMRQEPY |
| TwinStrep- | AGKSREWRLELLHSLRAQQKRNNWTGDAGTDDEILNLSRRLYELLVPSAIGEKGD |
| SUMO- | AQMLSRKFLSPLVDPNSEGGKGTAKSGRKPRWMKMREEGHPDWEAEREKDRA |
| BrCas12b, | KKAADPTASILNDLEAFGLRPLFPLFTDEQKGIQWLPKQKRQFVRTFDRDMFQQA |
| extra C-term | LERMLSWESWNRRVAEEYQKLQAQRDELYAKYLADGGAWLEALQSFEKQREVEL |
| extension | AEESFAAKSEYLITRRQIRGWKQVYEKWSQLPEHAAQEQFWQVVADVQTSLPGA |
| | FGDPKVYQFLSQPEHHHIWRGYPNRLFHYSDYNGVRKKLQRARHDATFTLPDPVE |
| | HPLWIRFDARGGNIHDYEISQNGKQYQVTFSRLLWPENETWVERENVTVAIGAS |
| | QQLKRQIRLDGYADKKQKVRYRDYSSGIELTGVLGGAKIQFDRRHLRKASNRLADG |
| | ETGPVYLNVVVDIEPFLAMRNGRLQTPIGQVLQVNTKDWPKVTGYKPAELISWIQ |
| | NSPLAVGTGVNTIEAGMRVMSVDLGQRSAAAVSIFEVMRQKPAEQETKLFYPIAV |
| | TGLYAVHRRSLLLRLPGEKISDEIEQQRKIRAHARSLVRYQIRLLADVLRLHTRGT |
| | AEQRRAKLDELLATLQTKQELDQKLWQTELEKLFDYIHEPAERWQQALVAAHRTL |
| | EPVIGQAVRHWRKSLRIDRKGLAGMSMWNIEELEETRKLLIAWSKHSRVPGEPNR |
| | LDKEETFAPQQLQHIQNVKDDRLKQMANLLVMTALGYKYDEAEKQWKEAYPACQ |
| | MILFEDLSRYRFALDRPRRENNRLMKWAHRSIPRLVYLQGELFGIQVGDVYSAYTS |
| | RFHAKTGAPGIRCHALKEEDLQPNSYVVKQLIKDGFIREDQTGSLKPGQIVPWSGG |
| | ELFVTLADRSGSRLAVIHADINAAQNLQKRFWQQNTEIFRVPCKVTTSGLIPAYDK |
| | MKKLFGKGYFAKINQTDTSEVYVWEHSAKMKGKTTPADPAEEGVFDESLTDEME |
| | ELEDSQEGYKTLFRDPSGFFWSSDRWLPQKEFWFWVKRRIEKKLREQLQ* (SEQ |
| | ID NO: 62034) |
| WCV0328 | /5HEX/AAAAA/3IABkFQ/ |
| /5HEX/AAAAA/ | |
| 3IABkFQ/ | |
| homopolymer | |
| hex probe | |
| WCV0329 | /5HEX/TTTTT/3IABkFQ/ |
| /5HEX/TTTTT/ | |
| 3IABkFQ/ | |
| homopolymer | |
| hex probe | |
| N set 6 guide 3 | gttagtggaaatgtagatggttagcacgccgcaaattgcacaatttgcccccagcgc (SEQ ID NO: |
| BrCas12b | 62035) |
| N set 6 guide 3 | GUCUAGAGGACAGAAUUUUUCAACGGGUGUGCCAAUGGCCACUUUCCAGG |
| AapCas12b | UGGCAAAGCCCGUUGAGCUUCUCAAAUCUGAGAAGUGGCACCGAAGAACG |
| | CUGAAGCGCUG (SEQ ID NO: 62036) |
| OA N set 20 | TAGTGGAAATGTAGATGGTTAGCACGCCGCAAATTGCACAATTTG (SEQ ID |
| guide 2 | NO: 62037) |
| BrCas12b | |
| JJ S Set 19 | TAGTGGAAATGTAGATGGTTAGCACCTGACACTACTGATGCTGTC (SEQ ID |
| guide 7 | NO: 62038) |
| BrCas12b | |
| N set 6 guide | Gcgctgggggcaaattgtgcaatttgcggcgtgctaaccatctacatttccactaacccctatagtgagt |
| template 3 | cgtattaatttc (SEQ ID NO: 62039) |
| BrCas12b | |
| N set 6 guide | cagcgcttcagcgttcttoggtgccacttctcagatttgagaagctcaacgggctttgccacctggaaa |
| template 3 | gtggccattggcacacccgttgaaaaattctgtcctctagacccctatagtgagtcgtattaatttc |
| AapCas12b | (SEQ ID NO: 62040) |
| OA N set 20 | caaattgtgcaatttgcggcgtgctaaccatctacatttccactaccctatagtgagtcgtattaatttc |
| guide template | (SEQ ID NO: 62041) |
| 2 BrCas12b | |
| JJ S Set 19 | gacagcatcagtagtgtcaggtgctaaccatctacatttccactaccctatagtgagtcgtattaatttc |
| guide template | (SEQ ID NO: 62042) |
| 7 BrCas12b | |
| OA N set 20 | mix of N set 20 primers as provided below |
| LAMP primer | |
| set | |
| OA N set 20 | AACAAACCCAAGGAAATTTTGG (SEQ ID NO: 62043) |
| F3 | |
| OA N set 20 | TATTCAGCAAAATGACTTGATCT (SEQ ID NO: 62044) |
| B3 | |
| OA N set 20 | CATTCCGAAGAACGCTGAAGCACTAATCAGACAAGGAACTGA (SEQ ID NO: |
| FIP(F1c + F2) | 62045) |
| OA N set 20 | CGCATTGGCATGGAAGTCACATCCAATTTGATGGCACCTG (SEQ ID NO: |
| BIP(B1c + B2) | 62046) |
| OA N set 20 | CAATTTGCGGCCAATGTTTGT (SEQ ID NO: 62047) |
| LoopF | |
| JJ S Set 19 | mix of S set 19 primers as provided below |
| LAMP primer | |
| set | |
| JJ S Set 19 F3 | TTCAATGGTTTAACAGGCAC (SEQ ID NO: 62048) |
| JJ S Set 19 B3 | CCAAGTAGGAGTAAGTTGATCT (SEQ ID NO: 62049) |
| JJ S Set 19 | TCAGTAGTGTCAGCAATGTCTAGGTGTTCTTACTGAGTCTAAC (SEQ ID NO: |
| FIP(F1c + F2) | 62050) |
| JJ S Set 19 | CAGACACTTGAGTTCTTGACAGGTTAGAAGTATTTGTTCCTGG (SEQ ID NO: |
| BIP(B1c + B2) | 62051) |
| JJ S Set 19 | CCAAATTGTTGGAAAGGCAG (SEQ ID NO: 62052) |
| LoopF | |
| JJ S Set 19 | TGGTGGTGTCAGTGTTATAAC (SEQ ID NO: 62053) |
| LoopB | |

### Example 9— LAMP-OSD

[0571] The present example explores the use of OSD with LAMP amplification. The OSD probe comprises two complementary probes, which utilizes a fluor and quencher strand. The fluor strand comprises a sequence specific target-binding probe such that separation of the fluorophore and quencher induces a change in fluorescence intensity. Advantageously, the OSD probes can distinguish SNPs in LAMP amplicons.

TABLE 11
N set 6 probe designs

| ID | Sequence | Probe set |
|---|---|---|
| WCV0606 | /56-FAM/CCCAAGGAAATTTTGGGG | N6-F1 |
| | ACCAGGAACTAATCAGA/3InvdT/ | |
| | (SEQ ID NO: 62054) | |
| WCV0607 | CCTGGTCCCCAAAATTTCCTTGGG/ | N6-Q1 |
| | 3IABkFQ/ | |
| | (SEQ ID NO: 62055) | |
| WCV0608 | /56-FAM/TCTGATTAGTTCCTGGT | N6-F2 |
| | CCCCAAAATTTCCTTGGG/3InvdT/ | |
| | (SEQ ID NO: 62056) | |
| WCV0609 | TTTGGGGACCAGGAACTAATCAGA/ | N6-Q2 |
| | 3IABkFQ/ | |
| | (SEQ ID NO: 62057) | |
| WCV0610 | /56-FAM/CAGTTCCCGAAGGTGT | N6-F3 |
| | GACTTCCATGCCAATGCGC/ | |
| | 3InvdT/ | |
| | (SEQ ID NO: 62058) | |
| WCVO611 | TGGAAGTCACACCTTCGGGAACTG/ | N6-Q3 |
| | 3IABkFQ/ | |
| | (SEQ ID NO: 62059) | |
| WCV0612 | /56-FAM/GTGCGCATTGGCATGG | N6-F4 |
| | AAGTCACACCTTCGGGAAC | |
| | /3InvdT/ | |
| | (SEQ ID NO: 62060) | |
| WCV0613 | TGTGACTTCCATGCCAATGCGCAC | N6-Q4 |
| | /3IABkFQ/ | |
| | (SEQ ID NO: 62061) | |

[0572] Use of OSD probe design was explored with COVID-19 LAMP specific probes. Several probe sets were explored in the LAMP-OSD detection assay at 21 minutes. As showing in FIG. 51, probe set 4 works best. Next, finding the best concentration for probe set 4 in the LAMP-OSD assays at 21 minutes and 28 minutes (FIG. 52). The 150 nM probe set 4 shows fastest and most sensitive detection with high signal to noise. Interestingly, the 75 nM probe set seems to achieve 10-fold higher sensitivity down to 10 copies per reaction (FIG. 52).

### Example 10

[0573] Integrating isothermal amplification with CRISPR-mediated detection required developing an optimal common reaction chemistry supporting both steps, as has been described in the previous examples. In summary, to amplify viral RNA, reverse transcription was chosen followed by Loop-mediated isothermal amplification (RT-LAMP)⁴ because LAMP reagents are widely available and use defined buffers amenable to Cas enzymes. LAMP operates at 55-65° C., requiring a thermostable Cas enzyme, such as Cas12b from Alicyclobacillus acidiphilus (AapCas12b)⁵. Different LAMP primer sets and AapCas12b guide RNAs (a guide RNA helps AapCas12b recognize and cut target DNA) were systematically evaluated to identify the best combination to target gene N, encoding the SARS-CoV-2 nucleocapsid protein, in a one-pot reaction (FIG. 17, 25E, 54A-56B). This assay is referred to herein in STOPCovid.v1. As expected, STOPCovid.v1 detection produced signal only when the target is present, whereas LAMP alone can produce nonspecific signal (FIG. 56B). STOPCovid.v1 is compatible with lateral flow and fluorescence readouts and can detect an internal control using fluorescence readout (FIGS. 57A-59H).

[0574] To simplify RNA extraction and boost sensitivity, Applicants adapted a magnetic bead purification method (FIG. 62A-62E). The magnetic beads could concentrate SARS-CoV-2 RNA genomes from the entire nasopharyngeal or anterior nasal swab into one STOPCovid reaction. Applicants optimized the workflow by combining the lysis and magnetic bead—binding steps and eliminating the ethanol wash and elution steps to reduce sample extraction to 15 minutes with minimal hands-on time. This streamlined workflow is referred to herein as STOPCovid.v2 (FIG. 53A).

[0575] Applicants compared STOPCovid.v2 to the standard CDC workflow (RNA extraction followed by RT—qPCR) using SARS-CoV-2 virus-like particles (FIG. 63C). Concentration of substrate by magnetic beads in STOPCovid.v2 allowed detection of viral RNA from the entire sample obtained by swab: a 600-fold higher input (in terms of quantity of viral RNA) than is afforded by the CDC workflow. As a result, STOPCovid.v2 could reliably detect 30-fold lower viral load than the CDC RT-qPCR workflow (100 copies per sample, or 33 copies per mL, compared to 1,000 copies per mL). Analysis of two independent nasopharyngeal swab sample dilution series revealed that STOPCovid.v2 has a limit of detection comparable to an RT-qPCR Ct value of 40.3 (FIG. 63D, 63E).

[0576] Blinded testing by an external laboratory at the University of Washington using 202 SARS-CoV-2 positive and 200 negative manufactured patient nasopharyngeal swab samples showed that the sensitivity and specificity of STOPCovid.v2 were 93.1% and 98.5%, respectively (FIG. 53B, 53C, FIG. 64A, and Table 12).

RT-qPCR

| STOPCovid.v2 | Pos. | Neg. | Total | Predictive value |
|---|---|---|---|---|
| Pos. | 188 | 3 | 191 | PPV = 98.4% |
| Neg. | 14 | 197 | 211 | NPV = 93.4% |
| Total | 202 | 200 | | |
| | Sensitivity | Specificity | | |
| | 93.1% | 98.5% | | |

Swabs were prepared according to the FDA's recommendation for simulating fresh swabs for regulatory applications.) STOPCovid.v2 false-negative samples had RT-qPCR Ct values greater than 37. Positive samples were detected in 15 to 45 mins. Finally, STOPCovid.v2 was validated using fresh, dry anterior nasal swabs (FIGS. 64B-64E) and correctly identified 5 positive samples (Ct values ranging from 19 to 36). Provided in this example is a detailed protocol for STOPCovid.v2.

[0577] The simplified format of STOPCovid. V2 is suited to deployment in low-complexity clinical laboratories or low-cost diagnostic development, and its high sensitivity may afford some leeway in sample collection.

[0578] Here Applicants describe in more detail the rationale and results that contributed to the development of STOPCovid. Applicants first simplified the viral RNA extraction method. Most clinical labs currently perform an RNA extraction step using commercial RNA extraction kits, which requires multiple fluid handling steps and relies on reagents that have been difficult to obtain steady supplies of. To eliminate this step, Applicants tested various viral lysis buffers for extraction of lentiviral RNA and added the lysate directly into RT-qPCR reactions (FIG. 54A, 54B). Applicants found that addition of DNA QuickExtract to COVID-19 positive patient nasopharyngeal (NP) swab viral transport media (VTM) followed by heating at 95° C. for 5 mins was comparable to the standard QIAmp Viral RNA Miniprep extraction (FIG. 54C).

[0579] Integrating the isothermal amplification step with the CRISPR-mediated detection step required developing an optimal common reaction chemistry capable of supporting both steps (FIG. 54D). To amplify the viral RNA, reverse transcription was chosen followed by Loop-mediated isothermal amplification (RT-LAMP)¹⁶. While Recombinase polymerase amplification was the focus²² in the past^{1,2,5}, LAMP reagents are readily available from multiple commercial suppliers, are easily multiplexed²³, and rely on defined buffers that are amenable to optimization with Cas enzymes. Applicants designed 29 sets of LAMP primers targeting different regions of the SARS-CoV-2 genome and identified 6 primer sets targeting genes ORF lab, S, and N that were capable of SARS-CoV-2 RNA detection (FIG. 54E).

[0580] LAMP operates at 55-65° C., requiring a thermostable Cas enzyme for a one-pot chemistry, such as Cas12b from Alicyclobacillus acidiphilus (AapCas12b)¹⁷. The AapCas12b locus does not contain an identifiable CRISPR array, but it can function up to 65° C. with a single guide RNA (sgRNA) based on the direct repeat from Alicyclobacillus macrosporangiidus Cas12b (AmCas12b)¹⁷ (FIG. 55A). Replacing the AmCas12b sgRNA with an sgRNA from Alicyclobacillus acidoterrestris Cas12b (AacCas12b) (Shmakov et al., 2015), which is highly similar to AapCas12b, produced more robust and specific nuclease activity, possibly due to the stronger hairpin formed near the 3′ end of the sgRNA (FIG. 55B, 55C).

[0581] Applicants next systematically evaluated all possible spacers targeting the top LAMP amplicons to identify the ideal combination of primers and guide sequence (FIG. 55D). For the top 4 combinations of LAMP primer set and guide, Applicants titrated the concentration of magnesium in a one-pot reaction to find the best combination of buffer, primer set, and guide, yielding an assay targeting gene N (FIG. 55E). For this assay, it was found that all 6 LAMP primers and spacer targeting regions were perfectly conserved in at least 99.5% of >31,000 sequenced human SARS-CoV-2 genomes²⁴.

[0582] Using these conditions, both AapCas12b and AacCas12b were tested in a one-pot reaction. Applicants found that AapCas12b generated faster (34 min to half maximum signal compared to 39 min) and stronger collateral activity (1.6 times maximum signal) than AacCas12b in the one-pot reaction (FIG. 25E). Applicants note that although AacCas12b has been reported to work with LAMP in one-pot assays at 55° C.²⁵, it did not provide adequate activity in the assay at 60° C., a temperature more optimally suited for LAMP, possibly because it is unstable at higher temperatures. Applicants further optimized the AapCas12b one-pot reaction by screening 94 additives to improve thermal stability (FIG. 17), finding that addition of taurine improved reaction kinetics (FIG. 56A, 17). Applicants termed this optimized one-pot assay STOP and its application for SARS-CoV-2 detection STOPCovid. As expected, STOPCovid detection produces signal only when the target is present, whereas LAMP alone (either as a stand-alone reaction or in the STOPCovid mastermix) can produce nonspecific signal (FIG. 56B), highlighting the additional specificity provided by CRISPR detection.

[0583] Applicants used STOPCovid.v1 with a lateral flow readout and SARS-CoV-2 genome standards spiked into pooled healthy saliva or NP swab VTM to determine the sensitivity, robustness, ideal incubation temperature, and readout time of the assay. Applicants found that the STOPCovid.v1 chemistry can detect 100 copies of SARS-CoV-2 per reaction and reproducibly detect 200 copies over 30 replicates (FIG. 57A, 57B). STOPCovid.v1 detection was stochastic below 100 copies per reaction and produced variable signal levels between replicates, potentially resulting from variability in the timing of LAMP (FIG. 57A, 57B). The ideal incubation parameters were 60° C. for at least 50 minutes for lateral flow, though longer incubation times do not affect the results (FIG. 26A, 26B). The reaction components could be formulated as a mastermix, which maintained functionality after 6 freeze-thaw cycles (FIG. 26C). The assay exhibited no cross-reactivity with the SARS-CoV or MERS-CoV genomes (FIG. 26D) and could be performed using either a standard heat block or via a water bath maintained by a commercially-available, low-cost (under $40 USD), sous-vide cooker (FIG. 41).

[0584] In addition to lateral flow readout, STOPCovid.v1 is also compatible with fluorescence readout, which allows for simultaneous detection of an internal control using orthogonal fluorescent dyes. By introducing LAMP primer sets targeting an abundant control gene into the STOPCovid reaction, LAMP amplification signal detected by SYTO 9 nucleic acid stain before 28 minutes indicates specific amplification of human sample, while Cas12b collateral cleavage of a HEX reporter probe indicates presence of SARS-CoV-2. Applicants screened 114 LAMP primers sets targeting ACTB and GAPDH to identify 19 LAMP primer sets that could be multiplexed with the N LAMP primer set at 50% or 20% of the total primer set concentration (FIG. 58). The best control LAMP primer set, ACTB Set 1, could be multiplexed with the N gene LAMP primer set at 20% of the total primer amount (FIG. 58). Using SARS-CoV-2 genome standards spiked into pooled healthy saliva or NP swabs, Applicants determined the multiplex reaction is sensitive down to 200 copies of SARS-CoV-2 genome per reaction (FIG. 59A-59D). This assay detected 30/30 replicates at 300 genomic copies and 27/30 replicates at 200 genomic copies (FIG. 59E, 59F). Similar to lateral flow, the fluorescent multiplexed assay was most robust at 60° C. (FIG. 59G, 59H).

[0585] Applicants then evaluated STOPCovid.v1 with lateral flow readout on 43 SARS-CoV-2 RNA positive (Ct values ranging from 17 to 38) and 15 negative patient NP swab VTM samples. STOPCovid.v1 had a sensitivity of 84% and specificity of 100% for detecting 2 out of 3 replicates for the 43 positive samples (FIG. 35A, C). Samples that tested false negative with STOPCovid.v1 had RT-qPCR Ct values above 32 (FIG. 35A, 60A-60B). Parallel work from the Virology Lab at the University of Washington on 19 positive and 7 negative patient samples showed that STOPCovid.v1 had a sensitivity of 84% and specificity of 100% (FIG. 60C). Patient sample dilution series revealed that STOPCovid.v1 sensitivity comparable to RT-qPCR Ct value of 30.8 (FIG. 60D). In addition, Applicants found that lysis at a lower temperature (60° C. or 22° C.) is a viable alternative for streamlining the STOPCovid.v1 assay workflow, albeit with a slight decrease in sensitivity (increased Ct value of 0.8/0.2 at 60° C. and 1.1/0.9 for 22° C. for CDC N1/N2 probe sets) (FIG. 61A-61C). Together, these results demonstrate the feasibility of detecting SARS-CoV-2 without RNA extraction in a one-pot reaction, but based on the distribution of Ct values for 2,105 SARS-CoV-2 positive patients (FIG. 61D), STOPCovid.v1 would only capture 60.5% of RT-qPCR-positive patients.

[0586] Applicants therefore sought to boost sensitivity by increasing sample input via sample concentration. In the initial attempt to simplify viral RNA extraction, Applicants only used 2.5 μL of the 3 mL NP swab VTM (0.083% of the total NP swab sample). Applicants reasoned that capturing all of the viral RNA from an NP or anterior nasal (AN) swab would increase sample input by 1,200-fold and dramatically increase sensitivity. Applicants tested sample concentration using two magnetic bead formulations, laboratory-developed²⁶ and commercial (Beckman SPRIselect), prior to STOPCovid detection. Applicants found that both formulations could efficiently capture viral RNA (SARS-CoV-2 genomic standards spiked into DNA QuickExtract lysis buffer with human background RNA) into one 50 μL STOPCovid reaction using the standard magnetic bead purification method (FIG. 62A). In addition, Applicants determined Applicants could elute the sample from the beads by directly adding STOPCovid mastermix to the magnetic beads without a separate water elution step (FIG. 62A). As the laboratory-developed magnetic beads are significantly cheaper ($0.20 USD/reaction compared to $6.13 USD/reaction) and easier to modify than the commercial version, Applicants moved forward with the laboratory-developed magnetic beads. Applicants found that introducing the bead concentration step increased sensitivity, enabling detection of as little as 100 viral copies per sample compared to 5,000 copies per sample without this step (FIG. 62B).

[0587] To streamline the magnetic bead concentration workflow, Applicants eliminated the ethanol wash step and combined the lysis and magnetic bead binding steps by optimizing the salt concentration of the one-pot reaction and testing alternative QuickExtract formulations (FIG. 62C-62E). Using SARS-CoV-2 virus-like particles (SARS-CoV-2 RNA targets in a noninfectious viral coat), Applicants found that Plant QuickExtract combined with magnetic bead binding in a KCl buffer produced the best results in lieu of any washing steps, further simplifying extraction to a total of 15 minutes with minimal hands on time (FIG. 62E). Applicants refer to this streamlined workflow as STOPCovid.v2 (FIG. 53A-53C).

[0588] Applicants further optimized the STOPCovid.v2 chemistry by titrating Cas12b and sgRNA concentrations. While characterizing STOPCovid.v2, Applicants noticed that STOPCovid.v2 occasionally produced false positive results. Applicants hypothesized that this was due to partial overlap between the sgRNA and LAMP BIP primer that contributed to sporadic Cas12b collateral activity. Applicants therefore titrated Cas12b and sgRNA concentrations and found that the optimal concentration of Cas12b and sgRNA for reducing the proportion of false positive results while retaining true positive signal was 31.3 nM (FIG. 63A). Applicants verified that this concentration of Cas12b and sgRNA maintained the same sensitivity (FIG. 63B).

[0589] Applicants compared STOPCovid.v2 to the standard CDC workflow that uses QIAmp Viral RNA Miniprep extraction followed by RT-qPCR (FIG. 63C). Starting with different concentrations of SARS-CoV-2 virus-like particles, Applicants performed a direct comparison of the two assay workflows. Applicants confirmed that the CDC SARS-CoV-2 RT-qPCR protocol could reliably detect down to 1,000 copies per mL of VTM, the reported limit of detection (LOD) of the assay (fda.gov/media/134922/download). By contrast, STOPCovid.v2 was able to reliably detect viral loads as low as 100 copies per sample (equivalent to 33 copies per mL VTM) for the fluorescence readout and 250 copies (equivalent to 83 copies per mL VTM) for the lateral flow readout. Applicants typically detect positive signal in less than 45 minutes by fluorescence read out and 80 minutes by lateral flow. Introduction of the magnetic bead concentration step in STOPCovid.v2 allowed for detecting viral RNA from the entire swab sample, or 600-fold higher input, than the CDC RT-qPCR workflow. As a result, STOPCovid.v2 could reliably detect 30-fold lower viral load than the CDC RT-qPCR workflow (100 copies per sample, or 33 copies per mL, compared to 1,000 copies per mL). These results suggest that though the STOPCovid.v2 reaction is 20 times less sensitive than the RT-qPCR reaction itself (detects 100 copies per reaction compared to 5 copies per reaction), adding an initial sample concentration in the STOPCovid.v2 workflow resulted in higher overall sensitivity.

[0590] Applicants evaluated the performance of the optimized STOPCovid.v2 chemistry on SARS-CoV-2 positive patient samples. Patient NP swab sample dilution series revealed that STOPCovid.v2 had a limit of detection comparable to an RT-qPCR Ct value of 40.3, which could in theory capture 99.7% of SARS-CoV-2 positive patients (FIG. 61D and FIG. 63D, 63E). Blinded testing by an external laboratory at the University of Washington on 202 SARS-CoV-2 positive and 200 negative patient NP swab VTM samples showed that the sensitivity and specificity of STOPCovid.v2 were 93.1% and 98.5% respectively (FIG. 53B, 53C, FIG. 64A, and Table 12). STOPCovid.v2 false negative samples had RT-qPCR Ct values that were greater than 37. Positive samples were detected in 15-45 mins. Finally, Applicants validated STOPCovid.v2 using dry AN swabs. Applicants confirmed that STOPCovid.v2 could detect SARS-CoV-2 virus-like particles spiked into SARS-CoV-2 negative dry AN swabs (FIG. 64B, 64C). STOPCovid.v2 correctly identified 5 SARS-CoV-2 positive patient AN swabs (Ct values ranging from 19 to 36) (FIG. 64D, 64E).

[0591] To aid users of STOPCovid, Applicants have developed a mobile phone application to help the user interpret lateral flow results (FIGS. 63C and 65A-65B). Note that lateral flow testing requires opening post-amplification tubes, and users should consider separate pre- and post-amplification workspaces to reduce chances of cross contamination between samples and false positives.

### Methods

### RT-qPCR Reactions

[0592] RT-qPCR reactions were performed using the TaqPath 1-Step RT-qPCR Master Mix (ThermoFisher A15300) using TaqMan probes and primer sets (Table 14) and measured on a Roche LightCycler 480. RT-qPCR quantification was performed using the second derivative maximum method from the LightCycler software.

### Viral Nucleic Acid Extraction

[0593] To compare crude lysis methods with standard RNA extraction methods, viral samples were purified using the QIAamp Viral RNA Mini Kit (Qiagen 52906), using 100 μL sample input and 100 μL elution volume.

### Lentiviral Lysis and Quantification

[0594] To evaluate crude lysis methods, red fluorescent protein sequence packaged into lentivirus as described previously²⁹ was directly used for downstream quantification or diluted 1:1 in candidate lysis buffers and boiled at 95° C. for 5 minutes. Lysis efficiency was determined using 2 μL of crude sample as input into a 20 μL RT-qPCR reaction, performed as described above.

### Mock Clinical Sample Preparation

[0595] Nasopharyngeal (NP) swabs from healthy donors (Lee Biosolutions 991-31-NC) were dipped in 2 mL E-MEM (VWR 10128-214) to dislodge material from the swab. NP swabs from 5 patients were pooled to simulate SARS-CoV-2-negative NP swab matrix. Saliva from 5 healthy donors (Lee Bisolution 991-05-S) was pooled together to simulate SARS-CoV-2 negative saliva matrix. Clinical matrices were heated at 95° C. for 5 minutes with an equal volume of QuickExtract DNA Extraction Solution (Lucigen QE09050), followed by the addition of SARS-CoV-2 genomic standards (Twist Biosciences 102019) at indicated concentrations to create mock clinical samples for downstream detection.

### Loop-Mediated Isothermal Amplification (LAMP)

[0596] LAMP primer sets (Table 15) were designed using LAMP Designer 1.16 (Premier Biosoft) or GLAPD³⁰. LAMP reactions were performed using final concentrations of 1.6 uM FIP/BIP primers, 0.2 uM F3/B3 primers, and 0.4 uM LoopF/B primers. LAMP primer sets were screened using the WarmStart Lamp Kit (New England Biolabs E1700) with 1X fluorescent LAMP dye and 25 ng of background human RNA in 20 μL reactions. RNA targets for LAMP primer screening (Table 15) were transcribed using HiScribe T7 Quick High Yield RNA Synthesis Kit (New England Biolabs E2050). Optimizations of LAMP primer sets selected for further evaluation were performed using 1X Isothermal Amplification Buffer (20 mM Tris-HCl, 50 mM KCl, 10 mM (NH4)2504, 2 mM MgSO4, 0.1% Tween 20, pH 8.8) (New England Biolabs B0537), 1.4 mM dNTPs (New England Biolabs N0447), 6.4 units of Bst2.0 WarmStart DNA Polymerase (New England Biolabs M0538), 6 units of WarmStart RTx Reverse Transcriptase (New England Biolabs M0380), variable concentrations of added MgSO4 (New England Biolabs B1003) and 1X fluorescent LAMP dye in 20 μL reactions containing 10% mock NP clinical sample with SARS-CoV-2 genomic standards. LAMP reactions were performed at 60° C. (unless otherwise indicated) for 1-2 hrs on a qPCR machine (Roche LightCycler 480 or BioRad CFX) with fluorescent measurements every 2 minutes. Cas12b Protein Purification

[0597] AacCas12b and AapCas12b orthologs were expressed and purified with a modified protocol³¹. Briefly, AacCas12b (human codon optimized) bacterial expression vector was transformed into BL21-CodonPlus (DE3)-RIPL Competent Cells (Agilent 230280), and AapCas12b bacterial expression vector was transformed into BL21(DE3) Competent E. coli (NEB C2527). Protein sequences for AacCas12b and AapCas12b are provided elsewhere herein. A 12.5 mL starter culture was grown in Terrific Broth media (TB) supplemented with 100 μg/ml ampicillin for 12 h, which was used to inoculate 12 L of TB for growth at 37° C. and 150 rpm until an OD600 of 0.4. After cells were cooled down to 16° C., protein expression was induced by supplementation with IPTG (Goldbio I2481C) to a final concentration of 0.5 mM. The cells were incubated at 16° C. for 16 h for protein expression, and then harvested by centrifugation for 20 min at 4° C. at 4000 rpm (Beckman Coulter Avanti J-E, rotor JLA9.100). Cell pellet was stored at −80° C. for later purification. All subsequent steps were performed at 4° C. Cell pellet was resuspended in 600 mL of lysis buffer (20 mM Tris-HCl, 500 mM NaCl, 1 mM DTT, pH 8.0) supplemented with complete ULTRA Tablets (Millipore sigma 6538282001), 1 mg/mL lysozyme (Sigma L6876), and 250 units/L benzonase (Sigma E1014). Cells were disrupted by the LM20 Microfluidizer system at 18,000 PSI. Lysate was cleared by centrifugation for 30 min at 4° C. at 9500 rpm (Beckman Coulter Avanti J-E, rotor JLA-10.500). The cleared lysate was applied to 5 mL of packed Strep-Tactin Sepharose (IBA 2-1201-010) and incubated with rotation for 1 h, followed by washing of the protein-bound resin in 150 mL of lysis buffer. The resin was resuspended in 15 mL of lysis buffer supplemented with 1.2 mg of Ulp1 SUMO protease, and incubated at 4° C. for 16 h with rotation. The suspension was applied to a column for elution and separation from resin by gravity flow. The resin was washed with 15 mL of lysis buffer, and this additional eluate was combined with the first 15 mL of eluate. The combined 30 mL of eluate was diluted with 30 mL of cation exchange buffer A (20 mM Tris-HCl, 5% glycerol, 1 mM DTT, pH 7.5) to lower the salt concentration for cation exchange chromatography. The resulting 60 mL protein solution was loaded onto a 5 mL HiTrap SP HP cation exchange column (GE Healthcare) via FPLC (AKTA PURE, GE Healthcare) and eluted over a 250 mM to 2 M NaCl salt gradient made by cation exchange buffer A and B (20 mM Tris-HCl, 2 M NaCl, 5% glycerol, 1 mM DTT, pH 7.5). The resulting fractions were tested for presence of the protein by NuPAGE (Invitrogen) and eStain L1 Protein Staining System (GenScript). The fractions containing the protein were pooled and concentrated by an Amicon Ultra-15 Centrifugal Filter Units (50KDa NMWL, Millipore UFC905024) to 1 mL. The concentrated protein was loaded onto a gel filtration column (Superdex 200 Increase 10/300 GL, GE Healthcare) equilibrated with Cas12 protein storage buffer (50 mM Tris-HCl, 600 mM NaCl, 2.5% glycerol, 2 mM DTT, pH 7.5) via FPLC. The resulting fractions from gel filtration were analyzed and the fractions containing the protein were pooled, snap frozen as 2 mg/mL aliquots, and stored at −80° C.

### Cas12b Collateral Detection

[0598] Cas12b detection reactions were performed using 1X Isothermal Amplification Buffer, 8 mM MgSO₄, 250 nM Cas12b protein, 250 nM sgRNA, 250 nM fluorescent reporter (/5HEX/TTTTT/3IABkFQ/) and 1 μL of completed LAMP reaction in 10 μL reactions. Cas12b detection reactions were performed at 60° C. (unless otherwise indicated) for 1-2 hrs on a qPCR machine (Roche LightCycler 480 or BioRad) with fluorescent measurements every 2 minutes.

### One Pot LAMP-Cas12b Fluorescent Reactions

[0599] One-pot LAMP-Cas12b reactions were performed using 1X Isothermal Amplification Buffer, 1.4 mM dNTPs, 6.4 units of Bst2.0 WarmStart DNA Polymerase, 6 units of WarmStart RTx Reverse Transcriptase, 250 nM Cas12b protein, 250 nM sgRNA, 200 nM fluorescent reporter, 1.6 uM FIP/BIP primers, 0.2 uM F3/B3 primers, 0.4 uM LoopF/B primers and variable concentrations of MgSO4 in 20 μL reactions. Where indicated, mock clinical sample with SARS-CoV-2 genomic standard was added at 10% of the final reaction volume to simulate crude input from sample lysis. One-pot reactions were performed at 60° C. (unless otherwise indicated) for 1-2 hrs on a qPCR machine (BioRad) with fluorescent measurements every 2 minutes.

### Conservation Analysis of STOPCovid Targeting Sites

[0600] Human SARS-CoV-2 nucleotide sequences were downloaded from Gisaid database²⁴ on May 30th 2020. Completed genomes (sequence length >29,000 nt and less than 5% of ambiguous nucleotides) were aligned using mafft³² to obtain a global alignment of 31,614 sequences. For each target, Applicantsextracted a sub alignment embedding the region of the target from the genome alignment and removed sequences with ambiguous nucleotides. Then, Applicantsdetermined the number of sequences that either perfectly matched the target or had substitutions and indels.

### Additive Screening

[0601] Additives from the Hampton Research Solubility and Stability Screen (Hampton Research HR2-072) were added at 20% of the final reaction volume of one-pot LAMP-Cas12b fluorescent detection reactions unless otherwise indicated.

### STOPCovid Reactions

[0602] STOPCovid reactions were one-pot LAMP Cas12b reactions described above, using N Set 2 LAMP primers, N set 2 AacCas12b sgRNA 11, and 50 mM taurine. When performing lateral flow reactions, the fluorescent reporter was substituted for a lateral flow collateral reporter (/56-FAM/TTTTTTT/3Bio/). Unless otherwise indicated, STOPCovid lateral flow reactions were incubated at 60° C. for one hour. After incubation, a HybriDetect Dipstick (Milenia Biotec GmbH MGHD 1) was added to the reaction and the liquid was allowed to flow to the top of the strip for subsequent detection. The final concentration of the lateral flow collateral reporter was titrated (125-200 nM) on each lot of HybriDetect Dipsticks to achieve maximal signal-to-noise ratio. Sous-Vide cooker (Amazon B07H9N9PMQ) was used where indicated. To maximize sensitivity and specificity, the final Aap Cas12b and sgRNA concentration was titrated to 31.3 nM. This concentration was used for validating STOPCovid.v2 on patient NP and anterior nasal (AN) samples.

### STOPCovid Multiplexed Control Reactions

[0603] Multiplexed reactions were performed as described for fluorescent STOPCovid reactions, with indicated ratios of N set 2 LAMP primers to control LAMP primers and the addition of 250 nM SYTO-9 Fluorescent Nucleic Acid Stain (ThermoFisher S34854). Total LAMP Primer concentration was consistent between single target and multiplexed STOPCovid reactions.

### SARS-CoV-2 Clinical Sample Collection

[0604] Nasopharyngeal swabs were collected in PBS, viral transport medium (ThermoFisher Scientific), or universal transport media (Becton Dickinson) and submitted to the Virology Laboratory at the University of Washington. SARS-CoV-2 was detected by a laboratory-developed RT-qPCR test using CDC distributed N1 and N2 gene primer/probe sets or tests from Hologic (Panther Fusion) and Roche (cobas). The Panther Fusion SARS-CoV-2 assay (Hologic) amplifies and detects two regions of ORF lab. The cobas SARS-CoV-2 assay on the 6800 platform (Roche Diagnostics) qualitatively detects two viral targets: ORF lab and E-gene. The averages of the observed Ct values in each test were used to determine the overall Ct value of the SARS-CoV-2 positive samples. Previous studies have shown that the average Ct values between each assay are comparable³³. After analysis, samples were stored at −80° C. until further analysis. Samples from the University of Washington were shipped to the Broad Institute for evaluating STOPCovid.v1 performance.

### Estimation of LOD Using Patient Samples

[0605] Clinical samples that tested positive for SARS-CoV-2 from the cobas SARS-CoV-2 assay were stored at 4° C. and used within 12 h to determine the LOD. A five-fold serial dilution of SARS-CoV-2 positive patient NP swab samples in UTM (Becton Dickinson) were generated. For STOPCovid.v1, samples were lysed with an equal volume of DNA QuickExtract for 5 mins at 95° C. 5 μL of lysates were used for the STOPCovid.v1 lateral flow reaction and incubated at 60° C. for one hour, following the signal readout using a HybridDetect Dipstick (Milenia). Ct 3.3 was added between the 5-fold dilutions of samples. To estimate the LOD of the STOPCovid.v2 fluorescent reaction of the total NP swab sample, three replicates of five-fold serial dilution of SARS-CoV-2 positive patient NP swab samples in UTM were generated. 50 μL of diluents were transferred to the extraction buffer (260 μL of laboratory-developed KCl magnetic beads, 40 μL of 10X QuickExtract Plant DNA Extraction Solution, and 50 μL water) using foam swabs (Puritan 25-1506). Nucleic acids bound to magnetic beads were subjected to a STOPCovid.v2 reaction at 60° C. on an ABI 7500 qPCR machine (Thermo Fisher) with measurements every 1 min for 45 min. Since 50 μL of the NP swab sample in UTM, out of 3 mL total, were used, Ct 5.9 was added to the observed average Ct value of the original sample, and Ct 3.3 was added between the 5-fold dilutions of samples. To project the proportion of SARS-CoV-2 positive patients that an assay with the estimated LOD could capture, the average Ct values obtained from the dilution series were compared to the larger 2,105 patient Ct values obtained from the cobas RT-qPCR assay.

[0606] To evaluate the performance of STOPCovid.v2, a blinded test of 202 SARS-CoV-2 positive samples and 200 negative samples was performed. Similar to the dilution series, as only 50 μL of the NP swab sample in 3 mL of UTM was used instead of the entire swab, Ct 5.9 was added to the observed Ct value of the original sample, and only samples with Ct values lower than 34 were used. 50 μL of randomized and blinded NP swab samples in UTM were transferred to 50 μL of water and 300 μL of extraction buffer. STOPCovid.v2 reaction was performed as described above and fluorescent measurements were taken every 2 min during a 44 min period in an ABI 7500 qPCR machine (Thermo Fisher). Fluorescence threshold for classifying samples as positive or negative was set to approximately 10% of the average steady state fluorescence signal, or 100,000 RFU on the ABI 7500 qPCR machine.

### Laboratory-Developed Magnetic Bead Preparation

[0607] Laboratory-developed magnetic beads for RNA concentration were prepared as previously described²⁶. Briefly, 10 mL of Sera-Mag SpeedBeads Carboxyl Magnetic Beads Hydrophobic (GE Healthcare 65152105050250) were washed with ddH₂O and resuspended in 500 mL of bead binding buffer (10 mM Tris-HCl pH 8.0, 1M NaCl, 18% PEG-8000, and 1 mM EDTA). Where indicated, 1M NaCl was replaced with 1M KCl.

### Bead Extraction and Concentration

[0608] 400 μL of laboratory-developed or commercial (SPRISelect, Beckman Coulter B23317) magnetic beads were mixed with 200 μL of heat-inactivated (95° C. for 5 minutes). QuickExtract DNA Extraction Solution spiked with indicated quantity of SARS-CoV-2 genomic standard and 1.25 μg of background human RNA. This mixture was allowed to bind for 5 minutes at room temperature, before transfer onto a magnetic plate (Alpaqua A001219). Beads were washed with 1 mL of 70% ethanol, and allowed to dry for 5 minutes. 50 μL of STOPCovid mastermix was directly added to the beads and the reaction mixture was incubated at 60° C. for 1-2 hrs. Where indicated, the washing and drying steps outlined above were skipped and a modified STOPCovid mastermix was used. Specifically, a modified 1X Isothermal Amplification Buffer containing no KCl (20 mM Tris-HCl, 10 mM (NH4)2504, 2 mM MgSO4, 0.1% Tween 20, pH 8.8) was used in place of the buffer described above.

### Combination of Lysis and Magnetic Bead Binding

[0609] To evaluate the ability to perform efficient viral lysis and nucleic acid binding in parallel, 100 μL of mock SARS-CoV-2 virus (SARS-CoV-2 RNA targets in a noninfectious viral coat) from AccuPlex SARS-CoV-2 Verification Panel (SeraCare 0505-0132) with 125 ng/μL background human RNA were either added to 100 μL of lysis buffer alone or 100 of lysis buffer combined with 400 μL of laboratory-developed KCl magnetic beads. Concentrations of lysis buffers, QuickExtract DNA Extraction Solution and QuickExtract Plant DNA Extraction Solution (Lucigen QEP70750), indicated the final working concentration. Samples containing no magnetic beads were incubated at the indicated temperature for 5 minutes, followed by the addition of 400 μL of laboratory-developed KCl magnetic beads. Samples containing combined bead/lysis mixtures were incubated at room temperature for 10 minutes. All samples were subsequently treated with the bead extraction and concentration steps described above with no wash step.

Comparison of STOPCovid.v2 to CDC RT-qPCR assays

[0610] To create mock samples simulating the addition of swabs, different amounts of mock SARS-CoV-2 virus from the AccuPlex SARS-CoV-2 Verification Panel were diluted in PBS containing 25 ng/μL background human RNA. 50 μL of mock sample was either added to extraction buffer (400 μL of laboratory-developed KCl magnetic beads, 60 μL of 10X QuickExtract Plant DNA Extraction Solution, and 90 μL of PBS) for detection with STOPCovid.v2 or to 1 mL E-MEM media for subsequent nucleic acid extraction and RT-qPCR. STOPCovid.v2 fluorescent reactions were incubated at 60° C. on a qPCR machine with measurement every 2 minutes. STOPCovid.v2 lateral flow reactions were allowed to proceed at 60° C. for 80 minutes before addition of a detection strip. RT-qPCR reactions were performed according to CDC recommendations available at fda.gov/media/134922/download, using the N1 primer and probe set.

### Evaluation of STOPCovid.v2 Using Dry Anterior Nasal Swabs

[0611] SARS-CoV-2 negative patient dry AN swabs (Lee Biosolutions 991-31-NC) were dipped into extraction buffer (260 μL of laboratory-developed KCl magnetic beads, 40 μL of 10X QuickExtract Plant DNA Extraction Solution, and 100 μL water) for detection with STOPCovid.v2. For simulating SARS-CoV-2 positive AN swabs, water in the extraction buffer was replaced with mock SARS-CoV-2 virus from the AccuPlex SARS-CoV-2 Verification Panel. SARS-CoV-2 positive patient dry AN swabs were collected from SARS-CoV-2 positive patients at Brigham and Women's Hospital. SARS-CoV-2 positive patients were identified using NP swabs and the Panther Fusion (Hologic) assay. Dry AN swabs were collected within 48 hours of the NP swab RT-qPCR test. To collect the AN swabs, a flocked AN swab (Miraclean Technology 93050) was inserted approximately 1 inch into the left nostril of the patient. Once in place, the swab was rotated 3 times and then kept in place for 15 seconds to absorb nasal secretions. The same procedure was repeated with the right nostril using the same swab. Dry AN swabs were stored at 4° C. and tested using STOPCovid.v2 within 24 hours as described above for negative AN swabs. Fluorescence threshold for classifying samples as positive or negative was set to approximately 10% of the average steady state fluorescence signal, or 500 RFU on the Biorad CFX96 qPCR machine.

### Lateral Flow Band Quantification

[0612] Acquired images were converted to 8-bit grayscale using photoshop and then imported into ImageLab software (BioRad Image Lab Software 6.0.1). Images were inverted and lanes were manually adjusted to fit the lateral flow strips. Bands were picked automatically and the background was adjusted manually to allow band comparison. Width of bands and background adjustment was kept constant between all bands in the same image. The band intensity ratio is calculated as the intensity of the top (test) band divided by the bottom (control) band.

### Mobile Phone Application

[0613] For classifying STOPCovid lateral flow strip results, the mobile application used >50 images containing >500 lateral flow strips that have been manually annotated as positive or negative to set the appropriate threshold for the band intensity ratio. As the lateral flow strip typically has a faint background for the top (test) band, this threshold was determined to be 0.14. To use the STOPCovid mobile phone application for interpreting lateral flow trip results, download the Expo application for iOS (apple.co/2c6HMtp) or Android (bit.ly/2bZq5ew). Launch the Expo application, tap “Sign in to your account”, and sign in with the STOPCovid team's Expo credentials. Please contact the STOPCovid team through the STOPCovid website (stopcovid.science/) for credentials. Open STOPCovid from the Expo application.

### STOPCovid.v2 Reagents and Protocol

Sequences
LAMP Primers (IDT):
F3:
(SEQ ID NO: 62062)
5′-GCTGCTGAGGCTTCTAAG-3′
B3:
(SEQ ID NO: 62063)
5′-GCGTCAATATGCTTATTCAGC-3′
FIP:
(SEQ ID NO: 62064)
5′-GCGGCCAATGTTTGTAATCAGTAGACGTGGTCCAGAACAA-3′
BIP:
(SEQ ID NO: 62065)
5′-TCAGCGTTCTTCGGAATGTCGCTGTGTAGGTCAACCACG-3′
LoopF:
(SEQ ID NO: 62066)
5′-CCTTGTCTGATTAGTTCCTGGT-3′
(SEQ ID NO: 62067)
LoopB: 5′-TGGCATGGAAGTCACACC-3′
AapCas12b Guide RNA (Synthego):
(SEQ ID NO: 62068)
5′-GUCUAGAGGACAGAAUUUUUCAACGGGUGUGCCAAU
GGCCACUUUCCAGGUGGCAAAGCCCGUUGAGCUUCUCAA
AUCUGAGAAGUGGCACCGAAGAACGCUGAAGCGCUG-3′
(The spacer targeting N gene is underlined.)
AapCas12b Protein Sequence:
(SEQ ID NO: 62069)
MAVKSMKVKLRLDNMPEIRAGLWKLHTEVNAGVRYY
TEWLSLLRQENLYRRSPNGDGEQECYKTAEECKAE
LLERLRARQVENGHCGPAGSDDELLQLARQLYELL
VPQAIGAKGDAQQIARKFLSPLADKDAVGGLGIAK
AGNKPRWVRMREAGEPGWEEEKAKAEARKSTDRTA
DVLRALADFGLKPLMRVYTDSDMSSVQWKPLRKGQ
AVRTWDRDMFQQAIERMMSWESWNQRVGEAYAKLV
EQKSRFEQKNFVGQEHLVQLVNQLQQDMKEASHGL
ESKEQTAHYLTGRALRGSDKVFEKWEKLDPDAPFD
LYDTEIKNVQRRNTRRFGSHDLFAKLAEPKYQALW
REDASFLTRYAVYNSIVRKLNHAKMFATFTLPDAT
AHPIWTRFDKLGGNLHQYTFLFNEFGEGRHAIRFQ
KLLTVEDGVAKEVDDVTVPISMSAQLDDLLPRDPH
ELVALYFQDYGAEQHLAGEFGGAKIQYRRDQLNHL
HARRGARDVYLNLSVRVQSQSEARGERRPPYAAVF
RLVGDNHRAFVHFDKLSDYLAEHPDDGKLGSEGLL
SGLRVMSVDLGLRTSASISVFRVARKDELKPNSEG
RVPFCFPIEGNENLVAVHERSQLLKLPGETESKDL
RAIREERQRTLRQLRTQLAYLRLLVRCGSEDVGRR
ERSWAKLIEQPMDANQMTPDWREAFEDELQKLKSL
YGICGDREWTEAVYESVRRVWRHMGKQVRDWRKDV
RSGERPKIRGYQKDVVGGNSIEQIEYLERQYKFLK
SWSFFGKVSGQVIRAEKGSRFAITLREHIDHAKED
RLKKLADRIIMEALGYVYALDDERGKGKWVAKYPP
CQLILLEELSEYQFNNDRPPSENNQLMQWSHRGVF
QELLNQAQVHDLLVGTMYAAFSSRFDARTGAPGIR
CRRVPARCAREQNPEPFPWWLNKFVAEHKLDGCPL
RADDLIPTGEGEFFVSPFSAEEGDFHQIHADLNAA
QNLQRRLWSDFDISQIRLRCDWGEVDGEPVLIPRT
TGKRTADSYGNKVFYTKTGVTYYERERGKKRRKVF
AQEELSEEEAELLVEADEAREKSVVLMRDPSGIIN
RGDWTRQKEFWSMVNQRIEGYLVKQIRSRVRLQES
ACENTGDI*
Reporter DNA (IDT):
Fluorescence:
5′-/5HEX/TTTTT/3IABkFQ/-3′
Lateral flow:
5′-/56-FAM/TTTTTTT/3Bio/-3′

### Patient Samples

[0615] Patient nasopharyngeal (NP) and anterior nasal (AN) swab samples should be collected and processed according to the appropriate biosafety procedure. The 2020 CDC COVID-19 test protocol was utilized for specimen collection, which is available at cdc.gov/coronavirus/2019-nCoV/lab/guidelines-clinical-specimens. Swabs that do not soak up excessive volumes (>80 μL) of extraction buffer, such as flocked swabs, should be used. Reagents

[0616] Extraction Buffer:

[0617] Sera-Mag SpeedBeads Carboxyl Magnetic Beads (VWR 65152105050250)
[0618] Poly(ethylene glycol) 8,000 (Millipore Sigma 89510)
[0619] 3 M Potassium chloride solution (Millipore Sigma 60135)
[0620] 1 M Tris-HCl, pH 8.0 (Thermo Fisher Scientific AM9855G)
[0621] UltraPure 0.5 M EDTA, pH 8.0 (Thermo Fisher Scientific 15575020)
[0622] UltraPure DNAse/RNAse-Free Distilled Water (Thermo Fisher Scientific 10977015)
[0623] 10× concentrated QuickExtract Plant DNA Extraction Solution (Lucigen, custom order). Once thawed, aliquot and store at −20° C. to avoid >3 freeze-thaw cycles.

[0624] STOPCovid.v2 Reaction:
[0625] 1 M Tris-HCl, pH 8.0 (Thermo Fisher Scientific AM9855G)
[0626] 2 M Ammonium sulfate solution (Millipore Sigma 76399)
[0627] 1 M Magnesium sulfate solution (Millipore Sigma M3409)
[0628] Tween 20 (Millipore Sigma P9416)
[0629] Bst 2.0 WarmStart DNA Polymerase (New England BioLabs M0538L)
[0630] WarmStart RTx Reverse Transcriptase (New England BioLabs M0380L)
[0631] 100 mM Magnesium sulfate, supplied with M0538L and M0380L
[0632] AapCas12b protein (New England BioLabs, custom order) or purified as described previously¹
[0633] 10 mM Deoxynucleotide (dNTP) Solution Mix (New England BioLabs N0447L)
[0634] Taurine (Millipore Sigma 86329)
[0635] Proteinase K Inhibitor (Millipore Sigma 539470)
[0636] Dimethyl sulfoxide (Millipore Sigma D2650)
[0637] UltraPure DNAse/RNAse-Free Distilled Water (Thermo Fisher Scientific 10977015)
[0638] (Optional) AccuPlex SARS-CoV-2 Reference Material Kit v2 (SeraCare 0505-0133)
[0639] (Optional) HybriDetect Dipstick (Milenia Biotec GmbH MGHD 1)

[0640] Equipment
[0641] 60° C. heat block, water bath, or sous-vide immersion cooker
[0642] Magnetic separator
[0643] (Optional) qPCR machine for fluorescence readout

[0644] Reagent Setup

[0645] Laboratory-developed magnetic beads:

[0646] 1. Vortex the Sera-Mag SpeedBeads Carboxyl Magnetic Beads for 1 min. Add 10 mL to a 50 mL conical tube.

[0647] 2. Using a 50 mL magnetic separator, pellet the magnetic beads.

[0648] 3. Aspirate the supernatant and discard.

[0649] 4. Wash beads twice with 10 mL of ddH₂O, resuspending the pellet each time by vortexing for 30 s.

[0650] 5. Pellet the beads for the last time.

[0651] 6. Prepare the bead buffer by mixing the following in a 500 mL reagent bottle.

TABLE 13A

| Component | Amount |
|---|---|
| 3M KCl | 167 mL |
| 1M Tris-HCl | 5 mL |
| 0.5M EDTA | 1 mL |
| PEG-8000 | 90 g |

[0652] 7. Fill with ddH₂O to 500 mL and invert 10 times to mix.

[0653] 8. Filter through a vacuum filtration unit according to the manufacturer's instructions.

[0654] 9. Remove the final wash fluid on the beads and add 10 mL of bead buffer.

[0655] 10. Vortex for 30 s to resuspend the beads and transfer to the 500 mL bottle containing the bead buffer.

[0656] 11. Invert to homogenize the beads with the buffer.

[0657] 12. Beads can be aliquoted and stored at 4° C. for 1 month or −20° C. for up to 1 year.

[0658] Extraction Buffer:

[0659] 1. Prepare the extraction buffer by mixing the following in a 50 mL conical tube.

TABLE 13B

| Component | Amount (mL) |
|---|---|
| Magnetic beads | 26 |
| 10x QuickExtract Plant | 4 |
| ddH₂O | 10 |
| Total | 40 |

[0660] 2. Aliquot for storage at −20° C. for up to 1 year. Avoid more than 1 additional freeze-thaw cycle.

[0661] 10×LAMP Primer Pool:

[0662] 1. Resuspend LAMP primers with ddH₂O to 100 μM.

[0663] 2. Prepare the 10×LAMP primer pool by mixing the following in a 1.5 mL tube.

TABLE 13C

| Component | Amount (μL) |
|---|---|
| F3 primer | 20 |
| B3 primer | 20 |
| FIP primer | 160 |
| BIP primer | 160 |
| LoopF primer | 40 |
| LoopB primer | 40 |
| ddH₂O | 560 |
| Total | 1000 |

[0664] 3. Aliquot for storage at −20° C. for up to 1 year.

[0665] 10×STOPCovid.v2 reaction buffer:

[0666] 1. Prepare the 10×STOPCovid.v2 reaction buffer by mixing the following in a 15 mL conical tube.

TABLE 13D

| | Initial | Final | Amount |
|---|---|---|---|
| Component | concentration | concentration | (mL) |
| Tris-HCl | 1M | 0.2M | 2 |
| (NH₄)₂SO₄ | 2M | 0.1M | 0.5 |
| Mg₂SO₄ | 1M | 0.02M | 0.2 |
| Tween 20 | 100% | 0.1% | 0.01 |
| ddH₂O | | | 7.29 |
| Total | | | 10 |

[0667] 2. Adjust the pH of the solution to 8.8. The pH should be very close to 8.8 before adjusting. 3. Aliquot for storage at −20° C. for up to 1 year.

[0668] 500 mM Taurine:

[0669] 1. Resuspend 6.258 g of Taurine in 100 mL of ddH₂O. Heating at 37° C. may be required for resuspension.

[0670] 2. Aliquot for storage at room temperature for up to 1 year. 10× Proteinase K Inhibitor:

[0671] 1. Resuspend 10 mg of Proteinase K Inhibitor with 150 μL of DMSO to make the stock solution.

[0672] 2. Dilute stock solution 1:100 with ddH₂O to make working aliquots. Store both stock and working solutions at −20° C. for up to 1 year.

[0673] STOPCovid.v2 Reaction:

[0674] 1. Prepare the STOPCovid.v2 reaction by mixing the following for one reaction. Scale up volume as needed for additional reactions.

TABLE 13E

| | Initial | | Final | | Amount |
|---|---|---|---|---|---|
| Component | concentration | | concentration | | (μL) |
| STOPCovid.v2 | 10x | | 1x | | 5 |
| reaction buffer | | | | | |
| dNTPs | 10 | mM | 1.4 | mM | 7 |
| Mg₂SO₄ | 100 | mM | 8 | mM | 4 |
| Bst 2.0 DNA Polymerase | 8,000 | units/mL | 320 | units/mL | 2 |
| RTx Reverse Transcriptase | 15,000 | units/mL | 300 | units/ml | 1 |
| LAMP primer pool | 10x | | 1x | | 5 |
| AapCas12b protein | 2 mg/mL or | | 31.25 | nM | 0.102 |
| | 15.4 | μM | | | |
| AapCas12b sgRNA | 100 | μM | 31.25 | nM | 0.156 |
| Reporter DNA | 100 | μM | 250 | nM | 0.125 |
| (fluorescence)* | | | | | |
| Taurine | 500 | mM | 50 | mM | 5 |

| | | | |
|---|---|---|---|
| Proteinase K Inhibitor | 10x | 1x | 5 |
| ddH₂O | | | 15.617 |
| Total | | | 50 |

*If performing lateral flow readout, use the lateral flow reporter instead of thefluorescence reporter, at a final concentration of 125-500 nM titrated for best signal-to-noise on each lot of Milenia HybriDetect Dipstick.

[0675] 2. Aliquot and store at −20° C. for up to 1 year.

[0676] Protocol

[0677] 1. Thaw extraction buffer and STOPCovid.v2 reaction at room temperature. Keep STOPCovid.v2 reaction on ice after thawing. Allow extraction buffer to equilibrate to room temperature before proceeding.

[0678] 2. Vortex extraction buffer for 15s.

[0679] 3. Dip dry NP or AN swab in 400 μL of extraction buffer in a 1.5 mL tube. Swirl swab against the side of the tube to dislodge material.

[0680] 4. Vortex or pipette to mix. Incubate at room temperature for 10 mins.

[0681] 5. Place sample and extraction buffer mix on magnet. Wait 5 mins or until solution is clear.

[0682] 6. Aspirate the supernatant. Make sure to remove all of the supernatant.

[0683] 7. Add 50 μL of STOPCovid reaction. Remove tube from magnet and spin down beads using a microcentrifuge.

[0684] 8. Vortex or pipette to mix.

[0685] 9. Pellet the beads at 5,000×g for 1 min. Lower speeds or a plate spinner may work as well.

[0686] 10. Depending on the readout method: Fluorescence readout:
[0687] a. Run the reaction at 60° C. for 45 mins
[0688] b. Read out the fluorescence using the VIC/HEX channel on a qPCR machine.

[0689] Lateral flow readout:
[0690] a. Run the reaction at 60° C. for 80 mins.
[0691] b. To prevent sample contamination, transfer sample to a different work area. Place a HybriDetect Dipstick into each reaction and wait for the reaction to flow through the dipstick. Generally, 2 mins is enough time to develop a positive band at the limit of detection.

TABLE 14

| Name | Sequence |
|---|---|
| CDC N1 F | GACCCCAAAATCAGCGAAAT |
| | (SEQ ID NO: 62070) |
| CDC N1 R | TCTGGTTACTGCCAGTTGAATCTG |
| | (SEQ ID NO: 62071) |
| CDC N1 | FAM-ACCCCGCATTACGTTTGGTGGACC-BHQ1 |
| Probe | (SEQ ID NO: 62072) |
| CDC N2 F | TTACAAACATTGGCCGCAAA |
| | (SEQ ID NO: 62073) |
| CDC N2 R | GCGCGACATTCCGAAGAA |
| | (SEQ ID NO: 62074) |
| CDC N2 | FAM-ACAATTTGCCCCCAGCGCTTCAG-BHQ1 |
| Probe | (SEQ ID NO: 62075) |
| RFP F | ACTTGATGTTGACGTTGTAGG |
| | (SEQ ID NO: 62076) |
| RFP R | AGTTCATCTACAAGGTGAAGCT |
| | (SEQ ID NO: 62077) |
| RFP Probe | FAM-CCCCGTAATGCAGAAGAAGA-BHQ1 |
| | (SEQ ID NO: 62078) |

TABLE 15

| Name | Sequence |
|---|---|
| ORF1ab Set 1 | CGCAACATTAAACCAGTACCAGAGGTGAAAATACTCAATAATTTG |
| target RNA | GGTGTGGACATTGCTGCTAATACTGTGATCTGGGACTACAAAAGA |
| | GATGCTCCAGCACATATATCTACTATTGGTGTTTGTTCTATGACTG |
| | ACATAGCCAAGAAACCAACTGAAACGATTTGTGCACCACTCACTG |
| | TCTTTTTTGATGGTAGAGTTGATGGTCAAGTAGACTTATTTAGAAA |
| | TGCCCGTAATGGTGTTCTTATTAC (SEQ ID NO: 62079) |
| ORF1ab Set 2 | AATTACAGAATAATGAGCTTAGTCCTGTTGCACTACGACAGATGT |
| target RNA | CTTGTGCTGCCGGTACTACACAAACTGCTTGCACTGATGACAATG |
| | CGTTAGCTTACTACAACACAACAAAGGGAGGTAGGTTTGTACTTG |
| | CACTGTTATCCGATTTACAGGATTTGAAATGGGCTAGATTCCCTA |
| | AGAGTGATGGAACTGGTACTATCTATACA (SEQ ID NO: 62080) |
| S Set 1 target | AGATCCATCAAAACCAAGCAAGAGGTCATTTATTGAAGATCTACT |
| RNA; S Set 2 | TTTCAACAAAGTGACACTTGCAGATGCTGGCTTCATCAAACAATA |
| target RNA | TGGTGATTGCCTTGGTGATATTGCTGCTAGAGACCTCATTTGTGCA |
| | CAAAAGTTTAACGGCCTTACTGTTTTGCCACCTTTGCTCACAGATG |
| | AAATGATTGCTCAATACACTTCTGCACTGTTAGCGGGTACAATCA |
| | CTTCTGGTTGGACCTTTGGTGCAGGTGCTGCATTACAAATACCATT |
| | TGCTATGCAAATGGCTTATAGGTTTAATGGTATTGGAGTTACACA |
| | GAATGTTCTCTATGAGAACC (SEQ ID NO: 62081) |
| N Set 1 target | CCCTCGAGGACAAGGCGTTCCAATTAACACCAATAGCAGTCCAGA |
| RNA; Zhang et | TGACCAAATTGGCTACTACCGAAGAGCTACCAGACGAATTCGTGG |
| al target RNA | TGGTGACGGTAAAATGAAAGATCTCAGTCCAAGATGGTATTTCTA |
| | CTACCTAGGAACTGGGCCAGAAGCTGGACTTCCCTATGGTGCTAA |
| | CAAAGACGGCATCATATGGGTTGCAACTGAGGGAGCCTTGAATA |
| | CACCAAAAGATCACATTGGCACCCGCAATCCTGCTAACAATGCTG |
| | CAATCGTGCTA (SEQ ID NO: 62082) |
| N Set 2 target | TAAGAAATCTGCTGCTGAGGCTTCTAAGAAGCCTCGGCAAAAACG |
| RNA | TACTGCCACTAAAGCATACAATGTAACACAAGCTTTCGGCAGACG |
| | TGGTCCAGAACAAACCCAAGGAAATTTTGGGGACCAGGAACTAA |
| | TCAGACAAGGAACTGATTACAAACATTGGCCGCAAATTGCACAAT |
| | TTGCCCCCAGCGCTTCAGCGTTCTTCGGAATGTCGCGCATTGGCAT |
| | GGAAGTCACACCTTCGGGAACGTGGTTGACCTACACAGGTGCCAT |
| | CAAATTGGATGACAAAGATCCAAATTTCAAAGATCAAGTCATTTT |
| | GCTGAATAAGCATATTGACGCATACAAAACA (SEQ ID NO: 62083) |
| Broughten et al | TGCTGAGGCTTCTAAGAAGCCTCGGCAAAAACGTACTGCCACTAA |
| target RNA | AGCATACAATGTAACACAAGCTTTCGGCAGACGTGGTCCAGAAC |
| | AAACCCAAGGAAATTTTGGGGACCAGGAACTAATCAGACAAGGA |
| | ACTGATTACAAACATTGGCCGCAAATTGCACAATTTGCCCCCAGC |
| | GCTTCAGCGTTCTTCGGAATGTCGCGCATTGGCATGGAAGTCACA |
| | CCTTCGGGAACGTGGTTGACCTACACAGGTGCCATCAAATTGGAT |
| | GACAAAGATCCAAATTTCAAAGATCAAGTCATTTTGCTGAATAAG |
| | CATATTGACGCATACAAAACA (SEQ ID NO: 62084) |
| ORF1ab Set 1 | AACCAGTACCAGAGGTGAA (SEQ ID NO: 62085) |
| F3 | |
| ORF1ab Set 1 | CACCATTACGGGCATTTCTA (SEQ ID NO: 62086) |
| B3 | |
| ORF1ab Set 1 | TGTGCTGGAGCATCTCTTTTGTTTTGGGTGTGGACATTGC (SEQ ID |
| FIP | NO: 62087) |
| ORF1ab Set 1 | AGCCAAGAAACCAACTGAAACGCTACTTGACCATCAACTCTACC |
| BIP | (SEQ ID NO: 62088) |
| ORF1ab Set 1 | GTCCCAGATCACAGTATTAGCA (SEQ ID NO: 62089) |
| LoopF | |
| ORF1ab Set 1 | TGTGCACCACTCACTGTC (SEQ ID NO: 62090) |
| LoopB | |
| ORF1ab Set 2 | TAATGAGCTTAGTCCTGTTGC (SEQ ID NO: 62091) |
| F3 | |
| ORF1ab Set 2 | GTACCAGTTCCATCACTCTTAG (SEQ ID NO: 62092) |
| B3 | |
| ORF1ab Set 2 | AGCTAACGCATTGTCATCAGTGACGACAGATGTCTTGTGC (SEQ ID |
| FIP | NO: 62093) |
| ORF1ab Set 2 | AACACAACAAAGGGAGGTAGGTTCTAGCCCATTTCAAATCCTG |
| BIP | (SEQ ID NO: 62094) |
| ORF1ab Set 2 | CAAGCAGTTTGTGTAGTACCG (SEQ ID NO: 62095) |
| LoopF | |
| ORF1ab Set 2 | TTGTACTTGCACTGTTATCCGA (SEQ ID NO: 62096) |
| LoopB | |
| S Set 1 F3 | AAACCAAGCAAGAGGTCATT (SEQ ID NO: 62097) |
| S Set 1 B3 | GTATTTGTAATGCAGCACCTG (SEQ ID NO: 62098) |
| S Set 1 FIP | TGCACAAATGAGGTCTCTAGCACAGATGCTGGCTTCATCAA (SEQ |
| | ID NO: 62099) |
| S Set 1 BIP | TTGCCACCTTTGCTCACAGATTCCAACCAGAAGTGATTGTAC (SEQ |
| | ID NO: 62100) |
| S Set 1 LoopF | CAATATCACCAAGGCAATCACC (SEQ ID NO: 62101) |
| S Set 1 LoopB | TGATTGCTCAATACACTTCTGC (SEQ ID NO: 62102) |
| S Set 2 F3 | CAGATGCTGGCTTCATCAA (SEQ ID NO: 62103) |
| S Set 2 B3 | GAGAACATTCTGTGTAACTCCA (SEQ ID NO: 62104) |
| S Set 2 FIP | TGGCAAAACAGTAAGGCCGTTAATGGTGATTGCCTTGGTG (SEQ |
| | ID NO; 62105) |
| S Set 2 BIP | TTCTGCACTGTTAGCGGGTACGTATTTGTAATGCAGCACCTG (SEQ |
| | ID NO: 62106) |
| S Set 2 LoopF | AAATGAGGTCTCTAGCAGCAAT (SEQ ID NO: 62107) |
| S Set 2 LoopB | AATCACTTCTGGTTGGACCTT (SEQ ID NO: 62108) |
| N Set 1 F3 | CAAGGCGTTCCAATTAACAC (SEQ ID NO: 62109) |
| N Set 1 B3 | GCAGCATTGTTAGCAGGA (SEQ ID NO: 62110) |
| N Set 1FIP | ACCGTCACCACCACGAATTCCAATAGCAGTCCAGATGACC (SEQ |
| | ID NO: 62111) |
| N Set 1 BIP | CTAGGAACTGGGCCAGAAGCACCCATATGATGCCGTCT (SEQ ID |
| | NO: 62112) |
| N Set 1 LoopF | GCTCTTCGGTAGTAGCCAATT (SEQ ID NO: 62113) |
| N Set 1 LoopB | GACTTCCCTATGGTGCTAACAA (SEQ ID NO: 62114) |
| N Set 2 F3 | GCTGCTGAGGCTTCTAAG (SEQ ID NO: 62115) |
| N Set 2 B3 | GCGTCAATATGCTTATTCAGC (SEQ ID NO: 62116) |
| N Set 2 FIP | GCGGCCAATGTTTGTAATCAGTAGACGTGGTCCAGAACAA (SEQ |
| | ID NO: 62117) |
| N Set 2 BIP | TCAGCGTTCTTCGGAATGTCGCTGTGTAGGTCAACCACG (SEQ ID |
| | NO: 62118) |
| N Set 2 LoopF | CCTTGTCTGATTAGTTCCTGGT (SEQ ID NO: 62119) |
| N Set 2 LoopB | TGGCATGGAAGTCACACC (SEQ ID NO: 62120) |
| ACTB Set 1 | AAGATGAGATTGGCATGGC (SEQ ID NO: 62121) |
| F3 | |
| ACTB Set 1 | GCAAGGGACTTCCTGTAAC (SEQ ID NO: 62122) |
| B3 | |
| ACTB Set 1 | CTCCAACCGACTGCTGTCTTTGGCTTGACTCAGGATTT (SEQ ID |
| FIP | NO: 62123) |
| ACTB Set 1 | CCCAAAGTTCACAATGTGGCCGCATCTCATATTTGGAATGAC (SEQ |
| BIP | ID NO: 62124) |
| ACTB Set 1 | ACCTTCACCGTTCCAGTT (SEQ ID NO: 62125) |
| LoopF | |
| ACTB Set 1 | GGACTTTGATTGCACATTGTTG (SEQ ID NO: 62126) |
| LoopB | |
| ACTB Set 2 | ACTCTTCCAGCCTTCCTT (SEQ ID NO: 62127) |
| F3 | |
| ACTB Set 2 | GATCCACACGGAGTACTTG (SEQ ID NO: 62128) |
| B3 | |
| ACTB Set 2 | TGTGTTGGCGTACAGGTCAACTACCTTCAACTCCATCATG (SEQ ID |
| FIP | NO: 62129) |
| ACTB Set 2 | CACCATGTACCCTGGCATTGATCTTGATCTTCATTGTGCTG (SEQ |
| BIP | ID NO: 62130) |
| ACTB Set 2 | GGATGTCCACGTCACACT (SEQ ID NO: 62131) |
| LoopF | |
| ACTB Set 2 | GACAGGATGCAGAAGGAGA (SEQ ID NO: 62132) |
| LoopB | |
| ACTB Set 3 | GGCCGTCTTCCCCTCCAT (SEQ ID NO: 62133) |
| F3 | |
| ACTB Set 3 | CGCAGCTCATTGTAGAAGGT (SEQ ID NO: 62134) |
| B3 | |
| ACTB Set 3 | TTGCTCTGGGCCTCGTCGCAGGCACCAGGGCGTGA (SEQ ID NO: |
| FIP | 62135) |
| ACTB Set 3 | TGAAGTACCCCATCGAGCACGGGTGGTGCCAGATTTTCTCCA |
| BIP | (SEQ ID NO: 62136) |
| ACTB Set 3 | CCTTCTGACCCATGCCCACCA (SEQ ID NO: 62137) |
| LoopF | |
| ACTB Set 3 | CATCGTCACCAACTGGGACGAC (SEQ ID NO: 62138) |
| LoopB | |
| ACTB Set 4 | GCACCAGGGCGTGATG (SEQ ID NO: 62139) |
| F3 | |
| ACTB Set 4 | TCAGCAGCACGGGGTG (SEQ ID NO: 62140) |
| B3 | |
| ACTB Set 4 | GAGGATGCCTCTCTTGCTCTGGGTGGGCATGGGTCAGAAG (SEQ |
| FIP | ID NO: 62141) |
| ACTB Set 4 | AGTACCCCATCGAGCACGGCACGCAGCTCATTGTAGAAGGT (SEQ |
| BIP | ID NO: 62142) |
| ACTB Set 4 | CCTCGTCGCCCACATAGGAATC (SEQ ID NO: 62143) |
| LoopF | |
| ACTB Set 4 | TCGTCACCAACTGGGACGACA (SEQ ID NO: 62144) |
| LoopB | |
| ACTB Set 5 | TACGTTGCTATCCAGGCTGT (SEQ ID NO: 62145) |
| F3 | |
| ACTB Set 5 | AGTCAGGTCCCGGCCA (SEQ ID NO: 62146) |
| B3 | |
| ACTB Set 5 | TGACCCCGTCACCGGAGTCCGCTATCCCTGTACGCCTCT (SEQ ID |
| FIP | NO: 62147) |
| ACTB Set 5 | CCCACACTGTGCCCATCTACGCAGGTCCAGACGCAGGAT (SEQ ID |
| BIP | NO: 62148) |
| ACTB Set 5 | CGATGCCAGTGGTACGGCC (SEQ ID NO: 62149) |
| LoopF | |
| ACTB Set 5 | GGGGTATGCCCTCCCCCAT (SEQ ID NO: 62150) |
| LoopB | |
| ACTB Set 6 | GCTATCCCTGTACGCCTCT (SEQ ID NO: 62151) |
| F3 | |
| ACTB Set 6 | CGGTGAGGATCTTCATGAGG (SEQ ID NO: 62152) |
| B3 | |
| ACTB Set 6 | AGATGGGCACAGTGTGGGTGGGCCGTACCACTGGCA (SEQ ID NO: |
| FIP | 62153) |
| ACTB Set 6 | GGGGTATGCCCTCCCCCATTCAGTCAGGTCCCGGC (SEQ ID NO: |
| BIP | 62154) |
| ACTB Set 6 | CGTCACCGGAGTCCATCACGA (SEQ ID NO: 62155) |
| LoopF | |
| ACTB Set 6 | GCCATCCTGCGTCTGGACC (SEQ ID NO: 62156) |
| LoopB | |
| ACTB Set 7 | GGGAAATCGTGCGTGACA (SEQ ID NO: 62157) |
| F3 | |
| ACTB Set 7 | GGCTGGAAGAGTGCCTCA (SEQ ID NO: 62158) |
| B3 | |
| ACTB Set 7 | GGAAGCAGCCGTGGCCATCAAGGAGAAGCTGTGCTACGT (SEQ ID |
| FIP | NO: 62159) |
| ACTB Set 7 | TCCTCCCTGGAGAAGAGCTACGCCGCTCATTGCCAATGGT (SEQ ID |
| BIP | NO: 62160) |
| ACTB Set 7 | TTGCTCGAAGTCCAGGGCG (SEQ ID NO: 62161) |
| LoopF | |
| ACTB Set 7 | NULL |
| LoopB | |
| ACTB Set 8 | AAGGAGAAGCTGTGCTACGT (SEQ ID NO: 62162) |
| F3 | |
| ACTB Set 8 | TGCCCAGGAAGGAAGGC (SEQ ID NO: 62163) |
| B3 | |
| ACTB Set 8 | CGTAGCTCTTCTCCAGGGAGGAGCCCTGGACTTCGAGCA (SEQ ID |
| FIP | NO: 62164) |
| ACTB Set 8 | CCTGACGGCCAGGTCATCACCTGGAAGAGTGCCTCAGGG (SEQ ID |
| BIP | NO: 62165) |
| ACTB Set 8 | AGCAGCCGTGGCCATCTC (SEQ ID NO: 62166) |
| LoopF | |
| ACTB Set 8 | ATTGGCAATGAGCGGTTCCGC (SEQ ID NO: 62167) |
| LoopB | |
| ACTB Set 9 | GGCATCCACGAAACTACCTT (SEQ ID NO: 62168) |
| F3 | |
| ACTB Set 9 | ACTTGCGCTCAGGAGGAG (SEQ ID NO: 62169) |
| B3 | |
| ACTB Set 9 | CCGCCAGACAGCACTGTGTTTCATGAAGTGTGACGTGGAC (SEQ |
| FIP | ID NO: 62170) |
| ACTB Set 9 | CACCACCATGTACCCTGGCATTTCATTGTGCTGGGTGCC (SEQ ID |
| BIP | NO: 62171) |
| ACTB Set 9 | GGCGTACAGGTCTTTGCGGAT (SEQ ID NO: 62172) |
| LoopF | |
| ACTB Set 9 | TGCCGACAGGATGCAGAAGG (SEQ ID NO: 62173) |
| LoopB | |
| ACTB Set 10 | ATGCAGAAGGAGATCACTGC (SEQ ID NO: 62174) |
| F3 | |
| ACTB Set 10 | TTTGCGGTGGACGATGGA (SEQ ID NO: 62175) |
| B3 | |
| ACTB Set 10 | CACACGGAGTACTTGCGCTCACTGGCACCCAGCACAATG (SEQ ID |
| FIP | NO: 62176) |
| ACTB Set 10 | CTCCATCCTGGCCTCGCTGTCGTCATACTCCTGCTTGCTG (SEQ ID |
| BIP | NO: 62177) |
| ACTB Set 10 | NULL |
| LoopF | |
| ACTB Set 10 | CCACCTTCCAGCAGATGTGGAT (SEQ ID NO: 62178) |
| LoopB | |
| GAPDH Set 1 | AAAGGGTCATCATCTCTGC (SEQ ID NO: 62179) |
| F3 | |
| GAPDH Set 1 | ATGATGTTCTGGAGAGCC (SEQ ID NO: 62180) |
| B3 | |
| GAPDH Set 1 | GCTAAGCAGTTGGTGGTGGAACCATGAGAAGTATGACAAC (SEQ |
| FIP | ID NO: 62181) |
| GAPDH Set 1 | GGTATCGTGGAAGGACTCATCCATCCACAGTCTTCTGG (SEQ ID |
| BIP | NO: 62182) |
| GAPDH Set 1 | TTGCTGATGATCTTGAGGC (SEQ ID NO: 62183) |
| LoopF | |
| GAPDH Set 1 | CAGTCCATGCCATCACTG (SEQ ID NO: 62184) |
| LoopB | |
| GAPDH Set 2 | ATGAGAAGTATGACAACAGCC (SEQ ID NO: 62185) |
| F3 | |
| GAPDH Set 2 | GATGATGTTCTGGAGAGCC (SEQ ID NO: 62186) |
| B3 | |
| GAPDH Set 2 | TGTCATGGATGACCTTGGCAGATCATCAGCAATGCCTC (SEQ ID |
| FIP | NO: 62187) |
| GAPDH Set 2 | GGTATCGTGGAAGGACTCATGGCCATCCACAGTCTTCTG (SEQ ID |
| BIP | NO: 62188) |
| GAPDH Set 2 | GCTAAGCAGTTGGTGGTG (SEQ ID NO: 62189) |
| LoopF | |
| GAPDH Set 2 | ACAGTCCATGCCATCACT (SEQ ID NO: 62190) |
| LoopB | |
| GAPDH Set 3 | GTGAAGGTCGGAGTCAAC (SEQ ID NO: 62191) |
| F3 | |
| GAPDH Set 3 | CTCCATGGTGGTGAAGAC (SEQ ID NO: 62192) |
| B3 | |
| GAPDH Set 3 | GGGTGGAATCATATTGGAACATAGTGGATATTGTTGCCATCA |
| FIP | (SEQ ID NO: 62193) |
| GAPDH Set 3 | CACCGTCAAGGCTGAGAAATCTCGCTCCTGGAAGAT (SEQ ID NO: |
| BIP | 62194 |
| GAPDH Set 3 | ACCATGTAGTTGAGGTCAATG (SEQ ID NO: 62195) |
| LoopF | |
| GAPDH Set 3 | GGAAGCTTGTCATCAATGGA (SEQ ID NO: 62196) |
| LoopB | |
| GAPDH Set 4 | ACCATGAGAAGTATGACAACAG (SEQ ID NO: 62197) |
| F3 | |
| GAPDH Set 4 | GATGATGTTCTGGAGAGCC (SEQ ID NO: 62198) |
| B3 | |
| GAPDH Set 4 | TGTCATGGATGACCTTGGCCTCAAGATCATCAGCAATGC (SEQ ID |
| FIP | NO: 62199) |
| GAPDH Set 4 | GGTATCGTGGAAGGACTCATGGCCATCCACAGTCTTCTG (SEQ ID |
| BIP | NO: 62200) |
| GAPDH Set 4 | GCTAAGCAGTTGGTGGTG (SEQ ID NO: 62201) |
| LoopF | |
| GAPDH Set 4 | ACAGTCCATGCCATCACT (SEQ ID NO: 62202) |
| LoopB | |
| GAPDH Set 5 | GTGAAGGTCGGAGTCAAC (SEQ ID NO: 62203) |
| F3 | |
| GAPDH Set 5 | GACTCCACGACGTACTCA (SEQ ID NO: 62204) |
| B3 | |
| GAPDH Set 5 | TGGGTGGAATCATATTGGAACAGGATATTGTTGCCATCAATGAC |
| FIP | (SEQ ID NO: 62205) |
| GAPDH Set 5 | ACCGTCAAGGCTGAGAACGATCTCGCTCCTGGAAGA (SEQ ID NO: |
| BIP | 62206) |
| GAPDH Set 5 | AACCATGTAGTTGAGGTCAATG (SEQ ID NO: 62207) |
| LoopF | |
| GAPDH Set 5 | GGAAGCTTGTCATCAATGGAA (SEQ ID NO: 62208) |
| LoopB | |
| GAPDH Set 6 | TGGTATCGTGGAAGGACTCA (SEQ ID NO: 62209) |
| F3 | |
| GAPDH Set 6 | CGTTCAGCTCAGGGATGAC (SEQ ID NO: 62210) |
| B3 | |
| GAPDH Set 6 | ACGCCACAGTTTCCCGGAGGTGACCACAGTCCATGCCA (SEQ ID |
| FIP | NO: 62211) |
| GAPDH Set 6 | CGCGGGGCTCTCCAGAACACTTGCCCACAGCCTTGG (SEQ ID NO: |
| BIP | 62212) |
| GAPDH Set 6 | ACAGTCTTCTGGGTGGCAGTGA (SEQ ID NO: 62213) |
| LoopF | |
| GAPDH Set 6 | CATCCCTGCCTCTACTGGCGC (SEQ ID NO: 62214) |
| LoopB | |
| GAPDH Set 7 | TCGTGGAAGGACTCATGACC SEQ ID NO: 62215) |
| F3 | |
| GAPDH Set 7 | CGTTCAGCTCAGGGATGAC (SEQ ID NO: 62216) |
| B3 | |
| GAPDH Set 7 | ACGCCACAGTTTCCCGGAGGACAGTCCATGCCATCACTGC (SEQ |
| FIP | ID NO: 62217) |
| GAPDH Set 7 | CGCGGGGCTCTCCAGAACACTTGCCCACAGCCTTGG (SEQ ID NO: |
| BIP | 62218) |
| GAPDH Set 7 | GCCATCCACAGTCTTCTGGGTG (SEQ ID NO: 62219) |
| LoopF | |
| GAPDH Set 7 | CATCCCTGCCTCTACTGGCGC (SEQ ID NO: 62220) |
| LoopB | |
| GAPDH Set 8 | GACCACAGTCCATGCCATC (SEQ ID NO: 62221) |
| F3 | |
| GAPDH Set 8 | GGCCATGCCAGTGAGCT (SEQ ID NO: 62222) |
| B3 | |
| GAPDH Set 8 | TGTTCTGGAGAGCCCCGCGACTGCCACCCAGAAGACT (SEQ ID |
| FIP | NO: 62223) |
| GAPDH Set 8 | CATCCCTGCCTCTACTGGCGCTCCCGTTCAGCTCAGGGAT (SEQ ID |
| BIP | NO: 62224) |
| GAPDH Set 8 | ACGCCACAGTTTCCCGGAGG (SEQ ID NO: 62225) |
| LoopF | |
| GAPDH Set 8 | TGCCAAGGCTGTGGGCAA (SEQ ID NO: 62226) |
| LoopB | |
| GAPDH Set 9 | GCGCTGCCAAGGCTGT (SEQ ID NO: 62227) |
| F3 | |
| GAPDH Set 9 | CCCAGGATGCCCTTGAGG (SEQ ID NO: 62228) |
| B3 | |
| GAPDH Set 9 | GTGGGGACACGGAAGGCCAGGGCAAGGTCATCCCTGA (SEQ ID |
| FIP | NO: 62229) |
| GAPDH Set 9 | TGCCAACGTGTCAGTGGTGGACTGCTTCACCACCTTCTTGA (SEQ |
| BIP | ID NO: 62230) |
| GAPDH Set 9 | CCAGTGAGCTTCCCGTTCAGC (SEQ ID NO: 62231) |
| LoopF | |
| GAPDH Set 9 | TGCCGTCTAGAAAAACCTGCCA (SEQ ID NO: 62232) |
| LoopB | |

TABLE 16

| Name | sgRNA Sequence |
|---|---|
| ORF1ab | GTCTAGAGGACAGAATTTTTCAACGGGTGTGCCAATGGCCACTTTCCAGGTGGCAA |
| Set 1 | AGCCCGTTGAGCTTCTCAAATCTGAGAAGTGGCACTAGTCCCAGATCACAGTATT |
| Guide 1 | (SEQ ID NO: 62233) |
| ORF1ab | GTCTAGAGGACAGAATTTTTCAACGGGTGTGCCAATGGCCACTTTCCAGGTGGCAA |
| Set 1 | AGCCCGTTGAGCTTCTCAAATCTGAGAAGTGGCACGTAGTCCCAGATCACAGTAT |
| Guide 2 | (SEQ ID NO: 62234) |
| ORF1ab | GTCTAGAGGACAGAATTTTTCAACGGGTGTGCCAATGGCCACTTTCCAGGTGGCAA |
| Set 1 | AGCCCGTTGAGCTTCTCAAATCTGAGAAGTGGCACTGTAGTCCCAGATCACAGTA |
| Guide 3 | (SEQ ID NO: 62235) |
| ORF1ab | GTCTAGAGGACAGAATTTTTCAACGGGTGTGCCAATGGCCACTTTCCAGGTGGCAA |
| Set 1 | AGCCCGTTGAGCTTCTCAAATCTGAGAAGTGGCACCTGCTAATACTGTGATCTGG |
| Guide 4 | (SEQ ID NO: 62236) |
| ORF1ab | GTCTAGAGGACAGAATTTTTCAACGGGTGTGCCAATGGCCACTTTCCAGGTGGCAA |
| Set 1 | AGCCCGTTGAGCTTCTCAAATCTGAGAAGTGGCACGCTATGTCAGTCATAGAACA |
| Guide 5 | (SEQ ID NO: 62237) |
| ORF1ab | GTCTAGAGGACAGAATTTTTCAACGGGTGTGCCAATGGCCACTTTCCAGGTGGCAA |
| Set 1 | AGCCCGTTGAGCTTCTCAAATCTGAGAAGTGGCACTTGGCTATGTCAGTCATAGA |
| Guide 6 | (SEQ ID NO: 62238) |
| ORF1ab | GTCTAGAGGACAGAATTTTTCAACGGGTGTGCCAATGGCCACTTTCCAGGTGGCAA |
| Set 1 | AGCCCGTTGAGCTTCTCAAATCTGAGAAGTGGCACCTTGGCTATGTCAGTCATAG |
| Guide 7 | (SEQ ID NO: 62239) |
| ORF1ab | GTCTAGAGGACAGAATTTTTCAACGGGTGTGCCAATGGCCACTTTCCAGGTGGCAA |
| Set 1 | AGCCCGTTGAGCTTCTCAAATCTGAGAAGTGGCACGTTTCTTGGCTATGTCAGTC |
| Guide 8 | (SEQ ID NO: 62240) |
| ORF1ab | GTCTAGAGGACAGAATTTTTCAACGGGTGTGCCAATGGCCACTTTCCAGGTGGCAA |
| Set 1 | AGCCCGTTGAGCTTCTCAAATCTGAGAAGTGGCACGTGTTTGTTCTATGACTGAC |
| Guide 9 | (SEQ ID NO: 62241) |
| ORF1ab | GTCTAGAGGACAGAATTTTTCAACGGGTGTGCCAATGGCCACTTTCCAGGTGGCAA |
| Set 1 | AGCCCGTTGAGCTTCTCAAATCTGAGAAGTGGCACAGTTGGTTTCTTGGCTATGT |
| Guide 10 | (SEQ ID NO: 62242) |
| ORF1ab | GTCTAGAGGACAGAATTTTTCAACGGGTGTGCCAATGGCCACTTTCCAGGTGGCAA |
| Set 1 | AGCCCGTTGAGCTTCTCAAATCTGAGAAGTGGCACCAGTTGGTTTCTTGGCTATG |
| Guide 11 | (SEQ ID NO: 62243) |
| ORF1ab | GTCTAGAGGACAGAATTTTTCAACGGGTGTGCCAATGGCCACTTTCCAGGTGGCAA |
| Set 1 | AGCCCGTTGAGCTTCTCAAATCTGAGAAGTGGCACGTTCTATGACTGACATAGCC |
| Guide 12 | (SEQ ID NO: 62244) |
| ORF1ab | GTCTAGAGGACAGAATTTTTCAACGGGTGTGCCAATGGCCACTTTCCAGGTGGCAA |
| Set 1 | AGCCCGTTGAGCTTCTCAAATCTGAGAAGTGGCACTTCTATGACTGACATAGCCA |
| Guide 13 | (SEQ ID NO: 62245) |
| ORF1ab | GTCTAGAGGACAGAATTTTTCAACGGGTGTGCCAATGGCCACTTTCCAGGTGGCAA |
| Set 1 | AGCCCGTTGAGCTTCTCAAATCTGAGAAGTGGCACTATGACTGACATAGCCAAGA |
| Guide 14 | (SEQ ID NO: 62246) |
| ORF1ab | GTCTAGAGGACAGAATTTTTCAACGGGTGTGCCAATGGCCACTTTCCAGGTGGCAA |
| Set 1 | AGCCCGTTGAGCTTCTCAAATCTGAGAAGTGGCACGTGCACCACTCACTGTCTTT |
| Guide 15 | (SEQ ID NO: 62247) |
| ORF1ab | GTCTAGAGGACAGAATTTTTCAACGGGTGTGCCAATGGCCACTTTCCAGGTGGCAA |
| Set 1 | AGCCCGTTGAGCTTCTCAAATCTGAGAAGTGGCACTGCACCACTCACTGTCTTTT |
| Guide 16 | (SEQ ID NO: 62248) |
| S Set 1 | GTCTAGAGGACAGAATTTTTCAACGGGTGTGCCAATGGCCACTTTCCAGGTGGCAA |
| Guide 1 | AGCCCGTTGAGCTTCTCAAATCTGAGAAGTGGCACTGCACAAATGAGGTCTCTAG |
| | (SEQ ID NO: 62249) |
| S Set 1 | GTCTAGAGGACAGAATTTTTCAACGGGTGTGCCAATGGCCACTTTCCAGGTGGCAA |
| Guide 2 | AGCCCGTTGAGCTTCTCAAATCTGAGAAGTGGCACCCTTGGTGATATTGCTGCTA |
| | (SEQ ID NO: 62250) |
| S Set 1 | GTCTAGAGGACAGAATTTTTCAACGGGTGTGCCAATGGCCACTTTCCAGGTGGCAA |
| Guide 3 | AGCCCGTTGAGCTTCTCAAATCTGAGAAGTGGCACGTGCACAAATGAGGTCTCTA |
| | (SEQ ID NO: 62251) |
| S Set 1 | GTCTAGAGGACAGAATTTTTCAACGGGTGTGCCAATGGCCACTTTCCAGGTGGCAA |
| Guide 4 | AGCCCGTTGAGCTTCTCAAATCTGAGAAGTGGCACTGTGCACAAATGAGGTCTCT |
| | (SEQ ID NO: 62252) |
| S Set 1 | GTCTAGAGGACAGAATTTTTCAACGGGTGTGCCAATGGCCACTTTCCAGGTGGCAA |
| Guide 5 | AGCCCGTTGAGCTTCTCAAATCTGAGAAGTGGCACAACTTTTGTGCACAAATGAG |
| | (SEQ ID NO: 62253) |
| S Set 1 | GTCTAGAGGACAGAATTTTTCAACGGGTGTGCCAATGGCCACTTTCCAGGTGGCAA |
| Guide 6 | AGCCCGTTGAGCTTCTCAAATCTGAGAAGTGGCACGTGCACAAAAGTTTAACGGC |
| | (SEQ ID NO: 62254) |
| S Set 1 | GTCTAGAGGACAGAATTTTTCAACGGGTGTGCCAATGGCCACTTTCCAGGTGGCAA |
| Guide 7 | AGCCCGTTGAGCTTCTCAAATCTGAGAAGTGGCACTGCACAAAAGTTTAACGGCC |
| | (SEQ ID NO: 62255) |
| S Set 1 | GTCTAGAGGACAGAATTTTTCAACGGGTGTGCCAATGGCCACTTTCCAGGTGGCAA |
| Guide 8 | AGCCCGTTGAGCTTCTCAAATCTGAGAAGTGGCACAACGGCCTTACTGTTTTGCC |
| | (SEQ ID NO: 62256) |
| S Set 1 | GTCTAGAGGACAGAATTTTTCAACGGGTGTGCCAATGGCCACTTTCCAGGTGGCAA |
| Guide 9 | AGCCCGTTGAGCTTCTCAAATCTGAGAAGTGGCACACGGCCTTACTG TTTTGCCA |
| | (SEQ ID NO: 62257) |
| S Set 1 | GTCTAGAGGACAGAATTTTTCAACGGGTGTGCCAATGGCCACTTTCCAGGTGGCAA |
| Guide 10 | AGCCCGTTGAGCTTCTCAAATCTGAGAAGTGGCACCTG TTTTGCCACCTTTGCTC |
| | (SEQ ID NO: 62258) |
| S Set 1 | GTCTAGAGGACAGAATTTTTCAACGGGTGTGCCAATGGCCACTTTCCAGGTGGCAA |
| Guide 11 | AGCCCGTTGAGCTTCTCAAATCTGAGAAGTGGCACTGCCACCTTTGCTCACAGAT |
| | (SEQ ID NO: 62259) |
| S Set 1 | GTCTAGAGGACAGAATTTTTCAACGGGTGTGCCAATGGCCACTTTCCAGGTGGCAA |
| Guide 12 | AGCCCGTTGAGCTTCTCAAATCTGAGAAGTGGCACGCCACCTTTGCTCACAGATG |
| | (SEQ ID NO: 62260) |
| S Set 1 | GTCTAGAGGACAGAATTTTTCAACGGGTGTGCCAATGGCCACTTTCCAGGTGGCAA |
| Guide 13 | AGCCCGTTGAGCTTCTCAAATCTGAGAAGTGGCACCCACCTTTGCTCACAGATGA |
| | (SEQ ID NO: 62261) |
| S Set 1 | GTCTAGAGGACAGAATTTTTCAACGGGTGTGCCAATGGCCACTTTCCAGGTGGCAA |
| Guide 14 | AGCCCGTTGAGCTTCTCAAATCTGAGAAGTGGCACGCTCACAGATGAAATGATTG |
| | (SEQ ID NO: 62262) |
| S Set 1 | GTCTAGAGGACAGAATTTTTCAACGGGTGTGCCAATGGCCACTTTCCAGGTGGCAA |
| Guide 15 | AGCCCGTTGAGCTTCTCAAATCTGAGAAGTGGCACCTCACAGATGAAATGATTGC |
| | (SEQ ID NO: 62263) |
| N Set 1 | GTCTAGAGGACAGAATTTTTCAACGGGTGTGCCAATGGCCACTTTCCAGGTGGCAA |
| Guide 1 | AGCCCGTTGAGCTTCTCAAATCTGAGAAGTGGCACGTCTGGTAGCTCTTCGGTAG |
| | (SEQ ID NO: 62264) |
| N Set 1 | GTCTAGAGGACAGAATTTTTCAACGGGTGTGCCAATGGCCACTTTCCAGGTGGCAA |
| Guide 2 | AGCCCGTTGAGCTTCTCAAATCTGAGAAGTGGCACCCGTCACCACCACGAATTCG |
| | (SEQ ID NO: 62265) |
| N Set 1 | GTCTAGAGGACAGAATTTTTCAACGGGTGTGCCAATGGCCACTTTCCAGGTGGCAA |
| Guide 3 | AGCCCGTTGAGCTTCTCAAATCTGAGAAGTGGCACACCGTCACCACCACGAATTC |
| | (SEQ ID NO: 62266) |
| N Set 1 | GTCTAGAGGACAGAATTTTTCAACGGGTGTGCCAATGGCCACTTTCCAGGTGGCAA |
| Guide 4 | AGCCCGTTGAGCTTCTCAAATCTGAGAAGTGGCACTACCGTCACCACCACGAATT |
| | (SEQ ID NO: 62267) |
| N Set 1 | GTCTAGAGGACAGAATTTTTCAACGGGTGTGCCAATGGCCACTTTCCAGGTGGCAA |
| Guide 5 | AGCCCGTTGAGCTTCTCAAATCTGAGAAGTGGCACATTTTACCGTCACCACCACG |
| | (SEQ ID NO: 62268) |
| N Set 1 | GTCTAGAGGACAGAATTTTTCAACGGGTGTGCCAATGGCCACTTTCCAGGTGGCAA |
| Guide 6 | AGCCCGTTGAGCTTCTCAAATCTGAGAAGTGGCACCATTTTACCGTCACCACCAC |
| | (SEQ ID NO: 62269) |
| N Set 1 | GTCTAGAGGACAGAATTTTTCAACGGGTGTGCCAATGGCCACTTTCCAGGTGGCAA |
| Guide 7 | AGCCCGTTGAGCTTCTCAAATCTGAGAAGTGGCACGACTGAGATCTTTCATTT IA |
| | (SEQ ID NO: 62270) |
| N Set 1 | GTCTAGAGGACAGAATTTTTCAACGGGTGTGCCAATGGCCACTTTCCAGGTGGCAA |
| Guide 8 | AGCCCGTTGAGCTTCTCAAATCTGAGAAGTGGCACGTGGTGGTGACGGTAAAATG |
| | (SEQ ID NO: 62271) |
| N Set 1 | GTCTAGAGGACAGAATTTTTCAACGGGTGTGCCAATGGCCACTTTCCAGGTGGCAA |
| Guide 9 | AGCCCGTTGAGCTTCTCAAATCTGAGAAGTGGCACCTAGGTAGTAGAAATACCAT |
| | (SEQ ID NO: 62272) |
| N Set 1 | GTCTAGAGGACAGAATTTTTCAACGGGTGTGCCAATGGCCACTTTCCAGGTGGCAA |
| Guide 10 | AGCCCGTTGAGCTTCTCAAATCTGAGAAGTGGCACTGGCCCAGTTCCTAGGTAGT |
| | (SEQ ID NO: 62273) |
| N Set 1 | GTCTAGAGGACAGAATTTTTCAACGGGTGTGCCAATGGCCACTTTCCAGGTGGCAA |
| Guide 11 | AGCCCGTTGAGCTTCTCAAATCTGAGAAGTGGCACCTACTACCTAGGAACTGGGC |
| | (SEQ ID NO: 62274) |
| N Set 1 | GTCTAGAGGACAGAATTTTTCAACGGGTGTGCCAATGGCCACTTTCCAGGTGGCAA |
| Guide 12 | AGCCCGTTGAGCTTCTCAAATCTGAGAAGTGGCACTACTACCTAGGAACTGGGCC |
| | (SEQ ID NO: 62275) |
| N Set 2 | GTCTAGAGGACAGAATTTTTCAACGGGTGTGCCAATGGCCACTTTCCAGGTGGCAA |
| Guide 1 | AGCCCGTTGAGCTTCTCAAATCTGAGAAGTGGCACCTGGTCCCCAAAATTTCCTT |
| | (SEQ ID NO: 62276) |
| N Set 2 | GTCTAGAGGACAGAATTTTTCAACGGGTGTGCCAATGGCCACTTTCCAGGTGGCAA |
| Guide 2 | AGCCCGTTGAGCTTCTCAAATCTGAGAAGTGGCACGTTCCTGGTCCCCAAAATTT |
| | (SEQ ID NO: 62277) |
| N Set 2 | GTCTAGAGGACAGAATTTTTCAACGGGTGTGCCAATGGCCACTTTCCAGGTGGCAA |
| Guide 3 | AGCCCGTTGAGCTTCTCAAATCTGAGAAGTGGCACTCTGATTAGTTCCTGGTCCC |
| | (SEQ ID NO: 62278) |
| N Set 2 | GTCTAGAGGACAGAATTTTTCAACGGGTGTGCCAATGGCCACTTTCCAGGTGGCAA |
| Guide 4 | AGCCCGTTGAGCTTCTCAAATCTGAGAAGTGGCACCTTGTCTGATTAGTTCCTGG |
| | (SEQ ID NO: 62279) |
| N Set 2 | GTCTAGAGGACAGAATTTTTCAACGGGTGTGCCAATGGCCACTTTCCAGGTGGCAA |
| Guide 5 | AGCCCGTTGAGCTTCTCAAATCTGAGAAGTGGCACTAATCAGTTCCTTGTCTGAT |
| | (SEQ ID NO: 62280) |
| N Set 2 | GTCTAGAGGACAGAATTTTTCAACGGGTGTGCCAATGGCCACTTTCCAGGTGGCAA |
| Guide 6 | AGCCCGTTGAGCTTCTCAAATCTGAGAAGTGGCACGTAATCAGTTCCTTGTCTGA |
| | (SEQ ID NO: 62281) |
| N Set 2 | GTCTAGAGGACAGAATTTTTCAACGGGTGTGCCAATGGCCACTTTCCAGGTGGCAA |
| Guide 7 | AGCCCGTTGAGCTTCTCAAATCTGAGAAGTGGCACCGGCCAATGTTTGTAATCAG |
| | (SEQ ID NO: 62282) |
| N Set 2 | GTCTAGAGGACAGAATTTTTCAACGGGTGTGCCAATGGCCACTTTCCAGGTGGCAA |
| Guide 8 | AGCCCGTTGAGCTTCTCAAATCTGAGAAGTGGCACGCGGCCAATGTTTGTAATCA |
| | (SEQ ID NO: 62283) |
| N Set 2 | GTCTAGAGGACAGAATTTTTCAACGGGTGTGCCAATGGCCACTTTCCAGGTGGCAA |
| Guide 9 | AGCCCGTTGAGCTTCTCAAATCTGAGAAGTGGCACTGCAATTTGCGGCCAATGTT |
| | (SEQ ID NO: 62284) |
| N Set 2 | GTCTAGAGGACAGAATTTTTCAACGGGTGTGCCAATGGCCACTTTCCAGGTGGCAA |
| Guide 10 | AGCCCGTTGAGCTTCTCAAATCTGAGAAGTGGCACGCCGCAAATTGCACAATTTG |
| | (SEQ ID NO: 62285) |
| N Set 2 | GTCTAGAGGACAGAATTTTTCAACGGGTGTGCCAATGGCCACTTTCCAGGTGGCAA |
| Guide 11 | AGCCCGTTGAGCTTCTCAAATCTGAGAAGTGGCACCGAAGAACGCTGAAGCGCTG |
| | (SEQ ID NO: 62286) |
| N Set 2 | GTCTAGAGGACAGAATTTTTCAACGGGTGTGCCAATGGCCACTTTCCAGGTGGCAA |
| Guide 12 | AGCCCGTTGAGCTTCTCAAATCTGAGAAGTGGCACCACAATTTGCCCCCAGCGCT |
| | (SEQ ID NO: 62287) |
| N Set 2 | GTCTAGAGGACAGAATTTTTCAACGGGTGTGCCAATGGCCACTTTCCAGGTGGCAA |
| Guide 13 | AGCCCGTTGAGCTTCTCAAATCTGAGAAGTGGCACGCCCCCAGCGCTTCAGCGTT |
| | (SEQ ID NO: 62288) |
| N Set 2 | GTCTAGAGGACAGAATTTTTCAACGGGTGTGCCAATGGCCACTTTCCAGGTGGCAA |
| Guide 14 | AGCCCGTTGAGCTTCTCAAATCTGAGAAGTGGCACCCCCCAGCGCTTCAGCGTTC |
| | (SEQ ID NO: 62289) |
| N Set 2 | GTCTAGAGGACAGAATTTTTCAACGGGTGTGCCAATGGCCACTTTCCAGGTGGCAA |
| Guide 15 | AGCCCGTTGAGCTTCTCAAATCTGAGAAGTGGCACAGCGTTCTTCGGAATGTCGC |
| | (SEQ ID NO: 62290) |
| N Set 2 | GTCTAGAGGACAGAATTTTTCAACGGGTGTGCCAATGGCCACTTTCCAGGTGGCAA |
| Guide 16 | AGCCCGTTGAGCTTCTCAAATCTGAGAAGTGGCACTTCGGAATGTCGCGCATTGG |
| | (SEQ ID NO: 62291) |
| N Set 2 | GTCTAGAGGACAGAATTTTTCAACGGGTGTGCCAATGGCCACTTTCCAGGTGGCAA |
| Guide 17 | AGCCCGTTGAGCTTCTCAAATCTGAGAAGTGGCACGGAATGTCGCGCATTGGCAT |
| | (SEQ ID NO: 62292) |
| N Set 2 | GTCTAGAGGACAGAATTTTTCAACGGGTGTGCCAATGGCCACTTTCCAGGTGGCAA |
| Guide 18 | AGCCCGTTGAGCTTCTCAAATCTGAGAAGTGGCACGCATGGAAGTCACACCTTCG |
| | (SEQ ID NO: 62292) |

[0692] Various modifications and variations of the described methods, pharmaceutical compositions, and kits of the invention will be apparent to those skilled in the art without departing from the scope and spirit of the invention. Although the invention has been described in connection with specific embodiments, it will be understood that it is capable of further modifications and that the invention as claimed should not be unduly limited to such specific embodiments. Indeed, various modifications of the described modes for carrying out the invention that are obvious to those skilled in the art are intended to be within the scope of the invention. This application is intended to cover any variations, uses, or adaptations of the invention following, in general, the principles of the invention and including such departures from the present disclosure come within known customary practice within the art to which the invention pertains and may be applied to the essential features hereinbefore set forth.

1. A composition for detecting the presence of a target polynucleotide in a sample, comprising isothermal amplification reagents for amplifying the target polynucleotide, and an extraction-free solution for isolating polynucleotides from a cell or virus particle.

2. The composition of claim 1, wherein the isothermal amplification reagents are LAMP reagents comprising F3, B3, FIP, BIP, Loop Forward and Loop Reverse primers.

3. The composition of claim 2, further comprising oligonucleotide strand displacement (OSD) probes.

4. The compositions of claim 3, wherein the OSD probes are selected from Table 11.

5. The composition of claim 4 wherein the OSD probes are provided at a concentration of 50 nM to 175 nM, preferably 75 nM to 150 nM.

6. The composition of claim 1, wherein the target polynucleotide is a viral polynucleotide or bacterial polynucleotide.

7. The composition of claim 6, wherein the viral polynucleotide is an influenza, adenovirus, respiratory syncytial virus, papillomavirus, herpesvirus, human immunodeficiency virus, hepatits, rhinovirus.

8. The composition of claim 7, wherein the LAMP primers are selected from SEQ ID NOs: 1-40,499 and 61,983-61,988, or Table 15.

9. The composition of claim 6, wherein the viral polynucleotide is a coronavirus polynucleotide.

10. The composition of claim 9, wherein the coronavirus polynucleotide is SARS-Cov-2.

11. The composition of claim 10, wherein the F3 primer is selected from Table 5 or Table 10.

12. The composition of claim 1, wherein the bacterial polynucleotide is Neisseria gonnorrhoea or Streptococcus pyogenes.

13. The composition of claim 1, further comprising one or more additives, wherein the additive is L-proline, L-histidine, b-alanine, L-serine, urea, acetamide, 4-aminobutyric acid, polyethylene glycol, polypropylene glycol, polyvinylpyrrolidone K, 6-O-a-D-maltosyl-b-cyclodextrin, (2-hydroxypropyl)-b-cyclodextrin, a-cyclodextrin, b-cyclodextrin, methyl-b-cyclodextrin, glycine, proline, taurine, or a combination thereof.

14. The composition of claim 13, wherein the additive is glycine, taurine, and/or proline.

15. The composition of claim 13, further comprising polynucleotide bind beads for the capture of nucleic acids in a sample.

16. A method of detecting a target nucleic acid in a sample comprising:
distributing a sample or set of samples into one or more individual discrete volumes each individual discrete volume comprising a composition according to claim 1;
incubating the sample or set of samples at conditions sufficient to allow extraction of target polynucleotides from the sample,
incubating the sample at an isothermal temperature to generate amplicons of target polynucleotides, wherein isolation of polynucleotides is not required between the extraction or amplification step; and
detecting the one or more amplicons, thereby indicated the presence of one or more target polynucleotides in the sample.

17. The method of claim 16, wherein the amplification reagents comprise LAMP primers and the isothermal incubation temperature is between 55° C. and 65° C.

18. The method of claim 16, wherein detection of target polynucleotides occurs in one hour or less.

19. A composition for detecting the presence of a target polynucleotide in a sample, comprising:
an extraction-free polynucleotide isolation solution;
one or more Cas proteins possessing collateral activity;
at least one guide polynucleotide comprising a sequence capable of binding a target polynucleotide and designed to form a complex with the one or more Cas proteins;
isothermal amplification reagents; and
a detection construct comprising a polynucleotide component, wherein the Cas protein exhibits collateral nuclease activity and cleaves the polynucleotide component of the detection construct once activated by the target sequence;

20. The composition of claim 19, wherein the one or more Cas proteins is a Type V Cas, a Type VI Cas, or a combination thereof.

21. The composition of claim 19, wherein the one or more Cas proteins is thermostable exhibiting nuclease activity at temperature of at least 50° C.

22. The composition of claim 19, wherein the Cas is a Cas12b.

23. The composition of claim 22, wherein the Cas12b is selected from Table 2A or Table 2B.

24. (canceled)

25. (canceled)

26. (canceled)

27. (canceled)

28. The composition of claim 19, wherein the guide polynucleotide is designed to bind to a target nucleic acid of a microbe.

29. The composition of claim 28, wherein the microbe is selected from human papillomavirus, hepatitis, adenovirus, coronavirus, herpesvirus, human immunodeficiency virus, influenza virus, rhinovirus, Neisseria gonorrhoeae, Respiratory syncytial virus, coronavirus, or Streptococcus pyogenes.

30. The composition of claim 19, wherein the isothermal amplification reagents are LAMP amplification reagents.

31. (canceled)

32. (canceled)

33. The composition of claim 29, wherein the guide polynucleotide comprises a spacer specific for the N gene or S gene of SARS-CoV-2.

34. The composition of claim 19, further comprising one or more additives to increase reaction specificity or kinetics.

35. The composition of claim 19, further comprising polynucleotide binding beads.

36. A method for detecting coronavirus in a sample, the method comprising:
distributing a sample or set of samples into individual discrete volumes, each individual discrete volume comprising a composition of claim 19;
incubating the sample or set of samples at conditions sufficient to allow lysis of a cell or virus via reagents of the extraction-free solution;
amplifying the target polynucleotides using isothermal amplification, wherein isolation of target polynucleotides between the incubating and amplifying steps is not required; and
detecting amplified target polynucleotides by binding of the CRISPR-Cas complex to the target polynucleotides, wherein binding of the target polynucleotides activates cleavage of the detection construct thereby generating a detectable signal.

37. The method of claim 36, wherein the extraction-free solution is mixed with a sample at a concentration of about 1:2 to 2:1 sample:extraction solution.

38. The method of claim 36, wherein the incubating step is performed at a temperature of about 20° C. to 60° C. for about 60 minutes, or 95° C. for about 5 to 10 minutes.

39. The method of claim 36, wherein the amplifying and detecting steps are performed at about 55° C. to about 65° C., about 59° C. to 61° C. or about 60° C. for 50 to 70 minutes.

40. The method of claim 39, wherein the target polynucleotide is detected in one hour or less.

41. The method of claim 36, wherein the steps of extracting, amplifying incubating, activating and detecting are all performed in the same individual discrete volume.

42.-59. (canceled)

The application's sequence listing, which the Patent Office published only in electronic form, follows.

SEQUENCE LISTING (62293 sequences)

SEQ ID NO: 1 - DNA, 42 bp, Artificial Sequence
  Synthetic
acctgttccacaagtactacaacatacctgaagaggaggagc

SEQ ID NO: 2 - DNA, 47 bp, Artificial Sequence
  Synthetic
tgctgcagctgtttcatgatttactaactcatcatttaagtttggag

SEQ ID NO: 3 - DNA, 48 bp, Artificial Sequence
  Synthetic
gcagagtagcatcatctagaaaacctgtatctttcatgaataggcaaa

SEQ ID NO: 4 - DNA, 44 bp, Artificial Sequence
  Synthetic
tggcgagcataataatatagcacattgctaaaacagtggaagca

SEQ ID NO: 5 - DNA, 39 bp, Artificial Sequence
  Synthetic
ggtggggaaacggagtcgcgcactccactatttcctccc

SEQ ID NO: 6 - DNA, 39 bp, Artificial Sequence
  Synthetic
ataccccagcaccgaccaccaccagagaagctcccagaa

SEQ ID NO: 7 - DNA, 43 bp, Artificial Sequence
  Synthetic
tgagcctgattttgaaatgctacaatggggaagaggaagatgt

SEQ ID NO: 8 - DNA, 47 bp, Artificial Sequence
  Synthetic
ggacctcccaaagtctctaattctacctaatgtaaatgtgtttgtgg

SEQ ID NO: 9 - DNA, 38 bp, Artificial Sequence
  Synthetic
aatgcctcatctggagcagccgcctttacggatgacat

SEQ ID NO: 10 - DNA, 44 bp, Artificial Sequence
  Synthetic
gggttaacaatagtgtgtggcacaggctggagaaatagaaatgc

SEQ ID NO: 11 - DNA, 43 bp, Artificial Sequence
  Synthetic
ggatttcctgttaatccaatgcctatgtggaggttggaaggta

SEQ ID NO: 12 - DNA, 43 bp, Artificial Sequence
  Synthetic
ggccatttaccttatttactggtgaagcgggtattgatggtga

SEQ ID NO: 13 - DNA, 41 bp, Artificial Sequence
  Synthetic
ccagaatgcatattgtccccagaaatgtcctccagatgctg

SEQ ID NO: 14 - DNA, 46 bp, Artificial Sequence
  Synthetic
gtctgtaactaagtcctaaggatgccatggggtcaatatttttgcc

SEQ ID NO: 15 - DNA, 41 bp, Artificial Sequence
  Synthetic
aatgcctgcaataagcacgctgtattgttcaacaacagctg

SEQ ID NO: 16 - DNA, 49 bp, Artificial Sequence
  Synthetic
ggacaacaaagagaaagtccttcgaagacatttgctattagacttttgg

SEQ ID NO: 17 - DNA, 42 bp, Artificial Sequence
  Synthetic
actttcgttttagggcagctattgggaaattccctggcattg

SEQ ID NO: 18 - DNA, 50 bp, Artificial Sequence
  Synthetic
gcgccaagctttctaaagaaagattatgcattaccatttgataatgaagg

SEQ ID NO: 19 - DNA, 39 bp, Artificial Sequence
  Synthetic
gcgtgtcttggaggtcgaggaaccccagaagactccgtg

SEQ ID NO: 20 - DNA, 43 bp, Artificial Sequence
  Synthetic
ccaagtctagacagacctgttgtttgatttgtcccgtctccag

SEQ ID NO: 21 - DNA, 43 bp, Artificial Sequence
  Synthetic
ctccaggatttactctactaggagtggtctcgggattggtact

SEQ ID NO: 22 - DNA, 41 bp, Artificial Sequence
  Synthetic
acggttggatgtccactagcaggttgtaacaacacctgatc

SEQ ID NO: 23 - DNA, 43 bp, Artificial Sequence
  Synthetic
ctctggtgtgtaatgtctccaaagtgcacattttacaggtgac

SEQ ID NO: 24 - DNA, 40 bp, Artificial Sequence
  Synthetic
agcaaaatccagatcgggcgtgaccctgatgtaacaatga

SEQ ID NO: 25 - DNA, 46 bp, Artificial Sequence
  Synthetic
tcgcctatgacttggatgaagtatgtactcctctagaaccttatgc

SEQ ID NO: 26 - DNA, 44 bp, Artificial Sequence
  Synthetic
ccgaataggaaagtatgggtgaccttccatatacttccacgctg

SEQ ID NO: 27 - DNA, 42 bp, Artificial Sequence
  Synthetic
ggtctaaagatacgtcctggcgtaggagacacagaaaatccc

SEQ ID NO: 28 - DNA, 45 bp, Artificial Sequence
  Synthetic
ggtgttccaaagtacacatgtgataataggagctcaagacaatca

SEQ ID NO: 29 - DNA, 40 bp, Artificial Sequence
  Synthetic
ggtcctggaggctgtacgacacctcccctgcgaggaacca

SEQ ID NO: 30 - DNA, 40 bp, Artificial Sequence
  Synthetic
gactccgccaacgatctgccaccaaaagaaacaccgtccg

SEQ ID NO: 31 - DNA, 42 bp, Artificial Sequence
  Synthetic
gcgcctaggacagggatgtacccctcggtaaggtgatcgaca

SEQ ID NO: 32 - DNA, 42 bp, Artificial Sequence
  Synthetic
cactggttcccaacacctgctaaacagacaacgccatcctac

SEQ ID NO: 33 - DNA, 34 bp, Artificial Sequence
  Synthetic
ccattgacaaggccggcgcacgtcaccggccaca

SEQ ID NO: 34 - DNA, 42 bp, Artificial Sequence
  Synthetic
cctctcgggacagccactagaaatgactctttgcagacaggg

SEQ ID NO: 35 - DNA, 42 bp, Artificial Sequence
  Synthetic
gacgtatcttgcacggaggaccgctcatggatgaacacaacg

SEQ ID NO: 36 - DNA, 37 bp, Artificial Sequence
  Synthetic
ggggacatgtccaccctgtcttgcaattggacgcggg

SEQ ID NO: 37 - DNA, 40 bp, Artificial Sequence
  Synthetic
gccgcgttgaggtggatcaatgatgatgcttatggcccag

SEQ ID NO: 38 - DNA, 42 bp, Artificial Sequence
  Synthetic
cacgtttggagtgctgcttcacagcccttattctctggtggg

SEQ ID NO: 39 - DNA, 35 bp, Artificial Sequence
  Synthetic
aaatcccgtaggccgccggcgctggaccggcactt

SEQ ID NO: 40 - DNA, 38 bp, Artificial Sequence
  Synthetic
aacacctgcacctcgccggctacccttgtcgtgagcct

SEQ ID NO: 41 - DNA, 39 bp, Artificial Sequence
  Synthetic
acaagacaggccctcccgagtacagcgtccctactgtcc

SEQ ID NO: 42 - DNA, 42 bp, Artificial Sequence
  Synthetic
cggtgcgcacacttggatcaatgcttaatccatcagtcgcgg

SEQ ID NO: 43 - DNA, 39 bp, Artificial Sequence
  Synthetic
cccccttgatgtgttgcagggcttggcaacgatggggaa

SEQ ID NO: 44 - DNA, 41 bp, Artificial Sequence
  Synthetic
gcgagacagaatcttgcgggacgacttctccttggacccca

SEQ ID NO: 45 - DNA, 40 bp, Artificial Sequence
  Synthetic
aaacctctctgtcgggggcctactggcagtgttgttgtgg

SEQ ID NO: 46 - DNA, 41 bp, Artificial Sequence
  Synthetic
gggggctagtaactgaggcggactgccaggtaatccaactg

SEQ ID NO: 47 - DNA, 42 bp, Artificial Sequence
  Synthetic
cggcacaaacaactcccacaacctggcaaacctcttacctgc

SEQ ID NO: 48 - DNA, 41 bp, Artificial Sequence
  Synthetic
tccctggaaggctgggaagtactgcatggtcctatccgact

SEQ ID NO: 49 - DNA, 40 bp, Artificial Sequence
  Synthetic
acacgggcacttgaggtccttcgtcacaatgaccagcatt

SEQ ID NO: 50 - DNA, 37 bp, Artificial Sequence
  Synthetic
acaggaggggtctgcgcagcgagtacgcacctcccca

SEQ ID NO: 51 - DNA, 40 bp, Artificial Sequence
  Synthetic
tgggcgcaagagatctgacttcctgcccactcagccagat

SEQ ID NO: 52 - DNA, 42 bp, Artificial Sequence
  Synthetic
gctctcagtgcggatgtcttgtggcttctcatatgacacccg

SEQ ID NO: 53 - DNA, 35 bp, Artificial Sequence
  Synthetic
gtcatcgccgcagaccaggaaagcggctgcagcag

SEQ ID NO: 54 - DNA, 42 bp, Artificial Sequence
  Synthetic
cgcctgcaagtggagtgagttttgcggtctctacctcttcaa

SEQ ID NO: 55 - DNA, 48 bp, Artificial Sequence
  Synthetic
gctgattttcctcctgttattgctgatttctaaaaaatgttgctcctg

SEQ ID NO: 56 - DNA, 47 bp, Artificial Sequence
  Synthetic
agtctccagctgctttcatttgcttctagtttgaaaaaatcagaagg

SEQ ID NO: 57 - DNA, 42 bp, Artificial Sequence
  Synthetic
gtgtctattgtgtagcctgttcccaacattcccatacaccgg

SEQ ID NO: 58 - DNA, 44 bp, Artificial Sequence
  Synthetic
catggcattctgtgaccctgctttggatagaatggatgaagaac

SEQ ID NO: 59 - DNA, 44 bp, Artificial Sequence
  Synthetic
cgtttccacctacgggtaaacaaacttggctaaaaatatctgtg

SEQ ID NO: 60 - DNA, 43 bp, Artificial Sequence
  Synthetic
cccatcccattgttgatcatattgtgagtcgctggagtgaatg

SEQ ID NO: 61 - DNA, 47 bp, Artificial Sequence
  Synthetic
ttctggaatatgcaggtttctcaaaagagatggtctattagtagcag

SEQ ID NO: 62 - DNA, 47 bp, Artificial Sequence
  Synthetic
aaggttgcaacacttagcgtagaaaggaacagatctatactaaacac

SEQ ID NO: 63 - DNA, 40 bp, Artificial Sequence
  Synthetic
gcatatctggtcccccctcaccaaaagcataacaatggcc

SEQ ID NO: 64 - DNA, 45 bp, Artificial Sequence
  Synthetic
actgtatctcgggttttctttctccccagaatgtgataggcttct

SEQ ID NO: 65 - DNA, 41 bp, Artificial Sequence
  Synthetic
cgcttgtattgttgtacgatcctgtctggctgacacgtaaa

SEQ ID NO: 66 - DNA, 45 bp, Artificial Sequence
  Synthetic
atccctgaactacctcttttcgatgggacaccataaattttgaga

SEQ ID NO: 67 - DNA, 45 bp, Artificial Sequence
  Synthetic
tgccatcctccttctataaaaccagttccccagattgaatcaaga

SEQ ID NO: 68 - DNA, 43 bp, Artificial Sequence
  Synthetic
tttgtggtgtggtgtcattgtggcaaataaatcaattcagccg

SEQ ID NO: 69 - DNA, 47 bp, Artificial Sequence
  Synthetic
aacttgactttgctaagagccatttaaggagagacataagatgaaag

SEQ ID NO: 70 - DNA, 46 bp, Artificial Sequence
  Synthetic
tgggtagtaagcctttataacgtttggatagatctggtcttacagc

SEQ ID NO: 71 - DNA, 42 bp, Artificial Sequence
  Synthetic
cccattatgcctaggccagcagcatcattattgtctttgact

SEQ ID NO: 72 - DNA, 45 bp, Artificial Sequence
  Synthetic
aaccatggcatctcttataccatcacacattagtagtagcgagtg

SEQ ID NO: 73 - DNA, 48 bp, Artificial Sequence
  Synthetic
gtttgtttgttggtcttctgttggttgatttctgatcagttaccaatc

SEQ ID NO: 74 - DNA, 50 bp, Artificial Sequence
  Synthetic
tgggtgtggatatttgtttcactagccagcagatttacttataaaagaac

SEQ ID NO: 75 - DNA, 48 bp, Artificial Sequence
  Synthetic
cctgagtaagggatgatttttgcatacacacttgaaaatataacaacc

SEQ ID NO: 76 - DNA, 46 bp, Artificial Sequence
  Synthetic
ctgatgaacaatgacttgggatgattgtggttcaactaatcaaaca

SEQ ID NO: 77 - DNA, 40 bp, Artificial Sequence
  Synthetic
tgattgagagtgtcccaggtctccaaaaacaaggaccaac

SEQ ID NO: 78 - DNA, 43 bp, Artificial Sequence
  Synthetic
gcaaggtacaaagttgaacacttcaagcccaccacaaaacaac

SEQ ID NO: 79 - DNA, 43 bp, Artificial Sequence
  Synthetic
ttcccttttgacttgtgtgttctatcagaactacactgctcac

SEQ ID NO: 80 - DNA, 49 bp, Artificial Sequence
  Synthetic
gcatttgttttgaggattggcaaccaaatcaaccagaatcaaaatcaac

SEQ ID NO: 81 - DNA, 45 bp, Artificial Sequence
  Synthetic
actccatttgataagctgactacagctagaaggggaagtgaacaa

SEQ ID NO: 82 - DNA, 42 bp, Artificial Sequence
  Synthetic
actgatcctgcattgtcacagtaaagggtccaacatctgttt

SEQ ID NO: 83 - DNA, 42 bp, Artificial Sequence
  Synthetic
accactcagttgatccttgcttaactgctcctatactgcaag

SEQ ID NO: 84 - DNA, 39 bp, Artificial Sequence
  Synthetic
cactccaactacaccgagggaaataagtggagctgcaga

SEQ ID NO: 85 - DNA, 46 bp, Artificial Sequence
  Synthetic
ctgagttctctttctttgcctgtatcaaagttatcttaacaaccct

SEQ ID NO: 86 - DNA, 46 bp, Artificial Sequence
  Synthetic
tctgtagtggtatagtgttgtgcacaatagactggcagttactgag

SEQ ID NO: 87 - DNA, 46 bp, Artificial Sequence
  Synthetic
ggcgatgcaaatagttaacacttaacttagcataggaattcttggg

SEQ ID NO: 88 - DNA, 42 bp, Artificial Sequence
  Synthetic
ggaggctgcacgacactcatacatcactcccctgtgaggaac

SEQ ID NO: 89 - DNA, 39 bp, Artificial Sequence
  Synthetic
acgatctgaccgccacccgaccaaacgtaacaccaaccg

SEQ ID NO: 90 - DNA, 39 bp, Artificial Sequence
  Synthetic
tggcagcgcctccaagaggcatcgatacccttacgtgcg

SEQ ID NO: 91 - DNA, 35 bp, Artificial Sequence
  Synthetic
tcgaggcgttaccctcgcggccgatgccatcctgc

SEQ ID NO: 92 - DNA, 40 bp, Artificial Sequence
  Synthetic
ttgtgggatccggagcagcttgatgatgaactggtcccct

SEQ ID NO: 93 - DNA, 41 bp, Artificial Sequence
  Synthetic
tgggcaaaatcggtaaggcgtttcaactcttcaggctgtcc

SEQ ID NO: 94 - DNA, 42 bp, Artificial Sequence
  Synthetic
tccgcacactttggtgaatccatccttaacaacaccaggcca

SEQ ID NO: 95 - DNA, 38 bp, Artificial Sequence
  Synthetic
cggacctgtccctgtcttccaggcacaggctggaagcg

SEQ ID NO: 96 - DNA, 37 bp, Artificial Sequence
  Synthetic
acaagaccgtgcgtcccggcggctttggagaacctcg

SEQ ID NO: 97 - DNA, 40 bp, Artificial Sequence
  Synthetic
ggtccgaagatggccaggagttgtgtagtacacccgaccc

SEQ ID NO: 98 - DNA, 39 bp, Artificial Sequence
  Synthetic
cgggagaagacgactggttccaagactgggcgcacaacg

SEQ ID NO: 99 - DNA, 42 bp, Artificial Sequence
  Synthetic
cccgtggtagacagtccagcataactgctacccaaaccttcc

SEQ ID NO: 100 - DNA, 38 bp, Artificial Sequence
  Synthetic
aaagtccaccgctttagccactcacgccgtgggcctat

SEQ ID NO: 101 - DNA, 42 bp, Artificial Sequence
  Synthetic
aggaacttgccgtaggtggagtcctaatatcaggaccggggt

SEQ ID NO: 102 - DNA, 40 bp, Artificial Sequence
  Synthetic
cgagctcgtcgcacttcttctggtgatcaaggggggaaga

SEQ ID NO: 103 - DNA, 40 bp, Artificial Sequence
  Synthetic
ggacgagtcgaacatgccggagcaggactggcagggggaa

SEQ ID NO: 104 - DNA, 38 bp, Artificial Sequence
  Synthetic
gggtgttggcccatggaggccatcgtgggaccagatgt

SEQ ID NO: 105 - DNA, 41 bp, Artificial Sequence
  Synthetic
tgcttgaactgctcagcgagcgatggaagagtgctctcagc

SEQ ID NO: 106 - DNA, 39 bp, Artificial Sequence
  Synthetic
aaggcagtagcggcaccggtcaacatattgggggggtgg

SEQ ID NO: 107 - DNA, 37 bp, Artificial Sequence
  Synthetic
tgcatcgctctccggcacgctaatagccttcgcctcc

SEQ ID NO: 108 - DNA, 40 bp, Artificial Sequence
  Synthetic
gtcctaggaccgacgatcctcattatgcacactcgctgcc

SEQ ID NO: 109 - DNA, 40 bp, Artificial Sequence
  Synthetic
cgggtactcgtggagtcctactgcgcctacacaggtttgc

SEQ ID NO: 110 - DNA, 38 bp, Artificial Sequence
  Synthetic
agcggatcgaaggagtccagaacaggagatgggcggca

SEQ ID NO: 111 - DNA, 40 bp, Artificial Sequence
  Synthetic
gccggaagttgaggagctgccctatctactgccttggccg

SEQ ID NO: 112 - DNA, 40 bp, Artificial Sequence
  Synthetic
ctttggcaagcactgcgtgaagcaactcgttgctacgcca

SEQ ID NO: 113 - DNA, 41 bp, Artificial Sequence
  Synthetic
acacgatgagacgagctggctgaacgaggttttctgcgttc

SEQ ID NO: 114 - DNA, 42 bp, Artificial Sequence
  Synthetic
gcccccaacataaagcctctcaaccaatgttgtgacctggac

SEQ ID NO: 115 - DNA, 41 bp, Artificial Sequence
  Synthetic
ggggttgtagggtcacgggtaaacatcatgctcctccaacg

SEQ ID NO: 116 - DNA, 42 bp, Artificial Sequence
  Synthetic
tgcggccaccctattgatttcattcaaagactccatggcctc

SEQ ID NO: 117 - DNA, 43 bp, Artificial Sequence
  Synthetic
cccatattctttcattgccttttccactttgtgcgacaatgct

SEQ ID NO: 118 - DNA, 43 bp, Artificial Sequence
  Synthetic
ggagaaatttaggcttctcaactccgaacaatggcctggacag

SEQ ID NO: 119 - DNA, 43 bp, Artificial Sequence
  Synthetic
tgtctttggaattttctcctcgtttattacctcctggcttgga

SEQ ID NO: 120 - DNA, 44 bp, Artificial Sequence
  Synthetic
cttgcaatgtgctcaattggagttgacagattcaagttggattg

SEQ ID NO: 121 - DNA, 50 bp, Artificial Sequence
  Synthetic
tcggatcagtaagagagaattccatttataaaaggaagatcccatttgag

SEQ ID NO: 122 - DNA, 44 bp, Artificial Sequence
  Synthetic
gtctttttctttgacagaagactcggcccttttcaatcccttca

SEQ ID NO: 123 - DNA, 41 bp, Artificial Sequence
  Synthetic
gagggccttccactttctgctattgaggaattgtcaaggga

SEQ ID NO: 124 - DNA, 45 bp, Artificial Sequence
  Synthetic
ccaagcgaatctctgtagagttttactcatcggaggacttgaatg

SEQ ID NO: 125 - DNA, 43 bp, Artificial Sequence
  Synthetic
ggggttcagtagcagacattgcgaaaccggtacatataaaagc

SEQ ID NO: 126 - DNA, 41 bp, Artificial Sequence
  Synthetic
caggtcaaacggttctggttttaatgcatggaaatgtggct

SEQ ID NO: 127 - DNA, 43 bp, Artificial Sequence
  Synthetic
gcttccacaaaaaaccatccattaccatggcggataaccaagg

SEQ ID NO: 128 - DNA, 42 bp, Artificial Sequence
  Synthetic
ccgggggcttaggtccttttctggcagtccgtatgtaagtcc

SEQ ID NO: 129 - DNA, 42 bp, Artificial Sequence
  Synthetic
aggattgccatctaatgcattgctgctacaacacaatgctgg

SEQ ID NO: 130 - DNA, 40 bp, Artificial Sequence
  Synthetic
gtgttgctagggtctccattctgtcacgtttagcgctgaa

SEQ ID NO: 131 - DNA, 41 bp, Artificial Sequence
  Synthetic
gttcggtgctgtatactgtctttgcacaaggccattgaact

SEQ ID NO: 132 - DNA, 47 bp, Artificial Sequence
  Synthetic
ccacataatacactttgtgttctgcaggtgtgcagtaatatagatgc

SEQ ID NO: 133 - DNA, 44 bp, Artificial Sequence
  Synthetic
gggttaccctcatatacaggattgtcaggaccctgcctttttac

SEQ ID NO: 134 - DNA, 41 bp, Artificial Sequence
  Synthetic
aggacgtgcgggaacaaatgatacacctatacccacatcct

SEQ ID NO: 135 - DNA, 43 bp, Artificial Sequence
  Synthetic
gaggtagctacatcaaggggtaggctatggattttaaaaccct

SEQ ID NO: 136 - DNA, 44 bp, Artificial Sequence
  Synthetic
cccgttgtaaccagtatggcttataactcctagtggctctatgg

SEQ ID NO: 137 - DNA, 48 bp, Artificial Sequence
  Synthetic
gggttataccaaagttccagtcctcagatgttatggcctatattcatg

SEQ ID NO: 138 - DNA, 35 bp, Artificial Sequence
  Synthetic
tcaggaggcaccacaggcgccgccgccttacctga

SEQ ID NO: 139 - DNA, 39 bp, Artificial Sequence
  Synthetic
acgagcccccaactgtgtactacaactctgctggctcgg

SEQ ID NO: 140 - DNA, 40 bp, Artificial Sequence
  Synthetic
ctgggcttgggtttggatgagtccctcctagccagcctac

SEQ ID NO: 141 - DNA, 39 bp, Artificial Sequence
  Synthetic
tggcagtggggtcaaactgcggaagcccccagtttatgc

SEQ ID NO: 142 - DNA, 40 bp, Artificial Sequence
  Synthetic
gtctttggcactccctggcaaaggcgagaataccagcaac

SEQ ID NO: 143 - DNA, 38 bp, Artificial Sequence
  Synthetic
ggctgatttggggggggtttcctggacccccaaagaca

SEQ ID NO: 144 - DNA, 42 bp, Artificial Sequence
  Synthetic
ggcaagattacaggcggcctttggtcgtgatgccttacaaca

SEQ ID NO: 145 - DNA, 39 bp, Artificial Sequence
  Synthetic
tcgccaggttccattggctttggaggcaggccatatcga

SEQ ID NO: 146 - DNA, 40 bp, Artificial Sequence
  Synthetic
gcatttcgaacagggtgggactccggcactagatacgcct

SEQ ID NO: 147 - DNA, 40 bp, Artificial Sequence
  Synthetic
gctggcgtaaggtaggagttccctgggcgctacctgaact

SEQ ID NO: 148 - DNA, 39 bp, Artificial Sequence
  Synthetic
tggggtaggggggcatgtagccactgtggtgttccagtc

SEQ ID NO: 149 - DNA, 40 bp, Artificial Sequence
  Synthetic
gcgaacgtggtgcaaatagacgaaggcaggtcctctcagg

SEQ ID NO: 150 - DNA, 46 bp, Artificial Sequence
  Synthetic
acacatattgaggaagtcttgggaataggcaagcctagctacataa

SEQ ID NO: 151 - DNA, 40 bp, Artificial Sequence
  Synthetic
gcgcttaccgggatgagagcatggaaaggaccacaggagg

SEQ ID NO: 152 - DNA, 42 bp, Artificial Sequence
  Synthetic
gggcaggattgcagggtttagacatcctcggtgattacagcc

SEQ ID NO: 153 - DNA, 41 bp, Artificial Sequence
  Synthetic
taggggcaggtccatgattgctcttattcagacccttgttc

SEQ ID NO: 154 - DNA, 39 bp, Artificial Sequence
  Synthetic
gcgggatcctagcgtgggacataactccctcatcctgcc

SEQ ID NO: 155 - DNA, 40 bp, Artificial Sequence
  Synthetic
ggctggaggcgatgtggttgaaaccctgagtcatccctgt

SEQ ID NO: 156 - DNA, 37 bp, Artificial Sequence
  Synthetic
agagcgggagaaagaggaggaatgcgccgtgccttct

SEQ ID NO: 157 - DNA, 40 bp, Artificial Sequence
  Synthetic
tttgcctgttccatgcccggccaaggataatagcccgtcc

SEQ ID NO: 158 - DNA, 42 bp, Artificial Sequence
  Synthetic
ggaggggagtcgagggataagggagcatcagatcacctggga

SEQ ID NO: 159 - DNA, 43 bp, Artificial Sequence
  Synthetic
tgtagtactaaagatggctggcctttggacatttaccgatggc

SEQ ID NO: 160 - DNA, 39 bp, Artificial Sequence
  Synthetic
acgtcagggcctagcctgagtaaggctctgacgtctccc

SEQ ID NO: 161 - DNA, 41 bp, Artificial Sequence
  Synthetic
ggatggcggcctcaggtaaggataaaagcgtggggacagtt

SEQ ID NO: 162 - DNA, 40 bp, Artificial Sequence
  Synthetic
gccatatggtccactgtggttaatctgatgtcgcagtctc

SEQ ID NO: 163 - DNA, 44 bp, Artificial Sequence
  Synthetic
ttgtcattggtccatttctattccaggtcagatcgagtaatggt

SEQ ID NO: 164 - DNA, 46 bp, Artificial Sequence
  Synthetic
aggagaaattttgcaatcttggagtggatactaacgtcggaatcac

SEQ ID NO: 165 - DNA, 45 bp, Artificial Sequence
  Synthetic
ctagtggatctgctgatactgctcaaagtctaattattgcagcca

SEQ ID NO: 166 - DNA, 44 bp, Artificial Sequence
  Synthetic
gcacccttattttcaatgtttggagagcgggtcatcaatcaaga

SEQ ID NO: 167 - DNA, 47 bp, Artificial Sequence
  Synthetic
gcacttttgcatctttctgaaaatggacctgaatttcgttaataggg

SEQ ID NO: 168 - DNA, 41 bp, Artificial Sequence
  Synthetic
gtttcactgacctcctcaggagttgaccggtttttgagagt

SEQ ID NO: 169 - DNA, 46 bp, Artificial Sequence
  Synthetic
ccctcatttgttggaatagagtccttctttagttcctaaggccatt

SEQ ID NO: 170 - DNA, 40 bp, Artificial Sequence
  Synthetic
tccggatgtgccttcatctgaacaattctcggaaaggatg

SEQ ID NO: 171 - DNA, 40 bp, Artificial Sequence
  Synthetic
caaagagggcctgccactttcttgaggaaatgtcaaggga

SEQ ID NO: 172 - DNA, 41 bp, Artificial Sequence
  Synthetic
tccattcaagtcctccgatgagcttccaggacatactgctg

SEQ ID NO: 173 - DNA, 40 bp, Artificial Sequence
  Synthetic
tccatggctgtatggaggatctccagcgcaaaatgccata

SEQ ID NO: 174 - DNA, 47 bp, Artificial Sequence
  Synthetic
acttccattgtttcaaggcatgaattatggctttccttgaagaatcc

SEQ ID NO: 175 - DNA, 46 bp, Artificial Sequence
  Synthetic
agcctctcttattcagtctttgtttaaggagagtaagagacaacat

SEQ ID NO: 176 - DNA, 41 bp, Artificial Sequence
  Synthetic
tctcacaacatttgccagtttgggcgaaaagcttgaacagt

SEQ ID NO: 177 - DNA, 46 bp, Artificial Sequence
  Synthetic
gctggtatttgtgttcgaatcttcatgttctcaaacaaaatggcaa

SEQ ID NO: 178 - DNA, 45 bp, Artificial Sequence
  Synthetic
agcaaaatcgtcggatgattggcaaaagaaatacaccaagacaat

SEQ ID NO: 179 - DNA, 46 bp, Artificial Sequence
  Synthetic
ccaaggtcattgtttatcatgttgttctggagtaaatgaatcagct

SEQ ID NO: 180 - DNA, 39 bp, Artificial Sequence
  Synthetic
cgccaacagtaaggtgacgacagctggtgcatgtgggga

SEQ ID NO: 181 - DNA, 40 bp, Artificial Sequence
  Synthetic
gcctcgagcttgggcttctccttttactcggaggccacgg

SEQ ID NO: 182 - DNA, 42 bp, Artificial Sequence
  Synthetic
agtttcggggattgtgaaccgtcagatcacacgctctttcct

SEQ ID NO: 183 - DNA, 38 bp, Artificial Sequence
  Synthetic
agcagcgtggcggcgaaagtagacggggtagggagatc

SEQ ID NO: 184 - DNA, 39 bp, Artificial Sequence
  Synthetic
gcagtaccactaccgccacccaacggataacgcggtggc

SEQ ID NO: 185 - DNA, 43 bp, Artificial Sequence
  Synthetic
aatgttgcgttgttggagagtatcaactcttactgctctctcc

SEQ ID NO: 186 - DNA, 40 bp, Artificial Sequence
  Synthetic
caagaagcgaccgcagtgggtcataaagctgttgaccggc

SEQ ID NO: 187 - DNA, 40 bp, Artificial Sequence
  Synthetic
gcgtgctgcatagcttggcgtacgggagatacaaggagcg

SEQ ID NO: 188 - DNA, 38 bp, Artificial Sequence
  Synthetic
cggtgctttctgcagtgtgtgggcagccggcagaggat

SEQ ID NO: 189 - DNA, 38 bp, Artificial Sequence
  Synthetic
cgaaacgagaggctcagccgctgttacatcgccggcgg

SEQ ID NO: 190 - DNA, 36 bp, Artificial Sequence
  Synthetic
tccacaggtaccgcgtctgtcactcggaccgctcct

SEQ ID NO: 191 - DNA, 34 bp, Artificial Sequence
  Synthetic
ccggcggctgcagttgttgcgaactgtgcgtgcc

SEQ ID NO: 192 - DNA, 40 bp, Artificial Sequence
  Synthetic
cgcctcgttttcctcttcggtgcctgctgtgctactggtg

SEQ ID NO: 193 - DNA, 40 bp, Artificial Sequence
  Synthetic
gcgcctctctcatggatccactggtgagctggggaacagg

SEQ ID NO: 194 - DNA, 39 bp, Artificial Sequence
  Synthetic
tgacgtacccgccgggaacttccacgctgttttcgaaac

SEQ ID NO: 195 - DNA, 36 bp, Artificial Sequence
  Synthetic
tggagtttgcgcgcgtcgcaggtagcgcatgcagtg

SEQ ID NO: 196 - DNA, 37 bp, Artificial Sequence
  Synthetic
accccgtgcaacgtcgagatgcgcttcagatcgtgga

SEQ ID NO: 197 - DNA, 39 bp, Artificial Sequence
  Synthetic
gcagctatgctcgatgaccgagggctccagaaacaggca

SEQ ID NO: 198 - DNA, 36 bp, Artificial Sequence
  Synthetic
gccgtcaacagcgtgccttttggatgggctccgggt

SEQ ID NO: 199 - DNA, 40 bp, Artificial Sequence
  Synthetic
gccgacttggaggactttgccaactcctgctgctcactgt

SEQ ID NO: 200 - DNA, 37 bp, Artificial Sequence
  Synthetic
gccgtagttgtcgcggtcccaggacgtggtgacctcg

SEQ ID NO: 201 - DNA, 37 bp, Artificial Sequence
  Synthetic
cgactgccgcatggtttcctctcaccaagggcgggct

SEQ ID NO: 202 - DNA, 39 bp, Artificial Sequence
  Synthetic
cgctcgtcagcaggtagaaggctcggacaagatcacggc

SEQ ID NO: 203 - DNA, 37 bp, Artificial Sequence
  Synthetic
cccttgaacatcccgcagcacctgcggggaaacgaga

SEQ ID NO: 204 - DNA, 36 bp, Artificial Sequence
  Synthetic
gcgcggtcattctggccaatctggccgatggctgtg

SEQ ID NO: 205 - DNA, 33 bp, Artificial Sequence
  Synthetic
gctcgcagtagtggcgcacgtgtgcgcgctctt

SEQ ID NO: 206 - DNA, 38 bp, Artificial Sequence
  Synthetic
agtgcgtatacggggctgggagggctgctccaactttg

SEQ ID NO: 207 - DNA, 36 bp, Artificial Sequence
  Synthetic
aagcagccgcgtcttaagcgattgcgggacctgcgc

SEQ ID NO: 208 - DNA, 37 bp, Artificial Sequence
  Synthetic
ctacgcacctgtggccgcagggtgcacagcgacagtg

SEQ ID NO: 209 - DNA, 35 bp, Artificial Sequence
  Synthetic
taccagcggcccatggtgccgccgcggtagagcat

SEQ ID NO: 210 - DNA, 38 bp, Artificial Sequence
  Synthetic
ccgcgcacttttgccaagtcgccgctcagattccagga

SEQ ID NO: 211 - DNA, 36 bp, Artificial Sequence
  Synthetic
tggcgcagttctggcacggccaccgggaacaaagcg

SEQ ID NO: 212 - DNA, 40 bp, Artificial Sequence
  Synthetic
agacgcgcgtactcggaaacactacatcaaagggtcggct

SEQ ID NO: 213 - DNA, 42 bp, Artificial Sequence
  Synthetic
ccagacctccagcaacaccgtcatcagcaacgtgttatcggc

SEQ ID NO: 214 - DNA, 35 bp, Artificial Sequence
  Synthetic
acggtttccacgccaccgcgcagtacgggggtcga

SEQ ID NO: 215 - DNA, 35 bp, Artificial Sequence
  Synthetic
ctgcgcgaagaactgggctgaactcgcgacccacg

SEQ ID NO: 216 - DNA, 36 bp, Artificial Sequence
  Synthetic
cgtggttggagcagcaccagggtgccgcctggaaca

SEQ ID NO: 217 - DNA, 36 bp, Artificial Sequence
  Synthetic
ttctggcggtgggtcccgacgaagcccacactgacg

SEQ ID NO: 218 - DNA, 36 bp, Artificial Sequence
  Synthetic
ggcgtccgaatggtgggtagcacgccgatgtgcagc

SEQ ID NO: 219 - DNA, 37 bp, Artificial Sequence
  Synthetic
acgcggccattttgtgtttggcgggctctcgtcctgt

SEQ ID NO: 220 - DNA, 40 bp, Artificial Sequence
  Synthetic
tgtcaaccgtcgcatcacgcccagcccagcttttgtatga

SEQ ID NO: 221 - DNA, 39 bp, Artificial Sequence
  Synthetic
cgttgtggtagaacggcaaccggcttcctgcgacaccag

SEQ ID NO: 222 - DNA, 39 bp, Artificial Sequence
  Synthetic
cgcagattctcggccaacagctacccaccacgcgtttcg

SEQ ID NO: 223 - DNA, 38 bp, Artificial Sequence
  Synthetic
gcacccaggacctccggtacccgacaccgatcacgaag

SEQ ID NO: 224 - DNA, 38 bp, Artificial Sequence
  Synthetic
ccgcagaaagtcgaagatgcccggcaccaccgagacgt

SEQ ID NO: 225 - DNA, 40 bp, Artificial Sequence
  Synthetic
gtgagcaccatcagcacctgatcggaatgtcacaacgccg

SEQ ID NO: 226 - DNA, 41 bp, Artificial Sequence
  Synthetic
ggctgcagcgctttcagaattgacattcacgacctagacgc

SEQ ID NO: 227 - DNA, 37 bp, Artificial Sequence
  Synthetic
ttcgggtagctgcaggccgggccttggtacaggagca

SEQ ID NO: 228 - DNA, 39 bp, Artificial Sequence
  Synthetic
cggttgggcgcgttgatctagcgcaccaaccactggagg

SEQ ID NO: 229 - DNA, 36 bp, Artificial Sequence
  Synthetic
cagtccgccgctcattttgtgtgagcacggcgcaga

SEQ ID NO: 230 - DNA, 38 bp, Artificial Sequence
  Synthetic
tgatgcgggtgcgtagggtgctggcttttctggaggaa

SEQ ID NO: 231 - DNA, 35 bp, Artificial Sequence
  Synthetic
gaaagcgaagacggcgcccacgtggcaggcggtct

SEQ ID NO: 232 - DNA, 41 bp, Artificial Sequence
  Synthetic
gtcatggccaatcgtcgtctccagcctggtggaactcatca

SEQ ID NO: 233 - DNA, 38 bp, Artificial Sequence
  Synthetic
ggacccgaaaacgagggcgggctttcttggcgtacagc

SEQ ID NO: 234 - DNA, 38 bp, Artificial Sequence
  Synthetic
cgtgcaggatgacgtggattcttccgcgtcctcgtcga

SEQ ID NO: 235 - DNA, 37 bp, Artificial Sequence
  Synthetic
ggtgagagtagtggtggggctgtccacgccgcctcat

SEQ ID NO: 236 - DNA, 36 bp, Artificial Sequence
  Synthetic
gagaggaggagagccggcatagttgcacacggccga

SEQ ID NO: 237 - DNA, 35 bp, Artificial Sequence
  Synthetic
cggcgtcggcgtttccaactggcgccctggtacga

SEQ ID NO: 238 - DNA, 36 bp, Artificial Sequence
  Synthetic
catctctaccgccgccgtgcaagggcggcgacatct

SEQ ID NO: 239 - DNA, 39 bp, Artificial Sequence
  Synthetic
tgcgacgaacacgaagctctccgggtgacgttgtggatg

SEQ ID NO: 240 - DNA, 36 bp, Artificial Sequence
  Synthetic
caccgacacagcagcaccaggtccgtcgccgctgtt

SEQ ID NO: 241 - DNA, 41 bp, Artificial Sequence
  Synthetic
gcgtccgacgatgtgctcttctaacttgtccatcagcgacg

SEQ ID NO: 242 - DNA, 38 bp, Artificial Sequence
  Synthetic
cgtcttttcggcgctcaacaagaggcgcacctccgaaa

SEQ ID NO: 243 - DNA, 35 bp, Artificial Sequence
  Synthetic
acgcccgccagaagtacgctcggtaggcacgcgat

SEQ ID NO: 244 - DNA, 39 bp, Artificial Sequence
  Synthetic
tctgttggcggggctcacgcgtcgtaacaaagcacaggc

SEQ ID NO: 245 - DNA, 37 bp, Artificial Sequence
  Synthetic
agaggctacccgaccgtagcacaaccgcaacgatccc

SEQ ID NO: 246 - DNA, 38 bp, Artificial Sequence
  Synthetic
gacggtcgtggtctcctcggctggaggggtccggaaca

SEQ ID NO: 247 - DNA, 39 bp, Artificial Sequence
  Synthetic
acagtacgacggcaacccaacgtcttcttgcggtaccgg

SEQ ID NO: 248 - DNA, 40 bp, Artificial Sequence
  Synthetic
catcctgctgtcacacgacgaactgttgacggatgtgcaa

SEQ ID NO: 249 - DNA, 37 bp, Artificial Sequence
  Synthetic
aagcgcgtgcccacccaagtcgtcgtcatcgaaaggc

SEQ ID NO: 250 - DNA, 39 bp, Artificial Sequence
  Synthetic
acctggcatcgcagcctctttccgagaaacggctgtcgg

SEQ ID NO: 251 - DNA, 35 bp, Artificial Sequence
  Synthetic
tggcttacgacgctgacgcggcggcccagaaaacc

SEQ ID NO: 252 - DNA, 42 bp, Artificial Sequence
  Synthetic
ggtcgaacctcataacggtgggcacgcgtcctatgatgagtt

SEQ ID NO: 253 - DNA, 40 bp, Artificial Sequence
  Synthetic
cttgcgcttaccgatccgcttagattcgacggggaacgct

SEQ ID NO: 254 - DNA, 36 bp, Artificial Sequence
  Synthetic
gctcactcaacaccgccgtgacacgcgctttgggag

SEQ ID NO: 255 - DNA, 40 bp, Artificial Sequence
  Synthetic
acgtgacgatcaaaagtgcccgacgctactacatgcccct

SEQ ID NO: 256 - DNA, 36 bp, Artificial Sequence
  Synthetic
acgatgatggcccgcgacggaatttgcccgtgcgga

SEQ ID NO: 257 - DNA, 39 bp, Artificial Sequence
  Synthetic
gcaaccagtgctccactacgtcacgaccagtctccggac

SEQ ID NO: 258 - DNA, 35 bp, Artificial Sequence
  Synthetic
acatggacgccgcctctgcccgttcttcccgcgga

SEQ ID NO: 259 - DNA, 38 bp, Artificial Sequence
  Synthetic
atgcaaagacggcgcgggacgtggatccccattatccc

SEQ ID NO: 260 - DNA, 35 bp, Artificial Sequence
  Synthetic
tgttgtgtccgccgctgctggtcaccgtggtcagt

SEQ ID NO: 261 - DNA, 36 bp, Artificial Sequence
  Synthetic
cccgggcactgatcctgaccagcgtgagagccccgt

SEQ ID NO: 262 - DNA, 39 bp, Artificial Sequence
  Synthetic
cacgctgaccggcgatcaggcggaaaaagtggatgcggc

SEQ ID NO: 263 - DNA, 34 bp, Artificial Sequence
  Synthetic
ttggcccacgacgcctgacgcagcgcaaaggcca

SEQ ID NO: 264 - DNA, 40 bp, Artificial Sequence
  Synthetic
gcgactcctggacctgcgtaaaaacagcagagaaccgagg

SEQ ID NO: 265 - DNA, 37 bp, Artificial Sequence
  Synthetic
agatgtggcaggcgcgtctactggttctgctgacgcg

SEQ ID NO: 266 - DNA, 38 bp, Artificial Sequence
  Synthetic
acaaccccacgggccgaagagcgcgtacacatagatcg

SEQ ID NO: 267 - DNA, 34 bp, Artificial Sequence
  Synthetic
tctcggtgctgggcgcttggacgccagtcgcatg

SEQ ID NO: 268 - DNA, 39 bp, Artificial Sequence
  Synthetic
agggactggaggtgcgcgtagatacgtaacgtgtgcgag

SEQ ID NO: 269 - DNA, 37 bp, Artificial Sequence
  Synthetic
cgctgtgctggcatcgagttacggctggtgagtccac

SEQ ID NO: 270 - DNA, 40 bp, Artificial Sequence
  Synthetic
ccatgacctacgtgcgcaagtttcctggcacttgacgagc

SEQ ID NO: 271 - DNA, 40 bp, Artificial Sequence
  Synthetic
tcgctcgaccgttcgtacgaaagtaatggtctgcagctgc

SEQ ID NO: 272 - DNA, 40 bp, Artificial Sequence
  Synthetic
gcggtctccacgtcaggtacgaatcgagtcttcgggggtg

SEQ ID NO: 273 - DNA, 36 bp, Artificial Sequence
  Synthetic
aacgcgctgcacgaccacttccatgttacgcggcag

SEQ ID NO: 274 - DNA, 36 bp, Artificial Sequence
  Synthetic
cggaacccgccatgcaacgagcaccgcccatgggtt

SEQ ID NO: 275 - DNA, 38 bp, Artificial Sequence
  Synthetic
cgctcgagctcctgcctaaagtccggcgctggtcttga

SEQ ID NO: 276 - DNA, 40 bp, Artificial Sequence
  Synthetic
tcccagtaacagacgacccagtgcctgtccgatacacgtg

SEQ ID NO: 277 - DNA, 41 bp, Artificial Sequence
  Synthetic
gccacgtggttttcgagaacgtgacgttgttgttgcggatc

SEQ ID NO: 278 - DNA, 37 bp, Artificial Sequence
  Synthetic
gggagcgcggtggaagacaaccgtcagaatcgacggt

SEQ ID NO: 279 - DNA, 35 bp, Artificial Sequence
  Synthetic
tctcccccgattccagcgtgtcaacggcggtcgga

SEQ ID NO: 280 - DNA, 37 bp, Artificial Sequence
  Synthetic
cgctcatccgcgtgctctgaagggctgttcgatgtgg

SEQ ID NO: 281 - DNA, 37 bp, Artificial Sequence
  Synthetic
cacggcgtgtccttgctacccacctgcgagttgaggc

SEQ ID NO: 282 - DNA, 37 bp, Artificial Sequence
  Synthetic
ttcacgtccgggtggctgccgtgttcgagcacctgac

SEQ ID NO: 283 - DNA, 42 bp, Artificial Sequence
  Synthetic
ggcgctgatgatgttgacgtcgcgtagccacctgttggaacc

SEQ ID NO: 284 - DNA, 38 bp, Artificial Sequence
  Synthetic
agatgatgcaccccgaactcgccgcagaaggccatgag

SEQ ID NO: 285 - DNA, 35 bp, Artificial Sequence
  Synthetic
gcctaacctccgctcgcactggcggccgaatctcc

SEQ ID NO: 286 - DNA, 41 bp, Artificial Sequence
  Synthetic
gcggaggaagattcgtctgagccgtcttcgtcgtccctagt

SEQ ID NO: 287 - DNA, 36 bp, Artificial Sequence
  Synthetic
ggccgacgctggttctcctcgtgatgcgtgacggag

SEQ ID NO: 288 - DNA, 39 bp, Artificial Sequence
  Synthetic
ggtcgcagatgagcagcttctgcgcgaatgttaccaccc

SEQ ID NO: 289 - DNA, 36 bp, Artificial Sequence
  Synthetic
ttctccaacgcgcggcaggcatgggtacggaggcgt

SEQ ID NO: 290 - DNA, 42 bp, Artificial Sequence
  Synthetic
cgtccaggttactcggggaacagcataatctgcgaggaggac

SEQ ID NO: 291 - DNA, 39 bp, Artificial Sequence
  Synthetic
tcgtcctccccttcgtccggtctctacgctcctacgaca

SEQ ID NO: 292 - DNA, 39 bp, Artificial Sequence
  Synthetic
accactagcttggctacgtggagcactgggcgtggaaac

SEQ ID NO: 293 - DNA, 40 bp, Artificial Sequence
  Synthetic
tcgtcgcgctccagcacatacctacgatttggccatgtcg

SEQ ID NO: 294 - DNA, 41 bp, Artificial Sequence
  Synthetic
cgcgctctcttgaacacgacaattggcgcaaactttttggc

SEQ ID NO: 295 - DNA, 37 bp, Artificial Sequence
  Synthetic
cggatctgcggctcaaacacccgcgaagtgcagcagg

SEQ ID NO: 296 - DNA, 37 bp, Artificial Sequence
  Synthetic
gactttacggtgcgcggcgatggaaaccagcagcccg

SEQ ID NO: 297 - DNA, 40 bp, Artificial Sequence
  Synthetic
tctgccgccaccaaaagatctgtggcggtcaccactttca

SEQ ID NO: 298 - DNA, 35 bp, Artificial Sequence
  Synthetic
tttccctaccgcgcgctggcgctccacaccaacag

SEQ ID NO: 299 - DNA, 36 bp, Artificial Sequence
  Synthetic
tccacgatgtcggcgatgactccagcgcctgcagat

SEQ ID NO: 300 - DNA, 41 bp, Artificial Sequence
  Synthetic
cccccagggcgttgtaaaagtccttatgctgcgctacatgc

SEQ ID NO: 301 - DNA, 36 bp, Artificial Sequence
  Synthetic
ggggatgtcgtgggtctcctccagagcgtgccggta

SEQ ID NO: 302 - DNA, 40 bp, Artificial Sequence
  Synthetic
gcgcttgagaaaaatgtcgcggggcgctgctttctttcga

SEQ ID NO: 303 - DNA, 36 bp, Artificial Sequence
  Synthetic
agccctcgagcgtgtacgtcggctccttcgtgggca

SEQ ID NO: 304 - DNA, 39 bp, Artificial Sequence
  Synthetic
tgcagactcttgccctgcgctttgtgctcgacgttaacg

SEQ ID NO: 305 - DNA, 39 bp, Artificial Sequence
  Synthetic
acagcctggatctcaccgtcagcctccggatcacatggt

SEQ ID NO: 306 - DNA, 36 bp, Artificial Sequence
  Synthetic
cgctggatgacggtgatgcgtgtacacggccggcga

SEQ ID NO: 307 - DNA, 40 bp, Artificial Sequence
  Synthetic
actgctgtggtgttgccttctggtaggagcgacgctgacg

SEQ ID NO: 308 - DNA, 42 bp, Artificial Sequence
  Synthetic
gccacgacaaacactaccgtcgtgaagtgacgttaggggagg

SEQ ID NO: 309 - DNA, 39 bp, Artificial Sequence
  Synthetic
tgcatccgtccggtggtgcccacatctggtatacacccg

SEQ ID NO: 310 - DNA, 39 bp, Artificial Sequence
  Synthetic
ttccgtgctggcgatcgcgtacttttcactcccgggtgc

SEQ ID NO: 311 - DNA, 41 bp, Artificial Sequence
  Synthetic
tctacccaccctgcgagacatcgcgtacaggagtcctaggt

SEQ ID NO: 312 - DNA, 36 bp, Artificial Sequence
  Synthetic
agtgtgccgcacaaggccgtgcaagcccattccccg

SEQ ID NO: 313 - DNA, 38 bp, Artificial Sequence
  Synthetic
cccctggtcttcaagcacacttacgcagcccagcctag

SEQ ID NO: 314 - DNA, 38 bp, Artificial Sequence
  Synthetic
gagatgccaacagtgttgctacaggaagcttacagggt

SEQ ID NO: 315 - DNA, 42 bp, Artificial Sequence
  Synthetic
cgtacttttccactccaggcgatatgtgcggtatgattttgc

SEQ ID NO: 316 - DNA, 41 bp, Artificial Sequence
  Synthetic
gttaggtcgctactcgctgggatgattccgtagacgccagg

SEQ ID NO: 317 - DNA, 40 bp, Artificial Sequence
  Synthetic
gagcaagttaccatcccctgcatgcgcgaatggaaaccat

SEQ ID NO: 318 - DNA, 39 bp, Artificial Sequence
  Synthetic
agggttgagggggccgttcggatctacgtcccagtctct

SEQ ID NO: 319 - DNA, 36 bp, Artificial Sequence
  Synthetic
aacgacgacgcggttgcccgacgtcgtacgagtcgc

SEQ ID NO: 320 - DNA, 38 bp, Artificial Sequence
  Synthetic
gccacaaaagccaccgcggcgagagattctccagcccg

SEQ ID NO: 321 - DNA, 38 bp, Artificial Sequence
  Synthetic
tgcgcgctgctggtgttttattgcaacagcttcgacgg

SEQ ID NO: 322 - DNA, 36 bp, Artificial Sequence
  Synthetic
acgaaggtccaagcggcgggcggatgctggtcgttg

SEQ ID NO: 323 - DNA, 38 bp, Artificial Sequence
  Synthetic
cgcgtgactctctgttcgatggcagctccaagcgccgt

SEQ ID NO: 324 - DNA, 38 bp, Artificial Sequence
  Synthetic
cccaacggtcacacgtccggaaagccgtcccggtcatt

SEQ ID NO: 325 - DNA, 35 bp, Artificial Sequence
  Synthetic
caacgcggcacttccaacagtgtggtgcacggcgt

SEQ ID NO: 326 - DNA, 35 bp, Artificial Sequence
  Synthetic
ttcgcacacccagcccctgggatcggtcgtcgcgt

SEQ ID NO: 327 - DNA, 35 bp, Artificial Sequence
  Synthetic
ccgacgtcccgcatccaactggcgtgcgaggaaga

SEQ ID NO: 328 - DNA, 38 bp, Artificial Sequence
  Synthetic
gaacacgcgcaacagggccgatgtcgggcgtccaccta

SEQ ID NO: 329 - DNA, 39 bp, Artificial Sequence
  Synthetic
tatcgtcgggtcggctgtccaaagcctggttggatctcg

SEQ ID NO: 330 - DNA, 39 bp, Artificial Sequence
  Synthetic
cctcgtcatcctccgtgtcggtagcctcctccaccacgg

SEQ ID NO: 331 - DNA, 40 bp, Artificial Sequence
  Synthetic
ggcccactttcgggtggaggcttgaagtacagcatgccca

SEQ ID NO: 332 - DNA, 41 bp, Artificial Sequence
  Synthetic
ggtgccgaaatcaccgtgtgaaaaaccgcgactttccacac

SEQ ID NO: 333 - DNA, 37 bp, Artificial Sequence
  Synthetic
atgtcgcgacacccgggtcgcccacccccattacacg

SEQ ID NO: 334 - DNA, 43 bp, Artificial Sequence
  Synthetic
agaacatatataatcgccgtttcgtacggatcaagaggtccat

SEQ ID NO: 335 - DNA, 35 bp, Artificial Sequence
  Synthetic
agcacggggtactcgtggcgctctcggggccgtat

SEQ ID NO: 336 - DNA, 42 bp, Artificial Sequence
  Synthetic
gaaggaaaccgaccccgaaactagcgttcataacaatcccgg

SEQ ID NO: 337 - DNA, 37 bp, Artificial Sequence
  Synthetic
ctcaacctgtgcgccacagcgttgcaggccacgaaca

SEQ ID NO: 338 - DNA, 39 bp, Artificial Sequence
  Synthetic
ccctcactgggctacgagtgcaccggtgtgcagctaagc

SEQ ID NO: 339 - DNA, 37 bp, Artificial Sequence
  Synthetic
tcatctacgtgccccccggggacccaagccagactgc

SEQ ID NO: 340 - DNA, 37 bp, Artificial Sequence
  Synthetic
tcagcgaaaccggcacccgggccggcgagtaatagca

SEQ ID NO: 341 - DNA, 35 bp, Artificial Sequence
  Synthetic
ggctgtcatgggtctgcgcagccgccgaaacacga

SEQ ID NO: 342 - DNA, 37 bp, Artificial Sequence
  Synthetic
atcgttcacgtcgccgccgccgaaagcgtcgtgagca

SEQ ID NO: 343 - DNA, 37 bp, Artificial Sequence
  Synthetic
acagcagccgcgcttgtctaggggactacctcctcga

SEQ ID NO: 344 - DNA, 39 bp, Artificial Sequence
  Synthetic
gcgtctacgtggtgatgctgcccaatcggcgtcgcttag

SEQ ID NO: 345 - DNA, 37 bp, Artificial Sequence
  Synthetic
aggcctggttacagcgcgggggacctgtttcagcgtg

SEQ ID NO: 346 - DNA, 40 bp, Artificial Sequence
  Synthetic
gcaaccccgccaactggttcgcgtaaatctgcgggatagc

SEQ ID NO: 347 - DNA, 36 bp, Artificial Sequence
  Synthetic
tgttcgacagcggcgtagactcgcctcgacagagcc

SEQ ID NO: 348 - DNA, 38 bp, Artificial Sequence
  Synthetic
ggtcatgacaccgacgcgttgaagttcacgtcgcgtcc

SEQ ID NO: 349 - DNA, 35 bp, Artificial Sequence
  Synthetic
gtcgctcggcattccgcactccggcatggtgctgc

SEQ ID NO: 350 - DNA, 38 bp, Artificial Sequence
  Synthetic
agttgtgccgccggagctataacgccatgggatcctca

SEQ ID NO: 351 - DNA, 39 bp, Artificial Sequence
  Synthetic
aaccagatggcgacggacgtcctgaacagaccgctaacc

SEQ ID NO: 352 - DNA, 39 bp, Artificial Sequence
  Synthetic
tgctaaccacgcaaccggatctgatgctgttgtcgtgca

SEQ ID NO: 353 - DNA, 36 bp, Artificial Sequence
  Synthetic
atcccggcaagttgcgcgccaccaccgcattaaccg

SEQ ID NO: 354 - DNA, 38 bp, Artificial Sequence
  Synthetic
cgcctgctctctccaggtccggaccttctgggaccagt

SEQ ID NO: 355 - DNA, 40 bp, Artificial Sequence
  Synthetic
gccttccagactgcacggccataggcagcgacgtgtatgg

SEQ ID NO: 356 - DNA, 36 bp, Artificial Sequence
  Synthetic
cagaaaacacccccccgcccggacgcccgacatcca

SEQ ID NO: 357 - DNA, 43 bp, Artificial Sequence
  Synthetic
tcttccccatattccttcattgtctctttgtgcgacagtgctt

SEQ ID NO: 358 - DNA, 44 bp, Artificial Sequence
  Synthetic
tgtagtcgtatagatccggaagaaatggacagtggtgaatagca

SEQ ID NO: 359 - DNA, 40 bp, Artificial Sequence
  Synthetic
ttcgcctctctcggactgactaagacaggaaatggcaagc

SEQ ID NO: 360 - DNA, 44 bp, Artificial Sequence
  Synthetic
tcctcaaagtccaatttttccggaaacaagccaattaatgtggg

SEQ ID NO: 361 - DNA, 40 bp, Artificial Sequence
  Synthetic
caatgtgctcaattggggcagattcgagctggatagaact

SEQ ID NO: 362 - DNA, 47 bp, Artificial Sequence
  Synthetic
ccatactcacaaagttcaccacgtgttcattataaaaggaaggtccc

SEQ ID NO: 363 - DNA, 44 bp, Artificial Sequence
  Synthetic
tctctttgatagaagactcagcctctgccttcttcaatctcttc

SEQ ID NO: 364 - DNA, 44 bp, Artificial Sequence
  Synthetic
cagatgccctgatctcagtagcgatcctatgaacagatggaaac

SEQ ID NO: 365 - DNA, 44 bp, Artificial Sequence
  Synthetic
cctctttgtcatacaggatcagctaggtccaatttacaggagaa

SEQ ID NO: 366 - DNA, 43 bp, Artificial Sequence
  Synthetic
ccattttcgcctctccagaaattcatggaactgattcggatga

SEQ ID NO: 367 - DNA, 43 bp, Artificial Sequence
  Synthetic
ttgaagcaatttgaacccctctattagagggacaagaatggtc

SEQ ID NO: 368 - DNA, 43 bp, Artificial Sequence
  Synthetic
gcatttcagttttcgcgcctaaagaaatgatgttttttgggcg

SEQ ID NO: 369 - DNA, 41 bp, Artificial Sequence
  Synthetic
tccaatatgtcgtcagcttcctgggcgccattatgagaact

SEQ ID NO: 370 - DNA, 41 bp, Artificial Sequence
  Synthetic
ccgaatcgctacagggaaagcccacaactgcaccctgaaga

SEQ ID NO: 371 - DNA, 38 bp, Artificial Sequence
  Synthetic
acatctacgcctcccagtcagaagtgcggttccagaag

SEQ ID NO: 372 - DNA, 42 bp, Artificial Sequence
  Synthetic
tactgcaagagctggcgaactcttagtaatggagttggaaac

SEQ ID NO: 373 - DNA, 42 bp, Artificial Sequence
  Synthetic
gcgccagcgagtaaatgcaaacacatgtcaatgcagctgtgg

SEQ ID NO: 374 - DNA, 44 bp, Artificial Sequence
  Synthetic
gcgcatgaagtaatggttactgtttgcttttgctaaattggcct

SEQ ID NO: 375 - DNA, 47 bp, Artificial Sequence
  Synthetic
aggcattttctgaagctgcattagtgtacttgctttaattgtagagg

SEQ ID NO: 376 - DNA, 45 bp, Artificial Sequence
  Synthetic
accccatttaaacacactctagaaagtaacttcagccactcaaac

SEQ ID NO: 377 - DNA, 42 bp, Artificial Sequence
  Synthetic
ggcgagggtccaatagttgcataggatctacagtggacggtc

SEQ ID NO: 378 - DNA, 43 bp, Artificial Sequence
  Synthetic
aggctcatctttacaaaatactggagtaagctcttgaccaccg

SEQ ID NO: 379 - DNA, 48 bp, Artificial Sequence
  Synthetic
tggttctccacaatatgaatccaagtgattgtattttgagattggcaa

SEQ ID NO: 380 - DNA, 42 bp, Artificial Sequence
  Synthetic
tgggaagtctcagttgttgcgtacagtttctggagcaggtgt

SEQ ID NO: 381 - DNA, 40 bp, Artificial Sequence
  Synthetic
cgcaacgaggaagtttgctggagcttcagcagttgcaagc

SEQ ID NO: 382 - DNA, 42 bp, Artificial Sequence
  Synthetic
ttaaatgccttcagtgtcctcacaagacaaagcctctgtagc

SEQ ID NO: 383 - DNA, 45 bp, Artificial Sequence
  Synthetic
tggtcagaattcctgtacgaggatccgtatacagatttaaggggt

SEQ ID NO: 384 - DNA, 40 bp, Artificial Sequence
  Synthetic
gtgtactcacccaaccagttgcttggtcttcatcgctttc

SEQ ID NO: 385 - DNA, 42 bp, Artificial Sequence
  Synthetic
ccaccattttccccacctggaattgcggcaatattgagttgc

SEQ ID NO: 386 - DNA, 38 bp, Artificial Sequence
  Synthetic
atgcatcggccctcacacacgcccgctcataggggtta

SEQ ID NO: 387 - DNA, 42 bp, Artificial Sequence
  Synthetic
ggttcttaccgtgcagatgcaaggtattcctccttatccttc

SEQ ID NO: 388 - DNA, 43 bp, Artificial Sequence
  Synthetic
ggacgtccctggaccctttaaaataatattttgccagctcttg

SEQ ID NO: 389 - DNA, 47 bp, Artificial Sequence
  Synthetic
actttctactgcttaaccccagaaatgtaagcggtttctataggtac

SEQ ID NO: 390 - DNA, 42 bp, Artificial Sequence
  Synthetic
acactgcgcacgcttttacaaaaagtagaaatctcgtcggcg

SEQ ID NO: 391 - DNA, 39 bp, Artificial Sequence
  Synthetic
ctggacatgcaggtcgagggtgcattgccactaccgttt

SEQ ID NO: 392 - DNA, 36 bp, Artificial Sequence
  Synthetic
ttcctccgggagctcgtccgacggttccacggtgca

SEQ ID NO: 393 - DNA, 45 bp, Artificial Sequence
  Synthetic
cactattgaacgtgcgggacatgttatcttggtaggcaatttctg

SEQ ID NO: 394 - DNA, 41 bp, Artificial Sequence
  Synthetic
cgtcgcggcgaaatgattgaaagtgggggttgtcttcttcg

SEQ ID NO: 395 - DNA, 38 bp, Artificial Sequence
  Synthetic
ttgctcagcttcctggtactcagtcacagtcacaaggt

SEQ ID NO: 396 - DNA, 40 bp, Artificial Sequence
  Synthetic
accgctttgtagatgtggatgacaagcactgcctgttgaa

SEQ ID NO: 397 - DNA, 39 bp, Artificial Sequence
  Synthetic
gctgccggcatcacatggatcttccaacatgaggcggtg

SEQ ID NO: 398 - DNA, 41 bp, Artificial Sequence
  Synthetic
ggatcctgccggtttcgaaccccgtggtttggtggaaaagt

SEQ ID NO: 399 - DNA, 39 bp, Artificial Sequence
  Synthetic
gcgaaacatgttctgacgaggcctcctgagcgtcaccca

SEQ ID NO: 400 - DNA, 42 bp, Artificial Sequence
  Synthetic
agcttctacaaagtcccaaagatggcacactaatagcgcgag

SEQ ID NO: 401 - DNA, 37 bp, Artificial Sequence
  Synthetic
cgcttggctgccaccgtaggacgggagcaggaacaga

SEQ ID NO: 402 - DNA, 42 bp, Artificial Sequence
  Synthetic
gctttgctatccaacaaagcatttcagtagtgccgtctcgta

SEQ ID NO: 403 - DNA, 43 bp, Artificial Sequence
  Synthetic
aaaagtaatcgggtccagactgatagccttgcgactaatggtt

SEQ ID NO: 404 - DNA, 44 bp, Artificial Sequence
  Synthetic
gcatttgtaaagtattccccgttcatcgagctttcattaatcgc

SEQ ID NO: 405 - DNA, 40 bp, Artificial Sequence
  Synthetic
ttttgcgtcgctgccaacgtgaatgggaggaaagacagcc

SEQ ID NO: 406 - DNA, 45 bp, Artificial Sequence
  Synthetic
ggcatgttggtatgtaagatggttttggcacgcaaactattaact

SEQ ID NO: 407 - DNA, 40 bp, Artificial Sequence
  Synthetic
ctaattgggtttcggggtccctgctggaaagtgacattgg

SEQ ID NO: 408 - DNA, 45 bp, Artificial Sequence
  Synthetic
agttgtaactgcgtcctttgggccttaaataaggctgctaggatt

SEQ ID NO: 409 - DNA, 40 bp, Artificial Sequence
  Synthetic
cgcactggatgttggctagaccgtaacaacacgggctggg

SEQ ID NO: 410 - DNA, 36 bp, Artificial Sequence
  Synthetic
gctgcccgcatcatagctcgcggccagagcgttggt

SEQ ID NO: 411 - DNA, 40 bp, Artificial Sequence
  Synthetic
aactcgacgccgtctgctgacaagcgcgatatcaagcatg

SEQ ID NO: 412 - DNA, 41 bp, Artificial Sequence
  Synthetic
cctctaacttttgccgcttaggttaaaagggaagccatgga

SEQ ID NO: 413 - DNA, 40 bp, Artificial Sequence
  Synthetic
tgatggacctcgtctacggctagggtaccgtgggacaact

SEQ ID NO: 414 - DNA, 38 bp, Artificial Sequence
  Synthetic
aacggatccgggcacagtttgcccgacgaggtaatggt

SEQ ID NO: 415 - DNA, 41 bp, Artificial Sequence
  Synthetic
gccatcttgaaagcgctggtgcctatgttagcgccagagga

SEQ ID NO: 416 - DNA, 40 bp, Artificial Sequence
  Synthetic
ccacgatccagtacccctcgaactttacgctggctgtggg

SEQ ID NO: 417 - DNA, 42 bp, Artificial Sequence
  Synthetic
tgtttgctgcattgttagctgagacaatccaaggatgacaac

SEQ ID NO: 418 - DNA, 40 bp, Artificial Sequence
  Synthetic
actgcggaattccacaaggacagttaatgctggatgcttt

SEQ ID NO: 419 - DNA, 47 bp, Artificial Sequence
  Synthetic
ggtagttttatgtttcctggagtgtgaagcttcttgtactcaaatgt

SEQ ID NO: 420 - DNA, 42 bp, Artificial Sequence
  Synthetic
agtgtgctctgaagaatcatgtttcccggttcctacacttac

SEQ ID NO: 421 - DNA, 41 bp, Artificial Sequence
  Synthetic
aggtgccgtctaaatagggaatgctgggttcagggtttgac

SEQ ID NO: 422 - DNA, 43 bp, Artificial Sequence
  Synthetic
agttgttatgttgaaactctacggtgagtaggcaagttgtgga

SEQ ID NO: 423 - DNA, 40 bp, Artificial Sequence
  Synthetic
gggtccacagcctagatctcgaccctcccagactgctgta

SEQ ID NO: 424 - DNA, 42 bp, Artificial Sequence
  Synthetic
gaacatacaacaaaacaggccgtaccctagaaaagtcaaccc

SEQ ID NO: 425 - DNA, 40 bp, Artificial Sequence
  Synthetic
gctccccccctaggcttgttatggttggtgggcagggata

SEQ ID NO: 426 - DNA, 39 bp, Artificial Sequence
  Synthetic
cttttatgctggccgactacccactggcataaggagacg

SEQ ID NO: 427 - DNA, 42 bp, Artificial Sequence
  Synthetic
ctgcgtgtgggagcataagtgtcaccatctccattccatgca

SEQ ID NO: 428 - DNA, 38 bp, Artificial Sequence
  Synthetic
gttgttgttcgcaatccggcgcttccatgcctttttcc

SEQ ID NO: 429 - DNA, 40 bp, Artificial Sequence
  Synthetic
tcctcggggggagtctcgtactactcataccccaagacgc

SEQ ID NO: 430 - DNA, 43 bp, Artificial Sequence
  Synthetic
gacaggataggggtattttgtgattagtttttgcagtgccaga

SEQ ID NO: 431 - DNA, 41 bp, Artificial Sequence
  Synthetic
gcctccgggtcttgcaagttttgagcgcagtgatgaatcag

SEQ ID NO: 432 - DNA, 40 bp, Artificial Sequence
  Synthetic
aagcattgctgccaaacaccctgcatttaccttttcctgt

SEQ ID NO: 433 - DNA, 43 bp, Artificial Sequence
  Synthetic
attgctgtcagactgcggtcactgaactattaagtgaaagtca

SEQ ID NO: 434 - DNA, 40 bp, Artificial Sequence
  Synthetic
ttgcggctttcggggacatgttccatcacctttgtgtgct

SEQ ID NO: 435 - DNA, 40 bp, Artificial Sequence
  Synthetic
catgagcagtagccccgacgtgggacaccattgaaaccag

SEQ ID NO: 436 - DNA, 40 bp, Artificial Sequence
  Synthetic
tcgtgttcttgacctcgactgaaaacgcatttttcccact

SEQ ID NO: 437 - DNA, 41 bp, Artificial Sequence
  Synthetic
gagagcggcttgttctagcagtccccacatgatttccaggg

SEQ ID NO: 438 - DNA, 43 bp, Artificial Sequence
  Synthetic
cgggaacaggacaaatgcaatagctattggtggaaaaagatca

SEQ ID NO: 439 - DNA, 42 bp, Artificial Sequence
  Synthetic
aaatgcttgcgtacagggtgatttcaacctattaacctggga

SEQ ID NO: 440 - DNA, 47 bp, Artificial Sequence
  Synthetic
agccagaaggtaaagaaaagagaaactaacttgtttctagtgcaaca

SEQ ID NO: 441 - DNA, 47 bp, Artificial Sequence
  Synthetic
ccgtagtaccatcgactgacattattgtcacattacaattaactgca

SEQ ID NO: 442 - DNA, 48 bp, Artificial Sequence
  Synthetic
gaaccgtcaccatactgtaagaaatttctaaaacagaacctcttatgc

SEQ ID NO: 443 - DNA, 49 bp, Artificial Sequence
  Synthetic
ttggatattcgggaagatcatcagtctcctctgtagtttctttacaact

SEQ ID NO: 444 - DNA, 45 bp, Artificial Sequence
  Synthetic
tgttctttgcctggtaaagattcataaaaggacttttttgcctgg

SEQ ID NO: 445 - DNA, 42 bp, Artificial Sequence
  Synthetic
gtttgcaagtctgtcaggtttgaccatggtctccgtgtactc

SEQ ID NO: 446 - DNA, 44 bp, Artificial Sequence
  Synthetic
aaggggctccaaaacattgatatcggaataaaacttaatgccca

SEQ ID NO: 447 - DNA, 42 bp, Artificial Sequence
  Synthetic
gggtaagagcgttgttgcgaactgtaaattctagcggtgccc

SEQ ID NO: 448 - DNA, 46 bp, Artificial Sequence
  Synthetic
gctcgcatcaaagggataattaacagggtcatgaaagtaaacgttg

SEQ ID NO: 449 - DNA, 50 bp, Artificial Sequence
  Synthetic
ggttgatgtgattaatcttccctgtcctaaatatccaaagtactactacc

SEQ ID NO: 450 - DNA, 45 bp, Artificial Sequence
  Synthetic
gcaatttgtgttttgtgtgtgtttaaatcagcctttctctacacc

SEQ ID NO: 451 - DNA, 43 bp, Artificial Sequence
  Synthetic
gatggacactgactgttgttactttgtcactcaagcggcattc

SEQ ID NO: 452 - DNA, 42 bp, Artificial Sequence
  Synthetic
gatgcttttgggacgctggtacaccttttgttaattaaggcg

SEQ ID NO: 453 - DNA, 46 bp, Artificial Sequence
  Synthetic
aaagctacgttgagtacttcggatgtaaagtcagactattacactc

SEQ ID NO: 454 - DNA, 45 bp, Artificial Sequence
  Synthetic
tgccacctgcgagatttacgcaaggtagaggcataaaaacttaat

SEQ ID NO: 455 - DNA, 46 bp, Artificial Sequence
  Synthetic
tgctggcttctgatttgtatgatttagatttacattaggctccaca

SEQ ID NO: 456 - DNA, 38 bp, Artificial Sequence
  Synthetic
aagcatgtttcagaggtcgcgttccgtaaagactccgg

SEQ ID NO: 457 - DNA, 44 bp, Artificial Sequence
  Synthetic
gcctaaacaagagggcgactcccatgtggaggtataacaaaatt

SEQ ID NO: 458 - DNA, 42 bp, Artificial Sequence
  Synthetic
cttctcgtaggcactttgcggaccggtacccttgtatacgct

SEQ ID NO: 459 - DNA, 42 bp, Artificial Sequence
  Synthetic
agggagacatcaaggctgggtttttctcaagacccgtccaag

SEQ ID NO: 460 - DNA, 40 bp, Artificial Sequence
  Synthetic
ccactgccaccaacaaacatccgccatggggagatctgga

SEQ ID NO: 461 - DNA, 42 bp, Artificial Sequence
  Synthetic
gtgcggtagctttaatggcctccattgctcctatcaaatcag

SEQ ID NO: 462 - DNA, 45 bp, Artificial Sequence
  Synthetic
tctttgttcttctgaagaaatgggagccttcaatcatcatgtcac

SEQ ID NO: 463 - DNA, 43 bp, Artificial Sequence
  Synthetic
gtgtgaaattcgcccatagggaatgaatgataacacaaatgcc

SEQ ID NO: 464 - DNA, 41 bp, Artificial Sequence
  Synthetic
gcaggtattgggtggctctggctaagccaaaacatacaaca

SEQ ID NO: 465 - DNA, 43 bp, Artificial Sequence
  Synthetic
cctatggttccatgtacacacaacggtgaaggaccatgttctc

SEQ ID NO: 466 - DNA, 45 bp, Artificial Sequence
  Synthetic
acttgtcaccaatccattccaagtggttgaaaaagtttactgagt

SEQ ID NO: 467 - DNA, 42 bp, Artificial Sequence
  Synthetic
ggtctcttccatctggattttgactggctacaaccaacagga

SEQ ID NO: 468 - DNA, 41 bp, Artificial Sequence
  Synthetic
ccccggagttgaatcatctccagtgtgtggagtacaatctc

SEQ ID NO: 469 - DNA, 46 bp, Artificial Sequence
  Synthetic
tccacatcattttcatctgtgacaaagtagaggacacaattctgat

SEQ ID NO: 470 - DNA, 42 bp, Artificial Sequence
  Synthetic
ggttctttttcaccggggaatataaagcctatcaacacacca

SEQ ID NO: 471 - DNA, 43 bp, Artificial Sequence
  Synthetic
aaacacccttctgaagttagctgagggaaaacaagagctatcg

SEQ ID NO: 472 - DNA, 41 bp, Artificial Sequence
  Synthetic
gaggccagaaacggctatcttgatgtgatagcttcataccc

SEQ ID NO: 473 - DNA, 42 bp, Artificial Sequence
  Synthetic
gtcgtccaaggttgcaggtcacagtgcatttctactaaatcc

SEQ ID NO: 474 - DNA, 46 bp, Artificial Sequence
  Synthetic
ctcctcctctgtaatctcatactcaaaatgacttagtgttaccagc

SEQ ID NO: 475 - DNA, 47 bp, Artificial Sequence
  Synthetic
ttctgcttcatggacaatataccaaaagaagtcttaacagaaatggc

SEQ ID NO: 476 - DNA, 47 bp, Artificial Sequence
  Synthetic
ggagttattttcacagcctgcaaccgaaagtataacaaaagtccaga

SEQ ID NO: 477 - DNA, 49 bp, Artificial Sequence
  Synthetic
aactctctgttaacatagcatgcttatatcaaatgttatgtgatcctcc

SEQ ID NO: 478 - DNA, 44 bp, Artificial Sequence
  Synthetic
tcagaattgcttcttgaagtgcatcctgaagaggaaaacaatgg

SEQ ID NO: 479 - DNA, 47 bp, Artificial Sequence
  Synthetic
acagtccagttctgctaaatctttgcgggagaaagagcttattttac

SEQ ID NO: 480 - DNA, 40 bp, Artificial Sequence
  Synthetic
gggccctgattttccttctcgtccaccacgtcccctgaaa

SEQ ID NO: 481 - DNA, 45 bp, Artificial Sequence
  Synthetic
actcatgaataagaagttgcagcaatattgttaaagggcacagca

SEQ ID NO: 482 - DNA, 41 bp, Artificial Sequence
  Synthetic
tcagcaaacgatcagcaagagtgcaattgcctacctgatgt

SEQ ID NO: 483 - DNA, 44 bp, Artificial Sequence
  Synthetic
gatgttgttgggtctattgcatctatacagtgcctgtggaaagt

SEQ ID NO: 484 - DNA, 40 bp, Artificial Sequence
  Synthetic
gccaatgctatccgttttgtggtaacgccattgcagtgtt

SEQ ID NO: 485 - DNA, 45 bp, Artificial Sequence
  Synthetic
agtaggtatttgctgaacccttctacaccacgtgacgttttaaat

SEQ ID NO: 486 - DNA, 44 bp, Artificial Sequence
  Synthetic
acttctagtttttattgtgcctcggtttcagagacagatgctgg

SEQ ID NO: 487 - DNA, 48 bp, Artificial Sequence
  Synthetic
gtctggcaaattgaatctaaacactcacaaagtattagttcctaaggt

SEQ ID NO: 488 - DNA, 46 bp, Artificial Sequence
  Synthetic
tccaaagaaaaacaagctatctccaattgccacagtttgtaaatgg

SEQ ID NO: 489 - DNA, 46 bp, Artificial Sequence
  Synthetic
cctcaattccagagggaggtgtcctaatattttggataattggcag

SEQ ID NO: 490 - DNA, 48 bp, Artificial Sequence
  Synthetic
ccaaatgactcagagagactggatgtgaactatagtgaaataaactgc

SEQ ID NO: 491 - DNA, 38 bp, Artificial Sequence
  Synthetic
gttggcagctgacgccggttgtccacgacctactcacc

SEQ ID NO: 492 - DNA, 41 bp, Artificial Sequence
  Synthetic
ttgcacagccagttgacgttttggtaatggtcattcagttc

SEQ ID NO: 493 - DNA, 46 bp, Artificial Sequence
  Synthetic
tccatccgttataaaaaagcccgaacctgataaatactcatgaagg

SEQ ID NO: 494 - DNA, 39 bp, Artificial Sequence
  Synthetic
gcacatacattgctccgtccctcgcgccttcagacctga

SEQ ID NO: 495 - DNA, 42 bp, Artificial Sequence
  Synthetic
tggaggtggccctgtataggtcaacccatatttgatgtttct

SEQ ID NO: 496 - DNA, 46 bp, Artificial Sequence
  Synthetic
gcttaaaaaatccttcccccattctttgatatcagttccttgttgg

SEQ ID NO: 497 - DNA, 46 bp, Artificial Sequence
  Synthetic
gcattgagagaagtaacagtagtctgtgagaaattgaaagaaagcg

SEQ ID NO: 498 - DNA, 45 bp, Artificial Sequence
  Synthetic
gcagctgtaaaatcaactccttcattgtccaatcttgctatggaa

SEQ ID NO: 499 - DNA, 49 bp, Artificial Sequence
  Synthetic
ttaaacatgtcgcaaaccatttgataccctattgaatacagatatgaga

SEQ ID NO: 500 - DNA, 40 bp, Artificial Sequence
  Synthetic
tatggtcgttgcagacgtgggccctaaaatttagcaaacg

SEQ ID NO: 501 - DNA, 45 bp, Artificial Sequence
  Synthetic
gttgttgcatatccagcataatcaagtgctgcctagaatttcatg

SEQ ID NO: 502 - DNA, 46 bp, Artificial Sequence
  Synthetic
agctgtctactaattgctcatagcaggatattgtattagacctgca

SEQ ID NO: 503 - DNA, 44 bp, Artificial Sequence
  Synthetic
gcactatagcttctaccataaaccaggacgattcaggtacagaa

SEQ ID NO: 504 - DNA, 45 bp, Artificial Sequence
  Synthetic
ctttccactgcctcggctatgaaagtatttaggtagtccatatgt

SEQ ID NO: 505 - DNA, 39 bp, Artificial Sequence
  Synthetic
tgctcccgtacactgtttgtgaagggacatagaggggga

SEQ ID NO: 506 - DNA, 45 bp, Artificial Sequence
  Synthetic
actctcctcgcatatgtcattatcaggcagacagtcagtttaaat

SEQ ID NO: 507 - DNA, 45 bp, Artificial Sequence
  Synthetic
cttcctcgtcctcagaatcctgggaaatgtttttttgaaagactg

SEQ ID NO: 508 - DNA, 43 bp, Artificial Sequence
  Synthetic
cggttccatactatactcagtccttgtccgaagcaaaaggaca

SEQ ID NO: 509 - DNA, 38 bp, Artificial Sequence
  Synthetic
gtttccactgtccacgggtcgagtccaacagtcccctt

SEQ ID NO: 510 - DNA, 45 bp, Artificial Sequence
  Synthetic
tggtagggggtatttttacaacatcaaacatgccattgtaactgt

SEQ ID NO: 511 - DNA, 50 bp, Artificial Sequence
  Synthetic
ggttgttaatagcagccacaatagtatggatatctgagtttattgtgtac

SEQ ID NO: 512 - DNA, 41 bp, Artificial Sequence
  Synthetic
ctatataggcccacacgaggctcatctagtgatagcggtcc

SEQ ID NO: 513 - DNA, 43 bp, Artificial Sequence
  Synthetic
ggaaaagttatatcagggccagattggggtaacaccacagttc

SEQ ID NO: 514 - DNA, 43 bp, Artificial Sequence
  Synthetic
gcatgataaaatatgttggtgcgagcctcctcctaaccctgta

SEQ ID NO: 515 - DNA, 43 bp, Artificial Sequence
  Synthetic
ggaacatctgatttattggtctgcaacaggatggcgatatggt

SEQ ID NO: 516 - DNA, 38 bp, Artificial Sequence
  Synthetic
gtccctgggctttttgtagcggctctttggtgtcctct

SEQ ID NO: 517 - DNA, 38 bp, Artificial Sequence
  Synthetic
taaggcaataccgcaccctgccaagttgcttgccaagt

SEQ ID NO: 518 - DNA, 41 bp, Artificial Sequence
  Synthetic
tcaccggttccgaagaccactagtgttgtacagcctccagg

SEQ ID NO: 519 - DNA, 42 bp, Artificial Sequence
  Synthetic
ctgcgcggcaacaagtaaactcaatggacgttaagttcccgg

SEQ ID NO: 520 - DNA, 38 bp, Artificial Sequence
  Synthetic
ctgacaccatgtgccagggccgccgacctcatgggata

SEQ ID NO: 521 - DNA, 36 bp, Artificial Sequence
  Synthetic
cggtaggagtaagggccacccttgcgtgccctgcgt

SEQ ID NO: 522 - DNA, 41 bp, Artificial Sequence
  Synthetic
cccagtggcctccagagagtaaaccttagttctcgcccagg

SEQ ID NO: 523 - DNA, 40 bp, Artificial Sequence
  Synthetic
gccttggccgtagctgtcaagacagctcagggtgttccga

SEQ ID NO: 524 - DNA, 42 bp, Artificial Sequence
  Synthetic
cggtactgttcatccacacgcattttgaactcgaccagaccg

SEQ ID NO: 525 - DNA, 40 bp, Artificial Sequence
  Synthetic
caggggtgatagctctacccgaggcatgcaactggaccag

SEQ ID NO: 526 - DNA, 42 bp, Artificial Sequence
  Synthetic
caggagaaaacagggccacagctctgcattgtctggcatgtc

SEQ ID NO: 527 - DNA, 40 bp, Artificial Sequence
  Synthetic
aatcactgagtcgcgaggcctatagctaggaccgaggctg

SEQ ID NO: 528 - DNA, 40 bp, Artificial Sequence
  Synthetic
cccttatgatgtctccgcacgcgtgttcacgcccatggag

SEQ ID NO: 529 - DNA, 40 bp, Artificial Sequence
  Synthetic
accgcagtacccaggaaggaagaattgtggcgaagtgcag

SEQ ID NO: 530 - DNA, 36 bp, Artificial Sequence
  Synthetic
acgaagtctaccgccttggcgcgccggcatattccg

SEQ ID NO: 531 - DNA, 41 bp, Artificial Sequence
  Synthetic
cgtggtgatggtcctgactccacatgtccaaggcatatggc

SEQ ID NO: 532 - DNA, 40 bp, Artificial Sequence
  Synthetic
ccccccttgatcagctccagaggccaacaacgggggaaat

SEQ ID NO: 533 - DNA, 40 bp, Artificial Sequence
  Synthetic
cctaccagtgcggcctctccgattacaaccgttccccagg

SEQ ID NO: 534 - DNA, 40 bp, Artificial Sequence
  Synthetic
tggagcgagccagaccttggatcgggtgagaatttcccgt

SEQ ID NO: 535 - DNA, 42 bp, Artificial Sequence
  Synthetic
ggtagagcacttcgcgatcagggtgattgttgggagagtcgt

SEQ ID NO: 536 - DNA, 42 bp, Artificial Sequence
  Synthetic
agggtttgttgggtggtcagagcattgcttccctcatgtcct

SEQ ID NO: 537 - DNA, 35 bp, Artificial Sequence
  Synthetic
tggcggcgcaaaatcgccattctatcgcccggagc

SEQ ID NO: 538 - DNA, 41 bp, Artificial Sequence
  Synthetic
ggggatgcctggcattaagggtgctgagtgacttcaagacg

SEQ ID NO: 539 - DNA, 41 bp, Artificial Sequence
  Synthetic
gatgccgtccacttccgtgaaacaacatcaagttcccctgc

SEQ ID NO: 540 - DNA, 38 bp, Artificial Sequence
  Synthetic
acgtggcctgaagaagacggcgaccctcgctagctagt

SEQ ID NO: 541 - DNA, 39 bp, Artificial Sequence
  Synthetic
acagggggctgctttgccgaagcagcaggactaccaagc

SEQ ID NO: 542 - DNA, 42 bp, Artificial Sequence
  Synthetic
gccccagtccacgagtatgacatcagactcttggtccactgt

SEQ ID NO: 543 - DNA, 38 bp, Artificial Sequence
  Synthetic
ttgcgggaatggctccgaacccccactcagccagatca

SEQ ID NO: 544 - DNA, 42 bp, Artificial Sequence
  Synthetic
ggagtcaaagcagcgggtatcaagcgggtggaatttcttctg

SEQ ID NO: 545 - DNA, 35 bp, Artificial Sequence
  Synthetic
ctacgccgtcgctctcagcgcggcgctgagagact

SEQ ID NO: 546 - DNA, 40 bp, Artificial Sequence
  Synthetic
atcgagtttggcagcggcagtacctctttaactgggcggt

SEQ ID NO: 547 - DNA, 44 bp, Artificial Sequence
  Synthetic
tgctgtgaccataagacaatatgaatcgtaatgagcaattccgg

SEQ ID NO: 548 - DNA, 44 bp, Artificial Sequence
  Synthetic
gcctcaacattgggtgaattcaagaaccagttaaagatctcatg

SEQ ID NO: 549 - DNA, 45 bp, Artificial Sequence
  Synthetic
cttgagtgcatctggtaatttccattggatagtaagacatggaca

SEQ ID NO: 550 - DNA, 47 bp, Artificial Sequence
  Synthetic
accaataaacaggtttgtcccaaaagttacctcataccactaaatgc

SEQ ID NO: 551 - DNA, 44 bp, Artificial Sequence
  Synthetic
cctgatgtccatggtattgtcattagcaatgctaggtactcatg

SEQ ID NO: 552 - DNA, 44 bp, Artificial Sequence
  Synthetic
acctaagccttcagtgagtgcttaggctgatgaaagatactcaa

SEQ ID NO: 553 - DNA, 39 bp, Artificial Sequence
  Synthetic
tgccatgtgtaatcgcccacaagccatgtatgttccaca

SEQ ID NO: 554 - DNA, 38 bp, Artificial Sequence
  Synthetic
gtagggtagtgctctgggtgttatcacagggcaaagct

SEQ ID NO: 555 - DNA, 44 bp, Artificial Sequence
  Synthetic
tggaatagtaaacacctgatgtacgtagtctcaacaggaggaca

SEQ ID NO: 556 - DNA, 44 bp, Artificial Sequence
  Synthetic
tgtcgtatgtcagcaaaacaaacatatgcatacatggtcccatt

SEQ ID NO: 557 - DNA, 45 bp, Artificial Sequence
  Synthetic
ggagatccatcacatccaagtagtagaaatcatgatgacttggtc

SEQ ID NO: 558 - DNA, 45 bp, Artificial Sequence
  Synthetic
cgtcccacaatggatgttgttaaagtgtgtgtattaatccatggt

SEQ ID NO: 559 - DNA, 49 bp, Artificial Sequence
  Synthetic
tgtgttagaatttgtggaggctagaccaatggctagtttagataacaag

SEQ ID NO: 560 - DNA, 50 bp, Artificial Sequence
  Synthetic
gggggtgctactcaaattaataagtactttaccaacactatcttagaagt

SEQ ID NO: 561 - DNA, 48 bp, Artificial Sequence
  Synthetic
ccttgtcacctggaaaaacatcataggagtttaacataaatccagtca

SEQ ID NO: 562 - DNA, 46 bp, Artificial Sequence
  Synthetic
ggttgcctagtttcattctcatgttaaagtccgattagggaaaagt

SEQ ID NO: 563 - DNA, 38 bp, Artificial Sequence
  Synthetic
tctgggggtgtgatggttagtggatccacaagtgttgg

SEQ ID NO: 564 - DNA, 38 bp, Artificial Sequence
  Synthetic
aacagcccatgggtccagcttgcaaagccgctatgtcc

SEQ ID NO: 565 - DNA, 40 bp, Artificial Sequence
  Synthetic
actgagccctcctgcgacaaaccacaaaagatgctcgact

SEQ ID NO: 566 - DNA, 38 bp, Artificial Sequence
  Synthetic
gcaggcagcagtggatgtgtacgcgtctcggaaaaacg

SEQ ID NO: 567 - DNA, 40 bp, Artificial Sequence
  Synthetic
cgatgagagcggaatgtcccgaaaccaaattcttccgcgc

SEQ ID NO: 568 - DNA, 40 bp, Artificial Sequence
  Synthetic
accaggataccccgtggattgtcaccatgtccaccccatg

SEQ ID NO: 569 - DNA, 43 bp, Artificial Sequence
  Synthetic
ggcgtaagataattcctgcagaaatactgcgactacttcaaca

SEQ ID NO: 570 - DNA, 43 bp, Artificial Sequence
  Synthetic
actctggctgtacaagaattacacccagaggaggagttactgt

SEQ ID NO: 571 - DNA, 45 bp, Artificial Sequence
  Synthetic
gctattccactgtcctcaaacagtggaagcaattagtctttctcc

SEQ ID NO: 572 - DNA, 45 bp, Artificial Sequence
  Synthetic
tgtttgttttacaacccaatctggtcggctgcgctatatttttac

SEQ ID NO: 573 - DNA, 50 bp, Artificial Sequence
  Synthetic
acaatctagtaatggctgaatccaaagaggtaaagtagtatcatacatga

SEQ ID NO: 574 - DNA, 39 bp, Artificial Sequence
  Synthetic
ggtggggctgcttgatctccgtcttcacctgtctccccg

SEQ ID NO: 575 - DNA, 41 bp, Artificial Sequence
  Synthetic
cctgatcgtggaacagatcgaagaacgtcatatcctctctg

SEQ ID NO: 576 - DNA, 42 bp, Artificial Sequence
  Synthetic
catggaggtacccttaggaagtgtgcaaacagtaatcaacgc

SEQ ID NO: 577 - DNA, 42 bp, Artificial Sequence
  Synthetic
tccctccctaggtgtttgagcaacttgggtattggtacggga

SEQ ID NO: 578 - DNA, 47 bp, Artificial Sequence
  Synthetic
tcatctatttcaaactgcgccatagacattggtgatccagaatacat

SEQ ID NO: 579 - DNA, 46 bp, Artificial Sequence
  Synthetic
ctgtctagaggagttgtcagctggtgatttgacagacatattcaat

SEQ ID NO: 580 - DNA, 44 bp, Artificial Sequence
  Synthetic
gggtcgaaagatacattttgcctataaactgggtgacactgaaa

SEQ ID NO: 581 - DNA, 46 bp, Artificial Sequence
  Synthetic
tctgtataaaatccggccatttgctttagtactttttcagcgagtc

SEQ ID NO: 582 - DNA, 49 bp, Artificial Sequence
  Synthetic
cctcactagtaactagagaaccactcctaaaaatggattagggaatcac

SEQ ID NO: 583 - DNA, 49 bp, Artificial Sequence
  Synthetic
acctaaaggtgtctgatccaaatcaccatataagggcttaaatttttgg

SEQ ID NO: 584 - DNA, 49 bp, Artificial Sequence
  Synthetic
cgaagttaaagtgatagaacaccgaggtttctatttgaagtttgtacac

SEQ ID NO: 585 - DNA, 40 bp, Artificial Sequence
  Synthetic
tgctggtgagagagaaaaggccctctagcagcggccaact

SEQ ID NO: 586 - DNA, 42 bp, Artificial Sequence
  Synthetic
gcgggtaggggcagtataccaaaaccctaatgtggtccaccg

SEQ ID NO: 587 - DNA, 38 bp, Artificial Sequence
  Synthetic
acaggacctcaggcgggaggcgaggctatgttccgcca

SEQ ID NO: 588 - DNA, 38 bp, Artificial Sequence
  Synthetic
agggcgtaggtgatggctccgccattggctgccacttt

SEQ ID NO: 589 - DNA, 40 bp, Artificial Sequence
  Synthetic
agcgacctcagaggcgttccgctacaaggttactgtgggc

SEQ ID NO: 590 - DNA, 39 bp, Artificial Sequence
  Synthetic
aaaaccaacacccgtgggtcatacgctcagtgtaggcgc

SEQ ID NO: 591 - DNA, 36 bp, Artificial Sequence
  Synthetic
tgccagggacgacgtaggaatgtcgaccccgctgaa

SEQ ID NO: 592 - DNA, 41 bp, Artificial Sequence
  Synthetic
cagaggcggcataggtgagacttttgatgccagtcagagca

SEQ ID NO: 593 - DNA, 39 bp, Artificial Sequence
  Synthetic
ccttagagccatccgggtaggtccggccataacccacca

SEQ ID NO: 594 - DNA, 41 bp, Artificial Sequence
  Synthetic
gcagcctcaagcatctttgggtatacattaaccccccggcc

SEQ ID NO: 595 - DNA, 40 bp, Artificial Sequence
  Synthetic
gccagatttgctgtccgtgcaaccaataggccgacctgcc

SEQ ID NO: 596 - DNA, 35 bp, Artificial Sequence
  Synthetic
aatgacaacccggcgccccggcttcgctgctttca

SEQ ID NO: 597 - DNA, 42 bp, Artificial Sequence
  Synthetic
ggaggacccgactagtggtctgctgcggatgtatgtgagctg

SEQ ID NO: 598 - DNA, 38 bp, Artificial Sequence
  Synthetic
gagatgcccacctcgcgaaggcgccacactgagaagtg

SEQ ID NO: 599 - DNA, 40 bp, Artificial Sequence
  Synthetic
aggtcgagctcaaggacggcttgtacgagctagtggaggc

SEQ ID NO: 600 - DNA, 38 bp, Artificial Sequence
  Synthetic
ccagggccccaattcttctcagccttggcgcgcttcct

SEQ ID NO: 601 - DNA, 35 bp, Artificial Sequence
  Synthetic
tgggcctggtcacgccaaggggctggacctcgtgt

SEQ ID NO: 602 - DNA, 41 bp, Artificial Sequence
  Synthetic
gggagacccgcgtgttggtatctttgccctcgaacttgagt

SEQ ID NO: 603 - DNA, 40 bp, Artificial Sequence
  Synthetic
agactgggccggtcgaagagtgtgctttggctttctctca

SEQ ID NO: 604 - DNA, 42 bp, Artificial Sequence
  Synthetic
gcacccaggctagtggtgtaagactgctagtgaccaactgct

SEQ ID NO: 605 - DNA, 40 bp, Artificial Sequence
  Synthetic
attggctgcatatcgacgacaacaatataccaaaacggcg

SEQ ID NO: 606 - DNA, 40 bp, Artificial Sequence
  Synthetic
ccaccaacgattcaggaacattaccgaaagacacagtgtt

SEQ ID NO: 607 - DNA, 48 bp, Artificial Sequence
  Synthetic
gcatgccagatttaccggttatggggttgtttattaagtttaaatcgg

SEQ ID NO: 608 - DNA, 49 bp, Artificial Sequence
  Synthetic
aaactctttcatatgccgttcctatgattcgggctatagagtattttac

SEQ ID NO: 609 - DNA, 40 bp, Artificial Sequence
  Synthetic
acaacatccaacgccgttttagtggaaacgaaaaaccgtc

SEQ ID NO: 610 - DNA, 44 bp, Artificial Sequence
  Synthetic
aatcgagtcttttcgttcccataatgtttactgctattggacga

SEQ ID NO: 611 - DNA, 40 bp, Artificial Sequence
  Synthetic
tgattaaacaatgggccgttgaggctatgttacctgcact

SEQ ID NO: 612 - DNA, 45 bp, Artificial Sequence
  Synthetic
ggaaagaccgtttgttttatagtggaggggtatgtatattagcgc

SEQ ID NO: 613 - DNA, 43 bp, Artificial Sequence
  Synthetic
tgagtggattattcgacgggactttttcatcgtcgttacttcc

SEQ ID NO: 614 - DNA, 45 bp, Artificial Sequence
  Synthetic
cctctatggttgacagcacatttcttgctgggttatttaacatcc

SEQ ID NO: 615 - DNA, 42 bp, Artificial Sequence
  Synthetic
acctcatcgaaatgcgtatagccagaaactatccgacagaga

SEQ ID NO: 616 - DNA, 38 bp, Artificial Sequence
  Synthetic
ttttcggtttaggcagccggcgtttcctccttgcagac

SEQ ID NO: 617 - DNA, 37 bp, Artificial Sequence
  Synthetic
tgtggccgcccggttttggacgaaccgtgttccgtcg

SEQ ID NO: 618 - DNA, 38 bp, Artificial Sequence
  Synthetic
cagtacgtgctgccgggtttcccagaccccgagactgt

SEQ ID NO: 619 - DNA, 38 bp, Artificial Sequence
  Synthetic
ccatccaacagggtgcggttcatcctcccagtgaccct

SEQ ID NO: 620 - DNA, 39 bp, Artificial Sequence
  Synthetic
aggaaacatgatgcccggggtatctaggtttgccccccg

SEQ ID NO: 621 - DNA, 49 bp, Artificial Sequence
  Synthetic
ccctgcttgcccatactatatgtttattagatcgatgggaaaaaattcg

SEQ ID NO: 622 - DNA, 43 bp, Artificial Sequence
  Synthetic
gtgtcctgtgtcagctgctgtttagacaagatagaggaagagc

SEQ ID NO: 623 - DNA, 39 bp, Artificial Sequence
  Synthetic
atctggcctggtgcaataggccatcaatgaggaagctgc

SEQ ID NO: 624 - DNA, 40 bp, Artificial Sequence
  Synthetic
gttcgcattttggaccaacaaggagcaagcttcacaggag

SEQ ID NO: 625 - DNA, 46 bp, Artificial Sequence
  Synthetic
tggaatattgctggtgatcctttcccaccagggattagatatcagt

SEQ ID NO: 626 - DNA, 45 bp, Artificial Sequence
  Synthetic
tctgtatgtcattgacagtccagcccatcctgataaatggacagt

SEQ ID NO: 627 - DNA, 44 bp, Artificial Sequence
  Synthetic
tggttattttttgcactgcctctgatatgcaagaatgaggggtg

SEQ ID NO: 628 - DNA, 50 bp, Artificial Sequence
  Synthetic
ccattgctctccaattactgtgatatcaggaaagtactatttttagatgg

SEQ ID NO: 629 - DNA, 45 bp, Artificial Sequence
  Synthetic
actggccatcttcctgctaattttagaagcagaagttattccagc

SEQ ID NO: 630 - DNA, 43 bp, Artificial Sequence
  Synthetic
gtgggatgtgtacttctgaacttatggaaagctaggggatggt

SEQ ID NO: 631 - DNA, 46 bp, Artificial Sequence
  Synthetic
gccaagtattgtagagatcctacctattaggacacatagttagccc

SEQ ID NO: 632 - DNA, 49 bp, Artificial Sequence
  Synthetic
gcagaattcttattatggcttccaccttagggcaacatatctatgaaac

SEQ ID NO: 633 - DNA, 43 bp, Artificial Sequence
  Synthetic
tgcttccttccacacaggtactgtagtgctacagaaaaattgt

SEQ ID NO: 634 - DNA, 45 bp, Artificial Sequence
  Synthetic
agttgatactactggcctaattccatggaacaggaccatgtacaa

SEQ ID NO: 635 - DNA, 43 bp, Artificial Sequence
  Synthetic
tctcttgttaatagcagccctgtaacaatgtatgcccctccca

SEQ ID NO: 636 - DNA, 41 bp, Artificial Sequence
  Synthetic
cgcctcaatagccctcagcaaacaatgacgctgacggtaca

SEQ ID NO: 637 - DNA, 41 bp, Artificial Sequence
  Synthetic
gctcccaccctatctgctgcttggatggcctactgtaaggg

SEQ ID NO: 638 - DNA, 42 bp, Artificial Sequence
  Synthetic
agcaagctcgatgtcagcagtttagcatttcatcacgtggcc

SEQ ID NO: 639 - DNA, 40 bp, Artificial Sequence
  Synthetic
cgtcagagattcccacctcggtcaacgacatgcagtggct

SEQ ID NO: 640 - DNA, 39 bp, Artificial Sequence
  Synthetic
ccaggggctcagtctggacagtttaggcgcaggtttccg

SEQ ID NO: 641 - DNA, 36 bp, Artificial Sequence
  Synthetic
cccccttcagcacctacgtggagccggtcagcagct

SEQ ID NO: 642 - DNA, 37 bp, Artificial Sequence
  Synthetic
tcttcgccgggctggacgacttcgagggcgtagtggc

SEQ ID NO: 643 - DNA, 36 bp, Artificial Sequence
  Synthetic
ttcgaggctgtgctgcgcggcgaactccaccgaggt

SEQ ID NO: 644 - DNA, 41 bp, Artificial Sequence
  Synthetic
cgcgtacatggccaagctccaacacaacaaactccccctcg

SEQ ID NO: 645 - DNA, 39 bp, Artificial Sequence
  Synthetic
aggtcctggactgcgtggttaacgtacatgttctgcgcc

SEQ ID NO: 646 - DNA, 37 bp, Artificial Sequence
  Synthetic
agctcgtgctcccagaggcagtacatccccgcgtacg

SEQ ID NO: 647 - DNA, 38 bp, Artificial Sequence
  Synthetic
gctccggggacagttctccaggacctccgggacttcga

SEQ ID NO: 648 - DNA, 41 bp, Artificial Sequence
  Synthetic
gggcaggactagctcgtcgtctcctgaacacgctaatgtgc

SEQ ID NO: 649 - DNA, 39 bp, Artificial Sequence
  Synthetic
cgatacacggcaacccccggctctcctccacccaaacga

SEQ ID NO: 650 - DNA, 37 bp, Artificial Sequence
  Synthetic
ctggtgttcgaactgggccacaccgcgtcctccgaca

SEQ ID NO: 651 - DNA, 39 bp, Artificial Sequence
  Synthetic
tggagcttgtggccctacacccagacggaacagctccca

SEQ ID NO: 652 - DNA, 40 bp, Artificial Sequence
  Synthetic
gcaagggggagctgctgatctaatgggcgtaaagacgggc

SEQ ID NO: 653 - DNA, 38 bp, Artificial Sequence
  Synthetic
tgaccacatggggccggtacctaaggcccaccgtcacg

SEQ ID NO: 654 - DNA, 36 bp, Artificial Sequence
  Synthetic
gctgctgccgacacaacgtctgggcggtcagcgaga

SEQ ID NO: 655 - DNA, 37 bp, Artificial Sequence
  Synthetic
tcgggctggcggtcgatctcgctaaccagcagctcca

SEQ ID NO: 656 - DNA, 36 bp, Artificial Sequence
  Synthetic
ccacgacatccgcggctttacacgatctggcgctgc

SEQ ID NO: 657 - DNA, 39 bp, Artificial Sequence
  Synthetic
caaggcggcccacttggaatcatcatctctaagcgcgcg

SEQ ID NO: 658 - DNA, 41 bp, Artificial Sequence
  Synthetic
acgaagtgaaccaactgccgaatacagcgtcctgaacacgt

SEQ ID NO: 659 - DNA, 34 bp, Artificial Sequence
  Synthetic
acgatcgtgctgcgcgagcgggtggaccacgtca

SEQ ID NO: 660 - DNA, 39 bp, Artificial Sequence
  Synthetic
gctgacgcgtgcttttgttccgccagcgcgtgtatgagt

SEQ ID NO: 661 - DNA, 40 bp, Artificial Sequence
  Synthetic
agagctacgcgtacctctgcccggaaagaccactagcccg

SEQ ID NO: 662 - DNA, 35 bp, Artificial Sequence
  Synthetic
ccaccaacgtgccctacccccaggggcaggacgaa

SEQ ID NO: 663 - DNA, 37 bp, Artificial Sequence
  Synthetic
ttgtgcgggaggggcttggcttgggggattcgcaggc

SEQ ID NO: 664 - DNA, 41 bp, Artificial Sequence
  Synthetic
ccccgcgggatcggatacaagtaggtgataaacagcgggcg

SEQ ID NO: 665 - DNA, 36 bp, Artificial Sequence
  Synthetic
tggcacaacagacccgcggcagggcgttgtagtgcg

SEQ ID NO: 666 - DNA, 36 bp, Artificial Sequence
  Synthetic
ggtccatgttcgagggcggcgccggccaattcttcc

SEQ ID NO: 667 - DNA, 40 bp, Artificial Sequence
  Synthetic
tcgaaggcggaatagtggcgcgtcctgtctctgcagtcgt

SEQ ID NO: 668 - DNA, 35 bp, Artificial Sequence
  Synthetic
tgcaggcggttgtcgaggctgcttcggcggctcct

SEQ ID NO: 669 - DNA, 40 bp, Artificial Sequence
  Synthetic
cgtcagcaccttcatcgacctggtgtagacctccaggggc

SEQ ID NO: 670 - DNA, 38 bp, Artificial Sequence
  Synthetic
gccgcacctcaaggaggaactccaatcagcgcccgaac

SEQ ID NO: 671 - DNA, 39 bp, Artificial Sequence
  Synthetic
tccagcgcaaccagctcccacgcgatggtctctatgtcc

SEQ ID NO: 672 - DNA, 35 bp, Artificial Sequence
  Synthetic
agaagttctgccggcggctttgccccccacaaccc

SEQ ID NO: 673 - DNA, 36 bp, Artificial Sequence
  Synthetic
aggttccgaacgccgtcggtggtaccgcctcaagcc

SEQ ID NO: 674 - DNA, 37 bp, Artificial Sequence
  Synthetic
tctgcgccaagtgcctgggagacgaactcgaaggcgg

SEQ ID NO: 675 - DNA, 35 bp, Artificial Sequence
  Synthetic
acgccggtgttctgcacgcatgaacgactgggccg

SEQ ID NO: 676 - DNA, 37 bp, Artificial Sequence
  Synthetic
gctgatccacatgctggccatacgacgtcaaggggcg

SEQ ID NO: 677 - DNA, 36 bp, Artificial Sequence
  Synthetic
acgtgagggctcgcaggacacaacaggtgggtgctt

SEQ ID NO: 678 - DNA, 38 bp, Artificial Sequence
  Synthetic
tccctcagatgatagggcgtgtgatgcgacgcctgtgc

SEQ ID NO: 679 - DNA, 37 bp, Artificial Sequence
  Synthetic
ggagtcgaggaccttcagggcggcgttcaacgacgcc

SEQ ID NO: 680 - DNA, 38 bp, Artificial Sequence
  Synthetic
cctgcatgccaatgcccatggaaacccacgccccagtg

SEQ ID NO: 681 - DNA, 37 bp, Artificial Sequence
  Synthetic
cggcgggatccatggcgatatacagcgctccgatcgg

SEQ ID NO: 682 - DNA, 38 bp, Artificial Sequence
  Synthetic
ccacgaacacgagctcggtctcaaccaccttcgctccc

SEQ ID NO: 683 - DNA, 36 bp, Artificial Sequence
  Synthetic
tcatccacgacgccccggacagctcggcgatggtca

SEQ ID NO: 684 - DNA, 36 bp, Artificial Sequence
  Synthetic
accgaggaggcgtgggtgaccttgtcgcggtggttc

SEQ ID NO: 685 - DNA, 37 bp, Artificial Sequence
  Synthetic
acggatcggcgggcaaaaaccgatggcgtccaccaga

SEQ ID NO: 686 - DNA, 38 bp, Artificial Sequence
  Synthetic
gcgaatagctacggccgcttgtccagacggacagcacc

SEQ ID NO: 687 - DNA, 37 bp, Artificial Sequence
  Synthetic
cccgtcggtcgcatacagcactgcgatcacgaagggc

SEQ ID NO: 688 - DNA, 35 bp, Artificial Sequence
  Synthetic
tgcacaacgtacggggcggtcctgcgccgacaaga

SEQ ID NO: 689 - DNA, 38 bp, Artificial Sequence
  Synthetic
tgacatagtccccgcccaggccccatgttttccgcggc

SEQ ID NO: 690 - DNA, 36 bp, Artificial Sequence
  Synthetic
gttggtcccgacgctcagcctgcgcttcaagcacgg

SEQ ID NO: 691 - DNA, 36 bp, Artificial Sequence
  Synthetic
tggtgaagggcgacgaacggacacccagatgcgcct

SEQ ID NO: 692 - DNA, 37 bp, Artificial Sequence
  Synthetic
agctgcaccagggtctggcacacgaaaatcacccgcc

SEQ ID NO: 693 - DNA, 42 bp, Artificial Sequence
  Synthetic
cgtggcattcagacagtacgggtcgaacctgtttttacgggc

SEQ ID NO: 694 - DNA, 37 bp, Artificial Sequence
  Synthetic
accacacgacatgcaggcttccatgcccagcccccaa

SEQ ID NO: 695 - DNA, 34 bp, Artificial Sequence
  Synthetic
aagtcgacacaccgcgcggcggaaggaaacgggc

SEQ ID NO: 696 - DNA, 37 bp, Artificial Sequence
  Synthetic
cccgtgcatgaagacctggatccaccggggtgttgca

SEQ ID NO: 697 - DNA, 36 bp, Artificial Sequence
  Synthetic
gcatcatcccgcccgcatccgtcgccccatgcacgt

SEQ ID NO: 698 - DNA, 35 bp, Artificial Sequence
  Synthetic
acgcgtggtaggtcgctgggtttccgggagcgctg

SEQ ID NO: 699 - DNA, 38 bp, Artificial Sequence
  Synthetic
tgggatcggccatcttaagcgatgggactccgcgtcgt

SEQ ID NO: 700 - DNA, 40 bp, Artificial Sequence
  Synthetic
ggcatgtaggagcacgctgccccgatcactgtgtactacg

SEQ ID NO: 701 - DNA, 39 bp, Artificial Sequence
  Synthetic
ccaaaacaaaccggctggcgtcggtctgtatgtcctgcg

SEQ ID NO: 702 - DNA, 40 bp, Artificial Sequence
  Synthetic
cgtgctggccccttgatacgatgctggttgggtgggggta

SEQ ID NO: 703 - DNA, 42 bp, Artificial Sequence
  Synthetic
ccagccttgcaagcactctagtacttatcctggggagaaggg

SEQ ID NO: 704 - DNA, 43 bp, Artificial Sequence
  Synthetic
acagcaatacaatacagcaaacagtgatctggaggggaacttg

SEQ ID NO: 705 - DNA, 42 bp, Artificial Sequence
  Synthetic
ccgtatcccagtgttgcttgcttcagtgtccattttgccagg

SEQ ID NO: 706 - DNA, 45 bp, Artificial Sequence
  Synthetic
acctccatagcacttatctcactatgacaaaacaacatcacagca

SEQ ID NO: 707 - DNA, 49 bp, Artificial Sequence
  Synthetic
gcactggtttacaattatttctggctgctgctttattcttctatcatag

SEQ ID NO: 708 - DNA, 41 bp, Artificial Sequence
  Synthetic
gacaccgcttattcacatactgtagacactacaagacagcg

SEQ ID NO: 709 - DNA, 48 bp, Artificial Sequence
  Synthetic
ggtgataaccaaaaatgtgacccatcttaacaaatttttggatggaca

SEQ ID NO: 710 - DNA, 43 bp, Artificial Sequence
  Synthetic
cccatttccacaatacaacttctgtggcagccagttaccctaa

SEQ ID NO: 711 - DNA, 38 bp, Artificial Sequence
  Synthetic
ggggttctctccctcgtggacagcgccctggtaaatgt

SEQ ID NO: 712 - DNA, 47 bp, Artificial Sequence
  Synthetic
tgcctagcaagcattgtttaatgatcaagattcctaaaaacattggg

SEQ ID NO: 713 - DNA, 38 bp, Artificial Sequence
  Synthetic
cactggatatggacgggcgtcgggcattggcacaggac

SEQ ID NO: 714 - DNA, 40 bp, Artificial Sequence
  Synthetic
gtcaattgtgtccccccgggccgtaggtgacaatgctgaa

SEQ ID NO: 715 - DNA, 40 bp, Artificial Sequence
  Synthetic
gccagtagtgcgcctctggtacgtagtgacacagacctgc

SEQ ID NO: 716 - DNA, 40 bp, Artificial Sequence
  Synthetic
gcgtagggtctcctctcacagaactagatgtactgggtga

SEQ ID NO: 717 - DNA, 41 bp, Artificial Sequence
  Synthetic
gcagcatggaggaaagtactgatacaacggacattgaacac

SEQ ID NO: 718 - DNA, 45 bp, Artificial Sequence
  Synthetic
agggattttcagcatcatcaaacttgattgaggtttctaggggac

SEQ ID NO: 719 - DNA, 44 bp, Artificial Sequence
  Synthetic
actcatgtctgcatcctcaatgtaaagcagatgacaaatgtcct

SEQ ID NO: 720 - DNA, 47 bp, Artificial Sequence
  Synthetic
ggtgtgccttaaaaactcaaaaaacctaactttaccatcagtgttcc

SEQ ID NO: 721 - DNA, 45 bp, Artificial Sequence
  Synthetic
acctcccaaaacttaagatctttgtaaatgtccctctaaggatgc

SEQ ID NO: 722 - DNA, 42 bp, Artificial Sequence
  Synthetic
ggggctattggcaagacagaccccaacattggcaaacgtctc

SEQ ID NO: 723 - DNA, 45 bp, Artificial Sequence
  Synthetic
tctccttcacaatcggatgacatatgccaattaatttactgtgtg

SEQ ID NO: 724 - DNA, 45 bp, Artificial Sequence
  Synthetic
ggtgatatgtgaacagcatgcagcgaaagtatgtgataagtccac

SEQ ID NO: 725 - DNA, 44 bp, Artificial Sequence
  Synthetic
aggagctctctcatacagattcatttggaaacacaacagacact

SEQ ID NO: 726 - DNA, 49 bp, Artificial Sequence
  Synthetic
gatcagcaagtgtttcaccttctatataggaattgtcaaatatctggtg

SEQ ID NO: 727 - DNA, 43 bp, Artificial Sequence
  Synthetic
ttgaactgcgcgggaaactttattcagcaagttaaaacaacca

SEQ ID NO: 728 - DNA, 47 bp, Artificial Sequence
  Synthetic
gctcaggaattgctgataaatccattaagggaactattcataccaga

SEQ ID NO: 729 - DNA, 47 bp, Artificial Sequence
  Synthetic
ggtttccttcacatattcatccgtagaatctggaaaattgtatctgc

SEQ ID NO: 730 - DNA, 46 bp, Artificial Sequence
  Synthetic
aggaccacccctatccatttgatcctaatagagaacgtttagtctg

SEQ ID NO: 731 - DNA, 50 bp, Artificial Sequence
  Synthetic
tttctgtaaaaatcagcaagctgttctctttacaatgtatattttgtggc

SEQ ID NO: 732 - DNA, 44 bp, Artificial Sequence
  Synthetic
ccgttgcgcactaaatagaagtgatggcaatgttagatcttgtt

SEQ ID NO: 733 - DNA, 40 bp, Artificial Sequence
  Synthetic
gaagagtacgaacagcagtagcacacctgttgtcacactt

SEQ ID NO: 734 - DNA, 47 bp, Artificial Sequence
  Synthetic
gagagatacatgaaccgtctgtacatgcgtagattttaattctctgg

SEQ ID NO: 735 - DNA, 45 bp, Artificial Sequence
  Synthetic
atagcgactacctgagaagtacttttaaactttcaggacagtgga

SEQ ID NO: 736 - DNA, 45 bp, Artificial Sequence
  Synthetic
tgctgaagctgttcgatgatctaatatggtgagtttccatcatgg

SEQ ID NO: 737 - DNA, 50 bp, Artificial Sequence
  Synthetic
tgcccaagtatcattggttatttcatttccaaataaattacctgtcactg

SEQ ID NO: 738 - DNA, 40 bp, Artificial Sequence
  Synthetic
atgtggacggggtgttgctggggaacccaccaaaaggaaa

SEQ ID NO: 739 - DNA, 39 bp, Artificial Sequence
  Synthetic
cccgttcgctgagttgatcgagccaactgctgtcccaac

SEQ ID NO: 740 - DNA, 43 bp, Artificial Sequence
  Synthetic
agcgcgctttgatctatacatttttaaacctccaaaacacacg

SEQ ID NO: 741 - DNA, 43 bp, Artificial Sequence
  Synthetic
tggtacagtctccggtaaaggtataggtccggaagaggatcag

SEQ ID NO: 742 - DNA, 43 bp, Artificial Sequence
  Synthetic
tccgctgcatctgtatatatttcatcttcctgatccagcactt

SEQ ID NO: 743 - DNA, 47 bp, Artificial Sequence
  Synthetic
tgatcctattcaagggttgtaactctccggactttaatgtatttgtg

SEQ ID NO: 744 - DNA, 45 bp, Artificial Sequence
  Synthetic
ctctctaagatcccgctcaaactctttgaatttgaaaatcccgcg

SEQ ID NO: 745 - DNA, 44 bp, Artificial Sequence
  Synthetic
cctccccctaatccatctactataggaccctgatgtgtctgatg

SEQ ID NO: 746 - DNA, 41 bp, Artificial Sequence
  Synthetic
gatgacccgatgttcccaatcgagggtaagaggtatccaaa

SEQ ID NO: 747 - DNA, 44 bp, Artificial Sequence
  Synthetic
agccaatatcacacatatccccattgattgtcctccaattcagc

SEQ ID NO: 748 - DNA, 47 bp, Artificial Sequence
  Synthetic
tcacagttgaacattcacagtacatactgtgaactagtatactgtga

SEQ ID NO: 749 - DNA, 43 bp, Artificial Sequence
  Synthetic
tctgaacttgcacttacctttacaacctagggctactttccga

SEQ ID NO: 750 - DNA, 47 bp, Artificial Sequence
  Synthetic
cgtagtgtagtttgatacagttcctaaggaatacaaaagactatgcc

SEQ ID NO: 751 - DNA, 42 bp, Artificial Sequence
  Synthetic
gtactgctctgacaccttggatatggcccatgctactcaaga

SEQ ID NO: 752 - DNA, 48 bp, Artificial Sequence
  Synthetic
acctttttgtcactaggaaggtctatctctgataatcttgaagcattt

SEQ ID NO: 753 - DNA, 44 bp, Artificial Sequence
  Synthetic
gctaacgaagtgtccatgtgttcgtcatggaatagcgataaggg

SEQ ID NO: 754 - DNA, 45 bp, Artificial Sequence
  Synthetic
aggaaatcctcaaaatgaattccctctaggctttctgctaggtat

SEQ ID NO: 755 - DNA, 50 bp, Artificial Sequence
  Synthetic
gacaaaacctcgttgcttaaaaggtaatgatctagaaataaagctggaag

SEQ ID NO: 756 - DNA, 40 bp, Artificial Sequence
  Synthetic
gactcaactcagcaacagtctgtaagcgccctaaaacgaa

SEQ ID NO: 757 - DNA, 45 bp, Artificial Sequence
  Synthetic
gcagaaatatgatttcccagtgtcactttcttacagggtgttcca

SEQ ID NO: 758 - DNA, 44 bp, Artificial Sequence
  Synthetic
ggatcttaaatcagtttctccccttcacaggaaactctgacaga

SEQ ID NO: 759 - DNA, 40 bp, Artificial Sequence
  Synthetic
tgctccggaggttcgttctcccggcccacaatcttcgatc

SEQ ID NO: 760 - DNA, 49 bp, Artificial Sequence
  Synthetic
cgatctgctaatgtattgccttctagaatttgtatagacactgtaaagc

SEQ ID NO: 761 - DNA, 39 bp, Artificial Sequence
  Synthetic
tgcttctgcatgcacacttgcagtccctatgaacctcct

SEQ ID NO: 762 - DNA, 48 bp, Artificial Sequence
  Synthetic
ggcgggattttcaaattcaaattgagttacattcaacaaatcagaaca

SEQ ID NO: 763 - DNA, 44 bp, Artificial Sequence
  Synthetic
aggctctataggttcaattgcactattagtaccagaagcggtac

SEQ ID NO: 764 - DNA, 41 bp, Artificial Sequence
  Synthetic
tttgccacaggtttagccggtgttttgatgttttgcagatg

SEQ ID NO: 765 - DNA, 45 bp, Artificial Sequence
  Synthetic
cgttcaggattgaaaattgactgatccaatatcgagtgtttaggc

SEQ ID NO: 766 - DNA, 41 bp, Artificial Sequence
  Synthetic
taggtggacagtctcctgcatattgggatgttgctaaacca

SEQ ID NO: 767 - DNA, 44 bp, Artificial Sequence
  Synthetic
aatggcgagcatacgactgcgatgtttatggcgataaatgtttc

SEQ ID NO: 768 - DNA, 46 bp, Artificial Sequence
  Synthetic
gacatcttgttgccaaagatgttatgaatggcaattagcttttgtg

SEQ ID NO: 769 - DNA, 45 bp, Artificial Sequence
  Synthetic
ggctatgttccaaacaacttaccttgctggacaggtagtattgtc

SEQ ID NO: 770 - DNA, 41 bp, Artificial Sequence
  Synthetic
cccttatcaacaaaactgcttgctcgttggatgatgctgaa

SEQ ID NO: 771 - DNA, 43 bp, Artificial Sequence
  Synthetic
gcaacaaaaaaaagccttacacctctggagccagcaaatcctt

SEQ ID NO: 772 - DNA, 47 bp, Artificial Sequence
  Synthetic
tccacaggttcatcgtctagtaaaagtttaacagctttagatgactt

SEQ ID NO: 773 - DNA, 44 bp, Artificial Sequence
  Synthetic
attcattatggcggttcccatggtggaattgtagaagatgaagc

SEQ ID NO: 774 - DNA, 40 bp, Artificial Sequence
  Synthetic
gatggtgtttcggaactgatcgggtcctctccagtctctc

SEQ ID NO: 775 - DNA, 44 bp, Artificial Sequence
  Synthetic
ttgctgttccaccaattggtttatttggcaatttaggaataggg

SEQ ID NO: 776 - DNA, 41 bp, Artificial Sequence
  Synthetic
gtgcttgtactaggacccgcagaagaaattgaattaggccc

SEQ ID NO: 777 - DNA, 44 bp, Artificial Sequence
  Synthetic
cctgtgacttttggtacttctacttgatcgcctcttaacagtgg

SEQ ID NO: 778 - DNA, 48 bp, Artificial Sequence
  Synthetic
ggccatatctaatctgttgtcttctaattagttgatgtagaaaaccct

SEQ ID NO: 779 - DNA, 50 bp, Artificial Sequence
  Synthetic
accgtcttcctaaataagactgacttccttataaagacctaaagttttgg

SEQ ID NO: 780 - DNA, 43 bp, Artificial Sequence
  Synthetic
aattgttgggtgcggtaaggaatttccatcaagcaatactgac

SEQ ID NO: 781 - DNA, 46 bp, Artificial Sequence
  Synthetic
tgcatgtgtctaaatcttcttgtctcgacaaaacagtcaaatcaac

SEQ ID NO: 782 - DNA, 40 bp, Artificial Sequence
  Synthetic
tggtgctatgtttcttggagccgtccgtagaaatgaaggg

SEQ ID NO: 783 - DNA, 46 bp, Artificial Sequence
  Synthetic
ccgcttttaatgcatctgaaacattaagaagatctgtggatacctc

SEQ ID NO: 784 - DNA, 40 bp, Artificial Sequence
  Synthetic
gcaggctaggacacggtcacccctccactagtttggtcga

SEQ ID NO: 785 - DNA, 40 bp, Artificial Sequence
  Synthetic
gtgaattcagtgctggtgcctccatctaagttcacagagc

SEQ ID NO: 786 - DNA, 44 bp, Artificial Sequence
  Synthetic
gccaaatactcccatgtccttaagaaaagctacttccaaaggct

SEQ ID NO: 787 - DNA, 39 bp, Artificial Sequence
  Synthetic
tgttgtagatggcgtcgctgatccaggagatcgaggtat

SEQ ID NO: 788 - DNA, 43 bp, Artificial Sequence
  Synthetic
ccagtaaattctgtgcacattggtgacccactggatcttctcc

SEQ ID NO: 789 - DNA, 46 bp, Artificial Sequence
  Synthetic
accaatgtagagttttgtgccaaatcaaattacctcataccactgc

SEQ ID NO: 790 - DNA, 46 bp, Artificial Sequence
  Synthetic
ggattgtaagccaatatcccatacagtggtccagaagatagaaagg

SEQ ID NO: 791 - DNA, 44 bp, Artificial Sequence
  Synthetic
tgcgttcttgtttttgatttctgtcgatgtagagagcttcctcg

SEQ ID NO: 792 - DNA, 41 bp, Artificial Sequence
  Synthetic
ctttgccatgtgtaatcatcccaaggcaatgtatgtgcctc

SEQ ID NO: 793 - DNA, 41 bp, Artificial Sequence
  Synthetic
tgcttccacatgtttggctctgatgttcataccacgattgt

SEQ ID NO: 794 - DNA, 41 bp, Artificial Sequence
  Synthetic
ggagtagtaaacaccggatgtgcctactggagcacatggag

SEQ ID NO: 795 - DNA, 42 bp, Artificial Sequence
  Synthetic
gcaaaacagacataaccgcctctagatgtatacatggcccca

SEQ ID NO: 796 - DNA, 43 bp, Artificial Sequence
  Synthetic
cgagtcatgtatggatgctatttgtaagccagggaaaagcttg

SEQ ID NO: 797 - DNA, 44 bp, Artificial Sequence
  Synthetic
tggatgtagttagtgatttgccagaaaagaactgagccagtgtg

SEQ ID NO: 798 - DNA, 45 bp, Artificial Sequence
  Synthetic
agtggggggacttagagtgtgttgtttactagtaactttgtgttg

SEQ ID NO: 799 - DNA, 42 bp, Artificial Sequence
  Synthetic
gtgttggtaagacacagatacgatcaccacagagaaagggga

SEQ ID NO: 800 - DNA, 46 bp, Artificial Sequence
  Synthetic
gccatggttattggtcctacatctactactttagtagtgcactcca

SEQ ID NO: 801 - DNA, 48 bp, Artificial Sequence
  Synthetic
cttggttttggtgggtgtgtttaattgtatctaaacaaaaggtgagag

SEQ ID NO: 802 - DNA, 42 bp, Artificial Sequence
  Synthetic
cctccccatactctttcattgtttattttgtgcgacaatgct

SEQ ID NO: 803 - DNA, 45 bp, Artificial Sequence
  Synthetic
attcggaagtctaagtggtcgtgaagtaaatgctagaattgaacc

SEQ ID NO: 804 - DNA, 42 bp, Artificial Sequence
  Synthetic
ctcatgcttgcaatgtgttcaatgctggatagagcttgatga

SEQ ID NO: 805 - DNA, 43 bp, Artificial Sequence
  Synthetic
gtcagtgagagaaaactccatgcatcccacttaaggaatgaca

SEQ ID NO: 806 - DNA, 40 bp, Artificial Sequence
  Synthetic
tttgacagaggactcagcttcacgttgtctcctccagtca

SEQ ID NO: 807 - DNA, 43 bp, Artificial Sequence
  Synthetic
ggattcttctcctgtcttcctgatgcactcgcgagatactgac

SEQ ID NO: 808 - DNA, 46 bp, Artificial Sequence
  Synthetic
catgttttagcctttcgaccttttccaagcacagtccattatccaa

SEQ ID NO: 809 - DNA, 44 bp, Artificial Sequence
  Synthetic
ccaccattaaaggggcaattttgacatcagagtcacagttaacg

SEQ ID NO: 810 - DNA, 45 bp, Artificial Sequence
  Synthetic
ggcacatctccaaaagcgaaggctgctagaaatattgttagaaga

SEQ ID NO: 811 - DNA, 42 bp, Artificial Sequence
  Synthetic
cccgaccattgtgaattcctcataggcaacctccaaacattg

SEQ ID NO: 812 - DNA, 39 bp, Artificial Sequence
  Synthetic
aggacctttgcatccttttggaaaccagcggctaaatcc

SEQ ID NO: 813 - DNA, 40 bp, Artificial Sequence
  Synthetic
cagcttttctgttccctgtgttcagaggggaaacgtactc

SEQ ID NO: 814 - DNA, 39 bp, Artificial Sequence
  Synthetic
catcctactctgcttcggcgcgtactgggaacatttgac

SEQ ID NO: 815 - DNA, 48 bp, Artificial Sequence
  Synthetic
gctaccaaatcaaatttctcttgcaaccattgcatcaaatttacatga

SEQ ID NO: 816 - DNA, 48 bp, Artificial Sequence
  Synthetic
cgagactgtagaatcacaatcacttattgtatggatgacatagagact

SEQ ID NO: 817 - DNA, 45 bp, Artificial Sequence
  Synthetic
gttcagcttcatcttcgcctaaaagaaagacaaagtaaaaggaga

SEQ ID NO: 818 - DNA, 40 bp, Artificial Sequence
  Synthetic
gctcagcgacagagttggtggtaacagcaacggtcggagg

SEQ ID NO: 819 - DNA, 43 bp, Artificial Sequence
  Synthetic
gaagtcgttcaagtctcgatagacctgctgaggaagttggaag

SEQ ID NO: 820 - DNA, 43 bp, Artificial Sequence
  Synthetic
tgacctccaccacccttaccttggaagtattctttatttgggt

SEQ ID NO: 821 - DNA, 43 bp, Artificial Sequence
  Synthetic
acaccagttacttcagaaacaagatgtcctggtttgcctacag

SEQ ID NO: 822 - DNA, 48 bp, Artificial Sequence
  Synthetic
gcgccttatattagcaggatgtatcagcaatattttacctcttactcc

SEQ ID NO: 823 - DNA, 47 bp, Artificial Sequence
  Synthetic
cgtcattcaaaacgtcaaagtaaggtctttattttcatgccaattcg

SEQ ID NO: 824 - DNA, 43 bp, Artificial Sequence
  Synthetic
gggcataaacattaggattttccgtcctctaggcataggaacg

SEQ ID NO: 825 - DNA, 41 bp, Artificial Sequence
  Synthetic
ggaggctgcacgacactcatactcactcccctgtgaggaac

SEQ ID NO: 826 - DNA, 39 bp, Artificial Sequence
  Synthetic
accaacgatctggccgccgaaagaaacaccaaccgtcgc

SEQ ID NO: 827 - DNA, 38 bp, Artificial Sequence
  Synthetic
gctctcacgcaaggcacacatagtgctggaagcggagg

SEQ ID NO: 828 - DNA, 42 bp, Artificial Sequence
  Synthetic
ttcgggcactctcagaatgctcatgatgatgaactggtcgcc

SEQ ID NO: 829 - DNA, 40 bp, Artificial Sequence
  Synthetic
gttccaagggcttgcatgcgaccgcagcaatttcaactcc

SEQ ID NO: 830 - DNA, 40 bp, Artificial Sequence
  Synthetic
agagttcatccacgtgcaccctcatgctagagagcctgcg

SEQ ID NO: 831 - DNA, 41 bp, Artificial Sequence
  Synthetic
gggcatggtggtaaagctgcagtcccctcctcttttcaacc

SEQ ID NO: 832 - DNA, 36 bp, Artificial Sequence
  Synthetic
acaccaaccggcggtaccccggcaaggtcgaagcag

SEQ ID NO: 833 - DNA, 36 bp, Artificial Sequence
  Synthetic
acgcagcggtgtctgcaccgccgtagctgttgagcc

SEQ ID NO: 834 - DNA, 42 bp, Artificial Sequence
  Synthetic
agccagcaccgtgataaacagtaacagccactcagagtttcc

SEQ ID NO: 835 - DNA, 38 bp, Artificial Sequence
  Synthetic
ttggccacgcccctcgtaccatcagggcacgtagtagg

SEQ ID NO: 836 - DNA, 42 bp, Artificial Sequence
  Synthetic
ggagtggcactcgtcacagatgatatgggaagtttctggccg

SEQ ID NO: 837 - DNA, 40 bp, Artificial Sequence
  Synthetic
cgcctgaggtggggatcacattaggtctcaatgctgtcgc

SEQ ID NO: 838 - DNA, 39 bp, Artificial Sequence
  Synthetic
agcttcacagagcacgacgcaaagccgggggtgtatagg

SEQ ID NO: 839 - DNA, 42 bp, Artificial Sequence
  Synthetic
taggaggggggtaggacctgtggggacgtgatgtggaaatgt

SEQ ID NO: 840 - DNA, 42 bp, Artificial Sequence
  Synthetic
cagcccaaggaccttttgcttggctctaagcacatcccctac

SEQ ID NO: 841 - DNA, 38 bp, Artificial Sequence
  Synthetic
aagctgtggacgcggagggtcaacatattgggcggctg

SEQ ID NO: 842 - DNA, 40 bp, Artificial Sequence
  Synthetic
gtttgatgcgtccgtctcgggatagcctttgcctccaggg

SEQ ID NO: 843 - DNA, 41 bp, Artificial Sequence
  Synthetic
tccggggtcctgtgatcttcatgtgtgtcacaccacttgct

SEQ ID NO: 844 - DNA, 42 bp, Artificial Sequence
  Synthetic
gcccacagagaagctcacctcaaggatacatcgttatgcgcc

SEQ ID NO: 845 - DNA, 42 bp, Artificial Sequence
  Synthetic
ggtggtctatggcactctgctgtcctcgactcgtttgatcct

SEQ ID NO: 846 - DNA, 40 bp, Artificial Sequence
  Synthetic
gccggctattgaccctccgacaacagctggctgataaggt

SEQ ID NO: 847 - DNA, 42 bp, Artificial Sequence
  Synthetic
acccgcacggataagtctggatagtcttctgtgtagacccgt

SEQ ID NO: 848 - DNA, 38 bp, Artificial Sequence
  Synthetic
tggcacggcatctgcgatagccctcacagaacgcctct

SEQ ID NO: 849 - DNA, 42 bp, Artificial Sequence
  Synthetic
tggtacagtcacgggtgaggtaaacatcatgctcgtccaacg

SEQ ID NO: 850 - DNA, 40 bp, Artificial Sequence
  Synthetic
cgctcccaccctgttgagtttggtatggcagctttttccc

SEQ ID NO: 851 - DNA, 44 bp, Artificial Sequence
  Synthetic
gcaatgtaggcttcaatgttctcatgtcaaaacagaaagacgcc

SEQ ID NO: 852 - DNA, 45 bp, Artificial Sequence
  Synthetic
gtcaattcaacaactgcatggtagggattccattgggatcagact

SEQ ID NO: 853 - DNA, 45 bp, Artificial Sequence
  Synthetic
cgatgtgcttttccattatccattttctgctgaattgttcactct

SEQ ID NO: 854 - DNA, 43 bp, Artificial Sequence
  Synthetic
ggagtgatgcttctgcgatggtaaaagcaaactacaatgatgc

SEQ ID NO: 855 - DNA, 46 bp, Artificial Sequence
  Synthetic
ctaaccatagcagagaccaaactggtattaatgatggcatgctttg

SEQ ID NO: 856 - DNA, 46 bp, Artificial Sequence
  Synthetic
tggttttttgggtcttttcactcttacaccctttctttttcgaatt

SEQ ID NO: 857 - DNA, 42 bp, Artificial Sequence
  Synthetic
gccaaatcttgtaagcatacaggaaacgtttggggtatcgtt

SEQ ID NO: 858 - DNA, 39 bp, Artificial Sequence
  Synthetic
acacctgttccacaagtgtgagaggaggagcagcaagaa

SEQ ID NO: 859 - DNA, 50 bp, Artificial Sequence
  Synthetic
tcttctaggattccactgtcatcaaactttatcatctagaaagcaaactc

SEQ ID NO: 860 - DNA, 47 bp, Artificial Sequence
  Synthetic
ccaaacacatatgaagcatttccaaaaaattcgtagtgtacctgttg

SEQ ID NO: 861 - DNA, 47 bp, Artificial Sequence
  Synthetic
gaaggttctgttggcacatctatatagatagtaaacatagacagcct

SEQ ID NO: 862 - DNA, 43 bp, Artificial Sequence
  Synthetic
cattgtattcagaaactaccagtgccacgtcagcaaggcatta

SEQ ID NO: 863 - DNA, 43 bp, Artificial Sequence
  Synthetic
gcacagtccattctccagttttacttacagagccatcagggga

SEQ ID NO: 864 - DNA, 44 bp, Artificial Sequence
  Synthetic
gcatttgcccctcctctaattatatctgtctagacttagagcgt

SEQ ID NO: 865 - DNA, 42 bp, Artificial Sequence
  Synthetic
tgccatctggaattactctgctaggtacaggaggttctatgg

SEQ ID NO: 866 - DNA, 45 bp, Artificial Sequence
  Synthetic
cgtatcctattcaaaccttgactgaaatcaaagggaggagtttca

SEQ ID NO: 867 - DNA, 43 bp, Artificial Sequence
  Synthetic
agcctcagtaaatgctgtattctgtgttgatcagcttgccgaa

SEQ ID NO: 868 - DNA, 48 bp, Artificial Sequence
  Synthetic
gaccaacaccttagattgatctacattcattctgctactgatagactc

SEQ ID NO: 869 - DNA, 48 bp, Artificial Sequence
  Synthetic
ccttgttctcgctttccataaaagaatggcctgatttacttaaaatgt

SEQ ID NO: 870 - DNA, 50 bp, Artificial Sequence
  Synthetic
cctgtagtggaattttacaaagctgaacattatctcagacatgtagaaga

SEQ ID NO: 871 - DNA, 47 bp, Artificial Sequence
  Synthetic
actcaagctgaagtgtgcaaattgattactactgtgaaactactctg

SEQ ID NO: 872 - DNA, 44 bp, Artificial Sequence
  Synthetic
acgttatctccctcttaagtttcctcctcaatgggaatggagat

SEQ ID NO: 873 - DNA, 43 bp, Artificial Sequence
  Synthetic
cgcatttgaaaaaaagacgatcaagttgccgcgagtatcattg

SEQ ID NO: 874 - DNA, 44 bp, Artificial Sequence
  Synthetic
tcatctgatatagcatcccctgtttggtacgggatgtaatggat

SEQ ID NO: 875 - DNA, 46 bp, Artificial Sequence
  Synthetic
ctgctgagtttccacttcagtataaaaaggagattatttgaaagcg

SEQ ID NO: 876 - DNA, 43 bp, Artificial Sequence
  Synthetic
tgtgttagtattttgtcctgacacagaggacgaggacaaggaa

SEQ ID NO: 877 - DNA, 45 bp, Artificial Sequence
  Synthetic
gcacttccactgtatatccatgtttacattacaagacgttagcct

SEQ ID NO: 878 - DNA, 46 bp, Artificial Sequence
  Synthetic
aggtgtggtatcagttgaagtagtaaacatctgtaccttccattcc

SEQ ID NO: 879 - DNA, 46 bp, Artificial Sequence
  Synthetic
gcttacaaccttagatactgggacatttttcagatgtctctttggc

SEQ ID NO: 880 - DNA, 40 bp, Artificial Sequence
  Synthetic
ctacacaggcccaaaccagcaagtttggttttcctgacac

SEQ ID NO: 881 - DNA, 42 bp, Artificial Sequence
  Synthetic
tcaccatcctgaataactgtgtttaaggatccccatgtacca

SEQ ID NO: 882 - DNA, 50 bp, Artificial Sequence
  Synthetic
cagtagacccagagcctttaatgtattagacatttatttaatagggctgg

SEQ ID NO: 883 - DNA, 49 bp, Artificial Sequence
  Synthetic
ctgatctaggtctgcagaaaactttccccttaaaaaatacactttttgg

SEQ ID NO: 884 - DNA, 43 bp, Artificial Sequence
  Synthetic
gcaggaaacgtacaagtttaaaccacggttgcatgctttttgg

SEQ ID NO: 885 - DNA, 47 bp, Artificial Sequence
  Synthetic
tgtgcataactgtggtaactttctgcaaaagagaactgcaatgtttc

SEQ ID NO: 886 - DNA, 47 bp, Artificial Sequence
  Synthetic
tctttgctttttgtccagatgtcttgtgtattaactgtcaaaagcca

SEQ ID NO: 887 - DNA, 43 bp, Artificial Sequence
  Synthetic
gttctgcttgtccagctggaactgttatgagcaattaaatgac

SEQ ID NO: 888 - DNA, 44 bp, Artificial Sequence
  Synthetic
tcgattttcggatcttccccatatgcttcaatccaatgatcgtc

SEQ ID NO: 889 - DNA, 45 bp, Artificial Sequence
  Synthetic
agtcatacagatccgggagaaattggtgaatagtatctgcaacac

SEQ ID NO: 890 - DNA, 42 bp, Artificial Sequence
  Synthetic
tcttcatgttctttgtccttggaaggtgctagcagaacttca

SEQ ID NO: 891 - DNA, 41 bp, Artificial Sequence
  Synthetic
ccgtctcatgcttgcaatgtagaacttgatgaaatagggga

SEQ ID NO: 892 - DNA, 44 bp, Artificial Sequence
  Synthetic
cttgggtcggtaagggaaaattcatttgaggaatgataccgacg

SEQ ID NO: 893 - DNA, 47 bp, Artificial Sequence
  Synthetic
tcaaagaattctttggtcaggtcttcagattgagagcatgattgaag

SEQ ID NO: 894 - DNA, 46 bp, Artificial Sequence
  Synthetic
ttctctgtgtgaccattttcttgggattacaacacatttccagagg

SEQ ID NO: 895 - DNA, 41 bp, Artificial Sequence
  Synthetic
gctttcttctcattccctccgaccgaggagcatctgtgaga

SEQ ID NO: 896 - DNA, 44 bp, Artificial Sequence
  Synthetic
tgtgtccgtaacttcatactcttactgttctcaaacaagatggc

SEQ ID NO: 897 - DNA, 38 bp, Artificial Sequence
  Synthetic
tctgaggattggagtccgtcatctcgggcagaagaagt

SEQ ID NO: 898 - DNA, 45 bp, Artificial Sequence
  Synthetic
ctggtccaagatcgttgtttatcatagtgtccgggattaatgagt

SEQ ID NO: 899 - DNA, 43 bp, Artificial Sequence
  Synthetic
atcaattcccatttcaagcagacctagggccaaacctgtacaa

SEQ ID NO: 900 - DNA, 45 bp, Artificial Sequence
  Synthetic
caagagaaattcccaccagagtttgttctaacacgaacgtttacg

SEQ ID NO: 901 - DNA, 43 bp, Artificial Sequence
  Synthetic
tcagatacctcgaaagactcctgatttgcttgttgtcagtgct

SEQ ID NO: 902 - DNA, 45 bp, Artificial Sequence
  Synthetic
cctcagcaggtatatcctcataacaagagcagccaaatataggtg

SEQ ID NO: 903 - DNA, 43 bp, Artificial Sequence
  Synthetic
tgcctcatccacaatataccaatcactgtgtgccattcgacac

SEQ ID NO: 904 - DNA, 38 bp, Artificial Sequence
  Synthetic
ggcagtctctgtggcacttgcagaacgagcaggaccta

SEQ ID NO: 905 - DNA, 43 bp, Artificial Sequence
  Synthetic
ggcaagtagagcagatcttgtattagtacagtctctgggaggt

SEQ ID NO: 906 - DNA, 46 bp, Artificial Sequence
  Synthetic
aagtctaactggctccaaaaccttgcattttccttaacagacatca

SEQ ID NO: 907 - DNA, 43 bp, Artificial Sequence
  Synthetic
tgaggccactaagataaagagtcatcaagttgtgccttccctt

SEQ ID NO: 908 - DNA, 42 bp, Artificial Sequence
  Synthetic
cgatttcgggtggtgtctcgacaggacaatccacccaaactg

SEQ ID NO: 909 - DNA, 47 bp, Artificial Sequence
  Synthetic
cgtcgtttacgtactcttaacatgattctgttattttaggggcattt

SEQ ID NO: 910 - DNA, 43 bp, Artificial Sequence
  Synthetic
tgggaacgtgtgattgtacgtgatctagttcagctgttcttca

SEQ ID NO: 911 - DNA, 43 bp, Artificial Sequence
  Synthetic
agaaacgtgtaggcctttcctaactgagttcacaactagtaca

SEQ ID NO: 912 - DNA, 47 bp, Artificial Sequence
  Synthetic
gccatcatttgaggagatagagctagaagtggtgttactataggtgc

SEQ ID NO: 913 - DNA, 47 bp, Artificial Sequence
  Synthetic
atgaactaatttgcgacgtttacgtttagataattcaacaggggatt

SEQ ID NO: 914 - DNA, 44 bp, Artificial Sequence
  Synthetic
ctggaaatctaacacgaaagactctccgtgcaaatgataacact

SEQ ID NO: 915 - DNA, 41 bp, Artificial Sequence
  Synthetic
ttgaccagtgttccccagtgcaaaatgttgcttttgatgca

SEQ ID NO: 916 - DNA, 40 bp, Artificial Sequence
  Synthetic
cagtttttggaacagaacgctgttcctttaggccgcaaat

SEQ ID NO: 917 - DNA, 48 bp, Artificial Sequence
  Synthetic
gtcatgaggctatatgactaggcaattgttaataaacgtttatgctgc

SEQ ID NO: 918 - DNA, 45 bp, Artificial Sequence
  Synthetic
cagatgctctgatttctgtggcgatcatatgaacaaatggagact

SEQ ID NO: 919 - DNA, 47 bp, Artificial Sequence
  Synthetic
cctccagaaatttcggtcattgatgaacaatagcaatggagttaatc

SEQ ID NO: 920 - DNA, 41 bp, Artificial Sequence
  Synthetic
gtcatgcccacttgctactgcatgaggggatcagttgcaca

SEQ ID NO: 921 - DNA, 45 bp, Artificial Sequence
  Synthetic
tggacccctcttgtggaaagcaagtttcataagaggaaagaaagt

SEQ ID NO: 922 - DNA, 48 bp, Artificial Sequence
  Synthetic
gagaacatgaaataaagggctctctaagacaatagcataagaattggt

SEQ ID NO: 923 - DNA, 44 bp, Artificial Sequence
  Synthetic
cgttgtattttaatacagccactgccatgggctggctaacaatc

SEQ ID NO: 924 - DNA, 45 bp, Artificial Sequence
  Synthetic
tctgcacacacacatcactttgaattctcactatgaggaatgttc

SEQ ID NO: 925 - DNA, 43 bp, Artificial Sequence
  Synthetic
gatcccaaatcatctcaaacccattggtgtttggataggaagg

SEQ ID NO: 926 - DNA, 43 bp, Artificial Sequence
  Synthetic
gagttttcaaagatccctgggtgcagattgtgtattggaagca

SEQ ID NO: 927 - DNA, 43 bp, Artificial Sequence
  Synthetic
gccttcttttcattccctccgatactttgtcgaaacactagcg

SEQ ID NO: 928 - DNA, 48 bp, Artificial Sequence
  Synthetic
ctttccctaatcttgccatcttgtgtttagaaatgtcttaagcattgc

SEQ ID NO: 929 - DNA, 41 bp, Artificial Sequence
  Synthetic
gtccgtcccaccagtatgtgagtcttaggagtttcaatcct

SEQ ID NO: 930 - DNA, 42 bp, Artificial Sequence
  Synthetic
accaatgctcatgtcagccgatagccaacttcagtatggagc

SEQ ID NO: 931 - DNA, 45 bp, Artificial Sequence
  Synthetic
atcctcaaagcgcgccatagcgaaaacggtgtatataaaagatgt

SEQ ID NO: 932 - DNA, 44 bp, Artificial Sequence
  Synthetic
tgtctccatacacagagtctgaatatgctgcatgccataaatgt

SEQ ID NO: 933 - DNA, 48 bp, Artificial Sequence
  Synthetic
ttggggctctaaatgcaatacaaaatattaagtatgcatggacctaag

SEQ ID NO: 934 - DNA, 39 bp, Artificial Sequence
  Synthetic
gcatcattgtggacctcctgaacattttgtgaacaggca

SEQ ID NO: 935 - DNA, 38 bp, Artificial Sequence
  Synthetic
atacattgccgccatgttcgtgttctgaagtggaagca

SEQ ID NO: 936 - DNA, 43 bp, Artificial Sequence
  Synthetic
acatctaaatcgtatccactgtgacgtgccacaatgtgcaaac

SEQ ID NO: 937 - DNA, 44 bp, Artificial Sequence
  Synthetic
atgttcccttgctgcaaagaatgacatagacagccaaatacagt

SEQ ID NO: 938 - DNA, 45 bp, Artificial Sequence
  Synthetic
ccatgttcctgcatcagtcatatggcaacaaagacaattgtatga

SEQ ID NO: 939 - DNA, 40 bp, Artificial Sequence
  Synthetic
ggtgctggaatacggtgagggcggtatccgctactcagct

SEQ ID NO: 940 - DNA, 48 bp, Artificial Sequence
  Synthetic
tgccaggtggatgatatatctctatacagtttaaaatgtttacggtac

SEQ ID NO: 941 - DNA, 40 bp, Artificial Sequence
  Synthetic
ataccaatacccatgcatacgctatgtgtgctgccatgtc

SEQ ID NO: 942 - DNA, 50 bp, Artificial Sequence
  Synthetic
aacatcactacgaggatcaaatgtttcctctttaattacatatgacaacc

SEQ ID NO: 943 - DNA, 41 bp, Artificial Sequence
  Synthetic
agggtccatgtcatctgcatattgcagcctttagtatctgc

SEQ ID NO: 944 - DNA, 42 bp, Artificial Sequence
  Synthetic
cacagcccaaaatacataactgtgtgaggacgttagggacaa

SEQ ID NO: 945 - DNA, 44 bp, Artificial Sequence
  Synthetic
tgctctattccaaaaatgcctagcgggattccatgtttttttgc

SEQ ID NO: 946 - DNA, 45 bp, Artificial Sequence
  Synthetic
gagactgtgtagaagcacatattgttgtttgctggcataatcaat

SEQ ID NO: 947 - DNA, 42 bp, Artificial Sequence
  Synthetic
tgctgtaaggtgtgcagttttaatttgtgtttgtggtatggg

SEQ ID NO: 948 - DNA, 43 bp, Artificial Sequence
  Synthetic
cggtataagggaaagttgtgcttatggatgtcaatccgacctt

SEQ ID NO: 949 - DNA, 45 bp, Artificial Sequence
  Synthetic
cgagttttcaaaaataccaggatggacagattgtgtattggaagc

SEQ ID NO: 950 - DNA, 38 bp, Artificial Sequence
  Synthetic
tctcattgcctccaactggcttgagacactggcaagga

SEQ ID NO: 951 - DNA, 42 bp, Artificial Sequence
  Synthetic
ccatcccaccagtaagtagtcttgttaggcgtctccatcctg

SEQ ID NO: 952 - DNA, 39 bp, Artificial Sequence
  Synthetic
ctgactcgttgctcccagactttgttgccaatttcagca

SEQ ID NO: 953 - DNA, 47 bp, Artificial Sequence
  Synthetic
actgctggggaagaatttttcaaattgaatacaagtcaaagaggagt

SEQ ID NO: 954 - DNA, 36 bp, Artificial Sequence
  Synthetic
acaggatccaccgcctttcgcgccccaccacctcaa

SEQ ID NO: 955 - DNA, 39 bp, Artificial Sequence
  Synthetic
ggagcccacaacaatagtgggctcggggacagctatgcg

SEQ ID NO: 956 - DNA, 37 bp, Artificial Sequence
  Synthetic
ggctccgccaaacttcccaatggagttgctacgcggc

SEQ ID NO: 957 - DNA, 38 bp, Artificial Sequence
  Synthetic
gtgcctcgcccaccactaaattggtgttggagcaacgc

SEQ ID NO: 958 - DNA, 42 bp, Artificial Sequence
  Synthetic
gccgacactgtgccaagaacctccgagagggaactgtgtgga

SEQ ID NO: 959 - DNA, 42 bp, Artificial Sequence
  Synthetic
gctcacagtcatgttgaccccaaaggccaaaatacctgggtc

SEQ ID NO: 960 - DNA, 40 bp, Artificial Sequence
  Synthetic
ggcggccctttttgacatggatgcgtggacgtctgcaatg

SEQ ID NO: 961 - DNA, 41 bp, Artificial Sequence
  Synthetic
ggcggcgttactgactgaatcaccccactgtcaagcctttg

SEQ ID NO: 962 - DNA, 41 bp, Artificial Sequence
  Synthetic
agcatctggcagtgccgagaactggggttcctagcagtgtg

SEQ ID NO: 963 - DNA, 39 bp, Artificial Sequence
  Synthetic
gcggttgcctatgggagtgtctggtgcgtgttctaccaa

SEQ ID NO: 964 - DNA, 35 bp, Artificial Sequence
  Synthetic
ctggcttcacagcgacgggcagcggcagagcggtt

SEQ ID NO: 965 - DNA, 39 bp, Artificial Sequence
  Synthetic
ctggttgaccaccacctggctcatggcactaacgggagg

SEQ ID NO: 966 - DNA, 39 bp, Artificial Sequence
  Synthetic
gacccgattgccacgatgcaatcttgtgtgacgagggcc

SEQ ID NO: 967 - DNA, 42 bp, Artificial Sequence
  Synthetic
catgcccagaacactaacgccgggccatgacgtggtgatctg

SEQ ID NO: 968 - DNA, 41 bp, Artificial Sequence
  Synthetic
cgtcctctcgcactcaacctttttgcaagatacgccactgg

SEQ ID NO: 969 - DNA, 40 bp, Artificial Sequence
  Synthetic
ccagcgcggagtagtagtgtcctgaggatgcaacgcaggg

SEQ ID NO: 970 - DNA, 38 bp, Artificial Sequence
  Synthetic
ggcccccccacctgagtaataatgggcccccagctgat

SEQ ID NO: 971 - DNA, 35 bp, Artificial Sequence
  Synthetic
tcacaggggtagcgctccccggcgaggagtcccaa

SEQ ID NO: 972 - DNA, 41 bp, Artificial Sequence
  Synthetic
ccaccccgagaggtggattccttttcaccaatggtcgctcg

SEQ ID NO: 973 - DNA, 40 bp, Artificial Sequence
  Synthetic
gccaggcaggagatgatgcattgacctcctttctggcaag

SEQ ID NO: 974 - DNA, 38 bp, Artificial Sequence
  Synthetic
agagggattttgaggcgcgggccttggtcgctacctgt

SEQ ID NO: 975 - DNA, 37 bp, Artificial Sequence
  Synthetic
cgtcaccgtaaccgtgccagccagcttggttgcgcag

SEQ ID NO: 976 - DNA, 41 bp, Artificial Sequence
  Synthetic
catcctccagagcctgcaaggttgaggctatagggtctgca

SEQ ID NO: 977 - DNA, 41 bp, Artificial Sequence
  Synthetic
caatgtcccccactgtgtctgtatccgtgatgaggtgaggg

SEQ ID NO: 978 - DNA, 42 bp, Artificial Sequence
  Synthetic
acagttatcgcagccggatgttccaaaccagcgtgtaaaagc

SEQ ID NO: 979 - DNA, 42 bp, Artificial Sequence
  Synthetic
gccgagcaacactcagctgtatttaaggctgctttggctgac

SEQ ID NO: 980 - DNA, 41 bp, Artificial Sequence
  Synthetic
atccggtgatgaaccacttcggacccagtggtgagatacgt

SEQ ID NO: 981 - DNA, 49 bp, Artificial Sequence
  Synthetic
tgccacagaaattgcaaggtattatacctttaagtattagagacttagc

SEQ ID NO: 982 - DNA, 42 bp, Artificial Sequence
  Synthetic
attcccttccaggcgttccttagaaaagttagattgctgtgg

SEQ ID NO: 983 - DNA, 50 bp, Artificial Sequence
  Synthetic
tgctccagttcagtatcatctaacaacaattatttgagagagatacagac

SEQ ID NO: 984 - DNA, 43 bp, Artificial Sequence
  Synthetic
gcagtgtaatgtatatctacgtcccgtggaggtaccggctatt

SEQ ID NO: 985 - DNA, 46 bp, Artificial Sequence
  Synthetic
ggacccagatatagtcacaatgccatgatgatctatttgaaagctc

SEQ ID NO: 986 - DNA, 48 bp, Artificial Sequence
  Synthetic
tggtatgctatatctgcttcgtctaggcaagtacttttgatttttcag

SEQ ID NO: 987 - DNA, 47 bp, Artificial Sequence
  Synthetic
acactctacccttcaacactcttattgcattttaatttatggtcctc

SEQ ID NO: 988 - DNA, 48 bp, Artificial Sequence
  Synthetic
gccttgtaaaaaaagatttccagcttatgaaagcagataatacacctc

SEQ ID NO: 989 - DNA, 35 bp, Artificial Sequence
  Synthetic
gtcgcgggggtggtgtttgcagctccacgcctcca

SEQ ID NO: 990 - DNA, 38 bp, Artificial Sequence
  Synthetic
ctccccttctgcaggtggttgtcgggcccttacaagca

SEQ ID NO: 991 - DNA, 42 bp, Artificial Sequence
  Synthetic
agcttcttccagtaatcttccaaggagggtcacttcgatcag

SEQ ID NO: 992 - DNA, 43 bp, Artificial Sequence
  Synthetic
caggttgccataggccttatcaaggagagattttgatgaagcg

SEQ ID NO: 993 - DNA, 42 bp, Artificial Sequence
  Synthetic
gcccctcaggtacaggatggattctaactgagtccacaggcg

SEQ ID NO: 994 - DNA, 48 bp, Artificial Sequence
  Synthetic
ggttcttcaaagacatccagatcatttcgttttgcatttgataatcct

SEQ ID NO: 995 - DNA, 49 bp, Artificial Sequence
  Synthetic
tttctgcattattacgtgactctggcatactatacacaagacacaaagg

SEQ ID NO: 996 - DNA, 48 bp, Artificial Sequence
  Synthetic
ggatcaaaagatgtatcctgtctgtaaagatacagaaaacagtaatgc

SEQ ID NO: 997 - DNA, 49 bp, Artificial Sequence
  Synthetic
ccactaacagttgggaaatacatggcaaaaatcagttttacattccagg

SEQ ID NO: 998 - DNA, 43 bp, Artificial Sequence
  Synthetic
cgttttgttcctctattagacccttccaagctgggttacaaca

SEQ ID NO: 999 - DNA, 48 bp, Artificial Sequence
  Synthetic
tgggttggtacattcattgaaatgtgacaatatgtttactcatgcaga

SEQ ID NO: 1000 - DNA, 45 bp, Artificial Sequence
  Synthetic
acataaggttctcttgtcacccaaactttctccaaggacaactca

SEQ ID NO: 1001 - DNA, 41 bp, Artificial Sequence
  Synthetic
ccccagtgacacaaacatgtaacatagcatggtccagctca

SEQ ID NO: 1002 - DNA, 38 bp, Artificial Sequence
  Synthetic
ataccgggggtaacaggagccacattggtccactgtca

SEQ ID NO: 1003 - DNA, 40 bp, Artificial Sequence
  Synthetic
agcgcgaatctttcttgattgtggtgggcctttgacaatg

SEQ ID NO: 1004 - DNA, 47 bp, Artificial Sequence
  Synthetic
ggtgttttatcgattgttccggtatgcttcgagcactaataaaactg

SEQ ID NO: 1005 - DNA, 44 bp, Artificial Sequence
  Synthetic
gtccagctttgaccatcatctgagagataaagaagagcgtctac

SEQ ID NO: 1006 - DNA, 47 bp, Artificial Sequence
  Synthetic
tgggattgactttgtttttgtctgatgattcaatggcaaagaaaacc

SEQ ID NO: 1007 - DNA, 43 bp, Artificial Sequence
  Synthetic
ccgaaagtggtgcatagtttcttaaacctttaagttttggcgc

SEQ ID NO: 1008 - DNA, 48 bp, Artificial Sequence
  Synthetic
ctacagcaatttctccaatgacaacaattgattgttgttatgctgaac

SEQ ID NO: 1009 - DNA, 43 bp, Artificial Sequence
  Synthetic
gctctccaatcaataattgctcaaacttgtggagcaggtgtac

SEQ ID NO: 1010 - DNA, 45 bp, Artificial Sequence
  Synthetic
gttcattaaacaatgccagggaattactgatggatctgatgtctc

SEQ ID NO: 1011 - DNA, 43 bp, Artificial Sequence
  Synthetic
tggctcatcatggagattgttatcagtcatgagtcagctgcta

SEQ ID NO: 1012 - DNA, 47 bp, Artificial Sequence
  Synthetic
cacccaggataggttacatcatctaacagatgtagtacattttggtt

SEQ ID NO: 1013 - DNA, 48 bp, Artificial Sequence
  Synthetic
tggatcttctttaggctctagatcatactaataaaacctggacatgtt

SEQ ID NO: 1014 - DNA, 41 bp, Artificial Sequence
  Synthetic
tcgtcttggggtttgcggtacctccggatctcttcaagggt

SEQ ID NO: 1015 - DNA, 47 bp, Artificial Sequence
  Synthetic
tgatgtggtgtctgttacaatgtttaccagatacaatagtgacaact

SEQ ID NO: 1016 - DNA, 48 bp, Artificial Sequence
  Synthetic
tgctagtagttggtaagtcctcaattaacatttggtgaggaaatacca

SEQ ID NO: 1017 - DNA, 48 bp, Artificial Sequence
  Synthetic
tgcgtttcagtacactaggatgtattacctctaatacctggaagatcc

SEQ ID NO: 1018 - DNA, 47 bp, Artificial Sequence
  Synthetic
tgtttggatctggaaattgtagtctttaccgatgagtctaaagtagc

SEQ ID NO: 1019 - DNA, 43 bp, Artificial Sequence
  Synthetic
ccccatcctctgcttgcttttaataagtatgtggatgctgaga

SEQ ID NO: 1020 - DNA, 45 bp, Artificial Sequence
  Synthetic
aggccaaatactgatttcattcgtatggaaatgcaaactttgagc

SEQ ID NO: 1021 - DNA, 41 bp, Artificial Sequence
  Synthetic
tggctcctaatgccctatgtaaaagtggctcacttgtctcc

SEQ ID NO: 1022 - DNA, 50 bp, Artificial Sequence
  Synthetic
gctgtcctctttgatacaaaaatcgtaaacttgagtgaaaagttaactgg

SEQ ID NO: 1023 - DNA, 42 bp, Artificial Sequence
  Synthetic
gggaatgtggtgcttatggcagatgtcaatccgactctactg

SEQ ID NO: 1024 - DNA, 41 bp, Artificial Sequence
  Synthetic
tcaaagatacctgggtgggattacaaacagactgtgtcctg

SEQ ID NO: 1025 - DNA, 46 bp, Artificial Sequence
  Synthetic
ggtcatgttgtctcttactctccttaggatgtgatggaatcaatgg

SEQ ID NO: 1026 - DNA, 42 bp, Artificial Sequence
  Synthetic
attacccccaaccggaagtccgttgaaactttagctagaagc

SEQ ID NO: 1027 - DNA, 45 bp, Artificial Sequence
  Synthetic
tctcttactctcgaacatgtatcctcatcgcaccaataatgttct

SEQ ID NO: 1028 - DNA, 41 bp, Artificial Sequence
  Synthetic
gcccatcccaccagtatgttgagtctcggtactgaatcttg

SEQ ID NO: 1029 - DNA, 45 bp, Artificial Sequence
  Synthetic
ccaaggtcattgtttatcatgttgttggagtgtctggaataaacg

SEQ ID NO: 1030 - DNA, 44 bp, Artificial Sequence
  Synthetic
ggatgtgaaggttccggatattgtaccaatcaagggcaggacta

SEQ ID NO: 1031 - DNA, 40 bp, Artificial Sequence
  Synthetic
ctcgaacaagttgcagcacttagccaaaggggaattcttg

SEQ ID NO: 1032 - DNA, 41 bp, Artificial Sequence
  Synthetic
tcagtctccttcaaatctgtgctagacgtgacaaccgacta

SEQ ID NO: 1033 - DNA, 48 bp, Artificial Sequence
  Synthetic
tcagattctgctatgtcatcagtttcctgatattgttttagaagagct

SEQ ID NO: 1034 - DNA, 38 bp, Artificial Sequence
  Synthetic
atgcaccgctgaaagtctcgaagttttatgccaccccg

SEQ ID NO: 1035 - DNA, 43 bp, Artificial Sequence
  Synthetic
gctagtgacagaggaatgaatagttttcaacctgatgccactg

SEQ ID NO: 1036 - DNA, 42 bp, Artificial Sequence
  Synthetic
gcaatttagcatcacccctgtatcgttgtagctctgcatgga

SEQ ID NO: 1037 - DNA, 46 bp, Artificial Sequence
  Synthetic
tccaattcccaaattgccaaagtataatttgaaggcaacacaatcg

SEQ ID NO: 1038 - DNA, 44 bp, Artificial Sequence
  Synthetic
atcagttccacctgctgcagtcaatagttccattagtagaaggc

SEQ ID NO: 1039 - DNA, 48 bp, Artificial Sequence
  Synthetic
aaacgttccaaaggtatctcttcattgttaatgtattagttgacccca

SEQ ID NO: 1040 - DNA, 46 bp, Artificial Sequence
  Synthetic
cccgctcaaagtataggctcatgttcagtttgaatatagaaatccc

SEQ ID NO: 1041 - DNA, 43 bp, Artificial Sequence
  Synthetic
gcgtgcatgaaagtaaacatcagttaagtactcctgttgccag

SEQ ID NO: 1042 - DNA, 48 bp, Artificial Sequence
  Synthetic
gatgaccagtagatccaacacctattggaaactagtaggtatagaagt

SEQ ID NO: 1043 - DNA, 45 bp, Artificial Sequence
  Synthetic
aggaaagtttgcattaccaaatcctaagtgtcctccaatacaact

SEQ ID NO: 1044 - DNA, 48 bp, Artificial Sequence
  Synthetic
cgttacaaagcagattaacaggcaaaggttgatattaaggacattgtc

SEQ ID NO: 1045 - DNA, 45 bp, Artificial Sequence
  Synthetic
actgtccacaaatagacgtcttttaagatgtagatttgagtccgc

SEQ ID NO: 1046 - DNA, 40 bp, Artificial Sequence
  Synthetic
ctggtgtccccgtcgctttggacgaagacccagatcatcc

SEQ ID NO: 1047 - DNA, 43 bp, Artificial Sequence
  Synthetic
agcgatatctccagcattttaatgtctacaagaagaggctcgg

SEQ ID NO: 1048 - DNA, 42 bp, Artificial Sequence
  Synthetic
acaggttcaaccactatgtttggtggaggtggtggaagagtc

SEQ ID NO: 1049 - DNA, 38 bp, Artificial Sequence
  Synthetic
tataggggctgctggttgcacccgctgtttctacaact

SEQ ID NO: 1050 - DNA, 46 bp, Artificial Sequence
  Synthetic
gctctactaaaagctcttggtgtaggaatttaatattgaagagcca

SEQ ID NO: 1051 - DNA, 44 bp, Artificial Sequence
  Synthetic
catgtgagttactgaaatcctctgtgaaaacagtgatgcacctt

SEQ ID NO: 1052 - DNA, 47 bp, Artificial Sequence
  Synthetic
ggcagccaatatgacatctgtaaagtattacatcccagtcatatccc

SEQ ID NO: 1053 - DNA, 45 bp, Artificial Sequence
  Synthetic
accctattgcaacacgtttacgagacggtttgtttatcaaattgg

SEQ ID NO: 1054 - DNA, 46 bp, Artificial Sequence
  Synthetic
caggatatacctatgaagggtgggttttccaatcttctcatctgac

SEQ ID NO: 1055 - DNA, 47 bp, Artificial Sequence
  Synthetic
gcgacaaaaggtacaaggtagtctactactcctgtaactattaccga

SEQ ID NO: 1056 - DNA, 44 bp, Artificial Sequence
  Synthetic
caaactctgcacactgaatctattcacgaagttttgtcaccaga

SEQ ID NO: 1057 - DNA, 45 bp, Artificial Sequence
  Synthetic
ccactgttctcaaacaatcgtctttgcagacatagatttgagtcc

SEQ ID NO: 1058 - DNA, 48 bp, Artificial Sequence
  Synthetic
tgtagcatttccagttgtacacttatattcaaattatgtgtgaccctc

SEQ ID NO: 1059 - DNA, 49 bp, Artificial Sequence
  Synthetic
gttgaatccaaaaatgactgtgactgtattcactaatacgttttctgga

SEQ ID NO: 1060 - DNA, 39 bp, Artificial Sequence
  Synthetic
gcttcttgcacagcatcgaactcaccagaagaagagcag

SEQ ID NO: 1061 - DNA, 46 bp, Artificial Sequence
  Synthetic
agaggtaacagagggagaaatagttttgatgaaaaagcacaaacct

SEQ ID NO: 1062 - DNA, 50 bp, Artificial Sequence
  Synthetic
caattgtctttgtgcagtgtctttaatgggtagattatgatagtagtagc

SEQ ID NO: 1063 - DNA, 42 bp, Artificial Sequence
  Synthetic
ccttcatttagaggcaccaaagctggatcctttgggacctac

SEQ ID NO: 1064 - DNA, 43 bp, Artificial Sequence
  Synthetic
tgtacttgttgtacccgcctattctaaggcttttcaaagagca

SEQ ID NO: 1065 - DNA, 46 bp, Artificial Sequence
  Synthetic
agtggttgtgctatatctgttacaaatcacaatgccaactattcct

SEQ ID NO: 1066 - DNA, 42 bp, Artificial Sequence
  Synthetic
ggatctggcagcataacccttaatacaaggttgtggtgccta

SEQ ID NO: 1067 - DNA, 46 bp, Artificial Sequence
  Synthetic
tccccataggattcctttgtcatttgtgtacctttggacatagtgg

SEQ ID NO: 1068 - DNA, 44 bp, Artificial Sequence
  Synthetic
ggaacaaatgctaaattccagtcttttcctctggaacctgatgt

SEQ ID NO: 1069 - DNA, 44 bp, Artificial Sequence
  Synthetic
caatgaaacattaaggtgcaagcatacatgttttgagcctctcc

SEQ ID NO: 1070 - DNA, 38 bp, Artificial Sequence
  Synthetic
gcagttaccactcccggtacacagtctttggctgcaac

SEQ ID NO: 1071 - DNA, 42 bp, Artificial Sequence
  Synthetic
aggcagtcccccgtgatagtctccatctcgggggtctctagc

SEQ ID NO: 1072 - DNA, 36 bp, Artificial Sequence
  Synthetic
gacgcaatggacccgagggatgctctggggcacaca

SEQ ID NO: 1073 - DNA, 37 bp, Artificial Sequence
  Synthetic
gcgggagtcgtatctggcgattggggctggacgttcg

SEQ ID NO: 1074 - DNA, 37 bp, Artificial Sequence
  Synthetic
ctggacaaggtcgccatctgcgccacgtacgcgctgt

SEQ ID NO: 1075 - DNA, 39 bp, Artificial Sequence
  Synthetic
ccccctgccttacgtggtctttgttggtgttgacgacgg

SEQ ID NO: 1076 - DNA, 35 bp, Artificial Sequence
  Synthetic
agagccaggaccaggacgcgccacgaccagctgct

SEQ ID NO: 1077 - DNA, 40 bp, Artificial Sequence
  Synthetic
cacgcctacctgaaggtgaccccgtaagcacggggagggt

SEQ ID NO: 1078 - DNA, 35 bp, Artificial Sequence
  Synthetic
agacggcgtccctggagtctctggcggacggaaca

SEQ ID NO: 1079 - DNA, 41 bp, Artificial Sequence
  Synthetic
ccaggtacatcagcagacaggcttctccctgttcaacccca

SEQ ID NO: 1080 - DNA, 40 bp, Artificial Sequence
  Synthetic
tcgtcgtcgaacggttttacgtcagttgccactgggtcct

SEQ ID NO: 1081 - DNA, 38 bp, Artificial Sequence
  Synthetic
gcggtggcgctgttcaagattgcttttggccatctgca

SEQ ID NO: 1082 - DNA, 39 bp, Artificial Sequence
  Synthetic
cccgatgacgtgctggacctatcgaacaccagctgcatg

SEQ ID NO: 1083 - DNA, 37 bp, Artificial Sequence
  Synthetic
cgtcagtttacggaccgcgtggtggtcacgtccccga

SEQ ID NO: 1084 - DNA, 40 bp, Artificial Sequence
  Synthetic
cgggaaaaactaccgcgctgatacactcgtgtccggagag

SEQ ID NO: 1085 - DNA, 40 bp, Artificial Sequence
  Synthetic
ggacgtaaaccaggtgggccagcagatcaccgtcctgttg

SEQ ID NO: 1086 - DNA, 37 bp, Artificial Sequence
  Synthetic
ctcgccgagctatgggcctcgttgtttcggcagcagc

SEQ ID NO: 1087 - DNA, 35 bp, Artificial Sequence
  Synthetic
ggagggcgtaacgttccgcttgctgggtcctgcgg

SEQ ID NO: 1088 - DNA, 35 bp, Artificial Sequence
  Synthetic
gcccgttaaccccccacgtgcccggggcttttcgt

SEQ ID NO: 1089 - DNA, 35 bp, Artificial Sequence
  Synthetic
actgtcgtcggtggcgctgacacaggcgggacacc

SEQ ID NO: 1090 - DNA, 38 bp, Artificial Sequence
  Synthetic
tcaaccccgccctacactacaccagaccccccgaagct

SEQ ID NO: 1091 - DNA, 36 bp, Artificial Sequence
  Synthetic
ttggtgagcgcctggacgctcgctgcttcctcgagt

SEQ ID NO: 1092 - DNA, 38 bp, Artificial Sequence
  Synthetic
cggtttgttggcgcctttatggcgcgcgggactttagc

SEQ ID NO: 1093 - DNA, 37 bp, Artificial Sequence
  Synthetic
ctcctgtgcaccctcacgttctcgggggtttcctccg

SEQ ID NO: 1094 - DNA, 40 bp, Artificial Sequence
  Synthetic
cttcctaacccagaccccggggggcgcgtcagatacagaa

SEQ ID NO: 1095 - DNA, 36 bp, Artificial Sequence
  Synthetic
cccacccccgaaccatgaacccgtggccgagatcgt

SEQ ID NO: 1096 - DNA, 37 bp, Artificial Sequence
  Synthetic
tcagaacgggccggtcgtcggccgattccttcatgca

SEQ ID NO: 1097 - DNA, 36 bp, Artificial Sequence
  Synthetic
aaggtcatccgaggcgccgtcccccaacactgacgt

SEQ ID NO: 1098 - DNA, 38 bp, Artificial Sequence
  Synthetic
aaggctgccgctttacgagggtctcctagttggcccgc

SEQ ID NO: 1099 - DNA, 35 bp, Artificial Sequence
  Synthetic
aatcgtggcgcggctcgtgcggggtttctggggct

SEQ ID NO: 1100 - DNA, 36 bp, Artificial Sequence
  Synthetic
gcgcctgatcgtggagacggctgtacgtcgctggcg

SEQ ID NO: 1101 - DNA, 38 bp, Artificial Sequence
  Synthetic
cgctttgtgactgagaacgtgctggagctggcccagga

SEQ ID NO: 1102 - DNA, 37 bp, Artificial Sequence
  Synthetic
ggctcgtggtccagtgcatcagttcacgaacgccgcg

SEQ ID NO: 1103 - DNA, 41 bp, Artificial Sequence
  Synthetic
gaccagatgctgcacgtgctgtgcatcggcaacaacaaagc

SEQ ID NO: 1104 - DNA, 40 bp, Artificial Sequence
  Synthetic
ctcgtgcgctttctggagctagctccggaaacttggtaca

SEQ ID NO: 1105 - DNA, 35 bp, Artificial Sequence
  Synthetic
accttcagtccggacgggcggtgggcggcagcatt

SEQ ID NO: 1106 - DNA, 35 bp, Artificial Sequence
  Synthetic
taagctccatcgcgggcggacccacgcccacatcc

SEQ ID NO: 1107 - DNA, 36 bp, Artificial Sequence
  Synthetic
tcctggcccagcagacccaggcgttgtagtgtgccc

SEQ ID NO: 1108 - DNA, 34 bp, Artificial Sequence
  Synthetic
tgctcgcgacgtcgggttgcagaccgcgccgttt

SEQ ID NO: 1109 - DNA, 35 bp, Artificial Sequence
  Synthetic
tcgaccgcctggccaaacgcgaatcgcggccagca

SEQ ID NO: 1110 - DNA, 35 bp, Artificial Sequence
  Synthetic
gtggcgtgaaactcccgcaacgaagccatacgcgc

SEQ ID NO: 1111 - DNA, 38 bp, Artificial Sequence
  Synthetic
ggagggggaaggaacgaaacactcttctgcgtgcccgt

SEQ ID NO: 1112 - DNA, 41 bp, Artificial Sequence
  Synthetic
gggaactcgggggtgatgaagtgacgtctgggaacacaggc

SEQ ID NO: 1113 - DNA, 41 bp, Artificial Sequence
  Synthetic
tcttggacatacggccgtcccaccatcacggactttcccct

SEQ ID NO: 1114 - DNA, 36 bp, Artificial Sequence
  Synthetic
gaggccaagctagccgaggctgcgctccatggcaga

SEQ ID NO: 1115 - DNA, 42 bp, Artificial Sequence
  Synthetic
acatcaccaccgtcagcaccttcaaactcgtgatcctccagc

SEQ ID NO: 1116 - DNA, 35 bp, Artificial Sequence
  Synthetic
accccaacgccatcgcctcacgtcgccgagcatcc

SEQ ID NO: 1117 - DNA, 39 bp, Artificial Sequence
  Synthetic
gcgacgcacatcaaggtgggcgatcagaaagcccccatt

SEQ ID NO: 1118 - DNA, 37 bp, Artificial Sequence
  Synthetic
cgagatgctgcgctccgatggatatggcgtcggaaga

SEQ ID NO: 1119 - DNA, 35 bp, Artificial Sequence
  Synthetic
ttccccaacggcaagcccgccgtccagaaccactg

SEQ ID NO: 1120 - DNA, 40 bp, Artificial Sequence
  Synthetic
atcaattccaaccggtgctgcgccgacagaaacccgttgt

SEQ ID NO: 1121 - DNA, 35 bp, Artificial Sequence
  Synthetic
agtacgtggaccaggcggtgcctcgcggttggtga

SEQ ID NO: 1122 - DNA, 39 bp, Artificial Sequence
  Synthetic
acaaggtaaccataggcggggctgaacagctgcaacggg

SEQ ID NO: 1123 - DNA, 36 bp, Artificial Sequence
  Synthetic
caccatcaaggtcccccccgttcggacggacacgcg

SEQ ID NO: 1124 - DNA, 36 bp, Artificial Sequence
  Synthetic
cggtaaaacagagcggggcgttcgaggcggaggtgg

SEQ ID NO: 1125 - DNA, 38 bp, Artificial Sequence
  Synthetic
cgcgagcggatctgctttcgagagcctcctcagcatcc

SEQ ID NO: 1126 - DNA, 39 bp, Artificial Sequence
  Synthetic
atcttgtcgcccacggccgactccatctttgtgctgtgc

SEQ ID NO: 1127 - DNA, 36 bp, Artificial Sequence
  Synthetic
ccacttacgggggccacatgtagtgcaggtgggcgg

SEQ ID NO: 1128 - DNA, 39 bp, Artificial Sequence
  Synthetic
gctcttaacgaggctctctgcggggcggcacacctatca

SEQ ID NO: 1129 - DNA, 36 bp, Artificial Sequence
  Synthetic
acatgctggccatcatcggcctcggcgacctggaca

SEQ ID NO: 1130 - DNA, 40 bp, Artificial Sequence
  Synthetic
ccgccaaccaagggctgatagataatgtcgcggatgctgc

SEQ ID NO: 1131 - DNA, 37 bp, Artificial Sequence
  Synthetic
acacgttcttcgccggcccccctagggggccaatggt

SEQ ID NO: 1132 - DNA, 37 bp, Artificial Sequence
  Synthetic
tcgtggtcaccggtgctcggcatgcacgataccgacc

SEQ ID NO: 1133 - DNA, 36 bp, Artificial Sequence
  Synthetic
ttccccgcccggtcgagttggagatagcccagccca

SEQ ID NO: 1134 - DNA, 39 bp, Artificial Sequence
  Synthetic
cggttcttggccctggtgagttctatgcgctggaggtgc

SEQ ID NO: 1135 - DNA, 37 bp, Artificial Sequence
  Synthetic
accccacagccaaacgcggtgtgtatacggacgcgcc

SEQ ID NO: 1136 - DNA, 37 bp, Artificial Sequence
  Synthetic
tccacatcgcgcaggggtactcaggacatcggtgtgt

SEQ ID NO: 1137 - DNA, 35 bp, Artificial Sequence
  Synthetic
tagcccgatgcccccgttgacaaggcgaccctgcg

SEQ ID NO: 1138 - DNA, 38 bp, Artificial Sequence
  Synthetic
aggttggagccggcgatggtgttcaaagacgcggtgaa

SEQ ID NO: 1139 - DNA, 39 bp, Artificial Sequence
  Synthetic
atcgccgacaggtttctggagtccttgtagaacgcgggt

SEQ ID NO: 1140 - DNA, 37 bp, Artificial Sequence
  Synthetic
gccagtgacgtggacgcctagagctgggtctggagtc

SEQ ID NO: 1141 - DNA, 40 bp, Artificial Sequence
  Synthetic
agtgttccaggggcaggaacaccggggcatccttatccat

SEQ ID NO: 1142 - DNA, 35 bp, Artificial Sequence
  Synthetic
tgggcgtggcactatcggctgacgaggccgcagct

SEQ ID NO: 1143 - DNA, 42 bp, Artificial Sequence
  Synthetic
ttccggaatttatacccgggccggtgtgtgatgatttcgcca

SEQ ID NO: 1144 - DNA, 37 bp, Artificial Sequence
  Synthetic
cacggggttacgcgggtagtggagggtcagccgttca

SEQ ID NO: 1145 - DNA, 35 bp, Artificial Sequence
  Synthetic
tgggcacgtacacccccctcgtacaggggctgggt

SEQ ID NO: 1146 - DNA, 37 bp, Artificial Sequence
  Synthetic
acgcgcagactgtcgacggcgccgtctaagtggagct

SEQ ID NO: 1147 - DNA, 37 bp, Artificial Sequence
  Synthetic
gggctgtcattcctcgggaacggaccggacggacctt

SEQ ID NO: 1148 - DNA, 37 bp, Artificial Sequence
  Synthetic
tggtgaatccagacgtggtgccgcagaacgccctcga

SEQ ID NO: 1149 - DNA, 38 bp, Artificial Sequence
  Synthetic
gctcgacctctccacacctgctgcgcggacaattaggc

SEQ ID NO: 1150 - DNA, 35 bp, Artificial Sequence
  Synthetic
agaacgactggcgcgccactcctgatgggccgcca

SEQ ID NO: 1151 - DNA, 39 bp, Artificial Sequence
  Synthetic
gagaaccgtggacgacgtacgcgacaagatcggactgcg

SEQ ID NO: 1152 - DNA, 35 bp, Artificial Sequence
  Synthetic
tgttggccccgacgctcagttaagcacggccgggc

SEQ ID NO: 1153 - DNA, 36 bp, Artificial Sequence
  Synthetic
accacacgagcacgaggcctccctgcagcacctctc

SEQ ID NO: 1154 - DNA, 36 bp, Artificial Sequence
  Synthetic
atcggcgttggtggagggcgtgcgtctggtggtcgt

SEQ ID NO: 1155 - DNA, 36 bp, Artificial Sequence
  Synthetic
attccaggtcgtcgcggcgtggacctctccgacagc

SEQ ID NO: 1156 - DNA, 34 bp, Artificial Sequence
  Synthetic
tttcggcctgccaggtggcgggccccggacataa

SEQ ID NO: 1157 - DNA, 35 bp, Artificial Sequence
  Synthetic
tcgaccgaacagccgtccgcgcgcccgagttttgc

SEQ ID NO: 1158 - DNA, 38 bp, Artificial Sequence
  Synthetic
tctggacacccccacggaccattggcacggacaacagg

SEQ ID NO: 1159 - DNA, 38 bp, Artificial Sequence
  Synthetic
tggggagtagggccttttccatggatgcgccccaaagc

SEQ ID NO: 1160 - DNA, 38 bp, Artificial Sequence
  Synthetic
cgccctcgacgagtgggatcttcacccccagtaccctc

SEQ ID NO: 1161 - DNA, 34 bp, Artificial Sequence
  Synthetic
aaaccgccccccaagcctaggatgaagccccccg

SEQ ID NO: 1162 - DNA, 41 bp, Artificial Sequence
  Synthetic
actgaccctctgatcgccgttaccggatagcagatgtgagg

SEQ ID NO: 1163 - DNA, 35 bp, Artificial Sequence
  Synthetic
cagccccttggagagcacccggtgcagcagtcgga

SEQ ID NO: 1164 - DNA, 35 bp, Artificial Sequence
  Synthetic
ggcagtgccgcattttggctggccggacgaacgac

SEQ ID NO: 1165 - DNA, 37 bp, Artificial Sequence
  Synthetic
gggccccggggttttaaggatacgggggggtaggtca

SEQ ID NO: 1166 - DNA, 35 bp, Artificial Sequence
  Synthetic
agtccaggcacgcgtcctcgccgtcccgggtgttt

SEQ ID NO: 1167 - DNA, 40 bp, Artificial Sequence
  Synthetic
ctcttccgcggtaaatcccgtgccccccggtatacgacga

SEQ ID NO: 1168 - DNA, 40 bp, Artificial Sequence
  Synthetic
cgccttcacgattacccgttggtcggaggggtgtgtcttt

SEQ ID NO: 1169 - DNA, 40 bp, Artificial Sequence
  Synthetic
tgggttcaggcgcctactcatctggtcctccccaagtacc

SEQ ID NO: 1170 - DNA, 36 bp, Artificial Sequence
  Synthetic
tcgcacgggccccttttggactgccgtccacaacgc

SEQ ID NO: 1171 - DNA, 37 bp, Artificial Sequence
  Synthetic
tggcggtgggagagtcggttcgtccctcgcatgaagc

SEQ ID NO: 1172 - DNA, 36 bp, Artificial Sequence
  Synthetic
cgcgcatgcttcatgggtcccggggcggtcattgga

SEQ ID NO: 1173 - DNA, 36 bp, Artificial Sequence
  Synthetic
gggtggcggcaagaacagcgcgcagtctggcatctg

SEQ ID NO: 1174 - DNA, 38 bp, Artificial Sequence
  Synthetic
gtgttgttgggtgccctccgccccccaaaccatgtccg

SEQ ID NO: 1175 - DNA, 38 bp, Artificial Sequence
  Synthetic
cccggcgtccacaaatgagttccagcctggttgtccgt

SEQ ID NO: 1176 - DNA, 35 bp, Artificial Sequence
  Synthetic
tttggcgcgtcaccgaccgcaacgcgggactatgc

SEQ ID NO: 1177 - DNA, 34 bp, Artificial Sequence
  Synthetic
aggccgctgtccgtctctgcggccgtggttaacc

SEQ ID NO: 1178 - DNA, 37 bp, Artificial Sequence
  Synthetic
gcttcgaccgaaactggcgagtcagcgcgatccgaca

SEQ ID NO: 1179 - DNA, 37 bp, Artificial Sequence
  Synthetic
agccacatcaggagcgcccgatcgcctgtctcctcgt

SEQ ID NO: 1180 - DNA, 50 bp, Artificial Sequence
  Synthetic
tgttcccaatttgtaacatcaagctatcagaagataataaccattggatc

SEQ ID NO: 1181 - DNA, 39 bp, Artificial Sequence
  Synthetic
attgtcaaccaactggtgccaaggtttgagtctgttgct

SEQ ID NO: 1182 - DNA, 47 bp, Artificial Sequence
  Synthetic
atcaggataacaggagcactccgaaaaagggaaagtagttaaatcag

SEQ ID NO: 1183 - DNA, 48 bp, Artificial Sequence
  Synthetic
cctggaattagtgcttttggttctcaaagggttttcatttaaatacgg

SEQ ID NO: 1184 - DNA, 42 bp, Artificial Sequence
  Synthetic
ttccgaaagcccaggatgatggtgtatccctcctgttgctgt

SEQ ID NO: 1185 - DNA, 48 bp, Artificial Sequence
  Synthetic
cccataacatccaatgacataacccctttgggtatacatttaaaccct

SEQ ID NO: 1186 - DNA, 40 bp, Artificial Sequence
  Synthetic
gtggtctccatgcgacgtgccgtctgtgccttctcatctg

SEQ ID NO: 1187 - DNA, 41 bp, Artificial Sequence
  Synthetic
gttccccccagcaaagaattgttagagtctcctgagcattg

SEQ ID NO: 1188 - DNA, 42 bp, Artificial Sequence
  Synthetic
tggaaagattctgccccatgctgaaacaacacatagcgcctc

SEQ ID NO: 1189 - DNA, 45 bp, Artificial Sequence
  Synthetic
tgtggtttttgtcagtatctcgcaataaaagaactacggaacctg

SEQ ID NO: 1190 - DNA, 41 bp, Artificial Sequence
  Synthetic
ccacgggtccatttctattccagatcagatcgagtgatggt

SEQ ID NO: 1191 - DNA, 41 bp, Artificial Sequence
  Synthetic
agatgctagtggatctgctgatctaattattgcggccagga

SEQ ID NO: 1192 - DNA, 43 bp, Artificial Sequence
  Synthetic
acccctcatgtactcttatcttcaaaagcgggtcatcagtcaa

SEQ ID NO: 1193 - DNA, 43 bp, Artificial Sequence
  Synthetic
aatgccttaaaagctgatgcatggacctgaatttcgtcaacag

SEQ ID NO: 1194 - DNA, 42 bp, Artificial Sequence
  Synthetic
gtttcactgacctcctcaggagtgatcggtttttgagagttc

SEQ ID NO: 1195 - DNA, 43 bp, Artificial Sequence
  Synthetic
caagtacgtctctcatttgttggaaccaaggccattagaagcc

SEQ ID NO: 1196 - DNA, 38 bp, Artificial Sequence
  Synthetic
gaaaccctctcaagacggcggaaaagatgccggcactt

SEQ ID NO: 1197 - DNA, 46 bp, Artificial Sequence
  Synthetic
cacacaaatcacgacgacagaaatattttgatgttactcctgatgt

SEQ ID NO: 1198 - DNA, 46 bp, Artificial Sequence
  Synthetic
cgcgataatatcaatcttctcctcaaagagttaaatgtgaggtgtc

SEQ ID NO: 1199 - DNA, 48 bp, Artificial Sequence
  Synthetic
gcaacaacaacgacacgaattactaggagcatccagtatataaagttg

SEQ ID NO: 1200 - DNA, 50 bp, Artificial Sequence
  Synthetic
tgtcgtctaacagatttgagatgttgtggatgatatacaatgtattgatg

SEQ ID NO: 1201 - DNA, 45 bp, Artificial Sequence
  Synthetic
gatctctacctgcgacgtaaaagtattgaattttcaggacagtgg

SEQ ID NO: 1202 - DNA, 48 bp, Artificial Sequence
  Synthetic
tgaggccttcttttctcccataattggactcccaaataaattattgga

SEQ ID NO: 1203 - DNA, 41 bp, Artificial Sequence
  Synthetic
tttcggtgggactggaaacggcagctctgcaagttccttct

SEQ ID NO: 1204 - DNA, 44 bp, Artificial Sequence
  Synthetic
gttcctatacccagtcctccaaaatcgactcttgctgatcgatt

SEQ ID NO: 1205 - DNA, 47 bp, Artificial Sequence
  Synthetic
agttgtaagtacaggtggttctgccaacattaattgaatcaggagga

SEQ ID NO: 1206 - DNA, 43 bp, Artificial Sequence
  Synthetic
gatctggagtagcagctacattctctttagcactgacgtcact

SEQ ID NO: 1207 - DNA, 39 bp, Artificial Sequence
  Synthetic
tcgcctgaatgttggcctatctataggttctgacgctgc

SEQ ID NO: 1208 - DNA, 43 bp, Artificial Sequence
  Synthetic
ctgtaccagcatagaaaaacagactcaagaccaatcgccagag

SEQ ID NO: 1209 - DNA, 48 bp, Artificial Sequence
  Synthetic
ttaaataatggattgcctgttgtggttaagaggtattgaaataggtcg

SEQ ID NO: 1210 - DNA, 48 bp, Artificial Sequence
  Synthetic
caccaaagccaatgtcacacatattccacctgtgcaattaattaattc

SEQ ID NO: 1211 - DNA, 44 bp, Artificial Sequence
  Synthetic
tcgttcagtcatatctatttgccaactaagtgtcctactgctgc

SEQ ID NO: 1212 - DNA, 50 bp, Artificial Sequence
  Synthetic
agtacattcagagaccattcacagtattgtgataaaatactgtgaatccc

SEQ ID NO: 1213 - DNA, 40 bp, Artificial Sequence
  Synthetic
cctttggcgccaaaaacttaccgagggtcgatactgccaa

SEQ ID NO: 1214 - DNA, 47 bp, Artificial Sequence
  Synthetic
cgtcagaaattaagttagcaggcaagggagataaggctactattcct

SEQ ID NO: 1215 - DNA, 42 bp, Artificial Sequence
  Synthetic
gcttagatgctctctcaggcgacagatctcagagctaagtcc

SEQ ID NO: 1216 - DNA, 42 bp, Artificial Sequence
  Synthetic
gcagagtcggaccccaatttccccgagagaatctggaaccac

SEQ ID NO: 1217 - DNA, 43 bp, Artificial Sequence
  Synthetic
atcccccagacccttttccatttggaagtttggtatattttgg

SEQ ID NO: 1218 - DNA, 48 bp, Artificial Sequence
  Synthetic
gctggatctctaaaggtgaatagttgggcctgatatatcttttattgc

SEQ ID NO: 1219 - DNA, 50 bp, Artificial Sequence
  Synthetic
tctcttcaaatatgttgtccccaatgtgatactaatgtgtttgtagatcc

SEQ ID NO: 1220 - DNA, 44 bp, Artificial Sequence
  Synthetic
gctatttacatcacgctggaactgtttgagtttgaaaatcccgc

SEQ ID NO: 1221 - DNA, 44 bp, Artificial Sequence
  Synthetic
cgctctgtcatatctaaagtccagacctactgctgaaccagaag

SEQ ID NO: 1222 - DNA, 45 bp, Artificial Sequence
  Synthetic
caggagtttataggtcagaacccatgaatattttaccgtggtgtc

SEQ ID NO: 1223 - DNA, 43 bp, Artificial Sequence
  Synthetic
gccaatctggtattatcccttccaggaggagacatagaatcct

SEQ ID NO: 1224 - DNA, 38 bp, Artificial Sequence
  Synthetic
ccagctcctcccatgtccctctgaggctgcagggactt

SEQ ID NO: 1225 - DNA, 40 bp, Artificial Sequence
  Synthetic
gcgccaacctgctagggatttctgttaggacccttctcgc

SEQ ID NO: 1226 - DNA, 41 bp, Artificial Sequence
  Synthetic
cgggccgtaacctaactttttctgcgagaaactccgtcttg

SEQ ID NO: 1227 - DNA, 40 bp, Artificial Sequence
  Synthetic
ccgcttgttgcacggggtagacaagtagaccaacagcacc

SEQ ID NO: 1228 - DNA, 44 bp, Artificial Sequence
  Synthetic
gcctatacatccactggatctgttccaagagggtctgacatagc

SEQ ID NO: 1229 - DNA, 40 bp, Artificial Sequence
  Synthetic
cgagtgtccctcctttccacagggaccaagccctatccca

SEQ ID NO: 1230 - DNA, 44 bp, Artificial Sequence
  Synthetic
gacatgcctaaggctgtcagaataccataatgacaggagatacc

SEQ ID NO: 1231 - DNA, 48 bp, Artificial Sequence
  Synthetic
ccttttctttttggctagtcctgcaaataaggtgactcaagatttcac

SEQ ID NO: 1232 - DNA, 43 bp, Artificial Sequence
  Synthetic
ccctaggccatttagaagttctttgacaggacaggtttagagc

SEQ ID NO: 1233 - DNA, 43 bp, Artificial Sequence
  Synthetic
gttcctggctcaagataattttgttcagaagaagtgcagtgga

SEQ ID NO: 1234 - DNA, 46 bp, Artificial Sequence
  Synthetic
gcctggtataggatctcctactagggagtgggactttgtatctacc

SEQ ID NO: 1235 - DNA, 44 bp, Artificial Sequence
  Synthetic
gccttgacttactaaatggtctactagtctatgttgcatgggtc

SEQ ID NO: 1236 - DNA, 42 bp, Artificial Sequence
  Synthetic
tgcgttattggccacctactgggaagcagaagtcatcccaca

SEQ ID NO: 1237 - DNA, 44 bp, Artificial Sequence
  Synthetic
tcttgttctgtggtaatcatgttgaaagaaggggaggaataggg

SEQ ID NO: 1238 - DNA, 46 bp, Artificial Sequence
  Synthetic
ggtaacatctgtccagaacttttctgaacctaacaccagaaaaagg

SEQ ID NO: 1239 - DNA, 43 bp, Artificial Sequence
  Synthetic
acacctggaaaatgagctctcgccatagaagccttaaacaggg

SEQ ID NO: 1240 - DNA, 45 bp, Artificial Sequence
  Synthetic
gggtgtctccatgtctattatggataggaagaagccttaagacat

SEQ ID NO: 1241 - DNA, 39 bp, Artificial Sequence
  Synthetic
actcacttgtctggtgcagaaagacgaagaaggactcca

SEQ ID NO: 1242 - DNA, 47 bp, Artificial Sequence
  Synthetic
gcttgacacatggttttattgatgttggaataatacagtgacagaac

SEQ ID NO: 1243 - DNA, 46 bp, Artificial Sequence
  Synthetic
gcaatgtctcatgtaacatgtgcccatggtatttagaagatgtggt

SEQ ID NO: 1244 - DNA, 48 bp, Artificial Sequence
  Synthetic
gagagtgaaacactaatcctgacatgtaagagaccaggaaataagaca

SEQ ID NO: 1245 - DNA, 46 bp, Artificial Sequence
  Synthetic
ttttccctactttatgccaggtattcaattgggtagaagacaagaa

SEQ ID NO: 1246 - DNA, 41 bp, Artificial Sequence
  Synthetic
cgcacatccccatgaatttagcaagagtcactgctatcgag

SEQ ID NO: 1247 - DNA, 42 bp, Artificial Sequence
  Synthetic
cagccagtccctgattgctgttactatccaagaactccccga

SEQ ID NO: 1248 - DNA, 43 bp, Artificial Sequence
  Synthetic
tgctgcctatacaaatctttctgtcagagtacatgaacagccc

SEQ ID NO: 1249 - DNA, 41 bp, Artificial Sequence
  Synthetic
cagcatggagtcaaactgccaacaagcagacatgatgatga

SEQ ID NO: 1250 - DNA, 39 bp, Artificial Sequence
  Synthetic
agggaacacccaggctctaccgagaggctggcagatcga

SEQ ID NO: 1251 - DNA, 44 bp, Artificial Sequence
  Synthetic
tcccagtgcagattcgatctgaaggcaataattgtactactcat

SEQ ID NO: 1252 - DNA, 44 bp, Artificial Sequence
  Synthetic
gcaggtttgacttcatggagtattgcctaggcagaccaaaatgc

SEQ ID NO: 1253 - DNA, 43 bp, Artificial Sequence
  Synthetic
actggatttattgctgtcttgttgtatgggaacggcttcttca

SEQ ID NO: 1254 - DNA, 45 bp, Artificial Sequence
  Synthetic
tccaggtttttgtaccatgtaatcaccaaatcaaacagaagacga

SEQ ID NO: 1255 - DNA, 44 bp, Artificial Sequence
  Synthetic
tcctttaatagttttgcaggcggtccaatatgggtgaaaacacc

SEQ ID NO: 1256 - DNA, 43 bp, Artificial Sequence
  Synthetic
gctcttagatcatccactttttcgtcggagcaatgaatgagct

SEQ ID NO: 1257 - DNA, 39 bp, Artificial Sequence
  Synthetic
gcattaaaggtgccagcagctgctttgaaaccaaacaca

SEQ ID NO: 1258 - DNA, 47 bp, Artificial Sequence
  Synthetic
gccccatggaatgttatttctcttttggagatccaaacaatatggat

SEQ ID NO: 1259 - DNA, 41 bp, Artificial Sequence
  Synthetic
tcgatccagccatctgctccatgagaacagaatggtgctgg

SEQ ID NO: 1260 - DNA, 43 bp, Artificial Sequence
  Synthetic
cacaatatcaagtgcagtatcccaagcagcgattcaagtgatc

SEQ ID NO: 1261 - DNA, 43 bp, Artificial Sequence
  Synthetic
tccgcgcaataattcttcaaaaaggtgtaagggtttgtgttgc

SEQ ID NO: 1262 - DNA, 49 bp, Artificial Sequence
  Synthetic
gcttgttatacaatgccagggaattctaacgtttcccaattaatagacg

SEQ ID NO: 1263 - DNA, 46 bp, Artificial Sequence
  Synthetic
tcttgtaactctaattgcactgcaaaaattactgatgctgaatgga

SEQ ID NO: 1264 - DNA, 46 bp, Artificial Sequence
  Synthetic
tccattgtaatctgcatcaccttttgggattggatatactatcagg

SEQ ID NO: 1265 - DNA, 50 bp, Artificial Sequence
  Synthetic
ggacaatcaccagtaaagcattgtttgacagtttataatgtatagagctg

SEQ ID NO: 1266 - DNA, 41 bp, Artificial Sequence
  Synthetic
accaataggctccacaggtactgaggtacaacaaggcctat

SEQ ID NO: 1267 - DNA, 50 bp, Artificial Sequence
  Synthetic
gcctgaacgtggttcattatttacaatgatactgcagctatattagatgt

SEQ ID NO: 1268 - DNA, 45 bp, Artificial Sequence
  Synthetic
cgttcaactatttgggtgggagttggctgaatttgaaataatgga

SEQ ID NO: 1269 - DNA, 46 bp, Artificial Sequence
  Synthetic
caccttcacggctcactcttaattacataggcctacttatactaca

SEQ ID NO: 1270 - DNA, 45 bp, Artificial Sequence
  Synthetic
acatctgagcgtttgcgtttcatcagatgactattttctacatcc

SEQ ID NO: 1271 - DNA, 47 bp, Artificial Sequence
  Synthetic
tgggatctggacacagtaatctaaagaacacagtctgtagtagtacc

SEQ ID NO: 1272 - DNA, 50 bp, Artificial Sequence
  Synthetic
gtgcaacctactataaacacctgatgatgaaaatgatcacagattgaatg

SEQ ID NO: 1273 - DNA, 43 bp, Artificial Sequence
  Synthetic
ctccggagatatcctttgacatttagatctggtgttcctttgg

SEQ ID NO: 1274 - DNA, 46 bp, Artificial Sequence
  Synthetic
cccaatcatctaacactgttggatttttgcaaagtttctctggatc

SEQ ID NO: 1275 - DNA, 45 bp, Artificial Sequence
  Synthetic
cagtttttctggatactttcggagacgccgctttctatatcaaac

SEQ ID NO: 1276 - DNA, 39 bp, Artificial Sequence
  Synthetic
gacaaacagctttcgcaacagaaacagctgagtctggtt

SEQ ID NO: 1277 - DNA, 39 bp, Artificial Sequence
  Synthetic
atgactcctcctctggggtgagcccatctattgtgtgaa

SEQ ID NO: 1278 - DNA, 46 bp, Artificial Sequence
  Synthetic
cctagtccactgtcctgaaacagttggaagcaataagaatttctcc

SEQ ID NO: 1279 - DNA, 49 bp, Artificial Sequence
  Synthetic
gcttgagaagccatttgatgatttctgggaaatcatatatttatggaac

SEQ ID NO: 1280 - DNA, 46 bp, Artificial Sequence
  Synthetic
agtcattaattgctcttgtagtgcaacccgaagataatgaatcaga

SEQ ID NO: 1281 - DNA, 40 bp, Artificial Sequence
  Synthetic
ttttcctcttcggcctcggcgtctctatccgactcccctg

SEQ ID NO: 1282 - DNA, 42 bp, Artificial Sequence
  Synthetic
tgacatcttctggacagtccctaaacgaataaagcgagcttc

SEQ ID NO: 1283 - DNA, 45 bp, Artificial Sequence
  Synthetic
gcatctggagtgattggtagtacttccccaagaccttctattcca

SEQ ID NO: 1284 - DNA, 43 bp, Artificial Sequence
  Synthetic
aggaacctgttgaacaaatctatgaagggccctttaaggagta

SEQ ID NO: 1285 - DNA, 45 bp, Artificial Sequence
  Synthetic
gtgtcaggaatgttaacaaatgtgttataggagggttcagggatg

SEQ ID NO: 1286 - DNA, 47 bp, Artificial Sequence
  Synthetic
gcaaactggttaggatctggtaattaataatgtccaagttccaaagg

SEQ ID NO: 1287 - DNA, 50 bp, Artificial Sequence
  Synthetic
cccgccgtccataaaaaaataatttattaattctacatgtaaatggccag

SEQ ID NO: 1288 - DNA, 44 bp, Artificial Sequence
  Synthetic
ccagctgccagttttctaatattgacctttagaggctgatgtgt

SEQ ID NO: 1289 - DNA, 45 bp, Artificial Sequence
  Synthetic
ggtcgggtatcaaatacagcagtttacatatcagtcgttcaaagg

SEQ ID NO: 1290 - DNA, 43 bp, Artificial Sequence
  Synthetic
cctgtcttcctgatgtgtacttcttcactcgcgagatactgac

SEQ ID NO: 1291 - DNA, 39 bp, Artificial Sequence
  Synthetic
ggtccatttctgttccaccacgctggatcagacagggta

SEQ ID NO: 1292 - DNA, 45 bp, Artificial Sequence
  Synthetic
cctttgttattgtcagctgtgattcgtcgttttcccaaatgaagt

SEQ ID NO: 1293 - DNA, 43 bp, Artificial Sequence
  Synthetic
cctgacaatgttcctagcagcgggaggtaagaaatgatgatgt

SEQ ID NO: 1294 - DNA, 46 bp, Artificial Sequence
  Synthetic
gtccaaccattgtgaattcctcataaagagaggaagaagtgcttac

SEQ ID NO: 1295 - DNA, 41 bp, Artificial Sequence
  Synthetic
ggagttggtgcatgggattcaccgaggtgatttgaatttcg

SEQ ID NO: 1296 - DNA, 43 bp, Artificial Sequence
  Synthetic
tgtttcactaacttcttcaggggatcgtttcttaagggtccga

SEQ ID NO: 1297 - DNA, 41 bp, Artificial Sequence
  Synthetic
cccaaaacatcacgcatctgcgccagaagccaatatagtgg

SEQ ID NO: 1298 - DNA, 42 bp, Artificial Sequence
  Synthetic
tcctgctgttccttcatctggttacaatacttgggaaggacg

SEQ ID NO: 1299 - DNA, 41 bp, Artificial Sequence
  Synthetic
actttggttccgtttgacacggcgatcattccaacaaatgc

SEQ ID NO: 1300 - DNA, 47 bp, Artificial Sequence
  Synthetic
tcttcattcacgaatttcccaggatccgatttaattattgagaggcg

SEQ ID NO: 1301 - DNA, 42 bp, Artificial Sequence
  Synthetic
ccagtttgtttccactcccatatgggatccatcattccgtat

SEQ ID NO: 1302 - DNA, 40 bp, Artificial Sequence
  Synthetic
ttgtccctccactatgatagcatccagagtggagtacagg

SEQ ID NO: 1303 - DNA, 43 bp, Artificial Sequence
  Synthetic
tctgaaaccataccaaccatcaatttttggtgctatagcgggt

SEQ ID NO: 1304 - DNA, 42 bp, Artificial Sequence
  Synthetic
tgtccatttctgaatcagccagctgaactcttggtagcaatg

SEQ ID NO: 1305 - DNA, 42 bp, Artificial Sequence
  Synthetic
acttgccattctgccttaacaagggtttaaccgaaaacggtg

SEQ ID NO: 1306 - DNA, 47 bp, Artificial Sequence
  Synthetic
gcttttgacatatagcacagcgaatattttggcatacagtagaacaa

SEQ ID NO: 1307 - DNA, 47 bp, Artificial Sequence
  Synthetic
ttctgtaacgttgtatgtcctgtttaatttgacacctcagatgaaga

SEQ ID NO: 1308 - DNA, 39 bp, Artificial Sequence
  Synthetic
tttcctgattttcctgcacccacgggagtatgggtaacg

SEQ ID NO: 1309 - DNA, 46 bp, Artificial Sequence
  Synthetic
gcgattcttgccacatttaaatctcatacaatggttaacctgtacc

SEQ ID NO: 1310 - DNA, 45 bp, Artificial Sequence
  Synthetic
cagcacgttgggcatattcagcatatgataatgatttaaccgaag

SEQ ID NO: 1311 - DNA, 42 bp, Artificial Sequence
  Synthetic
acgcatctaaacgtttggccgaatttcaagaatcagaggacg

SEQ ID NO: 1312 - DNA, 44 bp, Artificial Sequence
  Synthetic
gcgtccctgtttttttaaacactttccatggacattgcaagaga

SEQ ID NO: 1313 - DNA, 42 bp, Artificial Sequence
  Synthetic
ggtcggggtggggtctttgtatcacctacacccacaaccatc

SEQ ID NO: 1314 - DNA, 47 bp, Artificial Sequence
  Synthetic
cacgcagcaacaactataaacaatattactgtgagtccactattgtg

SEQ ID NO: 1315 - DNA, 46 bp, Artificial Sequence
  Synthetic
ctaaaaaccacagcagcagccttgtacatacgtgataatatggtac

SEQ ID NO: 1316 - DNA, 47 bp, Artificial Sequence
  Synthetic
tgcagaggacgtaatattaaacccaattgattctagcataccagtgc

SEQ ID NO: 1317 - DNA, 39 bp, Artificial Sequence
  Synthetic
tgatggcctagtgattgggctgggctcgtattgggtcta

SEQ ID NO: 1318 - DNA, 46 bp, Artificial Sequence
  Synthetic
gaggaggcagataaaccttgttgtaccatatttttttgcagatgtc

SEQ ID NO: 1319 - DNA, 43 bp, Artificial Sequence
  Synthetic
accatcctgaataacactgttttgtctgcttgctctgcacaat

SEQ ID NO: 1320 - DNA, 50 bp, Artificial Sequence
  Synthetic
cgtctagtatgtcaggattcatggttgcaaaattacattatctgtagagg

SEQ ID NO: 1321 - DNA, 48 bp, Artificial Sequence
  Synthetic
gcatgtgcttgctaaatttaatggacaatcctccattttagtacatgc

SEQ ID NO: 1322 - DNA, 44 bp, Artificial Sequence
  Synthetic
cttaattgaaatgtgtctgcctgtggtgtgttacctgaatgggt

SEQ ID NO: 1323 - DNA, 47 bp, Artificial Sequence
  Synthetic
cactgtgccattgtcatatttttcaacaggtcaagtttgtaaaagac

SEQ ID NO: 1324 - DNA, 41 bp, Artificial Sequence
  Synthetic
cctccgaccgtctcttcagtctctgaatcccagagcaacgg

SEQ ID NO: 1325 - DNA, 39 bp, Artificial Sequence
  Synthetic
agacctgctgctggtactgactgctgacattactgctga

SEQ ID NO: 1326 - DNA, 43 bp, Artificial Sequence
  Synthetic
ccaactacttctgaaactggatcaagcccaggtcttgatgttg

SEQ ID NO: 1327 - DNA, 47 bp, Artificial Sequence
  Synthetic
caggccatttacaagtggagttaaacttttcagcattttcagaaagt

SEQ ID NO: 1328 - DNA, 38 bp, Artificial Sequence
  Synthetic
accactgggcgtcggataatgacaatgctacacctcca

SEQ ID NO: 1329 - DNA, 39 bp, Artificial Sequence
  Synthetic
gggctagcacatcagcttcctttgaagtggagcttgtga

SEQ ID NO: 1330 - DNA, 48 bp, Artificial Sequence
  Synthetic
acgggaattaagtaatcccatctgaatttgcgagataaatttacctcc

SEQ ID NO: 1331 - DNA, 45 bp, Artificial Sequence
  Synthetic
atgagtcagcaatgccttgtttaacatatggtgctatgtatcctg

SEQ ID NO: 1332 - DNA, 44 bp, Artificial Sequence
  Synthetic
acgatcgttaacggttggatttgttgaacttagaccgaatttgg

SEQ ID NO: 1333 - DNA, 40 bp, Artificial Sequence
  Synthetic
gccgtagtgctggctagtaccaggcagatggcgactacca

SEQ ID NO: 1334 - DNA, 45 bp, Artificial Sequence
  Synthetic
ccacaatatcaagtgcaatatcccagcaaatgcagagattcaagt

SEQ ID NO: 1335 - DNA, 43 bp, Artificial Sequence
  Synthetic
gagctctggattggcataagctggataatgagaaacaacatgc

SEQ ID NO: 1336 - DNA, 46 bp, Artificial Sequence
  Synthetic
tgaccagaactatccagatctgtattcaacaattgaagaccttgtc

SEQ ID NO: 1337 - DNA, 46 bp, Artificial Sequence
  Synthetic
tgttgcatggctctattttgtacaacaactatcctgccatatggag

SEQ ID NO: 1338 - DNA, 45 bp, Artificial Sequence
  Synthetic
tcttcccaagaatccatgatttgattttagagtttgcttgcaact

SEQ ID NO: 1339 - DNA, 42 bp, Artificial Sequence
  Synthetic
gaccacagtctcagctctactagaaactgtacagagaggacc

SEQ ID NO: 1340 - DNA, 48 bp, Artificial Sequence
  Synthetic
gtgttcctgatgattctgtctgtatgaaaatctcaaaaacaacaacca

SEQ ID NO: 1341 - DNA, 50 bp, Artificial Sequence
  Synthetic
cctgcatgtcgatatagatcaggtagaaaagatcaagaaaactaggtttg

SEQ ID NO: 1342 - DNA, 46 bp, Artificial Sequence
  Synthetic
ttgactttgagtggtaatggttctatacacattcccagaatcatca

SEQ ID NO: 1343 - DNA, 43 bp, Artificial Sequence
  Synthetic
tggcatcgaacagcattcctataaaaccagaactatacccatg

SEQ ID NO: 1344 - DNA, 44 bp, Artificial Sequence
  Synthetic
ttcccaactccttttgcgataatcaagagtggatgcaattttcc

SEQ ID NO: 1345 - DNA, 47 bp, Artificial Sequence
  Synthetic
gggatgatcagtctatccaataacctagaagactctaactcttgtgg

SEQ ID NO: 1346 - DNA, 42 bp, Artificial Sequence
  Synthetic
tctgagtgttcagcagcctagtgattactcaatcaccctcca

SEQ ID NO: 1347 - DNA, 46 bp, Artificial Sequence
  Synthetic
ctccttgattaggtggttgattgattgcaaactgtataacaaccac

SEQ ID NO: 1348 - DNA, 49 bp, Artificial Sequence
  Synthetic
ccagtattccatctcgaatttggataatccaactctactcatacaattg

SEQ ID NO: 1349 - DNA, 45 bp, Artificial Sequence
  Synthetic
gaagaccagacgtgcacctctaacacatgatgtaggtataaaacc

SEQ ID NO: 1350 - DNA, 42 bp, Artificial Sequence
  Synthetic
aagacctccatacccgagaaattatgctgcactatacccatc

SEQ ID NO: 1351 - DNA, 39 bp, Artificial Sequence
  Synthetic
tgactgggttcactctcgattcacagggagcattgtgtc

SEQ ID NO: 1352 - DNA, 42 bp, Artificial Sequence
  Synthetic
gcagagtttgaaccgtaagcatttgcctcctgtgacattacc

SEQ ID NO: 1353 - DNA, 50 bp, Artificial Sequence
  Synthetic
ctctgaccaaaagacacatctagattagcaaaagaatctattatgatggg

SEQ ID NO: 1354 - DNA, 48 bp, Artificial Sequence
  Synthetic
gcaggtattaaagaggcatattgcaatcaatccaactataacacagaa

SEQ ID NO: 1355 - DNA, 50 bp, Artificial Sequence
  Synthetic
ccttcctcctgataaatgaatccacatcagatatgaagatatgtgttcag

SEQ ID NO: 1356 - DNA, 46 bp, Artificial Sequence
  Synthetic
agtgtaaaatttgcacgtgtttgtgatgggcatttggtaatgatga

SEQ ID NO: 1357 - DNA, 45 bp, Artificial Sequence
  Synthetic
ctacgactccagcatcaaagatggactttgtgtctacttttctca

SEQ ID NO: 1358 - DNA, 40 bp, Artificial Sequence
  Synthetic
aaaccattgctagcggcctcaatttctgcaaatggctgtt

SEQ ID NO: 1359 - DNA, 45 bp, Artificial Sequence
  Synthetic
cttagtaagccaagcacaaacgtaattatggcagtttgttgacca

SEQ ID NO: 1360 - DNA, 46 bp, Artificial Sequence
  Synthetic
ccacaagtacattgaactaatgcactctcctgttatgacaaatggt

SEQ ID NO: 1361 - DNA, 45 bp, Artificial Sequence
  Synthetic
atgttcctcttctacaaaagtggaaagagtgattgctcttcagag

SEQ ID NO: 1362 - DNA, 45 bp, Artificial Sequence
  Synthetic
acagcacagtcaaagacagtttgatgcctgagaagtttttgaatg

SEQ ID NO: 1363 - DNA, 43 bp, Artificial Sequence
  Synthetic
agcagtgctacgttcaacacaaagttaagtatgcaacagttgt

SEQ ID NO: 1364 - DNA, 46 bp, Artificial Sequence
  Synthetic
tcctcaaaccaagactcgttactactttatgtgagagactatgttg

SEQ ID NO: 1365 - DNA, 43 bp, Artificial Sequence
  Synthetic
agtgtctaaaaacgcattataggccgaacatgtgcaaagcgtt

SEQ ID NO: 1366 - DNA, 50 bp, Artificial Sequence
  Synthetic
gtcaaaatgtgtagggtctgcaattcaggattaagtcttttagtactttc

SEQ ID NO: 1367 - DNA, 48 bp, Artificial Sequence
  Synthetic
tcccagtcaccttcatgtttaattttgagtttgaagatgaaaaacttg

SEQ ID NO: 1368 - DNA, 50 bp, Artificial Sequence
  Synthetic
gcatagtcaccatcaagtataccagtactcaaacaattggataacaactg

SEQ ID NO: 1369 - DNA, 43 bp, Artificial Sequence
  Synthetic
agtgggcgtacaaaacaaaacaaaatgtagttgtaccagtggt

SEQ ID NO: 1370 - DNA, 48 bp, Artificial Sequence
  Synthetic
gcgttcaacttctctttaacaacaaaagttgaaatatctgttacacca

SEQ ID NO: 1371 - DNA, 47 bp, Artificial Sequence
  Synthetic
tggttctattttaggttgctcaactaaggttaaggattttgtgtctg

SEQ ID NO: 1372 - DNA, 44 bp, Artificial Sequence
  Synthetic
acgtgtgcatcgttgaacattagttctgttgttgtctacatgtg

SEQ ID NO: 1373 - DNA, 47 bp, Artificial Sequence
  Synthetic
cgacccaatcaacatctattgcttttaaggacaaagatctttctggt

SEQ ID NO: 1374 - DNA, 43 bp, Artificial Sequence
  Synthetic
cctctaacacttctaacacgtgaattgtgctagtgtcaaacgt

SEQ ID NO: 1375 - DNA, 45 bp, Artificial Sequence
  Synthetic
agctgctgacgcttttaagttatgttaaaataatggccaaagcac

SEQ ID NO: 1376 - DNA, 47 bp, Artificial Sequence
  Synthetic
tggctaaattgacttaactcttggttcaaggatgattactgtgatgg

SEQ ID NO: 1377 - DNA, 44 bp, Artificial Sequence
  Synthetic
gggaatctcttaagtctagcactcttgtgctttttggttgtgaa

SEQ ID NO: 1378 - DNA, 44 bp, Artificial Sequence
  Synthetic
aacgatgtgcattagaaatagcacttatgtctttagccgagtgc

SEQ ID NO: 1379 - DNA, 47 bp, Artificial Sequence
  Synthetic
gcgtgacagcttggttttcattacgcaagtatattgtaaaaactagc

SEQ ID NO: 1380 - DNA, 46 bp, Artificial Sequence
  Synthetic
gccagcgacagtattaacaatttcaggcttcacacctttaaacaag

SEQ ID NO: 1381 - DNA, 41 bp, Artificial Sequence
  Synthetic
attcacctacgcggcagtatcaaggctttggttttagaaca

SEQ ID NO: 1382 - DNA, 50 bp, Artificial Sequence
  Synthetic
gcaattaaatatgcagcacaccaaaattgtatttctttgctactagaagc

SEQ ID NO: 1383 - DNA, 47 bp, Artificial Sequence
  Synthetic
ccagcctgtaatgtagaaccataaccttttcgcgtgatcataatgac

SEQ ID NO: 1384 - DNA, 48 bp, Artificial Sequence
  Synthetic
ctaaaagaatgtctaggtgtgtgcatgcatggagtaactcttaaaatt

SEQ ID NO: 1385 - DNA, 46 bp, Artificial Sequence
  Synthetic
gcaaccacattaactgttaacatctggttttgaagaccaacctaat

SEQ ID NO: 1386 - DNA, 47 bp, Artificial Sequence
  Synthetic
acccaaatagtggtggtataaacaaaatccataagcttatttgctgg

SEQ ID NO: 1387 - DNA, 44 bp, Artificial Sequence
  Synthetic
accaatgtgtacaacgctctttaatttgtctttttgttgcactg

SEQ ID NO: 1388 - DNA, 48 bp, Artificial Sequence
  Synthetic
ggctggactaacacagaaatcataagctgtatgtactatggtttgttg

SEQ ID NO: 1389 - DNA, 44 bp, Artificial Sequence
  Synthetic
gcccactcctttgaattagaagctacaaacgtcgttctaatggg

SEQ ID NO: 1390 - DNA, 47 bp, Artificial Sequence
  Synthetic
gcttgttcagccattctgttaatttttgaagaaggctatgaatgttg

SEQ ID NO: 1391 - DNA, 48 bp, Artificial Sequence
  Synthetic
tgcacattcttaccatcattatcctaaatgatggtagatggttttgtg

SEQ ID NO: 1392 - DNA, 43 bp, Artificial Sequence
  Synthetic
ccagagtcatgttcccatttaacatggtggacgtgcattcatg

SEQ ID NO: 1393 - DNA, 43 bp, Artificial Sequence
  Synthetic
acatctttacacaattgccaacaggcagctgcagcctatcttg

SEQ ID NO: 1394 - DNA, 46 bp, Artificial Sequence
  Synthetic
cccggactcgtttaaataactgtttaatcatggctgtacatgtgac

SEQ ID NO: 1395 - DNA, 48 bp, Artificial Sequence
  Synthetic
cagtctttttcatcaaagttacgcatatggtaatgttagtagacagga

SEQ ID NO: 1396 - DNA, 46 bp, Artificial Sequence
  Synthetic
tgacgtgcagtagggtattcctcttaatgggaatttctatgacttc

SEQ ID NO: 1397 - DNA, 44 bp, Artificial Sequence
  Synthetic
cgggtacaccatcaataaacacttttcttcgcaaccacaattcc

SEQ ID NO: 1398 - DNA, 48 bp, Artificial Sequence
  Synthetic
cccctgagaacgtaagaagtcataagctttgagtacaggattaacatc

SEQ ID NO: 1399 - DNA, 45 bp, Artificial Sequence
  Synthetic
aagagacgccacccactgtatgactcagttaaatcttaaatacgc

SEQ ID NO: 1400 - DNA, 48 bp, Artificial Sequence
  Synthetic
caatgtaaccaagtccagcataagtgcaaaagcatttttctatgatga

SEQ ID NO: 1401 - DNA, 44 bp, Artificial Sequence
  Synthetic
ggtaggcatctatagccagagaaacatcactaagactgatgctg

SEQ ID NO: 1402 - DNA, 45 bp, Artificial Sequence
  Synthetic
gcagaacttttgtacaaaccaaagaaccacaaaccacatctttca

SEQ ID NO: 1403 - DNA, 48 bp, Artificial Sequence
  Synthetic
accgtaatctactttctcaaacacacatgcttccaaattacaaaagac

SEQ ID NO: 1404 - DNA, 39 bp, Artificial Sequence
  Synthetic
tcgctccagggtaatacacactcctcctggtagtggaaa

SEQ ID NO: 1405 - DNA, 47 bp, Artificial Sequence
  Synthetic
tgttgaggatcaccaacatatacaatctatgtgcactaactatgact

SEQ ID NO: 1406 - DNA, 50 bp, Artificial Sequence
  Synthetic
cctggcagctacataattttgactaagcgatttatacataaaaactccac

SEQ ID NO: 1407 - DNA, 44 bp, Artificial Sequence
  Synthetic
agacaatgacaaataagtagtggcagtttaaggattgtgcacgt

SEQ ID NO: 1408 - DNA, 41 bp, Artificial Sequence
  Synthetic
tgccaacattgtcacctgtgatcatgtcagaggttggttag

SEQ ID NO: 1409 - DNA, 43 bp, Artificial Sequence
  Synthetic
gctccaatcttaacaaaataacgcaggtgtttgtactttgggc

SEQ ID NO: 1410 - DNA, 48 bp, Artificial Sequence
  Synthetic
gcccttgtttatggcattttcattagtatgactgctttgttaagaatg

SEQ ID NO: 1411 - DNA, 44 bp, Artificial Sequence
  Synthetic
cccaccatttacaccttcaaggtgaattctcaattgtttgcagg

SEQ ID NO: 1412 - DNA, 46 bp, Artificial Sequence
  Synthetic
tctgtgaatgtctgccacaaattataacatttttactcaagctggt

SEQ ID NO: 1413 - DNA, 41 bp, Artificial Sequence
  Synthetic
aagcttgtcaagggacgctcttgtcgccacatataagtttg

SEQ ID NO: 1414 - DNA, 47 bp, Artificial Sequence
  Synthetic
cgaccttgggtataaaaaccatcatttaactggtttgtttacgtacg

SEQ ID NO: 1415 - DNA, 47 bp, Artificial Sequence
  Synthetic
caacagtcaaatccaaagacttcaatcctagttctaagactgtttgt

SEQ ID NO: 1416 - DNA, 50 bp, Artificial Sequence
  Synthetic
gcacccaagtgtaacactctcatattgtgtcaatattttaacagtaccac

SEQ ID NO: 1417 - DNA, 48 bp, Artificial Sequence
  Synthetic
cgccaaaatacataatttgcgtgtagttgtcggaattaactatcttgg

SEQ ID NO: 1418 - DNA, 44 bp, Artificial Sequence
  Synthetic
cgttgcaaacagagtaactagtgtttgccttgttgcatattgct

SEQ ID NO: 1419 - DNA, 45 bp, Artificial Sequence
  Synthetic
acgtagtttcattgccaatagtagtgatgctcacataccatttgg

SEQ ID NO: 1420 - DNA, 45 bp, Artificial Sequence
  Synthetic
agcgacacaatagacacaggtaagatggtttttattctacaagcc

SEQ ID NO: 1421 - DNA, 50 bp, Artificial Sequence
  Synthetic
tgaagttgatgtgtacgtaattccaaatatttatgatgtatctggtgtgg

SEQ ID NO: 1422 - DNA, 50 bp, Artificial Sequence
  Synthetic
gaaacattacgtggttgaacagcaagttttaacttattctagttttggcg

SEQ ID NO: 1423 - DNA, 45 bp, Artificial Sequence
  Synthetic
gctaaggttgtagtcaccaaaactactgcagatgttagtgagatg

SEQ ID NO: 1424 - DNA, 47 bp, Artificial Sequence
  Synthetic
tgcctgaattgctaatgaaaatggtttctttaattggtggaattgct

SEQ ID NO: 1425 - DNA, 47 bp, Artificial Sequence
  Synthetic
ccaatctaccagtaatcagcctatctctatgacagacttgacactat

SEQ ID NO: 1426 - DNA, 43 bp, Artificial Sequence
  Synthetic
tgccttctttgtaaagagcaagattggttgtgcgttgatggta

SEQ ID NO: 1427 - DNA, 47 bp, Artificial Sequence
  Synthetic
gtgctaatttcactggtcaaattcatacaaattgccaaattacactg

SEQ ID NO: 1428 - DNA, 44 bp, Artificial Sequence
  Synthetic
tgtggatcttttcaacgtcgtaatggcttctttagttgttttgc

SEQ ID NO: 1429 - DNA, 49 bp, Artificial Sequence
  Synthetic
aaaattacagcaatcaaagttgcgtttctaatccttttcgtttatgtgc

SEQ ID NO: 1430 - DNA, 42 bp, Artificial Sequence
  Synthetic
atcactataagcaccacacaccaagctagtggatgatcatgc

SEQ ID NO: 1431 - DNA, 41 bp, Artificial Sequence
  Synthetic
agcccaggtgtcaaagattgattgaagatgcttgtactgtg

SEQ ID NO: 1432 - DNA, 45 bp, Artificial Sequence
  Synthetic
acgtagaaaacccagcctgtgtaatttatagtagagtcggaaggt

SEQ ID NO: 1433 - DNA, 46 bp, Artificial Sequence
  Synthetic
ttctgaaacgtttttgaacattccatacccatcaacaagaaagaca

SEQ ID NO: 1434 - DNA, 43 bp, Artificial Sequence
  Synthetic
acctaaagatttaagagccgcagggaatccttcaagtgacaga

SEQ ID NO: 1435 - DNA, 43 bp, Artificial Sequence
  Synthetic
ggccaaaacattgtgtgacattagaaaatgcaaaagccacggt

SEQ ID NO: 1436 - DNA, 45 bp, Artificial Sequence
  Synthetic
gagatgggttgaattctagtgcaattcactagagaaatgcaacaa

SEQ ID NO: 1437 - DNA, 47 bp, Artificial Sequence
  Synthetic
accactggcttaccattgtgtattcagagctgcttttaattaacatg

SEQ ID NO: 1438 - DNA, 40 bp, Artificial Sequence
  Synthetic
ccaggtgtggcaaatggacactcatgtcctgtttctgtgt

SEQ ID NO: 1439 - DNA, 40 bp, Artificial Sequence
  Synthetic
agaaacatctgtcccatcgctgcgatgagtgtctagactc

SEQ ID NO: 1440 - DNA, 42 bp, Artificial Sequence
  Synthetic
gcgatgctaccttttccaccctaaaagacggctgtttgaggg

SEQ ID NO: 1441 - DNA, 43 bp, Artificial Sequence
  Synthetic
ggcattacaccctctgtaaagctaaccgcggcataaaagtgtt

SEQ ID NO: 1442 - DNA, 47 bp, Artificial Sequence
  Synthetic
ggcgcatttcgtatcttttatacatgcatggctaaaaagtaacaatc

SEQ ID NO: 1443 - DNA, 42 bp, Artificial Sequence
  Synthetic
tccacttgtgcaccacctttagtcatgaactgtatacaacac

SEQ ID NO: 1444 - DNA, 45 bp, Artificial Sequence
  Synthetic
gcagaagtgtcagaagcagattctagaaagaaaacatagatcgcg

SEQ ID NO: 1445 - DNA, 49 bp, Artificial Sequence
  Synthetic
tcagctaatgtggtttgttctacttatatatatagacattgtgtggggt

SEQ ID NO: 1446 - DNA, 41 bp, Artificial Sequence
  Synthetic
cgtgtcgggggttaccacatctcttaggccaagtgtggtgg

SEQ ID NO: 1447 - DNA, 43 bp, Artificial Sequence
  Synthetic
acagaaatatatgatggggtggcatcacttccacgcctaaacg

SEQ ID NO: 1448 - DNA, 40 bp, Artificial Sequence
  Synthetic
tgacgtgggcggtttaagaagttccaaagggcaagggacc

SEQ ID NO: 1449 - DNA, 43 bp, Artificial Sequence
  Synthetic
agaaacaccctgaaggcctgttagaagatacttatgctgagga

SEQ ID NO: 1450 - DNA, 42 bp, Artificial Sequence
  Synthetic
ggtaaccacagtgacatctgaaacttggtacgtaaacgcaaa

SEQ ID NO: 1451 - DNA, 41 bp, Artificial Sequence
  Synthetic
ccaacgcaagcttgttaggatatctgggaatcagtacagag

SEQ ID NO: 1452 - DNA, 42 bp, Artificial Sequence
  Synthetic
gccatcccgtgtaaaaaagtgactgccatgtttttctttggt

SEQ ID NO: 1453 - DNA, 45 bp, Artificial Sequence
  Synthetic
ggggtacaaagcctaactgctctcatattaatgtaatggatccag

SEQ ID NO: 1454 - DNA, 36 bp, Artificial Sequence
  Synthetic
tgcccatctccacgcgaaggtccgcggaaatccagc

SEQ ID NO: 1455 - DNA, 41 bp, Artificial Sequence
  Synthetic
tgcttgtgaggcatgactccaggcatggacatctctccgtc

SEQ ID NO: 1456 - DNA, 39 bp, Artificial Sequence
  Synthetic
gcgttcagcagcgcctcagagtgtcgttggatctgaggg

SEQ ID NO: 1457 - DNA, 38 bp, Artificial Sequence
  Synthetic
ccaccggcatagtgatggtcacgcctggtgacctgcct

SEQ ID NO: 1458 - DNA, 41 bp, Artificial Sequence
  Synthetic
gccgtgctgcacctcaaacattaacatgtacccggcagtcc

SEQ ID NO: 1459 - DNA, 37 bp, Artificial Sequence
  Synthetic
acaaggcaggacgcagcccaacattagcatcccggcg

SEQ ID NO: 1460 - DNA, 42 bp, Artificial Sequence
  Synthetic
ctacctgaactaagactgggtgtaccatccttttgccaatca

SEQ ID NO: 1461 - DNA, 42 bp, Artificial Sequence
  Synthetic
cgaggcaggcttacatgggagtccaggggggactttatgtga

SEQ ID NO: 1462 - DNA, 35 bp, Artificial Sequence
  Synthetic
cgggttggtccagggccttgtcgctgactccgcca

SEQ ID NO: 1463 - DNA, 39 bp, Artificial Sequence
  Synthetic
ctcgtctgggttcttggccccagctcctaagaaggcacc

SEQ ID NO: 1464 - DNA, 36 bp, Artificial Sequence
  Synthetic
aagaggcccctctccgcgagaccctaggcgtcccct

SEQ ID NO: 1465 - DNA, 39 bp, Artificial Sequence
  Synthetic
cctctggtaggactgggcgacccacacacccacccgtct

SEQ ID NO: 1466 - DNA, 39 bp, Artificial Sequence
  Synthetic
cgtaaacgcgctggactgagaaaaggtcagggcccaagg

SEQ ID NO: 1467 - DNA, 39 bp, Artificial Sequence
  Synthetic
gccttcttaggagctgtccgagacacccaggcacacact

SEQ ID NO: 1468 - DNA, 42 bp, Artificial Sequence
  Synthetic
gagttgagctgcctaccatgctccaaaattggtgccttgctc

SEQ ID NO: 1469 - DNA, 38 bp, Artificial Sequence
  Synthetic
cctcgtcttcggtctcagcttcacacgttagggggcgc

SEQ ID NO: 1470 - DNA, 38 bp, Artificial Sequence
  Synthetic
aggggctggtctgtgacctgttgtcggaggtggagagg

SEQ ID NO: 1471 - DNA, 38 bp, Artificial Sequence
  Synthetic
agtccaggcccgggacataaactctaggcctgtggagc

SEQ ID NO: 1472 - DNA, 38 bp, Artificial Sequence
  Synthetic
agagcccagaccggtctccgctccagggaatctttggg

SEQ ID NO: 1473 - DNA, 38 bp, Artificial Sequence
  Synthetic
gcaacgtccaggagctgttctctccccgctgaccagtc

SEQ ID NO: 1474 - DNA, 38 bp, Artificial Sequence
  Synthetic
tcgtggtggaggctgccaggcagcttgtccttgaggag

SEQ ID NO: 1475 - DNA, 35 bp, Artificial Sequence
  Synthetic
cacgttggaccccaagcggtcgggagaggcgcctt

SEQ ID NO: 1476 - DNA, 35 bp, Artificial Sequence
  Synthetic
ggcggagagaatggaggccagagggccggtctcga

SEQ ID NO: 1477 - DNA, 34 bp, Artificial Sequence
  Synthetic
aatgcggccctgcacgtggccgaggccaccttgt

SEQ ID NO: 1478 - DNA, 39 bp, Artificial Sequence
  Synthetic
aaagctggaagcgcctcctatccctgttgtctggccacg

SEQ ID NO: 1479 - DNA, 42 bp, Artificial Sequence
  Synthetic
gccctcctttggggatgatgcatctaggtcagacaggtagcg

SEQ ID NO: 1480 - DNA, 37 bp, Artificial Sequence
  Synthetic
acccgtgggacaaacgcccgagaatggccgcgagttt

SEQ ID NO: 1481 - DNA, 37 bp, Artificial Sequence
  Synthetic
tccccccgccactactccactggatgccctccacgac

SEQ ID NO: 1482 - DNA, 36 bp, Artificial Sequence
  Synthetic
ccgctttctggtctcgggtgagctgcccccgtcaag

SEQ ID NO: 1483 - DNA, 38 bp, Artificial Sequence
  Synthetic
cggccgccttcatcgagttcagctcgttggagaggacc

SEQ ID NO: 1484 - DNA, 41 bp, Artificial Sequence
  Synthetic
gcttgaagaagagctcggggacgagaaccacgagaggtgcc

SEQ ID NO: 1485 - DNA, 42 bp, Artificial Sequence
  Synthetic
acggcgcagttgacgatagagagacagcgggcaagttttgtg

SEQ ID NO: 1486 - DNA, 35 bp, Artificial Sequence
  Synthetic
cgggaggcagatgttggccgtgctgcagccctcga

SEQ ID NO: 1487 - DNA, 37 bp, Artificial Sequence
  Synthetic
agacaacgtgggcctcaacggccttcactggccctgt

SEQ ID NO: 1488 - DNA, 39 bp, Artificial Sequence
  Synthetic
cgagggtgtctctggccttgccacctccgccacctccta

SEQ ID NO: 1489 - DNA, 41 bp, Artificial Sequence
  Synthetic
ctcatgagcaccctggcaacaacgtgacatggagaaactgg

SEQ ID NO: 1490 - DNA, 35 bp, Artificial Sequence
  Synthetic
aatccgcatggagcccccgccaggcccgcatgagt

SEQ ID NO: 1491 - DNA, 34 bp, Artificial Sequence
  Synthetic
tccaccacgtggcgggttcagccgcttcttgggc

SEQ ID NO: 1492 - DNA, 40 bp, Artificial Sequence
  Synthetic
ccttcagatatgccaccccccaggggtactgggggtggtt

SEQ ID NO: 1493 - DNA, 39 bp, Artificial Sequence
  Synthetic
cccgagggtcatgggctcatcaacatgagacgtgaccgg

SEQ ID NO: 1494 - DNA, 37 bp, Artificial Sequence
  Synthetic
tcagtcagggaagccgccgcacctggcttctgaccgg

SEQ ID NO: 1495 - DNA, 40 bp, Artificial Sequence
  Synthetic
cagcagcgtgttcacaaacttatagcctcagccatctacc

SEQ ID NO: 1496 - DNA, 38 bp, Artificial Sequence
  Synthetic
gcctgtgctaccggacacggagcagctcagggaatggc

SEQ ID NO: 1497 - DNA, 35 bp, Artificial Sequence
  Synthetic
aacggggtggatttggcgtgcattagacgcgcgcg

SEQ ID NO: 1498 - DNA, 41 bp, Artificial Sequence
  Synthetic
caccctcctcttgaacaggcctttgtcaatccatggcaggc

SEQ ID NO: 1499 - DNA, 39 bp, Artificial Sequence
  Synthetic
ggacattgtccccccctgactgtatgggttaccgcacgc

SEQ ID NO: 1500 - DNA, 39 bp, Artificial Sequence
  Synthetic
acttggctgaaccaccggccaacttagcagttcggcacc

SEQ ID NO: 1501 - DNA, 36 bp, Artificial Sequence
  Synthetic
ctgaagcccggtgcccaaacgagtcactgctgctgg

SEQ ID NO: 1502 - DNA, 42 bp, Artificial Sequence
  Synthetic
agccagatgttcaggaaccaaagcatcgcttaagtatgagtg

SEQ ID NO: 1503 - DNA, 39 bp, Artificial Sequence
  Synthetic
gggaacagcaggggaggtccagggaatgaaagctcacgg

SEQ ID NO: 1504 - DNA, 40 bp, Artificial Sequence
  Synthetic
gctctcgctgtagtcagactcgtgagggcagtgatagcga

SEQ ID NO: 1505 - DNA, 35 bp, Artificial Sequence
  Synthetic
ttggtgctgtgcccctgccgcagttcgcccagctc

SEQ ID NO: 1506 - DNA, 35 bp, Artificial Sequence
  Synthetic
catgcaccaggggcagctgcgttccagcttcgtcc

SEQ ID NO: 1507 - DNA, 35 bp, Artificial Sequence
  Synthetic
gcagcgggtcagcagtcatcgccgctggagttcct

SEQ ID NO: 1508 - DNA, 40 bp, Artificial Sequence
  Synthetic
gggaagagcacatgcagcctgaggagcgacgagtatgtgg

SEQ ID NO: 1509 - DNA, 39 bp, Artificial Sequence
  Synthetic
gctgatggtgcttgccggatgcgaaaatactgccccgcg

SEQ ID NO: 1510 - DNA, 39 bp, Artificial Sequence
  Synthetic
atccgggccttgacgtgggttctacaatgccagggggga

SEQ ID NO: 1511 - DNA, 38 bp, Artificial Sequence
  Synthetic
gctctacgccttcctccgcaggcttggtgcctctgtgg

SEQ ID NO: 1512 - DNA, 39 bp, Artificial Sequence
  Synthetic
ggaccaacaacccccacctgtggcatgtctgttccccct

SEQ ID NO: 1513 - DNA, 46 bp, Artificial Sequence
  Synthetic
gtctcagttgagcattcaccttttaactggaccctttaaaacatcc

SEQ ID NO: 1514 - DNA, 42 bp, Artificial Sequence
  Synthetic
tgccggactctgtcatccgtaaattgtctgcgtacgctttcc

SEQ ID NO: 1515 - DNA, 40 bp, Artificial Sequence
  Synthetic
ccgatccgacccgctctactttgacagcacctccaacagc

SEQ ID NO: 1516 - DNA, 42 bp, Artificial Sequence
  Synthetic
gcaaaaggggccctattctgctaatgcctctatgttggcaca

SEQ ID NO: 1517 - DNA, 36 bp, Artificial Sequence
  Synthetic
gcacagtgcggctcaggctgcaccgagctgatgggt

SEQ ID NO: 1518 - DNA, 39 bp, Artificial Sequence
  Synthetic
caccgacaacgttctgcgccaatctggttgtcggcctcc

SEQ ID NO: 1519 - DNA, 38 bp, Artificial Sequence
  Synthetic
tcccttcgcaggagggccacagacggatgtcaggtcgg

SEQ ID NO: 1520 - DNA, 38 bp, Artificial Sequence
  Synthetic
tcccgatggcaggtgcacgctcaagtgtaagcagcccg

SEQ ID NO: 1521 - DNA, 39 bp, Artificial Sequence
  Synthetic
ggggctccggtgcctttttcgtgctctcatccctgcaac

SEQ ID NO: 1522 - DNA, 41 bp, Artificial Sequence
  Synthetic
gcacacgttgttttggcaataaaccagaaagatacccagag

SEQ ID NO: 1523 - DNA, 41 bp, Artificial Sequence
  Synthetic
cggccgtttcaaatgctgtggacacgcatccctgtcttctc

SEQ ID NO: 1524 - DNA, 34 bp, Artificial Sequence
  Synthetic
tgctgtccaccgccctgtggctagcccccgcaaa

SEQ ID NO: 1525 - DNA, 39 bp, Artificial Sequence
  Synthetic
cggggtttacagtggcctcattgaaaagggggtggcggt

SEQ ID NO: 1526 - DNA, 39 bp, Artificial Sequence
  Synthetic
gctgaagcggctaagtgggaggtgtcttgggcatcatcc

SEQ ID NO: 1527 - DNA, 35 bp, Artificial Sequence
  Synthetic
tcccgctctgccagctcgagccccaagccttcgca

SEQ ID NO: 1528 - DNA, 42 bp, Artificial Sequence
  Synthetic
tgctcttcaaccttggcagtgtgacaaggcagtagaggacac

SEQ ID NO: 1529 - DNA, 39 bp, Artificial Sequence
  Synthetic
aggcaggcgtccttgggtgcaggcaccgtctgtatacgt

SEQ ID NO: 1530 - DNA, 38 bp, Artificial Sequence
  Synthetic
tggcgccctaagaccacctggccaccacagcacaagtg

SEQ ID NO: 1531 - DNA, 36 bp, Artificial Sequence
  Synthetic
gcagcacacgcccccattccttccccgggaatgtgt

SEQ ID NO: 1532 - DNA, 40 bp, Artificial Sequence
  Synthetic
aaggctggcaaagatccccagtctcctaggaatgccgagc

SEQ ID NO: 1533 - DNA, 39 bp, Artificial Sequence
  Synthetic
tcagcctacaagagcacccagagttgcgctcgacgaact

SEQ ID NO: 1534 - DNA, 38 bp, Artificial Sequence
  Synthetic
gccgagaagaccttctcctgcccgtcagcacccccaca

SEQ ID NO: 1535 - DNA, 40 bp, Artificial Sequence
  Synthetic
gccatcaagtgcacgtgcaacggggaaagaggccgttggc

SEQ ID NO: 1536 - DNA, 38 bp, Artificial Sequence
  Synthetic
gccgggacaagctcagcctccccagtaggtgcctggct

SEQ ID NO: 1537 - DNA, 39 bp, Artificial Sequence
  Synthetic
aggaggccgggcgctataggaccccctctatgtcttcgc

SEQ ID NO: 1538 - DNA, 40 bp, Artificial Sequence
  Synthetic
gggacgtggtctactgggagcgaaggcccgtctgtagagg

SEQ ID NO: 1539 - DNA, 38 bp, Artificial Sequence
  Synthetic
cgctgtgtgggcgagctgatgtcccctctgccgtggaa

SEQ ID NO: 1540 - DNA, 38 bp, Artificial Sequence
  Synthetic
agctagagaaggagccccatgggccgcatccacgtcct

SEQ ID NO: 1541 - DNA, 41 bp, Artificial Sequence
  Synthetic
tgtggctgcgttacaccgatatgcaaagatctgcgtggaca

SEQ ID NO: 1542 - DNA, 38 bp, Artificial Sequence
  Synthetic
ccctggccacctaccctcttagacctgtggcccgcgta

SEQ ID NO: 1543 - DNA, 40 bp, Artificial Sequence
  Synthetic
tcaaggcctccctgaggaaggacgatgtcggctgtcctgc

SEQ ID NO: 1544 - DNA, 37 bp, Artificial Sequence
  Synthetic
cctcccctacggttaccccaccgggaggccgtgcttt

SEQ ID NO: 1545 - DNA, 43 bp, Artificial Sequence
  Synthetic
cgagtcagccatggaagaagaaagagcggtctgtataaaaacg

SEQ ID NO: 1546 - DNA, 50 bp, Artificial Sequence
  Synthetic
aggtagtactaaagcatgcaaatctagacaaatatgattggaaatagacc

SEQ ID NO: 1547 - DNA, 48 bp, Artificial Sequence
  Synthetic
cgtttgtactggagaaccaactaacgttagtgcaagattccaataacg

SEQ ID NO: 1548 - DNA, 48 bp, Artificial Sequence
  Synthetic
tgaaagaagaaaatggcaactggtgactgtactgaattccaaatgatt

SEQ ID NO: 1549 - DNA, 49 bp, Artificial Sequence
  Synthetic
ggtctatttgtgtggcgagttttcagtttatgaaataactaatgccacc

SEQ ID NO: 1550 - DNA, 43 bp, Artificial Sequence
  Synthetic
accatatctttgggcatctgatgtattttgaggatgcaaacgg

SEQ ID NO: 1551 - DNA, 40 bp, Artificial Sequence
  Synthetic
cgaaaacggtcgtgtaggtcttaacaattgcaccgactcg

SEQ ID NO: 1552 - DNA, 49 bp, Artificial Sequence
  Synthetic
aggttggggttcttcaatttcaaattggagaagaaattcctttagatcc

SEQ ID NO: 1553 - DNA, 44 bp, Artificial Sequence
  Synthetic
tgcctccatgaaagtaatatccagtatcttccacctcaaaagcc

SEQ ID NO: 1554 - DNA, 48 bp, Artificial Sequence
  Synthetic
gcatttccaaatccaaattcacacagagattgtcctcctattgaatta

SEQ ID NO: 1555 - DNA, 44 bp, Artificial Sequence
  Synthetic
tgcaggacattttgtagctaatgatgggaacttgcctttgtacc

SEQ ID NO: 1556 - DNA, 50 bp, Artificial Sequence
  Synthetic
ggtatgttggcttggctttatactccacgtatattttatttttcaaccgc

SEQ ID NO: 1557 - DNA, 45 bp, Artificial Sequence
  Synthetic
cgcatggtagcctatacatattgtgctactggtcctgttatgtgc

SEQ ID NO: 1558 - DNA, 43 bp, Artificial Sequence
  Synthetic
gtcgatgaaatctcctggataacatctgcttccagtgagatca

SEQ ID NO: 1559 - DNA, 43 bp, Artificial Sequence
  Synthetic
acttctttccctttcttgttcacatatttgctatggctgacgg

SEQ ID NO: 1560 - DNA, 43 bp, Artificial Sequence
  Synthetic
agcataccttggtgctattagatttttgctaaaacccggagac

SEQ ID NO: 1561 - DNA, 42 bp, Artificial Sequence
  Synthetic
aaccggcaatggctccaaatgttacaggactaaggaacattc

SEQ ID NO: 1562 - DNA, 50 bp, Artificial Sequence
  Synthetic
cccattgattccaatttcactccattgattatcccaaatattcagaagag

SEQ ID NO: 1563 - DNA, 39 bp, Artificial Sequence
  Synthetic
acgtgccaagacttaccgttacaaggttcgttggcagac

SEQ ID NO: 1564 - DNA, 44 bp, Artificial Sequence
  Synthetic
acaccaaatcctcctctgtcctgagctacttaattttgatcaca

SEQ ID NO: 1565 - DNA, 50 bp, Artificial Sequence
  Synthetic
cctttccagctgtttctgaccttattaagttattagacttagtggagaag

SEQ ID NO: 1566 - DNA, 45 bp, Artificial Sequence
  Synthetic
accagttgtatatcacccagcaaacgtgcttgctacaaatttagg

SEQ ID NO: 1567 - DNA, 41 bp, Artificial Sequence
  Synthetic
ccctgtacagcatctccatcatatttgacgaagggacagac

SEQ ID NO: 1568 - DNA, 43 bp, Artificial Sequence
  Synthetic
ctgttgttggtggattggccaaatgaagctgaagatctttctg

SEQ ID NO: 1569 - DNA, 47 bp, Artificial Sequence
  Synthetic
tggtggcatataatgtagccaaattgaatgatgacttaattgaaagc

SEQ ID NO: 1570 - DNA, 45 bp, Artificial Sequence
  Synthetic
agtcaaattgtgtagcatttgcagtcctgaatggatacttacaca

SEQ ID NO: 1571 - DNA, 46 bp, Artificial Sequence
  Synthetic
ggtcagtaagttcaaattgtggtttcagcagagttaaatcctttgc

SEQ ID NO: 1572 - DNA, 44 bp, Artificial Sequence
  Synthetic
ccccaatcgcataactccatttagactttaagacaagagcaaat

SEQ ID NO: 1573 - DNA, 38 bp, Artificial Sequence
  Synthetic
accccgacctggaaagggtgtcttcgccaccaactgga

SEQ ID NO: 1574 - DNA, 37 bp, Artificial Sequence
  Synthetic
ggtgggggtagtggagtctgcaaaggggaggggagcg

SEQ ID NO: 1575 - DNA, 39 bp, Artificial Sequence
  Synthetic
gcacttaagcacattggcgtccacgattactggctgagg

SEQ ID NO: 1576 - DNA, 48 bp, Artificial Sequence
  Synthetic
cgaaccatgttagttagtatgggttatgatctgtaagctttactaacg

SEQ ID NO: 1577 - DNA, 40 bp, Artificial Sequence
  Synthetic
cctggcccttcccctaatggaataagtacaggccgtggca

SEQ ID NO: 1578 - DNA, 47 bp, Artificial Sequence
  Synthetic
accttctgttacaactggagtatctagaatcaattgctgagatacac

SEQ ID NO: 1579 - DNA, 49 bp, Artificial Sequence
  Synthetic
ggcgttgtacatctaaaaattgccttgaggtcacacaaatatttgaaag

SEQ ID NO: 1580 - DNA, 42 bp, Artificial Sequence
  Synthetic
actttcaactgggccttgtactgaaatgcaattattggggga

SEQ ID NO: 1581 - DNA, 44 bp, Artificial Sequence
  Synthetic
gcaaacggtcactaattgcatgatacagtggcgagagttcaaag

SEQ ID NO: 1582 - DNA, 40 bp, Artificial Sequence
  Synthetic
acctgatgttccaacccctaaagtttgggcctgtagaggt

SEQ ID NO: 1583 - DNA, 47 bp, Artificial Sequence
  Synthetic
tgctggcaaaaagaaattatgatccttatgttagaggaggttcagtt

SEQ ID NO: 1584 - DNA, 43 bp, Artificial Sequence
  Synthetic
aggggccgttttttatcgaaattagatcactgaaagccagaga

SEQ ID NO: 1585 - DNA, 40 bp, Artificial Sequence
  Synthetic
atgcacagctagcgccatatctttcttctagcatggacca

SEQ ID NO: 1586 - DNA, 42 bp, Artificial Sequence
  Synthetic
tgttgggatcttctggcctattctcaagggcgttatattgga

SEQ ID NO: 1587 - DNA, 43 bp, Artificial Sequence
  Synthetic
gcttaatgccactgtatcgtttcaagcaagaagcttgtggatg

SEQ ID NO: 1588 - DNA, 42 bp, Artificial Sequence
  Synthetic
acacgttaacagtactcgattcctggcaggagaaatcccatc

SEQ ID NO: 1589 - DNA, 42 bp, Artificial Sequence
  Synthetic
cgttttgatttagcctcagtcttcatgggggttaaagggaga

SEQ ID NO: 1590 - DNA, 42 bp, Artificial Sequence
  Synthetic
gtgaaatggcgaactgtttgttcgcatggtatcaacagtggg

SEQ ID NO: 1591 - DNA, 43 bp, Artificial Sequence
  Synthetic
agaacggttaggattcgtttttcttgtgtagctgcttctggtg

SEQ ID NO: 1592 - DNA, 44 bp, Artificial Sequence
  Synthetic
actcggagacaagtgatataatggacagttagtctggacggatg

SEQ ID NO: 1593 - DNA, 49 bp, Artificial Sequence
  Synthetic
ccatctttacatgagaaggcattccctaccttcctttagtaaagaatgt

SEQ ID NO: 1594 - DNA, 42 bp, Artificial Sequence
  Synthetic
aaccatgatccaccatgttcaatattgggttgattggtttgg

SEQ ID NO: 1595 - DNA, 45 bp, Artificial Sequence
  Synthetic
cgcaccttgacaaatcctttagaaattctcaaaagggattgacgg

SEQ ID NO: 1596 - DNA, 44 bp, Artificial Sequence
  Synthetic
agcatcaactgatgagccagaatctgaagctaacagaacattgc

SEQ ID NO: 1597 - DNA, 41 bp, Artificial Sequence
  Synthetic
agacaaagagtatgcagcggtcatcgcaatcgtaagtatcc

SEQ ID NO: 1598 - DNA, 43 bp, Artificial Sequence
  Synthetic
tgttccatagtcccttgtcgatatcctctttgtgaacagtgtc

SEQ ID NO: 1599 - DNA, 44 bp, Artificial Sequence
  Synthetic
atcaccctctacaaaaagctcctatacagggtgttatgttttgc

SEQ ID NO: 1600 - DNA, 45 bp, Artificial Sequence
  Synthetic
cacagtatcgcaagttgaaggttaactttttggatatctgccttc

SEQ ID NO: 1601 - DNA, 45 bp, Artificial Sequence
  Synthetic
tttgcaggcctgtagtccctgaagaagataaaactaagaatcagg

SEQ ID NO: 1602 - DNA, 42 bp, Artificial Sequence
  Synthetic
cccccgaaaagctctatccatgggctcttttgttgagtttga

SEQ ID NO: 1603 - DNA, 45 bp, Artificial Sequence
  Synthetic
gccaaccattgcttatccgaaatcaatgttctgttatctccagat

SEQ ID NO: 1604 - DNA, 41 bp, Artificial Sequence
  Synthetic
cctttgctacctcttccatggaatgcggttttaaagatggc

SEQ ID NO: 1605 - DNA, 47 bp, Artificial Sequence
  Synthetic
ttttgctatccaatttcctgagtcttctgattgagggacttctatca

SEQ ID NO: 1606 - DNA, 46 bp, Artificial Sequence
  Synthetic
aaagcgttctagttgtgtgtgataagtttctcggaaatcacaaact

SEQ ID NO: 1607 - DNA, 43 bp, Artificial Sequence
  Synthetic
gttcgcatattggaagacggagctgaataggaattcctcgacc

SEQ ID NO: 1608 - DNA, 41 bp, Artificial Sequence
  Synthetic
aggtttaacaaaagccaaggaggcttcgccaagctttgagt

SEQ ID NO: 1609 - DNA, 46 bp, Artificial Sequence
  Synthetic
cggagtagagaaatcagcagactgcttcgcattcttattaccaatg

SEQ ID NO: 1610 - DNA, 42 bp, Artificial Sequence
  Synthetic
catgcaccaatagttacggtgttttacagtttgtggagggtt

SEQ ID NO: 1611 - DNA, 47 bp, Artificial Sequence
  Synthetic
gcttgtgtgtcttttgtctttttcataaacaatatgctcaatacggg

SEQ ID NO: 1612 - DNA, 42 bp, Artificial Sequence
  Synthetic
gtttcacctcctaagaagaaccgctttcggaacaacaactgc

SEQ ID NO: 1613 - DNA, 45 bp, Artificial Sequence
  Synthetic
catcctgttcagctttacgaaggaaagcctgtacagaatacaaga

SEQ ID NO: 1614 - DNA, 48 bp, Artificial Sequence
  Synthetic
ccttcggttatcggagtagttacaagtttaacagtagatcaactttcc

SEQ ID NO: 1615 - DNA, 44 bp, Artificial Sequence
  Synthetic
ggaagcagataatttagaggaagctcttgccctttatgtggtct

SEQ ID NO: 1616 - DNA, 49 bp, Artificial Sequence
  Synthetic
cctaagatagcgatcaaaggttgatcctacttaacctattttacagatg

SEQ ID NO: 1617 - DNA, 42 bp, Artificial Sequence
  Synthetic
gcaggtttagatgttgtgggttttggctatggcttttatggg

SEQ ID NO: 1618 - DNA, 44 bp, Artificial Sequence
  Synthetic
aatgttctaaaggggatgtggatttaagcactcctcctatcaca

SEQ ID NO: 1619 - DNA, 42 bp, Artificial Sequence
  Synthetic
ggagtggattcctcggttgttccaacaacattatactcccct

SEQ ID NO: 1620 - DNA, 44 bp, Artificial Sequence
  Synthetic
catgggtgatttcttctgggaattactgttgaagtacgtccctt

SEQ ID NO: 1621 - DNA, 43 bp, Artificial Sequence
  Synthetic
agaactgctgcctctaaaagatcaggctgataaatgttttcgg

SEQ ID NO: 1622 - DNA, 43 bp, Artificial Sequence
  Synthetic
ctggtaaaagaagggctgtttgatattgtcgcgaatagtcaca

SEQ ID NO: 1623 - DNA, 43 bp, Artificial Sequence
  Synthetic
ggctgcagaggctattgaagtttgattttctctactaagtcgt

SEQ ID NO: 1624 - DNA, 38 bp, Artificial Sequence
  Synthetic
agacgtcacaggtgtggtaagttatccccaggcatgac

SEQ ID NO: 1625 - DNA, 42 bp, Artificial Sequence
  Synthetic
gattgctcctcagaggtattggtagtttggcaagcaaacaac

SEQ ID NO: 1626 - DNA, 41 bp, Artificial Sequence
  Synthetic
tggtttcttgcccaagatctcacctcttacaaaccgcattt

SEQ ID NO: 1627 - DNA, 45 bp, Artificial Sequence
  Synthetic
ttcacagatcctccgtaaagaatgattgcttctctcttttccaaa

SEQ ID NO: 1628 - DNA, 42 bp, Artificial Sequence
  Synthetic
aggttatggaatcgcggttatcaggagcctgtgcagaatgtg

SEQ ID NO: 1629 - DNA, 42 bp, Artificial Sequence
  Synthetic
tggaatttctcgaggcgctctaaagtaacaggactatcccct

SEQ ID NO: 1630 - DNA, 43 bp, Artificial Sequence
  Synthetic
gaagtggatactgagacagaaagttaccggtactttgcaacac

SEQ ID NO: 1631 - DNA, 47 bp, Artificial Sequence
  Synthetic
ggtgcatattacgctgtccttcgaaacaagaagttctttttcaacac

SEQ ID NO: 1632 - DNA, 43 bp, Artificial Sequence
  Synthetic
tggtcaaagacgcaagctgtgaccttatctttgggatacagat

SEQ ID NO: 1633 - DNA, 40 bp, Artificial Sequence
  Synthetic
atgattttgttcgttggcggagagaaaacaggcaagccat

SEQ ID NO: 1634 - DNA, 45 bp, Artificial Sequence
  Synthetic
agctagcttcatggagtatgtctaccaacataaaactggagttct

SEQ ID NO: 1635 - DNA, 45 bp, Artificial Sequence
  Synthetic
gggaaaggggttttcaagaagaatatcattctctgtaacaacctc

SEQ ID NO: 1636 - DNA, 47 bp, Artificial Sequence
  Synthetic
tttcaggaatttctgtcggtggcggtcttaattccattaataagact

SEQ ID NO: 1637 - DNA, 39 bp, Artificial Sequence
  Synthetic
agaaggaagaccgcaaaggaagcagacactacatgccaa

SEQ ID NO: 1638 - DNA, 42 bp, Artificial Sequence
  Synthetic
catggtagtcgtaaaagaaagggattgttgtgtccttccgtt

SEQ ID NO: 1639 - DNA, 39 bp, Artificial Sequence
  Synthetic
tagaggcccaggaatggagacgtagcaaaaatctcccca

SEQ ID NO: 1640 - DNA, 41 bp, Artificial Sequence
  Synthetic
gctcagtatttagcagggcagtcttcccaaaagacttcaga

SEQ ID NO: 1641 - DNA, 42 bp, Artificial Sequence
  Synthetic
gttagcatggcaggagaatttcttaactgacaaaagctgccg

SEQ ID NO: 1642 - DNA, 42 bp, Artificial Sequence
  Synthetic
aggctgctaatatgtcttcacgttccgtagtggttcgggatt

SEQ ID NO: 1643 - DNA, 38 bp, Artificial Sequence
  Synthetic
tcagaaagggctgaaggcagaaacggtgcaactcgatc

SEQ ID NO: 1644 - DNA, 48 bp, Artificial Sequence
  Synthetic
agttgcacagaaataacagctcccaaaaataggattagaagaacttcc

SEQ ID NO: 1645 - DNA, 46 bp, Artificial Sequence
  Synthetic
tgctttcgagaggatacaaaggggctggattcacaatagtaaatgc

SEQ ID NO: 1646 - DNA, 41 bp, Artificial Sequence
  Synthetic
taaggggtccccagacatggcagaacacatcacttcagaag

SEQ ID NO: 1647 - DNA, 41 bp, Artificial Sequence
  Synthetic
tggctcagtcggttcttcagtaatccagactcttcctcatc

SEQ ID NO: 1648 - DNA, 40 bp, Artificial Sequence
  Synthetic
tctacggcgagcttgtttactaaggcagaaggatcttgtt

SEQ ID NO: 1649 - DNA, 44 bp, Artificial Sequence
  Synthetic
cttgaatttcgaaagaggatgttgccttgcttgcgttattttcg

SEQ ID NO: 1650 - DNA, 43 bp, Artificial Sequence
  Synthetic
ggttgtcagtaagatcgtcggacctttaattacagctgggatg

SEQ ID NO: 1651 - DNA, 43 bp, Artificial Sequence
  Synthetic
acaggattcttgctttggcagaatttcaacattgcgatcatca

SEQ ID NO: 1652 - DNA, 46 bp, Artificial Sequence
  Synthetic
cattgatcgttttgctagggatttcttaaacacgtacagaaagcaa

SEQ ID NO: 1653 - DNA, 41 bp, Artificial Sequence
  Synthetic
cacgagtgtttgagtgctaagtctgactgcgctatgaggat

SEQ ID NO: 1654 - DNA, 43 bp, Artificial Sequence
  Synthetic
gtaggggctcaaggacgaactcaaatcaatgatttccacttca

SEQ ID NO: 1655 - DNA, 42 bp, Artificial Sequence
  Synthetic
gattgtagagtgggatcagcaagttggacaataaaatgcgcg

SEQ ID NO: 1656 - DNA, 49 bp, Artificial Sequence
  Synthetic
cctacctggttgattatggagaaattaccgaatctctaataatggatca

SEQ ID NO: 1657 - DNA, 38 bp, Artificial Sequence
  Synthetic
aaagctcctttttcgtgcccgtgctgctatccccgata

SEQ ID NO: 1658 - DNA, 40 bp, Artificial Sequence
  Synthetic
tcccattctcttcacgaggtttatccaccatccctgcttc

SEQ ID NO: 1659 - DNA, 43 bp, Artificial Sequence
  Synthetic
tgttcaatgttcctttggagcagaaattcactgctttagcctg

SEQ ID NO: 1660 - DNA, 38 bp, Artificial Sequence
  Synthetic
cgtgcgtgctagaacttcttaaaacgacgaggacccta

SEQ ID NO: 1661 - DNA, 46 bp, Artificial Sequence
  Synthetic
gcatttgtacgttgatatcgagcatgtgctgcttgagaattcttac

SEQ ID NO: 1662 - DNA, 43 bp, Artificial Sequence
  Synthetic
gcatgcagggttgctatcaacgaaaactcgaatccaaactttc

SEQ ID NO: 1663 - DNA, 42 bp, Artificial Sequence
  Synthetic
tggtataagaacggtcgtgtgcgacgctgtagcataatcaat

SEQ ID NO: 1664 - DNA, 41 bp, Artificial Sequence
  Synthetic
gatggcgctattgcaaatgcaagaacgcaaagattttcacg

SEQ ID NO: 1665 - DNA, 44 bp, Artificial Sequence
  Synthetic
agaagaaaactccaatcaaaacgtggtgtgcccaatcatttcag

SEQ ID NO: 1666 - DNA, 42 bp, Artificial Sequence
  Synthetic
ggcagctcctcaattccgagatatgctgatcaaattttggct

SEQ ID NO: 1667 - DNA, 45 bp, Artificial Sequence
  Synthetic
gggaagcagaccagagaagaagaatccccttagaagttacttaaa

SEQ ID NO: 1668 - DNA, 42 bp, Artificial Sequence
  Synthetic
tccccagggaatttctttgcaaggattaaccagcaaatacac

SEQ ID NO: 1669 - DNA, 42 bp, Artificial Sequence
  Synthetic
gggaggtaaatcaagactccgatttcctgctttcatcatggg

SEQ ID NO: 1670 - DNA, 43 bp, Artificial Sequence
  Synthetic
atcgtagagtcttgtatcacctgaaaaattgggatagcgctct

SEQ ID NO: 1671 - DNA, 42 bp, Artificial Sequence
  Synthetic
ttacgctaaaaacgggcctattttgattaaccaaaagagcgc

SEQ ID NO: 1672 - DNA, 41 bp, Artificial Sequence
  Synthetic
tcatcaagctatcggcgatgtatagctttcgatgctcaacc

SEQ ID NO: 1673 - DNA, 41 bp, Artificial Sequence
  Synthetic
gcaagagcagcttctttgtctatcgcagaagaaaaattccc

SEQ ID NO: 1674 - DNA, 39 bp, Artificial Sequence
  Synthetic
ctccaggagttgcggatacaacctatgaagaagctcgtc

SEQ ID NO: 1675 - DNA, 45 bp, Artificial Sequence
  Synthetic
caatcaatgcagaattcgtcacaaaagactttaggagatcgtgtg

SEQ ID NO: 1676 - DNA, 47 bp, Artificial Sequence
  Synthetic
gctatcgaagtggattgccgaattatcctttatctaacagtctctct

SEQ ID NO: 1677 - DNA, 48 bp, Artificial Sequence
  Synthetic
cttcgtcaagggttcttgtgattgtctctttactattaggaattaacg

SEQ ID NO: 1678 - DNA, 42 bp, Artificial Sequence
  Synthetic
ttgcgcatggatgactgttagtcaatgaccttcctatgtctc

SEQ ID NO: 1679 - DNA, 44 bp, Artificial Sequence
  Synthetic
cgagcagcaagaaggaattaattgtcatcgacaagattccctcc

SEQ ID NO: 1680 - DNA, 41 bp, Artificial Sequence
  Synthetic
gctgtttcatctgcggaactttaaagcagtgaaaacttgcc

SEQ ID NO: 1681 - DNA, 45 bp, Artificial Sequence
  Synthetic
gagaagtctttattcaagccaaaggctttcaatcttcgggacaac

SEQ ID NO: 1682 - DNA, 39 bp, Artificial Sequence
  Synthetic
aacagaaagcctgagccagctcgtgcaagtatgttcaac

SEQ ID NO: 1683 - DNA, 48 bp, Artificial Sequence
  Synthetic
gtcctccgctgatgatattagaagacgtttagaaattctagaagatgc

SEQ ID NO: 1684 - DNA, 42 bp, Artificial Sequence
  Synthetic
cagcaaatggtgaatgctgcctaaaaattcgtctaactgctg

SEQ ID NO: 1685 - DNA, 41 bp, Artificial Sequence
  Synthetic
tgcgagtgttatatgagcacgaacttctacaatagcgtgca

SEQ ID NO: 1686 - DNA, 43 bp, Artificial Sequence
  Synthetic
tgtccatttatttggtcttggagtctcttgaacgcaacgagaa

SEQ ID NO: 1687 - DNA, 41 bp, Artificial Sequence
  Synthetic
cgcttcatcgataggcatagccaacaggaaaatggagaggt

SEQ ID NO: 1688 - DNA, 43 bp, Artificial Sequence
  Synthetic
tccaagaattagacaaaagatcgcaccatttgttcgcgagtca

SEQ ID NO: 1689 - DNA, 43 bp, Artificial Sequence
  Synthetic
caaccaccttgatgaaaaacaaagtttgtctcggacgttttgc

SEQ ID NO: 1690 - DNA, 46 bp, Artificial Sequence
  Synthetic
cgatgtagtattttgctcttgccttacatttctcgcatatgaacag

SEQ ID NO: 1691 - DNA, 44 bp, Artificial Sequence
  Synthetic
agctaatcactcacagcaccatctgtgcgatcaaaaatacgttt

SEQ ID NO: 1692 - DNA, 41 bp, Artificial Sequence
  Synthetic
taccgtcgtatgtcggctgaccattttcaccatttcacaga

SEQ ID NO: 1693 - DNA, 45 bp, Artificial Sequence
  Synthetic
ctttccgactgcagttgatcatttatcacagatacatcaagagct

SEQ ID NO: 1694 - DNA, 43 bp, Artificial Sequence
  Synthetic
gttgttcttttgggtacaacaatctccaaagcgacgaagaact

SEQ ID NO: 1695 - DNA, 39 bp, Artificial Sequence
  Synthetic
caaaggagttgccggacctccaagagatgcaaccagaag

SEQ ID NO: 1696 - DNA, 46 bp, Artificial Sequence
  Synthetic
cgttgaaaccgattttgttgctaactcggacaataaactcgtaacg

SEQ ID NO: 1697 - DNA, 39 bp, Artificial Sequence
  Synthetic
acctgcggaagaagctgttgagcttcatcttgagcttct

SEQ ID NO: 1698 - DNA, 46 bp, Artificial Sequence
  Synthetic
ggatcctaaatagcgcttcactaaagtcattttctgttcatttcgg

SEQ ID NO: 1699 - DNA, 42 bp, Artificial Sequence
  Synthetic
tcacctaacctaggattatgcgttcgctatcgtcaacagcat

SEQ ID NO: 1700 - DNA, 39 bp, Artificial Sequence
  Synthetic
gccctttcccaactccttgagtttagtgcaccgttacga

SEQ ID NO: 1701 - DNA, 43 bp, Artificial Sequence
  Synthetic
ttaggcccagaggtcgattgtcgtctattaatccttctaacga

SEQ ID NO: 1702 - DNA, 45 bp, Artificial Sequence
  Synthetic
gtcaccggagcatcattatttactttacgctcttttgaacatgtc

SEQ ID NO: 1703 - DNA, 42 bp, Artificial Sequence
  Synthetic
gtgggagcgttcgagacatgattagttgctatgtctacctct

SEQ ID NO: 1704 - DNA, 41 bp, Artificial Sequence
  Synthetic
ggacaattccgcataatttcggaagctctgtttggttcctt

SEQ ID NO: 1705 - DNA, 41 bp, Artificial Sequence
  Synthetic
caatgcaccccttctttctgatccaagaggttccttctcaa

SEQ ID NO: 1706 - DNA, 43 bp, Artificial Sequence
  Synthetic
ccaccttcaatcacagcacttaaggaattcgatacttggattc

SEQ ID NO: 1707 - DNA, 45 bp, Artificial Sequence
  Synthetic
cgggatgattgaagtacagtccatgacttttttcaagctaacatc

SEQ ID NO: 1708 - DNA, 47 bp, Artificial Sequence
  Synthetic
ccagtcctcttgtctttcgacttcttagatagtcgcttattagtgaa

SEQ ID NO: 1709 - DNA, 42 bp, Artificial Sequence
  Synthetic
ctgttttattcttgcgtattggctgttgacaatggcttgagc

SEQ ID NO: 1710 - DNA, 44 bp, Artificial Sequence
  Synthetic
cggctttgcgcataaaaaacattttcaggttgagtatatggaag

SEQ ID NO: 1711 - DNA, 49 bp, Artificial Sequence
  Synthetic
gcgattttaaccacaagcttcaaatagaaactattgatcaaagtatccg

SEQ ID NO: 1712 - DNA, 45 bp, Artificial Sequence
  Synthetic
caaagttctggcattacagatcctagagttagtggtcatacaagg

SEQ ID NO: 1713 - DNA, 45 bp, Artificial Sequence
  Synthetic
gccctgaagtcagattttcttgccaaaaaaattatcaggacgctt

SEQ ID NO: 1714 - DNA, 40 bp, Artificial Sequence
  Synthetic
atgcagggttcgggaaaacaccatcacacacagcttttac

SEQ ID NO: 1715 - DNA, 44 bp, Artificial Sequence
  Synthetic
cctccgtagacaaaaacaacggactggaatatacacttcttccg

SEQ ID NO: 1716 - DNA, 45 bp, Artificial Sequence
  Synthetic
gcactctttaaatgattgctgcctaaggaagtgatgattcgaaga

SEQ ID NO: 1717 - DNA, 38 bp, Artificial Sequence
  Synthetic
gagtttgggcaagccgatgaagaaatccccgccagaaa

SEQ ID NO: 1718 - DNA, 39 bp, Artificial Sequence
  Synthetic
ctgttcgaaacgcatggcagcccatggatcgtttagagc

SEQ ID NO: 1719 - DNA, 43 bp, Artificial Sequence
  Synthetic
tcccaaccaactgcttaaacatctagctttgatcaattccgta

SEQ ID NO: 1720 - DNA, 42 bp, Artificial Sequence
  Synthetic
agtgattgttacctctttgcaacctttggcagtcattgagga

SEQ ID NO: 1721 - DNA, 41 bp, Artificial Sequence
  Synthetic
ccataggatctggaaccggagttgctgattttgtggttctt

SEQ ID NO: 1722 - DNA, 43 bp, Artificial Sequence
  Synthetic
actctttttagactctgtgcgtgtcagcagagcaatacgttgg

SEQ ID NO: 1723 - DNA, 43 bp, Artificial Sequence
  Synthetic
gccccaatcgaaaatctctcctattattcccccttaggtctgg

SEQ ID NO: 1724 - DNA, 45 bp, Artificial Sequence
  Synthetic
tgggatgcgatcttctgtgtattagcttttcttctttcagttctg

SEQ ID NO: 1725 - DNA, 42 bp, Artificial Sequence
  Synthetic
aggagaacacataccctcttctttattcatgcttcgatccca

SEQ ID NO: 1726 - DNA, 41 bp, Artificial Sequence
  Synthetic
tgaagaaccaggatccagctaatttctcggaagggagttgt

SEQ ID NO: 1727 - DNA, 38 bp, Artificial Sequence
  Synthetic
gctcgcaatagcagttctcctttttgggcttctctgcg

SEQ ID NO: 1728 - DNA, 39 bp, Artificial Sequence
  Synthetic
agagtgcgcaataaccacccgtgaaagcacaggttcatg

SEQ ID NO: 1729 - DNA, 46 bp, Artificial Sequence
  Synthetic
gtcacgaatattttcctgagaaggaatgacaatgctctttatcgac

SEQ ID NO: 1730 - DNA, 46 bp, Artificial Sequence
  Synthetic
aagaccctgctttccctgtaaagaattattaagcaaggatttaccg

SEQ ID NO: 1731 - DNA, 43 bp, Artificial Sequence
  Synthetic
ccaaagctccgtacactttttccttgcaaccgatagattctga

SEQ ID NO: 1732 - DNA, 38 bp, Artificial Sequence
  Synthetic
atctcccgcagccatatcacccggaagtggctactacc

SEQ ID NO: 1733 - DNA, 43 bp, Artificial Sequence
  Synthetic
gtgtctcgaaaagctgcttctaaatgtttgttcctttcgatcg

SEQ ID NO: 1734 - DNA, 41 bp, Artificial Sequence
  Synthetic
cgatttccctaacgcttccttatttatgcctttgttgctgc

SEQ ID NO: 1735 - DNA, 42 bp, Artificial Sequence
  Synthetic
accacaactcttgctcgcttatcaaagagcatcatacgaaga

SEQ ID NO: 1736 - DNA, 44 bp, Artificial Sequence
  Synthetic
catccgcaaaagttactttgttttgtgtcgttcggaaaatctcc

SEQ ID NO: 1737 - DNA, 40 bp, Artificial Sequence
  Synthetic
acaagcttgctgttaaactcctccttatggctcagcttca

SEQ ID NO: 1738 - DNA, 43 bp, Artificial Sequence
  Synthetic
gcgcattgaaactatgcagatcaatatttgttttcctccggga

SEQ ID NO: 1739 - DNA, 40 bp, Artificial Sequence
  Synthetic
tccagcacacatgagacaggttggagattgaaagacacga

SEQ ID NO: 1740 - DNA, 46 bp, Artificial Sequence
  Synthetic
ccagaaagtttaatctgcgctctttgtgtcagtcttttttctggat

SEQ ID NO: 1741 - DNA, 45 bp, Artificial Sequence
  Synthetic
cctactcatgcggaatgttttggtccgaataattacatctgttgc

SEQ ID NO: 1742 - DNA, 44 bp, Artificial Sequence
  Synthetic
cctaatccacaacgaggtcctggtgctttggttaaaattgctac

SEQ ID NO: 1743 - DNA, 42 bp, Artificial Sequence
  Synthetic
ttcctcattatctttggtcttgccaccacaggatacggcata

SEQ ID NO: 1744 - DNA, 45 bp, Artificial Sequence
  Synthetic
acaaaccgatcgcgaattggagcttagtctatttgtaaagtagtg

SEQ ID NO: 1745 - DNA, 39 bp, Artificial Sequence
  Synthetic
cgcaaatgattacgcccctctagtttggttggtgagtga

SEQ ID NO: 1746 - DNA, 41 bp, Artificial Sequence
  Synthetic
gccctgatagaaggagctatggtgaaatggcgttatgttcc

SEQ ID NO: 1747 - DNA, 45 bp, Artificial Sequence
  Synthetic
ttggaggtggcatcctttccgataagactatcatgattaaagctg

SEQ ID NO: 1748 - DNA, 43 bp, Artificial Sequence
  Synthetic
accggccaaactccatcaaggcccattaaagataatcattgga

SEQ ID NO: 1749 - DNA, 44 bp, Artificial Sequence
  Synthetic
ccagcagctacattgctactaaagaactctggatcagtttcctt

SEQ ID NO: 1750 - DNA, 43 bp, Artificial Sequence
  Synthetic
tgaatgcgcagatcgtatatctaaagcgagtagcttctttggt

SEQ ID NO: 1751 - DNA, 40 bp, Artificial Sequence
  Synthetic
aggttttcatatgctggttcccatttgttcggagatgcgt

SEQ ID NO: 1752 - DNA, 40 bp, Artificial Sequence
  Synthetic
acccgctgctgaattattttgtgcttccggactatcgaag

SEQ ID NO: 1753 - DNA, 46 bp, Artificial Sequence
  Synthetic
gacaaaccatgattcacctcgatacagccttgtttttattaaaccc

SEQ ID NO: 1754 - DNA, 42 bp, Artificial Sequence
  Synthetic
ccgcatctgtaagctcacagaatgcaagaagatataatcgcc

SEQ ID NO: 1755 - DNA, 39 bp, Artificial Sequence
  Synthetic
tcatcttcccgacggatgctagatggaaactgatgggga

SEQ ID NO: 1756 - DNA, 46 bp, Artificial Sequence
  Synthetic
gccagattcgccttatttcttctttaggacccatatacaagagagt

SEQ ID NO: 1757 - DNA, 42 bp, Artificial Sequence
  Synthetic
tctccagaagttccgatcattgagacaatggtgatggagttg

SEQ ID NO: 1758 - DNA, 45 bp, Artificial Sequence
  Synthetic
ggcccagtacctgcttcttagcaaatgaaaacatggatactatgg

SEQ ID NO: 1759 - DNA, 41 bp, Artificial Sequence
  Synthetic
ccttggaaccgattcttacactgctctgccctgttagtgga

SEQ ID NO: 1760 - DNA, 42 bp, Artificial Sequence
  Synthetic
tgtactttaacacagccactgcccaagtgcttgtcatgatgg

SEQ ID NO: 1761 - DNA, 50 bp, Artificial Sequence
  Synthetic
cactagaatcaggataacaggagcagaaaagggaaagatagtcaaatcag

SEQ ID NO: 1762 - DNA, 47 bp, Artificial Sequence
  Synthetic
aaaccgtttcttgaactaatgctttggagtaaaagggttttcattca

SEQ ID NO: 1763 - DNA, 43 bp, Artificial Sequence
  Synthetic
tcagaccgtgtttaaagaagcgtattgtggattcttgatcgtc

SEQ ID NO: 1764 - DNA, 47 bp, Artificial Sequence
  Synthetic
ttgtgtaggctgaagctactgtagaggctgaaaaaataaagatatgc

SEQ ID NO: 1765 - DNA, 44 bp, Artificial Sequence
  Synthetic
tccacatccttggtaaaggtagtcttctttgtctggtggatcct

SEQ ID NO: 1766 - DNA, 41 bp, Artificial Sequence
  Synthetic
aagctgttgttgcaattttttgccttggtgaatgccttgga

SEQ ID NO: 1767 - DNA, 46 bp, Artificial Sequence
  Synthetic
cctgttatctagtcctccaacaacttgtgacaactactttcaagtg

SEQ ID NO: 1768 - DNA, 41 bp, Artificial Sequence
  Synthetic
cctgacagcaactccctcatcatacattggagaagctgatg

SEQ ID NO: 1769 - DNA, 45 bp, Artificial Sequence
  Synthetic
tggttacagtggtatcagttccacaatccattccaaaaatcccag

SEQ ID NO: 1770 - DNA, 49 bp, Artificial Sequence
  Synthetic
agcttcagatcttgcattttcaattgaatgacagaatttctcatgatga

SEQ ID NO: 1771 - DNA, 48 bp, Artificial Sequence
  Synthetic
cagatcaatttttgtgtcaagagggtattttcaagttcaacgaaactg

SEQ ID NO: 1772 - DNA, 47 bp, Artificial Sequence
  Synthetic
gttgaatagcttagtgacacctcctatacaagaagctcaaaagagaa

SEQ ID NO: 1773 - DNA, 40 bp, Artificial Sequence
  Synthetic
tagcaacctccatggcctccgtagcactacggcaaaggct

SEQ ID NO: 1774 - DNA, 44 bp, Artificial Sequence
  Synthetic
ggaacactttcactgcctgtattgccatagaaaaacacgtaacc

SEQ ID NO: 1775 - DNA, 40 bp, Artificial Sequence
  Synthetic
tcaatgggctggacaaggtcggaaacaggctactatacca

SEQ ID NO: 1776 - DNA, 46 bp, Artificial Sequence
  Synthetic
ccatctacatcactacaatcagcttgcaaaaatggcagataaaggt

SEQ ID NO: 1777 - DNA, 47 bp, Artificial Sequence
  Synthetic
tgcgttgaggcgaaatagtaatagaagtattttagtcctaaagctgt

SEQ ID NO: 1778 - DNA, 38 bp, Artificial Sequence
  Synthetic
caaagctgctactacgctgcaaatgttggggatgcaca

SEQ ID NO: 1779 - DNA, 42 bp, Artificial Sequence
  Synthetic
cattgaaacggtcgctgagagggcaattagatctaagtgacc

SEQ ID NO: 1780 - DNA, 48 bp, Artificial Sequence
  Synthetic
gtgcgtcttgagcaaatctgatattatcatggtgcctattttatggat

SEQ ID NO: 1781 - DNA, 40 bp, Artificial Sequence
  Synthetic
tttggatccccctggaggcgtctaaaggaaggtacgggcg

SEQ ID NO: 1782 - DNA, 36 bp, Artificial Sequence
  Synthetic
tcccccgttcccttccgtcgggagcaggagaaggag

SEQ ID NO: 1783 - DNA, 49 bp, Artificial Sequence
  Synthetic
gaccatgtagtactgaagcaatcataatactcttaagtgttatcgctac

SEQ ID NO: 1784 - DNA, 38 bp, Artificial Sequence
  Synthetic
ggcaccaaagcaggcctaatggtgaagggacgagtgta

SEQ ID NO: 1785 - DNA, 45 bp, Artificial Sequence
  Synthetic
ccaagtctgctaacccttatatagcacaaaaacttggtaggccta

SEQ ID NO: 1786 - DNA, 50 bp, Artificial Sequence
  Synthetic
tcgtttcttccattttaagctaggagataataccccaacagtaataattc

SEQ ID NO: 1787 - DNA, 44 bp, Artificial Sequence
  Synthetic
tccctgacaccttaggcactaagttggacacccttattttgaag

SEQ ID NO: 1788 - DNA, 46 bp, Artificial Sequence
  Synthetic
agcatggtgtacatcctaaaacaaacaatactggaacaaaggatga

SEQ ID NO: 1789 - DNA, 48 bp, Artificial Sequence
  Synthetic
ccatagaaaaaacatgagttgccatttggatatagtagactccacatg

SEQ ID NO: 1790 - DNA, 49 bp, Artificial Sequence
  Synthetic
ggccgattaaataattgtgcatcagaaattgccagttctatctatttcc

SEQ ID NO: 1791 - DNA, 49 bp, Artificial Sequence
  Synthetic
caccactatgaaaaatctacgcccaaactttataaaaacatccactccc

SEQ ID NO: 1792 - DNA, 42 bp, Artificial Sequence
  Synthetic
gctagactgcacacaacactcaaaatcatgtgatggtggatt

SEQ ID NO: 1793 - DNA, 38 bp, Artificial Sequence
  Synthetic
atttccgggattgcacaggcgtgtctgtcttggtgcag

SEQ ID NO: 1794 - DNA, 44 bp, Artificial Sequence
  Synthetic
tgcaatctcataacataacgtggattcctacttggagtcaggaa

SEQ ID NO: 1795 - DNA, 45 bp, Artificial Sequence
  Synthetic
aatccaacctttaaaatcacacgagggttttgttatgcagtttgg

SEQ ID NO: 1796 - DNA, 45 bp, Artificial Sequence
  Synthetic
gccacacttgtgttgaacataatcagttttaggttgcaaggctat

SEQ ID NO: 1797 - DNA, 44 bp, Artificial Sequence
  Synthetic
ccaatcttaaaacaagaaaggccatgcacaagcatttcagagtg

SEQ ID NO: 1798 - DNA, 45 bp, Artificial Sequence
  Synthetic
ccagccttggccatataaacattaattctgaaccacctaaagttg

SEQ ID NO: 1799 - DNA, 48 bp, Artificial Sequence
  Synthetic
agtttcctcaccttctacatcatcttcctgaagatgatgactttcttg

SEQ ID NO: 1800 - DNA, 48 bp, Artificial Sequence
  Synthetic
ccaaggtatcaacaaacaactgactataaaaatttgcaggatctttgg

SEQ ID NO: 1801 - DNA, 44 bp, Artificial Sequence
  Synthetic
gccccctgtagagacataacaccgatatggttaagtctaaagga

SEQ ID NO: 1802 - DNA, 43 bp, Artificial Sequence
  Synthetic
tctgtttcgtaaacaatggaacgtcgggcactaagaaattggc

SEQ ID NO: 1803 - DNA, 48 bp, Artificial Sequence
  Synthetic
aacaggcacaaacctattagtgaaaaagccttgtttttggataaagtg

SEQ ID NO: 1804 - DNA, 44 bp, Artificial Sequence
  Synthetic
tctggagcattaagcaagaaacattgcaggttgttgttaatggt

SEQ ID NO: 1805 - DNA, 44 bp, Artificial Sequence
  Synthetic
tgtaccaaaatgcataacagcgtatgtaaatgtggtgtaaagca

SEQ ID NO: 1806 - DNA, 48 bp, Artificial Sequence
  Synthetic
acaccatctactttctcgaatgtttaatattattgtgacggaggtaag

SEQ ID NO: 1807 - DNA, 48 bp, Artificial Sequence
  Synthetic
ccatcgtcaacatcatccacttttataatagaccttcattggttgatg

SEQ ID NO: 1808 - DNA, 46 bp, Artificial Sequence
  Synthetic
ccagcaacctaaaactccaatgtaatgcccttatcagtattcagat

SEQ ID NO: 1809 - DNA, 47 bp, Artificial Sequence
  Synthetic
gcggcctcaacagtaataaaagtatactggcttttgttcaaaacatc

SEQ ID NO: 1810 - DNA, 44 bp, Artificial Sequence
  Synthetic
actgattaaaagcatccacagaccagcatgtgcagggtaatgtt

SEQ ID NO: 1811 - DNA, 48 bp, Artificial Sequence
  Synthetic
accatatcgtaacactttggtaggggctgtaatagatcaggattttgg

SEQ ID NO: 1812 - DNA, 41 bp, Artificial Sequence
  Synthetic
acgcacgatacgtacaagccatgctaaaggttttatccgtt

SEQ ID NO: 1813 - DNA, 43 bp, Artificial Sequence
  Synthetic
acaacaattacagcgagtatagcacgcctgtggattttttggc

SEQ ID NO: 1814 - DNA, 43 bp, Artificial Sequence
  Synthetic
gttggtaaagcacatcactaccatttgcatatagggaggctgc

SEQ ID NO: 1815 - DNA, 45 bp, Artificial Sequence
  Synthetic
cgcataaaaaggaacccttaatggttttagctgcttataacggca

SEQ ID NO: 1816 - DNA, 50 bp, Artificial Sequence
  Synthetic
acaaggtcagatttaacttggctaagtgttctgtagaagattttaatgtg

SEQ ID NO: 1817 - DNA, 46 bp, Artificial Sequence
  Synthetic
acagtgtaaaaagcacaggagttatttgtgttataagtttggccat

SEQ ID NO: 1818 - DNA, 47 bp, Artificial Sequence
  Synthetic
ccatgtgtaagtaccaaaaagggaaaagggttctaacttagaggaag

SEQ ID NO: 1819 - DNA, 43 bp, Artificial Sequence
  Synthetic
acctccaatacccaacagctccctcctaagaatagttttgaag

SEQ ID NO: 1820 - DNA, 44 bp, Artificial Sequence
  Synthetic
tcaacgaagctagccatattaacaacgatgattacgcaaaggac

SEQ ID NO: 1821 - DNA, 44 bp, Artificial Sequence
  Synthetic
acccgcataggtaacatagacattatggcagcaaatactctgaa

SEQ ID NO: 1822 - DNA, 48 bp, Artificial Sequence
  Synthetic
cagcttgcaatctaactgtagaagattttgtaaaaggttgtaacacac

SEQ ID NO: 1823 - DNA, 45 bp, Artificial Sequence
  Synthetic
cgtaatttgcacaacccatcaacatctgtttgtatatattgccgc

SEQ ID NO: 1824 - DNA, 48 bp, Artificial Sequence
  Synthetic
gctgaaaacggcaacaattaactttaagggcatttgatatttacaatg

SEQ ID NO: 1825 - DNA, 43 bp, Artificial Sequence
  Synthetic
agtgttaaaacgcctactaagcctaccctagttagcgctactg

SEQ ID NO: 1826 - DNA, 47 bp, Artificial Sequence
  Synthetic
cagcagcatataaaagcaagtctttattgtgatgaatatggatgtgg

SEQ ID NO: 1827 - DNA, 50 bp, Artificial Sequence
  Synthetic
aatggatagccagcactcttatcatagtattttgagatttatgatggtgg

SEQ ID NO: 1828 - DNA, 48 bp, Artificial Sequence
  Synthetic
ccaccataaaatttagtggtgcctaaaatgtttgaaaagtatagcagc

SEQ ID NO: 1829 - DNA, 45 bp, Artificial Sequence
  Synthetic
gcttctgaagagcacgtatactaaggccaatgtatgtgccttaat

SEQ ID NO: 1830 - DNA, 43 bp, Artificial Sequence
  Synthetic
caagcattgtgtgttgtgaacagttgggttgaacatgacataa

SEQ ID NO: 1831 - DNA, 45 bp, Artificial Sequence
  Synthetic
aaggactcatcagtgaacttttgtatcttggatagctacagtgtt

SEQ ID NO: 1832 - DNA, 50 bp, Artificial Sequence
  Synthetic
cgctctgtacattcattagctagtataatcgtatagctagttgtaaatgg

SEQ ID NO: 1833 - DNA, 47 bp, Artificial Sequence
  Synthetic
acgtctcaagcacactataaacactagctaatttaagtgctcctacg

SEQ ID NO: 1834 - DNA, 43 bp, Artificial Sequence
  Synthetic
acacatacttacgagtggtgtcatttattgttccggccaaggt

SEQ ID NO: 1835 - DNA, 49 bp, Artificial Sequence
  Synthetic
gcttagctgcaaagttctgactatttaataagtttttgaaggctaaccc

SEQ ID NO: 1836 - DNA, 46 bp, Artificial Sequence
  Synthetic
ccgctataactcttgctacaatcttccttagataaagtgccacagg

SEQ ID NO: 1837 - DNA, 43 bp, Artificial Sequence
  Synthetic
cacaacaaaatcaattcctgtggaagcgtgatagcattgggac

SEQ ID NO: 1838 - DNA, 40 bp, Artificial Sequence
  Synthetic
tcacgccctacttttgcaaagtagttacatgggcagccaa

SEQ ID NO: 1839 - DNA, 47 bp, Artificial Sequence
  Synthetic
tggttgggcatcatagaacttaaaactttgtgttatgatattggcaa

SEQ ID NO: 1840 - DNA, 43 bp, Artificial Sequence
  Synthetic
atccatatacacacaaggcgtatctggcagcctttgagcattt

SEQ ID NO: 1841 - DNA, 47 bp, Artificial Sequence
  Synthetic
tcgatcttagccacaactttatcattcaagactggtcattatacagg

SEQ ID NO: 1842 - DNA, 45 bp, Artificial Sequence
  Synthetic
tcgtggaaatgtaaacgccattaaattgaatgtcctttttgatgg

SEQ ID NO: 1843 - DNA, 48 bp, Artificial Sequence
  Synthetic
ccaccaataatcttctggttgaagttattcagaagtatggtttggagg

SEQ ID NO: 1844 - DNA, 43 bp, Artificial Sequence
  Synthetic
ggcttccagtcagatgcagcgtaacgatgagaaagttatgact

SEQ ID NO: 1845 - DNA, 50 bp, Artificial Sequence
  Synthetic
tctgcattccaagaaaactctgttaacatacatttgtcatatgattcgag

SEQ ID NO: 1846 - DNA, 43 bp, Artificial Sequence
  Synthetic
tgtgtggcgctgtttgtattaggtttacaatttcaaattctcg

SEQ ID NO: 1847 - DNA, 41 bp, Artificial Sequence
  Synthetic
tgatgaggggttgatggtgatttgatgcagcactgtccatt

SEQ ID NO: 1848 - DNA, 44 bp, Artificial Sequence
  Synthetic
aaggcgtaaaattaacaccctcataggagttttcactttaccga

SEQ ID NO: 1849 - DNA, 46 bp, Artificial Sequence
  Synthetic
acagattgctttcgtaggaacagttccctctggtaattatttagcc

SEQ ID NO: 1850 - DNA, 48 bp, Artificial Sequence
  Synthetic
tgattgtacgtggttgtactaccagtgagttccctgctataactatag

SEQ ID NO: 1851 - DNA, 49 bp, Artificial Sequence
  Synthetic
gcttactattacaagtcagaggcatgtttaatgtttatttaggcatggc

SEQ ID NO: 1852 - DNA, 45 bp, Artificial Sequence
  Synthetic
tcccaatttaatggagagggcaccgtaaacctaatcttcccaatt

SEQ ID NO: 1853 - DNA, 46 bp, Artificial Sequence
  Synthetic
tcgaggcttaaaaacagaatcttctctgctaatgtttctgttagca

SEQ ID NO: 1854 - DNA, 39 bp, Artificial Sequence
  Synthetic
caagacccgaacagtgctcaacttataagtgcccccaaa

SEQ ID NO: 1855 - DNA, 43 bp, Artificial Sequence
  Synthetic
agagttagcgtgaaaggccgcaaacagaacttttatgattcgt

SEQ ID NO: 1856 - DNA, 48 bp, Artificial Sequence
  Synthetic
gacaaatgcagcacaatcaatagtaccttcagagtttactataggtaa

SEQ ID NO: 1857 - DNA, 47 bp, Artificial Sequence
  Synthetic
actttgcacacaaatgaggtccgttgaggcttataataattgtacag

SEQ ID NO: 1858 - DNA, 50 bp, Artificial Sequence
  Synthetic
gcggtaagacgaccattaataagtccaagaaattctatctagacttgatg

SEQ ID NO: 1859 - DNA, 43 bp, Artificial Sequence
  Synthetic
ccactcttaggagctatacctctattatgtcacagcgagggtt

SEQ ID NO: 1860 - DNA, 46 bp, Artificial Sequence
  Synthetic
ccttgagattgatgtagctctgatttgttacattcttggacctaca

SEQ ID NO: 1861 - DNA, 47 bp, Artificial Sequence
  Synthetic
acaagcatcttctaattctgagacaagacctgagaagaaatatctcc

SEQ ID NO: 1862 - DNA, 47 bp, Artificial Sequence
  Synthetic
ggcctaacatacattgttcctttcaattagaactggaagtttttgga

SEQ ID NO: 1863 - DNA, 43 bp, Artificial Sequence
  Synthetic
gcttaccaggagtaaaagacatcctccaaaagggttctggcat

SEQ ID NO: 1864 - DNA, 40 bp, Artificial Sequence
  Synthetic
agcgacccagtagactccgtcgaacaggaccgcatgctaa

SEQ ID NO: 1865 - DNA, 39 bp, Artificial Sequence
  Synthetic
cagccatgtcaggtgttacaccgcgtagtagagccaatt

SEQ ID NO: 1866 - DNA, 41 bp, Artificial Sequence
  Synthetic
aacctaattgcgccgttatagctatctgggaatcctgacga

SEQ ID NO: 1867 - DNA, 41 bp, Artificial Sequence
  Synthetic
ggttaccaccagatgccgacatactgaagacacctcagaaa

SEQ ID NO: 1868 - DNA, 43 bp, Artificial Sequence
  Synthetic
actttctgcttgggcattagcaaactgacatgactattgagga

SEQ ID NO: 1869 - DNA, 45 bp, Artificial Sequence
  Synthetic
tccattcaagtcctccgatgagttttccaggacatactattgagg

SEQ ID NO: 1870 - DNA, 42 bp, Artificial Sequence
  Synthetic
ggtcaaggaatggggcatcaccctgctttctttggcatgtcc

SEQ ID NO: 1871 - DNA, 43 bp, Artificial Sequence
  Synthetic
gcttgggaatgagcattaaccagctacctaactgaaatgactc

SEQ ID NO: 1872 - DNA, 41 bp, Artificial Sequence
  Synthetic
tccattcaagtcctccgatgagcttccaggacatactgacg

SEQ ID NO: 1873 - DNA, 42 bp, Artificial Sequence
  Synthetic
tggaggctgcacgacactcgtagatcactcccctgtgaggaa

SEQ ID NO: 1874 - DNA, 40 bp, Artificial Sequence
  Synthetic
ccaacgatctgtccgccaccaaagaaacaccatccgtcgc

SEQ ID NO: 1875 - DNA, 39 bp, Artificial Sequence
  Synthetic
ccccatgaggtcggcgaatccggaggtcccgcaatttgg

SEQ ID NO: 1876 - DNA, 40 bp, Artificial Sequence
  Synthetic
tggggtccagcacgtagatgtacattctgcacacacccgg

SEQ ID NO: 1877 - DNA, 39 bp, Artificial Sequence
  Synthetic
ccaccaccatacccacagcgggacatcgaatggcttggg

SEQ ID NO: 1878 - DNA, 40 bp, Artificial Sequence
  Synthetic
ggtctgtcatcagaaggaccggagctgcaagcccatcact

SEQ ID NO: 1879 - DNA, 37 bp, Artificial Sequence
  Synthetic
gccgctgggacttcagcagggcgtgccaacctacacc

SEQ ID NO: 1880 - DNA, 41 bp, Artificial Sequence
  Synthetic
cgatcctcgatatcgcagcgctgaacatcgatttaccgccg

SEQ ID NO: 1881 - DNA, 40 bp, Artificial Sequence
  Synthetic
cagcgtgaccaggttctccaaccctttggctgatgctgat

SEQ ID NO: 1882 - DNA, 42 bp, Artificial Sequence
  Synthetic
gtggccactgctaggtctttgaacctatacgaccacctagcg

SEQ ID NO: 1883 - DNA, 40 bp, Artificial Sequence
  Synthetic
aggaaggtctgggtagccgtgagacaagaacgtggtgacc

SEQ ID NO: 1884 - DNA, 41 bp, Artificial Sequence
  Synthetic
gaagggcacataacgggacctcgctcagtcctaggcctctc

SEQ ID NO: 1885 - DNA, 39 bp, Artificial Sequence
  Synthetic
gtgcggatgttggggtcgatccacattaggcttcggctc

SEQ ID NO: 1886 - DNA, 40 bp, Artificial Sequence
  Synthetic
tctacctcgacccgttcggcaccttttccattgagacccg

SEQ ID NO: 1887 - DNA, 39 bp, Artificial Sequence
  Synthetic
gcgcacacagtggcttggtaagactaagcagcagggact

SEQ ID NO: 1888 - DNA, 39 bp, Artificial Sequence
  Synthetic
gtctggaacgagtgctggctttcggctgcgttgtgattg

SEQ ID NO: 1889 - DNA, 39 bp, Artificial Sequence
  Synthetic
tttggttggtcgtcaggggactttgcctggcaaccctgc

SEQ ID NO: 1890 - DNA, 38 bp, Artificial Sequence
  Synthetic
tgtcggcgcagtatggctggcccgccatactatctccg

SEQ ID NO: 1891 - DNA, 39 bp, Artificial Sequence
  Synthetic
ggaaatgaagggcagcccaggccgacttcaaggcatggc

SEQ ID NO: 1892 - DNA, 39 bp, Artificial Sequence
  Synthetic
cttggcacggacacttgagctgggtgggggacttccatt

SEQ ID NO: 1893 - DNA, 40 bp, Artificial Sequence
  Synthetic
gatgaggcctatgcgtctggcatccgccagccaactatca

SEQ ID NO: 1894 - DNA, 41 bp, Artificial Sequence
  Synthetic
gtccttttcctccgagggggatgtaccaccaactgtccatg

SEQ ID NO: 1895 - DNA, 41 bp, Artificial Sequence
  Synthetic
cgccggtccaagaatacgacataccgttagtgacagcgagg

SEQ ID NO: 1896 - DNA, 39 bp, Artificial Sequence
  Synthetic
ccctgctggacaaggagcgaatcactctgcccgatcgaa

SEQ ID NO: 1897 - DNA, 42 bp, Artificial Sequence
  Synthetic
gcctccggttcaaggttacagccactgaacaggacatcaggg

SEQ ID NO: 1898 - DNA, 40 bp, Artificial Sequence
  Synthetic
tcagccaccacgaccaaatcatcaaaggccgcaaacctcc

SEQ ID NO: 1899 - DNA, 48 bp, Artificial Sequence
  Synthetic
ccacggtggtttttgtgagtatcaaagaactaagaaatctaatgtcgc

SEQ ID NO: 1900 - DNA, 42 bp, Artificial Sequence
  Synthetic
gtcattggtccattcctattccacggatcagaccgagtgatg

SEQ ID NO: 1901 - DNA, 45 bp, Artificial Sequence
  Synthetic
ttggttatcgttagttgcgattccaagttgttttccctaacgaag

SEQ ID NO: 1902 - DNA, 43 bp, Artificial Sequence
  Synthetic
gtgggtctgctgatactgcagaatgatgatgttgatcaaagct

SEQ ID NO: 1903 - DNA, 43 bp, Artificial Sequence
  Synthetic
cctcatgcactcttatcttcaatgtacaagcggatcatcagtc

SEQ ID NO: 1904 - DNA, 47 bp, Artificial Sequence
  Synthetic
cgcatccttctgaaaatgtcttaaagatctgaatttcgtcaataggg

SEQ ID NO: 1905 - DNA, 39 bp, Artificial Sequence
  Synthetic
ttcactgacctcctcgggagattgaccggttcttgagag

SEQ ID NO: 1906 - DNA, 46 bp, Artificial Sequence
  Synthetic
cctcatttgttggaacagagttcttagtacctaaggccattagagg

SEQ ID NO: 1907 - DNA, 41 bp, Artificial Sequence
  Synthetic
tcccctcagaacagcggactcggcactttaaccgaagaccc

SEQ ID NO: 1908 - DNA, 41 bp, Artificial Sequence
  Synthetic
gccaacctctcaggacagcctatgaaagccttaacaccggc

SEQ ID NO: 1909 - DNA, 42 bp, Artificial Sequence; identical to SEQ ID NO: 94
  Synthetic

SEQ ID NO: 1910 - DNA, 36 bp, Artificial Sequence
  Synthetic
tgagctcggacctgtccctggcctgcaactggacgc

SEQ ID NO: 1911 - DNA, 42 bp, Artificial Sequence
  Synthetic
cgcaaagcagaagaacacgaggtactcaatgcagcatccctg

SEQ ID NO: 1912 - DNA, 41 bp, Artificial Sequence
  Synthetic
ggtccgaagatggccaggagttgtgttgtacacccgactct

SEQ ID NO: 1913 - DNA, 39 bp, Artificial Sequence
  Synthetic
cacgtgatgagcttggtctccactgcgagatctggccgt

SEQ ID NO: 1914 - DNA, 39 bp, Artificial Sequence
  Synthetic
gcgatggtcctcgttccggccaacgtgcatcaatggggt

SEQ ID NO: 1915 - DNA, 38 bp, Artificial Sequence
  Synthetic
acaccggggatctcatggttgtggtgtgcacccgtgga

SEQ ID NO: 1916 - DNA, 39 bp, Artificial Sequence
  Synthetic
taagcacctcctgagcacccggcagccccatcacgtact

SEQ ID NO: 1917 - DNA, 41 bp, Artificial Sequence
  Synthetic
agtaggccacggcattgatgctcaaagaagaagtgcgacga

SEQ ID NO: 1918 - DNA, 41 bp, Artificial Sequence
  Synthetic
acagaggacggacgagtcgaatctacagatttgtggcaccg

SEQ ID NO: 1919 - DNA, 38 bp, Artificial Sequence
  Synthetic
gggtgcgtcagggtgacttcggccaacacccctgctat

SEQ ID NO: 1920 - DNA, 41 bp, Artificial Sequence
  Synthetic
ggtgataacctctgcttggcggaagggatgatgctcgctga

SEQ ID NO: 1921 - DNA, 38 bp, Artificial Sequence
  Synthetic
ccctgcaagaatgtccacgaggtgggcgctggcttagc

SEQ ID NO: 1922 - DNA, 38 bp, Artificial Sequence
  Synthetic
tatggcagtgacgcgggcgggaaccatgtttcccccac

SEQ ID NO: 1923 - DNA, 42 bp, Artificial Sequence
  Synthetic
ctccacatgttcctgcaggtcctggacatgtcaaaaacggga

SEQ ID NO: 1924 - DNA, 37 bp, Artificial Sequence
  Synthetic
aggtaattgcgaccccaccggtgctgcgggaggaggt

SEQ ID NO: 1925 - DNA, 39 bp, Artificial Sequence
  Synthetic
cgaatctccgagacttccgcagtcgatccgcttgtggca

SEQ ID NO: 1926 - DNA, 37 bp, Artificial Sequence
  Synthetic
gactcaacgtcggagtcgggggcattacgggcgacaa

SEQ ID NO: 1927 - DNA, 42 bp, Artificial Sequence
  Synthetic
gctgcaagcttcctctacggatattaccaggacgtgctcaag

SEQ ID NO: 1928 - DNA, 38 bp, Artificial Sequence
  Synthetic
ggccatcttctcgcacacgccctgagaaggggggtcgt

SEQ ID NO: 1929 - DNA, 38 bp, Artificial Sequence
  Synthetic
ttgtcagtacgccgctcgcttatgttgggggccctctt

SEQ ID NO: 1930 - DNA, 38 bp, Artificial Sequence
  Synthetic
gtcttgctgtctcccacgcggcgctggaaagagggtct

SEQ ID NO: 1931 - DNA, 40 bp, Artificial Sequence
  Synthetic
tgtctccaagctcgcaagggtgaaatcaatagggtggccg

SEQ ID NO: 1932 - DNA, 44 bp, Artificial Sequence
  Synthetic
tgcacccatggacatagcttcgaatggggtacatataaaacaag

SEQ ID NO: 1933 - DNA, 49 bp, Artificial Sequence
  Synthetic
tgtagcatctgatcagctgtgtattattcatattatgtagaaggtgtgg

SEQ ID NO: 1934 - DNA, 41 bp, Artificial Sequence
  Synthetic
tggttccaccgcatctgtatggatatccctgtatgcaatgt

SEQ ID NO: 1935 - DNA, 40 bp, Artificial Sequence
  Synthetic
ccccagctttatggcgtctagcatttcagccccgtgtgtg

SEQ ID NO: 1936 - DNA, 45 bp, Artificial Sequence
  Synthetic
cattggcatggtagcacttgtatgcataaagaccctaatacaacc

SEQ ID NO: 1937 - DNA, 47 bp, Artificial Sequence
  Synthetic
gctcatacaaaagtatgatttgccaaggagtaccaaaaaaaagttgt

SEQ ID NO: 1938 - DNA, 44 bp, Artificial Sequence
  Synthetic
accttcgaaaaaagcatttccaatttgacaacacaaggagaacc

SEQ ID NO: 1939 - DNA, 45 bp, Artificial Sequence
  Synthetic
accctcgtatgagacttttcctgttatgtgcagaactatagtgac

SEQ ID NO: 1940 - DNA, 41 bp, Artificial Sequence
  Synthetic
tctttggacccttgtcgctgctaaagcgacagcgactcgag

SEQ ID NO: 1941 - DNA, 43 bp, Artificial Sequence
  Synthetic
ccaaaacaaacacagcagcagtggatttttacttgtgtcgact

SEQ ID NO: 1942 - DNA, 41 bp, Artificial Sequence
  Synthetic
ggtggtgccctctactttgggaataggacctgcaaggcctc

SEQ ID NO: 1943 - DNA, 40 bp, Artificial Sequence
  Synthetic
gttgtggcagaggatgtaacttagggtccaccatacctac

SEQ ID NO: 1944 - DNA, 43 bp, Artificial Sequence
  Synthetic
ggttccatttcaatgtcctcgatcccgggtacattactatcag

SEQ ID NO: 1945 - DNA, 40 bp, Artificial Sequence
  Synthetic
tccgtgctgagaactttagacagcgctctagtgacaactt

SEQ ID NO: 1946 - DNA, 47 bp, Artificial Sequence
  Synthetic
aggcacgtcagacttatttaattgtctattcaggatggtgatatggt

SEQ ID NO: 1947 - DNA, 45 bp, Artificial Sequence
  Synthetic
gccataatatccggggtcaatgtaggaatatgatttgcagttcat

SEQ ID NO: 1948 - DNA, 46 bp, Artificial Sequence
  Synthetic
cacaggaacagcaattacacaaatttgttatgagcatgtatgtgtg

SEQ ID NO: 1949 - DNA, 38 bp, Artificial Sequence
  Synthetic
atcgtacacctgtcccacagctgaggaggaggagcaat

SEQ ID NO: 1950 - DNA, 45 bp, Artificial Sequence
  Synthetic
atccatatcgtctatcaggttggaccactctggaggatttgtttg

SEQ ID NO: 1951 - DNA, 46 bp, Artificial Sequence
  Synthetic
gtcccagtttgtataaggaaacacatttcaaaaaacatggctacac

SEQ ID NO: 1952 - DNA, 40 bp, Artificial Sequence
  Synthetic
ggggtagaggggtatgcggttctagttctaccaggcagcc

SEQ ID NO: 1953 - DNA, 40 bp, Artificial Sequence
  Synthetic
gttcccactgcttcaggagctgacgaaccaccgagacaga

SEQ ID NO: 1954 - DNA, 43 bp, Artificial Sequence
  Synthetic
ctaacgatgaataacctgtagtcccatttgggcaacttgggta

SEQ ID NO: 1955 - DNA, 44 bp, Artificial Sequence
  Synthetic
tcctggatcagcagtgataactatgagctcttcaattgttcctt

SEQ ID NO: 1956 - DNA, 42 bp, Artificial Sequence
  Synthetic
tcatcatcaaaggcgggattttcattttgtaaggcaaccgtc

SEQ ID NO: 1957 - DNA, 46 bp, Artificial Sequence
  Synthetic
catcaggtactataggtctgtcagtacattggcctctaatattcct

SEQ ID NO: 1958 - DNA, 47 bp, Artificial Sequence
  Synthetic
cccttctacatattcatccgtactcaatcgtggaaagttatatctgc

SEQ ID NO: 1959 - DNA, 49 bp, Artificial Sequence
  Synthetic
gggatgacctgatgtactaatacctgttggtttggaaattgataggatt

SEQ ID NO: 1960 - DNA, 45 bp, Artificial Sequence
  Synthetic
acatgtcaccatcctgaatagtagtaaaggtttgcgaaaatgtcc

SEQ ID NO: 1961 - DNA, 44 bp, Artificial Sequence
  Synthetic
cctgctgagcaccataaataaagtttttacgcgaggcactttta

SEQ ID NO: 1962 - DNA, 38 bp, Artificial Sequence
  Synthetic
tggcgccaaaaacttaccgaatgctgccttttaagcca

SEQ ID NO: 1963 - DNA, 41 bp, Artificial Sequence
  Synthetic
ggtctaccgttgtctgtctcaactaaagcagctgttaaggg

SEQ ID NO: 1964 - DNA, 44 bp, Artificial Sequence
  Synthetic
ccttttcaaacccttcagtatcccttcaatagcagcagttacct

SEQ ID NO: 1965 - DNA, 48 bp, Artificial Sequence
  Synthetic
catcgttcccttcaatttttctcttaataccaagagaatctacttgga

SEQ ID NO: 1966 - DNA, 40 bp, Artificial Sequence
  Synthetic
agctctagtgggtttgatgcaatgattgtagcttgcagga

SEQ ID NO: 1967 - DNA, 42 bp, Artificial Sequence
  Synthetic
gctttttttcaatatccccctgcatatgggacggagaagagg

SEQ ID NO: 1968 - DNA, 43 bp, Artificial Sequence
  Synthetic
cattgatcaaaaaggtcattgctccgccaacttttatccccca

SEQ ID NO: 1969 - DNA, 45 bp, Artificial Sequence
  Synthetic
acgttatcattagctgtgcttgtgaagttataatgggagccaatg

SEQ ID NO: 1970 - DNA, 45 bp, Artificial Sequence
  Synthetic
ggtcagttttcataacctcttggtcggtcagtacagtggatttgc

SEQ ID NO: 1971 - DNA, 43 bp, Artificial Sequence
  Synthetic
ggttttgaaatctccaagatcagggatggggaatgcagtactg

SEQ ID NO: 1972 - DNA, 47 bp, Artificial Sequence
  Synthetic
gcatggataacagggaatcttgtttgtctatcagcttacgatctctt

SEQ ID NO: 1973 - DNA, 43 bp, Artificial Sequence
  Synthetic
agcgacaatctatcttcacatgattgttatgcccctctactgg

SEQ ID NO: 1974 - DNA, 49 bp, Artificial Sequence
  Synthetic
cacaatggacaagaaaaaccatccgataattgtgatttttatggttggg

SEQ ID NO: 1975 - DNA, 47 bp, Artificial Sequence
  Synthetic
caccaagaattattaacgccaagaattatgttcaatgtaagtgtggt

SEQ ID NO: 1976 - DNA, 45 bp, Artificial Sequence
  Synthetic
caccacacttacccatgtacatattgagtattgtcaaccacctaa

SEQ ID NO: 1977 - DNA, 46 bp, Artificial Sequence
  Synthetic
cagctttaacaagtctagcaacattacctcaattgtatggtttgtg

SEQ ID NO: 1978 - DNA, 48 bp, Artificial Sequence
  Synthetic
gcaacataagacaagctacattcaccggtccatttttttcttttgaac

SEQ ID NO: 1979 - DNA, 42 bp, Artificial Sequence
  Synthetic
acctgcacaattacagccaatttggtacattagcaaagactg

SEQ ID NO: 1980 - DNA, 48 bp, Artificial Sequence
  Synthetic
tgagcacaaatatcatgtccaactattaaaccatttgctaaagttgac

SEQ ID NO: 1981 - DNA, 48 bp, Artificial Sequence
  Synthetic
accagctttattacaaccatagacacggttttatatagttgttactgc

SEQ ID NO: 1982 - DNA, 45 bp, Artificial Sequence
  Synthetic
caacatctgaatcaatggaacaacagggtgtgcaattagaaaagg

SEQ ID NO: 1983 - DNA, 50 bp, Artificial Sequence
  Synthetic
agcattcttcataacaccatctgaactttgtgtactatgtttaaaagagg

SEQ ID NO: 1984 - DNA, 39 bp, Artificial Sequence
  Synthetic
acaagttgacagccctgcattaatgtctggtcggatgag

SEQ ID NO: 1985 - DNA, 47 bp, Artificial Sequence
  Synthetic
gcaataacattaacagtctggacgtttatggtccatatagagatgct

SEQ ID NO: 1986 - DNA, 45 bp, Artificial Sequence
  Synthetic
gttagtaagtgctaggtctgccattgtatgaacgtgataaagctg

SEQ ID NO: 1987 - DNA, 45 bp, Artificial Sequence
  Synthetic
gcaccaccataagaatcttggttaaatcatgctggtactggtatg

SEQ ID NO: 1988 - DNA, 46 bp, Artificial Sequence
  Synthetic
accattgaccatacaaatcttggtttactgtcatttttgcagacac

SEQ ID NO: 1989 - DNA, 46 bp, Artificial Sequence
  Synthetic
ggtgtgtgtcaacatctaagttcatccgtttgttgtttctattggt

SEQ ID NO: 1990 - DNA, 47 bp, Artificial Sequence
  Synthetic
gtgggcagaacattacgtttagtataagccagactttattatgaggc

SEQ ID NO: 1991 - DNA, 44 bp, Artificial Sequence
  Synthetic
cgggccaaaactaaactactaacaacctgttcttatgggttggg

SEQ ID NO: 1992 - DNA, 49 bp, Artificial Sequence
  Synthetic
gctctatcaaaagaacactgtcagttccagatccttctagaattttagg

SEQ ID NO: 1993 - DNA, 43 bp, Artificial Sequence
  Synthetic
tgccagaacataatcatcaacttctaatcttgcacgggttcac

SEQ ID NO: 1994 - DNA, 43 bp, Artificial Sequence
  Synthetic
acaccaatggaacactataaacactgtgcacctacacttgtcc

SEQ ID NO: 1995 - DNA, 41 bp, Artificial Sequence
  Synthetic
tgttccaatgttttcgcgagtagtgttagaggttgggttgg

SEQ ID NO: 1996 - DNA, 43 bp, Artificial Sequence
  Synthetic
aaacctttaggattgcctatgtcatggttattgcagcgtgtca

SEQ ID NO: 1997 - DNA, 50 bp, Artificial Sequence
  Synthetic
gcgcttcttaaaggaacgtaatcaaccttttttctattattcagatacgc

SEQ ID NO: 1998 - DNA, 50 bp, Artificial Sequence
  Synthetic
caactttatccacaatcacaccattagtaggttatcaatgattaaaggtc

SEQ ID NO: 1999 - DNA, 45 bp, Artificial Sequence
  Synthetic
cgcatattaacaggaacagctaatgacaggctgtatgatgaatgt

SEQ ID NO: 2000 - DNA, 41 bp, Artificial Sequence
  Synthetic
accaataggacaggaagcagaaaccttcttttgcttcaagt

SEQ ID NO: 2001 - DNA, 49 bp, Artificial Sequence
  Synthetic
cgaagaggaagaagaaggtgagttactgattattctgtttcttcttgtg

SEQ ID NO: 2002 - DNA, 50 bp, Artificial Sequence
  Synthetic
gcagttaaacgaccattaataagccttacaagaaattttatctcgtctcg

SEQ ID NO: 2003 - DNA, 47 bp, Artificial Sequence
  Synthetic
tgaccacgaataacagtagcagttaattgatatgaaaggcaagatgt

SEQ ID NO: 2004 - DNA, 40 bp, Artificial Sequence
  Synthetic
ggtcagcccaagaagttttctcggtcattatgctggaagt

SEQ ID NO: 2005 - DNA, 45 bp, Artificial Sequence
  Synthetic
gcttttggcgaggttttgttaaagtaaagattctaaacctcagca

SEQ ID NO: 2006 - DNA, 46 bp, Artificial Sequence
  Synthetic
agagtcaaactgttctggtaattgtcagaacactgattctgattcg

SEQ ID NO: 2007 - DNA, 44 bp, Artificial Sequence
  Synthetic
cctctccatactctttcattgctttagattttgtgcgacaatgc

SEQ ID NO: 2008 - DNA, 39 bp, Artificial Sequence
  Synthetic
cctctgttggccatttcttgtgaaagcagggctaggatt

SEQ ID NO: 2009 - DNA, 43 bp, Artificial Sequence
  Synthetic
gtttgattggtcttggtgttgtcatgtccaaagaagtgaatgc

SEQ ID NO: 2010 - DNA, 45 bp, Artificial Sequence
  Synthetic
tcatgtttttagtccttgggatctttggaagcaagtattgtcaga

SEQ ID NO: 2011 - DNA, 43 bp, Artificial Sequence
  Synthetic
ctcctcatgcttgcaatgtactgatagagctcgatgaaattgg

SEQ ID NO: 2012 - DNA, 41 bp, Artificial Sequence
  Synthetic
atgtggctcaagtctcgggtcacagatgtggtaaactttgt

SEQ ID NO: 2013 - DNA, 44 bp, Artificial Sequence
  Synthetic
ggccatgcttctgatttattctcaatcgagagcatgattgaagc

SEQ ID NO: 2014 - DNA, 41 bp, Artificial Sequence
  Synthetic
caccaaccattcttccaacagatgaaactggtggagaacgc

SEQ ID NO: 2015 - DNA, 42 bp, Artificial Sequence
  Synthetic
tctccagaagttccggtcattagggacaatggtaatggaact

SEQ ID NO: 2016 - DNA, 40 bp, Artificial Sequence
  Synthetic
tgagtgcagaccgtgccagaagcagaaatcctgggaatgc

SEQ ID NO: 2017 - DNA, 43 bp, Artificial Sequence
  Synthetic
gggatcactcttgttcctctaatgacatgccattctgcagcat

SEQ ID NO: 2018 - DNA, 43 bp, Artificial Sequence
  Synthetic
attccaaaggacgacgcgacgatacttattgctttgattgctc

SEQ ID NO: 2019 - DNA, 39 bp, Artificial Sequence
  Synthetic
tggatggggtgtccggggagtctcaaggtccgttccaga

SEQ ID NO: 2020 - DNA, 41 bp, Artificial Sequence
  Synthetic
gcctcttcttgaagtcgtctaaggggcaggaactagatcag

SEQ ID NO: 2021 - DNA, 45 bp, Artificial Sequence
  Synthetic
ctcgctttcttcttataggcatgttctttaccaaaaggcacatca

SEQ ID NO: 2022 - DNA, 43 bp, Artificial Sequence
  Synthetic
ttaccaaaaggacgcccagtctggtggttcattaggatatagg

SEQ ID NO: 2023 - DNA, 42 bp, Artificial Sequence
  Synthetic
catccaatacagcagaaacacccggtgattcaatagggggga

SEQ ID NO: 2024 - DNA, 44 bp, Artificial Sequence
  Synthetic
gtctccaatctttgtgtaggagtacggactcaggatttggtcag

SEQ ID NO: 2025 - DNA, 43 bp, Artificial Sequence
  Synthetic
ctggagcatactcagttaaccgccaatgaagattttgctgaca

SEQ ID NO: 2026 - DNA, 41 bp, Artificial Sequence
  Synthetic
gctggtgcacatcctacaataaacagaacagcggatggatt

SEQ ID NO: 2027 - DNA, 45 bp, Artificial Sequence
  Synthetic
tgtcatccgtaaataatctggccatgcaggaagacagatctagtg

SEQ ID NO: 2028 - DNA, 46 bp, Artificial Sequence
  Synthetic
aaaagctaattgccattgatcaagtatgtaaggtaaagcttgaacc

SEQ ID NO: 2029 - DNA, 48 bp, Artificial Sequence
  Synthetic
ccatttagcaggcctatctgatacaaacggttttcttcagatttaagc

SEQ ID NO: 2030 - DNA, 49 bp, Artificial Sequence
  Synthetic
caccaactgttactgaagaactgatgtcataatacactataaaaggctg

SEQ ID NO: 2031 - DNA, 47 bp, Artificial Sequence
  Synthetic
gaaacaaacttccaaatgtgtgcataaaggcaatgaaagaatatggg

SEQ ID NO: 2032 - DNA, 48 bp, Artificial Sequence
  Synthetic
accggttctctttgtaatcatacaatggtgaacagtatatgtaacaca

SEQ ID NO: 2033 - DNA, 46 bp, Artificial Sequence
  Synthetic
tcggactgacgaaaggaatcccttttcactataagacaagaaatgg

SEQ ID NO: 2034 - DNA, 41 bp, Artificial Sequence
  Synthetic
gccatattttcaccgagtgccagatcccaaggacaaagaac

SEQ ID NO: 2035 - DNA, 48 bp, Artificial Sequence
  Synthetic
gctgtaaaatagttcctcctcatgctgatgaaataggagaagatgttg

SEQ ID NO: 2036 - DNA, 43 bp, Artificial Sequence
  Synthetic
tcccatttgtgtggctccagtgaactttgtaagtatggagttc

SEQ ID NO: 2037 - DNA, 44 bp, Artificial Sequence
  Synthetic
gccatgtttccgatttgttttcaaattgagagcatgattgaggc

SEQ ID NO: 2038 - DNA, 44 bp, Artificial Sequence
  Synthetic
acatgtctctcatactgagtagcttcgataacctcgtttcaggt

SEQ ID NO: 2039 - DNA, 42 bp, Artificial Sequence
  Synthetic
cctaggcatcagcatgtaccaggtatatcaccgatatgagca

SEQ ID NO: 2040 - DNA, 47 bp, Artificial Sequence
  Synthetic
cgctcgaattgagttatcattccatttacagaggatgtcaaaaatgc

SEQ ID NO: 2041 - DNA, 49 bp, Artificial Sequence
  Synthetic
cactcttctctttctctggaaatgtgtaatggaatcaatggataaggaa

SEQ ID NO: 2042 - DNA, 42 bp, Artificial Sequence
  Synthetic
gtccagattgctcaagtttttcacaggattcgtgcactttgt

SEQ ID NO: 2043 - DNA, 45 bp, Artificial Sequence
  Synthetic
gcccatcccaccagtatgtgttaggagtctcaatcttaaatcttg

SEQ ID NO: 2044 - DNA, 43 bp, Artificial Sequence
  Synthetic
tcatgtcagccgattcattaattcctagccaacttcagcatgg

SEQ ID NO: 2045 - DNA, 44 bp, Artificial Sequence
  Synthetic
tggtacatttgttcatcctcaagaaattcccaagagaaatcgct

SEQ ID NO: 2046 - DNA, 47 bp, Artificial Sequence
  Synthetic
attgccaaattcagccatcctatgaaatcggtgcatatatataaccc

SEQ ID NO: 2047 - DNA, 43 bp, Artificial Sequence
  Synthetic
acacaatgtcatgtacagtaggtttccgcagagaaacacaagt

SEQ ID NO: 2048 - DNA, 47 bp, Artificial Sequence
  Synthetic
cctgtgcatgtaatagcgcttgctagtaatacaaattatatgcaggc

SEQ ID NO: 2049 - DNA, 45 bp, Artificial Sequence
  Synthetic
ctcaggtgtgtctcctgttactgcactatattggtataggacagg

SEQ ID NO: 2050 - DNA, 47 bp, Artificial Sequence
  Synthetic
acactggattgccattgctatcgtagggtaacagtatttacatttcc

SEQ ID NO: 2051 - DNA, 50 bp, Artificial Sequence
  Synthetic
aatttgaaatgttggtaccacgtgggtctggaaaatgcaatatattatgc

SEQ ID NO: 2052 - DNA, 46 bp, Artificial Sequence
  Synthetic
agcaattgcagtagcggatactacaatgttctgaatctatgtacag

SEQ ID NO: 2053 - DNA, 44 bp, Artificial Sequence
  Synthetic
ccacagattcaattacaacaggtgggtggcagacctaatactgt

SEQ ID NO: 2054 - DNA, 43 bp, Artificial Sequence
  Synthetic
tcccagatgtaggggtagtaataaatgcatttaccgacccttc

SEQ ID NO: 2055 - DNA, 50 bp, Artificial Sequence
  Synthetic
ggcctatgtaaacgaacaatatccaatagacactacattaaccttttcac

SEQ ID NO: 2056 - DNA, 42 bp, Artificial Sequence
  Synthetic
tcaggtaatgtaacccgaaacactcgcaagcaagacattcct

SEQ ID NO: 2057 - DNA, 44 bp, Artificial Sequence
  Synthetic
gggtttgtttataatccactgacaccccatgttgctacttctgt

SEQ ID NO: 2058 - DNA, 41 bp, Artificial Sequence
  Synthetic
ctgtccccatatgcatctgcaggttcccttagacatttgtc

SEQ ID NO: 2059 - DNA, 44 bp, Artificial Sequence
  Synthetic
tcttgtgactaaaacatccgagctggcacatatatgggaaagac

SEQ ID NO: 2060 - DNA, 44 bp, Artificial Sequence
  Synthetic
tgcattgttgtttggtcctgatatgtggtcaagtactagttgcc

SEQ ID NO: 2061 - DNA, 40 bp, Artificial Sequence
  Synthetic
ccaattgtccctgcatgtgcactggaactgctaagcatat

SEQ ID NO: 2062 - DNA, 44 bp, Artificial Sequence
  Synthetic
gctgtgcttattgtcctccctaggagtcaagggattctcatacc

SEQ ID NO: 2063 - DNA, 40 bp, Artificial Sequence
  Synthetic
gccatatggtccacagtggtcagatctaatgtcgcagtcc

SEQ ID NO: 2064 - DNA, 43 bp, Artificial Sequence
  Synthetic
agggtaatgaactgtacttgttgttgtatcacctctggccgta

SEQ ID NO: 2065 - DNA, 45 bp, Artificial Sequence
  Synthetic
gtacgccaccatcaagggagataacaaaagagaagaaagaagagc

SEQ ID NO: 2066 - DNA, 42 bp, Artificial Sequence
  Synthetic
tgctaatgggtctgctgacacagtttgattatcgctgctaga

SEQ ID NO: 2067 - DNA, 45 bp, Artificial Sequence
  Synthetic
tcccaaccattgtgaattcttcataagaagaagaagtgctaacgg

SEQ ID NO: 2068 - DNA, 45 bp, Artificial Sequence
  Synthetic
cccacatcattgatgacgaataagtgaacgtactattgtctcccg

SEQ ID NO: 2069 - DNA, 40 bp, Artificial Sequence
  Synthetic
gcagcaaaggggagaagttttaggacactgttccagcaaa

SEQ ID NO: 2070 - DNA, 43 bp, Artificial Sequence
  Synthetic
gtcttctttgcccaaaatgagaaatgatgaaggcacatctggg

SEQ ID NO: 2071 - DNA, 43 bp, Artificial Sequence
  Synthetic
tcttggtttggattccatcagaattatttgtgaccgggagaga

SEQ ID NO: 2072 - DNA, 47 bp, Artificial Sequence
  Synthetic
agcgtgtcaactctaaataattgctttaagcaatgaatctctgtcac

SEQ ID NO: 2073 - DNA, 43 bp, Artificial Sequence
  Synthetic
gacactctttgtggagaaatgtgaaggatcgctcatttgcaga

SEQ ID NO: 2074 - DNA, 41 bp, Artificial Sequence
  Synthetic
acttcttcaggagatgggacacacaacaaggagaacgttcc

SEQ ID NO: 2075 - DNA, 43 bp, Artificial Sequence
  Synthetic
cagcttcacctaatggtctgtaactttgggaattggatctggg

SEQ ID NO: 2076 - DNA, 48 bp, Artificial Sequence
  Synthetic
ggtagcagtagagtcagtgattgtatttagattttgtagctcctgatg

SEQ ID NO: 2077 - DNA, 39 bp, Artificial Sequence
  Synthetic
gctacttctgccaagtcccgaatttgaaaatgccgccta

SEQ ID NO: 2078 - DNA, 46 bp, Artificial Sequence
  Synthetic
cgttgtagctagtatgtcgtcaactagaattgcagactatagctgg

SEQ ID NO: 2079 - DNA, 48 bp, Artificial Sequence
  Synthetic
ctttgttaaagtaaggatggcctgttatcaggtgtagaaattaaacgt

SEQ ID NO: 2080 - DNA, 47 bp, Artificial Sequence
  Synthetic
ctgctttatcttcttgtaaacggcttaatagccctattcaggatggt

SEQ ID NO: 2081 - DNA, 46 bp, Artificial Sequence
  Synthetic
ggtgttaagaatgcacccccattcattaacctgctatgtatttgtc

SEQ ID NO: 2082 - DNA, 41 bp, Artificial Sequence
  Synthetic
gtttctaatgccctcctccgtggtggtgacagattgcaagt

SEQ ID NO: 2083 - DNA, 43 bp, Artificial Sequence
  Synthetic
gcattttcatccccattagtcaatgaggtggaaaaggtagcgt

SEQ ID NO: 2084 - DNA, 50 bp, Artificial Sequence
  Synthetic
cgcggaggatctgttattatttgatatgtagagatactgtacaaaaactg

SEQ ID NO: 2085 - DNA, 47 bp, Artificial Sequence
  Synthetic
aaagcacttctcatatacacatccaccactaacagatgctaaattgg

SEQ ID NO: 2086 - DNA, 41 bp, Artificial Sequence
  Synthetic
gtttgtatgccctgccttctgccaaatacaacactgggatc

SEQ ID NO: 2087 - DNA, 50 bp, Artificial Sequence
  Synthetic
atgtctataaagtacaggccatccgatatattatcaagatgcagatgagc

SEQ ID NO: 2088 - DNA, 46 bp, Artificial Sequence
  Synthetic
gctgtgctaatacactgaaataagccattgaaatgttggaggtaca

SEQ ID NO: 2089 - DNA, 40 bp, Artificial Sequence
  Synthetic
tgggaacatagccagaggcccactttgggggtctgggtat

SEQ ID NO: 2090 - DNA, 42 bp, Artificial Sequence
  Synthetic
aggatgcccatatacagagatgtaaaagggtctctgtaggca

SEQ ID NO: 2091 - DNA, 44 bp, Artificial Sequence
  Synthetic
aggccacttcttgtacgaatagtctgaaggccacattagactaa

SEQ ID NO: 2092 - DNA, 48 bp, Artificial Sequence
  Synthetic
agccacaaagacatctgcaaaatactacattttatttacatcctggac

SEQ ID NO: 2093 - DNA, 45 bp, Artificial Sequence
  Synthetic
caaacaaggagtacagcctactacgacaaagtgtctctatggacc

SEQ ID NO: 2094 - DNA, 45 bp, Artificial Sequence
  Synthetic
gccagcgtctgacttaacatttattacattggttgataacacaca

SEQ ID NO: 2095 - DNA, 45 bp, Artificial Sequence
  Synthetic
ccagtttgagataaaaatctgcgactacagaacgtttgtcctctg

SEQ ID NO: 2096 - DNA, 45 bp, Artificial Sequence
  Synthetic
aatattacaaaacatcgctgccggtcaacaacaagattactcagc

SEQ ID NO: 2097 - DNA, 42 bp, Artificial Sequence
  Synthetic
cctcctcctcaggatcaccattttacctgtcagtcttttagc

SEQ ID NO: 2098 - DNA, 43 bp, Artificial Sequence
  Synthetic
tgcccctcatttaattcaagagaatctgtttgaggtgctccag

SEQ ID NO: 2099 - DNA, 46 bp, Artificial Sequence
  Synthetic
tgtgacagcttccaaccttgggttaactaaaacacctttgaaaagc

SEQ ID NO: 2100 - DNA, 47 bp, Artificial Sequence
  Synthetic
taacccagttttcacaacatgatctaaagaatactttggtgtagcat

SEQ ID NO: 2101 - DNA, 49 bp, Artificial Sequence
  Synthetic
atgtcccagtttgtgaatatgtttgatggaaatagagcatattttctcc

SEQ ID NO: 2102 - DNA, 40 bp, Artificial Sequence
  Synthetic
tgctcgttggatcttcggcgtctctagctctaccacgtcg

SEQ ID NO: 2103 - DNA, 43 bp, Artificial Sequence
  Synthetic
gctggtgtaatgtctaatgtagcaacagatgtggtcggtgttg

SEQ ID NO: 2104 - DNA, 39 bp, Artificial Sequence
  Synthetic
aggtgtactggtacgtggagaggccctattaatcagcct

SEQ ID NO: 2105 - DNA, 42 bp, Artificial Sequence
  Synthetic
ctgcagatgtttctgaaaaccgaggccagaccaggattttgc

SEQ ID NO: 2106 - DNA, 49 bp, Artificial Sequence
  Synthetic
tgttgcaaatatcagctgtgcattaaatacctgacaatatactagagga

SEQ ID NO: 2107 - DNA, 45 bp, Artificial Sequence
  Synthetic
cgtttgcgtcgcctaagaagatatggcagtagatgtttatgatga

SEQ ID NO: 2108 - DNA, 48 bp, Artificial Sequence
  Synthetic
gctctgtctatcattgcaaatttgtgtagtggaaatcagtttagagtt

SEQ ID NO: 2109 - DNA, 45 bp, Artificial Sequence
  Synthetic
gcatttgttttggatccattgaaacccgcatatcctttaaagcag

SEQ ID NO: 2110 - DNA, 45 bp, Artificial Sequence
  Synthetic
agtgtgccaagtgattgtttcttaggggtctacatttttgtctac

SEQ ID NO: 2111 - DNA, 38 bp, Artificial Sequence
  Synthetic
ctgcccatctccacgcgaagccgcggaaatccagcaat

SEQ ID NO: 2112 - DNA, 41 bp, Artificial Sequence; identical to SEQ ID NO: 1458
  Synthetic

SEQ ID NO: 2113 - DNA, 42 bp, Artificial Sequence
  Synthetic
ctgaactaagactgggtgtccatccactaaccatccttttgc

SEQ ID NO: 2114 - DNA, 41 bp, Artificial Sequence
  Synthetic
cgaggcaggcttacatgggagggggggactttatgtgaccc

SEQ ID NO: 2115 - DNA, 35 bp, Artificial Sequence
  Synthetic
cgggctggtccagggacttgtcgctgactccgcca

SEQ ID NO: 2116 - DNA, 35 bp, Artificial Sequence
  Synthetic
cgcagggcaagacgagggatccaaggactcgggcc

SEQ ID NO: 2117 - DNA, 39 bp, Artificial Sequence
  Synthetic
cacgctggagggacattgtccgccacttcctgggtcatg

SEQ ID NO: 2118 - DNA, 43 bp, Artificial Sequence
  Synthetic
cccagctcattttggaaaataaacacaatccaacacgaggcaa

SEQ ID NO: 2119 - DNA, 35 bp, Artificial Sequence
  Synthetic
tgcgccgcctaatgcatcctatgcgccgaggcctt

SEQ ID NO: 2120 - DNA, 38 bp, Artificial Sequence
  Synthetic
tccttcttccacggcgccgcgagttacgctccttggag

SEQ ID NO: 2121 - DNA, 37 bp, Artificial Sequence
  Synthetic
tcgagctcgctggcgtgagaagctgtgtgacggtccc

SEQ ID NO: 2122 - DNA, 39 bp, Artificial Sequence
  Synthetic
acttgtaggcccggggaccccgatcgtaagccgcaatgt

SEQ ID NO: 2123 - DNA, 41 bp, Artificial Sequence
  Synthetic
cccacaccatcagcagcgtcttcctgagaggaggcttgtgt

SEQ ID NO: 2124 - DNA, 36 bp, Artificial Sequence
  Synthetic
cccccatcactctcccaggcctcgtttcggccccga

SEQ ID NO: 2125 - DNA, 39 bp, Artificial Sequence
  Synthetic
actcggcctggtctcggctgagtccgacaggaggtctcc

SEQ ID NO: 2126 - DNA, 38 bp, Artificial Sequence
  Synthetic
ccctgcgacccccttaaccctgtagttgagcggctcct

SEQ ID NO: 2127 - DNA, 36 bp, Artificial Sequence
  Synthetic
agcactcggcggggctttcttcgtcgcgtgacctgg

SEQ ID NO: 2128 - DNA, 40 bp, Artificial Sequence
  Synthetic
aattaggaaggcgctgggggcgggtgttccagtcatcggg

SEQ ID NO: 2129 - DNA, 39 bp, Artificial Sequence
  Synthetic
cgtccctggccacgaaggatttcagccagcatcttagca

SEQ ID NO: 2130 - DNA, 36 bp, Artificial Sequence
  Synthetic
gcaaccaggcccactgcaagacgcagttgctgacgc

SEQ ID NO: 2131 - DNA, 35 bp, Artificial Sequence
  Synthetic
agacccaccacctcgtgccgggcgtttgtcccacg

SEQ ID NO: 2132 - DNA, 38 bp, Artificial Sequence
  Synthetic
cggaagaggaggaggaggcggcggggggaggatgaaac

SEQ ID NO: 2133 - DNA, 38 bp, Artificial Sequence
  Synthetic
ggggtggtgaggatgcagctcctttatgcgctttgccg

SEQ ID NO: 2134 - DNA, 42 bp, Artificial Sequence
  Synthetic
cgttgcaggcctccttcaaaagttctctatcgtcaactgcgc

SEQ ID NO: 2135 - DNA, 37 bp, Artificial Sequence
  Synthetic
tcatccccctgcgtgtcggccaacatctgcctcccgc

SEQ ID NO: 2136 - DNA, 36 bp, Artificial Sequence
  Synthetic
tgtcaaccggccccgcaacgagtcccgctgagcaga

SEQ ID NO: 2137 - DNA, 35 bp, Artificial Sequence
  Synthetic
tgcggcagaggctaagcgcccgttgaggcccacgt

SEQ ID NO: 2138 - DNA, 38 bp, Artificial Sequence
  Synthetic
ctctccagtgcggtgttgctcaaggccagagacaccct

SEQ ID NO: 2139 - DNA, 35 bp, Artificial Sequence
  Synthetic
tctcgtcccacctggcggaacgtgtctgggaggcg

SEQ ID NO: 2140 - DNA, 38 bp, Artificial Sequence
  Synthetic
tcacgtccctggccgagctaaaagcctcggtctgctcc

SEQ ID NO: 2141 - DNA, 39 bp, Artificial Sequence
  Synthetic
accgcgttaacatctcggccagaactgggcctcgtggga

SEQ ID NO: 2142 - DNA, 39 bp, Artificial Sequence
  Synthetic
ggcttccgcctgttttgtttgtacgagagaacccgccac

SEQ ID NO: 2143 - DNA, 39 bp, Artificial Sequence
  Synthetic
cggagttgatgaaaggggccggatctcggccgttgtctc

SEQ ID NO: 2144 - DNA, 38 bp, Artificial Sequence
  Synthetic
aactccacgctgcgtccatcggggggtggcatatctga

SEQ ID NO: 2145 - DNA, 35 bp, Artificial Sequence
  Synthetic
agacgaggcacaggcacccctggctcgcctggagt

SEQ ID NO: 2146 - DNA, 38 bp, Artificial Sequence
  Synthetic
accggtgacaccaagtccatctgtcatgtcgggggcct

SEQ ID NO: 2147 - DNA, 41 bp, Artificial Sequence
  Synthetic
tgttcaggttttgctcaaggaaattggtttcagcaatcgga

SEQ ID NO: 2148 - DNA, 40 bp, Artificial Sequence
  Synthetic
cgccaaccaacacctccctctacaggcagcgtcttcagga

SEQ ID NO: 2149 - DNA, 38 bp, Artificial Sequence
  Synthetic
ggagtccggacagtttcatgctcgggcttcaggggcat

SEQ ID NO: 2150 - DNA, 41 bp, Artificial Sequence
  Synthetic
ggcagacatccgcgattacctttgtcgctgcagtactacga

SEQ ID NO: 2151 - DNA, 37 bp, Artificial Sequence
  Synthetic
tggccctgatcctgagccgggaagaggacgaggacga

SEQ ID NO: 2152 - DNA, 38 bp, Artificial Sequence
  Synthetic
tcacgtcctctaccccggcgcggggtcgaggaggtagt

SEQ ID NO: 2153 - DNA, 42 bp, Artificial Sequence
  Synthetic
cgtgtgctgcctggaacacaatgaggttcagggacttgtcct

SEQ ID NO: 2154 - DNA, 36 bp, Artificial Sequence
  Synthetic
actcgggagtctctggcccccatagctgcccctggt

SEQ ID NO: 2155 - DNA, 40 bp, Artificial Sequence
  Synthetic
accgtctatagcgcctttgggtccatgactgctgacccgc

SEQ ID NO: 2156 - DNA, 39 bp, Artificial Sequence
  Synthetic
cgcgcaggcttactttttgcatcatccggcaagcaccat

SEQ ID NO: 2157 - DNA, 42 bp, Artificial Sequence
  Synthetic
cagggggatctttacgtgggtgttcgtgccaaaccaaaaagg

SEQ ID NO: 2158 - DNA, 40 bp, Artificial Sequence
  Synthetic
acctgggcttatgcagacgagttcctctgaaggatgggcg

SEQ ID NO: 2159 - DNA, 39 bp, Artificial Sequence
  Synthetic
ggtggtctgccaaagctgctatcaacaggtgggggttgt

SEQ ID NO: 2160 - DNA, 40 bp, Artificial Sequence
  Synthetic
ctgcgaagagcgtcactgtgtgtagcagaatagggcccct

SEQ ID NO: 2161 - DNA, 36 bp, Artificial Sequence
  Synthetic
tgttcaacgcggtcaaggcctgcccatacctgcggg

SEQ ID NO: 2162 - DNA, 36 bp, Artificial Sequence
  Synthetic
tggttggggctgcttcccagtggccaggtggacgca

SEQ ID NO: 2163 - DNA, 37 bp, Artificial Sequence
  Synthetic
aactgcgagggggcctggtagaccctcgtgagacccg

SEQ ID NO: 2164 - DNA, 39 bp, Artificial Sequence
  Synthetic
acaggcaactacatggggccgtgtcggatctcggtccag

SEQ ID NO: 2165 - DNA, 36 bp, Artificial Sequence
  Synthetic
caacccggcagagctccaggtagcctgagccgcact

SEQ ID NO: 2166 - DNA, 42 bp, Artificial Sequence
  Synthetic
agcgtcccctgttaggtccttgcctaacagggtcatcgtcct

SEQ ID NO: 2167 - DNA, 39 bp, Artificial Sequence
  Synthetic
ggtcctaactggtcaggggcaagccggtcaacacgacat

SEQ ID NO: 2168 - DNA, 36 bp, Artificial Sequence
  Synthetic
agcagctggccccgaatcccaccagcccgttcacca

SEQ ID NO: 2169 - DNA, 37 bp, Artificial Sequence
  Synthetic
cctacacgaccgccaaggggcagaacgttgtcggtga

SEQ ID NO: 2170 - DNA, 38 bp, Artificial Sequence
  Synthetic
gttgagaccgtcctggcaggaagcggggtcttttggac

SEQ ID NO: 2171 - DNA, 39 bp, Artificial Sequence
  Synthetic
ttccccaggcagtcccagccgggacagattgtcttccac

SEQ ID NO: 2172 - DNA, 40 bp, Artificial Sequence
  Synthetic
cccggactcgttttacggactccccccttttccgcatcag

SEQ ID NO: 2173 - DNA, 40 bp, Artificial Sequence
  Synthetic
caacgggactgtcatggaaattattgccaaaacaacgtgt

SEQ ID NO: 2174 - DNA, 36 bp, Artificial Sequence
  Synthetic
gcggctgaacgtgactacccggcggtggacagcagt

SEQ ID NO: 2175 - DNA, 38 bp, Artificial Sequence
  Synthetic
atcctgccagcgggagaggcaaaagaccctccccacct

SEQ ID NO: 2176 - DNA, 36 bp, Artificial Sequence
  Synthetic
tggaggggggccaaagaggtaccacccccacccaca

SEQ ID NO: 2177 - DNA, 40 bp, Artificial Sequence
  Synthetic
caccagtttctttccgcggtggcgggaggacaccaaccct

SEQ ID NO: 2178 - DNA, 40 bp, Artificial Sequence
  Synthetic
ggcacaggagcgattaagtcctttctggagtgcctttcgc

SEQ ID NO: 2179 - DNA, 41 bp, Artificial Sequence
  Synthetic
tggccaacatgacttccgtcaaaggaaggcgctgtaggatt

SEQ ID NO: 2180 - DNA, 40 bp, Artificial Sequence
  Synthetic
cagatccacgaccgcatccagttttctcgcccccttcact

SEQ ID NO: 2181 - DNA, 36 bp, Artificial Sequence
  Synthetic
aggcgaccccatgatgcggggtgatgcggaccttgg

SEQ ID NO: 2182 - DNA, 37 bp, Artificial Sequence
  Synthetic
ggggtgacgaggatggaaaggccttgccgtgccctct

SEQ ID NO: 2183 - DNA, 39 bp, Artificial Sequence
  Synthetic
tggctcgctgctgtgacgcctggccatatcagggaagtc

SEQ ID NO: 2184 - DNA, 40 bp, Artificial Sequence
  Synthetic
cgagggtgccgcctttgagacagggtctgggtaaacaggt

SEQ ID NO: 2185 - DNA, 35 bp, Artificial Sequence
  Synthetic
tggcggtgccggtgaatccccagcctgccggactt

SEQ ID NO: 2186 - DNA, 35 bp, Artificial Sequence
  Synthetic
tggaggcctcgcacgagacgtcggcaaacaggggc

SEQ ID NO: 2187 - DNA, 40 bp, Artificial Sequence
  Synthetic
acaggaggtagcggtggggccacctccttgtcgtagagcg

SEQ ID NO: 2188 - DNA, 39 bp, Artificial Sequence
  Synthetic
cgctcctttgtggcatcaccgcctgtgcagagccttgac

SEQ ID NO: 2189 - DNA, 35 bp, Artificial Sequence
  Synthetic
tggtttgcgaggctgggccacgtcacggggaactg

SEQ ID NO: 2190 - DNA, 37 bp, Artificial Sequence
  Synthetic
gctcatcatcagcgtcctgcgctgagccgcgaccagt

SEQ ID NO: 2191 - DNA, 42 bp, Artificial Sequence
  Synthetic
gctacctcatgttcagggccatgcaaaggcaggtctttctca

SEQ ID NO: 2192 - DNA, 36 bp, Artificial Sequence
  Synthetic
cccttggtcacgcttggctgggctgaccccggcaaa

SEQ ID NO: 2193 - DNA, 43 bp, Artificial Sequence
  Synthetic
tgccaatatctaagttgccttagttgttttccgtttgctgcat

SEQ ID NO: 2194 - DNA, 42 bp, Artificial Sequence
  Synthetic
gctggcaaattgctcgtgacaaaaagacattgtcctgcagct

SEQ ID NO: 2195 - DNA, 47 bp, Artificial Sequence
  Synthetic
ttgccgtaccaattccatatatgattgttaaactccagtaatcgaag

SEQ ID NO: 2196 - DNA, 47 bp, Artificial Sequence
  Synthetic
tggtggttctattagcatgtttgttgtgtgctaaaaacagagatacc

SEQ ID NO: 2197 - DNA, 47 bp, Artificial Sequence
  Synthetic
gcatctttcacatatttggcttgactggctgatgtagatagtaatgc

SEQ ID NO: 2198 - DNA, 44 bp, Artificial Sequence
  Synthetic
aaccgtaataggctcatgcaaatgtttagtattttatgggcctg

SEQ ID NO: 2199 - DNA, 46 bp, Artificial Sequence
  Synthetic
gcacgtgttgccagtgtttaaagaactgtatgaaaaagatagtgac

SEQ ID NO: 2200 - DNA, 39 bp, Artificial Sequence
  Synthetic
attgcttaggcactgcgtcctatagcaacgaacgatgga

SEQ ID NO: 2201 - DNA, 42 bp, Artificial Sequence
  Synthetic
ggtgtcctgggtgctagacacagtacatgtgggttcaagggt

SEQ ID NO: 2202 - DNA, 41 bp, Artificial Sequence
  Synthetic
ggcctctatgcccttaggaataatgatagtgtggaacagcg

SEQ ID NO: 2203 - DNA, 44 bp, Artificial Sequence
  Synthetic
gctggttgtgtggtagtcacgtttctagcactatatatacaggc

SEQ ID NO: 2204 - DNA, 38 bp, Artificial Sequence
  Synthetic
tagtggcatgggaggtggaaggagcagatgttccagtg

SEQ ID NO: 2205 - DNA, 46 bp, Artificial Sequence
  Synthetic
acttgcctggcgaataggaaaatgctggtagttctagattacttac

SEQ ID NO: 2206 - DNA, 43 bp, Artificial Sequence
  Synthetic
gcattttcagtgtcattaagcttgtcggacagcctttaggaat

SEQ ID NO: 2207 - DNA, 39 bp, Artificial Sequence
  Synthetic
ccaagggaacgtcagacctatcacaggttttggggcaat

SEQ ID NO: 2208 - DNA, 43 bp, Artificial Sequence
  Synthetic
aaggcttgttaaacaactgtgacttctttatgcatccacacct

SEQ ID NO: 2209 - DNA, 43 bp, Artificial Sequence
  Synthetic
aagactagcagtaggaggtggtacatggatgctacattactgg

SEQ ID NO: 2210 - DNA, 40 bp, Artificial Sequence
  Synthetic
caccggacagggggggttattgcgtgtcatgtatgtgtgt

SEQ ID NO: 2211 - DNA, 43 bp, Artificial Sequence
  Synthetic
tgcacggtgagtaacacatgtattatgcctggcagttatttgg

SEQ ID NO: 2212 - DNA, 50 bp, Artificial Sequence
  Synthetic
ccaaactttgattcaccttttcctggtttctggtattgttagaaagatgg

SEQ ID NO: 2213 - DNA, 45 bp, Artificial Sequence
  Synthetic
cgacaaactctcttctgctaaaagagcctactgctgaaaatttgg

SEQ ID NO: 2214 - DNA, 43 bp, Artificial Sequence
  Synthetic
gctttattgcaatcctctgctaactacgatgcttcacagggaa

SEQ ID NO: 2215 - DNA, 50 bp, Artificial Sequence
  Synthetic
ggtaaccgtttctctactttttcctactgtaggattatatgctttaatgc

SEQ ID NO: 2216 - DNA, 50 bp, Artificial Sequence
  Synthetic
gtcatttggcgcatttcatatctttcaaagcaataatcaagctaaacatg

SEQ ID NO: 2217 - DNA, 43 bp, Artificial Sequence
  Synthetic
tgaaacagtttttgggttgggtattcgtatgcagcagaaacct

SEQ ID NO: 2218 - DNA, 40 bp, Artificial Sequence
  Synthetic
cttcgtcctccagctcgaagaccgccacaccttccacatc

SEQ ID NO: 2219 - DNA, 43 bp, Artificial Sequence
  Synthetic
gacgaaatccagtggcacccatttggcagtgttatttatttgg

SEQ ID NO: 2220 - DNA, 46 bp, Artificial Sequence
  Synthetic
gctatgtcttcttggccatgtagaaatgtatttgaggacttgtcca

SEQ ID NO: 2221 - DNA, 44 bp, Artificial Sequence
  Synthetic
tggtaatgcaccttttgtgtcaaagtttggtacgttttagcaga

SEQ ID NO: 2222 - DNA, 47 bp, Artificial Sequence
  Synthetic
tctacgtttcaataaagcaggatgtctaactctataccgtacacacc

SEQ ID NO: 2223 - DNA, 43 bp, Artificial Sequence
  Synthetic
acctgcttaggatccatactaagagccgatacagaaaatccca

SEQ ID NO: 2224 - DNA, 43 bp, Artificial Sequence
  Synthetic
cgctctgttaaatctacgttccaaaacgagatgtcctccagaa

SEQ ID NO: 2225 - DNA, 42 bp, Artificial Sequence
  Synthetic
aacacgcaggttatgttcaggatcttcctattgtgcaaagtc

SEQ ID NO: 2226 - DNA, 41 bp, Artificial Sequence
  Synthetic
cctcgccaaagcccagctattctgtgcagtgaggaaaagga

SEQ ID NO: 2227 - DNA, 41 bp, Artificial Sequence
  Synthetic
tctccaccaccagccttactgtcctacagaaccagcacagc

SEQ ID NO: 2228 - DNA, 42 bp, Artificial Sequence
  Synthetic
tccatccccgggatgcctactatagtgatgaggacgaggagg

SEQ ID NO: 2229 - DNA, 42 bp, Artificial Sequence
  Synthetic
gtcgcgtcaatatccacttgcgacgtagactgtttgagctgc

SEQ ID NO: 2230 - DNA, 41 bp, Artificial Sequence
  Synthetic
tgacaccctctgcaactgtgaaaagtaataggaccacgtgt

SEQ ID NO: 2231 - DNA, 45 bp, Artificial Sequence
  Synthetic
ccaattatttcactagcattgcccaccaaaataagacatccagcg

SEQ ID NO: 2232 - DNA, 42 bp, Artificial Sequence
  Synthetic
tgctctgcccgtttgtaatggccaagcaaaatatgtaaagga

SEQ ID NO: 2233 - DNA, 44 bp, Artificial Sequence
  Synthetic
gtggagttggcataggaaatcaatacttttgtatgagcctgttg

SEQ ID NO: 2234 - DNA, 44 bp, Artificial Sequence
  Synthetic
acaggaaatgcattaggaaaggtaatagaggaagacaggtggaa

SEQ ID NO: 2235 - DNA, 43 bp, Artificial Sequence
  Synthetic
tcatcatcaccgctttgtacatatacgttaagtttgatggcga

SEQ ID NO: 2236 - DNA, 36 bp, Artificial Sequence
  Synthetic
ccgagtcgctgacgcttatgcaacccgacgccacca

SEQ ID NO: 2237 - DNA, 43 bp, Artificial Sequence
  Synthetic
gccaggtggaggttactttgttaaggtatagattgcacaaaca

SEQ ID NO: 2238 - DNA, 46 bp, Artificial Sequence
  Synthetic
ggaaggatagacagccaaaagaagaagtgtggagacctttatttgc

SEQ ID NO: 2239 - DNA, 40 bp, Artificial Sequence
  Synthetic
cccccccatctctatcacgtacttgtgttgtagtgtgcaa

SEQ ID NO: 2240 - DNA, 39 bp, Artificial Sequence
  Synthetic
gggatgtatccagtgcgcccattctttgggggtttgggc

SEQ ID NO: 2241 - DNA, 45 bp, Artificial Sequence
  Synthetic
caggattgtcataggtaacaagtgtccaacaagtacatgtacagg

SEQ ID NO: 2242 - DNA, 44 bp, Artificial Sequence
  Synthetic
cactatagggttttttcctgattgcttcccgactgttaactgtt

SEQ ID NO: 2243 - DNA, 43 bp, Artificial Sequence
  Synthetic
ccatagtaagattgtcccgggtgtgacactgaaaacaccaatt

SEQ ID NO: 2244 - DNA, 44 bp, Artificial Sequence
  Synthetic
caccatatggctcagctgccgatgtgcctttagatattgtaacc

SEQ ID NO: 2245 - DNA, 41 bp, Artificial Sequence
  Synthetic
gcagataccattgttagggccatcccagttgtttaacaagc

SEQ ID NO: 2246 - DNA, 40 bp, Artificial Sequence
  Synthetic
aaggaacccgtgtacagacacccaaacgttcctaagcatg

SEQ ID NO: 2247 - DNA, 40 bp, Artificial Sequence
  Synthetic
ccgaaatcggtccgggggtagtggtgtcctgtatgtgacc

SEQ ID NO: 2248 - DNA, 40 bp, Artificial Sequence
  Synthetic
cgccatggctagacgctttctgccatgaatcactcccctg

SEQ ID NO: 2249 - DNA, 41 bp, Artificial Sequence
  Synthetic
cggcaacaagtatactccgccaaagaaacaccaaccgtcgc

SEQ ID NO: 2250 - DNA, 37 bp, Artificial Sequence
  Synthetic
gtaccccatgaggtcggcaaagtcgcgcaacgtgggt

SEQ ID NO: 2251 - DNA, 39 bp, Artificial Sequence
  Synthetic
ccggtatccagcactgagatgcgctgctgtcctccacgt

SEQ ID NO: 2252 - DNA, 42 bp, Artificial Sequence
  Synthetic
cccaatgagccccgctaatgatcacggctaccatgatcttgg

SEQ ID NO: 2253 - DNA, 40 bp, Artificial Sequence
  Synthetic
tcgggacatcctgacgagttgaccttgcacaccggcttta

SEQ ID NO: 2254 - DNA, 39 bp, Artificial Sequence
  Synthetic
gctctagtacggcagggtggtgtcatggttcggctgcac

SEQ ID NO: 2255 - DNA, 40 bp, Artificial Sequence
  Synthetic
cgtggtggagtgcaacaaaggattcactcgtggggatcgt

SEQ ID NO: 2256 - DNA, 40 bp, Artificial Sequence
  Synthetic
cccttgatgtaccaagcagccacagctagctgcaatggct

SEQ ID NO: 2257 - DNA, 39 bp, Artificial Sequence
  Synthetic
gtaagcaggcccaagcaccgccgtcgccatattctaccc

SEQ ID NO: 2258 - DNA, 40 bp, Artificial Sequence
  Synthetic
gaggacctcccgaccaagtcgagacagctgcttgtgggga

SEQ ID NO: 2259 - DNA, 38 bp, Artificial Sequence
  Synthetic
cgtgagccggccagagtctttctcgggggttttgtgga

SEQ ID NO: 2260 - DNA, 42 bp, Artificial Sequence
  Synthetic
caggtggtgtgctgttgtcacttttcatccccgttgagacac

SEQ ID NO: 2261 - DNA, 42 bp, Artificial Sequence
  Synthetic
ccacggcatggcattcatcacaatatggcaaattcctcgccg

SEQ ID NO: 2262 - DNA, 40 bp, Artificial Sequence
  Synthetic
cgaccactacgtctccctgagttcggggtatgggcttgaa

SEQ ID NO: 2263 - DNA, 42 bp, Artificial Sequence
  Synthetic
ggtctccgatggtgtgagctcagtgtagtgctctgtgagtgc

SEQ ID NO: 2264 - DNA, 38 bp, Artificial Sequence
  Synthetic
cacgggatgtgtgagggtgaccacactcgtgggcccca

SEQ ID NO: 2265 - DNA, 40 bp, Artificial Sequence
  Synthetic
gcctgcacagtgggttgtatgtgccgagatgctgaagtcc

SEQ ID NO: 2266 - DNA, 41 bp, Artificial Sequence
  Synthetic
cgacgagagcccccgaaatgcaggtaaggtgctagtggaca

SEQ ID NO: 2267 - DNA, 40 bp, Artificial Sequence
  Synthetic
cactggccctccgtgtaacaatcatgagaatcacggggcc

SEQ ID NO: 2268 - DNA, 39 bp, Artificial Sequence
  Synthetic
gcagtctccgccgtgatatgagcagcttccttgcgaccc

SEQ ID NO: 2269 - DNA, 41 bp, Artificial Sequence
  Synthetic
ccggtaaagctggtgggaacccgaccttgagccttcgatac

SEQ ID NO: 2270 - DNA, 39 bp, Artificial Sequence
  Synthetic
tccaagctccccctcgaggcctgatgagttggccctttc

SEQ ID NO: 2271 - DNA, 42 bp, Artificial Sequence
  Synthetic
ggaggccgctagcttaatgtcctgataggatgcaagtgctcg

SEQ ID NO: 2272 - DNA, 40 bp, Artificial Sequence
  Synthetic
ccatcaccgcctgaggaagttttttaccctgacctcggcg

SEQ ID NO: 2273 - DNA, 42 bp, Artificial Sequence
  Synthetic
ccctgcagctttacaagccgctggtgctcaccactagcatgg

SEQ ID NO: 2274 - DNA, 42 bp, Artificial Sequence
  Synthetic
gtggtagggtctctggtcaggttcctcaaatgtgtctgtggc

SEQ ID NO: 2275 - DNA, 42 bp, Artificial Sequence
  Synthetic
ccccaagttttctgagggctgactctgcacacatacactccc

SEQ ID NO: 2276 - DNA, 38 bp, Artificial Sequence
  Synthetic
caggctgcataggcaaggcggttgagggcagccagttg

SEQ ID NO: 2277 - DNA, 39 bp, Artificial Sequence
  Synthetic
gcacgggcaactaccaccaagcggtaatgaggccgaagt

SEQ ID NO: 2278 - DNA, 40 bp, Artificial Sequence
  Synthetic
acgtcaaaggctgccaccagtcttcgtcaacggtcaagtc

SEQ ID NO: 2279 - DNA, 41 bp, Artificial Sequence
  Synthetic
gctccgaccgaacaacaaccaagaggatgcggttttgttcg

SEQ ID NO: 2280 - DNA, 40 bp, Artificial Sequence
  Synthetic
aacagtaccgacaagcccggcgaaaagaaaatcgccctcc

SEQ ID NO: 2281 - DNA, 40 bp, Artificial Sequence
  Synthetic
ccttggctttgcagcttggctggacggcttggattttcag

SEQ ID NO: 2282 - DNA, 40 bp, Artificial Sequence
  Synthetic
gaccgcgccccagtatttcgatgtcgcccaagttttcaga

SEQ ID NO: 2283 - DNA, 38 bp, Artificial Sequence
  Synthetic
cgcgcagtttgccgttgacttgacgaagccgccctggt

SEQ ID NO: 2284 - DNA, 38 bp, Artificial Sequence
  Synthetic
ggcgttaaaaagccgagcggggcttcgatgcccttgtt

SEQ ID NO: 2285 - DNA, 37 bp, Artificial Sequence
  Synthetic
cccgaatggcagatacaggcacggctgccgtcttggt

SEQ ID NO: 2286 - DNA, 37 bp, Artificial Sequence
  Synthetic
attggcacgccgatccgcccgaacaggcggtatttgc

SEQ ID NO: 2287 - DNA, 39 bp, Artificial Sequence
  Synthetic
tcgggctgcccatgaccctttgttgcgatgtgatgacgc

SEQ ID NO: 2288 - DNA, 40 bp, Artificial Sequence
  Synthetic
cgcgcggcagttgatacaggcgggttctgccttttcaaac

SEQ ID NO: 2289 - DNA, 38 bp, Artificial Sequence
  Synthetic
gccgccaaaggcaaaggacgaggcggacaccttgttgc

SEQ ID NO: 2290 - DNA, 42 bp, Artificial Sequence
  Synthetic
gcccatttgtaaccggttctgcacaatttcagccacaactgc

SEQ ID NO: 2291 - DNA, 35 bp, Artificial Sequence
  Synthetic
aacggcggcctgattaccgcacaccagcgcaccga

SEQ ID NO: 2292 - DNA, 39 bp, Artificial Sequence
  Synthetic
agttgccgcacctgccctcgcaagataaaccacgtcgcc

SEQ ID NO: 2293 - DNA, 38 bp, Artificial Sequence
  Synthetic
gaatcggggcgaactcgggttccaatgcctgcgtttca

SEQ ID NO: 2294 - DNA, 37 bp, Artificial Sequence
  Synthetic
cgccagttgaccgaatcgggaactcttgccgcgttcc

SEQ ID NO: 2295 - DNA, 38 bp, Artificial Sequence
  Synthetic
cgcaaagactaccgcagcaacgtcagcggtgcaggcga

SEQ ID NO: 2296 - DNA, 36 bp, Artificial Sequence
  Synthetic
acttcctcgaccgcctcgcgtaacgcgcaaaccccg

SEQ ID NO: 2297 - DNA, 42 bp, Artificial Sequence
  Synthetic
gcatcctgctcgacaacatcctaggttttgtggacataggcg

SEQ ID NO: 2298 - DNA, 38 bp, Artificial Sequence
  Synthetic
cgaggctttgggcttgggtccttttgggcggcaggacg

SEQ ID NO: 2299 - DNA, 41 bp, Artificial Sequence
  Synthetic
gtccgcaacaaaatcgccctggttcatgttcgtgccttccg

SEQ ID NO: 2300 - DNA, 38 bp, Artificial Sequence
  Synthetic
agacattgccctccccgagggttttccagtgcgaacgc

SEQ ID NO: 2301 - DNA, 34 bp, Artificial Sequence
  Synthetic
acggcggcgaagagaaaggtttcttgggcgcggc

SEQ ID NO: 2302 - DNA, 35 bp, Artificial Sequence
  Synthetic
ttggcgttggctcaggcgggcatcggacggcaaag

SEQ ID NO: 2303 - DNA, 38 bp, Artificial Sequence
  Synthetic
ggcaatttgttcggcaatggcgcgaagctgcgttgggc

SEQ ID NO: 2304 - DNA, 35 bp, Artificial Sequence
  Synthetic
tcgaagatgcctgcgccgcataccgggttcgccga

SEQ ID NO: 2305 - DNA, 36 bp, Artificial Sequence
  Synthetic
ccgacaccatccgcctgatggcacgcctgccgctat

SEQ ID NO: 2306 - DNA, 34 bp, Artificial Sequence
  Synthetic
cgtgtgcatcggtcctgccttcggcggcggcaat

SEQ ID NO: 2307 - DNA, 38 bp, Artificial Sequence
  Synthetic
tgccgctcgccaaagtcggcgccttgttctttcaggga

SEQ ID NO: 2308 - DNA, 38 bp, Artificial Sequence
  Synthetic
ttggaaatcgtccgcaccgagggtttgaccgccgtaat

SEQ ID NO: 2309 - DNA, 38 bp, Artificial Sequence
  Synthetic
cgcctgaccatgctgttgcgccgcacctgtcagaatcg

SEQ ID NO: 2310 - DNA, 41 bp, Artificial Sequence
  Synthetic
cgccgatgccgtacaagaaaccatggacagatggatgtgcg

SEQ ID NO: 2311 - DNA, 38 bp, Artificial Sequence
  Synthetic
agtcgcgcccgtcgacaaagaaaatcaccgccatcagc

SEQ ID NO: 2312 - DNA, 37 bp, Artificial Sequence
  Synthetic
gcgcaggtggggcaggtaatcgccttaagccttgccg

SEQ ID NO: 2313 - DNA, 39 bp, Artificial Sequence
  Synthetic
gctgttttcgggcatctggctgaacacctgccccggtat

SEQ ID NO: 2314 - DNA, 37 bp, Artificial Sequence
  Synthetic
ccgatcataccggtcgcgccattgcgccgcttccaac

SEQ ID NO: 2315 - DNA, 38 bp, Artificial Sequence
  Synthetic
ccgatttccaaaaccgcgcctgctgcaaggctacgact

SEQ ID NO: 2316 - DNA, 39 bp, Artificial Sequence
  Synthetic
acggcagggcggggttttgtcgttttcgaaccccaaccc

SEQ ID NO: 2317 - DNA, 41 bp, Artificial Sequence
  Synthetic
cctgtcgctcggtaaatcagcgaatcgaacacagctacgcc

SEQ ID NO: 2318 - DNA, 37 bp, Artificial Sequence
  Synthetic
actgcttcgcgcgcttcgaaaaagccgaagccgaact

SEQ ID NO: 2319 - DNA, 38 bp, Artificial Sequence
  Synthetic
gcgttcttccctgcgtttgctgcctgcctcaacatcgg

SEQ ID NO: 2320 - DNA, 37 bp, Artificial Sequence
  Synthetic
tcgagcgggcaggctgaaatcaggcagtcggcgcagt

SEQ ID NO: 2321 - DNA, 37 bp, Artificial Sequence
  Synthetic
accgcgccatgctcttggcgcgttggcggctttttgg

SEQ ID NO: 2322 - DNA, 41 bp, Artificial Sequence
  Synthetic
cgcctcgcccgtatccatgtacgaacttcaccaaacccacg

SEQ ID NO: 2323 - DNA, 35 bp, Artificial Sequence
  Synthetic
ccgcagcattcccacgactccttttgggcgagccg

SEQ ID NO: 2324 - DNA, 40 bp, Artificial Sequence
  Synthetic
gcgcgtgaacacggcattcctaatgttggggaacggcatt

SEQ ID NO: 2325 - DNA, 36 bp, Artificial Sequence
  Synthetic
actctccgccctgctcgacctcgcggattgcctgct

SEQ ID NO: 2326 - DNA, 37 bp, Artificial Sequence
  Synthetic
ggctgaaaaacgccgtcgaacttcagcgtcgggtgca

SEQ ID NO: 2327 - DNA, 42 bp, Artificial Sequence
  Synthetic
ccatgctgaacaccgccctttcaaacggcatcggcttcttct

SEQ ID NO: 2328 - DNA, 42 bp, Artificial Sequence
  Synthetic
tcaagacagaaagctcctgccgtgtgcatataaagcggcagg

SEQ ID NO: 2329 - DNA, 40 bp, Artificial Sequence
  Synthetic
cgctgttttacacgctgaccgacgatcggacgcgttttgc

SEQ ID NO: 2330 - DNA, 36 bp, Artificial Sequence
  Synthetic
tgctgcactttccggcgaacaaggtttgccagcgcg

SEQ ID NO: 2331 - DNA, 41 bp, Artificial Sequence
  Synthetic
gggactgacggtgtcggtattgcggcatagtattcgcggac

SEQ ID NO: 2332 - DNA, 35 bp, Artificial Sequence
  Synthetic
aagctgcgcggtgctgaccgacgttgagccgggga

SEQ ID NO: 2333 - DNA, 39 bp, Artificial Sequence
  Synthetic
cctccgcaacgacctgacctcaatctgttcgggtgtcag

SEQ ID NO: 2334 - DNA, 36 bp, Artificial Sequence
  Synthetic
cgtgcgcgcctaccagattccttgcgaggctttgcg

SEQ ID NO: 2335 - DNA, 39 bp, Artificial Sequence
  Synthetic
tatggctgcacggcgaggcccagttgttcggacaaacgc

SEQ ID NO: 2336 - DNA, 42 bp, Artificial Sequence
  Synthetic
ggcacatttttcacgcttgccatgcttttgtcttcttcgccc

SEQ ID NO: 2337 - DNA, 41 bp, Artificial Sequence
  Synthetic
cccagcagtttcgccgttttgtctacgagcttttgggcgag

SEQ ID NO: 2338 - DNA, 36 bp, Artificial Sequence
  Synthetic
tgaccgccatgtacaagccgctgcccgcctgcatga

SEQ ID NO: 2339 - DNA, 38 bp, Artificial Sequence
  Synthetic
cgccgtttatgacgcccccaaggcgcgcaccataacca

SEQ ID NO: 2340 - DNA, 38 bp, Artificial Sequence
  Synthetic
gctcgcgcgaaaacttaaaccacgttttcaggcggccc

SEQ ID NO: 2341 - DNA, 37 bp, Artificial Sequence
  Synthetic
gcctgccggggctacatcactggagctgttcgtcggt

SEQ ID NO: 2342 - DNA, 37 bp, Artificial Sequence
  Synthetic
gtcccgaaagccgctgcacgaaatccgtgtcgatgca

SEQ ID NO: 2343 - DNA, 34 bp, Artificial Sequence
  Synthetic
ggcaaggtgcggcagcttcgctgcacgacacgct

SEQ ID NO: 2344 - DNA, 39 bp, Artificial Sequence
  Synthetic
cgatgacggtggtggcaaccaaaaggccgaagtcatggc

SEQ ID NO: 2345 - DNA, 39 bp, Artificial Sequence
  Synthetic
atcagcatcggggcggtttcgccaagctcgaagaagact

SEQ ID NO: 2346 - DNA, 35 bp, Artificial Sequence
  Synthetic
acacccgaaacccgcagcgcgcctgacggatgctg

SEQ ID NO: 2347 - DNA, 35 bp, Artificial Sequence
  Synthetic
gcttcaggacggcatcgccgcgtatcatcggcgcg

SEQ ID NO: 2348 - DNA, 35 bp, Artificial Sequence
  Synthetic
ccgccgacttccgcatacggcgtgggtcatgccgt

SEQ ID NO: 2349 - DNA, 37 bp, Artificial Sequence
  Synthetic
actttccaagtctgcgcggcaaacctgcctcgtcggg

SEQ ID NO: 2350 - DNA, 38 bp, Artificial Sequence
  Synthetic
ggagtagcgttgggattcgctctcggcaaagaacgtac

SEQ ID NO: 2351 - DNA, 38 bp, Artificial Sequence
  Synthetic
ttccgacccattctccggagatttcggcggcacagaag

SEQ ID NO: 2352 - DNA, 42 bp, Artificial Sequence
  Synthetic
ggtaggatgcggatttcctgcttttggaactgtggccaaaca

SEQ ID NO: 2353 - DNA, 42 bp, Artificial Sequence
  Synthetic
gcccacgtcgtttatccgcaagtgtttgagccagatttcgga

SEQ ID NO: 2354 - DNA, 41 bp, Artificial Sequence
  Synthetic
gcaactgccttatgccctgacgagacccaatgcgaggtagc

SEQ ID NO: 2355 - DNA, 40 bp, Artificial Sequence
  Synthetic
tatgctgccgattgccgccgatacacgggataatcagcgc

SEQ ID NO: 2356 - DNA, 38 bp, Artificial Sequence
  Synthetic
cgcccatgtgcgtgctgatcaagcgtggcgataatcga

SEQ ID NO: 2357 - DNA, 37 bp, Artificial Sequence
  Synthetic
cgtcgacggtctgacacacctaatcgccgtctgccca

SEQ ID NO: 2358 - DNA, 41 bp, Artificial Sequence
  Synthetic
gcaaatatacagccgcagcggttcatggcaacgtcaatcgg

SEQ ID NO: 2359 - DNA, 39 bp, Artificial Sequence
  Synthetic
tttccggttgccgatacgcctgtattccatcacgccgtc

SEQ ID NO: 2360 - DNA, 40 bp, Artificial Sequence
  Synthetic
gccattaccgccgaaccgagacctgtcgttttattggggc

SEQ ID NO: 2361 - DNA, 39 bp, Artificial Sequence
  Synthetic
cggtattcctgagcgtcggatccgtttggcgcaggttgg

SEQ ID NO: 2362 - DNA, 38 bp, Artificial Sequence
  Synthetic
cggcttggacgttgcacactttgggcgcaggtcatcga

SEQ ID NO: 2363 - DNA, 36 bp, Artificial Sequence
  Synthetic
cgcgccctatcatgatgccgccgcaaaaagccgccg

SEQ ID NO: 2364 - DNA, 38 bp, Artificial Sequence
  Synthetic
acggcggcatggcaatactgaaaaaccgaccgttgggc

SEQ ID NO: 2365 - DNA, 36 bp, Artificial Sequence
  Synthetic
gaccaaagccgccaatgccaatccggcatcgacgct

SEQ ID NO: 2366 - DNA, 35 bp, Artificial Sequence
  Synthetic
agcttgcccggaaagccgcgccgagggcgaatgtg

SEQ ID NO: 2367 - DNA, 36 bp, Artificial Sequence
  Synthetic
gcaggtcgtcgtcgctgtacctgctgcgcgggttca

SEQ ID NO: 2368 - DNA, 39 bp, Artificial Sequence
  Synthetic
tctgcctgtccctcagcgccctatcaggctcatacggcg

SEQ ID NO: 2369 - DNA, 41 bp, Artificial Sequence
  Synthetic
ccgtctgcaagcctacgaaggagttgctgttcaaaccacgg

SEQ ID NO: 2370 - DNA, 36 bp, Artificial Sequence
  Synthetic
ccacgttggcacgcctgtggcatcccttgccgtcca

SEQ ID NO: 2371 - DNA, 40 bp, Artificial Sequence
  Synthetic
cgcaagaacacaggcaaagcccggcactctgcatttttgc

SEQ ID NO: 2372 - DNA, 39 bp, Artificial Sequence
  Synthetic
cgctttgccgaactcgacggggatgacggtcagtgtgtg

SEQ ID NO: 2373 - DNA, 37 bp, Artificial Sequence
  Synthetic
aaatcccgccctgctcgccttggacggcgttatgggt

SEQ ID NO: 2374 - DNA, 35 bp, Artificial Sequence
  Synthetic
ctgaccggcacacccacacgcgggcaagctgacgt

SEQ ID NO: 2375 - DNA, 35 bp, Artificial Sequence
  Synthetic
acgccgacgacctcgaagctcgggacaggggtgga

SEQ ID NO: 2376 - DNA, 41 bp, Artificial Sequence
  Synthetic
ccaaaaccgccgtcctacaccaggattgcgctgaacagcct

SEQ ID NO: 2377 - DNA, 39 bp, Artificial Sequence
  Synthetic
caacagcatctccgtcagcgactttgacggatgcctggc

SEQ ID NO: 2378 - DNA, 42 bp, Artificial Sequence
  Synthetic
gccatattcgcaggattgctgccgggggaaaaggagttaacc

SEQ ID NO: 2379 - DNA, 37 bp, Artificial Sequence
  Synthetic
ccgacaaagaccgcgcatggtgtacgacaggtgcggc

SEQ ID NO: 2380 - DNA, 38 bp, Artificial Sequence
  Synthetic
catcacccgcatcggtttcaacctgcaaccggggatgc

SEQ ID NO: 2381 - DNA, 42 bp, Artificial Sequence
  Synthetic
gctatcggagttggaccaggtgcgggttttttgacggttcag

SEQ ID NO: 2382 - DNA, 37 bp, Artificial Sequence
  Synthetic
agccggcggattctgcctgtcggcaatggcatgcatg

SEQ ID NO: 2383 - DNA, 36 bp, Artificial Sequence
  Synthetic
accccggggcaaaccatccgcgcaatgcctgctcga

SEQ ID NO: 2384 - DNA, 43 bp, Artificial Sequence
  Synthetic
tccattatttaccaattcctcaccggacgttactttgcgccaa

SEQ ID NO: 2385 - DNA, 37 bp, Artificial Sequence
  Synthetic
cgccgctacgccatcaacgttgaccgatggcacgacc

SEQ ID NO: 2386 - DNA, 38 bp, Artificial Sequence
  Synthetic
ggcgaacccaaacccagcatcacgggtcggcgtggatt

SEQ ID NO: 2387 - DNA, 40 bp, Artificial Sequence
  Synthetic
gggaaatctttacccacggcggatttcgaccgcccattcc

SEQ ID NO: 2388 - DNA, 37 bp, Artificial Sequence
  Synthetic
acgcaccgttgccgacattgatgctgactttgtccgc

SEQ ID NO: 2389 - DNA, 34 bp, Artificial Sequence
  Synthetic
agcaggcgcgattaccggctgctgcgcttgggca

SEQ ID NO: 2390 - DNA, 35 bp, Artificial Sequence
  Synthetic
acgtcttgagcgtcggcccccgcgagacaggtcgt

SEQ ID NO: 2391 - DNA, 41 bp, Artificial Sequence
  Synthetic
ggcacaccaattgaaccttgccaaaccttccaatacgcccg

SEQ ID NO: 2392 - DNA, 40 bp, Artificial Sequence
  Synthetic
cgacgcactggtcggcaaaggatgccttcgatgacgaggt

SEQ ID NO: 2393 - DNA, 39 bp, Artificial Sequence
  Synthetic
cgacagcgcatcgaagccatgggatagcgtccggcaagt

SEQ ID NO: 2394 - DNA, 38 bp, Artificial Sequence
  Synthetic
gctgaccgccgacgatgtcgtccgatgtgtattcccaa

SEQ ID NO: 2395 - DNA, 37 bp, Artificial Sequence
  Synthetic
accggttgccgccaaaaaaggtaaacgacgacgcgcg

SEQ ID NO: 2396 - DNA, 39 bp, Artificial Sequence
  Synthetic
gcgtcaaccgtatgccgctccgctgaatcggataggtcg

SEQ ID NO: 2397 - DNA, 38 bp, Artificial Sequence
  Synthetic
aaacccaagcccgaagacgcggggtgaggatgtagcgt

SEQ ID NO: 2398 - DNA, 36 bp, Artificial Sequence
  Synthetic
tcctacggctggttcggcttgcctgttggacgggga

SEQ ID NO: 2399 - DNA, 36 bp, Artificial Sequence
  Synthetic
tcggcggcattgcccgatccggattcaaacgcgcca

SEQ ID NO: 2400 - DNA, 38 bp, Artificial Sequence
  Synthetic
gatgggttggttcgatgccgttggaaaacccgcccagc

SEQ ID NO: 2401 - DNA, 39 bp, Artificial Sequence
  Synthetic
ccttgccgtcgccatcctgtcggctttgaataactgcgt

SEQ ID NO: 2402 - DNA, 38 bp, Artificial Sequence
  Synthetic
tacgccttttcggacggcgccggaaagggtaacggtcg

SEQ ID NO: 2403 - DNA, 35 bp, Artificial Sequence
  Synthetic
aactgaccgcgctgctcggccgtcagccagagggt

SEQ ID NO: 2404 - DNA, 39 bp, Artificial Sequence
  Synthetic
accgactacgtcgtcgccgcaaggcattggctttttcca

SEQ ID NO: 2405 - DNA, 40 bp, Artificial Sequence
  Synthetic
gctccataagccctaccgcctgtcgcgttcgatttcgctg

SEQ ID NO: 2406 - DNA, 39 bp, Artificial Sequence
  Synthetic
cgatgccgaatacgaccgccctcgggatggtttcgttcc

SEQ ID NO: 2407 - DNA, 39 bp, Artificial Sequence
  Synthetic
ccgcactggacgcattctgcggtcggcgaaaccaaatgg

SEQ ID NO: 2408 - DNA, 35 bp, Artificial Sequence
  Synthetic
ccatcccgggcatccgctacgttgcggctgactgc

SEQ ID NO: 2409 - DNA, 41 bp, Artificial Sequence
  Synthetic
gcgttttccatcggcatcgaaccgaacggtattgcgcttcg

SEQ ID NO: 2410 - DNA, 42 bp, Artificial Sequence
  Synthetic
ggaaaagctgtttgccaaccggtgcaaagtgtgtatcaggct

SEQ ID NO: 2411 - DNA, 38 bp, Artificial Sequence
  Synthetic
ccgatacgcgccatcgatacttggtttgcgccccgatt

SEQ ID NO: 2412 - DNA, 41 bp, Artificial Sequence
  Synthetic
acggaacagcagcaaaggctcatgtattgaatgccgcgagc

SEQ ID NO: 2413 - DNA, 39 bp, Artificial Sequence
  Synthetic
cgcgcagttgttccagcgatcgctatgccgaaatgagcg

SEQ ID NO: 2414 - DNA, 41 bp, Artificial Sequence
  Synthetic
caccctgtacgaaacgctcgctgaattccgctttatcggcg

SEQ ID NO: 2415 - DNA, 40 bp, Artificial Sequence
  Synthetic
gccataatgcgcgctttgtaggccaacctcaaaccgccag

SEQ ID NO: 2416 - DNA, 37 bp, Artificial Sequence
  Synthetic
tcggcggtggtgatgtgttcaacccgttttggcgcaa

SEQ ID NO: 2417 - DNA, 37 bp, Artificial Sequence
  Synthetic
ggtaacggcggcgaccaatgtttctgcctgcccgtcc

SEQ ID NO: 2418 - DNA, 36 bp, Artificial Sequence
  Synthetic
tccatcgcgtccgccagtatgggcgggcgagttgaa

SEQ ID NO: 2419 - DNA, 36 bp, Artificial Sequence
  Synthetic
acatccacaccgccgagcgttcaaaccgaccaccgc

SEQ ID NO: 2420 - DNA, 38 bp, Artificial Sequence
  Synthetic
gcggaagcggtcgacgtatctggcggggtcttttttgc

SEQ ID NO: 2421 - DNA, 41 bp, Artificial Sequence
  Synthetic
ggcaggaaatcctatgccgtcgcaaatcgtaggcaagcgca

SEQ ID NO: 2422 - DNA, 34 bp, Artificial Sequence
  Synthetic
ggaaaccgccgccgacaacggcggcagaaggctt

SEQ ID NO: 2423 - DNA, 38 bp, Artificial Sequence
  Synthetic
tgccggtggacattggtgcagcgtccgggattttcaac

SEQ ID NO: 2424 - DNA, 39 bp, Artificial Sequence
  Synthetic
cctgcatcagatagctgcggaaccgcgccgattacttcg

SEQ ID NO: 2425 - DNA, 41 bp, Artificial Sequence
  Synthetic
cggcgcgaatttaaacggaaattggacgacctgataacaag

SEQ ID NO: 2426 - DNA, 43 bp, Artificial Sequence
  Synthetic
atccccaatatgccgtcagcattggccgtaataaaaagtatgg

SEQ ID NO: 2427 - DNA, 34 bp, Artificial Sequence
  Synthetic
tgggacagctcggggcaaggcaactggacgggga

SEQ ID NO: 2428 - DNA, 38 bp, Artificial Sequence
  Synthetic
ctcgcgcatatggacgcggtacatcgaatgctcgctcg

SEQ ID NO: 2429 - DNA, 38 bp, Artificial Sequence
  Synthetic
gcgtctgcctcgatacccaaacggcggctttgccccaa

SEQ ID NO: 2430 - DNA, 35 bp, Artificial Sequence
  Synthetic
tccacgcgcctgccagttgcgcaaaccgccgttgc

SEQ ID NO: 2431 - DNA, 36 bp, Artificial Sequence
  Synthetic
tgaggctgttgcggacggatattcggcttgccgctg

SEQ ID NO: 2432 - DNA, 36 bp, Artificial Sequence
  Synthetic
ttcaagacgacggcggactgtcggcagatacgccgt

SEQ ID NO: 2433 - DNA, 38 bp, Artificial Sequence
  Synthetic
tccatcgcgcgcggctatccttcctgaatcaggtcggc

SEQ ID NO: 2434 - DNA, 38 bp, Artificial Sequence
  Synthetic
gcctgcttccggccattctgatcggtttgttgggcggt

SEQ ID NO: 2435 - DNA, 35 bp, Artificial Sequence
  Synthetic
acgacgtttccggcctgccaaggtaggcgggcagc

SEQ ID NO: 2436 - DNA, 36 bp, Artificial Sequence
  Synthetic
ggtgtacggaatcgtcgccgggcgcatcagcagcat

SEQ ID NO: 2437 - DNA, 40 bp, Artificial Sequence
  Synthetic
ttcggttcgggcttgttgggaacgacgattcctgtgatgg

SEQ ID NO: 2438 - DNA, 37 bp, Artificial Sequence
  Synthetic
tggcgcacggcatcgatatgtccagccgttgcgtgca

SEQ ID NO: 2439 - DNA, 39 bp, Artificial Sequence
  Synthetic
tttccgtggcgatgtcgtaagcaaaaatggttatcggcc

SEQ ID NO: 2440 - DNA, 41 bp, Artificial Sequence
  Synthetic
ttgacggccttccattttggaaaagaagatttggctgaagt

SEQ ID NO: 2441 - DNA, 45 bp, Artificial Sequence
  Synthetic
ccctttggatattgcgctcaatttaaaaagcggtaataaagggaa

SEQ ID NO: 2442 - DNA, 39 bp, Artificial Sequence
  Synthetic
cacagcattcccggggtgtcccgaacaacgccttttcct

SEQ ID NO: 2443 - DNA, 42 bp, Artificial Sequence
  Synthetic
cctcaggcaaatacgcggacaaacgcagttgttcggaaaacg

SEQ ID NO: 2444 - DNA, 41 bp, Artificial Sequence
  Synthetic
tgccgtctgaagcaccgtttgaggttgatgctgtcgaactg

SEQ ID NO: 2445 - DNA, 37 bp, Artificial Sequence
  Synthetic
cgcgccacccatgcattggcatggcggcgacaaatgc

SEQ ID NO: 2446 - DNA, 45 bp, Artificial Sequence
  Synthetic
gttgatttgaaaaaaatgccgtctgaaacagtttctcgaacggta

SEQ ID NO: 2447 - DNA, 38 bp, Artificial Sequence
  Synthetic
acacccgaccaccaaaagctggcgattgcggcatgggc

SEQ ID NO: 2448 - DNA, 43 bp, Artificial Sequence
  Synthetic
gtctgaatgtttcgacaatccgattgctatctctctacgccac

SEQ ID NO: 2449 - DNA, 39 bp, Artificial Sequence
  Synthetic
cacaaccgccgacatcaagctttctttttcggcgagcgt

SEQ ID NO: 2450 - DNA, 42 bp, Artificial Sequence
  Synthetic
gtcaattcgcaccggactgcgtttcaaacccttgcccaaacc

SEQ ID NO: 2451 - DNA, 35 bp, Artificial Sequence
  Synthetic
tcctcaggctccgccacacccgctccttcgcatgg

SEQ ID NO: 2452 - DNA, 48 bp, Artificial Sequence
  Synthetic
cattggcaaaaatagcagcacaatattaaatcccaaaacagaaatgac

SEQ ID NO: 2453 - DNA, 35 bp, Artificial Sequence
  Synthetic
cgcaccttcgggcagactgggcaacgacagcgagg

SEQ ID NO: 2454 - DNA, 35 bp, Artificial Sequence
  Synthetic
ttgccggttcggaagccgcggtacgcgcatgacgg

SEQ ID NO: 2455 - DNA, 39 bp, Artificial Sequence
  Synthetic
cgcatgaagattggcttccgccttctgctggcggaatcg

SEQ ID NO: 2456 - DNA, 40 bp, Artificial Sequence
  Synthetic
cgcttcaaggtagccttttgccgatgtatctcggccggct

SEQ ID NO: 2457 - DNA, 35 bp, Artificial Sequence
  Synthetic
ggcgtgttggttgatgccgggctacggacacggca

SEQ ID NO: 2458 - DNA, 50 bp, Artificial Sequence
  Synthetic
gcgaaagtttccgtaaaaatatcggtcggattaatttgttcaatatcacc

SEQ ID NO: 2459 - DNA, 40 bp, Artificial Sequence
  Synthetic
ccgccgcccaagattggaatcttcaggaaagctttgccgc

SEQ ID NO: 2460 - DNA, 42 bp, Artificial Sequence
  Synthetic
acttcaaactgcgcggacaaccccaatccgtgcaaaaacagg

SEQ ID NO: 2461 - DNA, 38 bp, Artificial Sequence
  Synthetic
cgccgtacctatgcgtgtgaaagcattgtccgccacgc

SEQ ID NO: 2462 - DNA, 37 bp, Artificial Sequence
  Synthetic
acggtttcgtcgacggcacgtcggggatgatggcgac

SEQ ID NO: 2463 - DNA, 41 bp, Artificial Sequence
  Synthetic
gctctacttcgcagccgtcaacattgtggctgccggtaatc

SEQ ID NO: 2464 - DNA, 38 bp, Artificial Sequence
  Synthetic
tggtattcgtcatcggcatcgcgttaggcggcgtggca

SEQ ID NO: 2465 - DNA, 38 bp, Artificial Sequence
  Synthetic
gcatttccaatcccgacaccgtgccacgccgaagacga

SEQ ID NO: 2466 - DNA, 40 bp, Artificial Sequence
  Synthetic
catcgtcaggcgagcaaccggcttcccgattaccctgaaa

SEQ ID NO: 2467 - DNA, 38 bp, Artificial Sequence
  Synthetic
atcggacgaattggcacggattatgtcggtggcacggc

SEQ ID NO: 2468 - DNA, 37 bp, Artificial Sequence
  Synthetic
tgctcgacaacggcgttcccgttcggcgcaataaagc

SEQ ID NO: 2469 - DNA, 37 bp, Artificial Sequence
  Synthetic
cgtcgccgccataaaacgctcgaggtgtatgggcagg

SEQ ID NO: 2470 - DNA, 39 bp, Artificial Sequence
  Synthetic
atccgcagcccgacggttcctttcagacggcattggtcg

SEQ ID NO: 2471 - DNA, 38 bp, Artificial Sequence
  Synthetic
attgcgcgacatcgtccgaccgcccagccataaaacag

SEQ ID NO: 2472 - DNA, 40 bp, Artificial Sequence
  Synthetic
cgcccgataaagctgcgtaagtttgggcggatatttcggc

SEQ ID NO: 2473 - DNA, 41 bp, Artificial Sequence
  Synthetic
gcccgaaccgatgaagcaatccattttgcgcctgattccga

SEQ ID NO: 2474 - DNA, 37 bp, Artificial Sequence
  Synthetic
gccgattttgcctttgccgcgccttaccacatcgcgc

SEQ ID NO: 2475 - DNA, 40 bp, Artificial Sequence
  Synthetic
acgaagtggaagccgtgttggcgtcagcgtaaccatgtcg

SEQ ID NO: 2476 - DNA, 36 bp, Artificial Sequence
  Synthetic
agtcgaacccgccgccaagttgccggcaacaacgac

SEQ ID NO: 2477 - DNA, 42 bp, Artificial Sequence
  Synthetic
tcttcgcggaagatttcgccttcgcatccccttcctttatgc

SEQ ID NO: 2478 - DNA, 37 bp, Artificial Sequence
  Synthetic
agtccgctacacgcaaggccgctcgttgatgtagcgg

SEQ ID NO: 2479 - DNA, 38 bp, Artificial Sequence
  Synthetic
ggcttccaacgcgtcatccaggccaagcctttgcctgc

SEQ ID NO: 2480 - DNA, 40 bp, Artificial Sequence
  Synthetic
tgtcttcggcaaccacaccgacaattacccgcaaacacgt

SEQ ID NO: 2481 - DNA, 38 bp, Artificial Sequence
  Synthetic
gcgcattttgcccgaacgcaccacaacaaccgcatcct

SEQ ID NO: 2482 - DNA, 40 bp, Artificial Sequence
  Synthetic
aacggtctttgaggcggctgtatcgcgacgacttccatca

SEQ ID NO: 2483 - DNA, 34 bp, Artificial Sequence
  Synthetic
aagctcggcggcgcaaagcgttggaacaggcgca

SEQ ID NO: 2484 - DNA, 40 bp, Artificial Sequence
  Synthetic
cgaagccccggaatttgcctggcaaatgtggcgacatagc

SEQ ID NO: 2485 - DNA, 39 bp, Artificial Sequence
  Synthetic
gccaaaccgccgtggacatcaactcaaacaggttgcggg

SEQ ID NO: 2486 - DNA, 40 bp, Artificial Sequence
  Synthetic
cggaattccgcgcatttgcagaggtcaaactcgaaggcgg

SEQ ID NO: 2487 - DNA, 38 bp, Artificial Sequence
  Synthetic
ctgccctttctgcaaagccgttcagtgggcgaacgggt

SEQ ID NO: 2488 - DNA, 38 bp, Artificial Sequence
  Synthetic
gaacaggtattccggcgcggaccgcagggattacgcca

SEQ ID NO: 2489 - DNA, 39 bp, Artificial Sequence
  Synthetic
atcggcaggctgaaacactcggcaggattttatgtgctg

SEQ ID NO: 2490 - DNA, 37 bp, Artificial Sequence
  Synthetic
gcgcgctggatgccaaagttgtgatgaatgtcgcgca

SEQ ID NO: 2491 - DNA, 35 bp, Artificial Sequence
  Synthetic
gcgtgctgctgccggaaacgcgaacatcatgcccg

SEQ ID NO: 2492 - DNA, 41 bp, Artificial Sequence
  Synthetic
gctgaccactgaaaacacgcccgatgtagtaggcgtgttcc

SEQ ID NO: 2493 - DNA, 41 bp, Artificial Sequence
  Synthetic
accgtcatatgccttattgtcgtgggtaagaaggaacaggg

SEQ ID NO: 2494 - DNA, 40 bp, Artificial Sequence
  Synthetic
gcccggtcaaaagcgcaaaaagttccgatacctttgcgcc

SEQ ID NO: 2495 - DNA, 40 bp, Artificial Sequence
  Synthetic
agctacaccccgaaacatccgcaatcggggtctgacaggt

SEQ ID NO: 2496 - DNA, 38 bp, Artificial Sequence
  Synthetic
gcacggcgatgcggaagtgataagcggtttcgggatgg

SEQ ID NO: 2497 - DNA, 40 bp, Artificial Sequence
  Synthetic
gcggcggcggtttttgtagatgatggtacagaccgtgcgc

SEQ ID NO: 2498 - DNA, 35 bp, Artificial Sequence
  Synthetic
ccagcggtttgcaatcgcccggttgccaagcgtcc

SEQ ID NO: 2499 - DNA, 38 bp, Artificial Sequence
  Synthetic
taccgcgtctttgccgactgggacggtcgcagaaaagc

SEQ ID NO: 2500 - DNA, 38 bp, Artificial Sequence
  Synthetic
ccgatacggggtaaggcaggatgcctgtggacgcaacc

SEQ ID NO: 2501 - DNA, 35 bp, Artificial Sequence
  Synthetic
gtttgcgccgccgtctttgggcgcggttgccgtat

SEQ ID NO: 2502 - DNA, 37 bp, Artificial Sequence
  Synthetic
gttcctcgtaggctgcctgcgccgcaacaagaggccg

SEQ ID NO: 2503 - DNA, 37 bp, Artificial Sequence
  Synthetic
ggtcgtacagggcgttgccggtccttgaccgcgaacc

SEQ ID NO: 2504 - DNA, 46 bp, Artificial Sequence
  Synthetic
agtgccatttcattctaacttccttaaaacgctaatcataagaggg

SEQ ID NO: 2505 - DNA, 39 bp, Artificial Sequence
  Synthetic
gcttcatctgctttgtgcgggtcaggcatcgggagggat

SEQ ID NO: 2506 - DNA, 37 bp, Artificial Sequence
  Synthetic
cgaccacatcggacaatcccgcgcggcaggggttgtt

SEQ ID NO: 2507 - DNA, 41 bp, Artificial Sequence
  Synthetic
gtttccgttcgggcaatggttcccgcctgaaagaatcccat

SEQ ID NO: 2508 - DNA, 38 bp, Artificial Sequence
  Synthetic
gcccgtcgtcttccacgttgcgagatgcacggctcaaa

SEQ ID NO: 2509 - DNA, 41 bp, Artificial Sequence
  Synthetic
ggcggttacttttttgcctgccgttccgcccgaaaatctgc

SEQ ID NO: 2510 - DNA, 37 bp, Artificial Sequence
  Synthetic
gcagcttcggcttcggctgcaggacaatccgaacctg

SEQ ID NO: 2511 - DNA, 40 bp, Artificial Sequence
  Synthetic
cgcccgatataggcttccgcgacgatttcttcctcagcgt

SEQ ID NO: 2512 - DNA, 39 bp, Artificial Sequence
  Synthetic
cgttgacactgcccgcgaatcgatacgaacgtccgttac

SEQ ID NO: 2513 - DNA, 39 bp, Artificial Sequence
  Synthetic
ccctgcgtttcaagcccgatcggcaacatgaacgaagtg

SEQ ID NO: 2514 - DNA, 37 bp, Artificial Sequence
  Synthetic
tccaatacgccgcccagggcgcccgattacaggcttg

SEQ ID NO: 2515 - DNA, 41 bp, Artificial Sequence
  Synthetic
ccgcctgataaatgttgcgcgtgacgtgaaatccgacatcg

SEQ ID NO: 2516 - DNA, 36 bp, Artificial Sequence
  Synthetic
tcaaacccgcgttgcgcccctgacggctggttttcg

SEQ ID NO: 2517 - DNA, 36 bp, Artificial Sequence
  Synthetic
atcgcggctgtcctgctctgggcgtggaaatttcgg

SEQ ID NO: 2518 - DNA, 35 bp, Artificial Sequence
  Synthetic
cgggcgtgtgtctgaaccgcgtcgaggcagtccga

SEQ ID NO: 2519 - DNA, 41 bp, Artificial Sequence
  Synthetic
cgaacgggaacacatccgccttttatcgtgaatgccgaccg

SEQ ID NO: 2520 - DNA, 37 bp, Artificial Sequence
  Synthetic
cggcaagaagcggcggtatgttgccttgtgttgccgt

SEQ ID NO: 2521 - DNA, 41 bp, Artificial Sequence
  Synthetic
cggacaggagggcgtttgatgtggggtcgaaggcaagatgg

SEQ ID NO: 2522 - DNA, 36 bp, Artificial Sequence
  Synthetic
gcgggggcttcgagtttcgggactggtatcgcgcca

SEQ ID NO: 2523 - DNA, 35 bp, Artificial Sequence
  Synthetic
acaccgccgcaccgtatccccggcgcgtggcaata

SEQ ID NO: 2524 - DNA, 35 bp, Artificial Sequence
  Synthetic
ttcccaccgcttccccgacgatgtgattcgggcgg

SEQ ID NO: 2525 - DNA, 36 bp, Artificial Sequence
  Synthetic
tccgggcggttttggcgtgttcacgaagccgatgcc

SEQ ID NO: 2526 - DNA, 38 bp, Artificial Sequence
  Synthetic
gccttgagcttgtcgattgccgacgcatcgcacttgcc

SEQ ID NO: 2527 - DNA, 39 bp, Artificial Sequence
  Synthetic
cgcccatcaaccccatcactgcccgattcttgccgttgc

SEQ ID NO: 2528 - DNA, 40 bp, Artificial Sequence
  Synthetic
gcgaagtgggcgaactgatcgtgcggcaggcatattgagg

SEQ ID NO: 2529 - DNA, 34 bp, Artificial Sequence
  Synthetic
ttttggcgggcgcggtgtcggcgggaaaatgcgc

SEQ ID NO: 2530 - DNA, 38 bp, Artificial Sequence
  Synthetic
ggctggcaggcgagttttctcaagcactgccatcaccg

SEQ ID NO: 2531 - DNA, 41 bp, Artificial Sequence
  Synthetic
cgacaggggttctttttgctctagatcgtcaaagtttagca

SEQ ID NO: 2532 - DNA, 38 bp, Artificial Sequence
  Synthetic
ttttcgcaaatcttccgccccggcgagattctgaactt

SEQ ID NO: 2533 - DNA, 36 bp, Artificial Sequence
  Synthetic
caggaaatcatcgcgcgcgacaataccgccaagccg

SEQ ID NO: 2534 - DNA, 35 bp, Artificial Sequence
  Synthetic
gcacatcgcccccgaaacccgccacgcgttttcgg

SEQ ID NO: 2535 - DNA, 35 bp, Artificial Sequence
  Synthetic
actgccgacgtgcttgccctgccttgtccgagccg

SEQ ID NO: 2536 - DNA, 35 bp, Artificial Sequence
  Synthetic
cgccgacgcccgatttcacgcagcatcgcggtgga

SEQ ID NO: 2537 - DNA, 42 bp, Artificial Sequence
  Synthetic
cggaagacaaatccatgccgccatctgtggcgcatcaaaacc

SEQ ID NO: 2538 - DNA, 36 bp, Artificial Sequence
  Synthetic
atcagcgcgggcttgtgccgcacaaggtgcggcagt

SEQ ID NO: 2539 - DNA, 40 bp, Artificial Sequence
  Synthetic
cttgcattggaagccttgggcgcgttgacgtgatccatcg

SEQ ID NO: 2540 - DNA, 41 bp, Artificial Sequence
  Synthetic
gctggccggaaaccatatctcgaaaacgctgcaaaatgaac

SEQ ID NO: 2541 - DNA, 39 bp, Artificial Sequence
  Synthetic
tccacccgcacccgaccttatacacccaaagccacttcc

SEQ ID NO: 2542 - DNA, 35 bp, Artificial Sequence
  Synthetic
ccgtacgacgctgaacggctcggcctggatgtggc

SEQ ID NO: 2543 - DNA, 40 bp, Artificial Sequence
  Synthetic
ggcatcagcagctccacgctaaagtcgaaaacgtcgtgcg

SEQ ID NO: 2544 - DNA, 38 bp, Artificial Sequence
  Synthetic
ctccgatcggcaactggcaagaagaggtcagcgcgatg

SEQ ID NO: 2545 - DNA, 39 bp, Artificial Sequence
  Synthetic
aaggcgcatctgctcgatgtggccgcgatttgttcatcg

SEQ ID NO: 2546 - DNA, 37 bp, Artificial Sequence
  Synthetic
cgccgcgttcgtactgcatggacaccatcgagcagcg

SEQ ID NO: 2547 - DNA, 35 bp, Artificial Sequence
  Synthetic
atcaggctgcggtgggagcagtgtccctcgtcgcc

SEQ ID NO: 2548 - DNA, 37 bp, Artificial Sequence
  Synthetic
aaggcggtgcggacgttgttgaccgaatgctgcatca

SEQ ID NO: 2549 - DNA, 38 bp, Artificial Sequence
  Synthetic
cggtgaaacacggcatttggttgacggcatcgacgtgg

SEQ ID NO: 2550 - DNA, 34 bp, Artificial Sequence
  Synthetic
ggcgggcggcaaagtgttcgcggtacaccacgct

SEQ ID NO: 2551 - DNA, 38 bp, Artificial Sequence
  Synthetic
gcagcagcaatgtcggcattacagaaagccggtgtgga

SEQ ID NO: 2552 - DNA, 37 bp, Artificial Sequence
  Synthetic
cccgcccataaagccatcggcgccggagagtgcaatc

SEQ ID NO: 2553 - DNA, 40 bp, Artificial Sequence
  Synthetic
gctcgacagccttgccgacatttgtaggcaataagcgcgg

SEQ ID NO: 2554 - DNA, 35 bp, Artificial Sequence
  Synthetic
tgtttgccgcgctgatccgccggcggcagcagttt

SEQ ID NO: 2555 - DNA, 40 bp, Artificial Sequence
  Synthetic
cgacaggcagggagtcggcatacctgacggtcttcagccc

SEQ ID NO: 2556 - DNA, 39 bp, Artificial Sequence
  Synthetic
cggtgtcaacgataaggcacgggaacatctttgaccagt

SEQ ID NO: 2557 - DNA, 43 bp, Artificial Sequence
  Synthetic
accgtaaacgcaggtctgaaatttgagcgtttttgaattcagc

SEQ ID NO: 2558 - DNA, 38 bp, Artificial Sequence
  Synthetic
gcagcgcaacctcaaaccgaaacctgcgcgagtgttgc

SEQ ID NO: 2559 - DNA, 39 bp, Artificial Sequence
  Synthetic
cgacatctcgacggcaaccggttcaggttgttgaggcgt

SEQ ID NO: 2560 - DNA, 36 bp, Artificial Sequence
  Synthetic
cgcccttgcccaacgctatagcggtattgacggcgg

SEQ ID NO: 2561 - DNA, 38 bp, Artificial Sequence
  Synthetic
tggaaatccgcggcgcaggcgacctgcatcatttcgcc

SEQ ID NO: 2562 - DNA, 38 bp, Artificial Sequence
  Synthetic
cgaccacgcttctggtcgaggggaaatcggcgaaacgg

SEQ ID NO: 2563 - DNA, 33 bp, Artificial Sequence
  Synthetic
tcgccctgcacaagctcgttcggcggctttgcg

SEQ ID NO: 2564 - DNA, 37 bp, Artificial Sequence
  Synthetic
tgttgttcgtaccggttgccaccccgccaaaaacggc

SEQ ID NO: 2565 - DNA, 39 bp, Artificial Sequence
  Synthetic
tcctcgccgcctacatccattccgaagatgaagttgccg

SEQ ID NO: 2566 - DNA, 39 bp, Artificial Sequence
  Synthetic
tacagcacccgccacctgcttgttttcggtaatgctgcg

SEQ ID NO: 2567 - DNA, 38 bp, Artificial Sequence
  Synthetic
cgatctcatccgtatcgccccgcgttggagggcgacga

SEQ ID NO: 2568 - DNA, 39 bp, Artificial Sequence
  Synthetic
ggtatcgccgtcggtatggccgttgatggtgtcggtgag

SEQ ID NO: 2569 - DNA, 38 bp, Artificial Sequence
  Synthetic
gcaacgacgaactggcgcactcttcggtggtcatgcgg

SEQ ID NO: 2570 - DNA, 39 bp, Artificial Sequence
  Synthetic
ccaagttcgcccaatacctgctcgccgagtttcagcgtg

SEQ ID NO: 2571 - DNA, 42 bp, Artificial Sequence
  Synthetic
cgggcatcgttgcttttcattcatagtaacggatgtggaaag

SEQ ID NO: 2572 - DNA, 38 bp, Artificial Sequence
  Synthetic
tgcccctgcccgatgacataatgcaaactgcccacgcc

SEQ ID NO: 2573 - DNA, 42 bp, Artificial Sequence
  Synthetic
cgcagtcaggggcagaaacttcgaacaagcctgttttcctgc

SEQ ID NO: 2574 - DNA, 37 bp, Artificial Sequence
  Synthetic
atggtaggcagcacgcgcgacaaattcacacgggcgg

SEQ ID NO: 2575 - DNA, 40 bp, Artificial Sequence
  Synthetic
cggcgcattggcaaaaggtcgctttatcaggcgatggagg

SEQ ID NO: 2576 - DNA, 42 bp, Artificial Sequence
  Synthetic
cggcgtttcaaggtggttacgagtatcggcatcgttaccagt

SEQ ID NO: 2577 - DNA, 39 bp, Artificial Sequence
  Synthetic
cgcacgaccggttcttcgttaagattgtctgtcgcggcg

SEQ ID NO: 2578 - DNA, 37 bp, Artificial Sequence
  Synthetic
ggcgggaatggcggcaaatatcatcggcttctgcgtg

SEQ ID NO: 2579 - DNA, 39 bp, Artificial Sequence
  Synthetic
ccagaccgatatgccgtcgccgccatatccgacgcttac

SEQ ID NO: 2580 - DNA, 36 bp, Artificial Sequence
  Synthetic
ggtttgcgcccgcatgtgggcgtttaccggttcgac

SEQ ID NO: 2581 - DNA, 36 bp, Artificial Sequence
  Synthetic
aaccaccccgacccctgtgcgtttcaaacggcgcgg

SEQ ID NO: 2582 - DNA, 38 bp, Artificial Sequence
  Synthetic
gcagcgaacacgatacccgtatgagcagggcgcatcga

SEQ ID NO: 2583 - DNA, 38 bp, Artificial Sequence
  Synthetic
ggcaaagcaaccttagccgcgcacgatggaagcaggaa

SEQ ID NO: 2584 - DNA, 33 bp, Artificial Sequence
  Synthetic
atcaccgcgccgctgcaattggcggcctgcagt

SEQ ID NO: 2585 - DNA, 44 bp, Artificial Sequence
  Synthetic
accgcctttaaacaattgaaagaaatccgtatctggttaaacgg

SEQ ID NO: 2586 - DNA, 41 bp, Artificial Sequence
  Synthetic
tcgacattaccgaacaccgcaaagggtcagtccgatttcgt

SEQ ID NO: 2587 - DNA, 41 bp, Artificial Sequence
  Synthetic
ccagcttcgccgacatcttctttcttcggtcaacacgatgg

SEQ ID NO: 2588 - DNA, 41 bp, Artificial Sequence
  Synthetic
aatcccgccgaagaaaccgatatatattcgagtgcgcgctc

SEQ ID NO: 2589 - DNA, 36 bp, Artificial Sequence
  Synthetic
tccacccacggcgcattcgtcgccatcgtgtgttcg

SEQ ID NO: 2590 - DNA, 38 bp, Artificial Sequence
  Synthetic
agcgcgccaaatcgaccgtttggcaatccttttacgcg

SEQ ID NO: 2591 - DNA, 39 bp, Artificial Sequence
  Synthetic
cggatagacaagttcgcccgccggcaggcgttttctacc

SEQ ID NO: 2592 - DNA, 41 bp, Artificial Sequence
  Synthetic
gcgtgccattatgggtttccacgaccaaatccgcctgtacg

SEQ ID NO: 2593 - DNA, 38 bp, Artificial Sequence
  Synthetic
aaatgccggcgatgaaggtcaccgggtcggtatggaca

SEQ ID NO: 2594 - DNA, 35 bp, Artificial Sequence
  Synthetic
ttgtcttgcccacgcccggcggtggaaggcgggaa

SEQ ID NO: 2595 - DNA, 37 bp, Artificial Sequence
  Synthetic
ggatttgcgcgcccaagctcgcgccgtctgaaaatcc

SEQ ID NO: 2596 - DNA, 37 bp, Artificial Sequence
  Synthetic
tctttgacgaagcggcgcattgccgccgccaaatcca

SEQ ID NO: 2597 - DNA, 38 bp, Artificial Sequence
  Synthetic
ccaaagcccttgatcgcgtccggtgtggtgcaggagga

SEQ ID NO: 2598 - DNA, 34 bp, Artificial Sequence
  Synthetic
gattcccgccgccgtcatgcatacgcgccatcgt

SEQ ID NO: 2599 - DNA, 40 bp, Artificial Sequence
  Synthetic
tgcctgaaacggctaaatcctatcgattcaaaacactggc

SEQ ID NO: 2600 - DNA, 41 bp, Artificial Sequence
  Synthetic
cctgcactcatcaatcctgatttaacccaaactcaaagcca

SEQ ID NO: 2601 - DNA, 38 bp, Artificial Sequence
  Synthetic
gccatttgccgatgattggggcccccggcaggagcatt

SEQ ID NO: 2602 - DNA, 37 bp, Artificial Sequence
  Synthetic
tgttgtcgttgtgggcgggcggctttgtgcagattgc

SEQ ID NO: 2603 - DNA, 38 bp, Artificial Sequence
  Synthetic
ccgggtttcacatcgccgtatgagcgacgctttaccga

SEQ ID NO: 2604 - DNA, 41 bp, Artificial Sequence
  Synthetic
ggaacacggcatcgacacactcagagggctttgagcatcgc

SEQ ID NO: 2605 - DNA, 35 bp, Artificial Sequence
  Synthetic
gcgcatcgatttgggcgcggaagccggcgaagagt

SEQ ID NO: 2606 - DNA, 36 bp, Artificial Sequence
  Synthetic
cgtatgtccggcgcgtcaggtcagggcttcgggcgt

SEQ ID NO: 2607 - DNA, 38 bp, Artificial Sequence
  Synthetic
cagcgcgaagtgttggcggcgacgcagataaaatcgcg

SEQ ID NO: 2608 - DNA, 40 bp, Artificial Sequence
  Synthetic
cgtgccacttgttgccgtcgcactcttggggtcctgaagc

SEQ ID NO: 2609 - DNA, 38 bp, Artificial Sequence
  Synthetic
gagccgtccacgttggagacgcgctcaaacctttcggt

SEQ ID NO: 2610 - DNA, 38 bp, Artificial Sequence
  Synthetic
atttcgtggtgtccgggcagcacccccatcgacctgat

SEQ ID NO: 2611 - DNA, 41 bp, Artificial Sequence
  Synthetic
cactcttcgccattcccgcgatttccgatagattcctgccg

SEQ ID NO: 2612 - DNA, 37 bp, Artificial Sequence
  Synthetic
caacgtcggcgcactggaccggtcggctttttcctgc

SEQ ID NO: 2613 - DNA, 39 bp, Artificial Sequence
  Synthetic
acggacgcgggcaagacactgaacaggatgttgcggatg

SEQ ID NO: 2614 - DNA, 36 bp, Artificial Sequence
  Synthetic
acgagtgcggctacggaatccgacacgctcgtccgt

SEQ ID NO: 2615 - DNA, 38 bp, Artificial Sequence
  Synthetic
cgcgggaatccggtaaccgaaacggcgggggtttctgt

SEQ ID NO: 2616 - DNA, 36 bp, Artificial Sequence
  Synthetic
acgcctacctgctgaccggcaaggatgcgggcgatg

SEQ ID NO: 2617 - DNA, 40 bp, Artificial Sequence
  Synthetic
gttccacacgctcaacaaagccttgctgacgctttcggtc

SEQ ID NO: 2618 - DNA, 39 bp, Artificial Sequence
  Synthetic
aagtcatgctccatgccgtcaaggtgtcagtgcgttgtg

SEQ ID NO: 2619 - DNA, 39 bp, Artificial Sequence
  Synthetic
tggctgcggtacacaatgccgcagcccgcatgtttttcc

SEQ ID NO: 2620 - DNA, 39 bp, Artificial Sequence
  Synthetic
gcatcgccaaccgcctgttgacgccgttgtttttcacgt

SEQ ID NO: 2621 - DNA, 42 bp, Artificial Sequence
  Synthetic
gcgcaccttatcgccgaacaaacgaaacgttttttgcagcgg

SEQ ID NO: 2622 - DNA, 37 bp, Artificial Sequence
  Synthetic
agctgatgcggcagatggtgcagacgcgttcggcaac

SEQ ID NO: 2623 - DNA, 37 bp, Artificial Sequence
  Synthetic
ccttcatcgcccgatacggcgcttcggcgacaacagc

SEQ ID NO: 2624 - DNA, 45 bp, Artificial Sequence
  Synthetic
cgaatgctgcaaatttgtttgatgagccgtattgtttcatcatct

SEQ ID NO: 2625 - DNA, 40 bp, Artificial Sequence
  Synthetic
ccaagccaaaccggtaacctgtcgcttcgattacggcgtt

SEQ ID NO: 2626 - DNA, 39 bp, Artificial Sequence
  Synthetic
gcgtgggtcattttggcgttgttggacatcgcgcattgg

SEQ ID NO: 2627 - DNA, 41 bp, Artificial Sequence
  Synthetic
atgaccaaggacaaaatggacttgtaggggaggttgttctg

SEQ ID NO: 2628 - DNA, 43 bp, Artificial Sequence
  Synthetic
cgccaagcgtaaaccattcattatcggataacatctccttcaa

SEQ ID NO: 2629 - DNA, 47 bp, Artificial Sequence
  Synthetic
gctttggttccttcacatgtcagaagtaatcattaaattcggatccg

SEQ ID NO: 2630 - DNA, 42 bp, Artificial Sequence
  Synthetic
acacggtgcttgatacctttcaacaaatgtgggtgacaatcg

SEQ ID NO: 2631 - DNA, 40 bp, Artificial Sequence
  Synthetic
ggactactgtggctaccgtaaattgggtatctaggccact

SEQ ID NO: 2632 - DNA, 47 bp, Artificial Sequence
  Synthetic
ctgaatttttcagttgcctcacctttgaaaccacttctgatttacct

SEQ ID NO: 2633 - DNA, 45 bp, Artificial Sequence
  Synthetic
ttgtctgtttgggtgtatgaatcatcctgattcatttttctctgg

SEQ ID NO: 2634 - DNA, 44 bp, Artificial Sequence
  Synthetic
gccaaagtaaatggtactaaagctgctccaaagtaatcggttcg

SEQ ID NO: 2635 - DNA, 40 bp, Artificial Sequence
  Synthetic
accgcccggacagcttttgatacacgccaaatcgcaaggt

SEQ ID NO: 2636 - DNA, 38 bp, Artificial Sequence
  Synthetic
cgtggaagaaggcggcaaggtacctccgcgctgatgca

SEQ ID NO: 2637 - DNA, 39 bp, Artificial Sequence
  Synthetic
ctttggcagtggcgatgttgccgtgcgttgggtcaaaga

SEQ ID NO: 2638 - DNA, 39 bp, Artificial Sequence
  Synthetic
ccgtcggcaatcagcggaacctgaccgccattcacaacg

SEQ ID NO: 2639 - DNA, 38 bp, Artificial Sequence
  Synthetic
cttggctcatcgcgcccaagtaccaaggccgctcgtac

SEQ ID NO: 2640 - DNA, 35 bp, Artificial Sequence
  Synthetic
cgttcgatgcgcccctgatcgtccgccaagatgcc

SEQ ID NO: 2641 - DNA, 36 bp, Artificial Sequence
  Synthetic
acgggtttgacgatgcccgggacgcgataccgacga

SEQ ID NO: 2642 - DNA, 38 bp, Artificial Sequence
  Synthetic
ccgatgaccttgcccgcttcgcctgaacatccccacca

SEQ ID NO: 2643 - DNA, 36 bp, Artificial Sequence
  Synthetic
cgcttcggtcaggcagttcagacctgcggctcgtgt

SEQ ID NO: 2644 - DNA, 38 bp, Artificial Sequence
  Synthetic
tcgtccacgcctgcggttgtcttattcggcaacatcgc

SEQ ID NO: 2645 - DNA, 37 bp, Artificial Sequence
  Synthetic
atcctcgccgtcctcgagccgggcggacttcatcgtg

SEQ ID NO: 2646 - DNA, 39 bp, Artificial Sequence
  Synthetic
atatgccggactcgcgccgggaaacgccgaaattttccg

SEQ ID NO: 2647 - DNA, 40 bp, Artificial Sequence
  Synthetic
acacggtgagggacgaagcctccgaaccgtctttctgtgc

SEQ ID NO: 2648 - DNA, 39 bp, Artificial Sequence
  Synthetic
ttgtgcggacgcgtggtcgatgtccaacaagaaatgcgc

SEQ ID NO: 2649 - DNA, 41 bp, Artificial Sequence
  Synthetic
ccggacagatattgccggtgtacatcggatgctcttccaga

SEQ ID NO: 2650 - DNA, 35 bp, Artificial Sequence
  Synthetic
agccgtggtcgaagccgatgtccaactcgagggcg

SEQ ID NO: 2651 - DNA, 41 bp, Artificial Sequence
  Synthetic
gcaattccaccatccccaccgggtctgaccgtctttgaagg

SEQ ID NO: 2652 - DNA, 36 bp, Artificial Sequence
  Synthetic
acctaccgccgccgcaatcgacaaacgtgccttccg

SEQ ID NO: 2653 - DNA, 38 bp, Artificial Sequence
  Synthetic
tatcggcatcaggcagcagctccaaatcaaacgcgccc

SEQ ID NO: 2654 - DNA, 37 bp, Artificial Sequence
  Synthetic
ggcggcatcgaaggcttcgcgtctgaacaccctcccg

SEQ ID NO: 2655 - DNA, 37 bp, Artificial Sequence
  Synthetic
gctgcgtgaggactcggtcgcatcgcttttgccgccg

SEQ ID NO: 2656 - DNA, 37 bp, Artificial Sequence
  Synthetic
caaaccgcaaaccgtccgcagcacggacagggatcgt

SEQ ID NO: 2657 - DNA, 38 bp, Artificial Sequence
  Synthetic
aggacggggtgctgaaacaccgaccaaccgaccgattc

SEQ ID NO: 2658 - DNA, 36 bp, Artificial Sequence
  Synthetic
tctgttcattgtcccgcgccggcgcaacggccttac

SEQ ID NO: 2659 - DNA, 41 bp, Artificial Sequence
  Synthetic
gcgtgcggattgaaatgcatctgctttggcactgaaaagcg

SEQ ID NO: 2660 - DNA, 39 bp, Artificial Sequence
  Synthetic
ggtatccgaacacctgccgactcgcctcgggattgaaca

SEQ ID NO: 2661 - DNA, 41 bp, Artificial Sequence
  Synthetic
tggttttgtctgcctatgccgtctatctgaagtccgagcgc

SEQ ID NO: 2662 - DNA, 40 bp, Artificial Sequence
  Synthetic
tgcgagaattggcggaggaaaaaaactgtacagcaggcgc

SEQ ID NO: 2663 - DNA, 39 bp, Artificial Sequence
  Synthetic
gcgcatcgtcatccggcatttttcgtcatccgttaccgc

SEQ ID NO: 2664 - DNA, 40 bp, Artificial Sequence
  Synthetic
gcctcgctgccttcgagattcctactggtacatcgacacg

SEQ ID NO: 2665 - DNA, 38 bp, Artificial Sequence
  Synthetic
acgacggacagcaaaacgcccccgaacacctgcaacaa

SEQ ID NO: 2666 - DNA, 40 bp, Artificial Sequence
  Synthetic
aaagccgcgagtggtcatggaaaaccgttcgttacctccg

SEQ ID NO: 2667 - DNA, 41 bp, Artificial Sequence
  Synthetic
gttcagacggcattttgtatggagcgacaaataccccgttt

SEQ ID NO: 2668 - DNA, 39 bp, Artificial Sequence
  Synthetic
tcttcgaggcgttcgcgggtcgtttatgctgatccctcg

SEQ ID NO: 2669 - DNA, 42 bp, Artificial Sequence
  Synthetic
cgggtaatctttccgaaaccgtttcaatatagccaaggggat

SEQ ID NO: 2670 - DNA, 39 bp, Artificial Sequence
  Synthetic
agcctgctttgcgtatccacggcgactgcgtgtccattg

SEQ ID NO: 2671 - DNA, 40 bp, Artificial Sequence
  Synthetic
aggtattcgagataggcgcgggtcgtcaacagcgtcgtcg

SEQ ID NO: 2672 - DNA, 36 bp, Artificial Sequence
  Synthetic
acgaatcgccgtcttgcgccacgcgctgaaggaggt

SEQ ID NO: 2673 - DNA, 35 bp, Artificial Sequence
  Synthetic
acccccaagccgcattggattgccgggaaacacgc

SEQ ID NO: 2674 - DNA, 38 bp, Artificial Sequence
  Synthetic
tttgccgtcttcgatgcccaactgcccaaaagcgtacc

SEQ ID NO: 2675 - DNA, 38 bp, Artificial Sequence
  Synthetic
ttgccgaagccagatcgcacgttctttggcggcttcgt

SEQ ID NO: 2676 - DNA, 39 bp, Artificial Sequence
  Synthetic
tcgaccaaatcgccgatggggcggcgattatcatctgca

SEQ ID NO: 2677 - DNA, 37 bp, Artificial Sequence
  Synthetic
tcctttcgggcgcgagactaaaatcggtgcggacgtg

SEQ ID NO: 2678 - DNA, 37 bp, Artificial Sequence
  Synthetic
tccgcatcagccacatcggatgagtccgaggctgtgg

SEQ ID NO: 2679 - DNA, 38 bp, Artificial Sequence
  Synthetic
ccgataccacacccgaatacgcgccattgcaggcggtt

SEQ ID NO: 2680 - DNA, 34 bp, Artificial Sequence
  Synthetic
tgggcaagccattccgccttgccgatgttgccgc

SEQ ID NO: 2681 - DNA, 34 bp, Artificial Sequence
  Synthetic
cctcaaccgccgcatgcacgagtatggtggcgcg

SEQ ID NO: 2682 - DNA, 40 bp, Artificial Sequence
  Synthetic
ccgctgattgcaccgctcattggtgttccaaagcagtacc

SEQ ID NO: 2683 - DNA, 41 bp, Artificial Sequence
  Synthetic
caccgtaagcgagcgtcaacttgtattcctgatttccggcc

SEQ ID NO: 2684 - DNA, 43 bp, Artificial Sequence
  Synthetic
ggtactgcttcctttgccggctttgttatcgacttcaatttgg

SEQ ID NO: 2685 - DNA, 38 bp, Artificial Sequence
  Synthetic
ccttcggcgtgcatttggacagcgccgcataacctctt

SEQ ID NO: 2686 - DNA, 41 bp, Artificial Sequence
  Synthetic
cgatgtttgggcaaagtggctgagcagtagggtcatcaggc

SEQ ID NO: 2687 - DNA, 35 bp, Artificial Sequence
  Synthetic
tcaggtgcgcgctcatcgggacagccagcgcatcg

SEQ ID NO: 2688 - DNA, 37 bp, Artificial Sequence
  Synthetic
acatcaatgccaagccgggctcgccctgatagccgtc

SEQ ID NO: 2689 - DNA, 37 bp, Artificial Sequence
  Synthetic
tcacccacgccgtgctgtcgatatgggcggcgagtcc

SEQ ID NO: 2690 - DNA, 34 bp, Artificial Sequence
  Synthetic
tccgcgccggctttttcgggggcgaacaacaccg

SEQ ID NO: 2691 - DNA, 36 bp, Artificial Sequence
  Synthetic
gcaaagagtttcggggcggctgctctgcggcggaca

SEQ ID NO: 2692 - DNA, 39 bp, Artificial Sequence
  Synthetic
cggatatttctgcctgcccgttgaacccgtataccaacc

SEQ ID NO: 2693 - DNA, 39 bp, Artificial Sequence
  Synthetic
ccgtctggttgcgttggcgcggtagctaagacgacgtcc

SEQ ID NO: 2694 - DNA, 37 bp, Artificial Sequence
  Synthetic
cgggaactgggtgtgggaaatcatttcgcgcgcaccc

SEQ ID NO: 2695 - DNA, 38 bp, Artificial Sequence
  Synthetic
aaagtgcgtcaaggcagagtctacctcttcgcgacgct

SEQ ID NO: 2696 - DNA, 39 bp, Artificial Sequence
  Synthetic
aaatcccgtcccgcacgcgacgagcaaatgaaactggcg

SEQ ID NO: 2697 - DNA, 40 bp, Artificial Sequence
  Synthetic
tgcgccccctcatgattgagcggaatcgtacaggaagacg

SEQ ID NO: 2698 - DNA, 34 bp, Artificial Sequence
  Synthetic
tgccgcgcacgatgcttgcgcgtggcaggaacac

SEQ ID NO: 2699 - DNA, 34 bp, Artificial Sequence
  Synthetic
acgtcggtcagggcaacgcaaaaggccgcgctcg

SEQ ID NO: 2700 - DNA, 40 bp, Artificial Sequence
  Synthetic
atggttttgcccggcgagtcgaaactggtcgaatgcaacg

SEQ ID NO: 2701 - DNA, 40 bp, Artificial Sequence
  Synthetic
gggcgaggaatagtcgatgacggatgcgcgtttcggcata

SEQ ID NO: 2702 - DNA, 41 bp, Artificial Sequence
  Synthetic
cgtagaagcggctgaacagggtcgtatccgcactacctcgc

SEQ ID NO: 2703 - DNA, 38 bp, Artificial Sequence
  Synthetic
ggtcagcagtgccaaaacccaaggctgctgctgtccct

SEQ ID NO: 2704 - DNA, 38 bp, Artificial Sequence
  Synthetic
aaacggcatattcgcccgcgtttcgcaccctcttccgt

SEQ ID NO: 2705 - DNA, 41 bp, Artificial Sequence
  Synthetic
cgtacccgaaaacgaatacatcgccaaggcttcgatgaaga

SEQ ID NO: 2706 - DNA, 35 bp, Artificial Sequence
  Synthetic
ggtttggcggcggaaaccgtcagacggcaggcagc

SEQ ID NO: 2707 - DNA, 43 bp, Artificial Sequence
  Synthetic
gcatcgtattgactgcctttcaaccgatttgcacaaattaacc

SEQ ID NO: 2708 - DNA, 41 bp, Artificial Sequence
  Synthetic
ccaattcgtgcgtgtcttcaatttcggatttaattgacccg

SEQ ID NO: 2709 - DNA, 38 bp, Artificial Sequence
  Synthetic
aaccgaagtcaaaccgccgggcgatgaagcgtgggatt

SEQ ID NO: 2710 - DNA, 45 bp, Artificial Sequence
  Synthetic
cacagggtcaaaatacagttcagtctaccattgatattgtgtgct

SEQ ID NO: 2711 - DNA, 41 bp, Artificial Sequence
  Synthetic
ggacagtttggcagacggtgtgaatttgggcaaagaccccg

SEQ ID NO: 2712 - DNA, 45 bp, Artificial Sequence
  Synthetic
gtgccaccgtcttttttgtgatctttgattgataatggtgaaacg

SEQ ID NO: 2713 - DNA, 41 bp, Artificial Sequence
  Synthetic
tcgggcttttggtcattttcagaaacaattactggcgtgtc

SEQ ID NO: 2714 - DNA, 39 bp, Artificial Sequence
  Synthetic
ccgtcttggttttccagtgcaaaagggatacgcaaccat

SEQ ID NO: 2715 - DNA, 38 bp, Artificial Sequence
  Synthetic
tcgaattgcagcgtgaatgcgccgccgtactgctggct

SEQ ID NO: 2716 - DNA, 35 bp, Artificial Sequence
  Synthetic
tcggtggtccgctcggaagacaccgacgctgacct

SEQ ID NO: 2717 - DNA, 39 bp, Artificial Sequence
  Synthetic
atccattccctctcccgtggaatatttccgttgccgtcc

SEQ ID NO: 2718 - DNA, 43 bp, Artificial Sequence
  Synthetic
ctcaaaaaataccagcccgagagtatctgccagttttccttgt

SEQ ID NO: 2719 - DNA, 39 bp, Artificial Sequence
  Synthetic
gcgcgttgagatagacggcgagccgaaatgcgtaccggc

SEQ ID NO: 2720 - DNA, 37 bp, Artificial Sequence
  Synthetic
gcggagaactgtttgaccgcgggctcgcccgaatcca

SEQ ID NO: 2721 - DNA, 42 bp, Artificial Sequence
  Synthetic
acgccgtctgaaaaaacctttttgttttgcagtaaatcgaga

SEQ ID NO: 2722 - DNA, 39 bp, Artificial Sequence
  Synthetic
gccatgcgcccaaacagatgttgtcctttgtaagcggcg

SEQ ID NO: 2723 - DNA, 42 bp, Artificial Sequence
  Synthetic
gcgcctgctgcttaagatatgcaagcagtcgaaaatcaggcg

SEQ ID NO: 2724 - DNA, 39 bp, Artificial Sequence
  Synthetic
tttccagtcgccgccgtctaaggtcgaaatcgccaaacg

SEQ ID NO: 2725 - DNA, 40 bp, Artificial Sequence
  Synthetic
aaacacccgcttcaaaacccactcggggaatcagaagcgg

SEQ ID NO: 2726 - DNA, 37 bp, Artificial Sequence
  Synthetic
tttgaccgcgccgacacgtgacgaaagaggcggaaca

SEQ ID NO: 2727 - DNA, 38 bp, Artificial Sequence
  Synthetic
aaacggcggtcgattttgtcgccgtgtcaagatggaaa

SEQ ID NO: 2728 - DNA, 34 bp, Artificial Sequence
  Synthetic
tgccgcccgtgcaaactgtgcagacggcggaaca

SEQ ID NO: 2729 - DNA, 40 bp, Artificial Sequence
  Synthetic
acgaaccgttgggctacatcaagtcgagaccgcctgtttc

SEQ ID NO: 2730 - DNA, 42 bp, Artificial Sequence
  Synthetic
tcttcgccgtaaattaccgccaaatcggcgagatttccatcg

SEQ ID NO: 2731 - DNA, 38 bp, Artificial Sequence
  Synthetic
ccgaacttgctgtccactccgcgtaccacgctgctgac

SEQ ID NO: 2732 - DNA, 39 bp, Artificial Sequence
  Synthetic
ggaatgtgccgctgccgaaccgtcctattatgtccgtcg

SEQ ID NO: 2733 - DNA, 39 bp, Artificial Sequence
  Synthetic
cctgttgggtttgcgcgatgacgtatcggacgggttgga

SEQ ID NO: 2734 - DNA, 38 bp, Artificial Sequence
  Synthetic
tcttgatgggcgtcttgcgtatgtgctcctggcgcaga

SEQ ID NO: 2735 - DNA, 38 bp, Artificial Sequence
  Synthetic
atcagaagcggtagcgcacgacgcttggaaaacacccg

SEQ ID NO: 2736 - DNA, 42 bp, Artificial Sequence
  Synthetic
ccgataagtttccgtgcggacaatctcgaaacccgtcattcc

SEQ ID NO: 2737 - DNA, 37 bp, Artificial Sequence
  Synthetic
ctcttgtcgtgcggacggtttgcccgcctgagcaaca

SEQ ID NO: 2738 - DNA, 39 bp, Artificial Sequence
  Synthetic
aaacgatacggcaagcgcgacgaagaaaaccacctgcgt

SEQ ID NO: 2739 - DNA, 36 bp, Artificial Sequence
  Synthetic
cctgtcaagcccgtgtgcagggaagctgcccgaagc

SEQ ID NO: 2740 - DNA, 38 bp, Artificial Sequence
  Synthetic
ggcggatgatacggaggctttggccgccgtttcccgtt

SEQ ID NO: 2741 - DNA, 39 bp, Artificial Sequence
  Synthetic
gcgggggtgcgaaggaaataaggaaccaccgtatccaca

SEQ ID NO: 2742 - DNA, 36 bp, Artificial Sequence
  Synthetic
gcgcgtttccccgttgacggcgcgataatcggcagg

SEQ ID NO: 2743 - DNA, 36 bp, Artificial Sequence
  Synthetic
tcggggataaggcgggcgagacgtccagcggcgtca

SEQ ID NO: 2744 - DNA, 39 bp, Artificial Sequence
  Synthetic
gcgacgcggctttcgaacaggccgcatagtcaaaatgcc

SEQ ID NO: 2745 - DNA, 36 bp, Artificial Sequence
  Synthetic
ggcttatccggtgatggcggccgcagcaattcccgc

SEQ ID NO: 2746 - DNA, 41 bp, Artificial Sequence
  Synthetic
cccgtgatgaagtcccgggattccctcataaaaccgctgcc

SEQ ID NO: 2747 - DNA, 38 bp, Artificial Sequence
  Synthetic
acgagctgggcggtgtgtaaccaccaccagataatcgc

SEQ ID NO: 2748 - DNA, 39 bp, Artificial Sequence
  Synthetic
gcggttacggaggcggacaatcgcatcctcctccttcaa

SEQ ID NO: 2749 - DNA, 40 bp, Artificial Sequence
  Synthetic
ctgttgtcgcagcgtgtggaggccaccagcgtgattttgc

SEQ ID NO: 2750 - DNA, 34 bp, Artificial Sequence
  Synthetic
ttgcggaatcggcgggcagaatccgccgccgcat

SEQ ID NO: 2751 - DNA, 39 bp, Artificial Sequence
  Synthetic
gggctgtacgcgcttaccgtaagcctgtccaacacatcc

SEQ ID NO: 2752 - DNA, 38 bp, Artificial Sequence
  Synthetic
acgagaagggggcggctttcaaaccccaccgcagaatg

SEQ ID NO: 2753 - DNA, 37 bp, Artificial Sequence
  Synthetic
accaactcctaccgcagccagcggcagggatttgacc

SEQ ID NO: 2754 - DNA, 38 bp, Artificial Sequence
  Synthetic
gcggaagtatggtacaggcggtcaccgtgcgccctgtt

SEQ ID NO: 2755 - DNA, 39 bp, Artificial Sequence
  Synthetic
gggcaatgcacgccgaacacaacacggttgtttcagggt

SEQ ID NO: 2756 - DNA, 39 bp, Artificial Sequence
  Synthetic
gccgcctgcccgatattggggtatcacgcgcattcccct

SEQ ID NO: 2757 - DNA, 38 bp, Artificial Sequence
  Synthetic
atcgggcgttcgggcatcacggcgtagttttcaatccg

SEQ ID NO: 2758 - DNA, 39 bp, Artificial Sequence
  Synthetic
cggcctgtaaattccgcgtacgtcaacggcgcggattcg

SEQ ID NO: 2759 - DNA, 35 bp, Artificial Sequence
  Synthetic
ttacggcccggaccaacgccgccggccgatgatga

SEQ ID NO: 2760 - DNA, 39 bp, Artificial Sequence
  Synthetic
gcggtccgcagtcgcattttccactccgaatgtctgacg

SEQ ID NO: 2761 - DNA, 36 bp, Artificial Sequence
  Synthetic
cgaagtatcgcccgccgaaacgtgccggggttctca

SEQ ID NO: 2762 - DNA, 46 bp, Artificial Sequence
  Synthetic
aggttatccaaaaggtttacagcctatactggaatttctgcgtttg

SEQ ID NO: 2763 - DNA, 37 bp, Artificial Sequence
  Synthetic
aacagcctgctgtcgcccgtttggtggcggaggaaac

SEQ ID NO: 2764 - DNA, 39 bp, Artificial Sequence
  Synthetic
atacgcggcggcaaagaacatggtcaggaacaatgcctg

SEQ ID NO: 2765 - DNA, 41 bp, Artificial Sequence
  Synthetic
cggctgttgaccaaaatctgcgataaggcgtggcagaagga

SEQ ID NO: 2766 - DNA, 38 bp, Artificial Sequence
  Synthetic
cgcgcagggtgttgccttagagatggttaacgaaggcg

SEQ ID NO: 2767 - DNA, 38 bp, Artificial Sequence
  Synthetic
tggtggacaattccgcgccgccacatcgacatccaaga

SEQ ID NO: 2768 - DNA, 40 bp, Artificial Sequence
  Synthetic
acgtaaaacctgcaatgcgccagctcgttaccgaacagct

SEQ ID NO: 2769 - DNA, 40 bp, Artificial Sequence
  Synthetic
gtcgccttcgatgatgacggttgccgtttaccgcaacaac

SEQ ID NO: 2770 - DNA, 39 bp, Artificial Sequence
  Synthetic
cgatggttggcaaccgtgcggtatccatcccgattcggc

SEQ ID NO: 2771 - DNA, 40 bp, Artificial Sequence
  Synthetic
attaatacgccccagccgcccttacctctacacggacggc

SEQ ID NO: 2772 - DNA, 43 bp, Artificial Sequence
  Synthetic
ataggcagaatgaccgcagcgatgtttcaaatttcgaagatgt

SEQ ID NO: 2773 - DNA, 39 bp, Artificial Sequence
  Synthetic
accggagtggacgaacctcttagctacccggctatgcaa

SEQ ID NO: 2774 - DNA, 34 bp, Artificial Sequence
  Synthetic
cgcaagctgtttcggcggcttttcctgccgcgcc

SEQ ID NO: 2775 - DNA, 36 bp, Artificial Sequence
  Synthetic
cggtcgaggaggcaatccgtaacgctcaaaccgccg

SEQ ID NO: 2776 - DNA, 36 bp, Artificial Sequence
  Synthetic
gcaccttcgtcgcggatttcggccatcgcgccgttt

SEQ ID NO: 2777 - DNA, 37 bp, Artificial Sequence
  Synthetic
ttggtcgccgagctgccagccctgaaatcgaacgccg

SEQ ID NO: 2778 - DNA, 39 bp, Artificial Sequence
  Synthetic
accatttggtcgcggtgggcttcctgattaccatcggcg

SEQ ID NO: 2779 - DNA, 40 bp, Artificial Sequence
  Synthetic
cgatttgcccgtttacgccctgtcaacagtggcgcgaaac

SEQ ID NO: 2780 - DNA, 38 bp, Artificial Sequence
  Synthetic
acaggatggatttcgcccagccgcggcggcttcagcta

SEQ ID NO: 2781 - DNA, 35 bp, Artificial Sequence
  Synthetic
ggacgacttcgcgttccgcggcagcgttacgggca

SEQ ID NO: 2782 - DNA, 40 bp, Artificial Sequence
  Synthetic
acgagggcatgacgaccgtgggtctggtcggacagattgc

SEQ ID NO: 2783 - DNA, 39 bp, Artificial Sequence
  Synthetic
gctacggcaatcagtgtcaggttctacaccgcccaagca

SEQ ID NO: 2784 - DNA, 37 bp, Artificial Sequence
  Synthetic
atgccgtgcagggcttgggggcacgttctaccaaggc

SEQ ID NO: 2785 - DNA, 38 bp, Artificial Sequence
  Synthetic
cggcccattcgtcttggttgatcagctcgcccaagcca

SEQ ID NO: 2786 - DNA, 35 bp, Artificial Sequence
  Synthetic
cgttgcgcggcagcttgtcctcacccaagccgtct

SEQ ID NO: 2787 - DNA, 38 bp, Artificial Sequence
  Synthetic
ccgggtgcaagcagggtttcggcaaacacccattgacc

SEQ ID NO: 2788 - DNA, 43 bp, Artificial Sequence
  Synthetic
gaggcaaccggcaattattatgacgtaaacgctgtaatactgc

SEQ ID NO: 2789 - DNA, 42 bp, Artificial Sequence
  Synthetic
cgggcgttgtgtgttttgttgtcaatgactaccaccacgacg

SEQ ID NO: 2790 - DNA, 40 bp, Artificial Sequence
  Synthetic
gcaggttgtcggctttgacgtaaactaccgccgcaatacg

SEQ ID NO: 2791 - DNA, 36 bp, Artificial Sequence
  Synthetic
cgtacatcacgccggtcaggcgaagcccagcgcatc

SEQ ID NO: 2792 - DNA, 36 bp, Artificial Sequence
  Synthetic
cttggcaggcttcgcagcgacgcggctacaacgtcg

SEQ ID NO: 2793 - DNA, 35 bp, Artificial Sequence
  Synthetic
aaaggcagacgcggtcgccccgttgcgtttcggaa

SEQ ID NO: 2794 - DNA, 38 bp, Artificial Sequence
  Synthetic
tgggcgcgcaagaagtcggctgccgtagattttgacgg

SEQ ID NO: 2795 - DNA, 38 bp, Artificial Sequence
  Synthetic
acgtgcagcaggcggatttgttcgggtttttgacggcg

SEQ ID NO: 2796 - DNA, 38 bp, Artificial Sequence
  Synthetic
gcggtgtggcgcaggaattgtcgggagccagagtctct

SEQ ID NO: 2797 - DNA, 39 bp, Artificial Sequence
  Synthetic
acatcggcagcatcctcgaaagcgttgcgccataatggt

SEQ ID NO: 2798 - DNA, 35 bp, Artificial Sequence
  Synthetic
acggtttgcaggcagtcgcgcggcggctttgttca

SEQ ID NO: 2799 - DNA, 36 bp, Artificial Sequence
  Synthetic
ccgatgacccagaagccgaccagctgacgggcgtgt

SEQ ID NO: 2800 - DNA, 35 bp, Artificial Sequence
  Synthetic
aactcgccttcgcctgcggcgcagcaaaccgccga

SEQ ID NO: 2801 - DNA, 42 bp, Artificial Sequence
  Synthetic
cggggaaggaaataccgatgggtgcctgatacagtcggtaca

SEQ ID NO: 2802 - DNA, 38 bp, Artificial Sequence
  Synthetic
tccattttggtcggcggcgtttggaaggcaagagcgac

SEQ ID NO: 2803 - DNA, 39 bp, Artificial Sequence
  Synthetic
ggcgcggatgcacttgaagaagtgccgcctgcaaacctc

SEQ ID NO: 2804 - DNA, 37 bp, Artificial Sequence
  Synthetic
ccagtatttcagacggccccgcccaaacgccgcgtgt

SEQ ID NO: 2805 - DNA, 38 bp, Artificial Sequence
  Synthetic
tttggcaaaaccgggcggaacgcaacgacatcctcgcc

SEQ ID NO: 2806 - DNA, 38 bp, Artificial Sequence
  Synthetic
cgggcaggttgagggtgaaatcccgcgctgtacggcat

SEQ ID NO: 2807 - DNA, 38 bp, Artificial Sequence
  Synthetic
cctgccggattgcttgtccgatcgacgaccaccacacc

SEQ ID NO: 2808 - DNA, 38 bp, Artificial Sequence
  Synthetic
cgacttcgatgccgccgtcttagggcaaatgggtctgc

SEQ ID NO: 2809 - DNA, 38 bp, Artificial Sequence
  Synthetic
tgccttggaacatccccatcatcagtacgggaatgagc

SEQ ID NO: 2810 - DNA, 41 bp, Artificial Sequence
  Synthetic
ggaaaggtaaaacacgacgcgcttgaaagtgcgcgaactgt

SEQ ID NO: 2811 - DNA, 38 bp, Artificial Sequence
  Synthetic
cccaggtcttttgcgtcgtccgccaaagccgaactcgc

SEQ ID NO: 2812 - DNA, 42 bp, Artificial Sequence
  Synthetic
ggcgtattcgagataggcgcgtcccataccgattccaacacg

SEQ ID NO: 2813 - DNA, 41 bp, Artificial Sequence
  Synthetic
gcgggttgagggtggaaaagaagcgtgggcgttttacttgt

SEQ ID NO: 2814 - DNA, 42 bp, Artificial Sequence
  Synthetic
gcacggtcgatgtatctgaccgcgtagccggcttctatttcg

SEQ ID NO: 2815 - DNA, 39 bp, Artificial Sequence
  Synthetic
cggcaaggtgttcgccgaggccaaacggcaaaaaaacgc

SEQ ID NO: 2816 - DNA, 46 bp, Artificial Sequence
  Synthetic
cgggttcttgccatcaaatttaactaaacttttggtgctttttccg

SEQ ID NO: 2817 - DNA, 45 bp, Artificial Sequence
  Synthetic
agttcaaaggctacacgtcaaataaaagaaggttcaatatgtcgg

SEQ ID NO: 2818 - DNA, 36 bp, Artificial Sequence
  Synthetic
acaagtaatcccgcgtcccgcggctgtgcgtgaggt

SEQ ID NO: 2819 - DNA, 44 bp, Artificial Sequence
  Synthetic
ccgtccgttctaaaatttgaccaatcctgttttttgacgctgaa

SEQ ID NO: 2820 - DNA, 38 bp, Artificial Sequence
  Synthetic
ggttcgggctttcacaacggagcacatccgccacatcc

SEQ ID NO: 2821 - DNA, 38 bp, Artificial Sequence
  Synthetic
gacttggggcttctggctgccagcaggctgatggcaat

SEQ ID NO: 2822 - DNA, 35 bp, Artificial Sequence
  Synthetic
tatggcaatcggcgcctgccggcccagcaacacca

SEQ ID NO: 2823 - DNA, 39 bp, Artificial Sequence
  Synthetic
cggctcagggattcgacaatgtctcccgcaacaatgggc

SEQ ID NO: 2824 - DNA, 39 bp, Artificial Sequence
  Synthetic
ctcgccggacaattcattgctgggcacctgtatcggcgt

SEQ ID NO: 2825 - DNA, 36 bp, Artificial Sequence
  Synthetic
gctcgggcttttaccgcgtcaaacccaagccgcacc

SEQ ID NO: 2826 - DNA, 40 bp, Artificial Sequence
  Synthetic
acggctttttctttgggctcggaaaagccgaaaccgcacc

SEQ ID NO: 2827 - DNA, 38 bp, Artificial Sequence
  Synthetic
cggatatcgagctgcacagccgtgagttcgggcgggag

SEQ ID NO: 2828 - DNA, 40 bp, Artificial Sequence
  Synthetic
ccaccacacgccatgtcgaaaggaaaaccaacatgtccgc

SEQ ID NO: 2829 - DNA, 37 bp, Artificial Sequence
  Synthetic
tggttcgagggcaggctggacctgttcccgattggcg

SEQ ID NO: 2830 - DNA, 35 bp, Artificial Sequence
  Synthetic
tggcggcaaccttcggtaccagcgtgcagagccac

SEQ ID NO: 2831 - DNA, 39 bp, Artificial Sequence
  Synthetic
caatccctgcgtgcttcggggcgaagaaagccttgccaa

SEQ ID NO: 2832 - DNA, 40 bp, Artificial Sequence
  Synthetic
tccactgcttgccctcaacaagatggcggacggtataggc

SEQ ID NO: 2833 - DNA, 38 bp, Artificial Sequence
  Synthetic
tcgccagcttgcctgtccgcggagcatccaaatggcag

SEQ ID NO: 2834 - DNA, 38 bp, Artificial Sequence
  Synthetic
cccgttgcgtttcggaatgcccgtaaaggcagacgcgg

SEQ ID NO: 2835 - DNA, 40 bp, Artificial Sequence
  Synthetic
gttggaagtttgacgggggctcaccagaggttcgtccact

SEQ ID NO: 2836 - DNA, 43 bp, Artificial Sequence
  Synthetic
tccgttcaattgcttatttgttcaaaaagatgaagcggcaatg

SEQ ID NO: 2837 - DNA, 40 bp, Artificial Sequence
  Synthetic
ctgcctgcgggaatgtcgaaccaaacccaatgcttcaacc

SEQ ID NO: 2838 - DNA, 41 bp, Artificial Sequence
  Synthetic
acggacagatggatcggcatttgcggatccgggtttgatta

SEQ ID NO: 2839 - DNA, 39 bp, Artificial Sequence
  Synthetic
tatgcggcggcagggcttctttgccgaaaatatccccca

SEQ ID NO: 2840 - DNA, 36 bp, Artificial Sequence
  Synthetic
tacagttccgcgccgcactgcctgtatttccgcgac

SEQ ID NO: 2841 - DNA, 41 bp, Artificial Sequence
  Synthetic
cggcttgaccacccagaactgaactcaatgcggacgtatcc

SEQ ID NO: 2842 - DNA, 40 bp, Artificial Sequence
  Synthetic
attgctcaacgccgcttcgacgcacaaaaccatgtttggg

SEQ ID NO: 2843 - DNA, 37 bp, Artificial Sequence
  Synthetic
tgctcttctcgccgacagcgcgcgccatttgagtttc

SEQ ID NO: 2844 - DNA, 38 bp, Artificial Sequence
  Synthetic
ggcggtcgcttcgtccaactgcatcgatttgaccggtt

SEQ ID NO: 2845 - DNA, 37 bp, Artificial Sequence
  Synthetic
cgctgtgggtgtcggtcaggcttgaaagcccacctcg

SEQ ID NO: 2846 - DNA, 38 bp, Artificial Sequence
  Synthetic
ggttcgatcatcagcgtgccggactacggcttccacgc

SEQ ID NO: 2847 - DNA, 34 bp, Artificial Sequence
  Synthetic
cgcgagagtacggatgcgctcaacgcgccgcaca

SEQ ID NO: 2848 - DNA, 39 bp, Artificial Sequence
  Synthetic
agacaagggtgcggcagcccctgacaggttgcttcgaag

SEQ ID NO: 2849 - DNA, 35 bp, Artificial Sequence
  Synthetic
gcgcagggacgcatcgttacccgactttgagcgcg

SEQ ID NO: 2850 - DNA, 39 bp, Artificial Sequence
  Synthetic
ccacacaagccatcctgcccgtcggggtggacttcaaag

SEQ ID NO: 2851 - DNA, 39 bp, Artificial Sequence
  Synthetic
agcgcacacccaaacctggatcaggtcggtcagatagct

SEQ ID NO: 2852 - DNA, 40 bp, Artificial Sequence
  Synthetic
aagtcatcgacaacgcggcgttgcacgtcgatttcagtgg

SEQ ID NO: 2853 - DNA, 38 bp, Artificial Sequence
  Synthetic
tgggcttgaaagtcgtgcgcaccgtatgttccgcaacc

SEQ ID NO: 2854 - DNA, 39 bp, Artificial Sequence
  Synthetic
gcctgtaccgttgccgtcatggcggggttcagttcgatg

SEQ ID NO: 2855 - DNA, 39 bp, Artificial Sequence
  Synthetic
gcccaagcccttatcctgcaaagcggatgaagccttcgc

SEQ ID NO: 2856 - DNA, 37 bp, Artificial Sequence
  Synthetic
tgggacgaaacccggggcttgaaacatctgccgcgtc

SEQ ID NO: 2857 - DNA, 39 bp, Artificial Sequence
  Synthetic
ggcggacgcgttgaaggtggcaaaaaccaccgtttaccg

SEQ ID NO: 2858 - DNA, 38 bp, Artificial Sequence
  Synthetic
aaggcgtggctttcggcgccatactgacggttctgcag

SEQ ID NO: 2859 - DNA, 35 bp, Artificial Sequence
  Synthetic
agccgtgcgctatacccgccggcaagcgtcccgtt

SEQ ID NO: 2860 - DNA, 38 bp, Artificial Sequence
  Synthetic
tgaatggttgtggcagcccggttgacggtgcggacatt

SEQ ID NO: 2861 - DNA, 36 bp, Artificial Sequence
  Synthetic
cggcttgggacattgcctccccgtcgtgcgaggcat

SEQ ID NO: 2862 - DNA, 39 bp, Artificial Sequence
  Synthetic
gcggtcggacacgtcaaactggaagaaatccgcgctttg

SEQ ID NO: 2863 - DNA, 34 bp, Artificial Sequence
  Synthetic
cccggtgccgtgcagattcattgcagcacgccgg

SEQ ID NO: 2864 - DNA, 35 bp, Artificial Sequence
  Synthetic
agccggggcggaagtttcccgttcgcgtggggcat

SEQ ID NO: 2865 - DNA, 41 bp, Artificial Sequence
  Synthetic
gcgcagacgttttctgacggcttcggcaaaaaagaaaccgc

SEQ ID NO: 2866 - DNA, 36 bp, Artificial Sequence
  Synthetic
gccaatatcggtgcggcgcgtaccgacgcttccggt

SEQ ID NO: 2867 - DNA, 38 bp, Artificial Sequence
  Synthetic
agcagcagctacaatgtcggaccacgcgcccgaacaga

SEQ ID NO: 2868 - DNA, 40 bp, Artificial Sequence
  Synthetic
cctcgaatggggcggacagtcaaaatcagggtttgcgagc

SEQ ID NO: 2869 - DNA, 38 bp, Artificial Sequence
  Synthetic
cgacatccgcaccgcattgggttcgggaagtcgctgac

SEQ ID NO: 2870 - DNA, 40 bp, Artificial Sequence
  Synthetic
gaccgaagaccaaggcttcgttcatcggtgcgctctttgg

SEQ ID NO: 2871 - DNA, 37 bp, Artificial Sequence
  Synthetic
ccgaaacctatatcggggcgcgatacgggcggcggtt

SEQ ID NO: 2872 - DNA, 39 bp, Artificial Sequence
  Synthetic
ccaaacatcccgccaaaggcctgatgagggcttcgagga

SEQ ID NO: 2873 - DNA, 41 bp, Artificial Sequence
  Synthetic
ccgcttcctcgacagcgaaagtactgcaaaaggtgatgccg

SEQ ID NO: 2874 - DNA, 41 bp, Artificial Sequence
  Synthetic
cgacggtcggagaatgggtggtccggcttcgaacaatctgt

SEQ ID NO: 2875 - DNA, 38 bp, Artificial Sequence
  Synthetic
cctggaagcaggcggtagacctgccacatcgggttgcc

SEQ ID NO: 2876 - DNA, 38 bp, Artificial Sequence
  Synthetic
gggcaacgtcatcgaagcggcctgcgtcagatcgggat

SEQ ID NO: 2877 - DNA, 38 bp, Artificial Sequence
  Synthetic
tttggggcggcaagttcgtgcggttcgacaccccattt

SEQ ID NO: 2878 - DNA, 39 bp, Artificial Sequence
  Synthetic
gccgctattccgacgaatggcctcaggcacgacatcacg

SEQ ID NO: 2879 - DNA, 38 bp, Artificial Sequence
  Synthetic
atgcggcaggtttgatggatggacttttctcccacgaa

SEQ ID NO: 2880 - DNA, 39 bp, Artificial Sequence
  Synthetic
gcgttttgctggcggatgtagaggctgggtcaaatccgg

SEQ ID NO: 2881 - DNA, 34 bp, Artificial Sequence
  Synthetic
tcgcgcaaaagcccggaggggcaagtgttcgccg

SEQ ID NO: 2882 - DNA, 37 bp, Artificial Sequence
  Synthetic
ccgaatacgccgacaccgacgtacggctgcggacggt

SEQ ID NO: 2883 - DNA, 36 bp, Artificial Sequence
  Synthetic
gggcaacataagcggcggacgttgtggtagccgccg

SEQ ID NO: 2884 - DNA, 40 bp, Artificial Sequence
  Synthetic
cgccgtctttgcctacacccatatcacgaagacggctcgg

SEQ ID NO: 2885 - DNA, 39 bp, Artificial Sequence
  Synthetic
accacggcaggttacggattgatgtcgaaaccgccgttg

SEQ ID NO: 2886 - DNA, 42 bp, Artificial Sequence
  Synthetic
gttccgctgattaaggccttgcattttccaacacctgcttgc

SEQ ID NO: 2887 - DNA, 38 bp, Artificial Sequence
  Synthetic
ccgaaccgtgcctgctgtaaccaccacgtcgtaatcgt

SEQ ID NO: 2888 - DNA, 35 bp, Artificial Sequence
  Synthetic
cgccgaagaacagtccggtggcgcatacacgtcgg

SEQ ID NO: 2889 - DNA, 40 bp, Artificial Sequence
  Synthetic
tggcaatgctgtcttcgcggaactacaccaaccgttctcc

SEQ ID NO: 2890 - DNA, 35 bp, Artificial Sequence
  Synthetic
ttgtccgcacgaaccgccgcgcgcttgccagccaa

SEQ ID NO: 2891 - DNA, 38 bp, Artificial Sequence
  Synthetic
gcgcgctttggcaaacgatatcggcaatttcctgctgg

SEQ ID NO: 2892 - DNA, 38 bp, Artificial Sequence
  Synthetic
tgcccgcgccgattttgggcaaacgcctcgatattggg

SEQ ID NO: 2893 - DNA, 42 bp, Artificial Sequence
  Synthetic
acagataacctgcggcggcaaatacgcaaacactacgtctgc

SEQ ID NO: 2894 - DNA, 36 bp, Artificial Sequence
  Synthetic
gccttgccgaacgcgaacggcgcggtgcaaatcttg

SEQ ID NO: 2895 - DNA, 36 bp, Artificial Sequence
  Synthetic
cgtgttgcacagccggatggcccaacatcgcgcgca

SEQ ID NO: 2896 - DNA, 35 bp, Artificial Sequence
  Synthetic
agcagcgcgtctccatcgcggctcgtcggcgaaga

SEQ ID NO: 2897 - DNA, 41 bp, Artificial Sequence
  Synthetic
cgtcgtcgccgtagacatcaagatacgcctttcaaacggct

SEQ ID NO: 2898 - DNA, 40 bp, Artificial Sequence
  Synthetic
cccttctgccttctggacgaagagcttgcagaaacgcgag

SEQ ID NO: 2899 - DNA, 38 bp, Artificial Sequence
  Synthetic
ccctgatcaacgccaaacgctacttcgagcgcgtccag

SEQ ID NO: 2900 - DNA, 39 bp, Artificial Sequence
  Synthetic
tggcggaagagcagaccgttagcgatgtcgtctgaaagc

SEQ ID NO: 2901 - DNA, 40 bp, Artificial Sequence
  Synthetic
gcaggcggcatggctttcagacctgtacgggcagggattt

SEQ ID NO: 2902 - DNA, 36 bp, Artificial Sequence
  Synthetic
agcaggaagccgccgacttttgccacagttgcggcg

SEQ ID NO: 2903 - DNA, 35 bp, Artificial Sequence
  Synthetic
cgaggcaaaccgcatccgctcggcatgggcaagct

SEQ ID NO: 2904 - DNA, 40 bp, Artificial Sequence
  Synthetic
ggcaaaactgcccgccacataatgggggcggtgtttaagc

SEQ ID NO: 2905 - DNA, 40 bp, Artificial Sequence
  Synthetic
ggcgatttgctgctgaatcggatcggtgcgttcttctccg

SEQ ID NO: 2906 - DNA, 38 bp, Artificial Sequence
  Synthetic
gccttcttcgacttggctgtcgtgcctgtccgacgacc

SEQ ID NO: 2907 - DNA, 38 bp, Artificial Sequence
  Synthetic
tgctctacctggccgggttttatgccaaaagccccgtc

SEQ ID NO: 2908 - DNA, 38 bp, Artificial Sequence
  Synthetic
cacttgcccgcttttttgcagctgggaacaagccgcca

SEQ ID NO: 2909 - DNA, 40 bp, Artificial Sequence
  Synthetic
gatgttttcggggaacacggctcgacaacacgctcgttct

SEQ ID NO: 2910 - DNA, 39 bp, Artificial Sequence
  Synthetic
cggtcatcagggcggtgtcttgaaaccctgaccctctgc

SEQ ID NO: 2911 - DNA, 37 bp, Artificial Sequence
  Synthetic
gtaggtctcggtgtcatcgccgcgtccagggtcagct

SEQ ID NO: 2912 - DNA, 38 bp, Artificial Sequence
  Synthetic
acgtgattgccgaacagggcacttcctgatcgcgcatc

SEQ ID NO: 2913 - DNA, 40 bp, Artificial Sequence
  Synthetic
aaagcaggtgccaaccgcttgggtttgtaccaacagtccg

SEQ ID NO: 2914 - DNA, 38 bp, Artificial Sequence
  Synthetic
acgccaccgacaccaccagtctacttcgcggttgaagg

SEQ ID NO: 2915 - DNA, 38 bp, Artificial Sequence
  Synthetic
ccgccgcgaaaaactggaaacaatggcggggaagtcgg

SEQ ID NO: 2916 - DNA, 38 bp, Artificial Sequence
  Synthetic
cggcgtatcgctcaaaatgccgcgcgtaggtcagttcc

SEQ ID NO: 2917 - DNA, 34 bp, Artificial Sequence
  Synthetic
tgccgccgcattgctgaccgcctaagccgatgcg

SEQ ID NO: 2918 - DNA, 37 bp, Artificial Sequence
  Synthetic
caaaccgaaagcgcgggcccgtacacgctccaaaccg

SEQ ID NO: 2919 - DNA, 43 bp, Artificial Sequence
  Synthetic
ggcacaccaaaaatcatggcttaacacagagtatgcaacttac

SEQ ID NO: 2920 - DNA, 43 bp, Artificial Sequence
  Synthetic
gctgctgattatctgccgtaaacagtatgacaatttgctgaac

SEQ ID NO: 2921 - DNA, 39 bp, Artificial Sequence
  Synthetic
cggtgtgccattggtagattttgctgattaccaccaaca

SEQ ID NO: 2922 - DNA, 41 bp, Artificial Sequence
  Synthetic
gtcccacaattcaaaaccgtcttttgggtcaaaatgggtgc

SEQ ID NO: 2923 - DNA, 44 bp, Artificial Sequence
  Synthetic
ggctgtttttcaggttgcttaattttgaaatgttcaacggcatt

SEQ ID NO: 2924 - DNA, 40 bp, Artificial Sequence
  Synthetic
tttgagcttgtcagcagccgactgaaaatgcgcctgctca

SEQ ID NO: 2925 - DNA, 44 bp, Artificial Sequence
  Synthetic
tgccaaacaccgacataatcatcttcttgttttgatgttggcag

SEQ ID NO: 2926 - DNA, 43 bp, Artificial Sequence
  Synthetic
cgcttgtttacgagttttcaaacaaactttagcgcgaaaccat

SEQ ID NO: 2927 - DNA, 38 bp, Artificial Sequence
  Synthetic
gccctgccacaaacagatttcctgcatttcccaaaagc

SEQ ID NO: 2928 - DNA, 42 bp, Artificial Sequence
  Synthetic
gtggcaatgaatggaatattgtcccaaccgcttgaaacactt

SEQ ID NO: 2929 - DNA, 42 bp, Artificial Sequence
  Synthetic
agactgttcccgataactcgccatacaggacataatgcctac

SEQ ID NO: 2930 - DNA, 47 bp, Artificial Sequence
  Synthetic
gccttaatccaacaaaaaatgacgagcatatccggcaaataatcttg

SEQ ID NO: 2931 - DNA, 39 bp, Artificial Sequence
  Synthetic
agcgcgttattgttcaacagcgtcgtcaaagcaggcaaa

SEQ ID NO: 2932 - DNA, 41 bp, Artificial Sequence
  Synthetic
gtcggtgtgattgccgccattacggcaataatcgacagcgc

SEQ ID NO: 2933 - DNA, 36 bp, Artificial Sequence
  Synthetic
tatcgacctgcgccgccctgcccgtagcgacttggt

SEQ ID NO: 2934 - DNA, 49 bp, Artificial Sequence
  Synthetic
cagaaatcggttattgacgaagtgagatagggagagaaataaatatcgt

SEQ ID NO: 2935 - DNA, 35 bp, Artificial Sequence
  Synthetic
tgcggtgatgtcggcagggcctgatcgaatggccg

SEQ ID NO: 2936 - DNA, 35 bp, Artificial Sequence
  Synthetic
ggcgcgtaccgttttggcagccggcacactgttcg

SEQ ID NO: 2937 - DNA, 35 bp, Artificial Sequence
  Synthetic
gcgtcggcgtggatggagagcgtgtcgccaaaggg

SEQ ID NO: 2938 - DNA, 41 bp, Artificial Sequence
  Synthetic
gcttctcttcggcaggattggagcacccgatatgccgtcta

SEQ ID NO: 2939 - DNA, 39 bp, Artificial Sequence
  Synthetic
aggtcgaggcgggcgaaacgccgagttcttctccaaact

SEQ ID NO: 2940 - DNA, 39 bp, Artificial Sequence
  Synthetic
cgacgcattgggcaagcccgatgccttgttcttccagcc

SEQ ID NO: 2941 - DNA, 40 bp, Artificial Sequence
  Synthetic
acgccgaacaaatcaggcagttcgaccaagcccaaatcgc

SEQ ID NO: 2942 - DNA, 38 bp, Artificial Sequence
  Synthetic
atggatgggcggatggcggcaacaccagctcgttcaca

SEQ ID NO: 2943 - DNA, 42 bp, Artificial Sequence
  Synthetic
gcggcaatcaagcatttcggacgaagcagtcgtctatggtcg

SEQ ID NO: 2944 - DNA, 35 bp, Artificial Sequence
  Synthetic
tgcccccgttttggctgccgaccaggccctgcgta

SEQ ID NO: 2945 - DNA, 40 bp, Artificial Sequence
  Synthetic
cgcaccggcattcacatctgttaagcaagcgaaaacggca

SEQ ID NO: 2946 - DNA, 38 bp, Artificial Sequence; identical to SEQ ID NO: 2734
  Synthetic

SEQ ID NO: 2947 - DNA, 41 bp, Artificial Sequence
  Synthetic
cggggaatcagaagcggtagcaaacacccgcttcaaaaccc

SEQ ID NO: 2948 - DNA, 36 bp, Artificial Sequence
  Synthetic
acgcggggtttgggcaacgggaatccggacctgtcc

SEQ ID NO: 2949 - DNA, 37 bp, Artificial Sequence
  Synthetic
cccaaagccgttcccgttgccaaccatacggacggcg

SEQ ID NO: 2950 - DNA, 42 bp, Artificial Sequence
  Synthetic
acacgccgtcgatttggtgatttgtcgatgacggtagtcgga

SEQ ID NO: 2951 - DNA, 35 bp, Artificial Sequence
  Synthetic
tttcccggcctgcccaacgccgctccggcatggtt

SEQ ID NO: 2952 - DNA, 36 bp, Artificial Sequence
  Synthetic
gaagtgcgcttcgggcatcccctgacattcggcggc

SEQ ID NO: 2953 - DNA, 35 bp, Artificial Sequence
  Synthetic
ccgattacaccgcctccagcgcgcgtaccggcaaa

SEQ ID NO: 2954 - DNA, 38 bp, Artificial Sequence
  Synthetic
tgcgtccgccggcgatttcattggatggcgagatgtgg

SEQ ID NO: 2955 - DNA, 42 bp, Artificial Sequence
  Synthetic
ccaaatgcctgacggtgcagtgcgcgggttggaagtattggt

SEQ ID NO: 2956 - DNA, 38 bp, Artificial Sequence
  Synthetic
tcgaatttttcggcgagggcgccggcgtcatgttggaa

SEQ ID NO: 2957 - DNA, 36 bp, Artificial Sequence
  Synthetic
gcggtttggaagcggaaaccatatcgggcaggcgca

SEQ ID NO: 2958 - DNA, 38 bp, Artificial Sequence
  Synthetic
cccgatacggttgaggtcgtccggcatggtcgccccaa

SEQ ID NO: 2959 - DNA, 38 bp, Artificial Sequence
  Synthetic
gcgacatcaagttgccaaacggcggggtggtgtccgta

SEQ ID NO: 2960 - DNA, 36 bp, Artificial Sequence
  Synthetic
tcgggcgcggagagtggttcagaaagccgcgtttgc

SEQ ID NO: 2961 - DNA, 34 bp, Artificial Sequence
  Synthetic
gatgcgccgcaaatccgcacgcagtcggtcaggt

SEQ ID NO: 2962 - DNA, 33 bp, Artificial Sequence
  Synthetic
aaaacggcgggcgcgtgcggcggttcacaatgt

SEQ ID NO: 2963 - DNA, 40 bp, Artificial Sequence
  Synthetic
ccgcaaacccacctcgtcaaaaatggcggtcagaatcagc

SEQ ID NO: 2964 - DNA, 40 bp, Artificial Sequence
  Synthetic
tgagtttgaacgatgtggcggacgttcagacggcctttga

SEQ ID NO: 2965 - DNA, 41 bp, Artificial Sequence
  Synthetic
gggcgcggataaagtcgtcgtacgttgatgatgtcgtgcgg

SEQ ID NO: 2966 - DNA, 37 bp, Artificial Sequence
  Synthetic
ccgtcaacaaggcgcaacagcgactggtcaaggccgt

SEQ ID NO: 2967 - DNA, 38 bp, Artificial Sequence
  Synthetic
agcgaacagcggcgcaacgtttgattgccgaaccaggt

SEQ ID NO: 2968 - DNA, 39 bp, Artificial Sequence
  Synthetic
gcacacgtcatcggatttaccagcgaaagttccaaacct

SEQ ID NO: 2969 - DNA, 41 bp, Artificial Sequence
  Synthetic
gcgcacacgaattaagcatcgaatgtcgcggaatttggcag

SEQ ID NO: 2970 - DNA, 40 bp, Artificial Sequence
  Synthetic
tgaagaaaaggcgggcgagccgtgctttcttgcgcactgc

SEQ ID NO: 2971 - DNA, 41 bp, Artificial Sequence
  Synthetic
tgccgtctgaaacacattaaggacagaccttttccggattg

SEQ ID NO: 2972 - DNA, 39 bp, Artificial Sequence
  Synthetic
ccgttttggaacgcgtcatcgcggcgttgactttgccct

SEQ ID NO: 2973 - DNA, 37 bp, Artificial Sequence
  Synthetic
cggaaatgccgttgccttcgtcatccacgccatcggc

SEQ ID NO: 2974 - DNA, 35 bp, Artificial Sequence
  Synthetic
tcgcgcacttcggcaatgggatgcttgccgtgcgc

SEQ ID NO: 2975 - DNA, 37 bp, Artificial Sequence
  Synthetic
ggtttgttcggcaggtttggcggcgaagtcgtgtccg

SEQ ID NO: 2976 - DNA, 35 bp, Artificial Sequence
  Synthetic
gttgatcaggcgcgccactgatgccagcatcggcg

SEQ ID NO: 2977 - DNA, 36 bp, Artificial Sequence
  Synthetic
ccgagtaggaagccagcggggaccgaacttgccgcc

SEQ ID NO: 2978 - DNA, 39 bp, Artificial Sequence
  Synthetic
tccccagttgtggtagcggtatcggtttcgacatcacgc

SEQ ID NO: 2979 - DNA, 37 bp, Artificial Sequence
  Synthetic
tgccgctgtgggtcagtgcgccatgtacggtttgggt

SEQ ID NO: 2980 - DNA, 38 bp, Artificial Sequence
  Synthetic
gctgccggtggcgaaggtaaaacgccaaggcaaccaaa

SEQ ID NO: 2981 - DNA, 38 bp, Artificial Sequence
  Synthetic
cctcgcctttcagacgatggatggcttgcccgtcttgg

SEQ ID NO: 2982 - DNA, 39 bp, Artificial Sequence
  Synthetic
ggcggcttcgtcgcacaaaccatcggaaaacacgtcgcc

SEQ ID NO: 2983 - DNA, 39 bp, Artificial Sequence
  Synthetic
tgccgacggacgaacgctgacaaacgcaagacttcgtct

SEQ ID NO: 2984 - DNA, 39 bp, Artificial Sequence
  Synthetic
cgcacgcgaacagggcttgtcgatgcccgtaaacgttac

SEQ ID NO: 2985 - DNA, 34 bp, Artificial Sequence
  Synthetic
attgccgccgcccaacaatttccggcggcgaacg

SEQ ID NO: 2986 - DNA, 41 bp, Artificial Sequence
  Synthetic
tgtttgtgctggcgtttgtgcgacggaacagaacaaatgcc

SEQ ID NO: 2987 - DNA, 39 bp, Artificial Sequence
  Synthetic
gaacaaaagctgctccgtcccggggcaaacggcaacagc

SEQ ID NO: 2988 - DNA, 43 bp, Artificial Sequence
  Synthetic
tctcaatctgcaggtgctgaaatcgtacaggttaatcaaatgg

SEQ ID NO: 2989 - DNA, 38 bp, Artificial Sequence
  Synthetic
gtctgtgcctgtgtcctgcataccccctaccctgaccg

SEQ ID NO: 2990 - DNA, 36 bp, Artificial Sequence
  Synthetic
ggcaatcccgccgatgttcacgaagccctgttccgc

SEQ ID NO: 2991 - DNA, 37 bp, Artificial Sequence
  Synthetic
cggagagcgcgtcggatttcccgatacagctaccccg

SEQ ID NO: 2992 - DNA, 40 bp, Artificial Sequence
  Synthetic
cacagtttcggcaaggctttccgacagggcggttgtcatc

SEQ ID NO: 2993 - DNA, 40 bp, Artificial Sequence
  Synthetic
cgtattgaccgcaccggcagacaggaagcgtttcatctgg

SEQ ID NO: 2994 - DNA, 39 bp, Artificial Sequence
  Synthetic
ctgggtgtcggctacctgcttgttcgacggtcattttgc

SEQ ID NO: 2995 - DNA, 35 bp, Artificial Sequence
  Synthetic
gcaaccatggcctcgaccggtgtgccgcttccgca

SEQ ID NO: 2996 - DNA, 41 bp, Artificial Sequence
  Synthetic
ggcaggcactttaatcatggcgaggcacggtagaagaagcc

SEQ ID NO: 2997 - DNA, 37 bp, Artificial Sequence
  Synthetic
ggcgacaacttggatatgggcatacgcgcgcggcatt

SEQ ID NO: 2998 - DNA, 39 bp, Artificial Sequence
  Synthetic
aaaagctgcacgcggtttgcaatatttcaccgcccccga

SEQ ID NO: 2999 - DNA, 38 bp, Artificial Sequence
  Synthetic
cgggcgaggttttgggtgtaactccccgaccgcgacat

SEQ ID NO: 3000 - DNA, 36 bp, Artificial Sequence
  Synthetic
cgcccaaacactgctgcaaacgcggacaagacctgc

SEQ ID NO: 3001 - DNA, 38 bp, Artificial Sequence
  Synthetic
ttggtgcaacgcctctacacatcgcaggattgtgccgc

SEQ ID NO: 3002 - DNA, 39 bp, Artificial Sequence
  Synthetic
acggctacaacgaggtcaacctccgaacgcgcctttctg

SEQ ID NO: 3003 - DNA, 36 bp, Artificial Sequence
  Synthetic
ccgacggataagcgacgtgcgccgcctttgtccgca

SEQ ID NO: 3004 - DNA, 39 bp, Artificial Sequence
  Synthetic
tatgcgggctttttccacgccttaaggcggctttgtcgg

SEQ ID NO: 3005 - DNA, 39 bp, Artificial Sequence
  Synthetic
tggacgcttggcaaccggcgtaccgcttcaggaaatcgc

SEQ ID NO: 3006 - DNA, 39 bp, Artificial Sequence
  Synthetic
gcgaatgtctgccatgttcgggcccagttgaacagggga

SEQ ID NO: 3007 - DNA, 39 bp, Artificial Sequence
  Synthetic
cgctcctgaccgccctgttcttaccccgtatcggcaaac

SEQ ID NO: 3008 - DNA, 38 bp, Artificial Sequence
  Synthetic
gtacaagtaatcccgcgtcccgcggctgtgcgtgaggt

SEQ ID NO: 3009 - DNA, 35 bp, Artificial Sequence
  Synthetic
ccgacaaacaggccgcacccggcgcggcaaagtct

SEQ ID NO: 3010 - DNA, 35 bp, Artificial Sequence
  Synthetic
agggccgcaccaaatcggcgcgaactcaacgccgc

SEQ ID NO: 3011 - DNA, 44 bp, Artificial Sequence
  Synthetic
gccattaaaagaccagggcattcgaaaagtaattcttggttgcc

SEQ ID NO: 3012 - DNA, 42 bp, Artificial Sequence
  Synthetic
tgctgattgtcgtattcggcggttccacataatgaagcggct

SEQ ID NO: 3013 - DNA, 40 bp, Artificial Sequence
  Synthetic
agtcgcgcatgtgcctgaaaaaatcaaactgattgccgcc

SEQ ID NO: 3014 - DNA, 41 bp, Artificial Sequence
  Synthetic
ggaagaaacggcaatgacggcttccgaaaaaggcctgaccg

SEQ ID NO: 3015 - DNA, 38 bp, Artificial Sequence
  Synthetic
gtggacgatgcctacgaagcctcgcggacgacgtttcc

SEQ ID NO: 3016 - DNA, 39 bp, Artificial Sequence
  Synthetic
tgccgcaactgccacttcaaacatttgttgcaggcggga

SEQ ID NO: 3017 - DNA, 39 bp, Artificial Sequence
  Synthetic
caggttcggtcgtcgtgtccgacggcacagtaaaggctg

SEQ ID NO: 3018 - DNA, 41 bp, Artificial Sequence
  Synthetic
gccgcacccaccatcattgaaggccttcgacgatttcggaa

SEQ ID NO: 3019 - DNA, 35 bp, Artificial Sequence
  Synthetic
ggtgggcggacgctattcccgccaaccgcaaccat

SEQ ID NO: 3020 - DNA, 36 bp, Artificial Sequence
  Synthetic
cgctgcatacggctttgcgctccctgccgtccgcat

SEQ ID NO: 3021 - DNA, 36 bp, Artificial Sequence
  Synthetic
ccgattccgccggtcagtcactggtggctgacccat

SEQ ID NO: 3022 - DNA, 42 bp, Artificial Sequence
  Synthetic
ccgcgtacatactcaactccataacccaatttcgcacaatgg

SEQ ID NO: 3023 - DNA, 36 bp, Artificial Sequence
  Synthetic
cccgaggttgaagccgtgtggctgatcggcgatgcg

SEQ ID NO: 3024 - DNA, 35 bp, Artificial Sequence
  Synthetic
gcacacatggcggctgcacctgaccggcgttccct

SEQ ID NO: 3025 - DNA, 41 bp, Artificial Sequence
  Synthetic
cgaaaagcgtgccgccttgtgcgaattgaacggcttatggc

SEQ ID NO: 3026 - DNA, 37 bp, Artificial Sequence
  Synthetic
gcgttcttcccactgctgcaatgaccgccctgacagg

SEQ ID NO: 3027 - DNA, 43 bp, Artificial Sequence
  Synthetic
gcttgaaaaaacgtgttttaagggaaaccgaaaatgccgtctt

SEQ ID NO: 3028 - DNA, 40 bp, Artificial Sequence
  Synthetic
cggaaaaaatgtcggggatggctcctcctcaaacccgacc

SEQ ID NO: 3029 - DNA, 36 bp, Artificial Sequence
  Synthetic
cctgtccggcatccagacaggccgcatccgcctaca

SEQ ID NO: 3030 - DNA, 42 bp, Artificial Sequence
  Synthetic
cgcatcatcagcgtgttgtcggcggacggcaagaaataccgg

SEQ ID NO: 3031 - DNA, 41 bp, Artificial Sequence
  Synthetic
ggcagaaaaaatccgcgctcaagatgcgctgtttgcacaaa

SEQ ID NO: 3032 - DNA, 34 bp, Artificial Sequence
  Synthetic
cgaagtcagcaccgcgcctagcgcgtcccacctt

SEQ ID NO: 3033 - DNA, 38 bp, Artificial Sequence
  Synthetic
gccattcgatgacggcggccctccatatacgccagccc

SEQ ID NO: 3034 - DNA, 36 bp, Artificial Sequence
  Synthetic
ttgccgccgcgttgttctacatgcccgacaacccca

SEQ ID NO: 3035 - DNA, 41 bp, Artificial Sequence
  Synthetic
tttgagtgccgacgagaaccaggtaatactgttcctctacc

SEQ ID NO: 3036 - DNA, 40 bp, Artificial Sequence
  Synthetic
gccgccgatttggatgtcacttccgtaacggcgcattacg

SEQ ID NO: 3037 - DNA, 38 bp, Artificial Sequence
  Synthetic
cgtcatcctgcccaaacttgccgcaaggtcgtgcgcca

SEQ ID NO: 3038 - DNA, 41 bp, Artificial Sequence
  Synthetic
tcggtagggctgaacattgcccaaggcgatgtcctgatacg

SEQ ID NO: 3039 - DNA, 41 bp, Artificial Sequence
  Synthetic
gctcaaacccggacaggtcggatttgatgatgtgccagccg

SEQ ID NO: 3040 - DNA, 36 bp, Artificial Sequence
  Synthetic
cggcgcggaaagtaccatcctgcgaaatccgtgccg

SEQ ID NO: 3041 - DNA, 41 bp, Artificial Sequence
  Synthetic
cattgccgaaaaagtccgccagatttcagcttcgctcacgc

SEQ ID NO: 3042 - DNA, 36 bp, Artificial Sequence
  Synthetic
gtcaaagctgccgccacggggataccgccctgctgt

SEQ ID NO: 3043 - DNA, 35 bp, Artificial Sequence
  Synthetic
accgaacaaggcggacggtcgcccaacatttcggc

SEQ ID NO: 3044 - DNA, 36 bp, Artificial Sequence
  Synthetic
accctcggttcgacctgccttcggttctctcggggc

SEQ ID NO: 3045 - DNA, 40 bp, Artificial Sequence
  Synthetic
tttgcaccctgcggcaaatggcacactgatacccaaagca

SEQ ID NO: 3046 - DNA, 38 bp, Artificial Sequence
  Synthetic
cggtgtttgccgcgtatcgaatcgcacttgccgcagaa

SEQ ID NO: 3047 - DNA, 40 bp, Artificial Sequence
  Synthetic
gctttcgtcggagaggacggtactggcggtatgaacaggc

SEQ ID NO: 3048 - DNA, 37 bp, Artificial Sequence
  Synthetic
gctccctgcttagcggaacggagaatccgcccgaccg

SEQ ID NO: 3049 - DNA, 35 bp, Artificial Sequence
  Synthetic
gcgtttccggcccgaacagcgcgccccgatgaaac

SEQ ID NO: 3050 - DNA, 38 bp, Artificial Sequence
  Synthetic
gggcggcggtaaaggcgttttcacgggcgcaaaacttc

SEQ ID NO: 3051 - DNA, 39 bp, Artificial Sequence
  Synthetic
tcttctgcaaccgcccgcgacggctttgggcattttgtc

SEQ ID NO: 3052 - DNA, 35 bp, Artificial Sequence
  Synthetic
ccattgccgccagttcccatcggcaaatacgcgcc

SEQ ID NO: 3053 - DNA, 37 bp, Artificial Sequence
  Synthetic
tttgggcgcgcaccgtaacgaagccgtctatgccaag

SEQ ID NO: 3054 - DNA, 39 bp, Artificial Sequence
  Synthetic
ctgccactcgacgtgttcgctttacgccaaactctgggc

SEQ ID NO: 3055 - DNA, 38 bp, Artificial Sequence
  Synthetic
cgttttttgcgggtgctggcttgccgccgctacatcgt

SEQ ID NO: 3056 - DNA, 35 bp, Artificial Sequence
  Synthetic
agctggcggcaggtttcgcgcacgggattcgagga

SEQ ID NO: 3057 - DNA, 40 bp, Artificial Sequence
  Synthetic
cgccattacctacgcgctgatgccgtccgacaacaccatc

SEQ ID NO: 3058 - DNA, 35 bp, Artificial Sequence
  Synthetic
gcattacggcgcgttggcatcccacacggcaagct

SEQ ID NO: 3059 - DNA, 38 bp, Artificial Sequence
  Synthetic
atcggcacaattcccgctgccagaaatcggagtcgggc

SEQ ID NO: 3060 - DNA, 38 bp, Artificial Sequence
  Synthetic
gacggaaggggagggcaaagggagagcgcccaatacca

SEQ ID NO: 3061 - DNA, 41 bp, Artificial Sequence
  Synthetic
agcgcgatgatttggatgctgacgacgtaaaccaccaccag

SEQ ID NO: 3062 - DNA, 40 bp, Artificial Sequence
  Synthetic
aggggagggcgttcagacggatgataaataccgacgccgc

SEQ ID NO: 3063 - DNA, 35 bp, Artificial Sequence
  Synthetic
tttccgcacacgcccagccccgccgcctgtacgaa

SEQ ID NO: 3064 - DNA, 40 bp, Artificial Sequence
  Synthetic
ccgtgcgcgaaaaaagcaacccaatgcgccgtctatgtgt

SEQ ID NO: 3065 - DNA, 39 bp, Artificial Sequence
  Synthetic
agtccggatgccaagccgctcattatgggacaggtcgcc

SEQ ID NO: 3066 - DNA, 35 bp, Artificial Sequence
  Synthetic
gtgtgggcggcgttgttggccctgctgattctgcc

SEQ ID NO: 3067 - DNA, 41 bp, Artificial Sequence
  Synthetic
tgtgtaatcacgatgccgccgagtgatgctcacccaccaaa

SEQ ID NO: 3068 - DNA, 40 bp, Artificial Sequence
  Synthetic
gcgggattggtttcggtggggagcttcagatgtgtagggc

SEQ ID NO: 3069 - DNA, 37 bp, Artificial Sequence
  Synthetic
gcatattggtgcgcggatcgcgacccgcgcaaattcc

SEQ ID NO: 3070 - DNA, 36 bp, Artificial Sequence
  Synthetic
gcttcggtctcggaagcaggcatgcggcggtcagga

SEQ ID NO: 3071 - DNA, 36 bp, Artificial Sequence
  Synthetic
gtcccaaaactggctgcccacagttcggcggacgca

SEQ ID NO: 3072 - DNA, 37 bp, Artificial Sequence
  Synthetic
caagaaatcctcgccgtcggccgtccgcggaaggctt

SEQ ID NO: 3073 - DNA, 34 bp, Artificial Sequence
  Synthetic
tccacgaaaccggccacgccggacacgcccagtt

SEQ ID NO: 3074 - DNA, 38 bp, Artificial Sequence
  Synthetic
ggcatcaccgaacgcgtcgcgacgacggagttgagatg

SEQ ID NO: 3075 - DNA, 42 bp, Artificial Sequence
  Synthetic
ccgccggagattttgtagctgtcatcatgaccgtcttgcacg

SEQ ID NO: 3076 - DNA, 38 bp, Artificial Sequence
  Synthetic
cgttggtcggggcggtaacggatggtgtacgccatggc

SEQ ID NO: 3077 - DNA, 39 bp, Artificial Sequence
  Synthetic
acgccgacttcgccctgacctacaaaaccaacgcctcca

SEQ ID NO: 3078 - DNA, 34 bp, Artificial Sequence
  Synthetic
gggctttttcggcggcgacggcgggttggtgcaa

SEQ ID NO: 3079 - DNA, 39 bp, Artificial Sequence
  Synthetic
gcttccgatggcggcttacggttttcaatccggccggtg

SEQ ID NO: 3080 - DNA, 35 bp, Artificial Sequence
  Synthetic
agacggagttggggcagccgacggcgatgtcctgc

SEQ ID NO: 3081 - DNA, 38 bp, Artificial Sequence
  Synthetic
tgcgttcgttgcgtttgaggtcgacagccgttttgccg

SEQ ID NO: 3082 - DNA, 40 bp, Artificial Sequence
  Synthetic
cggaagttgtcgcgcattgtgcgcaatccaagtcccatcc

SEQ ID NO: 3083 - DNA, 37 bp, Artificial Sequence
  Synthetic
ggtcatccgatggcacagcttcgacatccgcgcccaa

SEQ ID NO: 3084 - DNA, 39 bp, Artificial Sequence
  Synthetic
cgcgtgcgtttgaggtggtcggaaggcttattgaccacc

SEQ ID NO: 3085 - DNA, 39 bp, Artificial Sequence
  Synthetic
ccaaagcgggtttcaggcgttgggcaaactctcccgttt

SEQ ID NO: 3086 - DNA, 41 bp, Artificial Sequence
  Synthetic
caggaaggtggcgacatcgacaagcgatgaaggacaacacc

SEQ ID NO: 3087 - DNA, 33 bp, Artificial Sequence
  Synthetic
tcgttgcggctgccgttcaccgcccgaaaccga

SEQ ID NO: 3088 - DNA, 36 bp, Artificial Sequence
  Synthetic
agcggatcggcaatgctgacccgcgcacgttttcgg

SEQ ID NO: 3089 - DNA, 37 bp, Artificial Sequence
  Synthetic
ttcccgtgcctgttccgccgcacaggaaatgccgtct

SEQ ID NO: 3090 - DNA, 38 bp, Artificial Sequence
  Synthetic
accgcgctcgatttggcggcacggcagttatcaggctg

SEQ ID NO: 3091 - DNA, 41 bp, Artificial Sequence
  Synthetic
ccgatgtggattttgccggacacgcggagtttaaagcacgc

SEQ ID NO: 3092 - DNA, 41 bp, Artificial Sequence
  Synthetic
cggcgtaacaaatcgtgcaggtgaacaaatccgcgtgttcg

SEQ ID NO: 3093 - DNA, 35 bp, Artificial Sequence
  Synthetic
acgctgtgctgggtgcgattcctgcaccagctcga

SEQ ID NO: 3094 - DNA, 38 bp, Artificial Sequence
  Synthetic
gacggtaaatttggcggcttcgtgccctgcggatccaa

SEQ ID NO: 3095 - DNA, 37 bp, Artificial Sequence
  Synthetic
gcgccgatgaggacgttcatacaacggcagcgaatgg

SEQ ID NO: 3096 - DNA, 40 bp, Artificial Sequence
  Synthetic
gaccatgcgtgcgttgatttggatgacgcgcgaacgtttg

SEQ ID NO: 3097 - DNA, 35 bp, Artificial Sequence
  Synthetic
gccggatttcgctgccgtttgctcctgaccaccgc

SEQ ID NO: 3098 - DNA, 38 bp, Artificial Sequence
  Synthetic
cgcatattggtgctgagccagatggaagccctcgccga

SEQ ID NO: 3099 - DNA, 39 bp, Artificial Sequence
  Synthetic
cgcggatggctttctcgacttcaccatcggcgtgaaacc

SEQ ID NO: 3100 - DNA, 35 bp, Artificial Sequence
  Synthetic
tgccgctgaaatacgcgcacgctgctcgccgtgat

SEQ ID NO: 3101 - DNA, 40 bp, Artificial Sequence
  Synthetic
cgactttgacgggcaggtagttcgtgtcgaaggcttgcag

SEQ ID NO: 3102 - DNA, 39 bp, Artificial Sequence
  Synthetic
cgatgtgtccgaccgtaccgagcgtaaccataggcagct

SEQ ID NO: 3103 - DNA, 36 bp, Artificial Sequence
  Synthetic
accactgcagtcgccacgctgatgaccgcgctgtcc

SEQ ID NO: 3104 - DNA, 40 bp, Artificial Sequence
  Synthetic
tcgtgaaatactcgcgcgtccgattacccagcaaatgcgc

SEQ ID NO: 3105 - DNA, 35 bp, Artificial Sequence
  Synthetic
gtttcggggaaacgggcgacgcccccatgtgcgat

SEQ ID NO: 3106 - DNA, 49 bp, Artificial Sequence
  Synthetic
gctactcgtgctaaattgatttgtgccaaatcttttgctttagtatcag

SEQ ID NO: 3107 - DNA, 43 bp, Artificial Sequence
  Synthetic
ggagttaaccatggctgaacaaatcaattgtaccaatcaggct

SEQ ID NO: 3108 - DNA, 42 bp, Artificial Sequence
  Synthetic
agctgctgttcggtgttcaattagttttgcctttagtggtaa

SEQ ID NO: 3109 - DNA, 44 bp, Artificial Sequence
  Synthetic
gcaaacagatttaaggcaaaacaacggcacaaaataagccgatt

SEQ ID NO: 3110 - DNA, 36 bp, Artificial Sequence
  Synthetic
aaagcctcgccctcctgccgacggcattgcatcgcg

SEQ ID NO: 3111 - DNA, 40 bp, Artificial Sequence
  Synthetic
cggttacctgacccgtcgtcatcgtcttcaacaacgacca

SEQ ID NO: 3112 - DNA, 40 bp, Artificial Sequence
  Synthetic
caacctctgggcggtaaagctgcccaaacctccatctcac

SEQ ID NO: 3113 - DNA, 38 bp, Artificial Sequence
  Synthetic
cgataccgatgccgtctgaacccccgcgcctgtaaacg

SEQ ID NO: 3114 - DNA, 37 bp, Artificial Sequence
  Synthetic
ggcagaaatggggcgcgaattgctgtgggggttgtct

SEQ ID NO: 3115 - DNA, 40 bp, Artificial Sequence
  Synthetic
cgtgcgggttcgactttaacctcgaaataacgccgctcca

SEQ ID NO: 3116 - DNA, 38 bp, Artificial Sequence
  Synthetic
gcaaaaagaagccgcgtggggcggattgcggatttcgt

SEQ ID NO: 3117 - DNA, 38 bp, Artificial Sequence
  Synthetic
ccagcggctgtatcgaacggtactacacccgcacccat

SEQ ID NO: 3118 - DNA, 38 bp, Artificial Sequence
  Synthetic
tgtgggagtgggcgaacgcccccgtattgaccacgtcc

SEQ ID NO: 3119 - DNA, 38 bp, Artificial Sequence
  Synthetic
ggcggtttcggcggaacacatgcgatgtggcaaacgcg

SEQ ID NO: 3120 - DNA, 37 bp, Artificial Sequence
  Synthetic
gtcgtggtcggtgctggttcgtatggcgatgtaccgg

SEQ ID NO: 3121 - DNA, 34 bp, Artificial Sequence
  Synthetic
gcgcgcggtcgttgatgtcagcgattggggcgtc

SEQ ID NO: 3122 - DNA, 43 bp, Artificial Sequence
  Synthetic
gctttctgttgaaatggagtctgataattgatgacgggggaag

SEQ ID NO: 3123 - DNA, 34 bp, Artificial Sequence
  Synthetic
acgtggtgaaagccggcggcgtgcggcatcgact

SEQ ID NO: 3124 - DNA, 36 bp, Artificial Sequence
  Synthetic
atccatcggcgtggggcagagcgatttggcgagccg

SEQ ID NO: 3125 - DNA, 38 bp, Artificial Sequence
  Synthetic
ggaatgcccgaaagcagcctaataaatcgacgcgccgg

SEQ ID NO: 3126 - DNA, 36 bp, Artificial Sequence
  Synthetic
ggctggacgatacgcagctgtccaactcgcgcaggt

SEQ ID NO: 3127 - DNA, 40 bp, Artificial Sequence
  Synthetic
tgcgatgaagctgtggaaggaaaccgccgcgatacctatg

SEQ ID NO: 3128 - DNA, 39 bp, Artificial Sequence
  Synthetic
cgaccttggacggcaaagtcacatcctcctgccggtttg

SEQ ID NO: 3129 - DNA, 38 bp, Artificial Sequence
  Synthetic
aaagcccttccttcgacagcgaggtatttggggcgaaa

SEQ ID NO: 3130 - DNA, 38 bp, Artificial Sequence
  Synthetic
cagccgttacctcgggggatttccgggtgtattcggca

SEQ ID NO: 3131 - DNA, 41 bp, Artificial Sequence
  Synthetic
tccacgatacggtcgacggtttccggacacttggttttcgg

SEQ ID NO: 3132 - DNA, 38 bp, Artificial Sequence
  Synthetic
ccatactttccctgctgcggacgctatgcgccaatccc

SEQ ID NO: 3133 - DNA, 37 bp, Artificial Sequence
  Synthetic
gggttcgcctagctgccagcttcccgttttcgccagt

SEQ ID NO: 3134 - DNA, 39 bp, Artificial Sequence
  Synthetic
aggatgatggcggtgctgtacctggctgaccaacccctt

SEQ ID NO: 3135 - DNA, 35 bp, Artificial Sequence
  Synthetic
ggtggcggatgtcgggactgctgccgccaatcgct

SEQ ID NO: 3136 - DNA, 41 bp, Artificial Sequence
  Synthetic
acgcctgattcgaggttcagcaccggcagcttcaaaaacac

SEQ ID NO: 3137 - DNA, 37 bp, Artificial Sequence
  Synthetic
agtacggtgccggcgatgcgccaacccaactacaccg

SEQ ID NO: 3138 - DNA, 37 bp, Artificial Sequence
  Synthetic
ggagatgtagccggtcagggccgacagcctgcaaccc

SEQ ID NO: 3139 - DNA, 36 bp, Artificial Sequence
  Synthetic
tgcggagggtgccgagttcacatgggacccgacgac

SEQ ID NO: 3140 - DNA, 38 bp, Artificial Sequence
  Synthetic
ttccctttgagccggggcgctaccctatagcccgcctt

SEQ ID NO: 3141 - DNA, 40 bp, Artificial Sequence
  Synthetic
cgcgctgttctttgaacgacgacgctgacgctgatttccg

SEQ ID NO: 3142 - DNA, 36 bp, Artificial Sequence
  Synthetic
atcaatacgccggcgcaggcgcgcccaagcttcgac

SEQ ID NO: 3143 - DNA, 40 bp, Artificial Sequence
  Synthetic
ggcaacgtcggcgatgtctttgtcgttgccaaagcctttg

SEQ ID NO: 3144 - DNA, 39 bp, Artificial Sequence
  Synthetic
cttcggcacactgcttaccctacataaacagcggcaggg

SEQ ID NO: 3145 - DNA, 40 bp, Artificial Sequence
  Synthetic
ggcttcgttggggatggagattctttggacggcgttacca

SEQ ID NO: 3146 - DNA, 38 bp, Artificial Sequence
  Synthetic
tttccccgaaaccctgccagggaaggttcgggcatcac

SEQ ID NO: 3147 - DNA, 36 bp, Artificial Sequence
  Synthetic
aagtcggcgcgggcaaaggtagcgtgccgggcgtta

SEQ ID NO: 3148 - DNA, 38 bp, Artificial Sequence
  Synthetic
tccacaggtttgttcaagccaactcgtccgtactttgg

SEQ ID NO: 3149 - DNA, 40 bp, Artificial Sequence
  Synthetic
tctgcaatctgttccgcacgaatgcaatgtttatctgcct

SEQ ID NO: 3150 - DNA, 41 bp, Artificial Sequence
  Synthetic
gcctgttttaatcggatcggtcaaatgccttggaaaaacct

SEQ ID NO: 3151 - DNA, 43 bp, Artificial Sequence
  Synthetic
cctttttttcaaatgcgccaacttattgttatggcttggggtg

SEQ ID NO: 3152 - DNA, 38 bp, Artificial Sequence
  Synthetic
ccgtcggcatcaccctcatcaggttgacaagcccggtt

SEQ ID NO: 3153 - DNA, 38 bp, Artificial Sequence
  Synthetic
gcgcggtgttcgacaaataccgttgccggaaaccgtca

SEQ ID NO: 3154 - DNA, 39 bp, Artificial Sequence
  Synthetic
agcctcccttcccgacttggctgccggtaatgttttgcg

SEQ ID NO: 3155 - DNA, 41 bp, Artificial Sequence
  Synthetic
cgggcaggctttgggtttgaacgatgcggtcgttttgaaag

SEQ ID NO: 3156 - DNA, 35 bp, Artificial Sequence
  Synthetic
tcaagggcggccgcctttcgtcaggccggcggtat

SEQ ID NO: 3157 - DNA, 38 bp, Artificial Sequence
  Synthetic
agctgtttaaagaccgcctgcttcgatgcgcgaagggt

SEQ ID NO: 3158 - DNA, 38 bp, Artificial Sequence
  Synthetic
aaatcccgtcctggttcggcgtcgagcagtgtgccttt

SEQ ID NO: 3159 - DNA, 42 bp, Artificial Sequence
  Synthetic
cgcgcaggttatttcttcacgcttgtccgcgtatgatgaacg

SEQ ID NO: 3160 - DNA, 39 bp, Artificial Sequence
  Synthetic
cccggctcggatgtcgatttgcgtttccaagaggcggtc

SEQ ID NO: 3161 - DNA, 35 bp, Artificial Sequence
  Synthetic
tttcggcagcaccccttccccgtcaaaaccggccg

SEQ ID NO: 3162 - DNA, 41 bp, Artificial Sequence
  Synthetic
tgatggagcacctactagtatggttttacccctgcttcacg

SEQ ID NO: 3163 - DNA, 35 bp, Artificial Sequence
  Synthetic
caaaccgcctcgcgcaaaccggcgtacggctcgaa

SEQ ID NO: 3164 - DNA, 37 bp, Artificial Sequence
  Synthetic
ccagcaggttgccgaaaatgccgatgccgtgtccgca

SEQ ID NO: 3165 - DNA, 37 bp, Artificial Sequence
  Synthetic
cccaacccgaacaccaccactcttctgtgccgtccgg

SEQ ID NO: 3166 - DNA, 39 bp, Artificial Sequence
  Synthetic
tgcgccaaaacaaccaaaccaacaggtggcggttgtagc

SEQ ID NO: 3167 - DNA, 38 bp, Artificial Sequence
  Synthetic
gcaccgcccgcattcaggacgatacagtcgcacatggc

SEQ ID NO: 3168 - DNA, 37 bp, Artificial Sequence
  Synthetic
ctttggcgaggcagacgcgcgacctcgacaccgacga

SEQ ID NO: 3169 - DNA, 38 bp, Artificial Sequence
  Synthetic
gggtggatttgccggcgttaactcaaagtcctcgccga

SEQ ID NO: 3170 - DNA, 40 bp, Artificial Sequence
  Synthetic
gtgtttgaggaagcggtggcctccccggtctgattgaagg

SEQ ID NO: 3171 - DNA, 39 bp, Artificial Sequence
  Synthetic
cgcggttgctccaccatgtatgggctggacggacatgtg

SEQ ID NO: 3172 - DNA, 35 bp, Artificial Sequence
  Synthetic
gcggcgaatacatcagcgcgttcggctgcacccca

SEQ ID NO: 3173 - DNA, 38 bp, Artificial Sequence
  Synthetic
gcgggcgcgaaaaatatgcgccacttgggcgtgaatcg

SEQ ID NO: 3174 - DNA, 38 bp, Artificial Sequence
  Synthetic
aagttgccgccgccgatatcgcctttgacaaagttcgg

SEQ ID NO: 3175 - DNA, 38 bp, Artificial Sequence
  Synthetic
cgttgagctgctgcggcttcttgccgcaacacgtatcg

SEQ ID NO: 3176 - DNA, 41 bp, Artificial Sequence
  Synthetic
agcgaacccaactcatactgcgcgagtgcctgatgttcagt

SEQ ID NO: 3177 - DNA, 37 bp, Artificial Sequence
  Synthetic
cacggaaaccgacctgtcgtcagggcgaacagacggt

SEQ ID NO: 3178 - DNA, 36 bp, Artificial Sequence
  Synthetic
tatgcgccccgccgaatccgggaaaacgcccaagcc

SEQ ID NO: 3179 - DNA, 38 bp, Artificial Sequence
  Synthetic
caaacacggcaggcttctttccaatcggggtcggcagg

SEQ ID NO: 3180 - DNA, 36 bp, Artificial Sequence
  Synthetic
acaccgccgtctcacgcagattcgacggccagtgcg

SEQ ID NO: 3181 - DNA, 38 bp, Artificial Sequence
  Synthetic
accccggctacatcgccagggcggtgggcatttgtttg

SEQ ID NO: 3182 - DNA, 36 bp, Artificial Sequence
  Synthetic
atcccccgagcacaccagcgtgtaaacccgcgccac

SEQ ID NO: 3183 - DNA, 39 bp, Artificial Sequence
  Synthetic
tgcaggaaaacggcagcctactcgctggataatggcttg

SEQ ID NO: 3184 - DNA, 35 bp, Artificial Sequence
  Synthetic
tttcctggctgccgctggcagcgttgccgtcaggg

SEQ ID NO: 3185 - DNA, 33 bp, Artificial Sequence
  Synthetic
cagcacgggtacgctgctaaagcagggccgcca

SEQ ID NO: 3186 - DNA, 38 bp, Artificial Sequence
  Synthetic
ccagacgggcgaggtaaaccatccgatccgcgcatcgt

SEQ ID NO: 3187 - DNA, 36 bp, Artificial Sequence
  Synthetic
cgcggataggcgtttttgcgcgcaagccggcaaact

SEQ ID NO: 3188 - DNA, 40 bp, Artificial Sequence
  Synthetic
ctgccgagcaggtctttggcggcaaaaaccaaggctttga

SEQ ID NO: 3189 - DNA, 40 bp, Artificial Sequence
  Synthetic
gccatacctttgctgttgccgacgaccgggcatattcagc

SEQ ID NO: 3190 - DNA, 34 bp, Artificial Sequence
  Synthetic
aaccggcatcgcccaacggcttttcgccgcttgc

SEQ ID NO: 3191 - DNA, 35 bp, Artificial Sequence
  Synthetic
ggcaggctggcggtttaccgcgcggcaggtcgaaa

SEQ ID NO: 3192 - DNA, 42 bp, Artificial Sequence
  Synthetic
tgccattacgtcgtcgttgactaaactttaccgcgaactgcc

SEQ ID NO: 3193 - DNA, 39 bp, Artificial Sequence
  Synthetic
ttccaagttgcgttgggcgtgcaaggcgaagtcatcacc

SEQ ID NO: 3194 - DNA, 37 bp, Artificial Sequence
  Synthetic
ggtcaggtgcaccatcagcagtgctcaaacgcctgcg

SEQ ID NO: 3195 - DNA, 40 bp, Artificial Sequence
  Synthetic
tccgcacacacttccaaggttcgtgaaaacaaacgcggac

SEQ ID NO: 3196 - DNA, 39 bp, Artificial Sequence
  Synthetic
gccccatcatggttttgggctactggccgaaatcacccg

SEQ ID NO: 3197 - DNA, 38 bp, Artificial Sequence
  Synthetic
gccgctgttcgaacgcaaatcccgcagcagcctttcgc

SEQ ID NO: 3198 - DNA, 36 bp, Artificial Sequence
  Synthetic
agtctgcgcccaaatcggcccatttgggctgctcgc

SEQ ID NO: 3199 - DNA, 40 bp, Artificial Sequence
  Synthetic
ttgccgcatcgaagttcggcttgttctttgcccctgaagg

SEQ ID NO: 3200 - DNA, 43 bp, Artificial Sequence
  Synthetic
tgacatttttagaatgatgccgtcttgaaaagcctgaatccgt

SEQ ID NO: 3201 - DNA, 39 bp, Artificial Sequence
  Synthetic
gcggacgtgatggcgaaaatggccgcctttaccgaatgc

SEQ ID NO: 3202 - DNA, 39 bp, Artificial Sequence
  Synthetic
gccctcgccgaagtagtcgttgttggacgaagccgcagc

SEQ ID NO: 3203 - DNA, 35 bp, Artificial Sequence
  Synthetic
cggacgcttgcagcacctgccatccgtgaagcagc

SEQ ID NO: 3204 - DNA, 38 bp, Artificial Sequence
  Synthetic
aattgcgcgtccggccagtcatcacctacaaactcgcc

SEQ ID NO: 3205 - DNA, 36 bp, Artificial Sequence
  Synthetic
cgtcaacgccgccaacgaccaggttgacggcaggtg

SEQ ID NO: 3206 - DNA, 38 bp, Artificial Sequence
  Synthetic
ccccgtgttgccgcaaactaatcgcgtccagattgagg

SEQ ID NO: 3207 - DNA, 38 bp, Artificial Sequence
  Synthetic
gcaaaatcaaacgcgtgcgcccctttttcgcgtgccgc

SEQ ID NO: 3208 - DNA, 38 bp, Artificial Sequence
  Synthetic
acgcataccgccgacctttctgcccttgattgccgttg

SEQ ID NO: 3209 - DNA, 35 bp, Artificial Sequence
  Synthetic
cctcggctgcgccaatttgaaggcttgggcgcaca

SEQ ID NO: 3210 - DNA, 41 bp, Artificial Sequence
  Synthetic
cggcaagcaggaaaaaaacgctatggccttggtcggtatgg

SEQ ID NO: 3211 - DNA, 35 bp, Artificial Sequence
  Synthetic
ctgccgcatctgtgcccacgaacatcggcggtctg

SEQ ID NO: 3212 - DNA, 39 bp, Artificial Sequence
  Synthetic
gtacgttccacgccgtttctgaaccggtatcgaaatcgt

SEQ ID NO: 3213 - DNA, 39 bp, Artificial Sequence
  Synthetic
acaagccccgattccccggttcctttctttgcgatgcct

SEQ ID NO: 3214 - DNA, 37 bp, Artificial Sequence
  Synthetic
catcgttgccgggtattgccccgccggcagaagcgtt

SEQ ID NO: 3215 - DNA, 42 bp, Artificial Sequence
  Synthetic
ccaaatccgccaactctaccgagacaaaaccaaattcccgcc

SEQ ID NO: 3216 - DNA, 35 bp, Artificial Sequence
  Synthetic
tcgccttgggctgacgcagcgtgcctgttccggca

SEQ ID NO: 3217 - DNA, 37 bp, Artificial Sequence
  Synthetic
gcgcccgaaaaacagcttgcggtaactgtgcgcctgc

SEQ ID NO: 3218 - DNA, 35 bp, Artificial Sequence
  Synthetic
acattccggaccgcccctcgcgagcgtttcccagc

SEQ ID NO: 3219 - DNA, 39 bp, Artificial Sequence
  Synthetic
gcataccgcccgccaaaaagagcactaccgctggacgta

SEQ ID NO: 3220 - DNA, 37 bp, Artificial Sequence
  Synthetic
gtccagccacgtctttaccgccggcgttcgtgtcggt

SEQ ID NO: 3221 - DNA, 39 bp, Artificial Sequence
  Synthetic
ggcttccaaaccagccgccgatttcctcgaccttgcctt

SEQ ID NO: 3222 - DNA, 41 bp, Artificial Sequence
  Synthetic
tgcaccgatatgcccgaactctagggttcgtacagggatgc

SEQ ID NO: 3223 - DNA, 38 bp, Artificial Sequence
  Synthetic
gcaaccgcagcaactacgcccgccgcatcatatgggaa

SEQ ID NO: 3224 - DNA, 38 bp, Artificial Sequence
  Synthetic
ccgtcggacaactcgtcttcttccaagcgtgcggatgc

SEQ ID NO: 3225 - DNA, 34 bp, Artificial Sequence
  Synthetic
aaccaggcaggccggcttgccggttgcgcgcaaa

SEQ ID NO: 3226 - DNA, 39 bp, Artificial Sequence
  Synthetic
ttgcgacaggacgggcagcttggaaatggaaaacccgcg

SEQ ID NO: 3227 - DNA, 37 bp, Artificial Sequence
  Synthetic
cgcgacattctgcgcggagaggttgatgtcttgcggc

SEQ ID NO: 3228 - DNA, 40 bp, Artificial Sequence
  Synthetic
cgagttccacacccaagccaacttcatcggtcagcggaat

SEQ ID NO: 3229 - DNA, 36 bp, Artificial Sequence
  Synthetic
cggtatgttcggcggcgttatgctgtcggcgagtgc

SEQ ID NO: 3230 - DNA, 35 bp, Artificial Sequence
  Synthetic
ggcgcgccatccatgttccggtcgctgtctcgcgt

SEQ ID NO: 3231 - DNA, 34 bp, Artificial Sequence
  Synthetic
gcctccgtcggcgcatttaatcgggcccggatgg

SEQ ID NO: 3232 - DNA, 37 bp, Artificial Sequence
  Synthetic
gccgtctgaaagccgtttgcggcactgccgccggatt

SEQ ID NO: 3233 - DNA, 36 bp, Artificial Sequence
  Synthetic
cgtccgaagcgtttggcgtagcaccaaaatgccgcg

SEQ ID NO: 3234 - DNA, 45 bp, Artificial Sequence
  Synthetic
tccggctacaagtgataaggtgggctttaattgacgattatcttg

SEQ ID NO: 3235 - DNA, 38 bp, Artificial Sequence
  Synthetic
ccggctgacgattttggggctccgtccggttcaaaccc

SEQ ID NO: 3236 - DNA, 37 bp, Artificial Sequence
  Synthetic
tcgccgcaaaattccgacccattgtgcggcggaaacc

SEQ ID NO: 3237 - DNA, 37 bp, Artificial Sequence
  Synthetic
cgctgcaaacccacggcaaacgttcggctttggtgcc

SEQ ID NO: 3238 - DNA, 39 bp, Artificial Sequence
  Synthetic
cgggttactttggcagggtcgaaggctccggcgaatacg

SEQ ID NO: 3239 - DNA, 40 bp, Artificial Sequence
  Synthetic
tggcataatcgagcagcagcacctgccctatctggtagcg

SEQ ID NO: 3240 - DNA, 40 bp, Artificial Sequence
  Synthetic
gcctgcgtaattccggcaaccgccggctttgtttatgttg

SEQ ID NO: 3241 - DNA, 36 bp, Artificial Sequence
  Synthetic
ccatacagccggccgccttccgtttgaggcgcgggt

SEQ ID NO: 3242 - DNA, 40 bp, Artificial Sequence
  Synthetic
gagggttttgtcaccggagaggttccgccgactattccca

SEQ ID NO: 3243 - DNA, 37 bp, Artificial Sequence
  Synthetic
acatcggcatcagcgcggggcggcggattttgcctct

SEQ ID NO: 3244 - DNA, 37 bp, Artificial Sequence
  Synthetic
cgacctgcgccaaatcggtaaaacaggatgccgacgc

SEQ ID NO: 3245 - DNA, 39 bp, Artificial Sequence
  Synthetic
acgcgggcttcagctacggaacaagtgcagatgcttggt

SEQ ID NO: 3246 - DNA, 38 bp, Artificial Sequence
  Synthetic
gtcatcgacagcgaccccgttcgttgaggaatcgggct

SEQ ID NO: 3247 - DNA, 40 bp, Artificial Sequence
  Synthetic
cgttcaacgtcgtcatccgcactgcctgaaacaatgccgt

SEQ ID NO: 3248 - DNA, 35 bp, Artificial Sequence
  Synthetic
cagacccgaaaaaccgcgccgaggtcgttgcgcag

SEQ ID NO: 3249 - DNA, 38 bp, Artificial Sequence
  Synthetic
cggcatttccacgccgcaatctttggcggatgcggtcg

SEQ ID NO: 3250 - DNA, 39 bp, Artificial Sequence
  Synthetic
ccgtcaaagccgttgccgaaacgccgcaaaccaatttcg

SEQ ID NO: 3251 - DNA, 41 bp, Artificial Sequence
  Synthetic
ggggttttcaggcggcatgaaacatccgatacagccgtccc

SEQ ID NO: 3252 - DNA, 36 bp, Artificial Sequence
  Synthetic
cagccaggcaaacgccatcacccgcctgccaaaacc

SEQ ID NO: 3253 - DNA, 39 bp, Artificial Sequence
  Synthetic
tcagggtaacgcctgccgctacccggaaaaacatacgcg

SEQ ID NO: 3254 - DNA, 34 bp, Artificial Sequence
  Synthetic
ccgcgttcgaccacggtttttgcggtcggtgcgt

SEQ ID NO: 3255 - DNA, 36 bp, Artificial Sequence
  Synthetic
ttgccgccgcattgggcaaacagggcatattcgcgc

SEQ ID NO: 3256 - DNA, 38 bp, Artificial Sequence
  Synthetic
gcggtagtagccgtagcggatcggcaggcatgataggc

SEQ ID NO: 3257 - DNA, 38 bp, Artificial Sequence
  Synthetic
gctgatggtgcgcgaaacgccatttccgttacccgctt

SEQ ID NO: 3258 - DNA, 37 bp, Artificial Sequence
  Synthetic
tgcctgcccttccaatgccgtcgtcgcttcgtttgcc

SEQ ID NO: 3259 - DNA, 37 bp, Artificial Sequence
  Synthetic
ccccaaatgccgaccagggtgcaaaattgccgccgcc

SEQ ID NO: 3260 - DNA, 37 bp, Artificial Sequence
  Synthetic
acgcgtttgttggcggcggccgtcgccgtattcaaac

SEQ ID NO: 3261 - DNA, 38 bp, Artificial Sequence
  Synthetic
gggcatcgccgtattggtacgatggcgaacgggtttgc

SEQ ID NO: 3262 - DNA, 37 bp, Artificial Sequence
  Synthetic
ggcaaatgccgtctgcgcgcgcaaggaagacggttcg

SEQ ID NO: 3263 - DNA, 40 bp, Artificial Sequence
  Synthetic
ggcgcgtatgtgctgcaccttagaatgtttgttgcgccgg

SEQ ID NO: 3264 - DNA, 35 bp, Artificial Sequence
  Synthetic
gcccgaagaaacccgccaagcgtcgccgaatctgc

SEQ ID NO: 3265 - DNA, 39 bp, Artificial Sequence
  Synthetic
cgcgccattttgaaagacgcgttgtccaatgcgctggtg

SEQ ID NO: 3266 - DNA, 34 bp, Artificial Sequence
  Synthetic
gccgacggcgtatgtgcatcgcgagcgtgccttt

SEQ ID NO: 3267 - DNA, 39 bp, Artificial Sequence
  Synthetic
cccctgatcaaccacggctttggtggaaaggatgtcggc

SEQ ID NO: 3268 - DNA, 40 bp, Artificial Sequence
  Synthetic
gccaaagaagccggagccaaactgcaatgggaaggaacgg

SEQ ID NO: 3269 - DNA, 37 bp, Artificial Sequence
  Synthetic
ttcggcaaccccgcaaccgcttgcgtgcagagtaccg

SEQ ID NO: 3270 - DNA, 47 bp, Artificial Sequence
  Synthetic
gtgctaaatctaccaagttgcaaatttgtagctactttgatattccg

SEQ ID NO: 3271 - DNA, 40 bp, Artificial Sequence
  Synthetic
tggtaaggtgtcacttgctccttatgcaacgaaagcttgt

SEQ ID NO: 3272 - DNA, 43 bp, Artificial Sequence
  Synthetic
tgcttagtctttctttttctggagaaaaaggaccgtctgttgc

SEQ ID NO: 3273 - DNA, 43 bp, Artificial Sequence
  Synthetic
gtaacccagctaggcaatttgttatagaagtgttcctgcagct

SEQ ID NO: 3274 - DNA, 43 bp, Artificial Sequence
  Synthetic
cgatgcccatttgtattgcaacatcatataccagcaacaaggg

SEQ ID NO: 3275 - DNA, 46 bp, Artificial Sequence
  Synthetic
tcctggcatcttcaaaaaacaatagtgggaaagttgattatgatgg

SEQ ID NO: 3276 - DNA, 42 bp, Artificial Sequence
  Synthetic
tccatctatacctccagcactttactagggatccggccatag

SEQ ID NO: 3277 - DNA, 45 bp, Artificial Sequence
  Synthetic
gaacaatagatgaagcaccaggctattccactagaacctataggc

SEQ ID NO: 3278 - DNA, 45 bp, Artificial Sequence
  Synthetic
tggaacctgtgttgtgtatctagtagccacctgtacaaagtactc

SEQ ID NO: 3279 - DNA, 46 bp, Artificial Sequence
  Synthetic
ccctgtgtgtctgtagtggtaacttttctgacgaatctttattgga

SEQ ID NO: 3280 - DNA, 46 bp, Artificial Sequence
  Synthetic
caaactaaccgttctctttgaggatgttttgcgtttacagttacct

SEQ ID NO: 3281 - DNA, 43 bp, Artificial Sequence
  Synthetic
tgacgagcataaagttgttctcttttggccagattttgtgcag

SEQ ID NO: 3282 - DNA, 48 bp, Artificial Sequence
  Synthetic
gggatccattgcattaatatgagctttggaagtagaaatagtaatgca

SEQ ID NO: 3283 - DNA, 47 bp, Artificial Sequence
  Synthetic
aagcagtcaggatattcaagtacaacaatgttaagctgtgaaacttg

SEQ ID NO: 3284 - DNA, 42 bp, Artificial Sequence
  Synthetic
tcttctccatactctttcattgcccgacaatgcttcaatccg

SEQ ID NO: 3285 - DNA, 45 bp, Artificial Sequence
  Synthetic
tccttgtaatcatacaaatctggcagcctggacagtagtaaacag

SEQ ID NO: 3286 - DNA, 44 bp, Artificial Sequence
  Synthetic
ctgaaaacaaggaggcccatcattgaaccttttctgaaaacaac

SEQ ID NO: 3287 - DNA, 42 bp, Artificial Sequence
  Synthetic
agctgactcgttttcttcatgtttaagcaagtactggcggaa

SEQ ID NO: 3288 - DNA, 42 bp, Artificial Sequence
  Synthetic
tctcatgcttgcaatgtgttcaactggatagagctcgatgag

SEQ ID NO: 3289 - DNA, 44 bp, Artificial Sequence
  Synthetic
tcacaaagtttaccacgtcggatggtttcatcataaaaggaaga

SEQ ID NO: 3290 - DNA, 45 bp, Artificial Sequence
  Synthetic
gtctttctctttgacagaggactcgctccttcagtcactacaaca

SEQ ID NO: 3291 - DNA, 38 bp, Artificial Sequence
  Synthetic
tctgttcgctgaaggggtcctggaggaagccacacgga

SEQ ID NO: 3292 - DNA, 39 bp, Artificial Sequence
  Synthetic
tggctccactggtccccaatcggaccccctttcaaagtg

SEQ ID NO: 3293 - DNA, 40 bp, Artificial Sequence
  Synthetic
gacgcacgtccactcggatgtagcttcccagagagaagcg

SEQ ID NO: 3294 - DNA, 41 bp, Artificial Sequence
  Synthetic
catgcaaggagtcccggagtcttccccttatgtccagtccc

SEQ ID NO: 3295 - DNA, 40 bp, Artificial Sequence
  Synthetic
ccaggggaggattcaccgacagttctcgagggccttcctt

SEQ ID NO: 3296 - DNA, 45 bp, Artificial Sequence
  Synthetic
aggatcctcgaacatagctgtttcgaaaccggtacatataaaagt

SEQ ID NO: 3297 - DNA, 45 bp, Artificial Sequence
  Synthetic
ggcatttgacatctatgacaccttatatggtgcaacattagaagc

SEQ ID NO: 3298 - DNA, 45 bp, Artificial Sequence
  Synthetic
gttcgtagcagcgtaggtcaattgaagatgtaatactagatctgg

SEQ ID NO: 3299 - DNA, 42 bp, Artificial Sequence
  Synthetic
ctcctcatttgtaccttcacagtccttggtgtgccatcagtg

SEQ ID NO: 3300 - DNA, 41 bp, Artificial Sequence
  Synthetic
ttaaattgcgcactgcctttgttaacccaggcattgtttca

SEQ ID NO: 3301 - DNA, 45 bp, Artificial Sequence
  Synthetic
ccaaatctaatctggaccaggtggcaatgggaatcctgtatatgc

SEQ ID NO: 3302 - DNA, 43 bp, Artificial Sequence
  Synthetic
cgtgtttattaacgactgcaatgctgtggtgccctctactgtt

SEQ ID NO: 3303 - DNA, 46 bp, Artificial Sequence
  Synthetic
cgtaatactgcttatatgccccttgtaaaggtactggagatgttga

SEQ ID NO: 3304 - DNA, 39 bp, Artificial Sequence
  Synthetic
cggtggtgtcaggtccactgaggcaccaaggaaaccgag

SEQ ID NO: 3305 - DNA, 42 bp, Artificial Sequence
  Synthetic
aggggctccagattgtataatactctgtgggtcctacagaac

SEQ ID NO: 3306 - DNA, 40 bp, Artificial Sequence
  Synthetic
agatgtaagggccggacgatcagtagtactgtagcacctg

SEQ ID NO: 3307 - DNA, 45 bp, Artificial Sequence
  Synthetic
atgttgtaggggaatatgacatgcatatgcagaccctgatacagt

SEQ ID NO: 3308 - DNA, 48 bp, Artificial Sequence
  Synthetic
gcatacgtttacggcgtttatggcatggggataattattatttatggc

SEQ ID NO: 3309 - DNA, 41 bp, Artificial Sequence
  Synthetic
aggatcaggtaggtgcactccgaaattcctaaggtatctgc

SEQ ID NO: 3310 - DNA, 50 bp, Artificial Sequence
  Synthetic
cacgttgtgtctgtgtatttttacacagttatgtattataggttgtacac

SEQ ID NO: 3311 - DNA, 47 bp, Artificial Sequence
  Synthetic
cccccgccttattataaaaatgtctacagcatgtttttttttcttcg

SEQ ID NO: 3312 - DNA, 47 bp, Artificial Sequence
  Synthetic
acacaccttacataacataccacaaaacgcaaaaaacgtaaacttac

SEQ ID NO: 3313 - DNA, 36 bp, Artificial Sequence
  Synthetic
ctccacccttctgcagacggtggagcacccccccta

SEQ ID NO: 3314 - DNA, 42 bp, Artificial Sequence
  Synthetic
ggaccctatcaggcagtacggtgcaagcccacctatatgtgt

SEQ ID NO: 3315 - DNA, 40 bp, Artificial Sequence
  Synthetic
ccagcaagcgtactatctggcatctagtaggcccgctggt

SEQ ID NO: 3316 - DNA, 40 bp, Artificial Sequence
  Synthetic
tgtacggattggcgggaaccttgttctccttccacttgcc

SEQ ID NO: 3317 - DNA, 43 bp, Artificial Sequence
  Synthetic
caccagggattgtataggggtactttgttacagtccaaagtgg

SEQ ID NO: 3318 - DNA, 46 bp, Artificial Sequence
  Synthetic
gtggaattcacagggtcataaaagttcaggccatttgtattttgag

SEQ ID NO: 3319 - DNA, 40 bp, Artificial Sequence
  Synthetic
agctgaagcaggcgtaaccaaagtcaccgcatagctctgc

SEQ ID NO: 3320 - DNA, 39 bp, Artificial Sequence
  Synthetic
cgatgctgcactggatgttaacgctggtgactttctgtg

SEQ ID NO: 3321 - DNA, 41 bp, Artificial Sequence
  Synthetic
gcatagccaaccctgcgaaaaccacggttgatggtttgccc

SEQ ID NO: 3322 - DNA, 42 bp, Artificial Sequence
  Synthetic
ccagctccacatggtggttgatacacccaataaccgttgacg

SEQ ID NO: 3323 - DNA, 43 bp, Artificial Sequence
  Synthetic
tgggggcaattaaaatttgcactgccactcttgatacaaaacc

SEQ ID NO: 3324 - DNA, 39 bp, Artificial Sequence
  Synthetic
ggtgtagggattactccaggggtcctaaccgaagctcca

SEQ ID NO: 3325 - DNA, 43 bp, Artificial Sequence
  Synthetic
agtttgagcttctgttgatgacaaacattgttgaagccttcga

SEQ ID NO: 3326 - DNA, 46 bp, Artificial Sequence
  Synthetic
cccaagaaaggtgttaagtttttcagagtacaatcaccacaactag

SEQ ID NO: 3327 - DNA, 40 bp, Artificial Sequence
  Synthetic
ggccactcacccatcaagcattttgacatgctaggcggct

SEQ ID NO: 3328 - DNA, 42 bp, Artificial Sequence
  Synthetic
tcagttgggtccggtctagcacttgttcaaattactggagag

SEQ ID NO: 3329 - DNA, 41 bp, Artificial Sequence
  Synthetic
ggtggtgaaggagggaggtttgtcatgtcctgaaagcctgc

SEQ ID NO: 3330 - DNA, 44 bp, Artificial Sequence
  Synthetic
cagttttgaagctaatcacgtcggtgggaaagagtgagttttcg

SEQ ID NO: 3331 - DNA, 40 bp, Artificial Sequence
  Synthetic
gtccagaacagccttgcggggctaagtcccacatcactgg

SEQ ID NO: 3332 - DNA, 41 bp, Artificial Sequence
  Synthetic
cctcgggtgtgatggtactgtctgttgtcgatgtggtcacc

SEQ ID NO: 3333 - DNA, 40 bp, Artificial Sequence
  Synthetic
gcgctcttccaaattacggtgccgaacaggctggcatgaa

SEQ ID NO: 3334 - DNA, 42 bp, Artificial Sequence
  Synthetic
gcagatcttctacaggcaccgtttgaggacaaacttcccgag

SEQ ID NO: 3335 - DNA, 38 bp, Artificial Sequence
  Synthetic
aaagtggtgtaccgagccaccttctctggcatgctaca

SEQ ID NO: 3336 - DNA, 40 bp, Artificial Sequence
  Synthetic
ggcttcacccgaaacggttctggggagaccccgggcttaa

SEQ ID NO: 3337 - DNA, 44 bp, Artificial Sequence
  Synthetic
cagtggttatcaggatggcaatttctgtttctctcaccatttcc

SEQ ID NO: 3338 - DNA, 45 bp, Artificial Sequence
  Synthetic
ggaaagcctaatcgaattgtccttatacagaaattggtcaaagcc

SEQ ID NO: 3339 - DNA, 38 bp, Artificial Sequence
  Synthetic
acacaaacatgcagccatgccaagtgtgcatagcatgg

SEQ ID NO: 3340 - DNA, 43 bp, Artificial Sequence
  Synthetic
gaggatagcaggagcactccggaaaatcattcatactagcaca

SEQ ID NO: 3341 - DNA, 42 bp, Artificial Sequence
  Synthetic
tccatcatcaaaggcccagccattgcttggatcctaacaatg

SEQ ID NO: 3342 - DNA, 48 bp, Artificial Sequence
  Synthetic
atcgtacttttcagcagtatccaatttgaattgtcttattgttcgttg

SEQ ID NO: 3343 - DNA, 47 bp, Artificial Sequence
  Synthetic
tgaagtagcaaaaacacacactcttattatattgggttgacacctgt

SEQ ID NO: 3344 - DNA, 50 bp, Artificial Sequence
  Synthetic
tgtgaagcattatccacatcatcaaatatatttgaagagagtacagatgg

SEQ ID NO: 3345 - DNA, 46 bp, Artificial Sequence
  Synthetic
tgtacctgagaaacatttgcagttaaaagacgattatttcaggaca

SEQ ID NO: 3346 - DNA, 50 bp, Artificial Sequence
  Synthetic
tcgtctaacaagccaattttaccataggtaaagtcatttctttcatgaac

SEQ ID NO: 3347 - DNA, 39 bp, Artificial Sequence
  Synthetic
gcgatggggtcttggagtacctcgcagactccagccaag

SEQ ID NO: 3348 - DNA, 38 bp, Artificial Sequence
  Synthetic
cttgtcgcgcaagtagtcgagaatctgctgtcccgtct

SEQ ID NO: 3349 - DNA, 43 bp, Artificial Sequence
  Synthetic
ggaagtgcttcaggaattggttttatggattgggaattggcac

SEQ ID NO: 3350 - DNA, 41 bp, Artificial Sequence
  Synthetic
gaaagtaggatccggtgcagccttttccgatgatgtcactt

SEQ ID NO: 3351 - DNA, 43 bp, Artificial Sequence
  Synthetic
gcattaggattttctgtgtcaagcaaccgttaggggttggaac

SEQ ID NO: 3352 - DNA, 48 bp, Artificial Sequence
  Synthetic
cctgatttgtcctgttgtaatcgtcaatacaagatggtgatatgtgtg

SEQ ID NO: 3353 - DNA, 39 bp, Artificial Sequence
  Synthetic
cagaaccggtatgcaatagcccagagctgtcaaccgttt

SEQ ID NO: 3354 - DNA, 42 bp, Artificial Sequence
  Synthetic
ctgatgatctttcgacgatgtaggcaacccttcttgtgacct

SEQ ID NO: 3355 - DNA, 43 bp, Artificial Sequence
  Synthetic
cgaaaagaatgctctttcccctgcaaaagagcggtttttaccc

SEQ ID NO: 3356 - DNA, 42 bp, Artificial Sequence
  Synthetic
tgaaagaacgtgtccataccatggggccaaacattgcgagta

SEQ ID NO: 3357 - DNA, 39 bp, Artificial Sequence
  Synthetic
taccagccagcgactagtccagaggactatttggagcca

SEQ ID NO: 3358 - DNA, 48 bp, Artificial Sequence
  Synthetic
atgctcatcgagtgttttttgatttagattgatgaccaaatacaagac

SEQ ID NO: 3359 - DNA, 42 bp, Artificial Sequence
  Synthetic
cggttccgcagaccactatggcatgagtgtcgaacagcctcc

SEQ ID NO: 3360 - DNA, 39 bp, Artificial Sequence
  Synthetic
gcggcaacaagtaaactccaccgcccacaggacgtcaag

SEQ ID NO: 3361 - DNA, 38 bp, Artificial Sequence
  Synthetic
tgacagcgtgggggtgatttgtgccctgtgtcctggaa

SEQ ID NO: 3362 - DNA, 41 bp, Artificial Sequence
  Synthetic
acagtatgggtgcggccatcactgggccaaggttatactgg

SEQ ID NO: 3363 - DNA, 40 bp, Artificial Sequence
  Synthetic
ttggtcgaatgcggcaagggtcaactcttctgggtgtcca

SEQ ID NO: 3364 - DNA, 40 bp, Artificial Sequence
  Synthetic
acaaaccccgtggagttcatcctaacattaggccccccgc

SEQ ID NO: 3365 - DNA, 40 bp, Artificial Sequence
  Synthetic
gtgtggtggtgtgcaggagcaattggacctatggtgagcg

SEQ ID NO: 3366 - DNA, 39 bp, Artificial Sequence
  Synthetic
cccatgattccctgcggccgaagcaacctgcaagaacgt

SEQ ID NO: 3367 - DNA, 41 bp, Artificial Sequence
  Synthetic
ccacccttaacctgcaacgggtttcatagcccgagtggagg

SEQ ID NO: 3368 - DNA, 40 bp, Artificial Sequence
  Synthetic
cgcggagaatacgatgggttcttgaaggattgggcagcgt

SEQ ID NO: 3369 - DNA, 41 bp, Artificial Sequence
  Synthetic
gccccatggaagagtgtccacaggtgcagttcttatccacg

SEQ ID NO: 3370 - DNA, 40 bp, Artificial Sequence
  Synthetic
aacacctaccacatgcccggttacctcaagggttcctcgg

SEQ ID NO: 3371 - DNA, 37 bp, Artificial Sequence
  Synthetic
ctccggtcctgatgttggggtgttcgggttcggggca

SEQ ID NO: 3372 - DNA, 41 bp, Artificial Sequence
  Synthetic
acgcccagactggtcaattgtttaaagggcggtaggcatct

SEQ ID NO: 3373 - DNA, 40 bp, Artificial Sequence
  Synthetic
tctccctgtacggcccctacgagactactacagtgcccca

SEQ ID NO: 3374 - DNA, 42 bp, Artificial Sequence
  Synthetic
gagtggggccagttaaagtcggccagctgggatacaatgtgg

SEQ ID NO: 3375 - DNA, 38 bp, Artificial Sequence
  Synthetic
aagaggggaggtcaccgcggaccttgccgggtaatccc

SEQ ID NO: 3376 - DNA, 38 bp, Artificial Sequence
  Synthetic
atgtggcgccgcagaacgtcaatactctgccctggagc

SEQ ID NO: 3377 - DNA, 39 bp, Artificial Sequence
  Synthetic
aagggcactccggggagttgcggcactgacagacttcaa

SEQ ID NO: 3378 - DNA, 40 bp, Artificial Sequence
  Synthetic
acgccatccagctccgtgaaacaatctgaagtgtccctgc

SEQ ID NO: 3379 - DNA, 38 bp, Artificial Sequence
  Synthetic
gcaggtggccttgagagaggtctccaccctctctggca

SEQ ID NO: 3380 - DNA, 36 bp, Artificial Sequence
  Synthetic
gcaggtggtatcgggcagcgacttggaagcgaccgg

SEQ ID NO: 3381 - DNA, 40 bp, Artificial Sequence
  Synthetic
gccccagtccaggtgtatgacacagggtcatggtcaaccg

SEQ ID NO: 3382 - DNA, 41 bp, Artificial Sequence
  Synthetic
cgccgtatccgtacttggaacgccctagaggaagcctgtgg

SEQ ID NO: 3383 - DNA, 42 bp, Artificial Sequence
  Synthetic
gtcgtcaccacataccaggagcgctttagcctcctgtagagc

SEQ ID NO: 3384 - DNA, 41 bp, Artificial Sequence
  Synthetic
gcactatccgagcccacaaggcggttaattcctggctaggg

SEQ ID NO: 3385 - DNA, 38 bp, Artificial Sequence
  Synthetic
atggcggccctacctccctgttggagacatcgggctcg

SEQ ID NO: 3386 - DNA, 43 bp, Artificial Sequence
  Synthetic
tactgcgtaggtgcactaggcttgtagatctgttctctaaacg

SEQ ID NO: 3387 - DNA, 42 bp, Artificial Sequence
  Synthetic
ggtgttcacgtgcctccgatagggttagagacgtgctagtgc

SEQ ID NO: 3388 - DNA, 45 bp, Artificial Sequence
  Synthetic
gtggttgaatgactttgacttttgagagtgccaagaaatttgaca

SEQ ID NO: 3389 - DNA, 43 bp, Artificial Sequence
  Synthetic
cgcttattatagcagccaacatagggcaagggaggtaggacta

SEQ ID NO: 3390 - DNA, 38 bp, Artificial Sequence
  Synthetic
tccaagcaccttttacgggcattgttgagtcctgcggt

SEQ ID NO: 3391 - DNA, 46 bp, Artificial Sequence
  Synthetic
gaccaccagttacatatgccataatgacgccatggtttatacttca

SEQ ID NO: 3392 - DNA, 41 bp, Artificial Sequence
  Synthetic
acctaagttgagtgatcgcaacttgttaacaaggcactcga

SEQ ID NO: 3393 - DNA, 40 bp, Artificial Sequence
  Synthetic
caggagacaatgcgcagtattaccagtctgtgtaaatggc

SEQ ID NO: 3394 - DNA, 46 bp, Artificial Sequence
  Synthetic
tgcatcgtcctcttcttcctcacttttcatcacgtatgtattgttc

SEQ ID NO: 3395 - DNA, 46 bp, Artificial Sequence
  Synthetic
aggtgtatgttagcagcatttacaatgtgttgacatcgttaaggag

SEQ ID NO: 3396 - DNA, 42 bp, Artificial Sequence
  Synthetic
aagactgaagtggtttagcacctcacaggacatcttacttgc

SEQ ID NO: 3397 - DNA, 42 bp, Artificial Sequence
  Synthetic
tcacctaccatgtaaggtgcatgaacatgcttagaggtgaag

SEQ ID NO: 3398 - DNA, 47 bp, Artificial Sequence
  Synthetic
gctctaacatccatgcatataggcaaactgtatcctggaatttgaga

SEQ ID NO: 3399 - DNA, 44 bp, Artificial Sequence
  Synthetic
tgatgacgaagtgaggtatccattccgtagtgtcagtatcatca

SEQ ID NO: 3400 - DNA, 47 bp, Artificial Sequence
  Synthetic
agcttcactacgtagtgtgtcatcatgtaaatcatgagggtaagact

SEQ ID NO: 3401 - DNA, 46 bp, Artificial Sequence
  Synthetic
ggtagtagttttctgaccacaatgtcatgctaatttggaatctgca

SEQ ID NO: 3402 - DNA, 44 bp, Artificial Sequence
  Synthetic
tggtcctttgtactctgacatcttaaggagaccctctatcgtat

SEQ ID NO: 3403 - DNA, 40 bp, Artificial Sequence
  Synthetic
ccactacatcgccattcaagtccaaagccagcttcacgag

SEQ ID NO: 3404 - DNA, 47 bp, Artificial Sequence
  Synthetic
tggtttaagtatgacattgcctacaaccatacagaaggaagtcatag

SEQ ID NO: 3405 - DNA, 46 bp, Artificial Sequence
  Synthetic
ggaaaagaaccttcacagaaatccagctccttcttattgtaatggc

SEQ ID NO: 3406 - DNA, 39 bp, Artificial Sequence
  Synthetic
ctaaccattgcagaaacgggttcttggctcatgtggttt

SEQ ID NO: 3407 - DNA, 44 bp, Artificial Sequence
  Synthetic
gtcagtagggttgattggtcttttcattagtgatgaagttgctc

SEQ ID NO: 3408 - DNA, 47 bp, Artificial Sequence
  Synthetic
gcaacaagtgccttaagtttttccagtttccgttaagatgtttgatg

SEQ ID NO: 3409 - DNA, 45 bp, Artificial Sequence
  Synthetic
gcagctgttcagataaagacatgtacatatcaatgcccaagtagc

SEQ ID NO: 3410 - DNA, 46 bp, Artificial Sequence
  Synthetic
accagcatgtttatttgcaaaacaaaaatcattggttacaaagcca

SEQ ID NO: 3411 - DNA, 43 bp, Artificial Sequence
  Synthetic
tctggacgaagctcactataagaaagctatgggcaaacctgtg

SEQ ID NO: 3412 - DNA, 39 bp, Artificial Sequence
  Synthetic
ccaccagccactactgaagcttactcctcttgtgcaacc

SEQ ID NO: 3413 - DNA, 47 bp, Artificial Sequence
  Synthetic
cgctacgcaattttaggtacatttcgttacatttagtaccttcgagg

SEQ ID NO: 3414 - DNA, 40 bp, Artificial Sequence
  Synthetic
aaccactctgcagaacagcagctgatgttctctaccaacc

SEQ ID NO: 3415 - DNA, 46 bp, Artificial Sequence
  Synthetic
cggacaaatttatacttgggtgtctaaaattgtctgcttaggctta

SEQ ID NO: 3416 - DNA, 47 bp, Artificial Sequence
  Synthetic
acatgatcttgtgtcaaaggttcatagattcaccactactttgaatg

SEQ ID NO: 3417 - DNA, 48 bp, Artificial Sequence
  Synthetic
gaccactgtgtactttgaacaagacatcattggatgcttttaactttc

SEQ ID NO: 3418 - DNA, 50 bp, Artificial Sequence
  Synthetic
cgacaccagaatagttagaggttactctactatggtaatgctttagatca

SEQ ID NO: 3419 - DNA, 43 bp, Artificial Sequence
  Synthetic
cctccaatacccaacaacttaatgtatatgaactcccaggggc

SEQ ID NO: 3420 - DNA, 47 bp, Artificial Sequence
  Synthetic
acaacctattaatgtctacagcaccagaagatggtttctcttttgtc

SEQ ID NO: 3421 - DNA, 43 bp, Artificial Sequence
  Synthetic
gcactagttacttttgccctcttgcaggctatgacccaaatgt

SEQ ID NO: 3422 - DNA, 43 bp, Artificial Sequence
  Synthetic
gtcgtagtgctactggactcagttggcctcttattgttacagc

SEQ ID NO: 3423 - DNA, 42 bp, Artificial Sequence
  Synthetic
gcaggtacttctgtagcatttccatatggtgctgggcagttt

SEQ ID NO: 3424 - DNA, 45 bp, Artificial Sequence
  Synthetic
gggtcattagcacaagtggtagtaaaggattctgtgacttgaaag

SEQ ID NO: 3425 - DNA, 48 bp, Artificial Sequence
  Synthetic
ccatgtcaccatctactctaaacttataacttggttaaagattgtcca

SEQ ID NO: 3426 - DNA, 44 bp, Artificial Sequence
  Synthetic
cctacaatgcctgcatcacgtgtacgccaatcattattaaagac

SEQ ID NO: 3427 - DNA, 48 bp, Artificial Sequence
  Synthetic
ggatacacctatcatccaaacagtttctcttcgaccgttattttaaat

SEQ ID NO: 3428 - DNA, 47 bp, Artificial Sequence
  Synthetic
tgacagtttgaaaagcaacattgtttattgctagataaacgcactac

SEQ ID NO: 3429 - DNA, 48 bp, Artificial Sequence
  Synthetic
acagatagagacaccagctacggaactcaaatgaatcttaagtatgcc

SEQ ID NO: 3430 - DNA, 43 bp, Artificial Sequence
  Synthetic
cgttagctaacctgtagaaacgggttcttgctcgcaaacataa

SEQ ID NO: 3431 - DNA, 46 bp, Artificial Sequence
  Synthetic
cggcatcatcagaaagaatcatcatatcatgaattcgtggatgagt

SEQ ID NO: 3432 - DNA, 47 bp, Artificial Sequence
  Synthetic
agacatcagcatactcctgattaggacttatgattgaaaggttcgtg

SEQ ID NO: 3433 - DNA, 45 bp, Artificial Sequence
  Synthetic
gcaaacatagggattaacagacaacgaccattcctatgttgcaag

SEQ ID NO: 3434 - DNA, 40 bp, Artificial Sequence
  Synthetic
ttcctcagtggctttgagcgccaacacttgtactgagaga

SEQ ID NO: 3435 - DNA, 43 bp, Artificial Sequence
  Synthetic
gtgttgggtacaagccagtaatcttagtgcacctactctagtg

SEQ ID NO: 3436 - DNA, 44 bp, Artificial Sequence
  Synthetic
agcattgacaacactcaagtcataaatgcattgccagaaacaac

SEQ ID NO: 3437 - DNA, 47 bp, Artificial Sequence
  Synthetic
tgattgcagatgaaacatcatgtgtaaaagcacacaaggataagtca

SEQ ID NO: 3438 - DNA, 47 bp, Artificial Sequence
  Synthetic
cgacgtggtatttctagacttgtaacattttgtgcataatgtctgat

SEQ ID NO: 3439 - DNA, 44 bp, Artificial Sequence
  Synthetic
aaagccaatccacgcacgaaggttaccctaatatgtttatcacc

SEQ ID NO: 3440 - DNA, 42 bp, Artificial Sequence
  Synthetic
gtaagctcaaagccatgcgcagtgatacactgaaaggattgt

SEQ ID NO: 3441 - DNA, 45 bp, Artificial Sequence
  Synthetic
caatgcagacttcacaaccatgtattataggagatgaactgaggg

SEQ ID NO: 3442 - DNA, 44 bp, Artificial Sequence
  Synthetic
catcacagcctggtaagttcaagaatgcaattgtgtgtaggttt

SEQ ID NO: 3443 - DNA, 45 bp, Artificial Sequence
  Synthetic
cctggtaaatgtattccacaggttaatttctgctggatttagcct

SEQ ID NO: 3444 - DNA, 43 bp, Artificial Sequence
  Synthetic
acaagacagtaagtgaagaacaagctctgcacaatgactgaca

SEQ ID NO: 3445 - DNA, 45 bp, Artificial Sequence
  Synthetic
cctcgagcttatatcgctgtatgaataagcccagatcacaaatgg

SEQ ID NO: 3446 - DNA, 50 bp, Artificial Sequence
  Synthetic
ccaaagcatgaatgaaatttcagcaaataaagtcacaagatttgtcagtg

SEQ ID NO: 3447 - DNA, 44 bp, Artificial Sequence
  Synthetic
ccaattaaagtagaatctgcgtcggctcagacaatggttgccaa

SEQ ID NO: 3448 - DNA, 45 bp, Artificial Sequence
  Synthetic
tgccaagatagttagccccaattggacagcttttgttacaaatgt

SEQ ID NO: 3449 - DNA, 43 bp, Artificial Sequence
  Synthetic
tgtctgtgtacccatgggtttgtaactttgaattgtgtgacaa

SEQ ID NO: 3450 - DNA, 44 bp, Artificial Sequence
  Synthetic
acttgagcataaatgtagttggcttttttcacctgctcaagaca

SEQ ID NO: 3451 - DNA, 50 bp, Artificial Sequence
  Synthetic
gcaaagatcattcaacttagtggcactacaactcaacatttttttcaacc

SEQ ID NO: 3452 - DNA, 43 bp, Artificial Sequence
  Synthetic
gccaataacaattaagagcaggtggtaggccctttgagagaga

SEQ ID NO: 3453 - DNA, 50 bp, Artificial Sequence
  Synthetic
agcatttgttccaggtgtaattacacatctgaaatattagacatttcacc

SEQ ID NO: 3454 - DNA, 47 bp, Artificial Sequence
  Synthetic
agcaatggtgttattagagtaagcaactagccaaaaatctattgtgg

SEQ ID NO: 3455 - DNA, 46 bp, Artificial Sequence
  Synthetic
gcattcgccatattgcttcatgaaaggtcttttattgaggacttgc

SEQ ID NO: 3456 - DNA, 49 bp, Artificial Sequence
  Synthetic
tgcagttgatgttgttgtaagtgattctatgagaaccaaaaacaaatcg

SEQ ID NO: 3457 - DNA, 42 bp, Artificial Sequence
  Synthetic
ggacataaggtggtagccctttctgagtgtgttcttggacaa

SEQ ID NO: 3458 - DNA, 48 bp, Artificial Sequence
  Synthetic
gctcttctttgaatgagtcaagctctcgttattggcatcattaacaac

SEQ ID NO: 3459 - DNA, 42 bp, Artificial Sequence
  Synthetic
aagagcatgcacccttgaggcatcgtcatggttacaatcttg

SEQ ID NO: 3460 - DNA, 42 bp, Artificial Sequence
  Synthetic
gcaaatgaactggaagcccttatgctgtttttcagagcgcta

SEQ ID NO: 3461 - DNA, 46 bp, Artificial Sequence
  Synthetic
gtgaaatagccatgtacaacgacataattggtggttattctgagga

SEQ ID NO: 3462 - DNA, 43 bp, Artificial Sequence
  Synthetic
gcaagaataccacgaaagcaagaaatcggaagaaacaggtacg

SEQ ID NO: 3463 - DNA, 43 bp, Artificial Sequence
  Synthetic
cctgttccgattagaataggcaaattcctggaacaatggaacc

SEQ ID NO: 3464 - DNA, 40 bp, Artificial Sequence
  Synthetic
acagcgccctagggagtgtcacttgtcattggtgctgtga

SEQ ID NO: 3465 - DNA, 48 bp, Artificial Sequence
  Synthetic
cctgatagtgatatagctcgcaagcatgaaaattattctcttcctgac

SEQ ID NO: 3466 - DNA, 47 bp, Artificial Sequence
  Synthetic
acatgaggtttattagatgcacagcttgtatttctctatgcagttgc

SEQ ID NO: 3467 - DNA, 41 bp, Artificial Sequence
  Synthetic
ccattgcgtcctccattctggtccccccgcattacatttgg

SEQ ID NO: 3468 - DNA, 40 bp, Artificial Sequence
  Synthetic
tgccaatgtggtctttgggtgtacttccctacggcgctaa

SEQ ID NO: 3469 - DNA, 45 bp, Artificial Sequence
  Synthetic
agcagatttcttagtgacagtttggcttgagagcaaagtttctgg

SEQ ID NO: 3470 - DNA, 43 bp, Artificial Sequence
  Synthetic
gttcagcagtatgacgttgtctttcatggagccattaaattgg

SEQ ID NO: 3471 - DNA, 49 bp, Artificial Sequence
  Synthetic
cctacttgtgctgtttagttacgagttccgtttacgatacatagtctac

SEQ ID NO: 3472 - DNA, 39 bp, Artificial Sequence
  Synthetic
gggaagggtgggaaaaactggccatgcggtgttgtactc

SEQ ID NO: 3473 - DNA, 41 bp, Artificial Sequence
  Synthetic
caagaagggtgagcaggcagcagtagacctggcagatgagg

SEQ ID NO: 3474 - DNA, 43 bp, Artificial Sequence
  Synthetic
gcacccatgatgacaatctatacacgtgtccgtgtttcctgtt

SEQ ID NO: 3475 - DNA, 46 bp, Artificial Sequence
  Synthetic
cacaagcttcaactgttggtgactgttaaagatgtgttagaaaagg

SEQ ID NO: 3476 - DNA, 38 bp, Artificial Sequence
  Synthetic
agggcatcaggcaatttccatggacagtcgttcttgga

SEQ ID NO: 3477 - DNA, 44 bp, Artificial Sequence
  Synthetic
ccaactgtcatcactaggtcttttaaggtgagcaaggtagagaa

SEQ ID NO: 3478 - DNA, 47 bp, Artificial Sequence
  Synthetic
ctgagtggtactaaacacaaccttatcaattagccctatgttttcag

SEQ ID NO: 3479 - DNA, 50 bp, Artificial Sequence
  Synthetic
ggttgtgaggcaatatctactggtatgaatatgtacactgttgatttacg

SEQ ID NO: 3480 - DNA, 40 bp, Artificial Sequence
  Synthetic
ccccacatcccacactaaatgttcctggtgttggaaaacc

SEQ ID NO: 3481 - DNA, 48 bp, Artificial Sequence
  Synthetic
tgtgagtactccttcttgtgtgtcaaagatttttgcttaagattagcc

SEQ ID NO: 3482 - DNA, 45 bp, Artificial Sequence
  Synthetic
ttcctgattgccatgtgtaatcatcttatgtatgtacccccagga

SEQ ID NO: 3483 - DNA, 45 bp, Artificial Sequence
  Synthetic
cgaggacaccatgcttttatatgtcacgattcaaatattgtgtgc

SEQ ID NO: 3484 - DNA, 50 bp, Artificial Sequence
  Synthetic
tcacatcattaccttcagtgtttgttgattctattcttgtatcatactcc

SEQ ID NO: 3485 - DNA, 49 bp, Artificial Sequence
  Synthetic
cacactggaattttctcaggtcaattggtgttataggtatgattacagc

SEQ ID NO: 3486 - DNA, 45 bp, Artificial Sequence
  Synthetic
acgcacagagtttctctttaagaaacacaaactgtaattgccact

SEQ ID NO: 3487 - DNA, 43 bp, Artificial Sequence
  Synthetic
tttaggatctgggggcaaagaatactggaaaatctcttgccac

SEQ ID NO: 3488 - DNA, 46 bp, Artificial Sequence
  Synthetic
tgaagatactgttggtggtgttagtaccatttacatccaagtttgt

SEQ ID NO: 3489 - DNA, 49 bp, Artificial Sequence
  Synthetic
accctgaagtgtacagaacaatttctataggtataatagctaatgtggt

SEQ ID NO: 3490 - DNA, 45 bp, Artificial Sequence
  Synthetic
gcaaatcataggaatcagagacctttggtacttccaacacattct

SEQ ID NO: 3491 - DNA, 42 bp, Artificial Sequence
  Synthetic
ccttgtacaaaacacccccacatactgcacgaatgatcaagt

SEQ ID NO: 3492 - DNA, 49 bp, Artificial Sequence
  Synthetic
gtgactatacctgggtttttgtggatgtgttattcagaagtgtatttgg

SEQ ID NO: 3493 - DNA, 43 bp, Artificial Sequence
  Synthetic
ctcatcagctctgaatcctcttttaacccctgctgataagtct

SEQ ID NO: 3494 - DNA, 43 bp, Artificial Sequence
  Synthetic
ggtagaagcactaacacacagtctaaagaggtggagttgtcac

SEQ ID NO: 3495 - DNA, 49 bp, Artificial Sequence
  Synthetic
cttcacaagctacctgtacattagatctaaaaggagattgtttacagac

SEQ ID NO: 3496 - DNA, 47 bp, Artificial Sequence
  Synthetic
ccatcaaatgcatttctcatatgcagggtaaagtaggctttctagat

SEQ ID NO: 3497 - DNA, 43 bp, Artificial Sequence
  Synthetic
tgtgatgtgatctctaaggtctgtactgagcgtacgttttgct

SEQ ID NO: 3498 - DNA, 48 bp, Artificial Sequence
  Synthetic
tgacaggagcaagaatagttttgttcaacctgatgtgttaaagtatgg

SEQ ID NO: 3499 - DNA, 44 bp, Artificial Sequence
  Synthetic
ttcacagtcatgccccaacccagaaatatgggcatttatacctg

SEQ ID NO: 3500 - DNA, 41 bp, Artificial Sequence
  Synthetic
ggaagatgctccaggttctactggcccattacaaggcctaa

SEQ ID NO: 3501 - DNA, 42 bp, Artificial Sequence
  Synthetic
ctctgtgattggtacctgctctatcacacctgtcactgcatt

SEQ ID NO: 3502 - DNA, 50 bp, Artificial Sequence
  Synthetic
tcggggacaaatacctttaaaactgagaaggggaaacattaaatattcct

SEQ ID NO: 3503 - DNA, 46 bp, Artificial Sequence
  Synthetic
gacgttccctgtctgaattgtatgtattcagatgtaagttaccaga

SEQ ID NO: 3504 - DNA, 43 bp, Artificial Sequence
  Synthetic
gctgttctcgctttccaaaaaagaacaattgctttgtggcctg

SEQ ID NO: 3505 - DNA, 48 bp, Artificial Sequence
  Synthetic
gccattcttccaatattctgggattatgtaaaataactttggatgctg

SEQ ID NO: 3506 - DNA, 48 bp, Artificial Sequence
  Synthetic
tgaccccatgagtcagataaaacagcttgaataaattgtttactgtgc

SEQ ID NO: 3507 - DNA, 47 bp, Artificial Sequence
  Synthetic
gaaggtaacaccaactcttccaaataaagtatgaaggggactattgc

SEQ ID NO: 3508 - DNA, 43 bp, Artificial Sequence
  Synthetic
ccaatctgcagtttgtaattcaagaccaggacctgctttcaag

SEQ ID NO: 3509 - DNA, 43 bp, Artificial Sequence
  Synthetic
agtctcggactcaaatctacaagatccgagctttagtggacct

SEQ ID NO: 3510 - DNA, 42 bp, Artificial Sequence
  Synthetic
tgatcctgcagtacatcgaaaccagtgtgacgaagaagatga

SEQ ID NO: 3511 - DNA, 48 bp, Artificial Sequence
  Synthetic
tggaactagtaacgacagaggaaattattcaaatactggacaatggac

SEQ ID NO: 3512 - DNA, 41 bp, Artificial Sequence
  Synthetic
ggctcttggttctctggtggttcgacaagagaacgacgacg

SEQ ID NO: 3513 - DNA, 45 bp, Artificial Sequence
  Synthetic
cctctggatttatcacatccaaaggtacaaaaccaagcataccac

SEQ ID NO: 3514 - DNA, 49 bp, Artificial Sequence
  Synthetic
ggtttgaacctgttgtacaaaacgcttttaatagggttatcaatcaagg

SEQ ID NO: 3515 - DNA, 43 bp, Artificial Sequence
  Synthetic
gttgaaaaaggtccagttggctatcgcgcaggtgttaagacaa

SEQ ID NO: 3516 - DNA, 41 bp, Artificial Sequence
  Synthetic
tgctttgccttctccatcttctaatgtcgctgtttggagac

SEQ ID NO: 3517 - DNA, 43 bp, Artificial Sequence
  Synthetic
acatcttctcatttttctctcagctcctgtcaggaatgggaac

SEQ ID NO: 3518 - DNA, 41 bp, Artificial Sequence
  Synthetic
tgtctttgctgtgttcatagctggtcttcggtacctggagt

SEQ ID NO: 3519 - DNA, 45 bp, Artificial Sequence
  Synthetic
agtttccatctgttcataagatcgtactcactgagtgacatcaac

SEQ ID NO: 3520 - DNA, 44 bp, Artificial Sequence
  Synthetic
tcctctttgtcatacagaatcagctaggtccaatctaccgaaga

SEQ ID NO: 3521 - DNA, 40 bp, Artificial Sequence; identical to SEQ ID NO: 2016
  Synthetic

SEQ ID NO: 3522 - DNA, 43 bp, Artificial Sequence
  Synthetic
ctgatgaagcttgagactctcagacaattggtgtggatggcat

SEQ ID NO: 3523 - DNA, 44 bp, Artificial Sequence
  Synthetic
cccaaaagagctctttcatttgatctttttgttcatgatgcccg

SEQ ID NO: 3524 - DNA, 43 bp, Artificial Sequence
  Synthetic
gccaccccaaataaacaaaggattaggctgttgctgcttcaat

SEQ ID NO: 3525 - DNA, 42 bp, Artificial Sequence
  Synthetic
tccatcttgctttctggcgcaaattgacacgattactgttga

SEQ ID NO: 3526 - DNA, 46 bp, Artificial Sequence
  Synthetic
gaggcgtgtataaaaagaaatgtgtccgttgaggtatttttctcac

SEQ ID NO: 3527 - DNA, 48 bp, Artificial Sequence
  Synthetic
cagtaccttccattgattagcctttgttgaaatgaaaaaacctcatgc

SEQ ID NO: 3528 - DNA, 50 bp, Artificial Sequence
  Synthetic
gcaaaaggataattagcagcttctggttggtaaatcaaccttatttaacg

SEQ ID NO: 3529 - DNA, 43 bp, Artificial Sequence
  Synthetic
tgcaaaacattaaactctgctactgtaaacgttatgcgcgtgt

SEQ ID NO: 3530 - DNA, 47 bp, Artificial Sequence
  Synthetic
ttcagtaagaccgatagcttccaaacgtgcagaagaagaaatttcag

SEQ ID NO: 3531 - DNA, 48 bp, Artificial Sequence
  Synthetic
agccataaaaccaatattgtgctttatggtaaaaatgattgttggtct

SEQ ID NO: 3532 - DNA, 45 bp, Artificial Sequence
  Synthetic
ccaactttgattcggttaaattcctaggaggacataatggcatta

SEQ ID NO: 3533 - DNA, 42 bp, Artificial Sequence
  Synthetic
caaagaagcaagcctaagcctaaagtgggcttgtctggtcta

SEQ ID NO: 3534 - DNA, 45 bp, Artificial Sequence
  Synthetic
gcctgcaaaatcttacctaagtcatggaggctcaaaatttgtgat

SEQ ID NO: 3535 - DNA, 40 bp, Artificial Sequence
  Synthetic
agcacaacaaaacaagccatttcagcaattagaagcgctg

SEQ ID NO: 3536 - DNA, 48 bp, Artificial Sequence
  Synthetic
cacaaaacctttcaagagacgtttgaagttactaagttttgacgatgt

SEQ ID NO: 3537 - DNA, 46 bp, Artificial Sequence
  Synthetic
gcaattaatggctgatttgcggagaataccgattgaaatttctcct

SEQ ID NO: 3538 - DNA, 44 bp, Artificial Sequence
  Synthetic
cccaaatctacggctgataaagattgtggtgatcacatctgctt

SEQ ID NO: 3539 - DNA, 39 bp, Artificial Sequence
  Synthetic
tacgagatccccaacgttggtggtaccgaaaacatgagt

SEQ ID NO: 3540 - DNA, 45 bp, Artificial Sequence
  Synthetic
gcagggcgtaactttgctaaatcaagatgaataccctaaatttgg

SEQ ID NO: 3541 - DNA, 42 bp, Artificial Sequence
  Synthetic
gcaatagctcctccattgacattacttttgctgctcaggctt

SEQ ID NO: 3542 - DNA, 40 bp, Artificial Sequence
  Synthetic
accagtgcatcaattaacgcttcacgattatggtcggtgg

SEQ ID NO: 3543 - DNA, 47 bp, Artificial Sequence
  Synthetic
tgaggttaatcgaccaaaatcttcttcttgccaaagaatatctgaac

SEQ ID NO: 3544 - DNA, 50 bp, Artificial Sequence
  Synthetic
gagcaacccttcaagataaacatcttttgaaggataagattgatagaagg

SEQ ID NO: 3545 - DNA, 50 bp, Artificial Sequence
  Synthetic
gcttcttttgtagctactagtgtcgctttgatcagcatttaaaactactg

SEQ ID NO: 3546 - DNA, 44 bp, Artificial Sequence
  Synthetic
acaatggggcatttccgatgctaaaaaatggttagttaagccag

SEQ ID NO: 3547 - DNA, 44 bp, Artificial Sequence
  Synthetic
gaccttgaaagtggcaaagttttagttgtcaagagcttactgac

SEQ ID NO: 3548 - DNA, 44 bp, Artificial Sequence
  Synthetic
gcatttttattaccacaagctgccaaaagtaaatggttggcagc

SEQ ID NO: 3549 - DNA, 44 bp, Artificial Sequence
  Synthetic
ccagtcacaaaatcttctgctgttatgtctcttggtatacggct

SEQ ID NO: 3550 - DNA, 44 bp, Artificial Sequence
  Synthetic
caacattcttagcatcccagtagtttggtgcttacttcttgagc

SEQ ID NO: 3551 - DNA, 50 bp, Artificial Sequence
  Synthetic
acgaaaatccttgttgttaagagcttctttcaaaaacactaagaaagacc

SEQ ID NO: 3552 - DNA, 45 bp, Artificial Sequence
  Synthetic
ctaattgaactgggaaggttacaccaaagctgagtttgcaaaagc

SEQ ID NO: 3553 - DNA, 44 bp, Artificial Sequence
  Synthetic
tgtgtcatcagccagctgtacatcagtttttagaggagaattgg

SEQ ID NO: 3554 - DNA, 45 bp, Artificial Sequence
  Synthetic
ggtgtccactcttgtgcctgctaaaaagagcttatttgtgacaag

SEQ ID NO: 3555 - DNA, 41 bp, Artificial Sequence
  Synthetic
tgcttggggtaatggctcactggcacctgcttctagtccag

SEQ ID NO: 3556 - DNA, 41 bp, Artificial Sequence
  Synthetic
cattggattgtaggcatggtttgcaccacaagtgttgcaac

SEQ ID NO: 3557 - DNA, 42 bp, Artificial Sequence
  Synthetic
tctgtaatactgccgcgatctggccatttgcaagtatttacg

SEQ ID NO: 3558 - DNA, 45 bp, Artificial Sequence
  Synthetic
caggttttcgaggtgttgcaggtcttgaaatgtattatactagtg

SEQ ID NO: 3559 - DNA, 43 bp, Artificial Sequence
  Synthetic
cagttggatgagttaggatcatccttccctcactggaaattcc

SEQ ID NO: 3560 - DNA, 47 bp, Artificial Sequence
  Synthetic
ggtttgaccatagagtcatattggtaggtttatccaccatattgatg

SEQ ID NO: 3561 - DNA, 43 bp, Artificial Sequence
  Synthetic
ccaaaatcatctgattgagcagctactaagccaaccaaagcgt

SEQ ID NO: 3562 - DNA, 44 bp, Artificial Sequence
  Synthetic
ggacgtaattgccctcactattgaaagaaaatgagaccactgtc

SEQ ID NO: 3563 - DNA, 43 bp, Artificial Sequence
  Synthetic
gctgctggtgttttagcaatgataaccaaacagctccgttgag

SEQ ID NO: 3564 - DNA, 47 bp, Artificial Sequence
  Synthetic
cttctgtgccatacataccatagtttatcatttacgatgcccttacc

SEQ ID NO: 3565 - DNA, 45 bp, Artificial Sequence
  Synthetic
aggaatagctcgctctttagggtaagcagagttgaatttgacctt

SEQ ID NO: 3566 - DNA, 46 bp, Artificial Sequence
  Synthetic
tgaaactgattggggctaacgcacatgtctaagttattattggttg

SEQ ID NO: 3567 - DNA, 41 bp, Artificial Sequence
  Synthetic
tgccttcaaaaatggcagctaaatgtggctctagcttttcg

SEQ ID NO: 3568 - DNA, 47 bp, Artificial Sequence
  Synthetic
gctccgtatggtaaatagcttgtaaagatactacgacgattagagaa

SEQ ID NO: 3569 - DNA, 47 bp, Artificial Sequence
  Synthetic
gccgattagccttaagtttggttaagaagcagtcttagctaatcaac

SEQ ID NO: 3570 - DNA, 49 bp, Artificial Sequence
  Synthetic
cgtcatacaacctggtaaataaggttattgttggtcctaatttcaatcg

SEQ ID NO: 3571 - DNA, 45 bp, Artificial Sequence
  Synthetic
ggcttatgcgcttgtttgtaagtaaaaatagggatgatgctatcg

SEQ ID NO: 3572 - DNA, 43 bp, Artificial Sequence
  Synthetic
ccgatttttacacacagttgtcctagccattaccgactaccga

SEQ ID NO: 3573 - DNA, 44 bp, Artificial Sequence
  Synthetic
agctaattgaacatctgctccaacataagccctgattatgctcc

SEQ ID NO: 3574 - DNA, 46 bp, Artificial Sequence
  Synthetic
aatcagattggcctttggtaattgttaaacggtaagaaagtagccg

SEQ ID NO: 3575 - DNA, 44 bp, Artificial Sequence
  Synthetic
gtgattcttgaagagtaccagctttctcttgacgatgctcttcg

SEQ ID NO: 3576 - DNA, 43 bp, Artificial Sequence
  Synthetic
cggtaccagtcttttctttgttgtagctgcagcttctttttcc

SEQ ID NO: 3577 - DNA, 45 bp, Artificial Sequence
  Synthetic
cacctccccataaaaatcccattttacaaaaaagagtttcggtgg

SEQ ID NO: 3578 - DNA, 46 bp, Artificial Sequence
  Synthetic
cggtatattaagcgacataccagtccaagtccccttcttagaaagt

SEQ ID NO: 3579 - DNA, 44 bp, Artificial Sequence
  Synthetic
gcgtcgtaaatggtattggattgataggaaggtcaattggttgc

SEQ ID NO: 3580 - DNA, 44 bp, Artificial Sequence
  Synthetic
ggtgattgacatgttcttgagtcaagttccggctatgaaaatgc

SEQ ID NO: 3581 - DNA, 45 bp, Artificial Sequence
  Synthetic
ggcaacaaatcagcaatcttgttaaaaaatggcaccattgattgc

SEQ ID NO: 3582 - DNA, 44 bp, Artificial Sequence
  Synthetic
gatcgcctttgttactagattctctttatccaaacgtgccaaac

SEQ ID NO: 3583 - DNA, 45 bp, Artificial Sequence
  Synthetic
ccacatatttgctttcttctagggtggctttattcaagacttgcc

SEQ ID NO: 3584 - DNA, 50 bp, Artificial Sequence
  Synthetic
ggtctaaaagagcaactcgattcaacagtttgttccttttagaatcaaag

SEQ ID NO: 3585 - DNA, 43 bp, Artificial Sequence
  Synthetic
gccccaaagccttagaaagattcctactttgctgaaatctacc

SEQ ID NO: 3586 - DNA, 43 bp, Artificial Sequence
  Synthetic
cccttaagcatggtgataccgttttacacctgatgacacactc

SEQ ID NO: 3587 - DNA, 44 bp, Artificial Sequence
  Synthetic
ggtctccatgcaaatgagtaatgaagaaggaacgcaaagacaaa

SEQ ID NO: 3588 - DNA, 43 bp, Artificial Sequence
  Synthetic
cgtctagggttccttctaagtctttgtctggcgcataccattt

SEQ ID NO: 3589 - DNA, 39 bp, Artificial Sequence
  Synthetic
gcttcatgagcgatttgtgctcggattgcgagaaatcac

SEQ ID NO: 3590 - DNA, 41 bp, Artificial Sequence
  Synthetic
tccaactcgaggcattctttgaacaaagaacgcctagaaca

SEQ ID NO: 3591 - DNA, 39 bp, Artificial Sequence
  Synthetic
tccgataagggcaaacttggtcaggcttgattgcgtcag

SEQ ID NO: 3592 - DNA, 46 bp, Artificial Sequence
  Synthetic
ccgctgttaaaaactcatctaaggcccgctcagttgatttatgatc

SEQ ID NO: 3593 - DNA, 47 bp, Artificial Sequence
  Synthetic
ttaggcgtgtcaagaagaccttttatcagtttttagaggctattggt

SEQ ID NO: 3594 - DNA, 41 bp, Artificial Sequence
  Synthetic
tgagggcttcaactaaagcatccaaacgacctcaactccaa

SEQ ID NO: 3595 - DNA, 40 bp, Artificial Sequence
  Synthetic
agccccatcagcaatcatttgtctttttcagatggggggt

SEQ ID NO: 3596 - DNA, 43 bp, Artificial Sequence
  Synthetic
caaacgtcttgtgttacctcttgatcttagcagccgagtacga

SEQ ID NO: 3597 - DNA, 39 bp, Artificial Sequence
  Synthetic
tgacatcgtgtacgcgtacaaagcagccttgtctgctta

SEQ ID NO: 3598 - DNA, 41 bp, Artificial Sequence
  Synthetic
gttcacaaatcgcacctgctaaacgtcagttagtggaaggg

SEQ ID NO: 3599 - DNA, 48 bp, Artificial Sequence
  Synthetic
aagagattgctcaatagcttgtgtttatggcctgtcaattagatacac

SEQ ID NO: 3600 - DNA, 46 bp, Artificial Sequence
  Synthetic
ggaaaagccaagaaatctgctggatgaacccctaaaacattacact

SEQ ID NO: 3601 - DNA, 42 bp, Artificial Sequence
  Synthetic
agcacccgcattcataaaaacaggtttgaatttgcatgtggc

SEQ ID NO: 3602 - DNA, 45 bp, Artificial Sequence
  Synthetic
gccctttaagatttgcttccatgatttgtggatctgtgtttaagc

SEQ ID NO: 3603 - DNA, 42 bp, Artificial Sequence
  Synthetic
ggttacttgattttcgttgtgcagaaagcaagagcccctgaa

SEQ ID NO: 3604 - DNA, 44 bp, Artificial Sequence
  Synthetic
ggccttcaattcccttgtcaaattccagttgctactttatcgac

SEQ ID NO: 3605 - DNA, 42 bp, Artificial Sequence
  Synthetic
agcaacacgttggcaaaccattgcggtaaaaattcctggacg

SEQ ID NO: 3606 - DNA, 43 bp, Artificial Sequence
  Synthetic
tattgccaccccatttgccattcaggctgtaataatttagcgc

SEQ ID NO: 3607 - DNA, 44 bp, Artificial Sequence
  Synthetic
tggaggaattatggaaaatcaggaaccaaaggtttcaagccttg

SEQ ID NO: 3608 - DNA, 45 bp, Artificial Sequence
  Synthetic
ttacctttcctttgcctacgttgtgccttaaacccatttaattgc

SEQ ID NO: 3609 - DNA, 43 bp, Artificial Sequence
  Synthetic
cggaagaaaaagatggtattgatgccaagtcctgcaacagcta

SEQ ID NO: 3610 - DNA, 48 bp, Artificial Sequence
  Synthetic
acaggctggtaccaattactcattatatttttgatggtcttgtcaacg

SEQ ID NO: 3611 - DNA, 47 bp, Artificial Sequence
  Synthetic
ccagttacgtctttggaaaatgtttgtaatcaccaaaggtttgtagt

SEQ ID NO: 3612 - DNA, 47 bp, Artificial Sequence
  Synthetic
gaatgtgccaagttgcaaaaatctcaggtggagtatatcaattctcc

SEQ ID NO: 3613 - DNA, 45 bp, Artificial Sequence
  Synthetic
cttagtgactacacgcccaaaagagcttcaacgattttttcaatg

SEQ ID NO: 3614 - DNA, 39 bp, Artificial Sequence
  Synthetic
tgacgtgacagtcgaaagcaagccttatttcggtaagct

SEQ ID NO: 3615 - DNA, 47 bp, Artificial Sequence
  Synthetic
aggtctgcgctaagatatggtatataaccattgctcaaaaaagaaga

SEQ ID NO: 3616 - DNA, 41 bp, Artificial Sequence
  Synthetic
gaaggagatttcggacgaaccttgatttgggacataacagc

SEQ ID NO: 3617 - DNA, 43 bp, Artificial Sequence
  Synthetic
tgcatttaatcttggagagcaagaaatgttttaaggcccgtcg

SEQ ID NO: 3618 - DNA, 48 bp, Artificial Sequence
  Synthetic
tgctcttcctagatctcaaaaaaggtaagccaagaatgttaaaaaacc

SEQ ID NO: 3619 - DNA, 43 bp, Artificial Sequence
  Synthetic
ggtggcggtgtagtggttttattatgctggtgattttttctca

SEQ ID NO: 3620 - DNA, 45 bp, Artificial Sequence
  Synthetic
tgcagccttgcttgttaaacaatttgaaaaacgttggataagacg

SEQ ID NO: 3621 - DNA, 44 bp, Artificial Sequence
  Synthetic
aggaactatcatatcaggaggtcttcaagaagtgcaatgatggg

SEQ ID NO: 3622 - DNA, 43 bp, Artificial Sequence
  Synthetic
actcgaaaccatacagaagaaatgatcccaccaaagtaatgcg

SEQ ID NO: 3623 - DNA, 45 bp, Artificial Sequence
  Synthetic
cgcgaaatgctaagattatcggtaatttcacttcttcactagcgt

SEQ ID NO: 3624 - DNA, 43 bp, Artificial Sequence
  Synthetic
tcagccttctatcttgattttgctacgacgacgttctaagcta

SEQ ID NO: 3625 - DNA, 43 bp, Artificial Sequence
  Synthetic
gcagatattcttcgactttgggtccatagaaacacggacatca

SEQ ID NO: 3626 - DNA, 45 bp, Artificial Sequence
  Synthetic
ccaaatggcgagtttacaaaagaacaagaagaaccagagtcaaac

SEQ ID NO: 3627 - DNA, 43 bp, Artificial Sequence
  Synthetic
tctgtttctgatttccgtcaagatcccatgatggatgaaaggt

SEQ ID NO: 3628 - DNA, 41 bp, Artificial Sequence
  Synthetic
gttacccttgagtcagggacatagtcatcctcaccaaaacc

SEQ ID NO: 3629 - DNA, 50 bp, Artificial Sequence
  Synthetic
cgattcaacctctttatactacgcccgatatacgtattagtatcaaggat

SEQ ID NO: 3630 - DNA, 46 bp, Artificial Sequence
  Synthetic
cgtaaggagatggatttagcagaattatcaacctgacttaaagcgt

SEQ ID NO: 3631 - DNA, 38 bp, Artificial Sequence
  Synthetic
aaacagcctttccaatgcgcttgttcccaagctgcttg

SEQ ID NO: 3632 - DNA, 50 bp, Artificial Sequence
  Synthetic
agaggtaaatctcagtgaaacacaactgtgattataagcaaatcatcttg

SEQ ID NO: 3633 - DNA, 48 bp, Artificial Sequence
  Synthetic
aggattaaaccgagtataagcgtagaaacgattaatgtctattctcgt

SEQ ID NO: 3634 - DNA, 45 bp, Artificial Sequence
  Synthetic
ccttttcacggcggtaacacaaagttactaaatagctatagtccg

SEQ ID NO: 3635 - DNA, 41 bp, Artificial Sequence
  Synthetic
gccccctgtgagataaggtagtagctgagctaaactcccat

SEQ ID NO: 3636 - DNA, 42 bp, Artificial Sequence
  Synthetic
tggacttaccgctggtgtaccaatgctttcagcgcttatccc

SEQ ID NO: 3637 - DNA, 42 bp, Artificial Sequence
  Synthetic
gggcttagtgatccggtggtactgttatccccagggtagctt

SEQ ID NO: 3638 - DNA, 41 bp, Artificial Sequence
  Synthetic
cgcagtgaataggcccaagcaaggcgtcaccccctatacat

SEQ ID NO: 3639 - DNA, 45 bp, Artificial Sequence
  Synthetic
gagtccggctaagcagtgagcagctcaatgttataaagataagca

SEQ ID NO: 3640 - DNA, 42 bp, Artificial Sequence
  Synthetic
tgtaccggggctaaaacagtttctctcctaccatgacacttt

SEQ ID NO: 3641 - DNA, 41 bp, Artificial Sequence
  Synthetic
cctacaacaagttcgagcccgtatcgtaactcgccggttca

SEQ ID NO: 3642 - DNA, 38 bp, Artificial Sequence
  Synthetic
tgagaggtcttgtggggcctgacctcctgcgtgcaaag

SEQ ID NO: 3643 - DNA, 48 bp, Artificial Sequence
  Synthetic
cgaaacgtaaagaagaagttgaccttctttgattgttttttcagtagc

SEQ ID NO: 3644 - DNA, 40 bp, Artificial Sequence
  Synthetic
gcagacaaccaaccagctgtcttgttatctgctgccattg

SEQ ID NO: 3645 - DNA, 43 bp, Artificial Sequence
  Synthetic
tgcaggattgtcattgtcagaaatctgggatacgagttgatcc

SEQ ID NO: 3646 - DNA, 45 bp, Artificial Sequence
  Synthetic
tccttgaattaggtgatggtgtctaccaccaagtttgttatcacc

SEQ ID NO: 3647 - DNA, 43 bp, Artificial Sequence
  Synthetic
tcgtacaactccttcagtagtatcacactgcttgacgttttgc

SEQ ID NO: 3648 - DNA, 50 bp, Artificial Sequence
  Synthetic
ccagcgatggtagttgtttataactgcttctaacttgctatctagtttac

SEQ ID NO: 3649 - DNA, 39 bp, Artificial Sequence
  Synthetic
tcgttctcaggatctggcaaaccaaggcacgttctagat

SEQ ID NO: 3650 - DNA, 50 bp, Artificial Sequence
  Synthetic
cgtaggtctgttagtttggtaaacacgataataatcacctaatttagcag

SEQ ID NO: 3651 - DNA, 43 bp, Artificial Sequence
  Synthetic
gcagtttgctattccaagaaactttagcgctcctctacgatag

SEQ ID NO: 3652 - DNA, 41 bp, Artificial Sequence
  Synthetic
tggcaaaactagagaagttgggacttggcatccgtccacta

SEQ ID NO: 3653 - DNA, 41 bp, Artificial Sequence
  Synthetic
gtcacatcacctcgtctatcacggctggtggaacttctgtt

SEQ ID NO: 3654 - DNA, 42 bp, Artificial Sequence
  Synthetic
atttggtgagcacgagggatcacaaaaagatctctttgcctt

SEQ ID NO: 3655 - DNA, 48 bp, Artificial Sequence
  Synthetic
acgatcgctggattctaaatttttgctatgcgcaaaatgatatctttg

SEQ ID NO: 3656 - DNA, 39 bp, Artificial Sequence
  Synthetic
ttgccgtattgctgttccgttggaaaataagcgtgctca

SEQ ID NO: 3657 - DNA, 49 bp, Artificial Sequence
  Synthetic
tctggtagtttttctttgaccttctaagcctattatgatctgatgaaga

SEQ ID NO: 3658 - DNA, 43 bp, Artificial Sequence
  Synthetic
cataggctggcgatcaataaagatctcgtgattgtggttgacc

SEQ ID NO: 3659 - DNA, 43 bp, Artificial Sequence
  Synthetic
gagtttatcaaacgcttgaaaggctctattgagagcgcacaga

SEQ ID NO: 3660 - DNA, 44 bp, Artificial Sequence
  Synthetic
agggtttgattttgccaaatcttgcgatcaagaacaagaagctc

SEQ ID NO: 3661 - DNA, 49 bp, Artificial Sequence
  Synthetic
cccgttcaaattggctcttgtatttaccaagcctataaagaaaaacaag

SEQ ID NO: 3662 - DNA, 44 bp, Artificial Sequence
  Synthetic
ggcttcttgttcagggagggtagctctagtgatatcaaatatgc

SEQ ID NO: 3663 - DNA, 39 bp, Artificial Sequence
  Synthetic
acatgatgcgctcagaagggggtcagaatcaccacttcc

SEQ ID NO: 3664 - DNA, 43 bp, Artificial Sequence
  Synthetic
cagaaaaagcagctgaattggtacacaaaagggcacaggttga

SEQ ID NO: 3665 - DNA, 48 bp, Artificial Sequence
  Synthetic
aggaccgtcatgaatactaaaatgtgaaaggaattcacacttatgact

SEQ ID NO: 3666 - DNA, 40 bp, Artificial Sequence
  Synthetic
attgcggtgtgaagacctgcctcagtttgactttgcctta

SEQ ID NO: 3667 - DNA, 49 bp, Artificial Sequence
  Synthetic
tccctacctagaagtttgtacttgtctctttaatcagcttgagattgac

SEQ ID NO: 3668 - DNA, 47 bp, Artificial Sequence
  Synthetic
gccaaatcgtaaacaacgttggaaatcaaagatgtagataatcaccg

SEQ ID NO: 3669 - DNA, 42 bp, Artificial Sequence
  Synthetic
agaagcttcgcaatcactatcaaagattgggctttatcacgt

SEQ ID NO: 3670 - DNA, 48 bp, Artificial Sequence
  Synthetic
cgatcagtgggttattggttatacggtctgattaaatcctacccattg

SEQ ID NO: 3671 - DNA, 44 bp, Artificial Sequence
  Synthetic
agcgtgacaaccaatccattggattactccattattggcaaagg

SEQ ID NO: 3672 - DNA, 44 bp, Artificial Sequence
  Synthetic
agtgaaaatccgactttcagaagttccacgagtggtttgattgt

SEQ ID NO: 3673 - DNA, 40 bp, Artificial Sequence
  Synthetic
gcattagcaaaggcggtagccgcatcagtatgtcgccgcc

SEQ ID NO: 3674 - DNA, 38 bp, Artificial Sequence
  Synthetic
atgcaacggcggatgttgttggatatgcagcgctggcg

SEQ ID NO: 3675 - DNA, 40 bp, Artificial Sequence
  Synthetic
gtccggcaacaacgcctcagcaatgcgtgctcatggtatg

SEQ ID NO: 3676 - DNA, 40 bp, Artificial Sequence
  Synthetic
gggcatggggcaaggatttgcgcgcgttagggctattggg

SEQ ID NO: 3677 - DNA, 40 bp, Artificial Sequence
  Synthetic
gtgagggcgtactcatcggtgaaagtcaccgttggcacag

SEQ ID NO: 3678 - DNA, 42 bp, Artificial Sequence
  Synthetic
tgacacccaatcccgacactgtaaagagacatttgtccccgg

SEQ ID NO: 3679 - DNA, 42 bp, Artificial Sequence
  Synthetic
gcgcggatggtccaattatccactgacagccgacttttaccc

SEQ ID NO: 3680 - DNA, 38 bp, Artificial Sequence
  Synthetic
ccaagatgcaggcgggggaggccaccgtctacaccgga

SEQ ID NO: 3681 - DNA, 38 bp, Artificial Sequence
  Synthetic
cctcataaactgccgccccatcgagtccagccggtcca

SEQ ID NO: 3682 - DNA, 40 bp, Artificial Sequence
  Synthetic
actcctgataggccacctgcatgtggcgcctgactatagg

SEQ ID NO: 3683 - DNA, 38 bp, Artificial Sequence
  Synthetic
gccctccattgcgccttaagttggggaagtccgtcggt

SEQ ID NO: 3684 - DNA, 42 bp, Artificial Sequence
  Synthetic
actgtagccgccattctgttggtgattttgagagcaagggcc

SEQ ID NO: 3685 - DNA, 40 bp, Artificial Sequence
  Synthetic
gcctgtggccgaatgcttcgtgcaggacatagacgcagtg

SEQ ID NO: 3686 - DNA, 39 bp, Artificial Sequence
  Synthetic
aacagacggagcgactcccgcaggtacggcaaggagaca

SEQ ID NO: 3687 - DNA, 41 bp, Artificial Sequence
  Synthetic
cgaacggagcaggtggtacaatattgatgaaggaggccggg

SEQ ID NO: 3688 - DNA, 38 bp, Artificial Sequence
  Synthetic
ctgcgtacgagccaacatcactgccctcatcaccggct

SEQ ID NO: 3689 - DNA, 36 bp, Artificial Sequence
  Synthetic
ttgagggccagaccaggctctgctctgtcgtgcctg

SEQ ID NO: 3690 - DNA, 35 bp, Artificial Sequence
  Synthetic
attggtccgttggggcgggcgacgcggcacacgat

SEQ ID NO: 3691 - DNA, 38 bp, Artificial Sequence
  Synthetic
ccaccgacgtggggactgttggtgggtatgcggtgtca

SEQ ID NO: 3692 - DNA, 41 bp, Artificial Sequence
  Synthetic
gcgatattcaacctggagggcgaccaattcagcctacaccg

SEQ ID NO: 3693 - DNA, 38 bp, Artificial Sequence
  Synthetic
ctctgcagagggcaaggtcaccgctcgccccatcacca

SEQ ID NO: 3694 - DNA, 44 bp, Artificial Sequence
  Synthetic
ctatcagagtcagtggtgttgtaatgggcaagatcagtttttgg

SEQ ID NO: 3695 - DNA, 48 bp, Artificial Sequence
  Synthetic
cctaaccagtttacaaacttgacgaactaaacgaaatttttctagtgc

SEQ ID NO: 3696 - DNA, 39 bp, Artificial Sequence
  Synthetic
ccaaaagcaacaaaacggcatgttcgcacctatagcgaa

SEQ ID NO: 3697 - DNA, 48 bp, Artificial Sequence
  Synthetic
ccacaattgcatttaacaaaagcatattacaaatggtatgtcattgct

SEQ ID NO: 3698 - DNA, 50 bp, Artificial Sequence
  Synthetic
gctagcagcaaatttaacatcttcttactttctaatcaattacgtctagc

SEQ ID NO: 3699 - DNA, 47 bp, Artificial Sequence
  Synthetic
caacaatcttacctttagggcaaactgaacttgccactgttaatttg

SEQ ID NO: 3700 - DNA, 44 bp, Artificial Sequence
  Synthetic
gctcccaaacattataacagtccttggttgatggctgtagtgtc

SEQ ID NO: 3701 - DNA, 50 bp, Artificial Sequence
  Synthetic
caagcaattttaccaaaacacgtctcacttacttctaatggtcttttagg

SEQ ID NO: 3702 - DNA, 49 bp, Artificial Sequence
  Synthetic
gcaacttaatatgttgcccaatgacgtccattatttatacaggtgattg

SEQ ID NO: 3703 - DNA, 47 bp, Artificial Sequence
  Synthetic
acaacactcacctttttgaaaaagtggtaaaaagtttgatgatcagg

SEQ ID NO: 3704 - DNA, 45 bp, Artificial Sequence
  Synthetic
agaaacacagtttacaaggtgtgaaaagctggtgaagttaaacct

SEQ ID NO: 3705 - DNA, 46 bp, Artificial Sequence
  Synthetic
cacacaacgaccaagatttttatcatttttgttgagagttgtacca

SEQ ID NO: 3706 - DNA, 44 bp, Artificial Sequence
  Synthetic
tggagctacagataagacagtatcaaacaattgggtgttgtgag

SEQ ID NO: 3707 - DNA, 46 bp, Artificial Sequence
  Synthetic
aaccatctttaagcacactagcatgtaaaagtactgtagttgaagt

SEQ ID NO: 3708 - DNA, 46 bp, Artificial Sequence
  Synthetic
caaacttagcctcatgccattgatttgtttgaagcacctttacact

SEQ ID NO: 3709 - DNA, 46 bp, Artificial Sequence
  Synthetic
acacgtccatcattaacataccatttattgtagagttggtgaatgc

SEQ ID NO: 3710 - DNA, 45 bp, Artificial Sequence
  Synthetic
gcataatctaacatagccttggctatagtggtagtgctagtgagg

SEQ ID NO: 3711 - DNA, 49 bp, Artificial Sequence
  Synthetic
gacactgaaaaattatgcaaacgcaccactgttcttattgattatgatc

SEQ ID NO: 3712 - DNA, 48 bp, Artificial Sequence
  Synthetic
actaggttggtcatcaaaattaccatacaccaaattgagttaggtagt

SEQ ID NO: 3713 - DNA, 50 bp, Artificial Sequence
  Synthetic
tgaagtccattagcaaccatgtattaggttttttaaatgtactatgggtg

SEQ ID NO: 3714 - DNA, 48 bp, Artificial Sequence
  Synthetic
ggcacgcttcaattgtttaataagtttgcttatgaaaatgctagacaa

SEQ ID NO: 3715 - DNA, 45 bp, Artificial Sequence
  Synthetic
gaacaggtctaccatcattgtcttttctgttcattatgctggagt

SEQ ID NO: 3716 - DNA, 46 bp, Artificial Sequence
  Synthetic
tccagaattaacagccaattcagttcgttcttggttttataggtgc

SEQ ID NO: 3717 - DNA, 45 bp, Artificial Sequence
  Synthetic
caacaaccacaaacattacacacatggtaaatgtgttcaggttcc

SEQ ID NO: 3718 - DNA, 49 bp, Artificial Sequence
  Synthetic
gccaaagcaccagaaaagttaagttgttataaagaggtgtactaagtcg

SEQ ID NO: 3719 - DNA, 48 bp, Artificial Sequence
  Synthetic
acgcatttaagcatagctctagccccagttgaaaatgaagatatacat

SEQ ID NO: 3720 - DNA, 45 bp, Artificial Sequence
  Synthetic
cctaactgagtgtgtgttaacatctgtgttccacttgttacaact

SEQ ID NO: 3721 - DNA, 46 bp, Artificial Sequence
  Synthetic
gcacgttctttaccactaatagcatctttgacaaagcgtaatgtcc

SEQ ID NO: 3722 - DNA, 47 bp, Artificial Sequence
  Synthetic
gcctataaaacctatctgttgcagtgcctaacatgatacgtatgatt

SEQ ID NO: 3723 - DNA, 48 bp, Artificial Sequence
  Synthetic
ggtaccatctttgtcaactatttgcgttgggttgaagaagatttaact

SEQ ID NO: 3724 - DNA, 49 bp, Artificial Sequence
  Synthetic
ccagcagcttgcaatattgtagaaaatcaagaagataagttttggtgtg

SEQ ID NO: 3725 - DNA, 48 bp, Artificial Sequence
  Synthetic
gctagaatacttctcttggtttgcattttgtcttaacatctcacaatg

SEQ ID NO: 3726 - DNA, 42 bp, Artificial Sequence
  Synthetic
gccacaaacatgagcactttcatttgctattcgtaatgtgcg

SEQ ID NO: 3727 - DNA, 44 bp, Artificial Sequence
  Synthetic
ggaaccaacataaccccactggttgtgattatgtttacaatccg

SEQ ID NO: 3728 - DNA, 44 bp, Artificial Sequence
  Synthetic
tgggttgcataatcataatccaacagctgttactgatgccaaat

SEQ ID NO: 3729 - DNA, 46 bp, Artificial Sequence
  Synthetic
gcaacattagtaggcaatgttgtttcaaagtttttgttcgctatgg

SEQ ID NO: 3730 - DNA, 47 bp, Artificial Sequence
  Synthetic
caccacaacatccacctataaggactaaagagtttagatcttggtgt

SEQ ID NO: 3731 - DNA, 39 bp, Artificial Sequence
  Synthetic
acacctttgtcagaaccagcaacaatgtgcgtacctcat

SEQ ID NO: 3732 - DNA, 44 bp, Artificial Sequence
  Synthetic
gttgaagaattgtcaggaacacctatggcctcttgctttttcac

SEQ ID NO: 3733 - DNA, 47 bp, Artificial Sequence
  Synthetic
tggcacataaaaagtacgagttacaggcataactatatctggtgaaa

SEQ ID NO: 3734 - DNA, 38 bp, Artificial Sequence
  Synthetic
agaccccgtccactagtgtggccgcattcctaatggtt

SEQ ID NO: 3735 - DNA, 46 bp, Artificial Sequence
  Synthetic
atgagtagtgttgatagtgctgtttttcttgacaccacaatacctt

SEQ ID NO: 3736 - DNA, 43 bp, Artificial Sequence
  Synthetic
agtctcaggcaaaacattatcatcagtgtgagcacttgcagtt

SEQ ID NO: 3737 - DNA, 45 bp, Artificial Sequence
  Synthetic
gtctggttggttacatggtgtccttggttttaaaaatgtttccac

SEQ ID NO: 3738 - DNA, 46 bp, Artificial Sequence
  Synthetic
gctaaacaacaaatcttccaaagcattacctcagagaaacattcgt

SEQ ID NO: 3739 - DNA, 46 bp, Artificial Sequence
  Synthetic
gcctgaattgaattagaaatggccttgttaatcaacagggtagtgc

SEQ ID NO: 3740 - DNA, 38 bp, Artificial Sequence
  Synthetic
ggttgacgcagaacatagccatgtaaaggcgtggtctg

SEQ ID NO: 3741 - DNA, 49 bp, Artificial Sequence
  Synthetic
caacaaaacacaagaagactcaacagaaaattatatcaaatggccttgg

SEQ ID NO: 3742 - DNA, 47 bp, Artificial Sequence
  Synthetic
ggcacactactattagacatcgttttgcttaccaagattatatgcaa

SEQ ID NO: 3743 - DNA, 47 bp, Artificial Sequence
  Synthetic
gcagccatcaccggtaagtaataagcttttaatcctgaaactaatgc

SEQ ID NO: 3744 - DNA, 49 bp, Artificial Sequence
  Synthetic
ggaaatttcttcctagcagctctgtctaaactaaacaaaatggctagtg

SEQ ID NO: 3745 - DNA, 41 bp, Artificial Sequence
  Synthetic
cgtttgcgattaccaagactggcaacgttctgatggtgttg

SEQ ID NO: 3746 - DNA, 47 bp, Artificial Sequence
  Synthetic
ggtgacttcgactggttatcaaaacgattctaaccagtcttcttcag

SEQ ID NO: 3747 - DNA, 43 bp, Artificial Sequence
  Synthetic
cagtgctaacctcactatcaaagaaaggttttccacagcttgc

SEQ ID NO: 3748 - DNA, 44 bp, Artificial Sequence
  Synthetic
cggtacctcataagactcctgataatcaagggtgtgctagaact

SEQ ID NO: 3749 - DNA, 43 bp, Artificial Sequence
  Synthetic
tcaccaagtgaggtttcctctaacaacgattggtttttggtgg

SEQ ID NO: 3750 - DNA, 41 bp, Artificial Sequence
  Synthetic
acaggttttgttgctcttgtacgtaaagatacggctggcgt

SEQ ID NO: 3751 - DNA, 45 bp, Artificial Sequence
  Synthetic
ccccatgtaaaaacagttgaagacactgagcctccaaaatcaaga

SEQ ID NO: 3752 - DNA, 50 bp, Artificial Sequence
  Synthetic
gcgaaatggaaaagaacttgttcttaacaggacagtaaattgatagaaga

SEQ ID NO: 3753 - DNA, 38 bp, Artificial Sequence
  Synthetic
aacctcaagtgtgctgccacgagagctgtttttggcac

SEQ ID NO: 3754 - DNA, 36 bp, Artificial Sequence
  Synthetic
tgctgggcggtgtcactctcctggggctcctgcagt

SEQ ID NO: 3755 - DNA, 44 bp, Artificial Sequence
  Synthetic
caagaaacttctctcgttgagccaggataggtagtgctagaatg

SEQ ID NO: 3756 - DNA, 47 bp, Artificial Sequence
  Synthetic
tcagcaattgttgtatgctcaatttctcatgcaaaatatcaaacacc

SEQ ID NO: 3757 - DNA, 47 bp, Artificial Sequence
  Synthetic
gttggtattgggaagtctctacctagaaattttccccatagatgttg

SEQ ID NO: 3758 - DNA, 41 bp, Artificial Sequence
  Synthetic
ctaccaaggggatatcctcgcggagaagcatcaacatcaga

SEQ ID NO: 3759 - DNA, 42 bp, Artificial Sequence
  Synthetic
cactggtgtctgagcaagagcaaatccagcatttgagccaga

SEQ ID NO: 3760 - DNA, 45 bp, Artificial Sequence
  Synthetic
tggaactaatgactgttgtttgacttattgctccagaagactcaa

SEQ ID NO: 3761 - DNA, 43 bp, Artificial Sequence
  Synthetic
gttgcatggtagaagagattggtccatcactagaatcctgtcc

SEQ ID NO: 3762 - DNA, 44 bp, Artificial Sequence
  Synthetic
ttgtctagaatctccatttgcatgagggccaccctcttttaaat

SEQ ID NO: 3763 - DNA, 44 bp, Artificial Sequence
  Synthetic
gcttgaacaacatctaaagggacatttggggctatggattttgc

SEQ ID NO: 3764 - DNA, 43 bp, Artificial Sequence
  Synthetic
tcgctgaagccagtaagatctacaacaaattatgtaggcacac

SEQ ID NO: 3765 - DNA, 49 bp, Artificial Sequence
  Synthetic
gggattaacaaaaagaaaggacagcctgattgattgtgtgttattttcc

SEQ ID NO: 3766 - DNA, 43 bp, Artificial Sequence
  Synthetic
gttggcaaaccgtctttgggtcttcattgtttatggtttaccg

SEQ ID NO: 3767 - DNA, 40 bp, Artificial Sequence
  Synthetic
cagttctctgatggagagcagagcgcagtgtttgaatgtg

SEQ ID NO: 3768 - DNA, 47 bp, Artificial Sequence
  Synthetic
ggaatttccctgactttgtggtttggaaactaacagtgatatatcag

SEQ ID NO: 3769 - DNA, 44 bp, Artificial Sequence
  Synthetic
tgtcaacttcatttggcaacgatcgaaggcgattatttaatgtg

SEQ ID NO: 3770 - DNA, 43 bp, Artificial Sequence
  Synthetic
gcaatatccattcaggtgtttttcccctgctgcaatgttttgg

SEQ ID NO: 3771 - DNA, 44 bp, Artificial Sequence
  Synthetic
gctgcaaccaaaaatgacttttacttttgtatgagcctgttgca

SEQ ID NO: 3772 - DNA, 47 bp, Artificial Sequence
  Synthetic
gcacttgctcttgttttattaaggtctgttgagtctttatgaacagg

SEQ ID NO: 3773 - DNA, 49 bp, Artificial Sequence
  Synthetic
cctctaccagttccaataccaagaaagattcttcaatatggaagtttgg

SEQ ID NO: 3774 - DNA, 46 bp, Artificial Sequence
  Synthetic
ggaagatcagaagcagggtgaatttctatctaacattcccactaca

SEQ ID NO: 3775 - DNA, 41 bp, Artificial Sequence
  Synthetic
gtgtcaaagctggatgcacggtcaatctgtaggtgaagaca

SEQ ID NO: 3776 - DNA, 43 bp, Artificial Sequence
  Synthetic
ctcctgctttgtcatgatcactatttgttaccgggcatcctag

SEQ ID NO: 3777 - DNA, 47 bp, Artificial Sequence
  Synthetic
gggcacatcagataaatttccttgttagaagatggtgatatgatgga

SEQ ID NO: 3778 - DNA, 47 bp, Artificial Sequence
  Synthetic
tgggaacagcaaaataattgtctgtaatacatttgtagccaatggag

SEQ ID NO: 3779 - DNA, 48 bp, Artificial Sequence
  Synthetic
cataccgtacttaaggagtcacatcgacaccaaatcctaataaaatgc

SEQ ID NO: 3780 - DNA, 41 bp, Artificial Sequence
  Synthetic
gacccacctcaatttgtgttgttttagtcactggcaaacgg

SEQ ID NO: 3781 - DNA, 44 bp, Artificial Sequence
  Synthetic
gctcaaacccttcaattccagcggggtaaaaatgatgaaagtgc

SEQ ID NO: 3782 - DNA, 43 bp, Artificial Sequence
  Synthetic
gggtgcttgaggaaggttccaaaaagggatatacgtaatgtgt

SEQ ID NO: 3783 - DNA, 39 bp, Artificial Sequence
  Synthetic
gactcccaccgcagtttcagtcttcgagcgttttgatga

SEQ ID NO: 3784 - DNA, 43 bp, Artificial Sequence
  Synthetic
gggaaaatttagcctatagcctaggtggaagtccatggtgagg

SEQ ID NO: 3785 - DNA, 38 bp, Artificial Sequence
  Synthetic
acactgcaaggtgacgttccgcatggagctgtaggagt

SEQ ID NO: 3786 - DNA, 43 bp, Artificial Sequence
  Synthetic
gcagtcctatcaactgattgaatcatggtcttgaccacatcct

SEQ ID NO: 3787 - DNA, 50 bp, Artificial Sequence
  Synthetic
atgccaaatcttgcatatgtatggtgtggtgaaattattatacaatgagc

SEQ ID NO: 3788 - DNA, 50 bp, Artificial Sequence
  Synthetic
accaaactctaattgtcaattcccaaaggttccatttatttacacaagag

SEQ ID NO: 3789 - DNA, 45 bp, Artificial Sequence
  Synthetic
atgagtaattttgatcccaccacccagcaaagatgtcttttgctt

SEQ ID NO: 3790 - DNA, 49 bp, Artificial Sequence
  Synthetic
gccaggaacaaaacaaaacagtaatgagatcttgtctttgattttcaag

SEQ ID NO: 3791 - DNA, 45 bp, Artificial Sequence
  Synthetic
cgttagaaggagaggtcaatctgttaagtcagcacatcagaaagg

SEQ ID NO: 3792 - DNA, 42 bp, Artificial Sequence
  Synthetic
tgttgtgatagctcccacaggaagctaacagagggaaaatgg

SEQ ID NO: 3793 - DNA, 46 bp, Artificial Sequence
  Synthetic
tgaaacaagttgaaaaaccacctcagtcttcaacctctaatcctcc

SEQ ID NO: 3794 - DNA, 43 bp, Artificial Sequence
  Synthetic
gcttcctgcattctatatgactctccagctggagacttggagt

SEQ ID NO: 3795 - DNA, 48 bp, Artificial Sequence
  Synthetic
aatccaaacctccttaaagctctagtgaaataatgaagttttcctgga

SEQ ID NO: 3796 - DNA, 47 bp, Artificial Sequence
  Synthetic
cctcatctgttgtgttttggccatggatatagtggacaattagtttg

SEQ ID NO: 3797 - DNA, 47 bp, Artificial Sequence
  Synthetic
caacccacttgtgattagtaacagagtttttccagtcttttccatct

SEQ ID NO: 3798 - DNA, 45 bp, Artificial Sequence
  Synthetic
caactccaaactgaaccaagttctagaatctcagtcaactttgga

SEQ ID NO: 3799 - DNA, 41 bp, Artificial Sequence
  Synthetic
tgcccaagattgcattctgtatcgaaggtcttcctggaatg

SEQ ID NO: 3800 - DNA, 48 bp, Artificial Sequence
  Synthetic
gccattggatcaatttcagctttagatcatcacattgataaaaccatg

SEQ ID NO: 3801 - DNA, 46 bp, Artificial Sequence
  Synthetic
gcaataaaccattttcatccaaccactcctggatttccttatgtcc

SEQ ID NO: 3802 - DNA, 45 bp, Artificial Sequence
  Synthetic
cctgtatggaaacctggattcaaattactcaattttgtgccgaat

SEQ ID NO: 3803 - DNA, 41 bp, Artificial Sequence
  Synthetic
ttgccgtgctgttgtcatttagctacattctatgtctggtt

SEQ ID NO: 3804 - DNA, 40 bp, Artificial Sequence
  Synthetic
tttgctgcgttcaacaaaaaggggagaccctcagtgtgat

SEQ ID NO: 3805 - DNA, 49 bp, Artificial Sequence
  Synthetic
cccccaaatgtacagtttgtcaaatgacccacttaaaattcaaataccc

SEQ ID NO: 3806 - DNA, 48 bp, Artificial Sequence
  Synthetic
cgtattttgaagtaaccccgaggaggagacatacttttgattaacagc

SEQ ID NO: 3807 - DNA, 43 bp, Artificial Sequence
  Synthetic
ccattttctatgaaacccgcgattggcaacagggatgcgaaat

SEQ ID NO: 3808 - DNA, 45 bp, Artificial Sequence
  Synthetic
cgcgttgtatgaccagagatctagaagtagaagggagaattcagg

SEQ ID NO: 3809 - DNA, 50 bp, Artificial Sequence
  Synthetic
aggatccaatctttgtatcctgactatacagagatgaagcattaaacaac

SEQ ID NO: 3810 - DNA, 44 bp, Artificial Sequence
  Synthetic
tccatctcaacaatgaacagagatccctgccactcataaacaag

SEQ ID NO: 3811 - DNA, 46 bp, Artificial Sequence
  Synthetic
tcgtcccttgactgttttttcataatgttgtttcaattgtgctaga

SEQ ID NO: 3812 - DNA, 41 bp, Artificial Sequence
  Synthetic
caggtcaatgggcaggacaaagaagcaactataccagacat

SEQ ID NO: 3813 - DNA, 43 bp, Artificial Sequence
  Synthetic
acacccttctttaggatcaatacctaccttctttgctgtgtcc

SEQ ID NO: 3814 - DNA, 41 bp, Artificial Sequence
  Synthetic
gctaagctgctgcaactctttcgagcagcaaatacaggact

SEQ ID NO: 3815 - DNA, 48 bp, Artificial Sequence
  Synthetic
cccgacaacaagtcttattgctattatgctcagcaaatttaaaaacag

SEQ ID NO: 3816 - DNA, 41 bp, Artificial Sequence
  Synthetic
tgaagccacccatgaccatggaaagacaaacttagaggctc

SEQ ID NO: 3817 - DNA, 38 bp, Artificial Sequence
  Synthetic
atgtgccagctgccttacaggcgcacgtagagtaaagc

SEQ ID NO: 3818 - DNA, 44 bp, Artificial Sequence
  Synthetic
actgaaggtgcaacagggtcgtcctactgatataatacctttgg

SEQ ID NO: 3819 - DNA, 43 bp, Artificial Sequence
  Synthetic
ttgagtgccaacctgtgctcaggttacattagagtcagtagac

SEQ ID NO: 3820 - DNA, 44 bp, Artificial Sequence
  Synthetic
accacaatgatgacatctgcaaatttacatccaagtttgagacg

SEQ ID NO: 3821 - DNA, 43 bp, Artificial Sequence
  Synthetic
cggtaagtgtaccctaaaggcccatgaagtgttagttcccaag

SEQ ID NO: 3822 - DNA, 41 bp, Artificial Sequence
  Synthetic
ccaatgttcccccaagcaggggtgaatacatcctttgatcc

SEQ ID NO: 3823 - DNA, 46 bp, Artificial Sequence
  Synthetic
cctctacaaaacatatgtctggcattaatgatgtgtatggcaatgc

SEQ ID NO: 3824 - DNA, 43 bp, Artificial Sequence
  Synthetic
caatgtcacagtagttaccaggatgtctctcaccattgcaaca

SEQ ID NO: 3825 - DNA, 43 bp, Artificial Sequence
  Synthetic
cagcagaaagccggattgaatgcaatgtcaaattacaggattt

SEQ ID NO: 3826 - DNA, 40 bp, Artificial Sequence
  Synthetic
tgacacaaacatgcaaccatgcgtgtgtgtagcatggtcc

SEQ ID NO: 3827 - DNA, 44 bp, Artificial Sequence
  Synthetic
tcgaggataacaggaacactccggaaaattgtccatattagccc

SEQ ID NO: 3828 - DNA, 38 bp, Artificial Sequence
  Synthetic
tcccatccacacgtcatctcgagagggaatccaggagt

SEQ ID NO: 3829 - DNA, 37 bp, Artificial Sequence
  Synthetic
gctgctccagcgtgtcgtgcctaattacgctgtccgc

SEQ ID NO: 3830 - DNA, 40 bp, Artificial Sequence
  Synthetic
gctctcccactccaacacgggccctgtggagactgcatct

SEQ ID NO: 3831 - DNA, 39 bp, Artificial Sequence
  Synthetic
tgcggagatgtggagagaaacggctggacgaactgtgcg

SEQ ID NO: 3832 - DNA, 38 bp, Artificial Sequence
  Synthetic
acgtatacgaagggtggctcgtgggcggtctcccttgt

SEQ ID NO: 3833 - DNA, 38 bp, Artificial Sequence
  Synthetic
tccgttgtgctcgacgccgtgtacgtccaccacatgag

SEQ ID NO: 3834 - DNA, 40 bp, Artificial Sequence
  Synthetic
gcgtatcctcgtctgccctctggccggcgagagaaagaga

SEQ ID NO: 3835 - DNA, 38 bp, Artificial Sequence
  Synthetic
gcggggctttctttgagttcgccgggtatgagccgcca

SEQ ID NO: 3836 - DNA, 37 bp, Artificial Sequence
  Synthetic
tctcgccgaggacgcgttccgtagacgggctcgaagc

SEQ ID NO: 3837 - DNA, 40 bp, Artificial Sequence
  Synthetic
ataccattcccaaccatccctaacatcaagttccctggaa

SEQ ID NO: 3838 - DNA, 39 bp, Artificial Sequence
  Synthetic
tggttaagctgggcgattgtgcaaaaagtctggcaaacc

SEQ ID NO: 3839 - DNA, 39 bp, Artificial Sequence
  Synthetic
tgtgagtcaaaacggaggcttgcaaaaaaacagagtggt

SEQ ID NO: 3840 - DNA, 43 bp, Artificial Sequence
  Synthetic
ccatttcccacaaagtctgccgacacgaaacactgatacttac

SEQ ID NO: 3841 - DNA, 40 bp, Artificial Sequence
  Synthetic
tgcaagtttgtaaggcgtgtttctcccgaagaactgacag

SEQ ID NO: 3842 - DNA, 46 bp, Artificial Sequence
  Synthetic
cctctatgttgcgaaagtatgctttcctttgccatagtaaacatga

SEQ ID NO: 3843 - DNA, 44 bp, Artificial Sequence
  Synthetic
tctgcggtaaacctgtactagatgtttgttgttgtacttcaagc

SEQ ID NO: 3844 - DNA, 40 bp, Artificial Sequence
  Synthetic
cagtgcgacacaactaacgaattgtttgatttcggttgga

SEQ ID NO: 3845 - DNA, 42 bp, Artificial Sequence
  Synthetic
cgccccggctttataacatttagggacttgatatatccgagt

SEQ ID NO: 3846 - DNA, 43 bp, Artificial Sequence
  Synthetic
gttgctgtccggttgtaacatttgtgtttttttaccgaaagac

SEQ ID NO: 3847 - DNA, 42 bp, Artificial Sequence
  Synthetic
ttttccccccctgatcggagtctgcgcagattttaaaatacg

SEQ ID NO: 3848 - DNA, 39 bp, Artificial Sequence
  Synthetic
accctcgggaaggttctcttttacgtcgtttcctgtagc

SEQ ID NO: 3849 - DNA, 38 bp, Artificial Sequence
  Synthetic
atcgcgcaatcgaaccattctctgacggctaaggtgaa

SEQ ID NO: 3850 - DNA, 44 bp, Artificial Sequence
  Synthetic
gcaatgtgatcaacgacgttttatgtatcggaaaaactcgaatt

SEQ ID NO: 3851 - DNA, 48 bp, Artificial Sequence
  Synthetic
caaagcaattcctctatcgcagaagaaagtttcggaaaatgtaaacac

SEQ ID NO: 3852 - DNA, 45 bp, Artificial Sequence
  Synthetic
cctgtaaactggtctgcttgcatgtgttataacagacatatgcaa

SEQ ID NO: 3853 - DNA, 44 bp, Artificial Sequence
  Synthetic
aatctctaacccgtcatctccaaggacactttcaaaatttttcg

SEQ ID NO: 3854 - DNA, 43 bp, Artificial Sequence
  Synthetic
cacaaatcatcgtcgaacaataaggcggtgagcaagttctctt

SEQ ID NO: 3855 - DNA, 40 bp, Artificial Sequence
  Synthetic
gattccgccgtactgaaaaaacaacgctgtttaaaagggc

SEQ ID NO: 3856 - DNA, 40 bp, Artificial Sequence
  Synthetic
ggcagaacagagaccccccctgctgacaggatcgtcccct

SEQ ID NO: 3857 - DNA, 35 bp, Artificial Sequence
  Synthetic
cgcgaagtgttccgcgacgtggagacgcgggcgaa

SEQ ID NO: 3858 - DNA, 40 bp, Artificial Sequence
  Synthetic
gggcgttcgttccgcacatagccgtgacgtatgaagaaga

SEQ ID NO: 3859 - DNA, 38 bp, Artificial Sequence
  Synthetic
gcgatctccacctcgcgtggcctccgatacgtacgact

SEQ ID NO: 3860 - DNA, 41 bp, Artificial Sequence
  Synthetic
aggaaaacgagtacgcgcaccaatcatgcattgtgtggggt

SEQ ID NO: 3861 - DNA, 42 bp, Artificial Sequence
  Synthetic
ccgacttcgataaacctcttggttccttagcccaagagcatg

SEQ ID NO: 3862 - DNA, 43 bp, Artificial Sequence
  Synthetic
tcctttttcaatttcttcttcccctctcacagaacttcaggct

SEQ ID NO: 3863 - DNA, 40 bp, Artificial Sequence
  Synthetic
tggaacttctggtagctcatggaaatgggaggacctgaga

SEQ ID NO: 3864 - DNA, 43 bp, Artificial Sequence
  Synthetic
catctcctgtggcccacttgaatacaataagcaatgaggaaac

SEQ ID NO: 3865 - DNA, 48 bp, Artificial Sequence
  Synthetic
agggagccaattttaaagacagtatgactttcgagtttagtagtacag

SEQ ID NO: 3866 - DNA, 48 bp, Artificial Sequence
  Synthetic
tgagtcccaatactgaaagttttggcgatacaagggtatgatatgacc

SEQ ID NO: 3867 - DNA, 47 bp, Artificial Sequence
  Synthetic
gaaggttaacagagtgtgttactgtgttatcatgcgaacaattcaac

SEQ ID NO: 3868 - DNA, 40 bp, Artificial Sequence
  Synthetic
tcctgggtaacacgttccataagctcatggtcctacattg

SEQ ID NO: 3869 - DNA, 42 bp, Artificial Sequence
  Synthetic
agagactttgttggtcagcactaaaagaagtcctcgtgctat

SEQ ID NO: 3870 - DNA, 44 bp, Artificial Sequence
  Synthetic
cgtggactggtgtatctgaaatgattggaaatctagtggtaccg

SEQ ID NO: 3871 - DNA, 43 bp, Artificial Sequence
  Synthetic
tctaccatccctgtccacccattcaatctagaggcctatttgg

SEQ ID NO: 3872 - DNA, 36 bp, Artificial Sequence
  Synthetic
agcacgagccaaggggacgcttccacgcggcagatc

SEQ ID NO: 3873 - DNA, 39 bp, Artificial Sequence
  Synthetic
aggtgcgtacacggccaccttggagtgggagagaacaga

SEQ ID NO: 3874 - DNA, 38 bp, Artificial Sequence
  Synthetic
tcgttcaggtcaagcgccagctccgcacgtctgtctga

SEQ ID NO: 3875 - DNA, 37 bp, Artificial Sequence
  Synthetic
gcaggagtcggtcgatcgtctagtctatgcgcgcgcc

SEQ ID NO: 3876 - DNA, 39 bp, Artificial Sequence
  Synthetic
gccggcgagcgtttgcttgttcacacagatgcaaccgat

SEQ ID NO: 3877 - DNA, 36 bp, Artificial Sequence
  Synthetic
ctcatacgccacggggtcccccgtctggcgtcgaac

SEQ ID NO: 3878 - DNA, 37 bp, Artificial Sequence
  Synthetic
gcctccgctgcctatcggacgccgttctgtctcgaga

SEQ ID NO: 3879 - DNA, 40 bp, Artificial Sequence
  Synthetic
ggagaagaggtggcggctcagaagaatctgccgatcacca

SEQ ID NO: 3880 - DNA, 35 bp, Artificial Sequence
  Synthetic
ttgcgtcgcttcgagcccgagaaagaggcgccggt

SEQ ID NO: 3881 - DNA, 41 bp, Artificial Sequence
  Synthetic
gccaagctgtctcgcggatacctgcgaagatagtgaccccg

SEQ ID NO: 3882 - DNA, 44 bp, Artificial Sequence
  Synthetic
gtatgacggccccagattcgactccttaacacatcattattcct

SEQ ID NO: 3883 - DNA, 40 bp, Artificial Sequence
  Synthetic
atgagaacagctgctctctgttagcgattttgtgctcatg

SEQ ID NO: 3884 - DNA, 44 bp, Artificial Sequence
  Synthetic
cgtctgactgtttgcgattctggtttccaatgtccattttttcc

SEQ ID NO: 3885 - DNA, 44 bp, Artificial Sequence
  Synthetic
cgtgcctgctttttagcgtgtagctctgttttctttgttttgtc

SEQ ID NO: 3886 - DNA, 44 bp, Artificial Sequence
  Synthetic
tctcggattgcgtcgttatgatttttgttaaaaagcgaatgtcc

SEQ ID NO: 3887 - DNA, 41 bp, Artificial Sequence
  Synthetic
gcccagagagattgcaactacttcacacatcacgagtctcc

SEQ ID NO: 3888 - DNA, 43 bp, Artificial Sequence
  Synthetic
cggcccattggaacgaacattatgatcatctgaaactgtttgg

SEQ ID NO: 3889 - DNA, 45 bp, Artificial Sequence
  Synthetic
cggtatacgcgtttagtagaatgctgatgacgcatacgatctact

SEQ ID NO: 3890 - DNA, 38 bp, Artificial Sequence
  Synthetic
gcgtgtttagtgggtgcagtccgtcattacatctcccg

SEQ ID NO: 3891 - DNA, 42 bp, Artificial Sequence
  Synthetic
tcagacctctcatcgttcacataatttcgacgcaaactttgg

SEQ ID NO: 3892 - DNA, 42 bp, Artificial Sequence
  Synthetic
tggaagtccgacagatgcaatagttcgttgagagaattaggc

SEQ ID NO: 3893 - DNA, 49 bp, Artificial Sequence
  Synthetic
agtcttagtgaggactgactttgaagaaacatactgatttgtacagaag

SEQ ID NO: 3894 - DNA, 42 bp, Artificial Sequence
  Synthetic
tcagacatgggaagcaagatacaagtgttggtaaacgcgtgt

SEQ ID NO: 3895 - DNA, 39 bp, Artificial Sequence
  Synthetic
acacaaggcaattttagcccttttttcaaacgtctgggc

SEQ ID NO: 3896 - DNA, 39 bp, Artificial Sequence
  Synthetic
cgcccatatgctaaacgaacggtttgtggagtcggtagc

SEQ ID NO: 3897 - DNA, 45 bp, Artificial Sequence
  Synthetic
ggactagtgttcgcattagagaatcgagcctagcgattagtttgt

SEQ ID NO: 3898 - DNA, 39 bp, Artificial Sequence
  Synthetic
cggcctggaatacaagaccattgatgccaatgaagcctt

SEQ ID NO: 3899 - DNA, 41 bp, Artificial Sequence
  Synthetic
accatgacctcgagaatctctctgaatgggagcctttgaac

SEQ ID NO: 3900 - DNA, 43 bp, Artificial Sequence
  Synthetic
agacgttcgagacctgttcaaaatctgtgtttgtatctgctcc

SEQ ID NO: 3901 - DNA, 46 bp, Artificial Sequence
  Synthetic
acaaccattgagtgagaatacgctgaattttttctggaatcttgag

SEQ ID NO: 3902 - DNA, 35 bp, Artificial Sequence
  Synthetic
cgagccaaggggacgatccgccgacacactgcagc

SEQ ID NO: 3903 - DNA, 39 bp, Artificial Sequence
  Synthetic
cgtctccgatccgtcaggaccgagctctctcaccccgtg

SEQ ID NO: 3904 - DNA, 38 bp, Artificial Sequence
  Synthetic
tctcgctccgcttggttttccggccgccgagattaacg

SEQ ID NO: 3905 - DNA, 38 bp, Artificial Sequence
  Synthetic
gtctgcggaccccgatgtaaaccggtgattcccggaga

SEQ ID NO: 3906 - DNA, 36 bp, Artificial Sequence
  Synthetic
cctcgccttgcaaactccgtacatgagggcggccag

SEQ ID NO: 3907 - DNA, 43 bp, Artificial Sequence
  Synthetic
ccctcttgagcttcctatacagtttccttaatgggaacgggga

SEQ ID NO: 3908 - DNA, 44 bp, Artificial Sequence
  Synthetic
agcgacggtaaatgcatttgaaactattgccgcaaatatcattg

SEQ ID NO: 3909 - DNA, 42 bp, Artificial Sequence
  Synthetic
ccgatcaaggaatggggcatcagtttcctttggcatatccgc

SEQ ID NO: 3910 - DNA, 43 bp, Artificial Sequence
  Synthetic
ggcctattatcttttgcctaggcattttctgacatgaccctcg

SEQ ID NO: 3911 - DNA, 45 bp, Artificial Sequence
  Synthetic
agtttctccaagcgaatctctgtatctcatcggaggacttgaatg

SEQ ID NO: 3912 - DNA, 41 bp, Artificial Sequence
  Synthetic
ccagatcaggttttttgggttgggtaaccgaaaacggtccg

SEQ ID NO: 3913 - DNA, 49 bp, Artificial Sequence
  Synthetic
tcttcttccactgttggtgcatatttatggaaaagtgaatcagtatagg

SEQ ID NO: 3914 - DNA, 41 bp, Artificial Sequence
  Synthetic
ggttgctcacgctgtctattgtcagaagatgaccatgaaca

SEQ ID NO: 3915 - DNA, 40 bp, Artificial Sequence
  Synthetic
tctgtacctgaatcgtctgcctatagtgtgccccaactgt

SEQ ID NO: 3916 - DNA, 43 bp, Artificial Sequence
  Synthetic
cggactaagttgctgtataacatcagcgacagttgaaacggaa

SEQ ID NO: 3917 - DNA, 40 bp, Artificial Sequence
  Synthetic
tgccgcactactgtttctctattggacaacgtgtagatgg

SEQ ID NO: 3918 - DNA, 43 bp, Artificial Sequence
  Synthetic
cccattatcatatgcccactgcgttggaacatagttttgctga

SEQ ID NO: 3919 - DNA, 39 bp, Artificial Sequence
  Synthetic
tcctggcacaaatctaggcgcagtttagagctgcagaca

SEQ ID NO: 3920 - DNA, 44 bp, Artificial Sequence
  Synthetic
cgtccatggctctaagttatattcacatgcagcaattgaaatgc

SEQ ID NO: 3921 - DNA, 42 bp, Artificial Sequence
  Synthetic
tgtttccagtgtccacgtattttccggagacttgtccatcag

SEQ ID NO: 3922 - DNA, 45 bp, Artificial Sequence
  Synthetic
ggtgtgtggtagatgtaacatgtaccatcaggtacagatgtccct

SEQ ID NO: 3923 - DNA, 42 bp, Artificial Sequence
  Synthetic
cacaggcaaatatggtgtacctttaacatctggtcctgacat

SEQ ID NO: 3924 - DNA, 48 bp, Artificial Sequence
  Synthetic
ctctgtattgatgtccagacactttccatattttgaattgaaaaagcc

SEQ ID NO: 3925 - DNA, 50 bp, Artificial Sequence
  Synthetic
acccataccccaatattctccaatagttgctatggattataaacaaactc

SEQ ID NO: 3926 - DNA, 43 bp, Artificial Sequence
  Synthetic
cacacatacacaatcatcgttttgtgcccctacctcttcttcc

SEQ ID NO: 3927 - DNA, 43 bp, Artificial Sequence
  Synthetic
agtgtaattaaaggtgtggcaacctgttccctgccaaaaatgc

SEQ ID NO: 3928 - DNA, 48 bp, Artificial Sequence
  Synthetic
tggtcgctcttctgtattttcaaatacatataaaagcactgtgtacaa

SEQ ID NO: 3929 - DNA, 46 bp, Artificial Sequence
  Synthetic
gccccgtacactgaacaattgctgtttgctattttatagtaaggtc

SEQ ID NO: 3930 - DNA, 46 bp, Artificial Sequence
  Synthetic
caggtcaatctcagtttgtggtataatcagcagtataatcatgcac

SEQ ID NO: 3931 - DNA, 42 bp, Artificial Sequence
  Synthetic
cgttttaatttctgcagcgtctgtgacagctcagcagttgtt

SEQ ID NO: 3932 - DNA, 42 bp, Artificial Sequence
  Synthetic
cacatccatatcacttcctgaccaggctcacaacatagtgtg

SEQ ID NO: 3933 - DNA, 47 bp, Artificial Sequence
  Synthetic
ccactgcaccattttagatagttcaacaccagaatggatagaaagac

SEQ ID NO: 3934 - DNA, 45 bp, Artificial Sequence
  Synthetic
tgtactattggcttccagtccctatgaaacaatggataaagcatg

SEQ ID NO: 3935 - DNA, 48 bp, Artificial Sequence
  Synthetic
ggaccatgtcctttcaaaaaaacataatggaaatcctgtataccaatt

SEQ ID NO: 3936 - DNA, 41 bp, Artificial Sequence
  Synthetic
acgttttatggccgtcatgtatggatgggtggtgtaaagtg

SEQ ID NO: 3937 - DNA, 38 bp, Artificial Sequence
  Synthetic
cgggctctgtggttctgggaggcacctacgaagcctca

SEQ ID NO: 3938 - DNA, 48 bp, Artificial Sequence
  Synthetic
gcacagtttacatttgtccaatgataggtatcggtttcaaaaacataa

SEQ ID NO: 3939 - DNA, 44 bp, Artificial Sequence
  Synthetic
gcaaaaacacaaaactaacacacaacgccatatatgctgctagg

SEQ ID NO: 3940 - DNA, 45 bp, Artificial Sequence
  Synthetic
tacctcaccagtttgggggaagttctactacatatactaatccca

SEQ ID NO: 3941 - DNA, 45 bp, Artificial Sequence
  Synthetic
atcaggatcaggtgccacacgataatcccatatttcaaaatgctg

SEQ ID NO: 3942 - DNA, 43 bp, Artificial Sequence
  Synthetic
gccataacgcaaatgtggagctcaatctccttttgataccacc

SEQ ID NO: 3943 - DNA, 47 bp, Artificial Sequence
  Synthetic
tgtcctctaagctagtggcaaccatactatgaattctaccttactgg

SEQ ID NO: 3944 - DNA, 48 bp, Artificial Sequence
  Synthetic
gtaaaagcatagttggcagcctatttgttttatacactatgccttacc

SEQ ID NO: 3945 - DNA, 38 bp, Artificial Sequence
  Synthetic
gaggggagggaaaaactggccccaatgggtgttgtact

SEQ ID NO: 3946 - DNA, 42 bp, Artificial Sequence
  Synthetic
aggctggaccactgttaccagttgcatacccagcagtagacc

SEQ ID NO: 3947 - DNA, 42 bp, Artificial Sequence
  Synthetic
gcctcaacagatggtgattgtatgacccagttaaagatgtct

SEQ ID NO: 3948 - DNA, 47 bp, Artificial Sequence
  Synthetic
caccagaaaattcagcacacatgacatcttctaatatagtgccaatc

SEQ ID NO: 3949 - DNA, 46 bp, Artificial Sequence
  Synthetic
caaaggctgtgatgtaatgtctacttgtacactgtacaactaggga

SEQ ID NO: 3950 - DNA, 42 bp, Artificial Sequence
  Synthetic
tccaacatcccacacaacatgctggtattgatgaaccaacaa

SEQ ID NO: 3951 - DNA, 48 bp, Artificial Sequence
  Synthetic
tgtcctgtccattatagtcagtgttagaaagtttccttggtagatctg

SEQ ID NO: 3952 - DNA, 43 bp, Artificial Sequence
  Synthetic
ccagaatattgacatattggtgcctcaggagctccaattcctt

SEQ ID NO: 3953 - DNA, 43 bp, Artificial Sequence
  Synthetic
cagcacagtgaaattgtctaagatcacatggtgtcattggcat

SEQ ID NO: 3954 - DNA, 40 bp, Artificial Sequence
  Synthetic
tggtgaaccattgcaaccaattaaactcctctgaccctca

SEQ ID NO: 3955 - DNA, 46 bp, Artificial Sequence
  Synthetic
tgtctccttcttttgtcttcttccattgctcaacatacaccttagc

SEQ ID NO: 3956 - DNA, 45 bp, Artificial Sequence
  Synthetic
cctcagcttgtacttacctggataaccaaaggctgttttagtacc

SEQ ID NO: 3957 - DNA, 48 bp, Artificial Sequence
  Synthetic
agcaacgaatagtaatgctctgtaatgaaaattattgtgtgtgtgttg

SEQ ID NO: 3958 - DNA, 45 bp, Artificial Sequence
  Synthetic
tgaaccatctgtactttcatcgaaaaaagttggtttgttgtggat

SEQ ID NO: 3959 - DNA, 49 bp, Artificial Sequence
  Synthetic
tgcctcaattacttcttctaaagcaagaagctacaaaagtaataagtcc

SEQ ID NO: 3960 - DNA, 46 bp, Artificial Sequence
  Synthetic
accatttgactgcaatctctaacattatacgcagatgaagatagca

SEQ ID NO: 3961 - DNA, 47 bp, Artificial Sequence
  Synthetic
ggtagtttaatttgttgtgggactctatgaggaatgcattagatggt

SEQ ID NO: 3962 - DNA, 47 bp, Artificial Sequence
  Synthetic
ctcagaggcatactgtgatttacttttcaagtttcagaagctaaagc

SEQ ID NO: 3963 - DNA, 40 bp, Artificial Sequence
  Synthetic
ggcctcctctcaggggaattgaggcctcctccaactccat

SEQ ID NO: 3964 - DNA, 45 bp, Artificial Sequence
  Synthetic
cacgtttatttctacctgctctgtaactgtaaacctcccaaaagg

SEQ ID NO: 3965 - DNA, 44 bp, Artificial Sequence
  Synthetic
tggattaccccctacaccaccaggggaaatcgatattgtatcag

SEQ ID NO: 3966 - DNA, 45 bp, Artificial Sequence
  Synthetic
agtctgcatcaggagcagctgatgtttcatttacatttgaaaggg

SEQ ID NO: 3967 - DNA, 47 bp, Artificial Sequence
  Synthetic
gctctgtttgtgatggtataatggttggattggtagtgtttaatccc

SEQ ID NO: 3968 - DNA, 46 bp, Artificial Sequence
  Synthetic
tgggtatgtgttaggattttcaacagaagaggaaatccattaggtg

SEQ ID NO: 3969 - DNA, 43 bp, Artificial Sequence
  Synthetic
gggaagcaagtttattatcctgcttggctggaaaggttggaga

SEQ ID NO: 3970 - DNA, 49 bp, Artificial Sequence
  Synthetic
gcgtaagggtcagttttttccttattacaagtatattacttcatgggcc

SEQ ID NO: 3971 - DNA, 37 bp, Artificial Sequence
  Synthetic
actgtcgccagtggggtgcgctcagccactaacccgt

SEQ ID NO: 3972 - DNA, 43 bp, Artificial Sequence
  Synthetic
acactatttgtcaccataagcaagtctgtgggatggaaccaac

SEQ ID NO: 3973 - DNA, 43 bp, Artificial Sequence
  Synthetic
tgcttcaacagttggtgacattaaaattcacacaacctctagc

SEQ ID NO: 3974 - DNA, 40 bp, Artificial Sequence
  Synthetic
acagattttgcccgaagatgctaaaggttggtggtggaag

SEQ ID NO: 3975 - DNA, 50 bp, Artificial Sequence
  Synthetic
agggtcccattacaattaaagaaggttcaaatgttaggagagataacaag

SEQ ID NO: 3976 - DNA, 41 bp, Artificial Sequence
  Synthetic
cttggcagccgtgttggtaagataagtcagagttctcaggg

SEQ ID NO: 3977 - DNA, 45 bp, Artificial Sequence
  Synthetic
gtggtagaaaagagagtgttgctaacaagaaaacagcagacaagc

SEQ ID NO: 3978 - DNA, 44 bp, Artificial Sequence
  Synthetic
accttgtctatgtagtcctcaactacaccaatgatgaaacagga

SEQ ID NO: 3979 - DNA, 43 bp, Artificial Sequence
  Synthetic
catgctcttggaagtttatatcccactctttgggccaagatcc

SEQ ID NO: 3980 - DNA, 49 bp, Artificial Sequence
  Synthetic
tctggggacatcataaccatcataaggttttcctaggtttactattcca

SEQ ID NO: 3981 - DNA, 45 bp, Artificial Sequence
  Synthetic
tcagtcctgtggttaataaagtgttattcagcacaaactaccatg

SEQ ID NO: 3982 - DNA, 45 bp, Artificial Sequence
  Synthetic
gtcgtgtgcttctaatttaactggtttggagggctgctactatag

SEQ ID NO: 3983 - DNA, 43 bp, Artificial Sequence
  Synthetic
gctaccaaaggcactccctaattgtttagacactcaccaaggt

SEQ ID NO: 3984 - DNA, 44 bp, Artificial Sequence
  Synthetic
ggtctagtgatgtttaaccactgacctgtcacaagtcaccatgg

SEQ ID NO: 3985 - DNA, 45 bp, Artificial Sequence
  Synthetic
acttcttgttgatcatacccatcaagtttaaccaaaccaggtgac

SEQ ID NO: 3986 - DNA, 43 bp, Artificial Sequence
  Synthetic
ggtacccttgcaagatcttaagatcacccacagtaacagtccc

SEQ ID NO: 3987 - DNA, 43 bp, Artificial Sequence
  Synthetic
ccaagccctgaaatatagctgttatagaggagagcaaatccag

SEQ ID NO: 3988 - DNA, 43 bp, Artificial Sequence
  Synthetic
actcaggtttcttcttgggtgtattgatgtgtattgcccaagg

SEQ ID NO: 3989 - DNA, 45 bp, Artificial Sequence
  Synthetic
cctatgatattacctgtgttggccatatgactatccaacccaacc

SEQ ID NO: 3990 - DNA, 41 bp, Artificial Sequence
  Synthetic
gtgaggtctacttccaatcgtgtcctggtgttaaggaacca

SEQ ID NO: 3991 - DNA, 45 bp, Artificial Sequence
  Synthetic
ccttgtgtctttagtagcgttgtttttcccttatgtgtctttggg

SEQ ID NO: 3992 - DNA, 43 bp, Artificial Sequence
  Synthetic
gcatgcatttgtgaccaaaacaccaggtatcttaacaggctca

SEQ ID NO: 3993 - DNA, 45 bp, Artificial Sequence
  Synthetic
tgcattgagtaaacaggatgtatcaaatgtgaccttccttaaacg

SEQ ID NO: 3994 - DNA, 46 bp, Artificial Sequence
  Synthetic
cttctcttgtcttcctgatgtgtatcgcgagatactaacaaaaacc

SEQ ID NO: 3995 - DNA, 38 bp, Artificial Sequence
  Synthetic
ttgtcggcccattcctgttcgtcggacagagtgatggt

SEQ ID NO: 3996 - DNA, 45 bp, Artificial Sequence
  Synthetic
ggagctcttctttcttctcttttgtgtcgttttcccaaatgaagt

SEQ ID NO: 3997 - DNA, 44 bp, Artificial Sequence
  Synthetic
tgtgaattcttcatacccctcatgtcatccgtcaagaaggaaga

SEQ ID NO: 3998 - DNA, 39 bp, Artificial Sequence
  Synthetic
cctcaggagttgatgcatgggggcgatctgaatttcgtg

SEQ ID NO: 3999 - DNA, 44 bp, Artificial Sequence
  Synthetic
tgtttcactaacctcttcaggagatattgaccgtttcttgaggg

SEQ ID NO: 4000 - DNA, 40 bp, Artificial Sequence
  Synthetic
gacttgcttccgggctaggcacaagcggtaatgcagttga

SEQ ID NO: 4001 - DNA, 39 bp, Artificial Sequence
  Synthetic
ggatttaacacggacgcggaaaccgattacgtggggttt

SEQ ID NO: 4002 - DNA, 38 bp, Artificial Sequence
  Synthetic
cttcgtttgggtcgttctcccccacacttcaggaccta

SEQ ID NO: 4003 - DNA, 40 bp, Artificial Sequence
  Synthetic
ggtctgttcccggtgatattgattggacaatcctgaggtg

SEQ ID NO: 4004 - DNA, 40 bp, Artificial Sequence
  Synthetic
cccacgtcctgcaacaaatcctggttagaccgagtggcga

SEQ ID NO: 4005 - DNA, 40 bp, Artificial Sequence
  Synthetic
gtctccaaaacccggagcacgggaatttaacaagacacgc

SEQ ID NO: 4006 - DNA, 39 bp, Artificial Sequence
  Synthetic
tctgtccccgctgcctcatcgcaggggctacattctgga

SEQ ID NO: 4007 - DNA, 38 bp, Artificial Sequence
  Synthetic
cttgcaatctgggcgcagggacgaggattgggaggagg

SEQ ID NO: 4008 - DNA, 40 bp, Artificial Sequence
  Synthetic
cggtacagactcccaggtagcatggaagacccaagagcga

SEQ ID NO: 4009 - DNA, 41 bp, Artificial Sequence
  Synthetic
gatgccgttcaggttcaccctgtgcaactttagccagacca

SEQ ID NO: 4010 - DNA, 35 bp, Artificial Sequence
  Synthetic
tgctggaagcactgggcgcgggatgggccggagtt

SEQ ID NO: 4011 - DNA, 38 bp, Artificial Sequence
  Synthetic
cacctctaccgggtcctggatggtccacctctcccgat

SEQ ID NO: 4012 - DNA, 40 bp, Artificial Sequence
  Synthetic
tgcacaacatgaacccccggggcctggatcttaaggttgg

SEQ ID NO: 4013 - DNA, 36 bp, Artificial Sequence
  Synthetic
aaccgggtgcggcaagtccggggtgatgagctgcga

SEQ ID NO: 4014 - DNA, 38 bp, Artificial Sequence
  Synthetic
ccccgaaacgaggaagtctgcttccaggcggtcccaga

SEQ ID NO: 4015 - DNA, 38 bp, Artificial Sequence
  Synthetic
ctgtacgccctgcaatccctccggagcttgcccttgga

SEQ ID NO: 4016 - DNA, 38 bp, Artificial Sequence
  Synthetic
gccttcgtctcagagtggtccgtgtcctgcaggggcgt

SEQ ID NO: 4017 - DNA, 39 bp, Artificial Sequence
  Synthetic
tgacaacctgagtgccgaggtccagctgttggggtaggt

SEQ ID NO: 4018 - DNA, 37 bp, Artificial Sequence
  Synthetic
cgcgtcaggattgtgcccgcgcaacgcacttccattc

SEQ ID NO: 4019 - DNA, 39 bp, Artificial Sequence
  Synthetic
tacgtgcgcgccagcatcctacacatagatgggctccga

SEQ ID NO: 4020 - DNA, 40 bp, Artificial Sequence
  Synthetic
cgctcaagcttacgccctccatggttaacggccttgtagg

SEQ ID NO: 4021 - DNA, 40 bp, Artificial Sequence
  Synthetic
cgcccgcgattcatggaactatctgggcggctaggacaat

SEQ ID NO: 4022 - DNA, 35 bp, Artificial Sequence
  Synthetic
ccccaagctggtcgccctttcccagcgatcccagc

SEQ ID NO: 4023 - DNA, 38 bp, Artificial Sequence
  Synthetic
cgccactcctgaagttcctcctcgctgcacgggctgta

SEQ ID NO: 4024 - DNA, 36 bp, Artificial Sequence
  Synthetic
gttcaaagtcacggggcccggacgcggcggttgaca

SEQ ID NO: 4025 - DNA, 35 bp, Artificial Sequence
  Synthetic
cgccgtctttacgcggcactccccgtcaacgtcgc

SEQ ID NO: 4026 - DNA, 38 bp, Artificial Sequence
  Synthetic
ccaccgcccccagaggaaattcgcgctcaaaatccccg

SEQ ID NO: 4027 - DNA, 39 bp, Artificial Sequence
  Synthetic
cggtcgatcttgacgcgcttaggcgctaacgatgcatct

SEQ ID NO: 4028 - DNA, 38 bp, Artificial Sequence
  Synthetic
gctcaggggcgttggggttatgtcatcatttgcggcgg

SEQ ID NO: 4029 - DNA, 36 bp, Artificial Sequence
  Synthetic
atgctcgaggacctggcccactaggaagtgcggcgg

SEQ ID NO: 4030 - DNA, 37 bp, Artificial Sequence
  Synthetic
ctcgaaccggggtacacgccttcctccgtagcctggc

SEQ ID NO: 4031 - DNA, 37 bp, Artificial Sequence
  Synthetic
aaaagggggctcgctcgccagcattgccagggttacg

SEQ ID NO: 4032 - DNA, 40 bp, Artificial Sequence
  Synthetic
ggtgcgcacgtggttgttgaaaggcctacgagcagacggt

SEQ ID NO: 4033 - DNA, 42 bp, Artificial Sequence
  Synthetic
gggcacgtacggcgtcttgtaagcgatcaactactcagtgct

SEQ ID NO: 4034 - DNA, 38 bp, Artificial Sequence
  Synthetic
gggcttgctgctgggacatctaaggatgcacccgctgc

SEQ ID NO: 4035 - DNA, 35 bp, Artificial Sequence
  Synthetic
gctgttgtagcggcccacgaggccatccgtcccga

SEQ ID NO: 4036 - DNA, 42 bp, Artificial Sequence
  Synthetic
cccgcgtaggttcttgaaagcctttttccagacaagccggca

SEQ ID NO: 4037 - DNA, 41 bp, Artificial Sequence
  Synthetic
cgtactgcggcggaattttctgacgacaccgacagtttgag

SEQ ID NO: 4038 - DNA, 37 bp, Artificial Sequence
  Synthetic
cgggagccaatgcgggttcaagcgcggcgtccatgaa

SEQ ID NO: 4039 - DNA, 42 bp, Artificial Sequence
  Synthetic
agcgtaggtcttccagcggtttgaacgccatggccaataacg

SEQ ID NO: 4040 - DNA, 41 bp, Artificial Sequence
  Synthetic
catcacgctctcgtacgagggccttgttagagatgaggcgc

SEQ ID NO: 4041 - DNA, 41 bp, Artificial Sequence
  Synthetic
ggtcccagcccagcttgaaattaagtggggcgtcaaaatgg

SEQ ID NO: 4042 - DNA, 45 bp, Artificial Sequence
  Synthetic
aggagcattaactttagcagcatttcaagtacttggaaagcaaga

SEQ ID NO: 4043 - DNA, 41 bp, Artificial Sequence
  Synthetic
gctgggtggagcgaaaggtgagcaagtttactggtcgctgc

SEQ ID NO: 4044 - DNA, 40 bp, Artificial Sequence
  Synthetic
tgcccagggccttgtagacgcgagtgaccgttactgacgc

SEQ ID NO: 4045 - DNA, 38 bp, Artificial Sequence
  Synthetic
gcgtcagcgactacggagtcaagcttacaagcgcgggc

SEQ ID NO: 4046 - DNA, 35 bp, Artificial Sequence
  Synthetic
tttccgcgcctgggtctggcagacgagcggccgtt

SEQ ID NO: 4047 - DNA, 36 bp, Artificial Sequence
  Synthetic
caacacgcgctgcaccctgtgtgcgcgagtttgctc

SEQ ID NO: 4048 - DNA, 38 bp, Artificial Sequence
  Synthetic
ggtgtccagcacgtcctcctacccgaccatgcagatca

SEQ ID NO: 4049 - DNA, 35 bp, Artificial Sequence
  Synthetic
aggctcggtggccgtggatgtgcagaccgacccct

SEQ ID NO: 4050 - DNA, 41 bp, Artificial Sequence
  Synthetic
cggcgggatcttcctcggtaatactgttgcagagagatggc

SEQ ID NO: 4051 - DNA, 41 bp, Artificial Sequence
  Synthetic
cgttccaggtgcccatgaacgcatcaattttgcgtccctgg

SEQ ID NO: 4052 - DNA, 38 bp, Artificial Sequence
  Synthetic
gcatcttccatctccaccaccgccgtgcagcgcgagat

SEQ ID NO: 4053 - DNA, 35 bp, Artificial Sequence
  Synthetic
tgccagttctgggcctggccagctccggtcgtgca

SEQ ID NO: 4054 - DNA, 38 bp, Artificial Sequence
  Synthetic
ggagccaccgtggggtttctaaccgggtctggtgcagt

SEQ ID NO: 4055 - DNA, 44 bp, Artificial Sequence
  Synthetic
aattgttatgtcagcgcctccccaaaacaaactaatgctggaaa

SEQ ID NO: 4056 - DNA, 43 bp, Artificial Sequence
  Synthetic
acccagagaatctagcaaaagcttgtggttgacttacaagaca

SEQ ID NO: 4057 - DNA, 38 bp, Artificial Sequence
  Synthetic
tggtgttggtgggcagtgtgttgtacctgcccgactcc

SEQ ID NO: 4058 - DNA, 40 bp, Artificial Sequence
  Synthetic
gttgcccagggaactctgcacacctacgagtggaacttcc

SEQ ID NO: 4059 - DNA, 41 bp, Artificial Sequence
  Synthetic
acgctgcgcttaatctcgaactgttcgactcctcggttagc

SEQ ID NO: 4060 - DNA, 35 bp, Artificial Sequence
  Synthetic
cctggcgcatggtaggtgcccctgcccttccagca

SEQ ID NO: 4061 - DNA, 40 bp, Artificial Sequence
  Synthetic
gtagacggcctcgatgacgctgaagttttcgacgtggtca

SEQ ID NO: 4062 - DNA, 35 bp, Artificial Sequence
  Synthetic
tctgcttaagccggcggtcgctcgcgcacctgcta

SEQ ID NO: 4063 - DNA, 40 bp, Artificial Sequence
  Synthetic
gcacctgtggcgattgtagcatgggaaccccaccatgaac

SEQ ID NO: 4064 - DNA, 41 bp, Artificial Sequence
  Synthetic
ccccgagattgctgttcccaaatgcggtactggtacttggg

SEQ ID NO: 4065 - DNA, 39 bp, Artificial Sequence
  Synthetic
tacccgaatatgcagcgcggctgtggggcttgtggttac

SEQ ID NO: 4066 - DNA, 37 bp, Artificial Sequence
  Synthetic
gctcaagtgtctgcacgggacgcgctgaccgttctcg

SEQ ID NO: 4067 - DNA, 40 bp, Artificial Sequence
  Synthetic
tgctgatggaacgctaccgctttggaagatctcggtctgc

SEQ ID NO: 4068 - DNA, 42 bp, Artificial Sequence
  Synthetic
cgaggaggacgtggttccactgtgtttggtctttctgggctg

SEQ ID NO: 4069 - DNA, 42 bp, Artificial Sequence
  Synthetic
tcctgtgggggttctagacgaggcaacccaaaatcaagcagg

SEQ ID NO: 4070 - DNA, 39 bp, Artificial Sequence
  Synthetic
tcgacgctgcgcttaagcacgttacactagcgccctggt

SEQ ID NO: 4071 - DNA, 40 bp, Artificial Sequence
  Synthetic
tgtagtgcagggtctcctcgacttggaatgtatgcgccgc

SEQ ID NO: 4072 - DNA, 41 bp, Artificial Sequence
  Synthetic
gcccgtccacaacgttttaagggacgagaacctgaaggagc

SEQ ID NO: 4073 - DNA, 38 bp, Artificial Sequence
  Synthetic
actcaagcagcccctcgccagctggccaactacattgc

SEQ ID NO: 4074 - DNA, 41 bp, Artificial Sequence
  Synthetic
gatcgtgccctgggtgatgactctttgaggaccaattgcgc

SEQ ID NO: 4075 - DNA, 37 bp, Artificial Sequence
  Synthetic
acgaggaggcttgaccggaggcaggcaacagagcagc

SEQ ID NO: 4076 - DNA, 40 bp, Artificial Sequence
  Synthetic
gctgacctcgactctgctgaaacttgaccaccagggagct

SEQ ID NO: 4077 - DNA, 42 bp, Artificial Sequence
  Synthetic
gccagctggacacctgagttagactaccgtactacttccgcg

SEQ ID NO: 4078 - DNA, 40 bp, Artificial Sequence
  Synthetic
ggcctggggagcctgaaaagcagttcgtggaggagtttgt

SEQ ID NO: 4079 - DNA, 43 bp, Artificial Sequence
  Synthetic
tccagagtagagtcttatttcagctcccgaagttgcatgagaa

SEQ ID NO: 4080 - DNA, 47 bp, Artificial Sequence
  Synthetic
caccagggaaaggataattagcaaatatctgctgggttagatattgc

SEQ ID NO: 4081 - DNA, 43 bp, Artificial Sequence
  Synthetic
acctgacataaagcaggccataatctaccaaggagaacatggt

SEQ ID NO: 4082 - DNA, 44 bp, Artificial Sequence
  Synthetic
agctatgcttgatttgtgggtttccagttacatggtatgatgga

SEQ ID NO: 4083 - DNA, 45 bp, Artificial Sequence
  Synthetic
ctttgagcagtattaccttgtccaagtgtcagtcaaaaccttgtt

SEQ ID NO: 4084 - DNA, 47 bp, Artificial Sequence
  Synthetic
gaggttctttggtatgtggcttaatgataaggcaaatcgttacagaa

SEQ ID NO: 4085 - DNA, 49 bp, Artificial Sequence
  Synthetic
acaaagtacaaaagaaccacgagaactcaggtttgcatattcaaattac

SEQ ID NO: 4086 - DNA, 39 bp, Artificial Sequence
  Synthetic
gcagacaatgctgcagacgcagccattccccacctacct

SEQ ID NO: 4087 - DNA, 48 bp, Artificial Sequence
  Synthetic
cgagatcaaaacaggggtagatcatttcctattacttggtaattgtgg

SEQ ID NO: 4088 - DNA, 41 bp, Artificial Sequence
  Synthetic
cccgtctgctgggtgatgactaccccagcagaagcaaaagt

SEQ ID NO: 4089 - DNA, 38 bp, Artificial Sequence
  Synthetic
tgagtgacagaaccccagggcttccttactcccccctt

SEQ ID NO: 4090 - DNA, 49 bp, Artificial Sequence
  Synthetic
aaatgctaccaagtctccattatcaggtggaaatatatgtgttagagtt

SEQ ID NO: 4091 - DNA, 46 bp, Artificial Sequence
  Synthetic
gccaaggtagatgtttccataaacttttggtagcctatccaaaacc

SEQ ID NO: 4092 - DNA, 40 bp, Artificial Sequence
  Synthetic
aaggccacccgtactgagagacacattctcccaccaccag

SEQ ID NO: 4093 - DNA, 44 bp, Artificial Sequence
  Synthetic
tgggctgctgaataacataatgattgcaccgcattctaatttcg

SEQ ID NO: 4094 - DNA, 43 bp, Artificial Sequence
  Synthetic
cctgggatatgatcctgaccacaaggcacactgacatacatct

SEQ ID NO: 4095 - DNA, 41 bp, Artificial Sequence
  Synthetic
ggcagcattaactggatggggatgcgaattcccctcaacac

SEQ ID NO: 4096 - DNA, 45 bp, Artificial Sequence
  Synthetic
tggacttacaccaacaatttgtagacatcatgttacattcctgca

SEQ ID NO: 4097 - DNA, 44 bp, Artificial Sequence
  Synthetic
cctggctttatcacttacattttggctgcatgctggaataagct

SEQ ID NO: 4098 - DNA, 40 bp, Artificial Sequence
  Synthetic
ccgatgtgatttttgccggaagtccgtgtgattaaagagc

SEQ ID NO: 4099 - DNA, 42 bp, Artificial Sequence
  Synthetic
cgtcagtgtaagttgcctttaagtcagtacaagcgccaacag

SEQ ID NO: 4100 - DNA, 39 bp, Artificial Sequence
  Synthetic
gatgctctcacttctcctggattataatggccgggctac

SEQ ID NO: 4101 - DNA, 43 bp, Artificial Sequence
  Synthetic
caggatatccatatgtctgaagcaaccattgttccaagggcaa

SEQ ID NO: 4102 - DNA, 40 bp, Artificial Sequence
  Synthetic
agctccacagtgctggatagatactcagagacccagttca

SEQ ID NO: 4103 - DNA, 46 bp, Artificial Sequence
  Synthetic
ccagttcttgttgtcccgatcttgatcatacagacataacatttgg

SEQ ID NO: 4104 - DNA, 42 bp, Artificial Sequence
  Synthetic
cattctcatagtcagcatcactgcggccgacagaaaacagag

SEQ ID NO: 4105 - DNA, 41 bp, Artificial Sequence
  Synthetic
cttctccaatttctgtgggctttctcagatgtcatcggact

SEQ ID NO: 4106 - DNA, 45 bp, Artificial Sequence
  Synthetic
gttgatcaaggattctagcatgtgtggagtggaatctctaggaga

SEQ ID NO: 4107 - DNA, 49 bp, Artificial Sequence
  Synthetic
cttgggttggtaatgacatcagttagagggtagaacaaataataatgga

SEQ ID NO: 4108 - DNA, 41 bp, Artificial Sequence
  Synthetic
gctgctgactcttcgttctttgatcgaagaccacaacacca

SEQ ID NO: 4109 - DNA, 42 bp, Artificial Sequence
  Synthetic
tgtctttcccttttgtgaagactgcgggaaaacgggaaatcc

SEQ ID NO: 4110 - DNA, 44 bp, Artificial Sequence
  Synthetic
gagaggttctactgtcccattttcaaatggctgaaacatacagg

SEQ ID NO: 4111 - DNA, 45 bp, Artificial Sequence
  Synthetic
ggagcatggatcgaatctaccatgcattgacctcaaaataactgt

SEQ ID NO: 4112 - DNA, 48 bp, Artificial Sequence
  Synthetic
ttgagttcggtaatgcaagatctgtggaacatcactaggtacaattac

SEQ ID NO: 4113 - DNA, 46 bp, Artificial Sequence
  Synthetic
tccattaaaggatagcaaactgcttcaggcacattatccaaaactc

SEQ ID NO: 4114 - DNA, 49 bp, Artificial Sequence
  Synthetic
gctgagctttttgagactcttgtctcagttcaaataagaaaaacgtagg

SEQ ID NO: 4115 - DNA, 50 bp, Artificial Sequence
  Synthetic
gcaccaaagaatctagtttgtggatatccctgataacaataactaatgac

SEQ ID NO: 4116 - DNA, 50 bp, Artificial Sequence
  Synthetic
acctgttcagtgtaaatgatgtcatctctactctgctaatataacagaaa

SEQ ID NO: 4117 - DNA, 43 bp, Artificial Sequence
  Synthetic
gaatgtaactcctcttgagcgatctcatccacatgtacatgcg

SEQ ID NO: 4118 - DNA, 49 bp, Artificial Sequence
  Synthetic
gactggattgtctttaaccctaagtcatacaacaatcaaatctatccac

SEQ ID NO: 4119 - DNA, 42 bp, Artificial Sequence
  Synthetic
cagaaatcgtgtgggtccagagaaaacaccattgctattcac

SEQ ID NO: 4120 - DNA, 46 bp, Artificial Sequence
  Synthetic
tcctgcagctattacagaacatgggtaatttctcatacctatgaca

SEQ ID NO: 4121 - DNA, 47 bp, Artificial Sequence
  Synthetic
cgtaccctaggaaaatgagtgtattacttttgaccatcctttttctg

SEQ ID NO: 4122 - DNA, 46 bp, Artificial Sequence
  Synthetic
agtgccaacctgaagatctagtagaaggtaggctacttaaactagg

SEQ ID NO: 4123 - DNA, 41 bp, Artificial Sequence
  Synthetic
tggtgggattaacacgtgatgtccactatctcctgatgcag

SEQ ID NO: 4124 - DNA, 44 bp, Artificial Sequence
  Synthetic
cggataaggttcaaaagtgtaacgacccggcagatcaaaatcag

SEQ ID NO: 4125 - DNA, 45 bp, Artificial Sequence
  Synthetic
cgagtcgtccagctgaagacgtattaatgtattgtgatgttgtcg

SEQ ID NO: 4126 - DNA, 44 bp, Artificial Sequence
  Synthetic
cccattttcactgaataactcacctaagatgagagcagtccagg

SEQ ID NO: 4127 - DNA, 45 bp, Artificial Sequence
  Synthetic
tgctatagcttgattgtctccttgttcttgcagctgttaaagttg

SEQ ID NO: 4128 - DNA, 48 bp, Artificial Sequence
  Synthetic
gctgtagacatatagttgaaccctcaagggaaaaattggttaagatgt

SEQ ID NO: 4129 - DNA, 50 bp, Artificial Sequence
  Synthetic
gtggattggtcttccataagttagagagtatatgtgttcagtagaattgg

SEQ ID NO: 4130 - DNA, 44 bp, Artificial Sequence
  Synthetic
ttctctaaacttaagttagccctgggggcttatggaactgatga

SEQ ID NO: 4131 - DNA, 41 bp, Artificial Sequence
  Synthetic
tccctctgacgtttaacccgttcgggggtattctaatcaat

SEQ ID NO: 4132 - DNA, 44 bp, Artificial Sequence
  Synthetic
agcatactatcggcatcaggatctgagagtaagaggtataggga

SEQ ID NO: 4133 - DNA, 47 bp, Artificial Sequence
  Synthetic
ggtaagttccaatgctttcaaacaattatcacaccaattgagacttt

SEQ ID NO: 4134 - DNA, 42 bp, Artificial Sequence
  Synthetic
aggatctccagtataagggaatgtggatgtcaatccgacctt

SEQ ID NO: 4135 - DNA, 45 bp, Artificial Sequence
  Synthetic
gtttgtccactcttgtttgttgaatatcacacccaggaatctttg

SEQ ID NO: 4136 - DNA, 47 bp, Artificial Sequence
  Synthetic
tggtcatgttgtctcttactcttctggatgtgatagaatcaatggat

SEQ ID NO: 4137 - DNA, 46 bp, Artificial Sequence
  Synthetic
ccttcttttcattacctccaaccgacactagcgagaaatatttgtg

SEQ ID NO: 4138 - DNA, 42 bp, Artificial Sequence
  Synthetic
tcgaacatgtaacctttccctagtctgagcattgcacccata

SEQ ID NO: 4139 - DNA, 41 bp, Artificial Sequence
  Synthetic
agtccgtcccaccagtatgttcttaggagtctcaatcctga

SEQ ID NO: 4140 - DNA, 46 bp, Artificial Sequence
  Synthetic
agccgattcattaattccagacacgatttgtagccaattttagcat

SEQ ID NO: 4141 - DNA, 40 bp, Artificial Sequence
  Synthetic
gcctcccctgatagtcttcattctccacattccagaagtc

SEQ ID NO: 4142 - DNA, 46 bp, Artificial Sequence
  Synthetic
actgctagggaagaatttctcaaatgggaattcttgaagatgaaca

SEQ ID NO: 4143 - DNA, 43 bp, Artificial Sequence
  Synthetic
tgcagagcaggaaaatattagttgggtagggtcagcaaagcac

SEQ ID NO: 4144 - DNA, 40 bp, Artificial Sequence
  Synthetic
ccgtcctgttgtctgttccacaaaaagtgagggagctgcg

SEQ ID NO: 4145 - DNA, 42 bp, Artificial Sequence
  Synthetic
acgcacactatcctcctcctctggtggttgacctacattgca

SEQ ID NO: 4146 - DNA, 49 bp, Artificial Sequence
  Synthetic
gctagtccaaataggtccttgaattagacatattagaggtgtttaaggt

SEQ ID NO: 4147 - DNA, 44 bp, Artificial Sequence
  Synthetic
ggtatgtttaacagttttcccatgctgtgcgatacaaatgtggg

SEQ ID NO: 4148 - DNA, 42 bp, Artificial Sequence
  Synthetic
cctcatttcccagcaatgcatattgggcatatgacaatgaca

SEQ ID NO: 4149 - DNA, 42 bp, Artificial Sequence
  Synthetic
gcaaaatagcgacttccctgtgggtaccaaaaaaaagctgca

SEQ ID NO: 4150 - DNA, 42 bp, Artificial Sequence
  Synthetic
ggtctagtaatttctcctggcacgaggaggaggaggatgagg

SEQ ID NO: 4151 - DNA, 40 bp, Artificial Sequence
  Synthetic
tttccaaagaggtggtttgcaaagggttacaaacaagtgc

SEQ ID NO: 4152 - DNA, 46 bp, Artificial Sequence
  Synthetic
gcacaacaatcctacatatatggcagctttcctatctttcctcact

SEQ ID NO: 4153 - DNA, 39 bp, Artificial Sequence
  Synthetic
tacagtaggaggccgggtgcgggggattgggtataggca

SEQ ID NO: 4154 - DNA, 40 bp, Artificial Sequence
  Synthetic
cccctgcctgaggaggttcaatgggtctgtgcaggttagc

SEQ ID NO: 4155 - DNA, 41 bp, Artificial Sequence
  Synthetic
ggcaccaaaggctgtaactccagcgctcgggtacactttta

SEQ ID NO: 4156 - DNA, 45 bp, Artificial Sequence
  Synthetic
gcaacaaataaaaatcagagccctggtaccagctgtaccatatgt

SEQ ID NO: 4157 - DNA, 39 bp, Artificial Sequence
  Synthetic
gtgtttttcttgccctgcagccagttcccgtctgcttac

SEQ ID NO: 4158 - DNA, 47 bp, Artificial Sequence
  Synthetic
agcagccatttgtaaataatcaggaaataaatctgaagtgccattgg

SEQ ID NO: 4159 - DNA, 46 bp, Artificial Sequence
  Synthetic
ataccattgttgtggccctggctgattcccaattatttaataagcc

SEQ ID NO: 4160 - DNA, 44 bp, Artificial Sequence
  Synthetic
ggactgcaaaaacctatatgtgtctttgttggatgactggaact

SEQ ID NO: 4161 - DNA, 43 bp, Artificial Sequence
  Synthetic
acatgcacaacaacagcatacagtgctacaaaacgcaaaaagc

SEQ ID NO: 4162 - DNA, 42 bp, Artificial Sequence
  Synthetic
acagaaatggggaagctgcacatgcaccctgtgagtaagtgt

SEQ ID NO: 4163 - DNA, 43 bp, Artificial Sequence
  Synthetic
cacagtaattgcacaacatgtcaaagggtgtgtttgacaggtt

SEQ ID NO: 4164 - DNA, 44 bp, Artificial Sequence
  Synthetic
gctgttatattgcgggcataagtttggagaaacagtggaattac

SEQ ID NO: 4165 - DNA, 43 bp, Artificial Sequence
  Synthetic
tctgtatagtttgagcgttgaaagagacgtttgcatccaacac

SEQ ID NO: 4166 - DNA, 38 bp, Artificial Sequence
  Synthetic
ggacatgggctgccagaccgggacggtccagtacttcc

SEQ ID NO: 4167 - DNA, 37 bp, Artificial Sequence
  Synthetic
acgggattggtcggccgaaccggcccgtcaatcaaag

SEQ ID NO: 4168 - DNA, 41 bp, Artificial Sequence
  Synthetic
taagcaaaggggggatgggttttaccgagtaaaaggttcca

SEQ ID NO: 4169 - DNA, 39 bp, Artificial Sequence
  Synthetic
tatcccgcatgtaagctggctgattctggtctcacctgt

SEQ ID NO: 4170 - DNA, 36 bp, Artificial Sequence
  Synthetic
tacaccatgcgcggcggtcgcggttcgatgtagggt

SEQ ID NO: 4171 - DNA, 39 bp, Artificial Sequence
  Synthetic
tacgtgcaggcgccacacgcatgtggctgagcaaaaagg

SEQ ID NO: 4172 - DNA, 38 bp, Artificial Sequence
  Synthetic
gctggacacgcccatctcctcaggttcctgcggaggtg

SEQ ID NO: 4173 - DNA, 38 bp, Artificial Sequence
  Synthetic
gcagcacgcaaaagagcaggttacttgaggagccggcg

SEQ ID NO: 4174 - DNA, 35 bp, Artificial Sequence
  Synthetic
ccccattgacgcgtctgccccccttccgcctccaa

SEQ ID NO: 4175 - DNA, 39 bp, Artificial Sequence
  Synthetic
ccgaacagaagatgggacgccgtcgtcacgctccacaac

SEQ ID NO: 4176 - DNA, 40 bp, Artificial Sequence
  Synthetic
accgcatctcttggcgtttaccgtcctcgaattcgtggcc

SEQ ID NO: 4177 - DNA, 40 bp, Artificial Sequence
  Synthetic
acaggcaaaacacgccgtggcggtgcgaaatgaagagtgt

SEQ ID NO: 4178 - DNA, 38 bp, Artificial Sequence
  Synthetic
cgcgcttcagtgcaccgttgagaagcagtttcaggacg

SEQ ID NO: 4179 - DNA, 42 bp, Artificial Sequence
  Synthetic
cactgataacatgtaactccgccttatcaggtacgtgctgtt

SEQ ID NO: 4180 - DNA, 38 bp, Artificial Sequence
  Synthetic
ggtcacgggcgtgttcagtaatcgatggagcgcatgcc

SEQ ID NO: 4181 - DNA, 38 bp, Artificial Sequence
  Synthetic
cctgccgttgttctttgcggcccgttgcagtgattcgg

SEQ ID NO: 4182 - DNA, 36 bp, Artificial Sequence
  Synthetic
tttgtgggagcgtccggccgtcccgttgtgcgttgt

SEQ ID NO: 4183 - DNA, 38 bp, Artificial Sequence
  Synthetic
cggcaccgttgtcgcagtacagacggtgtcagtcaagg

SEQ ID NO: 4184 - DNA, 39 bp, Artificial Sequence
  Synthetic
ggcttctggttgggcgagcccaacagtagtccctctgcc

SEQ ID NO: 4185 - DNA, 41 bp, Artificial Sequence
  Synthetic
ccccgtgttgttctgccgtattcgtcctccccctgaaaagc

SEQ ID NO: 4186 - DNA, 37 bp, Artificial Sequence
  Synthetic
gcccgggtatgcgaaaccatcgtagctggcggttctg

SEQ ID NO: 4187 - DNA, 35 bp, Artificial Sequence
  Synthetic
tgcacctctggcgccacagagccacgcgctagcac

SEQ ID NO: 4188 - DNA, 39 bp, Artificial Sequence
  Synthetic
tcagggcgcgtctggtctcaaaggggatcaaattggccc

SEQ ID NO: 4189 - DNA, 40 bp, Artificial Sequence
  Synthetic
gtgaatgagggcgcatctacctcgaggcctgcgtaacttg

SEQ ID NO: 4190 - DNA, 38 bp, Artificial Sequence
  Synthetic
acgcctctgaggacgctgcctgtccttagttggcgccg

SEQ ID NO: 4191 - DNA, 39 bp, Artificial Sequence
  Synthetic
ggccaccgcgtccttcatttccggcggtaacaaaggacg

SEQ ID NO: 4192 - DNA, 40 bp, Artificial Sequence
  Synthetic
cctgttggacgatctcgcacatgacgcaaagacgctcctg

SEQ ID NO: 4193 - DNA, 41 bp, Artificial Sequence
  Synthetic
ggcgatgtgctgggggtgatacagagagcctagaatcacgc

SEQ ID NO: 4194 - DNA, 40 bp, Artificial Sequence
  Synthetic
cgcgtgaggtgaggtggacatccccacacgccatagacat

SEQ ID NO: 4195 - DNA, 39 bp, Artificial Sequence
  Synthetic
ttggggtaacggcgggcacctttccacacgcaatgaagc

SEQ ID NO: 4196 - DNA, 38 bp, Artificial Sequence
  Synthetic
tgcgagcaggagggacctttgtatgccagaagcctcct

SEQ ID NO: 4197 - DNA, 36 bp, Artificial Sequence
  Synthetic
tccctgggcaggcggaatagcgctgtgcgccctcaa

SEQ ID NO: 4198 - DNA, 38 bp, Artificial Sequence
  Synthetic
gcagcagcaggatgagcagcatgctgctcctgctcctc

SEQ ID NO: 4199 - DNA, 40 bp, Artificial Sequence
  Synthetic
gcactcttaccccccgtaaccacggagacacaggatggga

SEQ ID NO: 4200 - DNA, 35 bp, Artificial Sequence
  Synthetic
tgtcagaggtgctgcgggcacggtgcccagtgggt

SEQ ID NO: 4201 - DNA, 41 bp, Artificial Sequence
  Synthetic
ccccggacgtaaaggtcgaaggagacagctctgattcacgg

SEQ ID NO: 4202 - DNA, 36 bp, Artificial Sequence
  Synthetic
ttctgccgggagctgggagaagcgtcggagagctgg

SEQ ID NO: 4203 - DNA, 37 bp, Artificial Sequence
  Synthetic
catgctggccgagagggtggggacggagtgatggcct

SEQ ID NO: 4204 - DNA, 41 bp, Artificial Sequence
  Synthetic
gcgcatcttggagaccctgaagagtccggagaagatagggc

SEQ ID NO: 4205 - DNA, 43 bp, Artificial Sequence
  Synthetic
ccaaaccatactctttgcaaagcaagcagggatgtctgaggag

SEQ ID NO: 4206 - DNA, 38 bp, Artificial Sequence
  Synthetic
ccgcactcaaccaccagcccggggtggtaactacctgc

SEQ ID NO: 4207 - DNA, 40 bp, Artificial Sequence
  Synthetic
tcccccgttacctcctctggcagacagtgggtatggcaat

SEQ ID NO: 4208 - DNA, 41 bp, Artificial Sequence
  Synthetic
catggccgtcttgtaccagtcatagaaccaccaaaactgag

SEQ ID NO: 4209 - DNA, 47 bp, Artificial Sequence
  Synthetic
cgccttttaggaacaatttaaaggctcaggtttctaagacatcaagg

SEQ ID NO: 4210 - DNA, 45 bp, Artificial Sequence
  Synthetic
gttgttatcattaggggtggacactagtgagcatagacagaaagc

SEQ ID NO: 4211 - DNA, 39 bp, Artificial Sequence
  Synthetic
gagggcaggcacagctgtactgctgtttaaggcccgaga

SEQ ID NO: 4212 - DNA, 39 bp, Artificial Sequence
  Synthetic
ttcgtcgtccgaggcgctgtggctgggactgttattcac

SEQ ID NO: 4213 - DNA, 43 bp, Artificial Sequence
  Synthetic
cccttaggtatactgactcttgtcagcctttgtaacactgtgg

SEQ ID NO: 4214 - DNA, 44 bp, Artificial Sequence
  Synthetic
acaaacggacataaaacatcaacaatggggtcatgatgatgttc

SEQ ID NO: 4215 - DNA, 40 bp, Artificial Sequence
  Synthetic
gggtctgtaacggtggaggttgcaggagcgtcacatccca

SEQ ID NO: 4216 - DNA, 41 bp, Artificial Sequence
  Synthetic
gcaatggctgaaggacatccgagttgcccccagcttctact

SEQ ID NO: 4217 - DNA, 42 bp, Artificial Sequence
  Synthetic
ccgtactgatcacctttgaaacaggtggcggcctaatgaaag

SEQ ID NO: 4218 - DNA, 41 bp, Artificial Sequence
  Synthetic
gacttatttgactgcagagtggcgaggacggggatatggtt

SEQ ID NO: 4219 - DNA, 45 bp, Artificial Sequence
  Synthetic
gggttatcttgcacagttggaagggaatatctcaggcatatggag

SEQ ID NO: 4220 - DNA, 47 bp, Artificial Sequence
  Synthetic
acagttacagaacacacaacacatgacatgtatggtatgtatcccct

SEQ ID NO: 4221 - DNA, 43 bp, Artificial Sequence
  Synthetic
ttgctttcttgcagcagctgaaacttactagatgatagcgatg

SEQ ID NO: 4222 - DNA, 44 bp, Artificial Sequence
  Synthetic
ggcaatctggagagacagactcacagtggaatagaaaatgaagc

SEQ ID NO: 4223 - DNA, 50 bp, Artificial Sequence
  Synthetic
tctgtagcatcatctataagcccaaggtttctcatatgaattcaaaaagc

SEQ ID NO: 4224 - DNA, 44 bp, Artificial Sequence
  Synthetic
ggaacatgctgcaggcctagtcatgagaaaagaaggaatactgt

SEQ ID NO: 4225 - DNA, 42 bp, Artificial Sequence
  Synthetic
ggtttctccggtttgtgcaaccatcagctcttcctaccccac

SEQ ID NO: 4226 - DNA, 48 bp, Artificial Sequence
  Synthetic
ggccaccaaagtatactaaactactaataaagtagaggaaacaacact

SEQ ID NO: 4227 - DNA, 44 bp, Artificial Sequence
  Synthetic
gttctgtagttatgtcaaagcctgtggtcactcctgaagtagtg

SEQ ID NO: 4228 - DNA, 39 bp, Artificial Sequence
  Synthetic
aggatctggagcagcagttggaaaatcccgcctttacca

SEQ ID NO: 4229 - DNA, 41 bp, Artificial Sequence
  Synthetic
tgagggtgagacacaaagagtctggtgtggctcttagagtg

SEQ ID NO: 4230 - DNA, 44 bp, Artificial Sequence
  Synthetic
gccgtggaagtatatttctgtttctatcttccaccttccagacc

SEQ ID NO: 4231 - DNA, 46 bp, Artificial Sequence
  Synthetic
cgtttaacttatttagcaaggggtggaaactgaaaggtattgaggt

SEQ ID NO: 4232 - DNA, 44 bp, Artificial Sequence
  Synthetic
cccaaatccaatatcacacatgtctctgcccacctcttgaatta

SEQ ID NO: 4233 - DNA, 43 bp, Artificial Sequence
  Synthetic
gcctgagtaccttgaccagggggttgtaggtgaaaatattcct

SEQ ID NO: 4234 - DNA, 43 bp, Artificial Sequence
  Synthetic
tctgatagatccacatcccaaaagtccacacgttgtcctgatc

SEQ ID NO: 4235 - DNA, 44 bp, Artificial Sequence
  Synthetic
cgtgttgagacagcaccatttactgtgaatttaatgtgaaatgc

SEQ ID NO: 4236 - DNA, 48 bp, Artificial Sequence
  Synthetic
gcttcccttgagcaatcaaatcaaattgcaagaaattgatattcgttg

SEQ ID NO: 4237 - DNA, 47 bp, Artificial Sequence
  Synthetic
ctgaaatgttggacccatcagtacgtgagaatgagcatgatactttg

SEQ ID NO: 4238 - DNA, 48 bp, Artificial Sequence
  Synthetic
cctgttcagaagaatttgcagtttcattgaaaagacgattgttgtttc

SEQ ID NO: 4239 - DNA, 48 bp, Artificial Sequence
  Synthetic
gatgttgcactttggtgattcactaacaaatgcctcttatatgtatgg

SEQ ID NO: 4240 - DNA, 39 bp, Artificial Sequence
  Synthetic
gcgtcacctcctcgctttctcgacgacgacgacgaagag

SEQ ID NO: 4241 - DNA, 50 bp, Artificial Sequence
  Synthetic
ggcaatgtggtagtgactaaaaacagaacataaagaatctagtagcaagc

SEQ ID NO: 4242 - DNA, 50 bp, Artificial Sequence
  Synthetic
ccaaaatagaccacacttccaaacaaataaagtagaaggtaatacatggg

SEQ ID NO: 4243 - DNA, 44 bp, Artificial Sequence
  Synthetic
gggggtctagcactgttactatattgttatagacacaggcacat

SEQ ID NO: 4244 - DNA, 43 bp, Artificial Sequence
  Synthetic
accaaaagactgtgcatctacaaatactgctgtgcaaactcat

SEQ ID NO: 4245 - DNA, 45 bp, Artificial Sequence
  Synthetic
ccatagtgacgtcctcctcaaattgcactttatacatctaggttt

SEQ ID NO: 4246 - DNA, 47 bp, Artificial Sequence
  Synthetic
aggttgcacaggaatataaggtgtaattaatacattaccctgtgcag

SEQ ID NO: 4247 - DNA, 50 bp, Artificial Sequence
  Synthetic
tcaaagaaaggatgtccaactgttaattgttggaactgatttatacttcc

SEQ ID NO: 4248 - DNA, 48 bp, Artificial Sequence
  Synthetic
ggattttctgtatcctgcaatttgtggtattgaaattgatagaggtgg

SEQ ID NO: 4249 - DNA, 47 bp, Artificial Sequence
  Synthetic
cgaaccactcggaattgtaaagtaatattttaatcctaatggccagg

SEQ ID NO: 4250 - DNA, 48 bp, Artificial Sequence
  Synthetic
ccacatgagtcaagtcaacatcatttattttgcatgtgaaatggaaca

SEQ ID NO: 4251 - DNA, 45 bp, Artificial Sequence
  Synthetic
cccctgatgtgagtaatagggttaatgaacaggccaaaaatgaac

SEQ ID NO: 4252 - DNA, 40 bp, Artificial Sequence
  Synthetic
ttcctttgatctctccgaacctagggctcaacctttcaga

SEQ ID NO: 4253 - DNA, 40 bp, Artificial Sequence
  Synthetic
accatcatggcatgcggatccaactgtggaaaactccatt

SEQ ID NO: 4254 - DNA, 46 bp, Artificial Sequence
  Synthetic
gctccactcttcctgttggaatgcagatttcttaaaattagagagg

SEQ ID NO: 4255 - DNA, 39 bp, Artificial Sequence
  Synthetic
tccaagccacttgtctccattccagaccggatgatggaa

SEQ ID NO: 4256 - DNA, 48 bp, Artificial Sequence
  Synthetic
caagtatcttttccaccatcgtgtataaaggacaagaaatgtgatgtc

SEQ ID NO: 4257 - DNA, 39 bp, Artificial Sequence
  Synthetic
cgcccgattgaaacttaccgtcattttggcgccaactct

SEQ ID NO: 4258 - DNA, 43 bp, Artificial Sequence
  Synthetic
ctggccaaactcttcttgtagtattggggtgtgtagacattgc

SEQ ID NO: 4259 - DNA, 43 bp, Artificial Sequence
  Synthetic
tgaggacacaagaattgcagttcctgacgctgctattagaagt

SEQ ID NO: 4260 - DNA, 46 bp, Artificial Sequence
  Synthetic
ctcaaattcctgctggcgaagtcaaatttgttaaatgatgaggagg

SEQ ID NO: 4261 - DNA, 45 bp, Artificial Sequence
  Synthetic
aggtcaaattgcatagcatctgctgattggattgtaaatcagacc

SEQ ID NO: 4262 - DNA, 46 bp, Artificial Sequence
  Synthetic
gtgtccaaagcctttcaaaaaaagaatggtacccctgtatttcaac

SEQ ID NO: 4263 - DNA, 43 bp, Artificial Sequence
  Synthetic
cggaggtacgggttgatacccaagctttattattttttgcacg

SEQ ID NO: 4264 - DNA, 49 bp, Artificial Sequence
  Synthetic
ttccatccttataatatgcacctgctttgtagactcagatgatatgtgg

SEQ ID NO: 4265 - DNA, 37 bp, Artificial Sequence
  Synthetic
ggtgtctcgtcgacggtgtcccacggggctacgagaa

SEQ ID NO: 4266 - DNA, 39 bp, Artificial Sequence
  Synthetic
ggaccctctggatcctctggaagggaagcgagcacctca

SEQ ID NO: 4267 - DNA, 43 bp, Artificial Sequence
  Synthetic
gctagcctcctccagtaaccttagagtacaaacagttagtgga

SEQ ID NO: 4268 - DNA, 44 bp, Artificial Sequence
  Synthetic
tccacctattggttgaccaccgaatctgcattaactgatcatgt

SEQ ID NO: 4269 - DNA, 43 bp, Artificial Sequence
  Synthetic
tgctacgtccctttcaaatatttgtgccctcacgtttagttcg

SEQ ID NO: 4270 - DNA, 50 bp, Artificial Sequence
  Synthetic
accagaatgttcccctaatagtgatagtgcatttttatacagatcttagc

SEQ ID NO: 4271 - DNA, 46 bp, Artificial Sequence
  Synthetic
cacagcataaccttccaaatcttgtgcgttctaccacatttactgt

SEQ ID NO: 4272 - DNA, 39 bp, Artificial Sequence
  Synthetic
tccgtgctttgtacccttgccctgcaactggtaaggtat

SEQ ID NO: 4273 - DNA, 44 bp, Artificial Sequence
  Synthetic
aacacctaaaggctggccacccagaaaaggaaagattagtatgg

SEQ ID NO: 4274 - DNA, 40 bp, Artificial Sequence
  Synthetic
gcagtattgggtatcgcatcccaatgttatgccaggcact

SEQ ID NO: 4275 - DNA, 44 bp, Artificial Sequence
  Synthetic
gctcatatggatctttcctttctggtcttacatcacaggcaaca

SEQ ID NO: 4276 - DNA, 45 bp, Artificial Sequence
  Synthetic
gctttcaatgtgatgtttttgtccaacagaaaataacagggtccc

SEQ ID NO: 4277 - DNA, 42 bp, Artificial Sequence
  Synthetic
gccccaacagtaagaatgcatttcgaaggggtcttgcaagga

SEQ ID NO: 4278 - DNA, 48 bp, Artificial Sequence
  Synthetic
agcttctcttaaaggttgagcaattagacattaaacgaaaaacagatg

SEQ ID NO: 4279 - DNA, 48 bp, Artificial Sequence
  Synthetic
cctctggagtgtcatcaatggataatacaagaaaatgtagaagacctt

SEQ ID NO: 4280 - DNA, 44 bp, Artificial Sequence
  Synthetic
gcaactgtaggttccgtagaactttgcaggtaaacgaggaatgt

SEQ ID NO: 4281 - DNA, 43 bp, Artificial Sequence
  Synthetic
gcatacttggatttagccaaactttaaaaccacgctaaaaccg

SEQ ID NO: 4282 - DNA, 44 bp, Artificial Sequence
  Synthetic
cagtccatgtaccagtttttccatattttaccgaactggatggg

SEQ ID NO: 4283 - DNA, 46 bp, Artificial Sequence
  Synthetic
agtgacgctagtgtcaagcaataagtgttattgatattcaaacgcc

SEQ ID NO: 4284 - DNA, 41 bp, Artificial Sequence
  Synthetic
agggcggagagatagaccaacagggcgcgagatttgtacaa

SEQ ID NO: 4285 - DNA, 43 bp, Artificial Sequence
  Synthetic
tgtgcttagtactttgtcagtgttacagtgacggaagacctag

SEQ ID NO: 4286 - DNA, 38 bp, Artificial Sequence
  Synthetic
cacgtacccttttgacctggccttagggcaacattggg

SEQ ID NO: 4287 - DNA, 41 bp, Artificial Sequence
  Synthetic
cagggatactgtcgccaacaaaaacgtgaacaagtctatgc

SEQ ID NO: 4288 - DNA, 42 bp, Artificial Sequence
  Synthetic
gcgtctttaggacagatagtagcttagcctttgtaccagcac

SEQ ID NO: 4289 - DNA, 41 bp, Artificial Sequence
  Synthetic
ggttacaatggtcacagcatgtggatgagctggaggaggag

SEQ ID NO: 4290 - DNA, 47 bp, Artificial Sequence
  Synthetic
tgaagagtgccagggaatttccgggtcagttatttcaaatctaatag

SEQ ID NO: 4291 - DNA, 48 bp, Artificial Sequence
  Synthetic
gcactcttctacctgtgatagttcatccaaaaaaacgtttatttgagg

SEQ ID NO: 4292 - DNA, 45 bp, Artificial Sequence
  Synthetic
gcactagccatttgatgattaacaaatttgtgtttggtcaaatgc

SEQ ID NO: 4293 - DNA, 40 bp, Artificial Sequence
  Synthetic
ccttcccacttcttcagcagacagcaagaaaacgaagagt

SEQ ID NO: 4294 - DNA, 42 bp, Artificial Sequence
  Synthetic
ccaaatggtctgtagccagtagctattttgggggtttgggaa

SEQ ID NO: 4295 - DNA, 42 bp, Artificial Sequence
  Synthetic
tcttcagcagttattgtaggccccagaaggtgttccagagac

SEQ ID NO: 4296 - DNA, 48 bp, Artificial Sequence
  Synthetic
ggcctactcaggtaattgatatctcttgttattcaatcaagaacttgc

SEQ ID NO: 4297 - DNA, 46 bp, Artificial Sequence
  Synthetic
acaaagggttttctgaatctccataagaattaggtagaggaggtcc

SEQ ID NO: 4298 - DNA, 46 bp, Artificial Sequence
  Synthetic
tgctgatctgtcttgagaaaatgttgcacacaagaattcaagatgg

SEQ ID NO: 4299 - DNA, 46 bp, Artificial Sequence
  Synthetic
tggtactttacaaagacgaaagactaagcgattttaaccagtacac

SEQ ID NO: 4300 - DNA, 45 bp, Artificial Sequence
  Synthetic
acatgagtcagtattttgcaaacacttttgccaaatgtactgtga

SEQ ID NO: 4301 - DNA, 44 bp, Artificial Sequence
  Synthetic
ccgccaaattttgagtcagtcaaacagaggcgattgttataccg

SEQ ID NO: 4302 - DNA, 46 bp, Artificial Sequence
  Synthetic
gcttttctgctgcatccaacaactttacctgaggtgattattaggt

SEQ ID NO: 4303 - DNA, 39 bp, Artificial Sequence
  Synthetic
atcgacgagctccagagtcgacttcttgtgcaaactgtg

SEQ ID NO: 4304 - DNA, 43 bp, Artificial Sequence
  Synthetic
tgagttagtgtctacctgtgtaagaggcaaaacggagactgtt

SEQ ID NO: 4305 - DNA, 49 bp, Artificial Sequence
  Synthetic
gcagctgattgatgttctaccaatataatttcatgatgggagaatttcc

SEQ ID NO: 4306 - DNA, 40 bp, Artificial Sequence
  Synthetic
tcggtgtcggtggtcccaccctagctctacaaggccaacc

SEQ ID NO: 4307 - DNA, 40 bp, Artificial Sequence
  Synthetic
ggatcccgagcttcttcttgtatagaacggttgcgagaac

SEQ ID NO: 4308 - DNA, 43 bp, Artificial Sequence
  Synthetic
ggtgtagatggtgtcaatggtctatgggcataggtactggcaa

SEQ ID NO: 4309 - DNA, 46 bp, Artificial Sequence
  Synthetic
actacagtaggtgtactttctggtaccatcagttgttagtacctct

SEQ ID NO: 4310 - DNA, 46 bp, Artificial Sequence
  Synthetic
cttgtttttggtgggttaatagagctatagggggacaatatgagga

SEQ ID NO: 4311 - DNA, 48 bp, Artificial Sequence
  Synthetic
gtttgtttgggatcaaaagacacattaacaaatacatgagcaaacagt

SEQ ID NO: 4312 - DNA, 47 bp, Artificial Sequence
  Synthetic
ggccatttgcaagtactgtgaatatgtcaattttgtaaagtttcagg

SEQ ID NO: 4313 - DNA, 50 bp, Artificial Sequence
  Synthetic
agcgtttacctaaagaaaactgtgatccttatgccagatataatttttgg

SEQ ID NO: 4314 - DNA, 46 bp, Artificial Sequence
  Synthetic
tcataggtaaacaggggtgcgcaactatatctactgactcatttgg

SEQ ID NO: 4315 - DNA, 45 bp, Artificial Sequence
  Synthetic
cctcttgttaaaacttgacctacctcgccaaaaggaagtaaagac

SEQ ID NO: 4316 - DNA, 46 bp, Artificial Sequence
  Synthetic
cccatcagtttccatctgttcataacgagtgacatcaaaatcatgg

SEQ ID NO: 4317 - DNA, 43 bp, Artificial Sequence
  Synthetic
ccctctcaatatcaatgcagatcttgagagaaagtcggaaccc

SEQ ID NO: 4318 - DNA, 43 bp, Artificial Sequence
  Synthetic
ccctctgatgaagcttaacaatcttgagtcagctggtgtggat

SEQ ID NO: 4319 - DNA, 42 bp, Artificial Sequence
  Synthetic
ccagtgaatgctgccatgatcgttttctgtacaaagaaacct

SEQ ID NO: 4320 - DNA, 39 bp, Artificial Sequence
  Synthetic
aagccatgggtacactgtcctttcaaccgaaaacggtac

SEQ ID NO: 4321 - DNA, 46 bp, Artificial Sequence
  Synthetic
aggtcaatttcagtttgcggtacacggtaaagtaacaactattcca

SEQ ID NO: 4322 - DNA, 41 bp, Artificial Sequence
  Synthetic
gcagcgtctgtgtatctgcatatgacagggagacagctcag

SEQ ID NO: 4323 - DNA, 43 bp, Artificial Sequence
  Synthetic
gcctatatccatatcactgtctgctgatggaggctcacagact

SEQ ID NO: 4324 - DNA, 43 bp, Artificial Sequence
  Synthetic
cgtcattatcaaatgcccattgcaatacagcacagttttcagg

SEQ ID NO: 4325 - DNA, 50 bp, Artificial Sequence
  Synthetic
gaagtcgaccccttgatatcttaaacacacatatgtagtaaagtagatga

SEQ ID NO: 4326 - DNA, 45 bp, Artificial Sequence
  Synthetic
cccatatgcacttcccatgtgattatacagactttaatgacgagg

SEQ ID NO: 4327 - DNA, 43 bp, Artificial Sequence
  Synthetic
gcaaagcaaaaacacaaaactaacatattttgctgctacgcct

SEQ ID NO: 4328 - DNA, 47 bp, Artificial Sequence
  Synthetic
gccctacacaaagcaaaagtgtaatatgctgtgtggttaataaacac

SEQ ID NO: 4329 - DNA, 42 bp, Artificial Sequence
  Synthetic
cctcaataactgggggttcaacaaggctctgtccatgttagt

SEQ ID NO: 4330 - DNA, 42 bp, Artificial Sequence
  Synthetic
gtcaggatcaggtgccacactggataatccagtctttgagga

SEQ ID NO: 4331 - DNA, 47 bp, Artificial Sequence
  Synthetic
gcctacgccttaaaaagtatacaggcacatgatgtggttatacatgg

SEQ ID NO: 4332 - DNA, 43 bp, Artificial Sequence
  Synthetic
catctgttttggaattaccagccttctcacgtttgcttgctgt

SEQ ID NO: 4333 - DNA, 41 bp, Artificial Sequence
  Synthetic
tttgtgttcctagtggtgtccaacagggacacaataatggc

SEQ ID NO: 4334 - DNA, 45 bp, Artificial Sequence
  Synthetic
ctaagcttgtggcagctgggcatactatgaactccactttacttg

SEQ ID NO: 4335 - DNA, 41 bp, Artificial Sequence
  Synthetic
tgcgtttggctgatggtgtaactactactaaaaaacgctcg

SEQ ID NO: 4336 - DNA, 39 bp, Artificial Sequence
  Synthetic
aaaagggtggaggacatagggggttgtgtccctaggcat

SEQ ID NO: 4337 - DNA, 42 bp, Artificial Sequence
  Synthetic
ccaacagcagtaaagtatgctgatgtaagacgcctcgcctta

SEQ ID NO: 4338 - DNA, 47 bp, Artificial Sequence
  Synthetic
cctcaggattgggaaaaaacatttcatatcggtgcatatataagtgc

SEQ ID NO: 4339 - DNA, 42 bp, Artificial Sequence
  Synthetic
actcgtaacatgtaaggtcagtctaagtgtgcaggacattgt

SEQ ID NO: 4340 - DNA, 41 bp, Artificial Sequence
  Synthetic
cccaattacctgaatcagccatcaaaattgtgtgccccaac

SEQ ID NO: 4341 - DNA, 47 bp, Artificial Sequence
  Synthetic
tgagataggtcaaattgacagtcctgtacccgaatggattaaaagac

SEQ ID NO: 4342 - DNA, 40 bp, Artificial Sequence
  Synthetic
tgtccagcatgcaggtgttgagtcatttttggttatcgcc

SEQ ID NO: 4343 - DNA, 48 bp, Artificial Sequence
  Synthetic
tgccttccagttttcattagtaagtaaagtgtttacgttttcaaatcc

SEQ ID NO: 4344 - DNA, 41 bp, Artificial Sequence
  Synthetic
tcgtgatactgcaaggcttggacataaggcacgtgaaatgg

SEQ ID NO: 4345 - DNA, 44 bp, Artificial Sequence
  Synthetic
attgccctcaacctttggaatttacaaaacatgtaagcaaagtg

SEQ ID NO: 4346 - DNA, 45 bp, Artificial Sequence
  Synthetic
ggcactatggaggtaggaccgattcttctatagtttcattagtgg

SEQ ID NO: 4347 - DNA, 45 bp, Artificial Sequence
  Synthetic
aagcaggcctatgtaactttacaatagaatttcagcacagtgact

SEQ ID NO: 4348 - DNA, 47 bp, Artificial Sequence
  Synthetic
gccacatctgcaaaaaaatatgacatatgggtccgattttatattgc

SEQ ID NO: 4349 - DNA, 47 bp, Artificial Sequence
  Synthetic
gtaccccaatgttcccctaagggtcagtagattataaacaaacacag

SEQ ID NO: 4350 - DNA, 43 bp, Artificial Sequence
  Synthetic
gccctgttaaataggtgtctaacaagcagatccctatggcgat

SEQ ID NO: 4351 - DNA, 41 bp, Artificial Sequence
  Synthetic
aagcggtcgcagaataactttataatagccactgtgtctcc

SEQ ID NO: 4352 - DNA, 46 bp, Artificial Sequence
  Synthetic
tccattattgtgtcaacctgctctaaaagtgatcagatttgcattg

SEQ ID NO: 4353 - DNA, 39 bp, Artificial Sequence
  Synthetic
gaggtcattggctggactggacgaattcatcaatgtgcc

SEQ ID NO: 4354 - DNA, 45 bp, Artificial Sequence
  Synthetic
gtgaatcccccacagtactaaaagaacccaacaataaagaggagc

SEQ ID NO: 4355 - DNA, 46 bp, Artificial Sequence
  Synthetic
ccctttcttgacaattttgtatgcagaatgatgccatcaatttcga

SEQ ID NO: 4356 - DNA, 50 bp, Artificial Sequence
  Synthetic
catcctccctctataaaacctgctagagagagagaagaagaaaaaagaga

SEQ ID NO: 4357 - DNA, 50 bp, Artificial Sequence
  Synthetic
aagttcagcattataagtccagacaaaggaggatagagaatttaaacaag

SEQ ID NO: 4358 - DNA, 43 bp, Artificial Sequence
  Synthetic
cccattgattccaattttactccacaacgtatgactacccgca

SEQ ID NO: 4359 - DNA, 47 bp, Artificial Sequence
  Synthetic
catcagtctccatctgttcgtaagactgagtgacatcaaaatcatgg

SEQ ID NO: 4360 - DNA, 48 bp, Artificial Sequence
  Synthetic
ctcttctgtatataggtcctccagtaataaatacctggaagaacatcc

SEQ ID NO: 4361 - DNA, 42 bp, Artificial Sequence
  Synthetic
aattccatcaccattgttccaactctccctaggaggtctgga

SEQ ID NO: 4362 - DNA, 43 bp, Artificial Sequence
  Synthetic
ccctttgatgaagctcaatactcttgagtcaactggtgtggat

SEQ ID NO: 4363 - DNA, 50 bp, Artificial Sequence
  Synthetic
ctcctcggttactaattcatcacatctattggagatgtaaagttagaact

SEQ ID NO: 4364 - DNA, 42 bp, Artificial Sequence
  Synthetic
gttgcagtcttgggctcaaataaagtactttagtcctagccc

SEQ ID NO: 4365 - DNA, 43 bp, Artificial Sequence
  Synthetic
acatcattactgtaacgcccgtcaacattactgcaaccacatt

SEQ ID NO: 4366 - DNA, 48 bp, Artificial Sequence
  Synthetic
cccatctactagtggttgcaaccaataaaatatacccaaggtaaggtg

SEQ ID NO: 4367 - DNA, 44 bp, Artificial Sequence
  Synthetic
ccatctgagctgtcgtctggctttttttagtaaactgtggaagc

SEQ ID NO: 4368 - DNA, 48 bp, Artificial Sequence
  Synthetic
actgcattgtcctcattatttccattcgcatacatttaaaaaacaagg

SEQ ID NO: 4369 - DNA, 42 bp, Artificial Sequence
  Synthetic
gtgtctattaggcagtcgatgtccggggatccgagtctccta

SEQ ID NO: 4370 - DNA, 47 bp, Artificial Sequence
  Synthetic
ggccatataccgatatgtaagaaggacctcctacatctactcctaag

SEQ ID NO: 4371 - DNA, 39 bp, Artificial Sequence
  Synthetic
agccatcaacaatagaggccatggctcagttgaattgca

SEQ ID NO: 4372 - DNA, 42 bp, Artificial Sequence
  Synthetic
accatccacaacaataggaggttacatcctgttattcctggc

SEQ ID NO: 4373 - DNA, 41 bp, Artificial Sequence
  Synthetic
caaccaacaacaaacaactgtgtggtgctaaggacgctaga

SEQ ID NO: 4374 - DNA, 47 bp, Artificial Sequence
  Synthetic
gcaaaatataaagagggagccagcgtttgagggtaatggtaaaaagt

SEQ ID NO: 4375 - DNA, 47 bp, Artificial Sequence
  Synthetic
ccttttccttaggaggctctgccttacagatatattgattctcttgc

SEQ ID NO: 4376 - DNA, 43 bp, Artificial Sequence
  Synthetic
gaacatacctgctggcaaaattggtattgcttttggaggcacc

SEQ ID NO: 4377 - DNA, 41 bp, Artificial Sequence
  Synthetic
gtccgtctctctgttttggcccttgaagcagtagtccttct

SEQ ID NO: 4378 - DNA, 49 bp, Artificial Sequence
  Synthetic
ttagcagaaatggttcaatggtgtcatatctataagcaataattggctc

SEQ ID NO: 4379 - DNA, 41 bp, Artificial Sequence
  Synthetic
cttgttggctgttcatggatacttccaaacatacaggggtg

SEQ ID NO: 4380 - DNA, 43 bp, Artificial Sequence
  Synthetic
ggtttgcaaccccttcctagaaatgtatagcttctttggactt

SEQ ID NO: 4381 - DNA, 37 bp, Artificial Sequence
  Synthetic
ctcccacccaggcggcataccggtggtgctactagcg

SEQ ID NO: 4382 - DNA, 41 bp, Artificial Sequence
  Synthetic
ctgctggagaagtgggaagcggcttcagcttcaagtcttgc

SEQ ID NO: 4383 - DNA, 48 bp, Artificial Sequence
  Synthetic
aaagcagtttctaagtagtgtgtctttataatgagtccaaatgtccat

SEQ ID NO: 4384 - DNA, 42 bp, Artificial Sequence
  Synthetic
aagaatcaggtcctagcactagcataaaattggcgggctctg

SEQ ID NO: 4385 - DNA, 47 bp, Artificial Sequence
  Synthetic
cggacattaagtagaccaacattcatcctagcctacttaatcgaatt

SEQ ID NO: 4386 - DNA, 47 bp, Artificial Sequence
  Synthetic
agatgcattagctgagtctgctgtcaaaagactcattatatggatct

SEQ ID NO: 4387 - DNA, 46 bp, Artificial Sequence
  Synthetic
ttgttcaataaatatgctgacgtggtgtaatcctcatcctgttgag

SEQ ID NO: 4388 - DNA, 46 bp, Artificial Sequence
  Synthetic
ttgctccctacacgtattttccagcagccaatatggtctattaaat

SEQ ID NO: 4389 - DNA, 44 bp, Artificial Sequence
  Synthetic
ctatggatctgtctgaaagactgtcccgtaacataccggtttga

SEQ ID NO: 4390 - DNA, 38 bp, Artificial Sequence
  Synthetic
gctgtggacagtgtggtcagtttggcgcctttttagca

SEQ ID NO: 4391 - DNA, 47 bp, Artificial Sequence
  Synthetic
actgaaaaatgagaggtaatgctccaggcagtactaattcttcaaga

SEQ ID NO: 4392 - DNA, 45 bp, Artificial Sequence
  Synthetic
atcctgtgcaagaaaccgtggctacttgtaccttctaaactatca

SEQ ID NO: 4393 - DNA, 44 bp, Artificial Sequence
  Synthetic
ctaaaagtccagaagttgcagttgagagcttattttcacagcct

SEQ ID NO: 4394 - DNA, 43 bp, Artificial Sequence
  Synthetic
acctaaaacatccagaaggagatggcagttcctgcagtgcatc

SEQ ID NO: 4395 - DNA, 42 bp, Artificial Sequence
  Synthetic
aggagagtcctgctaggagacgtgtctcaggtgatgttgtgg

SEQ ID NO: 4396 - DNA, 43 bp, Artificial Sequence
  Synthetic
gcttgggatccgccaataattccgatatctccagcatttaagc

SEQ ID NO: 4397 - DNA, 41 bp, Artificial Sequence
  Synthetic
gacccacaattcctgttgacactgaatgactgcagagccag

SEQ ID NO: 4398 - DNA, 42 bp, Artificial Sequence
  Synthetic
ttagcaatgcagaagaaggtgtagtgctaaacgtttcggtgg

SEQ ID NO: 4399 - DNA, 43 bp, Artificial Sequence
  Synthetic
ctgaatttgaaattgaagcccctccatctctgaagcgggtgac

SEQ ID NO: 4400 - DNA, 44 bp, Artificial Sequence
  Synthetic
taggacgtcctagatacagtgaaaccgagtttgcattgttccac

SEQ ID NO: 4401 - DNA, 44 bp, Artificial Sequence
  Synthetic
cgcaaacgaaaacgaatagctatcagatacagtttaccagttgg

SEQ ID NO: 4402 - DNA, 40 bp, Artificial Sequence
  Synthetic
agttcctcatgtctcaggaagtgcgattcggatctggtag

SEQ ID NO: 4403 - DNA, 45 bp, Artificial Sequence
  Synthetic
acccaactatttattgtaggctgtgacaaggctttgctatatccc

SEQ ID NO: 4404 - DNA, 42 bp, Artificial Sequence
  Synthetic
tagtggttctctagtttccagtgattgttagtcccctgagca

SEQ ID NO: 4405 - DNA, 41 bp, Artificial Sequence
  Synthetic
tagtggtctgcggaaccggtgcgggcatagagtgggttgat

SEQ ID NO: 4406 - DNA, 38 bp, Artificial Sequence
  Synthetic
ggccctagattgggtgtgcgtttggggatacgttggcg

SEQ ID NO: 4407 - DNA, 39 bp, Artificial Sequence
  Synthetic
ccagggctctggcacatggtccctgttgcatagttgacc

SEQ ID NO: 4408 - DNA, 38 bp, Artificial Sequence
  Synthetic
ccactttggcggtccgctataggtcaatatgcgtccgc

SEQ ID NO: 4409 - DNA, 37 bp, Artificial Sequence
  Synthetic
ttgccgcttacgctgtgagaaacacaccccagtggcc

SEQ ID NO: 4410 - DNA, 40 bp, Artificial Sequence
  Synthetic
cagtgactttgaccaggggtggaatagggtcgctggtccg

SEQ ID NO: 4411 - DNA, 41 bp, Artificial Sequence
  Synthetic
cccagggtgcccagagtaacacggatgtttcctgaagcagt

SEQ ID NO: 4412 - DNA, 42 bp, Artificial Sequence
  Synthetic
tgctccattccactacggagctgtagataaggccggaagcgg

SEQ ID NO: 4413 - DNA, 41 bp, Artificial Sequence
  Synthetic
gggaacccatggtatctggtggctgcctcgtagatgccaag

SEQ ID NO: 4414 - DNA, 38 bp, Artificial Sequence
  Synthetic
tccctcctctcaaccctcggtagcacagcagcacacac

SEQ ID NO: 4415 - DNA, 39 bp, Artificial Sequence
  Synthetic
cgttgcagtcgagcccgtgatatgtcgccacaagcagtg

SEQ ID NO: 4416 - DNA, 38 bp, Artificial Sequence
  Synthetic
tccacctcaacgcagaccttccgtgcccgctccgtgat

SEQ ID NO: 4417 - DNA, 39 bp, Artificial Sequence
  Synthetic
gcccccaaagtcattgcgttgctgctttggctacaccgc

SEQ ID NO: 4418 - DNA, 38 bp, Artificial Sequence
  Synthetic
accacgggggctcccataacacctgaacaacccccgtc

SEQ ID NO: 4419 - DNA, 42 bp, Artificial Sequence
  Synthetic
aaatgtgatgagcttgccgggacccctatagtaagcaacggc

SEQ ID NO: 4420 - DNA, 39 bp, Artificial Sequence
  Synthetic
gctctcagagacgtgggaggacgccactggacacgtatc

SEQ ID NO: 4421 - DNA, 40 bp, Artificial Sequence
  Synthetic
tggaagagtgctccaaagctcctgaacattccgccgatgg

SEQ ID NO: 4422 - DNA, 40 bp, Artificial Sequence
  Synthetic
agtcaacatcctgggtgggtggccgagaccacgaaagtcg

SEQ ID NO: 4423 - DNA, 39 bp, Artificial Sequence
  Synthetic
ggcataccggcactagtgaggatttccacgggaggcgaa

SEQ ID NO: 4424 - DNA, 42 bp, Artificial Sequence
  Synthetic
ggcatcatgaacaccaagtgcccgcatcgatccgttcttgac

SEQ ID NO: 4425 - DNA, 40 bp, Artificial Sequence
  Synthetic
tccttcccccgaattcttcagctgggttcaggggcgaatc

SEQ ID NO: 4426 - DNA, 35 bp, Artificial Sequence
  Synthetic
tccaccacccaggcggaaggtgccgtggaaaccgc

SEQ ID NO: 4427 - DNA, 42 bp, Artificial Sequence
  Synthetic
ctacaggacatgaccaccccgaggcaggatttacgcagaaga

SEQ ID NO: 4428 - DNA, 42 bp, Artificial Sequence
  Synthetic
tatcagtgctgcaacctcgaccccacgtacaacctctcggta

SEQ ID NO: 4429 - DNA, 41 bp, Artificial Sequence
  Synthetic
cgagagcaagggagtcgaacgggagtacctggtcattgccg

SEQ ID NO: 4430 - DNA, 37 bp, Artificial Sequence
  Synthetic
ctggccggctcgatctttcgtgatccacgtccgcctc

SEQ ID NO: 4431 - DNA, 45 bp, Artificial Sequence
  Synthetic
aagaatgaacatcttcccctaatgttaagcacctcataacgatgt

SEQ ID NO: 4432 - DNA, 42 bp, Artificial Sequence
  Synthetic
tcttgggagtggagtcaatgaacttcttcaaccatttccatt

SEQ ID NO: 4433 - DNA, 45 bp, Artificial Sequence
  Synthetic
cgtgattagaacacacgagtactccacatcctgtaacatcagaaa

SEQ ID NO: 4434 - DNA, 42 bp, Artificial Sequence
  Synthetic
gacaaattgactcaggggagacatattgttgtgttcagtgcc

SEQ ID NO: 4435 - DNA, 41 bp, Artificial Sequence
  Synthetic
agaaggccaaactatcaaatgcatactgatccctcctggtg

SEQ ID NO: 4436 - DNA, 43 bp, Artificial Sequence
  Synthetic
gcacaaacagccatacaattattcaatctcccctgtggcattt

SEQ ID NO: 4437 - DNA, 46 bp, Artificial Sequence
  Synthetic
acaacataatggaccctgagtacacaaatgtcctacaaagggattt

SEQ ID NO: 4438 - DNA, 41 bp, Artificial Sequence
  Synthetic
tttgaggcttgctttaacagtgcgtgggccatagcttcaag

SEQ ID NO: 4439 - DNA, 43 bp, Artificial Sequence
  Synthetic
attggataccatgccaataattccacacagtgacattccgctc

SEQ ID NO: 4440 - DNA, 38 bp, Artificial Sequence
  Synthetic
ttgtgttacccaggcagcttatgtttcacgctgctgag

SEQ ID NO: 4441 - DNA, 45 bp, Artificial Sequence
  Synthetic
aaatgctaataatttggggagtgcatctggtacaatgctctttgt

SEQ ID NO: 4442 - DNA, 47 bp, Artificial Sequence
  Synthetic
catgaagacagaaggaacacttgagtgtatttattgctcccaaagga

SEQ ID NO: 4443 - DNA, 41 bp, Artificial Sequence
  Synthetic
aggaatggttgatggttggtatgctgctgcataccctgatc

SEQ ID NO: 4444 - DNA, 46 bp, Artificial Sequence
  Synthetic
gactgatgatcacagacatgagacctgtgtgttatgatgtctctgg

SEQ ID NO: 4445 - DNA, 43 bp, Artificial Sequence
  Synthetic
acactcaacaaagatcaacttctgtactatctcctgtgctccg

SEQ ID NO: 4446 - DNA, 44 bp, Artificial Sequence
  Synthetic
gccaacagcttctatgaagtgttgtgctataccaaaatgaacaa

SEQ ID NO: 4447 - DNA, 43 bp, Artificial Sequence
  Synthetic
acagaggtacaccaaggaatcaattgagttgttcagcatatgc

SEQ ID NO: 4448 - DNA, 45 bp, Artificial Sequence
  Synthetic
atcagaactgaagcattaatgaccattcactttcctcattcctga

SEQ ID NO: 4449 - DNA, 40 bp, Artificial Sequence
  Synthetic
caactcacccatccaaccaaactttttccgggtggctagt

SEQ ID NO: 4450 - DNA, 41 bp, Artificial Sequence
  Synthetic
aaactcaagaagtgcagtgctagaaggacacattggcacat

SEQ ID NO: 4451 - DNA, 50 bp, Artificial Sequence
  Synthetic
tactgttagtcatcacagtgactgactactataaattgactttgtggctt

SEQ ID NO: 4452 - DNA, 48 bp, Artificial Sequence
  Synthetic
atccacatggggcaaataatcatttgtctatgttgacagatattgtga

SEQ ID NO: 4453 - DNA, 46 bp, Artificial Sequence
  Synthetic
gcacaaatcacattatccattctggatgaatatgatggctgcaatt

SEQ ID NO: 4454 - DNA, 43 bp, Artificial Sequence
  Synthetic
agcatatgcagcaacaatccaatccaggttttttgtttggtat

SEQ ID NO: 4455 - DNA, 40 bp, Artificial Sequence
  Synthetic
ccctccactcaacctcctcctgtgataggtactcggatgt

SEQ ID NO: 4456 - DNA, 39 bp, Artificial Sequence
  Synthetic
caatccttgctgcagtcacacgcactgcatgttgtttga

SEQ ID NO: 4457 - DNA, 45 bp, Artificial Sequence
  Synthetic
agtgtcttaaccagcaaagtgtttcacaataggtaacaactgttt

SEQ ID NO: 4458 - DNA, 44 bp, Artificial Sequence
  Synthetic
tcttcccactagctgaaacatgtaactgttcattgtgtcacaaa

SEQ ID NO: 4459 - DNA, 47 bp, Artificial Sequence
  Synthetic
gcacctaatcatgttcttacaatggaaatccaatgatagatgggttg

SEQ ID NO: 4460 - DNA, 40 bp, Artificial Sequence
  Synthetic
gccatgagcaaactcctcactcttcattgtccctcagttt

SEQ ID NO: 4461 - DNA, 46 bp, Artificial Sequence
  Synthetic
tgtaggtagaatgtttgcaatgcacagctatcattttctctgctaa

SEQ ID NO: 4462 - DNA, 45 bp, Artificial Sequence
  Synthetic
gaacctacatatcctcacgggcttctctgctttataaaagggtaa

SEQ ID NO: 4463 - DNA, 49 bp, Artificial Sequence
  Synthetic
tacagtcagtagtagaccatgtgaaggctagtatcaaagtgataatttg

SEQ ID NO: 4464 - DNA, 38 bp, Artificial Sequence
  Synthetic
cctcccgggagagccatagtgtcgtcctggcaattccg

SEQ ID NO: 4465 - DNA, 42 bp, Artificial Sequence
  Synthetic
caggggccctagattgggtgtgtggggataggctgacgtcta

SEQ ID NO: 4466 - DNA, 39 bp, Artificial Sequence
  Synthetic
cgcatggcgtccgggttctagaaagagcaaccaggaagg

SEQ ID NO: 4467 - DNA, 36 bp, Artificial Sequence
  Synthetic
ggtgttgggtggcggtgatgcgttgtggggagtttg

SEQ ID NO: 4468 - DNA, 42 bp, Artificial Sequence
  Synthetic
tcatggacatgatcgctggtgcccaccatggagaaatacgct

SEQ ID NO: 4469 - DNA, 41 bp, Artificial Sequence
  Synthetic
tcagttatgccaacggaagcgggtcttggagggtagtgcca

SEQ ID NO: 4470 - DNA, 39 bp, Artificial Sequence
  Synthetic
gcccccttgtgtcatcggaggaagcaatcagtggggcag

SEQ ID NO: 4471 - DNA, 39 bp, Artificial Sequence
  Synthetic
agcccgttgctgctgtccagcagggtcgtgaaagaacac

SEQ ID NO: 4472 - DNA, 40 bp, Artificial Sequence
  Synthetic
cctcgtgttcttctgctttgcggaggccacatcccgtaga

SEQ ID NO: 4473 - DNA, 39 bp, Artificial Sequence
  Synthetic
aaagtcccctacttcgtgcgccggctatcttccgcgcta

SEQ ID NO: 4474 - DNA, 42 bp, Artificial Sequence
  Synthetic
ggagaccaagctcatcacgtggaagccgttgatgatgtcacc

SEQ ID NO: 4475 - DNA, 41 bp, Artificial Sequence
  Synthetic
ggaacgaggaccatcgcatcacacaaggtcttggtccacat

SEQ ID NO: 4476 - DNA, 41 bp, Artificial Sequence
  Synthetic
tccctgtggagaacctagggacggtggagaggagttgtccg

SEQ ID NO: 4477 - DNA, 39 bp, Artificial Sequence
  Synthetic
cgggtgctcaggaggtgcttaatgtggcatccgtggagt

SEQ ID NO: 4478 - DNA, 39 bp, Artificial Sequence
  Synthetic
gaagctggtcgcattgggcagacagacacgtcaagaccg

SEQ ID NO: 4479 - DNA, 41 bp, Artificial Sequence
  Synthetic
tctgtgagtgctatgacgcgggtaactgtagtctcggcggg

SEQ ID NO: 4480 - DNA, 38 bp, Artificial Sequence
  Synthetic
tgaagtcaccctgacgcacccggtgctcgtgacgacct

SEQ ID NO: 4481 - DNA, 41 bp, Artificial Sequence
  Synthetic
gtcccgccatgcagaggttatagacctcgagtttctgccag

SEQ ID NO: 4482 - DNA, 37 bp, Artificial Sequence
  Synthetic
tgtgggtgctggcctagctcacgaggaccttccccag

SEQ ID NO: 4483 - DNA, 36 bp, Artificial Sequence
  Synthetic
cgcccgcgtcactgccatatgcagtcgcctcaggag

SEQ ID NO: 4484 - DNA, 41 bp, Artificial Sequence
  Synthetic
ctgcaggaacatgtggagtgggcaggaaggggagtacaggg

SEQ ID NO: 4485 - DNA, 41 bp, Artificial Sequence
  Synthetic
gcaattaccttgcgagcccgaagggatcagtgagcatggac

SEQ ID NO: 4486 - DNA, 40 bp, Artificial Sequence
  Synthetic
tgtggcagaggaggatgagcggcgaatctccgagacttcc

SEQ ID NO: 4487 - DNA, 42 bp, Artificial Sequence
  Synthetic
acgacaacatcctctgagcccgggggcatggaagaataggac

SEQ ID NO: 4488 - DNA, 40 bp, Artificial Sequence
  Synthetic
agactgcaagttctggacagccttttgacgccgctgcttt

SEQ ID NO: 4489 - DNA, 38 bp, Artificial Sequence
  Synthetic
gcgtgtgcgagaagatggccaggagcttcccatcacgg

SEQ ID NO: 4490 - DNA, 41 bp, Artificial Sequence
  Synthetic
ttcaaggggggaaaactgcggcagctagttgtcagtacgcc

SEQ ID NO: 4491 - DNA, 40 bp, Artificial Sequence
  Synthetic
cgcgtgggagacagcaagactgtgggggcaaacatgatta

SEQ ID NO: 4492 - DNA, 40 bp, Artificial Sequence
  Synthetic
tgcctcagaaaacttggggtcctggacagaagcctagcgc

SEQ ID NO: 4493 - DNA, 45 bp, Artificial Sequence
  Synthetic
agatccgaaaatcgaaacgaacacatgaaacagacttctaagtgc

SEQ ID NO: 4494 - DNA, 46 bp, Artificial Sequence
  Synthetic
gtatgactacaaggagaaccgattttagtatgtgtgaacttccctc

SEQ ID NO: 4495 - DNA, 43 bp, Artificial Sequence
  Synthetic
aagaacatgaggaaaacaagccactactttctctggtgccata

SEQ ID NO: 4496 - DNA, 47 bp, Artificial Sequence
  Synthetic
atgagaaggaactatttcacagcgcccttcattatgtattcagtagc

SEQ ID NO: 4497 - DNA, 39 bp, Artificial Sequence
  Synthetic
tggagccacacagatgggaagtccgtaagagcatgtctc

SEQ ID NO: 4498 - DNA, 41 bp, Artificial Sequence
  Synthetic
aatcagaaacatggccaattggaaaggttctgcacaccttc

SEQ ID NO: 4499 - DNA, 43 bp, Artificial Sequence
  Synthetic
tttgcatcagaatagaccaggcatcacactgaaattcgctttc

SEQ ID NO: 4500 - DNA, 42 bp, Artificial Sequence
  Synthetic
agaagcagtaatgagaatgggagagttctcgccattttccgt

SEQ ID NO: 4501 - DNA, 38 bp, Artificial Sequence
  Synthetic
agccgcgtactctagctgatgcacaaggaagttgcaaa

SEQ ID NO: 4502 - DNA, 42 bp, Artificial Sequence
  Synthetic
gcagggagcaattagaagactccttgtttgtcaggttgtgtt

SEQ ID NO: 4503 - DNA, 42 bp, Artificial Sequence
  Synthetic
aattgtagaacgtaaaacaggggacactgtcctccacatcct

SEQ ID NO: 4504 - DNA, 42 bp, Artificial Sequence
  Synthetic
ggggctatatccctaggacggcttgggccttatcaaacagcc

SEQ ID NO: 4505 - DNA, 46 bp, Artificial Sequence
  Synthetic
tgtgctttgatagaaaacatcgagcgcatttatgttggaggtcact

SEQ ID NO: 4506 - DNA, 44 bp, Artificial Sequence
  Synthetic
ccaggaaaggcttctagacctccaatgttctatttggtcctcta

SEQ ID NO: 4507 - DNA, 42 bp, Artificial Sequence
  Synthetic
cgtggacattacaggacacatgctactgtttgtccacgtctt

SEQ ID NO: 4508 - DNA, 44 bp, Artificial Sequence
  Synthetic
aaaaggaagcatctaagtatggggagaaaaaatgatgctgctgc

SEQ ID NO: 4509 - DNA, 42 bp, Artificial Sequence
  Synthetic
agatgttaccctacactttgagcatgtccataaaggcgggat

SEQ ID NO: 4510 - DNA, 47 bp, Artificial Sequence
  Synthetic
atttccacaaacacccattgctataagtataactaggatgcaggtaa

SEQ ID NO: 4511 - DNA, 43 bp, Artificial Sequence
  Synthetic
atcctgattaccttaaaatggctgcacatttgttcccgcctta

SEQ ID NO: 4512 - DNA, 43 bp, Artificial Sequence
  Synthetic
cccagggtcaaaacaatggtattgggtggtatctacaactgtt

SEQ ID NO: 4513 - DNA, 40 bp, Artificial Sequence
  Synthetic
ccccagctacaagtagtttggattgacatgcaatggcctg

SEQ ID NO: 4514 - DNA, 36 bp, Artificial Sequence
  Synthetic
actacgtccgccgtctaggtgagcgccggacaaagg

SEQ ID NO: 4515 - DNA, 35 bp, Artificial Sequence
  Synthetic
cgggattcgagcgccccttagggctagcgctacgg

SEQ ID NO: 4516 - DNA, 39 bp, Artificial Sequence
  Synthetic
cgccgtcatcctccacccaaacatagggaggggggattt

SEQ ID NO: 4517 - DNA, 41 bp, Artificial Sequence
  Synthetic
aagacctccaagacctcctgcatgctggtgatggagggaag

SEQ ID NO: 4518 - DNA, 40 bp, Artificial Sequence
  Synthetic
ccttcctgggcctctatcctccgaggcgttctacgaaggc

SEQ ID NO: 4519 - DNA, 38 bp, Artificial Sequence
  Synthetic
cttccggtgcgggaaagcagtgacatagggggcatggc

SEQ ID NO: 4520 - DNA, 39 bp, Artificial Sequence
  Synthetic
tacaggcgccagctgtccttggaactggctgatttcggg

SEQ ID NO: 4521 - DNA, 38 bp, Artificial Sequence
  Synthetic
gacctgcgggccactaactcaggctggacaagtcaggg

SEQ ID NO: 4522 - DNA, 40 bp, Artificial Sequence
  Synthetic
ctggcccatatcctgcagcctgccaggagaatgtcatcca

SEQ ID NO: 4523 - DNA, 42 bp, Artificial Sequence
  Synthetic
aggcatactgatccccgagacccgcagctgcactaatgattg

SEQ ID NO: 4524 - DNA, 40 bp, Artificial Sequence
  Synthetic
ggggcagctacttgcctcagtggtttggcagagtagtcca

SEQ ID NO: 4525 - DNA, 40 bp, Artificial Sequence
  Synthetic
acctgatcccatctccaggcttgcaggacaggggtgatta

SEQ ID NO: 4526 - DNA, 46 bp, Artificial Sequence
  Synthetic
gctattcgccatactacccatgtcatagggttttaagaatgccatt

SEQ ID NO: 4527 - DNA, 37 bp, Artificial Sequence
  Synthetic
agttctgcccagtggatcccgtccgacgggtcttggg

SEQ ID NO: 4528 - DNA, 39 bp, Artificial Sequence
  Synthetic
gttcatggaccctcgacctgcattagggcagggtggctg

SEQ ID NO: 4529 - DNA, 46 bp, Artificial Sequence
  Synthetic
cagcccctactggaaatttcagaatattgaggtgtgaaacttcttg

SEQ ID NO: 4530 - DNA, 35 bp, Artificial Sequence
  Synthetic
gagcagtaccggtggcggttcctgccagccactcc

SEQ ID NO: 4531 - DNA, 40 bp, Artificial Sequence
  Synthetic
atcctccttctcctgcagcaacttggaaggcgaggtggag

SEQ ID NO: 4532 - DNA, 38 bp, Artificial Sequence
  Synthetic
tcgcttcctcttctcctcagcctccaggggggaaagcg

SEQ ID NO: 4533 - DNA, 41 bp, Artificial Sequence
  Synthetic
tatcagcccacttcccagggttccaaacacgtagactgggt

SEQ ID NO: 4534 - DNA, 42 bp, Artificial Sequence
  Synthetic
acccttaaggtccttaccccgcgaggaaggagggtggaatgt

SEQ ID NO: 4535 - DNA, 44 bp, Artificial Sequence
  Synthetic
tcaaaccaaggcctaccaccgagatgcaaattatgaaaggaaga

SEQ ID NO: 4536 - DNA, 41 bp, Artificial Sequence
  Synthetic
taagctcagacctccgggaagcacggcttgacaaacatggg

SEQ ID NO: 4537 - DNA, 37 bp, Artificial Sequence
  Synthetic
acgccggttgagtcgcgtcggacgtagttcaggaggc

SEQ ID NO: 4538 - DNA, 43 bp, Artificial Sequence
  Synthetic
agaagtacacatcagggagacagttcattgccatcatccattt

SEQ ID NO: 4539 - DNA, 45 bp, Artificial Sequence
  Synthetic
aagtcgaaaggttaaaacatggaacggcgtattttgacttggttt

SEQ ID NO: 4540 - DNA, 43 bp, Artificial Sequence
  Synthetic
tggttgcatacatgttagagagagattgttccaccagcaactg

SEQ ID NO: 4541 - DNA, 39 bp, Artificial Sequence
  Synthetic
attggagatgtgccacagcactgcctaagaatgtccacc

SEQ ID NO: 4542 - DNA, 43 bp, Artificial Sequence
  Synthetic
ggaaaagggcaacagctatactcattgactgttcgtctcttcc

SEQ ID NO: 4543 - DNA, 45 bp, Artificial Sequence
  Synthetic
aattggggaattgaacatatcgacacttggagtcatgtctggtaa

SEQ ID NO: 4544 - DNA, 40 bp, Artificial Sequence
  Synthetic
acaggggacagagaaactgactcagggccattaatctccc

SEQ ID NO: 4545 - DNA, 43 bp, Artificial Sequence
  Synthetic
tgtacttgggacatttgataccactctactttgctttggtggg

SEQ ID NO: 4546 - DNA, 39 bp, Artificial Sequence
  Synthetic
gtggagtccgctgttctgagtgatgcttaatgctggtcc

SEQ ID NO: 4547 - DNA, 40 bp, Artificial Sequence
  Synthetic
tatcagaatggaccaggcgattcacactgaagttcgcttt

SEQ ID NO: 4548 - DNA, 44 bp, Artificial Sequence
  Synthetic
aacacagttcgagtctctgaaactcccattctcattactgcttc

SEQ ID NO: 4549 - DNA, 42 bp, Artificial Sequence
  Synthetic
acaggaacaggatacaccatggccactttcccttttctgagt

SEQ ID NO: 4550 - DNA, 39 bp, Artificial Sequence
  Synthetic
ctaactcaaggtcgccagacttatggtgttggccaatgc

SEQ ID NO: 4551 - DNA, 46 bp, Artificial Sequence
  Synthetic
agagcactgacattaaatacgatgacgatagcccttctttttaact

SEQ ID NO: 4552 - DNA, 41 bp, Artificial Sequence
  Synthetic
ctttcacaatcactggggacaaccatcgccaggaacattcg

SEQ ID NO: 4553 - DNA, 42 bp, Artificial Sequence
  Synthetic
gctagcaagcattgacctgaagaagaggccttattttctcaa

SEQ ID NO: 4554 - DNA, 43 bp, Artificial Sequence
  Synthetic
ctcatagtgaatgcaccaaaccaaggtcctgtagaatctgtcc

SEQ ID NO: 4555 - DNA, 42 bp, Artificial Sequence
  Synthetic
cccagatggctcttcaattgttctcccctatggcacctatat

SEQ ID NO: 4556 - DNA, 37 bp, Artificial Sequence
  Synthetic
gacggcctcgctgactggagaatcgtgtgcgcgaaag

SEQ ID NO: 4557 - DNA, 38 bp, Artificial Sequence
  Synthetic
tattgccacgcatccggatcactgggctggggtggttt

SEQ ID NO: 4558 - DNA, 35 bp, Artificial Sequence
  Synthetic
acgccgtccaacttcacgcgttcaccgcgtcgtgc

SEQ ID NO: 4559 - DNA, 42 bp, Artificial Sequence
  Synthetic
tccaataaacccatcccctcgcgacggattcctgaggctaca

SEQ ID NO: 4560 - DNA, 41 bp, Artificial Sequence
  Synthetic
gggacggaggagagacgatgcaggtcggaccatccacccat

SEQ ID NO: 4561 - DNA, 45 bp, Artificial Sequence
  Synthetic
atacaccacatcgttggataatacggacgcgttaatcgaactttc

SEQ ID NO: 4562 - DNA, 41 bp, Artificial Sequence
  Synthetic
cgttatcatctgctcccgctgccggccgctgaaaaaagagt

SEQ ID NO: 4563 - DNA, 40 bp, Artificial Sequence
  Synthetic
cggattccaagtcagagcggcgggtcggtccaggtcaacg

SEQ ID NO: 4564 - DNA, 39 bp, Artificial Sequence
  Synthetic
tcagccacgacgcgagtgacgttatagcgccgtctttcg

SEQ ID NO: 4565 - DNA, 39 bp, Artificial Sequence
  Synthetic
tctcatcaccgagaccgcgggccaggctgtgggtctcgt

SEQ ID NO: 4566 - DNA, 36 bp, Artificial Sequence
  Synthetic
cgcccgatccctccaggtttacgcggtgccgttcac

SEQ ID NO: 4567 - DNA, 38 bp, Artificial Sequence
  Synthetic
catcgggtagacggcgctagcggatccgtcagccagta

SEQ ID NO: 4568 - DNA, 37 bp, Artificial Sequence
  Synthetic
ggaggaaactgccgcgggatcttcctcagagacggcc

SEQ ID NO: 4569 - DNA, 39 bp, Artificial Sequence
  Synthetic
gcacgctgcatggctaaatacccatgacgcgttcgggac

SEQ ID NO: 4570 - DNA, 40 bp, Artificial Sequence
  Synthetic
gcatgaactgcccgtggtggtggagcctcggtttggatac

SEQ ID NO: 4571 - DNA, 36 bp, Artificial Sequence
  Synthetic
tgaggttgcgggccaggttctcggacgagggctatg

SEQ ID NO: 4572 - DNA, 36 bp, Artificial Sequence
  Synthetic
tctgagcgagtcccttgcgcgcagcggctcatcagg

SEQ ID NO: 4573 - DNA, 38 bp, Artificial Sequence
  Synthetic
cgcaagtaatgggtgcgcgatacgtggtgtgcacgttg

SEQ ID NO: 4574 - DNA, 37 bp, Artificial Sequence
  Synthetic
cgagagcccgtcgtgatagtcctacgcggcgacagct

SEQ ID NO: 4575 - DNA, 36 bp, Artificial Sequence
  Synthetic
acatgcgccctgggtctgatcgatgggtccgcttca

SEQ ID NO: 4576 - DNA, 37 bp, Artificial Sequence
  Synthetic
cgtgcgccacgccaagatagtacgactcgtaggccgt

SEQ ID NO: 4577 - DNA, 38 bp, Artificial Sequence
  Synthetic
caggcggtgcagatcggttttcaatgcgggcaggcgtg

SEQ ID NO: 4578 - DNA, 39 bp, Artificial Sequence
  Synthetic
cgggtacgacctgcgatttagcgacagttgagcgcgtcg

SEQ ID NO: 4579 - DNA, 39 bp, Artificial Sequence
  Synthetic
ccgctggtcggtttctgactggcggtgtttccagcattt

SEQ ID NO: 4580 - DNA, 39 bp, Artificial Sequence
  Synthetic
gcgctccacgatctcggcatgtgctagaccgtaccgaat

SEQ ID NO: 4581 - DNA, 38 bp, Artificial Sequence
  Synthetic
accaggacaaggtggtgagctgccgatttttcgccgca

SEQ ID NO: 4582 - DNA, 39 bp, Artificial Sequence
  Synthetic
ggccttggtggacttccaggcggataatctcctgggcca

SEQ ID NO: 4583 - DNA, 40 bp, Artificial Sequence
  Synthetic
agagggctcatccgactctgcccacgctgatgtcctcggg

SEQ ID NO: 4584 - DNA, 39 bp, Artificial Sequence
  Synthetic
caggggcgagtccgtcgtcacgacgccatcaccgagaac

SEQ ID NO: 4585 - DNA, 41 bp, Artificial Sequence
  Synthetic
tcgcgcatagtgtggaagtggtcgcccaccatgaaggattt

SEQ ID NO: 4586 - DNA, 39 bp, Artificial Sequence
  Synthetic
cccctccgtattcttgtcgcgtccaccagctggactacg

SEQ ID NO: 4587 - DNA, 38 bp, Artificial Sequence
  Synthetic
tgctgggcgccaggaaaaacttcatgacgcccaagtgg

SEQ ID NO: 4588 - DNA, 38 bp, Artificial Sequence
  Synthetic
acctgacggtgaaccacccaaatcgcccctcacgtcag

SEQ ID NO: 4589 - DNA, 39 bp, Artificial Sequence
  Synthetic
cggcagcagtacacgtcgagcgcgtacgccgtgtaccac

SEQ ID NO: 4590 - DNA, 38 bp, Artificial Sequence
  Synthetic
cgtcgggcacagacccatggcgaccgggatcacgacga

SEQ ID NO: 4591 - DNA, 37 bp, Artificial Sequence
  Synthetic
gcgtagttgcgcaggccctgtacctggtgtcgcggtc

SEQ ID NO: 4592 - DNA, 41 bp, Artificial Sequence
  Synthetic
cgtaattcaccacgggcacgcccgtgagtgttacttcccca

SEQ ID NO: 4593 - DNA, 37 bp, Artificial Sequence
  Synthetic
actgacagttgcgcaatccgatctccatcgccagcgc

SEQ ID NO: 4594 - DNA, 38 bp, Artificial Sequence
  Synthetic
gcgcgttgccccaaaccactttgatttgagcgtgctgc

SEQ ID NO: 4595 - DNA, 35 bp, Artificial Sequence
  Synthetic
acaagccccagcaaccggtacccaagctggccgag

SEQ ID NO: 4596 - DNA, 36 bp, Artificial Sequence
  Synthetic
aagctacagcgctcgcggcactggcagaccttggtc

SEQ ID NO: 4597 - DNA, 38 bp, Artificial Sequence
  Synthetic
gggccacgctgacggctttttacggtctggatctcgcg

SEQ ID NO: 4598 - DNA, 37 bp, Artificial Sequence
  Synthetic
cggcttgaacgagcgccttgtcgctgctgatctgacg

SEQ ID NO: 4599 - DNA, 34 bp, Artificial Sequence
  Synthetic
gcgctacgaacccgcacagcctggcttacgggga

SEQ ID NO: 4600 - DNA, 35 bp, Artificial Sequence
  Synthetic
tacgcgcacgccaaaccgcgcgccaacgagttgac

SEQ ID NO: 4601 - DNA, 36 bp, Artificial Sequence
  Synthetic
ggcttcggcgtgcagctgtcgccacatccagcatgt

SEQ ID NO: 4602 - DNA, 40 bp, Artificial Sequence
  Synthetic
gttggacgacaacgccaagcgcaactctagcattttggcg

SEQ ID NO: 4603 - DNA, 39 bp, Artificial Sequence
  Synthetic
gtgcagcagcgcctacagagcgtttcctcttcctcttcg

SEQ ID NO: 4604 - DNA, 40 bp, Artificial Sequence
  Synthetic
tcaaccaggacttgctgtcggccgttgatccgcccgtcta

SEQ ID NO: 4605 - DNA, 37 bp, Artificial Sequence
  Synthetic
tgaccacccccgacgccaaacagctcgcgaagtgtct

SEQ ID NO: 4606 - DNA, 37 bp, Artificial Sequence
  Synthetic
cggaagcaggacccactaccgtgcgctagcgtcacgg

SEQ ID NO: 4607 - DNA, 38 bp, Artificial Sequence
  Synthetic
caaacagctgtcgcggtactcgacttcgcacgggcacg

SEQ ID NO: 4608 - DNA, 36 bp, Artificial Sequence
  Synthetic
cgccacagcagagccagcactttgcgactctgggcc

SEQ ID NO: 4609 - DNA, 40 bp, Artificial Sequence
  Synthetic
agctcgatgttgaacaccgacgcggagtgctgacgaagtg

SEQ ID NO: 4610 - DNA, 42 bp, Artificial Sequence
  Synthetic
tcgttttcctcctctccgtcgtgaatgtcctgggctaagcag

SEQ ID NO: 4611 - DNA, 39 bp, Artificial Sequence
  Synthetic
accagtctcagtctcagcagcattgagaaacagcggcgg

SEQ ID NO: 4612 - DNA, 40 bp, Artificial Sequence
  Synthetic
ctgttgctctcctctaccccgcgtcggacgcgattgatgg

SEQ ID NO: 4613 - DNA, 38 bp, Artificial Sequence
  Synthetic
ccactactgccggagccgagctccggcagtaacagtag

SEQ ID NO: 4614 - DNA, 41 bp, Artificial Sequence
  Synthetic
atagcggcgttaggtgacacgtacagcaaaggtacgacggt

SEQ ID NO: 4615 - DNA, 35 bp, Artificial Sequence
  Synthetic
gttgcgcacccgtaagccgagggggaggggcgaat

SEQ ID NO: 4616 - DNA, 39 bp, Artificial Sequence
  Synthetic
gctgctgttgctgctgttgttgagcagcaacagtcgcag

SEQ ID NO: 4617 - DNA, 39 bp, Artificial Sequence
  Synthetic
ggggatctcctcacgcacgcggattgcgaccccgaagtg

SEQ ID NO: 4618 - DNA, 39 bp, Artificial Sequence
  Synthetic
gccacaaagtcgcttttgccgctcatcgaccccgtgacg

SEQ ID NO: 4619 - DNA, 38 bp, Artificial Sequence
  Synthetic
cctcgcacagccgatgcaccatacgcaaggcatcgtgg

SEQ ID NO: 4620 - DNA, 38 bp, Artificial Sequence
  Synthetic
gcgatcaccacgctcgaggaacgcaggagattctggcc

SEQ ID NO: 4621 - DNA, 37 bp, Artificial Sequence
  Synthetic
cagccagaccgctagccgaaagccgtcccgaacatca

SEQ ID NO: 4622 - DNA, 39 bp, Artificial Sequence
  Synthetic
acccggcgtgtcgactcgtagggaaaaaaaggtggggcc

SEQ ID NO: 4623 - DNA, 35 bp, Artificial Sequence
  Synthetic
gcggactgcaccgggatgatctcacggcggcagtc

SEQ ID NO: 4624 - DNA, 36 bp, Artificial Sequence
  Synthetic
cgaccgcgcggctgatgatacgtctggcaccctacc

SEQ ID NO: 4625 - DNA, 41 bp, Artificial Sequence
  Synthetic
tgaagaaatagaccgggtgccgtctggatgaccgtatgggc

SEQ ID NO: 4626 - DNA, 35 bp, Artificial Sequence
  Synthetic
gaggccacggcgcagaagaaccgctgcccgtctac

SEQ ID NO: 4627 - DNA, 37 bp, Artificial Sequence
  Synthetic
cgcgccggtactcgagcaaacgtctacctggcctacc

SEQ ID NO: 4628 - DNA, 35 bp, Artificial Sequence
  Synthetic
agcggctgctggaagagggcgggtgacggcgacat

SEQ ID NO: 4629 - DNA, 38 bp, Artificial Sequence
  Synthetic
cacctggacatctaccgtcgccacaggcggttgagcgc

SEQ ID NO: 4630 - DNA, 35 bp, Artificial Sequence
  Synthetic
tgcctcagctgttaccgcggccttcccaagcggca

SEQ ID NO: 4631 - DNA, 35 bp, Artificial Sequence
  Synthetic
gctggtgcggcttttccacatcgtcccgtagcccg

SEQ ID NO: 4632 - DNA, 35 bp, Artificial Sequence
  Synthetic
ctcggtgagcgggtagcgaagcctgcgactgctgc

SEQ ID NO: 4633 - DNA, 39 bp, Artificial Sequence
  Synthetic
cagggccagggacagccttgtcgtcgtggttgatgttga

SEQ ID NO: 4634 - DNA, 37 bp, Artificial Sequence
  Synthetic
cgcaccctctgagtgctgcctgccacggtagcacctg

SEQ ID NO: 4635 - DNA, 36 bp, Artificial Sequence
  Synthetic
ccgtcttatcccgtgccgcataccgcccggagagtc

SEQ ID NO: 4636 - DNA, 39 bp, Artificial Sequence
  Synthetic
cgtaaggaaaccgcggcgggcctgggaaactcaagtctt

SEQ ID NO: 4637 - DNA, 39 bp, Artificial Sequence
  Synthetic
acagtccggcttgggtgtccatgtttgccggcttcgagg

SEQ ID NO: 4638 - DNA, 37 bp, Artificial Sequence
  Synthetic
cgcggagggtgattcgcactcccgggcgtctccatag

SEQ ID NO: 4639 - DNA, 41 bp, Artificial Sequence
  Synthetic
agttgttgaggtccaccagcagtaaacatcaagggccgctg

SEQ ID NO: 4640 - DNA, 36 bp, Artificial Sequence
  Synthetic
agacgaccggcttccagcgactgccaggtgcttcgg

SEQ ID NO: 4641 - DNA, 34 bp, Artificial Sequence
  Synthetic
gcttgcccgacgcgtgaaggccgagcgcaaacac

SEQ ID NO: 4642 - DNA, 40 bp, Artificial Sequence
  Synthetic
gcacgttgaccgacacgttctacaatcagctgcaggtgca

SEQ ID NO: 4643 - DNA, 39 bp, Artificial Sequence
  Synthetic
gctgttgcgacggcgaatgacgcaccaagtcaaatccac

SEQ ID NO: 4644 - DNA, 36 bp, Artificial Sequence
  Synthetic
ccggagcgtggcggtacaaggtgcgacgacccttct

SEQ ID NO: 4645 - DNA, 38 bp, Artificial Sequence
  Synthetic
cgtgtcgtacgcgcaccgttgataccgcggaatcaacg

SEQ ID NO: 4646 - DNA, 42 bp, Artificial Sequence
  Synthetic
tcagctccgaggctaggttagctgatcgacatgaagaccgcc

SEQ ID NO: 4647 - DNA, 40 bp, Artificial Sequence
  Synthetic
gaggcccatgatgagtagtcgcgccctggatcgtacccat

SEQ ID NO: 4648 - DNA, 38 bp, Artificial Sequence
  Synthetic
gcggccggcatcaggagaaacctcaagacgctgctagt

SEQ ID NO: 4649 - DNA, 39 bp, Artificial Sequence
  Synthetic
ccgatagcggttcctcagccaggtaacgcgcatctcagc

SEQ ID NO: 4650 - DNA, 35 bp, Artificial Sequence
  Synthetic
agggtggtccgcgttccgttgtgccacccggtgct

SEQ ID NO: 4651 - DNA, 37 bp, Artificial Sequence
  Synthetic
ccgaccagttctccatcgcgtgctttccccgagctcc

SEQ ID NO: 4652 - DNA, 39 bp, Artificial Sequence
  Synthetic
cccgtggccgtaccctgttgtaccagatgttcaccgtgg

SEQ ID NO: 4653 - DNA, 40 bp, Artificial Sequence
  Synthetic
cacgcatgtgctacgcggattagaggctcggcaattctcg

SEQ ID NO: 4654 - DNA, 36 bp, Artificial Sequence
  Synthetic
cgacgagcgcgggtcacaaacgtcgaacgcgatcgg

SEQ ID NO: 4655 - DNA, 38 bp, Artificial Sequence
  Synthetic
ctgacgccacgccgccattgtgttcctgataggcccgg

SEQ ID NO: 4656 - DNA, 35 bp, Artificial Sequence
  Synthetic
tgctgctctgcacgctctgacaccaaccaggcggc

SEQ ID NO: 4657 - DNA, 39 bp, Artificial Sequence
  Synthetic
gcgtcgcccttctccgtgatcaacgtggtctcttacgtg

SEQ ID NO: 4658 - DNA, 39 bp, Artificial Sequence
  Synthetic
cgtcgtggagacaagcaacaccagttttgggggcggagg

SEQ ID NO: 4659 - DNA, 37 bp, Artificial Sequence
  Synthetic
gtgctcagcggcgtgtacagcttggatcacgtcggcg

SEQ ID NO: 4660 - DNA, 36 bp, Artificial Sequence
  Synthetic
ggtagcgcttgcggcacaccacctcctgcatctcca

SEQ ID NO: 4661 - DNA, 39 bp, Artificial Sequence
  Synthetic
gcagcggcgagaggagaggattcaggtggatcctccgtc

SEQ ID NO: 4662 - DNA, 38 bp, Artificial Sequence
  Synthetic
tcctctcagtttccccgtctccacgtcgaaaccccggc

SEQ ID NO: 4663 - DNA, 37 bp, Artificial Sequence
  Synthetic
gtggtgccgtccacgtcgtgcaagccgtggtaaccgt

SEQ ID NO: 4664 - DNA, 35 bp, Artificial Sequence
  Synthetic
gcacgcgcgtttccccgtaagcgccgacaactccg

SEQ ID NO: 4665 - DNA, 37 bp, Artificial Sequence
  Synthetic
cggcaagctcacgcactgccgtagctcatttgcgccg

SEQ ID NO: 4666 - DNA, 35 bp, Artificial Sequence
  Synthetic
cggaacgtgacggttgccgttttccccgccggtgg

SEQ ID NO: 4667 - DNA, 37 bp, Artificial Sequence
  Synthetic
tgacgacggggaggatgacgagccactaccgcagagc

SEQ ID NO: 4668 - DNA, 39 bp, Artificial Sequence
  Synthetic
atcggctcgtatcccgaagtgctcagagacgcgttccgc

SEQ ID NO: 4669 - DNA, 36 bp, Artificial Sequence
  Synthetic
ccgtcctggcacgcctcttcagacgcagacaggtgc

SEQ ID NO: 4670 - DNA, 39 bp, Artificial Sequence
  Synthetic
cccggcgtgctgttggtctccgttgccgtagaagaagtt

SEQ ID NO: 4671 - DNA, 38 bp, Artificial Sequence
  Synthetic
agagcctcacctgcgtgacgtttctgggctactccgcc

SEQ ID NO: 4672 - DNA, 40 bp, Artificial Sequence
  Synthetic
gagcacttgcggctccatgagctggaggtccatacggatt

SEQ ID NO: 4673 - DNA, 37 bp, Artificial Sequence
  Synthetic
gcccgtcgtagcgcagaataagctgctgttcaccacg

SEQ ID NO: 4674 - DNA, 40 bp, Artificial Sequence
  Synthetic
caacgccgcgtgtaacttccacgctctttgacaccatcac

SEQ ID NO: 4675 - DNA, 36 bp, Artificial Sequence
  Synthetic
atatgtgggagcgcaaggccagaggtcctcgcaggc

SEQ ID NO: 4676 - DNA, 36 bp, Artificial Sequence
  Synthetic
gcgactttaccgcgaacgccggtctgcgtgggcgaa

SEQ ID NO: 4677 - DNA, 41 bp, Artificial Sequence
  Synthetic
tgcctgtccaaccaccatgacgtgtgatccatgagttcggc

SEQ ID NO: 4678 - DNA, 40 bp, Artificial Sequence
  Synthetic
gctcatgcagcgtctcacggggcgattgtaggtaacgagc

SEQ ID NO: 4679 - DNA, 36 bp, Artificial Sequence
  Synthetic
acaccagcgacaacgtgctctgcaccacctcggggt

SEQ ID NO: 4680 - DNA, 38 bp, Artificial Sequence
  Synthetic
cgtgtgcaccaccgtggagactcttggcgatggtcatg

SEQ ID NO: 4681 - DNA, 36 bp, Artificial Sequence
  Synthetic
cgtgcaccacggtgaacacgttgcctggacgcctgg

SEQ ID NO: 4682 - DNA, 39 bp, Artificial Sequence
  Synthetic
ggcgctgtgtccgagctcacctgctgtacaacaatccgg

SEQ ID NO: 4683 - DNA, 40 bp, Artificial Sequence
  Synthetic
ccaggtgagaaagagaagccgcctctcatcgtgccgcaga

SEQ ID NO: 4684 - DNA, 39 bp, Artificial Sequence
  Synthetic
cggcagcggtggtactggtatgcttactgtgtgaagcgg

SEQ ID NO: 4685 - DNA, 35 bp, Artificial Sequence
  Synthetic
gtccagaacgcggttgggaacgccacaggccgtag

SEQ ID NO: 4686 - DNA, 40 bp, Artificial Sequence
  Synthetic
catgttgccgtgtgacgagacgaggtgacgcgacctcctg

SEQ ID NO: 4687 - DNA, 41 bp, Artificial Sequence
  Synthetic
tgggcgatgcacaactctttctgctacggctgctgatacga

SEQ ID NO: 4688 - DNA, 35 bp, Artificial Sequence
  Synthetic
ggtggtggtgggcatcgtgcgctcggcagctcctt

SEQ ID NO: 4689 - DNA, 40 bp, Artificial Sequence
  Synthetic
gtcgcctcggtagctcagtagtctacggaccgtctgtcga

SEQ ID NO: 4690 - DNA, 48 bp, Artificial Sequence
  Synthetic
cgataggcggctataagatagagattgtctctctttatctttcttgtg

SEQ ID NO: 4691 - DNA, 41 bp, Artificial Sequence
  Synthetic
tatggttcttaggcgcgcatcaagtcatgattcgtaactgc

SEQ ID NO: 4692 - DNA, 38 bp, Artificial Sequence
  Synthetic
ccggcgtgcagcaaggttcgcttcgtaattctgacgca

SEQ ID NO: 4693 - DNA, 38 bp, Artificial Sequence
  Synthetic
tccctcggcgaccaacaccaagatgtgggccgagaact

SEQ ID NO: 4694 - DNA, 37 bp, Artificial Sequence
  Synthetic
gtagcgggagatacggcgttcaagccgccgttcaagc

SEQ ID NO: 4695 - DNA, 39 bp, Artificial Sequence
  Synthetic
gctatcgtcgccggtttcgggtggtggacgagacgagac

SEQ ID NO: 4696 - DNA, 37 bp, Artificial Sequence
  Synthetic
tcggcgttttcgggaagggcaaacccaagccggtcgg

SEQ ID NO: 4697 - DNA, 36 bp, Artificial Sequence
  Synthetic
cgacgcgatcacggtaaccctacgctagcggggctg

SEQ ID NO: 4698 - DNA, 42 bp, Artificial Sequence
  Synthetic
gcgttgtctcgcctatcagcgttaacgtgggtttcaggggaa

SEQ ID NO: 4699 - DNA, 37 bp, Artificial Sequence
  Synthetic
tacgagaccccgaggtacgcactgcagaccgtacggg

SEQ ID NO: 4700 - DNA, 36 bp, Artificial Sequence
  Synthetic
cggaacggcgtttcactgccttctgcaccgccgacg

SEQ ID NO: 4701 - DNA, 37 bp, Artificial Sequence
  Synthetic
gcgtggcagggctggaagaacccagcactccatcgac

SEQ ID NO: 4702 - DNA, 37 bp, Artificial Sequence
  Synthetic
accggtgtggaagccgaggcatacgccacagcatgcg

SEQ ID NO: 4703 - DNA, 35 bp, Artificial Sequence
  Synthetic
acatgggccatgtgtggtggtgtgcactgccgcga

SEQ ID NO: 4704 - DNA, 40 bp, Artificial Sequence
  Synthetic
ctccgggttcctgccttttccaaggccgtggaaaaccacc

SEQ ID NO: 4705 - DNA, 40 bp, Artificial Sequence
  Synthetic
aacaacgcagactgctgaaggccaggcatgggtctgtcga

SEQ ID NO: 4706 - DNA, 37 bp, Artificial Sequence
  Synthetic
agcttctccccgactccgcgagactggcagggacacg

SEQ ID NO: 4707 - DNA, 40 bp, Artificial Sequence
  Synthetic
cgataccaccacattcaggggcctggccgtcctgttcctg

SEQ ID NO: 4708 - DNA, 35 bp, Artificial Sequence
  Synthetic
gggactttccacacggcggaccgttgacgtgggcg

SEQ ID NO: 4709 - DNA, 40 bp, Artificial Sequence
  Synthetic
tcgacgacaggtgcggattagtgcgacagacatccccctg

SEQ ID NO: 4710 - DNA, 41 bp, Artificial Sequence
  Synthetic
caacaataccgccctacgttggttcagtgttggatcagact

SEQ ID NO: 4711 - DNA, 38 bp, Artificial Sequence
  Synthetic
ggacgtaacattcggacacggactcgcgggtttgggga

SEQ ID NO: 4712 - DNA, 35 bp, Artificial Sequence
  Synthetic
ggcgacgacagttccgtgggaaggcaccgcgacag

SEQ ID NO: 4713 - DNA, 35 bp, Artificial Sequence
  Synthetic
ccggcggtggtgaacgagaaccccagcaacggcct

SEQ ID NO: 4714 - DNA, 41 bp, Artificial Sequence
  Synthetic
gtaacccagccaaaccagcgcgattgctgacgctggaaacc

SEQ ID NO: 4715 - DNA, 36 bp, Artificial Sequence
  Synthetic
ccgtgccatcggtgggtaccagagaacgcagcgcac

SEQ ID NO: 4716 - DNA, 40 bp, Artificial Sequence
  Synthetic
gcgagaaccggtcgctcatagctcctcctggtgcctgtgg

SEQ ID NO: 4717 - DNA, 37 bp, Artificial Sequence
  Synthetic
ggaggctatatgaccgcgcggggccgcccaaacatct

SEQ ID NO: 4718 - DNA, 41 bp, Artificial Sequence
  Synthetic
ccttcatcgcgtttgccgtgccccttgagtttgatggtgcc

SEQ ID NO: 4719 - DNA, 39 bp, Artificial Sequence
  Synthetic
aaacgggcgcggttttataggccgggactttgacagccg

SEQ ID NO: 4720 - DNA, 40 bp, Artificial Sequence
  Synthetic
agctgatgcatttccagcgacgtctcctttacggggctgg

SEQ ID NO: 4721 - DNA, 38 bp, Artificial Sequence
  Synthetic
ttctctgtggtcggcgagtctgggcctgaagcgatgga

SEQ ID NO: 4722 - DNA, 37 bp, Artificial Sequence
  Synthetic
gcagtgctacggtggttccctacgatcctccggcgct

SEQ ID NO: 4723 - DNA, 38 bp, Artificial Sequence
  Synthetic
tggtaaagtgaagacgcgccgcaggctggaacgcaacg

SEQ ID NO: 4724 - DNA, 38 bp, Artificial Sequence
  Synthetic
gtgacgcagcagcatcgctccacagacgccgtttgcta

SEQ ID NO: 4725 - DNA, 41 bp, Artificial Sequence
  Synthetic
acacctggtcgacgtggttacgttgagtgccagtacagcgc

SEQ ID NO: 4726 - DNA, 36 bp, Artificial Sequence
  Synthetic
gtcagggccagaacccgcaggtgacgccggttgtcc

SEQ ID NO: 4727 - DNA, 40 bp, Artificial Sequence
  Synthetic
ccctgctgttggctacctctctttcctgtgcaccgtcatc

SEQ ID NO: 4728 - DNA, 39 bp, Artificial Sequence
  Synthetic
cgcatctgctcgccgtagattggatgattttgcgcgaca

SEQ ID NO: 4729 - DNA, 38 bp, Artificial Sequence
  Synthetic
acgagcacgcttccgaggggaagatcgtcctctcgccg

SEQ ID NO: 4730 - DNA, 39 bp, Artificial Sequence
  Synthetic
gaccgagccagagggacctccgacaggtaagatgtggct

SEQ ID NO: 4731 - DNA, 36 bp, Artificial Sequence
  Synthetic
cgtggaaaaccacccggcagtcctccgggttcctgc

SEQ ID NO: 4732 - DNA, 40 bp, Artificial Sequence
  Synthetic
cgggggggtgaaatttggagtgcagcacacgcaactagtc

SEQ ID NO: 4733 - DNA, 47 bp, Artificial Sequence
  Synthetic
aagttcgctgcaatatgcacaccaatgaaatggaagtctgaatacat

SEQ ID NO: 4734 - DNA, 48 bp, Artificial Sequence
  Synthetic
aggaaaaccgattcactgaaattggtcggattttatcttgttagcttt

SEQ ID NO: 4735 - DNA, 39 bp, Artificial Sequence
  Synthetic
aatcacagggaccatgcgtaaaggctggagaagttaggt

SEQ ID NO: 4736 - DNA, 42 bp, Artificial Sequence
  Synthetic
ctgcaaagatattggcgatctgatgctatcgatctgagctct

SEQ ID NO: 4737 - DNA, 39 bp, Artificial Sequence
  Synthetic
cattgcagggccactgagtaccatccatggctgcacaag

SEQ ID NO: 4738 - DNA, 42 bp, Artificial Sequence
  Synthetic
ttctcccttactgacccaaggcctacttcaagaacacagtac

SEQ ID NO: 4739 - DNA, 39 bp, Artificial Sequence
  Synthetic
aaacagatcggagacatggccaaggttctgcacaccttc

SEQ ID NO: 4740 - DNA, 41 bp, Artificial Sequence
  Synthetic
agaatggttagcggcattggggaatcagcctcccttcattg

SEQ ID NO: 4741 - DNA, 40 bp, Artificial Sequence
  Synthetic
gcgacaagcgaacaatggagatgccatatcatcagatggg

SEQ ID NO: 4742 - DNA, 43 bp, Artificial Sequence
  Synthetic
agaaggacaagaattgcatatgagagtgctgctgtttggaatt

SEQ ID NO: 4743 - DNA, 48 bp, Artificial Sequence
  Synthetic
atgagaacatggaagcaatggacttcttatagcccaatatctacttct

SEQ ID NO: 4744 - DNA, 40 bp, Artificial Sequence
  Synthetic
ggaagtgaaaattgatgacggcgaggctcagagttcactc

SEQ ID NO: 4745 - DNA, 46 bp, Artificial Sequence
  Synthetic
tttggtggacaacttttttaacgagtcgtaaagagacggaacataa

SEQ ID NO: 4746 - DNA, 40 bp, Artificial Sequence
  Synthetic
aagacgagcaagacgagaacgggttccctatcagcggcag

SEQ ID NO: 4747 - DNA, 44 bp, Artificial Sequence
  Synthetic
agaggaagaaagagaacaaacagtgcaggtgctcaaagtccatt

SEQ ID NO: 4748 - DNA, 43 bp, Artificial Sequence
  Synthetic
aaacacttcaggtttttggaggttcaccctatttaccaccttg

SEQ ID NO: 4749 - DNA, 40 bp, Artificial Sequence
  Synthetic
ctgccgacgttgcaagaggatttacttctccaccaccgca

SEQ ID NO: 4750 - DNA, 46 bp, Artificial Sequence
  Synthetic
tataggtaacggggcaatagttgagtgcattcgacatctaaaagca

SEQ ID NO: 4751 - DNA, 45 bp, Artificial Sequence
  Synthetic
tgaagggaatggctattttaaagcacaaaacgtcgcatagtttga

SEQ ID NO: 4752 - DNA, 40 bp, Artificial Sequence
  Synthetic
tgatgatactcgacatcgttgctagcacaatgggacgaag

SEQ ID NO: 4753 - DNA, 41 bp, Artificial Sequence
  Synthetic
cgcttctacggctcgcagtatagcattcgaagccaagtgat

SEQ ID NO: 4754 - DNA, 40 bp, Artificial Sequence
  Synthetic
gcattaggccatctttgggatcactaacccggaacatgaa

SEQ ID NO: 4755 - DNA, 40 bp, Artificial Sequence
  Synthetic
cgaaaacggtgtagccagtactttccatgcctttccttct

SEQ ID NO: 4756 - DNA, 39 bp, Artificial Sequence
  Synthetic
ttaacgaggtgcagctgccgcgcgtccgacaaatgatga

SEQ ID NO: 4757 - DNA, 40 bp, Artificial Sequence
  Synthetic
gggtttggctggctgttgctggacaaaaccctcgtccatt

SEQ ID NO: 4758 - DNA, 39 bp, Artificial Sequence
  Synthetic
ggcgtacagttttggagccaagttattgtggcgcagatg

SEQ ID NO: 4759 - DNA, 42 bp, Artificial Sequence
  Synthetic
ctctgacacaaaagctctagtccaaacgatcggtacccttcc

SEQ ID NO: 4760 - DNA, 47 bp, Artificial Sequence
  Synthetic
acgtgtcagtttctataaacgatgatgatcaaatggaagaaagccta

SEQ ID NO: 4761 - DNA, 41 bp, Artificial Sequence
  Synthetic
tgcgctcgtcagatagcaagccggtgaagtagttaccagcg

SEQ ID NO: 4762 - DNA, 40 bp, Artificial Sequence
  Synthetic
agtaggatagcacctgccgccgcgccttcacatgagctat

SEQ ID NO: 4763 - DNA, 44 bp, Artificial Sequence
  Synthetic
agcatataaaactgatttaccgcctttaagaaaggctgcacaag

SEQ ID NO: 4764 - DNA, 47 bp, Artificial Sequence
  Synthetic
aagcggttattgattacctgagcgagttgtatatagtaggacacaat

SEQ ID NO: 4765 - DNA, 43 bp, Artificial Sequence
  Synthetic
agagtctttttcccattggtccctcttgtcaaacatgccttac

SEQ ID NO: 4766 - DNA, 38 bp, Artificial Sequence
  Synthetic
gcatcgttgcacgggctgtactgctttctggtgcgagg

SEQ ID NO: 4767 - DNA, 41 bp, Artificial Sequence
  Synthetic
cggaaacgggaaatcagggcggcggacatgcttttctctct

SEQ ID NO: 4768 - DNA, 35 bp, Artificial Sequence
  Synthetic
ggttcgggtcctgcgggaatcccctgccagagcgt

SEQ ID NO: 4769 - DNA, 44 bp, Artificial Sequence
  Synthetic
gctgcaaggtcattagatatccgggaacgaaattggactaaacg

SEQ ID NO: 4770 - DNA, 40 bp, Artificial Sequence
  Synthetic
gctcgaccgttttcacgtggtgcaacgcctcatttcccat

SEQ ID NO: 4771 - DNA, 42 bp, Artificial Sequence
  Synthetic
ttgaagtaagctgttttaagcccagcctgcgaattcaacaag

SEQ ID NO: 4772 - DNA, 43 bp, Artificial Sequence
  Synthetic
taagctcctgcattaatggtgtagacacagaaactgtacagcc

SEQ ID NO: 4773 - DNA, 42 bp, Artificial Sequence
  Synthetic
tgttgctcgcataaattcgcggcgtggcaactattgaacgct

SEQ ID NO: 4774 - DNA, 42 bp, Artificial Sequence
  Synthetic
gctatgagcacaagtgaggcgcaagactcctctccgtgtctg

SEQ ID NO: 4775 - DNA, 35 bp, Artificial Sequence
  Synthetic
gacaacagcggggaggaagcaaatccgcggcgcag

SEQ ID NO: 4776 - DNA, 48 bp, Artificial Sequence
  Synthetic
tgtacataatccagcaagtaaaccccattgtctctactatgttgaact

SEQ ID NO: 4777 - DNA, 38 bp, Artificial Sequence
  Synthetic
tgctgacgtcactggcgatgacgccggtcgctgcatct

SEQ ID NO: 4778 - DNA, 38 bp, Artificial Sequence
  Synthetic
catccgcaaagatgaggctgctgttatagcgtgccacg

SEQ ID NO: 4779 - DNA, 44 bp, Artificial Sequence
  Synthetic
caaacgtccaggcagggtttcttgcaaatttttaaaagcctgag

SEQ ID NO: 4780 - DNA, 41 bp, Artificial Sequence
  Synthetic
ccccctcctggattttacactgactgtccgtaacatcatcc

SEQ ID NO: 4781 - DNA, 42 bp, Artificial Sequence
  Synthetic
cacatgcgggggatgaaggaagagcaaatgggtttcctgacc

SEQ ID NO: 4782 - DNA, 43 bp, Artificial Sequence
  Synthetic
gtttaccaccaaatttaaggccaggatggtttggccttcgttg

SEQ ID NO: 4783 - DNA, 41 bp, Artificial Sequence
  Synthetic
aactccgggagtgtacactaatgaaaatcaaccccgcaacc

SEQ ID NO: 4784 - DNA, 39 bp, Artificial Sequence
  Synthetic
tatcgcagctggtatttggcagtccatgaccgaactcct

SEQ ID NO: 4785 - DNA, 39 bp, Artificial Sequence
  Synthetic
cgtacgcggacattaccgagccgtctacagtggtgcgac

SEQ ID NO: 4786 - DNA, 38 bp, Artificial Sequence
  Synthetic
gctgcggccgcaacagctatcgcgcacccagtatacat

SEQ ID NO: 4787 - DNA, 41 bp, Artificial Sequence
  Synthetic
cgcccagacgtagggtacagtccgggagaaaaaaccactgt

SEQ ID NO: 4788 - DNA, 46 bp, Artificial Sequence
  Synthetic
acgtactagagcacatgaaggtcttttttatcggacgtacttttac

SEQ ID NO: 4789 - DNA, 39 bp, Artificial Sequence
  Synthetic
cgccgtagacgtcgacgcattgtacaacgcgacgtactg

SEQ ID NO: 4790 - DNA, 42 bp, Artificial Sequence
  Synthetic
ccaaccaaaggagaaaagcggcggttctgttgtgtgcgttac

SEQ ID NO: 4791 - DNA, 38 bp, Artificial Sequence
  Synthetic
cactccctcgatgatgccgcactccgaggcatcctgac

SEQ ID NO: 4792 - DNA, 42 bp, Artificial Sequence
  Synthetic
ttaagccctattccggaaccgcttgtgaagcattaggagcgc

SEQ ID NO: 4793 - DNA, 44 bp, Artificial Sequence
  Synthetic
ctgctcaagttgtgttctataccggcttaaacacaagatgcgtg

SEQ ID NO: 4794 - DNA, 42 bp, Artificial Sequence
  Synthetic
cgttcgcgttattgagaatcacgcctactgcgctaagaggaa

SEQ ID NO: 4795 - DNA, 46 bp, Artificial Sequence
  Synthetic
aacaagaacacctacgagtacatgcgatattgacataggtatccac

SEQ ID NO: 4796 - DNA, 40 bp, Artificial Sequence
  Synthetic
gggaaatgatcttcgggtggatgtgccatgggaaaaaagt

SEQ ID NO: 4797 - DNA, 44 bp, Artificial Sequence
  Synthetic
gtgtcaatcatgtttgactcctccttcatttggggttagcaaac

SEQ ID NO: 4798 - DNA, 39 bp, Artificial Sequence
  Synthetic
ggatacctgggccccactatcacagctgtttggcctata

SEQ ID NO: 4799 - DNA, 40 bp, Artificial Sequence
  Synthetic
tttccgggttttgtgtctcgcggtgtacgcccccagtttc

SEQ ID NO: 4800 - DNA, 45 bp, Artificial Sequence
  Synthetic
atggataaaaatcccactatggacccctgaggactttgtagcata

SEQ ID NO: 4801 - DNA, 40 bp, Artificial Sequence
  Synthetic
ccacagctggcgcacaagttggccctaattgcgacttcaa

SEQ ID NO: 4802 - DNA, 46 bp, Artificial Sequence
  Synthetic
gctatttgagccttcattccttcaggaataattctttctccggaaa

SEQ ID NO: 4803 - DNA, 39 bp, Artificial Sequence
  Synthetic
accggtgggttcccaggaatttcaggagctcatgggacg

SEQ ID NO: 4804 - DNA, 42 bp, Artificial Sequence
  Synthetic
acattcttttcattttcgtcgctgaaatggaaaccaggcagg

SEQ ID NO: 4805 - DNA, 40 bp, Artificial Sequence
  Synthetic
aaaacgctgggctcgaggactgctttgtcgctgtagatgt

SEQ ID NO: 4806 - DNA, 45 bp, Artificial Sequence
  Synthetic
ttcttgctttaagggctggcgacctaaaccttcaaaaattttagg

SEQ ID NO: 4807 - DNA, 42 bp, Artificial Sequence
  Synthetic
atggaaagccggttgtaagcgacgctgttgtagttcgttgga

SEQ ID NO: 4808 - DNA, 43 bp, Artificial Sequence
  Synthetic
aaccttcgagaactaaacaaactgttgtccgttcgtcaaaacc

SEQ ID NO: 4809 - DNA, 42 bp, Artificial Sequence
  Synthetic
ttcacgacgaacctaagacttaccggttcaaatttgcgcagg

SEQ ID NO: 4810 - DNA, 41 bp, Artificial Sequence
  Synthetic
cgcagcaacgctcaaagaaacactgcctgactctcccaaga

SEQ ID NO: 4811 - DNA, 42 bp, Artificial Sequence
  Synthetic
tgtagcctgctttcagcactgcgaatcgccactccatcatgg

SEQ ID NO: 4812 - DNA, 43 bp, Artificial Sequence
  Synthetic
ccgcagctgtctctacctcaagtatttattgaacagagcttct

SEQ ID NO: 4813 - DNA, 42 bp, Artificial Sequence
  Synthetic
ttaaccctccctcttggccagccgaggcaaaagtacagtggt

SEQ ID NO: 4814 - DNA, 43 bp, Artificial Sequence
  Synthetic
tgaagatttctgctgtcatttgtgtcttcttcaggcggtacag

SEQ ID NO: 4815 - DNA, 42 bp, Artificial Sequence
  Synthetic
ttgttgctccagttattgacaaacgaaggagaaactgcctcg

SEQ ID NO: 4816 - DNA, 41 bp, Artificial Sequence
  Synthetic
gtatgctcaaacagccgaaagaagggttacattatggccag

SEQ ID NO: 4817 - DNA, 43 bp, Artificial Sequence
  Synthetic
atacggtaagggcagcccaaagcttttagtaatacctgaaaca

SEQ ID NO: 4818 - DNA, 41 bp, Artificial Sequence
  Synthetic
ttctcatctttttatgcctgccaatcaaggtcactgactgc

SEQ ID NO: 4819 - DNA, 39 bp, Artificial Sequence
  Synthetic
cccccaggatgatttacccctaacaacagaaggaggacg

SEQ ID NO: 4820 - DNA, 38 bp, Artificial Sequence
  Synthetic
tcaactgtgctacacgctgcaataggtaccgagcccac

SEQ ID NO: 4821 - DNA, 43 bp, Artificial Sequence
  Synthetic
aaatggaaggtcagattcttcttcccatactgggttctgctgc

SEQ ID NO: 4822 - DNA, 45 bp, Artificial Sequence
  Synthetic
tcacaaggtcttaaactttcttggatcttgtgttaagtgtgaggg

SEQ ID NO: 4823 - DNA, 42 bp, Artificial Sequence
  Synthetic
aatggtgagctccgatgggttggacaaggctaaggaaccgtt

SEQ ID NO: 4824 - DNA, 43 bp, Artificial Sequence
  Synthetic
ctgtccttaagacggggattggagttgttaagttccagtttgt

SEQ ID NO: 4825 - DNA, 43 bp, Artificial Sequence
  Synthetic
ctggttccccaagcttcgtgtaacagtattggtagacactgat

SEQ ID NO: 4826 - DNA, 42 bp, Artificial Sequence
  Synthetic
tacactatacgcgtggttaaactgtacaaagggggaaaggga

SEQ ID NO: 4827 - DNA, 43 bp, Artificial Sequence
  Synthetic
cgcccaaggattctctcgtttaattatgcatcatcgagcaatt

SEQ ID NO: 4828 - DNA, 41 bp, Artificial Sequence
  Synthetic
ccagctgacatacactgtagtgatacatggtcatgagcggt

SEQ ID NO: 4829 - DNA, 38 bp, Artificial Sequence
  Synthetic
ttcctcacagggcggtagttcagacggtatcgctacag

SEQ ID NO: 4830 - DNA, 43 bp, Artificial Sequence
  Synthetic
ccgctgtgctggtgaaagatttgaacatttggaaaatcgctta

SEQ ID NO: 4831 - DNA, 43 bp, Artificial Sequence
  Synthetic
gcaaagaaagttcacctccaggttgtgcaagttgtatgttctg

SEQ ID NO: 4832 - DNA, 39 bp, Artificial Sequence
  Synthetic
ctggcaaacgggtggaaaaaccgtgttttgcgatgttcg

SEQ ID NO: 4833 - DNA, 39 bp, Artificial Sequence
  Synthetic
catagccccaggtcccgtaatctggtaaggcattatggc

SEQ ID NO: 4834 - DNA, 40 bp, Artificial Sequence
  Synthetic
gcctatggctggtcgctcaaacatctagcctcatctgcca

SEQ ID NO: 4835 - DNA, 41 bp, Artificial Sequence
  Synthetic
gttgaggcttgtgggttttccgcacagcgtcttgggttgtt

SEQ ID NO: 4836 - DNA, 40 bp, Artificial Sequence
  Synthetic
gcctgagcaccagttggcttatgggtgtgctcatagctca

SEQ ID NO: 4837 - DNA, 39 bp, Artificial Sequence
  Synthetic
gaatgcctagtggggctaacctggtggggtgaaatcctg

SEQ ID NO: 4838 - DNA, 41 bp, Artificial Sequence
  Synthetic
acagaaggtggctttatcacattccattatagcccctgtgg

SEQ ID NO: 4839 - DNA, 48 bp, Artificial Sequence
  Synthetic
tcaagagctggaaaataaacttccatcaaatctaacataggtgaacaa

SEQ ID NO: 4840 - DNA, 47 bp, Artificial Sequence
  Synthetic
gtaccaattacaacaagcaaaagcctgttaaggaaatgttttggctc

SEQ ID NO: 4841 - DNA, 41 bp, Artificial Sequence
  Synthetic
gatggtgactgcaggtggagtgagctgtagtttctcaagtc

SEQ ID NO: 4842 - DNA, 40 bp, Artificial Sequence
  Synthetic
atccaagttcattgactggctgtaatgtgtccgacttgcg

SEQ ID NO: 4843 - DNA, 43 bp, Artificial Sequence
  Synthetic
tttgtcagatggtttcaagcactctctgcccttatcttcaaga

SEQ ID NO: 4844 - DNA, 45 bp, Artificial Sequence
  Synthetic
cattgtagatcttcttagtgcctcccatccctctttctcacagaa

SEQ ID NO: 4845 - DNA, 47 bp, Artificial Sequence
  Synthetic
ataacgattttgtggctagatcgaaggtagtctggtatgaatcttct

SEQ ID NO: 4846 - DNA, 39 bp, Artificial Sequence
  Synthetic
cgctgtgttgacccagaaagcttggacaaaacagctgtt

SEQ ID NO: 4847 - DNA, 44 bp, Artificial Sequence
  Synthetic
gtaatctctatgctggcttccatgatcacaccctatagctgaac

SEQ ID NO: 4848 - DNA, 44 bp, Artificial Sequence
  Synthetic
atggattgacaataacacctgctgcattatcccagttgactttc

SEQ ID NO: 4849 - DNA, 43 bp, Artificial Sequence
  Synthetic
ttctgcagacgattcgacatttagatcgacagtatgagaacaa

SEQ ID NO: 4850 - DNA, 48 bp, Artificial Sequence
  Synthetic
tcggtggttccatttagaatagacagcagcatacaatgtaattcttac

SEQ ID NO: 4851 - DNA, 48 bp, Artificial Sequence
  Synthetic
tgcactgacagtatagatacgttgggttagaaatgtttgaatcgtcat

SEQ ID NO: 4852 - DNA, 46 bp, Artificial Sequence
  Synthetic
tgaaagacacagcaaaaggagattgaattttcagcttcatcttcga

SEQ ID NO: 4853 - DNA, 41 bp, Artificial Sequence
  Synthetic
ctgtttttggacaaacaccgggttgctgcttgatgacttac

SEQ ID NO: 4854 - DNA, 49 bp, Artificial Sequence
  Synthetic
ctcatattgagtcacaggagagcagcattttcttttctgatattttccc

SEQ ID NO: 4855 - DNA, 43 bp, Artificial Sequence
  Synthetic
ggactgtgcattttaaaacccaagtgtcgaaggaggaggagta

SEQ ID NO: 4856 - DNA, 39 bp, Artificial Sequence
  Synthetic
gtcaggagaaaccccccgcattcggtctctcctcctcct

SEQ ID NO: 4857 - DNA, 43 bp, Artificial Sequence
  Synthetic
actgtttggaactgggttggagtcagtgctatcaaatgcaata

SEQ ID NO: 4858 - DNA, 45 bp, Artificial Sequence
  Synthetic
gggaagtgtaatatacctaggaggcggattatacccagttgaccc

SEQ ID NO: 4859 - DNA, 48 bp, Artificial Sequence
  Synthetic
ttctgttgtgccattagaggatctctcttgtatctccactatctactg

SEQ ID NO: 4860 - DNA, 44 bp, Artificial Sequence
  Synthetic
gagcctcagcaactccacatacaaatacattcagatcagatgac

SEQ ID NO: 4861 - DNA, 39 bp, Artificial Sequence
  Synthetic
cccagctttactgacacagccgcatcaaaggcgggattt

SEQ ID NO: 4862 - DNA, 44 bp, Artificial Sequence
  Synthetic
aattgggcaggcggttcattgataattcaatagcatcagcagta

SEQ ID NO: 4863 - DNA, 44 bp, Artificial Sequence
  Synthetic
atgattctgatcatgaacgcctaggtagtacctataccaagcgg

SEQ ID NO: 4864 - DNA, 43 bp, Artificial Sequence
  Synthetic
agaagagaacaactatatgccagactggtagagcatctcccat

SEQ ID NO: 4865 - DNA, 44 bp, Artificial Sequence
  Synthetic
tagagctacaagatgccctacactcaacaacccaaaaagacaaa

SEQ ID NO: 4866 - DNA, 47 bp, Artificial Sequence
  Synthetic
gtccgcaccccaataattatttgcggaaatttgaagaggatatgtcc

SEQ ID NO: 4867 - DNA, 37 bp, Artificial Sequence
  Synthetic
acagaccacgatccccacaccactgctgccgtgcgac

SEQ ID NO: 4868 - DNA, 44 bp, Artificial Sequence
  Synthetic
gccttaaccacaaattctttggccttactgaacgacatcgaaat

SEQ ID NO: 4869 - DNA, 42 bp, Artificial Sequence
  Synthetic
tgccagcctattcacatacctgactacattaacggtctccat

SEQ ID NO: 4870 - DNA, 36 bp, Artificial Sequence
  Synthetic
atcacatgagaacggcgcgacgtcgcgcgaattcgg

SEQ ID NO: 4871 - DNA, 48 bp, Artificial Sequence
  Synthetic
atgtcacatggatcatcaaccaaagttcttgagtagtcatatgttctt

SEQ ID NO: 4872 - DNA, 42 bp, Artificial Sequence
  Synthetic
attgtgtaatggaggcagaaacagtcttccttccgtaagtct

SEQ ID NO: 4873 - DNA, 44 bp, Artificial Sequence
  Synthetic
caggatgaacagtgatcagtttgctgttggcattcattccattt

SEQ ID NO: 4874 - DNA, 44 bp, Artificial Sequence
  Synthetic
aacagcttatcaccttctactgctcgctctaaattcttggagac

SEQ ID NO: 4875 - DNA, 39 bp, Artificial Sequence
  Synthetic
aagcgtgtttgaatcagcggtttcttctatggcctctcc

SEQ ID NO: 4876 - DNA, 42 bp, Artificial Sequence
  Synthetic
gaccagttgtgcaagacgttgcaaaacacacaattaatttgc

SEQ ID NO: 4877 - DNA, 44 bp, Artificial Sequence
  Synthetic
aacaagacatcttagacgtgctaattttctacttcacacagcgg

SEQ ID NO: 4878 - DNA, 45 bp, Artificial Sequence
  Synthetic
cagaagatgaggtggacgaagtgggtcactatttggaaatgttgt

SEQ ID NO: 4879 - DNA, 43 bp, Artificial Sequence
  Synthetic
cccaacaggtacacaaatatcagaccatgtcatacccactgtc

SEQ ID NO: 4880 - DNA, 38 bp, Artificial Sequence
  Synthetic
tccacgattggacgccattatggtttgaaacagccgtc

SEQ ID NO: 4881 - DNA, 39 bp, Artificial Sequence
  Synthetic
caggcacagcaggaatattggtaccaagtaatgctgccc

SEQ ID NO: 4882 - DNA, 49 bp, Artificial Sequence
  Synthetic
gcatttgaatatgcacaaaggggagcatattgctatttaaaaatgctcg

SEQ ID NO: 4883 - DNA, 46 bp, Artificial Sequence
  Synthetic
atggaagcaatagccaagcgtcagtactgttttcttcataaagttc

SEQ ID NO: 4884 - DNA, 43 bp, Artificial Sequence
  Synthetic
aacaagttatgaaatgtggcaaacattctacagttttgccccg

SEQ ID NO: 4885 - DNA, 43 bp, Artificial Sequence
  Synthetic
accagcaccaaagacggaacactttaaacaattggattcacct

SEQ ID NO: 4886 - DNA, 47 bp, Artificial Sequence
  Synthetic
ctgggatttatgtcactgcacctaatgtacagttgtattacaccaat

SEQ ID NO: 4887 - DNA, 45 bp, Artificial Sequence
  Synthetic
aactctacttgtgtgttactgtccccatcattgctgtgtggtaac

SEQ ID NO: 4888 - DNA, 41 bp, Artificial Sequence
  Synthetic
ccaggtgcaggttacagacctccccttcatatacagggtta

SEQ ID NO: 4889 - DNA, 40 bp, Artificial Sequence
  Synthetic
tactgcacctatgggaacaccaaacagggcctgtaggtaa

SEQ ID NO: 4890 - DNA, 42 bp, Artificial Sequence
  Synthetic
cagcagttctagacttcttgcagcagttttgttagcccgttt

SEQ ID NO: 4891 - DNA, 45 bp, Artificial Sequence
  Synthetic
tccagattatttacaaatggctgcaacatttgttccttccgtaga

SEQ ID NO: 4892 - DNA, 43 bp, Artificial Sequence
  Synthetic
acaatggtatttgttggggtaatcaatgttggtactgcgtgtg

SEQ ID NO: 4893 - DNA, 47 bp, Artificial Sequence
  Synthetic
cttttatgcactgtagccaactctaacagtaagagcaaaaaaatgtg

SEQ ID NO: 4894 - DNA, 38 bp, Artificial Sequence
  Synthetic
tggattaacccgctcaatgcccaggcctttcgcgaccc

SEQ ID NO: 4895 - DNA, 38 bp, Artificial Sequence
  Synthetic
cccagattgggtgtgcgcgtcttccacgaggttgcgac

SEQ ID NO: 4896 - DNA, 41 bp, Artificial Sequence
  Synthetic
ggctttggaggacgggatcaacgaaagaagtgccaagagga

SEQ ID NO: 4897 - DNA, 39 bp, Artificial Sequence
  Synthetic
tcgcagcgccatacatcggccccaccatcaaatccacat

SEQ ID NO: 4898 - DNA, 40 bp, Artificial Sequence
  Synthetic
cctcgtgggggtggcctattcaacccctgcaaagaggaat

SEQ ID NO: 4899 - DNA, 36 bp, Artificial Sequence
  Synthetic
cccactcggggtcgctaacaatcccgcatggccgag

SEQ ID NO: 4900 - DNA, 39 bp, Artificial Sequence
  Synthetic
gttcaccaaaacctgtggcgccctgaagcaatcggtggg

SEQ ID NO: 4901 - DNA, 39 bp, Artificial Sequence
  Synthetic
ccactacagcgtggcagatccatcaagccggtggagagg

SEQ ID NO: 4902 - DNA, 38 bp, Artificial Sequence
  Synthetic
ttctgatgctgcctgagagggcgacaacgatggcgccg

SEQ ID NO: 4903 - DNA, 42 bp, Artificial Sequence
  Synthetic
tcttgcagtcctggtctgtccagccctaagatggccagaaga

SEQ ID NO: 4904 - DNA, 40 bp, Artificial Sequence
  Synthetic
cctgtttcggccaggttggggtctccacccctttgatgtt

SEQ ID NO: 4905 - DNA, 39 bp, Artificial Sequence
  Synthetic
taacggcgtgatgtggaccggattgacaggtcccttcgg

SEQ ID NO: 4906 - DNA, 38 bp, Artificial Sequence
  Synthetic
cactgacaactcaacacccccaggtgcgtgtaggtgcg

SEQ ID NO: 4907 - DNA, 39 bp, Artificial Sequence
  Synthetic
ggtgcgccaatcacgtactcaatgtcgtatgcccctccg

SEQ ID NO: 4908 - DNA, 42 bp, Artificial Sequence
  Synthetic
aaagtgcgatgaactggccagactctgtagtaggctacggca

SEQ ID NO: 4909 - DNA, 41 bp, Artificial Sequence
  Synthetic
gggaggttgggcacataccgggcagtgtcaaacatgcctga

SEQ ID NO: 4910 - DNA, 39 bp, Artificial Sequence
  Synthetic
ccaagctgggacaccatgtggtctgtagaggaggggcgt

SEQ ID NO: 4911 - DNA, 42 bp, Artificial Sequence
  Synthetic
aacacctcccactagtcgagcacctaaggccttctgcttgaa

SEQ ID NO: 4912 - DNA, 40 bp, Artificial Sequence
  Synthetic
gattcgcgactccgatgcttctttttgccaaggcccacac

SEQ ID NO: 4913 - DNA, 36 bp, Artificial Sequence
  Synthetic
gaaggggccgtgcagtggaacacgtgattgcctcgc

SEQ ID NO: 4914 - DNA, 40 bp, Artificial Sequence
  Synthetic
aggctataagggagagtggcgcacctgccagatctgctcc

SEQ ID NO: 4915 - DNA, 41 bp, Artificial Sequence
  Synthetic
ccacgcccctaagtgcaaaccttgtgatcccactacgaacg

SEQ ID NO: 4916 - DNA, 41 bp, Artificial Sequence
  Synthetic
gtaccgctccccatgactcccagacccccacaagaggttag

SEQ ID NO: 4917 - DNA, 42 bp, Artificial Sequence
  Synthetic
tccctctcccaggaggaaacgggccaaagcggtagaaacaac

SEQ ID NO: 4918 - DNA, 40 bp, Artificial Sequence
  Synthetic
gcttgtaacaccttgcgcggtgaattgctcagggggctaa

SEQ ID NO: 4919 - DNA, 42 bp, Artificial Sequence
  Synthetic
taaccacatcagctccgtgtggtggccatgattgttgttgga

SEQ ID NO: 4920 - DNA, 40 bp, Artificial Sequence
  Synthetic
accgaaaaggacatcagggtcgatgactttgcgggcttcg

SEQ ID NO: 4921 - DNA, 35 bp, Artificial Sequence
  Synthetic
aggaggacaaccgagccctagcgtcacctggggga

SEQ ID NO: 4922 - DNA, 40 bp, Artificial Sequence
  Synthetic
atcgggttggtttacggtaggcggtcgggcatgagacatg

SEQ ID NO: 4923 - DNA, 45 bp, Artificial Sequence
  Synthetic
atacatatactgtgatcatgggcgttgattttcgtgagatccact

SEQ ID NO: 4924 - DNA, 42 bp, Artificial Sequence
  Synthetic
gagtacaacaaatcacactcgggcataacacacaacagcgtt

SEQ ID NO: 4925 - DNA, 42 bp, Artificial Sequence
  Synthetic
tatgggtgtgttcgggcaaatactgtgtaacctgatcttcct

SEQ ID NO: 4926 - DNA, 45 bp, Artificial Sequence
  Synthetic
gatggggtcttcaaaactactcttcgtgatccagaccaatgtgta

SEQ ID NO: 4927 - DNA, 49 bp, Artificial Sequence
  Synthetic
actgatccagatacatacaccagtgaagtataagagaagtttgatacca

SEQ ID NO: 4928 - DNA, 43 bp, Artificial Sequence
  Synthetic
gttgagaaaacgaaacagacggtgggactttttgtgtgtgttt

SEQ ID NO: 4929 - DNA, 43 bp, Artificial Sequence
  Synthetic
aagtgcttcaaaccccagtgttaaggcacactaaaccttgatg

SEQ ID NO: 4930 - DNA, 44 bp, Artificial Sequence
  Synthetic
acatcaatagggcgcacaaatcctttcctcttcttaattactgg

SEQ ID NO: 4931 - DNA, 44 bp, Artificial Sequence
  Synthetic
attaccccataatttgcgaaaagcacttgggtaataagggcttc

SEQ ID NO: 4932 - DNA, 39 bp, Artificial Sequence
  Synthetic
gttggagtgtatcgcagaggaagtgaacccgacaccaaa

SEQ ID NO: 4933 - DNA, 45 bp, Artificial Sequence
  Synthetic
tgtacatttccaaacactttcaggtactttctgaaccatccatca

SEQ ID NO: 4934 - DNA, 44 bp, Artificial Sequence
  Synthetic
tgcaattgcagaacacttcaattccatcaaagtgcttgggatct

SEQ ID NO: 4935 - DNA, 44 bp, Artificial Sequence
  Synthetic
ctaagccccccaacaatcttgtgcaaacatatatctaggtcaaa

SEQ ID NO: 4936 - DNA, 45 bp, Artificial Sequence
  Synthetic
atgattatgcaacaaaaactgggcaccaaagatcttaccagtagc

SEQ ID NO: 4937 - DNA, 49 bp, Artificial Sequence
  Synthetic
aacctgctgtattgagtgacaatgcccttgtacttagagaataatgatt

SEQ ID NO: 4938 - DNA, 43 bp, Artificial Sequence
  Synthetic
acaaagcattccatcaaaatcccgcacatcaggatcacaaccc

SEQ ID NO: 4939 - DNA, 48 bp, Artificial Sequence
  Synthetic
aagagatacttcaagcctgatcaacatgtatatctttcatgggcataa

SEQ ID NO: 4940 - DNA, 42 bp, Artificial Sequence
  Synthetic
tcattggtcgagagaaccacgctcgaccgaaatccacgaaag

SEQ ID NO: 4941 - DNA, 41 bp, Artificial Sequence
  Synthetic
ttgcagatgcagcaagtgtggagcataaaagcgctcgtggt

SEQ ID NO: 4942 - DNA, 40 bp, Artificial Sequence
  Synthetic
agtggaacgtggacgacctcaatcgtcaagcactgcgtac

SEQ ID NO: 4943 - DNA, 39 bp, Artificial Sequence
  Synthetic
ccggggttgagtgtgactgttcactgccaagctggacac

SEQ ID NO: 4944 - DNA, 38 bp, Artificial Sequence
  Synthetic
aagtgaaaacaacgcggcgcgaacgcctgcagatcgac

SEQ ID NO: 4945 - DNA, 46 bp, Artificial Sequence
  Synthetic
aagcaattgagtcttgtatggaagggcttcaaattttgcactaagc

SEQ ID NO: 4946 - DNA, 40 bp, Artificial Sequence
  Synthetic
caggctttgtgtagttgcaacagtcacgaaaaagcagtcg

SEQ ID NO: 4947 - DNA, 42 bp, Artificial Sequence
  Synthetic
agaagatgaagctacaaatgctgcttaaggagctctgcgtcc

SEQ ID NO: 4948 - DNA, 47 bp, Artificial Sequence
  Synthetic
catcagctagcttcacaggcaggagtcttctgttaattgattgtcat

SEQ ID NO: 4949 - DNA, 43 bp, Artificial Sequence
  Synthetic
agtaggatttttggatgatgccactccatctaatgcatttcgc

SEQ ID NO: 4950 - DNA, 38 bp, Artificial Sequence
  Synthetic
acctacaccaagaccccgcaagtgcttgcctcctcctg

SEQ ID NO: 4951 - DNA, 43 bp, Artificial Sequence
  Synthetic
tgaaagacttgaagaggaagctaggtaatggattagcaggccc

SEQ ID NO: 4952 - DNA, 39 bp, Artificial Sequence
  Synthetic
tcgcagacgaataaaacgagcatcaccaccttggacaca

SEQ ID NO: 4953 - DNA, 41 bp, Artificial Sequence
  Synthetic
taggccacgtcctaccatacccgcaacaggaaggacgtctg

SEQ ID NO: 4954 - DNA, 44 bp, Artificial Sequence
  Synthetic
gggacctttaagaagtacaccttttctgatataaatctcgcgcc

SEQ ID NO: 4955 - DNA, 42 bp, Artificial Sequence
  Synthetic
tattgcatttacagaacagccacgtaagcggcttacacgaat

SEQ ID NO: 4956 - DNA, 46 bp, Artificial Sequence
  Synthetic
atcagatgttcattgttggttgtgccacatggtttagctaaatccc

SEQ ID NO: 4957 - DNA, 49 bp, Artificial Sequence
  Synthetic
agatgtttcttttatggcaagagggtactccatctttacaaaacatgtg

SEQ ID NO: 4958 - DNA, 41 bp, Artificial Sequence
  Synthetic
taataggccattttgggtgcacaaagttcgtttccccatgc

SEQ ID NO: 4959 - DNA, 45 bp, Artificial Sequence
  Synthetic
tgtaccaactaggaatgctcacaggagtactggatgtataggtat

SEQ ID NO: 4960 - DNA, 43 bp, Artificial Sequence
  Synthetic
cgaaatcggtcgcttgtatagcacaaagtaaagtgtgccaaat

SEQ ID NO: 4961 - DNA, 41 bp, Artificial Sequence
  Synthetic
aacctaatgcaacctcgccagcgctggatgggatggttcca

SEQ ID NO: 4962 - DNA, 37 bp, Artificial Sequence
  Synthetic
gggccggctgctaattgccgcagtaagtgcggtcagc

SEQ ID NO: 4963 - DNA, 35 bp, Artificial Sequence
  Synthetic
ccccctggcacataccgcaaccacaacgcgcctgc

SEQ ID NO: 4964 - DNA, 42 bp, Artificial Sequence
  Synthetic
tgttccttacccccggtctacctggaaatagggagggggtac

SEQ ID NO: 4965 - DNA, 40 bp, Artificial Sequence
  Synthetic
ttaccatctgccaccagcggtacttctgagcatgctcccg

SEQ ID NO: 4966 - DNA, 41 bp, Artificial Sequence
  Synthetic
ggactgcgattcgtaaggcggggttgtaggaaacaggtgca

SEQ ID NO: 4967 - DNA, 39 bp, Artificial Sequence
  Synthetic
ctgccctccaaccgctttacctttactgtggcggtcagc

SEQ ID NO: 4968 - DNA, 35 bp, Artificial Sequence
  Synthetic
ctgggctggaggtgcgctacgggggcaaaaaccgc

SEQ ID NO: 4969 - DNA, 39 bp, Artificial Sequence
  Synthetic
attcgccggctcgctgttttggtcaacattagacgcgtt

SEQ ID NO: 4970 - DNA, 38 bp, Artificial Sequence
  Synthetic
gacttgctcccgcctcggtagcacctggtatatgccgg

SEQ ID NO: 4971 - DNA, 38 bp, Artificial Sequence
  Synthetic
cttgactcagccacagacgtcgactgcacaacgccggg

SEQ ID NO: 4972 - DNA, 36 bp, Artificial Sequence
  Synthetic
gatgaggccccgtcccttccaaggtggacggtggcg

SEQ ID NO: 4973 - DNA, 38 bp, Artificial Sequence
  Synthetic
ggtcgttgttctggggtgagcgttggcggccttagctg

SEQ ID NO: 4974 - DNA, 40 bp, Artificial Sequence
  Synthetic
tccttgctggtggcgaaattggattggcgtcaggattgcc

SEQ ID NO: 4975 - DNA, 38 bp, Artificial Sequence
  Synthetic
gtaaccgcgacgtgtccagggtctcccccgtggtgaat

SEQ ID NO: 4976 - DNA, 39 bp, Artificial Sequence
  Synthetic
gaagcagctccgcctcgctcatccacacacatctgagct

SEQ ID NO: 4977 - DNA, 35 bp, Artificial Sequence
  Synthetic
gccgctgcctcacgtcgtaagcgaccgcggttagc

SEQ ID NO: 4978 - DNA, 38 bp, Artificial Sequence
  Synthetic
ttactccagcactgcccgtcatggtgagctcggcagtc

SEQ ID NO: 4979 - DNA, 41 bp, Artificial Sequence
  Synthetic
ttggttaatgtagcgaccggcgtgtgaccttggtccagtcg

SEQ ID NO: 4980 - DNA, 39 bp, Artificial Sequence
  Synthetic
ggccccgtctctatttccgctcctcaagcaatgctagcg

SEQ ID NO: 4981 - DNA, 41 bp, Artificial Sequence
  Synthetic
acttgacgttcgtaatgggcttaaaaaatccgttggtcgtc

SEQ ID NO: 4982 - DNA, 47 bp, Artificial Sequence
  Synthetic
tctcgtgtatgtctaacgatgttccaaacatctttgaattgtttcca

SEQ ID NO: 4983 - DNA, 43 bp, Artificial Sequence
  Synthetic
gtattaacgcattgcccagttgaattgaagtttggtttacgcg

SEQ ID NO: 4984 - DNA, 39 bp, Artificial Sequence
  Synthetic
acaaacaatggtagaccgcgcatacgaaactgtgcaagc

SEQ ID NO: 4985 - DNA, 47 bp, Artificial Sequence
  Synthetic
gttgcaaaaacaaagacagtttgaaggaatacgttcaattaaagctc

SEQ ID NO: 4986 - DNA, 39 bp, Artificial Sequence
  Synthetic
ccagctccggattatgtggtcgatgtacggcaaatcaat

SEQ ID NO: 4987 - DNA, 38 bp, Artificial Sequence
  Synthetic
cgatgaacaccgttttgcactaggccaacgttttccac

SEQ ID NO: 4988 - DNA, 38 bp, Artificial Sequence
  Synthetic
ggcaccactggattccgtttagtaaatttgggacgccg

SEQ ID NO: 4989 - DNA, 42 bp, Artificial Sequence
  Synthetic
ctagctcctgcaaactttctggaagccagtttttcattggtg

SEQ ID NO: 4990 - DNA, 41 bp, Artificial Sequence
  Synthetic
gtgtgcacaccgttgcatttaaggctgttatcatctgatcg

SEQ ID NO: 4991 - DNA, 43 bp, Artificial Sequence
  Synthetic
ctgcttcttccggtgaatattcaagccctgaattaaaaaaggc

SEQ ID NO: 4992 - DNA, 42 bp, Artificial Sequence
  Synthetic
caccgttgcctttactgtaagtatgttacaaaatacgcacgc

SEQ ID NO: 4993 - DNA, 38 bp, Artificial Sequence
  Synthetic
actctgggaatcggggggaggtcggtggcgctgtatgc

SEQ ID NO: 4994 - DNA, 37 bp, Artificial Sequence
  Synthetic
ccggtattcacggggcgacaacaccgtgtgtacccgc

SEQ ID NO: 4995 - DNA, 38 bp, Artificial Sequence
  Synthetic
cgatccgggccaagggcttgataattcccccggtgtcg

SEQ ID NO: 4996 - DNA, 36 bp, Artificial Sequence
  Synthetic
tgggcgggtatcatcggtcttcggacagcgttcccg

SEQ ID NO: 4997 - DNA, 46 bp, Artificial Sequence
  Synthetic
agctagaacgattcgcagttaatccagtatttgtctacagccttct

SEQ ID NO: 4998 - DNA, 39 bp, Artificial Sequence
  Synthetic
agcaatcaggtcagccaaaatgcctgatgtaccatttgc

SEQ ID NO: 4999 - DNA, 43 bp, Artificial Sequence
  Synthetic
gagagaaccaaggggaagtgaccatcctatttgttcctgaagg

SEQ ID NO: 5000 - DNA, 39 bp, Artificial Sequence
  Synthetic
ggaccagcggctacactagaagccaaaactcttgcctta

SEQ ID NO: 5001 - DNA, 50 bp, Artificial Sequence
  Synthetic
gtagcatgacaaaaatcttagagcctgtattgatagataactatgtctgg

SEQ ID NO: 5002 - DNA, 47 bp, Artificial Sequence
  Synthetic
gttagtggggaaattgaattgggcaggagtttacataattgccttac

SEQ ID NO: 5003 - DNA, 42 bp, Artificial Sequence
  Synthetic
aaactgcccatacaaaaggaaacaactcaggaatccaggtgg

SEQ ID NO: 5004 - DNA, 43 bp, Artificial Sequence
  Synthetic
ctagtgattttaacctgccacctctgacatttatcacagctgg

SEQ ID NO: 5005 - DNA, 43 bp, Artificial Sequence
  Synthetic
atacatactgacaatggcagcaattattcctgcttgattcccg

SEQ ID NO: 5006 - DNA, 45 bp, Artificial Sequence
  Synthetic
aggggatgctagattggtaataacaaaatgccagtctctttctcc

SEQ ID NO: 5007 - DNA, 43 bp, Artificial Sequence
  Synthetic
aacaccaaaaaagataaagccacctttctggggcttgttccat

SEQ ID NO: 5008 - DNA, 44 bp, Artificial Sequence
  Synthetic
acaactgctgtttatccattttcagtctgtcgagtaacgcctat

SEQ ID NO: 5009 - DNA, 41 bp, Artificial Sequence
  Synthetic
acagaggtacataatgtttgggctacttcttgtgggttggg

SEQ ID NO: 5010 - DNA, 44 bp, Artificial Sequence
  Synthetic
ctgctgttaaatggcagtctagctgtccgtgaaattgacagatc

SEQ ID NO: 5011 - DNA, 45 bp, Artificial Sequence
  Synthetic
tggtggtaatagcaacaatgagtcccacttctccaattgtccctc

SEQ ID NO: 5012 - DNA, 42 bp, Artificial Sequence
  Synthetic
gttgcaactcacagtctggggcggtatctttccacagccagg

SEQ ID NO: 5013 - DNA, 41 bp, Artificial Sequence
  Synthetic
agcagctaccaatgctgcttgtggaaaacccacctcctcct

SEQ ID NO: 5014 - DNA, 38 bp, Artificial Sequence
  Synthetic
agggactttccgctggggactgcaggatctgagggctc

SEQ ID NO: 5015 - DNA, 40 bp, Artificial Sequence
  Synthetic
acgaccttcaccgcgactccgcctcgaacatctccgtgtc

SEQ ID NO: 5016 - DNA, 37 bp, Artificial Sequence
  Synthetic
gagcgcgtgatggtcatcgcccatggccatcaacgcc

SEQ ID NO: 5017 - DNA, 36 bp, Artificial Sequence
  Synthetic
cgctctcaaacacctccccgagggcctttctggggc

SEQ ID NO: 5018 - DNA, 39 bp, Artificial Sequence
  Synthetic
taacgtcaaggtcgtcgtcgggttaagcacctgggcccg

SEQ ID NO: 5019 - DNA, 35 bp, Artificial Sequence
  Synthetic
ggtccgaaacgtcccgtcgaacagccaggtcgcgg

SEQ ID NO: 5020 - DNA, 42 bp, Artificial Sequence
  Synthetic
tccttgtgggacgagaacagccaagttacatcaccaacccgg

SEQ ID NO: 5021 - DNA, 37 bp, Artificial Sequence
  Synthetic
cgttgagggtctgcacgcacggcgtatctcatcaccg

SEQ ID NO: 5022 - DNA, 42 bp, Artificial Sequence
  Synthetic
ggtgcgctgcttcaagattctgccgctagagtacgagatcga

SEQ ID NO: 5023 - DNA, 35 bp, Artificial Sequence
  Synthetic
ccacgccctcgctgttcgtaagggagacgcgtggc

SEQ ID NO: 5024 - DNA, 40 bp, Artificial Sequence
  Synthetic
cactggtacatggcccactaccgcaaaacagggccgagag

SEQ ID NO: 5025 - DNA, 37 bp, Artificial Sequence
  Synthetic
gagcgcggccccagacttacctggcccatgatgcagg

SEQ ID NO: 5026 - DNA, 41 bp, Artificial Sequence
  Synthetic
ctgcatgtagcggtcgtagtggcgaacctttagccccgagg

SEQ ID NO: 5027 - DNA, 39 bp, Artificial Sequence
  Synthetic
gctctccggcggcgttgatggcggctttacgaccactac

SEQ ID NO: 5028 - DNA, 39 bp, Artificial Sequence
  Synthetic
gagagtccgtacccgccccacatgaactacgggccggac

SEQ ID NO: 5029 - DNA, 36 bp, Artificial Sequence
  Synthetic
ggggtgagcgagtggagcacgttgccaggttctgcc

SEQ ID NO: 5030 - DNA, 35 bp, Artificial Sequence
  Synthetic
cggagaacgcgaggcccatcgaaacagccgcctgg

SEQ ID NO: 5031 - DNA, 37 bp, Artificial Sequence
  Synthetic
cgtgcttcagggggcggttcaccggagctctcggtaa

SEQ ID NO: 5032 - DNA, 39 bp, Artificial Sequence
  Synthetic
cgaagagcgcactcccccaaaaagagtggtttgccgtgg

SEQ ID NO: 5033 - DNA, 40 bp, Artificial Sequence
  Synthetic
aaaggcgccaacaaacctaggaccagaccctgcagctaca

SEQ ID NO: 5034 - DNA, 35 bp, Artificial Sequence
  Synthetic
gcgggacttcgcccagttccgtagtctccgcgaga

SEQ ID NO: 5035 - DNA, 38 bp, Artificial Sequence
  Synthetic
gtttgcctccagccacaacacaccggggaaacaggcac

SEQ ID NO: 5036 - DNA, 36 bp, Artificial Sequence
  Synthetic
ggacaaggccgggtcccgtatcagcctcgcagaccc

SEQ ID NO: 5037 - DNA, 40 bp, Artificial Sequence
  Synthetic
ctcccggaaggtattgctcgcagcttcatggagggcagcc

SEQ ID NO: 5038 - DNA, 39 bp, Artificial Sequence
  Synthetic
cggcgtagatgcgcttctcccggatctggtggccatagg

SEQ ID NO: 5039 - DNA, 35 bp, Artificial Sequence
  Synthetic
ccggcggacgcgactaacagttggtcgggttgccc

SEQ ID NO: 5040 - DNA, 36 bp, Artificial Sequence
  Synthetic
caagggggtgtgggtgacgaagccccggatcctcgt

SEQ ID NO: 5041 - DNA, 37 bp, Artificial Sequence
  Synthetic
gtccgccgggatgtcggatgagggcgggttcatcctg

SEQ ID NO: 5042 - DNA, 37 bp, Artificial Sequence
  Synthetic
cgtactaccctttcgacgcgctcctggagtcggcgac

SEQ ID NO: 5043 - DNA, 35 bp, Artificial Sequence
  Synthetic
gtgcgccgtgctgtgtctgatcgcgatcgggggag

SEQ ID NO: 5044 - DNA, 36 bp, Artificial Sequence
  Synthetic
gctgggcatgctgatcccggtccaatccggacgccc

SEQ ID NO: 5045 - DNA, 39 bp, Artificial Sequence
  Synthetic
gtgacgtcggcgcgactcagggctacgtgtacttcgagg

SEQ ID NO: 5046 - DNA, 35 bp, Artificial Sequence
  Synthetic
aggagccccacgttctcgaacagcttcgcccagcc

SEQ ID NO: 5047 - DNA, 37 bp, Artificial Sequence
  Synthetic
gggcggtccagaaccactgctttcccaacggcaagcc

SEQ ID NO: 5048 - DNA, 37 bp, Artificial Sequence
  Synthetic
acaacccccacctcgctcagtacgtatggcgctgagc

SEQ ID NO: 5049 - DNA, 39 bp, Artificial Sequence
  Synthetic
agcgacgtcgagtttaactgcaggcaggtcacacatggc

SEQ ID NO: 5050 - DNA, 39 bp, Artificial Sequence
  Synthetic
ggaacgcgtaatcggccaccgcaccatcgagctgtacaa

SEQ ID NO: 5051 - DNA, 37 bp, Artificial Sequence
  Synthetic
ttcggtgctgtttcaggggtttgctccgccgtgatcg

SEQ ID NO: 5052 - DNA, 35 bp, Artificial Sequence
  Synthetic
gctttgtgcgcatgccccgtgcgaacggcgtcctc

SEQ ID NO: 5053 - DNA, 40 bp, Artificial Sequence
  Synthetic
cttcgcccaccgattcctgtccaacaatctgtcgacagga

SEQ ID NO: 5054 - DNA, 34 bp, Artificial Sequence
  Synthetic
gtatgcgacgcggctggtatacaggcgggcggac

SEQ ID NO: 5055 - DNA, 36 bp, Artificial Sequence
  Synthetic
tggtggcggcgcacaacattccaggtacacgcacgc

SEQ ID NO: 5056 - DNA, 38 bp, Artificial Sequence
  Synthetic
cacacggcgtgcctgaagagttcaggtcccggaactcg

SEQ ID NO: 5057 - DNA, 37 bp, Artificial Sequence
  Synthetic
gcgagcaccgaccccctagatggggcacaccggaatc

SEQ ID NO: 5058 - DNA, 42 bp, Artificial Sequence
  Synthetic
aggacgtctccaagctctccgacgacaggaaggcaaacagaa

SEQ ID NO: 5059 - DNA, 36 bp, Artificial Sequence
  Synthetic
gcgacgtccggcgacatagtcgtgcaggtccccaac

SEQ ID NO: 5060 - DNA, 39 bp, Artificial Sequence
  Synthetic
cgctatcgtcggctgcggttggaaaagaagacaaccggc

SEQ ID NO: 5061 - DNA, 36 bp, Artificial Sequence
  Synthetic
caggtcgaggatcgcgtcgcagacgctgcagcaggg

SEQ ID NO: 5062 - DNA, 38 bp, Artificial Sequence
  Synthetic
gggggcggagtcgttcaacctgccggggtaaaatccac

SEQ ID NO: 5063 - DNA, 39 bp, Artificial Sequence
  Synthetic
tgcgttatcacctcctcgctcgatacaacggctcggccc

SEQ ID NO: 5064 - DNA, 35 bp, Artificial Sequence
  Synthetic
cggctccctgacgatgcgtcggtccaacagcaccg

SEQ ID NO: 5065 - DNA, 38 bp, Artificial Sequence
  Synthetic
ttttcgagaagaaggcgtcgcgtccgtcagggtctcgc

SEQ ID NO: 5066 - DNA, 38 bp, Artificial Sequence
  Synthetic
cgcctatgcgcgtccctgtggcaggcggttgttatcgc

SEQ ID NO: 5067 - DNA, 39 bp, Artificial Sequence
  Synthetic
acgacgatgcatgttcggcgcaaaagataggtcgccggg

SEQ ID NO: 5068 - DNA, 37 bp, Artificial Sequence
  Synthetic
gttcgaggcggatccggtcagcccacgatgacgccaa

SEQ ID NO: 5069 - DNA, 34 bp, Artificial Sequence
  Synthetic
tggcaggccgaaaacgccataactccgcgcggcc

SEQ ID NO: 5070 - DNA, 36 bp, Artificial Sequence
  Synthetic
cggtcgtagtccaacgtgcctagtggtcggcgtggg

SEQ ID NO: 5071 - DNA, 34 bp, Artificial Sequence
  Synthetic
gcatgccccgcaaaacgccccaccacaacacggc

SEQ ID NO: 5072 - DNA, 36 bp, Artificial Sequence
  Synthetic
atgcagaaggggtgcaggcaacggacgagatcgccc

SEQ ID NO: 5073 - DNA, 37 bp, Artificial Sequence
  Synthetic
ggggcggggtttgttgtgagaacgcagctgtcttcgc

SEQ ID NO: 5074 - DNA, 36 bp, Artificial Sequence
  Synthetic
ctccccagagcctgctggttgggtcgtgccatccga

SEQ ID NO: 5075 - DNA, 39 bp, Artificial Sequence
  Synthetic
tttcgcgggaagaaccttccggaacacgcttcaccccgg

SEQ ID NO: 5076 - DNA, 39 bp, Artificial Sequence
  Synthetic
ccatcggaggccccccagattgtacgtgtgctttcgggc

SEQ ID NO: 5077 - DNA, 37 bp, Artificial Sequence
  Synthetic
gggtggcgctctctgccaatcgcaggagccgtagtcc

SEQ ID NO: 5078 - DNA, 40 bp, Artificial Sequence
  Synthetic
cgatcctgccgctcgttcgacgagtcgaaatcccacacag

SEQ ID NO: 5079 - DNA, 39 bp, Artificial Sequence
  Synthetic
acgaagtgtcttgtgcagccaaaggtcgctgaggctctg

SEQ ID NO: 5080 - DNA, 45 bp, Artificial Sequence
  Synthetic
aatcgtgcgtaaattgctataccccaatttcttgcaggtcaacac

SEQ ID NO: 5081 - DNA, 41 bp, Artificial Sequence
  Synthetic
caggcactcctggtcaacagtcgccattctgctcgacacag

SEQ ID NO: 5082 - DNA, 43 bp, Artificial Sequence
  Synthetic
tttgctgcgacaacaatgccgaacagtataatgccatcattgt

SEQ ID NO: 5083 - DNA, 41 bp, Artificial Sequence
  Synthetic
gtggtgtctaatcagcagacagacagatcgttgtccagtgc

SEQ ID NO: 5084 - DNA, 41 bp, Artificial Sequence
  Synthetic
tggaccatggggaagctgattgatacctcagaaaatgcaca

SEQ ID NO: 5085 - DNA, 39 bp, Artificial Sequence
  Synthetic
gggcacggtgctgtctaatagatgttttggtccgcgtac

SEQ ID NO: 5086 - DNA, 44 bp, Artificial Sequence
  Synthetic
tgaatggtataaagctagaggtggcacagactcgtggtcaatgt

SEQ ID NO: 5087 - DNA, 38 bp, Artificial Sequence
  Synthetic
aaggtactacgaccgcaggggtttaggggctggggcga

SEQ ID NO: 5088 - DNA, 39 bp, Artificial Sequence
  Synthetic
aagggttaaacgcgctaatccaacatcgggtggacaatc

SEQ ID NO: 5089 - DNA, 38 bp, Artificial Sequence
  Synthetic
ggtccccgggatattttgccaaacacggggtgccatgg

SEQ ID NO: 5090 - DNA, 40 bp, Artificial Sequence
  Synthetic
ggcgaggaggagactgccttatcgctcctgtataggcaca

SEQ ID NO: 5091 - DNA, 40 bp, Artificial Sequence
  Synthetic
gttagtcgcctggggcaacgagcctacctgaacaccagag

SEQ ID NO: 5092 - DNA, 49 bp, Artificial Sequence
  Synthetic
ttgagcaagacataggactaaccggcagttaataaatctatttcctgca

SEQ ID NO: 5093 - DNA, 39 bp, Artificial Sequence
  Synthetic
cactgaccgtttgcttactgtgaccacctctttgccatc

SEQ ID NO: 5094 - DNA, 39 bp, Artificial Sequence
  Synthetic
actgaccaaggttcagactcaagcagctgtgtttgctta

SEQ ID NO: 5095 - DNA, 43 bp, Artificial Sequence
  Synthetic
cataggcctgggaaacttgaatcacaatatctaatggggcatc

SEQ ID NO: 5096 - DNA, 41 bp, Artificial Sequence
  Synthetic
gaggagtttcagcttgcctttaaattctcaggggtaaggtc

SEQ ID NO: 5097 - DNA, 45 bp, Artificial Sequence
  Synthetic
tgatctacgggatcgtatgacagagaaacaaaaacttcctgccaa

SEQ ID NO: 5098 - DNA, 41 bp, Artificial Sequence
  Synthetic
actgaaacggtgtgtactgccacgcctaaatccttgcgctt

SEQ ID NO: 5099 - DNA, 43 bp, Artificial Sequence
  Synthetic
agaatgcacctgttttaattgtggtaaaggccccaatacctcc

SEQ ID NO: 5100 - DNA, 46 bp, Artificial Sequence
  Synthetic
tcgaaaaaacatcaaaagacgcttgatttgtagcttcatcttcctc

SEQ ID NO: 5101 - DNA, 50 bp, Artificial Sequence
  Synthetic
ttgctttctcaaattgaacattggacttttctagcatagtataaagtcac

SEQ ID NO: 5102 - DNA, 45 bp, Artificial Sequence
  Synthetic
acttgggaaatttgggtattggtacgcagcaggtgtaataggttt

SEQ ID NO: 5103 - DNA, 42 bp, Artificial Sequence
  Synthetic
tacacaaatcccgcctttgatccaaaatctggatctggtgca

SEQ ID NO: 5104 - DNA, 46 bp, Artificial Sequence
  Synthetic
agaactacagcctttagggtcttactttctgcaagattatccacta

SEQ ID NO: 5105 - DNA, 48 bp, Artificial Sequence
  Synthetic
tgttggacatccatactttgaagtgctaactttaggaacttctacagc

SEQ ID NO: 5106 - DNA, 44 bp, Artificial Sequence
  Synthetic
aatccaaatcagtatcctccagaggatcatgtgctacgtccatg

SEQ ID NO: 5107 - DNA, 41 bp, Artificial Sequence
  Synthetic
ggtcttagcctggtttggagaagctcaaactcaaaccgtgc

SEQ ID NO: 5108 - DNA, 43 bp, Artificial Sequence
  Synthetic
ctggaaaggtttgtgtagacagttgatatcacgcaaagtaggt

SEQ ID NO: 5109 - DNA, 38 bp, Artificial Sequence
  Synthetic
tgctgtttgcagaacttggtgatctgccatggcgatag

SEQ ID NO: 5110 - DNA, 40 bp, Artificial Sequence
  Synthetic
agctgattgatgatgccgatggtcttctgtaacctgctgg

SEQ ID NO: 5111 - DNA, 43 bp, Artificial Sequence
  Synthetic
agaaacatctgtggtggaaaagcactacaccgtaacagttcaa

SEQ ID NO: 5112 - DNA, 44 bp, Artificial Sequence
  Synthetic
acaatgggcatttgacaatgacacatctgcagctaaagcataat

SEQ ID NO: 5113 - DNA, 41 bp, Artificial Sequence
  Synthetic
agacttgagaaaagaggatggcgtcgaaacgctctgtcaga

SEQ ID NO: 5114 - DNA, 40 bp, Artificial Sequence
  Synthetic
cgcagagcctcagccctagagaggtttccgaagacgagga

SEQ ID NO: 5115 - DNA, 42 bp, Artificial Sequence
  Synthetic
cgcgacttcaacgacttcaagcagtttgcaggaccttgaaca

SEQ ID NO: 5116 - DNA, 39 bp, Artificial Sequence
  Synthetic
aaacgggacactgctgaaaatatcaggagggcatgtacc

SEQ ID NO: 5117 - DNA, 43 bp, Artificial Sequence
  Synthetic
gtggtacaacccactgttaaacctgtctagagggacaccaaat

SEQ ID NO: 5118 - DNA, 44 bp, Artificial Sequence
  Synthetic
aactctaggggctacaggaggaaggtgtaatttctaataaggct

SEQ ID NO: 5119 - DNA, 44 bp, Artificial Sequence
  Synthetic
tctttgcaaagaactagcacaccccataaagttctctgggtctt

SEQ ID NO: 5120 - DNA, 38 bp, Artificial Sequence
  Synthetic
tgctccagatcccgcctttacgtatatttccgctgggc

SEQ ID NO: 5121 - DNA, 45 bp, Artificial Sequence
  Synthetic
ttgatgtttttggtgacttcagtgacttcacgaaacacatcatcc

SEQ ID NO: 5122 - DNA, 49 bp, Artificial Sequence
  Synthetic
aattaggtgacactgaaaatcctgccattctgcctattatcattaccag

SEQ ID NO: 5123 - DNA, 43 bp, Artificial Sequence
  Synthetic
ttggggctgcaaacttcaaaacggccatttgcaagtttgatta

SEQ ID NO: 5124 - DNA, 45 bp, Artificial Sequence
  Synthetic
tgctttaattctactgactcatgggagctgacaacatgtatgagg

SEQ ID NO: 5125 - DNA, 40 bp, Artificial Sequence
  Synthetic
agactgactcaaatctggcagcactcccggtacatgagtg

SEQ ID NO: 5126 - DNA, 43 bp, Artificial Sequence
  Synthetic
aaatggactacatcaaggaaggaaaaatttgctgctcattgcc

SEQ ID NO: 5127 - DNA, 45 bp, Artificial Sequence
  Synthetic
tactggagtgagcaagaagaattcttcctttctgctgaataaagc

SEQ ID NO: 5128 - DNA, 46 bp, Artificial Sequence
  Synthetic
ttcaggatgtaagctttcaacatccttgttatggccgttttctcat

SEQ ID NO: 5129 - DNA, 49 bp, Artificial Sequence
  Synthetic
gaagggtttagtgtttgtgaaaacgccacatcaattaaatcttgtcttg

SEQ ID NO: 5130 - DNA, 47 bp, Artificial Sequence
  Synthetic
aagaatctagctgatgtggtatgcttttcaggtaaatcaagcaatga

SEQ ID NO: 5131 - DNA, 42 bp, Artificial Sequence
  Synthetic
atctgatgaggagacccaggacgcaactggtatctatttgga

SEQ ID NO: 5132 - DNA, 43 bp, Artificial Sequence
  Synthetic
caaggcttcaagcagtttcaattctgtcatcgaataagcgtct

SEQ ID NO: 5133 - DNA, 47 bp, Artificial Sequence
  Synthetic
aatacgtttttttgggggaaaagtttttagtatcttgcaatggttgt

SEQ ID NO: 5134 - DNA, 47 bp, Artificial Sequence
  Synthetic
attgggagctggttagaaaagagcccaagtctattatagccactctt

SEQ ID NO: 5135 - DNA, 40 bp, Artificial Sequence
  Synthetic
agaagaagaacagccaccgacgatcccacctgcgaaggag

SEQ ID NO: 5136 - DNA, 40 bp, Artificial Sequence
  Synthetic
attgctgcgcatttttggtagtaatacctgttgtgccctc

SEQ ID NO: 5137 - DNA, 49 bp, Artificial Sequence
  Synthetic
agagagctcactacctacagaatccaatttcacctgtaatattagcatc

SEQ ID NO: 5138 - DNA, 43 bp, Artificial Sequence
  Synthetic
ctggtgatgtaagtcttgaatttgcaatctggatcaggagccg

SEQ ID NO: 5139 - DNA, 48 bp, Artificial Sequence
  Synthetic
ctaatttaggggagtttagtggggactactgtatgcccagataaaatt

SEQ ID NO: 5140 - DNA, 47 bp, Artificial Sequence
  Synthetic
ttggaactcagttacattttcatgctttcatagtagggatggtctac

SEQ ID NO: 5141 - DNA, 48 bp, Artificial Sequence
  Synthetic
aaggtattcaaattggtagaggtgggctttgttaaataaaggatgacc

SEQ ID NO: 5142 - DNA, 45 bp, Artificial Sequence
  Synthetic
taatgctgttattcaggacggaacagttcttaaaatttgctgccc

SEQ ID NO: 5143 - DNA, 43 bp, Artificial Sequence
  Synthetic
tatggctcgtgaaggtaaaatggagcatttgtaggtggcaata

SEQ ID NO: 5144 - DNA, 46 bp, Artificial Sequence
  Synthetic
ctactgaaaatcctgctccagaaatcttgcaaatcaactaaccaaa

SEQ ID NO: 5145 - DNA, 39 bp, Artificial Sequence
  Synthetic
tctctcgaacggaagcggtacgccaaaataccagagacg

SEQ ID NO: 5146 - DNA, 48 bp, Artificial Sequence
  Synthetic
gtgcagaaattgtaagtcatgaaggcaaattaacaggcaataccaaat

SEQ ID NO: 5147 - DNA, 41 bp, Artificial Sequence
  Synthetic
aacttctgcttcaattcgcacaagacagatcacaggcaatt

SEQ ID NO: 5148 - DNA, 43 bp, Artificial Sequence
  Synthetic
ggaaattccctggcactatacaacaagtccccaatagctctgt

SEQ ID NO: 5149 - DNA, 44 bp, Artificial Sequence
  Synthetic
cccataacactgcgttgttggccaaataaatctttgaatttgcc

SEQ ID NO: 5150 - DNA, 46 bp, Artificial Sequence
  Synthetic
tcaagaggaagctagggatccacacattaaatctattcctccaaca

SEQ ID NO: 5151 - DNA, 42 bp, Artificial Sequence
  Synthetic
gcaaaggtcctgaaataactgtgaaagggtatgacatcagcg

SEQ ID NO: 5152 - DNA, 46 bp, Artificial Sequence
  Synthetic
aagaattatcaatcaagggcaacgagtctggatttctggtttgaac

SEQ ID NO: 5153 - DNA, 48 bp, Artificial Sequence
  Synthetic
atagggttttcagatttcatttgccctggattataaactttgggatct

SEQ ID NO: 5154 - DNA, 45 bp, Artificial Sequence
  Synthetic
atggagcctaagcaaaatcaattgtcccaatgttctcctattgtg

SEQ ID NO: 5155 - DNA, 48 bp, Artificial Sequence
  Synthetic
tcagattggaatgttaaatgggagcgcagattttttagaaactgaagt

SEQ ID NO: 5156 - DNA, 43 bp, Artificial Sequence
  Synthetic
atttggccagtattaatacccacacaggttgtaaagcgtccag

SEQ ID NO: 5157 - DNA, 42 bp, Artificial Sequence
  Synthetic
aaaacgtcaacaaaagccaggtatcttcccatgttctaggtg

SEQ ID NO: 5158 - DNA, 43 bp, Artificial Sequence
  Synthetic
attcctaactttgatggaaacgtcttgtcaaagttgctccacg

SEQ ID NO: 5159 - DNA, 42 bp, Artificial Sequence
  Synthetic
attcgttatggctaccgatgaaataatagggatcgagctggg

SEQ ID NO: 5160 - DNA, 40 bp, Artificial Sequence
  Synthetic
ggcggccaacccagcttatgcatgcgagtcttcacaccat

SEQ ID NO: 5161 - DNA, 41 bp, Artificial Sequence
  Synthetic
cgaatgttgaagcatgtggttactatggtggaattgcccag

SEQ ID NO: 5162 - DNA, 48 bp, Artificial Sequence
  Synthetic
ttaccattcacttggtagaacaggtctatgaaatttggtagcattgca

SEQ ID NO: 5163 - DNA, 45 bp, Artificial Sequence
  Synthetic
tggacggaactcttctaggcgtcctcaaatttataaattggtgag

SEQ ID NO: 5164 - DNA, 42 bp, Artificial Sequence
  Synthetic
ccacaagggttacccactactgtctgtcatctgtagtgagaa

SEQ ID NO: 5165 - DNA, 45 bp, Artificial Sequence
  Synthetic
ttgggtgaaatagctcagtactacatcctgtgtacatgagtgaaa

SEQ ID NO: 5166 - DNA, 46 bp, Artificial Sequence
  Synthetic
cattccatggacatcaggtgtaccccagcactagtataagtatcag

SEQ ID NO: 5167 - DNA, 47 bp, Artificial Sequence
  Synthetic
gctggcttggataatcacaggagacttgaaaggttaattttccaatc

SEQ ID NO: 5168 - DNA, 40 bp, Artificial Sequence
  Synthetic
tgcttctaaccccagtgtgtaaaagggacactaaacctgg

SEQ ID NO: 5169 - DNA, 40 bp, Artificial Sequence
  Synthetic
tggattccaagagcacctagagtctggggtagttagtgcg

SEQ ID NO: 5170 - DNA, 43 bp, Artificial Sequence
  Synthetic
acaggaagttctatcccatcatttgagtacgagctaccctcaa

SEQ ID NO: 5171 - DNA, 45 bp, Artificial Sequence
  Synthetic
agacaattggatttcattgctgatgtgctctccctaaactggtaa

SEQ ID NO: 5172 - DNA, 47 bp, Artificial Sequence
  Synthetic
aatcccactcaagagaaaagagagcttgtgacatttgttctaaccac

SEQ ID NO: 5173 - DNA, 42 bp, Artificial Sequence
  Synthetic
cgcgcattggcagaacatttaatgttttggatcaggaggtaa

SEQ ID NO: 5174 - DNA, 40 bp, Artificial Sequence
  Synthetic
atcttgaacccagaagctctgatgtgctgtgcatgcaaat

SEQ ID NO: 5175 - DNA, 47 bp, Artificial Sequence
  Synthetic
atgcccaaccaggtgataatgtggatctactagtttgtatttgtctt

SEQ ID NO: 5176 - DNA, 42 bp, Artificial Sequence
  Synthetic
atacaccaacaaccaggatgatctttttcctgttgtgcacaa

SEQ ID NO: 5177 - DNA, 46 bp, Artificial Sequence
  Synthetic
agtgtgttttacaatgtgttccctggtctagggtcattgtcattga

SEQ ID NO: 5178 - DNA, 49 bp, Artificial Sequence
  Synthetic
aaatcgaaacaaacaaatttgcagcgaaatctgaatacatgaagcatac

SEQ ID NO: 5179 - DNA, 39 bp, Artificial Sequence
  Synthetic
cctgttctcagcggtccaaatgggtcctcaatgcttaat

SEQ ID NO: 5180 - DNA, 43 bp, Artificial Sequence
  Synthetic
aggaattatttcacatcagaggtgttgatgtacacccccttca

SEQ ID NO: 5181 - DNA, 49 bp, Artificial Sequence
  Synthetic
ccaagacttgaaccacacaaatggcttagaagcatatctcctatctcaa

SEQ ID NO: 5182 - DNA, 43 bp, Artificial Sequence
  Synthetic
aagacatgaccaaagagttctttgattcctccactcctttggg

SEQ ID NO: 5183 - DNA, 42 bp, Artificial Sequence
  Synthetic
tgcccttaggatgaagtggatgccattatccttttgtctgcc

SEQ ID NO: 5184 - DNA, 38 bp, Artificial Sequence
  Synthetic
ggccccgttcacttcagaaactaagatctgcatggccc

SEQ ID NO: 5185 - DNA, 41 bp, Artificial Sequence
  Synthetic
acatgttggagagagaactggtcgatatacacgctgcttgt

SEQ ID NO: 5186 - DNA, 41 bp, Artificial Sequence
  Synthetic
agtacacagattggcgggatgttcttctgttgggttttgtc

SEQ ID NO: 5187 - DNA, 41 bp, Artificial Sequence
  Synthetic
cgaagagcaacagccattctaacccactcactatcagttgg

SEQ ID NO: 5188 - DNA, 44 bp, Artificial Sequence
  Synthetic
gtttcaaaactggggaattgaacctgtcaggcaatattccgatc

SEQ ID NO: 5189 - DNA, 46 bp, Artificial Sequence
  Synthetic
attcatcgtccatgatgtgggaattgatatgtgttaactagcactg

SEQ ID NO: 5190 - DNA, 44 bp, Artificial Sequence
  Synthetic
ctcttctctaactgtgaatgtgaggacaggagaattgcctctca

SEQ ID NO: 5191 - DNA, 45 bp, Artificial Sequence
  Synthetic
agtgagagggtattggagaggcaattgttactctatcacctttca

SEQ ID NO: 5192 - DNA, 43 bp, Artificial Sequence
  Synthetic
gacgatgagaattttcaagaacaggactcctctgcacactgta

SEQ ID NO: 5193 - DNA, 43 bp, Artificial Sequence
  Synthetic
tttctgaacaggtagaagtgcaaaactattacatgcggcactt

SEQ ID NO: 5194 - DNA, 38 bp, Artificial Sequence
  Synthetic
gggccctccagatccaccgacgctctgcgtctgtgctt

SEQ ID NO: 5195 - DNA, 44 bp, Artificial Sequence
  Synthetic
ggaggctcgggatccgtataccaacactttaatgtattctgagg

SEQ ID NO: 5196 - DNA, 40 bp, Artificial Sequence
  Synthetic
ggatacacaccttttggaggcaaattgcaggccttactgg

SEQ ID NO: 5197 - DNA, 45 bp, Artificial Sequence
  Synthetic
tggtgaacatccttccgttacattgtacttgaacatctatctgag

SEQ ID NO: 5198 - DNA, 40 bp, Artificial Sequence
  Synthetic
aaacgcaaacactcctcctctgaagataaagccgtccagt

SEQ ID NO: 5199 - DNA, 49 bp, Artificial Sequence
  Synthetic
taaagcaatagaggttccaaaggtggcaaatttattaggatcaggtaac

SEQ ID NO: 5200 - DNA, 46 bp, Artificial Sequence
  Synthetic
ctgcagaggtagatgacagtagaataaaaagctgattttgtttggg

SEQ ID NO: 5201 - DNA, 38 bp, Artificial Sequence; identical to SEQ ID NO: 4464
  Synthetic

SEQ ID NO: 5202 - DNA, 36 bp, Artificial Sequence
  Synthetic
ggtgtgcgcgccacaagaaaagatgggcgcgccttg

SEQ ID NO: 5203 - DNA, 41 bp, Artificial Sequence
  Synthetic
ttcacgctgctggcatcctgttccacatgtttgcggaaccc

SEQ ID NO: 5204 - DNA, 40 bp, Artificial Sequence
  Synthetic
cggtcactggggtgtcctgaaccttcaaccaattgcctga

SEQ ID NO: 5205 - DNA, 41 bp, Artificial Sequence
  Synthetic
tggggccctataacccacaagtgcatagtgccagcagtagg

SEQ ID NO: 5206 - DNA, 39 bp, Artificial Sequence
  Synthetic
gcttcaccaagacctgcggaggggcacaggagctggtta

SEQ ID NO: 5207 - DNA, 42 bp, Artificial Sequence
  Synthetic
cctctacggagtctcctcgagcatgaggacgacatactccca

SEQ ID NO: 5208 - DNA, 37 bp, Artificial Sequence
  Synthetic
tggaccctcatcttcctgtgctaggtgcatgcgggca

SEQ ID NO: 5209 - DNA, 41 bp, Artificial Sequence
  Synthetic
gtggcgacatcttgaggggtctgtcccagcagcaccaagtc

SEQ ID NO: 5210 - DNA, 39 bp, Artificial Sequence
  Synthetic
aagggcccgtatgccagatgtaagtgacctagcccccag

SEQ ID NO: 5211 - DNA, 40 bp, Artificial Sequence
  Synthetic
ggccctggacttcatccctgtggcgaggagttgtcggtaa

SEQ ID NO: 5212 - DNA, 39 bp, Artificial Sequence
  Synthetic
cagacccaacgacggtgcttggcgtagcgagcaccgtga

SEQ ID NO: 5213 - DNA, 38 bp, Artificial Sequence
  Synthetic
gacggacgcccttatgaccgtctaccacctgcgtcacg

SEQ ID NO: 5214 - DNA, 40 bp, Artificial Sequence
  Synthetic
cacggggtgcgcatggtatgggagtgtttaggtaggcacg

SEQ ID NO: 5215 - DNA, 42 bp, Artificial Sequence
  Synthetic
ctgggggctgtccaaaatgagaacttccaggtctgcagacat

SEQ ID NO: 5216 - DNA, 42 bp, Artificial Sequence
  Synthetic
tgcagaagaactgaaacccgctccacatgtgtttcctccaga

SEQ ID NO: 5217 - DNA, 38 bp, Artificial Sequence
  Synthetic
tcgtcgtgagcggcttagcccggcaaggatgtcaacaa

SEQ ID NO: 5218 - DNA, 40 bp, Artificial Sequence
  Synthetic
gttacgcaggctacaccagtggtctcgcagccatgaggac

SEQ ID NO: 5219 - DNA, 40 bp, Artificial Sequence
  Synthetic
tgtgcagcaacacttggcatggcacactagggctggtagt

SEQ ID NO: 5220 - DNA, 41 bp, Artificial Sequence
  Synthetic
tgttgtggggtctcagctccccagtgagcattgacgtgact

SEQ ID NO: 5221 - DNA, 38 bp, Artificial Sequence
  Synthetic
gttccctcctgctctcccgatcgtatccgggcatttgc

SEQ ID NO: 5222 - DNA, 42 bp, Artificial Sequence
  Synthetic
catctcctgacccgacaacagcggggcattgagctaaaggat

SEQ ID NO: 5223 - DNA, 40 bp, Artificial Sequence
  Synthetic
tgcgagaagatggcactctacgtgcagatcccatcacggt

SEQ ID NO: 5224 - DNA, 41 bp, Artificial Sequence
  Synthetic
gtggggtgctcactaccagtttgatgttggctgccctacac

SEQ ID NO: 5225 - DNA, 40 bp, Artificial Sequence
  Synthetic
gcgagctgcttgggagacagtgatgatgttgcccaaccac

SEQ ID NO: 5226 - DNA, 40 bp, Artificial Sequence
  Synthetic
ggcgccacccttaagagcttaccttgggcaatgagtttgg

SEQ ID NO: 5227 - DNA, 45 bp, Artificial Sequence
  Synthetic
gtaaggaagtgggccttaatggctttttcaattgctatgccattt

SEQ ID NO: 5228 - DNA, 45 bp, Artificial Sequence
  Synthetic
aagccgctcaagaattgttcaatttgctctgtttagttcatttcc

SEQ ID NO: 5229 - DNA, 44 bp, Artificial Sequence
  Synthetic
aattggagttcttatagctgacgcctcctcttttgccttctctc

SEQ ID NO: 5230 - DNA, 43 bp, Artificial Sequence
  Synthetic
aaagcctcagataaccaacaagatgagagtaagtctggcagcc

SEQ ID NO: 5231 - DNA, 44 bp, Artificial Sequence
  Synthetic
ccaccctcttaagttgagaaacaggagaaagcactgttgaaact

SEQ ID NO: 5232 - DNA, 43 bp, Artificial Sequence
  Synthetic
tatcagcagattggaagaagaaggtcatcttcttggcttgtcc

SEQ ID NO: 5233 - DNA, 49 bp, Artificial Sequence
  Synthetic
tttggagagaaggaagatgttatgcgctgttgaaattcaaataaagcag

SEQ ID NO: 5234 - DNA, 43 bp, Artificial Sequence
  Synthetic
agagttacttctgatccacgaaggaagatcgtctcctggaaca

SEQ ID NO: 5235 - DNA, 40 bp, Artificial Sequence
  Synthetic
ccatagcggttcagaaaatggccagttgctcgccaattag

SEQ ID NO: 5236 - DNA, 41 bp, Artificial Sequence
  Synthetic
ccagattgggttgctagacaaaaatcaaattggtctgcagc

SEQ ID NO: 5237 - DNA, 44 bp, Artificial Sequence
  Synthetic
agggtagtatgctttaaattcccaaaacatatacacaggctccc

SEQ ID NO: 5238 - DNA, 48 bp, Artificial Sequence
  Synthetic
aacaagcaatttccataagtctgacatgtttcttttccaaatggtgat

SEQ ID NO: 5239 - DNA, 45 bp, Artificial Sequence
  Synthetic
aaaacctacactatctcccctcccgtggttctagagtaagagctg

SEQ ID NO: 5240 - DNA, 42 bp, Artificial Sequence
  Synthetic
aaaacgcattccagcagtaaacaccccaacccatttaaacac

SEQ ID NO: 5241 - DNA, 43 bp, Artificial Sequence
  Synthetic
taggcctactgttcctgtagagcattatagctgatgcctctgg

SEQ ID NO: 5242 - DNA, 43 bp, Artificial Sequence
  Synthetic
ttttacaacaaccaaccagaaacgttcaaattgaacagcccga

SEQ ID NO: 5243 - DNA, 49 bp, Artificial Sequence
  Synthetic
tggttttacgtactggtagtagacattcctaattcaggtggtaaactag

SEQ ID NO: 5244 - DNA, 49 bp, Artificial Sequence
  Synthetic
agtttcaggcaatcagtttagagtgatctattaaagcaaacttgttagg

SEQ ID NO: 5245 - DNA, 44 bp, Artificial Sequence
  Synthetic
atatgccagacatttttggacacggagcatgtggttcaggtatg

SEQ ID NO: 5246 - DNA, 42 bp, Artificial Sequence
  Synthetic
atcaatgctatgaatccaggcattgtcctcaataccggatgg

SEQ ID NO: 5247 - DNA, 41 bp, Artificial Sequence
  Synthetic
cacttgtccatttgtgtcattcgtgtttgttttgacagccg

SEQ ID NO: 5248 - DNA, 40 bp, Artificial Sequence
  Synthetic
tccatggggccaaagaaatagctatgaggcccatgcaact

SEQ ID NO: 5249 - DNA, 43 bp, Artificial Sequence
  Synthetic
ctatcgactcttcaaacacggcatagactcaggtactccttcc

SEQ ID NO: 5250 - DNA, 46 bp, Artificial Sequence
  Synthetic
cgagaacgaaaatgacagtgatacactgtttctgcctgtgttaaat

SEQ ID NO: 5251 - DNA, 38 bp, Artificial Sequence
  Synthetic
tacaggtagaagggcgccatccccacttccaccactat

SEQ ID NO: 5252 - DNA, 49 bp, Artificial Sequence
  Synthetic
acagacctacgtgaccatatagacttgtaataaatagcacattctaggc

SEQ ID NO: 5253 - DNA, 46 bp, Artificial Sequence
  Synthetic
tggagacatatgcaatacaatgcagttactgatgcttcttcacaaa

SEQ ID NO: 5254 - DNA, 39 bp, Artificial Sequence
  Synthetic
aatcccactttcactgacccaaatgccctccagtttctg

SEQ ID NO: 5255 - DNA, 41 bp, Artificial Sequence
  Synthetic
acggatgaatatgttgcacgcgcaagtagtctggatgttcc

SEQ ID NO: 5256 - DNA, 45 bp, Artificial Sequence
  Synthetic
gtgttgaggtaggtcgtggtccaatttatttaataaaggatggcc

SEQ ID NO: 5257 - DNA, 44 bp, Artificial Sequence
  Synthetic
tatggttgatactggctttggtgaacttcacttttgttagcctg

SEQ ID NO: 5258 - DNA, 44 bp, Artificial Sequence
  Synthetic
tttcctacacctagtggttctatggtgtgctcgttgtaaccaat

SEQ ID NO: 5259 - DNA, 47 bp, Artificial Sequence
  Synthetic
taggacgcaaatttttactacaagctgtagcttttcgttttcctaat

SEQ ID NO: 5260 - DNA, 42 bp, Artificial Sequence
  Synthetic
atgcgtgccaaatccctgtttaaaaaacaatggaatggttgg

SEQ ID NO: 5261 - DNA, 41 bp, Artificial Sequence
  Synthetic
agaatgtgtgtactgcaagcaatcccgaaaagcaaagtcat

SEQ ID NO: 5262 - DNA, 44 bp, Artificial Sequence
  Synthetic
ttccataatataaggggtcggtggcgtgttcttgatgatctgca

SEQ ID NO: 5263 - DNA, 43 bp, Artificial Sequence
  Synthetic
cggacagagcccattacaatattgtttgtacgcacaaccgaag

SEQ ID NO: 5264 - DNA, 42 bp, Artificial Sequence
  Synthetic
atatgcacacacttagaagtctgcagttgattcgcctcgttc

SEQ ID NO: 5265 - DNA, 50 bp, Artificial Sequence
  Synthetic
aggaaaaccgtttcattgaaattggctttctctaggtaatatatgtggac

SEQ ID NO: 5266 - DNA, 41 bp, Artificial Sequence
  Synthetic
aacaagccaattaaagtgggcatcctcaaagtccaccttct

SEQ ID NO: 5267 - DNA, 45 bp, Artificial Sequence
  Synthetic
ttttacagcagaggtgtcccactgtatttatgtacactcccttca

SEQ ID NO: 5268 - DNA, 43 bp, Artificial Sequence
  Synthetic
gttggaaccacataaatgggaaaagcttggcctactgcagttc

SEQ ID NO: 5269 - DNA, 41 bp, Artificial Sequence; identical to SEQ ID NO: 4498
  Synthetic

SEQ ID NO: 5270 - DNA, 46 bp, Artificial Sequence
  Synthetic
acaaagactgaacaaaaggagctacgcatcctttgtcattgtgttc

SEQ ID NO: 5271 - DNA, 44 bp, Artificial Sequence
  Synthetic
aattggcaaatgttgtgaggaagaaattgtgaaggagagctctg

SEQ ID NO: 5272 - DNA, 43 bp, Artificial Sequence
  Synthetic
agtaccagcggaaatgctcgctctcttgttgatttgttgaagt

SEQ ID NO: 5273 - DNA, 40 bp, Artificial Sequence
  Synthetic
tgacttcgccctcatagtgaaacctatctactcctgcctg

SEQ ID NO: 5274 - DNA, 38 bp, Artificial Sequence
  Synthetic
cccaaatggcccttcagctacccctgtgacatcggtat

SEQ ID NO: 5275 - DNA, 44 bp, Artificial Sequence
  Synthetic
ggatgaagactaccaaggcaggatttccttatgactgacaaacg

SEQ ID NO: 5276 - DNA, 47 bp, Artificial Sequence
  Synthetic
agatggacctgacatctgtacattctcaataaatgggatacggagag

SEQ ID NO: 5277 - DNA, 48 bp, Artificial Sequence
  Synthetic
attggtttaaggtgtgttacatgcaagaaacaacagctaacttttctg

SEQ ID NO: 5278 - DNA, 43 bp, Artificial Sequence
  Synthetic
aggaggagtctgaatatccatatgcgccttaacagctgatcgc

SEQ ID NO: 5279 - DNA, 46 bp, Artificial Sequence
  Synthetic
cgggatgatgatgagagcgaattatctgatatgtcactttcagatc

SEQ ID NO: 5280 - DNA, 39 bp, Artificial Sequence
  Synthetic
tgcaatagcctcagtcccagttgcctttttttccctctg

SEQ ID NO: 5281 - DNA, 44 bp, Artificial Sequence
  Synthetic
cacagtaggtgtcagttttactgaaactacagcatgtcttgttg

SEQ ID NO: 5282 - DNA, 41 bp, Artificial Sequence
  Synthetic
aagtgaccaagaagacgaggagcttgtagccagtctaagcg

SEQ ID NO: 5283 - DNA, 47 bp, Artificial Sequence
  Synthetic
gactcacaatatggttctgaacagttggtgctaaaaagatttctctg

SEQ ID NO: 5284 - DNA, 38 bp, Artificial Sequence
  Synthetic
ccggctgttcgcaagcgatctgagggtggtatctctgg

SEQ ID NO: 5285 - DNA, 43 bp, Artificial Sequence
  Synthetic
agctgctccacaagatatttatcctttgtatatcaggggggca

SEQ ID NO: 5286 - DNA, 49 bp, Artificial Sequence
  Synthetic
tcctttattcaggatcacagctagtaatattatcagatgctgaagcttc

SEQ ID NO: 5287 - DNA, 43 bp, Artificial Sequence
  Synthetic
tagacgctattatgaacaagtgccgtaactaaggaagcaggcc

SEQ ID NO: 5288 - DNA, 43 bp, Artificial Sequence
  Synthetic
ttgagttacaaacactgggtgaagcgatgcagcaagagaactt

SEQ ID NO: 5289 - DNA, 38 bp, Artificial Sequence
  Synthetic
cagatggctgtttggcttccttggtgatcggttgggta

SEQ ID NO: 5290 - DNA, 44 bp, Artificial Sequence
  Synthetic
cctaaccgatttgcctttggagccaaactagtctctcagtttct

SEQ ID NO: 5291 - DNA, 46 bp, Artificial Sequence
  Synthetic
tgtgcaggaacacagtttcagcctcaataactgtgttaactaattc

SEQ ID NO: 5292 - DNA, 46 bp, Artificial Sequence
  Synthetic
tttcagaaaacgtagatcctccaatattcacatgtatattcaggcc

SEQ ID NO: 5293 - DNA, 39 bp, Artificial Sequence
  Synthetic
tggcatgcaattggtatgtggaacttcaaaattcgcgcg

SEQ ID NO: 5294 - DNA, 48 bp, Artificial Sequence
  Synthetic
tcggaagaatgattggtggaatcgcataatcactgagtttgagttcag

SEQ ID NO: 5295 - DNA, 44 bp, Artificial Sequence
  Synthetic
ggtgaaaatggacgaaggacaatgtttgaaattttcctttgagg

SEQ ID NO: 5296 - DNA, 42 bp, Artificial Sequence
  Synthetic
agggaagggtactcactggtcggaccacttggctgttttgga

SEQ ID NO: 5297 - DNA, 44 bp, Artificial Sequence
  Synthetic
ttgcttcaaatgagaatgtggaaaccccagtatctgcttctcag

SEQ ID NO: 5298 - DNA, 43 bp, Artificial Sequence
  Synthetic
acttggaatgcaggaccttttttccccatttgaatgcctgtca

SEQ ID NO: 5299 - DNA, 49 bp, Artificial Sequence
  Synthetic
ttgaggacacaagagtctgaatgtccatcagtcattatagtaaaacatg

SEQ ID NO: 5300 - DNA, 47 bp, Artificial Sequence
  Synthetic
gacaattggcatggttcgaaccgtatcctatttgataatccaggttt

SEQ ID NO: 5301 - DNA, 44 bp, Artificial Sequence
  Synthetic
aatggatggacagagactgatagtcaatcagtcattgccacaac

SEQ ID NO: 5302 - DNA, 41 bp, Artificial Sequence
  Synthetic
gtgtcttgaaacgatggaagttggtcataggtttggcgacc

SEQ ID NO: 5303 - DNA, 48 bp, Artificial Sequence
  Synthetic
aattggcaaatgtcgtgaggaagagtaattgtaaaagagagctctgta

SEQ ID NO: 5304 - DNA, 44 bp, Artificial Sequence
  Synthetic
atgttcgaaagtaagagcatgaagctcaagtcaatgcttgcaag

SEQ ID NO: 5305 - DNA, 43 bp, Artificial Sequence
  Synthetic
tccaatcctctgatgatttcgctcctgcttctattccctcatg

SEQ ID NO: 5306 - DNA, 41 bp, Artificial Sequence
  Synthetic
ggacaacgaccttggaccagcgtggcatcggtatgggtatc

SEQ ID NO: 5307 - DNA, 40 bp, Artificial Sequence
  Synthetic
caacacggcgaccctacaagtcttgcagtgaagtgttcag

SEQ ID NO: 5308 - DNA, 43 bp, Artificial Sequence
  Synthetic
ttggaaaaactaactaacactgggtttcaacggtttctggcac

SEQ ID NO: 5309 - DNA, 47 bp, Artificial Sequence
  Synthetic
aattccggttgaccttctatgtccatctatttcatcgttttcttcct

SEQ ID NO: 5310 - DNA, 38 bp, Artificial Sequence
  Synthetic
acgaaagtttgcaggaggcatctgtatccacctccagc

SEQ ID NO: 5311 - DNA, 46 bp, Artificial Sequence
  Synthetic
ggcagtacggaggctatagacctatattgctattgtcacttgtacc

SEQ ID NO: 5312 - DNA, 47 bp, Artificial Sequence
  Synthetic
agatgaagggggagattggagaggctcctaaaaatgttataaactct

SEQ ID NO: 5313 - DNA, 46 bp, Artificial Sequence
  Synthetic
ggcatacagacattaaaccaccagttcaatagctttatgtgcttta

SEQ ID NO: 5314 - DNA, 41 bp, Artificial Sequence
  Synthetic
gacaaaaccgctacctgtgtaacgtgttgtacccttccttt

SEQ ID NO: 5315 - DNA, 39 bp, Artificial Sequence
  Synthetic
gggcaccgcaaagacctacggagtccacagtgtccaggt

SEQ ID NO: 5316 - DNA, 43 bp, Artificial Sequence
  Synthetic
ttggacaggtgcaggcaatgtctttgtgtttcactatggtatg

SEQ ID NO: 5317 - DNA, 44 bp, Artificial Sequence
  Synthetic
attgtggtaataacgtcccctgcgcaatagtaacatgggcaata

SEQ ID NO: 5318 - DNA, 44 bp, Artificial Sequence
  Synthetic
tatccgtctacataggcctgcctaatctactaaagcgaacagtc

SEQ ID NO: 5319 - DNA, 41 bp, Artificial Sequence
  Synthetic
gcctgtaccatcgcgttctacagaagatatagtgggcgaat

SEQ ID NO: 5320 - DNA, 39 bp, Artificial Sequence
  Synthetic
attggggaacactgggctaataagttctaaaggggggca

SEQ ID NO: 5321 - DNA, 40 bp, Artificial Sequence
  Synthetic
ggtactatgggtgacactgtgccaggtgaagcaggcatac

SEQ ID NO: 5322 - DNA, 44 bp, Artificial Sequence
  Synthetic
ctgtacctgggcaatatgatgcatcatattcctcaacatgtctg

SEQ ID NO: 5323 - DNA, 43 bp, Artificial Sequence
  Synthetic
tcctacaatcctccattttgctgaaaccacagacataagccaa

SEQ ID NO: 5324 - DNA, 40 bp, Artificial Sequence
  Synthetic
gagaccctccttacagccatgactgatgtgtcctgttgac

SEQ ID NO: 5325 - DNA, 40 bp, Artificial Sequence
  Synthetic
tgaaacgatggaggttgttcagagtcataggtctgtcggc

SEQ ID NO: 5326 - DNA, 43 bp, Artificial Sequence
  Synthetic
gaaagcaaagttggcaaatgttgtaagaaagttcggtgtcctg

SEQ ID NO: 5327 - DNA, 43 bp, Artificial Sequence
  Synthetic
tcttcaatcctctgacgattttgccggcttgaatcccttcatg

SEQ ID NO: 5328 - DNA, 43 bp, Artificial Sequence
  Synthetic
cggacatgagtattggagttactgtgctggaccaagatcattg

SEQ ID NO: 5329 - DNA, 41 bp, Artificial Sequence
  Synthetic
acagaagaccagtcgggatatccgcatcaattcgggctctg

SEQ ID NO: 5330 - DNA, 39 bp, Artificial Sequence
  Synthetic
ggtggtaaatcccagcacaggttccagggaagcggtcac

SEQ ID NO: 5331 - DNA, 38 bp, Artificial Sequence
  Synthetic
gagttcctctagggatggccgatgccgcctgtagcacg

SEQ ID NO: 5332 - DNA, 38 bp, Artificial Sequence
  Synthetic
ccggtggcctcagctgcttcgagggagaatggttcacc

SEQ ID NO: 5333 - DNA, 41 bp, Artificial Sequence
  Synthetic
agggtggcatcttcgacaactgtgatgtccagcctaggagg

SEQ ID NO: 5334 - DNA, 37 bp, Artificial Sequence
  Synthetic
cagtggggctccgcgtactctcctgggcagctcatca

SEQ ID NO: 5335 - DNA, 41 bp, Artificial Sequence
  Synthetic
taggaggttattggcacgccctcactgggattccgggaatc

SEQ ID NO: 5336 - DNA, 40 bp, Artificial Sequence
  Synthetic
tcttcagtggtcagcgtcggtaccaacatggcaagaacca

SEQ ID NO: 5337 - DNA, 37 bp, Artificial Sequence
  Synthetic
tgcttcgctggttccgacttgtggcgccagaaagggc

SEQ ID NO: 5338 - DNA, 38 bp, Artificial Sequence
  Synthetic
cgtgctggtggcgatgcactgccaacactagcatgact

SEQ ID NO: 5339 - DNA, 40 bp, Artificial Sequence
  Synthetic
gccggcctttgtgcaaactgacacacttcagcagcaatgt

SEQ ID NO: 5340 - DNA, 42 bp, Artificial Sequence
  Synthetic
aggactgtgccatagttcgggagcacaccattcactctctga

SEQ ID NO: 5341 - DNA, 39 bp, Artificial Sequence
  Synthetic
ccattgccaatgggggctaccttctcacgacccaaacgc

SEQ ID NO: 5342 - DNA, 42 bp, Artificial Sequence
  Synthetic
ctccctagggaggctcagaccaacgatagccggttttacccg

SEQ ID NO: 5343 - DNA, 37 bp, Artificial Sequence
  Synthetic
gtgcccggttgctggcgaagggtcgcagtggcaaaca

SEQ ID NO: 5344 - DNA, 39 bp, Artificial Sequence
  Synthetic
ctgggtgtgtcggcagtgaccacatcaccggctggaatt

SEQ ID NO: 5345 - DNA, 38 bp, Artificial Sequence
  Synthetic
ggcaggtaccgtgcgctcttaccacgtgacaccagcct

SEQ ID NO: 5346 - DNA, 38 bp, Artificial Sequence
  Synthetic
ggaacatgtggccccccatcacccgccaagcaaggggt

SEQ ID NO: 5347 - DNA, 39 bp, Artificial Sequence
  Synthetic
tgtgaagccggtggcggaagcgtagctagcagccatggg

SEQ ID NO: 5348 - DNA, 36 bp, Artificial Sequence
  Synthetic
cggcctctttcctgctgggaaggagcagagcagccg

SEQ ID NO: 5349 - DNA, 39 bp, Artificial Sequence
  Synthetic
gcgctcggcgttctactctggagacggttgacccagtcg

SEQ ID NO: 5350 - DNA, 40 bp, Artificial Sequence
  Synthetic
gatggggtgcagcaaaggatggatccacaagtacagcgcg

SEQ ID NO: 5351 - DNA, 39 bp, Artificial Sequence
  Synthetic
cgtctagcgcctacgacctgaggcaaatcaccggcgaag

SEQ ID NO: 5352 - DNA, 39 bp, Artificial Sequence
  Synthetic
ctgctgtgtccctactgccctctcggcaagaacagtcgt

SEQ ID NO: 5353 - DNA, 41 bp, Artificial Sequence
  Synthetic
agctggtgtgcaggagagaagaccctcccacaacctaaggg

SEQ ID NO: 5354 - DNA, 40 bp, Artificial Sequence
  Synthetic
tcgacgaacatgacatgcaggtcaaagcatgcacccggac

SEQ ID NO: 5355 - DNA, 41 bp, Artificial Sequence
  Synthetic
cttggctgaatgtgttgctgggggcttccgcatatccgtac

SEQ ID NO: 5356 - DNA, 40 bp, Artificial Sequence
  Synthetic
gagttggtgatgtgccaggtccgcgaggcaagagcttcag

SEQ ID NO: 5357 - DNA, 42 bp, Artificial Sequence
  Synthetic
atttggaagcttgtgaattcgactagcacgcaaacacacaat

SEQ ID NO: 5358 - DNA, 47 bp, Artificial Sequence
  Synthetic
aggcagtgtaagcatttttatcatgagctccagaataatatcttgca

SEQ ID NO: 5359 - DNA, 43 bp, Artificial Sequence
  Synthetic
ggcaattccctggaactatttcaagtttttgcaattgctcctc

SEQ ID NO: 5360 - DNA, 42 bp, Artificial Sequence
  Synthetic
tgcgttctagcaacaaaaaagcaacctactccaaacgactct

SEQ ID NO: 5361 - DNA, 40 bp, Artificial Sequence
  Synthetic
gtgggataggtgcaatgtcatttatgaactgtcccgcgat

SEQ ID NO: 5362 - DNA, 39 bp, Artificial Sequence
  Synthetic
caaggcttgctcccgaagaccaaatttggcctggttgtt

SEQ ID NO: 5363 - DNA, 48 bp, Artificial Sequence
  Synthetic
ctaaaagtcagttttggctgcaactgttacatcatccaatagagctat

SEQ ID NO: 5364 - DNA, 42 bp, Artificial Sequence
  Synthetic
tttggacacaattagacctgagtgattgaaacgctcgctgag

SEQ ID NO: 5365 - DNA, 40 bp, Artificial Sequence
  Synthetic
ccccaccacctccacaaccgtcggtttgttgtggctgttt

SEQ ID NO: 5366 - DNA, 37 bp, Artificial Sequence
  Synthetic
gtggaaggtcacccaggcggtgtggtgcaggaggagg

SEQ ID NO: 5367 - DNA, 38 bp, Artificial Sequence
  Synthetic
gcgaccccccagtaatcatttttagctctgttgcggac

SEQ ID NO: 5368 - DNA, 47 bp, Artificial Sequence
  Synthetic
atgctgcttttgctactaacatactcgccatagcaaatacaaaatgt

SEQ ID NO: 5369 - DNA, 41 bp, Artificial Sequence
  Synthetic
ccactagcacaggttccagtgctgacccgtgttggaggaat

SEQ ID NO: 5370 - DNA, 43 bp, Artificial Sequence
  Synthetic
tccagacagagattttcttgatgttcatatcccgctggtgttg

SEQ ID NO: 5371 - DNA, 43 bp, Artificial Sequence
  Synthetic
agtcattatacaccctcatgacagtttttacgtttgcgcctgt

SEQ ID NO: 5372 - DNA, 45 bp, Artificial Sequence
  Synthetic
ccaaatgtttattgtaggatgcacatcattttctgcacatggaac

SEQ ID NO: 5373 - DNA, 46 bp, Artificial Sequence
  Synthetic
atccagtgatgctcaattgtttaacccattattatgaccttgggct

SEQ ID NO: 5374 - DNA, 48 bp, Artificial Sequence
  Synthetic
caaacgtaaaaattgaggtctgaccttccttgaatactgtgtaaaagt

SEQ ID NO: 5375 - DNA, 43 bp, Artificial Sequence
  Synthetic
tcgaacaatcaagcagtgccactatctctgttatgttcctttc

SEQ ID NO: 5376 - DNA, 42 bp, Artificial Sequence
  Synthetic
atcgtgcggtcttggtaaatgtttgttgttcaaagtggttcc

SEQ ID NO: 5377 - DNA, 45 bp, Artificial Sequence
  Synthetic
atgcgactgctagcatcatttatgatgagttctgaggatgttctt

SEQ ID NO: 5378 - DNA, 48 bp, Artificial Sequence
  Synthetic
ccagaagttagatgtgtttgcagaacatttatatatagcacgggtcta

SEQ ID NO: 5379 - DNA, 47 bp, Artificial Sequence
  Synthetic
ctggttatgagactttcagggtcgtgacttgcctatttatttgtgac

SEQ ID NO: 5380 - DNA, 39 bp, Artificial Sequence
  Synthetic
aagaactgactcccggaaccagttcgtttgttgcttggc

SEQ ID NO: 5381 - DNA, 48 bp, Artificial Sequence
  Synthetic
ctaattcaaaatgcacaagctgtggttcagttttcttgtcatcagttg

SEQ ID NO: 5382 - DNA, 45 bp, Artificial Sequence
  Synthetic
tgagattccaattaagcagaccatctcataatcctctgctgtgtc

SEQ ID NO: 5383 - DNA, 44 bp, Artificial Sequence
  Synthetic
tctctcctatcattgttggcaacttatagtaaccggtgctggtt

SEQ ID NO: 5384 - DNA, 49 bp, Artificial Sequence
  Synthetic
actttgtcgatttgaaaatgagaggtggtagaactaagctttctaattc

SEQ ID NO: 5385 - DNA, 45 bp, Artificial Sequence
  Synthetic
ccctccgtgctcgaagatttgttaagtcagtacctttattactgt

SEQ ID NO: 5386 - DNA, 42 bp, Artificial Sequence
  Synthetic
tgaaacggaggatcataactctgcgctgaggagaggtggtaa

SEQ ID NO: 5387 - DNA, 40 bp, Artificial Sequence
  Synthetic
agcattgcctacagatatgccaatgcttcagaaacgcagc

SEQ ID NO: 5388 - DNA, 43 bp, Artificial Sequence
  Synthetic
cgaggcgcattagatggtaatgttcaattgagtaggtgctcta

SEQ ID NO: 5389 - DNA, 47 bp, Artificial Sequence
  Synthetic
agatgaatcaggccgatttgacctcataaagattcattaggttttcc

SEQ ID NO: 5390 - DNA, 39 bp, Artificial Sequence
  Synthetic
aaaaggcgaagagggaggagccgtcgtcgtcgtcgtaac

SEQ ID NO: 5391 - DNA, 45 bp, Artificial Sequence
  Synthetic
tctccagaaaatggggttgcaatttaatagtgtcatgtgcaaaca

SEQ ID NO: 5392 - DNA, 46 bp, Artificial Sequence
  Synthetic
cccctattgaacgtctacaatcctaacttgctgtacaaaacgtcta

SEQ ID NO: 5393 - DNA, 43 bp, Artificial Sequence
  Synthetic
tttcagatgtcttggacaaagtcagcacctttgcaacaggctt

SEQ ID NO: 5394 - DNA, 46 bp, Artificial Sequence
  Synthetic
aatttgctatcacagatgcatgtgtactagtctccatactaatcgc

SEQ ID NO: 5395 - DNA, 41 bp, Artificial Sequence
  Synthetic
agacaggatatggcatttgaccctactgtcctgttggtggt

SEQ ID NO: 5396 - DNA, 46 bp, Artificial Sequence
  Synthetic
aaatgggcaaggatatttatggtgatcttgcataaagctgttcctt

SEQ ID NO: 5397 - DNA, 48 bp, Artificial Sequence
  Synthetic
atggtgttttatggggtaatgactgctgaagttaatatttcgcgtatt

SEQ ID NO: 5398 - DNA, 41 bp, Artificial Sequence
  Synthetic
aacatgccctcaaactttggtttttgtgctacgtttgcagt

SEQ ID NO: 5399 - DNA, 40 bp, Artificial Sequence
  Synthetic
ggagatcctccatacagccattgtgttctgttgactgtgt

SEQ ID NO: 5400 - DNA, 42 bp, Artificial Sequence
  Synthetic
gaactcatgccttgaaacaatggaggccttgggttagtttgt

SEQ ID NO: 5401 - DNA, 48 bp, Artificial Sequence
  Synthetic
aatggtcacacaaagaacaataggggctcttattagatagcctctctt

SEQ ID NO: 5402 - DNA, 43 bp, Artificial Sequence
  Synthetic
ccaaactggcaaatgttgtgagtgaaagaaagctcagtgtctt

SEQ ID NO: 5403 - DNA, 45 bp, Artificial Sequence
  Synthetic
tgaagctccgaacacaaatacccattgaaatacttcaggtcaatg

SEQ ID NO: 5404 - DNA, 43 bp, Artificial Sequence
  Synthetic
tccaatcctccgacgattttgcgaatctatccactcctgcttg

SEQ ID NO: 5405 - DNA, 42 bp, Artificial Sequence
  Synthetic
cccagatggctctccaattgttcctctatggcacctatatgt

SEQ ID NO: 5406 - DNA, 43 bp, Artificial Sequence
  Synthetic
tgaagtctgcttaaagtgggagccagggggttacaaagtcttc

SEQ ID NO: 5407 - DNA, 43 bp, Artificial Sequence
  Synthetic
ccctagtagttcatataggagaccgattctggcatcaatccgg

SEQ ID NO: 5408 - DNA, 46 bp, Artificial Sequence
  Synthetic
tggagcctcagagagctaaaaattacaagcactgtagctctaattc

SEQ ID NO: 5409 - DNA, 44 bp, Artificial Sequence
  Synthetic
aaggtcaccattcaagattgattctgacacaacacagtctaacg

SEQ ID NO: 5410 - DNA, 47 bp, Artificial Sequence
  Synthetic
aacaccagaaagacaatccaaaaggttttcagcttcatcttcaatcc

SEQ ID NO: 5411 - DNA, 38 bp, Artificial Sequence
  Synthetic
tcctcaaggagtgcgtttggtgtcgtacgatgtggaag

SEQ ID NO: 5412 - DNA, 46 bp, Artificial Sequence
  Synthetic
gcttttaaaaatcctgaacaaaggcaatgtcccatagagtacgtag

SEQ ID NO: 5413 - DNA, 38 bp, Artificial Sequence
  Synthetic
caggaagaggaactgggggttgagttggccttccagac

SEQ ID NO: 5414 - DNA, 46 bp, Artificial Sequence
  Synthetic
caacagatgttggtgctgttggctacttcaaattcttcgttagagg

SEQ ID NO: 5415 - DNA, 48 bp, Artificial Sequence
  Synthetic
tcaaacctttgacattttagagccaacaaacctattacctaattgggt

SEQ ID NO: 5416 - DNA, 45 bp, Artificial Sequence
  Synthetic
cgccattgcaggaatttgctgcttactcttattgtaccttctgag

SEQ ID NO: 5417 - DNA, 45 bp, Artificial Sequence
  Synthetic
agtgagcgtttactaattgtgggaactttgatatctccaccatct

SEQ ID NO: 5418 - DNA, 50 bp, Artificial Sequence
  Synthetic
gttggagacacagaaaatcctagctgtttgtttaggatctatagacaagt

SEQ ID NO: 5419 - DNA, 41 bp, Artificial Sequence
  Synthetic
aactacaacaggacagagcaggtcaggccataagctgattg

SEQ ID NO: 5420 - DNA, 43 bp, Artificial Sequence
  Synthetic
aggatttgtcacaagaggcggcaactgaaacaatacacaacaa

SEQ ID NO: 5421 - DNA, 44 bp, Artificial Sequence
  Synthetic
ggactaggaaatgaagctgaagatcccattgctatcagactcag

SEQ ID NO: 5422 - DNA, 40 bp, Artificial Sequence
  Synthetic
cgtcgacgcctagaagacgacgttgttctctccgttgggc

SEQ ID NO: 5423 - DNA, 41 bp, Artificial Sequence
  Synthetic
gcaaactaaaatacaggggcatgccttcagcaacccatgaa

SEQ ID NO: 5424 - DNA, 42 bp, Artificial Sequence
  Synthetic
aattggtgccaatagacgcccgcactactatttcaggaccaa

SEQ ID NO: 5425 - DNA, 39 bp, Artificial Sequence
  Synthetic
cctagacgggtagcgactagctgtagtggccacaaatgt

SEQ ID NO: 5426 - DNA, 44 bp, Artificial Sequence
  Synthetic
tgtacaatagaagagtcagacaggtaattgaactgaatcgcctg

SEQ ID NO: 5427 - DNA, 41 bp, Artificial Sequence
  Synthetic
tcgtccttaatactggctctcgacctttaatgctgctccac

SEQ ID NO: 5428 - DNA, 45 bp, Artificial Sequence
  Synthetic
tgcttctggtaaggtgtatcttccaatcatctgtactcagcactc

SEQ ID NO: 5429 - DNA, 46 bp, Artificial Sequence
  Synthetic
acttctaagtcttccaaacgcaaagcaagtagaacaaagttcacat

SEQ ID NO: 5430 - DNA, 41 bp, Artificial Sequence
  Synthetic
gactcacagccaacctctctgttgcaagaggattatgtctc

SEQ ID NO: 5431 - DNA, 46 bp, Artificial Sequence
  Synthetic
ttcaggatcttgcatcgtttgaaccataacaaaatggtcctttcca

SEQ ID NO: 5432 - DNA, 44 bp, Artificial Sequence
  Synthetic
atcagattttatgtaagtgccagcgctgagaaagaagcagttgc

SEQ ID NO: 5433 - DNA, 48 bp, Artificial Sequence
  Synthetic
cagtgcagaaaatgaagctgaagcattgttattttcagttccagtttc

SEQ ID NO: 5434 - DNA, 42 bp, Artificial Sequence
  Synthetic
gcataatgccagagtggataacaatgactcactagctgtagc

SEQ ID NO: 5435 - DNA, 46 bp, Artificial Sequence
  Synthetic
tgatgttacatatgcatgttggagtggattaccatctaaacccgtt

SEQ ID NO: 5436 - DNA, 48 bp, Artificial Sequence
  Synthetic
aaatgctgcaaaagacattgatacaacataataacatgctcttgtctt

SEQ ID NO: 5437 - DNA, 39 bp, Artificial Sequence
  Synthetic
ctctcccactgcctggaaacatagtttcggagttccagg

SEQ ID NO: 5438 - DNA, 48 bp, Artificial Sequence
  Synthetic
gacactgtcacactaccaaaaggaattaacccttttactggtattcat

SEQ ID NO: 5439 - DNA, 41 bp, Artificial Sequence
  Synthetic
ttttcctgatgtcaccgttgttggaccagaaacagtgacat

SEQ ID NO: 5440 - DNA, 43 bp, Artificial Sequence
  Synthetic
tacactttttaaatcagccttcccgtctgctcctcctcaaagg

SEQ ID NO: 5441 - DNA, 48 bp, Artificial Sequence
  Synthetic
cccacaaacaaatataattcctggcattgcaggttcaatattagaagt

SEQ ID NO: 5442 - DNA, 43 bp, Artificial Sequence
  Synthetic
aatccagaaactcaacggctagtgtagttccaataccaagcgg

SEQ ID NO: 5443 - DNA, 40 bp, Artificial Sequence
  Synthetic
ctatggaaaacgagagcagctgtctcccattgttcctgct

SEQ ID NO: 5444 - DNA, 41 bp, Artificial Sequence
  Synthetic
acaaccaacatccagtattgaggcagcttgttcaggacagg

SEQ ID NO: 5445 - DNA, 45 bp, Artificial Sequence
  Synthetic
tgtttgactcatggggtcagtcgatggacagtctaaaatctgttt

SEQ ID NO: 5446 - DNA, 42 bp, Artificial Sequence
  Synthetic
ttcaggtacgtctttattgttgcctaccactcccggtcattg

SEQ ID NO: 5447 - DNA, 38 bp, Artificial Sequence
  Synthetic
gcccatcctggacatggagacgcccgtctggtccacca

SEQ ID NO: 5448 - DNA, 42 bp, Artificial Sequence
  Synthetic
ctcaagttttcgcacccgtcgcgaggaaatgctggcaggttc

SEQ ID NO: 5449 - DNA, 36 bp, Artificial Sequence
  Synthetic
gattccattcggggtgccgctgtggcctcccgttcc

SEQ ID NO: 5450 - DNA, 38 bp, Artificial Sequence
  Synthetic
taaggccctgggagcgcgtgccataaacgccgactacg

SEQ ID NO: 5451 - DNA, 38 bp, Artificial Sequence
  Synthetic
gcctcttccagtaactcggccctttgcggacgagctgc

SEQ ID NO: 5452 - DNA, 37 bp, Artificial Sequence
  Synthetic
gcgagtagttggtgatgcggcgcccggcctgacgatt

SEQ ID NO: 5453 - DNA, 36 bp, Artificial Sequence
  Synthetic
gagcttggccatgtacgcgcaacctccccggctgga

SEQ ID NO: 5454 - DNA, 36 bp, Artificial Sequence
  Synthetic
gtcggcgagcccacacacaaccacaccccccagtac

SEQ ID NO: 5455 - DNA, 35 bp, Artificial Sequence
  Synthetic
agaactgcccccgaagccacgagccacgccagaac

SEQ ID NO: 5456 - DNA, 36 bp, Artificial Sequence
  Synthetic
gttcgtcctgccccactggacagggccgagagaacg

SEQ ID NO: 5457 - DNA, 35 bp, Artificial Sequence
  Synthetic
gtggtccgtctcgctaacggagccgtcaagcgcgt

SEQ ID NO: 5458 - DNA, 37 bp, Artificial Sequence
  Synthetic
ccgaaggtcctcccagatccctgcagcaccatggccg

SEQ ID NO: 5459 - DNA, 40 bp, Artificial Sequence
  Synthetic
gcagaaccgggccacgatctggggcgataacatctgcatt

SEQ ID NO: 5460 - DNA, 35 bp, Artificial Sequence
  Synthetic
attggcgcgcggaccacaaccttccccaacgcgag

SEQ ID NO: 5461 - DNA, 39 bp, Artificial Sequence
  Synthetic
tgcactttgcgtgtctggtgtgatacgtcccgctcagga

SEQ ID NO: 5462 - DNA, 38 bp, Artificial Sequence
  Synthetic
cgtgtcgtcgaatgccaggccgcatcgatccggagatc

SEQ ID NO: 5463 - DNA, 36 bp, Artificial Sequence
  Synthetic
ggtgcggtgcctgccgataagccacttccccgactg

SEQ ID NO: 5464 - DNA, 37 bp, Artificial Sequence
  Synthetic
gaatgggagctcgggtccacaaccttccgtcccctgc

SEQ ID NO: 5465 - DNA, 37 bp, Artificial Sequence
  Synthetic
atcgccttgtgtgtgtgctggcccaagattcggcgcg

SEQ ID NO: 5466 - DNA, 37 bp, Artificial Sequence
  Synthetic
ggcgaacacggggctgcattccccctcgcacatcctc

SEQ ID NO: 5467 - DNA, 35 bp, Artificial Sequence
  Synthetic
cgccggatcgaggtaccgttggaggagcaagcggc

SEQ ID NO: 5468 - DNA, 40 bp, Artificial Sequence
  Synthetic
aggatcttgggtgctgacgcgccgagatttacaaggacca

SEQ ID NO: 5469 - DNA, 35 bp, Artificial Sequence
  Synthetic
tcagggggtgcgtcacgcttttaaccgcgagcgcc

SEQ ID NO: 5470 - DNA, 39 bp, Artificial Sequence
  Synthetic
ggccacctgacacagaggcgagcggctcaagatctttcg

SEQ ID NO: 5471 - DNA, 35 bp, Artificial Sequence
  Synthetic
tgtgggtgtgtaggcgatgctacgcgcgccaaacc

SEQ ID NO: 5472 - DNA, 35 bp, Artificial Sequence
  Synthetic
aagtctgcgggggagcggtgaggccgctgttggtg

SEQ ID NO: 5473 - DNA, 38 bp, Artificial Sequence
  Synthetic
atggtcgccgtcattatggccgcgaatgtgtgcggagg

SEQ ID NO: 5474 - DNA, 37 bp, Artificial Sequence
  Synthetic
cgctctccatcctgcatcaggagtgtcacgcgggagg

SEQ ID NO: 5475 - DNA, 36 bp, Artificial Sequence
  Synthetic
caggggcgatggaagcggagtgcgcctggattcgct

SEQ ID NO: 5476 - DNA, 39 bp, Artificial Sequence
  Synthetic
tccaggcagcgatgtttggcgtgctcagcccctgcttta

SEQ ID NO: 5477 - DNA, 39 bp, Artificial Sequence
  Synthetic
gtcctgtcggacgacggtgcatcatcagctcaagacggg

SEQ ID NO: 5478 - DNA, 39 bp, Artificial Sequence
  Synthetic
gccagggcgcagaagacgtcggtgttttacctgctgcag

SEQ ID NO: 5479 - DNA, 36 bp, Artificial Sequence
  Synthetic
cgctcaaacgccccgaggagttgcgcgccatccaac

SEQ ID NO: 5480 - DNA, 42 bp, Artificial Sequence
  Synthetic
acagggtgttgcaatacgacccatgcaaacagcctgtacgac

SEQ ID NO: 5481 - DNA, 38 bp, Artificial Sequence
  Synthetic
ggcggcgaacaaggcacatgttttgggggatgtccgtg

SEQ ID NO: 5482 - DNA, 38 bp, Artificial Sequence
  Synthetic
gctacgccaccaccatgcaggtttcggtccgttgtgac

SEQ ID NO: 5483 - DNA, 39 bp, Artificial Sequence
  Synthetic
cttcgaccggggtctcggacgagagcgtgtttatcctgg

SEQ ID NO: 5484 - DNA, 37 bp, Artificial Sequence
  Synthetic
gccccgttaggcgccagaagtttttctcgggggacgc

SEQ ID NO: 5485 - DNA, 39 bp, Artificial Sequence
  Synthetic
tgtgtctgtcctccggaagggctcatcccgccgaccttg

SEQ ID NO: 5486 - DNA, 36 bp, Artificial Sequence
  Synthetic
cggcacgctgttgacgcttgtggcctcgaataccga

SEQ ID NO: 5487 - DNA, 37 bp, Artificial Sequence
  Synthetic
ccccgcgtcagacaaaccctgagtcttcggacctcgc

SEQ ID NO: 5488 - DNA, 37 bp, Artificial Sequence
  Synthetic
ccgggacttttggatgtcgccacgaccacctgctccg

SEQ ID NO: 5489 - DNA, 39 bp, Artificial Sequence
  Synthetic
ccttcatgacggcgctggtactggaatagtggcgctggc

SEQ ID NO: 5490 - DNA, 38 bp, Artificial Sequence
  Synthetic
gtcaaagtcgccgccctccctcaagaaccccaccaacc

SEQ ID NO: 5491 - DNA, 37 bp, Artificial Sequence
  Synthetic
cggctcagctggtgggagtcaccttcggtgggggcta

SEQ ID NO: 5492 - DNA, 34 bp, Artificial Sequence
  Synthetic
tcagcttgcgggcctcgttgccatcgcgtggtgc

SEQ ID NO: 5493 - DNA, 36 bp, Artificial Sequence
  Synthetic
tgtacctgcgggcgaagatgtgggggactgcatcgg

SEQ ID NO: 5494 - DNA, 36 bp, Artificial Sequence
  Synthetic
tccacctcctgccacttggttggcctgggactgggt

SEQ ID NO: 5495 - DNA, 36 bp, Artificial Sequence
  Synthetic
gatggccgcgtggaactgcaagcgcgtggacatcct

SEQ ID NO: 5496 - DNA, 35 bp, Artificial Sequence
  Synthetic
tgcgaaagttgcgcccctgccctgagtcagtgcca

SEQ ID NO: 5497 - DNA, 38 bp, Artificial Sequence
  Synthetic
gcagggtctcgagttcggctcatgcaggagacgtaccg

SEQ ID NO: 5498 - DNA, 39 bp, Artificial Sequence
  Synthetic
ccgagcctcccaggtgcagaaccgagggcttcaaggagg

SEQ ID NO: 5499 - DNA, 39 bp, Artificial Sequence
  Synthetic
gttgccgtcttgggctttgtcggattacctccgttcgcg

SEQ ID NO: 5500 - DNA, 36 bp, Artificial Sequence
  Synthetic
cgtctacgtccgaagcgggatggccgggcagaagtt

SEQ ID NO: 5501 - DNA, 37 bp, Artificial Sequence
  Synthetic
gattccccagagcagccccgcttgatggcggcctgct

SEQ ID NO: 5502 - DNA, 38 bp, Artificial Sequence
  Synthetic
acatctcgcgcgcgctgtggtgaacgtcttttcgcact

SEQ ID NO: 5503 - DNA, 42 bp, Artificial Sequence
  Synthetic
ggtccgggtaaaacaacagccgagctttttttcgtccacacg

SEQ ID NO: 5504 - DNA, 37 bp, Artificial Sequence
  Synthetic
caggaggctgggatcgaaggcgcagcagctggaaggc

SEQ ID NO: 5505 - DNA, 36 bp, Artificial Sequence
  Synthetic
ggatcagctgctttgtgcgctcggggcccatgaacc

SEQ ID NO: 5506 - DNA, 36 bp, Artificial Sequence
  Synthetic
cgtcaggacggagagccaggatccagcggggccaga

SEQ ID NO: 5507 - DNA, 36 bp, Artificial Sequence
  Synthetic
gtgcggggcattgtgtctccggcgaggtgggcttct

SEQ ID NO: 5508 - DNA, 38 bp, Artificial Sequence
  Synthetic
gatcccccccgcgttccatgcagggcacatatgatcgc

SEQ ID NO: 5509 - DNA, 38 bp, Artificial Sequence
  Synthetic
ggtaggccgcgctacacgtcctacgttctggccctggt

SEQ ID NO: 5510 - DNA, 38 bp, Artificial Sequence
  Synthetic
gaggccctcttgcacgaacggaaccttaccaccccggc

SEQ ID NO: 5511 - DNA, 35 bp, Artificial Sequence
  Synthetic
gggtggttccgccttgcgtagcaagacccggggga

SEQ ID NO: 5512 - DNA, 38 bp, Artificial Sequence
  Synthetic
aaaagccagcgcgggtgggaccggcaagtttccaaagc

SEQ ID NO: 5513 - DNA, 36 bp, Artificial Sequence
  Synthetic
tgcgtgcaggcgtttaacgaccttgagggcgggcat

SEQ ID NO: 5514 - DNA, 38 bp, Artificial Sequence
  Synthetic
ctgcaccgagatcgtccatcccgcttcccaggttgcag

SEQ ID NO: 5515 - DNA, 39 bp, Artificial Sequence
  Synthetic
atcaggggccgtgatatgccgaggacatccgcgacgaaa

SEQ ID NO: 5516 - DNA, 39 bp, Artificial Sequence
  Synthetic
ctcctcgtccgtccggcactttgtgtttggagccaaggc

SEQ ID NO: 5517 - DNA, 40 bp, Artificial Sequence
  Synthetic
ttcagtcggtatcgctggcgccgcttctggtccacgagag

SEQ ID NO: 5518 - DNA, 38 bp, Artificial Sequence
  Synthetic
ccacgttcgagctcggggtggtgacgcaggtactcgtg

SEQ ID NO: 5519 - DNA, 36 bp, Artificial Sequence
  Synthetic
ggggacacgggctaccctcatgtgcgttcgatgcgg

SEQ ID NO: 5520 - DNA, 39 bp, Artificial Sequence
  Synthetic
tgtctggttcgaggacgaccactcgtgcgtctgcgtgtc

SEQ ID NO: 5521 - DNA, 37 bp, Artificial Sequence
  Synthetic
ggccgtgaatcccccgtcatttgccgacaccgtggtg

SEQ ID NO: 5522 - DNA, 36 bp, Artificial Sequence
  Synthetic
gtgtcccgcggggagaaaggacgacgcccccgaaga

SEQ ID NO: 5523 - DNA, 37 bp, Artificial Sequence
  Synthetic
tggtcgccaccacgcattgggaagtcacgaggtacgg

SEQ ID NO: 5524 - DNA, 35 bp, Artificial Sequence
  Synthetic
actcgttggcgcgctgaatcaccaccatccgcgtg

SEQ ID NO: 5525 - DNA, 38 bp, Artificial Sequence
  Synthetic
gcggcccgggagagaagagacacagagggccactcacg

SEQ ID NO: 5526 - DNA, 36 bp, Artificial Sequence
  Synthetic
aggttcaccatgcaggcgtgcccgacgcctcgtgaa

SEQ ID NO: 5527 - DNA, 39 bp, Artificial Sequence
  Synthetic
taacgatgcggggggtggcctccacaaaatctcggtcca

SEQ ID NO: 5528 - DNA, 38 bp, Artificial Sequence
  Synthetic
cgcctgtgcgtgtccttgtgttgcaggcggttgctgtc

SEQ ID NO: 5529 - DNA, 35 bp, Artificial Sequence
  Synthetic
ccgtcttcggtgccagtcctgttggtgccggtggg

SEQ ID NO: 5530 - DNA, 39 bp, Artificial Sequence
  Synthetic
tgtttggcgtcgtgagtcccgcctgcgtagttcaagagg

SEQ ID NO: 5531 - DNA, 37 bp, Artificial Sequence
  Synthetic
ggacagcagcggggagtgttcctctccgtgggggtct

SEQ ID NO: 5532 - DNA, 34 bp, Artificial Sequence
  Synthetic
cggccatgcacaccagcaggcgcggaccaggtaa

SEQ ID NO: 5533 - DNA, 37 bp, Artificial Sequence
  Synthetic
acgaacggccacgacagtgacgtacgccgaggctatg

SEQ ID NO: 5534 - DNA, 37 bp, Artificial Sequence
  Synthetic
ataacgacaaacggcccctcgttgctgatcccccgcc

SEQ ID NO: 5535 - DNA, 39 bp, Artificial Sequence
  Synthetic
tccaagccagccaagttaacggcaaaatccgccggggtg

SEQ ID NO: 5536 - DNA, 41 bp, Artificial Sequence
  Synthetic
ccccggtgtcgttcaacaaagattggggagaagcaggtgtc

SEQ ID NO: 5537 - DNA, 38 bp, Artificial Sequence
  Synthetic
tctggacatgtcggcggaatcctgtcgtcggggtcgtc

SEQ ID NO: 5538 - DNA, 36 bp, Artificial Sequence
  Synthetic
ttcttgcggaccacggcccgcgtgtatgggcatgcc

SEQ ID NO: 5539 - DNA, 37 bp, Artificial Sequence
  Synthetic
tcctccgcaaacaggcccgatcgtgcgcactaggtcc

SEQ ID NO: 5540 - DNA, 36 bp, Artificial Sequence
  Synthetic
gcaggaagctccacagggcagaacaacgccctgccc

SEQ ID NO: 5541 - DNA, 40 bp, Artificial Sequence
  Synthetic
gtcgttcggggtgctcgttgacaaaacttacgacaggcca

SEQ ID NO: 5542 - DNA, 36 bp, Artificial Sequence
  Synthetic
ccccggagacccccaaaccttgacacaggcgctcgg

SEQ ID NO: 5543 - DNA, 36 bp, Artificial Sequence
  Synthetic
ctggacgccatggacagggatggtcgaggggggctt

SEQ ID NO: 5544 - DNA, 37 bp, Artificial Sequence
  Synthetic
gtggtacacgagcacgagccaaggatcgccgggtggt

SEQ ID NO: 5545 - DNA, 39 bp, Artificial Sequence
  Synthetic
ccgcagatcgcagcggtctccctggcggtgaatgtagtc

SEQ ID NO: 5546 - DNA, 42 bp, Artificial Sequence
  Synthetic
tcagatcacccgcatcatccgatctggatgcggggaaaactc

SEQ ID NO: 5547 - DNA, 38 bp, Artificial Sequence
  Synthetic
tcagccttaccacgcccgacctcctcctccagtccaat

SEQ ID NO: 5548 - DNA, 38 bp, Artificial Sequence
  Synthetic
acttccgggcctcagaaccctccggatagccaggcctg

SEQ ID NO: 5549 - DNA, 37 bp, Artificial Sequence
  Synthetic
gggacctgcggccaacacactggggtgaggggacact

SEQ ID NO: 5550 - DNA, 38 bp, Artificial Sequence
  Synthetic
cgggctaaccaggaaatccgtgtcacacggccgggcta

SEQ ID NO: 5551 - DNA, 38 bp, Artificial Sequence
  Synthetic
cccgacggcgtagtggaggaggtcccccacaaagcgaa

SEQ ID NO: 5552 - DNA, 38 bp, Artificial Sequence
  Synthetic
cgccagcctgtttgtcctgggagccgttgtacgccaga

SEQ ID NO: 5553 - DNA, 37 bp, Artificial Sequence
  Synthetic
gtataccctgtccgtgggcgaccaccaggaccaccga

SEQ ID NO: 5554 - DNA, 38 bp, Artificial Sequence
  Synthetic
actcggaaagcgaagacgaggcaccgactgttggcggc

SEQ ID NO: 5555 - DNA, 42 bp, Artificial Sequence
  Synthetic
gctccgctaaaagaccgcatcggtgatgggggggaagagaga

SEQ ID NO: 5556 - DNA, 45 bp, Artificial Sequence
  Synthetic
ttcaattcagacagggaatcaacactgatttacccaggtgttgtt

SEQ ID NO: 5557 - DNA, 42 bp, Artificial Sequence
  Synthetic
ggggctgtggctgtattgaattgagttctcagtatgttgttc

SEQ ID NO: 5558 - DNA, 44 bp, Artificial Sequence
  Synthetic
gctggcgaaatcacatgtgtccaaattttgattgaaagataccc

SEQ ID NO: 5559 - DNA, 40 bp, Artificial Sequence
  Synthetic
agcggctttgaaatgatttgggcaccgagaagctactgtc

SEQ ID NO: 5560 - DNA, 42 bp, Artificial Sequence
  Synthetic
attcctatgggagtgggcctcaaccactgaacaaatggcact

SEQ ID NO: 5561 - DNA, 41 bp, Artificial Sequence
  Synthetic
tccttgccacaagaacacatcaggcctgttaataggaagtt

SEQ ID NO: 5562 - DNA, 40 bp, Artificial Sequence
  Synthetic
gaacgcccaccaaatattgcccatgcctcaaggtcggtcg

SEQ ID NO: 5563 - DNA, 44 bp, Artificial Sequence
  Synthetic
tttggaagatccagcgtctagagacacaagagttgcctgaactt

SEQ ID NO: 5564 - DNA, 42 bp, Artificial Sequence
  Synthetic
ctttcccgaccaccagttggataggtgtccttgttgggattg

SEQ ID NO: 5565 - DNA, 44 bp, Artificial Sequence
  Synthetic
gtggaccatatggccataattaagatcctaagtgacgggttctt

SEQ ID NO: 5566 - DNA, 47 bp, Artificial Sequence
  Synthetic
caagtacggtccattacccaaaagatgttttaacctttcgactttgt

SEQ ID NO: 5567 - DNA, 41 bp, Artificial Sequence
  Synthetic
attggagatgtgccacagcactgtctaagaatgtccaccat

SEQ ID NO: 5568 - DNA, 43 bp, Artificial Sequence
  Synthetic
atgaggagttcacaatggtgggatcttctggttgcttttctga

SEQ ID NO: 5569 - DNA, 40 bp, Artificial Sequence
  Synthetic
ttcagaaagatgcgaaagtgctccatcacactgtcgatgt

SEQ ID NO: 5570 - DNA, 45 bp, Artificial Sequence
  Synthetic
attcatcgtcgatgatgtgggaatgatccattgataggtattgac

SEQ ID NO: 5571 - DNA, 38 bp, Artificial Sequence
  Synthetic
ggacatttgacaccacccagtgctttgctttggtggag

SEQ ID NO: 5572 - DNA, 46 bp, Artificial Sequence
  Synthetic
aggtaaggaagacagaagatacggcttttgcaaggttactcagttc

SEQ ID NO: 5573 - DNA, 44 bp, Artificial Sequence
  Synthetic
gaaagcgtctgagtttagtatggaagtgcaacacatctcacaca

SEQ ID NO: 5574 - DNA, 44 bp, Artificial Sequence
  Synthetic
tctggttctaaatttcaactggtgcgcatcttagaagcattcgc

SEQ ID NO: 5575 - DNA, 43 bp, Artificial Sequence
  Synthetic
actgaaactggcattagagcatttttggggcaaagaaacgaaa

SEQ ID NO: 5576 - DNA, 39 bp, Artificial Sequence
  Synthetic
gtgatgaggtggatcaggggatttgtcacaatcctcccg

SEQ ID NO: 5577 - DNA, 47 bp, Artificial Sequence
  Synthetic
gttagtacgcctgaagaaaatggctgctttctgattagttctttcca

SEQ ID NO: 5578 - DNA, 44 bp, Artificial Sequence
  Synthetic
ccgttacctgtagcagcagtcttttttaatgactgcaacaacag

SEQ ID NO: 5579 - DNA, 41 bp, Artificial Sequence
  Synthetic
accgtatcccaatcggaaagccactggtactagagccgacc

SEQ ID NO: 5580 - DNA, 39 bp, Artificial Sequence
  Synthetic
aaagggttcagggggtgctactgtgactctaggtgttgt

SEQ ID NO: 5581 - DNA, 49 bp, Artificial Sequence
  Synthetic
agatcctatatcagacgttacagcagctatattttcatcttgtcctgta

SEQ ID NO: 5582 - DNA, 46 bp, Artificial Sequence
  Synthetic
ttgcagatgttatcacagtacacagtaactctaacgcgaccactat

SEQ ID NO: 5583 - DNA, 48 bp, Artificial Sequence
  Synthetic
aactgcaattgtagatgcagtggcctcatcatcaaattgtatttcact

SEQ ID NO: 5584 - DNA, 41 bp, Artificial Sequence
  Synthetic
aacgcttactacaagtaggccacctcaacagtttcctgagg

SEQ ID NO: 5585 - DNA, 40 bp, Artificial Sequence
  Synthetic
atcctctggctcaaacagatgaagctgtgtttgttttggg

SEQ ID NO: 5586 - DNA, 49 bp, Artificial Sequence
  Synthetic
cttgcaatttcagaacatttcagcagaaaatctggatatttacaggtgc

SEQ ID NO: 5587 - DNA, 45 bp, Artificial Sequence
  Synthetic
atcaatttccactaggtagacggtgctcttttctaacacgtttgt

SEQ ID NO: 5588 - DNA, 45 bp, Artificial Sequence
  Synthetic
tttgtctgaataaattgctgatgcgtgaaaaatatttgccagccc

SEQ ID NO: 5589 - DNA, 45 bp, Artificial Sequence
  Synthetic
aacggtctcttagagtcaaacaaggaaacacttgagtcagccata

SEQ ID NO: 5590 - DNA, 42 bp, Artificial Sequence
  Synthetic
agtcattgtcaccagatgctactattgtgacacttggagtct

SEQ ID NO: 5591 - DNA, 44 bp, Artificial Sequence
  Synthetic
tagtggagttgttgaagatgaagctgtctttttgcaccaacagt

SEQ ID NO: 5592 - DNA, 42 bp, Artificial Sequence
  Synthetic
accaactccttcggaagtgggaagtcgtgagtaaccgtgtct

SEQ ID NO: 5593 - DNA, 46 bp, Artificial Sequence
  Synthetic
ttggatatagaccattaggatccgcgtctagtcactggtaagtctg

SEQ ID NO: 5594 - DNA, 45 bp, Artificial Sequence
  Synthetic
aactgatgtaggtggtgttagtggtagctgtctcactttcttctg

SEQ ID NO: 5595 - DNA, 41 bp, Artificial Sequence
  Synthetic
ttaaatttcagttttccgcgggatgagctggtgttcgtaaa

SEQ ID NO: 5596 - DNA, 41 bp, Artificial Sequence
  Synthetic
ctgcgccaaatccagcttttgtccttctgatgtagcagaca

SEQ ID NO: 5597 - DNA, 44 bp, Artificial Sequence
  Synthetic
aagtcagttttccttgggtcgagctcgtttaccatttaacaaac

SEQ ID NO: 5598 - DNA, 41 bp, Artificial Sequence
  Synthetic
ggtcagtcatttggtcagcagatctcacaaatggacgtctg

SEQ ID NO: 5599 - DNA, 43 bp, Artificial Sequence
  Synthetic
gaattatactcatgggccaggagactgatactagcttccacag

SEQ ID NO: 5600 - DNA, 41 bp, Artificial Sequence
  Synthetic
ttcagtcgctctgcggagaggtgctagtgctggagagaacc

SEQ ID NO: 5601 - DNA, 40 bp, Artificial Sequence
  Synthetic
aagaggactgagaagccctggacgtggtttgttcctgccg

SEQ ID NO: 5602 - DNA, 43 bp, Artificial Sequence
  Synthetic
acaggttaaaacatattgtgtgggcgactccaacaggctctct

SEQ ID NO: 5603 - DNA, 42 bp, Artificial Sequence
  Synthetic
tggcaactatgtccatgtgccacccgaacttcttttcctcca

SEQ ID NO: 5604 - DNA, 46 bp, Artificial Sequence
  Synthetic
cagaagatggatccaaatagggctttttggtccctgttttatgtct

SEQ ID NO: 5605 - DNA, 42 bp, Artificial Sequence
  Synthetic
gtgccgagcacctagaagacagtttgccatgatgtgtcctgg

SEQ ID NO: 5606 - DNA, 41 bp, Artificial Sequence
  Synthetic
ttaccagttgccaagatagagccgccttggtccatctttcc

SEQ ID NO: 5607 - DNA, 45 bp, Artificial Sequence
  Synthetic
agatgtaggggatgcctatttttccctggtagggtaaatgcagta

SEQ ID NO: 5608 - DNA, 42 bp, Artificial Sequence
  Synthetic
tctactccagatgagaagttccaattggccatagttcacagc

SEQ ID NO: 5609 - DNA, 45 bp, Artificial Sequence
  Synthetic
tagaggcaacaatccaaaaaagccggattttctcttcctggtgta

SEQ ID NO: 5610 - DNA, 44 bp, Artificial Sequence
  Synthetic
gcagagaccttctacacagatggcatatcctgcttttccctctt

SEQ ID NO: 5611 - DNA, 48 bp, Artificial Sequence
  Synthetic
attcctggaaaagatagagcccggggttagttcttttataatgctatg

SEQ ID NO: 5612 - DNA, 38 bp, Artificial Sequence
  Synthetic
gcacacagacaatggccccaacctacccaccatgccac

SEQ ID NO: 5613 - DNA, 44 bp, Artificial Sequence
  Synthetic
tttccaggtctattacagagaaggcttccacagtagttcaccag

SEQ ID NO: 5614 - DNA, 38 bp, Artificial Sequence
  Synthetic
ccagactgtgcagacatcctcttcacctgccgtaaagc

SEQ ID NO: 5615 - DNA, 48 bp, Artificial Sequence
  Synthetic
ggcaaaggtcctggagatattgggcacaaatatctatactttgtgtag

SEQ ID NO: 5616 - DNA, 38 bp, Artificial Sequence
  Synthetic
aggcgccagagagctcattatacatcccgctctgaagt

SEQ ID NO: 5617 - DNA, 44 bp, Artificial Sequence
  Synthetic
atggagcctggtaggaatcagacaatatactaagcaagcacttg

SEQ ID NO: 5618 - DNA, 43 bp, Artificial Sequence
  Synthetic
acacctctatgtgtggcaatgaattgaggttgtggaactcgag

SEQ ID NO: 5619 - DNA, 47 bp, Artificial Sequence
  Synthetic
gagtcatgtgataagcactattgggttacatcttaatagggcaaagc

SEQ ID NO: 5620 - DNA, 40 bp, Artificial Sequence
  Synthetic
agccaatcaacacaaggcctagggtttgcttcacctcctg

SEQ ID NO: 5621 - DNA, 44 bp, Artificial Sequence
  Synthetic
cctcctagggaaggggagttgtccgatttttatctatgtcaatg

SEQ ID NO: 5622 - DNA, 45 bp, Artificial Sequence
  Synthetic
aatgactctttatcgcctgactggtgatatttgcctctaggtagc

SEQ ID NO: 5623 - DNA, 40 bp, Artificial Sequence
  Synthetic
agacttaaggcggcccaactgcctcgcgaatgcttggaaa

SEQ ID NO: 5624 - DNA, 50 bp, Artificial Sequence
  Synthetic
acctaataggagttcctgttacacccatatctattgccaatttataggtc

SEQ ID NO: 5625 - DNA, 46 bp, Artificial Sequence
  Synthetic
gtttgggcacaagtcaggattgcctgttattcactatatggtatcc

SEQ ID NO: 5626 - DNA, 41 bp, Artificial Sequence
  Synthetic
cagtacttggccggtactgggtgcttctaactggcagcttt

SEQ ID NO: 5627 - DNA, 42 bp, Artificial Sequence
  Synthetic
aacatcgtcaaactcacctcatgatcacaccagtcacattga

SEQ ID NO: 5628 - DNA, 49 bp, Artificial Sequence
  Synthetic
acatctggatgctttcctataatgcctctgagaagattaggtagttgtc

SEQ ID NO: 5629 - DNA, 45 bp, Artificial Sequence
  Synthetic
accatacatttgttcagaaggggattttgtcatcagagtggaacc

SEQ ID NO: 5630 - DNA, 46 bp, Artificial Sequence
  Synthetic
aggaacaattgtttatcaaagaggccttttattaccttgctcctgc

SEQ ID NO: 5631 - DNA, 42 bp, Artificial Sequence
  Synthetic
aagaggtttcttcggagctattgacctgcaatcattccttcc

SEQ ID NO: 5632 - DNA, 48 bp, Artificial Sequence
  Synthetic
taagctcacaaatagagcttgcagctcatcttcactgtttattatccc

SEQ ID NO: 5633 - DNA, 44 bp, Artificial Sequence
  Synthetic
tgctgcatctttaaatgatgatggcctagaagcagcagttgagt

SEQ ID NO: 5634 - DNA, 44 bp, Artificial Sequence
  Synthetic
aaggaggtcgcactcagctattgtatatgagacccatacaactg

SEQ ID NO: 5635 - DNA, 40 bp, Artificial Sequence
  Synthetic
cggaagccatggaggttgctcccaattgtcctcattgcct

SEQ ID NO: 5636 - DNA, 44 bp, Artificial Sequence
  Synthetic
tcttgatcgtcttttcttcaaatgcgaaggccctcttttcaaac

SEQ ID NO: 5637 - DNA, 44 bp, Artificial Sequence
  Synthetic
aggccattttcatcatgggagatctcctccataacaaaccagtt

SEQ ID NO: 5638 - DNA, 46 bp, Artificial Sequence
  Synthetic
actgaggaatgtgatttagccttacaacagaatgtttcggactaca

SEQ ID NO: 5639 - DNA, 38 bp, Artificial Sequence
  Synthetic
agaggaagcagatggagagcgagtctcctgtagtgcag

SEQ ID NO: 5640 - DNA, 43 bp, Artificial Sequence
  Synthetic
accttttatgaggaggttacaggaccatatctggcagcatctg

SEQ ID NO: 5641 - DNA, 49 bp, Artificial Sequence
  Synthetic
aaaattgaaggagatacatgggcagacccaagtatattacacttccaaa

SEQ ID NO: 5642 - DNA, 49 bp, Artificial Sequence
  Synthetic
ggcagggccatctgttatagatttctatgtcaataatagatggatcagg

SEQ ID NO: 5643 - DNA, 46 bp, Artificial Sequence
  Synthetic
tcttcaactacacatcctgaccctttcaccttgataatttggtgaa

SEQ ID NO: 5644 - DNA, 43 bp, Artificial Sequence
  Synthetic
ctgtttgaacaggttcctacacgaatattcaaactgcacagcg

SEQ ID NO: 5645 - DNA, 50 bp, Artificial Sequence
  Synthetic
ctcgtgcatctataactaccagaaggactcaatagcagataaatcttgat

SEQ ID NO: 5646 - DNA, 41 bp, Artificial Sequence
  Synthetic
ttttgcagatgactgtctggatgaagtactctggctgtggg

SEQ ID NO: 5647 - DNA, 44 bp, Artificial Sequence
  Synthetic
agagacagagaacgcttagtatggccaacacctagaggatttcc

SEQ ID NO: 5648 - DNA, 40 bp, Artificial Sequence
  Synthetic
tcctccatggggtgaatattggcctggcttcaagggtcta

SEQ ID NO: 5649 - DNA, 38 bp, Artificial Sequence
  Synthetic
ttttgggcgtaaggagcagcatccccaacatttcctgc

SEQ ID NO: 5650 - DNA, 47 bp, Artificial Sequence
  Synthetic
tttagcatttgtacccccaccacaagaagacaaatatctgtatgtgt

SEQ ID NO: 5651 - DNA, 49 bp, Artificial Sequence
  Synthetic
aagcgcaaaaggtctaagtaatttcgcatacagtaaacatttcacagta

SEQ ID NO: 5652 - DNA, 45 bp, Artificial Sequence
  Synthetic
ttaacggcgaaatatgaatcagagaaatagcccatgcaaatcttg

SEQ ID NO: 5653 - DNA, 44 bp, Artificial Sequence
  Synthetic
ccttaccaggttgacactatttgtgtagctaacacacacagtct

SEQ ID NO: 5654 - DNA, 47 bp, Artificial Sequence
  Synthetic
agactttatcagatgaaactgtggccaaaatatcctgtaaggcagtg

SEQ ID NO: 5655 - DNA, 38 bp, Artificial Sequence
  Synthetic
aagtcaaatggtgcagtggggtatgcaatggctggttc

SEQ ID NO: 5656 - DNA, 47 bp, Artificial Sequence
  Synthetic
aattgggacccaccgatttatccagcataatactccaatacactttc

SEQ ID NO: 5657 - DNA, 38 bp, Artificial Sequence
  Synthetic
acaaccgcagacgacaagcccttgtcctcgtcgtcgtc

SEQ ID NO: 5658 - DNA, 45 bp, Artificial Sequence
  Synthetic
aagttgaaggaacaacatgggctttcccaaatatataacactgct

SEQ ID NO: 5659 - DNA, 45 bp, Artificial Sequence
  Synthetic
agaagaaggaattccagatgttgggtgtttctgctcctaaaccag

SEQ ID NO: 5660 - DNA, 43 bp, Artificial Sequence
  Synthetic
actcgttctgctgaccttttccgggattttcaaattcaaatgt

SEQ ID NO: 5661 - DNA, 45 bp, Artificial Sequence
  Synthetic
agtgataaataacaccggcctaccctggcacatttttttcactag

SEQ ID NO: 5662 - DNA, 43 bp, Artificial Sequence
  Synthetic
tcctgaaagagaacgtttagtttggtaccgactccaagaggac

SEQ ID NO: 5663 - DNA, 43 bp, Artificial Sequence
  Synthetic
atgccagacatttcttttgtaaggagctcatctggaggattcc

SEQ ID NO: 5664 - DNA, 46 bp, Artificial Sequence
  Synthetic
tcctcctcaaggattggaggatacctttaggacacatagctgctaa

SEQ ID NO: 5665 - DNA, 38 bp, Artificial Sequence
  Synthetic
aacaaccggttctggtcgttaagacacaggcaccgata

SEQ ID NO: 5666 - DNA, 42 bp, Artificial Sequence
  Synthetic
agaagaatcccgctcttagaatgatttgtcagctgtgatcgg

SEQ ID NO: 5667 - DNA, 47 bp, Artificial Sequence
  Synthetic
agtacagtccattatccaaaggtgttccgtgttttaatctttcaacc

SEQ ID NO: 5668 - DNA, 42 bp, Artificial Sequence
  Synthetic
aatattgctcctttaatggtggcaaggaatctggtcttgcga

SEQ ID NO: 5669 - DNA, 41 bp, Artificial Sequence
  Synthetic
agagcaacagtatcagcagaccccaatttgtgtgctatggc

SEQ ID NO: 5670 - DNA, 41 bp, Artificial Sequence
  Synthetic
gaagagcaacagccattctaagacccttccgctgactatca

SEQ ID NO: 5671 - DNA, 43 bp, Artificial Sequence
  Synthetic
tgagacactttcaaaaggatgcaacattgtcgatgggttcaat

SEQ ID NO: 5672 - DNA, 41 bp, Artificial Sequence
  Synthetic
cagggaatggaaaagttgacgattctggcccgttaatctcc

SEQ ID NO: 5673 - DNA, 43 bp, Artificial Sequence
  Synthetic
acgttcgacactgttcaaataatcacctactctgttccggtgg

SEQ ID NO: 5674 - DNA, 41 bp, Artificial Sequence
  Synthetic
agagtctgcagtattgagaggattgcttaatgctggtccat

SEQ ID NO: 5675 - DNA, 45 bp, Artificial Sequence
  Synthetic
aacacattaactgaaagaggagtgggatgtttgttcgttccactg

SEQ ID NO: 5676 - DNA, 48 bp, Artificial Sequence
  Synthetic
tgaggcaaattctcagagaatcaggccattagttcttattccactgta

SEQ ID NO: 5677 - DNA, 47 bp, Artificial Sequence
  Synthetic
atcaacaatcttttgtaccgagtcccaattcttccagatagaccatt

SEQ ID NO: 5678 - DNA, 47 bp, Artificial Sequence
  Synthetic
cttgccatttcagaacatagatagcctcctttgcttaacatatctcg

SEQ ID NO: 5679 - DNA, 43 bp, Artificial Sequence
  Synthetic
caccagaatgcacagggagatgttatttgatcaattgccgatt

SEQ ID NO: 5680 - DNA, 47 bp, Artificial Sequence
  Synthetic
aactgtacgaacgagtgaaaagactgaaatatttcaaagcaaccagt

SEQ ID NO: 5681 - DNA, 41 bp, Artificial Sequence
  Synthetic
acttctgcctcatcacagccgcagatttgtaaattccgcag

SEQ ID NO: 5682 - DNA, 49 bp, Artificial Sequence
  Synthetic
tatcgccaagtgagaaagatcatcgtccacctatttaaaatgaatctga

SEQ ID NO: 5683 - DNA, 40 bp, Artificial Sequence
  Synthetic
gtgtggttgtacacagtgtggatgcagctgttgtatgtcc

SEQ ID NO: 5684 - DNA, 44 bp, Artificial Sequence
  Synthetic
agggtggtggaattgcttaagtgaccaaatgacaatccaaacag

SEQ ID NO: 5685 - DNA, 46 bp, Artificial Sequence
  Synthetic
accacagtgtctaaaggaatgtggctctattaacagttgattagca

SEQ ID NO: 5686 - DNA, 45 bp, Artificial Sequence
  Synthetic
acacagatagtaatgcagctgctgtctacacataattccacaatc

SEQ ID NO: 5687 - DNA, 41 bp, Artificial Sequence
  Synthetic
aacatgtgcagcactggaagtccatttcacgagccttaaat

SEQ ID NO: 5688 - DNA, 46 bp, Artificial Sequence
  Synthetic
actgtggaggttgtattcgatggcgtatataaatgtccatgctgta

SEQ ID NO: 5689 - DNA, 38 bp, Artificial Sequence
  Synthetic
ccccgccgcgaaaacgatacttgtgacgccgtagtgct

SEQ ID NO: 5690 - DNA, 41 bp, Artificial Sequence
  Synthetic
tgtgttgtgtgtgtggattagttagctagcaagacaggagg

SEQ ID NO: 5691 - DNA, 48 bp, Artificial Sequence
  Synthetic
ttaaactactgcagacatacgtgtgtacaaacaatacaaaaacccaac

SEQ ID NO: 5692 - DNA, 46 bp, Artificial Sequence
  Synthetic
ggacatttctcctcccaccaatacgtaaagtaaaaggatcactgta

SEQ ID NO: 5693 - DNA, 45 bp, Artificial Sequence
  Synthetic
aggctatagaattgcaacctttaggtcattaattgcggatgaagc

SEQ ID NO: 5694 - DNA, 41 bp, Artificial Sequence
  Synthetic
ctcctgtttccaaggtggtcaactgctggcatgataaaagt

SEQ ID NO: 5695 - DNA, 44 bp, Artificial Sequence
  Synthetic
tatggcagatgtagggtttggagcacctcagcttttgaagtttg

SEQ ID NO: 5696 - DNA, 41 bp, Artificial Sequence
  Synthetic
attggaatgttggtgtagctccatatggcctgagactgcac

SEQ ID NO: 5697 - DNA, 46 bp, Artificial Sequence
  Synthetic
tgtactgccaaatggtattgctaagctttctaaaacatgcttgtgc

SEQ ID NO: 5698 - DNA, 45 bp, Artificial Sequence
  Synthetic
aaatggttcaatgggcgtatgaaaagcataatagtaagcaattgc

SEQ ID NO: 5699 - DNA, 49 bp, Artificial Sequence
  Synthetic
aaatgttgtagggaatgtgatggtccctgatacttaagtaaattagcaa

SEQ ID NO: 5700 - DNA, 41 bp, Artificial Sequence
  Synthetic
gattcctcaagaagcggcaggatcgtcgtcgttgtcctctt

SEQ ID NO: 5701 - DNA, 49 bp, Artificial Sequence
  Synthetic
caagagttgagcgacttaaagcagctccaacatttcaatttattagcac

SEQ ID NO: 5702 - DNA, 40 bp, Artificial Sequence
  Synthetic
tgtaggtgagcatcccaatgtagctgcacatcgatttgag

SEQ ID NO: 5703 - DNA, 44 bp, Artificial Sequence
  Synthetic
tggggacagattgtttttttatggtatcaccaacaactccatct

SEQ ID NO: 5704 - DNA, 43 bp, Artificial Sequence
  Synthetic
tcgttagttagcagcgaatctcattccctgagctttatgtacc

SEQ ID NO: 5705 - DNA, 40 bp, Artificial Sequence
  Synthetic
attaatgcaatggactctcgcacctgaggaggtgaaggaa

SEQ ID NO: 5706 - DNA, 42 bp, Artificial Sequence
  Synthetic
aagcgaccacggaatatctatgagtttagtagtgcgacgctt

SEQ ID NO: 5707 - DNA, 43 bp, Artificial Sequence
  Synthetic
ttaccctcctattatttgcccacaaacgtttgtgtgcgatgtt

SEQ ID NO: 5708 - DNA, 41 bp, Artificial Sequence
  Synthetic
aagctggcaagaacaacacccagaagatgactcaaatgcct

SEQ ID NO: 5709 - DNA, 42 bp, Artificial Sequence
  Synthetic
atggctggatcaagtgagcaggccatttgcctagcctgactt

SEQ ID NO: 5710 - DNA, 42 bp, Artificial Sequence
  Synthetic
tcttcaaatgcatttatcgtcgctagactcaggcactccttc

SEQ ID NO: 5711 - DNA, 49 bp, Artificial Sequence
  Synthetic
acctaacaacaaatggaagtaatgcgttttagatctttctcgatcatgt

SEQ ID NO: 5712 - DNA, 46 bp, Artificial Sequence
  Synthetic
aagctatcactagtatctcagggttcttgtctgaaagcttccaatc

SEQ ID NO: 5713 - DNA, 46 bp, Artificial Sequence
  Synthetic
atatgttccagctaggacaagcaccaagttcatcttctagtgttga

SEQ ID NO: 5714 - DNA, 41 bp, Artificial Sequence
  Synthetic
atcaactaatatctcctcggccctaggtcttcttgggggtc

SEQ ID NO: 5715 - DNA, 43 bp, Artificial Sequence
  Synthetic
gaggaatctccagaagcatcacgatcaatatcctccgtgttct

SEQ ID NO: 5716 - DNA, 43 bp, Artificial Sequence
  Synthetic
aatcctcatcatggaatctcaccaagttgtgtttgtctgttcg

SEQ ID NO: 5717 - DNA, 48 bp, Artificial Sequence
  Synthetic
atacactagagaacgatgtgcaagtgttgcatttgattcattgtatga

SEQ ID NO: 5718 - DNA, 45 bp, Artificial Sequence
  Synthetic
gaacagagaaaagcagtaccccatctaaataccgagatccatgtt

SEQ ID NO: 5719 - DNA, 44 bp, Artificial Sequence
  Synthetic
acaaagttgctcttgctcctccgtacaattcacgaagattactc

SEQ ID NO: 5720 - DNA, 49 bp, Artificial Sequence
  Synthetic
aatctctacttcaatctggacgcagtcctaagtttttgattatccctta

SEQ ID NO: 5721 - DNA, 44 bp, Artificial Sequence
  Synthetic
tgtgatagtaaccaatcaggaatcccccctccaaagaatcgttt

SEQ ID NO: 5722 - DNA, 43 bp, Artificial Sequence
  Synthetic
agaatggtatattcctcttcccagcacatctgctccacctaga

SEQ ID NO: 5723 - DNA, 46 bp, Artificial Sequence
  Synthetic
agtacaataggtatcaacggaatgctgtgtagaatgcaagagttcc

SEQ ID NO: 5724 - DNA, 43 bp, Artificial Sequence
  Synthetic
aagcataccaatcacggaaagggagcttgttgttatgagtagc

SEQ ID NO: 5725 - DNA, 43 bp, Artificial Sequence
  Synthetic
acccaaaaataaggttaatgccaggcacagccatcaacagtcg

SEQ ID NO: 5726 - DNA, 46 bp, Artificial Sequence
  Synthetic
atgagaatgtaatctgcaacacaacgactataagatgcctgattgc

SEQ ID NO: 5727 - DNA, 42 bp, Artificial Sequence
  Synthetic
acttactcaacagcaactgaaagaccagctgagagtgttctg

SEQ ID NO: 5728 - DNA, 48 bp, Artificial Sequence
  Synthetic
aaacgctgttgattattaccagagcaattgtcaaatcctcatctaact

SEQ ID NO: 5729 - DNA, 48 bp, Artificial Sequence
  Synthetic
tagacgaaacaagatcagcatcttctgaataaccattctcaattgctt

SEQ ID NO: 5730 - DNA, 42 bp, Artificial Sequence
  Synthetic
cagtgttgggggattcaattacaatgcagcaactgatggatc

SEQ ID NO: 5731 - DNA, 45 bp, Artificial Sequence
  Synthetic
aagtggacttgaaacacctgaccttctgatcctgttattaccacc

SEQ ID NO: 5732 - DNA, 49 bp, Artificial Sequence
  Synthetic
gtctcaaaattttaacaccggtagcttgcagtatcttttaatctgtgtg

SEQ ID NO: 5733 - DNA, 40 bp, Artificial Sequence
  Synthetic
atttgggttgcaacagtttggaaatctcgtgacggaacac

SEQ ID NO: 5734 - DNA, 41 bp, Artificial Sequence
  Synthetic
tagggcatgccgatttgtttctgcagacccataacatatgt

SEQ ID NO: 5735 - DNA, 48 bp, Artificial Sequence
  Synthetic
cgtaagcccttagattacaaacgtcaccatgcacatattcaatctctt

SEQ ID NO: 5736 - DNA, 40 bp, Artificial Sequence
  Synthetic
ccaagtcttggtctgttggtgactgatcacgttgcaacaa

SEQ ID NO: 5737 - DNA, 43 bp, Artificial Sequence
  Synthetic
ggatacattctgcttcaatgtacgctttcagcacccaacatgg

SEQ ID NO: 5738 - DNA, 43 bp, Artificial Sequence
  Synthetic
tgaaacttgtactattgccggtaaaagcgcattatcaagcaaa

SEQ ID NO: 5739 - DNA, 44 bp, Artificial Sequence
  Synthetic
acttacaatcgccaacaattattccacatcgccaattacaacag

SEQ ID NO: 5740 - DNA, 45 bp, Artificial Sequence
  Synthetic
tgattacagggcttttatcagtgttttagactctgcagctttcac

SEQ ID NO: 5741 - DNA, 48 bp, Artificial Sequence
  Synthetic
ggtttctactgttaaaattggtggcacaatgtaaggtttatcaaaagc

SEQ ID NO: 5742 - DNA, 46 bp, Artificial Sequence
  Synthetic
agatgcagagtttgtagaaccagttcttataaaagacgtgctcatc

SEQ ID NO: 5743 - DNA, 46 bp, Artificial Sequence
  Synthetic
ttcaatcagcactttctgttgtttccgccttcttcatcataaatgt

SEQ ID NO: 5744 - DNA, 45 bp, Artificial Sequence
  Synthetic
tatgcagttttttaaaatgggccgacgtatacattgctcagcagt

SEQ ID NO: 5745 - DNA, 43 bp, Artificial Sequence
  Synthetic
aggcgtttccttatggtacttgaactgcctaattgtacacatg

SEQ ID NO: 5746 - DNA, 46 bp, Artificial Sequence
  Synthetic
cttcctcgttcatgacaatgtagcgtcaacaccattaacaacagta

SEQ ID NO: 5747 - DNA, 46 bp, Artificial Sequence
  Synthetic
aaccagtgtccgtaattaaagttgcacacacaacaagtcttctgta

SEQ ID NO: 5748 - DNA, 48 bp, Artificial Sequence
  Synthetic
ataccagctgactacatcttgcccctacaaaagaaacattacaagtca

SEQ ID NO: 5749 - DNA, 45 bp, Artificial Sequence
  Synthetic
agatgctgttacttttgcaacagtccattaacaacagcactttca

SEQ ID NO: 5750 - DNA, 44 bp, Artificial Sequence
  Synthetic
gctattatagtcagtgtcgaacagcagcaacaccactcaaaagt

SEQ ID NO: 5751 - DNA, 47 bp, Artificial Sequence
  Synthetic
gttcttaaatctaagtggtggctgcgcaaaactactgagtacaatgt

SEQ ID NO: 5752 - DNA, 42 bp, Artificial Sequence
  Synthetic
tttggatgttgtgtggaagcatgacaatgaaaggttgcatat

SEQ ID NO: 5753 - DNA, 46 bp, Artificial Sequence
  Synthetic
acacaattgtcaatggtgtgcaacacaaaacttactaccaccattt

SEQ ID NO: 5754 - DNA, 42 bp, Artificial Sequence
  Synthetic
aacaactttgtcagttcgtatgcttacaacacgccaagtcat

SEQ ID NO: 5755 - DNA, 40 bp, Artificial Sequence
  Synthetic
ctggtgatgctggccattcaatcaaacacacaagaccaca

SEQ ID NO: 5756 - DNA, 44 bp, Artificial Sequence
  Synthetic
ttttacactacaagctgcttttggtcaggtgttgtgactccaaa

SEQ ID NO: 5757 - DNA, 40 bp, Artificial Sequence
  Synthetic
gtgttgaatccaatgcaggtgtaacgtaaccattggcaac

SEQ ID NO: 5758 - DNA, 42 bp, Artificial Sequence
  Synthetic
ttttgctccatggtggttgtgtcagcaaactaggtaacaaac

SEQ ID NO: 5759 - DNA, 38 bp, Artificial Sequence
  Synthetic
tttgcgcaaaatggcacaacatagcagacacggacaac

SEQ ID NO: 5760 - DNA, 44 bp, Artificial Sequence
  Synthetic
ctggtgaaggttttaacatcttagctgttcacaccaaaaacacc

SEQ ID NO: 5761 - DNA, 47 bp, Artificial Sequence
  Synthetic
ttatgctgctatattgaatggttgctcattataatgctccacaaaca

SEQ ID NO: 5762 - DNA, 46 bp, Artificial Sequence
  Synthetic
taaccctggttttcttactccgtaaatgtaagacagagtgacaaag

SEQ ID NO: 5763 - DNA, 45 bp, Artificial Sequence
  Synthetic
gcacttatttgttctcactcattgcaccagcaaactaacgtagtc

SEQ ID NO: 5764 - DNA, 47 bp, Artificial Sequence
  Synthetic
tatggttgctaatggtttgaatgcaagtttaaaagacagaaagagcg

SEQ ID NO: 5765 - DNA, 40 bp, Artificial Sequence
  Synthetic
aacttgtgtgacgaccctgaaaagaaaaaggccaacaacg

SEQ ID NO: 5766 - DNA, 42 bp, Artificial Sequence
  Synthetic
tgctgcagctatgtacaaagaagtgcatggcactaacaactt

SEQ ID NO: 5767 - DNA, 43 bp, Artificial Sequence
  Synthetic
agatgttacaaaggaaaaccaggaaacgacacgttcacaagtc

SEQ ID NO: 5768 - DNA, 46 bp, Artificial Sequence
  Synthetic
tacagttgaattggaaccaccttgagatacttaatttggggtccag

SEQ ID NO: 5769 - DNA, 41 bp, Artificial Sequence
  Synthetic
gactaatggttctggtagcggttcctgcgtagtgttggaat

SEQ ID NO: 5770 - DNA, 40 bp, Artificial Sequence
  Synthetic
ctagtgccgctcgactagagaatgcacggacacagtaatc

SEQ ID NO: 5771 - DNA, 45 bp, Artificial Sequence
  Synthetic
ggagatattggttcttactggttgttctatggggtcaaaccaatt

SEQ ID NO: 5772 - DNA, 47 bp, Artificial Sequence
  Synthetic
tgatgcctgttatgggtatgactaagatgtcacttttcataaagcac

SEQ ID NO: 5773 - DNA, 43 bp, Artificial Sequence
  Synthetic
agttgctactgctggttaccatgttaacatctttgttccacac

SEQ ID NO: 5774 - DNA, 43 bp, Artificial Sequence
  Synthetic
tttcgatgagggttcagaattaacaattgcagcatcacccttt

SEQ ID NO: 5775 - DNA, 45 bp, Artificial Sequence
  Synthetic
tgtctgaaatccatagtagctaccagccataaaacttggtagtgc

SEQ ID NO: 5776 - DNA, 45 bp, Artificial Sequence
  Synthetic
agccactttgtattatcagaatggtagatcttcctcagtccaaca

SEQ ID NO: 5777 - DNA, 46 bp, Artificial Sequence
  Synthetic
ttgtctaagcatcctaaacctgagtagatgtttgacccagtctaac

SEQ ID NO: 5778 - DNA, 42 bp, Artificial Sequence
  Synthetic
tttgggttccatggacattgatggcgaatgtcagaccaatca

SEQ ID NO: 5779 - DNA, 47 bp, Artificial Sequence
  Synthetic
atacggttacttacaaatccactgcagcaacattatgagaagtcaaa

SEQ ID NO: 5780 - DNA, 38 bp, Artificial Sequence
  Synthetic
cgctctgtgcaaaagctgtcaacactcaactctggcac

SEQ ID NO: 5781 - DNA, 44 bp, Artificial Sequence
  Synthetic
gcttccagctcctagagttctcaacattatagtcaattggttcc

SEQ ID NO: 5782 - DNA, 50 bp, Artificial Sequence
  Synthetic
tttaggcttacaaactcagacagtggcgaatataacatagtcatattcac

SEQ ID NO: 5783 - DNA, 43 bp, Artificial Sequence
  Synthetic
aagactagtggtgacttggctcacatgttcataggtacaaaca

SEQ ID NO: 5784 - DNA, 45 bp, Artificial Sequence
  Synthetic
tgtacctctacaagttggtttttccgttagaacacaaccttcagg

SEQ ID NO: 5785 - DNA, 45 bp, Artificial Sequence
  Synthetic
acattgccaatgtggtactgttgcaatgcatgtttaaagcaacaa

SEQ ID NO: 5786 - DNA, 41 bp, Artificial Sequence
  Synthetic
gtcgcactgtgcagagtcatgattgctttagggttgtacaa

SEQ ID NO: 5787 - DNA, 39 bp, Artificial Sequence
  Synthetic
tcatgcatttcacactcctgcaacggtgctggtttcaat

SEQ ID NO: 5788 - DNA, 47 bp, Artificial Sequence
  Synthetic
agagaacattgcttttaacgttgttctaatggctactggtaattcac

SEQ ID NO: 5789 - DNA, 46 bp, Artificial Sequence
  Synthetic
ctgtttgtggttatacagactttgccagagtaaaacgttcgtatga

SEQ ID NO: 5790 - DNA, 40 bp, Artificial Sequence
  Synthetic
acaagactttttgcctcgcacacgcctatatccatgttca

SEQ ID NO: 5791 - DNA, 48 bp, Artificial Sequence
  Synthetic
ccaaggttcatgaggtcataattgagcattatctttacaccatagcat

SEQ ID NO: 5792 - DNA, 40 bp, Artificial Sequence
  Synthetic
tggctctgattatggtgttgcaaacaacaattgcgtcgtg

SEQ ID NO: 5793 - DNA, 50 bp, Artificial Sequence
  Synthetic
aactccactgttatgagtttgtcctgtgtttgcaattaaatttactcagg

SEQ ID NO: 5794 - DNA, 48 bp, Artificial Sequence
  Synthetic
aaatgtatttgctgttgagagtggtaggaaccaattattgaatgcaaa

SEQ ID NO: 5795 - DNA, 38 bp, Artificial Sequence
  Synthetic
ctgcttttgtgggtgcactaaatgtcctgtgcgtgaaa

SEQ ID NO: 5796 - DNA, 44 bp, Artificial Sequence
  Synthetic
acgtttattgtgttgtacgttgactaacagttaaagcacttgcc

SEQ ID NO: 5797 - DNA, 44 bp, Artificial Sequence
  Synthetic
ggcaccatctactctatcactcccagcttgctgataaacaacaa

SEQ ID NO: 5798 - DNA, 41 bp, Artificial Sequence
  Synthetic
agtgtttcagctatcgtcacagcctcaacctggaccgaagt

SEQ ID NO: 5799 - DNA, 38 bp, Artificial Sequence
  Synthetic
agcgtcatacctagcttgcccttctatggcactgcgac

SEQ ID NO: 5800 - DNA, 44 bp, Artificial Sequence
  Synthetic
atgttgcattgcagactgatgttgttaaaagatgcagcaagaat

SEQ ID NO: 5801 - DNA, 43 bp, Artificial Sequence
  Synthetic
ctgctttgaatgtattcgtttctcattgttgtgcaagctgtct

SEQ ID NO: 5802 - DNA, 48 bp, Artificial Sequence
  Synthetic
tcacatctcgcataatgtttgaaccgtgacattgcaattttcaatttg

SEQ ID NO: 5803 - DNA, 45 bp, Artificial Sequence
  Synthetic
acactgttcaaaaattgcaaactctagccactttaagtcgactaa

SEQ ID NO: 5804 - DNA, 46 bp, Artificial Sequence
  Synthetic
tacagtaatggctctaggtttgttcgcattgctaagcgattgatta

SEQ ID NO: 5805 - DNA, 43 bp, Artificial Sequence
  Synthetic
ttttccatacagcttggcactggtgtggttacattgaagacaa

SEQ ID NO: 5806 - DNA, 48 bp, Artificial Sequence
  Synthetic
aagctttgtttcacttgccatatgtatatgattggtaaatgtggtaca

SEQ ID NO: 5807 - DNA, 42 bp, Artificial Sequence
  Synthetic
aattgggattctaattgggcctttaacgagtgttgatacggc

SEQ ID NO: 5808 - DNA, 46 bp, Artificial Sequence
  Synthetic
acgagtaaaacacggtgatttttctctttcgttttctgtcatgttg

SEQ ID NO: 5809 - DNA, 39 bp, Artificial Sequence
  Synthetic
gaaagggcaaacgggtggatggtcctgtgccaagataat

SEQ ID NO: 5810 - DNA, 43 bp, Artificial Sequence
  Synthetic
tttgacaagcctcaggaaaaagatacgagaaggcttaggagta

SEQ ID NO: 5811 - DNA, 42 bp, Artificial Sequence
  Synthetic
ccagagaccttgaccacaacttttagctttaacaccattggc

SEQ ID NO: 5812 - DNA, 44 bp, Artificial Sequence
  Synthetic
aacttcacctgcaactgctgagcatgtttagtttacttcatcaa

SEQ ID NO: 5813 - DNA, 43 bp, Artificial Sequence
  Synthetic
actgaacctaggtgaacgctagtgcgatctttgattactccag

SEQ ID NO: 5814 - DNA, 46 bp, Artificial Sequence
  Synthetic
cttttagtatttggcttccgtccttaagtagccaaatacctaggac

SEQ ID NO: 5815 - DNA, 38 bp, Artificial Sequence
  Synthetic
ggaaatccccatgcactgttcacacttagcagctgact

SEQ ID NO: 5816 - DNA, 40 bp, Artificial Sequence
  Synthetic
aatggggaacaggagcagcagtgcaaaatgtccaggcact

SEQ ID NO: 5817 - DNA, 46 bp, Artificial Sequence
  Synthetic
agaagcaaactatgttaaaccaccaattgcaccataggagctaatt

SEQ ID NO: 5818 - DNA, 49 bp, Artificial Sequence
  Synthetic
aggacaatggataaaaaagtgtgggattaattagctttttccagtctcc

SEQ ID NO: 5819 - DNA, 46 bp, Artificial Sequence
  Synthetic
agtgctatatgacaacgaggaaaataggtcttctgaatcttggtaa

SEQ ID NO: 5820 - DNA, 43 bp, Artificial Sequence
  Synthetic
cactatccgtcgagacttgcagtgtgttagatggtccttttac

SEQ ID NO: 5821 - DNA, 40 bp, Artificial Sequence
  Synthetic
aaatggattgccagtgtggtgtacatacccagaggaaccc

SEQ ID NO: 5822 - DNA, 42 bp, Artificial Sequence
  Synthetic
gcttccattgttcccctggagggcagagggtctacaggtaca

SEQ ID NO: 5823 - DNA, 47 bp, Artificial Sequence
  Synthetic
cagccgcagaggttattattggtatccaaaggtatagattcaccaat

SEQ ID NO: 5824 - DNA, 40 bp, Artificial Sequence
  Synthetic
cgcctttgaggaggaggtaaccgcagcagcagcaagtgta

SEQ ID NO: 5825 - DNA, 42 bp, Artificial Sequence
  Synthetic
atctcctgccttggaaactgtgtttaccaccagtagaggtta

SEQ ID NO: 5826 - DNA, 45 bp, Artificial Sequence
  Synthetic
tccggtaaattatatttgccaccctcacgtaatcatctgtaggca

SEQ ID NO: 5827 - DNA, 41 bp, Artificial Sequence
  Synthetic
aatcctgagtctgaacgtttgggtagacccaacacctaacg

SEQ ID NO: 5828 - DNA, 48 bp, Artificial Sequence
  Synthetic
tggtgacaagattccagaacaaaatgactccccaggaataatatatgt

SEQ ID NO: 5829 - DNA, 40 bp, Artificial Sequence
  Synthetic
ccatctattggggatgcgtacatttccttagggggctctg

SEQ ID NO: 5830 - DNA, 41 bp, Artificial Sequence
  Synthetic
ggcagtttggcttcgaggtgcattgatggcctggaactgac

SEQ ID NO: 5831 - DNA, 36 bp, Artificial Sequence
  Synthetic
tcctgtcacaccccaccgttgaccctgtccgtgtgc

SEQ ID NO: 5832 - DNA, 41 bp, Artificial Sequence
  Synthetic
agcatgtgccccaatcttggagatccaggtgtagatgcagg

SEQ ID NO: 5833 - DNA, 40 bp, Artificial Sequence
  Synthetic
tccgactacctcccggagatgcgctcctccacctcaaaca

SEQ ID NO: 5834 - DNA, 39 bp, Artificial Sequence
  Synthetic
ccagagacggtgttgcgccggcaaaggatgaccaggttc

SEQ ID NO: 5835 - DNA, 38 bp, Artificial Sequence
  Synthetic
tgggtgcaaggctcgtgcgcaaaacatatggcatcccg

SEQ ID NO: 5836 - DNA, 42 bp, Artificial Sequence
  Synthetic
acacccagttatgcagtgccatgatagaattccaggaggttt

SEQ ID NO: 5837 - DNA, 37 bp, Artificial Sequence
  Synthetic
gtaggtgcctccagagcccctaagtttgggggcgccc

SEQ ID NO: 5838 - DNA, 38 bp, Artificial Sequence
  Synthetic
ccggtatcgggccagaggtggtggagtgttgggcttag

SEQ ID NO: 5839 - DNA, 40 bp, Artificial Sequence
  Synthetic
tccgtagaagggtcctcgtcctacccctgaaggtgaaccg

SEQ ID NO: 5840 - DNA, 35 bp, Artificial Sequence
  Synthetic
tgggccctcaagtccagccagagaagggccggtgg

SEQ ID NO: 5841 - DNA, 40 bp, Artificial Sequence
  Synthetic
gggccaagaacccagacgagtaccacctcctcttcttgct

SEQ ID NO: 5842 - DNA, 42 bp, Artificial Sequence
  Synthetic
aagccagacagcagccaattgtccactttataccaggggcag

SEQ ID NO: 5843 - DNA, 38 bp, Artificial Sequence
  Synthetic
accggtcgcccagtcctacggacccttctacggactcg

SEQ ID NO: 5844 - DNA, 40 bp, Artificial Sequence
  Synthetic
cccgtcttactgcccagcctggaaatgcataggagtgcga

SEQ ID NO: 5845 - DNA, 37 bp, Artificial Sequence
  Synthetic
cgagttacgctccttggagggccttcttccacggcgc

SEQ ID NO: 5846 - DNA, 35 bp, Artificial Sequence
  Synthetic
tgaccctcgcgccccatcttccacacccaccaccg

SEQ ID NO: 5847 - DNA, 38 bp, Artificial Sequence
  Synthetic
cacaaagctgtgtgacggtcccatcgagctcgctggcg

SEQ ID NO: 5848 - DNA, 37 bp, Artificial Sequence
  Synthetic
cggaagccctcgtttcggccatcactctcccaggccc

SEQ ID NO: 5849 - DNA, 40 bp, Artificial Sequence
  Synthetic
gtggattcgggggaagctggtccttctacgagcacgaaga

SEQ ID NO: 5850 - DNA, 37 bp, Artificial Sequence
  Synthetic
tcttgagctggcgcgggtaacgctgcaggatctggtc

SEQ ID NO: 5851 - DNA, 37 bp, Artificial Sequence
  Synthetic
gccagagccaacctcagctcaagtcgagggcatggcc

SEQ ID NO: 5852 - DNA, 39 bp, Artificial Sequence
  Synthetic
gcaccaccatcgtccacgagccgctatgctattgggaat

SEQ ID NO: 5853 - DNA, 38 bp, Artificial Sequence
  Synthetic
gaccggacggccacgttgtgagagtatggggcccctcc

SEQ ID NO: 5854 - DNA, 40 bp, Artificial Sequence
  Synthetic
cgtcgtccaggaccaaggggaaggaggagaacccgaggat

SEQ ID NO: 5855 - DNA, 37 bp, Artificial Sequence
  Synthetic
ccgaagggaggtgatggggaaaaaccatcccccggcc

SEQ ID NO: 5856 - DNA, 38 bp, Artificial Sequence
  Synthetic
gagggggaatcgtcggttagggtttgctcgcacggccc

SEQ ID NO: 5857 - DNA, 40 bp, Artificial Sequence
  Synthetic
aacgctcttttccttcaccgctcagatccctctggcgacg

SEQ ID NO: 5858 - DNA, 39 bp, Artificial Sequence
  Synthetic
gtggccaggcccaacgactacctccctcttttcactcct

SEQ ID NO: 5859 - DNA, 40 bp, Artificial Sequence
  Synthetic
agaaggggctgtggacataggctactgccggtccctgagg

SEQ ID NO: 5860 - DNA, 37 bp, Artificial Sequence
  Synthetic
gacacgccctggtcggactagagcctctccaggtccc

SEQ ID NO: 5861 - DNA, 34 bp, Artificial Sequence
  Synthetic
ccggcagccccttcatcctgcaggtcgcgccaaa

SEQ ID NO: 5862 - DNA, 36 bp, Artificial Sequence
  Synthetic
cgctgcctggtgaatgcgctcatccccctgcgtgtc

SEQ ID NO: 5863 - DNA, 36 bp, Artificial Sequence
  Synthetic
gctcggtagcagcggactcctaacggccggaatgcg

SEQ ID NO: 5864 - DNA, 38 bp, Artificial Sequence
  Synthetic
cctgccattcccagccactcccctcgcgagctgaacag

SEQ ID NO: 5865 - DNA, 40 bp, Artificial Sequence
  Synthetic
gagggccagatgcaggagcttgatagagggacatctgggc

SEQ ID NO: 5866 - DNA, 36 bp, Artificial Sequence
  Synthetic
ttcagctgctggacacgcagcgcacctacttcaccc

SEQ ID NO: 5867 - DNA, 35 bp, Artificial Sequence
  Synthetic
ggcgaggcgttgtggcacatgccatcctctcgcgg

SEQ ID NO: 5868 - DNA, 40 bp, Artificial Sequence
  Synthetic
gccaggtggattttgagctccgcctccagaatcagcggcg

SEQ ID NO: 5869 - DNA, 42 bp, Artificial Sequence
  Synthetic
ggcatagaggcctaggtccacaaacaagaccaccatcctgct

SEQ ID NO: 5870 - DNA, 42 bp, Artificial Sequence
  Synthetic
agcccaggaccagttctactccctggtcaaagaaggcgagaa

SEQ ID NO: 5871 - DNA, 44 bp, Artificial Sequence
  Synthetic
agatggggatatttaaaaggggcaggtttaacgagcagagaaga

SEQ ID NO: 5872 - DNA, 39 bp, Artificial Sequence
  Synthetic
acctacgcccttgccccctccgtcgctaaaaacacctgg

SEQ ID NO: 5873 - DNA, 40 bp, Artificial Sequence
  Synthetic
ctcccagtcagatgtccgtgctttgacctgtgcctcagca

SEQ ID NO: 5874 - DNA, 36 bp, Artificial Sequence
  Synthetic
gccaggatgccaccgaggttgaacaggccactcggg

SEQ ID NO: 5875 - DNA, 38 bp, Artificial Sequence
  Synthetic
acccggtccttgtgactgcttacgttgttgcatgccgc

SEQ ID NO: 5876 - DNA, 38 bp, Artificial Sequence
  Synthetic
atgacccaacgaaacagtcccgtcgcaggggcattggc

SEQ ID NO: 5877 - DNA, 39 bp, Artificial Sequence
  Synthetic
catggtcgggctcgggagagagtccggacagtttcatgc

SEQ ID NO: 5878 - DNA, 44 bp, Artificial Sequence
  Synthetic
ggggcattaactaagcttatgagctttcctccagaaagagtgac

SEQ ID NO: 5879 - DNA, 39 bp, Artificial Sequence
  Synthetic
ccagtttgccccatcgtttcccgcaaggatcccatgccc

SEQ ID NO: 5880 - DNA, 40 bp, Artificial Sequence
  Synthetic
cgaggatgaagcaacccccgggtagatggcgagactcttg

SEQ ID NO: 5881 - DNA, 40 bp, Artificial Sequence
  Synthetic
gctccgccacgtattccccgatctacgcttttagccacgg

SEQ ID NO: 5882 - DNA, 38 bp, Artificial Sequence
  Synthetic
tctctcaggacctcaaaggcgggcgaaccaagcccagg

SEQ ID NO: 5883 - DNA, 39 bp, Artificial Sequence
  Synthetic
atgtggcggctcttgaacccagacactccgagcctactg

SEQ ID NO: 5884 - DNA, 37 bp, Artificial Sequence
  Synthetic
cccggccatctttgccggattctggtagaggcgctgc

SEQ ID NO: 5885 - DNA, 38 bp, Artificial Sequence
  Synthetic
ggggacacggagcctgaccaaacttccagcaccaggcg

SEQ ID NO: 5886 - DNA, 40 bp, Artificial Sequence
  Synthetic
gatctcgtcccagttttgcggctcgacctggtcctcggag

SEQ ID NO: 5887 - DNA, 35 bp, Artificial Sequence
  Synthetic
gcccccggccatactccaatcttgagccggctggg

SEQ ID NO: 5888 - DNA, 39 bp, Artificial Sequence
  Synthetic
gcccatcatcccccgagcatcttccagcctctctttcca

SEQ ID NO: 5889 - DNA, 40 bp, Artificial Sequence
  Synthetic
catcgcaatcatgaagtcctccacaagcgttttgacccac

SEQ ID NO: 5890 - DNA, 38 bp, Artificial Sequence
  Synthetic
ggaccacgggtgtcaccagcgacctgcttctggacgcc

SEQ ID NO: 5891 - DNA, 41 bp, Artificial Sequence
  Synthetic
aatcccatgtcagggttggggttggtatcatgcacctcgct

SEQ ID NO: 5892 - DNA, 36 bp, Artificial Sequence
  Synthetic
cccgtgccgcagcgtaaacttctacggccccaggtc

SEQ ID NO: 5893 - DNA, 38 bp, Artificial Sequence
  Synthetic
gtgacgatgccatcaaccagctcggctactcgggggtt

SEQ ID NO: 5894 - DNA, 38 bp, Artificial Sequence
  Synthetic
aaacaccccccccactggcctcaagggggtcagtacct

SEQ ID NO: 5895 - DNA, 37 bp, Artificial Sequence
  Synthetic
ggggcacctaaagacccccctttcgctcttggccggg

SEQ ID NO: 5896 - DNA, 41 bp, Artificial Sequence
  Synthetic
tgtcttccacaccatccacagcacattttccccaggcagtc

SEQ ID NO: 5897 - DNA, 38 bp, Artificial Sequence
  Synthetic
cggagccccaagccacctttgtcgcccgatgtcgtaaa

SEQ ID NO: 5898 - DNA, 39 bp, Artificial Sequence
  Synthetic
tcttcatacaggcccgcaatttcactatctgctgctgac

SEQ ID NO: 5899 - DNA, 40 bp, Artificial Sequence
  Synthetic
cctggtccagcgttgcctcccgatttgacctcacacgaga

SEQ ID NO: 5900 - DNA, 40 bp, Artificial Sequence
  Synthetic
ttggtatagggcaaggttgggcgtggtgctacgcgagttg

SEQ ID NO: 5901 - DNA, 39 bp, Artificial Sequence
  Synthetic
ccttggggtagccgacggtgggtcacctgactactgaga

SEQ ID NO: 5902 - DNA, 41 bp, Artificial Sequence
  Synthetic
tgggcagcatgcttggataacttctcttcgaacacctggcc

SEQ ID NO: 5903 - DNA, 39 bp, Artificial Sequence
  Synthetic
ccgaaagggccaggtcggagcagcctatttttgagcacc

SEQ ID NO: 5904 - DNA, 38 bp, Artificial Sequence
  Synthetic
atttccgtcagccagggtgaccatgtgtgtgggcgcag

SEQ ID NO: 5905 - DNA, 37 bp, Artificial Sequence
  Synthetic
tcacctggatcccctcaccgcgtgagtggcaagggct

SEQ ID NO: 5906 - DNA, 41 bp, Artificial Sequence
  Synthetic
ggatcgattggaaaagggcccagcggcctgtttctaaacgt

SEQ ID NO: 5907 - DNA, 39 bp, Artificial Sequence
  Synthetic
gccagcaggtaaggcaggcccagatcttcctcagtggct

SEQ ID NO: 5908 - DNA, 39 bp, Artificial Sequence
  Synthetic
ctagattcagcgatcccccggtacgagcgggatagcagg

SEQ ID NO: 5909 - DNA, 36 bp, Artificial Sequence
  Synthetic
gagcttgcggctgagctcctccgtgaaggcagggtc

SEQ ID NO: 5910 - DNA, 36 bp, Artificial Sequence
  Synthetic
ctccagggagatgggggccattgccgatgccctggc

SEQ ID NO: 5911 - DNA, 39 bp, Artificial Sequence
  Synthetic
cagctgctgcttgtcgaggatgaagaagctgctggcggc

SEQ ID NO: 5912 - DNA, 39 bp, Artificial Sequence
  Synthetic
acacggcgtacatgtcgatgggtcttgcgggccaacacc

SEQ ID NO: 5913 - DNA, 36 bp, Artificial Sequence
  Synthetic
cccctgtcgaccagaggacgacggccaccaacgagg

SEQ ID NO: 5914 - DNA, 36 bp, Artificial Sequence
  Synthetic
gcaggcacagggtctcggtgccaagctgcagtcctg

SEQ ID NO: 5915 - DNA, 37 bp, Artificial Sequence
  Synthetic
ccagcagggcacagaggtgacgctttcggggcgtaag

SEQ ID NO: 5916 - DNA, 41 bp, Artificial Sequence
  Synthetic
ttccttcagcgtctatgcccagactggcagctgaaccagaa

SEQ ID NO: 5917 - DNA, 36 bp, Artificial Sequence
  Synthetic
cgggcctctggaccctcacaccggccagcctcaact

SEQ ID NO: 5918 - DNA, 39 bp, Artificial Sequence
  Synthetic
agatgtagccgcacggaccctgcacagactagcgaggat

SEQ ID NO: 5919 - DNA, 37 bp, Artificial Sequence
  Synthetic
tgagccggcagaggaccagcggtgttcacccgggatg

SEQ ID NO: 5920 - DNA, 38 bp, Artificial Sequence
  Synthetic
cgggtgaggcggctaagaggatatccgccgtctgctgc

SEQ ID NO: 5921 - DNA, 44 bp, Artificial Sequence
  Synthetic
ttcgagtatccttctttgatgttcgctgctaactcttgcaaaca

SEQ ID NO: 5922 - DNA, 44 bp, Artificial Sequence
  Synthetic
cttagtgaagagtctttgtcaccactctataagggctatgctcc

SEQ ID NO: 5923 - DNA, 42 bp, Artificial Sequence
  Synthetic
cccgcgattggaagctgtataaacaatcgtcttttgctttgt

SEQ ID NO: 5924 - DNA, 46 bp, Artificial Sequence
  Synthetic
ttcctttaagttcggtgattatccagctgactcatgactaagcata

SEQ ID NO: 5925 - DNA, 40 bp, Artificial Sequence
  Synthetic
tgtcccccaaggaagagctacagtgcatcgaaacgaactg

SEQ ID NO: 5926 - DNA, 43 bp, Artificial Sequence
  Synthetic
ttccacttctcttagttctcaaaggggaggaactgactgatcc

SEQ ID NO: 5927 - DNA, 43 bp, Artificial Sequence
  Synthetic
tgcaagcaggcccatagatgggggtaatttctgatagaggtac

SEQ ID NO: 5928 - DNA, 43 bp, Artificial Sequence
  Synthetic
acacctttagacagagttcagagagctgaatgtgacgcccata

SEQ ID NO: 5929 - DNA, 45 bp, Artificial Sequence
  Synthetic
cagaacggttgcttatggttggtttcatcgtctacagtatccatt

SEQ ID NO: 5930 - DNA, 43 bp, Artificial Sequence
  Synthetic
tgagtcttttcaacaagacagagctggccaaagagctgtttca

SEQ ID NO: 5931 - DNA, 49 bp, Artificial Sequence
  Synthetic
gatgttattccagcagaaaagcctgtcatatctatttcccaaaatgtgt

SEQ ID NO: 5932 - DNA, 44 bp, Artificial Sequence
  Synthetic
ctgaagccatttgcacttatcttctaaacggttggtgaatgtcc

SEQ ID NO: 5933 - DNA, 41 bp, Artificial Sequence
  Synthetic
ttcaaccgacactgttgacacaggttaacagagtgtgtcac

SEQ ID NO: 5934 - DNA, 43 bp, Artificial Sequence
  Synthetic
gctgagggagcaattgagctttctttgggaaatatttcgaatc

SEQ ID NO: 5935 - DNA, 48 bp, Artificial Sequence
  Synthetic
ccttgtactgtggggtattcatcattctgatagatattctgttgatcc

SEQ ID NO: 5936 - DNA, 41 bp, Artificial Sequence
  Synthetic
ttcgcactgagtagaggctttgttacactcatgcattgatg

SEQ ID NO: 5937 - DNA, 41 bp, Artificial Sequence
  Synthetic
ttgaagggggatggactggaccctgttcattctgatgatga

SEQ ID NO: 5938 - DNA, 43 bp, Artificial Sequence
  Synthetic
ctatcagattctggcgatctactcagaaactgattgcccccag

SEQ ID NO: 5939 - DNA, 44 bp, Artificial Sequence
  Synthetic
aggtggttatttgatcgttgggagcggtcatatgaaaatgtgta

SEQ ID NO: 5940 - DNA, 43 bp, Artificial Sequence
  Synthetic
atggactctgtagtagctgtgctcttttccaactacagcaaat

SEQ ID NO: 5941 - DNA, 41 bp, Artificial Sequence
  Synthetic
attgtgcagacactgtgggtccacctctggtatagtagctt

SEQ ID NO: 5942 - DNA, 45 bp, Artificial Sequence
  Synthetic
gaggcagacttcgccatgagctacagcattctttaggatctaatt

SEQ ID NO: 5943 - DNA, 40 bp, Artificial Sequence
  Synthetic
aaactcccgcgaactgttttggcaattgtgtttgttgctc

SEQ ID NO: 5944 - DNA, 41 bp, Artificial Sequence
  Synthetic
ctcagggaactaagggcttggacagctttcacattgctatg

SEQ ID NO: 5945 - DNA, 44 bp, Artificial Sequence
  Synthetic
aacgtaggcaaaagtagagaaactacttcagatacttgcagcaa

SEQ ID NO: 5946 - DNA, 45 bp, Artificial Sequence
  Synthetic
ttgatgaagctaccattgcatatcagtaaaaaagccctggcatta

SEQ ID NO: 5947 - DNA, 42 bp, Artificial Sequence
  Synthetic
aaaaggctttggacacagttagagctgagagtttccatcctc

SEQ ID NO: 5948 - DNA, 43 bp, Artificial Sequence
  Synthetic
taccaacctgtacctccgttggcaatagtaaaaccatgccaat

SEQ ID NO: 5949 - DNA, 40 bp, Artificial Sequence
  Synthetic
cgccaacaacatcgcgactcgggatgatgtcctggatcct

SEQ ID NO: 5950 - DNA, 37 bp, Artificial Sequence
  Synthetic
gacaggcgaaggggaaggggaggagtgggagcgggaa

SEQ ID NO: 5951 - DNA, 40 bp, Artificial Sequence
  Synthetic
agtactacgtggtcatgggtagaatcattcgcgctcttcc

SEQ ID NO: 5952 - DNA, 41 bp, Artificial Sequence
  Synthetic
cgtactaaacgtgcctctgttacgtggacatgtaccagcag

SEQ ID NO: 5953 - DNA, 41 bp, Artificial Sequence
  Synthetic
agttcgccctggggtgataccgggtcaattggtctgactgt

SEQ ID NO: 5954 - DNA, 40 bp, Artificial Sequence
  Synthetic
ggctcgtctgccattttagaggattgagttcgtgcaacac

SEQ ID NO: 5955 - DNA, 41 bp, Artificial Sequence
  Synthetic
acagaaacacctcagggatatgttacgtgtgcggattgttg

SEQ ID NO: 5956 - DNA, 45 bp, Artificial Sequence
  Synthetic
acctgatggtttggaggtgggaattaaaatccacatcttcaacag

SEQ ID NO: 5957 - DNA, 46 bp, Artificial Sequence
  Synthetic
gtgggtcatccatattatgatgtccagacactttagggacttcaat

SEQ ID NO: 5958 - DNA, 45 bp, Artificial Sequence
  Synthetic
ggttagagacacagaaaactctagcgatgtgttttgcctgtcatc

SEQ ID NO: 5959 - DNA, 49 bp, Artificial Sequence
  Synthetic
gtgatcaacaacaacgaacaatagcgttactaatgacccacttactgta

SEQ ID NO: 5960 - DNA, 40 bp, Artificial Sequence
  Synthetic
cttctgtatgcctcttggggacttggattttcgtgtcctc

SEQ ID NO: 5961 - DNA, 41 bp, Artificial Sequence
  Synthetic
cctgagctcacctatgtccggtcccaggatatattcgtctc

SEQ ID NO: 5962 - DNA, 42 bp, Artificial Sequence
  Synthetic
ggagatcccaaaagattttcaacgtgtcctatgagcgctgat

SEQ ID NO: 5963 - DNA, 42 bp, Artificial Sequence
  Synthetic
agtctgctcctaagcctgaaaagatttcttcttacccttggg

SEQ ID NO: 5964 - DNA, 44 bp, Artificial Sequence
  Synthetic
cttccctgaaggttgagacaatttgaatgctcaaatcaaaggcg

SEQ ID NO: 5965 - DNA, 46 bp, Artificial Sequence
  Synthetic
aaatccatctacgtgcatttccttactctgaaatggattcttgatg

SEQ ID NO: 5966 - DNA, 46 bp, Artificial Sequence
  Synthetic
aacggtttcaataaaaagctgtgctagacatgaagtatgcagagac

SEQ ID NO: 5967 - DNA, 40 bp, Artificial Sequence
  Synthetic
gtacagctcacagttggcgtaagcgatacgactatctagc

SEQ ID NO: 5968 - DNA, 45 bp, Artificial Sequence
  Synthetic
caaggcagcgtggaattatacaaccatattcaaagcctaaaacgg

SEQ ID NO: 5969 - DNA, 45 bp, Artificial Sequence
  Synthetic
gatctttatgctctgggggttgcttttttctggatcaaaacgttc

SEQ ID NO: 5970 - DNA, 47 bp, Artificial Sequence
  Synthetic
tctgtttctgtctataaccgaagtcactctctccatgatctttcaag

SEQ ID NO: 5971 - DNA, 42 bp, Artificial Sequence
  Synthetic
gctgttgccgagggaagaaacgattcttttctcgttcaatga

SEQ ID NO: 5972 - DNA, 45 bp, Artificial Sequence
  Synthetic
ttgcctgaatgagagtggacttgattatctaattcaaacagctcc

SEQ ID NO: 5973 - DNA, 43 bp, Artificial Sequence
  Synthetic
tcaaacagcatgatgtccgatagcaggcgttatggttatgcta

SEQ ID NO: 5974 - DNA, 45 bp, Artificial Sequence
  Synthetic
ataccctgtcagaaatacacgagcacaaaacaatcacaacagctc

SEQ ID NO: 5975 - DNA, 40 bp, Artificial Sequence
  Synthetic
gcagactttctgggggaggaaagagagctcagatctgtgt

SEQ ID NO: 5976 - DNA, 41 bp, Artificial Sequence
  Synthetic
tgatgagttgcgtaattggatgcacaggagacaatggcaac

SEQ ID NO: 5977 - DNA, 39 bp, Artificial Sequence
  Synthetic
tgcttgcgaaaggtgtgtacccattattccacccccatc

SEQ ID NO: 5978 - DNA, 41 bp, Artificial Sequence
  Synthetic
aaaggagaacctcgagccttgttggtaaaggatgtctgatg

SEQ ID NO: 5979 - DNA, 44 bp, Artificial Sequence
  Synthetic
ttagctcccaggttacgtcatgtatgagactgatagatgtttgt

SEQ ID NO: 5980 - DNA, 50 bp, Artificial Sequence
  Synthetic
tatcgatgtttctcgcttaacagaactctagatccttaaatagagcattt

SEQ ID NO: 5981 - DNA, 43 bp, Artificial Sequence
  Synthetic
ccgctttcctgtgtgtaatcatctctgctatcgaaaaggtttc

SEQ ID NO: 5982 - DNA, 44 bp, Artificial Sequence
  Synthetic
gatcttcagttacaacttgacagctgagttcgaggtgtttctct

SEQ ID NO: 5983 - DNA, 42 bp, Artificial Sequence
  Synthetic
aacgacctcggtacaaaaaccctggtttatgaagtggtggat

SEQ ID NO: 5984 - DNA, 42 bp, Artificial Sequence
  Synthetic
gcaaaacatctccttcctgcattgttgcttataagaaggctg

SEQ ID NO: 5985 - DNA, 41 bp, Artificial Sequence
  Synthetic
gaagctgacttcgccgatcttacttctcccagactgttctt

SEQ ID NO: 5986 - DNA, 42 bp, Artificial Sequence
  Synthetic
cgtatccttgccggtattcactcgatattacggagacaaaga

SEQ ID NO: 5987 - DNA, 43 bp, Artificial Sequence
  Synthetic
tgcacaagctttactgaacactacgaactcatagactagggat

SEQ ID NO: 5988 - DNA, 41 bp, Artificial Sequence
  Synthetic
cactgttcgcggttacaaacccttgtggttcagtaggagaa

SEQ ID NO: 5989 - DNA, 38 bp, Artificial Sequence
  Synthetic
tctagggatttggcctccacgaacccctacatccatgc

SEQ ID NO: 5990 - DNA, 41 bp, Artificial Sequence
  Synthetic
aggtttagggcttcttcctgcataccataaacagcctcagt

SEQ ID NO: 5991 - DNA, 46 bp, Artificial Sequence
  Synthetic
caagtagcgaaaaatccaacagcccacaaaccaaaaccttctatag

SEQ ID NO: 5992 - DNA, 38 bp, Artificial Sequence
  Synthetic
ctgctcagctcttgcggttataaccgcgaatcccatag

SEQ ID NO: 5993 - DNA, 43 bp, Artificial Sequence
  Synthetic
tttgtcacgaatatagccactgatttgggttcttctgagctag

SEQ ID NO: 5994 - DNA, 48 bp, Artificial Sequence
  Synthetic
agatcctctaaatttgaacctccgcatactaagttgtccattgttgat

SEQ ID NO: 5995 - DNA, 44 bp, Artificial Sequence
  Synthetic
tccagacatagcaacaatgacagaaacttcaataaacgaaagcg

SEQ ID NO: 5996 - DNA, 45 bp, Artificial Sequence
  Synthetic
tgatggttacttcctcaaaacaagaacggtaaaagaaggtcgttt

SEQ ID NO: 5997 - DNA, 40 bp, Artificial Sequence
  Synthetic
tcagaaccctgacggattgtctgagagagattgtggtact

SEQ ID NO: 5998 - DNA, 43 bp, Artificial Sequence
  Synthetic
ggctgcatcgtctcgagaacttaaaaaacacttgttggagaga

SEQ ID NO: 5999 - DNA, 45 bp, Artificial Sequence
  Synthetic
tctccagcagcaaaaactaaaattctggttcggtttctttacctc

SEQ ID NO: 6000 - DNA, 42 bp, Artificial Sequence
  Synthetic
tgtacggaagaagaattgaggtctaagaagaaggtggacgac

SEQ ID NO: 6001 - DNA, 41 bp, Artificial Sequence
  Synthetic
caacgttctctcctgcacgagttactggggttgaaatgttc

SEQ ID NO: 6002 - DNA, 44 bp, Artificial Sequence
  Synthetic
caagtagtcattgctatgctcgaatagagttgtacaagcgattg

SEQ ID NO: 6003 - DNA, 41 bp, Artificial Sequence
  Synthetic
agccgataatgctcgctcactcctccaactaaaagaccatt

SEQ ID NO: 6004 - DNA, 48 bp, Artificial Sequence
  Synthetic
gtccttcctgtttagggaaacgacgttttatttttatagcggacttct

SEQ ID NO: 6005 - DNA, 41 bp, Artificial Sequence
  Synthetic
cattctgtggcttctgcattagataaggatggccgattcgt

SEQ ID NO: 6006 - DNA, 46 bp, Artificial Sequence
  Synthetic
tacgatccaaattgagaaccttgcctgatacaccagaaatagtcga

SEQ ID NO: 6007 - DNA, 43 bp, Artificial Sequence
  Synthetic
tcttactagctccttgtcgagaacaggacttggagaagctttc

SEQ ID NO: 6008 - DNA, 38 bp, Artificial Sequence
  Synthetic
aatgccgctcgagtcaatgtagttcacgagcagtttgc

SEQ ID NO: 6009 - DNA, 38 bp, Artificial Sequence
  Synthetic
cgacaacccacgatcttgctgcgctcatttcttggttg

SEQ ID NO: 6010 - DNA, 41 bp, Artificial Sequence
  Synthetic
tcgctcccactaatgcaactcttgaagcttttggtacagta

SEQ ID NO: 6011 - DNA, 42 bp, Artificial Sequence
  Synthetic
aaacagtgaggacgacaaagtaaagtcggagatactgggagg

SEQ ID NO: 6012 - DNA, 42 bp, Artificial Sequence
  Synthetic
gcaatcgctaaaacaatcgattgcagcaattgtggctatcgc

SEQ ID NO: 6013 - DNA, 47 bp, Artificial Sequence
  Synthetic
gtaggtaaaacctcgtttggtcaacatctgtatcaaaaaaaggcagc

SEQ ID NO: 6014 - DNA, 43 bp, Artificial Sequence
  Synthetic
caggctgcacaccatcactacttttttatggttttgtctgtgc

SEQ ID NO: 6015 - DNA, 43 bp, Artificial Sequence
  Synthetic
ggaactgaccctataaggaatgcgtaacgacatcattgcatga

SEQ ID NO: 6016 - DNA, 41 bp, Artificial Sequence
  Synthetic
gacaaccatttttgctttgctgtgggatttggcgaagaaga

SEQ ID NO: 6017 - DNA, 42 bp, Artificial Sequence
  Synthetic
cgatcaaatcgcaaacaaacacttgatcgtgtgtgtcgtgat

SEQ ID NO: 6018 - DNA, 44 bp, Artificial Sequence
  Synthetic
gcgaacgtttacaaatggctcccaaaattttcgcaaaagcatac

SEQ ID NO: 6019 - DNA, 50 bp, Artificial Sequence
  Synthetic
atctgtgcagcttaaaacctaatgtctttagagaaagtcataaatacgga

SEQ ID NO: 6020 - DNA, 40 bp, Artificial Sequence
  Synthetic
ggcttctgtcaccttgctcagctttagttgtggcttcaac

SEQ ID NO: 6021 - DNA, 40 bp, Artificial Sequence
  Synthetic
ccgcacaagaaagccctcttggaaagactcctttggtgtt

SEQ ID NO: 6022 - DNA, 46 bp, Artificial Sequence
  Synthetic
ctgtcaattctacattatgtgcagcgatcttttttggagcatatgc

SEQ ID NO: 6023 - DNA, 46 bp, Artificial Sequence
  Synthetic
gaagctggttctacaacagaaactacagtttctccatagatagcac

SEQ ID NO: 6024 - DNA, 41 bp, Artificial Sequence
  Synthetic
gctcaaagtccaaaaaaacgcatcttggagcatcttgtgga

SEQ ID NO: 6025 - DNA, 44 bp, Artificial Sequence
  Synthetic
gcctgaccccagaaaccatttcttcttcattaaaatcagcaacg

SEQ ID NO: 6026 - DNA, 42 bp, Artificial Sequence
  Synthetic
tcgtttccttttccaggttcattggtcgaggacaatatgctc

SEQ ID NO: 6027 - DNA, 44 bp, Artificial Sequence
  Synthetic
ttaggtcctgtagctttagactcatcaaagagactcccgtagac

SEQ ID NO: 6028 - DNA, 41 bp, Artificial Sequence
  Synthetic
aaggcactattcgttgcaccaaagagttcagttccttggat

SEQ ID NO: 6029 - DNA, 41 bp, Artificial Sequence
  Synthetic
aatcacaatgcgctcccatttagtgcatgagaatcgtcttg

SEQ ID NO: 6030 - DNA, 42 bp, Artificial Sequence
  Synthetic
agaagcaaggatgaggttttctgtgttggagcacacatcacg

SEQ ID NO: 6031 - DNA, 42 bp, Artificial Sequence
  Synthetic
gcccctaaaacccgacaaagagaacgtccctaatattgaaga

SEQ ID NO: 6032 - DNA, 42 bp, Artificial Sequence
  Synthetic
aaaagcatctaggagctccccaaaggactggatatgaagtgg

SEQ ID NO: 6033 - DNA, 39 bp, Artificial Sequence
  Synthetic
cacaggagcaaccacgaagagtaaaagagtgccttggtg

SEQ ID NO: 6034 - DNA, 49 bp, Artificial Sequence
  Synthetic
acctctctgtaagcaaatactgacaggttacttccggatattaatgatc

SEQ ID NO: 6035 - DNA, 41 bp, Artificial Sequence
  Synthetic
cgaagcggtgaatgcatgaaggatgagatgttgaagagagc

SEQ ID NO: 6036 - DNA, 48 bp, Artificial Sequence
  Synthetic
actggaaaagctacaatggattgtagaagagtaagaagttcattgctt

SEQ ID NO: 6037 - DNA, 40 bp, Artificial Sequence
  Synthetic
tctgccatcaaagcatttcgaatgggaatgacgagtgatt

SEQ ID NO: 6038 - DNA, 38 bp, Artificial Sequence
  Synthetic
aatttggcggctggtaatcctgacttcggcgaatttgg

SEQ ID NO: 6039 - DNA, 42 bp, Artificial Sequence
  Synthetic
ttccgaccgagcaatctcagtttgggagtaaaagttcaggtt

SEQ ID NO: 6040 - DNA, 45 bp, Artificial Sequence
  Synthetic
caacacttttttaaggcatcttccagtagtgttgttgaagctcaa

SEQ ID NO: 6041 - DNA, 45 bp, Artificial Sequence
  Synthetic
ccaaagcgttcatatctcggactaagaaaaggtccttttgttgat

SEQ ID NO: 6042 - DNA, 40 bp, Artificial Sequence
  Synthetic
aagcaaccttgacgggcattgccattccactaaaaagcct

SEQ ID NO: 6043 - DNA, 40 bp, Artificial Sequence
  Synthetic
aaaccggcgtatttcttcctgaaaacaattcccctgtgga

SEQ ID NO: 6044 - DNA, 46 bp, Artificial Sequence
  Synthetic
agaccctcttacgctggttaacctttggagataataatagaggatt

SEQ ID NO: 6045 - DNA, 41 bp, Artificial Sequence
  Synthetic
tctttgtcatcgatttggtcacggaggggaaagcatcatca

SEQ ID NO: 6046 - DNA, 42 bp, Artificial Sequence
  Synthetic
cgtccactaccaagacctagatacgccaatcaaaatctcctt

SEQ ID NO: 6047 - DNA, 42 bp, Artificial Sequence
  Synthetic
tagctctgcagattttgtagcaccctccgggatagtcttagg

SEQ ID NO: 6048 - DNA, 45 bp, Artificial Sequence
  Synthetic
agctaaaccaacccgaagaatctgttcttacacatatcgatcgta

SEQ ID NO: 6049 - DNA, 47 bp, Artificial Sequence
  Synthetic
tctcaaaatccctttaaagcagagcatacgcggaaatttctacttct

SEQ ID NO: 6050 - DNA, 45 bp, Artificial Sequence
  Synthetic
atctggaaattcaagaaagtcgtggggtaagggatcaggaattcc

SEQ ID NO: 6051 - DNA, 42 bp, Artificial Sequence
  Synthetic
ctgaaggaatcgctcaaggacgtgttccaatttggtttggtt

SEQ ID NO: 6052 - DNA, 39 bp, Artificial Sequence
  Synthetic
tggaggggccattccgtaattgttgttcgagatccttgg

SEQ ID NO: 6053 - DNA, 39 bp, Artificial Sequence
  Synthetic
aacctgggagacaagatgcaccattggagataaaagcgc

SEQ ID NO: 6054 - DNA, 44 bp, Artificial Sequence
  Synthetic
caccctaatatagttccgctgcctcttgatacagtttgaaagct

SEQ ID NO: 6055 - DNA, 42 bp, Artificial Sequence
  Synthetic
cagatgcttttacgacttgcaaccaagatattggtgtgcggt

SEQ ID NO: 6056 - DNA, 40 bp, Artificial Sequence
  Synthetic
aagttcccatgatcgcctcaacaggaaactctaacccttt

SEQ ID NO: 6057 - DNA, 40 bp, Artificial Sequence
  Synthetic
gagcttgtcccaattgctccgtcaaaaagaaacggatcgt

SEQ ID NO: 6058 - DNA, 46 bp, Artificial Sequence
  Synthetic
tatcagcgatgcagtttctacagcagaagatacccacaataaaagc

SEQ ID NO: 6059 - DNA, 38 bp, Artificial Sequence
  Synthetic
tgttccccgtacaagcaagtttctgccccatatctgca

SEQ ID NO: 6060 - DNA, 43 bp, Artificial Sequence
  Synthetic
ctgctcagctgttaaaaagtcaaatggtaagtgttcttcccac

SEQ ID NO: 6061 - DNA, 38 bp, Artificial Sequence
  Synthetic
ccccaggcaaagcaaaaagcaagctcactgttgctgtt

SEQ ID NO: 6062 - DNA, 45 bp, Artificial Sequence
  Synthetic
ggtaactgttgtattcgcacgggcgatatatcaatgaggtaggac

SEQ ID NO: 6063 - DNA, 46 bp, Artificial Sequence
  Synthetic
gatcctaacgtgtctcctattgctgtagtaggtatctgaatctgtg

SEQ ID NO: 6064 - DNA, 43 bp, Artificial Sequence
  Synthetic
ttttcctgtgttttttcgatcagcggagcaactcttactgacg

SEQ ID NO: 6065 - DNA, 43 bp, Artificial Sequence
  Synthetic
gggagttggagaaatcatgggaccctcaaactcaacaagaact

SEQ ID NO: 6066 - DNA, 42 bp, Artificial Sequence
  Synthetic
ttcgagcccttttgaagagtgatcgcaatctaatgacgagaa

SEQ ID NO: 6067 - DNA, 42 bp, Artificial Sequence
  Synthetic
tcagagcctgtggatagtcttgcagcgtattccattccattt

SEQ ID NO: 6068 - DNA, 43 bp, Artificial Sequence
  Synthetic
agggaaatcagaaaatcccgcaaaaccttcctcttaagtctcc

SEQ ID NO: 6069 - DNA, 43 bp, Artificial Sequence
  Synthetic
agcgtacatccatgatttattgtgttatcgcggctatcgtctt

SEQ ID NO: 6070 - DNA, 39 bp, Artificial Sequence
  Synthetic
cgcgctccgttaagatgattcaaggccctattgacaaag

SEQ ID NO: 6071 - DNA, 43 bp, Artificial Sequence
  Synthetic
ccttcggcaacaaaaatcgttgcaaaaattctccaacggaaag

SEQ ID NO: 6072 - DNA, 40 bp, Artificial Sequence
  Synthetic
ttaacttcaacaagcgctgcaacaaaagagggcgtgattg

SEQ ID NO: 6073 - DNA, 44 bp, Artificial Sequence
  Synthetic
caggacgcaccggagataaaattaaagatgctgttattgatgcg

SEQ ID NO: 6074 - DNA, 38 bp, Artificial Sequence
  Synthetic
gtagtgccagctcgggataaacccgtcactaaacactg

SEQ ID NO: 6075 - DNA, 40 bp, Artificial Sequence
  Synthetic
tcctgcagccagaccatgtaatgtctccggaaaagacaac

SEQ ID NO: 6076 - DNA, 42 bp, Artificial Sequence
  Synthetic
cttaatctttctgaatggggcgttccagtaggagcatacagc

SEQ ID NO: 6077 - DNA, 40 bp, Artificial Sequence
  Synthetic
ttacgaaggccatacggtatctaaattggctattcgtgcg

SEQ ID NO: 6078 - DNA, 44 bp, Artificial Sequence
  Synthetic
gtgcggggagaactcttgttggttctcgtatttaaaatcgattc

SEQ ID NO: 6079 - DNA, 46 bp, Artificial Sequence
  Synthetic
caacgaaatacgcttgatacccattggaagttgcaaaaaagattgt

SEQ ID NO: 6080 - DNA, 42 bp, Artificial Sequence
  Synthetic
aatgtcgaggctttaaacgttttcatatcgcaaacgccttgt

SEQ ID NO: 6081 - DNA, 40 bp, Artificial Sequence
  Synthetic
cgtctgcgtaagatgcatcttaacgtcttccctaatccca

SEQ ID NO: 6082 - DNA, 40 bp, Artificial Sequence
  Synthetic
gcgtaatggtgtgatgcctgctgcttgctctctaaactct

SEQ ID NO: 6083 - DNA, 44 bp, Artificial Sequence
  Synthetic
tccgtaacttctgattcagaattgaccttcccatgaatgcctat

SEQ ID NO: 6084 - DNA, 38 bp, Artificial Sequence
  Synthetic
catggcaaaggttcgcctcacacactttcttcgcgaag

SEQ ID NO: 6085 - DNA, 41 bp, Artificial Sequence
  Synthetic
aggcgattctggaccaaaatcgaacgcttactacaggagat

SEQ ID NO: 6086 - DNA, 41 bp, Artificial Sequence
  Synthetic
ttgccttaggagaaaagggaaggacaatcacacatcccacc

SEQ ID NO: 6087 - DNA, 39 bp, Artificial Sequence
  Synthetic
agcttcggaaggagacaagttcgatccgagatggcttta

SEQ ID NO: 6088 - DNA, 42 bp, Artificial Sequence
  Synthetic
agcaattacgggatgaacatctggcaagctttgaatacggtg

SEQ ID NO: 6089 - DNA, 45 bp, Artificial Sequence
  Synthetic
gttcacctctttcaacggtatatgagtatggctaaggagattcgc

SEQ ID NO: 6090 - DNA, 43 bp, Artificial Sequence
  Synthetic
ctccacaaatcagccgatccctatcgatcagatttatgcagat

SEQ ID NO: 6091 - DNA, 41 bp, Artificial Sequence
  Synthetic
tgctcgctgcaaattccgaaagttttgcgttagtagaagct

SEQ ID NO: 6092 - DNA, 44 bp, Artificial Sequence
  Synthetic
aacagctcaccaatcgagaatcagatgtcggttttatgcttagt

SEQ ID NO: 6093 - DNA, 40 bp, Artificial Sequence
  Synthetic
catgtgcggcaagccttttggtgtttgcctctctacaaga

SEQ ID NO: 6094 - DNA, 42 bp, Artificial Sequence
  Synthetic
caagagcacaatggtatccgagctagcattgcatcaggacta

SEQ ID NO: 6095 - DNA, 43 bp, Artificial Sequence
  Synthetic
tggaagaggttcttttatgaatcgttagcactgcattcacagc

SEQ ID NO: 6096 - DNA, 45 bp, Artificial Sequence
  Synthetic
tatagggagcgaatgttgctgtttgctaagaaactatctctctgg

SEQ ID NO: 6097 - DNA, 38 bp, Artificial Sequence
  Synthetic
ttggcgagatagcgttgttcacaggctgtgatggaaat

SEQ ID NO: 6098 - DNA, 41 bp, Artificial Sequence
  Synthetic
ggtgctttgtgccaactctttgctttaccaataagctcgaa

SEQ ID NO: 6099 - DNA, 43 bp, Artificial Sequence
  Synthetic
ctaagggaacagaaggcttgataatctccaagcaagcgtctac

SEQ ID NO: 6100 - DNA, 39 bp, Artificial Sequence
  Synthetic
tgctaaaaggtcgcgctagaagcatgatctttgttgcag

SEQ ID NO: 6101 - DNA, 42 bp, Artificial Sequence
  Synthetic
gtggaaattcgggggagtcttttctaaggacaaaaaccactg

SEQ ID NO: 6102 - DNA, 45 bp, Artificial Sequence
  Synthetic
aaggacaatatagccttggagaaaccgactctcctagtactccat

SEQ ID NO: 6103 - DNA, 47 bp, Artificial Sequence
  Synthetic
tcctggttttcctctcttaatagctcaccacattctgaaatccaaat

SEQ ID NO: 6104 - DNA, 47 bp, Artificial Sequence
  Synthetic
ccggaagacttattagcagcagctgtctgattactagaaaattgcat

SEQ ID NO: 6105 - DNA, 44 bp, Artificial Sequence
  Synthetic
actagctaagcagttaggccttttgactaaacatccgattgttc

SEQ ID NO: 6106 - DNA, 40 bp, Artificial Sequence
  Synthetic
ttcacactacacaatgtgtcgcccaccctttcctggagta

SEQ ID NO: 6107 - DNA, 44 bp, Artificial Sequence
  Synthetic
tgacggatgttgttaaaggttctccacaatgacatcttcttggc

SEQ ID NO: 6108 - DNA, 48 bp, Artificial Sequence
  Synthetic
ttctcagaagaggatgtgcatgagaaatcggatcatctaaattctgaa

SEQ ID NO: 6109 - DNA, 42 bp, Artificial Sequence
  Synthetic
tcgcagaattgatgatcatatgcctgcgttatcgagcgtatg

SEQ ID NO: 6110 - DNA, 43 bp, Artificial Sequence
  Synthetic
atatgctgaggatttagaacaagcagtatccccttctgcgatg

SEQ ID NO: 6111 - DNA, 40 bp, Artificial Sequence
  Synthetic
gtcgcatcgagcaaagcatctgatgttttgtcgagcaatt

SEQ ID NO: 6112 - DNA, 44 bp, Artificial Sequence
  Synthetic
tagcagggatagaggaagccaaggattcttcaagaaatctacga

SEQ ID NO: 6113 - DNA, 47 bp, Artificial Sequence
  Synthetic
ctccttctttgacaaagtcagagatctgtcatatttctgaattgtct

SEQ ID NO: 6114 - DNA, 50 bp, Artificial Sequence
  Synthetic
ggagcatatttagaaacagttcccttcatatccttaatcttatgacacag

SEQ ID NO: 6115 - DNA, 42 bp, Artificial Sequence
  Synthetic
gcgattcagttagcacgtattccccagctcctaaacgcaaat

SEQ ID NO: 6116 - DNA, 39 bp, Artificial Sequence
  Synthetic
tccgaagaaagcttgggtgctgcaggtatcagcatttgg

SEQ ID NO: 6117 - DNA, 40 bp, Artificial Sequence
  Synthetic
cgttgcgtgatctcaaggctctctcgtaacagcagatacc

SEQ ID NO: 6118 - DNA, 44 bp, Artificial Sequence
  Synthetic
ggaaattttctttccggagaacgagtgcgtcgggttaattttcc

SEQ ID NO: 6119 - DNA, 44 bp, Artificial Sequence
  Synthetic
gatcccagccatcaatgtgatagctttactgtatcggtgtcaaa

SEQ ID NO: 6120 - DNA, 40 bp, Artificial Sequence
  Synthetic
ctagtcagcgagtgggatgacattatatcaccccccctcc

SEQ ID NO: 6121 - DNA, 47 bp, Artificial Sequence
  Synthetic
tatgccgcatattttaacgcgtacaacagaatccctataaagaatgt

SEQ ID NO: 6122 - DNA, 42 bp, Artificial Sequence
  Synthetic
tccacagttacagaaatcgatgagtagaccgatgaaacgcat

SEQ ID NO: 6123 - DNA, 38 bp, Artificial Sequence
  Synthetic
gcgctatgatggttacagcgagcatcgtcgctacaatc

SEQ ID NO: 6124 - DNA, 44 bp, Artificial Sequence
  Synthetic
accagtattttgggtcatatcttgtctcaaagaggggaagagtc

SEQ ID NO: 6125 - DNA, 41 bp, Artificial Sequence
  Synthetic
gaaagggggagctatttatgccaagaattgtacagggccac

SEQ ID NO: 6126 - DNA, 42 bp, Artificial Sequence
  Synthetic
gcaattcaagcaagtgtggatgcgaaactccagaaacccata

SEQ ID NO: 6127 - DNA, 41 bp, Artificial Sequence
  Synthetic
atacacatttgcagaggagagcccaatctctccaaccagac

SEQ ID NO: 6128 - DNA, 41 bp, Artificial Sequence
  Synthetic
gcatcgacaccatcaccatctccggactgattaatcgtgac

SEQ ID NO: 6129 - DNA, 42 bp, Artificial Sequence
  Synthetic
tttacgcagttgctgtactactcaaaaagaggcgaggtctct

SEQ ID NO: 6130 - DNA, 43 bp, Artificial Sequence
  Synthetic
ttgctctgaaacacttctgtcgtttcatttttttctcacgtcg

SEQ ID NO: 6131 - DNA, 44 bp, Artificial Sequence
  Synthetic
ttgatggaattggacgattctacatgcccctcataatcactgag

SEQ ID NO: 6132 - DNA, 48 bp, Artificial Sequence
  Synthetic
gccaagccaataatggtgatgatggtatgttgtatcattcaaattgga

SEQ ID NO: 6133 - DNA, 44 bp, Artificial Sequence
  Synthetic
ggtgagaatggacggaaaacaattttcctttgagaatgttgcac

SEQ ID NO: 6134 - DNA, 40 bp, Artificial Sequence
  Synthetic
aaggaccagaagtggaggaaagtacactgatttgacctgc

SEQ ID NO: 6135 - DNA, 46 bp, Artificial Sequence
  Synthetic
gggatgtgtttgtcataagggaacttgagtcaagaagaaggttctg

SEQ ID NO: 6136 - DNA, 45 bp, Artificial Sequence
  Synthetic
aacagacactatcaagagttggagaacacatgcacattcagactc

SEQ ID NO: 6137 - DNA, 41 bp, Artificial Sequence
  Synthetic
cacatgtgtgtgcagggataacttctggttgaaagacaccc

SEQ ID NO: 6138 - DNA, 47 bp, Artificial Sequence
  Synthetic
tgagatgatttgggatccgaacgcgatatcttgctttattgagaagt

SEQ ID NO: 6139 - DNA, 40 bp, Artificial Sequence
  Synthetic
tctacggaaggagtacctgagttatcgtcagcatccacag

SEQ ID NO: 6140 - DNA, 41 bp, Artificial Sequence
  Synthetic
tggcttcggaggaaatttgtatgtcaagacagaggctccag

SEQ ID NO: 6141 - DNA, 46 bp, Artificial Sequence
  Synthetic
tgaaggagttaactggagtccacttcagtttgatatcagtccaatt

SEQ ID NO: 6142 - DNA, 45 bp, Artificial Sequence
  Synthetic
aaatccagcattgtacacacaagagcaagattttctttcccacat

SEQ ID NO: 6143 - DNA, 42 bp, Artificial Sequence
  Synthetic
atcaccttacacagggaattctgggtttcagctggagcatgt

SEQ ID NO: 6144 - DNA, 42 bp, Artificial Sequence
  Synthetic
actggactatgaagctagatgcacgtaaaagggctggtttca

SEQ ID NO: 6145 - DNA, 44 bp, Artificial Sequence
  Synthetic
agagcagaatttttggaatcgatgactgcttcaacgattgcaac

SEQ ID NO: 6146 - DNA, 49 bp, Artificial Sequence
  Synthetic
aggagaattgggaataataagagccgttcccataaagattcttgtaatc

SEQ ID NO: 6147 - DNA, 43 bp, Artificial Sequence
  Synthetic
caatcagatcctttttactggggagccaatgaaatagcagcag

SEQ ID NO: 6148 - DNA, 38 bp, Artificial Sequence
  Synthetic
ccagttgcatgggcctcataccaaaagcagcttctgtg

SEQ ID NO: 6149 - DNA, 42 bp, Artificial Sequence
  Synthetic
tcatcctagctccagtgctggtcttctggtaggcctgcaaat

SEQ ID NO: 6150 - DNA, 46 bp, Artificial Sequence
  Synthetic
catcacaatggcaaaacctccttccaatggaatatctaactgtctt

SEQ ID NO: 6151 - DNA, 41 bp, Artificial Sequence
  Synthetic
cctgcattgtgacgaagacttgtctattctttgaggtgcag

SEQ ID NO: 6152 - DNA, 42 bp, Artificial Sequence
  Synthetic
tttgacaaagacacagactcagattttcccaattctgcgtcc

SEQ ID NO: 6153 - DNA, 41 bp, Artificial Sequence
  Synthetic
aagaggcgactgttcgaggagaatcttcagcttcatgagtt

SEQ ID NO: 6154 - DNA, 46 bp, Artificial Sequence
  Synthetic
atacccatggagaatacccagagtcatattcctgatgagaaagcaa

SEQ ID NO: 6155 - DNA, 48 bp, Artificial Sequence
  Synthetic
cactgcaagacaagttaatgacaatgttccaatgttcaatttgatctt

SEQ ID NO: 6156 - DNA, 41 bp, Artificial Sequence
  Synthetic
agtgaaactggagaatgggaagtgttggtggagctggtaac

SEQ ID NO: 6157 - DNA, 40 bp, Artificial Sequence
  Synthetic
gacgaccgaaagcgtcaccgtgtgatcccgatctcgatcc

SEQ ID NO: 6158 - DNA, 39 bp, Artificial Sequence
  Synthetic
cctccagaggccgtagaggggccacttgtgccaacagat

SEQ ID NO: 6159 - DNA, 46 bp, Artificial Sequence
  Synthetic
gcaggtagcaacgatagaataggtctttgagatttactggtaaagc

SEQ ID NO: 6160 - DNA, 41 bp, Artificial Sequence
  Synthetic
tgaggctataggaccaagtgaacagaagcactggggtcaat

SEQ ID NO: 6161 - DNA, 46 bp, Artificial Sequence
  Synthetic
caaacgagctactataaggaccagccctaaaaaaatgtacctgacc

SEQ ID NO: 6162 - DNA, 41 bp, Artificial Sequence
  Synthetic
ttttgcagatgtcctattggctttttgtacccttgcaaccg

SEQ ID NO: 6163 - DNA, 45 bp, Artificial Sequence
  Synthetic
atcagtttagagcttttcgactgaacagacatgtcagctaaagca

SEQ ID NO: 6164 - DNA, 40 bp, Artificial Sequence
  Synthetic
taggtgaacattgggacacagcctctaatggtgggcatcc

SEQ ID NO: 6165 - DNA, 43 bp, Artificial Sequence
  Synthetic
acgacgagaacaatgttatgttagggggatggtatcacccaca

SEQ ID NO: 6166 - DNA, 45 bp, Artificial Sequence
  Synthetic
attggttacaaagagcacaaggcgtcagaaacagttcattactcc

SEQ ID NO: 6167 - DNA, 39 bp, Artificial Sequence
  Synthetic
gttaacagctttcagccagggcattgtgacctatgggcg

SEQ ID NO: 6168 - DNA, 43 bp, Artificial Sequence
  Synthetic
tgaatgcaagtccatatgatttggaaaaactgcttcacgggac

SEQ ID NO: 6169 - DNA, 47 bp, Artificial Sequence
  Synthetic
ttgttccatgggttatgtacttgctccatgatctttattgtaagcac

SEQ ID NO: 6170 - DNA, 44 bp, Artificial Sequence
  Synthetic
gagtgctgctactatacgtagtgtaaccatcacacaagtcttca

SEQ ID NO: 6171 - DNA, 44 bp, Artificial Sequence
  Synthetic
tggtaacatgatagatggttttgcttgccatcaaatcacctact

SEQ ID NO: 6172 - DNA, 43 bp, Artificial Sequence
  Synthetic
acgggagttgctaggtgtttacagaggtttataaacacctcta

SEQ ID NO: 6173 - DNA, 45 bp, Artificial Sequence
  Synthetic
acgtagaagaatttgtctttcaggcgatgaatgtaacaagccacg

SEQ ID NO: 6174 - DNA, 43 bp, Artificial Sequence
  Synthetic
tgacaaatattaccctgttgtggtggaactctccatgcttgat

SEQ ID NO: 6175 - DNA, 43 bp, Artificial Sequence
  Synthetic
ttaactgtcacaagtgctggacaagacttcagaagactcctcc

SEQ ID NO: 6176 - DNA, 46 bp, Artificial Sequence
  Synthetic
acctgctaatattgtacttccacaaactgccaatcacataaggtta

SEQ ID NO: 6177 - DNA, 48 bp, Artificial Sequence
  Synthetic
aaactgtgcttaatgttgttggaccgctctaacaatacataactttgt

SEQ ID NO: 6178 - DNA, 47 bp, Artificial Sequence
  Synthetic
atcaatgacgttgcatttgtttcggtgctatatcatgtcttaaggat

SEQ ID NO: 6179 - DNA, 46 bp, Artificial Sequence
  Synthetic
aggaaatgtgttttgtgatggagtactggaaaaagactttaccttt

SEQ ID NO: 6180 - DNA, 42 bp, Artificial Sequence
  Synthetic
aaaattgttcaatggcaagaggcctacaaatctagcagggcg

SEQ ID NO: 6181 - DNA, 48 bp, Artificial Sequence
  Synthetic
ttgagtcgtgaagatcttgagattgatgaattagctttttaccgcaag

SEQ ID NO: 6182 - DNA, 48 bp, Artificial Sequence
  Synthetic
ttaaattgataggacacaccgtctgctttagagctatcaaaacccaac

SEQ ID NO: 6183 - DNA, 43 bp, Artificial Sequence
  Synthetic
ggtgacagctcagagagtggtggttttttaacaccacttaact

SEQ ID NO: 6184 - DNA, 48 bp, Artificial Sequence
  Synthetic
tggctttagctaatatgttaccagcagagcttaataaaagaggcaata

SEQ ID NO: 6185 - DNA, 45 bp, Artificial Sequence
  Synthetic
ctaaggaattgaaacggcccattcttaacatcagtaaccgtatga

SEQ ID NO: 6186 - DNA, 48 bp, Artificial Sequence
  Synthetic
aactggtttgaaactgaagcttactggtgtagttaaaacagagacatt

SEQ ID NO: 6187 - DNA, 47 bp, Artificial Sequence
  Synthetic
tgtgttgcactttattacacatgcatacgatatttgactatgtggcg

SEQ ID NO: 6188 - DNA, 45 bp, Artificial Sequence
  Synthetic
actcgttctatgtcgtattgcagtaaagcatataccctcatcagc

SEQ ID NO: 6189 - DNA, 42 bp, Artificial Sequence
  Synthetic
aagcttaaacgtgcttttggtgacaccacacaatcacgttaa

SEQ ID NO: 6190 - DNA, 43 bp, Artificial Sequence
  Synthetic
gcctactgcttccgtctcaaagtaggatttaccattttcacaa

SEQ ID NO: 6191 - DNA, 47 bp, Artificial Sequence
  Synthetic
gatcttgtggatctgttggttatgtctaagctccaattgatgcatat

SEQ ID NO: 6192 - DNA, 48 bp, Artificial Sequence
  Synthetic
agatgctttagcttctatgactggtaccattcttaagacgcttaatag

SEQ ID NO: 6193 - DNA, 45 bp, Artificial Sequence
  Synthetic
tgtgtacaagcatacatttagaggcgtgtactcaactgatggaac

SEQ ID NO: 6194 - DNA, 46 bp, Artificial Sequence
  Synthetic
gcaaaggttattgctaagtgggttagcacaaaagcactatcttaat

SEQ ID NO: 6195 - DNA, 48 bp, Artificial Sequence
  Synthetic
tgactgatgtcaaatgtgctaatgtacttagaattagaagcaacatgc

SEQ ID NO: 6196 - DNA, 47 bp, Artificial Sequence
  Synthetic
tgctaagaaaaatcttgatgaggcggctttctctagctgttttaact

SEQ ID NO: 6197 - DNA, 50 bp, Artificial Sequence
  Synthetic
gtatggcagattcaaactatccaggatcagatatctcattcaactgctta

SEQ ID NO: 6198 - DNA, 46 bp, Artificial Sequence
  Synthetic
gaactgctactgaatatgcttccacttaggatctacagaaaacgca

SEQ ID NO: 6199 - DNA, 44 bp, Artificial Sequence
  Synthetic
cggcaagtttgtacaagtgcccatgtgtcaaaacataagacaca

SEQ ID NO: 6200 - DNA, 47 bp, Artificial Sequence
  Synthetic
tcagttctttgttgttaagaggacacttttacacgctcatagcattt

SEQ ID NO: 6201 - DNA, 48 bp, Artificial Sequence
  Synthetic
ttttggtgactatgttattgcagcccagcataggcatgatataagaat

SEQ ID NO: 6202 - DNA, 41 bp, Artificial Sequence
  Synthetic
atccagctttgcatgtagcttcacactaaaacagcaagtgc

SEQ ID NO: 6203 - DNA, 50 bp, Artificial Sequence
  Synthetic
ttggaaaagccaggctctattatgatagtataagcgtaaatttcatcctg

SEQ ID NO: 6204 - DNA, 40 bp, Artificial Sequence
  Synthetic
ctgggatgatatgttacgccgcccaacccataagtacagg

SEQ ID NO: 6205 - DNA, 47 bp, Artificial Sequence
  Synthetic
gttgattcaacctttgtcacagaatccatcatcactcaaaatcatca

SEQ ID NO: 6206 - DNA, 42 bp, Artificial Sequence
  Synthetic
agatggatggtgacgatgtctacaaaacatccagctcctaat

SEQ ID NO: 6207 - DNA, 40 bp, Artificial Sequence
  Synthetic
ttatgcagagtgttggagcttgttctgatgcaactgccac

SEQ ID NO: 6208 - DNA, 46 bp, Artificial Sequence
  Synthetic
cttgaaattgtttgctgcagaaacctgatgcataactctgcttaaa

SEQ ID NO: 6209 - DNA, 44 bp, Artificial Sequence
  Synthetic
acacattggtatgaaacgttactgcgcaagatgtgacttccctg

SEQ ID NO: 6210 - DNA, 48 bp, Artificial Sequence
  Synthetic
accataaatgcattacctgagatggtggtaagcatactaacttcatct

SEQ ID NO: 6211 - DNA, 41 bp, Artificial Sequence
  Synthetic
caaaccgtggattctgctcaatgtttctgcagtctgtgaat

SEQ ID NO: 6212 - DNA, 38 bp, Artificial Sequence
  Synthetic
atcacccagctcatgctcctaaatcgccagttgcctta

SEQ ID NO: 6213 - DNA, 39 bp, Artificial Sequence
  Synthetic
gaagccactggtttgtttgcttcaccaggaggagctttc

SEQ ID NO: 6214 - DNA, 48 bp, Artificial Sequence
  Synthetic
taaacgtgccacagtttacaattcttacaagtaatcacatgtaacact

SEQ ID NO: 6215 - DNA, 48 bp, Artificial Sequence
  Synthetic
tttgaggcacataaggactcttttacttatccacattacagttccaaa

SEQ ID NO: 6216 - DNA, 42 bp, Artificial Sequence
  Synthetic
gcatggatgctaagcaggttgacctaaattgcatcttgtgat

SEQ ID NO: 6217 - DNA, 42 bp, Artificial Sequence
  Synthetic
acaacataccctactaatgtggccttaagctctgggtggtgt

SEQ ID NO: 6218 - DNA, 44 bp, Artificial Sequence
  Synthetic
agagtctttcgatgataagaggtcccaaccttgtccaccactac

SEQ ID NO: 6219 - DNA, 46 bp, Artificial Sequence
  Synthetic
tgcatttgttaataggcttgtaccgaaacaaactcctgaacaacca

SEQ ID NO: 6220 - DNA, 45 bp, Artificial Sequence
  Synthetic
ttctccaatggaaagagttagtctcttcatcatacagcctgtagg

SEQ ID NO: 6221 - DNA, 47 bp, Artificial Sequence
  Synthetic
aatggggtattttgcattttggacgccaattaaaaatccttcactag

SEQ ID NO: 6222 - DNA, 41 bp, Artificial Sequence
  Synthetic
ctggacatacagcctgaagactccatcaccccaatgcatat

SEQ ID NO: 6223 - DNA, 47 bp, Artificial Sequence
  Synthetic
ccggctagacttgaaatagttaagcccagtgactaactatggtttca

SEQ ID NO: 6224 - DNA, 43 bp, Artificial Sequence
  Synthetic
tcatgcctttaaatgcaaccgtaacaagcctttattctgcatc

SEQ ID NO: 6225 - DNA, 42 bp, Artificial Sequence
  Synthetic
gtaaggattttacgcctgtacagggttatcagactgcctggc

SEQ ID NO: 6226 - DNA, 45 bp, Artificial Sequence
  Synthetic
acaaggtcttttagaggtctctgtggttaggatgacaaatcgttt

SEQ ID NO: 6227 - DNA, 47 bp, Artificial Sequence
  Synthetic
attgggttacacctctcacttctagactcatacaatcaacagcatta

SEQ ID NO: 6228 - DNA, 48 bp, Artificial Sequence
  Synthetic
tgagcagcctgatgtcttttattcaccatatatcttagcagcatcaat

SEQ ID NO: 6229 - DNA, 47 bp, Artificial Sequence
  Synthetic
cctgcaggtgttcttactaatcatacagaaatttttaggagctttga

SEQ ID NO: 6230 - DNA, 43 bp, Artificial Sequence
  Synthetic
aagtgattattgtggaggcaattcttctgcagaccaacccaaa

SEQ ID NO: 6231 - DNA, 40 bp, Artificial Sequence
  Synthetic
ccgaaccagcattgctatttcgcagctgtcgtgtaagact

SEQ ID NO: 6232 - DNA, 48 bp, Artificial Sequence
  Synthetic
tgtggtgattatgcagcatgtaagcattaatgttatcacagaaactac

SEQ ID NO: 6233 - DNA, 38 bp, Artificial Sequence
  Synthetic
gcatcaaagtgttgcctccaggcagccaaagtgtatcc

SEQ ID NO: 6234 - DNA, 44 bp, Artificial Sequence
  Synthetic
tgcttatgtttctcaacagcttagtccttctccatagcttgtgc

SEQ ID NO: 6235 - DNA, 43 bp, Artificial Sequence
  Synthetic
gtagtggttactactaccctgaaccacagcgcaggtactcata

SEQ ID NO: 6236 - DNA, 50 bp, Artificial Sequence
  Synthetic
gtaaaatggccttggtatgtatggcaatagtaaaacaagcatagctacac

SEQ ID NO: 6237 - DNA, 46 bp, Artificial Sequence
  Synthetic
agagttcctagtcatgcttggtggatttaccataaagagtgaatgt

SEQ ID NO: 6238 - DNA, 49 bp, Artificial Sequence
  Synthetic
ttgaggactatcatactctgacgggtacctagttttataccttgaatgt

SEQ ID NO: 6239 - DNA, 40 bp, Artificial Sequence
  Synthetic
aatccagtagtagagcgtcctcaaactggtcggactgatc

SEQ ID NO: 6240 - DNA, 42 bp, Artificial Sequence
  Synthetic
ccaggctgatgtcaataccccgcggaatagcctcatcgctac

SEQ ID NO: 6241 - DNA, 45 bp, Artificial Sequence
  Synthetic
ttgctagtcttgttctggcaaaacatgcttagttacttgctgagg

SEQ ID NO: 6242 - DNA, 47 bp, Artificial Sequence
  Synthetic
tgacagtacactttcaggttttgagtgataggcattcaaattctcat

SEQ ID NO: 6243 - DNA, 47 bp, Artificial Sequence
  Synthetic
gcagaaaagtcgagataaggcacctatagtctgctataaccttctct

SEQ ID NO: 6244 - DNA, 42 bp, Artificial Sequence
  Synthetic
ggaaggacctctttgcatcagattcgctttcaacatgatgtt

SEQ ID NO: 6245 - DNA, 46 bp, Artificial Sequence
  Synthetic
ctacagagattcgcttggagaagcttctgttttggagtaagtggag

SEQ ID NO: 6246 - DNA, 41 bp, Artificial Sequence
  Synthetic
ggcttcgccgagatcagaagtgtggcagttctgatgtccag

SEQ ID NO: 6247 - DNA, 42 bp, Artificial Sequence
  Synthetic
gaaagtgacagggcccctttttcaatatgatggttttaccca

SEQ ID NO: 6248 - DNA, 42 bp, Artificial Sequence
  Synthetic
aacacagttcgagtctctgaaactcccattctcatcactgct

SEQ ID NO: 6249 - DNA, 40 bp, Artificial Sequence
  Synthetic
ccctcccgggagagccatagtggtcaccccagcgattccg

SEQ ID NO: 6250 - DNA, 40 bp, Artificial Sequence
  Synthetic
tggagtatacgtgttgccgcgcagaagttttacgcgtcgc

SEQ ID NO: 6251 - DNA, 35 bp, Artificial Sequence
  Synthetic
gctcgtcggcgctcctgtatcaagggccctcacgc

SEQ ID NO: 6252 - DNA, 42 bp, Artificial Sequence
  Synthetic
acacctacagtggcagtcaggtcgcgcctactaataggtcca

SEQ ID NO: 6253 - DNA, 39 bp, Artificial Sequence
  Synthetic
gcatgtcctgcgtttaccccagccaagatgccccaatgg

SEQ ID NO: 6254 - DNA, 38 bp, Artificial Sequence
  Synthetic
tactgctggcactacgcaccggccgcagacacttgatg

SEQ ID NO: 6255 - DNA, 40 bp, Artificial Sequence
  Synthetic
ctcccagtggtcggtggtttgcgcacgtcttgagaaaccc

SEQ ID NO: 6256 - DNA, 41 bp, Artificial Sequence
  Synthetic
tgaccgcagtgagcaacatccagcaaggcagtatagcaagc

SEQ ID NO: 6257 - DNA, 38 bp, Artificial Sequence
  Synthetic
cgctgctgctgggacacatgttaccccgcacgtaccac

SEQ ID NO: 6258 - DNA, 39 bp, Artificial Sequence
  Synthetic
aggtcatcacctggggtgcgctaatcgtgcagagacggg

SEQ ID NO: 6259 - DNA, 41 bp, Artificial Sequence
  Synthetic
atggagcaggttcgagaacgctcccaacgaggtcctgatct

SEQ ID NO: 6260 - DNA, 42 bp, Artificial Sequence
  Synthetic
tgttgcggggatctttagggcttgctaagggtttccactggt

SEQ ID NO: 6261 - DNA, 41 bp, Artificial Sequence
  Synthetic
gggaaccgcaccgttacaactccgcgagaaacttaccgtag

SEQ ID NO: 6262 - DNA, 40 bp, Artificial Sequence
  Synthetic
acgtaccgatatgtcgcctccgacagaggacgaccgagtc

SEQ ID NO: 6263 - DNA, 40 bp, Artificial Sequence
  Synthetic
gcaggctcctcccccaagttggtccatgtagtgttggctt

SEQ ID NO: 6264 - DNA, 42 bp, Artificial Sequence
  Synthetic
atggaggagtgctcacaagctgccttgaactggtgggctatt

SEQ ID NO: 6265 - DNA, 38 bp, Artificial Sequence
  Synthetic
tactcggggggtgggttgccaagccgcttaccacgaac

SEQ ID NO: 6266 - DNA, 36 bp, Artificial Sequence
  Synthetic
cgtaggacctggggagggagtggttgccccgggatg

SEQ ID NO: 6267 - DNA, 40 bp, Artificial Sequence
  Synthetic
aaagggatacaagggcgtgtggcagttattgctgccccgc

SEQ ID NO: 6268 - DNA, 38 bp, Artificial Sequence
  Synthetic
tgccggctgctgagttctttaggggcttacatggaggg

SEQ ID NO: 6269 - DNA, 41 bp, Artificial Sequence
  Synthetic
cagacgctgagctagtggacgtgtaatgttgctgcccatct

SEQ ID NO: 6270 - DNA, 41 bp, Artificial Sequence
  Synthetic
tcagctggacggctctaatgtgtcctgtggtttcgaggacg

SEQ ID NO: 6271 - DNA, 42 bp, Artificial Sequence
  Synthetic
aagagaaactgcccatcagccccgcttctagacgacgttgaa

SEQ ID NO: 6272 - DNA, 38 bp, Artificial Sequence
  Synthetic
ttccaaccaccatcatggcgaatgcggccccctttagc

SEQ ID NO: 6273 - DNA, 39 bp, Artificial Sequence
  Synthetic
ctccctcacggagcggctttacgataaccacactgggcc

SEQ ID NO: 6274 - DNA, 39 bp, Artificial Sequence
  Synthetic
tagagcagccctgagagcctttggcctgtggagcatctc

SEQ ID NO: 6275 - DNA, 45 bp, Artificial Sequence
  Synthetic
tcaagaagtacacatcaggaagacattcattgccatcatccattt

SEQ ID NO: 6276 - DNA, 44 bp, Artificial Sequence
  Synthetic
agtcgaaaggctaaagcatggaaacgtattttgacttggtttct

SEQ ID NO: 6277 - DNA, 45 bp, Artificial Sequence
  Synthetic
agagaagaaagaagaactccaggatctctccaacatgtatgcaac

SEQ ID NO: 6278 - DNA, 45 bp, Artificial Sequence
  Synthetic
tagcatctttattggagatgtgccactgcttaaggatgtctacca

SEQ ID NO: 6279 - DNA, 42 bp, Artificial Sequence
  Synthetic
tgaagagttcacaatggttgggatcaatctcctggttgcttt

SEQ ID NO: 6280 - DNA, 44 bp, Artificial Sequence
  Synthetic
aaagtgctttttcaaaattggggagcaatatcccaatcattccc

SEQ ID NO: 6281 - DNA, 42 bp, Artificial Sequence
  Synthetic
acacagggaacagagaaactgattgaccaacactgattcagg

SEQ ID NO: 6282 - DNA, 42 bp, Artificial Sequence
  Synthetic
gatgtgcttgggacatttgataccactttgctttggtggagc

SEQ ID NO: 6283 - DNA, 42 bp, Artificial Sequence
  Synthetic
agacaggagatatgggccagcagccttctctcctttcgcaag

SEQ ID NO: 6284 - DNA, 40 bp, Artificial Sequence
  Synthetic
ctgccgacgccttaccgattgcttccgttggcataactga

SEQ ID NO: 6285 - DNA, 40 bp, Artificial Sequence
  Synthetic
gcccccttgtgtcatcggaggaaacaatcagtggggcaga

SEQ ID NO: 6286 - DNA, 39 bp, Artificial Sequence
  Synthetic
gcccattgctgctgtccaccggcagggtcgtgaaagaac

SEQ ID NO: 6287 - DNA, 40 bp, Artificial Sequence
  Synthetic
atctgaagggtaggtgggtgccggaggagaggccacatcc

SEQ ID NO: 6288 - DNA, 39 bp, Artificial Sequence; identical to SEQ ID NO: 4473
  Synthetic

SEQ ID NO: 6289 - DNA, 37 bp, Artificial Sequence
  Synthetic
ccgcgtgcggtgacatcagtatctcctggcccctacg

SEQ ID NO: 6290 - DNA, 37 bp, Artificial Sequence
  Synthetic
agaccttgtgggctggccctaaaggtccgaggagccg

SEQ ID NO: 6291 - DNA, 38 bp, Artificial Sequence
  Synthetic
tcacggacaactcctctccaccgagcatgcaggtgggc

SEQ ID NO: 6292 - DNA, 40 bp, Artificial Sequence
  Synthetic
tttgtgacgagtgccactccacggtcaaggacagtgccga

SEQ ID NO: 6293 - DNA, 38 bp, Artificial Sequence
  Synthetic
accgcggtcttgacgtgtctgagcatcggtcgacacga

SEQ ID NO: 6294 - DNA, 40 bp, Artificial Sequence
  Synthetic
gagtgctatgacgcgggctgagcctaactgtagtctcggc

SEQ ID NO: 6295 - DNA, 38 bp, Artificial Sequence
  Synthetic
acctggaggtcgtcacgagcttgacaggcaatacgcgg

SEQ ID NO: 6296 - DNA, 42 bp, Artificial Sequence
  Synthetic
accaactggcagaaactcgaggcccgccaagtattgtatccc

SEQ ID NO: 6297 - DNA, 38 bp, Artificial Sequence
  Synthetic
agatcatgagcggtgaggtcccagaggatggcgggcag

SEQ ID NO: 6298 - DNA, 42 bp, Artificial Sequence
  Synthetic
ctcagcagcctcactgtaacccacactccgagcttatccact

SEQ ID NO: 6299 - DNA, 39 bp, Artificial Sequence
  Synthetic
gggacgttccccattaacgcctagttcggcgcaggaagg

SEQ ID NO: 6300 - DNA, 39 bp, Artificial Sequence
  Synthetic
cgagcccgaaccggacgtacgcctctgctgttatatggg

SEQ ID NO: 6301 - DNA, 39 bp, Artificial Sequence
  Synthetic
ccggactacaaccccccgctccacaggtggttcgtagtc

SEQ ID NO: 6302 - DNA, 36 bp, Artificial Sequence
  Synthetic
tcttccatgccccccctggccatgacccgtcgctga

SEQ ID NO: 6303 - DNA, 39 bp, Artificial Sequence
  Synthetic
ctgacgcccccacattcagccatggcaacggacgtcttt

SEQ ID NO: 6304 - DNA, 39 bp, Artificial Sequence
  Synthetic
acgacgtggttagcaagctcccccgctgtcctggtgagt

SEQ ID NO: 6305 - DNA, 40 bp, Artificial Sequence
  Synthetic
tcacttgctacatcaaggcccggcatggtgcagtcctgga

SEQ ID NO: 6306 - DNA, 42 bp, Artificial Sequence
  Synthetic
ccagtcaattcctggctaggcatatcatcctcgcccacagtg

SEQ ID NO: 6307 - DNA, 40 bp, Artificial Sequence
  Synthetic
gtccgcgctaggcttctgtctgcccagttgaagaggtact

SEQ ID NO: 6308 - DNA, 48 bp, Artificial Sequence
  Synthetic
acccagaaacatattgcttttgtgttgttttgtgcaaaatatacagca

SEQ ID NO: 6309 - DNA, 40 bp, Artificial Sequence
  Synthetic
tgtgtcacaaaccgctggtatgatattttgtgcagtcgtc

SEQ ID NO: 6310 - DNA, 39 bp, Artificial Sequence
  Synthetic
gcacaacaagcgtatagggtgtgcactctaccaccagtc

SEQ ID NO: 6311 - DNA, 41 bp, Artificial Sequence
  Synthetic
gacagtcagcaaaggccaaacgacctgtgtttggccatagc

SEQ ID NO: 6312 - DNA, 41 bp, Artificial Sequence
  Synthetic
gggaatgacagtgcttatgctgtttagccactgtttccctg

SEQ ID NO: 6313 - DNA, 39 bp, Artificial Sequence
  Synthetic
tggggggggctgttatatcccagataatggctgcaacca

SEQ ID NO: 6314 - DNA, 41 bp, Artificial Sequence
  Synthetic
tatgggcacgtttaagccttacctaaacggttcgctagggt

SEQ ID NO: 6315 - DNA, 41 bp, Artificial Sequence
  Synthetic
atgtgaatttcaaggatgacgctcccacatgtacctcccat

SEQ ID NO: 6316 - DNA, 38 bp, Artificial Sequence
  Synthetic
ttccacccagaaggccgcgaaccgggtcctgtcactgt

SEQ ID NO: 6317 - DNA, 44 bp, Artificial Sequence
  Synthetic
gctgacgtgctatctggcattgtaaatataatgctataaggccc

SEQ ID NO: 6318 - DNA, 40 bp, Artificial Sequence
  Synthetic
tggcagatcgcattttgcagtggttccaatgcctaggccc

SEQ ID NO: 6319 - DNA, 43 bp, Artificial Sequence
  Synthetic
ccccagctgtgttggacatcgcaggatttgtaaagtttgtact

SEQ ID NO: 6320 - DNA, 40 bp, Artificial Sequence
  Synthetic
tacttgctccagctgcctcttcaccatcatcaacatcagc

SEQ ID NO: 6321 - DNA, 38 bp, Artificial Sequence
  Synthetic
cgactatgtgacacgcaccatggcctacagtaagcaac

SEQ ID NO: 6322 - DNA, 43 bp, Artificial Sequence
  Synthetic
atccagattatttgggaatggccctgcgcaagtaaaagaacat

SEQ ID NO: 6323 - DNA, 46 bp, Artificial Sequence
  Synthetic
attggaggattggaactttgggtaaatctatatgtgtcctccaagc

SEQ ID NO: 6324 - DNA, 42 bp, Artificial Sequence
  Synthetic
gtaaggttgttctaggtcaggagaaattggtggtgtgcacac

SEQ ID NO: 6325 - DNA, 44 bp, Artificial Sequence
  Synthetic
tgtgcgacacaagctgcaataacagcaaagataattcttgttgt

SEQ ID NO: 6326 - DNA, 46 bp, Artificial Sequence
  Synthetic
gaatcggagcagggaaattccgcaatagtattattacagtcctctg

SEQ ID NO: 6327 - DNA, 49 bp, Artificial Sequence
  Synthetic
tatcaggattcacatgaacagtggcaaagtacattccatcataatccac

SEQ ID NO: 6328 - DNA, 39 bp, Artificial Sequence
  Synthetic
accgcaaatcgcagctggagtgagacagtgcctctctcc

SEQ ID NO: 6329 - DNA, 41 bp, Artificial Sequence
  Synthetic
agacttcaagaggaggctcgggtaagctgtttcccggacct

SEQ ID NO: 6330 - DNA, 46 bp, Artificial Sequence
  Synthetic
ctccatctattacacgccctttgagtgggatattaaaaggtcttgt

SEQ ID NO: 6331 - DNA, 46 bp, Artificial Sequence
  Synthetic
acatcattaggtggtggggagtcatatgcaggatttaaaactgtag

SEQ ID NO: 6332 - DNA, 44 bp, Artificial Sequence
  Synthetic
catcagtttgcagtttcagcagtgaaagtctatatctggtgcag

SEQ ID NO: 6333 - DNA, 46 bp, Artificial Sequence
  Synthetic
atcacctacttacccttacacaccgggtgcaagaaaaaatcataat

SEQ ID NO: 6334 - DNA, 45 bp, Artificial Sequence
  Synthetic
ttatgctggatctgaaaggcttctttccaggatcaattacatcaa

SEQ ID NO: 6335 - DNA, 46 bp, Artificial Sequence
  Synthetic
acagaaaatcctaacacgtatcctgagacacgtccattctattgtc

SEQ ID NO: 6336 - DNA, 46 bp, Artificial Sequence
  Synthetic
gtgatgtaggatttggagctgctaggtactcctgatttatcttcct

SEQ ID NO: 6337 - DNA, 47 bp, Artificial Sequence
  Synthetic
acaaacctcaaaacaatttaggaccttgagtataaagagccactagg

SEQ ID NO: 6338 - DNA, 43 bp, Artificial Sequence
  Synthetic
gaggcaaacttagaaaccgtttctgtttgaacttgcacttacc

SEQ ID NO: 6339 - DNA, 39 bp, Artificial Sequence
  Synthetic
aagaatgaagtgggccatgtgttgccatatcacccttgg

SEQ ID NO: 6340 - DNA, 44 bp, Artificial Sequence
  Synthetic
tcagaaagatgagacttgacaatgcttactctctcaacagggcc

SEQ ID NO: 6341 - DNA, 41 bp, Artificial Sequence
  Synthetic
aactcccattgtactggcatacatactggcaggaaccttct

SEQ ID NO: 6342 - DNA, 43 bp, Artificial Sequence
  Synthetic
agctgtagagattgcaaataagactacatcacctccatccagg

SEQ ID NO: 6343 - DNA, 44 bp, Artificial Sequence
  Synthetic
ttcagccaaaaaggaggacatggtgtcttgagaaaataccatgc

SEQ ID NO: 6344 - DNA, 48 bp, Artificial Sequence
  Synthetic
tgaggaatcacctaaagcaagtgagaatgtatagtcagatgcattcat

SEQ ID NO: 6345 - DNA, 45 bp, Artificial Sequence
  Synthetic
ccaagatgtgggaaatgggaacactaaatttttaagcacccattg

SEQ ID NO: 6346 - DNA, 48 bp, Artificial Sequence
  Synthetic
aattgttgcctttctgtttttcgccaaaaattgataaggctctccatt

SEQ ID NO: 6347 - DNA, 43 bp, Artificial Sequence
  Synthetic
tgaggaacttgaaagactaaaaccgacgggctttccttggtaa

SEQ ID NO: 6348 - DNA, 43 bp, Artificial Sequence
  Synthetic
actttccacacttttcatctctctgcattgcgacctatgggag

SEQ ID NO: 6349 - DNA, 45 bp, Artificial Sequence
  Synthetic
tcttggacaagaatggcatgtgaacatgtagatcttcatgaacaa

SEQ ID NO: 6350 - DNA, 48 bp, Artificial Sequence
  Synthetic
ctagcgaagttaaagcccaatcatcatcatggttaacagtatcagtac

SEQ ID NO: 6351 - DNA, 43 bp, Artificial Sequence
  Synthetic
attgacttgtttgttaagcgtcgaaaaccatctccacaaactg

SEQ ID NO: 6352 - DNA, 46 bp, Artificial Sequence
  Synthetic
tttgtcttttagatcaggcttggccaacaggtttctcgttaaaatt

SEQ ID NO: 6353 - DNA, 42 bp, Artificial Sequence
  Synthetic
ttaatcctgctaatgggcatatgctttacctgcagctacagc

SEQ ID NO: 6354 - DNA, 42 bp, Artificial Sequence
  Synthetic
cagtggcaggaagcatggtagctaaaacaagagcaactaacc

SEQ ID NO: 6355 - DNA, 44 bp, Artificial Sequence
  Synthetic
ctcctctgagtaaggatttacctgagcctacacctacacccata

SEQ ID NO: 6356 - DNA, 48 bp, Artificial Sequence
  Synthetic
tgttgagtacaaagtaacagtctggacatataaatcatcagatgccaa

SEQ ID NO: 6357 - DNA, 50 bp, Artificial Sequence
  Synthetic
acgaaattgtagtgttcgtgttaagccaccattagcagtaatatcataat

SEQ ID NO: 6358 - DNA, 46 bp, Artificial Sequence
  Synthetic
cagtagctgctggtttggaatcactctttaaatatgtaggtaccaa

SEQ ID NO: 6359 - DNA, 49 bp, Artificial Sequence
  Synthetic
atacatctttggttccacatacacgccttcactaataacatcaggaaat

SEQ ID NO: 6360 - DNA, 43 bp, Artificial Sequence
  Synthetic
tggtaatgttaaacctggtgaaactgaaatgccccttgtggtc

SEQ ID NO: 6361 - DNA, 43 bp, Artificial Sequence
  Synthetic
attgtgcttggtttgtacaaaatgatttgccatagcccaaaca

SEQ ID NO: 6362 - DNA, 44 bp, Artificial Sequence
  Synthetic
agaggctcggattaatgataagaagacgaaccatgctaaaaagc

SEQ ID NO: 6363 - DNA, 48 bp, Artificial Sequence
  Synthetic
ctcagtttgtatttattgccgtgcccacgtaatttacatataccatct

SEQ ID NO: 6364 - DNA, 50 bp, Artificial Sequence
  Synthetic
tttggtgattttatacaaacagcccgtcaacataggcatcatataagaat

SEQ ID NO: 6365 - DNA, 44 bp, Artificial Sequence
  Synthetic
cagatcctgctatgcacgttgcactaaaacaacaagttcgtaaa

SEQ ID NO: 6366 - DNA, 47 bp, Artificial Sequence
  Synthetic
tgctatcagtgctaagaatagagctggcctgtcatagtactaagaat

SEQ ID NO: 6367 - DNA, 46 bp, Artificial Sequence
  Synthetic
acatgaattttgttgttcacatggttcaaaacttgagcacattcat

SEQ ID NO: 6368 - DNA, 46 bp, Artificial Sequence
  Synthetic
aagtctagctatagatgcttaccctacacgaaagactttttggtat

SEQ ID NO: 6369 - DNA, 44 bp, Artificial Sequence
  Synthetic
tgaacgtttaaagttatttgctgcatggtagcagaagcatagct

SEQ ID NO: 6370 - DNA, 43 bp, Artificial Sequence
  Synthetic
atgttgctaattatcagcacattggagactttcccgtaccagg

SEQ ID NO: 6371 - DNA, 49 bp, Artificial Sequence
  Synthetic
ctttccactgcaaataggtttttcaaagtataacaatctctctcagcaa

SEQ ID NO: 6372 - DNA, 45 bp, Artificial Sequence
  Synthetic
tgatgcttttcctgtagccaagatctttatgcacatcatagacat

SEQ ID NO: 6373 - DNA, 48 bp, Artificial Sequence
  Synthetic
atcacacggtgtaatctaggtggggtagttacaatattcttcagcatg

SEQ ID NO: 6374 - DNA, 41 bp, Artificial Sequence
  Synthetic
ctcaaagttgagttttggttcgcctgtctgttcggctgaag

SEQ ID NO: 6375 - DNA, 43 bp, Artificial Sequence
  Synthetic
ttttacatttaggtgcagggtctgccagatggtaaccactgtc

SEQ ID NO: 6376 - DNA, 46 bp, Artificial Sequence
  Synthetic
atcgttcttgtgagagtactactgtcaggtaaacaagaacacctac

SEQ ID NO: 6377 - DNA, 47 bp, Artificial Sequence
  Synthetic
tcgtaaacgtagaagtatttctgctaaactgacattaaagggttcaa

SEQ ID NO: 6378 - DNA, 45 bp, Artificial Sequence
  Synthetic
aaatgcttatgtctctcaacagctccttctccatagctaaagcag

SEQ ID NO: 6379 - DNA, 44 bp, Artificial Sequence
  Synthetic
tacagggtgtcaaacttggcatacagtaacatatacgggcaaat

SEQ ID NO: 6380 - DNA, 44 bp, Artificial Sequence
  Synthetic
atctgagcgaaattaccaaacctagacacagtgaatttaggttg

SEQ ID NO: 6381 - DNA, 47 bp, Artificial Sequence
  Synthetic
tcaacagtgttttggtaaaagaggaccaagctttaacatttcagcat

SEQ ID NO: 6382 - DNA, 46 bp, Artificial Sequence
  Synthetic
ctggtactcagcacatttcaaatgggatcatcaagagtagcaagta

SEQ ID NO: 6383 - DNA, 39 bp, Artificial Sequence
  Synthetic
tgcagcaatatgcacccacttcgccttgttcattgatga

SEQ ID NO: 6384 - DNA, 42 bp, Artificial Sequence
  Synthetic
cgaaagaggcgaagaaacaattgatttcggtgggagactttg

SEQ ID NO: 6385 - DNA, 45 bp, Artificial Sequence
  Synthetic
cctaatggacctccttgttatcagttcaatgctcaatttcaaagc

SEQ ID NO: 6386 - DNA, 45 bp, Artificial Sequence
  Synthetic
aaaacgagtcaactaaagtgggctgtcaaagtctactttctctgg

SEQ ID NO: 6387 - DNA, 49 bp, Artificial Sequence
  Synthetic
gaattatttcacagcagaggtgtcccagtattaatgtatacccccttca

SEQ ID NO: 6388 - DNA, 45 bp, Artificial Sequence
  Synthetic
aaatgggagaaatactgtgtccttgccttgaaatttggcctatgg

SEQ ID NO: 6389 - DNA, 42 bp, Artificial Sequence
  Synthetic
ccccaagggagtggaagaagtgacttagccaatagagtccta

SEQ ID NO: 6390 - DNA, 45 bp, Artificial Sequence
  Synthetic
aattgggaggttttacgtacagatgatcaaccttccttcttggtc

SEQ ID NO: 6391 - DNA, 40 bp, Artificial Sequence
  Synthetic
ggcgataatggacgaagaacattccctttgaggatgttgc

SEQ ID NO: 6392 - DNA, 39 bp, Artificial Sequence
  Synthetic
tcctgagaggatccgtagccctatccactggccacagcg

SEQ ID NO: 6393 - DNA, 44 bp, Artificial Sequence
  Synthetic
aagaggacaactatccactagaggagaatccattgcttccacgt

SEQ ID NO: 6394 - DNA, 47 bp, Artificial Sequence
  Synthetic
aagctttcagcatctattactgacactgtatatttctcctagcacac

SEQ ID NO: 6395 - DNA, 42 bp, Artificial Sequence
  Synthetic
aagagacggagagagaccgaggttcaatgttggacgaggagg

SEQ ID NO: 6396 - DNA, 45 bp, Artificial Sequence
  Synthetic
aaatgttggaggtggagatgtaaaaaaactgtagtgcatgctaaa

SEQ ID NO: 6397 - DNA, 43 bp, Artificial Sequence
  Synthetic
cggaggacttatatagggcttgttgcaagtgtagtttgttcaa

SEQ ID NO: 6398 - DNA, 43 bp, Artificial Sequence
  Synthetic
acacctgttaaaccaaatacagctgttgcagatgactcaggag

SEQ ID NO: 6399 - DNA, 39 bp, Artificial Sequence
  Synthetic
tgcagcctatacctgaaaggcctgggctgttgcatcaat

SEQ ID NO: 6400 - DNA, 45 bp, Artificial Sequence
  Synthetic
cactttagttagagccagggaactggatcacttataggtacctgt

SEQ ID NO: 6401 - DNA, 40 bp, Artificial Sequence
  Synthetic
ggtggttcgagtgagcagatgtgcactgtttgacctatag

SEQ ID NO: 6402 - DNA, 50 bp, Artificial Sequence
  Synthetic
tacaggtgaatattgggatgtagcagtttactaattgtattgcaggacaa

SEQ ID NO: 6403 - DNA, 39 bp, Artificial Sequence
  Synthetic
ctttcatggaagacgggagcaatcacccatagtccctgc

SEQ ID NO: 6404 - DNA, 38 bp, Artificial Sequence
  Synthetic
gtacctccccctcagactgcggtaaatgacagcgggtt

SEQ ID NO: 6405 - DNA, 44 bp, Artificial Sequence
  Synthetic
tcgcactgtttatgcagagcatgcagtattgtaaacaacattct

SEQ ID NO: 6406 - DNA, 43 bp, Artificial Sequence
  Synthetic
ttttggtaagtgacaaatgcccggctttaaagtgcacggtaac

SEQ ID NO: 6407 - DNA, 42 bp, Artificial Sequence
  Synthetic
attcggatttccatttcatcgacgatagtgcattcgggtcac

SEQ ID NO: 6408 - DNA, 46 bp, Artificial Sequence
  Synthetic
tcattgaaattggagtaacacggatattttgttggctttctctagg

SEQ ID NO: 6409 - DNA, 41 bp, Artificial Sequence
  Synthetic
aagaggcgaagagacaattgaaggttcggtgggagactttg

SEQ ID NO: 6410 - DNA, 43 bp, Artificial Sequence
  Synthetic
agactttgatgactgcaaagatgtttagagatctgggctctgg

SEQ ID NO: 6411 - DNA, 43 bp, Artificial Sequence
  Synthetic
gggctactgaatacataatgaagggaaagtcatccatggctgc

SEQ ID NO: 6412 - DNA, 43 bp, Artificial Sequence
  Synthetic
tgtgttcttgaaataggagacatgcataggaacatgggcctcg

SEQ ID NO: 6413 - DNA, 41 bp, Artificial Sequence
  Synthetic
gggagtggaggaaggctctaagacgcatatagactgttgaa

SEQ ID NO: 6414 - DNA, 39 bp, Artificial Sequence
  Synthetic
gtgatgccccctttgatgacacaagtgtgctgcctcttc

SEQ ID NO: 6415 - DNA, 48 bp, Artificial Sequence
  Synthetic
cagaaaataactggaggccttatggactgagaaatttgctttaaggat

SEQ ID NO: 6416 - DNA, 40 bp, Artificial Sequence
  Synthetic
acagagattcgcttggggaactgttttggagggagtgaag

SEQ ID NO: 6417 - DNA, 43 bp, Artificial Sequence
  Synthetic
agggacaacatgaccaagaaaatagctcttttttgtcagcttt

SEQ ID NO: 6418 - DNA, 45 bp, Artificial Sequence
  Synthetic
ccgttggagggaatgagaagagttagtcatcatctttctcacaac

SEQ ID NO: 6419 - DNA, 43 bp, Artificial Sequence
  Synthetic
tccaatcctctgatgatttcgctcctgcttgtattccctcatg

SEQ ID NO: 6420 - DNA, 43 bp, Artificial Sequence
  Synthetic
aacaacgaccttggaccagctgtagtctttaatgaacagctga

SEQ ID NO: 6421 - DNA, 41 bp, Artificial Sequence
  Synthetic
tcttccctagcagttcatatcggatcaattcgggccctaga

SEQ ID NO: 6422 - DNA, 38 bp, Artificial Sequence
  Synthetic
ccagctacccgaccctacaacttgcagtgatgtgtcca

SEQ ID NO: 6423 - DNA, 47 bp, Artificial Sequence
  Synthetic
tggaaccatataatgaagtgcaagacctctgagttgtttaattcctc

SEQ ID NO: 6424 - DNA, 44 bp, Artificial Sequence
  Synthetic
acatgccttaaaacgaaagtatggacttgctgtatcacgacatg

SEQ ID NO: 6425 - DNA, 48 bp, Artificial Sequence
  Synthetic
tgacagtgtatttgacctgtcagatcatatgctatgtcactttcatct

SEQ ID NO: 6426 - DNA, 41 bp, Artificial Sequence
  Synthetic
gacgtggtccagattagatttgcaacgttgggatagggcat

SEQ ID NO: 6427 - DNA, 45 bp, Artificial Sequence
  Synthetic
aaaagcaaagcacatgaagcaatactctgatttagcaagactctc

SEQ ID NO: 6428 - DNA, 40 bp, Artificial Sequence
  Synthetic
agagaattacaacaccccaccagaacccccactcttttgg

SEQ ID NO: 6429 - DNA, 43 bp, Artificial Sequence
  Synthetic
ggccttcagatccatctattgttacaacaggagctccagatgt

SEQ ID NO: 6430 - DNA, 41 bp, Artificial Sequence
  Synthetic
cacatggatacgaggaaattccaaataggttcggtgcctct

SEQ ID NO: 6431 - DNA, 46 bp, Artificial Sequence
  Synthetic
tgccttaacatccagacgtgggacatagttagttttttacccaatc

SEQ ID NO: 6432 - DNA, 43 bp, Artificial Sequence
  Synthetic
tcctgaaacacaacgtttagtatggtaacacctaaaggctgcc

SEQ ID NO: 6433 - DNA, 41 bp, Artificial Sequence
  Synthetic
attggttgtgttcctgctattggcagtcacctgtttgcaca

SEQ ID NO: 6434 - DNA, 43 bp, Artificial Sequence
  Synthetic
tttacgacgcgaacagttatttgcctgcatctcctatagtgcc

SEQ ID NO: 6435 - DNA, 40 bp, Artificial Sequence
  Synthetic
gaaccctatgtttcatgcgacctgttgttccttggctgag

SEQ ID NO: 6436 - DNA, 42 bp, Artificial Sequence
  Synthetic
tctgcagtagtatggtacaacagaagtatgtttcgggcccat

SEQ ID NO: 6437 - DNA, 48 bp, Artificial Sequence
  Synthetic
ggctcaaatagaccagtgattcagcatatatattgactagtgtgtgtc

SEQ ID NO: 6438 - DNA, 44 bp, Artificial Sequence
  Synthetic
ctcgaggtctggatacgagatgggctttgatctatcatctgtca

SEQ ID NO: 6439 - DNA, 42 bp, Artificial Sequence
  Synthetic
aaaagtacacatcaggaaggcaaattgccatcatccacttca

SEQ ID NO: 6440 - DNA, 49 bp, Artificial Sequence
  Synthetic
aaaaggtcgaaaggttgaaacatgcctccttattttaacttgatttctg

SEQ ID NO: 6441 - DNA, 42 bp, Artificial Sequence
  Synthetic
atgctagaaagagaattggtccgttaaacactgcctgttccg

SEQ ID NO: 6442 - DNA, 41 bp, Artificial Sequence
  Synthetic
tctctcttggaaatgtgccacagtctaaggatgtccaccat

SEQ ID NO: 6443 - DNA, 45 bp, Artificial Sequence
  Synthetic
gaagagcaacagctattctcagaaactctcccgcttactatcaac

SEQ ID NO: 6444 - DNA, 41 bp, Artificial Sequence
  Synthetic
agatcaatggccctgagtcacaatttcccagttcctgatta

SEQ ID NO: 6445 - DNA, 39 bp, Artificial Sequence
  Synthetic
tgccccaccagaacagagtatcaaccctgatcctctcac

SEQ ID NO: 6446 - DNA, 44 bp, Artificial Sequence
  Synthetic
aagagatatggcccagcattaagcacattagccttctctccttt

SEQ ID NO: 6447 - DNA, 43 bp, Artificial Sequence
  Synthetic
tggaggagtattgcaaacattatggatggcaaaacacgcatct

SEQ ID NO: 6448 - DNA, 46 bp, Artificial Sequence
  Synthetic
ggttagattaagggtttgtgtacgtaagagaagcacttgaagactg

SEQ ID NO: 6449 - DNA, 49 bp, Artificial Sequence
  Synthetic
aaaaggagattgtttttggacagtgctacctgtgtaacagtattttcag

SEQ ID NO: 6450 - DNA, 42 bp, Artificial Sequence
  Synthetic
gggaagtggatctagaacggttcattaatggcggatcccaag

SEQ ID NO: 6451 - DNA, 45 bp, Artificial Sequence
  Synthetic
gtggatcacgttctggtagacccatctactgttacagatggtctt

SEQ ID NO: 6452 - DNA, 43 bp, Artificial Sequence
  Synthetic
actggcggtgtcactcaatcctagaactgcaaaactagtctca

SEQ ID NO: 6453 - DNA, 45 bp, Artificial Sequence
  Synthetic
agcagcaccagacaatgcatttttctgttagtataggtctgtgta

SEQ ID NO: 6454 - DNA, 46 bp, Artificial Sequence
  Synthetic
agaccctataaatgcaacagatgttgctttctgcatattcatcctc

SEQ ID NO: 6455 - DNA, 43 bp, Artificial Sequence
  Synthetic
taggtgatacagagaatccagcaacaattcattcgttggtctg

SEQ ID NO: 6456 - DNA, 45 bp, Artificial Sequence
  Synthetic
gtgtgccattagaattagtggacactatcactggtcatgcgtaag

SEQ ID NO: 6457 - DNA, 39 bp, Artificial Sequence
  Synthetic
ctagtggacagcagtgaccttcaggcgccaaaaacttac

SEQ ID NO: 6458 - DNA, 49 bp, Artificial Sequence
  Synthetic
ctgtgtggaaacctggatattgtgtaagatgtacctttagtgtctttgt

SEQ ID NO: 6459 - DNA, 45 bp, Artificial Sequence
  Synthetic
gtgcctggatattttacacagcagttccttatatcccactccaaa

SEQ ID NO: 6460 - DNA, 46 bp, Artificial Sequence
  Synthetic
agaagtgtaccagtagcattgtttattgttccatgtacaaaacttg

SEQ ID NO: 6461 - DNA, 43 bp, Artificial Sequence
  Synthetic
agatggaaacgaggtgtctgtgaggtaatttaatttgcactgg

SEQ ID NO: 6462 - DNA, 43 bp, Artificial Sequence
  Synthetic
cattggcagcatctgaaagcaccatattgggatttctttaggc

SEQ ID NO: 6463 - DNA, 41 bp, Artificial Sequence
  Synthetic
atgtgcattttaccaaggaagcattccagtcctcacttgcc

SEQ ID NO: 6464 - DNA, 45 bp, Artificial Sequence
  Synthetic
ttttacatgggtggcggatgcctttgtgatgtattagtaaatcct

SEQ ID NO: 6465 - DNA, 40 bp, Artificial Sequence
  Synthetic
caggtgggggtcgggtaacacaggaggcccaataggatct

SEQ ID NO: 6466 - DNA, 43 bp, Artificial Sequence
  Synthetic
acagaccctgttacacaatctgccagatccttctgttacagca

SEQ ID NO: 6467 - DNA, 45 bp, Artificial Sequence
  Synthetic
gtatccaccctgactcatttgaattcaataatacctgtgtcaccg

SEQ ID NO: 6468 - DNA, 46 bp, Artificial Sequence
  Synthetic
ccacagtccggtaaactttatctaccgtattcatcagtaggcagta

SEQ ID NO: 6469 - DNA, 38 bp, Artificial Sequence
  Synthetic
cattgggatgctgcaaagcctaaaggaggacatgcacc

SEQ ID NO: 6470 - DNA, 45 bp, Artificial Sequence
  Synthetic
tgccaccagctataaacattatctgtgagaggaaccttgcataat

SEQ ID NO: 6471 - DNA, 41 bp, Artificial Sequence
  Synthetic
tctacctcctctagaaagcggtcttaaaccccccgtctacg

SEQ ID NO: 6472 - DNA, 43 bp, Artificial Sequence
  Synthetic
cttgatcctatgattgttgttggcatacacctctcccggttag

SEQ ID NO: 6473 - DNA, 50 bp, Artificial Sequence
  Synthetic
gcactatccctatacaatagacaccgcaataatagtaaatctaacacctg

SEQ ID NO: 6474 - DNA, 45 bp, Artificial Sequence
  Synthetic
tagcgaatggtatgttgtgacagtagctcttccattgtatccaaa

SEQ ID NO: 6475 - DNA, 48 bp, Artificial Sequence
  Synthetic
tttcacctcagagacaaagcaaaagtagcttcatcttctcctaatcca

SEQ ID NO: 6476 - DNA, 43 bp, Artificial Sequence
  Synthetic
gtgccgctgcagaagaagtaaaaaatcacaatgttgctgcata

SEQ ID NO: 6477 - DNA, 44 bp, Artificial Sequence
  Synthetic
ccaaattatttctgctcctgttaccgctttggaagtgtagtcgt

SEQ ID NO: 6478 - DNA, 39 bp, Artificial Sequence
  Synthetic
ctccagagagtcgccccgtaactctgtcggtcgacttcg

SEQ ID NO: 6479 - DNA, 47 bp, Artificial Sequence
  Synthetic
agaccctataagttcaggttctgaatctgcagcacttatatctgaaa

SEQ ID NO: 6480 - DNA, 44 bp, Artificial Sequence
  Synthetic
ggggagggatttcaacgtgttatcaatattttgtgttggctgtt

SEQ ID NO: 6481 - DNA, 48 bp, Artificial Sequence
  Synthetic
gaacaatacgagtcagcagattaggctttctgaccaatagttagtcca

SEQ ID NO: 6482 - DNA, 45 bp, Artificial Sequence
  Synthetic
tgaaggagaatctatgatcatgccccttgcagctatttctggaat

SEQ ID NO: 6483 - DNA, 43 bp, Artificial Sequence
  Synthetic
aatgttttacagatggctctttggtgagtacacgagcaacagg

SEQ ID NO: 6484 - DNA, 45 bp, Artificial Sequence
  Synthetic
tgtctttaacccagaaagagagagaccacctctaccaatttcaag

SEQ ID NO: 6485 - DNA, 38 bp, Artificial Sequence
  Synthetic
ccagccactggtgaacactgggatccttttgctggagc

SEQ ID NO: 6486 - DNA, 41 bp, Artificial Sequence
  Synthetic
ctcggatttaacaagcattgctgttgcctgtttcccctttg

SEQ ID NO: 6487 - DNA, 40 bp, Artificial Sequence
  Synthetic
gcagtttggcttcgaggtgcattgatggcctggaactgac

SEQ ID NO: 6488 - DNA, 39 bp, Artificial Sequence
  Synthetic
ccagagacggtgttgcgccggcaaaggaggaccaggttc

SEQ ID NO: 6489 - DNA, 43 bp, Artificial Sequence
  Synthetic
gtagacacccagttatgcagtgtgatagaattccaggaggttt

SEQ ID NO: 6490 - DNA, 36 bp, Artificial Sequence
  Synthetic
agtaggtgcctccagagcccaagtttgggggcgccc

SEQ ID NO: 6491 - DNA, 38 bp, Artificial Sequence; identical to SEQ ID NO: 5838
  Synthetic

SEQ ID NO: 6492 - DNA, 39 bp, Artificial Sequence
  Synthetic
cctggggccaccttcatcaccacttcggtctcccctagg

SEQ ID NO: 6493 - DNA, 36 bp, Artificial Sequence
  Synthetic
gtggctgcctttgggatgcagcaggcaaggcgagca

SEQ ID NO: 6494 - DNA, 39 bp, Artificial Sequence
  Synthetic
agttgatgatctgtaggcgcacatctacgaggccatcaa

SEQ ID NO: 6495 - DNA, 35 bp, Artificial Sequence
  Synthetic
atgcgggatctgccggtcgaaacccgatggccccg

SEQ ID NO: 6496 - DNA, 36 bp, Artificial Sequence
  Synthetic
actcgtgaggcaccccatcctggctcccgcgcatac

SEQ ID NO: 6497 - DNA, 40 bp, Artificial Sequence
  Synthetic
tccccgggagattcgcgacacatgatcagccacgaacgaa

SEQ ID NO: 6498 - DNA, 39 bp, Artificial Sequence
  Synthetic
gtttcagatcccacgcctccaaaaacacggccaagggag

SEQ ID NO: 6499 - DNA, 41 bp, Artificial Sequence
  Synthetic
agctatgcctcccgtcgactgagaagcccagttatccaccc

SEQ ID NO: 6500 - DNA, 40 bp, Artificial Sequence
  Synthetic
cggccaatcccggggtaactagggactggctgtctcctac

SEQ ID NO: 6501 - DNA, 39 bp, Artificial Sequence
  Synthetic
cctgcgtagaacgatggggcgctggtcggcacacatccg

SEQ ID NO: 6502 - DNA, 39 bp, Artificial Sequence
  Synthetic
gactctgtttccagccagagggacaatttctggcggcgg

SEQ ID NO: 6503 - DNA, 37 bp, Artificial Sequence
  Synthetic
ccgccatctcgtgggccttcgctggaagagcaggtcc

SEQ ID NO: 6504 - DNA, 39 bp, Artificial Sequence
  Synthetic
ggcctcattcgcctctcgcgctccgagaacaggaagaca

SEQ ID NO: 6505 - DNA, 39 bp, Artificial Sequence
  Synthetic
gcaggcaggcctccagcttaaacaagggaagagcgggag

SEQ ID NO: 6506 - DNA, 37 bp, Artificial Sequence
  Synthetic
gccgtgcctaggatgcggaggatgtgaatgcccccgg

SEQ ID NO: 6507 - DNA, 38 bp, Artificial Sequence
  Synthetic
tgcgagcaaaggcggcgatccggaacagatcacagtca

SEQ ID NO: 6508 - DNA, 36 bp, Artificial Sequence
  Synthetic
tcgccagagggatctgcacctggaggctgtgctccc

SEQ ID NO: 6509 - DNA, 38 bp, Artificial Sequence
  Synthetic
cgacctcagctccgagtgggaagaggtagcgccccagg

SEQ ID NO: 6510 - DNA, 35 bp, Artificial Sequence
  Synthetic
cccacttttggcgcgacctcctcggcgcacaggtt

SEQ ID NO: 6511 - DNA, 35 bp, Artificial Sequence
  Synthetic
actcctgctggccctcccttcaccgactgccccct

SEQ ID NO: 6512 - DNA, 36 bp, Artificial Sequence
  Synthetic
catgagcaagggcccagggacttccaatcccccggg

SEQ ID NO: 6513 - DNA, 38 bp, Artificial Sequence
  Synthetic
ttccggccgttagcgtgccaccacagctatgatgccag

SEQ ID NO: 6514 - DNA, 38 bp, Artificial Sequence
  Synthetic
gcctctggctgttcagctcgcttctgcttctgcctggc

SEQ ID NO: 6515 - DNA, 36 bp, Artificial Sequence
  Synthetic
aggggtcagcggctgtcaaccggtcttcctctgcca

SEQ ID NO: 6516 - DNA, 36 bp, Artificial Sequence
  Synthetic
cggccaggctctgaccagattgagaccctggcgcac

SEQ ID NO: 6517 - DNA, 37 bp, Artificial Sequence
  Synthetic
agatgcggcgcagacagccacagggggatgccagagg

SEQ ID NO: 6518 - DNA, 40 bp, Artificial Sequence
  Synthetic
ctcgtcaggccgcgagaggatggcctcaaacactgacatt

SEQ ID NO: 6519 - DNA, 35 bp, Artificial Sequence
  Synthetic
cctttgagcccgaggtgccagagtgctccggctgc

SEQ ID NO: 6520 - DNA, 40 bp, Artificial Sequence
  Synthetic
gtagcgccgctgattctggacatcatcgatcccggctaca

SEQ ID NO: 6521 - DNA, 42 bp, Artificial Sequence
  Synthetic
tctgttccttctgctccagtgctcattacctctcgctgtcga

SEQ ID NO: 6522 - DNA, 37 bp, Artificial Sequence
  Synthetic
gatgcgcctgacgttgtgcggccccactgtatccacc

SEQ ID NO: 6523 - DNA, 44 bp, Artificial Sequence
  Synthetic
tcgaagagtttatatggatgtgcatatggtttttgtctgatggc

SEQ ID NO: 6524 - DNA, 41 bp, Artificial Sequence
  Synthetic
ttggcttctgacatctcccagctgtgcgtagtgttgctgtg

SEQ ID NO: 6525 - DNA, 37 bp, Artificial Sequence
  Synthetic
agtagcgggcctcggtgtggatggacgaggagctcat

SEQ ID NO: 6526 - DNA, 40 bp, Artificial Sequence
  Synthetic
gcagtggctatgcctccatgccaagagctggtgggagagg

SEQ ID NO: 6527 - DNA, 38 bp, Artificial Sequence
  Synthetic
gagatggtgtccggagaccccacaccgtgggccccttt

SEQ ID NO: 6528 - DNA, 41 bp, Artificial Sequence
  Synthetic
aagagccagggggggaagtcgtcttttcaccacgtccacga

SEQ ID NO: 6529 - DNA, 39 bp, Artificial Sequence
  Synthetic
aagcctgcctcatccttgaccaaagcagcagcctcagga

SEQ ID NO: 6530 - DNA, 39 bp, Artificial Sequence
  Synthetic
ccctgggcttggttcgcctccaaatactggccggtactc

SEQ ID NO: 6531 - DNA, 37 bp, Artificial Sequence
  Synthetic
tgggcagtaggctcggagtgtcacgggagccacaacc

SEQ ID NO: 6532 - DNA, 36 bp, Artificial Sequence
  Synthetic
cccgcctggtgctggaagttcagggacgttggtggc

SEQ ID NO: 6533 - DNA, 39 bp, Artificial Sequence
  Synthetic
agatggccatcagtaggcaccctggcccgcagacacatt

SEQ ID NO: 6534 - DNA, 38 bp, Artificial Sequence
  Synthetic
cagtcctaggtcagcggccgactcgggggcctctacac

SEQ ID NO: 6535 - DNA, 38 bp, Artificial Sequence
  Synthetic
tgtgctggaaagagaggctggatcttgtccgccgccag

SEQ ID NO: 6536 - DNA, 37 bp, Artificial Sequence
  Synthetic
tgggacctggggccgtagacctggtgcctgaagaccc

SEQ ID NO: 6537 - DNA, 37 bp, Artificial Sequence
  Synthetic
tgctgtatgcctcgcagcgctatcctgctgcagggcg

SEQ ID NO: 6538 - DNA, 40 bp, Artificial Sequence
  Synthetic
ggggggcctggagtcgatcaccacccgctgtatgaggaag

SEQ ID NO: 6539 - DNA, 36 bp, Artificial Sequence
  Synthetic
tggcacgcgattggggcacccctcctcgtgcaccta

SEQ ID NO: 6540 - DNA, 37 bp, Artificial Sequence
  Synthetic
aagggcgcacaccactcctgtgatggatccagcgagt

SEQ ID NO: 6541 - DNA, 37 bp, Artificial Sequence
  Synthetic
acaccctcaacccccgagtgccggatcaacgtacacg

SEQ ID NO: 6542 - DNA, 35 bp, Artificial Sequence
  Synthetic
gccctccagatcgccaccttgggggtgcagggtga

SEQ ID NO: 6543 - DNA, 42 bp, Artificial Sequence
  Synthetic
tgacggatgtctttaacggcgcaggatgtgttggcctttagg

SEQ ID NO: 6544 - DNA, 42 bp, Artificial Sequence
  Synthetic
gcgtaacgtcattgtccaccgacattcatgacctgccccact

SEQ ID NO: 6545 - DNA, 40 bp, Artificial Sequence
  Synthetic
actgacccccttgagcacgcgaagccgtctctctgagatg

SEQ ID NO: 6546 - DNA, 39 bp, Artificial Sequence
  Synthetic
gtgtcctggtttaaggccgcagtgctgctccaatgtccg

SEQ ID NO: 6547 - DNA, 36 bp, Artificial Sequence
  Synthetic
tgtacccatcccggccctcatgggcaggctctcacg

SEQ ID NO: 6548 - DNA, 39 bp, Artificial Sequence
  Synthetic
tcgatgagggagcaaacacccgcacagtcacggggatct

SEQ ID NO: 6549 - DNA, 43 bp, Artificial Sequence
  Synthetic
gtggtcagcagcagatagtgaatcttgagctccaactactttg

SEQ ID NO: 6550 - DNA, 36 bp, Artificial Sequence
  Synthetic
cgtagcaccacgtggctgctccagcccctgcatacc

SEQ ID NO: 6551 - DNA, 36 bp, Artificial Sequence
  Synthetic
cgctctccgggcacgtcttagttcggggcctgtgtc

SEQ ID NO: 6552 - DNA, 37 bp, Artificial Sequence
  Synthetic
cccgtgcctccttactacggatggatcgcgagggagc

SEQ ID NO: 6553 - DNA, 37 bp, Artificial Sequence
  Synthetic
aggcctctgcgtccggagtcacagacttggccttggg

SEQ ID NO: 6554 - DNA, 40 bp, Artificial Sequence
  Synthetic
ctggatgagggagcgccaattacaagggtgggctaactct

SEQ ID NO: 6555 - DNA, 37 bp, Artificial Sequence
  Synthetic
ccagggtccccacagtggatggctctgaccagcaaga

SEQ ID NO: 6556 - DNA, 38 bp, Artificial Sequence
  Synthetic
gggcagttcctcgttgcgcacccagatgcctcacctgg

SEQ ID NO: 6557 - DNA, 39 bp, Artificial Sequence
  Synthetic
cagacgcccccagccctaacaggcacatctacagcatca

SEQ ID NO: 6558 - DNA, 37 bp, Artificial Sequence
  Synthetic
ccaccaccgtcagggagtctaggggtggtggatgtgc

SEQ ID NO: 6559 - DNA, 36 bp, Artificial Sequence
  Synthetic
cacgttgctgggtgggggaaccttcatcacggggcc

SEQ ID NO: 6560 - DNA, 36 bp, Artificial Sequence
  Synthetic
ctgtcctcccagggacccgacccgcatgcgcaacca

SEQ ID NO: 6561 - DNA, 40 bp, Artificial Sequence
  Synthetic
ggtggttacaggagacgtgggttggttctgcccaaccacg

SEQ ID NO: 6562 - DNA, 38 bp, Artificial Sequence
  Synthetic
cgtagctcaccgccagctccggactcgggagccttaat

SEQ ID NO: 6563 - DNA, 42 bp, Artificial Sequence
  Synthetic
aacgatggaatggccaccaggtggcaataaccgaggccttca

SEQ ID NO: 6564 - DNA, 38 bp, Artificial Sequence
  Synthetic
gcaccgtcaggcacctgtgctcttagggaggtggccac

SEQ ID NO: 6565 - DNA, 38 bp, Artificial Sequence
  Synthetic
gagtctgcgatagagggccaggcacaagagcgccgcct

SEQ ID NO: 6566 - DNA, 39 bp, Artificial Sequence
  Synthetic
cgtacgtgcgtgtctttgcccaggaagctgtacgcggag

SEQ ID NO: 6567 - DNA, 37 bp, Artificial Sequence
  Synthetic
tggactcagccaccttgtcgttgaggaccccggtcga

SEQ ID NO: 6568 - DNA, 35 bp, Artificial Sequence
  Synthetic
gccgctgggtgacacagacaacaccccccgatgcc

SEQ ID NO: 6569 - DNA, 44 bp, Artificial Sequence
  Synthetic
tttcaggctttgcaaacacagtgtattagttgctctgtaactgg

SEQ ID NO: 6570 - DNA, 42 bp, Artificial Sequence
  Synthetic
atagggtggacggtgagcaaccaccacagtatgaaaccaccc

SEQ ID NO: 6571 - DNA, 41 bp, Artificial Sequence
  Synthetic
aacaacatgtttggactgggtagttttacaccctccgcaac

SEQ ID NO: 6572 - DNA, 40 bp, Artificial Sequence
  Synthetic
agaagtacgcctgctgcattatatgtcacttgcgtttccc

SEQ ID NO: 6573 - DNA, 50 bp, Artificial Sequence
  Synthetic
gtagacattataaacgagcagagcacacttctaaatgatatccattgtga

SEQ ID NO: 6574 - DNA, 40 bp, Artificial Sequence
  Synthetic
tttgggtggggttgtcatttcattttgcatcagctaacgg

SEQ ID NO: 6575 - DNA, 43 bp, Artificial Sequence
  Synthetic
atgtgttgttatttaaggcaagggaaataccaagcacaggcac

SEQ ID NO: 6576 - DNA, 46 bp, Artificial Sequence
  Synthetic
gctggaaaaaaaaaggctacactgacacattgtcttttcctctttg

SEQ ID NO: 6577 - DNA, 40 bp, Artificial Sequence
  Synthetic
aaacctactgaccacggacccgggtttcgttggtgcccag

SEQ ID NO: 6578 - DNA, 43 bp, Artificial Sequence
  Synthetic
accaggatatatgtcattgtttgcagtacccttaacgttccgc

SEQ ID NO: 6579 - DNA, 49 bp, Artificial Sequence
  Synthetic
tactgctactacgtgtacataacctcacaacaggatacatatatgcaat

SEQ ID NO: 6580 - DNA, 44 bp, Artificial Sequence
  Synthetic
ctcctactcctgtagtgccgaaataatacctcagttccatacac

SEQ ID NO: 6581 - DNA, 47 bp, Artificial Sequence
  Synthetic
aaatcgtatagttgtccccaaagtgcaaatttatttgggtcgggtag

SEQ ID NO: 6582 - DNA, 48 bp, Artificial Sequence
  Synthetic
gctgtttgatgttaatcctggtgagcaaccaataatacatagttgtgt

SEQ ID NO: 6583 - DNA, 44 bp, Artificial Sequence
  Synthetic
tatcagattatttcgaatggctgcattaaaacattgctctcggc

SEQ ID NO: 6584 - DNA, 41 bp, Artificial Sequence
  Synthetic
actggctacaacgtgcacaggttacaaaaagcagattgccc

SEQ ID NO: 6585 - DNA, 41 bp, Artificial Sequence
  Synthetic
ggtgatacctaccgctttttacattttctgcaggaggagga

SEQ ID NO: 6586 - DNA, 38 bp, Artificial Sequence
  Synthetic
cagtgaccatgccctgccttaacggcggccattttagg

SEQ ID NO: 6587 - DNA, 42 bp, Artificial Sequence
  Synthetic
ccattgtttggggcatatagttgttacactgctgttgccaaa

SEQ ID NO: 6588 - DNA, 42 bp, Artificial Sequence
  Synthetic
ataccacttctgtcactggctgtgttaaggaaatgcaagcac

SEQ ID NO: 6589 - DNA, 38 bp, Artificial Sequence
  Synthetic
tcctgaagaggaggagcgactgcattacaggtaccgca

SEQ ID NO: 6590 - DNA, 42 bp, Artificial Sequence
  Synthetic
aaaacgaaagtatctgacaagccctacagcttccagtctcgg

SEQ ID NO: 6591 - DNA, 45 bp, Artificial Sequence
  Synthetic
tgaagttatgtgccagcctcccgaccgtttataaaaatacaaagc

SEQ ID NO: 6592 - DNA, 45 bp, Artificial Sequence
  Synthetic
ggcagcatggataaataaatgttgctgtgcaataggtttccaatc

SEQ ID NO: 6593 - DNA, 44 bp, Artificial Sequence
  Synthetic
aaaagctggctattccgttgatgtgtgtatggaaaggctttagc

SEQ ID NO: 6594 - DNA, 41 bp, Artificial Sequence
  Synthetic
agaagaaccaggtcccctcagcatgtcctgttcccacctcc

SEQ ID NO: 6595 - DNA, 42 bp, Artificial Sequence
  Synthetic
attcctttggaaactttacctccaaggcctaacgactggaat

SEQ ID NO: 6596 - DNA, 42 bp, Artificial Sequence
  Synthetic
ctgacccgattcctcccagatttcaataactacagcatttgc

SEQ ID NO: 6597 - DNA, 45 bp, Artificial Sequence
  Synthetic
agcccaatttcgactattgttgaaagcatatctgaagtgtcatgt

SEQ ID NO: 6598 - DNA, 41 bp, Artificial Sequence
  Synthetic
aattgcctttcagatgacactgtctactggctttgcaggag

SEQ ID NO: 6599 - DNA, 41 bp, Artificial Sequence
  Synthetic
ggttgtgaaccagcgttaggtttaacctcatcactgcaagg

SEQ ID NO: 6600 - DNA, 40 bp, Artificial Sequence
  Synthetic
tttcagctgaattgtcccagtttttagcagccctgtttga

SEQ ID NO: 6601 - DNA, 40 bp, Artificial Sequence
  Synthetic
ttgcggaacagcattaacagaacaacttgtagctccttgt

SEQ ID NO: 6602 - DNA, 40 bp, Artificial Sequence
  Synthetic
gcttgcctgcagtgttggaaaccgcatcaggctgatccag

SEQ ID NO: 6603 - DNA, 39 bp, Artificial Sequence
  Synthetic
ctccaggagcttctgttgggccttcaccgtcggccatag

SEQ ID NO: 6604 - DNA, 41 bp, Artificial Sequence
  Synthetic
acagacagcaggaggcacaagggccaacggactagctagat

SEQ ID NO: 6605 - DNA, 38 bp, Artificial Sequence
  Synthetic
gcacagggggggtacaggaagtgctgtaactgcacccg

SEQ ID NO: 6606 - DNA, 44 bp, Artificial Sequence
  Synthetic
cagcaacactgtcaatatgcacaatctcactagcattaggacca

SEQ ID NO: 6607 - DNA, 45 bp, Artificial Sequence
  Synthetic
agaaacaccagaatggattgtaagaactgaaactggcattcttct

SEQ ID NO: 6608 - DNA, 42 bp, Artificial Sequence
  Synthetic
ggcacaaatgacaatgtcagaatgaccgtactatgggtctcc

SEQ ID NO: 6609 - DNA, 43 bp, Artificial Sequence
  Synthetic
gctgcagccattatgtgatgcggtatctatatagctccagcac

SEQ ID NO: 6610 - DNA, 41 bp, Artificial Sequence
  Synthetic
tgatgcaaactggaaatgcttctattgtcctcctggtcgtc

SEQ ID NO: 6611 - DNA, 38 bp, Artificial Sequence
  Synthetic
acatggaccaaggtgtctgggttacacgtgtcccttcg

SEQ ID NO: 6612 - DNA, 42 bp, Artificial Sequence
  Synthetic
acagaagacaggatccagcggcgctgtcagggttacactggt

SEQ ID NO: 6613 - DNA, 39 bp, Artificial Sequence
  Synthetic
gatggtcaacgtgcagtaacaatcatgccacagggttac

SEQ ID NO: 6614 - DNA, 46 bp, Artificial Sequence
  Synthetic
tggcgttactgcttttcttattgtgtatgtatatgatcaggaggcc

SEQ ID NO: 6615 - DNA, 43 bp, Artificial Sequence
  Synthetic
atcctgtagtactgtggacacctaagacacacgaaaagcaaca

SEQ ID NO: 6616 - DNA, 35 bp, Artificial Sequence
  Synthetic
attgggacccgaccccccataacgacaggggggcg

SEQ ID NO: 6617 - DNA, 45 bp, Artificial Sequence
  Synthetic
acagaggaaaccatactatttgagcatccaaaaagtcaggatccg

SEQ ID NO: 6618 - DNA, 43 bp, Artificial Sequence
  Synthetic
gttcccaaggtgtctggatatcaacttattgggatcaggcaaa

SEQ ID NO: 6619 - DNA, 45 bp, Artificial Sequence
  Synthetic
acccagctatttattatagggtgcaagacatattgcatggggtac

SEQ ID NO: 6620 - DNA, 42 bp, Artificial Sequence
  Synthetic
tctgtttacgtagggaacagatgtgaattgcgtcgcccatag

SEQ ID NO: 6621 - DNA, 48 bp, Artificial Sequence
  Synthetic
actacacgtagcaccaatatgactgcatgtactctttaaaattggaag

SEQ ID NO: 6622 - DNA, 46 bp, Artificial Sequence
  Synthetic
gtactgttgtgtatgtatgggtggcacacaaacatgcataaggaaa

SEQ ID NO: 6623 - DNA, 39 bp, Artificial Sequence
  Synthetic
ccggtttcggtcgtgcacaagcgcgaaacagctaacagt

SEQ ID NO: 6624 - DNA, 40 bp, Artificial Sequence
  Synthetic
tgagtgtcgtacagcctccaggtactcaccggttccgcag

SEQ ID NO: 6625 - DNA, 38 bp, Artificial Sequence
  Synthetic
gcgcgcgacaaggaagactttttagggatgggctggcg

SEQ ID NO: 6626 - DNA, 39 bp, Artificial Sequence
  Synthetic
cgccagagctctcgcgcatcgggtaagttccctgttgca

SEQ ID NO: 6627 - DNA, 37 bp, Artificial Sequence
  Synthetic
tctcaccgaatgtggccgtgcgtcgatgtgcgtccgc

SEQ ID NO: 6628 - DNA, 40 bp, Artificial Sequence
  Synthetic
cgtcatgttcggcttggcctggccaacagaaggatgacaa

SEQ ID NO: 6629 - DNA, 40 bp, Artificial Sequence
  Synthetic
ggatggggcgccttgcaatatgccagcaatagggtctcat

SEQ ID NO: 6630 - DNA, 40 bp, Artificial Sequence
  Synthetic
tgacttcaacgccagcacggccgcatttgaggtaagtggt

SEQ ID NO: 6631 - DNA, 42 bp, Artificial Sequence
  Synthetic
ccttgctcttactcggacctgcacgatgttttggtggaggtg

SEQ ID NO: 6632 - DNA, 41 bp, Artificial Sequence
  Synthetic
attccctcactggcctgtggtgcacagatgcgtcataagca

SEQ ID NO: 6633 - DNA, 41 bp, Artificial Sequence
  Synthetic
ctaaaaggtgctttgacgcgcggcacatcctcagtagagcg

SEQ ID NO: 6634 - DNA, 40 bp, Artificial Sequence
  Synthetic
tggcccagctgatggctataccgtgtctgctgggcgtaag

SEQ ID NO: 6635 - DNA, 39 bp, Artificial Sequence
  Synthetic
tcacgcagatgtactccagtgccgtgcacggctccaaag

SEQ ID NO: 6636 - DNA, 41 bp, Artificial Sequence
  Synthetic
caggtcgggtacttgcatgcccagcatatgcgacaggaact

SEQ ID NO: 6637 - DNA, 42 bp, Artificial Sequence
  Synthetic
ctaccaccatccttggcatcgggcacagttagtctgacccca

SEQ ID NO: 6638 - DNA, 39 bp, Artificial Sequence
  Synthetic
caccgacgccctcatgacagtacgttgcagtcgatcacg

SEQ ID NO: 6639 - DNA, 40 bp, Artificial Sequence
  Synthetic
ccgtcaggctcagggcgtatctgcctcccaaaactcaaga

SEQ ID NO: 6640 - DNA, 40 bp, Artificial Sequence
  Synthetic
atacatcgccacctgcatgcaacctgccaagacccatgtg

SEQ ID NO: 6641 - DNA, 42 bp, Artificial Sequence
  Synthetic
ttctgggccaaacacatgtggatgttgatagtcctgcgaggt

SEQ ID NO: 6642 - DNA, 40 bp, Artificial Sequence
  Synthetic
tgtcgtcaacttgctgcctggacagaatggccgcgcagat

SEQ ID NO: 6643 - DNA, 38 bp, Artificial Sequence
  Synthetic
cgaaacccgcgccaaactttacctccgcgtactctgag

SEQ ID NO: 6644 - DNA, 35 bp, Artificial Sequence
  Synthetic
cgtttagcgcgggggtcatgccgatagctggctcg

SEQ ID NO: 6645 - DNA, 40 bp, Artificial Sequence
  Synthetic
cctgggcacggcctgattaccggttggtaatctggccttt

SEQ ID NO: 6646 - DNA, 40 bp, Artificial Sequence
  Synthetic
acctggagcctgagcaggtagaagaccaggaccccgagtc

SEQ ID NO: 6647 - DNA, 40 bp, Artificial Sequence
  Synthetic
cgcaaggctcctcaccatggagatcttgcagaatggggtg

SEQ ID NO: 6648 - DNA, 40 bp, Artificial Sequence
  Synthetic
tggattccagtattcccccgctggtccttcttttccgccc

SEQ ID NO: 6649 - DNA, 40 bp, Artificial Sequence
  Synthetic
aatcgcgcccacaatgctggggtcccctggctttctgaga

SEQ ID NO: 6650 - DNA, 40 bp, Artificial Sequence
  Synthetic
gggctgcctgggaaacagtttggatgatgtttcccagcca

SEQ ID NO: 6651 - DNA, 36 bp, Artificial Sequence
  Synthetic
ccacccctcagagcgtggaacgggagatgagggacg

SEQ ID NO: 6652 - DNA, 39 bp, Artificial Sequence
  Synthetic
cgcgattgatgcggatttgccgttccagcaccgttttgc

SEQ ID NO: 6653 - DNA, 40 bp, Artificial Sequence
  Synthetic
cgaggtgggcgtaacgcttgcaaagtccacgccaaaatgg

SEQ ID NO: 6654 - DNA, 39 bp, Artificial Sequence
  Synthetic
tcatgcccgggaagagtttgccggcttcgtcttcctgtc

SEQ ID NO: 6655 - DNA, 37 bp, Artificial Sequence
  Synthetic
gggcggacaatgccgtctgcgtcatgccgcctgaaac

SEQ ID NO: 6656 - DNA, 36 bp, Artificial Sequence
  Synthetic
cagcgtcagtccgaacgtcctcagtgccaccccgtc

SEQ ID NO: 6657 - DNA, 39 bp, Artificial Sequence
  Synthetic
gcgaaccgaaaacccaataccgagccccagtagcgttgg

SEQ ID NO: 6658 - DNA, 41 bp, Artificial Sequence
  Synthetic
gaccaatacatcggcggcatcgagtttggtgaagaagcgcg

SEQ ID NO: 6659 - DNA, 36 bp, Artificial Sequence
  Synthetic
gcaaaatcaccgtcgccgcctcgttggcgagtgcgg

SEQ ID NO: 6660 - DNA, 38 bp, Artificial Sequence
  Synthetic
gctcccaagccgaaacgtgatatcgcaagccgctttcg

SEQ ID NO: 6661 - DNA, 35 bp, Artificial Sequence
  Synthetic
gtgatgcggccgccgacttctatcgcgccgccaac

SEQ ID NO: 6662 - DNA, 37 bp, Artificial Sequence
  Synthetic
aaccgggaatcaggtcggtggcggtgtggcaggcgta

SEQ ID NO: 6663 - DNA, 35 bp, Artificial Sequence
  Synthetic
ggggtgtgcgtgccggaaattaccgccgaccgcac

SEQ ID NO: 6664 - DNA, 38 bp, Artificial Sequence
  Synthetic
ccgcccgcgacaatgtagttggcacgaacgcttggaag

SEQ ID NO: 6665 - DNA, 37 bp, Artificial Sequence
  Synthetic
gcgcttttgggcgaacagcgtaaggaagcgcgcgtgg

SEQ ID NO: 6666 - DNA, 36 bp, Artificial Sequence
  Synthetic
ggcagggaataccgcccgttacgtccgccagttcgc

SEQ ID NO: 6667 - DNA, 38 bp, Artificial Sequence
  Synthetic
ccgccctgcaagccgatgtcgtgcgtgatttgtccgaa

SEQ ID NO: 6668 - DNA, 42 bp, Artificial Sequence
  Synthetic
gcttcctgccatttgctgtcgggctggagaatgtacaaggcc

SEQ ID NO: 6669 - DNA, 36 bp, Artificial Sequence
  Synthetic
agtttcaccgccaccaacgcgcaaggactggcaccg

SEQ ID NO: 6670 - DNA, 39 bp, Artificial Sequence
  Synthetic
ttcgtcccaagccggacaccaaaaaccatgtgtcgtggc

SEQ ID NO: 6671 - DNA, 38 bp, Artificial Sequence
  Synthetic
ccgcgtttcgggcaactcggaatggtttgccgaacgcg

SEQ ID NO: 6672 - DNA, 36 bp, Artificial Sequence
  Synthetic
ggtacgcgccgtggatgacgacatcgggctgttgtc

SEQ ID NO: 6673 - DNA, 37 bp, Artificial Sequence
  Synthetic
ccgctttgccgtggaacagttcgtcagcctgtgtccg

SEQ ID NO: 6674 - DNA, 38 bp, Artificial Sequence
  Synthetic
tgcaggtggaggtagcgcgcaaaccgaagatgccgtct

SEQ ID NO: 6675 - DNA, 36 bp, Artificial Sequence
  Synthetic
tagagcagttcggcgtgtgctttctcgcgctcgccc

SEQ ID NO: 6676 - DNA, 42 bp, Artificial Sequence
  Synthetic
gccgccctaccgacttgataatgcgaagtgttttatgcgtgg

SEQ ID NO: 6677 - DNA, 37 bp, Artificial Sequence
  Synthetic
cgcgtgtcgcccaaaatgacttgcctccgccgaactc

SEQ ID NO: 6678 - DNA, 40 bp, Artificial Sequence
  Synthetic
ccaaaaacgcctcgaatcgtggatatgcggcgaaacgtgc

SEQ ID NO: 6679 - DNA, 39 bp, Artificial Sequence
  Synthetic
ttatgccgtctgtcgaacggcggcagtcatcgtcgcttc

SEQ ID NO: 6680 - DNA, 37 bp, Artificial Sequence
  Synthetic
ggcggagagtgcaccgtgttcaacgtcaacgatgccg

SEQ ID NO: 6681 - DNA, 40 bp, Artificial Sequence
  Synthetic
ttcgggccgatgaaggtaaagctgccgaaaacgccgattt

SEQ ID NO: 6682 - DNA, 40 bp, Artificial Sequence
  Synthetic
gattcgtcggcgagtttgacgtcaccgttgccgtgcattc

SEQ ID NO: 6683 - DNA, 37 bp, Artificial Sequence
  Synthetic
cgccggtggctttggagacgtgttggaagtgaacccg

SEQ ID NO: 6684 - DNA, 39 bp, Artificial Sequence
  Synthetic
acgtcttccaatgtcagcggcgtgtccaccgacttcgac

SEQ ID NO: 6685 - DNA, 39 bp, Artificial Sequence
  Synthetic
cgggtgtcgatgtcggcgaaagcctgcacgactatttgg

SEQ ID NO: 6686 - DNA, 36 bp, Artificial Sequence
  Synthetic
cgatgtgcgcgacagggaacagcgttcagacggcat

SEQ ID NO: 6687 - DNA, 35 bp, Artificial Sequence
  Synthetic
ggcgttgcccagttgcaggtgtccggactcgccac

SEQ ID NO: 6688 - DNA, 37 bp, Artificial Sequence
  Synthetic
cctgcgaaatgctggtcggattccgctgttgccggta

SEQ ID NO: 6689 - DNA, 40 bp, Artificial Sequence
  Synthetic
cgctcccttgcctacgatgcagagtttgtgcagcatacgg

SEQ ID NO: 6690 - DNA, 36 bp, Artificial Sequence
  Synthetic
gaccccagcttcaaagccgccctacccagccggcaa

SEQ ID NO: 6691 - DNA, 38 bp, Artificial Sequence
  Synthetic
gttccgaccagtggggcaactttttggttcaggcggcg

SEQ ID NO: 6692 - DNA, 37 bp, Artificial Sequence
  Synthetic
atcagccccctgcgtaccaaaacccaggcggcatcga

SEQ ID NO: 6693 - DNA, 40 bp, Artificial Sequence
  Synthetic
tcagtggtttgtcggcatggacttgatggctttgtcgcgc

SEQ ID NO: 6694 - DNA, 37 bp, Artificial Sequence
  Synthetic
ccgccgccatcgagcctttcttccgcctgcaaggacg

SEQ ID NO: 6695 - DNA, 38 bp, Artificial Sequence
  Synthetic
catggcagggcaggccgaaggaaaaatacggcggtccc

SEQ ID NO: 6696 - DNA, 39 bp, Artificial Sequence
  Synthetic
tcttcgaggctgacgaaggcgaattcgttaccgccgtgc

SEQ ID NO: 6697 - DNA, 38 bp, Artificial Sequence
  Synthetic
tcgatgctgtcgaacgcgccaacacatgaaccgccgca

SEQ ID NO: 6698 - DNA, 39 bp, Artificial Sequence
  Synthetic
gattcgtccgcctgatacacggggcggcgtgttgattgc

SEQ ID NO: 6699 - DNA, 35 bp, Artificial Sequence
  Synthetic
tgcggcgaggcgtgcattccgttgcgcatcgtagc

SEQ ID NO: 6700 - DNA, 37 bp, Artificial Sequence
  Synthetic
cgtccaaacgcgccatttcgcttcgcgcccgaccaac

SEQ ID NO: 6701 - DNA, 35 bp, Artificial Sequence
  Synthetic
tcgtgccacggcagcatgcgcaaaaccggccatcc

SEQ ID NO: 6702 - DNA, 38 bp, Artificial Sequence
  Synthetic
cgccacggcgtgttgtcgactatcaaggcggctgctcc

SEQ ID NO: 6703 - DNA, 40 bp, Artificial Sequence
  Synthetic
tgtttggtccgtcgggttcgggaacacgcccccttcagac

SEQ ID NO: 6704 - DNA, 37 bp, Artificial Sequence
  Synthetic
aacaaccagaatgaggcggcattgccgtaccgtccgg

SEQ ID NO: 6705 - DNA, 38 bp, Artificial Sequence
  Synthetic
gcggcaacatgcacgatacgacctcctgctgccggaaa

SEQ ID NO: 6706 - DNA, 37 bp, Artificial Sequence
  Synthetic
ccgtcagcggcaacagcacttttcgtccgcgcaactc

SEQ ID NO: 6707 - DNA, 38 bp, Artificial Sequence
  Synthetic
gccgccgtctgcatcagcatgctgtcgtggtatttccc

SEQ ID NO: 6708 - DNA, 39 bp, Artificial Sequence
  Synthetic
cggcacgcaaaacctgtacgcggcagcagcttttggatt

SEQ ID NO: 6709 - DNA, 40 bp, Artificial Sequence
  Synthetic
cgttgtgcattgaagggcgaaccgaactcaaaatgcccgc

SEQ ID NO: 6710 - DNA, 35 bp, Artificial Sequence
  Synthetic
cggcgacgggggaatttgcaaggcaaaggcgtgcg

SEQ ID NO: 6711 - DNA, 39 bp, Artificial Sequence
  Synthetic
cgccgtaacccatttccgcttcgcgcatggctcaacctc

SEQ ID NO: 6712 - DNA, 40 bp, Artificial Sequence
  Synthetic
caacacgctgttgggtatgggaccggtaaagcctgctacg

SEQ ID NO: 6713 - DNA, 35 bp, Artificial Sequence
  Synthetic
tttgccgtatccgggcggtaacgcttcgggcctgc

SEQ ID NO: 6714 - DNA, 36 bp, Artificial Sequence
  Synthetic
ggtggaacggaagctgctggatcacgccgcacatcg

SEQ ID NO: 6715 - DNA, 41 bp, Artificial Sequence
  Synthetic
ccgctgtcggcttcaaaatggtgatgctcgaccacagcctg

SEQ ID NO: 6716 - DNA, 36 bp, Artificial Sequence
  Synthetic
gtttgcgcgtcagctcgacaccgtacccgcgttacc

SEQ ID NO: 6717 - DNA, 39 bp, Artificial Sequence
  Synthetic
ttttccggcaggagcttgtcgcccaacgcatcgaagacg

SEQ ID NO: 6718 - DNA, 40 bp, Artificial Sequence
  Synthetic
gcgtgccgcagattttcatcgaaggcggtagaggtcggta

SEQ ID NO: 6719 - DNA, 42 bp, Artificial Sequence
  Synthetic
aagcctgcgccttttgcattcgcgtgccgtctgaaagttgat

SEQ ID NO: 6720 - DNA, 37 bp, Artificial Sequence
  Synthetic
aagtcggcgtagatgtgcccaaagcccatgcgctcgg

SEQ ID NO: 6721 - DNA, 42 bp, Artificial Sequence
  Synthetic
aaccctgaaatcgtcgaagcgcacccaaataaccttccctgc

SEQ ID NO: 6722 - DNA, 36 bp, Artificial Sequence
  Synthetic
gaaccggcgggcaggatgtaaaccgtcctgcgcgac

SEQ ID NO: 6723 - DNA, 39 bp, Artificial Sequence
  Synthetic
ccggcgatggtctgcctgaggcgacaacttcaaagccta

SEQ ID NO: 6724 - DNA, 39 bp, Artificial Sequence
  Synthetic
aaaggtcgatgacgcgcacgggcatcgccatgaaagacg

SEQ ID NO: 6725 - DNA, 38 bp, Artificial Sequence
  Synthetic
aatcggcaactgcggttcccccagatgtcgaagtcgcc

SEQ ID NO: 6726 - DNA, 39 bp, Artificial Sequence
  Synthetic
gctttcagacgacgtcaggttcccttttccaacgtatcc

SEQ ID NO: 6727 - DNA, 36 bp, Artificial Sequence
  Synthetic
gcaaggtcggcggcgctttattaccaatgcgccgcc

SEQ ID NO: 6728 - DNA, 39 bp, Artificial Sequence
  Synthetic
catgttgcgcgggatttctggtccattgctgctgccaaa

SEQ ID NO: 6729 - DNA, 35 bp, Artificial Sequence
  Synthetic
gggcatgaccgccgccatatcgaagccgccgacct

SEQ ID NO: 6730 - DNA, 40 bp, Artificial Sequence
  Synthetic
aacgtggtcgatgtggttgcagcccatctccgacacgacc

SEQ ID NO: 6731 - DNA, 36 bp, Artificial Sequence
  Synthetic
atgccgaacgtcccccagctcttcctgctcgccagc

SEQ ID NO: 6732 - DNA, 39 bp, Artificial Sequence
  Synthetic
aggcagtggagtcgaggatgtgccccgttaccgacaagt

SEQ ID NO: 6733 - DNA, 38 bp, Artificial Sequence
  Synthetic
gggttgccgccgaccaaaactgctgtctttaggcatcg

SEQ ID NO: 6734 - DNA, 39 bp, Artificial Sequence
  Synthetic
ttgatgccgacgacctgtccatcaatccgggcaattccg

SEQ ID NO: 6735 - DNA, 40 bp, Artificial Sequence
  Synthetic
gcttcgccgtcgccttgtttaaatcgccgttctgctttcg

SEQ ID NO: 6736 - DNA, 38 bp, Artificial Sequence
  Synthetic
ttcgcgcccaaccgttatttggtcgcgacggcaagcag

SEQ ID NO: 6737 - DNA, 37 bp, Artificial Sequence
  Synthetic
aaaaccctgcaccgcagtgatccggcaatctgcacgg

SEQ ID NO: 6738 - DNA, 35 bp, Artificial Sequence
  Synthetic
gtagcgcgctgatgcaggagccttgaccaccgcct

SEQ ID NO: 6739 - DNA, 38 bp, Artificial Sequence
  Synthetic
cgcaaggcaggccgtggttcggtaaaacgccgtgttcg

SEQ ID NO: 6740 - DNA, 39 bp, Artificial Sequence
  Synthetic
gggttcggacggcatctgtctgttttcgacattcgccgg

SEQ ID NO: 6741 - DNA, 38 bp, Artificial Sequence
  Synthetic
agccataagctgcccgtttcggctttgccgaccaccgc

SEQ ID NO: 6742 - DNA, 39 bp, Artificial Sequence
  Synthetic
gggtatggacggcagcaaggtgcggatttccttcagcct

SEQ ID NO: 6743 - DNA, 36 bp, Artificial Sequence
  Synthetic
tgctcctgctcgcccacgatagagcgtttgggcggc

SEQ ID NO: 6744 - DNA, 35 bp, Artificial Sequence
  Synthetic
agacggatgcgagggcgtacgacctgctccttgcc

SEQ ID NO: 6745 - DNA, 39 bp, Artificial Sequence
  Synthetic
gggtaccttccacgacgcgtaaatccccgaattcgcacc

SEQ ID NO: 6746 - DNA, 35 bp, Artificial Sequence
  Synthetic
ctgcgggcagttcgttggtttcgtccgcagcctcg

SEQ ID NO: 6747 - DNA, 39 bp, Artificial Sequence
  Synthetic
tttgggcgtgtcgtgtgttccacggcggacaatacagca

SEQ ID NO: 6748 - DNA, 38 bp, Artificial Sequence
  Synthetic
gcaaggtggcggctgtcgacaacggacaaaccactgcc

SEQ ID NO: 6749 - DNA, 36 bp, Artificial Sequence
  Synthetic
gccgctgcaagggcttttttgattgcaccgccgcag

SEQ ID NO: 6750 - DNA, 40 bp, Artificial Sequence
  Synthetic
tccgttgcggatgtggtggggcacgcaccaaaaaacctca

SEQ ID NO: 6751 - DNA, 41 bp, Artificial Sequence
  Synthetic
atgaggaagttgcagtgtcgggcctcacgacagaaaccgac

SEQ ID NO: 6752 - DNA, 37 bp, Artificial Sequence
  Synthetic
tgtgcaggctgtgtccgaagcgcatcccggcatcagc

SEQ ID NO: 6753 - DNA, 40 bp, Artificial Sequence
  Synthetic
ggtgcgttgttctgttcgccactcttggcacgcatcaatg

SEQ ID NO: 6754 - DNA, 38 bp, Artificial Sequence
  Synthetic
ggaggcggtcagtatgccgaagaggcttcagacggcat

SEQ ID NO: 6755 - DNA, 42 bp, Artificial Sequence
  Synthetic
tttccgcaggttcggctgtactatacttccgccgaaaccctt

SEQ ID NO: 6756 - DNA, 38 bp, Artificial Sequence
  Synthetic
aggctgtgttcgagttcggggttcaaagccgtcctgcc

SEQ ID NO: 6757 - DNA, 39 bp, Artificial Sequence
  Synthetic
gggaagcggccgatgtgttttgaacaccttcttccggca

SEQ ID NO: 6758 - DNA, 40 bp, Artificial Sequence
  Synthetic
gcttttcgcgtgatgccccgatggtcatgaaacgcaaagc

SEQ ID NO: 6759 - DNA, 38 bp, Artificial Sequence
  Synthetic
ggtgcaggcggggtggaaattgcgcctttttttgggca

SEQ ID NO: 6760 - DNA, 42 bp, Artificial Sequence
  Synthetic
ttgatggctttaggttttgtcgttaaaacgccattcgaaacg

SEQ ID NO: 6761 - DNA, 38 bp, Artificial Sequence
  Synthetic
caggttgcggctgccttcttctacatcctgcaagcccg

SEQ ID NO: 6762 - DNA, 39 bp, Artificial Sequence
  Synthetic
caggtgtcgccgctgacgaactcgttcccaaactcggat

SEQ ID NO: 6763 - DNA, 38 bp, Artificial Sequence
  Synthetic
agcgtgtgttttcggggttgacggttcgcaagccatcg

SEQ ID NO: 6764 - DNA, 39 bp, Artificial Sequence
  Synthetic
ccgacggtcagcgggatgacaccatcctgcacatcatcg

SEQ ID NO: 6765 - DNA, 36 bp, Artificial Sequence
  Synthetic
acgccatgtttttcggcggctcccgtcatcgcctcc

SEQ ID NO: 6766 - DNA, 37 bp, Artificial Sequence
  Synthetic
tggcactgcgttggacggggtcttccccgacctgaac

SEQ ID NO: 6767 - DNA, 34 bp, Artificial Sequence
  Synthetic
agcgcgtcggcatcggtatcccttgacgcggcag

SEQ ID NO: 6768 - DNA, 39 bp, Artificial Sequence
  Synthetic
aaccagtcgtcgcttttgcctttccaagccgttgacgca

SEQ ID NO: 6769 - DNA, 39 bp, Artificial Sequence
  Synthetic
ctcttgcgccgtcctgcctaccgtttaccgcaatatcgc

SEQ ID NO: 6770 - DNA, 36 bp, Artificial Sequence
  Synthetic
agcagggtggcggtcaacggcattaccgccgcattc

SEQ ID NO: 6771 - DNA, 37 bp, Artificial Sequence
  Synthetic
cgcctttgccgcgtgtttcagccaacctcctagagcc

SEQ ID NO: 6772 - DNA, 39 bp, Artificial Sequence
  Synthetic
gtttgcgacagtcggccatgatgctcgcctacgtcgaaa

SEQ ID NO: 6773 - DNA, 42 bp, Artificial Sequence
  Synthetic
ttcgacaatgccggtaatgcgttcatacggcatcgtcgaaac

SEQ ID NO: 6774 - DNA, 37 bp, Artificial Sequence
  Synthetic
gacgtgttcctcgggttgcagacgtcttccgggccga

SEQ ID NO: 6775 - DNA, 38 bp, Artificial Sequence
  Synthetic
agccttcaacggcactgcacgacaatttctcctgccgc

SEQ ID NO: 6776 - DNA, 40 bp, Artificial Sequence
  Synthetic
ccggcaaaatgcaggcaggcaactctggttcggctacacc

SEQ ID NO: 6777 - DNA, 36 bp, Artificial Sequence
  Synthetic
acgatgatgcccatcccgcgccccctccgtcaactt

SEQ ID NO: 6778 - DNA, 36 bp, Artificial Sequence
  Synthetic
ggagagggcggcgggtatcaacgtcctctcccgcct

SEQ ID NO: 6779 - DNA, 42 bp, Artificial Sequence
  Synthetic
tcgaaacagccttggatgtcgcttcccacttcacaacacccg

SEQ ID NO: 6780 - DNA, 38 bp, Artificial Sequence
  Synthetic
ttttggacacgctgccggaaccaagcccaagccctaat

SEQ ID NO: 6781 - DNA, 39 bp, Artificial Sequence
  Synthetic
gaacggattcggtttgcttggctcgggcatcagcaggac

SEQ ID NO: 6782 - DNA, 37 bp, Artificial Sequence
  Synthetic
ggtatgctgggcgcgtcgatcaccgacctcctcaacc

SEQ ID NO: 6783 - DNA, 41 bp, Artificial Sequence
  Synthetic
aagccacttcgataaaggcggccattcgcacaaagcatggg

SEQ ID NO: 6784 - DNA, 38 bp, Artificial Sequence
  Synthetic
tcggcaatctggaaatggtcgttttccaaccgctgccg

SEQ ID NO: 6785 - DNA, 36 bp, Artificial Sequence
  Synthetic
cacttctcccgcccccgaaatcatgcggcgacatgg

SEQ ID NO: 6786 - DNA, 38 bp, Artificial Sequence
  Synthetic
accgcatccgtgccgtattctttccctgatcgtgctgc

SEQ ID NO: 6787 - DNA, 34 bp, Artificial Sequence
  Synthetic
acaggcgcgcgagaaagacaaacgccgcgcacac

SEQ ID NO: 6788 - DNA, 34 bp, Artificial Sequence
  Synthetic
aaacaggtgcgccgacggcagcaacgccctgcct

SEQ ID NO: 6789 - DNA, 35 bp, Artificial Sequence
  Synthetic
tcctgtggcacggctaccctatccacaccggcggc

SEQ ID NO: 6790 - DNA, 35 bp, Artificial Sequence
  Synthetic
cgccgtgcggttgccgatactcctgcatacgcgcg

SEQ ID NO: 6791 - DNA, 34 bp, Artificial Sequence
  Synthetic
cccgaaggcagcgcgtttttcgggcgtggcttgg

SEQ ID NO: 6792 - DNA, 35 bp, Artificial Sequence
  Synthetic
agccgcccgcctcgttttggtgttgcggggtcacg

SEQ ID NO: 6793 - DNA, 42 bp, Artificial Sequence
  Synthetic
aggcgcacaaattcttcctcgggcgttttctttggcggattt

SEQ ID NO: 6794 - DNA, 35 bp, Artificial Sequence
  Synthetic
gcgatgtttgccgccgtcgcgcaccaccttttccg

SEQ ID NO: 6795 - DNA, 41 bp, Artificial Sequence
  Synthetic
ggtggttttcgtcgtggaggcgttgtttcaacacgacgcgg

SEQ ID NO: 6796 - DNA, 35 bp, Artificial Sequence
  Synthetic
ccggtgatgcggacggcttagccgtgggtgcttgc

SEQ ID NO: 6797 - DNA, 40 bp, Artificial Sequence
  Synthetic
tcgctgtcggtttgcgaaccttgccttccgtgatccttac

SEQ ID NO: 6798 - DNA, 38 bp, Artificial Sequence
  Synthetic
cgttttcggcggcggatttcgcaacggaaagccaaacg

SEQ ID NO: 6799 - DNA, 39 bp, Artificial Sequence
  Synthetic
gtctgtcgtcgaggcattccacggcgcataccagctttc

SEQ ID NO: 6800 - DNA, 40 bp, Artificial Sequence
  Synthetic
acgaaaacggccaagtcttgggcgatgccggggtaatcca

SEQ ID NO: 6801 - DNA, 44 bp, Artificial Sequence
  Synthetic
cctgttaacaagaaacggttttgccataacggggcattaaacct

SEQ ID NO: 6802 - DNA, 39 bp, Artificial Sequence
  Synthetic
cgactaccgttgctatgcgttccaacgtaccgatgattg

SEQ ID NO: 6803 - DNA, 35 bp, Artificial Sequence
  Synthetic
aattccgcgcgcgggcatgcaaccaccatcagccc

SEQ ID NO: 6804 - DNA, 35 bp, Artificial Sequence
  Synthetic
gccaaccatccgcttgccggtgtcgccgcacggat

SEQ ID NO: 6805 - DNA, 39 bp, Artificial Sequence
  Synthetic
gcactgtttgccgagcgcggcttgtcgatttcctgacgt

SEQ ID NO: 6806 - DNA, 39 bp, Artificial Sequence
  Synthetic
tgaagggcgatgtcccgcgttcttcgccttcttcctcca

SEQ ID NO: 6807 - DNA, 40 bp, Artificial Sequence
  Synthetic
ggctttggggcgacaaacagacggcggacgacggaaatcc

SEQ ID NO: 6808 - DNA, 37 bp, Artificial Sequence
  Synthetic
gccagcggctttccacaatgctgcaaaacgccttggc

SEQ ID NO: 6809 - DNA, 36 bp, Artificial Sequence
  Synthetic
aacgacgacgcgcaggtgggccggataaagggcgac

SEQ ID NO: 6810 - DNA, 38 bp, Artificial Sequence
  Synthetic
gtttgcccgaacgtgcggtccgcctttctcggtgtctg

SEQ ID NO: 6811 - DNA, 39 bp, Artificial Sequence
  Synthetic
gcagggcagtgtgtatccagtcgcctacctgttcggtct

SEQ ID NO: 6812 - DNA, 41 bp, Artificial Sequence
  Synthetic
aaacagtcatgccgatgccgaacaatacagcctgatgacgc

SEQ ID NO: 6813 - DNA, 41 bp, Artificial Sequence
  Synthetic
acgcatgatatttggctggcggggcaaccactttaaacgcc

SEQ ID NO: 6814 - DNA, 38 bp, Artificial Sequence
  Synthetic
cgccgtacacgaggtcttccggcccgaacacaaaccgc

SEQ ID NO: 6815 - DNA, 43 bp, Artificial Sequence
  Synthetic
aaccgtttacaccggaagatgtcttgggcaatcaattctttca

SEQ ID NO: 6816 - DNA, 39 bp, Artificial Sequence
  Synthetic
atggtgatgatgattgcgcccaatcggagtaagcggaaa

SEQ ID NO: 6817 - DNA, 44 bp, Artificial Sequence
  Synthetic
agaagtaacaggccgtctgaaaacatcgttactccaaaaacgta

SEQ ID NO: 6818 - DNA, 38 bp, Artificial Sequence
  Synthetic
tcatcgtcgaagaaagcggctcaatgcgttgcgtccga

SEQ ID NO: 6819 - DNA, 37 bp, Artificial Sequence
  Synthetic
gtagggcggcgaggttggttcatctactgcaccggcg

SEQ ID NO: 6820 - DNA, 41 bp, Artificial Sequence
  Synthetic
tccgagtccgaagcatcttgtgtgtctgcctccccgataat

SEQ ID NO: 6821 - DNA, 42 bp, Artificial Sequence
  Synthetic
tcgctgctcatcaggctaaggtcgtcttgccataggtacggc

SEQ ID NO: 6822 - DNA, 40 bp, Artificial Sequence
  Synthetic
gttctttacgtttttgtggggcttaccaggcatccaaacg

SEQ ID NO: 6823 - DNA, 39 bp, Artificial Sequence
  Synthetic
aggcgtggatttccgttaccgtttgccgcattgcccgac

SEQ ID NO: 6824 - DNA, 46 bp, Artificial Sequence
  Synthetic
gcatttttcggtatcggtgtaacggcgttttcggtatatatgcaaa

SEQ ID NO: 6825 - DNA, 39 bp, Artificial Sequence
  Synthetic
ggcgtggcgatgattgccgcgaatccccaaaccgcatta

SEQ ID NO: 6826 - DNA, 41 bp, Artificial Sequence
  Synthetic
taagccaagccgttgcaaccggcatagtgcttgcattgagc

SEQ ID NO: 6827 - DNA, 39 bp, Artificial Sequence
  Synthetic
acgtctggctttccattcgggtcaattcccgaagctcgc

SEQ ID NO: 6828 - DNA, 39 bp, Artificial Sequence
  Synthetic
cctaccgtttttctgcttgcgtggcacaaacagttgtcg

SEQ ID NO: 6829 - DNA, 40 bp, Artificial Sequence
  Synthetic
gcgtattgtctgtgcgcggattctcctgcaaggcattcat

SEQ ID NO: 6830 - DNA, 41 bp, Artificial Sequence
  Synthetic
cgaaaacacagcttccgaaccgagggacggtgcttctatgg

SEQ ID NO: 6831 - DNA, 41 bp, Artificial Sequence
  Synthetic
gcggcgaagatgaatgccaactcgaaggcgtaacgaagttg

SEQ ID NO: 6832 - DNA, 41 bp, Artificial Sequence
  Synthetic
tgcactgaagccgagtattccgactgtgcggtttcgtcaaa

SEQ ID NO: 6833 - DNA, 38 bp, Artificial Sequence
  Synthetic
gaccccgaacacgccaaaatctgccgtgatactgccgc

SEQ ID NO: 6834 - DNA, 40 bp, Artificial Sequence
  Synthetic
aagcccaatgggagaaatcgtggatttgggctttcatcaa

SEQ ID NO: 6835 - DNA, 37 bp, Artificial Sequence
  Synthetic
acgcttcgaccgtccaatcccaccggtcggattgcgc

SEQ ID NO: 6836 - DNA, 38 bp, Artificial Sequence
  Synthetic
ggcaacggcgtaaatcagtgccgcgatggacgaagccg

SEQ ID NO: 6837 - DNA, 35 bp, Artificial Sequence
  Synthetic
gacggtttcgcggctgtctcgccgacaaccccctt

SEQ ID NO: 6838 - DNA, 39 bp, Artificial Sequence
  Synthetic
ccagcccgcgatcctgatacacgacagcatatgcgtcgc

SEQ ID NO: 6839 - DNA, 39 bp, Artificial Sequence
  Synthetic
aggagtggtaaccatgccgacaatccaacgcggcctgac

SEQ ID NO: 6840 - DNA, 38 bp, Artificial Sequence
  Synthetic
gacttgttcgggcagccccacgccctgcttgtaccgat

SEQ ID NO: 6841 - DNA, 42 bp, Artificial Sequence
  Synthetic
ggcggttttgattttggagccggcgctgttgattttccttgc

SEQ ID NO: 6842 - DNA, 39 bp, Artificial Sequence
  Synthetic
acggtttatctgcccgccgaccatcaatgcgacaaagcg

SEQ ID NO: 6843 - DNA, 37 bp, Artificial Sequence
  Synthetic
gaacgcaggctgccgagcagctcgaaggcgacctcat

SEQ ID NO: 6844 - DNA, 35 bp, Artificial Sequence
  Synthetic
ggtgttgttcggcggcaaggacgaaaccgccgcac

SEQ ID NO: 6845 - DNA, 38 bp, Artificial Sequence
  Synthetic
cggctgccgtgtcggtaaatcacaggcctaggttacct

SEQ ID NO: 6846 - DNA, 36 bp, Artificial Sequence
  Synthetic
agagcggcatatcgggatgcaaccccgtcgtcagcg

SEQ ID NO: 6847 - DNA, 39 bp, Artificial Sequence
  Synthetic
tcgtcggcgtgtttaagcgctacaacactttcggcctgc

SEQ ID NO: 6848 - DNA, 36 bp, Artificial Sequence
  Synthetic
tttgcccgccgtcgaacgccgcttctgcatcttccg

SEQ ID NO: 6849 - DNA, 40 bp, Artificial Sequence
  Synthetic
gttgtcgtttcccccgaagccggccttcgacgtttttcac

SEQ ID NO: 6850 - DNA, 34 bp, Artificial Sequence
  Synthetic
gcatcggccctgcctacgaagcaaatcggcggcg

SEQ ID NO: 6851 - DNA, 40 bp, Artificial Sequence
  Synthetic
cgcgcgtcatatggtcgagcgcatcgagaaacagctccct

SEQ ID NO: 6852 - DNA, 36 bp, Artificial Sequence
  Synthetic
atctggtgatgggccgcccacttcgcgcaatacggc

SEQ ID NO: 6853 - DNA, 40 bp, Artificial Sequence
  Synthetic
gcgcgaactcgaaaaaccgcggcgcaatacttggtcaaac

SEQ ID NO: 6854 - DNA, 39 bp, Artificial Sequence
  Synthetic
tggtggaaggcttcgaacatcgcaccgttgccgaaaccg

SEQ ID NO: 6855 - DNA, 37 bp, Artificial Sequence
  Synthetic
ggccgggtttcgaccgtgtgcgttgccgaaaacaccc

SEQ ID NO: 6856 - DNA, 39 bp, Artificial Sequence
  Synthetic
gcccaattggaaaagggcagcggattgacggcgaaccag

SEQ ID NO: 6857 - DNA, 37 bp, Artificial Sequence
  Synthetic
ccggcatccgcgccttgttcaaacggctgagccttgc

SEQ ID NO: 6858 - DNA, 38 bp, Artificial Sequence
  Synthetic
accgtccgaccatcgtgtttgctggagcgtcccgaacc

SEQ ID NO: 6859 - DNA, 41 bp, Artificial Sequence
  Synthetic
gacgagttccacgtcgttcgccacgcttttttgtgtttgcc

SEQ ID NO: 6860 - DNA, 36 bp, Artificial Sequence
  Synthetic
ggatgttgggcgcgggcattacggacgcggcgaaac

SEQ ID NO: 6861 - DNA, 37 bp, Artificial Sequence
  Synthetic
gcgtgtcgggcaggtaggttcacccaaatcggcttgg

SEQ ID NO: 6862 - DNA, 38 bp, Artificial Sequence
  Synthetic
gtctgtgcccacatcggtctgaccgcgcccctgaactt

SEQ ID NO: 6863 - DNA, 38 bp, Artificial Sequence
  Synthetic
cgggaacggctctggcaaccggcgacttcgggggattt

SEQ ID NO: 6864 - DNA, 35 bp, Artificial Sequence
  Synthetic
gacaaaggcgtgctggcggtctgccgcaaagccgc

SEQ ID NO: 6865 - DNA, 40 bp, Artificial Sequence
  Synthetic
atacgcttagggtgtctgatcgaaaccatacgcccaagac

SEQ ID NO: 6866 - DNA, 37 bp, Artificial Sequence
  Synthetic
aagggttcgtccaaaagcaggaaacgccagcgcatcg

SEQ ID NO: 6867 - DNA, 42 bp, Artificial Sequence
  Synthetic
aacgttgtgaaacggtttgcgcgaaggaattgtcgggcgaat

SEQ ID NO: 6868 - DNA, 38 bp, Artificial Sequence
  Synthetic
ggagttgccgcgttggaagttggctggtgaaacccctg

SEQ ID NO: 6869 - DNA, 44 bp, Artificial Sequence
  Synthetic
ttctgcggatgtttttctccgtaattaatccgcttatccttgat

SEQ ID NO: 6870 - DNA, 36 bp, Artificial Sequence
  Synthetic
ggacagccggttccggtcacaggaacgcgccgtcaa

SEQ ID NO: 6871 - DNA, 40 bp, Artificial Sequence
  Synthetic
tcatcttgttgctgatggcggaaccaagaaagcagcgacg

SEQ ID NO: 6872 - DNA, 39 bp, Artificial Sequence
  Synthetic
cggcaaccggcttcttcttccttgagcgccgagatttgg

SEQ ID NO: 6873 - DNA, 36 bp, Artificial Sequence
  Synthetic
ctgacggcgcggcattccttggcggagaacatcggc

SEQ ID NO: 6874 - DNA, 38 bp, Artificial Sequence
  Synthetic
tgcgagatgctgggaacggaaaccggtttccttgtccc

SEQ ID NO: 6875 - DNA, 41 bp, Artificial Sequence
  Synthetic
gcgtgaaaccaagacattcggcagccttttgtccaaaccgc

SEQ ID NO: 6876 - DNA, 38 bp, Artificial Sequence
  Synthetic
accgttattggcggatttggcgccttatacgccgccgc

SEQ ID NO: 6877 - DNA, 42 bp, Artificial Sequence
  Synthetic
ttggacaacgccctgaaggttgcctgtcgttgtgataggcaa

SEQ ID NO: 6878 - DNA, 38 bp, Artificial Sequence
  Synthetic
ggctgaaatcaggcggcgcgccaagcccaaatccgtct

SEQ ID NO: 6879 - DNA, 38 bp, Artificial Sequence
  Synthetic
tcgccgtcgccgtcagctagcagggaaacgtctctgcc

SEQ ID NO: 6880 - DNA, 39 bp, Artificial Sequence
  Synthetic
agggcaattcgacgatgttgatacaggcttgcagaactt

SEQ ID NO: 6881 - DNA, 38 bp, Artificial Sequence
  Synthetic
gaagcgaggtcaggcggcatccgggattcgaccgtgtt

SEQ ID NO: 6882 - DNA, 41 bp, Artificial Sequence
  Synthetic
agccgataatcaggcgtgttgccaggcattacgcgcaacaa

SEQ ID NO: 6883 - DNA, 35 bp, Artificial Sequence
  Synthetic
ggcgatggcggacggtatgcttgccggcaaccagc

SEQ ID NO: 6884 - DNA, 39 bp, Artificial Sequence
  Synthetic
gcacatttttcggggcgcatacgcctgtcttgactttcg

SEQ ID NO: 6885 - DNA, 36 bp, Artificial Sequence
  Synthetic
gtgattccggctgttcgcggtcagaaccggccgcac

SEQ ID NO: 6886 - DNA, 35 bp, Artificial Sequence
  Synthetic
tgccgaagcagaagccgaaaagcgataccggggcg

SEQ ID NO: 6887 - DNA, 37 bp, Artificial Sequence
  Synthetic
gcctcctggccgccgattaacacgatgcggtctttgc

SEQ ID NO: 6888 - DNA, 37 bp, Artificial Sequence
  Synthetic
taaggcttcgctgcgccagatatcgcggcggtttcag

SEQ ID NO: 6889 - DNA, 37 bp, Artificial Sequence
  Synthetic
agcaggaagccgcacaagccaatcaccgcgccgaaac

SEQ ID NO: 6890 - DNA, 34 bp, Artificial Sequence
  Synthetic
cggcgcgcgggtcaaaatttcaccgcaccgacgg

SEQ ID NO: 6891 - DNA, 40 bp, Artificial Sequence
  Synthetic
gctgcatgaggacgctctatgacgcccgtttaccgtgaat

SEQ ID NO: 6892 - DNA, 36 bp, Artificial Sequence
  Synthetic
gcaggacggtcaaggcacacgggtagggcaggcgaa

SEQ ID NO: 6893 - DNA, 38 bp, Artificial Sequence
  Synthetic
tgctgacattgtgctacgtcgacgcccttcagttcggc

SEQ ID NO: 6894 - DNA, 39 bp, Artificial Sequence
  Synthetic
aagcatcaacggcttggaggcccgccactttgccgtttg

SEQ ID NO: 6895 - DNA, 38 bp, Artificial Sequence
  Synthetic
tggtggacacgcagaaaaaccgccgccttgccgttgac

SEQ ID NO: 6896 - DNA, 37 bp, Artificial Sequence
  Synthetic
cgccgccctgccttgtgaagcttacaaccgcgcaacc

SEQ ID NO: 6897 - DNA, 40 bp, Artificial Sequence
  Synthetic
acatcgggcatttcttcccagctgtccgaccttttggcgg

SEQ ID NO: 6898 - DNA, 39 bp, Artificial Sequence
  Synthetic
atacggctgcatcgcggtctgccgacaacgaagaaaacg

SEQ ID NO: 6899 - DNA, 35 bp, Artificial Sequence
  Synthetic
cggaacgcctcaaagccgccggcggacgatttgcg

SEQ ID NO: 6900 - DNA, 38 bp, Artificial Sequence
  Synthetic
gtcaaatcgtggtttgacgggcacaacgacggccagcc

SEQ ID NO: 6901 - DNA, 36 bp, Artificial Sequence
  Synthetic
aaaagccgggcgcaaatcagtcgggtctttggccgc

SEQ ID NO: 6902 - DNA, 39 bp, Artificial Sequence
  Synthetic
ccaaatgggcgaattggggcgcgcgtttgccctcgttct

SEQ ID NO: 6903 - DNA, 34 bp, Artificial Sequence
  Synthetic
gcggcggcggttctcaaaatgtcccagccgcctg

SEQ ID NO: 6904 - DNA, 34 bp, Artificial Sequence
  Synthetic
gcgcggcacttcgaccaatccccctgcccggttt

SEQ ID NO: 6905 - DNA, 35 bp, Artificial Sequence
  Synthetic
atgcgcgcggatgtttggcgcctggcgggttttgc

SEQ ID NO: 6906 - DNA, 36 bp, Artificial Sequence
  Synthetic
attgtccgaccatacgcccgtgctcagcacggggac

SEQ ID NO: 6907 - DNA, 44 bp, Artificial Sequence
  Synthetic
gagttcctgttgtcgctatttgcattttcaaatggtagggaagg

SEQ ID NO: 6908 - DNA, 44 bp, Artificial Sequence
  Synthetic
gcgaagagcggaaaatcaaacaccttgatttctttggaaatctc

SEQ ID NO: 6909 - DNA, 40 bp, Artificial Sequence
  Synthetic
tcccgggtagcagccttttttgcgcccaaatgctcaacca

SEQ ID NO: 6910 - DNA, 40 bp, Artificial Sequence
  Synthetic
aaatgccccgatggtgcaggtttacctccgaatgcgtctc

SEQ ID NO: 6911 - DNA, 40 bp, Artificial Sequence
  Synthetic
ctgttcggcagccgtttcacccgggcggcttgattttcct

SEQ ID NO: 6912 - DNA, 37 bp, Artificial Sequence
  Synthetic
gcgcgatgtccatccgcagccgaatttctgcccttcg

SEQ ID NO: 6913 - DNA, 35 bp, Artificial Sequence
  Synthetic
cccgccccgatcccttctatgctcgggcggtatcc

SEQ ID NO: 6914 - DNA, 35 bp, Artificial Sequence
  Synthetic
atttggccgatgcgctgcaaactgttccccgccgc

SEQ ID NO: 6915 - DNA, 40 bp, Artificial Sequence
  Synthetic
gttggcgatgacttcgttggtgtccgacgtgtatcagggc

SEQ ID NO: 6916 - DNA, 40 bp, Artificial Sequence
  Synthetic
cgcattaatgccgtttatgccagagaccgacaaaaatgcc

SEQ ID NO: 6917 - DNA, 41 bp, Artificial Sequence
  Synthetic
tggttttgccgatgtctgccggatcggtgaagtctgccttg

SEQ ID NO: 6918 - DNA, 35 bp, Artificial Sequence
  Synthetic
gcagtaccgcccagcaggacgacttggcttgggcg

SEQ ID NO: 6919 - DNA, 39 bp, Artificial Sequence
  Synthetic
ggtggtgcagcctgccgaacgcagcagttctttaccgta

SEQ ID NO: 6920 - DNA, 36 bp, Artificial Sequence
  Synthetic
tgtggacgacgtaaccgcgcatgcagcacgacagcg

SEQ ID NO: 6921 - DNA, 40 bp, Artificial Sequence
  Synthetic
tccgccaccaaaaacctgatgacgtaaatggcggacacgg

SEQ ID NO: 6922 - DNA, 38 bp, Artificial Sequence
  Synthetic
atttggacttcaaacgcggcagttcggcggggtacacg

SEQ ID NO: 6923 - DNA, 38 bp, Artificial Sequence
  Synthetic
tcaaaccataggccgcgccttgtcggcgtacaggatgg

SEQ ID NO: 6924 - DNA, 35 bp, Artificial Sequence
  Synthetic
cgaagctgacgttggcggcaccgtggcgatggtcg

SEQ ID NO: 6925 - DNA, 38 bp, Artificial Sequence
  Synthetic
ttgcccatgccgaccataatcggattgcctgcccgtgc

SEQ ID NO: 6926 - DNA, 40 bp, Artificial Sequence
  Synthetic
tcttcgggattggattcgccggtatcgaaagcggcagcgg

SEQ ID NO: 6927 - DNA, 38 bp, Artificial Sequence
  Synthetic
aatcgttgctgccggcatcgttcagaggaccgttcggc

SEQ ID NO: 6928 - DNA, 38 bp, Artificial Sequence
  Synthetic
agccgcagtggattaagaagggtgtcgagctgggtcgg

SEQ ID NO: 6929 - DNA, 36 bp, Artificial Sequence
  Synthetic
tgctccccgaacgcgctttggacggtatggacgggc

SEQ ID NO: 6930 - DNA, 38 bp, Artificial Sequence
  Synthetic
acataaagccggcggcaaacaactccgtcggcgaatgg

SEQ ID NO: 6931 - DNA, 39 bp, Artificial Sequence
  Synthetic
gagcaggcggtatggtcggcgatttccccaacagccacg

SEQ ID NO: 6932 - DNA, 41 bp, Artificial Sequence
  Synthetic
tccagcatcacatactcgaaagtcatgccaacgctatctgg

SEQ ID NO: 6933 - DNA, 39 bp, Artificial Sequence
  Synthetic
acgaagttttggtcgattgcccaagaaatgaacccgggt

SEQ ID NO: 6934 - DNA, 38 bp, Artificial Sequence
  Synthetic
gcaagggcgggttcggtaagcaagaaaccgtccgtacg

SEQ ID NO: 6935 - DNA, 38 bp, Artificial Sequence
  Synthetic
ggttttggcggcaggcgtataactacctcaacgccgca

SEQ ID NO: 6936 - DNA, 40 bp, Artificial Sequence
  Synthetic
tttggcggctttggatatcggaacaccgttcggatgttcg

SEQ ID NO: 6937 - DNA, 36 bp, Artificial Sequence
  Synthetic
aatcctgcatggcgagggtgacgcctcgacgccatc

SEQ ID NO: 6938 - DNA, 35 bp, Artificial Sequence
  Synthetic
ggcgagtacggcgacctgtaccgaagtcgccctgc

SEQ ID NO: 6939 - DNA, 40 bp, Artificial Sequence
  Synthetic
cgctttcatgcgcctgaccggctttatgtgcctgtttcgc

SEQ ID NO: 6940 - DNA, 37 bp, Artificial Sequence
  Synthetic
tccgccgcgccgcttttacaggatttggtgtcggagc

SEQ ID NO: 6941 - DNA, 35 bp, Artificial Sequence
  Synthetic
ggcccggggcgcatgattttcaacctgcgccaacg

SEQ ID NO: 6942 - DNA, 33 bp, Artificial Sequence
  Synthetic
ttgttcgaccgccgcgtcagcaaccgcctgacc

SEQ ID NO: 6943 - DNA, 37 bp, Artificial Sequence
  Synthetic
ggttcgatggcttcggatgccgccgatgcgcgtttgc

SEQ ID NO: 6944 - DNA, 36 bp, Artificial Sequence
  Synthetic
ggacgagccgttgacgagccgaacacgagccgcttg

SEQ ID NO: 6945 - DNA, 37 bp, Artificial Sequence
  Synthetic
caagcgcgcgcaggacgtaccgtatccagcggatccg

SEQ ID NO: 6946 - DNA, 36 bp, Artificial Sequence
  Synthetic
gcttcgccgaagcagacgggggcataccggcgtgct

SEQ ID NO: 6947 - DNA, 45 bp, Artificial Sequence
  Synthetic
aatttgcaggttatcactatgtgcagccagaatgaacaatctgat

SEQ ID NO: 6948 - DNA, 35 bp, Artificial Sequence
  Synthetic
ggcgaaaaaggcgctggcgtttcgggtggcgcagg

SEQ ID NO: 6949 - DNA, 37 bp, Artificial Sequence
  Synthetic
gacgttgtgcaaggtttccgggatggcgtgtgcggtc

SEQ ID NO: 6950 - DNA, 34 bp, Artificial Sequence
  Synthetic
cagtccgcacgccccaattttgcacggaggctgc

SEQ ID NO: 6951 - DNA, 37 bp, Artificial Sequence
  Synthetic
actttggtggcgacgacttcgtcccgtttcggcgtgc

SEQ ID NO: 6952 - DNA, 35 bp, Artificial Sequence
  Synthetic
gcgcccgaaatccccgtcagaaactcgctgcccgc

SEQ ID NO: 6953 - DNA, 39 bp, Artificial Sequence
  Synthetic
cgccatcgaagcctgcacgcgtgaaatcggtttcgtgtc

SEQ ID NO: 6954 - DNA, 39 bp, Artificial Sequence
  Synthetic
acctgaaagacctgttcggcacaccaggccagcaggatg

SEQ ID NO: 6955 - DNA, 40 bp, Artificial Sequence
  Synthetic
gcattggccgtcataccgctaggtcgagtgctttgacaaa

SEQ ID NO: 6956 - DNA, 39 bp, Artificial Sequence
  Synthetic
aaaaccgtgttggagctcggcttccaaatcggcatcggg

SEQ ID NO: 6957 - DNA, 42 bp, Artificial Sequence
  Synthetic
ccctgcgacggttttagacaggggggccgaatacttcttctc

SEQ ID NO: 6958 - DNA, 40 bp, Artificial Sequence
  Synthetic
cgatacgttcggggtggatgttttgccaacctcaaaccgc

SEQ ID NO: 6959 - DNA, 38 bp, Artificial Sequence
  Synthetic
ttgcgacgtatgcaccagctcacgctgacggacaaagc

SEQ ID NO: 6960 - DNA, 37 bp, Artificial Sequence
  Synthetic
gcgcaggcgatggtggtgtcaacgccgaaatcgtcgc

SEQ ID NO: 6961 - DNA, 44 bp, Artificial Sequence
  Synthetic
ttgctggaatctaaatcggctgcagacccttgttttttattccc

SEQ ID NO: 6962 - DNA, 38 bp, Artificial Sequence
  Synthetic
tgtgaatgtttcgccgcccgatcggctctccatcgacc

SEQ ID NO: 6963 - DNA, 38 bp, Artificial Sequence
  Synthetic
gggcgataatggcgcggaagtcttcacgcgaacatgcc

SEQ ID NO: 6964 - DNA, 40 bp, Artificial Sequence
  Synthetic
gcactttgccgccgatgttttcgaaccgcaagttacttgg

SEQ ID NO: 6965 - DNA, 36 bp, Artificial Sequence
  Synthetic
gcgaatcgccgcagacgatatggggcccgaacaagg

SEQ ID NO: 6966 - DNA, 39 bp, Artificial Sequence
  Synthetic
tattgcaggagttcggcagcttatgccgacagtttgccg

SEQ ID NO: 6967 - DNA, 36 bp, Artificial Sequence
  Synthetic
tccgcaccgcaaatcagggtgtgcggatgcggttga

SEQ ID NO: 6968 - DNA, 40 bp, Artificial Sequence
  Synthetic
acgaagcagtgctgatgctcactgttcgatcagccagacg

SEQ ID NO: 6969 - DNA, 36 bp, Artificial Sequence
  Synthetic
acagcctcgccaccaacgcacagcagcatcgcgatg

SEQ ID NO: 6970 - DNA, 38 bp, Artificial Sequence
  Synthetic
cgttggcgcggattttggcgaacacggcggaaacaggc

SEQ ID NO: 6971 - DNA, 38 bp, Artificial Sequence
  Synthetic
gccgtttcgacaaaggcggccacggatttgtgcagggc

SEQ ID NO: 6972 - DNA, 40 bp, Artificial Sequence
  Synthetic
aaacgccagcgacgaagtgcttccttcatcagcttggtcg

SEQ ID NO: 6973 - DNA, 39 bp, Artificial Sequence
  Synthetic
gcagcgaccaggaatggcgacgaacccttcagcgtgatg

SEQ ID NO: 6974 - DNA, 35 bp, Artificial Sequence
  Synthetic
agcccgttcatttgcgccacggcgtactcgtccgt

SEQ ID NO: 6975 - DNA, 40 bp, Artificial Sequence
  Synthetic
gcctgaacaatcaaaatggcgattgctgaccatcgtgaat

SEQ ID NO: 6976 - DNA, 41 bp, Artificial Sequence
  Synthetic
tatcggcttcactattggcagctgttcgttgctttgggatt

SEQ ID NO: 6977 - DNA, 40 bp, Artificial Sequence
  Synthetic
tgtacggcaaaggagacggctgtaatcgccgaaacggtct

SEQ ID NO: 6978 - DNA, 38 bp, Artificial Sequence
  Synthetic
cggcggcaagcgtctgaatgttggactactatccgcgt

SEQ ID NO: 6979 - DNA, 41 bp, Artificial Sequence
  Synthetic
accgtattcattgcaggtgccgatacagttgggcggtcaac

SEQ ID NO: 6980 - DNA, 38 bp, Artificial Sequence
  Synthetic
aaagccagttggacttcgccccgcaacagcggcattcc

SEQ ID NO: 6981 - DNA, 40 bp, Artificial Sequence
  Synthetic
acttctcggacgttccattcgggcttcgactccgttaccg

SEQ ID NO: 6982 - DNA, 36 bp, Artificial Sequence
  Synthetic
gtcggtcagcagcgccactactgaccccgcctttgg

SEQ ID NO: 6983 - DNA, 40 bp, Artificial Sequence
  Synthetic
acacgatggcgggtgcttcggtggttaaagtgtcagccgt

SEQ ID NO: 6984 - DNA, 38 bp, Artificial Sequence
  Synthetic
acagtaatgcgcttcagacggctttctgccccgccctc

SEQ ID NO: 6985 - DNA, 41 bp, Artificial Sequence
  Synthetic
gcaactgcgcgacgtattgtcttggaggcgatgatgaacag

SEQ ID NO: 6986 - DNA, 39 bp, Artificial Sequence
  Synthetic
cctgcttgccaacgtctttgccttcgtcgggggttttgc

SEQ ID NO: 6987 - DNA, 36 bp, Artificial Sequence
  Synthetic
gcaggattggcggggcatgcaatccgaccgaaaccg

SEQ ID NO: 6988 - DNA, 40 bp, Artificial Sequence
  Synthetic
ttcgccgtgggactttatccggctgtgcatcaaagccgcc

SEQ ID NO: 6989 - DNA, 38 bp, Artificial Sequence
  Synthetic
tttctgcgtcggtcattggggttccgagcacacccacc

SEQ ID NO: 6990 - DNA, 38 bp, Artificial Sequence
  Synthetic
ccccaaagccgaaatcgaaggcctcatcaggcgcgcct

SEQ ID NO: 6991 - DNA, 35 bp, Artificial Sequence
  Synthetic
ttcgcgggaatgacggtcgaagatctgccccccgg

SEQ ID NO: 6992 - DNA, 37 bp, Artificial Sequence
  Synthetic
ggtgcagcctgccttcgtagtcggtcaggaacacgtc

SEQ ID NO: 6993 - DNA, 39 bp, Artificial Sequence
  Synthetic
acgagttggtgtacttgccggaacgtccacccgaccaaa

SEQ ID NO: 6994 - DNA, 39 bp, Artificial Sequence
  Synthetic
tgtcgcggacaaaacgatggtccgactttcgccaaaggc

SEQ ID NO: 6995 - DNA, 40 bp, Artificial Sequence
  Synthetic
acgatttgcagttggcggcgagatacggcatatcgcaagg

SEQ ID NO: 6996 - DNA, 38 bp, Artificial Sequence
  Synthetic
cggctgcgtttggcgactacaactgttgcagctcgata

SEQ ID NO: 6997 - DNA, 37 bp, Artificial Sequence
  Synthetic
ttttccccgagcgcggcattcgaagccgccaatcagg

SEQ ID NO: 6998 - DNA, 39 bp, Artificial Sequence
  Synthetic
tcttcggcgatttcaaagccgttcccgtccgcatccttc

SEQ ID NO: 6999 - DNA, 40 bp, Artificial Sequence
  Synthetic
gggcattgtttgaccggtttcctttcgacccgagcattcg

SEQ ID NO: 7000 - DNA, 40 bp, Artificial Sequence
  Synthetic
gcttaagcccgcaacaaaaagacttggtcagtttgccttt

SEQ ID NO: 7001 - DNA, 39 bp, Artificial Sequence
  Synthetic
gaagtcggcggcgaattgctggatcatgcctttacccgg

SEQ ID NO: 7002 - DNA, 38 bp, Artificial Sequence
  Synthetic
ccaaatgcggatggtgcggagacggaagagcaggttgc

SEQ ID NO: 7003 - DNA, 45 bp, Artificial Sequence
  Synthetic
agtgactgggttatcttcggcttgtagtatcagaggataaagtgt

SEQ ID NO: 7004 - DNA, 39 bp, Artificial Sequence
  Synthetic
gttgagaagcgttgacggctatgcggatatgacctcagt

SEQ ID NO: 7005 - DNA, 42 bp, Artificial Sequence
  Synthetic
tgaaagaatgtccaggcgatttcgaatttcctgatgcaaagt

SEQ ID NO: 7006 - DNA, 44 bp, Artificial Sequence
  Synthetic
cccgatgttcgtgattacggaggtatttttgtgcgatagacatc

SEQ ID NO: 7007 - DNA, 46 bp, Artificial Sequence
  Synthetic
aatatttcacgggcaataacttcccaagcagatgaagtagtgattg

SEQ ID NO: 7008 - DNA, 43 bp, Artificial Sequence
  Synthetic
cgattgaggcttcatcgtttttagggcaatctcggtgctgaat

SEQ ID NO: 7009 - DNA, 43 bp, Artificial Sequence
  Synthetic
tggaattctaggcagaatctcttgccttgacccagagcagttg

SEQ ID NO: 7010 - DNA, 44 bp, Artificial Sequence
  Synthetic
tggcacaaattccatatccgaacatcaaaaagaggtatcggaaa

SEQ ID NO: 7011 - DNA, 35 bp, Artificial Sequence
  Synthetic
ctgcgcgacatccacaccccaggttggccgccaag

SEQ ID NO: 7012 - DNA, 34 bp, Artificial Sequence
  Synthetic
acatcgccaaaggacgcggattggcgcgcgtctg

SEQ ID NO: 7013 - DNA, 39 bp, Artificial Sequence
  Synthetic
ccgctttggatttggttgccgtcgaacccggaccgatac

SEQ ID NO: 7014 - DNA, 35 bp, Artificial Sequence
  Synthetic
gcatccgcttctccggcgaaccgccgagcatgacg

SEQ ID NO: 7015 - DNA, 39 bp, Artificial Sequence
  Synthetic
gttctgccgaccgctacttccttcgatgccttcggggac

SEQ ID NO: 7016 - DNA, 36 bp, Artificial Sequence
  Synthetic
gttcggtcaccgtcgggcaacacttcggcggtcagc

SEQ ID NO: 7017 - DNA, 33 bp, Artificial Sequence
  Synthetic
gttggatgcgcccgtcgatcaggcgcgcgcaat

SEQ ID NO: 7018 - DNA, 39 bp, Artificial Sequence
  Synthetic
cgtggcaaacatccaacccgaccgccgattcgatcatgg

SEQ ID NO: 7019 - DNA, 38 bp, Artificial Sequence
  Synthetic
gtctgtccctgcccggcaaacaattctttgcggcctgc

SEQ ID NO: 7020 - DNA, 38 bp, Artificial Sequence
  Synthetic
agcatcctcaaattcaccggcctaccttcgacggcggc

SEQ ID NO: 7021 - DNA, 34 bp, Artificial Sequence
  Synthetic
gccgacacgttggcgcaattcgcccaccacccga

SEQ ID NO: 7022 - DNA, 35 bp, Artificial Sequence
  Synthetic
tccaagacccaggcgagcatactcggcgtggcagg

SEQ ID NO: 7023 - DNA, 42 bp, Artificial Sequence
  Synthetic
atcgccaactcctgcgtcttcccgggtgtacagttcggtcag

SEQ ID NO: 7024 - DNA, 36 bp, Artificial Sequence
  Synthetic
cccctgcccaaaacgaccggtcggcaccgtcttacg

SEQ ID NO: 7025 - DNA, 42 bp, Artificial Sequence
  Synthetic
gatcgccgaaatcgattccccaggacagatgacggaagagga

SEQ ID NO: 7026 - DNA, 40 bp, Artificial Sequence
  Synthetic
cgcgtgccgccatatcttcgaccatcacccaaatgctcaa

SEQ ID NO: 7027 - DNA, 40 bp, Artificial Sequence
  Synthetic
gcgggatgattttttccgccaaacgttacccccttgtcgc

SEQ ID NO: 7028 - DNA, 38 bp, Artificial Sequence
  Synthetic
tcgttgagcaggcgcaatacgacgccaggccaccaaag

SEQ ID NO: 7029 - DNA, 42 bp, Artificial Sequence
  Synthetic
aagcccaaaaagtcggactggtggtcgatttcgttcaacagc

SEQ ID NO: 7030 - DNA, 34 bp, Artificial Sequence
  Synthetic
tacttgccaccgcgccctacgtgttcgggcgtgc

SEQ ID NO: 7031 - DNA, 41 bp, Artificial Sequence
  Synthetic
ctcgaggttgcaaaagtcgcctggaaatcggggtgcgaaca

SEQ ID NO: 7032 - DNA, 40 bp, Artificial Sequence
  Synthetic
ttgatgaccgcctgccagtagcacttgcgtccgaactgcc

SEQ ID NO: 7033 - DNA, 39 bp, Artificial Sequence
  Synthetic
gatggatgcccgattcgtgcgtatcccgtgcagcccaat

SEQ ID NO: 7034 - DNA, 39 bp, Artificial Sequence
  Synthetic
ttttcgcaatcgcattgaccgctcgaagcgggttttgcc

SEQ ID NO: 7035 - DNA, 35 bp, Artificial Sequence
  Synthetic
gccatcgttgccgccctgatacggcttcggggtcg

SEQ ID NO: 7036 - DNA, 37 bp, Artificial Sequence
  Synthetic
gcaccggtctcttccgattggccgtcctgccgggtat

SEQ ID NO: 7037 - DNA, 40 bp, Artificial Sequence
  Synthetic
tgctttccaacatcctccccctgaggttgagcagccaacg

SEQ ID NO: 7038 - DNA, 40 bp, Artificial Sequence
  Synthetic
cgcacacgctgccatatcctgacattggaacttcctgcgg

SEQ ID NO: 7039 - DNA, 38 bp, Artificial Sequence
  Synthetic
tgcccttcattgccgttggggagggcggtttcgtcagt

SEQ ID NO: 7040 - DNA, 39 bp, Artificial Sequence
  Synthetic
gcagaaagtcggcgaataccgggttcggcaggcaggttt

SEQ ID NO: 7041 - DNA, 40 bp, Artificial Sequence
  Synthetic
tccgcctgtaccgaaatcaacgccatacccaatacgccgg

SEQ ID NO: 7042 - DNA, 40 bp, Artificial Sequence
  Synthetic
cgaaaccgacgctcgcgtatcgtcttcgggattagccaat

SEQ ID NO: 7043 - DNA, 44 bp, Artificial Sequence
  Synthetic
ttttccagacggcattttttgttttggtcattttgctggaagag

SEQ ID NO: 7044 - DNA, 38 bp, Artificial Sequence
  Synthetic
catccgcacccagttgcgcggtttgtttgctgccgagg

SEQ ID NO: 7045 - DNA, 44 bp, Artificial Sequence
  Synthetic
gtcagacatcgggaaatgcttttttcaaaagcagattggacaaa

SEQ ID NO: 7046 - DNA, 38 bp, Artificial Sequence
  Synthetic
tgcaaaccgcgccgtatcagaattgcgcgcttgcttca

SEQ ID NO: 7047 - DNA, 37 bp, Artificial Sequence
  Synthetic
gcgaaccggcgcaagaactatacttcggggttgcggg

SEQ ID NO: 7048 - DNA, 39 bp, Artificial Sequence
  Synthetic
gttgccaagcctaagccgttgcgcaatcggcggattcgg

SEQ ID NO: 7049 - DNA, 40 bp, Artificial Sequence
  Synthetic
tggcggcttcgactgtttcgcctttatgcacgccaccttt

SEQ ID NO: 7050 - DNA, 41 bp, Artificial Sequence
  Synthetic
agcatccccatcatccacaaccggggaagtagaacacggct

SEQ ID NO: 7051 - DNA, 41 bp, Artificial Sequence
  Synthetic
tcgcttcgatcacttcgggacgcggaattgctgaaacagga

SEQ ID NO: 7052 - DNA, 39 bp, Artificial Sequence
  Synthetic
ggattgccggcgccgatgtccgatatgaagcggcggata

SEQ ID NO: 7053 - DNA, 34 bp, Artificial Sequence
  Synthetic
cgcgccgtccaagccttttggcgagggtcatcgc

SEQ ID NO: 7054 - DNA, 37 bp, Artificial Sequence
  Synthetic
ggcttggatttgccggactgtgcacgacctccggcaa

SEQ ID NO: 7055 - DNA, 36 bp, Artificial Sequence
  Synthetic
cgagggtgcgctccatctgccgaaatgggcgtcgtc

SEQ ID NO: 7056 - DNA, 38 bp, Artificial Sequence
  Synthetic
gtagcggtcgaagtcgtgcggacctggacatcctcgcc

SEQ ID NO: 7057 - DNA, 41 bp, Artificial Sequence
  Synthetic
cgggggaagtcggtcaggtagcctgttcaaccccttcgtcc

SEQ ID NO: 7058 - DNA, 38 bp, Artificial Sequence
  Synthetic
tttgaccagcagcgaagacaggtcggcttcggcgcaag

SEQ ID NO: 7059 - DNA, 39 bp, Artificial Sequence
  Synthetic
cacggtccgcgtgatttggtaatcggcaggggaaatgtg

SEQ ID NO: 7060 - DNA, 44 bp, Artificial Sequence
  Synthetic
acaggctggttactttgtttttttgccatcgtgaccaaactgac

SEQ ID NO: 7061 - DNA, 37 bp, Artificial Sequence
  Synthetic
ggtcggtatgcaatgcgtggtcgcgtgggctgtatgc

SEQ ID NO: 7062 - DNA, 37 bp, Artificial Sequence
  Synthetic
ccccgatagccgaaaagcagctaccgaagccctgcgc

SEQ ID NO: 7063 - DNA, 38 bp, Artificial Sequence
  Synthetic
ggacagcccgaacacacccgttttcgggaatcagggcg

SEQ ID NO: 7064 - DNA, 36 bp, Artificial Sequence
  Synthetic
ttgccggaacatggctgctagatgcctgcgccgtag

SEQ ID NO: 7065 - DNA, 38 bp, Artificial Sequence
  Synthetic
tgggcaacgaaggcgacggacaccagcatgtcgcaatg

SEQ ID NO: 7066 - DNA, 41 bp, Artificial Sequence
  Synthetic
ctacaccctctccgtcgtcccggctttgaaatggcggtaca

SEQ ID NO: 7067 - DNA, 36 bp, Artificial Sequence
  Synthetic
atatgtgccgtgccgcgctgccggtcgttgagttcg

SEQ ID NO: 7068 - DNA, 40 bp, Artificial Sequence
  Synthetic
aaaggggcgaagtttacaggcttcgcgttgttgtaggttt

SEQ ID NO: 7069 - DNA, 36 bp, Artificial Sequence
  Synthetic
ttggtttcgccgctcatggcaaagcccgcgccgaag

SEQ ID NO: 7070 - DNA, 36 bp, Artificial Sequence
  Synthetic
cgctcggcggcatccaaagaaagttacgaggccgcc

SEQ ID NO: 7071 - DNA, 35 bp, Artificial Sequence
  Synthetic
tcacaggcacacgtctgcgaaagcctcgaccgccc

SEQ ID NO: 7072 - DNA, 39 bp, Artificial Sequence
  Synthetic
cgtgggcttacctgccgctcgatgtaaacctcgggcagc

SEQ ID NO: 7073 - DNA, 40 bp, Artificial Sequence
  Synthetic
ttcagacggcattttcggcacaatttctggtggcggcttg

SEQ ID NO: 7074 - DNA, 41 bp, Artificial Sequence
  Synthetic
tacctcgccaaaaaactcggcaggcttggaggaattcgtgc

SEQ ID NO: 7075 - DNA, 41 bp, Artificial Sequence
  Synthetic
ggtcggtatggatgccttcctgagcccgtcaaagagtttgg

SEQ ID NO: 7076 - DNA, 42 bp, Artificial Sequence
  Synthetic
accaacaacagcaccttcctcgcgttctaggttcgggtatgc

SEQ ID NO: 7077 - DNA, 41 bp, Artificial Sequence
  Synthetic
atctggcgaaggaaatgcacgtgcgaaatactgtcgccgat

SEQ ID NO: 7078 - DNA, 41 bp, Artificial Sequence
  Synthetic
gcttgcccgattttgaaagccgggtgagttttgccagttgc

SEQ ID NO: 7079 - DNA, 36 bp, Artificial Sequence
  Synthetic
ccgcccgcccgattgtcaaaaggcagggcgatcagc

SEQ ID NO: 7080 - DNA, 42 bp, Artificial Sequence
  Synthetic
tcgagtacgccggtgattttgtgtccacggcttgaatatcga

SEQ ID NO: 7081 - DNA, 45 bp, Artificial Sequence
  Synthetic
aattcgactgctttttcggcgggataaaaatatgacgacacaaga

SEQ ID NO: 7082 - DNA, 42 bp, Artificial Sequence
  Synthetic
tccaacagttttgccacaccgtgtggaaaaacggtggacaga

SEQ ID NO: 7083 - DNA, 42 bp, Artificial Sequence
  Synthetic
agcccagtatgacaatttgctgtgctgattatctgccgtaaa

SEQ ID NO: 7084 - DNA, 40 bp, Artificial Sequence
  Synthetic
tgcccaagcacccaaatcatatttgttttgccgtgatgtg

SEQ ID NO: 7085 - DNA, 40 bp, Artificial Sequence
  Synthetic
cacgccaatgacgcgcaatctttcggattctttcgccagt

SEQ ID NO: 7086 - DNA, 39 bp, Artificial Sequence
  Synthetic
gcaaaattccgcgcattaagcatgattttcaggctgcct

SEQ ID NO: 7087 - DNA, 41 bp, Artificial Sequence
  Synthetic
gcctataccgaaaaatggcgcgaaaccattctgtgcgctcg

SEQ ID NO: 7088 - DNA, 38 bp, Artificial Sequence
  Synthetic
gtttgatgccgttttgtgcgtgattatttacgcggcgg

SEQ ID NO: 7089 - DNA, 38 bp, Artificial Sequence
  Synthetic
gcaaacaacaacactcgggcctgcccattgtgcatagg

SEQ ID NO: 7090 - DNA, 43 bp, Artificial Sequence
  Synthetic
cgaaatttttcatggtaaacgagcggataccgcaatggctttg

SEQ ID NO: 7091 - DNA, 39 bp, Artificial Sequence
  Synthetic
gtccgaagacggcggcttcacaacagccgaagccgtaag

SEQ ID NO: 7092 - DNA, 39 bp, Artificial Sequence
  Synthetic
ggtacgcaaccgaacagctctgttggctatgactgcccg

SEQ ID NO: 7093 - DNA, 47 bp, Artificial Sequence
  Synthetic
accgttcaaataaatcgctctacatgattagacccaacatgagtttg

SEQ ID NO: 7094 - DNA, 43 bp, Artificial Sequence
  Synthetic
ctgggcaaactggaaaaacggatatattatgctgacgcccaaa

SEQ ID NO: 7095 - DNA, 33 bp, Artificial Sequence
  Synthetic
cggcaaaggcgtgcacgtaatgcctgcgtcgcg

SEQ ID NO: 7096 - DNA, 36 bp, Artificial Sequence
  Synthetic
cgcctgcgcgttgtgaatcgccctgcaacactacgc

SEQ ID NO: 7097 - DNA, 41 bp, Artificial Sequence
  Synthetic
aaacggtttttctttggcttcggggataaaaccgcctacgc

SEQ ID NO: 7098 - DNA, 40 bp, Artificial Sequence
  Synthetic
gcggctgccgtacaatcaaaatgatatgtcgggcggcatc

SEQ ID NO: 7099 - DNA, 34 bp, Artificial Sequence
  Synthetic
gcatcagccttgccacgcttgcgcgtcggcttga

SEQ ID NO: 7100 - DNA, 40 bp, Artificial Sequence
  Synthetic
caggcagtgtcggtcatcctcactcttccagcctgccctc

SEQ ID NO: 7101 - DNA, 37 bp, Artificial Sequence
  Synthetic
tccaggcgtccccagttgtcatcacgcccaacctgac

SEQ ID NO: 7102 - DNA, 37 bp, Artificial Sequence
  Synthetic
acgttcgacggcggcttgtgcatcaaaagtcctgcgg

SEQ ID NO: 7103 - DNA, 39 bp, Artificial Sequence
  Synthetic
ttcagcttcggatggaaaaggacgttttttgctggcatc

SEQ ID NO: 7104 - DNA, 39 bp, Artificial Sequence
  Synthetic
catacggcgcatcgttggcggcgccggtttacaatcctt

SEQ ID NO: 7105 - DNA, 40 bp, Artificial Sequence
  Synthetic
cccgcctttccgacaacgagaacagtatgcccaactgcaa

SEQ ID NO: 7106 - DNA, 39 bp, Artificial Sequence
  Synthetic
tgtggcgaaaagctccatcggaatcgcccaagtgagctg

SEQ ID NO: 7107 - DNA, 38 bp, Artificial Sequence
  Synthetic
gggctgctggatgcgggtaaaagtcgccgaacggaaag

SEQ ID NO: 7108 - DNA, 37 bp, Artificial Sequence
  Synthetic
cgcccgccggtctgaaacatccagctcgaccatcagg

SEQ ID NO: 7109 - DNA, 41 bp, Artificial Sequence
  Synthetic
acggtggaacgtgggaacagggatagtttgggtactgccgc

SEQ ID NO: 7110 - DNA, 37 bp, Artificial Sequence
  Synthetic
aagcaacagcatccgccgcgcgtgatgtcgaaaccga

SEQ ID NO: 7111 - DNA, 39 bp, Artificial Sequence
  Synthetic
tccccgataccgatgccgtctgtaaacggcaggtgcatc

SEQ ID NO: 7112 - DNA, 39 bp, Artificial Sequence
  Synthetic
aaacggttgcccaaaccccgcaaccgaaccgtcattccc

SEQ ID NO: 7113 - DNA, 38 bp, Artificial Sequence
  Synthetic
tctgctcgccaaagtcaaagccacgcggatgtcgaggc

SEQ ID NO: 7114 - DNA, 40 bp, Artificial Sequence
  Synthetic
aacatctggcgcaaaaaaccggcggcatccaaagtgtcgg

SEQ ID NO: 7115 - DNA, 40 bp, Artificial Sequence
  Synthetic
cgaagtgttggacgcaccgctaaagagttgccgtcgatgg

SEQ ID NO: 7116 - DNA, 38 bp, Artificial Sequence
  Synthetic
ttttccacgcgtttgcccgggctgcggcaaagttgttg

SEQ ID NO: 7117 - DNA, 38 bp, Artificial Sequence
  Synthetic
cgacatccacggcaaagcgctgtggaaacgctcgtcgg

SEQ ID NO: 7118 - DNA, 37 bp, Artificial Sequence
  Synthetic
attcacacgcaaacccgcctgacaacacggcggaagg

SEQ ID NO: 7119 - DNA, 41 bp, Artificial Sequence
  Synthetic
agtgtccgccaacatattgcgcggcagtgacgacgatgacc

SEQ ID NO: 7120 - DNA, 39 bp, Artificial Sequence
  Synthetic
ccccgcccgtttcgccaaaggagaagtttaaccgccagg

SEQ ID NO: 7121 - DNA, 39 bp, Artificial Sequence
  Synthetic
accattgccgtctgcgacacggctttttgtggatgatgg

SEQ ID NO: 7122 - DNA, 37 bp, Artificial Sequence
  Synthetic
cgaaaccttaaaccccggcccgcgaggcggagaagct

SEQ ID NO: 7123 - DNA, 37 bp, Artificial Sequence
  Synthetic
tgtcaaaacgctccttcaggcgaacggttggcgcgtg

SEQ ID NO: 7124 - DNA, 34 bp, Artificial Sequence
  Synthetic
gcatccgcgccgaagagtcggcggcgttttggac

SEQ ID NO: 7125 - DNA, 35 bp, Artificial Sequence
  Synthetic
catctgcgccttgtccggcaggcggactggcggaa

SEQ ID NO: 7126 - DNA, 39 bp, Artificial Sequence
  Synthetic
cctgcggattcaataccggcaggaaacgtgcgcctgttg

SEQ ID NO: 7127 - DNA, 36 bp, Artificial Sequence
  Synthetic
cggccgattccgccaaaccggattatgcgccgggag

SEQ ID NO: 7128 - DNA, 39 bp, Artificial Sequence
  Synthetic
cccattccccgtttgccagcggaatcggccggtgagttt

SEQ ID NO: 7129 - DNA, 41 bp, Artificial Sequence
  Synthetic
gctgggcacgtcttccaaagccggcaaggcttatttgtcca

SEQ ID NO: 7130 - DNA, 34 bp, Artificial Sequence
  Synthetic
gccagttcgcgcgtggttttcggggcgcaacacc

SEQ ID NO: 7131 - DNA, 38 bp, Artificial Sequence
  Synthetic
gcctttggcggctttgcgttgggatttcatcggacagg

SEQ ID NO: 7132 - DNA, 34 bp, Artificial Sequence
  Synthetic
gtgtgcggcgcggatgtacggaaaaacgcgcggc

SEQ ID NO: 7133 - DNA, 37 bp, Artificial Sequence
  Synthetic
gcgtttttccagcgcgtcgacgaaatggcggcatacg

SEQ ID NO: 7134 - DNA, 40 bp, Artificial Sequence
  Synthetic
gatcctacacgccgcgaacctccgaaagctccttgtccgc

SEQ ID NO: 7135 - DNA, 42 bp, Artificial Sequence
  Synthetic
gactcggaagacgtcatccggcggtccagttgaagcagctga

SEQ ID NO: 7136 - DNA, 42 bp, Artificial Sequence
  Synthetic
aacttgaagcggcaatgagggccctgacgcagatagacgatg

SEQ ID NO: 7137 - DNA, 37 bp, Artificial Sequence
  Synthetic
cggctgtgcgtgaggtgctcaagtaatcccgcgtccc

SEQ ID NO: 7138 - DNA, 38 bp, Artificial Sequence
  Synthetic
tcaacgcctttcaccagctctcctccgcgatatagggt

SEQ ID NO: 7139 - DNA, 37 bp, Artificial Sequence
  Synthetic
gtccaccaccaagagcgcggccgacttggaagccttg

SEQ ID NO: 7140 - DNA, 38 bp, Artificial Sequence
  Synthetic
ggcgagcgtttgcggatgaatgccgaacggacaaaacc

SEQ ID NO: 7141 - DNA, 40 bp, Artificial Sequence
  Synthetic
atgtgtgccgaaaacaaccgcttgaggaagacggttgcga

SEQ ID NO: 7142 - DNA, 35 bp, Artificial Sequence
  Synthetic
cttccgtcctcgccgatcctgtggatgacggcggg

SEQ ID NO: 7143 - DNA, 35 bp, Artificial Sequence
  Synthetic
cgaagccctgcgcctcgaaaccgcccaagccttgc

SEQ ID NO: 7144 - DNA, 35 bp, Artificial Sequence
  Synthetic
tttgcagacgaccgcgtgctccgacaagcagcccg

SEQ ID NO: 7145 - DNA, 36 bp, Artificial Sequence
  Synthetic
aaatcctgtttgccgccgccttggggcgcaattcgg

SEQ ID NO: 7146 - DNA, 35 bp, Artificial Sequence
  Synthetic
tttggccttggctgccgatccgccgaaacagcttg

SEQ ID NO: 7147 - DNA, 38 bp, Artificial Sequence
  Synthetic
cgctacggcagccgcgaaagcggttgttggtggtttgc

SEQ ID NO: 7148 - DNA, 39 bp, Artificial Sequence
  Synthetic
tgccggtatggtttcaagacgaaagagcagacggagaag

SEQ ID NO: 7149 - DNA, 41 bp, Artificial Sequence
  Synthetic
cctctcgtactaggagcagccccgtgagacagtttggtccc

SEQ ID NO: 7150 - DNA, 36 bp, Artificial Sequence
  Synthetic
gcggggccctcgaaaacctccgcacggttaccaacc

SEQ ID NO: 7151 - DNA, 42 bp, Artificial Sequence
  Synthetic
agcacaaaaatcttgccgtcgcgcgattgacgtgattgtcga

SEQ ID NO: 7152 - DNA, 39 bp, Artificial Sequence
  Synthetic
gacgggcaaaggttcgcgtgttgaggttggacacggtaa

SEQ ID NO: 7153 - DNA, 41 bp, Artificial Sequence
  Synthetic
atctccatccacgacgtgggcgcatcgttgaccaattcagg

SEQ ID NO: 7154 - DNA, 41 bp, Artificial Sequence
  Synthetic
cggcaaataccaaacccccgtcgataggtgttgaagcccat

SEQ ID NO: 7155 - DNA, 39 bp, Artificial Sequence
  Synthetic
aatggccgccgccttcaccaggtcggacatatgcacgtc

SEQ ID NO: 7156 - DNA, 38 bp, Artificial Sequence
  Synthetic
ccctgccttgcgcgaccaacccaatgtcagcgtgttcg

SEQ ID NO: 7157 - DNA, 37 bp, Artificial Sequence
  Synthetic
tctcgctcgcgtccaaatctgatgccgccgatggagc

SEQ ID NO: 7158 - DNA, 36 bp, Artificial Sequence
  Synthetic
ccgtgggtatgtcgctcggctgcgttcgagcgaggc

SEQ ID NO: 7159 - DNA, 37 bp, Artificial Sequence
  Synthetic
caccgtcggtgcagtcttcatttggcgatgtggacgg

SEQ ID NO: 7160 - DNA, 39 bp, Artificial Sequence
  Synthetic
ctacgaagcccccgtcggagcccaatagctgaatacggt

SEQ ID NO: 7161 - DNA, 35 bp, Artificial Sequence
  Synthetic
cgttcaggctgcccgaacacttgtccgccgtcgtc

SEQ ID NO: 7162 - DNA, 40 bp, Artificial Sequence
  Synthetic
agaacaaatcaaacgcgcccgcctgcaggtagcggctgag

SEQ ID NO: 7163 - DNA, 36 bp, Artificial Sequence
  Synthetic
cgcaccccgtgggcacaatgcgcagggtcatggctt

SEQ ID NO: 7164 - DNA, 46 bp, Artificial Sequence
  Synthetic
catgcagatatgcagattctgacaaaggtttagatcagttttcgga

SEQ ID NO: 7165 - DNA, 40 bp, Artificial Sequence
  Synthetic
tatcgagttgcgccaccaaccccaaatattgcacgcccca

SEQ ID NO: 7166 - DNA, 40 bp, Artificial Sequence
  Synthetic
tcaaccaatccgtttacgcccataaagctgcggcccattt

SEQ ID NO: 7167 - DNA, 38 bp, Artificial Sequence
  Synthetic
ttttggacgaaccctccatcggtgagggtggcgagcag

SEQ ID NO: 7168 - DNA, 41 bp, Artificial Sequence
  Synthetic
gcgacggcgtgattaaagtcgaagacttcgcaggggacgta

SEQ ID NO: 7169 - DNA, 38 bp, Artificial Sequence
  Synthetic
acgccgtacgccgaaacaggccgatgaggttttcgagg

SEQ ID NO: 7170 - DNA, 36 bp, Artificial Sequence
  Synthetic
aacgcatcgtgccgcccatgacgaatggcaaaccgc

SEQ ID NO: 7171 - DNA, 40 bp, Artificial Sequence
  Synthetic
agctgcaactgctcggtaatgacgaatgccccgaaatgct

SEQ ID NO: 7172 - DNA, 38 bp, Artificial Sequence
  Synthetic
ccgccagattgccgcgtgttcgtcccctatgctttggc

SEQ ID NO: 7173 - DNA, 39 bp, Artificial Sequence
  Synthetic
tggggtctttttcggtcaggcatcgtcaaaccgctcgac

SEQ ID NO: 7174 - DNA, 42 bp, Artificial Sequence
  Synthetic
tgtccgtcgggattttggtgtcatgcgctcttctctgctttg

SEQ ID NO: 7175 - DNA, 39 bp, Artificial Sequence
  Synthetic
atgaccccgcttttgctggtagcgggtcaatacggtcag

SEQ ID NO: 7176 - DNA, 39 bp, Artificial Sequence
  Synthetic
cttggtcgagctgcttgccctttgactttggcggcatcg

SEQ ID NO: 7177 - DNA, 37 bp, Artificial Sequence
  Synthetic
caggttcaggcttggtcgcttcgggcatatcgagcgg

SEQ ID NO: 7178 - DNA, 38 bp, Artificial Sequence
  Synthetic
cgcgaaagagttgtccgacgaattccatacgcgcgccg

SEQ ID NO: 7179 - DNA, 40 bp, Artificial Sequence
  Synthetic
ctgcggaaaatgcggcaaagcgccgatgtcttccttacgc

SEQ ID NO: 7180 - DNA, 37 bp, Artificial Sequence
  Synthetic
ggcacgacacccgccgattttcgtcgtgttcggcctg

SEQ ID NO: 7181 - DNA, 40 bp, Artificial Sequence
  Synthetic
ctcgatgcgatggaaagccccgccattcccgcatcagggc

SEQ ID NO: 7182 - DNA, 40 bp, Artificial Sequence
  Synthetic
ccgtcctcgaagccgtcaggggttgttcgggtaggcgata

SEQ ID NO: 7183 - DNA, 38 bp, Artificial Sequence
  Synthetic
cactcggcgacaaaaaaggcatagggcttcgtcgagcg

SEQ ID NO: 7184 - DNA, 40 bp, Artificial Sequence
  Synthetic
gcgtatacaaccgctcgccctgccgtaaacttttgctcct

SEQ ID NO: 7185 - DNA, 40 bp, Artificial Sequence
  Synthetic
tcggttttctctgtgcggacacgttttgggttatgaggat

SEQ ID NO: 7186 - DNA, 35 bp, Artificial Sequence
  Synthetic
caaccggcgtggcgatgtaggacagggtgtgccag

SEQ ID NO: 7187 - DNA, 35 bp, Artificial Sequence
  Synthetic
cgcggccaaactcgttgcttacggtttcgcgcagg

SEQ ID NO: 7188 - DNA, 36 bp, Artificial Sequence
  Synthetic
atgagcgtggtcaaaggtcgccgctgcacgggcttt

SEQ ID NO: 7189 - DNA, 40 bp, Artificial Sequence
  Synthetic
tggcaatggcaggctttgagaccgatcatcgtgatgtcgg

SEQ ID NO: 7190 - DNA, 42 bp, Artificial Sequence
  Synthetic
cttgcccatgaaaaccacgtcgggttgagcacgatttggttc

SEQ ID NO: 7191 - DNA, 39 bp, Artificial Sequence
  Synthetic
gacaagcccccgcctaccagtagggcaggtaaacgtcga

SEQ ID NO: 7192 - DNA, 39 bp, Artificial Sequence
  Synthetic
aaccgtctgcaccgtaaatgttaaagatggtcgggttgc

SEQ ID NO: 7193 - DNA, 39 bp, Artificial Sequence
  Synthetic
tttccagtgcggcgagatacatcatccttgcaacaggtc

SEQ ID NO: 7194 - DNA, 37 bp, Artificial Sequence
  Synthetic
acatccgccgtggtgttgcatcccgttcaagttgccg

SEQ ID NO: 7195 - DNA, 45 bp, Artificial Sequence
  Synthetic
ttcatgcagtggcgttagcttaaaaaactgagcttcgagaattac

SEQ ID NO: 7196 - DNA, 38 bp, Artificial Sequence
  Synthetic
gtgcctctccaaacgccacgcctgacgaagcgacaacg

SEQ ID NO: 7197 - DNA, 40 bp, Artificial Sequence
  Synthetic
gtttgtcgtcaaaccgcgcgttgggcttcgtattgttggt

SEQ ID NO: 7198 - DNA, 37 bp, Artificial Sequence
  Synthetic
gaggcggaggtagagccggaatgttgggcggcgttcc

SEQ ID NO: 7199 - DNA, 36 bp, Artificial Sequence
  Synthetic
ttgccgccagttgcagcgcggaatgggagcagatgc

SEQ ID NO: 7200 - DNA, 38 bp, Artificial Sequence
  Synthetic
cgcatcgacgttgtcctttggtttcggcgggtgagagc

SEQ ID NO: 7201 - DNA, 36 bp, Artificial Sequence
  Synthetic
tgccgcacgcgcagaagctttcagttttgccgcttc

SEQ ID NO: 7202 - DNA, 38 bp, Artificial Sequence
  Synthetic
caagccgaaacacgagcgaaacggtgcggcaggtttcg

SEQ ID NO: 7203 - DNA, 34 bp, Artificial Sequence
  Synthetic
cgtgtccgcgcgtttgcaaccctgaccctgctcg

SEQ ID NO: 7204 - DNA, 39 bp, Artificial Sequence
  Synthetic
acggtgcgtttctgacttcgcgcaaaacctcgctcctgc

SEQ ID NO: 7205 - DNA, 40 bp, Artificial Sequence
  Synthetic
ccgtcctgccactcggtctccgccgaaaatcgtcttgaac

SEQ ID NO: 7206 - DNA, 36 bp, Artificial Sequence
  Synthetic
ctggtccgcatacagccgcacgtggtttcggggcaa

SEQ ID NO: 7207 - DNA, 39 bp, Artificial Sequence
  Synthetic
cgcgggcttggcgttatacggggtttcagcctgtcatcg

SEQ ID NO: 7208 - DNA, 40 bp, Artificial Sequence
  Synthetic
accgcaaaagacgacaaggtgtaccgattacgcccatccc

SEQ ID NO: 7209 - DNA, 32 bp, Artificial Sequence
  Synthetic
aaggcagccgcgcgatttcgccgcccgatacg

SEQ ID NO: 7210 - DNA, 39 bp, Artificial Sequence
  Synthetic
cgggcctataccgttgccgcttttgacggcagggagcaa

SEQ ID NO: 7211 - DNA, 40 bp, Artificial Sequence
  Synthetic
gcccactgcagatagggaccaaagtggtacgtgagctggg

SEQ ID NO: 7212 - DNA, 41 bp, Artificial Sequence
  Synthetic
aaaccataaaacgggttgccttcagaagttgaagcaggtaa

SEQ ID NO: 7213 - DNA, 41 bp, Artificial Sequence
  Synthetic
cagatcgaccgcttcctcgtgcggatattgtggaacgggaa

SEQ ID NO: 7214 - DNA, 42 bp, Artificial Sequence
  Synthetic
acaggcgaacaccaccaactacatgcgttcgacaccaatgtt

SEQ ID NO: 7215 - DNA, 40 bp, Artificial Sequence
  Synthetic
cggtagattgcccggaatgcgcgcctctcccttgtccaac

SEQ ID NO: 7216 - DNA, 37 bp, Artificial Sequence
  Synthetic
ccgccgacggccgaaaagttacaaaacaaccgccgcc

SEQ ID NO: 7217 - DNA, 39 bp, Artificial Sequence
  Synthetic
cgtatcgaccaaagcggcgtaagcgatgtacgaacccga

SEQ ID NO: 7218 - DNA, 41 bp, Artificial Sequence
  Synthetic
gcattcaaccgtttggacagcatccatttgtcggtactgcc

SEQ ID NO: 7219 - DNA, 40 bp, Artificial Sequence
  Synthetic
cgactttgtcggcaacaccttgtcgggcaaatcgagttcg

SEQ ID NO: 7220 - DNA, 39 bp, Artificial Sequence
  Synthetic
gccgaagcgatggcgatggccacaaagaaacgctcggat

SEQ ID NO: 7221 - DNA, 39 bp, Artificial Sequence
  Synthetic
caagtgccgggcaaacctccaatcggcaggatggatgca

SEQ ID NO: 7222 - DNA, 38 bp, Artificial Sequence
  Synthetic
cgaaagcaaagccgaactcgactgcacttcgcggcgaa

SEQ ID NO: 7223 - DNA, 36 bp, Artificial Sequence
  Synthetic
agaagccgtcttcccgctgcgcggttgacgaagggc

SEQ ID NO: 7224 - DNA, 39 bp, Artificial Sequence
  Synthetic
tctgccttcgcttctgccgcgcttcaggaacagcttctg

SEQ ID NO: 7225 - DNA, 38 bp, Artificial Sequence
  Synthetic
gagcgcggggttgcctttggtttggacgtttaccgcag

SEQ ID NO: 7226 - DNA, 40 bp, Artificial Sequence
  Synthetic
ctttgtcgcgggcgagtttggaactcttcctcgtcgaagg

SEQ ID NO: 7227 - DNA, 36 bp, Artificial Sequence
  Synthetic
tcgtcttcgcctttgaccggaaagccgtgctgctgc

SEQ ID NO: 7228 - DNA, 40 bp, Artificial Sequence
  Synthetic
cttggcagatatgtgtcgggctagccggtcaaagaacgtc

SEQ ID NO: 7229 - DNA, 41 bp, Artificial Sequence
  Synthetic
tcttcagccgccttcaaatccacgtgaaaactgtggcgttg

SEQ ID NO: 7230 - DNA, 36 bp, Artificial Sequence
  Synthetic
ggaggtgtggatgcggccttgaatcgggcggacacc

SEQ ID NO: 7231 - DNA, 36 bp, Artificial Sequence
  Synthetic
ggaagctgtccgagcccgtgtccgcacgcttatccc

SEQ ID NO: 7232 - DNA, 39 bp, Artificial Sequence
  Synthetic
ggcaagtgcgccgaaatggagcaaaatcagcacggaaac

SEQ ID NO: 7233 - DNA, 38 bp, Artificial Sequence
  Synthetic
gtcgccttcacatcgtgcacggcggctttggcttccgt

SEQ ID NO: 7234 - DNA, 39 bp, Artificial Sequence
  Synthetic
ggcaacgcggctgtcttccccgcattttggacacatgga

SEQ ID NO: 7235 - DNA, 36 bp, Artificial Sequence
  Synthetic
tttcaggcaggtcgggctgtgtttgccgggcagacg

SEQ ID NO: 7236 - DNA, 40 bp, Artificial Sequence
  Synthetic
cgattgcgatatacccggcggggtttggaatgggtgcgtt

SEQ ID NO: 7237 - DNA, 36 bp, Artificial Sequence
  Synthetic
cgtcgcataccaaacgcgcccgttcctgcccgctat

SEQ ID NO: 7238 - DNA, 37 bp, Artificial Sequence
  Synthetic
gaagcctgccgcgagattctccacgccgtaatacgcg

SEQ ID NO: 7239 - DNA, 40 bp, Artificial Sequence
  Synthetic
acgcaccacaacgacagtatggtgcagggcgtattgttgc

SEQ ID NO: 7240 - DNA, 36 bp, Artificial Sequence
  Synthetic
ttgggacgggcagaacgacctcggtttcccagccgc

SEQ ID NO: 7241 - DNA, 39 bp, Artificial Sequence
  Synthetic
ccgaaatgcctgcccataccgtccgcatccgcacatcaa

SEQ ID NO: 7242 - DNA, 40 bp, Artificial Sequence
  Synthetic
gtttgcctgtttgagcgcgtcgaagtattgctcgaccgtc

SEQ ID NO: 7243 - DNA, 36 bp, Artificial Sequence
  Synthetic
gacattgccgccgctcaagctcctgcccacgcttgc

SEQ ID NO: 7244 - DNA, 40 bp, Artificial Sequence
  Synthetic
gtaaccgccgcccaattcgtctttccaccgggcaggctat

SEQ ID NO: 7245 - DNA, 41 bp, Artificial Sequence
  Synthetic
gcaaacgaaatgccttgcgcctcgccgcagttgaaaatcga

SEQ ID NO: 7246 - DNA, 38 bp, Artificial Sequence
  Synthetic
ggcaggaacgaagtcggcagatatcggcttggcggttg

SEQ ID NO: 7247 - DNA, 39 bp, Artificial Sequence
  Synthetic
cgatttgctccgcgtgttgcgaaccccatatcggcgaag

SEQ ID NO: 7248 - DNA, 41 bp, Artificial Sequence
  Synthetic
caaccaggtcgaatacggcgggttgggtttgaacgacggag

SEQ ID NO: 7249 - DNA, 39 bp, Artificial Sequence
  Synthetic
cggatgtggcggatgacgggaaaccgaattggcgcaatt

SEQ ID NO: 7250 - DNA, 36 bp, Artificial Sequence
  Synthetic
ctgccgccatatccgggcattcggacgttttgccgc

SEQ ID NO: 7251 - DNA, 39 bp, Artificial Sequence
  Synthetic
aaacagctgatccgtgccgccgatttgaacgtccgctgg

SEQ ID NO: 7252 - DNA, 41 bp, Artificial Sequence
  Synthetic
caatgcatcccgctcggattgagcacaagctgtccgaacat

SEQ ID NO: 7253 - DNA, 40 bp, Artificial Sequence
  Synthetic
tacctgcccaagcaatacccgtggaacttgggtgtcgttg

SEQ ID NO: 7254 - DNA, 40 bp, Artificial Sequence
  Synthetic
cgcccacacgtgccaaatcatacgaccatccgttccaatg

SEQ ID NO: 7255 - DNA, 38 bp, Artificial Sequence
  Synthetic
tcgccccttatgacctcgactaatgccttcgaatgccc

SEQ ID NO: 7256 - DNA, 38 bp, Artificial Sequence
  Synthetic
gacaccgtgcgcgaagaaggtttgggcgtgagtttggc

SEQ ID NO: 7257 - DNA, 36 bp, Artificial Sequence
  Synthetic
cgctcgcccgccacaaactcttccaagtcgcgggac

SEQ ID NO: 7258 - DNA, 40 bp, Artificial Sequence
  Synthetic
ggtacgacttcgatgccgcgcgtttccttcctgaccaacc

SEQ ID NO: 7259 - DNA, 41 bp, Artificial Sequence
  Synthetic
aaccttggtcgcccataacggaacttgtccgccctgaaagg

SEQ ID NO: 7260 - DNA, 39 bp, Artificial Sequence
  Synthetic
ggccgaccgacagtttccagccttcggcaaacagggttt

SEQ ID NO: 7261 - DNA, 39 bp, Artificial Sequence
  Synthetic
ggcaagggcgaggatgatgagatcccatttggcgcaacc

SEQ ID NO: 7262 - DNA, 36 bp, Artificial Sequence
  Synthetic
ctctgcctgccctgctgctcgaaacgctggtgtccg

SEQ ID NO: 7263 - DNA, 40 bp, Artificial Sequence
  Synthetic
cgttaacaccgagcttgtcgcatgatgacggttgccaacc

SEQ ID NO: 7264 - DNA, 37 bp, Artificial Sequence
  Synthetic
cgaggttcgcaccgacttcggcgcaagagctgttggg

SEQ ID NO: 7265 - DNA, 40 bp, Artificial Sequence
  Synthetic
aagccgcacaagcctttccccattttttccagcagggcga

SEQ ID NO: 7266 - DNA, 40 bp, Artificial Sequence
  Synthetic
tgccgcgttgtcgtgaaaagcctgatgtgggacagctcgg

SEQ ID NO: 7267 - DNA, 41 bp, Artificial Sequence
  Synthetic
tcgtctttcaactgcgcttccacgagccggcttatgaggat

SEQ ID NO: 7268 - DNA, 39 bp, Artificial Sequence
  Synthetic
gcgtcgtggtttcagacgtgccacgggtttggcgggtac

SEQ ID NO: 7269 - DNA, 38 bp, Artificial Sequence
  Synthetic
ggacaggcgcggcgaaactagggtaatcaggtgcaggg

SEQ ID NO: 7270 - DNA, 35 bp, Artificial Sequence
  Synthetic
gcaccatcagcatcggggcaaaccctcgccccgct

SEQ ID NO: 7271 - DNA, 38 bp, Artificial Sequence
  Synthetic
cggcacgtcggcaaaacgggaaatcaacctcacgccgc

SEQ ID NO: 7272 - DNA, 39 bp, Artificial Sequence
  Synthetic
gctgtccgcccgagagttcaggatttgggtttggcaagt

SEQ ID NO: 7273 - DNA, 39 bp, Artificial Sequence
  Synthetic
cgcgacacgcctttttcctgtgaccatggaaatggcgga

SEQ ID NO: 7274 - DNA, 35 bp, Artificial Sequence
  Synthetic
ggcggggttgaggctgaacccggcggcgaaaaagc

SEQ ID NO: 7275 - DNA, 38 bp, Artificial Sequence
  Synthetic
cctcctgctgctgcaacaggcaaaccaagctgccgcag

SEQ ID NO: 7276 - DNA, 34 bp, Artificial Sequence
  Synthetic
actgtgccagttcgcgctctctggcgcgcaccaa

SEQ ID NO: 7277 - DNA, 35 bp, Artificial Sequence
  Synthetic
ggcaaaggtgcgggcggtatgccgaacgcctgcac

SEQ ID NO: 7278 - DNA, 42 bp, Artificial Sequence
  Synthetic
tgcgacaggatttgcgacaacggcctgaagcagcaacacatt

SEQ ID NO: 7279 - DNA, 39 bp, Artificial Sequence
  Synthetic
tcctgctgggtttggaaggccgtctgcccgaattggaag

SEQ ID NO: 7280 - DNA, 37 bp, Artificial Sequence
  Synthetic
ctttcggcgcgggggtttccgttttgtgcggcaaccg

SEQ ID NO: 7281 - DNA, 37 bp, Artificial Sequence
  Synthetic
ataccggcctgtccgtgacccattgcccatcgcgccg

SEQ ID NO: 7282 - DNA, 38 bp, Artificial Sequence
  Synthetic
ggcttcgtacagcttatcgcctgtcggcaagcgggttg

SEQ ID NO: 7283 - DNA, 39 bp, Artificial Sequence
  Synthetic
ccgacaatggcaagggcgtttcgtcaaaggggacaaacg

SEQ ID NO: 7284 - DNA, 38 bp, Artificial Sequence
  Synthetic
ccgccgtacaacgaatggctctcggaagggatgccgac

SEQ ID NO: 7285 - DNA, 37 bp, Artificial Sequence
  Synthetic
ccctcgccgctgattgacgtgtccgtagtcgcattgc

SEQ ID NO: 7286 - DNA, 38 bp, Artificial Sequence
  Synthetic
acggcgaaatcgaatgggtcaattcggtcagcggctcg

SEQ ID NO: 7287 - DNA, 38 bp, Artificial Sequence
  Synthetic
gcggcggatgctgttgctacggtttatcctcctcacga

SEQ ID NO: 7288 - DNA, 37 bp, Artificial Sequence
  Synthetic
cgccgtcgcggaatgggaagtctcgacctcaacggcg

SEQ ID NO: 7289 - DNA, 38 bp, Artificial Sequence
  Synthetic
agcggcacttccaatacgcgaaattcaccgccgaagcc

SEQ ID NO: 7290 - DNA, 38 bp, Artificial Sequence
  Synthetic
aggcgagtttgtaggcggtctgaaacacgccaatccgt

SEQ ID NO: 7291 - DNA, 36 bp, Artificial Sequence
  Synthetic
aacgcaccatggtcgggcgctgcacactggaagacg

SEQ ID NO: 7292 - DNA, 37 bp, Artificial Sequence
  Synthetic
agaaacaccgccgctccgacagcgtcttccccgaaat

SEQ ID NO: 7293 - DNA, 39 bp, Artificial Sequence
  Synthetic
cgtccacacgcccaacatcggtgtataacgtgccgctcg

SEQ ID NO: 7294 - DNA, 37 bp, Artificial Sequence
  Synthetic
gcgcggtaagccacgcctagcgacggtgcgaacgata

SEQ ID NO: 7295 - DNA, 39 bp, Artificial Sequence
  Synthetic
tgttgtcggtttagcagcaaggttcaggaaaggcattgc

SEQ ID NO: 7296 - DNA, 40 bp, Artificial Sequence
  Synthetic
gtttgaacacgattgaccgctagatgctttgatgtcggtt

SEQ ID NO: 7297 - DNA, 41 bp, Artificial Sequence
  Synthetic
ccacctacttacattttgcggttttctatccgccgtttgtc

SEQ ID NO: 7298 - DNA, 40 bp, Artificial Sequence
  Synthetic
ggtcgcgccattcagaaaactttcaaggatttccaaacgg

SEQ ID NO: 7299 - DNA, 38 bp, Artificial Sequence
  Synthetic
aaacagcccgaatcacaacctgttccaatgcttcggag

SEQ ID NO: 7300 - DNA, 40 bp, Artificial Sequence
  Synthetic
acacaaagcgagatgcccgacttcggtatctgcaatcggc

SEQ ID NO: 7301 - DNA, 45 bp, Artificial Sequence
  Synthetic
acgtgatgatgctaaatttttgcagaaaataggtaattgccaccg

SEQ ID NO: 7302 - DNA, 43 bp, Artificial Sequence
  Synthetic
ggtcgtcatgaagttttaatgcggcgtctgaaacaaccaacca

SEQ ID NO: 7303 - DNA, 44 bp, Artificial Sequence
  Synthetic
cggaagcgatgcacaatctggttaaatattgctgataagtgcca

SEQ ID NO: 7304 - DNA, 43 bp, Artificial Sequence
  Synthetic
tctgaaagatgatgatgagccaagcatcacatcggcaatcagt

SEQ ID NO: 7305 - DNA, 45 bp, Artificial Sequence
  Synthetic
tgcaactgacctgcaaattttctgacagaaagtgtgtaaaaactc

SEQ ID NO: 7306 - DNA, 43 bp, Artificial Sequence
  Synthetic
gtgcctgtcataatcgcttaatgcctgccataaataaaccgcg

SEQ ID NO: 7307 - DNA, 38 bp, Artificial Sequence
  Synthetic
cgttggaaacgttgtgcgacttaacgggcaactttcct

SEQ ID NO: 7308 - DNA, 39 bp, Artificial Sequence
  Synthetic
catagccagcagcgtccaagcccctggttttggcactgc

SEQ ID NO: 7309 - DNA, 37 bp, Artificial Sequence
  Synthetic
cggttggtcaggcgcacgttacgccgccgttccaaat

SEQ ID NO: 7310 - DNA, 40 bp, Artificial Sequence
  Synthetic
tcgcccaggtaagtctttggaaaggatgatgattgggagg

SEQ ID NO: 7311 - DNA, 38 bp, Artificial Sequence
  Synthetic
acattgacacacggcggcggcttcctcgttcggtatgg

SEQ ID NO: 7312 - DNA, 35 bp, Artificial Sequence
  Synthetic
ccgcagtttaccgccgcagctttccagcgtcaggc

SEQ ID NO: 7313 - DNA, 36 bp, Artificial Sequence
  Synthetic
tttcaccagcccctccgcgtggtcgcgcctttggtg

SEQ ID NO: 7314 - DNA, 38 bp, Artificial Sequence
  Synthetic
gctgggcagcgaatccttcctagcgttggacacccgag

SEQ ID NO: 7315 - DNA, 34 bp, Artificial Sequence
  Synthetic
gccgccggcaaattcccatacctgctcggctcgc

SEQ ID NO: 7316 - DNA, 35 bp, Artificial Sequence
  Synthetic
gcccgatgccgatgttgcgtcgccaaagccgtcgg

SEQ ID NO: 7317 - DNA, 34 bp, Artificial Sequence
  Synthetic
ggctgtgtgcgtcggcatatgatgtcggcgcgcc

SEQ ID NO: 7318 - DNA, 36 bp, Artificial Sequence
  Synthetic
ggcgcggtgcagggttttgttcgtccctgccagcgt

SEQ ID NO: 7319 - DNA, 38 bp, Artificial Sequence
  Synthetic
ctgttgggtaaacgtgccctgcctcgccgtcgaacgtc

SEQ ID NO: 7320 - DNA, 40 bp, Artificial Sequence
  Synthetic
acccgaaaaacagcacggcggggattgtcgtccaatttgc

SEQ ID NO: 7321 - DNA, 37 bp, Artificial Sequence
  Synthetic
gcaatcagcctttgcgtcggctggtgttgttggcggg

SEQ ID NO: 7322 - DNA, 36 bp, Artificial Sequence
  Synthetic
aagcgacagcatccgccggcgtgatgtcgaaaccga

SEQ ID NO: 7323 - DNA, 37 bp, Artificial Sequence
  Synthetic
acaccgatgccgtctgaacctccgcgcctgtaaacgg

SEQ ID NO: 7324 - DNA, 39 bp, Artificial Sequence
  Synthetic
ccacttccgtgggaatgacggtcagacggcatcggtgtc

SEQ ID NO: 7325 - DNA, 42 bp, Artificial Sequence
  Synthetic
cggcggataaatcgaattgcccctgactttgggcatgatggc

SEQ ID NO: 7326 - DNA, 40 bp, Artificial Sequence
  Synthetic
tccaaacgctcgcggatttcatcctgatgctgcccgaaga

SEQ ID NO: 7327 - DNA, 35 bp, Artificial Sequence
  Synthetic
gttcctgcgcggcgaggattgcatcccgttcgccc

SEQ ID NO: 7328 - DNA, 34 bp, Artificial Sequence
  Synthetic
tttacgcgttccgccgcctcgcctcggtcgccat

SEQ ID NO: 7329 - DNA, 37 bp, Artificial Sequence
  Synthetic
cgcgacgaaggcgggttttcagcgacgtatccgaagc

SEQ ID NO: 7330 - DNA, 41 bp, Artificial Sequence
  Synthetic
tgtacgttcccctgccagtgccgatgtccacctacatccgc

SEQ ID NO: 7331 - DNA, 39 bp, Artificial Sequence
  Synthetic
aggctcttcgtaaggcttcgcccacgcgcgttttgccac

SEQ ID NO: 7332 - DNA, 39 bp, Artificial Sequence
  Synthetic
ccccgaccacgcgctctttctgccacagacatcgtgttg

SEQ ID NO: 7333 - DNA, 37 bp, Artificial Sequence
  Synthetic
ccacgccacggaaatcacgcgatacctgcgtcggcac

SEQ ID NO: 7334 - DNA, 35 bp, Artificial Sequence
  Synthetic
aaaacggcggcgcaccacacaggaagcctaccgcc

SEQ ID NO: 7335 - DNA, 41 bp, Artificial Sequence
  Synthetic
cgtatttttggaagcggcggctgaagcgatccaaaaaggct

SEQ ID NO: 7336 - DNA, 42 bp, Artificial Sequence
  Synthetic
agagtgggtaagctggtagccgcgggtagtggcatttttgga

SEQ ID NO: 7337 - DNA, 37 bp, Artificial Sequence
  Synthetic
gacgccgatcaggaacacgcaggacttcacgcccctg

SEQ ID NO: 7338 - DNA, 42 bp, Artificial Sequence
  Synthetic
gcttgaacgcctcgatatccggtcgatattctggcgctcagt

SEQ ID NO: 7339 - DNA, 35 bp, Artificial Sequence
  Synthetic
gcactgcctgcccgcattgatgttcggcccgtgga

SEQ ID NO: 7340 - DNA, 34 bp, Artificial Sequence
  Synthetic
aaccggcagccaaagccacggccgccacaatgtc

SEQ ID NO: 7341 - DNA, 35 bp, Artificial Sequence
  Synthetic
gctgccgcgcccatcaatgtattcggttgcggcgg

SEQ ID NO: 7342 - DNA, 41 bp, Artificial Sequence
  Synthetic
aacggtagagcagggtttggaccattggaagaaaccgcgca

SEQ ID NO: 7343 - DNA, 37 bp, Artificial Sequence
  Synthetic
cggccgggtctgttgggatcgcacgggggaaatcctc

SEQ ID NO: 7344 - DNA, 40 bp, Artificial Sequence
  Synthetic
caggttgcccatcgggtaatttgggtttggaaaactttgt

SEQ ID NO: 7345 - DNA, 40 bp, Artificial Sequence
  Synthetic
cgccgaacatgacatgtcccagtggggcaaagtgtctctt

SEQ ID NO: 7346 - DNA, 39 bp, Artificial Sequence
  Synthetic
acctcgtcggctttgtcggcgagcagtcggatgcggaaa

SEQ ID NO: 7347 - DNA, 38 bp, Artificial Sequence
  Synthetic
cgtttgcttacgggcggatagggaatggaagcaggttt

SEQ ID NO: 7348 - DNA, 35 bp, Artificial Sequence
  Synthetic
acgcactgctttcgcccgaagtccccagcctgtcc

SEQ ID NO: 7349 - DNA, 39 bp, Artificial Sequence
  Synthetic
caaactctccgccatccatccgagttcgcccatcacgcg

SEQ ID NO: 7350 - DNA, 38 bp, Artificial Sequence
  Synthetic
agccgtcgatttctgccgctttgcgtcttgaggcaggg

SEQ ID NO: 7351 - DNA, 38 bp, Artificial Sequence
  Synthetic
agcctgattgccggttatgccagggcggaagtcgggat

SEQ ID NO: 7352 - DNA, 35 bp, Artificial Sequence
  Synthetic
aaagcccttgccaaacgcggcgttttgtccgccgg

SEQ ID NO: 7353 - DNA, 40 bp, Artificial Sequence
  Synthetic
ccgacttggacggtttgctgcgacgtggttcacaccggtg

SEQ ID NO: 7354 - DNA, 40 bp, Artificial Sequence
  Synthetic
cgcttggaaaacacccgcttcaatcagaagcggtagcgca

SEQ ID NO: 7355 - DNA, 36 bp, Artificial Sequence
  Synthetic
aaggcgcacgcaattccgctatagccgcccacgcct

SEQ ID NO: 7356 - DNA, 37 bp, Artificial Sequence
  Synthetic
tgggcggcagtgcgcaatgggatactgcaccagcgtc

SEQ ID NO: 7357 - DNA, 39 bp, Artificial Sequence
  Synthetic
cgcgccaagtccataccggcgccaaacttttcctcgtca

SEQ ID NO: 7358 - DNA, 36 bp, Artificial Sequence
  Synthetic
gtccgcaccatcctgtcgcatcgaacgccacgccct

SEQ ID NO: 7359 - DNA, 38 bp, Artificial Sequence
  Synthetic
tttcccgtccatccatcggcatggcttggcgcgtgatg

SEQ ID NO: 7360 - DNA, 38 bp, Artificial Sequence
  Synthetic
ctgcgcctgcggcaatttgaacccgaagttacccgcaa

SEQ ID NO: 7361 - DNA, 37 bp, Artificial Sequence
  Synthetic
gtgttgctgctggacgaaccgcgtcttccaacgcgcg

SEQ ID NO: 7362 - DNA, 40 bp, Artificial Sequence
  Synthetic
gcatggcgacaatctcgtcccggaacgtgaaacgggtgtc

SEQ ID NO: 7363 - DNA, 38 bp, Artificial Sequence
  Synthetic
attcggcgaacacatcatccggtgtcggtatggcggcg

SEQ ID NO: 7364 - DNA, 42 bp, Artificial Sequence
  Synthetic
atcttgatgtgtttgtgttcgacgagccgcacattatccaag

SEQ ID NO: 7365 - DNA, 35 bp, Artificial Sequence
  Synthetic
ctgcaccgcagcaggatgttttcggcggcggtttg

SEQ ID NO: 7366 - DNA, 39 bp, Artificial Sequence
  Synthetic
aacatcagcgtactcccccccggcatattgcccggccct

SEQ ID NO: 7367 - DNA, 42 bp, Artificial Sequence
  Synthetic
gcgtaaccacttccacatcggtgtccgttgtttttcgtcagg

SEQ ID NO: 7368 - DNA, 41 bp, Artificial Sequence
  Synthetic
gatgacggtccgttgcagtcgtcaaacgactgagccggata

SEQ ID NO: 7369 - DNA, 39 bp, Artificial Sequence
  Synthetic
ctggtgtggttggaagacggcttggccaaaccgataccg

SEQ ID NO: 7370 - DNA, 34 bp, Artificial Sequence
  Synthetic
gcgggcgcgttcgtgtatgcaggcagcgtgatgc

SEQ ID NO: 7371 - DNA, 38 bp, Artificial Sequence
  Synthetic
cgccattttgcgcccgatatgttgcaagggcagggtcg

SEQ ID NO: 7372 - DNA, 37 bp, Artificial Sequence
  Synthetic
accgacgcaggcatcgatgcaggttcacgctgatgcc

SEQ ID NO: 7373 - DNA, 37 bp, Artificial Sequence
  Synthetic
agcttcttcatctcgcgcgtggcctttgagccggtcg

SEQ ID NO: 7374 - DNA, 39 bp, Artificial Sequence
  Synthetic
atgggcatctaccggcgtgacaggctgtcaacgtagagc

SEQ ID NO: 7375 - DNA, 40 bp, Artificial Sequence
  Synthetic
cgacatcggcgatttcgtcctgacgacggcgagctggtat

SEQ ID NO: 7376 - DNA, 40 bp, Artificial Sequence
  Synthetic
ttccgacaccgcaatatgccccgaccatttctgcccttgc

SEQ ID NO: 7377 - DNA, 39 bp, Artificial Sequence
  Synthetic
atcggcgtattcgatcggggctgatgcgcgaatgggaca

SEQ ID NO: 7378 - DNA, 35 bp, Artificial Sequence
  Synthetic
tcttcggcggctttggcggtcgccctgcaactggg

SEQ ID NO: 7379 - DNA, 37 bp, Artificial Sequence
  Synthetic
cgcacgggattcagcggctgggcattcaggcggacaa

SEQ ID NO: 7380 - DNA, 38 bp, Artificial Sequence
  Synthetic
atgcgggcggaggattatgcccggcagggaagttaagc

SEQ ID NO: 7381 - DNA, 37 bp, Artificial Sequence
  Synthetic
agtgctgaacgacacgcgcgttcccagcatctcgcac

SEQ ID NO: 7382 - DNA, 41 bp, Artificial Sequence
  Synthetic
cgcgattgagcaagacgcaaattccgtcgtagtagctttcg

SEQ ID NO: 7383 - DNA, 36 bp, Artificial Sequence
  Synthetic
ggaggcggcggcgtataaggttcggacggcatcgcg

SEQ ID NO: 7384 - DNA, 36 bp, Artificial Sequence
  Synthetic
atccgccgtggtgttgccatcccgttcaagttgccg

SEQ ID NO: 7385 - DNA, 35 bp, Artificial Sequence
  Synthetic
acactgcctgggcaaagcgtgcccaggctttggcg

SEQ ID NO: 7386 - DNA, 35 bp, Artificial Sequence
  Synthetic
gcccgaaactgccgcaccttaccggccgccttcag

SEQ ID NO: 7387 - DNA, 42 bp, Artificial Sequence
  Synthetic
aactgacgggcattttgaatttgctgaaccttggttttgcct

SEQ ID NO: 7388 - DNA, 38 bp, Artificial Sequence
  Synthetic
ccagtccgacccactgcatctcaggcggctttcctgta

SEQ ID NO: 7389 - DNA, 40 bp, Artificial Sequence
  Synthetic
gggcggactgaatatccggtccggttacggtaatgctgcc

SEQ ID NO: 7390 - DNA, 38 bp, Artificial Sequence
  Synthetic
gcacaggcagtccgcgatcctgtattcgcgtacctgcg

SEQ ID NO: 7391 - DNA, 41 bp, Artificial Sequence
  Synthetic
ttcaaccgcgatgtgtccgtagacgcacaactgggatacgg

SEQ ID NO: 7392 - DNA, 38 bp, Artificial Sequence
  Synthetic
cggtacatcacgctgcgctgccgatgccgacatgatgc

SEQ ID NO: 7393 - DNA, 40 bp, Artificial Sequence
  Synthetic
cggtacgcggccttggtagagttcatcggtcaatccacca

SEQ ID NO: 7394 - DNA, 40 bp, Artificial Sequence
  Synthetic
ctgcaggggctcgagtacgccggcaaaaacgtccacttga

SEQ ID NO: 7395 - DNA, 38 bp, Artificial Sequence
  Synthetic
cagtcgtacatcgcaaacacgccgatacggaagcggcg

SEQ ID NO: 7396 - DNA, 38 bp, Artificial Sequence
  Synthetic
cccctcgctgccgttgactggcggatttggaagggaaa

SEQ ID NO: 7397 - DNA, 34 bp, Artificial Sequence
  Synthetic
cagcggcaaatcggcagcgcgtccgcatcgatgc

SEQ ID NO: 7398 - DNA, 43 bp, Artificial Sequence
  Synthetic
cgtaaaaaccggcggcaaacctgttctactttcaatttttcgc

SEQ ID NO: 7399 - DNA, 40 bp, Artificial Sequence
  Synthetic
tttccagcgcggatattctggccgatgtcttgaccgcgct

SEQ ID NO: 7400 - DNA, 40 bp, Artificial Sequence
  Synthetic
aggatggggtgcatacggtagccatcgagccgctggtcta

SEQ ID NO: 7401 - DNA, 41 bp, Artificial Sequence
  Synthetic
ccgatacggtttggagccgttttccgcataagctcggaagc

SEQ ID NO: 7402 - DNA, 37 bp, Artificial Sequence
  Synthetic
tggttcgcaccgctttacgaacgtggcgatgtccagc

SEQ ID NO: 7403 - DNA, 39 bp, Artificial Sequence
  Synthetic
gcgaccataccaaacacccattgatggagcaaaggttgt

SEQ ID NO: 7404 - DNA, 40 bp, Artificial Sequence
  Synthetic
ggcaaagcaaaaacccccgggtaggtcactgccaaacacc

SEQ ID NO: 7405 - DNA, 39 bp, Artificial Sequence
  Synthetic
tttgcctgacccactgcctggcacagtcggacatagacg

SEQ ID NO: 7406 - DNA, 40 bp, Artificial Sequence
  Synthetic
cgaaatgattaaggcgggcgcgaaatcgtgttccgccgcc

SEQ ID NO: 7407 - DNA, 39 bp, Artificial Sequence
  Synthetic
acgttttaaacctcccccgccgaaatcggtcagctgccg

SEQ ID NO: 7408 - DNA, 35 bp, Artificial Sequence
  Synthetic
gccaccctgcaatcgctcgttcgggcagccacagc

SEQ ID NO: 7409 - DNA, 39 bp, Artificial Sequence
  Synthetic
tgcccaagctgatttcgccctttgcgcgaggaaaacagg

SEQ ID NO: 7410 - DNA, 38 bp, Artificial Sequence
  Synthetic
tcatcgaaatcaccgtccccgatcggtgcggatgaggc

SEQ ID NO: 7411 - DNA, 43 bp, Artificial Sequence
  Synthetic
tcgaaataccccaatcggaaccccatagagctttctacggttt

SEQ ID NO: 7412 - DNA, 36 bp, Artificial Sequence
  Synthetic
gcggcagggttgggttcgacgtgttgggtttcgccg

SEQ ID NO: 7413 - DNA, 39 bp, Artificial Sequence
  Synthetic
gtttcgcgcgcctcttgcacaccagcgaagacatcaaca

SEQ ID NO: 7414 - DNA, 36 bp, Artificial Sequence
  Synthetic
aaccgacttcccggcaaacggtcatttcgggcggcg

SEQ ID NO: 7415 - DNA, 38 bp, Artificial Sequence
  Synthetic
gcgtggacggcttcttcaaaggatggcggcgacttggg

SEQ ID NO: 7416 - DNA, 35 bp, Artificial Sequence
  Synthetic
acggcggcgtttttgctgccgttgcgccaataccg

SEQ ID NO: 7417 - DNA, 40 bp, Artificial Sequence
  Synthetic
atgttgtcggcaagctcgcgcacaaaatcccgccctcaaa

SEQ ID NO: 7418 - DNA, 34 bp, Artificial Sequence
  Synthetic
ctttggcgggcgcggtttccgcattgctggcagc

SEQ ID NO: 7419 - DNA, 40 bp, Artificial Sequence
  Synthetic
ttccatacggacgttgtgcgcggcgaaaccctgacctaca

SEQ ID NO: 7420 - DNA, 38 bp, Artificial Sequence
  Synthetic
atcggaagcttgtgcggattcgttgcggcggaagaggc

SEQ ID NO: 7421 - DNA, 39 bp, Artificial Sequence
  Synthetic
acactgggcgagtttgacgactagtagtcgtgccggtcg

SEQ ID NO: 7422 - DNA, 39 bp, Artificial Sequence
  Synthetic
aaacctgcccgccgtcattcggattaaccctttgctcgg

SEQ ID NO: 7423 - DNA, 36 bp, Artificial Sequence
  Synthetic
cttgccgatatgcttgccgcgcccaagccgtgtacg

SEQ ID NO: 7424 - DNA, 34 bp, Artificial Sequence
  Synthetic
gctgctgcaacgcgggttcagccgtagcgttgcg

SEQ ID NO: 7425 - DNA, 37 bp, Artificial Sequence
  Synthetic
ggctgcctgccgacatcctgcatcggcaggcggattt

SEQ ID NO: 7426 - DNA, 40 bp, Artificial Sequence
  Synthetic
aaaaccctgcccatccccagcgatgacgcttttgccgttt

SEQ ID NO: 7427 - DNA, 42 bp, Artificial Sequence
  Synthetic
atgtcaaacgcctctcctccgcccaagaccatacgttcggcg

SEQ ID NO: 7428 - DNA, 37 bp, Artificial Sequence
  Synthetic
cggcgatgatggtgttttcggagggtttgcaggcgca

SEQ ID NO: 7429 - DNA, 37 bp, Artificial Sequence
  Synthetic
ggctggcgactctgctgcacggagagggtcagcgaag

SEQ ID NO: 7430 - DNA, 39 bp, Artificial Sequence
  Synthetic
cacgactgaaccgatgccgttggggttgggtgtggaaat

SEQ ID NO: 7431 - DNA, 39 bp, Artificial Sequence
  Synthetic
cgtcgatttcgcctgcggcacaacttgttcggcgttgac

SEQ ID NO: 7432 - DNA, 42 bp, Artificial Sequence
  Synthetic
ggtggtgtccgaaatgtttgcgccttcctcacgaccagactg

SEQ ID NO: 7433 - DNA, 40 bp, Artificial Sequence
  Synthetic
taatagaggcccgccgcaaagacgggtttcatcctgttgg

SEQ ID NO: 7434 - DNA, 39 bp, Artificial Sequence
  Synthetic
acggcatttgtcatcactggccctgctgtcgctgctggt

SEQ ID NO: 7435 - DNA, 40 bp, Artificial Sequence
  Synthetic
ttacccatcgcaccgacaaacacggcgtggaatggtcttt

SEQ ID NO: 7436 - DNA, 42 bp, Artificial Sequence
  Synthetic
ttgaggccgtctgaaacttcgcggtgaaaatggaagcggtca

SEQ ID NO: 7437 - DNA, 40 bp, Artificial Sequence
  Synthetic
cacgcagaaggtcagcaccataccgttaccgccaaaaacc

SEQ ID NO: 7438 - DNA, 37 bp, Artificial Sequence
  Synthetic
gcccatgtgctgcggttgtgaaagacgcgctggatgc

SEQ ID NO: 7439 - DNA, 38 bp, Artificial Sequence
  Synthetic
ggcggcggtatttatgtccgtcgatgccgaagccgtca

SEQ ID NO: 7440 - DNA, 39 bp, Artificial Sequence
  Synthetic
aaaaccgctcaaaccgcccttcgacaaatcaagcctcgg

SEQ ID NO: 7441 - DNA, 39 bp, Artificial Sequence
  Synthetic
ggtcaacgcaggcggttcgcttgagtccttgaaccagcg

SEQ ID NO: 7442 - DNA, 40 bp, Artificial Sequence
  Synthetic
ccaacacacccaagccacacaggggttttgaaggcggttt

SEQ ID NO: 7443 - DNA, 39 bp, Artificial Sequence
  Synthetic
attcggtgactacggctggatgcaggacaagcagggctg

SEQ ID NO: 7444 - DNA, 36 bp, Artificial Sequence
  Synthetic
caccaacctcaccggctcaatggattcccgcctgcg

SEQ ID NO: 7445 - DNA, 39 bp, Artificial Sequence
  Synthetic
gttccgccacaaacaactgggggtaacttggtgcagggc

SEQ ID NO: 7446 - DNA, 37 bp, Artificial Sequence
  Synthetic
ggcttcccaagtacaggcctctggtcttcgggcgagg

SEQ ID NO: 7447 - DNA, 38 bp, Artificial Sequence
  Synthetic
ggacgtgccgccgatgttatttccaccggattcaccaa

SEQ ID NO: 7448 - DNA, 37 bp, Artificial Sequence
  Synthetic
ccagaagcgtttgcctgtggcagcgccgatgcctacg

SEQ ID NO: 7449 - DNA, 38 bp, Artificial Sequence
  Synthetic
gagggtgaggatttcgtcgtggctgcaacttcgccccg

SEQ ID NO: 7450 - DNA, 37 bp, Artificial Sequence
  Synthetic
ggtcagacgctcgacggtgtaatcgccgccgtcaaag

SEQ ID NO: 7451 - DNA, 37 bp, Artificial Sequence
  Synthetic
gcgtgggcgtatccgtcgttcgcggtagatggtcagc

SEQ ID NO: 7452 - DNA, 35 bp, Artificial Sequence
  Synthetic
gcgcggcaggcatcattcggcgtgggggttgaact

SEQ ID NO: 7453 - DNA, 37 bp, Artificial Sequence
  Synthetic
agcgtgttcaatggcggcgccacttgtttgggcgtgc

SEQ ID NO: 7454 - DNA, 38 bp, Artificial Sequence
  Synthetic
gcacgctcgcgctcttggaggatgacttcgtcgagcga

SEQ ID NO: 7455 - DNA, 37 bp, Artificial Sequence
  Synthetic
gtgccgactgttttgccgacgaaaccgtccgccacgc

SEQ ID NO: 7456 - DNA, 39 bp, Artificial Sequence
  Synthetic
ttccgacaaaatccggctcacagtttgccgtatcgggcg

SEQ ID NO: 7457 - DNA, 35 bp, Artificial Sequence
  Synthetic
cgaagccgacgaacgcaaggttgcggacgcgcgtt

SEQ ID NO: 7458 - DNA, 36 bp, Artificial Sequence
  Synthetic
aaacagccgttgaccgcaacctgcacgttccgcgct

SEQ ID NO: 7459 - DNA, 38 bp, Artificial Sequence
  Synthetic
gacaaactccgcacgtccgcgtgcctgttcccgatgga

SEQ ID NO: 7460 - DNA, 39 bp, Artificial Sequence
  Synthetic
cggcacgcctttcagacgggagatacggtgcggattccg

SEQ ID NO: 7461 - DNA, 37 bp, Artificial Sequence
  Synthetic
cgaaagcagccacgtcgcctcgatgccgcggattacg

SEQ ID NO: 7462 - DNA, 41 bp, Artificial Sequence
  Synthetic
ctgaacgaaaaacgcgccgagaggacgacgttcacatccaa

SEQ ID NO: 7463 - DNA, 38 bp, Artificial Sequence
  Synthetic
acgtggccaaaccgcaccgttttccgctgtctgaacgg

SEQ ID NO: 7464 - DNA, 40 bp, Artificial Sequence
  Synthetic
catcgccacacccgttcagatcataaatcagtgcgtcgcc

SEQ ID NO: 7465 - DNA, 36 bp, Artificial Sequence
  Synthetic
accgcacaaaccggcggagcccatgccttcaatgcg

SEQ ID NO: 7466 - DNA, 35 bp, Artificial Sequence
  Synthetic
cgtgatcgacggaggtgcgacagcttcgggcaggg

SEQ ID NO: 7467 - DNA, 38 bp, Artificial Sequence
  Synthetic
ttggaaaactacgaaggcggcccaaacgtccgccgagc

SEQ ID NO: 7468 - DNA, 40 bp, Artificial Sequence
  Synthetic
cccgaacctcgattacgccggaggttttcagacggcatcg

SEQ ID NO: 7469 - DNA, 38 bp, Artificial Sequence
  Synthetic
atccgccctctttgctgcgccggcgtttatcaggtctt

SEQ ID NO: 7470 - DNA, 41 bp, Artificial Sequence
  Synthetic
gtcgtcgttttgcccacaccggacatgagtgcgaacatcct

SEQ ID NO: 7471 - DNA, 38 bp, Artificial Sequence
  Synthetic
gccattgccgccgccaaaagcatgaaacgccacatcag

SEQ ID NO: 7472 - DNA, 38 bp, Artificial Sequence
  Synthetic
aaaagccgcagccacctcgcatcatggaggggctgatg

SEQ ID NO: 7473 - DNA, 35 bp, Artificial Sequence
  Synthetic
tgctcgaccgccacttcacgttgatgagggcggcg

SEQ ID NO: 7474 - DNA, 39 bp, Artificial Sequence
  Synthetic
caggaaatttccgccctcgtcagttcgtgggcatccagc

SEQ ID NO: 7475 - DNA, 39 bp, Artificial Sequence
  Synthetic
caaacttgggactgaacccggctcagcatgggcatcggc

SEQ ID NO: 7476 - DNA, 35 bp, Artificial Sequence
  Synthetic
aggcgctcggcaaacacaatgcgccttcccagctc

SEQ ID NO: 7477 - DNA, 40 bp, Artificial Sequence
  Synthetic
gcgacacctacaacgacacacaagaaaccggtggcgtaca

SEQ ID NO: 7478 - DNA, 40 bp, Artificial Sequence
  Synthetic
atcgccgacaaaaccaccatcgaggtgtttgccgctttcg

SEQ ID NO: 7479 - DNA, 38 bp, Artificial Sequence
  Synthetic
ccgggcgcggtattctggagccgtatttggtggccatg

SEQ ID NO: 7480 - DNA, 39 bp, Artificial Sequence
  Synthetic
ggacgacgtacgcgccgaagcggtaaatcaagccctgtt

SEQ ID NO: 7481 - DNA, 38 bp, Artificial Sequence
  Synthetic
cgacggcggcgagattgtcgatcaaatcctgcaacacg

SEQ ID NO: 7482 - DNA, 43 bp, Artificial Sequence
  Synthetic
accaataccgtaaatagcctgaagttgcaggggtaaatatccc

SEQ ID NO: 7483 - DNA, 43 bp, Artificial Sequence
  Synthetic
aaatgtcttccactgtcaagcctgtctaagttgcatactcctg

SEQ ID NO: 7484 - DNA, 42 bp, Artificial Sequence
  Synthetic
cgacagcagctttgatttcaggatgcaaccaaatgacgttta

SEQ ID NO: 7485 - DNA, 39 bp, Artificial Sequence
  Synthetic
cgccgcatattttcagacggaatccccaagcaatcaatg

SEQ ID NO: 7486 - DNA, 35 bp, Artificial Sequence
  Synthetic
ccccttcagacggcatcgcatcggcgtgcctgtcg

SEQ ID NO: 7487 - DNA, 40 bp, Artificial Sequence
  Synthetic
gagttcgcggttttcaacgcgactttattgcgacccacgg

SEQ ID NO: 7488 - DNA, 40 bp, Artificial Sequence
  Synthetic
gtaaccagactgtacgggccgctgcaccacttggttgacg

SEQ ID NO: 7489 - DNA, 40 bp, Artificial Sequence
  Synthetic
gggaatcagaagcggtagcgctggaaaacacccgcttcaa

SEQ ID NO: 7490 - DNA, 38 bp, Artificial Sequence
  Synthetic
gccaggccggcggtaatcacaggttacgctggtggtcg

SEQ ID NO: 7491 - DNA, 37 bp, Artificial Sequence
  Synthetic
atatgccccgttccgtcggcgtatcggcgcggcttct

SEQ ID NO: 7492 - DNA, 37 bp, Artificial Sequence
  Synthetic
gcgcgtatcagcacggtgacccgaagacaacggcaac

SEQ ID NO: 7493 - DNA, 39 bp, Artificial Sequence
  Synthetic
tggtcgaaaccgccatttccgcggtgtcttccggcattt

SEQ ID NO: 7494 - DNA, 40 bp, Artificial Sequence
  Synthetic
cgctgaacgccaataccgcccaggtcttggaaatcggggt

SEQ ID NO: 7495 - DNA, 39 bp, Artificial Sequence
  Synthetic
cggcgcgtatccgtttgaaacctctttttccgcagccgc

SEQ ID NO: 7496 - DNA, 36 bp, Artificial Sequence
  Synthetic
acggcgttgaacgaagtcgatggtcgccggaatgca

SEQ ID NO: 7497 - DNA, 35 bp, Artificial Sequence
  Synthetic
gcgtgggcgtgaactaccggtctgccgcccattcg

SEQ ID NO: 7498 - DNA, 41 bp, Artificial Sequence
  Synthetic
aattgttggaatccggcttgtttgaccttttctcaggagca

SEQ ID NO: 7499 - DNA, 37 bp, Artificial Sequence
  Synthetic
cgcgcgggtcttggacgaatccatcaggacggcttgg

SEQ ID NO: 7500 - DNA, 37 bp, Artificial Sequence
  Synthetic
tttgaccaactcggcaagcggtgtttccctgcgcggc

SEQ ID NO: 7501 - DNA, 35 bp, Artificial Sequence
  Synthetic
gcaccagttcgcccgcgatgctcatcgccatcggc

SEQ ID NO: 7502 - DNA, 37 bp, Artificial Sequence
  Synthetic
cgcccgtggcttctttacggcttttggacgacggcgc

SEQ ID NO: 7503 - DNA, 41 bp, Artificial Sequence
  Synthetic
aacgccgccatttccatatcggggtattgccgtgccgtatt

SEQ ID NO: 7504 - DNA, 39 bp, Artificial Sequence
  Synthetic
gcacttctaactccccgcccatttgcattgcgaactgcc

SEQ ID NO: 7505 - DNA, 45 bp, Artificial Sequence
  Synthetic
tttgcaaaggtctcagaatgccgcatatctgaaaagtgtattccg

SEQ ID NO: 7506 - DNA, 41 bp, Artificial Sequence
  Synthetic
agcgtaccgaccgacaatccgcgtgcaaaaatatccgcacc

SEQ ID NO: 7507 - DNA, 37 bp, Artificial Sequence
  Synthetic
cgtattccccgccggagagaacggcggtcagcgattc

SEQ ID NO: 7508 - DNA, 36 bp, Artificial Sequence
  Synthetic
aatacgcgatgcagctcgccggtgttggcgtggagc

SEQ ID NO: 7509 - DNA, 39 bp, Artificial Sequence
  Synthetic
aagctcgccatgcccttcgcggttgtccaaatcgaccag

SEQ ID NO: 7510 - DNA, 41 bp, Artificial Sequence
  Synthetic
ttccaaatcatcctgccccaccgagtgcttcgtaggcgttg

SEQ ID NO: 7511 - DNA, 38 bp, Artificial Sequence
  Synthetic
tgagccgccttctcgacaaccgctgtgtcggagttggc

SEQ ID NO: 7512 - DNA, 36 bp, Artificial Sequence
  Synthetic
attccgccatgccgtccggcttcgacgatggtgcag

SEQ ID NO: 7513 - DNA, 40 bp, Artificial Sequence
  Synthetic
cggcgtaatcgtcggctcgcccagagtttggtttcgacgg

SEQ ID NO: 7514 - DNA, 40 bp, Artificial Sequence
  Synthetic
cgcataccgcagcgaaatgcaaggtggaactgtgcggtaa

SEQ ID NO: 7515 - DNA, 37 bp, Artificial Sequence
  Synthetic
gcagcagcggaacacaaagcagttgccgggcgatgag

SEQ ID NO: 7516 - DNA, 39 bp, Artificial Sequence
  Synthetic
cggttccctaaggcgcccacgcaggcagtacaaatggta

SEQ ID NO: 7517 - DNA, 39 bp, Artificial Sequence
  Synthetic
tgcagaccggcaagctgttattcttgtttgccgccttcg

SEQ ID NO: 7518 - DNA, 35 bp, Artificial Sequence
  Synthetic
gcgggcgaactcgacgcttatcgccaccatcgggc

SEQ ID NO: 7519 - DNA, 39 bp, Artificial Sequence
  Synthetic
atgattttggacatcggcccgaaccggcggctttaagca

SEQ ID NO: 7520 - DNA, 40 bp, Artificial Sequence
  Synthetic
ggttggcgcagaagctgtttgcactacttctcgctgcacg

SEQ ID NO: 7521 - DNA, 40 bp, Artificial Sequence
  Synthetic
agacgacctgattattgcccgctctaccacggcgcagaag

SEQ ID NO: 7522 - DNA, 40 bp, Artificial Sequence
  Synthetic
aagggtttccaacaggctgctgtctgttcgagttggcaca

SEQ ID NO: 7523 - DNA, 39 bp, Artificial Sequence
  Synthetic
cgccgacctgttcgcaaatcgacagtatctggcgcgcct

SEQ ID NO: 7524 - DNA, 43 bp, Artificial Sequence
  Synthetic
aaatgccgtctgaacacattgccataagccgcaatatcaagtt

SEQ ID NO: 7525 - DNA, 38 bp, Artificial Sequence
  Synthetic
cgggctgccgtttaccatagtttcaacagatacgccgc

SEQ ID NO: 7526 - DNA, 43 bp, Artificial Sequence
  Synthetic
gttcaagtttcggctattgcaaatgataaaccaaatctgcggt

SEQ ID NO: 7527 - DNA, 41 bp, Artificial Sequence
  Synthetic
ccgcaacacaagggtatgatttgaagtaaaggctgcaattg

SEQ ID NO: 7528 - DNA, 39 bp, Artificial Sequence
  Synthetic
ccgcagttttgccctgtcctgtaaaaacctgccccaccc

SEQ ID NO: 7529 - DNA, 37 bp, Artificial Sequence
  Synthetic
tatcgacatcgggcacgctggaagggacggcggaact

SEQ ID NO: 7530 - DNA, 38 bp, Artificial Sequence
  Synthetic
gtaatcctgccgccgagcgcgatttgggcatcggcaac

SEQ ID NO: 7531 - DNA, 35 bp, Artificial Sequence
  Synthetic
ccgggcaatacggcatcgccctacgggcacaacgc

SEQ ID NO: 7532 - DNA, 38 bp, Artificial Sequence
  Synthetic
gcatcgggcggcttgtgtagacatccgttcgctcgatt

SEQ ID NO: 7533 - DNA, 40 bp, Artificial Sequence
  Synthetic
cgagatagccttgcgcggtcgtgttcgacaccgtcaacat

SEQ ID NO: 7534 - DNA, 40 bp, Artificial Sequence
  Synthetic
ggtacagcccgaagcgcaaagcagtatgtttcctcggctg

SEQ ID NO: 7535 - DNA, 38 bp, Artificial Sequence
  Synthetic
ggcagaggtgcggattagcgcgacggcaaaatcgggac

SEQ ID NO: 7536 - DNA, 38 bp, Artificial Sequence
  Synthetic
ttttccggccttctgcgagaaaggtatgtgcgcgaccg

SEQ ID NO: 7537 - DNA, 35 bp, Artificial Sequence
  Synthetic
agatgaggaggcagcgggccttctccggcggttgc

SEQ ID NO: 7538 - DNA, 43 bp, Artificial Sequence
  Synthetic
ggcatattaacaacatcaaccctgcttgtagctgcaatgaacg

SEQ ID NO: 7539 - DNA, 39 bp, Artificial Sequence
  Synthetic
cgatggggaggtttggaagctagtctgccaccctatccg

SEQ ID NO: 7540 - DNA, 39 bp, Artificial Sequence
  Synthetic
cgtaacctacgccgcccagctctatgatggcgggcatag

SEQ ID NO: 7541 - DNA, 36 bp, Artificial Sequence
  Synthetic
cggcatcttgtccgacggccaacacaccgacagccc

SEQ ID NO: 7542 - DNA, 35 bp, Artificial Sequence
  Synthetic
ggtaggaacgggcggtggtgcgcgcaaaccgatga

SEQ ID NO: 7543 - DNA, 36 bp, Artificial Sequence
  Synthetic
gcggatgggggacgttgagcgacggcggcaaaatcg

SEQ ID NO: 7544 - DNA, 37 bp, Artificial Sequence
  Synthetic
gcaaaggcggcttgggcaaattgttttggggcgcggt

SEQ ID NO: 7545 - DNA, 38 bp, Artificial Sequence
  Synthetic
tgattaccgccgtctccgccatgcagggtggtgaaggg

SEQ ID NO: 7546 - DNA, 39 bp, Artificial Sequence
  Synthetic
ctatcacgcaccggtctgctggcgggattgacggtttcg

SEQ ID NO: 7547 - DNA, 42 bp, Artificial Sequence
  Synthetic
ggcaggcgtatgcgaaagatgtcaagttcgggcgtaaccatc

SEQ ID NO: 7548 - DNA, 38 bp, Artificial Sequence
  Synthetic
ccatgcccagtttgcggatgcgcccgccaaagttaccg

SEQ ID NO: 7549 - DNA, 38 bp, Artificial Sequence
  Synthetic
gccggaagcggcttggtacggcctgttccaaaacgatt

SEQ ID NO: 7550 - DNA, 38 bp, Artificial Sequence
  Synthetic
catcggcaagattttcggtcgcaattgctgctggcgcg

SEQ ID NO: 7551 - DNA, 38 bp, Artificial Sequence
  Synthetic
gcagcagatgccggcgcatacagccgccaatagccgtc

SEQ ID NO: 7552 - DNA, 38 bp, Artificial Sequence
  Synthetic
gcctgttgcggcacttgctgatttgcgtttccaaaccc

SEQ ID NO: 7553 - DNA, 37 bp, Artificial Sequence
  Synthetic
cgaagcggcgggattcggaacttgagccggctgttcc

SEQ ID NO: 7554 - DNA, 40 bp, Artificial Sequence
  Synthetic
ttgtcgaacactttgccgaagcaaccgtcatacgcgacac

SEQ ID NO: 7555 - DNA, 38 bp, Artificial Sequence
  Synthetic
aacaaccgtccgatttggtgcgcccgaatccgcgctca

SEQ ID NO: 7556 - DNA, 38 bp, Artificial Sequence
  Synthetic
gcaatacgccgtcaaaaccccacgggcttgggtttgcc

SEQ ID NO: 7557 - DNA, 36 bp, Artificial Sequence
  Synthetic
gacagggcgcggtcgagttcgccggtttgcgtttgg

SEQ ID NO: 7558 - DNA, 39 bp, Artificial Sequence
  Synthetic
gcggttttcgcgccgtagcagacctgcaagcccaatacg

SEQ ID NO: 7559 - DNA, 39 bp, Artificial Sequence
  Synthetic
tcatcgtgagcgtgttcagacgtgggcaggcagagcatt

SEQ ID NO: 7560 - DNA, 35 bp, Artificial Sequence
  Synthetic
ggcatgacggcggacagttgcccgccgtttcagac

SEQ ID NO: 7561 - DNA, 40 bp, Artificial Sequence
  Synthetic
atttcggcaatcgataccgccgctccttcatcttccgccg

SEQ ID NO: 7562 - DNA, 38 bp, Artificial Sequence
  Synthetic
gcaaacacgccgccgacatgtttggcgatgacggtaac

SEQ ID NO: 7563 - DNA, 39 bp, Artificial Sequence
  Synthetic
cgaactttccggcggtcagaaccggattcaggcacaggg

SEQ ID NO: 7564 - DNA, 40 bp, Artificial Sequence
  Synthetic
gtcgaattcgtcctgaccgaggggtcgactttgccggaac

SEQ ID NO: 7565 - DNA, 40 bp, Artificial Sequence
  Synthetic
gttggcgatgctggtggtggagtggaaaaggacgaaccga

SEQ ID NO: 7566 - DNA, 35 bp, Artificial Sequence
  Synthetic
ccgcgtccgattccacgcttatggtcgtgccgccc

SEQ ID NO: 7567 - DNA, 37 bp, Artificial Sequence
  Synthetic
ggttcgcccgcttccagcacatcgtcggctgcacaca

SEQ ID NO: 7568 - DNA, 34 bp, Artificial Sequence
  Synthetic
tggcagccctctcgcctgaatggcgcggcggtaa

SEQ ID NO: 7569 - DNA, 40 bp, Artificial Sequence
  Synthetic
accttggttgccgcgactttcagtttggcatcagggtctt

SEQ ID NO: 7570 - DNA, 36 bp, Artificial Sequence
  Synthetic
aacggcgtggcgcaaggtcattttgccccgatgcgg

SEQ ID NO: 7571 - DNA, 40 bp, Artificial Sequence
  Synthetic
tttggcagaggcgctcaaagatgcttctcaatccggcaac

SEQ ID NO: 7572 - DNA, 37 bp, Artificial Sequence
  Synthetic
ccggcatcggcgatctcatctaacccaagccgacgcg

SEQ ID NO: 7573 - DNA, 42 bp, Artificial Sequence
  Synthetic
gtgccgtagtggttttcgagcagccaaacgggttttccttac

SEQ ID NO: 7574 - DNA, 39 bp, Artificial Sequence
  Synthetic
ggaagggcggcttcttctgccctttatatacgcggccgg

SEQ ID NO: 7575 - DNA, 39 bp, Artificial Sequence
  Synthetic
atgcgctgaaaacacccccgatggcgtagaacggtgtga

SEQ ID NO: 7576 - DNA, 47 bp, Artificial Sequence
  Synthetic
ggcatcgggaacttaatcaggggtttcagaccttttcctaattcaat

SEQ ID NO: 7577 - DNA, 37 bp, Artificial Sequence
  Synthetic
gcccgaagatttggtgtgccgtttcctgccctgccgc

SEQ ID NO: 7578 - DNA, 38 bp, Artificial Sequence
  Synthetic
atgagtatcgtgctgcacggcgtcaggtgggcgcaacc

SEQ ID NO: 7579 - DNA, 35 bp, Artificial Sequence
  Synthetic
ggccagccgtccgcattcaactgggaggcaggctg

SEQ ID NO: 7580 - DNA, 40 bp, Artificial Sequence
  Synthetic
cgacaacgccctgagcaagggcttaagcggaattggtcgc

SEQ ID NO: 7581 - DNA, 38 bp, Artificial Sequence
  Synthetic
tcgtctttggcggcgtcggcgtgaaaacggttcggtaa

SEQ ID NO: 7582 - DNA, 36 bp, Artificial Sequence
  Synthetic
gcgaggtaggcggtcagcacgaacgcctgcacgaag

SEQ ID NO: 7583 - DNA, 37 bp, Artificial Sequence
  Synthetic
cgtcggtgttgacggcaatgccggcctcaaacgcctc

SEQ ID NO: 7584 - DNA, 36 bp, Artificial Sequence
  Synthetic
gccgccggcattgtcgatagcccttgtccgcatcag

SEQ ID NO: 7585 - DNA, 38 bp, Artificial Sequence
  Synthetic
cggaaggattgcaggcttttgggccgcacctgtccatg

SEQ ID NO: 7586 - DNA, 36 bp, Artificial Sequence
  Synthetic
tcaaacagagcccgacgtgggcggcagccaaaaccc

SEQ ID NO: 7587 - DNA, 36 bp, Artificial Sequence
  Synthetic
gcgtgaaggtcgccaaaggcccgccgttgtgcgaaa

SEQ ID NO: 7588 - DNA, 47 bp, Artificial Sequence
  Synthetic
cgttttcctgatgttccgtcttgataataaaaattctggcaaccatc

SEQ ID NO: 7589 - DNA, 37 bp, Artificial Sequence
  Synthetic
cgggctgtccgtccgtatcgaatcccgaacccgaccc

SEQ ID NO: 7590 - DNA, 37 bp, Artificial Sequence
  Synthetic
attcatcgcggcaggttgacggaacgacgccggcaac

SEQ ID NO: 7591 - DNA, 38 bp, Artificial Sequence
  Synthetic
caggcctcaacccatcctgcgttttcctggatggcggc

SEQ ID NO: 7592 - DNA, 38 bp, Artificial Sequence
  Synthetic
aagctccctgccgtggattttgactgacccgccgcttc

SEQ ID NO: 7593 - DNA, 38 bp, Artificial Sequence
  Synthetic
cggggacgcggatttcagacgcccttaccgcccatcaa

SEQ ID NO: 7594 - DNA, 39 bp, Artificial Sequence
  Synthetic
gttccgcgccgatgatgcgatcctcaactggtcgctcaa

SEQ ID NO: 7595 - DNA, 39 bp, Artificial Sequence
  Synthetic
tgatgttgacggcgcagtggcagcaccacaaaccagacc

SEQ ID NO: 7596 - DNA, 38 bp, Artificial Sequence
  Synthetic
gatgacgggcgcgacgtgtttggaaaaacaccgcccga

SEQ ID NO: 7597 - DNA, 38 bp, Artificial Sequence
  Synthetic
aaagacggcttcatgcgtgcgtcttccaaccctccgcc

SEQ ID NO: 7598 - DNA, 36 bp, Artificial Sequence
  Synthetic
gaagcccagtccgacgacgtaagctcgccgttgccg

SEQ ID NO: 7599 - DNA, 39 bp, Artificial Sequence
  Synthetic
cgtatggcgaggcggtcgacttgggctacctgcaccata

SEQ ID NO: 7600 - DNA, 38 bp, Artificial Sequence
  Synthetic
gcgaaattttgccgcctactgccatcttcgtcggcggc

SEQ ID NO: 7601 - DNA, 40 bp, Artificial Sequence
  Synthetic
gcctgcctgaaaggttcggacaccggtatggaaacactgc

SEQ ID NO: 7602 - DNA, 39 bp, Artificial Sequence
  Synthetic
gacgatgccgcgctgctgtatggttgccgagattgtcct

SEQ ID NO: 7603 - DNA, 36 bp, Artificial Sequence
  Synthetic
gtagccgcgtttgagggcgcaacaggcgcaaaacgg

SEQ ID NO: 7604 - DNA, 36 bp, Artificial Sequence
  Synthetic
tcgccttcggcatagggacactgcggcaagaccacc

SEQ ID NO: 7605 - DNA, 41 bp, Artificial Sequence
  Synthetic
cccgcgccggtaatcagaatcgttggaaaaaaccgtggacg

SEQ ID NO: 7606 - DNA, 41 bp, Artificial Sequence
  Synthetic
actttgccgagcatatagccgctgattttgggtctgccgac

SEQ ID NO: 7607 - DNA, 39 bp, Artificial Sequence
  Synthetic
cgcgaagggcagtacgtccgtcatgctgcccatcgtatt

SEQ ID NO: 7608 - DNA, 38 bp, Artificial Sequence
  Synthetic
atgccgtatcacgttccccctccgccgccaaagtcaga

SEQ ID NO: 7609 - DNA, 35 bp, Artificial Sequence
  Synthetic
gacgccgcctacgcactcaacggcattcacgcccg

SEQ ID NO: 7610 - DNA, 38 bp, Artificial Sequence
  Synthetic
acaccttggctcgttccaaaggcaataagacgggacat

SEQ ID NO: 7611 - DNA, 38 bp, Artificial Sequence
  Synthetic
atcaggtaggcaaacaccgccatgctgctggggcggta

SEQ ID NO: 7612 - DNA, 39 bp, Artificial Sequence
  Synthetic
ccaaggcgaggacggtgcaccccattttggagacaccct

SEQ ID NO: 7613 - DNA, 38 bp, Artificial Sequence
  Synthetic
cgtcatacaggcgcgggctgaacactggagcttcagcg

SEQ ID NO: 7614 - DNA, 37 bp, Artificial Sequence
  Synthetic
ttccgcgctgcaacacgctcatgcagtcggtcgtcag

SEQ ID NO: 7615 - DNA, 35 bp, Artificial Sequence
  Synthetic
ccgttaccggggttctgcgaccggctcgaaccagc

SEQ ID NO: 7616 - DNA, 39 bp, Artificial Sequence
  Synthetic
acctgaacgccttgtcctccaggtaaacacgacgcaggc

SEQ ID NO: 7617 - DNA, 35 bp, Artificial Sequence
  Synthetic
gttggcgggttggatgggcttccctctgaccggcc

SEQ ID NO: 7618 - DNA, 34 bp, Artificial Sequence
  Synthetic
gccgcatttcaaagcggcggcgcagtgccgaaca

SEQ ID NO: 7619 - DNA, 39 bp, Artificial Sequence
  Synthetic
cgaacctgccgatgccgtattgcatcggcaactcggcac

SEQ ID NO: 7620 - DNA, 35 bp, Artificial Sequence
  Synthetic
gtttgttggcggtaggcgcaagcggcatccgggac

SEQ ID NO: 7621 - DNA, 38 bp, Artificial Sequence
  Synthetic
cgcgcgttccgaacccaagatccgaaatacaccaccgc

SEQ ID NO: 7622 - DNA, 37 bp, Artificial Sequence
  Synthetic
gatgccggaaccgacaccgccgcatccgtttgaagcc

SEQ ID NO: 7623 - DNA, 40 bp, Artificial Sequence
  Synthetic
cgccttcaaaccccaagccggctttatacgggcagcatcg

SEQ ID NO: 7624 - DNA, 36 bp, Artificial Sequence
  Synthetic
gcgcggcgttcgtcttgtaccgaaccgatgaaaggc

SEQ ID NO: 7625 - DNA, 35 bp, Artificial Sequence
  Synthetic
gcggggaggccgtctgaattttgccgactgcgccg

SEQ ID NO: 7626 - DNA, 37 bp, Artificial Sequence
  Synthetic
cgctcttcaatcagcgtgcccgcgctacggcaaccct

SEQ ID NO: 7627 - DNA, 34 bp, Artificial Sequence
  Synthetic
ggcatgcgccgcattgtgtctgcggcggttttgc

SEQ ID NO: 7628 - DNA, 36 bp, Artificial Sequence
  Synthetic
tggcccggcgtgttttcccggcggtatagacggcag

SEQ ID NO: 7629 - DNA, 38 bp, Artificial Sequence
  Synthetic
cctgggctttgctgatgacgcgggtgcgtggcttttcg

SEQ ID NO: 7630 - DNA, 35 bp, Artificial Sequence
  Synthetic
ggcggccagcagcttgtctgctcaggcggaatggc

SEQ ID NO: 7631 - DNA, 35 bp, Artificial Sequence
  Synthetic
gttgcgcgcgtctgtggtgcaacgatgcctggagg

SEQ ID NO: 7632 - DNA, 42 bp, Artificial Sequence
  Synthetic
agtcatcgtcttcatcgtcgccttgccggtgctttgaatcag

SEQ ID NO: 7633 - DNA, 37 bp, Artificial Sequence
  Synthetic
ccagccgccgcctttcctttcggcgacaacctcttga

SEQ ID NO: 7634 - DNA, 35 bp, Artificial Sequence
  Synthetic
gccgtctgaacgcgaccgtcattcgaccagcgcgg

SEQ ID NO: 7635 - DNA, 41 bp, Artificial Sequence
  Synthetic
tcggtttgattcctaccggcgacaaaatacccaaggcggcg

SEQ ID NO: 7636 - DNA, 40 bp, Artificial Sequence
  Synthetic
cctgctgaaaaaagccgatgccttcgtcctgttgcagcag

SEQ ID NO: 7637 - DNA, 38 bp, Artificial Sequence
  Synthetic
gtcgccgtcagccattattgcccccaaacggtgcagtc

SEQ ID NO: 7638 - DNA, 39 bp, Artificial Sequence
  Synthetic
ttgccgcttctgatcgattgccagccgactgttcctgcc

SEQ ID NO: 7639 - DNA, 38 bp, Artificial Sequence
  Synthetic
taccgcgaacgcatgagggcccgaccgcttcatctgcg

SEQ ID NO: 7640 - DNA, 38 bp, Artificial Sequence
  Synthetic
agggcgcgggtcatatcggcggggcattaccgtcaact

SEQ ID NO: 7641 - DNA, 35 bp, Artificial Sequence
  Synthetic
ggcaatggcgacgcgttggcccatcggatcgaacg

SEQ ID NO: 7642 - DNA, 40 bp, Artificial Sequence
  Synthetic
ggcgaggaacatcgtctgcacaaatgtacgcccccatcaa

SEQ ID NO: 7643 - DNA, 38 bp, Artificial Sequence
  Synthetic
ggcgatgaaggcggcaagagccctgattgccattttcg

SEQ ID NO: 7644 - DNA, 36 bp, Artificial Sequence
  Synthetic
gcagccatggtgcgtccgaactcgcccggacaagtc

SEQ ID NO: 7645 - DNA, 41 bp, Artificial Sequence
  Synthetic
catgagttgtgccagttccgccgtccgccggaaattcgaca

SEQ ID NO: 7646 - DNA, 38 bp, Artificial Sequence
  Synthetic
tggagacaacatgtagcgcaccatatctcgcacacagc

SEQ ID NO: 7647 - DNA, 46 bp, Artificial Sequence
  Synthetic
gacagttggtgtcctaattgtaacaaatggcaaaagatgtagcaag

SEQ ID NO: 7648 - DNA, 46 bp, Artificial Sequence
  Synthetic
aaaggaggttattgtttgaggacactgaacattatggttttcagct

SEQ ID NO: 7649 - DNA, 48 bp, Artificial Sequence
  Synthetic
acagctgacgttaattagccacccccattgaatcattttagaaagttc

SEQ ID NO: 7650 - DNA, 45 bp, Artificial Sequence
  Synthetic
atcccttgcgaaatctaaatatgcagcaaattgatcagagcttgt

SEQ ID NO: 7651 - DNA, 44 bp, Artificial Sequence
  Synthetic
tttggagtgtgcattacaaaaatgacagacctcctagaagagct

SEQ ID NO: 7652 - DNA, 42 bp, Artificial Sequence
  Synthetic
aacctaaacttgggtcccctggtgtttcttcttgtgtaaccc

SEQ ID NO: 7653 - DNA, 42 bp, Artificial Sequence
  Synthetic
tattgcagtgattgatacaccaggacactgcgtctattgtgg

SEQ ID NO: 7654 - DNA, 43 bp, Artificial Sequence
  Synthetic
acaagacaggttttaaatgtcaccggtgtcaaaggcgggattt

SEQ ID NO: 7655 - DNA, 47 bp, Artificial Sequence
  Synthetic
accaccagcatttaatgtaaaagtgtctgttacaggatgatacacta

SEQ ID NO: 7656 - DNA, 44 bp, Artificial Sequence
  Synthetic
agtaggggttcaaattgatagaggtcgatccagtaaagggtgac

SEQ ID NO: 7657 - DNA, 43 bp, Artificial Sequence
  Synthetic
aaggagatagtttacctacagacccgaggagtaccatcagctg

SEQ ID NO: 7658 - DNA, 49 bp, Artificial Sequence
  Synthetic
acttgatgagtgggaattagcattttatctgtaagtatcttccaaaccc

SEQ ID NO: 7659 - DNA, 47 bp, Artificial Sequence
  Synthetic
gacctatgtgtaagtgaccaatagcaggaaacagaatgattcaacat

SEQ ID NO: 7660 - DNA, 50 bp, Artificial Sequence
  Synthetic
aaatcgaaacaaacaaatttgcagcgaaaatctgaatacatgaagcatac

SEQ ID NO: 7661 - DNA, 44 bp, Artificial Sequence
  Synthetic
cgagattggagtgacaaggagagtggatgtgtgtattctcagat

SEQ ID NO: 7662 - DNA, 39 bp, Artificial Sequence
  Synthetic
cggtccaaattcctgctgatgtattccctccccttcgtg

SEQ ID NO: 7663 - DNA, 43 bp, Artificial Sequence
  Synthetic
aaagtgggcacttggtgagaatgtctctacagttgtcaaagtc

SEQ ID NO: 7664 - DNA, 48 bp, Artificial Sequence
  Synthetic
aggaattacttcacagcagaggtatacccccttcattatatattctgt

SEQ ID NO: 7665 - DNA, 42 bp, Artificial Sequence
  Synthetic
gcatggagttttctctcactgacaggacacagtacttctccc

SEQ ID NO: 7666 - DNA, 43 bp, Artificial Sequence
  Synthetic
tgagaataaatcagaaacatggcccctgcagaccttcccaatg

SEQ ID NO: 7667 - DNA, 38 bp, Artificial Sequence
  Synthetic
agcgataggaggggatgctaggctagccccgctgctct

SEQ ID NO: 7668 - DNA, 37 bp, Artificial Sequence
  Synthetic
tgggatgctcctcccgattcctcccgccattcctggg

SEQ ID NO: 7669 - DNA, 38 bp, Artificial Sequence
  Synthetic
tccttcggatgcccaggtcgtttcctcttcgggtcggc

SEQ ID NO: 7670 - DNA, 36 bp, Artificial Sequence
  Synthetic
cgctcccctcgttccacctaagaatagccggcccgc

SEQ ID NO: 7671 - DNA, 39 bp, Artificial Sequence
  Synthetic
aaggcctcttcctaggtccggaaggatggagagggggct

SEQ ID NO: 7672 - DNA, 39 bp, Artificial Sequence
  Synthetic
agagaacgacccagaacgctacacactgtacctgcaaat

SEQ ID NO: 7673 - DNA, 42 bp, Artificial Sequence
  Synthetic
attggggccagaagaaaaacaaagccctgctatttcgtgaaa

SEQ ID NO: 7674 - DNA, 43 bp, Artificial Sequence
  Synthetic
ttggactatgaacaatttgacagcttcttgtccagcttgtctg

SEQ ID NO: 7675 - DNA, 43 bp, Artificial Sequence
  Synthetic
ggggtgtacagggtggttttcattgtctgtttcatcatctgat

SEQ ID NO: 7676 - DNA, 40 bp, Artificial Sequence
  Synthetic
actaggtagtcagaacagccctgtattctgctgactgtcg

SEQ ID NO: 7677 - DNA, 38 bp, Artificial Sequence
  Synthetic
ggaggacgcggacaaagaaatattttctcctggcacgc

SEQ ID NO: 7678 - DNA, 42 bp, Artificial Sequence
  Synthetic
acagaagcttggacaatgcgaacaatgtttaggttctgtcat

SEQ ID NO: 7679 - DNA, 39 bp, Artificial Sequence
  Synthetic
tggactttaaacaagaggcggaccacacacatgtacagc

SEQ ID NO: 7680 - DNA, 39 bp, Artificial Sequence
  Synthetic
ccactgtcaccacagctgccggcctccacttgtactgtg

SEQ ID NO: 7681 - DNA, 41 bp, Artificial Sequence
  Synthetic
acctacatttagtggtggcaatggatgtccaacacagcagg

SEQ ID NO: 7682 - DNA, 44 bp, Artificial Sequence
  Synthetic
cgcaaaggtactgtacgctatagttccactacgtgttttcatag

SEQ ID NO: 7683 - DNA, 47 bp, Artificial Sequence
  Synthetic
taccagttccaagatatgcctccgtaacattggtagtggaagtatta

SEQ ID NO: 7684 - DNA, 38 bp, Artificial Sequence
  Synthetic
tttcagatggctttgtggcgttgacaacccgagacaca

SEQ ID NO: 7685 - DNA, 39 bp, Artificial Sequence
  Synthetic
tggattgcctgatccacagtacttcaacaccaacacagg

SEQ ID NO: 7686 - DNA, 41 bp, Artificial Sequence
  Synthetic
gggattgcccccccttagaagtatcaatcatatcgccatcc

SEQ ID NO: 7687 - DNA, 38 bp, Artificial Sequence
  Synthetic
gggatgctatacccaccactagaagatgtagggggctc

SEQ ID NO: 7688 - DNA, 46 bp, Artificial Sequence
  Synthetic
acaactgtatgtaatgtaaaggcgtaacacataaccatgcatacat

SEQ ID NO: 7689 - DNA, 40 bp, Artificial Sequence
  Synthetic
ccaccttagtatgtaggcggcggggccatccaagtcaagc

SEQ ID NO: 7690 - DNA, 38 bp, Artificial Sequence
  Synthetic
ttgcgaggggatctgggagtgcgcaggtacaggacttg

SEQ ID NO: 7691 - DNA, 42 bp, Artificial Sequence
  Synthetic
tggagtcaactgggctactggtcaggccaaagatagcagaca

SEQ ID NO: 7692 - DNA, 40 bp, Artificial Sequence
  Synthetic
acacccttccaattggactggccacaggtcacaagagcgc

SEQ ID NO: 7693 - DNA, 43 bp, Artificial Sequence
  Synthetic
cgaggggatgtatggttaaattcaaatagtgcagtacgatggc

SEQ ID NO: 7694 - DNA, 39 bp, Artificial Sequence
  Synthetic
gtaccccacctgtggtacgtcctgtggctaggtctttca

SEQ ID NO: 7695 - DNA, 42 bp, Artificial Sequence
  Synthetic
tggagggctgacaataccaccttgagcaaagaagccaaaacg

SEQ ID NO: 7696 - DNA, 48 bp, Artificial Sequence
  Synthetic
gttagggcccatagaatgttggtcactaagaggaaaaacttaagaaca

SEQ ID NO: 7697 - DNA, 38 bp, Artificial Sequence
  Synthetic
cgccagatgggtgggccattgccacgttcagagagaca

SEQ ID NO: 7698 - DNA, 40 bp, Artificial Sequence
  Synthetic
gtcccttactcggtgctcttgcaccaatgaccccagtcgt

SEQ ID NO: 7699 - DNA, 43 bp, Artificial Sequence
  Synthetic
tcttacatgcaggagaagtatgaggtcgcgtgcatgtactttg

SEQ ID NO: 7700 - DNA, 48 bp, Artificial Sequence
  Synthetic
acatgccaacataactgagattcaatcttcagattttcctccttaatc

SEQ ID NO: 7701 - DNA, 38 bp, Artificial Sequence
  Synthetic
caacctgggttacctgcgatatgaaggttcggggttga

SEQ ID NO: 7702 - DNA, 43 bp, Artificial Sequence
  Synthetic
cctcatgcagctacaatccttgggattgtcaggtaaagtgact

SEQ ID NO: 7703 - DNA, 42 bp, Artificial Sequence
  Synthetic
gtctactccgcgttcaatccggccctgctgttgtcaaagcaa

SEQ ID NO: 7704 - DNA, 47 bp, Artificial Sequence
  Synthetic
ggactagtcttgtcgtcaattatggtgtgatctcccattttctcata

SEQ ID NO: 7705 - DNA, 40 bp, Artificial Sequence
  Synthetic
ccatgccgatgcccctgttgtgcacatccaattgcagtga

SEQ ID NO: 7706 - DNA, 39 bp, Artificial Sequence
  Synthetic
caactcgggccatcactagtgttctaagctccgcatccc

SEQ ID NO: 7707 - DNA, 41 bp, Artificial Sequence
  Synthetic
ttgcagaagtgtgtcgaggcaagacctcctcctttggaact

SEQ ID NO: 7708 - DNA, 42 bp, Artificial Sequence
  Synthetic
aactcagtgaccaacaccgagcgtcctccagcgtataactgc

SEQ ID NO: 7709 - DNA, 41 bp, Artificial Sequence
  Synthetic
tgcagacaaacaagcaatgcgttcttgtggtgcacccatca

SEQ ID NO: 7710 - DNA, 41 bp, Artificial Sequence
  Synthetic
gcatcattgctggtgtgcacggatctcagcgttggtgtagc

SEQ ID NO: 7711 - DNA, 43 bp, Artificial Sequence
  Synthetic
attgtgatgtttactccccggaacttctgcaatcttctctgtg

SEQ ID NO: 7712 - DNA, 40 bp, Artificial Sequence
  Synthetic
tggtctgaaggggatgacgtcctcctcacccacccgagac

SEQ ID NO: 7713 - DNA, 46 bp, Artificial Sequence
  Synthetic
gaattcaactcccccccaaacgatacactatctctgttatgtttct

SEQ ID NO: 7714 - DNA, 39 bp, Artificial Sequence
  Synthetic
tggggacatctgggtgacaaccaagggcaaattggtaac

SEQ ID NO: 7715 - DNA, 43 bp, Artificial Sequence
  Synthetic
aacgggggatgataaaaatgcaaatactatctacaagcctccc

SEQ ID NO: 7716 - DNA, 42 bp, Artificial Sequence
  Synthetic
atcctggtgtcagatgtgtcttgtttatatctacgatgggcc

SEQ ID NO: 7717 - DNA, 42 bp, Artificial Sequence
  Synthetic
aatgacgtgtggatgggaagatcaatgactttgaaggtttca

SEQ ID NO: 7718 - DNA, 38 bp, Artificial Sequence
  Synthetic
agaagtcagtggcgaggttttgatatcaggttgtgccc

SEQ ID NO: 7719 - DNA, 40 bp, Artificial Sequence
  Synthetic
ggacagctttcctttgtgtgcttagttaggtctgccatgg

SEQ ID NO: 7720 - DNA, 43 bp, Artificial Sequence
  Synthetic
ggaattccctggcgttttacagctctgatattgctttattgca

SEQ ID NO: 7721 - DNA, 49 bp, Artificial Sequence
  Synthetic
agctgatactcagataagtgtaccccacagcttttctattactacatct

SEQ ID NO: 7722 - DNA, 48 bp, Artificial Sequence
  Synthetic
ttgcttgttggcaatatatggatgtcaatagatacagcattaccatct

SEQ ID NO: 7723 - DNA, 40 bp, Artificial Sequence
  Synthetic
gaagcgtcgacgagctgcagcctgatggggctgatgatga

SEQ ID NO: 7724 - DNA, 47 bp, Artificial Sequence
  Synthetic
ctcttggaagagttcagcgactgaccttttaaaattaggatgaatgg

SEQ ID NO: 7725 - DNA, 38 bp, Artificial Sequence
  Synthetic
ccggaaggtgcaccaacaaatgggccttgtaactgatg

SEQ ID NO: 7726 - DNA, 50 bp, Artificial Sequence
  Synthetic
ttcaactacagaaacctcagtttgcttccaagtctactaaatctgactaa

SEQ ID NO: 7727 - DNA, 41 bp, Artificial Sequence
  Synthetic
atcctccagaacaaacagacgatctgaacctgtttgggatc

SEQ ID NO: 7728 - DNA, 43 bp, Artificial Sequence
  Synthetic
tggcctgatcttataaaaatggagctgctcccgttttgtgaaa

SEQ ID NO: 7729 - DNA, 40 bp, Artificial Sequence
  Synthetic
acaacatgtgcagacaaactgaagccagtaacaaaagcgg

SEQ ID NO: 7730 - DNA, 43 bp, Artificial Sequence
  Synthetic
aaatggaacgtgttaccctggaactaaaaagtgtcctgagttc

SEQ ID NO: 7731 - DNA, 45 bp, Artificial Sequence
  Synthetic
tgtggggcatacatcacccagtgtcgtttcttatgtacaaatttg

SEQ ID NO: 7732 - DNA, 41 bp, Artificial Sequence
  Synthetic
ggagggagccatggaagaatattgcactacacaattaccac

SEQ ID NO: 7733 - DNA, 46 bp, Artificial Sequence
  Synthetic
tggtttccagcattcaaatgatcaagccttttgagttgaatcccta

SEQ ID NO: 7734 - DNA, 43 bp, Artificial Sequence
  Synthetic
ctatataacaaggtgaagagggcacctcgaaacagcctttccc

SEQ ID NO: 7735 - DNA, 39 bp, Artificial Sequence
  Synthetic
aaacccgctcaatgcccggcactactcggctagcagtct

SEQ ID NO: 7736 - DNA, 36 bp, Artificial Sequence
  Synthetic
gcaggggccctaaattgggttccacggggttgcgac

SEQ ID NO: 7737 - DNA, 36 bp, Artificial Sequence
  Synthetic
cgagcttcggagcagtcacgaaggcagcccctcctg

SEQ ID NO: 7738 - DNA, 39 bp, Artificial Sequence
  Synthetic
gggcggtactgttggtcaaggtacgaactgcaactgccg

SEQ ID NO: 7739 - DNA, 40 bp, Artificial Sequence
  Synthetic
gatgacaagccgtattgctggcactggaccgcagacatcc

SEQ ID NO: 7740 - DNA, 39 bp, Artificial Sequence
  Synthetic
ggccaacaggcaacaacagcacccacatctggtgtaggt

SEQ ID NO: 7741 - DNA, 40 bp, Artificial Sequence
  Synthetic
cttcacacctacgcccgctcgccgtagaggtattgggtgt

SEQ ID NO: 7742 - DNA, 42 bp, Artificial Sequence
  Synthetic
gcttggcttggcatgtcaagggacggactaagagtagtggcc

SEQ ID NO: 7743 - DNA, 42 bp, Artificial Sequence
  Synthetic
cgtgacgctgtcatcatgctcacccagtatcccgaagaggat

SEQ ID NO: 7744 - DNA, 42 bp, Artificial Sequence
  Synthetic
ggagacgaaggtcatcacgtgggctgataccggaagaacagc

SEQ ID NO: 7745 - DNA, 42 bp, Artificial Sequence
  Synthetic
cggttctaagacccttgctggccccaccaggtctttgtctac

SEQ ID NO: 7746 - DNA, 38 bp, Artificial Sequence
  Synthetic
gtgtgcacgcggggtgttgtggtctccaggttttcgac

SEQ ID NO: 7747 - DNA, 39 bp, Artificial Sequence
  Synthetic
taggactgtcaccaccggagccgtcggcgaagaacttgc

SEQ ID NO: 7748 - DNA, 38 bp, Artificial Sequence
  Synthetic
agaggtctagacgtcgccgtgtcatgagcgcgtcagtg

SEQ ID NO: 7749 - DNA, 42 bp, Artificial Sequence
  Synthetic
accggtatgtttcgtctggggaactcacagagcaccacagag

SEQ ID NO: 7750 - DNA, 38 bp, Artificial Sequence
  Synthetic
gctgggggccgttcagaatggtctgcggacatgcaagc

SEQ ID NO: 7751 - DNA, 35 bp, Artificial Sequence
  Synthetic
tctaggagggtgggtggccaacgacgaacgcggtg

SEQ ID NO: 7752 - DNA, 39 bp, Artificial Sequence
  Synthetic
caggcgagggggctgtacagtatgattgccccgggaagc

SEQ ID NO: 7753 - DNA, 40 bp, Artificial Sequence
  Synthetic
catgccagaaggggtacaagggcagatatcgtcgctccgc

SEQ ID NO: 7754 - DNA, 40 bp, Artificial Sequence
  Synthetic
gaggattcaccgcttcgcgcccacggagaaagtaacctcc

SEQ ID NO: 7755 - DNA, 40 bp, Artificial Sequence
  Synthetic
acaaggccaccacccagatgcatgcactgtctccatagca

SEQ ID NO: 7756 - DNA, 40 bp, Artificial Sequence
  Synthetic
ttccgcggaggaaaaggaagcccggccatgacttgggaca

SEQ ID NO: 7757 - DNA, 41 bp, Artificial Sequence
  Synthetic
gctcatcaccccttgctctgctggcgtaataaggtgttgct

SEQ ID NO: 7758 - DNA, 42 bp, Artificial Sequence
  Synthetic
tcgctctctcgacaagaaagcctcggcaatggggtatcagag

SEQ ID NO: 7759 - DNA, 40 bp, Artificial Sequence
  Synthetic
gagagccaggggacacacgaggagtacctggtcatagcct

SEQ ID NO: 7760 - DNA, 42 bp, Artificial Sequence
  Synthetic
ctacagagccaggaacagctggagatccagcggagtaacaga

SEQ ID NO: 7761 - DNA, 40 bp, Artificial Sequence
  Synthetic
actgggcggtgaagacaaaacgggacaagtccagccggtc

SEQ ID NO: 7762 - DNA, 41 bp, Artificial Sequence
  Synthetic
cgagtaactcgtccctcttctgtgatgatcgactgcaacac

SEQ ID NO: 7763 - DNA, 39 bp, Artificial Sequence
  Synthetic
gcgtactgccccagcttgaaggccgtgattggtgcttaa

SEQ ID NO: 7764 - DNA, 44 bp, Artificial Sequence
  Synthetic
gtgttgaaaagaaaaagactgaggggagatgcaacagggtacac

SEQ ID NO: 7765 - DNA, 44 bp, Artificial Sequence
  Synthetic
ccatactggcattactggtgacacgactcagtatctcaaggaga

SEQ ID NO: 7766 - DNA, 39 bp, Artificial Sequence
  Synthetic
ccactgtgtggttttccctcatttgctgcatcaagtgtg

SEQ ID NO: 7767 - DNA, 44 bp, Artificial Sequence
  Synthetic
tgtacaacagacttctcagtggttaggcctgagtttttcaacag

SEQ ID NO: 7768 - DNA, 40 bp, Artificial Sequence
  Synthetic
gaagtcttcatcgctcaaagcagagtagttgcagctgctc

SEQ ID NO: 7769 - DNA, 45 bp, Artificial Sequence
  Synthetic
tactggctacaaacaatgtctttcgtcttctccaaaggttacacc

SEQ ID NO: 7770 - DNA, 43 bp, Artificial Sequence
  Synthetic
tgatgaaacctgtgaacatgagtaccaccaaattccagaggga

SEQ ID NO: 7771 - DNA, 39 bp, Artificial Sequence
  Synthetic
gaaacatggtggtggtgtagcccttttgcatggcaccat

SEQ ID NO: 7772 - DNA, 39 bp, Artificial Sequence
  Synthetic
gtgcagacggttcgtacacaccatgacaacctgctcata

SEQ ID NO: 7773 - DNA, 44 bp, Artificial Sequence
  Synthetic
ctagtggtgatatcacttgtgttgtgagagcatctcagtagtgc

SEQ ID NO: 7774 - DNA, 41 bp, Artificial Sequence
  Synthetic
cataatggcaaccatccaacgttagtcaacgatgccctctt

SEQ ID NO: 7775 - DNA, 45 bp, Artificial Sequence
  Synthetic
aagacatctgaggagcactttgtctgaataggaccaatctctgta

SEQ ID NO: 7776 - DNA, 44 bp, Artificial Sequence
  Synthetic
cttgatgagagttttcttggtaggtaccaccaacttgaggaaat

SEQ ID NO: 7777 - DNA, 42 bp, Artificial Sequence
  Synthetic
ttaacgggtgtagaagctgtgacacacacatggaatggaaac

SEQ ID NO: 7778 - DNA, 47 bp, Artificial Sequence
  Synthetic
aaggaaacatcttacactacaaccaattttggttcaatctctgtgta

SEQ ID NO: 7779 - DNA, 46 bp, Artificial Sequence
  Synthetic
agacactattcagcgagtttcaagaggttaatgtgccaaacaattg

SEQ ID NO: 7780 - DNA, 47 bp, Artificial Sequence
  Synthetic
aacacaagagttaggtcatgaggatcttaatggtaatgcttgtgttt

SEQ ID NO: 7781 - DNA, 44 bp, Artificial Sequence
  Synthetic
tgcagcatttgtttaagtggattaggaaatcgtcacctgaatgg

SEQ ID NO: 7782 - DNA, 44 bp, Artificial Sequence
  Synthetic
tggaagagctatgttcatatcatggttgcgcttatagcacatca

SEQ ID NO: 7783 - DNA, 43 bp, Artificial Sequence
  Synthetic
agtgttgctgtgaaaaatggcgggatgtctctcataggtcttt

SEQ ID NO: 7784 - DNA, 42 bp, Artificial Sequence
  Synthetic
tacagctcacagcgagttagcacacgaatgtagaaaggacac

SEQ ID NO: 7785 - DNA, 43 bp, Artificial Sequence
  Synthetic
aattcgtagtgctgccaagaagtgtctagttgtagcacaagtt

SEQ ID NO: 7786 - DNA, 40 bp, Artificial Sequence
  Synthetic
tttagccagcgtggtggttctgatagcagctactacaggg

SEQ ID NO: 7787 - DNA, 42 bp, Artificial Sequence
  Synthetic
cactcgttatgtgcttatggatggctaacagaaccctccagg

SEQ ID NO: 7788 - DNA, 43 bp, Artificial Sequence
  Synthetic
tattgccatattggtgacttgtgcactcaccaaaaacacgtct

SEQ ID NO: 7789 - DNA, 45 bp, Artificial Sequence
  Synthetic
agacactgttgccacttacacaccactgaaatacttgtacttgtt

SEQ ID NO: 7790 - DNA, 42 bp, Artificial Sequence
  Synthetic
aggaaaatggcattcccgtcagttccacaggttacttgtacc

SEQ ID NO: 7791 - DNA, 44 bp, Artificial Sequence
  Synthetic
atccaacctggtcaaacattttcacactgataaacaccagatgg

SEQ ID NO: 7792 - DNA, 43 bp, Artificial Sequence
  Synthetic
tgacatattgggacctctttctgcctttcaaagcagcacacat

SEQ ID NO: 7793 - DNA, 41 bp, Artificial Sequence
  Synthetic
gtttacgagaatgctttcttgcccaagcagcatagcacatg

SEQ ID NO: 7794 - DNA, 43 bp, Artificial Sequence
  Synthetic
gctagagctatagtgtttgtgtgtctgtaaggtgttgccagta

SEQ ID NO: 7795 - DNA, 44 bp, Artificial Sequence
  Synthetic
aaaccatgtatcaaggttgctactgtaccacagatgtgcacttt

SEQ ID NO: 7796 - DNA, 40 bp, Artificial Sequence
  Synthetic
gcgaggaaatgctcgataaccaagcggcatatgatggtaa

SEQ ID NO: 7797 - DNA, 45 bp, Artificial Sequence
  Synthetic
acaatgctcttcactatgcttaggcgcattgttgataatgttgtt

SEQ ID NO: 7798 - DNA, 43 bp, Artificial Sequence
  Synthetic
cggctggtaccacacaaacagaattgttatagtaggcaagtgc

SEQ ID NO: 7799 - DNA, 47 bp, Artificial Sequence
  Synthetic
ttcaactgtgctttccttctgtgtaggtaatccttatatgctttagc

SEQ ID NO: 7800 - DNA, 40 bp, Artificial Sequence
  Synthetic
agaaacacagtctgtaccgtctgactgcatcaagggttcg

SEQ ID NO: 7801 - DNA, 46 bp, Artificial Sequence
  Synthetic
cgtcagcgtctaactaaatacacattaccctcatcaaaatgacgta

SEQ ID NO: 7802 - DNA, 43 bp, Artificial Sequence
  Synthetic
aatcaggatcttaatgggaactggtcaataggaactccgcagc

SEQ ID NO: 7803 - DNA, 44 bp, Artificial Sequence
  Synthetic
tctactgtgtttccacctacaagtcaacaaaaggaacaccatct

SEQ ID NO: 7804 - DNA, 48 bp, Artificial Sequence
  Synthetic
agacttttatgactttgctgtgtctgaagtgttttagttcaacagaac

SEQ ID NO: 7805 - DNA, 41 bp, Artificial Sequence
  Synthetic
ttgaagtcaatagccgccactccgtaaaacttgcttgttcc

SEQ ID NO: 7806 - DNA, 42 bp, Artificial Sequence
  Synthetic
agtgtgcgcaagtattaagtgagatgatgttccacctggttt

SEQ ID NO: 7807 - DNA, 47 bp, Artificial Sequence
  Synthetic
tgtgtgctataacagtaactatgcgactgccttaaagttcttaatgc

SEQ ID NO: 7808 - DNA, 47 bp, Artificial Sequence
  Synthetic
acatgatgagcttactggccacgtgttatcattagttagcattacgg

SEQ ID NO: 7809 - DNA, 43 bp, Artificial Sequence
  Synthetic
aatgccccaggttgtgatgtgcaataatagctcatacctccta

SEQ ID NO: 7810 - DNA, 39 bp, Artificial Sequence
  Synthetic
tggtattgccactgtacgcgaacctcccatgaaagatgc

SEQ ID NO: 7811 - DNA, 43 bp, Artificial Sequence
  Synthetic
atgttgcaaattatcaaaaggtcggcttaccagtaccaggtgg

SEQ ID NO: 7812 - DNA, 41 bp, Artificial Sequence
  Synthetic
agacttcgtgcaaaacactacgcctttagtcagcaatgtgc

SEQ ID NO: 7813 - DNA, 49 bp, Artificial Sequence
  Synthetic
acagacctcaaataggcgttgtaaggagataaaaacagcttttctccaa

SEQ ID NO: 7814 - DNA, 46 bp, Artificial Sequence
  Synthetic
atgtggctacattacaagcagaaatgaagaccagtaatgatcttac

SEQ ID NO: 7815 - DNA, 41 bp, Artificial Sequence
  Synthetic
tagagggctgtcatgcaactcctgtagaaaatcctagctgg

SEQ ID NO: 7816 - DNA, 46 bp, Artificial Sequence
  Synthetic
tgaagtactttgtcaagattggacctgaagtagaaaagcaagttgc

SEQ ID NO: 7817 - DNA, 44 bp, Artificial Sequence
  Synthetic
ttgctgataagtttccagttcttcaattctacttcagcctgagg

SEQ ID NO: 7818 - DNA, 45 bp, Artificial Sequence
  Synthetic
atgtgaataagcatgcattccacagtaaaagaaaggcaattgctt

SEQ ID NO: 7819 - DNA, 43 bp, Artificial Sequence
  Synthetic
aaaggacactttgatggacacgacctttgtgtaaacagcatta

SEQ ID NO: 7820 - DNA, 46 bp, Artificial Sequence
  Synthetic
ttgatggtagagtggaaggacagtgttattaaaacaccattacggg

SEQ ID NO: 7821 - DNA, 41 bp, Artificial Sequence
  Synthetic
gctatgccttcgaacacatcgtaatgaagaccgccaagttg

SEQ ID NO: 7822 - DNA, 43 bp, Artificial Sequence
  Synthetic
gtaaggatggacatgttgaaaccttgttaggcatcgcaacacc

SEQ ID NO: 7823 - DNA, 43 bp, Artificial Sequence
  Synthetic
ctgtgcaacagtacatacggcctagggtcatacatatcgctaa

SEQ ID NO: 7824 - DNA, 45 bp, Artificial Sequence
  Synthetic
tggctataccatgcatgctaactggaagacaactggataggattt

SEQ ID NO: 7825 - DNA, 50 bp, Artificial Sequence
  Synthetic
tgcactttcgagtacatatctgatgctcgtaagtgtttaaaattacctga

SEQ ID NO: 7826 - DNA, 43 bp, Artificial Sequence
  Synthetic
aaatggtacaatcacagatgctgtcagagcatttgagttcagc

SEQ ID NO: 7827 - DNA, 45 bp, Artificial Sequence
  Synthetic
atgcagattcttttgtagtcaaggggcaataacaccagtttgtcc

SEQ ID NO: 7828 - DNA, 46 bp, Artificial Sequence
  Synthetic
tatggtttttacaccactactggcaccggtgcatttaaaagttcaa

SEQ ID NO: 7829 - DNA, 45 bp, Artificial Sequence
  Synthetic
tcaagatgttaactgcactgatgtcagtagaatatatgcgccaag

SEQ ID NO: 7830 - DNA, 44 bp, Artificial Sequence
  Synthetic
acagaagtaatgcctgtttctatgggtagaatctccgcagatgt

SEQ ID NO: 7831 - DNA, 43 bp, Artificial Sequence
  Synthetic
taatgctagagatctcatttgtgcgatcagtgagcagaggtgg

SEQ ID NO: 7832 - DNA, 43 bp, Artificial Sequence
  Synthetic
gcaagctgcaagacgttgttgctaagttgtttaacaagtgtgt

SEQ ID NO: 7833 - DNA, 41 bp, Artificial Sequence
  Synthetic
acatgtcacgtatgtgccatccgagggaagtatgctttgcc

SEQ ID NO: 7834 - DNA, 45 bp, Artificial Sequence
  Synthetic
catcaccagatgttgatcttggcttttgaatgttgacgacagaag

SEQ ID NO: 7835 - DNA, 43 bp, Artificial Sequence
  Synthetic
gtggttcttgctgcaagtttgtaatttgacacccttgagaact

SEQ ID NO: 7836 - DNA, 43 bp, Artificial Sequence
  Synthetic
attcacatcttttgcttgtcgctatcaaggcatagaggtacaa

SEQ ID NO: 7837 - DNA, 45 bp, Artificial Sequence
  Synthetic
cgaagtttactaccagcttgagttgtagcattttcaataccagtg

SEQ ID NO: 7838 - DNA, 44 bp, Artificial Sequence
  Synthetic
agtcacactagccatccttactgcacgttaacaatattgcagca

SEQ ID NO: 7839 - DNA, 45 bp, Artificial Sequence
  Synthetic
taaagcttgttttcctctggctcattaattctgtagacagcagca

SEQ ID NO: 7840 - DNA, 42 bp, Artificial Sequence
  Synthetic
actgtggctacatcacgaacgcgcaaaacctgaatcagtgcc

SEQ ID NO: 7841 - DNA, 40 bp, Artificial Sequence
  Synthetic
agtgtgttagaggtacgactgtttgccctcgtatgttcct

SEQ ID NO: 7842 - DNA, 44 bp, Artificial Sequence
  Synthetic
gcttgaagatccttgtaaggtacaacctttcctagagcacaaag

SEQ ID NO: 7843 - DNA, 39 bp, Artificial Sequence
  Synthetic
agcgccgaccccaaggtttactccttgccatgctgagtg

SEQ ID NO: 7844 - DNA, 40 bp, Artificial Sequence
  Synthetic
acaatgctgccaccgtgctatctgcgtagaagccttttgg

SEQ ID NO: 7845 - DNA, 41 bp, Artificial Sequence
  Synthetic
gctgaggcatctaaaaagccttgagtgacgttgtactgttt

SEQ ID NO: 7846 - DNA, 46 bp, Artificial Sequence
  Synthetic
aagcacattgacgcatacaaaaccagtctttttctttttgtccttt

SEQ ID NO: 7847 - DNA, 43 bp, Artificial Sequence
  Synthetic
tcaatgtgtaacattagggaggacttaccctcgatcgtactcc

SEQ ID NO: 7848 - DNA, 43 bp, Artificial Sequence
  Synthetic
accaataggtgacaatcatccagacatatcctcattgaccggg

SEQ ID NO: 7849 - DNA, 42 bp, Artificial Sequence
  Synthetic
ttgacaaggtgtgaagagccgcaaggttagccacattcaggg

SEQ ID NO: 7850 - DNA, 46 bp, Artificial Sequence
  Synthetic
gttgggacacactccacacaaagctgcgtctttaaaataattgatg

SEQ ID NO: 7851 - DNA, 44 bp, Artificial Sequence
  Synthetic
cagacagactaatacagataacccgacaccataagcaacaactg

SEQ ID NO: 7852 - DNA, 48 bp, Artificial Sequence
  Synthetic
ttaccattttctagggagatctggactgatgaaacttgctagaattac

SEQ ID NO: 7853 - DNA, 49 bp, Artificial Sequence
  Synthetic
ggtaacttacctatttatccccaccgtaaaataagggtagctgaattgt

SEQ ID NO: 7854 - DNA, 43 bp, Artificial Sequence
  Synthetic
taccagttatgttaacacctggatcaaacgctgatggggattg

SEQ ID NO: 7855 - DNA, 43 bp, Artificial Sequence
  Synthetic
ttagccactactctcataggagaacaaagcgcagactaccagt

SEQ ID NO: 7856 - DNA, 42 bp, Artificial Sequence
  Synthetic
agtccaccgcctcactagttggtgtagtgaatctaaaatggc

SEQ ID NO: 7857 - DNA, 42 bp, Artificial Sequence
  Synthetic
ttaaatgaagttcttgtggtgccatttccgcagcatccaatg

SEQ ID NO: 7858 - DNA, 43 bp, Artificial Sequence
  Synthetic
aaatgcatctgtgttctggcagctcataaaagggattgtgaat

SEQ ID NO: 7859 - DNA, 41 bp, Artificial Sequence
  Synthetic
ttgcctatcaacacacacactcaatctgagttgtggcctca

SEQ ID NO: 7860 - DNA, 46 bp, Artificial Sequence
  Synthetic
tccctaattgtgattgcactgaatgccaatcatgtgcagtaactct

SEQ ID NO: 7861 - DNA, 41 bp, Artificial Sequence
  Synthetic
ctgaggagcaagggttatctgacgaagcctacaccaaagac

SEQ ID NO: 7862 - DNA, 45 bp, Artificial Sequence
  Synthetic
ggctccagcttagctatgtacatcacgcttcagtaaatttcttga

SEQ ID NO: 7863 - DNA, 46 bp, Artificial Sequence
  Synthetic
ttgatgggtatgatcaacagagtgtcttcaccactaggattttgca

SEQ ID NO: 7864 - DNA, 45 bp, Artificial Sequence
  Synthetic
ttaccagcaatggcaagaaggttttgccatctaaaagatactctt

SEQ ID NO: 7865 - DNA, 41 bp, Artificial Sequence
  Synthetic
gggaacctaaacccaaaagcagacaaactcttcctctgggc

SEQ ID NO: 7866 - DNA, 46 bp, Artificial Sequence
  Synthetic
ccatgagggtgttaagctagagatctgatgtctttaaacttctcat

SEQ ID NO: 7867 - DNA, 46 bp, Artificial Sequence
  Synthetic
ttcttggtatacatgttggtggcaaataagatttgagaagcattgc

SEQ ID NO: 7868 - DNA, 41 bp, Artificial Sequence
  Synthetic
tggttcagcagtagggtgtgattctccatctagcatgagag

SEQ ID NO: 7869 - DNA, 42 bp, Artificial Sequence
  Synthetic
cgccactctttccttatacaccggtttttggtccatctgatg

SEQ ID NO: 7870 - DNA, 39 bp, Artificial Sequence
  Synthetic
tctgccattcgcattttgcacacccagaacaaagcaaat

SEQ ID NO: 7871 - DNA, 45 bp, Artificial Sequence
  Synthetic
agactctctaaattcaaatgtggcgaaaatggaaagcacttctgc

SEQ ID NO: 7872 - DNA, 47 bp, Artificial Sequence
  Synthetic
gtatgcaacaaatcatattgccacctgtttgctcagatttaacatct

SEQ ID NO: 7873 - DNA, 49 bp, Artificial Sequence
  Synthetic
actgggatgcagttagaaaagaaagcaaacctaaattagaatatccttc

SEQ ID NO: 7874 - DNA, 41 bp, Artificial Sequence
  Synthetic
ctagctcctcacggacttttttctatgtggtgttcgaggtg

SEQ ID NO: 7875 - DNA, 45 bp, Artificial Sequence
  Synthetic
aaacagaaacatcaaaggtgctagttgggtaaagtcacagtttct

SEQ ID NO: 7876 - DNA, 42 bp, Artificial Sequence
  Synthetic
gttccattagttgaaggtacccctttctccccctactcctgg

SEQ ID NO: 7877 - DNA, 42 bp, Artificial Sequence
  Synthetic
cctgaatttttggtacagccttcctacatctgggtcaaaggc

SEQ ID NO: 7878 - DNA, 50 bp, Artificial Sequence
  Synthetic
tgtaggtgatggactttttgtagcactcaactggtaaattatttggtagt

SEQ ID NO: 7879 - DNA, 43 bp, Artificial Sequence
  Synthetic
tggtctggagattaatagggctgcctgtagaaccaacacctaa

SEQ ID NO: 7880 - DNA, 48 bp, Artificial Sequence
  Synthetic
ttactcatgcaggaactataggtgagtctctagtatcatccacctttc

SEQ ID NO: 7881 - DNA, 41 bp, Artificial Sequence
  Synthetic
agttggcttttattcctcctgcggcacatagttgccaaaga

SEQ ID NO: 7882 - DNA, 43 bp, Artificial Sequence
  Synthetic
cccatggggttggtataaatacagagttgtccagatgtccagc

SEQ ID NO: 7883 - DNA, 42 bp, Artificial Sequence
  Synthetic
aatttgctggcttcagaagagtcgatttgttggctcctcctc

SEQ ID NO: 7884 - DNA, 46 bp, Artificial Sequence
  Synthetic
attgtggaagaagcagattgtgttgctttgttcaaataagtcatct

SEQ ID NO: 7885 - DNA, 41 bp, Artificial Sequence
  Synthetic
ggcagcagtacacatttctcctcaattccactgtcctgaaa

SEQ ID NO: 7886 - DNA, 48 bp, Artificial Sequence
  Synthetic
tcctagcactttatgaaaaaggagcctttctacttagttcccaatgtt

SEQ ID NO: 7887 - DNA, 40 bp, Artificial Sequence
  Synthetic
agaagtccttctccgctgaaacggtgaggattctctatgc

SEQ ID NO: 7888 - DNA, 40 bp, Artificial Sequence
  Synthetic
gcccactgcaccaactcctgattgtgcgacggaactgatc

SEQ ID NO: 7889 - DNA, 40 bp, Artificial Sequence
  Synthetic
tccctcagttgtgcctttgctccagtgtctgtaatgggaa

SEQ ID NO: 7890 - DNA, 44 bp, Artificial Sequence
  Synthetic
cccagacttcattagacagccttaatgtatatgtcacgtcatcg

SEQ ID NO: 7891 - DNA, 39 bp, Artificial Sequence
  Synthetic
tggtacaatttgcgcgggaacaggctgtaaatacgaccg

SEQ ID NO: 7892 - DNA, 48 bp, Artificial Sequence
  Synthetic
gctgaaaaattacactgttggttcggttttttatccattccaaagcag

SEQ ID NO: 7893 - DNA, 45 bp, Artificial Sequence
  Synthetic
tgaagcatttgaaatagcagaaggctcagggtttaggtacatgac

SEQ ID NO: 7894 - DNA, 43 bp, Artificial Sequence
  Synthetic
tgaatggaatgggaaagggagacaatgttgttttgcagctctt

SEQ ID NO: 7895 - DNA, 39 bp, Artificial Sequence
  Synthetic
gtggagaacgccagaatgctccaattccaccaaccattc

SEQ ID NO: 7896 - DNA, 40 bp, Artificial Sequence
  Synthetic
gatcaggagaatttggcgtcaaatgtgagtgagaccagca

SEQ ID NO: 7897 - DNA, 39 bp, Artificial Sequence
  Synthetic
tcctgagaggatcagtggccccatatccactggccacgg

SEQ ID NO: 7898 - DNA, 45 bp, Artificial Sequence
  Synthetic
cccaaggggacaactatctactagccattgtttccatgttctcat

SEQ ID NO: 7899 - DNA, 48 bp, Artificial Sequence
  Synthetic
ctgctggttttgaagtttataacgccaatcattaggtcttcttcgaaa

SEQ ID NO: 7900 - DNA, 45 bp, Artificial Sequence
  Synthetic
cctgggcttggaaaaacccagcatttggattttctaatagtacag

SEQ ID NO: 7901 - DNA, 45 bp, Artificial Sequence
  Synthetic
aatgacagttattcccatcgaagaaatttctttgacggtaacacc

SEQ ID NO: 7902 - DNA, 44 bp, Artificial Sequence
  Synthetic
ggaaattatcccgatacagaccgtattgaaaacaacctccgtct

SEQ ID NO: 7903 - DNA, 45 bp, Artificial Sequence
  Synthetic
cagtgtactaactgtcagcatgtgagactttcatggttgcagtac

SEQ ID NO: 7904 - DNA, 46 bp, Artificial Sequence
  Synthetic
tgatcccaatgttggtatggtagaaggtgtaatcaattctgtcaat

SEQ ID NO: 7905 - DNA, 46 bp, Artificial Sequence
  Synthetic
ttaaacctgttttggaagatgggaacctttaacaacttttgcttca

SEQ ID NO: 7906 - DNA, 47 bp, Artificial Sequence
  Synthetic
tcaggcgttgataaattaaccagagtgctgtaaaataggttccaagg

SEQ ID NO: 7907 - DNA, 48 bp, Artificial Sequence
  Synthetic
tcaagaaccttgacgttacctttacataaaagtacttcctatctgtgc

SEQ ID NO: 7908 - DNA, 42 bp, Artificial Sequence
  Synthetic
ccatgtgatgggccaattcactctgtcaagagttaacgaaat

SEQ ID NO: 7909 - DNA, 46 bp, Artificial Sequence
  Synthetic
atggttccttattcaaagatggggtcgtaaaatggaaactgaagca

SEQ ID NO: 7910 - DNA, 45 bp, Artificial Sequence
  Synthetic
atcaattaggagatgccacaacaagtttgagaggtaagataaggc

SEQ ID NO: 7911 - DNA, 41 bp, Artificial Sequence
  Synthetic
tgagagaggctagaacaacttccgacggtttagtggaggtc

SEQ ID NO: 7912 - DNA, 50 bp, Artificial Sequence
  Synthetic
aaggcagagttgatctcttaggagagattttattaacacccactacacta

SEQ ID NO: 7913 - DNA, 39 bp, Artificial Sequence
  Synthetic
tcatgtgatgcgataaccaccgggcgtctagttggacta

SEQ ID NO: 7914 - DNA, 45 bp, Artificial Sequence
  Synthetic
tttagctgataccggtcttaaaagtgcatgtaacacattcccaaa

SEQ ID NO: 7915 - DNA, 44 bp, Artificial Sequence
  Synthetic
gataccatgcttaaagatgggttgattcggctgttatacccatg

SEQ ID NO: 7916 - DNA, 41 bp, Artificial Sequence
  Synthetic
tcaaagatgaggggacagtaactataaaattgccgctgctc

SEQ ID NO: 7917 - DNA, 44 bp, Artificial Sequence
  Synthetic
tttgggtcacccgattggagcatttctgctaataaggtgactaa

SEQ ID NO: 7918 - DNA, 42 bp, Artificial Sequence
  Synthetic
tgacaaaggcacaaaagacttaactttttccaacaccgcgat

SEQ ID NO: 7919 - DNA, 40 bp, Artificial Sequence
  Synthetic
ctaactgtgtagcctgcttgcatttgcttttcggtgatgc

SEQ ID NO: 7920 - DNA, 46 bp, Artificial Sequence
  Synthetic
gacttgtccctttgatagaggtgcaccaatacatacaaagaccaaa

SEQ ID NO: 7921 - DNA, 50 bp, Artificial Sequence
  Synthetic
accggcttttttagaataaccaacacagttataattacatgcttaaaggc

SEQ ID NO: 7922 - DNA, 43 bp, Artificial Sequence
  Synthetic
tttgtcaacaaatttgggttcggtgttaataacgccaatagcc

SEQ ID NO: 7923 - DNA, 40 bp, Artificial Sequence
  Synthetic
aacggcaatcgcatgcttaggccttattttttgcagcaag

SEQ ID NO: 7924 - DNA, 47 bp, Artificial Sequence
  Synthetic
tggctcagaagctacaaaaacccgccattagtcaaaatataatccaa

SEQ ID NO: 7925 - DNA, 50 bp, Artificial Sequence
  Synthetic
aatcagatgctctttacgttgttgacaacttctttaaaatctacttcacc

SEQ ID NO: 7926 - DNA, 45 bp, Artificial Sequence
  Synthetic
attgacttactcagatggttcagacctgaactcacccttgtcaaa

SEQ ID NO: 7927 - DNA, 43 bp, Artificial Sequence
  Synthetic
caagctattcagtttgcttttgacctttggcatcttgacctgc

SEQ ID NO: 7928 - DNA, 44 bp, Artificial Sequence
  Synthetic
attaccctgttgaccaagcaaacacagattgtttgaaagactgg

SEQ ID NO: 7929 - DNA, 45 bp, Artificial Sequence
  Synthetic
acgtaaccctaaatcaaatgaacctaaaagtggtgtcatcaaaca

SEQ ID NO: 7930 - DNA, 46 bp, Artificial Sequence
  Synthetic
acgatcggttacagaaatcaagtcagtgtcaccgtattttacagta

SEQ ID NO: 7931 - DNA, 41 bp, Artificial Sequence
  Synthetic
tctgccacctctcaaccgactgttgggacatcagatggtgt

SEQ ID NO: 7932 - DNA, 39 bp, Artificial Sequence
  Synthetic
ggcttcaaccacaaacagcagcctggacggtaaccacta

SEQ ID NO: 7933 - DNA, 44 bp, Artificial Sequence
  Synthetic
tcatgttcatgtctcctttaatgctaaaaactcacgcctaaacg

SEQ ID NO: 7934 - DNA, 43 bp, Artificial Sequence
  Synthetic
aaggggtagatcagaaatcagctcgaataaggaaaacagctgc

SEQ ID NO: 7935 - DNA, 43 bp, Artificial Sequence
  Synthetic
tcgtttgattcacaagagaggaaagactgtttaccgagcgtat

SEQ ID NO: 7936 - DNA, 46 bp, Artificial Sequence
  Synthetic
tattgcttacctagaatcacacgacccacctgaatatcagtgactt

SEQ ID NO: 7937 - DNA, 45 bp, Artificial Sequence
  Synthetic
tcatcctaaagtgttttaccaggactgttttatggttgctgtagc

SEQ ID NO: 7938 - DNA, 43 bp, Artificial Sequence
  Synthetic
acaagaaaattgaggagtgtacaggtcaacaggtaccccaagg

SEQ ID NO: 7939 - DNA, 42 bp, Artificial Sequence
  Synthetic
ttgggggacaacagaagacttaagaatatggccgttgacaaa

SEQ ID NO: 7940 - DNA, 41 bp, Artificial Sequence
  Synthetic
gtgaaagccagttgacctatgttaaaatcagccgccttagt

SEQ ID NO: 7941 - DNA, 42 bp, Artificial Sequence
  Synthetic
gaacagcggaatgcacgtattaattgccaacaaatctctgta

SEQ ID NO: 7942 - DNA, 40 bp, Artificial Sequence
  Synthetic
ttttcggcggttcagaagttaaatctggtagggccgtaaa

SEQ ID NO: 7943 - DNA, 46 bp, Artificial Sequence
  Synthetic
agtcactttcattttagtgggatcatctcacaagtacctcaatcag

SEQ ID NO: 7944 - DNA, 44 bp, Artificial Sequence
  Synthetic
gcccaaggcagtaatcatttcaatcacttcacaggattcgtaaa

SEQ ID NO: 7945 - DNA, 41 bp, Artificial Sequence
  Synthetic
ttgtcctagttgtacgaggagagttcaatactggccaggct

SEQ ID NO: 7946 - DNA, 45 bp, Artificial Sequence
  Synthetic
tgaagtggttacagcattagaatcacctacagtagaaccaggaaa

SEQ ID NO: 7947 - DNA, 43 bp, Artificial Sequence
  Synthetic
acagaagtgaactcttgtcttgaactcgagtttgatgccacag

SEQ ID NO: 7948 - DNA, 47 bp, Artificial Sequence
  Synthetic
ttttggatcgtgaagtaacgcaaagacgtattcttaactgtcttgaa

SEQ ID NO: 7949 - DNA, 47 bp, Artificial Sequence
  Synthetic
caggctattgctgatgaattagacgaccagtctgtaaactagacaaa

SEQ ID NO: 7950 - DNA, 43 bp, Artificial Sequence
  Synthetic
tctttgactgctatgggagaagcacaggtgcttctaaggtaac

SEQ ID NO: 7951 - DNA, 47 bp, Artificial Sequence
  Synthetic
cgtaaacgtaaatcagaagcagctagttctaattgtgagaactgttt

SEQ ID NO: 7952 - DNA, 46 bp, Artificial Sequence
  Synthetic
ataacggctcctaaaaagctaccttgaaaacatcactcaattgtca

SEQ ID NO: 7953 - DNA, 43 bp, Artificial Sequence
  Synthetic
agcgttaatattgtcgatgtcattgaaagcccgagataatgcc

SEQ ID NO: 7954 - DNA, 40 bp, Artificial Sequence
  Synthetic
gcagtacttgctagccaacacgcatcctcatgaagtgtca

SEQ ID NO: 7955 - DNA, 44 bp, Artificial Sequence
  Synthetic
ctttcgaaatcgtatcatgtttcccacgtcctgaaaaggcaata

SEQ ID NO: 7956 - DNA, 43 bp, Artificial Sequence
  Synthetic
tgatggtgacgatgctggaccgacaacaaaatctttaagcaat

SEQ ID NO: 7957 - DNA, 43 bp, Artificial Sequence
  Synthetic
atgcattaaggattcaagataggcacaagattgctgacggctt

SEQ ID NO: 7958 - DNA, 46 bp, Artificial Sequence
  Synthetic
tcaagcggctctagaagtactagaatttcctctattccatttttcg

SEQ ID NO: 7959 - DNA, 48 bp, Artificial Sequence
  Synthetic
atttgctgttacatgtgattgatgcttaaaaccactttttcttgctca

SEQ ID NO: 7960 - DNA, 45 bp, Artificial Sequence
  Synthetic
tacacgtttgaccaagaaatagaggtcaagtctccattgctgttt

SEQ ID NO: 7961 - DNA, 44 bp, Artificial Sequence
  Synthetic
actgaccaaccatcttttgaggaccataagcttttccagacaaa

SEQ ID NO: 7962 - DNA, 48 bp, Artificial Sequence
  Synthetic
gctcttagccaaacattttctggttgtaaatcataaattctcgttggg

SEQ ID NO: 7963 - DNA, 50 bp, Artificial Sequence
  Synthetic
ttaccaggatttttatcaagtcggtccataaatatcaagatctgtctgtt

SEQ ID NO: 7964 - DNA, 44 bp, Artificial Sequence
  Synthetic
cagaagccttaaaagcagcgggaccatttttaattttgccaaag

SEQ ID NO: 7965 - DNA, 48 bp, Artificial Sequence
  Synthetic
tcttgctcaatcatgtatcagctcgaacattttcaaatatagtggcgg

SEQ ID NO: 7966 - DNA, 42 bp, Artificial Sequence
  Synthetic
attaccaatccagtagccattgagatcaatacggccatagcg

SEQ ID NO: 7967 - DNA, 45 bp, Artificial Sequence
  Synthetic
cccttcgcttagaattagcggataaagcttggtcaaaaaacttgg

SEQ ID NO: 7968 - DNA, 41 bp, Artificial Sequence
  Synthetic
acttgtctcaactgcatgatcctcgaattcttggcacagct

SEQ ID NO: 7969 - DNA, 42 bp, Artificial Sequence
  Synthetic
acgggttgctaaaatgtatgcggccgtaaactcctctttagg

SEQ ID NO: 7970 - DNA, 42 bp, Artificial Sequence
  Synthetic
catgaccatgcgaggcatcactttccttatataagcctctgg

SEQ ID NO: 7971 - DNA, 38 bp, Artificial Sequence
  Synthetic
tcatcgacgttggtggagaattcatcggtagcgcttac

SEQ ID NO: 7972 - DNA, 45 bp, Artificial Sequence
  Synthetic
tctaggcaatagagcacaagcatcaacccaaatattgttttttgg

SEQ ID NO: 7973 - DNA, 47 bp, Artificial Sequence
  Synthetic
ccagttgatgtgaggacttatggattctgttcttctttaaaggctcc

SEQ ID NO: 7974 - DNA, 41 bp, Artificial Sequence
  Synthetic
agctttttaacgaatttccgcctatcggtgggttttccttt

SEQ ID NO: 7975 - DNA, 48 bp, Artificial Sequence
  Synthetic
ggtcgtgtgaggcatgaaaaatgctccaaatagcaagatatcaatgtc

SEQ ID NO: 7976 - DNA, 42 bp, Artificial Sequence
  Synthetic
aatcactacgagctatcacgcacaaaacaagccaaggcatat

SEQ ID NO: 7977 - DNA, 41 bp, Artificial Sequence
  Synthetic
tatccgctaaggtgcttacccagccatatccctagctgaaa

SEQ ID NO: 7978 - DNA, 43 bp, Artificial Sequence
  Synthetic
atcggattggtggtgtggaatctgccacattaatcataaaacc

SEQ ID NO: 7979 - DNA, 45 bp, Artificial Sequence
  Synthetic
aagagccccacaaccacagagttaccaactttattagaacctgta

SEQ ID NO: 7980 - DNA, 40 bp, Artificial Sequence
  Synthetic
aagactagggcaagggaccatctgtcttgacaatgggtat

SEQ ID NO: 7981 - DNA, 40 bp, Artificial Sequence
  Synthetic
cgcccgcagactgtctgttgggggtctgtgtcttgtttgt

SEQ ID NO: 7982 - DNA, 43 bp, Artificial Sequence
  Synthetic
aaatggtaaccaaaaaggatcctgtgtgtaaaaaatgcggccg

SEQ ID NO: 7983 - DNA, 48 bp, Artificial Sequence
  Synthetic
ttttccatcatgagatttgaccactaacattgttacacatatgggata

SEQ ID NO: 7984 - DNA, 41 bp, Artificial Sequence
  Synthetic
aaatggcacctggtgtttgtgcaaagtcaagagcaagactc

SEQ ID NO: 7985 - DNA, 43 bp, Artificial Sequence
  Synthetic
catcactatttccaatttggacagcgtggtggttcaggtacag

SEQ ID NO: 7986 - DNA, 44 bp, Artificial Sequence
  Synthetic
gattggggcaaagtaatgacgttgagcttagagaggaagacttt

SEQ ID NO: 7987 - DNA, 48 bp, Artificial Sequence
  Synthetic
ctttgatcaagttggatttaggtgcctaaaagataagcgtcaagaagg

SEQ ID NO: 7988 - DNA, 44 bp, Artificial Sequence
  Synthetic
ggatacccgtgatgccaatattgatgttctggtgaaggaatgtt

SEQ ID NO: 7989 - DNA, 42 bp, Artificial Sequence
  Synthetic
accagcatcatttctccagagtacaaacaggtctcttgagaa

SEQ ID NO: 7990 - DNA, 48 bp, Artificial Sequence
  Synthetic
ttccagcaattttatagaggctgtccttatgaagaccaactgactttc

SEQ ID NO: 7991 - DNA, 39 bp, Artificial Sequence
  Synthetic
aaagggcttgtcctccatacaacgtgaccatcccagaaa

SEQ ID NO: 7992 - DNA, 40 bp, Artificial Sequence
  Synthetic
ggaaacgagcatagttgagcaaaccaaaccatcgaagttg

SEQ ID NO: 7993 - DNA, 43 bp, Artificial Sequence
  Synthetic
tggaatgttaatcaaagtgtcacgctcaatgtcggcaaccatg

SEQ ID NO: 7994 - DNA, 47 bp, Artificial Sequence
  Synthetic
acagactctgttaaaaaagcatcgtcttacagctcgtagacctatag

SEQ ID NO: 7995 - DNA, 44 bp, Artificial Sequence
  Synthetic
acacttgactttcaattgttcgaaacggtatgtctattgcagct

SEQ ID NO: 7996 - DNA, 47 bp, Artificial Sequence
  Synthetic
ttgctgtcatcataccaatacgatgctacggtactatatggggctaa

SEQ ID NO: 7997 - DNA, 42 bp, Artificial Sequence
  Synthetic
accactcgaatactagttacttgcatgggagcacagattgtc

SEQ ID NO: 7998 - DNA, 41 bp, Artificial Sequence
  Synthetic
caacctgtgttgttccttttgcctgctcaggttaagtcagc

SEQ ID NO: 7999 - DNA, 46 bp, Artificial Sequence
  Synthetic
gctttttgagcttgagtacgcatcaagaggatattttagaagcttg

SEQ ID NO: 8000 - DNA, 41 bp, Artificial Sequence
  Synthetic
atcaaccgtaacaaagttcaccagcaacgattactgacgct

SEQ ID NO: 8001 - DNA, 43 bp, Artificial Sequence
  Synthetic
agacattttttcgcccttaccagcatgctccatataaggctat

SEQ ID NO: 8002 - DNA, 40 bp, Artificial Sequence
  Synthetic
tgaccctggatgagtgaagcatcaatcatttggtggcaaa

SEQ ID NO: 8003 - DNA, 42 bp, Artificial Sequence
  Synthetic
ggtacagcacgccagatgatgatcaatcactcttacccattt

SEQ ID NO: 8004 - DNA, 45 bp, Artificial Sequence
  Synthetic
atggtcaccaaggataaccaattcagtacattgtgacagaacacc

SEQ ID NO: 8005 - DNA, 46 bp, Artificial Sequence
  Synthetic
tgtcatggtattcaatttcagcctcaacctgtttattggtcatggt

SEQ ID NO: 8006 - DNA, 41 bp, Artificial Sequence
  Synthetic
gattccttgcttagccaagactccttatgtacctggttggg

SEQ ID NO: 8007 - DNA, 43 bp, Artificial Sequence
  Synthetic
aactccttttaaacaaacttgcgaccacgagctttcgtccttt

SEQ ID NO: 8008 - DNA, 45 bp, Artificial Sequence
  Synthetic
ggctcagtcgtagaatcagattgttgatgaaagcaataaggagtt

SEQ ID NO: 8009 - DNA, 46 bp, Artificial Sequence
  Synthetic
actaagaagcaattgaatagcctgcagacttcttctcagtgtcatt

SEQ ID NO: 8010 - DNA, 38 bp, Artificial Sequence
  Synthetic
cccttgaccaacggaccatagataagcgtgaggtcggt

SEQ ID NO: 8011 - DNA, 42 bp, Artificial Sequence
  Synthetic
ctgtgttcggcatgggtacatgggttatgaaaatagcacatt

SEQ ID NO: 8012 - DNA, 41 bp, Artificial Sequence
  Synthetic
tctcaaatttcctacgcccgcgctgggttcagaacgtcgtg

SEQ ID NO: 8013 - DNA, 42 bp, Artificial Sequence
  Synthetic
cctgctcgagttgtagctctcgggttccctcagattggttgg

SEQ ID NO: 8014 - DNA, 41 bp, Artificial Sequence
  Synthetic
aagtcagcaccccttctcccggcctcaggtgatcgagagaa

SEQ ID NO: 8015 - DNA, 44 bp, Artificial Sequence
  Synthetic
ttccaatcgtccggtttagttagcgccaacaggttgatattcct

SEQ ID NO: 8016 - DNA, 45 bp, Artificial Sequence
  Synthetic
actcgactagtgagctattacgcgacaactaggatgttagcttag

SEQ ID NO: 8017 - DNA, 42 bp, Artificial Sequence
  Synthetic
cacctttccctcacggtactggggaccatctcccaaccctaa

SEQ ID NO: 8018 - DNA, 41 bp, Artificial Sequence
  Synthetic
gaaaggaggtgatccagccgcgatgattggggtgaagtcgt

SEQ ID NO: 8019 - DNA, 40 bp, Artificial Sequence
  Synthetic
catcggcttcggcattagctgacggactttctgaagaaga

SEQ ID NO: 8020 - DNA, 44 bp, Artificial Sequence
  Synthetic
tgctgttgagaagacttgtgattttcactaaattgatcgaccgc

SEQ ID NO: 8021 - DNA, 39 bp, Artificial Sequence
  Synthetic
tctgaaagggcttgacgaacttttgacgatctcactcgc

SEQ ID NO: 8022 - DNA, 44 bp, Artificial Sequence
  Synthetic
gatacgtcaaatgtaccaccaccggataagactgacaaggatga

SEQ ID NO: 8023 - DNA, 40 bp, Artificial Sequence
  Synthetic
ttgccttctgggttagcaatgaactcagcagtagcagttc

SEQ ID NO: 8024 - DNA, 38 bp, Artificial Sequence
  Synthetic
cttagcagacgctcgtgcaagaacatccagccgatagc

SEQ ID NO: 8025 - DNA, 39 bp, Artificial Sequence
  Synthetic
tagcgttgaagttgttgacgtgagctcatgcagaaatgc

SEQ ID NO: 8026 - DNA, 47 bp, Artificial Sequence
  Synthetic
atcaataggaccaatcaaactcaggtgtgtcagttttaactcacaaa

SEQ ID NO: 8027 - DNA, 44 bp, Artificial Sequence
  Synthetic
actgtcactggcttagattcatctgttcagcttagcaaccatga

SEQ ID NO: 8028 - DNA, 43 bp, Artificial Sequence
  Synthetic
attacgaatagtggcgctactagaaactcatgaaccagtaggg

SEQ ID NO: 8029 - DNA, 47 bp, Artificial Sequence
  Synthetic
acttctcatcaatggcttacctatgtcaatgcattgatgattctgag

SEQ ID NO: 8030 - DNA, 43 bp, Artificial Sequence
  Synthetic
aaaagcactaattctccttcgtccttatagccagacttgcggt

SEQ ID NO: 8031 - DNA, 45 bp, Artificial Sequence
  Synthetic
tggtcaccaccattcaaaaactctttggagtgtcataactttcca

SEQ ID NO: 8032 - DNA, 45 bp, Artificial Sequence
  Synthetic
atgtctccatcaatacaccgttaaaactcaacttgaaagcctaga

SEQ ID NO: 8033 - DNA, 48 bp, Artificial Sequence
  Synthetic
ctatcactgaaaatgacaatgcgtcagtcttctagatttttggtcatt

SEQ ID NO: 8034 - DNA, 49 bp, Artificial Sequence
  Synthetic
aaacctcagcacattattcaagctccgtaatgttttctactttcaaaga

SEQ ID NO: 8035 - DNA, 46 bp, Artificial Sequence
  Synthetic
ttgcatctgtacaggtctatagtgacatctgataacccaacctcac

SEQ ID NO: 8036 - DNA, 40 bp, Artificial Sequence
  Synthetic
gctatggctgactcactagcttcataggctttgggttctt

SEQ ID NO: 8037 - DNA, 44 bp, Artificial Sequence
  Synthetic
cttaaaagggcactaggaaaggaaacaaaaccgtcaaagcgata

SEQ ID NO: 8038 - DNA, 44 bp, Artificial Sequence
  Synthetic
attggcgaacttttccaaatggttctttaagggttgctagcttt

SEQ ID NO: 8039 - DNA, 41 bp, Artificial Sequence
  Synthetic
ccttgcccataaagccaagattgtcaatcgtgtctttgttg

SEQ ID NO: 8040 - DNA, 43 bp, Artificial Sequence
  Synthetic
atccgtcgctttatgttgtaattgtgaacatggctatgcggtg

SEQ ID NO: 8041 - DNA, 43 bp, Artificial Sequence
  Synthetic
ggacaaccgtttttttaaaaggttggttgggattcgggattgg

SEQ ID NO: 8042 - DNA, 43 bp, Artificial Sequence
  Synthetic
cctttgccaaacacgagcaatcggtatagataaagtccacgta

SEQ ID NO: 8043 - DNA, 43 bp, Artificial Sequence
  Synthetic
gtatgagatggctgaggtcaagggaaaacagcctgatagtctg

SEQ ID NO: 8044 - DNA, 46 bp, Artificial Sequence
  Synthetic
aaaagtcccgctaatgaatcccgcaaaacatataccttacacaaag

SEQ ID NO: 8045 - DNA, 47 bp, Artificial Sequence
  Synthetic
atcaactcctgattgattacctgtttacgctcaaaatggtatttcag

SEQ ID NO: 8046 - DNA, 46 bp, Artificial Sequence
  Synthetic
cctgctaagtcgggattgaagtctaacgtatatggctatacactag

SEQ ID NO: 8047 - DNA, 43 bp, Artificial Sequence
  Synthetic
ccacctaaagctacccccaactatggtaaaacatttgggttag

SEQ ID NO: 8048 - DNA, 40 bp, Artificial Sequence
  Synthetic
attcacacgaccaatcagacctacggtagctctgctcaag

SEQ ID NO: 8049 - DNA, 41 bp, Artificial Sequence
  Synthetic
gtggtacgcccctacctgtcgagaggggagaagagctcaac

SEQ ID NO: 8050 - DNA, 36 bp, Artificial Sequence
  Synthetic
cagggcgccctgctactgacataatgccggcagcgt

SEQ ID NO: 8051 - DNA, 40 bp, Artificial Sequence
  Synthetic
gggtttataccacccgcgcttatgtgactatcaggcgccc

SEQ ID NO: 8052 - DNA, 38 bp, Artificial Sequence
  Synthetic
tacaccccttacccgaaggccaatgcccgcccgcacta

SEQ ID NO: 8053 - DNA, 40 bp, Artificial Sequence
  Synthetic
cggtggttgtggcctcctatttatgccttgcgtccgaatc

SEQ ID NO: 8054 - DNA, 41 bp, Artificial Sequence
  Synthetic
tgcttcgatcgtgaatacgcctacatcctttacgcacagcc

SEQ ID NO: 8055 - DNA, 38 bp, Artificial Sequence
  Synthetic
tctcacggacgccttccatcacagccagttttgcgccg

SEQ ID NO: 8056 - DNA, 37 bp, Artificial Sequence
  Synthetic
ggggccgatttccccgaggtaagaagcccgcagaccc

SEQ ID NO: 8057 - DNA, 39 bp, Artificial Sequence
  Synthetic
cggccaacgcccaacacaacgtcgaaggcctctggaaag

SEQ ID NO: 8058 - DNA, 41 bp, Artificial Sequence
  Synthetic
tataggcaggagacggctgctcttcgggagggacttggtat

SEQ ID NO: 8059 - DNA, 41 bp, Artificial Sequence
  Synthetic
ggtttccctgttatgaccccgcaatcaccagcctcttgccc

SEQ ID NO: 8060 - DNA, 38 bp, Artificial Sequence
  Synthetic
cgatgcccccgagatgtgtgttcgaggtggtcatcccg

SEQ ID NO: 8061 - DNA, 39 bp, Artificial Sequence
  Synthetic
tcgaggtgcgagctgtggtgggtgtaaagcttaccctgc

SEQ ID NO: 8062 - DNA, 40 bp, Artificial Sequence
  Synthetic
agcttgccgaattggttgaggcagttgagaaccgcagtgc

SEQ ID NO: 8063 - DNA, 38 bp, Artificial Sequence
  Synthetic
ggtgttgcaggctccccaagtagcagtgtaccgggctc

SEQ ID NO: 8064 - DNA, 39 bp, Artificial Sequence
  Synthetic
gcttgctagtcgcctgtggtcgagagcctccccaggaac

SEQ ID NO: 8065 - DNA, 41 bp, Artificial Sequence
  Synthetic
tgcggtcgcaggtttgaaagcggccaggtgtactccttcag

SEQ ID NO: 8066 - DNA, 39 bp, Artificial Sequence
  Synthetic
ctctccaccatgcccccacttgtcgggtacgacggcaac

SEQ ID NO: 8067 - DNA, 38 bp, Artificial Sequence
  Synthetic
ttccatcacttccaccgacgtgacgacgagctctgcgg

SEQ ID NO: 8068 - DNA, 40 bp, Artificial Sequence
  Synthetic
tgacccctggtaacacgaacacttgatcttgtgcggggct

SEQ ID NO: 8069 - DNA, 42 bp, Artificial Sequence
  Synthetic
gcccagtcgcagagtgctatggaatgattgtcgcctcctcag

SEQ ID NO: 8070 - DNA, 44 bp, Artificial Sequence
  Synthetic
tctgtgggtctggtgggatgagcatagtagtataggtagaaaca

SEQ ID NO: 8071 - DNA, 46 bp, Artificial Sequence
  Synthetic
tttctgtgtctaagcactggtgggaacaccacttaaatatcaatgt

SEQ ID NO: 8072 - DNA, 50 bp, Artificial Sequence
  Synthetic
tgattatgtcattgcattgactggtgggtctatcagaaaaaggtaaaatt

SEQ ID NO: 8073 - DNA, 42 bp, Artificial Sequence
  Synthetic
ttctgagagttggagtgttggtaaagtttcttagcaggtgtg

SEQ ID NO: 8074 - DNA, 46 bp, Artificial Sequence
  Synthetic
actggtgttattgacattagtgctaccaaggtttattgtttgtcaa

SEQ ID NO: 8075 - DNA, 47 bp, Artificial Sequence
  Synthetic
acaagcttttttctatagtggtggtatcaccagtaaaaacaggatca

SEQ ID NO: 8076 - DNA, 48 bp, Artificial Sequence
  Synthetic
ttctgcattgataattgtggtgagcggttattactctgcaagatagca

SEQ ID NO: 8077 - DNA, 48 bp, Artificial Sequence
  Synthetic
tgaaactgtctgtagtgtcgcataaccactaataactacatatggaac

SEQ ID NO: 8078 - DNA, 48 bp, Artificial Sequence
  Synthetic
tgatgaagagggtggttatgatgtcattactaataggccattgtgaaa

SEQ ID NO: 8079 - DNA, 46 bp, Artificial Sequence
  Synthetic
agcttgttagtatgaaaggtactggaagcatcaatgtcaataggtg

SEQ ID NO: 8080 - DNA, 42 bp, Artificial Sequence
  Synthetic
tttgactttgttgtcaatgctgctaatagcacgtgcaacacc

SEQ ID NO: 8081 - DNA, 47 bp, Artificial Sequence
  Synthetic
aacttgtgttattgccaatgttccaagtcaaacttgaaagaagcttt

SEQ ID NO: 8082 - DNA, 45 bp, Artificial Sequence
  Synthetic
gaagttgactgggttgctttttacgctttacatccaaagaagcaa

SEQ ID NO: 8083 - DNA, 44 bp, Artificial Sequence
  Synthetic
gtgatgttggtttttgtccacaccaacacgtccattaacaaact

SEQ ID NO: 8084 - DNA, 49 bp, Artificial Sequence
  Synthetic
tgtcctatagttgttggtgtttcaggagtctttcctaccaaatatacat

SEQ ID NO: 8085 - DNA, 47 bp, Artificial Sequence
  Synthetic
tgatgacggttacatttgtggtggatgaactaaagattgagagtaca

SEQ ID NO: 8086 - DNA, 45 bp, Artificial Sequence
  Synthetic
agctacaattccaccttacaatctgtctctcaacacaaccagatg

SEQ ID NO: 8087 - DNA, 44 bp, Artificial Sequence
  Synthetic
cataatggtgtcttcttgggagttaccttaatacgcaacacaga

SEQ ID NO: 8088 - DNA, 39 bp, Artificial Sequence
  Synthetic
tgcaagttgagagtgccaacgcagcatacaaaaaggcaa

SEQ ID NO: 8089 - DNA, 40 bp, Artificial Sequence
  Synthetic
tgcaccacatggaccttttggtcaccaccaataccaagta

SEQ ID NO: 8090 - DNA, 44 bp, Artificial Sequence
  Synthetic
cgcaaagtctgaatttgatcatgagtgagtagcagcttgttcag

SEQ ID NO: 8091 - DNA, 47 bp, Artificial Sequence
  Synthetic
tgaaactttgacatggcctcttatcgcttaagtttaccaggcataat

SEQ ID NO: 8092 - DNA, 45 bp, Artificial Sequence
  Synthetic
ttaactgcttgtgctttttctgttgtgcaccatgtttaacagctt

SEQ ID NO: 8093 - DNA, 45 bp, Artificial Sequence
  Synthetic
gggtgtgcttgtgaccgtaccttgctcgtttaaataagaaatgtc

SEQ ID NO: 8094 - DNA, 45 bp, Artificial Sequence
  Synthetic
tacttggaaagatggcagagtcagcatagaccaagtccatcatag

SEQ ID NO: 8095 - DNA, 45 bp, Artificial Sequence
  Synthetic
tgctctatgcgatgcgatggcttggttatctaatgttaaaacacc

SEQ ID NO: 8096 - DNA, 42 bp, Artificial Sequence
  Synthetic
actgaacttttgcaatttgtcaccttgatcaacgagtgctgg

SEQ ID NO: 8097 - DNA, 45 bp, Artificial Sequence
  Synthetic
agaactgttggtggtgtttctcatgtttttgatggtattgtcttg

SEQ ID NO: 8098 - DNA, 44 bp, Artificial Sequence
  Synthetic
tggcacaagttttaacagaagttgttcgtaccacctggcttaaa

SEQ ID NO: 8099 - DNA, 46 bp, Artificial Sequence
  Synthetic
atttgccttacccagatcctagttgtcttaacaacatcatcaacaa

SEQ ID NO: 8100 - DNA, 44 bp, Artificial Sequence
  Synthetic
ttgtggttcacaaactgtacttcgacatgatcatatgcgcattt

SEQ ID NO: 8101 - DNA, 45 bp, Artificial Sequence
  Synthetic
gtcagtgatgcatatgctaatttggggaggaccctgtattgtagt

SEQ ID NO: 8102 - DNA, 45 bp, Artificial Sequence
  Synthetic
tgttcctttacaggttggtttttcagacacacaaccttcagtttg

SEQ ID NO: 8103 - DNA, 38 bp, Artificial Sequence
  Synthetic
ttgagccaaaaccaccacactaacagcatcaccagagg

SEQ ID NO: 8104 - DNA, 46 bp, Artificial Sequence
  Synthetic
tggtcaacttgatggtctttgttacacaattgaaaattctggatac

SEQ ID NO: 8105 - DNA, 46 bp, Artificial Sequence
  Synthetic
aattgtttgcaaaacgaaaaatgggacaacaccgagatttttgaga

SEQ ID NO: 8106 - DNA, 44 bp, Artificial Sequence
  Synthetic
taaccacttgtccactttttatccaggcatagcataaccacact

SEQ ID NO: 8107 - DNA, 48 bp, Artificial Sequence
  Synthetic
cacctggtacaactgttttaaaacgtgcatcactaacataatcattga

SEQ ID NO: 8108 - DNA, 41 bp, Artificial Sequence
  Synthetic
gttacgggtttattgccaactcaagaaaccattggctgagt

SEQ ID NO: 8109 - DNA, 43 bp, Artificial Sequence
  Synthetic
ttcctgtgtttttagtgttgtcaacacacggccattatgtgtg

SEQ ID NO: 8110 - DNA, 47 bp, Artificial Sequence
  Synthetic
atcaaccactccgtttaacttgttggcattaaaataaacaaaaccag

SEQ ID NO: 8111 - DNA, 48 bp, Artificial Sequence
  Synthetic
gcacttttgtgggtattttaccaccccattaatataaaactggccagt

SEQ ID NO: 8112 - DNA, 44 bp, Artificial Sequence
  Synthetic
atgttgcactccccatttattatcacaccaaaagatgcagttgc

SEQ ID NO: 8113 - DNA, 46 bp, Artificial Sequence
  Synthetic
atcaacaaagcattattggtgccgtaactgtagtaagttttgcaag

SEQ ID NO: 8114 - DNA, 50 bp, Artificial Sequence
  Synthetic
aagttgttacatctggtttgggtactagaaagacctttagtacaagactt

SEQ ID NO: 8115 - DNA, 44 bp, Artificial Sequence
  Synthetic
atgaccggcttgattcaattcaaaaacaaatgcattcaaagctg

SEQ ID NO: 8116 - DNA, 45 bp, Artificial Sequence
  Synthetic
aatggtgtctttcgtgtaacttccgcacaaaatcagacaaaacag

SEQ ID NO: 8117 - DNA, 41 bp, Artificial Sequence
  Synthetic
ctacaggttgttgtggttgttgcccacaatcacaacagcct

SEQ ID NO: 8118 - DNA, 46 bp, Artificial Sequence
  Synthetic
atgtccatttacgtaactggaacttgcaacacaactataaaaagcg

SEQ ID NO: 8119 - DNA, 43 bp, Artificial Sequence
  Synthetic
cacttcttagtggtgtacttcttgtactgacccacttgaacac

SEQ ID NO: 8120 - DNA, 43 bp, Artificial Sequence
  Synthetic
tcctccttcattttacatgcctctaagattcctgggaatgacc

SEQ ID NO: 8121 - DNA, 44 bp, Artificial Sequence
  Synthetic
tttggaaccaaagttctctattgctgagcgatcctcaaactcaa

SEQ ID NO: 8122 - DNA, 42 bp, Artificial Sequence
  Synthetic
agttcttctggtacttccactccttatcagccctgggttgag

SEQ ID NO: 8123 - DNA, 49 bp, Artificial Sequence
  Synthetic
agtgggtgataatgttcagattaccaggttcttattatccttagctaca

SEQ ID NO: 8124 - DNA, 45 bp, Artificial Sequence
  Synthetic
ttggacagacctttattgcaaattgttttcagcaacactcagttt

SEQ ID NO: 8125 - DNA, 43 bp, Artificial Sequence
  Synthetic
atctgatttattagacgaggcgcgattcttgcttgtggaacaa

SEQ ID NO: 8126 - DNA, 44 bp, Artificial Sequence
  Synthetic
tgtggagattgggttttggcagcaataattcttttacactgtca

SEQ ID NO: 8127 - DNA, 42 bp, Artificial Sequence
  Synthetic
acaactttggagtggattgcacgggactttcggaatctaact

SEQ ID NO: 8128 - DNA, 44 bp, Artificial Sequence
  Synthetic
aatggggtaatgagaattggattgcctttgccttctcctgtgag

SEQ ID NO: 8129 - DNA, 45 bp, Artificial Sequence
  Synthetic
taaccctgataatcagacaaggcacatcgtccccattttgataat

SEQ ID NO: 8130 - DNA, 41 bp, Artificial Sequence
  Synthetic
tcgacgtccatcgactacaccgtctttgtcggacctgcgag

SEQ ID NO: 8131 - DNA, 43 bp, Artificial Sequence
  Synthetic
agagagttgctttgcccagaacttccattaattttaagaccca

SEQ ID NO: 8132 - DNA, 42 bp, Artificial Sequence
  Synthetic
aatattgcaatatggcagtctgggttcttcctccagagcctc

SEQ ID NO: 8133 - DNA, 46 bp, Artificial Sequence
  Synthetic
tgcaggttattgcagaaattcaccagattctccttcatttgttgaa

SEQ ID NO: 8134 - DNA, 43 bp, Artificial Sequence
  Synthetic
ttaaacttaggccttgaaacagacatcagcaattggtgtgctg

SEQ ID NO: 8135 - DNA, 41 bp, Artificial Sequence
  Synthetic
ctgagcaagcccacattttcgctgaacttttgccaaggcgg

SEQ ID NO: 8136 - DNA, 49 bp, Artificial Sequence
  Synthetic
taggtgacacagcatttatacaaggggtgtttctaaagagataacttct

SEQ ID NO: 8137 - DNA, 46 bp, Artificial Sequence
  Synthetic
atctgaacgtctactgctggtcacttttggtatagttacagtttga

SEQ ID NO: 8138 - DNA, 42 bp, Artificial Sequence
  Synthetic
tactgcttttgatgcaaaacagacagtgttcacctgaagcag

SEQ ID NO: 8139 - DNA, 43 bp, Artificial Sequence
  Synthetic
atcagaatgaaccatgaagcctatgatacatttgctcgcgacg

SEQ ID NO: 8140 - DNA, 45 bp, Artificial Sequence
  Synthetic
ccagaataatggcatttgctggatcctctggtattatctccaact

SEQ ID NO: 8141 - DNA, 43 bp, Artificial Sequence
  Synthetic
aatccctacccctaaaatctgtttgcgggtgcggtgttaatag

SEQ ID NO: 8142 - DNA, 38 bp, Artificial Sequence
  Synthetic
cgcggttaggacttgtttcagttttaggtgcttggcag

SEQ ID NO: 8143 - DNA, 42 bp, Artificial Sequence
  Synthetic
tttgtgtgaaacctgtgctgctccatcagtacctttgtgatc

SEQ ID NO: 8144 - DNA, 44 bp, Artificial Sequence
  Synthetic
ggaattgttccaccaacaggaaagttgtgaaggactctgaaagt

SEQ ID NO: 8145 - DNA, 41 bp, Artificial Sequence
  Synthetic
ctgatgttacggagagtcaaaccgaagtaccaagtcgcctc

SEQ ID NO: 8146 - DNA, 49 bp, Artificial Sequence
  Synthetic
acaaacacaagtagggcaaacagaatctgtatgttcattatcataagcc

SEQ ID NO: 8147 - DNA, 45 bp, Artificial Sequence
  Synthetic
acgatgcaacgtcacaatgttgatataggattaccatctaatgca

SEQ ID NO: 8148 - DNA, 42 bp, Artificial Sequence
  Synthetic
tttcactatgctcgacaaaatggtagctgccagtgtaggtat

SEQ ID NO: 8149 - DNA, 40 bp, Artificial Sequence
  Synthetic
atctggtggaaggcttggatatatcctccaactcgaacac

SEQ ID NO: 8150 - DNA, 42 bp, Artificial Sequence
  Synthetic
gggtgacccaaaatgaaggccttaatgaaggtgaatcaacac

SEQ ID NO: 8151 - DNA, 42 bp, Artificial Sequence
  Synthetic
tgtagcagagaccgattttaccaaaatcgagtaggacgttcc

SEQ ID NO: 8152 - DNA, 42 bp, Artificial Sequence
  Synthetic
acaacagacaaaatgtgggctttcacatccaaccataaacac

SEQ ID NO: 8153 - DNA, 49 bp, Artificial Sequence
  Synthetic
atccagactacattaaaatggcgcccttctggaaaaaaagaataaggaa

SEQ ID NO: 8154 - DNA, 40 bp, Artificial Sequence
  Synthetic
gtggttctctcgtatccacagagttttgaccttgggcctg

SEQ ID NO: 8155 - DNA, 42 bp, Artificial Sequence
  Synthetic
aacatctcagacaagttgtagcatcagaaaatcagcagctgc

SEQ ID NO: 8156 - DNA, 42 bp, Artificial Sequence
  Synthetic
actttgaagcaggaattctggagtctgtgtaggcggtcttga

SEQ ID NO: 8157 - DNA, 43 bp, Artificial Sequence
  Synthetic
actgtgtgaaaaatccctcaactagtggggttggagggtaatc

SEQ ID NO: 8158 - DNA, 43 bp, Artificial Sequence
  Synthetic
aatggagacaagtccttatcaactccaacaagccctccattct

SEQ ID NO: 8159 - DNA, 48 bp, Artificial Sequence
  Synthetic
tatcccaatttggtcaagagcacctactcaagagataaagttcttccg

SEQ ID NO: 8160 - DNA, 42 bp, Artificial Sequence
  Synthetic
tttcccttttccctttcctattcctaagaaccctgaacctgc

SEQ ID NO: 8161 - DNA, 45 bp, Artificial Sequence
  Synthetic
tctctttgatcttccacaaggggtatccaaggcatctcttcatag

SEQ ID NO: 8162 - DNA, 44 bp, Artificial Sequence
  Synthetic
agtgactggtgcttcttattttacttgatccaacctcagctgta

SEQ ID NO: 8163 - DNA, 43 bp, Artificial Sequence
  Synthetic
tcaagttcagataaaccctacaccttcaccaggaaccatagca

SEQ ID NO: 8164 - DNA, 49 bp, Artificial Sequence
  Synthetic
aatattgggacaggaacttcagctctccaaatctgtaaatctagctaaa

SEQ ID NO: 8165 - DNA, 45 bp, Artificial Sequence
  Synthetic
cttggacatctattccaactttggcgttgaccaactgagtctgaa

SEQ ID NO: 8166 - DNA, 46 bp, Artificial Sequence
  Synthetic
tttctggaatcacattaaagcaagctgcactcctgtaatatccatt

SEQ ID NO: 8167 - DNA, 42 bp, Artificial Sequence
  Synthetic
ttgcttcccatgtcagagtgaaggagcaaaacattccaagtt

SEQ ID NO: 8168 - DNA, 46 bp, Artificial Sequence
  Synthetic
ttgaggatccagttttagcaaagaatgatgtatgtctggattctcc

SEQ ID NO: 8169 - DNA, 42 bp, Artificial Sequence
  Synthetic
tagagggcctttagatctgacaatacctactggagtgaacca

SEQ ID NO: 8170 - DNA, 42 bp, Artificial Sequence
  Synthetic
agaagttgggaaacaaagactcaagggggtggaagtacttca

SEQ ID NO: 8171 - DNA, 42 bp, Artificial Sequence
  Synthetic
caggcagaagtgtgtggactcaatctaatcagtctcccagta

SEQ ID NO: 8172 - DNA, 44 bp, Artificial Sequence
  Synthetic
tggtcagatttttgtcagttagtgtcctacccttctcctcaaga

SEQ ID NO: 8173 - DNA, 38 bp, Artificial Sequence
  Synthetic
gcagttggcattcttggagtttgcgggagaaatgctta

SEQ ID NO: 8174 - DNA, 43 bp, Artificial Sequence
  Synthetic
gagagaagaatggatgtgtgagatgacaagcagccaatcatct

SEQ ID NO: 8175 - DNA, 45 bp, Artificial Sequence
  Synthetic
tccatgttgctggaggaaattctttggaacatttcttgagtaacc

SEQ ID NO: 8176 - DNA, 47 bp, Artificial Sequence
  Synthetic
agaaccagaggattataaagaggctctaactgagtcttacccactat

SEQ ID NO: 8177 - DNA, 45 bp, Artificial Sequence
  Synthetic
ggagttcatccaagattggctcagaacaattttccatcatgacag

SEQ ID NO: 8178 - DNA, 47 bp, Artificial Sequence
  Synthetic
tgctattggcatagatcctgatagacatctccgaatcttatcattgt

SEQ ID NO: 8179 - DNA, 41 bp, Artificial Sequence
  Synthetic
ggcaccatgcagtaccaaacacttcaatttggtcattcgtg

SEQ ID NO: 8180 - DNA, 42 bp, Artificial Sequence
  Synthetic
cctacagcaactgttacccttatgttaaactccagtgtgccg

SEQ ID NO: 8181 - DNA, 42 bp, Artificial Sequence
  Synthetic
cgggtacggacaatgaccaagagactgtgattcttcctgatg

SEQ ID NO: 8182 - DNA, 42 bp, Artificial Sequence
  Synthetic
atgagatcagatgcacccattggttgtcattgggaatgcttc

SEQ ID NO: 8183 - DNA, 39 bp, Artificial Sequence
  Synthetic
ttgggagggaatggtagacggtgtcctgttccctcagaa

SEQ ID NO: 8184 - DNA, 43 bp, Artificial Sequence
  Synthetic
ttcttgtggccctggagaacagtttgttcatttctgagtcagt

SEQ ID NO: 8185 - DNA, 43 bp, Artificial Sequence
  Synthetic
atggatttcctttgccatatcatgtcaggcccacatgatgaac

SEQ ID NO: 8186 - DNA, 42 bp, Artificial Sequence
  Synthetic
aaagacagtgcagcaacttagaaacaggctaacaacaggtct

SEQ ID NO: 8187 - DNA, 44 bp, Artificial Sequence
  Synthetic
aatctcgcagtggcagtttacaaataatctaacagtcgcaaaca

SEQ ID NO: 8188 - DNA, 42 bp, Artificial Sequence
  Synthetic
cattgtgacgaagagttgacagatccacctctgctactgtag

SEQ ID NO: 8189 - DNA, 48 bp, Artificial Sequence
  Synthetic
aattggttttctcttgaagcagactttcttcaaacagcttttccaaat

SEQ ID NO: 8190 - DNA, 42 bp, Artificial Sequence
  Synthetic
cctcgtttggaagcaataccttgtcctgttccataaatagcc

SEQ ID NO: 8191 - DNA, 44 bp, Artificial Sequence
  Synthetic
actgggtcgtaactgcatatgggtaacagttgcttacatccttc

SEQ ID NO: 8192 - DNA, 46 bp, Artificial Sequence
  Synthetic
caaggtaatacacgcataggtagagttccctctgatcttctgaaac

SEQ ID NO: 8193 - DNA, 46 bp, Artificial Sequence
  Synthetic
ccaaattttaaagtatggcagcacccctttgcctgtactaataccc

SEQ ID NO: 8194 - DNA, 39 bp, Artificial Sequence
  Synthetic
tgtccctcttacagacacaggcctcagcaatggtctcaa

SEQ ID NO: 8195 - DNA, 42 bp, Artificial Sequence
  Synthetic
taagcactattgacacagaaccctagcatccccagaatgttc

SEQ ID NO: 8196 - DNA, 39 bp, Artificial Sequence
  Synthetic
tgtcaacaacgggtaaggtctgtaggagtccgtgctttg

SEQ ID NO: 8197 - DNA, 43 bp, Artificial Sequence
  Synthetic
gatcctaacagatttgctctagctgaacagcccataccaaacg

SEQ ID NO: 8198 - DNA, 48 bp, Artificial Sequence
  Synthetic
ccttaccttgtgtagaaaatcctcccatgtccccatcttcaataatag

SEQ ID NO: 8199 - DNA, 49 bp, Artificial Sequence
  Synthetic
tgggtcagtaggagacagtattcccagcctttaaataataatggttgtc

SEQ ID NO: 8200 - DNA, 47 bp, Artificial Sequence
  Synthetic
ttaagcaacatgagtgcgactctttctattattattggttcacacgg

SEQ ID NO: 8201 - DNA, 42 bp, Artificial Sequence
  Synthetic
gtggggacatttgggtgacgaattgataacacttgccaggat

SEQ ID NO: 8202 - DNA, 44 bp, Artificial Sequence
  Synthetic
ctggggatgataaaaatgcaactgaccaatactgtccataagcc

SEQ ID NO: 8203 - DNA, 43 bp, Artificial Sequence
  Synthetic
tcctgacgtcagatgtatctgcatatgtctatgacgggcctat

SEQ ID NO: 8204 - DNA, 44 bp, Artificial Sequence
  Synthetic
agaacgatcagcaaggatttacgcgatttggaattaggtgtgga

SEQ ID NO: 8205 - DNA, 39 bp, Artificial Sequence
  Synthetic
ttccacgcgacagatccgtctaggatcacgagccaaggg

SEQ ID NO: 8206 - DNA, 36 bp, Artificial Sequence
  Synthetic
acagagctggtcctgacggatgggcgcgtctctctg

SEQ ID NO: 8207 - DNA, 38 bp, Artificial Sequence
  Synthetic
gctgatcctaacggaaggaggcatgcgccacacggagg

SEQ ID NO: 8208 - DNA, 36 bp, Artificial Sequence
  Synthetic
cctcccacgcgcgcctataaactgtgccctgttgcg

SEQ ID NO: 8209 - DNA, 37 bp, Artificial Sequence
  Synthetic
acaagacgagggctgcaacgctggtccggcagctcta

SEQ ID NO: 8210 - DNA, 38 bp, Artificial Sequence
  Synthetic
cggaggagagagaacggccgtacaccctctctcgcgcc

SEQ ID NO: 8211 - DNA, 38 bp, Artificial Sequence
  Synthetic
ggccaaggcaacggcacgatgacgacgtcctggctttc

SEQ ID NO: 8212 - DNA, 38 bp, Artificial Sequence
  Synthetic
cgatacagcgcgtcgtcgaactgctggtcggagagtgc

SEQ ID NO: 8213 - DNA, 43 bp, Artificial Sequence
  Synthetic
gttctcggacgggtcccttaatacttacttgagtgatggagtt

SEQ ID NO: 8214 - DNA, 47 bp, Artificial Sequence
  Synthetic
gcacgttgtctatccaatcgtaaagacctattctttgtattgggaaa

SEQ ID NO: 8215 - DNA, 41 bp, Artificial Sequence
  Synthetic
cgctttcctccgcatgtacaatgttgttcaacattcgcaag

SEQ ID NO: 8216 - DNA, 45 bp, Artificial Sequence
  Synthetic
ttttacacagtgtcgaaatcaccaaccggcttaactatacagttt

SEQ ID NO: 8217 - DNA, 40 bp, Artificial Sequence
  Synthetic
aacctgacctcgataaagcacttctcggcagtttgtttca

SEQ ID NO: 8218 - DNA, 42 bp, Artificial Sequence
  Synthetic
aatgacaaaacgtgctctctctggtgactatgagcagaccga

SEQ ID NO: 8219 - DNA, 46 bp, Artificial Sequence
  Synthetic
gttgcctgagttttcggtattcgaagttaacctgtgtttttaacga

SEQ ID NO: 8220 - DNA, 45 bp, Artificial Sequence
  Synthetic
ggttttgaagaagaagatgggatgttcaacgcctggaaaaaaatt

SEQ ID NO: 8221 - DNA, 43 bp, Artificial Sequence
  Synthetic
aacgattggattttcaaagtttccattggagaccgttgaacat

SEQ ID NO: 8222 - DNA, 44 bp, Artificial Sequence
  Synthetic
cgaaaatagttccgcctgtttctactcagaatacggtagcattt

SEQ ID NO: 8223 - DNA, 43 bp, Artificial Sequence
  Synthetic
ggtcaagcgaagataacattctttctaacgtagtgttgccgga

SEQ ID NO: 8224 - DNA, 42 bp, Artificial Sequence
  Synthetic
cattcgactcacatcattgaagcttaactttttcaccacgcc

SEQ ID NO: 8225 - DNA, 45 bp, Artificial Sequence
  Synthetic
aggttagattcggaaaccatagctagtgcaagttaagcagtttac

SEQ ID NO: 8226 - DNA, 39 bp, Artificial Sequence
  Synthetic
ggctccgcccatgatttcattaaaaaaacggccaacctc

SEQ ID NO: 8227 - DNA, 40 bp, Artificial Sequence
  Synthetic
gagtcgcttctagactcgcctgtttgagctgaagatggtg

SEQ ID NO: 8228 - DNA, 41 bp, Artificial Sequence
  Synthetic
tatgggcgcaaagtgctgtaaggtgttttcggttttcttac

SEQ ID NO: 8229 - DNA, 42 bp, Artificial Sequence
  Synthetic
ttggaagcatacgtttgtggcgtaagataacaggtaccgtgt

SEQ ID NO: 8230 - DNA, 44 bp, Artificial Sequence
  Synthetic
tttgcttttactgcagagcgtaatacctgtttataaactccgaa

SEQ ID NO: 8231 - DNA, 39 bp, Artificial Sequence
  Synthetic
tcggagagcgttgtggattgtgaaatgctacacggacac

SEQ ID NO: 8232 - DNA, 39 bp, Artificial Sequence
  Synthetic
acgacgtgctgcaaggccggcccgtctttagaaagagcg

SEQ ID NO: 8233 - DNA, 41 bp, Artificial Sequence
  Synthetic
cagaccgctgctggacgaacttggagagaaacgcgaaggga

SEQ ID NO: 8234 - DNA, 38 bp, Artificial Sequence
  Synthetic
acatctgttcgacgtgatcgcctctgacacaggccgcc

SEQ ID NO: 8235 - DNA, 42 bp, Artificial Sequence
  Synthetic
ttgggtggtcttgactttggcggacagatcttgccggtatcg

SEQ ID NO: 8236 - DNA, 41 bp, Artificial Sequence
  Synthetic
ccctcttccctttaaccccacgcaccctgtgtgtgactgtc

SEQ ID NO: 8237 - DNA, 43 bp, Artificial Sequence
  Synthetic
acaaagggattggctgatgattacagttccatgctattcccca

SEQ ID NO: 8238 - DNA, 47 bp, Artificial Sequence
  Synthetic
aactgaggaatatatctgttccagctgtctatgtaacttctcatccc

SEQ ID NO: 8239 - DNA, 44 bp, Artificial Sequence
  Synthetic
taatgcctttctcctcatgtctgatcttggactttccttcagtc

SEQ ID NO: 8240 - DNA, 50 bp, Artificial Sequence
  Synthetic
agaagtagcaatagatgacgaaacgactctacatttattgggtattttgg

SEQ ID NO: 8241 - DNA, 46 bp, Artificial Sequence
  Synthetic
tttgtgagtggaagagaaaaaccttggattttgtttgtaccattca

SEQ ID NO: 8242 - DNA, 46 bp, Artificial Sequence
  Synthetic
ggaaggcaaactagtaaaagggtccataatgcatcaaacatttggt

SEQ ID NO: 8243 - DNA, 45 bp, Artificial Sequence
  Synthetic
agaagacaagcataacgggaaacgcaatgttacatttacccaaat

SEQ ID NO: 8244 - DNA, 46 bp, Artificial Sequence
  Synthetic
tcatcgattatgaggagctaagagaggggaatatctcaaacctttc

SEQ ID NO: 8245 - DNA, 43 bp, Artificial Sequence
  Synthetic
tgcagatgcatatgtttttgtggtattgctatttccggcttga

SEQ ID NO: 8246 - DNA, 48 bp, Artificial Sequence
  Synthetic
attgcaatacaacttgtcaaacaccatgtatattctgaaatgggaggc

SEQ ID NO: 8247 - DNA, 46 bp, Artificial Sequence
  Synthetic
caccatcaaaatgagcaggggtctttgttagtaatctcgtcaatgg

SEQ ID NO: 8248 - DNA, 39 bp, Artificial Sequence
  Synthetic
cctacaagcgccaggagggtggagatagagccggccttg

SEQ ID NO: 8249 - DNA, 38 bp, Artificial Sequence
  Synthetic
ctcggagtcccagcgcgtttctgtcgctgcgttccatg

SEQ ID NO: 8250 - DNA, 36 bp, Artificial Sequence
  Synthetic
cacctccctgtggcgcatcagagcaggagcaggctc

SEQ ID NO: 8251 - DNA, 39 bp, Artificial Sequence
  Synthetic
tatccgtcctccctgggcacgatctggccctcaggtgac

SEQ ID NO: 8252 - DNA, 35 bp, Artificial Sequence
  Synthetic
ccgtccaccgtccctctcaggcgttcgggggactt

SEQ ID NO: 8253 - DNA, 42 bp, Artificial Sequence
  Synthetic
gaagacctagagctgccggacccacgtcgaacagatgtctga

SEQ ID NO: 8254 - DNA, 40 bp, Artificial Sequence
  Synthetic
gtgattctgggaaacgtgcccagacgatcacccaagccgt

SEQ ID NO: 8255 - DNA, 37 bp, Artificial Sequence
  Synthetic
gccctcctgggtacggcaactctcgtgccgttgcctt

SEQ ID NO: 8256 - DNA, 39 bp, Artificial Sequence
  Synthetic
gccgtgcttccagagaccgagtttaacggcgtgttcgac

SEQ ID NO: 8257 - DNA, 38 bp, Artificial Sequence
  Synthetic
caactcggcctgcgtgatcccgtgggggcagaactgag

SEQ ID NO: 8258 - DNA, 38 bp, Artificial Sequence
  Synthetic
aagccatgacggtacacagggtaagatacggcgtcctg

SEQ ID NO: 8259 - DNA, 47 bp, Artificial Sequence
  Synthetic
ttaaccgtttcttctgccagttaggcttatgctatatgaacagactg

SEQ ID NO: 8260 - DNA, 42 bp, Artificial Sequence
  Synthetic
tctccgaacatgatcagaactcgtgtttaagggggttcgttt

SEQ ID NO: 8261 - DNA, 42 bp, Artificial Sequence
  Synthetic
acgaaaacttttaacttcgacggaaatcttacttgtcgggcg

SEQ ID NO: 8262 - DNA, 39 bp, Artificial Sequence
  Synthetic
actgcaaatcgttccgtcgtggtctcgacttcgtgaatg

SEQ ID NO: 8263 - DNA, 43 bp, Artificial Sequence
  Synthetic
agcaaagcaataacgaaccttgttctcgttttttgctgtgaaa

SEQ ID NO: 8264 - DNA, 39 bp, Artificial Sequence
  Synthetic
tatcgtcgagctgtacagacgtatcgtcctccgcaagtt

SEQ ID NO: 8265 - DNA, 45 bp, Artificial Sequence
  Synthetic
taccttcaaaaatacgtaaacccctctgtaacagggagaagtttg

SEQ ID NO: 8266 - DNA, 42 bp, Artificial Sequence
  Synthetic
acaaacttgcaagcctgagctttcatttgctcttccatatgt

SEQ ID NO: 8267 - DNA, 39 bp, Artificial Sequence
  Synthetic
ggtaggtcgcgacttgttgattacttgtccaaaggtcga

SEQ ID NO: 8268 - DNA, 43 bp, Artificial Sequence
  Synthetic
caaccctgatgtaataaattccgtgatccaaccgcagattgtc

SEQ ID NO: 8269 - DNA, 42 bp, Artificial Sequence
  Synthetic
tcgggagaaaatagatcaagggctaattcggtttttaggcgc

SEQ ID NO: 8270 - DNA, 47 bp, Artificial Sequence
  Synthetic
taattcgcttaagattggcagtggaagttttgtagatatgggcttag

SEQ ID NO: 8271 - DNA, 39 bp, Artificial Sequence
  Synthetic
cgtctgttgttaggaccggtttagtcgttggtgtcccat

SEQ ID NO: 8272 - DNA, 49 bp, Artificial Sequence
  Synthetic
tcttcgcatacgtaagaaactacgcttttttaatgaagctgaacaactc

SEQ ID NO: 8273 - DNA, 43 bp, Artificial Sequence
  Synthetic
gcaaagcataaattcttctggcgttttcagttcaaacgcagac

SEQ ID NO: 8274 - DNA, 46 bp, Artificial Sequence
  Synthetic
tcatggttccgtcttccaagtcgttagtaaatataacagtaggaga

SEQ ID NO: 8275 - DNA, 42 bp, Artificial Sequence
  Synthetic
ccagatccgggttatagcgacaaagatctacactctttgctc

SEQ ID NO: 8276 - DNA, 42 bp, Artificial Sequence
  Synthetic
ctctctcctgtgtcgatcgcaataaacttatgctgaaccgag

SEQ ID NO: 8277 - DNA, 38 bp, Artificial Sequence
  Synthetic
atgtgtgacgtccgcatcattaacgacgttgtccacca

SEQ ID NO: 8278 - DNA, 38 bp, Artificial Sequence
  Synthetic
tgctcctacaagcgccaggatagagccggccttggaac

SEQ ID NO: 8279 - DNA, 37 bp, Artificial Sequence
  Synthetic
ggtggccgtgtacgcacctcgtcactcgaggaaacgc

SEQ ID NO: 8280 - DNA, 40 bp, Artificial Sequence
  Synthetic
atcgaccgactcctgctatccgggtgactccgcagactgg

SEQ ID NO: 8281 - DNA, 35 bp, Artificial Sequence
  Synthetic
gcggttctgccagggcgttagggtgacgacggacc

SEQ ID NO: 8282 - DNA, 36 bp, Artificial Sequence
  Synthetic
gggaccccgtggcgtatgatcgttccgcacatacgc

SEQ ID NO: 8283 - DNA, 38 bp, Artificial Sequence
  Synthetic
acattccatggggccaaagaatacaactggcaagtgca

SEQ ID NO: 8284 - DNA, 48 bp, Artificial Sequence
  Synthetic
ttaaatacggactgaaaggagggccgatattcttccctcatagacttt

SEQ ID NO: 8285 - DNA, 42 bp, Artificial Sequence
  Synthetic
ctccgccgagatcaaaagtccttgtttcccaacaagagtggc

SEQ ID NO: 8286 - DNA, 46 bp, Artificial Sequence
  Synthetic
aggcgatcatggaaaagaacatagtagcccttagtagtatcaaggt

SEQ ID NO: 8287 - DNA, 43 bp, Artificial Sequence
  Synthetic
gggagaccttcactacctccagaatttctgtcccaattgctct

SEQ ID NO: 8288 - DNA, 40 bp, Artificial Sequence
  Synthetic
ggccactatgtctgcacgttttgcactggtcacataattc

SEQ ID NO: 8289 - DNA, 44 bp, Artificial Sequence
  Synthetic
agaagtgagaataagatgctgcaacaatgtggttggttttttcc

SEQ ID NO: 8290 - DNA, 42 bp, Artificial Sequence
  Synthetic
cacgcaacaggacttgcaagcagtgacaaaatacacaatgtg

SEQ ID NO: 8291 - DNA, 43 bp, Artificial Sequence
  Synthetic
atgtggggtctgggtgttcacatcttctgaaactacatcacct

SEQ ID NO: 8292 - DNA, 46 bp, Artificial Sequence
  Synthetic
caggtggtagagctgtttaaatgccactccaaaaagttccttaaac

SEQ ID NO: 8293 - DNA, 49 bp, Artificial Sequence
  Synthetic
gcttgccaaaatgttaaatgtaccagaactttgtaatttaggtggttgt

SEQ ID NO: 8294 - DNA, 50 bp, Artificial Sequence
  Synthetic
tgcacaaatagcagatatagatgcacacaatctctaacatatttagcttg

SEQ ID NO: 8295 - DNA, 41 bp, Artificial Sequence
  Synthetic
gcaaacagctacagcaccatatgcccatttgtcttgctgta

SEQ ID NO: 8296 - DNA, 46 bp, Artificial Sequence
  Synthetic
tacaggacacaagtcaagaactatgttctactgtctttcctccttt

SEQ ID NO: 8297 - DNA, 45 bp, Artificial Sequence
  Synthetic
gcacgctcgcctgatattgaacttccagttgtattataggtgtag

SEQ ID NO: 8298 - DNA, 45 bp, Artificial Sequence
  Synthetic
aaccccatatttactgatccttcgggatacgaccactagcctcta

SEQ ID NO: 8299 - DNA, 47 bp, Artificial Sequence
  Synthetic
tcaccttctatacctgccatatctgtctgaaatagtatgcaggattc

SEQ ID NO: 8300 - DNA, 45 bp, Artificial Sequence
  Synthetic
tacgcttgcccgaccctaatggtttcagaattaaataaagacgtg

SEQ ID NO: 8301 - DNA, 46 bp, Artificial Sequence
  Synthetic
acaccgtgcaatgcttctaaatcactttttaattctagtacaggac

SEQ ID NO: 8302 - DNA, 44 bp, Artificial Sequence
  Synthetic
tgtgtgtgatactcccttgcaacaacacatacatacattccaga

SEQ ID NO: 8303 - DNA, 49 bp, Artificial Sequence
  Synthetic
atacgcttccaaacttgcttttaggccaaactgctattagctaaatgtt

SEQ ID NO: 8304 - DNA, 40 bp, Artificial Sequence
  Synthetic
cattgcaccagctatgtgaagtgaacacacagccaagttg

SEQ ID NO: 8305 - DNA, 47 bp, Artificial Sequence
  Synthetic
taaggtgctacagatgtcaacatcccgtttcttatagtcacagtgta

SEQ ID NO: 8306 - DNA, 42 bp, Artificial Sequence
  Synthetic
ctcagaggatgaggatgaggatgatgttgttcgtcccgtcta

SEQ ID NO: 8307 - DNA, 41 bp, Artificial Sequence
  Synthetic
gtaatcagcaaacagtgtgccgccggcacttctgtatcaat

SEQ ID NO: 8308 - DNA, 42 bp, Artificial Sequence
  Synthetic
tgccactgcaacaaatacaagatacaatatagcttggcctgc

SEQ ID NO: 8309 - DNA, 47 bp, Artificial Sequence
  Synthetic
gcatttgacaatgaagtaaccgatgtgtgcattactgtctacatctg

SEQ ID NO: 8310 - DNA, 46 bp, Artificial Sequence
  Synthetic
cctaaggtatcaaggggtcgagacaattatgttttggtgtaccttg

SEQ ID NO: 8311 - DNA, 42 bp, Artificial Sequence
  Synthetic
atttggataacgacgaagacaagggaattttctcctggcacg

SEQ ID NO: 8312 - DNA, 40 bp, Artificial Sequence
  Synthetic
acaaactttaaagacgaggccatcccatatgcacttccca

SEQ ID NO: 8313 - DNA, 41 bp, Artificial Sequence
  Synthetic
actgactccaccacacagtccattccttgcgacacactctg

SEQ ID NO: 8314 - DNA, 44 bp, Artificial Sequence
  Synthetic
agatgaaacccaacgccaaaaattgtaccagtgatacactaggg

SEQ ID NO: 8315 - DNA, 38 bp, Artificial Sequence
  Synthetic
tttgctgctttgtgtgcctgaaacacagaggcagactg

SEQ ID NO: 8316 - DNA, 42 bp, Artificial Sequence
  Synthetic
ccaacatctggggttcatagttatattgcctgtaccctgaac

SEQ ID NO: 8317 - DNA, 42 bp, Artificial Sequence
  Synthetic
agacattgtggctttacacagaccgcctactaaaacgcacac

SEQ ID NO: 8318 - DNA, 43 bp, Artificial Sequence
  Synthetic
acgtaggcgtcgtaaacgtattctaggaggcagataaaccttg

SEQ ID NO: 8319 - DNA, 41 bp, Artificial Sequence
  Synthetic
acagatatgtgaaaagtgcagctgtgggtcctgcttttcag

SEQ ID NO: 8320 - DNA, 41 bp, Artificial Sequence
  Synthetic
ctgcataccttagtgcttttgggagaacgtatgctgcaagc

SEQ ID NO: 8321 - DNA, 39 bp, Artificial Sequence
  Synthetic
ggcaactctccaggttgtctgcatatcaacatcaaccgg

SEQ ID NO: 8322 - DNA, 40 bp, Artificial Sequence
  Synthetic
ctgcctgcgcacctctcatgggactcaaagtgagcacacg

SEQ ID NO: 8323 - DNA, 46 bp, Artificial Sequence
  Synthetic
tgtggctattcagacaggattatgcgcatttgctacatcttgagat

SEQ ID NO: 8324 - DNA, 40 bp, Artificial Sequence
  Synthetic
aactccaggatctgggcaattctaccagggtagtgcacaa

SEQ ID NO: 8325 - DNA, 43 bp, Artificial Sequence
  Synthetic
acaactttaattggggagattgcaaaactaaatcgcagactgc

SEQ ID NO: 8326 - DNA, 47 bp, Artificial Sequence
  Synthetic
tctcttgttgtaccatgggtgacatggagtatttattatctgcagtt

SEQ ID NO: 8327 - DNA, 47 bp, Artificial Sequence
  Synthetic
tggaaaatcacactacaggaaatggggttatttctgagtcaaacctg

SEQ ID NO: 8328 - DNA, 46 bp, Artificial Sequence
  Synthetic
ggacagccatttcctagattttcttttgtctccatcatatccatca

SEQ ID NO: 8329 - DNA, 50 bp, Artificial Sequence
  Synthetic
aggaacaaggcataactgattacatgttctttaacactatctacaaaacc

SEQ ID NO: 8330 - DNA, 48 bp, Artificial Sequence
  Synthetic
aaaagttttgcaaatggacccaattatttcttaagccatgaatcagac

SEQ ID NO: 8331 - DNA, 39 bp, Artificial Sequence
  Synthetic
ggtggtggatgtcatgtctgctatagctggtggtggtgg

SEQ ID NO: 8332 - DNA, 44 bp, Artificial Sequence
  Synthetic
aacgatttatgagtcaaaaggttggaatagttgtaccactcccg

SEQ ID NO: 8333 - DNA, 44 bp, Artificial Sequence
  Synthetic
tatgcgaaaaacttgattgttgtgtctctccaagtacctctcac

SEQ ID NO: 8334 - DNA, 50 bp, Artificial Sequence
  Synthetic
agatgatgaagttgatgcagaagagccacagttacttgattattgtacaa

SEQ ID NO: 8335 - DNA, 48 bp, Artificial Sequence
  Synthetic
acaggtaacaactagtggattttcatctctactctttgcactcttaaa

SEQ ID NO: 8336 - DNA, 44 bp, Artificial Sequence
  Synthetic
aaatgcgtaatatgtcaatggcagaccctctgttttacaacgat

SEQ ID NO: 8337 - DNA, 48 bp, Artificial Sequence
  Synthetic
agatgtaaaagcagaacaatcgttgtgttaggaaactgtatacattgt

SEQ ID NO: 8338 - DNA, 47 bp, Artificial Sequence
  Synthetic
atttggaggcttaaagacacaagtttaaaacagtattttggctctgt

SEQ ID NO: 8339 - DNA, 40 bp, Artificial Sequence
  Synthetic
aaccttcgacgacgacaaggagtccgtcgtttggctcctc

SEQ ID NO: 8340 - DNA, 43 bp, Artificial Sequence
  Synthetic
gaggagctatataaacaatgtgccagcccatgtatcaccttct

SEQ ID NO: 8341 - DNA, 45 bp, Artificial Sequence
  Synthetic
cagatgagtctgcagtactagatgtccacatctaaagcaaaccgt

SEQ ID NO: 8342 - DNA, 43 bp, Artificial Sequence
  Synthetic
accttcctattttacaaccgataccaattgtagctcgctcacc

SEQ ID NO: 8343 - DNA, 45 bp, Artificial Sequence
  Synthetic
ttcagatgacttttacttgcatcctacagccatctgcaaaaaatt

SEQ ID NO: 8344 - DNA, 44 bp, Artificial Sequence
  Synthetic
gaggacgatactggtgatcacatgaacacttgattctgtttagg

SEQ ID NO: 8345 - DNA, 38 bp, Artificial Sequence
  Synthetic
caacaccgagtggctcactgtctttgcaaccaaaacgg

SEQ ID NO: 8346 - DNA, 43 bp, Artificial Sequence
  Synthetic
ttctgggacgttgatttaacagagaaatcgtctgcccaaagac

SEQ ID NO: 8347 - DNA, 41 bp, Artificial Sequence
  Synthetic
ggctgcctgcccctctttgagcacacgagactcttcacacc

SEQ ID NO: 8348 - DNA, 39 bp, Artificial Sequence
  Synthetic
tactgtttgacaccatgggcgtgagttttcatgcgagcc

SEQ ID NO: 8349 - DNA, 50 bp, Artificial Sequence
  Synthetic
aggcttaaacaaattactatcgggacagtatagagtttagtgtatcttgt

SEQ ID NO: 8350 - DNA, 43 bp, Artificial Sequence
  Synthetic
accatcatgcattgggtaggtgaattttgtggcattacattgg

SEQ ID NO: 8351 - DNA, 50 bp, Artificial Sequence
  Synthetic
aacatcactatattcccacaccagcggtacacaattaatgtatggtacaa

SEQ ID NO: 8352 - DNA, 47 bp, Artificial Sequence
  Synthetic
tggatctcaacaatttctcacaactgacactaaagtctggtagaaga

SEQ ID NO: 8353 - DNA, 49 bp, Artificial Sequence
  Synthetic
actttgcaaattggtcaggtagtatctgtactaaagctatcacaaacac

SEQ ID NO: 8354 - DNA, 38 bp, Artificial Sequence
  Synthetic
ccaacccagtggtccacaacatggtggttgaagatgcc

SEQ ID NO: 8355 - DNA, 44 bp, Artificial Sequence
  Synthetic
tttgacatggaagttactgttgtcaccaggtggtacaaacatga

SEQ ID NO: 8356 - DNA, 46 bp, Artificial Sequence
  Synthetic
tgctgtgtatggtatcacatctacagtgtcttccatagctctgaag

SEQ ID NO: 8357 - DNA, 38 bp, Artificial Sequence
  Synthetic
aaactgcaggcccaagtgattaagtgcgcattcctgta

SEQ ID NO: 8358 - DNA, 45 bp, Artificial Sequence
  Synthetic
tggtatcagatagaggaaacctgttacaatgtccttcaccaatca

SEQ ID NO: 8359 - DNA, 47 bp, Artificial Sequence
  Synthetic
ggtttcactgacacacttaaagaccgccatttaactacctttgaagt

SEQ ID NO: 8360 - DNA, 38 bp, Artificial Sequence
  Synthetic
ccaagccgacaaggtgatggatgccaatccactcaagg

SEQ ID NO: 8361 - DNA, 41 bp, Artificial Sequence
  Synthetic
atggatgatctgggccaaaacgacaccatctgacagaacat

SEQ ID NO: 8362 - DNA, 44 bp, Artificial Sequence
  Synthetic
tcaagtaggcttgctagatactgcgtggtggcttactacagttc

SEQ ID NO: 8363 - DNA, 44 bp, Artificial Sequence
  Synthetic
agaccctaaagtcattcaatactgctcaattgagccatggactg

SEQ ID NO: 8364 - DNA, 44 bp, Artificial Sequence
  Synthetic
ccttgcaaggtcctgaacatggtaatgatatggcagtttcttct

SEQ ID NO: 8365 - DNA, 49 bp, Artificial Sequence
  Synthetic
atacatgtgggtggaaatggtaggtcagcaaaatatttcctaagtagtg

SEQ ID NO: 8366 - DNA, 43 bp, Artificial Sequence
  Synthetic
tgaatgagtacatagaaacagccggttctgggttgatgtcaag

SEQ ID NO: 8367 - DNA, 43 bp, Artificial Sequence
  Synthetic
actttcctaaaggatgaactccgctccacaatcctggtcttac

SEQ ID NO: 8368 - DNA, 42 bp, Artificial Sequence
  Synthetic
agatggagaactcattgcttttgacgctttaaaccacactgg

SEQ ID NO: 8369 - DNA, 44 bp, Artificial Sequence
  Synthetic
atgagtcaatcagatggactaaggaacaaacacaacgaatggac

SEQ ID NO: 8370 - DNA, 43 bp, Artificial Sequence
  Synthetic
aaccctgctctcagaatgaaatgttctcttgtctgctgtgatt

SEQ ID NO: 8371 - DNA, 48 bp, Artificial Sequence
  Synthetic
caagtacagtccattatccaaaggtcatgttttaacctttcaaccttc

SEQ ID NO: 8372 - DNA, 44 bp, Artificial Sequence
  Synthetic
gtaaaattgctcctttaatggtggcgaaatctggttttgcggac

SEQ ID NO: 8373 - DNA, 43 bp, Artificial Sequence
  Synthetic
ggcggagagcaacagctatccttactatcaactgaatcagcct

SEQ ID NO: 8374 - DNA, 46 bp, Artificial Sequence
  Synthetic
cacttccaaaaagatgcaaaagtgccatccccatgacattgtcaat

SEQ ID NO: 8375 - DNA, 41 bp, Artificial Sequence
  Synthetic
cagggaacagagaagttgacaatcaggaccgttgatttccc

SEQ ID NO: 8376 - DNA, 40 bp, Artificial Sequence
  Synthetic
ggaaacggccgattttcccacttacttgcaaccgcccaaa

SEQ ID NO: 8377 - DNA, 44 bp, Artificial Sequence
  Synthetic
ggtgtttatgttacacatcagctgaggcactcaagagtagtctc

SEQ ID NO: 8378 - DNA, 41 bp, Artificial Sequence
  Synthetic
atgattcttcaggctgacatagctaggtataggcggcagag

SEQ ID NO: 8379 - DNA, 43 bp, Artificial Sequence
  Synthetic
ggagacccaaatgcttcctgcttactgtaaataaagctgaagc

SEQ ID NO: 8380 - DNA, 39 bp, Artificial Sequence
  Synthetic
ccaggaactaggcgcagctgccttgcatgcgtcacacat

SEQ ID NO: 8381 - DNA, 48 bp, Artificial Sequence
  Synthetic
actggtttggaactcctctatctctttcaaattcctcgctataatcct

SEQ ID NO: 8382 - DNA, 41 bp, Artificial Sequence
  Synthetic
gcttttacagccagcagcgtcgcctccctcatttcttcctc

SEQ ID NO: 8383 - DNA, 41 bp, Artificial Sequence
  Synthetic
aacatgcctgctacatctcgggaggctgacttgtccagagt

SEQ ID NO: 8384 - DNA, 42 bp, Artificial Sequence
  Synthetic
ctgctcttccctagaaacgggcgtgcagccctttaccacatt

SEQ ID NO: 8385 - DNA, 40 bp, Artificial Sequence
  Synthetic
acgatgagaccaagtccagggtgctgcatcctggtgtgtc

SEQ ID NO: 8386 - DNA, 37 bp, Artificial Sequence
  Synthetic
gaccatgacctacgcgaccgttgtcatggcggctgcg

SEQ ID NO: 8387 - DNA, 40 bp, Artificial Sequence
  Synthetic
ggggtggaggtagcaccactcccctgctatgactggatca

SEQ ID NO: 8388 - DNA, 42 bp, Artificial Sequence
  Synthetic
ggaccaccaggacaatgtagccgcattcccttccaagttgca

SEQ ID NO: 8389 - DNA, 38 bp, Artificial Sequence
  Synthetic
gggccgtagatgaccccgagacggcagttgcatctcct

SEQ ID NO: 8390 - DNA, 39 bp, Artificial Sequence
  Synthetic
ttgggacgactgcgactgtaggaggacatgacgctggcc

SEQ ID NO: 8391 - DNA, 36 bp, Artificial Sequence
  Synthetic
tttgggcgcgagaaagaccgtgcgagaccgtctgcg

SEQ ID NO: 8392 - DNA, 41 bp, Artificial Sequence
  Synthetic
cgtccacgccaagacaaaggaggaccccctggtggaaaacg

SEQ ID NO: 8393 - DNA, 41 bp, Artificial Sequence
  Synthetic
ccctgccgcaatgctttttaggtgccaccaagcttgacaat

SEQ ID NO: 8394 - DNA, 37 bp, Artificial Sequence
  Synthetic
ccagcctcggttatgcagggactaacgagcccctgcg

SEQ ID NO: 8395 - DNA, 36 bp, Artificial Sequence
  Synthetic
acaactcatgcgagggtgccctttcgcgccgagcag

SEQ ID NO: 8396 - DNA, 38 bp, Artificial Sequence
  Synthetic
gaggtgtgcgtcagggcaaatgcgacgactcggacttt

SEQ ID NO: 8397 - DNA, 40 bp, Artificial Sequence
  Synthetic
aagctcctcgtaggtgaggtccttcaggagtgggcactgg

SEQ ID NO: 8398 - DNA, 42 bp, Artificial Sequence
  Synthetic
accagcatgaaggggacaagctgcggctctttgttacctacg

SEQ ID NO: 8399 - DNA, 38 bp, Artificial Sequence
  Synthetic
gccctggctggtggttttcatctccgtcctcgaggagc

SEQ ID NO: 8400 - DNA, 38 bp, Artificial Sequence
  Synthetic
gcgtcattgacggcggcctctaccaggacaactcgggc

SEQ ID NO: 8401 - DNA, 36 bp, Artificial Sequence
  Synthetic
cgcaggcgctgaaaaaggtagtgcgccgctggatca

SEQ ID NO: 8402 - DNA, 38 bp, Artificial Sequence
  Synthetic
cgggagacggtcgacgaagccaccgaaaccatgcgtcg

SEQ ID NO: 8403 - DNA, 42 bp, Artificial Sequence
  Synthetic
aggaaagcgtctagccaatcgccgcaattctaacagcgtcca

SEQ ID NO: 8404 - DNA, 39 bp, Artificial Sequence
  Synthetic
cgacgcgctcggcaaggattgttgacatggacgacttcc

SEQ ID NO: 8405 - DNA, 38 bp, Artificial Sequence
  Synthetic
gtagccgtagaggtagcgggactctggaaccgcgtccg

SEQ ID NO: 8406 - DNA, 37 bp, Artificial Sequence
  Synthetic
ggctaaagccgcgactaacgtggcggctatcgggctt

SEQ ID NO: 8407 - DNA, 37 bp, Artificial Sequence
  Synthetic
gcatcccgtcctgcgccaaatttgtacagcgccggcg

SEQ ID NO: 8408 - DNA, 35 bp, Artificial Sequence
  Synthetic
tgattgcgcgcgaggaggttgcacgatggcctccg

SEQ ID NO: 8409 - DNA, 36 bp, Artificial Sequence
  Synthetic
cgcatggcgctcaaggtgcacggccttgtggatgcg

SEQ ID NO: 8410 - DNA, 34 bp, Artificial Sequence
  Synthetic
taagggcggcgctgcaaagttgcatcgcggcctc

SEQ ID NO: 8411 - DNA, 37 bp, Artificial Sequence
  Synthetic
acgaacgtgcagtccaacctgtgaaccgctcgcgctg

SEQ ID NO: 8412 - DNA, 39 bp, Artificial Sequence
  Synthetic
cggtcaacggtgagcagcttggtgaagggtgcgatcagc

SEQ ID NO: 8413 - DNA, 37 bp, Artificial Sequence
  Synthetic
cactgtcggccgaggaagaaagccccctcctgcatca

SEQ ID NO: 8414 - DNA, 39 bp, Artificial Sequence
  Synthetic
ccgccagggttctacacgggcccacagaaacccgtcgtt

SEQ ID NO: 8415 - DNA, 37 bp, Artificial Sequence
  Synthetic
gcctggtgtgggacgacgatcccgcccaagtccaaca

SEQ ID NO: 8416 - DNA, 41 bp, Artificial Sequence
  Synthetic
accctggaggttccgtttgtgcaatgctgtttctgccctcc

SEQ ID NO: 8417 - DNA, 40 bp, Artificial Sequence
  Synthetic
gatgccgggggtctacacctacggctctcggtgaagtcca

SEQ ID NO: 8418 - DNA, 43 bp, Artificial Sequence
  Synthetic
gcaagaggagatagcagtgtcccaatctctagctccttctcag

SEQ ID NO: 8419 - DNA, 42 bp, Artificial Sequence
  Synthetic
tcagcaactaccccgtggttggggcgagatcgttgtaaaagc

SEQ ID NO: 8420 - DNA, 39 bp, Artificial Sequence
  Synthetic
cgcgtgctctccagtcgcatgttattgctgggcgagatg

SEQ ID NO: 8421 - DNA, 35 bp, Artificial Sequence
  Synthetic
aactacacccccgcccccttagtcgcgcgcgtcag

SEQ ID NO: 8422 - DNA, 37 bp, Artificial Sequence
  Synthetic
cgtgtactgggtgcgcgagatcagggacgaggaggac

SEQ ID NO: 8423 - DNA, 40 bp, Artificial Sequence
  Synthetic
cggcacggcggtggtgtttaatagctacgcttgctcctga

SEQ ID NO: 8424 - DNA, 37 bp, Artificial Sequence
  Synthetic
aaatggatgtggagcccgaggtccacggtctgcacgc

SEQ ID NO: 8425 - DNA, 40 bp, Artificial Sequence
  Synthetic
ccaggaggcgaagatggggctggaaggatgcaacacgtag

SEQ ID NO: 8426 - DNA, 36 bp, Artificial Sequence
  Synthetic
caggagaggcatggcaggcaggaacccgccactcag

SEQ ID NO: 8427 - DNA, 38 bp, Artificial Sequence
  Synthetic
gaacgggggcgccttcaatttaggtccggagcgttgag

SEQ ID NO: 8428 - DNA, 37 bp, Artificial Sequence
  Synthetic
cctgacgcggaggagacgaaagggcctcctcgtacga

SEQ ID NO: 8429 - DNA, 40 bp, Artificial Sequence
  Synthetic
gagcacgctgcacagtatcgtcttaatagcatcggcggcg

SEQ ID NO: 8430 - DNA, 39 bp, Artificial Sequence
  Synthetic
cacccacgatgtgaccacggagatccacgggcacaaagc

SEQ ID NO: 8431 - DNA, 43 bp, Artificial Sequence
  Synthetic
aagggtctgcaaattggtgttgttcgtttgcatagataggctc

SEQ ID NO: 8432 - DNA, 39 bp, Artificial Sequence
  Synthetic
gaactctgcggtggacagttttccacaccgtgattctca

SEQ ID NO: 8433 - DNA, 42 bp, Artificial Sequence
  Synthetic
cctacgagtacatgaacgggcgcgccaatgttaacgtaagcg

SEQ ID NO: 8434 - DNA, 35 bp, Artificial Sequence
  Synthetic
gcgcctccgtccgctttgatgtgcgccatggggaa

SEQ ID NO: 8435 - DNA, 40 bp, Artificial Sequence
  Synthetic
aacgtggcccaatgcaacatggccctggtagccaatgttg

SEQ ID NO: 8436 - DNA, 35 bp, Artificial Sequence
  Synthetic
cagccctaccccgccaacttgggtgacggagggca

SEQ ID NO: 8437 - DNA, 35 bp, Artificial Sequence
  Synthetic
ggcaacgccaccacctaagctcgcgcacaatggcc

SEQ ID NO: 8438 - DNA, 40 bp, Artificial Sequence
  Synthetic
ttcgagtacgaggccatgttgctgctcgaggctgagacag

SEQ ID NO: 8439 - DNA, 38 bp, Artificial Sequence
  Synthetic
tccggcgcaaccaggaggaagcgaaagtagggggagtg

SEQ ID NO: 8440 - DNA, 38 bp, Artificial Sequence
  Synthetic
gtctcgctccacatgcgccgcggtcccaactgcgattt

SEQ ID NO: 8441 - DNA, 40 bp, Artificial Sequence
  Synthetic
ctgcttaaaagcttgctgggccttagcgggaaaagctgcg

SEQ ID NO: 8442 - DNA, 35 bp, Artificial Sequence
  Synthetic
tggccttccacctcggcaaactgggagtgcaccgg

SEQ ID NO: 8443 - DNA, 40 bp, Artificial Sequence
  Synthetic
tggtatccatgcccttctcccatctgaacgtgtgcaaccc

SEQ ID NO: 8444 - DNA, 36 bp, Artificial Sequence
  Synthetic
ccggagcccacccgctgataaaaggagcccctcgcc

SEQ ID NO: 8445 - DNA, 41 bp, Artificial Sequence
  Synthetic
acagaaggaaaccaacgctgggagcagcacatcctcctgtc

SEQ ID NO: 8446 - DNA, 40 bp, Artificial Sequence
  Synthetic
ctcacccattttgcctaccccggatccatgatgcgacgca

SEQ ID NO: 8447 - DNA, 39 bp, Artificial Sequence
  Synthetic
cgtggagctaaccaacctggtcagcacagtctgccccag

SEQ ID NO: 8448 - DNA, 39 bp, Artificial Sequence
  Synthetic
gccttggacctggccgaaatctcataaagtcgggcagcc

SEQ ID NO: 8449 - DNA, 35 bp, Artificial Sequence
  Synthetic
gccactgccgctgcaacctggagctgggggttgca

SEQ ID NO: 8450 - DNA, 40 bp, Artificial Sequence
  Synthetic
ctcgcccaattgcacgccatccaggtagacccctttaccc

SEQ ID NO: 8451 - DNA, 40 bp, Artificial Sequence
  Synthetic
gggatcgagtaaagggtgacggtgtgggccctccatgatc

SEQ ID NO: 8452 - DNA, 40 bp, Artificial Sequence
  Synthetic
aaatcggtctctgcgctcgcgctgcagctgatcttcgttt

SEQ ID NO: 8453 - DNA, 40 bp, Artificial Sequence
  Synthetic
gtccgcccagacccgacttaagttgtatgcctttgcctcg

SEQ ID NO: 8454 - DNA, 40 bp, Artificial Sequence
  Synthetic
taccccgacgagttcataccgattcagtcgtagccgtcga

SEQ ID NO: 8455 - DNA, 41 bp, Artificial Sequence
  Synthetic
atccagtgtcgtcataatcgcaaaagttcacctgttcctgg

SEQ ID NO: 8456 - DNA, 44 bp, Artificial Sequence
  Synthetic
ggggtgtactgtcatgccactactgtacatataacactcctctc

SEQ ID NO: 8457 - DNA, 42 bp, Artificial Sequence
  Synthetic
ctgctggtaggggctctaatgagcaatttttccttctgctca

SEQ ID NO: 8458 - DNA, 48 bp, Artificial Sequence
  Synthetic
taatgctgacaagtctcatgaaaggtctacttttcccttactgtcatg

SEQ ID NO: 8459 - DNA, 43 bp, Artificial Sequence
  Synthetic
atcaacaaataaccttcagccaacattgccatttggaggtcca

SEQ ID NO: 8460 - DNA, 43 bp, Artificial Sequence
  Synthetic
acaagttgcagaaactgatcaaaacatcactcccaccacgatt

SEQ ID NO: 8461 - DNA, 42 bp, Artificial Sequence
  Synthetic
ttgctgcaaagccagaaaaaaatcggctgaggattcccgatt

SEQ ID NO: 8462 - DNA, 42 bp, Artificial Sequence
  Synthetic
tcctgcagcttatcgactggtgtgtattcgggactgtggtga

SEQ ID NO: 8463 - DNA, 38 bp, Artificial Sequence
  Synthetic
ctggaactctgttggggcataactgatttctgcgggga

SEQ ID NO: 8464 - DNA, 41 bp, Artificial Sequence
  Synthetic
cgaaaccagcggctgtatccagcaaagggtcttaaggaggg

SEQ ID NO: 8465 - DNA, 46 bp, Artificial Sequence
  Synthetic
tggaaatgtctcactcaaggttggcaaaggtggttcagtattaact

SEQ ID NO: 8466 - DNA, 44 bp, Artificial Sequence
  Synthetic
agaagataaacgcaccctatggaatcctgatcaattctgcaatt

SEQ ID NO: 8467 - DNA, 41 bp, Artificial Sequence
  Synthetic
ggaaagccacatcaaccagcgtattcacatccagtttcctg

SEQ ID NO: 8468 - DNA, 38 bp, Artificial Sequence
  Synthetic
gtgcgggaactggacttgggaatcaccgacccccgttt

SEQ ID NO: 8469 - DNA, 42 bp, Artificial Sequence
  Synthetic
atgttgggaatgatggaacccacagtgtgtttataaggggca

SEQ ID NO: 8470 - DNA, 45 bp, Artificial Sequence
  Synthetic
tggaaactcttgcagcaggggcagattatcataatgtaagttctg

SEQ ID NO: 8471 - DNA, 40 bp, Artificial Sequence
  Synthetic
gcggaggcaggattggaagaacctgcgtgacttgcacttt

SEQ ID NO: 8472 - DNA, 42 bp, Artificial Sequence
  Synthetic
tccgcacatgtggaaaagctgtttctattatgaaggtttgcc

SEQ ID NO: 8473 - DNA, 45 bp, Artificial Sequence
  Synthetic
atcctgtaaatacgtcactaggacctctactaaccatgcttcagc

SEQ ID NO: 8474 - DNA, 40 bp, Artificial Sequence
  Synthetic
actgggttagtatgcccgtgtgtactcgttcctactggat

SEQ ID NO: 8475 - DNA, 41 bp, Artificial Sequence
  Synthetic
aatgacggaaggtgtaaaaacccggaagtgtgtttgcgaaa

SEQ ID NO: 8476 - DNA, 42 bp, Artificial Sequence
  Synthetic
agtctggcggaggagcaattatagggcctaatgtgaagacag

SEQ ID NO: 8477 - DNA, 49 bp, Artificial Sequence
  Synthetic
agttcaagtttggatagtgttggtgcttctaatctattgaagaatcctt

SEQ ID NO: 8478 - DNA, 42 bp, Artificial Sequence
  Synthetic
caatgggcgttgctgtggtaccatgtccaaatatgttcttcc

SEQ ID NO: 8479 - DNA, 43 bp, Artificial Sequence
  Synthetic
aatgacagcaatgaaagatggatgatcttctgcaccacgaatc

SEQ ID NO: 8480 - DNA, 44 bp, Artificial Sequence
  Synthetic
tgatgatgctacagcggctgcttctattgtccaagtatcctgtt

SEQ ID NO: 8481 - DNA, 39 bp, Artificial Sequence
  Synthetic
acagaagctggctccatggtatatcgtcggctttgcatg

SEQ ID NO: 8482 - DNA, 42 bp, Artificial Sequence
  Synthetic
aaggtatacacagggcctctagtgcccatattctcaggtaga

SEQ ID NO: 8483 - DNA, 38 bp, Artificial Sequence
  Synthetic
tccagagcttgaagatgccgttacgcttgatggtcgtc

SEQ ID NO: 8484 - DNA, 44 bp, Artificial Sequence
  Synthetic
cactccaaagaacaaccacaacctggactttttgtgttgttgtt

SEQ ID NO: 8485 - DNA, 43 bp, Artificial Sequence
  Synthetic
aaagacaaggtttgacccctctctctcttatcaagtcaggctt

SEQ ID NO: 8486 - DNA, 45 bp, Artificial Sequence
  Synthetic
cctctcaaaacaggtcctgacaatctcctaccttgactattctga

SEQ ID NO: 8487 - DNA, 44 bp, Artificial Sequence
  Synthetic
tctactaccatggtccagccgctagagctactttattggcatta

SEQ ID NO: 8488 - DNA, 43 bp, Artificial Sequence
  Synthetic
tatcagtgaatctgctggttacactaacggggaggattccttt

SEQ ID NO: 8489 - DNA, 43 bp, Artificial Sequence
  Synthetic
ccacatatgaatctagtcatctgggttggaacacagcatcgac

SEQ ID NO: 8490 - DNA, 48 bp, Artificial Sequence
  Synthetic
aagcagagagaaaaacaacaacacattgcttttgttcttgtttgtgat

SEQ ID NO: 8491 - DNA, 42 bp, Artificial Sequence
  Synthetic
tgtcattggtaccatagcactaggtcagctaatgcaatgccc

SEQ ID NO: 8492 - DNA, 50 bp, Artificial Sequence
  Synthetic
aagggaactgtgatagatgttgattcctggtatttctgataaaattggta

SEQ ID NO: 8493 - DNA, 46 bp, Artificial Sequence
  Synthetic
ttgacctataccaattgcggtttcccttttattggcatatagttct

SEQ ID NO: 8494 - DNA, 46 bp, Artificial Sequence
  Synthetic
aacctataaggcaacagcatccccaatatgaactatttgttttccc

SEQ ID NO: 8495 - DNA, 50 bp, Artificial Sequence
  Synthetic
tctcattattacctggaccaagtctgataatgaaggtagtctaacacatc

SEQ ID NO: 8496 - DNA, 43 bp, Artificial Sequence
  Synthetic
acaaggggttatcagttatgctccccttcactcgagtagtctg

SEQ ID NO: 8497 - DNA, 43 bp, Artificial Sequence
  Synthetic
gtggcttaacaactccgctctgattaacattggtacatctgtt

SEQ ID NO: 8498 - DNA, 43 bp, Artificial Sequence
  Synthetic
ccaacctgcaaataggatcattagagacaggacttcatgaggc

SEQ ID NO: 8499 - DNA, 50 bp, Artificial Sequence
  Synthetic
tcaacatgctaagactcaagaatgtgagtgatacatgatgtagtagtgta

SEQ ID NO: 8500 - DNA, 49 bp, Artificial Sequence
  Synthetic
agagttactcagactggatatcccatcagagactgaaaaaatggatctt

SEQ ID NO: 8501 - DNA, 49 bp, Artificial Sequence
  Synthetic
gaattatgggagcttatcgactcttagtgataaaggttctagtagtgat

SEQ ID NO: 8502 - DNA, 45 bp, Artificial Sequence
  Synthetic
tggtaaagggagaaattgacctactatcttggaacacctgagaca

SEQ ID NO: 8503 - DNA, 44 bp, Artificial Sequence
  Synthetic
gtgacatccagagttcctgtcagtgatttcttcatagacgtgag

SEQ ID NO: 8504 - DNA, 46 bp, Artificial Sequence
  Synthetic
ttgtcagaaatataggtgatccagcacctgctttgatgaatctctt

SEQ ID NO: 8505 - DNA, 45 bp, Artificial Sequence
  Synthetic
agaaactccagacccgttagaatttacatatttctgagccttcaa

SEQ ID NO: 8506 - DNA, 46 bp, Artificial Sequence
  Synthetic
ttgaagttactcacccctgtatcggtagcagtatctctcaatctgt

SEQ ID NO: 8507 - DNA, 46 bp, Artificial Sequence
  Synthetic
aaagacacatcacatgcagtccccagaatcgtttgaatattttagg

SEQ ID NO: 8508 - DNA, 43 bp, Artificial Sequence
  Synthetic
ctgctgaggttcaacacaatatacccccttaacccccagaagg

SEQ ID NO: 8509 - DNA, 39 bp, Artificial Sequence
  Synthetic
atctcggagaaggtgcaggtgttcatgcagggtcctaat

SEQ ID NO: 8510 - DNA, 41 bp, Artificial Sequence
  Synthetic
ccatacagccatgggacaggattgatgtgttctgttgactg

SEQ ID NO: 8511 - DNA, 39 bp, Artificial Sequence
  Synthetic
gtcgtcagacctatgactggatatagtgttggctagcgc

SEQ ID NO: 8512 - DNA, 50 bp, Artificial Sequence
  Synthetic
aaatggtcacacaacgaacaataggttatcagatagcttctcttgttcaa

SEQ ID NO: 8513 - DNA, 46 bp, Artificial Sequence
  Synthetic
atgactaattcacaagacacagagcctcattccatttggtgttgtc

SEQ ID NO: 8514 - DNA, 45 bp, Artificial Sequence
  Synthetic
gcatgaagctccgaacacaaggttgattcattaaagtatttcagg

SEQ ID NO: 8515 - DNA, 40 bp, Artificial Sequence
  Synthetic
ccaatcctctgatgacttcgccctgcttgtattccctcat

SEQ ID NO: 8516 - DNA, 40 bp, Artificial Sequence
  Synthetic
atgagcattggggtaacagtgagttgaagagccatttggg

SEQ ID NO: 8517 - DNA, 45 bp, Artificial Sequence
  Synthetic
gtaatcccctgaatccatttgtcacattaccacagcattgtttac

SEQ ID NO: 8518 - DNA, 38 bp, Artificial Sequence
  Synthetic
tcgtacaggagaccagttggaatccgagccctagacac

SEQ ID NO: 8519 - DNA, 44 bp, Artificial Sequence
  Synthetic
aggactacgaggtggactttgagcaattcttctgttgttaattc

SEQ ID NO: 8520 - DNA, 40 bp, Artificial Sequence
  Synthetic
atacggtgccatgcatgcagcgcctgtacctgatgctcct

SEQ ID NO: 8521 - DNA, 40 bp, Artificial Sequence
  Synthetic
ttgttgaacaagcacagcaggctgcaccaccagcctaact

SEQ ID NO: 8522 - DNA, 43 bp, Artificial Sequence
  Synthetic
agtgataagtcaatatgtggggacttttacagcctctgccaca

SEQ ID NO: 8523 - DNA, 40 bp, Artificial Sequence
  Synthetic
ccaccaaagattagaagcgcacgtttcgccatacacctcg

SEQ ID NO: 8524 - DNA, 44 bp, Artificial Sequence
  Synthetic
ccttcttggccagtaactgccatgcttacacattgtaattgcat

SEQ ID NO: 8525 - DNA, 44 bp, Artificial Sequence
  Synthetic
tgagcctactaaattttctgggaggaccaaaaatggctgcttga

SEQ ID NO: 8526 - DNA, 42 bp, Artificial Sequence
  Synthetic
gcaacaagcttgaggaccaaataacattgcattttccaaacg

SEQ ID NO: 8527 - DNA, 42 bp, Artificial Sequence
  Synthetic
tgtggaatacgcagccacaacaaatttaactgttagtctgcg

SEQ ID NO: 8528 - DNA, 43 bp, Artificial Sequence
  Synthetic
acatgcaagtgttgtggtatatggacatatgagcagcagtgta

SEQ ID NO: 8529 - DNA, 40 bp, Artificial Sequence
  Synthetic
gtggatattggccctgtgtccctagagggatcggcagcac

SEQ ID NO: 8530 - DNA, 40 bp, Artificial Sequence
  Synthetic
accttgccggccatgtcatttgtgcattgggatttcctca

SEQ ID NO: 8531 - DNA, 42 bp, Artificial Sequence
  Synthetic
atgctgaccctgaggtgttggagccctgtactgtaagtgtgg

SEQ ID NO: 8532 - DNA, 41 bp, Artificial Sequence
  Synthetic
cgtcgtaaacgtgtaccctattctataccttgccgtcacca

SEQ ID NO: 8533 - DNA, 40 bp, Artificial Sequence
  Synthetic
tatccccaaggtgtctggctattagggtcaggaagctgta

SEQ ID NO: 8534 - DNA, 43 bp, Artificial Sequence
  Synthetic
gtttacgcagggaacaaatgttttaataagagtcaggcagtgc

SEQ ID NO: 8535 - DNA, 43 bp, Artificial Sequence
  Synthetic
aattgtttgtaaccgttgtggatacgggggatgtagcagtaca

SEQ ID NO: 8536 - DNA, 41 bp, Artificial Sequence
  Synthetic
gcccaaggaggatcgctatggtggaaaacttgtctcgtaaa

SEQ ID NO: 8537 - DNA, 43 bp, Artificial Sequence
  Synthetic
gttgttttgtattgtgctgtactggtcatacaaaccaggcacc

SEQ ID NO: 8538 - DNA, 42 bp, Artificial Sequence
  Synthetic
gttccttgtgttcgggtagccacaacaaaaaaggcgggagac

SEQ ID NO: 8539 - DNA, 44 bp, Artificial Sequence
  Synthetic
tttgtgctgactactttcccttaaagtttcctggctagaaaagt

SEQ ID NO: 8540 - DNA, 41 bp, Artificial Sequence
  Synthetic
aacatgtttacaaggtgggacgtgggtttggacaggacttt

SEQ ID NO: 8541 - DNA, 40 bp, Artificial Sequence
  Synthetic
acctccaacaaagcctgaagaggctgttcacagttggtat

SEQ ID NO: 8542 - DNA, 37 bp, Artificial Sequence
  Synthetic
aacctgactcacgctcagggcatgggggatgcggagg

SEQ ID NO: 8543 - DNA, 38 bp, Artificial Sequence
  Synthetic
cgaccgcgccattccattggtaggggccaatgggaggc

SEQ ID NO: 8544 - DNA, 41 bp, Artificial Sequence
  Synthetic
atcacccgaaaactagaggacattgactttcaaacaacccg

SEQ ID NO: 8545 - DNA, 42 bp, Artificial Sequence
  Synthetic
agttggcctaactcaccaaaaacttctaagtaagcgccccaa

SEQ ID NO: 8546 - DNA, 35 bp, Artificial Sequence
  Synthetic
tgcgtggtctccggtgcctacccgctgaacccacc

SEQ ID NO: 8547 - DNA, 38 bp, Artificial Sequence
  Synthetic
tgggtgggtgtacgtaggttccattcagcggccccgtg

SEQ ID NO: 8548 - DNA, 41 bp, Artificial Sequence
  Synthetic
gagatgctgctgtgtgaggcagccccaccttatcgttcaag

SEQ ID NO: 8549 - DNA, 40 bp, Artificial Sequence
  Synthetic
tggaagcctgctcagggatttcccgccttctgccatggta

SEQ ID NO: 8550 - DNA, 38 bp, Artificial Sequence
  Synthetic
acgtgggctgggcggatctgccccccttggtagatgtt

SEQ ID NO: 8551 - DNA, 40 bp, Artificial Sequence
  Synthetic
tctcccggattcactgccatctgtttcgggcgaacgtgag

SEQ ID NO: 8552 - DNA, 42 bp, Artificial Sequence
  Synthetic
ctcttcgcctacgcacaagtggctacggatcatgctctcacc

SEQ ID NO: 8553 - DNA, 37 bp, Artificial Sequence
  Synthetic
accagtgtcgccagtgcctcaggagaacgcattcggc

SEQ ID NO: 8554 - DNA, 39 bp, Artificial Sequence
  Synthetic
ccgagctcgggactctggtacccgttcccttttcagcgc

SEQ ID NO: 8555 - DNA, 40 bp, Artificial Sequence
  Synthetic
actggatgtgggcaaaggatgtacttatggcagcctttgt

SEQ ID NO: 8556 - DNA, 36 bp, Artificial Sequence
  Synthetic
tggcgatctgggagttggcggtccggacggccttga

SEQ ID NO: 8557 - DNA, 40 bp, Artificial Sequence
  Synthetic
tagaggctgccgatgcctgaggtcacatctcacgcatacg

SEQ ID NO: 8558 - DNA, 37 bp, Artificial Sequence
  Synthetic
atgggagaggcaccactctgtatacccccacacggcg

SEQ ID NO: 8559 - DNA, 36 bp, Artificial Sequence
  Synthetic
gcaatgccagcgcggggtatgcaggagtggacgctg

SEQ ID NO: 8560 - DNA, 39 bp, Artificial Sequence
  Synthetic
tcgggcgaagagcttccggcgttgaatctctacacggca

SEQ ID NO: 8561 - DNA, 37 bp, Artificial Sequence
  Synthetic
cggacagtgtcgcgctgcacgctggcaattgacctgc

SEQ ID NO: 8562 - DNA, 35 bp, Artificial Sequence
  Synthetic
gcgctgggcggttgaggttggctcctcagggtgct

SEQ ID NO: 8563 - DNA, 39 bp, Artificial Sequence
  Synthetic
ccctggctgaactcaccgacagcccccagttggattccg

SEQ ID NO: 8564 - DNA, 38 bp, Artificial Sequence
  Synthetic
ggccaccatcccgtgacaggcgtccccgtggatacctg

SEQ ID NO: 8565 - DNA, 40 bp, Artificial Sequence
  Synthetic
ggtatccacacggagcaggcccgctattacaatgttggcg

SEQ ID NO: 8566 - DNA, 39 bp, Artificial Sequence
  Synthetic
ctccagcggcccaaagggacggaattggagtctccggat

SEQ ID NO: 8567 - DNA, 39 bp, Artificial Sequence
  Synthetic
accagccaccagacgagcacggactggtccatgtgttcc

SEQ ID NO: 8568 - DNA, 40 bp, Artificial Sequence
  Synthetic
cggttgaaggagcccacgttattccaagcaggggtttagc

SEQ ID NO: 8569 - DNA, 41 bp, Artificial Sequence
  Synthetic
cgtcgcctataccgcatctgcgctttggagaacccctttgg

SEQ ID NO: 8570 - DNA, 38 bp, Artificial Sequence
  Synthetic
agagacacaagcccccccggggcgccattactcgaatg

SEQ ID NO: 8571 - DNA, 36 bp, Artificial Sequence
  Synthetic
cgcaccgtagcccgcgaaatgcagtgtcccaacccg

SEQ ID NO: 8572 - DNA, 36 bp, Artificial Sequence
  Synthetic
gcagcactacgtggcgggaacgccatgcttgggtca

SEQ ID NO: 8573 - DNA, 39 bp, Artificial Sequence
  Synthetic
aaaagctcagggcatccgcgcagtcgaacagggtgttgg

SEQ ID NO: 8574 - DNA, 41 bp, Artificial Sequence
  Synthetic
atcctgctgctcctgctcatccgagcagcagcaggatgagc

SEQ ID NO: 8575 - DNA, 42 bp, Artificial Sequence
  Synthetic
cggtggaggtaaaggtgttgcgagtcctactttaccggtggc

SEQ ID NO: 8576 - DNA, 42 bp, Artificial Sequence
  Synthetic
gtgtacctggggcacctcaaccaacccgctcgaacttatggt

SEQ ID NO: 8577 - DNA, 42 bp, Artificial Sequence
  Synthetic
atctggatcccttgacctcggctggaggtccttcccttcaac

SEQ ID NO: 8578 - DNA, 36 bp, Artificial Sequence
  Synthetic
ttccttgcaggcgaagaggctaactggcgccgtggc

SEQ ID NO: 8579 - DNA, 35 bp, Artificial Sequence
  Synthetic
gacgagtgcagcaccaggtaacaggctggcgtggg

SEQ ID NO: 8580 - DNA, 34 bp, Artificial Sequence
  Synthetic
accgcgttgtcggagctgtgagcccacggacgga

SEQ ID NO: 8581 - DNA, 43 bp, Artificial Sequence
  Synthetic
agctagaggatttgcgattgctatatgtcagcctctgataacg

SEQ ID NO: 8582 - DNA, 38 bp, Artificial Sequence
  Synthetic
agacgctgactctagtgtgccctcctcctcggtcccgt

SEQ ID NO: 8583 - DNA, 40 bp, Artificial Sequence
  Synthetic
ccggtggaggatcaggaggacctgactgtggagtgtgtac

SEQ ID NO: 8584 - DNA, 48 bp, Artificial Sequence
  Synthetic
atggattgttagacagacgttggtaggtcatatgcatactgtaccata

SEQ ID NO: 8585 - DNA, 41 bp, Artificial Sequence
  Synthetic
agtgttctatggacctgcagactaggaactgcaacaagctc

SEQ ID NO: 8586 - DNA, 48 bp, Artificial Sequence
  Synthetic
gaggaggacagatggaaatatttgcgcaaaaggaaatggattcttaaa

SEQ ID NO: 8587 - DNA, 41 bp, Artificial Sequence
  Synthetic
aggccatagaggtacagctggccatgcctccgtgctatagg

SEQ ID NO: 8588 - DNA, 37 bp, Artificial Sequence
  Synthetic
gtatccccagtcccagccccacaacgcttgggtgggc

SEQ ID NO: 8589 - DNA, 47 bp, Artificial Sequence
  Synthetic
gatagcattgccagggtatatgtcttgaaatgtattggaccatatgt

SEQ ID NO: 8590 - DNA, 42 bp, Artificial Sequence
  Synthetic
cacacctaacacccccacttgcagcaaatacaaaaaaaacac

SEQ ID NO: 8591 - DNA, 42 bp, Artificial Sequence
  Synthetic
gccgtcttggatatcacccccttggctcagtgtatagtgggt

SEQ ID NO: 8592 - DNA, 38 bp, Artificial Sequence
  Synthetic
ttgatgagttacccgccgcctagatgcggaggtggcag

SEQ ID NO: 8593 - DNA, 40 bp, Artificial Sequence
  Synthetic
atgtctatgtcacgcggactaacccacagtgagaagccta

SEQ ID NO: 8594 - DNA, 43 bp, Artificial Sequence
  Synthetic
atcctgattatctgaagatggctgcatttgttccctacgcagc

SEQ ID NO: 8595 - DNA, 40 bp, Artificial Sequence
  Synthetic
atggatccccagttgttagaggctgtaaactggcagacgg

SEQ ID NO: 8596 - DNA, 38 bp, Artificial Sequence
  Synthetic
cttgtgtgtagcccccagttttaagctgggttggcaac

SEQ ID NO: 8597 - DNA, 47 bp, Artificial Sequence
  Synthetic
ccttcaattggcagatctaaaacgaggactcaaagctaatactgaat

SEQ ID NO: 8598 - DNA, 43 bp, Artificial Sequence
  Synthetic
gccagggtgtgtaaggagttccaaatgattctttaaactttgc

SEQ ID NO: 8599 - DNA, 42 bp, Artificial Sequence
  Synthetic
tgcatgttggcagttcatggaactgaaatgtcattaccatct

SEQ ID NO: 8600 - DNA, 46 bp, Artificial Sequence
  Synthetic
agcaaaacaagctataatgatggccttttctctgccaaattcagaa

SEQ ID NO: 8601 - DNA, 41 bp, Artificial Sequence
  Synthetic
gacgagggggaagtcgaaggaccgatatctgcgttttccgt

SEQ ID NO: 8602 - DNA, 38 bp, Artificial Sequence
  Synthetic
tggcatagggacaggcaaagcacttccacctcccaaag

SEQ ID NO: 8603 - DNA, 44 bp, Artificial Sequence
  Synthetic
gtagtggtagtaatactcctgcagtgctgcacttctagtactgc

SEQ ID NO: 8604 - DNA, 47 bp, Artificial Sequence
  Synthetic
aactagaaagaccaaggttctctgatagttcctaatctgctaagcct

SEQ ID NO: 8605 - DNA, 46 bp, Artificial Sequence
  Synthetic
attaccagcaataataacaccaggctcattggaagcaaaatcatct

SEQ ID NO: 8606 - DNA, 44 bp, Artificial Sequence
  Synthetic
gtagtgatcgccttctaacagttgagccttagtcctactgtcag

SEQ ID NO: 8607 - DNA, 47 bp, Artificial Sequence
  Synthetic
tttcagggtagtactgatagcagactactattaaaagctgggtttgt

SEQ ID NO: 8608 - DNA, 44 bp, Artificial Sequence
  Synthetic
gtttacagcacgataggtcctcatcaaaatatcaggccacttac

SEQ ID NO: 8609 - DNA, 45 bp, Artificial Sequence
  Synthetic
gtttactttcctactcctagtggctgtaagggcgatttaggatca

SEQ ID NO: 8610 - DNA, 50 bp, Artificial Sequence
  Synthetic
attgtctcagacatctcttggaaggggttattcctttgtttaacaatcct

SEQ ID NO: 8611 - DNA, 40 bp, Artificial Sequence
  Synthetic
gtgtgttactgactcacagggtcaaaagcagggtggagtg

SEQ ID NO: 8612 - DNA, 45 bp, Artificial Sequence
  Synthetic
ggatactttagagcgccttgtacagggagaattacccctcattct

SEQ ID NO: 8613 - DNA, 45 bp, Artificial Sequence
  Synthetic
tagacgatgatgtggatgaagttgattcacagtcctcagttaact

SEQ ID NO: 8614 - DNA, 39 bp, Artificial Sequence
  Synthetic
gagccgagctctgaaaccaagtaaaagcaagcgacatgc

SEQ ID NO: 8615 - DNA, 48 bp, Artificial Sequence
  Synthetic
agcagactcatttgatctatcacaatctgaatcttctgtaaatccatt

SEQ ID NO: 8616 - DNA, 41 bp, Artificial Sequence
  Synthetic
actgctgcagaagttggaagcatgtaagtcgcgagagaccc

SEQ ID NO: 8617 - DNA, 44 bp, Artificial Sequence
  Synthetic
aaaagggtgtacgtattgctttggacgtcttttattggcttgca

SEQ ID NO: 8618 - DNA, 38 bp, Artificial Sequence
  Synthetic
tgggcttggcattggaacagctacagtgccacctagtg

SEQ ID NO: 8619 - DNA, 39 bp, Artificial Sequence
  Synthetic
tatcagaggtcacaggggttggctatcagcagtaccacc

SEQ ID NO: 8620 - DNA, 48 bp, Artificial Sequence
  Synthetic
actcatgtgggttatacagaagacatcttctaattcaaattcactcct

SEQ ID NO: 8621 - DNA, 47 bp, Artificial Sequence
  Synthetic
atgatttggcagagattggggaggcctatttaaaattcttacatcag

SEQ ID NO: 8622 - DNA, 49 bp, Artificial Sequence
  Synthetic
cctgatggagttctggtagatgaccgttttctttttcgagaatacaaac

SEQ ID NO: 8623 - DNA, 48 bp, Artificial Sequence
  Synthetic
ttaagcacagaccaaaataccgtttctaaataccctgaattgattacc

SEQ ID NO: 8624 - DNA, 47 bp, Artificial Sequence
  Synthetic
atggattaatcagtgaccaaaaggacaattgattttgtttgggatca

SEQ ID NO: 8625 - DNA, 41 bp, Artificial Sequence
  Synthetic
ttgactagcagcgaatcaaacatatttgcaccctgagctct

SEQ ID NO: 8626 - DNA, 44 bp, Artificial Sequence
  Synthetic
tctgcatttttgttaccccaccgatatgttttgaagtgccaaat

SEQ ID NO: 8627 - DNA, 50 bp, Artificial Sequence
  Synthetic
atcactatatgtgtcagcctcattggatgaaaattttagcaatacatccg

SEQ ID NO: 8628 - DNA, 44 bp, Artificial Sequence
  Synthetic
actcagctcccttgataataagagaagcaaagtgtctgcattct

SEQ ID NO: 8629 - DNA, 49 bp, Artificial Sequence
  Synthetic
aatggacatatatcggagttgatgggcttctccatattttattttgacc

SEQ ID NO: 8630 - DNA, 39 bp, Artificial Sequence
  Synthetic
cactgaagagtgcacatgcggtctctacaggcacattct

SEQ ID NO: 8631 - DNA, 40 bp, Artificial Sequence
  Synthetic
ggcatcaaaggaggattcgtcctcgttcgggagtaccatc

SEQ ID NO: 8632 - DNA, 41 bp, Artificial Sequence
  Synthetic
acagccatttactgtttgatgggtatcaacgcctgtgacag

SEQ ID NO: 8633 - DNA, 47 bp, Artificial Sequence
  Synthetic
aacagatatacatgtaaccgcttgctcctgtctgtattctttccaag

SEQ ID NO: 8634 - DNA, 39 bp, Artificial Sequence
  Synthetic
attgacctgcaatgctacgaggcctccaactcttgttca

SEQ ID NO: 8635 - DNA, 41 bp, Artificial Sequence
  Synthetic
gtgtcgtgaagaaattcggaatgtcgctacacccttctttg

SEQ ID NO: 8636 - DNA, 45 bp, Artificial Sequence
  Synthetic
cggagcaagtacaaaagttaaaacggtgggctaagttgttgaact

SEQ ID NO: 8637 - DNA, 45 bp, Artificial Sequence
  Synthetic
acaatgggcctatgatagcgatcactatttgccattttagcataa

SEQ ID NO: 8638 - DNA, 41 bp, Artificial Sequence
  Synthetic
aattagagctcagtgacccagaattgaaacgagcgttgagt

SEQ ID NO: 8639 - DNA, 42 bp, Artificial Sequence
  Synthetic
tggcagtatctgaaaccaaagcggagacttttgcaagctttg

SEQ ID NO: 8640 - DNA, 41 bp, Artificial Sequence
  Synthetic
gttaccttcgctgatgatgctggttgttaatgcggacttca

SEQ ID NO: 8641 - DNA, 37 bp, Artificial Sequence
  Synthetic
caccagcaccacagcaaccactgtggctgtggctgtg

SEQ ID NO: 8642 - DNA, 41 bp, Artificial Sequence
  Synthetic
caacctccagagattccagccctacttctccctcccctccc

SEQ ID NO: 8643 - DNA, 47 bp, Artificial Sequence
  Synthetic
gatcctccagtaatacttttgcgacgcttcttatctctgtatctgta

SEQ ID NO: 8644 - DNA, 42 bp, Artificial Sequence
  Synthetic
tagaggaacctacaccaccaagctacagcttgtgtgatgttg

SEQ ID NO: 8645 - DNA, 41 bp, Artificial Sequence
  Synthetic
gctgtagaagaacctccagacagtaaagagggcggcttaat

SEQ ID NO: 8646 - DNA, 44 bp, Artificial Sequence
  Synthetic
gatgctactattgtccaaggccggcagttcctgaacatttaaat

SEQ ID NO: 8647 - DNA, 48 bp, Artificial Sequence
  Synthetic
atcctgaacgaaggaattatccagagaattattacagttggcaaatcg

SEQ ID NO: 8648 - DNA, 47 bp, Artificial Sequence
  Synthetic
acattcagaggacagacatctactcaaaatatggatgtcctacagtt

SEQ ID NO: 8649 - DNA, 49 bp, Artificial Sequence
  Synthetic
acaacaggacatccattgtttaacatcctgtctatcatctttagaagtt

SEQ ID NO: 8650 - DNA, 42 bp, Artificial Sequence
  Synthetic
attacctgcagcaagtcaacagacggtagggaaatagatgga

SEQ ID NO: 8651 - DNA, 43 bp, Artificial Sequence
  Synthetic
cagaaaaactgtctttggatttggagttgtagcccagcttgaa

SEQ ID NO: 8652 - DNA, 45 bp, Artificial Sequence
  Synthetic
tttcagtgtgattttcaatcggctctccttcttccgtaaaagctc

SEQ ID NO: 8653 - DNA, 47 bp, Artificial Sequence
  Synthetic
tttcctgggaaaataaaagtggtgccttcttgcattgatttcctttc

SEQ ID NO: 8654 - DNA, 46 bp, Artificial Sequence
  Synthetic
gctggtacaacaattctatttctgctgctcattacaaaagccttct

SEQ ID NO: 8655 - DNA, 43 bp, Artificial Sequence
  Synthetic
attgtcaccttatagagttgacagcaccacagaaagcctgact

SEQ ID NO: 8656 - DNA, 41 bp, Artificial Sequence
  Synthetic
tgctcttagtcctcgtttggattttgctgctgattgttctg

SEQ ID NO: 8657 - DNA, 39 bp, Artificial Sequence
  Synthetic
atctgaacagtggacgtttgcaaacagtttctgggtggc

SEQ ID NO: 8658 - DNA, 43 bp, Artificial Sequence
  Synthetic
tgacaatgaacaaattttgccctttcctcttgggtgtcagaaa

SEQ ID NO: 8659 - DNA, 41 bp, Artificial Sequence
  Synthetic
cacaccactgagcctagtttgacaaacacattgacatcagc

SEQ ID NO: 8660 - DNA, 42 bp, Artificial Sequence
  Synthetic
atcccgcctttgatgctgatgtcctccatttgaccttgtgct

SEQ ID NO: 8661 - DNA, 47 bp, Artificial Sequence
  Synthetic
tctcagttcattaccaatgcttcagaaggtccaataggtatagtagg

SEQ ID NO: 8662 - DNA, 44 bp, Artificial Sequence
  Synthetic
atacattcgcctatacaagatggctgtagcaaaattaactgccc

SEQ ID NO: 8663 - DNA, 45 bp, Artificial Sequence
  Synthetic
aggatgtgaatggtgatcacagacctaaatttaagtctggtggtg

SEQ ID NO: 8664 - DNA, 41 bp, Artificial Sequence
  Synthetic
tcaacagaagccacctgcagctgacaaatcaactgtccaaa

SEQ ID NO: 8665 - DNA, 41 bp, Artificial Sequence
  Synthetic
tttcagcaactattggtttccgatgaaaattctcccggcag

SEQ ID NO: 8666 - DNA, 47 bp, Artificial Sequence
  Synthetic
atgcccaagttacagaggattcaggctgttaatatactttcgcttta

SEQ ID NO: 8667 - DNA, 46 bp, Artificial Sequence
  Synthetic
tctaacaatgcggtggttgaaaattttagcaagaataacagctctt

SEQ ID NO: 8668 - DNA, 48 bp, Artificial Sequence
  Synthetic
gaactttcaaagatggtacaatgggtctgctaataatgcatagtgaaa

SEQ ID NO: 8669 - DNA, 43 bp, Artificial Sequence
  Synthetic
cttccgcgacatggtttatcggaacctttcactaagaggacat

SEQ ID NO: 8670 - DNA, 42 bp, Artificial Sequence
  Synthetic
tggtggaggaacagtttctaggcttggttttggaagggattc

SEQ ID NO: 8671 - DNA, 46 bp, Artificial Sequence
  Synthetic
tgagcatcctgcagtaataaatgttggcaaagtttgtacatcaagt

SEQ ID NO: 8672 - DNA, 40 bp, Artificial Sequence
  Synthetic
ttttacagtgagaccgaaagcgtgcatagaagccctttgg

SEQ ID NO: 8673 - DNA, 50 bp, Artificial Sequence
  Synthetic
ttaccagaacaaaatgaaaacagggcctacaataaatatctgagtttgct

SEQ ID NO: 8674 - DNA, 46 bp, Artificial Sequence
  Synthetic
agatgctgtttgtaaatggcctggcaaagaaaaacaattcattacc

SEQ ID NO: 8675 - DNA, 43 bp, Artificial Sequence
  Synthetic
tcgcatataaatgtgatgaacccaggtggaggaacaaaagcta

SEQ ID NO: 8676 - DNA, 44 bp, Artificial Sequence
  Synthetic
ggtcaaattccttttccccaccatgtttggaatgatactgacag

SEQ ID NO: 8677 - DNA, 44 bp, Artificial Sequence
  Synthetic
cgcttttgttgctggctgtcaatcttaaacacattccataaccg

SEQ ID NO: 8678 - DNA, 39 bp, Artificial Sequence
  Synthetic
tagagggcattggagagggtaatagtaggttcctggccc

SEQ ID NO: 8679 - DNA, 43 bp, Artificial Sequence
  Synthetic
gctcgaagaattatcattcgtttgctagtgggatctgccatgg

SEQ ID NO: 8680 - DNA, 43 bp, Artificial Sequence
  Synthetic
gtagtgagctgggtaaagatggcggcccttgtattactctgta

SEQ ID NO: 8681 - DNA, 45 bp, Artificial Sequence
  Synthetic
tggtacagtgggcatatgataatgactaacgccaattctgcatat

SEQ ID NO: 8682 - DNA, 42 bp, Artificial Sequence
  Synthetic
ggcccagcagaaagttccatccgggctcgaggtactagcaac

SEQ ID NO: 8683 - DNA, 46 bp, Artificial Sequence
  Synthetic
aaaaggtcctgcaaatcccctagctagcatatttctgattacatct

SEQ ID NO: 8684 - DNA, 43 bp, Artificial Sequence
  Synthetic
acgcgtattacctgaagggacggtggtcctatagggtctatag

SEQ ID NO: 8685 - DNA, 46 bp, Artificial Sequence
  Synthetic
atatatctcctgcacaaccagcctaatgtgaaccaattgatatggt

SEQ ID NO: 8686 - DNA, 38 bp, Artificial Sequence
  Synthetic
cagtgccacggctaacacaaagttgttggcacctgttg

SEQ ID NO: 8687 - DNA, 41 bp, Artificial Sequence
  Synthetic
accttcattaggggaacattgggaatctcctggctgtttgg

SEQ ID NO: 8688 - DNA, 46 bp, Artificial Sequence
  Synthetic
tacggtgaccaggtatttttctttgtctagcccaaaaatgtctagc

SEQ ID NO: 8689 - DNA, 45 bp, Artificial Sequence
  Synthetic
tcaaactggtttactggagcgttcacagttttctttcttacagta

SEQ ID NO: 8690 - DNA, 41 bp, Artificial Sequence
  Synthetic
atccggacctcatgccagataaaagagtaaagccgtccaaa

SEQ ID NO: 8691 - DNA, 41 bp, Artificial Sequence
  Synthetic
tgactgactcaaacgttcttggaccgttttcgttgcaagta

SEQ ID NO: 8692 - DNA, 40 bp, Artificial Sequence
  Synthetic
gatcgccagaatgcaactgatctcccaattccatcaatca

SEQ ID NO: 8693 - DNA, 42 bp, Artificial Sequence
  Synthetic
tcagttgctcacaaatcttgcccctctttttcgaagtcgtac

SEQ ID NO: 8694 - DNA, 42 bp, Artificial Sequence
  Synthetic
aaaagtatctccgcgggggatgttctcatttgaagcaatttg

SEQ ID NO: 8695 - DNA, 40 bp, Artificial Sequence
  Synthetic
aatacggagggaaggacttcagggttttgcaccttccatc

SEQ ID NO: 8696 - DNA, 44 bp, Artificial Sequence
  Synthetic
aatttgaaaatacaggcgagcgccgatgtttcttgtacctcaca

SEQ ID NO: 8697 - DNA, 41 bp, Artificial Sequence
  Synthetic
gagcaattgaacagctcagaggattgtctagcttgctgtgg

SEQ ID NO: 8698 - DNA, 43 bp, Artificial Sequence
  Synthetic
aaaacgaaagtatttaggcagtccgttttactccttcccggca

SEQ ID NO: 8699 - DNA, 39 bp, Artificial Sequence
  Synthetic
acgccaccacagcaaatacaaacacagctttgcctgtac

SEQ ID NO: 8700 - DNA, 45 bp, Artificial Sequence
  Synthetic
aacagatgacagtgacattgcactgtgcattactatctacatctg

SEQ ID NO: 8701 - DNA, 41 bp, Artificial Sequence
  Synthetic
ttttacgaggcacaccaaaacaactttcctgtgtttggtgg

SEQ ID NO: 8702 - DNA, 41 bp, Artificial Sequence
  Synthetic
attgtcccgactctgtgtctagcgacaacagtttcaacagg

SEQ ID NO: 8703 - DNA, 40 bp, Artificial Sequence
  Synthetic
tttgtgtgcctgtgtgtctgaacaggtagaaaacaacgag

SEQ ID NO: 8704 - DNA, 39 bp, Artificial Sequence
  Synthetic
gtgtactatggtcgcccaccacgtttgatacagctgagt

SEQ ID NO: 8705 - DNA, 45 bp, Artificial Sequence
  Synthetic
tccacaaactggggaggtatctcataactatgtacaccagatgtg

SEQ ID NO: 8706 - DNA, 42 bp, Artificial Sequence
  Synthetic
ttgtggctttacacagacctgccaagcctactaaaacgcaca

SEQ ID NO: 8707 - DNA, 43 bp, Artificial Sequence
  Synthetic
aacatgttccctattttcttgcagaggtgtaggaggcaggtaa

SEQ ID NO: 8708 - DNA, 41 bp, Artificial Sequence
  Synthetic
ttcccaaggtgtctgcatttcaacttattgggatcgggcaa

SEQ ID NO: 8709 - DNA, 48 bp, Artificial Sequence
  Synthetic
catgactatatctgcaaccacacaaacatactgtttaatttggcttga

SEQ ID NO: 8710 - DNA, 43 bp, Artificial Sequence
  Synthetic
aaaagccttgctataacctgtcaattagctagtgggtcctctt

SEQ ID NO: 8711 - DNA, 45 bp, Artificial Sequence
  Synthetic
cggcggtgattgtttgtgtccatacaaaaacatacattcatgcac

SEQ ID NO: 8712 - DNA, 41 bp, Artificial Sequence
  Synthetic
tggttgttgcacaccactgtgcataaaatggacactactgt

SEQ ID NO: 8713 - DNA, 43 bp, Artificial Sequence
  Synthetic
tgcaaacatctgcaacacaatgaagacacatagttggctacca

SEQ ID NO: 8714 - DNA, 42 bp, Artificial Sequence
  Synthetic
aacggccatacaagctaccaacagtccaattctatttcatgt

SEQ ID NO: 8715 - DNA, 44 bp, Artificial Sequence
  Synthetic
ctcagaggatgaggatgaaacagacattctgtaccaggcttgct

SEQ ID NO: 8716 - DNA, 39 bp, Artificial Sequence
  Synthetic
ggaggtgttcgggatggtttattgcatcccctgttttcc

SEQ ID NO: 8717 - DNA, 48 bp, Artificial Sequence
  Synthetic
aatggtacagtgggcatttgataatcctcagatgctaataatgcatat

SEQ ID NO: 8718 - DNA, 49 bp, Artificial Sequence
  Synthetic
aatgcattagatggcaatcctatgtgatgttattagtaatggaggacat

SEQ ID NO: 8719 - DNA, 42 bp, Artificial Sequence
  Synthetic
acaaagacgtggtcaaaactagattgcacagtgtctccatca

SEQ ID NO: 8720 - DNA, 47 bp, Artificial Sequence
  Synthetic
tccaaagggcataatgcaattgaattctgtgttatagcttgattcat

SEQ ID NO: 8721 - DNA, 44 bp, Artificial Sequence
  Synthetic
atggtagcattggggtattttttggcacatatcctgtacgaccc

SEQ ID NO: 8722 - DNA, 45 bp, Artificial Sequence
  Synthetic
aacaacatctgtggacagtacaccagatacttgtgtagtgtcact

SEQ ID NO: 8723 - DNA, 45 bp, Artificial Sequence
  Synthetic
gctagaaaaactggcatacgtgtcacttctagtaaacatagtggc

SEQ ID NO: 8724 - DNA, 47 bp, Artificial Sequence
  Synthetic
gacctactgaggcaaaggtataccgttacatactcttcagtgcttac

SEQ ID NO: 8725 - DNA, 41 bp, Artificial Sequence
  Synthetic
gcacaccatgtggtacccaagtggtgttctttaattcaagc

SEQ ID NO: 8726 - DNA, 41 bp, Artificial Sequence
  Synthetic
aggtactgtaggcgatgctattccacaactggatggcgatg

SEQ ID NO: 8727 - DNA, 41 bp, Artificial Sequence
  Synthetic
aacatgttttggtctgtttgtgcaatccaagttgcctgcag

SEQ ID NO: 8728 - DNA, 42 bp, Artificial Sequence
  Synthetic
aagaacgttactgttacacatgccatcgcagagcttcccatt

SEQ ID NO: 8729 - DNA, 41 bp, Artificial Sequence
  Synthetic
gttacccaggggatttcaacgaaatggtttgttctgctcaa

SEQ ID NO: 8730 - DNA, 40 bp, Artificial Sequence
  Synthetic
gatgcggcagagcagacaaatgatgttccaacggaaatgt

SEQ ID NO: 8731 - DNA, 46 bp, Artificial Sequence
  Synthetic
agtgaattggaatatggtaactgcatggcatactagagtttatcgc

SEQ ID NO: 8732 - DNA, 43 bp, Artificial Sequence
  Synthetic
ggtaccaccatagcaatgagcagtgactccatctattgccttt

SEQ ID NO: 8733 - DNA, 45 bp, Artificial Sequence
  Synthetic
ttcatgactcaaatgtcaagaacctcctttgcattatccctaagc

SEQ ID NO: 8734 - DNA, 46 bp, Artificial Sequence
  Synthetic
actgtcaatttattcaacagtggcgaaagatagaccagctaccatg

SEQ ID NO: 8735 - DNA, 39 bp, Artificial Sequence
  Synthetic
gagaacgccagaatgccactcgtccaattccaccaatca

SEQ ID NO: 8736 - DNA, 42 bp, Artificial Sequence
  Synthetic
taaacggaaagtggatgagagaacccattattagcttggcgc

SEQ ID NO: 8737 - DNA, 44 bp, Artificial Sequence
  Synthetic
ggtcaggatgatcaaacgtggaattcttgtttttcgtccattct

SEQ ID NO: 8738 - DNA, 45 bp, Artificial Sequence
  Synthetic
ggaagctttccactagaggagttcacttgattccatagtctccat

SEQ ID NO: 8739 - DNA, 38 bp, Artificial Sequence
  Synthetic
cagcaggacgagcaagctttaggttttgtgacactgcc

SEQ ID NO: 8740 - DNA, 40 bp, Artificial Sequence
  Synthetic
agttgcgtgtatcgtcccaacctagtccactgtcctcaaa

SEQ ID NO: 8741 - DNA, 48 bp, Artificial Sequence
  Synthetic
ttcagttttatgctgcaaaatgtcggtacatgcaatacattacacaat

SEQ ID NO: 8742 - DNA, 49 bp, Artificial Sequence
  Synthetic
agggctaatagatgatgcaacatttagtccattcctcatatatacatcc

SEQ ID NO: 8743 - DNA, 38 bp, Artificial Sequence
  Synthetic
accgtttcgatgctgtgcaacatctatgtctgtgcggc

SEQ ID NO: 8744 - DNA, 43 bp, Artificial Sequence
  Synthetic
acgttatggaccgctatttattaccctgcagatacctgtccac

SEQ ID NO: 8745 - DNA, 43 bp, Artificial Sequence
  Synthetic
aagacgaggctagggatccggtttcattctatacctccaacat

SEQ ID NO: 8746 - DNA, 44 bp, Artificial Sequence
  Synthetic
gctggtgctgaggtgtttgttgtctaaaggtatagattcaccta

SEQ ID NO: 8747 - DNA, 41 bp, Artificial Sequence
  Synthetic
gcatctgctaacattaatggcaggggccaacaagtgtatga

SEQ ID NO: 8748 - DNA, 45 bp, Artificial Sequence
  Synthetic
atttgcatccaagtcacagacgctgcaaaacattaaaaaccagac

SEQ ID NO: 8749 - DNA, 40 bp, Artificial Sequence
  Synthetic
caccccttgtaaaggtgaacacgacaggtgcctttaggag

SEQ ID NO: 8750 - DNA, 47 bp, Artificial Sequence
  Synthetic
gtccttagcatctagtgactccccataatacagcattattagcaccc

SEQ ID NO: 8751 - DNA, 43 bp, Artificial Sequence
  Synthetic
ttttgggtggttgatttatcagacaaaaagcgcctaccaagag

SEQ ID NO: 8752 - DNA, 43 bp, Artificial Sequence
  Synthetic
gtattactcatgtgttttgcaacgtactgtaaaagcaccgctc

SEQ ID NO: 8753 - DNA, 20 bp, Artificial Sequence
  Synthetic
atctttgtcacccgatttgg

SEQ ID NO: 8754 - DNA, 25 bp, Artificial Sequence
  Synthetic
tgcagtagctttatacttttttcag

SEQ ID NO: 8755 - DNA, 23 bp, Artificial Sequence
  Synthetic
taattagatttttgaagggcagt

SEQ ID NO: 8756 - DNA, 25 bp, Artificial Sequence
  Synthetic
gactattgaatctttatgaaagtgg

SEQ ID NO: 8757 - DNA, 20 bp, Artificial Sequence
  Synthetic
atacctagctcacacaggcc

SEQ ID NO: 8758 - DNA, 19 bp, Artificial Sequence
  Synthetic
aggagaaccaacgtccacc

SEQ ID NO: 8759 - DNA, 19 bp, Artificial Sequence
  Synthetic
caactgtgtttagatgggc

SEQ ID NO: 8760 - DNA, 24 bp, Artificial Sequence
  Synthetic
atacactttatacaacccgtgtag

SEQ ID NO: 8761 - DNA, 21 bp, Artificial Sequence
  Synthetic
cgcgcaattttatttggctat

SEQ ID NO: 8762 - DNA, 25 bp, Artificial Sequence
  Synthetic
ctgcacatttttattatgatgtgtc

SEQ ID NO: 8763 - DNA, 19 bp, Artificial Sequence
  Synthetic
cctgaaaaggaacgtttgg

SEQ ID NO: 8764 - DNA, 23 bp, Artificial Sequence
  Synthetic
tattccagacatatgttagccag

SEQ ID NO: 8765 - DNA, 25 bp, Artificial Sequence
  Synthetic
cagataccttttatctaaagcaact

SEQ ID NO: 8766 - DNA, 22 bp, Artificial Sequence
  Synthetic
ctatgtgagcaataatctgact

SEQ ID NO: 8767 - DNA, 22 bp, Artificial Sequence
  Synthetic
ggattgtgcagaaaaaattgac

SEQ ID NO: 8768 - DNA, 21 bp, Artificial Sequence
  Synthetic
cagagcaagtgttagattcac

SEQ ID NO: 8769 - DNA, 25 bp, Artificial Sequence
  Synthetic
catatctaacctaatagatgatgga

SEQ ID NO: 8770 - DNA, 22 bp, Artificial Sequence
  Synthetic
gcatagtagattacagtgcttt

SEQ ID NO: 8771 - DNA, 20 bp, Artificial Sequence
  Synthetic
actacaagggactcctccac

SEQ ID NO: 8772 - DNA, 19 bp, Artificial Sequence
  Synthetic
agaggaggaagggaattgg

SEQ ID NO: 8773 - DNA, 25 bp, Artificial Sequence
  Synthetic
gttaagtagtgtgatatatcttggt

SEQ ID NO: 8774 - DNA, 25 bp, Artificial Sequence
  Synthetic
ggtcctatagaaactccttctatag

SEQ ID NO: 8775 - DNA, 25 bp, Artificial Sequence
  Synthetic
cttcagatatcaatgtttttgtgga

SEQ ID NO: 8776 - DNA, 19 bp, Artificial Sequence
  Synthetic
gatttgaaaatcccgcctt

SEQ ID NO: 8777 - DNA, 23 bp, Artificial Sequence
  Synthetic
gtatcttacccacaacaaaatgt

SEQ ID NO: 8778 - DNA, 23 bp, Artificial Sequence
  Synthetic
acggatgaatatgttaaaggaac

SEQ ID NO: 8779 - DNA, 24 bp, Artificial Sequence
  Synthetic
ctggacatcctttgtataacaaac

SEQ ID NO: 8780 - DNA, 20 bp, Artificial Sequence
  Synthetic
ccatttgaaccaacatctga

SEQ ID NO: 8781 - DNA, 18 bp, Artificial Sequence
  Synthetic
cccttacggggcgacact

SEQ ID NO: 8782 - DNA, 19 bp, Artificial Sequence
  Synthetic
tgcaccatgagcacgaatc

SEQ ID NO: 8783 - DNA, 15 bp, Artificial Sequence
  Synthetic
gcaccgctcgcgaaa

SEQ ID NO: 8784 - DNA, 18 bp, Artificial Sequence
  Synthetic
tcaccaatgactgcccca

SEQ ID NO: 8785 - DNA, 17 bp, Artificial Sequence
  Synthetic
ttcgatctacccgggcc

SEQ ID NO: 8786 - DNA, 18 bp, Artificial Sequence
  Synthetic
acatcaaccggaccgctt

SEQ ID NO: 8787 - DNA, 18 bp, Artificial Sequence
  Synthetic
cgcaaggcagttggtttg

SEQ ID NO: 8788 - DNA, 19 bp, Artificial Sequence
  Synthetic
acataggctcgatgcagcg

SEQ ID NO: 8789 - DNA, 18 bp, Artificial Sequence
  Synthetic
gatctgcgcctgcctttg

SEQ ID NO: 8790 - DNA, 20 bp, Artificial Sequence
  Synthetic
ttagttaccttgggaccgca

SEQ ID NO: 8791 - DNA, 17 bp, Artificial Sequence
  Synthetic
gccgcgctgctcactat

SEQ ID NO: 8792 - DNA, 17 bp, Artificial Sequence
  Synthetic
gacccgcggtctcatct

SEQ ID NO: 8793 - DNA, 20 bp, Artificial Sequence
  Synthetic
tcttaggaggaagggtgacg

SEQ ID NO: 8794 - DNA, 18 bp, Artificial Sequence
  Synthetic
gccagggctacaaagtgc

SEQ ID NO: 8795 - DNA, 18 bp, Artificial Sequence
  Synthetic
ccaccccaacatcgagga

SEQ ID NO: 8796 - DNA, 18 bp, Artificial Sequence
  Synthetic
gtggcggttacccagact

SEQ ID NO: 8797 - DNA, 18 bp, Artificial Sequence
  Synthetic
cgtggccgcatattgcat

SEQ ID NO: 8798 - DNA, 20 bp, Artificial Sequence
  Synthetic
tacctagctgggctatccac

SEQ ID NO: 8799 - DNA, 19 bp, Artificial Sequence
  Synthetic
ggtccctagcacagaggat

SEQ ID NO: 8800 - DNA, 18 bp, Artificial Sequence
  Synthetic
gaggtgtgggactgggtt

SEQ ID NO: 8801 - DNA, 19 bp, Artificial Sequence
  Synthetic
cggagtacgtcgagatcct

SEQ ID NO: 8802 - DNA, 20 bp, Artificial Sequence
  Synthetic
gtggagaattggaaggaccc

SEQ ID NO: 8803 - DNA, 20 bp, Artificial Sequence
  Synthetic
tctcagtagaggaagctgct

SEQ ID NO: 8804 - DNA, 19 bp, Artificial Sequence
  Synthetic
gtccaaacggactcccatg

SEQ ID NO: 8805 - DNA, 20 bp, Artificial Sequence
  Synthetic
tgacgtgctacatcaaagcc

(The sequence listing continues in the following parts.)
